United States Patent Application Publication US 2025/0320254 A1 - sequence listing, part 4

SEQ ID NO: 10016 - protein, 1426 aa, Homo sapiens
MNDWHRIFTQNVLVPPHPQRARQPWKESTAFQCVLKWLDGPVIRQGVLEVLSEVECHLRVSFFDVTYRHFFGRTWKTTVKPTKRPPSRIVFNEPLYFHTSLNHPHIVAVVEVVAEGKKRDGSLQTLSCGFGILRIFSNQPDSPISASQDKRLRLYHGTPRALLHPLLQDPAEQNRHMTLIENCSLQYTLKPHPALEPAFHLLPENLLVSGLQQIPGLLPAHGESGDALRKPRLQKPITGHLDDLFFTLYPSLEKFEEELLELHVQDHFQEGCGPLDGGALEILERRLRVGVHNGLGFVQRPQVVVLVPEMDVALTRSASFSRKVVSSSKTSSGSQALVLRSRLRLPEMVGHPAFAVIFQLEYVFSSPAGVDGNAASVTSLSNLACMHMVRWAVWNPLLEADSGRVTLPLQGGIQPNPSHCLVYKVPSASMSSEEVKQVESGTLRFQFSLGSEEHLDAPTEPVSGPKVERRPSRKPPTSPSSPPAPVPRVLAAPQNSPVGPGLSISQLAASPRSPTQHCLARPTSQLPHGSQASPAQAQEFPLEAGISHLEADLSQTSLVLETSIAEQLQELPFTPLHAPIVVGTQTRSSAGQPSRASMVLLQSSGFPEILDANKQPAEAVSATEPVTFNPQKEESDCLQSNEMVLQFLAFSRVAQDCRGTSWPKTVYFTFQFYRFPPATTPRLQLVQLDEAGQPSSGALTHILVPVSRDGTFDAGSPGFQLRYMVGPGFLKPGERRCFARYLAVQTLQIDVWDGDSLLLIGSAAVQMKHLLRQGRPAVQASHELEVVATEYEQDNMVVSGDMLGFGRVKPIGVHSVVKGRLHLTLANVGHPCEQKVRGCSTLPPSRSRVISNDGASRFSGGSLLTTGSSRRKHVVQAQKLADVDSELAAMLLTHARQGKGPQDVSRESDATRRRKLERMRSVRLQEAGGDLGRRGTSVLAQQSVRTQHLRDLQVIAAYRERTKAESIASLLSLAITTEHTLHATLGVAEFFEFVLKNPHNTQHTVTVEIDNPELSVIVDSQEWRDFKGAAGLHTPVEEDMFHLRGSLAPQLYLRPHETAHVPFKFQSFSAGQLAMVQASPGLSNEKGMDAVSPWKSSAVPTKHAKVLFRASGGKPIAVLCLTVELQPHVVDQVFRFYHPELSFLKKAIRLPPWHTFPGAPVGMLGEDPPVHVRCSDPNVICETQNVGPGEPRDIFLKVASGPSPEIKDFFVIIYSDRWLATPTQTWQVYLHSLQRVDVSCVAGQLTRLSLVLRGTQTVRKVRAFTSHPQELKTDPKGVFVLPPRGVQDLHVGVRPLRAGSRFVHLNLVDVDCHQLVASWLVCLCCRQPLISKAFEIMLAAGEGKGVNKRITYTNPYPSRRTFHLHSDHPELLRFREDSFQVGGGETYTIGLQFAPSQRVGEEEILIYINDHEDKNEEAFCVKVIYQ

SEQ ID NO: 10017 - protein, 1199 aa, Homo sapiens
MPLTGVEPARMNRKKGDKGFESPRPYKLTHQVVCINNINFQRKSVVGFVELTIFPTVANLNRIKLNSKQCRIYRVRINDLEAAFIYNDPTLEVCHSESKQRNLNYFSNAYAAAVSAVDPDAGNGELCIKVPSELWKHVDELKVLKIHINFSLDQPKGGLHFVVPSVEGSMAERGAHVFSCGYQNSTRFWFPCVDSYSELCTWKLEFTVDAAMVAVSNGDLVETVYTHDMRKKTFHYMLTIPTAASNISLAIGPFEILVDPYMHEVTHFCLPQLLPLLKHTTSYLHEVFEFYEEILTCRYPYSCFKTVFIDEAYVEVAAYASMSIFSTNLLHSAMIIDETPLTRRCLAQSLAQQFFGCFISRMSWSDEWVLKGISGYIYGLWMKKTFGVNEYRHWIKEELDKIVAYELKTGGVLLHPIFGGGKEKDNPASHLHFSIKHPHTLSWEYYSMFQCKAHLVMRLIENRISMEFMLQVFNKLLSLASTASSQKFQSHMWSQMLVSTSGFLKSISNVSGKDIQPLIKQWVDQSGVVKFYGSFAFNRKRNVLELEIKQDYTSPGTQKYVGPLKVTVQELDGSFNHTLQIEENSLKHDIPCHSKSRRNKKKKIPLMNGEEVDMDLSAMDADSPLLWIRIDPDMSVLRKVEFEQADFMWQYQLRYERDVVAQQESILALEKFPTPASRLALTDILEQEQCFYRVRMSACFCLAKIANSMVSTWTGPPAMKSLFTRMFCCKSCPNIVKTNNFMSFQSYFLQKTMPVAMALLRDVHNLCPKEVLTFILDLIKYNDNRKNKFSDNYYRAEMIDALANSVTPAVSVNNEVRTLDNLNPDVRLILEEITRFLNMEKLLPSYRHTITVSCLRAIRVLQKNGHVPSDPALFKSYAEYGHFVDIRIAALEAVVDYTKVDRSYEELQWLLNMIQNDPVPYVRHKILNMLTKNPPFTKNMESPLCNEALVDQLWKLMNSGTSHDWRLRCGAVDLYFTLFGLSRPSCLPLPELGLVLNLKEKKAVLNPTIIPESVAGNQEAANNPSSHPQLVGFQNPFSSSQDEEEIDMDTVHDSQAFISHHLNMLERPSTPGLSKYRPASSRSALIPQHSAGCDSTPTTKPQWSLELARKGTGKEQAPLEMSMHPAASAPLSVFTKESTASKHSDHHHHHHHEHKKKKKKHKHKHKHKHKHDSKEKDKEPFTFSSPASGRSIRSPSLSD

SEQ ID NO: 10018 - protein, 498 aa, Homo sapiens
MAEDSESAASQQSLELDDQDTCGIDGDNEEETEHAKGSPGGYLGAKKKKKKQKRKKEKPNSGGTKSDSASDSQEIKIQQPSKNPSVPMQKLQDIQRAMELLSACQGPARNIDEAAKHRYQFWDTQPVPKLDEVITSHGAIEPDKDNVRQEPYSLPQGFMWDTLDLSDAEVLKELYTLLNENYVEDDDNMFRFDYSPEFLLWALRPPGWLLQWHCGVRVSSNKKLVGFISAIPANIRIYDSVKKMVEINFLCVHKKLRSKRVAPVLIREITRRVNLEGIFQAVYTAGVVLPKPIATCRYWHRSLNPRKLVEVKFSHLSRNMTLQRTMKLYRLPDVTKTSGLRPMEPKDIKSVRELINTYLKQFHLAPVMDEEEVAHWFLPREHIIDTFVVESPNGKLTDFLSFYTLPSTVMHHPAHKSLKAAYSFYNIHTETPLLDLMSDALILAKSKGFDVFNALDLMENKTFLEKLKFGIGDGNLQYYLYNWRCPGTDSEKVGLVLQ

SEQ ID NO: 10019 - protein, 407 aa, Homo sapiens
MELLEEDLTCPICCSLFDDPRVLPCSHNFCKKCLEGILEGSVRNSLWRPAPFKCPTCRKETSATGINSLQVNYSLKGIVEKYNKIKISPKMPVCKGHLGQPLNIFCLTDMQLICGICATRGEHTKHVFCSIEDAYAQERDAFESLFQSFETWRRGDALSRLDTLETSKRKSLQLLTKDSDKVKEFFEKLQHTLDQKKNEILSDFETMKLAVMQAYDPEINKLNTILQEQRMAFNIAEAFKDVSEPIVFLQQMQEFREKIKVIKETPLPPSNLPASPLMKNFDTSQWEDIKLVDVDKLSLPQDTGTFISKIPWSFYKLFLLILLLGLVIVFGPTMFLEWSLFDDLATWKGCLSNFSSYLTKTADFIEQSVFYWEQVTDGFFIFNERFKNFTLVVLNNVAEFVCKYKLL

SEQ ID NO: 10020 - protein, 283 aa, Homo sapiens
MAAAPQAPGRGSLRKTRPLVVKTSLNNPYIIRWSALESEDMHFILQTLEDRLKAIGLQKIEDKKKKNKTPFLKKESREKCSIAVDISENLKEKKTDAKQQVSGWTPAHVRKQLAIGVNEVTRALERRELLLVLVCKSVKPAMITSHLIQLSLSRSVPACQVPRLSERIAPVIGLKCVLALAFKKNTTDFVDEVRAIIPRVPSLSVPWLQDRIEDSGENLETEPLESQDRELLDTSFEDLSKPKRKLADGRQASVTLQPLKIKKLIPNPNKIRKPPKSKKATPK

SEQ ID NO: 10021 - protein, 362 aa, Homo sapiens
MELGSCLEGGREAAEEEGEPEVKKRRLLCVEFASVASCDAAVAQCFLAENDWEMERALNSYFEPPVEESALERRPETISEPKTYVDLTNEETTDSTTSKISPSEDTQQENGSMFSLITWNIDGLDLNNLSERARGVCSYLALYSPDVIFLQEVIPPYYSYLKKRSSNYEIITGHEEGYFTAIMLKKSRVKLKSQEIIPFPSTKMMRNLLCVHVNVSGNELCLMTSHLESTRGHAAERMNQLKMVLKKMQEAPESATVIFAGDTNLRDREVTRCGGLPNNIVDVWEFLGKPKHCQYTWDTQMNSNLGITAACKLRFDRIFFRAAAEEGHIIPRSLDLLGLEKLDCGRFPSDHWGLLCNLDIIL

SEQ ID NO: 10022 - protein, 1072 aa, Homo sapiens
MAPPTGVLSSLLLLVTIAGCARKQCSEGRTYSNAVISPNLETTRIMRVSHTFPVVDCTAACCDLSSCDLAWWFEGRCYLVSCPHKENCEPKKMGPIRSYLTFVLRPVQRPAQLLDYGDMMLNRGSPSGIWGDSPEDIRKDLTFLGKDWGLEEMSEYSDDYRELEKDLLQPSGKQEPRGSAEYTDWGLLPGSEGAFNSSVGDSPAVPAETQQDPELHYLNESASTPAPKLPERSVLLPLPTTPSSGEVLEKEKASQLQEQSSNSSGKEVLMPSHSLPPASLELSSVTVEKSPVLTVTPGSTEHSIPTPPTSAAPSESTPSELPISPTTAPRTVKELTVSAGDNLIITLPDNEVELKAFVAPAPPVETTYNYEWNLISHPTDYQGEIKQGHKQTLNLSQLSVGLYVFKVTVSSENAFGEGFVNVTVKPARRVNLPPVAVVSPQLQELTLPLTSALIDGSQSTDDTEIVSYHWEEINGPFIEEKTSVDSPVLRLSNLDPGNYSFRLTVTDSDGATNSTTAALIVNNAVDYPPVANAGPNHTITLPQNSITLNGNQSSDDHQIVLYEWSLGPGSEGKHVVMQGVQTPYLHLSAMQEGDYTFQLKVTDSSRQQSTAVVTVIVQPENNRPPVAVAGPDKELIFPVESATLDGSSSSDDHGIVFYHWEHVRGPSAVEMENIDKAIATVTGLQVGTYHFRLTVKDQQGLSSTSTLTVAVKKENNSPPRARAGGRHVLVLPNNSITLDGSRSTDDQRIVSYLWIRDGQSPAAGDVIDGSDHSVALQLTNLVEGVYTFHLRVTDSQGASDTDTATVEVQPDPRKSGLVELTLQVGVGQLTEQRKDTLVRQLAVLLNVLDSDIKVQKIRAHSDLSTVIVFYVQSRPPFKVLKAAEVARNLHMRLSKEKADFLLFKVLRVDTAGCLLKCSGHGHCDPLTKRCICSHLWMENLIQRYIWDGESNCEWSIFYVTVLAFTLIVLTGGFTWLCICCCKRQKRTKIRKKTKYTILDNMDEQERMELRPKYGIKHRSTEHNSSLMVSESEFDSDQDTIFSREKMERGNPKVSMNGSIRNGASFSYCSKDR

SEQ ID NO: 10023 - protein, 925 aa, Homo sapiens
MPHKIGFVVVSSSGHEDGFSARELMIHAPTVSGWRSPRFCQFPQEIVLQMVERCRIRKLQLLAHQYMISSKIEFYISESLPEYFAPYQAERFRRLGYVSLCDNEKTGCKARELKSVYVDAVGQFLKLIFHQNHVNKYNIYNQVALVAINIIGDPADFSDESNTASREKLIDHYLGHNSEDPALEGTYARKSDYISPLDDLAFDMYQDPEVAQIIRKLDERKREAVQKERYDYAKKLKQAIADLQKVGERLGRYEVEKRCAVEKEDYDLAKEKKQQMEQYRAEVYEQLELHSLLDAELMRRPFDLPLQPLARSGSPCHQKPMPSLPQLEERGTENQFAEPFLQEKPSSYSLTISPQHSAVDPLLPATDPHPKINAESLPYDERPLPAIRKHYGEAVVEPEMSNADISDARRGGMLGEPEPLTEKALREASSAIDVLGETLVAEAYCKTWSYREDALLALSKKLMEMPVGTPKEDLKNTLRASVFLVRRAIKDIVTSVFQASLKLLKMIITQYIPKHKLSKLETAHCVERTIPVLLTRTGDSSARLRVTAANFIQEMALFKEVKSLQIIPSYLVQPLKANSSVHLAMSQMGLLARLLKDLGTGSSGFTIDNVMKFSVSALEHRVYEVRETAVRIILDMYRQHQASILEYLPPDDSNTRRNILYKTIFEGFAKIDGRATDAEMRARRKAATEEAEKQKKEEIKALQGQLAALKEIQAEVQEKESDAVKPKNQDIQGGKAAPAEALGIPDEHYLDNLCIFCGERSESFTEEGLDLHYWKHCLMLTRCDHCKQVVEISSLTEHLLTECDKKDGFGKCYRCSEAVFKEELPRHIKHKDCNPAKPEKLANRCPLCHENFSPGEEAWKAHLMGPAGCTMNLRKTHILQKAPALQPGKSSAVAASGPLGSKAGSKIPTPKGGLSKSSSRTYAKR

SEQ ID NO: 10024 - protein, 583 aa, Homo sapiens
MAAAAVSESWPELELAERERRRELLLTGPGLEERVRAAGGQLPPRLFTLPLLHYLEVSGCGSLRAPGPGLAQGLPQLHSLVLRRNALGPGLSPELGPLPALRVLDLSGNALEALPPGQGLGPAEPPGLPQLQSLNLSGNRLRELPADLARCAPRLQSLNLTGNCLDSFPAELFRPGALPLLSELAAADNCLRELSPDIAHLASLKTLDLSNNQLSEIPAELADCPKLKEINFRGNKLRDKRLEKMVSGCQTRSILEYLRVGGRGGGKGKGRAEGSEKEESRRKRRERKQRREGGDGEEQDVGDAGRLLLRVLHVSENPVPLTVRVSPEVRDVRPYIVGAVVRGMDLQPGNALKRFLTSQTKLHEDLCEKRTAATLATHELRAVKGPLLYCARPPQDLKIVPLGRKEAKAKELVRQLQLEAEEQRKQKKRQSVSGLHRYLHLLDGNENYPCLVDADGDVISFPPITNSEKTKVKKTTSDLFLEVTSATSLQICKDVMDALILKMAEMKKYTLENKEEGSLSDTEADAVSGQLPDPTTNPSAGKDGPSLLVVEQVRVVDLEGSLKVVYPSKADLATAPPHVTVVR

SEQ ID NO: 10025 - protein, 572 aa, Homo sapiens
MFLFQGNNGTVLYTGDFRLAQGEAARMELLHSGGRVKDIQSVYLDTTFCDPRFYQIPSREECLSGVLELVRSWITRSPYHVVWLNCKAAYGYEYLFTNLSEELGVQVHVNKLDMFRNMPEILHHLTTDRNTQIHACRHPKAEEYFQWSKLPCGITSRNRIPLHIISIKPSTMWFGERSRKTNVIVRTGESSYRACFSFHSSYSEIKDFLSYLCPVNAYPNVIPVGTTMDKVVEILKPLCRSSQSTEPKYKPLGKLKRARTVHRDSEEEDDYLFDDPLPIPLRHKVPYPETFHPEVFSMTAVSEKQPEKLRQTPGCCRAECMQSSRFTNFVDCEESNSESEEEVGIPASLQGDLGSVLHLQKADGDVPQWEVFFKRNDEITDESLENFPSSTVAGGSQSPKLFSDSDGESTHISSQNSSQSTHITEQGSQGWDSQSDTVLLSSQERNSGDITSLDKADYRPTIKENIPASLMEQNVICPKDTYSDLKSRDKDVTIVPSTGEPTTLSSETHIPEEKSLLNLSTNADSQSSSDFEVPSTPEAELPKREHLQYLYEKLATGESIAVKKRKCSLLDT

SEQ ID NO: 10026 - protein, 434 aa, Homo sapiens
MSSFEGQMAEYPTISIDRFDRENLRARAYFLSHCHKDHMKGLRAPTLKRRLECSLKVYLYCSPVTKELLLTSPKYRFWKKRIISIEIETPTQISLVDEASGEKEEIVVTLLPAGHCPGSVMFLFQGNNGTVLYTGDFRLAQGEAARMELLHSGGRVKDIQSVYLDTTFCDPRFYQIPSREECLSGVLELVRSWITRSPYHVVWLNCKAAYGYEYLFTNLSEELGVQVHVNKLDMFRNMPEILHHLTTDRNTQIHACRHPKAEEYFQWSKLPCGITSRNRIPLHIISIKPSTMWFGERSRKTNVIVRTGESSYRACFSFHSSYSEIKDFLSYLCPVNAYPNVIPVGTTMDKVVEILKPLCRSSQSTEPKYKPLGKLKRARTVHRDSGSHSVTQARMRWCHHDSLYPLTPGIKRSSCLSLLTSWITGAYRHAQLMI

SEQ ID NO: 10027 - protein, 284 aa, Homo sapiens
MDAIKKKMQMLKLDKENAIDRAEQAEADKKQAEDRCKQLEEEQQALQKKLKGTEDEVEKYSESVKEAQEKLEQAEKKATDAEADVASLNRRIQLVEEELDRAQERLATALQKLEEAEKAADESERGMKVIENRAMKDEEKMELQEMQLKEAKHIAEDSDRKYEEVARKLVILEGELERSEERAEVAESKCGDLEEELKIVTNNLKSLEAQADKYSTKEDKYEEEIKLLEEKLKEAETRAEFAERSVAKLEKTIDDLEETLASAKEENVEIHQTLDQTLLELNNL

SEQ ID NO: 10028 - protein, 284 aa, Homo sapiens
MDAIKKKMQMLKLDKENAIDRAEQAEADKKQAEDRCKQLEEEQQALQKKLKGTEDEVEKYSESVKEAQEKLEQAEKKATDAEADVASLNRRIQLVEEELDRAQERLATALQKLEEAEKAADESERGMKVIENRAMKDEEKMELQEMQLKEAKHIAEDSDRKYEEVARKLVILEGELERSEERAEVAESRARQLEEELRTMDQALKSLMASEEEYSTKEDKYEEEIKLLEEKLKEAETRAEFAERSVAKLEKTIDDLEETLASAKEENVEIHQTLDQTLLELNNL

SEQ ID NO: 10029 - protein, 2554 aa, Homo sapiens
MTATTRGSPVGGNDNQGQAPDGQSQPPLQQNQTSSPDSSNENSPATPPDEQGQGDAPPQLEDEEPAFPHTDLAKLDDMINRPRWVVPVLPKGELEVLLEAAIDLSKKGLDVKSEACQRFFRDGLTISFTKILTDEAVSGWKFEIHRCIINNTHRLVELCVAKLSQDWFPLLELLAMALNPHCKFHIYNGTRPCESVSSSVQLPEDELFARSPDPRSPKGWLVDLLNKFGTLNGFQILHDRFINGSALNVQIIAALIKPFGQCYEFLTLHTVKKYFLPIIEMVPQFLENLTDEELKKEAKNEAKNDALSMIIKSLKNLASRVPGQEETVKNLEIFRLKMILRLLQISSFNGKMNALNEVNKVISSVSYYTHRHGNPEEEEWLTAERMAEWIQQNNILSIVLRDSLHQPQYVEKLEKILRFVIKEKALTLQDLDNIWAAQAGKHEAIVKNVHDLLAKLAWDFSPEQLDHLFDCFKASWTNASKKQREKLLELIRRLAEDDKDGVMAHKVLNLLWNLAHSDDVPVDIMDLALSAHIKILDYSCSQDRDTQKIQWIDRFIEELRTNDKWVIPALKQIREICSLFGEAPQNLSQTQRSPHVFYRHDLINQLQHNHALVTLVAENLATYMESMRLYARDHEDYDPQTVRLGSRYSHVQEVQERLNFLRFLLKDGQLWLCAPQAKQIWKCLAENAVYLCDREACFKWYSKLMGDEPDLDPDINKDFFESNVLQLDPSLLTENGMKCFERFFKAVNCREGKLVAKRRAYMMDDLELIGLDYLWRVVIQSNDDIASRAIDLLKEIYTNLGPRLQVNQVVIHEDFIQSCFDRLKASYDTLCVLDGDKDSVNCARQEAVRMVRVLTVLREYINECDSDYHEERTILPMSRAFRGKHLSFVVRFPNQGRQVDDLEVWSHTNDTIGSVRRCILNRIKANVAHTKIELFVGGELIDPADDRKLIGQLNLKDKSLITAKLTQISSNMPSSPDSSSDSSTGSPGNHGNHYSDGPNPEVESCLPGVIMSLHPRYISFLWQVADLGSSLNMPPLRDGARVLMKLMPPDSTTIEKLRAICLDHAKLGESSLSPSLDSLFFGPSASQVLYLTEVVYALLMPAGAPLADDSSDFQFHFLKSGGLPLVLSMLTRNNFLPNADMETRRGAYLNALKIAKLLLTAIGYGHVRAVAEACQPGVEGVNPMTQINQVTHDQAVVLQSALQSIPNPSSECMLRNVSVRLAQQISDEASRYMPDICVIRAIQKIIWASGCGSLQLVFSPNEEITKIYEKTNAGNEPDLEDEQVCCEALEVMTLCFALIPTALDALSKEKAWQTFIIDLLLHCHSKTVRQVAQEQFFLMCTRCCMGHRPLLFFITLLFTVLGSTARERAKHSGDYFTLLRHLLNYAYNSNINVPNAEVLLNNEIDWLKRIRDDVKRTGETGIEETILEGHLGVTKELLAFQTSEKKFHIGCEKGGANLIKELIDDFIFPASNVYLQYMRNGELPAEQAIPVCGSPPTINAGFELLVALAVGCVRNLKQIVDSLTEMYYIGTAITTCEALTEWEYLPPVGPRPPKGFVGLKNAGATCYMNSVIQQLYMIPSIRNGILAIEGTGSDVDDDMSGDEKQDNESNVDPRDDVFGYPQQFEDKPALSKTEDRKEYNIGVLRHLQVIFGHLAASRLQYYVPRGFWKQFRLWGEPVNLREQHDALEFFNSLVDSLDEALKALGHPAMLSKVLGGSFADQKICQGCPHRYECEESFTTLNVDIRNHQNLLDSLEQYVKGDLLEGANAYHCEKCNKKVDTVKRLLIKKLPPVLAIQLKRFDYDWERECAIKFNDYFEFPRELDMEPYTVAGVAKLEGDNVNPESQLIQQSEQSESETAGSTKYRLVGVLVHSGQASGGHYYSYIIQRNGGDGERNRWYKFDDGDVTECKMDDDEEMKNQCFGGEYMGEVFDHMMKRMSYRRQKRWWNAYILFYERMDTIDQDDELIRYISELAITTRPHQIIMPSAIERSVRKQNVQFMHNRMQYSMEYFQFMKKLLTCNGVYLNPPPGQDHLLPEAEEITMISIQLAARFLFTTGFHTKKVVRGSASDWYDALCILLRHSKNVRFWFAHNVLFNVSNRFSEYLLECPSAEVRGAFAKLIVFIAHFSLQDGPCPSPFASPGPSSQAYDNLSLSDHLLRAVLNLLRREVSEHGRHLQQYFNLFVMYANLGVAEKTQLLKLSVPATFMLVSLDEGPGPPIKYQYAELGKLYSVVSQLIRCCNVSSRMQSSINGNPPLPNPFGDPNLSQPIMPIQQNVADILFVRTSYVKKIIEDCSNSEETVKLLRFCCWENPQFSSTVLSELLWQVAYSYTYELRPYLDLLLQILLIEDSWQTHRIHNALKGIPDDRDGLFDTIQRSKNHYQKRAYQCIKCMVALFSNCPVAYQILQGNGDLKRKWTWAVEWLGDELERRPYTGNPQYTYNNWSPPVQSNETSNGYFLERSHSARMTLAKACELCPEEEPDDQDAPDEHESPPPEDAPLYPHSPGSQYQQNNHVHGQPYTGPAAHHMNNPQRTGQRAQENYEGSEEVSPPQTKDQ

SEQ ID NO: 10030 - protein, 258 aa, Homo sapiens
MAVLAPLIALVYSVPRLSRWLAQPYYLLSALLSAAFLLVRKLPPLCHGLPTQREDGNPCDFDWREVEILMFLSAIVMMKNRRSMFLMTCKPPLYMGPEYIKYFNDKTIDEELERDKRVTWIVEFFANWSNDCQSFAPIYADLSLKYNCTGLNFGKVDVGRYTDVSTRYKVSTSPLTKQLPTLILFQGGKEAMRRPQIDKKGRAVSWTFSEENVIREFNLNELYQRAKKLSKAGDNIPEEQPVASTPTTVSDGENKKDK

SEQ ID NO: 10031 - protein, 331 aa, Homo sapiens
MAQASPPRPERVLGASSPEARPAQEALLLPTGVFQVAEKMEKRTCALCPKDVEYNVLYFAQSENIAAHENCLLYSSGLVECEDQDPLNPDRSFDVESVKKEIQRGRKLKCKFCHKRGATVGCDLKNCNKNYHFFCAKKDDAVPQSDGVRGIYKLLCQQHAQFPIIAQSAKFSGVKRKRGRKKPLSGNHVQPPETMKCNTFIRQVKEEHGRHTDATVKVPFLKKCKEAGLLNYLLEEILDKVHSIPEKLMDETTSESDYEEIGSALFDCRLFEDTFVNFQAAIEKKIHASQQRWQQLKEEIELLQDLKQTLCSFQENRDLMSSSTSISSLSY

SEQ ID NO: 10032 - protein, 435 aa, Homo sapiens
MNFSEVFKLSSLLCKFSPDGKYLASCVQYRLVVRDVNTLQILQLYTCLDQIQHIEWSADSLFILCAMYKRGLVQVWSLEQPEWHCKIDEGSAGLVASCWSPDGRHILNTTEFHLRITVWSLCTKSVSYIKYPKACLQGITFTRDGRYMALAERRDCKDYVSIFVCSDWQLLRHFDTDTQDLTGIEWAPNGCVLAVWDTCLEYKILLYSLDGRLLSTYSAYEWSLGIKSVAWSPSSQFLAVGSYDGKVRILNHVTWKMITEFGHPAAINDPKIVVYKEAEKSPQLGLGCLSFPPPRAGAGPLPSSESKYEIASVPVSLQTLKPVTDRANPKIGIGMLAFSPDSYFLATRNDNIPNAVWVWDIQKLRLFAVLEQLSPVRAFQWDPQQPRLAICTGGSRLYLWSPAGCMSVQVPGEGKHIPEATDVAALLCAVWHHTG

SEQ ID NO: 10033 - protein, 505 aa, Homo sapiens
MASRLTLLTLLLLLLAGFLEPQDRASSNPNATSSSSQDPESLQDRGEGKVATTVISKMLFVEPILEVSSLPTTNSTTNSATKITANTTDEPTTQPTTEPTTQPTIQPTQPTTQLPTDSPTQPTTGSFCPGPVTLCSDLESHSTEAVLGDALVDFSLKLYHAFSAMKKVETNMAFSPFSIASLLTQVLLGAGENTKTNLESILSYPKDFTCVHQALKGFTTKGVTSVSQIFHSPDLAIRDTFVNASRTLYSSSPRVLSNNSDANLELINTWVAKNTNNKISRLLDSLPSDTRLVLLNAIYLSAKWKTTFDPKKTRMEPFHFKNSVIKVPMMNSKKYPVAHFIDQTLKAKVGQLQLSHNLSLVILVPQNLKHRLEDMEQALSPSVFKAIMEKLEMSKFQPTLLTLPRIKVTTSQDMLSIMEKLEFFDFSYDLNLCGLTEDPDLQVSAMQHQTVLELTETGVEAAAASAISVARTLLVFEVQQPFLFVLWDQQHKFPVFMGRVYDPRA

SEQ ID NO: 10034 - protein, 272 aa, Homo sapiens
MLQLRDSVDSAGTSPTAVLAAGEEVGAGGGPGGGRPGAGTPLRQTLWPLSIHDPTRRARVKEYFVFRPGSIEQAVEEIRVVVRPVEDGEIQGVWLLTEVDHWNNEKERLVLVTEQSLLICKYDFISLQCQQVVRIALNAVDTISYGEFQFPPKSLNKREGFGIRIQWDKQSRPSFINRWNPWSTNVPYATFTEHPMAGADEKTASLCQLESFKALLIQAVKKAQKESPLPGQANGVLILERPLLIETYVGLMSFINNEAKLGYSMTRGKIGF

SEQ ID NO: 10035 - protein, 408 aa, Homo sapiens
MECLRSLPCLLPRAMRLPRRTLCALALDVTSVGPPVAACGRRANLIGRSRAAQLCGPDRLRVAGEVHRFRTSDVSQATLASVAPVFTVTKFDKQGNVTSFERKKTELYQELGLQARDLRFQHVMSITVRNNRIIMRMEYLKAVITPECLLILDYRNLNLEQWLFRELPSQLSGEGQLVTYPLPFEFRAIEALLQYWINTLQGKLSILQPLILETLDALVDPKHSSVDRSKLHILLQNGKSLSELETDIKIFKESILEILDEEELLEELCVSKWSDPQVFEKSSAGIDHAEEMELLLENYYRLADDLSNAARELRVLIDDSQSIIFINLDSHRNVMMRLNLQLTMGTFSLSLFGLMGVAFGMNLESSLEEDHRIFWLITGIMFMGSGLIWRRLLSFLGRQLEAPLPPMV

SEQ ID NO: 10036 - protein, 369 aa, Homo sapiens
MVRPLNPRPLPPVVLMLLLLLPPSPLPLAAGDPLPTESRLMNSCLQARRKCQADPTCSAAYHHLDSCTSSISTPLPSEEPSVPADCLEAAQQLRNSSLIGCMCHRRMKNQVACLDIYWTVHRARSLDSDLCLKFAMLCTLNDKCDRLRKAYGEACSGPHCQRHVCLRQLLTFFEKAAEPHAQGLLLCPCAPNDRGCGERRRNTIAPNCALPPVAPNCLELRRLCFSDPLCRSRLVDFQTHCHPMDILGTCATEQSRCLRAYLGLIGTAMTPNFVSNVNTSVALSCTCRGSGNLQEECEMLEGFFSHNPCLTEAIAAKMRFHSQLFSQDWPHPTFAVMAHQNENPAVRPQPWVPSLFSCTLPLILLLSLW

SEQ ID NO: 10037 - protein, 180 aa, Homo sapiens
MADSELQLVEQRIRSFPDFPTPGVVFRDISPVLKDPASFRAAIGLLARHLKATHGGRIDYIAGLDSRGFLFGPSLAQELGLGCVLIRKRGKLPGPTLWASYSLEYGKAELEIQKDALEPGQRVVVVDDLLATGGTMNAACELLGRLQAEVLECVSLVELTSLKGREKLAPVPFFSLLQYE

SEQ ID NO: 10038 - protein, 443 aa, Homo sapiens
MECLRSLPCLLPRAMRLPRRTLCALALDVTSVGPPVAACGRRANLIGRSRAAQLCGPDRLRVAGEVHRFRTSDVSQATLASVAPVFTVTKFDKQGNVTSFERKKTELYQELGLQARDLRFQHVMSITVRNNRIIMRMEYLKAVITPECLLILDYRNLNLEQWLFRELPSQLSGEGQLVTYPLPFEFRAIEALLQYWINTLQGKLSILQPLILETLDALVDPKHSSVDRSKLHILLQNGKSLSELETDIKIFKESILEILDEEELLEELCVSKWSDPQVFEKSSAGIDHAEEMELLLENYYRLADDLSNAARELRVLIDDSQSIIFINLDSHRNVMMRLNLQLTMGTFSLSLFGLMGVAFGMNLESSLEEDHRIFWLITGIMFMGSGLIWRRLLSFLGRQLEAPLPPMMASLPKKTLLADRSMELKNSLRLDGLGSGRSILTNR

SEQ ID NO: 10039 - protein, 4243 aa, Homo sapiens
MGHLWLLGIWGLCGLLLCAADPSTDGSQIIPKVTEIIPKYGSINGATRLTIRGEGFSQANQFNYGVDNAELGNSVQLISSFQSITCDVEKDASHSTQITCYTRAMPEDSYTVRVSVDGVPVTENNTCKGHINSWECTFNAKSFRTPTIRSITPLSGTPGTLITIQGRIFTDVYGSNIALSSNGKNVRILRVYIGGMPCELLIPQSDNLYGLKLDHPNGDMGSMVCKTTGTFIGHHNVSFILDNDYGRSFPQKMAYFVSSLNKIAMFQTYAEVTMIFPSQGSIRGGTTLTISGRFFDQTDFPVRVLVGGEPCDILNVTENSICCKTPPKPHILKTVYPGGRGLKLEVWNNSRPIRLEEILEYNEKTPGYMGASWVDSASYIWLMEQDTFVARFSGFLVAPDSDVYRFYIKGDDRYAIYFSQTGLPEDKVRIAYHSANANSYFSSPTQRSDDIHLQKGKEYYIEILLQEYRLSAFVDVGLYQYRNVYTEQQTGDAVNEEQVIKSQSTILQEVQVITLENWETTNAINEVQKIKVTSPCVEANSCSLYQYRLIYNMEKTVFLPADASEFILQSALNDLWSIKPDTVQVIRTQNPQSYVYMVTFISTRGDFDLLGYEVVEGNNVTLDITEQTKGKPNLETFTLNWDGIASKPLTLWSSEAEFQGAVEEMVSTKCPPQIANFEEGFVVKYFRDYETDFNLEHINRGQKTAETDAYCGRYSLKNPAVLFDSADVKPNRRPYGDILLFPYNQLCLAYKGFLANYIGLKFQYQDNSKITRSTDTQFTYNFAYGNNWTYTCIDLLDLVRTKYTGTNVSLQRISLHKASESQSFYVDVVYIGHTSTISTLDEMPKRRLPALANKGIFLEHFQVNQTKTNGPTMTNQYSVTMTSYNCSYNIPMMAVSFGQIITHETENEFVYRGNNWPGESKIHIQRIQAASPPLSGSFDIQAYGHILKGLPAAVSAADLQFALQSLEGMGRISVTREGTCAGYAWNIKWRSTCGKQNLLQINDSNIIGEKANMTVTRIKEGGLFRQHVLGDLLRTPSQQPQVEVYVNGIPAKCSGDCGFTWDSNITPLVLAISPSQGSYEEGTILTIVGSGFSPSSAVTVSVGPVGCSLLSVDEKELKCQILNGSAGHAPVAVSMADVGLAQNVGGEEFYFVYQSQISHIWPDSGSIAGGTLLTLSGFGFNENSKVLVGNETCNVIEGDLNRITCRTPKKTEGTVDISVTTNGFQATARDAFSYNCLQTPIITDFSPKVRTILGEVNLTIKGYNFGNELTQNMAVYVGGKTCQILHWNFTDIRCLLPKLSPGKHDIYVEVRNWGFASTRDKLNSSIQYVLEVTSMFPQRGSLFGGTEITIRGFGFSTIPAENTVLLGSIPCNVTSSSENVIKCILHSTGNIFRITNNGKDSVHGLGYAWSPPVLNVSVGDTVAWHWQTHPFLRGIGYRIFSVSSPGSVIYDGKGFTSGRQKSTSGSFSYQFTSPGIHYYSSGYVDEAHSIFLQGVINVLPAETRHIPLHLFVGRSEATYAYGGPENLHLGSSVAGCLATEPLCSLNNTRVKNSKRLLFEVSSCFSPSISNITPSTGTVNELITIIGHGFSNLPWANKVTIGSYPCVVEESSEDSITCHIDPQNSMDVGIRETVTLTVYNLGTAINTLSNEFDRRFVLLPNIDLVLPNAGSTTGMTSVTIKGSGFAVSSAGVKVLMGHFPCKVLSVNYTAIECETSPAAQQLVDVDLLIHGVPAQCQGNCTFSYLESITPYITGVFPNSVIGSVKVLIEGEGLGTVLEDIAVFIGNQQFRAIEVNENNITALVTPLPVGHHSVSVVVGSKGLALGNLTVSSPPVASLSPTSGSIGGGTTLVITGNGFYPGNTTVTIGDEPCQIISINPNEVYCRTPAGTTGMVDVKIFVNTIAYPPLLFTYALEDTPFLRGIIPSRGPPGTEIEITGSNFGFEILEISVMINNIQCNVTMANDSVVQCIVGDHAGGTFPVMMHHKTKGSAMSTVVFEYPLNIQNINPSQGSFGGGQTMTVTGTGFNPQNSIILVCGSECAIDRLRSDYTTLLCEIPSNNGTGAEQACEVSVVNGKDLSQSMTPFTYAVSLTPLITAVSPKRGSTAGGTRLTVVGSGFSENMEDVHITIAEAKCDVEYSNKTHIICMTDAHTLSGWAPVCVHIRGVGMAKLDNADFLYVDAWSSNFSWGGKSPPEEGSLVVITKGQTILLDQSTPILKMLLIQGGTLIFDEADIELQAENILITDGGVLQIGTETSPFQHKAVITLHGHLRSPELPVYGAKTLAVREGILDLHGVPVPVTWTRLAHTAKAGERILILQEAVTWKPGDNIVIASTGHRHSQGENEKMTIASVSADGINITLSNPLNYTHLGITVTLPDGTLFEARAEVGILTRNILIRGSDNVEWNNKIPACPDGFDTGEFATQTCLQGKFGEEIGSDQFGGCVMFHAPVPGANMVTGRIEYVEVFHAGQAFRLGRYPIHWHLLGDLQFKSYVRGCAIHQAYNRAVTIHNTHHLLVERNIIYDIKGGAFFIEDGIEHGNILQYNLAVFVQQSTSLLNDDVTPAAFWVTNPNNTIRHNAVAGGTHFGFWYRMNNHPDGPSYDRNICQKRVPLGEFFNNTVHSQGWFGMWIFEEYFPMQTGSCTSTVPAPAIFNSLTTWNCQKGAEWVNGGALQFHNFVMVNNYEAGIETKRILAPYVGGWGETNGAVIKNAKIVGHLDELGMGSAFCTAKGLVLPFSEGLTVSSVHFMNFDRPNCVALGVTSISGVCNDRCGGWSAKFVDVQYSHTPNKAGFRWEHEMVMIDVDGSLTGHKGHTVIPHSSLLDPSHCTQEAEWSIGFPGSVCDASVSFHRLAFNQPSPVSLLEKDVVLSDSFGTSIIPFQKKRLTHMSGWMALIPNANHINWYFKGVDHITNISYTSTFYGFKEEDYVIISHNFTQNPDMFNIIDMRNGSSNPLNWNTSKNGDWHLEANTSTLYYLVSGRNDLHQSQLISGNLDPDVKDVVINFQAYCCILQDCFPVHPPSRKPIPKKRPATYNLWSNDSFWQSSRENNYTVPHPGANVIIPEGTWIVADIDMPSMERLIIWGVLELEDKYNVGAAESSYREVVLNATYISLQGGRLIGGWEDNPFKGDLKIVLRGNHTTQDWALPEGPNQGAKVLGVFGELDLHGIPHSIYKTKLSETAFAGSKVLSLMDAVDWQEGEEIVITTTSYDFHQTETRSIVKILHDHKILILNDSLSYTHFAEKYHVPGTGESYTLAADVGILSRNIKIVGEDYPGWSEDSFGARVLVGSFTENMMTFKGNARISNVEFYHSGQEGFRDSTDPRYAVTFLNLGQIQEHGSSYIRGCAFHHGFSPAIGVFGTDGLDIDDNIIHFTVGEGIRIWGNANRVRGNLIALSVWPGTYQNRKDLSSTLWHAAIEINRGTNTVLQNNVVAGFGRAGYRIDGEPCPGQFNPVEKWFDNEAHGGLYGIYMNQDGLPGCSLIQGFTIWTCWDYGIYFQTTESVHIYNVTLVDNGMAIFPMIYMPAAISHKISSKNVQIKSSLIVGSSPGFNCSDVLTNDDPNIELTAAHRSPRSPSGGRSGICWPTFASAHNMAPRKPHAGIMSYNAISGLLDISGSTFVGFKNVCSGETNVIFITNPLNEDLQHPIHVKNIKLVDTTEQSKIFIHRPDISKVNPSDCVDMVCDAKRKSFLRDIDGSFLGNAGSVIPQAEYEWDGNSQVGIGDYRIPKAMLTFLNGSRIPVTEKAPHKGIIRDSTCKYLPEWQSYQCFGMEYAMMVIESLDPDTETRRLSPVAIMGNGYVDLINGPQDHGWCAGYTCQRRLSLFHSIVALNKSYEVYFTGTSPQNLRLMLLNVDHNKAVLVGIFFSTLQRLDVYVNNLLVCPKTTIWNAQQKHCELNNHLYKDQFLPNLDSTVLGENYFDGTYQMLYLLVKGTIPVEIHTATVIFVSFQLSVATEDDFYTSHNLVKNLALFLKIPSDKIRISKIRGKSLRRKRSMGFIIEIEIGDPPIQFISNGTTGQMQLSELQEIAGSLGQAVILGNISSILGFNISSMSITNPLPSPSDSGWIKVTAQPVERSAFPVHHVAFVSSLLVITQPVAAQPGQPFPQQPSVKATDSDGNCVSVGITALTLRAILKDSNNNQVNGLSGNTTIPFSSCWANYTDLTPLRTGKNYKIEFILDNVVGVESRTFSLLAESVSSSGSSSSSNSKASTVGTYAQIMTVVISCLVGRMWLLEIFMAAVSTLNITLRSY

SEQ ID NO: 10040 - protein, 256 aa, Homo sapiens
MAGAVSLLGVVGLLLVSALSGVLGDRANPDLRAHPGNAAHPGSGATEPRRRPPLKDQRERTRAGSLPLGALYTAAVAAFVLYKCLQGKDETAVLHEEASKQQPLQSEQQLAQLTQQLAQTEQHLNNLMAQLDPLFERVTTLAGAQQELLNMKLWTIHELLQDSKPDKDMEASEPEASRPLPEDFCLKEDEEEIGDSQAWEEPTNWSTETWNLATSWEVGRGLRRRCSQAVAKGPSHSLGWEGGTTAEGRLKQSLFS

SEQ ID NO: 10041 - protein, 183 aa, Homo sapiens
MSTVDLARVGACILKHAVTGEAVELRSLWREHACVVAGLRRFGCVVCRWIAQDLSSLAGLLDQHGVRLVGVGPEALGLQEFLDGDYFAGELYLDESKQLYKELGFKRYNSLSILPAALGKPVRDVAAKAKAVGIQGNLSGDLLQSGGLLVVSKEVPRRLRPQGAHPAGPGHLCGGLCQRPASV

SEQ ID NO: 10042 - protein, 349 aa, Homo sapiens
MAVFVVLLALVAGVLGNEFSILKSPGSVVFRNGNWPIPGERIPDVAALSMGFSVKEDLSWPGLAVGNLFHRPRATVMVMVKGVNKLALPPGSVISYPLENAVPFSLDSVANSIHSLFSEETPVVLQLAPSEERVYMVGKANSVFEDLSVTLRQLRNRLFQENSVLSSLPLNSLSRNNEVDLLFLSELQVLHDISSLLSRHKHLAKDHSPDLYSLELAGLDEIGKRYGEDSEQFRDASKILVDALQKFADDMYSLYGGNAVVELVTVKSFDTSLIRKTRTILEAKQANPASPYNLAYKYNFEYSVVFNMVLWIMIALALAVIITSYNIWNMDPGYDSIIYRMTNQKIRMD

SEQ ID NO: 10043 - protein, 1755 aa, Homo sapiens
MLSATPLYGNVHSWMNSERVRMCGASEDRKILVNDGDASKARLELREENPLNHNVVDASTAHRIDGLAALSMDRTGLIREGLRVPGNIVYSSLCGLGSEKGREAATSTLGGLGFSSERNPEMQFKPNTPETVEASAVSGKPPNGFSAIYKTPPGIQKSAVATAEALGLDRPASDKQSPLNINGASYLRLPWVNPYMEGATPAIYPFLDSPNKYSLNMYKALLPQQSYSLAQPLYSPVCTNGERFLYLPPPHYVGPHIPSSLASPMRLSTPSASPAIPPLVHCADKSLPWKMGVSPGNPVDSHAYPHIQNSKQPRVPSAKAVTSGLPGDTALLLPPSPRPSPRVHLPTQPAADTYSEFHKHYARISTSPSVALSKPYMTVSSEFPAARLSNGKYPKAPEGGEGAQPVPGHARKTAVQDRKDGSSPPLLEKQTVTKDVTDKPLDLSSKVVDVDASKADHMKKMAPTVLVHSRAGSGLVLSGSEIPKETLSPPGNGCAIYRSEIISTAPSSWVVPGPSPNEENNGKSMSLKNKALDWAIPQQRSSSCPRMGGTDAVITNVSGSVSSAGRPASASPAPNANADGTKTSRSSVETTPSVIQHVGQPPATPAKHSSSTSSKGAKASNPEPSFKANENGLPPSSIFLSPNEAFRSPPIPYPRSYLPYPAPEGIAVSPLSLHGKGPVYPHPVLLPNGSLFPGHLAPKPGLPYGLPTGRPEFVTYQDALGLGMVHPMLIPHTPIEITKEEKPERRSRSHERARYEDPTLRNRFSEILETSSTKLHPDVPTDKNLKPNPNWNQGKTVVKSDKLVYVDLLREEPDAKTDTNVSKPSFAAESVGQSAEPPKPSVEPALQQHRDFIALREELGRISDFHETYTFKQPVFTVSKDSVLAGTNKENLGLPVSTPFLEPPLGSDGPAVTFGKTQEDPKPFCVGSAPPSVDVTPTYTKDGADEAESNDGKVLKPKPSKLAKRIANSAGYVGDRFKCVTTELYADSSQLSREQRALQMEGLQEDSILCLPAAYCERAMMRFSELEMKEREGGHPATKDSEMCKFSPADWERLKGNQDKKPKSVTLEEAIAEQNESERCEYSVGNKHRDPFEAPEDKDLPVEKYFVERQPVSEPPADQVASDMPHSPTLRVDRKRKVSGDSSHTETTAEEVPEDPLLKAKRRRVSKDDWPEREMTNSSSNHLEDPHYSELTNLKVCIELTGLHPKKQRHLLHLRERWEQQVSAADGKPGRQSRKEVTQATQPEAIPQGTNITEEKPGRKRAEAKGNRSWSEESLKPSDNEQGLPVFSGSPPMKSLSSTSAGGKKQAQPSCAPASRPPAKQQKIKENQKTDVLCADEEEDCQAASLLQKYTDNSEKPSGKRLCKTKHLIPQESRRGLPLTGEYYVENADGKVTVRRFRKRPEPSSDYDLSPAKQEPKPFDRLQQLLPASQSTQLPCSSSPQETTQSRPMPPEARRLIVNKNAGETLLQRAARLGYEEVVLYCLENKICDVNHRDNAGYCALHEACARGWLNIVRHLLEYGADVNCSAQDGTRPLHDAVENDHLEIVRLLLSYGADPTLATYSGRTIMKMTHSELMEKFLTDYLNDLQGRNDDDASGTWDFYGSSVCEPDDESGYDVLANPPGPEDQDDDDDAYSDVFEFEFSETPLLPCYNIQVSVAQGPRNWLLLSDVLKKLKMSSRIFRCNFPNVEIVTIAEAEFYRQVSASLLFSCSKDLEAFNPESKELLDLVEFTNEIQTLLGSSVEWLHPSDLASDNYW

SEQ ID NO: 10044 - protein, 773 aa, Homo sapiens
MAECGASGSGSSGDSLDKSITLPPDEIFRNLENAKRFAIDIGGSLTKLAYYSTVQHKVAKVRSFDHSGKDTEREHEPPYEISVQEEITARLHFIKFENTYIEACLDFIKDHLVNTETKVIQATGGGAYKFKDLIEEKLRLKVDKEDVMTCLIKGCNFVLKNIPHEAFVYQKDSDPEFRFQTNHPHIFPYLLVNIGSGVSIVKVETEDRFEWVGGSSIGGGTFWGLGALLTKTKKFDELLHLASRGQHSNVDMLVRDVYGGAHQTLGLSGNLIASSFGKSATADQEFSKEDMAKSLLHMISNDIGQLACLHARLHSLDRVYFGGFFIRGHPVTMRTITYSINFFSKGEVQALFLRHEGYLGAIGAFLKGAEQDNPNQYSWGENYAGSSGLMSASPELGPAQRARSGTFDLLEMDRLERPLVDLPLLLDPPSYVPDTVDLTDDALARKYWLTCFEEALDGVVKRAVASQPDSVDAAERAEKFRQKYWNKLQTLRQQPFAYGTLTVRSLLDTREHCLNEFNFPDPYSKVKQRENGVALRCFPGVVRSLDALGWEERQLALVKGLLAGNVFDWGAKAVSAVLESDPYFGFEEAKRKLQERPWLVDSYSEWLQRLKGPPHKCALIFADNSGIDIILGVFPFVRELLLRGTEVILACNSGPALNDVTHSESLIVAERIAGMDPVVHSALQEERLLLVQTGSSSPCLDLSRLDKGLAALVRERGADLVVIEGMGRAVHTNYHAALRCESLKLAVIKNAWLAERLGGRLFSVIFKYEVPAE

SEQ ID NO: 10045 - protein, 1187 aa, Homo sapiens
MAKPYEFNWQKEVPSFLQEGAVFDRYEEESFVFEPNCLFKVDEFGFFLTWRSEGKEGQVLECSLINSIRSGAIPKDPKILAALEAVGKSENDLEGRIVCVCSGTDLVNISFTYMVAENPEVTKQWVEGLRSIIHNFRANNVSPMTCLKKHWMKLAFMTNTNGKIPVRSITRTFASGKTEKVIFQALKELGLPSGKNDEIEPTAFSYEKFYELTQKICPRTDIEDLFKKINGDKTDYLTVDQLVSFLNEHQRDPRLNEILFPFYDAKRAMQIIEMYEPDEDLKKKGLISSDGFCRYLMSDENAPVFLDRLELYQEMDHPLAHYFISSSHNTYLTGRQFGGKSSVEMYRQVLLAGCRCVELDCWDGKGEDQEPIITHGKAMCTDILFKDVIQAIKETAFVTSEYPVILSFENHCSKYQQYKMSKYCEDLFGDLLLKQALESHPLEPGRALPSPNDLKRKILIKNKRLKPEVEKKQLEALRSMMEAGESASPANILEDDNEEEIESADQEEEAHPEFKFGNELSADDLGHKEAVANSVKKASDDLEHENNKKGLVTVEDEQAWMASYKYVGATTNIHPYLSTMINYAQPVKFQGFHVAEERNIHYNMSSFNESVGLGYLKTHAIEFVNYNKRQMSRIYPKGGRVDSSNYMPQIFWNAGCQMVSLNYQTPDLAMQLNQGKFEYNGSCGYLLKPDFMRRPDRTFDPFSETPVDGVIAATCSVQVISGQFLSDKKIGTYVEVDMYGLPTDTIRKEFRTRMVMNNGLNPVYNEESFVFRKVILPDLAVLRIAVYDDNNKLIGQRILPLDGLQAGYRHISLRNEGNKPLSLPTIFCNIVLKTYVPDGFGDIVDALSDPKKFLSITEKRADQMRAMGIETSDIADVPSDTSKNDKKGKANTAKANVTPQSSSELRPTTTAALASGVEAKKGIELIPQVRIEDLKQMKAYLKHLKKQQKELNSLKKKHAKEHSTMQKLHCTQVDKIVAQYDKEKSTHEKILEKAMKKKGGSNCLEMKKETEIKIQTLTSDHKSKVKEIVAQHTKEWSEMINTHSAEEQEIRDLHLSQQCELLKKLLINAHEQQTQQLKLSHDRESKEMRAHQAKISMENSKAISQDKSIKNKAERERRVRELNSSNTKKFLEERKRLAMKQSKEMDQLKKVQLEHLEFLEKQNEQAKEMQQMVKLEAEMDRRPATVV

SEQ ID NO: 10046 - protein, 323 aa, Homo sapiens [sequence omitted]

SEQ ID NO: 10047 - protein, 1591 aa, Homo sapiens
MSLLCVRVKRAKFQGSPDKFNTYVTLKVQNVKSTTVAVRGDQPSWEQDFMFEISRLDLGLSVEVWNKGLIWDTMVGTVWIALKTIRQSDEEGPGEWSTLEAETLMKDDEICGTRNPTPHKILLDTRFELPFDIPEEEARYWTYKWEQINALGADNEYSSQEESQRKPLPTAAAQCSFEDPDSAVDDRDSDYRSETSNSFPPPYHTASQPNASVHQFPVPVRSPQQLLLQGSSRDSCNDSMQSYDLDYPERRAISPTSSSRYGSSCNVSQGSSQLSELDQYHEQDDDHRETDSIHSCHSSHSLSRDGQAGFGEQEKPLEVTGQAEKEAACEPKEMKEDATTHPPPDLVLQKDHFLGPQESFPEENASSPFTQARAHWIRAVTKVRLQLQEIPDDGDPSLPQWLPEGPAGGLYGIDSMPDLRRKKPLPLVSDLSLVQSRKAGITSAMATRTSLKDEELKSHVYKKTLQALIYPISCTTPHNFEVWTATTPTYCYECEGLLWGIARQGMRCSECGVKCHEKCQDLLNADCLQRAAEKSCKHGAEDRTQNIIMAMKDRMKIRERNKPEIFEVIRDVFTVNKAAHVQQMKTVKQSVLDGTSKWSAKITITVVCAQGLQAKDKTGSSDPYVTVQVSKTKKRTKTIFGNLNPVWEEKFHFECHNSSDRIKVRVWDEDDDIKSRVKQRLKRESDDFLGQTIIEVRTLSGEMDVWYNLEKRTDKSAVSGAIRLQISVEIKGEEKVAPYHVQYTCLHENLFHYLTDIQGSGGVRIPEARGDDAWKVYFDETAQEIVDEFAMRYGIESIYQAMTHFACLSSKYMCPGVPAVMSTLLANINAYYAHTTASTNVSASDRFAASNFGKERFVKLLDQLHNSLRIDLSTYRNNFPAGSPERLQDLKSTVDLLTSITFFRMKVQELQSPPRASQVVKDCVKACLNSTYEYIFNNCHDLYSRQYQLKQELPPEEQGPSIRNLDFWPKLITLIVSIIEEDKNSYTPVLNQFPQELNVGKVSAEVMWHLFAQDMKYALEEHEKDHLCKSADYMNLHFKVKWLHNEYVRDLPVLQGQVPEYPAWFEQFVLQWLDENEDVSLEFLRGALERDKKDGFQQTSEHALFSCSVVDVFTQLNQSFEIIRKLECPDPSILAHYMRRFAKTIGKVLMQYADILSKDFPAYCTKEKLPCILMNNVQQLRVQLEKMFEAMGGKELDLEAADSLKELQVKLNTVLDELSMVFGNSFQVRIDECVRQMADILGQVRGTGNASPDARASAAQDADSVLRPLMDFLDGNLTLFATVCEKTVLKRVLKELWRVVMNTMERMIVLPPLTDQTGTQLIFTAAKELSHLSKLKDHMVREETRNLTPKQCAVLDLALDTIKQYFHAGGNGLKKTFLEKSPDLQSLRYALSLYTQTTDTLIKTFVRSQTTQGSGVDDPVGEVSIQVDLFTHPGTGEHKVTVKVVAANDLKWQTAGMFRPFVEVTMVGPHQSDKKRKFTTKSKSNNWAPKYNETFHFLLGNEEGPESYELQICVKDYCFAREDRVLGLAVMPLRDVTAKGSCACWCPLGRKIHMDETGLTILRILSQRSNDEVAREFVKLKSESRSTEEGS

SEQ ID NO: 10048 - protein, 331 aa, Homo sapiens
MRPALAVGLVFAGCCSNVIFLELLARKHPGCGNIVTFAQFLFIAVEGFLFEADLGRKPPAIPIRYYAIMVTMFFTVSVVNNYALNLNIAMPLHMIFRSGSLIANMILGIIILKKRYSIFKYTSIALVSVGIFICTFMSAKQVTSQSSLSENDGFQAFVWWLLGIGALTFALLMSARMGIFQETLYKRFGKHSKEALFYNHALPLPGFVFLASDIYDHAVLFNKSELYEIPVIGVTLPIMWFYLLMNIITQYVCIRGVFILTTECASLTVTLVVTLRKFVSLIFSILYFQNPFTLWHWLGTLFVFIGTLMYTEVWNNLGTTKSEPQKDSKKN

SEQ ID NO: 10049 - protein, 350 aa, Homo sapiens
MAAAGEGTPSSRGPRRDPPRRPPRNGYGVYVYPNSFFRYEGEWKAGRKHGHGKLLFKDGSYYEGAFVDGEITGEGRRHWAWSGDTFSGQFVLGEPQGYGVMEYKAGGCYEGEVSHGMREGHGFLVDRDGQVYQGSFHDNKRHGPGQMLFQNGDKYDGDWVRDRRQGHGVLRCADGSTYKGQWHSDVFSGLGSMAHCSGVTYYGLWINGHPAEQATRIVILGPEVMEVAQGSPFSVNVQLLQDHGEIAKSESGRVLQISAGVRYVQLSAYSEVNFFKVDRDNQETLIQTPFGFECIPYPVSSPAAGVPGPRAAKGGAEADVPLPRGDLELHLGALHGQEDTPGGLLGSSLF

SEQ ID NO: 10050 - protein, 497 aa, Homo sapiens
MAAAGEGTPSSRGPRRDPPRRPPRNGYGVYVYPNSFFRYEGEWKAGRKHGHGKLLFKDGSYYEGAFVDGEITGEGRRHWAWSGDTFSGQFVLGEPQGYGVMEYKAGGCYEGEVSHGMREGHGFLVDRDGQVYQGSFHDNKRHGPGQMLFQNGDKYDGDWVRDRRQGHGVLRCADGSTYKGQWHSDVFSGLGSMAHCSGVTYYGLWINGHPAEQATRIVILGPEVMEVAQGSPFSVNVQLLQDHGEIAKSESGRVLQISAGVRYVQLSAYSEVNFFKVDRDNQETLIQTPFGFECIPYPVSSPAAGVPGPRAAKGGAEADVPLPRGDLELHLGALHGQEDTPGGLLARGHAPHCPGACQRVEQGCAEFTDVLLGPPPPGYHPFLFLDSLHKKAGGRSRGGLHPRGTPPTAQEPPGGSRPEGRATEEQAAAAHLGEYVLMIRDVTTPPFLGRRLPPAFKHLRVVAKRAGQPPHVLEEGPEASSSWQAAHSCTPEPPAPR

SEQ ID NO: 10051 - protein, 464 aa, Homo sapiens
MGSPAHRPALLLLLPPLLLLLLLRVPPSRSFPGSGDSPLEDDEVGYSHPRYKDTPWCSPIKVKYGDVYCRAPQGGYYKTALGTRCDIRCQKGYELHGSSLLICQSNKRWSDKVICKQKRCPTLAMPANGGFKCVDGAYFNSRCEYYCSPGYTLKGERTVTCMDNKAWSGRPASCVDMEPPRIKCPSVKERIAEPNKLTVRVSWETPEGRDTADGILTDVILKGLPPGSNFPEGDHKIQYTVYDRAENKGTCKFRVKVRVKRCGKLNAPENGYMKCSSDGDNYGATCEFSCIGGYELQGSPARVCQSNLAWSGTEPTCAAMNVNVGVRTAAALLDQFYEKRRLLIVSTPTARNLLYRLQLGMLQQAQCGLDLRHITVVELVGVFPTLIGRIGAKIMPPALALQLRLLLRIPLYSFSMVLVDKHGMDKERYVSLVMPVALFNLIDTFPLRKEEMVLQAEMSQTCNT

SEQ ID NO: 10052 - protein, 728 aa, Homo sapiens
MEAAAGGRGCFQPHPGLQKTLEQFHLSSMSSLGGPAAFSARWAQEAYKKESAKEAGAAAVPAPVPAATEPPPVLHLPAIQPPPPVLPGPFFMPSDRSTERCETVLEGETISCFVVGGEKRLCLPQILNSVLRDFSLQQINAVCDELHIYCSRCTADQLEILKVMGILPFSAPSCGLITKTDAERLCNALLYGGAYPPPCKKELAASLALGLELSERSVRVYHECFGKCKGLLVPELYSSPSAACIQCLDCRLMYPPHKFVVHSHKALENRTCHWGFDSANWRAYILLSQDYTGKEEQARLGRCLDDVKEKFDYGNKYKRRVPRVSSEPPASIRPKTDDTSSQSPAPSEKDKPSSWLRTLAGSSNKSLGCVHPRQRLSAFRPWSPAVSASEKELSPHLPALIRDSFYSYKSFETAVAPNVALAPPAQQKVVSSPPCAAAVSRAPEPLATCTQPRKRKLTVDTPGAPETLAPVAAPEEDKDSEAEVEVESREEFTSSLSSLSSPSFTSSSSAKDLGSPGARALPSAVPDAAAPADAPSGLEAELEHLRQALEGGLDTKEAKEKFLHEVVKMRVKQEEKLSAALQAKRSLHQELEFLRVAKKEKLREATEAKRNLRKEIERLRAENEKKMKEANESRLRLKRELEQARQARVCDKGCEAGRLRAKYSAQIEDLQVKLQHAEADREQLRADLLREREAREHLEKVVKELQEQLWPRARPEAAGSEGAAELEP

SEQ ID NO: 10053 - protein, 522 aa, Homo sapiens
MKAMPWNWTCLLSHLLMVGMGSSTLLTRQPAPLSQKQRSFVTFRGEPAEGFNHLVVDERTGHIYLGAVNRIYKLSSDLKVLVTHETGPDEDNPKCYPPRIVQTCNEPLTTTNNVNKMLLIDYKENRLIACGSLYQGICKLLRLEDLFKLGEPYHKKEHYLSGVNESGSVFGVIVSYSNLDDKLFIATAVDGKPEYFPTISSRKLTKNSEADGMFAYVFHDEFVASMIKIPSDTFTIIPDFDIYYVYGFSSGNFVYFLTLQPEMVSPPGSTTKEQVYTSKLVRLCKEDTAFNSYVEVPIGCERSGVEYRLLQAAYLSKAGAVLGRTLGVHPDDDLLFTVFSKGQKRKMKSLDESALCIFILKQINDRIKERLQSCYRGEGTLDLAWLKVKDIPCSSALLTIDDNFCGLDMNAPLGVSDMVRGIPVFTEDRDRMTSVIAYVYKNHSLAFVGTKSGKLKKSFGTGPQGGITQEWIGVEGDPPGANIASQEQMLCVYLQCSSHKAISDQRVQPLLCCFLNVPGNSS

SEQ ID NO: 10054 - protein, 387 aa, Homo sapiens
MGAFLDKPKTEKHNAHGAGNGLRYGLSSMQGWRVEMEDAHTAVVGIPHGLEDWSFFAVYDGHAGSRVANYCSTHLLEHITTNEDFRAAGKSGSALELSVENVKNGIRTGFLKIDEYMRNFSDLRNGMDRSGSTAVGVMISPKHIYFINCGDSRAVLYRNGQVCFSTQDHKPCNPREKERIQNAGGSVMIQRVNGSLAVSRALGDYDYKCVDGKGPTEQLVSPEPEVYEILRAEEDEFIILACDGIWDVMSNEELCEYVKSRLEVSDDLENVCNWVVDTCLHKGSRDNMSIVLVCFSNAPKVSDEAVKKDSELDKHLESRVEEIMEKSGEEGMPDLAHVMRILSAENIPNLPPGGGLAGKRNVIEAVYSRLNPHRESDGGAGDLEDPW

SEQ ID NO: 10055 - protein, 558 aa, Homo sapiens
MRCALALSALLLLLSTPPLLPSSPSPSPSPSQNATQTTTDSSNKTAPTPASSVTIMATDTAQQSTVPTSKANEILASVKATTLGVSSDSPGTTTLAQQVSGPVNTTVARGGGSGNPTTTIESPKSTKSADTTTVATSTATAKPNTTSSQNGAEDTTNSGGKSSHSVTTDLTSTKAEHLTTPHPTSPLSPRQPTSTHPVATPTSSGHDHLMKISSSSSTVAIPGYTFTSPGMTTTLLETVFHHVSQAGLELLTSGDLPTLASQSAGITASSVISQRTQQTSSQMPASSTAPSSQETVQPTSPATALRTPTLPETMSSSPTAASTTHRYPKTPSPTVAHESNWAKCEDLETQTQSEKQLVLNLTGNTLCAGGASDEKLISLICRAVKATFNPAQDKCGIRLASVPGSQTVVVKEITIHTKLPAKDVYERLKDKWDELKEAGVSDMKLGDQGPPEEAEDRFSMPLIITIVCMASFLLLVAALYGCCHQRLSQRKDQQRLTEELQTVENGYHDNPTLEVMETSSEMQEKKVVSLNGELGDSWIVPLDNLTKDDLDEEEDTHL

SEQ ID NO: 10056 - protein, 99 aa, Homo sapiens
MKASAALLCLLLTAAAFSPQGLAQPVGINTSTTCCYRFINKKIPKQRLESYRRTTSSHCPREAVIFKTKLDKEICADPTQKWVQDFMKHLDKKTQTPKL

SEQ ID NO: 10057 - protein, 342 aa, Homo sapiens
MDILKSEILRKRQLVEDRNLLVENKKYFKRSELAKKEEEAYFERCGYKIQPKEEDQKPLTSSNPVLELELAEEKLPMTLSRQEVIRRLRERGEPIRLFGETDYDAFQRLRKIEILTPEVNKGLRNDLKAALDKIDQQYLNEIVGGQEPGEEDTQNDLKVHEENTTIEELEALGESLGKGDDHKDMDIITKFLKFLLGVWAKELNAREDYVKRSVQGKLNSATQKQTESYLRPLFRKLRKRNLPADIKESITDIIKFMLQREYVKANDAYLQMAIGNAPWPIGVTMVGIHARTGREKIFSKHVAHVLNDETQRKYIQGLKRLMTICQKHFPTDPSKCVEYNAL

SEQ ID NO: 10058 - protein, 292 aa, Homo sapiens
MREWWVQVGLLAVPLLAAYLHIPPPQLSPALHSWKSSGKFFTYKGLRIFYQDSVGVVGSPEIVVLLHGFPTSSYDWYKIWEGLTLRFHRVIALDFLGFGFSDKPRPHHYSIFEQASIVEALLRHLGLQNRRINLLSHDYGDIVAQELLYRYKQNRSGRLTIKSLCLSNGGIFPETHRPLLLQKLLKDGGVLSPILTRLMNFFVFSRGLLQYINQRKKFRRRWVGALASVTIPIHFIYGPLDPVNPYPEFLELYRKTLPRSTVSILDDHISHYPQLEDPMGFLNAYMGFINSF

SEQ ID NO: 10059 - protein, 116 aa, Homo sapiens
MEEYHRHCDEVGFNAEEAHNIVKECVDGVLGGEDYNHNNINQWTASIVEQSLTHLVKLGKAYKYIVTCAVVQKSAYGFHTASSCFWDTTSDGTCTVRWENRTMNCIVNVFAIAIVL

SEQ ID NO: 10060 - protein, 452 aa, Homo sapiens [sequence omitted]

SEQ ID NO: 10061 - protein, 224 aa, Homo sapiens
MLAISRNQKLLQAGEENQVLELLIHRDGEFQELMKLALNQGKIHHEMQVLEKEVEKRDSDIQQLQKQLKEAEQILATAVYQAKEKLKSIEKARKGAISSEEIIKYAHRISASNAVCAPLTWVPGDPRRPYPTDLEMRSGLLGQMNNPSTNGVNGHLPGDALAAGRLPDVLAPQYPWQSNDMSMNMLPPNHSSDFLLEPPGHNKENEDDVEIMSTDSSSSSSESD

SEQ ID NO: 10062 - protein, 238 aa, Homo sapiens
MAPKKRPETQKTSEIVLRPRNKRSRSPLELEPEAKKLCAKGSGPSRRCDSDCLWVGLAGPQILPPCRSIVRTLHQHKLGRASWPSVQQGLQQSFLHTLDSYRILQKAAPFDRRATSLAWHPTHPSTVAVGSKGGDIMLWNFGIKDKPTFIKGAAWHPRYNLIVVGRYPDPNFKSCTPYELRTIDVFDGNSGKMMCQLYDPESSGISSLNEFNPMGDTLASAMGYHILIWSQEEARTRK

SEQ ID NO: 10063 - protein, 340 aa, Homo sapiens [sequence omitted]

SEQ ID NO: 10064 - protein, 1089 aa, Homo sapiens
MQKASVLLFLAWVCFLFYAGIALFTSGFLLTRLELTNHSSCQEPPGPGSLPWGSQGKPGACWMASRFSRVVLVLIDALRFDFAQPQHSHVPREPPVSLPFLGKLSSLQRILEIQPHHARLYRSQVDPPTTTMQRLKALTTGSLPTFIDAGSNFASHAIVEDNLIKQLTSAGRRVVFMGDDTWKDLFPGAFSKAFFFPSFNVRDLDTVDNGILEHLYPTMDSGEWDVLIAHFLGVDHCGHKHGPHHPEMAKKLSQMDQVIQGLVERLENDTLLVVAGDHGMTTNGDHGGDSELEVSAALFLYSPTAVFPSTPPEEPEVIPQVSLVPTLALLLGLPIPFGNIGEVMAELFSGGEDSQPHSSALAQASALHLNAQQVSRFLHTYSAATQDLQAKELHQLQNLFSKASADYQWLLQSPKGAEATLPTVIAELQQFLRGARAMCIESWARFSLVRMAGGTALLAASCFICLLASQWAISPGFPFCPLLLTPVAWGLVGAIAYAGLLGTIELKLDLVLLGAVAAVSSFLPFLWKAWAGWGSKRPLATLFPIPGPVLLLLLFRLAVFFSDSFVVAEARATPFLLGSFILLLVVQLHWEGQLLPPKLLTMPRLGTSATTNPPRHNGAYALRLGIGLLLCTRLAGLFHRCPEETPVCHSSPWLSPLASMVGGRAKNLWYGACVAALVALLAAVRLWLRRYGNLKSPEPPMLFVRWGLPLMALGTAAYWALASGADEAPPRLRVLVSGASMVLPRAVAGLAASGLALLLWKPVTVLVKAGAGAPRTRTVLTPFSGPPTSQADLDYVVPQIYRHMQEEFRGRLERTKSQGPLTVAAYQLGSVYSAAMVTALTLLAFPLLLLHAERISLVFLLLFLQSFLLLHLLAAGIPVTTPGPFTVPWQAVSAWALMATQTFYSTGHQPVFPAIHWHAAFVGFPEGHGSCTWLPALLVGANTFASHLLFAVGCPLLLLWPFLCESQGLRKRQQPPGNEADARVRPEEEEEPLMEMRLRDAPQHFYAALLQLGLKYLFILGIQILACALAASILRRHLMVWKVFAPKFIFEAVGFIVSSVGLLLGIALVMRVDGAVSSWFRQLFLAQQR

SEQ ID NO: 10065 - protein, 1905 aa, Homo sapiens
MRRQWGALLLGALLCAHGLASSPECACGRSHFTCAVSALGECTCIPAQWQCDGDNDCGDHSDEDGCILPTCSPLDFHCDNGKCIRRSWVCDGDNDCEDDSDEQDCPPRECEEDEFPCQNGYCIRSLWHCDGDNDCGDNSDEQCDMRKCSDKEFRCSDGSCIAEHWYCDGDTDCKDGSDEENCPSAVPAPPCNLEEFQCAYGRCILDIYHCDGDDDCGDWSDESDCSSHQPCRSGEFMCDSGLCINAGWRCDGDADCDDQSDERNCTTSMCTAEQFRCHSGRCVRLSWRCDGEDDCADNSDEENCENTGSPQCALDQFLCWNGRCIGQRKLCNGVNDCGDNSDESPQQNCRPRTGEENCNVNNGGCAQKCQMVRGAVQCTCHTGYRLTEDGHTCQDVNECAEEGYCSQGCTNSEGAFQCWCETGYELRPDRRSCKALGPEPVLLFANRIDIRQVLPHRSEYTLLLNNLENAIALDFHHRRELVFWSDVTLDRILRANLNGSNVEEVVSTGLESPGGLAVDWVHDKLYWTDSGTSRIEVANLDGAHRKVLLWQNLEKPRAIALHPMEGTIYWTDWGNTPRIEASSMDGSGRRIIADTHLFWPNGLTIDYAGRRMYWVDAKHHVIERANLDGSHRKAVISQGLPHPFAITVFEDSLYWTDWHTKSINSANKFTGKNQEIIRNKLHFPMDIHTLHPQRQPAGKNRCGDNNGGCTHLCLPSGQNYTCACPTGFRKISSHACAQSLDKFLLFARRMDIRRISFDTEDLSDDVIPLADVRSAVALDWDSRDDHVYWTDVSTDTISRAKWDGTGQEVVVDTSLESPAGLAIDWVTNKLYWTDAGTDRIEVANTDGSMRTVLIWENLDRPRDIVVEPMGGYMYWTDWGASPKIERAGMDASGRQVIISSNLTWPNGLAIDYGSQRLYWADAGMKTIEFAGLDGSKRKVLIGSQLPHPFGLTLYGERIYWTDWQTKSIQSADRLTGLDRETLQENLENLMDIHVFHRRRPPVSTPCAMENGGCSHLCLRSPNPSGFSCTCPTGINLLSDGKTCSPGMNSFLIFARRIDIRMVSLDIPYFADVVVPINITMKNTIAIGVDPQEGKVYWSDSTLHRISRANLDGSQHEDIITTGLQTTDGLAVDAIGRKVYWTDTGTNRIEVGNLDGSMRKVLVWQNLDSPRAIVLYHEMGFMYWTDWGENAKLERSGMDGSDRAVLINNNLGWPNGLTVDKASSQLLWADAHTERIEAADLNGANRHTLVSPVQHPYGLTLLDSYIYWTDWQTRSIHRADKGTGSNVILVRSNLPGLMDMQAVDRAQPLGFNKCGSRNGGCSHLCLPRPSGFSCACPTGIQLKGDGKTCDPSPETYLLFSSRGSIRRISLDTSDHTDVHVPVPELNNVISLDYDSVDGKVYYTDVFLDVIRRADLNGSNMETVIGRGLKTTDGLAVDWVARNLYWTDTGRNTIEASRLDGSCRKVLINNSLDEPRAIAVFPRKGYLFWTDWGHIAKIERANLDGSERKVLINTDLGWPNGLTLDYDTRRIYWVDAHLDRIESADLNGKLRQVLVSHVSHPFALTQQDRWIYWTDWQTKSIQRVDKYSGRNKETVLANVEGLMDIIVVSPQRQTGTNACGVNNGGCTHLCFARASDFVCACPDEPDSRPCSLVPGLVPPAPRATGMSEKSPVLPNTPPTTLYSSTTRTRTSLEEVEGRCSERDARLGLCARSNDAVPAAPGEGLHISYAIGGLLSILLILVVIAALMLYRHKKSKFTDPGMGNLTYSNPSYRTSTQEVKIEAIPKPAMYNQLCYKKEGGPDHNYTKEKIKIVEGICLLSGDDAEWDDLKQLRSSRGGLLRDHVCMKTDTVSIQASSGSLDDTETEQLLQEEQSECSSVHTAATPERRGSLPDTGWKHERKLSSESQV

SEQ ID NO: 10066 - protein, 392 aa, Homo sapiens
MSTRESFNPESYELDKSFRLTRFTELKGTGCKVPQDVLQKLLESLQENHFQEDEQFLGAVMPRLGIGMDTCVIPLRHGGLSLVQTTDYIYPIVDDPYMMGRIACANVLSDLYAMGVTECDNMLMLLGVSNKMTDRERDKVMPLIIQGFKDAAEEAGTSVTGGQTVLNPWIVLGGVATTVCQPNEFIMPDNAVPGDVLVLTKPLGTQVAVAVHQWLDIPEKWNKIKLVVTQEDVELAYQEAMMNMARLNRTAAGLMHTFNAHAATDITGFGILGHAQNLAKQQRNEVSFVIHNLPVLAKMAAVSKACGNMFGLMHGTCPETSGGLLICLPREQAARFCAEIKSPKYGEGHQAWIIGIVEKGNRTARIIDKPRIIEVAPQVATQNVNPTPGATS

SEQ ID NO: 10067 - protein, 218 aa, Homo sapiens
MGRVFLTGEKANSILKRYPRANGFFEEIRQGNIERECKEEFCTFEEAREAFENNEKTKEFWSTYTKAQQGESNRGSDWFQFYLTFPLIFGLFIILLVIFLIWRCFLRNKTRRQTVTEGHIPFPQHLNIITPPPPPDEVFDSSGLSPGFLGYVVGRSDSVSTRLSNCDPPPTYEEATGQVNLQRSETEPHLDPPPEYEDIVNSNSASAIPMVPVVTTIK

SEQ ID NO: 10068 - protein, 1173 aa, Homo sapiens
MAGAQPGVHALQLKPVCVSDSLKKGTKFVKWDDDSTIVTPIILRTDPQGFFFYWTDQNKETELLDLSLVKDARCGRHAKAPKDPKLRELLDVGNIGRLEQRMITVVYGPDLVNISHLNLVAFQEEVAKEWTNEVFSLATNLLAQNMSRDAFLEKAYTKLKLQVTPEGRIPLKNIYRLFSADRKRVETALEACSLPSSRNDSIPQEDFTPEVYRVFLNNLCPRPEIDNIFSEFGAKSKPYLTVDQMMDFINLKQRDPRLNEILYPPLKQEQVQVLIEKYEPNNSLARKGQISVDGFMRYLSGEENGVVSPEKLDLNEDMSQPLSHYFINSSHNTYLTAGQLAGNSSVEMYRQVLLSGCRCVELDCWKGRTAEEEPVITHGFTMTTEISFKEVIEAIAECAFKTSPFPILLSFENHVDSPKQQAKMAEYCRLIFGDALLMEPLEKYPLESGVPLPSPMDLMYKILVKNKKKSHKSSEGSGKKKLSEQASNTYSDSSSMFEPSSPGAGEADTESDDDDDDDDCKKSSMDEGTAGSEAMATEEMSNLVNYIQPVKFESFEISKKRNKSFEMSSFVETKGLEQLTKSPVEFVEYNKMQLSRIYPKGTRVDSSNYMPQLFWNAGCQMVALNFQTMDLAMQINMGMYEYNGKSGYRLKPEFMRRPDKHFDPFTEGIVDGIVANTLSVKIISGQFLSDKKVGTYVEVDMFGLPVDTRRKAFKTKTSQGNAVNPVWEEEPIVFKKVVLPTLACLRIAVYEEGGKFIGHRILPVQAIRPGYHYICLRNERNQPLTLPAVFVYIEVKDYVPDTYADVIEALSNPIRYVNLMEQRAKQLAALTLEDEEEVKKEADPGETPSEAPSEARTTPAENGVNHTTTLTPKPPSQALHSQPAPGSVKAPAKTEDLIQSVLTEVEAQTIEELKQQKSFVKLQKKHYKEMKDLVKRHHKKTTDLIKEHTTKYNEIQNDYLRRRAALEKSAKKDSKKKSEPSSPDHGSSTIEQDLAALDAEMTQKLIDLKDKQQQQLLNLRQEQYYSEKYQKREHIKLLIQKLTDVAEECQNNQLKKLKEICEKEKKELKKKMDKKRQEKITEAKSKDKSQMEEEKTEMIRSYIQEVVQYIKRLEEAQSKRQEKLVEKHKEIRQQILDEKPKGEGSSSFLSETCHEDPSVSPNFTPPNPQALKW

SEQ ID NO: 10069 - protein, 82 aa, Homo sapiens
MGREFGNLTRMRHVISYSLSPFEQRAYPHVFTKGIPNVLRRIRESFFRVVPQFVVFYLIYTWGTEEFERSKRKNPAAYENDK

SEQ ID NO: 10070 - protein, 454 aa, Homo sapiens
MARPNKFLLWFCCFAWLCFPISLGSQASGGEAQIAASAELESGAMPWSLLQHIDERDRAGLLPALFKVLSVGRGGSPRLQPDSRALHYMKKLYKTYATKEGIPKSNRSHLYNTVRLFTPCTRHKQAPGDQVTGILPSVELLFNLDRITTVEHLLKSVLLYNINNSVSFSSAVKCVCNLMIKEPKSSSRTLGRAPYSFTFNSQFEFGKKHKWIQIDVTSLLQPLVASNKRSIHMSINFTCMKDQLEHPSAQNGLFNMTLVSPSLILYLNDTSAQAYHSWYSLHYKRRPSQGPDQERSLSAYPVGEEAAEDGRSSHHRHRRGQETVSSELKKPLGPASFNLSEYFRQFLLPQNECELHDFRLSFSQLKWDNWIVAPHRYNPRYCKGDCPRAVGHRYGSPVHTMVQNIIYEKLDSSVPRPSCVPAKYSPLSVLTIEPDGSIAYKEYEDMIATKCTCR

SEQ ID NO: 10071 - protein, 852 aa, Homo sapiens
MEALGPGGDRASPASSTSSLDLWHLSMRADSAYSSFSAASGGPEPRTQSPGTDLLPYLDWDYVRVVWGGPGPAPPDAALCTSPRPRPAVAARSGPQPTEVPGTPGPLNRQATPLLYALAAEAEAAAQAAEPPSPPASRAAYRQRLQGAQRRVLRETSFQRKELRMSLPARLRPTVPARPPATHPRSASLSHPGGEGEPARSRAPAPGTAGRGPLANQQRKWCFSEPGKLDRVGRGGGPARECLGEACSSSGLPGPEPLEFQHPALAKFEDHEVGWLPETQPQGSMNLDSGSLKLGDAFRPASRSRSASGEVLGSWGGSGGTIPIVQAVPQGAETPRPLFQTKLSRFLPQKEAAVMYPAELPQSSPADSEQRVSETCIVPAWLPSLPDEVFLEEAPLVRMRSPPDPHASQGPPASVHASDQPYGTGLGQRTGQVTVPTEYPLHECPGTAGADDCWQGVNGSVGISRPTSHTPTGTANDNIPTIDPTGLTTNPPTAAESDLLKPVPADALGLSGNDTPGPSHNTALARGTGQPGSRPTWPSQCLEELVQELARLDPSLCDPLASQPSPEPPLGLLDGLIPLAEVRAAMRPACGEAGEEAASTFEPGSYQFSFTQLLPAPREETRLENPATHPVLDQPCGQGLPAPNNSIQGKKVELAARLQKMLQDLHTEQERLQGEAQAWARRQAALEAAVRQACAPQELERFSRFMADLERVLGLLLLLGSRLARVRRALARAASDSDPDEQASLLQRLRLLQRQEEDAKELKEHVARRERAVREVLVRALPVEELRVYCALLAGKAAVLAQQRNLDERIRLLQDQLDAIRDDLGHHAPSPSPARPPGTCPPVQPPFPLLLT

SEQ ID NO: 10072 - protein, 138 aa, Homo sapiens
MTWRQAVLLSCFSAVVLLSMLREGTSVSVGTMQMAGEEASEDAKQKIFMQESDASNFLKRRGKRSPKSRDEVNVENRQKLRVDELRREYYEEQRNEFENFVEEQNDEQEERSREAVEQWRQWHYDGLHPSYLYNRHHT

SEQ ID NO: 10073 - protein, 471 aa, Homo sapiens
MDILCEENTSLSSTTNSLMQLNDDTRLYSNDFNSGEANTSDAFNWTVDSENRTNLSCEGCLSPSCLSLLHLQEKNWSALLTAVVIILTIAGNILVIMAVSLEKKLQNATNYFLMSLAIADMLLGFLVMPVSMLTILYGYRWPLPSKLCAVWIYLDVLFSTASIMHLCAISLDRYVAIQNPIHHSRFNSRTKAFLKIIAVWTISVGISMPIPVFGLQDDSKVFKEGSCLLADDNFVLIGSFVSFFIPLTIMVITYFLTIKSLQKEATLCVSDLGTRAKLASFSFLPQSSLSSEKLFQRSIHREPGSYTGRRTMQSISNEQKACKVLGIVFFLFVVMWCPFFITNIMAVICKESCNEDVIGALLNVFVWIGYLSSAVNPLVYTLFNKTYRSAFSRYIQCQYKENKKPLQLILVNTIPALAYKSSQLQMGQKKNSKQDAKTTDNDCSMVALGKQHSEEASKDNSDGVNEKVSCV

SEQ ID NO: 10074 - protein, 242 aa, Homo sapiens
MALKNKFSCLWILGLCLVATTSSKIPSITDPHFIDNCIEAHNEWRGKVNPPAADMKYMIWDKGLAKMAKAWANQCKFEHNDCLDKSYKCYAAFEYVGENIWLGGIKSFTPRHAITAWYNETQFYDFDSLSCSRVCGHYTQLVWANSFYVGCAVAMCPNLGGASTAIFVCNYGPAGNFANMPPYVRGESCSLCSKEEKCVKNLCRTPQLIIPNQNPFLKPTGRAPQQTAFNPFSLGFLLLRIF

SEQ ID NO: 10075 - protein, 253 aa, Homo sapiens
MKFAVYLPPKAETGKCPALYWLSGLTCTEQNFISKSGYHQSASEHGLVVIAPDTSPRGCNIKGEDESWDFGTGAGFYVDATEDPWKTNYRMYSYVTEELPQLINANFPVDPQRMSIFGHSMGGHGALICALKNPGKYKSVSAFAPICNPVLCPWGKKAFSGYLGTDQSKWKAYDATHLVKSYPGSQLDILIDQGKDDQFLLDGQLLPDNFIAACTEKKIPVVFRLQEGYDHSYYFIATFITDHIRHHAKYLNA

SEQ ID NO: 10076 - protein, 369 aa, Homo sapiens
MNTLFNTTFETEEASHHEACVRLRPQTYDLQESNVQLKLTIVDAVGFGDQINKDESYRPIVDYIDAQFENYLQEELKIRRSLFDYHDTRIHVCLYFITPTGHSLKSLDLVTMKKLDSKVNIIPIIAKADTISKSELHKFKIKIMGELVSNGVQIYQFPTDDEAVAEINAVMNAHLPFAVVGSTEEVKVGNKLVRARQYPWGVVQVENENHCDFVKLREMLIRVNMEDLREQTHSRHYELYRRCKLEEMGFQDSDGDSQPFSLQETYEAKRKEFLSELQRKEEEMRQMFVNKVKETELELKEKERELHEKFEHLKRVHQEEKRKVEEKRRELEEETNAFNRRKAAVEALQSQALHATSQQPLRKDKDKKN

SEQ ID NO: 10077 - protein, 483 aa, Homo sapiens
MAATDLERFSNAEPEPRSLSLGGHVGFDSLPDQLVSKSVTQGFSFNILCVGETGIGKSTLMNTLFNTTFETEEASHHEACVRLRPQTYDLQESNVQLKLTIVDAVGFGDQINKDESYRPIVDYIDAQFENYLQEELKIRRSLFDYHDTRIHVCLYFITPTGHSLKSLDLVTMKKLDSKVNIIPIIAKADTISKSELHKFKIKIMGELVSNGVQIYQFPTDDEAVAEINAVMNAHLPFAVVGSTEEVKVGNKLVRARQYPWGVVQVENENHCDFVKLREMLIRVNMEDLREQTHSRHYELYRRCKLEEMGFQDSDGDSQPFSLQETYEAKRKEFLSELQRKEEEMRQMFVNKVKETELELKEKERELHEKFEHLKRVHQEEKRKVEEKRRELEEETNAFNRRKAAVEALQSQALHATSQQPLRKDKDKKNRSDIGAHQPGMSLSSSKVMMTKASVEPLNCSSWWPAIQCCSCLVRDATWREGFL

SEQ ID NO: 10078 - protein, 282 aa, Homo sapiens
MALKQISSNKCFGGLQKVFEHDSVELNCKMKFAVYLPPKAETGKCPALYWLSGLTCTEQNFISKSGYHQSASEHGLVVIAPDTSPRGCNIKGEDESWDFGTGAGFYVDATEDPWKTNYRMYSYVTEELPQLINANFPVDPQRMSIFGHSMGGHGALICALKNPGKYKSVSAFAPICNPVLCPWGKKAFSGYLGTDQSKWKAYDATHLVKSYPGSQLDILIDQGKDDQFLLDGQLLPDNFIAACTEKKIPVVFRLQEGYDHSYYFIATFITDHIRHHAKYLNA

SEQ ID NO: 10079 - protein, 702 aa, Homo sapiens
MPINKSEKPESCDNVKVVVRCRPLNEREKSMCYKQAVSVDEMRGTITVHKTDSSNEPPKTFTFDTVFGPESKQLDVYNLTARPIIDSVLEGYNGTIFAYGQTGTGKTFTMEGVRAIPELRGIIPNSFAHIFGHIAKAEGDTRFLVRVSYLEIYNEEVRDLLGKDQTQRLEVKERPDVGVYIKDLSAYVVNNADDMDRIMTLGHKNRSVGATNMNEHSSRSHAIFTITIECSEKGIDGNMHVRMGKLHLVDLAGSERQAKTGATGQRLKEATKINLSLSTLGNVISALVDGKSTHVPYRNSKLTRLLQDSLGGNSKTMMCANIGPADYNYDETISTLRYANRAKNIKNKARINEDPKDALLRQFQKEIEELKKKLEEGEEISGSDISGSEEDDDEEGEVGEDGEKRKKRRDQAGKKKVSPDKMIEMQAKIDEERKALETKLDMEEEERNKARAELEKREKDLLKAQQEHQSLLEKLSALEKKVIVGGVDLLAKAEEQEKLLEESNMELEERRKRAEQLRRELEEKEQERLDIEEKYTSLQEEAQGKTKKLKKVWTMLMAAKSEMADLQQEHQREIEGLLENIRQLSRELRLQMLIIDNFIPRDYQEMIENYVHWNEDIGEWQLKCVAYTGNNMRKQTPVPDKKEKDPFEVDLSHVYLAYTEESLRQSLMKLERPRTSKGKARPKTGRRKRSAKPETVIDSLLQ

SEQ ID NO: 10080 - protein, 1989 aa, Homo sapiens
MATADTPAPASSGLSPKEEGELEDGEISDDDNNSQIRSRSSSSSSGGGLLPYPRRRPPHSARGGGSGGGGGSSSSSSSSQQQLRNFSRSRHASERGHLRGPSSYRPKEPFRSHPPSVRMPSSSLSESSPRPSFWERSHLALDRFRFRGRPYRGGSRWSRGRGVGERGGKPGCRPPLGGGAGSGFSSSQSWREPSPPRKSSKSFGRSPSRKQNYSSKNENCVEETFEDLLLKYKQIQLELECINKDEKLALSSKEENVQEDPKTLNFEDQTSTDNVSITKDSSKEVAPEEKTQVKTFQAFELKPLRQKLTLPGDKNRLKKVKDGAKPLSLKSDTTDSSQGLQDKEQNLTRRISTSDILSEKKLGEDEEELSELQLRLLALQSASKKWQQKEQQVMKESKEKLTKTKTVQQKVKTSTKTHSAKKVSTTAKQALRKQQTKAWKKLQQQKEQERQKEEDQRKQAEEEERRKREEEIRKIRDLSNQEEQYNRFMKLVGGKRRSRSKSSDPDLRRSLDKQPTDSGGGIYQYDNYEEVAMDTDSETSSPAPSPVQPPFFSECSLGYFSPAPSLSLPPPPQVSSLPPLSQPYVEGLCVSLEPLPPLPPLPPLPPEDPEQPPKPPFADEEEEEEMLLREELLKSLANKRAFKPEETSSNSDPPSPPVLNNSHPVPRSNLSIVSINTVSQPRIQNPKFHRGPRLPRTVISLPKHKSVVVTLNDSDDSESDGEASKSTNSVFGGLESMIKEARRTAEQASKPKVPPKSEKENDPLRTPEALPEEKKIEYRLLKEEIANREKQRLIKSDQLKTSSSSPANSDVEIDGIGRIAMVTKQVTDAESKLKKHRILLMKDESVLKNLVQQEAKKKESVRNAEAKITKLTEQLQATEKILNVNRMFLKKLQEQIHRVQQRVTIKKALTLKYGEELARAKAVASKEIGKRKLEQDRFGPNKMMRLDSSPVSSPRKHSAELIAMEKRRLQKLEYEYALKIQKLKEARALKAKEQQNISPVVEEEPEFSLPQPSLHDLTQDKLTLDTEENDVDDEILSGSSRERRRSFLESNYFTKPNLKHTDTANKECINKLNKNTVEKPELFLGLKIGELQKLYSKADSLKQLILKTTTGITEKVLHGQEISVDVDFVTAQSKTMEVKPCPFRPYHSPLLVFKSYRFSPYYRTKEKLPLSSVSYSNMIEPDQCFCRFDLTGTCNDDDCQWQHIQDYTLSRKQLFQDILSYNLSLIGCAETSTNEEITASAEKYVEKLFGVNKDRMSMDQMAVLLVSNINESKGHTPPFTTYKDKRKWKPKFWRKPISDNSFSSDEEQSTGPIKYAFQPENQINVPALDTVVTPDDVRYFTNETDDIANLEASVLENPSHVQLWLKLAYKYLNQNEGECSESLDSALNVLARALENNKDNPEIWCHYLRLFSKRGTKDEVQEMCETAVEYAPDYQSFWTFLHLESTFEEKDYVCERMLEFLMGAAKQETSNILSFQLLEALLFRVQLHIFTGRCQSALAILQNALKSANDGIVAEYLKTSDRCLAWLAYIHLIEFNILPSKFYDPSNDNPSRIVNTESFVMPWQAVQDVKTNPDMLLAVFEDAVKACTDESLAVEERIEACLPLYTNMIALHQLLERYEAAMELCKSLLESCPINCQLLEALVALYLQTNQHDKARAVWLTAFEKNPQNAEVFYHMCKFFILQNRGDNLLPFLRKFIASFFKPGFEKYNNLDLFRYLLNIPGPIDIPSRLCKGNFDDDMFNHQVPYLWLIYCLCHPLQSSIKETVEAYEAALGVAMRCDIVQKIWMDYLVFANNRAAGSRNKVQEFKFFTDLVNRCLVTVPARYPIPFSSADYWSNYEFHNRVIFFYLSCVPKTQHSKTLERFCSVMPANSGLALRLLQHEWEESNVQILKLQAKMFTYNIPTCLATWKIAIAAEIVLKGQREVHRLYQRALQKLPLCASLWKDQLLFEASEGGKTDNLRKLVSKCQEIGVSLNELLNLNSNKTESKNH

SEQ ID NO: 10081 - protein, 699 aa, Homo sapiens
MPINKSEKPESCDNVKVVVRCRPLNEREKSMCYKQAVSVDEMRGTITVHKTDSSNEPPKTFTFDTVFGPESKQLDVYNLTARPIIDSVLEGYNGTIFAYGQTGTGKTFTMEGVRAIPELRGIIPNSFAHIFGHIAKAEGDTRFLVRVSYLEIYNEEVRDLLGKDQTQRLEVKERPDVGVYIKDLSAYVVNNADDMDRIMTLGHKNRSVGATNMNEHSSRSHAIFTITIECSEKGIDGNMHVRMGKLHLVDLAGSERQAKTGATGQRLKEATKINLSLSTLGNVISALVDGKSTHVPYRNSKLTRLLQDSLGGNSKTMMCANIGPADYNYDETISTLRYANRAKNIKNKARINEDPKDALLRQFQKEIEELKKKLEEGEEISGSDISGSEEDDDEEGEVGEDGEKRKKRRGKKKVSPDKMIEMQAKIDEERKALETKLDMEEEERNKARAELEKREKDLLKAQQEHQSLLEKLSALEKKVIVGGVDLLAKAEEQEKLLEESNMELEERRKRAEQLRRELEEKEQERLDIEEKYTSLQEEAQGKTKKLKKVWTMLMAAKSEMADLQQEHQREIEGLLENIRQLSRELRLQMLIIDNFIPRDYQEMIENYVHWNEDIGEWQLKCVAYTGNNMRKQTPVPDKKEKDPFEVDLSHVYLAYTEESLRQSLMKLERPRTSKGKARPKTGRRKRSAKPETVIDSLLQ

SEQ ID NO: 10082 - protein, 336 aa, Homo sapiens
MEKLRLLGLRYQEYVTRHPAATAQLETAVRGFSYLLAGRFADSHELSELVYSASNLLVLLNDGILRKELRKKLPVSLSQQKLLTWLSVLECVEVFMEMGAAKVWGEVGRWLVIALVQLAKAVLRMLLLLWFKAGLQTSPPIVPLDRETQAQPPDGDHSPGNHEQSYVGKRSNRVVRTLQNTPSLHSRHWGAPQQREGRQQQHHEELSATPTPLGLQETIAEFLYIARPLLHLLSLGLWGQRSWKPWLLAGVVDVTSLSLLSDRKGLTRRERRELRRRTILLLYYLLRSPFYDRFSEARILFLLQLLADHVPGVGLVTRPLMDYLPTWQKIYFYSWG

SEQ ID NO: 10083 - protein, 571 aa, Homo sapiens
MSHQPLSCLTEKEDSPSESTGNGPPHLAHPNLDTFTPEELLQQMKELLTENHQLKEAMKLNNQAMKGRFEELSAWTEKQKEERQFFEIQSKEAKERLMALSHENEKLKEELGKLKGKSERSSEDPTDDSRLPRAEAEQEKDQLRTQVVRLQAEKADLLGIVSELQLKLNSSGSSEDSFVEIRMAEGEAEGSVKEIKHSPGPTRTVSTGTSRSADGAKNYFEHEELTVSQLLLCLREGNQKVERLEVALKEAKERVSDFEKKTSNRSEIETQTEGSTEKENDEEKGPETVGSEVEALNLQVTSLFKELQEAHTKLSEAELMKKRLQEKCQALERKNSAIPSELNEKQELVYTNKKLELQVESMLSEIKMEQAKTEDEKSKLTVLQMTHNKLLQEHNNALKTIEELTRKESEKVDRAVLKELSEKLELAEKALASKQLQMDEMKQTIAKQEEDLETMTILRAQMEVYCSDFHAERAAREKIHEEKEQLALQLAVLLKENDAFEDGGRQSLMEMQSRHGARTSDSDQQAYLVQRGAEDRDWRQQRNIPIHSCPKCGEVLPDIDTLQIHVMDCII

SEQ ID NO: 10084 - protein, 586 aa, Homo sapiens
MSWLFGINKGPKGEGAGPPPPLPPAQPGAEGGGDRGLGDRPAPKDKWSNFDPTGLERAAKAARELEHSRYAKDALNLAQMQEQTLQLEQQSKLKEYEAAVEQLKSEQIRAQAEERRKTLSEETRQHQARAQYQDKLARQRYEDQLKQQQLLNEENLRKQEESVQKQEAMRRATVEREMELRHKNEMLRVEAEARARAKAERENADIIREQIRLKAAEHRQTVLESIRTAGTLFGEGFRAFVTDWDKVTATVAGLTLLAVGVYSAKNATLVAGRFIEARLGKPSLVRETSRITVLEALRHPIQVSRRLLSRPQDALEGVVLSPSLEARVRDIAIATRNTKKNRSLYRNILMYGPPGTGKTLFAKKLALHSGMDYAIMTGGDVAPMGREGVTAMHKLFDWANTSRRGLLLFVDEADAFLRKRATEKISEDLRATLNAFLYRTGQHSNKFMLVLASNQPEQFDWAINDRINEMVHFDLPGQEERERLVRMYFDKYVLKPATEGKQRLKLAQFDYGRKCSEVARLTEGMSGREIAQLAVSWQATAYASEDGVLTEAMMDTRVQDAVQQHQQKMCWLKAEGPGRGDEPSPS

SEQ ID NO: 10085 - protein, 370 aa, Homo sapiens
MLPRLICINDYEQHAKSVLPKSIYDYYRSGANDEETLADNIAAFSRWKLYPRMLRNVAETDLSTSVLGQRVSMPICVGATAMQRMAHVDGELATVRACQSLGTGMMLSSWATSSIEEVAEAGPEALRWLQLYIYKDREVTKKLVRQAEKMGYKAIFVTVDTPYLGNRLDDVRNRFKLPPQLRMKNFETSTLSFSPEENFGDDSGLAAYVAKAIDPSISWEDIKWLRRLTSLPIVAKGILRGDDAREAVKHGLNGILVSNHGARQLDGVPATIDVLPEIVEAVEGKVEVFLDGGVRKGTDVLKALALGAKAVFVGRPIVWGLAFQGEKGVQDVLEILKEEFRLAMALSGCQNVKVIDKTLVRKNPLAVSKI

SEQ ID NO: 10086 - protein, 124 aa, Homo sapiens
MAQSLALSLLILVLAFGIPRTQGSDGGAQDCCLKYSQRKIPAKVVRSYRKQEPSLGCSIPAILFLPRKRSQAELCADPKELWVQQLMQHLDKTPSPQKPAQGCRKDRGASKTGKKGKGSKGCKR

SEQ ID NO: 10087 - protein, 335 aa, Homo sapiens
MLGSGFKAERLRVNLRLVINRLKLLEKKKTELAQKARKEIADYLAAGKDERARIRVEHIIREDYLVEAMEILELYCDLLLARFGLIQSMKELDSGLAESVSTLIWAAPRLQSEVAELKIVADQLCAKYSKEYGKLCRTNQIGTVNDRLMHKLSVEAPPKILVERYLIEIAKNYNVPYEPDSVVMAEAPPGVETDLIDVGFTDDVKKGGPGRGGSGGFTAPVGGPDGTVPMPMPMPMPMPSANTPFSYPLPKGPVDDINADKNISSAQIVGPGPKPEASAKLPSRPADNYDNFVLPELPSVPDTLPTASAGASTSASEDIDFDDLSRRFEELKKKT

SEQ ID NO: 10088 - protein, 366 aa, Homo sapiens
MLGSGFKAERLRVNLRLVINRLKLLEKKKTELAQKARKEIADYLAAGKDERARIRVEHIIREDYLVEAMEILELYCDLLLARFGLIQSMKELDSGLAESVSTLIWAAPRLQSEVAELKIVADQLCAKYSKEYGKLCRTNQIGTVNDRLMHKLSVEAPPKILVERYLIEIAKNYNVPYEPDSVVMAEAPPGVETDLIDVGFTDDVKKGGPGRGGSGGFTAPVGGPDGTVPMPMPMPMPMPSANTPFSYPLPKGPSDFNGLPMGTYQAFPNIHPPQIPATPPSYESVDDINADKNISSAQIVGPGPKPEASAKLPSRPADNYDNFVLPELPSVPDTLPTASAGASTSASEDIDFDDLSRRFEELKKKT

SEQ ID NO: 10089 - protein, 104 aa, Homo sapiens
MALLLALSLLVLWTSPAPTLSGTNDAEDCCLSVTQKPIPGYIVRNFHYLLIKDGCRVPAVVFTTLRGRQLCAPPDQPWVERIIQRLQRTSAKASLALPGPVSSL

SEQ ID NO: 10090 - protein, 525 aa, Homo sapiens
MAGLWLGLVWQKLLLWGAASALSLAGASLVLSLLQRVASYARKWQQMRPIPTVARAYPLVGHALLMKPDGREFFQQIIEYTEEYRHMPLLKLWVGPVPMVALYNAENVEVILTSSKQIDKSSMYKFLEPWLGLGLLTSTGNKWRSRRKMLTPTFHFTILEDFLDIMNEQANILVKKLEKHINQEAFNCFFYITLCALDIICETAMGKNIGAQSNDDSEYVRAVYRMSEMIFRRIKMPWLWLDLWYLMFKEGWEHKKSLQILHTFTNSVIAERANEMNANEDCRGDGRGSAPSKNKRRAFLDLLLSVTDDEGNRLSHEDIREEVDTFMFEGHDTTAAAINWSLYLLGSNPEVQKKVDHELDDVFGKSDRPATVEDLKKLRYLECVIKETLRLFPSVPLFARSVSEDCEVAGYRVLKGTEAVIIPYALHRDPRYFPNPEEFQPERFFPENAQGRHPYAYVPFSAGPRNCIGQKFAVMEEKTILSCILRHFWIESNQKREELGLEGQLILRPSNGIWIKLKRRNADER

SEQ ID NO: 10091 - protein, 1749 aa, Homo sapiens
MSDTKVKVAVRVRPMNRRELELNTKCVVEMEGNQTVLHPPPSNTKQGERKPPKVFAFDYCFWSMDESNTTKYAGQEVVFKCLGEGILEKAFQGYNACIFAYGQTGSGKSFSMMGHAEQLGLIPRLCCALFKRISLEQNESQTFKVEVSYMEIYNEKVRDLLDPKGSRQSLKVREHKVLGPYVDGLSQLAVTSFEDIESLMSEGNKSRTVAATNMNEESSRSHAVFNIIITQTLYDLQSGNSGEKVSKVSLVDLAGSERVSKTGAAGERLKEGSNINKSLTTLGLVISSLADQAAGKGKSKFVPYRDSVLTWLLKDNLGGNSQTSMIATISPAADNYEETLSTLRYADRAKRIVNHAVVNEDPNAKVIRELREEVEKLREQLSQAEAMKAPELKEKLEESEKLIKELTVTWEEKLRKTEEIAQERQRQLESMGISLEMSGIKVGDDKCYLVNLNADPALNELLVYYLKDHTRVGADTSQDIQLFGIGIQPQHCEIDIASDGDVTLTPKENARSCVNGTLVCSTTQLWHGDRILWGNNHFFRINLPKRKRRDWLKDFEKETGPPEHDLDAASEASSEPDYNYEFAQMEVIMKTLNSNDPVQNVVQVLEKQYLEEKRSALEEQRLMYERELEQLRQQLSPDRQPQSSGPDRLAYSSQTAQQKVTQWAEERDELFRQSLAKLREQLVKANTLVREANFLAEEMSKLTDYQVTLQIPAANLSANRKRGAIVSEPAIQVRRKGKSTQVWTIEKLENKLIDMRDLYQEWKEKVPEAKRLYGKRGDPFYEAQENHNLIGVANVFLECLFCDVKLQYAVPIISQQGEVAGRLHVEVMRVTGAVPERVVEDDSSENSSESGSLEVVDSSGEIIHRVKKLTCRVKIKEATGLPLNLSNFVFCQYTFWDQCESTVAAPVVDPEVPSPQSKDAQYTVTFSHCKDYVVNVTEEFLEFISDGALAIEVWGHRCAGNGSSIWEVDSLHAKTRTLHDRWNEVTRRIEMWISILELNELGEYAAVELHQAKDVNTGGIFQLRQGHSRRVQVTVKPVQHSGTLPLMVEAILSVSIGCVTARSTKLQRGLDSYQEEDLNCVRERWSDALIKRREYLDEQIKKVSNKTEKTEDDVEREAQLVEQWVGLTEERNAVLVPAPGSGIPGAPADWIPPPGMETHIPVLFLDLNADDLSANEQLVGPHASGVNSILPKEHGSQFFYLPIIKHSDDEVSATASWDSSVHDSVHLNRVTPQNERIYLIVKTTVQLSHPAAMELVLRKRIAANIYNKQSFTQSLKRRISLKNIFYSCGVTYEIVSNIPKATEEIEDRETLALLAARSENEGTSDGETYIEKYTRGVLQVENILSLERLRQAVTVKEALSTKARHIRRSLSTPNVHNVSSSRPDLSGFDEDDKGWPENQLDMSDYSSSYQDVACYGTLPRDSPRRNKEGCTSETPHALTVSPFKAFSPQPPKFFKPLMPVKEEHKKRIALEARPLLSQEDSEEEENELEAINRKLISSQPYVPVEFADFSVYNASLENREWFSSKVDLSNSRVLEKEVSRSPTTSSITSGYFSHSASNATLSDMVVPSSDSSDQLAIQTKDADSTEHSTPSLVHDFRPSSNKELTEVEKGLVKDKIIVVPLKENSALAKGSPSSQSIPEKNSKSLCRTGSCSELDACPSKISQPARGFCPREVTVEHTTNILEDHSFTEFMGVSEGKDFDGLTDSSAGELSSRRSLPNKTGGKTVSDGLHHPSQLHSKLENDQGGTTSR

SEQ ID NO: 10092 - protein, 1312 aa, Homo sapiens
MSRIEKMSILGVRSFGIEDKDKQIITFFSPLTILVGPNGAGKTTIIECLKYICTGDFPPGTKGNTFVHDPKVAQETDVRAQIRLQFRDVNGELIAVQRSMVCTQKSKKTEFKTLEGVITRTKHGEKVSLSSKCAEIDREMISSLGVSKAVLNNVIFCHQEDSNWPLSEGKALKQKFDEIFSATRYIKALETLRQVRQTQGQKVKEYQMELKYLKQYKEKACEIRDQITSKEAQLTSSKEIVKSYENELDPLKNRLKEIEHNLSKIMKLDNEIKALDSRKKQMEKDNSELEEKMEKVFQGTDEQLNDLYHNHQRTVREKERKLVDCHRELEKLNKESRLLNQEKSELLVEQGRLQLQADRHQEHIRARDSLIQSLATQLELDGFERGPFSERQIKNFHKLVRERQEGEAKTANQLMNDFAEKETLKQKQIDEIRDKKTGLGRIIELKSEILSKKQNELKNVKYELQQLEGSSDRILELDQELIKAERELSKAEKNSNVETLKMEVISLQNEKADLDRTLRKLDQEMEQLNHHTTTRTQMEMLTKDKADKDEQIRKIKSRHSDELTSLLGYFPNKKQLEDWLHSKSKEINQTRDRLAKLNKELASSEQNKNHINNELKRKEEQLSSYEDKLFDVCGSQDFESDLDRLKEEIEKSSKQRAMLAGATAVYSQFITQLTDENQSCCPVCQRVFQTEAELQEVISDLQSKLRLAPDKLKSTESELKKKEKRRDEMLGLVPMRQSIIDLKEKEIPELRNKLQNVNRDIQRLKNDIEEQETLLGTIMPEEESAKVCLTDVTIMERFQMELKDVERKIAQQAAKLQGIDLDRTVQQVNQEKQEKQHKLDTVSSKIELNRKLIQDQQEQIQHLKSTTNELKSEKLQISTNLQRRQQLEEQTVELSTEVQSLYREIKDAKEQVSPLETTLEKFQQEKEELINKKNTSNKIAQDKLNDIKEKVKNIHGYMKDIENYIQDGKDDYKKQKETELNKVIAQLSECEKHKEKINEDMRLMRQDIDTQKIQERWLQDNLTLRKRNEELKEVEEERKQHLKEMGQMQVLQMKSEHQKLEENIDNIKRNHNLALGRQKGYEEEIIHFKKELREPQFRDAEEKYREMMIVMRTTELVNKDLDIYYKTLDQAIMKFHSMKMEEINKIIRDLWRSTYRGQDIEYIEIRSDADENVSASDKRRNYNYRVVMLKGDTALDMRGRCSAGQKVLASLIIRLALAETFCLNCGIIALDEPTTNLDRENIESLAHALVEIIKSRSQQRNFQLLVITHDEDFVELLGRSEYVEKFYRIKKNIDQCSEIVKCSVSSLGFNVH

SEQ ID NO: 10093 - protein, 270 aa, Homo sapiens
MLRQLLLAALCLAGPPAPARACQLPSEWRPLSEGCRAELAETIVYARVLALHPEAPGLYNHLPWQYHAGQGGLFYSAEVEMLCDQAWGSMLEVPAGSRLNLTGLGYFSCHSHTVVQDYSYFFFLRMDENYNLLPHGVNFQDAIFPDTQENRRMFSSLFQFSNCSQGQQLATFSSDWEIQEDSRLMCSSVQKALFEEEDHVKKLQQKVATLEKRNRQLRERVKKVKRSLRQARKKGRHLELANQKLSEKLAAGALPHINARGPVRPPYLRG

SEQ ID NO: 10094 - protein, 1770 aa, Homo sapiens
MSDTKVKVAVRVRPMNRRELELNTKCVVEMEGNQTVLHPPPSNTKQGERKPPKVFAFDYCFWSMDESNTTKYAGQEVVFKCLGEGILEKAFQGYNACIFAYGQTGSGKSFSMMGHAEQLGLIPRLCCALFKRISLEQNESQTFKVEVSYMEIYNEKVRDLLDPKGSRQSLKVREHKVLGPYVDGLSQLAVTSFEDIESLMSEGNKSRTVAATNMNEESSRSHAVFNIIITQTLYDLQSGNSGEKVSKVSLVDLAGSERVSKTGAAGERLKEGSNINKSLTTLGLVISSLADQAAGKGKSKFVPYRDSVLTWLLKDNLGGNSQTSMIATISPAADNYEETLSTLRYADRAKRIVNHAVVNEDPNAKVIRELREEVEKLREQLSQAEAMKAPELKEKLEESEKLIKELTVTWEEKLRKTEEIAQERQRQLESMGISLEMSGIKVGDDKCYLVNLNADPALNELLVYYLKDHTRVGADTSQDIQLFGIGIQPQHCEIDIASDGDVTLTPKENARSCVNGTLVCSTTQLWHGDRILWGNNHFFRINLPKRKRRDWLKDFEKETGPPEHDLDAASEASSEPDYNYEFAQMEVIMKTLNSNDPVQNVVQVLEKQYLEEKRSALEEQRLMYERELEQLRQQLSPDRQPQSSGPDRLAYSSQTAQQKVTQWAEERDELFRQSLAKLREQLVKANTLVREANFLAEEMSKLTDYQVTLQIPAANLSANRKRGAIVSEPAIQVRRKGKSTQVWTIEKLENKLIDMRDLYQEWKEKVPEAKRLYGKRGDPFYEAQENHNLIGVANVFLECLFCDVKLQYAVPIISQQGEVAGRLHVEVMRVTGAVPERVVEDDSSENSSESGSLEVVDSSGEIIHRVKKLTCRVKIKEATGLPLNLSNFVFCQYTFWDQCESTVAAPVVDPEVPSPQSKDAQYTVTFSHCKDYVVNVTEEFLEFISDGALAIEVWGHRCAGNGSSIWEVDSLHAKTRTLHDRWNEVTRRIEMWISILELNELGEYAAVELHQAKDVNTGGIFQLRQGHSRRVQVTVKPVQHSGTLPLMVEAILSVSIGCVTARSTKLQRGLDSYQRDDEDGDDMDSYQEEDLNCVRERWSDALIKRREYLDEQIKKVSNKTEKTEDDVEREAQLVEQWVGLTEERNAVLVPAPGSGIPGAPADWIPPPGMETHIPVLFLDLNADDLSANEQLVGPHASGVNSILPKEHGSQFFYLPIIKHSDDEVSATASWDSSVHDSVHLNRVTPQNERIYLIVKTTVQLSHPAAMELVLRKRIAANIYNKQSFTQSLKRRISLKNIFYSCGVTYEIVSNIPKATEEIEDRETLALLAARSENEGTSDGETYIEKYTRGVLQVENILSLERLRQAVTVKEALSTKARHIRRSLSTPNVHNVSSSRPDLSGFDEDDKGWPENQLDMSDYSSSYQDVACYGTLPRDSPRRNKEGCTSETPHALTVSPFKAFSPQPPKFFKPLMPVKEEHKKRIALEARPLLSQEDSEEEENELEAINRKLISSQPYVPVEFADFSVYNASLENREWFSSKVDLSNSRVLEKEVSRSPTTSSITSGYFSHSASNATLSDMVVPSSDSSDQLAIQTKDADSTEHSTPSLVHDFRPSSNKELTEVEKGLVKDKIIVVPLKENSALAKGSPSSQSIPEKNSKSLCRTGSCSELDACPSKISQPARGFCPREVTVEHTTNILEDHSFTEFMGVSEGKDFDGLTDSSAGELSSRRSLPNKTGGKTVSDGLHHPSQLHSKLENDQVIIPEAAFWVLCCQ

SEQ ID NO: 10095 - protein, 396 aa, Homo sapiens
MVAGTRCLLALLLPQVLLGGAAGLVPELGRRKFAAASSGRPSSQPSDEVLSEFELRLLSMFGLKQRPTPSRDAVVPPYMLDLYRRHSGQPGSPAPDHRLERAASRANTVRSFHHEESLEELPETSGKTTRRFFFNLSSIPTEEFITSAELQVFREQMQDALGNNSSFHHRINIYEIIKPATANSKFPVTRLLDTRLVNQNASRWESFDVTPAVMRWTAQGHANHGFVVEVAHLEEKQGVSKRHVRISRSLHQDEHSWSQIRPLLVTFGHDGKGHPLHKREKRQAKHKQRKRLKSSCKRHPLYVDFSDVGWNDWIVAPPGYHAFYCHGECPFPLADHLNSTNHAIVQTLVNSVNSKIPKACCVPTELSAISMLYLDENEKVVLKNYQDMVVEGCGCR

SEQ ID NO: 10096 - protein, 357 aa, Homo sapiens
MARENGESSSSWKKQAEDIKKIFEFKETLGTGAFSEVVLAEEKATGKLFAVKCIPKKALKGKESSIENEIAVLRKIKHENIVALEDIYESPNHLYLVMQLVSGGELFDRIVEKGFYTEKDASTLIRQVLDAVYYLHRMGIVHRDLKPENLLYYSQDEESKIMISDFGLSKMEGKGDVMSTACGTPGYVAPEVLAQKPYSKAVDCWSIGVIAYILLCGYPPFYDENDSKLFEQILKAEYEFDSPYWDDISDSAKDFIRNLMEKDPNKRYTCEQAARHPWIAGDTALNKNIHESVSAQIRKNFAKSKWRQAFNATAVVRHMRKLHLGSSLDSSNASVSSSLSLASQKDCAYVAKPESLS

SEQ ID NO: 10097 - protein, 740 aa, Homo sapiens
MRQTLPLLLLTVLRPSWADPPQEKVPLFRVTQQGPWGSSGSNATDSPCEGLPAADATALTLANRNLERLPGCLPRTLRSLDASHNLLRALSTSELGHLEQLQVLTLRHNRIAALRWGPGGPAGLHTLDLSYNQLAALPPCTGPALSSLRALALAGNPLRALQPRAFACFPALQLLNLSCTALGRGAQGGIAEAAFAGEDGAPLVTLEVLDLSGTFLERVESGWIRDLPKLTSLYLRKMPRLTTLEGDIFKMTPNLQQLDCQDSPALASVATHIFQDTPHLQVLLFQNCNLSSFPPWTLDSSQVLSINLFGNPLTCSCDLSWLLTDAKRTVLSRAADTMCAPAAGSSGPFSASLSLSQLPGVCQSDQSTTLGASHPPCFNRSTYAQGTTVAPSAAPATRPAGDQQSVSKAPNVGSRTIAAWPHSDAREGTAPSTTNSVAGHSNSSVFPRAASTTRTQHRGEHAPELVLEPDISAASTPLASKLLGPFPTSWDRSISSPQPGQRTHATPQAPNPSLSEGEIPVLLLDDYSEEEEGRKEEVGTPHQDVPCDYHPCKHLQTPCAELQRRWRCRCPGLSGEDTIPDPPRLQGVTETTDTSALVHWCAPNSVVHGYQIRYSAEGWAGNQSVVGVIYATARQHPLYGLSPGTTYRVCVLAANRAGLSQPRSSGWRSPCAAFTTKPSFALLLSGLCAASGLLLASTVVLSACLCRRGQTLGLQRCDTHLVAYKNPAFDDYPLGLQTVS

SEQ ID NO: 10098 - protein, 86 aa, Homo sapiens
MGRKDAATIKLPVDQYRKQIGKQDYKKTKPILRATKLKAEAKKTAIGIKEVGLVLAAILALLLAFYAFFYLRLTTDVDPDLDQDED

SEQ ID NO: 10099 - protein, 301 aa, Homo sapiens
MLALRVARGSWGALRGAAWAPGTRPSKRRACWALLPPVPCCLGCLAERWRLRPAALGLRLPGIGQRNHCSGAGKAAPRPAAGAGAAAEAPGGQWGPASTPSLYENPWTIPNMLSMTRIGLAPVLGYLIIEEDFNIALGVFALAGLTDLLDGFIARNWANQRSALGSALDPLADKILISILYVSLTYADLIPVPLTYMIISRDVMLIAAVFYVRYRTLPTPRTLAKYFNPCYATARLKPTFISKVNTAVQLILVAASLAAPVFNYADSIYLQILWCFTAFTTAASAYSYYHYGRKTVQVIKD

SEQ ID NO: 10100 - protein, 368 aa, Homo sapiens
MTRGFAPILPVEFHKMGSFRRPRPRFMSSPVLSDLPRFQAARQALQLSSSSAWNSVQTAVINVFKGGGLQSNELYALNENIRRLLKSELGSFITDYFQNQLLAKGLFFVEEKIKLCEGENRIEVLAEVWDHFFTETLPTLQAIFYPVQGQELTIRQISLLGFRDLVLLKVKLGDLLLLAQSKLPSSIVQMLLILQSVHEPTGPSESYLQLEELVKQVVSPFLGISGDRSFSGPTYTLARRHSRVRPKVTVLNYASPITAVSRPLNEMVLTPLTEQEGEAYLEKCGSVRRHTVANAHSDIQLLAMATMMHSGLGEEASSENKCLLLPPSFPPPHRQCSSEPNITDNPDGLEEGARGSQEGSELNCASLS

SEQ ID NO: 10101 - protein, 115 aa, Homo sapiens
MSRHSRLQRQVLSLYRDLLRAGRGKPGAEARVRAEFRQHAGLPRSDVLRIEYLYRRGRRQLQLLRSGHATAMGAFVRPRAPTGEPGGVGCQPDDGDSPRNPHDSTGAPETRPDGR

SEQ ID NO: 10102 - protein, 695 aa, Homo sapiens
MAETKIIYHMDEEETPYLVKLPVAPERVTLADFKNVLSNRPVHAYKFFFKSMDQDFGVVKEEIFDDNAKLPCFNGRVVSWLVLAEGAHSDAGSQGTDSHTDLPPPLERTGGIGDSRPPSFHPNVASSRDGMDNETGTESMVSHRRERARRRNREEAARTNGHPRGDRRRDVGLPPDSASTALSSELESSSFVDSDEDGSTSRLSSSTEQSTSSRLIRKHKRRRRKQRLRQADRASSFSSITDSTMSLNIVTVTLNMERHHFLGISIVGQSNDRGDGGIYIGSIMKGGAVAADGRIEPGDMLLQVNDVNFENMSNDDAVRVLREIVSQTGPISLTVAKCWDPTPRSYFTVPRADPVRPIDPAAWLSHTAALTGALPRYGTSPCSSAVTRTSSSSLTSSVPGAPQLEEAPLTVKSDMSAVVRVMQLPDSGLEIRDRMWLKITIANAVIGADVVDWLYTHVEGFKERREARKYASSLLKHGFLRHTVNKITFSEQCYYVFGDLCSNLATLNLNSGSSGTSDQDTLAPLPHPAAPWPLGQGYPYQYPGPPPCFPPAYQDPGFSYGSGSTGSQQSEGSKSSGSTRSSRRAPGREKERRAAGAGGSGSESDHTAPSGVGSSWRERPAGQLSRGSSPRSQASATAPGLPPPHPTTKAYTVVGGPPGGPPVRELAAVPPELTGSRQSFQKAMGNPCEFFVDIM

SEQ ID NO: 10103 - protein, 670 aa, Homo sapiens
MAETKIIYHMDEEETPYLVKLPVAPERVTLADFKNVLSNRPVHAYKFFFKSMDQDFGVVKEEIFDDNAKLPCFNGRVVSWLVLAEGAHSDAGSQGTDSHTDLPPPLERTGGIGDSRPPSFHPNVASSRDGMDNETGTESMVSHRRERARRRNREEAARTNGHPRGDRRRDVGLPPDSASTALSSELESSSFVDSDEDGSTSRLSSSTEQSTSSRLIRKHKRRRRKQRLRQADRASSFSSITDSTMSLNIVTVTLNMERHHFLGISIVGQSNDRGDGGIYIGSIMKGGAVAADGRIEPGDMLLQVNDVNFENMSNDDAVRVLREIVSQTGPISLTVAKCWDPTPRSYFTVPRADPVRPIDPAAWLSHTAALTGALPRYELEEAPLTVKSDMSAVVRVMQLPDSGLEIRDRMWLKITIANAVIGADVVDWLYTHVEGFKERREARKYASSLLKHGFLRHTVNKITFSEQCYYVFGDLCSNLATLNLNSGSSGTSDQDTLAPLPHPAAPWPLGQGYPYQYPGPPPCFPPAYQDPGFSYGSGSTGSQQSEGSKSSGSTRSSRRAPGREKERRAAGAGGSGSESDHTAPSGVGSSWRERPAGQLSRGSSPRSQASATAPGLPPPHPTTKAYTVVGGPPGGPPVRELAAVPPELTGSRQSFQKAMGNPCEFFVDIM

SEQ ID NO: 10104 - protein, 377 aa, Homo sapiens
MEALLLGAGLLLGAYVLVYYNLVKAPPCGGMGNLRGRTAVVTGANSGIGKMTALELARRGARVVLACRSQERGEAAAFDLRQESGNNEVIFMALDLASLASVRAFATAFLSSEPRLDILIHNAGISSCGRTREAFNLLLRVNHIGPFLLTHLLLPCLKACAPSRVVVVASAAHCRGRLDFKRLDRPVVGWRQELRAYADTKLANVLFARELANQLEATGVTCYAAHPGPVNSELFLRHVPGWLRPLLRPLAWLVLRAPRGGAQTPLYCALQEGIEPLSGRYFANCHVEEVPPAARDDRAAHRLWEASKRLAGLGPGEDAEPDEDPQSEDSEAPSSLSTPHPEEPTVSQPYPSPQSSPDLSKMTHRIQAKVEPEIQLS

SEQ ID NO: 10105 - protein, 840 aa, Homo sapiens
MNGEYRGRGFGRGRFQSWKRGRGGGNFSGKWREREHRPDLSKTTGKRTSEQTPQFLLSTKTPQSMQSTLDRFIPYKGWKLYFSEVYSDSSPLIEKIQAFEKFFTRHIDLYDKDEIERKGSILVDFKELTEGGEVTNLIPDIATELRDAPEKTLACMGLAIHQVLTKDLERHAAELQAQEGLSNDGETMVNVPHIHARVYNYEPLTQLKNVRANYYGKYIALRGTVVRVSNIKPLCTKMAFLCAACGEIQSFPLPDGKYSLPTKCPVPVCRGRSFTALRSSPLTVTMDWQSIKIQELMSDDQREAGRIPRTIECELVHDLVDSCVPGDTVTITGIVKVSNAEEGSRNKNDKCMFLLYIEANSISNSKGQKTKSSEDGCKHGMLMEFSLKDLYAIQEIQAEENLFKLIVNSLCPVIFGHELVKAGLALALFGGSQKYADDKNRIPIRGDPHILVVGDPGLGKSQMLQAACNVAPRGVYVCGNTTTTSGLTVTLSKDSSSGDFALEAGALVLGDQGICGIDEFDKMGNQHQALLEAMEQQSISLAKAGVVCSLPARTSIIAAANPVGGHYNKAKTVSENLKMGSALLSRFDLVFILLDTPNEHHDHLLSEHVIAIRAGKQRTISSATVARMNSQDSNTSVLEVVSEKPLSERLKVVPGETIDPIPHQLLRKYIGYARQYVYPRLSTEAARVLQDFYLELRKQSQRLNSSPITTRQLESLIRLTEARARLELREEATKEDAEDIVEIMKYSMLGTYSDEFGNLDFERSQHGSGMSNRSTAKRFISALNNVAERTYNNIFQFHQLRQIAKELNIQVADFENFIGSLNDQGYLLKKGPKVYQLQTM

SEQ ID NO: 10106 - protein, 1241 aa, Homo sapiens
MALGTTLRASLLLLGLLTEGLAQLAIPASVPRGFWALPENLTVVEGASVELRCGVSTPGSAVQWAKDGLLLGPDPRIPGFPRYRLEGDPARGEFHLHIEACDLSDDAEYECQVGRSEMGPELVSPRVILSILVPPKLLLLTPEAGTMVTWVAGQEYVVNCVSGDAKPAPDITILLSGQTISDISANVNEGSQQKLFTVEATARVTPRSSDNRQLLVCEASSPALEAPIKASFTVNVLFPPGPPVIEWPGLDEGHVRAGQSLELPCVARGGNPLATLQWLKNGQPVSTAWGTEHTQAVARSVLVMTVRPEDHGAQLSCEAHNSVSAGTQEHGITLQVTFPPSAIIILGSASQTENKNVTLSCVSKSSRPRVLLRWWLGWRQLLPMEETVMDGLHGGHISMSNLTFLARREDNGLTLTCEAFSEAFTKETFKKSLILNVKYPAQKLWIEGPPEGQKLRAGTRVRLVCLAIGGNPEPSLMWYKDSRTVTESRLPQESRRVHLGSVEKSGSTFSRELVLVTGPSDNQAKFTCKAGQLSASTQLAVQFPPTNVTILANASALRPGDALNLTCVSVSSNPPVNLSWDKEGERLEGVAAPPRRAPFKGSAAARSVLLQVSSRDHGQRVTCRAHSAELRETVSSFYRLNVLYRPEFLGEQVLVVTAVEQGEALLPVSVSANPAPEAFNWTFRGYRLSPAGGPRHRILSSGALHLWNVTRADDGLYQLHCQNSEGTAEARLRLDVHYAPTIRALQDPTEVNVGGSVDIVCTVDANPILPGMFNWERLGEDEEDQSLDDMEKISRGPTGRLRIHHAKLAQAGAYQCIVDNGVAPPARRLLRLVVRFAPQVEHPTPLTKVAAAGDSTSSATLHCRARGVPNIVFTWTKNGVPLDLQDPRYTEHTYHQGGVHSSLLTIANVSAAQDYALFTCTATNALGSDQTNIQLVSISRPDPPSGLKVVSLTPHSVGLEWKPGFDGGLPQRFCIRYEALGTPGFHYVDVVPPQATTFTLTGLQPSTRYRVWLLASNALGDSGLADKGTQLPITTPGLHQPSGEPEDQLPTEPPSGPSGLPLLPVLFALGGLLLLSNASCVGGVLWQRRLRRLAEGISEKTEAGSEEDRVRNEYEESQWTGERDTQSSTVSTTEAEPYYRSLRDFSPQLPPTQEEVSYSRGFTGEDEDMAFPGHLYDEVERTYPPSGAWGPLYDEVQMGPWDLHWPEDTYQDPRGIYDQVAGDLDTLEPDSLPFELRGHLV

SEQ ID NO: 10107 - protein, 583 aa, Homo sapiens
MAEGDEAARGQQPHQGLWRRRRTSDPSAAVNHVSSTTSLGENYEDDDLVNSDEVMKKPCPVQIVLAHEDDHNFELDEEALEQILLQEHIRDLNIVVVSVAGAFRKGKSFLLDFMLRYMYNKDSQSWIGGNNEPLTGFTWRGGCERETTGIQVWNEVFVIDRPNGTKVAVLLMDTQGAFDSQSTIKDCATVFALSTMTSSVQVYNLSQNIQEDDLQHLQLFTEYGRLAMEEIYQKPFQTLMFLIRDWSYPYEHSYGLEGGKQFLEKRLQVKQNQHEELQNVRKHIHNCFSNLGCFLLPHPGLKVATNPSFDGRLKDIDEDFKRELRNLVPLLLAPENLVEKEISGSKVTCRDLVEYFKAYIKIYQGEELPHPKSMLQATAEANNLAAVAGARDTYCKSMEQVCGGDKPYIAPSDLERKHLDLKEVAIKQFRSVKKMGGDEFCRRYQDQLEAEIEETYANFIKHNDGKNIFYAARTPATLFAVMFAMYIISGLTGFIGLNSIAVLCNLVMGLALIFLCTWAYVKYSGEFREIGTVIDQIAETLWEQVLKPLGDNLMEENIRQSVTNSIKAGLTDQVSHHARLKTD

SEQ ID NO: 10108 - protein, 677 aa, Homo sapiens
MQPTLLLSLLGAVGLAAVNSMPVDNRNHNEGMVTRCIIEVLSNALSKSSAPPITPECRQVLKTSRKDVKDKETTENENTKFEVRLLRDPADASEAHESSSRGEAGAPGEEDIQGPTKADTEKWAEGGGHSRERADEPQWSLYPSDSQVSEEVKTRHSEKSQREDEEEEEGENYQKGERGEDSSEEKHLEEPGETQNAFLNERKQASAIKKEELVARSETHAAGHSQEKTHSREKSSQESGEETGSQENHPQESKGQPRSQEESEEGEEDATSEVDKRRTRPRHHHGRSRPDRSSQGGSLPSEEKGHPQEESEESNVSMASLGEKRDHHSTHYRASEEEPEYGEEIKGYPGVQAPEDLEWERYRGRGSEEYRAPRPQSEESWDEEDKRNYPSLELDKMAHGYGEESEEERGLEPGKGRHHRGRGGEPRAYFMSDTREEKRFLGEGHHRVQENQMDKARRHPQGAWKELDRNYLNYGEEGAPGKWQQQGDLQDTKENREEARFQDKQYSSHHTAEKRKRLGELFNPYYDPLQWKSSHFERRDNMNDNFLEGEEENELTLNEKNFFPEYNYDWWEKKPFSEDVNWGYEKRNLARVPKLDLKRQYDRVAQLDQLLHYRKKSAEFPDFYDSEEPVSTHQEAENEKDRADQTVLTEDEKKELENLAAMDLELQKIAEKFSQRG

SEQ ID NO: 10109 - protein, 696 aa, Homo sapiens
MKAPIPHLILLYATFTQSLKVVTKRGSADGCTDWSIDIKKYQVLVGEPVRIKCALFYGYIRTNYSLAQSAGLSLMWYKSSGPGDFEEPIAFDGSRMSKEEDSIWFRPTLLQDSGLYACVIRNSTYCMKVSISLTVGENDTGLCYNSKMKYFEKAELSKSKEISCRDIEDFLLPTREPEILWYKECRTKTWRPSIVFKRDTLLIREVREDDIGNYTCELKYGGFVVRRTTELTVTAPLTDKPPKLLYPMESKLTIQETQLGDSANLTCRAFFGYSGDVSPLIYWMKGEKFIEDLDENRVWESDIRILKEHLGEQEVSISLIVDSVEEGDLGNYSCYVENGNGRRHASVLLHKRELMYTVELAGGLGAILLLLVCLVTIYKCYKIEIMLFYRNHFGAEELDGDNKDYDAYLSYTKVDPDQWNQETGEEERFALEILPDMLEKHYGYKLFIPDRDLIPTGTYIEDVARCVDQSKRLIIVMTPNYVVRRGWSIFELETRLRNMLVTGEIKVILIECSELRGIMNYQEVEALKHTIKLLTVIKWHGPKCNKLNSKFWKRLQYEMPFKRIEPITHEQALDVSEQGPFGELQTVSAISMAAATSTALATAHPDLRSTFHNTYHSQMRQKHYYRSYEYDVPPTGTLPLTSIGNQHTYCNIPMTLINGQRPQTKSSREQNPDEAHTNSAILPLLPRETSISSVIW

SEQ ID NO: 10110 - protein, 672 aa, Homo sapiens
MTPSQVAFEIRGTLLPGEVFAICGSCDALGNWNPQNAVALLPENDTGESMLWKATIVLSRGVSVQYRYFKGYFLEPKTIGGPCQVIVHKWETHLQPRSITPLESEIIIDDGQFGIHNGVETLDSGWLTCQTEIRLRLHYSEKPPVSITKKKLKKSRFRVKLTLEGLEEDDDDRVSPTVLHKMSNSLEISLISDNEFKCRHSQPECGYGLQPDRWTEYSIQTMEPDNLELIFDFFEEDLSEHVVQGDALPGHVGTACLLSSTIAESGKSAGILTLPIMSRNSRKTIGKVRVDYIIIKPLPGYSCDMKSSFSKYWKPRIPLDVGHRGAGNSTTTAQLAKVQENTIASLRNAASHGAAFVEFDVHLSKDFVPVVYHDLTCCLTMKKKFDADPVELFEIPVKELTFDQLQLLKLTHVTALKSKDRKESVVQEENSFSENQPFPSLKMVLESLPEDVGFNIEIKWICQQRDGMWDGNLSTYFDMNLFLDIILKTVLENSGKRRIVFSSFDADICTMVRQKQNKYPILFLTQGKSEIYPELMDLRSRTTPIAMSFAQFENLLGINVHTEDLLRNPSYIQEAKAKGLVIFCWGDDTNDPENRRKLKELGVNGLIYDRIYDWMPEQPNIFQVEQLERLKQELPELKSCLCPTVSRFVPSSLCGESDIHVDANGIDNVENA

SEQ ID NO: 10111 - protein, 1299 aa, Homo sapiens
MPKKKRLSAGRVPLILFLCQMISALEVPLDPKLLEDLVQPPTITQQSPKDYIIDPRENIVIQCEAKGKPPPSFSWTRNGTHFDIDKDPLVTMKPGTGTLIINIMSEGKAETYEGVYQCTARNERGAAVSNNIVVRPSRSPLWTKEKLEPITLQSGQSLVLPCRPPIGLPPPIIFWMDNSFQRLPQSERVSQGLNGDLYFSNVLPEDTREDYICYARFNHTQTIQQKQPISVKVISVDELNDTIAANLSDTEFYGAKSSRERPPTFLTPEGNASNKEELRGNVLSLECIAEGLPTPIIYWAKEDGMLPKNRTVYKNFEKTLQIIHVSEADSGNYQCIAKNALGAIHHTISVRVKAAPYWITAPQNLVLSPGEDGTLICRANGNPKPRISWLTNGVPIEIAPDDPSRKIDGDTIIFSNVQERSSAVYQCNASNEYGYLLANAFVNVLAEPPRILTPANTLYQVIANRPALLDCAFFGSPLPTIEWFKGAKGSALHEDIYVLHENGTLEIPVAQKDSTGTYTCVARNKLGMAKNEVHLEIKDPTWIVKQPEYAVVQRGSMVSFECKVKHDHTLSLTVLWLKDNRELPSDERFTVDKDHLVVADVSDDDSGTYTCVANTTLDSVSASAVLSVVAPTPTPAPVYDVPNPPFDLELTDQLDKSVQLSWTPGDDNNSPITRIHHEYEDAMHKPGLWHHQTEVSGTQTTAQLKLSPYVNYSFRVMAVNSIGKSLPSEASEQYLTKASEPDKNPTAVEGLGSEPDNLVITWKPLNGFESNGPGLQYKVSWRQKDGDDEWTSVVVANVSKYIVSGTPTFVPYLIKVQALNDMGFAPEPAVVMGHSGEDLPMVAPGNVRVNVVNSTLAEVHWDPVPLKSIRGHLQGYRIYYWKTQSSSKRNRRHIEKKILTFQGSKTHGMLPGLEPFSHYTLNVRVVNGKGEGPASPDRVFNTPEGVPSAPSSLKIVNPTLDSLTLEWDPPSHPNGILTEYTLKYQPINSTHELGPLVDLKIPANKTRWTLKNLNFSTRYKFYFYAQTSAGSGSQITEEAVTTVDEAGILPPDVGAGKVQAVNPRISNLTAAAAETYANISWEYEGPEHVNFYVEYGVAGSKEEWRKEIVNGSRSFFGLKGLMPGTAYKVRVGAVGDSGFVSSEDVFETGPAMASRQVDIATQGWFIGLMCAVALLILILLIVCFIRRNKGGKYPVKEKEDAHADPEIQPMKEDDGTFGEYSDAEDHKPLKKGSRTPSDRTVKKEDSDDSLVDYGEGVNGQFNEDGSFIGQYSGKKEKEPAEGNESSEAPSPVNAMNSFV

SEQ ID NO: 10112 - protein, 1192 aa, Homo sapiens
MQLKIMPKKKRLSAGRVPLILFLCQMISALEVPLDPKLLEDLVQPPTITQQSPKDYIIDPRENIVIQCEAKGKPPPSFSWTRNGTHFDIDKDPLVTMKPGTGTLIINIMSEGKAETYEGVYQCTARNERGAAVSNNIVVRPSRSPLWTKEKLEPITLQSGQSLVLPCRPPIGLPPPIIFWMDNSFQRLPQSERVSQGLNGDLYFSNVLPEDTREDYICYARFNHTQTIQQKQPISVKVISAKSSRERPPTFLTPEGNASNKEELRGNVLSLECIAEGLPTPIIYWAKEDGMLPKNRTVYKNFEKTLQIIHVSEADSGNYQCIAKNALGAIHHTISVRVKAAPYWITAPQNLVLSPGEDGTLICRANGNPKPRISWLTNGVPIEIAPDDPSRKIDGDTIIFSNVQERSSAVYQCNASNEYGYLLANAFVNVLAEPPRILTPANTLYQVIANRPALLDCAFFGSPLPTIEWFKGAKGSALHEDIYVLHENGTLEIPVAQKDSTGTYTCVARNKLGMAKNEVHLEIKDPTWIVKQPEYAVVQRGSMVSFECKVKHDHTLSLTVLWLKDNRELPSDERFTVDKDHLVVADVSDDDSGTYTCVANTTLDSVSASAVLSVVAPTPTPAPVYDVPNPPFDLELTDQLDKSVQLSWTPGDDNNSPITKFIIEYEDAMHKPGLWHHQTEVSGTQTTAQLKLSPYVNYSFRVMAVNSIGKSLPSEASEQYLTKASEPDKNPTAVEGLGSEPDNLVITWKPLNGFESNGPGLQYKVSWRQKDGDDEWTSVVVANVSKYIVSGTPTFVPYLIKVQALNDMGFAPEPAVVMGHSGEDLPMVAPGNVRVNVVNSTLAEVHWDPVPLKSIRGHLQGYRIYYWKTQSSSKRNRRHIEKKILTFQGSKTHGMLPGLEPFSHYTLNVRVVNGKGEGPASPDRVFNTPEGVPSAPSSLKIVNPTLDSLTLEWDPPSHPNGILTEYTLKYQPINSTHELGPLVDLKIPANKTRWTLKNLNFSTRYKFYFYAQTSAGSGSQITEEAVTTVDEAGILPPDVGAGKAMASRQVDIATQGWFIGLMCAVALLILILLIVCFIRRNKGGKYPVKEKEDAHADPEIQPMKEDDGTFGEYSDAEDHKPLKKGSRTPSDRTVKKEDSDDSLVDYGEGVNGQFNEDGSFIGQYSGKKEKEPAEGNESSEAPSPVNAMNSFV

SEQ ID NO: 10113 - protein, 1304 aa, Homo sapiens
MQLKIMPKKKRLSAGRVPLILFLCQMISALEVPLDPKLLEDLVQPPTITQQSPKDYIIDPRENIVIQCEAKGKPPPSFSWTRNGTHFDIDKDPLVTMKPGTGTLIINIMSEGKAETYEGVYQCTARNERGAAVSNNIVVRPSRSPLWTKEKLEPITLQSGQSLVLPCRPPIGLPPPIIFWMDNSFQRLPQSERVSQGLNGDLYFSNVLPEDTREDYICYARFNHTQTIQQKQPISVKVISVDELNDTIAANLSDTEFYGAKSSRERPPTFLTPEGNASNKEELRGNVLSLECIAEGLPTPIIYWAKEDGMLPKNRTVYKNFEKTLQIIHVSEADSGNYQCIAKNALGAIHHTISVRVKAAPYWITAPQNLVLSPGEDGTLICRANGNPKPRISWLTNGVPIEIAPDDPSRKIDGDTIIFSNVQERSSAVYQCNASNEYGYLLANAFVNVLAEPPRILTPANTLYQVIANRPALLDCAFFGSPLPTIEWFKGAKGSALHEDIYVLHENGTLEIPVAQKDSTGTYTCVARNKLGMAKNEVHLEIKDPTWIVKQPEYAVVQRGSMVSFECKVKHDHTLSLTVLWLKDNRELPSDERFTVDKDHLVVADVSDDDSGTYTCVANTTLDSVSASAVLSVVAPTPTPAPVYDVPNPPFDLELTDQLDKSVQLSWTPGDDNNSPITKFIIEYEDAMHKPGLWHHQTEVSGTQTTAQLKLSPYVNYSFRVMAVNSIGKSLPSEASEQYLTKASEPDKNPTAVEGLGSEPDNLVITWKPLNGFESNGPGLQYKVSWRQKDGDDEWTSVVVANVSKYIVSGTPTFVPYLIKVQALNDMGFAPEPAVVMGHSGEDLPMVAPGNVRVNVVNSTLAEVHWDPVPLKSIRGHLQGYRIYYWKTQSSSKRNRRHIEKKILTFQGSKTHGMLPGLEPFSHYTLNVRVVNGKGEGPASPDRVFNTPEGVPSAPSSLKIVNPTLDSLTLEWDPPSHPNGILTEYTLKYQPINSTHELGPLVDLKIPANKTRWTLKNLNFSTRYKFYFYAQTSAGSGSQITEEAVTTVDEAGILPPDVGAGKVQAVNPRISNLTAAAAETYANISWEYEGPEHVNFYVEYGVAGSKEEWRKEIVNGSRSFFGLKGLMPGTAYKVRVGAVGDSGFVSSEDVFETGPAMASRQVDIATQGWFIGLMCAVALLILILLIVCFIRRNKGGKYPVKEKEDAHADPEIQPMKEDDGTFGEYSDAEDHKPLKKGSRTPSDRTVKKEDSDDSLVDYGEGVNGQFNEDGSFIGQYSGKKEKEPAEGNESSEAPSPVNAMNSFV

SEQ ID NO: 10114 - protein, 303 aa, Homo sapiens
MSSAPASGSVRARYLVYFQYVGTDFNGVAAVRGTQRAVGVQNYLEEAAERLNSVEPVRFTISSRTDAGVHALSNAAHLDVQRRSGRPPFPPEVLAEALNTHLRHPAIRVLRAFRVPSDFHARHAATSRTYLYRLATGCHRRDELPVFERNLCWTLPADCLDMVAMQEAAQHLLGTHDFSAFQSAGSPVPSPVRTLRRVSVSPGQASPLVTPEESRKLRFWNLEFESQSFLYRQVRRMTAVLVAVGLGALAPAQVKTILESQDPLGKHQTRVAPAHGLFLKSVLYGNLGAASCTLQGPQFGSHG

SEQ ID NO: 10115 - protein, 236 aa, Homo sapiens
MVGRRALIVLAHSERTSFNYAMKEAAAAALKKKGWEVVESDLYAMNFNPIISRKDITGKLKDPANFQYPAESVLAYKEGHLSPDIVAEQKKLEAADLVIFQSKKAVLSITTGGSGSMYSLQGIHGDMNVILWPIQSGILHFCGFQVLEPQLTYSIGHTPADARIQILEGWKKRLENIWDETPLYFAPSSLFDLNFQAGFLMKKEVQDEEKNKKFGLSVGHHLGKSIPTDNQIKARK

SEQ ID NO: 10116 - protein, 236 aa, Homo sapiens
MHTTQKDTTYTKIFVGGLPYHTTDASLRKYFEVFGEIEEAVVITDRQTGKSRGYGFVTMADRAAAERACKDPNPIIDGRKANVNLAYLGAKPRIMQPGFAFGVQQLHPALIQRPFGIPAHYVYPQAFVQPGVVIPHVQPTAAAASTTPYIDYTGAAYAQYSAAAAAAAAAAAYDQYPYAASPAAAGYVTAGGYGYAVQQPITAAAPGTAAAAAAAAAAAAAFGQYQPQQLQTDRMQ

SEQ ID NO: 10117 - protein, 160 aa, Homo sapiens
MFSDIYKIREIADGLCLEVEGKMVSRTEGNIDDSLIGGNASAEGPEGEGTESTVITGVDIVMNHHLQETSFTKEAYKKYIKDYMKSIKGKLEEQRPERVKPFMTGAAEQIKHILANFKNYQFFIGENMNPDGMVALLDYREDGVTPYMIFFKDGLEMEKC

SEQ ID NO: 10118 - protein, 291 aa, Homo sapiens
MAVTLSLLLGGRVCAAVTRCGFATRGVAGPGPIGREPDPDSDWEPEERELQEVESTLKRQKQAIRFQKIRRQMEAPGAPPRTLTWEAMEQIRYLHEEFPESWSVPRLAEGFDVSTDVIRRVLKSKFLPTLEQKLKQDQKVLKKAGLAHSLQHLRGSGNTSKLLPAGHSVSGSLLMPGHEASSKDPNHSTALKVIESDTHRTNTPRRRKGRNKEIQDLEESFVPVAAPLGHPRELQKYSSDSESPRGTGSGALPSGQKLEELKAEEPDNFSSKVVQRGREFFDSNGNFLYRI

SEQ ID NO: 10119 - protein, 115 aa, Homo sapiens
MFHVSFRYIFGLPPLILVLLPVASSDCDIEGKDGKQYESVLMVSIDQLLDSMKEIGSNCLNNEFNFFKRHICDANKEENKSLKEQKKLNDLCFLKRLLQEIKTCWNKILMGTKEH

SEQ ID NO: 10120 - protein, 1059 aa, Homo sapiens
MVDVLLLFSLCLLFHISRPDLSHNRLSFIKASSMSHLQSLREVKLNNNELETIPNLGPVSANITLLSLAGNRIVEILPEHLKEFQSLETLDLSSNNISELQTAFPALQLKYLYLNSNRVTSMEPGYFDNLANTLLVLKLNRNRISAIPPKMFKLPQLQHLELNRNKIKNVDGLTFQGLGALKSLKMQRNGVTKLMDGAFWGLSNMEILQLDHNNLTEITKGWLYGLLMLQELHLSQNAINRISPDAWEFCQKLSELDLTFNHLSRLDDSSFLGLSLLNTLHIGNNRVSYIADCAFRGLSSLKTLDLKNNEISWTIEDMNGAFSGLDKLRRLILQGNRIRSITKKAFTGLDALEHLDLSDNAIMSLQGNAFSQMKKLQQLHLNTSSLLCDCQLKWLPQWVAENNFQSFVNASCAHPQLLKGRSIFAVSPDGFVCDDFPKPQITVQPETQSAIKGSNLSFICSAASSSDSPMTFAWKKDNELLHDAEMENYAHLRAQGGEVMEYTTILRLREVEFASEGKYQCVISNHFGSSYSVKAKLTVNMLPSFTKTPMDLTIRAGAMARLECAAVGHPAPQIAWQKDGGTDFPAARERRMHVMPEDDVFFIVDVKIEDIGVYSCTAQNSAGSISANATLTVLETPSFLRPLLDRTVTKGETAVLQCIAGGSPPPKLNWTKDDSPLVVTERHFFAAGNQLLIIVDSDVSDAGKYTCEMSNTLGTERGNVRLSVIPTPTCDSPQMTAPSLDDDGWATVGVVIIAVVCCVVGTSLVWVVIIYHTRRRNEDCSITNTDETNLPADIPSYLSSQGTLADRQDGYVSSESGSHHQFVTSSGAGFFLPQHDSSGTCHIDNSSEADVEAATDLFLCPFLGSTGPMYLKGNVYGSDPFETYHTGCSPDPRTVLMDHYEPSYIKKKECYPCSHPSEESCERSFSNISWPSHVRKLLNTSYSHNEGPGMKNLCLNKSSLDFSANPEPASVASSNSFMGTFGKALRRPHLDAYSSFGQPSDCQPRAFYLKAHSSPDLDSGSEEDGKERTDFQEENHICTFKQTLENYRTPNFQSYDLDT

SEQ ID NO: 10121 - protein, 261 aa, Homo sapiens
MFEARLVQGSILKKVLEALKDLINEACWDISSSGVNLQSMDSSHVSLVQLTLRSEGFDTYRCDRNLAMGVNLTSMSKILKCAGNEDIITLRAEDNADTLALVFEAPNQEKVSDYEMKLMDLDVEQLGIPEQEYSCVVKMPSGEFARICRDLSHIGDAVVISCAKDGVKFSASGELGNGNIKLSQTSNVDKEEEAVTIEMNEPVQLTFALRYLNFFTKATPLSSTVTLSMSADVPLVVEYKIADMGHLKYYLAPKIEDEEGS

SEQ ID NO: 10122 - protein, 340 aa, Homo sapiens
MARDLIGPALPPGFKARGTAEDEERDPSPVAGPALPPNYKSSSSDSSDSDEDSSSLYEEGNQESEEDDSGPTARKQRKNQDDDDDDDDGFFGPALPPGFKKQDDSPPRPIIGPALPPGFIKSTQKSDKGRDDPGQQETDSSEDEDIIGPMPAKGPVNYNVTTEFEKRAQRMKEKLTKGDDDSSKPIVRESWMTELPPEMKDFGLGPRTFKRRADDTSGDRSIWTDTPADRERKAKETQEARKSSSKKDEEHILSGRDKRLAEQVSSYNESKRSESLMDIHHKKLKSKAAEDKNKPQERIPFDRDKDLKVNRFDEAQKKALIKKSRELNTRFSHGKGNMFL

SEQ ID NO: 10123 - protein, 205 aa, Homo sapiens
MSRGLQLLLLSCAYSLAPATPEVKVACSEDVDLPCTAPWDPQVPYTVSWVKLLEGGEERMETPQEDHLRGQHYHQKGQNGSFDAPNERPYSLKIRNTTSCNSGTYRCTLQDPDGQRNLSGKVILRVTGCPAQRKEETFKKYRAEIVLLLALVIFYLTLIIFTCKFARLQSIFPDFSKAGMERAFLPVTSPNKHLGLVTPHKTELV

SEQ ID NO: 10124 - protein, 476 aa, Homo sapiens
MAAVATCGSVAASTGSAVATASKSNVTSFQRRGPRASVTNDSGPRLVSIAGTRPSVRNGQLLVSTGLPALDQLLGGGLAVGTVLLIEEDKYNIYSPLLFKYFLAEGIVNGHTLLVASAKEDPANILQELPAPLLDDKCKKEFDEDVYNHKTPESNIKMKIAWRYQLLPKMEQIGPVSSSRFGHYYDASKRMPQELIEASNWHGFFLPEKISSTLKVEPCSLTPGYTKLLQFIQNIIYEEGFDGSNPQKKQRNILRIGIQNLGSPLWGDDICCAENGGNSHSLTKFLYVLRGLLRTSLSACIITMPTHLIQNKAIIARVTTLSDVVVGLESFIGSERETNPLYKDYHGLIHIRQIPRLNNLICDESDVKDLAFKLKRKLFTIEWVQDNYLRQERNIYPPGFSYLLKQKDSAWGEGSLQHSTFLMSFLAKATAFASRLVRHSEPLKQNGSGRIRQAAGPRLWHDGRRQEAPGLLGIPP

SEQ ID NO: 10125 - protein, 846 aa, Homo sapiens
MFKCWSVVLVLGFIFLESEGRPTKEGGYGLKSYQPLMRLRHKEKNQESSRVKGFMIQDGPFGSCENKYCGLGRHCVTSRETGQAECACMDLCKRHYKPVCGSDGEFYENHCEVHRAACLKKQKITIVHNEDCFFKGDKCKTTEYSKMKNMLLDLQNQKYIMQENENPNGDDISRKKLLVDQMFKYFDADSNGLVDINELTQVIKQEELGKDLFDCTLYVLLKYDDFNADKHLALEEFYRAFQVIQLSLPEDQKLSITAATVGQSAVLSCAIQGTLRPPIIWKRNNIILNNLDLEDINDFGDDGSLYITKVTTTHVGNYTCYADGYEQVYQTHIFQVNVPPVIRVYPESQAREPGVTASLRCHAEGIPKPQLGWLKNGIDITPKLSKQLTLQANGSEVHISNVRYEDTGAYTCIAKNEAGVDEDISSLFVEDSARKTLANILWREEGLGIGNMFYVFYEDGIKVIQPIECEFQRHIKPSEKLLGFQDEVCPKAEGDEVQRCVWASAVNVKDKFIYVAQPTLDRVLIVDVQSQKVVQAVSTDPVPVKLHYDKSHDQVWVLSWGTLEKTSPTLQVITLASGNVPHHTIHTQPVGKQFDRVDDFFIPTTTLIITHMRFGFILHKDEAALQKIDLETMSYIKTINLKDYKCVPQSLAYTHLGGYYFIGCKPDSTGAVSPQVMVDGVTDSVIGFNSDVTGTPYVSPDGHYLVSINDVKGLVRVQYITIRGEIQEAFDIYTNLHISDLAFQPSFTEAHQYNIYGSSSTQTDVLFVELSSGKVKMIKSLKEPLKAEEWPWNRKNRQIQDSGLFGQYLMTPSKDSLFILDGRLNKLNCEITEVEKGNTVIWVGDA

SEQ ID NO: 10126 - protein, 844 aa, Homo sapiens
MDEDGLELQQEPNSFFDATDRVSFCHPGWSTVAPSGSTATSASQAQVICSASRVTGATGADGTHMDGDQIVVEVQETVFVSDVVDSDITVHNFVPDDPDSVVIQDVIEDVVIEDVQCPDIMEEADVSETVIIPEQVLDSDVTEEVSLAHCTVPDDVLASDITSASMSMPEHVLTGDSIHVSDVGHVGHVGHVEHVVHDSVVEAEIVTDPLTTDVVSEEVLVADCASEAVIDANGIPVDQQDDDKGNCEDYLMISLDDAGKIEHDGSSGMTMDTESEIDPCKVDGTCPEVIKVYIFKADPGEDDLGGTVDIVESEPENDHGVELLDQNSSIRVPREKMVYMTVNDSQPEDEDLNVAEIADEVYMEVIVGEEDAAAAAAAAAVHEQQMDDNEIKTFMPIAWAAAYGNNSDGIENRNGTASALLHIDESAGLGRLAKQKPKKRRRPDSRQYQTAIIIGPDGHPLTVYPCMICGKKFKSRGFLKRHMKNHPEHLAKKKYRCTDCDYTTNKKISLHNHLESHKLTSKAEKAIECDECGKHFSHAGALFTHKMVHKEKGANKMHKCKFCEYETAEQGLLNRHLLAVHSKNFPHICVECGKGFRHPSELKKHMRIHTGEKPYQCQYCEYRSADSSNLKTHVKTKHSKEMPFKCDICLLTFSDTKEVQQHALIHQESKTHQCLHCDHKSSNSSDLKRHIISVHTKDYPHKCDMCDKGFHRPSELKKHVAAHKGKKMHQCRHCDFKIADPFVLSRHILSVHTKDLPFRCKRCRKGFRQQSELKKHMKTHSGRKVYQCEYCEYSTTDASGFKRHVISIHTKDYPHRCEYCKKGFRRPSEKNQHIMRHHKEVGLP

SEQ ID NO: 10127 - protein, 329 aa, Homo sapiens
MKLLRRAWRRRAALGLGTLALCGAALLYLARCAAEPGDPRAMSGRSPPPPAPARAAAFLAVLVASAPRAAERRSVIRSTWLARRGAPGDVWARFAVGTAGLGAEERRALEREQARHGDLLLLPALRDAYENLTAKVLAMLAWLDEHVAFEFVLKADDDSFARLDALLAELRAREPARRRRLYWGFFSGRGRVKPGGRWREAAWQLCDYYLPYALGGGYVLSADLVHYLRLSRDYLRAWHSEDVSLGAWLAPVDVQREHDPRFDTEYRSRGCSNQYLVTHKQSLEDMLEKHATLAREGRLCKREVQLRLSYVYDWSAPPSQCCQRREGIP

SEQ ID NO: 10128 - protein, 96 aa, Homo sapiens
MRVTSATCALLLALICSVQLGDACLDIDKLLANVVFDVSQDLLKEELARYNPSPLTEESFLNVQQCFANVSVTERFAHSVVIKKILQSNDCIEAAF

SEQ ID NO: 10129 - protein, 113 aa, Homo sapiens
MADPEELQVSSPPPPPPSSPSSSDASAASSPGGPVSLGWPVPSRSSGPTVDQLEEVELQIGDAAFSLTKLLEATSAVSAQVEELAFKCTENARFLKTWRDLLKEGYDSLKPDD

SEQ ID NO: 10130 - protein, 951 aa, Homo sapiens
MPGPLGLLCFLALGLLGSAGPSGAAPPLCAAPCSCDGDRRVDCSGKGLTAVPEGLSAFTQALDISMNNITQLPEDAFKNFPFLEELQLAGNDLSFIHPKALSGLKELKVLTLQNNQLKTVPSEAIRGLSALQSLRLDANHITSVPEDSFEGLVQLRHLWLDDNSLTEVPVHPLSNLPTLQALTLALNKISSIPDFAFTNLSSLVVLHLHNNKIRSLSQHCFDGLDNLETLDLNYNNLGEFPQAIKALPSLKELGFHSNSISVIPDGAFDGNPLLRTIHLYDNPLSFVGNSAFHNLSDLHSLVIRGASMVQQFPNLTGTVHLESLTLTGTKISSIPNNLCQEQKMLRTLDLSYNNIRDLPSFNGCHALEEISLQRNQIYQIKEGTFQGLISLRILDLSRNLIHEIHSRAFATLGPITNLDVSFNELTSFPTEGLNGLNQLKLVGNFKLKEALAAKDFVNLRSLSVPYAYQCCAFWGCDSYANLNTEDNSLQDHSVAQEKGTADAANVTSTLENEEHSQIIIHCTPSTGAFKPCEYLLGSWMIRLTVWFIFLVALFFNLLVILTTFASCTSLPSSKLFIGLISVSNLFMGIYTGILTFLDAVSWGRFAEFGIWWETGSGCKVAGFLAVFSSESAIFLLMLATVERSLSAKDIMKNGKSNHLKQFRVAALLAFLGATVAGCFPLFHRGEYSASPLCLPFPTGETPSLGFTVTLVLLNSLAFLLMAVIYTKLYCNLEKEDLSENSQSSMIKHVAWLIFTNCIFFCPVAFFSFAPLITAISISPEIMKSVTLIFFPLPACLNPVLYVFFNPKFKEDWKLLKRRVTKKSGSVSVSISSQGGCLEQDFYYDCGMYSHLQGNLTVCDCCESFLLTKPVSCKHLIKSHSCPALAVASCQRPEGYWSDCGTQSAHSDYADEEDSFVSDSSDQVQACGRACFYQSRGFPLVRYAYNLPRVKD

SEQ ID NO: 10131 - protein, 150 aa, Homo sapiens
MAARGVIAPVGESLRYAEYLQPSAKRPDADVDQQRLVRSLIAVGLGVAALAFAGRYAFRIWKPLEQVITETAKKISTPSFSSYYKGGFEQKMSRREAGLILGVSPSAGKAKIRTAHRRVMILNHPDKGGSPYVAAKINEAKDLLETTTKH

SEQ ID NO: 10132 - protein, 198 aa, Homo sapiens
MFKVIQRSVGPASLSLLTFKVYAAPKKDSPPKNSVKVDELSLYSVPEGQSKYVEEARSQLEESISQLRHYCEPYTTWCQETYSQTKPKMQSLVQWGLDSYDYLQNAPPGFFPRLGVIGFAGLIGLLLARGSKIKKLVYPPGFMGLAASLYYPQQAIVFAQVSGERLYDWGLRGYIVIEDLWKENFQKPGNVKNSPGTK

SEQ ID NO: 10133 - protein, 277 aa, Homo sapiens
MCVGARRLGRGPCAALLLLGLGLSTVTGLHCVGDTYPSNDRCCHECRPGNGMVSRCSRSQNTVCRPCGPGFYNDVVSSKPCKPCTWCNLRSGSERKQLCTATQDTVCRCRAGTQPLDSYKPGVDCAPCPPGHFSPGDNQACKPWTNCTLAGKHTLQPASNSSDAICEDRDPPATQPQETQGPPARPITVQPTEAWPRTSQGPSTRPVEVPGGRAVAAILGLGLVLGLLGPLAILLALYLLRRDQRLPPDAHKPPGGGSFRTPIQEEQADAHSTLAKI

SEQ ID NO: 10134 - protein, 656 aa, Homo sapiens
MRTVVLTMKASVIEMFLVLLVTGVHSNKETAKKIKRPKFTVPQINCDVKAGKIIDPEFIVKCPAGCQDPKYHVYGTDVYASYSSVCGAAVHSGVLDNSGGKILVRKVAGQSGYKGSYSNGVQSLSLPRWRESFIVLESKPKKGVTYPSALTYSSSKSPAAQAGETTKAYQRPPIPGTTAQPVTLMQLLAVTVAVATPTTLPRPSPSAASTTSIPRPQSVGHRSQEMDLWSTATYTSSQNRPRADPGLVPKEELSTQSLEPVSLGDPNCKIDLSFLIDGSTSIGKRRFRIQKQLLADVAQALDIGPAGPLMGVVQYGDNPATHFNLKTHTNSRDLKTAIEKITQRGGLSNVGRAISFVTKNFFSKANGNRSGAPNVVVVMVDGWPTDKVEEASRLARESGINIFFITIEGAAENEKQYVVEPNFANKAVCRTNGFYSLHVQSWFGLHKTLQPLVKRVCDTDRLACSKTCLNSADIGFVIDGSSSVGTGNFRTVLQFVTNLTKEFEISDTDTRIGAVQYTYEQRLEFGFDKYSSKPDILNAIKRVGYWSGGTSTGAAINFALEQLFKKSKPNKRKLMILITDGRSYDDVRIPAMAAHLKGVITYAIGVAWAAQEELEVIATHPARDHSFFVDEFDNLHQYVPRIIQNICTEFNSQPRN

SEQ ID NO: 10135 - protein, 693 aa, Homo sapiens
MRTVVLTMKASVIEMFLVLLVTGVHSNKETAKKIKRPKFTVPQINCDVKAGKIIDPEFIVKCPAGCQDPKYHVYGTDVYASYSSVCGAAVHSGVLDNSGGKILVRKVAGQSGYKGSYSNGVQSLSLPRWRESFIVLESKPKKGVTYPSALTYSSSKSPAAQAGETTKAYQRPPIPGTTAQPVTLMQLLAVTVAVATPTTLPRPSPSAASTTSIPRPQSVGHRSQEMDLWSTATYTSSQNRPRADPGIQRQDPSGAAFQKPVGADVSLGEMDSWKPGSVLLDEGLVPKEELSTQSLEPVSLGDPNCKIDLSFLIDGSTSIGKRRFRIQKQLLADVAQALDIGPAGPLMGVVQYGDNPATHFNLKTHTNSRDLKTAIEKITQRGGLSNVGRAISFVTKNFFSKANGNRSGAPNVVVVMVDGWPTDKVEEASRLARESGINIFFITIEGAAENEKQYVVEPNFANKAVCRTNGFYSLHVQSWFGLHKTLQPLVKRVCDTDRLACSKTCLNSADIGFVIDGSSSVGTGNFRTVLQFVTNLTKEFEISDTDTRIGAVQYTYEQRLEFGFDKYSSKPDILNAIKRVGYWSGGTSTGAAINFALEQLFKKSKPNKRKLMILITDGRSYDDVRIPAMAAHLKGVITYAIGVAWAAQEELEVIATHPARDHSFFVDEFDNLHQYVPRIIQNICTEFNSQPRN

SEQ ID NO: 10136 - protein, 234 aa, Homo sapiens
MAQHGAMGAFRALCGLALLCALSLGQRPTGGPGCGPGRLLLGTGTDARCCRVHTTRCCRDYPGEECCSEWDCMCVQPEFHCGDPCCTTCRHHPCPPGQGVQSQGKFSFGFQCIDCASGTFSGGHEGHCKPWTDCTQFGFLTVFPGNKTHNAVCVPGSPPAEPLGWLTVVLLAVAACVLLLTSAQLGLHIWQLRKTQLLLEVPPSTEDARSCQFPEEERGERSAEEKGRLGDLWV

SEQ ID NO: 10137 - protein, 241 aa, Homo sapiens
MAQHGAMGAFRALCGLALLCALSLGQRPTGGPGCGPGRLLLGTGTDARCCRVHTTRCCRDYPGEECCSEWDCMCVQPEFHCGDPCCTTCRHHPCPPGQGVQSQGKFSFGFQCIDCASGTFSGGHEGHCKPWTDCTQFGFLTVFPGNKTHNAVCVPGSPPAEPLGWLTVVLLAVAACVLLLTSAQLGLHIWQLRSQCMWPRETQLLLEVPPSTEDARSCQFPEEERGERSAEEKGRLGDLWV

SEQ ID NO: 10138 - protein, 171 aa, Homo sapiens
MAKFVIRPATAADCSDILRLIKELAKYEYMEEQVILTEKDLLEDGFGEHPFYHCLVAEVPKEHWTPEGHSIVGFAMYYFTYDPWIGKLLYLEDFFVMSDYRGFGIGSEILKNLSQVAMRCRCSSMHFLVAEWNEPSINFYKRRGASDLSSEEGWRLFKIDKEYLLKMATEE

SEQ ID NO: 10139 - protein, 390 aa, Homo sapiens
MLPGVGVFGTSLTARVIIPLLKDEGFAVKALWGRTQEEAEELAKEMSVPFYTSRIDEVLLHQDVDLVCINLPPPLTRQIAVKTLGIGKNVICDRTATPLDAFRMTSAAHYYPKLMSIMGNVLRFLPAFVRMKQLIEEGYVGEPLVCEVQVHGGSLLGKKYNWSCDDLMGGGGLHSVGTYIIDLLTFLTGQKAVKVHGLLKTFVKQTDHIKGIRQITSDDFCTFQMVLEGGVCCTVTLNFNVPGEFKQDVTVVGSAGRLLAVGTDLYGQRNSAPEQELLVQDATPVSNSLLPEKAFSDIPSPYLRGTIKMMQAVRQAFQDQDDRRTWDGRPLTMAATFDDCLYALCVVDTIKRSSQTGEWQNIAIMTEEPELSPAYLISEAMRRSRMSLYC

SEQ ID NO: 10140 - protein, 448 aa, Homo sapiens
MRRAALRLCALGKGQLTPGRGLTQGPQNPKKQGIFHIHEACSSIHVNHVRDKLREIVGASTNWRDHVKAMEERKLLHSFLAKSQDGLPPRRMKDSYIEVLLPLGSEPELREKYLTVQNTVRFGRILEDLDSLGVLICYMHNKIHSAKMSPLSIVTALVDKIDMCKKSLSPEQDIKFSGHVSWVGKTSMEVKMQMFQLHGDEFCPVLDATFVMVARDSENKGPAFVNPLIPESPEEEELFRQGELNKGRRIAFSSTSLLKMAPSAEERTTIHEMFLSTLDPKTISFRSRVLPSNAVWMENSKLKSLEICHPQERNIFNRIFGGFLMRKAYELAWATACSFGGSRPFVVAVDDIMFQKPVEVGSLLFLSSQVCFTQNNYIQVRVHSEVASLQEKQHTTTNVFHFTFMSEKEVPLVFPKTYGESMLYLDGQRHFNSMSGPATLRKDYLVEP

SEQ ID NO: 10141 - protein, 198 aa, Homo sapiens
MALRHLALLAGLLVGVASKSMENTAQLPECCVDVVGVNASCPGASLCGPGCYRRWNADGSASCVRCGNGTLPAYNGSECRSFAGPGAPFPMNRSSGTPGRPHPGAPRVAASLFLGTFFISSGLILSVAGFFYLKRSSKLPRACYRRNKAPALQPGEAAAMIPPPQSSVRKPRYVRRERPLDRATDPAAFPGEARISNV

SEQ ID NO: 10142 - protein, 344 aa, Homo sapiens
MALRHLALLAGLLVGVASKSMENTAQLPECCVDVVGVNASCPGASLCGPGCYRRWNADGSASCVRCGNGTLPAYNGSECRSFAGPGAPFPMNRSSGTPGRPHPGAPRVAASLFLGTFFISSGLILSVAGFFYLKRSSKLPRACYRRNKAPALQPGEAAAMIPPPQSSGNSSCRIPLWGFPSLGQSQGALWVCPQTGLPGSGSRPPLPGSPGDPPTRQGQGRIWLVPPALDLSWIWPAPPARPPLIPVTSMLFPVPETWGLQERRTHHDRADPQYLLLLEVQLHPRTDAAGLRQALLSSHRFSGAGSGGPKSQPVRKPRYVRRERPLDRATDPAAFPGEARISNV

SEQ ID NO: 10143 - protein, 189 aa, Homo sapiens
MALRHLALLAGLLVGVASKSMENTAQLPECCVDVVGVNASCPGASLCGPGCYRRWNADGSASCVRCGNGTLPAYNGSECRSFAGPGAPFPMNRSSGTPGRPHPGAPRVAASLFLGTFFISSGLILSVAGFFYLKRSSKLPRACYRRNKAPALQPGEAAAMIPPPQSSDVGSAGKEDPPRQGRPPIPAPP

SEQ ID NO: 10144 - protein, 186 aa, Homo sapiens
MEALPLLAATTPDHGRHRRLLLLPLLLFLLPAGAVQGWETEERPRTREEECHFYAGGQVYPGEASRVSVADHSLHLSKAKISKPAPYWEGTAVIDGEFKELKLTDYRGKYLVFFFYPLDFTFVCPTEIIAFGDRLEEFRSINTEVVACSVDSQFTHLAWSVSYTYIRRKKRMDLLLKHGQITLDMI

SEQ ID NO: 10145 - protein, 380 aa, Homo sapiens
MALRHLALLAGLLVGVASKSMENTVTRNSTAVINTQAEGTLSPPGLSSLPVVREWALTHTAQLPECCVDVVGVNASCPGASLCGPGCYRRWNADGSASCVRCGNGTLPAYNGSECRSFAGPGAPFPMNRSSGTPGRPHPGAPRVAASLFLGTFFISSGLILSVAGFFYLKRSSKLPRACYRRNKAPALQPGEAAAMIPPPQSSGNSSCRIPLWGFPSLGQSQGALWVCPQTGLPGSGSRPPLPGSPGDPPTRQGQGRIWLVPPALDLSWIWPAPPARPPLIPVTSMLFPVPETWGLQERRTHHDRADPQYLLLLEVQLHPRTDAAGLRQALLSSHRFSGAGSGGPKSQPVRKPRYVRRERPLDRATDPAAFPGEARISNV

SEQ ID NO: 10146 - protein, 271 aa, Homo sapiens
MEALPLLAATTPDHGRHRRLLLLPLLLFLLPAGAVQGWETEERPRTREEECHFYAGGQVYPGEASRVSVADHSLHLSKAKISKPAPYWEGTAVIDGEFKELKLTDYRGKYLVFFFYPLDFTFVCPTEIIAFGDRLEEFRSINTEVVACSVDSQFTHLAWINTPRRQGGLGPIRIPLLSDLTHQISKDYGVYLEDSGHTLRGLFIIDDKGILRQITLNDLPVGRSVDETLRLVQAFQYTDKHGEVCPAGWKPGSETIIPDPAGKLKYFDKLN

SEQ ID NO: 10147 - protein, 501 aa, Homo sapiens
MGTIHLFRKPQRSFFGKLLREFRLVAADRRSWKILLFGVINLICTGFLLMWCSSTNSIALTAYTYLTIFDLFRDGVSPFWLGWSQTPDLKWSTHLGLPKCWDNRRELPCLSNSLMTCLISYWVTLRKPSPVYSFGFERLEVLAVFASTVLAQLGALFILKESAERFLEQPEIHTGRLLVGTFVALCFNLFTMLSIRNKPFAYVSEAASTSWLQEHVADLSRSLCGIIPGLSSIFLPRMNPFVLIDLAGAFALCITYMLIEINNYFAVDTASAIAIALMTFGTMYPMSVYSGKVLLQTTPPHVIGQLDKLIREVSTLDGVLEVRNEHFWTLGFGSLAGSVHVRIRRDANEQMVLAHVTNRLYTLVSTLTVQIFKDDWIRPALLSGPVAANVLNFSDHHVIPMPLLKGTDDLNPVTSTPAKPSSPPPEFSFNTPGKNVNPVILLNTQTRPYGFGLNHGHTPYSSMLNQGLGVPGIGATQGLRTGFTNIPSRYGTNNRIGQPRP

SEQ ID NO: 10148 - protein, 2045 aa, Homo sapiens
MAGRSHPGPLRPLLPLLVVAACVLPGAGGTCPERALERREEEANVVLTGTVEEILNVDPVQHTYSCKVRVWRYLKGKDLVARESLLDGGNKVVISGFGDPLICDNQVSTGDTRIFFVNPAPPYLWPAHKNELMLNSSLMRITLRNLEEVEFCVEDKPGTHFTPVPPTPPDACRGMLCGFGAVCEPNAEGPGRASCVCKKSPCPSVVAPVCGSDASTYSNECELQRAQCSQQRRIRLLSRGPCGSRDPCSNVTCSFGSTCARSADGLTASCLCPATCRGAPEGTVCGSDGADYPGECQLLRRACARQENVFKKFDGPCDPCQGALPDPSRSCRVNPRTRRPEMLLRPESCPARQAPVCGDDGVTYENDCVMGRSGAARGLLLQKVRSGQCQGRDQCPEPCRFNAVCLSRRGRPRCSCDRVTCDGAYRPVCAQDGRTYDSDCWRQQAECRQQRAIPSKHQGPCDQAPSPCLGVQCAFGATCAVKNGQAACECLQACSSLYDPVCGSDGVTYGSACELEATACTLGREIQVARKGPCDRCGQCRFGALCEAETGRCVCPSECVALAQPVCGSDGHTYPSECMLHVHACTHQISLHVASAGPCETCGDAVCAFGAVCSAGQCVCPRCEHPPPGPVCGSDGVTYGSACELREAACLQQTQIEEARAGPCEQAECGSGGSGSGEDGDCEQELCRQRGGIWDEDSEDGPCVCDFSCQSVPGSPVCGSDGVTYSTECELKKARCESQRGLYVAAQGACRGPTFAPLPPVAPLHCAQTPYGCCQDNITAARGVGLAGCPSACQCNPHGSYGGTCDPATGQCSCRPGVGGLRCDRCEPGFWNFRGIVTDGRSGCTPCSCDPQGAVRDDCEQMTGLCSCKPGVAGPKCGQCPDGRALGPAGCEADASAPATCAEMRCEFGARCVEESGSAHCVCPMLTCPEANATKVCGSDGVTYGNECQLKTIACRQGLQISIQSLGPCQEAVAPSTHPTSASVTVTTPGLLLSQALPAPPGALPLAPSSTAHSQTTPPPSSRPRTTASVPRTTVWPVLTVPPTAPSPAPSLVASAFGESGSTDGSSDEELSGDQEASGGGSGGLEPLEGSSVATPGPPVERASCYNSALGCCSDGKTPSLDAEGSNCPATKVFQGVLELEGVEGQELFYTPEMADPKSELFGETARSIESTLDDLFRNSDVKKDFRSVRLRDLGPGKSVRAIVDVHFDPTTAFRAPDVARALLRQIQVSRRRSLGVRRPLQEHVRFMDFDWFPAFITGATSGAIAAGATARATTASRLPSSAVTPRAPHPSHTSQPVAKTTAAPTTRRPPTTAPSRVPGRRPPAPQQPPKPCDSQPCFHGGTCQDWALGGGFTCSCPAGRGGAVCEKVLGAPVPAFEGRSFLAFPTLRAYHTLRLALEFRALEPQGLLLYNGNARGKDFLALALLDGRVQLRFDTGSGPAVLTSAVPVEPGQWHRLELSRHWRRGTLSVDGETPVLGESPSGTDGLNLDTDLFVGGVPEDQAAVALERTFVGAGLRGCIRLLDVNNQRLELGIGPGAATRGSGVGECGDHPCLPNPCHGGAPCQNLEAGRFHCQCPPGRVGPTCADEKSPCQPNPCHGAAPCRVLPEGGAQCECPLGREGTFCQTASGQDGSGPFLADFNGFSHLELRGLHTFARDLGEKMALEVVFLARGPSGLLLYNGQKTDGKGDFVSLALRDRRLEFRYDLGKGAAVIRSREPVTLGAWTRVSLERNGRKGALRVGDGPRVLGESPVPHTVLNLKEPLYVGGAPDFSKLARAAAVSSGFDGAIQLVSLGGRQLLTPEHVLRQVDVTSFAGHPCTRASGHPCLNGASCVPREAAYVCLCPGGFSGPHCEKGLVEKSAGDVDTLAFDGRTFVEYLNAVTESEKALQSNHFELSLRTEATQGLVLWSGKATERADYVALAIVDGHLQLSYNLGSQPVVLRSTVPVNTNRWLRVVAHREQREGSLQVGNEAPVTGSSPLGATQLDTDGALWLGGLPELPVGPALPKAYGTGFVGCLRDVVVGRHPLHLLEDAVTKPELRPCPTP

SEQ ID NO: 10149 - protein, 212 aa, Homo sapiens
MDYLLMIFSLLFVACQGAPETAVLGAELSAVGENGGEKPTPSPPWRLRRSKRCSCSSLMDKECVYFCHLDIIWVNTPEHVVPYGLGSPRSKRALENLLPTKATDRENRCQCASQKDKKCWNFCQAGKELRAEDIMEKDWNNHKKGKDCSKLGKKCIYQQLVRGRKIRRSSEEHLRQTRSETMRNSVKSSFHDPKLKGKPSRERYVTHNRAHW

SEQ ID NO: 10150 - protein, 326 aa, Homo sapiens
MDYSHQTSLVPCGQDKYISKNELLLHLKTYNLYYEGQNLQLRHREEEDEFIVEGLLNISWGLRRPIRLQMQDDNERIRPPPSSSSWHSGCNLGAQGTTLKPLTVPKVQISEVDAPPEGDQMPSSTDSRGLKPLQEDTPQLMRTRSDVGVRRRGNVRTPSDQRRIRRHRFSINGHFYNHKTSVFTPAYGSVTNVRINSTMTTPQVLKLLLNKFKIENSAEEFALYVVHTSGEKQKLKATDYPLIARILQGPCEQISKVFLMEKDQVEEVTYDVAQYIKFEMPVLKSFIQKLQEEEDREVKKLMRKYTVLRLMIRQRLEEIAETPATI

SEQ ID NO: 10151 - protein, 413 aa, Homo sapiens
MAEAGPQAPPPPGTPSRHEKSLGLLTTKFVSLLQEAKDGVLDLKLAADTLAVRQKRRIYDITNVLEGIGLIEKKSKNSIQWKGVGPGCNTREIADKLIELKAEIEELQQREQELDQHKVWVQQSIRNVTEDVQNSCLAYVTHEDICRCFAGDTLLAIRAPSGTSLEVPIPEGLNGQKKYQIHLKSVSGPIEVLLVNKEAWSSPPVAVPVPPPEDLLQSPSAVSTPPPLPKPALAQSQEASRPNSPQLTPTAVPGSAEVQGMAGPAAEITVSGGPGTDSKDSGELSSLPLGPTTLDTRPLQSSALLDSSSSSSSSSSSSSNSNSSSSSGPNPSTSFEPIKADPTGVLELPKELSEIFDPTRECMSSELLEELMSSEVFAPLLRLSPPPGDHDYIYNLDESEGVCDLFDVPVLNL

SEQ ID NO: 10152 - protein, 104 aa, Homo sapiens
MGRAVKVLQLFKTLHRTRQQVFKNDARALEAARIKINEEFKNNKSETSSKKIEELMKIGSDVELLLRTSVIQGIHTDHNTLKLVPRKDLLVENVPYCDAPTQKQ

SEQ ID NO: 10153 - protein, 449 aa, Homo sapiens
MEFDCEGLRRLLGKYKFRDLTVEELRNVNVFFPHFKYSMDTYGNTYNIPIRFWILDSHPFAPPICFLKPTANMGILVGKHVDAQGRIYLPYLQNWSHPKSVIVGLIKEMIAKFQEELPMYSLSSSDEARQVDLLAYIAKITEGVSDTNSKSWANHENKTVNKITVVGGGELGIACTLAISAKGIADRLVLLDLSEGTKGATMDLEIFNLPNVEISKDLSASAHSKVVIFTVNSLGSSQSYLDVVQSNVDMFRALVPALGHYSQHSVLLVASQPVEIMTYVTWKLSTFPANRVIGIGCNLDSQRLQYIITNVLKAQTSGKEVWVIGEQGEDKVLTWSGQEEVVSHTSQVQLSNRAMELLRVKGQRSWSVGLSVADMVDSIVNNKKKVHSVSALAKGYYDINSEVFLSLPCILGTNGVSEVIKTTLKEDTVTEKLQSSASSIHSLQQQLKL

SEQ ID NO: 10154 - protein, 2718 aa, Homo sapiens
MPRTKQIHPRNLRDKIEEAQKELNGAEVSKKEILQAGVKGTSESLKGVKRKKIVAENHLKKIPKSPLRNPLQAKHKQNTEESSFAVLHSASESHKKQNYIPVKNGKQFTKQNGETPGIIAEASKSEESVSPKKPLFLQQPSELRRWRSEGADPAKFSDLDEQCDSSSLSSKTRTDNSECISSHCGTTSPSYTNTAFDVLLKAMEPELSTLSQKGSPCAIKTEKLRPNKTARSPPKLKNSSMDAPNQTSQELVAESQSSCTSYTVHMSAAQKNEQGAMQSASHLYHQHEHFVPKSNQHNQQLPGCSGFTGSLTNLQNQENAKLEQVYNIAVTSSVGLTSPSSRSQVTPQNQQMDSASPLSISPANSTQSPPMPIYNSTHVASVVNQSVEQMCNLLLKDQKPKKQGKYICEYCNRACAKPSVLLKHIRSHTGERPYPCVTCGFSFKTKSNLYKHKKSHAHTIKLGLVLQPDAGGLFLSHESPKALSIHSDVEDSGESEEEGATDERQHDLGAMELQPVHIIKRMSNAETLLKSSFTPSSPENVIGDFLLQDRSAESQAVTELPKVVVHHVTVSPLRTDSPKAMDPKPELSSAQKQKDLQVTNVQPLSANMSQGGVSRLETNENSHQKGDMNPLEGKQDSHVGTVHAQLQRQQATDYSQEQQGKLLSPRSLGSTDSGYFSRSESADQTVSPPTPFARRLPSTEQDSGRSNGPSAALVTTSTPSALPTGEKALLLPGQMRPPLATKTLEERISKLISDNEALVDDKQLDSVKPRRTSLSRRGSIDSPKSYIFKDSFQFDLKPVGRRTSSSSDIPKSPFTPTEKSKQVFLLSVPSLDCLPITRSNSMPTTGYSAVPANIIPPPHPLRGSQSFDDKIGAFYDDVFVSGPNAPVPQSGHPRTLVRQAAIEDSSANESHVLGTGQSLDESHQGCHAAGEAMSVRSKALAQGPHIEKKKSHQGRGTMFECETCRNRYRKLENFENHKKFYCSELHGPKTKVAMREPEHSPVPGGLQPQILHYRVAGSSGIWEQTPQIRKRRKMKSVGDDEELQQNESGTSPKSSEGLQFQNALGCNPSLPKHNVTIRSDQQHKNIQLQNSHIHLVARGPEQTMDPKLSTIMEQQISSAAQDKIELQRHGTGISVIQHTNSLSRPNSFDKPEPFERASPVSFQELNRTGKSGSLKVIGISQEESHPSRDGSHPHQLALSDALRGELQESSRKSPSERHVLGQPSRLVRQHNIQVPEILVTEEPDRDLEAQCHDQEKSEKFSWPQRSETLSKLPTEKLPPKKKRLRLAEIEHSSTESSFDSTLSRSLSRESSLSHTSSFSASLDIEDVSKTEASPKIDFLNKAEFLMIPAGLNTLNVPGCHREMRRTASEQINCTQTSMEVSDLRSKSFDCGSITPPQTTPLTELQPPSSPSRVGVTGHVPLLERRRGPLVRQISLNIAPDSHLSPVHPTSFQNTALPSVNAVPYQGPQLTSTSLAEFSANTLHSQTQVKDLQAETSNSSSTNVFPVQQLCDINLLNQIHAPPSHQSTQLSLQVSTQGSKPDKNSVLSGSSKSEDCFAPKYQLHCQVFTSGPSCSSNPVHSLPNQVISDPVGTDHCVTSATLPTKLIDSMSNSHPLLPPELRPLGSQVQKVPSSFMLPIRLQSSVPAYCFATLTSLPQILVTQDLPNQPICQTNHSVVPISEEQNSVPTLQKGHQNALPNPEKEFLCENVFSEMSQNSSLSESLPITQKISVGRLSPQQESSASSKRMLSPANSLDIAMEKHQKRAKDENGAVCATDVRPLEALSSRVNEASKQKKPILVRQVCTTEPLDGVMLEKDVFSQPEISNEAVNLTNVLPADNSSTGCSKFVVIEPISELQEFENIKSSTSLTLTVRSSPAPSENTHISPLKCTDNNQERKSPGVKNQGDKVNIQEQSQQPVTSLSLFNIKDTQQLAFPSLKTTTNFTWCYLLRQKSLHLPQKDQKTSAYTDWTVSASNPNPLGLPTKVALALLNSKQNTGKSLYCQAITTHSKSDLLVYSSKWKSSLSKRALGNQKSTVVEFSNKDASEINSEQDKENSLIKSEPRRIKIFDGGYKSNEEYVYVRGRGRGKYICEECGIRCKKPSMLKKHIRTHTDVRPYHCTYCNFSFKTKGNLTKHMKSKAHSKKCVDLGVSVGLIDEQDTEESDEKQRFSYERSGYDLEESDGPDEDDNENEDDDEDSQAESVLSATPSVTASPQHLPSRSSLQDPVSTDEDVRITDCFSGVHTDPMDVLPRALLTRMTVLSTAQSDYNRKTLSPGKARQRAARDENDTIPSVDTSRSPCHQMSVDYPESEEILRSSMAGKAVAITQSPSSVRLPPAAAEHSPQTAAGMPSVASPHPDPQEQKQQITLQPTPGLPSPHTHLFSHLPLHSQQQSRTPYNMVPVGGIHVVPAGLTYSTFVPLQAGPVQLTIPAVSVVHRTLGTHRNTVTEVSGTTNPAGVAELSSVVPCIPIGQIRVPGLQNLSTPGLQSLPSLSMETVNIVGLANTNMAPQVHPPGLALNAVGLQVLTANPSSQSSPAPQAHIPGLQILNIALPTLIPSVSQVAVDAQGAPEMPASQSKACETQPKQTSVASANQVSRTESPQGLPTVQRENAKKVLNPPAPAGDHARLDGLSKMDTEKAASANHVKPKPELTSIQGQPASTSQPLLKAHSEVFTKPSGQQTLSPDRQVPRPTALPRRQPTVHFSDVSSDDDEDRLVIAT

SEQ ID NO: 10155 - protein, 385 aa, Homo sapiens
MASLGPAAAGEQASGAEAEPGPAGPPPPPSPSSLGPLLPLQREPLYNWQATKASLKERFAFLFNSELLSDVRFVLGKGRGAAAAGGPQRIPAHRFVLAAGSAVFDAMFNGGMATTSAEIELPDVEPAAFLALLRFLYSDEVQIGPETVMTTLYTAKKYAVPALEAHCVEFLTKHLRADNAFMLLTQARLFDEPQLASLCLDTIDKSTMDAISAEGFTDIDIDTLCAVLERDTLSIRESRLFGAVVRWAEAECQRQQLPVTFGNKQKVLGKALSLIRFPLMTIEEFAAGPAQSGILSDREVVNLFLHFTVNPKPRVEYIDRPRCCLRGKECCINRFQQVESRWGYSGTSDRIRSLNMRKSKPWDRMIPALVVMGQLTHSGSCSRNP

SEQ ID NO: 10156 - protein, 247 aa, Homo sapiens
MNPFLILAFVGAAVAVPFDDDDKIVGGYTCEENSLPYQVSLNSGSHFCGGSLISEQWVVSAAHCYKTRIQVRLGEHNIKVLEGNEQFINAAKIIRHPKYNRDTLDNDIMLIKLSSPAVINARVSTISLPTTPPAAGTECLISGWGNTLSFGADYPDELKCLDAPVLTQAECKASYPGKITNSMFCVGFLEGGKDSCQRDSGGPVVCNGQLQGVVSWGHGCAWKNRPGVYTKVYNYVDWIKDTIAANS

SEQ ID NO: 10157 - protein, 864 aa, Homo sapiens
MPNVLLPPKESNLFKRILKCYEQKQYKNGLKFCKMILSNPKFAEHGETLAMKGLTLNCLGKKEEAYEFVRKGLRNDVKSHVCWHVYGLLQRSDKKYDEAIKCYRNALKLDKDNLQILRDLSLLQIQMRDLEGYRETRYQLLQLRPTQRASWIGYAIAYHLLKDYDMALKLLEEFRQTQQVPPNKIDYEYSELILYQNQVMREADLLQESLEHIEMYEKQICDKLLVEEIKGEILLKLGRLKEASEVFKNLIDRNAENWCYYEGLEKALQISTLEERLQIYEEISKQHPKAITPRRLPLTLVPGERFRELMDKFLRVNFSKGCPPLFTTLKSLYYNTEKVSIIQELVTNYEASLKTCDFFSPYENGEKEPPTTLLWVQYFLAQHFDKLGQYSLALDYINAAIASTPTLIELFYMKAKIYKHIGNLKEAAKWMDEAQSLDTADRFINSKCAKYMLRANMIKEAEEMCSKFTREGTSAMENLNEMQCMWFQTECISAYQRLGRYGDALKKCHEVERHFFEITDDQFDFHTYCMRKMTLRAYVDLLRLEDILRRHAFYFKAARSAIEIYLKLYDNPLTNESKQQEINSENLSAKELKKMLSKQRRAQKKAKLEEERKHAERERQQKNQKKKRDEEEEEASGLKEELIPEKLERVENPLEEAVKFLIPLKNLVADNIDTHLLAFEIYFRKGKFLLMLQSVKRAFAINSNNPWLHECLIRFSKSVSNHSNLPDIVSKVLSQEMQKIFVKKDLESFNEDFLKRNATSLQHLLSGAKMMYFLDKSRQEKAIAIATRLDETIKDKDVKTLIKVSEALLDGSFGNCSSQYEEYRMACHNLLPFTSAFLPAVNEVDNPNVALNHTANYDVLANEI

SEQ ID NO: 10158 - protein, 103 aa, Homo sapiens
MRIMLLFTAILAFSLAQSFGAVCKEPQEEVVPGGGRSKRDPDLYQLLQRLFKSHSSLEGLLKALSQASTDPKESTSPEKHSPTDVNQENVPSFGILKYPPRAE

SEQ ID NO: 10159 - protein, 332 aa, Homo sapiens
MATLKDQLIYNLLKEEQTPQNKITVVGVGAVGMACAISILMKDLADELALVDVIEDKLKGEMMDLQHGSLFLRTPKIVSGKDYNVTANSKLVIITAGARQQEGESRLNLVQRNVNIFKFIIPNVVKYSPNCKLLIVSNPVDILTYVAWKISGFPKNRVIGSGCNLDSARFRYLMGERLGVHPLSCHGWVLGEHGDSSVPVWSGMNVAGVSLKTLHPDLGTDKDKEQWKEVHKQVVESAYEVIKLKGYTSWAIGLSVADLAESIMKNLRRVHPVSTMIKGLYGIKDDVFLSVPCILGQNGISDLVKVTLTSEEEARLKKSADTLWGIQKELQF

SEQ ID NO: 10160 - protein, 1333 aa, Homo sapiens
MTADKLVFFVNGRKVVEKNADPETTLLAYLRRKLGLSGTKLGCGEGGCGACTVMLSKYDRLQNKIVHFSANACLAPICSLHHVAVTTVEGIGSTKTRLHPVQERIAKSHGSQCGFCTPGIVMSMYTLLRNQPEPTMEEIENAFQGNLCRCTGYRPILQGFRTFARDGGCCGGDGNNPNCCMNQKKDHSVSLSPSLFKPEEFTPLDPTQEPIFPPELLRLKDTPRKQLRFEGERVTWIQASTLKELLDLKAQHPDAKLVVGNTEIGIEMKFKNMLFPMIVCPAWIPELNSVEHGPDGISFGAACPLSIVEKTLVDAVAKLPAQKTEVFRGVLEQLRWFAGKQVKSVASVGGNIITASPISDLNPVFMASGAKLTLVSRGTRRTVQMDHTFFPGYRKTLLSPEEILLSIEIPYSREGEYFSAFKQASRREDDIAKVTSGMRVLFKPGTTEVQELALCYGGMANRTISALKTTQRQLSKLWKEELLQDVCAGLAEELHLPPDAPGGMVDFRCTLTLSFFFKFYLTVLQKLGQENLEDKCGKLDPTFASATLLFQKDPPADVQLFQEVPKGQSEEDMVGRPLPHLAADMQASGEAVYCDDIPRYENELSLRLVTSTRAHAKIKSIDTSEAKKVPGFVCFISADDVPGSNITGICNDETVFAKDKVTCVGHIIGAVVADTPEHTQRAAQGVKITYEELPAIITIEDAIKNNSFYGPELKIEKGDLKKGFSEADNVVSGEIYIGGQEHFYLETHCTIAVPKGEAGEMELFVSTQNTMKTQSFVAKMLGVPANRIVVRVKRMGGGFGGKETRSTVVSTAVALAAYKTGRPVRCMLDRDEDMLITGGRHPFLARYKVGFMKTGTVVALEVDHFSNVGNTQDLSQSIMERALFHMDNCYKIPNIRGTGRLCKTNLPSNTAFRGFGGPQGMLIAECWMSEVAVTCGMPAEEVRRKNLYKEGDLTHFNQKLEGFTLPRCWEECLASSQYHARKSEVDKFNKENCWKKRGLCIIPTKFGISFTVPFLNQAGALLHVYTDGSVLLTHGGTEMGQGLHTKMVQVASRALKIPTSKIYISETSTNTVPNTSPTAASVSADLNGQAVYAACQTILKRLEPYKKKNPSGSWEDWVTAAYMDTVSLSATGFYRTPNLGYSFETNSGNPFHYFSYGVACSEVEIDCLTGDHKNLRTDIVMDVGSSLNPAIDIGQVEGAFVQGLGLFTLEELHYSPEGSLHTRGPSTYKIPAFGSIPIEFRVSLLRDCPNKKAIYASKAVGEPPLFLAASIFFAIKDAIRAARAQHTGNNVKELFRLDSPATPEKIRNACVDKFTTLCVTGVPENCKPWSVRV

SEQ ID NO: 10161 - protein, 456 aa, Homo sapiens
MGITLIWCLALVLIKWITSKRRGAISYDSSDQTALYIRMLGDVRVRSRAGFESERRGSHPYIDFRIFHSQSEIEVSVSARNIRRLLSFQRYLRSSRFFRGTAVSNSLNILDDDYNGQAKCMLEKVGNWNFDIFLFDRLTNGNSLVSLTFHLFSLHGLIEYFHLDMMKLRRFLVMIQEDYHSQNPYHNAVHAADVTQAMHCYLKEPKLANSVTPWDILLSLIAAATHDLDHPGVNQPFLIKTNHYLATLYKNTSVLENHHWRSAVGLLRESGLFSHLPLESRQQMETQIGALILATDISRQNEYLSLFRSHLDRGDLCLEDTRHRHLVLQMALKCADICNPCRTWELSKQWSEKVTEEFFHQGDIEKKYHLGVSPLCDRHTESIANIQIGFMTYLVEPLFTEWARFSNTRLSQTMLGHVGLNKASWKGLQREQSSSEDTDAAFELNSQLLPQENRLS

SEQ ID NO: 10162 - protein, 174 aa, Homo sapiens
MKYKNLMARALYDNVPECAEELAFRKGDILTVIEQNTGGLEGWWLCSLHGRQGIVPGNRVKLLIGPMQETASSHEQPASGLMQQTFGQQKLYQVPNPQAAPRDTIYQVPPSYQNQGIYQVPTGHGTQEQEVYQVPPSVQRSIGGTSGPHVGKKVFQRDGQVSYFLVRASKQTSL

SEQ ID NO: 10163 - protein, 4262 aa, Homo sapiens
MPRPGTMALCLLTLVLSLLPPQAAAEQDLSVNRAVWDGGGCISQGDVLNRQCQQLSQHVRTGSAANTATGTTSTNVVEPRMYLSCSTNPEMTSIESSVTSDTPGVSSTRMTPTESRTTSESTSDSTTLFPSSTEDTSSPTTPEGTDVPMSTPSEESISSTMAFVSTAPLPSFEAYTSLTYKVDMSTPLTTSTQASSSPTTPESTTIPKSTNSEGSTPLTSMPASTMKVASSEAITLLTTPVEISTPVTISAQASSSPTTAEGPSLSNSAPSGGSTPLTRMPLSVMLVVSSEASTLSTTPAATNIPVITSTEASSSPTTAEGTSIPTSTYTEGSTPLTSTPASTMPVATSEMSTLSITPVDTSTLVTTSTEPSSLPTTAEATSMLTSTLSEGSTPLTNMPVSTILVASSEASTTSTIPVDSKTFVTTASEASSSPTTAEDTSIATSTPSEGSTPLTSMPVSTTPVASSEASNLSTTPVDSKTQVTTSTEASSSPPTAEVNSMPTSTPSEGSTPLTSMSVSTMPVASSEASTLSTTPVDTSTPVTTSSEASSSSTTPEGTSIPTSTPSEGSTPLTNMPVSTRLVVSSEASTTSTTPADSNTFVTTSSEASSSSTTAEGTSMPTSTYSERGTTITSMSVSTTLVASSEASTLSTTPVDSNTPVTTSTEATSSSTTAEGTSMPTSTYTEGSTPLTSMPVNTTLVASSEASTLSTTPVDTSTPVTTSTEASSSPTTADGASMPTSTPSEGSTPLTSMPVSKTLLTSSEASTLSTTPLDTSTHITTSTEASCSPTTTEGTSMPISTPSEGSPLLTSIPVSITPVTSPEASTLSTTPVDSNSPVTTSTEVSSSPTPAEGTSMPTSTYSEGRTPLTSMPVSTTLVATSAISTLSTTPVDTSTPVTNSTEARSSPTTSEGTSMPTSTPGEGSTPLTSMPDSTTPVVSSEARTLSATPVDTSTPVTTSTEATSSPTTAEGTSIPTSTPSEGTTPLTSTPVSHTLVANSEASTLSTTPVDSNTPLTTSTEASSPPPTAEGTSMPTSTPSEGSTPLTRMPVSTTMVASSETSTLSTTPADTSTPVTTYSQASSSSTTADGTSMPTSTYSEGSTPLTSVPVSTRLVVSSEASTLSTTPVDTSIPVTTSTEASSSPTTAEGTSIPTSPPSEGTTPLASMPVSTTLVVSSEANTLSTTPVDSKTQVATSTEASSPPPTAEVTSMPTSTPGERSTPLTSMPVRHTPVASSEASTLSTSPVDTSTPVTTSAETSSSPTTAEGTSLPTSTTSEGSTLLTSIPVSTTLVTSPEASTLLTTPVDTKGPVVTSNEVSSSPTPAEGTSMPTSTYSEGRTPLTSIPVNTTLVASSAISILSTTPVDNSTPVTTSTEACSSPTTSEGTSMPNSNPSEGTTPLTSIPVSTTPVVSSEASTLSATPVDTSTPGTTSAEATSSPTTAEGISIPTSTPSEGKTPLKSIPVSNTPVANSEASTLSTTPVDSNSPVVTSTAVSSSPTPAEGTSIAISTPSEGSTALTSIPVSTTTVASSEINSLSTTPAVTSTPVTTYSQASSSPTTADGTSMQTSTYSEGSTPLTSLPVSTMLVVSSEANTLSTTPIDSKTQVTASTEASSSTTAEGSSMTISTPSEGSPLLTSIPVSTTPVASPEASTLSTTPVDSNSPVITSTEVSSSPTPAEGTSMPTSTYTEGRTPLTSITVRTTPVASSAISTLSTTPVDNSTPVTTSTEARSSPTTSEGTSMPNSTPSEGTTPLTSIPVSTTPVLSSEASTLSATPIDTSTPVTTSTEATSSPTTAEGTSIPTSTLSEGMTPLTSTPVSHTLVANSEASTLSTTPVDSNSPVVTSTAVSSSPTPAEGTSIATSTPSEGSTALTSIPVSTTTVASSETNTLSTTPAVTSTPVTTYAQVSSSPTTADGSSMPTSTPREGRPPLTSIPVSTTTVASSEINTLSTTLADTRTPVTTYSQASSSPTTADGTSMPTPAYSEGSTPLTSMPLSTTLVVSSEASTLSTTPVDTSTPATTSTEGSSSPTTAGGTSIQTSTPSERTTPLAGMPVSTTLVVSSEGNTLSTTPVDSKTQVTNSTEASSSATAEGSSMTISAPSEGSPLLTSIPLSTTPVASPEASTLSTTPVDSNSPVITSTEVSSSPIPTEGTSMQTSTYSDRRTPLTSMPVSTTVVASSAISTLSTTPVDTSTPVTNSTEARSSPTTSEGTSMPTSTPSEGSTPFTSMPVSTMPVVTSEASTLSATPVDTSTPVTTSTEATSSPTTAEGTSIPTSTLSEGTTPLTSIPVSHTLVANSEVSTLSTTPVDSNTPFTTSTEASSPPPTAEGTSMPTSTSSEGNTPLTRMPVSTTMVASFETSTLSTTPADTSTPVTTYSQAGSSPTTADDTSMPTSTYSEGSTPLTSVPVSTMPVVSSEASTHSTTPVDTSTPVTTSTEASSSPTTAEGTSIPTSPPSEGTTPLASMPVSTTPVVSSEAGTLSTTPVDTSTPMTTSTEASSSPTTAEDIVVPISTASEGSTLLTSIPVSTTPVASPEASTLSTTPVDSNSPVVTSTEISSSATSAEGTSMPTSTYSEGSTPLRSMPVSTKPLASSEASTLSTTPVDTSIPVTTSTETSSSPTTAKDTSMPISTPSEVSTSLTSILVSTMPVASSEASTLSTTPVDTRTLVTTSTGTSSSPTTAEGSSMPTSTPGERSTPLTNILVSTTLLANSEASTLSTTPVDTSTPVTTSAEASSSPTTAEGTSMRISTPSDGSTPLTSILVSTLPVASSEASTVSTTAVDTSIPVTTSTEASSSPTTAEVTSMPTSTPSETSTPLTSMPVNHTPVASSEAGTLSTTPVDTSTPVTTSTKASSSPTTAEGIVVPISTASEGSTLLTSIPVSTTPVASSEASTLSTTPVDTSIPVTTSTEGSSSPTTAEGTSMPISTPSEVSTPLTSILVSTVPVAGSEASTLSTTPVDTRTPVTTSAEASSSPTTAEGTSMPISTPGERRTPLTSMSVSTMPVASSEASTLSRTPADTSTPVTTSTEASSSPTTAEGTGIPISTPSEGSTPLTSIPVSTTPVAIPEASTLSTTPVDSNSPVVTSTEVSSSPTPAEGTSMPISTYSEGSTPLTGVPVSTTPVTSSAISTLSTTPVDTSTPVTTSTEAHSSPTTSEGTSMPTSTPSEGSTPLTYMPVSTMLVVSSEDSTLSATPVDTSTPVTTSTEATSSTTAEGTSIPTSTPSEGMTPLTSVPVSNTPVASSEASILSTTPVDSNTPLTTSTEASSSPPTAEGTSMPTSTPSEGSTPLTSMPVSTTTVASSETSTLSTTPADTSTPVTTYSQASSSPPIADGTSMPTSTYSEGSTPLTNMSFSTTPVVSSEASTLSTTPVDTSTPVTTSTEASLSPTTAEGTSIPTSSPSEGTTPLASMPVSTTPVVSSEVNTLSTTPVDSNTLVTTSTEASSSPTIAEGTSLPTSTTSEGSTPLSIMPLSTTPVASSEASTLSTTPVDTSTPVTTSSPTNSSPTTAEVTSMPTSTAGEGSTPLTNMPVSTTPVASSEASTLSTTPVDSNTFVTSSSQASSSPATLQVTTMRMSTPSEGSSSLTTMLLSSTYVTSSEASTPSTPSVDRSTPVTTSTQSNSTPTPPEVITLPMSTPSEVSTPLTIMPVSTTSVTISEAGTASTLPVDTSTPVITSTQVSSSPVTPEGTTMPIWTPSEGSTPLTTMPVSTTRVTSSEGSTLSTPSVVTSTPVTTSTEAISSSATLDSTTMSVSMPMEISTLGTTILVSTTPVTRFPESSTPSIPSVYTSMSMTTASEGSSSPTTLEGTTTMPMSTTSERSTLLTTVLISPISVMSPSEASTLSTPPGDTSTPLLTSTKAGSFSIPAEVTTIRISITSERSTPLTTLLVSTTLPTSFPGASIASTPPLDTSTTFTPSTDTASTPTIPVATTISVSVITEGSTPGTTIFIPSTPVTSSTADVFPATTGAVSTPVITSTELNTPSTSSSSTTTSFSTTKEFTTPAMTTAAPLTYVTMSTAPSTPRTTSRGCTTSASTLSATSTPHTSTSVTTRPVTPSSESSRPSTITSHTIPPTFPPAHSSTPPTTSASSTTVNPEAVTTMTTRTKPSTRTTSFPTVTTTAVPTNTTIKSNPTSTPTVPRTTTCFGDGCQNTASRCKNGGTWDGLKCQCPNLYYGELCEEVVSSIDIGPPETISAQMELTVTVTSVKFTEELKNHSSQEFQEFKQTFTEQMNIVYSGIPEYVGVNITKLRHDVFQHHWHPSAKHYGDPVRP

SEQ ID NO: 10164 - protein, 253 aa, Homo sapiens
MANLGCWMLVLFVATWSDLGLCKKRPKPGGWNTGGSRYPGQGSPGGNRYPPQGGGGWGQPHGGGWGQPHGGGWGQPHGGGWGQPHGGGWGQGGGTHSQWNKPSKPKTNMKHMAGAAAAGAVVGGLGGYMLGSAMSRPIIHFGSDYEDRYYRENMHRYPNQVYYRPMDEYSNQNNFVHDCVNITIKQHTVTTTTKGENFTETDVKMMERVVEQMCITQYERESQAYYQRGSSMVLFSSPPVILLISFLIFLIVG

SEQ ID NO: 10165 - protein, 5478 aa, Homo sapiens
MLVIWILTLALRLCASVTTVTPEGSAVHKAISQQGTLWTGEVLEKQTVEQGKSTLRRQKNHFHRSAGELRCRNALKDEGASAGWSVMFAGESVVVLVHLWMTGARVKNLGLVEFASPGDDGDGRAEGFSLGLPLSEQARAAGAREKERQETVINHSTFSGFSQITGSTVNTSIGGNTTSASTPSSSDPFTTFSDYGVSVTFITGSTATKHFLDSSTNSGHSEESTVSHSGPGATGTTLFPSHSATSVFVGEPKTSPITSASMETTALPGSTTTAGLSEKSTTFYSSPRSPDRTLSPARTTSSGVSEKSTTSHSRPGPTHTIAFPDSTTMPGVSQESTASHSIPGSTDTTLSPGTTTPSSLGPESTTFHSSPGYTKTTRLPDNTTTSGLLEASTPVHSSTGSPHTTLSPSSSTTHEGEPTTFQSWPSSKDTSPAPSGTTSAFVKLSTTYHSSPSSTPTTHFSASSTTLGHSEESTPVHSSPVATATTPPPARSATSGHVEESTAYHRSPGSTQTMHFPESSTTSGHSEESATFHGSTTHTKSSTPSTTAALAHTSYHSSLGSTETTHFRDSSTISGRSEESKASHSSPDAMATTVLPAGSTPSVLVGDSTPSPISSGSMETTALPGSTTKPGLSEKSTTFYSSPRSPDTTHLPASMTSSGVSEESTTSHSRPGSTHTTAFPGSTTMPGLSQESTASHSSPGPTDTTLSPGSTTASSLGPEYTTFHSRPGSTETTLLPDNTTASGLLEASMPVHSSTRSPHTTLSPAGSTTRQGESTTFHSWPSSKDTRPAPPTTTSAFVEPSTTSHGSPSSIPTTHISARSTTSGLVEESTTYHSSPGSTQTMHFPESDTTSGRGEESTTSHSSTTHTISSAPSTTSALVEEPTSYHSSPGSTATTHFPDSSTTSGRSEESTASHSSQDATGTIVLPARSTTSVLLGESTTSPISSGSMETTALPGSTTTPGLSERSTTFHSSPRSPATTLSPASTTSSGVSEESTTSRSRPGSTHTTAFPDSTTTPGLSRHSTTSHSSPGSTDTTLLPASTTTSGPSQESTTSHSSSGSTDTALSPGSTTALSFGQESTTFHSNPGSTHTTLFPDSTTSSGIVEASTRVHSSTGSPRTTLSPASSTSPGLQGESTAFQTHPASTHTTPSPPSTATAPVEESTTYHRSPGSTPTTHFPASSTTSGHSEKSTIFHSSPDASGTTPSSAHSTTSGRGESTTSRISPGSTEITTLPGSTTTPGLSEASTTFYSSPRSPTTTLSPASMTSLGVGEESTTSRSQPGSTHSTVSPASTTTPGLSEESTTVYSSSRGSTETTVFPHSTTTSVHGEEPTTFHSRPASTHTTLFTEDSTTSGLTEESTAFPGSPASTQTGLPATLTTADLGEESTTFPSSSGSTGTKLSPARSTTSGLVGESTPSRLSPSSTETTTLPGSPTTPSLSEKSTTFYTSPRSPDATLSPATTTSSGVSEESSTSHSQPGSTHTTAFPDSTTTSDLSQEPTTSHSSQGSTEATLSPGSTTASSLGQQSTTFHSSPGDTETTLLPDDTITSGLVEASTPTHSSTGSLHTTLTPASSTSAGLQEESTTFQSWPSSSDTTPSPPGTTAAPVEVSTTYHSRPSSTPTTHFSASSTTLGRSEESTTVHSSPGATGTALFPTRSATSVLVGEPTTSPISSGSTETTALPGSTTTAGLSEKSTTFYSSPRSPDTTLSPASTTSSGVSEESTTSHSRPGSTHTTAFPGSTTMPGVSQESTASHSSPGSTDTTLSPGSTTASSLGPESTTFHSSPGSTETTLLPDNTTASGLLEASTPVHSSTGSPHTTLSPAGSTTRQGESTTFQSWPSSKDTMPAPPTTTSAFVELSTTSHGSPSSTPTTHFSASSTTLGRSEESTTVHSSPVATATTPSPARSTTSGLVEESTAYHSSPGSTQTMHFPESSTASGRSEESRTSHSSTTHTISSPPSTTSALVEEPTSYHSSPGSTATTHFPDSSTTSGRSEESTASHSSQDATGTIVLPARSTTSVLLGESTTSPISSGSMETTALPGSTTTPGLSEKSTTFHSSPRSPATTLSPASTTSSGVSEESTTSHSRPGSTHTTAFPDSTTTPGLSRHSTTSHSSPGSTDTTLLPASTTTSGPSQESTTSHSSPGSTDTALSPGSTTALSFGQESTTFHSSPGSTHTTLFPDSTTSSGIVEASTRVHSSTGSPRTTLSPASSTSPGLQGESTAFQTHPASTHTTPSPPSTATAPVEESTTYHRSPGSTPTTHFPASSTTSGHSEKSTIFHSSPDASGTTPSSAHSTTSGRGESTTSRISPGSTEITTLPGSTTTPGLSEASTTFYSSPRSPTTTLSPASMTSLGVGEESTTSRSQPGSTHSTVSPASTTTPGLSEESTTVYSSSPGSTETTVFPRTPTTSVRGEEPTTFHSRPASTHTTLFTEDSTTSGLTEESTAFPGSPASTQTGLPATLTTADLGEESTTFPSSSGSTGTTLSPARSTTSGLVGESTPSRLSPSSTETTTLPGSPTTPSLSEKSTTFYTSPRSPDATLSPATTTSSGVSEESSTSHSQPGSTHTTAFPDSTTTPGLSRHSTTSHSSPGSTDTTLLPASTTTSGPSQESTTSHSSPGSTDTALSPGSTTALSFGQESTTFHSSPGSTHTTLFPDSTTSSGIVEASTRVHSSTGSPRTTLSPASSTSPGLQGESTTFQTHPASTHTTPSPPSTATAPVEESTTYHRSPGSTPTTHFPASSTTSGHSEKSTIFHSSPDASGTTPSSAHSTTSGRGESTTSRISPGSTEITTLPGSTTTPGLSEASTTFYSSPRSPTTTLSPASMTSLGVGEESTTSRSQPGSTHSTVSPASTTTPGLSEESTTVYSSSPGSTETTVFPRSTTTSVRGEEPTTFHSRPASTHTTLFTEDSTTSGLTEESTAFPGSPASTQTGLPATLTTADLGEESTTFPSSSGSTGTTLSPARSTTSGLVGESTPSRLSPSSTETTTLPGSPTTPSLSEKSTTFYTSPRSPDATLSPATTTSSGVSEESSTSHSQPGSTHTTAFPDSTTTSGLSQEPTASHSSQGSTEATLSPGSTTASSLGQQSTTFHSSPGDTETTLLPDDTITSGLVEASTPTHSSTGSLHTTLTPASSTSAGLQEESTTFQSWPSSSDTTPSPPGTTAAPVEVSTTYHSRPSSTPTTHFSASSTTLGRSEESTTVHSSPGATGTALFPTRSATSVLVGEPTTSPISSGSTETTALPGSTTTAGLSEKSTTFYSSPRSPDTTLSPASTTSSGVSEESTTSHSRPGSTHTTAFPGSTTMPGVSQESTASHSSPGSTDTTLSPGSTTASSLGPESTTFHSGPGSTETTLLPDNTTASGLLEASTPVHSSTGSPHTTLSPAGSTTRQGESTTFQSWPNSKDTTPAPPTTTSAFVELSTTSHGSPSSTPTTHFSASSTTLGRSEESTTVHSSPVATATTPSPARSTTSGLVEESTTYHSSPGSTQTMHFPESDTTSGRGEESTTSHSSTTHTISSAPSTTSALVEEPTSYHSSPGSTATTHFPDSSTTSGRSEESTASHSSQDATGTIVLPARSTTSVLLGESTTSPISSGSMETTALPGSTTTPGLSEKSTTFHSSPRSPATTLSPASTTSSGVSEESTTSHSRPGSTHTTAFPDSTTTPGLSRHSTTSHSSPGSTDTTLLPASTTTSGSSQESTTSHSSSGSTDTALSPGSTTALSFGQESTTFHSSPGSTHTTLFPDSTTSSGIVEASTRVHSSTGSPRTTLSPASSTSPGLQGESTAFQTHPASTHTTPSPPSTATAPVEESTTYHRSPGSTPTTHFPASSTTSGHSEKSTIFHSSPDASGTTPSSAHSTTSGRGESTTSRISPGSTEITTLPGSTTTPGLSEASTTFYSSPRSPTTTLSPASMTSLGVGEESTTSRSQPGSTHSTVSPASTTTPGLSEESTTVYSSSPGSTETTVFPRSTTTSVRREEPTTFHSRPASTHTTLFTEDSTTSGLTEESTAFPGSPASTQTGLPATLTTADLGEESTTFPSSSGSTGTKLSPARSTTSGLVGESTPSRLSPSSTETTTLPGSPTTPSLSEKSTTFYTSPRSPDATLSPATTTSSGVSEESSTSHSQPGSTHTTAFPDSTTTSGLSQEPTTSHSSQGSTEATLSPGSTTASSLGQQSTTFHSSPGDTETTLLPDDTITSGLVEASTPTHSSTGSLHTTLTPASSTSTGLQEESTTFQSWPSSSDTTPSPPSTTAVPVEVSTTYHSRPSSTPTTHFSASSTTLGRSEESTTVHSSPGATGTALFPTRSATSVLVGEPTTSPISSGSTETTALPGSTTTAGLSEKSTTFYSSPRSPDTTLSPASTTSSGVSEESTTSHSRPGSMHTTAFPSSTTMPGVSQESTASHSSPGSTDTTLSPGSTTASSLGPESTTFHSSPGSTETTLLPDNTTASGLLEASTPVHSSTGSPHTTLSPAGSTTRQGESTTFQSWPNSKDTTPAPPTTTSAFVELSTTSHGSPSSTPTTHFSASSTTLGRSEESTTVHSSPVATATTPSPARSTTSGLVEESTTYHSSPGSTQTMHFPESNTTSGRGEESTTSHSSTTHTISSAPSTTSALVEEPTSYHSSPGSTATTHFPDSSTTSGRSEESTASHSSQDATGTIVLPARSTTSVLLGESTTSPISSGSMETTALPGSTTTPGLSEKSTTFHSSPSSTPTTHFSASSTTLGRSEESTTVHSSPVATATTPSPARSTTSGLVEESTAYHSSPGSTQTMHFPESSTASGRSEESRTSHSSTTHTISSPPSTTSALVEEPTSYHSSPGSIATTHFPESSTTSGRSEESTASHSSPDTNGITPLPAHFTTSGRIAESTTFYISPGSMETTLASTATTPGLSAKSTILYSSSRSPDQTLSPASMTSSSISGEPTSLYSQAESTHTTAFPASTTTSGLSQESTTFHSKPGSTETTLSPGSITTSSFAQEFTTPHSQPGSALSTVSPASTTVPGLSEESTTFYSSPGSTETTAFSHSNTMSIHSQQSTPFPDSPGFTHTVLPATLTTTDIGQESTAFHSSSDATGTTPLPARSTASDLVGEPTTFYISPSPTYTTLFPASSSTSGLTEESTTFHTSPSFTSTIVSTESLETLAPGLCQEGQIWNGKQCVCPQGYVGYQCLSPLESFPVETPEKLNATLGMTVKVTYRNFTEKMNDASSQEYQNFSTLFKNRMDVVLKGDNLPQYRGVNIRRLLNGSIVVKNDVILEADYTLEYEELFENLAEIVKAKIMNETRTTLLDPDSCRKAILCYSEEDTFVDSSVTPGFDFQEQCTQKAAEGYTQFYYVDVLDGKLACVNKCTKGTKSQMNCNLGTCQLQRSGPRCLCPNTNTHWYWGETCEFNIAKSLVYGIVGAVMAVLLLALIILIILFSLSQRKRHREQYDVPQEWRKEGTPGIFQKTAIWEDQNLRESRFGLENAYNNFRPTLETVDSGTELHIQRPEMVASTV

SEQ ID NO: 10166 - protein, 834 aa, Homo sapiens
MKYKNLMARALYDNVPECAEELAFRKGDILTVIEQNTGGLEGWWLCSLHGRQGIVPGNRVKLLIGPMQETASSHEQPASGLMQQTFGQQKLYQVPNPQAAPRDTIYQVPPSYQNQGIYQVPTGHGTQEQEVYQVPPSVQRSIGGTSGPHVGKKVITPVRTGHGYVYEYPSRYQKDVYDIPPSHTTQGVYDIPPSSAKGPVFSVPVGEIKPQGVYDIPPTKGVYAIPPSACRDEAGLREKDYDFPPPMRQAGRPDLRPEGVYDIPPTCTKPAGKDLHVKYNCDIPGAAEPVARRHQSLSPNHPPPQLGQSVGSQNDAYDVPRGVQFLEPPAETSEKANPQERDGVYDVPLHNPPDAKGSRDLVDGINRLSFSSTGSTRSNMSTSSTSSKESSLSASPAQDKRLFLDPDTAIERLQRLQQALEMGVSSLMALVTTDWRCYGYMERHINEIRTAVDKVELFLKEYLHFVKGAVANAACLPELILHNKMKRELQRVEDSHQILSQTSHDLNECSWSLNILAINKPQNKCDDLDRFVMVAKTVPDDAKQLTTTINTNAEALFRPGPGSLHLKNGPESIMNSTEYPHGGSQGQLLHPGDHKAQAHNKALPPGLSKEQAPDCSSSDGSERSWMDDYDYVHLQGKEEFERQQKELLEKENIMKQNKMQLEHHQLSQFQLLEQEITKPVENDISKWKPSQSLPTTNSGVSAQDRQLLCFYYDQCETHFISLLNAIDALFSCVSSAQPPRIFVAHSKFVILSAHKLVFIGDTLTRQVTAQDIRNKVMNSSNQLCEQLKTIVMATKMAALHYPSTTALQEMVHQVTDLSRNAQLFKRSLLEMATF

SEQ ID NO: 10167 - protein, 3323 aa, Homo sapiens
MQLLGLLGLLWMLKASPWATGTLSTATSISQVPFPRAEAASAVLSNSPHSRDLAGWPLGVPQLASPAPGHRENAPMTLTTSPHDTLISETLLNSPVSSNTSTTPTSKFAFKVETTPPTVLVYSATTECVYPTSFIITISHPTSICVTTTQVAFTSSYTSTPVTQKPVTTVTSTYSMTTTEKGTSAMTSSPSTTTARETPIVTVTPSSVSATDTTFHTTISSTTRTTERTPLPTGSIHTTTSPTPVFTTLKTAVTSTSPITSSITSTNTVTSMTTTASQPTATNTLSSPTRTILSSTPVLSTETITSGITNTTPLSTLVTTLPTTISRSTPTSETTYTTSPTSTVTDSTTKIAYSTSMTGTLSTETSLPPTSSSLPTTETATTPMTNLVTTTTEISSHSTPSFSSSTIYSTVSTSTTAISSLPPTSGTMVTSTTMTPSSLSTDIPFTTPTTITHHSVGSTGFLTTATDLTSTFTVSSSSAMSTSVIPSSPSIQNTETSSLVSMTSATTPNVRPTFVSTLSTPTSSLLTTFPATYSFSSSMSASSAGTTHTESISSPPASTSTLHTTAESTLAPTTTTSFTTSTTMEPPSTTAATTGTGQTTFTSSTATFPETTTPTPTTDMSTESLTTAMTSPPITSSVTSTNTVTSMTTTTSPPTTTNSFTSLTSMPLSSTPVPSTEVVTSGTINTIPPSILVTTLPTPNASSMTTSETTYPNSPTGPGTNSTTEITYPTTMTETSSTATSLPPTSPLVSTAKTAKTPTTNLVTTTTKTTSHSTTSFTSSTVYSTASTYTTAITSVPTTLGTMVTSTSMISSTVSTGIPTSQPTTITPSSVGISGSLPMMTDLTSVYTVSNMSARPTTVIPSSPTVQNTEISISVSMTSATTPSGGPTFTSTENTPTRSLLTSFPMTHSFSSSMSESSAGTTHTESISSPRGTTSTLHTTVESTPSPTTTTSFTTSTMMEPPSSTVSTTGRGQTTFPSSTATFPETTTLTPTTDISTVSLTTAMTSPPPVSSSITPTNTMTSMRTTTYWPTATNTLSPLTSSILSSTPVPSTEMITSHTTNTTPLSTLVTTLLTTITRSTPTSETTYPTSPTSIVSDSTTEITYSTSITGTLSTATTLPPTSSSLPTTETATMTPTTTLITTTPNTTSLSTPSFTSSTIYSTVSTSTTAISSASPTSGTMVTSTTMTPSSLSTDTPSTTPTTITYPSVGSTGFLTTATDLTSTFTVSSSSAMSTSVIPSSPSIQNTETSSLVSMTSATTPSLRPTITSTDSTLTSSLLTTFPSTYSFSSSMSASSAGTTHTETISSLPASTNTIHTTAESALAPTTTTSFTTSPTMEPPSTTVATTGTGQTTFPSSTATFLETTTLTPTTDFSTESLTTAMTSTPPITSSITPTDTMTSMRTTTSWPTATNTLSPLTSSILSSTPVPSTEVTTSHTTNTNPVSTLVTTLPITITRSTLTSETAYPSSPTSTVTESTTEITYPTTMTETSSTATSLPPTSSLVSTAETAKTPTTNLVTTTTKTTSHSTTSFTSSTIYSTASTPTTAITSVPTTLGTMVTSTSMIPSTVSTGIPTSQPTTITPSSVGISGSLPMMTDLTSVYTVSSMSARPTSVIPSSPTVQNTETSIFVSMMSATTPSGGPTFTSTENTPTRSLLTSFPVTHSFSSSMSASSVGTTHTQSISSPPAITSTLHTTAESTPSPTTTMSFTTFTKMETPSSTVATTGTGQTTFTSSTATSPKTTTLTPTSDISTGSFKTAVSSTPPITSSITSTYTVTSMTTTTPLGPTATNTLPSFTSSVSSSTPVPSTEAITSGTTNTTPLSTLVTTFSNSDTSSTPTSETTYPTSLTSALTDSTTRTTYSTNMTGTLSTVTSLRPTSSSLLTTVTATVPTTNLVTTTTKITSHSTPSFTSSIATTETPSHSTPRFTSSITTTETPSHSTPRFTSSITNTKTTSHSSPSFTSSITTTETTSHNTPSLTSSITTTKTTSHSTPSYTSLITTTTTTSHSTPSFTSSITTTETTSHNTPSLTSSITTTETTSHSTPSFTSSITTETTSHSTPSFTSLITITEITSHSTLSYTTSITTTETPSHSTLSFTSSITTTETTSHSTPSFTSSITTSEMPSHSTPSFTSSITTTENATHSTPNFTSSITTTETTSHSTPSFTSLITTTETTSHRWGTTETTSYSTPSFTSSNTITETTSHSTPSYITSITTTETPSSSTPSFSSSITTTETTSHSTPGFTSSITTTETTSHSTPSFTSSITTTETTSHDTPSFTSSITTSETPSHSTPSSTSLITTTKTTSHSTPSFTSSITTTETTSHSAHSFTSSITTTETTSHNTRSFTSSITTTETNSHSTTSFTSSITTTETTSHSTPSFSSSITTTETPLHSTPGLTSWVTTTKTTSHITPGLTSSITTTETTSHSTPGFTSSITTTETTSESTPSLSSSTIYSTVSTSTTAITSHFTTSETAVTPTPVTPSSLSTDIPTTSLRTLTPSSVGTSTSLTTTTDFPSIPTDISTLPTRTHIISSSPSIQSTETSSLVGTTSPTMSTVRMTLRITENTPISSFSTSIVVIPETPTQTPPVLTSATGTQTSPAPTTVTFGSTDSSTSTLHTLTPSTALSTIVSTSQVPIPSTHSSTLQTTPSTPSLQTSLTSTSEFTTESFTRGSTSTNAILTSFSTIIWSSTPTIIMSSSPSSASITPVFSTTIHSVPSSPYIFSTENVGSASITGFPSLSSSATTSTSSTSSSLTTALTEITPFSYISLPSTTPCPGTITITIVPASPTDPCVEMDPSTEATSPPTTPLTVFPFTTEMVTCPTSISIQTTLTTYMDTSSMMPESESSISPNASSSTGTGTVPTNTVFTSTRLPTSETWLSNSSVIPLPLPGVSTIPLTMKPSSSLPTILRTSSKSTHPSPPTTRTSETPVATTQTPTTLTSRRTTRITSQMTTQSTLTTTAGTCDNGGTWEQGQCACLPGFSGDRCQLQTRCQNGGQWDGLKCQCPSTFYGSSCEFAVEQVDLDVVETEVGMEVSVDQQFSPDLNDNTSQAYRDFNKTFWNQMQKIFADMQGFTFKGVEILSLRNGSIVVDYLVLLEMPFSPQLESEYEQVKTTLKEGLQNASQDVNSCQDSQTLCFKPDSIKVNNNSKTELTPAAICRRAAPTGYEEFYFPLVEATRLRCVTKCTSGVDNAIDCHQGQCVLETSGPTCRCYSTDTHWFSGPRCEVAVHWRALVGGLTAGAALLVLLLLALGVRAVRSGWWGGQRRGRSWDQDRKWFETWDEEVVGTFSNWGFEDDGTDKDTNFYVALENVDTTMKVHIKRPEMTSSSV

SEQ ID NO: 10168 - protein, 528 aa, Homo sapiens
MDAQQTKTNEARLWGDHGQEALESAHVCLINATATGTEILKNLVLPGIGSFTIIDGNQVSGEDAGNNFFLQRSSIGKNRAEAAMEFLQELNSDVSGSFVEESPENLLDNDPSFFCRFTVVVATQLPESTSLRLADVLWNSQIPLLICRTYGLVGYMRIIIKEHPVIESHPDNALEDLRLDKPFPELREHFQSYDLDHMEKKDHSHTPWIVIIAKYLAQWYSETNGRIPKTYKEKEDFRDLIRQGILKNENGAPEDEENFEEAIKNVNTALNTTQIPSSIEDIFNDDRCINITKQTPSFWILARALKEFVAKEGQGNLPVRGTIPDMIADSGKYIKLQNVYREKAKKDAAAVGNHVAKLLQSIGQAPESISEKELKLLCSNSAFLRVVRCRSLAEEYGLDTINKDEIISSMDNPDNEIVLYLMLRAVDRFHKQQGRYPGVSNYQVEEDIGKLKSCLTGFLQEYGLSVMVKDDYVHEFCRYGAAEPHTIAAFLGGAAAQEVIKIITKQFVIFNNTYIYSGMSQTSATFQL

SEQ ID NO: 10169 - protein, 684 aa, Homo sapiens
MQSREDVPRSRRLASPRGGRRPKRISKPSVSAFFTGPEELKDTAHSAALLAQLKSFYDARLLCDVTIEVVTPGSGPGTGRLFSCNRNVLAAACPYFKSMFTGGMYESQQASVTMHDVDAESFEVLVDYCYTGRVSLSEANVQRLYAASDMLQLEYVREACASFLARRLDLTNCTAILKFADAFDHHKLRSQAQSYIAHNFKQLSRMGSIREETLADLTLAQLLAVLRLDSLDIESERTVCHVAVQWLEAAAKERGPSAAEVFKCVRWMHFTEEDQDYLEGLLTKPIVKKYCLDVIEGALQMRYGDLLYKSLVPVPNSSSSSSSSNSLVSAAENPPQRLGMCAKEMVIFFGHPRDPFLCYDPYSGDIYTMPSPLTSFAHTKTVTSSAVCVSPDHDIYLAAQPRKDLWVYKPAQNSWQQLADRLLCREGMDVAYLNGYIYILGGRDPITGVKLKEVECYSVQRNQWALVAPVPHSFYSFELIVVQNYLYAVNSKRMLCYDPSHNMWLNCASLKRSDFQEACVFNDEIYCICDIPVMKVYNPARGEWRRISNIPLDSETHNYQIVNHDQKLLLITSTTPQWKKNRVTVYEYDTREDQWINIGTMLGLLQFDSGFICLCARVYPSCLEPGQSFITEEDDARSESSTEWDLDGFSELDSESGSSSSFSDDEVWVQVAPQRNAQDQQGSL

SEQ ID NO: 10170 - protein, 519 aa, Homo sapiens
MIPVSLVVVVVGGWTVVYLTDLVLKSSVYFKHSYEDWLENNGLSISPFHIRWQTAVFNRAFYSWGRRKARMLYQWFNFGMVFGVIAMFSSFFLLGKTLMQTLAQMMADSPSSYSSSSSSSSSSSSSSSSSSSSSSSLHNEQVLQVVVPGINLPVNQLTYFFTAVLISGVVHEIGHGIAAIREQVRFNGFGIFLFIIYPGAFVDLFTTHLQLISPVQQLRIFCAGIWHNFVLALLGILALVLLPVILLPFYYTGVGVLITEVAEDSPAIGPRGLFVGDLVTHLQDCPVTNVQDWNECLDTIAYEPQIGYCISASTLQQLSFPVRAYKRLDGSTECCNNHSLTDVCFSYRNNFNKRLHTCLPARKAVEATQVCRTNKDCKKSSSSSFCIIPSLETHTRLIKVKHPPQIDMLYVGHPLHLHYTVSITSFIPRFNFLSIDLPVVVETFVKYLISLSGALAIVNAVPCFALDGQWILNSFLDATLTSVIGDNDVKDLIGFFILLGGSVLLAANVTLGLWMVTAR

SEQ ID NO: 10171 - protein, 674 aa, Homo sapiens
MQSREDAPRSRRLASPRGGKRPKKIHKPTVSAFFTGPEELKDTAHSAALLAQLKSFYDARLLCDVTIEVVTPGSGPGTGRLFPCNRNVLAAACPYFKSMFTGGMYESQQASVTMHDVDAESFEVLVDYCYTGRVSLSEANVERLYAASDMLQLEYVREACASFLARRLDLTNCTAILKFADAFGHRKLRSQAQSYIAQNFKQLSHMGSIREETLADLTLAQLLAVLRLDSLDVESEQTVCHVAVQWLEAAPKERGPSAAEVFKCVRWMHFTEEDQDYLEGLLTKPIVKKYCLDVIEGALQMRYGDLLYKSLVPVPNSSSSSSSSNSLVSAAENPPQRLGMCAKEMVIFFGHPRDPFLCCDPYSGDLYKVPSPLTCLAHTRTVTTLAVCISPDHDIYLAAQPRTDLWVYKPAQNSWQQLADRLLCREGMDVAYLNGYIYILGGRDPITGVKLKEVECYNVKRNQWALVAPLPHSFLSFDLMVIRDYLYALNSKRMFCYDPSHNMWLKCVSLKRNDFQEACVFNEEIYCICDIPVMKVYNPVRAEWRQMNNIPLVSETNNYRIIKHGQKLLLITSRTPQWKKNRVTVYEYDIRGDQWINIGTTLGLLQFDSNFFCLSARVYPSCLEPGQSFLTEEEEIPSESSTEWDLGGFSEPDSESGSSSSLSDDDFWVRVAPQ

SEQ ID NO: 10172 - protein, 376 aa, Homo sapiens
MADYWKSQPKKFCDYCKCWIADNRPSVEFHERGKNHKENVAKRISEIKQKSLDKAKEEEKASKEFAAMEAAALKAYQEDLKRLGLESEILEPSITPVTSTIPPTSTSNQQKEKKEKKKRKKDPSKGRWVEGITSEGYHYYYDLISGASQWEKPEGFQGDLKKTAVKTVWVEGLSEDGFTYYYNTETGESRWEKPDDFIPHTSDLPSSKVNENSLGTLDESKSSDSHSDSDGEQEAEEGGVSTETEKPKIKFKEKNKNSDGGSDPETQKEKSIQKQNSLGSNEEKSKTLKKSNPYGEWQEIKQEVESHEEVDLELPSTENEYVSTSEADGGGEPKVVFKEKTVTSLGVMADGVAPVFKKRRTENGKSRNLRQRGDDQ

SEQ ID NO: 10173 - protein, 507 aa, Homo sapiens
MEFLLGNPFSTPVGQCLEKATDGSLQSEDWTLNMEICDIINETEEGPKDAIRALKKRLNGNRNYREVMLALTVLETCVKNCGHRFHILVANRDFIDSVLVKIISPKNNPPTIVQDKVLALIQAWADAFRSSPDLTGVVHIYEELKRKGVEFPMADLDALSPIHTPQRSVPEVDPAATMPRSQSQQRTSAGSYSSPPPAPYSAPQAPALSVTGPITANSEQIARLRSELDVVRGNTKVMSEMLTEMVPGQEDSSDLELLQELNRTCRAMQQRIVELISRVSNEEVTEELLHVNDDLNNVFLRYERFERYRSGRSVQNASNGVLNEVTEDNLIDLGPGSPAVVSPMVGNTAPPSSLSSQLAGLDLGTESVSGTLSSLQQCNPRDGFDMFAQTRGNSLAEQRKTVTYEDPQAVGGLASALDNRKQSSEGIPVAQPSVMDDIEVWLRTDLKGDDLEEGVTSEEFDKFLEERAKAAEMVPDLPSPPMEAPAPASNPSGRKKPERSEDALFAL

SEQ ID NO: 10174 - protein, 376 aa, Homo sapiens
MVSWKGIYFILTLFWGSFFGSIFMLSPFLPLMFVNPSWYRWINNRLVATWLTLPVALLETMFGVKVIITGDAFVPGERSVIIMNHRTRMDWMFLWNCLMRYSYLRLEKICLKASLKGVPGFGWAMQAAAYIFIHRKWKDDKSHFEDMIDYFCDIHEPLQLLIFPEGTDLTENSKSRSNAFAEKNGLQKYEYVLHPRTTGFTFVVDRLREGKNLDAVHDITVAYPHNIPQSEKHLLQGDFPREIHFHVHRYPIDTLPTSKEDLQLWCHKRWEEKEERLRSFYQGEKNFYFTGQSVIPPCKSELRVLVVKLLSILYWTLFSPAMCLLIYLYSLVKWYFIITIVIFVLQERIFGGLEIIELACYRLLHKQPHLNSKKNE

SEQ ID NO: 10175 - protein, 519 aa, Homo sapiens
MAAEREPPPLGDGKPTDFEDLEDGEDLFTSTVSTLESSPSSPEPASLPAEDISANSNGPKPTEVVLDDDREDLFAEATEEVSLDSPEREPILSSEPSPAVTPVTPTTLIAPRIESKSMSAPVIFDRSREEIEEEANGDIFDIEIGVSDPEKVGDGMNAYMAYRVTTKTSLSMFSKSEFSVKRRFSDFLGLHSKLASKYLHVGYIVPPAPEKSIVGMTKVKVGKEDSSSTEFVEKRRAALERYLQRTVKHPTLLQDPDLRQFLESSELPRAVNTQALSGAGILRMVNKAADAVNKMTIKMNESDAWFEEKQQQFENLDQQLRKLHVSVEALVCHRKELSANTAAFAKSAAMLGNSEDHTALSRALSQLAEVEEKIDQLHQEQAFADFYMFSELLSDYIRLIAAVKGVFDHRMKCWQKWEDAQITLLKKREAEAKMMVANKPDKIQQAKNEIREWEAKVQQGERDFEQISKTIRKEVGRFEKERVKDFKTVIIKYLESLVQTQQQLIKYWEAFLPEAKAIA

SEQ ID NO: 10176 - protein, 114 aa, Homo sapiens
MEKPLFPLVPLHWFGFGYTALVVSGGIVGYVKTGSVPSLAAGLLFGSLAGLGAYQLYQDPRNVWGFLAATSVTFVGVMGMRSYYYGKFMPVGLIAGASLLMAAKVGVRMLMTSD

SEQ ID NO: 10177 - protein, 593 aa, Homo sapiens
MTSAVVDSGGTILELSSNGVENQEESEKVSEYPAVIVEPVPSARLEQGYAAQVLVYDDETYMMQDVAEEQEVETENVETVEASVHSSNAHCTDKTIEAAEALLHMESPTCLRDSRSPVEVFVPPCVSTPEFIHAAMRPDVITETVVEVSTEESEPMDTSPIPTSPDSHEPMKKKKVGRKPKTQQSPISNGSPELGIKKKPREGKGNTTYLWEFLLDLLQDKNTCPRYIKWTQREKGIFKLVDSKAVSKLWGKHKNKPDMNYETMGRALRYYYQRGILAKVEGQRLVYQFKDMPKNIVVIDDDKSETCNEDLAGTTDEKSLERVSLSAESLLKAASSVRSGKNSSPINCSRAEKGVARVVNITSPGHDASSRSPTTTASVSATAAPRTVRVAMQVPVVMTSLGQKISTVAVQSVNAGAPLITSTSPTTATSPKVVIQTIPTVMPASTENGDKITMQPAKIITIPATQLAQCQLQTKSNLTGSGSINIVGTPLAVRALTPVSIAHGTPVMRLSMPTQQASGQTPPRVISAVIKGPEVKSEAVAKKQEHDVKTLQLVEEKPADGNKTVTHVVVVSAPSAIALPVTMKTEGLVTCEK

SEQ ID NO: 10178 - protein, 655 aa, Homo sapiens
MAEAPQVVEIDPDFEPLPRPRSCTWPLPRPEFSQSNSATSSPAPSGSAAANPDAAAGLPSASAAAVSADFMSNLSLLEESEDFPQAPGSVAAAVAAAAAAAATGGLCGDFQGPEAGCLHPAPPQPPPPGPLSQHPPVPPAAAGPLAGQPRKSSSSRRNAWGNLSYADLITKAIESSAEKRLTLSQIYEWMVKSVPYFKDKGDSNSSAGWKNSIRHNLSLHSKFIRVQNEGTGKSSWWMLNPEGGKSGKSPRRRAASMDNNSKFAKSRSRAAKKKASLQSGQEGAGDSPGSQFSKWPASPGSHSNDDFDNWSTFRPRTSSNASTISGRLSPIMTEQDDLGEGDVHSMVYPPSAAKMASTLPSLSEISNPENMENLLDNLNLLSSPTSLTVSTQSSPGTMMQQTPCYSFAPPNTSLNSPSPNYQKYTYGQSSMSPLPQMPIQTLQDNKSSYGGMSQYNCAPGLLKELLTSDSPPHNDIMTPVDPGVAQPNSRVLGQNVMMGPNSVMSTYGSQASHNKMMNPSSHTHPGHAQQTSAVNGRPLPHTVSTMPHTSGMNRLTQVKTPVQVPLPHPMQMSALGGYSSVSSCNGYGRMGLLHQEKLPSDLDGMFIERLDCDMESIIRNDLMDGDTLDFNFDNVLPNQSFPHSVKTTTHSWVSG

SEQ ID NO: 10179 - protein, 393 aa, Homo sapiens
MGKSDFLTPKAIANRIKSKGLQKLRWYCQMCQKQCRDENGFKCHCMSESHQRQLLLASENPQQFMDYFSEEFRNDFLELLRRRFGTKRVHNNIVYNEYISHREHIHMNATQWETLTDFTKWLGREGLCKVDETPKGWYIQYIDRDPETIRRQLELEKKKKQDLDDEEKTAKFIEEQVRRGLEGKEQEVPTFTELSRENDEEKVTFNLSKGACSSSGATSSKSSTLGPSALKTIGSSASVKRKESSQSSTQSKEKKKKKSALDEIMEIEEEKKRTARTDYWLQPEIIVKIITKKLGEKYHKKKAIVKEVIDKYTAVVKMIDSGDKLKLDQTHLETVIPAPGKRILVLNGGYRGNEGTLESINEKTFSATIVIETGPLKGRRVEGIQYEDISKLA

SEQ ID NO: 10180 - protein, 740 aa, Homo sapiens
MPLAQLADPWQKMAVESPSDSAENGQQIMDEPMGEEEINPQTEEVSIKEIAITHHVKEGHEKADPSQFELLKVLGQGSFGKVFLVKKISGSDARQLYAMKVLKKATLKVRDRVRTKMERDILVEVNHPFIVKLHYAFQTEGKLYLILDFLRGGDLFTRLSKEVMFTEEDVKFYLAELALALDHLHSLGIIYRDLKPENILLDEEGHIKLTDFGLSKESIDHEKKAYSFCGTVEYMAPEVVNRRGHTQSADWWSFGVLMFEMLTGTLPFQGKDRKETMTMILKAKLGMPQFLSPEAQSLLRMLFKRNPANRLGAGPDGVEEIKRHSFFSTIDWNKLYRREIHPPFKPATGRPEDTFYFDPEFTAKTPKDSPGIPPSANAHQLFRGFSFVAITSDDESQAMQTVGVHSIVQQLHRNSIQFTDGYEVKEDIGVGSYSVCKRCIHKATNMEFAVKIIDKSKRDPTEEIEILLRYGQHPNIITLKDVYDDGKYVYVVTELMKGGELLDKILRQKFFSEREASAVLFTITKTVEYLHAQGVVHRDLKPSNILYVDESGNPESIRICDFGFAKQLRAENGLLMTPCYTANFVAPEVLKRQGYDAACDIWSLGVLLYTMLTGYTPFANGPDDTPEEILARIGSGKFSLSGGYWNSVSDTAKDLVSKMLHVDPHQRLTAALVLRHPWIVHWDQLPQYQLNRQDAPHLVKGAMAATYSALNRNQSPVLEPVGRSTLAQRRGIKKITSTAL

SEQ ID NO: 10181 - protein, 392 aa, Homo sapiens
MELVAGCYEQVLFGFAVHPEPEACGDHEQWTLVADFTHHAHTASLSAVAVNSRFVVTGSKDETIHIYDMKKKIEHGALVHHSGTITCLKFYGNRHLISGAEDGLICIWDAKKWECLKSIKAHKGQVTFLSIHPSGKLALSVGTDKTLRTWNLVEGRSAFIKNIKQNAHIVEWSPRGEQYVVIIQNKIDIYQLDTASISGTITNEKRISSVKFLSESVLAVAGDEEVIRFFDCDSLVCLCEFKAHENRVKDMFSFEIPEHHVIVSASSDGFIKMWKLKQDKKVPPSLLCEINTNARLTCLGVWLDKVADMKESLPPAAEPSPVSKEQSKIGKKEPGDTVHKEEKRSKPNTKKRGLTGDSKKATKESGLISTKKRKMVEMLEKKRKKKKIKTMQ

SEQ ID NO: 10182 - protein, 59 aa, Homo sapiens
MVHAFLIHTLRAPNTEDTGLCRVLYSCVFGAEKSPDDPRPHGAERDRLLRKEQILAVAR

SEQ ID NO: 10183 - protein, 935 aa, Homo sapiens
MKRLTCFFICFFLSEVSGFEIPINGLSEFVDYEDLVELAPGKFQLVAENRRYQEEVDQVTLYSYKVQSTITSRMATTMIQSKVVNNSPQPQNVVFDVQIPKGAFISNFSMTVDGKTFRSSIKEKTVGRALYAQARAKGKTAGLVRSSALDMENFRTEVNVLPGAKVQFELHYQEVKWRKLGSYEHRIYLQPGRLAKHLEVDVWVIEPQGLRFLHVPDTFEGHFDGVPVISKGQQKAHVSFKPTVAQQRICPNCRETAVDGELVVLYDVKREEKAGELEVFNGYFVHFFAPDNLDPIPKNILFVIDVSGSMWGVKMKQTVEAMKTILDDLRAEDHFSVIDFNQNIRTWRNDLISATKTQVADAKRYIEKIQPSGGTNINEALLRAIFILNEANNLGLLDPNSVSLIILVSDGDPTVGELKLSKIQKNVKENIQDNISLFSLGMGFDVDYDFLKRLSNENHGIAQRIYGNQDTSSQLKKFYNQVSTPLLRNVQFNYPHTSVTDVTQNNFHNYFGGSEIVVAGKFDPAKLDQIESVITATSANTQLVLETLAQMDDLQDFLSKDKHADPDFTRKLWAYLTINQLLAERSLAPTAAAKRRITRSILQMSLDHHIVTPLTSLVIENEAGDERMLADAPPQDPSCCSGALYYGSKVVPDSTPSWANPSPTPVISMLAQGSQVLESTPPPHVMRVENDPHFIIYLPKSQKNICFNIDSEPGKILNLVSDPESGIVVNGQLVGAKKPNNGKLSTYFGKLGFYFQSEDIKIEISTETITLSHGSSTFSLSWSDTAQVTNQRVQISVKKEKVVTITLDKEMSFSVLLHRVWKKHPVNVDFLGIYIPPTNKFSPKAHGLIGQFMQEPKIHIFNERPGKDPEKPEASMEVKGQKLIITRGLQKDYRTDLVFGTDVTCWFVHNSGKGFIDGHYKDYFVPQLYSFLKRP

SEQ ID NO: 10184 - protein, 200 aa, Homo sapiens
MASSLTCTGVIWALLSFLCAATSCVGFFMPYWLWGSQLGKPVSFGTFRRCSYPVHDESRQMMVMVEECGRYASFQGIPSAEWRICTIVTGLGCGLLLLVALTALMGCCVSDLISRTVGRVAGGIQFLGGLLIGAGCALYPLGWDSEEVRQTCGYTSGQFDLGKCEIGWAYYCTGAGATAAMLLCTWLACFSGKKQKHYPY

SEQ ID NO: 10185 - protein, 75 aa, Homo sapiens
MAEEPQSVLQLPTSIAAGGEGLTDVSPETTTPEPPSSAAVSPGTEEPAGDTKKKNDSGLWPGAVAHSCNPSTLVG

SEQ ID NO: 10186 - protein, 280 aa, Homo sapiens
MARFWVCVAGAGFFLAFLVLHSRFCGSPVLRNFTFAVSWRTEKILYRLDVGWPKHPEYFTGTTFCVAVDSLNGLVYIGQRGDNIPKILVFTEDGYFLRAWNYTVDTPHGIFAASTLYEQSVWITDVGSDFMILWLHGENGTGPAKFNIPHSVTLDSAGRVWVADRGNKRIQVFDKDTGEWLGAWNNCFTEEGPSSVRFTPDGKYLIVAQLNLSRLSVVAAPPVGSIGECSVISTIQLADQVLPHLLEVDRKTGAVYVAEIGAKQVQKYVPLNSYVPSFGS

SEQ ID NO: 10187 - protein, 347 aa, Homo sapiens
MARFWVCVAGAGFFLAFLVLHSRFCGSPVLRNFTFAVSWRTEKILYRLDVGWPKHPEYFTGTTFCVAVDSLNGLVYIGQRGDNIPKILVFTEDGYFLRAWNYTVDTPHGIFAASTLYEQSVWITDVGSGFFGHTVKKYSSFGDLVQVLGTPGKKGTSLNPLQFDNPAELYVEDTGDIYIVDGDGGLNNRLIKLSQDFMILWLHGENGTGPAKFNIPHSVTLDSAGRVWVADRGNKRIQVFDKDTGEWLGAWNNCFTEEGPSSVRFTPDGKYLIVAQLNLSRLSVVAAPPVGSIGECSVISTIQLADQVLPHLLEVDRKTGAVYVAEIGAKQVQKYVPLNSYVPSFGS

SEQ ID NO: 10188 - protein, 144 aa, Homo sapiens
MPKNKGKGGKNRRRGKNENESEKRELVFKEDGQEYAQVIKMLGNGRLEAMCFDGVKRLCHIRGKLRKKVWINTSDIILVGLRDYQDNKADVILKYNADEARSLKAYGELPEHAKINETDTFGPGDDDEIQFDDIGDDDEDIDDI

SEQ ID NO: 10189 - protein, 529 aa, Homo sapiens
MAALTTVVVAAAATAVAGAVAGAGAATGTGVGATPAPQQSDGCFSTSGGIRPFHLQNWKQKVNQTKKAEFVRTAEKFKNQVINMEKDKHSHFYNQKSDFRIEHSMLEELENKLIHSRKTERAKIQQQLAKIHNNVKKLQHQLKDVKPTPDFVEKLREMMEEIENAINTFKEEQRLIYEELIKEEKTTNNELSAISRKIDTWALGNSETEKAFRAISSKVPVDKVTPSTLPEEVLDFEKFLQQTGGRQGAWDDYDHQNFVKVRNKHKGKPTFMEEVLEHLPGKTQDEVQQHEKWYQKFLALEERKKESIQIWKTKKQQKREEIFKLKEKADNTPVLFHNKQEDNQKQKEEQRKKQKLAVEAWKKQKSIEMSMKCASQLKEEEEKEKKHQKERQRQFKLKLLLESYTQQKKEQEEFLRLEKEIREKAEKAEKRKNAADEISRFQERDLHKLELKILDRQAKEDEKSQKQRRLAKLKEKVENNVSRDPSRLYKPTKGWEERTKKIGPTGSGPLLHIPHRAIPTWRQGIQRRV

SEQ ID NO: 10190 - protein, 189 aa, Homo sapiens
MSAAMRERFDRFLHEKNCMTDLLAKLEAKTGVNRSFIALGVIGLVALYLVFGYGASLLCNLIGFGYPAYISIKAIESPNKEDDTQWLTYWVVYGVFSIAEFFSDIFLSWFPFYYMLKCGFLLWCMAPSPSNGAELLYKRIIRPFFLKHESQMDSVVKDLKDKAKETADAITKEAKKATVNLLGEEKKST

SEQ ID NO: 10191 - protein, 635 aa, Homo sapiens
MSGAGRALAALLLAASVLSAALLAPGGSSGRDAQAAPPRDLDKKRHAELKMDQALLLIHNELLWTNLTVYWKSECCYHCLFQVLVNVPQSPKAGKPSAAAASVSTQHGSILQLNDTLEEKEVCRLEYRFGEFGNYSLLVKNIHNGVSEIACDLAVNEDPVDSNLPVSIAFLIGLAVIIVISFLRLLLSLDDFNNWISKAISSRETDRLINSELGSPSRTDPLDGDVQPATWRLSALPPRLRSVDTFRGIALILMVFVNYGGGKYWYFKHASWNGLTVADLVFPWFVFIMGSSIFLSMTSILQRGCSKFRLLGKIAWRSFLLICIGIIIVNPNYCLGPLSWDKVRIPGVLQRLGVTYFVVAVLELLFAKPVPEHCASERSCLSLRDITSSWPQWLLILVLEGLWLGLTFLLPVPGCPTGYLGPGGIGDFGKYPNCTGGAAGYIDRLLLGDDHLYQHPSSAVLYHTEVAYDPEGILGTINSIVMAFLGVQAGKILLYYKARTKDILIRFTAWCCILGLISVALTKVSENEGFIPVNKNLWSLSYVTTLSSFAFFILLVLYPVVDVKGLWTGTPFFYPGMNSILVYVGHEVFENYFPFQWKLKDNQSHKEHLTQNIVATALWVLIAYILYRKKIFWKI

SEQ ID NO: 10192 - protein, 833 aa, Homo sapiens
MVPSRRTWNLGATPSLRGLWRVGRAPEPEPGMARPAPAPASPAARPFPHTGPGRLRTGRGKDTPVCGDEDSSARSAARPALAQCRALSVDWAGPGSPHGLYLTLQVEHLKEKLISQAQEVSRLRSELGGTDLEKHRDLLMVENERLRQEMRRCEAELQELRTKPAGPCPGCEHSQESAQLRDKLSQLQLEMAESKGMLSELNLEVQQKTDRLAEVELRLKDCLAEKAQEEERLSRRLRDSHETIASLRAQSPPVKYVIKTVEVESSKTKQALSESQARNQHLQEQVAMQRQVLKEMEQQLQSSHQLTARLRAQIAMYESELERAHGQMLEEMQSLEEDKNRAIEEAFARAQVEMKAVHENLAGVRTNLLTLQPALRTLTNDYNGLKRQVRGFPLLLQEALRSVKAEIGQAIEEVNSNNQELLRKYRRELQLRKKCHNELVRLKGNIRVIARVRPVTKEDGEGPEATNAVTFDADDDSIIHLLHKGKPVSFELDKVFSPQASQQDVFQEVQALVTSCIDGFNVCIFAYGQTGAGKTYTMEGTAENPGINQRALQLLFSEVQEKASDWEYTITVSAAEIYNEVLRDLLGKEPQEKLEIRLCPDGSGQLYVPGLTEFQVQSVDDINKVFEFGHTNRTTEFTNLNEHSSRSHALLIVTVRGVDCSTGLRTTGKLNLVDLAGSERVGKSGAEGSRLREAQHINKSLSALGDVIAALRSRQGHVPFRNSKLTYLLQDSLSGDSKTLMVVQVSPVEKNTSETLYSLKFAERVRSVELGPGLRRAELGSWSSQEHLEWEPACQTPQPSARAHSAPSSGTSSRPGSIRRKLQPSGKSRPLPV

SEQ ID NO: 10193 - protein, 402 aa, Homo sapiens
MRSGGVRSFALELARGPGGAYRGGERLCGRVLLEAAAPLRVRALEVKARGGAATHWLEGRSVGVNAVSSDYAAAETYLRRRQLLLRDTGETTTLPPGRHEFLFSFQLPPTLVTSFEGKHGSVRYCIKATLHRPWVPARRARKVFTVIEPVDINTPALLAPQAGAREKVARSWYCNRGLVSLSAKIDRKGYTPGEVIPVFAEIDNGSTRPVLPRAAVVQTQTFMARGARKQKRAVVASLAGEPVGPGQRALWQGRALRIPPVGPSILHCRVLHVDYALKVCVDIPGTSKLLLELPLVIGTIPLHPFGSRSSSVGSHASFLLDWRLGALPERPEAPPEYSEVVADTEEAALGQSPFPLPQDPDMSLEGPFFAYIQEFRYRPPPLYSEEDPNPLLGDMRPRCMTC

SEQ ID NO: 10194 - protein, 401 aa, Homo sapiens
MDLTQQAKDIQNITVQETNKNNSESIECSKITMDLKFNNSRKYISITVPSKTQTMSPHIKSVDDVVVLGMNLSKFNKLTQFFICVAGVFVFYLIYGYLQELIFSVEGFKSCGWYLTLVQFAFYSIFGLIELQLIQDKRRRIPGKTYMIIAFLTVGTMGLSNTSLGYLNYPTQVIFKCCKLIPVMLGGVFIQGKRYNVADVSAAICMSLGLIWFTLADSTTAPNFNLTGVVLISLALCADAVIGNVQEKAMKLHNASNSEMVLYSYSIGFVYILLGLTCTSGLGPAVTFCAKNPVRTYGYAFLFSLTGYFGISFVLALIKIFGALIAVTVTTGRKAMTIVLSFIFFAKPFTFQYVWSGLLVVLGIFLNVYSKNMDKIRLPSLYDLINKSVEARKSRTLAQTV

SEQ ID NO: 10195 - protein, 655 aa, Homo sapiens
MATPVVTKTAWKLQEIVAHASNVSSLVLGKASGRLLATGGDDCRVNLWSINKPNCIMSLTGHTSPVESVRLNTPEELIVAGSQSGSIRVWDLEAAKILRTLMGHKANICSLDFHPYGEFVASGSQDTNIKLWDIRRKGCVFRYRGHSQAVRCLRFSPDGKWLASAADDHTVKLWDLTAGKMMSEFPGHTGPVNVVEFHPNEYLLASGSSDRTIRFWDLEKFQVVSCIEGEPGPVRSVLFNPDGCCLYSGCQDSLRVYGWEPERCFDVVLVNWGKVADLAICNDQLIGVAFSQSNVSSYVVDLTRVTRTGTVARDPVQDHRPLAQPLPNPSAPLRRIYERPSTTCSKPQRVKQNSESERRSPSSEDDRDERESRAEIQNAEDYNEIFQPKNSISRTPPRRSEPFPAPPEDDAATAKEAAKPSPAMDVQFPVPNLEVLPRPPVVASTPAPKAEPAIIPATRNEPIGLKASDFLPAVKIPQQAELVDEDAMSQIRKGHDTMCVVLTSRHKNLDTVRAVWTMGDIKTSVDSAVAINDLSVVVDLLNIVNQKASLWKLDLCTTVLPQIEKLLQSKYESYVQTGCTSLKLILQRFLPLITDMLAAPPSVGVDISREERLHKCRLCYKQLKSISGLVKSKSGLSGRHGSTFRELHLLMASLD

SEQ ID NO: 10196 - protein, 456 aa, Homo sapiens
MKETPLSNCERRFLLRAIEEKKRLDGRQTYDYRNIRISFGTDYGCCIVELGKTRVLGQVSCELVSPKLNRATEGILFFNLELSQMAAPAFEPGRQSDLLVKLNRLMERCLRNSKCIDTESLCVVAGEKVWQIRVDLHLLNHDGNIIDAASIAAIVALCHFRRPDVSVQGDEVTLYTPEERDPVPLSIHHMPICVSFAFFQQGTYLLVDPNEREERVMDGLLVIAMNKHREICTIQSSGGIMLLKDQVLRCSKIAGVKVAEITELILKALENDQKVRKEGGKFGFAESIANQRITAFKMEKAPIDTSDVEEKAEEIIAEAEPPSEVVSTPVLWTPGTAQIGEGVENSWGDLEDSEKEDDEGGGDQAIILDGIKMDTGVEVSDIGSQELGFHHVGQTGLEFLTSDAPIILSDSEEEEMIILEPDKNPKKIRTQTTSAKQEKAPSKKPVKRRKKKRAAN

SEQ ID NO: 10197 - protein, 54 aa, Homo sapiens
MFLSAVFFAKSKSNETKSPLRGKEKNTLPLNGGLKMTLIYKEKTEGGDTDSEIL

SEQ ID NO: 10198 - protein, 682 aa, Homo sapiens
MARSRSRSPRWKHRSLSPVPRNAEHYKQRHSHGHYGCEYRKDPKRPVAWRMDSEKHGQSKPRIPSRGNIYYQSYEHRSPSPNIRNSLENVYMYKPHRGYSPGRGDSNRRAQYMPKYSEGIPYKEHERNSYPQKVQGGHSPDDHRVRGSGKGGKPPQRSIADSFRFEGKWHEDELRHQRIQEEKYSQSTRRGSEDFETRSSFQKRYPEDRDFRKYGHTSKRPKDVERYESREPARNPKWKPEHSLPPYQEDTDQWNLGPQTYRHAEREHPETSSATKVSYDYRHKRPKLLDGDQDFSDGRTQKYCKEEDRKYSFQKGPLNRELDCFNTGRGRETQDGQVKEPFKPSKKDSIACTYSNKNDVDLRSSNDKWKEKIKKEGDCRKESNSSSNQLDKSQKLPDVKPSPINLRKKSLTVKVDVKKTVDTFRVASSYSTERQMSHDLVAVGRKSENFHPVFEHLDSTQNTENKPTGEFAQEIITIIHQVKANYFPSPGITLHERFSTMQDIHKADVNEIPLNSDPEIHRRIDMSLAELQSKQAVIYESEQTLIKIIDPNDLRHDIERRRKERLQNEDEHIFHIASAAERDDQNSSFSKNYTTQRKDIITHKPFEVEGNHRNTRVRPFKSNFRGGRCQPNYKSGLVQKSLYIQAKYQRLRFTGPRGFITHKFRERLMRKKKEYTDVATGI

SEQ ID NO: 10199 - protein, 568 aa, Homo sapiens
MVLLHWCLLWLLFPLSSRTQKLPTRDEELFQMQIRDKAFFHDSSVIPDGAEISSYLFRDTPKRYFFVVEEDNTPLSVTVTPCDAPLEWKLSLQELPEDRSGEGSGDLEPLEQQKQQIINEEGTELFSYKGNDVEYFISSSSPSGLYQLDLLSTEKDTHFKVYATTTPESDQPYPELPYDPRVDVTSLGRTTVTLAWKPSPTASLLKQPIQYCVVINKEHNFKSLCAVEAKLSADDAFMMAPKPGLDFSPFDFAHFGFPSDNSGKERSFQAKPSPKLGRHVYSRPKVDIQKICIGNKNIFTVSDLKPDTQYYFDVFVVNINSNMSTAYVGTFARTKEEAKQKTVELKDGKITDVFVKRKGAKFLRFAPVSSHQKVTFFIHSCLDAVQIQVRRDGKLLLSQNVEGIQQFQLRGKPKAKYLVRLKGNKKGASMLKILATTRPTKQSFPSLPEDTRIKAFDKLRTCSSATVAWLGTQERNKFCIYKKEVDDNYNEDQKKREQNQCLGPDIRKKSEKVLCKYFHSQNLQKAVTTETIKGLQPGKSYLLDVYVIGHGGHSVKYQSKVVKTRKFC

SEQ ID NO: 10200 - protein, 157 aa, Homo sapiens
MDPRLPAWALVLLGPALVFALGPAPTPEMREKLCGHHFVRALVRVCGGPRWSTEARRPATGGDQRESHSVSQAGLKLLSSSNPPTLTFQSVGISDVSCYSGWRDDICSMGWWPTVISRWDLACSPCPRPLTITATTVQLPPTLHATAASVAVPNKTC

SEQ ID NO: 10201 - protein, 977 aa, Homo sapiens
MAQFYYKRNVNAPYRDRIPLRIVRAESELSPSEKAYLNAVEKGDYASVKKSLEEAEIYFKININCIDPLGRTALLIAIENENLELIELLLSFNVYVGDALLHAIRKEVVGAVELLLNHKKPSGEKQVPPILLDKQFSEFTPDITPIILAAHTNNYEIIKLLVQKGVSVPRPHEVRCNCVECVSSSDVDSLRHSRSRLNIYKALASPSLIALSSEDPFLTAFQLSWELQELSKVENEFKSEYEELSRQCKQFAKDLLDQTRSSRELEIILNYRDDNSLIEEQSGNDLARLKLAIKYRQKEFVAQPNCQQLLASRWYDEFPGWRRRHWAVKMVTCFIIGLLFPVFSVCYLIAPKSPLGLFIRKPFIKFICHTASYLTFLFLLLLASQHIDRSDLNRQGPPPTIVEWMILPWVLGFIWGEIKQMWDGGLQDYIHDWWNLMDFVMNSLYLATISLKIVAFVKYSALNPRESWDMWHPTLVAEALFAIANIFSSLRLISLFTANSHLGPLQISLGRMLLDILKFLFIYCLVLLAFANGLNQLYFYYEETKGLTCKGIRCEKQNNAFSTLFETLQSLFWSIFGLINLYVTNVKAQHEFTEFVGATMFGTYNVISLVVLLNMLIAMMNNSYQLIADHADIEWKFARTKLWMSYFEEGGTLPTPFNVIPSPKSLWYLIKWIWTHLCKKKMRRKPESFGTIGRRAADNLRRHHQYQEVMRNLVKRYVAAMIRDAKTEEGLTEENFKELKQDISSFRFEVLGLLRGSKLSTIQSANASKESSNSADSDEKSDSEGNSKDKKKNFSLFDLTTLIHPRSAAIASERHNISNGSALVVQEPPREKQRKVNFVTDIKNFGLFHRRSKQNAAEQNANQIFSVSEEVARQQAAGPLERNIQLESRGLASRGDLSIPGLSEQCVLVDHRERNTDTLGLQVGKRVCPFKSEKVVVEDTVPIIPKEKHAKEEDSSIDYDLNLPDTVTHEDYVTTRL

SEQ ID NO: 10202 - protein, 514 aa, Homo sapiens
MPAVSGPGPLFCLLLLLLDPHSPETGCPPLRRFEYKLSFKGPRLALPGAGIPFWSHHGDAILGLEEVRLTPSMRNRSGAVWSRASVPFSAWEVEVQMRVTGLGRRGAQGMAVWYTRGRGHVGSVLGGLASWDGIGIFFDSPAEDTQDSPAIRVLASDGHIPSEQPGDGASQGLGSCHWDFRNRPHPFRARITYWGQRLRMSLNSGLTPSDPGEFCVDVGPLLLVPGGFFGVSAATGTLAGEDPTGQVPPQPFLEMQQLRLARQLEGLWARLGLGTREDVTPKSDSEAQGEGERLFDLEETLGRHRRILQALRGLSKQLAQAERQWKKQLGPPGQARPDGGWALDASCQIPSTPGRGGHLSMSLNKDSAKVGALLHGQWTLLQALQEMRDAAVRMAAEAQVSYLPVGIEHHFLELDHILGLLQEELRGPAKAAAKAPRPPGQPPRASSCLQPGIFLFYLLIQTVGFFGYVHFRQELNKSLQECLSTGSLPLGPAPHTPRALGILRRQPLPASMPA

SEQ ID NO: 10203 - protein, 174 aa, Homo sapiens
MAAAAELSLLEKSLGLSKGNKYSAQGERQIPVLQTNNGPSLTGLTTIAAHLVKQANKEYLLGSTAEEKAIVQQWLEYRVTQVDGHSSKNDIHTLLKDLNSYLEDKVYLTGYNFTLADILLYYGLHRFIVDLTVQEKEKYLNVSRWFCHIQHYPGIRQHLSSVVFIKNRLYTNSH

SEQ ID NO: 10204 - protein, 566 aa, Homo sapiens
MSSRLGAVPATSGPTTFKQQRSTRIVGAKNRTQCSIKDNSFQYTIPHDDSLSGSSSASSCEPVSDFPASFRKSTYWMKMRRIKPAATSHVEGSGGVSAKGKRKPRQEEDEDYREFPQKKHKLYGRKQRPKTQPNPKSQARRIRKEPPVYAAGSLEEQWYLEIVDKGSVSCPTCQAVGRKTIEGLKKHMENCKQEMFTCHHCGKQLRSLAGMKYHVMANHNSLPILKAGDEIDEPSERERLRTVLKRLGKLRCMRESCSSSFTSIMGYLYHVRKCGKGAAELEKMTLKCHHCGKPYRSKAGLAYHLRSEHGPISFFPESGQPECLKEMNLESKSGGRVQRRSAKIAVYHLQELASAELAKEWPKRKVLQDLVPDDRKLKYTRPGLPTFSQEVLHKWKTDIKKYHRIQCPNQGCEAVYSSVSGLKAHLGSCTLGNFVAGKYKCLLCQKEFVSESGVKYHINSVHAEDWFVVNPTTTKSFEKLMKIKQRQQEEEKRRQQHRSRRSLRRRQQPGIELPETELSLRVGKDQRRNNEELVVSASCKEPEQEPVPAQFQKVKPPKTNHKRGRK

SEQ ID NO: 10205 - protein, 1038 aa, Homo sapiens
MDPNTIIEALRGTMDPALREAAERQLNEAHKSLNFVSTLLQITMSEQLDLPVRQAGVIYLKNMITQYWPDRETAPGDISPYTIPEEDRHCIRENIVEAIIHSPELIRVQLTTCIHHIIKHDYPSRWTAIVDKIGFYLQSDNSACWLGILLCLYQLVKNYEYKKPEERSPLVAAMQHFLPVLKDRFIQLLSDQSDQSVLIQKQIFKIFYALVQYTLPLELINQQNLTEWIEILKTVVNRDVPNETLQVEEDDRPELPWWKCKKWALHILARLFERYGSPGNVSKEYNEFAEVFLKAFAVGVQQVLLKVLYQYKEKQYMAPRVLQQTLNYINQGVSHALTWKNLKPHIQGIIQDVIFPLMCYTDADEELWQEDPYEYIRMKFDVFEDFISPTTAAQTLLFTACSKRKEVLQKTMGFCYQILTEPNADPRKKDGALHMIGSLAEILLKKKIYKDQMEYMLQNHVFPLFSSELGYMRARACWVLHYFCEVKFKSDQNLQTALELTRRCLIDDREMPVKVEAAIALQVLISNQEKAKEYITPFIRPVMQALLHIIRETENDDLTNVIQKMICEYSEEVTPIAVEMTQHLAMTFNQVIQTGPDEEGSDDKAVTAMGILNTIDTLLSVVEDHKEITQQLEGICLQVIGTVLQQHVLEFYEEIFSLAHSLTCQQVSPQMWQLLPLVFEVFQQDGFDYFTDMMPLLHNYVTVDTDTLLSDTKYLEMIYSMCKKVLTGVAGEDAECHAAKLLEVIILQCKGRGIDQCIPLFVEAALERLTREVKTSELRTMCLQVAIAALYYNPHLLLNTLENLRFPNNVEPVTNHFITQWLNDVDCFLGLHDRKMCVLGLCALIDMEQIPQVLNQVSGQILPAFILLFNGLKRAYACHAEHENDSDDDDEAEDDDETEELGSDEDDIDEDGQEYLEILAKQAGEDGDDEDWEEDDAEETALEGYSTIIDDEDNPVDEYQIFKAIFQTIQNRNPVWYQALTHGLNEEQRKQLQDIATLADQRRAAHESKMIEKHGGYKFSAPVVPSSFNFGGPAPGMN

SEQ ID NO: 10206 - protein, 86 aa, Homo sapiens
MAVRQWVIALALAALLVVDREVPVAAGKLPFSRMPICEHMVESPTCSQMSNLVCGTDGLTYTNECQLCLARIKTKQDIQIMKDGKC

SEQ ID NO: 10207 - protein, 779 aa, Homo sapiens
MIPFLPMFSLLLLLIVNPINANNHYDKILAHSRIRGRDQGPNVCALQQILGTKKKYFSTCKNWYKKSICGQKTTVLYECCPGYMRMEGMKGCPAVLPIDHVYGTLGIVGATTTQRYSDASKLREEIEGKGSFTYFAPSNEAWDNLDSDIRRGLESNVNVELLNALHSHMINKRMLTKDLKNGMIIPSMYNNLGLFINHYPNGVVTVNCARIIHGNQIATNGVVHVIDRVLTQIGTSIQDFIEAEDDLSSFRAAAITSDILEALGRDGHFTLFAPTNEAFEKLPRGVLERIMGDKVASEALMKYHILNTLQCSESIMGGAVFETLEGNTIEIGCDGDSITVNGIKMVNKKDIVTNNGVIHLIDQVLIPDSAKQVIELAGKQQTTFTDLVAQLGLASALRPDGEYTLLAPVNNAFSDDTLSMDQRLLKLILQNHILKVKVGLNELYNGQILETIGGKQLRVFVYRTAVCIENSCMEKGSKQGRNGAIHIFREIIKPAEKSLHEKLKQDKRFSTFLSLLEAADLKELLTQPGDWTLFVPTNDAFKGMTSEEKEILIRDKNALQNIILYHLTPGVFIGKGFEPGVTNILKTTQGSKIFLKEVNDTLLVNELKSKESDIMTTNGVIHVVDKLLYPADTPVGNDQLLEILNKLIKYIQIKFVRGSTFKEIPVTVYKPIIKKYTKIIDGVPVEITEKETREERIITGPEIKYTRISTGGGETEETLKKLLQEEVTKVTKFIEGGDGHLFEDEEIKRLLQGDTPVRKLQANKKVQGSRRRLREGRSQ

SEQ ID NO: 10208 - protein, 809 aa, Homo sapiens
MIPFLPMFSLLLLLIVNPINANNHYDKILAHSRIRGRDQGPNVCALQQILGTKKKYFSTCKNWYKKSICGQKTTVLYECCPGYMRMEGMKGCPAVLPIDHVYGTLGIVGATTTQRYSDASKLREEIEGKGSFTYFAPSNEAWDNLDSDIRRGLESNVNVELLNALHSHMINKRMLTKDLKNGMIIPSMYNNLGLFINHYPNGVVTVNCARIIHGNQIATNGVVHVIDRVLTQIGTSIQDFIEAEDDLSSFRAAAITSDILEALGRDGHFTLFAPTNEAFEKLPRGVLERIMGDKVASEALMKYHILNTLQCSESIMGGAVFETLEGNTIEIGCDGDSITVNGIKMVNKKDIVTNNGVIHLIDQVLIPDSAKQVIELAGKQQTTFTDLVAQLGLASALRPDGEYTLLAPVNNAFSDDTLSMDQRLLKLILQNHILKVKVGLNELYNGQILETIGGKQLRVFVYRTAVCIENSCMEKGSKQGRNGAIHIFREIIKPAEKSLHEKLKQDKRFSTFLSLLEAADLKELLTQPGDWTLFVPTNDAFKGMTSEEKEILIRDKNALQNIILYHLTPGVFIGKGFEPGVTNILKTTQGSKIFLKEVNDTLLVNELKSKESDIMTTNGVIHVVDKLLYPADTPVGNDQLLEILNKLIKYIQIKFVRGSTFKEIPVTVYRPTLTKVKIEGEPEFRLIKEGETITEVIHGEPIIKKYTKIIDGVPVEITEKETREERIITGPEIKYTRISTGGGETEETLKKLLQEEVTKVTKFIEGGDGHLFEDEEIKRLLQGDTPVRKLQANKKVQGSRRRLREGRSQ

SEQ ID NO: 10209 - protein, 836 aa, Homo sapiens
MIPFLPMFSLLLLLIVNPINANNHYDKILAHSRIRGRDQGPNVCALQQILGTKKKYFSTCKNWYKKSICGQKTTVLYECCPGYMRMEGMKGCPAVLPIDHVYGTLGIVGATTTQRYSDASKLREEIEGKGSFTYFAPSNEAWDNLDSDIRRGLESNVNVELLNALHSHMINKRMLTKDLKNGMIIPSMYNNLGLFINHYPNGVVTVNCARIIHGNQIATNGVVHVIDRVLTQIGTSIQDFIEAEDDLSSFRAAAITSDILEALGRDGHFTLFAPTNEAFEKLPRGVLERIMGDKVASEALMKYHILNTLQCSESIMGGAVFETLEGNTIEIGCDGDSITVNGIKMVNKKDIVTNNGVIHLIDQVLIPDSAKQVIELAGKQQTTFTDLVAQLGLASALRPDGEYTLLAPVNNAFSDDTLSMDQRLLKLILQNHILKVKVGLNELYNGQILETIGGKQLRVFVYRTAVCIENSCMEKGSKQGRNGAIHIFREIIKPAEKSLHEKLKQDKRFSTFLSLLEAADLKELLTQPGDWTLFVPTNDAFKGMTSEEKEILIRDKNALQNIILYHLTPGVFIGKGFEPGVTNILKTTQGSKIFLKEVNDTLLVNELKSKESDIMTTNGVIHVVDKLLYPADTPVGNDQLLEILNKLIKYIQIKFVRGSTFKEIPVTVYTTKIITKVVEPKIKVIEGSLQPIIKTEGPTLTKVKIEGEPEFRLIKEGETITEVIHGEPIIKKYTKIIDGVPVEITEKETREERIITGPEIKYTRISTGGGETEETLKKLLQEEVTKVTKFIEGGDGHLFEDEEIKRLLQGDTPVRKLQANKKVQGSRRRLREGRSQ

SEQ ID NO: 10210 - protein, 808 aa, Homo sapiens
MIPFLPMFSLLLLLIVNPINANNHYDKILAHSRIRGRDQGPNVCALQQILGTKKKYFSTCKNWYKKSICGQKTTVLYECCPGYMRMEGMKGCPAVLPIDHVYGTLGIVGATTTQRYSDASKLREEIEGKGSFTYFAPSNEAWDNLDSDIRRGLESNVNVELLNALHSHMINKRMLTKDLKNGMIIPSMYNNLGLFINHYPNGVVTVNCARIIHGNQIATNGVVHVIDRVLTQIGTSIQDFIEAEDDLSSFRAAAITSDILEALGRDGHFTLFAPTNEAFEKLPRGVLERIMGDKVASEALMKYHILNTLQCSESIMGGAVFETLEGNTIEIGCDGDSITVNGIKMVNKKDIVTNNGVIHLIDQVLIPDSAKQVIELAGKQQTTFTDLVAQLGLASALRPDGEYTLLAPVNNAFSDDTLSMDQRLLKLILQNHILKVKVGLNELYNGQILETIGGKQLRVFVYRTAVCIENSCMEKGSKQGRNGAIHIFREIIKPAEKSLHEKLKQDKRFSTFLSLLEAADLKELLTQPGDWTLFVPTNDAFKGMTSEEKEILIRDKNALQNIILYHLTPGVFIGKGFEPGVTNILKTTQGSKIFLKEVNDTLLVNELKSKESDIMTTNGVIHVVDKLLYPADTPVGNDQLLEILNKLIKYIQIKFVRGSTFKEIPVTVYTTKIITKVVEPKIKVIEGSLQPIIKTEGPTLTKVKIEGEPEFRLIKEGETITEVIHGEPIIKKYTKIIDGVPVEITEKETREERIITGPEIKYTRISTGGGETEETLKKLLQEDTPVRKLQANKKVQGSRRRLREGRSQ

SEQ ID NO: 10211 - protein, 599 aa, Homo sapiens
MGPKRRQLTFREKSRIIQEVEENPDLRKGEIARRFNIPPSTLSTILKNKRAILASERKYGVASTCRKTNKLSPYDKLEGLLIAWFQQIRAAGLPVKGIILKEKALRIAEELGMDDFTASNGWLDRFRRRHGVVSCSGVARARARNAAPRTPAAPASPAAVPSEGSGGSTTGWRAREEQPPSVAEGYASQDVFSATETSLWYDFLPDQAAGLCGGDGRPRQATQRLSVLLCANADGSEKLPPLVAGKSAKPRAGQAGLPCDYTANSKGGVTTQALAKYLKALDTRMAAESRRVLLLAGRLAAQSLDTSGLRHVQLAFFPPGTVHPLERGVVQQVKGHYRQAMLLKAMAALEGQDPSGLQLGLTEALHFVAAAWQAVEPSDIAACFREAGFGGGPNATITTSLKSEGEEEEEEEEEEEEEEGEGEEEEEEGEEEEEEGGEGEELGEEEEVEEEGDVDSDEEEEEDEESSSEGLEAEDWAQGVVEAGGSFGAYGAQEEAQCPTLHFLEGGEDSDSDSEEEDDEEEDDEDEDDDDDEEDGDEVPVPSFGEAMAYFAMVKRYLTSFPIDDRVQSHILHLEHDLVHVTRKNHARQAGVRGLGHQS

SEQ ID NO: 10212 - protein, 432 aa, Homo sapiens
MPARPGRLLPLLARPAALTALLLLLLGHGGGGRWGARAQEAAAAAADGPPAADGEDGQDPHSKHLYTADMFTHGIQSAAHFVMFFAPWCGHCQRLQPTWNDLGDKYNSMEDAKVYVAKVDCTAHSDVCSAQGVRGYPTLKLFKPGQEAVKYQGPRDFQTLENWMLQTLNEEPVTPEPEVEPPSAPELKQGLYELSASNFELHVAQGDHFIKFFAPWCGHCKALAPTWEQLALGLEHSETVKIGKVDCTQHYELCSGNQVRGYPTLLWFRDGKKVDQYKGKRDLESLREYVESQLQRTETGATETVTPSEAPVLAAEPEADKGTVLALTENNFDDTIAEGITFIKFYAPWCGHCKTLAPTWEELSKKEFPGLAGVKIAEVDCTAERNICSKYSVRGYPTLLLFRGGKKVSEHSGGRDLDSLHRFVLSQAKDEL

SEQ ID NO: 10213 - protein, 174 aa, Homo sapiens
MAAANKGNKPRVRSIRFAAGHDAEGSHSHVHFDEKLHDSVVMVTQESDSSFLVKVGFLKILHRYEITFTLPPVHRLSKDVREAPVPSLHLKLLSVVPVPEGYSVKCEYSAHKEGVLKEEILLACEGGTGTCVRVTVQARVMDRHHGTPMLLDGVKCVGAELEYDSEHSDWHGFD

SEQ ID NO: 10214 - protein, 520 aa, Homo sapiens
MPLELTQSRVQKIWVPVDHRPSLPRSCGPKLTNSPTVIVMVGLPARGKTYISKKLTRYLNWIGVPTKVFNVGEYRREAVKQYSSYNFFRPDNEEAMKVRKQCALAALRDVKSYLAKEGGQIAVFDATNTTRERRHMILHFAKENDFKAFFIESVCDDPTVVASNIMEVKISSPDYKDCNSAEAMDDFMKRISCYEASYQPLDPDKCDRDLSLIKVIDVGRRFLVNRVQDHIQSRIVYYLMNIHVQPRTIYLCRHGENEHNLQGRIGGDSGLSSRGKKFASALSKFVEEQNLKDLRVWTSQLKSTIQTAEALRLPYEQWKALNEIDAGVCEELTYEEIRDTYPEEYALREQDKYYYRYPTGESYQDLVQRLEPVIMELERQENVLVICHQAVLRCLLAYFLDKSAEEMPYLKCPLHTVLKLTPVAYGCRVESIYLNVESVCTHRERSEDAKKGPNPLMRRNSVTPLASPEPTKKPRINSFEEHVASTSAALPSCLPPEVPTQLPGQNMKGSRSSADSSRKH

SEQ ID NO: 10215 - protein, 433 aa, Homo sapiens
MLAATVLTLALLGNAHACSKGTSHEAGIVCRITKPALLVLNHETAKVIQTAFQRASYPDITGEKAMMLLGQVKYGLHNIQISHLSIASSQVELVEAKSIDVSIQNVSVVFKGTLKYGYTTAWWLGIDQSIDFEIDSAIDLQINTQLTCDSGRVRTDAPDCYLSFHKLLLHLQGEREPGWIKQLFTNFISFTLKLVLKGQICKEINVISNIMADFVQTRAASILSDGDIGVDISLTGDPVITASYLESHHKAVLETWGFNTNQEIFQEVVGGFPSQAQVTVHCLKMPKISCQNKGVVVNSSVMVKFLFPRPDQQHSVAYTFEEDIVTTVQASYSKKKLFLSLLDFQITPKTVSNLTESSSESVQSFLQSMITAVGIPEVMSRLEVVFTALMNSKGVSLFDIINPEIITRDGFLLLQMDFGFPEHLLVDFLQSLS

SEQ ID NO: 10216 - protein, 478 aa, Homo sapiens
MLGSLGLWALLPTAVEAPPNRRTCVFFEAPGVRGSTKTLGELLDTGTELPRAIRCLYSRCCFGIWNLTQDRAQVEMQGCRDSDEPGCESLHCDPSPRAHPSPGSTLFTCSCGTDFCNANYSHLPPPGSPGTPGSQGPQAAPGESIWMALVLLGLFLLLLLLLGSIILALLQRKNYRVRGEPVPEPRPDSGRDWSVELQELPELCFSQVIREGGHAVVWAGQLQGKLVAIKAFPPRSVAQFQAERALYELPGLQHDHIVRFITASRGGPGRLLSGPLLVLELHPKGSLCHYLTQYTSDWGSSLRMALSLAQGLAFLHEERWQNGQYKPGIAHRDLSSQNVLIREDGSCAIGDLGLALVLPGLTQPPAWTPTQPQGPAAIMEDPDGLRELLEDCWDADPEARLTAECVQQRLAALAHPQESHPFPESCPRGCPPLCPEDCTSIPAPTILPCRPQRSACHFSVQQGPCSRNPQPACTLSPV

SEQ ID NO: 10217 - protein, 366 aa, Homo sapiens
MESETEPEPVTLLVKSPNQRHRDLELSGDRGWSVGHLKAHLSRVYPERPRPEDQRLIYSGKLLLDHQCLRDLLPKVAESTEEPAGSNRGQYPEDSSSDGLRQREVLRNLSSPGWENISRPEAAQQAFQGLGPGFSGYTPYGWLQLSWFQQIYARQYYMQYLAATAASGAFVPPPSAQEIPVVSAPAPAPIHNQFPAENQPANQNAAPQVVVNPGANQNLRMNAQGGPIVEEDDEINRDWLDWTYSAATFSVFLSILYFYSSLSRFLMVMGATVVMYLHHVGWFPFRPRPVQNFPNDGPPPDVVNQDPNNNLQEGTDPETEDPNHLPPDRDVLDGEQTSPSFMSTAWLVFKTFFASLLPEGPPAIAN

SEQ ID NO: 10218 - protein, 678 aa, Homo sapiens
MHVFAYRVHTHHLGKVVSGYRVRNGQWTLIGRQSPQLPQAFYPVGHPVDVSFGDLLAARCVFTGEGRTEATHIGGTSSDEMCNLYIMYYMEAKHAVSFMTCTQNVAPDMFRTIPPEANIPIPVKSDMVMMHEHHKETEYKDKIPLLQQPKREEEEVLDQGDFYSLLSKLLGEREDVVHVHKYNPTEKAESESDLVAEIANVVQKKDLGRSDAREGAEHERGNAILVRDRIHKFHRLVSTLRPPESRVFSLQQPPPGEGTWEPEHTGDFHMEEALDWPGVYLLPGQVSGVALDPKNNLVIFHRGDHVWDGNSFDSKFVYQQIGLGPIEEDTILVIDPNNAAVLQSSGKNLFYLPHGLSIDKDGNYWVTDVALHQVFKLDPNNKEGPVLILGRSMQPGSDQNHFCQPTDVAVDPGTGAIYVSDGYCNSRIVQFSPSGKFITQWGEESSGSSPLPGQFTVPHSLALVPLLGQLCVADRENGRIQCFKTDTKEFVREIKHSSFGRNVFAISYIPGLLFAVNGKPHFGDQEPVQGFVMNFSNGEIIDIFKPVRKHFDMPHDIVASEDGTVYIGDAHTNTVWKFTLTEKLEHRSVKKAGIEVQEIKADSEHKLETSSGRVLGRFRGKGSGGLNLGNFFASRKGYSRKGFDRLSTEGSDQEKEDDGSESEEEYSAPLPALAPSSS

SEQ ID NO: 10219 - protein, 397 aa, Homo sapiens
MVKETTYYDVLGVKPNATQEELKKAYRKLALKYHPDKNPNEGEKFKQISQAYEVLSDAKKRELYDKGGEQAIKEGGAGGGFGSPMDIFDMFFGGGGRMQRERRGKNVVHQLSVTLEDLYNGATRKLALQKNVICDKCEGRGGKKGAVECCPNCRGTGMQIRIHQIGPGMVQQIQSVCMECQGHGERISPKDRCKSCNGRKIVREKKILEVHIDKGMKDGQKITFHGEGDQEPGLEPGDIIIVLDQKDHAVFTRRGEDLFMCMDIQLVEALCGFQKPISTLDNRTIVITSHPGQIVKHGDIKCVLNEGMPIYRRPYEKGRLIIEFKVNFPENGFLSPDKLSLLEKLLPERKEVEETDEMDQVELVDFDPNQERRRHYNGEAYEDDEHHPRGGVQCQTS

SEQ ID NO: 10220 - protein, 2871 aa, Homo sapiens
MSCNGGSHPRINTLGRMIRAESGPDLRYEVTSGGGGTSRMYYSRRGVITDQNSDGYCQTGTMSRHQNQNTIQELLQNCSDCLMRAELIVQPELKYGDGIQLTRSRELDECFAQANDQMEILDSLIREMRQMGQPCDAYQKRLLQLQEQMRALYKAISVPRVRRASSKGGGGYTCQSGSGWDEFTKHVTSECLGWMRQQRAEMDMVAWGVDLASVEQHINSHRGIHNSIGDYRWQLDKIKADLREKSAIYQLEEEYENLLKASFERMDHLRQLQNIIQATSREIMWINDCEEEELLYDWSDKNTNIAQKQEAFSIRMSQLEVKEKELNKLKQESDQLVLNQHPASDKIEAYMDTLQTQWSWILQITKCIDVHLKENAAYFQFFEEAQSTEAYLKGLQDSIRKKYPCDKNMPLQHLLEQIKELEKEREKILEYKRQVQNLVNKSKKIVQLKPRNPDYRSNKPIILRALCDYKQDQKIVHKGDECILKDNNERSKWYVTGPGGVDMLVPSVGLIIPPPNPLAVDLSCKIEQYYEAILALWNQLYINMKSLVSWHYCMIDIEKIRAMTIAKLKTMRQEDYMKTIADLELHYQEFIRNSQGSEMFGDDDKRKIQSQFTDAQKHYQTLVIQLPGYPQHQTVTTTEITHHGTCQDVNHNKVIETNRENDKQETWMLMELQKIRRQIEHCEGRMTLKNLPLADQGSSHHITVKINELKSVQNDSQAIAEVLNQLKDMLANFRGSEKYCYLQNEVFGLFQKLENINGVTDGYLNSLCTVRALLQAILQTEDMLKVYEARLTEEETVCLDLDKVEAYRCGLKKIKNDLNLKKSLLATMKTELQKAQQIHSQTSQQYPLYDLDLGKFGEKVTQLTDRWQRIDKQIDFRLWDLEKQIKQLRNYRDNYQAFCKWLYDAKRRQDSLESMKFGDSNTVMRFLNEQKNLHSEISGKRDKSEEVQKIAELCANSIKDYELQLASYTSGLETLLNIPIKRTMIQSPSGVILQEAADVHARYIELLTRSGDYYRFLSEMLKSLEDLKLKNTKIEVLEEELRLARDANSENCNKNKFLDQNLQKYQAECSQFKAKLASLEELKRQAELDGKSAKQNLDKCYGQIKELNEKITRLTYEIEDEKRRRKSVEDRFDQQKNDYDQLQKARQCEKENLGWQKLESEKAIKEKEYEIERLRVLLQEEGTRKREYENELAKVRNHYNEEMSNLRNKYETEINITKTTIKEISMQKEDDSKNLRNQLDRLSRENRDLKDEIVRLNDSILQATEQRRRAEENALQQKACGSEIMQKKQHLEIELKQVMQQRSEDNARHKQSLEEAAKTIQDKNKEIERLKAEFQEEAKRRWEYENELSKVRNNYDEEIISLKNQFETEINITKTTIHQLTMQKEEDTSGYRAQIDNLTRENRSLSEEIKRLKNTLTQTTENLRRVEEDIQQQKATGSEVSQRKQQLEVELRQVTQMRTEESVRYKQSLDDAAKTIQDKNKEIERLKQLIDKETNDRKCLEDENARLQRVQYDLQKANSSATETINKLKVQEQELTRLRIDYERVSQERTVKDQDITRFQNSLKELQLQKQKVEEELNRLKRTASEDSCKRKKLEEELEGMRRSLKEQAIKITNLTQQLEQASIVKKRSEDDLRQQRDVLDGHLREKQRTQEELRRLSSEVEALRRQLLQEQESVKQAHLRNEHFQKAIEDKSRSLNESKIEIERLQSLTENLTKEHLMLEEELRNLRLEYDDLRRGRSEADSDKNATILELRSQLQISNNRTLELQGLINDLQRERENLRQEIEKFQKQALEASNRIQESKNQCTQVVQERESLLVKIKVLEQDKARLQRLEDELNRAKSTLEAETRVKQRLECEKQQIQNDLNQWKTQYSRKEEAIRKIESEREKSEREKNSLRSEIERLQAEIKRIEERCRRKLEDSTRETQSQLETERSRYQREIDKLRQRPYGSHRETQTECEWTVDTSKLVFDGLRKKVTAMQLYECQLIDKTTLDKLLKGKKSVEEVASEIQPFLRGAGSIAGASASPKEKYSLVEAKRKKLISPESTVMLLEAQAATGGIIDPHRNEKLTVDSAIARDLIDFDDRQQIYAAEKAITGFDDPFSGKTVSVSEAIKKNLIDRETGMRLLEAQIASGGVVDPVNSVFLPKDVALARGLIDRDLYRSLNDPRDSQKNFVDPVTKKKVSYVQLKERCRIEPHTGLLLLSVQKRSMSFQGIRQPVTVTELVDSGILRPSTVNELESGQISYDEVGERIKDFLQGSSCIAGIYNETTKQKLGIYEAMKIGLVRPGTALELLEAQAATGFIVDPVSNLRLPVEEAYKRGLVGIEFKEKLLSAERAVTGYNDPETGNIISLFQAMNKELIEKGHGIRLLEAQIATGGIIDPKESHRLPVDIAYKRGYFNEELSEILSDPSDDTKGFFDPNTEENLTYLQLKERCIKDEETGLCLLPLKEKKKQVQTSQKNTLRKRRVVIVDPETNKEMSVQEAYKKGLIDYETFKELCEQECEWEEITITGSDGSTRVVLVDRKTGSQYDIQDAIDKGLVDRKFFDQYRSGSLSLTQFADMISLKNGVGTSSSMGSGVSDDVFSSSRHESVSKISTISSVRNLTIRSSSFSDTLEESSPIAAIFDTENLEKISITEGIERGIVDSITGQRLLEAQACTGGIIHPTTGQKLSLQDAVSQGVIDQDMATRLKPAQKAFIGFEGVKGKKKMSAAEAVKEKWLPYEAGQRFLEFQYLTGGLVDPEVHGRISTEEAIRKGFIDGRAAQRLQDTSSYAKILTCPKTKLKISYKDAINRSMVEDITGLRLLEAASVSSKGLPSPYNMSSAPGSRSGSRSGSRSGSRSGSRSGSRRGSFDATGNSSYSYSYSFSSSSIGH

SEQ ID NO: 10221 - protein, 342 aa, Homo sapiens
MMRVCWLVRQDSRHQRIRLPHLEAVVIGRGPETKITDKKCSRQQVQLKAECNKGYVKVKQVGVNPTSIDSVVIGKDQEVKLQPGQVLHMVNELYPYIVEFEEEAKNPGLETHRKRKRSGNSDSIERDAAQEAEAGTGLEPGSNSGQCSVPLKKGKDAPIKKESLGHWSQGLKISMQDPKMQVYKDEQVVVIKDKYPKARYHWLVLPWTSISSLKAVAREHLELLKHMHTVGEKVIVDFAGSSKLRFRLGYHAIPSMSHVHLHVISQDFDSPCLKNKKHWNSFNTEYFLESQAVIEMVQEAGRVTVRDGMPELLKLPLRCHECQQLLPSIPQLKEHLRKHWTQ

SEQ ID NO: 10222 - protein, 61 aa, Homo sapiens
MDPNCSCTTGVSCACTGSCTCKECKCTSCKKSCCSCCPVGCAKCAHGCVCKGTLENCSCCA

SEQ ID NO: 10223 - protein, 467 aa, Homo sapiens
MHSTTPISSLFSFTSPAVKRLLGWKQGDEEEKWAEKAVDSLVKKLKKKKGAMDELERALSCPGQPSKCVTIPRSLDGRLQVSHRKGLPHVIYCRVWRWPDLQSHHELKPLECCEFPFGSKQKEVCINPYHYRRVETPVLPPVLVPRHSEYNPQLSLLAKFRSASLHSEPLMPHNATYPDSFQQPPCSALPPSPSHAFSQSPCTASYPHSPGSPSEPESPYQHSVDTPPLPYHATEASETQSGQPVDATADRHVVLSIPNGDFRPVCYEEPQHWCSVAYYELNNRVGETFQASSRSVLIDGFTDPSNNRNRFCLGLLSNVNRNSTIENTRRHIGKGVHLYYVGGEVYAECVSDSSIFVQSRNCNYQHGFHPATVCKIPSGCSLKVFNNQLFAQLLAQSVHHGFEVVYELTKMCTIRMSFVKGWGAEYHRQDVTSTPCWIEIHLHGPLQWLDKVLTQMGSPHNPISSVS

SEQ ID NO: 10224 - protein, 568 aa, Homo sapiens
MDYRRLLMSRVVPGQFDDADSSDSENRDLKTVKEKDDILFEDLQDNVNENGEGEIEDEEEEGYDDDDDDWDWDEGVGKLAKGYVWNGGSNPQANRQTSDSSSAKMSTPADKVLRKFENKINLDKLNVTDSVINKVTEKSRQKEADMYRIKDKADRATVEQVLDPRTRMILFKMLTRGIITEINGCISTGKEANVYHASTANGESRAIKIYKTSILVFKDRDKYVSGEFRFRHGYCKGNPRKMVKTWAEKEMRNLIRLNTAEIPCPEPIMLRSHVLVMSFIGKDDMPAPLLKNVQLSESKARELYLQVIQYMRRMYQDARLVHADLSEFNMLYHGGGVYIIDVSQSVEHDHPHALEFLRKDCANVNDFFMRHSVAVMTVRELFEFVTDPSITHENMDAYLSKAMEIASQRTKEERSSQDHVDEEVFKRAYIPRTLNEVKNYERDMDIIMKLKEEDMAMNAQQDNILYQTVTGLKKDLSGVQKVPALLENQVEERTCSDSEDIGSSECSDTDSEEQGDHARPKKHTTDPDIDKKERKKMVKEAQREKRKNKIPKHVKKRKEKTAKTKKGK

SEQ ID NO: 10225 - protein, 267 aa, Homo sapiens
MADSEALPSLAGDPVAVEALLRAVFGVVVDEAIQKGTSVSQKVCEWKEPEELKQLLDLELRSQGESQKQILERCRAVIRYSVKTGHPRFFNQLFSGLDPHALAGRIITESLNTSQYTYEIAPVFVLMEEEVLRKLRALVGWSSGDGIFCPGGSISNMYAVNLARYQRYPDCKQRGLRTLPPLALFTSKEVGKRHRPNPGLLILISSHVTTPSRRELRFWDLAPTVSEWSRLMREGKWSPRIWRGRLVWPRLRVLCRSWSVPPLAPLC

SEQ ID NO: 10226 - protein, 128 aa, Homo sapiens
MTGYTPDEKLRLQQLRELRRRWLKDQELSPREPVLPPQKMGPMEKFWNKFLENKSPWRKMVHGVYKKSIFVFTHVLVPVWIIHYYMKYHVSEKPYGIVEKKSRIFPGDTILETGEVIPPMKEFPDQHH

SEQ ID NO: 10227 - protein, 579 aa, Homo sapiens
MWRVLFLLSGLGGLRMDSNFDSLPVQITVPEKIRSIIKEGIESQASYKIVIEGKPYTVNLMQKNFLPHNFRVYSYSGTGIMKPLDQDFQNFCHYQGYIEGYPKSVVMVSTCTGLRGVLQFENVSYGIEPLESSVGFEHVIYQVKHKKADVSLYNEKDIESRDLSFKLQSVEHPRTISLESLAVILAQLLSLSMGITYDDINKCQCSGAVCIMNPEAIHFSGVKIFSNCSFEDFAHFISKQKSQCLHNQPRLDPFFKQQAVCGNAKLEAGEECDCGTEQDCALIGETCCDIATCRFKAGSNCAEGPCCENCLFMSKERMCRPSFEECDLPEYCNGSSASCPENHYVQTGHPCGLNQWICIDGVCMSGDKQCTDTFGKEVEFGPSECYSHLNSKTDVSGNCGISDSGYTQCEADGHLCIAVEFASDHADSQKMWIKDGTSCGSNKVCRNQRCVSSSYLGYDCTTDKCNDRGVCNNKKHCHCSASYLPPDCSVQSDLWPGGSIDSGNFPPVAIPARLPERRYIENIYHSKPMRWPFFLFIPFFIIFCVLIAIMVKVNFQRKKWRTEDYSSDEQPESESEPKG

SEQ ID NO: 10228 - protein, 812 aa, Homo sapiens
MGWRPRRARGTPLLLLLLLLLLWPVPGAGVLQGHIPGQPVTPHWVLDGQPWRTVSLEEPVSKPDMGLVALEAEGQELLLELEKNHRLLAPGYIETHYGPDGQPVVLAPNHTDHCHYQGRVRGFPDSWVVLCTCSGMSGLITLSRNASYYLRPWPPRGSKDFSTHEIFRMEQLLTWKGTCGHRDPGNKAGMTSLPGGPQSRGRREARRTRKYLELYIVADHTLFLTRHRNLNHTKQRLLEVANYVDQLLRTLDIQVALTGLEVWTERDRSRVTQDANATLWAFLQWRRGLWAQRPHDSAQLLTGRAFQGATVGLAPVEGMCRAESSGGVSTDHSELPIGAAATMAHEIGHSLGLSHDPDGCCVEAAAESGGCVMAAATGHPFPRVFSACSRRQLRAFFRKGGGACLSNAPDPGLPVPPALCGNGFVEAGEECDCGPGQECRDLCCFAHNCSLRPGAQCAHGDCCVRCLLKPAGALCRQAMGDCDLPEFCTGTSSHCPPDVYLLDGSPCARGSGYCWDGACPTLEQQCQQLWGPGSHPAPEACFQVVNSAGDAHGNCGQDSEGHFLPCAGRDALCGKLQCQGGKPSLLAPHMVPVDSTVHLDGQEVTCRGALALPSAQLDLLGLGLVEPGTQCGPRMVCQSRRCRKNAFQELQRCLTACHSHGVCNSNHNCHCAPGWAPPFCDKPGFGGSMDSGPVQAENHDTFLLAMLLSVLLPLLPGAGLAWCCYRLPGAHLQRCSWGCRRDPACSGPKDGPHRDHPLGGVHPMELGPTATGQPWPLDPENSHEPSSHPEKPLPAVSPDPQDQVQMPRSCLW

SEQ ID NO: 10229 - protein, 715 aa, Homo sapiens
MFLLLALLTELGRLQAHEGSEGIFLHVTVPRKIKSNDSEVSERKMIYIITIDGQPYTLHLGKQSFLPQNFLVYTYNETGSLHSVSPYFMMHCHYQGYAAEFPNSFVTLSICSGLRGFLQFENISYGIEPVESSARFEHIIYQMKNNDPNVSILAVNYSHIWQKDQPYKVPLNSQIKNLSKLLPQYLEIYIIVEKALMFTQFKLTVILSSLELWSNENQISTSGDADDILQRFLAWKRDYLILRPHDIAYLLVYRKHPKYVGATFPGTVCNKSYDAGIAMYPDAIGLEGFSVIIAQLLGLNVGLTYDDITQCFCLRATCIMNHEAVSASGRKIFSNCSMHDYRYFVSKFETKCLQKLSNLQPLHQNQPVCGNGILESNEECDCGNKNECQFKKCCDYNTCKLKGSVKCGSGPCCTSKCELSIAGTPCRKSIDPECDFTEYCNGTSSNCVPDTYALNGRLCKLGTAYCYNGQCQTTDNQCAKIFGKGAQGAPFACFKEVNSLHERSENCGFKNSQPLPCERKDVLCGKLACVQPHKNANKSDAQSTVYSYIQDHVCVSIATGSSMRSDGTDNAYVADGTMCGPEMYCVNKTCRKVHLMGYNCNATTKCKGKGICNNFGNCQCFPGHRPPDCKFQFGSPGGSIDDGNFQKSGDFYTEKGYNTHWNNWFILSFCIFLPFFIVFTTVIFKRNEISKSCNRENAEYNRNSSVVSESDDVGH

SEQ ID NO: 10230 - protein, 557 aa, Homo sapiens
MDSDEGYNYEFDEDEECSEEDSGAEEEEDEDDDEPDDDTLDLGEVELVEPGLGVGGERDGLLCGETGGGGGSALGPGGGGGGGGGGGGGGPGHEQEEDYRYEVLTAEQILQHMVECIREVNEVIQNPATITRILLSHFNWDKEKLMERYFDGNLEKLFAECHVINPSKKSRTRQMNTRSSAQDMPCQICYLNYPNSYFTGLECGHKFCMQCWSEYLTTKIMEEGMGQTISCPAHGCDILVDDNTVMRLITDSKVKLKYQHLITNSFVECNRLLKWCPAPDCHHVVKVQYPDAKPVRCKCGRQFCFNCGENWHDPVKCKWLKKWIKKCDDDSETSNWIAANTKECPKCHVTIEKDGGCNHMVCRNQNCKAEFCWVCLGPWEPHGSAWYNCNRYNEDDAKAARDAQERSRAALQRYLFYCNRYMNHMQSLRFEHKLYAQVKQKMEEMQQHNMSWIEVQFLKKAVDVLCQCRATLMYTYVFAFYLKKNNQSIIFENNQADLENATEVLSGYLERDISQDSLQDIKQKVQDKYRYCESRRRVLLQHVHEGYEKDLWEYIED

SEQ ID NO: 10231 - protein, 401 aa, Homo sapiens
MSLYDDLGVETSDSKTEGWSKNFKLLQSQLQVKKAALTQAKSQRTKQSTVLAPVIDLKRGGSSDDRQIVDTPPHVAAGLKDPVPSGFSAGEVLIPLADEYDPMFPNDYEKVVKRQREERQRQRELERQKEIEEREKRRKDRHEASGFARRPDPDSDEDEDYERERRKRSMGGAAIAPPTSLVEKDKELPRDFPYEEDSRPRSQSSKAAIPPPVYEEQDRPRSPTGPSNSFLANMGGTVAHKIMQKYGFREGQGLGKHEQGLSTALSVEKTSKRGGKIIVGDATEKDASKKSDSNPLTEILKCPTKVVLLRNMVGAGEVDEDLEVETKEECEKYGKVGKCVIFEIPGAPDDEAVRIFLEFERVESAIKAVVDLNGRYFGGRVVKACFYNLDKFRVLDLAEQV

SEQ ID NO: 10232 - protein, 363 aa, Homo sapiens
MSFGRDMELEHFDERDKAQRYSRGSRVNGLPSPTHSAHCSFYRTRTLQTLSSEKKAKKVRFYRNGDRYFKGIVYAISPDRFRSFEALLADLTRTLSDNVNLPQGVRTIYTIDGLKKISSLDQLVEGESYVCGSIEPFKKLEYTKNVNPNWSVNVKTTSASRAVSSLATAKGSPSEVRENKDFIRPKLVTIIRSGVKPRKAVRILLNKKTAHSFEQVLTDITDAIKLDSGVVKRLYTLDGKQVMCLQDFFGDDDIFIACGPEKFRYQDDFLLDESECRVVKSTSYTKIASSSRRSTTKSPGPSRRSKSPASTSSVNGTPGSQLSTPRSGKSPSPSPTSPGSLRKQRDLYRPLSSDDLDSVGDSV

SEQ ID NO: 10233 - protein, 433 aa, Homo sapiens
MLELIEVNGTPGSQLSTPRSGKSPSPSPTSPGSLRKQRSSQHGGSSTSLASTKVCSSMDENDGPGEEVSEEGFQIPATITERYKVGRTIGDGNFAVVKECVERSTAREYALKIIKKSKCRGKEHMIQNEVSILRRVKHPNIVLLIEEMDVPTELYLVMELVKGGDLFDAITSTNKYTERDASGMLYNLASAIKYLHSLNIVHRDIKPENLLVYEHQDGSKSLKLGDFGLATIVDGPLYTVCGTPTYVAPEIIAETGYGLKVDIWAAGVITYILLCGFPPFRGSGDDQEVLFDQILMGQVDFPSPYWDNVSDSAKELITMMLLVDVDQRFSAVQVLEHPWVNDDGLPENEHQLSVAGKIKKHFNTGPKPNSTAAGVSVIATTALDKERQVFRRRRNQDVRSRYKAQPAPPELNSESEDYSPSSSETVRSPNSPF

SEQ ID NO: 10234 - protein, 787 aa, Homo sapiens
MFRLWLLLAGLCGLLASRPGFQNSLLQIVIPEKIQTNTNDSSEIEYEQISYIIPIDEKLYTVHLKQRYFLADNFMIYLYNQGSMNTYSSDIQTQCYYQGNIEGYPDSMVTLSTCSGLRGILQFENVSYGIEPLESAVEFQHVLYKLKNEDNDIAIFIDRSLKEQPMDDNIFISEKSEPAVPDLFPLYLEMHIVVDKTLYDYWGSDSMIVTNKVIEIVGLANSMFTQFKVTIVLSSLELWSDENKISTVGEADELLQKFLEWKQSYLNLRPHDIAYLLIYMDYPRYLGAVFPGTMCITRYSAGVALYPKEITLEAFAVIVTQMLALSLGISYDDPKKCQCSESTCIMNPEVVQSNGVKTFSSCSLRSFQNFISNVGVKCLQNKPQMQKKSPKPVCGNGRLEGNEICDCGTEAQCGPASCCDFRTCVLKDGAKCYKGLCCKDCQILQSGVECRPKAHPECDIAENCNGTSPECGPDITLINGLSCKNNKFICYDGDCHDLDARCESVFGKGSRNAPFACYEEIQSQSDRFGNCGRDRNNKYVFCGWRNLICGRLVCTYPTRKPFHQENGDVIYAFVRDSVCITVDYKLPRTVPDPLAVKNGSQCDIGRVCVNRECVESRIIKASAHVCSQQCSGHGVCDSRNKCHCSPGYKPPNCQIRSKGFSIFPEEDMGSIMERASGKTENTWLLGFLIALPILIVTTAIVLARKQLKKWFAKEEEFPSSESKSEGSTQTYASQSSSEGSTQTYASQTRSESSSQADTSKSKSEDSAEAYTSRSKSQDSTQTQSSSN

SEQ ID NO: 10235 - protein, 655 aa, Homo sapiens
MGSGARFPSGTLRVRWLLLLGLVGPVLGAARPGFQQTSHLSSYEIITPWRLTRERREAPRPYSKQVSYVIQAEGKEHIIHLERNKDLLPEDFVVYTYNKEGTLITDHPNIQNHCHYRGYVEGVHNSSIALSDCFGLRGLLHLENASYGIEPLQNSSHFEHIIYRMDDVYKEPLKCGVSNKDIEKETAKDEEEEPPSMTQLLRRRRAVLPQTRYVELFIVVDKERYDMMGRNQTAVREEMILLANYLDSMYIMLNIRIVLVGLEIWTNGNLINIVGGAGDVLGNFVQWREKFLITRRRHDSAQLVLKKGFGGTAGMAFVGTVCSRSHAGGINVFGQITVETFASIVAHELGHNLGMNHDDGRDCSCGAKSCIMNSGASGSRNFSSCSAEDFEKLTLNKGGNCLLNIPKPDEAYSAPSCGNKLVDAGEECDCGTPKECELDPCCEGSTCKLKSFAECAYGDCCKDCRFLPGGTLCRGKTSECDVPEYCNGSSQFCQPDVFIQNGYPCQNNKAYCYNGMCQYYDAQCQVIFGSKAKAAPKDCFIEVNSKGDRFGNCGFSGNEYKKCATGNALCGKLQCENVQEIPVFGIVPAIIQTPSRGTKCWGVDFQLGSDVPDPGMVNEGTKCGAGKICRNFQCVDASVLNYDCDVQKKCHGHGK

SEQ ID NO: 10236 - protein, 359 aa, Homo sapiens
MIAAQAKLVYHLNKYYNEKCQARKAAIAKTIREVCKVVSDVLKEVEVQEPRFISSLNEMDNRYEGLEVISPTEFEVVLYLNQMGVFNFVDDGSLPGCAVLKLSDGRKRSMSLWVEFITASGYLSARKIRSRFQTLVAQAVDKCSYRDVVKMVADTSEVKLRIRDRYVVQITPAFKCTGIWPRSAAHWPLPHIPWPGPNRVAEVKAEGFNLLSKECHSLAGKQSSAESDAWVLQFAEAENRLQMGGCRKKCLSILKTLRDRHLELPGQPLNNYHMKTLVSYECEKHPRESDWDESCLGDRLNGILLQLISCLQCRRCPHYFLPNLDLFQGKPHSALENAAKQTWRLAREILTNPKSLEKL

SEQ ID NO: 10237 - protein, 1742 aa, Homo sapiens
MTSSSPAGLEGSDLSSINTMMSAVMSVGKVTENGGSPQGIKSPSKPPGPNRIGRRNQETKEEKSSYNCPLCEKICTTQHQLTMHIRQHNTDTGGADHSCSICGKSLSSASSLDRHMLVHSGERPYKCTVCGQSFTTNGNMHRHMKIHEKDPNSATATAPPSPLKRRRLSSKRKLSHDAESEREDPAPAKKMVEDGQSGDLEKKADEVFHCPVCFKEFVCKYGLETHMETHSDNPLRCDICCVTFRTHRGLLRHNALVHKQLPRDAMGRPFIQNNPSIPAGFHDLGFTDFSCRKFPRISQAWCETNLRRCISEQHRFVCDTCDKAFPMLCSLALHKQTHVAADQGQEKPQATPLPGDALDQKGFLALLGLQHTKDVRPAPAEEPLPDDNQAIQLQTLKCQLPQDPGCTNLLSLSPFEAASLGGSLTVLPATKDSIKHLSLQPFQKGFIIQPDSSIVVKPISGESAIELADIQQILKMAASAPPQISLPPFSKAPAAPLQAIFKHMPPLKPKPLVTPRTVVATSTPPPLINAQQASPGCISPSLPPPPLKLLKGSVEAASNAHLLQSKSGTQPHAATRLSLQQPRAELPGQPEMKTQLEQDSIIEALLPLSMEAKIKQEITEGELKAFMTAPGGKKTPAMRKVLYPCRFCNQVFAFSGVLRAHVRSHLGISPYQCNICDYIAADKAALIRHLRTHSGERPYICKICHYPFTVKANCERHLRKKHLKATRKDIEKNIEYVSSSAAELVDAFCAPDTVCRLCGEDLKHYRALRIHMRTHCGRGLGGGHKGRKPFECKECSAAFAAKRNCIHHILKQHLHVPEQDIESYVLAADGLGPAEAPAAEASGRGEDSGCAALGDCKPLTAFLEPQNGFLHRGPTQPPPPHVSIKLEPASSFAVDFNEPLDFSQKGLALVQVKQENISFLSPSSLVPYDCSMEPIDLSIPKNFRKGDKDLATPSEAKKPEEEAGSSEQPSPCPAPGPSLPVTLGPSGILESPMAPAPAATPEPPAQPLQGPVQLAVPIYSSALVSSPPLVGSSALLSGTALLRPLRPKPPLLLPKPPVTEELPPLASIAQIISSVSSAPTLLKTKVADPGPASTGSNTTASDSLGGSVPKAATTATPAATTSPKESSEPPAPASSPEAASPTEQGPAGTSKKRGRKRGMRSRPRANSGGVDLDSSGEFASIEKMLATTDTNKFSPFLQTAEDNTQDEVAGAPADHHGPSDEEQGSPPEDKLLRAKRNSYTNCLQKITCPHCPRVFPWASSLQRHMLTHTGQKPFPCQKCDAFFSTKSNCERHQLRKHGVTTCSLRRNGLIPQSKESDVGSHDSTDSQSDAETAAAAGEVLDLTSRDREQPSEGATELRQVAGDAPVEQATAETASPVHREEHGRGESHEPEEEHGTEESTGDADGAEEDASSNQSLDLDFATKLMDFKLAEGDGEAGAGGAASQEQKLACDTCGKSFKFLGTLSRHRKAHGRQEPKDEKGDGASTAEEGPQPAPEQEEKPPETPAEVVESAPGAGEAPAEKLAEETEGPSDGESAAEKRSSEKSDDDKKPKTDSPKSVASKADKRKKVCSVCNKRFWSLQDLTRHMRSHTGERPYKCQTCERTFTLKHSLVRHQRIHQKARHAKHHGKDSDKEERGEEDSENESTHSGNNAVSENEAELAPNASNHMAVTRSRKEGLASATKDCSHREEKVTAGWPSEPGQGDLNPESPAALGQDLLEPRSKRPAHPILATADGASQLVGME

SEQ ID NO: 10238 - protein, 1235 aa, Homo sapiens
MRSRSNSGVRLDGYARLVQQTILCYQNPVTGLLSASHEQKDAWVRDNIYSILAVWGLGMAYRKNADRDEDKAKAYELEQNVVKLMRGLLQCMMRQVAKVEKFKHTQSTKDSLHAKYNTATCGTVVGDDQWGHLQVDATSLFLLFLAQMTASGLRIIFTLDEVAFIQNLVFYIEAAYKVADYGMWERGDKTNQGIPELNASSVGMAKAALEAIDELDLFGAHGGRKSVIHVLPDEVEHCQSILFSMLPRASTSKEIDAGLLSIISFPAFAVEDVNLVNVTKNEIISKLQGRYGCCRFLRDGYKTPREDPNRLHYDPAELKLFENIECEWPVFWTYFIIDGVFSGDAVQVQEYREALEGILIRGKNGIRLVPELYAVPPNKVDEEYKNPHTVDRVPMGKVPHLWGQSLYILSSLLAEGFLAAGEIDPLNRRFSTSVKPDVVVQVTVLAENNHIKDLLRKHGVNVQSIADIHPIQVQPGRILSHIYAKLGRNKNMNLSGRPYRHIGVLGTSKLYVIRNQIFTFTPQFTDQHHFYLALDNEMIVEMLRIELAYLCTCWRMTGRPTLTFPISRTMLTNDGSDIHSAVLSTIRKLEDGYFGGARVKLGNLSEFLTTSFYTYLTFLDPDCDEKLFDNASEGTFSPDSDSDLVGYLEDTCNQESQDELDHYINHLLQSTSLRSYLPPLCKNTEDRHVFSAIHSTRDILSVMAKAKGLEVPFVPMTLPTKVLSAHRKSLNLVDSPQPLLEKVPESDFQWPRDDHGDVDCEKLVEQLKDCSNLQDQADILYILYVIKGPSWDTNLSGQHGVTVQNLLGELYGKAGLNQEWGLIRYISGLLRKKVEVLAEACTDLLSHQKQLTVGLPPEPREKIISAPLPPEELTKLIYEASGQDISIAVLTQEIVVYLAMYVRAQPSLFVEMLRLRIGLIIQVMATELARSLNCSGEEASESLMNLSPFDMKNLLHHILSGKEFGVERSVRPIHSSTSSPTISIHEVGHTGVTKTERSGINRLRSEMKQMTRRFSADEQFFSVGQAASSSAHSSKSARSSTPSSPTGTSSSDSGGHHIGWGERQGQWLRRRRLDGAINRVPVGFYQRVWKILQKCHGLSIDGYVLPSSTTREMTPHEIKFAVHVESVLNRVPQPEYRQLLVEAIMVLTLLSDTEMTSIGGIIHVDQIVQMASQLFLQDQVSIGAMDTLEKDQATGICHFFYDSAPSGAYGTMTYLTRAVASYLQELLPNSGCQMQ

SEQ ID NO: 10239 - protein, 200 aa, Homo sapiens
MDSYLLMWGLLTFIMVPGCQAELCDDDPPEIPHATFKAMAYKEGTMLNCECKRGFRRIKSGSLYMLCTGNSSHSSWDNQCQCTSSATRNTTKQVTPQPEEQKERKTTEMQSPMQPVDQASLPGEEKPQASPEGRPESETSCLVTTTDFQIQTEMAATMETSIFTTEYQVAVAGCVFLLISVLLLSGLTWQRRQRKSRRTI

SEQ ID NO: 10240 - protein, 1589 aa, Homo sapiens
MAKQLNLPENTDDWTKEDVNQWLESHKIDQKHREILTEQDVNGAVLKWLKKEHLVDMGITHGPAIQIEELFKELRKTAIEDSIQTSKMGKPSKNAPKDQTVSQKERRETSKQKQKGKENPDMANPSAMSTTAKGSKSLKVELIEDKIDYTKERQPSIDLTCVSYPFDEFSNPYRYKLDFSLQPETGPGNLIDPIHEFKAFTNTATATEEDVKMKFSNEVFRFASACMNSRTNGTIHFGVKDKPHGKIVGIKVTNDTKEALINHFNLMINKYFEDHQVQQAKKCIREPRFVEVLLPNSTLSDRFVIEVDIIPQFSECQYDYFQIKMQNYNNKIWEQSKKFSLFVRDGTSSKDITKNKVDFRAFKADFKTLAESRKAAEEKFRAKTNKKEREGPKLVKLLTGNQDLLDNSYYEQYILVTNKCHPDQTKHLDFLKEIKWFAVLEFDPESNINGVVKAYKESRVANLHFPSVYVEQKTTPNETISTLNLYHQPSWIFCNGRLDLDSEKYKPFDPSSWQRERASDVRKLISFLTHEDIMPRGKFLVVFLLLSSVDDPRDPLIETFCAFYQDLKGMENILCICVHPHIFQGWKDLLEARLIKHQDEISSQCISALSLEEINGTILKLKSVTQSSKRLLPSIGLSTVLLKKEEDIMTALEIICENECEGTLLEKDKNKFLEFKASKEEDFYRGGKVSWWNFYFSSESYSSPFVKRDKYERLEAMIQNCADSSKPTSTKIIHLYHHPGCGGTTLAMHILWELRKKFRCAVLKNKTVDFSEIGEQVTSLITYGAMNRQEYVPVLLLVDDFEEQDNVYLLQYSIQTAIAKKYIRYEKPLVIILNCMRSQNPEKSARIPDSIAVIQQLSPKEQRAFELKLKEIKEQHKNFEDFYSFMIMKTNFNKEYIENVVRNILKGQNIFTKEAKLFSFLALLNSYVPDTTISLSQCEKFLGIGNKKAFWGTEKFEDKMGTYSTILIKTEVIECGNYCGVRIIHSLIAEFSLEELKKSYHLNKSQIMLDMLTENLFFDTGMGKSKFLQDMHTLLLTRHRDEHEGETGNWFSPFIEALHKDEGNEAVEAVLLESIHRFNPNAFICQALARHFYIKKKDFGNALNWAKQAKIIEPDNSYISDTLGQVYKSKIRWWIEENGGNGNISVDDLIALLDLAEHASSAFKESQQQSEDREYEVKERLYPKSKRRYDTYNIAGYQGEIEVGLYTIQILQLIPFFDNKNELSKRYMVNFVSGSSDIPGDPNNEYKLALKNYIPYLTKLKFSLKKSFDFFDEYFVLLKPRNNIKQNEEAKTRRKVAGYFKKYVDIFCLLEESQNNTGLGSKFSEPLQVERCRRNLVALKADKFSGLLEYLIKSQEDAISTMKCIVNEYTFLLEQCTVKIQSKEKLNFILANIILSCIQPTSRLVKPVEKLKDQLREVLQPIGLTYQFSEPYFLASLLFWPENQQLDQHSEQMKEYAQALKNSFKGQYKHMHRTKQPIAYFFLGKGKRLERLVHKGKIDQCFKKTPDINSLWQSGDVWKEEKVQELLLRLQGRAENNCLYIEYGINEKITIPITPAFLGQLRSGRSIEKVSFYLGFSIGGPLAYDIEIV

SEQ ID NO: 10241 - protein, 272 aa, Homo sapiens
MDSYLLMWGLLTFIMVPGCQAELCDDDPPEIPHATFKAMAYKEGTMLNCECKRGFRRIKSGSLYMLCTGNSSHSSWDNQCQCTSSATRNTTKQVTPQPEEQKERKTTEMQSPMQPVDQASLPGHCREPPPWENEATERIYHFVVGQMVYYQCVQGYRALHRGPAESVCKMTHGKTRWTQPQLICTGEMETSQFPGEEKPQASPEGRPESETSCLVTTTDFQIQTEMAATMETSIFTTEYQVAVAGCVFLLISVLLLSGLTWQRRQRKSRRTI

SEQ ID NO: 10242 - protein, 498 aa, Homo sapiens
MDFSVKVDIEKEVTCPICLELLTEPLSLDCGHSFCQACITAKIKESVIISRGESSCPVCQTRFQPGNLRPNRHLANIVERVKEVKMSPQEGQKRDVCEHHGKKLQIFCKEDGKVICWVCELSQEHQGHQTFRINEVVKECQEKLQVALQRLIKEDQEAEKLEDDIRQERTAWKNYIQIERQKILKGFNEMRVILDNEEQRELQKLEEGEVNVLDNLAAATDQLVQQRQDASTLISDLQRRLRGSSVEMLQDVIDVMKRSESWTLKKPKSVSKKLKSVFRVPDLSGMLQVLKELTDVQYYWVDVMLNPGSATSNVAISVDQRQVKTVRTCTFKNSNPCDFSAFGVFGCQYFSSGKYYWEVDVSGKIAWILGVHSKISSLNKRKSSGFAFDPSVNYSKVYSRYRPQYGYWVIGLQNTCEYNAFEDSSSSDPKVLTLFMAVPPCRIGVFLDYEAGIVSFFNVTNHGALIYKFSGCRFSRPAYPYFNPWNCLVPMTVCPPSS

SEQ ID NO: 10243 - protein, 154 aa, Homo sapiens
MAPRRARGCRTLGLPALLLLLLLRPPATREPAASSPSSNNTAATTAAIVPGSQLMPSKSPSTGTTEISSHESSHGTPSQTTAKNWELTASASHQPPGVYPQGHSDTTVAISTSTVLLCGLSAVSLLACYLKSRASVCSCHPRSAGHTCSVGSVC

SEQ ID NO: 10244 - protein, 267 aa, Homo sapiens
MAPRRARGCRTLGLPALLLLLLLRPPATRGITCPPPMSVEHADIWVKSYSLYSRERYICNSGFKRKAGTSSLTECVLNKATNVAHWTTPSLKCIRDPALVHQRPAPPSTVTTAGVTPQPESLSPSGKEPAASSPSSNNTAATTAAIVPGSQLMPSKSPSTGTTEISSHESSHGTPSQTTAKNWELTASASHQPPGVYPQGHSDTTVAISTSTVLLCGLSAVSLLACYLKSRQTPPLASVEMEAMEALPVTWGTSSRDEDLENCSHHL

SEQ ID NO: 10245 - protein, 611 aa, Homo sapiens
MSIHIVALGNEGDTFHQDNRPSGLIRTYLGRSPLVSGDESSLLLNAASTVARPVFTEYQASAFGNVKLVVHDCPVWDIFDSDWYTSRNLIGGADIIVIKYNVNDKFSFHEVKDNYIPVIKRALNSVPVIIAAVGTRQNEELPCTCPLCTSDRGSCVSTTEGIQLAKELGATYLELHSLDDFYIGKYFGGVLEYFMIQALNQKTSEKMKKRKMSNSFHGIRPPQLEQPEKMPVLKAEASHYNSDLNNLLFCCQCVDVVFYNPNLKKVVEAHKIVLCAVSHVFMLLFNVKSPTDIQDSSIIRTTQDLFAINRDTAFPGASHESSGNPPLRVIVKDALFCSCLSDILRFIYSGAFQWEELEEDIRKKLKDSGDVSNVIEKVKCILKTPGKINCLRNCKTYQARKPLWFYNTSLKFFLNKPMLADVVFEIQGTTVPAHRAILVARCEVMAAMFNGNYMEAKSVLIPVYGVSKETFLSFLEYLYTDSCCPAGIFQAMCLLICAEMYQVSRLQHICELFIITQLQSMPSRELASMNLDIVDLLKKAKFHHSDCLSTWLLHFIATNYLIFSQKPEFQDLSVEERSFVEKHRWPSNMYLKQLAEYRKYIHSRKCRCLVM

SEQ ID NO: 10246 - protein, 224 aa, Homo sapiens
MSRKIEGFLLLLLFGYEATLGLSSTEDEGEDPWYQKACKCDCQGGPNALWSAGATSLDCIPECPYHKPLGFESGEVTPDQITCSNPEQYVGWYSSWTANKARLNSQGFGCAWLSKFQDSSQWLQIDLKEIKVISGILTQGRCDIDEWMTKYSVQYRTDERLNWIYYKDQTGNNRVFYGNSDRTSTVQNLLRPPIISRFIRLIPLGWHVRIAIRMELLECVSKCA

SEQ ID NO: 10247 - protein, 565 aa, Homo sapiens
MDFLLALVLVSSLYLQAAAEFDGRWPRQIVSSIGLCRYGGRIDCCWGWARQSWGQCQPVCQPRCKHGECIGPNKCKCHPGYAGKTCNQDLNECGLKPRPCKHRCMNTYGSYKCYCLNGYMLMPDGSCSSALTCSMANCQYGCDVVKGQIRCQCPSPGLQLAPDGRTCVDVDECATGRASCPRFRQCVNTFGSYICKCHKGFDLMYIGGKYQCHDIDECSLGQYQCSSFARCYNIRGSYKCKCKEGYQGDGLTCVYIPKVMIEPSGPIHVPKGNGTILKGDTGNNNWIPDVGSTWWPPKTPYIPPIITNRPTSKPTTRPTPKPTPIPTPPPPPPLPTELRTPLPPTTPERPTTGLTTIAPAASTPPGGITVDNRVQTDPQKPRGDVFIPRQPSNDLFEIFEIERGVSADDEAKDDPGVLVHSCNFDHGLCGWIREKDNDLHWEPIRDPAGGQYLTVSAAKAPGGKAARLVLPLGRLMHSGDLCLSFRHKVTGLHSGTLQVFVRKHGAHGAALWGRNGGHGWRQTQITLRGADIKSVVFKGEKRRGHTGEIGLDDVSLKKGHCSEER

SEQ ID NO: 10248 - protein, 210 aa, Homo sapiens
MLKCFRNCLRPSSLSTLPLQYGILFPKLLACLVHLHFGHFSSAVISVTSFYLSMNLDGSAQDPEKREYSSVCVGREDDIKKSERMTAVVHDREVVIFYHKGEYHAMDIRCYHSGGPLHLGDIEDFDGRPCIVCPWHKYKITLATGEGLYQSINPKDPSAKPKWCSKGIKQRIHTVTVDNGNIYVTLSNEPFKCDSDFYATGDFKVIKSSS

SEQ ID NO: 10249 - protein, 282 aa, Homo sapiens
MSRQTATALPTGTSKCPPSQRVPALTGTTASNNDLASLFECPVCFDYVLPPILQCQSGHLVCSNCRPKLTCCPTCRGPLGSIRNLAMEKVANSVLFPCKYASSGCEITLPHTEKADHEELCEFRPYSCPCPGASCKWQGSLDAVMPHLMHQHKSITTLQGEDIVFLATDINLPGAVDWVMMQSCFGFHFMLVLEKQEKYDGHQQFFAIVQLIGTRKQAENFAYRLELNGHRRRLTWEATPRSIHEGIATAIMNSDCLVFDTSIAQLFAENGNLGINVTISMC

SEQ ID NO: 10250 - protein, 434 aa, Homo sapiens
MEDLFSPSILPPAPNISVPILLGWGLNLTLGQGAPASGPPSRRVRLVFLGVILVVAVAGNTTVLCRLCGGGGPWAGPKRRKMDFLLVQLALADLYACGGTALSQLAWELLGEPRAATGDLACRFLQLLQASGRGASAHLVVLIALERRRAVRLPHGRPLPARALAALGWLLALLLALPPAFVVRGDSPSPLPPPPPPTSLQPGAPPAARAWPGERRCHGIFAPLPRWHLQVYAFYEAVAGFVAPVTVLGVACGHLLSVWWRHRPQAPAAAAPWSASPGRAPAPSALPRAKVQSLKMSLLLALLFVGCELPYFAARLAAAWSSGPAGDWEGEGLSAALRVVAMANSALNPFVYLFFQAGDCRLRRQLRKRLGSLCCAPQGGAEDEEGPRGHQALYRQRWPHPHYHHARREPLDEGGLRPPPPRPRPLPCSCESAF

SEQ ID NO: 10251 - protein, 536 aa, Homo sapiens
MLLLWVSVVAALALAVLAPGAGEQRRRAAKAPNVVLVVSDSFDGRLTFHPGSQVVKLPFINFMKTRGTSFLNAYTNSPICCPSRAAMWSGLFTHLTESWNNFKGLDPNYTTWMDVMERHGYRTQKFGKLDYTSGHHSISNRVEAWTRDVAFLLRQEGRPMVNLIRNRTKVRVMERDWQNTDKAVNWLRKEAINYTEPFVIYLGLNLPHPYPSPSSGENFGSSTFHTSLYWLEKVSHDAIKIPKWSPLSEMHPVDYYSSYTKNCTGRFTKKEIKNIRAFYYAMCAETDAMLGEIILALHQLDLLQKTIVIYSSDHGELAMEHRQFYKMSMYEASAHVPLLMMGPGIKAGLQVSNVVSLVDIYPTMLDIAGIPLPQNLSGYSLLPLSSETFKNEHKVKNLHPPWILSEFHGCNVNASTYMLRTNHWKYIAYSDGASILPQLFDLSSDPDELTNVAVKFPEITYSLDQKLHSIINYPKVSASVHQYNKEQFIKWKQSIGQNYSNVIANLRWHQDWQKEPRKYENAIDQWLKTHMNPRAV

SEQ ID NO: 10252 - protein, 2580 aa, Homo sapiens
MAEEGAVAVCVRVRPLNSREESLGETAQVYWKTDNNVIYQVDGSKSFNFDRVFHGNETTKNVYEEIAAPIIDSAIQGYNGTIFAYGQTASGKTYTMMGSEDHLGVIPRAIHDIFQKIKKFPDREFLLRVSYMEIYNETITDLLCGTQKMKPLIIREDVNRNVYVADLTEEVVYTSEMALKWITKGEKSRHYGETKMNQRSSRSHTIFRMILESREKGEPSNCEGSVKVSHLNLVDLAGSERAAQTGAAGVRLKEGCNINRSLFILGQVIKKLSDGQVGGFINYRDSKLTRILQNSLGGNAKTRIICTITPVSFDETLTALQFASTAKYMKNTPYVNEVSTDEALLKRYRKEIMDLKKQLEEVSLETRAQAMEKDQLAQLLEEKDLLQKVQNEKIENLTRMLVTSSSLTLQQELKAKRKRRVTWCLGKINKMKNSNYADQFNIPTNITTKTHKLSINLLREIDESVCSESDVFSNTLDTLSEIEWNPATKLLNQENIESELNSLRADYDNLVLDYEQLRTEKEEMELKLKEKNDLDEFEALERKTKKDQENELSSKVELLREKEDQIKKLQEYIDSQKLENIKMDLSYSLESIEDPKQMKQTLFDAETVALDAKRESAFLRSENLELKEKMKELATTYKQMENDIQLYQSQLEAKKKMQVDLEKELQSAFNEITKLTSLIDGKVPKDLLCNLELEGKITDLQKELNKEVEENEALREEVILLSELKSLPSEVERLRKEIQDKSEELHIITSEKDKLFSEVVHKESRVQGLLEEIGKTKDDLATTQSNYKSTDQEFQNFKTLHMDFEQKYKMVLEENERMNQEIVNLSKEAQKFDSSLGALKTELSYKTQELQEKTREVQERLNEMEQLKEQLENRDSTLQTVEREKTLITEKLQQTLEEVKTLTQEKDDLKQLQESLQIERDQLKSDIHDTVNMNIDTQEQLRNALESLKQHQETINTLKSKISEEVSRNLHMEENTGETKDEFQQKMVGIDKKQDLEAKNTQTLTADVKDNEIIEQQRKIFSLIQEKNELQQMLESVIAEKEQLKTDLKENIEMTIENQEELRLLGDELKKQQEIVAQEKNHAIKKEGELSRTCDRLAEVEEKLKEKSQQLQEKQQQLLNVQEEMSEMQKKINEIENLKNELKNKELTLEHMETERLELAQKLNENYEEVKSITKERKVLKELQKSFETERDHLRGYIREIEATGLQTKEELKIAHIHLKEHQETIDELRRSVSEKTAQIINTQDLEKSHTKLQEEIPVLHEEQELLPNVKEVSETQETMNELELLTEQSTTKDSTTLARIEMERLRLNEKFQESQEEIKSLTKERDNLKTIKEALEVKHDQLKEHIRETLAKIQESQSKQEQSLNMKEKDNETTKIVSEMEQFKPKDSALLRIEIEMLGLSKRLQESHDEMKSVAKEKDDLQRLQEVLQSESDQLKENIKEIVAKHLETEEELKVAHCCLKEQEETINELRVNLSEKETEISTIQKQLEAINDKLQNKIQEIYEKEEQFNIKQISEVQEKVNELKQFKEHRKAKDSALQSIESKMLELTNRLQESQEEIQIMIKEKEEMKRVQEALQIERDQLKENTKEIVAKMKESQEKEYQFLKMTAVNETQEKMCEIEHLKEQFETQKLNLENIETENIRLTQILHENLEEMRSVTKERDDLRSVEETLKVERDQLKENLRETITRDLEKQEELKIVHMHLKEHQETIDKLRGIVSEKTNEISNMQKDLEHSNDALKAQDLKIQEELRIAHMHLKEQQETIDKLRGIVSEKTDKLSNMQKDLENSNAKLQEKIQELKANEHQLITLKKDVNETQKKVSEMEQLKKQIKDQSLTLSKLEIENLNLAQKLHENLEEMKSVMKERDNLRRVEETLKLERDQLKESLQETKARDLEIQQELKTARMLSKEHKETVDKLREKISEKTIQISDIQKDLDKSKDELQKKQDRQNHQVKPEKRLLSDGQQHLTESLREKCSRIKELLKRYSEMDDHYECLNRLSLDLEKEIEFQKELSMRVKANLSLPYLQTKHIEKLFTANQRCSMEFHRIMKKLKYVLSYVTKIKEEQHESINKFEMDFIDEVEKQKELLIKIQHLQQDCDVPSRELRDLKLNQNMDLHIEEILKDFSESEFPSIKTEFQQVLSNRKEMTQFLEEWLNTRFDIEKLKNGIQKENDRICQVNNFFNNRIIAIMNESTEFEERSATISKEWEQDLKSLKEKNEKLFKNYQTLKTSLASGAQVNPTTQDNKNPHVTSRATQLTTEKIRELENSLHEAKESAMHKESKIIKMQKELEVTNDIIAKLQAKVHESNKCLEKTKETIQVLQDKVALGAKPYKEEIEDLKMKLVKIDLEKMKNAKEFEKEISATKATVEYQKEVIRLLRENLRRSQQAQDTSVISEHTDPQPSNKPLTCGGGSGIVQNTKALILKSEHIRLEKEISKLKQQNEQLIKQKNELLSNNQHLSNEVKTWKERTLKREAHKQVTCENSPKSPKVTGTASKKKQITPSQCKERNLQDPVPKESPKSCFFDSRSKSLPSPHPVRYFDNSSLGLCPEVQNAGAESVDSQPGPWHASSGKDVPECKTQ

SEQ ID NO: 10253 - protein, 127 aa, Homo sapiens
MNFILFIFIPGVFSLKSSTLKPTIEALPNVLPLNEDVNKQEEKNEDHTPNYAPANEKNGNYYKDIKQYVFTTQNPNGTESEISVRATTDLNFALKNDKTVNATTYEKSTIEEETTTSEPSHKNIQSI

SEQ ID NO: 10254 - protein, 294 aa, Homo sapiens
MNFILFIFIPGVFSLKSSTLKPTIEALPNVLPLNEDVNKQEEKNEDHTPNYAPANEKNGNYYKDIKQYVFTTQNPNGTESEISVRATTDLNFALKNDKTVNATTYEKSTIEEETTTSEPSHKNIQRSTPNVPAFWTMLAKAINGTAVVMDDKDQLFHPIPESDVNATQGENQPDLEDLKIKIMLGISLMTLLLFVVLLAFCSATLYKLRHLSYKSCESQYSVNPELATMSYFHPSEGVSDTSFSKSAESSTFLGTTSSDMRRSGTRTSESKIMTDIISIGSDNEMHENDESVTR

SEQ ID NO: 10255 - protein, 493 aa, Homo sapiens
MASGILVNVKEEVTCPICLELLTQPLSLDCGHSFCQACLTANHKKSMLDKGESSCPVCRISYQPENIRPNRHVANIVEKLREVKLSPEGQKVDHCARHGEKLLLFCQEDGKVICWLCERSQEHRGHHTFLTEEVAREYQVKLQAALEMLRQKQQEAEELEADIREEKASWKTQIQYDKTNVLADFEQLRDILDWEESNELQNLEKEEEDILKSLTNSETEMVQQTQSLRELISDLEHRLQGSVMELLQGVDGVIKRTENVTLKKPETFPKNQRRVFRAPDLKGMLEVFRELTDVRRYWVDVTVAPNNISCAVISEDKRQVSSPKPQIIYGARGTRYQTFVNFNYCTGILGSQSITSGKHYWEVDVSKKTAWILGVCAGFQPDAMCNIEKNENYQPKYGYWVIGLEEGVKCSAFQDSSFHTPSVPFIVPLSVIICPDRVGVFLDYEACTVSFFNITNHGFLIYKFSHCSFSQPVFPYLNPRKCGVPMTLCSPSS

SEQ ID NO: 10256 - protein, 1124 aa, Homo sapiens
MDSLASLVLCGVSLLLSGTVEGAMDLILINSLPLVSDAETSLTCIASGWRPHEPITIGRDFEALMNQHQDPLEVTQDVTREWAKKVVWKREKASKINGAYFCEGRVRGEAIRIRTMKMRQQASFLPATLTMTVDKGDNVNISFKKVLIKEEDAVIYKNGSFIHSVPRHEVPDILEVHLPHAQPQDAGVYSARYIGGNLFTSAFTRLIVRRCEAQKWGPECNHLCTACMNNGVCHEDTGECICPPGFMGRTCEKACELHTFGRTCKERCSGQEGCKSYVFCLPDPYGCSCATGWKGLQCNEACHPGFYGPDCKLRCSCNNGEMCDRFQGCLCSPGWQGLQCEREGIQRMTPKIVDLPDHIEVNSGKFNPICKASGWPLPTNEEMTLVKPDGTVLHPKDFNHTDHFSVAIFTIHRILPPDSGVWVCSVNTVAGMVEKPFNISVKVLPKPLNAPNVIDTGHNFAVINISSEPYFGDGPIKSKKLLYKPVNHYEAWQHIQVTNEIVTLNYLEPRTEYELCVQLVRRGEGGEGHPGPVRRFTTASIGLPPPRGLNLLPKSQTTLNLTWQPIFPSSEDDFYVEVERRSVQKSDQQNIKVPGNLTSVLLNNLHPREQYVVRARVNTKAQGEWSEDLTAWTLSDILPPQPENIKISNITHSSAVISWTILDGYSISSITIRYKVQGKNEDQHVDVKIKNATITQYQLKGLEPETAYQVDIFAENNIGSSNPAFSHELVTLPESQAPADLGGGKMLLIAILGSAGMTCLTVLLAFLIILQLKRANVQRRMAQAFQNVREEPAVQFNSGTLALNRKVKNNPDPTIYPVLDWNDIKFQDVIGEGNFGQVLKARIKKDGLRMDAAIKRMKEYASKDDHRDFAGELEVLCKLGHHPNIINLLGACEHRGYLYLAIEYAPHGNLLDFLRKSRVLETDPAFAIANSTASTLSSQQLLHFAADVARGMDYLSQKQFIHRDLAARNILVGENYVAKIADFGLSRGQEVYVKKTMGRLPVRWMAIESLNYSVYTTNSDVWSYGVLLWEIVSLGGTPYCGMTCAELYEKLPQGYRLEKPLNCDDEVYDLMRQCWREKPYERPSFAQILVSLNRMLEERKTYVNTTLYEKFTYAGIDCSAEEAA

SEQ ID NO: 10257 - protein, 576 aa, Homo sapiens
MYDNMSTMVYIKEDKLEKLTQDEIISKTKQVIQGLEALKNEHNSILQSLLETLKCLKKDDESNLVEEKSNMIRKSLEMLELGLSEAQVMMALSNHLNAVESEKQKLRAQVRRLCQENQWLRDELANTQQKLQKSEQSVAQLEEEKKHLEFMNQLKKYDDDISPSEDKDTDSTKEPLDDLFPNDEDDPGQGIQQQHSSAAAAAQQGGYEIPARLRTLHNLVIQYASQGRYEVAVPLCKQALEDLEKTSGHDHPDVATMLNILALVYRDQNKYKDAANLLNDALAIREKTLGKDHPAVAATLNNLAVLYGKRGKYKEAEPLCKRALEIREKVLGKDHPDVAKQLNNLALLCQNQGKYEEVEYYYQRALEIYQTKLGPDDPNVAKTKNNLASCYLKQGKFKQAETLYKEILTRAHEREFGSVDDENKPIWMHAEEREECKGKQKDGTSFGEYGGWYKACKVDSPTVTTTLKNLGALYRRQGKFEAAETLEEAAMRSRKQRSISEIPKKILSANGSNHFPLPGSQGLDNVHKQRVAEVLNDPENMEKRRSRESLNVDVVKYESGPDGGEEMRKMKLGLVN

SEQ ID NO: 10258 - protein, 208 aa, Homo sapiens
MKKNEVYETFSYPESYSPTLPVSRRENNSPSNLPRPSFCMEEYQRAELEEDPILSRTPSPVHPSDFSEHNCQPYYASDGATYGSSSGLCLGNPRADSIHNTYSTDHASAAPPSVTRSPVENDGYIEEGSITKHPSTWSVEAVVLFLKQTDPLALCPLVDLFRSHEIDGKALLLLTSDVLLKHLGVKLGTAVKLCYYIDRLKQGKCFEN

SEQ ID NO: 10259 - protein, 469 aa, Homo sapiens
MCDLIEPQPAEKIGKMKKLRRTLSESFSRIALKKDDTTFDEICVTKMSTRNCQGMDSVIKPLDTIPEDKKVRVQRTQSTFDPFEKPANQVKRVHSENNACINFKTSSTGKESPKVRRHSSPSSPTSPKFGKADSYEKLEKLGEGSYATVYKGKSKVNGKLVALKVIRLQEEEGTPFTAIREASLLKGLKHANIVLLHDIIHTKETLTLVFEYVHTDLCQYMDKHPGGLHPDNVKLFLFQLLRGLSYIHQRYILHRDLKPQNLLISDTGELKLADFGLARAKSVPSHTYSNEVVTLWYRPPDVLLGSTEYSTCLDMWGVGCIFVEMIQGVAAFPGMKDIQDQLERIFLVLGTPNEDTWPGVHSLPHFKPERFTLYSSKNLRQAWNKLSYVNHAEDLASKLLQCSPKNRLSAQAALSHEYFSDLPPRLWELTDMSSIFTVPNVRLQPEAGESMRAFGKNNSYGKSLSNSKH

SEQ ID NO: 10260 - protein, 363 aa, Homo sapiens
MATLRRLREAPRHLLVCEKSNFGNHKSRHRHLVQTHYYNYRVSFLIPECGILSEELKNLVMNTGPYYFVKNLPLHELITPEFISTFIKKGSCYALTYNTHIDEDNTVALLPNGKLILSLDKDTYEETGLQGHPSQFSGRKIMKFIVSIDLMELSLNLDSKKYERISWSFKEKKPLKFDFLLAWHKTGSEESTMMSYFSKYQIQEHQPKVALSTLRDLQCPVLQSSELEGTPEVSCRALELFDWLGAVFSNVDLNNEPNNFISTYCCPEPSTVVAKAYLCTITGFILPEKICLLLEHLCHYFDEPKLAPWVTLSVQGFADSPVSWEKNEHGFRKGGEHLYNFVIFNNQDYWLQMAVGANDHCPP

SEQ ID NO: 10261 - protein, 370 aa, Homo sapiens
MKVTGITILFWPLSMILLSDKIQSSKREVQCNFTEKNYTLIPADIKKDVTILDLSYNQITLNGTDTRVLQTYFLLTELYLIENKVTILHNNGFGNLSSLEILNICRNSIYVIQQGAFLGLNKLKQLYLCQNKIEQLNADVFVPLRSLKLLNLQGNLISYLDVPPLFHLELITLYGNLWNCSCSLFNLQNWLNTSNVTLENENITMCSYPNSLQSYNIKTVPHKAECHSKFPSSVTEDLYIHFQPISNSIFNSSSNNLTRNSEHEPLGKSWAFLVGVVVTVLTTSLLIFIAIKCPIWYNILLSYNHHRLEEHEAETYEDGFTGNPSSLSQIPETNSEETTVIFEQLHSFVVDDDGFIEDKYIDIHELCEEN

SEQ ID NO: 10262 - protein, 116 aa, Homo sapiens
MVHCSCVLFRKYGNFIDKLRLFTRGGSGGMGYPRLGGEGGKGGDVWVVAQNRMTLKQLKDRYPRKRFVAGVGANSKISALKGSKGKDCEIPVPVGISVTDENGKIIDSQMLENPLC

SEQ ID NO: 10263 - protein, 1630 aa, Homo sapiens
MPFAKRIVEPQWLCRQRRPAPGPAVDASGGSAEPPPPLQPPGRRDLDEVEAPGPEEPARAVPAPSGLPPPPPPLPAPADQTQPPHGEASVAGEESTAGIPEAAPAAGEASSAAAAAAVLLMLDLCAVSNAALARVLRQLSDVARHACSLFQELESDIQLTHRRVWALQGKLGGVQRVLSTLDPKQEAVPVSNLDIESKLSVYYRAPWHQQRNIFLPATRPPCVEELHRHARQSLQALRREHRSRSDRREQRAAAPLSIAAPPLPAYPPAHSQRRREFKDRHFLTSHPPEDEDTDVMLGQRPKNPIHNIPSTLDKQTNWSKALPLPTPEEKMKQDAQVISSCIIPINVTGVGFDREASIRCSLVHSQSVLQRRRKLRRRKTISGIPRRVQQEIDSDESPVARERNVIVHTNPDPSNTVNRISGTRDSECQTEDILIAAPSRRRIRAQRGQSIAASLSHSAGNISALADKGDTMFTPAVSSRTRSRSLPREGNRGGDAEPKVGAKPSAYEEGESFVGDHERTPNDFSEAPSSPSAQDHQPTLGLACSQHLHSPQHKLSERGRSRLSRMAADSGSCDISSNSDTFGSPIHCISTAGVLLSSHMDQKDDHQSSSGNWSGSSSTCPSQTSETIPPAASPPLTGSSHCDSELSLNTAPHANEDASVFVTEQYNDHLDKVRGHRANSFTSTVADLLDDPNNSNTSDSEWNYLHHHHDASCRQDFSPERPKADSLGCPSFTSMATYDSFLEKSPSDKADTSSHFSVDTEGYYTSMHFDCGLKGNKSYVCHYAALGPENGQGVGASPGLPDCAWQDYLDHKRQGRPSISFRKPKAKPTPPKRSSSLRKSDGNADISEKKEPKISSGQHLPHSSREMKLPLDFANTPSRMENANLPTKQEPSWINQSEQGIKEPQLDASDIPPFKDEVAESTHYADLWLLNDLKTNDPYRSLSNSSTATGTTVIECIKSPESSESQTSQSESRATTPSLPSVDNEFKLASPEKLAGLASPSSGYSSQSETPTSSFPTAFFSGPLSPGGSKRKPKVPERKSSLQQPSLKDGTISLSKDLELPIIPPTHLDLSALHNVLNKPFHHRHPLHVFTHNKQNTVGETLRSNPPPSLAITPTILKSVNLRSINKSEEVKQKEENNTDLPYLEESTLTTAALSPSKIRPHTANKSVSRQYSTEDTILSFLDSSAVEMGPDKLHLEKNSTFDVKNRCDPETITSAGSSLLDSNVTKDQVRTETEPIPENTPTKNCAFPTEGFQRVSAARPNDLDGKIIQYGPGPDETLEQVQKAPSAGLEEVAQPESVDVITSQSDSPTRATDVSNQFKHQFVMSRHHDKVPGTISYESEITSVNSFPEKCSKQENIASGISAKSASDNSKAEETQGNVDEASLKESSPSDDSIISPLSEDSQAEAEGVFVSPNKPRTTEDLFAVIHRSKRKVLGRKDSGDMSVRSKSRAPLSSSSSSASSITSPSSNVTTPNSQRSPGLIYRNAKKSNTSNEEFKLLLLKKGSRSDSSYRMSATEILKSPILPKPPGELTAESPQSTDDAHQGSQGAEALSPLSPCSPRVNAEGFSSKSFATSASARVGRSRAPPAASSSRYSVRCRLYNTPMQAISEGETENSDGSPHDDRSSQSST

SEQ ID NO: 10264 - protein, 600 aa, Homo sapiens
MASNHKSSAARPVSRGGVGLTGRPPSGIRPLSGNIRVATAMPPGTARPGSRGCPIGTGGVLSSQIKVAHRPVTQQGLTGMKTGTKGPQRQILDKSYYLGLLRSKISELTTEVNKLQKGIEMYNQENSVYLSYEKRAETLAVEIKELQGQLADYNMLVDKLNTNTEMEEVMNDYNMLKAQNDRETQSLDVIFTERQAKEKQIRSVEEEIEQEKQATDDIIKNMSFENQVKYLEMKTTNEKLLQELDTLQQQLDSQNMKKESLEAEIAHSQVKQEAVLLHEKLYELESHRDQMIAEDKSIGSPMEEREKLLKQIKDDNQEIASMERQLTDTKEKINQFIEEIRQLDMDLEEHQGEMNQKYKELKKREEHMDTFIETFEETKNQELKRKAQIEANIVALLEHCSRNINRIEQISSITNQELKMMQDDLNFKSTEVQKSQSTAQNLTSDIQRLQLDLQKMELLESKMTEEQHSLKSKIKQMTTDLEIYNDLPALKSSGEEKIKKLHQERMILSTHRNAFKKIMEKQNIEYEALKTQLQENETHSQLTNLERKWQHLEQNNFAMKEFIATKSQESDYQPIKKNVTKQIAEYNKTIVDALHSTSGN

SEQ ID NO: 10265 - protein, 356 aa, Homo sapiens
MSLWVDKYRPCSLGRLDYHKEQAAQLRNLVQCGDFPHLLVYGPSGAGKKTRIMCILRELYGVGVEKLRIEHQTITTPSKKKIEISTIASNYHLEVNPSDAGNSDRVVIQEMLKTVAQSQQLETNSQRDFKVVLLTEVDKLTKDAQHALRRTMEKYMSTCRLILCCNSTSKVIPPIRSRCLAVRVPAPSIEDICHVLSTVCKKEGLNLPSQLAHRLAEKSCRNLRKALLMCEACRVQQYPFTADQEIPETDWEVYLRETANAIVSQQTPQRLLEVRGRLYELLTHCIPPEIIMKGLLSELLHNCDGQLKGEVAQMAAYYEHRLQLGSKAIYHLEAFVAKFMALYKKFMEDGLEGMMF

SEQ ID NO: 10266 - protein, 459 aa, Homo sapiens
MEKTCIDALPLTMNSSEKQETVCIFGTGDFGRSLGLKMLQCGYSVVFGSRNPQKTTLLPSGAEVLSYSEAAKKSGIIIIAIHREHYDFLTELTEVLNGKILVDISNNLKINQYPESNAEYLAHLVPGAHVVKAFNTISAWALQSGALDASRQVFVCGNDSKAKQRVMDIVRNLGLTPMDQGSLMAAKEIEKYPLQLFPMWRFPFYLSAVLCVFLFFYCVIRDVIYPYVYEKKDNTFRMAISIPNRIFPITALTLLALVYLPGVIAAILQLYRGTKYRRFPDWLDHWMLCRKQLGLVALGFAFLHVLYTLVIPIRYYVRWRLGNLTVTQAILKKENPFSTSSAWLSDSYVALGILGFFLFVLLGITSLPSVSNAVNWREFRFVQSKLGYLTLILCTAHTLVYGGKRFLSPSNLRWYLPAAYVLGLIIPCTVLVIKFVLIMPCVDNTLTRIRQGWERNSKH

SEQ ID NO: 10267 - protein, 469 aa, Homo sapiens
MAAEAGVVGAGASPDGDWRDQACGLLLHVHLSSRLGRAAPVRTGRHLRTVFEDTVEERVINEEYKIWKKNTPFLYDLVMTHALQWPSLTVQWLPEVTKPEGKDYALHWLVLGTHTSDEQNHLVVARVHIPNDDAQFDASHCDSDKGEFGGFGSVTGKIECEIKINHEGEVNRARYMPQNPHIIATKTPSSDVLVFDYTKHPAKPDPSGECNPDLRLRGHQKEGYGLSWNSNLSGHLLSASDDHTVCLWDINAGPKEGKIVDAKAIFTGHSAVVEDVAWHLLHESLFGSVADDQKLMIWDTRSNTTSKPSHLVDAHTAEVNCLSFNPYSEFILATGSADKTVALWDLRNLKLKLHTFESHKDEIFQVHWSPHNETILASSGTDRRLNVWDLSKIGEEQSAEDAEDGPPELLFIHGGHTAKISDFSWNPNEPWVICSVSEDNIMQIWQMAENIYNDEESDVTTSELEGQGS

SEQ ID NO: 10268 - protein, 425 aa, Homo sapiens
MASKEMFEDTVEERVINEEYKIWKKNTPFLYDLVMTHALQWPSLTVQWLPEVTKPEGKDYALHWLVLGTHTSDEQNHLVVARVHIPNDDAQFDASHCDSDKGEFGGFGSVTGKIECEIKINHEGEVNRARYMPQNPHIIATKTPSSDVLVFDYTKHPAKPDPSGECNPDLRLRGHQKEGYGLSWNSNLSGHLLSASDDHTVCLWDINAGPKEGKIVDAKAIFTGHSAVVEDVAWHLLHESLFGSVADDQKLMIWDTRSNTTSKPSHLVDAHTAEVNCLSFNPYSEFILATGSADKTVALWDLRNLKLKLHTFESHKDEIFQVHWSPHNETILASSGTDRRLNVWDLSKIGEEQSAEDAEDGPPELLFIHGGHTAKISDFSWNPNEPWVICSVSEDNIMQIWQMAENIYNDEESDVTTSELEGQGS

SEQ ID NO: 10269 - protein, 361 aa, Homo sapiens
MAQPGDPRRLCRLVQEGRLRALKEELQAAGGCPGPAGDTLLHCAARHGHRDVLAYLAEAWGMDIEATNRDYKRPLHEAASMGHRDCVRYLLGRGAAVDCLKKADWTPLMMACTRKNLGVIQELVEHGANPLLKNKDGWNSFHIASREGDPLILQYLLTVCPGAWKTESKIRRTPLHTAAMHGHLEAVKVLLKRCQYEPDYRDNCGVTALMDAIQCGHIDVARLLLDEHGACLSAEDSLGAQALHRAAVTGQDEAIRFLVSELGVDVDVRATSTHLTALHYAAKEGHTSTIQTLLSLGADINSKDEKNRSALHLACAGQHLACAKFLLQSGLKDSEDITGTLAQQLPRRADVLQGSGHSAMT

SEQ ID NO: 10270 - protein, 1012 aa, Homo sapiens
MPASAPPRRPRPPPPSLSLLLVLLGLGGRRLRAEPGDGAQTWARFSRPPAPEAAGLFQGTFPDGFLWAVGSAAYQTEGGWQQHGKGASIWDTFTHHPLAPPGDSRNASLPLGAPSPLQPATGDVASDSYNNVFRDTEALRELGVTHYRFSISWARVLPNGSAGVPNREGLRYYRRLLERLRELGVQPVVTLYHWDLPQRLQDAYGGWANRALADHFRDYAELCFRHFGGQVKYWITIDNPYVVAWHGYATGRLAPGIRGSPRLGYLVAHNLLLAHAKVWHLYNTSFRPTQGGQVSIALSSHWINPRRMTDHSIKECQKSLDFVLGWFAKPVFIDGDYPESMKNNLSSILPDFTESEKKFIKGTADFFALCFGPTLSFQLLDPHMKFRQLESPNLRQLLSWIDLEFNHPQIFIVENGWFVSGTTKRDDAKYMYYLKKFIMETLKAIKLDGVDVIGYTAWSLMDGFEWHRGYSIRRGLFYVDFLSQDKMLLPKSSALFYQKLIEKNGFPPLPENQPLEGTFPCDFAWGVVDNYIQVDTTLSQFTDLNVYLWDVHHSKRLIKVDGVVTKKRKSYCVDFAAIQPQIALLQEMHVTHFRFSLDWALILPLGNQSQVNHTILQYYRCMASELVRVNITPVVALWQPMAPNQGLPRLLARQGAWENPYTALAFAEYARLCFQELGHHVKLWITMNEPYTRNMTYSAGHNLLKAHALAWHVYNEKFRHAQNGKISIALQADWIEPACPFSQKDKEVAERVLEFDIGWLAEPIFGSGDYPWVMRDWLNQRNNFLLPYFTEDEKKLIQGTFDFLALSHYTTILVDSEKEDPIKYNDYLEVQEMTDITWLNSPSQVAVVPWGLRKVLNWLKFKYGDLPMYIISNGIDDGLHAEDDQLRVYYMQNYINEALKAHILDGINLCGYFAYSFNDRTAPRFGLYRYAADQFEPKASMKHYRKIIDSNGFPGPETLERFCPEEFTVCTECSFFHTRKSLLAFIAFLFFASIISLSLIFYYSKKGRRSYK

SEQ ID NO: 10271 - protein, 194 aa, Homo sapiens
MAASLVGKKIVFVTGNAKKLEEVVQILGDKFPCTLVAQKIDLPEYQGEPDEISIQKCQEAVRQVQGPVLVEDTCLCFNALGGLPGPYIKWFLEKLKPEGLHQLLAGFEDKSAYALCTFALSTGDPSQPVRLFRGRTSGRIVAPRGCQDFGWDPCFQPDGYEQTYAEMPKAEKNAVSHRFRALLELQEYFGSLAA

SEQ ID NO: 10272 - protein, 528 aa, Homo sapiens
MATRVEEAARGRGGGAEEATEAGRGGRRRSPRQKFEIGTMEEAGICGLGVKADMLCNSQSNDILQHQGSNCGGTSNKHSLEEDEGSDFITENRNLVSPAYCTQESREEIPGGEARTDPPDGQQDSECNRNKEKTLGKEVLLLMQALNTLSTPEEKLAALCKKYADLLEESRSVQKQMKILQKKQAQIVKEKVHLQSEHSKAILARSKLESLCRELQRHNKTLKEENMQQAREEEERRKEATAHFQITLNEIQAQLEQHDIHNAKLRQENIELGEKLKKLIEQYALREEHIDKVFKHKELQQQLVDAKLQQTTQLIKEADEKHQREREFLLKEATESRHKYEQMKQQEVQLKQQLSLYMDKFEEFQTTMAKSNELFTTFRQEMEKMTKKIKKLEKETIIWRTKWENNNKALLQMAEEKTVRDKEYKALQIKLERLEKLCRALQTERNELNEKVEVLKEQVSIKAAIKAANRDLATPVMQPCTALDSHKELNTSSKRALGAHLEAEPKSQRSAVQKPPSTGSAPAIESVD

SEQ ID NO: 10273 - protein, 470 aa, Homo sapiens
MKRSVAVWLLVGLSLGVPQFGKGDICDPNPCENGGICLPGLADGSFSCECPDGFTDPNCSSVVEVGPCTPNPCHNGGTCEISEAYRGDTFIGYVCKCPRGFNGIHCQHNINECEVEPCKNGGICTDLVANYSCECPGEFMGRNCQYKCSGPLGIEGGIISNQQITASSTHRALFGLQKWYPYYARLNKKGLINAWTAAENDRWPWIQINLQRKMRVTGVITQGAKRIGSPEYIKSYKIAYSNDGKTWAMYKVKGTNEDMVFRGNIDNNTPYANSFTPPIKAQYVRLYPQVCRRHCTLRMELLGCELSGCSEPLGMKSGHIQDYQITASSIFRTLNMDMFTWEPRKARLDKQGKVNAWTSGHNDQSQWLQVDLLVPTKVTGIITQGAKDFGHVQFVGSYKLAYSNDGEHWTVYQDEKQRKDKVFQGNFDNDTHRKNVIDPPIYARHIRILPWSWYGRITLRSELLGCTEEE

SEQ ID NO: 10274 - protein, 3418 aa, Homo sapiens [sequence omitted]

SEQ ID NO: 10275 - protein, 352 aa, Homo sapiens
MFRGLSSWLGLQQPVAGGGQPNGDAPPEQPSETVAESAEEELQQAGDQELLHQAKDFGNYLFNFASAATKKITESVAETAQTIKKSVEEGKIDGIIDKTIIGDFQKEQKKFVEEQHTKKSEAAVPPWVDTNDEETIQQQILALSADKRNFLRDPPAGVQFNFDFDQMYPVALVMLQEDELLSKMRFALVPKLVKEEVFWRNYFYRVSLIKQSAQLTALAAQQQAAGKEEKSNGREQDLPLAEAVRPKTPPVVIKSQLKTQEDEEEISTSPGVSEFVSDAFDACNLNQEDLRKEMEQLVLDKKQEETAVLEEDSADWEKELQQELQEYEVVTESEKRDENWDKEIEKMLQEEN

SEQ ID NO: 10276 - protein, 229 aa, Homo sapiens
MAPHDPGSLTTLVPWAAALLLALGVERALALPEICTQCPGSVQNLSKVAFYCKTTRELMLHARCCLNQKGTILGLDLQNCSLEDPGPNFHQAHTTVIIDLQANPLKGDLANTFRGFTQLQTLILPQHVNCPGGINAWNTITSYIDNQICQGQKNLCNNTGDPEMCPENGSCVPDGPGLLQCVCADGFHGYKCMRQGSFSLLMFFGILGATTLSVSILLWATQRRKAKTS

SEQ ID NO: 10277 - protein, 234 aa, Homo sapiens
MSNYSVSLVGPAPWGFRLQGGKDFNMPLTISSLKDGGKAAQANVRIGDVVLSIDGINAQGMTHLEAQNKIKGCTGSLNMTLQRASAAPKPEPVPVQKPTVTSVCSETSQELAEGQRRGSQGDSKQQNGKIPPKRPPRKHIVERYTEFYHVPTHSDASKKRLIEDTEDWRPRTGTTQSRSFRILAQITGTEHLKESEADNTKKAKEKIPLHVFSPKYTKLRDWHHEVSARALNVQ

SEQ ID NO: 10278 - protein, 400 aa, Homo sapiens
MNEEYDVIVLGTGLTECILSGIMSVNGKKVLHMDRNPYYGGESASITPLEDLYKRFKIPGSPPESMGRGRDWNVDLIPKFLMANGLMGLFEKRRFRKFLVYVANFDEKDPRTFEGIDPKKTTMRDVYKKFDLGQDVIDFTGHALALYRTDDYLDQPCYETINRIKLYSESLARYGKSPYLYPLYGLGELPQGFARLSAIYGGTYMLNKPIEEIIVQNGKVIGVKSEGEIARCKQLICDPSYVKDRVEKVGQVIRVICILSHPIKNTNDANSCQIIIPQNQVNRKSDIYVCMISFAHNVAAQGKYIAIVSTTVETKEPEKEIRPALELLEPIEQKFVSISDLLVPKDLGTESQIFISRTYDATTHFETTCDDIKNIYKRMTGSEFDFEEMKRKKNDIYGED

SEQ ID NO: 10279 - protein, 445 aa, Homo sapiens
MNEEYDVIVLGTGLTECILSGIMSVNGKKVLHMDRNPYYGGESASITPLEDLYKRFKIPGSPPESMGRGRDWNVDLIPKFLMANGQLVKMLLYTEVTRYLDFKVTEGSFVYKGGKIYKVPSTEAEALASSLMGLFEKRRFRKFLVYVANFDEKDPRTFEGIDPKKTTMRDVYKKFDLGQDVIDFTGHALALYRTDDYLDQPCYETINRIKLYSESLARYGKSPYLYPLYGLGELPQGFARLSAIYGGTYMLNKPIEEIIVQNGKVIGVKSEGEIARCKQLICDPSYVKDRVEKVGQVIRVICILSHPIKNTNDANSCQIIIPQNQVNRKSDIYVCMISFAHNVAAQGKYIAIVSTTVETKEPEKEIRPALELLEPIEQKFVSISDLLVPKDLGTESQIFISRTYDATTHFETTCDDIKNIYKRMTGSEFDFEEMKRKKNDIYGED

SEQ ID NO: 10280 - protein, 189 aa, Homo sapiens
MALTFYLLVALVVLSYKSFSSLGCDLPQTHSLGNRRALILLAQMRRISPFSCLKDRHDFEFPQEEFDDKQFQKAQAISVLHEMIQQTFNLFSTKDSSAALDETLLDEFYIELDQQLNDLESCVMQEVGVIESPLMYEDSILAVRKYFQRITLYLTEKKYSSCAWEVVRAEIMRSFSLSINLQKRLKSKE

SEQ ID NO: 10281 - protein, 188 aa, Homo sapiens
MALTFALLVALLVLSCKSSCSVGCDLPQTHSLGSRRTLMLLAQMRRISLFSCLKDRHDFGFPQEEFGNQFQKAETIPVLHEMIQQIFNLFSTKDSSAAWDETLLDKFYTELYQQLNDLEACVIQGVGVTETPLMKEDSILAVRKYFQRITLYLKEKKYSPCAWEVVRAEIMRSFSLSTNLQESLRSKE

SEQ ID NO: 10282 - protein, 189 aa, Homo sapiens
MALPFALLMALVVLSCKSSCSLDCDLPQTHSLGHRRTMMLLAQMRRISLFSCLKDRHDFRFPQEEFDGNQFQKAEAISVLHEVIQQTFNLFSTKDSSVAWDERLLDKLYTELYQQLNDLEACVMQEVWVGGTPLMNEDSILAVRKYFQRITLYLTEKKYSPCAWEVVRAEIMRSFSSSRNLQERLRRKE

SEQ ID NO: 10283 - protein, 189 aa, Homo sapiens
MALSFSLLMAVLVLSYKSICSLGCDLPQTHSLGNRRALILLAQMGRISHFSCLKDRYDFGFPQEVFDGNQFQKAQAISAFHEMIQQTFNLFSTKDSSAAWDETLLDKFYIELFQQLNDLEACVTQEVGVEEIALMNEDSILAVRKYFQRITLYLMGKKYSPCAWEVVRAEIMRSFSFSTNLQKGLRRKD

SEQ ID NO: 10284 - protein, 189 aa, Homo sapiens
MALSFSLLMAVLVLSYKSICSLGCDLPQTHSLGNRRALILLGQMGRISPFSCLKDRHDFRIPQEEFDGNQFQKAQAISVLHEMIQQTFNLFSTEDSSAAWEQSLLEKFSTELYQQLNDLEACVIQEVGVEETPLMNEDSILAVRKYFQRITLYLIERKYSPCAWEVVRAEIMRSLSFSTNLQKRLRRKD

SEQ ID NO: 10285 - protein, 189 aa, Homo sapiens
MALPFALMMALVVLSCKSSCSLGCNLSQTHSLNNRRTLMLMAQMRRISPFSCLKDRHDFEFPQEEFDGNQFQKAQAISVLHEMMQQTFNLFSTKNSSAAWDETLLEKFYIELFQQMNDLEACVIQEVGVEETPLMNEDSILAVKKYFQRITLYLMEKKYSPCAWEVVRAEIMRSLSFSTNLQKRLRRKD

SEQ ID NO: 10286 - protein, 189 aa, Homo sapiens
MALSFSLLMAVLVLSYKSICSLGCDLPQTHSLGNRRALILLAQMGRISPFSCLKDRHDFGFPQEEFDGNQFQKAQAISVLHEMIQQTFNLFSTKDSSATWEQSLLEKFSTELNQQLNDLEACVIQEVGVEETPLMNVDSILAVKKYFQRITLYLTEKKYSPCAWEVVRAEIMRSFSLSKIFQERLRRKE

SEQ ID NO: 10287 - protein, 195 aa, Homo sapiens
MALLFPLLAALVMTSYSPVGSLGCDLPQNHGLLSRNTLVLLHQMRRISPFLCLKDRRDFRFPQEMVKGSQLQKAHVMSVLHEMLQQIFSLFHTERSSAAWNMTLLDQLHTGLHQQLQHLETCLLQVVGEGESAGAISSPALTLRRYFQGIRVYLKEKKYSDCAWEVVRMEIMKSLFLSTNMQERLRSKDRDLGSS

SEQ ID NO: 10288 - protein, 187 aa, Homo sapiens
MTNKCLLQIALLLCFSTTALSMSYNLLGFLQRSSNFQCQKLLWQLNGRLEYCLKDRMNFDIPEEIKQLQQFQKEDAALTIYEMLQNIFAIFRQDSSSTGWNETIVENLLANVYHQINHLKTVLEEKLEKEDFTRGKLMSSLHLKRYYGRILHYLKAKEYSHCAWTIVRVEILRNFYFINRLTGYLRN

SEQ ID NO: 10289 - protein, 525 aa, Homo sapiens
MASNDYTQQATQSYGAYPTQPGQGYSQQSSQPYGQQSYSGYSQSTDTSGYGQSSYSSYGQSQNSYGTQSTPQGYGSTGGYGSSQSSQSSYGQQSSYPGYGQQPAPSSTSGSYGSSSQSSSYGQPQSGSYSQQPSYGGQQQSYGQQQSYNPPQGYGQQNQYNSSSGGGGGGGGGGNYGQDQSSMSSGGGSGGGYGNQDQSGGGGSGGYGQQDRGGRGRGGSGGGGGGGGGGYNRSSGGYEPRGRGGGRGGRGGMGGSDRGGFNKFGGPRDQGSRHDSEQDNSDNNTIFVQGLGENVTIESVADYFKQIGIIKTNKKTGQPMINLYTDRETGKLKGEATVSFDDPPSAKAAIDWFDGKEFSGNPIKVSFATRRADFNRGGGNGRGGRGRGGPMGRGGYGGGGSGGGGRGGFPSGGGGGGGQQRAGDWKCPNPTCENMNFSWRNECNQCKAPKPDGPGGGPGGSHMGGNYGDDRRGGRGGYDRGGYRGRGGDRGGFRGGRGGGDRGGFGPGKMDSRGEHRQDRRERPY

SEQ ID NO: 10290 - protein, 3012 aa, Homo sapiens
MASQQDSGFFEISIKYLLKSWSNTSPVGNGYIKPPVPPASGTHREKGPPTMLPINVDPDSKPGEYVLKSLFVNFTTQAERKIRIIMAEPLEKPLTKSLQRGEDPQFDQVISSMSSLSEYCLPSILRTLFDWYKRQNGIEDESHEYRPRTSNKSKSDEQQRDYLMERRDLAIDFIFSLVLIEVLKQIPLHPVIDSLIHDVINLAFKHFKYKEGYLGPNTGNMHIVADLYAEVIGVLAQAKFPAVKKKFMAELKELRHKEQNPYVVQSIISLIMGMKFFRIKMYPVEDFEASLQFMQECAHYFLEVKDKDIKHALAGLFVEILVPVAAAVKNEVNVPCLRNFVESLYDTTLELSSRKKHSLALYPLVTCLLCVSQKQLFLNRWHIFLNNCLSNLKNKDPKMARVALESLYRLLWVYMIRIKCESNTATQSRLITIITTLFPKGSRGVVPRDMPLNIFVKIIQFIAQERLDFAMKEIIFDFLCVGKPAKAFSLNPERMNIGLRAFLVIADSLQQKDGEPPMPVTGAVLPSGNTLRVKKTYLSKTLTEEEAKMIGMSLYYSQVRKAVDNILRHLDKEVGRCMMLTNVQMLNKEPEDMITGERKPKIDLFRTCVAAIPRLLPDGMSKLELIDLLARLSIHMDDELRHIAQNSLQGLLVDFSDWREDVLFGFTNFLLREVNDMHHTLLDSSLKLLLQLLTQWKLVIQTQGKVYEQANKIRNSELIANGSSHRIQSERGPHCSVLHAVEGFALVLLCSFQVATRKLSVLILKEIRALFIALGQPEDDDRPMIDVMDQLSSSILESFIHVAVSDSATLPLTHNVDLQWLVEWNAVLVNSHYDVKSPSHVWIFAQSVKDPWVLCLFSFLRQENLPKHCPTALSYAWPYAFTRLQSVMPLVDPNSPINAKKTSTAGSGDNYVTLWRNYLILCFGVAKPSIMSPGHLRASTPEIMATTPDGTVSYDNKAIGTPSVGVLLKQLVPLMRLESIEITESLVLGFGRTNSLVFRELVEELHPLMKEALERRPENKKRRERRDLLRLQLLRIFELLADAGVISDSTNGALERDTLALGALFLEYVDLTRMLLEAENDKEVEILKDIRAHFSAMVANLIQCVPVHHRRFLFPQQSLRHHLFILFSQWAGPFSIMFTPLDRYSDRNHQITRYQYCALKAMSAVLCCGPVFDNVGLSPDGYLYKWLDNILACQDLRVHQLGCEVVVLLLELNPDQINLFNWAIDRCYTGSYQLASGCFKAIATVCGSRNYPFDIVTLLNLVLFKASDTNREIYEISMQLMQILEAKLFVYSKKVAEQRPGSILYGTHGPLPPLYSVSLALLSCELARMYPELTLPLFSGKPAIPHNTPQRAPDHAYLPAALAAQHRAGGQQAPPPGSSPSSPEDEVKDREGDVTASHGLRGNGWGSPEATSLVLNNLMYMTAKYGDEVPGPEMENAWNALANNEKWSNNLRITLQFLISLCGVSSDTVLLPYIKKVAIYLCRNNTIQTMEELLFELQQTEPVNPIVQHCDNPPFYRFTASSKASAAASGTTSSSNTVVAGQENFPDAEENKILKESDERFSNVIRAHTRLESRYSNSSGGSYDEDKNDPISPYTGWLLTITETKQPQPLPMPCTGGCWAPLVDYLPETITPRGPLHRCNIAVIFMTEMVVDHSVREDWALHLPLLLHAVFLGLDHYRPEVFEHSKKLLLHLLIALSCNSNFHSIASVLLQTREMGEAKTLTVQPAYQPEYLYTGGFDFLREDQSSPVPDSGLSSSSTSSSISLGGSSGNLPQMTQEVEDVDTAAETDEKANKLIEFLTTRAFGPLWCHEDITPKNQNSKSAEQLTNFLRHVVSVFKDSKSGFHLEHQLSEVALQTALASSSRHYAGRSFQIFRALKQPLSAHALSDLLSRLVEVIGEHGDEIQGYVMEALLTLEAAVDNLSDCLKNSDLLTVLSRSSSPDLSSSSKLTASRKSTGQLNMNPGTTSGNTATAERSRHQRSFSVPKKFGVIDRSSDPPRSATLDRIQACTQQGLSSKTRSSSSLKDSLTDPSHINHPTNLLATIFWVTVALMESDFEFEYLMALRLLSRLLAHMPLDKAENREKLEKLQAQLKWADFSGLQQLLLKGFTSLTTTDLTLQLFSLLTPVSKISMVDASHAIGFPLNVLCLLPQLIQHFENPNQFCKDIAERIAQVCLEEKNPKLSNLAHVMTLYKTHSYTRDCATWVNVVCRYLHEAYADITLNMVTYLAELLEKGLPSVQQPLLQVIYSLLSYMDLSVVPVKQFNVEVLKTIEKYVQSVHWREALNILKLVVSRSASLVLPSYQHSDLSKIEIHRVWTSASKELPGKTLDFHFDISETPIIGRRYDELQNSSGRDGKPRAMAVTRSTSSTSSGSNSNVLVPVSWKRPQYSQKRTKEKLVHVLSLCGQEVGLSKNPSVIFSSCGDLDLLEHQTSLVSSEDGAREQENMDDTNSEQQFRVFRDFDFLDVELEDGEGESMDNFNWGVRRRSLDSLDKCDMQILEERQLSGSTPSLNKMHHEDSDESSEEEDLTASQILEHSDLIMTLSPSEETNPMELLTTACDSTPAEPHSFNTRMSSFDASLPDMNNLQISEGSKAEAVREEEDTTVHEDDLSSSINELPAAFECSDSFSLDMTEGEEKGNRALDQFTLASFGEGDRGVSPPPSPFFSAILAAFQPAACDDAEEAWRSHINQLMCDSDGSCAVYTFHVFSSLFKNIQKRFCFLTCDAASYLGDNLRGIGSKFVSSSQMLTSCSECPTLFVDAETLLSCGLLDKLKFSVLELQEYLDTYNNRKEATLSWLANCKATFAGGSRDGVITCQPGDSEEKQLELCQRLYKLHFQLLLLFQSYCKLIGQVHEVSSMPELLNMSRELSDLKKHLKEASAVIAADPLYSDGAWSEPTFTSTEAAIQSMLECLKNNELGKALRQIRECRSLWPNDIFGSSSDDEVQTLLNIYFRHQTLGQTGTYALVGSNQSLTEICTKLMELNMEIRDMIRRAQSYRVLTTFLPDSSVSGTSL

SEQ ID NO: 10291 - protein, 764 aa, Homo sapiens
MAATLKSLKLVRYRAFCSPSAFGAVRSVSYWNVSSTQHGGQDPPEHISLCHSAKKVKNICSTFSSRRILTTSSAHPGLEFSKTSSSKASTLQLGSPRATGVDEEDVEVFDSFENMRVFLQLRPEYRVHSYNASETSQLLSVSEGELILHKVRVNQNNLQAQVIVDYLCKLSSLPAEQHPVLLGSTSFALLCQLSVKKIQLFDTQDLINVLKAFVILGIPHSHSMLDVYETKCCHQVWEMNMDQLLLVADLWRYLGRKVPRFLNIFSSYLNLHWKDLSLSQLVHLIYVIGENRQVSQDLMQKLESLILKYIDLINLEEVGTICLGFFKSSTNLSEFVMRKIGDLACANIQHLSSRSLVNIVKMFRFTHVDHINFMKQIGEIAPQRIPSLGVQGVMHLTLYCSALRFLNEGVMNAVAASLPPRVAHCRSKDVAKILWSFGTLNYKPPNAEEFYSSLISEIHRKMPEFNQYPEHLPTCLLGLAFLEYFPVELIDFALSPGFVRLAQERTKFDLLKELYTLDGTVGIECPDYRGNRLSTHLQQEGSELLWYLAEKDMNSKPEFLETVFLLETMLGGPQYVKHHMILPHTRSSDLEVQLDVNLKPLPFNREATPAENVAKLRLEHVGVSLTDDLMNKLLKGKARGHFQGKTESEPGQQPMELENKAAVPLGGFLCNVADKSGAMEMAGLCPAACMQTPRMKLAVQFTNRNQYCYGSRDLLGLHNMKRRQLARLGYRVVELSYWEWLPLLKRTRLEKLAFLHEKVFTSAL

SEQ ID NO: 10292 - protein, 325 aa, Homo sapiens
MAQYKGTMREAGRAMHLLKKRERQREQMEVLKQRIAEETILKSQVDKRFSAHYDAVEAELKSSTVGLVTLNDMKARQEALVRERERQLAKRQHLEEQRLQQERQREQEQRRERKRKISCLSFALDDLDDQADAAEARRAGNLGKNPDVDTSFLPDRDREEEENRLREELRQEWEAQREKVKDEEMEVTFSYWDGSGHRRTVRVRKGNTVQQFLKKALQGLRKDFLELRSAGVEQLMFIKEDLILPHYHTFYDFIIARARGKSGPLFSFDVHDDVRLLSDATMEKDESHAGKVVLRSWYEKNKHIFPASRWEAYDPEKKWDKYTIR

SEQ ID NO: 10293 - protein, 240 aa, Homo sapiens
MAEYLASIFGTEKDKVNCSFYFKIGACRHGDRCSRLHNKPTFSQTILIQNIYRNPQNSAQTADGSHCAVSDVEMQEHYDEFFEEVFTEMEEKYGEVEEMNVCDNLGDHLVGNVYVKFRREEDAEKAVIDLNNRWFNGQPIHAELSPVTDFREACCRQYEMGECTRGGFCNFMHLKPISRELRRELYGRRRKKHRSRSRSRERRSRSRDRGRGGGGGGGGGGGGRERDRRRSRDRERSGRF

SEQ ID NO: 10294 - protein, 231 aa, Homo sapiens
MASAVFEGTSLVNMFVRGCWVNGIRRLIVSRRGDEEEFFEIRTEWSDRSVLYLHRSLADLGRLWQRLRDAFPEDRSELAQGPLRQGLVAIKEAHDIETRLNEVEKLLKTIISMPCKYSRSEVVLTFFERSPLDQVLKNDNVHKIQPSFQSPVKISEIMRSNGFCLANTETIVIDHSIPNGRDQQLGVDPTEHLFENGSEFPSELEDGDDPAAYVTNLSYYHLVPFETDIWD

SEQ ID NO: 10295 - protein, 102 aa, Homo sapiens
MQRVSGLLSWTLSRVLWLSGLSEPGAARQPRIMEEKALEVYDLIRTIRDPEKPNTLEELEVVSESCVEVQEINEEEYLVIIRFTPTVPHCSLATLIVGNLHF

SEQ ID NO: 10296 - protein, 164 aa, Homo sapiens
MPDTMLPACFLGLLAFSSACYFQNCPRGGKRAMSDLELRQCLPCGPGGKGRCFGPSICCADELGCFVGTAEALRCQEENYLPSPCQSGQKACGSGGRCAAFGVCCNDESCVTEPECREGFHRRARASDRSNATQLDGPAGALLLRLVQLAGAPEPFEPAQPDAY

SEQ ID NO: 10297 - protein, 1016 aa, Homo sapiens
MAPRTLWSCYLCCLLTAAAGAASYPPRGFSLYTGSSGALSPGGPQAQIAPRPASRHRNWCAYVVTRTVSCVLEDGVETYVKYQPCAWGQPQCPQSIMYRRFLRPRYRVAYKTVTDMEWRCCQGYGGDDCAESPAPALGPASSTPRPLARPARPNLSGSSAGSPLSGLGGEGPGESEKVQQLEEQVQSLTKELQGLRGVLQGLSGRLAEDVQRAVETAFNGRQQPADAAARPGVHETLNEIQHQLQLLDTRVSTHDQELGHLNNHHGGSSSSGGSRAPAPASAPPGPSEELLRQLEQRLQESCSVCLAGLDGFRRQQQEDRERLRAMEKLLASVEERQRHLAGLAVGRRPPQECCSPELGRRLAELERRLDVVAGSVTVLSGRRGTELGGAAGQGGHPPGYTSLASRLSRLEDRFNSTLGPSEEQEESWPGAPGGLSHWLPAARGRLEQLGGLLANVSGELGGRLDLLEEQVAGAMQACGQLCSGAPGEQDSQVSEILSALERRVLDSEGQLRLVGSGLHTVEAAGEARQATLEGLQEVVGRLQDRVDAQDETAAEFTLRLNLTAARLGQLEGLLQAHGDEGCGACGGVQEELGRLRDGVERCSCPLLPPRGPGAGPGVGGPSRGPLDGFSVFGGSSGSALQALQGELSEVILSFSSLNDSLNELQTTVEGQGADLADLGATKDRIISEINRLQQEATEHATESEERFRGLEEGQAQAGQCPSLEGRLGRLEGVCERLDTVAGGLQGLREGLSRHVAGLWAGLRETNTTSQMQAALLEKLVGGQAGLGRRLGALNSSLQLLEDRLHQLSLKDLTGPAGEAGPPGPPGLQGPPGPAGPPGSPGKDGQEGPIGPPGPQGEQGVEGAPAAPVPQVAFSAALSLPRSEPGTVPFDRVLLNDGGYYDPETGVFTAPLAGRYLLSAVLTGHRHEKVEAVLSRSNQGVARVDSGGYEPEGLENKPVAESQPSPGTLGVFSLILPLQAGDTVCVDLVMGQLAHSEEPLTIFSGALLYGDPELEHA

SEQ ID NO: 10298 - protein, 520 aa, Homo sapiens
MECPHLSSSVCIAPDSAKFPNGSPSSWCCSVCRSNKSPWVCLTCSSVHCGRYVNGHAKKHYEDAQVPLTNHKKSEKQDKVQHTVCMDCSSYSTYCYRCDDFVVNDTKLGLVQKVREHLQNLENSAFTADRHKKRKLLENSTLNSKLLKVNGSTTAICATGLRNLGNTCFMNAILQSLSNIEQFCCYFKELPAVELRNGKTAGRRTYHTRSQGDNNVSLVEEFRKTLCALWQGSQTAFSPESLFYVVWKIMPNFRGYQQQDAHEFMRYLLDHLHLELQGGFNGVSRSAILQENSTLSASNKCCINGASTVVTAIFGGILQNEVNCLICGTESRKFDPFLDLSLDIPSQFRSKRSKNQENGPVCSLRDCLRSFTDLEELDETELYMCHKCKKKQKSTKKFWIQKLPKVLCLHLKRFHWTAYLRNKVDTYVEFPLRGLDMKCYLLEPENSGPESCLYDLAAVVVHHGSGVGSGHYTAYATHEGRWFHFNDSTVTLTDEETVVKAKAYILFYVEHQAKAGSDKL

SEQ ID NO: 10299 - protein, 222 aa, Homo sapiens
MLWLLFFLVTAIHAELCQPGAENAFKVRLSIRTALGDKAYAWDTNEEYLFKAMVAFSMRKVPNREATEISHVLLCNVTQRVSFWFVVTDPSKNHTLPAVEVQSAIRMNKNRINNAFFLNDQTLEFLKIPSTLAPPMDPSVPIWIIIFGVIFCIIIVAIALLILSGIWQRRRKNKEPSEVDDAEDKCENMITIENGIPSDPLDMKGGHINDAFMTEDERLTPL

SEQ ID NO: 10300 - protein, 228 aa, Homo sapiens
MCHVIVTCRSMLWTLLSIVVAFAELIAFMSADWLIGKARSRGGVEPAGPGGGSPEPYHPTLGIYARCIRNPGVQHFQRDTLCGPYAESFGEIASGFWQATAIFLAVGIFILCMVALVSVFTMCVQSIMKKSIFNVCGLLQGIAGLFLILGLILYPAGWGCQKAIDYCGHYASAYKPGDCSLGWAFYTAIGGTVLTFICAVFSAQAEIATSSDKVQEEIEEGKNLICLL

SEQ ID NO: 10301 - protein, 445 aa, Homo sapiens
MREIVHIQAGQCGNQIGAKFWEVISDEHGIDPTGSYHGDSDLQLERINVYYNEAAGNKYVPRAILVDLEPGTMDSVRSGPFGQIFRPDNFVFGQSGAGNNWAKGHYTEGAELVDSVLDVVRKESESCDCLQGFQLTHSLGGGTGSGMGTLLISKIREEYPDRIMNTFSVMPSPKVSDTVVEPYNATLSVHQLVENTDETYSIDNEALYDICFRTLKLTTPTYGDLNHLVSATMSGVTTCLRFPGQLNADLRKLAVNMVPFPRLHFFMPGFAPLTSRGSQQYRALTVPELTQQMFDSKNMMAACDPRHGRYLTVAAIFRGRMSMKEVDEQMLNVQNKNSSYFVEWIPNNVKTAVCDIPPRGLKMSATFIGNSTAIQELFKRISEQFTAMFRRKAFLHWYTGEGMDEMEFTEAESNMNDLVSEYQQYQDATADEQGEFEEEEGEDEA

SEQ ID NO: 10302 - protein, 112 aa, Homo sapiens
MASSRRGLLLLLLLTAHLGPSEAQHWSHGWYPGGKRALSSAQDPQNALRPPGSPVQTAHGLPSDALAPLDDSMPWEGRTTAQWSLHRKRHLARTLLTAAREPRPAPPSSNKV

SEQ ID NO: 10303 - protein, 2059 aa, Homo sapiens
MASPLRDEEEEEEEMVVSEEEEEEEEEGDEEEEEEVEAADEDDEEDDDEGVLGRGPGHDRGRDRHSPPGCHLFPPPPPPPPPLPPPPPPPPPDKDDIRLLPSALGVKKRKRGPKKQKENKPGKPRKRKKRDSEEEFGSERDEYREKSESGGSEYGTGPGRKRRRKHREKKEKKTKRRKKGEGDGGQKQVEQKSSATLLLTWGLEDVEHVFSEEDYHTLTNYKAFSQFMRPLIAKKNPKIPMSKMMTILGAKWREFSANNPFKGSAAAVAAAAAAAAAAVAEQVSAAVSSATPIAPSGPPALPPPPAADIQPPPIRRAKTKEGKGPGHKRRSKSPRVPDGRKKLRGKKMAPLKIKLGLLGGKRKKGGSYVFQSDEGPEPEAEESDLDSGSVHSASGRPDGPVRTKKLKRGRPGRKKKKVLGCPAVAGEEEVDGYETDHQDYCEVCQQGGEIILCDTCPRAYHLVCLDPELDRAPEGKWSCPHCEKEGVQWEAKEEEEEYEEEGEEEGEKEEEDDHMEYCRVCKDGGELLCCDACISSYHIHCLNPPLPDIPNGEWLCPRCTCPVLKGRVQKILHWRWGEPPVAVPAPQQADGNPDVPPPRPLQGRSEREFFVKWVGLSYWHCSWAKELQLEIFHLVMYRNYQRKNDMDEPPPLDYGSGEDDGKSDKRKVKDPHYAEMEEKYYRFGIKPEWMTVHRIINHSVDKKGNYHYLVKWRDLPYDQSTWEEDEMNIPEYEEHKQSYWRHRELIMGEDPAQPRKYKKKKKELQGDGPPSSPTNDPTVKYETQPRFITATGGTLHMYQLEGLNWLRFSWAQGTDTILADEMGLGKTIQTIVFLYSLYKEGHTKGPFLVSAPLSTIINWEREFQMWAPKFYVVTYTGDKDSRAIIRENEFSFEDNAIKGGKKAFKMKREAQVKFHVLLTSYELITIDQAALGSIRWACLVVDEAHRLKNNQSKFFRVLNGYKIDHKLLLTGTPLQNNLEELFHLLNFLTPERFNNLEGFLEEFADISKEDQIKKLHDLLGPHMLRRLKADVFKNMPAKTELIVRVELSPMQKKYYKYILTRNFEALNSRGGGNQVSLLNIMMDLKKCCNHPYLFPVAAMESPKLPSGAYEGGALIKSSGKLMLLQKMLRKLKEQGHRVLIFSQMTKMLDLLEDFLDYEGYKYERIDGGITGALRQEAIDRFNAPGAQQFCFLLSTRAGGLGINLATADTVIIFDSDWNPHNDIQAFSRAHRIGQANKVMIYRFVTRASVEERITQVAKRKMMLTHLVVRPGLGSKAGSMSKQELDDILKFGTEELFKDENEGENKEEDSSVIHYDNEAIARLLDRNQDATEDTDVQNMNEYLSSFKVAQYVVREEDKIEEIEREIIKQEENVDPDYWEKLLRHHYEQQQEDLARNLGKGKRVRKQVNYNDAAQEDQDNQSEYSVGSEEEDEDFDERPEGRRQSKRQLRNEKDKPLPPLLARVGGNIEVLGFNTRQRKAFLNAVMRWGMPPQDAFTTQWLVRDLRGKTEKEFKAYVSLFMRHLCEPGADGSETFADGVPREGLSRQQVLTRIGVMSLVKKKVQEFEHINGRWSMPELMPDPSADSKRSSRASSPTKTSPTTPEASATNSPCTSKPATPAPSEKGEGIRTPLEKEEAENQEEKPEKNSRIGEKMETEADAPSPAPSLGERLEPRKIPLEDEVPGVPGEMEPEPGYRGDREKSATESTPGERGEEKPLDGQEHRERPEGETGDLGKREDVKGDRELRPGPRDEPRSNGRREEKTEKPRFMFNIADGGFTELHTLWQNEERAAISSGKLNEIWHRRHDYWLLAGIVLHGYARWQDIQNDAQFAIINEPFKTEANKGNFLEMKNKFLARRFKLLEQALVIEEQLRRAAYLNLSQEPAHPAMALHARFAEAECLAESHQHLSKESLAGNKPANAVLHKVLNQLEELLSDMKADVTRLPATLSRIPPIAARLQMSERSILSRLASKGTEPHPTPAYPPGPYATPPGYGAAFSAAPVGALAAAGANYSQMPAGSFITAATNGPPVLVKKEKEMVGALVSDGLDRKEPRAGEVICIDD

SEQ ID NO: 10304 - protein, 542 aa, Homo sapiens
MVAHDETGGLLPIKRTIRVLDVNNQSFREQEEPSNKRVRPLARVTSLANLISPVRNGAVRRFGQTIQSFTLRGDHRSPASAQKFSSRSTVPTPAKRRSSALWSEMLDITMKESLTTREIRRQEAIYEMSRGEQDLIEDLKLARKAYHDPMLKLSIMSEEELTHIFGDLDSYIPLHEDLLTRIGEATKPDGTVEQIGHILVSWLPRLNAYRGYCSNQLAAKALLDQKKQDPRVQDFLQRCLESPFSRKLDLWSFLDIPRSRLVKYPLLLKEILKHTPKEHPDVQLLEDAILIIQGVLSDINLKKGESECQYYIDKLEYLDEKQRDPRIEASKVLLCHGELRSKSGHKLYIFLFQDILVLTRPVTRNERHSYQVYRQPIPVQELVLEDLQDGDVRMGGSFRGAFSNSEKAKNIFRIRFHDPSPAQSHTLQANDVFHKQQWFNCIRAAIAPFQSAGSPPELQGLPELHEECEGNHPSARKLTAQRRASTVSSVTQVEVDENAYRCGSGMQMAEDSKSLKTHQTQPGIRRARDKALSGGKRKETLV

SEQ ID NO: 10305 - protein, 417 aa, Homo sapiens
MASYLYGVLFAVGLCAPIYCVSPANAPSAYPRPSSTKSTPASQVYSLNTDFAFRLYRRLVLETPSQNIFFSPVSVSTSLAMLSLGAHSVTKTQILQGLGFNLTHTPESAIHQGFQHLVHSLTVPSKDLTLKMGSALFVKKELQLQANFLGNVKRLYEAEVFSTDFSNPSIAQARINSHVKKKTQGKVVDIIQGLDLLTAMVLVNHIFFKAKWEKPFHPEYTRKNFPFLVGEQVTVHVPMMHQKEQFAFGVDTELNCFVLQMDYKGDAVAFFVLPSKGKMRQLEQALSARTLRKWSHSLQKRWIEVFIPRFSISASYNLETILPKMGIQNVFDKNADFSGIAKRDSLQVSKATHKAVLDVSEEGTEATAATTTKFIVRSKDGPSYFTVSFNRTFLMMITNKATDGILFLGKVENPTKS

SEQ ID NO: 10306 - protein, 274 aa, Homo sapiens
MPRNLLYSLLSSHLSPHFSTSVTSAKVAVNGVQLHYQQTGEGDHAVLLLPGMLGSGETDFGPQLKNLNKKLFTVVAWDPRGYGHSRPPDRDFPADFFERDAKDAVDLMKALKFKKVSLLGWSDGGITALIAAAKYPSYIHKMVIWGANAYVTDEDSMIYEGIRDVSKWSERTRKPLEALYGYDYFARTCEKWVDGIRQFKHLPDGNICRHLLPRVQCPALIVHGEKDPLVPRFHADFIHKHVKGSRLHLMPEGKHNLHLRFADEFNKLAEDFLQ

SEQ ID NO: 10307 - protein, 108 aa, Homo sapiens
MADPRVRQIKIKTGVVKRLVKEKVMYEKEAKQQEEKIEKMRAEDGENYDIKKQAEILQESRMMIPDCQRRLEAAYLDLQRILENEKDLEEAEEYKEARLVLDSVKLEA

SEQ ID NO: 10308 - protein, 802 aa, Homo sapiens
MDSWFILVLLGSGLICVSANNATTVAPSVGITRLINSSTAEPVKEEAKTSNPTSSLTSLSVAPTFSPNITLGPTYLTTVNSSDSDNGTTRTASTNSIGITISPNGTWLPDNQFTDARTEPWEGNSSTAATTPETFPPSGNSDSKDRRDETPIIAVMVALSSLLVIVFIIIVLYMLRFKKYKQAGSHSNSFRLSNGRTEDVEPQSVPLLARSPSTNRKYPPLPVDKLEEEINRRMADDNKLFREEFNALPACPIQATCEAASKEENKEKNRYVNILPYDHSRVHLTPVEGVPDSDYINASFINGYQEKNKFIAAQGPKEETVNDFWRMIWEQNTATIVMVTNLKERKECKCAQYWPDQGCWTYGNIRVSVEDVTVLVDYTVRKFCIQQVGDMTNRKPQRLITQFHFTSWPDFGVPFTPIGMLKFLKKVKACNPQYAGAIVVHCSAGVGRTGTFVVIDAMLDMMHTERKVDVYGFVSRIRAQRCQMVQTDMQYVFIYQALLEHYLYGDTELEVTSLETHLQKIYNKIPGTSNNGLEEEFKKLTSIKIQNDKMRTGNLPANMKKNRVLQIIPYEFNRVIIPVKRGEENTDYVNASFIDGYRQKDSYIASQGPLLHTIEDFWRMIWEWKSCSIVMLTELEERGQEKCAQYWPSDGLVSYGDITVELKKEEECESYTVRDLLVTNTRENKSRQIRQFHFHGWPEVGIPSDGKGMISIIAAVQKQQQQSGNHPITVHCSAGAGRTGTFCALSTVLERVKAEGILDVFQTVKSLRLQRPHMVQTLEQYEFCYKVVQEYIDAFSDYANFK

SEQ ID NO: 10309 - protein, 249 aa, Homo sapiens
MKLNISFPATGCQKLIEVDDERKLRTFYEKRMATEVAADALGEEWKGYVVRISGGNDKQGFPMKQGVLTHGRVRLLLSKGHSCYRPRRTGERKRKSVRGCIVDANLSVLNLVIVKKGEKDIPGLTDTTVPRRLGPKRASRIRKLFNLSKEDDVRQYVVRKPLNKEGKKPRTKAPKIQRLVTPRVLQHKRRRIALKKQRTKKNKEEAAEYAKLLAKRMKEAKEKRQEQIAKRRRLSSLRASTSKSESSQK

SEQ ID NO: 10310 - protein, 290 aa, Homo sapiens
MGSSKKVTLSVLSREQSEGVGARVRRSIGRPELKNLDPFLLFDEFKGGRPGGFPDHPHRGFETVSYLLEGGSMAHEDFCGHTGKMNPGDLQWMTAGRGILHAEMPCSEEPAHGLQLWVNLRSSEKMVEPQYQELKSEEIPKPSKDGVTVAVISGEALGIKSKVYTRTPTLYLDFKLDPGAKHSQPIPKGWTSFIYTISGDVYIGPDDAQQKIEPHHTAVLGEGDSVQVENKDPKRSHFVLIAGEPLREPVIQHGPFVMNTNEEISQAILDFRNAKNGFERAKTWKSKIGN

SEQ ID NO: 10311 - protein, 161 aa, Homo sapiens
MLMPVHFLLLLLLLLGGPRTGLPHKFYKAKPIFSCLNTALSEAEKGQWEDASLLSKRSFHYLRSRDASSGEEEEGKEKKTFPISGARGGARGTRYRYVSQAQPRGKPRQDTAKSPHRTKFTLSLDVPTNIMNLLFNIAKAKNLRAQAAANAHLMAQIGRKK

SEQ ID NO: 10312 - protein, 193 aa, Homo sapiens
MAGKKVLIVYAHQEPKSFNGSLKNVAVDELSRQGCTVTVSDLYAMNLEPRATDKDITGTLSNPEVFNYGVETHEAYKQRSLASDITDEQKKVREADLVIFQGKLALLSVTTGGTAEMYTKTGVNGDSRYFLWPLQHGTLHFCGFKVLAPQISFAPEIASEEERKGMVAAWSQRLQTIWKEEPIPCTAHWHFGQ

SEQ ID NO: 10313 - protein, 839 aa, Homo sapiens
MDCYTANWNPLGDSAFYRKYELYSMDWDLKEELRDCLVAAAPYGGPIALLRNPWRKEKAASVRPVLDIYSASGMPLASLLWKSGPVVSLGWSAEEELLCVQEDGAVLVYGLHGDFRRHFSMGNEVLQNRVLDARIFHTEFGSGVAILTGAHRFTLSANVGDLKLRRMPEVPGLQSAPSCWTVLCQDRVAHILLAVGPDLYLLDHAACSAVTPPGLAPGVSSFLQMAVSFTYRHLALFTDTGYIWMGTASLKEKLCEFNCNIRAPPKQMVWCSRPRSKERAVVVAWERRLMVVGDAPESIQFVLDEDSYLVPELDGVRIFSRSTHEFLHEVPAASEEIFKIASMAPGALLLEAQKEYEKESQKADEYLREIQELGQLTQAVQQCIEAAGHEHQPDMQKSLLRAASFGKCFLDRFPPDSFVHMCQDLRVLNAVRDYHIGIPLTYSQYKQLTIQVLLDRLVLRRLYPLAIQICEYLRLPEVQGVSRILAHWACYKVQQKDVSDEDVARAINQKLGDTPGVSYSDIAARAYGCGRTELAIKLLEYEPRSGEQVPLLLKMKRSKLALSKAIESGDTDLVFTVLLHLKNELNRGDFFMTLRNQPMALSLYRQFCKHQELETLKDLYNQDDNHQELGSFHIRASYAAEERIEGRVAALQTAADAFYKAKNEFAAKATEDQMRLLRLQRRLEDELGGQFLDLSLHDTVTTLILGGHNKRAEQLARDFRIPDKRLWWLKLTALADLEDWEELEKFSKSKKSPIGYLPFVEICMKQHNKYEAKKYASRVGPEQKVKALLLVGDVAQAADVAIEHRNEAELSLVLSHCTGATDGATADKIQRARAQAQKK

SEQ ID NO: 10314 - protein, 402 aa, Homo sapiens
MESRGPLATSRLLLLLLLLLLRHTRQGWALRPVLPTQSAHDPPAVHLSNGPGQEPIAVMTFDLTKITKTSSSFEVRTWDPEGVIFYGDTNPKDDWFMLGLRDGRPEIQLHNHWAQLTVGAGPRLDDGRWHQVEVKMEGDSVLLEVDGEEVLRLRQVSGPLTSKRHPIMRIALGGLLFPASNLRLPLVPALDGCLRRDSWLDKQAEISASAPTSLRSCDVESNPGIFLPPGTQAEFNLRDIPQPHAEPWAFSLDLGLKQAAGSGHLLALGTPENPSWLSLHLQDQKVVLSSGSGPGLDLPLVLGLPLQLKLSMSRVVLSQGSKMKALALPPLGLAPLLNLWAKPQGRLFLGALPGEDSSTSFCLNGLWAQGQRLDVDQALNRSHEIWTHSCPQSPGNGTDASH

SEQ ID NO: 10315 - protein, 484 aa, Homo sapiens
MACRGGAGNGHRASATLSRVSPGSLYTCRTRTHNICMVSDFFYPNMGGVESHIYQLSQCLIERGHKVIIVTHAYGNRKGIRYLTSGLKVYYLPLKVMYNQSTATTLFHSLPLLRYIFVRERVTIIHSHSSFSAMAHDALFHAKTMGLQTVFTDHSLFGFADVSSVLTNKLLTVSLCDTNHIICVSYTSKENTVLRAALNPEIVSVIPNAVDPTDFTPDPFRRHDSITIVVVSRLVYRKGIDLLSGIIPELCQKYPDLNFIIGGEGPKRIILEEVRERYQLHDRVRLLGALEHKDVRNVLVQGHIFLNTSLTEAFCMAIVEAASCGLQVVSTRVGGIPEVLPENLIILCEPSVKSLCEGLEKAIFQLKSGTLPAPENIHNIVKTFYTWRNVAERTEKVYDRVSVEAVLPMDKRLDRLISHCGPVTGYIFALLAVFNFLFLIFLRWMTPDSIIDVAIDATGPRGAWTNNYSHSKRGGENNEISETR

SEQ ID NO: 10316 - protein, 502 aa, Homo sapiens
MKGEITLSQWIPLMEENCRKCSETAKVCLPKNFSIKEIFDKAISARKINRPMLQAALMLRKKGFTTAILTNTWLDDRAERDGLAQLMCELKMHFDFLIESCQVGMVKPEPQIYKFLLDTLKASPSEVVFLDDIGANLKPARDLGMVTILVQDTDTALKELEKVTGIQLLNTPAPLPTSCNPSDMSHGYVTVKPRVRLHFVELGSGPAVCLCHGFPESWYSWRYQIPALAQAGYRVLAMDMKGYGESSAPPEIEEYCMEVLCKEMVTFLDKLGLSQAVFIGHDWGGMLVWYMALFYPERVRAVASLNTPFIPANPNMSPLESIKANPVFDYQLYFQEPGVAEAELEQNLSRTFKSLFRASDESVLSMHKVCEAGGLFVNSPEEPSLSRMVTEEEIQFYVQQFKKSGFRGPLNWYRNMERNWKWACKSLGRKILIPALMVTAEKDFVLVPQMSQHMEDWIPHLKRGHIEDCGHWTQMDKPTEVNQILIKWLDSDARNPPVVSKM

SEQ ID NO: 10317 - protein, 303 aa, Homo sapiens
MAGAACEPVARPSLTSISSGELRSLWTCDCELALLPLAQLLRLQPGAFQLSGDQLVVARPGEPAAARGGFNVFGDGLVRLDGQLYRLSSYIKRYVELTNYCDYKDYRETILSKPMLFFINVQTKKDTSKERTYAFLVNTRHPKIRRQIEQGMDMVISSVIGESYRLQFDFQEAVKNFFPPGNEVVNGENLSFAYEFKADALFDFFYWFGLSNSVVKVNGKVLNLSSTSPEKKETIKLFLEKMSEPLIRRSSFSDRKFSVTSRGSIDDVFNCNLSPRSSLTEPLLAELPFPSVLESEETPNQFI

SEQ ID NO: 10318 - protein, 696 aa, Homo sapiens
MAMARLGSWLGEAQWLALVSLFVAALATVGLYLAQWALARARPQPQRRAVEPGEGPRPGSDALLSWILTLGSWRSQWQAAWVTALNEEAERKGGPPFLSFEEDPRQQALELVVQEVSSVLRSAEEKVVVCHVVGQAIQFLVSETPALGAGCRLYDMRLSPFHLQLEFHMKEKREDLQISWSFISVPEMAVNIQPKALGEDQVAETSAMSDVLKDILKHLAGSASPSVVLITKPTTVKEAQNLQCAASTAQESCPPKPPRAHELKLLVRNIHVLLLSEPGASGHINAVCVVQLNDPVQRFSSTLTKNTPDLMWEEEFTFELNAKSKELHLQISEAGRSSEGLLATATVPLDLFKKQPSGPQSFTLTSGSACGSSVLGSVTAEFSYMEPGELKSWPIPPPVPAAKIEKDRTVMPCGTVVTTVTAVKTKPRVDVGRASPLSSDSPVKTPIKVKVIEKDISVQAIACRSAPVSKTLSSSDTELLVLNGSDPVAEVAIRQLSESSKLKLKSPRKKSTIIISGISKTSLSQDHDAALMQGYTASVDSTHQEDAPSHPERAAASAPPEEAESAQASLAPKPQEDELDSWDLEKEPQAAAWSSQVLLDPDGDELSESSMSVLEPGTAKKHKGGILRKGAKLFFRRRHQQKDPGMSQSHNDLVFLEQPEGSRRKGITLTRILNKKLLSRHRNKNTMNGAPVEPCT

SEQ ID NO: 10319 - protein, 409 aa, Homo sapiens
MEGESTSAVLSGFVLGALAFQHLNTDSDTEGFLLGEVKGEAKNSITDSQMDDVEVVYTIDIQKYIPCYQLFSFYNSSGEVNEQALKKILSNVKKNVVGWYKFRRHSDQIMTFRERLLHKNLQEHFSNQDLVFLLLTPSIITESCSTHRLEHSLYKPQKGLFHRVPLVVANLGMSEQLGYKTVSGSCMSTGFSRAVQTHSSKFFEEDGSLKEVHKINEMYASLQEELKSICKKVEDSEQAVDKLVKDVNRLKREIEKRRGAQIQAAREKNIQKDPQENIFLCQALRTFFPNSEFLHSCVMSLKNRHVSKSSCNYNHHLDVVDNLTLMVEHTDIPEASPASTPQIIKHKALDLDDRWQFKRSRLLDTQDKRSKADTGSSNQDKASKMSSPETDEEIEKMKGFGEYSRSPTF

SEQ ID NO: 10320 - protein, 802 aa, Homo sapiens
MKYIKSNSKNSSHHFVETFNIKPQDLHKCIARCHFARSRFLQILQRQDCVTQKYQENAQLSVKQVRNLRSECIGLENQIKKMEPYDDHSNMEEKIQKVRSLWASVNETLMFLEKEREVVSSVLSLVNQYALDGTNVAINIPRLLLDKIEKQMFQLHIGNVYEAGKLNLLTVIQLLNEVLKVMKYERCQADQARLTVDLHYLEKETKFQKERLSDLKHMRYRIKDDLTTIRHSVVEKQGEWHKKWKEFLGLSPFSLIKGWTPSVDLLPPMSPLSFDPASEEVYAKSILCQYPASLPDAHKQHNQENGCRGDSDTLGALHDLANSPASFLSQSVSSSDRNSVTVLEKDTKMGTPKEKNEAISKKIPEFEVENSPLSDVAKNTESSAFGGSLPAKKSDPFQKEQDHLVEEVARAVLSDSPQLSEGKEIKLEELIDSLGSNPFLTRNQIPRTPENLITEIRSSWRKAIEMEENRTKEPIQMDAEHREVLPESLPVLHNQREFSMADFLLETTVSDFGQSHLTEEKVISDCECVPQKHVLTSHIDEPPTQNQSDLLNKKVICKQDLECLAFTKLSETSRMETFSPAVGNRIDVMGGSEEEFMKILDHLEVSCNKPSTNKTMLWNSFQISSGISSKSFKDNDFGILHETLPEEVGHLSFNSSSSSEANFKLEPNSPMHGGTLLEDVVGGRQTTPESDFNLQALRSRYEALKKSLSKKREESYLSNSQTPERHKPELSPTPQNVQTDDTLNFLDTCDLHTEHIKPSLRTSIGERKRSLSPLIKFSPVEQRLRTTIACSLGELPNLKGKV

SEQ ID NO: 10321 - protein, 327 aa, Homo sapiens
MRLAVLFSGALLGLLAESTGTTSHRTTKSHKTTTHRTTTTGTTSHGPTTATHNPTTTSHGNVTVHPTSNSTATSQGPSTATHSPATTSHGNATVHPTSNSTATSPGFTSSAHPEPPPPSPSPSPTSKETIGDYTWTNGSQPCVHLQAQIQIRVMYTTQGGGEAWGISVLNPNKTKVQGSCEGAHPHLLLSFPYGHLSFGFMQDLQQKVVYLSYMAVEYNVSFPHAAQWTFSAQNASLRDLQAPLGQSFSCSNSSIILSPAVHLDLLSLRLQAAQLPHTGVFGQSFSCPSDRSILLPLIIGLILLGLLALVLIAFCIIRRRPSAYQAL

SEQ ID NO: 10322 - protein, 1034 aa, Homo sapiens
MAAATGAVAASAASGQAEGKKITDLRVIDLKSELKRRNLDITGVKTVLISRLKQAIEEEGGDPDNIELTVSTDTPNKKPTKGKGKKHEADELSGDASVEDDAFIKDCELENQEAHEQDGNDELKDSEEFGENEEENVHSKELLSAEENKRAHELIEAEGIEDIEKEDIESQEIEAQEGEDDTFLTAQDGEEEENEKDIAGSGDGTQEVSKPLPSEGSLAEADHTAHEEMEAHTTVKEAEDDNISVTIQAEDAITLDFDGDDLLETGKNVKITDSEASKPKDGQDAIAQSPEKESKDYEMNANHKDGKKEDCVKGDPVEKEARESSKKAESGDKEKDTLKKGPSSTGASGQAKSSSKESKDSKTSSKDDKGSTSSTSGSSGSSTKNIWVSGLSSNTKAADLKNLFGKYGKVLSAKVVTNARSPGAKCYGIVTMSSSTEVSRCIAHLHRTELHGQLISVEKVKGDPSKKEMKKENDEKSSSRSSGDKKNTSDRSSKTQASVKKEEKRSSEKSEKKESKDTKKIEGKDEKNDNGASGQTSESIKKSEEKKRISSKSPGHMVILDQTKGDHCRPSRRGRYEKIHGRSKEKERASLDKKRDKDYRRKEILPFEKMKEQRLREHLVRFERLRRAMELRRRREIAERERRERERIRIIREREERERLQRERERLEIERQKLERERMERERLERERIRIEQERRKEAERIAREREELRRQQQQLRYEQEKRNSLKRPRDVDHRRDDPYWSENKKLSLDTDARFGHGSDYSRQQNRFNDFDHRERGRFPESSAVQSSSFERRDRFVGQSEGKKARPTARREDPSFERYPKNFSDSRRNEPPPPRNELRESDRREVRGERDERRTVIIHDRPDITHPRHPREAGPNPSRPTSWKSEGSMSTDKRETRVERPERSGREVSGHSVRGAPPGNRSSASGYGSREGDRGVITDRGGGSQHYPEERHVVERHGRDTSGPRKEWHGPPSQGPSYHDTRRMGDGRAGAGMITQHSSNASPINRIVQISGNSMPRGSGSGFKPFKGGPPRRF

SEQ ID NO: 10323 - protein, 1487 aa, Homo sapiens
MIRLGAPQTLVLLTLLVAAVLRCQGQDVQEAGSCVQDGQRYNDKDVWKPEPCRICVCDTGTVLCDDIICEDVKDCLSPEIPFGECCPICPTDLATASGQPGPKGQKGEPGDIKDIVGPKGPPGPQGPAGEQGPRGDRGDKGEKGAPGPRGRDGEPGTPGNPGPPGPPGPPGPPGLGGNFAAQMAGGFDEKAGGAQLGVMQGPMGPMGPRGPPGPAGAPGPQGFQGNPGEPGEPGVSGPMGPRGPPGPPGKPGDDGEAGKPGKAGERGPPGPQGARGFPGTPGLPGVKGHRGYPGLDGAKGEAGAPGVKGESGSPGENGSPGPMGPRGLPGERGRTGPAGAAGARGNDGQPGPAGPPGPVGPAGGPGFPGAPGAKGEAGPTGARGPEGAQGPRGEPGTPGSPGPAGASGNPGTDGIPGAKGSAGAPGIAGAPGFPGPRGPPGPQGATGPLGPKGQTGEPGIAGFKGEQGPKGEPGPAGPQGAPGPAGEEGKRGARGEPGGVGPIGPPGERGAPGNRGFPGQDGLAGPKGAPGERGPSGLAGPKGANGDPGRPGEPGLPGARGLTGRPGDAGPQGKVGPSGAPGEDGRPGPPGPQGARGQPGVMGFPGPKGANGEPGKAGEKGLPGAPGLRGLPGKDGETGAAGPPGPAGPAGERGEQGAPGPSGFQGLPGPPGPPGEGGKPGDQGVPGEAGAPGLVGPRGERGFPGERGSPGAQGLQGPRGLPGTPGTDGPKGASGPAGPPGAQGPPGLQGMPGERGAAGIAGPKGDRGDVGEKGPEGAPGKDGGRGLTGPIGPPGPAGANGEKGEVGPPGPAGSAGARGAPGERGETGPPGPAGFAGPPGADGQPGAKGEQGEAGQKGDAGAPGPQGPSGAPGPQGPTGVTGPKGARGAQGPPGATGFPGAAGRVGPPGSNGNPGPPGPPGPSGKDGPKGARGDSGPPGRAGEPGLQGPAGPPGEKGEPGDDGPSGAEGPPGPQGLAGQRGIVGLPGQRGERGFPGLPGPSGEPGKQGAPGASGDRGPPGPVGPPGLTGPAGEPGREGSPGADGPPGRDGAAGVKGDRGETGAVGAPGAPGPPGSPGPAGPTGKQGDRGEAGAQGPMGPSGPAGARGIQGPQGPRGDKGEAGEPGERGLKGHRGFTGLQGLPGPPGPSGDQGASGPAGPSGPRGPPGPVGPSGKDGANGIPGPIGPPGPRGRSGETGPAGPPGNPGPPGPPGPPGPGIDMSAFAGLGPREKGPDPLQYMRADQAAGGLRQHDAEVDATLKSLNNQIESIRSPEGSRKNPARTCRDLKLCHPEWKSGDYWIDPNQGCTLDAMKVFCNMETGETCVYPNPANVPKKNWWSSKSKEKKHIWFGETINGGFHFSYGDDNLAPNTANVQMTFLRLLSTEGSQNITYHCKNSIAYLDEAAGNLKKALLIQGSNDVEIRAEGNSRFTYTALKDGCTKHTGKWGKTVIEYRSQKTSRLPIIDIAPMDIGGPEQEFGVDIGPVCFL

SEQ ID NO: 10324 - protein, 376 aa, Homo sapiens
MDVLAEANGTFALNLLKTLGKDNSKNVFFSPMSMSCALAMVYMGAKGNTAAQMAQILSFNKSGGGGDIHQGFQSLLTEVNKTGTQYLLRMANRLFGEKSCDFLSSFRDSCQKFYQAEMEELDFISAVEKSRKHINTWVAEKTEGKIAELLSPGSVDPLTRLVLVNAVYFRGNWDEQFDKENTEERLFKVSKNEEKPVQMMFKQSTFKKTYIGEIFTQILVLPYVGKELNMIIMLPDETTDLRTVEKELTYEKFVEWTRLDMMDEEEVEVSLPRFKLEESYDMESVLRNLGMTDAFELGKADFSGMSQTDLSLSKVVHKSFVEVNEEGTEAAAATAAIMMMRCARFVPRFCADHPFLFFIQHSKTNGILFCGRFSSP

SEQ ID NO: 10325 - protein, 242 aa, Homo sapiens
MAAVKASTSKATRPWYSHPVYARYWQHYHQAMAWMQSHHNAYRKAVESCFNLPWYLPSALLPQSSYDNEAAYPQSFYDHHVAWQDYPCSSSHFRRSGQHPRYSSRIQASTKEDQALSKEEEMETESDAEVECDLSNMEITEELRQYFAETERHREERRRQQQLDAERLDSYVNADHDLYCNTRRSVEAPTERPGERRQAEMKRLYGDSAAKIQAMEAAVQLSFDKHCDRKQPKYWPVIPLKF

SEQ ID NO: 10326 - protein, 831 aa, Homo sapiens
MADSSGQQAPDYRSILSISDEAARAQALNEHLSTRSYVQGYSLSQADVDAFRQLSAPPADPQLFHVARWFRHIEALLGSPCGKGQPCRLQASKGRRVQPQWSPPAGTQPCRLHLYNSLTRNKEVFIPQDGKKVTWYCCGPTVYDASHMGHARSYISFDILRRVLKDYFKFDVFYCMNITDIDDKIIKRARQNHLFEQYREKRPEAAQLLEDVQAALKPFSVKLNETTDPDKKQMLERIQHAVQLATEPLEKAVQSRLTGEEVNSCVEVLLEEAKDLLSDWLDSTLGCDVTDNSIFSKLPKFWEGDFHRDMEALNVLPPDVLTRVSEYVPEIVNFVQKIVDNGYGYVSNGSVYFDTAKFASSEKHSYGKLVPEAVGDQKALQEGEGDLSISADRLSEKRSPNDFALWKASKPGEPSWPCPWGKGRPGWHIECSAMAGTLLGASMDIHGGGFDLRFPHHDNELAQSEAYFENDCWVRYFLHTGHLTIAGCKMSKSLKNFITIKDALKKHSARQLRLAFLMHSWKDTLDYSSNTMESALQYEKFLNEFFLNVKDILRAPVDITGQFEKWGEEEAELNKNFYDKKTAIHKALCDNVDTRTVMEEMRALVSQCNLYMAARKAVRKRPNQALLENIALYLTHMLKIFGAVEEDSSLGFPVGGPGTSLSLEATVMPYLQVLSEFREGVRKIAREQKVPEILQLSDALRDNILPELGVRFEDHEGLPTVVKLVDRNTLLKEREEKRRVEEEKRKKKEEAARRKQEQEAAKLAKMKIPPSEMFLSETDKYSKFDENGLPTHDMEGKELSKGQAKKLKKLFEAQEKLYKEYLQMAQNGSFQ

SEQ ID NO: 10327 - protein, 313 aa, Homo sapiens
MPNTAMKKKVLLMGKSGSGKTSMRSIIFANYIARDTRRLGATIDVEHSHVRFLGNLVLNLWDCGGQDTFMENYFTSQRDNIFRNVEVLIYVFDVESRELEKDMHYYQSCLEAILQNSPDAKIFCLVHKMDLVQEDQRDLIFKEREEDLRRLSRPLECACFRTSIWDETLYKAWSSIVYQLIPNVQQLEMNLRNFAQIIEADEVLLFERATFLVISHYQCKEQRDVHRFEKISNIIKQFKLSCSKLAASFQSMEVRNSNFAAFIDIFTSNTYVMVVMSDPSIPSAATLINIRNARKHFEKLERVDGPKHSLLMR

SEQ ID NO: 10328 - protein, 375 aa, Homo sapiens
MADHSFSDGVPSDSVEAAKNASNTEKLTDQVMQNPRVLAALQERLDNVPHTPSSYIETLPKAVKRRINALKQLQVRCAHIEAKFYEEVHDLERKYAALYQPLFDKRREFITGDVEPTDAESEWHSENEEEEKLAGDMKSKVVVTEKAAATAEEPDPKGIPEFWFTIFRNVDMLSELVQEYDEPILKHLQDIKVKFSDPGQPMSFVLEFHFEPNDYFTNSVLTKTYKMKSEPDKADPFSFEGPEIVDCDGCTIDWKKGKNVTVKTIKKKQKHKGRGTVRTITKQVPNESFFNFFNPLKASGDGESLDEDSEFTLASDFEIGHFFRERIVPRAVLYFTGEAIEDDDNFEEGEEGEEEELEGDEEGEDEDDAEINPKV

SEQ ID NO: 10329 - protein, 463 aa, Homo sapiens
MSGVFCFFFFFLGVPEAEVTWFRNKSKLGSPHHLHEGSLLLTNVSSSDQGLYSCRAANLHGELTESTQLLILDPPQVPTQLEDIRALLAATGPNLPSVLTSPLGTQLVLDPGNSALLGCPIKGHPVPNITWFHGGQPIVTATGLTHHILAAGQILQVANLSGGSQGEFSCLAQNEAGVLMQKASLVIQDYWWSVDRLATCSASCGNRGVQQPRLRCLLNSTEVNPAHCAGKVRPAVQPIACNRRDCPSRWMVTSWSACTRSCGGGVQTRRVTCQKLKASGISTPVSNDMCTQVAKRPVDTQACNQQLCVEWAFSSWGQCNGPCIGPHLAVQHRQVFCQTRDGITLPSEQCSALPRPVSTQNCWSEACSVHWRVSLWTLCTATCGNYGFQSRRVECVHARTNKAVPEHLCSWGPRPANWQRCNITPCENMECRDTTRYCEKVKQLKLCQLSQFKSRCCGTCGKA

SEQ ID NO: 10330 - protein, 1762 aa, Homo sapiens
MECCRRATPGTLLLFLAFLLLSSRTARSEEDRDGLWDAWGPWSECSRTCGGGASYSLRRCLSSKSCEGRNIRYRTCSNVDCPPEAGDFRAQQCSAHNDVKHHGQFYEWLPVSNDPDNPCSLKCQAKGTTLVVELAPKVLDGTRCYTESLDMCISGLCQIVGCDHQLGSTVKEDNCGVCNGDGSTCRLVRGQYKSQLSATKSDDTVVAIPYGSRHIRLVLKGPDHLYLETKTLQGTKGENSLSSTGTFLVDNSSVDFQKFPDKEILRMAGPLTADFIVKIRNSGSADSTVQFIFYQPIIHRWRETDFFPCSATCGGGYQLTSAECYDLRSNRVVADQYCHYYPENIKPKPKLQECNLDPCPASDGYKQIMPYDLYHPLPRWEATPWTACSSSCGGGIQSRAVSCVEEDIQGHVTSVEEWKCMYTPKMPIAQPCNIFDCPKWLAQEWSPCTVTCGQGLRYRVVLCIDHRGMHTGGCSPKTKPHIKEECIVPTPCYKPKEKLPVEAKLPWFKQAQELEEGAAVSEEPSFIPEAWSACTVTCGVGTQVRIVRCQVLLSFSQSVADLPIDECEGPKPASQRACYAGPCSGEIPEFNPDETDGLFGGLQDFDELYDWEYEGFTKCSESCGGGVQEAVVSCLNKQTREPAEENLCVTSRRPPQLLKSCNLDPCPARWEIGKWSPCSLTCGVGLQTRDVFCSHLLSREMNETVILADELCRQPKPSTVQACNRFNCPPAWYPAQWQPCSRTCGGGVQKREVLCKQRMADGSFLELPETFCSASKPACQQACKKDDCPSEWLLSDWTECSTSCGEGTQTRSAICRKMLKTGLSTVVNSTLCPPLPFSSSIRPCMLATCARPGRPSTKHSPHIAAARKVYIQTRRQRKLHFVVGGFAYLLPKTAVVLRCPARRVRKPLITWEKDGQHLISSTHVTVAPFGYLKIHRLKPSDAGVYTCSAGPAREHFVIKLIGGNRKLVARPLSPRSEEEVLAGRKGGPKEALQTHKHQNGIFSNGSKAEKRGLAANPGSRYDDLVSRLLEQGGWPGELLASWEAQDSAERNTTSEEDPGAEQVLLHLPFTMVTEQRRLDDILGNLSQQPEELRDLYSKHLVAQLAQEIFRSHLEHQDTLLKPSERRTSPVTLSPHKHVSGFSSSLRTSSTGDAGGGSRRPHRKPTILRKISAAQQLSASEVVTHLGQTVALASGTLSVLLHCEAIGHPRPTISWARNGEEVQFSDRILLQPDDSLQILAPVEADVGFYTCNATNALGYDSVSIAVTLAGKPLVKTSRMTVINTEKPAVTVDIGSTIKTVQGVNVTINCQVAGVPEAEVTWFRNKSKLGSPHHLHEGSLLLTNVSSSDQGLYSCRAANLHGELTESTQLLILDPPQVPTQLEDIRALLAATGPNLPSVLTSPLGTQLVLDPGNSALLGCPIKGHPVPNITWFHGGQPIVTATGLTHHILAAGQILQVANLSGGSQGEFSCLAQNEAGVLMQKASLVIQDYWWSVDRLATCSASCGNRGVQQPRLRCLLNSTEVNPAHCAGKVRPAVQPIACNRRDCPSRWMVTSWSACTRSCGGGVQTRRVTCQKLKASGISTPVSNDMCTQVAKRPVDTQACNQQLCVEWAFSSWGQCNGPCIGPHLAVQHRQVFCQTRDGITLPSEQCSALPRPVSTQNCWSEACSVHWRVSLWTLCTATCGNYGFQSRRVECVHARTNKAVPEHLCSWGPRPANWQRCNITPCENMECRDTTRYCEKVKQLKLCQLSQFKSRCCGTCGKA

SEQ ID NO: 10331 - protein, 570 aa, Homo sapiens
MAGLTAAAPRPGVLLLLLSILHPSRPGGVPGAIPGGVPGGVFYPGAGLGALGGGALGPGGKPLKPVPGGLAGAGLGAGVGGAFAGIPGVGPFGGPQPGVPLGYPIKAPKLPGYGPGGVAGAAGKAGYPTGTGVGPQAAAAAAAKAAAKFGAGAAGVLPGVGGAGVPGVPGAIPGIGGIAGVGTPAAAAAAAAAAKAAKYGAAAGLVPGGPGFGPGVVGVPGAGVPGVGVPGAGIPVVPGAGIPGAAVPGVVSPEAAAKAAAKAAKYGARPGVGVGGIPTYGVGAGGFPGFGVGVGGIPGVAGVPGVGGVPGVGGVPGVGISPEAQAAAAAKAAKYGLVPGVGVAPGVGVAPGVGVAPGVGLAPGVGVAPGVGVAPGVGVAPGIGPGGVAAAAKSAAKVAAKAQLRAAAGLGAGIPGLGVGVGVPGLGVGAGVPGLGVGAGVPGFGAVPGALAAAKAAKYGAAVPGVLGGLGALGGVGIPGGVVGAGPAAAAAAAKAAAKAAQFGLVGAAGLGGLGVGGLGVPGVGGLGGIPPAAAAKAAKYGVAARPGFGLSPIFPGGACLGKACGRKRK

SEQ ID NO: 10332 - protein, 323 aa, Homo sapiens
MDSKHQCVKLNDGHFMPVLGFGTYAPPEVPRSKALEVTKLAIEAGFRHIDSAHLYNNEEQVGLAIRSKIADGSVKREDIFYTSKLWSTFHRPELVRPALENSLKKAQLDYVDLYLIHSPMSLKPGEELSPTDENGKVIFDIVDLCTTWEAMEKCKDAGLAKSIGVSNFNRRQLEMILNKPGLKYKPVCNQVECHPYFNRSKLLDFCKSKDIVLVAYSALGSQRDKRWVDPNSPVLLEDPVLCALAKKHKRTPALIALRYQLQRGVVVLAKSYNEQRIRQNVQVFEFQLTAEDMKAIDGLDRNLHYFNSDSFASHPNYPYSDEY

SEQ ID NO: 10333 - protein, 730 aa, Homo sapiens
MAGLTAAAPRPGVLLLLLSILHPSRPGGVPGAIPGGVPGGVFYPGAGLGALGGGALGPGGKPLKPVPGGLAGAGLGAGLGAFPAVTFPGALVPGGVADAAAAYKAAKAGAGLGGVPGVGGLGVSAGAVVPQPGAGVKPGKVPGVGLPGVYPGGVLPGARFPGVGVLPGVPTGAGVKPKAPGVGGAFAGIPGVGPFGGPQPGVPLGYPIKAPKLPGGYGLPYTTGKLPYGYGPGGVAGAAGKAGYPTGTGVGPQAAAAAAAKAAAKFGAGAAGVLPGVGGAGVPGVPGAIPGIGGIAGVGTPAAAAAAAAAAKAAKYGAAAGLVPGGPGFGPGVVGVPGAGVPGVGVPGAGIPVVPGAGIPGAAVPGVVSPEAAAKAAAKAAKYGARPGVGVGGIPTYGVGAGGFPGFGVGVGGIPGVAGVPGVGGVPGVGGVPGVGISPEAQAAAAAKAAKYGVGTPAAAAAKAAAKAAQFALLNLAGLVPGVGVAPGVGVAPGVGVAPGVGLAPGVGVAPGVGVAPGVGVAPGIGPGGVAAAAKSAAKVAAKAQLRAAAGLGAGIPGLGVGVGVPGLGVGAGVPGLGVGAGVPGFGAVPGALAAAKAAKYGAAVPGVLGGLGALGGVGIPGGVVGAGPAAAAAAAKAAAKAAQFGLVGAAGLGGLGVGGLGVPGVGGLGGIPPAAAAKAAKYGAAGLGGVLGGAGQFPLGGVAARPGFGLSPIFPGGACLGKACGRKRK

SEQ ID NO: 10334 - protein, 439 aa, Homo sapiens
MECCRRATPGTLLLFLAFLLLSSRTARSEEDRDGLWDAWGPWSECSRTCGGGASYSLRRCLSSKSCEGRNIRYRTCSNVDCPPEAGDFRAQQCSAHNDVKHHGQFYEWLPVSNDPDNPCSLKCQAKGTTLVVELAPKVLDGTRCYTESLDMCISGLCQIVGCDHQLGSTVKEDNCGVCNGDGSTCRLVRGQYKSQLSATKSDDTVVAIPYGSRHIRLVLKGPDHLYLETKTLQGTKGENSLSSTGTFLVDNSSVDFQKFPDKEILRMAGPLTADFIVKIRNSGSADSTVQFIFYQPIIHRWRETDFFPCSATCGGGYQLTSAECYDLRSNRVVADQYCHYYPENIKPKPKLQECNLDPCPARWEATPWTACSSSCGGGIQSRAVSCVEEDIQGHVTSVEEWKCMYTPKMPIAQPCNIFDCPKWLAQEWSPVTVPSFFVH

SEQ ID NO: 10335 - protein, 219 aa, Homo sapiens
MECCRRATPGTLLLFLAFLLLSSRTARSEEDRDGLWDAWGPWSECSRTCGGGASYSLRRCLSSKSCEGRNIRYRTCSNVDCPPEAGDFRAQQCSAHNDVKHHGQFYEWLPVSNDPDNPCSLKCQAKGTTLVVELAPKVLDGTRCYTESLDMCISGLCQIVGCDHQLGSTVKEDNCGVCNGDGSTCRLVRGQYKSQLSATKCKTHRDGRPLDLLTYPLLA

SEQ ID NO: 10336 - protein, 677 aa, Homo sapiens
MAGLTAAAPRPGVLLLLLSILHPSRPGGVPGAIPGGVPGGVFYPALGPGGKPLKPVPGGLAGAGLGAGLGAFPAVTFPGALVPGGVADAAAAYKAAKAGAGLGGVPGVGGLGVSAGAVVPQPGAGVKPGKVPGVGLPGVYPGGVLPGARFPGVGVLPGVPTGAGVKPKAPGVGGAFAGIPGVGPFGGPQPGVPLGYPIKAPKLPGGYGLPYTTGKLPYGYGPGGVAGAAGKAGYPTGTGVGPQAAAAAAAKAAAKFGAGAAGVLPGVGGAGVPGVPGAIPGIGGIAGVGTPAAAAAAAAAAKAAKYGAAAGLVPGGPGFGPGVVGVPGAGVPGVGVPGAGIPVVPGAGIPGAAVPGVVSPEAAAKAAAKAAKYGARPGVGVGGIPTYGVGAGGFPGFGVGVGGIPGVAGVPGVGGVPGVGGVPGVGISPEAQAAAAAKAAKYGLVPGVGVAPGVGVAPGVGVAPGVGLAPGVGVAPGVGVAPGVGVAPGIGPGGVAAAAKSAAKVAAKAQLRAAAGLGAGIPGLGVGVGVPGLGVGAGVPGLGVGAGVPGFGAVPGALAAAKAAKYGAAVPGVLGGLGALGGVGIPGGVVGAGPAAAAAAAKAAAKAAQFGLVGAAGLGGLGVGGLGVPGVGGLGGIPPAAAAKAAKYGVAARPGFGLSPIFPGGACLGKACGRKRK

SEQ ID NO: 10337 - protein, 705 aa, Homo sapiens
MAGLTAAAPRPGVLLLLLSILHPSRPGGVPGAIPGGVPGGVFYPGAGLGALGGGALGPGGKPLKPVPGGLAGAGLGAGLGAFPAVTFPGALVPGGVADAAAAYKAAKAGAGLGGVPGVGGLGVSAGAVVPQPGAGVKPGKVPGVGLPGVYPGGVLPGARFPGVGVLPGVPTGAGVKPKAPGVGGAFAGIPGVGPFGGPQPGVPLGYPIKAPKLPGGYGLPYTTGKLPYGYGPGGVAGAAGKAGYPTGTGVGPQAAAAAAAKAAAKFGAGAAGVLPGVGGAGVPGVPGAIPGIGGIAGVGTPAAAAAAAAAAKAAKYGAAAGLVPGGPGFGPGVVGVPGAGVPGVGVPGAGIPVVPGAGIPGAAVPGVVSPEAAAKAAAKAAKYGARPGVGVGGIPTYGVGAGGFPGFGVGVGGIPGVAGVPGVGGVPGVGGVPGVGISPEAQAAAAAKAAKYGLVPGVGVAPGVGVAPGVGVAPGVGLAPGVGVAPGVGVAPGVGVAPGIGPGGVAAAAKSAAKVAAKAQLRAAAGLGAGIPGLGVGVGVPGLGVGAGVPGLGVGAGVPGFGAVPGALAAAKAAKYGAAVPGVLGGLGALGGVGIPGGVVGAGPAAAAAAAKAAAKAAQFGLVGAAGLGGLGVGGLGVPGVGGLGGIPPAAAAKAAKYGAAGLGGVLGGAGQFPLGGVAARPGFGLSPIFPGGACLGKACGRKRK

SEQ ID NO: 10338 - protein, 658 aa, Homo sapiens
MAGLTAAAPRPGVLLLLLSILHPSRPGGVPGAIPGGVPGGVFYPGAGLGALGGGALGPGGKPLKPVPGGLAGAGLGAGLGAFPAVTFPGALVPGGVADAAAAYKAAKAGAGLGGVPGVGGLGVSAGAVVPQPGAGVKPGKVPGVGLPGVYPGGVLPGARFPGVGVLPGVPTGAGVKPKAPGVGGAFAGIPGVGPFGGPQPGVPLGYPIKAPKLPGYGPGGVAGAAGKAGYPTGTGVGPQAAAAAAAKAAAKFGAGAAGVLPGVGGAGVPGVPGAIPGIGGIAGVGTPAAAAAAAAAAKAAKYGAAAGLVPGGPGFGPGVVGVPGAGVPGVGVPGAGIPVVPGAGIPGAAVPGVVSPEAAAKAAAKAAKYGARPGVGVGGIPTYGVGAGGFPGFGVGVGGIPGVAGVPGVGGVPGVGGVPGVGISPEAQAAAAAKAAKYGLVPGVGVAPGVGVAPGVGVAPGVGLAPGVGVAPGVGVAPGVGVAPGIGPGGVAGAAAGLGAGIPGLGVGVGVPGLGVGAGVPGLGVGAGVPGFGAVPGALAAAKAAKYGAAVPGVLGGLGALGGVGIPGGVVGAGPAAAAAAAKAAAKAAQFGLVGAAGLGGLGVGGLGVPGVGGLGGIPPAAAAKAAKYGVAARPGFGLSPIFPGGACLGKACGRKRK

SEQ ID NO: 10339 - protein, 206 aa, Homo sapiens
MRRTGAPAQADSRGRGRARGGCPGGEATLSQPPPRGGTRGQEPQMKETIMNQEKLAKLQAQVRIGGKGTARRKKKVVHRTATADDKKLQFSLKKLGVNNISGIEEVNMFTNQGTVIHFNNPKVQASLAANTFTITGHAETKQLTEMLPSILNQLGADSLTSLRRLAEALPKQSVDGKAPLATGEDDDDEVPDLVENFDEASKNEAN

SEQ ID NO: 10340 - protein, 554 aa, Homo sapiens
MPLPWSLALPLLLSWVAGGFGNAASARHHGLLASARQPGVCHYGTKLACCYGWRRNSKGVCEATCEPGCKFGECVGPNKCRCFPGYTGKTCSQDVNECGMKPRPCQHRCVNTHGSYKCFCLSGHMLMPDATCVNSRTCAMINCQYSCEDTEEGPQCLCPSSGLRLAPNGRDCLDIDECASGKVICPYNRRCVNTFGSYYCKCHIGFELQYISGRYDCIDINECTMDSHTCSHHANCFNTQGSFKCKCKQGYKGNGLRCSAIPENSVKEVLRAPGTIKDRIKKLLAHKNSMKKKAKIKNVTPEPTRTPTPKVNLQPFNYEEIVSRGGNSHGGKKGNEEKMKEGLEDEKREEKALKNDIEERSLRGDVFFPKVNEAGEFGLILVQRKALTSKLEHKADLNISVDCSFNHGICDWKQDREDDFDWNPADRDNAIGFYMAVPALAGHKKDIGRLKLLLPDLQPQSNFCLLFDYRLAGDKVGKLRVFVKNSNNALAWEKTTSEDEKWKTGKIQLYQGTDATKSIIFEAERGKGKTGEIAVDGVLLVSGLCPDSLLSVDD

SEQ ID NO: 10341 - protein, 734 aa, Homo sapiens
MWGLLLALAAFAPAVGPALGAPRNSVLGLAQPGTTKVPGSTPALHSSPAQPPAETANGTSEQHVRIRVIKKKKVIMKKRKKLTLTRPTPLVTAGPLVTPTPAGTLDPAEKQETGCPPLGLESLRVSDSRLEASSSQSFGLGPHRGRLNIQSGLEDGDLYDGAWCAEEQDADPWFQVDAGHPTRFSGVITQGRNSVWRYDWVTSYKVQFSNDSRTWWGSRNHSSGMDAVFPANSDPETPVLNLLPEPQVARFIRLLPQTWLQGGAPCLRAEILACPVSDPNDLFLEAPASGSSDPLDFQHHNYKAMRKLMKQVQEQCPNITRIYSIGKSYQGLKLYVMEMSDKPGEHELGEPEVRYVAGMHGNEALGRELLLLLMQFLCHEFLRGNPRVTRLLSEMRIHLLPSMNPDGYEIAYHRGSELVGWAEGRWNNQSIDLNHNFADLNTPLWEAQDDGKVPHIVPNHHLPLPTYYTLPNATVAPETRAVIKWMKRIPFVLSANLHGGELVVSYPFDMTRTPWAARELTPTPDDAVFRWLSTVYAGSNLAMQDTSRRPCHSQDFSVHGNIINGADWHTVPGSMNDFSYLHTNCFEVTVELSCDKFPHENELPQEWENNKDALLTYLEQVRMGIAGVVRDKDTELGIADAVIAVDGINHDVTTAWGGDYWRLLTPGDYMVTASAEGYHSVTRNCRVTFEEGPFPCNFVLTKTPKQRLRELLAAGAKVPPDLRRRLERLRGQKD

SEQ ID NO: 10342 - protein, 490 aa, Homo sapiens
MNLAEICDNAKKGREYALLGNYDSSMVYYQGVMQQIQRHCQSVRDPAIKGKWQQVRQELLEEYEQVKSIVSTLESFKIDKPPDFPVSCQDEPFRDPAVWPPPVPAEHRAPPQIRRPNREVRPLRKEMAGVGARGPVGRAHPISKSEKPSTSRDKDYRARGRDDKGRKNMQDGASDGEMPKFDGAGYDKDLVEALERDIVSRNPSIHWDDIADLEEAKKLLREAVVLPMWMPDFFKGIRRPWKGVLMVGPPGTGKTMLAKAVATECGTTFFNVSSSTLTSKYRGESEKLVRLLFEMARFYAPTTIFIDEIDSICSRRGTSDEHEASRRVKSELLIQMDGVGGALENDDPSKMVMVLAATNFPWDIDEALRRRLEKRIYIPLPTAKGRAELLKINLREVELDPDIQLEDIAEKIEGYSGADITNVCRDASLMAMRRRINGLSPEEIRALSKEELQMPVTKGDFELALKKIAKSVSAADLEKYEKWMVEFGSA

SEQ ID NO: 10343 - protein, 219 aa, Homo sapiens
MSSHLVEPPPPLHNNNNNCEENEQSLPPPAGLNSSWVELPMNSSNGNDNGNGKNGGLEHVPSSSSIHNGDMEKILLDAQHESGQSSSRGSSHCDSPSPQEDGQIMFDVEMHTSRDHSSQSEEEVVEGEKEVEALKKSADWVSDWSSRPENIPPKEFHFRHPKRSVSLSMRKSGAMKKGGIFSAEFLKVFIPSLFLSHVLALGLGIYIGKRLSTPSASTY

SEQ ID NO: 10344 - protein, 44 aa, Homo sapiens
MSDKPDMAEIEKFDKSKLKKTETQEKNPLPSKETIEQEKQAGES

SEQ ID NO: 10345 - protein, 1406 aa, Homo sapiens
MAARSPPSPHPSPPARQLGPRSPRVGRGAEVHAMRSEASGFAGAAREVVADESDKIWVGEEGSGGRRGPGGAAPAHAPLLSAPMGSRRLEGISVEEAMVTRTQLLEEELSSLKEELALCQADKEFVWSLWKRLQVTNPDLTQVVSLVVEREKQKSEAKDRKVLEILQVKDAKIQEFEQRESVLKQEINDLVKRKIAVDEENAFLRKEFSDLEKKFKDKSQEIKDTKECVQNKEEQNRLVIKNLEEENKKLSTRCTDLLNDLEKLRKQEAHLRKEKYSTDAKIKTFEDNLIEARKEVEVSQSKYNALSLQLSNKQTELIQKDMDITLVRKELQELQNLYKQNSTHTAQQAELIQQLQVLNMDTQKVLRNQEDVHTAESISYQKLYNELHICFETTKSNEAMLRQSVTNLQDQLLQKEQENAKLKEKLQESQGAPLPLPQESDPDYSAQVPHRPSLSSLETLMVSQKSEIEYLQEKLKIANEKLSENISANKGFSRKSIMTSAEGKHKEPPVKRSRSLSPKSSFTDSEELQKLRKAERKIENLEKALQLKSQENDELRDAHEKRKERLQMLQTNYRAVKEQLKQWEEGSGMTEIRKIKRADPQQLRQEDSDAVWNELAYFKRENQELMIQKMNLEEELDELKVHISIDKAAIQELNRCVAERREEQLFRSGEDDEVKRSTPEKNGKEMLEQTLQKVTELENRLKSFEKRSRKLKEGNKKLMKENDFLKSLLKQQQEDTETREKELEQIIKGSKDVEKENTELQVKISELETEVTSLRRQVAEANALRNENEELINPMEKSHQSADRAKSEMATMKVRSGRYDCKTTMTKVKFKAAKKNCSVGRHHTVLNHSIKVMSNVFENLSKDGWEDVSESSSDSEAQTSQTLGTIIVETSQKISPTEDGKDQKESDPTEDSQTQGKEIVQTYLNIDGKTPKDYFHDKNAKKPTFQKKNCKMQKSSHTAVPTRVNREKYKNITAQKSSSNIILLRERIISLQQQNSVLQNAKKTAELSVKEYKEVNEKLLHQQQVSDQRFQTSRQTIKKLNLDLAGLRKEKEDLLKKLESSSEITSLAEENSQVTFPRIQVTSLSPSRSMDLEMKQLQYKLKNATNELTKQSSNVKTLKFELLAKEEHIKEMHEKISRMERDITMKRHLIEDLKFRQKVNLESNKSFSEMLQNLDKKVKTLTEECSNKKVSIDSLKQRLNVAVKEKSQYEQMYQKSKEELEKKDLKLTLLVSRISETESAMAEIETAASKQLQELALQSEQVLEGAQKTLLLANEKVEEFTTFVKALAKELQNDVHVVRRQIRELKKMKKNRDACKTSTHKAQTLAASILNISRSDLEEILDTEDQVEIEKTKIDAENDKEWMLYIQKLLEGQLPFASYLLEAVLEKINEKKKLVEGYFTIMKDIR

SEQ ID NO: 10346 - protein, 763 aa, Homo sapiens
MVACRAIGILSRFSAFRILRSRGYICRNFTGSSALLTRTHINYGVKGDVAVVRINSPNSKVNTLSKELHSEFSEVMNEIWASDQIRSAVLISSKPGCFIAGADINMLAACKTLQEVTQLSQEAQRIVEKLEKSTKPIVAAINGSCLGGGLEVAISCQYRIATKDRKTVLGTPEVLLGALPGAGGTQRLPKMVGVPAALDMMLTGRSIRADRAKKMGLVDQLVEPLGPGLKPPEERTIEYLEEVAITFAKGLADKKISPKRDKGLVEKLTAYAMTIPFVRQQVYKKVEEKVRKQTKGLYPAPLKIIDVVKTGIEQGSDAGYLCESQKFGELVMTKESKALMGLYHGQVLCKKNKFGAPQKDVKHLAILGAGLMGAGIAQVSVDKGLKTILKDATLTALDRGQQQVFKGLNDKVKKKALTSFERDSIFSNLTGQLDYQGFEKADMVIEAVFEDLSLKHRVLKEVEAVIPDHCIFASNTSALPISEIAAVSKRPEKVIGMHYFSPVDKMQLLEIITTEKTSKDTSASAVAVGLKQGKVIIVVKDGPGFYTTRCLAPMMSEVIRILQEGVDPKKLDSLTTSFGFPVGAATLVDEVGVDVAKHVAEDLGKVFGERFGGGNPELLTQMVSKGFLGRKSGKGFYIYQEGVKRKDLNSDMDSILASLKLPPKSEVSSDEDIQFRLVTRFVNEAVMCLQEGILATPAEGDIGAVFGLGFPPCLGGPFRFVDLYGAQKIVDRLKKYEAAYGKQFTPCQLLADHANSPNKKFYQ

SEQ ID NO: 10347 - protein, 631 aa, Homo sapiens
MTSANKAIELQLQVKQNAEELQDFMRDLENWEKDIKQKDMELRRQNGVPEENLPPIRNGNFRKKKKGKAKESSKKTREENTKNRIKSYDYEAWAKLDVDRILDELDKDDSTHESLSQESESEEDGIHVDSQKALVLKEKGNKYFKQGKYDEAIDCYTKGMDADPYNPVLPTNRASAYFRLKKFAVAESDCNLAVALNRSYTKAYSRRGAARFALQKLEEAKKDYERVLELEPNNFEATNELRKISQALASKENSYPKEADIVIKSTEGERKQIEAQQNKQQAISEKDRGNGFFKEGKYERAIECYTRGIAADGANALLPANRAMAYLKIQKYEEAEKDCTQAILLDGSYSKAFARRGTARTFLGKLNEAKQDFETVLLLEPGNKQAVTELSKIKKKPLKKVIIEETGNLIQTIDVPDSTTAAAPENNPINLANVIAATGTTSKKNSSQDDLFPTSDTPRAKVLKIEEVSDTSSLQPQASLKQDVCQSYSEKMPIEIEQKPAQFATTVLPPIPANSFQLESDFRQLKSSPDMLYQYLKQIEPSLYPKLFQKNLDPDVFNQIVKILHDFYIEKEKPLLIFEILQRLSELKRFDMAVMFMSETEKKIARALFNHIDKSGLKDSSVEELKKRYGG

SEQ ID NO: 10348 - protein, 1049 aa, Homo sapiens
MVFPMWTLKRQILILFNIILISKLLGARWFPKTLPCDVTLDVPKNHVIVDCTDKHLTEIPGGIPTNTTNLTLTINHIPDISPASFHRLDHLVEIDFRCNCVPIPLGSKNNMCIKRLQIKPRSFSGLTYLKSLYLDGNQLLEIPQGLPPSLQLLSLEANNIFSIRKENLTELANIEILYLGQNCYYRNPCYVSYSIEKDAFLNLTKLKVLSLKDNNVTAVPTVLPSTLTELYLYNNMIAKIQEDDFNNLNQLQILDLSGNCPRCYNAPFPCAPCKNNSPLQIPVNAFDALTELKVLRLHSNSLQHVPPRWFKNINKLQELDLSQNFLAKEIGDAKFLHFLPSLIQLDLSFNFELQVYRASMNLSQAFSSLKSLKILRIRGYVFKELKSFNLSPLHNLQNLEVLDLGTNFIKIANLSMFKQFKRLKVIDLSVNKISPSGDSSEVGFCSNARTSVESYEPQVLEQLHYFRYDKYARSCRFKNKEASFMSVNESCYKYGQTLDLSKNSIFFVKSSDFQHLSFLKCLNLSGNLISQTLNGSEFQPLAELRYLDFSNNRLDLLHSTAFEELHKLEVLDISSNSHYFQSEGITHMLNFTKNLKVLQKLMMNDNDISSSTSRTMESESLRTLEFRGNHLDVLWREGDNRYLQLFKNLLKLEELDISKNSLSFLPSGVFDGMPPNLKNLSLAKNGLKSFSWKKLQCLKNLETLDLSHNQLTTVPERLSNCSRSLKNLILKNNQIRSLTKYFLQDAFQLRYLDLSSNKIQMIQKTSFPENVLNNLKMLLLHHNRFLCTCDAVWFVWWVNHTEVTIPYLATDVTCVGPGAHKGQSVISLDLYTCELDLTNLILFSLSISVSLFLMVMMTASHLYFWDVWYIYHFCKAKIKGYQRLISPDCCYDAFIVYDTKDPAVTEWVLAELVAKLEDPREKHFNLCLEERDWLPGQPVLENLSQSIQLSKKTVFVMTDKYAKTENFKIAFYLSHQRLMDEKVDVIILIFLEKPFQKSKFLQLRKRLCGSSVLEWPTNPQAHPYFWQCLKNALATDNHVAYSQVFKETV

SEQ ID NO: 10349 - protein, 1008 aa, Homo sapiens
MSSVSGNASFILGTGKIVTPQKHAELPPNPCTPDTFKSPLNFSTVTVEQLGITPESFVRNSAGKSSSYLKKCRRRSAVGARGSPETNHLIRFIARQQNIKNARKSPLAQDSPSQGSPALYRNVNTLRERISAFQSAFHSIKENEKMTGCLEFSEAGKESEMTDLTRKEGLSACQQSGFPAVLSSKRRRISYQRDSDENLTDAEGKVIGLQIFNIDTDRACAVETSVDLSEISSKLGSTQSGFLVEESLPLSELTETSNALKVADCVVGKGSSDAVSPDTFTAEVSSDAVPDVRSPATPACRRDLPTPKTFVLRSVLKKPSVKMCLESLQEHCNNLYDDDGTHPSLISNLPNCCKEKEAEDEENFEAPAFLNMRKRKRVTFGEDLSPEVFDESLPANTPLRKGGTPVCKKDFSGLSSLLLEQSPVPEPLPQPDFDDKGENLENIEPLQVSFAVLSSPNKSSISETLSGTDTFSSSNNHEKISSPKVGRITRTSNRRNQLVSVVEESVCNLLNTEVQPCKEKKINRRKSQETKCTKRALPKKSQVLKSCRKKKGKGKKSVQKSLYGERDIASKKPLLSPIPELPEVPEMTPSIPSIRRLGSGYFSSNGKLEEVKTPKNPVKRKDLLRHDPDLHMHQGYDKYDVSEFCSYIKSSSSLGNATSDEDPNTNIMNINENKNIPKAKNKSESENEPKAGTDSPVSCASVTEERVASDSPKPALTLQQGQEFSAGGQNAENLCQFFKISPDLNIKCERKDDFLGAAEGKLQCNRLMPNSQKDCHCLGDVLIENTKESKSQSEDLGRKPMESSSVVSCRDRKDRRRSMCYSDGRSLHLEKNGNHTPSSSVGSSVEISLENSELFKDLSDAIEQTFQRRNSETKVRRSTRLQKDLENEGLVWISLPLPSTSQKAKRRTICTFDSSGFESMSPIKETVSSRQKPQMAPPVSDPENSQGPAAGSSDEPGKRRKSFCISTLANTKATSQFKGYRRRSSLNGKGESSLTALERIEHNGERKQ

SEQ ID NO: 10350 - protein, 318 aa, Homo sapiens
MPNIVLFSGSSHQDLSQRVADRLGLELGKVVTKKFSNQETSVEIGESVRGEDVYIIQSGCGEINDNLMELLIMINACKIASSSRVTAVIPCFPYARQDKKDKSRAPISAKLVANMLSVAGADHIITMDLHASQIQGFFDIPVDNLYAEPAVLQWIRENIAEWKNCIIVSPDAGGAKRVTSIADRLNVEFALIHKERKKANEVDRMVLVGDVKDRVAILVDDMADTCGTICHAADKLLSAGATKVYAILTHGIFSGPAISRINNAAFEAVVVTNTIPQEDKMKHCTKIQVIDISMILAEAIRRTHNGESVSYLFSHVPL

SEQ ID NO: 10351 - protein, 1099 aa, Homo sapiens
MAHLGPTPPPHSLNYKSEDRLSEQDWPAYFKVPCCGVDTSQIESEEAEVDVRERETQRDREPKRARDLTLRDSCTDNSMQFGTRTTTAEPGFMGTWQNADTNLLFRMSQQAIRCTLVNCTCECFQPGKINLRTCDQCKHGWVAHALDKLSTQHLYHPTQVEIVQSNVVFDISSLMLYGTQAVPVRLKILLDRLFSVLKQEEVLHILHGLGWTLRDYVRGYILQDAAGKVLDRWAIMSREEEIITLQQFLRFGETKSIVELMAIQEKEGQAVAVPSSKTDSDIRTFIESNNRTRSPSLLAHLENSNPSSIHHFENIPNSLAFLLPFQYINPVSAPLLGLPPNGLLLEQPGLRLREPSLSTQNEYNESSESEVSPTPYKNDQTPNRNALTSITNVEPKTEPACVSPIQNSAPVSDLTKTEHPKSSFRIHRMRRMGSASRKGRVFCNACGKTFYDKGTLKIHYNAVHLKIKHRCTIEGCNMVFSSLRSRNRHSANPNPRLHMPMLRNNRDKDLIRATSGAATPVIASTKSNLALTSPGRPPMGFTTPPLDPVLQNPLPSQLVFSGLKTVQPVPPFYRSLLTPGEMVSPPTSLPTSPIIPTSGTIEQHPPPPSEPVVPAVMMATHEPSADLAPKKKPRKSSMPVKIEKEIIDTADEFDDEDDDPNDGGAVVNDMSHDNHCHSQEEMSPGMSVKDFSKHNRTRCISRTEIRRADSMTSEDQEPERDYENESESSEPKLGEESMEGDEHIHSEVSEKVLMNSERPDENHSEPSHQDVIKVKEEFTDPTYDMFYMSQYGLYNGGGASMAALHESFTSSLNYGSPQKFSPEGDLCSSPDPKICYVCKKSFKSSYSVKLHYRNVHLKEMHVCTVAGCNAAFPSRRSRDRHSANINLHRKLLTKELDDMGLDSSQPSLSKDLRDEFLVKIYGAQHPMGLDVREDASSPAGTEDSHLNGYGRGMAEDYMVLDLSTTSSLQSSSSIHSSRESDAGSDEGILLDDIDGASDSGESAHKAEAPALPGSLGAEVSGSLMFSSLSGSNGGIMCNICHKMYSNKGTLRVHYKTVHLREMHKCKVPGCNMMFSSVRSRNRHSQNPNLHKNIPFTSVD

SEQ ID NO: 10352 - protein, 117 aa, Homo sapiens
MSSNVPADMINLRLILVSGKTKEFLFSPNDSASDIAKHVYDNWPMDWEEEQVSSPNILRLIYQGRFLHGNVTLGALKLPFGKTTVMHLVARETLPEPNSQGQRNREKTGESNCCVIL

SEQ ID NO: 10353 - protein, 376 aa, Homo sapiens
METLSNASGTFAIRLLKILCQDNPSHNVFCSPVSISSALAMVLLGAKGNTATQMAQALSLNTEEDIHRAFQSLLTEVNKAGTQYLLRTANRLFGEKTCQFLSTFKESCLQFYHAELKELSFIRAAEESRKHINTWVSKKTEGKIEELLPGSSIDAETRLVLVNAIYFKGKWNEPFDETYTREMPFKINQEEQRPVQMMYQEATFKLAHVGEVRAQLLELPYARKELSLLVLLPDDGVELSTVEKSLTFEKLTAWTKPDCMKSTEVEVLLPKFKLQEDYDMESVLRHLGIVDAFQQGKADLSAMSAERDLCLSKFVHKSFVEVNEEGTEAAAASSCFVVAECCMESGPRFCADHPFLFFIRHNRANSILFCGRFSSP

SEQ ID NO: 10354 - protein, 1326 aa, Homo sapiens
MNLNTSSNTGDTQRLKIASLDVKQILKNETELDITDNLRKKLHWAKKEKLEITTKHNAELASYESQIAKLRSEVEKGEALRQSLEYDLAVARKEAGLGRRAAEERLAEAHRIQEKLCAQNSELQAKTNETEKAFQTSQQKWKEECRRFEHDLEERDNMIQNCNREYDLLMKEKSRLEKTLQEALEKHQREKNEMESHIRETALEEFRLQEEQWEAERRELQFIVQEQDTAVQNMHKKVEKLETEHMDCSDLLRRQTSELEFSTQREERLRKEFEATTLRVRKLEENIEAERAAHLESKFNSEIIQLRIRDLEGALQVEKASQAEAVADLEIIKNEFKEVESAYEREKHNAQESFAKLNLLEKEYFSKNKKLNEDIEEQKKVIIDLSKRLQYNEKSCSELQEELVMAKKHQAFLVETCENNVKELESILDSFTVSGQWTSGIHKDKDKPPSFSVVLERLRRTLTDYQNKLEDASNEEKACNELDSTKQKIDSHTKNIKELQDKLADVNKELSHLHTKCADREALISTLKVELQNVLHCWEKEKAQAAQSESELQKLSQAFHKDAEEKLTFLHTLYQHLVAGCVLIKQPEGMLDKFSWSELCAVLQENVDALIADLNRANEKIRHLEYICKNKSDTMRELQQTQEDTFTKVAEQIKAQESCWHRQKKELELQYSELFLEVQKRAQKFQEIAEKNMEKLNHIEKSHEQLVLENSHFKKLLSQTQREQMSLLAACALMAGALYPLYSRSCALSTQRDFLQEQVNTFELFKLEIRTLAQALSTVEEKKQEEAKMKKKTFKGLIRIFRKGVIAVLAANRLKILGQSCASLFTWMESFKEGIGMLVCTGEPQDKHKFPKHQKEQLRCLQALSWLTSSDLLAAIISSMAELQDVIGKADPNSRICGHLLIGAAKNSFAKLMDKISLVMECIPLHSSRSITYVEKDSLVQRLAHGLHKVNTLALKYGLRGHVPITKSTASLQKQILGFTQRLHAAEVERRSLRLEVTEFKRSVNEMKKELDKAQGLQMQLNEFKQSKLITHEKFESACEELNNALLREEQAQMLLNEQAQQLQELNYKLELHSSEEADKNQTLGEAVKSLSEAKMELRRKDQSLRQLNRHLTQLEQDKRRLEENIHDAESALRMAAKDKECVANHMRAVENTLHKVRDQISLSWSAASRNDFTLQLPKLHLETFAMEGLKGGPEVVACQAMIKSFMDVYQLASTRIMTLEKEMTSHRSHIAALKSELHTACLRENASLQSIGSRDHSNLSIPSRAPLPADTTGIGDFLPLKAELDTTYTFLKETFINTVPHALTSSHSSPVTMSANANRPTQIGL

SEQ ID NO: 10355 - protein, 140 aa, Homo sapiens
MSRVLQKDAEQESQMRAEIQDMKQELSTVNMMDEFARYARLERKINKMTDKLKTHVKARTAQLAKIKWVISVAFYVLQAALMISLIWKYYSVPVAVVPSKWITPLDRLVAFPTRVAGGVGITCWILVCNKVVAIVLHPFS

SEQ ID NO: 10356 - protein, 205 aa, Homo sapiens
MGTWILFACLLGAAFAMPLPPHPGHPGYINFSYENSHSQAINVDRTALVLTPLKWYQSIRPPYPSYGYEPMGGWLHHQIIPVLSQQHPPTHTLQPHHHIPVVPAQQPVIPQQPMMPVPGQHSMTPIQHHQPNLPPPAQQPYQPQPVQPQPHQPMQPQPPVHPMQPLPPQPPLPPMFPMQPLPPMLPDLTLEAWPSTDKTKREEVD

SEQ ID NO: 10357 - protein, 191 aa, Homo sapiens
MGTWILFACLLGAAFAMPLPPHPGHPGYINFSYEVLTPLKWYQSIRPPYPSYGYEPMGGWLHHQIIPVLSQQHPPTHTLQPHHHIPVVPAQQPVIPQQPMMPVPGQHSMTPIQHHQPNLPPPAQQPYQPQPVQPQPHQPMQPQPPVHPMQPLPPQPPLPPMFPMQPLPPMLPDLTLEAWPSTDKTKREEVD

SEQ ID NO: 10358 - protein, 329 aa, Homo sapiens
MTRDFKPGDLIFAKMKGYPHWPARVDEVPDGAVKPPTNKLPIFFFGTHETAFLGPKDIFPYSENKEKYGKPNKRKGFNEGLWEIDNNPKVKFSSQQAATKQSNASSDVEVEEKETSVSKEDTDHEEKASNEDVTKAVDITTPKAARRGRKRKAEKQVETEEAGVVTTATASVNLKVSPKRGRPAATEVKIPKPRGRPKMVKQPCPSESDIITEEDKSKKKGQEEKQPKKQPKKDEEGQKEEDKPRKEPDKKEGKKEVESKRKNLAKTGVTSTSDSEEEGDDQEGEKKRKGGRNFQTAHRRNMLKGQHEKEAADRKRKQEEQMETEHFAL

SEQ ID NO: 10359 - protein, 333 aa, Homo sapiens
MTRDFKPGDLIFAKMKGYPHWPARVDEVPDGAVKPPTNKLPIFFFGTHETAFLGPKDIFPYSENKEKYGKPNKRKGFNEGLWEIDNNPKVKFSSQQAATKQSNASSDVEVEEKETSVSKEDTDHEEKASNEDVTKAVDITTPKAARRGRKRKAEKQVETEEAGVVTTATASVNLKVSPKRGRPAATEVKIPKPRGRPKMVKQPCPSESDIITEEDKSKKKGQEEKQPKKQPKKDEEGQKEEDKPRKEPDKKEGKKEVESKRKNLAKTGVTSTSDSEEEGDDQEGEKKRKGGRNFQTAHRRNMLKGQHEKEAADRKRKQEEQMETEHQTTCNLQ

SEQ ID NO: 10360 - protein, 327 aa, Homo sapiens
MPALLERPKLSNAMARALHRHIMMERERKRQEEEEVDKMMEQKMKEEQERRKKKEMEERMSLEETKEQILKLEEKLLALQEEKHQLFLQLKKVLHEEEKRRRKEQSDLTTLTSAAYQQSLTVHTGTHLLSMQGSPGGHNRPGTLMAADRAKQMFGPQVLTTRHYVGSAAAFAGTPEHGQFQGSPGGAYGTAQPPPHYGPTQPAYSPSQQLRAPSAFPAVQYLSQPQPQPYAVHGHFQPTQTGFLQPGGALSLQKQMEHANQQTGFSDSSSLRPMHPQALHPAPGLLASPQLPVQMQPAGKSGFAATSQPGPRLPFIQHSQNPRFYHK

SEQ ID NO: 10361 - protein, 530 aa, Homo sapiens
MTRDFKPGDLIFAKMKGYPHWPARVDEVPDGAVKPPTNKLPIFFFGTHETAFLGPKDIFPYSENKEKYGKPNKRKGFNEGLWEIDNNPKVKFSSQQAATKQSNASSDVEVEEKETSVSKEDTDHEEKASNEDVTKAVDITTPKAARRGRKRKAEKQVETEEAGVVTTATASVNLKVSPKRGRPAATEVKIPKPRGRPKMVKQPCPSESDIITEEDKSKKKGQEEKQPKKQPKKDEEGQKEEDKPRKEPDKKEGKKEVESKRKNLAKTGVTSTSDSEEEGDDQEGEKKRKGGRNFQTAHRRNMLKGQHEKEAADRKRKQEEQMETEQQNKDEGKKPEVKKVEKKRETSMDSRLQRIHAEIKNSLKIDNLDVNRCIEALDELASLQVTMQQAQKHTEMITTLKKIRRFKVSQVIMEKSTMLYNKFKNMFLVGEGDSVITQVLNKSLAEQRQHEEANKTKDQGKKGPNKKLEKEQTGSKTLNGGSDAQDGNQPQHNGESNEDSKDNHEASTKKKPSSEERETEISLKDSTLDN

SEQ ID NO: 10362 - protein, 447 aa, Homo sapiens
MAGAGGGNDIQWCFSQVKGAVDDDVAEADIISTVEFNHSGELLATGDKGGRVVIFQQEQENKIQSHSRGEYNVYSTFQSHEPEFDYLKSLEIEEKINKIRWLPQKNAAQFLLSTNDKTIKLWKISERDKRPEGYNLKEEDGRYRDPTTVTTLRVPVFRPMDLMVEASPRRIFANAHTYHINSISINSDYETYLSADDLRINLWHLEITDRSFNIVDIKPANMEELTEVITAAEFHPNSCNTFVYSSSKGTIRLCDMRASALCDRHSKLFEEPEDPSNRSFFSEIISSISDVKFSHSGRYMMTRDYLSVKIWDLNMENRPVETYQVHEYLRSKLCSLYENDCIFDKFECCWNGSDSVVMTGSYNNFFRMFDRNTKRDITLEASRENNKPRTVLKPRKVCASGKRKKDEISVDSLDFNKKILHTAWHPKENIIAVATTNNLYIFQDKVN

SEQ ID NO: 10363 - protein, 379 aa, Homo sapiens
MEQLSSANTRFALDLFLALSENNPAGNIFISPFSISSAMAMVFLGTRGNTAAQLSKTFHFNTVEEVHSRFQSLNADINKRGASYILKLANRLYGEKTYNFLPEFLVSTQKTYGADLASVDFQHASEDARKTINQWVKGQTEGKIPELLASGMVDNMTKLVLVNAIYFKGNWKDKFMKEATTNAPFRLNKKDRKTVKMMYQKKKFAYGYIEDLKCRVLELPYQGEELSMVILLPDDIEDESTGLKKIEEQLTLEKLHEWTKPENLDFIEVNVSLPRFKLEESYTLNSDLARLGVQDLFNSSKADLSGMSGARDIFISKIVHKSFVEVNEEGTEAAAATAGIATFCMLMPEENFTADHPFLFFIRHNSSGSILFLGRFSSP

SEQ ID NO: 10364 - protein, 294 aa, Homo sapiens; identical to SEQ ID NO: 4377

SEQ ID NO: 10365 - protein, 723 aa, Homo sapiens
MGILERVVRRNGRVDRSLKDECDTAEKKAKVIAGMNAVEENQGPGESQKVEEASPPAVQQPTDPASPTVATTPEPVGSDAGDKNATKAGDDEPEYEDGRGFGIGELVWGKLRGFSWWPGRIVSWWMTGRSRAAEGTRWVMWFGDGKFSVVCVEKLMPLSSFCSAFHQATYNKQPMYRKAIYEVLQVASSRAGKLFPVCHDSDESDTAKAVEVQNKPMIEWALGGFQPSGPKGLEPPEEEKNPYKEVYTDMWVEPEAAAYAPPPPAKKPRKSTAEKPKVKEIIDERTRERLVYEVRQKCRNIEDICISCGSLNVTLEHPLFVGGMCQNCKNCFLECAYQYDDDGYQSYCTICCGGREVLMCGNNNCCRCFCVECVDLLVGPGAAQAAIKEDPWNCYMCGHKGTYGLLRRREDWPSRLQMFFANNHDQEFDPPKVYPPVPAEKRKPIRVLSLFDGIATGLLVLKDLGIQVDRYIASEVCEDSITVGMVRHQGKIMYVGDVRSVTQKHIQEWGPFDLVIGGSPCNDLSIVNPARKGLYEGTGRLFFEFYRLLHDARPKEGDDRPFFWLFENVVAMGVSDKRDISRFLESNPVMIDAKEVSAAHRARYFWGNLPGMNRPLASTVNDKLELQECLEHGRIAKFSKVRTITTRSNSIKQGKDQHFPVFMNEKEDILWCTEMERVFGFPVHYTDVSNMSRLARQRLLGRSWSVPVIRHLFAPLKEYFACV

SEQ ID NO: 10366 - protein, 629 aa, Homo sapiens
MGCKVLLNIGQQMLRRKVVDCSREETRLSRCLNTFDLVALGVGSTLGAGVYVLAGAVARENAGPAIVISFLIAALASVLAGLCYGEFGARVPKTGSAYLYSYVTVGELWAFITGWNLILSYIIGTSSVARAWSATFDELIGRPIGEFSRTHMTLNAPGVLAENPDIFAVIIILILTGLLTLGVKESAMVNKIFTCINVLVLGFIMVSGFVKGSVKNWQLTEEDFGNTSGRLCLNNDTKEGKPGVGGFMPFGFSGVLSGAATCFYAFVGFDCIATTGEEVKNPQKAIPVGIVASLLICFIAYFGVSAALTLMMPYFCLDNNSPLPDAFKHVGWEGAKYAVAVGSLCALSASLLGSMFPMPRVIYAMAEDGLLFKFLANVNDRTKTPIIATLASGAVAAVMAFLFDLKDLVDLMSIGTLLAYSLVAACVLVLRYQPEQPNLVYQMASTSDELDPADQNELASTNDSQLGFLPEAEMFSLKTILSPKNMEPSKISGLIVNISTSLIAVLIITFCIVTVLGREALTKGALWAVFLLAGSALLCAVVTGVIWRQPESKTKLSFKVPFLPVLPILSIFVNVYLMMQLDQGTWVRFAVWMLIGFIIYFGYGLWHSEEASLDADQARTPDGNLDQCK

SEQ ID NO: 10367 - protein, 323 aa, Homo sapiens
MDSKYQCVKLNDGHFMPVLGFGTYAPAEVPKSKALEAVKLAIEAGFHHIDSAHVYNNEEQVGLAIRSKIADGSVKREDIFYTSKLWSNSHRPELVRPALERSLKNLQLDYVDLYLIHFPVSVKPGEEVIPKDENGKILFDTVDLCATWEAMEKCKDAGLAKSIGVSNFNHRLLEMILNKPGLKYKPVCNQVECHPYFNQRKLLDFCKSKDIVLVAYSALGSHREEPWVDPNSPVLLEDPVLCALAKKHKRTPALIALRYQLQRGVVVLAKSYNEQRIRQNVQVFEFQLTSEEMKAIDGLNRNVRYLTLDIFAGPPNYPFSDEY

SEQ ID NO: 10368 - protein, 271 aa, Homo sapiens
MGSLFPLSLLFFLAAAYPGVGSALGRRTKRAQSPKGSPLAPSGTSVPFWVRMSPEFVAVQPGKSVQLNCSNSCPQPQNSSLRTPLRQGKTLRGPGWVSYQLLDVRAWSSLAHCLVTCAGKTRWATSRITAYKPPHSVILEPPVLKGRKYTLRCHVTQVFPVGYLVVTLRHGSRVIYSESLERFTGLDLANVTLTYEFAAGPRDFWQPVICHARLNLDGLVVRNSSAPITLMLAWSPAPTALASGSIAALVGILLTVGAAYLCKCLAMKSQA

SEQ ID NO: 10369 - protein, 665 aa, Homo sapiens
MEVSGPEDDPFLSQLHQVQCPVCQQMMPAAHINSHLDRCLLLHPAGHAEPAAGSHRAGERAKGPSPPGAKRRRLSESSALKQPATPTAAESSEGEGEEGDDGGETESRESYDAPPTPSGARLIPDFPVARSSSPGRKGSGKRPAAAAAAGSASPRSWDEAEAQEEEEAVGDGDGDGDADADGEDDPGHWDADAAEAATAFGASGGGRPHPRALAAEEIRQMLQGKPLADTMRPDTLQDYFGQSKAVGQDTLLRSLLETNEIPSLILWGPPGCGKTTLAHIIASNSKKHSIRFVTLSATNAKTNDVRDVIKQAQNEKSFFKRKTILFIDEIHRFNKSQQDTFLPHVECGTITLIGATTENPSFQVNAALLSRCRVIVLEKLPVEAMVTILMRAINSLGIHVLDSSRPTDPLSHSSNSSSEPAMFIEDKAVDTLAYLSDGDARAGLNGLQLAVLARLSSRKMFCKKSGQSYSPSRVLITENDVKEGLQRSHILYDRAGEEHYNCISALHKSMRGSDQNASLYWLARMLEGGEDPLYVARRLVRFASEDIGLADPSALTQAVAAYQGCHFIGMPECEVLLAQCVVYFARAPKSIEVYSAYNNVKACLRNHQGPLPPVPLHLRNAPTRLMKDLGYGKGYKYNPMYSEPVDQEYLPEELRGVDFFKQRRC

SEQ ID NO: 10370 - protein, 776 aa, Homo sapiens
MLPGCIFLMILLIPQVKEKFILGVEGQQLVRPKKLPLIQKRDTGHTHDDDILKTYEEELLYEIKLNRKTLVLHLLRSREFLGSNYSETFYSMKGEAFTRHPQIMDHCFYQGSIVHEYDSAASISTCNGLRGFFRINDQRYLIEPVKYSDEGEHLVFKYNLRVPYGANYSCTELNFTRKTVPGDNESEEDSKIKGIHDEKYVELFIVADDTVYRRNGHPHNKLRNRIWGMVNFVNMIYKTLNIHVTLVGIEIWTHEDKIELYSNIETTLLRFSFWQEKILKTRKDFDHVVLLSGKWLYSHVQGISYPGGMCLPYYSTSIIKDLLPDTNIIANRMAHQLGHNLGMQHDEFPCTCPSGKCVMDSDGSIPALKFSKCSQNQYHQYLKDYKPTCMLNIPFPYNFHDFQFCGNKKLDEGEECDCGPAQECTNPCCDAHTCVLKPGFTCAEGECCESCQIKKAGSICRPAKDECDFPEMCTGHSPACPKDQFRVNGFPCKNSEGYCFMGKCPTREDQCSELFDDEAIESHDICYKMNTKGNKFGYCKNKENRFLPCEEKDVRCGKIYCTGGELSSLLGEDKTYHLKDPQKNATVKCKTIFLYHDSTDIGLVASGTKCGEGMVCNNGECLNMEKVYISTNCPSQCNENPVDGHGLQCHCEEGQAPVACEETLHVTNITILVVVLVLVIVGIGVLILLVRYRKCIKLKQVQSPPTETLGVENKGYFGDEQQIRTEPILPEIHFLNQRTPESLESLPTSFSSPHYITLKPASKDSRGIADPNQSAK

SEQ ID NO: 10371 - protein, 1893 aa, Homo sapiens
MARLADYFVLVAFGPHPRGSGEGQGQILQRFPEKDWEDNPFPQGIELFCQPSGWQLCPERNPPTFFVAVLTDINSERHYCACLTFWEPAEPSQETTRVEDATEREEEGDEGGQTHLSPTAPAPSAQLFAPKTLVLVSRLDHTEVFRNSLGLIYAIHVEGLNVCLENVIGNLLTCTVPLAGGSQRTISLGAGDRQVIQTPLADSLPVSRCSVALLFRQLGITNVLSLFCAALTEHKVLFLSRSYQRLADACRGLLALLFPLRYSFTYVPILPAQLLEVLSTPTPFIIGVNAAFQAETQELLDVIVADLDGGTVTIPECVHIPPLPEPLQSQTHSVLSMVLDPELELADLAFPPPTTSTSSLKMQDKELRAVFLRLFAQLLQGYRWCLHVVRIHPEPVIRFHKAAFLGQRGLVEDDFLMKVLEGMAFAGFVSERGVPYRPTDLFDELVAHEVARMRADENHPQRVLRHVQELAEQLYKNENPYPAVAMHKVQRPGESSHLRRVPRPFPRLDEGTVQWIVDQAAAKMQGAPPAVKAERRTTVPSGPPMTAILERCSGLHVNSARRLEVVRNCISYVFEGKMLEAKKLLPAVLRALKGRAARRCLAQELHLHVQQNRAVLDHQQFDFVVRMMNCCLQDCTSLDEHGIAAALLPLVTAFCRKLSPGVTQFAYSCVQEHVVWSTPQFWEAMFYGDVQTHIRALYLEPTEDLAPAQEVGEAPSQEDERSALDVASEQRRLWPTLSREKQQELVQKEESTVFSQAIHYANRMSYLLLPLDSSKSRLLRERAGLGDLESASNSLVTNSMAGSVAESYDTESGFEDAETCDVAGAVVRFINRFVDKVCTESGVTSDHLKGLHVMVPDIVQMHIETLEAVQRESRRLPPIQKPKLLRPRLLPGEECVLDGLRVYLLPDGREEGAGGSAGGPALLPAEGAVFLTTYRVIFTGMPTDPLVGEQVVVRSFPVAALTKEKRISVQTPVDQLLQDGLQLRSCTFQLLKMAFDEEVGSDSAELFRKQLHKLRYPPDIRATFAFTLGSAHTPGRPPRVTKDKGPSLRTLSRNLVKNAKKTIGRQHVTRKKYNPPSWEHRGQPPPEDQEDEISVSEELEPSTLTPSSALKPSDRMTMSSLVERACCRDYQRLGLGTLSSSLSRAKSEPFRISPVNRMYAICRSYPGLLIVPQSVQDNALQRVSRCYRQNRFPVVCWRSGRSKAVLLRSGGLHGKGVVGLFKAQNAPSPGQSQADSSSLEQEKYLQAVVSSMPRYADASGRNTLSGFSSAHMGSHVPSPRARVTTLSNPMAASASRRTAPRGKWGSVRTSGRSSGLGTDVGSRLAGRDALAPPQANGGPPDPGFLRPQRAALYILGDKAQLKGVRSDPLQQWELVPIEVFEARQVKASFKKLLKACVPGCPAAEPSPASFLRSLEDSEWLIQIHKLLQVSVLVVELLDSGSSVLVGLEDGWDITTQVVSLVQLLSDPFYRTLEGFRLLVEKEWLSFGHRFSHRGAHTLAGQSSGFTPVFLQFLDCVHQVHLQFPMEFEFSQFYLKFLGYHHVSRRFRTFLLDSDYERIELGLLYEEKGERRGQVPCRSVWEYVDRLSKRTPVFHNYMYAPEDAEVLRPYSNVSNLKVWDFYTEETLAEGPPYDWELAQGPPEPPEEERSDGGAPQSRRRVVWPCYDSCPRAQPDAISRLLEELQRLETELGQPAERWKDTWDRVKAAQRLEGRPDGRGTPSSLLVSTAPHHRRSLGVYLQEGPVGSTLSLSLDSDQSSGSTTSGSRQAARRSTSTLYSQFQTAESENRSYEGTLYKKGAFMKPWKARWFVLDKTKHQLRYYDHRVDTECKGVIDLAEVEAVAPGTPTMGAPKTVDEKAFFDVKTTRRVYNFCAQDVPSAQQWVDRIQSCLSDA

SEQ ID NO: 10372 - protein, 141 aa, Homo sapiens
MNARGLGSELKDSIPVTELSASGPFESHDLLRKGFSCVKNELLPSHPLELSEKNFQLNQDKMNFSTLRNIQGLFAPLKLQMEFKAVQQVQRLPFLSSSNLSLDVLRGNDETIGFEDILNDPSQSEVMGEPHLMVEYKLGLL

SEQ ID NO: 10373 - protein, 385 aa, Homo sapiens
MAALSGVRWLTRALVSAGNPGAWRGLSTSAAAHAASRSQAEDVRVEGSFPVTMLPGDGVGPELMHAVKEVFKAAAVPVEFQEHHLSEVQNMASEEKLEQVLSSMKENKVAIIGKIHTPMEYKGELASYDMRLRRKLDLFANVVHVKSLPGYMTRHNNLDLVIIREQTEGEYSSLEHESARGVIECLKIVTRAKSQRIAKFAFDYATKKGRGKVTAVHKANIMKLGDGLFLQCCEEVAELYPKIKFETMIIDNCCMQLVQNPYQFDVLVMPNLYGNIIDNLAAGLVGGAGVVPGESYSAEYAVFETGARHPFAQAVGRNIANPTAMLLSASNMLRHLNLEYHSSMIADAVKKVIKVGKVRTRDMGGYSTTTDFIKSVIGHLQTKGS

SEQ ID NO: 10374 - protein, 310 aa, Homo sapiens
MVYKTLFALCILTAGWRVQSLPTSAPLSVSLPTNIVPPTTIWTSSPQNTDADTASPSNGTHNNSVLPVTASAPTSLLPKNISIESREEEITSPGSNWEGTNTDPSPSGFSSTSGGVHLTTTLEEHSSGTPEAGVAATLSQSAAEPPTLISPQAPASSPSSLSTSPPEVFSASVTTNHSSTVTSTQPTGAPTAPESPTEESSSDHTPTSHATAEPVPQEKTPPTTVSGKVMCELIDMETTTTFPRVIMQEVEHALSSGSIAAITVTVIAVVLLVFGVAAYLKIRHSSYGRLLDDHDYGSWGNYNNPLYDDS

SEQ ID NO: 10375 - protein, 118 aa, Homo sapiens
MEEKYGGDVLAGPGGGGGLGPVDVPSARLTKYIVLLCFTKFLKAVGLFESYDLLKAVHIVQFIFILKLGTAFFMVLFQKPFSSGKTITKHQIIGSLKIPGRKEFKDKKLNDPRKLVGN

SEQ ID NO: 10376 - protein, 323 aa, Homo sapiens
MDSKYQCVKLNDGHFMPVLGFGTYAPAEVPKSKALEATKLAIEAGFRHIDSAHLYNNEEQVGLAIRSKIADGSVKREDIFYTSKLWCNSHRPELVRPALERSLKNLQLDYVDLYLIHFPVSVKPGEEVIPKDENGKILFDTVDLCATWEAVEKCKDAGLAKSIGVSNFNRRQLEMILNKPGLKYKPVCNQVECHPYFNQRKLLDFCKSKDIVLVAYSALGSHREEPWVDPNSPVLLEDPVLCALAKKHKRTPALIALRYQLQRGVVVLAKSYNEQRIRQNVQVFEFQLTSEEMKAIDGLNRNVRYLTLDIFAGPPNYPFSDEY

SEQ ID NO: 10377 - protein, 914 aa, Homo sapiens
MSRFFTTGSDSESESSLSGEELVTKPVGGNYGKQPLLLSEDEEDTKRVVRSAKDKRFEELTNLIRTIRNAMKIRDVTKCLEEFELLGKAYGKAKSIVDKEGVPRFYIRILADLEDYLNELWEDKEGKKKMNKNNAKALSTLRQKIRKYNRDFESHITSYKQNPEQSADEDAEKNEEDSEGSSDEDEDEDGVSAATFLKKKSEAPSGESRKFLKKMDDEDEDSEDSEDDEDWDTGSTSSDSDSEEEEGKQTALASRFLKKAPTTDEDKKAAEKKREDKAKKKHDRKSKRLDEEEEEDNEGGEWERVRGGVPLVKEKPKMFAKGTEITHAVVIKKLNEILQARGKKGTDRAAQIELLQLLVQIAAENNLGEGVIVKIKFNIIASLYDYNPNLATYMKPEMWGKCLDCINELMDILFANPNIFVGENILEESENLHNADQPLRVRGCILTLVERMDEEFTKIMQNTDPHSQEYVEHLKDEAQVCAIIERVQRYLEEKGTTEEVCRIYLLRILHTYYKFDYKAHQRQLTPPEGSSKSEQDQAENEGEDSAVLMERLCKYIYAKDRTDRIRTCAILCHIYHHALHSRWYQARDLMLMSHLQDNIQHADPPVQILYNRTMVQLGICAFRQGLTKDAHNALLDIQSSGRAKELLGQGLLLRSLQERNQEQEKVERRRQVPFHLHINLELLECVYLVSAMLLEIPYMAAHESDARRRMISKQFHHQLRVGERQPLLGPPESMREHVVAASKAMKMGDWKTCHSFIINEKMNGKVWDLFPEADKVRTMLVRKIQEESLRTYLFTYSSVYDSISMETLSDMFELDLPTVHSIISKMIINEELMASLDQPTQTVVMHRTEPTAQQNLALQLAEKLGSLVENNERVFDHKQGTYGGYFRDQKDGYRKNEGYMRRGGYRQQQSQTAY

SEQ ID NO: 10378 - protein, 383 aa, Homo sapiens
MSLVDLGKKLLEAARAGQDDEVRILMANGAPFTTDWLGTSPLHLAAQYGHYSTTEVLLRAGVSRDARTKVDRTPLHMAASEGHASIVEVLLKHGADVNAKDMLKMTALHWATEHNHQEVVELLIKYGADVHTQSKFCKTAFDISIDNGNEDLAEILQIAMQNQINTNPESPDTVTIHAATPQFIIGPGGVVNLTDETGVSAVQFGNSSTSVLATLAALAEASAPLSNSSETPVVATEEVVTAESVDGAIQQVVSSGGQQVITIVTDGIQLGNLHSIPTSGIGQPIIVTMPDGQQVLTVPATDIAEETVISEEPPAKRQCIEIIENRVESAEIEEREALQKQLDEANREAQKYRQQLLKKEQEAEAYRQKLEAMTRLQTNKEAV

SEQ ID NO: 10379 - protein, 267 aa, Homo sapiens
MAATFFGEVVKAPCRAGTEDEEEEEEGRRETPEDREVRLQLARKREVRLLRRQTKTSLEVSLLEKYPCSKFIIAIGNNAVAFLSSFVMNSGVWEEVGCAKLWNEWCRTTDTTHLSSTEAFCVFYHLKSNPSVFGSCPRKNMQITILTCRHVTDYKTSESTGSLPSPFLRALKTQNFKDSACCPLLEQPNIVHDLPAAVLSYCQVWKIPAILYLCYTDVMKLDLITVEAFKPILSTRSLKGLVKNIPQSTEILKKLMTTNEIQSNIYT

SEQ ID NO: 10380 - protein, 567 aa, Homo sapiens
MLSAIYTVLAGLLFLPLLVNLCCPYFFQDIGYFLKVAAVGRRVRSYGKRRPARTILRAFLEKARQTPHKPFLLFRDETLTYAQVDRRSNQVARALHDHLGLRQGDCVALLMGNEPAYVWLWLGLVKLGCAMACLNYNIRAKSLLHCFQCCGAKVLLVSPELQAAVEEILPSLKKDDVSIYYVSRTSNTDGIDSFLDKVDEVSTEPIPESWRSEVTFSTPALYIYTSGTTGATLALRTKFSASQFWDDCRKYNVTVIQYIGELLRYLCNSPQKPNDRDHKVRLALGNGLRGDVWRQFVKRFGDICIYEFYAATEGNIGFMNYARKVGAVGRVNYLQKKIITYDLIKYDVEKDEPVRDENGYCVRVPKGEVGLLVCKITQLTPFNGYAGAKAQTEKKKLRDVFKKGDLYFNSGDLLMVDHENFIYFHDRVGDTFRWKGENVATTEVADTVGLVDFVQEVNVYGVHVPDHEGRIGMASIKMKENHEFDGKKLFQHIADYLPSYARPRFLRIQDTIEITGTFKHRKMTLVEEGFNPAVIKDALYFLDDTAKMYVPMTEDIYNAISAKTLKL

SEQ ID NO: 10381 - protein, 267 aa, Homo sapiens
MHLLLFQLLVLLPLGKTTRHQDGRQNQSSLSPVLLPRNQRELPTGNHEEAEEKPDLFVAVPHLVATSPAGEGQRQREKMLSRFGRFWKKPEREMHPSRDSDSEPFPPGTQSLIQPIDGMKMEKSPLREEAKKFWHHFMFRKTPASQGVILPIKSHEVHWETCRTVPFSQTITHEGCEKVVVQNNLCFGKCGSVHFPGAAQHSHTSCSHCLPAKFTTMHLPLNCTELSSVIKVVMLVEECQCKVKTEHEDGHILHAGSQDSFIPGVSA

SEQ ID NO: 10382 - protein, 265 aa, Homo sapiens
MGLRIHFVVDPHGWCCMGLIVFVWLYNIVLIPKIVLFPHYEEGHIPGILIIIFYGISIFCLVALVRASITDPGRLPENPKIPHGEREFWELCNKCNLMRPKRSHHCSRCGHCVRRMDHHCPWINNCVGEDNHWLFLQLCFYTELLTCYALMFSFCHYYYFLPLKKRNLDLFVFRHELAIMRLAAFMGITMLVGITGLFYTQLIGIITDTTSIEKMSNCCEDISRPRKPWQQTFSEVFGTRWKILWFIPFRQRQPLRVPYHFANHV

SEQ ID NO: 10383 - protein, 1302 aa, Homo sapiens
MTTKRSLFVRLVPCRCLRGEEETVTTLDYSHCSLEQVPKEIFTFEKTLEELYLDANQIEELPKQLFNCQSLHKLSLPDNDLTTLPASIANLINLRELDVSKNGIQEFPENIKNCKVLTIVEASVNPISKLPDGFSQLLNLTQLYLNDAFLEFLPANFGRLTKLQILELRENQLKMLPKTMNRLTQLERLDLGSNEFTEVPEVLEQLSGLKEFWMDANRLTFIPGFIGSLKQLTYLDVSKNNIEMVEEGISTCENLQDLLLSSNSLQQLPETIGSLKNITTLKIDENQLMYLPDSIGGLISVEELDCSFNEVEALPSSIGQLTNLRTFAADHNYLQQLPPEIGSWKNITVLFLHSNKLETLPEEMGDMQKLKVINLSDNRLKNLPFSFTKLQQLTAMWLSDNQSKPLIPLQKETDSETQKMVLTNYMFPQQPRTEDVMFISDNESFNPSLWEEQRKQRAQVAFECDEDKDEREAPPREGNLKRYPTPYPDELKNMVKTVQTIVHRLKDEETNEDSGRDLKPHEDQQDINKDVGVKTSESTTTVKSKVDEREKYMIGNSVQKISEPEAEISPGSLPVTANMKASENLKHIVNHDDVFEESEELSSDEEMKMAEMRPPLIETSINQPKVVALSNNKKDDTKETDSLSDEVTHNSNQNNSNCSSPSRMSDSVSLNTDSSQDTSLCSPVKQTHIDINSKIRQEDENFNSLLQNGDILNSSTEEKFKAHDKKDFNLPEYDLNVEERLVLIEKSVDSTATADDTHKLDHINMNLNKLITNDTFQPEIMERSKTQDIVLGTSFLSINSKEETEHLENGNKYPNLESVNKVNGHSEETSQSPNRTEPHDSDCSVDLGISKSTEDLSPQKSGPVGSVVKSHSITNMEIGGLKIYDILSDNGPQQPSTTVKITSAVDGKNIVRSKSATLLYDQPLQVFTGSSSSSDLISGTKAIFKFDSNHNPEEPNIIRGPTSGPQSAPQIYGPPQYNIQYSSSAAVKDTLWHSKQNPQIDHASFPPQLLPRSESTENQSYAKHSANMNFSNHNNVRANTAYHLHQRLGPARHGEMWAISPNDRLIPAVTRSTIQRQSSVSSTASVNLGDPGSTRRAQIPEGDYLSYREFHSAGRTPPMMPGSQRPLSARTYSIDGPNASRPQSARPSINEIPERTMSVSDFNYSRTSPSKRPNARVGSEHSLLDPPGKSKVPRDWREQVLRHIEAKKLEKIRVRVEKDPELGFSISGGVGGRGNPFRPDDDGIFVTRVQPEGPASKLLQPGDKIIQANGYSFINIEHGQAVSLLKTFQNTVELIIVREVSS

SEQ ID NO: 10384 - protein, 1371 aa, Homo sapiens
MTTKRSLFVRLVPCRCLRGEEETVTTLDYSHCSLEQVPKEIFTFEKTLEELYLDANQIEELPKQLFNCQSLHKLSLPDNDLTTLPASIANLINLRELDVSKNGIQEFPENIKNCKVLTIVEASVNPISKLPDGFSQLLNLTQLYLNDAFLEFLPANFGRLTKLQILELRENQLKMLPKTMNRLTQLERLDLGSNEFTEVPEVLEQLSGLKEFWMDANRLTFIPGFIGSLKQLTYLDVSKNNIEMVEEGISTCENLQDLLLSSNSLQQLPETIGSLKNITTLKIDENQLMYLPDSIGGLISVEELDCSFNEVEALPSSIGQLTNLRTFAADHNYLQQLPPEIGSWKNITVLFLHSNKLETLPEEMGDMQKLKVINLSDNRLKNLPFSFTKLQQLTAMWLSDNQSKPLIPLQKETDSETQKMVLTNYMFPQQPRTEDVMFISDNESFNPSLWEEQRKQRAQVAFECDEDKDEREAPPREGNLKRYPTPYPDELKNMVKTVQTIVHRLKDEETNEDSGRDLKPHEDQQDINKDVGVKTSESTTTVKSKVDEREKYMIGNSVQKISEPEAEISPGSLPVTANMKASENLKHIVNHDDVFEESEELSSDEEMKMAEMRPPLIETSINQPKVVALSNNKKDDTKETDSLSDEVTHNSNQNNSNCSSPSRMSDSVSLNTDSSQDTSLCSPVKQTHIDINSKIRQEDENFNSLLQNGDILNSSTEEKFKAHDKKDFNLPEYDLNVEERLVLIEKSVDSTATADDTHKLDHINMNLNKLITNDTFQPEIMERSKTQDIVLGTSFLSINSKEETEHLENGNKYPNLESVNKVNGHSEETSQSPNRTEPHDSDCSVDLGISKSTEDLSPQKSGPVGSVVKSHSITNMEIGGLKIYDILSDNGPQQPSTTVKITSAVDGKNIVRSKSATLLYDQPLQVFTGSSSSSDLISGTKAIFKFDSNHNPEEPNIIRGPTSGPQSAPQIYGPPQYNIQYSSSAAVKDTLWHSKQNPQIDHASFPPQLLPRSESTENQSYAKHSANMNFSNHNNVRANTAYHLHQRLGPARHGEMWAISPNDRLIPAVTRSTIQRQSSVSSTASVNLGDPGSTRRAQIPEGDYLSYREFHSAGRTPPMMPGSQRPLSARTYSIDGPNASRPQSARPSINEIPERTMSVSDFNYSRTSPSKRPNARVGSEHSLLDPPGKSKVPRDWREQVLRHIEAKKLEKMPLSNGQMGQPLRPQANYSQIHHPPQASVARHPSREQLIDYLMLKVAHQPPYTQPHCSPRQGHELAKQEIRVRVEKDPELGFSISGGVGGRGNPFRPDDDGIFVTRVQPEGPASKLLQPGDKIIQANGYSFINIEHGQAVSLLKTFQNTVELIIVREVSS

SEQ ID NO: 10385 - protein, 1710 aa, Homo sapiens
MSLDFGSVALPVQNEDEEYDEEDYEREKELQQLLTDLPHDMLDDDLSSPELQYSDCSEDGTDGQPHHPEQLEMSWNEQMLPKSQSVNGYNEIQSLYAGEKCGNVWEENRSKTEDRHPVYHPEEGGDEGGSGYSPPSKCEQTDLYHLPENFRPYTNGQKQEFNNQATNVIKFSDPQWNHFQGPSCQGLEPYNKVTYKPYQSSAQNNGSPAQEITGSDTFEGLQQQFLGANENSAENMQIIQLQVLNKAKERQLENLIEKLNESERQIRYLNHQLVIIKDEKDGLTLSLRESQKLFQNGKEREIQLEAQIKALETQIQALKVNEEQMIKKSRTTEMALESLKQQLVDLHHSESLQRAREQHESIVMGLTKKYEEQVLSLQKNLDATVTALKEQEDICSRLKDHVKQLERNQEAIKLEKTEIINKLTRSLEESQKQCAHLLQSGSVQEVAQLQFQLQQAQKAHAMSANMNKALQEELTELKDEISLYESAAKLGIHPSDSEGELNIELTESYVDLGIKKVNWKKSKVTSIVQEEDPNEELSKDEFILKLKAEVQRLLGSNSMKRHLVSQLQNDLKDCHKKIEDLHQVKKDEKSIEVETKTDTSEKPKNQLWPESSTSDVVRDDILLLKNEIQVLQQQNQELKETEGKLRNTNQDLCNQMRQMVQDFDHDKQEAVDRCERTYQQHHEAMKTQIRESLLAKHALEKQQLFEAYERTHLQLRSELDKLNKEVTAVQECYLEVCREKDNLELTLRKTTEKEQQTQEKIKEKLIQQLEKEWQSKLDQTIKAMKKKTLDCGSQTDQVTTSDVISKKEMAIMIEEQKCTIQQNLEQEKDIAIKGAMKKLEIELELKHCENITKQVEIAVQNAHQRWLGELPELAEYQALVKAEQKKWEEQHEVSVNKRISFAVSEAKEKWKSELENMRKNILPGKELEEKIHSLQKELELKNEEVPVVIRAELAKARSEWNKEKQEEIHRIQEQNEQDYRQFLDDHRNKINEVLAAAKEDFMKQKTELLLQKETELQTCLDQSRREWTMQEAKRIQLEIYQYEEDILTVLGVLLSDTQKEHISDSEDKQLLEIMSTCSSKWMSVQYFEKLKGCIQKAFQDTLPLLVENADPEWKKRNMAELSKDSASQGTGQGDPGPAAGHHAQPLALQATEAEADKKKVLEIKDLCCGHCFQELEKAKQECQDLKGKLEKCCRHLQHLERKHKAVVEKIGEENNKVVEELIEENNDMKNKLEELQTLCKTPPRSLSAGAIENACLPCSGGALEELRGQYIKAVKKIKCDMLRYIQESKERAAEMVKAEVLRERQETARKMRKYYLICLQQILQDDGKEGAEKKIMNAASKLATMAKLLETPISSKSQSKTTQSALPLTSEMLIAVKKSKRNDVNQKIPCCIESKSNSVNTITRTLCEQAPKRRAACNLQRLLENSEHQSIKHVGSKETHLEFQFGDGSCKHLNSLPRNVSPEFVPCEGEGGFGLHKKKDLLSDNGSESLPHSAAYPFLGTLGNKPSPRCTPGPSESGCMHITFRDSNERLGLKVYKCNPLMESENAASEKSQGLDVQEPPVKDGGDLSDCLGWPSSSATLSFDSREASFVHGRPQGTLEIPSESVKSKQFSPSGYLSDTEESNMICQTMKCQRYQTPYLSEETTYLEPGKISVNCGHPSRHKADRLKSDFKKLSSTLPSSVCQQPSRKLIVPLSSQQDSGFDSPFVNLD

SEQ ID NO: 10386 - protein, 494 aa, Homo sapiens
MMYSPICLTQDEFHPFIEALLPHVRAIAYTWFNLQARKRKYFKKHEKRMSKDEERAVKDELLSEKPEIKQKWASRLLAKLRKDIRQEYREDFVLTVTGKKHPCCVLSNPDQKGKIRRIDCLRQADKVWRLDLVMVILFKGIPLESTDGERLMKSPHCTNPALCVQPHHITVSVKELDLFLAYYVQEQDSGQSGSPSHNDPAKNPPGYLEDSFVKSGVFNVSELVRVSRTPITQGTGVNFPIGEIPSQPYYHDMNSGVNLQRSLSSPPSSKRPKTISIDENMEPSPTGDFYPSPSSPAAGSRTWHERDQDMSSPTTMKKPEKPLFSSASPQDSSPRLSTFPQHHHPGIPGVAHSVISTRTPPPPSPLPFPTQAILPPAPSSYFSHPTIRYPPHLNPQDTLKNYVPSYDPSSPQTSQPNGSGQVVGKVPGHFTPVLAPSPHPSAVRPVTLSMTDTKPITTSTEAYTASGTSQANRYVGLSPRDPSFLHQQQSWYLG

SEQ ID NO: 10387 - protein, 887 aa, Homo sapiens
MNSGGGLPPPSAAASPSSSSLAAAVAVVAPPGVGGVPGGAAVGVKLKYCRYYAKDKTCFYGEECQFLHEDPAAGAAPGLGLHSNSVPLALAGAPVAGFPPGAVAGGGAGPPPGPKKPDLGDPGTGAAAGGGGSSGGLDGPRLAIPGMDGGALTDTSLTDSYFSTSFIGVNGFGSPVETKYPLMQRMTNSSSSPSLLNDSAKPYSAHDPLTSPASSLFNDFGALNISQRRKPRKYRLGMLEERLVPMGSKARKAKNPIGCLADRCKSGVPINMVWWNRVTENNLQTPNPTASEFIPKGGSTSRLSNVSQSNMSAFSQVFSHPSMGSPATAGLAPGMSLSAGSSPLHSPKITPHTSPAPRRRSHTPNPASYMVPSSASTSVNNPVSQTPSSGQVIQKETVGGTTYFYTDTTPAPLTGMVFPNYHIYPPTAPHVAYMQPKANAPSFFMADELRQELINRHLITMAQIDQADMPAVPTEVDSYHSLFPLEPLPPPNRIQKSSNFGYITSCYKAVNSKDDLPYCLRRIHGFRLVNTKCMVLVDMWKKIQHSNIVTLREVFTTKAFAEPSLVFAYDFHAGGETMMSRHFNDPNADAYFTKRKWGQHEGPLPRQHAGLLPESLIWAYIVQLSSALRTIHTAGLACRVMDPTKILITGKTRLRVNCVGVFDVLTFDNSQNNNPLALMAQYQQADLISLGKVVLALACNSLAGIQRENLQKAMELVTINYSSDLKNLILYLLTDQNRMRSVNDIMPMIGARFYTQLDAAQMRNDVIEEDLAKEVQNGRLFRLLAKLGTINERPEFQKDPTWSETGDRYLLKLFRDHLFHQVTEAGAPWIDLSHIISCLNKLDAGVPEKISLISRDEKSVLVVTYSDLKRCFENTFQELIAAANGQL

SEQ ID NO: 10388 - protein, 420 aa, Homo sapiens
MMYSPICLTQDEFHPFIEALLPHVRAIAYTWFNLQARKRKYFKKHEKRMSKDEERAVKDELLSEKPEIKQKWASRLLAKLRKDIRQEYREDFVLTVTGKKHPCCVLSNPDQKGKIRRIDCLRQADKVWRLDLVMVILFKGIPLESTDGERLMKSPHCTNPALCVQPHHITVSVKELDLFLAYYVQEQDSGQSGSPSHNDPAKNPPGYLEDSFVKSGVFNVSELVRVSRTPITQGTGVNFPIGEIPSQPYYHDMNSGVNLQRSLSSPPSSKRPKTISIDENMEPSPTGDFYPSPSSPAAGSRTWHERDQDMSSPTTMKKPEKPLFSSASPQDSSPRLSTFPQHHHPGIPGVAHSVISTRTPPPPSPLPFPTQAILPPAPSSYFSHPTIRYPPHLNPQDTLKNYVPSYDPSSPQTSQSWYLG

SEQ ID NO: 10389 - protein, 279 aa, Homo sapiens
MATRQRESSITSCCSTSSCDADDEGVRGTCEDASLCKRFAVSIGYWHDPYIQHFVRLSKERKAPEINRGYFARVHGVSQLIKAFLRKTECHCQIVNLGAGMDTTFWRLKDEDLLPSKYFEVDFPMIVTRKLHSIKLPTLLIAECVLVYMTPEQSANLLKWAANSFERAMFINYEQVNMGDRFGQIMIENLRRRQCDLAGVETCKSLESQKERLLSNGWETASAVDMMELYNRLPRAEVSRIESLEFLDEMELLEQLMRHYCLCWATKGGNELGLKEITY

SEQ ID NO: 10390 - protein, 704 aa, Homo sapiens
MIARCLLAVRSLRRVGGSRILLRMTLGREVMSPLQAMSSYTVAGRNVLRWDLSPEQIKTRTEELIVQTKQVYDAVGMLGIEEVTYENCLQALADVEVKYIVERTMLDFPQHVSSDKEVRAASTEADKRLSRFDIEMSMRGDIFERIVHLQETCDLGKIKPEARRYLEKSIKMGKRNGLHLPEQVQNEIKSMKKRMSELCIDFNKNLNEDDTFLVFSKAELGALPDDFIDSLEKTDDDKYKITLKYPHYFPVMKKCCIPETRRRMEMAFNTRCKEENTIILQQLLPLRTKVAKLLGYSTHADFVLEMNTAKSTSRVTAFLDDLSQKLKPLGEAEREFILNLKKKECKDRGFEYDGKINAWDLYYYMTQTEELKYSIDQEFLKEYFPIEVVTEGLLNTYQELLGLSFEQMTDAHVWNKSVTLYTVKDKATGEVLGQFYLDLYPREGKYNHAACFGLQPGCLLPDGSRMMAVAALVVNFSQPVAGRPSLLRHDEVRTYFHEFGHVMHQICAQTDFARFSGTNVETDFVEVPSQMLENWVWDVDSLRRLSKHYKDGSPIADDLLEKLVASRLVNTGLLTLRQIVLSKVDQSLHTNTSLDAASEYAKYCSEILGVAATPGTNMPATFGHLAGGYDGQYYGYLWSEVFSMDMFYSCFKKEGIMNPEVGMKYRNLILKPGGSLDGMDMLHNFLKREPNQKAFLMSRGLHAP

SEQ ID NO: 10391 - protein, 739 aa, Homo sapiens
MPALARDGGQLPLLVVFSAMIFGTITNQDLPVIKCVLINHKNNDSSVGKSSSYPMVSESPEDLGCALRPQSSGTVYEAAAVEVDVSASITLQVLVDAPGNISCLWVFKHSSLNCQPHFDLQNRGVVSMVILKMTETQAGEYLLFIQSEATNYTILFTVSIRNTLLYTLRRPYFRKMENQDALVCISESVPEPIVEWVLCDSQGESCKEESPAVVKKEEKVLHELFGTDIRCCARNELGRECTRLFTIDLNQTPQTTLPQLFLKVGEPLWIRCKAVHVNHGFGLTWELENKALEEGNYFEMSTYSTNRTMIRILFAFVSSVARNDTGYYTCSSSKHPSQSALVTIVEKGFINATNSSEDYEIDQYEEFCFSVRFKAYPQIRCTWTFSRKSFPCEQKGLDNGYSISKFCNHKHQPGEYIFHAENDDAQFTKMFTLNIRRKPQVLAEASASQASCFSDGYPLPSWTWKKCSDKSPNCTEEITEGVWNRKANRKVFGQWVSSSTLNMSEAIKGFLVKCCAYNSLGTSCETILLNSPGPFPFIQDNISFYATIGVCLLFIVVLTLLICHKYKKQFRYESQLQMVQVTGSSDNEYFYVDFREYEYDLKWEFPRENLEFGKVLGSGAFGKVMNATAYGISKTGVSIQVAVKMLKEKADSSEREALMSELKMMTQLGSHENIVNLLGACTLSGPIYLIFEYCCYGDLLNYLRSKREKFHRTWTEIFKEHNFSFYPTFQSHPNSSKKK

SEQ ID NO: 10392 - protein, 252 aa, Homo sapiens
MTPLCPRPALCYHFLTSLLRSAMQNARGARQRAEAAVLSGPGPPLGRAAQHGIPRPLSSAGRLSQGCRGASTVGAAGWKGELPKAGGSPAPGPETPAISPSKRARPAEVGGMQLRFARLSEHATAPTRGSARAAGYDLYSAYDYTIPPMEKAVVKTDIQIALPSGCYGRVAPRSGLAAKHFIDVGAGVIDEDYRGNVGVVLFNFGKEKFEVKKGDRIAQLICERIFYPEIEEVQALDDTERGSGGFGSTGKN

SEQ ID NO: 10393 - protein, 1038 aa, Homo sapiens
MWRCGGRQGLCVLRRLSGGHAHHRAWRWNSNRACERALQYKLGDKIHGFTVNQVTSVPELFLTAVKLTHDDTGARYLHLAREDTNNLFSVQFRTTPMDSTGVPHILEHTVLCGSQKYPCRDPFFKMLNRSLSTFMNAFTASDYTLYPFSTQNPKDFQNLLSVYLDATFFPCLRELDFWQEGWRLEHENPSDPQTPLVFKGVVFNEMKGAFTDNERIFSQHLQNRLLPDHTYSVVSGGDPLCIPELTWEQLKQFHATHYHPSNARFFTYGNFPLEQHLKQIHEEALSKFQKIEPSTVVPAQTPWDKPREFQITCGPDSFATDPSKQTTISVSFLLPDITDTFEAFTLSLLSSLLTSGPNSPFYKALIESGLGTDFSPDVGYNGYTREAYFSVGLQGIAEKDIETVRSLIDRTIDEVVEKGFEDDRIEALLHKIEIQMKHQSTSFGLMLTSYIASCWNHDGDPVELLKLGNQLAKFRQCLQENPKFLQEKVKQYFKNNQHKLTLSMRPDDKYHEKQAQVEATKLKQKVEALSPGDRQQIYEKGLELRSQQSKPQDASCLPALKVSDIEPTIPVTELDVVLTAGDIPVQYCAQPTNGMVYFRAFSSLNTLPEELRPYVPLFCSVLTKLGCGLLDYREQAQQIELKTGGMSASPHVLPDDSHMDTYEQVGVLFSSLCLDRNLPDMMQLWSEIFNNPCFEEEEHFKVLVKMTAQELANGIPDSGHLYASIRAGRTLTPAGDLQETFSGMDQVRLMKRIAEMTDIKPILRKLPRIKKHLLNGDNMRCSVNATPQQMPQTEKAVEDFLRSIGRSKKERRPVRPHTVEKPVPSSSGGDAHVPHGSQVIRKLVMEPTFKPWQMKTHFLMPFPVNYVGECIRTVPYTDPDHASLKILARLMTAKFLHTEIREKGGAYGGGAKLSHNGIFTLYSYRDPNTIETLQSFGKAVDWAKSGKFTQQDIDEAKLSVFSTVDAPVAPSDKGMDHFLYGLSDEMKQAHREQLFAVSHDKLLAVSDRYLGTGKSTHGLAILGPENPKIAKDPSWIIQ

SEQ ID NO: 10394 - protein, 620 aa, Homo sapiens
MSALTPPTDMPTPTTDKITQAAMETIYLCKFRVSMDGEWLCLRELDDISLTPDPEPTHEDPNYLMANERMNLMNMAKLSIKGLIESALNLGRTLDSDYAPLQQFFVVMEHCLKHGLKAKKTFLGQNKSFWGPLELVEKLVPEAAEITASVKDLPGLKTPVGRGRAWLRLALMQKKLSEYMKALINKKELLSEFYEPNALMMEEEGAIIAGLLVGLNVIDANFCMKGEDLDSQVGVIDFSMYLKDGNSSKGTEGDGQITAILDQKNYVEELNRHLNATVNNLQAKVDALEKSNTKLTEELAVANNRIITLQEEMERVKEESSYILESNRKGPKQDRTAEGQALSEARKHLKEETQLRLDVEKELEMQISMRQEMELAMKMLEKDVCEKQDALVSLRQQLDDLRALKHELAFKLQSSDLGVKQKSELNSRLEEKTNQMAATIKQLEQRLRQAERSRQSAELDNRLFKQDFGDKINSLQLEVEELTRQRNQLELELKQEKERRLQNDRSIPGRGSQKSESKMDGKHKMQEENVKLKKPLEESHRLQPHPMDEQDQLLLSEKPQLCQLCQEDGSLTKNVCKNCSGTFCDACSTNELPLPSSIKLERVCNPCHKHLMKQYSTSPS

SEQ ID NO: 10395 - protein, 304 aa, Homo sapiens
MSSIKHLVYAVIRFLREQSQMDTYTSDEQESLEVAIQCLETVFKISPEDTHLAVSQPLTEMFTSSFCKNDVLPLSNSVPEDVGKADQLKDEGNNHMKEENYAAAVDCYTQAIELDPNNAVYYCNRAAAQSKLGHYTDAIKDCEKAIAIDSKYSKAYGRMGLALTALNKFEEAVTSYQKALDLDPENDSYKSNLKIAEQKLREVSSPTGTGLSFDMASLINNPAFISMAASLMQNPQVQQLMSGMMTNAIGGPAAGVGGLTDLSSLIQAGQQFAQQIQQQNPELIEQLRNHIRSRSFSSSAEEHS

SEQ ID NO: 10396 - protein, 2037 aa, Homo sapiens
MLEAIDKNRALHAAERLQTKLRERGDVANEDKLSLLKSVLQSPLFSQILSLQTSVQQLKDQVNIATSATSNIEYAHVPHLSPAVIPTLQNESFLLSPNNGNLEALTGPGIPHINGKPACDEFDQLIKNMAQGRHVEVFELLKPPSGGLGFSVVGLRSENRGELGIFVQEIQEGSVAHRDGRLKETDQILAINGQALDQTITHQQAISILQKAKDTVQLVIARGSLPQLVSPIVSRSPSAASTISAHSNPVHWQHMETIELVNDGSGLGFGIIGGKATGVIVKTILPGGVADQHGRLCSGDHILKIGDTDLAGMSSEQVAQVLRQCGNRVKLMIARGAIEERTAPTALGITLSSSPTSTPELRVDASTQKGEESETFDVELTKNVQGLGITIAGYIGDKKLEPSGIFVKSITKSSAVEHDGRIQIGDQIIAVDGTNLQGFTNQQAVEVLRHTGQTVLLTLMRRGMKQEAELMSREDVTKDADLSPVNASIIKENYEKDEDFLSSTRNTNILPTEEEGYPLLSAEIEEIEDAQKQEAALLTKWQRIMGINYEIVVAHVSKFSENSGLGISLEATVGHHFIRSVLPEGPVGHSGKLFSGDELLEVNGITLLGENHQDVVNILKELPIEVTMVCCRRTVPPTTQSELDSLDLCDIELTEKPHVDLGEFIGSSETEDPVLAMTDAGQSTEEVQAPLAMWEAGIQHIELEKGSKGLGFSILDYQDPIDPASTVIIIRSLVPGGIAEKDGRLLPGDRLMFVNDVNLENSSLEEAVEALKGAPSGTVRIGVAKPLPLSPEEGYVSAKEDSFLYPPHSCEEAGLADKPLFRADLALVGTNDADLVDESTFESPYSPENDSIYSTQASILSLHGSSCGDGLNYGSSLPSSPPKDVIENSCDPVLDLHMSLEELYTQNLLQRQDENTPSVDISMGPASGFTINDYTPANAIEQQYECENTIVWTESHLPSEVISSAELPSVLPDSAGKGSEYLLEQSSLACNAECVMLQNVSKESFERTINIAKGNSSLGMTVSANKDGLGMIVRSIIHGGAISRDGRIAIGDCILSINEESTISVTNAQARAMLRRHSLIGPDIKITYVPAEHLEEFKISLGQQSGRVMALDIFSSYTGRDIPELPEREEGEGEESELQNTAYSNWNQPRRVELWREPSKSLGISIVGGRGMGSRLSNGEVMRGIFIKHVLEDSPAGKNGTLKPGDRIVEVDGMDLRDASHEQAVEAIRKAGNPVVFMVQSIINRPRAPSQSESEPEKAPLCSVPPPPPSAFAEMGSDHTQSSASKISQDVDKEDEFGYSWKNIRERYGTLTGELHMIELEKGHSGLGLSLAGNKDRSRMSVFIVGIDPNGAAGKDGRLQIADELLEINGQILYGRSHQNASSIIKCAPSKVKIIFIRNKDAVNQMAVCPGNAVEPLPSNSENLQNKETEPTVTTSDAAVDLSSFKNVQHLELPKDQGGLGIAISEEDTLSGVIIKSLTEHGVAATDGRLKVGDQILAVDDEIVVGYPIEKFISLLKTAKMTVKLTIHAENPDSQAVPSAAGAASGEKKNSSQSLMVPQSGSPEPESIRNTSRSSTPAIFASDPATCPIIPGCETTIEISKGRTGLGLSIVGGSDTLLGAIIIHEVYEEGAACKDGRLWAGDQILEVNGIDLRKATHDEAINVLRQTPQRVRLTLYRDEAPYKEEEVCDTLTIELQKKPGKGLGLSIVGKRNDTGVFVSDIVKGGIADADGRLMQGDQILMVNGEDVRNATQEAVAALLKCSLGTVTLEVGRIKAGPFHSERRPSQSSQVSEGSLSSFTFPLSGSSTSESLESSSKKNALASEIQGLRTVEMKKGPTDSLGISIAGGVGSPLGDVPIFIAMMHPTGVAAQTQKLRVGDRIVTICGTSTEGMTHTQAVNLLKNASGSIEMQVVAGGDVSVVTGHQQEPASSSLSFTGLTSSSIFQDDLGPPQCKSITLERGPDGLGFSIVGGYGSPHGDLPIYVKTVFAKGAASEDGRLKRGDQIIAVNGQSLEGVTHEEAVAILKRTKGTVTLMVLS

SEQ ID NO: 10397 - protein, 469 aa, Homo sapiens
MAAASPLRDCQAWKDARLPLSTTSNEACKLFDATLTQYVKWTNDKSLGGIEGCLSKLKAADPTFVMGHAMATGLVLIGTGSSVKLDKELDLAVKTMVEISRTQPLTRREQLHVSAVETFANGNFPKACELWEQILQDHPTDMLALKFSHDAYFYLGYQEQMRDSVARIYPFWTPDIPLSSYVKGIYSFGLMETNFYDQAEKLAKEALSINPTDAWSVHTVAHIHEMKAEIKDGLEFMQHSETFWKDSDMLACHNYWHWALYLIEKGEYEAALTIYDTHILPSLQANDAMLDVVDSCSMLYRLQMEGVSVGQRWQDVLPVARKHSRDHILLFNDAHFLMASLGAHDPQTTQELLTTLRDASESPGENCQHLLARDVGLPLCQALVEAEDGNPDRVLELLLPIRYRIVQLGGSNAQRDVFNQLLIHAALNCTSSVHKNVARSLLMERDALKPNSPLTERLIRKAATVHLMQ

SEQ ID NO: 10398 - protein, 253 aa, Homo sapiens
MKHINLSFAACGFLGIYHLGAASALCRHGKKLVKDVKAFAGASAGSLVASVLLTAPEKIEECNQFTYKFAEEIRRQSFGAVTPGYDFMARLRSGMESILPPSAHELAQNRLHVSITNAKTRENHLVSTFSSREDLIKVLLASSFVPIYAGLKLVEYKGQKWVDGGLTNALPILPVGRTVTISPFSGRLDISPQDKGQLDLYVNIAKQDIMLSLANLVRLNQALFPPSKRKMESLYQCGFDDTVKFLLKENWFE

SEQ ID NO: 10399 - protein, 1117 aa, Homo sapiens
MEILWKTLTWILSLIMASSEFHSDHRLSYSSQEEFLTYLEHYQLTIPIRVDQNGAFLSFTVKNDKHSRRRRSMDPIDPQQAVSKLFFKLSAYGKHFHLNLTLNTDFVSKHFTVEYWGKDGPQWKHDFLDNCHYTGYLQDQRSTTKVALSNCVGLHGVIATEDEEYFIEPLKNTTEDSKHFSYENGHPHVIYKKSALQQRHLYDHSHCGVSDFTRSGKPWWLNDTSTVSYSLPINNTHIHHRQKRSVSIERFVETLVVADKMMVGYHGRKDIEHYILSVMNIVAKLYRDSSLGNVVNIIVARLIVLTEDQPNLEINHHADKSLDSFCKWQKSILSHQSDGNTIPENGIAHHDNAVLITRYDICTYKNKPCGTLGLASVAGMCEPERSCSINEDIGLGSAFTIAHEIGHNFGMNHDGIGNSCGTKGHEAAKLMAAHITANTNPFSWSACSRDYITSFLDSGRGTCLDNEPPKRDFLYPAVAPGQVYDADEQCRFQYGATSRQCKYGEVCRELWCLSKSNRCVTNSIPAAEGTLCQTGNIEKGWCYQGDCVPFGTWPQSIDGGWGPWSLWGECSRTCGGGVSSSLRHCDSPAPSGGGKYCLGERKRYRSCNTDPCPLGSRDFREKQCADFDNMPFRGKYYNWKPYTGGGVKPCALNCLAEGYNFYTERAPAVIDGTQCNADSLDICINGECKHVGCDNILGSDAREDRCRVCGGDGSTCDAIEGFFNDSLPRGGYMEVVQIPRGSVHIEVREVAMSKNYIALKSEGDDYYINGAWTIDWPRKFDVAGTAFHYKRPTDEPESLEALGPTSENLIVMVLLQEQNLGIRYKFNVPITRTGSGDNEVGFTWNHQPWSECSATCAGGVQRQEVVCKRLDDNSIVQNNYCDPDSKPPENQRACNTEPCPPEWFIGDWLECSKTCDGGMRTRAVLCIRKIGPSEEETLDYSGCLTHRPVEKEPCNNQSCPPQWVALDWSECTPKCGPGFKHRIVLCKSSDLSKTFPAAQCPEESKPPVRIRCSLGRCPPPRWVTGDWGQCSAQCGLGQQMRTVQCLSYTGQASSDCLETVRPPSMQQCESKCDSTPISNTEECKDVNKVAYCPLVLKFKFCSRAYFRQMCCKTCQGH

SEQ ID NO: 10400 - protein, 41 aa, Homo sapiens
MKFFVFALILALMLSMTGADSHAKEKHHSHRGYRSNYLYDN

SEQ ID NO: 10401 - protein, 52 aa, Homo sapiens
MKFLVFAFILALMVSMIGADSSEEYGYGPYQPVPEQPLYPQPYQPQYQQYTF

SEQ ID NO: 10402 - protein, 472 aa, Homo sapiens
MSNIYIQEPPTNGKVLLKTTAGDIDIELWSKEAPKACRNFIQLCLEAYYDNTIFHRVVPGFIVQGGDPTGTGSGGESIYGAPFKDEFHSRLRFNRRGLVAMANAGSHDNGSQFFFTLGRADELNNKHTIFGKVTGDTVYNMLRLSEVDIDDDERPHNPHKIKSCEVLFNPFDDIIPREIKRLKKEKPEEEVKKLKPKGTKNFSLLSFGEEAEEEEEEVNRVSQSMKGKSKSSHDLLKDDPHLSSVPVVESEKGDAPDLVDDGEDESAEHDEYIDGDEKNLMRERIAKKLKKDTSANVKSAGEGEVEKKSVSRSEELRKEARQLKRELLAAKQKKVENAAKQAEKRSEEEEAPPDGAVAEYRREKQKYEALRKQQSKKGTSREDQTLALLNQFKSKLTQAIAETPENDIPETEVEDDEGWMSHVLQFEDKSRKVKDASMQDSDTFEIYDPRNPVNKRRREESKKLMREKKERR

SEQ ID NO: 10403 - protein, 228 aa, Homo sapiens
MAAPPQPVTHLIFDMDGLLLDTERLYSVVFQEICNRYDKKYSWDVKSLVMGKKALEAAQIIIDVLQLPMSKEELVEESQTKLKEVFPTAALMPGAEKLIIHLRKHGIPFALATSSGSASFDMKTSRHKEFFSLFSHIVLGDDPEVQHGKPDPDIFLACAKRFSPPPAMEKCLVFEDAPNGVEAALAAGMQVVMVPDGNLSRDLTTKATLVLNSLQDFQPELFGLPSYE

SEQ ID NO: 10404 - protein, 297 aa, Homo sapiens
MQRARPTLWAAALTLLVLLRGPPVARAGASSAGLGPVVRCEPCDARALAQCAPPPAVCAELVREPGCGCCLTCALSEGQPCGIYTERCGSGLRCQPSPDEARPLQALLDGRGLCVNASAVSRLRAYLLPAPPAPGEPPAPGNASESEEDRSAGSVESPSVSSTHRVSDPKFHPLHSKIIIIKKGHAKDSQRYKVDYESQSTDTQNFSSESKRETEYGPCRREMEDTLNHLKFLNVLSPRGVHIPNCDKKGFYKKKQCRPSKGRKRGFCWCVDKYGQPLPGYTTKGKEDVHCYSMQSK

SEQ ID NO: 10405 - protein, 370 aa, Homo sapiens
MDSELKEEIPVHEEFILCGGAETQVLKCGPWTDLFHDQSVKRPKLLIFIIPGNPGFSAFYVPFAKALYSLTNRRFPVWTISHAGHALAPKDKKILTTSEDSNAQEIKDIYGLNGQIEHKLAFLRTHVPKDMKLVLIGHSIGSYFTLQMLKRVPELPVIRAFLLFPTIERMSESPNGRIATPLLCWFRYVLYVTGYLLLKPCPETIKSLLIRRGLQVMNLENEFSPLNILEPFCLANAAYLGGQEMMEVVKRDDETIKEHLCKLTFYYGTIDPWCPKEYYEDIKKDFPEGDIRLCEKNIPHAFITHFNQEMADMIADSLKDDLSKIGNPSWHYHSLRTMRCPSAQILKPPDERFGSDLLPTYWWKNQISRD

SEQ ID NO: 10406 - protein, 686 aa, Homo sapiens
MGRIHQAMVTSLNEDNESVTVEWIENGDTKGKEIDLESIFSLNPDLVPDEEIEPSPETPPPPASSAKVNKIVKNRRTVASIKNDPPSRDNRVVGSARARPSQFPEQSSSAQQNGSVSDISPVQAAKKEFGPPSRRKSNCVKEVEKLQEKREKRRLQQQELREKRAQDVDATNPNYEIMCMIRDFRGSLDYRPLTTADPIDEHRICVCVRKRPLNKKETQMKDLDVITIPSKDVVMVHEPKQKVDLTRYLENQTFRFDYAFDDSAPNEMVYRFTARPLVETIFERGMATCFAYGQTGSGKTHTMGGDFSGKNQDCSKGIYALAARDVFLMLKKPNYKKLELQVYATFFEIYSGKVFDLLNRKTKLRVLEDGKQQVQVVGLQEREVKCVEDVLKLIDIGNSCRTSGQTSANAHSSRSHAVFQIILRRKGKLHGKFSLIDLAGNERGADTSSADRQTRLEGAEINKSLLALKECIRALGRNKPHTPFRASKLTQVLRDSFIGENSRTCMIATISPGMASCENTLNTLRYANRVKELTVDPTAAGDVRPIMHHPPNQIDDLETQWGVGSSPQRDDLKLLCEQNEEEVSPQLFTFHEAVSQMVEMEEQVVEDHRAVFQESIRWLEDEKALLEMTEEVDYDVDSYATQLEAILEQKIDILTELRDKVKSFRAALQEEEQASKQINPKRPRAL

SEQ ID NO: 10407 - protein, 278 aa, Homo sapiens
MAALFLKRLTLQTVKSENSCIRCFGKHILQKTAPAQLSPIASAPRLSFLIHAKAFSTAEDTQNEGKKTKKNKTAFSNVGRKISQRVIHLFDEKGNDLGNMHRANVIRLMDERDLRLVQRNTSTEPAEYQLMTGLQILQERQRLREMEKANPKTGPTLRKELILSSNIGQHDLDTKTKQIQQWIKKKHLVQITIKKGKNVDVSENEMEEIFHQILQTMPGIATFSSRPQAVQGGKALMCVLRAFSKNEEKAYKETQETQERDTLNKDHGNDKESNVLHQ

SEQ ID NO: 10408 - protein, 784 aa, Homo sapiens
MDADDSRAPKGSLRKFLEHLSGAGKAIGVLTSGGDAQGMNAAVRAVVRMGIYVGAKVYFIYEGYQGMVDGGSNIAEADWESVSSILQVGGTIIGSARCQAFRTREGRLKAACNLLQRGITNLCVIGGDGSLTGANLFRKEWSGLLEELARNGQIDKEAVQKYAYLNVVGMVGSIDNDFCGTDMTIGTDSALHRIIEVVDAIMTTAQSHQRTFVLEVMGRHCGYLALVSALACGADWVFLPESPPEEGWEEQMCVKLSENRARKKRLNIIIVAEGAIDTQNKPITSEKIKELVVTQLGYDTRVTILGHVQRGGTPSAFDRILASRMGVEAVIALLEATPDTPACVVSLNGNHAVRLPLMECVQMTQDVQKAMDERRFQDAVRLRGRSFAGNLNTYKRLAIKLPDDQIPKTNCNVAVINVGAPAAGMNAAVRSAVRVGIADGHRMLAIYDGFDGFAKGQIKEIGWTDVGGWTGQGGSILGTKRVLPGKYLEEIATQMRTHSINALLIIGGFEAYLGLLELSAAREKHEEFCVPMVMVPATVSNNVPGSDFSIGADTALNTITDTCDRIKQSASGTKRRVFIIETMGGYCGYLANMGGLAAGADAAYIFEEPFDIRDLQSNVEHLTEKMKTTIQRGLVLRNESCSENYTTDFIYQLYSEEGKGVFDCRKNVLGHMQQGGAPSPFDRNFGTKISARAMEWITAKLKEARGRGKKFTTDDSICVLGISKRNVIFQPVAELKKQTDFEHRIPKEQWWLKLRPLMKILAKYKASYDVSDSGQLEHVQPWSV

SEQ ID NO: 10409 - protein, 197 aa, Homo sapiens
MHFRNFNYSFSSLIACVANSDIFSESETRAKFESLFRTYDKDITFQYFKSFKRVRINFSNPFSAADARLQLHKTEFLGKEMKLYFAQTLHIGSSHLAPPNPDKQFLISPPASPPVGWKQVEDATPVINYDLLYAISKLGPGEKYELHAATDTTPSVVVHVCESDQEKEEEEEMERMRRPKPKIIQTRRPEYTPIHLS

SEQ ID NO: 10410 - protein, 589 aa, Homo sapiens
MLHLHHSCLCFRSWLPAMLAVLLSLAPSASSDISASRPNILLLMADDLGIGDIGCYGNNTMRTPNIDRLAEDGVKLTQHISAASLCTPSRAAFLTGRYPVRSGMVSSIGYRVLQWTGASGGLPTNETTFAKILKEKGYATGLIGKWHLGLNCESASDHCHHPLHHGFDHFYGMPFSLMGDCARWELSEKRVNLEQKLNFLFQVLALVALTLVAGKLTHLIPVSWMPVIWSALSAVLLLASSYFVGALIVHADCFLMRNHTITEQPMCFQRTTPLILQEVASFLKRNKHGPFLLFVSFLHVHIPLITMENFLGKSLHGLYGDNVEEMDWMVGRILDTLDVEGLSNSTLIYFTSDHGGSLENQLGNTQYGGWNGIYKGGKGMGGWEGGIRVPGIFRWPGVLPAGRVIGEPTSLMDVFPTVVRLAGGEVPQDRVIDGQDLLPLLLGTAQHSDHEFLMHYCERFLHAARWHQRDRGTMWKVHFVTPVFQPEGAGACYGRKVCPCFGEKVVHHDPPLLFDLSRDPSETHILTPASEPVFYQVMERVQQAVWEHQRTLSPVPLQLDRLGNIWRPWLQPCCGPFPLCWCLREDDPQ

SEQ ID NO: 10411 - protein, 718 aa, Homo sapiens
MRAVLDTADIAIVALYFILVMCIGFFAMWKSNRSTVSGYFLAGRSMTWVAIGASLFVSNIGSEHFIGLAGSGAASGFAVGAWEFNALLLLQLLGWVFIPIYIRSGVYTMPEYLSKRFGGHRIQVYFAALSLILYIFTKLSVDLYSGALFIQESLGWNLYVSVILLIGMTALLTVTGGLVAVIYTDTLQALLMIIGALTLMIISIMEIGGFEEVKRRYMLASPDVTSILLTYNLSNTNSCNVSPKKEALKMLRNPTDEDVPWPGFILGQTPASVWYWCADQVIVQRVLAAKNIAHAKGSTLMAGFLKLLPMFIIVVPGMISRILFTDDIACINPEHCMLVCGSRAGCSNIAYPRLVMKLVPVGLRGLMMAVMIAALMSDLDSIFNSASTIFTLDVYKLIRKSASSRELMIVGRIFVAFMVVISIAWVPIIVEMQGGQMYLYIQEVADYLTPPVAALFLLAIFWKRCNEQGAFYGGMAGFVLGAVRLILAFAYRAPECDQPDNRPGFIKDIHYMYVATGLFWVTGLITVIVSLLTPPPTKEQIRTTTFWSKKNLVVKENCSPKEEPYKMQEKSILRCSENNETINHIIPNGKSEDSIKGLQPEDVNLLVTCREEGNPVASLGHSEAETPVDAYSNGQAALMGEKERKKETDDGGRYWKFIDWFCGFKSKSLSKRSLRDLMEEEAVCLQMLEETRQVKVILNIGLFAVCSLGIFMFVYFSL

SEQ ID NO: 10412 - protein, 593 aa, Homo sapiens
MRSAARRGRAAPAARDSLPVLLFLCLLLKTCEPKTANAFKPNILLIMADDLGTGDLGCYGNNTLRTPNIDQLAEEGVRLTQHLAAAPLCTPSRAAFLTGRHSFRSGMDASNGYRALQWNAGSGGLPENETTFARILQQHGYATGLIGKWHQGVNCASRGDHCHHPLNHGFDYFYGMPFTLTNDCDPGRPPEVDAALRAQLWGYTQFLALGILTLAAGQTCGFFSVSARAVTGMAGVGCLFFISWYSSFGFVRRWNCILMRNHDVTEQPMVLEKTASLMLKEAVSYIERHKHGPFLLFLSLLHVHIPLVTTSAFLGKSQHGLYGDNVEEMDWLIGKVLNAIEDNGLKNSTFTYFTSDHGGHLEARDGHSQLGGWNGIYKGGKGMGGWEGGIRVPGIFHWPGVLPAGRVIGEPTSLMDVFPTVVQLVGGEVPQDRVIDGHSLVPLLQGAEARSAHEFLFHYCGQHLHAARWHQKDSGSVWKVHYTTPQFHPEGAGACYGRGVCPCSGEGVTHHRPPLLFDLSRDPSEARPLTPDSEPLYHAVIARVGAAVSEHRQTLSPVPQQFSMSNILWKPWLQPCCGHFPFCSCHEDGDGTP

SEQ ID NO: 10413 - protein, 1332 aa, Homo sapiens
MAEAGLRGWLLWALLLRLAQSEPYTTIHQPGYCAFYDECGKNPELSGSLMTLSNVSCLSNTPARKITGDHLILLQKICPRLYTGPNTQACCSAKQLVSLEASLSITKALLTRCPACSDNFVNLHCHNTCSPNQSLFINVTRVAQLGAGQLPAVVAYEAFYQHSFAEQSYDSCSRVRVPAAATLAVGTMCGVYGSALCNAQRWLNFQGDTGNGLAPLDITFHLLEPGQAVGSGIQPLNEGVARCNESQGDDVATCSCQDCAASCPAIARPQALDSTFYLGQMPGSLVLIIILCSVFAVVTILLVGFRVAPARDKSKMVDPKKGTSLSDKLSFSTHTLLGQFFQGWGTWVASWPLTILVLSVIPVVALAAGLVFTELTTDPVELWSAPNSQARSEKAFHDQHFGPFFRTNQVILTAPNRSSYRYDSLLLGPKNFSGILDLDLLLELLELQERLRHLQVWSPEAQRNISLQDICYAPLNPDNTSLYDCCINSLLQYFQNNRTLLLLTANQTLMGQTSQVDWKDHFLYCANAPLTFKDGTALALSCMADYGAPVFPFLAIGGYKGKDYSEAEALIMTFSLNNYPAGDPRLAQAKLWEEAFLEEMRAFQRRMAGMFQVTFMAERSLEDEINRTTAEDLPIFATSYIVIFLYISLALGSYSSWSRVMVDSKATLGLGGVAVVLGAVMAAMGFFSYLGIRSSLVILQVVPFLVLSVGADNIFIFVLEYQRLPRRPGEPREVHIGRALGRVAPSMLLCSLSEAICFFLGALTPMPAVRTFALTSGLAVILDFLLQMSAFVALLSLDSKRQEASRLDVCCCVKPQELPPPGQGEGLLLGFFQKAYAPFLLHWITRGVVLLLFLALFGVSLYSMCHISVGLDQELALPKDSYLLDYFLFLNRYFEVGAPVYFVTTLGYNFSSEAGMNAICSSAGCNNFSFTQKIQYATEFPEQSYLAIPASSWVDDFIDWLTPSSCCRLYISGPNKDKFCPSTVNSLNCLKNCMSITMGSVRPSVEQFHKYLPWFLNDRPNIKCPKGGLAAYSTSVNLTSDGQVLASRFMAYHKPLKNSQDYTEALRAARELAANITADLRKVPGTDPAFEVFPYTITNVFYEQYLTILPEGLFMLSLCLVPTFAVSCLLLGLDLRSGLLNLLSIVMILVDTVGFMALWGISYNAVSLINLVSAVGMSVEFVSHITRSFAISTKPTWLERAKEATISMGSAVFAGVAMTNLPGILVLGLAKAQLIQIFFFRLNLLITLLGLLHGLVFLPVILSYVGPDVNPALALEQKRAEEAVAAVMVASCPNHPSRVSTADNIYVNHSFEGSIKGAGAISNFLPNNGRQF

SEQ ID NO: 10414 - protein, 205 aa, Homo sapiens
MSVDPMTYEAQFFGFTPQTCMLRIYIAFQDYLFEVMQAVEQVILKKLDGIPDCDISPVQIRKCTEKFLCFMKGHFDNLFSKMEQLFLQLILRIPSNILLPEDKCKETPYSEEDFQHLQKEIEQLQEKYKTELCTKQALLAELEEQKIVQAKLKQTLTFFDELHNVGRDHGTSDFRESLVSLVQNSRKLQNIRDNVEKESKRLKIS

SEQ ID NO: 10415 - protein, 180 aa, Homo sapiens
MESWWGLPCLAFLCFLMHARGQRDFDLADALDDPEPTKKPNSDIYPKPKPPYYPQPENPDSGGNIYPRPKPRPQPQPGNSGNSGGYFNDVDRDDGRYPPRPRPRPPAGGGGGGYSSYGNSDNTHGGDHHSTYGNPEGNMVAKIVSPIVSVVVVTLLGAAASYFKLNNRRNCFRTHEPENV

SEQ ID NO: 10416 - protein, 199 aa, Homo sapiens
MTSCGQQSLNVLAVLFSLLFSAVLSAHFRVCEPYTDHKGRYHFGFHCPRLSDNKTFILCCHHNNTVFKYCCNETEFQAVMQANLTASSEGYMHNNYTALLGVWIYGFFVLMLLVLDLLYYSAMNYDICKVYLARWGIQGRWMKQDPRRWGNPARAPRPGQRAPQPQPPPGPLPQAPQAVHTLRGDAHSPPLMTFQSSSA

SEQ ID NO: 10417 - protein, 76 aa, Homo sapiens
MARGAALALLLFGLLGVLVAAPGFGDLRLQAARGGRPGVACHSHALRPGPKFGIARSLRPGWWGEGKEKLEKNFEP

SEQ ID NO: 10418 - protein, 177 aa, Homo sapiens
MARGAALALLLFGLLGVLVAAPDGGFDLSDALPDNENKKPTAIPKKPSAGDDFDLGDAVVDGENDDPRPPNPPKPMPNPNPNHPSSSGSFSDADLADGVSGGEGKGGSDGGGSHRKEGEEADAPGVIPGIVGAVVVAVAGAISSFIAYQKKKLCFKENGQLAGSLGPCIGIRREADG

SEQ ID NO: 10419 - protein, 169 aa, Homo sapiens
MARGAALALLLFGLLGVLVAAPDGGFDLSDALPGDDFDLGDAVVDGENDDPRPPNPPKPMPNPNPNHPSSSGSFSDADLADGVSGGEGKGGSDGGGSHRKEGEEADAPGVIPGIVGAVVVAVAGAISSFIAYQKKKLCFKENAEQGEVDMESHRNANAEPAVQRTLLEK

SEQ ID NO: 10420 - protein, 185 aa, Homo sapiens
MARGAALALLLFGLLGVLVAAPDGGFDLSDALPDNENKKPTAIPKKPSAGDDFDLGDAVVDGENDDPRPPNPPKPMPNPNPNHPSSSGSFSDADLADGVSGGEGKGGSDGGGSHRKEGEEADAPGVIPGIVGAVVVAVAGAISSFIAYQKKKLCFKENAEQGEVDMESHRNANAEPAVQRTLLEK

SEQ ID NO: 10421 - protein, 594 aa, Homo sapiens
MVLLHVLFEHAVGYALLALKEVEEISLLQPQVEESVLNLGKFHSIVRLVAFCPFASSQVALENANAVSEGVVHEDLRLLLETHLPSKKKKVLLGVGDPKIGAAIQEELGYNCQTGGVIAEILRGVRLHFHNLVKGLTDLSACKAQLGLGHSYSRAKVKFNVNRVDNMIIQSISLLDQLDKDINTFSMRVREWYGYHFPELVKIINDNATYCRLAQFIGNRRELNEDKLEKLEELTMDGAKAKAILDASRSSMGMDISAIDLINIESFSSRVVSLSEYRQSLHTYLRSKMSQVAPSLSALIGEAVGARLIAHAGSLTNLAKYPASTVQILGAEKALFRALKTRGNTPKYGLIFHSTFIGRAAAKNKGRISRYLANKCSIASRIDCFSEVPTSVFGEKLREQVEERLSFYETGEIPRKNLDVMKEAMVQAEEAAAEITRKLEKQEKKRLKKEKKRLAALALASSENSSSTPEECEEMSEKPKKKKKQKPQEVPQENGMEDPSISFSKPKKKKSFSKEELMSSDLEETAGSTSIPKRKKSTPKEETVNDPEEAGHRSGSKKKRKFSKEEPVSSGPEEAVGKSSSKKKKKFHKASQED

SEQ ID NO: 10422 - protein, 550 aa, Homo sapiens
MAEASFGSSSPVGSLSSEDHDFDPTAEMLVHDYDDERTLEEEEMMDEGKNFSSEIEDLEKEGTMPLEDLLAFYGYEPTIPAVANSSANSSPSELADELPDMTLDKEEIAKDLLSGDDEETQSSADDLTPSVTSHETSDFFPRPLRSNTACDGDKESEVEDVETDSGNSPEDLRKEIMIGLQYQAEIPPYLGEYDGNEKVYENEDQLLWCPDVVLESKVKEYLVETSLRTGSEKIMDRISAGTHTRDNEQALYELLKCNHNIKEAIERYCCNGKASQEGMTAWTEEECRSFEHALMLFGKDFHLIQKNKVRTRTVAECVAFYYMWKKSERYDYFAQQTRFGKKRYNHHPGVTDYMDRLVDETEALGGTVNASALTSNRPEPIPDQQLNILNSFTASDLTALTNSVATVCDPTDVNCLDDSFPPLGNTPRGQVNHVPVVTEELLTLPSNGESDCFNLFETGFYHSELNPMNMCSEESERPAKRLKMGIAVPESFMNEVSVNNLGVDFENHTHHITSAKMAVSVADFGSLSANETNGFISAHALHQHAALHSE

SEQ ID NO: 10423 - protein, 172 aa, Homo sapiens
MAESLRSPRRSLYKLVGSPPWKEAFRQRCLERMRNSRDRLLNRYRQAGSSGPGNSQNSFLVQEVMEEEWNALQSVENCPEDLAQLEELIDMAVLEEIQQELINQEQSIISEYEKSLQFDEKCLSIMLAEWEANPLICPVCTKYNLRITSGVVVCQCGLSIPSHACDTWAVIL

SEQ ID NO: 10424 - protein, 219 aa, Homo sapiens
MAESLRSPRRSLYKLVGSPPWKEAFRQRCLERMRNSRDRLLNRYRQAGSSGPGNSQNSFLVQEVMEEEWNALQSVENCPEDLAQLEELIDMAVLEEIQQELINQEQSIISEYEKSLQFDEKCLSIMLAEWEANPLICPVCTKYNLRITSGVVVCQCGLSIPSHSSELTEQKLRACLEGSINEHSAHCPHTPEFSVTGGTEEKSSLLMSCLACDTWAVIL

SEQ ID NO: 10425 - protein, 383 aa, Homo sapiens
MEPRAVGVSKQDIREQIWGYMESQNLADFPRPVHHRIPNFKGASHAAEQLPRLQAFKTARTIKVNPDAPQKSARFFVLESKKTLLVPTPRLRTGLFNKITPPPGATKDILRKCATSQGVRNYSVPIGLDSRVLVDLVVVGSVAVSEKGWRIGKGEGYADLEYAMMVSMGAVSKETPVVTIVHDCQVVDIPEELVEEHDITVDYILTPTRVIATGCKRPKPMGITWFKISLEMMEKIPILRSLRAREQQAGKDVTLQGEHQHLPEPGCQQTVPLSVGRRPPDTPGPETNSMEAAPGSPPGEGAPLAADVYVGNLPGDARVSDLKRALRELGSVPLRLTWQGPRRRAFLHYPDSAAAQQAVSCLQGLRLGTDTLRVALARQQRDK

SEQ ID NO: 10426 - protein, 694 aa, Homo sapiens
MENKSLESSQTDLKLVAHPRAKSKVWKYFGFDTNAEGCILQWKKIYCRICMAQIAYSGNTSNLSYHLEKNHPEEFCEFVKSNTEQMREAFATAFSKLKPESSQQPGQDALAVKAGHGYDSKKQQELTAAVLGLICEGLYPASIVDEPTFKVLLKTADPRYELPSRKYISTKAIPEKYGAVREVILKELAEATWCGISTDMWRSENQNRAYVTLAAHFLGLGAPNCLSMGSRCLKTFEVPEENTAETITRVLYEVFIEWGISAKVFGATTNYGKDIVKACSLLDVAVHMPCLGHTFNAGIQQAFQLPKLGALLSRCRKLVEYFQQSAVAMYMLYEKQKQQNVAHCMLVSNRVSWWGSTLAMLQRLKEQQFVIAGVLVEDSNNHHLMLEASEWATIEGLVELLQPFKQVAEMLSASRYPTISMVKPLLHMLLNTTLNIKETDSKELSMAKEVIAKELSKTYQETPEIDMFLNVATFLDPRYKRLPFLSAFERQQVENRVVEEAKGLLDKVKDGGYRPAEDKIFPVPEEPPVKKLMRTSTPPPASVINNMLAEIFCQTGGVEDQEEWHAQVVEELSNFKSQKVLGLNEDPLKWWSDRLALFPLLPKVLQKYWCVTATRVAPERLFGSAANVVSAKRNRLAPAHVDEQVFLYENARSGAEAEPEDQDEGEWGLDQEQVFSLGDGVSGGFFGIRDSSFL

SEQ ID NO: 10427 - protein, 1783 aa, Homo sapiens
MTSLKRSQTERPLATDRASVVGTDGTPKVHTDDFYMRRFRSQNGSLGSSVMAPVGPPRSEGSHHITSTPGVPKMGVRARIADWPPRKENIKESSRSSQEIETSSCLDSLSSKSSPVSQGSSVSLNSNDSAMLKSIQNTLKNKTRPSENMDSRFLMPEAYPSSPRKALRRIRQRSNSDITISELDVDSFDECISPTYKTGPSLHREYGSTSSIDKQGTSGESFFDLLKGYKDDKSDRGPTPTKLSDFLITGGGKGSGFSLDVIDGPISQRENLRLFKEREKPLKRRSKSETGDSSIFRKLRNAKGEELGKSSDLEDNRSEDSVRPWTCPKCFAHYDVQSILFDLNEAIMNRHNVIKRRNTTTGASAAAVASLVSGPLSHSASFSSPMGSTEDLNSKGSLSMDQGDDKSNELVMSCPYFRNEIGGEGERKISLSKSNSGSFSGCESASFESTLSSHCTNAGVAVLEVPKENLVLHLDRVKRYIVEHVDLGAYYYRKFFYQKEHWNYFGADENLGPVAVSIRREKPDEMKENGSPYNYRIIFRTSELMTLRGSVLEDAIPSTAKHSTARGLPLKEVLEHVVPELNVQCLRLAFNTPKVTEQLMKLDEQGLNYQQKVGIMYCKAGQSTEEEMYNNESAGPAFEEFLQLLGERVRLKGFEKYRAQLDTKTDSTGTHSLYTTYKDYEIMFHVSTMLPYTPNNKQQLLRKRHIGNDIVTIVFQEPGAQPFSPKNIRSHFQHVFVIVRVHNPCSDSVCYSVAVTRSRDVPSFGPPIPKGVTFPKSNVFRDFLLAKVINAENAAHKSEKFRAMATRTRQEYLKDLAEKNVTNTPIDPSGKFPFISLASKKKEKSKPYPGAELSSMGAIVWAVRAEDYNKAMELDCLLGISNEFIVLIEQETKSVVFNCSCRDVIGWTSTDTSLKIFYERGECVSVGSFINIEEIKEIVKRLQFVSKGCESVEMTLRRNGLGQLGFHVNYEGIVADVEPYGYAWQAGLRQGSRLVEICKVAVATLSHEQMIDLLRTSVTVKVVIIPPHDDCTPRRSCSETYRMPVMEYKMNEGVSYEFKFPFRNNNKWQRNASKGPHSPQVPSQVQSPMTSRLNAGKGDGKMPPPERAANIPRSISSDGRPLERRLSPGSDIYVTVSSMALARSQCRNSPSNLSSSSDTGSVGGTYRQKSMPEGFGVSRRSPASIDRQNTQSDIGGSGKSTPSWQRSEDSIADQMEPTCHLPAVSKVLPAFRESPSGRLMRQDPVVHLSPNKQGHSDSHYSSHSSSNTLSSNASSAHSDEKWYDGDRTESELNSYNYLQGTSADSGIDTTSYGPSHGSTASLGAATSSPRSGPGKEKVAPLWHSSSEVISMADRTLETESHGLDRKTESSLSLDIHSKSQAGSTPLTRENSTFSINDAASHTSTMSSRHSASPVVFTSARSSPKEELHPAAPSQLAPSFSSSSSSSSGPRSFYPRQGATSKYLIGWKKPEGTINSVGFMDTRKRHQSDGNEIAHTRLRASTRDLRASPKPTSKSTIEEDLKKLIDLESPTPESQKSFKFHALSSPQSPFPSTPTSRRALHRTLSDESIYNSQREHFFTSRASLLDQALPNDVLFSSTYPSLPKSLPLRRPSYTLGMKSLHGEFSASDSSLTDIQETRRQPMPDPGLMPLPDTAADLDWSNLVDAAKAYEVQRASFFAASDENHRPLSAASNSDQLEDQALAQMKPYSSSKDSSPTLASKVDQLEGMLKMLREDLKKEKEDKAHLQAEVQHLREDNLRLQEESQNASDKLKKFTEWVFNTIDMS

SEQ ID NO: 10428 - protein, 562 aa, Homo sapiens
MCPKSLSEKNSNNEVACKKTKIKKTCRRIIPPKMKNTSSKAESTLQNSSSAVHTESNKLQPKRTADAMNLSVDVESSQDGDSDEDTTPSLDFSGLSPYERKRLKNISENADFFASLQLSESAARLREMIEKRQPPKSKRKKPKRENGIGCRRSMRLLKVDPSGVSLPAAPTPPTLVADETPLLPPGPLEMTSENQEDNNERFKGFLHTWAGMSKPSSKNTEKGLSSIKSYKANLNGMVISEDTVYKVTTGPIFSMALHPSETRTLVAVGAKFGQVGLCDLTQQPKEDGVYVFHPHSQPVSCLYFSPANPAHILSLSYDGTLRCGDFSRAIFEEVYRNERSSFSSFDFLAEDASTLIVGHWDGNMSLVDRRTPGTSYEKLTSSSMGKIRTVHVHPVHRQYFITAGLRDTHIYDARRLNSRRSQPLISLTEHTKSIASAYFSPLTGNRVVTTCADCNLRIFDSSCISSKIPLLTTIRHNTFTGRWLTRFQAMWDPKQEDCVIVGSMAHPRRVEIFHETGKRVHSFGGEYLVSVCSINAMHPTRYILAGGNSSGKIHVFMNEKSC

SEQ ID NO: 10429 - protein, 336 aa, Homo sapiens
MAVATAAAVLAALGGALWLAARRFVGPRVQRLRRGGDPGLMHGKTVLITGANSGLGRATAAELLRLGARVIMGCRDRARAEEAAGQLRRELRQAAECGPEPGVSGVGELIVRELDLASLRSVRAFCQEMLQEEPRLDVLINNAGIFQCPYMKTEDGFEMQFGVNHLGHFLLTNLLLGLLKSSAPSRIVVVSSKLYKYGDINFDDLNSEQSYNKSFCYSRSKLANILFTRELARRLEGTNVTVNVLHPGIVRTNLGRHIHIPLLVKPLFNLVSWAFFKTPVEGAQTSIYLASSPEVEGVSGRYFGDCKEEELLPKAMDESVARKLWDISEVMVGLLK

SEQ ID NO: 10430 - protein, 1081 aa, Homo sapiens
MEPSRALLGCLASAAAAAPPGEDGAGAGAEEEEEEEEEAAAAVGPGELGCDAPLPYWTAVFEYEAAGEDELTLRLGDVVEVLSKDSQVSGDEGWWTGQLNQRVGIFPSNYVTPRSAFSSRCQPGGEDPSCYPPIQLLEIDFAELTLEEIIGIGGFGKVYRAFWIGDEVAVKAARHDPDEDISQTIENVRQEAKLFAMLKHPNIIALRGVCLKEPNLCLVMEFARGGPLNRVLSGKRIPPDILVNWAVQIARGMNYLHDEAIVPIIHRDLKSSNILILQKVENGDLSNKILKITDFGLAREWHRTTKMSAAGTYAWMAPEVIRASMFSKGSDVWSYGVLLWELLTGEVPFRGIDGLAVAYGVAMNKLALPIPSTCPEPFAKLMEDCWNPDPHSRPSFTNILDQLTTIEESGFFEMPKDSFHCLQDNWKHEIQEMFDQLRAKEKELRTWEEELTRAALQQKNQEELLRRREQELAEREIDILERELNIIIHQLCQEKPRVKKRKGKFRKSRLKLKDGNRISLPSDFQHKFTVQASPTMDKRKSLINSRSSPPASPTIIPRLRAIQLTPGESSKTWGRSSVVPKEEGEEEEKRAPKKKGRTWGPGTLGQKELASGDEGLKSLVDGYKQWSSSAPNLVKGPRSSPALPGFTSLMEMEDEDSEGPGSGESRLQHSPSQSYLCIPFPRGEDGDGPSSDGIHEEPTPVNSATSTPQLTPTNSLKRGGAHHRRCEVALLGCGAVLAATGLGFDLLEAGKCQLLPLEEPEPPAREEKKRREGLFQRSSRPRRSTSPPSRKLFKKEEPMLLLGDPSASLTLLSLSSISECNSTRSLLRSDSDEIVVYEMPVSPVEAPPLSPCTHNPLVNVRVERFKRDPNQSLTPTHVTLTTPSQPSSHRRTPSDGALKPETLLASRSPSSNGLSPSPGAGMLKTPSPSRDPGEFPRLPDPNVVFPPTPRRWNTQQDSTLERPKTLEFLPRPRPSANRQRLDPWWFVSPSHARSTSPANSSSTETPSNLDSCFASSSSTVEERPGLPALLPFQAGPLPPTERTLLDLDAEGQSQDSTVPLCRAELNTHRPAPYEIQQEFWS

SEQ ID NO: 10431 - protein, 441 aa, Homo sapiens
MDDDDFGGFEAAETFDGGSGETQTTSPAIPWAAFPAVSGVHLSPSSPEIVLDRDHSSSIGCLSSDAIISSPENTHAANSIVSQTIPKAQIQQSTHTHLDISLFPLGLTDEKSNGTIALVDDSEDPGANVSNIQLQQKISSLEIKLKVSEEEKQRIKQDVESLMEKHNVLEKGFLKEKEQEAISFQDRYKELQEKHKQELEDMRKAGHEALSIIVDEYKALLQSSVKQQVEAIEKQYISAIEKQAHKCEELLNAQHQRLLEMLDTEKELLKEKIKEALIQQSQEQKEILEKCLEEERQRNKEALVSAAKLEKEAVKDAVLKVVEEERKNLEKAHAEERELWKTEHAKDQEKVSQEIQKAIQEQRKISQETVKAAIIEEQKRSEKAVEEAVKRTRDELIEYIKEQKRLDQVIRQRSLSSLELFLSCAQKQLSALIATEPVDIE

SEQ ID NO: 10432 - protein, 446 aa, Homo sapiens
MAAATIVHDTSEAVELCPAYGLYLKPITKMTISVALPQLKQPGKSISNWEVMERLKGMVQNHQFSTLRISKSTMDFIRFEGEVENKSLVKSFLACLDGKTIKLSGFSDILKVRAAEFKIDFPTRHDWDSFFRDAKDMNETLPGERPDTIHLEGLPCKWFALKESGSEKPSEDVLVKVFEKFGEIRNVDIPMLDPYREEMTGRNFHTFSFGGHLNFEAYVQYREYMGFIQAMSALRGMKLMYKGEDGKAVACNIKVSFDSTKHLSDASIKKRQLERQKLQELEQQREEQKRREKEAEERQRAEERKQKELEELERERKREEKLRKREQKQRDRELRRNQKKLEKLQAEEQKQLQEKIKLEERKLLLAQRNLQSIRLIAELLSRAKVPGGSLCSRQPRPGCPQCPPLKCGRRHGAVSPPAAAVATKPALMPRMTAPSREGVALVCRSR

SEQ ID NO: 10433 - protein, 505 aa, Homo sapiens
MSAEEMVQIRLEDRCYPVSKRKLIEQSDYFRALYRSGMREALSQEAGGPEVQQLRGLSAPGLRLVLDFINAGGAREGWLLGPRGEKGGGVDEDEEMDEVSLLSELVEAASFLQVTSLLQLLLSQVRLNNCLEMYRLAQVYGLPDLQEACLRFMVVHFHEVLCKPQFHLLGSPPQAPGDVSLKQRLREARMTGTPVLVALGDFLGGPLAPHPYQGEPPSMLRYEEMTERWFPLANNLPPDLVNVRGYGSAILDNYLFIVGGYRITSQEISAAHSYNPSTNEWLQVASMNQKRSNFKLVAVNSKLYAIGGQAVSNVECYNPEQDAWNFVAPLPNPLAEFSACECKGKIYVIGGYTTRDRNMNILQYCPSSDMWTLFETCDVHIRKQQMVSVEETIYIVGGCLHELGPNRRSSQSEDMLTVQSYNTVTRQWLYLKENTSKSGLNLTCALHNDGIYIMSRDVTLSTSLEHRVFLKYNIFSDSWEAFRRFPAFGHNLLVSSLYLPNKAET

SEQ ID NO: 10434 - protein, 340 aa, Homo sapiens
MHVAEVAVNVILLLSMGWTSDSLCSPTIFYRDCWIRRFPGLLINLEESQKLGAQFLKYYSESTGQKCSRSCCLRKDVSCNLAVFYHSPIHDNINCLHVHCPTLESCILEPGTSAILYNITDGIDPDLLVFEQSPTYLNTRSSSNRWDRLRILKAMNLDKQTTTINGMLPSTEAPSSTTHQDLVVNTNSTSYSKELTTDFWARFTSLNESITTKINKVSPSTDFISNPDNKTISPFFEPIDTKLSHMPVPPGLNSSKQLLNKTKGYNSRNHTSANEDEVSVTSKTWLVSVALCTSVIFLGCCIVILASGCCGKQQGQYKPGQRKSGSLQIKNRNHMKENSS

SEQ ID NO: 10435 - protein, 434 aa, Homo sapiens
MLPARCARLLTPHLLLVLVQLSPARGHRTTGPRFLISDRDPQCNLHCSRTQPKPICASDGRSYESMCEYQRAKCRDPTLGVVHRGRCKDAGQSKCRLERAQALEQAKKPQEAVFVPECGEDGSFTQVQCHTYTGYCWCVTPDGKPISGSSVQNKTPVCSGSVTDKPLSQGNSGRKDDGSKPTPTMETQPVFDGDEITAPTLWIKHLVIKDSKLNNTNIRNSEKVYSCDQERQSALEEAQQNPREGIVIPECAPGGLYKPVQCHQSTGYCWCVLVDTGRPLPGTSTRYVMPSCESDARAKTTEADDPFKDRELPGCPEGKKMEFITSLLDALTTDMVQAINSAAPTGGGRFSEPDPSHTLEERVVHWYFSQLDSNSSNDINKREMKPFKRYVKKKAKPKKCARRFTDYCDLNKDKVISLPELKGCLGVSKEGRLV

SEQ ID NO: 10436 - protein, 329 aa, Homo sapiens
MLTLQTWLVQALFIFLTTESTGELLDPCGYISPESPVVQLHSNFTAVCVLKEKCMDYFHVNANYIVWKTNHFTIPKEQYTIINRTASSVTFTDIASLNIQLTCNILTFGQLEQNVYGITIISGLPPEKPKNLSCIVNEGKKMRCEWDGGRETHLETNFTLKSEWATHKFADCKAKRDTPTSCTVDYSTVYFVNIEVWVEAENALGKVTSDHINFDPVYKVKPNPPHNLSVINSEELSSILKLTWTNPSIKSVIILKYNIQYRTKDASTWSQIPPEDTASTRSSFTVQDLKPFTEYVFRIRCMKEDGKGYWSDWSEEASGITYEDNIASF

SEQ ID NO: 10437 - protein, 203 aa, Homo sapiens
MLTLQTWLVQALFIFLTTESTGELLDPCGYISPESPVVQLHSNFTAVCVLKEKLKPNPPHNLSVINSEELSSILKLTWTNPSIKSVIILKYNIQYRTKDASTWSQIPPEDTASTRSSFTVQDLKPFTEYVFRIRCMKEDGKGYWSDWSEEASGITYEDKLKNTSGLMFQILQRVILPSGHLTLLQGTILIQKIKCIQMAISLM

SEQ ID NO: 10438 - protein, 857 aa, Homo sapiens
MLTLQTWLVQALFIFLTTESTGELLDPCGYISPESPVVQLHSNFTAVCVLKEKCMDYFHVNANYIVWKTNHFTIPKEQYTIINRTASSVTFTDIASLNIQLTCNILTFGQLEQNVYGITIISGLPPEKPKNLSCIVNEGKKMRCEWDGGRETHLETNFTLKSEWATHKFADCKAKRDTPTSCTVDYSTVYFVNIEVWVEAENALGKVTSDHINFDPVYKVKPNPPHNLSVINSEELSSILKLTWTNPSIKSVIILKYNIQYRTKDASTWSQIPPEDTASTRSSFTVQDLKPFTEYVFRIRCMKEDGKGYWSDWSEEASGITYEDRPSKAPSFWYKIDPSHTQGYRTVQLVWKTLPPFEANGKILDYEVTLTRWKSHLQNYTVNATKLTVNLTNDRYLATLTVRNLVGKSDAAVLTIPACDFQGNLAESKCYLITVTPVYADGPGSPESIKAYLKQAPPSKGPTVRTKKVGKNEAVLEWDQLPVDVQNGFIRNYTIFYRTIIGNETAVNVDSSHTEYTLSSLTSDTLYMVRMAAYTDEGGKDGPEFTFTTPKFAQGEIEAIVVPVCLAFLLTTLLGVLFCFNKRDLIKKHIWPNVPDPSKSHIAQWSPHTPPRHNFNSKDQMYSDGNFTDVSVVEIEANDKKPFPEDLKSLDLFKKEKINTEGHSSGIGGSSCMSSSRPSISSSDENESSQNTSSTVQYSTVVHSGYRHQVPSVQVFSRSESTQPLLDSEERPEDLQLVDHVDGGDGILPRQQYFKQNCSQHESSPDISHFERSKQVSSVNEEDFVRLKQQISDHISQSCGSGQMKMFQEVSAADAFGPGTEGQVERFETVGMEAATDEGMPKSYLPQTVRQGGYMPQ

SEQ ID NO: 10439 - protein, 621 aa, Homo sapiens
MVLCPVIGKLLHKRVVLASASPRRQEILSNAGLRFEVVPSKFKEKLDKASFATPYGYAMETAKQKALEVANRLYQKDLRAPDVVIGADTIVTVGGLILEKPVDKQDAYRMLSRLSGREHSVFTGVAIVHCSSKDHQLDTRVSEFYEETKVKFSELSEELLWEYVHSGEPMDKAGGYGIQALGGMLVESVHGDFLNVVGFPLNHFCKQLVKLYYPPRPEDLRRSVKHDSIPAADTFEDLSDVEGGGSEPTQRDAGSRDEKAEAGEAGQATAEAECHRTRETLPPFPTRLLELIEGFMLSKGLLTACKLKVFDLLKDEAPQKAADIASKVDASACGMERLLDICAAMGLLEKTEQGYSNTETANVYLASDGEYSLHGFIMHNNDLTWNLFTYLEFAIREGTNQHHRALGKKAEDLFQDAYYQSPETRLRFMRAMHGMTKLTACQVATAFNLSRFSSACDVGGCTGALARELAREYPRMQVTVFDLPDIIELAAHFQPPGPQAVQIHFAAGDFFRDPLPSAELYVLCRILHDWPDDKVHKLLSRVAESCKPGAGLLLVETLLDEEKRVAQRALMQSLNMLVQTEGKERSLGEYQCLLELHGFHQVQVVHLGGVLDAILATKVAP

SEQ ID NO: 10440 - protein, 82 aa, Homo sapiens
MKALCLLLLPVLGLLVSSKTLCSMEEAINERIQEVAGSLSFAVTGCTCGSACGSWDVRAETTCHCQCAGMDWTGARCCRVQP

SEQ ID NO: 10441 - protein, 324 aa, Homo sapiens
MAAAAPGNGRASAPRLLLLFLVPLLWAPAAVRAGPDEDLSHRNKEPPAPAQQLQPQPVAVQGPEPARVEKIFTPAAPVHTNKEDPATQTNLGFIHAFVAAISVIIVSELGDKTFFIAAIMAMRYNRLTVLAGAMLALGLMTCLSVLFGYATTVIPRVYTYYVSTVLFAIFGIRMLREGLKMSPDEGQEELEEVQAELKKKDEEFQRTKLLNGPGDVETGTSITVPQKKWLHFISPIFVQALTLTFLAEWGDRSQLTTIVLAAREDPYGVAVGGTVGHCLCTGLAVIGGRMIAQKISVRTVTIIGGIVFLAFAFSALFISPDSGF

SEQ ID NO: 10442 - protein, 353 aa, Homo sapiens
MAAPAQQTTQPGGGKRKGKAQYVLAKRARRCDAGGPRQLEPGLQGILITCNMNERKCVEEAYSLLNEYGDDMYGPEKFTDKDQQPSGSEGEDDDAEAALKKEVGDIKASTEMRLRRFQSVESGANNVVFIRTLGIEPEKLVHHILQDMYKTKKKKTRVILRMLPISGTCKAFLEDMKKYAETFLEPWFKAPNKGTFQIVYKSRNNSHVNREEVIRELAGIVCTLNSENKVDLTNPQYTVVVEIIKAVCCLSVVKDYMLFRKYNLQEVVKSPKDPSQLNSKQGNGKEAKLESADKSDQNNTAEGKNNQQVPENTEELGQTKPTSNPQVVNEGGAKPELASQATEGSKSNENDFS

SEQ ID NO: 10443 - protein, 2701 aa, Homo sapiens
MTEKMSSFLYIGDIVSLYAEGSVNGFISTLGLVDDRCVVHPEAGDLANPPKKFRDCLFKVCPMNRYSAQKQYWKAKQAKQGNHTEAALLKKLQHAAELEQKQNESENKKLLGEIVKYSNVIQLLHIKSNKYLTVNKRLPALLEKNAMRVSLDAAGNEGSWFYIHPFWKLRSEGDNIVVGDKVVLMPVNAGQPLHASNIELLDNPGCKEVNAVNCNTSWKITLFMKYSSYREDVLKGGDVVRLFHAEQEKFLTCDEYEKKQHIFLRTTLRQSATSATSSKALWEIEVVHHDPCRGGAGQWNSLFRFKHLATGNYLAAELNPDYRDAQNEGKNVRDGVPPTSKKKRQAGEKIMYTLVSVPHGNDIASLFELDATTLQRADCLVPRNSYVRLRHLCTNTWVTSTSIPIDTDEERPVMLKIGTCQTKEDKEAFAIVSVPLSEVRDLDFANDANKVLATTVKKLENGTITQNERRFVTKLLEDLIFFVADVPNNGQEVLDVVITKPNRERQKLMREQNILAQVFGILKAPFKEKAGEGSMLRLEDLGDQRYAPYKYMLRLCYRVLRHSQQDYRKNQEYIAKNFCVMQSQIGYDILAEDTITALLHNNRKLLEKHITAKEIETFVSLLRRNREPRFLDYLSDLCVSNTTAIPVTQELICKFMLSPGNADILIQTKVVSMQADNPMESSILSDDIDDEEVWLYWIDSNKEPHGKAIRHLAQEAKEGTKADLEVLTYYRYQLNLFARMCLDRQYLAINQISTQLSVDLILRCVSDESLPFDLRASFCRLMLHMHVDRDPQESVVPVRYARLWTEIPTKITIHEYDSITDSSRNDMKRKFALTMEFVEEYLKEVVNQPFPFGDKEKNKLTFEVVHLARNLIYFGFYSFSELLRLTRTLLAILDIVQAPMSSYFERLSKFQDGGNNVMRTIHGVGEMMTQMVLSRGSIFPMSVPDVPPSIHPSKQGSPTEHEDVTVMDTKLKIIEILQFILSVRLDYRISYMLSIYKKEFGEDNDNAETSASGSPDTLLPSAIVPDIDEIAAQAETMFAGRKEKNPVQLDDEGGRTFLRVLIHLIMHDYPPLLSGALQLLFKHFSQRAEVLQAFKQVQLLVSNQDVDNYKQIKADLDQLRLTVEKSELWVEKSSNYENGEIGESQVKGGEEPIEESNILSPVQDGTKKPQIDSNKSNNYRIVKEILIRLSKLCVQNKKCRNQHQRLLKNMGAHSVVLDLLQIPYEKNDEKMNEVMNLAHTFLQNFCRGNPQNQVLLHKHLNLFLTPGLLEAETMRHIFMNNYHLCNEISERVVQHFVHCIETHGRHVEYLRFLQTIVKADGKYVKKCQDMVMTELINGGEDVLIFYNDRASFPILLHMMCSERDRGDESGPLAYHITLVELLAACTEGKNVYTEIKCNSLLPLDDIVRVVTHDDCIPEVKIAYVNFVNHCYVDTEVEMKEIYTSNHIWKLFENFLVDMARVCNTTTDRKHADIFLEKCVTESIMNIVSGFFNSPFSDNSTSLQTHQPVFIQLLQSAFRIYNCTWPNPAQKASVESCIRTLAEVAKNRGIAIPVDLDSQVNTLFMKSHSNMVQRAAMGWRLSARSGPRFKEALGGPAWDYRNIIEKLQDVVASLEHQFSPMMQAEFSVLVDVLYSPELLFPEGSDARIRCGAFMSKLINHTKKLMEKEEKLCIKILQTLREMLEKKDSFVEEGNTLRKILLNRYFKGDYSIGVNGHLSGAYSKTAQVGGSFSGQDSDKMGISMSDIQCLLDKEGASELVIDVIVNTKNDRIFSEGIFLGIALLEGGNTQTQYSFYQQLHEQKKSEKFFKVLYDRMKAAQKEIRSTVTVNTIDLGNKKRDDDNELMTSGPRMRVRDSTLHLKEGMKGQLTEASSATSKAYCVYRREMDPEIDIMCTGPEAGNTEEKSAEEVTMSPAIAIMQPILRFLQLLCENHNRELQNFLRNQNNKTNYNLVCETLQFLDCICGSTTGGLGLLGLYINEKNVALVNQNLESLTEYCQGPCHENQTCIATHESNGIDIIIALILNDINPLGKYRMDLVLQLKNNASKLLLAIMESRHDSENAERILFNMRPRELVDVMKNAYNQGLECDHGDDEGGDDGVSPKDVGHNIYILAHQLARHNKLLQQMLKPGSDPDEGDEALKYYANHTAQIEIVRHDRTMEQIVFPVPNICEYLTRESKCRVFNTTERDEQGSKVNDFFQQTEDLYNEMKWQKKIRNNPALFWFSRHISLWGSISFNLAVFINLAVALFYPFGDDGDEGTLSPLFSVLLWIAVAICTSMLFFFSKPVGIRPFLVSIMLRSIYTIGLGPTLILLGAANLCNKIVFLVSFVGNRGTFTRGYRAVILDMAFLYHVAYVLVCMLGLFVHEFFYSFLLFDLVYREETLLNVIKSVTRNGRSIILTAVLALILVYLFSIIGFLFLKDDFTMEVDRLKNRTPVTGSHQVPTMTLTTMMEACAKENCSPTIPASNTADEEYEDGIERTCDTLLMCIVTVLNQGLRNGGGVGDVLRRPSKDEPLFAARVVYDLLFYFIVIIIVLNLIFGVIIDTFADLRSEKQKKEEILKTTCFICGLERDKFDNKTVSFEEHIKSEHNMWHYLYFIVLVKVKDPTEYTGPESYVAQMIVEKNLDWFPRMRAMSLVSNEGDSEQNEIRSLQEKLESTMSLVKQLSGQLAELKEQMTEQRKNKQRLGFLGSNTPHVNHHMPPH

SEQ ID NO: 10444 - protein, 231 aa, Homo sapiens
MTVGKSSKMLQHIDYRMRCILQDGRIFIGTFKAFDKHMNLILCDCDEFRKIKPKNSKQAEREEKRVLGLVLLRGENLVSMTVEGPPPKDTGIARVPLAGAAGGPGIGRAAGRGIPAGVPMPQAPAGLAGPVRGVGGPSQQVMTPQGRGTVAAAAAAATASIAGAPTQYPPGRGGPPPPMGRGAPPPGMMGPPPGMRPPMGPPMGIPPGRGTPMGMPPPGMRPPPPGMRGLL

SEQ ID NO: 10445 - protein, 284 aa, Homo sapiens
MWRGLALARAIGCAARGRGQWAVRAADCAQSGRHPGPAVVCGRRLISVLEQIRHFVMMPEINTNHLDKQQVQLLAEMCILIDENDNKIGAETKKNCHLNENIEKGLLHRAFSVFLFNTENKLLLQQRSDAKITFPGCFTNTCCSHPLSNPAELEESDALGVRRAAQRRLKAELGIPLEEVPPEEINYLTRIHYKAQSDGIWGEHEIDYILLVRKNVTLNPDPNEIKSYCYVSKEELKELLKKAASGEIKITPWFKIIAATFLFKWWDNLNHLNQFVDHEKIYRM

SEQ ID NO: 10446 - protein, 318 aa, Homo sapiens
MVELMFPLLLLLLPFLLYMAAPQIRKMLSSGVCTSTVQLPGKVVVVTGANTGIGKETAKELAQRGARVYLACRDVEKGELVAKEIQTTTGNQQVLVRKLDLSDTKSIRAFAKGFLAEEKHLHVLINNAGVMMCPYSKTADGFEMHIGVNHLGHFLLTHLLLEKLKESAPSRIVNVSSLAHHLGRIHFHNLQGEKFYNAGLAYCHSKLANILFTQELARRLKGSGVTTYSVHPGTVQSELVRHSSFMRWMWWLFSFFIKTPQQGAQTSLHCALTEGLEILSGNHFSDCHVAWVSAQARNETIARRLWDVSCDLLGLPID

SEQ ID NO: 10447 - protein, 90 aa, Homo sapiens
MKMANSLRGEVLKLYKNLLYLGRDYPKGADYFKKRLKNIFLKNKDVKNPEKIKELIAQGEFVMKELEALYFLRKYRAMKQRYYSDTNKTN

SEQ ID NO: 10448 - protein, 390 aa, Homo sapiens
MPHLMERMVGSGLLWLALVSCILTQASAVQRVPRDPSTVEDKCEKACRPEEECLALNSTWGCFCRQDLNSSDVHSLQPQLDCGPREIKVKVDKCLLGGLGLGEEVIAYLRDPNCSSILQTEERNWVSVTSPVQASACRNILERNQTHAIYKNTLSLVNDFIIRDTILNINFQCAYPLDMKVSLQAALQPIVSSLNVSVDGNGEFIVRMALFQDQNYTNPYEGDAVELSVESVLYVGAILEQGDTSRFNLVLRNCYATPTEDKADLVKYFIIRNSCSNQRDSTIHVEENGQSSESRFSVQMFMFAGHYDLVFLHCEIHLCDSLNEQCQPSCSRSQVRSEVPAIDLARVLDLGPITRRGAQSPGVMNGTPSTAGFLVAWPMVLLTVLLAWLF

SEQ ID NO: 10449 - protein, 537 aa, Homo sapiens
MPHLMERMVGSGLLWLALVSCILTQASAVQRGYGNPIEASSYGLDLDCGAPGTPEAHVCFDPCQNYTLLDEPFRSTENSAGSQGCDKNMSGWYRFVGEGGVRMSETCVQVHRCQTDAPMWLNGTHPALGDGITNHTACAHWSGNCCFWKTEVLVKACPGGYHVYRLEGTPWCNLRYCTVPRDPSTVEDKCEKACRPEEECLALNSTWGCFCRQDLNSSDVHSLQPQLDCGPREIKVKVDKCLLGGLGLGEEVIAYLRDPNCSSILQTEERNWVSVTSPVQASACRNILERNQTHAIYKNTLSLVNDFIIRDTILNINFQCAYPLDMKVSLQAALQPIVSSLNVSVDGNGEFIVRMALFQDQNYTNPYEGDAVELSVESVLYVGAILEQGDTSRFNLVLRNCYATPTEDKADLVKYFIIRNSCSNQRDSTIHVEENGQSSESRFSVQMFMFAGHYDLVFLHCEIHLCDSLNEQCQPSCSRSQVRSEVPAIDLARVLDLGPITRRGAQSPGVMNGTPSTAGFLVAWPMVLLTVLLAWLF

SEQ ID NO: 10450 - protein, 180 aa, Homo sapiens
MGIPMGKSMLVLLTFLAFASCCIAAYRPSETLCGGELVDTLQFVCGDRGFYFSRPASRVSRRSRGIVEECCFRSCDLALLETYCATPAKSERDVSTPPTVLPDNFPRYPVGKFFQYDTWKQSTQRLRRGLPALLRARRGHVLAKELEAFREAKRHRPLIALPTQDPAHGGAPPEMASNRK

SEQ ID NO: 10451 - protein, 183 aa, Homo sapiens
MGIPMGKSMLVLLTFLAFASCCIAAYRPSETLCGGELVDTLQFVCGDRGFYFRLPGRPASRVSRRSRGIVEECCFRSCDLALLETYCATPAKSERDVSTPPTVLPDNFPRYPVGKFFQYDTWKQSTQRLRRGLPALLRARRGHVLAKELEAFREAKRHRPLIALPTQDPAHGGAPPEMASNRK

SEQ ID NO: 10452 - protein, 1012 aa, Homo sapiens
MEEYEKFCEKSLARIQEASLSTESFLPAQSESISLIRFHGVAILSPLLNIEKRKEMQQEKQKALDVEARKQVNRKKALLTRVQEILDNVQVRKAPNASDFDQWEMETVYSNSEVRNLNVPATFPNSFPSHTEHSTAAKLDKIAGILPLDNEDQCKTDGIDLARDSEGFNSPKQCDSSNISHVENEAFPKTSSATPQETLISDGPFSVNEQQDLPLLAEVIPDPYVMSLQNLMKKSKEYIEREQSRRSLRGSINRIVNESHLDKEHDAVEVADCVKEKGQLTGKHCVSVIPDKPSLNKSNVLLQGASTQASSMSMPVLASFSKVDIPIRTGHPTVLESNSDFKVIPTFVTENNVIKSLTGSYAKLPSPEPSMSPKMHRRRSRTSSACHILINNPINACELSPKGKEQAMDLIIQDTDENTNVPEIMPKLPTDLAGVCSSKVYVGKNTSEVKEDVVLGKSNQVCQSSGNHLENKVTHGLVTVEGQLTSDERGAHIMNSTCAAMPKLHEPYASSQCIASPNFGTVSGLKPASMLEKNCSLQTELNKSYDVKNPSPLLMQNQNTRQQMDTPMVSCGNEQFLDNSFEKVKRRLDLDIDGLQKENCPYVITSGITEQERQHLPEKRYPKGSGFVNKNKMLGTSSKESEELLKSKMLAFEEMRKRLEEQHAQQLSLLIAEQEREQERLQKEIEEQEKMLKEKKAMTAEASELDINNAVELEWRKISDSSLLETMLSQADSLHTSNSNSSGFTNSAMQYSFVSANEAPFYLWGSSTSGLTKLSVTRPFGRAKTRWSQVFSLEIQAKFNKITAVAKGFLTRRLMQTDKLKQLRQTVKDTMEFIRSFQSEAPLKRGIVSAQDASLQERVLAQLRAALYGIHDIFFVMDAAERMSILHHDREVRKEKMLRQMDKMKSPRVALSAATQKSLDRKKYMKAAEMGMPNKKFLVKQNPSETRVLQPNQGQNAPVHRLLSRQGTPKTSVKGVVQNRQKPSQSRVPNRVPVSGVYAGKIQRKRPNVATI

SEQ ID NO: 10453 - protein, 298 aa, Homo sapiens
MTEQAISFAKDFLAGGIAAAISKTAVAPIERVKLLLQVQHASKQIAADKQYKGIVDCIVRIPKEQGVLSFWRGNLANVIRYFPTQALNFAFKDKYKQIFLGGVDKHTQFWRYFAGNLASGGAAGATSLCFVYPLDFARTRLAADVGKSGTEREFRGLGDCLVKITKSDGIRGLYQGFSVSVQGIIIYRAAYFGVYDTAKGMLPDPKNTHIVVSWMIAQTVTAVAGVVSYPFDTVRRRMMMQSGRKGADIMYTGTVDCWRKIFRDEGGKAFFKGAWSNVLRGMGGAFVLVLYDELKKVI

SEQ ID NO: 10454 - protein, 134 aa, Homo sapiens
MKSVLLLTTLLVPAHLVAAWSNNYAVDCPQHCDSSECKSSPRCKRTVLDDCGCCRVCAAGRGETCYRTVSGMDGMKCGPGLRCQPSNGEDPFGEEFGICKEHDMASGDGNIVREEVVKENAAGSPVMRKWLNPR

SEQ ID NO: 10455 - protein, 867 aa, Homo sapiens
MRGFNLLLFWGCCVMHSWEGHIRPTRKPNTKGNNCRDSTLCPAYATCTNTVDSYYCACKQGFLSSNGQNHFKDPGVRCKDINECLTSSVCPEHSDCVNSMGSYSCSCQVGFISRNSTCEDVDECADPRACPEHATCNNTVGNYSCFCNPGFESSSGHLSFQGLKASCEDIDECTEMCPINSTCTNTPGSYFCTCHPGFAPSNGQLNFTDQGVECRDIDECRQDPSTCGPNSICTNALGSYSCGCIAGFHPNPEGSQKDGNFSCQRVLFKCKEDVIPDNKQIQQCQEGTAVKPAYVSFCAQINNIFSVLDKVCENKTTVVSLKNTTESFVPVLKQISTWTKFTKEETSSLATVFLESVESMTLASFWKPSANITPAVRTEYLDIESKVINKECSEENVTLDLVAKGDKMKIGCSTIEESESTETTGVAFVSFVGMESVLNERFFKDHQAPLTTSEIKLKMNSRVVGGIMTGEKKDGFSDPIIYTLENIQPKQKFERPICVSWSTDVKGGRWTSFGCVILEASETYTICSCNQMANLAVIMASGELTMDFSLYIISHVGIIISLVCLVLAIATFLLCRSIRNHNTYLHLHLCVCLLLAKTLFLAGIHKTDNKMGCAIIAGFLHYLFLACFFWMLVEAVILFLMVRNLKVVNYFSSRNIKMLHICAFGYGLPMLVVVISASVQPQGYGMHNRCWLNTETGFIWSFLGPVCTVIVVSKYYNSLAKCVLKEEQGDLRDLEFPGTCAAERINSLLLTWTLWILRQRLSSVNAEVSTLKDTRLLTFKAFAQLFILGCSWVLGIFQIGPVAGVMAYLFTIINSLQGAFIFLIHCLLNGQVREEYKRWITGKTKPSSQSQTSRILLSSMPSASKTG

SEQ ID NO: 10456 - protein, 184 aa, Homo sapiens
MKSVLLLTTLLVPAHLVAAWSNNYAVDCPQHCDSSECKSSPRCKRTVLDDCGCCRVCAAGRGETCYRTVSGMDGMKCGPGLRCQPSNGEDPFGEEFGICKDCPYGTFGMDCRETCNCQSGICDRGTGKCLKFPFFQYSVTKSSNRFVSLTEHDMASGDGNIVREEVVKENAAGSPVMRKWLNPR

SEQ ID NO: 10457 - protein, 745 aa, Homo sapiens
MRGFNLLLFWGCCVMHSWEGHIRPTRKPNTKGNNCRDSTLCPAYATCTNTVDSYYCACKQGFLSSNGQNHFKDPGVRCKDIDECTEMCPINSTCTNTPGSYFCTCHPGFAPSNGQLNFTDQGVECRDIDECRQDPSTCGPNSICTNALGSYSCGCIAGFHPNPEGSQKDGNFSCQRVLFKCKEDVIPDNKQIQQCQEGTAVKPAYVSFCAQINNIFSVLDKVCENKTTVVSLKNTTESFVPVLKQISTWTKFTKEETSSLATVFLESVESMTLASFWKPSANITPAVRTEYLDIESKVINKECSEENVTLDLVAKGDKMKIGCSTIEESESTETTGVAFVSFVGMESVLNERFFKDHQAPLTTSEIKLKMNSRVVGGIMTGEKKDGFSDPIIYTLENIQPKQKFERPICVSWSTDVKGGRWTSFGCVILEASETYTICSCNQMANLAVIMASGELTMDFSLYIISHVGIIISLVCLVLAIATFLLCRSIRNHNTYLHLHLCVCLLLAKTLFLAGIHKTDNKMGCAIIAGFLHYLFLACFFWMLVEAVILFLMVRNLKVVNYFSSRNIKMLHICAFGYGLPMLVVVISASVQPQGYGMHNRCWLNTETGFIWSFLGPVCTVIVINSLLLTWTLWILRQRLSSVNAEVSTLKDTRLLTFKAFAQLFILGCSWVLGIFQIGPVAGVMAYLFTIINSLQGAFIFLIHCLLNGQVREEYKRWITGKTKPSSQSQTSRILLSSMPSASKTG

SEQ ID NO: 10458 - protein, 624 aa, Homo sapiens
MALRARALYDFRSENPGEISLREHEVLSLCSEQDIEGWLEGVNSRGDRGLFPASYVQVIRAPEPGPAGDGGPGAPARYANVPPGGFEPLPVAPPASFKPPPDAFQALLQPQQAPPPSTFQPPGAGFPYGGGALQPSPQQLYGGYQASQGSDDDWDDEWDDSSTVADEPGALGSGAYPDLDGSSSAGVGAAGRYRLSTRSDLSLGSRGGSVPPQHHPSGPKSSATVSRNLNRFSTFVKSGGEAFVLGEASGFVKDGDKLCVVLGPYGPEWQENPYPFQCTIDDPTKQTKFKGMKSYISYKLVPTHTQVPVHRRYKHFDWLYARLAEKFPVISVPHLPEKQATGRFEEDFISKRRKGLIWWMNHMASHPVLAQCDVFQHFLTCPSSTDEKAWKQGKRKAEKDEMVGANFFLTLSTPPAAALDLQEVESKIDGFKCFTKKMDDSALQLNHTANEFARKQVTGFKKEYQKVGQSFRGLSQAFELDQQAFSVGLNQAIAFTGDAYDAIGELFAEQPRQDLDPVMDLLALYQGHLANFPDIIHVQKGALTKVKESRRHVEEGKMEVQKADGIQDRCNTISFATLAEIHHFHQIRVRDFKSQMQHFLQQQIIFFQKVTQKLEEALHKYDSV

SEQ ID NO: 10459 - protein, 318 aa, Homo sapiens
MAAAAAAAAEQQSSNGPVKKSMREKAVERRSVNKEHNSNFKAGYIPIDEDRLHKTGLRGRKGNLAICVIILLFILAVINLIITLVIWAVIRIGPNGCDSMEFHESGLLRFKQVSDMGVIHPLYKSTVGGRRNENLVITGNNQPIVFQQGTTKLSVENNKTSITSDIGMQFFDPRTQNILFSTDYETHEFHLPSGVKSLNVQKASTERITSNATSDLNIKVDGRAIVRGNEGVFIMGKTIEFHMGGNMELKAENSIILNGSVMVSTTRLPSSSSGDQLGSGDWVRYKLCMCADGTLFKVQVTSQNMGCQISDNPCGNTH

SEQ ID NO: 10460 - protein, 270 aa, Homo sapiens
MKPKMKYSTNKISTAKWKNTASKALCFKLGKSQQKAKEVCPMYFMKLRSGLMIKKEACYFRRETTKRPSLKTGRKHKRHLVLAACQQQSTVECFAFGISGVQKYTRALHDSSITGISPITEYLASLSTYNDQSITFALEDESYEIYVEDLKKDEKKDKVLLSYYESQHPSNESGDGVDGKMLMVTLSPTKDFWLHANNKEHSVELHKCEKPLPDQAFFVLHNMHSNCVSFECKTDPGVFIGVKDNHLALIKVDSSENLCTENILFKLSET

SEQ ID NO: 10461 - protein, 257 aa, Homo sapiens
MHSDAAAVNFQLNSHLSTLANIHKIYHTLNKLNLTEDIGQDDHQTGSLRSCSSSDCFNKVMPPRKKRRPASGDDLSAKKSRHDSMYRKYDSTRIKTEEEAFSSKRCLEWFYEYAGTDDVVGPEGMEKFCEDIGVEPENVVMLVLAWKLDAQNMGYFTLQEWLKGMTSLQCDTTEKLRNTLDYLRSFLNDSTNFKLIYRYAFDFARQSKYKVINKDQWCNVLEFSRTINLDLSNYDEDGAWPVLLDEFVEWYKDKQMS

SEQ ID NO: 10462 - protein, 300 aa, Homo sapiens
MVLLWLTLLLIALPCLLQTKEGGKPWAGAENLTCWIHDVDFLSCSWAVGPGAPADVQYDLYLNVANRRQQYECLHYKTDAQGTRIGCRFDDISRLSSGSQSSHILVRGRSAAFGIPCTDKFVVFSQIEILTPPNMTAKCNKTHSFMHWKMRSHFNRKFRYELQIQKRMQPVITEQVRDRTSFQLLNPGTYTVQIRARERVYEFLSAWSTPQRFECDQEEGANTRAWRTSLLIALGTLLALVCVFVICRRYLVMQRLFPRIPHMKDPIGDSFQNDKLVVWEAGKAGLEECLVTEVQVVQKT

SEQ ID NO: 10463 - protein, 1267 aa, Homo sapiens
MLVGQGAGLLGPAVVTAAVVLLLSGVGPAHGSEDIVVGCGGFVKSDVEINYSLIEIKLYTKHGTLKYQTDCAPNNGYFMIPLYDKGDFILKIEPPLGWSFEPTTVELHVDGVSDICTKGGDINFVFTGFSVNGKVLSKGQPLGPAGVQVSLRNTGTEAKIQSTVTQPGGKFAFFKVLPGDYEILATHPTWALKEASTTVRVTNSNANAASPLIVAGYNVSGSVRSDGEPMKGVKFLLFSSLVTKEDVLGCNVSPVPGFQPQDESLVYLCYTVSREDGSFSFYSLPSGGYTVIPFYRGERITFDVAPSRLDFTVEHDSLKIEPVFHVMGFSVTGRVLNGPEGDGVPEAVVTLNNQIKVKTKADGSFRLENITTGTYTIHAQKEHLYFETVTIKIAPNTPQLADIVATGFSVCGRISIIRFPDTVKQMNKYKVVLSSQDKDKSLVTVETDAHGSFCFKAKPGTYKVQVMVPEAETRAGLTLKPQTFPLTVTDRPVMDVAFVQFLASVSGKVSCLDTCGDLLVTLQSLSRQGEKRSLQLSGKVNAMTFTFDNVLPGKYKISIMHEDWCWKNKSLEVEVLEDDVSAVEFRQTGYMLRCSLSHAITLEFYQDGNGRENVGIYNLSKGVNRFCLSKPGVYKVTPRSCHRFEQAFYTYDTSSPSILTLTAIRHHVLGTITTDKMMDVTVTIKSSIDSEPALVLGPLKSVQELRREQQLAEIEARRQEREKNGNEEGEERMTKPPVQEMVDELQGPFSYDFSYWARSGEKITVTPSSKELLFYPPSMEAVVSGESCPGKLIEIHGKAGLFLEGQIHPELEGVEIVISEKGASSPLITVFTDDKGAYSVGPLHSDLEYTVTSQKEGYVLTAVEGTIGDFKAYALAGVSFEIKAEDDQPLPGVLLSLSGGLFRSNLLTQDNGILTFSNLSPGQYYFKPMMKEFRFEPSSQMIEVQEGQNLKITITGYRTAYSCYGTVSSLNGEPEQGVAMEAVGQNDCSIYGEDTVTDEEGKFRLRGLLPGCVYHVQLKAEGNDHIERALPHHRVIEVGNNDIDDVNIIVFRQINQFDLSGNVITSSEYLPTLWVKLYKSENLDNPIQTVSLGQSLFFHFPPLLRDGENYVVLLDSTLPRSQYDYILPQVSFTAVGYHKHITLIFNPTRKLPEQDIAQGSYIALPLTLLVLLAGYNHDKLIPLLLQLTSRLQGVGALGQAASDNSGPEDAKRQAKKQKTRRTLRLQEEFQLMWCLVPWRGTLGIHLFSSLPFASEILLETTATCIHY

SEQ ID NO: 10464 - protein, 534 aa, Homo sapiens [sequence omitted]

SEQ ID NO: 10465 - protein, 333 aa, Homo sapiens
MLLLVTSLLLCELPHPAFLLIPEKSDLRTVAPASSLNVRFDSRTMNLSWDCQENTTFSKCFLTDKKNRVVEPRLSNNECSCTFREICLHEGVTFEVHVNTSQRGFQQKLLYPNSGREGTAAQNFSCFIYNADLMNCTWARGPTAPRDVQYFLYIRNSKRRREIRCPYYIQDSGTHVGCHLDNLSGLTSRNYFLVNGTSREIGIQFFDSLLDTKKIERFNPPSNVTVRCNTTHCLVRWKQPRTYQKLSYLDFQYQLDVHRKNTQPGTENLLINVSGDLENRYNFPSSEPRAKHSVKIRAADVRILNWSSWSEAIEFGSLGYSGCSRQFHRSKTN

SEQ ID NO: 10466 - protein, 410 aa, Homo sapiens
MLLLVTSLLLCELPHPAFLLIPEKSDLRTVAPASSLNVRFDSRTMNLSWDCQENTTFSKCFLTDKKNRVVEPRLSNNECSCTFREICLHEGVTFEVHVNTSQRGFQQKLLYPNSGREGTAAQNFSCFIYNADLMNCTWARGPTAPRDVQYFLYIRNSKRRREIRCPYYIQDSGTHVGCHLDNLSGLTSRNYFLVNGTSREIGIQFFDSLLDTKKIERFNPPSNVTVRCNTTHCLVRWKQPRTYQKLSYLDFQYQLDVHRKNTQPGTENLLINVSGDLENRYNFPSSEPRAKHSVKIRAADVRILNWSSWSEAIEFGSDDGNLGSVYIYVLLIVGTLVCGIVLGFLFKRFLRIQRLFPPVPQIKDKLNDNHEVEDEMGPQRHHRCGWNLYPTPGPSPGSGSSPRLGSESSL

SEQ ID NO: 10467 - protein, 400 aa, Homo sapiens
MLLLVTSLLLCELPHPAFLLIPEKSDLRTVAPASSLNVRFDSRTMNLSWDCQENTTFSKCFLTDKKNRVVEPRLSNNECSCTFREICLHEGVTFEVHVNTSQRGFQQKLLYPNSGREGTAAQNFSCFIYNADLMNCTWARGPTAPRDVQYFLYIRNSKRRREIRCPYYIQDSGTHVGCHLDNLSGLTSRNYFLVNGTSREIGIQFFDSLLDTKKIERFNPPSNVTVRCNTTHCLVRWKQPRTYQKLSYLDFQYQLDVHRKNTQPGTENLLINVSGDLENRYNFPSSEPRAKHSVKIRAADVRILNWSSWSEAIEFGSDDGNLGSVYIYVLLIVGTLVCGIVLGFLFKRFLRIQRLFPPVPQIKDKLNDNHEVEDEIIWEEFTPEEGKGYREEVLTVKEIT

SEQ ID NO: 10468 - protein, 322 aa, Homo sapiens
MKGLYFQQSSTDEEITFVFQEKEDLPVTEDNFVKLQVKACALSQINTKLLAEMKMKKDLFPVGREIAGIVLDVGSKVSFFQPDDEVVGILPLDSEDPGLCEVVRVHEHYLVHKPEKVTWTEAAGSIRDGVRAYTALHYLSHLSPGKSVLIMDGASAFGTIAIQLAHHRGAKVISTACSLEDKQCLERFRPPIARVIDVSNGKVHVAESCLEETGGLGVDIVLDAGVRLYSKDDEPAVKLQLLPHKHDIITLLGVGGHWVTTEENLQLDPPDSHCLFLKGATLAFLNDEVWNLSNVQQGKYLSTYLKGCDGEVINWCFQTSVG

SEQ ID NO: 10469 - protein, 349 aa, Homo sapiens
MKGLYFQQSSTDEEITFVFQEKEDLPVTEDNFVKLQVKACALSQINTKLLAEMKMKKDLFPVGREIAGIVLDVGSKVSFFQPDDEVVGILPLDSEDPGLCEVVRVHEHYLVHKPEKVTWTEAAGSIRDGVRAYTALHYLSHLSPGKSVLIMDGASAFGTIAIQLAHHRGAKVISTACSLEDKQCLERFRPPIARVIDVSNGKVHVAESCLEETGGLGVDIVLDAGVRLYSKDDEPAVKLQLLPHKHDIITLLGVGGHWVTTEENLQLDPPDSHCLFLKGATLAFLNDEVWNLSNVQQGKYLCILKDVMEKLSTGVFRPQLDEPIPLYEAKVSMEAVQKNQGRKKQVVQF

SEQ ID NO: 10470 - protein, 1332 aa, Homo sapiens
MESRDPAQPMSPGEATQSGARPADRYGLLKHSREFLDFFWDIAKPEQETRLAATEKLLEYLRGRPKGSEMKYALKRLITGLGVGRETARPCYSLALAQLLQSFEDLPLCSILQQIQEKYDLHQVKKAMLRPALFANLFGVLALFQSGRLVKDQEALMKSVKLLQALAQYQNHLQEQPRKALVDILSEVSKATLQEILPEVLKADLNIILSSPEQLELFLLAQQKVPSKLKKLVGSVNLFSDENVPRLVNVLKMAASSVKKDRKLPAIALDLLRLALKEDKFPRFWKEVVEQGLLKMQFWPASYLCFRLLGAALPLLTKEQLHLVMQGDVIRHYGEHVCTAKLPKQFKFAPEMDDYVGTFLEGCQDDPERQLAVLVAFSSVTNQGLPVTPTFWRVVRFLSPPALQGYVAWLRAMFLQPDLDSLVDFSTNNQKKAQDSSLHMPERAVFRLRKWIIFRLVSIVDSLHLEMEEALTEQVARFCLFHSFFVTKKPTSQIPETKHPFSFPLENQAREAVSSAFFSLLQTLSTQFKQAPGQTQGGQPWTYHLVQFADLLLNHSHNVTTVTPFTAQQRQAWDRMLQTLKELEAHSAEARAAAFQHLLLLVGIHLLKSPAESCDLLGDIQTCIRKSLGEKPRRSRTKTIDPQEPPWVEVLVEILLALLAQPSHLMRQVARSVFGHICSHLTPRALQLILDVLNPETSEDENDRVVVTDDSDERRLKGAEDKSEEGEDNRSSESEEESEGEESEEEERDGDVDQGFREQLMTVLQAGKALGGEDSENEEELGDEAMMALDQSLASLFAEQKLRIQARRDEKNKLQKEKALRRDFQIRVLDLVEVLVTKQPENALVLELLEPLLSIIRRSLRSSSSKQEQDLLHKTARIFTHHLCRARRYCHDLGERAGALHAQVERLVQQAGRQPDSPTALYHFNASLYLLRVLKGNTAEGCVHETQEKQKAGTDPSHMPTGPQAASCLDLNLVTRVYSTALSSFLTKRNSPLTVPMFLSLFSRHPVLCQSLLPILVQHITGPVRPRHQACLLLQKTLSMREVRSCFEDPEWKQLMGQVLAKVTENLRVLGEAQTKAQHQQALSSLELLNVLFRTCKHEKLTLDLTVLLGVLQGQQQSLQQGAHSTGSSRLHDLYWQAMKTLGVQRPKLEKKDAKEIPSATQSPISKKRKKKGFLPETKKRKKRKSEDGTPAEDGTPAATGGSQPPSMGRKKRNRTKAKVPAQANGTPTTKSPAPGAPTRSPSTPAKSPKLQKKNQKPSQVNGAPGSPTEPAGQKQHQKALPKKGVLGKSPLSALARKKARLSLVIRSPSLLQSGAKKKAQTLRFTISSSKK

SEQ ID NO: 10471 - protein, 371 aa, Homo sapiens
MGRLVLLWGAAVFLLGGWMALGQGGAAEGVQIQIIYFNLETVQVTWNASKYSRTNLTFHYRFNGDEAYDQCTNYLLQEGHTSGCLLDAEQRDDILYFSIRNGTHPVFTASRWMVYYLKPSSPKHVRFSWHQDAVTVTCSDLSYGDLLYEVQYRSPFDTEWQSKQENTCNVTIEGLDAEKCYSFWVRVKAMEDVYGPDTYPSDWSEVTCWQRGEIRDACAETPTPPKPKLSKFILISSLAILLMVSLLLLSLWKLWRVKKFLIPSVPDPKSIFPGLFEIHQGNFQEWITDTQNVAHLHKMAGAEQESGPEEPLVVQLAKTEAESPRMLDPQTEEKEASGGSLQLPHQPLQGGDVVTIGGFTFVMNDRSYVAL

SEQ ID NO: 10472 - protein, 183 aa, Homo sapiens
MEPEEGTPLWRLQKLPAELGPQLLHKIIDGICGRAYPVYQDYHTVWESEEWMHVLEDIAKFFKAIVGKNLPDEEIFQQLNQLNSLHQETIMKCVKSRKDEIKQALSREIVAISSAQLQDFDWQVKLALSSDKIAALRMPLLSLHLDVKENGEVKPYSIEMSREELQNLIQSLEAANKVVLQLK

SEQ ID NO: 10473 - protein, 176 aa, Homo sapiens
MRIFAVFIFMTYWHLLNAPYNKINQRILVVDPVTSEHELTCQAEGYPKAEVIWTSSDHQVLSGKTTTTNSKREEKLFNVTSTLRINTTTNEIFYCTFRRLDPEENHTAELVIPELPLAHPPNERTHLVILGAILLCLGVALTFIFRLRKGRMMDVKKCGIQDTNSKKQSDTHLEET

SEQ ID NO: 10474 - protein, 290 aa, Homo sapiens
MRIFAVFIFMTYWHLLNAFTVTVPKDLYVVEYGSNMTIECKFPVEKQLDLAALIVYWEMEDKNIIQFVHGEEDLKVQHSSYRQRARLLKDQLSLGNAALQITDVKLQDAGVYRCMISYGGADYKRITVKVNAPYNKINQRILVVDPVTSEHELTCQAEGYPKAEVIWTSSDHQVLSGKTTTTNSKREEKLFNVTSTLRINTTTNEIFYCTFRRLDPEENHTAELVIPELPLAHPPNERTHLVILGAILLCLGVALTFIFRLRKGRMMDVKKCGIQDTNSKKQSDTHLEET

SEQ ID NO: 10475 - protein, 602 aa, Homo sapiens
MARLTKRRQADTKAIQHLWAAIEIIRNQKQIANIDRITKYMSRVHGMHPKETTRQLSLAVKDGLIVETLTVGCKGSKAGIEQEGYWLPGDEIDWETENHDWYCFECHLPGEVLICDLCFRVYHSKCLSDEFRLRDSSSPWQCPVCRSIKKKNTNKQEMGTYLRFIVSRMKERAIDLNKKGKDNKHPMYRRLVHSAVDVPTIQEKVNEGKYRSYEEFKADAQLLLHNTVIFYGADSEQADIARMLYKDTCHELDELQLCKNCFYLSNARPDNWFCYPCIPNHELVWAKMKGFGFWPAKVMQKEDNQVDVRFFGHHHQRAWIPSENIQDITVNIHRLHVKRSMGWKKACDELELHQRFLREGRFWKSKNEDRGEEEAESSISSTSNEQLKVTQEPRAKKGRRNQSVEPKKEEPEPETEAVSSSQEIPTMPQPIEKVSVSTQTKKLSASSPRMLHRSTQTTNDGVCQSMCHDKYTKIFNDFKDRMKSDHKRETERVVREALEKLRSEMEEEKRQAVNKAVANMQGEMDRKCKQVKEKCKEEFVEEIKKLATQHKQLISQTKKKQWCYNCEEEAMYHCCWNTSYCSIKCQQEHWHAEHKRTCRRKR

SEQ ID NO: 10476 - protein, 181 aa, Homo sapiens
MPVPASWPHLPSPFLLMTLLLGRLTGVAGEDELQVIQPEKSVSVAAGESATLRCAMTSLIPVGPIMWFRGAGAGRELIYNQKEGHFPRVTTVSELTKRNNLDFSISISNITPADAGTYYCVKFRKGSPDDVEFKSGAGTELSVREAALAPTAPLLVALLLGPKLLLVVGVSAIYICWKQKA

SEQ ID NO: 10477 - protein, 398 aa, Homo sapiens
MPVPASWPHLPSPFLLMTLLLGRLTGVAGEDELQVIQPEKSVSVAAGESATLRCAMTSLIPVGPIMWFRGAGAGRELIYNQKEGHFPRVTTVSELTKRNNLDFSISISNITPADAGTYYCVKFRKGSPDDVEFKSGAGTELSVRAKPSAPVVSGPAVRATPEHTVSFTCESHGFSPRDITLKWFKNGNELSDFQTNVDPAGDSVSYSIHSTARVVLTRGDVHSQVICEIAHITLQGDPLRGTANLSEAIRVPPTLEVTQQPMRAENQANVTCQVSNFYPRGLQLTWLENGNVSRTETASTLIENKDGTYNWMSWLLVNTCAHRDDVVLTCQVEHDGQQAVSKSYALEISAHQKEHGSDITHEAALAPTAPLLVALLLGPKLLLVVGVSAIYICWKQKA

SEQ ID NO: 10478 - protein, 198 aa, Homo sapiens
MPIPASPLHPPLPSLLLYLLLELAGVTHVFHVQQTEMSQTVSTGESIILSCSVPNTLPNGPVLWFKGTGPNRKLIYNFKQGNFPRVKEIGDTTKPGNTDFSTRIREISLADAGTYYCVKFIKGRAIKEYQSGRGTQVFVTAEQNPRPPKNRPAGRAGSRAHHDAHTCLSALPERNSTNYFVQPCCCLRLLGLTGLLSK

SEQ ID NO: 10479 - protein, 197 aa, Homo sapiens
MPIPASPLHPPLPSLLLYLLLELAGVTHVFHVQQTEMSQTVSTGESIILSCSVPNTLPNGPVLWFKGTGPNRKLIYNFKQGNFPRVKEIGDTTKPGNTDFSTRIREISLADAGTYYCVKFIKGRAIKEYQSGRGTQVFVTEQNPRPPKNRPAGRAGSRAHHDAHTCLSALPERNSTNYFVQPCCCLRLLGLTGLLSK

SEQ ID NO: 10480 - protein, 798 aa, Homo sapiens
MLMLMLVAAVTMWLRPLVTAQLCRSRTVRTGKVFNLIQDVQGDRLYFHPTTTRLIKHPCEKNIALYLGKQVFFTMDNFETSLLPFTIPTSMQVGVPEVTSAHFAGSLLLLVVDQKVYIYDYENNSWSMSLGIKHPVTHVSGDNCCYTGSLFCVHVSNLVFAYFRGDQISQTYIYYSNTGGFSFWKYHYDRQAEIIGSLGGIFHFFSLSQVAMLVVNQGKGMFKYSDHPLNRSFGLSFDYNGTLDILIAPGQRGILLLWFENSLLFSHNAGQLVDTVRVKKGDQTLFSSIFEAKITIHNIAVTENELAVITREDNLYYGNLGIVPSSIIKFADQYIWSEDVALMFRSPGTLEILTPLRDTAFPAFDFQKCLVNIQALLMDPELHVGKCKIEFLTGEFIYRMYTIDMHSQLELTASLIPQPGTSLIPLVMVSNPHSLGFQATFYENGYTSDGNTKYKLDIFLKQQQHWGRTDSNFTSSLKKATMSTLTVDIANKEISCVDIKPLSTLISVGCDLDKKIVIQNKVSACSMGILDPLTLQDNYSFIIEKEFYDPGFQGQQSSEDLHVFYSYQQLGCPLLVYYDTLWKPVVELWRKDSFQEVIDAEYVLLEVNGQFSYSYSLTAQSAMCTSQPQNWTTMIKEFGGPFFWNRENYVSCHDPNNNAPLRWPDVQYQILGGRTANQIIFGHNGFYVFYISIVDPYYSYCQLETIFSIYVYGAFPVQLVSAGVVILLIISSILGSVWLAYKTPKLLRTARGRRIKKCATQLCRRCKTVCQFRASATARAGTEPPGRHRTPHGGRSDH

SEQ ID NO: 10481 - protein, 185 aa, Homo sapiens
MPRLFFFHLLGVCLLLNQFSRAVADSWMEEVIKLCGRELVRAQIAICGMSTWSKRSLSQEDAPQTPRPVAEIVPSFINKDTETINMMSEFVANLPQELKLTLSEMQPALPQLQQHVPVLKDSSLLFEEFKKLIRNRQSEAADSSPSELKYLGLDTHSRKKRQLYSALANKCCHVGCTKRSLARFC

SEQ ID NO: 10482 - protein, 2961 aa, Homo sapiens
MGNAPSHSSEDEAAAAGGEGWGPHQDWAAVSGTTPGPGVAAPALPPAAALLEPARLREAAAALLPTPPCESLVSRHRGALFRWLEERLGRGEESVTLEQFRELLEARGAGCSSEQFEEAFAQFDAEGDGTVDAENMLEALKNSSGANLQGELSHIIRQLQACSLVPGFTDIFSESKEGLDIHSSMILRFLHRNRLSSAVMPYPMLEHCNNMCTMRSSVLKESLDQLVQKEKESPGDLTRSPEMDKLKSVAKCYAYIETSSNSADIDKMTNGETSSYWQSDGSACSHWIRLKMKPDVVLRHLSIAVAATDQSYMPQQVTVAVGRNASDLQEVRDVHIPSNVTGYVTLLENANVSQLYVQINIKRCLSDGCDTRIHGLRAVGFQRVKKSGVSVSDASAIWYWSLLTSLVTASMETNPAFVQTVLHNTQKALRHMPPLSLSPGSTDFSTFLSPNVLEEVDSFLIRITSCCSTPEVELTLLAFALARGSVAKVMSSLCTITDHLDTQYDASSLILSMASVRQNLLLKYGKPLQLTLQACDVKGKEDKSGPENLLVEPWTRDGFLTETGKTRASTIFSTGTESAFQVTQIRIMVRRGGIGAQCGLVFAYNSSSDKFCAEEHFKRFEKYDKWKLQELRQFVKSRIGCSSDDLGEDDPIGWFELEEEWDEADVKLQQCRVAKYLMVKFLCTRQESAERLGVQGLTISGYLRPARAEAEQSVTCAHCRKDTEESVCGATLLLRTLQFIQQLAHDLVQQKESGLKYKSFLDFAGLDLQIFWNFYSKLKQNPREECVSAQTLLLQLLQSCFSVLQGDVLAASEEEKAPIQSPKGVEAAKELYTHLCDVVDKVDGDSVPMEILKQEVRNTLLNGAAIFFPNRQTRRNHLFTMMNVTEQEHKQSLQLTFRSLCTYFSDKDPGGLLLLPEKNDLAKMNISEVLAVMDTLVSVAARECELLMLSGAPGEVGSVLFSLFWSVQGSLLSWCYLQLKSTDSGAKDLAVDLIEKYVGQFLASMRAILESLFSQYSGKTIVERLCNSVFSMAARQLVIFLLDFCTLDIPHCVLLREFSVLTELLKKLCSGPEGGLRKLDVETWQQEQPVVLHTWTKESAHNYENNCHEVSVFVSPGATYFEVEFDDRCETEKRYDYLEFTDARGRKTRYDTKVGTDKWPKKVTFKAGPRLQFLFHSDSSHNEWGYKFTVTACGLPDVAVSWGLDLQLLVSRLMGRLASQCMALKSVRQLGSNMVVPQAKMALVLSSPLWKPVFRHQVCPELELEASWPTHPHRNSKEVKNIPDDPCRHFLLDFAQSEPAQNFCGPYSELFKGFIQACRKQAPKTDIVAGSTIDQAVNATFAALVYRTPDLYEKLQKYVNSGGKIALSEEFAQVYSLADGIRIWMLEMKQKSLMSLGNEAEEKHSSEATEVNPESLAKECIEKSLLLLKFLPTGISSKESCEKLETADETSHLQPLNKRQRTSSVVEEHFQASVSPTEAAPPATGDQSPGLGTQPKLPSSSGLPAADVSPATAEEPLSPSTPTRRPPFTRGRLRLLSFRSMEEARLVPTVKEKYPVLKDVMDFIKDQSLSHRSVVKVLSLRKAQAQSILEVLKITQHCAESLGQPHCFHPPFILFLLELLTCQKDFTNYFGHLEGCGADLHKEIRDTYYQLVLFLVKAVKGFSSLNDRSLLPALSCVQTALLHLLDMGWEPNDLAFFVDIQLPDLLMKMSQENISVHDSVISQWSEEDELADAKQNSEWMDECQDGMFEAWYEKIAQEDPEKQRKMHMFIARYCDLLNVDISCDGCDEIAPWHRYRCLQCSDMDLCKTCFLGGVKPEGHGDDHEMVNMEFTCDHCQGLIIGRRMNCNVCDDFDLCYGCYAAKKYSYGHLPTHSITAHPMVTIRISDRQRLIQPYIHNYSWLLFAALALYSAHLASAEDVDGEKLDPQTRSSATTLRSQCMQLVGDCLMKAHQGKGLKALALLGVLPDGDSSLEDQALPVTVPTGASEEQLEKKAVQGAELSEAGNGKRAVHEEIRPVDFKQRNKADKGVSLSKDPSCQTQISDSPADASPPTGLPDAEDSEVSSQKPIEEKAVTPSPEQVFAECSQKRILGLLAAMLPPLKSGPTVPLIDLEHVLPLMFQVVISNAGHLNETYHLTLGLLGQLIIRLLPAEVDAAVIKVLSAKHNLFAAGDSSIVPDGWKTTHLLFSLGAVCLDSRVGLDWACSMAEILRSLNSAPLWRDVIATFTDHCIKQLPFQLKHTNIFTLLVLVGFPQVLCVGTRCVYMDNANEPHNVIILKHFTEKNRAVIVDVKTRKRKTVKDYQLVQKGGGQECGDSRAQLSQYSQHFAFIASHLLQSSMDSHCPEAVEATWVLSLALKGLYKTLKAHGFEEIRATFLQTDLLKLLVKKCSKGTGFSKTWLLRDLEILSIMLYSSKKEINALAEHGDLELDERGDREEEVERPVSSPGDPEQKKLDPLEGLDEPTRICFLMAHDALNAPLHILRAIYELQMKKTDYFFLEVQKRFDGDELTTDERIRSLAQRWQPSKSLRLEEQSAKAVDTDMIILPCLSRPARCDQATAESNPVTQKLISSTESELQQSYAKQRRSKSAALLHKELNCKSKRAVRDYLFRVNEATAVLYARHVLASLLAEWPSHVPVSEDILELSGPAHMTYILDMFMQLEEKHEWEKILQKVLQGCREDMLGTMALAACQFMEEPGMEVQVRESKHPYNNNTNFEDKVHIPGAIYLSIKFDSQCNTEEGCDELAMSSSSDFQQDRHSFSGSQQKWKDFELPGDTLYYRFTSDMSNTEWGYRFTVTAGHLGRFQTGFEILKQMLSEERVVPHLPLAKIWEWLVGVACRQTGHQRLKAIHLLLRIVRCCGHSDLCDLALLKPLWQLFTHMEYGLFEDVTQPGILLPLHRALTELFFVTENRAQELGVLQDYLLALTTDDHLLRCAAQALQNIAAISLAINYPNKATRLWNVEC

SEQ ID NO: 10483 - protein, 213 aa, Homo sapiens
MPRLLRLSLLWLGLLLVRFSRELSDISSARKLCGRYLVKEIEKLCGHANWSQFRFEEETPFSRLIAQASEKVEAYSPYQFESPQTASPARGRGTNPVSTSWEEAVNSWEMQSLPEYKDKKGYSPLGKTREFSSSHNINVYIHENAKFQKKRRNKIKTLSNLFWGHHPQRKRRGYSEKCCLTGCTKEELSIACLPYIDFKRLKEKRSSLVTKIY

SEQ ID NO: 10484 - protein, 323 aa, Homo sapiens
MGGQVSASNSFSRLHCRNANEDWMSALCPRLWDVPLHHLSIPGSHDTMTYCLNKKSPISHEESRLLQLLNKALPCITRPVVLKWSVTQALDVTEQLDAGVRYLDLRIAHMLEGSEKNLHFVHMVYTTALVEDTLTEISEWLERHPREVVILACRNFEGLSEDLHEYLVACIKNIFGDMLCPRGEVPTLRQLWSRGQQVIVSYEDESSLRRHHELWPGVPYWWGNRVKTEALIRYLETMKSCGRPGGLFVAGINLTENLQYVLAHPSESLEKMTLPNLPRLSAWVREQCPGPGSRCTNIIAGDFIGADGFVSDVIALNQKLLWC

SEQ ID NO: 10485 - protein, 2108 aa, Homo sapiens
MATNIEQIFRSFVVSKFREIQQELSSGRNEGQLNGETNTPIEGNQAGDAAASARSLPNEEIVQKIEEVLSGVLDTELRYKPDLKEGSRKSRCVSVQTDPTDEIPTKKSKKHKKHKNKKKKKKKEKEKKYKRQPEESESKTKSHDDGNIDLESDSFLKFDSEPSAVALELPTRAFGPSETNESPAVVLEPPVVSMEVSEPHILETLKPATKTAELSVVSTSVISEQSEQSVAVMPEPSMTKILDSFAAAPVPTTTLVLKSSEPVVTMSVEYQMKSVLKSVESTSPEPSKIMLVEPPVAKVLEPSETLVVSSETPTEVYPEPSTSTTMDFPESSAIEALRLPEQPVDVPSEIADSSMTRPQELPELPKTTALELQESSVASAMELPGPPATSMPELQGPPVTPVLELPGPSATPVPELPGPLSTPVPELPGPPATAVPELPGPSVTPVPQLSQELPGLPAPSMGLEPPQEVPEPPVMAQELPGLPLVTAAVELPEQPAVTVAMELTEQPVTTTELEQPVGMTTVEHPGHPEVTTATGLLGQPEATMVLELPGQPVATTALELPGQPSVTGVPELPGLPSATRALELSGQPVATGALELPGPLMAAGALEFSGQSGAAGALELLGQPLATGVLELPGQPGAPELPGQPVATVALEISVQSVVTTSELSTMTVSQSLEVPSTTALESYNTVAQELPTTLVGETSVTVGVDPLMAPESHILASNTMETHILASNTMDSQMLASNTMDSQMLASNTMDSQMLASSTMDSQMLATSSMDSQMLATSSMDSQMLATSTMDSQMLATSSMDSQMLATSSMDSQMLATSSMDSQMLATSSMDSQMLATSTMDSQMLATSTMDSQMLATSSMDSQMLASGTMDSQMLASGTMDAQMLASGTMDAQMLASSTQDSAMLGSKSPDPYRLAQDPYRLAQDPYRLGHDPYRLGHDAYRLGQDPYRLGHDPYRLTPDPYRMSPRPYRIAPRSYRIAPRPYRLAPRPLMLASRRSMMMSYAAERSMMSSYERSMMSYERSMMSPMAERSMMSAYERSMMSAYERSMMSPMAERSMMSAYERSMMSAYERSMMSPMADRSMMSMGADRSMMSSYSAADRSMMSSYSAADRSMMSSYTADRSMMSMAADSYTDSYTDTYTEAYMVPPLPPEEPPTMPPLPPEEPPMTPPLPPEEPPEGPALPTEQSALTAENTWPTEVPSSPSEESVSQPEPPVSQSEISEPSAVPTDYSVSASDPSVLVSEAAVTVPEPPPEPESSITLTPVESAVVAEEHEVVPERPVTCMVSETPAMSAEPTVLASEPPVMSETAETFDSMRASGHVASEVSTSLLVPAVTTPVLAESILEPPAMAAPESSAMAVLESSAVTVLESSTVTVLESSTVTVLEPSVVTVPEPPVVAEPDYVTIPVPVVSALEPSVPVLEPAVSVLQPSMIVSEPSVSVQESTVTVSEPAVTVSEQTQVIPTEVAIESTPMILESSIMSSHVMKGINLSSGDQNLAPEIGMQEIALHSGEEPHAEEHLKGDFYESEHGINIDLNINNHLIAKEMEHNTVCAAGTSPVGEIGEEKILPTSETKQRTVLDTYPGVSEADAGETLSSTGPFALEPDATGTSKGIEFTTASTLSLVNKYDVDLSLTTQDTEHDMVISTSPSGGSEADIEGPLPAKDIHLDLPSNNNLVSKDTEEPLPVKESDQTLAALLSPKESSGGEKEVPPPPKETLPDSGFSANIEDINEADLVRPLLPKDMERLTSLRAGIEGPLLASDVGRDRSAASPVVSSMPERASESSSEEKDDYEIFVKVKDTHEKSKKNKNRDKGEKEKKRDSSLRSRSKRSKSSEHKSRKRTSESRSRARKRSSKSKSHRSQTRSRSRSRRRRRSSRSRSKSRGRRSVSKEKRKRSPKHRSKSRERKRKRSSSRDNRKTVRARSRTPSRRSRSHTPSRRRRSRSVGRRRSFSISPSRRSRTPSRRSRTPSRRSRTPSRRSRTPSRRSRTPSRRSRTPSRRRRSRSVVRRRSFSISPVRLRRSRTPLRRRFSRSPIRRKRSRSSERGRSPKRLTDLDKAQLLEIAKANAAAMCAKAGVPLPPNLKPAPPPTIEEKVAKKSGGATIEELTEF

SEQ ID NO: 10486 - protein, 688 aa, Homo sapiens
MQVSSLNEVKIYSLSCGKSLPEWLSDRKKRALQKKDVDVRRRIELIQDFEMPTVCTTIKVSKDGQYILATGTYKPRVRCYDTYQLSLKFERCLDSEVVTFEILSDDYSKIVFLHNDRYIEFHSQSGFYYKTRIPKFGRDFSYHYPSCDLYFVGASSEVYRLNLEQGRYLNPLQTDAAENNVCDINSVHGLFATGTIEGRVECWDPRTRNRVGLLDCALNSVTADSEINSLPTISALKFNGALTMAVGTTTGQVLLYDLRSDKPLLVKDHQYGLPIKSVHFQDSLDLILSADSRIVKMWNKNSGKIFTSLEPEHDLNDVCLYPNSGMLLTANETPKMGIYYIPVLGPAPRWCSFLDNLTEELEENPESTVYDDYKFVTKKDLENLGLTHLIGSPFLRAYMHGFFMDIRLYHKVKLMVNPFAYEEYRKDKIRQKIEETRAQRVQLKKLPKVNKELALKLIEEEEEKQKSTWKKKVKSLPNILTDDRFKVMFENPDFQVDEESEEFRLLNPLVSKISEKRKKKLRLLEQQELREKEEEEEPEGKPSDAESSESSDDEKAWVEEVRKQRRLLQQEEKVKRQERLKEDQQTVLKPQFYEIKAGEEFRSFKDSATKQKLMNKTLEDRLKIEAKNGTLSVSDTTVGSKQLTFTLKRSEQQKKQQEAEKLHRQERKRLRRSAGHLKSRHKRGRSFH

SEQ ID NO: 10487 - protein, 445 aa, Homo sapiens
MWPGNAWRAALFWVPRGRRAQSALAQLRGILEGELEGIRGAGTWKSERVITSRQGPHIRVDGVSGGPGTVIFPGLPLPHLSCCIHLLSFTSGILNFCANNYLGLSSHPEVIQAGLQALEEFGAGLSSVRFICGTQSIHKNLEAKIARFHQREDAILYPSCYDANAGLFEALLTPEDAVLSDELNHASIIDGIRLCKAHKYRYRHLDMADLEAKLQEAQKHRLRLVATDGAFSMDGDIAPLQEICCLASRYGALVFMDECHATGFLGPTGRGTDELLGVMDQVTIINSTLGKALGGASGGYTTGPGPLVSLLRQRARPYLFSNSLPPAVVGCASKALDLLMGSNTIVQSMAAKTQRFRSKMEAAGFTISGASHPICPVMLGDARLASRMADDMLKRGIFVIGFSYPVVPKGKARIRVQISAVHSEEDIDRCVEAFVEVGRLHGALP

SEQ ID NO: 10488 - protein, 108 aa, Homo sapiens
MGVQVETISPGDGRTFPKRGQTCVVHYTGMLEDGKKFDSSRDRNKPFKFMLGKQEVIRGWEEGVAQMSVGQRAKLTISPDYAYGATGHPGIIPPHATLVFDVELLKLE

SEQ ID NO: 10489 - protein, 599 aa, Homo sapiens
MSTGFSFGSGTLGSTTVAAGGTSTGGVFSFGTGASSNPSVGLNFGNLGSTSTPATTSAPSSGFGTGLFGSKPATGFTLGGTNTGIATTITTGLTLGTPATTSAATTGFSLGFNKPAASATPFALPITSTSASGLTLSSALTSTPAASTGFTLNNLGGTTATTTTASTGLSLGGALAGLGGSLFQSTNTGTSGLGQNALGLTLGTTAATSTAGNEGLGGIDFSSSSDKKSDKTGTRPEDSKALKDENLPPVICQDVENLQKFVKEQKQVQEEISRMSSKAMLKVQEDIKALKQLLSLAANGIQRNTLNIDKLKIETAQELKNAEIALRTQKTPPGLQHEYAAPADYFRILVQQFEVQLQQYRQQIEELENHLATQANNSHITPQDLSMAMQKIYQTFVALAAQLQSIHENVKVLKEQYLGYRKMFLGDAVDVFETRRAEAKKWQNTPRVTTGPTPFSTMPNAAAVAMAATLTQQQQPATGPQPSLGVSFGTPFGSGIGTGLQSSGLGSSNLGGFGTSSGFGCSTTGASTFGFGTTNKPSGSLSAGFGSSSTSGFNFSNPGITASAGLTFGVSNPASAGFGTGGQLLQLKKPPAGNKRGKR

SEQ ID NO: 10490 - protein, 373 aa, Homo sapiens
MATQAHSLSYAGCNFLRQRLVLSTLSGRPVKIRKIRARDDNPGLRDFEASFIRLLDKITNGSRIEINQTGTTLYYQPGLLYGGSVEHDCSVLRGIGYYLESLLCLAPFMKHPLKIVLRGVTNDQVDPSVDVLKATALPLLKQFGIDGESFELKIVRRGMPPGGGGEVVFSCPVRKVLKPIQLTDPGKIKRIRGMAYSVRVSPQMANRIVDSARSILNKFIPDIYIYTDHMKGVNSGKSPGFGLSLVAETTSGTFLSAELASNPQGQGAAVLPEDLGRNCARLLLEEIYRGGCVDSTNQSLALLLMTLGQQDVSKVLLGPLSPYTIEFLRHLKSFFQIMFKIETKPCGEELKGGDKVLMTCVGIGFSNLSKTLK

SEQ ID NO: 10491 - protein, 314 aa, Homo sapiens
MSAAEAGGVFHRARGRTLAAFPAEKESEWKGPFYFILGADPQFGLIKAWSTGDCDNGGDEWEQEIRLTEQAVQAINKLNPKPKFFVLCGDLIHAMPGKPWRTEQTEDLKRVLRAVDRAIPLVLVSGNHDIGNTPTAETVEEFCRTWGDDYFSFWVGGVLFLVLNSQFYENPSKCPSLKQAQDQWLDEQLSIARQRHCQHAIVFQHIPLFLESIDEDDDYYFNLSKSTRKKLADKFIHAGVKVVFSGHYHRNAGGTYQNLDMVVSSAIGCQLGRDPHGLRVVVVTAEKIVHRYYSLDELSEKGIEDDLMDLIKKK

SEQ ID NO: 10492 - protein, 104 aa, Homo sapiens
MFFNTFVFQAGLVNLLFHKFKGTIILTAVYFALSISLHVWVMNLRWKNSNSFIWTDGLQMLFVFQRLAAVLYCYFYKRTAVRLGDPHFYQDSLWLRKEFMQVRR

SEQ ID NO: 10493 - protein, 621 aa, Homo sapiens
MEHIRTTKVEQVKLLDRFSTSNKSLTGTLYLTATHLLFIDSHQKETWILHHHIASVEKLALTTSGCPLVIQCKNFRTVHFIVPRERDCHDIYNSLLQLSKQAKYEDLYAFSYNPKQNDSERLQGWQLIDLAEEYKRMGVPNSHWQLSDANRDYKICETYPRELYVPRIASKPIIVGSSKFRSKGRFPVLSYYHQDKEAAICRCSQPLSGFSARCLEDEHLLQAISKANPVNRYMYVMDTRPKLNAMANRAAGKGYENEDNYSNIRFQFVGIENIHVMRSSLQKLLEVNGTKGLSVNDFYSGLESSGWLRHIKAVMDAAIFLAKAITVENASVLVHCSDGWDRTSQVCSLGSLLLDSYYRTIKGFMVLIEKDWISFGHKFSERCGQLDGDPKEVSPVFTQFLECVWHLTEQFPQAFEFSEAFLLQIHEHIHSCQFGNFLGNCQKEREELKLKEKTYSLWPFLLEDQKKYLNPLYSSESHRFTVLEPNTVSFNFKFWRNMYHQFDRTLHPRQSVFNIIMNMNEQNKQLEKDIKDLESKIKQRKNKQTDGILTKELLHSVHPESPNLKTSLCFKEQTLLPVNDALRTIEGSSPADNRYSEYAEEFSKSEPAVVSLEYGVARMTC

SEQ ID NO: 10494 - protein, 227 aa, Homo sapiens
MGASARLLRAVIMGAPGSGKGTVSSRITTHFELKHLSSGDLLRDNMLRGTEIGVLAKAFIDQGKLIPDDVMTRLALHELKNLTQYSWLLDGFPRTLPQAEALDRAYQIDTVINLNVPFEVIKQRLTARWIHPASGRVYNIEFNPPKTVGIDDLTGEPLIQREDDKPETVIKRLKAYEDQTKPVLEYYQKKGVLETFSGTETNKIWPYVYAFLQTKVPQRSQKASVTP

SEQ ID NO: 10495 - protein, 1010 aa, Homo sapiens
MAARVLIIGSGGREHTLAWKLAQSHHVKQVLVAPGNAGTACSEKISNTAISISDHTALAQFCKEKKIEFVVVGPEAPLAAGIVGNLRSAGVQCFGPTAEAAQLESSKRFAKEFMDRHGIPTAQWKAFTKPEEACSFILSADFPALVVKASGLAAGKGVIVAKSKEEACKAVQEIMQEKAFGAAGETIVIEELLDGEEVSCLCFTDGKTVAPMPPAQDHKRLLEGDGGPNTGGMGAYCPAPQVSNDLLLKIKDTVLQRTVDGMQQEGTPYTGILYAGIMLTKNGPKVLEFNCRFGDPECQVILPLLKSDLYEVIQSTLDGLLCTSLPVWLENHTALTVVMASKGYPGDYTKGVEITGFPEAQALGLEVFHAGTALKNGKVVTHGGRVLAVTAIRENLISALEEAKKGLAAIKFEGAIYRKDVGFRAIAFLQQPRSLTYKESGVDIAAGNMLVKKIQPLAKATSRSGCKVDLGGFAGLFDLKAAGFKDPLLASGTDGVGTKLKIAQLCNKHDTIGQDLVAMCVNDILAQGAEPLFFLDYFSCGKLDLSVTEAVVAGIAKACGKAGCALLGGETAEMPDMYPPGEYDLAGFAVGAMERDQKLPHLERITEGDVVVGIASSGLHSNGFSLVRKIVAKSSLQYSSPAPDGCGDQTLGDLLLTPTRIYSHSLLPVLRSGHVKAFAHITGGGLLENIPRVLPEKLGVDLDAQTWRIPRVFSWLQQEGHLSEEEMARTFNCGVGAVLVVSKEQTEQILRDIQQHKEEAWVIGSVVARAEGSPRVKVKNLIESMQINGSVLKNGSLTNHFSFEKKKARVAVLISGTGSNLQALIDSTREPNSSAQIDIVISNKAAVAGLDKAERAGIPTRVINHKLYKNRVEFDSAIDLVLEEFSIDIVCLAGFMRILSGPFVQKWNGKMLNIHPSLLPSFKGSNAHEQALETGVTVTGCTVHFVAEDVDAGQIILQEAVPVKRGDTVATLSERVKLAEHKIFPAALQLVASGTVQLGENGKICWVKEE

SEQ ID NO: 10496 - protein, 312 aa, Homo sapiens
MAKVFSFILVTTALTMGREISALEDCAQEQMRLRAQVRLLETRVKQQQVKIKQLLQENEVQFLDKGDENTVIDLGSKRQYADCSEIFNDGYKLSGFYKIKPLQSPAEFSVYCDMSDGGGWTVIQRRSDGSENFNRGWKDYENGFGNFVQKHGEYWLGNKNLHFLTTQEDYTLKIDLADFEKNSRYAQYKNFKVGDEKNFYELNIGEYSGTAGDSLAGNFHPEVQWWASHQRMKFSTWDRDHDNYEGNCAEEDQSGWWFNRCHSANLNGVYYSGPYTAKTDNGIVWYTWHGWWYSLKSVVMKIRPNDFIPNVI

SEQ ID NO: 10497 - protein, 309 aa, Homo sapiens
MLLILLSVALLALSSAQSLNEDVSQEESPSVISGKPEGRRPQGGNQPQRTPPPPGKPEGRPPQGGNQSQGPPPRPGKPEGPPPQGGNQSQGPPPRPGKPEGQPPQGGNQSQGPPPRPGKPEGPPPQGGNQSQGPPPRPGKPEGPPPQGGNQSQGPPPRPGKPEGPPPQGGNQSQGPPPHPGKPEGPPPQGGNQSQGPPPRPGKPEGPPPQGGNQSQGPPPRPGKPEGPPSQGGNKPQGPPPHPGKPQGPPPQEGNKPQRPPPPGRPQGPPPPGGNPQQPLPPPAGKPQGPPPPPQGGRPHRPPQGQPPQ

SEQ ID NO: 10498 - protein, 166 aa, Homo sapiens
MLLILLSVALLAFSSAQDLDEDVSQEDVPLVISDGGDSEQFIDEERQGPPLGGQQSQPSAGDGNQNDGPQQGPPQQGGQQQQGPPPPQGKPQGPPQQGGHPPPPQGRPQGPPQQGGHPRPPRGRPQGPPQQGGHQQGPPPPPPGKPQGPPPQGGRPQGPPQGQSPQ

SEQ ID NO: 10499 - protein, 337 aa, Homo sapiens
MEQPWPPPGPWSLPRAEGEAEEESDFDVFPSSPRCPQLPGGGAQMYSHGIELACQKQKEFVKSSVACKWNLAEAQQKLGSLALHNSESLDQEHAKAQTAVSELRQREEEWRQKEEALVQREKMCLWSTDAISKDVFNKSFINQDKRKDTEDEDKSESFMQKYEQKIRHFGMLSRWDDSQRFLSDHPYLVCEETAKYLILWCFHLEAEKKGALMEQIAHQAVVMQFIMEMAKNCNVDPRGCFRLFFQKAKAEEEGYFEAFKNELEAFKSRVRLYSQSQSFQPMTVQNHVPHSGVGSIGLLESLPQNPDYLQYSISTALCSLNSVVHKEDDEPKMMDTV

SEQ ID NO: 10500 - protein, 400 aa, Homo sapiens
MIRNWLTIFILFPLKLVEKCESSVSLTVPPVVKLENGSSTNVSLTLRPPLNATLVITFEITFRSKNITILELPDEVVVPPGVTNSSFQVTSQNVGQLTVYLHGNHSNQTGPRIRFLVIRSSAISIINQVIGWIYFVAWSISFYPQVIMNWRRKSVIGLSFDFVALNLTGFVAYSVFNIGLLWVPYIKEQFLLKYPNGVNPVNSNDVFFSLHAVVLTLIIIVQCCLYERGGQRVSWPAIGFLVLAWLFAFVTMIVAAVGVTTWLQFLFCFSYIKLAVTLVKYFPQAYMNFYYKSTEGWSIGNVLLDFTGGSFSLLQMFLQSYNNDQWTLIFGDPTKFGLGVFSIVFDVVFFIQHFCLYRKRPGLQAARTGSGSRLRQDWAPSLQPKALPQTTSVSASSLKG

SEQ ID NO: 10501 - protein, 295 aa, Homo sapiens
MPSPRRSMEGRPLGVSASSSSSSPGSPAHGGGGGGSRFEFQSLLSSRATAVDPTCARLRASESPVHRRGSFPLAAAGPSQSPAPPLPEEDRMDLNPSFLGIALRSLLAIDLWLSKKLGVCAGESSSWGSVRPLMKLLEISGHGIPWLLGTLYCLCRSDSWAGREVLMNLLFALLLDLLLVALIKGLVRRRRPAHNQMDMFVTLSVDKYSFPSGHATRAALMSRFILNHLVLAIPLRVLVVLWAFVLGLSRVMLGRHNVTDVAFGFFLGYMQYSIVDYCWLSPHNAPVLFLLWSQR

SEQ ID NO: 10502 - protein, 503 aa, Homo sapiens
MLSQLAMLQGSLLLVVATMSVAQQTRQEADRGCETLVVQHGHCSYTFLLPKSEPCPPGPEVSRDSNTLQRESLANPLHLGKLPTQQVKQLEQALQNNTQWLKKLERAIKTILRSKLEQVQQQMAQNQTAPMLELGTSLLNQTTAQIRKLTDMEAQLLNQTSRMDAQMPETFLSTNKLENQLLLQRQKLQQLQGQNSALEKRLQALETKQQEELASILSKKAKLLNTLSRQSAALTNIERGLRGVRHNSSLLQDQQHSLRQLLVLLRHLVQERANASAPAFIMAGEQVFQDCAEIQRSGASASGVYTIQVSNATKPRKVFCDLQSSGGRWTLIQRRENGTVNFQRNWKDYKQGFGDPAGEHWLGNEVVHQLTRRAAYSLRVELQDWEGHEAYAQYEHFHLGSENQLYRLSVVGYSGSAGRQSSLVLQNTSFSTLDSDNDHCLCKCAQVMSGGWWFDACGLSNLNGVYYHAPDNKYKMDGIRWHYFKGPSYSLRASRMMIRPLDI

SEQ ID NO: 10503 - protein, 442 aa, Homo sapiens
MTCYRGFLLGSCCRVAGGRAAALRGPGAGGPAARPRLGGDGGGRRHLGQGQPRELAGCGSRADGGFRPSRVVVVAKTTRYEFEQQRYRYAELSEEDLKQLLALKGSSYSGLLERHHIHTKNVEHIIDSLRNEGIEVRLVKRREYDEETVRWADAVIAAGGDGTMLLAASKVLDRLKPVIGVNTDPERSEGHLCLPVRYTHSFPEALQKFYRGEFRWLWRQRIRLYLEGTGINPVPVDLHEQQLSLNQHNRALNIERAHDERSEASGPQLLPVRALNEVFIGESLSSRASYYEISVDDGPWEKQKSSGLNLCTGTGSKAWSFNINRVATQAVEDVLNIAKRQGNLSLPLNRELVEKVTNEYNESLLYSPEEPKILFSIREPIANRVFSSSRQRCFSSKVCVRSRCWDACMVVDGGTSFEFNDGAIASMMINKEDELRTVLLEQ

SEQ ID NO: 10504 - protein, 481 aa, Homo sapiens
MATSTGRWLLLRLALFGFLWEASGGLDSGASRDDDLLLPYPRARARLPRDCTRVRAGNREHESWPPPPATPGAGGLAVRTFVSHFRDRAVAGHLTRAVEPLRTFSVLEPGGPGGCAARRRATVEETARAADCRVAQNGGFFRMNSGECLGNVVSDERRVSSSGGLQNAQFGIRRDGTLVTGYLSEEEVLDTENPFVQLLSGVVWLIRNGSIYINESQATECDETQETGSFSKFVNVISARTAIGHDRKGQLVLFHADGQTEQRGINLWEMAEFLLKQDVVNAINLDGGGSATFVLNGTLASYPSDHCQDNMWRCPRQVSTVVCVHEPRCQPPDCHGHGTCVDGHCQCTGHFWRGPGCDELDCGPSNCSQHGLCTETGCRCDAGWTGSNCSEVKQCLQPPEATLRAGELSFFTRTAWLALTLALAFLLLISTAANLSLLLSRAERNRRLHGDYAYHPLQEMNGEPLAAEKEQPGGAHNPFKD

SEQ ID NO: 10505 - protein, 137 aa, Homo sapiens
MGLRAGGTLGRAGAGRGAPEGPGPSGGAQGGSIHSGRIAAVHNVPLSVLIRPLPSVLDPAKVQSLVDTIREDPDSVPPIDVLWIKGAQGGDYFYSFGGCHRYAAYQQLQRETIPAKLVQSTLSDLRVYLGASTPDLQ

SEQ ID NO: 10506 - protein, 612 aa, Homo sapiens
MAAPEGSGLGEDARLDQETAQWLRWDKNSLTLEAVKRLIAEGNKEELRKCFGARMEFGTAGLRAAMGPGISRMNDLTIIQTTQGFCRYLEKQFSDLKQKGIVISFDARAHPSSGGSSRRFARLAATTFISQGIPVYLFSDITPTPFVPFTVSHLKLCAGIMITASHNPKQDNGYKVYWDNGAQIISPHDKGISQAIEENLEPWPQAWDDSLIDSSPLLHNPSASINNDYFEDLKKYCFHRSVNRETKVKFVHTSVHGVGHSFVQSAFKAFDLVPPEAVPEQKDPDPEFPTVKYPNPEEGKGVLTLSFALADKTKARIVLANDPDADRLAVAEKQDSGEWRVFSGNELGALLGWWLFTSWKEKNQDRSALKDTYMLSSTVSSKILRAIALKEGFHFEETLTGFKWMGNRAKQLIDQGKTVLFAFEEAIGYMCCPFVLDKDGVSAAVISAELASFLATKNLSLSQQLKAIYVEYGYHITKASYFICHDQETIKKLFENLRNYDGKNNYPKACGKFEISAIRDLTTGYDDSQPDKKAVLPTSKSSQMITFTFANGGVATMRTSGTEPKIKYYAELCAPPGNSDPEQLKKELNELVSAIEEHFFQPQKYNLQPKAD

SEQ ID NO: 10507 - protein, 423 aa, Homo sapiens
MLPWKKHKFELLAEAPPRQASKPKGYAVSLHYSALSSLARACPEGALSRVGSMFRSKRKKLHITSEDPTYTVLYLGNATTIQARGDGCTDLAVGKIWSKSEAGRQGTKMKLTVSAQGIRMVHAEERALRRPGHLYLLHRVTYCVADARLPKVFAWVYRHELKHKAVMLRCHAVLVSKPEKAQAMALLLYQTSANALAEFKRLKRRDDARHQQQELVGAHTIPLVPLRKLLLHGPCCYKPPVERSRSAPKLGSITEDLLGEQLEQELQEEEEEEQPEGCPEEEENRAAEGDPAEEEAEAQRALVVAMHFECGDLLDTLENGRGEALGGGGGSLGPGAGPPPLLLGSASDMKAELSQLISDLGELSFGNDVRTLQADLRVTRLLSGDSTGSESSIEGGGPDATSATAGDSSRQADGASADEPHSG

SEQ ID NO: 10508 - protein, 930 aa, Homo sapiens
MNGRSCSMSLHRTSGTPQGPRMVSGHHIPAIRAHSGTPGPSPCGSTSSPTMASLANNLHLKMPSGGGMAPQNNVAESRIHLPALSPRRQMLTNGKPRFQVTQAGGMSGSHTLKPKQQEFGSPFPPNPGKGALGFGPQCKSIGKGSCNNLVVTSSPMMVQRLGLISPPASQVSTACNQISPSLQRAMNAANLNIPPSDTRSLISRESLASTTLSLTESQSASSMKQEWSQGYRALPSLSNHGSQNGLDLGDLLSLPPGTSMSSNSVSNSLPSYLFGTESSHSPYPSPRHSSTRSHSARSKKRALSLSPLSDGIGIDFNTIIRTSPTSLVAYINGSRASPANLSPQPEVYGHFLGVRGSCIPQPRPVPGSQKGVLVAPGGLALPAYGEDGALEHERMQQLEHGGLQPGLVNHMVVQHGLPGPDSQSAGLFKTERLEEFPGSTVDLPPAPPLPPLPPPPGPPPPYHAHAHLHHPELGPHAQQLALPQATLDDDGEMDGIGGKHCCRWIDCSALYDQQEELVRHIEKVHIDQRKGEDFTCFWAGCPRRYKPFNARYKLLIHMRVHSGEKPNKCTFEGCEKAFSRLENLKIHLRSHTGEKPYLCQHPGCQKAFSNSSDRAKHQRTHLDTKPYACQIPGCTKRYTDPSSLRKHVKAHSSKEQQARKKLRSSTELHPDLLTDCLTVQSLQPATSPRDAAAEGTVGRSPGPGPDLYSAPIFSSNYSSRSGTAAGAVPPPHPVSHPSPGHNVQGSPHNPSSQLPPLTAVDAGAERFAPSAPSPHHISPRRVPAPSSILQRTQPPYTQQPSGSHLKSYQPETNSSFQPNGIHVHGFYGQLQKFCPPHYPDSQRIVPPVSSCSVVPSFEDCLVPTSMGQASFDVFHRAFSTHSGITVYDLPSSSSSLFGESLRSGAEDATFLQISTVDRCPSQLSSVYTEG

SEQ ID NO: 10509 - protein, 1724 aa, Homo sapiens
MVMGIFANCIFCLKVKYLPQQQKKKLQTDIKENGGKFSFSLNPQCTHIILDNADVLSQYQLNSIQKNHVHIANPDFIWKSIREKRLLDVKNYDPYKPLDITPPPDQKASSSEVKTEGLCPDSATEEEDTVELTEFGMQNVEIPHLPQDFEVAKYNTLEKVGMEGGQEAVVVELQCSRDSRDCPFLISSHFLLDDGMETRRQFAIKKTSEDASEYFENYIEELKKQGFLLREHFTPEATQLASEQLQALLLEEVMNSSTLSQEVSDLVEMIWAEALGHLEHMLLKPVNRISLNDVSKAEGILLLVKAALKNGETAEQLQKMMTEFYRLIPHKGTMPKEVNLGLLAKKADLCQLIRDMVNVCETNLSKPNPPSLAKYRALRCKIEHVEQNTEEFLRVRKEVLQNHHSKSPVDVLQIFRVGRVNETTEFLSKLGNVRPLLHGSPVQNIVGILCRGLLLPKVVEDRGVQRTDVGNLGSGIYFSDSLSTSIKYSHPGETDGTRLLLICDVALGKCMDLHEKDFSLTEAPPGYDSVHGVSQTASVTTDFEDDEFVVYKTNQVKMKYIIKFSMPGDQIKDFHPSDHTELEEYRPEFSNFSKVEDYQLPDAKTSSSTKAGLQDASGNLVPLEDVHIKGRIIDTVAQVIVFQTYTNKSHVPIEAKYIFPLDDKAAVCGFEAFINGKHIVGEIKEKEEAQQEYLEAVTQGHGAYLMSQDAPDVFTVSVGNLPPKAKVLIKITYITELSILGTVGVFFMPATVAPWQQDKALNENLQDTVEKICIKEIGTKQSFSLTMSIEMPYVIEFIFSDTHELKQKRTDCKAVISTMEGSSLDSSGFSLHIGLSAAYLPRMWVEKHPEKESEACMLVFQPDLDVDLPDLASESEVIICLDCSSSMEGVTFLQAKQIALHALSLVGEKQKVNIIQFGTGYKELFSYPKHITSNTMAAEFIMSATPTMGNTDFWKTLRYLSLLYPARGSRNILLVSDGHLQDESLTLQLVKRSRPHTRLFACGIGSTANRHVLRILSQCGAGVFEYFNAKSKHSWRKQIEDQMTRLCSPSCHSVSVKWQQLNPDVPEALQAPAQVPSLFLNDRLLVYGFIPHCTQATLCALIQEKEFRTMVSTTELQKTTGTMIHKLAARALIRDYEDGILHENETSHEMKKQTLKSLIIKLSKENSLITQFTSFVAVEKRDENESPFPDIPKVSELIAKEDVDFLPYMSWQGEPQEAVRNQSLLASSEWPELRLSKRKHRKIPFSKRKMELSQPEVSEDFEEDGLGVLPAFTSNLERGGVEKLLDLSWTESCKPTATEPLFKKVSPWETSTSSFFPILAPAVGSYLPPTARAHSPASLSFASYRQVASFGSAAPPRQFDASQFSQGPVPGTCADWIPQSASCPTGPPQNPPSSPYCGIVFSGSSLSSAQSAPLQHPGGFTTRPSAGTFPELDSPQLHFSLPTDPDPIRGFGSYHPSASSPFHFQPSAASLTANLRLPMASALPEALCSQSRTTPVDLCLLEESVGSLEGSRCPVFAFQSSDTESDELSEVLQDSCFLQIKCDTKDDSILCFLEVKEEDEIVCIQHWQDAVPWTELLSLQTEDGFWKLTPELGLILNLNTNGLHSFLKQKGIQSLGVKGRECLLDLIATMLVLQFIRTRLEKEGIVFKSLMKMDDASISRNIPWAFEAIKQASEWVRRTEGQYPSICPRLELGNDWDSATKQLLGLQPISTVSPLHRVLHYSQG

SEQ ID NO: 10510 - protein, 572 aa, Homo sapiens
MECLYYFLGFLLLAARLPLDAAKRFHDVLGNERPSAYMREHNQLNGWSSDENDWNEKLYPVWKRGDMRWKNSWKGGRVQAVLTSDSPALVGSNITFAVNLIFPRCQKEDANGNIVYEKNCRNEAGLSADPYVYNWTAWSEDSDGENGTGQSHHNVFPDGKPFPHHPGWRRWNFIYVFHTLGQYFQKLGRCSVRVSVNTANVTLGPQLMEVTVYRRHGRAYVPIAQVKDVYVVTDQIPVFVTMFQKNDRNSSDETFLKDLPIMFDVLIHDPSHFLNYSTINYKWSFGDNTGLFVSTNHTVNHTYVLNGTFSLNLTVKAAAPGPCPPPPPPPRPSKPTPSLATTLKSYDSNTPGPAGDNPLELSRIPDENCQINRYGHFQATITIVEGILEVNIIQMTDVLMPVPWPESSLIDFVVTCQGSIPTEVCTIISDPTCEITQNTVCSPVDVDEMCLLTVRRTFNGSGTYCVNLTLGDDTSLALTSTLISVPDRDPASPLRMANSALISVGCLAIFVTVISLLVYKKHKEYNPIENSPGNVVRSKGLSVFLNRAKAVFFPGNQEKDPLLKNQEFKGVS

SEQ ID NO: 10511 - protein, 356 aa, Homo sapiens
MRPTLLWSLLLLLGVFAAAAAAPPAQLTLETYQEWCNDSAATHDPLSQLPAPQHPKIRLYNAEQVLSWEPVALSNSTRPVVYQVQFKYTDSKWFTADIMSIGVNCTQITATECDFTAASPSAGFPMDFNVTLRLRAELGALHSAWVTMPWFQHYRNVTVGPPENIEVTPGEGSLIIRFSSPFDIADTSTAFFCYYVHYWEKGGIQQVKGPFRSNSISLDNLKPSRVYCLQVQAQLLWNKSNIFRVGHLSNISCYETMADASTELQQVILISVGTFSLLSVLAGACFFLVLKYRGLIKYWFHTPPSIPLQIEEYLKDPTQPILEALDKDSSPKDDVWDSVSIISFPEKEQEDVLQTL

SEQ ID NO: 10512 - protein, 347 aa, Homo sapiens
MGARGAPSRRRQAGRRLRYLPTGSFPFLLLLLLLCIQLGGGQKKKENLLAEKVEQLMEWSSRRSIFRMNGDKFRKFIKAPPRNYSMIVMFTALQPQRQCSVCRQANEEYQILANSWRYSSAFCNKLFFSMVDYDEGTDVFQQLNMNSAPTFMHFPPKGRPKRADTFDLQRIGFAAEQLAKWIADRTDVHIRVFRPPNYSGTIALALLVSLVGGLLYLRRNNLEFIYNKTGWAMVSLCIVFAMTSGQMWNHIRGPPYAHKNPHNGQVSYIHGSSQAQFVAESHIILVLNAAITMGMVLLNEAATSKGDVGKRRIICLVGLGLVVFFFSFLLSIFRSKYHGYPYSFLIK

SEQ ID NO: 10513 - protein, 2090 aa, Homo sapiens
MDEVEQDQHEARLKELFDSFDTTGTGSLGQEELTDLCHMLSLEEVAPVLQQTLLQDNLLGRVHFDQFKEALILILSRTLSNEEHFQEPDCSLEAQPKYVRGGKRYGRRSLPEFQESVEEFPEVTVIEPLDEEARPSHIPAGDCSEHWKTQRSEEYEAEGQLRFWNPDDLNASQSGSSPPQDWIEEKLQEVCEDLGITRDGHLNRKKLVSICEQYGLQNVDGEMLEEVFHNLDPDGTMSVEDFFYGLFKNGKSLTPSASTPYRQLKRHLSMQSFDESGRRTTTSSAMTSTIGFRVFSCLDDGMGHASVERILDTWQEEGIENSQEILKALDFSLDGNINLTELTLALENELLVTKNSIHQAALASFKAEIRHLLERVDQVVREKEKLRSDLDKAEKLKSLMASEVDDHHAAIERRNEYNLRKLDEEYKERIAALKNELRKEREQILQQAGKQRLELEQEIEKAKTEENYIRDRLALSLKENSRLENELLENAEKLAEYENLTNKLQRNLENVLAEKFGDLDPSSAEFFLQEERLTQMRNEYERQCRVLQDQVDELQSELEEYRAQGRVLRLPLKNSPSEEVEANSGGIEPEHGLGSEECNPLNMSIEAELVIEQMKEQHHRDICCLRLELEDKVRHYEKQLDETVVSCKKAQENMKQRHENETHTLEKQISDLKNEIAELQGQAAVLKEAHHEATCRHEEEKKQLQVKLEEEKTHLQEKLRLQHEMELKARLTQAQASFEREREGLQSSAWTEEKVRGLTQELEQFHQEQLTSLVEKHTLEKEELRKELLEKHQRELQEGREKMETECNRRTSQIEAQFQSDCQKVTERCESALQSLEGRYRQELKDLQEQQREEKSQWEFEKDELTQECAEAQELLKETLKREKTTSLVLTQEREMLEKTYKEHLNSMVVERQQLLQDLEDLRNVSETQQSLLSDQILELKSSHKRELREREEVLCQAGASEQLASQRLERLEMEHDQERQEMMSKLLAMENIHKATCETADRERAEMSTEISRLQSKIKEMQQATSPLSMLQSGCQVIGEEEVEGDGALSLLQQGEQLLEENGDVLLSLQRAHEQAVKENVKMATEISRLQQRLQKLEPGLVMSSCLDEPATEFFGNTAEQTEQFLQQNRTKQVEGVTRRHVLSDLEDDEVRDLGSTGTSSVQRQEVKIEESEASVEGFSELENSEETRTESWELKNQISQLQEQLMMLCADCDRASEKKQDLLFDVSVLKKKLKMLERIPEASPKYKLLYEDVSRENDCLQEELRMMETRYDEALENNKELTAEVFRLQDELKKMEEVTETFLSLEKSYDEVKIENEGLNVLVLRLQGKIEKLQESVVQRCDCCLWEASLENLEIEPDGNILQLNQTLEECVPRVRSVHHVIEECKQENQYLEGNTQLLEKVKAHEIAWLHGTIQTHQERPRVQNQVILEENTTLLGFQDKHFQHQATIAELELEKTKLQELTRKLKERVTILVKQKDVLSHGEKEEELKAMMHDLQITCSEMQQKVELLRYESEKLQQENSILRNEITTLNEEDSISNLKLGTLNGSQEEMWQKTETVKQENAAVQKMVENLKKQISELKIKNQQLDLENTELSQKNSQNQEKLQELNQRLTEMLCQKEKEPGNSALEEREQEKFNLKEELERCKVQSSTLVSSLEAELSEVKIQTHIVQQENHLLKDELEKMKQLHRCPDLSDFQQKISSVLSYNEKLLKEKEALSEELNSCVDKLAKSSLLEHRIATMKQEQKSWEHQSASLKSQLVASQEKVQNLEDTVQNVNLQMSRMKSDLRVTQQEKEALKQEVMSLHKQLQNAGGKSWAPEIATHPSGLHNQQKRLSWDKLDHLMNEEQQLLWQENERLQTMVQNTKAELTHSREKVRQLESNLLPKHQKHLNPSGTMNPTEQEKLSLKRECDQFQKEQSPANRKVSQMNSLEQELETIHLENEGLKKKQVKLDEQLMEMQHLRSTATPSPSPHAWDLQLLQQQACPMVPREQFLQLQRQLLQAERINQHLQEELENRTSETNTPQGNQEQLVTVMEERMIEVEQKLKLVKRLLQEKVNQLKEQVSLPGHLCSPTSHSSFNSSFTSLYCH

SEQ ID NO: 10514 - protein, 1977 aa, Homo sapiens
MPGEQMDPTGSQLDSDFSQQDTPCLIIEDSQPESQVLEDDSGSHFSMLSRHLPNLQTHKENPVLDVVSNPEQTAGEERGDGNSGFNEHLKENKVADPVDSSNLDTCGSISQVIEQLPQPNRTSSVLGMSVESAPAVEEEKGEELEQKEKEKEEDTSGNTTHSLGAEDTASSQLGFGVLELSQSQDVEENTVPYEVDKEQLQSVTTNSGYTRLSDVDANTAIKHEEQSNEDIPIAEQSSKDIPVTAQPSKDVHVVKEQNPPPARSEDMPFSPKASVAAMEAKEQLSAQELMESGLQIQKSPEPEVLSTQEDLFDQSNKTVSSDGCSTPSREEGGCSLASTPATTLHLLQLSGQRSLVQDSLSTNSSDLVAPSPDAFRSTPFIVPSSPTEQEGRQDKPMDTSVLSEEGGEPFQKKLQSGEPVELENPPLLPESTVSPQASTPISQSTPVFPPGSLPIPSQPQFSHDIFIPSPSLEEQSNDGKKDGDMHSSSLTVECSKTSEIEPKNSPEDLGLSLTGDSCKLMLSTSEYSQSPKMESLSSHRIDEDGENTQIEDTEPMSPVLNSKFVPAENDSILMNPAQDGEVQLSQNDDKTKGDDTDTRDDISILATGCKGREETVAEDVCIDLTCDSGSQAVPSPATRSEALSSVLDQEEAMEIKEHHPEEGSSGSEVEEIPETPCESQGEELKEENMESVPLHLSLTETQSQGLCLQKEMPKKECSEAMEVETSVISIDSPQKLAILDQELEHKEQEAWEEATSEDSSVVIVDVKEPSPRVDVSCEPLEGVEKCSDSQSWEDIAPEIEPCAENRLDTKEEKSVEYEGDLKSGTAETEPVEQDSSQPSLPLVRADDPLRLDQELQQPQTQEKTSNSLTEDSKMANAKQLSSDAEAQKLGKPSAHASQSFCESSSETPFHFTLPKEGDIIPPLTGATPPLIGHLKLEPKRHSTPIGISNYPESTIATSDVMSESMVETHDPILGSGKGDSGAAPDVDDKLCLRMKLVSPETEASEESLQFNLEKPATGERKNGSTAVAESVASPQKTMSVLSCICEARQENEARSEDPPTTPIRGNLLHFPSSQGEEEKEKLEGDHTIRQSQQPMKPISPVKDPVSPASQKMVIQGPSSPQGEAMVTDVLEDQKEGRSTNKENPSKALIERPSQNNIGIQTMECSLRVPETVSAATQTIKNVCEQGTSTVDQNFGKQDATVQTERGSGEKPVSAPGDDTESLHSQGEEEFDMPQPPHGHVLHRHMRTIREVRTLVTRVITDVYYVDGTEVERKVTEETEEPIVECQECETEVSPSQTGGSSGDLGDISSFSSKASSLHRTSSGTSLSAMHSSGSSGKGAGPLRGKTSGTEPADFALPSSRGGPGKLSPRKGVSQTGTPVCEEDGDAGLGIRQGGKAPVTPRGRGRRGRPPSRTTGTRETAVPGPLGIEDISPNLSPDDKSFSRVVPRVPDSTRRTDVGAGALRRSDSPEIPFQAAAGPSDGLDASSPGNSFVGLRVVAKWSSNGYFYSGKITRDVGAGKYKLLFDDGYECDVLGKDILLCDPIPLDTEVTALSEDEYFSAGVVKGHRKESGELYYSIEKEGQRKWYKRMAVILSLEQGNRLREQYGLGPYEAVTPLTKAADISLDNLVEGKRKRRSNVSSPATPTASSSSSTTPTRKITESPRASMGVLSGKRKLITSEEERSPAKRGRKSATVKPGAVGAGEFVSPCESGDNTGEPSALEEQRGPLPLNKTLFLGYAFLLTMATTSDKLASRSKLPDGPTGSSEEEEEFLEIPPFNKQYTESQLRAGAGYILEDFNEAQCNTAYQCLLIADQHCRTRKYFLCLASGIPCVSHVWVHDSCHANQLQNYRNYLLPAGYSLEEQRILDWQPRENPFQNLKVLLVSDQQQNFLELWSEILMTGGAASVKQHHSSAHNKDIALGVFDVVVTDPSCPASVLKCAEALQLPVVSQEWVIQCLIVGERIGFKQHPKYKHDYVSH

SEQ ID NO: 10515 - protein, 247 aa, Homo sapiens
MRGNLALVGVLISLAFLSLLPSGHPQPAGDDACSVQILVPGLKGDAGEKGDKGAPGRPGRVGPTGEKGEKGDSGDIGPPGPNGEPGLPCECSQLRKAIGEMDNQVSQLTSELKFIKNAVAGVRETESKIYLLVKEEKRYADAQLSCQGRGGTLSMPKDEAANGLMAAYLAQAGLARVFIGINDLEKEGAFVYSDHSPMRTFNKWRSGEPNNAYDEEDCVEMVASGGWNDVACHTTMYFMCEFDKENM

SEQ ID NO: 10516 - protein, 319 aa, Homo sapiens
MLWRQLIYWQLLALFFLPFCLCQDEYMEVSGRTNKVVARIVQSHQQTGRSGSRREKVRERSHPKTGTVDNNTSTDLKSLRPDELPHPEVDDLAQITTFWGQSPQTGGLPPDCSKCCHGDYSFRGYQGPPGPPGPPGIPGNHGNNGNNGATGHEGAKGEKGDKGDLGPRGERGQHGPKGEKGYPGIPPELQIAFMASLATHFSNQNSGIIFSSVETNIGNFFDVMTGRFGAPVSGVYFFTFSMMKHEDVEEVYVYLMHNGNTVFSMYSYEMKGKSDTSSNHAVLKLAKGDEVWLRMGNGALHGDHQRFSTFAGFLLFETK

SEQ ID NO: 10517 - protein, 173 aa, Homo sapiens
MGTSALWALWLLLALCWAPRESGATGTGRKAKCEPSQFQCTNGRCITLLWKCDGDEDCVDGSDEKNCVKKTCAESDFVCNNGQCVPSRWKCDGDPDCEDGSDESPEQCRNITCSPDEFTCSSGRCISRNFVCNGQDDCSDGSDELDCAPPTCGAHEFQCSTSSCIPISWVCDD

SEQ ID NO: 10518 - protein, 845 aa, Homo sapiens
MGTSALWALWLLLALCWAPRESGATGTGRKAKCEPSQFQCTNGRCITLLWKCDGDEDCVDGSDEKNCVKKTCAESDFVCNNGQCVPSRWKCDGDPDCEDGSDESPEQCHMRTCRIHEISCGAHSTQCIPVSWRCDGENDCDSGEDEENCGNITCSPDEFTCSSGRCISRNFVCNGQDDCSDGSDELDCAPPTCGAHEFQCSTSSCIPISWVCDDDADCSDQSDESLEQCGRQPVIHTKCPASEIQCGSGECIHKKWRCDGDPDCKDGSDEVNCPSRTCRPDQFECEDGSCIHGSRQCNGIRDCVDGSDEVNCKNVNQCLGPGKFKCRSGECIDISKVCNQEQDCRDWSDEPLKECHINECLVNNGGCSHICKDLVIGYECDCAAGFELIDRKTCGDIDECQNPGICSQICINLKGGYKCECSRGYQMDLATGVCKAVGKEPSLIFTNRRDIRKIGLERKEYIQLVEQLRNTVALDADIAAQKLFWADLSQKAIFSASIDDKVGRHVKMIDNVYNPAAIAVDWVYKTIYWTDAASKTISVATLDGTKRKFLFNSDLREPASIAVDPLSGFVYWSDWGEPAKIEKAGMNGFDRRPLVTADIQWPNGITLDLIKSRLYWLDSKLHMLSSVDLNGQDRRIVLKSLEFLAHPLALTIFEDRVYWIDGENEAVYGANKFTGSELATLVNNLNDAQDIIVYHELVQPSGKNWCEEDMENGGCEYLCLPAPQINDHSPKYTCSCPSGYNVEENGRDCQRINVTTAVSEVSVPPKGTSAAWAILPLLLLVMAAVGGYLMWRNWQHKNMKSMNFDNPVYLKTTEEDLSIDIGRHSASVGHTYPAISVVSTDDDLA

SEQ ID NO: 10519 - protein, 873 aa, Homo sapiens
MGTSALWALWLLLALCWAPRESGATGTGRKAKCEPSQFQCTNGRCITLLWKCDGDEDCVDGSDEKNCVKKTCAESDFVCNNGQCVPSRWKCDGDPDCEDGSDESPEQCHMRTCRIHEISCGAHSTQCIPVSWRCDGENDCDSGEDEENCGNITCSPDEFTCSSGRCISRNFVCNGQDDCSDGSDELDCAPPTCGAHEFQCSTSSCIPISWVCDDDADCSDQSDESLEQCGRQPVIHTKCPASEIQCGSGECIHKKWRCDGDPDCKDGSDEVNCPSRTCRPDQFECEDGSCIHGSRQCNGIRDCVDGSDEVNCKNVNQCLGPGKFKCRSGECIDISKVCNQEQDCRDWSDEPLKECHINECLVNNGGCSHICKDLVIGYECDCAAGFELIDRKTCGDIDECQNPGICSQICINLKGGYKCECSRGYQMDLATGVCKAVGKEPSLIFTNRRDIRKIGLERKEYIQLVEQLRNTVALDADIAAQKLFWADLSQKAIFSASIDDKVGRHVKMIDNVYNPAAIAVDWVYKTIYWTDAASKTISVATLDGTKRKFLFNSDLREPASIAVDPLSGFVYWSDWGEPAKIEKAGMNGFDRRPLVTADIQWPNGITLDLIKSRLYWLDSKLHMLSSVDLNGQDRRIVLKSLEFLAHPLALTIFEDRVYWIDGENEAVYGANKFTGSELATLVNNLNDAQDIIVYHELVQPSGKNWCEEDMENGGCEYLCLPAPQINDHSPKYTCSCPSGYNVEENGRDCQSTATTVTYSETKDTNTTEISATSGLVPGGINVTTAVSEVSVPPKGTSAAWAILPLLLLVMAAVGGYLMWRNWQHKNMKSMNFDNPVYLKTTEEDLSIDIGRHSASVGHTYPAISVVSTDDDLA

SEQ ID NO: 10520 - protein, 545 aa, Homo sapiens
MALRRGGCGALGLLLLLLGAACLIPRSAQVRRLARCPATCSCTKESIICVGSSWVPRIVPGDISSLSLVNGTFSEIKDRMFSHLPSLQLLLLNSNSFTIIRDDAFAGLFHLEYLFIEGNKIETISRNAFRGLRDLTHLSLANNHIKALPRDVFSDLDSLIELDLRGNKFECDCKAKWLYLWLKMTNSTVSDVLCIGPPEYQEKKLNDVTSFDYECTTTDFVVHQTLPYQSVSVDTFNSKNDVYVAIAQPSMENCMVLEWDHIEMNFRSYDNITGQSIVGCKAILIDDQVFVVVAQLFGGSHIYKYDESWTKFVKFQDIEVSRISKPNDIELFQIDDETFFVIADSSKAGLSTVYKWNSKGFYSYQSLHEWFRDTDAEFVDIDGKSHLILSSRSQVPIILQWNKSSKKFVPHGDIPNMEDVLAVKSFRMQNTLYLSLTRFIGDSRVMRWNSKQFVEIQALPSRGAMTLQPFSFKDNHYLALGSDYTFSQIYQWDKEKQLFKKFKEIYVQAPRSFTAVSTDRRDFFFASSFKGKTKIFEHIIVDLSL

SEQ ID NO: 10521 - protein, 240 aa, Homo sapiens
MLALLCSCLLLAAGASDAWTGEDSAEPNSDSAEWIRDMYAKVTEIWQEVMQRRDDDGALHAACQVQPSATLDAAQPRVTGVVLFRQLAPRAKLDAFFALEGFPTEPNSSSRAIHVHQFGDLSQGCESTGPHYNPLAVPHPQHPGDFGNFAVRDGSLWRYRAGLAASLAGPHSIVGRAVVVHAGEDDLGRGGNQASVENGNAGRRLACCVVGVCGPGLWERQAREHSERKKRRRESECKAA

SEQ ID NO: 10522 - protein, 387 aa, Homo sapiens
MEDDAPVIYGLEFQARALTPQTAETDAIRFLVGTQSLKYDNQIHIIDFDDENNIINKNVLLHQAGEIWHISASPADRGVLTTCYNRTSDSKVLTCAAVWRMPKELESGSHESPDDSSSTAQTLELLCHLDNTAHGNMACVVWEPMGDGKKIISLADNHILLWDLQESSSQAVLASSASLEGKGQLKFTSGRWSPHHNCTQVATANDTTLRGWDTRSMSQIYCIENAHGQLVRDLDFNPNKQYYLASCGDDCKVKFWDTRNVTEPVKTLEEHSHWVWNVRYNHSHDQLVLTGSSDSRVILSNMVSISSEPFGHLVDDDDISDQEDHRSEEKSKEPLQDNVIATYEEHEDSVYAVDWSSADPWLFASLSYDGRLVINRVPRALKYHILL

SEQ ID NO: 10523 - protein, 317 aa, Homo sapiens
MGLLLPLALCILVLCCGAMSPPQLALNPSALLSRGCNDSDVLAVAGFALRDINKDRKDGYVLRLNRVNDAQEYRRAISKKKIYMTCPDCPSSIPTDSSNHQVLEAATESLAKYNNENTSKQYSLFKVTRASSQWVVGPSYFVEYLIKESPCTKSQASSCSLQSSDSVPVGLCKGSLTRTHWEKFVSVTCDFFESQAPATGSENSAVNQKPTNLPKVEESQQKNTPPTDSPSKAGPRGSVQYLPDLDDKNSQEKGPQEAFPVHLDLTTNPQGETLDISFLFLEPMEEKLVVLPFPKEKARTAECPGPAQNASPLVLPP

SEQ ID NO: 10524 - protein, 345 aa, Homo sapiens
MGLLLPLALCILVLCCGAMSPPQLALNPSALLSRGCNDSDVLAVAGFALRDINKDRKDGYVLRLNRVNDAQEYRRVYGQCKAIFYMNNPSRVLYLAAYNCTLRPVSKKKIYMTCPDCPSSIPTDSSNHQVLEAATESLAKYNNENTSKQYSLFKVTRASSQWVVGPSYFVEYLIKESPCTKSQASSCSLQSSDSVPVGLCKGSLTRTHWEKFVSVTCDFFESQAPATGSENSAVNQKPTNLPKVEESQQKNTPPTDSPSKAGPRGSVQYLPDLDDKNSQEKGPQEAFPVHLDLTTNPQGETLDISFLFLEPMEEKLVVLPFPKEKARTAECPGPAQNASPLVLPP

SEQ ID NO: 10525 - protein, 333 aa, Homo sapiens
MRIWWLLLAIEICTGNINSQDTCRQGHPGIPGNPGHNGLPGRDGRDGAKGDKGDAGEPGCPGSPGKDGTSGEKGERGADGKVEAKGIKGDQGSRGSPGKHGPKGLAGPMGEKGLRGETGPQGQKGNKGDVGPTGPEGPRGNIGPLGPTGLPGPMGPIGKPGPKGEAGPTGPQGEPGVRGIRGWKGDRGEKGKIGETLVLPKSAFTVGLTVLSKFPSSDVPIKFDKILYNEFNHYDTAVGKFTCHIAGVYYFTYHITVFSRNVQVSLVKNGVKILHTRDAYVSSEDQASGSIVLQLKLGDEMWLQVTGGERFNGLFADEDDDTTFTGFLLFSSQ

SEQ ID NO: 10526 - protein, 747 aa, Homo sapiens
MLGKGVVGGGGGTKAPKPSFVSYVRPEEIHTNEKEVTEKEVTLHLLPGEQLLCEASTVLKYVQEDSCQHGVYGRLVCTDFKIAFLGDDESALDNDETQFKNKVIGENDITLHCVDQIYGVFDEKKKTLFGQLKKYPEKLIIHCKDLRVFQFCLRYTKEEEVKRIVSGIIHHTQAPKLLKRLFLFSYATAAQNNTVTDPKNHTVMFDTLKDWCWELERTKGNMKYKAVSVNEGYKVCERLPAYFVVPTPLPEENVQRFQGHGIPIWCWSCHNGSALLKMSALPKEQDDGILQIQKSFLDGIYKTIHRPPYEIVKTEDLSSNFLSLQEIQTAYSKFKQLFLIDNSTEFWDTDIKWFSLLESSSWLDIIRRCLKKAIEITECMEAQNMNVLLLEENASDLCCLISSLVQLMMDPHCRTRIGFQSLIQKEWVMGGHCFLDRCNHLRQNDKEEVPVFLLFLDCVWQLVHQHPPAFEFTETYLTVLSDSLYIPIFSTFFFNSPHQKDTNMGREGQDTQSKPLNLLTVWDWSVQFEPKAQTLLKNPLYVEKPKLDKGQRKGMRFKHQRQLSLPLTQSKSSPKRGFFREETDHLIKNLLGKRISKLINSSDELQDNFREFYDSWHSKSTDYHGLLLPHIEGPEIKVWAQRYLRWIPEAQILGGGQVATLSKLLEMMEEVQSLQEKIDERHHSQQAPQAEAPCLLRNSARLSSLFPFALLQRHSSKPVLPTSGWKALGDEDDLAKREDEFVDLGDV

SEQ ID NO: 10527 - protein, 99 aa, Homo sapiens
MRIWWLLLAIEICTGNINSQDTCRQGHPGIPGNPGHNGLPGRDGRDGAKGDKGDAGEPGCPGSPGKDGTSGEKGERGADGKVEAKGIKGMFRCLWSKTE

SEQ ID NO: 10528 - protein, 229 aa, Homo sapiens
MNLEGLEMIAVLIVIVLFVKLLEQFGLIEAGLEDSVEDELEMATVRHRPEALELLEAQSKFTKKELQILYRGFKNECPSGVVNEETFKEIYSQFFPQGDSTTYAHFLFNAFDTDHNGAVSFEDFIKGLSILLRGTVQEKLNWAFNLYDINKDGYITKEEMLDIMKAIYDMMGKCTYPVLKEDAPRQHVETFFQKMDKNKDGVVTIDEFIESCQKDENIMRSMQLFENVI

SEQ ID NO: 10529 - protein, 276 aa, Homo sapiens
MKRLAARCFAGLLILSPLTVISDSRPADSGKAIEDGNLEEMEEEVRLKKRKRRRNVDKDPAKEDVEKAKKRRGRPPAEKLSPNPPKLTKQMNAIIDTVINYKDSSGRQLSEVFIQLPSRKELPEYYELIRKPVDFKKIKERIRNHKYRSLGDLEKDVMLLCHNAQTFNLEGSQIYEDSIVLQSVFKSARQKIAKEEESEDESNEEEEEEDEEESESEAKSVKVKIKLNKKDDKGRDKGKGKKRPNRGKAKPVVSDFDSDEEQDEREQSEGSGTDDE

SEQ ID NO: 10530 - protein, 760 aa, Homo sapiens
MRALAVLSVTLVMACTEAFFPFISRGKELLWGKPEESRVSSVLEESKRLVDTAMYATMQRNLKKRGILSPAQLLSFSKLPEPTSGVIARAAEIMETSIQAMKRKVNLKTQQSQHPTDALSEDLLSIIANMSGCLPYMLPPKCPNTCLANKYRPITGACNNRDHPRWGASNTALARWLPPVYEDGFSQPRGWNPGFLYNGFPLPPVREVTRHVIQVSNEVVTDDDRYSDLLMAWGQYIDHDIAFTPQSTSKAAFGGGADCQMTCENQNPCFPIQIITLRDYIPRILGPEAFQQYVGPYEGYDSTANPTVSNVFSTAAFRFGHATIHPLVRRLDASFQEHPDLPGLWLHQAFFSPWTLLRGGGLDPLIRGLLARPAKLQVQDQLMNEELTERLFVLSNSSTLDLASINLQRGRDHGLPGYNEWREFCGLPRLETPADLSTAIASRSVADKILDLYKHPDNIDVWLGGLAENFLPRARTGPLFACLIGKQMKALRDGDWFWWENSHVFTDAQRRELEKHSLSRVICDNTGLTRVPMDAFQVGKFPEDFESCDSITGMNLEAWRETFPQDDKCGFPESVENGDFVHCEESGRRVLVYSCRHGYELQGREQLTCTQEGWDFQPPLCKDVNECADGAHPPCHASARCRNTKGGFQCLCADPYELGDDGRTCVDSGRLPRVTWISMSLAALLIGGFAGLTSTVICRWTRTGTKSTLPISETGGGTPELRCGKHQAVGTSPQRAAAQDSEQESAGMEGRDTHRLPRAL

SEQ ID NO: 10531 - protein, 599 aa, Homo sapiens
MMNKLYIGNLSPAVTADDLRQLFGDRKLPLAGQVLLKSGYAFVDYPDQNWAIRAIETLSGKVELHGKIMEVDYSVSKKLRSRKIQIRNIPPHLQWEVLDGLLAQYGTVENVEQVNTDTETAVVNVTYATREEAKIAMEKLSGHQFENYSFKISYIPDEEVSSPSPPQRAQRGDHSSREQGHAPGGTSQARQIDFPLRILVPTQFVGAIIGKEGLTIKNITKQTQSRVDIHRKENSGAAEKPVTIHATPEGTSEACRMILEIMQKEADETKLAEEIPLKILAHNGLVGRLIGKEGRNLKKIEHETGTKITISSLQDLSIYNPERTITVKGTVEACASAEIEIMKKLREAFENDMLAVNQQANLIPGLNLSALGIFSTGLSVLSPPAGPRGAPPAAPYHPFTTHSGYFSSLYPHHQFGPFPHHHSYPEQEIVNLFIPTQAVGAIIGKKGAHIKQLARFAGASIKIAPAEGPDVSERMVIITGPPEAQFKAQGRIFGKLKEENFFNPKEEVKLEAHIRVPSSTAGRVIGKGGKTVNELQNLTSAEVIVPRDQTPDENEEVIVRIIGHFFASQTAQRKIREIVQQVKQQEQKYPQGVASQRSK

SEQ ID NO: 10532 - protein, 876 aa, Homo sapiens
MRALAVLSVTLVMACTEAFFPFISRGKELLWGKPEESRVSSVLEESKRLVDTAMYATMQRNLKKRGILSPAQLLSFSKLPEPTSGVIARAAEIMETSIQAMKRKVNLKTQQSQHPTDALSEDLLSIIANMSGCLPYMLPPKCPNTCLANKYRPITGACNNRDHPRWGASNTALARWLPPVYEDGFSQPRGWNPGFLYNGFPLPPVREVTRHVIQVSNEVVTDDDRYSDLLMAWGQYIDHDIAFTPQSTSKAAFGGGADCQMTCENQNPCFPIQLPEEARPAAGTACLPFYRSSAACGTGDQGALFGNLSTANPRQQMNGLTSFLDASTVYGSSPALERQLRNWTSAEGLLRVHARLRDSGRAYLPFVPPRAPAACAPEPGIPGETRGPCFLAGDGRASEVPSLTALHTLWLREHNRLAAALKALNAHWSADAVYQEARKVVGALHQIITLRDYIPRILGPEAFQQYVGPYEGYDSTANPTVSNVFSTAAFRFGHATIHPLVRRLDASFQEHPDLPGLWLHQAFFSPWTLLRGGYNEWREFCGLPRLETPADLSTAIASRSVADKILDLYKHPDNIDVWLGGLAENFLPRARTGPLFACLIGKQMKALRDGDWFWWENSHVFTDAQRRELEKHSLSRVICDNTGLTRVPMDAFQVGKFPEDFESCDSITGMNLEAWRETFPQDDKCGFPESVENGDFVHCEESGRRVLVYSCRHGYELQGREQLTCTQEGWDFQPPLCKDVNECADGAHPPCHASARCRNTKGGFQCLCADPYELGDDGRTCVDSGRLPRVTWISMSLAALLIGGFAGLTSTVICRWTRTGTKSTLPISETGGGTPELRCGKHQAVGTSPQRAAAQDSEQESAGMEGRDTHRLPRAL

SEQ ID NO: 10533 - protein, 66 aa, Homo sapiens
MKPLLVVFVFLFLWDPVLAGINSLSSEMHKKCYKNGICRLECYESEMLVAYCMFQLECCVKGNPAP

SEQ ID NO: 10534 - protein, 77 aa, Homo sapiens
MATRSVLLALVVLNLLFYVPPGRSGPNVYIQKIFASCWRLQGTCRPKCLKNEQYRILCDTIHLCCVNPKYLPILTGK

SEQ ID NO: 10535 - protein, 78 aa, Homo sapiens
MNLCLSALLFFLVILLPSGKGMFGNDGVKVRTCTSQKAVCFFGCPPGYRWIAFCHNILSCCKNMTRFQPPQAKDPWVH

SEQ ID NO: 10536 - protein, 518 aa, Homo sapiens
MDEKCSFCNLQREAVSDCIPSLDSSQSTPTEELSSQGQSNTDKIECQAENYLNALFRKKDLPQNCDPNIPLVAQELMKKMIRQFAIEYISKSGKTQENRNGSIGPSIVCKSIQMNQAENSLQEEQEGPLDLTVNRMQEQNTQQGDGVLDLSTKKTSIKSEESSICDPSSENSVAGRLHRNREDYVERSAEFADGLLSKALKDIQSGALDINKAGILYGIPQKTLLLHLEALPAGKPASFKNKTRDFHDSYSYKDSKETCAVLQKVALWARAQAERTEKSKLNLLETSEIKFPTASTYLHQLTLQKMVTQFKEKNESLQYETSNPTVQLKIPQLRVSSVSKSQPDGSGLLDVMYQVSKTSSVLEGSALQKLKNILPKQNKIECSGPVTHSSVDSYFLHGDLSPLCLNSKNGTVDGTSENTEDGLDRKDSKQPRKKRGRYRQYDHEIMEEAIAMVMSGKMSVSKAQGIYGVPHSTLEYKVKERSGTLKTPPKKKLRLPDTGLYNMTDSGTGSCKNSSKPV

SEQ ID NO: 10537 - protein, 794 aa, Homo sapiens
MLTRNCLSLLLWVLFDGGLLTPLQPQPQQTLATEPRENVIHLPGQRSHFQRVKRGWVWNQFFVLEEYVGSEPQYVGKLHSDLDKGEGTVKYTLSGDGAGTVFTIDETTGDIHAIRSLDREEKPFYTLRAQAVDIETRKPLEPESEFIIKVQDINDNEPKFLDGPYVATVPEMSPVGAYVLQVKATDADDPTYGNSARVVYSILQGQPYFSIDPKTGVIRTALPNMDREVKEQYQVLIQAKDMGGQLGGLAGTTIVNITLTDVNDNPPRFPKSIFHLKVPESSPIGSAIGRIRAVDPDFGQNAEIEYNIVPGDGGNLFDIVTDEDTQEGVIKLKKPLDFETKKAYTFKVEASNLHLDHRFHSAGPFKDTATVKISVLDVDEPPVFSKPLYTMEVYEDTPVGTIIGAVTAQDLDVGSSAVRYFIDWKSDGDSYFTIDGNEGTIATNELLDRESTAQYNFSIIASKVSNPLLTSKVNILINVLDVNEFPPEISVPYETAVCENAKPGQIIQIVSAADRDLSPAGQQFSFRLSPEAAIKPNFTVRDFRNNTAGIETRRNGYSRRQQELYFLPVVIEDSSYPVQSSTNTMTIRVCRCDSDGTILSCNVEAIFLPVGLSTGALIAILLCIVILLAIVVLYVALRRQKKKDTLMTSKEDIRDNVIHYDDEGGGEEDTQAFDIGALRNPKVIEENKIRRDIKPDSLCLPRQRPPMEDNTDIRDFIHQRLQENDVDPTAPPYDSLATYAYEGSGSVAESLSSIDSLTTEADQDYDYLTDWGPRFKVLADMFGEEESYNPDKVT

SEQ ID NO: 10538 - protein, 423 aa, Homo sapiens
MALKVLLEQEKTFFTLLVLLGYLSCKVTCESGDCRQQEFRDRSGNCVPCNQCGPGMELSKECGFGYGEDAQCVTCRLHRFKEDWGFQKCKPCLDCAVVNRFQKANCSATSDAICGDCLPGFYRKTKLVGFQDMECVPCGDPPPPYEPHCASKVNLVKIASTASSPRDTALAAVICSALATVLLALLILCVIYCKRQFMEKKPSWSLRSQDIQYNGSELSCFDRPQLHEYAHRACCQCRRDSVQTCGPVRLLPSMCCEEACSPNPATLGCGVHSAASLQARNAGPAGEMVPTFFGSLTQSICGEFSDAWPLMQNPMGGDNISFCDSYPELTGEDIHSLNPELESSTSLDSNSSQDLVGGAVPVQSHSENFTAATDLSRYNNTLVESASTQDALTMRSQLDQESGAVIHPATQTSLQVRQRLGSL

SEQ ID NO: 10539 - protein, 331 aa, Homo sapiens
MLLSQNAFIFRSLNLVLMVYISLVFGISYDSPDYTDESCTFKISLRNFRSILSWELKNHSIVPTHYTLLYTIMSKPEDLKVVKNCANTTRSFCDLTDEWRSTHEAYVTVLEGFSGNTTLFSCSHNFWLAIDMSFEPPEFEIVGFTNHINVMVKFPSIVEEELQFDLSLVIEEQSEGIVKKHKPEIKGNMSGNFTYIIDKLIPNTNYCVSVYLEHSDEQAVIKSPLKCTLLPPGQESESAESAKIGGIITVFLIALVLTSTIVTLKWIGYICLRNSLPKVLRQGLAKGWNAVAIHRCSHNALQSETPELKQSSCLSFPSSWDYKRASLCPSD

SEQ ID NO: 10540 - protein, 174 aa, Homo sapiens
MRALAVLSVTLVMACTEAFFPFISRGKELLWGKPEESRVSSVLEESKRLVDTAMYATMQRNLKKRGILSPAQLLSFSKLPEPTSGVIARAAEIMETSIQAMKRKVNLKTQQSQHPTDALSEDLLSIIANMSGCLPYMLPPKCPNTCLANKYRPITGACNNRKMKYKPDHSETAN

SEQ ID NO: 10541 - protein, 204 aa, Homo sapiens
MMPSCNRSCSCSRGPSVEDGKWYGVRSYLHLFYEDCAGTALSDDPEGPPVLCPRRPWPSLCWKISLSSGTLLLLLGVAALTTGYAVPPKLEGIGEGEFLVLDQRAADYNQALGTCRLAGTALCVAAGVLLAICLFWAMIGWLSQDTKAEPLDPEADSHVEVFGDEPEQQLSPIFRNASGQSWFSPPASPFGQSSVQTIQPKRDS

SEQ ID NO: 10542 - protein, 4579 aa, Homo sapiens
METKENRWVPVTVLPGCVGCRTVAALASWTVRDVKERIFAETGFPVSEQRLWRGGRELSDWIKIGDLTSKNCHLFVNLQSKGLKGGGRFGQTTPPLVDFLKDILRRYPEGGQILKELIQNAEDAGATEVKFLYDETQYGTETLWSKDMAPYQGPALYVYNNAVFTPEDWHGIQEIARSRKKDDPLKVGRFGIGFNSVYHITDVPCIFSGDQIGMLDPHQTLFGPHESGQCWNLKDDSKEISELSDQFAPFVGIFGSTKETFINGNFPGTFFRFPLRLQPSQLSSNLYNKQKVLELFESFRADADTVLLFLKSVQDVSLYVREADGTEKLVFRVTSSESKALKHERPNSIKILGTAISNYCKKTPSNNITCVTYHVNIVLEEESTKDAQKTSWLVCNSVGGRGISSKLDSLADELKFVPIIGIAMPLSSRDDEAKGATSDFSGKAFCFLPLPPGEESSTGLPVHISGFFGLTDNRRSIKWRELDQWRDPAALWNEFLVMNVVPKAYATLILDSIKRLEMEKSSDFPLSVDVIYKLWPEASKVKVHWQPVLEPLFSELLQNAVIYSISCDWVRLEQVYFSELDENLEYTKTVLNYLQSSGKQIAKVPGNVDAAVQLTAASGTTPVRKVTPAWVRQVLRKCAHLGCAEEKLHLLEFVLSDQAYSELLGLELLPLQNGNFVPFSSSVSDQDVIYITSAEYPRSLFPSLEGRFILDNLKPHLVAALKEAAQTRGRPCTQLQLLNPERFARLIKEVMNTFWPGRELIVQWYPFDENRNHPSVSWLKMVWKNLYIHFSEDLTLFDEMPLIPRTILEEGQTCVELIRLRIPSLVILDDESEAQLPEFLADIVQKLGGFVLKKLDASIQHPLIKKYIHSPLPSAVLQIMEKMPLQKLCNQITSLLPTHKDALRKFLASLTDSSEKEKRIIQELAIFKRINHSSDQGISSYTKLKGCKVLHHTAKLPADLRLSISVIDSSDEATIRLANMLKIEQLKTTSCLKLVLKDIENAFYSHEEVTQLMLWVLENLSSLKNENPNVLEWLTPLKFIQISQEQMVSAGELFDPDIEVLKDLFCNEEGTYFPPSVFTSPDILHSLRQIGLKNEASLKEKDVVQVAKKIEALQVGACPDQDVLLKKAKTLLLVLNKNHTLLQSSEGKMTLKKIKWVPACKERPPNYPGSLVWKGDLCNLCAPPDMCDVGHAILIGSSLPLVESIHVNLEKALGIFTKPSLSAVLKHFKIVVDWYSSKTFSDEDYYQFQHILLEIYGFMHDHLNEGKDSFRALKFPWVWTGKKFCPLAQAVIKPIHDLDLQPYLHNVPKTMAKFHQLFKVCGSIEELTSDHISMVIQKIYLKSDQDLSEQESKQNLHLMLNIIRWLYSNQIPASPNTPVPIHHSKNPSKLIMKPIHECCYCDIKVDDLNDLLEDSVEPIILVHEDIPMKTAEWLKVPCLSTRLINPENMGFEQSGQREPLTVRIKNILEEYPSVSDIFKELLQNADDANATECSFLIDMRRNMDIRENLLDPGMAACHGPALWSFNNSQFSDSDFVNITRLGESLKRGEVDKVGKFGLGFNSVYHITDIPIIMSREFMIMFDPNINHISKHIKDKSNPGIKINWSKQQKRLRKFPNQFKPFIDVFGCQLPLTVEAPYSYNGTLFRLSFRTQQEAKVSEVSSTCYNTADIYSLVDEFSLCGHRLIIFTQSVKSMYLKYLKIEETNPSLAQDTVIIKKKSCSSKALNTPVLSVLKEAAKLMKTCSSSNKKLPSDEPKSSCILQITVEEFHHVFRRIADLQSPLFRGPDDDPAALFEMAKSGQSKKPSDELSQKTVECTTWLLCTCMDTGEALKFSLSESGRRLGLVPCGAVGVQLSEIQDQKWTVKPHIGEVFCYLPLRIKTGLPVHINGCFAVTSNRKEIWKTDTKGRWNTTFMRHVIVKAYLQVLSVLRDLATSGELMDYTYYAVWPDPDLVHDDFSVICQGFYEDIAHGKGKELTKVFSDGSTWVSMKNVRFLDDSILKRRDVGSAAFKIFLKYLKKTGSKNLCAVELPSSVKLGFEEAGCKQILLENTFSEKQFFSEVFFPNIQEIEAELRDPLMIFVLNEKVDEFSGVLRVTPCIPCSLEGHPLVLPSRLIHPEGRVAKLFDIKDGRFPYGSTQDYLNPIILIKLVQLGMAKDDILWDDMLERAVSVAEINKSDHVAACLRSSILLSLIDEKLKIRDPRAKDFAAKYQTIRFLPFLTKPAGFSLDWKGNSFKPETMFAATDLYTAEHQDIVCLLQPILNENSHSFRGCGSVSLAVKEFLGLLKKPTVDLVINQLKEVAKSVDDGITLYQENITNACYKYLHEALMQNEITKMSIIDKLKPFSFILVENAYVDSEKVSFHLNFEAAPYLYQLPNKYKNNFRELFETVGVRQSCTVEDFALVLESIDQERGTKQITEENFQLCRRIISEGIWSLIREKKQEFCEKNYGKILLPDTNLMLLPAKSLCYNDCPWIKVKDTTVKYCHADIPREVAVKLGAVPKRHKALERYASNVCFTTLGTEFGQKEKLTSRIKSILNAYPSEKEMLKELLQNADDAKATEICFVFDPRQHPVDRIFDDKWAPLQGPALCVYNNQPFTEDDVRGIQNLGKGTKEGNPYKTGQYGIGFNSVYHITDCPSFISGNDILCIFDPHARYAPGATSISPGRMFRDLDADFRTQFSDVLDLYLGTHFKLDNCTMFRFPLRNAEMAKVSEISSVPASDRMVQNLLDKLRSDGAELLMFLNHMEKISICEIDKSTGALNVLYSVKGKITDGDRLKRKQFHASVIDSVTKKRQLKDIPVQQITYTMDTEDSEGNLTTWLICNRSGFSSMEKVSKSVISAHKNQDITLFPRGGVAACITHNYKKPHRAFCFLPLSLETGLPFHVNGHFALDSARRNLWRDDNGVGVRSDWNNSLMTALIAPAYVELLIQLKKRYFPGSDPTLSVLQNTPIHVVKDTLKKFLSFFPVNRLDLQPDLYCLVKALYNCIHEDMKRLLPVVRAPNIDGSDLHSAVIITWINMSTSNKTRPFFDNLLQDELQHLKNADYNITTRKTVAENVYRLKHLLLEIGFNLVYNCDETANLYHCLIDADIPVSYVTPADIRSFLMTFSSPDTNCHIGKLPCRLQQTNLKLFHSLKLLVDYCFKDAEENEIEVEGLPLLITLDSVLQTFDAKRPKFLTTYHELIPSRKDLFMNTLYLKYSNILLNCKVAKVFDISSFADLLSSVLPREYKTKSCTKWKDNFASESWLKNAWHFISESVSVKEDQEETKPTFDIVVDTLKDWALLPGTKFTVSANQLVVPEGDVLLPLSLMHIAVFPNAQSDKVFHALMKAGCIQLALNKICSKDSAFVPLLSCHTANIESPTSILKALHYMVQTSTFRAEKLVENDFEALLMYFNCNLNHLMSQDDIKILKSLPCYKSISGRYVSIGKFGTCYVLTKSIPSAEVEKWTQSSSSAFLEEKIHLKELYEVIGCVPVDDLEVYLKHLLPKIENLSYDAKLEHLIYLKNRLSSAEELSEIKEQLFEKLESLLIIHDANSRLKQAKHFYDRTVRVFEVMLPEKLFIPNDFFKKLEQLIKPKNHVTFMTSWVEFLRNIGLKYILSQQQLLQFAKEISVRANTENWSKETLQNTVDILLHHIFQERMDLLSGNFLKELSLIPFLCPERAPAEFIRFHPQYQEVNGTLPLIKFNGAQVNPKFKQCDVLQLLWTSCPILPEKATPLSIKEQEGSDLGPQEQLEQVLNMLNVNLDPPLDKVINNCRNICNITTLDEEMVKTRAKVLRSIYEFLSAEKREFRFQLRGVAFVMVEDGWKLLKPEEVVINLEYESDFKPYLYKLPLELGTFHQLFKHLGTEDIISTKQYVEVLSRIFKNSEGKQLDPNEMRTVKRVVSGLFRSLQNDSVKVRSDLENVRDLALYLPSQDGRLVKSSILVFDDAPHYKSRIQGNIGVQMLVDLSQCYLGKDHGFHTKLIMLFPQKLRPRLLSSILEEQLDEETPKVCQFGALCSLQGRLQLLLSSEQFITGLIRIMKHENDNAFLANEEKAIRLCKALREGLKVSCFEKLQTTLRVKGFNPIPHSRSETFAFLKRFGNAVILLYIQHSDSKDINFLLALAMTLKSATDNLISDTSYLIAMLGCNDIYRIGEKLDSLGVKYDSSEPSKLELPMPGTPIPAEIHYTLLMDPMNVFYPGEYVGYLVDAEGGDIYGSYQPTYTYAIIVQEVEREDADNSSFLGKIYQIDIGYSEYKIVSSLDLYKFSRPEESSQSRDSAPSTPTSPTEFLTPGLRSIPPLFSGRESHKTSSKHQSPKKLKVNSLPEILKEVTSVVEQAWKLPESERKKIIRRLYLKWHPDKNPENHDIANEVFKHLQNEINRLEKQAFLDQNADRASRRTFSTSASRFQSDKYSFQRFYTSWNQEATSHKSERQQQNKEKCPPSAGQTYSQRFFVPPTFKSVGNPVEARRWLRQARANFSAARNDLHKNANEWVCFKCYLSTKLALIAADYAVRGKSDKDVKPTALAQKIEEYSQQLEGLTNDVHTLEAYGVDSLKTRYPDLLPFPQIPNDRFTSEVAMRVMECTACIIIKLENFMQQKV

SEQ ID NO: 10543 - protein, 1194 aa, Homo sapiens
METRRRLEQERATMQMTPGEFRRPRLASFGGMGTTSSLPSFVGSGNHNPAKHQLQNGYQGNGDYGSYAPAAPTTSSMGSSIRHSPLSSGISTPVTNVSPMHLQHIREQMAIALKRLKELEEQVRTIPVLQVKISVLQEEKRQLVSQLKNQRAASQINVCGVRKRSYSAGNASQLEQLSRARRSGGELYIDYEEEEMETVEQSTQRIKEFRQLTADMQALEQKIQDSSCEASSELRENGECRSVAVGAEENMNDIVVYHRGSRSCKDAAVGTLVEMRNCGVSVTEAMLGVMTEADKEIELQQQTIESLKEKIYRLEVQLRETTHDREMTKLKQELQAAGSRKKVDKATMAQPLVFSKVVEAVVQTRDQMVGSHMDLVDTCVGTSVETNSVGISCQPECKNKVVGPELPMNWWIVKERVEMHDRCAGRSVEMCDKSVSVEVSVCETGSNTEESVNDLTLLKTNLNLKEVRSIGCGDCSVDVTVCSPKECASRGVNTEAVSQVEAAVMAVPRTADQDTSTDLEQVHQFTNTETATLIESCTNTCLSTLDKQTSTQTVETRTVAVGEGRVKDINSSTKTRSIGVGTLLSGHSGFDRPSAVKTKESGVGQININDNYLVGLKMRTIACGPPQLTVGLTASRRSVGVGDDPVGESLENPQPQAPLGMMTGLDHYIERIQKLLAEQQTLLAENYSELAEAFGEPHSQMGSLNSQLISTLSSINSVMKSASTEELRNPDFQKTSLGKITGNYLGYTCKCGGLQSGSPLSSQTSQPEQEVGTSEGKPISSLDAFPTQEGTLSPVNLTDDQIAAGLYACTNNESTLKSIMKKKDGNKDSNGAKKNLQFVGINGGYETTSSDDSSSDESSSSESDDECDVIEYPLEEEEEEEDEDTRGMAEGHHAVNIEGLKSARVEDEMQVQECEPEKVEIRERYELSEKMLSACNLLKNTINDPKALTSKDMRFCLNTLQHEWFRVSSQKSAIPAMVGDYIAAFEAISPDVLRYVINLADGNGNTALHYSVSHSNFEIVKLLLDADVCNVDHQNKAGYTPIMLAALAAVEAEKDMRIVEELFGCGDVNAKASQAGQTALMLAVSHGRIDMVKGLLACGADVNIQDDEGSTALMCASEHGHVEIVKLLLAQPGCNGHLEDNDGSTALSIALEAGHKDIAVLLYAHVNFAKAQSPGTPRLGRKTSPGPTHRGSFD

SEQ ID NO: 10544 - protein, 284 aa, Homo sapiens
MVLAVLWCSMAQTLLLPSFIWSCERYRADVRTVWEQCVAIMSEEDGDDDGGCDDYAEGRVCKVRFDANGATGPGSRDPAQVKLLPGRHMLFPPLERVHYLQVPLSRRLSHDETNIFSTPREPGSFLHKWSSSDDIRVLPAQSRALGGPPEYLGQRHRLEDEEDEEEAEGGGLASLRQFLESGVLGSGGGPPRGPGFFREEITTFIDETPLPSPTASPGHSPRRPRPLGLSPRRLSLGSPESRAVGLPLGLSAGRRCSLTGGEESARAWGGSWGPGNPIFPQLTL

SEQ ID NO: 10545 - protein, 234 aa, Homo sapiens [sequence omitted]

SEQ ID NO: 10546 - protein, 493 aa, Homo sapiens
MTANGTAEAVQIQFGLINCGNKYLTAEAFGFKVNASASSLKKKQIWTLEQPPDEAGSAAVCLRSHLGRYLAADKDGNVTCEREVPGPDCRFLIVAHDDGRWSLQSEAHRRYFGGTEDRLSCFAQTVSPAEKWSVHIAMHPQVNIYSVTRKRYAHLSARPADEIAVDRDVPWGVDSLITLAFQDQRYSVQTADHRFLRHDGRLVARPEPATGYTLEFRSGKVAFRDCEGRYLAPSGPSGTLKAGKATKVGKDELFALEQSCAQVVLQAANERNVSTRQGMDLSANQDEETDQETFQLEIDRDTKKCAFRTHTGKYWTLTATGGVQSTASSKNASCYFDIEWRDRRITLRASNGKFVTSKKNGQLAASVETAGDSELFLMKLINRPIIVFRGEHGFIGCRKVTGTLDANRSSYDVFQLEFNDGAYNIKDSTGKYWTVGSDSAVTSSGDTPVDFFFEFCDYNKVAIKVGGRYLKGDHAGVLKASAETVDPASLWEY

SEQ ID NO: 10547 - protein, 718 aa, Homo sapiens
MASSGEDISNDDDDMHPAAAGMADGVHLLGFSDEILLHILSHVPSTDLILNVRRTCRKLAALCLDKSLIHTVLLQKDYQASEDKVRQLVKEIGREIQQLSMAGCYWLPGSTVEHVARCRSLVKVNLSGCHLTSLRLSKMLSALQHLRSLAIDVSPGFDASQLSSECKATLSRVRELKQTLFTPSYGVVPCCTSLEKLLLYFEILDRTREGAILSGQLMVGQSNVPHYQNLRVFYARLAPGYINQEVVRLYLAVLSDRTPQNLHAFLISVPGSFAESGATKNLLDSMARNVVLDALQLPKSWLNGSSLLQHMKFNNPFYFSFSRCTLSGGHLIQQVINGGKDLRSLASLNLSGCVHCLSPDSLLRKAEDDIDSSILETLVASCCNLRHLNLSAAHHHSSEGLGRHLCQLLARLRHLRSLSLPVCSVADSAPRADRAPAQPAMHAVPRGFGKKVRVGVQSCPSPFSGQACPQPSSVFWSLLKNLPFLEHLELIGSNFSSAMPRNEPAIRNSLPPCSRAQSVGDSEVAAIGQLAFLRHLTLAQLPSVLTGSGLVNIGLQCQQLRSLSLANLGMMGKVVYMPALSDMLKHCKRLRDLRLEQPYFSANAQFFQALSQCPSLQRLCLVSRSGTLQPDAVLAFMARCLQVVMCHLFTGESLATCKSLQQSLLRSFQAERPALNVVIFPLLHEGLTDVIRDVPLVHLDEITLFKSRVAEEPPNLWW

SEQ ID NO: 10548 - protein, 434 aa, Homo sapiens
MAAAAGSCARVAAWGGKLRRGLAVSRQAVRSPGPLAAAVAGAALAGAGAAWHHSRVSVAARDGSFTVSAQKNVEHGIIYIGKPSLRKQRFMQFSSLEHEGEYYMTPRDFLFSVMFEQMERKTSVKKLTKKDIEDTLSGIQTAGCGSTFFRDLGDKGLISYTEYLFLLTILTKPHSGFHVAFKMLDTDGNEMIEKREFFKLQKIISKQDDLMTVKTNETGYQEAIVKEPEINTTLQMRFFGKRGQRKLHYKEFRRFMENLQTEIQEMEFLQFSKGLSFMRKEDFAEWLLFFTNTENKDIYWKNVREKLSAGESISLDEFKSFCHFTTHLEDFAIAMQMFSLAHRPVRLAEFKRAVKVATGQELSNNILDTVFKIFDLDGDECLSHEEFLGVLKNRMHRGLWVPQHQSIQEYWKCVKKESIKGVKEVWKQAGKGLF

SEQ ID NO: 10549 - protein, 95 aa, Homo sapiens
MKFLLLVLAALGFLTQVIPASAGGSKCVSNTPGYCRTCCHWGETALFMCNASRKCCISYSFLPKPDLPQLIGNHWQSRRRNTQRKDKKQQTTVTS

SEQ ID NO: 10550 - protein, 112 aa, Homo sapiens
MFVLLYVTSFAICASGQPRGNQLKGENYSPRYICSIPGLPGPPGPPGANGSPGPHGRIGLPGRDGRDGRKGEKGEKGTAGLRGKTGPLGLAGEKGDQGETGKKGPIGPEGEK

SEQ ID NO: 10551 - protein, 425 aa, Homo sapiens
MNLASQSGEAGAGQLLFANFNQDNTSLAVGSKSGYKFFSLSSVDKLEQIYECTDTEDVCIVERLFSSSLVAIVSLKAPRKLKVCHFKKGTEICNYSYSNTILAVKLNRQRLIVCLEESLYIHNIRDMKVLHTIRETPPNPAGLCALSINNDNCYLAYPGSATIGEVQVFDTINLRAANMIPAHDSPLAALAFDASGTKLATASEKGTVIRVFSIPEGQKLFEFRRGVKRCVSICSLAFSMDGMFLSASSNTETVHIFKLETVKEKPPEEPTTWTGYFGKVLMASTSYLPSQVTEMFNQGRAFATVRLPFCGHKNICSLATIQKIPRLLVGAADGYLYMYNLDPQEGGECALMKQHRLDGSLETTNEILDSASHDCPLVTQTYGAAAGKAYTDDLGAVGGACLEDEASALRLDEDSEHPPMILRTD

SEQ ID NO: 10552 - protein, 99 aa, Homo sapiens
MGLFMIIAILLFQKPTVTEQLKKCWNNYVQGHCRKICRVNEVPEALCENGRYCCLNIKELEACKKITKPPRPKPATLALTLQDYVTIIENFPSLKTQST

SEQ ID NO: 10553 - protein, 111 aa, Homo sapiens
MKSLLFTLAVFMLLAQLVSGNWYVKKCLNDVGICKKKCKPEEMHVKNGWAMCGKQRDCCVPADRRANYPVFCVQTKTTRISTVTATTATTTLMMTTASMSSMAPTPVSPTG

SEQ ID NO: 10554 - protein, 565 aa, Homo sapiens
MEDSDSAAKQLGLAEAAAVAAAAAVAAAAAAAAGGEAEEPVLSRDEDSEEDADSEAERETPRVTAVAVMAAEPGHMDMGAEALPGPDEAAAAAAFAEVTTVTVANVGAAADNVFTTSVANAASISGHVLSGRTALQIGDSLNTEKATLIVVHTDGSIVETTGLKGPAAPLTPGPQSPPTPLAPGQEKGGTKYNWDPSVYDSELPVRCRNISGTLYKNRLGSGGRGRCIKQGENWYSPTEFEAMAGRASSKDWKRSIRYAGRPLQCLIQDGILNPHAASCTCAACCDDMTLSGPVRLFVPYKRRKKENELPTTPVKKDSPKNITLLPATAATTFTVTPSGQITTSGALTFDRASTVEATAVISESPAQGDVFAGATVQEASVQPPCRASHPEPHYPGYQDSCQIAPFPEAALPTSHPKIVLTSLPALAVPPPTPTKAAPPALVNGLELSEPRSWLYLEEMVNSLLNTAQQLKTLFEQAKHASTYREAATNQAKIHADAERKEQSCVNCGREAMSECTGCHKVNYCSTFCQRKDWKDHQHICGQSAAVTVQADEVHVAESVMEKVTV

SEQ ID NO: 10555 - protein, 156 aa, Homo sapiens
MNILMLTFIICGLLTRVTKGSFEPQKCWKNNVGHCRRRCLDTERYILLCRNKLSCCISIISHEYTRRPAFPVIHLEDITLDYSDVDSFTGSPVSMLNDLITFDTTKFGETMTPETNTPETTMPPSEATTPETTMPPSETATSETMPPPSQTALTHN

SEQ ID NO: 10556 - protein, 278 aa, Homo sapiens
MGGPRALLAALWALEAAGTAALRIGAFNIQSFGDSKVSDPACGSIIAKILAGYDLALVQEVRDPDLSAVSALMEQINSVSEHEYSFVSSQPLGRDQYKEMYLFVYRKDAVSVVDTYLYPDPEDVFSREPFVVKFSAPGTAQNLVLIPLHAAPHQAVAEIDALYDVYLDVIDKWGTDDMLFLGDFNADCSYVRAQDWAAIRLRSSEVFKWLIPDSADTTVGNSDCAYDRIVACGARLRRSLKPQSATVHDFQEEFGLDQTQALAISDHFPVEVTLKFHR

SEQ ID NO: 10557 - protein, 376 aa, Homo sapiens
MLPAVGSADEEEDPAEEDCPELVPIETTQSEEEEKSGLGAKIPVTIITGYLGAGKTTLLNYILTEQHSKRVAVILNEFGEGSALEKSLAVSQGGELYEEWLELRNGCLCCSVKDSGLRAIENLMQKKGKFDYILLETTGLADPGAVASMFWVDAELGSDIYLDGIITIVDSKYGLKHLTEEKPDGLINEATRQVALADAILINKTDLVPEEDVKKLRTTIRSINGLGQILETQRSSLQKKLQHVPGTQPHLDQSIVTITFEVPGNAKEEHLNMFIQNLLWEKNVRNKDNHCMEVIRLKGLVSIKDKSQQVIVQGVHELYDLEETPVSWKDDTERTNRLVLLGRNLDKDILKQLFIATVTETEKQWTTRFQEDQVCT

SEQ ID NO: 10558 - protein, 433 aa, Homo sapiens
MIGGLFIYNHKGEVLISRVYRDDIGRNAVDAFRVNVIHARQQVRSPVTNIARTSFFHVKRSNIWLAAVTKQNVNAAMVFEFLYKMCDVMAAYFGKISEENIKNNFVLIYELLDEILDFGYPQNSETGALKTFITQQGIKSQTKEEQSQITSQVTGQIGWRREGIKYRRNELFLDVLESVNLLMSPQGQVLSAHVSGRVVMKSYLSGMPECKFGMNDKIVIEKQGKGTADETSKSGKQSIAIDDCTFHQCVRLSKFDSERSISFIPPDGEFELMRYRTTKDIILPFRVIPLVREVGRTKLEVKVVIKSNFKPSLLAQKIEVRIPTPLNTSGVQVICMKGKAKYKASENAIVWKIKRMAGMKESQISAEIELLPTNDKKKWARPPISMNFEVPFAPSGLKVRYLKVFEPKLNYSDHDVIKWVRYIGRSGIYETRC

SEQ ID NO: 10559 - protein, 1502 aa, Homo sapiens
MMAKNKEPRPPSYTISIVGLSGTEKDKGNCGVGKSCLCNRFVRSKADEYYPEHTSVLSTIDFGGRVVNNDHFLYWGDIIQNSEDGVECKIHVIEQTEFIDDQTFLPHRSTNLQPYIKRAAASKLQSAEKLMYICTDQLGLEQDFEQKQMPEGKLNVDGFLLCIDVSQGCNRKFDDQLKFVNNLFVQLSKSKKPVIIAATKCDECVDHYLREVQAFASNKKNLLVVETSARFNVNIETCFTALVQMLDKTRSKPKIIPYLDAYKTQRQLVVTATDKFEKLVQTVRDYHATWKTVSNKLKNHPDYEEYINLEGTRKARNTFSKHIEQLKQEHIRKRREEYINTLPRAFNTLLPNLEEIEHLNWSEALKLMEKRADFQLCFVVLEKTPWDETDHIDKINDRRIPFDLLSTLEAEKVYQNHVQHLISEKRRVEMKEKFKKTLEKIQFISPGQPWEEVMCFVMEDEAYKYITEADSKEVYGRHQREIVEKAKEEFQEMLFEHSELFYDLDLNATPSSDKMSEIHTVLSEEPRYKALQKLAPDRESLLLKHIGFVYHPTKETCLSGQNCTDIKVEQLLASSLLQLDHGRLRLYHDSTNIDKVNLFILGKDGLAQELANEIRTQSTDDEYALDGKIYELDLRPVDAKSPYFLSQLWTAAFKPHGCFCVFNSIESLSFIGEFIGKIRTEASQIRKDKYMANLPFTLILANQRDSISKNLPILRHQGQQLANKLQCPFVDVPAGTYPRKFNETQIKQALRGVLESVKHNLDVVSPIPANKDLSEADLRIVMCAMCGDPFSVDLILSPFLDSHSCSAAQAGQNNSLMLDKIIGEKRRRIQITILSYHSSIGVRKDELVHGYILVYSAKRKASMGMLRAFLSEVQDTIPVQLVAVTDSQADFFENEAIKELMTEGEHIATEITAKFTALYSLSQYHRQTEVFTLFFSDVLEKKNMIENSYLSDNTRESTHQSEDVFLPSPRDCFPYNNYPDSDDDTEAPPPYSPIGDDVQLLPTPSDRSRYRLDLEGNEYPIHSTPNCHDHERNHKVPPPIKPKPVVPKTNVKKLDPNLLKTIEAGIGKNPRKQTSRVPLAHPEDMDPSDNYAEPIDTIFKQKGYSDEIYVVPDDSQNRIKIRNSFVNNTQGDEENGFSDRTSKSHGERRPSKYKYKSKTLFSKAKSYYRRTHSDASDDEAFTTSKTKRKGRHRGSEEDPLLSPVETWKGGIDNPAITSDQELDDKKMKKKTHKVKEDKKQKKKTKNFNPPTRRNWESNYFGMPLQDLVTAEKPIPLFVEKCVEFIEDTGLCTEGLYRVSGNKTDQDNIQKQFDQDHNINLVSMEVTVNAVAGALKAFFADLPDPLIPYSLHPELLEAAKIPDKTERLHALKEIVKKFHPVNYDVFRYVITHLNRVSQQHKINLMTADNLSICFWPTLMRPDFENREFLSTTKIHQSVVETFIQQCQFFFYNGEIVETTNIVAPPPPSNPGQLVEPMVPLQLPPPLQPQLIQPQLQTDPLGII

SEQ ID NO: 10560 - protein, 354 aa, Homo sapiens
MAPWTLWRCCQRVVGWVPVLFITFVVVWSYYAYVVELCVFTIFGNEENGKTVVYLVAFHLFFVMFVWSYWMTIFTSPASPSKEFYLSNSEKERYEKEFSQERQQEILRRAARALPIYTTSASKTIRYCEKCQLIKPDRAHHCSACDSCILKMDHHCPWVNNCVGFSNYKFFLLFLLYSLLYCLFVAATVLEYFIKFWTNELTDTRAKFHVLFLFFVSAMFFISVLSLFSYHCWLVGKNRTTIESFRAPTFSYGPDGNGFSLGCSKNWRQVFGDEKKYWLLPIFSSLGDGCSFPTRLVGMDPEQASVTNQNEYARSGSNQPFPIKPLSESKNRLLDSESQWLENGAEEGIVKSGV

SEQ ID NO: 10561 - protein, 208 aa, Homo sapiens
MKDIDIGKEYIIPSPGYRSVRERTSTSGTHRDREDSKFRRTRPLECQDALETAARAEGLSLDASMHSQLRILDEEHPKGKYHHGLSALKPIRTTSKHQHPVDNAGLFSCMTFSWLSSLARVAHKKGELSMEDVWSLSKHESSDVNCRRLERLWQEELNEVGPDAASLRRVVWIFCRTRLILSIVCLMITQLAGFSGPNFQDGCILRSE

SEQ ID NO: 10562 - protein, 1074 aa, Homo sapiens
MKGTCVIAWLFSSLGLWRLAHPEAQGTTQCQRTEHPVISYKEIGPWLREFRAKNAVDFSQLTFDPGQKELVVGARNYLFRLQLEDLSLIQAVEWECDEATKKACYSKGKSKEECQNYIRVLLVGGDRLFTCGTNAFTPVCTNRSLSNLTEIHDQISGMARCPYSPQHNSTALLTAGGELYAATAMDFPGRDPAIYRSLGILPPLRTAQYNSKWLNEPNFVSSYDIGNFTYFFFRENAVEHDCGKTVFSRAARVCKNDIGGRFLLEDTWTTFMKARLNCSRPGEVPFYYNELQSTFFLPELDLIYGIFTTNVNSIAASAVCVFNLSAIAQAFSGPFKYQENSRSAWLPYPNPNPHFQCGTVDQGLYVNLTERNLQDAQKFILMHEVVQPVTTVPSFMEDNSRFSHVAVDVVQGREALVHIIYLATDYGTIKKVRVPLNQTSSSCLLEEIELFPERRREPIRSLQILHSQSVLFVGLREHVVKIPLKRCQFYRTRSTCIGAQDPYCGWDVVMKKCTSLEESLSMTQWEQSISACPTRNLTVDGHFGVWSPWTPCTHTDGSAVGSCLCRTRSCDSPAPQCGGWQCEGPGMEIANCSRNGGWTPWTSWSPCSTTCGIGFQVRQRSCSNPTPRHGGRVCVGQNREERYCNEHLLCPPHMFWTGWGPWERCTAQCGGGIQARRRICENGPDCAGCNVEYQSCNTNPCPELKKTTPWTPWTPVNISDNGGHYEQRFRYTCKARLADPNLLEVGRQRIEMRYCSSDGTSGCSTDGLSGDFLRAGRYSAHTVNGAWSAWTSWSQCSRDCSRGIRNRKRVCNNPEPKYGGMPCLGPSLEYQECNILPCPVDGVWSCWSPWTKCSATCGGGHYMRTRSCSNPAPAYGGDICLGLHTEEALCNTQPCPESWSEWSDWSECEASGVQVRARQCILLFPMGSQCSGNTTESRPCVFDSNFIPEVSVARSSSVEEKRCGEFNMFHMIAVGLSSSILGCLLTLLVYTYCQRYQQQSHDATVIHPVSPAPLNTSITNHINKLDKYDSVEAIKAFNKNNLILEERNKYFNPHLTGKTYSNAYFTDLNNYDEY

SEQ ID NO: 10563 - protein, 357 aa, Homo sapiens
MQARALLLAALAALALAREPPAAPCPARCDVSRCPSPRCPGGYVPDLCNCCLVCAASEGEPCGGPLDSPCGESLECVRGLCRCRWSHAVCGTDGHTYANVCALQAASRRALQLSGTPVRQLQKGACPLGLHQLSSPRYKFNFIADVVEKIAPAVVHIELFLRHPLFGRNVPLSSGSGFIMSEAGLIITNAHVVSSNSAAPGRQQLKVQLQNGDSYEATIKDIDKKSDIATIKIHPKKKLPVLLLGHSADLRPGEFVVAIGSPFALQNTVTTGIVSTAQREGRELGLRDSDMDYIQTDAIINYGNSGGPLVNLDGEVIGINTLKVTAGISFAIPSDRITRFLTEFQDKQIKAPSLAVH

SEQ ID NO: 10564 - protein, 172 aa, Homo sapiens
MLAAGVGGQGERLAGRRRKMAVESRVTQEEIKKEPEKPIDREKTCPLLLRVFTTNNGRHHRMDEFSRGNVPSSELQIYTWMDATLKELTSLVKEVYPEARKKGTHFNFAIVFTDVKRPGYRVKEIGSTMSGRKGTDDSMTLQSQKFQIGDYLDIAITPPNRAPPPSGRMRPY

SEQ ID NO: 10565 - protein, 202 aa, Homo sapiens
MQPILLLLAFLLLPRADAGEIIGGHEAKPHSRPYMAYLMIWDQKSLKRCGGFLIRDDFVLTAAHCWGRLERKAKRTRAVQPLRLPSNKAQVKPGQTCSVAGWGQTAPLGKHSHTLQEVKMTVQEDRKCESDLRHYYDSTIELCVGDPEIKKTSFKGDSGGPLVCNKVAQGIVSYGRNNGMPPRACTKVSSFVHWIKKTMKRY

SEQ ID NO: 10566 - protein, 202 aa, Homo sapiens; identical to SEQ ID NO: 10565

SEQ ID NO: 10567 - protein, 160 aa, Homo sapiens
MQPFLLLLAFLLTPGAGTEEIIGGHEAKPHSRPYMAFVQFLQEKSRKRCGGILVRKDFVLTAAHCQGSSINVTLGAHNIKEQERTQQFIPVKRPIPHPAYNPKNFSNDIMLLQGDSGGPLVCKDVAQGILSYGNKKGTPPGVYIKVSHFLPWIKRTMKRL

SEQ ID NO: 10568 - protein, 1898 aa, Homo sapiens
MLLSGGDPPAQEWFMVQTKSKPRVQRQRLQVQRIFRVKLNAFQSRPDTPYFWLQLEGPRENMGKAKEYLKGLCSPELWKEVRYPPILHCAFLGAQGLFLDCLCWSTLAYLVPGPPGSLMVGGLTESFIMTQNWLEELVGRLRWGPAPLLTPRGIWEAEVTRAFGALVWIRGDQHAGDLLQLPPAVQELLLSLVRDAAGKEDIIEWLSRFGISDSHSDPEVLICPPQQQKEAPAMVSVGESPGPFVDMGTLQNRGPENSKRLSSLGATGSLITAQSTPQEAANQLVRVGSNNQDGMDSAQEEGTVQATSSQDSTNHTQALLKQRQVQKIEDKLLFQPPVSALGVCPPWKAWTPGPAFGPLWPGAIAATFWRINELHSLHLAWLLSQACFNFPFWQRPLGPIQLKLPGQNPLPLNLEWKQKELAPLPSAESPAGRPDGGLGGEAALQNCPRPEISPKVTSLLVVPGSSDVKDKVSSDLPQIGPPLTSTPQLQAGGEPGDQGSMQLDFKGLEEGPAPVLPTGQGKPVAQGGLTDQSVPGAQTVPETLKVPMAAAVPKAENPSRTQVPSAAPKLPTSRMMLAVHTEPAAPEVPLAPTKPTAQLMATAQKTVVNQPVLVAQVEPTTPKTPQAQKMPVAKTSPAGPKTPKAQAGPAATVSKAPAASKAPAAPKVPVTPRVSRAPKTPAAQKVPTDAGPTLDVARLLSEVQPTSRASVSLLKGQGQAGRQGPQSSGTLALSSKHQFQMEGLLGAWEGAPRQPPRHLQANSTVTSFQRYHEALNTPFELNLSGEPGNQGLRRVVIDGSSVAMVHGLQHFFSCRGIAMAVQFFWNRGHREVTVFVPTWQLKKNRRVRESHFLTKLHSLKMLSITPSQLENGKKITTYDYRFMVKLAEETDGIIVTNEQIHILMNSSKKLMVKDRLLPFTFAGNLFMVPDDPLGRDGPTLDEFLKKPNRLDTDIGNFLKVWKTLPPSSASVTELSDDADSGPLESLPNMEEVREEKEERQDEEQRQGQGTQKAAEEDDLDSSLASVFRVECPSLSEEILRCLSLHDPPDGALDIDLLPGAASPYLGIPWDGKAPCQQVLAHLAQLTIPSNFTALSFFMGFMDSHRDAIPDYEALVGPLHSLLKQKPDWQWDQEHEEAFLALKRALVSALCLMAPNSQLPFRLEVTVSHVALTAILHQEHSGRKHPIAYTSKPLLPDEESQGPQSGGDSPYAVAWALKHFSRCIGDTPVVLDLSYASRTTADPEVREGRRVSKAWLIRWSLLVQDKGKRALELALLQGLLGENRLLTPAASMPRFFQVLPPFSDLSTFVCIHMSGYCFYREDEWCAGFGLYVLSPTSPPVSLSFSCSPYTPTYAHLAAVACGLERFGQSPLPVVFLTHCNWIFSLLWELLPLWRARGFLSSDGAPLPHPSLLSYIISLTSGLSSLPFIYRTSYRGSLFAVTVDTLAKQGAQGGGQWWSLPKDVPAPTVSPHAMGKRPNLLALQLSDSTLADIIARLQAGQKLSGSSPFSSAFNSLSLDKESGLLMFKGDKKPRVWVVPTQLRRDLIFSVHDIPLGAHQRPEETYKKLRLLGWWPGMQEHVKDYCRSCLFCIPRNLIGSELKVIESPWPLRSTAPWSNLQIEVVGPVTISEEGHKHVLIVADPNTRWVEAFPLKPYTHTAVAQVLLQHVFARWGVPVRLEAAQGPQFARHVLVSCGLALGAQVASLSRDLQFPCLTSSGAYWEFKRALKEFIFLHGKKWAASLPLLHLAFRASSTDATPFKVLTGGESRLTEPLWWEMSSANIEGLKMDVFLLQLVGELLELHWRVADKASEKAENRRFKRESQEKEWNVGDQVLLLSLPRNGSSAKWVGPFYIGDRLSLSLYRIWGFPTPEKLGCIYPSSLMKAFAKSGTPLSFKVLEQ

SEQ ID NO: 10569 - protein, 1088 aa, Homo sapiens
MRPKTFPATTYSGNSRQRLQEIREGLKQPSKSSVQGLPAGPNSDTSLDAKVLGSKDATRQQQQMRATPKFGPYQKALREIRYSLLPFANESGTSAAAEVNRQMLQELVNAGCDQEMAGRALKQTGSRSIEAALEYISKMGYLDPRNEQIVRVIKQTSPGKGLMPTPVTRRPSFEGTGDSFASYHQLSGTPYEGPSFGADGPTALEEMPRPYVDYLFPGVGPHGPGHQHQHPPKGYGASVEAAGAHFPLQGAHYGRPHLLVPGEPLGYGVQRSPSFQSKTPPETGGYASLPTKGQGGPPGAGLAFPPPAAGLYVPHPHHKQAGPAAHQLHVLGSRSQVFASDSPPQSLLTPSRNSLNVDLYELGSTSVQQWPAATLARRDSLQKPGLEAPPRAHVAFRPDCPVPSRTNSFNSHQPRPGPPGKAEPSLPAPNTVTAVTAAHILHPVKSVRVLRPEPQTAVGPSHPAWVPAPAPAPAPAPAPAAEGLDAKEEHALALGGAGAFPLDVEYGGPDRRCPPPPYPKHLLLRSKSEQYDLDSLCAGMEQSLRAGPNEPEGGDKSRKSAKGDKGGKDKKQIQTSPVPVRKNSRDEEKRESRIKSYSPYAFKFFMEQHVENVIKTYQQKVNRRLQLEQEMAKAGLCEAEQEQMRKILYQKESNYNRLKRAKMDKSMFVKIKTLGIGAFGEVCLACKVDTHALYAMKTLRKKDVLNRNQVAHVKAERDILAEADNEWVVKLYYSFQDKDSLYFVMDYIPGGDMMSLLIRMEVFPEHLARFYIAELTLAIESVHKMGFIHRDIKPDNILIDLDGHIKLTDFGLCTGFRWTHNSKYYQKGSHVRQDSMEPSDLWDDVSNCRCGDRLKTLEQRARKQHQRCLAHSLVGTPNYIAPEVLLRKGYTQLCDWWSVGVILFEMLVGQPPFLAPTPTETQLKVINWENTLHIPAQVKLSPEARDLITKLCCSADHRLGRNGADDLKAHPFFSAIDFSSDIRKQPAPYVPTISHPMDTSNFDPVDEESPWNDASEGSTKAWDTLTSPNNKHPEHAFYEFTFRRFFDDNGYPFRCPKPSGAEASQAESSDLESSDLVDQTEGCQPVYV

SEQ ID NO: 10570 - protein, 103 aa, Homo sapiens [sequence omitted]

SEQ ID NO: 10571 - protein, 248 aa, Homo sapiens
MGIMAASRPLSRFWEWGKNIVCVGRNYADHVREMRSAVLSEPVLFLKPSTAYAPEGSPILMPAYTRNLHHELELGVVMGKRCRAVPEAAAMDYVGGYALCLDMTARDVQDECKKKGLPWTLAKSFTASCPVSAFVPKEKIPDPHKLKLWLKVNGELRQEGETSSMIFSIPYIISYVSKIITLEEGDIILTGTPKGVGPVKENDEIEAGIHGLRQGLTLSPKLECSSAITAHCSLELPGSSNPPSASRF

SEQ ID NO: 10572 - protein, 226 aa, Homo sapiens
MGIMAASRPLSRFWEWGKNIVCVGRNYADHVREMRSAVLSEPVLFLKPSTAYAPEGSPILMPAYTRNLHHELELGVVMGKRCRAVPEAAAMDYVGGYALCLDMTARDVQDECKKKGLPWTLAKSFTASCPVSAFVPKEKIPDPHKLKLWLKVNGELRQEGETSSMIFSIPYIISYVSKIITLEEGDIILTGTPKGVGPVKENDEIEAGIHGLPKVSSATLPVRLQE

SEQ ID NO: 10573 - protein, 94 aa, Homo sapiens
MRTLAILAAILLVALQAQAEPLQARADEVAAAPEQIAADIPEVVVSLAWDESLAPKHPGSRKNMACYCRIPACIAGERRYGTCIYQGRLWAFCC

SEQ ID NO: 10574 - protein, 200 aa, Homo sapiens
MDFGLALLLAGLLGLLLAFPDQLTVSPAALVPGDPEVACTAHKVTPVDPNALSFSLLVGGQELEGAQALGPEVQEEEEEPQGDEDVLFRVTERWRLPPLGTPVPPALYCQATMRLPGLELSHRQAIPASKPAGDQLPAALWTSSAVLGLLLLALPTYHLWKRCRHLAEDDTHPPASLRLLPQVSAWAGLRGTGQVGISPS

SEQ ID NO: 10575 - protein, 1044 aa, Homo sapiens
MLKPQPLQQPSQPQQPPPTQQAVARRPPGGTSPPNGGLPGPLATSAAPPGPPAAASPCLGPVAAAGSGLRRGAEGILAPQPPPPQQHQERPGAAAIGSARGQSTGKGPPQSPVFEGVYNNSRMLHFLTAVVGSTCDVKVKNGTTYEGIFKTLSSKFELAVDAVHRKASEPAGGPRREDIVDTMVFKPSDVMLVHFRNVDFNYATKDKFTDSAIAMNSKVNGEHKEKVLQRWEGGDSNSDDYDLESDMSNGWDPNEMFKFNEENYGVKTTYDSSLSSYTVPLEKDNSEEFRQRELRAAQLAREIESSPQYRLRIAMENDDGRTEEEKHSAVQRQGSGRESPSLASREGKYIPLPQRVREGPRGGVRCSSSRGGRPGLSSLPPRGPHHLDNSSPGPGSEARGINGGPSRMSPKAQRPLRGAKTLSSPSNRPSGETSVPPPPAVGRMYPPRSPKSAAPAPISASCPEPPIGSAVPTSSASIPVTSSVSDPGVGSISPASPKISLAPTDVKELSTKEPGRTLEPQELARIAGKVPGLQNEQKRFQLEELRKFGAQFKLQPSSSPENSLDPFPPRILKEEPKGKEKEVDGLLTSEPMGSPVSSKTESVSDKEDKPPLAPSGGTEGPEQPPPPCPSQTGSPPVGLIKGEDKDEGPVAEQVKKSTLNPNAKEFNPTKPLLSVNKSTSTPTSPGPRTHSTPSIPVLTAGQSGLYSPQYISYIPQIHMGPAVQAPQMYPYPVSNSVPGQQGKYRGAKGSLPPQRSDQHQPASAPPMMQAAAAAGPPLVAATPYSSYIPYNPQQFPGQPAMMQPMAHYPSQPVFAPMLQSNPRMLTSGSHPQAIVSSSTPQYPSAEQPTPQALYATVHQSYPHHATQLHAHQPQPATTPTGSQPQSQHAAPSPVQHQAGQAPHLGSGQPQQNLYHPGALTGTPPSLPPGPSAQSPQSSFPQPAAVYAIHHQQLPHGFTNMAHVTQAHVQTGITAAPPPHPGAPHPPQVMLLHPPQSHGGPPQGAVPQSGVPALSASTPSPYPYIGHPQAPLPPPGELKIVLAAT

SEQ ID NO: 10576 - protein, 94 aa, Homo sapiens; identical to SEQ ID NO: 10573

SEQ ID NO: 10577 - protein, 331 aa, Homo sapiens
MASNFNDIVKQGYVKIRSRKLGIFRRCWLVFKKASSKGPRRLEKFPDEKAAYFRNFHKVTELHNIKNITRLPRETKKHAVAIIFHDETSKTFACESELEAEEWCKHLCMECLGTRLNDISLGEPDLLAAGVQREQNERFNVYLMPTPNLDIYGECTMQITHENIYLWDIHNAKVKLVMWPLSSLRRYGRDSTWFTFESGRMCDTGEGLFTFQTREGEMIYQKVHSATLAIAEQHERLMLEMEQKARLQTSLTEPMTLSKSISLPRSAYWHHITRQNSVGEIYSLQGHGFGSSKMSRAQTFPSYAPEQSEEAQQPLSRSSSYGFSYSSSLIQ

SEQ ID NO: 10578 - protein, 303 aa, Homo sapiens
MAPAADMTSLPLGVKVEDSAFGKPAGGGAGQAPSAAAATAAAMGADEEGAKPKVSPSLLPFSVEALMADHRKPGAKESALAPSEGVQAAGGSAQPLGVPPGSLGAPDAPSSPRPLGHFSVGGLLKLPEDALVKAESPEKPERTPWMQSPRFSPPPARRLSPPACTLRKHKTNRKPRTPFTTAQLLALERKFRQKQYLSIAERAEFSSSLSLTETQVKIWFQNRRAKAKRLQEAELEKLKMAAKPMLPPAAFGLSFPLGGPAAVAAAAGASLYGASGPFQRAALPVAPVGLYTAHVGYSMYHLT

SEQ ID NO: 10579 - protein, 805 aa, Homo sapiens
MANVSKKVSWSGRDRDDEEAAPLLRRTARPGGGTPLLNGAGPGAARQSPRSALFRVGHMSSVELDDELLDPDMDPPHPFPKEIPHNEKLLSLKYESLDYDNSENQLFLEEERRINHTAFRTVEIKRWVICALIGILTGLVACFIDIVVENLAGLKYRVIKGNIDKFTEKGGLSFSLLLWATLNAAFVLVGSVIVAFIEPVAAGSGIPQIKCFLNGVKIPHVVRLKTLVIKVSGVILSVVGGLAVGKEGPMIHSGSVIAAGISQGRSTSLKRDFKIFEYFRRDTEKRDFVSAGAAAGVSAAFGAPVGGVLFSLEEGASFWNQFLTWRIFFASMISTFTLNFVLSIYHGNMWDLSSPGLINFGRFDSEKMAYTIHEIPVFIAMGVVGGVLGAVFNALNYWLTMFRIRYIHRPCLQVIEAVLVAAVTATVAFVLIYSSRDCQPLQGGSMSYPLQLFCADGEYNSMAAAFFNTPEKSVVSLFHDPPGSYNPLTLGLFTLVYFFLACWTYGLTVSAGVFIPSLLIGAAWGRLFGISLSYLTGAAIWADPGKYALMGAAAQLGGIVRMTLSLTVIMMEATSNVTYGFPIMLVLMTAKIVGDVFIEGLYDMHIQLQSVPFLHWEAPVTSHSLTAREVMSTPVTCLRRREKVGVIVDVLSDTASNHNGFPVVEHADDTQPARLQGLILRSQLIVLLKHKVFVERSNLGLVQRRLRLKDFRDAYPRFPPIQSIHVSQDERECTMDLSEFMNPSPYTVPQEASLPRVFKLFRALGLRHLVVVDNRNQVVGLVTRKDLARYRLGKRGLEELSLAQT

SEQ ID NO: 10580 - protein, 2271 aa, Homo sapiens
MGVPKRKASGGQDGAASSAGAAKRARKEELTGVRFKAQLKDPQGPGPGLEAFVSAAKKLPREDVYDVVEGYIKISVECVEIFQLLSGEKRPESETMLIFQVFEAILLRTASDLSHFHVVGTNIVKKLMNNHMKLICESLYASGYRLARACLSLMTAMVTQGPEAARDVCSHFDLNKKTLYTLVTKRDSKGVYDVRQAYVQFALSFLIAGDDSTIVQVLEVKEFIPCIFSSGIKEDRISTINILLSTLKTKVVHNKNITKTQKVRFFTGQLLNHIASLYNWNGITDVNPENVKVSAEEAGKTMVRELVHNFLMDLCCSLKHGINFYDASLGTFGRGGNLTLLHFLLGLKTAADDDLVADLVVNILKVCPDLLNKYFKEVTFSFIPRAKSTWLNNIKLLNKIYEAQPEISRAFQTREFIPLPRLLAMVMVTTVPLVCNKSMFTQALNLDSTSVRHTALSLISVILKRALKTVDHCLNKEVWQESGVYTAVMMEEFVQLFREALSKILPDLNTVVWVWQSLKKQETKQDDKKGQKRSDGPPAACDAHQCDDAETILLKAVLLQVICLYQKVVPHVVMQYNFDFSKLLKGVISEQGLREEVPPILQHHMLKVALELPASKFLWLKAQEGPDAEIIGGERSVFYLLMKMFVTSSHLQLKSLTKLLIMKILRDTGVFEHTWKELELWLEHLENTMEEDKETVIQFLERILLTLVANPYSYTDKASDFVQEASMLQATMTKQEADDMSIPISHIDDVLDMVDVLVEGSEGLDEEIGFTLSEDMILLTFPFSAVVPAALEARNKLLLGTGNEAAENVVTYLTAVLTDLLHTQRDPLALCLLLQAYDKLEPPCLVPCCQQLSRFNRYYSLWIPEQAREAWLLQAQGSPSPPALPLASSFTALLQAAYESQALRDEHIQVQLQATMPHLSMQQVLLAAKQVLLYLRSTVENFGQLGRSVGPPLLQLFLDLLRRLVVHCEQLDAQNQQRCEAARAEADLFLDMESVASLELANDQTLEEVLVAILRHPTLEGWFLALEQQALPPHTLSPVLVKLLATHFSAGVLQLLAASAPILQNIGQLGLLARYSEAITQSVLKELQNRRAGPATSPPKTPPQLEALQELHPYMEGAQLREVTLALLSLPETHLVTQQPTKSPGKERHLNALGKTLVQLLTCSPQDQLQSGELLWSSEYVRGLGALLPTLAVDELDTVLLHTLQRDPVLAPAVGADLLDYCLARRTQAALSIAALLLQESCTHLLWFEQWCLQAGPGLGLQGDLDDFLPLIHVYLQCRTRSHFTRPAGVSSAVIPVLRKTLWRQLQSRLLSTDSPPASGLYQEILAQLVPFARAKDLSVLMDRLPSLLHTPSSHKRWIVADSISAALEGSAEELCAWRRTLLESCVKWLIVSFSGGQQDDDNTQNQEKEMLLRLNALLHALNEVDPGDWQKFVKKGLKFRYQDHTFLKMLLTAVQLLYSPESSVRTKLIQLPVVYVMLMQHSLFLPTLLTSDGEESPDSQVKEALVDLMLTVVEMCPSVCESSHFAVLLGAYGATLSVLDQKILLLLRAYEQNKLSLINFRVLLWGPAAVEHHKTCRSLGRSLWQQPSVGDILRLLDRDRMMQTILHFPQNRRLLPPEDTQELIFKDKSRVDLDGLYDPCFLLQLFSELTRPEFVVDCRKFLDSNALGLTVTALSSYDPQMRAIAYHVLAAYYSHLEGARFQEQSQLLYLLDVVRNGIRTQDMRLTFTLALFIAKAALQILKPEEHMYLKVSNFLLSHEYLNMDKVPGFYQFFYSSDFEQKTEQKWVFGVLRQGIRDKQCYELCARRGIFHIILSFFHSPLCDEAAQNWILEILQNAAQVARSAYEIIRDYSLLTWILHILESKFLETPLLSNVISLLHTLWVTNLGDKAVEWESQRLCQPSSQEPAKRLALHLVNEFLYVLIVLMKHLRPTLAPVQLTNFFGTLDSVLRYRATVIQAFRDMNRFTVNETVLSTKDVLVLLHKWSLIERDLKLQEDLRAAIEKAQARELMKMLKDKNKPVMPARAKGPRGRKRRPGEAEEMADPELMASTLETCKGLLRSILTYWRPVIPGPDPTQEPVDSASPESDAPGPVYAAASLAVSWVLRSVAEHPLSRAEAAGLIGWLKSHILPHPVVVADLLKDSAVRSSIFRLYSRLCGAEGLAGPVQEVACLFNTVMLQLVAAQGRAGSPFHPAMEALSLSSLSEKDEATQASAAFLVSLYIKDIWLGAQRPDTLLTHVRMVCEAADDAPSSEEEAIVVLCKDAASAASDA

SEQ ID NO: 10581 - protein, 165 aa, Homo sapiens
MDSSRARQQLRRRFLLLPDAEAQLDREGDAGPETSTAVEKKEKPLPRLNIHSGFWILASIVVTYYVDFFKTLKENFHTSSWFLCGSALLLVSLSIAFYCIVYLEWYCGIGEYDVKYPALIPITTASFIAAGICFNIALWHVWSFFTPLLLFTQFMGVVMFITLLG

SEQ ID NO: 10582 - protein, 214 aa, Homo sapiens
MSDLEDDETPQLSAHALAALQEFYAEQKQQIEPGEDDKYNIGIIEENWQLSQFWYSQETALQLAQEAIAAVGEGGRIACVSAPSVYQKLRELCRENFSIYIFEYDKRFAMYGEEFIFYDYNNPLDLPERIAAHSFDIVIADPPYLSEECLRKTSETVKYLTRGKILLCTGAIMEEQAAELLGVKMCTFVPRHTRNLANEFRCYVNYDSGLDCGI

SEQ ID NO: 10583 - protein, 111 aa, Homo sapiens
MADWARAQSPGAVEEILDRENKRMADSLASKVTRLKSLALDIDRDAEDQNRYLDGMDSDFTSMTSLLTGSVKRFSTMARSGQDNRKLLCGMAVGLIVAFFILSYFLSRART

SEQ ID NO: 10584 - protein, 655 aa, Homo sapiens
MGRWAWVPSPWPPPGLGPFLLLLLLLLLLPRGFQPQPGGNRTESPEPNATATPAIPTILVTSVTSETPATSAPEAEGPQSGGLPPPPRAVPSSSSPQAQALTEDGRPCRFPFRYGGRMLHACTSEGSAHRKWCATTHNYDRDRAWGYCVEATPPPGGPAALDPCASGPCLNGGSCSNTQDPQSYHCSCPRAFTGKDCGTEKCFDETRYEYLEGGDRWARVRQGHVEQCECFGGRTWCEGTRHTACLSSPCLNGGTCHLIVATGTTVCACPPGFAGRLCNIEPDERCFLGNGTGYRGVASTSASGLSCLAWNSDLLYQELHVDSVGAAALLGLGPHAYCRNPDNDERPWCYVVKDSALSWEYCRLEACESLTRVQLSPDLLATLPEPASPGRQACGRRHKKRTFLRPRIIGGSSSLPGSHPWLAAIYIGDSFCAGSLVHTCWVVSAAHCFSHSPPRDSVSVVLGQHFFNRTTDVTQTFGIEKYIPYTLYSVFNPSDHDLVLIRLKKKGDRCATRSQFVQPICLPEPGSTFPAGHKCQIAGWGHLDENVSGYSSSLREALVPLVADHKCSSPEVYGADISPNMLCAGYFDCKSDACQGDSGGPLACEKNGVAYLYGIISWGDGCGRLHKPGVYTRVANYVDWINDRIRPPRRLVAPS

SEQ ID NO: 10585 - protein, 1376 aa, Homo sapiens
MFRAGEASKRPLPGPSPPRVRSVEVARGRAGYGFTLSGQAPCVLSCVMRGSPADFVGLRAGDQILAVNEINVKKASHEDVVKLIGKCSGVLHMVIAEGVGRFESCSSDEEGGLYEGKGWLKPKLDSKALGINRAERVVEEMQSGGIFNMIFENPSLCASNSEPLKLKQRSLSESAATRFDVGHESINNPNPNMLSKEEISKVIHDDSVFSIGLESHDDFALDASILNVAMIVGYLGSIELPSTSSNLESDSLQAIRGCMRRLRAEQKIHSLVTMKIMHDCVQLSTDKAGVVAEYPAEKLAFSAVCPDDRRFFGLVTMQTNDDGSLAQEEEGALRTSCHVFMVDPDLFNHKIHQGIARRFGFECTADPDTNGCLEFPASSLPVLQFISVLYRDMGELIEGMRARAFLDGDADAHQNNSTSSNSDSGIGNFHQEEKSNRVLVVDLGGSSSRHGPGGSAWDGVGGRGAQPWGAPWTGPFCPDPEGSPPFEAAHQTDRFWDLNKHLGPASPVEVPPASLRSSVPPSKRGTVGAGCGFNQRWLPVHVLREWQCGHTSDQDSYTDSTDGWSSINCGTLPPPMSKIPADRYRVEGSFAQPPLNAPKREWSRKAFGMQSIFGPHRNVRKTKEDKKGSKFGRGTGLTQPSQRTSARRSFGRSKRFSITRSLDDLESATVSDGELTGADLKDCVSNNSLSSNASLPSVQSCRRLRERRVASWAVSFERLLQDPVGVRYFSDFLRKEFSEENILFWQACEYFNHVPAHDKKELSYRAREIFSKFLCSKATTPVNIDSQAQLADDVLRAPHPDMFKEQQLQIFNLMKFDSYTRFLKSPLYQECILAEVEGRALPDSQQVPSSPASKHSLGSDHSSVSTPKKLSGKSKSGRSLNEELGDEDSEKKRKGAFFSWSRTRSTGRSQKKREHGDHADDALHANGGLCRRESQGSVSSAGSLDLSEACRTLAPEKDKATKHCCIHLPDGTSCVVAVKAGFSIKDILSGLCERHGINGAAADLFLVGGDKPLVLHQDSSILESRDLRLEKRTLFRLDLVPINRSVGLKAKPTKPVTEVLRPVVARYGLDLSGLLVRLSGEKEPLDLGAPISSLDGQRVVLEEKDPSRGKASADKQKGVPVKQNTAVNSSSRNHSATGEERTLGKSNSIKIKGENGKNARDPRLSKREESIAKIGKKKYQKINLDEAEEFFELISKAQSNRADDQRGLLRKEDLVLPEFLRLPPGSTELTLPTPAAVAKGFSKRSATGNGRESASQPGEQWEPVQESSDSPSTSPGSASSPPGPPGTTPPGQKSPSGPFCTPQSPVSLAQEGTAQIWKRQSQEVEAGGIQTVEDEHVAELTLMGEGDISSPNSTLLPPPSTPQEVPGPSRPGTSRF

SEQ ID NO: 10586 - protein, 44 aa, Homo sapiens
MSYYSHLSGGLGCGLAVAVTMGRTVAVAEYGRCRHGCHSSYSAR

SEQ ID NO: 10587 - protein, 528 aa, Homo sapiens
MASMRESDTGLWLHNKLGATDELWAPPSIASLLTAAVIDNIRLCFHGLSSAVKLKLLLGTLHLPRRTVDEMKGALMEIIQLASLDSDPWVLMVADILKSFPDTGSLNLELEEQNPNVQDILGELREKVGECEASAMLPLECQYLNKNALTTLAGPLTPPVKHFQLKRKPKSATLRAELLQKSTETAQQLKRSAGVPFHAKGRGLLRKMDTTTPLKGIPKQAPFRSPTAPSVFSPTGNRTPIPPSRTLLRKERGVKLLDISELDMVGAGREAKRRRKTLDAEVVEKPAKEETVVENATPDYAAGLVSTQKLGSLNNEPALPSTSYLPSTPSVVPASSYIPSSETPPAPSSREASRPPEEPSAPSPTLPAQFKQRAPMYNSGLSPATPTPAAPTSPLTPTTPPAVAPTTQTPPVAMVAPQTQAPAQQQPKKNLSLTREQMFAAQEMFKTANKVTRPEKALILGFMAGSRENPCQEQGDVIQIKLSEHTEDLPKADGQGSTTMLVDTVFEMNYATGQWTRFKKYKPMTNVS

SEQ ID NO: 10588 - protein, 1365 aa, Homo sapiens
MEFSIKQSPLSVQSVVKCIKMKQAPEILGSANGKTPSCEVNRECSVFLSKAQLSSSLQEGVMQKFNGHDALPFIPADKLKDLTSRVFNGEPGAHDAKLRFESQEMKGIGTPPNTTPIKNGSPEIKLKITKTYMNGKPLFESSICGDSAADVSQSEENGQKPENKARRNRKRSIKYDSLLEQGLVEAALVSKISSPSDKKIPAKKESCPNTGRDKDHLLKYNVGDLVWSKVSGYPWWPCMVSADPLLHSYTKLKGQKKSARQYHVQFFGDAPERAWIFEKSLVAFEGEGQFEKLCQESAKQAPTKAEKIKLLKPISGKLRAQWEMGIVQAEEAASMSVEERKAKFTFLYVGDQLHLNPQVAKEAGIAAESLGEMAESSGVSEEAAENPKSVREECIPMKRRRRAKLCSSAETLESHPDIGKSTPQKTAEADPRRGVGSPPGRKKTTVSMPRSRKGDAASQFLVFCQKHRDEVVAEHPDASGEEIEELLRSQWSLLSEKQRARYNTKFALVAPVQAEEDSGNVNGKKRNHTKRIQDPTEDAEAEDTPRKRLRTDKHSLRKRDTITDKTARTSSYKAMEAASSLKSQAATKNLSDACKPLKKRNRASTAASSALGFSKSSSPSASLTENEVSDSPGDEPSESPYESADETQTEVSVSSKKSERGVTAKKEYVCQLCEKPGSLLLCEGPCCGAFHLACLGLSRRPEGRFTCSECASGIHSCFVCKESKTDVKRCVVTQCGKFYHEACVKKYPLTVFESRGFRCPLHSCVSCHASNPSNPRPSKGKMMRCVRCPVAYHSGDACLAAGCSVIASNSIICTAHFTARKGKRHHAHVNVSWCFVCSKGGSLLCCESCPAAFHPDCLNIEMPDGSWFCNDCRAGKKLHFQDIIWVKLGNYRWWPAEVCHPKNVPPNIQKMKHEIGEFPVFFFGSKDYYWTHQARVFPYMEGDRGSRYQGVRGIGRVFKNALQEAEARFREIKLQREARETQESERKPPPYKHIKVNKPYGKVQIYTADISEIPKCNCKPTDENPCGFDSECLNRMLMFECHPQVCPAGEFCQNQCFTKRQYPETKIIKTDGKGWGLVAKRDIRKGEFVNEYVGELIDEEECMARIKHAHENDITHFYMLTIDKDRIIDAGPKGNYSRFMNHSCQPNCETLKWTVNGDTRVGLFAVCDIPAGTELTFNYNLDCLGNEKTVCRCGASNCSGFLGDRPKTSTTLSSEEKGKKTKKKTRRRRAKGEGKRQSEDECFRCGDGGQLVLCDRKFCTKAYHLSCLGLGKRPFGKWECPWHHCDVCGKPSTSFCHLCPNSFCKEHQDGTAFSCTPDGRSYCCEHDLGAASVRSTKTEKPPPEPGKPKGKRRRRRGWRRVTEGK

SEQ ID NO: 10589 - protein, 362 aa, Homo sapiens
MDSPEVTFTLAYLVFAVCFVFTPNEFHAAGLTVQNLLSGWLGSEDAAFVPFHLRRTAATLLCHSLLPLGYYVGMCLAASEKRLHALSQAPEAWRLFLLLAVTLPSIACILIYYWSRDRWACHPLARTLALYALPQSGWQAVASSVNTEFRRIDKFATGAPGARVIVTDTWVMKVTTYRVHVAQQQDVHLTVTESRQHELSPDSNLPVQLLTIRVASTNPAVQAFDIWLNSTEYGELCEKLRAPIRRAAHVVIHQSLGDLFLETFASLVEVNPAYSVPSSQELEACIGCMQTRASVKLVKTCQEAATGECQQCYCRPMWCLTCMGKWFASRQDPLRPDTWLASRVPCPTCRARFCILDVCTVR

SEQ ID NO: 10590 - protein, 156 aa, Homo sapiens
MAPAVTRLLFLQLVLGPTLVMDIKMQIGSRNFYTLSIDYPRVNYPKGFRGYCNGLMSYMRGKMQNSDCPKIHYVIHAPWKAIQKFCKYSDSFCENYNEYCTLTQDSLPITVCSLSHQQPPTSCYYNSTLTNQKLYLLCSRKYEADPIGIAGLYSGI

SEQ ID NO: 10591 - protein, 429 aa, Homo sapiens
MSGVRPPIMNGPLHPRPLVALLDGRDCTVEMPILKDVATVAFCDAQSTQEIHEKVLNEAVGALMYHTITLTREDLEKFKALRIIVRIGSGFDNIDIKSAGDLGIAVCNVPAASVEETADSTLCHILNLYRRATWLHQALREGTRVQSVEQIREVASGAARIRGETLGIIGLGRVGQAVALRAKAFGFNVLFYDPYLSDGVERALGLQRVSTLQDLLFHSDCVTLHCGLNEHNHHLINDFTVKQMRQGAFLVNTARGGLVDEKALAQALKEGRIRGAALDVHESEPFSFSQGPLKDAPNLICTPHAAWYSEQASIEMREEAAREIRRAITGRIPDSLKNCVNKDHLTAATHWASMDPAVVHPELNGAAYRYPPGVVGVAPTGIPAAVEGIVPSAMSLSHGLPPVAHPPHAPSPGQTVKPEADRDHASDQL

SEQ ID NO: 10592 - protein, 232 aa, Homo sapiens
MANWVFCNRCFQPPHRTSCFSLTNCGHVYCDACLGKGKKNECLICKAPCRTVLLSKHTDADIQAFFMSIDSLCKKYSRETSQILEFQEKHRKRLLAFYREKISRLEESLRKSVLQIEQLQSMRSSQQTAFSTIKSSVSTKPHGCLLPPHSSAPDRLESMEVDLSPSPIRKSEIAAGPARISMISPPQDGRMAPCARRVCHFQRFTMFLHRRLSSLAAPPSVQFWKARGTHQL

SEQ ID NO: 10593 - protein, 478 aa, Homo sapiens
MAAALKCLLTLGRWCPGLGVAPQARALAALVPGVTQVDNKSGFLQKRPHRQHPGILKLPHVRLPQALANGAQLLLLGSAGPTMENQVQTLTSYLWSRHLPVEPEELQRRARHLEKKFLENPDLSQTEEKLRGAVLHALRKTTYHWQELSYTEGLSLVYMAARLDGGFAAVSRAFHEIRARNPAFQPQTLMDFGSGTGSVTWAAHSIWGQSLREYMCVDRSAAMLVLAEKLLKGGSESGEPYIPGVFFRQFLPVSPKVQFDVVVSAFSLSELPSKADRTEVVQTLWRKTGHFLVLVENGTKAGHSLLMDARDLVLKGKEKSPLDPRPGFVFAPCPHELPCPQLTNLACSFSQAYHPIPFSWNKKPKEEKFSMVILARGSPEEAHRWPRITQPVLKRPRHVHCHLCCPDGHMQHAVLTARRHGRYGGCDQNQWDVAGSCSPRQHLFPQGFVSLCPCQLLGRSFTCAYSVCVSSIYGSGSL

SEQ ID NO: 10594 - protein, 600 aa, Homo sapiens
MENSSAASASSEAGSSRSQEIEELERFIDSYVLEYQVQGLLADKTEGDGESERTQSHISQWTADCSEPLDSSCSFSRGRAPPQQNGSKDNSLDMLGTDIWAANTFDSFSGATWDLQPEKLDFTQFHRKVRHTPKQPLPHIDREGCGKGKLEDGDGINLNDIEKVLPAWQGYHPMPHEVEIAHTKKLFRRRRNDRRRQQRPPGGNKPQQHGDHQPGSAKHNRDHQKSYQGGSAPHPSGRPTHHGYSQNRRWHHGNMKHPPGDKGEAGAHRNAKETMTIENPKLEDTAGDTGHSSLEAPRSPDTLAPVASERLPPQQSGGPEVETKRKDSILPERIGERPKITLLQSSKDRLRRRLKEKVPDEVAVETTTPQQNKMDKLIEILNSMRNNSSDVDTKLTTFMEEAQNSTNSEEMLGEIVRTIYQKAVSDRSFAFTAAKLCDKMALFMVEGTKFRSLLLNMLQKDFTVREELQQQDVERWLGFITFLCEVFGTMRSSTGEPFRVLVCPIYTCLRELLQSQDVKEDAVLCCSMELQSTGRLLEEQLPEMMTELLASARDKMLCPSESMLTRSLLLEVIELHANSWNPLTPPITQYYNRTIQKLTA

SEQ ID NO: 10595 - protein, 206 aa, Homo sapiens
MGTWILFACLVGAAFAMPLPPHPGHPGYINFSYENSHSQAINVDRIALVLTPLKWYQSMIRPPYSSYGYEPMGGWLHHQIIPVVSQQHPLTHTLQSHHHIPVVPAQQPRVRQQALMPVPGQQSMTPTQHHQPNLPLPAQQPFQPQPVQPQPHQPMQPQPPVQPMQPLLPQPPLPPMFPLRPLPPILPDLHLEAWPATDKTKQEEVD

SEQ ID NO: 10596 - protein, 1195 aa, Homo sapiens
MTVMSLSRDLKDDFHSDTVLSILNEQRIRGILCDVTIIVEDTKFKAHSNVLAASSLYFKNIFWSHTICISSHVLELDDLKAEVFTEILNYIYSSTVVVKRQETVTDLAAAGKKLGISFLEDLTDRNFSNSPGPYVFCITEKGVVKEEKNEKRHEEPAITNGPRITNAFSIIETENSNNMFSPLDLRASFKKVSDSMRTASLCLERTDVCHEAEPVRTLAEHSYAVSSVAEAYRSQPVREHDGSSPGNTGKENCEALAAKPKTCRKPKTFSIPQDSDSATENIPPPPVSNLEVNQERSPQPAAVLTRSKSPNNEGDVHFSREDENQSSDVPGPPAAEVPPLVYNCSCCSKAFDSSTLLSAHMQLHKPTQEPLVCKYCNKQFTTLNRLDRHEQICMRSSHMPIPGGNQRFLENYPTIGQNGGSFTGPEPLLSENRIGEFSSTGSTLPDTDHMVKFVNGQMLYSCVVCKRSYVTLSSLRRHANVHSWRRTYPCHYCNKVFALAEYRTRHEIWHTGERRYQCIFCLETFMTYYILKNHQKSFHAIDHRLSISKKTANGGLKPSVYPYKLYRLLPMKCKRAPYKSYRNSSYENARENSQMNESAPGTYVVQNPHSSELPTLNFQDTVNTLTNSPAIPLETSACQDIPTSANVQNAEGTKWGEEALKMDLDNNFYSTEVSVSSTENAVSSDLRAGDVPVLSLSNSSENAASVISYSGSAPSVIVHSSQFSSVIMHSNAIAAMTSSNHRAFSDPAVSQSLKDDSKPEPDKVGRFASRPKSIKEKKKTTSHTRGEIPEESNYVADPGGSLSKTTNIAEETSKIETYIAKPALPGTSTNSNVAPLCQITVKIGNEAIVKRHILGSKLFYKRGRRPKYQMQEEPLPQGNDPEPSGDSPLGLCQSECMEMSEVFDDASDQDSTDKPWRPYYNYKPKKKSRQLKKMRKVNWRKEHGNRSPSHKCKYPAELDCAVGKAPQDKPFEEEETKEMPKLQCELCDGDKAVGAGNQGRPHRHLTSRPYACELCAKQFQSPSTLKMHMRCHTGEKPYQCKTCGRCFSVQGNLQKHERIHLGLKEFVCQYCNKAFTLNETLKIHERIHTGEKRYHCQFCFQRFLYLSTKRNHEQRHIREHNGKGYACFQCPKICKTAAALGMHQKKHLFKSPSQQEKIGDVCHENSNPLENQHFIGSEDNDQKDNIQTGVENVVL

SEQ ID NO: 10597 - protein, 525 aa, Homo sapiens
MVLFCLLFLYPAGHCPNPGISLGAVRTGFRFGHGDKVRYRCSSNLVLTGSSERECQGNGVWSGTEPICRQPYSYDFPEDVAPALGTSFSHMLGATNPTQKTKDHENGTGTNTYAALNSVYLMMNNQMRLLGMETMAWQEIRHAIILLTDGKSNMGGSPKTAVDHIREILNINQKRNDYLDIYAIGVGKLDVDWRELNELGSKKDGERHAFILQDTKALHQVFEHMLDVSKLTDTICGVGNMSANASDQERTPWHVTIKPKSQETCRGALISDQWVLTAAHCFRDGNDHSLWRVNVGDPKSQWGKEFLIEKAVISPGFDVFAKKNQGILEFYGDDIALLKLAQKVKMSTHARPICLPCTMEANLALRRPQGSTCRDHENELLNKQSVPAHFVALNGSKLNINLKMGVEWTSCAEVVSQEKTMFPNLTDVREVVTDQFLCSGTQEDESPCKGESGGAVFLERRFRFFQVGLVSWGLYNPCLGSADKNSRKRAPRSKVPPPRDFHINLFRMQPWLRQHLGDVLNFLPL

SEQ ID NO: 10598 - protein, 1258 aa, Homo sapiens
MITSELPVLQDSTNETTAHSDAGSELEETEVKGKRKRGRPGRPPSTNKKPRKSPGEKSRIEAGIRGAGRGRANGHPQQNGEGEPVTLFEVVKLGKSAMQSVVDDWIESYKQDRDIALLDLINFFIQCSGCRGTVRIEMFRNMQNAEIIRKMTEEFDEDSGDYPLTMPGPQWKKFRSNFCEFIGVLIRQCQYSIIYDEYMMDTVISLLTGLSDSQVRAFRHTSTLAAMKLMTALVNVALNLSIHQDNTQRQYEAERNKMIGKRANERLELLLQKRKELQENQDEIENMMNSIFKGIFVHRYRDAIAEIRAICIEEIGVWMKMYSDAFLNDSYLKYVGWTLHDRQGEVRLKCLKALQSLYTNRELFPKLELFTNRFKDRIVSMTLDKEYDVAVEAIRLVTLILHGSEEALSNEDCENVYHLVYSAHRPVAVAAGEFLHKKLFSRHDPQAEEALAKRRGRNSPNGNLIRMLVLFFLESELHEHAAYLVDSLWESSQELLKDWECMTELLLEEPVQGEEAMSDRQESALIELMVCTIRQAAEAHPPVGRGTGKRVLTAKERKTQIDDRNKLTEHFIITLPMLLSKYSADAEKVANLLQIPQYFDLEIYSTGRMEKHLDALLKQIKFVVEKHVESDVLEACSKTYSILCSEEYTIQNRVDIARSQLIDEFVDRFNHSVEDLLQEGEEADDDDIYNVLSTLKRLTSFHNAHDLTKWDLFGNCYRLLKTGIEHGAMPEQIVVQALQCSHYSILWQLVKITDGSPSKEDLLVLRKTVKSFLAVCQQCLSNVNTPVKEQAFMLLCDLLMIFSHQLMTGGREGLQPLVFNPDTGLQSELLSFVMDHVFIDQDEENQSMEGDEEDEANKIEALHKRRNLLAAFSKLIIYDIVDMHAAADIFKHYMKYYNDYGDIIKETLSKTRQIDKIQCAKTLILSLQQLFNELVQEQGPNLDRTSAHVSGIKELARRFALTFGLDQIKTREAVATLHKDGIEFAFKYQNQKGQEYPPPNLAFLEVLSEFSSKLLRQDKKTVHSYLEKFLTEQMMERREDVWLPLISYRNSLVTGGEDDRMSVNSGSSSSKTSSVRNKKGRPPLHKKRVEDESLDNTWLNRTDTMIQTPGPLPAPQLTSTVLRENSRPMGDQIQEPESEHGSEPDFLHNPQMQISWLGQPKLEDLNRKDRTGMNYMKVRTGVRHAVRGLMEEDAEPIFEDVMMSSRSQLEDMNEEFEDTMVIDLPPSRNRRERAELRPDFFDSAAIIEDDSGFGMPMF

SEQ ID NO: 10599 - protein, 372 aa, Homo sapiens
MRVMAPRALLLLLSGGLALTETWACSHSMRYFDTAVSRPGRGEPRFISVGYVDDTQFVRFDSDAASPRGEPRAPWVEQEGPEYWDRETQKYKRQAQADRVSLRNLRGYYNQSEDGSHTLQRMSGCDLGPDGRLLRGYDQSAYDGKDYIALNEDLRSWTAADTAAQITQRKLEAARAAEQLRAYLEGTCVEWLRRYLENGKETLQRAEPPKTHVTHHPLSDHEATLRCWALGFYPAEITLTWQRDGEDQTQDTELVETRPAGDGTFQKWAAVVVPSGQEQRYTCHMQHEGLQEPLTLSWEPSSQPTIPIMGIVAGLAVLVVLAVLGAVVTAMMCRRKSSGHFLPTGGKGGSCSQAACSNSAQGSDESLITCKA

SEQ ID NO: 10600 - protein, 645 aa, Homo sapiens
MLKFQEAAKCVSGSTAISTYPKTLIARRYVLQQKLGSGSFGTVYLVSDKKAKRGEELKVLKEISVGELNPNETVQANLEAQLLSKLDHPAIVKFHASFVEQDNFCIITEYCEGRDLDDKIQEYKQAGKIFPENQIIEWFIQLLLGVDYMHERRILHRDLKSKNVFLKNNLLKIGDFGVSRLLMGSCDLATTLTGTPHYMSPEALKHQGYDTKSDIWSLACILYEMCCMNHAFAGSNFLSIVLKIVEGDTPSLPERYPKELNAIMESMLNKNPSLRPSAIEILKIPYLDEQLQNLMCRYSEMTLEDKNLDCQKEAAHIINAMQKRIHLQTLRALSEVQKMTPRERMRLRKLQAADEKARKLKKIVEEKYEENSKRMQELRSRNFQQLSVDVLHEKTHLKGMEEKEEQPEGRLSCSPQDEDEERWQGREEESDEPTLENLPESQPIPSMDLHELESIVEDATSDLGYHEIPEDPLVAEEYYADAFDSYCEESDEEEEEIALERPEKEIRNEGSQPAYRTNQQDSDIEALARCLENVLGCTSLDTKTITTMAEDMSPGPPIFNSVMARTKMKRMRESAMQKLGTEVFEEVYNYLKRARHQNASEAEIRECLEKVVPQASDCFEVDQLLYFEEQLLITMGKEPTLQNHL

SEQ ID NO: 10601 - protein, 312 aa, Homo sapiens
MSKVARSSSESDVQLWETEEDDMTEGDLGYGLGRKPGGIYEIEFSHRSRKRSDGKNFSPPPFPRKGEERNEASFQYSKHKSQQDTFPQVSRISNYRRQSSTDSNSELSNEELRQCLNETLEEVEMLKTELEASQRQLRGKEEALKILQSMAILGKATSHTQAVLQKTMEQNRSLEKEINALQWEIEFDHNRFKNIEESWIQKYDRLNCENAVLKENLKVKTEEIKMLKSDNAVLNQRYLEALAMLDIKQQKMAQENMCCDKSGFAEASGLEDFHHQGVRRPSGRDCWVCSLQKTVLRGWKTRTVLKRSLRCS

SEQ ID NO: 10602 - protein, 125 aa, Homo sapiens
MGTSSIFLCVLFLCGALGLTMSPARGRLRCYICGFTKPCHPVPTECRDDEACGISIGTSGKSCLSRAQCPLPGYATYWLHSYTLWHHCCEQDLCNIAASPQQLTSLLASLPLFVASFAGRGHLLH

SEQ ID NO: 10603 - protein, 354 aa, Homo sapiens
MCGRTSCHLPRDVLTRACAYQDRRGQQRLPEWRDPDKYCPSYNKSPQSNSPVLLSRLHFEKDADSSERIIAPMRWGLVPSWFKESDPSKLQFNTTNCRSDTVMEKRSFKVPLGKGRRCVVLADGFYEWQRCQGTNQRQPYFIYFPQIKTEKSGSIGAADSPENWEKVWDNWRLLTMAGIFDCWEPPEGGDVLYSYTIITVDSCKGLSDIHHRMPAILDGEEAVSKWLDFGEVSTQEALKLIHPTENITFHAVSSVVNNSRNNTPECLAPVDLVVKKELRASGSSQRMLQWLATKSPKKEDSKTPQKEESDVPQWSSQFLQKSPLPTKRGTAGLLEQWLKREKEEEPVAKRPYSQ

SEQ ID NO: 10604 - protein, 254 aa, Homo sapiens
MAAVAATAAAKGNGGGGGRAGAGDASGTRKKKGPGPLATAYLVIYNVVMTAGWLVIAVGLVRAYLAKGSYHSLYYSIEKPLKFFQTGALLEILHCAIGIVPSSVVLTSFQVMSRVFLIWAVTHSVKEVQSEDSVLLFVIAWTITEIIRYSFYTFSLLNHLPYLIKWARYTLFIVLYPMGVSGELLTIYAALPFVRQAGLYSISLPNKYNFSFDYYAFLILIMISYIPIFPQLYFHMIHQRRKILSHTEEHKKFE

SEQ ID NO: 10605 - protein, 256 aa, Homo sapiens
MGHTRRQGTSPSKCPYLNFFQLLVLAGLSHFCSGVIHVTKEVKEVATLSCGHNVSVEELAQTRIYWQKEKKMVLTMMSGDMNIWPEYKNRTIFDITNNLSIVILALRPSDEGTYECVVLKYEKDAFKREHLAEVTLSVKADFPTPSISDFEIPTSNIRRIICSTSGGFPEPHLSWLENGEELNAINTTVSQDPETELYAVSSKLDFNMTTNHSFMCLIKYGHLRVNQTFNWNTSFAPRCRERRRNERLRRESVRPV

SEQ ID NO: 10606 - protein, 244 aa, Homo sapiens
MRWCLLLIWAQGLRQAPLASGMMTGTIETTGNISAEKGGSIILQCHLSSTTAQVTQVNWEQQDQLLAICNADLGWHISPSFKDRVAPGPGLGLTLQSLTVNDTGEYFCIYHTYPDGTYTGRIFLEVLESSVAEHGARFQIPLLGAMAATLVVICTAVIVVVALTRKKKALRIHSVEGDLRRKSAGQEEWSPSAPSPPGSCVQAEAAPAGLCGEQRGEDCAELHDYFNVLSYRSLGNCSFFTETG

SEQ ID NO: 10607 - protein, 241 aa, Homo sapiens
MKTLPAMLGTGKLFWVFFLIPYLDIWNIHGKESCDVQLYIKRQSEHSILAGDPFELECPVKYCANRPHVTWCKLNGTTCVKLEDRQTSWKEEKNISFFILHFEPVLPNDNGSYRCSANFQSNLIESHSTTLYVTGKQNELSDTAGREINLVDAHLKSEQTEASTRQNSQVLLSETGIYDNDPDLCFRMQEGSEVYSNPCLEENKPGIVYASLNHSVIGPNSRLARNVKEAPTEYASICVRS

SEQ ID NO: 10608 - protein, 893 aa, Homo sapiens
MVVDEQQRLTAQLTLQRQKIQELTTNAKETHTKLALAEARVQEEEQKATRLEKELQTQTTKFHQDQDTIMAKLTNEDSQNRQLQQKLAALSRQIDELEETNRSLRKAEEELQDIKEKISKGEYGNAGIMAEVEELRKRVLDMEGKDEELIKMEEQCRDLNKRLERETLQSKDFKLEVEKLSKRIMALEKLEDAFNKSKQECYSLKCNLEKERMTTKQLSQELESLKVRIKELEAIESRLEKTEFTLKEDLTKLKTLTVMFVDERKTMSEKLKKTEDKLQAASSQLQVEQNKVTTVTEKLIEETKRALKSKTDVEEKMYSVTKERDDLKNKLKAEEEKGNDLLSRVNMLKNRLQSLEAIEKDFLKNKLNQDSGKSTTALHQENNKIKELSQEVERLKLKLKDMKAIEDDLMKTEDEYETLERRYANERDKAQFLSKELEHVKMELAKYKLAEKTETSHEQWLFKRLQEEEAKSGHLSREVDALKEKIHEYMATEDLICHLQGDHSVLQKKLNQQENRNRDLGREIENLTKELERYRHFSKSLRPSLNGRRISDPQVFSKEVQTEAVDNEPPDYKSLIPLERAVINGQLYEESENQDEDPNDEGSVLSFKCSQSTPCPVNRKLWIPWMKSKEGHLQNGKMQTKPNANFVQPGDLVLSHTPGQPLHIKVTPDHVQNTATLEITSPTTESPHSYTSTAVIPNCGTPKQRITILQNASITPVKSKTSTEDLMNLEQGMSPITMATFARAQTPESCGSLTPERTMSPIQVLAVTGSASSPEQGRSPEPTEISAKHAIFRVSPDRQSSWQFQRSNSNSSSVITTEDNKIHIHLGSPYMQAVASPVRPASPSAPLQDNRTQGLINGALNKTTNKVTSSITITPTATPLPRQSQITVSNIYN

SEQ ID NO: 10609 - protein, 404 aa, Homo sapiens
MIWKRSAVLRFYSVCGLLLQAAASKNKVKGSQGQFPLTQNVTVVEGGTAILTCRVDQNDNTSLQWSNPAQQTLYFDDKKALRDNRIELVRASWHELSISVSDVSLSDEGQYTCSLFTMPVKTSKAYLTVLGVPEKPQISGFSSPVMEGDLMQLTCKTSGSKPAADIRWFKNDKEIKDVKYLKEEDANRKTFTVSSTLDFRVDRSDDGVAVICRVDHESLNATPQVAMQVLEIHYTPSVKIIPSTPFPQEGQPLILTCESKGKPLPEPVLWTKDGGELPDPDRMVVSGRELNILFLNKTDNGTYRCEATNTIGQSSAEYVLIVHDPNALAGQNGPDHALIGGIVAVVVFVTLCSIFLLGRYLARHKGTYLTNEAKGAEDAPDADTAIINAEGSQVNAEEKKEYFI

SEQ ID NO: 10610 - protein, 527 aa, Homo sapiens
MLMLFVFGVLLHEVSLSGQNEAPPNTHSIPGEPLYNYASIRLPEEHIPFFLHNNRHIATVCRKDSLCPYKKHLEKLKYCWGYEKSCKPEFRFGYPVCSYVDMGWTDTLESAEDIFWKQADFGYARERLEEMHVLCQPKETSDSSLVCSRYLQYCRATNLYLDLRNIKRNHDRFKEDFFQSGEIGGHCKLDIRTLTSEGQRKSPLQSWFAELQSYTQLNFRPIEDAKCDIVIEKPTYFMKLDAGVNMYHHFCDFINLYITQHVNNSFSTDVYIVMWDTSSYGYGDLFSDTWNAFTDYDVIHLKTYDSKRVCFKEAVFSLLPRMRYGLFYNTPLISGCQNTGLFRAFAQHVLHRLNITQEGPKDGKIRVTILARSTEYRKILNQNELVNALKTVSTFEVQIVDYKYRELGFLDQLRITHNTDIFIGMHGAGLTHLLFLPDWAAVFELYNCEDERCYLDLARLRGVHYITWRRQNKVFPQDKGHHPTLGEHPKFTNYSFDVEEFMYLVLQAADHVLQHPKWPFKKKHDEL

SEQ ID NO: 10611 - protein, 1070 aa, Homo sapiens
MARPVRGGLGAPRRSPCLLLLWLLLLRLEPVTAAAGPRAPCAAACTCAGDSLDCGGRGLAALPGDLPSWTRSLNLSYNKLSEIDPAGFEDLPNLQEVYLNNNELTAVPSLGAASSHVVSLFLQHNKIRSVEGSQLKAYLSLEVLDLSLNNITEVRNTCFPHGPPIKELNLAGNRIGTLELGAFDGLSRSLLTLRLSKNRITQLPVRAFKLPRLTQLDLNRNRIRLIEGLTFQGLNSLEVLKLQRNNISKLTDGAFWGLSKMHVLHLEYNSLVEVNSGSLYGLTALHQLHLSNNSIARIHRKGWSFCQKLHELVLSFNNLTRLDEESLAELSSLSVLRLSHNSISHIAEGAFKGLRSLRVLDLDHNEISGTIEDTSGAFSGLDSLSKLLLLEPSQSAGCSSPSQPHMSAGGRTLFGNKIKSVAKRAFSGLEGLEHLNLGGNAIRSVQFDAFVKMKNLKELHISSDSFLCDCQLKWLPPWLIGRMLQAFVTATCAHPESLKGQSIFSVPPESFVCDDFLKPQIITQPETTMAMVGKDIRFTCSAASSSSSPMTFAWKKDNEVLTNADMENFVHVHAQDGEVMEYTTILHLRQVTFGHEGRYQCVITNHFGSTYSHKARLTVNVLPSFTKTPHDITIRTTTMARLECAATGHPNPQIAWQKDGGTDFPAAQTPSLVVPLEDRVVSVGETVALQCKATGNPPPRITWFKGDRPLSLTERHHLTPDNQLLVVQNVVAEDAGRYTCEMSNTLGTERAHSQLSVLPAAGCRKDGTTVGIFTIAVVSSIVLTSLVWVCIIYQTRKKSEEYSVTNTDETVVPPDVPSYLSSQGTLSDRQETVVRTEGGPQANGHIESNGVCPRDASHFPEPDTHSVACRQPKLCAGSAYHKEPWKAMEKAEGTPGPHKMEHGGRVVCSDCNTEVDCYSRGQAFHPQPVSRDSAQPSAPNGPEPGGSDQEHSPHHQCSRTAAGSCPECQGSLYPSNHDRMLTAVKKKPMASLDGKGDSSWTLARLYHPDSTELQPASSLTSGSPERAEAQYLLVSNGHLPKACDASPESTPLTGQLPGKQRVPLLLAPKS

SEQ ID NO: 10612 - protein, 502 aa, Homo sapiens [sequence omitted]

SEQ ID NO: 10613 - protein, 566 aa, Homo sapiens
MGRAGGGGPGRGPPPLLLFLGAALVLASGAVPAREAGSAVEAEELVKGSPAWEPPANDTREEAGPPAAGEDEASWTAPGGELAGPEEVLQESAAVTGTAWLEADSPGLGGVTAEAGSGDAQALPATLQAPHEVLGQSIMPPAIPEATEASGPPSPTPGDKLSPASELPKESPLEVWLNLGGSTPDPQGPELTYPFQGTLEPQPASDIIDIDYFEGLDGEGRGADLGSFPGSPGTSENHPDTEGETPSWSLLDLYDDFTPFDESDFYPTTSFYDDLDEEEEEEEDDKDAVGGGDLEDENELLVPTGKPGLGPGTGQPTSRWHAVPPQHTLGSVPGSSIALRPRPGEPGRDLASSENGTECRSGFVRHNGSCRSVCDLFPSYCHNGGQCYLVENIGAFCRCNTQDYIWHKGMRCESIITDFQVMCVAVGSAALVLLLLFMMTVFFAKKLYLLKTENTKLRRTNKFRTPSELHNDNFSLSTIAEGSHPNVRKLCNTPRTSSPHARALAHYDNVICQDDPSAPHKIQEVLKSCLKEEESFNIQNSMSPKLEGGKGDQADLDVNCLQNNLT

SEQ ID NO: 10614 - protein, 128 aa, Homo sapiens
MMTAVSLTTRPQESVAFEDVAVYFTTKEWAIMVPAERALYRDVMLENYEAVAFVVPPTSKPALVSHLEQGKESCFTQPQGVLSRNDWRAGWIGYLELRRYTYLAKAVLRRIVSKIFRNRQCWEDRRKA

SEQ ID NO: 10615 - protein, 419 aa, Homo sapiens
MGKRLDQPQMYPQYTYYYPHYLQTKSYAPAPHPMAPPSPSTNSSSNNSSNNSSGEQLSKTNLYIRGLPPGTTDQDLIKLCQPYGKIVSTKAILDKNTNQCKGYGFVDFDSPAAAQKAVASLKANGVQAQMAKQQEQDPTNLYISNLPISMDEQELENMLKPFGHVISTRILRDANGVSRGVGFARMESTEKCEVVIQHFNGKYLKTPPGIPAPSEPLLCKFADGGQKKRQNQSKYTQNGRPWPREGEAGMALTYDPTAAIQNGFYSSPYSIATNRMIPQTSITPFIAASPVSTYQGAVITPTMDHPMSMQPANMMGPLTQQMNHLSLGTTGTIQSQDRIMILHQLLCQYMTAAAPMQGTYIPQYTPVPPTAVSIEGVVADTSPQTVAPSSQDTSGQQQQIAVDTSNEHAPAYSYQQSKP

SEQ ID NO: 10616 - protein, 437 aa, Homo sapiens
MGKRLDQPQMYPQYTYYYPHYLQTKQSYAPAPHPMAPPSPSTNSSSNNSSNNSSGEQLSKTNLYIRGLPPGTTDQDLIKLCQPYGKIVSTKAILDKNTNQCKGYGFVDFDSPAAAQKAVASLKANGVQAQMAKQQEQDPTNLYISNLPISMDEQELENMLKPFGHVISTRILRDANGVSRGVGFARMESTEKCEVVIQHFNGKYLKTPPGIPAPSEPLLCKFADGGQKKRQNQSKYTQNGRPWPREGEAGMALTYDPTAAIQNGFYSSPYSIATNRMIPQTSITPFIAASPVSTYQVQSTSWMPHPPYVMQPTGAVITPTMDHPMSMQPANMMGPLTQQMNHLSLGTTGTIQSQDRIMILHQLLCQYMTAAAPMQGTYIPQYTPVPPTAVSIEGVVADTSPQTVAPSSQDTSGQQQQIAVDTSNEHAPAYSYQQSKP

SEQ ID NO: 10617 - protein, 57 aa, Homo sapiens
MAVFHDEVEIEDFQYDEDSETYFYPCPCGDNFSITKDQFVCGETVPAPSANKELVKC

SEQ ID NO: 10618 - protein, 445 aa, Homo sapiens
MTGSSFSLAHLLIISGLLCYSAGCLALPSLDQKKRGGHKACCLLTPPPPPLFPPPFFRGGRSPLLSPDMKNLMLELETSQSPCMQGSLGSPGPPGPQGPPGLPGKTGPKGEKGELGRPGRKGRPGPPGVPGMPGPIGWPGPEGPRGEKGDLGMMGLPGSRGPMGSKGYPGSRGEKGSRGEKGDLGPKGEKGFPGFPGMLGQKGEMGPKGEPGIAGHRGPTGRPGKRGKQGQKGDSGVMGPPGKPGPSGQPGRPGPPGPPPAGQLIMGPKGERGFPGPPGRCLCGPTMNVNNPSYGESVYGPSSPRVPVIFVVNNQEELERLNTQNAIAFRRDQRSLYFKDSLGWLPIQLTPFYPVDYTADQHGTCGDGLLQPGEECDDGNSDVGDDCIRCHRAYCGDGHRHEGVEDCDGSDFGYLTCETYLPGSYGDLQCTQYCYIDSTPCRYFT

SEQ ID NO: 10619 - protein, 240 aa, Homo sapiens
MASLQRKGLQARILTSEEEEKLKRDQTLVSDFKQQKLEQEAQKNWDLFYKRNSTNFFKDRHWTTREFEELRSCREFEDQKLTMLEAGCGVGNCLFPLLEEDPNIFAYACDFSPRAIEYVKQNPLYDTERCKVFQCDLTKDDLLDHVPPESVDVVMLIFVLSAVHPDKMHLVLQNIYKCHGCSSELRQPWDKDDFAVTWDPWSPAIRVLLCHSGWSAVAWTWLTAASTSWAQAVLPPQPLK

SEQ ID NO: 10620 - protein, 455 aa, Homo sapiens
MDAALKRSRSEEPAEILPPARDEEEEEEEGMEQGLEEEEEVDPRIQGELEKLNQSTDDINRRETELEDARQKFRSVLVEATVKLDELVKKIGKAVEDSKPYWEARRVARQAQLEAQKATQDFQRATEVLRAAKETISLAEQRLLEDDKRQFDSAWQEMLNHATQRVMEAEQTKTRSELVHKETAARYNAAMGRMRQLEKKLKRAINKSKPYFELKAKYYVQLEQLKKTVDDLQAKLTLAKGEYKMALKNLEMISDEIHERRRSSAMGPRGCGVGAEGSSTSVEDLPGSKPEPDAISVASEAFEDDSCSNFVSEDDSETQSVSSFSSGPTSPSEMPDQFPAVVRPGSLDLPSPVSLSEFGMMFPVLGPRSECSGASSPECEVERGDRAEGAENKTSDKANNNRGLSSSSGSGGSSKSQSSTSPEGQALENRMKQLSLQCSKGRDGIIADIKMVQIG

SEQ ID NO: 10621 - protein, 467 aa, Homo sapiens
MDRRKKPLDVTASSLVDLKAELFRKQEEFKQEKLLKDSGVFGKPKTTNKKPSIWSKQNVGVSNRAEKDAEQKIEEQKTLDKAREKLEEKAKLYEKMTKGDFIDEEVEDMYLVDFTQKIIDKRKEMEASGAHRDSQKAGERDDDEENLPEGEIPPPQDPSEEWVDYVDSLGRSRRCMRKDLPDLLEMDKNLQGRLFISPANEKTLLSEDMRKELQRQQWEEEEREALKRPMGPVHYEDIRENEARQLGVGYFAFARDKELRNKQMKTLEMLREQTTDQRTKRENIKEKRKAILEARLAKLRQKKMKKSKEGGTEEENRDGDVIGPLPPEPEAVPTPRPAAQSSKVEVIVQERKDTKPGVPHIREWDRGKEFSFGYWSKRQSDLRAERDPEFAPPSDYFVGQKRTGFSSSQAWSRPGPAQSDPGQCPDQSHGPSPEHTSPTPAPDNPPQAPTVTFKTLDDMISYYKQVT

SEQ ID NO: 10622 - protein, 1451 aa, Homo sapiens
MVSKRRLSKSEDKESLTEDASKTRKQPLSKKTKKSHIANEVEENDSIFVKLLKISGIILKTGESQNQLAVDQIAFQKKLFQTLRRHPSYPKIIEEFVSGLESYIEDEDSFRNCLLSCERLQDEEASMGASYSKSLIKLLLGIDILQPAIIKTLFEKLPEYFFENKNSDEINIPRLIVSQLKWLDRVVDGKDLTTKIMQLISIAPENLQHDIITSLPEILGDSQHADVGKELSDLLIENTSLTVPILDVLSSLRLDPNFLLKVRQLVMDKLSSIRLEDLPVIIKFILHSVTAMDTLEVISELREKLDLQHCVLPSRLQASQVKLKSKGRASSSGNQESSGQSCIILLFDVIKSAIRYEKTISEAWIKAIENTASVSEHKVFDLVMLFIIYSTNTQTKKYIDRVLRNKIRSGCIQEQLLQSTFSVHYLVLKDMCSSILSLAQSLLHSLDQSIISFGSLLYKYAFKFFDTYCQQEVVGALVTHICSGNEAEVDTALDVLLELVVLNPSAMMMNAVFVKGILDYLDNISPQQIRKLFYVLSTLAFSKQNEASSHIQDDMHLVIRKQLSSTVFKYKLIGIIGAVTMAGIMAADRSESPSLTQERANLSDEQCTQVTSLLQLVHSCSEQSPQASALYYDEFANLIQHEKLDPKALEWVGHTICNDFQDAFVVDSCVVPEGDFPFPVKALYGLEEYDTQDGIAINLLPLLFSQDFAKDGGPVTSQESGQKLVSPLCLAPYFRLLRLCVERQHNGNLEEIDGLLDCPIFLTDLEPGEKLESMSAKERSFMCSLIFLTLNWFREIVNAFCQETSPEMKGKVLTRLKHIVELQIILEKYLAVTPDYVPPLGNFDVETLDITPHTVTAISAKIRKKGKIERKQKTDGSKTSSSDTLSEEKNSECDPTPSHRGQLNKEFTGKEEKTSLLLHNSHAFFRELDIEVFSILHCGLVTKFILDTEMHTEATEVVQLGPPELLFLLEDLSQKLESMLTPPIARRVPFLKNKGSRNIGFSHLQQRSAQEIVHCVFQLLTPMCNHLENIHNYFQCLAAENHGVVDGPGVKVQEYHIMSSCYQRLLQIFHGLFAWSGFSQPENQNLLYSALHVLSSRLKQGEHSQPLEELLSQSVHYLQNFHQSIPSFQCALYLIRLLMVILEKSTASAQNKEKIASLARQFLCRVWPSGDKEKSNISNDQLHALLCIYLEHTESILKAIEEIAGVGVPELINSPKDASSSTFPTLTRHTFVVFFRVMMAELEKTVKKIEPGTAADSQQIHEEKLLYWNMAVRDFSILINLIKVFDSHPVLHVCLKYGRLFVEAFLKQCMPLLDFSFRKHREDVLSLLETFQLDTRLLHHLCGHSKIHQDTRLTQHVPLLKKTLELLVCRVKAMLTLNNCREAFWLGNLKNRDLQGEEIKSQNSQESTADESEDDMSSQASKSKATEDGEEDEVSAGEKEQDSDESYDDSD

SEQ ID NO: 10623 - protein, 420 aa, Homo sapiens
MAPWPPKGLVPAMLWGLSLFLNLPGPIWLQPSPPPQSSPPPQPHPCHTCRGLVDSFNKGLERTIRDNFGGGNTAWEEENLSKYKDSETRLVEVLEGVCSKSDFECHRLLELSEELVESWWFHKQQEAPDLFQWLCSDSLKLCCPAGTFGPSCLPCPGGTERPCGGYGQCEGEGTRGGSGHCDCQAGYGGEACGQCGLGYFEAERNASHLVCSACFGPCARCSGPEESNCLQCKKGWALHHLKCVDIDECGTEGANCGADQFCVNTEGSYECRDCAKACLGCMGAGPGRCKKCSPGYQQVGSKCLDVDECETEVCPGENKQCENTEGGYRCICAEGYKQMEGICVKEQIPESAGFFSEMTEDELVVLQQMFFGIIICALATLAAKGDLVFTAIFIGAVAAMTGYWLSERSDRVLEGFIKGR

SEQ ID NO: 10624 - protein, 705 aa, Homo sapiens
MPVPWFLLSLALGRSPVVLSLERLVGPQDATHCSPGLSCRLWDSDILCLPGDIVPAPGPVLAPTHLQTELVLRCQKETDCDLCLRVAVHLAVHGHWEEPEDEEKFGGAADSGVEEPRNASLQAQVVLSFQAYPTARCVLLEVQVPAALVQFGQSVGSVVYDCFEAALGSEVRIWSYTQPRYEKELNHTQQLPALPWLNVSADGDNVHLVLNVSEEQHFGLSLYWNQVQGPPKPRWHKNLTGPQIITLNHTDLVPCLCIQVWPLEPDSVRTNICPFREDPRAHQNLWQAARLQLLTLQSWLLDAPCSLPAEAALCWRAPGGDPCQPLVPPLSWENVTVDKVLEFPLLKGHPNLCVQVNSSEKLQLQECLWADSLGPLKDDVLLLETRGPQDNRSLCALEPSGCTSLPSKASTRAARLGEYLLQDLQSGQCLQLWDDDLGALWACPMDKYIHKRWALVWLACLLFAAALSLILLLKKDHAKGWLRLLKQDVRSGAAARGRAALLLYSADDSGFERLVGALASALCQLPLRVAVDLWSRRELSAQGPVAWFHAQRRQTLQEGGVVVLLFSPGAVALCSEWLQDGVSGPGAHGPHDAFRASLSCVLPDFLQGRAPGSYVGACFDRLLHPDAVPALFRTVPVFTLPSQLPDFLGALQQPRAPRSGRLQERAEQVSRALQPALDSYFHPPGTPAPGRGVGPGAGPGAGDGT

SEQ ID NO: 10625 - protein, 667 aa, Homo sapiens
MGSSRLAALLLPLLLIVIDLSDSAGIGFRHLPHWNTRCPLASHTDDSFTGSSAYIPCRTWWALFSTKPWCVRVWHCSRCLCQHLLSGGSGLQRGLFHLLVQKSKKSSTFKFYRRHKMPAPAQRKLLPRRHLSEKSHHISIPSPDISHKGLRSKRTQPSDPETWESLPRLDSQRHGGPEFSFDLLPEARAIRVTISSGPEVSVRLCHQWALECEELSSPYDVQKIVSGGHTVELPYEFLLPCLCIEASYLQEDTVRRKKCPFQSWPEAYGSDFWKSVHFTDYSQHTQMVMALTLRCPLKLEAALCQRHDWHTLCKDLPNATARESDGWYVLEKVDLHPQLCFKFSFGNSSHVECPHQTGSLTSWNVSMDTQAQQLILHFSSRMHATFSAAWSLPGLGQDTLVPPVYTVSQARGSSPVSLDLIIPFLRPGCCVLVWRSDVQFAWKHLLCPDVSYRHLGLLILALLALLTLLGVVLALTCRRPQSGPGPARPVLLLHAADSEAQRRLVGALAELLRAALGGGRDVIVDLWEGRHVARVGPLPWLWAARTRVAREQGTVLLLWSGADLRPVSGPDPRAAPLLALLHAAPRPLLLLAYFSRLCAKGDIPPPLRALPRYRLLRDLPRLLRALDARPFAEATSWGRLGARQRRQSRLELCSRLEREAARLADLG

SEQ ID NO: 10626 - protein, 186 aa, Homo sapiens
MGSSRLAALLLPLLLIVIDLSDSAGIGFRHLPHWNTRCPLASHTEVLPISLAAPGGPSSPQSLGVCESGTVPAVCASICCQVAQVFNGASSTSWCRNPKSLPHSSSIGDTRCQHLLRGSCCLVVTCLRRAITFPSPPQTSPTRDFALKGPNLRIQRHGKVFPDWTHKGMEDPSSPLICCLRPGLFG

SEQ ID NO: 10627 - protein, 251 aa, Homo sapiens
MRNMESNAVQLTRMEYAMKSLSLLYPKSLSRHVSVRTSVVTQQLLSEPSPKAPRARPCRVSTADRSVRKGIMAYSLEDLLLKVRDTLMLADKPFFLVLEEDGTTVETEEYFQALAGDTVFMVLQKGQKWQPPSEQGTRHPLSLSHKPAKKIDVARVTFDLYKLNPQDFIGCLNVKATFYDTYSLSYDLHCCGAKRIMKEAFRWALFSMQATGHVLLGTSCYLQQLLDATEEGQPPKGKASSLIPTCLKILQ

SEQ ID NO: 10628 - protein, 1220 aa, Homo sapiens
MGVDFDVKTFCHNLRATKPPYECPVETCRKVYKSYSGIEYHLYHYDHDNPPPPQQTPLRKHKKKGRQSRPANKQSPSPSEVSQSPGREVMSYAQAQRMVEVDLHGRVHRISIFDNLDVVSEDEEAPEEAPENGSNKENTETPAATPKSGKHKNKEKRKDSNHHHHHNVSASTTPKLPEVVYRELEQDTPDAPPRPTSYYRYIEKSAEELDEEVEYDMDEEDYIWLDIMNERRKTEGVSPIPQEIFEYLMDRLEKESYFESHNKGDPNALVDEDAVCCICNDGECQNSNVILFCDMCNLAVHQECYGVPYIPEGQWLCRRCLQSPSRAVDCALCPNKGGAFKQTDDGRWAHVVCALWIPEVCFANTVFLEPIDSIEHIPPARWKLTCYICKQRGSGACIQCHKANCYTAFHVTCAQQAGLYMKMEPVRETGANGTSFSVRKTAYCDIHTPPGSARRLPALSHSEGEEDEDEEEDEGKGWSSEKVKKAKAKSRIKMKKARKILAEKRAAAPVVSVPCIPPHRLSKITNRLTIQRKSQFMQRLHSYWTLKRQSRNGVPLLRRLQTHLQSQRNCDQVGRDSEDKNWALKEQLKSWQRLRHDLERARLLVELIRKREKLKRETIKVQQIAMEMQLTPFLILLRKTLEQLQEKDTGNIFSEPVPLSEVTELDEVPDYLDHIKKPMDFFTMKQNLEAYRYLNFDDFEEDFNLIVSNCLKYNAKDTIFYRAAVRLREQGGAVLRQARRQAEKMGIDFETGMHIPHSLAGDEATHHTEDAAEEERLVLLENQKHLPVEEQLKLLLERLDEVNASKQSVGRSRRAKMIKKEMTALRRKLAHQRETGRDGPERHGPSSRGSLTPHPAACDKDGQTDSAAEESSSQETSKGLGPNMSSTPAHEVGRRTSVLFSKKNPKTAGPPKRPGRPPKNRESQMTPSHGGSPVGPPQLPIMSSLRQRKRGRSPRPSSSSDSDSDKSTEDPPMDLPANGFSGGNQPVKKSFLVYRNDCSLPRSSSDSESSSSSSSSAASDRTSTTPSKQGRGKPSFSRGTFPEDSSEDTSGTENEAYSVGTGRGVGHSMVRKSLGRGAGWLSEDEDSPLDALDLVWAKCRGYPSYPALIIDPKMPREGMFHHGVPIPVPPLEVLKLGEQMTQEAREHLYLVLFFDNKRTWQWLPRTKLVPLGVNQDLDKEKMLEGRKSNIRKSVQIAYHRALQHRSKVQGEQSSETSDSD

SEQ ID NO: 10629 - protein, 684 aa, Homo sapiens
MFAEAAKTTRPCGMAEFKEKPEAPTEQLDVACGQENLPVGAWPPGAAPAPFQYTPDHVVGPGADIDPTQITFPGCICVKTPCLPGTCSCLRHGENYDDNSCLRDIGSGGKYAEPVFECNVLCRCSDHCRNRVVQKGLQFHFQVFKTHKKGWGLRTLEFIPKGRFVCEYAGEVLGFSEVQRRIHLQTKSDSNYIIAIREHVYNGQVMETFVDPTYIGNIGRFLNHSCEPNLLMIPVRIDSMVPKLALFAAKDIVPEEELSYDYSGRYLNLTVSEDKERLDHGKLRKPCYCGAKSCTAFLPFDSSLYCPVEKSNISCGNEKEPSMCGSAPSVFPSCKRLTLETMKMMLDKKQIRAIFLFEFKMGRKAAETTRNINNAFGPGTANERTVQWWFKKFCKGDESLEDEERSGRPSEVDNDQLRAIIEADPLTTTREVAEELNVNHSTVVRHLKQIGKVKKLDKWVPHELTENQKNRRFEVSSSLILRNHNEPFLDRIVTCDEKWILYDNRRRSAQWLDQEEAPKHFPKPILHPKKVMVTIWWSAAGLIHYSFLNPGETITSEKYAQEIDEMNQKLQRLQLALVNRKGPILLHDNARPHVAQPTLQKLNELGYEVLPHPPYSPDLLPTNYHVFKHLNNFLQGKRFHNQQDAENAFQEFVESQSTDFYATGINQLISRWQKCVDCNGSYFD

SEQ ID NO: 10630 - protein, 349 aa, Homo sapiens
MAAPALGLVCGRCPELGLVLLLLLLSLLCGAAGSQEAGTGAGAGSLAGSCGCGTPQRPGAHGSSAAAHRYSREANAPGPVPGERQLAHSKMVPIPAGVFTMGTDDPQIKQDGEAPARRVTIDAFYMDAYEVSNTEFEKFVNSTGYLTEVAAAPWWLPVKGANWRHPEGPDSTILHRPDHPVLHVSWNDAVAYCTWAGKRLPTEAEWEYSCRGGLHNRLFPWGNKLQPKGQHYANIWQGEFPVTNTGEDGFQGTAPVDAFPPNGYGLYNIVGNAWEWTSDWWTVHHSVEETLNPKGPPSGKDRVKKGGSYMCHRSYCYRYRCAARSQNTPDSSASNLGFRCAADRLPTMD

SEQ ID NO: 10631 - protein, 275 aa, Homo sapiens
MSGVFCFFFFFLGVPEAEVTWFRNKSKLGSPHHLHEGSLLLTNVSSSDQGLYSCRAANLHGELTESTQLLILDPPQVPTQLEDIRALLAATGPNLPSVLTSPLGTQLVLDPGNSALLGCPIKGHPVPNITWFHGGQPIVTATGLTHHILAAGQILQVANLSGGSQGEFSCLAQNEAGVLMQKASLVIQVQWALHRASPSCATQTSLLPDTGWHHLTIRAVQCSSEACEHPELLVRGLQCTLESQPVDPVHSYLWQLRLPVPACGVCACPHQQGSA

SEQ ID NO: 10632 - protein, 401 aa, Homo sapiens
MMGLGNGRRSMKSPPLVLAALVACIIVLGFNYWIASSRSVDLQTRIMELEGRVRRAAAERGAVELKKNEFQGELEKQREQLDKIQSSHNFQLESVNKLYQDEKAVLVNNITTGERLIRVLQDQLKTLQRNYGRLQQDVLQFQKNQTNLERKFSYDLSQCINQMKEVKEQCEERIEEVTKKGNEAVASRDLSENNDQRQQLQALSEPQPRLQAAGLPHTEVPQGKGNVLGNSKSQTPAPSSEVVLDSKRQVEKEETNEIQVVNEEPQRDRLPQEPGREQVVEDRPVGGRGFGGAGELGQTPQVQAALSVSQENPEMEGPERDQLVIPDGQEEEQEAAGEGRNQQKLRGEDDYNMDENEAESETDKQAALAGNDRNIDVFNVEDQKRDTINLLDQREKRNHTL

SEQ ID NO: 10633 - protein, 305 aa, Homo sapiens [sequence omitted]

SEQ ID NO: 10634 - protein, 192 aa, Homo sapiens
MGKGCKVVVCGLLSVGKTAILEQLLYGNHTIGMEDCETMEDVYMASVETDRGVKEQLHLYDTRGLQEGVELPKHYFSFADGFVLVYSVNNLESFQRVELLKKEIDKFKDKKEVAIVVLGNKIDLSEQRQVDAEVAQQWAKSEKVRLWEVTVTDRKTLIEPFTLLASKLSQPQSKSSFPLPGRKNKGNSNSEN

SEQ ID NO: 10635 - protein, 382 aa, Homo sapiens
MLDTNLILLPLFQFIVPKEWNSKYRPVCIHLAGTGDHHYWRRRTLMARPMIKEARMASLLLENPYYGCRKPKDQVRSSLKNVSDLFVMGGALVLESAALLHWLEREGYGPLGMTGISMGGHMASLAVSNWPKPMPLIPCLSWSTASGVFTTGVLSKSINWRELEKQYYTQTVYEEEIIHMLEYCGTDSFKMGQEFVKHFTSSADKLTNLNLVSRTLNLDISNQVVSQKPADCHNSSKTSVSATSEGLLLQDTSKMKRFNQTLSTNKSGYTSRNPQSYHLLSKEQSRNSLRKESLIFMKGVMDECTHVANFSVPVDPSLIIVVQAKEDAYIPRTGVRSLQEIWPGCEIRYLEGGHISAYLFKQGLFRQAIYDAFDRFLHKYAN

SEQ ID NO: 10636 - protein, 687 aa, Homo sapiens
MTPQSLLQTTLFLLSLLFLVQGAHGRGHREDFRFCSQRNQTHRSSLHYKPTPDLRISIENSEEALTVHAPFPAAHPASRSFPDPRGLYHFCLYWNRHAGRLHLLYGKRDFLLSDKASSLLCFQHQEESLAQGPPLLATSVTSWWSPQNISLPSAASFTFSFHSPPHTAAHNASVDMCELKRDLQLLSQFLKHPQKASRRPSAAPASQQLQSLESKLTSVRFMGDMVSFEEDRINATVWKLQPTAGLQDLHIHSRQEEEQSEIMEYSVLLPRTLFQRTKGRSGEAEKRLLLVDFSSQALFQDKNSSQVLGEKVLGIVVQNTKVANLTEPVVLTFQHQLQPKNVTLQCVFWVEDPTLSSPGHWSSAGCETVRRETQTSCFCNHLTYFAVLMVSSVEVDAVHKHYLSLLSYVGCVVSALACLVTIAAYLCSRRKPRDYTIKVHMNLLLAVFLLDTSFLLSEPVALTGSEAGCRASAIFLHFSLLTCLSWMGLEGYNLYRLVVEVFGTYVPGYLLKLSAMGWGFPIFLVTLVALVDVDNYGPIILAVHRTPEGVIYPSMCWIRDSLVSYITNLGLFSLVFLFNMAMLATMVVQILRLRPHTQKWSHVLTLLGLSLVLGLPWALIFFSFASGTFQLVVLYLFSIITSFQGFLIFIWYWSMRLQARGGPSPLKSNSDSARLPISSGSTSSSRI

SEQ ID NO: 10637 - protein, 1686 aa, Homo sapiens
MPGGPSPRSPAPLLRPLLLLLCALAPGAPGPAPGRATEGRAALDIVHPVRVDAGGSFLSYELWPRALRKRDVSVRRDAPAFYELQYRGRELRFNLTANQHLLAPGFVSETRRRGGLGRAHIRAHTPACHLLGEVQDPELEGGLAAISACDGLKGVFQLSNEDYFIEPLDSAPARPGHAQPHVVYKRQAPERLAQRGDSSAPSTCGVQVYPELESRRERWEQRQQWRRPRLRRLHQRSVSKEKWVETLVVADAKMVEYHGQPQVESYVLTIMNMVAGLFHDPSIGNPIHITIVRLVLLEDEEEDLKITHHADNTLKSFCKWQKSINMKGDAHPLHHDTAILLTRKDLCAAMNRPCETLGLSHVAGMCQPHRSCSINEDTGLPLAFTVAHELGHSFGIQHDGSGNDCEPVGKRPFIMSPQLLYDAAPLTWSRCSRQYITRFLDRGWGLCLDDPPAKDIIDFPSVPPGVLYDVSHQCRLQYGAYSAFCEDMDNVCHTLWCSVGTTCHSKLDAAVDGTRCGENKWCLSGECVPVGFRPEAVDGGWSGWSAWSICSRSCGMGVQSAERQCTQPTPKYKGRYCVGERKRFRLCNLQACPAGRPSFRHVQCSHFDAMLYKGQLHTWVPVVNDVNPCELHCRPANEYFAEKLRDAVVDGTPCYQVRASRDLCINGICKNVGCDFEIDSGAMEDRCGVCHGNGSTCHTVSGTFEEAEGLGYVDVGLIPAGAREIRIQEVAEAANFLALRSEDPEKYFLNGGWTIQWNGDYQVAGTTFTYARRGNWENLTSPGPTKEPVWIQLLFQESNPGVHYEYTIHREAGGHDEVPPPVFSWHYGPWTKCTVTCGRGVQRQNVYCLERQAGPVDEEHCDPLGRPDDQQRKCSEQPCPARWWAGEWQLCSSSCGPGGLSRRAVLCIRSVGLDEQSALEPPACEHLPRPPTETPCNRHVPCPATWAVGNWSQCSVTCGEGTQRRNVLCTNDTGVPCDEAQQPASEVTCSLPLCRWPLGTLGPEGSGSGSSSHELFNEADFIPHHLAPRPSPASSPKPGTMGNAIEEEAPELDLPGPVFVDDFYYDYNFINFHEDLSYGPSEEPDLDLAGTGDRTPPPHSHPAAPSTGSPVPATEPPAAKEEGVLGPWSPSPWPSQAGRSPPPPSEQTPGNPLINFLPEEDTPIGAPDLGLPSLSWPRVSTDGLQTPATPESQNDFPVGKDSQSQLPPPWRDRTNEVFKDDEEPKGRGAPHLPPRPSSTLPPLSPVGSTHSSPSPDVAELWTGGTVAWEPALEGGLGPVDSELWPTVGVASLLPPPIAPLPEMKVRDSSLEPGTPSFPTPGPGSWDLQTVAVWGTFLPTTLTGLGHMPEPALNPGPKGQPESLSPEVPLSSRLLSTPAWDSPANSHRVPETQPLAPSLAEAGPPADPLVVRNAGWQAGNWSECSTTCGLGAVWRPVRCSSGRDEDCAPAGRPQPARRCHLRPCATWHSGNWSKCSRSCGGGSSVRDVQCVDTRDLRPLRPFHCQPGPAKPPAHRPCGAQPCLSWYTSSWRECSEACGGGEQQRLVTCPEPGLCEEALRPNTTRPCNTHPCTQWVVGPWGQCSGPCGGGVQRRLVKCVNTQTGLPEEDSDQCGHEAWPESSRPCGTEDCEPVEPPRCERDRLSFGFCETLRLLGRCQLPTIRTQCCRSCSPPSHGAPSRGHQRVARR

SEQ ID NO: 10638 - protein, 456 aa, Homo sapiens
MDSRLQEIRERQKLRRQLLAQQLGAESADSIGAVLNSKDEQREIAETRETCRASYDTSAPNAKRKYLDEGETDEDKMEEYKDELEMQQDEENLPYEEEIYKDSSTFLKGTQSLNPHNDYCQHFVDTGHRPQNFIRDVGLADRFEEYPKLRELIRLKDELIAKSNTPPMYLQADIEAFDIRELTPKFDVILLEPPLEEYYRETGITANEKCWTWDDIMKLEIDEIAAPRSFIFLWCGSGEGLDLGRVCLRKWGYRRCEDICWIKTNKNNPGKTKTLDPKAVFQRTKEHCLMGIKGTVKRSTDGDFIHANVDIDLIITEEPEIGNIEKPVEIFHIIEHFCLGRRRLHLFGRDSTIRPGWLTVGPTLTNSNYNAETYASYFSAPNSYLTGCTEEIERLRPKSPPPKSKSDRGGGAPRGGGRGGTSAGRGRERNRSNFRGERGGFRGGRGGAHRGGFPPR

SEQ ID NO: 10639 - protein, 226 aa, Homo sapiens
MARLLQASCLLSLLLAGFVSQSRGQEKSKMDCHGGISGTIYEYGALTIDGEEYIPFKQYAGKYVLFVNVASYUGLTGQYIELNALQEELAPFGLVILGFPCNQFGKQEPGENSEILPTLKYVRPGGGFVPNFQLFEKGDVNGEKEQKFYTFLKNSCPPTSELLGTSDRLFWEPMKVHDIRWNFEKFLVGPDGIPIMRWHHRTTVSNVKMDILSYMRRQAALGVKRK

SEQ ID NO: 10640 - protein, 430 aa, Homo sapiens
MSFTTRSTFSTNYRSLGSVQAPSYGARPVSSAASVYAGAGGSGSRISVSRSTSFRGGMGSGGLATGIAGGLAGMGGIQNEKETMQSLNDRLASYLDRVRSLETENRRLESKIREHLEKKGPQVRDWSHYFKIIEDLRAQIFANTVDNARIVLQIDNARLAADDFRVKYETELAMRQSVENDIHGLRKVIDDTNITRLQLETEIEALKEELLFMKKNHEEEVKGLQAQIASSGLTVEVDAPKSQDLAKIMADIRAQYDELARKNREELDKYWSQQIEESTTVVTTQSAEVGAAETTLTELRRTVQSLEIDLDSMRNLKASLENSLREVEARYALQMEQLNGILLHLESELAQTRAEGQRQAQEYEALLNIKVKLEAEIATYRRLLEDGEDFNLGDALDSSNSMQTIQKTTTRRIVDGKVVSETNDTKVLRH

SEQ ID NO: 10641 - protein, 2551 aa, Homo sapiens
MMLQHLVIFCLGLVVQNFCSPAETTGQARRCDRKSLLTIRTECRSCALNLGVKCPDGYTMITSGSVGVRDCRYTFEVRTYSLSLPGCRHICRKDYLQPRCCPGRWGPDCIECPGGAGSPCNGRGSCAEGMEGNGTCSCQEGFGGTACETCADDNLFGPSCSSVCNCVHGVCNSGLDGDGTCECYSAYTGPKCDKPIPECAALLCPENSRCSPSTEDENKLECKCLPNYRGDGKYCDPINPCLRKICHPHAHCTYLGPNRHSCTCQEGYRGDGQVCLPVDPCQINFGNCPTKSTVCKYDGPGQSHCECKEHYQNFVPGVGCSMTDICKSDNPCHRNANCTTVAPGRTECICQKGYVGDGLTCYGNIMERLRELNTEPRGKWQGRLTSFISLLDKAYAWPLSKLGPFTVLLPTDKGLKGFNVNELLVDNKAAQYFVKLHIIAGQMNIEYMNNTDMFYTLTGKSGEIFNSDKDNQIKLKLHGGKKKVKIIQGDIIASNGLLHILDRAMDKLEPTFESNNEQTIMTMLQPRYSKFRSLLEETNLGHALDEDGVGGPYTIFVPNNEALNNMKDGTLDYLLSPEGSRKLLELVRYHIVPFTQLEVATLISTPHIRSMANQLIQFNTTDNGQILANDVAMEEIEITAKNGRIYTLTGVLIPPSIVPILPHRCDETKREMKLGTCVSCSLVYWSRCPANSEPTALFTHRCVYSGRFGSLKSGCARYCNATVKIPKCCKGFYGPDCNQCPGGFSNPCSGNGQCADSLGGNGTCICEEGFQGSQCQFCSDPNKYGPRCNKKCLCVHGTCNNRIDSDGACLTGTCRDGSAGRLCDKQTSACGPYVQFCHIHATCEYSNGTASCICKAGYEGDGTLCSEMDPCTGLTPGGCSRNAECIKTGTGTHTCVCQQGWTGNGRDCSEINNCLLPSAGGCHDNASCLYVGPGQNECECKKGFRGNGIDCEPITSCLEQTGKCHPLASCQSTSSGVWSCVCQEGYEGDGFLCYGNAAVELSFLSEAAIFNRWINNASLQPTLSATSNLTVLVPSQQATEDMDQDEKSFWLSQSNIPALIKYHMLLGTYRVADLQTLSSSDMLATSLQGNFLHLAKVDGNITIEGASIVDGDNAATNGVIHIINKVLVPQRRLTGSLPNLLMRLEQMPDYSIFRGYIIQYNLANAIEAADAYTVFAPNNNAIENYIREKKVLSLEEDVLRYHVVLEEKLLKNDLHNGMHRETMLGFSYFLSFFLHNDQLYVNEAPINYTNVATDKGVIHGLGKVLEIQKNRCDNNDTTIIRGRCRTCSSELTCPFGTKSLGNEKRRCIYTSYFMGRRTLFIGCQPKCVRTVITRECCAGFFGPQCQPCPGNAQNVCFGNGICLDGVNGTGVCECGEGFSGTACETCTEGKYGIHCDQACSCVHGRCNQGPLGDGSCDCDVGWRGVHCDNATTEDNCNGTCHTSANCLTNSDGTASCKCAAGFQGNGTICTAINACEISNGGCSAKADCKRTTPGRRVCTCKAGYTGDGIVCLEINPCLENHGGCDKNAECTQTGPNQAACNCLPAYTGDGKVCTLINVCLTKNGGCSEFAICNHTGQVERTCTCKPNYIGDGFTCRGSIYQELPKNPKTSQYFFQLQEHFVKDLVGPGPFTVFAPLSAAFDEEARVKDWDKYGLMPQVLRYHVVACHQLLLENLKLISNATSLQGEPIVISVSQSTVYINNKAKIISSDIISTNGIVHIIDKLLSPKNLLITPKDNSGRILQNLTTLATNNGYIKFSNLIQDSGLLSVITDPIHTPVTLFWPTDQALHALPAEQQDFLFNQDNKDKLKEYLKFHVIRDAKVLAVDLPTSTAWKTLQGSELSVKCGAGRDIGDLFLNGQTCRIVQRELLFDLGVAYGIDCLLIDPTLGGRCDTFTTFDASGECGSCVNTPSCPRWSKPKGVKQKCLYNLPFKRNLEGCRERCSLVIQIPRCCKGYFGRDCQACPGGPDAPCNNRGVCLDQYSATGECKCNTGFNGTACEMCWPGRFGPDCLPCGCSDHGQCDDGITGSGQCLCETGWTGPSCDTQAVLPAVCTPPCSAHATCKENNTCECNLDYEGDGITCTVVDFCKQDNGGCAKVARCSQKGTKVSCSCQKGYKGDGHSCTEIDPCADGLNGGCHEHATCKMTGPGKHKCECKSHYVGDGLNCEPEQLPIDRCLQDNGQCHADAKCVDLHFQDTTVGVFHLRSPLGQYKLTFDKAREACANEAATMATYNQLSYAQKAKYHLCSAGWLETGRVAYPTAFASQNCGSGVVGIVDYGPRPNKSEMWDVFCYRMKDVNCTCKVGYVGDGFSCSGNLLQVLMSFPSLTNFLTEVLAYSNSSARGRAFLEHLTDLSIRGTLFVPQNSGLGENETLSGRDIEHHLANVSMFFYNDLVNGTTLQTRLGSKLLITASQDPLQPTETRFVDGRAILQWDIFASNGIIHVISRPLKAPPAPVTLTHTGLGAGIFFAIILVTGAVALAAYSYFRINRRTIGFQHFESEEDINVAALGKQQPENISNPLYESTTSAPPEPSYDPFTDSEERQLEGNDPLRTL

SEQ ID NO: 10642 - protein, 443 aa, Homo sapiens
MSDMEDDFMCDDEEDYDLEYSEDSNSEPNVDLENQYYNSKALKEDDPKAALSSFQKVLELEGEKGEWGFKALKQMIKINFKLTNFPEMMNRYKQLLTYIRSAVTRNYSEKSINSILDYISTSKQMDLLQEFYETTLEALKDAKNDRLWFKTNTKLGKLYLEREEYGKLQKILRQLHQSCQTDDGEDDLKKGTQLLEIYALEIQMYTAQKNNKKLKALYEQSLHIKSAIPHPLIMGVIRECGGKMHLREGEFEKAHTDFFEAFKNYDESGSPRRTTCLKYLVLANMLMKSGINPFDSQEAKPYKNDPEILAMTNLVSAYQNNDITEFEKILKTNHSNIMDDPFIREHIEELLRNIRTQVLIKLIKPYTRIHIPFISKELNIDVADVESLLVQCILDNTIHGRIDQVNQLLELDHQKRGGARYTALDKWTNQLNSLNQAVVSKLA

SEQ ID NO: 10643 - protein, 1179 aa, Homo sapiens
MARRSQSSSQGDNPLAPGYLPPHYKEYYRLAVDALAEGGSEAYSRFLATEGAPDFLCPEELEHVSRHLRPPQYVTREPPEGSLLDVDMDGSSGTYWPVNSDQAVPELDLGWPLTFGFQGTEVTTLVQPPPPDSPSIKDEARRMIRSAQQVVAVVMDMFTDVDLLSEVLEAAARRVPVYILLDEMNAQHFLDMADKCRVNLQHVDFLRVRTVAGPTYYCRTGKSFKGHVKEKFLLVDCAVVMSGSYSFMWSFEKIHRSLAHVFQGELVSSFDEEFRILFAQSEPLVPSAAALARMDAYALAPYAGAGPLVGVPGVGAPTPFSFPKRAHLLFPPPREEGLGFPSFLDPDRHFLSAFRREEPPRMPGGALEPHAGLRPLSRRLEAEAGPAGELAGARGFFQARHLEMDAFKRHSFATEGAGAVENFAAARQVSRQTFLSHGDDFRFQTSHFHRDQLYQQQYQWDPQLTPARPQGLFEKLRGGRAGFADPDDFTLGAGPRFPELGPDGHQRLDYVPSSASREVRHGSDPAFAPGPRGLEPSGAPRPNLTQRFPCQAAARPGPDPAPEAEPERRGGPEGRAGLRRWRLASYLSGCHGEDGGDDGLPAPMEAEAYEDDVLAPGGRAPAGDLLPSAFRVPAAFPTKVPVPGPGSGGNGPEREGPEEPGLAKQDSFRSRLNPLVQRSSRLRSSLIFSTSQAEGAAGAAAATEKVQLLHKEQTVSETLGPGGEAVRSAASTKVAELLEKYKGPARDPGGGAGAITVASHSKAVVSQAWREEVAAPGAVGGERRSLESCLLDLRDSFAQQLHQEAERQPGAASLTAAQLLDTLGRSGSDRLPSRFLSAQSHSTSPQGLDSPLPLEGSGAHQVLHNESKGSPTSAYPERKGSPTPGFSTRRGSPTTGFIEQKGSPTSAYPERRGSPVPPVPERRSSPVPPVPERRGSLTLTISGESPKAGPAEEGPSGPMEVLRKGSLRLRQLLSPKGERRMEDEGGFPVPQENGQPESPRRLSLGQGDSTEAATEERGPRARLSSATANALYSSNLRDDTKAILEQISAHGQKHRAVPAPSPGPTHNSPELGRPPAAGVLAPDMSDKDKCSAIFRSDSLGTQGRLSRTLPASAEERDRLLRRMESMRKEKRVYSRFEVFCKKEEASSPGAGEGPAEEGTRDSKVGKFVPKILGTFKSKK

SEQ ID NO: 10644 - protein, 537 aa, Homo sapiens
MSAPKLLSLGCIFFPLLLFQQARAQFPRQCATVEALRSGMCCPDLSPVSGPGTDRCGSSSGRGRCEAVTADSRPHSPQYPHDGRDDREVWPLRFFNRTCHCNGNFSGHNCGTCRPGWRGAACDQRVLIVRRNLLDLSKEEKNHFVRALDMAKRTTHPLFVIATRRSEEILGPDGNTPQFENISIYNYFVWTHYYSVKKTFLGVGQESFGEVDFSHEGPAFLTWHRYHLLRLEKDMQEMLQEPSFSLPYWNFATGKNVCDICTDDLMGSRSNFDSTLISPNSVFSQWRVVCDSLEDYDTLGTLCNSTEDGPIRRNPAGNVARPMVQRLPEPQDVAQCLEVGLFDTPPFYSNSTNSFRNTVEGYSDPTGKYDPAVRSLHNLAHLFLNGTGGQTHLSPNDPIFVLLHTFTDAVFDEWLRRYNADISTFPLENAPIGHNRQYNMVPFWPPVTNTEMFVTAPDNLGYTYEIQWPSREFSVPEIIAIAVVGALLLVALIFGTASYLIRARRSMDEANQPLLTDQYQCYAEEYEKLQNPNQSVV

SEQ ID NO: 10645 - protein, 503 aa, Homo sapiens
MTLGSPRKGLLMLLMALVTQGDPVKPSRGPLVTCTCESPHCKGPTCRGAWCTVVLVREEGRHPQEHRGCGNLHRELCRGRPTEFVNHYCCDSHLCNHNVSLVLEATQPPSEQPGTDGQLALILGPVLALLALVALGVLGLWHVRRRQEKQRGLHSELGESSLILKASEQGDSMLGDLLDSDCTTGSGSGLPFLVQRTVARQVALVECVGKGRYGEVWRGLWHGESVAVKIFSSRDEQSWFRETEIYNTVLLRHDNILGFIASDMTSRNSSTQLWLITHYHEHGSLYDFLQRQTLEPHLALRLAVSAACGLAHLHVEIFGTQGKPAIAHRDFKSRNVLVKSNLQCCIADLGLAVMHSQGSDYLDIGNNPRVGTKRYMAPEVLDEQIRTDCFESYKWTDIWAFGLVLWEIARRTIVNGIVEDYRPPFYDVVPNDPSFEDMKKVVCVDQQTPTIPNRLAADPVLSGLAQMMRECWYPNPSARLTALRIKKTLQKISNSPEKPKVIQ

SEQ ID NO: 10646 - protein, 815 aa, Homo sapiens
MFRLGLLVCFYNDLELLDATVAQVLLYQMIKCSHLRGFQAGVQKLKAELLDIAMENQTLNETLGSLSDAVVGLTYSQLESLSPEAVHGAISTLNQVSGWAKSQVIILSAKYLAHEKVLSFYNVSQMGALLAGVSTQAFCSMKRKDISQVLRSAVSQYVSDLSPAQQQGILSKMVQAEDTAPGIVEIQGAFFKEVSLFDLRRQPGFNSTVLKDKELGRSQALFLYELLLKTTRRPEELLSAGQLVKGVTCSHIDAMSTDFFLAHFQDFQNNFALLSPYQVNCLAWKYWEVSRLSMPPFLLAALPARYLASVPASQCVPFLISLGKSWLDSLVLDSHKKTSVLRKVQQCLDDSIADEYTVDIMGNLLCHLPAAIIDRGISPRAWATALHGLRDCPDLNPEQKAAVRLKLLGQYGLPQHWTAETTKDLGPFLVLFSGDELSSIATKFPEILLQAASKMARTLPTKEFLWAVFQSVRNSSDKIPSYDPMPGCHGVVAPSSDDIFKLAEANACWALEDLRCMEEDTFIRTVELLGAVQGFSRPQLMTLKEKAIQVWDMPSYWREHHIVSLGRIALALNESELEQLDLSSIDTVASLSWQTEWTPGQAESILQGYLDDSGYSIQDLKSFHLVGLGATLCAINITEIPLIKISEFRVVVARIGTLLCSTHVLAEFKRKAEVVFGDPTEWTSSVLQELGTIAAGLTKAELRMLDKDLMPYFQPSAIKCLPDEIFKELSAEQIASLGPENAAAVTHAQRRRLSPLQLQSLQQALDGAKTHSWQDAPASAGPTRTSSSRSPAGALQSWGLWLGCPLLVLMAKLLW

SEQ ID NO: 10647 - protein, 1139 aa, Homo sapiens
MSQEPTTYSLFLFLFLSHGVSSYTVPNSRQDLHPLLQNMAEEIIDGSYLNALLDLIQFQSSHVWTDDLSHRVLAYLNSRNVAFTIPSLQAAVENHLEQRLHQPQKLLEDLRKTDAQQFRTAMKCLLEDKKDGLDLKDIIIDLGEIRERALQSPGVNRSLFLITLERCFQMLNSLECVEILGKVLRGSSGSFLQPDITERLPRDLREDAFKNLSAVFKDLYDKTSAHSQRALYSWMTGILQTSSNATDDSASWVSAEHLWVLGRYMVHLSFEEITKISPIEIGLFISYDNATKQLDMVYDITPELAQAFLERISSSNFNMRNTSTIHRLGLLVCFYNDLELLDATVAQVLLYQMIKCSHLRGFQAGVQKLKAELLDIAMENQTLNETLGSLSDAVVGLTYSQLESLSPEAVHGAISTLNQVSGWAKSQVIILSAKYLAHEKVLSFYNVSQMGALLAGVSTQAFCSMKRKDISQVLRSAVSQYVSDLSPAQQQGILSKMVQAEDTAPGIVEIQGAFFKEVSLFDLRRQPGFNSTVLKDKELGRSQALFLYELLLKTTRRPEELLSAGQLVKGVTCSHIDAMSTDFFLAHFQDFQNNFALLSPYQVNCLAWKYWEVSRLSMPPFLLAALPARYLASVPASQCVPFLISLGKSWLDSLVLDSHKKTSVLRKVQQCLDDSIADEYTVDIMGNLLCHLPAAIIDRGISPRAWATALHGLRDCPDLNPEQKAAVRLKLLGQYGLPQHWTAETTKDLGPFLVLFSGDELSSIATKFPEILLQAASKMARTLPTKEFLWAVFQSVRNSSDKIPSYDPMPGCHGVVAPSSDDIFKLAEANACWALEDLRCMEEDTFIRTVELLGAVQGFSRPQLMTLKEKAIQVWDMPSYWREHHIVSLGRIALALNESELEQLDLSSIDTVASLSWQTEWTPGQAESILQGYLDDSGYSIQDLKSFHLVGLGATLCAINITEIPLIKISEFRVVVARIGTLLCSTHVLAEFKRKAEVVFGDPTEWTSSVLQELGTIAAGLTKAELRMLDKDLMPYFQPSAIKCLPDEIFKELSAEQIASLGPENAAAVTHAQRRRLSPLQLQSLQQALDGAKTHSWQDAPASAGPTRTSSSRSPAGALQSWGLWLGCPLLVLMAKLLW

SEQ ID NO: 10648 - protein, 402 aa, Homo sapiens
MPLQLLLLLILLGPGNSLQLWDTWADEAEKALGPLLARDRRQATEYEYLDYDFLPETEPPEMLRNSTDTTPLTGPGTPESTTVEPAARRSTGLDAGGAVTELTTELANMGNLSTDSAAMEIQTTQPAATEAQTTPLAATEAQTTRLTATEAQTTPLAATEAQTTPPAATEAQTTQPTGLEAQTTAPAAMEAQTTAPAAMEAQTTPPAAMEAQTTQTTAMEAQTTAPEATEAQTTQPTATEAQTTPLAAMEALSTEPSATEALSMEPTTKRGLFIPFSVSSVTHKGIPMAASNLSVNYPVGAPDHISVKQCLLAILILALVATIFFVCTVVLAVRLSRKGHMYPVRNYSPTEMVCISSLLPDGGEGPSATANGGLSKAKSPGLTPEPREDREGDDLTLHSFLP

SEQ ID NO: 10649 - protein, 373 aa, Homo sapiens
MSSGNYQQSEALSKPTFSEEQASALVESVFGLKVSKVRPLPSYDDQNFHVYVSKTKDGPTEYVLKISNTKASKNPDLIEVQNHIIMFLKAAGFPTASVCHTKGDNTASLVSVDSGSEIKSYLVRLLTYLPGRPIAELPVSPQLLYEIGKLAAKLDKTLQRFHHPKLSSLHRENFIWNLKNVPLLEKYLYALGQNRNREIVEHVIHLFKEEVMTKLSHFRECINHGDLNDHNILIESSKSASGNAEYQVSGILDFGDMSYGYYVFEVAITIMYMMIESKSPIQVGGHVLAGFESITPLTAVEKGALFLLVCSRFCQSLVMAAYSCQLYPENKDYLMVTAKTGWKHLQQMFDMGQKAVEEIWFETAKSYESGISM

SEQ ID NO: 10650 - protein, 620 aa, Homo sapiens
MAAVRGLRVSVKAEAPAGPALGLPSPEAESGVDRGEPEPMEVEEGELEIVPVRRSLKELIPDTSRRYENKAGSFITGIDVTSKEAIEKKEQRAKRFHFRSEVNLAQRNVALDRDMMKKAIPKVRLETIYICGVDEMSTQDVFSYFKEYPPAHIEWLDDTSCNVVWLDEMTATRALINMSSLPAQDKIRSRDASEDKSAEKRKKDKQEDSSDDDEAEEGEVEDENSSDVELDTLSQVEEESLLRNDLRPANKLAKGNRLFMRFATKDDKKELGAARRSQYYMKYGNPNYGGMKGILSNSWKRRYHSRRIQRDVIKKRALIGDDVGLTSYKHRHSGLVNVPEEPIEEEEEEEEEEEEEEEEDQDMDADDRVVVEYHEELPALKQPRERSASRRSSASSSDSDEMDYDLELKMISTPSPKKSMKMTMYADEVESQLKNIRNSMRADSVSSSNIKNRIGNKLPPEKFADVRHLLDEKRQHSRPRPPVSSTKSDIRQRLGKRPHSPEKAFSSNPVVRREPSSDVHSRLGVPRQDSKGLYADTREKKSGNLWTRLGSAPKTKEKNTKKVDHRAPGAEEDDSELQRAWGALIKEKEQSRQKKSRLDNLPSLQIEVSRESSSGSEAES

SEQ ID NO: 10651 - protein, 464 aa, Homo sapiens
MAMTAGTTTTFPMSNHTRERVTVAKLTLENFYSNLILQHEERETRQKKLEVAMEEEGLADEEKKLRRSQHARKETEFLRLKRTRLGLDDFESLKVIGRGAFGEVRLVQKKDTGHIYAMKILRKSDMLEKEQVAHIRAERDILVEADGAWVVKMFYSFQDKRNLYLIMEFLPGGDMMTLLMKKDTLTEEETQFYISETVLAIDAIHQLGFIHRDIKPDNLLLDAKGHVKLSDFGLCTGLKKAHRTEFYRNLTHNPPSDFSFQNMNSKRKAETWKKNRRQLAYSTVGTPDYIAPEVFMQTGYNKLCDWWSLGVIMYEMLIGYPPFCSETPQETYRKVMNWKETLVFPPEVPISEKAKDLILRFCIDSENRIGNSGVEEIKGHPFFEGVDWEHIRERPAAIPIEIKSIDDTSNFDDFPESDILQPVPNTTEPDYKSKDWVFLNYTYKRFEGLTQRGSIPTYMKAGKL

SEQ ID NO: 10652 - protein, 1548 aa, Homo sapiens
MLRARPEALMLLGALLTGSLGPSGSQDALSLPWEVQRYDGWFNNLRHHERGAVGCRLQRRVPANYADGVYQALEEPQLPNPRRLSNAATRGIAGLPSLHNRTVLGVFFGYHVLSDVVSVETPGCPAEFLNIRIPPGDPVFDPDQRGDVVLPFQRSRWDPETGRSPSNPRDLANQVTGWLDGSAIYGSSHSWSDALRSFSGGQLASGPDPAFPRDSQNPLLMWAAPDPATGQNGPRGLYAFGAERGNREPFLQALGLLWFRYHNLWAQRLARQHPDWEDEELFQHARKRVIATYQNIAVYEWLPSFLQKTLPEYTGYRPFLDPSISPEFVVASEQFFSTMVPPGVYMRNASCHFRKVLNKGFQSSQALRVCNNYWIRENPNLNSTQEVNELLLGMASQISELEDNIVVEDLRDYWPGPGKFSRTDYVASSIQRGRDMGLPSYSQALLAFGLDIPRNWSDLNPNVDPQVLEATAALYNQDLSQLELLLGGLLESHGDPGPLFSAIVLDQFVRLRDGDRYWFENTRNGLFSKKEIEDIRNTTLRDVLVAVINIDPSALQPNVFVWHKGAPCPQPKQLTTDGLPQCAPLTVLDFFEGSSPGFAITIIALCCLPLVSLLLSGVVAYFRGREHKKLQKKLKESVKKEAAKDGVPAMEWPGPKERSSPIIIQLLSDRCLQVLNRHLTVLRVVQLQPLQQVNLILSNNRGCRTLLLKIPKEYDLVLLFSSEEERGAFVQQLWDFCVRWALGLHVAEMSEKELFRKAVTKQQRERILEIFFRHLFAQVLDINQADAGTLPLDSSQKVREALTCELSRAEFAESLGLKPQDMFVESMFSLADKDGNGYLSFREFLDILVVFMKGSPEDKSRLMFTMYDLDENGFLSKDEFFTMMRSFIEISNNCLSKAQLAEVVESMFRESGFQDKEELTWEDFHFMLRDHDSELRFTQLCVKGGGGGGNGIRDIFKQNISCRVSFITRTPGERSHPQGLGPPAPEAPELGGPGLKKRFGKKAAVPTPRLYTEALQEKMQRGFLAQKLQQYKRFVENYRRHIVCVAIFSAICVGVFADRAYYYGFASPPSDIAQTTLVGIILSRGTAASVSFMFSYILLTMCRNLITFLRETFLNRYVPFDAAVDFHRWIAMAAVVLAILHSAGHAVNVYIFSVSPLSLLACIFPNVFVNDGSKLPQKFYWWFFQTVPGMTGVLLLLVLAIMYVFASHHFRRRSFRGFWLTHHLYILLYALLIIHGSYALIQLPTFHIYFLVPAIIYGGDKLVSLSRKKVEISVVKAELLPSGVTYLQFQRPQGFEYKSGQWVRIACLALGTTEYHPFTLTSAPHEDTLSLHIRAVGPWTTRLREIYSSPKGNGCAGYPKLYLDGPFGEGHQEWHKFEVSVLVGGGIGVTPFASILKDLVFKSSLGSQMLCKKIYFIWVTRTQRQFEWLADIIQEVEENDHQDLVSVHIYVTQLAEKFDLRTTMLYICERHFQKVLNRSLFTGLRSITHFGRPPFEPFFNSLQEVHPQVRKIGVFSCGPPGMTKNVEKACQLVNRQDRAHFMHHYENF

SEQ ID NO: 10653 - protein, 2040 aa, Homo sapiens
MSNRPNNNPGGSLRRSQRNTAGAQPQDDSIGGRSHLGQAKHKGYSPPESRKSNSKAPKVQSNTTSELSRGHLSKRSCSSSSAVIVPQPEDPDRANTSERQKTGQVPKKDNSRGVKRSASPDYNRTNSPSSAKKPKALQHTESPSETNKPHSKSKKRHLDQEQQLKSAQSPSTSKAHTRKSGATGGSRSQKRKRTESSCVKSGSGSESTGAEERSAKPTKLASKSATSAKAGCSTITDSSSAASTSSSSSAVASASSTVPPGARVKQGKDQNKARRSRSASSPSPRRSSREKEQSKTGGSSKFDWAARFSPKVSLPKTKLSLPGSSKSETSKPGPSGLQAKLASLRKSTKKRSESPPAELPSLRRSTRQKTTGSCASTSRRGSGLGKRGAAEARRQEKMADPESNQEAVNSSAARTDEAPQGAAASSSVAGAVGMTTSGESESDDSEMGRLQALLEARGLPPHLFGPLGPRMSQLFHRTIGSGASSKAQQLLQGLQASDESQQLQAVIEMCQLLVMGNEETLGGFPVKSVVPALITLLQMEHNFDIMNHACRALTYMMEALPRSSAVVVDAIPVFLEKLQVIQCIDVAEQALTALEMLSRRHSKAILQAGGLADCLLYLEFFSINAQRNALAIAANCCQSITPDEFHFVADSLPLLTQRLTHQDKKSVESTCLCFARLVDNFQHEENLLQQVASKDLLTNVQQLLVVTPPILSSGMFIMVVRMFSLMCSNCPTLAVQLMKQNIAETLHFLLCGASNGSCQEQIDLVPRSPQELYELTSLICELMPCLPKEGIFAVDTMLKKGNAQNTDGAIWQWRDDRGLWHPYNRIDSRIIEQINEDTGTARAIQRKPNPLANSNTSGYSESKKDDARAQLMKEDPELAKSFIKTLFGVLYEVYSSSAGPAVRHKCLRAILRIIYFADAELLKDVLKNHAVSSHIASMLSSQDLKIVVGALQMAEILMQKLPDIFSVYFRREGVMHQVKHLAESESLLTSPPKACTNGSGSMGSTTSVSSGTATAATHAAADLGSPSLQHSRDDSLDLSPQGRLSDVLKRKRLPKRGPRRPKYSPPRDDDKVDNQAKSPTTTQSPKSSFLASLNPKTWGRLSTQSNSNNIEPARTAGGSGLARAASKDTISNNREKIKGWIKEQAHKFVERYFSSENMDGSNPALNVLQRLCAATEQLNLQVDGGAECLVEIRSIVSESDVSSFEIQHSGFVKQLLLYLTSKSEKDAVSREIRLKRFLHVFFSSPLPGEEPIGRVEPVGNAPLLALVHKMNNCLSQMEQFPVKVHDFPSGNGTGGSFSLNRGSQALKFFNTHQLKCQLQRHPDCANVKQWKGGPVKIDPLALVQAIERYLVVRGYGRVREDDEDSDDDGSDEEIDESLAAQFLNSGNVRHRLQFYIGEHLLPYNMTVYQAVRQFSIQAEDERESTDDESNPLGRAGIWTKTHTIWYKPVREDEESNKDCVGGKRGRAQTAPTKTSPRNAKKHDELWHDGVCPSVSNPLEVYLIPTPPENITFEDPSLDVILLLRVLHAISRYWYYLYDNAMCKEIIPTSEFINSKLTAKANRQLQDPLVIMTGNIPTWLTELGKTCPFFFPFDTRQMLFYVTAFDRDRAMQRLLDTNPEINQSDSQDSRVAPRLDRKKRTVNREELLKQAESVMQDLGSSRAMLEIQYENEVGTGLGPTLEFYALVSQELQRADLGLWRGEEVTLSNPKGSQEGTKYIQNLQGLFALPFGRTAKPAHIAKVKMKFRFLGKLMAKAIMDFRLVDLPLGLPFYKWMLRQETSLTSHDLFDIDPVVARSVYHLEDIVRQKKRLEQDKSQTKESLQYALETLTMNGCSVEDLGLDFTLPGFPNIELKKGGKDIPVTIHNLEEYLRLVIFWALNEGVSRQFDSFRDGFESVFPLSHLQYFYPEELDQLLCGSKADTWDAKTLMECCRPDHGYTHDSRAVKFLFEILSSFDNEQQRLFLQFVTGSPRLPVGGFRSLNPPLTIVRKTFESTENPDDFLPSVMTCVNYLKLPDYSSIEIMREKLLIAAREGQQSFHLS

SEQ ID NO: 10654 - protein, 1722 aa, Homo sapiens
MSNRPNNNPGGSLRRSQRNTAGAQPQDDSIGGSRRGSGLGKRGAAEARRQEKMADPESNQEAVNSSAARTDEAPQGAAASSSVAGAVGMTTSGESESDDSEMGRLQALLEARGLPPHLFGPLGPRMSQLFHRTIGSGASSKAQQLLQGLQASDESQQLQAVIEMCQLLVMGNEETLGGFPVKSVVPALITLLQMEHNFDIMNHACRALTYMMEALPRSSAVVVDAIPVFLEKLQVIQCIDVAEQALTALEMLSRRHSKAILQAGGLADCLLYLEFFSINAQRNALAIAANCCQSITPDEFHFVADSLPLLTQRLTHQDKKSVESTCLCFARLVDNFQHEENLLQQVASKDLLTNVQQLLVVTPPILSSGMFIMVVRMFSLMCSNCPTLAVQLMKQNIAETLHFLLCGASNGSCQEQIDLVPRSPQELYELTSLICELMPCLPKEGIFAVDTMLKKGNAQNTDGAIWQWRDDRGLWHPYNRIDSRIIEAAHQVGEDEISLSTLGRVYTIDFNSMQQINEDTGTARAIQRKPNPLANSNTSGYSESKKDDARAQLMKEDPELAKSFIKTLFGVLYEVYSSSAGPAVRHKCLRAILRIIYFADAELLKDVLKNHAVSSHIASMLSSQDLKIVVGALQMAEILMQKLPDIFSVYFRREGVMHQVKHLAESESLLTSPPKACTNGSGSMGSTTSVSSGTATAATHAAADLGSPSLQHSRDDSLDLSPQGRLSDVLKRKRLPKRGPRRPKYSPPRDDDKVDNQAKSPTTTQSPKSSFLASLNPKTWGRLSTQSNSNNIEPARTAGGSGLARAASKDTISNNREKIKGWIKEQAHKFVERYFSSENMDGSNPALNVLQRLCAATEQLNLQVDGGAECLVEIRSIVSESDVSSFEIQHSGFVKQLLLYLTSKSEKDAVSREIRLKRFLHVFFSSPLPGEEPIGRVEPVGNAPLLALVHKMNNCLSQMEQFPVKVHDFPSGNGTGGSFSLNRGSQALKFFNTHQLKCQLQRHPDCANVKQWKGGPVKIDPLALVQAIERYLVVRGYGRVREDDEDSDDDGSDEEIDESLAAQFLNSGNVRHRLQFYIGEHLLPYNMTVYQAVRQFSIQAEDERESTDDESNPLGRAGIWTKTHTIWYKPVREDEESNKDCVGGKRGRAQTAPTKTSPRNAKKHDELWHDGVCPSVSNPLEVYLIPTPPENITFEDPSLDVILLLRVLHAISRYWYYLYDNAMCKEIIPTSEFINSKLTAKANRQLQDPLVIMTGNIPTWLTELGKTCPFFFPFDTRQMLFYVTAFDRDRAMQRLLDTNPEINQSDSQDSRVAPRLDRKKRTVNREELLKQAESVMQDLGSSRAMLEIQYENEVGTGLGPTLEFYALVSQELQRADLGLWRGEEVTLSNPKGSQEGTKYIQNLQGLFALPFGRTAKPAHIAKVKMKFRFLGKLMAKAIMDFRLVDLPLGLPFYKWMLRQETSLTSHDLFDIDPVVARSVYHLEDIVRQKKRLEQDKSQTKESLQYALETLTMNGCSVEDLGLDFTLPGFPNIELKKGGKDIPVTIHNLEEYLRLVIFWALNEGVSRQFDSFRDGFESVFPLSHLQYFYPEELDQLLCGSKADTWDAKTLMECCRPDHGYTHDSRAVKFLFEILSSFDNEQQRLFLQFVTGSPRLPVGGFRSLNPPLTIVRKTFESTENPDDFLPSVMTCVNYLKLPDYSSIEIMREKLLIAAREGQQSFHLS

SEQ ID NO: 10655 - protein, 1620 aa, Homo sapiens
MGAIGLLWLLPLLLSTAAVGSGMGTGQRAGSPAAGPPLQPREPLSYSRLQRKSLAVDFVVPSLFRVYARDLLLPPSSSELKAGRPEARGSLALDCAPLLRLLGPAPGVSWTAGSPAPAEARTLSRVLKGGSVRKLRRAKQLVLELGEEAILEGCVGPPGEAAVGLLQFNLSELFSWWIRQGEGRLRIRLMPEKKASEVGREGRLSAAIRASQPRLLFQIFGTGHSSLESPTNMPSPSPDYFTWNLTWIMKDSFPFLSHRSRYGLECSFDFPCELEYSPPLHDLRNQSWSWRRIPSEEASQMDLLDGPGAERSKEMPRGSFLLLNTSADSKHTILSPWMRSSSEHCTLAVSVHRHLQPSGRYIAQLLPHNEAAREILLMPTPGKHGWTVLQGRIGRPDNPFRVALEYISSGNRSLSAVDFFALKNCSEGTSPGSKMALQSSFTCWNGTVLQLGQACDFHQDCAQGEDESQMCRKLPVGFYCNFEDGFCGWTQGTLSPHTPQWQVRTLKDARFQDHQDHALLLSTTDVPASESATVTSATFPAPIKSSPCELRMSWLIRGVLRGNVSLVLVENKTGKEQGRMVWHVAAYEGLSLWQWMVLPLLDVSDRFWLQMVAWWGQGSRAIVAFDNISISLDCYLTISGEDKILQNTAPKSRNLFERNPNKELKPGENSPRQTPIFDPTVHWLFTTCGASGPHGPTQAQCNNAYQNSNLSVEVGSEGPLKGIQIWKVPATDTYSISGYGAAGGKGGKNTMMRSHGVSVLGIFNLEKDDMLYILVGQQGEDACPSTNQLIQKVCIGENNVIEEEIRVNRSVHEWAGGGGGGGGATYVFKMKDGVPVPLIIAAGGGGRAYGAKTDTFHPERLENNSSVLGLNGNSGAAGGGGGWNDNTSLLWAGKSLQEGATGGHSCPQAMKKWGWETRGGFGGGGGGCSSGGGGGGYIGGNAASNNDPEMDGEDGVSFISPLGILYTPALKVMEGHGEVNIKHYLNCSHCEVDECHMDPESHKVICFCDHGTVLAEDGVSCIVSPTPEPHLPLSLILSVVTSALVAALVLAFSGIMIVYRRKHQELQAMQMELQSPEYKLSKLRTSTIMTDYNPNYCFAGKTSSISDLKEVPRKNITLIRGLGHGAFGEVYEGQVSGMPNDPSPLQVAVKTLPEVCSEQDELDFLMEALIISKFNHQNIVRCIGVSLQSLPRFILLELMAGGDLKSFLRETRPRPSQPSSLAMLDLLHVARDIACGCQYLEENHFIHRDIAARNCLLTCPGPGRVAKIGDFGMARDIYRASYYRKGGCAMLPVKWMPPEAFMEGIFTSKTDTWSFGVLLWEIFSLGYMPYPSKSNQEVLEFVTSGGRMDPPKNCPGPVYRIMTQCWQHQPEDRPNFAIILERIEYCTQDPDVINTALPIEYGPLVEEEEKVPVRPKDPEGVPPLLVSQQAKREEERSPAAPPPLPTTSSGKAAKKPTAAEISVRVPRGPAVEGGHVNMAFSQSNPPSELHKVHGSRNKPTSLWNPTYGSWFTEKPTKKNNPIAKKEPHDRGNLGLEGSCTVPPNVATGRLPGASLLLEPSSLTANMKEVPLFRLRHFPCGNVNYGYQQQGLPLEAATAPGAGHYEDTILKSKNSMNQPGP

SEQ ID NO: 10656 - protein, 587 aa, Homo sapiens
MATAAYEQLKLHITPEKFYVEACDDGADDVLTIDRVSTEVTLAVKKDVPPSAVTRPIFGILGTIHLVAGNYLIVITKKIKVGEFFSHVVWKATDFDVLSYKKTMLHLTDIQLQDNKTFLAMLNHVLNVDGFYFSTTYDLTHTLQRLSNTSPEFQEMSLLERADQRFVWNGHLLRELSAQPEVHRFALPVLHGFITMHSCSINGKYFDWILISRRSCFRAGVRYYVRGIDSEGHAANFVETEQIVHYNGSKASFVQTRGSIPVFWSQRPNLKYKPLPQISKVANHMDGFQRHFDSQVIIYGKQVIINLINQKGSEKPLEQTFATMVSSLGSGMMRYIAFDFHKECKNMRWDRLSILLDQVAEMQDELSYFLVDSAGQVVANQEGVFRSNCMDCLDRTNVIQSLLARRSLQAQLQRLGVLHVGQKLEEQDEFEKIYKNAWADNANACAKQYAGTGALKTDFTRTGKRTHLGLIMDGWNSMIRYYKNNFSDGFRQDSIDLFLGNYSVDELESHSPLSVPRDWKFLALPIIMVVAFSMCIICLLMAGDTWTETLAYVLFWGVASIGTFFIILYNGKDFVDAPRLVQKEKID

SEQ ID NO: 10657 - protein, 129 aa, Homo sapiens
MSGRGKQGGKVRAKAKSRSSRAGLQFPVGRVHRLLRKGNYAERVGAGAPVYLAAVLEYLTAEILELAGNAARDNKKTRIIPRHLQLAIRNDEELNKLLGKVTIAQGGVLPNIQAVLLPKKTESQKTKSK

SEQ ID NO: 10658 - protein, 1274 aa, Homo sapiens
MSGSCAAPGPGSGSSPAACRFAHYFVLCGIDADSGLEPDELAGENFDQSPLRRTFKSKVLAHYPQNIEWNPFDQDAVNMLCMPKGLSFRTQTDNKDPQFHSFIITREDGSRTYGFVLTFYEEVTSKQICTAMQTLYQMHNAEHYSSVYASSSCSMDSLASSLDEGDTTSLLKLQRYNSYDISRDTLYVSKSICLITPLPFMQACKKFLIQLYKAVTSQQPPPLPLESYIHNILYEVPLPPPGRSLKFYGVYEPVICQRPGPSELPLSDYPLREAFELLGLENLVQVFTCVLLEMQILLYSQDYQRLMTVAEGITTLLFPFQWQHVYVPILPASLLHFLDAPVPYLMGLQSKEGTDRSKLELPQEANLCFVDIDNHFIELPEEFPQFPNKVDFIQELSEVLVQFGIPPEGSLHCSESTSKLKNMVLKDLVNDKKNGNVCTNNISMYELLKGNETIARLQALAKRTGVAVEKMDLSASLGEKDKDLKLHCEEAELRDYQLNVQLREVFANRFTQMFADYEAFVIQTAQDMESWLTNREQMQNFDKASFLSDQPEPYLPFLSRFIETQMFATFIDNKIMSQWEEKDPLLRVFDTRIDKIRLYNVRAPTLRTSIYQKCSTLKEAAQSIEQRLMKMDHTAIHPHLLDMKIGQGKYEQGFFPKLQSDVLATGPTSNNRWVSRSATAQRRKERLRQHSEHVGLDNDLREKYMQEARSLGKNLRQPKLSDLSPAVIAQTNCKFVEGLLKECRMKTKRMLVEKMGHEAVELGHGEANITGLEENTLIASLCDLLERIWSHGLQVKQGKSALWSHLIQFQDREEKQEHLAESPVALGPERRKSDSGVMLPTLRVSLIQDMRHIQNMSEIKTDVGRARAWIRLSLEKKLLSQHLKQLLSNQPLTKKLYKRYAFLRCEEEREQFLYHLLSLNAVDYFCFTSVFTTIMIPYRSVIIPIKKLSNAIITSNPWICVSGELGDTGVMQIPKNLLEMTFECQNLGKLTTVQIGHDNSGLLAKWLVDCVMVRNEITGHTYRFPCGRWLGKGIDDGSLERILIGELMTSASDEDLVKQCRTPPQQKSPTTARRLSITSLTGKNNKPNAGQIQEGIGEAVNNIVKHFHKPEKERGSLTVLLCGENGLVAALEQVFHHGFKSARIFHKNVFIWDFIEKVVAYFETTDQILDNEDDVLIQKSSCKTFCHYVNAINTAPRNIGKDGKFQILVCLGTRDRLLPQWIPLLAECPAITRMYEESALLRDRMTVNSLIRILQTIQDFTIVLEGSLIKGVDV

SEQ ID NO: 10659 - protein, 457 aa, Homo sapiens
MSKPHSEAGTAFIQTQQLHAAMADTFLEHMCRLDIDSPPITARNTGIICTIGPASRSVELKKGATLKITLDNAYMEKCDENILWLDYKNICKVVEVGSKIYVDDGLISLQVKQKGADFLVTEVENGGSLGSKKGVNLPGAAVDLPAVSEKDIQDLKFGVEQDVDMVFASFIRKASDVHEVRKVLGEKGKNIKIISKIENHEGVRRFDEILEASDGIMVARGDLGIEIPAEKVFLAQKMMIGRCNRAGKPVICATQMLESMIKKPRPTRAEGSDVANAVLDGADCIMLSGETAKGDYPLEAVRMQHLIAREAEAAIYHLQLFEELRRLAPITSDPTEATAVGAVEASFKCCSGAIIVLTKSGRSAHQVARYRPRAPIIAVTRNPQTARQAHLYRGIFPVLCKDPVQEAWAEDVDLRVNFAMNVGKARGFFKKGDVVIVLTGWRPGSGFTNTMRVVPVP

SEQ ID NO: 10660 - protein, 592 aa, Homo sapiens
MKRSKELITKNHSQEETSILRCWKCRKCIASSGCFMEYLENQVIKDKDDSVDAQNICHVWHMNVEALPEWISCLIQKAQWTVGKLNCPFCGARLGGFNFVSTPKCSCGQLAAVHLSKSRTDYQPTQAGRLMRPSVKYLSHPRVQSGCDKEALLTGGGSENRNHRLLNMARNNNDPGRLTEALCLEVRPTYFEMKNEKLLSKASEPKYQLFVPQLVTGRCATRAFHRKSHSLDLNISEKLTLLPTLYEIHSKTTAYSRLNETQPIDLSGLPLQSSKNSYSFQNPSSFDPSMLLQRFSVAPHETQTQRGGEFQCGLEAASVYSDHTNTNNLTFLMDLPSAGRSMPEASDQEEHLSPLDFLHSANFSLGSINQRLNKRERSKLKNLRRKQRRRERWLQKQGKYSGVGLLDHMTLNNEMSTDEDNEYAEEKDSYICAVCLDVYFNPYMCYPCHHIFCEPCLRTLAKDNPSSTPCPLCRTIISRVFFQTELNNATKTFFTKEYLKIKQSFQKSNSAKWPLPSCRKAFHLFGGFRRHAAPVTRRQFPHGAHRMDYLHFEDDSRGWWFDMDMVIIYIYSVNWVIGFIVFCFLCYFFFPF

SEQ ID NO: 10661 - protein, 975 aa, Homo sapiens
MSGIGNKRAAGEPGTSMPPEKKAAVEDSGTTVETIKLGGVSSTEELDIRTLQTKNRKLAEMLDQRQAIEDELREHIEKLERRQATDDASLLIVNRYWSQFDENIRIILKRYDLEQGLGDLLTERKALVVPEPEPDSDSNQERKDDRERGEGQEPAFSFLATLASSSSEEMESQLQERVESSRRAVSQIVTVYDKLQEKVELLSRKLNSGDNLIVEEAVQELNSFLAQENMRLQELTDLLQEKHRTMSQEFSKLQSKVETAESRVSVLESMIDDLQWDIDKIRKREQRLNRHLAEVLERVNSKGYKVYGAGSSLYGGTITINARKFEEMNAELEENKELAQNRLCELEKLRQDFEEVTTQNEKLKVELRSAVEQVVKETPEYRCMQSQFSVLYNESLQLKAHLDEARTLLHGTRGTHQHQVELIERDEVSLHKKLRTEVIQLEDTLAQVRKEYEMLRIEFEQTLAANEQAGPINREMRHLISSLQNHNHQLKGEVLRYKRKLREAQSDLNKTRLRSGSALLQSQSSTEDPKDEPAELKPDSEDLSSQSSASKASQEDANEIKSKRDEEERERERREKEREREREREKEKEREREKQKLKESEKERDSAKDKEKGKHDDGRKKEAEIIKQLKIELKKAQESQKEMKLLLDMYRSAPKEQRDKVQLMAAEKKSKAELEDLRQRLKDLEDKEKKENKKMADEDALRKIRAVEEQIEYLQKKLAMAKQEEEALLSEMDVTGQAFEDMQEQNIRLMQQLREKDDANFKLMSERIKSNQIHKLLKEEKEELADQVLTLKTQVDAQLQVVRKLEEKEHLLQSNIGTGEKELGLRTQALEMNKRKAMEAAQLADDLKAQLELAQKKLHDFQDEIVENSVTKEKDMFNFKRAQEDISRLRRKLETTKKPDNVPKCDEILMEEIKDYKARLTCPCCNMRKKDAVLTKCFHVFCFECVKTRYDTRQRKCPKCNAAFGANDFHRIYIG

SEQ ID NO: 10662 - protein, 774 aa, Homo sapiens
MERPLCSHLCSCLAMLALLSPLSLAQYDSWPHYPEYFQQPAPEYHQPQAPANVAKIQLRLAGQKRKHSEGRVEVYYDGQWGTVCDDDFSIHAAHVVCRELGYVEAKSWTASSSYGKGEGPIWLDNLHCTGNEATLAACTSNGWGVTDCKHTEDVGVVCSDKRIPGFKFDNSLINQIENLNIQVEDIRIRAILSTYRKRTPVMEGYVEVKEGKTWKQICDKHWTAKNSRVVCGMFGFPGERTYNTKVYKMFASRRKQRYWPFSMDCTGTEAHISSCKLGPQVSLDPMKNVTCENGLPAVVSCVPGQVFSPDGPSRFRKAYKPEQPLVRLRGGAYIGEGRVEVLKNGEWGTVCDDKWDLVSASVVCRELGFGSAKEAVTGSRLGQGIGPIHLNEIQCTGNEKSIIDCKFNAESQGCNHEEDAGVRCNTPAMGLQKKLRLNGGRNPYEGRVEVLVERNGSLVWGMVCGQNWGIVEAMVVCRQLGLGFASNAFQETWYWHGDVNSNKVVMSGVKCSGTELSLAHCRHDGEDVACPQGGVQYGAGVACSETAPDLVLNAEMVQQTTYLEDRPMFMLQCAMEENCLSASAAQTDPTTGYRRLLRFSSQIHNNGQSDFRPKNGRHAWIWHDCHRHYHSMEVFTHYDLLNLNGTKVAEGHKASFCLEDTECEGDIQKNYECANFGDQGITMGCWDMYRHDIDCQWVDITDVPPGDYLFQVVINPNFEVAESDYSNNIMKCRSRYDGHRIWMYNCHIGGSFSEETEKKFEHFSGLLNNQLSPQ

SEQ ID NO: 10663 - protein, 597 aa, Homo sapiens
MAAETLLSSLLGLLLLGLLLPASLTGGVGSLNLEELSEMRYGIEILPLPVMGGQSQSSDVVIVSSKYKQRYECRLPAGAIHFQREREEETPAYQGPGIPELLSPMRDAPCLLKTKDWWTYEFCYGRHIQQYHMEDSEIKGEVLYLGYYQSAFDWDDETAKASKQHRLKRYHSQTYGNGSKCDLNGRPREAEVRFLCDEGAGISGDYIDRVDEPLSCSYVLTIRTPRLCPHPLLRPPPSAAPQAILCHPSLQPEEYMAYVQRQADSKQYGDKIIEELQDLGPQVWSETKSGVAPQKMAGASPTKDDSKDSDFWKMLNEPEDQAPGGEEVPAEEQDPSPEAADSASGAPNDFQNNVQVKVIRSPADLIRFIEELKGGTKKGKPNIGQEQPVDDAAEVPQREPEKERGDPERQREMEEEEDEDEDEDEDEDERQLLGEFEKELEGILLPSDRDRLRSETEKELDPDGLKKESERDRAMLALTSTLNKLIKRLEEKQSPELVKKHKKKRVVPKKPPPSPQPTGKIEIKIVRPWAEGTEEGARWLTDEDTRNLKEIFFNILVPGAEEAQKERQRQKELESNYRRVWGSPGGEGTGDLDEFDF

SEQ ID NO: 10664 - protein, 652 aa, Homo sapiens
MAAETLLSSLLGLLLLGLLLPASLTGGVGSLNLEELSEMRYGIEILPLPVMGGQSQSSDVVIVSSKYKQRYECRLPAGAIHFQREREEETPAYQGPGIPELLSPMRDAPCLLKTKDWWTYEFCYGRHIQQYHMEDSEIKGEVLYLGYYQSAFDWDDETAKASKQHRLKRYHSQTYGNGSKCDLNGRPREAEVRFLCDEGAGISGDYIDRVDEPLSCSYVLTIRTPRLCPHPLLRPPPSAAPQAILCHPSLQPEEYMAYVQRQADSKQYGDKIIEELQDLGPQVWSETKSGVAPQKMAGASPTKDDSKDSDFWKMLNEPEDQAPGGEEVPAEEQDPSPEAADSASGAPNDFQNNVQVKVIRSPADLIRFIEELKGGTKKGKPNIGQEQPVDDAAEVPQREPEKERGDPERQREMEEEEDEDEDEDEDEDERQLLGEFEKELEGILLPSDRDRLRSETEKELDPDGLKKESERDRAMLALTSTLNKLIKRLEEKQSPELVKKHKKKRVVPKKPPPSPQPTEEDPEHRVRVRVTKLRLGGPNQDLTVLEMKRENPQLKQIEGLVKELLEREGLTAAGKIEIKIVRPWAEGTEEGARWLTDEDTRNLKEIFFNILVPGAEEAQKERQRQKELESNYRRVWGSPGGEGTGDLDEFDF

SEQ ID NO: 10665 - protein, 1087 aa, Homo sapiens
MSLKPQQQQQQQQQQQQQQQQQQQQQQQPPPAAANVRKPGGSGLLASPAAAPSPSSSSVSSSSATAPSSVVAATSGGGRPGLGRGRNSNKGLPQSTISFDGIYANMRMVHILTSVVGSKCEVQVKNGGIYEGVFKTYSPKCDLVLDAAHEKSTESSSGPKREEIMESILFKCSDFVVVQFKDMDSSYAKRDAFTDSAISAKVNGEHKEKDLEPWDAGELTANEELEALENDVSNGWDPNDMFRYNEENYGVVSTYDSSLSSYTVPLERDNSEEFLKREARANQLAEEIESSAQYKARVALENDDRSEEEKYTAVQRNSSEREGHSINTRENKYIPPGQRNREVISWGSGRQNSPRMGQPGSGSMPSRSTSHTSDFNPNSGSDQRVVNGGVPWPSPCPSPSSRPPSRYQSGPNSLPPRAATPTRPPSRPPSRPSRPPSHPSAHGSPAPVSTMPKRMSSEGPPRMSPKAQRHPRNHRVSAGRGSISSGLEFVSHNPPSEAATPPVARTSPSGGTWSSVVSGAKDSRLQDQRQNSPAGNKENIKPNETSPSFSKAENKGISPVVSEHRKQIDDLKKFKNDFRLQPSSTSESMDQLLNKNREGEKSRDLIKDKIEPSAKDSFIENSSSNCTSGSSKPNSPSISPSILSNTEHKRGPEVTSQGVQTSSPACKQEKDDKEEKKDAAEQVRKSTLNPNAKEFNPRSFSQPKPSTTPTSPRPQAQPSPSMVGHQQPTPVYTQPVCFAPNMMYPVPVSPGVQPLYPIPMTPMPVNQAKTYRAVPNMPQQRQDQHHQSAMMHPASAAGPPIAATPPAYSTQYVAYSPQQFPNQPLVQHVPHYQSQHPHVYSPVIQGNARMMAPPTHAQPGLVSSSATQYGAHEQTHAMYACPKLPYNKETSPSFYFAISTGSLAQQYAHPNATLHPHTPHPQPSATPTGQQQSQHGGSHPAPSPVQHHQHQAAQALHLASPQQQSAIYHAGLAPTPPSMTPASNTQSPQNSFPAAQQTVFTIHPSHVQPAYTNPPHMAHVPQAHVQSGMVPSHPTAHAPMMLMTTQPPGGPQAALAQSALQPIPVSTTAHFPYMTHPSVQAHHQQQL

SEQ ID NO: 10666 - protein, 1161 aa, Homo sapiens
MTFGTVLLLSVLASYHGFNLDVEEPTIFQEDAGGFGQSVVQFGGSRLVVGAPLEVVAANQTGRLYDCAAATGMCQPIPLHIRPEAVNMSLGLTLAASTNGSRLLACGPTLHRVCGENSYSKGSCLLLGSRWEIIQTVPDATPECPHQEMDIVFLIDGSGSIDQNDFNQMKGFVQAVMGQFEGTDTLFALMQYSNLLKIHFTFTQFRTSPSQQSLVDPIVQLKGLTFTATGILTVVTQLFHHKNGARKSAKKILIVITDGQKYKDPLEYSDVIPQAEKAGIIRYAIGVGHAFQGPTARQELNTISSAPPQDHVFKVDNFAALGSIQKQLQEKIYAVEGTQSRASSSFQHEMSQEGFSTALTMDGLFLGAVGSFSWSGGAFLYPPNMSPTFINMSQENVDMRDSYLGYSTELALWKGVQNLVLGAPRYQHTGKAVIFTQVSRQWRKKAEVTGTQIGSYFGASLCSVDVDSDGSTDLILIGAPHYYEQTRGGQVSVCPLPRGRVQWQCDAVLRGEQGHPWGRFGAALTVLGDVNEDKLIDVAIGAPGEQENRGAVYLFHGASESGISPSHSQRIASSQLSPRLQYFGQALSGGQDLTQDGLMDLAVGARGQVLLLRSLPVLKVGVAMRFSPVEVAKAVYRCWEEKPSALEAGDATVCLTIQKSSLDQLGDIQSSVRFDLALDPGRLTSRAIFNETKNPTLTRRKTLGLGIHCETLKLLLPDCVEDVVSPIILHLNFSLVREPIPSPQNLRPVLAVGSQDLFTASLPFEKNCGQDGLCEGDLGVTLSFSGLQTLTVGSSLELNVIVTVWNAGEDSYGTVVSLYYPAGLSHRRVSGAQKQPHQSALRLACETVPTEDEGLRSSRCSVNHPIFHEGSNGTFIVTFDVSYKATLGDRMLMRASASSENNKASSSKATFQLELPVKYAVYTMISRQEESTKYFNFATSDEKKMKEAEHRYRVNNLSQRDLAISINFWVPVLLNGVAVWDVVMEAPSQSLPCVSERKPPQHSDFLTQISRSPMLDCSIADCLQFRCDVPSFSVQEELDFTLKGNLSFGWVRETLQKKVLVVSVAEITFDTSVYSQLPGQEAFMRAQMEMVLEEDEVYNAIPIIMGSSVGALLLLALITATLYKLGFFKRHYKEMLEDKPEDTATFSGDDFSCVAPNVPLS

SEQ ID NO: 10667 - protein, 733 aa, Homo sapiens
MPSVSKAAAAALSGSPPQTEKPTHYRYLKEFRTEQCPLFSQHKCAQHRPFTCFHWHFLNQRRRRPLRRRDGTFNYSPDVYCSKYNEATGVCPDGDECPYLHRTTGDTERKYHLRYYKTGTCIHETDARGHCVKNGLHCAFAHGPLDLRPPVCDVRELQAQEALQNGQLGGGEGVPDLQPGVLASQAMIEKILSEDPRWQDANFVLGSYKTEQCPKPPRLCRQGYACPHYHNSRDRRRNPRRFQYRSTPCPSVKHGDEWGEPSRCDGGDGCQYCHSRTEQQFHPEIYKSTKCNDMRQTGYCPRGPFCAFAHVEKSLGMVNEWGCHDLHLTSPSSTGSGQPGNAKRRDSPAEGGPRGSEQDSKQNHLAVFAAVHPPAPSVSSSVASSLASSAGSGSSSPTALPAPPARALPLGPASSTVEAVLGSALDLHLSNVNIASLEKDLEEQDGHDLGAAGPRSLAGSAPVAIPGSLPRAPSLHSPSSASTSPLGSLSQPLPGPVGSSAMTPPQQPPPLRSEPGTLGSAASSYSPLGLNGVPGSIWDFVSGSFSPSPSPILSAGPPSSSSASPNGAELARVRRQLDEAKRKIRQWEESWQQVKQVCDAWQREAQEAKERARVADSDRQLALQKKEEVEAQVKQLQEELEGLGVASTLPGLRGCGDIGTIPLPKLHSLQSQLRLDLEAVDGVIFQLRAKQCVACRERAHGAVLRPCQHHILCEPCAATAPECPYCKGQPLQW

SEQ ID NO: 10668 - protein, 835 aa, Homo sapiens
MAELSEEALLSVLPTIRVPKAGDRVHKDECAFSFDTPESEGGLYICMNTFLGFGKQYVERHFNKTGQRVYLHLRRTRRPKEEDPATGTGDPPRKKPTRLAIGVEGGFDLSEEKFELDEDVKIVILPDYLEIARDGLGGLPDIVRDRVTSAVEALLSADSASRKQEVQAWDGEVRQVSKHAFSLKQLDNPARIPPCGWKCSKCDMRENLWLNLTDGSILCGRRYFDGSGGNNHAVEHYRETGYPLAVKLGTITPDGADVYSYDEDDMVLDPSLAEHLSHFGIDMLKMQKTDKTMTELEIDMNQRIGEWELIQESGVPLKPLFGPGYTGIRNLGNSCYLNSVVQVLFSIPDFQRKYVDKLEKIFQNAPTDPTQDFSTQVAKLGHGLLSGEYSKPVPESGDGERVPEQKEVQDGIAPRMFKALIGKGHPEFSTNRQQDAQEFFLHLINMVERNCRSSENPNEVFRFLVEEKIKCLATEKVKYTQRVDYIMQLPVPMDAALNKEELLEYEEKKRQAEEEKMALPELVRAQVPFSSCLEAYGAPEQVDDFWSTALQAKSVAVKTTRFASFPDYLVIQIKKFTFGLDWVPKKLDVSIEMPEELDISQLRGTGLQPGEEELPDIAPPLVTPDEPKAPMLDESVIIQLVEMGFPMDACRKAVYYTGNSGAEAAMNWVMSHMDDPDFANPLILPGSSGPGSTSAAADPPPEDCVTTIVSMGFSRDQALKALRATNNSLERAVDWIFSHIDDLDAEAAMDISEGRSAADSISESVPVGPKVRDGPGKYQLFAFISHMGTSTMCGHYVCHIKKEGRWVIYNDQKVCASEKPPKDLGYIYFYQRVAS

SEQ ID NO: 10669 - protein, 870 aa, Homo sapiens
MGNRGMEELIPLVNKLQDAFSSIGQSCHLDLPQIAVVGGQSAGKSSVLENFVGRDFLPRGSGIVTRRPLILQLIFSKTEHAEFLHCKSKKFTDFDEVRQEIEAETDRVTGTNKGISPVPINLRVYSPHVLNLTLIDLPGITKVPVGDQPPDIEYQIKDMILQFISRESSLILAVTPANMDLANSDALKLAKEVDPQGLRTIGVITKLDLMDEGTDARDVLENKLLPLRRGYIGVVNRSQKDIEGKKDIRAALAAERKFFLSHPAYRHMADRMGTPHLQKTLNQQLTNHIRESLPALRSKLQSQLLSLEKEVEEYKNFRPDDPTRKTKALLQMVQQFGVDFEKRIEGSGDQVDTLELSGGARINRIFHERFPFELVKMEFDEKDLRREISYAIKNIHGVRTGLFTPDMAFEAIVKKQIVKLKEPSLKCVDLVVSELATVIKKCAEKLSSYPRLREETERIVTTYIREREGRTKDQILLLIDIEQSYINTNHEDFIGFANAQQRSTQLNKKRAIPNQGEILVIRRGWLTINNISLMKGGSKEYWFVLTAESLSWYKDEEEKEKKYMLPLDNLKIRDVEKGFMSNKHVFAIFNTEQRNVYKDLRQIELACDSQEDVDSWKASFLRAGVYPEKDQAENEDGAQENTFSMDPQLERQVETIRNLVDSYVAIINKSIRDLMPKTIMHLMINNTKAFIHHELLAYLYSSADQSSLMEESADQAQRRDDMLRMYHALKEALNIIGDISTSTVSTPVPPPVDDTWLQSASSHSPTPQRRPVSSIHPPGRPPAVRGPTPGPPLIPVPVGAAASFSAPPIPSRPGPQSVFANSDLFPAPPQIPSRPVRIPPGIPPGVPSRRPPAAPSRPTIIRPAEPSLLD

SEQ ID NO: 10670 - protein, 326 aa, Homo sapiens
MSENDNVFCAQLQCFHFPTLRHHDLHSWHAESCYEKSSFLCKRSQTCVDIKDNVVDEGFYFTPKGDDPCLSCTCHGGEPEMCVAALCERPQGCQQYRKDPKECCKFMCLDPDGNSLFDSMASGMRLVVSCISSFLILSLLLFMVHRLRQRRRERIESLIGANLHHFNLGRRIPGFDYGPDGFGTGLTPLHLSDDGEGGTFHFHDPPPPYTAYKYPDIGQPDDPPPPYEASIHPDSVFYDPADDDAFEPVEVSLPAPGDGGSEGALLRRLEQPLPTAGASLADLEDSADSSSALLVPPDPAQSGSTPAAEALPGGGRHSRSSLNTVV

SEQ ID NO: 10671 - protein, 739 aa, Homo sapiens
MPSPRPVLLRGARAALLLLLPPRLLARPSLLLRRSLSAASCPPISLPAAASRSSMDGAGAEEVLAPLRLAVRQQGDLVRKLKEDKAPQVDVDKAVAELKARKRVLEAKELALQPKDDIVDRAKMEDTLKRRFFYDQAFAIYGGVSGLYDFGPVGCALKNNIIQTWRQHFIQEEQILEIDCTMLTPEPVLKTSGHVDKFADFMVKDVKNGECFRADHLLKAHLQKLMSDKKCSVEKKSEMESVLAQLDNYGQQELADLFVNYNVKSPITGNDLSPPVSFNLMFKTFIGPGGNMPGYLRPETAQGIFLNFKRLLEFNQGKLPFAAAQIGNSFRNEISPRSGLIRVREFTMAEIEHFVDPSEKDHPKFQNVADLHLYLYSAKAQVSGQSARKMRLGDAVEQGVINNTVLGYFIGRIYLYLTKVGISPDKLRFRQHMENEMAHYACDCWDAESKTSYGWIEIVGCADRSCYDLSCHARATKVPLVAEKPLKEPKTVNVVQFEPSKGAIGKAYKKDAKLVMEYLAICDECYITEMEMLLNEKGEFTIETEGKTFQLTKDMINVKRFQKTLYVEEVVPNVIEPSFGLGRIMYTVFEHTFHVREGDEQRTFFSFPAVVAPFKCSVLPLSQNQEFMPFVKELSEALTRHGVSHKVDDSSGSIGRRYARTDEIGVAFGVTIDFDTVNKTPHTATLRDRDSMRQIRAEISELPSIVQDLANGNITWADVEARYPLFEGQETGKKETIEE

SEQ ID NO: 10672 - protein, 1150 aa, Homo sapiens
MAPPLRPLARLRPPGMLLRALLLLLLLSPLPGVWCFSELSFVKEPQDVTVTRKDPVVLDCQAHGEVPIKVTWLKNGAKMSENKRIEVLSNGSLYISEVEGRRGEQSDEGFYQCLAMNKYGAILSQKAHLALSTISAFEVQPISTEVHEGGVARFACKISSHPPAVITWEFNRTTLPMTMDRITALPTGVLQIYDVSQRDSGNYRCIAATVAHRRKSMEASLTVIPAKESKSFHTPTIIAGPQNITTSLHQTVVLECMATGNPKPIISWSRLDHKSIDVFNTRVLGNGNLMISDVRLQHAGVYVCRATTPGTRNFTVAMATLTVLAPPSFVEWPESLTRPRAGTARFVCQAEGIPSPKMSWLKNGRKIHSNGRIKMYNSKLVINQIIPEDDAIYQCMAENSQGSILSRARLTVVMSEDRPSAPYNVHAETMSSSAILLAWERPLYNSDKVIAYSVHYMKAEGLNNEEYQVVIGNDTTHYIIDDLEPASNYTFYIVAYMPMGASQMSDHVTQNTLEDVPLRPPEISLTSRSPTDILISWLPIPAKYRRGQVVLYRLSFRLSTENSIQVLELPGTTHEYLLEGLKPDSVYLVRITAATRVGLGESSVWTSHRTPKATSVKAPKSPELHLEPLNCTTISVRWQQDVEDTAAIQGYKLYYKEEGQQENGPIFLDTKDLLYTLSGLDPRRKYHVRLLAYNNIDDGYQADQTVSTPGCVSVRDRMVPPPPPPHHLYAKANTSSSIFLHWRRPAFTAAQIINYTIRCNPVGLQNASLVLYLQTSETHMLVQGLEPNTKYEFAVRLHVDQLSSPWSPVVYHSTLPEAPAGPPVGVKVTLIEDDTALVSWKPPDGPETVVTRYTILYASRKAWIAGEWQVLHREGAITMALLENLVAGNVYIVKISASNEVGEGPFSNSVELAVLPKETSESNQRPKRLDSADAKVYSGYYHLDQKSMTGIAVGVGIALTCILICVLILIYRSKARKSSASKTAQNGTQQLPRTSASLASGNEVGKNLEGAVGNEESLMPMIMPNSFIDAKGGTDLIINSYGPIIKNNSKKKWFFFQDSKKIQVEQPQRRFTPAVCFYQPGTTVLISDEDSPSSPGQTTSFSRPFGVAADTEHSANSEGSHETGDSGRFSHESNDEIHLSSVISTTPPNL

SEQ ID NO: 10673 - protein, 1455 aa, Homo sapiens
MSDSWVPNSASGQDPGGRRRAWAELLAGRVKREKYNPERAQKLKESAVRLLRSHQDLNALLLEVEGPLCKKLSLSKVIDCDSSEAYANHSSSFIGSALQDQASRLGVPVGILSAGMVASSVGQICTAPAETSHPVLLTVEQRKKLSSLLEFAQYLLAHSMFSRLSFCQELWKIQSSLLLEAVWHLHVQGIVSLQELLESHPDMHAVGSWLFRNLCCLCEQMEASCQHADVARAMLSDFVQMFVLRGFQKNSDLRRTVEPEKMPQVTVDVLQRMLIFALDALAAGVQEESSTHKIVRCWFGVFSGHTLGSVISTDPLKRFFSHTLTQILTHSPVLKASDAVQMQREWSFARTHPLLTSLYRRLFVMLSAEELVGHLQEVLETQEVHWQRVLSFVSALVVCFPEAQQLLEDWVARLMAQAFESCQLDSMVTAFLVVRQAALEGPSAFLSYADWFKASFGSTRGYHGCSKKALVFLFTFLSELVPFESPRYLQVHILHPPLVPGKYRSLLTDYISLAKTRLADLKVSIENMGLYEDLSSAGDITEPHSQALQDVEKAIMVFEHTGNIPVTVMEASIFRRPYYVSHFLPALLTPRVLPKVPDSRVAFIESLKRADKIPPSLYSTYCQACSAAEEKPEDAALGVRAEPNSAEEPLGQLTAALGELRASMTDPSQRDVISAQVAVISERLRAVLGHNEDDSSVEISKIQLSINTPRLEPREHMAVDLLLTSFCQNLMAASSVAPPERQGPWAALFVRTMCGRVLPAVLTRLCQLLRHQGPSLSAPHVLGLAALAVHLGESRSALPEVDVGPPAPGAGLPVPALFDSLLTCRTRDSLFFCLKFCTAAISYSLCKFSSQSRDTLCSCLSPGLIKKFQFLMFRLFSEARQPLSEEDVASLSWRPLHLPSADWQRAALSLWTHRTFREVLKEEDVHLTYQDWLHLELEIQPEADALSDTERQDFHQWAIHEHFLPESSASGGCDGDLQAACTILVNALMDFHQSSRSYDHSENSDLVFGGRTGNEDIISRLQEMVADLELQQDLIVPLGHTPSQEHFLFEIFRRRLQALTSGWSVAASLQRQRELLMYKRILLRLPSSVLCGSSFQAEQPITARCEQFFHLVNSEMRNFCSHGGALTQDITAHFFRGLLNACLRSRDPSLMVDFILAKCQTKCPLILTSALVWWPSLEPVLLCRWRRHCQSPLPRELQKLQEGRQFASDFLSPEAASPAPNPDWLSAAALHFAIQQVREENIRKQLKKLDCEREELLVFLFFFSLMGLLSSHLTSNSTTDLPKAFHVCAAILECLEKRKISWLALFQLTESDLRLGRLLLRVAPDQHTRLLPFAFYSLLSYFHEDAAIREEAFLHVAVDMYLKLVQLFVAGDTSTVSPPAGRSLELKGQGNPVELITKARLFLLQLIPRCPKKSFSHVAELLADRGDCDPEVSAALQSRQQAAPDADLSQEPHLF

SEQ ID NO: 10674 - protein, 911 aa, Homo sapiens
MVQLRKLLRVLTLMKFPCCVLEVLLCALAAAARGQEMYAPHSIRIEGDVTLGGLFPVHAKGPSGVPCGDIKRENGIHRLEAMLYALDQINSDPNLLPNVTLGARILDTCSRDTYALEQSLTFVQALIQKDTSDVRCTNGEPPVFVKPEKVVGVIGASGSSVSIMVANILRLFQIPQISYASTAPELSDDRRYDFFSRVVPPDSFQAQAMVDIVKALGWNYVSTLASEGSYGEKGVESFTQISKEAGGLCIAQSVRIPQERKDRTIDFDRIIKQLLDTPNSRAVVIFANDEDIKQILAAAKRADQVGHFLWVGSDSWGSKINPLHQHEDIAEGAITIQPKRATVEGFDAYFTSRTLENNRRNVWFAEYWEENFNCKLTISGSKKEDTDRKCTGQERIGKDSNYEQEGKVQFVIDAVYAMAHALHHMNKDLCADYRGVCPEMEQAGGKKLLKYIRNVNFNGSAGTPVMFNKNGDAPGRYDIFQYQTTNTSNPGYRLIGQWTDELQLNIEDMQWGKGVREIPASVCTLPCKPGQRKKTQKGTPCCWTCEPCDGYQYQFDEMTCQHCPYDQRPNENRTGCQDIPIIKLEWHSPWAVIPVFLAMLGIIATIFVMATFIRYNDTPIVRASGRELSYVLLTGIFLCYIITFLMIAKPDVAVCSFRRVFLGLGMCISYAALLTKTNRIYRIFEQGKKSVTAPRLISPTSQLAITSSLISVQLLGVFIWFGVDPPNIIIDYDEHKTMNPEQARGVLKCDITDLQIICSLGYSILLMVTCTVYAIKTRGVPENFNEAKPIGFTMYTTCIVWLAFIPIFFGTAQSAEKLYIQTTTLTISMNLSASVALGMLYMPKVYIIIFHPELNVQKRKRSFKAVVTAATMSSRLSHKPSDRPNGEAKTELCENVDPNITSEDLSLHKED

SEQ ID NO: 10675 - protein, 906 aa, Homo sapiens
MVQLRKLLRVLTLMKFPCCVLEVLLCALAAAARGQEMYAPHSIRIEGDVTLGGLFPVHAKGPSGVPCGDIKRENGIHRLEAMLYALDQINSDPNLLPNVTLGARILDTCSRDTYALEQSLTFVQALIQKDTSDVRCTNGEPPVFVKPEKVVGVIGASGSSVSIMVANILRLFQIPQISYASTAPELSDDRRYDFFSRVVPPDSFQAQAMVDIVKALGWNYVSTLASEGSYGEKGVESFTQISKEAGGLCIAQSVRIPQERKDRTIDFDRIIKQLLDTPNSRAVVIFANDEDIKQILAAAKRADQVGHFLWVGSDSWGSKINPLHQHEDIAEGAITIQPKRATVEGFDAYFTSRTLENNRRNVWFAEYWEENFNCKLTISGSKKEDTDRKCTGQERIGKDSNYEQEGKVQFVIDAVYAMAHALHHMNKDLCADYRGVCPEMEQAGGKKLLKYIRNVNFNGSAGTPVMFNKNGDAPGRYDIFQYQTTNTSNPGYRLIGQWTDELQLNIEDMQWGKGVREIPASVCTLPCKPGQRKKTQKGTPCCWTCEPCDGYQYQFDEMTCQHCPYDQRPNENRTGCQDIPIIKLEWHSPWAVIPVFLAMLGIIATIFVMATFIRYNDTPIVRASGRELSYVLLTGIFLCYIITFLMIAKPDVAVCSFRRVFLGLGMCISYAALLTKTNRIYRIFEQGKKSVTAPRLISPTSQLAITSSLISVQLLGVFIWFGVDPPNIIIDYDEHKTMNPEQARGVLKCDITDLQIICSLGYSILLMVTCTVYAIKTRGVPENFNEAKPIGFTMYTTCIVWLAFIPIFFGTAQSAEKLYIQTTTLTISMNLSASVALGMLYMPKVYIIIFHPELNVQKRKRSFKAVVTAATMSSRLSHKPSDRPNGEAKTELCENVDPNSEKCNCY

SEQ ID NO: 10676 - protein, 416 aa, Homo sapiens
MLLILLSVALLALSSAQNLNEDVSQEESPSLIAGNPQGAPPQGGNKPQGPPSPPGKPQGPPPQGGNQPQGPPPPPGKPQGPPPQGGNKPQGPPPPGKPQGPPPQGDKSRSPRSPPGKPQGPPPQGGNQPQGPPPPPGKPQGPPPQGGNKPQGPPPPGKPQGPPPQGDNKSRSSRSPPGKPQGPPPQGGNQPQGPPPPPGKPQGPPPQGGNKPQGPPPPGKPQGPPPQGDNKSQSARSPPGKPQGPPPQGGNQPQGPPPPPGKPQGPPPQGGNKPQGPPPPGKPQGPPPQGGSKSRSSRSPPGKPQGPPPQGGNQPQGPPPPPGKPQGPPPQGGNKPQGPPPPGKPQGPPPQGGSKSRSARSPPGKPQGPPQQEGNNPQGPPPPAGGNPQQPQAPPAGQPQGPPRPPQGGRPSRPPQ

SEQ ID NO: 10677 - protein, 986 aa, Homo sapiens
MGPPLPLLLLLLLLLPPRVLPAAPSSVPRGRQLPGRLGCLLEEGLCGASEACVNDGVFGRCQKVPAMDFYRYEVSPVALQRLRVALQKLSGTGFTWQDDYTQYVMDQELADLPKTYLRRPEASSPARPSKHSVGSERRYSREGGAALANALRRHLPFLEALSQAPASDVLARTHTAQDRPPAEGDDRFSESILTYVAHTSALTYPPGSRTQLREDLLPRTLGQLQPDELSPKVDSGVDRHHLMAALSAYAAQRPPAPPGEGSLEPQYLLRAPSRMPRPLLAPAAPQKWPSPLGDSEDPSSTGDGARIHTLLKDLQRQPAEVRGLSGLELDGMAELMAGLMQGVDHGVARGSPGRAALGESGEQADGPKATLRGDSFPDDGVQDDDDRLYQEVHRLSATLGGLLQDHGSRLLPGALPFARPLDMERKKSEHPESSLSSEEETAGVENVKSQTYSKDLLGQQPHSEPGAAAFGELQNQMPGPSKEEQSLPAGAQEALSDGLQLEVQPSEEEARGYIVTDREVLGPAVTFKVSANVQNVTTEDVEKATVDNKDKLEETSGLKILQTGVGSKSKLKFLPPQAEQEDSTKFIALTLVSLACILGVLLASGLIYCLRHSSQHRLKEKLSGLGGDPGADATAAYQELCRQRMATRPPDRPEGPHTSRISSVSSQFSDGPIPSPSARSSASSWSEEPVQSNMDISTGHMILSYMEDHLKNKNRLEKEWEALCAYQAEPNSSFVAQREENVPKNRSLAVLTYDHSRVLLKAENSHSHSDYINASPIMDHDPRNPAYIATQGPLPATVADFWQMVWESGCVVIVMLTPLAENGVRQCYHYWPDEGSNLYHIYEVNLVSEHIWCEDFLVRSFYLKNLQTNETRTVTQFHFLSWYDRGVPSSSRSLLDFRRKVNKCYRGRSCPIIVHCSDGAGRSGTYVLIDMVLNKMAKGAKEIDIAATLEHLRDQRPGMVQTKEQFEFALTAVAEEVNAILKALPQ

SEQ ID NO: 10678 - protein, 998 aa, Homo sapiens
MGPPLPLLLLLLLLLPPRVLPAAPSSVPRGRQLPGRLDGVFGRCQKVPAMDFYRYEVSPVALQRLRVALQKLSGTGFTWQDDYTQYVMDQELADLPKTYLRRPEASSPARPSKHSVGSERRYSREGGAALANALRRHLPFLEALSQAPASDVLARTHTAQDRPPAEGDDRFSESILTYVAHTSALTYPPGSRTQLREDLLPRTLGQLQPDELSPKVDSGVDRHHLMAALSAYAAQRPPAPPGEGSLEPQYLLRAPSRMPRPLLAPAAPQKWPSPLGDSEDPSSTGDGARIHTLLKDLQRQPAEVRGLSGLELDGMAELMAGLMQGVDHGVARGSPGRAALGESGEQADGPKATLRGDSFPDDGVQDDDDRLYQEVHRLSATLGGLLQDHGSRLLPGALPFARPLDMERKKSEHPESSLSSEEETAGVENVKSQTYSKDLLGQQPHSEPGAAAFGELQNQMPGPSKEEQSLPAGAQEALSDGLQLEVQPSEEEARGYIVTDRDPLRPEEGRRLVEDVARLLQVPSSAFADVEVLGPAVTFKVSANVQNVTTEDVEKATVDNKDKLEETSGLKILQTGVGSKSKLKFLPPQAEQEDSTKFIALTLVSLACILGVLLASGLIYCLRHSSQHRLKEKLSGLGGDPGADATAAYQELCRQRMATRPPDRPEGPHTSRISSVSSQFSDGPIPSPSARSSASSWSEEPVQSNMDISTGHMILSYMEDHLKNKNRLEKEWEALCAYQAEPNSSFVAQREENVPKNRSLAVLTYDHSRVLLKAENSHSHSDYINASPIMDHDPRNPAYIATQGPLPATVADFWQMVWESGCVVIVMLTPLAENGVRQCYHYWPDEGSNLYHIYEVNLVSEHIWCEDFLVRSFYLKNLQTNETRTVTQFHFLSWYDRGVPSSSRSLLDFRRKVNKCYRGRSCPIIVHCSDGAGRSGTYVLIDMVLNKMAKGAKEIDIAATLEHLRDQRPGMVQTKEQFEFALTAVAEEVNAILKALPQ

SEQ ID NO: 10679 - protein, 1015 aa, Homo sapiens
MGPPLPLLLLLLLLLPPRVLPAAPSSVPRGRQLPGRLGCLLEEGLCGASEACVNDGVFGRCQKVPAMDFYRYEVSPVALQRLRVALQKLSGTGFTWQDDYTQYVMDQELADLPKTYLRRPEASSPARPSKHSVGSERRYSREGGAALANALRRHLPFLEALSQAPASDVLARTHTAQDRPPAEGDDRFSESILTYVAHTSALTYPPGSRTQLREDLLPRTLGQLQPDELSPKVDSGVDRHHLMAALSAYAAQRPPAPPGEGSLEPQYLLRAPSRMPRPLLAPAAPQKWPSPLGDSEDPSSTGDGARIHTLLKDLQRQPAEVRGLSGLELDGMAELMAGLMQGVDHGVARGSPGRAALGESGEQADGPKATLRGDSFPDDGVQDDDDRLYQEVHRLSATLGGLLQDHGSRLLPGALPFARPLDMERKKSEHPESSLSSEEETAGVENVKSQTYSKDLLGQQPHSEPGAAAFGELQNQMPGPSKEEQSLPAGAQEALSDGLQLEVQPSEEEARGYIVTDRDPLRPEEGRRLVEDVARLLQVPSSAFADVEVLGPAVTFKVSANVQNVTTEDVEKATVDNKDKLEETSGLKILQTGVGSKSKLKFLPPQAEQEDSTKFIALTLVSLACILGVLLASGLIYCLRHSSQHRLKEKLSGLGGDPGADATAAYQELCRQRMATRPPDRPEGPHTSRISSVSSQFSDGPIPSPSARSSASSWSEEPVQSNMDISTGHMILSYMEDHLKNKNRLEKEWEALCAYQAEPNSSFVAQREENVPKNRSLAVLTYDHSRVLLKAENSHSHSDYINASPIMDHDPRNPAYIATQGPLPATVADFWQMVWESGCVVIVMLTPLAENGVRQCYHYWPDEGSNLYHIYEVNLVSEHIWCEDFLVRSFYLKNLQTNETRTVTQFHFLSWYDRGVPSSSRSLLDFRRKVNKCYRGRSCPIIVHCSDGAGRSGTYVLIDMVLNKMAKGAKEIDIAATLEHLRDQRPGMVQTKEQFEFALTAVAEEVNAILKALPQ

SEQ ID NO: 10680 - protein, 1910 aa, Homo sapiens
MWVAKWLTGLLYHLSLFITRSWEVDFHPRQEALVRTLTSYEVVIPERVNEFGEVFPQSHHFSRQKRSSEALEPMPFRTHYRFTAYGQLFQLNLTADASFLAAGYTEVHLGTPERGAWESDAGPSDLRHCFYRGQVNSQEDYKAVVSLCGGLTGTFKGQNGEYFLEPIMKADGNEYEDGHNKPHLIYRQDLNNSFLQTLKYCSVSESQIKETSLPFHTYSNMNEDLNVMKERVLGHTSKNVPLKDERRHSRKKRLISYPRYIEIMVTADAKVVSAHGSNLQNYILTLMSIVATIYKDPSIGNLIHIVVVKLVMIHREEEGPVINFDGATTLKNFCSWQQTQNDLDDVHPSHHDTAVLITREDICSSKEKCNMLGLSYLGTICDPLQSCFINEEKGLISAFTIAHELGHTLGVQHDDNPRCKEMKVTKYHVMAPALSFHMSPWSWSNCSRKYVTEFLDTGYGECLLDKPDEEIYNLPSELPGSRYDGNKQCELAFGPGSQMCPHINICMHLWCTSTEKLHKGCFTQHVPPADGTDCGPGMHCRHGLCVNKETETRPVNGEWGPWEPYSSCSRTCGGGIESATRRCNRPEPRNGGNYCVGRRMKFRSCNTDSCPKGTQDFREKQCSDFNGKHLDISGIPSNVRWLPRYSGIGTKDRCKLYCQVAGTNYFYLLKDMVEDGTPCGTETHDICVQGQCMAAGCDHVLNSSAKIDKCGVCGGDNSSCKTITGVFNSSHYGYNVVVKIPAGATNVDIRQYSYSGQPDDSYLALSDAEGNFLFNGNFLLSTSKKEINVQGTRTVIEYSGSNNAVERINSTNRQEKELILQVLCVGNLYNPDVHYSFNIPLEERSDMFTWDPYGPWEGCTKMCQGLQRRNITCIHKSDHSVVSDKECDHLPLPSFVTQSCNTDCELRWHVIGKSECSSQCGQGYRTLDIHCMKYSIHEGQTVQVDDHYCGDQLKPPTQELCHGNCVFTRWHYSEWSQCSRSCGGGERSRESYCMNNFGHRLADNECQELSRVTRENCNEFSCPSWAASEWSECLVTCGKGTKQRQVWCQLNVDHLSDGFCNSSTKPESLSPCELHTCASWQVGPWGPCTTTCGHGYQMRDVKCVNELASAVLEDTECHEASRPSDRQSCVLTPCSFISKLETALLPTVLIKKMAQWRHGSWTPCSVSCGRGTQARYVSCRDALDRIADESYCAHLPRPAEIWDCFTPCGEWQAGDWSPCSASCGHGKTTRQVLCMNYHQPIDENYCDPEVRPLMEQECSLAACPPAHSHFPSSPVQPSYYLSTNLPLTQKLEDNENQVVHPSVRGNQWRTGPWGSCSSSCSGGLQHRAVVCQDENGQSASYCDAASKPPELQQCGPGPCPQWNYGNWGECSQTCGGGIKSRLVICQFPNGQILEDHNCEIVNKPPSVIQCHMHACPADVSWHQEPWTSCSASCGKGRKYREVFCIDQFQRKLEDTNCSQVQKPPTHKACRSVRCPSWKANSWNECSVTCGSGVQQRDVYCRLKGVGQVVEEMCDQSTRPCSQRRCWSQDCVQHKGMERGRLNCSTSCERKDSHQRMECTDNQIRQVNEIVYNSSTISLTSKNCRNPPCNYIVVTADSSQCANNCGFSYRQRITYCTEIPSTKKHKLHRLRPIVYQECPVVPSSQVYQCINSCLHLATWKVGKWSKCSVTCGIGIMKRQVKCITKHGLSSDLCLNHLKPGAQKKCYANDCKSFTTCKEIQVKNHIRKDGDYYLNIKGRIIKIYCADMYLENPKEYLTLVQGEENFSEVYGFRLKNPYQCPFNGSRREDCECDNGHLAAGYTVFSKIRIDLTSMQIKTTDLLFSKTIFGNAVPFATAGDCYSAFRCPQGQFSINLSGTGMKISSTAKWLTQGSYTSVSIRRSEDGTRFFGKCGGYCGKCLPHMTTGLPIQVI

SEQ ID NO: 10681 - protein, 476 aa, Homo sapiens
MRVFLLCAYILLLMVSQLRAVSFPEDDEPLNTVDYHYSRQYPVFRGRPSGNESQHRLDFQLMLKIRDTLYIAGRDQVYTVNLNEMPKTEVIPNKKLTWRSRQQDRENCAMKGKHKDECHNFIKVFVPRNDEMVFVCGTNAFNPMCRYYRLSTLEYDGEEISGLARCPFDARQTNVALFADGKLYSATVADFLASDAVIYRSMGDGSALRTIKYDSKWIKEPHFLHAIEYGNYVYFFFREIAVEHNNLGKAVYSRVARICKNDMGGSQRVLEKHWTSFLKARLNCSVPGDSFFYFDVLQSITDIIQINGIPTVVGVFTTQLNSIPGSAVCAFSMDDIEKVFKGRFKEQKTPDSVWTAVPEDKVPKPRPGCCAKHGLAEAYKTSIDFPDETLSFIKSHPLMDSAVPPIADEPWFTKTRVRYRLTAISVDHSAGPYQNYTVIFVGSEAGMVLKVLAKTSPFSLNDSVLLEEIEAYNHAK

SEQ ID NO: 10682 - protein, 998 aa, Homo sapiens
MRVFLLCAYILLLMVSQLRAVSFPEDDEPLNTVDYHYSRQYPVFRGRPSGNESQHRLDFQLMLKIRDTLYIAGRDQVYTVNLNEMPKTEVIPNKKLTWRSRQQDRENCAMKGKHKDECHNFIKVFVPRNDEMVFVCGTNAFNPMCRYYRLSTLEYDGEEISGLARCPFDARQTNVALFADGKLYSATVADFLASDAVIYRSMGDGSALRTIKYDSKWIKEPHFLHAIEYGNYVYFFFREIAVEHNNLGKAVYSRVARICKNDMGGSQRVLEKHWTSFLKARLNCSVPGDSFFYFDVLQSITDIIQINGIPTVVGVFTTQLNSIPGSAVCAFSMDDIEKVFKGRFKEQKTPDSVWTAVPEDKVPKPRPGCCAKHGLAEAYKTSIDFPDETLSFIKSHPLMDSAVPPIADEPWFTKTRVRYRLTAISVDHSAGPYQNYTVIFVGSEAGMVLKVLAKTSPFSLNDSVLLEEIEAYNHAKCSAENEEDKKVISLQLDKDHHALYVAFSSCIIRIPLSRCERYGSCKKSCIASRDPYCGWLSQGSCGRVTPGMLAEGYEQDTEFGNTAHLGDCHGVRWEVQSGESNQMVHMNVLITCVFAAFVLGAFIAGVAVYCYRDMFVRKNRKIHKDAESAQSCTDSSGSFAKLNGLFDSPVKEYQQNIDSPKLYSNLLTSRKELPPNGDTKSMVMDHRGQPPELAALPTPESTPVLHQKTLQAMKSHSEKAHGHGASRKETPQFFPSSPPPHSPLSHGHIPSAIVLPNATHDYNTSFSNSNAHKAEKKLQNIDHPLTKSSSKRDHRRSVDSRNTLNDLLKHLNDPNSNPKAIMGDIQMAHQNLMLDPMGSMSEVPPKVPNREASLYSPPSTLPRNSPTKRVDVPTTPGVPMTSLERQRGYHKNSSQRHSISAMPKNLNSPNGVLLSRQPSMNRGGYMPTPTGAKVDYIQGTPVSVHLQPSLSRQSSYTSNGTLPRTGLKRTPSLKPDVPPKPSFVPQTPSVRPLNKYTY

SEQ ID NO: 10683 - protein, 1816 aa, Homo sapiens
MALSSAWRSVLPLWLLWSAACSRAASGDDNAFPFDIEGSSAVGRQDPPETSEPRVALGRLPPAAEKCNAGFFHTLSGECVPCDCNGNSNECLDGSGYCVHCQRNTTGEHCEKCLDGYIGDSIRGAPQFCQPCPCPLPHLANFAESCYRKNGAVRCICNENYAGPNCERCAPGYYGNPLLIGSTCKKCDCSGNSDPNLIFEDCDEVTGQCRNCLRNTTGFKCERCAPGYYGDARIAKNCAVCNCGGGPCDSVTGECLEEGFEPPTGCDKCVWDLTDDLRLAALSIEEGKSGVLSVSSGAAAHRHVNEINATIYLLKTKLSERENQYALRKIQINNAENTMKSLLSDVEELVEKENQASRKGQLVQKESMDTINHASQLVEQAHDMRDKIQEINNKMLYYGEEHELSPKEISEKLVLAQKMLEEIRSRQPFFTQRELVDEEADEAYELLSQAESWQRLHNETRTLFPVVLEQLDDYNAKLSDLQEALDQALNYVRDAEDMNRATAARQRDHEKQQERVREQMEVVNMSLSTSADSLTTPRLTLSELDDIIKNASGIYAEIDGAKSELQVKLSNLSNLSHDLVQEAIDHAQDLQQEANELSRKLHSSDMNGLVQKALDASNVYENIVNYVSEANETAEFALNTTDRIYDAVSGIDTQIIYHKDESENLLNQARELQAKAESSSDEAVADTSRRVGGALARKSALKTRLSDAVKQLQAAERGDAQQRLGQSRLITEEANRTTMEVQQATAPMANNLTNWSQNLQHFDSSAYNTAVNSARDAVRNLTEVVPQLLDQLRTVEQKRPASNVSASIQRIRELIAQTRSVASKIQVSMMFDGQSAVEVHSRTSMDDLKAFTSLSLYMKPPVKRPELTETADQFILYLGSKNAKKEYMGLAIKNDNLVYVYNLGTKDVEIPLDSKPVSSWPAYFSIVKIERVGKHGKVFLTVPSLSSTAEEKFIKKGEFSGDDSLLDLDPEDTVFYVGGVPSNFKLPTSLNLPGFVGCLELATLNNDVISLYNFKHIYNMDPSTSVPCARDKLAFTQSRAASYFFDGSGYAVVRDITRRGKFGQVTRFDIEVRTPADNGLILLMVNGSMFFRLEMRNGYLHVFYDFGFSGGPVHLEDTLKKAQINDAKYHEISIIYHNDKKMILVVDRRHVKSMDNEKMKIPFTDIYIGGAPPEILQSRALRAHLPLDINFRGCMKGFQFQKKDFNLLEQTETLGVGYGCPEDSLISRRAYFNGQSFIASIQKISFFDGFEGGFNFRTLQPNGLLFYYASGSDVFSISLDNGTVIMDVKGIKVQSVDKQYNDGLSHFVISSVSPTRYELIVDKSRVGSKNPTKGKIEQTQASEKKFYFGGSPISAQYANFTGCISNAYFTRVDRDVEVEDFQRYTEKVHTSLYECPIESSPLFLLHKKGKNLSKPKASQNKKGGKSKDAPSWDPVALKLPERNTPRNSHCHLSNSPRAIEHAYQYGGTANSRQEFEHLKGDFGAKSQFSIRLRTRSSHGMIFYVSDQEENDFMTLFLAHGRLVYMFNVGHKKLKIRSQEKYNDGLWHDVIFIRERSSGRLVIDGLRVLEESLPPTEATWKIKGPIYLGGVAPGKAVKNVQINSIYSFSGCLSNLQLNGASITSASQTFSVTPCFEGPMETGTYFSTEGGYVVLDESFNIGLKFEIAFEVRPRSSSGTLVHGHSVNGEYLNVHMKNGQVIVKVNNGIRDFSTSVTPKQSLCDGRWHRITVIRDSNVVQLDVDSEVNHVVGPLNPKPIDHREPVFVGGVPESLLTPRLAPSKPFTGCIRHFVIDGHPVSFSKAALVSGAVSINSCPAA

SEQ ID NO: 10684 - protein, 328 aa, Homo sapiens
MEKSIWLLACLAWVLPTGSFVRTKIDTTENLLNTEVHSSPAQRWSMQVPPEVSAEAGDAAVLPCTFTHPHRHYDGPLTAIWRAGEPYAGPQVFRCAAARGSELCQTALSLHGRFRLLGNPRRNDLSLRVERLALADDRRYFCRVEFAGDVHDRYESRHGVRLHVTAAPRIVNISVLPSPAHAFRALCTAEGEPPPALAWSGPALGNSLAAVRSPREGHGHLVTAELPALTHDGRYTCTAANSLGRSEASVYLFRFHGASGASTVALLLGALGFKALLLLGVLAARAARRRPEHLDTPDTPPRSQAQESNYENLSQMNPRSPPATMCSP

SEQ ID NO: 10685 - protein, 4599 aa, Homo sapiens
MSEFLLALLTLSGLLPIARVLTVGADRDQQLCDPGEFLCHDHVTCVSQSWLCDGDPDCPDDSDESLDTCPEEVEIKCPLNHIACLGTNKCVHLSQLCNGVLDCPDGYDEGVHCQELLSNCQQLNCQYKCTMVRNSTRCYCEDGFEITEDGRSCKDQDECAVYGTCSQTCRNTHGSYTCSCVEGYLMQPDNRSCKAKIEPTDRPPILLIANFETIEVFYLNGSKMATLSSVNGNEIHTLDFIYNEDMICWIESRESSNQLKCIQITKAGGLTDEWTINILQSFHNVQQMAIDWLTRNLYFVDHVGDRIFVCNSNGSVCVTLIDLELHNPKAIAVDPIAGKLFFTDYGNVAKVERCDMDGMNRTRIIDSKTEQPAALALDLVNKLVYWVDLYLDYVGVVDYQGKNRHTVIQGRQVRHLYGITVFEDYLYATNSDNYNIVRINRFNGTDIHSLIKIENAWGIRIYQKRTQPTVRSHACEVDPYGMPGGCSHICLLSSSYKTRTCRCRTGFNLGSDGRSCKRPKNELFLFYGKGRPGIVRGMDLNTKIADEYMIPIENLVNPRALDFHAETNYIYFADTTSFLIGRQKIDGTERETILKDDLDNVEGIAVDWIGNNLYWTNDGHRKTINVARLEKASQSRKTLLEGEMSHPRGIVVDPVNGWMYWTDWEEDEIDDSVGRIEKAWMDGFNRQIFVTSKMLWPNGLTLDFHTNTLYWCDAYYDHIEKVFLNGTHRKIVYSGRELNHPFGLSHHGNYVFWTDYMNGSIFQLDLITSEVTLLRHERPPLFGLQIYDPRKQQGDNMCRVNNGGCSTLCLAIPGGRVCACADNQLLDENGTTCTFNPGEALPHICKAGEFRCKNRHCIQARWKCDGDDDCLDGSDEDSVNCFNHSCPDDQFKCQNNRCIPKRWLCDGANDCGSNEDESNQTCTARTCQVDQFSCGNGRCIPRAWLCDREDDCGDQTDEMASCEFPTCEPLTQFVCKSGRCISSKWHCDSDDDCGDGSDEVGCVHSCFDNQFRCSSGRCIPGHWACDGDNDCGDFSDEAQINCTKEEIHSPAGCNGNEFQCHPDGNCVPDLWRCDGEKDCEDGSDEKGCNGTIRLCDHKTKFSCWSTGRCINKAWVCDGDIDCEDQSDEDDCDSFLCGPPKHPCANDTSVCLQPEKLCNGKKDCPDGSDEGYLCDECSLNNGGCSNHCSVVPGRGIVCSCPEGLQLNKDNKTCEIVDYCSNHLKCSQVCEQHKHTVKCSCYEGWKLDVDGESCTSVDPFEAFIIFSIRHEIRRIDLHKRDYSLLVPGLRNTIALDFHFNQSLLYWTDVVEDRIYRGKLSESGGVSAIEVVVEHGLATPEGLTVDWIAGNIYWIDSNLDQIEVAKLDGSLRTTLIAGAMEHPRAIALDPRYGILFWTDWDANFPRIESASMSGAGRKTIYKDMKTGAWPNGLTVDHFEKRIVWTDARSDAIYSALYDGTNMIEIIRGHEYLSHPFAVSLYGSEVYWTDWRTNTLSKANKWTGQNVSVIQKTSAQPFDLQIYHPSRQPQAPNPCAANDGKGPCSHMCLINHNRSAACACPHLMKLSSDKKTCYEMKKFLLYARRSEIRGVDIDNPYFNFITAFTVPDIDDVTVIDFDASEERLYWTDIKTQTIKRAFINGTGLETVISRDIQSIRGLAVDWVSRNLYWISSEFDETQINVARLDGSLKTSIIHGIDKPQCLAAHPVRGKLYWTDGNTINMANMDGSNSKILFQNQKEPVGLSIDYVENKLYWISSGNGTINRCNLDGGNLEVIESMKEELTKATALTIMDKKLWWADQNLAQLGTCSKRDGRNPTILRNKTSGVVHMKVYDKEAQQGSNSCQLNNGGCSQLCLPTSETTRTCMCTVGYYLQKNRMSCQGIESFLMYSVHEGIRGIPLEPSDKMDALMPISGTSFAVGIDFHAENDTIYWTDMGFNKISRAKRDQTWKEDIITNGLGRVEGIAVDWIAGNIYWTDHGFNLIEVARLNGSFRYVIISQGLDQPRSIAVHPEKGLLFWTEWGQMPCIGKARLDGSEKVVLVSMGIAWPNGISIDYEENKLYWCDARTDKIERIDLETGGNREMVLSGSNVDMFSVAVFGAYIYWSDRAHANGSVRRGHKNDATETITMRTGLGVNLKEVKIFNRVREKGTNVCARDNGGCKQLCLYRGNSRRTCACAHGYLAEDGVTCLRHEGYLLYSGRTILKSIHLSDETNLNSPIRPYENPRYFKNVIALAFDYNQRRKGTNRIFYSDAHFGNIQLIKDNWEDRQVIVENVGSVEGLAYHRAWDTLYWTSSTTSSITRHTVDQTRPGAFDREAVITMSEDDHPHVLALDECQNLMFWTNWNEQHPSIMRSTLTGKNAQVVVSTDILTPNGLTIDYRAEKLYFSDGSLGKIERCEYDGSQRHVIVKSGPGTFLSLAVYDNYIFWSDWGRRAILRSNKYTGGDTKILRSDIPHQPMGIIAVANDTNSCELSPCALLNGGCHDLCLLTPNGRVNCSCRGDRILLEDNRCVTKNSSCNAYSEFECGNGECIDYQLTCDGIPHCKDKSDEKLLYCENRSCRRGFKPCYNRRCIPHGKLCDGENDCGDNSDELDCKVSTCATVEFRCADGTCIPRSARCNQNIDCADASDEKNCNNTDCTHFYKLGVKTTGFIRCNSTSLCVLPTWICDGSNDCGDYSDELKCPVQNKHKCEENYFSCPSGRCILNTWICDGQKDCEDGRDEFHCDSSCSWNQFACSAQKCISKHWICDGEDDCGDGLDESDSICGAITCAADMFSCQGSRACVPRHWLCDGERDCPDGSDELSTAGCAPNNTCDENAFMCHNKVCIPKQFVCDHDDDCGDGSDESPQCGYRQCGTEEFSCADGRCLLNTQWQCDGDFDCPDHSDEAPLNPKCKSAEQSCNSSFFMCKNGRCIPSGGLCDNKDDCGDGSDERNCHINECLSKKVSGCSQDCQDLPVSYKCKCWPGFQLKDDGKTCVDIDECSSGFPCSQQCINTYGTYKCLCTDGYEIQPDNPNGCKSLSDEEPFLILADHHEIRKISTDGSNYTLLKQGLNNVIAIDFDYREEFIYWIDSSRPNGSRINRMCLNGSDIKVVHNTAVPNALAVDWIGKNLYWSDTEKRIIEVSKLNGLYPTILVSKRLKFPRDLSLDPQAGYLYWIDCCEYPHIGRVGMDGTNQSVVIETKISRPMALTIDYVNRRLYWADENHIEFSNMDGSHRHKVPNQDIPGVIALTLFEDYIYWTDGKTKSLSRAHKTSGADRLSLIYSWHAITDIQVYHSYRQPDVSKHLCMINNGGCSHLCLLAPGKTHTCACPTNFYLAADNRTCLSNCTASQFRCKTDKCIPFWWKCDTVDDCGDGSDEPDDCPEFRCQPGRFQCGTGLCALPAFICDGENDCGDNSDELNCDTHVCLSGQFKCTKNQKCIPVNLRCNGQDDCGDEEDERDCPENSCSPDYFQCKTTKHCISKLWVCDEDPDCADASDEANCDKKTCGPHEFQCKNNNCIPDHWRCDSQNDCSDNSDEENCKPQTCTLKDFLCANGDCVSSRFWCDGDFDCADGSDERNCETSCSKDQFRCSNGQCIPAKWKCDGHEDCKYGEDEKSCEPASPTCSSREYICASDGCISASLKCNGEYDCADGSDEMDCVTECKEDQFRCKNKAHCIPIRWLCDGIHDCVDGSDEENCERGGNICRADEFLCNNSLCKLHFWVCDGEDDCGDNSDEAPDMCVKFLCPSTRPHRCRNNRICLQSEQMCNGIDECGDNSDEDHCGGKLTYKARPCKKDEFACSNKKCIPMDLQCDRLDDCGDGSDEQGCRIAPTEYTCEDNVNPCGDDAYCNQIKTSVFCRCKPGFQRNMKNRQCEDLNECLVFGTCSHQCINVEGSYKCVCDQNFQERNNTCIAEGSEDQVLYIANDTDILGFIYPFNYSGDHQQISHIEHNSRITGMDVYYQRDMIIWSTQFNPGGIFYKRIHGREKRQANSGLICPEFKRPRDIAVDWVAGNIYWTDHSRMHWFSYYTTHWTSLRYSINVGQLNGPNCTRLLTNMAGEPYAIAVNPKRGMMYWTVVGDHSHIEEAAMDGTLRRILVQKNLQRPTGLAVDYFSERIYWADFELSIIGSVLYDGSNSVVSVSSKQGLLHPHRIDIFEDYIYGAGPKNGVFRVQKFGHGSVEYLALNIDKTKGVLISHRYKQLDLPNPCLDLACEFLCLLNPSGATCVCPEGKYLINGTCNDDSLLDDSCKLTCENGGRCILNEKGDLRCHCWPSYSGERCEVNHCSNYCQNGGTCVPSVLGRPTCSCALGFTGPNCGKTVCEDFCQNGGTCIVTAGNQPYCHCQPEYTGDRCQYYVCHHYCVNSESCTIGDDGSVECVCPTRYEGPKCEVDKCVRCHGGHCIINKDSEDIFCNCTNGKIASSCQLCDGYCYNGGTCQLDPETNVPVCLCSTNWSGTQCERPAPKSSKSDHISTRSIAIIVPLVLLVTLITTLVIGLVLCKRKRRTKTIRRQPIINGGINVEIGNPSYNMYEVDHDHNDGGLLDPGFMIDPTKARYIGGGPSAFKLPHTAPPIYLNSDLKGPLTAGPTNYSNPVYAKLYMDGQNCRNSLGSVDERKELLPKKIEIGIRETVA

SEQ ID NO: 10686 - protein, 465 aa, Homo sapiens
MHGGQGPLLLLLLLAVCLGAQGRNQEERLLADLMQNYDPNLRPAERDSDVVNVSLKLTLTNLISLNEREEALTTNVWIEMQWCDYRLRWDPRDYEGLWVLRVPSTMVWRPDIVLENKSQTYSTNEIDLQLSQEDGQTIEWIFIDPEAFTENGEWAIQHRPAKMLLDPAAPAQEAGHQKVVFYLLIQRKPLFYVINIIAPCVLISSVAILIHFLPAKAGGQKCTVAINVLLAQTVFLFLVAKKVPETSQAVPLISKYLTFLLVVTILIVVNAVVVLNVSLRSPHTHSMARGVRKVFLRLLPQLLRMHVRPLAPAAVQDTQSRLQNGSSGWSITTGEEVALCLPRSELLFQQWQRQGLVAAALEKLEKGPELGLSQFCGSLKQAAPAIQACVEACNLIACARHQQSHFDNGNEEWFLVGRVLDRVCFLAMLSLFICGTAGIFLMAHYNRVPALPFPGDPRPYLPSPD

SEQ ID NO: 10687 - protein, 418 aa, Homo sapiens
MAASMCDVFSFCVGVAGRARVSVEVRFVSSAKGKGLFATQLIRKGETIFVERPLVAAQFLWNALYRYRACDHCLRALEKAEENAQRLTGKPGQVLPHPELCTVRKDLHQNCPHCQVMYCSAECRLAATEQYHQVLCPGPSQDDPLHPLNKLQEAWRSIHYPPETASIMLMARMVATVKQAKDKDRWIRLFSQFCNKTANEEEEIVHKLLGDKFKGQLELLRRLFTEALYEEAVSQWFTPDGFRSLFALVGTNGQGIGTSSLSQWVHACDTLELKPQDREQLDAFIDQLYKDIEAATGEFLNCEGSGLFVLQSCCNHSCVPNAETSFPENNFLLHVTALEDIKPGEEICISYLDCCQRERSRHSRHKILRENYLFVCSCPKCLAEADEPNVTSEEEEEEEEEEEGEPEDAELGDEMTDV

SEQ ID NO: 10688 - protein, 3969 aa, Homo sapiens
MAHSCRWRFPARPGTTGGGGGGGRRGLGGAPRQRVPALLLPPGPPVGGGGPGAPPSPPAVAAAAAAAGSSGAGVPGGAAAASAASSSSASSSSSSSSSASSGPALLRVGPGFDAALQVSAAIGTNLRRFRAVFGESGGGGGSGEDEQFLGFGSDEEVRVRSPTRSPSVKTSPRKPRGRPRSGSDRNSAILSDPSVFSPLNKSETKSGDKIKKKDSKSIEKKRGRPPTFPGVKIKITHGKDISELPKGNKEDSLKKIKRTPSATFQQATKIKKLRAGKLSPLKSKFKTGKLQIGRKGVQIVRRRGRPPSTERIKTPSGLLINSELEKPQKVRKDKEGTPPLTKEDKTVVRQSPRRIKPVRIIPSSKRTDATIAKQLLQRAKKGAQKKIEKEAAQLQGRKVKTQVKNIRQFIMPVVSAISSRIIKTPRRFIEDEDYDPPIKIARLESTPNSRFSAPSCGSSEKSSAASQHSSQMSSDSSRSSSPSVDTSTDSQASEEIQVLPEERSDTPEVHPPLPISQSPENESNDRRSRRYSVSERSFGSRTTKKLSTLQSAPQQQTSSSPPPPLLTPPPPLQPASSISDHTPWLMPPTIPLASPFLPASTAPMQGKRKSILREPTFRWTSLKHSRSEPQYFSSAKYAKEGLIRKPIFDNFRPPPLTPEDVGFASGFSASGTAASARLFSPLHSGTRFDMHKRSPLLRAPRFTPSEAHSRIFESVTLPSNRTSAGTSSSGVSNRKRKRKVFSPIRSEPRSPSHSMRTRSGRLSSSELSPLTPPSSVSSSLSISVSPLATSALNPTFTFPSHSLTQSGESAEKNQRPRKQTSAPAEPFSSSSPTPLFPWFTPGSQTERGRNKDKAPEELSKDRDADKSVEKDKSRERDREREKENKRESRKEKRKKGSEIQSSSALYPVGRVSKEKVVGEDVATSSSAKKATGRKKSSSHDSGTDITSVTLGDTTAVKTKILIKKGRGNLEKTNLDLGPTAPSLEKEKTLCLSTPSSSTVKHSTSSIGSMLAQADKLPMTDKRVASLLKKAKAQLCKIEKSKSLKQTDQPKAQGQESDSSETSVRGPRIKHVCRRAAVALGRKRAVFPDDMPTLSALPWEEREKILSSMGNDDKSSIAGSEDAEPLAPPIKPIKPVTRNKAPQEPPVKKGRRSRRCGQCPGCQVPEDCGVCTNCLDKPKFGGRNIKKQCCKMRKCQNLQWMPSKAYLQKQAKAVKKKEKKSKTSEKKDSKESSVVKNVVDSSQKPTPSAREDPAPKKSSSEPPPRKPVEEKSEEGNVSAPGPESKQATTPASRKSSKQVSQPALVIPPQPPTTGPPRKEVPKTTPSEPKKKQPPPPESGPEQSKQKKVAPRPSIPVKQKPKEKEKPPPVNKQENAGTLNILSTLSNGNSSKQKIPADGVHRIRVDFKEDCEAENVWEMGGLGILTSVPITPRVVCFLCASSGHVEFVYCQVCCEPFHKFCLEENERPLEDQLENWCCRRCKFCHVCGRQHQATKQLLECNKCRNSYHPECLGPNYPTKPTKKKKVWICTKCVRCKSCGSTTPGKGWDAQWSHDFSLCHDCAKLFAKGNFCPLCDKCYDDDDYESKMMQCGKCDRWVHSKCENLSDEMYEILSNLPESVAYTCVNCTERHPAEWRLALEKELQISLKQVLTALLNSRTTSHLLRYRQAAKPPDLNPETEESIPSRSSPEGPDPPVLTEVSKQDDQQPLDLEGVKRKMDQGNYTSVLEFSDDIVKIIQAAINSDGGQPEIKKANSMVKSFFIRQMERVFPWFSVKKSRFWEPNKVSSNSGMLPNAVLPPSLDHNYAQWQEREENSHTEQPPLMKKIIPAPKPKGPGEPDSPTPLHPPTPPILSTDRSREDSPELNPPPGIEDNRQCALCLTYGDDSANDAGRLLYIGQNEWTHVNCALWSAEVFEDDDGSLKNVHMAVIRGKQLRCEFCQKPGATVGCCLTSCTSNYHFMCSRAKNCVFLDDKKVYCQRHRDLIKGEVVPENGFEVFRRVFVDFEGISLRRKFLNGLEPENIHMMIGSMTIDCLGILNDLSDCEDKLFPIGYQCSRVYWSTTDARKRCVYTCKIVECRPPVVEPDINSTVEHDENRTIAHSPTSFTESSSKESQNTAEIISPPSPDRPPHSQTSGSCYYHVISKVPRIRTPSYSPTQRSPGCRPLPSAGSPTPTTHEIVTVGDPLLSSGLRSIGSRRHSTSSLSPQRSKLRIMSPMRTGNTYSRNNVSSVSTTGTATDLESSAKVVDHVLGPLNSSTSLGQNTSTSSNLQRTVVTVGNKNSHLDGSSSSEMKQSSASDLVSKSSSLKGEKTKVLSSKSSEGSAHNVAYPGIPKLAPQVHNTTSRELNVSKIGSFAEPSSVSFSSKEALSFPHLHLRGQRNDRDQHTDSTQSANSSPDEDTEVKTLKLSGMSNRSSIINEHMGSSSRDRRQKGKKSCKETFKEKHSSKSFLEPGQVTTGEEGNLKPEFMDEVLTPEYMGQRPCNNVSSDKIGDKGLSMPGVPKAPPMQVEGSAKELQAPRKRTVKVTLTPLKMENESQSKNALKESSPASPLQIESTSPTEPISASENPGDGPVAQPSPNNTSCQDSQSNNYQNLPVQDRNLMLPDGPKPQEDGSFKRRYPRRSARARSNMFFGLTPLYGVRSYGEEDIPFYSSSTGKKRGKRSAEGQVDGADDLSTSDEDDLYYYNFTRTVISSGGEERLASHNLFREEEQCDLPKISQLDGVDDGTESDTSVTATTRKSSQIPKRNGKENGTENLKIDRPEDAGEKEHVTKSSVGHKNEPKMDNCHSVSRVKTQGQDSLEAQLSSLESSRRVHTSTPSDKNLLDTYNTELLKSDSDNNNSDDCGNILPSDIMDFVLKNTPSMQALGESPESSSSELLNLGEGLGLDSNREKDMGLFEVFSQQLPTTEPVDSSVSSSISAEEQFELPLELPSDLSVLTTRSPTVPSQNPSRLAVISDSGEKRVTITEKSVASSESDPALLSPGVDPTPEGHMTPDHFIQGHMDADHISSPPCGSVEQGHGNNQDLTRNSSTPGLQVPVSPTVPIQNQKYVPNSTDSPGPSQISNAAVQTTPPHLKPATEKLIVVNQNMQPLYVLQTLPNGVTQKIQLTSSVSSTPSVMETNTSVLGPMGGGLTLTTGLNPSLPTSQSLFPSASKGLLPMSHHQHLHSFPAATQSSFPPNISNPPSGLLIGVQPPPDPQLLVSESSQRTDLSTTVATPSSGLKKRPISRLQTRKNKKLAPSSTPSNIAPSDVVSNMTLINFTPSQLPNHPSLLDLGSLNTSSHRTVPNIIKRSKSSIMYFEPAPLLPQSVGGTAATAAGTSTISQDTSHLTSGSVSGLASSSSVLNVVSMQTTTTPTSSASVPGHVTLTNPRLLGTPDIGSISNLLIKASQQSLGIQDQPVALPPSSGMFPQLGTSQTPSTAAITAASSICVLPSTQTTGITAASPSGEADEHYQLQHVNQLLASKTGIHSSQRDLDSASGPQVSNFTQTVDAPNSMGLEQNKALSSAVQASPTSPGGSPSSPSSGQRSASPSVPGPTKPKPKTKRFQLPLDKGNGKKHKVSHLRTSSSEAHIPDQETTSLTSGTGTPGAEAEQQDTASVEQSSQKECGQPAGQVAVLPEVQVTQNPANEQESAEPKTVEEEESNFSSPLMLWLQQEQKRKESITEKKPKKGLVFEISSDDGFQICAESIEDAWKSLTDKVQEARSNARLKQLSFAGVNGLRMLGILHDAVVFLIEQLSGAKHCRNYKFRFHKPEEANEPPLNPHGSARAEVHLRKSAFDMFNFLASKHRQPPEYNPNDEEEEEVQLKSARRATSMDLPMPMRFRHLKKTSKEAVGVYRSPIHGRGLFCKRNIDAGEMVIEYAGNVIRSIQTDKREKYYDSKGIGCYMFRIDDSEVVDATMHGNAARFINHSCEPNCYSRVINIDGQKHIVIFAMRKIYRGEELTYDYKFPIEDASNKLPCNCGAKKCRKFLN

SEQ ID NO: 10689 - protein, 924 aa, Homo sapiens
MALPQGSLTFRDVAVEFSQEEWKCLDPVQKALYRDVMLENYRNLGFLGLCLPDLNIISMLEQGKEPWTVVSQVKIARNPNCGECMKGVITGISPKCVIKELPPIQNSNTGEKFQAVMLEGHESYDTENFYFREIRKNLQEVDFQWKDGEINYKEGPMTHKNNLTGQRVRHSQGDVENKHMENQLILRFQSGLGELQKFQTAEKIYGCNQIERTVNNCFLASPLQRIFPGVQTNISRKYGNDFLQLSLPTQDEKTHIREKPYIGNECGKAFRVSSSLINHQMIHTTEKPYRCNESGKAFHRGSLLTVHQIVHTRGKPYQCDVCGRIFRQNSDLVNHRRSHTGDKPYICNECGKSFSKSSHLAVHQRIHTGEKPYKCNRCGKCFSQSSSLATHQTVHTGDKPYKCNECGKTFKRNSSLTAHHIIHAGKKPYTCDVCGKVFYQNSQLVRHQIIHTGETPYKCNECGKVFFQRSRLAGHRRIHTGEKPYKCNECGKVFSQHSHLAVHQRVHTGEKPYKCNECGKAFNWGSLLTVHQRIHTGEKPYKCNVCGKVFNYGGYLSVHMRCHTGEKPLHCNKCGMVFTYYSCLARHQRMHTGEKPYKCNVCGKVFIDSGNLSIHRRSHTGEKPFQCNECGKVFSYYSCLARHRKIHTGEKPYKCNDCGKAYTQRSSLTKHLVIHTGENPYHCNEFGEAFIQSSKLARYHRNPTGEKPHKCSECGRTFSHKTSLVYHQRRHTGEMPYKCIECGKVFNSTTTLARHRRIHTGEKPYKCNECGKVFRYRSGLARHWSIHTGEKPYKCNECGKAFRVRSILLNHQMMHTGEKPYKCNECGKAFIERSNLVYHQRNHTGEKPYKCMECGKAFGRRSCLTKHQRIHSSEKPYKCNECGKSYISRSGLTKHQIKHAGENLTTKLNVERPLDVVLTSGIPK

SEQ ID NO: 10690 - protein, 3123 aa, Homo sapiens
MHHGTGPQNVQHQLQRSRACPGSEGEEQPAHPNPPPSPAAPFAPSASPSAPQSPSYQIQQLMNRSPATGQNVNITLQSVGPVVGGNQQITLAPLPLPSPTSPGFQFSAQPRRFEHGSPSYIQVTSPLSQQVQTQSPTQPSPGPGQALQNVRAGAPGPGLGLCSSSPTGGFVDASVLVRQISLSPSSGGHFVFQDGSGLTQIAQGAQVQLQHPGTPITVRERRPSQPHTQSGGTIHHLGPQSPAAAGGAGLQPLASPSHITTANLPPQISSIIQGQLVQQQQVLQGPPLPRPLGFERTPGVLLPGAGGAAGFGMTSPPPPTSPSRTAVPPGLSSLPLTSVGNTGMKKVPKKLEEIPPASPEMAQMRKQCLDYHYQEMQALKEVFKEYLIELFFLQHFQGNMMDFLAFKKKHYAPLQAYLRQNDLDIEEEEEEEEEEEEKSEVINDEQQALAGSLVAGAGSTVETDLFKRQQAMPSTGMAEQSKRPRLEVGHQGVVFQHPGADAGVPLQQLMPTAQGGMPPTPQAAQLAGQRQSQQQYDPSTGPPVQNAASLHTPLPQLPGRLPPAGVPTAALSSALQFAQQPQVVEAQTQLQIPVKTQQPNVPIPAPPSSQLPIPPSQPAQLALHVPTPGKVQVQASQLSSLPQMVASTRLPVDPAPPCPRPLPTSSTSSLAPVSGSGPGPSPARSSPVNRPSSATNKALSPVTSRTPGVVASAPTKPQSPAQNATSSQDSSQDTLTEQITLENQVHQRIAELRKAGLWSQRRLPKLQEAPRPKSHWDYLLEEMQWMATDFAQERRWKVAAAKKLVRTVVRHHEEKQLREERGKKEEQSRLRRIAASTAREIECFWSNIEQVVEIKLRVELEEKRKKALNLQKVSRRGKELRPKGFDALQESSLDSGMSGRKRKASISLTDDEVDDEEETIEEEEANEGVVDHQTELSNLAKEAELPLLDLMKLYEGAFLPSSQWPRPKPDGEDTSGEEDADDCPGDRESRKDLVLIDSLFIMDQFKAAERMNIGKPNAKDIADVTAVAEAILPKGSARVTTSVKFNAPSLLYGALRDYQKIGLDWLAKLYRKNLNGILADEAGLGKTVQIIAFFAHLACNEGNWGPHLVVVRSCNILKWELELKRWCPGLKILSYIGSHRELKAKRQEWAEPNSFHVCITSYTQFFRGLTAFTRVRWKCLVIDEMQRVKGMTERHWEAVFTLQSQQRLLLIDSPLHNTFLELWTMVHFLVPGISRPYLSSPLRAPSEESQDYYHKVVIRLHRVTQPFILRRTKRDVEKQLTKKYEHVLKCRLSNRQKALYEDVILQPGTQEALKSGHFVNVLSILVRLQRICNHPGLVEPRHPGSSYVAGPLEYPSASLILKALERDFWKEADLSMFDLIGLENKITRHEAELLSKKKIPRKLMEEISTSAAPAARPAAAKLKASRLFQPVQYGQKPEGRTVAFPSTHPPRTAAPTTASAAPQGPLRGRPPIATFSANPEAKAAAAPFQTSQASASAPRHQPASASSTAASPAHPAKLRAQTTAQASTPGQPPPQPQAPSHAAGQSALPQRLVLPSQAQARLPSGEVVKIAQLASITGPQSRVAQPETPVTLQFQGSKFTLSHSQLRQLTAGQPLQLQGSVLQIVSAPGQPYLRAPGPVVMQTVSQAGAVHGALGSKPPAGGPSPAPLTPQVGVPGRVAVNALAVGEPGTASKPASPIGGPTQEEKTRLLKERLDQIYLVNERRCSQAPVYGRDLLRICALPSHGRVQWRGSLDGRRGKEAGPAHSYTSSSESPSELMLTLCRCGESLQDVIDRVAFVIPPVVAAPPSLRVPRPPPLYSHRMRILRQGLREHAAPYFQQLRQTTAPRLLQFPELRLVQFDSGKLEALAILLQKLKSEGRRVLILSQMILMLDILEMFLNFHYLTYVRIDENASSEQRQELMRSFNRDRRIFCAILSTHSRTTGINLVEADTVVFYDNDLNPVMDAKAQEWCDRIGRCKDIHIYRLVSGNSIEEKLLKNGTKDLIREVAAQGNDYSMAFLTQRTIQELFEVYSPMDDAGFPVKAEEFVVLSQEPSVTETIAPKIARPFIEALKSIEYLEEDAQKSAQEGVLGPHTDALSSDSENMPCDEEPSQLEELADFMEQLTPIEKYALNYLELFHTSIEQEKERNSEDAVMTAVRAWEFWNLKTLQEREARLRLEQEEAELLTYTREDAYSMEYVYEDVDGQTEVMPLWTPPTPPQDDSDIYLDSVMCLMYEATPIPEAKLPPVYVRKERKRHKTDPSAAGRKKKQRHGEAVVPPRSLFDRATPGLLKIRREGKEQKKNILLKQQVPFAKPLPTFAKPTAEPGQDNPEWLISEDWALLQAVKQLLELPLNLTIVSPAHTPNWDLVSDVVNSCSRIYRSSKQCRNRYENVIIPREEGKSKNNRPLRTSQIYAQDENATHTQLYTSHFDLMKMTAGKRSPPIKPLLGMNPFQKNPKHASVLAESGINYDKPLPPIQVASLRAERIAKEKKALADQQKAQQPAVAQPPPPQPQPPPPPQQPPPPLPQPQAAGSQPPAGPPAVQPQPQPQPQTQPQPVQAPAKAQPAITTGGSAAVLAGTIKTSVTGTSMPTGAVSGNVIVNTIAGVPAATFQSINKRLASPVAPGALTTPGGSAPAQVVHTQPPPRAVGSPATATPDLVSMATTQGVRAVTSVTASAVVTTNLTPVQTPARSLVPQVSQATGVQLPGKTITPAHFQLLRQQQQQQQQQQQQQQQQQQQQQQQQQQQQQTTTTSQVQVPQIQGQAQSPAQIKAVGKLTPEHLIKMQKQKLQMPPQPPPPQAQSAPPQPTAQVQVQTSQPPQQQSPQLTTVTAPRPGALLTGTTVANLQVARLTRVPTSQLQAQGQMQTQAPQPAQVALAKPPVVSVPAAVVSSPGVTTLPMNVAGISVAIGQPQKAAGQTVVAQPVHMQQLLKLKQQAVQQQKAIQPQAAQGPAAVQQKITAQQITTPGAQQKVAYAAQPALKTQFLTTPISQAQKLAGAQQVQTQIQVAKLPQVVQQQTPVASIQQVASASQQASPQTVALTQATAAGQQVQMIPAVTATAQVVQQKLIQQQVVTTASAPLQTPGAPNPAQVPASSDSPSQQPKLQMRVPAVRLKTPTKPPCQ

SEQ ID NO: 10691 - protein, 664 aa, Homo sapiens
MDSNHQSNYKLSKTEKKFLRKQIKAKHTLLRHEGIETVSYATQSLVVANGGLGNGVSRNQLLPVLEKCGLVDALLMPPNKPYSFARYRTTEESKRAYVTLNGKEVVDDLGQKITLYLNFVEKVQWKELRPQALPPGLMVVEEIISSEEEKMLLESVDWTEDTDNQNSQKSLKHRRVKHFGYEFHYENNNVDKDKPLSGGLPDICESFLEKWLRKGYIKHKPDQMTINQYEPGQGIPAHIDTHSAFEDEIVSLSLGSEIVMDFKHPDGIAVPVMLPRRSLLVMTGESRYLWTHGITCRKFDTVQASESLKSGIITSDVGDLTLSKRGLRTSFTFRKVRQTPCNCSYPLVCDSQRKETPPSFPESDKEASRLEQEYVHQVYEEIAGHFSSTRHTPWPHIVEFLKALPSGSIVADIGCGNGKYLGINKELYMIGCDRSQNLVDICRERQFQAFVCDALAVPVRSGSCDACISIAVIHHFATAERRVAALQEIVRLLRPGGKALIYVWAMEQEYNKQKSKYLRGNRNSQGKKEEMNSDTSVQRSLVEQMRDMGSRDSASSVPRINDSQEGGCNSRQVSNSKLPVHVNRTSFYSQDVLVPWHLKGNPDKGKPVEPFGPIGSQDPSPVFHRYYHVFREGELEGACRTVSDVRILQSYYDQGNWCVILQKA

SEQ ID NO: 10692 - protein, 529 aa, Homo sapiens
MVVIVVVIIIIIARAATWDSEYLVCKRKLESKKEALLILSKELDTCQQERDQYKLMANQLRERHQSLKKKYRELIDGDPSLPPEKRKQANLAQLLRDSQDRNKHLGEEIKELQQRLGEVQGDNKLLRMTIAKQRLGDEAIGVRHFAAHEREDLVQQLERAKEQIESLEHDLQASVDELQDVKEERSSYQDKVERLNQELNHILSGHENRIIDVDALCMENRYLQERLKQLHEEVNLLKSNIAKYKNALERRKNSKGQGKSSSSALTGVLSAKQVQDLLSEDHGCSLPATPQSISDLKSLATALLETIHEKNMVIQHQRQTNKILGNRVAELEKKLRTLEVSGLWSLPGGKDTILFSDPTLPSGQRSRSPLLKFVEQPTENKADPKDGEAQKQEEDESCAAAEALTAPEDAGRPAVNSPANQSRGNQCKLFHPSLPQLPSEEEVNSLGREIIKLTKEQAAAELEEVRRESPIEGQRSETGPAPPGLAIQGELPKSHLDSFEASRPAAKASTPEDGKGIPEGGGMRSTVKT

SEQ ID NO: 10693 - protein, 443 aa, Homo sapiens
MKLRSKAAALLLLALAALLLALLSLRAGRAEPPALPARPASAPQRHPAPVPARWPGPGALPGASPGVRRRRPPRPRPRAGRRGAARLEKLARRPGEPRSFQAVLPPELWIHLAVVACGNRLEETLVMLKSAVLFSHRKIQFHIFTEDSLKPEFDKQLRQWPDSYTKKFEHRIYPITFSVGNPQEWKKLFKPCAAQRLFLPVILKDVDSLLYVDTDVLFLRPVDDIWKLLRLFNSTQLAAMAPEHEIPKIGWYSRFARHPFYGSAGVNSGVMLMNLTRIRSTQFKNSMIPTGLAWEDMLYPLYQKYKNAITWGDQDLLNIIFYFNPECLYVFPCQWNYRPDHCMYGSNCREAEHEGVSVLHGNRGVYHDDKQPTFRALYEAIRDFPFQDNLFQSMYYPLQLKFLETVHTLCGRIPQVFLKQIEKTMKRAYEKHVIIHVGPNQMH

SEQ ID NO: 10694 - protein, 2970 aa, Homo sapiens
MSSGRRRGSAPWHSFSRFFAPRSPSRDKEEEEEERPGTSPPPAPGRSAASVENEPMSTSQKKENVLSSEAVKIRQSEDKRNHAEKPVTLPVQEDPKKAYDLSSSTSDTKIGESDRQPKESFFQFLGNLFNISGKSSLGEAKQSSFKDDQDKTEKDLQNPSDHHEDGIKREREIFSGSLRTQTHPTEEQDSNSSELSDAFSLDTTQDSDQETTNLLKQIDGKPEKPSVTYATYRGPRHIGKYLKQQTGLATVNTLDRENESSDSSTNRHIDPGSEIEAGVLPLLLSASTDSSMKGNLLEGPLEDSDCSKTSFNKENSLTNNPELQNIASSNNLLNKNAWGSIERNRSSPSSVTNSSYDGESDSQHHLSCEPVSQTNRNLVCSALLTGSNHRKVPCSPDFQRVTTTENTIKENSTVMSNRTLVQREELVEPQGPAISDFSCSKSDGSDTTEQESTNLPSPNKSIRHEHLQLPESECSDKQTIDSSSKQAATHTNIIALQRHAVTDTEFVNEGKRLSAQDSQKNVAVREIRRETESASAGESIASSHVKAPEDKIESLPKDTDQYFETKAKKLDFRSHDKIPHIRMNKKDLASLNYISESAVVASLGNENAPELKFELNRSHISETPLDSESPQQAEVSPDAKTSLSLDCKKLNFSISPPTFVSGVGMLSKLDIPDLMNEGSPVPIETGNVNIVGISYQPRKCKEENVKNHVEAAGRKSPPPSFCLEYTSAIFEFKEVLSNSEKCQVLPGSEASGPHLTGLELLSFDSGNLSKDCSSILSQDPNRVELVSSNTKANMSIIEKSDSLSLEAKTANIVSKAEIDGQNNVLVESHSGRGKTISLSKVSLSKVEPRNISQDKMSSFPLKITHVPEKPILSELTFLEVEQGKRFQSINHNEIGEKCSDAGLKENCQAELSPAASKYEDKPEPEVDALGSPPALLKSNISWILPPIHDEKISRQMAQNCEAHTCVFHQSLDICGTKKISGHSEMAELSLTNISPKFQETGSMKVNSPFLDSDSSLEKNSSASEDSSFLKVPSVLKLEKKSSSYRKKENIHFLNGGIDSVSSSSSYPEEVSMIVNSHKPQNNLDSIQVTKDLTHEGTSVTNLLYPTTSYLEFETSVSIGTEVTPFQEHFGIYTGKISIDFPTAAQFDNLVEAETGAVAGPAASVNSSGQQCSEASAEHIEARRRAHDQLLDLKSSLLKKADTLIGEIFNSVREELKFKHTVSTCQEHIAIEGIMNLGTLKEDISEKNPSEVTLTEIQQTEGLEEQGMENMSEVKEKPCVSPTVGEKNLLVDPNSMNVSCLLEDKARELVNEIIYVAQEKLRNDTFEDTEDTWDSELQANTSKILNSDSVKPHDVVREFLVSEQPVNQSTQISENKVLNEFFSLSNLASGTESIKGGEIVLYQKSLFSGNGSGLSDSINLQESDTVLLAEDMSHKRLDDRVKTHLFRSEDCNETMEIENVDNNKTETEDRRTLVLNFKWPPLVNDDIHAPGTSKSSLSDSLVCISEKNLPGHSKNTPLAMSDVGKVHKKDNEINIGKIELIPSMLETGKTNKKDAELNILKYEAVPPMIEMGRIHKMDAELNVTKTEPKANVFKMGEVYQMDAESCIEKTEGSAVILGMEKAYKMKDTEGDIGKIEVIPMMPEVKNIHQKDAEGDIVKTEMTPVTVDMENIYQTHAEGDIGKTGTIALSEVENIHQKGGEGISEKAEVIPVTLAMENTYQKDAEGDIGKAEVMPVRLEMENTYPKDTERDGGKTEVMPLALEVVNTYQKNAKGFTGNTEGSVLKMEATYRKTAEEVIKNTEIVPCVLKVKEAHETAPAPLEMEKACKRDVKETIGATVSTPSVIEMEKISPEDRGENIGKHKVLPAVVDIEKIHGTGLELTTKQGEAMLPAFESKTPQEYAEGSVEETKEEPTEIKEGLIAHENRLPTYFRGYESPTLSKDYEGYPAPAMPDFQPGDTTVRLDKRMSLTAIYDKRRETDYSDKGYNLAFVSQDEQENSSFTILYEEPLQEEDKYASAEARQTQSVLFHDTSADSMPVLACERSESRTDLVHHFEKGTKLGETFDSDSSEMFLSVEAKRYKIYPLALSPIYEDDSSQEDILSSEVSPGHHGPRKSRDSENQSSSVLSLLQSVSERLKMNFDEDDREAADEEEEEEEAAVLHKGDLRAGSGERVTFQLPDPSITFYPDDQESVGISKNSYVMPNEPTTSNLQVGLWPEKTSFLQKSDLTSKLHSSLKSAYHQYLQTSQSHSSEKGARFGGIFQEPVSKYFRVQDSPGRLSPFIENVDKQTLRCNPRPGKMVIYDLHESTYKQEVYCNIPDATSWSFPNGVLIKVVRGCWILYEKPHFRGQKCVLEEGEKVLNRDWILQNRRHPQRNFILGSLKRVLKDCSIPEIELFPQSDPACCPVYIQRAVPNLEELNISKSVSFTVKSGVWLAYPDINFKGQATVLEEDHGLFEISTAEMKSLHPLQMGGLKVEMPMNLKVIIYEKPHFHGQAKEFSEHIDSVPNFLKNNGDFHRIGSIRVIGGVWVAYEKEHFKGQQFLLEEGDFEDSNACGALSSPILSFRYLQANFIESSVTLFESDLESGKFIDITNQEISDLEEIGFGSKTRSIHVKSGVWVAYQQKFFCGEQYILEKGKYKCFFDWGGSNNIIMSIRPIQLEPLGINEPPHLLKAFSKPGFQGECIDFTEETSDLTSLMPCSFKVLRGCWLLYYQEDMFVNHCVLEEGLYADLTSCGCPASKVKSLKPIDYVFEEPSISLFALEHCEGRELHLEEAVNSVLNKDLHFYTQSVWVKSGLWIAYEGSNFLGRQILLRPNEIPNWTAFSRWKTIGSLRPMKQPAVYIRIKNRAQGEYLTVTGSLADTRATSVCISPYSGKNTQIWYYCRGLFKSKASDTCLDVIGGRDTPGAKVALWTEHGQFRQKWRLNKNGTISSYLSDQLVLDVKGGNYCDKTHVIVNQPLEGEETQKWDIEIL

SEQ ID NO: 10695 - protein, 1573 aa, Homo sapiens
MRVLACLLAALVGIQAVERLRLADGPHGCAGRLEVWHGGRWGTVCDDGWDLRDAAVACRQLGCGGALAAPGGAFFGEGAGPVWLSELACRGNEGQLGLCHHRGWKAHICSHEEDAGVVCAGQRVANSRDDSTSPLDGAPWPGLLLELSPSTEEPLVTHAPRPAGNPQNASRKKSPRPKQAKSTRAPLLTTGAPRQERLRLVSGPHRCAGRLEVWHGGRWGTVCDDGWDLRDAAVACRELGCGGALAAPGGARFGPGAGPVWMDDVGCGGGEQALRDCPRSPWGRSNCDHSEDAGLVCTGPAPRLRLADGPHGCAGRLEVWHGGRWGSVCDDAWDLRDAAVACRELGCGGALAAPGGAFFGEGSGPIILDDLRCRGNETALRFCPARPWGQHDCHHREDAGAVCDGMPLGYVPPTAPTDSNNSTPREAASRPPSTMTSQAPGTAGVSPPPASPTVLWEPGPEAGSPQLRLVAGPSKCSGRLEVWHDQRWGTVCDDSWDMRDSAVVCRELGCGGPQQPDPAAGRFGWGAGPIWLDDVGCVGTEASLSDCPAAPWGKHNCAHNEDVGVTCTGPPGLDSISDPFSWSWIPGLGRDRDAWLPGELATKPSASVTASVLEKTTTKAPGKMPKSTKKWVTKNAKRPTTQPPVMPTTKHSRAQSPPDLTSQTTAALTTEASRRPTSEFTRRPTTEAPQRWTSHTTATLTPQAPRERTTKTMAMLTTQGPQEMTSESTIKSIPQASLEPSAEIPEGSPESPKDPAPSPSVSTTGESGLFRVRLADGPNRCAGRLEVWHAGRWGTVCDDNWDLRDATVACWELGCGKVRPRVGKTHYGPGTGPIWLDDMGCKGSEASLSDCPSGAWGKHNCDHEEDVGLTCTGYTDYDDYPPWTWDPTSREDLAKGTTTAGVPGHTLPWRTTRRPGSSSPAIRRLPDTGSKDGYKLPWTWDTPSGRGLAEGTPTAGKLGPTLGAGTTRSPGSPPTLRVHGDTGSPRKPWPERRPPRPAATRTAPPTPSPGPSASPGPPGPALTSDSSRELTPHSALTSEATSDAPDTSPPTPDPASRTNPDLILTSPDFALSTPDSSVVPALTPEPSPTPLPTLPKELTSDPSTPSEVTSLSPTSEQVPESDTTPDLDTTPYSSTVSEYSRSPDPSPSPHPTTTPDPTMAPDPITTLNPTVTPHFPTTPHPTTTPHPTTITHSTMIPDPTTTPQPFTTITHSTMIPDPTTTPQPFTTMQPTTTPHSTTPHPTTTPHPTTITHSTMIPDPTTTPQPFTTMQPTTMPHPTTTPHPTTTPHPTTTPHPTTTPHPTMTPDPTTTPYPTTTPDPTTTPHPTTPDPSSTPVITTVSLPTSLGTELSSPTLAPTVKPSLHPQLTFTAPAPHTSTSQIPTLEPSPALESSPSRSSTATSMDPLSTEDFKPPRSQSPNLTPPPTHTPHSASDLTVSPDPLLSPTAHPLDHPPLDPLTLGPTPGQSPGPHGPCVAPTPPVRVMACEPPALVELVAAVRDVGGQLQRLTQVVEQERQERQALLLGLTQLVEAARGLGQLGEAVKRLAEMAWTTSMPAPTTTTPEEEERPLRGDV

SEQ ID NO: 10696 - protein, 694 aa, Homo sapiens
MPSATSHSGSGSKSSGPPPPSGSSGSEAAAGAGAAAPASQHPATGTGAVQTEAMKQILGVIDKKLRNLEKKKGKLDDYQERMNKGERLNQDQLDAVSKYQEVTNNLEFAKELQRSFMALSQDIQKTIKKTARREQLMREEAEQKRLKTVLELQYVLDKLGDDEVRTDLKQGLNGVPILSEEELSLLDEFYKLVDPERDMSLRLNEQYEHASIHLWDLLEGKEKPVCGTTYKVLKEIVERVFQSNYFDSTHNHQNGLCEEEEAASAPAVEDQVPEAEPEPAEEYTEQSEVESTEYVNRQFMAETQFTSGEKEQVDEWTVETVEVVNSLQQQPQAASPSVPEPHSLTPVAQADPLVRRQRVQDLMAQMQGPYNFIQDSMLDFENQTLDPAIVSAQPMNPTQNMDMPQLVCPPVHSESRLAQPNQVPVQPEATQVPLVSSTSEGYTASQPLYQPSHATEQRPQKEPIDQIQATISLNTDQTTASSSLPAASQPQVFQAGTSKPLHSSGINVNAAPFQSMQTVFNMNAPVPPVNEPETLKQQNQYQASYNQSFSSQPHQVEQTELQQEQLQTVVGTYHGSPDQSHQVTGNHQQPPQQNTGFPRSNQPYYNSRGVSRGGSRGARGLMNGYRGPANGFRGGYDGYRPSFSNTPNSGYTQSQFSAPRDYSGYQRDGYQQNFKRGSGQSGPRGAPRGNILWW

SEQ ID NO: 10697 - protein, 267 aa, Homo sapiens
MIEAEEQQPCKTDFYSELPKVELHAHLNGSISSHTMKKLIAQKPDLKIHDQMTVIDKGKKRTLEECFQMFQTIHQLTSSPEDILMVTKDVIKEFADDGVKYLELRSTPRRENATGMTKKTYVESILEGIKQSKQENLDIDVRYLIAVDRRGGPLVAKETVKLAEEFFLSTEGTVLGLDLSGDPTVGQAKDFLEPLLEAKKAGLKLALHLSEIPNQKKETQILLDLLPDRIGHGTFLNSGEGGSLDLVDFVRQHRIPLGKAWSFRSSR

SEQ ID NO: 10698 - protein, 3075 aa, Homo sapiens
MRGGVLLVLLLCVAAQCRQRGLFPAILNLASNAHISTNATCGEKGPEMFCKLVEHVPGRPVRNPQCRICDGNSANPRERHPISHAIDGTNNWWQSPSIQNGREYHWVTITLDLRQVFQVAYVIIKAANAPRPGNWILERSLDGTTFSPWQYYAVSDSECLSRYNITPRRGPPTYRADDEVICTSYYSRLVPLEHGEIHTSLINGRPSADDLSPKLLEFTSARYIRLRLQRIRTLNADLMTLSHREPKELDPIVTRRYYYSIKDISVGGMCICYGHASSCPWDETTKKLQCQCEHNTCGESCNRCCPGYHQQPWRPGTVSSGNTCEACNCHNKAKDCYYDESVAKQKKSLNTAGQFRGGGVCINCLQNTMGINCETCIDGYYRPHKVSPYEDEPCRPCNCDPVGSLSSVCIKDDLHSDLHNGKQPGQCPCKEGYTGEKCDRCQLGYKDYPTCVSCGCNPVGSASDEPCTGPCVCKENVEGKACDRCKPGFYNLKEKNPRGCSECFCFGVSDVCSSLSWPVGQVNSMSGWLVTDLISPRKIPSQQDALGGRHQVSINNTAVMQRLAPKYYWAAPEAYLGNKLTAFGGFLKYTVSYDIPVETVDSNLMSHADVIIKGNGLTLSTQAEGLSLQPYEEYLNVVRLVPENFQDFHSKRQIDRDQLMTVLANVTHLLIRANYNSAKMALYRLESVSLDIASSNAIDLVVAADVEHCECPQGYTGTSCESCLSGYYRVDGILFGGICQPCECHGHAAECNVHGVCIACAHNTTGVHCEQCLPGFYGEPSRGTPGDCQPCACPLTIASNNFSPTCHLNDGDEVVCDWCAPGYSGAWCERCADGYYGNPTVPGESCVPCDCSGNVDPSEAGHCDSVTGECLKCLGNTDGAHCERCADGFYGDAVTAKNCRACECHVKGSHSAVCHLETGLCDCKPNVTGQQCDQCLHGYYGLDSGHGCRPCNCSVAGSVSDGCTDEGQCHCVPGVAGKRCDRCAHGFYAYQDGSCTPCDCPHTQNTCDPETGECVCPPHTQGVKCEECEDGHWGYDAEVGCQACNCSLVGSTHHRCDVVTGHCQCKSKFGGRACDQCSLGYRDFPDCVPCDCDLRGTSGDACNLEQGLCGCVEETGACPCKENVFGPQCNECREGTFALRADNPLGCSPCFCSGLSHLCSELEDYVRTPVTLGSDQPLLRVVSQSNLRGTTEGVYYQAPDFLLDAATVRQHIRAEPFYWRLPQQFQGDQLMAYGGKLKYSVAFYSLDGVGTSNFEPQVLIKGGRIRKQVIYMDAPAPENGVRQEQEVAMRENFWKYFNSVSEKPVTREDFMSVLSDIEYILIKASYGQGLQQSRISDISMEVGRKAEKLHPEEEVASLLENCVCPPGTVGFSCQDCAPGYHRGKLPAGSDRGPRPLVAPCVPCSCNNHSDTCDPNTGKCLNCGDNTAGDHCDVCTSGYYGKVTGSASDCALCACPHSPPASFSPTCVLEGDHDFRCDACLLGYEGKHCERCSSSYYGNPQTPGGSCQKCDCNPHGSVHGDCDRTSGQCVCRLGASGLRCDECEPRHILMETDCVSCDDECVGVLLNDLDEIGDAVLSLNLTGIIPVPYGILSNLENTTKYLQESLLKENMQKDLGKIKLEGVAEETDNLQKKLTRMLASTQKVNRATERIFKESQDLAIAIERLQMSITEIMEKTTLNQTLDEDFLLPNSTLQNMQQNGTSLLEIMQIRDFTQLHQNATLELKAAEDLLSQIQENYQKPLEELEVLKEAASHVLSKHNNELKAAEALVREAEAKMQESNHLLLMVNANLREFSDKKLHVQEEQNLTSELIVQGRGLIDAAAAQTDAVQDALEHLEDHQDKLLLWSAKIRHHIDDLVMHMSQRNAVDLVYRAEDHAAEFQRLADVLYSGLENIRNVSLNATSAAYVHYNIQSLIEESEELARDAHRTVTETSLLSESLVSNGKAAVQRSSRFLKEGNNLSRKLPGIALELSELRNKTNRFQENAVEITRQTNESLLILRAIPKGIRDKGAKTKELATSASQSAVSTLRDVAGLSQELLNTSASLSRVNTTLRETHQLLQDSTMATLLAGRKVKDVEIQANLLFDRLKPLKMLEENLSRNLSEIKLLISQARKQAASIKVAVSADRDCIRAYQPQISSTNYNTLTLNVKTQEPDNLLFYLGSSTASDFLAVEMRRGRVAFLWDLGSGSTRLEFPDFPIDDNRWHSIHVARFGNIGSLSVKEMSSNQKSPTKTSKSPGTANVLDVNNSTLMFVGGLGGQIKKSPAVKVTHFKGCLGEAFLNGKSIGLWNYIEREGKCRGCFGSSQNEDPSFHFDGSGYSVVEKSLPATVTQIIMLFNTFSPNGLLLYLGSYGTKDFLSIELFRGRVKVMTDLGSGPITLLTDRRYNNGTWYKIAFQRNRKQGVLAVIDAYNTSNKETKQGETPGASSDLNRLDKDPIYVGGLPRSRVVRRGVTTKSFVGCIKNLEISRSTFDLLRNSYGVRKGCLLEPIRSVSFLKGGYIELPPKSLSPESEWLVTFATTNSSGIILAALGGDVEKRGDREEAHVPFFSVMLIGGNIEVHVNPGDGTGLRKALLHAPTGTCSDGQAHSISLVRNRRIITVQLDENNPVEMKLGTLVESRTINVSNLYVGGIPEGEGTSLLTMRRSFHGCIKNLIFNLELLDFNSAVGHEQVDLDTCWLSERPKLAPDAEDSKLLPEPRAFPEQCVVDAALEYVPGAHQFGLTQNSHFILPFNQSAVRKKLSVELSIRTFASSGLIYYMAHQNQADYAVLQLHGGRLHFMFDLGKGRTKVSHPALLSDGKWHTVKTDYVKRKGFITVDGRESPMVTVVGDGTMLDVEGLFYLGGLPSQYQARKIGNITHSIPACIGDVTVNSKQLDKDSPVSAFTVNRCYAVAQEGTYFDGSGYAALVKEGYKVQSDVNITLEFRTSSQNGVLLGISTAKVDAIGLELVDGKVLFHVNNGAGRITAAYEPKTATVLCDGKWHTLQANKSKHRITLIVDGNAVGAESPHTQSTSVDTNNPIYVGGYPAGVKQKCLRSQTSFRGCLRKLALIKSPQVQSFDFSRAFELHGVFLHSCPGTES

SEQ ID NO: 10699 - protein, 228 aa, Homo sapiens
MSVSEIFVELQGFLAAEQDIREEIRKVVQSLEQTAREILTLLQGVHQGAGFQDIPKRCLKAREHFGTVKTHLTSLKTKFPAEQYYRFHEHWRFVLQRLVFLAAFVVYLETETLVTREAVTEILGIEPDREKGFHLDVEDYLSGVLILASELSRLSVNSVTAGDYSRPLHISTFINELDSGFRLLNLKNDSLRKRYDGLKYDVKKVEEVVYDLSIRGFNKETAAACVEK

SEQ ID NO: 10700 - protein, 276 aa, Homo sapiens
MAAGFKTVEPLEYYRRFLKENCRPDGRELGEFRTTTVNIGSISTADGSALVKLGNTTVICGVKAEFAAPSTDAPDKGYVVPNVDLPPLCSSRFRSGPPGEEAQVASQFIADVIENSQIIQKEDLCISPGKLVWVLYCDLICLDYDGNILDACTFALLAALKNVQLPEVTINEETALAEVNLKKKSYLNIRTHPVATSFAVFDDTLLIVDPTGEEEHLATGTLTIVMDEEGKLCCLHKPGGSGLTGAKLQDCMSRAVTRHKEVKKLMDEVIKSMKPK

SEQ ID NO: 10701 - protein, 625 aa, Homo sapiens
MADQRMDISSTISDFMSPGPTDLLSSSLGTSGVDCNRKRKGSSTDYQESMDTDKDDPHGRLEYTEHQGRIKNAREAHSQIEKRRRDKMNSFIDELASLVPTCNAMSRKLDKLTVLRMAVQHMKTLRGATNPYTEANYKPTFLSDDELKHLILRAADGFLFVVGCDRGKILFVSESVFKILNYSQNDLIGQSLFDYLHPKDIAKVKEQLSSSDTAPRERLIDAKTGLPVKTDITPGPSRLCSGARRSFFCRMKCNRPSVKVEDKDFPSTCSKKKDRKSFCTIHSTGYLKSWPPTKMGLDEDNEPDNEGCNLSCLVAIGRLHSHVVPQPVNGEIRVKSMEYVSRHAIDGKFVFVDQRATAILAYLPQELLGTSCYEYFHQDDIGHLAECHRQVLQTREKITTNCYKFKIKDGSFITLRSRWFSFMNPWTKEVEYIVSTNTVVLANVLEGGDPTFPQLTASPHSMDSMLPSGEGGPKRTHPTVPGIPGGTRAGAGKIGRMIAEEIMEIHRIRGSSPSSCGSSPLNITSTPPPDASSPGGKKILNGGTPDIPSSGLLSGQAQENPGYPYSDSSSILGENPHIGIDMIDNDQGSSSPSNDEAAMAVIMSLLEADAGLGGPVDFSDLPWPL

SEQ ID NO: 10702 - protein, 858 aa, Homo sapiens
MDLPALLPAPTARGGQHGGGPGPLRRAPAPLGASPARRRLLLVRGPEDGGPGARPGEASGPSPPPAEDDSDGDSFLVLLEVPHGGAAAEAAGSQEAEPGSRVNLASRPEQGPSGPAAPPGPGVAPAGAVTISSQDLLVRLDRGVLALSAPPGPATAGAAAPRRAPQASGPSTPGYRCPEPQCALAFAKKHQLKVHLLTHGGGQGRRPFKCPLEGCGWAFTTSYKLKRHLQSHDKLRPFGCPVGGCGKKFTTVYNLKAHMKGHEQESLFKCEVCAERFPTHAKLSSHQRSHFEPERPYKCDFPGCEKTFITVSALFSHNRAHFREQELFSCSFPGCSKQYDKACRLKIHLRSHTGERPFICDSDSCGWTFTSMSKLLRHRRKHDDDRRFTCPVEGCGKSFTRAEHLKGHSITHLGTKPFECPVEGCCARFSARSSLYIHSKKHVQDVGAPKSRCPVSTCNRLFTSKHSMKAHMVRQHSRRQDLLPQLEAPSSLTPSSELSSPGQSELTNMDLAALFSDTPANASGSAGGSDEALNSGILTIDVTSVSSSLGGNLPANNSSLGPMEPLVLVAHSDIPPSLDSPLVLGTAATVLQQGSFSVDDVQTVSAGALGCLVALPMKNLSDDPLALTSNSNLAAHITTPTSSSTPRENASVPELLAPIKVEPDSPSRPGAVGQQEGSHGLPQSTLPSPAEQHGAQDTELSAGTGNFYLESGGSARTDYRAIQLAKEKKQRGAGSNAGASQSTQRKIKEGKMSPPHFHASQNSWLCGSLVVPSGGRPGPAPAAGVQCGAQGVQVQLVQDDPSGEGVLPSARGPATFLPFLTVDLPVYVLQEVLPSSGGPAGPEATQFPGSTINLQDLQ

SEQ ID NO: 10703 - protein, 757 aa, Homo sapiens
MAEVGRTGISYPGALLPQGFWAAVEVWLERPQVANKRLCGARLEARWSAALPCAEARGPGTSAGSEQKERGPGPGQGSPGGGPGPRSLSGPEQGTACCELEEAQGQCQQEEAQREAASVPLRDSGHPGHAEGREGDFPAADLDSLWEDFSQSLARGNSELLAFLTSSGAGSQPEAQRELDVVLRTVIPKTSPHCPLTTPRREIVVQDVLNGTITFLPLEEDDEGNLKVKMSNVYQIQLSHSKEEWFISVLIFCPERWHSDGIVYPKPTWLGEELLAKLAKWSVENKKSDFKSTLSLISIMKYSKAYQELKEKYKEMVKVWPEVTDPEKFVYEDVAIAAYLLILWEEERAERRLTARQSFVDLGCGNGLLVHILSSEGHPGRGIDVRRRKIWDMYGPQTQLEEDAITPNDKTLFPDVDWLIGNHSDELTPWIPVIAARSSYNCRFFVLPCCFFDFIGRYSRRQSKKTQYREYLDFIKEVGFTCGFHVDEDCLRIPSTKRVCLVGKSRTYPSSREASVDEKRTQYIKSRRGCPVSPPGWELSPSPRWVAAGSAGHCDGQQALDARVGCVTRAWAAEHGAGPQAEGPWLPGFHPREKAERVRNCAALPRDFIDQVVLQVANLLLGGKQLNTRSSRNGSLKTWNGGESLSLAEVANELDTETLRRLKRECGGLQTLLRNSHQVFQVVNGRVHIRDWREETLWKTKQPEAKQRLLSEACKTRLCWFFMHHPDGCALSTDCCPFAHGPAELRPPRTTPRKKIS

SEQ ID NO: 10704 - protein, 560 aa, Homo sapiens
MYDNMSTMVYIKEDKLEKLTQDEIISKTKQVIQGLEALKNEHNSILQSLLETLKCLKKDDESNLVEEKSNMIRKSLEMLELGLSEAQVMMALSNHLNAVESEKQKLRAQVRRLCQENQWLRDELANTQQKLQKSEQSVAQLEEEKKHLEFMNQLKKYDDDISPSEDKDTDSTKEPLDDLFPNDEDDPGQGIQQQHSSAAAAAQQGGYEIPARLRTLHNLVIQYASQGRYEVAVPLCKQALEDLEKTSGHDHPDVATMLNILALVYRDQNKYKDAANLLNDALAIREKTLGKDHPAVAATLNNLAVLYGKRGKYKEAEPLCKRALEIREKVLGKDHPDVAKQLNNLALLCQNQGKYEEVEYYYQRALEIYQTKLGPDDPNVAKTKNNLASCYLKQGKFKQAETLYKEILTRAHEREFGSVDDENKPIWMHAEEREECKGKQKDGTSFGEYGGWYKACKVDSPTVTTTLKNLGALYRRQGKFEAAETLEEAAMRSRKQGLDNVHKQRVAEVLNDPENMEKRRSRESLNVDVVKYESGPDGGEEVSMSVEWNGMRKMKLGLVN

SEQ ID NO: 10705 - protein, 289 aa, Homo sapiens
MSFVAYEELIKEGDTAILSLGHGAMVAVRVQRGAQTQTRHGVLRHSVDLIGRPFGSKVTCGRGGWVYVLHPTPELWTLNLPHRTQILYSTDIALITMMLELRPGSVVCESGTGSGSVSHAIIRTIAPTGHLHTVEFHQQRAEKAREEFQEHRVGRWVTVRTQDVCRSGFGVSHVADAVFLDIPSPWEAVGHAWDALKVEGGRFCSFSPCIEQVQRTCQALAARGFSELSTLEVLPQVYNVRTVSLPPPDLGTGTDGPAGSDTSPFRSGTPMKEAVGHTGYLTFATKTPG

SEQ ID NO: 10706 - protein, 1192 aa, Homo sapiens
MPAPEQASLVEEGQPQTRQEAASTGPGMEPETTATTILASVKEQELQFQRLTRELEVERQIVASQLERCRLGAESPSIASTSSTEKSFPWRSTDVPNTGVSKPRVSDAVQPNNYLIRTEPEQGTLYSPEQTSLHESEGSLGNSRSSTQMNSYSDSGYQEAGSFHNSQNVSKADNRQQHSFIGSTNNHVVRNSRAEGQTLVQPSVANRAMRRVSSVPSRAQSPSYVISTGVSPSRGSLRTSLGSGFGSPSVTDPRPLNPSAYSSTTLPAARAASPYSQRPASPTAIRRIGSVTSRQTSNPNGPTPQYQTTARVGSPLTLTDAQTRVASPSQGQVGSSSPKRSGMTAVPQHLGPSLQRTVHDMEQFGQQQYDIYERMVPPRPDSLTGLRSSYASQHSQLGQDLRSAVSPDLHITPIYEGRTYYSPVYRSPNHGTVELQGSQTALYRTGSVGIGNLQRTSSQRSTLTYQRNNYALNTTATYAEPYRPIQYRVQECNYNRLQHAVPADDGTTRSPSIDSIQKDPREFAWRDPELPEVIHMLQHQFPSVQANAAAYLQHLCFGDNKVKMEVCRLGGIKHLVDLLDHRVLEVQKNACGALRNLVFGKSTDENKIAMKNVGGIPALLRLLRKSIDAEVRELVTGVLWNLSSCDAVKMTIIRDALSTLTNTVIVPHSGWNNSSFDDDHKIKFQTSLVLRNTTGCLRNLSSAGEEARKQMRSCEGLVDSLLYVIHTCVNTSDYDSKTVENCVCTLRNLSYRLELEVPQARLLGLNELDDLLGKESPSKDSEPSCWGKKKKKKKRTPQEDQWDGVGPIPGLSKSPKGVEMLWHPSVVKPYLTLLAESSNPATLEGSAGSLQNLSAGNWKFAAYIRAAVRKEKGLPILVELLRMDNDRVVSSVATALRNMALDVRNKELIGKYAMRDLVNRLPGGNGPSVLSDETMAAICCALHEVTSKNMENAKALADSGGIEKLVNITKGRGDRSSLKVVKAAAQVLNTLWQYRDLRSIYKKDGWNQNHFITPVSTLERDRFKSHPSLSTTNQQMSPIIQSVGSTSSSPALLGIRDPRSEYDRTQPPMQYYNSQGDATHKGLYPGSSKPSPIYISSYSSPAREQNRRLQHQQLYYSQDDSNRKNFDAYRLYLQSPHSYEDPYFDDRVHFPASTDYSTQYGLKSTTNYVDFYSTKRPSYRAEQYPGSPDSWV

SEQ ID NO: 10707 - protein, 440 aa, Homo sapiens
MASLTVKAYLLGKEDAAREIRRFSFCCSPEPEAEAEAAAGPGPCERLLSRVAALFPALRPGGFQAHYRDEDGDLVAFSSDEELTMAMSYVKDDIFRIYIKEKKECRRDHRPPCAQEAPRNMVHPNVICDGCNGPVVGTRYKCSVCPDYDLCSVCEGKGLHRGHTKLAFPSPFGHLSEGFSHSRWLRKVKHGHFGWPGWEMGPPGNWSPRPPRAGEARPGPTAESASGPSEDPSVNFLKNVGESVAAALSPLGIEVDIDVEHGGKRSRLTPVSPESSSTEEKSSSQPSSCCSDPSKPGGNVEGATQSLAEQMRKIALESEGRPEEQMESDNCSGGDDDWTHLSSKEVDPSTGELQSLQMPESEGPSSLDPSQEGPTGLKEAALYPHLPPEADPRLIESLSQMLSMGFSDEGGWLTRLLQTKNYDIGAALDTIQYSKHPPPL

SEQ ID NO: 10708 - protein, 555 aa, Homo sapiens
MAAAAWLQVLPVILLLLGAHPSPLSFFSAGPATVAAADRSKWHIPIPSGKNYFSFGKILFRNTTIFLKFDGEPCDLSLNITWYLKSADCYNEIYNFKAEEVELYLEKLKEKRGLSGKYQTSSKLFQNCSELFKTQTFSGDFMHRLPLLGEKQEAKENGTNLTFIGDKTAMHEPLQTWQDAPYIFIVHIGISSSKESSKENSLSNLFTMTVEVKGPYEYLTLEDYPLMIFFMVMCIVYVLFGVLWLAWSACYWRDLLRIQFWIGAVIFLGMLEKAVFYAEFQNIRYKGESVQGALILAELLSAVKRSLARTLVIIVSLGYGIVKPRLGVTLHKVVVAGALYLLFSGMEGVLRVTGAQTDLASLAFIPLAFLDTALCWWIFISLTQTMKLLKLRRNIVKLSLYRHFTNTLILAVAASIVFIIWTTMKFRIVTCQSDWRELWVDDAIWRLLFSMILFVIMVLWRPSANNQRFAFSPLSEEEEEDEQKEPMLKESFEGMKMRSTKQEPNGNSKVNKAQEDDLKWVEENVPSSVTDVALPALLDSDEERMITHFERSKME

SEQ ID NO: 10709 - protein, 709 aa, Homo sapiens
MDQKLSKLVEELTTSGEPRLNPEKMKELKKICKSSEEQLSRAYRLLIAQLTQEHAEIRLSAFQIVEELFVRSHQFRMLVVSNFQEFLELTLGTDPAQPLPPPREAAQRLRQATTRAVEGWNEKFGEAYKKLALGYHFLRHNKKVDFQDTNARSLAERKREEEKQKHLDKIYQERASQAEREMQEMSGEIESCLTEVESCFRLLVPFDFDPNPETESLGMASGMSDALRSSCAGQVGPCRSGTPDPRDGEQPCCSRDLPASAGHPRAGGGAQPSQTATGDPSDEDEDSDLEEFVRSHGLGSHKYTLDVELCSEGLKVQENEDNLALIHAARDTLKLIRNKFLPAVCSWIQRFTRVGTHGGCLKRAIDLKAELELVLRKYKELDIEPEGGERRRTEALGDAEEDEDDEDFVEVPEKEGYEPHIPDHLRPEYGLEAAPEKDTVVRCLRTRTRMDEEVSDPTSAAAQLRQLRDHLPPPSSASPSRALPEPQEAQKLAAERARAPVVPYGVDLHYWGQELPTAGKIVKSDSQHRFWKPSEVEEEVVNADISEMLRSRHITFAGKFEPVQHWCRAPRPDGRLCERQDRLKCPFHGKIVPRDDEGRPLDPEDRAREQRRQLQKQERPEWQDPELMRDVEAATGQDLGSSRYSGKGRGKKRRYPSLTNLKAQADTARARIGRKVFAKAAVRRVVAAMNRMDQKKHEKFSNQFNYALN

SEQ ID NO: 10710 - protein, 927 aa, Homo sapiens
MPGPLGLLCFLALGLLGSAGPSGAAPPLCAAPCSCDGDRRVDCSGKGLTAVPEGLSAFTQALQLAGNDLSFIHPKALSGLKELKVLTLQNNQLKTVPSEAIRGLSALQSLRLDANHITSVPEDSFEGLVQLRHLWLDDNSLTEVPVHPLSNLPTLQALTLALNKISSIPDFAFTNLSSLVVLHLHNNKIRSLSQHCFDGLDNLETLDLNYNNLGEFPQAIKALPSLKELGFHSNSISVIPDGAFDGNPLLRTIHLYDNPLSFVGNSAFHNLSDLHSLVIRGASMVQQFPNLTGTVHLESLTLTGTKISSIPNNLCQEQKMLRTLDLSYNNIRDLPSFNGCHALEEISLQRNQIYQIKEGTFQGLISLRILDLSRNLIHEIHSRAFATLGPITNLDVSFNELTSFPTEGLNGLNQLKLVGNFKLKEALAAKDFVNLRSLSVPYAYQCCAFWGCDSYANLNTEDNSLQDHSVAQEKGTADAANVTSTLENEEHSQIIIHCTPSTGAFKPCEYLLGSWMIRLTVWFIFLVALFFNLLVILTTFASCTSLPSSKLFIGLISVSNLFMGIYTGILTFLDAVSWGRFAEFGIWWETGSGCKVAGFLAVFSSESAIFLLMLATVERSLSAKDIMKNGKSNHLKQFRVAALLAFLGATVAGCFPLFHRGEYSASPLCLPFPTGETPSLGFTVTLVLLNSLAFLLMAVIYTKLYCNLEKEDLSENSQSSMIKHVAWLIFTNCIFFCPVAFFSFAPLITAISISPEIMKSVTLIFFPLPACLNPVLYVFFNPKFKEDWKLLKRRVTKKSGSVSVSISSQGGCLEQDFYYDCGMYSHLQGNLTVCDCCESFLLTKPVSCKHLIKSHSCPALAVASCQRPEGYWSDCGTQSAHSDYADEEDSFVSDSSDQVQACGRACFYQSRGFPLVRYAYNLPRVKD

SEQ ID NO: 10711 - protein, 580 aa, Homo sapiens
MKENKENSSPSVTSANLDHTKPCWYWDKKDLAHTPSQLEGLDPATEARYRREGARFIFDVGTRLGLHYDTLATGIIYFHRFYMFHSFKQFPRYVTGACCLFLAGKVEETPKKCKDIIKTARSLLNDVQFGQFGDDPKEEVMVLERILLQTIKFDLQVEHPYQFLLKYAKQLKGDKNKIQKLVQMAWTFVNDSLCTTLSLQWEPEIIAVAVMYLAGRLCKFEIQEWTSKPMYRRWWEQFVQDVPVDVLEDICHQILDLYSQGKQQMPHHTPHQLQQPPSLQPTPQVPQVQQSQPSQSSEPSQPQQKDPQQPAQQQQPAQQPKKPSPQPSSPRQVKRAVVVSPKEENKAAEPPPPKIPKIETTHPPLPPAHPPPDRKPPLAAALGEAEPPGPVDATDLPKVQIPPPAHPAPVHQPPPLPHRPPPPPPSSYMTGMSTTSSYMSGEGYQSLQSMMKTEGPSYGALPPAYGPPAHLPYHPHVYPPNPPPPPVPPPPASFPPPAIPPPTPGYPPPPPTYNPNFPPPPPRLPPTHAVPPHPPPGLGLPPASYPPPAVPPGGQPPVPPPIPPPGMPPVGGLGRAAWMR

SEQ ID NO: 10712 - protein, 923 aa, Homo sapiens
MEEGNNNEEVIHLNNFHCHRGQEWINLRDGPITISDSSDEERIPMLVTPAPQQHEEEDLDDDVILTETNKPQRSRPNLIKPAAQWQDLKRLGEERPKKSRAAFESDKSSYFSVCNNPLFDSGAQDDSEDDYGEFLDLGPPGISEFTKPSGQTEREPKPGPSHNQAANDIVNPRSEQKVIILEEGSLLYTESDPLETQNQSSEDSETELLSNLGESAALADDQAIEEDCWLDHPYFQSLNQQPREITNQVVPQERQPEAELGRLLFQHEFPGPAFPRPEPQQGGISGPSSPQPAHPLGEFEDQQLASDDEEPGPAFPMQESQEPNLENIWGQEAAEVDQELVELLVKETEARFPDVANGFIEEIIHFKNYYDLNVLCNFLLENPDYPKREDRIIINPSSSLLASQDETKLPKIDFFDYSKLTPLDQRCFIQAADLLMADFKVLSSQDIKWALHELKGHYAITRKALSDAIKKWQELSPETSGKRKKRKQMNQYSYIDFKFEQGDIKIEKRMFFLENKRRHCRSYDRRALLPAVQQEQEFYEQKIKEMAEHEDFLLALQMNEEQYQKDGQLIECRCCYGEFPFEELTQCADAHLFCKECLIRYAQEAVFGSGKLELSCMEGSCTCSFPTSELEKVLPQTILYKYYERKAEEEVAAAYADELVRCPSCSFPALLDSDVKRFSCPNPHCRKETCRKCQGLWKEHNGLTCEELAEKDDIKYRTSIEEKMTAARIRKCHKCGTGLIKSEGCNRMSCRCGAQMCYLCRVSINGYDHFCQHPRSPGAPCQECSRCSLWTDPTEDDEKLIEEIQKEAEEEQKRKNGENTFKRIGPPLEKPVEKVQRVEALPRPVPQNLPQPQMPPYAFAHPPFPLPPVRPVFNNFPLNMGPIPAPYVPPLPNVRVNYDFGPIHMPLEHNLPMHFGPQPRHRF

SEQ ID NO: 10713 - protein, 106 aa, Homo sapiens
MFAPAVMRAFRKNKTLGYGVPMLLLIVGGSFGLREFSQIRYDAVKSKMDPELEKKLKENKISLESEYEKIKDSKFDDWKNIRGPRPWEDPDLLQGRNPESLKTKTT

SEQ ID NO: 10714 - protein, 195 aa, Homo sapiens
MNPVYSPGSSGVPYANAKGIGYPAGFPMGYAAAAPAYSPNMYPGANPTFQTGYTPGTPYKVSCSPTSGAVPPYSSSPNPYQTAVYPVRSAYPQQSPYAQQGTYYTQPLYAAPPHVIHHTTVVQPNGMPATVYPAPIPPPRGNGVTMGMVAGTTMAMSAGTLLTAHSPTPVAPHPVTVPTYRAPGTPTYSYVPPQW

SEQ ID NO: 10715 - protein, 938 aa, Homo sapiens
MNWNKGGPGTKRGFGFGGFAISAGKKEEPKLPQQSHSAFGATSSSSGFGKSAPPQLPSFYKIGSKRANFDEENAYFEDEEEDSSNVDLPYIPAENSPTRQQFHSKPVDSDSDDDPLEAFMAEVEDQAARDMKRLEEKDKERKNVKGIRDDIEEEDDQEAYFRYMAENPTAGVVQEEEEDNLEYDSDGNPIAPTKKIIDPLPPIDHSEIDYPPFEKNFYNEHEEITNLTPQQLIDLRHKLNLRVSGAAPPRPGSSFAHFGFDEQLMHQIRKSEYTQPTPIQCQGVPVALSGRDMIGIAKTGSGKTAAFIWPMLIHIMDQKELEPGDGPIAVIVCPTRELCQQIHAECKRFGKAYNLRSVAVYGGGSMWEQAKALQEGAEIVVCTPGRLIDHVKKKATNLQRVSYLVFDEADRMFDMGFEYQVRSIASHVRPDRQTLLFSATFRKKIEKLARDILIDPIRVVQGDIGEANEDVTQIVEILHSGPSKWNWLTRRLVEFTSSGSVLLFVTKKANAEELANNLKQEGHNLGLLHGDMDQSERNKVISDFKKKDIPVLVATDVAARGLDIPSIKTVINYDVARDIDTHTHRIGRTGRAGEKGVAYTLLTPKDSNFAGDLVRNLEGANQHVSKELLDLAMQNAWFRKSRFKGGKGKKLNIGGGGLGYRERPGLGSENMDRGNNNVMSNYEAYKPSTGAMGDRLTAMKAAFQSQYKSHFVAASLSNQKAGSSAAGASGWTSAGSLNSVPTNSAQQGHNSPDSPVTSAAKGIPGFGNTGNISGAPVTYPSAGAQGVNNTASGNNSREGTGGSNGKRERYTENRGSSRHSHGETGNRHSDSPRHGDGGRHGDGYRHPESSSRHTDGHRHGENRHGGSAGRHGENRGANDGRNGESRKEAFNRESKMEPKMEPKVDSSKMDKVDSKTDKTADGFAVPEPPKRKKSRWDS

SEQ ID NO: 10716 - protein, 155 aa, Homo sapiens
MEREPAGTEEPGPPGRRRRREGRTRTVRSNLLPPPGAEDPAAGAAKGERRRRRGCAQHLADNRLKTTKYTLLSFLPKNLFEQFHRPANVYFVFIALLNFVPAVNAFQPGLALAPVLFILAITAFRDLWEDYSRHRSDHKINHLGCLVFSSRSHLK

SEQ ID NO: 10717 - protein, 678 aa, Homo sapiens
MRTVVLTMKASVIEMFLVLLVTGVHSNKETAKKIKRPKFTVPQINCDVKAGKIIDPEFIVKCPAGCQDPKYHVYGTDVYASYSSVCGAAVHSGVLDNSGGKILVRKVAGQSGYKGSYSNGVQSLSLPRWRESFIVLESKPKKGVTYPSALTYSSSKSPAAQAGETTKAYQRPPIPGTTAQPVTLMQLLAVTVAVATPTTLPRPSPSAASTTSIPRPQSVGHRSQEMDLWSTATYTSSQNRPRADPGIQRQDPSGAAFQKPVGADVSLGLVPKEELSTQSLEPVSLGDPNCKIDLSFLIDGSTSIGKRRFRIQKQLLADVAQALDIGPAGPLMGVVQYGDNPATHFNLKTHTNSRDLKTAIEKITQRGGLSNVGRAISFVTKNFFSKANGNRSGAPNVVVVMVDGWPTDKVEEASRLARESGINIFFITIEGAAENEKQYVVEPNFANKAVCRTNGFYSLHVQSWFGLHKTLQPLVKRVCDTDRLACSKTCLNSADIGFVIDGSSSVGTGNFRTVLQFVTNLTKEFEISDTDTRIGAVQYTYEQRLEFGFDKYSSKPDILNAIKRVGYWSGGTSTGAAINFALEQLFKKSKPNKRKLMILITDGRSYDDVRIPAMAAHLKGVITYAIGVAWAAQEELEVIATHPARDHSFFVDEFDNLHQYVPRIIQNICTEFNSQPRN

SEQ ID NO: 10718 - protein, 203 aa, Homo sapiens
MWRLALGGVFLAAAQACVFCRLPAHDLSGRLARLCSQMEARQKECGASPDFSAFALDEVSMNKVTEKTHRVLRVMEIKEAVSSLPSYWSWLRKTKLPEYTREALCPPACRGSTTLYNCSTCKGTEVSCWPRKRCFPGSLGSQDSAPLHLRSFPASGCSEPPGGVPPPPSKKWLVKTLKTSQPPALRGMHSQLPHPLEGNQSAP

SEQ ID NO: 10719 - protein, 397 aa, Homo sapiens
MTAEEGVQLSQQNAKDFFRVLNLNKKCDTSKHKVLVVSVCPQSLPYFAAKFNLSVTDASRRLCGFLKSLGVHYVFDTTIAADFSILESQKEFVRRYRQHSEEERTLPMLTSACPGWVRYAERVLGRPITAHLCTAKSPQQVMGSLVKDYFARQQNLSPEKIFHVIVAPCYDKKLEALQESLPPALHGSRGADCVLTSGEIAQIMEQGDLSVRDAAVDTLFGDLKEDKVTRHDGASSDGHLAHIFRHAAKELFNEDVEEVTYRALRNKDFQEVTLEKNGEVVLRFAAAYGFRNIQNMILKLKKGKFPFHFVEVLACAGGCLNGRGQAQTPDGHADKALLRQMEGIYADIPVRRPESSAHVQELYQEWLEGINSPKAREVLHTTYQSQERGTHSLDIKW

SEQ ID NO: 10720 - protein, 121 aa, Homo sapiens
MVLQTQVFISLLLWISGAYGDIVMTQSPDSLAVSLGERATINCKSSQSVLYSSNNKNYLAWYQQKPGQPPKLLIYWASTRESGVPDRFSGSGSGTDFTLTISSLQAEDVAVYYCQQYYSTP

SEQ ID NO: 10721 - protein, 115 aa, Homo sapiens
MGSQVHLLSFLLLWISDTRAETTLTQSPAFMSATPGDKVNISCKASQDIDDDMNWYQQKPGEAAIFIIQEATTLVPGIPPRFSGSGYGTDFTLTINNIESEDAAYYFCLQHDNFP

SEQ ID NO: 10722 - protein, 116 aa, Homo sapiens
MEAPAQLLFLLLLWLPDTTREIVMTQSPPTLSLSPGERVTLSCRASQSVSSSYLTWYQQKPGQAPRLLIYGASTRATSIPARFSGSGSGTDFTLTISSLQPEDFAVYYCQQDYNLP

SEQ ID NO: 10723 - protein, 115 aa, Homo sapiens
MEAPAQLLFLLLLWLPDTTGEIVMTQSPATLSVSPGERATLSCRASQSVSSNLAWYQQKPGQAPRLLIYGASTRATGIPARFSGSGSGTEFTLTISSLQSEDFAVYYCQQYNNWP

SEQ ID NO: 10724 - protein, 114 aa, Homo sapiens
MLPSQLIGFLLLWVPASRGEIVLTQSPDFQSVTPKEKVTITCRASQSIGSSLHWYQQKPDQSPKLLIKYASQSFSGVPSRFSGSGSGTDFTLTINSLEAEDAATYYCHQSSSLP

SEQ ID NO: 10725 - protein, 117 aa, Homo sapiens
MDMRVPAQLLGLLLLWLSGARCDIQMTQSPSSLSASVGDRVTITCQASQDISNYLNWYQQKPGKAPKLLIYDASNLETGVPSRFSGSGSGTDFTFTISSLQPEDIATYYCQQYDNLP

SEQ ID NO: 10726 - protein, 120 aa, Homo sapiens
MRLPAQLLGLLMLWVPGSSAEIVMTQTPLSLSITPGEQASMSCRSSQSLLHSDGYTYLYWFLQKARPVSTLLIYEVSNRFSGVPDRFSGSGSGTDFTLKISRVEAEDFGVYYCMQDAQDP

SEQ ID NO: 10727 - protein, 116 aa, Homo sapiens
METPAQLLFLLLLWLPDTTGEIVLTQSPATLSLSPGERATLSCGASQSVSSSYLAWYQQKPGLAPRLLIYDASSRATGIPDRFSGSGSGTDFTLTISRLEPEDFAVYYCQQYGSSP

SEQ ID NO: 10728 - protein, 115 aa, Homo sapiens
MVSPLQFLRLLLLWVPASRGDVVMTQSPAFLSVTPGEKVTITCQASEGIGNYLYWYQQKPDQAPKLLIKYASQSISGVPSRFSGSGSGTDFTFTISSLEAEDAATYYCQQGNKHP

SEQ ID NO: 10729 - protein, 115 aa, Homo sapiens
MEAPAQLLFLLLLWLPDTTGEIVLTQSPATLSLSPGERATLSCRASQSVSSYLAWYQQKPGQAPRLLIYDASNRATGIPARFSGSGPGTDFTLTISSLEPEDFAVYYCQQRSNWH

SEQ ID NO: 10730 - protein, 117 aa, Homo sapiens
MDMRVPAQLLGLLLLWLPGVRFDIQMTQSPSFLSASVGDRVSIICWASEGISSNLAWYLQKPGKSPKLFLYDAKDLHPGVSSRFSGRGSGTDFTLTIISLKPEDFAAYYCKQDFSYP

SEQ ID NO: 10731 - protein, 119 aa, Homo sapiens
MAWTPLLFLTLLLHCTGSLSQLVLTQSPSASASLGASVKLTCTLSSGHSSYAIAWHQQQPEKGPRYLMKLNSDGSHSKGDGIPDRFSGSSSGAERYLTISSLQSEDEADYYCQTWGTGI

SEQ ID NO: 10732 - protein, 122 aa, Homo sapiens
MSVPTMAWMMLLLGLLAYGSGVDSQTVVTQEPSFSVSPGGTVTLTCGLSSGSVSTSYYPSWYQQTPGQAPRTLIYSTNTRSSGVPDRFSGSILGNKAALTITGAQADDESDYYCVLYMGSGI

SEQ ID NO: 10733 - protein, 120 aa, Homo sapiens
MAWTPLLLLFPLLLHCTGSLSQPVLTQSSSASASLGSSVKLTCTLSSGHSSYIIAWHQQQPGKAPRYLMKLEGSGSYNKGSGVPDRFSGSSSGADRYLTISNLQFEDEADYYCETWDSNT

SEQ ID NO: 10734 - protein, 117 aa, Homo sapiens
MAWAPLLLTLLAHCTGSWANFMLTQPHSVSESPGKTVTISCTGSSGSIASNYVQWYQQRPGSAPTTVIYEDNQRPSGVPDRFSGSIDSSSNSASLTISGLKTEDEADYYCQSYDSSN

SEQ ID NO: 10735 - protein, 123 aa, Homo sapiens
MALTPLLLLLLSHCTGSLSRPVLTQPPSLSASPGATARLPCTLSSDLSVGGKNMFWYQQKLGSSPRLFLYHYSDSDKQLGPGVPSRVSGSKETSSNTAFLLISGLQPEDEADYYCQVYESSAN

SEQ ID NO: 10736 - protein, 117 aa, Homo sapiens
MPWALLLLTLLTHSAVSVVQAGLTQPPSVSKGLRQTATLTCTGNSNIVGNQGAAWLQQHQGHPPKLLSYRNNNRPSGISERFSASRSGNTASLTITGLQPEDEADYYCSALDSSLSA

SEQ ID NO: 10737 - protein, 124 aa, Homo sapiens
MAWTLLLLVLLSHCTGSLSQPVLTQPSSHSASSGASVRLTCMLSSGFSVGDFWIRWYQQKPGNPPRYLLYYHSDSNKGQGSGVPSRFSGSNDASANAGILRISGLQPEDEADYYCGTWHSNSKT

SEQ ID NO: 10738 - protein, 117 aa, Homo sapiens
MTCSPLLLTLLIHCTGSWAQSVLTQPPSVSAAPGQKVTISCSGSSSNIGNNYVSWYQQLPGTAPKLLIYDNNKRPSGIPDRFSGSKSGTSATLGITGLQTGDEADYYCGTWDSSLSA

SEQ ID NO: 10739 - protein, 118 aa, Homo sapiens
MAWSSLLLTLLAHCTGSWAQSVLTQPPSVSGAPGQRVTISCTGSSSNIGAGYVVHWYQQLPGTAPKLLIYGNSNRPSGVPDQFSGSKSGTSASLAITGLQSEDEADYYCKAWDNSLNA

SEQ ID NO: 10740 - protein, 105 aa, Homo sapiens
MAWTPLLLLFLSHCTGSLSQAVLTQPTSLSASPGASARLTCTLRSGISVGSYRIYWYQQKPGSPPRYLLNYYSDSDKHQGSGVPSRFSGSKDASTNAGILFISGL

SEQ ID NO: 10741 - protein, 117 aa, Homo sapiens
MAGFPLLLTLLTHCAGSWAQSVLTQPPSASGTPGQRVTISCSGSSSNIGSNYVYWYQQLPGTAPKLLIYSNNQRPSGVPDRFSGSKSGTSASLAISGLRSEDEADYYCAAWDDSLSG

SEQ ID NO: 10742 - protein, 117 aa, Homo sapiens
MAWTPLFLFLLTCCPGSNSQAVVTQEPSLTVSPGGTVTLTCGSSTGAVTSGHYPYWFQQKPGQAPRTLIYDTSNKHSWTPARFSGSLLGGKAALTLLGAQPEDEAEYYCLLSYSGAR

SEQ ID NO: 10743 - protein, 123 aa, Homo sapiens
MAWTPLLLLFLSHCTGSLSQAVLTQPSSLSASPGASASLTCTLCSGINVGTYRIYWYQQKPGSPPQYLLRYKSDSDKQQGSGVPSRFSGSKDASANAGILLISGLQSEDEADYYCMIWHSSAS

SEQ ID NO: 10744 - protein, 117 aa, Homo sapiens
MASFPLLLTLLTHCAGSWAQSVLTQPPSASGTPGQRVTISCSGSSSNIGSNTVNWYQQLPGTAPKLLIYSNNQRPSGVPDRFSGSKSGTSASLAISGLQSEDEADYYCAAWDDSLNG

SEQ ID NO: 10745 - protein, 117 aa, Homo sapiens
MAWTPLFLFLLTCCPGSNSQTVVTQEPSLTVSPGGTVTLTCASSTGAVTSGYYPNWFQQKPGQAPRALIYSTSNKHSWTPARFSGSLLGGKAALTLSGVQPEDEAEYYCLLYYGGAQ

SEQ ID NO: 10746 - protein, 118 aa, Homo sapiens
MAWSPLLLTLLAHCTGSWAQSVLTQPPSVSGAPGQRVTISCTGSSSNIGAGYDVHWYQQLPGTAPKLLIYGNSNRPSGVPDRFSGSKSGTSASLAITGLQAEDEADYYCQSYDSSLSG

SEQ ID NO: 10747 - protein, 123 aa, Homo sapiens
MAWTPLLLLLLSHCTGSLSQPVLTQPPSSSASPGESARLTCTLPSDINVGSYNIYWYQQKPGSPPRYLLYYYSDSDKGQGSGVPSRFSGSKDASANTGILLISGLQSEDEADYYCMIWPSNAS

SEQ ID NO: 10748 - protein, 117 aa, Homo sapiens
MAWSPLFLTLITHCAGSWAQSVLTQPPSVSEAPRQRVTISCSGSSSNIGNNAVNWYQQLPGKAPKLLIYYDDLLPSGVSDRFSGSKSGTSASLAISGLQSEDEADYYCAAWDDSLNG

SEQ ID NO: 10749 - protein, 118 aa, Homo sapiens
MAWALLLLTLLTQGTGSWAQSALTQPPFVSGAPGQSVTISCTGTSSDVGDYDHVFWYQKRLSTTSRLLIYNVNTRPSGISDLFSGSKSGNMASLTISGLKSEVEANYHCSLYSSSYTF

SEQ ID NO: 10750 - protein, 114 aa, Homo sapiens
MAWTPPLLVLTLCTGSVISSGPTQVPAVSVALGQMARITCQGDSMEGSYEHWYQQKPGQAPVLVIYDSSDRPSRIPERFSGSKSGNTTTLTITGAQAEDEADYYYQLIDNHATQ

SEQ ID NO: 10751 - protein, 113 aa, Homo sapiens
MAWIPLLLPLLILCTVSVASYELTQPSSVSVSPGQTARITCSGDVLAKKYARWFQQKPGQAPVLVIYKDSERPSGIPERFSGSSSGTTVTLTISGAQVEDEADYYCYSAADNN

SEQ ID NO: 10752 - protein, 112 aa, Homo sapiens
MAWIPLLLPLLTLCTGSEASYELTQPPSVSVSPGQTARITCSGDALPKQYAYWYQQKPGQAPVLVIYKDSERPSGIPERFSGSSSGTTVTLTISGVQAEDEADYYCQSADSS

SEQ ID NO: 10753 - protein, 113 aa, Homo sapiens
MAWALLLLTLLTQDTGSWAQSALTQPASVSGSPGQSITISCTGTSSDVGSYNLVSWYQQHPGKAPKLMIYEGSKRPSGVSNRFSGSKSGNTASLTISGLQAEDEADYYCCSYA

SEQ ID NO: 10754 - protein, 115 aa, Homo sapiens
MAWATLLLPLLNLYTGSVASYELTQLPSVSVSPGQTARITCSGDVLGENYADWYQQKPGQAPELVIYEDSERYPGIPERFSGSTSGNTTTLTISRVLTEDEADYYCLSGDEDNPS

SEQ ID NO: 10755 - protein, 117 aa, Homo sapiens
MAWTVLLLGLLSHCTGSVTSYVLTQPPSVSVAPGQTARITCGGNNIGSKSVHWYQQKPGQAPVLVVYDDSDRPSGIPERFSGSNSGNTATLTISRVEAGDEADYYCQVWDSSSDHPT

SEQ ID NO: 10756 - protein, 112 aa, Homo sapiens
MAWTPLWLTLLTLCIGSVVSSELTQDPAVSVALGQTVRITCQGDSLRSYYASWYQQKPGQAPVLVIYGKNNRPSGIPDRFSGSSSGNTASLTITGAQAEDEADYYCNSRDSS

SEQ ID NO: 10757 - protein, 118 aa, Homo sapiens
MAWALLLLTLLTQGTGSWAQSALTQPPSVSGSPGQSVTISCTGTSSDVGSYNRVSWYQQPPGTAPKLMIYEVSNRPSGVPDRFSGSKSGNTASLTISGLQAEDEADYYCSLYTSSSTF

SEQ ID NO: 10758 - protein, 115 aa, Homo sapiens
MAWIPLLLPLLTLCTGSEASYELTQPPSVSVSLGQMARITCSGEALPKKYAYWYQQKPGQFPVLVIYKDSERPSGIPERFSGSSSGTIVTLTISGVQAEDEADYYCLSADSSGTY

SEQ ID NO: 10759 - protein, 120 aa, Homo sapiens
MAWALLLLTLLTQGTGSWAQSALTQPASVSGSPGQSITISCTGTSSDVGGYNYVSWYQQHPGKAPKLMIYEVSNRPSGVSNRFSGSKSGNTASLTISGLQAEDEADYYCSSYTSSSTLHS

SEQ ID NO: 10760 - protein, 115 aa, Homo sapiens
MAWTPLLLSLLAHCTGSATSYELTQPHSVSVATAQMARITCGGNNIGSKAVHWYQQKPGQDPVLVIYSDSNRPSGIPERFSGSNPGNTATLTISRIEAGDEADYYCQVWDSSSDH

SEQ ID NO: 10761 - protein, 119 aa, Homo sapiens
MAWALLLLSLLTQGTGSWAQSALTQPRSVSGSPGQSVTISCTGTSSDVGGYNYVSWYQQHPGKAPKLMIYDVSKRPSGVPDRFSGSKSGNTASLTISGLQAEDEADYYCCSYAGSYTFH

SEQ ID NO: 10762 - protein, 115 aa, Homo sapiens
MAWTPLLLPLLTFCTVSEASYELTQPPSVSVSPGQTARITCSGDALPKKYAYWYQQKSGQAPVLVIYEDSKRPSGIPERFSGSSSGTMATLTISGAQVEDEADYYCYSTDSSGNH

SEQ ID NO: 10763 - protein, 115 aa, Homo sapiens
MAWTALLLSLLAHFTGSVASYELTQPLSVSVALGQTARITCGGNNIGSKNVHWYQQKPGQAPVLVIYRDSNRPSGIPERFSGSNSGNTATLTISRAQAGDEADYYCQVWDSSTAH

SEQ ID NO: 10764 - protein, 122 aa, Homo sapiens
MAWVSFYLLPFIFSTGLCALPVLTQPPSASALLGASIKLTCTLSSEHSTYTIEWYQQRPGRSPQYIMKVKSDGSHSKGDGIPDRFMGSSSGADRYLTFSNLQSDDEAEYHCGESHTIDGQVG

SEQ ID NO: 10765 - protein, 115 aa, Homo sapiens
MAWIPLFLGVLAYCTGSVASYELTQPPSVSVSPGQTASITCSGDKLGDKYACWYQQKPGQSPVLVIYQDSKRPSGIPERFSGSNSGNTATLTISGTQAMDEADYYCQAWDSSTAH

SEQ ID NO: 10766 - protein, 118 aa, Homo sapiens
MLLALALLLAFLPPASQKSSNLEGRTKSVTRPTGSSAVITCDLPVENAVYTHWYLHQEGKAPQRLLYYDSYNSRVVLESGISREKYHTYASTGKSLKFILENLIERDSGVYYCATWDR

SEQ ID NO: 10767 - protein, 118 aa, Homo sapiens
MRWALLVLLAFLSPASQKSSNLEGGTKSVTRPTRSSAEITCDLTVINAFYIHWYLHQEGKAPQRLLYYDVSNSKDVLESGLSPGKYYTHTPRRWSWILILRNLIENDSGVYYCATWDR

SEQ ID NO: 10768 - protein, 118 aa, Homo sapiens
MQWALAVLLAFLSPASQKSSNLEGRTKSVIRQTGSSAEITCDLAEGSTGYIHWYLHQEGKAPQRLLYYDSYTSSVVLESGISPGKYDTYGSTRKNLRMILRNLIENDSGVYYCATWDG

SEQ ID NO: 10769 - protein, 118 aa, Homo sapiens
MRWALLVLLAFLSPASQKSSNLEGRTKSVTRQTGSSAEITCDLTVTNTFYIHWYLHQEGKAPQRLLYYDVSTARDVLESGLSPGKYYTHTPRRWSWILRLQNLIENDSGVYYCATWDR

SEQ ID NO: 10770 - protein, 117 aa, Homo sapiens
MRWALAVLLAFLSPASQISSNLEGRTKSVTRLTGSSAEITCDLPGASTLYIHWYLHQEGKAPQCLLYYEPYYSRVVLESGITPGKYDTGSTRSNWNLRLQNLIKNDSGFYYCATWDR

SEQ ID NO: 10771 - protein, 114 aa, Homo sapiens
MSIGLLCCVAFSLLWASPVNAGVTQTPKFQVLKTGQSMTLQCAQDMNHNSMYWYRQDPGMGLRLIYYSASEGTTDKGEVPNGYNVSRLNKREFSLRLESAAPSQTSVYFCASSE

SEQ ID NO: 10772 - protein, 114 aa, Homo sapiens
MGCRLLCCAVLCLLGAVPIDTEVTQTPKHLVMGMTNKKSLKCEQHMGHRAMYWYKQKAKKPPELMFVYSYEKLSINESVPSRFSPECPNSSLLNLHLHALQPEDSALYLCASSQ

SEQ ID NO: 10773 - protein, 114 aa, Homo sapiens
MSIRLLCCVAFSLLWAGPVTAGITQAPTSQILAAGRSMTLRCTQDMRHNAMYWYRQDLGLGLRLIHYSNTAGTTGKGEVPDGYSVSRANTDDFPLTLASAVPSQTSVYFCASSD

SEQ ID NO: 10774 - protein, 115 aa, Homo sapiens
MGTRLLCWAALCLLGADHTGAGVSQTPSNKVTEKGKDVELRCDPISGHTALYWYRQSLGQGPEFLIYFQGTGAADDSGLPKDRFFAVRPEGSVSTLKIQRTEQGDSAAYLRASSL

SEQ ID NO: 10775 - protein, 114 aa, Homo sapiens
MGPGLLCWELLYLLGAGPVEAGVTQSPTHLIKTRGQQVTLRCSPISGHSSVSWYQQAPGQGPQFIFEYANELRRSEGNFPNRFSGRQFHDYCSEMNVSALELGDSALYLCARSL

SEQ ID NO: 10776 - protein, 114 aa, Homo sapiens
MGFRLLCCVAFCLLGAGPVDSGVTQTPKHLITATGQRVTLRCSPRSGDLSVYWYQQSLDQGLQFLIHYYNGEERAKGNILERFSAQQFPDLHSELNLSSLELGDSALYFCASSV

SEQ ID NO: 10777 - protein, 114 aa, Homo sapiens
MGTRLFFYVALCLLWAGHRDAEITQSPRHKITETGRQVTLACHQTWNHNNMFWYRQDLGHGLRLIHYSYGVHDTNKGEVSDGYSVSRSNTEDLPLTLESAASSQTSVYFCASSE

SEQ ID NO: 10778 - protein, 115 aa, Homo sapiens
MSTRLLCWMALCLLGAELSEAEVAQSPRYKITEKSQAVAFWCDPISGHATLYWYRQILGQGPELLVQFQDESVVDDSQLPKDRFSAERLKGVDSTLKIQPAELGDSAMYLCASSL

SEQ ID NO: 10779 - protein, 114 aa, Homo sapiens
MSIGLLCCAALSLLWAGPVNAGVTQTPKFQVLKTGQSMTLQCAQDMNHEYMSWYRQDPGMGLRLIHYSVGAGITDQGEVPNGYNVSRSTTEDFPLRLLSAAPSQTSVYFCASSY

SEQ ID NO: 10780 - protein, 115 aa, Homo sapiens
MGTRLLCWVVLGFLGTDHTGAGVSQSPRYKVAKRGRDVALRCDSISGHVTLYWYRQTLGQGSEVLTYSQSDAQRDKSGRPSGRFSAERPERSVSTLKIQRTEQGDSAVYLCASSL

SEQ ID NO: 10781 - protein, 114 aa, Homo sapiens
MSISLLCCAAFPLLWAGPVNAGVTQTPKFRILKIGQSMTLQCAQDMNHNYMYWYRQDPGMGLKLIYYSVGAGITDKGEVPNGYNVSRSTTEDFPLRLELAAPSQTSVYFCASSY

SEQ ID NO: 10782 - protein, 114 aa, Homo sapiens
MGPGLLCWVLLCLLGAGPVDAGVTQSPTHLIKTRGQQVTLRCSPISGHKSVSWYQQVLGQGPQFIFQYYEKEERGRGNFPDRFSARQFPNYSSELNVNALLLGDSALYLCASSL

SEQ ID NO: 10783 - protein, 114 aa, Homo sapiens
MSLGLLCCVAFSLLWAGPMNAGVTQTPKFHVLKTGQSMTLLCAQDMNHEYMYRYRQDPGKGLRLIYYSVAAALTDKGEVPNGYNVSRSNTEDFPLKLESAAPSQTSVYFCASSY

SEQ ID NO: 10784 - protein, 115 aa, Homo sapiens
MGTSLLCWVVLGFLGTDHTGAGVSQSPRYKVTKRGQDVALRCDPISGHVSLYWYRQALGQGPEFLTYFNYEAQQDKSGLPNDRFSAERPEGSISTLTIQRTEQRDSAMYRCASSL

SEQ ID NO: 10785 - protein, 114 aa, Homo sapiens
MGPGLLCWALLCLLGAGLVDAGVTQSPTHLIKTRGQQVTLRCSPKSGHDTVSWYQQALGQGPQFIFQYYEEEERQRGNFPDRFSGHQFPNYSSELNVNALLLGDSALYLCASSL

SEQ ID NO: 10786 - protein, 113 aa, Homo sapiens
MSLGLLCCAAFSLLWAGPVNAGVTQTPKFHILKTGQSMTLQCAQDMNHGYMSWYRQDPGMGLRLIYYSAAAGTTDKEVPNGYNVSRLNTEDFPLRLVSAAPSQTSVYLCASSY

SEQ ID NO: 10787 - protein, 115 aa, Homo sapiens
MGTSLLCWVVLGFLGTDHTGAGVSQSPRYKVTKRGQDVTLRCDPISSHATLYWYQQALGQGPEFLTYFNYEAQPDKSGLPSDRFSAERPEGSISTLTIQRTEQRDSAMYRCASSL

SEQ ID NO: 10788 - protein, 114 aa, Homo sapiens
MGPGLLCWVLLCPLGEGPVDAGVTQSPTHLIKTRGQHVTLRCSPISGHTSVSSYQQALGQGPQFIFQYYEKEERGRGNFPDQFSGHQFPNYSSELNVNALLLGDSALYLCASSL

SEQ ID NO: 10789 - protein, 114 aa, Homo sapiens
MGSRLLCWVLLCLLGAGPVKAGVTQTPRYLIKTRGQQVTLSCSPISGHRSVSWYQQTPGQGLQFLFEYFSETQRNKGNFPGRFSGRQFSNSRSEMNVSTLELGDSALYLCASSL

SEQ ID NO: 10790 - protein, 114 aa, Homo sapiens
MGCRLLCCVVFCLLQAGPLDTAVSQTPKYLVTQMGNDKSIKCEQNLGHDTMYWYKQDSKKFLKIMFSYNNKELIINETVPNRFSPKSPDKAHLNLHINSLELGDSAVYFCASSQ

SEQ ID NO: 10791 - protein, 114 aa, Homo sapiens
MGCRLLCCAVLCLLGAVPMETGVTQTPRHLVMGMTNKKSLKCEQHLGHNAMYWYKQSAKKPLELMFVYNFKEQTENNSVPSRFSPECPNSSHLFLHLHTLQPEDSALYLCASSQ

SEQ ID NO: 10792 - protein, 114 aa, Homo sapiens
MSNQVLCCVVLCLLGANTVDGGITQSPKYLFRKEGQNVTLSCEQNLNHDAMYWYRQDPGQGLRLIYYSQIVNDFQKGDIAEGYSVSREKKESFPLTVTSAQKNPTAFYLCASSI

SEQ ID NO: 10793 - protein, 111 aa, Homo sapiens
MLLLLLLLGPGSGLGAVVSQHPSRVICKSGTSVKIECRSLDFQATTMFWYRQFPKQSLMLMATSNEGSKATYEQGVEKDKFLINHASLTLSTLTVTSAHPEDSSFYICSAR

SEQ ID NO: 10794 - protein, 115 aa, Homo sapiens
MGTRLLGCAALCLLAADSFHAKVTQTPGHLVKGKGQKTKMDCTPEKGHTFVYWYQQNQNKEFMLLISFQNEQVLQETEMHKKRFSSQCPKNAPCSLAILSSEPGDTALYLCASSQ

SEQ ID NO: 10795 - protein, 115 aa, Homo sapiens
MASLLFFCGAFYLLGTGSMDADVTQTPRNRITKTGKRIMLECSQTKGHDRMYWYRQDPGLGLQLIYYSFDVKDINKGEISDGYSVSRQAQAKFSLSLESAIPNQTALYFCATSDL

SEQ ID NO: 10796 - protein, 114 aa, Homo sapiens
MTIRLLCYVGFYFLGAGLMEADIYQTPRYLVIGTGKKITLECSQTMGHDKMYWYQQDPGMELHLIHYSYGVNSTEKGDLSSESTVSRIRTEHFPLTLESARPSHTSQYLCASSE

SEQ ID NO: 10797 - protein, 114 aa, Homo sapiens
MGPQLLGYVVLCLLGAGPLEAQVTQNPRYLITVTGKKLTVTCSQNMNHEYMSWYRQDPGLGLRQIYYSMNVEVTDKGDVPEGYKVSRKEKRNFPLILESPSPNQTSLYFCASSL

SEQ ID NO: 10798 - protein, 114 aa, Homo sapiens
MGIRLLCRVAFCFLAVGLVDVKVTQSSRYLVKRTGEKVFLECVQDMDHENMFWYRQDPGLGLRLIYFSYDVKMKEKGDIPEGYSVSREKKERFSLILESASTNQTSMYLCASSL

SEQ ID NO: 10799 - protein, 121 aa, Homo sapiens
MSVSFLIFLPVLGLPWGVLSQVQLQQSGPGLVKPSQTLSLTCAISGDSVSSNSAAWNWIRQSPSRGLEWLGRTYYRSKWYNDYAVSVKSRITINPDTSKNQFSLQLNSVTPEDTAVYYCAR

SEQ ID NO: 10800 - protein, 117 aa, Homo sapiens
MDWTWRILFLVAAATGAHSQVQLVQSGAEVKKPGASVKVSCKASGYTFTGYYMHWVRQAPGQGLEWMGWINPNSGGTNYAQKFQGWVTMTRDTSISTAYMELSRLRSDDTAVYYCAR

SEQ ID NO: 10801 - protein, 117 aa, Homo sapiens
MDWTWRILFLVAAATGAHSQVQLVQSGAEVKKPGASVKVSCKASGYTFTSYAMHWVRQAPGQRLEWMGWINAGNGNTKYSQKFQGRVTITRDTSASTAYMELSSLRSEDTAVYYCAR

SEQ ID NO: 10802 - protein, 119 aa, Homo sapiens
MDTLCSTLLLLTIPSWVLSQITLKESGPTLVKPTQTLTLTCTFSGFSLSTSGVGVGWIRQPPGKALEWLALIYWDDDKRYSPSLKSRLTITKDTSKNQVVLTMTNMDPVDTATYYCAHR

SEQ ID NO: 10803 - protein, 117 aa, Homo sapiens
MELGLSWVFLVAILEGVQCEVQLVESGGGLVQPGGSLRLSCAASGFTFSSYWMSWVRQAPGKGLEWVANIKQDGSEKYYVDSVKGRFTISRDNAKNSLYLQMNSLRAEDTAVYYCAR

SEQ ID NO: 10804 - protein, 117 aa, Homo sapiens
MEFGLSWVFLVAIIKGVQCQVQLVESGGGLVKPGGSLRLSCAASGFTFSDYYMSWIRQAPGKGLEWVSYISSSSSYTNYADSVKGRFTISRDNAKNSLYLQMNSLRAEDTAVYYCAR

SEQ ID NO: 10805 - protein, 116 aa, Homo sapiens
MELGLSWVFLVAILEGVQCEVQLVESGGGLVQPGGSLRLSCAASGFTFSSYDMHWVRQATGKGLEWVSAIGTAGDPYYPGSVKGRFTISRENAKNSLYLQMNSLRAGDTAVYYCAR

SEQ ID NO: 10806 - protein, 119 aa, Homo sapiens
MEFGLSWIFLAAILKGVQCEVQLVESGGGLVKPGGSLRLSCAASGFTFSNAWMSWVRQAPGKGLEWVGRIKSKTDGGTTDYAAPVKGRFTISRDDSKNTLYLQMNSLKTEDTAVYYCTT

SEQ ID NO: 10807 - protein, 117 aa, Homo sapiens
MEFGLSWVFLAGILKGVQCEVQLVESGGGLVQPGGSLRLSCAASGFTFSNSDMNWARKAPGKGLEWVSGVSWNGSRTHYVDSVKRRFIISRDNSRNSLYLQKNRRRAEDMAVYYCVR

SEQ ID NO: 10808 - protein, 117 aa, Homo sapiens
MDWTWSILFLVAAATGAHSQVQLVQSGAEVKKPGASVKVSCKASGYTFTSYGISWVRQAPGQGLEWMGWISAYNGNTNYAQKLQGRVTMTTDTSTSTAYMELRSLRSDDTAVYYCAR

SEQ ID NO: 10809 - protein, 117 aa, Homo sapiens
MEFGLSWVFLVAILKGVQCEVQLVESGGGVVRPGGSLRLSFAASGFTFDDYGMSWVRQAPGKGLEWVSGINWNGGSTGYADSVKGRFTISRDNAKNSLYLQMNSLRAEDTALYHCAR

SEQ ID NO: 10810 - protein, 117 aa, Homo sapiens
MELGLRWVFLVAILEGVQCEVQLVESGGGLVKPGGSLRLSCAASGFTFSSYSMNWVRQAPGKGLEWVSSISSSSSYIYYADSVKGRFTISRDNAKNSLYLQMNSLRAEDTAVYYCAR

SEQ ID NO: 10811 - protein, 117 aa, Homo sapiens
MEFGLSWLFLVAILKGVQCEVQLVESGGGLVQPGGSLRLSCAASGFTFSSYAMSWVRQAPGKGLEWVSAISGSGGSTYYADSVKGRFTISRDNSKNTLYLQMNSLRAEDTAVYYCAK

SEQ ID NO: 10812 - protein, 117 aa, Homo sapiens
MDCTWRILFLVAAATGTHAQVQLVQSGAEVKKPGASVKVSCKVSGYTLTELSMHWVRQAPGKGLEWMGGFDPEDGETIYAQKFQGRVTMTEDTSTDTAYMELSSLRSEDTAVYYCAT

SEQ ID NO: 10813 - protein, 119 aa, Homo sapiens
MDTLCYTLLLLTTPSWVLSQVTLKESGPVLVKPTETLTLTCTVSGFSLSNARMGVSWIRQPPGKALEWLAHIFSNDEKSYSTSLKSRLTISKDTSKSQVVLTMTNMDPVDTATYYCARI

SEQ ID NO: 10814 - protein, 117 aa, Homo sapiens
MKHLWFFLLLVAAPRWVLSQVQLQESGPGLVKPSDTLSLTCAVSGYSISSSNWWGWIRQPPGKGLEWIGYIYYSGSTYYNPSLKSRVTMSVDTSKNQFSLKLSSVTAVDTAVYYCAR

SEQ ID NO: 10815 - protein, 117 aa, Homo sapiens
MEFGLSWVFLVALLRGVQCQVQLVESGGGVVQPGRSLRLSCAASGFTFSSYGMHWVRQAPGKGLEWVAVIWYDGSNKYYADSVKGRFTISRDNSKNTLYLQMNSLRAEDTAVYYCAR

SEQ ID NO: 10816 - protein, 123 aa, Homo sapiens
MDLLHKNMKHLWFFLLLVAAPRWVLSQVQLQQWGAGLLKPSETLSLTCAVYGGSFSGYYWSWIRQPPGKGLEWIGEINHSGSTNYNPSLKSRVTISVDTSKNQFSLKLSSVTAADTAVYYCAR

SEQ ID NO: 10817 - protein, 117 aa, Homo sapiens
MEFGLSWVFLAAILKGVQCEVQLVESGGGLVQPGGSLRLSCAASGFTFSNSDMNWVHQAPGKGLEWVSGVSWNGSRTHYADSVKGRFIISRDNSRNTLYLQTNSLRAEDTAVYYCVR

SEQ ID NO: 10818 - protein, 116 aa, Homo sapiens
MQFVLSWVFLVGILKGVQCEVQLVESGGGLVQPRGSLRLSCAASGFTVSSNEMSWIRQAPGKGLEWVSSISGGSTYYADSRKGRFTISRDNSKNTLYLQMNNLRAEGTAVYYCARY

SEQ ID NO: 10819 - protein, 125 aa, Homo sapiens
MDLMCKKMKHLWFFLLLVAAPRWVLSQLQLQESGPGLVKPSETLSLTCTVSGGSISSSSYYWGWIRQPPGKGLEWIGSIYYSGSTYYNPSLKSRVTISVDTSKNQFSLKLSSVTAADTAVYYCAR

SEQ ID NO: 10820 - protein, 117 aa, Homo sapiens
MDWTWRILFLVAAVTDAYSQMQLVQSGAEVKKTGSSVKVSCKASGYTFTYRYLHWVRQAPGQALEWMGWITPFNGNTNYAQKFQDRVTITRDRSMSTAYMELSSLRSEDTAMYYCAR

SEQ ID NO: 10821 - protein, 117 aa, Homo sapiens
MDWTWRVFCLLAVAPGAHSQVQLVQSGAEVKKPGASVKVSCKASGYTFTSYYMHWVRQAPGQGLEWMGIINPSGGSTSYAQKFQGRVTMTRDTSTSTVYMELSSLRSEDTAVYYCAR

SEQ ID NO: 10822 - protein, 117 aa, Homo sapiens
MELGLCWVFLVAILEGVQCEVQLVESGGGLVQPGGSLRLSCAASGFTFSSYEMNWVRQAPGKGLEWVSYISSSGSTIYYADSVKGRFTISRDNAKNSLYLQMNSLRAEDTAVYYCAR

SEQ ID NO: 10823 - protein, 119 aa, Homo sapiens
MEFGLSWVFLVAILKGVQCEVQLVESGGGLVQPGRSLRLSCTASGFTFGDYAMSWVRQAPGKGLEWVGFIRSKAYGGTTEYAASVKGRFTISRDDSKSIAYLQMNSLKTEDTAVYYCTR

SEQ ID NO: 10824 - protein, 117 aa, Homo sapiens
MGSTAILALLLAVLQGVCAEVQLVQSGAEVKKPGESLKISCKGSGYSFTSYWIGWVRQMPGKGLEWMGIIYPGDSDTRYSPSFQGQVTISADKSISTAYLQWSSLKASDTAMYYCAR

SEQ ID NO: 10825 - protein, 116 aa, Homo sapiens
MEFWLSWVFLVAISKGVQCEVQLVETGGGLIQPGGSLRLSCAASGFTVSSNYMSWVRQAPGKGLEWVSVIYSGGSTYYADSVKGRFTISRDNSKNTLYLQMNSLRAEDTAVYYCAR

SEQ ID NO: 10826 - protein, 117 aa, Homo sapiens
MDWIWRILFLVGAATGAHSQMQLVQSGPEVKKPGTSVKVSCKASGFTFTSSAVQWVRQARGQRLEWIGWIVVGSGNTNYAQKFQERVTITRDMSTSTAYMELSSLRSEDTAVYYCAA

SEQ ID NO: 10827 - protein, 116 aa, Homo sapiens
MKHLWFFLLLVAAPRWVLSQVQLQESGPGLVKPSETLSLTCTVSGGSISSYYWSWIRQPPGKGLEWIGYIYYSGSTNYNPSLKSRVTISVDTSKNQFSLKLSSVTAADTAVYYCAR

SEQ ID NO: 10828 - protein, 118 aa, Homo sapiens
MKHLWFFLLLVAAPRWVLSQVQLQESGPGLVKPSETLSLTCTVSGGSVSSGSYYWSWIRQPPGKGLEWIGYIYYSGSTNYNPSLKSRVTISVDTSKNQFSLKLSSVTAADTAVYYCAR

SEQ ID NO: 10829 - protein, 116 aa, Homo sapiens
MEFGLSWVFLVAILKGVQCEVQLVESGGGLIQPGGSLRLSCAASGFTVSSNYMSWVRQAPGKGLEWVSVIYSCGSTYYADSVKGRFTISRDNSKNTLYLQMNSLRAEDTAVYYCAR

SEQ ID NO: 10830 - protein, 117 aa, Homo sapiens
MDWTWRFLFVVAAATGVQSQVQLVQSGAEVKKPGSSVKVSCKASGGTFSSYAISWVRQAPGQGLEWMGGIIPIFGTANYAQKFQGRVTITADKSTSTAYMELSSLRSEDTAVYYCAR

SEQ ID NO: 10831 - protein, 119 aa, Homo sapiens
MDILCSTLLLLTVPSWVLSQVTLKESGPALVKPTQTLTLTCTFSGFSLSTSGMRVSWIRQPPGKALEWLARIDWDDDKFYSTSLKTRLTISKDTSKNQVVLTMTNMDPVDTATYYCARI

SEQ ID NO: 10832 - protein, 119 aa, Homo sapiens
MEFGLSWVFLVAILKGVQCEVQLVESGGGLVQPGGSLKLSCAASGFTFSGSAMHWVRQASGKGLEWVGRIRSKANSYATAYAASVKGRFTISRDDSKNTAYLQMNSLKTEDTAVYYCTR

SEQ ID NO: 10833 - protein, 117 aa, Homo sapiens
MDWTWSILFLVAAATGTYSQVQLVQSGHEVKQPGASVKVSCKASGYSFTTYGMNWVPQAPGQGLEWMGWFNTYTGNPTYAQGFTGRFVFSMDTSASTAYLQISSLKAEDMAMYYCAR

SEQ ID NO: 10834 - protein, 192 aa, Homo sapiens
MGNISSNISAFQSLHIVMLGLDSAGKTTVLYRLKFNEFVNTVPTIGFNTEKIKLSNGTAKGISCHFWDVGGQEKLRPLWKSYSRCTDGIIYVVDSVDVDRLEEAKTELHKVTKFAENQGTPLLVIANKQDLPKSLPVAEIEKQLALHELIPATTYHVQPACAIIGEGLTEGMDKLYEMILKRRKSLKQKKKR

SEQ ID NO: 10835 - protein, 210 aa, Homo sapiens
MRPRLWLLLAAQLTVLHGNSVLQQTPAYIKVQTNKMVMLSCEAKISLSNMRIYWLRQRQAPSSDSHHEFLALWDSAKGTIHGEEVEQEKIAVFRDASRFILNLTSVKPEDSGIYFCMIVGSPELTFGKGTQLSVVDFLPTTAQPTKKSTLKKRVCRLPRPETQKGPLCSPITLGLLVAGVLVLLVSLGVAIHLCCRRRRARLRFMKQFYK

SEQ ID NO: 10836 - protein, 236 aa, Homo sapiens
MSKLPADSSVPQTGAANGDRDVPQAEVGRGRREPAPAQPEEAGEGAMAAARGGPVPAAREGRMAAARAAPAAAARGAPVAAAALARAAAAGRESPAAAAAREARMAEVARLLGEPVDEEGPEGRPRSRHGNGGLAALPYLRLRHPLSVLGINYQQFLRHYLENYPIAPGRIQELEERRRRFVEACRAREAAFDAEYQRNPHRVDLDILTFTIALTASEVINPLIEELGCDKFINRE

SEQ ID NO: 10837 - protein, 559 aa, Homo sapiens
MGDVKESKMQITPETPGRIPVLNPFESPSDYSNLHEQTLASPSVFKSTKLPTPGKFRWSIDQLAVINPVEIDPEDIHRQALYLSHSRIDKDVEDKRQKAIEEFFTKDVIVPSPWTDHEGKQLSQCHSSKCTNINSDSPVGKKLTIHSEKSDAACQTLLSLPVDFNLENILGDYFRADEFADQSPGNLSSSSLRRKLFLDGNGSISDSLPSASPGSPHSGVQTSLEMFYSIDLSPVKCRSPLQTPSSGQFSSSPIQASAKKYSLGSITSPSPISSPTFSPIEFQIGETPLSEQRKFTVHSPDASSGTNSNGITNPCIRSPYIDGCSPIKNWSPMRLQMYSGGTQYRTSVIQIPFTLETQGEDEEDKENIPSTDVSSPAMDAAGIHLRQFSNEASTHGTHLVVTAMSVTQNQSSASEKELALLQDVEREKDNNTVDMVDPIEIADETTWIKEPVDNGSLPMTDFVSGIAFSIENSHMCMSPLAESSVIPCESSNIQMDSGYNTQNCGSNIMDTVGAESYCKESDAQTCEVESKSQAFNMKQDHTTQRCWMKTASPFQCSSP

SEQ ID NO: 10838 - protein, 150 aa, Homo sapiens
MNLWLLACLVAGFLGAWAPAVHTQGVFEDCCLAYHYPIGWAVLRRAWTYRIQEVSGSCNLPAAIFYLPKRHRKVCGNPKSREVQRAMKLLDARNKVFAKLHHNTQTFQAGPHAVKKLSSGNSKLSSSKFSNPISSSKRNVSLLISANSGL

SEQ ID NO: 10839 - protein, 113 aa, Homo sapiens
MDGRVQLMKALLAGPLRPAARRWRNPIPFPETFDGDTDRLPEFIVQTSSYMFVDENTFSNDALKVTFLITRLTGPALQWVIPYIRKESPLLNDYRGFLAEMKRVFGWEEDEDF

SEQ ID NO: 10840 - protein, 113 aa, Homo sapiens
MEGRVQLMKALLARPLRPAARRWRNPIPFPETFDGDTDRLPEFIVQTSSYMFVDENTFSNDALKVTFLITRLTGPALQWVIPYIKKESPLLSDYRGFLAEMKRVFGWEEDEDF

SEQ ID NO: 10841 - protein, 370 aa, Homo sapiens
MFSTYFMEKWAPRQDDMLFYVRRKLAYSGSESGADGRKAAEPEVEVEVYRRDSKKLPGLGDPDIDWEESVCLNLILQKLDYMVTCAVCTRADGGDIHIHKKKSQQVFASPSKHPMDSKGEESKISYPNIFFMIDSFEEVFSDMTVGEGEMVCVELVASDKTNTFQGVIFQGSIRYEALKKVYDNRVSVAARMAQKMSFGFYKYSNMEFVRMKGPQGKGHAEMAVSRVSTGDTSPCGTEEDSSPASPMHERVTSFSTPPTPERNNRPAFFSPSLKRKVPRNRIAEMKKSHSANDSEEFFREDDGGADLHNATNLRSRSLSGTGRSLVGSWLKLNRADGNFLLYAHLTYVTLPLHRILTDILEVRQKPILMT

SEQ ID NO: 10842 - protein, 265 aa, Homo sapiens
MDPKQTTLLCLVLCLGQRIQAQEGDFPMPFISAKSSPVIPLDGSVKIQCQAIREAYLTQLMIIKNSTYREIGRRLKFWNETDPEFVIDHMDANKAGRYQCQYRIGHYRFRYSDTLELVVTGLYGKPFLSADRGLVLMPGENISLTCSSAHIPFDRFSLAKEGELSLPQHQSGEHPANFSLGPVDLNVSGIYRCYDSIHQDYTTQNLIRMAVAGLVLVALLAILVENWHSHTALNKEASADVAEPSWSQQMCQPGLTFARTPSVCK

SEQ ID NO: 10843 - protein, 444 aa, Homo sapiens
MSLMVVSMACVGLFLVQRAGPHMGGQDKPFLSAWPSAVVPRGGHVTLRCHYRHRFNNFMLYKEDRIHIPIFHGRIFQESFNMSPVTTAHAGNYTCRGSHPHSPTGWSAPSNPVVIMVTGNHRKPSLLAHPGPLVKSGERVILQCWSDIMFEHFFLHKEGISKDPSRLVGQIHDGVSKANFSIGPMMLALAGTYRCYGSVTHTPYQLSAPSDPLDIVVTGPYEKPSLSAQPGPKVQAGESVTLSCSSRSSYDMYHLSREGGAHERRLPAVRKVNRTFQADFPLGPATHGGTYRCFGSFRHSPYEWSDPSDPLLVSVTGNPSSSWPSPTEPSSKSGNPRHLHILIGTSVVIILFILLLFFLLHLWCSNKKNAAVMDQEPAGNRTANSEDSDEQDPEEVTYAQLDHCVFTQRKITRPSQRPKTPPTDTILYTELPNAKPRSKVVSCP

SEQ ID NO: 10844 - protein, 225 aa, Homo sapiens
MSLMVIIMACVGFFLLQGAWPQEGVHRKPSFLALPGHLVKSEETVILQCWSDVMFEHFLLHREGKFNNTLHLIGEHHDGVSKANFSIGPMMPVLAGTYRCYGSVPHSPYQLSAPSDPLDMVIIGLYEKPSLSAQPGPTVQAGENVTLSCSSIYPGKGRPMNVGSLQCAASTEHSRPTFLWALPPTEGPTDASALSVTLPTSGQTRVIHCLFPSQVTPDTYMFULG

SEQ ID NO: 10845 - protein, 449 aa, Homo sapiens
MIPTFTALLCLGLSLGPRTHMQAGPLPKPTLWAEPGSVISWGNSVTIWCQGTLEAREYRLDKEESPAPWDRQNPLEPKNKARFSIPSMTEDYAGRYRCYYRSPVGWSQPSDPLELVMTGAYSKPTLSALPSPLVTSGKSVTLLCQSRSPMDTFLLIKERAAHPLLHLRSEHGAQQHQAEFPMSPVTSVHGGTYRCFSSHGFSHYLLSHPSDPLELIVSGSLEGPRPSPTRSVSTAAGPEDQPLMPTGSVPHSGLRRHWEVLIGVLVVSILLLSLLLFLLLQHWRQGKHRTLAQRQADFQRPPGAAEPEPKDGGLQRRSSPAADVQGENFSGAAVKNTQPEDGVEMDTRQSPHDEDPQAVTYAKVKHSRPRREMASPPSPLSGEFLDTKDRQAEEDRQMDTEAAASEAPQDVTYARLHSFTLRQKATEPPPSQEGASPAEPSVYATLAIH

SEQ ID NO: 10846 - protein, 395 aa, Homo sapiens
MIPTFTALLCLGLSLGPRTHMQAGPLPKPTLWAEPGSVISWGNSVTIWCQGTLEAREYRLDKEESPAPWDRQNPLEPKNKARFSIPSMTEDYAGRYRCYYRSPVGWSQPSDPLELVMTGAYSKPTLSALPSPLVTSGKSVTLLCQSRSPMDTFLLIKERAAHPLLHLRSEHGAQQHQAEFPMSPVTSVHGGTYRCFSSHGFSHYLLSHPSDPLELIVSGSLEGPRPSPTRSVSTAAGPEDQPLMPTGSVPHSGLRRHWEVLIGVLVVSILLLSLLLFLLLQHWRQGKHRTLAQRQADFQRPPGAAEPEPKDGGLQRRSSPAADVQGENFCAAVKNTQPEDGVEMDTRAAASEAPQDVTYARLHSFTLRQKATEPPPSQEGASPAEPSVYATLAIH

SEQ ID NO: 10847 - protein, 448 aa, Homo sapiens
MIPTFTALLCLGLSLGPRTHMQAGPLPKPTLWAEPGSVISWGNSVTIWCQGTLEAREYRLDKEESPAPWDRQNPLEPKNKARFSIPSMTEDYAGRYRCYYRSPVGWSQPSDPLELVMTGAYSKPTLSALPSPLVTSGKSVTLLCQSRSPMDTFLLIKERAAHPLLHLRSEHGAQQHQAEFPMSPVTSVHGGTYRCFSSHGFSHYLLSHPSDPLELIVSGSLEGPRPSPTRSVSTAAGPEDQPLMPTGSVPHSGLRRHWEVLIGVLVVSILLLSLLLFLLLQHWRQGKHRTLAQRQADFQRPPGAAEPEPKDGGLQRRSSPAADVQGENFCAAVKNTQPEDGVEMDTRQSPHDEDPQAVTYAKVKHSRPRREMASPPSPLSGEFLDTKDRQAEEDRQMDTEAAASEAPQDVTYARLHSFTLRQKATEPPPSQEGASPAEPSVYATLAIH

SEQ ID NO: 10848 - protein, 127 aa, Homo sapiens
MSPHPTALLGLVLCLAQTIHTQEEDLPRPSISAEPGTVIPLGSHVTFVCRGPVGVQTFRLERDSRSTYNDTEDVSQASPSESEARFRIDSKALEARTPRTQSPAPQLDPRRGRRTTVTMSMHLLPKA

SEQ ID NO: 10849 - protein, 287 aa, Homo sapiens
MSPHPTALLGLVLCLAQTIHTQEEDLPRPSISAEPGTVIPLGSHVTFVCRGPVGVQTFRLERDSRSTYNDTEDVSQASPSESEARFRIDSVREGNAGLYRCIYYKPPKWSEQSDYLELLVKESSGGPDSPDTEPGSSAGPTQRPSDNSHNEHAPASQGLKAEHLYILIGVSVVFLFCLLLLVLFCLHRQNQIKQGPPRSKDEEQKPQQRPDLAVDVLERTADKATVNGLPEKDRETDTSALAAGSSQEVTYAQLDHWALTQRTARAVSPQSTKPMAESITYAAVARH

SEQ ID NO: 10850 - protein, 510 aa, Homo sapiens
MTPIVTVLICLGLSLGPRTRVQTGTIPKPTLWAEPDSVITQGSPVTLSCQGSLEAQEYRLYREKKSASWITRIRPELVKNGQFHIPSITWEHTGRYGCQYYSRARWSELSDPLVLVMTGAYPKPTLSAQPSPVVTSGGRVTLQCESQVAFGGFILCKEGEDEHPQCLNSQPHARGSSRAIFSVGPVSPNRRWSHRCYGYDLNSPYVWSSPSDLLELLVPGVSKKPSLSVQPGPVMAPGESLTLQCVSDVGYDRFVLYKEGERDLRQLPGRQPQAGLSQANFTLGPVSRSYGGQYRCYGAHNLSSECSAPSDPLDILITGQIRGTPFISVQPGPTVASGENVTLLCQSWRQFHTFLLTKAGAADAPLRLRSIHEYPKYQAEFPMSPVTSAHAGTYRCYGSLNSDPYLLSHPSEPLELVVSGPSMGSSPPPTGPISTPAGPEDQPLTPTGSDPQSGLGRHLGVVIGILVAVVLLLLLLLLLFLILRHRRQGKHWTSSPAQLPTPRKKTSMLP

SEQ ID NO: 10851 - protein, 598 aa, Homo sapiens
MTPIVTVLICLGLSLGPRTRVQTGTIPKPTLWAEPDSVITQGSPVTLSCQGSLEAQEYRLYREKKSASWITRIRPELVKNGQFHIPSITWEHTGRYGCQYYSRARWSELSDPLVLVMTGAYPKPTLSAQPSPVVTSGGRVTLQCESQVAFGGFILCKEGEDEHPQCLNSQPHARGSSRAIFSVGPVSPNRRWSHRCYGYDLNSPYVWSSPSDLLELLVPGVSKKPSLSVQPGPVMAPGESLTLQCVSDVGYDRFVLYKEGERDLRQLPGRQPQAGLSQANFTLGPVSRSYGGQYRCYGAHNLSSECSAPSDPLDILITGQIRGTPFISVQPGPTVASGENVTLLCQSWRQFHTFLLTKAGAADAPLRLRSIHEYPKYQAEFPMSPVTSAHAGTYRCYGSLNSDPYLLSHPSEPLELVVSGPSMGSSPPPTGPISTPAGPEDQPLTPTGSDPQSGLGRHLGVVIGILVAVVLLLLLLLLLFLILRHRRQGKHWTSTQRKADFQHPAGAVGPEPTDRGLQWRSSPAADAQEENLYAAVKDTQPEDGVEMDTRAAASEAPQDVTYAQLHSLTLRRKATEPPPSQEREPPAEPSIYATLAIH

SEQ ID NO: 10852 - protein, 631 aa, Homo sapiens
MTPALTALLCLGLSLGPRTRMQAGPFPKPTLWAEPGSVISWGSPVTIWCQGSLEAQEYQLDKEGSPEPWDRNNPLEPKNKARFSIPSMTQHHAGRYRCHYYSSAGWSEPSDPLELVMTGFYNKPTLSALPSPVVASGGNMTLRCGSQKGYHHFVLMKEGEHQLPRTLDSQQLHSGGFQALFPVGPVTPSHRWRFTCYYYYTNTPWVWSHPSDPLEILPSGVSRKPSLLTLQGPVLAPGQSLTLQCGSDVGYDRFVLYKEGERDFLQRPGQQPQAGLSQANFTLGPVSRSYGGQYRCYGAHNLSSEWSAPSDPLDILITGQIYDTVSLSAQPGPTVASGENMTLLCQSRGYFDTFLLTKEGAAHPPLRLRSMYGAHKYQAEFPMSPVTSAHAGTYRCYGSRSSNPHLLSFPSEPLELMVSGHSGGSSLPPTGPPSTPGLGRYLEVLIGVSVAFVLLLFLLLFLLLLRQRHSKHRTSDQRKTDFQRPAGAAETEPKDRGLLRRSSPAADVQEENLYAAVKDTQSEDRVELDSQSPHDEDPQAVTYAPVKHSSPRREMASPPSSLSGEFLDTKDRQVEEDRQMDTEAAASEASQDVTYAQLHSLTLRRKATEPPPSQEGEPPAEPSIYATLAIH

SEQ ID NO: 10853 - protein, 344 aa, Homo sapiens
MSPEEWTYLVVLLISIPIGFLFKKAGPGLKRWGAAAVGLGLTLFTCGPHTLHSLVTILGTWALIQAQPCSCHALALAWTFSYLLFFRALSLLGLPTPTPFTNAVQLLLTLKLVSLASEVQDLHLAQRKEMASGFSKGPTLGLLPDVPSLMETLSYSYCYVGIMTGPFFRYRTYLDWLEQPFPGAVPSLRPLLRRAWPAPLFGLLFLLSSHLFPLEAVREDAFYARPLPARLFYMIPVFFAFRMRFYVAWIAAECGCIAAGFGAYPVAAKARAGGGPTLQCPPPSSPEKAASLEYDYETIRNIDCYSTDFCVRVRDGMRYWNMTVQWWLAQYIYKSAPARSYVLR

SEQ ID NO: 10854 - protein, 244 aa, Homo sapiens
MAAVGFEEFSAPPGSELALPPLFGGHILESELETEVEFVSGGLGGSGLRERDEEEEAARGRRRRQRELNRRKYQALGRRCREIEQVNERVLNRLHQVQRITRRLQQERRFLMRVLDSYGDDYRASQFTIVLEDEGSQGTDAPTPGNAENEPPEKETLSPPRRTPAPPEPGSPAPGEGPSGRKRRRVPRDGRRAGNALTPELAPVQIKVEEDFGFEADEALDSSWVSRGPDKLLPYPTLASPASD

SEQ ID NO: 10855 - protein, 161 aa, Homo sapiens
MALVLILQLLTLWPLCHTDITPSAGRILSGGGDSSPRGKLPLLLPKARLGAGCLVPAQRCPGAAGDRGAAAAVAGGAARAGGGSWRQREPALRGPPAEHELRAVPRGRGGPAAVPPLRAALGRLHAAGRPRPRHLQLLLSHALRALRAVAAQRGAGHQLGR

SEQ ID NO: 10856 - protein, 271 aa, Homo sapiens
MALVLILQLLTLFPPASYHPKPWLGAQPATVVTPGVNVTLRCRAPQPAWRFGLFKPGEIAPLLFRDVSSELAEFFLEEVTPAQGGSYRCCYRRPDWGPGVWSQPSDVLELLVTEELPRPSLVALPGPVVGPGANVSLRCAGRLRNMSFVLYREGVAAPLQYRHSAQPWADFTLLGARAPGTYSCYYHTPSAPYVLSQRSEVLVISWEGEGPEARPASSAPGMQAPGPPPSDPGAQAPSLSSFRPRGLVLQPLLPQTQDSWDPAPPPSDPGV

SEQ ID NO: 10857 - protein, 322 aa, Homo sapiens
MPVTVTRTTITTTTTSSSGLGSPMIVGSPRALTQPLGLLRLLQLVSTCVAFSLVASVGAWTGSMGNWSMFTWCFCFSVTLIILIVELCGLQARFPLSWRNFPITFACYAALFCLSASIIYPTTYVQFLSHGRSRDHAIAATFFSCIACVAYATEVAWTRARPGEITGYMATVPGLLKVLETFVACIIFAFISDPNLYQHQPALEWCVAVYAICFILAAIAILLNLGECTNVLPIPFPSFLSGLALLSVLLYATALVLWPLYQFDEKYGGQPRRSRDVSCSRSHAYYVCAWDRRLAVAILTAINLLAYVADLVHSAHLVFVKV

SEQ ID NO: 10858 - protein, 310 aa, Homo sapiens
MPLLLLLPLLWAGALAMDPNFWLQVQESVTVQEGLCVLVPCTFFHPIPYYDKNSPVHGYWFREGAIISRDSPVATNKLDQEVQEETQGRFRLLGDPSRNNCSLSIVDARRRDNGSYFFRMERGSTKYSYKSPQLSVHVTDLTHRPKILIPGTLEPGHSKNLTCSVSWACEQGTPPIFSWLSAAPTSLGPRTTHSSVLIITPRPQDHGTNLTCQVKFAGAGVTTERTIQLNVTYVPQNPTTGIFPGDGSGKQETRAGVVHGAIGGAGVTALLALCLCLIFFIVKTHRRKAARTAVGRNDTHPTTGSASPVR

SEQ ID NO: 10859 - protein, 342 aa, Homo sapiens
MQGAQEASASEMLPLLLPLLWAGALAQERRFQLEGPESLTVQEGLCVLVPCRLPTTLPASYYGYGYWFLEGADVPVATNDPDEEVQEETRGRFHLLWDPRRKNCSLSIRDARRRDNAAYFFRLKSKWMKYGYTSSKLSVRVMGTLESGHPSNLTCSVPWVCEQGTPPIFSWMSAAPTSLGPRTTQSSVLTITPRPQDHSTNLTCQVTFPGAGVTMERTIQLNVSYAPQKVAISIFQGNSAAFKILQNTSSLPVLEGQALRLLCDADGNPPAHLSWFQGFPALNATPISNTGVLELPQVGSAEEGDFTCRAQHPLGSLQISLSLFVHWSSAPVPDRHSFRPPC

SEQ ID NO: 10860 - protein, 275 aa, Homo sapiens
MRILQLILLALATGLVGGETRIIKGFECKPHSQPWQAALFEKTRLLCGATLIAPRWLLTAAHCLKPWVSLTSPTHVSPDLSSSNYCLSHLSRYIVHLGQHNLQKEEGCEQTRTATESFPHPGFNNSLPNKDHRNDIMLVKMASPVSITWAVRPLTLSSRCVTAGTSCLISGWGSTSSPQLRLPHTLRCANITIIEHQKCENAYPGNITDTMVCASVQEGGKDSCQGDSGGPLVCNQSLQGIISWGQDPCAITRKPGVYTKVCKYVDWIQETMKNN

SEQ ID NO: 10861 - protein, 305 aa, Homo sapiens
MGRPRPRAAKTWMFLLLLGGAWAACGSLDLLTKLYAENLPCVHLNPQWPSQPSHCPRGWRSNPLPPAAGHSRAQEDKVLGGHECQPHSQPWQAALFQGQQLLCGGVLVGGNWVLTAAHCKKPKYTVRLGDHSLQNKDGPEQEIPVVQSIPHPCYNSSDVEDHNHDLMLLQLRDQASLGSKVKPISLADHCTQPGQKCTVSGWGTVTSPRENFPDTLNCAEVKIFPQKKCEDAYPGQITDGMVCAGSSKGADTCQGDSGGPLVCDGALQGITSWGSDPCGRSDKPGVYTNICRYLDWIKKIIGSKG

SEQ ID NO: 10862 - protein, 253 aa, Homo sapiens
MARSLLLPLQILLLSLALETAGEEAQGDKIIDGAPCARGSHPWQVALLSGNQLHCGGVLVNERWVLTAAHCKMNEYTVHLGSDTLGDRRAQRIKASKSFRHPGYSTQTHVNDLMLVKLNSQARLSSMVKKVRLPSRCEPPGTTCTVSGWGTTTSPDVTFPSDLMCVDVKLISPQDCTKVYKDLLENSMLCAGIPDSKKNACNGDSGGPLVCRGTLQGLVSWGTFPCGQPNDPGVYTQVCKFTKWINDTMKKHR

SEQ ID NO: 10863 - protein, 567 aa, Homo sapiens
MAPLALHLLVLVPILLSLVASQDWKAERSQDPFEKCMQDPDYEQLLKVVTWGLNRTLKPQRVIVVGAGVAGLVAAKVLSDAGHKVTILEADNRIGGRIFTYRDQNTGWIGELGAMRMPSSHRILHKLCQGLGLNLTKFTQYDKNTWTEVHEVKLRNYVVEKVPEKLGYALRPQEKGHSPEDIYQMALNQALKDLKALGCRKAMKKFERHTLLEYLLGEGNLSRPAVQLLGDVMSEDGFFYLSFAEALRAHSCLSDRLQYSRIVGGWDLLPRALLSSLSGLVLLNAPVVAMTQGPHDVHVQIETSPPARNLKVLKADVVLLTASGPAVKRITFSPPLPRHMQEALRRLHYVPATKVFLSFRRPFWREEHIEGGHSNTDRPSRMIFYPPPREGALLLASYTWSDAAAAFAGLSREEALRLALDDVAALHGPVVRQLWDGTGVVKRWAEDQHSQGGFVVQPPALWQTEKDDWTVPYGRIYFAGEHTAYPHGWVETAVKSALRAAIKINSRKGPASDTASPEGHASDMEGQGHVHGVASSPSHDLAKEEGSHPPVQGQLSLQNTTHTRTSH

SEQ ID NO: 10864 - protein, 353 aa, Homo sapiens
MAAAEAANCIMEVSCGQAESSEKPNAEDMTSKDYYFDSYAHFGIHEEMLKDEVRTLTYRNSMFHNRHLFKDKVVLDVGSGTGILCMFAAKAGARKVIGIECSSISDYAVKIVKANKLDHVVTIIKGKVEEVELPVEKVDIIISEWMGYCLFYESMLNTVLYARDKWLAPDGLIFPDRATLYVTAIEDRQYKDYKIHWWENVYGFDMSCIKDVAIKEPLVDVVDPKQLVTNACLIKEVDIYTVKVEDLTFTSPFCLQVKRNDYVHALVAYFNIEFTRCHKRTGFSTSPESPYTHWKQTVFYMEDYLTVKTGEEIFGTIGMRPNAKNNRDLDFTIDLDFKGQLCELSCSTDYRMR

SEQ ID NO: 10865 - protein, 250 aa, Homo sapiens
MDDDLMLALRLQEEWNLQEAERDHAQESLSLVDASWELVDPTPDLQALFVQFNDQFFWGQLEAVEVKWSVRMTLCAGICSYEGKGGMCSIRLSEPLLKLRPRKDLVETLLHEMIHAYLFVTNNDKDREGHGPEFCKHMHRINSLTGANITVYHTFHDEVDEYRRHWWRCNGPCQHRPPYYGYVKRATNREPSAHDYWWAEHQKTCGGTYIKIKEPENYSKKGKGKAKLGKEPVLAAENKGTFVYILLIFM

SEQ ID NO: 10866 - protein, 218 aa, Homo sapiens
MLRRPLAGLAAAALGRAPPDGMSGPRPVVLSGPSGAGKSTLLKRLLQEHSGIFGFSVSHTTRNPRPGEENGKDYYFVTREVMQRDIAAGDFIEHAEFSGNLYGTSKVAVQAVQAMNRICVLDVDLQGVRNIKATDLRPIYISVQPPSLHVLEQRLRQRNTETEESLVKRLAAAQADMESSKEPGLFDVVIINDSLDQAYAELKEALSEEIKKAQRTGA

SEQ ID NO: 10867 - protein, 750 aa, Homo sapiens
MEDYPDPQSANHMNSSLLSLYRKGNPDSVSNTPEMEQRETTSSTPRISSKTGSIPLKTPAKDSEGGWFIDKTPSVKKDSFFLDLSCEKSNPKKPITEIQDSKDSSLLESDMKRKGKLKNKGSKRKKEDLQEVDGEIEAVLQKKAKARGLEFQISNVKFEDVGGNDMTLKEVCKMLIHMRHPEVYHHLGVVPPRGVLLHGPPGCGKTLLAHAIAGELDLPILKVAAPEIVSGVSGESEQKLRELFEQAVSNAPCIIFIDEIDAITPKREVASKDMERRIVAQLLTCMDDLNNVAATARVLVIGATNRPDSLDPALRRAGRFDREICLGIPDEASRERILQTLCRKLRLPQAFDFCHLAHLTPGFVGADLMALCREAAMCAVNRVLMKLQEQQKKNPEMEDLPSKGVQEERLGTEPTSETQDELQRLLGLLRDQDPLSEEQMQGLCIELNDFIVALSSVQPSAKREGFVTVPNVTWADIGALEDIREELTMAILAPVRNPDQFKALGLVTPAGVLLAGPPGCGKTLLAKAVANESGLNFISVKGPELLNMYVGESERAVRQVFQRAKNSAPCVIFFDEVDALCPRRSDRETGASVRVVNQLLTEMDGLEARQQVFIMAATNRPDIIDPAILRPGRLDKTLFVGLPPPADRLAILKTITKNGTKPPLDADVNLEAIAGDLRCDCYTGADLSALVREASICALRQEMARQKSGNEKGELKVSHKHFEEAFKKVRSSISKKDQIMYERLQESLSR

SEQ ID NO: 10868 - protein, 411 aa, Homo sapiens
MAAPDLLDPKSAAQNSKPRLSFSTKPTVLASRVESDTTINVMKWKTVSTIFLVVVLYLIIGATVFKALEQPHEISQRTTIVIQKQTFISQHSCVNSTELDELIQQIVAAINAGIIPLGNTSNQISHWDLGSSFFFAGTVITTIGFGNISPRTEGGKIFCIIYALLGIPLFGFLLAGVGDQLGTIFGKGIAKVEDTFIKWNVSQTKIRIISTIIFILFGCVLFVALPAIIFKHIEGWSALDAIYFVVITLTTIGFGDYVAGGSDIEYLDFYKPVVWFWILVGLAYFAAVLSMIGDWLRVISKKTKEEVGEFRAHAAEWTANVTAEFKETRRRLSVEIYDKFQRATSIKRKLSAELAGNHNQELTPCRRTLSVNHLTSERDVLPPLLKTESIYLNGLTPHCAGEEIAVIENIK

SEQ ID NO: 10869 - protein, 422 aa, Homo sapiens
MMNPRAKRDFYLAAPDLLDPKSAAQNSKPRLSFSTKPTVLASRVESDTTINVMKWKTVSTIFLVVVLYLIIGATVFKALEQPHEISQRTTIVIQKQTFISQHSCVNSTELDELIQQIVAAINAGIIPLGNTSNQISHWDLGSSFFFAGTVITTIGFGNISPRTEGGKIFCIIYALLGIPLFGFLLAGVGDQLGTIFGKGIAKVEDTFIKWNVSQTKIRIISTIIFILFGCVLFVALPAIIFKHIEGWSALDAIYFVVITLTTIGFGDYVAGGSDIEYLDFYKPVVWFWILVGLAYFAAVLSMIGDWLRVISKKTKEEVGEFRAHAAEWTANVTAEFKETRRRLSVEIYDKFQRATSIKRKLSAELAGNHNQELTPCRRTLSVNHLTSERDVLPPLLKTESIYLNGLTPHCAGEEIAVIENIK

SEQ ID NO: 10870 - protein, 760 aa, Homo sapiens
MMEERAAAAVAAAASSCRPLGSGAGPGPTGAAPVSAPAPGPGPAGKGGGGGGSPGPTAGPEPLSLPGILHFIQHEWARFEAEKARWEAERAELQAQVAFLQGERKGQENLKTDLVRRIKMLEYALKQERAKYHKLKFGTDLNQGEKKADVSEQVSNGPVESVTLENSPLVWKEGRQLLRQYLEEVGYTDTILDMRSKRVRSLLGRSLELNGAVEPSEGAPRAPPGPAGLSGGESLLVKQIEEQIKRNAAGKDGKERLGGSVLGQIPFLQNCEDEDSDEDDELDSVQHKKQRVKLPSKALVPEMEDEDEEDDSEDAINEFDFLGSGEDGEGAPDPRRCTVDGSPHELESRRVKLQGILADLRDVDGLPPKVTGPPPGTPQPRPHEGSFGFSSDVFIMDTIGGGEVSLGDLADLTVTNDNDLSCDLSDSKDAFKKTWNPKFTLRSHYDGIRSLAFHHSQSALLTASEDGTLKLWNLQKAVTAKKNAALDVEPIHAFRAHRGPVLAVAMGSNSEYCYSGGADACIHSWKIPDLSMDPYDGYDPSVLSHVLEGHGDAVWGLAFSPTSQRLASCSADGTVRIWDPSSSSPACLCTFPTASEHGVPTSVAFTSTEPAHIVASFRSGDTVLYDMEVGSALLTLESRGSSGPTQINQVVSHPNQPLTITAHDDRGIRFLDNRTGKPVHSMVAHLDAVTCLAVDPNGAFLMSGSHDCSLRLWSLDNKTCVQEITAHRKKHEEAIHAVACHPSKALIASAGADALAKVFV

SEQ ID NO: 10871 - protein, 629 aa, Homo sapiens
MIRAFSFPVSPERGRLRGWLEGSLAGLCELHWLRERQEYRVQQALRLAQPGMGGAEAEDEEDADEDEDAAAARRAAAALEEQLEALPGLVWDLGQQLGDLSLESGGLEQESGRSSGFYEDPSSTGGPDSPPSTFCGDSGFSGSSSYGRLGPSEPRGIYASERPKSLGDASPSAPEVVGARAAVPRSFSAPYPTAGGSAGPEACSSAERRARAGPFLTPSPLHAVAMRSPRPCGRPPTDSPDAGGAGRPLDGYISALLRRRRRRGAGQPRTSPGGADGGPRRQNSVRQRPPDASPSPGSARPAREPSLERVGGHPTSPAALSRAWASSWESEAAPEPAAPPAAPSPPDSPAEGRLVKAQYIPGAQAATRGLPGRAARRKPPPLTRGRSVEQSPPRERPRAAGRRGRMAEASGRRGSPRARKASRSQSETSLLGRASAVPSGPPKYPTAEREEPRPPRPRRGPAPTLAAQAAGSCRRWRSTAEIDAADGRRVRPRAPAARVPGPGPSPSAPQRRLLYGCAGSDSECSAGRLGPLGRRGPAGGVGGGYGESESSASEGESPAFSSASSDSDGSGGLVWPQQLVAATAASGGGAGAGAPAGPAKVFVKIKASHALKKKILRFRSGSLKVMTTV

SEQ ID NO: 10872 - protein, 113 aa, Homo sapiens
MRSLGQNPTEAELQDMINEVDADGNGTIDFPEFLTMMARKMKDTDSEEEIREAFRVFDKDGNGYISAAELRHVMTNLGEKLTDEEVDEMIREADIDGDGQVNYEEFVQMMTAK

SEQ ID NO: 10873 - protein, 317 aa, Homo sapiens
MTVARPSVPAALPLLGELPRLLLLVLLCLPAVWGDCGLPPDVPNAQPALEGRTSFPEDTVITYKCEESFVKIPGEKDSVICLKGSQWSDIEEFCNQKSCPNPGEIRNGQIDVPGGILFGATISFSCNTGYKLFGSTSSFCLISGSSVQWSDPLPECREIYCPAPPQIDNGIIQGERDHYGYRQSVTYACNKGFTMIGEHSIYCTVNNDEGEWSGPPPECRGKSLTSKVPPTVQKPTTVNVPTTEVSPTSQKTTTKTTTPNAQATRSTPVSRTTKHFHETTPNKGSGTTSGTTRLLSGHTCFTLTGLLGTLVTMGLLT

SEQ ID NO: 10874 - protein, 151 aa, Homo sapiens
MKASSLAFSLLSAAFYLLWTPSTGLKTLNLGSCVIATNLQEIRNGFSEIRGSVQAKDGNIDIRILRRTESLQDTKPANRCCLLRHLLRLYLDRVFKNYQTPDHYTLRKISSLANSFLTIKKDLRLCLEPQAAVVKALGELDILLQWMEETE

SEQ ID NO: 10875 - protein, 760 aa, Homo sapiens
MKLNVDGLLVYFPYDYIYPEQFSYMRELKRTLDAKGHGVLEMPSGTGKTVSLLALIMAYQRAYPLEVTKLIYCSRTVPEIEKVIEELRKLLNFYEKQEGEKLPFLGLALSSRKNLCIHPEVTPLRFGKDVDGKCHSLTASYVRAQYQHDTSLPHCRFYEEFDAHGREVPLPAGIYNLDDLKALGRRQGWCPYFLARYSILHANVVVYSYHYLLDPKIADLVSKELARKAVVVFDEAHNIDNVCIDSMSVNLTRRTLDRCQGNLETLQKTVLRIKETDEQRLRDEYRRLVEGLREASAARETDAHLANPVLPDEVLQEAVPGSIRTAEHFLGFLRRLLEYVKWRLRVQHVVQESPPAFLSGLAQRVCIQRKPLRFCAERLRSLLHTLEITDLADFSPLTLLANFATLVSTYAKGFTIIIEPFDDRTPTIANPILHFSCMDASLAIKPVFERFQSVIITSGTLSPLDIYPKILDFHPVTMATFTMTLARVCLCPMIIGRGNDQVAISSKFETREDIAVIRNYGNLLLEMSAVVPDGIVAFFTSYQYMESTVASWYEQGILENIQRNKLLFIETQDGAETSVALEKYQEACENGRGAILLSVARGKVSEGIDFVHHYGRAVIMFGVPYVYTQSRILKARLEYLRDQFQIRENDFLTFDAMRHAAQCVGRAIRGKTDYGLMVFADKRFARGDKRGKLPRWIQEHLTDANLNLTVDEGVQVAKYFLRQMAQPFHREDQLGLSLLSLEQLESEETLKRIEQIAQQL

SEQ ID NO: 10876 - protein, 269 aa, Homo sapiens
MLLLINVILTLWVSCANGQVKPCDFPDIKHGGLFHENMRRPYFPVAVGKYYSYYCDEHFETPSGSYWDYIHCTQNGWSPAVPCLRKCYFPYLENGYNQNYGRKFVQGNSTEVACHPGYGLPKAQTTVTCTEKGWSPTPRCIRVNSSEKCGPPPPISNGDTTSFLLKVYVPQSRVEYQCQPYYELQGSNYVTCSNGEWSEPPRCIHPCIITEENMNKNNIKLKGRSDRKYYAKTGDTIEFMCKLGYNANTSILSFQAVCREGIVEYPRCE

SEQ ID NO: 10877 - protein, 625 aa, Homo sapiens
MNAAVVRRTQEALGKVIRRPPLTEKLLSKPPFRYLHDIITEVIRMTGFMKGLYTDAEMKSDNVKDKDAKISFLQKAIDVVVMVSGEPLLAKPARIVAGHEPERTNELLQIIGKCCLNKLSSDDAVRRVLAGEKGEVKGRASLTSRSQELDNKNVREEESRVHKNTEDRGDAEIKERSTSRDRKQKEELKEDRKPREKDKDKEKAKENGGNRHREGERERAKARARPDNERQKDRGNRERDRDSERKKETERKSEGGKEKERLRDRDRERDRDKGKDRDRRRVKNGEHSWDLDREKNREHDKPEKKSASSGEMSKKLSDGTFKDSKAETETEISTRASKSLTTKTSKRRSKNSVEGDSTSDAEGDAGPAGQDKSEVPETPEIPNELSSNIRRIPRPGSARPAPPRVKRQDSMEALQMDRSGSGKTVSNVITESHNSDNEEDDQFVVEAAPQLSEMSEIEMVTAVELEEEEKHGGLVKKILETKKDYEKLQQSPKPGEKERSLFESAWKKEKDIVSKEIEKLRTSIQTLCKSALPLGKIMDYIQEDVDAMQNELQMWHSENRQHAEALQQEQRITDCAVEPLKAELAELEQLIKDQQDKICAVKANILKNEEKIQKMVYSINLTSRR

SEQ ID NO: 10878 - protein, 1036 aa, Homo sapiens
MRKHRHLPLVAVFCLFLSGFPTTHAQQQQAVIEVNKRDIVFLVDGSSALGLANFNAIRDFIAKVIQRLEIGQDLIQVAVAQYADTVRPEFYFNTHPTKREVITAVRKMKPLDGSALYTGSALDFVRNNLFTSSAGYRAAEGIPKLLVLITGGKSLDEISQPAQELKRSSIMAFAIGNKGADQAELEEIAFDSSLVFIPAEFRAAPLQGMLPGLLAPLRTLSGTPEVHSNKRDIIFLLDGSANVGKTNFPYVRDFVMNLVNSLDIGNDNIRVGLVQFSDTPVTEFSLNTYQTKSDILGHLRQLQLQGGSGLNTGSALSYVYANHFTEAGGSRIREHVPQLLLLLTAGQSEDSYLQAANALTRAGILTFCVGASQANKAELEQIAFNPSLVYLMDDFSSLPALPQQLIQPLTTYVSGGVEEVPLAQPESKRDILFLFDGSANLVGQFPVVRDFLYKIIDELNVKPEGTRIAVAQYSDDVKVESRFDEHQSKPEILNLVKRMKIKTGKALNLGYALDYAQRYIFVKSAGSRIEDGVLQFLVLLVAGRSSDRVDGPASNLKQSGVVPFIFQAKNADPAELEQIVLSPAFILAAESLPKIGDLHPQIVNLLKSVHNGAPAPVSGEKDVVFLLDGSEGVRSGFPLLKEFVQRVVESLDVGQDRVRVAVVQYSDRTRPEFYLNSYMNKQDVVNAVRQLTLLGGPTPNTGAALEFVLRNILVSSAGSRITEGVPQLLIVLTADRSGDDVRNPSVVVKRGGAVPIGIGIGNADITEMQTISFIPDFAVAIPTFRQLGTVQQVISERVTQLTREELSRLQPVLQPLPSPGVGGKRDVVFLIDGSQSAGPEFQYVRTLIERLVDYLDVGFDTTRVAVIQFSDDPKVEFLLNAHSSKDEVQNAVQRLRPKGGRQINVGNALEYVSRNIFKRPLGSRIEEGVPQFLVLISSGKSDDEVDDPAVELKQFGVAPFTIARNADQEELVKISLSPEYVFSVSTFRELPSLEQKLLTPITTLTSEQIQKLLASTRYPPPGEMGASEVLLGAFSI

SEQ ID NO: 10879 - protein, 1237 aa, Homo sapiens
MRKHRHLPLVAVFCLFLSGFPTTHAQQQQAAQDSADIIFLIDGSNNTGSVNFAVILDFLVNLLEKLPIGTQQIRVGVVQFSDEPRTMFSLDTYSTKAQVLGAVKALGFAGGELANIGLALDFVVENHFTRAGGSRVEEGVPQVLVLISAGPSSDEIRYGVVALKQASVFSFGLGAQAASRAELQHIATDDNLVFTVPEFRSFGDLQEKLLPYIVGVAQRHIVLKPPTIVTQVIEVNKRDIVFLVDGSSALGLANFNAIRDFIAKVIQRLEIGQDLIQVAVAQYADTVRPEFYFNTHPTKREVITAVRKMKPLDGSALYTGSALDFVRNNLFTSSAGYRAAEGIPKLLVLITGGKSLDEISQPAQELKRSSIMAFAIGNKGADQAELEEIAFDSSLVFIPAEFRAAPLQGMLPGLLAPLRTLSGTPEVHSNKRDIIFLLDGSANVGKTNFPYVRDFVMNLVNSLDIGNDNIRVGLVQFSDTPVTEFSLNTYQTKSDILGHLRQLQLQGGSGLNTGSALSYVYANHFTEAGGSRIREHVPQLLLLLTAGQSEDSYLQAANALTRAGILTFCVGASQANKAELEQIAFNPSLVYLMDDFSSLPALPQQLIQPLTTYVSGGVEEVPLAQPESKRDILFLFDGSANLVGQFPVVRDFLYKIIDELNVKPEGTRIAVAQYSDDVKVESRFDEHQSKPEILNLVKRMKIKTGKALNLGYALDYAQRYIFVKSAGSRIEDGVLQFLVLLVAGRSSDRVDGPASNLKQSGVVPFIFQAKNADPAELEQIVLSPAFILAAESLPKIGDLHPQIVNLLKSVHNGAPAPVSGEKDVVFLLDGSEGVRSGFPLLKEFVQRVVESLDVGQDRVRVAVVQYSDRTRPEFYLNSYMNKQDVVNAVRQLTLLGGPTPNTGAALEFVLRNILVSSAGSRITEGVPQLLIVLTADRSGDDVRNPSVVVKRGGAVPIGIGIGNADITEMQTISFIPDFAVAIPTFRQLGTVQQVISERVTQLTREELSRLQPVLQPLPSPGVGGKRDVVFLIDGSQSAGPEFQYVRTLIERLVDYLDVGFDTTRVAVIQFSDDPKVEFLLNAHSSKDEVQNAVQRLRPKGGRQINVGNALEYVSRNIFKRPLGSRIEEGVPQFLVLISSGKSDDEVDDPAVELKQFGVAPFTIARNADQEELVKISLSPEYVFSVSTFRELPSLEQKLLTPITTLTSEQIQKLLASTRYPPPGEMGASEVLLGAFSI

SEQ ID NO: 10880 - protein, 856 aa, Homo sapiens
MDVRRLKVNELREELQRRGLDTRGLKAELAERLQAALEAEEPDDERELDADDEPGRPGHINEEVETEGGSELEGTAQPPPPGLQPHAEPGGYSGPDGHYAMDNITRQNQFYDTQVIKQENESGYERRPLEMEQQQAYRPEMKTEMKQGAPTSFLPPEASQLKPDRQQFQSRKRPYEENRGRGYFEHREDRRGRSPQPPAEEDEDDFDDTLVAIDTYNCDLHFKVARDRSSGYPLTIEGFAYLWSGARASYGVRRGRVCFEMKINEEISVKHLPSTEPDPHVVRIGWSLDSCSTQLGEEPFSYGYGGTGKKSTNSRFENYGDKFAENDVIGCFADFECGNDVELSFTKNGKWMGIAFRIQKEALGGQALYPHVLVKNCAVEFNFGQRAEPYCSVLPGFTFIQHLPLSERIRGTVGPKSKAECEILMMVGLPAAGKTTWAIKHAASNPSKKYNILGTNAIMDKMRVMGLRRQRNYAGRWDVLIQQATQCLNRLIQIAARKKRNYILDQTNVYGSAQRRKMRPFEGFQRKAIVICPTDEDLKDRTIKRTDEEGKDVPDHAVLEMKANFTLPDVGDFLDEVLFIELQREEADKLVRQYNEEGRKAGPPPEKRFDNRGGGGFRGRGGGGGFQRYENRGPPGGNRGGFQNRGGGSGGGGNYRGGFNRSGGGGYSQNRWGNNNRDNNNSNNRGSYNRAPQQQPPPQQPPPPQPPPQQPPPPPSYSPARNPPGASTYNKNSNIPGSSANTSTPTVSSYSPPQPSYSQPPYNQGGYSQGYTAPPPPPPPPPAYNYGSYGGYNPAPYTPPPPPTAQTYPQPSYNQYQQYAQQWNQYYQNQGQWPPYYGNYDYGSYSGNTQGGTSTQ

SEQ ID NO: 10881 - protein, 160 aa, Homo sapiens
MNNARYLWKRIPPAIKSANSELGGIWSVGQRIWQRDFPGIYTTINAHQWSETVQPIMEALRDATRRRAFALVSQAYTSIIADDFAAFVGLPVEEAVKGILEQGWQADSTTRMVLPRKPVAGALDVSFNKFIPLSEPAPVPPIPNEQQLARLTDYVAFLEN

SEQ ID NO: 10882 - protein, 607 aa, Homo sapiens
MSSGLRAADFPRWKRHISEQLRRRDRLQRQAFEEIILQYNKLLEKSDLHSVLAQKLQAEKHDVPNRHEISPGHDGTWNDNQLQEMAQLRIKHQEELTELHKKRGELAQLVIDLNNQMQRKDREMQMNEAKIAECLQTISDLETECLDLRTKLCDLERANQTLKDEYDALQITFTALEGKLRKTTEENQELVTRWMAEKAQEANRLNAENEKDSRRRQARLQKELAEAAKEPLPVEQDDDIEVIVDETSDHTEETSPVRAISRAATKRLSQPAGGLLDSITNIFGRRSVSSFPVPQDNVDTHPGSGKEVRVPATALCVFDAHDGEVNAVQFSPGSRLLATGGMDRRVKLWEVFGEKCEFKGSLSGSNAGITSIEFDSAGSYLLAASNDFASRIWTVDDYRLRHTLTGHSGKVLSAKFLLDNARIVSGSHDRTLKLWDLRSKVCIKTVFAGSSCNDIVCTEQCVMSGHFDKKIRFWDIRSESIVREMELLGKITALDLNPERTELLSCSRDDLLKVIDLRTNAIKQTFSAPGFKCGSDWTRVVFSPDGSYVAAGSAEGSLYIWSVLTGKVEKVLSKQHSSSINAVAWSPSGSHVVSVDKGCKAVLWAQY

SEQ ID NO: 10883 - protein, 588 aa, Homo sapiens
MSSGLRAADFPRWKRHISEQLRRRDRLQRQAFEEIILQYNKLLEKSDLHSVLAQKLQAEKHDVPNRHEISPGHDGTWNDNQLQEMAQLRIKHQEELTELHKKRGELAQLVIDLNNQMQRKDREMQMNEAKIAECLQTISDLETECLDLRTKLCDLERANQTLKDEYDALQITFTALEGKLRKTTEENQELVTRWMAEKAQEANRLNAENEKDSRRRQARLQKELAEAAKEPLPVEQDDDIEVIVDETSDHTEETSPVRAISRAATRRSVSSFPVPQDNVDTHPGSGKEVRVPATALCVFDAHDGEVNAVQFSPGSRLLATGGMDRRVKLWEVFGEKCEFKGSLSGSNAGITSIEFDSAGSYLLAASNDFASRIWTVDDYRLRHTLTGHSGKVLSAKFLLDNARIVSGSHDRTLKLWDLRSKVCIKTVFAGSSCNDIVCTEQCVMSGHFDKKIRFWDIRSESIVREMELLGKITALDLNPERTELLSCSRDDLLKVIDLRTNAIKQTFSAPGFKCGSDWTRVVFSPDGSYVAAGSAEGSLYIWSVLTGKVEKVLSKQHSSSINAVAWSPSGSHVVSVDKGCKAVLWAQY

SEQ ID NO: 10884 - protein, 535 aa, Homo sapiens
MLGPCMLLLLLLLGLRLQLSLGIIPVEEENPDFWNREAAEALGAAKKLQPAQTAAKNLIIFLGDGMGVSTVTAARILKGQKKDKLGPEIPLAMDRFPYVALSKTYNVDKHVPDSGATATAYLCGVKGNFQTIGLSAAARFNQCNTTRGNEVISVMNRAKKAGKSVGVVTTTRVQHASPAGTYAHTVNRNWYSDADVPASARQEGCQDIATQLISNMDIDVILGGGRKYMFRMGTPDPEYPDDYSQGGTRLDGKNLVQEWLAKRQGARYVWNRTELMQASLDPSVTHLMGLFEPGDMKYEIHRDSTLDPSLMEMTEAALRLLSRNPRGFFLFVEGGRIDHGHHESRAYRALTETIMFDDAIERAGQLTSEEDTLSLVTADHSHVFSFGGYPLRGSSIFGLAPGKARDRKAYTVLLYGNGPGYVLKDGARPDVTESESGSPEYRQQSAVPLDEETHAGEDVAVFARGPQAHLVHGVQEQTFIAHVMAFAACLEPYTACDLAPPAGTTDAAHPGRSVVPALLPLLAGTLLLLETATAP

SEQ ID NO: 10885 - protein, 155 aa, Homo sapiens
MRRCNSGSGPPPSLLLLLLWLLAVPGANAAPRSALYSPSDPLTLLQADTVRGAVLGSRSAWAVEFFASWCGHCIAFAPTWKALAEDVKAWRPALYLAALDCAEETNSAVCRDFNIPGFPTVRFFKAFTKNGSGAVFPGWRRLMDSLREITKSTWL

SEQ ID NO: 10886 - protein, 355 aa, Homo sapiens
MFVDNRIQKSMLLDLNKEIMNELGVTVVGDIIAILKHAKVVHRQDMCKAATESVPCSPSPLAGEIRRGTSAASRMITNSLNHDSPPSTPPRRPDTSTSKISVTVSNKMAAKSAKATAALARREEESLAVPAKRRRVTAEMEGKYVINMPKGTTPRTRKILEQQQAAKGLHRTSVFDRLGAETKADTTTGSKPTGVFSRLGATPETDEDLAWDSDNDSSSSVLQYAGVLKKLGRGPAKASPQPALTVKAKATSSATTAAAPTLRRLALSSRSGLERKPESLSKVSIIKRLGAAALVPEAQDSQVTSTKSKSSAEVKVTIKRTLVGPRGSSSSEGLGAQMDHAGTVSVFKRLGRRTF

SEQ ID NO: 10887 - protein, 481 aa, Homo sapiens
MNEVSVIKEGWLHKRGEYIKTWRPRYFLLKSDGSFIGYKERPEAPDQTLPPLNNFSVAECQLMKTERPRPNTFVIRCLQWTTVIERTFHVDSPDEREEWMRAIQMVANSLKQRAPGEDPMDYKCGSPSDSSTTEEMEVAVSKARAKVTMNDFDYLKLLGKGTFGKVILVREKATGRYYAMKILRKEVIIAKDEVAHTVTESRVLQNTRHPFLTALKYAFQTHDRLCFVMEYANGGELFFHLSRERVFTEERARFYGAEIVSALEYLHSRDVVYRDIKLENLMLDKDGHIKITDFGLCKEGISDGATMKTFCGTPEYLAPEVLEDNDYGRAVDWWGLGVVMYEMMCGRLPFYNQDHERLFELILMEEIRFPRTLSPEAKSLLAGLLKKDPKQRLGGGPSDAKEVMEHRFFLSINWQDVVQKKLLPPFKPQVTSEVDTRYFDDEFTAQSITITPPDRYDSLGLLELDQRTHFPQFSYSASIRE

SEQ ID NO: 10888 - protein, 217 aa, Homo sapiens
MWQPATERLQHFQTMLKSKLNVLTLKKEPLPAVIFHEPEAIELCTTTPLMKTRTHSGCKVTYLGKVSTTGMQFLSGCTEKPVIELWKKHTLAREDVFPANALLEIRPFQVWLHHLDHKGEATVHMDTFQVARIAYCTADHNVSPNIFAWVYREINDDLSYQMDCHAVECESKLEAKKLAHAMMEAFRKTFHSMKSDGRIHSNSSSEEVSQELESDDG

SEQ ID NO: 10889 - protein, 270 aa, Homo sapiens
MDLQNDLGQTALHLAAILGETSTVEKLYAAGAGLCVAERRGHTALHLACRVGAHACARALLQPRPRRPREAPDTYLAQGPDRTPDTNHTPVALYPDSDLEKEEEESEEDWKLQLEAENYEGHTPLHVAVIHKDVEMVRLLRDAGADLDKPEPTCGRSPLHLAVEAQAADVLELLLRAGANPAARMYGGRTPLGSAMLRPNPILARLLRAHGAPEPEGEDEKSGPCSSSSDSDSGDEGDEYDDIVVHSSRSQTRLPPTPASKPLPDDPRPV

SEQ ID NO: 10890 - protein, 352 aa, Homo sapiens
MDFLRNLFSQTLSLGSQKERLLDELTLEGVARYMQSERCRRVICLVGAGISTSAGIPDFRSPSTGLYDNLEKYHLPYPEAIFEISYFKKHPEPFFALAKELYPGQFKPTICHYFMRLLKDKGLLLRCYTQNIDTLERIAGLEQEDLVEAHGTFYTSHCVSASCRHEYPLSWMKEKIFSEVTPKCEDCQSLVKPDIVFFGESLPARFFSCMQSDFLKVDLLLVMGTSLQVQPFASLISKAPLSTPRLLINKEKAGQSDPFLGMIMGLGGGMDFDSKKAYRDVAWLGECDQGCLALAELLGWKKELEDLVRREHASIDAQSGAGVPNPSTSASPKKSPPPAKDEARTTEREKPQ

SEQ ID NO: 10891 - protein, 277 aa, Homo sapiens
MASYYEILDVPRSASADDIKKAYRRKALQWHPDKNPDNKEFAEKKFKEVAEAYEVLSDKHKREIYDRYGREGLTGTGTGPSRAEAGSGGPGFTFTFRSPEEVFREFFGSGDPFAELFDDLGPFSELQNRGSRHSGPFFTFSSSFPGHSDFSSSSFSFSPGAGAFRSVSTSTTFVQGRRITTRRIMENGQERVEVEEDGQLKSVTINGVPDDLALGLELSRREQQPSVTSRSGGTQVQQTPASCPLDSDLSEDEDLQLAMAYSLSEMEAAGKKPADVF

SEQ ID NO: 10892 - protein, 552 aa, Homo sapiens
MKLTSCLERALGDVFLLIGKECPFLLRDLLSSEELAQVFSQSVMNVLKVFVGSPCGLNLRNVLWHGFASPEEIPPKYCSMMILLTAGLGQLLKSYLQNTKLTLAHRSFISLTNLEDLIVFPDVTYEVLSVLEEVMMKSAFILKIMLPYWEVALVKFKSHRFADCAILLLTQLETGLRNVFATLNRCPKRLLTAESTALYTTFDQILAKHLNDGKINQLPLFLGEPAMEFLWDFLNHQEGPRIRDHLSHGEINLHEFSKETTNQLLAFSLVLLLRFVDDCLLSVFKEKSAVELLISLAEGYSSRCHPVFQLKKQVLSCEESIRVWALLPFPEELTRQAVRLEDNSETNACHSLITKMTDELYHHMPENRCVLKDLDRLPTETWPQLLRELCSTPVPTLFCPRIVLEVLVVLRSISEQCRRVSSQVTVASELRHRQWVERTLRSRQRQNYLRMWSSIRLLSPVLSLILLLIALELVNIHAVCGKNAHEYQQYLKFVKSILQYTENLVAYTSYEKNKWNETINLTHTALLKMWTFSEKKQMLIHLAKKSTSKVLL

SEQ ID NO: 10893 - protein, 283 aa, Homo sapiens
MADPHQLFDDTSSAQSRGYGAQRAPGGLSYPAASPTPHAAFLADPVSNMAMAYGSSLAAQGKELVDKNIDRFIPITKLKYYFAVDTMYVGRKLGLLFFPYLHQDWEVQYQQDTPVAPRFDVNAPDLYIPAMAFITYVLVAGLALGTQDRFSPDLLGLQASSALAWLTLEVLAILLSLYLVTVNTDLTTIDLVAFLGYKYVGMIGGVLMGLLFGKIGYYLVLGWCCVAIFVFMIRTLRLKILADAAAEGVPVRGARNQLRMYLTMAVAAAQPMLMYWLTFHLVR

SEQ ID NO: 10894 - protein, 188 aa, Homo sapiens
MSTMFADTLLIVFISVCTALLAEGITWVLVYRTDKYKRLKAEVEKQSKKLEKKKETITESAGRQQKKKIERQEEKLKNNNRDLSMVRMKSMFAIGFCFTALMGMFNSIFDGRVVAKLPFTPLSYIQGLSHRNLLGDDTTDCSFIFLYILCTMSIRQNIQKILGLAPSRAATKQAGGFLGPPPPSGKFS

SEQ ID NO: 10895 - protein, 732 aa, Homo sapiens
MVRSGNKAAVVLCMDVGFTMSNSIPGIESPFEQAKKVITMFVQRQVFAENKDEIALVLFGTDGTDNPLSGGDQYQNITVHRHLMLPDFDLLEDIESKIQPGSQQADFLDALIVSMDVIQHETIGKKFEKRHIEIFTDLSSRFSKSQLDIIIHSLKKCDISLQFFLPFSLGKEDGSGDRGDGPFRLGGHGPSFPLKGITEQQKEGLEIVKMVMISLEGEDGLDEIYSFSESLRKLCVFKKIERHSIHWPCRLTIGSNLSIRIAAYKSILQERVKKTWTVVDAKTLKKEDIQKETVYCLNDDDETEVLKEDIIQGFRYGSDIVPFSKVDEEQMKYKSEGKCFSVLGFCKSSQVQRRFFMGNQVLKVFAARDDEAAAVALSSLIHALDDLDMVAIVRYAYDKRANPQVGVAFPHIKHNYECLVYVQLPFMEDLRQYMFSSLKNSKKYAPTEAQLNAVDALIDSMSLAKKDEKTDTLEDLFPTTKIPNPRFQRLFQCLLHRALHPREPLPPIQQHIWNMLNPPAEVTTKSQIPLSKIKTLFPLIEAKKKDQVTAQEIFQDNHEDGPTAKKLKTEQGGAHFSVSSLAEGSVTSVGSVNPAENFRVLVKQKKASFEEASNQLINHIEQFLDTNETPYFMKSIDCIRAFREEAIKFSEEQRFNNFLKALQEKVEIKQLNHFWEIVVQDGITLITKEEASGSSVTAEEAKKFLAPKDKPSGDTAAVFEEGGDVDDLLDMI

SEQ ID NO: 10896 - protein, 419 aa, Homo sapiens
MAQESVMFSDVSVDFSQEEWECLNDDQRDLYRDVMLENYSNLVSMAGHSISKPNVISYLEQGKEPWLADRELTRGQWPVLESRCETKKLFLKKEIYEIESTQWEIMEKLTRRDFQCSSFRDDWECNRQFKKELGSQGGHFNQLVFTHEDLPTLSHHPSFTLQQIINSKKKFCASKEYRKTFRHGSQFATHEIIHTIEKPYECKECGKSFRHPSRLTHHQKIHTGKKPFECKECGKTFICGSDLTRHHRIHTGEKPYECKECGKAFSSGSNFTRHQRIHTGEKPYECKECGKAFSSGSNFTQHQRIHTGEKPYECKECGNAFSQSSQLIKHQRIHTGEKPYECKECEKAFRSGSDLTRHQRIHTGEKPYECKICGKAYSQSSQLISHHRIHTSEKPYEYRECGKNFNYDPQLIQHQNLYW

SEQ ID NO: 10897 - protein, 586 aa, Homo sapiens [sequence omitted]

SEQ ID NO: 10898 - protein, 595 aa, Homo sapiens
MATKARVMYDFAAEPGNNELTVNEGEIITITNPDVGGGWLEGRNIKGERGLVPTDYVEILPSDGKDQFSCGNSVADQAFLDSLSASTAQASSSAASNNHQVGSGNDPWSAWSASKSGNWESSEGWGAQPEGAGAQRNTNTPNNWDTAFGHPQAYQGPATGDDDDWDEDWDGPKSSSYFKDSESADAGGAQRGNSRASSSSMKIPLNKFPGFAKPGTEQYLLAKQLAKPKEKIPIIVGDYGPMWVYPTSTFDCVVADPRKGSKMYGLKSYIEYQLTPTNTNRSVNHRYKHFDWLYERLLVKFGSAIPIPSLPDKQVTGRFEEEFIKMRMERLQAWMTRMCRHPVISESEVFQQFLNFRDEKEWKTGKRKAERDELAGVMIFSTMEPEAPDLDLVEIEQKCEAVGKFTKAMDDGVKELLTVGQEHWKRCTGPLPKEYQKIGKALQSLATVFSSSGYQGETDLNDAITEAGKTYEEIASLVAEQPKKDLHFLMECNHEYKGFLGCFPDIIGTHKGAIEKVKESDKLVATSKITLQDKQNMVKRVSIMSYALQAEMNHFHSNRIYDYNSVIRLYLEQQVQFYETIAEKLRQALSRFPVM

SEQ ID NO: 10899 - protein, 291 aa, Homo sapiens
MAISSSSCELPLVAVCQVTSTPDKQQNFKTCAELVREAARLGACLAFLPEAFDFIARDPAETLHLSEPLGGKLLEEYTQLARECGLWLSLGGFHERGQDWEQTQKIYNCHVLLNSKGAVVATYRKTHLCDVEIPGQGPMCESNSTMPGPSLESPVSTPAGKIGLAVCYDMRFPELSLALAQAGAEILTYPSAFGSITGPAHWEVLLRARAIETQCYVVAAAQCGRHHEKRASYGHSMVVDPWGTVVARCSEGPGLCLARIDLNYLRQLRRHLPVFQHRRPDLYGNLGHPLS

SEQ ID NO: 10900 - protein, 86 aa, Homo sapiens
MAEDMETKIKNYKTAPFDSRFPNQNQTRNCWQNYLDFHRCQKAMTAKGGDISVCEWYQRVYQSLCPTSWVTDWDEQRAEGTFPGKI

SEQ ID NO: 10901 - protein, 175 aa, Homo sapiens
MLFLATFFPTWEGGIYDFIGEFMKASVDVADLIGLNLVMSRNAGKGEYKIMVAALGWATAELIMSRCIPLWVGARGIEFDWKYIQMSIDSNISLVHYIVASAQVWMITRYDLYHTFRPAVLLLMFLSVYKAFVMETFVHLCSLGSWAALLARAVVTGLLALSTLALYVAVVNVHS

SEQ ID NO: 10902 - protein, 626 aa, Homo sapiens
MIFLTALPLFWIMISASRGGHWGAWMPSSISAFEGTCVSIPCRFDFPDELRPAVVHGVWYFNSPYPKNYPPVVFKSRTQVVHESFQGRSRLLGDLGLRNCTLLLSNVSPELGGKYYFRGDLGGYNQYTFSEHSVLDIVNTPNIVVPPEVVAGTEVEVSCMVPDNCPELRPELSWLGHEGLGEPAVLGRLREDEGTWVQVSLLHFVPTREANGHRLGCQASFPNTTLQFEGYASMDVKYPPVIVEMNSSVEAIEGSHVSLLCGADSNPPPLLTWMRDGTVLREAVAESLLLELEEVTPAEDGVYACLAENAYGQDNRTVGLSVMYAPWKPTVNGTMVAVEGETVSILCSTQSNPDPILTIFKEKQILSTVIYESELQLELPAVSPEDDGEYWCVAENQYGQRATAFNLSVEFAPVLLLESHCAAARDTVQCLCVVKSNPEPSVAFELPSRNVTVNESEREFVYSERSGLVLTSILTLRGQAQAPPRVICTARNLYGAKSLELPFQGAHRLMWAKIGPVGAVVAFAILIAIVCYITQTRRKKNVTESPSFSAGDNPPVLFSSDFRISGAPEKYESERRLGSERRLLGLRGEPPELDLSYSHSDLGKRPTKDSYTLTEELAEYAEIRVK

SEQ ID NO: 10903 - protein, 494 aa, Homo sapiens
MGGAGILLLLLAGAGVVVAWRPPKGKCPLRCSCSKDSALCEGSPDLPVSFSPTLLSLSLVRTGVTQLKAGSFLRIPSLHLLLFTSNSFSVIEDDAFAGLSHLQYLFIEDNEIGSISKNALRGLRSLTHLSLANNHLETLPRFLFRGLDTLTHVDLRGNPFQCDCRVLWLLQWMPTVNASVGTGACAGPASLSHMQLHHLDPKTFKCRAIELSWFQTVGESALSVEPFSYQGEPHIVLAQPFAGRCLILSWDYSLQRFRPEEELPGEPPPRPSACPAACLAGLTCLPTSPQRPPWCPASHWCWARASSCWLPACGGAHSCGPGPVPACAWPQRRPWPRGGCCGPMTPSSCGWKGNPASWWPMPPRRAAPRCCAATGPAFTRTRACTPGTGTRTLRPWSWTAGPTCCWPRLPSGPCSSTGPVAASRDAQTSPRPRMSMPHATSRLVGTCSCASHATLGTPWSCAGTAPCFVCCSNFPRAVPTSSSHCSSPGTSWPS

SEQ ID NO: 10904 - protein, 311 aa, Homo sapiens
MLLWTAVLLFVPCVGKTVWLYLQAWPNPVFEGDALTLRCQGWKNTPLSQVKFYRDGKFLHFSKENQTLSMGAATVQSRGQYSCSGQVMYIPQTFTQTSETAMVQVQAPVSRPVLTLHHGPADPAVGDMVQLLCEAQRGSPPILYSFYLDEKIVGNHSAPCGGTTSLLFPVKSEQDAGNYSCEAENSVSRERSEPKKLSLKGSQVLFTPASNWLVPWLPASLLGLMVIAAALLVYVRSWRKAGPLPSQIPPTAPGGEQCPLYANVHHQKGKDEGVVYSVVHRTSKRSEARSAEFTVGRKFYHLCGGEMPAAQ

SEQ ID NO: 10905 - protein, 101 aa, Homo sapiens
MSDQEAKPSTEDLGDKKEGEYIKLKVIGQDSSEIHFKVKMTTHLKKLKESYCQRQGVPMNSLRFLFEGQRIADNHTPKELGMEEEDVIEVYQEQTGGHSTV

SEQ ID NO: 10906 - protein, 77 aa, Homo sapiens
MTSGQFKPVPQILMELPPAEQQRLFNEAAAIIRHLEWTDAVQLTALVMGSEALQQQLLAMLVNYVTKELRAEIQYDD

SEQ ID NO: 10907 - protein, 161 aa, Homo sapiens
MSVTLHTDVGDIKIEVFCERTPKTCENFLALCASNYYNGCIFHRNIKGFMVQTGDPTGTGRGGNSIWGKKFEDEYSEYLKHNVRGVVSMANNGPNTNGSQFFITYGKQPHLDMKYTVFGKVIDGLETLDELEKLPVNEKTYRPLNDVHIKDITIHANPFAQ

SEQ ID NO: 10908 - protein, 1107 aa, Homo sapiens
MAKMEVKTSLLDNMIGVGDMVLLEPLNEETFINNLKKRFDHSEIYTYIGSVVISVNPYRSLPIYSPEKVEEYRNRNFYELSPHIFALSDEAYRSLRDQDKDQCILITGESGAGKTEASKLVMSYVAAVCGKGAEVNQVKEQLLQSNPVLEAFGNAKTVRNDNSSRFGKYMDIEFDFKGDPLGGVISNYLLEKSRVVKQPRGERNFHVFYQLLSGASEELLNKLKLERDFSRYNYLSLDSAKVNGVDDAANFRTVRNAMQIVGFMDHEAESVLAVVAAVLKLGNIEFKPESRVNGLDESKIKDKNELKEICELTGIDQSVLERAFSFRTVEAKQEKVSTTLNVAQAYYARDALAKNLYSRLFSWLVNRINESIKAQTKVRKKVMGVLDIYGFEIFEDNSFEQFIINYCNEKLQQIFIELTLKEEQEEYIREDIEWTHIDYFNNAIICDLIENNTNGILAMLDEECLRPGTVTDETFLEKLNQVCATHQHFESRMSKCSRFLNDTSLPHSCFRIQHYAGKVLYQVEGFVDKNNDLLYRDLSQAMWKASHALIKSLFPEGNPAKINLKRPPTAGSQFKASVATLMKNLQTKNPNYIRCIKPNDKKAAHIFNEALVCHQIRYLGLLENVRVRRAGYAFRQAYEPCLERYKMLCKQTWPHWKGPARSGVEVLFNELEIPVEEYSFGRSKIFIRNPRTLFKLEDLRKQRLEDLATLIQKIYRGWKCRTHFLLMKKSQIVIAAWYRRYAQQKRYQQTKSSALVIQSYIRGWKARKILRELKHQKRCKEAVTTIAAYWHGTQARRELKRLKEEARRKHAVAVIWAYWLGLKVRREYRKFFRANAGKKIYEFTLQRIVQKYFLEMKNKMPSLSPIDKNWPSRPYLFLDSTHKELKRIFHLWRCKKYRDQFTDQQKLIYEEKLEASELFKDKKALYPSSVGQPFQGAYLEINKNPKYKKLKDAIEEKIIIAEVVNKINRANGKSTSRIFLLTNNNLLLADQKSGQIKSEVPLVDVTKVSMSSQNDGFFAVHLKEGSEAASKGDFLFSSDHLIEMATKLYRTTLSQTKQKLNIEISDEFLVQFRQDKVCVKFIQGNQKNGSVPTCKRKNNRLLEVAVP

SEQ ID NO: 10909 - protein, 344 aa, Homo sapiens
MNLLPCNPHGNGLLYAGFNQDHGCFACGMENGFRVYNTDPLKEKEKQEFLEGGVGHVEMLFRCNYLALVGGGKKPKYPPNKVMIWDDLKKKTVIEIEFSTEVKAVKLRRDRIVVVLDSMIKVFTFTHNPHQLHVFETCYNPKGLCVLCPNSNNSLLAFPGTHTGHVQLVDLASTEKPPVDIPAHEGVLSCIALNLQGTRIATASEKGTLIRIFDTSSGHLIQELRRGSQAANIYCINFNQDASLICVSSDHGTVHIFAAEDPKRNKQSSLASASFLPKYFSSKWSFSKFQVPSGSPCICAFGTEPNAVIAICADGSYYKFLFNPKGECIRDVYAQFLEMTDDKL

SEQ ID NO: 10910 - protein, 409 aa, Homo sapiens
MELRVGNRYRLGRKIGSGSFGDIYLGTDIAAGEEVAIKLECVKTKHPQLHIESKIYKMMQGGVGIPTIRWCGAEGDYNVMVMELLGPSLEDLFNFCSRKFSLKTVLLLADQMISRIEYIHSKNFIHRDVKPDNFLMGLGKKGNLVYIIDFGLAKKYRDARTHQHIPYRENKNLTGTARYASINTHLGIEQSRRDDLESLGYVLMYFNLGSLPWQGLKAATKRQKYERISEKKMSTPIEVLCKGYPSEFATYLNFCRSLRFDDKPDYSYLRQLFRNLFHRQGFSYDYVFDWNMLKFGASRAADDAERERRDREERLRHSRNPATRGLPSTASGRLRGTQEVAPPTPLTPTSHTANTSPRPVSGMERERKVSMRLHRGAPVNISSSDLTGRQDTSRMSTSQNSIPFEHHGK

SEQ ID NO: 10911 - protein, 465 aa, Homo sapiens
MGGAVVDEGPTGVKAPDGGWGWAVLFGCFVITGFSYAFPKAVSVFFKELIQEFGIGYSDTAWISSILLAMLYGTGPLCSVCVNRFGCRPVMLVGGLFASLGMVAASFCRSIIQVYLTTGVITGLGLALNFQPSLIMLNRYFSKRRPMANGLAAAGSPVFLCALSPLGQLLQDRYGWRGGFLILGGLLLNCCVCAALMRPLVVTAQPGSGPPRPSRRLLDLSVFRDRGFVLYAVAASVMVLGLFVPPVFVVSYAKDLGVPDTKAAFLLTILGFIDIFARPAAGFVAGLGKVRPYSVYLFSFSMFFNGLADLAGSTAGDYGGLVVFCIFFGISYGMVGALQFEVLMAIVGTHKFSSAIGLVLLMEAVAVLVGPPSGGKLLDATHVYMYVFILAGAEVLTSSLILLLGNFFCIRKKPKEPQPEVAAAEEEKLHKPPADSGVDLREVEHFLKAEPEKNGEVVHTPETSV

SEQ ID NO: 10912 - protein, 81 aa, Homo sapiens
MEGAGAGSGFRKELVSRLLHLHFKDDKTKVSGDALQLMVELLKVFVVEAAVRGVRQAQAEDALRVDVDQLEKVLPQLLLDF

SEQ ID NO: 10913 - protein, 216 aa, Homo sapiens
MAAQGEPQVQFKLVLVGDGGTGKTTFVKRHLTGEFEKKYVATLGVEVHPLVFHTNRGPIKFNVWDTAGQEKFGGLRDGYYIQAQCAIIMFDVTSRVTYKNVPNWHRDLVRVCENIPIVLCGNKVDIKDRKVKAKSIVFHRKKNLQYYDISAKSNYNFEKPFLWLARKLIGDPNLEFVAMPALAPPEVVMDPALAAQYEHDLEVAQTTALPDEDDDL

SEQ ID NO: 10914 - protein, 461 aa, Homo sapiens [sequence omitted]

SEQ ID NO: 10915 - protein, 288 aa, Homo sapiens
MRDRLPDLTACRKNDDGDTVVVVEKDHFMDDFFHQVEEIRNSIDKITQYVEEVKKNHSIILSAPNPEGKIKEELEDLNKEIKKTANKIRAKLKAIEQSFDQDESGNRTSVDLRIRRTQHSVLSRKFVEAMAEYNEAQTLFRERSKGRIQRQLEITGRTTTDDELEEMLESGKPSIFTSDIISDSQITRQALNEIESRHKDIMKLETSIRELHEMFMDMAMFVETQGEMINNIERNVMNATDYVEHAKEETKKAIKYQSKARRKKWIIIAVSVVLVAIIALIIGLSVGK

SEQ ID NO: 10916 - protein, 871 aa, Homo sapiens
MPVRKQDTQRALHLLEEYRSKLSQTEDRQLRSSIERVINIFQSNLFQALIDIQEFYEVTLLDNPKCIDRSKPSEPIQPVNTWEISSLPSSTVTSETLPSSLSPSVEKYRYQDEDTPPQEHISPQITNEVIGPELVHVSEKNLSEIENVHGFVSHSHISPIKANPPPVLVNTDSLETPTYVNGTDADYEYEEITLERGNSGLGFSIAGGTDNPHIGDDSSIFITKIITGGAAAQDGRLRVNDCILRVNEVDVRDVTHSKAVEALKEAGSIVRLYVKRRKPVSEKIMEIKLIKGPKGLGFSIAGGVGNQHIPGDNSIYVTKIIEGGAAHKDGKLQIGDKLLAVNNVCLEEVTHEEAVTALKNTSDFVYLKVAKPTSMYMNDGYAPPDITNSSSQPVDNHVSPSSFLGQTPASPARYSPVSKAVLGDDEITREPRKVVLHRGSTGLGFNIVGGEDGEGIFISFILAGGPADLSGELRKGDRIISVNSVDLRAASHEQAAAALKNAGQAVTIVAQYRPEEYSRFEAKIHDLREQMMNSSISSGSGSLRTSQKRSLYVRALFDYDKTKDSGLPSQGLNFKFGDILHVINASDDEWWQARQVTPDGESDEVGVIPSKRRVEKKERARLKTVKFNSKTRDKGEIPDDMGSKGLKHVTSNASDSESSYRGQEEYVLSYEPVNQQEVNYTRPVIILGPMKDRINDDLISEFPDKFGSCVPHTTRPKRDYEVDGRDYHFVTSREQMEKDIQEHKFIEAGQYNNHLYGTSVQSVREVAEKGKHCILDVSGNAIKRLQIAQLYPISIFIKPKSMENIMEMNKRLTEEQARKTFERAMKLEQEFTEHFTAIVQGDTLEDIYNQVKQIIEEQSGSYIWVPAKEKL

SEQ ID NO: 10917 - protein, 422 aa, Homo sapiens
MPAGRRGPAAQSARRPPPLLPLLLLLCVLGAPRAGSGAHTAVISPQDPTLLIGSSLLATCSVHGDPPGATAEGLYWTLNGRRLPPELSRVLNASTLALALANLNGSRQRSGDNLVCHARDGSILAGSCLYVGLPPEKPVNISCWSKNMKDLTCRWTPGAHGETFLHTNYSLKYKLRWYGQDNTCEEYHTVGPHSCHIPKDLALFTPYEIWVEATNRLGSARSDVLTLDILDVVTTDPPPDVHVSRVGGLEDQLSVRWVSPPALKDFLFQAKYQIRYRVEDSVDWKVVDDVSNQTSCRLAGLKPGTVYFVQVRCNPFGIYGSKKAGIWSEWSHPTAASTPRSERPGPGGGACEPRGGEPSSGPVRRELKQFLGWLKKHAYCSNLSFRLYDQWRAWMQKSHKTRNQDEGILPSGRRGTARGPAR

SEQ ID NO: 10918 - protein, 290 aa, Homo sapiens
MVTSSFPISVAVFALITLQVGTQDSFIAAVYEHAVILPNKTETPVSQEDALNLMNENIDILETAIKQAAEQGARIIVTPEDALYGWKFTRETVFPYLEDIPDPQVNWIPCQDPHRFGHTPVQARLSCLAKDNSIYVLANLGDKKPCNSRDSTCPPNGYFQYNTNVVYNTEGKLVARYHKYHLYSEPQFNVPEKPELVTFNTAFGRFGIFTCFDIFFYDPGVTLVKDFHVDTILFPTAWMNVLPLLTAIEFHSAWAMGMGVNLLVANTHHVSLNMTVVFMHQMVPKCIIMT

SEQ ID NO: 10919 - protein, 258 aa, Homo sapiens
LAARVAAVRAAAWLLLGAATGLTRGPAAAFTAARSDAGIRAMCSEIILRQEVLKDGFHRDLLIKVKFGESIEDLHTCRLLIKQDIPAGLYVDPYELASLRERNITEAVMVSENFDIEAPNYLSKESEVLIYARRDSQCIDCFQAFLPVHCRYHRPHSEDGEASIVVNNPDLLMFCDQEFPILKCWAHSEVAAPCALENEDICQWNKMKYKSVYKNVILQVPVGLTVHTSLVCSVTLLITILCSTLILVAVFKYGHFSL

SEQ ID NO: 10920 - protein, 115 aa, Homo sapiens
MCCWPLLLLWGLLPGTAAGGSGRTYPHRTLLDSEGKYWLGWSQRGSQIAFRLQVRTAGYVGFGFSPTGAMASADIVVGGVAHGRPYLQPCLLVSKTEACDAKCLQQQGNCCRATC

SEQ ID NO: 10921 - protein, 2964 aa, Homo sapiens
MDPRNTAMLGLGSDSEGFSRKSPSAISTGTLVSKREVELEKNTKEEEDLRKRNRERNIEAGKDDGLTDAQQQFSVKETNFSEGNLKLKIGLQAKRTKKPPKNLENYVCRPAIKTTIKHPRKALKSGKMTDEKNEHCPSKRDPSKLYKKADDVAAIECQSEEVIRLHSQGENNPLSKKLSPVHSEMADYINATPSTLLGSRDPDLKDRALLNGGTSVTEKLAQLIATCPPSKSSKTKPKKLGTGTTAGLVSKDLIRKAGVGSVAGIIHKDLIKKPTISTAVGLVTKDPGKKPVFNAAVGLVNKDSVKKLGTGTTAVFINKNLGKKPGTITTVGLLSKDSGKKLGIGIVPGLVHKESGKKLGLGTVVGLVNKDLGKKLGSTVGLVAKDCAKKIVASSAMGLVNKDIGKKLMSCPLAGLISKDAINLKAEALLPTQEPLKASCSTNINNQESQELSESLKDSATSKTFEKNVVRQNKESILEKFSVRKEIINLEKEMFNEGTCIQQDSFSSSEKGSYETSKHEKQPPVYCTSPDFKMGGASDVSTAKSPFSAVGESNLPSPSPTVSVNPLTRSPPETSSQLAPNPLLLSSTTELIEEISESVGKNQFTSESTHLNVGHRSVGHSISIECKGIDKEVNDSKTTHIDIPRISSSLGKKPSLTSESSIHTITPSVVNFTSLFSNKPFLKLGAVSASDKHCQVAESLSTSLQSKPLKKRKGRKPRWTKVVARSTCRSPKGLELERSELFKNVSCSSLSNSNSEPAKFMKNIGPPSFVDHDFLKRRLPKLSKSTAPSLALLADSEKPSHKSFATHKLSSSMCVSSDLLSDIYKPKRGRPKSKEMPQLEGPPKRTLKIPASKVFSLQSKEEQEPPILQPEIEIPSFKQGLSVSPFPKKRGRPKRQMRSPVKMKPPVLSVAPFVATESPSKLESESDNHRSSSDFFESEDQLQDPDDLDDSHRPSVCSMSDLEMEPDKKITKRNNGQLMKTIIRKINKMKTLKRKKLLNQILSSSVESSNKGKVQSKLHNTVSSLAATFGSKLGQQINVSKKGTIYIGKRRGRKPKTVLNGILSGSPTSLAVLEQTAQQAAGSALGQILPPLLPSSASSSEILPSPICSQSSGTSGGQSPVSSDAGFVEPSSVPYLHLHSRQGSMIQTLAMKKASKGRRRLSPPTLLPNSPSHLSELTSLKEATPSPISESHSDETIPSDSGIGTDNNSTSDRAEKFCGQKKRRHSFEHVSLIPPETSTVLSSLKEKHKHKCKRRNHDYLSYDKMKRQKRKRKKKYPQLRNRQDPDFIAELEELISRLSEIRITHRSHHFIPRDLLPTIFRINFNSFYTHPSFPLDPLHYIRKPDLKKKRGRPPKMREAMAEMPFMHSLSFPLSSTGFYPSYGMPYSPSPLTAAPIGLGYYGRYPPTLYPPPPSPSFTTPLPPPSYMHAGHLLLNPAKYHKKKHKLLRQEAFLTTSRTPLLSMSTYPSVPPEMAYGWMVEHKHRHRHKHREHRSSEQPQVSMDTGSSRSVLESLKRYRFGKDAVGERYKHKEKHRCHMSCPHLSPSKSLINREEQWVHREPSESSPLALGLQTPLQIDCSESSPSLSLGGFTPNSEPASSDEHTNLFTSAIGSCRVSNPNSSGRKKLTDSPGLFSAQDTSLNRLHRKESLPSNERAVQTLAGSQPTSDKPSQRPSESTNCSPTRKRSSSESTSSTVNGVPSRSPRLVASGDDSVDSLLQRMVQNEDQEPMEKSIDAVIATASAPPSSSPGRSHSKDRTLGKPDSLLVPAVTSDSCNNSISLLSEKLTSSCSPHHIKRSVVEAMQRQARKMCNYDKILATKKNLDHVNKILKAKKLQRQARTGNNFVKRRPGRPRKCPLQAVVSMQAFQAAQFVNPELNRDEEGAALHLSPDTVTDVIEAVVQSVNLNPEHKKGLKRKGWLLEEQTRKKQKPLPEEEEQENNKSFNEAPVEIPSPSETPAKPSEPESTLQPVLSLIPREKKPPRPPKKKYQKAGLYSDVYKTTDPKSRLIQLKKEKLEYTPGEHEYGLFPAPIHVGKYLRQKRIDFQLPYDILWQWKHNQLYKKPDVPLYKKIRSNVYVDVKPLSGYEATTCNCKKPDDDTRKGCVDDCLNRMIFAECSPNTCPCGEQCCNQRIQRHEWVQCLERFRAEEKGWGIRTKEPLKAGQFIIEYLGEVVSEQEFRNRMIEQYHNHSDHYCLNLDSGMVIDSYRMGNEARFINHSCDPNCEMQKWSVNGVYRIGLYALKDMPAGTELTYDYNFHSFNVEKQQLCKCGFEKCRGIIGGKSQRVNGLTSSKNSQPMATHKKSGRSKEKRKSKHKLKKRRGHLSEEPSENINTPTRLTPQLQMKPMSNRERNFVLKHHVFLVRNWEKIRQKQEEVKHTSDNIHSASLYTRWNGICRDDGNIKSDVFMTQFSALQTARSVRTRRLAAAEENIEVARAARLAQIFKEICDGIISYKDSSRQALAAPLLNLPPKKKNADYYEKISDPLDLITIEKQILTGYYKTVEAFDADMLKVFRNAEKYYGRKSPVGRDVCRLRKAYYNARHEASAQIDEIVGETASEADSSETSVSEKENGHEKDDDVIRCICGLYKDEGLMIQCDKCMVWQHCDCMGVNSDVEHYLCEQCDPRPVDREVPMIPRPHYAQPGCVYFICLLRDDLLLRQGDCVYLMRDSRRTPDGHPVRQSYRLLSHINRDKLDIFRIEKLWKNEKEERFAFGHHYFRPHETHHSPSRRFYHNELFRVPLYEIIPLEAVVGTCCVLDLYTYCKGRPKGVKEQDVYICDYRLDKSAHLFYKIHRNRYPVCTKPYAFDHFPKKLTPKKDFSPHYVPDNYKRNGGRSSWKSERSKPPLKDLGQEDDALPLIEEVLASQEQAANEIPSLEEPEREGATANVSEGEKKTEESSQEPQSTCTPEERRHNQRERLNQILLNLLEKIPGKNAIDVTYLLEEGSGRKLRRRTLFIPENSFRK

SEQ ID NO: 10922 - protein, 543 aa, Homo sapiens
MEGPAGYLRRASVAQLTQELGTAFFQQQQLPAAMADTFLEHLCLLDIDSEPVAARSTSIIATIGPASRSVERLKEMIKAGMNIARLNFSHGSHEYHAESIANVREAVESFAGSPLSYRPVAIALDTKGPEIRTGILQGGPESEVELVKGSQVLVTVDPAFRTRGNANTVWVDYPNIVRVVPVGGRIYIDDGLISLVVQKIGPEGLVTQVENGGVLGSRKGVNLPGAQVDLPGLSEQDVRDLRFGVEHGVDIVFASFVRKASDVAAVRAALGPEGHGIKIISKIENHEGVKRFDEILEVSDGIMVARGDLGIEIPAEKVFLAQKMMIGRCNLAGKPVVCATQMLESMITKPRPTRAETSDVANAVLDGADCIMLSGETAKGNFPVEAVKMQHAIAREAEAAVYHRQLFEELRRAAPLSRDPTEVTAIGAVEAAFKCCAAAIIVLTTTGRSAQLLSRYRPRAAVIAVTRSAQAARQVHLCRGVFPLLYREPPEAIWADDVDRRVQFGIESGKLRGFLRVGDLVIVVTGWRPGSGYTNIMRVLSIS

SEQ ID NO: 10923 - protein, 207 aa, Homo sapiens
MSSDRQRSDDESPSTSSGSSDADQRDPAAPEPEEQEERKPSATQQKKNTKLSSKTTAKLSTSAKRIQKELAEITLDPPPNCSAGPKGDNIYEWRSTILGPPGSVYEGGVFFLDITFSSDYPFKPPKVTFRTRIYHCNINSQGVICLDILKDNWSPALTISKVLLSICSLLTDCNPADPLVGSIATQYLTNRAEHDRIARQWTKRYAT

SEQ ID NO: 10924 - protein, 978 aa, Homo sapiens
MWRLRRAAVACEVCQSLVKHSSGIKGSLPLQKLHLVSRSIYHSHHPTLKLQRPQLRTSFQQFSSLTNLPLRKLKFSPIKYGYQPRRNFWPARLATRLLKLRYLILGSAVGGGYTAKKTFDQWKDMIPDLSEYKWIVPDIVWEIDEYIDFEKIRKALPSSEDLVKLAPDFDKIVESLSLLKDFFTSGHKLVSEVIGASDLLLLLGSPEETAFRATDRGSESDKHFRKVSDKEKIDQLQEELLHTQLKYQRILERLEKENKELRKLVLQKDDKGIHHRKLKKSLIDMYSEVLDVLSDYDASYNTQDHLPRVVVVGDQSAGKTSVLEMIAQARIFPRGSGEMMTRSPVKVTLSEGPHHVALFKDSSREFDLTKEEDLAALRHEIELRMRKNVKEGCTVSPETISLNVKGPGLQRMVLVDLPGVINTVTSGMAPDTKETIFSISKAYMQNPNAIILCIQDGSVDAERSIVTDLVSQMDPHGRRTIFVLTKVDLAEKNVASPSRIQQIIEGKLFPMKALGYFAVVTGKGNSSESIEAIREYEEEFFQNSKLLKTSMLKAHQVTTRNLSLAVSDCFWKMVRESVEQQADSFKATRFNLETEWKNNYPRLRELDRNELFEKAKNEILDEVISLSQVTPKHWEEILQQSLWERVSTHVIENIYLPAAQTMNSGTFNTTVDIKLKQWTDKQLPNKAVEVAWETLQEEFSRFMTEPKGKEHDDIFDKLKEAVKEESIKRHKWNDFAEDSLRVIQHNALEDRSISDKQQWDAAIYFMEEALQARLKDTENAIENMVGPDWKKRWLYWKNRTQEQCVHNETKNELEKMLKCNEEHPAYLASDEITTVRKNLESRGVEVDPSLIKDTWHQVYRRHFLKTALNHCNLCRRGFYYYQRHFVDSELECNDVVLFWRIQRMLAITANTLRQQLTNTEVRRLEKNVKEVLEDFAEDGEKKIKLLTGKRVQLAEDLKKVREIQEKLDAFIEALHQEK

SEQ ID NO: 10925 - protein, 482 aa, Homo sapiens
MAEVSIDQSKLPGVKEVCRDFAVLEDHTLAHSLQEQEIEHHLASNVQRNRLVQHDLQVAKQLQEEDLKAQAQLQKRYKDLEQQDCEIAQEIQEKLAIEAERRRIQEKKDEDIARLLQEKELQEEKKRKKHFPEFPATRAYADSYYYEDGDQPGSRRARELGSGFSRPCRLQRDGKTVKHKKEKPEHPLENLEEPEQHCSSKRSLSSSSSGKGRDNPHINNEQHERKRSTQERPRRPLLPTISGEVFLSTECDDWETKINHQTRNWEKQSRHQDRLSPKSSQKAGLHCKEVVYGRDHGQGEHRKRRHRPRTPPFSESEEQLHLHDAGMKPRVMKEAVSTPSRMAHRDQEWYDAEIARKLQEEELLATQVDMRAAQVAQDEEIARLLMAEEKKAYKKAKEREKSSLDKRKQDPEWKPKTAKAANSKSKESDEPHHSKNERPARPPPPIMTDGEDADYTHFTNQQSSTRHFSKSESSHKGFHYKH

SEQ ID NO: 10926 - protein, 306 aa, Homo sapiens
MAEVSIDQSKLPGVKEVCRDFAVLEDHTLAHSLQEQEIEHHLASNVQRNRLVQHDLQVAKQLQEEDLKAQAQLQKRYKDLEQQDCEIAQEIQEKLAIEAERRRIQEKKDEDIARLLQEKELQEEKKRKKHFPEFPATRAYADSYYYEDGGMKPRVMKEAVSTPSRMAHRDQEWYDAEIARKLQEEELLATQVDMRAAQVAQDEEIARLLMAEEKKAYKKAKEREKSSLDKRKQDPEWKPKTAKAANSKSKESDEPHHSKNERPARPPPPIMTDGEDADYTHFTNQQSSTRHFSKSESSHKGFHYKH

SEQ ID NO: 10927 - protein, 354 aa, Homo sapiens
MFGQIQSPGYPDSYPSDSEVTWNITVPDGFRIKLYFMHFNLESSYLCEYDYVKVETEDQVLATFCGRETTDTEQTPGQEVVLSPGSFMSITFRSDFSNEERFTGFDAHYMAVDVDECKEREDEELSCDHYCHNYIGGYYCSCRFGYILHTDNRTCRVECSDNLFTQRTGVITSPDFPNPYPKSSECLYTIELEEGFMVNLQFEDIFDIEDHPEVPCPYDYIKIKVGPKVLGPFCGEKAPEPISTQSHSVLILFHSDNSGENRGWRLSYRAAGNECPELQPPVHGKIEPSQAKYFFKDQVLVSCDTGYKVLKDNVEMDTFQIECLKDGTWSNKIPTCKKNEIDLESELKSEQVTE

SEQ ID NO: 10928 - protein, 533 aa, Homo sapiens
MSSCVSSQPSSNRAAPQDELGGRGSSSSESQKPCEALRGLSSLSIHLGMESFIVVTECEPGCAVDLGLARDRPLEADGQEVPLDTSGSQARPHLSGRKLSLQERSQGGLAAGGSLDMNGRCICPSLPYSPVSSPQSSPRLPRRPTVESHHVSITGMQDCVQLNQYTLKDEIGKGSYGVVKLAYNENDNTYYAMKVLSKKKLIRQAGFPRRPPPRGTRPAPGGCIQPRGPIEQVYQEIAILKKLDHPNVVKLVEVLDDPNEDHLYMVFELVNQGPVMEVPTLKPLSEDQARFYFQDLIKGIEYLHYQKIIHRDIKPSNLLVGEDGHIKIADFGVSNEFKGSDALLSNTVGTPAFMAPESLSETRKIFSGKALDVWAMGVTLYCFVFGQCPFMDERIMCLHSKIKSQALEFPDQPDIAEDLKDLITRMLDKNPESRIVVPEIKLHPWVTRHGAEPLPSEDENCTLVEVTEEEVENSVKHIPSLATVILVKTMIRKRSFGNPFEGSRREERSLSAPGNLLTKKPTRECESLSELKT

SEQ ID NO: 10929 - protein, 204 aa, Homo sapiens
MRPTFMSFRWLLLYYALCFSLSKASAHTVELNNMFGQIQSPGYPDSYPSDSEVTWNITVPDGFRIKLYFMHFNLESSYLCEYDYVKVETEDQVLATFCGRETTDTEQTPGQEVVLSPGSFMSITFRSDFSNEERFTGFDAHYMAVDVDECKEREDEELSCDHYCHNYIGGYYCSCRFGYILHTDNRTCRVECSDNLFTQRTGVI

SEQ ID NO: 10930 - protein, 384 aa, Homo sapiens
MDPAGGPRGVLPRPCRVLVLLNPRGGKGKALQLFRSHVQPLLAEAEISFTLMLTERRNHARELVRSEELGRWDALVVMSGDGLMHEVVNGLMERPDWETAIQKPLCSLPAGSGNALAASLNHYAGYEQVTNEDLLTNCTLLLCRRLLSPMNLLSLHTASGLRLFSVLSLAWGFIADVDLESEKYRRLGEMRFTLGTFLRLAALRTYRGRLAYLPVGRVGSKTPASPVVVQQGPVDAHLVPLEEPVPSHWTVVPDEDFVLVLALLHSHLGSEMFAAPMGRCAAGVMHLFYVRAGVSRAMLLRLFLAMEKGRHMEYECPYLVYVPVVAFRLEPKDGKGVFAVDGELMVSEAVQGQVHPNYFWMVSGCVEPPPSWKPQQMPPPEEPL

SEQ ID NO: 10931 - protein, 378 aa, Homo sapiens
MEVKPPPGRPQPDSGRRRRRRGEEGHDPKEPEQLRKLFIGGLSFETTDDSLREHFEKWGTLTDCVVMRDPQTKRSRGFGFVTYSCVEEVDAAMCARPHKVDGRVVEPKRAVSREDSVKPGAHLTVKKIFVGGIKEDTEEYNLRDYFEKYGKIETIEVMEDRQSGKKRGFAFVTFDDHDTVDKIVVQKYHTINGHNCEVKKALSKQEMQSAGSQRGRGGGSGNFMGRGGNFGGGGGNFGRGGNFGGRGGYGGGGGGSRGSYGGGDGGYNGFGGDGGNYGGGPGYSSRGGYGGGGPGYGNQGGGYGGGGGYDGYNEGGNFGGGNYGGGGNYNDFGNYSGQQQSNYGPMKGGSFGGRSSGSPYGGGYGSGGGSGGYGSRRF

SEQ ID NO: 10932 - protein, 898 aa, Homo sapiens
MRKGVLKDPEIADLFYKDDPEELFIGLHEIGHGSFGAVYFATNAHTSEVVAIKKMSYSGKQTHEKWQDILKEVKFLRQLKHPNTIEYKGCYLKEHTAWLVMEYCLGSASDLLEVHKKPLQEVEIAAITHGALHGLAYLHSHALIHRDIKAGNILLTEPGQVKLADFGSASMASPANSFVGTPYWMAPEVILAMDEGQYDGKVDIWSLGITCIELAERKPPLFNMNAMSALYHIAQNDSPTLQSNEWTDSFRRFVDYCLQKIPQERPTSAELLRHDFVRRDRPLRVLIDLIQRTKDAVRELDNLQYRKMKKILFQETRNGPLNESQEDEEDSEHGTSLNREMDSLGSNHSIPSMSVSTGSQSSSVNSMQEVMDESSSELVMMHDDESTINSSSSVVHKKDHVFIRDEAGHGDPRPEPRPTQSVQSQALHYRNRERFATIKSASLVTRQIHEHEQENELREQMSGYKRMRRQHQKQLIALENKLKAEMDEHRLKLQKEVETHANNSSIELEKLAKKQVAIIEKEAKVAAADEKKFQQQILAQQKKDLTTFLESQKKQYKICKEKIKEEMNEDHSTPKKEKQERISKHKENLQHTQAEEEAHLLTQQRLYYDKNCRFFKRKIMIKRHEVEQQNIREELNKKRTQKEMEHAMLIRHDESTRELEYRQLHTLQKLRMDLIRLQHQTELENQLEYNKRRERELHRKHVMELRQQPKNLKAMEMQIKKQFQDTCKVQTKQYKALKNHQLEVTPKNEHKTILKTLKDEQTRKLAILAEQYEQSINEMMASQALRLDEAQEAECQALRLQLQQEMELLNAYQSKIKMQTEAQHERELQKLEQRVSLRRAHLEQKIEEELAALQKERSERIKNLLERQEREIETFDMESLRMGFGNLVTLDFPKEDYR

SEQ ID NO: 10933 - protein, 319 aa, Homo sapiens
MVEKYRPQTLNDLISHQDILSTIQKFINEDRLPHLLLYGPPGTGKTSTILACAKQLYKDKEFGSMVLELNASDDRGIDIIRGPILSFASTRTIFKKGFKLVILDEADAMTQDAQNALRRVIEKFTENTRFCLICNYLSKIIPALQSRCTRFRFGPLTPELMVPRLEHVVEEEKVDISEDGMKALVTLSSGDMRRALNILQSTNMAFGKVTEETVYTCTGHPLKSDIANILDWMLNQDFTTAYRNITELKTLKGLALHDILTEIHLFVHRVDFPSSVRIHLLTKMADIEYRLSVGTNEKIQLSSLIAAFQVTRDLIVAEA

SEQ ID NO: 10934 - protein, 485 aa, Homo sapiens
MAAELYAPASAAAADLANSNAGAAVGRKAGPRSPPSAPAPAPPPPAPAPPTLGNNHQESPGWRCCRPTLRERNALMFNNELMADVHFVVGPPGATRTVPAHKYVLAVGSSVFYAMFYGDLAEVKSEIHIPDVEPAAFLILLKYMYSDEIDLEADTVLATLYAAKKYIVPALAKACVNFLETSLEAKNACVLLSQSRLFEEPELTQRCWEVIDAQAEMALRSEGFCEIDRQTLEIIVTREALNTKEAVVFEAVLNWAEAECKRQGLPITPRNKRHVLGRALYLVRIPTMTLEEFANGAAQSDILTLEETHSIFLWYTATNKPRLDFPLTKRKGLAPQRCHRFQSSAYRSNQWRYRGRCDSIQFAVDRRVFIAGLGLYGSSSGKAEYSVKIELKRLGVVLAQNLTKFMSDGSSNTFPVWFEHPVQVEQDTFYTASAVLDGSELSYFGQEGMTEVQCGKVAFQFQCSSDSTNGTGVQGGQIPELIFYA

SEQ ID NO: 10935 - protein, 748 aa, Homo sapiens
MNYQEAAIYLQEGENNDKFFTHPKDAKALAAYLFAHNHLFYLMELATALLLLLLSLCEAPAVPALRLGIYVHATLELFALMVVVFELCMKLRWLGLHTFIRHKRTMVKTSVLVVQFVEAIVVLVRQMSHVRVTRALRCIFLVDCRYCGGVRRNLRQIFQSLPPFMDILLLLLFFMIIFAILGFYLFSPNPSDPYFSTLENSIVSLFVLLTTANFPDVMMPSYSRNPWSCVFFIVYLSIELYFIMNLLLAVVFDTFNDIEKRKFKSLLLHKRTAIQHAYRLLISQRRPAGISYRQFEGLMRFYKPRMSARERYLTFKALNQNNTPLLSLKDFYDIYEVAALKWKAKKNREHWFDELPRTALLIFKGINILVKSKAFQYFMYLVVAVNGVWILVETFMLKGGNFFSKHVPWSYLVFLTIYGVELFLKVAGLGPVEYLSSGWNLFDFSVTVFAFLGLLALALNMEPFYFIVVLRPLQLLRLFKLKERYRNVLDTMFELLPRMASLGLTLLIFYYSFAIVGMEFFCGIVFPNCCNTSTVADAYRWRNHTVGNRTVVEEGYYYLNNFDNILNSFVTLFELTVVNNWYIIMEGVTSQTSHWSRLYFMTFYIVTMVVMTIIVAFILEAFVFRMNYSRKNQDSEVDGGITLEKEISKEELVAVLELYREARGASSDVTRLLETLSQMERYQQHSMVFLGRRSRTKSDLSLKMYQEEIQEWYEEHAREQEQQRQLSSSAAPAAQQPPGSRQRSQTVT

SEQ ID NO: 10936 - protein, 456 aa, Homo sapiens
MRLARLLRGAALAGPGPGLRAAGFSRSFSSDSGSSPASERGVPGQVDFYARFSPSPLSMKQFLDFGSVNACEKTSFMFLRQELPVRLANIMKEISLLPDNLLRTPSVQLVQSWYIQSLQELLDFKDKSAEDAKAIYERPRRTWLQVSSLCCMACKMIFTDTVIRIRNRHNDVIPTMAQGVIEYKESFGVDPVTSQNVQYFLDRFYMSRISIRMLLNQHSLLFGGKGKGSPSHRKHIGSINPNCNVLEVIKDGYENARRLCDLYYINSPELELEELNAKSPGQPIQVVYVPSHLYHMVFELFKNAMRATMEHHANRGVYPPIQVHVTLGNEDLTVKMSDRGGGVPLRKIDRLFNYMYSTAPRPRVETSRAVPLAGFGYGLPISRLYAQYFQGDLKLYSLEGYGTDAVIYIKALSTDSIERLPVYNKAAWKHYNTNHEADDWCVPSREPKDMTTFRSA

SEQ ID NO: 10937 - protein, 687 aa, Homo sapiens
MGNGESQLSSVPAQKLGWFIQEYLKPYEECQTLIDEMVNTICDVLQEPEQFPLVQGVAIGGSYGRKTVLRGNSDGTLVLFFSDLKQFQDQKRSQRDILDKTGDKLKFCLFTKWLKNNFEIQKSLDGFTIQVFTKNQRISFEVLAAFNALSLNDNPSPWIYRELKRSLDKTNASPGEFAVCFTELQQKFFDNRPGKLKDLILLIKHWHQQCQKKIKDLPSLSPYALELLTVYAWEQGCRKDNFDIAEGVRTVLELIKCQEKLCIYWMVNYNFEDETIRNILLHQLQSARPVILDPVDPTNNVSGDKICWQWLKKEAQTWLTSPNLDNELPAPSWNVLPAPLFTTPGHLLDKFIKEFLQPNKCFLEQIDSAVNIIRTFLKENCFRQSTAKIQIVRGGSTAKGTALKTGSDADLVVFHNSLKSYTSQKNERHKIVKEIHEQLKAFWREKEEELEVSFEPPKWKAPRVLSFSLKSKVLNESVSFDVLPAFNALGQLSSGSTPSPEVYAGLIDLYKSSDLPGGEFSTCFTVLQRNFIRSRPTKLKDLIRLVKHWYKECERKLKPKGSLPPKYALELLTIYAWEQGSGVPDFDTAEGFRTVLELVTQYQQLCIFWKVNYNFEDETVRKFLLSQLQKTRPVILDPAEPTGDVGGGDRWCWHLLAKEAKEWLSSPCFKDGTGNPIPPWKVPVKVI

SEQ ID NO: 10938 - protein, 291 aa, Homo sapiens
MNMIWRNSISCLRLGKVPHRYQSGYHPVAPLGSRILTDPAKVFEHNMWDHMQWSKEEEAAARKKVKENSAVRVLLEEQVKYEREASKYWDTFYKIHKNKFFKDRNWLLREFPEILPVDQKPEEKARESSWDHVKTSATNRFSRMHCPTVPDEKNHYEKSSGSSEGQSKTESDFSNLDSEKHKKGPMETGLFPGSNATFRILEVGCGAGNSVFPILNTLENSPESFLYCCDFASGAVELVKSHSSYRATQCFAFVHDVCDDGLPYPFPDGILDVILLVFVLSSIHPDRTLFI

SEQ ID NO: 10939 - protein, 205 aa, Homo sapiens
MWLLPALLLLCLSGCLSLKGPGSVTGTAGDSLTVWCQYESMYKGYNKYWCRGQYDTSCESIVETKGEEKVERNGRVSIRDHPEALAFTVTMQNLNEDDAGSYWCKIQTVWVLDSWSRDPSDLVRVYVSPAITTPRRTTHPATPPIFLVVNPGRNLSTGEVLTQNSGFRLSSPHFLLVVLLKLPLLLSMLGAVFWVNRPQWAPPGR

SEQ ID NO: 10940 - protein, 201 aa, Homo sapiens
MWLPPALLLLSLSGCFSIQGPESVRAPEQGSLTVQCHYKQGWETYIKWWCRGVRWDTCKILIETRGSEQGEKSDRVSIKDNQKDRTFTVTMEGLRRDDADVYWCGIERRGPDLGTQVKVIVDPEGAASTTASSPTNSNMAVFIGSHKRNHYMLLVFVKVPILLILVTAILWLKGSQRVPEEPGEQPIYMNFSEPLTKDMAT

SEQ ID NO: 10941 - protein, 1249 aa, Homo sapiens
MSVKEGAQRKWAALKEKLGPQDSDPTEANLESADPELCIRLLQMPSVVNYSGLRKRLEGSDGGWMVQFLEQSGLDLLLEALARLSGRGVARISDALLQLTCVSCVRAVMNSRQGIEYILSNQGYVRQLSQALDTSNVMVKKQVFELLAALCIYSPEGHVLTLDALDHYKTVCSQQYRFSIVMNELSGSDNVPYVVTLLSVINAVILGPEDLRARTQLRNEFIGLQLLDVLARLRDLEDADLLIQLEAFEEAKAEDEEELLRVSGGVDMSSHQEVFASLFHKVSCSPVSAQLLSVLQGLLHLEPTLRSSQLLWEALESLVNRAVLLASDAQECTLEEVVERLLSVKGRPRPSPLVKAHKSVQANLDQSQRGSSPQNTTTPKPSVEGQQPAAAAACEPVDHAQSESILKVSQPRALEQQASTPPPPPPPPLLPGSSAEPPPPPPPPPLPSVGAKALPTAPPPPPLPGLGAMAPPAPPLPPPLPGSCEFLPPPPPPLPGLGCPPPPPPLLPGMGWGPPPPPPPLLPCTCSPPVAGGMEEVIVAQVDHGLGSAWVPSHRRVNPPTLRMKKLNWQKLPSNVAREHNSMWASLSSPDAEAVEPDFSSIERLFSFPAAKPKEPTMVAPRARKEPKEITFLDAKKSLNLNIFLKQFKCSNEEVAAMIRAGDTTKFDVEVLKQLLKLLPEKHEIENLRAFTEERAKLASADHFYLLLLAIPCYQLRIECMLLCEGAAAVLDMVRPKAQLVLAACESLLTSRQLPIFCQLILRIGNFLNYGSHTGDADGFKISTLLKLTETKSQQNRVTLLHHVLEEAEKSHPDLLQLPRDLEQPSQAAGINLEIIRSEASSNLKKLLETERKVSASVAEVQEQYTERLQASISAFRALDELFEAIEQKQRELADYLCEDAQQLSLEDTFSTMKAFRDLFLRALKENKDRKEQAAKAERRKQQLAEEEARRPRGEDGKPVRKGPGKQEEVCVIDALLADIRKGFQLRKTARGRGDTDGGSKAASMDPPRATEPVATSNPAGDPVGSTRCPASEPGLDATTASESRGWDLVDAVTPGPQPTLEQLEEGGPRPLERRSSWYVDASDVLTTEDPQCPQPLEGAWPVTLGDAQALKPLKFSSNQPPAAGSSRQDAKDPTSLLGVLQAEADSTSEGLEDAVHSRGARPPAAGPGGDEDEDEEDTAPESALDTSLDKSFSEDAVTDSSGSGTLPRARGRASKGTGKRRKKRPSRSQEEVPPDSDDNKTKKLCVIQ

SEQ ID NO: 10942 - protein, 867 aa, Homo sapiens
MLSPNDKMLGKLDPFYQPSVSKQKTSAEIISEARNALRTVRTQRPFTPQEAQRKLFGPASSRTSENRPPSSFSLHASSFESSDSRPISGTRLSPLELKPKVPASPTREEDSCFSFPKPPVDPAKIRRVSNARARLFRAASQRALLPDRSLPPSDSKKTVESKETVMMGDSMVKINGIYLTKSNAICHLKSHPLQLTDDGGFSEIKEQEMFKGTTSLPSHLKNGGDQGKRHARASSCPSSSDLSRLQTKAVPKADLQEEDAEIEVDEVFWNTRIVPILRELEKEENIETVCAACTQLHHALEEGNMLGNKFKGRSILLKTLCKLVDVGSDSLSLKLAKIILALKVSRKNLLNVCKLIFKISRNEKNDSLIQNDSILESLLEVLRSEDLQTNMEAFLYCMGSIKFISGNLGFLNEMISKGAVEILINLIKQINENIKKCGTFLPNSGHLLVQVTATLRNLVDSSLVRSKFLNISALPQLCTAMEQYKGDKDVCTNIARIFSKLTSYRDCCTALASYSRCYALFLNLINKYQKKQDLVVRVVFILGNLTAKNNQAREQFSKEKGSIQTLLSLFQTFHQLDLHSQKPVGQRGEQHRAQRPPSEAEDVLIKLTRVLANIAIHPGVGPVLAANPGIVGLLLTTLEYKSLDDCEELVINATATINNLSYYQVKNSIIQDKKLYIAELLLKLLVSNNMDGILEAVRVFGNLSQDHDVCDFIVQNNVHRFMMALLDAQHQDICFSACGVLLNLTVDKDKRVILKEGGGIKKLVDCLRDLGPTDWQLACLVCKTLWNFSENITNASSCFGNEDTNTLLLLLSSFLDEELALDGSFDPDLKNYHKLHWETEFKPVAQQLLNRIQRHHTFLEPLPIPSF

SEQ ID NO: 10943 - protein, 2172 aa, Homo sapiens
MWGLLIWTLLALHQIRAARAQDDVSPYFKTEPVRTQVHLEGNRLVLTCMAEGSWPLEFKWLHNNRELTKFSLEYRYMITSLDRTHAGFYRCIVRNRMGALLQRQTEVQVAYMGSFEEGEKHQSVSHGEAAVIRAPRIASFPQPQVTWFRDGRKIPPSSRIAITLENTLVILSTVAPDAGRYYVQAVNDKNGDNKTSQPITLTVENVGGPADPIAPTIIIPPKNTSVVAGTSEVTLECVANARPLIKLHIIWKKDGVLLSGGISDHNRRLTIPNPTGSDAGYYECEAVLRSSSVPSVVRGAYLSVLEPPQFVKEPERHITAEMEKVVDIPCQAKGVPPPSITWYKDAAVVEVEKLTRFRQRNDGGLQISGLVPDDTGMFQCFARNAAGEVQTSTYLAVTSIAPNITRGPLDSTVIDGMSVVLACETSGAPRPAITWQKGERILASGSVQLPRFTPLESGSLLISPTHISDAGTYTCLATNSRGVDEASADLVVWARTRITKPPQDQSVIKGTQASMVCGVTHDPRVTIRYIWEKDGATLGTESHPRIRLDRNGSLHISQTWSGDIGTYTCRVISAGGNDSRSAHLRVRQLPHAPEHPVATLSTVERRAINLTWTKPFDGNSPLIRYILEMSENNAPWTVLLASVDPKATSVTVKGLVPARSYQFRLCAVNDVGKGQFSKDTERVSLPEEPPTAPPQNVIASGRTNQSIMIQWQPPPESHQNGILKGYIIRYCLAGLPVGYQFKNITDADVNNLLLEDLIIWTNYEIEVAAYNSAGLGVYSSKVTEWTLQGVPTVPPGNVHAEATNSTTIRFTWNAPSPQFINGINQGYKLIAWEPEQEEEVTMVTARPNFQDSIHVGFVSGLKKFTEYFTSVLCFTTPGDGPRSTPQLVRTHEDVPGPVGHLSFSEILDTSLKVSWQEPGEKNGILTGYRISWEEYNRTNTRVTHYLPNVTLEYRVTGLTALTTYTIEVAAMTSKGQGQVSASTISSGVPPELPGPPTNLGISNIGPRSVTLQFRPGYDGKTSISRWLVEAQVGVVGEGEEWLLIHQLSNEPDARSMEVPDLNPFTCYSFRMRQVNIVGTSPPSQPSRKIQTLQAPPDMAPANVSLRTASETSLWLRWMPLPEMEYNGNPESVGYKIKYSRSDGHGKTLSHVVQDRVERDYTIEDLEEWTEYRVQVQAFNAIGSGPWSQTVVGRTRESVPSSGPTNVSALATTSSSMLVRWSEVPEADRNGLVLGYKVMYKEKDSDTQPRFWLVEGNSSRSAQLTGLGKYVLYEVQVLAFTRIGDGSPSHPPILERTLDDVPGPPMGILFPEVRTTSVRLIWQPPAAPNGIILAYQITHRLNTTTANTATVEVLAPSARQYTATGLKPESVYLFRITAQTRKGWGEAAEALVVTTEKRDRPQPPSRPMVQQEDVRARSVLLSWEPGSDGLSPVRYYTIQTRELPSGRWALHSASVSHNASSFIVDRLKPFTSYKFRVKATNDIGDSEFSEESESLTTLQAAPDEAPTILSVTPHTTTSVLIRWQPPAEDKINGILLGFRIRYRELLYEGLRGFTLRGINNPGATWAELTSMYSMRNLSRPSLTQYELDNLNKHRRYEIRMSVYNAVGEGPSSPPQEVFVGEAVPTAAPRNVVVHGATATQLDVTWEPPPLDSQNGDIQGYKIYFWEAQRGNLTERVKTLFLAENSVKLKNLTGYTAYMVSVAAFNAAGDGPRSTPTQGQTQQAAPSAPSSVKFSELTTTSVNVSWEAPQFPNGILEGYRLVYEPCSPVDGVSKIVTVDVKGNSPLWLKVKDLAEGVTYRFRIRAKTFTYGPEIEANVTTGPGEGAPGPPGVPIIVRYSSAIAIHWSSGDPGKGPITRYVIEARPSDEGLWDILIKDIPKEVSSYTFSMDILKPGVSYDFRVIAVNDYGFGTPSSPSQSVPAQKANPFYEEWWFLVVIALVGLIFILLLVFVLIIRGQSKKYAKKTDSGNSAKSGALGHSEMMSLDESSFPALELNNRRLSVKNSFCRKNGLYTRSPPRPSPGSLHYSDEDVTKYNDLIPAESSSLTEKPSEISDSQGSDSEYEVDSNHQKAHSFVNHYISDPTYYNSWRRQQKGISRAQAYSYTESDSGEPDHTTVTNSTSTQQGSLFRPKASRTPTPQNPPNPPSQQSTLYRPPSSLAPGSRAPIAGFSSFV

SEQ ID NO: 10944 - protein, 140 aa, Homo sapiens
MLLTLEQEAKRQRLPMPSPERLDKVVDSMDALDKVVQEREDALRLLQTGQERARPGAWRRDIFGRIIWHKFKQWVIPWHLNKRYNRKRFFALPYVDHFLRLEREKRARIKARKENLERKKAKILLKKFPHLAEAQKSSLV

SEQ ID NO: 10945 - protein, 387 aa, Homo sapiens
MVVERDDGSTLMEIDGDKGKQGGPTYYIDTNALRVPRENMEAISPLKNGMVEDWDSFQAILDHTYKMHVKSEASLHPVLMSEAPWNTRAKREKLTELMFEHYNIPAFFLCKTAVLTAFANGRSTGLILDSGATHTTAIPVHDGYVLQQGIVKSPLAGDFITMQCRELFQEMNIELVPPYMIASKEAVREGSPANWKRKEKLPQVTRSWHNYMCNCVIQDFQASVLQVSDSTYDEQVAAQMPTVHYEFPNGYNCDFGAERLKIPEGLFDPSNVKGLSGNTMLGVSHVVTTSVGMCDIDIRPGLYGSVIVAGGNTLIQSFTDRLNRELSQKTPPSMRLKLIANNTTVERRFSSWIGGSILASLGTFQQMWISKQEYEEGGKQCVERKCP

SEQ ID NO: 10946 - protein, 320 aa, Homo sapiens
MSVLDALWEDRDVRFDLSAQQMKTRPGEVLIDCLDSIEDTKGNNGDRGRLLVTNLRILWHSLALSRVNVSVGYNCILNITTRTANSKLRGQTEALYILTKCNSTRFEFIFTNLVPGSPRLFTSVMAVHRAYETSKMYRDFKLRSALIQNKQLRLLPQEHVYDKINGVWNLSSDQGNLGTFFITNVRIVWHANMNDSFNVSIPYLQISGGYVLGFKIDPVEKLQESVKEINSLHKVYSASPIFGVDYEMEEKPQPLEALTVEQIQDDVEIDSDGHTDAFVAYFADGNKQQDREPVFSEELGLAIEKLKDGFTLQGLWEVMS

SEQ ID NO: 10947 - protein, 333 aa, Homo sapiens
MVSKSRWKLLAMLALVLVVMVWYSISREDRYIELFYFPIPEKKEPCLQGEAESKASKLFGNYSRDQPIFLRLEDYFWVKTPSAYELPYGTKGSEDLLLRVLAITSSSIPKNIQSLRCRRCVVVGNGHRLRNSSLGDAINKYDVVIRLNNAPVAGYEGDVGSKTTMRLFYPESAHFDPKVENNPDTLLVLVAFKAMDFHWIETILSDKKRVRKGFWKQPPLIWDVNPKQIRILNPFFMEIAADKLLSLPMQQPRKIKQKPTTGLLAITLALHLCDLVHIAGFGYPDAYNKKQTIHYYEQITLKSMAGSGHNVSQEALAIKRMLEMGAIKNLTSF

SEQ ID NO: 10948 - protein, 1642 aa, Homo sapiens
MSTAIREVGVWRQTRTLLLKNYLIKCRTKKSSVQEILFPLFFLFWLILISMMHPNKKYEEVPNIELNPMDKFTLSNLILGYTPVTNITSSIMQKVSTDHLPDVIITEEYTNEKEMLTSSLSKPSNFVGVVFKDSMSYELRFFPDMIPVSSIYMDSRAGCSKSCEAAQYWSSGFTVLQASIDAAIIQLKTNVSLWKELESTKAVIMGETAVVEIDTFPRGVILIYLVIAFSPFGYFLAIHIVAEKEKKIKEFLKIMGLHDTAFWLSWVLLYTSLIFLMSLLMAVIATASLLFPQSSSIVIFLLFFLYGLSSVFFALMLTPLFKKSKHVGIVEFFVTVAFGFIGLMIILIESFPKSLVWLFSPFCHCTFVIGIAQVMHLEDFNEGASFSNLTAGPYPLIITIIMLTLNSIFYVLLAVYLDQVIPGEFGLRRSSLYFLKPSYWSKSKRNYEELSEGNVNGNISFSEIIEPVSSEFVGKEAIRISGIQKTYRKKGENVEALRNLSFDIYEGQITALLGHSGTGKSTLMNILCGLCPPSDGFASIYGHRVSEIDEMFEARKMIGICPQLDIHFDVLTVEENLSILASIKGIPANNIIQEVQKVLLDLDMQTIKDNQAKKLSGGQKRKLSLGIAVLGNPKILLLDEPTAGMDPCSRHIVWNLLKYRKANRVTVFSTHFMDEADILADRKAVISQGMLKCVGSSMFLKSKWGIGYRLSMYIDKYCATESLSSLVKQHIPGATLLQQNDQQLVYSLPFKDMDKFSGLFSALDSHSNLGVISYGVSMTTLEDVFLKLEVEAEIDQADYSVFTQQPLEEEMDSKSFDEMEQSLLILSETKAALVSTMSLWKQQMYTIAKFHFFTLKRESKSVRSVLLLLLIFFTVQIFMFLVHHSFKNAVVPIKLVPDLYFLKPGDKPHKYKTSLLLQNSADSDISDLISFFTSQNIMVTMINDSDYVSVAPHSAALNVMHSEKDYVFAAVFNSTMVYSLPILVNIISNYYLYHLNVTETIQIWSTPFFQEITDIVFKIELYFQAALLGIIVTAMPPYFAMENAENHKIKAYTQLKLSGLLPSAYWIGQAVVDIPLFFIILILMLGSLLAFHYGLYFYTVKFLAVVFCLIGYVPSVILFTYIASFTFKKILNTKEFWSFIYSVAALACIAITEITFFMGYTIATILHYAFCIIIPIYPLLGCLISFIKISWKNVRKNVDTYNPWDRLSVAVISPYLQCVLWIFLLQYYEKKYGGRSIRKDPFFRNLSTKSKNRKLPEPPDNEDEDEDVKAERLKVKELMGCQCCEEKPSIMVSNLHKEYDDKKDFLLSRKVKKVATKYISFCVKKGEILGLLGPNGAGKSTIINILVGDIEPTSGQVFLGDYSSETSEDDDSLKCMGYCPQINPLWPDTTLQEHFEIYGAVKGMSASDMKEVISRITHALDLKEHLQKTVKKLPAGIKRKLCFALSMLGNPQITLLDEPSTGMDPKAKQHMWRAIRTAFKNRKRAAILTTHYMEEAEAVCDRVAIMVSGQLRCIGTVQHLKSKFGKGYFLEIKLKDWIENLEVDRLQREIQYIFPNASRQESFSSILAYKIPKEDVQSLSQSFFKLEEAKHAFAIEEYSFSQATLEQVFVELTKEQEEEDNSCGTLNSTLWWERTQEDRVVF

SEQ ID NO: 10949 - protein, 914 aa, Homo sapiens
MAENSVLTSTTGRTSLADSSIFDSKVTEISKENLLIGSTSYVEEEMPQIETRVILVQEAGKQEELIKALKTIKIMEVPVIKIKESCPGKSDEKLIKSVINMDIKVGFVKMESVEEFEGLDSPEFENVFVVTDFQDSVFNDLYKADCRVIGPPVVLNCSQKGEPLPFSCRPLYCTSMMNLVLCFTGFRKKEELVRLVTLVHHMGGVIRKDFNSKVTHLVANCTQGEKFRVAVSLGTPIMKPEWIYKAWERRNEQDFYAAVDDFRNEFKVPPFQDCILSFLGFSDEEKTNMEEMTEMQGGKYLPLGDERCTHLVVEENIVKDLPFEPSKKLYVVKQEWFWGSIQMDARAGETMYLYEKANTPELKKSVSMLSLNTPNSNRKRRRLKETLAQLSRETDVSPFPPRKRPSAEHSLSIGSLLDISNTPESSINYGDTPKSCTKSSKSSTPVPSKQSARWQVAKELYQTESNYVNILATIIQLFQVPLEEEGQRGGPILAPEEIKTIFGSIPDIFDVHTKIKDDLEDLIVNWDESKSIGDIFLKYSKDLVKTYPPFVNFFEMSKETIIKCEKQKPRFHAFLKINQAKPECGRQSLVELLIRPVQRLPSVALLLNDLKKHTADENPDKSTLEKAIGSLKEVMTHINEDKRKTEAQKQIFDVVYEVDGCPANLLSSHRSLVQRVETISLGEHPCDRGEQVTLFLFNDCLEIARKRHKVIGTFRSPHGQTRPPASLKHIHLMPLSQIKKVLDIRETEDCHNAFALLVRPPTEQANVLLSFQMTSDELPKENWLKMLCRHVANTICKADAENLIYTADPESFEVNTKDMDSTLSRASRAIKKTSKKVTRAFSFSKTPKRALRRALMTSHGSVEGRSPSSNDKHVMSRLSSTSSLAGIPSPSLVSLPSFFERRSHTLSRSTTHLI

SEQ ID NO: 10950 - protein, 1287 aa, Homo sapiens
MHPDLGPLCTLLYVTLTILCSSVSSDLAPYFTSEPLSAVQKLGGPVVLHCSAQPVTTRISWLHNGKTLDGNLEHVKIHQGTLTILSLNSSLLGYYQCLANNSIGAIVSGPATVSVAVLGDFGSSTKHVITAEEKSAGFIGCRVPESNPKAEVRYKIRGKWLEHSTENYLILPSGNLQILNVSLEDKGSYKCAAYNPVTHQLKVEPIGRKLLVSRPSSDDVHILHPTHSQALAVLSRSPVTLECVVSGVPAPQVYWLKDGQDIAPGSNWRRLYSHLATDSVDPADSGNYSCMAGNKSGDVKYVTYMVNVLEHASISKGLQDQIVSLGATVHFTCDVHGNPAPNCTWFHNAQPIHPSARHLTAGNGLKISGVTVEDVGMYQCVADNGIGFMHSTGRLEIENDGGFKPVIITAPVSAKVADGDFVTLSCNASGLPVPVIRWYDSHGLITSHPSQVLRSKSRKSQLSRPEGLNLEPVYFVLSQAGASSLHIQAVTQEHAGKYICEAANEHGTTQAEASLMVVPFETNTKAETVTLPDAAQNDDRSKRDGSETGLLSSFPVKVHPSAVESAPEKNASGISVPDAPIILSPPQTHTPDTYNLVWRAGKDGGLPINAYFVKYRKLDDGVGMLGSWHTVRVPGSENELHLAELEPSSLYEVLMVARSAAGEGQPAMLTFRTSKEKTASSKNTQASSPPVGIPKYPVVSEAANNNFGVVLTDSSRHSGVPEAPDRPTISTASETSVYVTWIPRANGGSPITAFKVEYKRMRTSNWLVAAEDIPPSKLSVEVRSLEPGSTYKFRVIAINHYGESFRSSASRPYQVVGFPNRFSSRPITGPHIAYTEAVSDTQIMLKWTYIPSSNNNTPIQGFYIYYRPTDSDNDSDYKRDVVEGSKQWHMIGHLQPETSYDIKMQCFNEGGESEFSNVMICETKVKRVPGASEYPVKDLSTPPNSLGSGGNVGPATSPARSSDMLYLIVGCVLGVMVLILMVFIAMCLWKNRQQNTIQKYDPPGYLYQGSDMNGQMVDYTTLSGASQINGNVHGGFLTNGGLSSGYSHLHHKVPNAVNGIVNGSLNGGLYSGHSNSLTRTHVDFEHPHHLVNGGGMYTAVPQIDPLECVNCRNCRNNNRCFTKTNSTFSSSPPPVVPVVAPYPQDGLEMKPLSHVKVPVCLTSAVPDCGQLPEESVKDNVEPVPTQRTCCQDIVNDVSSDGSEDPAEFSRGQEGMINLRIPDHLQLAKSCVWEGDSCAHSETEINIVSWNALILPPVPEGCAEKTMWSPPGIPLDSPTEVLQQPRET

SEQ ID NO: 10951 - protein, 705 aa, Homo sapiens
MTKFGFLRLSYEKQDTLLKLLILSMAAVLSFSTRLFAVLRFESVIHEFDPYFNYRTTRFLAEEGFYKFHNWFDDRAWYPLGRIIGGTIYPGLMITSAAIYHVLHFFHITIDIRNVCVFLAPLFSSFTTIVTYHLTKELKDAGAGLLAAAMIAVVPGYISRSVAGSYDNEGIAIFCMLLTYYMWIKAVKTGSICWAAKCALAYFYMVSSWGGYVFLINLIPLHVLVLMLTGRFSHRIYVAYCTVYCLGTILSMQISFVGFQPVLSSEHMAAFGVFGLCQIHAFVDYLRSKLNPQQFEVLFRSVISLVGFVLLTVGALLMLTGKISPWTGRFYSLLDPSYAKNNIPIIASVSEHQPTTWSSYYFDLQLLVFMFPVGLYYCFSNLSDARIFIIMYGVTSMYFSAVMVRLMLVLAPVMCILSGIGVSQVLSTYMKNLDISRPDKKSKKQQDSTYPIKNEVASGMILVMAFFLITYTFHSTWVTSEAYSSPSIVLSARGGDGSRIIFDDFREAYYWLRHNTPEDAKVMSWWDYGYQITAMANRTILVDNNTWNNTHISRVGQAMASTEEKAYEIMRELDVSYVLVIFGGLTGYSSDDINKFLWMVRIGGSTDTGKHIKENDYYTPTGEFRVDREGSPVLLNCLMYKMCYYRFGQVYTEAKRPPGFDRVRNAEIGNKDFELDVLEEAYTTEHWLVRIYKVKDLDNRGLSRT

SEQ ID NO: 10952 - protein, 1204 aa, Homo sapiens
MCGRAAEAAASSRTPGREMGQAVTRRLGAGARAAPRRAMDGRTPRPQDAPARRKPKAKAPLPPAETKYTDVSSAADSVESTAFIMEQKENMIDKDVELSVVLPGDIIKSTTVHGSKPMMDLLIFLCAQYHLNPSSYTIDLLSAEQNHIKFKPNTPIGMLEVEKVILKPKMLDKKKPTPIIPEKTVRVVINFKKTQKTIVRVSPHASLQELAPIICSKCEFDPLHTLLLKDYQSQEPLDLTKSLNDLGLRELYAMDVNRESCQISQNLDIMKEKENKGFFSFFQRSKKKRDQTASAPATPLVNKHRPTFTRSNTISKPYISNTLPSDAPKKRRAPLPPMPASQSVPQDLAHIQERPASCIVKSMSVDETDKSPCEAGRVRAGSLQLSSMSAGNSSLRRTKRKAPSPPSKIPPHQSDENSRVTALQPVDGVPPDSASEANSPEELSSPETFHPGLSSQEQCTAPKLMEETSVFECPGTPEAAITSLTSGISSDYSLEEIDEKEELSEVPKVEAENISPKSQDIPFVSTDIINTLKNDPDSALGNGSGEFSQNSMEEKQETKSTDGQEPHSVVYDTSNGKKVVDSIRNLKSLGPNQENVQNEIIVYPENTEDNMKNGVKKTEINVEGVAKNNNIDMEVERPSNSEAHETDTAISYKENHLAASSVPDQKLNQPSAEKTKDAAIQTTPSCNSFDGKHQDHNLSDSKVEECVQTSNNNISTQHSCLSSQDSVNTSREFRSQGTLIIHSEDPLTVKDPICAHGNDDLLPPVDRIDKNSTASYLKNYPLYRQDYNPKPKPSNEITREYIPKIGMTTYKIVPPKSLEISKDWQSETIEYKDDQDMHALGKKHTHENVKETAIQTEDSAISESPEEPLPNLKPKPNLRTEHQVPSSVSSPDDAMVSPLKPAPKMTRDTGTAPFAPNLEEINNILESKFKSRASNAQAKPSSFFLQMQKRVSGHYVTSAAAKSVHAAPNPAPKELTNKEAERDMLPSPEQTLSPLSKMPHSVPQPLVEKTDDDVIGQAPAEASPPPIAPKPVTIPASQVSTQNLKTLKTFGAPRPYSSSGPSPFALAVVKRSQSFSKERTESPSASALVQPPANTEEGKTHSVNKFVDIPQLGVSDKENNSAHNEQNSQIPTPTDGPSFTVMRQSSLTFQSSDPEQMRQSLLTAIRSGEAAAKLKRVTIPSNTISVNGRSRLSHSMSPDAQDGH

SEQ ID NO: 10953 - protein, 568 aa, Homo sapiens
MESSKKMDSPGALQTNPPLKLHTDRSAGTPVFVPEQGGYKEKFVKTVEDKYKCEKCHLVLCSPKQTECGHRFCESCMAALLSSSSPKCTACQESIVKDKVFKDNCCKREILALQIYCRNESRGCAEQLMLGHLLVHLKNDCHFEELPCVRPDCKEKVLRKDLRDHVEKACKYREATCSHCKSQVPMIALQKHEDTDCPCVVVSCPHKCSVQTLLRSELSAHLSECVNAPSTCSFKRYGCVFQGTNQQIKAHEASSAVQHVNLLKEWSNSLEKKVSLLQNESVEKNKSIQSLHNQICSFEIEIERQKEMLRNNESKILHLQRVIDSQAEKLKELDKEIRPFRQNWEEADSMKSSVESLQNRVTELESVDKSAGQVARNTGLLESQLSRHDQMLSVHDIRLADMDLRFQVLETASYNGVLIWKIRDYKRRKQEAVMGKTLSLYSQPFYTGYFGYKMCARVYLNGDGMGKGTHLSLFFVIMRGEYDALLPWPFKQKVTLMLMDQGSSRRHLGDAFKPDPNSSSFKKPTGEMNIASGCPVFVAQTVLENGTYIKDDTIFIKVIVDTSDLPDP

SEQ ID NO: 10954 - protein, 786 aa, Homo sapiens
MVHFCGLLTLHREPVPLKSISVSVNIYEFVAGVSATLNYENEEKVPLEAFFVFPMDEDSAVYSFEALVDGKKIVAELQDKMKARTNYEKAISQGHQAFLLEGDSSSRDVFSCNVGNLQPGSKAAVTLKYVQELPLEADGALRFVLPAVLNPRYQFSGSSKDSCLNVKTPIVPVEDLPYTLSMVATIDSQHGIEKVQSNCPLSPTEYLGEDKTSAQVSLAAGHKFDRDVELLIYYNEVHTPSVVLEMGMPNMKPGHLMGDPSAMVSFYPNIPEDQPSNTCGEFIFLMDRSGSMQSPMSSQDTSQLRIQAAKETLILLLKSLPIGCYFNIYGFGSSYEACFPESVKYTQQTMEEALGRVKLMQADLGGTEILAPLQNIYRGPSIPGHPLQLFVFTDGEVTDTFSVIKEVRINRQKHRCFSFGIGEGTSTSLIKGIARASGGTSEFITGKDRMQSKALRTLKRSLQPVVEDVSLSWHLPPGLSAKMLSPEQTVIFRGQRLISYAQLTGRMPAAETTGEVCLKYTLQGKTFEDKVTFPLQPKPDVNLTIHRLAAKSLLQTKDMGLRETPASDKKDALNLSLESGVISSFTAFIAINKELNKPVQGPLAHRDVPRPILLGASAPLKIKCQSGFRKALHSDRPPSASQPRGELMCYKAKTFQMDDYSLCGLISHKDQHSPGFGENHLVQLIYHQNANGSWDLNEDLAKILGMSLEEIMAAQPAELVDSSGWATILAVIWLHSNGKDLKCEWELLERKAVAWMRAHAGSTMPSVVKAAITFLKSSVDPAIFAF

SEQ ID NO: 10955 - protein, 212 aa, Homo sapiens
MRMTMEEMKNEAETTSMVSMPLYAVMYPVFNELERVNLSAAQTLRAAFIKAEKENPGLTQDIIMKILEKKSVEVNFTESLLRMAADDVEEYMIERPEPEFQDLNEKARALKQILSKIPDEINDRVRFLQTIKDIASAIKELLDTVNNVFKKYQYQNRRALEHQKKEFVKYSKSFSDTLKTYFKDGKAINVFVSANRLIHQTNLILQTFKTVA

SEQ ID NO: 10956 - protein, 212 aa, Homo sapiens
MAPWGKRLAGVRGVLLDISGVLYDSGAGGGTAIAGSVEAVARLKRSRLKVRFCTNESQKSRAELVGQLQRLGFDISEQEVTAPAPAACQILKEQGLRPYLLIHDGVRSEFDQIDTSNPNCVVIADAGESFSYQNMNNAFQVLMELEKPVLISLGKGRYYKETSGLMLDVGPYMKALEYACGIKAEVVGKPSPEFFKSALQAIGVEAHQLLSV

SEQ ID NO: 10957 - protein, 1324 aa, Homo sapiens
MLLSPSLLLLLLLGAPRGCAEGVAAALTPERLLEWQDKGIFVIQSESLKKCIQAGKSVLTLENCKQANKHMLWKWVSNHGLFNIGGSGCLGLNFSAPEQPLSLYECDSTLVSLRWRCNRKMITGPLQYSVQVAHDNTVVASRKYIHKWISYGSGGGDICEYLHKDLHTIKGNTHGMPCMFPFQYNHQWHHECTREGREDDLLWCATTSRYERDEKWGFCPDPTSAEVGCDTIWEKDLNSHICYQFNLLSSLSWSEAHSSCQMQGGTLLSITDETEENFIREHMSSKTVEVWMGLNQLDEHAGWQWSDGTPLNYLNWSPEVNFEPFVEDHCGTFSSFMPSAWRSRDCESTLPYICKKYLNHIDHEIVEKDAWKYYATHCEPGWNPYNRNCYKLQKEEKTWHEALRSCQADNSALIDITSLAEVEFLVTLLGDENASETWIGLSSNKIPVSFEWSNDSSVIFTNWHTLEPHIFPNRSQLCVSAEQSEGHWKVKNCEERLFYICKKAGHVLSDAESGCQEGWERHGGFCYKIDTVLRSFDQASSGYYCPPALVTITNRFEQAFITSLISSVVKMKDSYFWIALQDQNDTGEYTWKPVGQKPEPVQYTHWNTHQPRYSGGCVAMRGRHPLGRWEVKHCRHFKAMSLCKQPVENQEKAEYEERWPFHPCYLDWESEPGLASCFKVFHSEKVLMKRTWREAEAFCEEFGAHLASFAHIEEENFVNELLHSKFNWTEERQFWIGFNKRNPLNAGSWEWSDRTPVVSSFLDNTYFGEDARNCAVYKANKTLLPLHCGSKREWICKIPRDVKPKIPFWYQYDVPWLFYQDAEYLFHTFASEWLNFEFVCSWLHSDLLTIHSAHEQEFIHSKIKALSKYGASWWIGLQEERANDEFRWRDGTPVIYQNWDTGRERTVNNQSQRCGFISSITGLWGSEECSVSMPSICKRKKVWLIEKKKDTPKQHGTCPKGWLYFNYKCLLLNIPKDPSSWKNWTHAQHFCAEEGGTLVAIESEVEQAFITMNLFGQTTSVWIGLQNDDYETWLNGKPVVYSNWSPFDIINIPSHNTTEVQKHIPLCALLSSNPNFHFTGKWYFEDCGKEGYGFVCEKMQDTSGHGVNTSDMYPMPNTLEYGNRTYKIINANMTWYAAIKTCLMHKAQLVSITDQYHQSFLTVVLNRLGYAHWIGLFTTDNGLNFDWSDGTKSSFTFWKDEESSLLGDCVFADSNGRWHSTACESFLQGAICHVPPETRQSEHPELCSETSIPWIKFKSNCYSFSTVLDSMSFEAAHEFCKKEGSNLLTIKDEAENAFLLEELFAFGSSVQMVWLNAQFDGNSK

SEQ ID NO: 10958 - protein, 2168 aa, Homo sapiens
MESGERLPSSAASSTTPTSSSTPSVASVVSKGGLSTGVASLSSTINPCGHLFRTAGDQPFNLSTVSSAFPMVSHPVFGLHSASSGHSEFGGLGTLGTPTALAAHPQLASFPGAEWWRTTDAHTRTGATFFPPLLGIPPLFAPPAQNHDSSSFHSRTSGKSNRNGPEKGVNGSINGSNTSSVIGINTSVLSTTASSSMGQTKSTSSGGGNRKCNQEQSKNQPLDARVDKIKDKKPRKKAMESSSNSDSDSGTSSDTSSEGISSSDSDDLEEDEEEEDQSIEESEDDDSDSESEAQHKSNNQVLLHGISDPKADGQKATEKAQEKRIHQPLPLASESQTHSFQSQQKQPQVLSQQLPFIFQSSQAKEESVNKHTSVIQSTGLVSNVKPLSLVNQAKKETYMKLIVPSPDVLKAGNKNTSEESSLLTSELRSKREQYKQAFPSQLKKQESSKSLKKVIAALSNPKATSSSPAHPKQTLENNHPNPFLTNALLGNHQPNGVIQSVIQEAPLALTTKTKMQSKINENIAAASSTPFSSPVNLSTSGRRTPGNQTPVMPSASPILHSQGKEKAVSNNVNPVKTQHHSHPAKSLVEQFRGTDSDIPSSKDSEDSNEDEEEDDEEEDEEDDEDDESDDSQSESDSNSESDTEGSEEEDDDDKDQDESDSDTEGEKTSMKLNKTTSSVKSPSMSLTGHSTPRNLHIAKAPGSAPAALCSESQSPAFLGTSSSTLTSSPHSGTSKRRRVTDERELRIPLEYGWQRETRIRNFGGRLQGEVAYYAPCGKKLRQYPEVIKYLSRNGIMDISRDNFSFSAKIRVGDFYEARDGPQGMQWCLLKEEDVIPRIRAMEGRRGRPPNPDRQRAREESRMRRRKGRPPNVGNAEFLDNADAKLLRKLQAQEIARQAAQIKLLRKLQKQEQARVAKEAKKQQAIMAAEEKRKQKEQIKIMKQQEKIKRIQQIRMEKELRAQQILEAKKKKKEEAANAKLLEAEKRIKEKEMRRQQAVLLKHQERERRRQHMMLMKAMEARKKAEEKERLKQEKRDEKRLNKERKLEQRRLELEMAKELKKPNEDMCLADQKPLPELPRIPGLVLSGSTFSDCLMVVQFLRNFGKVLGFDVNIDVPNLSVLQEGLLNIGDSMGEVQDLLVRLLSAAVCDPGLITGYKAKTALGEHLLNVGVNRDNVSEILQIFMEAHCGQTELTESLKTKAFQAHTPAQKASVLAFLINELACSKSVVSEIDKNIDYMSNLRRDKWVVEGKLRKLRIIHAKKTGKRDTSGGIDLGEEQHPLGTPTPGRKRRRKGGDSDYDDDDDDDSDDQGDEDDEDEEDKEDKKGKKTDICEDEDEGDQAASVEELEKQIEKLSKQQSQYRRKLFDASHSLRSVMFGQDRYRRRYWILPQCGGIFVEGMESGEGLEEIAKEREKLKKAESVQIKEEMFETSGDSLNCSNTDHCEQKEDLKEKDNTNLFLQKPGSFSKLSKLLEVAKMPPESEVMTPKPNAGANGCTLSYQNSGKHSLGSVQSTATQSNVEKADSNNLFNTGSSGPGKFYSPLPNDQLLKTLTEKNRQWFSLLPRTPCDDTSLTHADMSTASLVTPQSQPPSKSPSPTPAPLGSSAQNPVGLNPFALSPLQVKGGVSMMGLQFCGWPTGVVTSNIPFTSSVPSLGSGLGLSEGNGNSFLTSNVASSKSESPVPQNEKATSAQPAAVEVAKPVDFPSPKPIPEEMQFGWWRIIDPEDLKALLKVLHLRGIREKALQKQIQKHLDYITQACLKNKDVAIIELNENEENQVTRDIVENWSVEEQAMEMDLSVLQQVEDLERRVASASLQVKGWMCPEPASEREDLVYFEHKSFTKLCKEHDGEFTGEDESSAHALERKSDNPLDIAVTRLADLERNIERRIEEDIAPGLRVWRRALSEARSAAQVALCIQQLQKSIAWEKSIMKVYCQICRKGDNEELLLLCDGCDKGCHTYCHRPKITTIPDGDWFCPACIAKASGQTLKIKKLHVKGKKTNESKKGKKVTLTGDTEDEDSASTSSSLKRGNKDLKKRKMEENTSINLSKQESFTSVKKPKRDDSKDLALCSMILTEMETHEDAWPFLLPVNLKLVPGYKKVIKKPMDFSTIREKLSSGQYPNLETFALDVRLVFDNCETFNEDDSDIGRAGHNMRKYFEKKWTDTFKVS

SEQ ID NO: 10959 - protein, 607 aa, Homo sapiens
MELVRRLMPLTLLILSCLAELTMAEAEGNASCTVSLGGANMAETHKAMILQLNPSENCTWTIERPENKSIRIIFSYVQLDPDGSCESENIKVFDGTSSNGPLLGQVCSKNDYVPVFESSSSTLTFQIVTDSARIQRTVFVFYYFFSPNISIPNCGGYLDTLEGSFTSPNYPKPHPELAYCVWHIQVEKDYKIKLNFKEIFLEIDKQCKFDFLAIYDGPSTNSGLIGQVCGRVTPTFESSSNSLTVVLSTDYANSYRGFSASYTSIYAENINTTSLTCSSDRMRVIISKSYLEAFNSNGNNLQLKDPTCRPKLSNVVEFSVPLNGCGTIRKVEDQSITYTNIITFSASSTSEVITRQKQLQIIVKCEMGHNSTVEIIYITEDDVIQSQNALGKYNTSMALFESNSFEKTILESPYYVDLNQTLFVQVSLHTSDPNLVVFLDTCRASPTSDFASPTYDLIKSGCSRDETCKVYPLFGHYGRFQFNAFKFLRSMSSVYLQCKVLICDSSDHQSRCNQGCVSRSKRDISSYKWKTDSIIGPIRLKRDRSASGNSGFQHETHAEETPNQPFNSVHLFSFMVLALNVVTVATITVRHFVNQRADYKYQKLQNY

SEQ ID NO: 10960 - protein, 230 aa, Homo sapiens
MARLALSPVPSHWMVALLLLLSAAEPVPAARSEDRYRNPKGSACSRIWQSPRFIARKRGFTVKMHCYMNSASGNVSWLWKQEMDENPQQLKLEKGRMEESQNESLATLTIQGIRFEDNGIYFCQQKCNNTSEVYQGCGTELRVMGFSTLAQLKQRNTLKDGIIMIQTLLIILFIIVPIFLLLDKDDSKAGMEEDHTYEGLDIDQTATYEDIVTLRTGEVKWSVGEHPGQE

SEQ ID NO: 10961 - protein, 283 aa, Homo sapiens
MVSAAAPSLLILLLLLLGSVPATDARSVPLKATFLEDVAGSGEAEGSSASSPSLPPPWTPALSPTSMGPQPITLGGPSPPTNFLDGIVDFFRQYVMLIAVVGSLAFLLMFIVCAAVITRQKQKASAYYPSSFPKKKYVDQSDRAGGPRAFSEVPDRAPDSRPEEALDSSRQLQADILAATQNLKSPTRAALGGGDGARMVEGRGAEEEEKGSQEGDQEVQGHGVPVETPEAQEEPCSGVLEGAVVAGEGQGELEGSLLLAQEAQGPVGPPESPCACSSVHPSV

SEQ ID NO: 10962 - protein, 142 aa, Homo sapiens
MVLIDMSVDLSTQVVDHYENPRNVGSLDKTSKNVGTGLVGAPACGDVMKLQIQVDEKGKIVDARFKTFGCGSAIASSSLATEWVKGKTVEEALTIKNTDIAKELCLPPVKLHCSMLAEDAIKAALADYKLKQEPKKGEAEKK

SEQ ID NO: 10963 - protein, 217 aa, Homo sapiens [sequence omitted]

SEQ ID NO: 10964 - protein, 560 aa, Homo sapiens
MDEERALYIVRAGEAGAIERVLRDYSDKHRATFKFESTDEDKRKKLCEGIFKVLIKDIPTTCQVSCLEVLRILSRDKKVLVPVTTKENMQILLRLAKLNELDDSLEKVSEFPVIVESLKCLCNIVFNSQMAQQLSLELNLAAKLCNLLRKCKDRKFINDIKCFDLRLLFLLSLLHTDIRSQLRYELQGLPLLTQILESAFSIKWTDEYESAIDHNGPPLSPQETDCAIEALKALFNVTVDSWKVHKESDSHQFRVMAAVLRHCLLIVGPTEDKTEELHSNAVNLLSNVPVSCLDVLICPLTHEETAQEATTLDELPSNKTAEKETVLKNNTMVYNGMNMEAIHVLLNFMEKRIDKGSSYREGLTPVLSLLTECSRAHRNIRKFLKDQVLPPLRDVTNRPEVGSTVRNKLVRLMTHVDLGVKQIAAEFLFVLCKERVDSLLKYTGYGNAAGLLAARGLLAGGRGDNWYSEDEDTDTEEYKNAKPNINLITGHLEEPMPNPIDEMTEEQKEYEAMKLVNMLDKLSREELLKPMGLKPDGTITPLEEALNQYSVIEETSSDTD

SEQ ID NO: 10965 - protein, 520 aa, Homo sapiens
MDEERALYIVRAGEAGAIERVLRDYSDKHRATFKFESTDEDKRKKLCEGIFKVLIKDIPTTCQVSCLEVLRILSRDKKVLVPVTTKENMQILLRLAKLNELDDSLEKVSEFPVIVESLKCLCNIVFNSQMAQQLSLELNLAAKLCNLLRKCKDRKFINDIKCFDLRLLFLLSLLHTDIRSQLRYELQGLPLLTQILESAFSIKWTDEYESAIDHNGPPLSPQETDCAIEALKALFNVTVDSWKVHKESDSHQFRVMAAVLRHCLLIVGPTEDKTEELHSNAVNLLSNVPVSCLDVLICPLTHEETAQEATTLDELPSNKTAEKETVLKNNTMVYNGMNMEAIHVLLNFMEKRIDKGSSYREGLTPVLSLLTECSRAHRNIRKFLKDQVLPPLRDVTNRPEVGSTVRNKLVRLMTHVDLGVKQIAAEFLFVLCKERVDSLLKYTGYGNAAGLLAARGLLAGGRGDNWYSEDEDTDTEEYKNAKPKEELLKPMGLKPDGTITPLEEALNQYSVIEETSSDTD

SEQ ID NO: 10966 - protein, 344 aa, Homo sapiens
MRVIRVGTRKSQLARIQTDSVVATLKASYPGLQFEIIAMSTTGDKILDTALSKIGEKSLFTKELEHALEKNEVDLVVHSLKDLPTVLPPGFTIGAICKRENPHDAVVFHPKFVGKTLETLPEKSVVGTSSLRRAAQLQRKFPHLEFRSIRGNLNTRLRKLDEQQEFSAIILATAGLQRMGWHNRVGQILHPEECMYAVGQGALGVEVRAKDQDILDLVGVLHDPETLLRCIAERAFLRHLEGGCSVPVAVHTAMKDGQLYLTGGVWSLDGSDSIQETMQATIHVPAQHEDGPEDDPQLVGITARNIPRGPQLAAQNLGISLANLLLSKGAKNILDVARQLNDAH

SEQ ID NO: 10967 - protein, 711 aa, Homo sapiens
MATSSMSKGCFVFKPNSKKRKISLPIEDYFNKGKNEPEDSKLRFETYQLIWQQMKSENERLQEELNKNLFDNLIEFLQKSHSGFQKNSRDLGGQIKLREIPTAALVLGVNVTDHDLTFGSLTEALQNNVTPYVVSLQAKDCPDMKHFLQKLISQLMDCCVDIKSKEEESVHVTQRKTHYSMDSLSSWYMTVTQKTDPKMLSKKRTTSSQWQSPPVVVILKDMESFATKVLQDFIIISSQHLHEFPLILIFGIATSPIIIHRLLPHAVSSLLCIELFQSLSCKEHLTTVLDKLLLTTQFPFKINEKVLQVLTNIFLYHDFSVQNFIKGLQLSLLEHFYSQPLSVLCCNLPEAKRRINFLSNNQCENIRRLPSFRRYVEKQASEKQVALLTNERYLKEETQLLLENLHVYHMNYFLVLRCLHKFTSSLPKYPLGRQIRELYCTCLEKNIWDSEEYASVLQLLRMLAKDELMTILEKCFKVFKSYCENHLGSTAKRIEEFLAQFQSLDETKEEEDASGSQPKGLQKTDLYHLQKSLLEMKELRRSKKQTKFEVLRENVVNFIDCLVREYLLPPETQPLHEVVYFSAAHALREHLNAAPRIALHTALNNPYYYLKNEALKSEEGCIPNIAPDICIAYKLHLECSRLINLVDWSEAFATVVTAAEKMDANSATSEEMNEIIHARFIRAVSELELLGFIKPTKQKTDHVARLTWGGC

SEQ ID NO: 10968 - protein, 97 aa, Homo sapiens
MTATEALLRVLLLLLAFGHSTYGAECFPACNPQNGFCEDDNVCRCQPGWQGPLCDQCVTSPGCLHGLCGEPGQCICTDGWDGELCDRDVRACSSAPC

SEQ ID NO: 10969 - protein, 76 aa, Homo sapiens
MEPGPALAWLLLLSLLADCLKAAQSRDFTVKDIIYLHPSTTPYPGGFKCFTCEKAADNYECNRWAPDIYCPRGTMI

SEQ ID NO: 10970 - protein, 423 aa, Homo sapiens
MIPEYCRALEENEISEHCFDLIFAFDEIVALGYRENVNLAQIRTFTEMDSHEEKVFRAVRETQEREAKAEMRRKAKELQQARRDAERQGKKAPGFGGFGSSAVSGGSTAAMITETIIETDKPKVAPAPARPSGPSKALKLGAKGKEVDNFVDKLKSEGETIMSSSMGKRTSEATKMHAPPINMESVHMKIEEKITLTCGRDGGLQNMELHGMIMLRISDDKYGRIRLHVENEDKKGVQLQTHPNVDKKLFTAESLIGLKNPEKSFPVNSDVGVLKWRLQTTEESFIPLTINCWPSESGNGCDVNIEYELQEDNLELNDVVITIPLPSGVGAPVIGEIDGEYRHDSRRNTLEWCLPVIDAKNKSGSLEFSIAGQPNDFFPVQVSFVSKKNYCNIQVTKVTQVDGNSPVRFSTETTFLVDKYEIL

SEQ ID NO: 10971 - protein, 590 aa, Homo sapiens
MELENIVANTVLLKAREGGGGKRKGKSKKWKEILKFPHISQCEDLRRTIDRDYCSLCDKQPIGRLLFRQFCETRPGLECYIQFLDSVAEYEVTPDEKLGEKGKEIMTKYLTPKSPVFIAQVGQDLVSQTEEKLLQKPCKELFSACAQSVHEYLRGEPFHEYLDSMFFDRFLQWKWLERQPVTKNTFRQYRVLGKGGFGEVCACQVRATGKMYACKRLEKKRIKKRKGESMALNEKQILEKVNSQFVVNLAYAYETKDALCLVLTIMNGGDLKFHIYNMGNPGFEEERALFYAAEILCGLEDLHRENTVYRDLKPENILLDDYGHIRISDLGLAVKIPEGDLIRGRVGTVGYMAPEVLNNQRYGLSPDYWGLGCLIYEMIEGQSPFRGRKEKVKREEVDRRVLETEEVYSHKFSEEAKSICKMLLTKDAKQRLGCQEEGAAEVKRHPFFRNMNFKRLEAGMLDPPFVPDPRAVYCKDVLDIEQFSTVKGVNLDHTDDDFYSKFSTGSVSIPWQNEMIETECFKELNVFGPNGTLPPDLNRNHPPEPPKKGLLQRLFKRQHQNNSKSSPSSKTSFNHHINSNHVSSNSTGSS

SEQ ID NO: 10972 - protein, 410 aa, Homo sapiens
MEAENAGSYSLQQAQAFYTFPFQQLMAEAPNMAVVNEQQMPEEVPAPAPAQEPVQEAPKGRKRKPRTTEPKQPVEPKKPVESKKSGKSAKSKEKQEKITDTFKVKRKVDRFNGVSEAELLTKTLPDILTFNLDIVIIGINPGLMAAYKGHHYPGPGNHFWKCLFMSGLSEVQLNHMDDHTLPGKYGIGFTNMVERTTPGSKDLSSKEFREGGRILVQKLQKYQPRIAVFNGKCIYEIFSKEVFGVKVKNLEFGLQPHKIPDTETLCYVMPSSSARCAQFPRAQDKVHYYIKLKDLRDQLKGIERNMDVQEVQYTFDLQLAQEDAKKMAVKEEKYDPGYEAAYGGAYGENPCSSEPCGFSSNGLIESVELRGESAFSGIPNGQWMTQSFTDQIPSFSNHCGTQEQEEESHA

SEQ ID NO: 10973 - protein, 548 aa, Homo sapiens
MTMAAAAVVARGAGARAATAAALRGGCGTAARGRPCAGPARPLCTAPGTAPDMKRYLWERYREAKRSTEELVPSIMSNLLNPDAIFSNNEMSLSDIEIYGFDYDYTLVFYSKHLHTLIFNAARDLLINEHRYPAEIRKYEYDPNFAIRGLHYDVQRAVLMKIDAFHYIQLGTVYRGLSVVPDEEVIEMYEGSHVPLEQMSDFYGKSSHGNTMKQFMDIFSLPEMTLLSCVNEYFLKNNIDYEPVHLYKDVKDSIRDVHIKGIMYRAIEADIEKYICYAEQTRAVLAKLADHGKKMFLITNSPSSFVDKGMSYIVGKDWRDLFDVVIVQAEKPNFFNDKRRPFRKMNEKGVLLWDKIHKLQKGQIYKQGNLYEFLKLTGWRGSRVLYFGDHIYSDLADLTLKHGWRTGAIIPELRSELKIMNTEQYIQTMTWLQTLTGLLEQMQVHRDAESQLVLQEWKKERKEMREMTKSFFNAQFGSLFRTDQNPTYFLRRLSRFADIYMASLSCLLNYDVSHTFYPRRTPLQHELPAWSERPPTFGTPLLQEAQAK

SEQ ID NO: 10974 - protein, 127 aa, Homo sapiens
MEHSTFLSGLVLATLLSQVSPFKIPIEELEDRVFVNCNTSITWVEGTVGTLLSDITRLDLGKRILDPRGIYRCNGTDIYKDKESTVQVHYRTADTQALLRNDQVYQPLRDRDDAQYSHLGGNWARNK

SEQ ID NO: 10975 - protein, 217 aa, Homo sapiens
MAAGSRTSLLLAFALLCLPWLQEAGAVQTVPLSRLFDHAMLQAHRAHQLAIDTYQEFEETYIPKDQKYSFLHDSQTSFCFSDSIPTPSNMEETQQKSNLELLRISLLLIESWLEPVRFLRSMFANNLVYDTSDSDDYHLLKDLEEGIQTLMGRLEDGSRRTGQILKQTYSKFDTNSHNHDALLKNYGLLYCFRKDMDKVETFLRMVQCRSVEGSCGF

SEQ ID NO: 10976 - protein, 498 aa, Homo sapiens
MDVTDHYEDVRKIYDDFLKNSNMLDLIDVYQKCRALTSNCENYNTVSPSQLLDFLSGKQYAVGDETDLSIPTSPTSKYNRDNEKVQLLARKIIFSYLNLLVNSKNDLAVAYILNIPDRGLGREAFTDLKHAAREKQMSIFLVATSFIRTIELGGKGYAPPPSDPLRTHVKGLSNFINFIDKLDEILGEIPNPSIAGGQILSVIKMQLIKGQNSRDPFCKAIEEVAQDLDLRIKNIINSQEGVVALSTTDISPARPKSHAINHGTAYCGRDTVKALLVLLDEEAANAPTKNKAELLYDEENTIHHHGTSILTLFRSPTQVNNSIKPLRERICVSMQEKKIKMKQTLIRSQFACTYKDDYMISKDNWNNVNLASKPLCVLYMENDLSEGVNPSVGRSTIGTSFGNVHLDRSKNEKVSRKSTSQTGNKSSKRKQVDLDGENILCDNRNEPPQHKNAKIPKKSNDSQNRLYGKLAKVAKSNKCTAKDKLISGQAKLTQFFRL

SEQ ID NO: 10977 - protein, 171 aa, Homo sapiens
MAAPSAGSWSTFQHKELMAADRGRRILGVCGMHPHHQETLKKNRVVLAKQLLLSELLEHLLEKDIITLEMRELIQAKVGSFSQNVELLNLLPKRGPQAFDAFCEALRETKQGHLEDMLLTTLSGLQHVLPPLSCDYDLSLPFPVCESCPLYKKLRLSTEIGSCSVTQAGMQ

SEQ ID NO: 10978 - protein, 348 aa, Homo sapiens
MSFLTNDASSESIASFSKQEVMSSFLPEGGCYELLTVIGKGFEDLMTVNLARYKPTGEYVTVRRINLEACSNEMVTFLQGELHVSKLFNHPNIVPYRATFIADNELWVVTSFMAYGSAKDLICTHFMDGMNELAIAYILQGVLKALDYIHHMGYVHRSVKASHILISVDGKVYLSGLRSNLSMISHGQRQRVVHDFPKYSVKVLPWLSPEVLQQNLQGYDAKSDIYSVGITACELANGHVPFKDMPATQMLLEKLNGTVPCLLDTSTIPAEELTMSPSRSVANSGLSDSLTTSTPRPSNGDSPSHPYHRTFSPHFHHFVEQCLQRNPDARYPCWPGPGLRESRGCSGG

SEQ ID NO: 10979 - protein, 379 aa, Homo sapiens
MGGRVFLVFLAFCVWLTLPGAETQDSRGCARWCPQDSSCVNATACRCNPGFSSFSEIITTPMETCDDINECATLSKVSCGKFSDCWNTEGSYDCVCSPGYEPVSGAKTFKNESENTCQDVDECQQNPRLCKSYGTCVNTLGSYTCQCLPGFKLKPEDPKLCTDVDECSSGQHQCDSSTVCFNTVGSYSCRCRPGWKPRHGIPNNQKDTVCEDMTFSTWTPPPGVHSQTLSRFFDKVQDLGRDYKPGLANNTIQSILQALDELLEAPGDLETLPRLQQHCVASHLLDGLEDVLRGLSKNLSNGLLNFSYPAGTELSLEVQKQVDRSVTLRQNQAVMQLDWNQAQKSGDPGGGSRADCHHLHGAERLSAVPPPGGPHFSPV

SEQ ID NO: 10980 - protein, 765 aa, Homo sapiens
MGGRVFLVFLAFCVWLTLPGAETQDSRGCARWCPQDSSCVNATACRCNPGFSSFSEIITTPMETCDDINECATLSKVSCGKFSDCWNTEGSYDCVCSPGYEPVSGAKTFKNESENTCQDVDECQQNPRLCKSYGTCVNTLGSYTCQCLPGFKLKPEDPKLCTDVNECTSGQNPCHSSTHCLNNVGSYQCRCRPGWQPIPGSPNGPNNTVCEDVDECSSGQHQCDSSTVCFNTVGSYSCRCRPGWKPRHGIPNNQKDTVCEDMTFSTWTPPPGVHSQTLSRFFDKVQDLGRDYKPGLANNTIQSILQALDELLEAPGDLETLPRLQQHCVASHLLDGLEDVLRGLSKNLSNGLLNFSYPAGTELSLEVQKQVDRSVTLRQNQAVMQLDWNQAQKSGDPGPSVVGLVSIPGMGKLLAEAPLVLEPEKQMLLHETHQGLLQDGSPILLSDVISAFLSNNDTQNLSSPVTFTFSHREEDPVLTVITYMGLSVSLLCLLLAALTFLLCKAIQNTSTSLHLQLSLCLFLAHLLFLVAIDQTGHKVLCSIIAGTLHYLYLATLTWMLLEALYLFLTARNLTVVNYSSINRFMKKLMFPVGYGVPAVTVAISAASRPHLYGTPSRCWLQPEKGFIWGFLGPVCAIFSVNLVLFLVTLWILKNRLSSLNSEVSTLRNTRMLAFKATAQLFILGCTWCLGILQVGPAARVMAYLFTIINSLQGVFIFLVYCLLSQQVREQYGKWSKGIRKLKTESEMHTLSSSAKADTSKPSTVN

SEQ ID NO: 10981 - protein, 955 aa, Homo sapiens
MEASSSGITNGKTKVFHPEGGVDLQGYQLDMQILPDGPKSDVDFSEILNAIQEMAKDVNILFDELEAVSSPCKDDDSLLHPGNLTSTSDDASRLEAGGETVPERNKSNGLYFRDGKCRIDYILVYRKSNPQTEKREVFERNIRAEGLQMEKESSLINSDIIFVKLHAPWEVLGRYAEQMNVRMPFRRKIYYLPRRYKFMSRIDKQISRFRRWLPKKPMRLDKETLPDLEENDCYTAPFSQQRIHHFIIHNKETFFNNATRSRIVHHILQRIKYEEGKNKIGLNRLLTNGSYEAAFPLHEGSYRSKNSIRTHGAENHRHLLYECWASWGVWYKYQPLDLVRRYFGEKIGLYFAWLGWYTGMLFPAAFIGLFVFLYGVTTLDHSQVSKEVCQATDIIMCPVCDKYCPFMRLSDSCVYAKVTHLFDNGATVFFAVFMAVWATVFLEFWKRRRAVIAYDWDLIDWEEEEEEIRPQFEAKYSKKERMNPISGKPEPYQAFTDKCSRLIVSASGIFFMICVVIAAVFGIVIYRVVTVSTFAAFKWALIRNNSQVATTGTAVCINFCIIMLLNVLYEKVALLLTNLEQPRTESEWENSFTLKMFLFQFVNLNSSTFYIAFFLGRFTGHPGAYLRLINRWRLEECHPSGCLIDLCMQMGIIMVLKQTWNNFMELGYPLIQNWWTRRKVRQEHGPERKISFPQWEKDYNLQPMNAYGLFDEYLEMILQFGFTTIFVAAFPLAPLLALLNNIIEIRLDAYKFVTQWRRPLASRAKDIGIWYGILEGIGILSVITNAFVIAITSDFIPRLVYAYKYGPCAGQGEAGQKCMVGYVNASLSVFRISDFENRSEPESDGSEFSGTPLKYCRYRDYRDPPHSLVPYGYTLQFWHVLAARLAFIIVFEHLVFCIKHLISYLIPDLPKDLRDRMRREKYLIQEMMYEAELERLQKERKERKKNGKAHHNEWP

SEQ ID NO: 10982 - protein, 1694 aa, Homo sapiens
MGVPKFYRWISERYPCLSEVVKEHQIPEFDNLYLDMNGIIHQCSHPNDDDVHFRISDDKIFTDIFHYLEVLFRIIKPRKVFFMAVDGVAPRAKMNQQRGRRFRSAKEAEDKIKKAIEKGETLPTEARFDSNCITPGTEFMARLHEHLKYFVNMKISTDKSWQGVTIYFSGHETPGEGEHKIMEFIRSEKAKPDHDPNTRHCLYGLDADLIMLGLTSHEAHFSLLREEVRFGGKKTQRVCAPEETTFHLLHLSLMREYIDYEFSVLKEKITFKYDIERIIDDWILMGFLVGNDFIPHLPHLHINHDALPLLYGTYVTILPELGGYINESGHLNLPRFEKYLVKLSDFDREHFSEVFVDLKWFESKVGNKYLNEAAGVAAEEARNYKEKKKLKGQENSLCWTALDKNEGEMITSKDNLEDETEDDDLFETEFRQYKRTYYMTKMGVDVVSDDFLADQAACYVQAIQWILHYYYHGVQSWSWYYPYHYAPFLSDIHNISTLKIHFELGKPFKPFEQLLAVLPAASKNLLPACYQHLMTNEDSPIIEYYPPDFKTDLNGKQQEWEAVVLIPFIDEKRLLEAMETCNHSLKKEERKRNQHSECLMCWYDRDTEFIYPSPWPEKFPAIERCCTRYKIISLDAWRVDINKNKITRIDQKALYFCGFPTLKHIRHKFFLKKSGVQVFQQSSRGENMMLEILVDAESDELTVENVASSVLGKSVFVNWPHLEEARVVAVSDGETKFYLEEPPGTQKLYSGRTAPPSKVVHLGDKEQSNWAKEVQGISEHYLRRKGIIINETSAVVYAQLLTGRKYQINQNGEVRLEKQWSKQVVPFVYQTIVKDIRAFDSRFSNIKTLDDLFPLRSMVFMLGTPYYGCTGEVQDSGDVITEGRIRVIFSIPCEPNLDALIQNQHKYSIKYNPGYVLASRLGVSGYLVSRFTGSIFIGRGSRRNPHGDHKANVGLNLKFNKKNEEVPGYTKKVGSEWMYSSAAEQLLAEYLERAPELFSYIAKNSQEDVFYEDDIWPGENENGAEKVQEIITWLKGHPVSTLSRSSCDLQILDAAIVEKIEEEVEKCKQRKNNKKVRVTVKPHLLYRPLEQQHGVIPDRDAEFCLFDRVVNVRENFSVPVGLRGTIIGIKGANREADVLFEVLFDEEFPGGLTIRCSPGRGYRLPTSALVNLSHGSRSETGNQKLTAIVKPQPAVHQHSSSSSVSSGHLGALNHSPQSLFVPTQVPTKDDDEFCNIWQSLQGSGKMQYFQPTIQEKGAVLPQEISQVNQHHKSGFNDNSVKYQQRKHDPHRKFKEECKSPKAECWSQKMSNKQPNSGIENFLASLNISKENEVQSSHHGEPPSEEHLSPQSFAMKGTRMLKEILKIDGSNTVDHKNEIKQIANEIPVSSNRRDEYGLPSQPKQNKKLASYMNKPHSANEYHNVQSMDNMCWPAPSQIPPVSTPVTELSRICSLVGMPQPDFSFLRMPQTMTVCQVKLSNGLLVHGPQCHSENEAKEKAALFALQQLGSLGMNFPLPSQVFANYPSAVPPGTIPPAFPPPTANIMPSSSHLFGSMPWGPSVPVPGKPFHHTLYSGTMPMAGGIPGGVHNQFIPLQVTKKRVANKKNFENKEAQSSQATPVQTSQPDSSNIVKVSPRESSSASLKSSPIAQPASSFQVETASQGHSISHHKSTPISSSRRKSRKLAVNFGVSKPSE

SEQ ID NO: 10983 - protein, 755 aa, Homo sapiens
MPPFLLLEAVCVFLFSRVPPSLPLQEVHVSKETIGKISAASKMMWCSAAVDIMFLLDGSNSVGKGSFERSKHFAITVCDGLDISPERVRVGAFQFSSTPHLEFPLDSFSTQQEVKARIKRMVFKGGRTETELALKYLLHRGLPGGRNASVPQILIIVTDGKSQGDVALPSKQLKERGVTVFAVGVRFPRWEELHALASEPRGQHVLLAEQVEDATNGLFSTLSSSAICSSATPDCRVEAHPCEHRTLEMVREFAGNAPCWRGSRRTLAVLAAHCPFYSWKRVFLTHPATCYRTTCPGPCDSQPCQNGGTCVPEGLDGYQCLCPLAFGGEANCALKLSLECRVDLLFLLDSSAGTTLDGFLRAKVFVKRFVRAVLSEDSRARVGVATYSRELLVAVPVGEYQDVPDLVWSLDGIPFRGGPTLTGSALRQAAERGFGSATRTGQDRPRRVVVLLTESHSEDEVAGPARHARARELLLLGVGSEAVRAELEEITGSPKHVMVYSDPQDLFNQIPELQGKLCSRQRPGCRTQALDLVFMLDTSASVGPENFAQMQSFVRSCALQFEVNPDVTQVGLVVYGSQVQTAFGLDTKPTRAAMLRAISQAPYLGGVGSAGTALLHIYDKVMTVQRGARPGVPKAVVVLTGGRGAEDAAVPAQKLRNNGISVLVVGVGPVLSEGLRRLAGPRDSLIHVAAYADLRYHQDVLIEWLCGEAKQPVNLCKPSPCMNEGSCVLQNGSYRCKCRDGWEGPHCENRFLRRP

SEQ ID NO: 10984 - protein, 228 aa, Homo sapiens
MITGVFSMRLWTPVGVLTSLAYCLHQRRVALAELQEADGQCPVDRSLLKLKMVQVVFRHGARSPLKPLPLEEQGGMFAGQLTKVGMQQMFALGERLRKNYVEDIPFLSPTFNPQEVFIRSTNIFRNLESTRCLLAGLFQCQKEGPIIIHTDEADSEVLYPNYQSCWSLRQRTRGRRQTASLQPGISEDLKKVKDRMGIDSSDKVDFFILLDNVAAEQEKMGSCRFHGS

SEQ ID NO: 10985 - protein, 153 aa, Homo sapiens
MSVPLLKIGVVLSTMAMITNWMSQTLPSLVGLNTTKLSAAGGGTLDRSTGVLPTNPEESWQVYSSAQDSEGRCICTVVAPQQTMCSRDARTKQLRQLLEKVQNMSQSIEVLDRRTQRDLQYVEKMENQMKGLESKFKQVEESHKQHLARQFKG

SEQ ID NO: 10986 - protein, 179 aa, Homo sapiens
MPSKSLVMEYLAHPSTLGLAVGVACGMCLGWSLRVCFGMLPKSKTSKTHTDTESEASILGDSGEYKMILVVRNDLKMGKGKVAAQCSHAAVSAYKQIQRRNPEMLKQWEYCGQPKVVVKAPDEETLIALLAHAKMLGLTVSLIQDAGRTQIAPGSQTVLGIGPGPADLIDKVTGHLKLY

SEQ ID NO: 10987 - protein, 217 aa, Homo sapiens
MSSDFEGYEQDFAVLTAEITSKIARVPRLPPDEKKQMVANVEKQLEEAKELLEQMDLEVREIPPQSRGMYSNRMRSYKQEMGKLETDFKRSRIAYSDEVRNELLGDDGNSSENQRAHLLDNTERLERSSRRLEAGYQIAVETEQIGQEMLENLSHDREKIQRARERLRETDANLGKSSRILTGMLRRIIQNRILLVILGIIVVITILMAITFSVRRH

SEQ ID NO: 10988 - protein, 423 aa, Homo sapiens
MERMLPLLALGLLAAGFCPAVLCHPNSPLDEENLTQENQDRGTHVDLGLASANVDFAFSLYKQLVLKAPDKNVIFSPLSISTALAFLSLGAHNTTLTEILKGLKFNLTETSEAEIHQSFQHLLRTLNQSSDELQLSMGNAMFVKEQLSLLDRFTEDAKRLYGSEAFATDFQDSAAAKKLINDYVKNGTRGKITDLIKDLDSQTMMVLVNYIFFKAKWEMPFDPQDTHQSRFYLSKKKWVMVPMMSLHHLTIPYFRDEELSCTVVELKYTGNASALFILPDQDKMEEVEAMLLPETLKRWRDSLEFREIGELYLPKFSISRDYNLNDILLQLGIEEAFTSKADLSGITGARNLAVSQVVHKAVLDVFEEGTEASAATAVKITLLSALVETRTIVRFNRPFLMIIVPTDTQNIFFMSKVTNPKQA

SEQ ID NO: 10989 - protein, 412 aa, Homo sapiens
MDTSPSRKYPVKKRVKIHPNTVMVKYTSHYPQPGDDGYEEINEGYGNFMEENPKKGLLSEMKKKGRAFFGTMDTLPPPTEDPMINEIGQFQSFAEKNIFQSRKMWIVLFGSALAHGCVALITRLVSDRSKVPSLELIFIRSVFQVLSVLVVCYYQEAPFGPSGYRLRLFFYGVCNVISITCAYTSFSIVPPSNGTTMWRATTTVFSAILAFLLVDEKMAYVDMATVVCSILGVCLVMIPNIVDEDNSLLNAWKEAFGYTMTVMAGLTTALSMIVYRSIKEKISMWTALFTFGWTGTIWGISTMFILQEPIIPLDGETWSYLIAICVCSTAAFLGVYYALDKFHPALVSTVQHLEIVVAMVLQLLVLHIFPSIYDVFGGVIIMISVFVLAGYKLYWRNLRKQDYQEILDSPIK

SEQ ID NO: 10990 - protein, 118 aa, Homo sapiens
MCDKEFMWALKNGDLDEVKDYVAKGEDVNRTLEGGRKPLHYAADCGQLEILEFLLLKGADINAPDKHHITPLLSAVYEGHVSCVKLLLSKGADKTVKGPDGLTAFEATDNQAIKALLQ

SEQ ID NO: 10991 - protein, 780 aa, Homo sapiens
MATSNLLKNKGSLQFEDKWDFMRPIVLKLLRQESVTKQQWFDLFSDVHAVCLWDDKGPAKIHQALKEDILEFIKQAQARVLSHQDDTALLKAYIVEWRKFFTQCDILPKPFCQLEITLMGKQGSNKKSNVEDSIVRKLMLDTWNESIFSNIKNRLQDSAMKLVHAERLGEAFDSQLVIGVRESYVNLCSNPEDKLQIYRDNFEKAYLDSTERFYRTQAPSYLQQNGVQNYMKYADAKLKEEEKRALRYLETRRECNSVEALMECCVNALVTSFKETILAECQGMIKRNETEKLHLMFSLMDKVPNGIEPMLKDLEEHIISAGLADMVAAAETITTDSEKYVEQLLTLFNRFSKLVKEAFQDDPRFLTARDKAYKAVVNDATIFKLELPLKQKGVGLKTQPESKCPELLANYCDMLLRKTPLSKKLTSEEIEAKLKEVLLVLKYVQNKDVFMRYHKAHLTRRLILDISADSEIEENMVEWLREVGMPADYVNKLARMFQDIKVSEDLNQAFKEMHKNNKLALPADSVNIKILNAGAWSRSSEKVFVSLPTELEDLIPEVEEFYKKNHSGRKLHWHHLMSNGIITFKNEVGQYDLEVTTFQLAVLFAWNQRPREKISFENLKLATELPDAELRRTLWSLVAFPKLKRQVLLYEPQVNSPKDFTEGTLFSVNQEFSLIKNAKVQKRGKINLIGRLQLTTERMREEENEGIVQLRILRTQEAIIQIMKMRKKISNAQLQTELVEILKNMFLPQKKMIKEQIEWLIEHKYIRRDESDINTFIYMA

SEQ ID NO: 10992 - protein, 596 aa, Homo sapiens
MTSPSPRIQIISTDSAVASPQRIQIVTDQQTGQKIQIVTAVDASGSPKQQFILTSPDGAGTGKVILASPETSSAKQLIFTTSDNLVPGRIQIVTDSASVERLLGKTDVQRPQVVEYCVVCGDKASGRHYGAVSCEGCKGFFKRSVRKNLTYSCRSNQDCIINKHHRNRCQFCRLKKCLEMGMKMESVQSERKPFDVQREKPSNCAASTEKIYIRKDLRSPLIATPTFVADKDGARQTGLLDPGMLVNIQQPLIREDGTVLLATDSKAETSQGALGTLANVVTSLANLSESLNNGDTSEIQPEDQSASEITRAFDTLAKALNTTDSSSSPSLADGIDTSGGGSIHVISRDQSTPIIEVEGPLLSDTHVTFKLTMPSPMPEYLNVHYICESASRLLFLSMHWARSIPAFQALGQDCNTSLVRACWNELFTLGLAQCAQVMSLSTILAAIVNHLQNSIQEDKLSGDRIKQVMEHIWKLQEFCNSMAKLDIDGYEYAYLKAIVLFSPDHPGLTSTSQIEKFQEKAQMELQDYVQKTYSEDTYRLARILVRLPALRLMSSNITEELFFTGLIGNVSIDSIIPYILKMETAEYNGQITGASL

SEQ ID NO: 10993 - protein, 488 aa, Homo sapiens
MPEEMDKPLISLHLVDSDSSLAKVPDEAPKVGILGSGDFARSLATRLVGSGFKVVVGSRNPKRTARLFPSAAQVTFQEEAVSSPEVIFVAVFREHYSSLCSLSDQLAGKILVDVSNPTEQEHLQHRESNAEYLASLFPTCTVVKAFNVISAWTLQAGPRDGNRQVPICGDQPEAKRAVSEMALAMGFMPVDMGSLASAWEVEAMPLRLLPAWKVPTLLALGLFVCFYAYNFVRDVLQPYVQESQNKFFKLPVSVVNTTLPCVAYVLLSLVYLPGVLAAALQLRRGTKYQRFPDWLDHWLQHRKQIGLLSFFCAALHALYSFCLPLRRAHRYDLVNLAVKQVLANKSHLWVEEEVWRMEIYLSLGVLALGTLSLLAVTSLPSIANSLNWREFSFVQSSLGFVALVLSTLHTLTYGWTRAFEESRYKFYLPPTFTLTLLVPCVVILAKALFLLPCISRRLARIRRGWERESTIKFTLPTDHALAEKTSHV

SEQ ID NO: 10994 - protein, 104 aa, Homo sapiens
MGKESGWDSGRAAVAAVVGGVVAVGTVLVALSAMGFTSVGIAASSIAAKMMSTAAIANGGGVAAGSLVAILQSVGAAGLSVTSKVIGGFAGTALGAWLGSPPSS

SEQ ID NO: 10995 - protein, 558 aa, Homo sapiens
MLGGSGSHGRRSLAALSQIAYQRNDDDEEEAARERRRRARQERLRQKQEEESLGQVTDQVEVNAQNSVPDEEAKTTTTNTQVEGDDEAAFLERLARREERRQKRLQEALERQKEFDPTITDASLSLPSRRMQNDTAENETTEKEEKSESRQERYEIEETETVTKSYQKNDWRDAEENKKEDKEKEEEEEEKPKRGSIGENQGEEKGTKVQAKREKLQEDKPTFKKEEIKDEKIKKDKEPKEEVKSFMDRKKGFTEVKSQNGEFMTHKLKHTENTFSRPGGRASVDTKEAEGAPQVEAGKRLEELRRRRGETESEEFEKLKQKQQEAALELEELKKKREERRKVLEEEEQRRKQEEADRKLREEEEKRRLKEEIERRRAEAAEKRQKMPEDGLSDDKKPFKCFTPKGSSLKIEERAEFLNKSVQKSSGVKSTHQAAIVSKIDSRLEQYTSAIEGTKSAKPTKPAASDLPVPAEGVRNIKSMWEKGNVFSSPTAAGTPNKETAGLKVGVSSRINEWLTKTPDGNKSPAPKPSDLRPGDVSSKRNLWEKQSVDKVTSPTKV

SEQ ID NO: 10996 - protein, 559 aa, Homo sapiens
MAETVWSTDTGEAVYRSRDPVRNLRLRVHLQRITSSNFLHYQPAAELGKDLIDLATFRPQPTASGHRPEEDEEEEIVIGWQEKLFSQFEVDLYQNETACQSPLDYQYRQEILKLENSGGKKNRRIFTYTDSDRYTNLEEHCQRMTTAASEVPSFLVERMANVRRRRQDRRGMEGGILKSRIVTWEPSEEFVRNNHVINTPLQTMHIMADLGPYKKLGYKKYEHVLCTLKVDSNGVITVKPDFTGLKGPYRIETEGEKQELWKYTIDNVSPHAQPEEEERERRVFKDLYGRHKEYLSSLVGTDFEMTVPGALRLFVNGEVVSAQGYEYDNLYVHFFVELPTAHWSSPAFQQLSGVTQTCTTKSLAMDKVAHFSYPFTFEAFFLHEDESSDALPEWPVLYCEVLSLDFWQRYRVEGYGAVVLPATPGSHTLTVSTWRPVELGTVAELRRFFIGGSLELEDLSYVRIPGSFKGERLSRFGLRTETTGTVTFRLHCLQQSRAFMESSSLQKRMRSVLDRLEGFSQQSSIHNVLEAFRRARRRMQEARESLPQDLVSPSGTLVS

SEQ ID NO: 10997 - protein, 433 aa, Homo sapiens
MRIISRQIVLLFSGFWGLAMGAFPSSVQIGGLFIRNTDQEYTAFRLAIFLHNTSPNASEAPFNLVPHVDNIETANSFAVTNAFCSQYSRGVFAIFGLYDKRSVHTLTSFCSALHISLITPSFPTEGESQFVLQLRPSLRGALLSLLDHYEWNCFVFLYDTDRGYSILQAIMEKAGQNGWHVSAICVENFNDVSYRQLLEELDRRQEKKFVIDCEIERLQNILEQIVSVGKHVKGYHYIIANLGFKDISLERFIHGGANVTGFQLVDFNTPMVIKLMDRWKKLDQREYPGSETPPKYTSALTYDGVLVMAETFRSLRRQKIDISRRGNAGDCLANPAAPWGQGIDMERTLKQVRIQGLTGNVQFDHYGRRVNYTMDVFELKSTGPRKVGYWNDMDKLVLIQDVPTLGNDTAAIENRTVVVTTIMPLMKNPILRN

SEQ ID NO: 10998 - protein, 884 aa, Homo sapiens
MRIISRQIVLLFSGFWGLAMGAFPSSVQIGGLFIRNTDQEYTAFRLAIFLHNTSPNASEAPFNLVPHVDNIETANSFAVTNAFCSQYSRGVFAIFGLYDKRSVHTLTSFCSALHISLITPSFPTEGESQFVLQLRPSLRGALLSLLDHYEWNCFVFLYDTDRGYSILQAIMEKAGQNGWHVSAICVENFNDVSYRQLLEELDRRQEKKFVIDCEIERLQNILEQIVSVGKHVKGYHYIIANLGFKDISLERFIHGGANVTGFQLVDFNTPMVIKLMDRWKKLDQREYPGSETPPKYTSALTYDGVLVMAETFRSLRRQKIDISRRGNAGDCLANPAAPWGQGIDMERTLKQVRIQGLTGNVQFDHYGRRVNYTMDVFELKSTGPRKVGYWNDMDKLVLIQDVPTLGNDTAAIENRTVVVTTIMESPYVMYKKNHEMFEGNDKYEGYCVDLASEIAKHIGIKYKIAIVPDGKYGARDADTKIWNGMVGELVYGKAEIAIAPLTITLVREEVIDFSKPFMSLGISIMIKKPQKSKPGVFSFLDPLAYEIWMCIVFAYIGVSVVLFLVSRFSPYEWHTEEPEDGKEGPSDQPPNEFGIFNSLWFSLGAFMQQGCDISPRSLSGRIVGGVWWFFTLIIISSYTANLAAFLTVERMVSPIESAEDLAKQTEIAYGTLDSGSTKEFFRRSKIAVYEKMWTYMRSAEPSVFTRTTAEGVARVRKSKGKFAFLLESTMNEYIEQRKPCDTMKVGGNLDSKGYGVATPKGSSLRNAVNLAVLKLNEQGLLDKLKNKWWYDKGECGSGGGDSKDKTSALSLSNVAGVFYILVGGLGLAMLVALIEFCYKSRAEAKRMKVAKSAQTFNPTSSQNTQNLATYREGYNVYGTESIKI

SEQ ID NO: 10999 - protein, 321 aa, Homo sapiens
MADSMQEKQRMAGQMLLQTFFNIDQISPNKKAHPNMEAGPPESGESTDALKLCPHEEFLRLCKERAEEIYPIKERNNRTRLALIICNTEFDHLPPRNGADFDITGMKELLEGLDYSVDVEENLTARDMESALRAFATRPEHKSSDSTFLVLMSHGILEGICGTVHDEKKPDVLLYDTIFQIFNNRNCLSLKDKPKVIIVQACRGANRGELWVRDSPASLEVASSQSSENLEEDAVYKTHVEKDFIAFCSSTPHNVSWRDSTMGSIFITQLITCFQKYSWCCHLEEVFRKVQQSFETPRAKAQMPTIERLSMTRYFYLFPGN

SEQ ID NO: 11000 - protein, 370 aa, Homo sapiens
MHRLIFVYTLICANFCSCRDTSATPQSASIKALRNANLRRDESNHLTDLYRRDETIQVKGNGYVQSPRFPNSYPRNLLLTWRLHSQENTRIQLVFDNQFGLEEAENDICRYDFVEVEDISETSTIIRGRWCGHKEVPPRIKSRTNQIKITFKSDDYFVAKPGFKIYYSLLEDFQPAAASETNWESVTSSISGVSYNSPSVTDPTLIADALDKKIAEFDTVEDLLKYFNPESWQEDLENMYLDTPRYRGRSYHDRKSKVDLDRLNDDAKRYSCTPRNYSVNIREELKLANVVFFPRCLLVQRCGGNCGCGTVNWRSCTCNSGKTVKKYHEVLQFEPGHIKRRGRAKTMALVDIQLDHHERCDCICSSRPPR

SEQ ID NO: 11001 - protein, 348 aa, Homo sapiens
MYRQRFLYSLYRHTHWVRCAKFSPDGRLIVSCSEDKTIKIWDTTNKQCVNNFSDSVGFANFVDFNPSGTCIASAGSDQTVKVWDVRVNKLLQHYQVHSGGVNCISFHPSGNYLITASSDGTLKILDLLEGRLIYTLQGHTGPVFTVSFSKGGELFASGGADTQVLLWRTNFDELHCKGLTKRNLKRLHFDSPPHLLDIYPRTPHPHEEKVETVEINPKLEVIDLQISTPPVMDILSFDSTTTTETSGRTLPDKGEEACGYFLNPSLMSPECLPTTTKKKTEDMSDLPCESQRSIPLAVTDALEHIMEQLNVLTQTVSILEQRLTLTEDKLKDCLENQQKLFSAVQQKS

SEQ ID NO: 11002 - protein, 267 aa, Homo sapiens
MANCERTFIAIKPDGVQRGLVGEIIKRFEQKGFRLVGLKFMQASEDLLKEHYVDLKDRPFFAGLVKYMHSGPVVAMVWEGLNVVKTGRVMLGETNPADSKPGTIRGDFCIQVGRTMANLERTFIAIKPDGVQRGLVGEIIKRFEQKGFRLVAMKFLRASEEHLKQHYIDLKDRPFFPGLVKYMNSGPVVAMVWEGLNVVKTGRVMLGETNPADSKPGTIRGDFCIQVGRNIIHGSDSVKSAEKEISLWFKPEELVDYKSCAHDWVYE

SEQ ID NO: 11003 - protein, 152 aa, Homo sapiens
MANCERTFIAIKPDGVQRGLVGEIIKRFEQKGFRLVGLKFMQASEDLLKEHYVDLKDRPFFAGLVKYMHSGPVVAMVWEGLNVVKTGRVMLGETNPADSKPGTIRGDFCIQVGRNIIHGSDSVESAEKEIGLWFHPEELVDYTSCAQNWIYE

SEQ ID NO: 11004 - protein, 879 aa, Homo sapiens
MGRLASRPLLLALLSLALCRGRVVRVPTATLVRVVGTELVIPCNVSDYDGPSEQNFDWSFSSLGSSFVELASTWEVGFPAQLYQERLQRGEILLRRTANDAVELHIKNVQPSDQGHYKCSTPSTDATVQGNYEDTVQVKVLADSLHVGPSARPPPSLSLREGEPFELRCTAASASPLHTHLALLWEVHRGPARRSVLALTHEGRFHPGLGYEQRYHSGDVRLDTVGSDAYRLSVSRALSADQGSYRCIVSEWIAEQGNWQEIQEKAVEVATVVIQPSVLRAAVPKNVSVAEGKELDLTCNITTDRADDVRPEVTWSFSRMPDSTLPGSRVLARLDRDSLVHSSPHVALSHVDARSYHLLVRDVSKENSGYYYCHVSLWAPGHNRSWHKVAEAVSSPAGVGVTWLEPDYQVYLNASKVPGFADDPTELACRVVDTKSGEANVRFTVSWYYRMNRRSDNVVTSELLAVMDGDWTLKYGERSKQRAQDGDFIFSKEHTDTFNFRIQRTTEEDRGNYYCVVSAWTKQRNNSWVKSKDVFSKPVNIFWALEDSVLVVKARQPKPFFAAGNTFEMTCKVSSKNIKSPRYSVLIMAEKPVGDLSSPNETKYIISLDQDSVVKLENWTDASRVDGVVLEKVQEDEFRYRMYQTQVSDAGLYRCMVTAWSPVRGSLWREAATSLSNPIEIDFQTSGPIFNASVHSDTPSVIRGDLIKLFCIITVEGAALDPDDMAFDVSWFAVHSFGLDKAPVLLSSLDRKGIVTTSRRDWKSDLSLERVSVLEFLLQVHGSEDQDFGNYYCSVTPWVKSPTGSWQKEAEIHSKPVFITVKMDVLNAFKYPLLIGVGLSTVIGLLSCLIGYCSSHWCCKKEVQETRRERRRLMSMEMD

SEQ ID NO: 11005 - protein, 530 aa, Homo sapiens
MLHLLALFLHCLPLASGDYDICKSWVTTDEGPTWEFYACQPKVMRLKDYVKVKVEPSGITCGDPPERFCSHENPYLCSNECDASNPDLAHPPRLMFDKEEEGLATYWQSITWSRYPSPLEANITLSWNKTVELTDDVVMTFEYGRPTVMVLEKSLDNGRTWQPYQFYAEDCMEAFGMSARRARDMSSSSAHRVLCTEEYSRWAGSKKEKHVRFEVRDRFAIFAGPDLRNMDNLYTRLESAKGLKEFFTLTDLRMRLLRPALGGTYVQRENLYKYFYAISNIEVIGRCKCNLHANLCSMREGSLQCECEHNTTGPDCGKCKKNFRTRSWRAGSYLPLPHGSPNACATAGSFGNCECYGHSNRCSYIDFLNVVTCVSCKHNTRGQHCQHCRLGYYRNGSAELDDENVCIECNCNQIGSVHDRCNETGFCECREGAAGPKCDDCLPTHYWRQGCYPNVCDDDQLLCQNGGTCLQNQRCACPRGYTGVRCEQPRCDPADDDGGLDCDRAPGAAPRPATLLGCLLLLGLAARLGR

SEQ ID NO: 11006 - protein, 229 aa, Homo sapiens
MDCRVHMRPIGLTWVLQLTLAWILLEACGGSRPLQARSQQHHGLAADLGKGKLHLAGPCCPSEMDTTETSGPGNHPERCGVPSPECESFLEHLQRALRSRFRLRLLGVRQAQPLCEELCQAWFANCEDDITCGPTWLPLSEKRGCEPSCLTYGQTFADGTDLCRSALGHALPVAAPGARHCFNISISAVPRPRPGRRGREAPSRRSRSPRTSILDAAGSGSGSGSGSGP

SEQ ID NO: 11007 - protein, 653 aa, Homo sapiens
MEPSGSEQLFEDPDPGGKSQDAEARKQTESEQKLSKMTHNALENINVIGQGLKHLFQHQRRRSSVSPHDVQQIQADPEPEMDLESQNACAEIDGVPTHPTALNRVLQQIRVPPKMKRGTSLHSRRGKPEAPKGSPQINRKSGQEMTAVMQSGRPRSSSTTDAPTSSAMMEIACAAAAAAAACLPGEEGTAERIERLEVSSLAQTSSAVASSTDGSIHTDSVDGTPDPQRTKAAIAHLQQKILKLTEQIKIAQTARDDNVAEYLKLANSADKQQAARIKQVFEKKNQKSAQTILQLQKKLEHYHRKLREVEQNGIPRQPKDVFRDMHQGLKDVGAKVTGFSEGVVDSVKGGFSSFSQATHSAAGAVVSKPREIASLIRNKFGSADNIPNLKDSLEEGQVDDAGKALGVISNFQSSPKYGSEEDCSSATSGSVGANSTTGGIAVGASSSKTNTLDMQSSGFDALLHEIQEIRETQARLEESFETLKEHYQRDYSLIMQTLQEERYRCERLEEQLNDLTELHQNEILNLKQELASMEEKIAYQSYERARDIQEALEACQTRISKMELQQQQQQVVQLEGLENATARNLLGKLINILLAVMAVLLVFVSTVANCVVPLMKTRNRTFSTLFLVVFIAFLWKHWDALFSYVERFFSSPR

SEQ ID NO: 11008 - protein, 847 aa, Homo sapiens
MSQRQGKEAYPTPTKDLHQPSLSPASPHSQGFERGKEDISQNKDESSLSMSKSKSESKLYNGSEKDSSTSSKLTKKESLKVQKKNYREEKKRATKELLSTITDPSVIVMADWLKIRGTLKSWTKLWCVLKPGVLLIYKTQKNGQWVGTVLLNACEIIERPSKKDGFCFKLFHPLEQSIWAVKGPKGEAVGSITQPLPSSYLIIRATSESDGRCWMDALELALKCSSLLKRTMIREGKEHDLSVSSDSTHVTFYGLLRANNLHSGDNFQLNDSEIERQHFKDQDMYSDKSDKENDQEHDESDNEVMGKSEESDTDTSERQDDSYIEPEPVEPLKETTYTEQSHEELGEAGEASQTETVSEENKSLIWTLLKQVRPGMDLSKVVLPTFILEPRSFLDKLSDYYYHADFLSEAALEENPYFRLKKVVKWYLSGFYKKPKGLKKPYNPILGETFRCLWIHPRTNSKTFYIAEQVSHHPPISAFYVSNRKDGFCLSGSILAKSKFYGNSLSAILEGEARLTFLNRGEDYVMTMPYAHCKGILYGTMTLELGGTVNITCQKTGYSAILEFKLKPFLGSSDCVNQISGKLKLGKEVLATLEGHWDSEVFITDKKTDNSEVFWNPTPDIKQWRLIRHTVKFEEQGDFESEKLWQRVTRAINAKDQTEATQEKYVLEEAQRQAARDRKTKNEEWSCKLFELDPLTGEWHYKFADTRPWDPLNDMIQFEKDGVIQTKVKHRTPMVSVPKMKHKPTRQQKKVAKGYSSPEPDIQDSSGSEAQSVKPSTRRKKGIELGDIQSSIESIKQTQEEIKRNIMALRNHLVSSTPATDYFLQQKDYFIIFLLILLQVIINFMFK

SEQ ID NO: 11009 - protein, 458 aa, Homo sapiens
MELPLGRCDDSRTWDDDSDPESETDPDAQAKAYVARVLSPPKSGLAFSRPSQLSTPAASPSASEPRAASRVSAVSEPGLLSLPPELLLEICSYLDARLVLHVLSRVCHALRDLVSDHVTWRLRALRRVRAPYPVVEEKNFDWPAACIALEQHLSRWAEDGRWVEYFCLAEGHVASVDSVLLLQGGSLCLSGSRDRNVNLWDLRQLGTESNQVLIKTLGTKRNSTHEGWVWSLAAQDHRVCSGSWDSTVKLWDMAADGQQFGEIKASSAVLCLSYLPDILVTGTYDKKVTIYDPRAGPALLKHQQLHSRPVLTLLADDRHIISGSEDHTLVVVDRRANSVLQRLQLDSYLLCMSYQEPQLWAGDNQGLLHVFANRNGCFQLIRSFDVGHSFPITGIQYSVGALYTTSTDKTIRVHVPTDPPRTICTRRHDNGLNRVCAEGNLVVAGSGDLSLEVWRLQA

SEQ ID NO: 11010 - protein, 928 aa, Homo sapiens
MDVGFSRTTVQTLSRSHCKNIKQKISQWEGRANGISNPEKWCPKDFGVRYNCHQEIRLKKNPIAERKSKNLDVTSRENVGLDINENTKSHDQSENENKKHEYDDTHFFKNESESNWVCSRVKEIESCKEDVLDPETSLPPGNFYTSQILWKKIEALPPDKLLNLALEHCDSSEKELNFRVLDSSYGITKSLENIYSEPEGQECGPSINPLPKPRRTFRYLSESGVTPYKERNCDKKYCENNSCAQSSLASSQEPEPKKYGGKIRGRSKRKSFEFEDIQHFRNRNSQTIREELGRNSGSALYYTQSEDNIYEDIIYPTKENPYEDIPVQPLPMWRSPSAWKLPPAKSAFKAPKLPPKPQFLHRKTMEVKNSQAYLRSKLTKDTTLPVTLTEWKLFRAGEVANTKRKNLPRLVLKIDDIFESKRGKKKVKLHSYTGKELPPTKGETSGNESDAEYLPKNRHKRLAQLQPSSKRNPHYQTLERDLIELQEQQLFELFVVVSLQKKPSGISYIPQVIQQFPGKDDHGYKQSKDMEERLKVIPKFCFPDSKDWMPTSELKSETFSFVLTGEDGSRWFGYCKKLLPVGKGKRLPEVYCMVSRLGCFNLFSKILDEVEKRREMSPALVYPFMRSVMEAPFPAPGRTITVKSYLPGAGDESIELCRPLDSRLEHVDFKCLFKCLSVCHLIRVCASLLLERRVIFVANSLSTLSKCGHAVVATLYPFTWQHTYIPVLPASMIDIVCSPTPFLIGILSCSLPQLQDLPIEEVLIVDLCADKFLQEVSDEDEILPPKLQAALMQILEERNEILTQEQNFSQDVTLNSLVSEAFVRFFVELVGHYSLNMTVTERGERVFQREPFRKSHTSRSVRHFLDLFMETQMFAGFIQDRELRKSGVKGLFEIRAIQYLETIPESEPSGMNRILRSLGSKMKFLQKK

SEQ ID NO: 11011 - protein, 298 aa, Homo sapiens
MVLLLILSVLLLKEDVRGSAQSSERRVVAHMPGDIIIGALFSVHHQPTVDKVHERKCGAVREQYGIQRVEAMLHTLERINSDPTLLPNITLGCEIRDSCWHSAVALEQSIEFIRDSLISSEEEEGLVRCVDGSSSSFRSKKPIVGVIGPGSSSVAIQVQNLLQLFNIPQIAYSATSMDLSDKTLFKYFMRVVPSDAQQARAMVDIVKRYNWTYVSAVHTEGRGTKKEEMRKRDQTLMLSFMRCVFLRFEEIRWNDSLVYDALENENIQVLSLCFPSSAVIQINTFLSPIALINRLNVT

SEQ ID NO: 11012 - protein, 285 aa, Homo sapiens
MARNAEKAMTALARFRQAQLEEGKVKERRPFLASECTELPKAEKWRRQIIGEISKKVAQIQNAGLGEFRIRDLNDEINKLLREKGHWEVRIKELGGPDYGKVGPKMLDHEGKEVPGNRGYKYFGAAKDLPGVRELFEKEPLPPPRKTRAELMKAIDFEYYGYLDEDDGVIVPLEQEYEKKLRAELVEKWKAEREARLARGEKEEEEEEEEEINIYAVTEEESDEEGSQEKGGDDSQQKFIAHVPVPSQQEIEEALVRRKKMELLQKYASETLQAQSEEARRLLGY

SEQ ID NO: 11013 - protein, 345 aa, Homo sapiens
MLPLLEVAEKEREALRTEADTISGRVDRLEREVDYLETQNPALPCVEFDEKVTGGPGTKGKGRRNEKYDMVTDCGYTISQVRSMKILKRFGGPAGLWTKDPLGQTEKIYVLDGTQNDTAFVFPRLRDFTLAMAARKASRVRVPFPWVGTGQLVYGGFLYFARRPPGRPGGGGEMENTLQLIKFHLANRTVVDSSVFPAEGLIPPYGLTADTYIDLAADEEGLWAVYATREDDRHLCLAKLDPQTLDTEQQWDTPCPRENAEAAFVICGTLYVVYNTRPASRARIQCSFDASGTLTPERAALPYFPRRYGAHASLRYNPRERQLYAWDDGYQIVYKLEMRKKEEEV

SEQ ID NO: 11014 - protein, 604 aa, Homo sapiens
MGAALGTGTRLAPWPGRACGALPRWTPTAPAQGCHSKPGPARPVPLKKRGYDVTRNPHLNKGMAFTLEERLQLGIHGLIPPCFLSQDVQLLRIMRYYERQQSDLDKYIILMTLQDRNEKLFYRVLTSDVEKFMPIVYTPTVGLACQHYGLTFRRPRGLFITIHDKGHLATMLNSWPEDNIKAVVVTDGERILGLGDLGCYGMGIPVGKLALYTACGGVNPQQCLPVLLDVGTNNEELLRDPLYIGLKHQRVHGKAYDDLLDEFMQAVTDKFGINCLIQFEDFANANAFRLLNKYRNKYCMFNDDIQGTASVAVAGILAALRITKNKLSNHVFVFQGAGEAAMGIAHLLVMALEKEGVPKAEATRKIWMVDSKGLIVKGRSHLNHEKEMFAQDHPEVNSLEEVVRLVKPTAIIGVAAIAGAFTEQILRDMASFHERPIIFALSNPTSKAECTAEKCYRVTEGRGIFASGSPFKSVTLEDGKTFIPGQGNNAYVFPGVALGVIAGGIRHIPDEIFLLTAEQIAQEVSEQHLSQGRLYPPLSTIRDVSLRIAIKVLDYAYKHNLASYYPEPKDKEAFVRSLVYTPDYDSFTLDSYTWPKEAMNVQTV

SEQ ID NO: 11015 - protein, 652 aa, Homo sapiens
MSGQSLTDRITAAQHSVTGSAVSKTVCKATTHEIMGPKKKHLDYLIQCTNEMNVNIPQLADSLFERTTNSSWVVVFKSLITTHHLMVYGNERFIQYLASRNTLFNLSNFLDKSGLQGYDMSTFIRRYSRYLNEKAVSYRQVAFDFTKVKRGADGVMRTMNTEKLLKTVPIIQNQMDALLDFNVNSNELTNGVINAAFMLLFKDAIRLFAAYNEGIINLLEKYFDMKKNQCKEGLDIYKKFLTRMTRISEFLKVAEQVGIDRGDIPDLSQAPSSLLDALEQHLASLEGKKIKDSTAASRATTLSNAVSSLASTGLSLTKVDEREKQAALEEEQARLKALKEQRLKELAKKPHTSLTTAASPVSTSAGGIMTAPAIDIFSTPSSSNSTSKLPNDLLDLQQPTFHPSVHPMSTASQVASTWGDPFSATVDAVDDAIPSLNPFLTKSSGDVHLSISSDVSTFTTRTPTHEMFVGFTPSPVAQPHPSAGLNVDFESVFGNKSTNVIVDSGGFDELGGLLKPTVASQNQNLPVAKLPPSKLVSDDLDSSLANLVGNLGIGNGTTKNDVNWSQPGEKKLTGGSNWQPKVAPTTAWNAATMAPPVMAYPATTPTGMIGYGIPPQMGSVPVMTQPTLIYSQPVMRPPNPFGPVSGAQIQFM

SEQ ID NO: 11016 - protein, 1298 aa, Homo sapiens
MQRGAALCLRLWLCLGLLDGLVSGYSMTPPTLNITEESHVIDTGDSLSISCRGQHPLEWAWPGAQEAPATGDKDSEDTGVVRDCEGTDARPYCKVLLLHEVHANDTGSYVCYYKYIKARIEGTTAASSYVFVRDFEQPFINKPDTLLVNRKDAMWVPCLVSIPGLNVTLRSQSSVLWPDGQEVVWDDRRGMLVSTPLLHDALYLQCETTWGDQDFLSNPFLVHITGNELYDIQLLPRKSLELLVGEKLVLNCTVWAEFNSGVTFDWDYPGKQAERGKWVPERRSQQTHTELSSILTIHNVSQHDLGSYVCKANNGIQRFRESTEVIVHENPFISVEWLKGPILEATAGDELVKLPVKLAAYPPPEFQWYKDGKALSGRHSPHALVLKEVTEASTGTYTLALWNSAAGLRRNISLELVVNVPPQIHEKEASSPSIYSRHSRQALTCTAYGVPLPLSIQWHWRPWTPCKMFAQRSLRRRQQQDLMPQCRDWRAVTTQDAVNPIESLDTWTEFVEGKNKTVSKLVIQNANVSAMYKCVVSNKVGQDERLIYFYVTTIPDGFTIESKPSEELLEGQPVLLSCQADSYKYEHLRWYRLNLSTLHDAHGNPLLLDCKNVHLFATPLAASLEEVAPGARHATLSLSIPRVAPEHEGHYVCEVQDRRSHDKHCHKKYLSVQALEAPRLTQNLTDLLVNVSDSLEMQCLVAGAHAPSIVWYKDERLLEEKSGVDLADSNQKLSIQRVREEDAGRYLCSVCNAKGCVNSSASVAVEGSEDKGSMEIVILVGTGVIAVFFWVLLLLIFCNMRRPAHADIKTGYLSIIMDPGEVPLEEQCEYLSYDASQWEFPRERLHLGRVLGYGAFGKVVEASAFGIHKGSSCDTVAVKMLKEGATASEHRALMSELKILIHIGNHLNVVNLLGACTKPQGPLMVIVEFCKYGNLSNFLRAKRDAFSPCAEKSPEQRGRFRAMVELARLDRRRPGSSDRVLFARFSKTEGGARRASPDQEAEDLWLSPLTMEDLVCYSFQVARGMEFLASRKCIHRDLAARNILLSESDVVKICDFGLARDIYKDPDYVRKGSARLPLKWMAPESIFDKVYTTQSDVWSFGVLLWEIFSLGASPYPGVQINEEFCQRLRDGTRMRAPELATPAIRRIMLNCWSGDPKARPAFSELVEILGDLLQGRGLQEEEEVCMAPRSSQSSEEGSFSQVSTMALHIAQADAEDSPPSLQRHSLAARYYNWVSFPGCLARGAETRGSSRMKTFEEFPMTPTTYKGSVDNQTDSGMVLASEEFEQIESRHRQESGFR

SEQ ID NO: 11017 - protein, 382 aa, Homo sapiens
MSDSKCDSQFYSVQVADSTFTVLKRYQQLKPIGSGAQGIVCAAFDTVLGINVAVKKLSRPFQNQTHAKRAYRELVLLKCVNHKNIISLLNVFTPQKTLEEFQDVYLVMELMDANLCQVIHMELDHERMSYLLYQMLCGIKHLHSAGIIHRDLKPSNIVVKSDCTLKILDFGLARTACTNFMMTPYVVTRYYRAPEVILGMGYKENVDIWSVGCIMGELVKGCVIFQGTDHIDQWNKVIEQLGTPSAEFMKKLQPTVRNYVENRPKYPGIKFEELFPDWIFPSESERDKIKTSQARDLLSKMLVIDPDKRISVDEALRHPYITVWYDPAEAEAPPPQIYDAQLEEREHAIEEWKELIYKEVMDWEERSKNGVVKDQPSAQMQQ

SEQ ID NO: 11018 - protein, 200 aa, Homo sapiens
MAASMHGQPSPSLEDAKLRRPMVIEIIEKNFDYLRKEMTQNIYQMATFGTTAGFSGIFSNFLFRRCFKVKHDALKTYASLATLPFLSTVVTDKLFVIDALYSDNISKENCVFRSSLIGIVCGVFYPSSLAFTKNGRLATKYHTVPLPPKGRVLIHWMTLCQTQMKLMAIPLVFQIMFGILNGLYHYAVFEETLEKTIHEE

SEQ ID NO: 11019 - protein, 926 aa, Homo sapiens
MLQVHRTGLGRLGVSLSKGLHHKAVLAVRREDVNAWERRAPLAPKHIKGITNLGYKVLIQPSNRRAIHDKDYVKAGGILQEDISEACLILGVKRPPEEKLMSRKTYAFFSHTIKAQEANMGLLDEILKQEIRLIDYEKMVDHRGVRVVAFGQWAGVAGMINILHGMGLRLLALGHHTPFMHIGMAHNYRNSSQAVQAVRDAGYEISLGLMPKSIGPLTFVFTGTGNVSKGAQAIFNELPCEYVEPHELKEVSQTGDLRKVYGTVLSRHHHLVRKTDAVYDPAEYDKHPERYISRFNTDIAPYTTCLINGIYWEQNTPRLLTRQDAQSLLAPGKFSPAGVEGCPALPHKLVAICDISADTGGSIEFMTECTTIEHPFCMYDADQHIIHDSVEGSGILMCSIDNLPAQLPIEATECFGDMLYPYVEEMILSDATQPLESQNFSPVVRDAVITSNGTLPDKYKYIQTLRESRERAQSLSMGTRRKVLVLGSGYISEPVLEYLSRDGNIEITVGSDMKNQIEQLGKKYNINPVSMDICKQEEKLGFLVAKQDLVISLLPYVLHPLVAKACITNKVNMVTASYITPALKELEKSVEDAGITIIGELGLDPGLDHMLAMETIDKAKEVGATIESYISYCGGLPAPEHSNNPLRYKFSWSPVGVLMNVMQSATYLLDGKVVNVAGGISFLDAVTSMDFFPGLNLEGYPNRDSTKYAEIYGISSAHTLLRGTLRYKGYMKALNGFVKLGLINREALPAFRPEANPLTWKQLLCDLVGISPSSEHDVLKEAVLKKLGGDNTQLEAAEWLGLLGDEQVPQAESILDALSKHLVMKLSYGPEEKDMIVMRDSFGIRHPSGHLEHKTIDLVAYGDINGFSAMAKTVGLPTAMAAKMLLDGEIGAKGLMGPFSKEIYGPILERIKAEGIIYTTQSTIKP

SEQ ID NO: 11020 - protein, 619 aa, Homo sapiens
MTDKSIVILSLMVFHSSFINGKTCRRQLVEEWHPQPSSYVVNWTLTENICLDFYRDCWFLGVNTKIDTSGNQAVPQICPLQIQLGDILVISSEPSLQFPEINLMNVSETSFVGCVQNTTTEDQLLFGCRLKGMHTVNSKWLSVGTHYFITVMASGPSPCPLGLRLNVTVKQQFCQESLSSEFCSGHGKCLSEAWSKTYSCHCQPPFSGKYCQELDACSFKPCKNNGSCINKRENWDEQAYECVCHPPFTGKNCSEIIGQCQPHVCFHGNCSNITSNSFICECDEQFSGPFCEVSAKPCVSLLFWKRGICPNSSSAYTYECPKGSSSQNGETDVSEFSLVPCQNGTDCIKISNDVMCICSPIFTDLLCKSIQTSCESFPLRNNATCKKCEKDYPCSCISGFTEKNCEKAIDHCKLLSINCLNEEWCFNIIGRFKYVCIPGCTKNPCWFLKNVYLIHQHLCYCGVTFHGICQDKGPAQFEYVWQLGFAGSEGEKCQGVIDAYFFLAANCTEDATYVNDPEDNNSSCWFPHEGTKEICANGCSCLSEEDSQEYRYLCFLRWAGNMYLENTTDDQENECQHEAVCKDEINRPRRILNTVIPHQIQQHIERFIQHDQVGFIVRI

SEQ ID NO: 11021 - protein, 161 aa, Homo sapiens
MLAFAARTVVKPLGFLKPFSLMKASSRFKAHQDALPRLPVPPLQQSLDHYLKALQPIVSEEEWAHTKQLVDEFQASGGVGERLQKGLERRARKTENWVSEGILTVTCCWLHMHSSPVPTALARPFVCCPEFREHILCVWHLAGCWVIKKDTVTSSLELTFK

SEQ ID NO: 11022 - protein, 2315 aa, Homo sapiens
MRILKRFLACIQLLCVCRLDWANGYYRQQRKLVEEIGWSYTGALNQKNWGKKYPTCNSPKQSPINIDEDLTQVNVNLKKLKFQGWDKTSLENTFIHNTGKTVEINLTNDYRVSGGVSEMVFKASKITFHWGKCNMSSDGSEHSLEGQKFPLEMQIYCFDADRFSSFEEAVKGKGKLRALSILFEVGTEENLDFKAIIDGVESVSRFGKQAALDPFILLNLLPNSTDKYYIYNGSLTSPPCTDTVDWIVFKDTVSISESQLAVFCEVLTMQQSGYVMLMDYLQNNFREQQYKFSRQVFSSYTGKEEIHEAVCSSEPENVQADPENYTSLLVTWERPRVVYDTMIEKFAVLYQQLDGEDQTKHEFLTDGYQDLGAILNNLLPNMSYVLQIVAICTNGLYGKYSDQLIVDMPTDNPELDLFPELIGTEEIIKEEEEGKDIEEGAIVNPGRDSATNQIRKKEPQISTTTHYNRIGTKYNEAKTNRSPTRGSEFSGKGDVPNTSLNSTSQPVTKLATEKDISLTSQTVTELPPHTVEGTSASLNDGSKTVLRSPHMNLSGTAESLNTVSITEYEEESLLTSFKLDTGAEDSSGSSPATSAIPFISENISQGYIFSSENPETITYDVLIPESARNASEDSTSSGSEESLKDPSMEGNVWFPSSTDITAQPDVGSGRESFLQTNYTEIRVDESEKTTKSFSAGPVMSQGPSVTDLEMPHYSTFAYFPTEVTPHAFTPSSRQQDLVSTVNVVYSQTTQPVYNGETPLQPSYSSEVFPLVTPLLLDNQILNTTPAASSSDSALHATPVFPSVDVSFESILSSYDGAPLLPFSSASFSSELFRHLHTVSQILPQVTSATESDKVPLHASLPVAGGDLLLEPSLAQYSDVLSTTHAASETLEFGSESGVLYKTLMFSQVEPPSSDAMMHARSSGPEPSYALSDNEGSQHIFTVSYSSAIPVHDSVGVTYQGSLFSGPSHIPIPKSSLITPTASLLQPTHALSGDGEWSGASSDSEFLLPDTDGLTALNISSPVSVAEFTYTTSVFGDDNKALSKSEIIYGNETELQIPSFNEMVYPSESTVMPNMYDNVNKLNASLQETSVSISSTKGMFPGSLAHTTTKVFDHEISQVPENNFSVQPTHTVSQASGDTSLKPVLSANSEPASSDPASSEMLSPSTQLLFYETSASFSTEVLLQPSFQASDVDTLLKTVLPAVPSDPILVETPKVDKISSTMLHLIVSNSASSENMLHSTSVPVFDVSPTSHMHSASLQGLTISYASEKYEPVLLKSESSHQVVPSLYSNDELFQTANLEINQAHPPKGRHVFATPVLSIDEPLNTLINKLIHSDEILTSTKSSVTGKVFAGIPTVASDTFVSTDHSVPIGNGHVAITAVSPHRDGSVTSTKLLFPSKATSELSHSAKSDAGLVGGGEDGDTDDDGDDDDDDRGSDGLSIHKCMSCSSYRESQEKVMNDSDTHENSLMDQNNPISYSLSENSEEDNRVTSVSSDSQTGMDRSPGKSPSANGLSQKHNDGKEENDIQTGSALLPLSPESKAWAVLTSDEESGSGQGTSDSLNENETSTDFSFADTNEKDADGILAAGDSEITPGFPQSPTSSVTSENSEVFHVSEAEASNSSHESRIGLAEGLESEKKAVIPLVIVSALTFICLVVLVGILIYWRKCFQTAHFYLEDSTSPRVISTPPTPIFPISDDVGAIPIKHFPKHVADLHASSGFTEEFETLKEFYQEVQSCTVDLGITADSSNHPDNKHKNRYINIVAYDHSRVKLAQLAEKDGKLTDYINANYVDGYNRPKAYIAAQGPLKSTAEDFWRMIWEHNVEVIVMITNLVEKGRRKCDQYWPADGSEEYGNFLVTQKSVQVLAYYTVRNFTLRNTKIKKGSQKGRPSGRVVTQYHYTQWPDMGVPEYSLPVLTFVRKAAYAKRHAVGPVVVHCSAGVGRTGTYIVLDSMLQQIQHEGTVNIFGFLKHIRSQRNYLVQTEEQYVFIHDTLVEAILSKETEVLDSHIHAYVNALLIPGPAGKTKLEKQFQLLSQSNIQQSDYSAALKQCNREKNRTSSIIPVERSRVGISSLSGEGTDYINASYIMGYYQSNEFIITQHPLLHTIKDFWRMIWDHNAQLVVMIPDGQNMAEDEFVYWPNKDEPINCESFKVTLMAEEHKCLSNEEKLIIQDFILEATQDDYVLEVRHFQCPKWPNPDSPISKTFELISVIKEEAANRDGPMIVHDEHGGVTAGTFCALTTLMHQLEKENSVDVYQVAKMINLMRPGVFADIEQYQFLYKVILSLVSTRQEENPSTSLDSNGAALPDGNIAESLESLV

SEQ ID NO: 11023 - protein, 517 aa, Homo sapiens
MGRRALLLLLLSFLAPWATIALRPALRALGSLHLPTNPTSLPAVAKNYSVLYFQQKALAAGQLHICIIQLNHYKTPLVDHFGFNTVKTFNQRYLVADKYWKKNGGSILFYTGNEGDIIWFCNNTGFMWDVAEELKAMLVFAEHRYYGESLPFGDNSFKDSRHLNFLTSEQALADFAELIKHLKRTIPGAENQPVIAIGGSYGGMLAAWFRMKYPHMVVGALAASAPIWQFEDLVPCGVFMKIVTTDFRKSGPHCSESIHRSWDAINRLSNTGSGLQWLTGALHLCSPLTSQDIQHLKDWISETWVNLAMVDYPYASNFLQPLPAWPIKVVCQYLKNPNVSDSLLLQNIFQALNVYYNYSGQVKCLNISETATSSLGTLGWSYQACTEVVMPFCTNGVDDMFEPHSWNLKELSDDCFQQWGVRPRPSWITTMYGGKNISSHTNIVFSNGELDPWSGGGVTKDITDTLVAVTISEGAHHLDLRTKNALDPMSVLLARSLEVRHMKNWIRDFYDSAGKQH

SEQ ID NO: 11024 - protein, 239 aa, Homo sapiens
MDTLEEVTWANGSTALPPPLAPNISVPHRCLLLLYEDIGTSRVRYWDLLLLIPNVLFLIFLLWKLPSARAKIRITSSPIFITFYILVFVVALVGIARAVVSMTVSTSNAATVADKILWEITRFFLLAIELSVIILGLAFGHLESKSSIKRVLAITTVLSLAYSVTQGTLEILYPDAHLSAEDFNIYGHGGRQFWLVSSCFFFLLGGASTCMRASWHCSTYCRGWGVCCCASTSSRGSAV

SEQ ID NO: 11025 - protein, 1896 aa, Homo sapiens
MPLPPRSLQVLLLLLLLLLLLPGMWAEAGLPRAGGGSQPPFRTFSASDWGLTHLVVHEQTGEVYVGAVNRIYKLSGNLTLLRAHVTGPVEDNEKCYPPPSVQSCPHGLGSTDNVNKLLLLDYAANRLLACGSASQGICQFLRLDDLFKLGEPHHRKEHYLSSVQEAGSMAGVLIAGPPGQGQAKLFVGTPIDGKSEYFPTLSSRRLMANEEDADMFGFVYQDEFVSSQLKIPSDTLSKFPAFDIYYVYSFRSEQFVYYLTLQLDTQLTSPDAAGEHFFTSKIVRLCVDDPKFYSYVEFPIGCEQAGVEYRLVQDAYLSRPGRALAHQLGLAEDEDVLFTVFAQGQKNRVKPPKESALCLFTLRAIKEKIKERIQSCYRGEGKLSLPWLLNKELGCINSPLQIDDDFCGQDFNQPLGGTVTIEGTPLFVDKDDGLTAVAAYDYRGRTVVFAGTRSGRIRKILVDLSNPGGRPALAYESVVAQEGSPILRDLVLSPNHQYLYAMTEKQVTRVPVESCVQYTSCELCLGSRDPHCGWCVLHSICSRRDACERADEPQRFAADLLQCVQLTVQPRNVSVTMSQVPLVLQAWNVPDLSAGVNCSFEDFTESESVLEDGRIHCRSPSAREVAPITRGQGDQRVVKLYLKSKETGKKFASVDFVFYNCSVHQSCLSCVNGSFPCHWCKYRHVCTHNVADCAFLEGRVNVSEDCPQILPSTQIYVPVGVVKPITLAARNLPQPQSGQRGYECLFHIPGSPARVTALRFNSSSLQCQNSSYSYEGNDVSDLPVNLSVVWNGNFVIDNPQNIQAHLYKCPALRESCGLCLKADPRFECGWCVAERRCSLRHHCAADTPASWMHARHGSSRCTDPKILKLSPETGPRQGGTRLTITGENLGLRFEDVRLGVRVGKVLCSPVESEYISAEQIVCEIGDASSVRAHDALVEVCVRDCSPHYRALSPKRFTFVTPTFYRVSPSRGPLSGGTWIGIEGSHLNAGSDVAVSVGGRPCSFSWRNSREIRCLTPPGQSPGSAPIIININRAQLTNPEVKYNYTEDPTILRIDPEWSINSGGTLLTVTGTNLATVREPRIRAKYGGIERENGCLVYNDTTMVCRAPSVANPVRSPPELGERPDELGFVMDNVRSLLVLNSTSFLYYPDPVLEPLSPTGLLELKPSSPLILKGRNLLPPAPGNSRLNYTVLIGSTPCTLTVSETQLLCEAPNLTGQHKVTVRAGGFEFSPGTLQVYSDSLLTLPAIVGIGGGGGLLLLVIVAVLIAYKRKSRDADRTLKRLQLQMDNLESRVALECKEAFAELQTDIHELTNDLDGAGIPFLDYRTYAMRVLFPGIEDHPVLKEMEVQANVEKSLTLFGQLLTKKHFLLTFIRTLEAQRSFSMRDRGNVASLIMTALQGEMEYATGVLKQLLSDLIEKNLESKNHPKLLLRRTESVAEKMLTNWFTFLLYKFLKECAGEPLFMLYCAIKQQMEKGPIDAITGEARYSLSEDKLIRQQIDYKTLTLNCVNPENENAPEVPVKGLDCDTVTQAKEKLLDAAYKGVPYSQRPKAADMDLEWRQGRMARIILQDEDVTTKIDNDWKRLNTLAHYQVTDGSSVALVPKQTSAYNISNSSTFTKSLSRYESMLRTASSPDSLRSRTPMITPDLESGTKLWHLVKNHDHLDQREGDRGSKMVSEIYLTRLLATKGTLQKFVDDLFETIFSTAHRGSALPLAIKYMFDFLDEQADKHQIHDADVRHTWKSNCLPLRFWVNVIKNPQFVFDIHKNSITDACLSVVAQTFMDSCSTSEHKLGKDSPSNKLLYAKDIPNYKSWVERYYADIAKMPAISDQDMSAYLAEQSRLHLSQFNSMSALHEIYSYITKYKDEILAALEKDEQARRQRLRSKLEQVVDTMALSS

SEQ ID NO: 11026 - protein, 522 aa, Homo sapiens
MCNTNMSVPTDGAVTTSQIPASEQETLVRPKPLLLKLLKSVGAQKDTYTMKERWSFTMLPRLVWNSWAQGICLPRPPKVLDLQVLFYLGQYIMTKRLYDEKQQHIVYCSNDLLGDLFGVPSFSVKEHRKIYTMIYRNLVVVNQQESSDSGTSVSENRCHLEGGSDQKDLVQELQEEKPSSSHLVSRPSTSSRRRAISETEENSDELSGERQRKRHKSDSISLSFDESLALCVIREICCERSSSSESTGTPSNPDLDAGVSEHSGDWLDQDSVSDQFSVEFEVESLDSEDYSLSEEGQELSDEDDEVYQVTVYQAGESDTDSFEEDPEISLADYWKCTSCNEMNPPLPSHCNRCWALRENWLPEDKGKDKGEISEKAKLENSTQAEEGFDVPDCKKTIVNDSRESCVEENDDKITQASQSQESEDYSQPSTSSSIIYSSQEDVKEFEREETQDKEESVESSLPLNAIEPCVICQGRPKNGCIVHGKTGHLMACFTCAKKLKKRNKPCPVCRQPIQMIVLTYFP

SEQ ID NO: 11027 - protein, 407 aa, Homo sapiens
MNKSQGSVSFTDVTVDFTQEEWEQLDPSQRILYMDVMLENYSNLLSVEVWKADDQMERDHRNPDEQARQFLILKNQTPIEERGDLFGKALNLNTDFVSLRQVPYKYDLYEKTLKYNSDLLNSNRSYAGKQTDECNEFGKALLYLKQEKTHSGVEYSEYNKSGKALSHKAAIFKHQKIKNLVQPFICTYCDKAFSFKSLLISHKRIHTGEKPYECNVCKKTFSHKANLIKHQRIHTGEKPFECPECGKAFTHQSNLIVHQRAHMEKKPYECSECGKTFAQKFELTTHQRIHTGERPYECNECAKTFFKKSNLIIHQKIHTGEKRYECSECGKSFIQNSQLIIHMRTHTGEKPYECTECGKTFSQRSTLRLHLRIHTGEKPYECSECGKAFSRKSRLSVHQRVHIGEKP

SEQ ID NO: 11028 - protein, 902 aa, Homo sapiens
MKIAVIGQSLFGQEVYCHLRKEGHEVVGVFTVPDKDGKADPLGLEAEKDGVPVFKYSRWRAKGQALPDVVAKYQALGAELNVLPFCSQFIPMEIISAPRHGSIIYHPSLLPRHRGASAINWTLIHGDKKGGFSIFWADDGLDTGDLLLQKECEVLPDDTVSTLYNRFLFPEGIKGMVQAVRLIAEGKAPRLPQPEEGATYEGIQKKETAKINWDQPAEAIHNWIRGNDKVPGAWTEACEQKLTFFNSTLNTSGLVPEGDALPIPGAHRPGVVTKAGLILFGNDDKMLLVKNIQLEDGKMILASNFFKGAASSVLELTEAELVTAEAVRSVWQRILPKVLEVEDSTDFFKSGAASVDVVRLVEEVKELCDGLELENEDVYMASTFGDFIQLLVRKLRGDDEEGECSIDYVEMAVNKRTVRMPHQLFIGGEFVDAEGAKTSETINPTDGSVICQVSLAQVTDVDKAVAAAKDAFENGRWGKISARDRGRLMYRLADLMEQHQEELATIEALDAGAVYTLALKTHVGMSIQTFRYFAGWCDKIQGSTIPINQARPNRNLTLTRKEPVGVCGIIIPWNYPLMMLSWKTAACLAAGNTVVIKPAQVTPLTALKFAELTLKAGIPKGVVNVLPGSGSLVGQRLSDHPDVRKIGFTGSTEVGKHIMKSCAISNVKKVSLELGGKSPLIIFADCDLNKAVQMGMSSVFFNKGENCIAAGRLFVEDSIHDEFVRRVVEEVRKMKVGNPLDRDTDHGPQNHHAHLVKLMEYCQHGVKEGATLVCGGNQVPRPGFFFEPTVFTDVEDHMFIAKEESFGPVMIISRFADGDLDAVLSRANATEFGLASGVFTRDINKALYVSDKLQAGTVFVNTYNKTDVAAPFGGFKQSGFGKDLGEAALNEYLRVKTVTFEY

SEQ ID NO: 11029 - protein, 579 aa, Homo sapiens
MDPAEAVLQEKALKFMCSMPRSLWLGCSSLADSMPSLRCLYNPGTGALTAFQTYNSCARLCLNQETVCLASTAMKTENCVAKTKLANGTSSMIVPKQRKLSASYEKEKELCVKYFEQWSESDQVEFVEHLISQMCHYQHGHINSYLKPMLQRDFITALPARGLDHIAENILSYLDAKSLCAAELVCKEWYRVTSDGMLWKKLIERMVRTDSLWRGLAERRGWGQYLFKNKPPDGNAPPNSFYRALYPKIIQDIETIESNWRCGRHSLQRIHCRSETSKGVYCLQYDDQKIVSGLRDNTIKIWDKNTLECKRILTGHTGSVLCLQYDERVIITGSSDSTVRVWDVNTGEMLNTLIHHCEAVLHLRFNNGMMVTCSKDRSIAVWDMASPTDITLRRVLVGHRAAVNVVDFDDKYIVSASGDRTIKVWNTSTCEFVRTLNGHKRGIACLQYRDRLVVSGSSDNTIRLWDIECGACLRVLEGHEELVRCIRFDNKRIVSGAYDGKIKVWDLVAALDPRAPAGTLCLRTLVEHSGRVFRLQFDEFQIVSSSHDDTILIWDFLNDPAAQAEPPRSPSRTYTYISR

SEQ ID NO: 11030 - protein, 1250 aa, Homo sapiens
MRRGGWRKRAENDGWETWGGYMAAKVQKLEEQFRSDAAMQKDGTSSTIFSGVAIYVNGYTDPSAEELRKLMMLHGGQYHVYYSRSKTTHIIATNLPNAKIKELKGEKVIRPEWIVESIKAGRLLSYIPYQLYTKQSSVQKGLSFNPVCRPEDPLPGPSNIAKQLNNRVNHIVKKIETENEVKVNGMNSWNEEDENNDFSFVDLEQTSPGRKQNGIPHPRGSTAIFNGHTPSSNGALKTQDCLVPMVNSVASRLSPAFSQEEDKAEKSSTDFRDCTLQQLQQSTRNTDALRNPHRTNSFSLSPLHSNTKINGAHHSTVQGPSSTKSTSSVSTFSKAAPSVPSKPSDCNFISNFYSHSRLHHISMWKCELTEFVNTLQRQSNGIFPGREKLKKMKTGRSALVVTDTGDMSVLNSPRHQSCIMHVDMDCFFVSVGIRNRPDLKGKPVAVTSNRGTGRAPLRPGANPQLEWQYYQNKILKGKADIPDSSLWENPDSAQANGIDSVLSRAEIASCSYEARQLGIKNGMFFGHAKQLCPNLQAVPYDFHAYKEVAQTLYETLASYTHNIEAVSCDEALVDITEILAETKLTPDEFANAVRMEIKDQTKCAASVGIGSNILLARMATRKAKPDGQYHLKPEEVDDFIRGQLVTNLPGVGHSMESKLASLGIKTCGDLQYMTMAKLQKEFGPKTGQMLYRFCRGLDDRPVRTEKERKSVSAEINYGIRFTQPKEAEAFLLSLSEEIQRRLEATGMKGKRLTLKIMVRKPGAPVETAKFGGHGICDNIARTVTLDQATDNAKIIGKAMLNMFHTMKLNISDMRGVGIHVNQLVPTNLNPSTCPSRPSVQSSHFPSGSYSVRDVFQVQKAKKSTEEEHKEVFRAAVDLEISSASRTCTFLPPFPAHLPTSPDTNKAESSGKWNGLHTPVSVQSRLNLSIEVPSPSQLDQSVLEALPPDLREQVEQVCAVQQAESHGDKKKEPVNGCNTGILPQPVGTVLLQIPEPQESNSDAGINLIALPAFSQVDPEVFAALPAELQRELKAAYDQRQRQGENSTHQQSASASVPKNPLLHLKAAVKEKKRNKKKKTIGSPKRIQSPLNNKLLNSPAKTLPGACGSPQKLIDGFLKHEGPPAEKPLEELSASTSGVPGLSSLQSDPAGCVRPPAPNLAGAVEFNDVKTLLREWITTISDPMEEDILQVVKYCTDLIEEKDLEKLDLVIKYMKRLMQQSVESVWNMAFDFILDNVQVVLQQTYGSTLKVT

SEQ ID NO: 11031 - protein, 534 aa, Homo sapiens
MFGTESSLSMFLNTLTPKFYVALTGTSSLISGLILIFEWWYFRKYGTSFIEQVSVSHLRPLLGGVDNNSSNNSNSSNGDSDSNRQSVSECKVWRNPLNLFRGAEYNRYTWVTGREPLTYYDMNLSAQDHQTFFTCDSDHLRPADAIMQKAWRERNPQARISAAHEALEINEIRSRVEVPLIASSTIWEIKLLPKCATAYILLAEEEATTIAEAEKLFKQALKAGDGCYRRSQQLQHHGSQYEAQHRRDTNVLVYIKRRLAMCARRLGRTREAVKMMRDLMKEFPLLSMFNIHENLLEALLELQAYADVQAVLAKYDDISLPKSATICYTAALLKARAVSDKFSPEAASRRGLSTAEMNAVEAIHRAVEFNPHVPKYLLEMKSLILPPEHILKRGDSEAIAYAFFHLAHWKRVEGALNLLHCTWEGTFRMIPYPLEKGHLFYPYPICTETADRELLPSFHEVSVYPKKELPFFILFTAGLCSFTAMLALLTHQFPELMGVFAKAFLSTLFAPLNFVMEKVESILPSSLWHQLTRI

SEQ ID NO: 11032 - protein, 572 aa, Homo sapiens
MAEAATGFLEQLKSCIVWSWTYLWTVWFFIVLFLVYILRVPLKINDNLSTVSMFLNTLTPKFYVALTGTSSLISGLILIFEWWYFRKYGTSFIEQVSVSHLRPLLGGVDNNSSNNSNSSNGDSDSNRQSVSECKVWRNPLNLFRGAEYNRYTWVTGREPLTYYDMNLSAQDHQTFFTCDSDHLRPADAIMQKAWRERNPQARISAAHEALEINEIRSRVEVPLIASSTIWEIKLLPKCATAYILLAEEEATTIAEAEKLFKQALKAGDGCYRRSQQLQHHGSQYEAQHRRDTNVLVYIKRRLAMCARRLGRTREAVKMMRDLMKEFPLLSMFNIHENLLEALLELQAYADVQAVLAKYDDISLPKSATICYTAALLKARAVSDKFSPEAASRRGLSTAEMNAVEAIHRAVEFNPHVPKYLLEMKSLILPPEHILKRGDSEAIAYAFFHLAHWKRVEGALNLLHSFRMIPYPLEKGHLFYPYPICTETADRELLPSFHEVSVYPKKELPFFILFTAGLCSFTAMLALLTHQFPELMGVFAKAFLSTLFAPLNFVMEKVESILPSSLWHQLTRI

SEQ ID NO: 11033 - protein, 321 aa, Homo sapiens
MGELPLDINIQEPRWDQSTFLGRARHFFTVTDPRNLLLSGAQLEASRNIVQNYRAGVVTPGITEDQLWRAKYVYDSAFHPDTGEKVVLIGRMSAQVPMNMTITGCMLTFYRKTPTVVFWQWVNQSFNAIVNYSNRSGDTPITVRQLGTAYVSATTGAVATALGLKSLTKHLPPLVGRFVPFAAVAAANCINIPLMRQRELQVGIPVADEAGQRLGYSVTAAKQGIFQVVISRICMAIPAMAIPPLIMDTLEKKDFLKRRPWLGAPLQVGLVGFCLVFATPLCCALFPQKSSIHISNLEPELRAQIHEQNPSVEVVYYNKGL

SEQ ID NO: 11034 - protein, 329 aa, Homo sapiens
MRPPPALALAGLCLLALPAAAASYFGLTGREVLTPFPGLGTAAAPAQGGAHLKQCDLLKLSRRQKQLCRREPGLAETLRDAAHLGLLECQFQFRHERWNCSLEGRMGLLKRGFKETAFLYAVSSAALTHTLARACSAGRMERCTCDDSPGLESRQAWQWGVCGDNLKYSTKFLSNFLGSKRGNKDLRARADAHNTHVGIKAVKSGLRTTCKCHGVSGSCAVRTCWKQLSPFRETGQVLKLRYDSAVKVSSATNEALGRLELWAPARQGSLTKGLAPRSGDLVYMEDSPSFCRPSKYSPGTAGWSAVARSQLITTSTSRIQAILPSQLPE

SEQ ID NO: 11035 - protein, 373 aa, Homo sapiens
MLIPFSMKNCFQLLCNCQVPAAGFKKTVKNGLILQSISNDVYQNLAVEDWIHDHMNLEGKPILFFWQNSPSVVIGRHQNPWQECNLNLMREEGIKLARRRSGGGTVYHDMGNINLTFFTTKKKYDRMENLKLIVRALNAVQPQLDVQATKRFDLLLDGQFKISGTASKIGRTTAYHHCTLLCSTDGTFLSSLLKSPYQGIRSNATASIPSLVKNLLEKDPTLTCEVLMNAVATEYAAYHQIDNHIHLINPTDETLFPGINSKAKELQTWEWIYGKTPKFSINTSFHVLYEQSHLEIKVFIDIKNGRIEICNIEAPDHWLPLEIRDKLNSSLIGSKFCPTETTMLTNILLRTCPQDHKLNSKWNILCEKIKGIM

SEQ ID NO: 11036 - protein, 412 aa, Homo sapiens
MGLGHEQGFGAPCLKCKEKCEGFELHFWRKICRNCKCGQEEHDVLLSNEEDRKVGKLFEDTKYTTLIAKLKSDGIPMYKRNVMILTNPVAAKKNVSINTVTYEWAPPVQNQALARQYMQMLPKEKQPVAGSEGAQYRKKQLAKQLPAHDQDPSKCHELSPREVKEMEQFVKKYKSEALGVGDVKLPCEMDAQGPKQMNIPGGDRSTPAAVGAMEDKSAEHKRTQYSCYCCKLSMKEGDPAIYAERAGYDKLWHPACFVCSTCHELLVDMIYFWKNEKLYCGRHYCDSEKPRCAGCDELIFSNEYTQAENQNWHLKHFCCFDCDSILAGEIYVMVNDKPVCKPCYVKNHAVVCQGCHNAIDPEVQRVTYNNFSWHASTECFLCSCCSKCLIGQKFMPVEGMVFCSVECKKRMS

SEQ ID NO: 11037 - protein, 246 aa, Homo sapiens
MSGAGEALAPGPVGPQRVAEAGGGQLGSTAQGKCDKDNTEKDITQATNSHFTHGEMQDQSIWGNPSDGELIRTQPQRLPQLQTSAQVPSGEEIGKIKNGHTGLSNGNGIHHGAKHGSADNRKLSAPVSQKMHRKIQSSLSVNSDISKKSKVNAVFSQKTGSSPEDCCVHCILACLFCEFLTLCNIVLGQASCGICTSEACCCCCGDEMGDDCNCPCDMDCGIMDACCESSDCLEICMECCGICFPS

SEQ ID NO: 11038 - protein, 825 aa, Homo sapiens
MPAPIRLRELIRTIRTARTQAEEREMIQKECAAIRSSFREEDNTYRCRNVAKLLYMHMLGYPAHFGQLECLKLIASQKFTDKRIGYLGAMLLLDERQDVHLLMTNCIKNDLNHSTQFVQGLALCTLGCMGSSEMCRDLAGEVEKLLKTSNSYLRKKAALCAVHVIRKVPELMEMFLPATKNLLNEKNHGVLHTSVVLLTEMCERSPDMLAHFRKNEKLVPQLVRILKNLIMSGYSPEHDVSGISDPFLQVRILRLLRILGRNDDDSSEAMNDILAQVATNTETSKNVGNAILYETVLTIMDIKSESGLRVLAINILGRFLLNNDKNIRYVALTSLLKTVQTDHNAVQRHRSTIVDCLKDLDVSIKRRAMELSFALVNGNNIRGMMKELLYFLDSCEPEFKADCASGIFLAAEKYAPSKRWHIDTIMRVLTTAGSYVRDDAVPNLIQLITNSVEMHAYTVQRLYKAILGDYSQQPLVQVAAWCIGEYGDLLVSGQCEEEEPIQVTEDEVLDILESVLISNMSTSVTRGYALTAIMKLSTRFTCTVNRIKKVVSIYGSSIDVELQQRAVEYNALFKKYDHMRSALLERMPVMEKVTTNGPTEIVQTNGETEPAPLETKPPPSGPQPTSQANDLLDLLGGNDITPVIPTAPTSKPSSAGGELLDLLGDINLTGAPAAAPAPASVPQISQPPFLLDGLSSQPLFNDIAAGIPSITAYSKNGLKIEFTFERSNTNPSVTVITIQASNSTELDMTDFVFQAAVPKTFQLQLLSPSSSIVPAFNTGTITQVIKVLNPQKQQLRMRIKLTYNHKGSAMQDLAEVNNFPPQSWQ

SEQ ID NO: 11039 - protein, 805 aa, Homo sapiens
MKDRSSTPPLHVHVDENTPVHVHIKKLPKPSATSSQKSHKRGMKGDTVNVRRSVRVKTKNPPHCLEITPPSSEKLVSVMRLSDLSTEDDDSGHCKMNRYDKKIDSLMNAVGCLKSEVKMQKGERQMAKRFLEERKEELEEVAHELAETEHENTVLRHNIERMKEEKDFTILQKKHLQQEKECLMSKLVEAEMDGAAAAKQVMALKDTIGKLKTEKQMTCTDINTLTRQKELLLQKLSTFEETNRTLRDLLREQHCKEDSERLMEQQGALLKRLAEADSEKARLLLLLQDKDKEVEELLQEIQCEKAQAKTASELSKSMESMRGHLQAQLRSKEAENSRLCMQIKNLERSGNQHKAEVEAIMEQLKELKQKGDRDKESLKKAIRAQKERAEKSEEYAEQLHVQLADKDLYVAEALSTLESWRSRYNQVVKEKGDLELEIIVLNDRVTDLVNQQQTLEEKMREDRDSLVERLHRQTAEYSAFKLENERLKASFAPMEDKLNQAHLEVQQLKASVKNYEGMIDNYKSQVMKTRLEADEVAAQLERCDKENKILKDEMNKEIEAARRQFQSQLADLQQLPDILKITEAKLAECQDQLQGYERKNIDLTAIISDLRSRIEHQGDKLEMAREKHQASQKENKQLSLKVDELERKLEATSAQNIEFLQVIAKREEAIHQSQLRLEEKTRECGTLARQLESAIEDARRQVEQTKEHALSKERAAQNKILDLETQLSRTKTELSQLRRSRDDADRRYQSRLQDLKDRLEQSESTNRSMQNYVQFLKSSYANVFGDGPYSTFLTSSPIRSRSPPA

SEQ ID NO: 11040 - protein, 91 aa, Homo sapiens
MGLLQLLAFSFLALCRARVRAQEPEFSYGCAEGSCYPATGDLLIGRAQKLSVTSTCGLHKPEPYCIVSHLQEDKKCFICNSQDPYHETLNP

SEQ ID NO: 11041 - protein, 850 aa, Homo sapiens
MGLLQLLAFSFLALCRARVRAQEPEFSYGCAEGSCYPATGDLLIGRAQKLSVTSTCGLHKPEPYCIVSHLQEDKKCFICNSQDPYHETLNPDSHLIENVVTTFAPNRLKIWWQSENGVENVTIQLDLEAEFHFTHLIMTFKTFRPAAMLIERSSDFGKTWGVYRYFAYDCEASFPGISTGPMKKVDDIICDSRYSDIEPSTEGEVIFRALDPAFKIEDPYSPRIQNLLKITNLRIKFVKLHTLGDNLLDSRMEIREKYYYAVYDMVVRGNCFCYGHASECAPVDGFNEEVEGMVHGHCMCRHNTKGLNCELCMDFYHDLPWRPAEGRNSNACKKCNCNEHSISCHFDMAVYLATGNVSGGVCDDCQHNTMGRNCEQCKPFYYQHPERDIRDPNFCERCTCDPAGSQNEGICDSYTDFSTGLIAGQCRCKLNVEGEHCDVCKEGFYDLSSEDPFGCKSCACNPLGTIPGGNPCDSETGHCYCKRLVTGQHCDQCLPEHWGLSNDLDGCRPCDCDLGGALNNSCFAESGQCSCRPHMIGRQCNEVEPGYYFATLDHYLYEAEEANLGPGVSIVERQYIQDRIPSWTGAGFVRVPEGAYLEFFIDNIPYSMEYDILIRYEPQLPDHWEKAVITVQRPGRIPTSSRCGNTIPDDDNQVVSLSPGSRYVVLPRPVCFEKGTNYTVRLELPQYTSSDSDVESPYTLIDSLVLMPYCKSLDIFTVGGSGDGVVTNSAWETFQRYRCLENSRSVVKTPMTDVCRNIIFSISALLHQTGLACECDPQGSLSSVCDPNGGQCQCRPNVVGRTCNRCAPGTFGFGPSGCKRRFLKSIVMHSFRLTQPLWQGSIAAEPMLPS

SEQ ID NO: 11042 - protein, 515 aa, Homo sapiens [sequence omitted]

SEQ ID NO: 11043 - protein, 695 aa, Homo sapiens
MAGVSFSGHRLELLAAYEEVIREESAADWALYTYEDGSDDLKLAASGEGGLQELSGHFENQKVMYGFCSVKDSQAALPKYVLINWVGEDVPDARKCACASHVAKVAEFFQGVDVIVNASSVEDIDAGAIGQRLSNGLARLSSPVLHRLRLREDENAEPVGTTYQKTDAAVEMKRINREQFWEQAKKEEELRKEEERKKALDERLRFEQERMEQERQEQEERERRYREREQQIEEHRRKQQTLEAEEAKRRLKEQSIFGDHRDEEEETHMKKSESEVEEAAAIIAQRPDNPREFFKQQERVASASAGSCDVPSPFNHRPGRPYCPFIKASDSGPSSSSSSSSSPPRTPFPYITCHRTPNLSSSLPCSHLDSHRRMAPTPIPTRSPSDSSTASTPVAEQIERALDEVTSSQPPPLPPPPPPAQETQEPSPILDSEETRAAAPQAWAGPMEEPPQAQAPPRGPGSPAEDLMFMESAEQAVLAAPVEPATADATEIHDAADTIETDTATADTTVANNVPPAATSLIDLWPGNGEGASTLQGEPRAPTPPSGTEVTLAEVPLLDEVAPEPLLPAGEGCATLLNFDELPEPPATFCDPEEVEGESLAAPQTPTLPSALEELEQEQEPEPHLLTNGETTQKEGTQASEGYFSQSQEEEFAQSEELCAKAPPPVFYNKPPEIDITCWDADPVPEEEEGFEGGD

SEQ ID NO: 11044 - protein, 349 aa, Homo sapiens
MPVERMRMRPWLEEQINSNTIPGLKWLNKEKKIFQIPWMHAARHGWDVEKDAPLFRNWAIHTGKHQPGVDKPDPKTWKANFRCAMNSLPDIEEVKDKSIKKGNNAFRVYRMLPLSERPSKKGKKPKTEKEDKVKHIKQEPVESSLGLSNGVSDLSPEYAVLTSTIKNEVDSTVNIIVVGQSHLDSNIENQEIVTNPPDICQVVEVTTESDEQPVSMSELYPLQISPVSSYAESETTDSVPSDEESAEGRPHWRKRNIEGKQYLSNMGTRGSYLLPGMASFVTSNKPDLQVTIKEESNPVPYNSSWPPFQDLPLSSSMTPASSSSRPDRETRASVIKKTSDITQARVKSC

SEQ ID NO: 11045 - protein, 339 aa, Homo sapiens
MAQYKGAASEAGRAMHLMKKREKQREQMEQMKQRIAEENIMKSNIDKKFSAHYDAVEAELKSSTVGLVTLNDMKAKQEALVKEREKQLAKKEQSKELQMKLEKLREKERKKEAKRKISSLSFTLEEEEEGGEEEEEAAMYEEEMEREEITTKKRKLGKNPDVDTSFLPDRDREEEENRLREELRQEWEAKQEKIKSEEIEITFSYWDGSGHRRTVKMRKGNTMQQFLQKALEILRKDFSELRSAGVEQLMYIKEDLIIPHHHSFYDFIVTKARGKSGPLFNFDVHDDVRLLSDATVEKDESHAGKVVLRSWYEKNKHIFPASRWEPYDPEKKWDKYTIR

SEQ ID NO: 11046 - protein, 323 aa, Homo sapiens
MGLSNILFVMAFLLSGAAPLKIQAYFNETADLPCQFANSQNQSLSELVVFWQDQENLVLNEVYLGKEKFDSVHSKYMGRTSFDSDSWTLRLHNLQIKDKGLYQCIIHHKKPTGMIRIHQMNSELSVLANFSQPEIVPISNITENVYINLTCSSIHGYPEPKKMSVLLRTKNSTIEYDGVMQKSQDNVTELYDVSISLSVSFPDVTSNMTIFCILETDKTRLLSSPFSIELEDPQPPPDHIPWITAVLPTVIICVMVFCLILWKWKKKKRPRNSYKCGTNTMEREESEQTKKREKIHIPERSDEAQRVFKSSKTSSCDKSDTCF

SEQ ID NO: 11047 - protein, 1711 aa, Homo sapiens
MSGTSSPEAVKKLLENMQSDLRALSLECKKKFPPVKEAAESGIIKVKTIAARNTEILAALKENSSEVVQPFLMGCGTKEPKITQLCLAAIQRLMSHEVVSETAAGNIINMLWQLMENSLEELKLLQTVLVLLTTNTVVHDEALSKAIVLCFRLHFTKDNITNNTAAATVRQVVTVVFERMVAEDERHRDIIEQPVLVQGNSNRRSVSTLKPCAKDAYMLFQDLCQLVNADAPYWLVGMTEMTRTFGLELLESVLNDFPQVFLQHQEFSFLLKERVCPLVIKLFSPNIKFRQGSSTSSSPAPVEKPYFPICMRLLRVVSVLIKQFYSLLVTECEIFLSLLVKFLDADKPQWLRAVAVESIHRFCVQPQLLRSFCQSYDMKQHSTKVFRDIVNALGSFIQSLFLVPPTGNPATSNQAGNNNLGGSVSAPANSGMVGIGGGVTLLPAFEYRGTWIPILTITVQGSAKATYLEMLDKVEPPTIPEGYAMSVAFHCLLDLVRGITSMIEGELGELETECQTTTEEGSSPTQSTEQQDLQSTSDQMDKEIVSRAVWEEMVNACWCGLLAALSLLLDASTDEAATENILKAELTMAALCGRLGLVTSRDAFITAICKGSLPPHYALTVLNTTTAATLSNKSYSVQGQSVMMISPSSESHQQVVAVGQPLAVQPQGTVMLTSKNIQCMRTLLNLAHCHGAVLGTSWQLVLATLQHLVWILGLKPSSGGALKPGRAVEGPSTVLTTAVMTDLPVISNILSRLFESSQYLDDVSLHHLINALCSLSLEAMDMAYGNNKEPSLFAVAKLLETGLVNMHRIEILWRPLTGHLLEVCQHPNSRMREWGAEALTSLIKAGLTFNHDPPLSQNQRLQLLLLNPLKEMSNINHPDIRLKQLECVLQILQSQGDSLGPGWPLVLGVMGAIRNDQGESLIRTAFQCLQLVVTDFLPTMPCTCLQIVVDVAGSFGLHNQELNISLTSIGLLWNISDYFFQRGETIEKELNKEEAAQQKQAEEKGVVLNRPFHPAPPFDCLWLCLYAKLGELCVDPRPAVRKSAGQTLFSTIGAHGTLLQHSTWHTVIWKVLFHLLDRVRESSTTADKEKIESGGGNILIHHSRDTAEKQWAETWVLTLAGVARIFNTRRYLLQPLGDFSRAWDVLLDHIQSAALSKNNEVSLAALKSFQEILQIVSPVRDSDKPETPPVVNVPVPVLIGPISGMSRPFVRTDSIGEKLGRYSSSEPPIVTDELEDLNLWWAAWNTWYRIGSESTKPPITFDKLTFIPSQPFLTALIQIFPALYQHIKTGFNMDDLQKLGVILHSAISVPISSDASPFILPSYTEAVLTSLQEAVLTALDVLQKAICVGPENMQIMYPAIFDQLLAFVEFSCKPPQYGQLETKHIANAKYNQAEWVALNYVPFAERSLEVVVDLYQKTACHKAVVNEKVLQNIIKTLRVPLSLKYSCPSESTWKLAVSSLLRVLSIGLPVARQHASSGKFDSMWPELANTFEDFLFTKSIPPDNLSIQEFQRNENIDVEVVQLISNEILPYANFIPKEFVGQIMTMLNKGSIHSQSSSFTEAEIDIRLREEFSKMCFETLLQFSFSNKVTTPQEGYISRMALSVLLKRSQDVLHRYIEDERLSGKCPLPRQQVTEIIFVLKAVSTLIDSLKKTQPENVDGNTWAQVIALYPTLVECITCSSSEVCSALKEALVPFKDFMQPPASRVQNGES

SEQ ID NO: 11048 - protein, 1717 aa, Homo sapiens
MSGTSSPEAVKKLLENMQSDLRALSLECKKKFPPVKEAAESGIIKVKTIAARNTEILAALKENSSEVVQPFLMGCGTKEPKITQLCLAAIQRLMSHEVVSETAAGNIINMLWQLMENSLEELKLLQTVLVLLTTNTVVHDEALSKAIVLCFRLHFTKDNITNNTAAATVRQVVTVVFERMVAEDERHRDIIEQPVLVQGNSNRRSVSTLKPCAKDAYMLFQDLCQLVNADAPYWLVGMTEMTRTFGLELLESVLNDFPQVFLQHQEFSFLLKERVCPLVIKLFSPNIKFRQGSSTSSSPAPVEKPYFPICMRLLRVVSVLIKQFYSLLVTECEIFLSLLVKFLDADKPQWLRAVAVESIHRFCVQPQLLRSFCQSYDMKQHSTKVFRDIVNALGSFIQSLFLVPPTGNPATSNQAGNNNLGGSVSAPANSGMVGIGGGVTLLPAFEYRGTWIPILTITVQGSAKATYLEMLDKVEPPTIPEGYAMSVAFHCLLDLVRGITSMIEGELGELETECQTTTEEGSSPTQSTEQQDLQSTSDQMDKEIVSRAVWEEMVNACWCGLLAALSLLLDASTDEAATENILKAELTMAALCGRLGLVTSRDAFITAICKGSLPPHYALTVLNTTTAATLSNKSYSVQGQSVMMISPSSESHQQVVAVGQPLAVQPQGTVMLTSKNIQCMRTLLNLAHCHGAVLGTSWQLVLATLQHLVWILGLKPSSGGALKPGRAVEGPSTVLTTAVMTDLPVISNILSRLFESSQYLDDVSLHHLINALCSLSLEAMDMAYGNNKEPSLFAVAKLLETGLVNMHRIEILWRPLTGHLLEVCQHPNSRMREWGAEALTSLIKAGLTFNHDPPLSQNQRLQLLLLNPLKEMSNINHPDIRLKQLECVLQILQSQGDSLGPGWPLVLGVMGAIRNDQGESLIRTAFQCLQLVVTDFLPTMPCTCLQIVVDVAGSFGLHNQELNISLTSIGLLWNISDYFFQRGETIEKELNKEEAAQQKQAEEKGVVLNRPFHPAPPFDCLWLCLYAKLGELCVDPRPAVRKSAGQTLFSTIGAHGTLLQHSTWHTVIWKVLFHLLDRVRESSTTADKEKIESGGGNILIHHSRDTAEKQWAETWVLTLAGVARIFNTRRYLLQPLGDFSRAWDVLLDHIQSAALSKNNEVSLAALKSFQEILQIVSPVRDSDKPETPPVVNVPVPVLIGPISGMSRPFVRTDSIGEKLGRYSSSEPPIVTDELEDLNLWWAAWNTWYRIGSESTKPPITFDKLTFIPSQPFLTALIQIFPALYQHIKTGFNMDDLQKLGVILHSAISVPISSDASPFILPSYTEAVLTSLQEAVLTALDVLQKAICVGPENMQIMYPAIFDQLLAFVEFSCKPPQYGQLETKHIANAKYNQIQLFAPAEWVALNYVPFAERSLEVVVDLYQKTACHKAVVNEKVLQNIIKTLRVPLSLKYSCPSESTWKLAVSSLLRVLSIGLPVARQHASSGKFDSMWPELANTFEDFLFTKSIPPDNLSIQEFQRNENIDVEVVQLISNEILPYANFIPKEFVGQIMTMLNKGSIHSQSSSFTEAEIDIRLREEFSKMCFETLLQFSFSNKVTTPQEGYISRMALSVLLKRSQDVLHRYIEDERLSGKCPLPRQQVTEIIFVLKAVSTLIDSLKKTQPENVDGNTWAQVIALYPTLVECITCSSSEVCSALKEALVPFKDFMQPPASRVQNGES

SEQ ID NO: 11049 - protein, 457 aa, Homo sapiens
MAWPKLPAPWLLLCTWLPAGCLSLLVTVQHTERYVTLFASIILKCDYTTSAQLQDVVVTWRFKSFCKDPIFDYYSASYQAALSLGQDPSNDCNDNQREVRIVAQRRGQNEPVLGVDYRQRKITIQNPLARHRYMKQAQALGPQMMGKPLYWGADRSSQVSSYPMHPLLQRDLSLPSSLPQMPMTQTTNQPPIANGVLEYLEKELRNLNLAQPLPPDLKGRFGHPCSMLSSLGSEVVERRIIHLPPLIRDLSSSRRTSDSLHQQWLTPIPSRPWDLREGRSHHHYPDFHQELQDRGPKSWALERRELDPSWSGRHRSSRLNGSPIHWSDRDSLSDVPSSSEARWRPSHPPFRSRCQERPRRPSPRESTQRHGRRRRHRSYSPPLPSGLSSWSSEEDKERQPQSWRAHRRGSHSPHWPEEKPPSYRSLDITPGKNSRKKGSVERRSEKDSSHSGRSVVI

SEQ ID NO: 11050 - protein, 762 aa, Homo sapiens
MRLLLALLGVLLSVPGPPVLSLEASEEVELEPCLAPSLEQQEQELTVALGQPVRLCCGRAERGGHWYKEGSRLAPAGRVRGWRGRLEIASFLPEDAGRYLCLARGSMIVLQNLTLITGDSLTSSNDDEDPKSHRDPSNRHSYPQQAPYWTHPQRMEKKLHAVPAGNTVKFRCPAAGNPTPTIRWLKDGQAFHGENRIGGIRLRHQHWSLVMESVVPSDRGTYTCLVENAVGSIRYNYLLDVLERSPHRPILQAGLPANTTAVVGSDVELLCKVYSDAQPHIQWLKHIVINGSSFGADGFPYVQVLKTADINSSEVEVLYLRNVSAEDAGEYTCLAGNSIGLSYQSAWLTVLPGTGRIPHLTCDSLTPAGRTKSPTLQFSLESGSSGKSSSSLVRGVRLSSSGPALLAGLVSLDLPLDPLWEFPRDRLVLGKPLGEGCFGQVVRAEAFGMDPARPDQASTVAVKMLKDNASDKDLADLVSEMEVMKLIGRHKNIINLLGVCTQEGPLYVIVECAAKGNLREFLRARRPPGPDLSPDGPRSSEGPLSFPVLVSCAYQVARGMQYLESRKCIHRDLAARNVLVTEDNVMKIADFGLARGVHHIDYYKKTSNGRLPVKWMAPEALFDRVYTHQSDVWSFGILLWEIFTLGGSPYPGIPVEELFSLLREGHRMDRPPHCPPELYGLMRECWHAAPSQRPTFKQLVEALDKVLLAVSEEYLDLRLTFGPYSPSGGDASSTCSSSDSVFSHDPLPLGSSSFPFGSGVQT

SEQ ID NO: 11051 - protein, 734 aa, Homo sapiens
MRLLLALLGVLLSVPGPPVLSLEASEEVELEPCLAPSLEQQEQELTVALGQPVRLCCGRAERGGHWYKEGSRLAPAGRVRGWRGRLEIASFLPEDAGRYLCLARGSMIVLQNLTLITGDSLTSSNDDEDPKSHRDPSNRHSYPQQAPYWTHPQRMEKKLHAVPAGNTVKFRCPAAGNPTPTIRWLKDGQAFHGENRIGGIRLRHQHWSLVMESVVPSDRGTYTCLVENAVGSIRYNYLLDVLERSPHRPILQAGLPANTTAVVGSDVELLCKVYSDAQPHIQWLKHIVINGSSFGADGFPYVQVLKTADINSSEVEVLYLRNVSAEDAGEYTCLAGNSIGLSYQSAWLTVLPEEDPTWTAAAPEASSPWSQALPASQAHPWYEACVSPPAAPPCSPASLVLGKPLGEGCFGQVVRAEAFGMDPARPDQASTVAVKMLKDNASDKDLADLVSEMEVMKLIGRHKNIINLLGVCTQEGPLYVIVECAAKGNLREFLRARRPPGPDLSPDGPRSSEGPLSFPVLVSCAYQVARGMQYLESRKCIHRDLAARNVLVTEDNVMKIADFGLARGVHHIDYYKKTSNGRLPVKWMAPEALFDRVYTHQSDVWSFGILLWEIFTLGGSPYPGIPVEELFSLLREGHRMDRPPHCPPELYGLMRECWHAAPSQRPTFKQLVEALDKVLLAVSEEYLDLRLTFGPYSPSGGDASSTCSSSDSVFSHDPLPLGSSSFPFGSGVQT

SEQ ID NO: 11052 - protein, 62 aa, Homo sapiens
MKIQLFFFILHFWVTILPARSNFEPKYRFERCEKVRGICKTFCDDVEYDYGYCIKWRSQCCV

SEQ ID NO: 11053 - protein, 3269 aa, Homo sapiens
MLSRLSGLANVVLHELSGDDDTDQNMRAPLDPELHQESDMEFNNTTQEDVQERLAYAEQLVVELKDIIRQKDVQLQQKDEALQEERKAADNKIKKLKLHAKAKLTSLNKYIEEMKAQGGTVLPTEPQSEEQLSKHDKSSTEEEMEIEKIKHKLQEKEELISTLQAQLTQAQAEQPAQSSTEMEEFVMMKQQLQEKEEFISTLQAQLSQTQAEQAAQLSSMQQVVREKDARFETQVRLHEDELLQLVTQADVETEMQQKLRVLQRKLEEHEESLVGRAQVVDLLQQELTAAEQRNQILSQQLQQMEAEHNTLRNTVETEREESKILLEKMELEVAERKLSFHNLQEEMHHLLEQFEQAGQAQAELESRYSALEQKHKAEMEEKTSHILSLQKTGQELQSACDALKDQNSKLLQDKNEQAVQSAQTIQQLEDQLQQKSKEISQFLNRLPLQQHETASQTSFPDVYNEGTQAVTEENIASLQKRVVELENEKGALLLSSIELEELKAENEKLSSQITLLEAQNRTGEADREVSEISIVDIANKRSSSAEESGQDVLENTFSQKHKELSVLLLEMKEAQEEIAFLKLQLQGKRAEEADHEVLDQKEMKQMEGEGIAPIKMKVFLEDTGQDFPLMPNEESSLPAVEKEQASTEHQSRTSEEISLNDAGVELKSTKQDGDKSLSAVPDIGQCHQDELERLKSQILELELNFHKAQEIYEKNLDEKAKEISNLNQLIEEFKKNADNNSSAFTALSEERDQLLSQVKELSMVTELRAQVKQLEMNLAEAERQRRLDYESQTAHDNLLTEQIHSLSIEAKSKDVKIEVLQNELDDVQLQFSEQSTLIRSLQSQLQNKESEVLEGAERVRHISSKVEELSQALSQKELEITKMDQLLLEKKRDVETLQQTIEEKDQQVTEISFSMTEKMVQLNEEKFSLGVEIKTLKEQLNLLSRAEEAKKEQVEEDNEVSSGLKQNYDEMSPAGQISKEELQHEFDLLKKENEQRKRKLQAALINRKELLQRVSRLEEELANLKDESKKEIPLSETERGEVEEDKENKEYSEKCVTSKCQEIEIYLKQTISEKEVELQHIRKDLEEKLAAEEQFQALVKQMNQTLQDKTNQIDLLQAEISENQAIIQKLITSNTDASDGDSVALVKETVVISPPCTGSSEHWKPELEEKILALEKEKEQLQKKLQEALTSRKAILKKAQEKERHLREELKQQKDDYNRLQEQFDEQSKENENIGDQLRQLQIQVRESIDGKLPSTDQQESCSSTPGLEEPLFKATEQHHTQPVLESNLCPDWPSHSEDASALQGGTSVAQIKAQLKEIEAEKVELELKVSSTTSELTKKSEEVFQLQEQINKQGLEIESLKTVSHEAEVHAESLQQKLESSQLQIAGLEHLRELQPKLDELQKLISKKEEDVSYLSGQLSEKEAALTKIQTEIIEQEDLIKALHTQLEMQAKEHDERIKQLQVELCEMKQKPEEIGEESRAKQQIQRKLQAALISRKEALKENKSLQEELSLARGTIERLTKSLADVESQVSAQNKEKDTVLGRLALLQEERDKLITEMDRSLLENQSLSSSCESLKLALEGLTEDKEKLVKEIESLKSSKIAESTEWQEKHKELQKEYEILLQSYENVSNEAERIQHVVEAVRQEKQELYGKLRSTEANKKETEKQLQEAEQEMEEMKEKMRKFAKSKQQKILELEEENDRLRAEVHPAGDTAKECMETLLSSNASMKEELERVKMEYETLSKKFQSLMSEKDSLSEEVQDLKHQIEGNVSKQANLEATEKHDNQTNVTEEGTQSIPGETEEQDSLSMSTRPTCSESVPSAKSANPAVSKDFSSHDEINNYLQQIDQLKERIAGLEEEKQKNKEFSQTLENEKNTLLSQISTKDGELKMLQEEVTKMNLLNQQIQEELSRVTKLKETAEEEKDDLEERLMNQLAELNGSIGNYCQDVTDAQIKNELLESEMKNLKKCVSELEEEKQQLVKEKTKVESEIRKEYLEKIQGAQKEPGNKSHAKELQELLKEKQQEVKQLQKDCIRYQEKISALERTVKALEFVQTESQKDLEITKENLAQAVEHRKKAQAELASFKVLLDDTQSEAARVLADNLKLKKELQSNKESVKSQMKQKDEDLERRLEQAEEKHLKEKKNMQEKLDALRREKVHLEETIGEIQVTLNKKDKEVQQLQENLDSTVTQLAAFTKSMSSLQDDRDRVIDEAKKWERKFSDAIQSKEEEIRLKEDNCSVLKDQLRQMSIHMEELKINISRLEHDKQIWESKAQTEVQLQQKVCDTLQGENKELLSQLEETRHLYHSSQNELAKLESELKSLKDQLTDLSNSLEKCKEQKGNLEGIIRQQEADIQNSKFSYEQLETDLQASRELTSRLHEEINMKEQKIISLLSGKEEAIQVAIAELRQQHDKEIKELENLLSQEEEENIVLEEENKKAVDKTNQLMETLKTIKKENIQQKAQLDSFVKSMSSLQNDRDRIVGDYQQLEERHLSIILEKDQLIQEAAAENNKLKEEIRGLRSHMDDLNSENAKLDAELIQYREDLNQVITIKDSQQKQLLEVQLQQNKELENKYAKLEEKLKESEEANEDLRRSFNALQEEKQDLSKEIESLKVSISQLTRQVTALQEEGTLGLYHAQLKVKEEEVHRLSALFSSSQKRIAELEEELVCVQKEAAKKVGEIEDKLKKELKHLHHDAGIMRNETETAEERVAELARDLVEMEQKLLMVTKENKGLTAQIQSFGRSMSSLQNSRDHANEELDELKRKYDASLKELAQLKEQGLLNRERDALLSETAFSMNSTEENSLSHLEKLNQQLLSKDEQLLHLSSQLEDSYNQVQSFSKAMASLQNERDHLWNELEKFRKSEEGKQRSAAQPSTSPAEVQSLKKAMSSLQNDRDRLLKELKNLQQQYLQINQEITELHPLKAQLQEYQDKTKAFQIMQEELRQENLSWQHELHQLRMEKSSWEIHERRMKEQYLMAISDKDQQLSHLQNLIRELRSSSSQTQPLKVQYQRQASPETSASPDGSQNLVYETELLRTQLNDSLKEIHQKELRIQQLNSNFSQLLEEKNTLSIQLCDTSQSLRENQQHYGDLLNHCAVLEKQVQELQAVSKEKGPLNIDVAPGAPQEKNGVHRKSDPEELREPQQSFSEAQQQLCNTRQEVNELRKLLEEERDQRVAAENALSVAEEQIRRLEHSEWDSSRTPIIGSCGTQEQALLIDLTSNSCRRTRSGVGWKRVLRSLCHSRTRVPLLAAIYFLMIHVLLILCFTGHL

SEQ ID NO: 11054 - protein, 319 aa, Homo sapiens
MGQGLWRVVRNQQLQQEGYSEQGYLTREQSRRMAASNISNTNHRKQVQGGIDIYHLLKARKSKEQEGFINLEMLPPELSFTILSYLNATDLCLASCVWQDLANDELLWQGLCKSTWGHCSIYNKNPPLGFSFRKLYMQLDEGSLTFNANPDEGVNYFMSKGILDDSPKEIAKFIFCTRTLNWKKLRIYLDERRDVLDDLVTLHNFRNQFLPNALREFFRHIHAPEERGEYLETLITKFSHRFCACNPDLMRELGLSPDAVYVLCYSLILLSIDLTSPHVKNKMSKREFIRNTRRAAQNISEDFVGHLYDNIYLIGHVAA

SEQ ID NO: 11055 - protein, 2115 aa, Homo sapiens
MTLHATRGAALLSWVNSLHVADPVEAVLQLQDCSIFIKIIDRIHGTEEGQQILKQPVSERLDFVCSFLQKNRKHPSSPECLVSAQKVLEGSELELAKMTMLLLYHSTMSSKSPRDWEQFEYKIQAELAVILKFVLDHEDGLNLNEDLENFLQKAPVPSTCSSTFPEELSPPSHQAKREIRFLELQKVASSSSGNNFLSGSPASPMGDILQTPQFQMRRLKKQLADERSNRDELELELAENRKLLTEKDAQIAMMQQRIDRLALLNEKQAASPLEPKELEELRDKNESLTMRLHETLKQCQDLKTEKSQMDRKINQLSEENGDLSFKLREFASHLQQLQDALNELTEEHSKATQEWLEKQAQLEKELSAALQDKKCLEEKNEILQGKLSQLEEHLSQLQDNPPQEKGEVLGDVLQLETLKQEAATLAANNTQLQARVEMLETERGQQEAKLLAERGHFEEEKQQLSSLITDLQSSISNLSQAKEELEQASQAHGARLTAQVASLTSELTTLNATIQQQDQELAGLKQQAKEKQAQLAQTLQQQEQASQGLRHQVEQLSSSLKQKEQQLKEVAEKQEATRQDHAQQLATAAEEREASLRERDAALKQLEALEKEKAAKLEILQQQLQVANEARDSAQTSVTQAQREKAELSRKVEELQACVETARQEQHEAQAQVAELELQLRSEQQKATEKERVAQEKDQLQEQLQALKESLKVTKGSLEEEKRRAADALEEQQRCISELKAETRSLVEQHKRERKELEEERAGRKGLEARLQQLGEAHQAETEVLRRELAEAMAAQHTAESECEQLVKEVAAWRERYEDSQQEEAQYGAMFQEQLMTLKEECEKARQELQEAKEKVAGIESHSELQISRQQNELAELHANLARALQQVQEKEVRAQKLADDLSTLQEKMAATSKEVARLETLVRKAGEQQETASRELVKEPARAGDRQPEWLEEQQGRQFCSTQAALQAMEREAEQMGNELERLRAALMESQGQQQEERGQQEREVARLTQERGRAQADLALEKAARAELEMRLQNALNEQRVEFATLQEALAHALTEKEGKDQELAKLRGLEAAQIKELEELRQTVKQLKEQLAKKEKEHASGSGAQSEAAGRTEPTGPKLEALRAEVSKLEQQCQKQQEQADSLERSLEAERASRAERDSALETLQGQLEEKAQELGHSQSALASAQRELAAFRTKVQDHSKAEDEWKAQVARGRQEAERKNSLISSLEEEVSILNRQVLEKEGESKELKRLVMAESEKSQKLEERLRLLQAETASNSARAAERSSALREEVQSLREEAEKQRVASENLRQELTSQAERAEELGQELKAWQEKFFQKEQALSTLQLEHTSTQALVSELLPAKHLCQQLQAEQAAAEKRHREELEQSKQAAGGLRAELLRAQRELGELIPLRQKVAEQERTAQQLRAEKASYAEQLSMLKKAHGLLAEENRGLGERANLGRQFLEVELDQAREKYVQELAAVRADAETRLAEVQREAQSTARELEVMTAKYEGAKVKVLEERQRFQEERQKLTAQVEQLEVFQREQTKQVEELSKKLADSDQASKVQQQKLKAVQAQGGESQQEAQRLQAQLNELQAQLSQKEQAAEHYKLQMEKAKTHYDAKKQQNQELQEQLRSLEQLQKENKELRAEAERLGHELQQAGLKTKEAEQTCRHLTAQVRSLEAQVAHADQQLRDLGKFQVATDALKSREPQAKPQLDLSIDSLDLSCEEGTPLSITSKLPRTQPDGTSVPGEPASPISQRLPPKVESLESLYFTPIPARSQAPLESSLDSLGDVFLDSGRKTRSARRRTTQIINITMTKKLDVEEPDSANSSFYSTRSAPASQASLRATSSTQSLARLGSPDYGNSALLSLPGYRPTTRSSARRSQAGVSSGAPPGRNSFYMGTCQDEPEQLDDWNRIAELQQRNRVCPPHLKTCYPLESRPSLSLGTITDEEMKTGDPQETLRRASMQPIQIAEGTGITTRQQRKRVSLEPHQGPGTPESKKATSCFPRPMTPRDRHEGRKQSTTEAQKKAAPASTKQADRRQSMAFSILNTPKKLGNSLLRRGASKKALSKASPNTRSGTRRSPRIATTTASAATAAAIGATPRAKGKAKH

SEQ ID NO: 11056 - protein, 102 aa, Homo sapiens
MDRLKSHLTVCFLPSVPFLILVSTLATAKSVTNSTLNGTNVVLGSVPVIIARTDHIIVKEGNSALINCSVYGIPDPQFKWYNSIGKLLKEEEDEKERGGGRL

SEQ ID NO: 11057 - protein, 561 aa, Homo sapiens
MSRARSHLRAALFLAAASARGITTQVAARRGLSAWPVPQEPSMEYQDAVRMLNTLQTNAGYLEQVKRQRGDPQTQLEAMELYLARSGLQVEDLDRLNIIHVTGTKGKGSTCAFTECILRSYGLKTGFFSSPHLVQVRERIRINGQPISPELFTKYFWRLYHRLEETKVDLAVVEVGIGGAYDCTNIIRKPVVCGVSSLGIDHTSLLGDTVEKIAWQKGGIFKQGVPAFTVLQPEGPLAVLRDRAQQISCPLYLCPMLEALEEGGPPLTLGLEGEHQRSNAALALQLAHCWLQRQDRHGAGEPKASRPGLLWQLPLAPVFQPTSHMRLGLRNTEWPGRTQVLRRGPLTWYLDGAHTASSAQACVRWFRQALQGRERPSGGPEVRVLLFNATGDRDPAALLKLLQPCQFDYAVFCPNLTEVSSTGNADQQNFTVTLDQVLLRCLEHQQHWNHLDEEQASPDLWSAPSPEPGGSASLLLAPHPPHTCSASSLVFSCISHALQWISQGRDPIFQPPSPPKGLLTHPVAHSGASILREAAAIHVLVTGSLHLVGGVLKLLEPALSQ

SEQ ID NO: 11058 - protein, 115 aa, Homo sapiens
MTMRHNWTPDLSPLWVLLLCAHVVTLLVRATPVSQTTTAATASVRSTKDPCPSQPPVFPAAKQCPALEVTWPEVEVPLSWAEGNLAPHPRSPALQPQQSTAAGLRLSTGPAAAQP

SEQ ID NO: 11059 - protein, 237 aa, Homo sapiens
MGSLFPLSLLFFLAAAYPGVGSALGRRTKRAQSPKGSPLAPSGTSVPFWVRMSPEFVAVQPGKSVQLNCSNSCPQPQNSSLRTPLRQGKTLRGPGWVSYQLLDVRAWSSLAHCLVTCAGKTRWATSRITAYKPPHSVILEPPVLKGRKYTLRCHVTQVFPVGYLVVTLRHGSRVIYSESLERFTGLDLANVTLTYEFAAGPRDFWQPVICHARLNLDGLVVRNSSAPITLMLGEAPL

SEQ ID NO: 11060 - protein, 357 aa, Homo sapiens
MLQFVRAGARAWLRPTGSQGLSSLAEEAARATENPEQVASEGLPEPVLRKVELPVPTHRRPVQAWVESLRGFEQERVGLADLHPDVFATAPRLDILHQVAMWQKNFKRISYAKTKTRAEVRGGGRKPWPQKGTGRARHGSIRSPLWRGGGVAHGPRGPTSYYYMLPMKVRALGLKVALTVKLAQDDLHIMDSLELPTGDPQYLTELAHYRRWGDSVLLVDLTHEEMPQSIVEATSRLKTFNLIPAVATRWRHEPKSSPVPQPTPLAGFPTSLRMKAQVIRVARQALHDVPRHLPALPSFALGLPHQNGSQESQPGTGPSLALGQQVMSWEQLLGQRLTGNKRPGRVWPRAAGLTKSH

SEQ ID NO: 11061 - protein, 1712 aa, Homo sapiens
MERNVLTTFSQEMSQLILNEMPKAEYSSLFNDFVESEFFLIDGDSLLITCICEISFKPGQNLHFFYLVERYLVDLISKGGQFTIVFFKDAEYAYFNFPELLSLRTALILHLQKNTTIDVRTTFSRCLSKEWGSFLEESYPYFLIVADEGLNDLQTQLFNFLIIHSWARKVNVVLSSGQESDVLCLYAYLLPSMYRHQIFSWKNKQNIKDAYTTLLNQLERFKLSALAPLFGSLKWNNITEEAHKTVSLLTQVWPEGSDIRRVFCVTSCSLSLRMYHRFLGNREPSSGQETEIQQVNSNCLTLQEMEDLCKLHCLTVVFLLHLPLSQRACARVITSHWAEDMKPLLQMKKWCEYFILRNIHTFEFWNLNLIHLSDLNDELLLKNIAFYYENENVKGLHLNLGDTIMKDYEYLWNTVSKLVRDFEVGQPFPLRTTKVCFLEKKPSPIKDSSNEMVPNLGFIPTSSFVVDKFAGDILKDLPFLKSDDPIVTSLVKQKEFDELVHWHSHKPLSDDYDRSRCQFDEKSRDPRVLRSVQKYHVFQRFYGNSLETVSSKIIVTQTIKSKKDFSGPKSKKAHETKAEIIARENKKRLFAREEQKEEQKWNALSFSIEEQLKENLHSGIKSLEDFLKSCKSSCVKLQVEMVGLTACLKAWKEHCRSEEGKTTKDLSIAVQVMKRIHSLMEKYSELLQEDDRQLIARCLKYLGFDELASSLHPAQDAENDVKVKKRNKYSVGIGPARFQLQYMGHYLIRDERKDPDPRVQDFIPDTWQRELLDVVDKNESAVIVAPTSSGKTYASYYCMEKVLKESDDGVVVYVAPTKALVNQVAATVQNRFTKNLPSGEVLCGVFTREYRHDALNCQVLITVPACFEILLLAPHRQNWVKKIRYVIFDEVHCLGGEIGAEIWEHLLVMIRCPFLALSATISNPEHLTEWLQSVKWYWKQEDKIIENNTASKRHVGRQAGFPKDYLQVKQSYKVRLVLYGERYNDLEKHVCSIKHGDIHFDHFHPCAALTTDHIERYGFPPDLTLSPRESIQLYDAMFQIWKSWPRAQELCPENFIHFNNKLVIKKMDARKYEESLKAELTSWIKNGNVEQARMVLQNLSPEADLSPENMITMFPLLVEKLRKMEKLPALFFLFKLGAVENAAESVSTFLKKKQETKRPPKADKEAHVMANKLRKVKKSIEKQKIIDEKSQKKTRNVDQSLIHEAEHDNLVKCLEKNLEIPQDCTYADQKAVDTETLQKVFGRVKFERKGEELKALAERGIGYHHSAMSFKEKQLVEILFRKGYLRVVTATGTLALGVNMPCKSVVFAQNSVYLDALNYRQMSGRAGRRGQDLMGDVYFFDIPFPKIGKLIKSNVPELRGHFPLSITLVLRLMLLASKGDDPEDAKAKVLSVLKHSLLSFKQPRVMDMLKLYFLFSLQFLVKEGYLDQEGNPMGFAGLVSHLHYHEPSNLVFVSFLVNGLFHDLCQPTRKGSKHFSQDVMEKLVLVLAHLFGRRYFPPKFQDAHFEFYQSKVFLDDLPEDFSDALDEYNMKIMEDFTTFLRIVSKLADMNQEYQLPLSKIKFTGKECEDSQLVSHLMSCKEGRVAISPFVCLSGNFDDDLLRLETPNHVTLGTIGVNRSQAPVLLSQKFDNRGRKMSLNAYALDFYKHGSLIGLVQDNRMNEGDAYYLLKDFALTIKSISVSLRELCENEDDNVVLAFEQLSTTFWEKLNKV

SEQ ID NO: 11062 - protein, 221 aa, Homo sapiens
MRPRLWLLLAAQLTVLHGNSVLQQTPAYIKVQTNKMVMLSCEAKISLSNMRIYWLRQRQAPSSDSHHEFLALWDSAKGTIHGEEVEQEKIAVFRDASRFILNLTSVKPEDSGIYFCMIVGSPELTFGKGTQLSVVDFLPTTAQPTKKSTLKKRVCRLPRPETQKGPLCSPITLGLLVAGVLVLLVSLGVAIHLCCRRRRARLRFMKQLRLHPLEKCSRMDY

SEQ ID NO: 11063 - protein, 198 aa, Homo sapiens
MRPRLWLLLAAQLTVLHGNSVLQQTPAYIKVQTNKMVMLSCEAKISLSNMRIYWLRQRQAPSSDSHHEFLALWDSAKGTIHGEEVEQEKIAVFRDASRFILNLTSVKPEDSGIYFCMIVGSPELTFGKGTQLSVVDFLPTTAQPTKKSTLKKRVCRLPRPETQKGLKGKVYQEPLSPNACMDTTAILQPHRSCLTHGS

SEQ ID NO: 11064 - protein, 431 aa, Homo sapiens
MTSQRSPLAPLLLLSLHGVAASLEVSESPGSIQVARGQPAVLPCTFTTSAALINLNVIWMVTPLSNANQPEQVILYQGGQMFDGAPRFHGRVGFTGTMPATNVSIFINNTQLSDTGTYQCLVNNLPDIGGRNIGVTGLTVLVPPSAPHCQIQGSQDIGSDVILLCSSEEGIPRPTYLWEKLDNTLKLPPTATQDQVQGTVTIRNISALSSGLYQCVASNAIGTSTCLLDLQVISPQPRNIGLIAGAIGTGAVIIIFCIALILGAFFYWRSKNKEEEEEEIPNEIREDDLPPKCSSAKAFHTEISSSDNNTLTSSNAYNSRYWSNNPKVHRNTESVSHFSDLGQSFSFHSGNANIPSIYANGTHLVPGQHKTLVVTANRGSSPQVMSRSNGSVSRKPRPPHTHSYTISHATLERIGAVPVMVPAQSRAGSLV

SEQ ID NO: 11065 - protein, 290 aa, Homo sapiens
MPFDFRRFDIYRKVPKDLTQPTYTGAIISICCCLFILFLFLSELTGFITTEVVNELYVDDPDKDSGGKIDVSLNISLPNLHCELVGLDIQDEMGRHEVGHIDNSMKIPLNNGAGCRFEGQFSINKVPGNFHVSTHSATAQPQNPDMTHVIHKLSFGDTLQVQNIHGAFNALGGADRLTSNPLASHDYILKIVPTVYEDKSGKQRYSYQYTVANKEYVAYSHTGRIIPAIWFRYDLSPITVKYTERRQPLYRFITTICAIIGGTFTVAGILDSCIFTASEAWKKIQLGKMH

SEQ ID NO: 11066 - protein, 420 aa, Homo sapiens
MEPLTASRLQVRKKNSLKDCVAVAGPLGVTHFLILSKTETNVYFKLMRLPGGPTLTFQVKKYSLVRDVVSSLRRHRMHEQQFAHPPLLVLNSFGPHGMHVKLMATMFQNLFPSINVHKVNLNTIKRCLLIDYNPDSQELDFRHYSIKVVPVGASRGMKKLLQEKFPNMSRLQDISELLATGAGLSESEAEPDGDHNITELPQAVAGRGNMRAQQSAVRLTEIGPRMTLQLIKVQEGVGEGKVMFHSFVSKTEEELQAILEAKEKKLRLKAQRQAQQAQNVQRKQEQREAHRKKSLEGMKKARVGGSDEEASGIPSRTASLELGEDDDEQEDDDIEYFCQAVGEAPSEDLFPEAKQKRLAKSPGRKRKRWEMDRGRGRLCDQKFPKTKDKSQGAQARRGPRGASRDGGRGRGRGRPGKRVA

SEQ ID NO: 11067 - protein, 873 aa, Homo sapiens
MFWKFDLHSSSHIDTLLEREDVTLKELMDEEDVLQECKAQNRKLIEFLLKAECLEDLVSFIIEEPPQDMDEKIRYKYPNISCELLTSDVSQMNDRLGEDESLLMKLYSFLLNDSPLNPLLASFFSKVLSILISRKPEQIVDFLKKKHDFVDLIIKHIGTSAIMDLLLRLLTCIEPPQPRQDVLNWLNEEKIIQRLVEIVHPSQEEDRHSNASQSLCEIVRLSRDQMLQIQNSTEPDPLLATLEKQEIIEQLLSNIFHKEKNESAIVSAIQILLTLLETRRPTFEGHIEICPPGMSHSACSVNKSVLEAIRGRLGSFHELLLEPPKKSVMKTTWGVLDPPVGNTRLNVIRLISSLLQTNTSSINGDLMELNSIGVILNMFFKYTWNNFLHTQVEICIALILASPFENTENATITDQDSTGDNLLLKHLFQKCQLIERILEAWEMNEKKQAEGGRRHGYMGHLTRIANCIVHSTDKGPNSALVQQLIKDLPDEVRERWETFCTSSLGETNKRNTVDLVTTCHIHSSSDDEIDFKETGFSQDSSLQQAFSDYQMQQMTSNFIDQFGFNDEKFADQDDIGNVSFDRVSDINFTLNTNESGNIALFEACCKERIQQFDDGGSDEEDIWEEKHIAFTPESQRRSSSGSTDSEESTDSEEEDGAKQDLFEPSSANTEDKMEVDLSEPPNWSANFDVPMETTHGAPLDSVGSDVWSTEEPMPTKETGWASFSEFTSSLSTKDSLRSNSPVEMETSTEPMDPLTPSAAALAVQPEAAGSVAMEASSDGEEDAESTDKVTETVMNGGMKETLSLTVDAKTETAVFKSEEGKLSTSQDAACKDAEECPETAEAKCAAPRPPSSSPEQRTGQPSAPGDTSVNGPV

SEQ ID NO: 11068 - protein, 508 aa, Homo sapiens
MEPDSVIEDKTIELMISNGTSSVIVSRKRPSEGNYQKEKDLCIKYFDQWSESDQVEFVEHLISRMCHYQHGHINSYLKPMLQRDFITALPEQGLDHIAENILSYLDARSLCAAELVCKEWQRVISEGMLWKKLIERMVRTDPLWKGLSERRGWDQYLFKNRPTDGPPNSFYRSLYPKIIQDIETIESNWRCGRHNLQRIQCRSENSKGVYCLQYDDEKIISGLRDNSIKIWDKTSLECLKVLTGHTGSVLCLQYDERVIVTGSSDSTVRVWDVNTGEVLNTLIHHNEAVLHLRFSNGLMVTCSKDRSIAVWDMASATDITLRRVLVGHRAAVNVVDFDDKYIVSASGDRTIKVWSTSTCEFVRTLNGHKRGIACLQYRDRLVVSGSSDNTIRLWDIECGACLRVLEGHEELVRCIRFDNKRIVSGAYDGKIKVWDLQAALDPRAPASTLCLRTLVEHSGRVFRLQFDEFQIISSSHDDTILIWDFLNVPPSAQNETRSPSRTYTYISR

SEQ ID NO: 11069 - protein, 390 aa, Homo sapiens
MPSEYTYVKLRSDCSRPSLQWYTRAQSKMRRPSLLLKDILKCTLLVFGVWILYILKLNYTTEECDMKKMHYVDPDHVKRAQKYAQQVLQKECRPKFAKTSMALLFEHRYSVDLLPFVQKAPKDSEAESKYDPPFGFRKFSSKVQTLLELLPEHDLPEHLKAKTCRRCVVIGSGGILHGLELGHTLNQFDVVIRLNSAPVEGYSEHVGNKTTIRMTYPEGAPLSDLEYYSNDLFVAVLFKSVDFNWLQAMVKKETLPFWVRLFFWKQVAEKIPLQPKHFRILNPVIIKETAFDILQYSEPQSRFWGRDKNVPTIGVIAVVLATHLCDEVSLAGFGYDLNQPRTPLHYFDSQCMAAMNFQTMHNVTTETKFLLKLVKEGVVKDLSGGIDREF

SEQ ID NO: 11070 - protein, 432 aa, Homo sapiens
MDARWWAVVVLAAFPSLGAGGETPEAPPESWTQLWFFRFVVNAAGYASFMVPGYLLVQYFRRKNYLETGRGLCFPLVKACVFGNEPKASDEVPLAPRTEAAETTPMWQALKLLFCATGLQVSYLTWGVLQERVMTRSYGATATSPGERFTDSQFLVLMNRVLALIVAGLSCVLCKQPRHGAPMYRYSFASLSNVLSSWCQYEALKFVSFPTQVLAKASKVIPVMLMGKLVSRRSYEHWEYLTATLISIGVSMFLLSSGPEPRSSPATTLSGLILLAGYIAFDSFTSNWQDALFAYKMSSVQMMFGVNFFSCLFTVGSLLEQGALLEGTRFMGRHSEFAAHALLLSICSACGQLFIFYTIGQFGAAVFTIIMTLRQAFAILLSCLLYGHTVTVVGGLGVAVVFAALLLRVYARGRLKQRGKKAVPVESPVQKV

SEQ ID NO: 11071 - protein, 564 aa, Homo sapiens
MAVFRSGLLVLTTPLASLAPRLASILTSAARLVNHTLYVHLQPGMSLEGPAQPQSSPVQATFEVLDFITHLYAGADVHRHLDVRILLTNIRTKSTFLPPLPTSVQNLAHPPEVVLTDFQTLDGSQYNPVKQQLVRYATSCYSCCPRLASVLLYSDYGIGEVPVEPLDVPLPSTIRPASPVAGSPKQPVRGYYRGAVGGTFDRLHNAHKVLLSVACILAQEQLVVGVADKDLLKSKLLPELLQPYTERVEHLSEFLVDIKPSLTFDVIPLLDPYGPAGSDPSLEFLVVSEETYRGGMAINRFRLENDLEELALYQIQLLKDLRHTENEEDKVSSSSFRQRMLGNLLRPPYERPELPTCLYVIGLTGISGSGKSSIAQRLKGLGAFVIDSDHLGHRAYAPGGPAYQPVVEAFGTDILHKDGIINRKVLGSRVFGNKKQLKILTDIMWPIIAKLAREEMDRAVAEGKRVCVIDAAVLLEAGWQNLVHEVWTAVIPETEAVRRIVERDGLSEAAAQSRLQSQMSGQQLVEQSHVVLSTLWEPHITQRQVEKAWALLQKRIPKTHQALD

SEQ ID NO: 11072 - protein, 381 aa, Homo sapiens
MAESHLLQWLLLLLPTLCGPGTAAWTTSSLACAQGPEFWCQSLEQALQCRALGHCLQEVWGHVGADDLCQECEDIVHILNKMAKEAIFQDTMRKFLEQECNVLPLKLLMPQCNQVLDDYFPLVIDYFQNQTDSNGICMHLGLCKSRQPEPEQEPGMSDPLPKPLRDPLPDPLLDKLVLPVLPGALQARPGPHTQDLSEQQFPIPLPYCWLCRALIKRIQAMIPKGALAVAVAQVCRVVPLVAGGICQCLAERYSVILLDTLLGRMLPQLVCRLVLRCSMDDSAGPRSPTGEWLPRDSECHLCMSVTTQAGNSSEQAIPQAMLQACVGSWLDREKCKQFVEQHTPQLLTLVPRGWDAHTTCQALGVCGTMSSPLQCIHSPDL

SEQ ID NO: 11073 - protein, 87 aa, Homo sapiens
MAGASLGARFYRQIKRHPGIIPMIGLICLGMGSAALYLLRLALRSPDVCWDRKNNPEPWNRLSPNDQYKFLAVSTDYKKLKKDRPDF

SEQ ID NO: 11074 - protein, 831 aa, Homo sapiens
MGELFRSEEMTLAQLFLQSEAAYCCVSELGELGKVQFRDLNPDVNVFQRKFVNEVRRCEEMDRKLRFVEKEIRKANIPIMDTGENPEVPFPRDMIDLEANFEKIENELKEINTNQEALKRNFLELTELKFILRKTQQFFDEMADPDLLEESSSLLEPSEMGRGTPLRLGFVAGVINRERIPTFERMLWRVCRGNVFLRQAEIENPLEDPVTGDYVHKSVFIIFFQGDQLKNRVKKICEGFRASLYPCPETPQERKEMASGVNTRIDDLQMVLNQTEDHRQRVLQAAAKNIRVWFIKVRKMKAIYHTLNLCNIDVTQKCLIAEVWCPVTDLDSIQFALRRGTEHSGSTVPSILNRMQTNQTPPTYNKTNKFTYGFQNIVDAYGIGTYREINPAPYTIITFPFLFAVMFGDFGHGILMTLFAVWMVLRESRILSQKNENEMFSTVFSGRYIILLMGVFSMYTGLIYNDCFSKSLNIFGSSWSVRPMFTYNWTEETLRGNPVLQLNPALPGVFGGPYPFGIDPIWNIATNKLTFLNSFKMKMSVILGIIHMLFGVSLSLFNHIYFKKPLNIYFGFIPEIIFMTSLFGYLVILIFYKWTAYDAHTSENAPSLLIHFINMFLFSYPESGYSMLYSGQKGIQCFLVVVALLCVPWMLLFKPLVLRRQYLRRKHLGTLNFGGIRVGNGPTEEDAEIIQHDQLSTHSEDADEFDFGDTMVHQAIHTIEYCLGCISNTASYLRLWALSLAHAQLSEVLWTMVIHIGLSVKSLAGGLVLFFFFTAFATLTVAILLIMEGLSAFLHALRLHWVEFQNKFYSGTGFKFLPFSFEHIREGKFEE

SEQ ID NO: 11075 - protein, 832 aa, Homo sapiens
MRGCLRLALLCALPWLLLAASPGHPAKSPRQPPAPRRDPFDAARGADFDHVYSGVVNLSTENIYSFNYTSQPDQVTAVRVYVNSSSENLNYPVLVVVRQQKEVLSWQVPLLFQGLYQRSYNYQEVSRTLCPSEATNETGPLQQLIFVDVASMAPLGAQYKLLVTKLKHFQLRTNVAFHFTASPSQPQYFLYKFPKDVDSVIIKVVSEMAYPCSVVSVQNIMCPVYDLDHNVEFNGVYQSMTKKAAITLQKKDFPGEQFFVVFVIKPEDYACGGSFFIQEKENQTWNLQRKKNLEVTIVPSIKESVYVKSSLFSVFIFLSFYLGCLLVGFVHYLRFQRKSIDGSFGSNDGSGNMVASHPIAASTPEGSNYGTIDESSSSPGRQMSSSDGGPPGQSDTDSSVEESDFDTMPDIESDKNIIRTKMFLYLSDLSRKDRRIVSKKYKIYFWNIITIAVFYALPVIQLVITYQTVVNVTGNQDICYYNFLCAHPLGVLSAFNNILSNLGHVLLGFLFLLIVLRRDILHRRALEAKDIFAVEYGIPKHFGLFYAMGIALMMEGVLSACYHVCPNYSNFQFDTSFMYMIAGLCMLKLYQTRHPDINASAYSAYASFAVVIMVTVLGVVFGKNDVWFWVIFSAIHVLASLALSTQIYYMGRFKIDVSDTDLGIFRRAAMVFYTDCIQQCSRPLYMDRMVLLVVGNLVNWSFALFGLIYRPRDFASYMLGIFICNLLLYLAFYIIMKLRSSEKVLPVPLFCIVATAVMWAAALYFFFQNLSSWEGTPAESREKNRECILLDFFDDHDIWHFLSATALFFSFLVLLTLDDDLDVVRRDQIPVF

SEQ ID NO: 11076 - protein, 180 aa, Homo sapiens
MSAARPQFSIDDAFELSLEDGGPGPESSGVARFGPLHFERRARFEVADEDKQSRLRYQNLENDEDGAQASPEPDGGVGTRDSSRTSIRSSQWSFSTISSSTQRSYNTCCSWTQHPLIQKNRRVVLASFLLLLLGLGVSSAIFFVPGFLLLVPGVYHVIFIYCAVKGHRGFQFFYLPYFEK

SEQ ID NO: 11077 - protein, 401 aa, Homo sapiens
MSSSGAKDKPELQFPFLQDEDTVATLLECKTLFILRGLPGSGKSTLARVIVDKYRDGTKMVSADAYKITPGARGAFSEEYKRLDEDLAAYCRRRDIRILVLDDTNHERERLEQLFEMADQYQYQVVLVEPKTAWRLDCAQLKEKNQWQLSADDLKKLKPGLEKDFLPLYFGWFLTKKSSETLRKAGQVFLEELGNHKAFKKELRQFVPGDEPREKMDLVTYFGKRPPGVLHCTTKFCDYGKAPGAEEYAQQDVLKKSYSKAFTLTISALFVTPKTTGARVELSEQQLQLWPSDVDKLSPTDNLPRGSRAHITLGCAADVEAVQTGLDLLEILRQEKGGSRGEEVGELSRGKLYSLGNGRWMLTLAKNMEVRAIFTGYYGKGKPVPTQGSRKGGALQSCTII

SEQ ID NO: 11078 - protein, 421 aa, Homo sapiens
MNRGFSRKSHTFLPKIFFRKMSSSGAKDKPELQFPFLQDEDTVATLLECKTLFILRGLPGSGKSTLARVIVDKYRDGTKMVSADAYKITPGARGAFSEEYKRLDEDLAAYCRRRDIRILVLDDTNHERERLEQLFEMADQYQYQVVLVEPKTAWRLDCAQLKEKNQWQLSADDLKKLKPGLEKDFLPLYFGWFLTKKSSETLRKAGQVFLEELGNHKAFKKELRQFVPGDEPREKMDLVTYFGKRPPGVLHCTTKFCDYGKAPGAEEYAQQDVLKKSYSKAFTLTISALFVTPKTTGARVELSEQQLQLWPSDVDKLSPTDNLPRGSRAHITLGCAADVEAVQTGLDLLEILRQEKGGSRGEEVGELSRGKLYSLGNGRWMLTLAKNMEVRAIFTGYYGKGKPVPTQGSRKGGALQSCTII

SEQ ID NO: 11079 - protein, 292 aa, Homo sapiens [sequence omitted]

SEQ ID NO: 11080 - protein, 1237 aa, Homo sapiens
MEEEDTKREVPKEDGVGDVQHFDSSKIMEEHSYIQKELDLQNGSLEEDSVVHSVENDSQNMMESLSPKKYSSSLRFKANGDYSGSYLTLSQPVPAKRSPSPLGTSVRSSPSLAKIQGSKQFSYDGTDKNIPMKPPTPLLNTTSSLSGYPLGRADFDHYTGRDSERALRLSEKPPYSKYSSRHKSHDNVYSLGGLEGRKASGSLLAMWNGSSLSDAGPPPISRSGAASMPSSPKQARKMSIQDSLALQPKLTRHKELASENINLRTRKYSSSSLSHMGAYSRSLPRLYRATENQLTPLSLPPRNSLGNSKRTKLGEKDLPHSVIDNDNYLNFSSLSSGALPYKTSASEGNPYVSSTLSVPASPRVARKMLLASTSSCASDDFDQASYVGTNPSHSLLAGESDRVFATRRNFSCGSVEFDEADLESLRQASGTPQPALRERKSSISSISGRDDLMDYHRRQREERLREQEMERLERQRLETILSLCAEYTKPDSRLSTGTTVEDVQKINKELEKLQLSDEESVFEEALMSPDTRYRCHRKDSLPDADLASCGSLSQSSASFFTPRSTRNDELLSDLTRTPPPPSSTFPKASSESSYLSILPKTPEGISEEQRSQELAAMEETRIVILNNLEELKQKIKDINDQMDESFRELDMECALLDGEQKSETTELMKEKEILDHLNRKIAELEKNIVGEKTKDADLLDVESKHFEDLEFQQLEHESRLDEEKENLTQQLLREVAEYQRNIVSRKEKISALKKQANHIVQQAQREQDHFVKEKNNLIMMLQREKENLCNLEKKYSSLSGGKGFPVNPNTLKEGYISVNEINEPCGNSTNLSPSTQFPADADAVATEPATAVLASQPQSKEHFRSLEERKKQHKEGLYLSDTLPRKKTTSSISPHFSSATMGRSITPKAHLPLGQSNSCGSVLPPSLAAMAKDSESRRMLRGYNHQQMSEGHRQKSEFYNRTASESNVYLNSFHYPDHSYKDQAFDTLSLDSSDSMETSISACSPDNISSASTSNIARIEEMERLLKQAHAEKTRLLESREREMEAKKRALEEEKRRREILEKRLQEETSQRQKLIEKEVKIRERQRAQARPLTRYLPVRKEDFDLRSHVETAGHNIDTCYHVSITEKTCRGFLIKMGGKIKTWKKRWFVFDRNKRTFSYYADKHETKLKGVIYFQAIEEVYYDHLKNANKSPNPLLTFSVKTHDRIYYMVAPSPEAMRIWMDVIVTGAEGYTHFLL

SEQ ID NO: 11081 - protein, 1253 aa, Homo sapiens
MEEHSYIQKELDLQNGSLEEDSVVHSVENDSQNMMESLSPKKYSSSLRFKANGDYSGSYLTLSQPVPAKRSPSPLGTSVRSSPSLAKIQGSKQFSYDGTDKNIPMKPPTPLLNTTSSLSGYPLGRADFDHYTGRDSERALRLSEKPPYSKYSSRHKSHDNVYSLGGLEGRKASGSLLAMWNGSSLSDAGPPPISRSGAASMPSSPKQARKMSIQDSLALQPKLTRHKELASENINLRTRKYSSSSLSHMGAYSRSLPRLYRATENQLTPLSLPPRNSLGNSKRTKLGEKDLPHSVIDNDNYLNFSSLSSGALPYKTSASEGNPYVSSTLSVPASPRVARKMLLASTSSCASDDFDQASYVGTNPSHSLLAGESDRVFATRRNFSCGSVEFDEADLESLRQASGTPQPALRERKSSISSISGRDDLMDYHRRQREERLREQEMERLERQRLETILSLCAEYTKPDSRLSTGTTVEDVQKINKELEKLQLSDEESVFEEALMSPDTRYRCHRKDSLPDADLASCGSLSQSSASFFTPRSTRNDELLSDLTRTPPPPSSTFPKASSESSYLSILPKTPEGISEEQRSQELAAMEETRIVILNNLEELKQKIKDINDQMDESFRELDMECALLDGEQKSETTELMKEKEILDHLNRKIAELEKNIVGEKTKEKVKLDAEREKLERLQELYSEQKTQLDNCPESMREQLQQQLKRDADLLDVESKHFEDLEFQQLEHESRLDEEKENLTQQLLREVAEYQRNIVSRKEKISALKKQANHIVQQAQREQDHFVKEKNNLIMMLQREKENLCNLEKKYSSLSGGKGFPVNPNTLKEGYISVNEINEPCGNSTNLSPSTQFPADADAVATEPATAVLASQPQSKEHFRSLEERKKQHKEGLYLSDTLPRKKTTSSISPHFSSATMGRSITPKAHLPLGQSNSCGSVLPPSLAAMAKDSESRRMLRGYNHQQMSEGHRQKSEFYNRTASESNVYLNSFHYPDHSYKDQAFDTLSLDSSDSMETSISACSPDNISSASTSNIARIEEMERLLKQAHAEKTRLLESREREMEAKKRALEEEKRRREILEKRLQEETSQRQKLIEKEVKIRERQRAQARPLTRYLPVRKEDFDLRSHVETAGHNIDTCYHVSITEKTCRGFLIKMGGKIKTWKKRWFVFDRNKRTFSYYADKHETKLKGVIYFQAIEEVYYDHLKNANKSPNPLLTFSVKTHDRIYYMVAPSPEAMRIWMDVIVTGAEGYTHFLL

SEQ ID NO: 11082 - protein, 390 aa, Homo sapiens
MEEKPSGPIPDMLATAEPSSSETDKEVLSPAVPAAAPSSSMSEEPGPEQAATPPVWERGGAGGMQQGSSPAPDSCQPGPGPSPGLTSIVSGTSEDLRPPRRRPPPGKQIPCSSPGCCLSFPSVRDLAQHLRTHCPPTQSLEGKLFRCSALSCTETFPSMQELVAHSKLHYKPNRYFKCENCLLRFRTHRSLFKHLHVCAEHAQSPAPPPPPALDREPPAPERPPEVDPASAPGLPFPLLEPFTTPAPAPTGPFLPYLNPAPFGLSPPRLRPFLAAAPGPPASSAAVWKKSQGAGSSPRRPQGGSDAPSGHAAPSRIVWEHTRGRYSCMQCAFSTASRPAMTLHLEDHRPGAPAAPAAGPPRPDAPADPAPLAPKVSPLLSEGELPVFSQL

SEQ ID NO: 11083 - protein, 608 aa, Homo sapiens
MRPVSVWQWSPWGLLLCLLCSSCLGSPSPSTGPEKKAGSQGLRFRLAGFPRKPYEGRVEIQRAGEWGTICDDDFTLQAAHILCRELGFTEATGWTHSAKYGPGTGRIWLDNLSCSGTEQSVTECASRGWGNSDCTHDEDAGVICKDQRLPGFSDSNVIEARVRLKGGAHPGEGRVEVLKASTWGTVCDRKWDLHAASVVCRELGFGSAREALSGARMGQGMGAIHLSEVRCSGQELSLWKCPHKNITAEDCSHSQDAGVRCNLPYTGAETRIRLSGGRSQHEGRVEVQIGGPGPLRWGLICGDDWGTLEAMVACRQLGLGYANHGLQETWYWDSGNITEVVMSGVRCTGTELSLDQCAHHGTHITCKRTGTRFTAGVICSETASDLLLHSALVQETAYIEDRPLHMLYCAAEENCLASSARSANWPYGHRRLLRFSSQIHNLGRADFRPKAGRHSWVWHECHGHYHSMDIFTHYDILTPNGTKVAEGHKASFCLEDTECQEDVSKRYECANFGEQGITVGCWDLYRHDIDCQWIDITDVKPGNYILQVVINPNFEVAESDFTNNAMKCNCKYDGHRIWVHNCHIGDAFSEEANRRFERYPGQTSNQII

SEQ ID NO: 11084 - protein, 418 aa, Homo sapiens
MAPPLLLLLLASGAAACPLPCVCQNLSESLSTLCAHRGLLFVPPNVDRRTVELRLADNFIQALGPPDFRNMTGLVDLTLSRNAITRIGARAFGDLESLRSLHLDGNRLVELGTGSLRGPVNLQHLILSGNQLGRIAPGAFDDFLESLEDLDLSYNNLRQVPWAGIGAMPALHTLNLDHNLIDALPPGAFAQLGQLSRLDLTSNRLATLAPDPLFSRGRDAEASPAPLVLSFSGNPLHCNCELLWLRRLARPDDLETCASPPGLAGRYFWAVPEGEFSCEPPLIARHTQRLWVLEGQRATLRCRALGDPAPTMHWVGPDDRLVGNSSRARAFPNGTLEIGVTGAGDAGGYTCIATNPAGEATARVELRVLALPHGGNSRPGAAAWPGSPSLVFILSTSGSPVYLEGQGALSSVLASRPG

SEQ ID NO: 11085 - protein, 1178 aa, Homo sapiens
MLKFRTVHGGLRLLGIRRTSTAPAASPNVRRLEYKPIKKVMVANRGEIAIRVFRACTELGIRTVAIYSEQDTGQMHRQKADEAYLIGRGLAPVQAYLHIPDIIKVAKENNVDAVHPGYGFLSERADFAQACQDAGVRFIGPSPEVVRKMGDKVEARAIAIAAGVPVVPGTDAPITSLHEAHEFSNTYGFPIIFKAAYGGGGRGMRVVHSYEELEENYTRAYSEALAAFGNGALFVEKFIEKPRHIEVQILGDQYGNILHLYERDCSIQRRHQKVVEIAPAAHLDPQLRTRLTSDSVKLAKQVGYENAGTVEFLVDRHGKHYFIEVNSRLQVEHTVTEEITDVDLVHAQIHVAEGRSLPDLGLRQENIRINGCAIQCRVTTEDPARSFQPDTGRIEVFRSGEGMGIRLDNASAFQGAVISPHYDSLLVKVIAHGKDHPTAATKMSRALAEFRVRGVKTNIAFLQNVLNNQQFLAGTVDTQFIDENPELFQLRPAQNRAQKLLHYLGHVMVNGPTTPIPVKASPSPTDPVVPAVPIGPPPAGFRDILLREGPEGFARAVRNHPGLLLMDTTFRDAHQSLLATRVRTHDLKKIAPYVAHNFSKLFSMENWGGATFDVAMRFLYECPWRRLQELRELIPNIPFQMLLRGANAVGYTNYPDNVVFKFCEVAKENGMDVFRVFDSLNYLPNMLLGMEAAGSAGGVVEAAISYTGDVADPSRTKYSLQYYMGLAEELVRAGTHILCIKDMAGLLKPTACTMLVSSLRDRFPDLPLHIHTHDTSGAGVAAMLACAQAGADVVDVAADSMSGMTSQPSMGALVACTRGTPLDTEVPMERVFDYSEYWEGARGLYAAFDCTATMKSGNSDVYENEIPGGQYTNLHFQAHSMGLGSKFKEVKKAYVEANQMLGDLIKVTPSSKIVGDLAQFMVQNGLSRAEAEAQAEELSFPRSVVEFLQGYIGVPHGGFPEPFRSKVLKDLPRVEGRPGASLPPLDLQALEKELVDRHGEEVTPEDVLSAAMYPDVFAHFKDFTATFGPLDSLNTRLFLQGPKIAEEFEVELERGKTLHIKALAVSDLNRAGQRQVFFELNGQLRSILVKDTQAMKEMHFHPKALKDVKGQIGAPMPGKVIDIKVVAGAKVAKGQPLCVLSAMKMETVVTSPMEGTVRKVHVTKDMTLEGDDLILEIE

SEQ ID NO: 11086 - protein, 368 aa, Homo sapiens
MSGAPTAGAALMLCAATAVLLSAQGGPVQSKSPRFASWDEMNVLAHGLLQLGQGLREHAERTRSQLSALERRLSACGSACQGTEGSTDLPLAPESRVDPEVLHSLQTQLKAQNSRIQQLFHKVAQQQRHLEKQHLRIQHLQSQFGLLDHKHLDHEVAKPARRKRLPEMAQPVDPAHNVSRLHHGGWTVIQRRHDGSVDFNRPWEAYKAGFGDPHGEFWLGLEKVHSITGDRNSRLAVQLRDWDGNAELLQFSVHLGGEDTAYSLQLTAPVAGQLGATTVPPSGLSVPFSTWDQDHDLRRDKNCAKSLSGGWWFGTCSHSNLNGQYFRSIPQQRQKLKKGIFWKTWRGRYYPLQATTMLIQPMAAEAAS

SEQ ID NO: 11087 - protein, 177 aa, Homo sapiens
MKTVTMMMVVEMQALTQVLRAVLSACTWVSRKGDLQRMKQTHKGKPPSSMAFTGKFEMESEKNYDEFMKLLGISSDVIEKARNFKIVTEVQQDGQDFTWSQHYSGGHTMTNKFTVGKESNIQTMGGKTFKATVQMEGGKLVVNFPNYHQTSEIVGDKLVEVSTIGGVTYERVSKRLA

SEQ ID NO: 11088 - protein, 148 aa, Homo sapiens
MAAAMVPGRSESWERGEPGRPALYFCGSIRGGREDRTLYERIVSRLRRFGTVLTEHVAAAELGARGEEAAGGDRLIHEQDLEWLQQADVVVAEVTQPSLGVGYELGRAVAFNKRILCLFRPQSGRGEHPKPPSWLSMDPALSSFPGGL

SEQ ID NO: 11089 - protein, 156 aa, Homo sapiens
MRLRMELGAPEEMGQVPPLDSRPSSPALYFTHDASLVHKSPDPFGAVAAQKFSLAHSMLAISGHLDSDDDSGSGSLVGIDNKIEQAMDLVKSHLMFAVREEVEVLKEQIRELAERNAALEQENGLLRALASPEQLAQLPSSGVPRLGPPAPNGPSV

SEQ ID NO: 11090 - protein, 175 aa, Homo sapiens
MGRPLLLPLLPLLLPPAFLQPSGSTGSGPSYLYGVTQPKHLSASMGGSVEIPFSFYYPWELATAPDVRISWRRGHFHRQSFYSTRPPSIHKDYVNRLFLNWTEGQKSGFLRISNLQKQDQSVYFCRVELDTRSSGRQQWQSIEGTKLSITQGNPSKTQRSHMRISGMKDKIQIPS

SEQ ID NO: 11091 - protein, 436 aa, Homo sapiens
MLYAKPPPTINGIKGLQRKERLKPAHIHLQQLTCFSITCSSTMSYSCCLPSLGCRTSCSSRPCVPPSCHGYTLPGACNIPANVSNCNWFCEGSFNGSEKETMQFLNDRLASYLEKVRQLERDNAELEKLIQERSQQQEPLLCPSYQSYFKTIEELQQKILCAKAENARLVVNIDNAKLASDDFRSKYQTEQSLRLLVESDINSIRRILDELTLCKSDLESQVESLREELICLKKNHEEEVNTLRSQLGDRLNVEVDTAPTVDLNQVLNETRSQYEALVEINRREVEQWFATQTEELNKQVVSSSEQLQSCQAEIIELRRTVNALEIELQAQHNLRDSLENTLTESEAHYSSQLSQVQSLITNVESQLAEIRCDLERQNQEYQVLLDVRARLECEINTYRSLLESEDCKLPCNPCATTNASGNSCGPCGTSQKGCCN

SEQ ID NO: 11092 - protein, 246 aa, Homo sapiens
MRNMLSKLQIACDNAVFGCSAVVRLDNLMSHLSDCEHNPKRPVTCEQGCGLEMPKDELPNHNCIKHLRSVVQQQQTRIAELEKTSAEHKHQLAEQKRDIQLLKAYMRAIRSVNPNLQNLEETIEYNEILEWVNSLQPARVTRWGGMISTPDAVLQAVIKRSLVESGCPASIVNELIENAHERSWPQGLATLETRQMNRRYYENYVAKRIPGKQAVVVMACENQHMGDDMVQEPGLVMIFAHGVEEI

SEQ ID NO: 11093 - protein, 982 aa, Homo sapiens [sequence omitted]

SEQ ID NO: 11094 - protein, 568 aa, Homo sapiens
MERAVRVESGVLVGVVCLLLACPATATGPEVAQPEVDTTLGRVRGRQVGVKGTDRLVNVFLGIPFAQPPLGPDRFSAPHPAQPWEGVRDASTAPPMCLQDVESMNSSRFVLNGKQQIFSVSEDCLVLNVYSPAEVPAGSGRPVMVWVHGGALITGAATSYDGSALAAYGDVVVVTVQYRLGVLGFFSTGDEHAPGNQGFLDVVAALRWVQENIAPFGGDLNCVTVFGGSAGGSIISGLVLSPVAAGLFHRAITQSGVITTPGIIDSHPWPLAQKIANTLACSSSSPAEMVQCLQQKEGEELVLSKKLKNTIYPLTVDGTVFPKSPKELLKEKPFHSVPFLMGVNNHEFSWLIPRGWGLLDTMEQMSREDMLAISTPVLTSLDVPPEMMPTVIDEYLGSNSDAQAKCQAFQEFMGDVFINVPTVSFSRYLRDSGSPVFFYEFQHRPSSFAKIKPAWVKADHGAEGAFVFGGPFLMDESSRLEATEEEKQLSLTMMAQWTHFARTGDPNSKALPPWPQFNQAEQYLEINPVPRAGQKFREAWMQFWSETLPSKIQQWHQKQKNRKAQEDL

SEQ ID NO: 11095 - protein, 1104 aa, Homo sapiens
MERSPGEGPSPSPMDQPSAPSDPTDQPPAAHAKPDPGSGGQPAGPGAAGEALAVLTSFGRRLLVLIPVYLAGAVGLSVGFVLFGLALYLGWRRVRDEKERSLRAARQLLDDEEQLTAKTLYMSHRELPAWVSFPDVEKAEWLNKIVAQVWPFLGQYMEKLLAETVAPAVRGSNPHLQTFTFTRVELGEKPLRIIGVKVHPGQRKEQILLDLNISYVGDVQIDVEVKKYFCKAGVKGMQLHGVLRVILEPLIGDLPFVGAVSMFFIRRPTLDINWTGMTNLLDIPGLSSLSDTMIMDSIAAFLVLPNRLLVPLVPDLQDVAQLRSPLPRGIIRIHLLAARGLSSKDKYVKGLIEGKSDPYALVRLGTQTFCSRVIDEELNPQWGETYEVMVHEVPGQEIEVEVFDKDPDKDDFLGRMKLDVGKVLQASVLDDWFPLQGGQGQVHLRLEWLSLLSDAEKLEQVLQWNWGVSSRPDPPSAAILVVYLDRAQDLPLKKGNKEPNPMVQLSIQDVTQESKAVYSTNCPVWEEAFRFFLQDPQSQELDVQVKDDSRALTLGALTLPLARLLTAPELILDQWFQLSSSGPNSRLYMKLVMRILYLDSSEICFPTVPGCPGAWDVDSENPQRGSSVDAPPRPCHTTPDSQFGTEHVLRIHVLEAQDLIAKDRFLGGLVKGKSDPYVKLKLAGRSFRSHVVREDLNPRWNEVFEVIVTSVPGQELEVEVFDKDLDKDDFLGRCKVRLTTVLNSGFLDEWLTLEDVPSGRLHLRLERLTPRPTAAELEEVLQVNSLIQTQKSAELAAALLSIYMERAEDLPLRKGTKHLSPYATLTVGDSSHKTKTISQTSAPVWDESASFLIRKPHTESLELQVRGEGTGVLGSLSLPLSELLVADQLCLDRWFTLSSGQGQVLLRAQLGILVSQHSGVEAHSHSYSHSSSSLSEEPELSGGPPHITSSAPELRQRLTHVDSPLEAPAGPLGQVKLTLWYYSEERKLVSIVHGCRSLRQNGRDPPDPYVSLLLLPDKNRGTKRRTSQKKRTLSPEFNERFEWELPLDEAQRRKLDVSVKSNSSFMSRERELLGKVQLDLAETDLSQGVARWYDLMDNKDKGSS

SEQ ID NO: 11096 - protein, 350 aa, Homo sapiens
MAATSLMSALAARLLQPAHSCSLRLRPFHLAAVRNEAVVISGRKLAQQIKQEVRQEVEEWVASGNKRPHLSVILVGENPASHSYVLNKTRAAAVVGINSETIMKPASISEEELLNLINKLNNDDNVDGLLVQLPLPEHIDERRICNAVSPDKDVDGFHVINVGRMCLDQYSMLPATPWGVWEIIKRTGIPTLGKNVVVAGRSKNVGMPIAMLLHTDGAHERPGGDATVTISHRYTPKEQLKKHTILADIVISAAGIPNLITADMIKEGAAVIDVGINRVHDPVTAKPKLVGDVDFEGVRQKAGYITPVPGGVGPMTVAMLMKNTIIAAKKVLRLEEREVLKSKELGVATN

SEQ ID NO: 11097 - protein, 807 aa, Homo sapiens
MVPAWLWLLCVSVPQALPKAQPAELSVEVPENYGGNFPLYLTKLPLPREGAEGQIVLSGDSGKATEGPFAMDPDSGFLLVTRALDREEQAEYQLQVTLEMQDGHVLWGPQPVLVHVKDENDQVPHFSQAIYRARLSRGTRPGIPFLFLEASDRDEPGTANSDLRFHILSQAPAQPSPDMFQLEPRLGALALSPKGSTSLDHALERTYQLLVQVKDMGDQASGHQATATVEVSIIESTWVSLEPIHLAENLKVLYPHHMAQVHWSGGDVHYHLESHPPGPFEVNAEGNLYVTRELDREAQAEYLLQVRAQNSHGEDYAAPLELHVLVMDENDNVPICPPRDPTVSIPELSPPGTEVTRLSAEDADAPGSPNSHVVYQLLSPEPEDGVEGRAFQVDPTSGSVTLGVLPLRAGQNILLLVLAMDLAGAEGGFSSTCEVEVAVTDINDHAPEFITSQIGPISLPEDVEPGTLVAMLTAIDADLEPAFRLMDFAIERGDTEGTFGLDWEPDSGHVRLRLCKNLSYEAAPSHEVVVVVQSVAKLVGPGPGPGATATVTVLVERVMPPPKLDQESYEASVPISAPAGSFLLTIQPSDPISRTLRFSLVNDSEGWLCIEKFSGEVHTAQSLQGAQPGDTYTVLVEAQDTALTLAPVPSQYLCTPRQDHGLIVSGPSKDPDLASGHGPYSFTLGPNPTVQRDWRLQTLNGSHAYLTLALHWVEPREHIIPVVVSHNAQMWQLLVRVIVCRCNVEGQCMRKVGRMKGMPTKLSAVGILVGTLVAIGIFLILIFTHWTMSRKKDPDQPADSVPLKATV

SEQ ID NO: 11098 - protein, 445 aa, Homo sapiens
MEFLQELNSDVSGSFVEESPENLLDNDPSFFCRFTVVVATQLPESTSLRLADVLWNSQIPLLICRTYGLVGYMRIIIKEHPVIESHPDNALEDLRLDKPFPELREHFQSYDLDHMEKKDHSHTPWIVIIAKYLAQWYSETNGRIPKTYKEKEDFRDLIRQGILKNENGAPEDEENFEEAIKNVNTALNTTQIPSSIEDIFNDDRCINITKQTPSFWILARALKEFVAKEGQGNLPVRGTIPDMIADSGKYIKLQNVYREKAKKDAAAVGNHVAKLLQSIGQAPESISEKELKLLCSNSAFLRVVRCRSLAEEYGLDTINKDEIISSMDNPDNEIVLYLMLRAVDRFHKQQGRYPGVSNYQVEEDIGKLKSCLTGFLQEYGLSVMVKDDYVHEFCRYGAAEPHTIAAFLGGAAAQEVIKIITKQFVIFNNTYIYSGMSQTSATFQL

SEQ ID NO: 11099 - protein, 157 aa, Homo sapiens [sequence omitted]

SEQ ID NO: 11100 - protein, 457 aa, Homo sapiens
MYESVEVGGPTPNPFLVVDFYNQNRACLLPEKGLPAPGPYSTPLRTPLWNGSNHSIETQSSSSEEIVPSPPSPPPLPRIYKPCFVCQDKSSGYHYGVSACEGCKGFFRRSIQKNMVYTCHRDKNCIINKVTRNRCQYCRLQKCFEVGMSKESVRNDRNKKKKEVPKPECSESYTLTPEVGELIEKVRKAHQETFPALCQLGKYTTNNSSEQRVSLDIDLWDKFSELSTKCIIKTVEFAKQLPGFTTLTIADQITLLKAACLDILILRICTRYTPEQDTMTFSDGLTLNRTQMHNAGFGPLTDLVFAFANQLLPLEMDDAETGLLSAICLICGDRQDLEQPDRVDMLQEPLLEALKVYVRKRRPSRPHMFPKMLMKITDLRSISAKGAERVITLKMEIPGSMPPLIQEMLENSEGLDTLSGQPGGGGRDGGGLAPPPGSCSPSLSPSSNRSSPATHSP

SEQ ID NO: 11101 - protein, 423 aa, Homo sapiens
MQRVNMIMAESPGLITICLLGYLLSAECTVFLDHENANKILNRPKRYNSGKLEEFVQGNLERECMEEKCSFEEAREVFENTERTTEFWKQYVDVTCNIKNGRCEQFCKNSADNKVVCSCTEGYRLAENQKSCEPAVPFPCGRVSVSQTSKLTRAETVFPDVDYVNSTEAETILDNITQSTQSFNDFTRVVGGEDAKPGQFPWQVVLNGKVDAFCGGSIVNEKWIVTAAHCVETGVKITVVAGEHNIEETEHTEQKRNVIRIIPHHNYNAAINKYNHDIALLELDEPLVLNSYVTPICIADKEYTNIFLKFGSGYVSGWGRVFHKGRSALVLQYLRVPLVDRATCLRSTKFTIYNNMFCAGFHEGGRDSCQGDSGGPHVTEVEGTSFLTGIISWGEECAMKGKYGIYTKVSRYVNWIKEKTKLT

SEQ ID NO: 11102 - protein, 1050 aa, Homo sapiens
MDKRKLGRRPSSSEIITEGKRKKSSSDLSEIRKMLNAKPEDVHVQSPLSKFRSSERWTLPLQWERSLRNKVISLDHKNKKHIRGCPVTSKSSPERQLKVMLTNVLWTDLGRKFRKTLPRNDANLCDANKVQSDSLPSTSVDSLETCQKLEPLRQSLNLSERIPRVILTNVLGTELGRKYIRTPPVTEGSLSDTDNLQSEQLSSSSDGSLESYQNLNPHKSCYLSERGSQRSKTVDDNSAKQTAHNKEKRRKDDGISLLISDTQPEDLNSGSRGCDHLEQESRNKDVKYSDSKVELTLISRKTKRRLRNNLPDSQYCTSLDKSTEQTKKQEDDSTISTEFEKPSENYHQDPKLPEEITTKPTKSDFTKLSSLNSQELTLSNATKSASAGSTTETVENSNSIDIVGISSLVEKDENELNTIEKPILRGHNEGNQSLISAEPIVVSSDEEGPVEHKSSEILKLQSKQDRETTNENESTSESALLELPLITCESVQMSSELCPYNPVMENISSIMPSNEMDLQLDFIFTSVYIGKIKGASKGCVTITKKYIKIPFQVSLNEISLLVDTTHLKRFGLWKSKDDNHSKRSHAILFFWVSSDYLQEIQTQLEHSVLSQQSKSSEFIFLELHNPVSQREELKLKDIMTEISIISGELELSYPLSWVQAFPLFQNLSSKESSFIHYYCVSTCSFPAGVAVAEEMKLKSVSQPSNTDAAKPTYTFLQKQSSGCYSLSITSNPDEEWREVRHTGLVQKLIVYPPPPTKGGLGVTNEDLECLEEGEFLNDVIIDFYLKYLILEKASDELVERSHIFSSFFYKCLTRKENNLTEDNPNLSMAQRRHKRVRTWTRHINIFNKDYIFVPVNESSHWYLAVICFPWLEEAVYEDFPQTVSQQSQAQQSQNDNKTIDNDLRTTSTLSLSAEDSQSTESNMSVPKKMCKRPCILILDSLKAASVQNTVQNLREYLEVEWEVKLKTHRQFSKTNMVDLCPKVPKQDNSSDCGVYLLQYVESFFKDPIVNFELPIHLEKWFPRHVIKTKREDIRELILKLHLQQQKGSSS

SEQ ID NO: 11103 - protein, 2081 aa, Homo sapiens
MLCCLLVRASNLPSAKKDRRSDPVASLTFRGVKKRTKVIKNSVNPVWNEGFEWDLKGIPLDQGSELHVVVKDHETMGRNRFLGEAKVPLREVLATPSLSASFNAPLLDTKKQPTGASLVLQVSYTPLPGAVPLFPPPTPLEPSPTLPDLDVVADTGGEEDTEDQGLTGDEAEPFLDQSGGPGAPTTPRKLPSRPPPHYPGIKRKRSAPTSRKLLSDKPQDFQIRVQVIEGRQLPGVNIKPVVKVTAAGQTKRTRIHKGNSPLFNETLFFNLFDSPGELFDEPIFITVVDSRSLRTDALLGEFRMDVGTIYREPRHAYLRKWLLLSDPDDFSAGARGYLKTSLCVLGPGDEAPLERKDPSEDKEDIESNLLRPTGVALRGAHFCLKVFRAEDLPQMDDAVMDNVKQIFGFESNKKNLVDPFVEVSFAGKMLCSKILEKTANPQWNQNITLPAMFPSMCEKMRIRIIDWDRLTHNDIVATTYLSMSKISAPGGEIEEEPAGAVKPSKASDLDDYLGFLPTFGPCYINLYGSPREFTGFPDPYTELNTGKGEGVAYRGRLLLSLETKLVEHSEQKVEDLPADDILRVEKYLRRRKYSLFAAFYSATMLQDVDDAIQFEVSIGNYGNKFDMTCLPLASTTQYSRAVFDGCHYYYLPWGNVKPVVVLSSYWEDISHRIETQNQLLGIADRLEAGLEQVHLALKAQCSTEDVDSLVAQLTDELIAGCSQPLGDIHETPSATHLDQYLYQLRTHHLSQITEAALALKLGHSELPAALEQAEDWLLRLRALAEEPQNSLPDIVIWMLQGDKRVAYQRVPAHQVLFSRRGANYCGKNCGKLQTIFLKYPMEKVPGARMPVQIRVKLWFGLSVDEKEFNQFAEGKLSVFAETYENETKLALVGNWGTTGLTYPKFSDVTGKIKLPKDSFRPSAGWTWAGDWFVCPEKTLLHDMDAGHLSFVEEVFENQTRLPGGQWIYMSDNYTDVNGEKVLPKDDIECPLGWKWEDEEWSTDLNRAVDEQGWEYSITIPPERKPKHWVPAEKMYYTHRRRRWVRLRRRDLSQMEALKRHRQAEAEGEGWEYASLFGWKFHLEYRKTDAFRRRRWRRRMEPLEKTGPAAVFALEGALGGVMDDKSEDSMSVSTLSFGVNRPTISCIFDYGNRYHLRCYMYQARDLAAMDKDSFSDPYAIVSFLHQSQKTVVVKNTLNPTWDQTLIFYEIEIFGEPATVAEQPPSIVVELYDHDTYGADEFMGRCICQPSLERMPRLAWFPLTRGSQPSGELLASFELIQREKPAIHHIPGFEVQETSRILDESEDTDLPYPPPQREANIYMVPQNIKPALQRTAIEILAWGLRNMKSYQLANISSPSLVVECGGQTVQSCVIRNLRKNPNFDICTLFMEVMLPREELYCPPITVKVIDNRQFGRRPVVGQCTIRSLESFLCDPYSAESPSPQGGPDDVSLLSPGEDVLIDIDDKEPLIPIQEEEFIDWWSKFFASIGEREKCGSYLEKDFDTLKVYDTQLENVEAFEGLSDFCNTFKLYRGKTQEETEDPSVIGEFKGLFKIYPLPEDPAIPMPPRQFHQLAAQGPQECLVRIYIVRAFGLQPKDPNGKCDPYIKISIGKKSVSDQDNYIPCTLEPVFGKMFELTCTLPLEKDLKITLYDYDLLSKDEKIGETVVDLENRLLSKFGARCGLPQTYCVSGPNQWRDQLRPSQLLHLFCQQHRVKAPVYRTDRVMFQDKEYSIEEIEAGRIPNPHLGPVEERLALHVLQQQGLVPEHVESRPLYSPLQPDIEQGKLQMWVDLFPKALGRPGPPFNITPRRARRFFLRCIIWNTRDVILDDLSLTGEKMSDIYVKGWMIGFEEHKQKTDVHYRSLGGEGNFNWRFIFPFDYLPAEQVCTIAKKDAFWRLDKTESKIPARVVFQIWDNDKFSFDDFLGSLQLDLNRMPKPAKTAKKCSLDQLDDAFHPEWFVSLFEQKTVKGWWPCVAEEGEKKILAGKLEMTLEIVAESEHEERPAGQGRDEPNMNPKLEDPRRPDTSFLWFTSPYKTMKFILWRRFRWAIILFIILFILLLFLAIFIYAFPNYAAMKLVKPFS

SEQ ID NO: 11104 - protein, 989 aa, Homo sapiens
MKVVNLKQAILQAWKERWSDYQWAINMKKFFPKGATWDILNLADALLEQAMIGPSPNPLILSYLKYAISSQMVSYSSVLTAISKFDDFSRDLCVQALLDIMDMFCDRLSCHGKAEECIGLCRALLSALHWLLRCTAASAERLREGLEAGTPAAGEKQLAMCLQRLEKTLSSTKNRALLHIAKLEEASSWTAIEHSLLKLGEILANLSNPQLRSQAEQCGTLIRSIPTMLSVHAEQMHKTGFPTVHAVILLEGTMNLTGETQSLVEQLTMVKRMQHIPTPLFVLEIWKACFVGLIESPEGTEELKWTAFTFLKIPQVLVKLKKYSHGDKDFTEDVNCAFEFLLKLTPLLDKADQRCNCDCTNFLLQECGKQGLLSEASVNNLMAKRKADREHAPQQKSGENANIQPNIQLILRAEPTVTNILKTMDADHSKSPEGLLGVLGHMLSGKSLDLLLAAAAATGKLKSFARKFINLNEFTTYGSEESTKPASVRALLFDISFLMLCHVAQTYGSEVILSESRTGAEVPFFETWMQTCMPEEGKILNPDHPCFRPDSTKVESLVALLNNSSEMKLVQMKWHEACLSISAAILEILNAWENGVLAFESIQKITDNIKGKVCSLAVCAVAWLVAHVRMLGLDEREKSLQMIRQLAGPLFSENTLQFYNERVVIMNSILERMCADVLQQTATQIKFPSTGVDTMPYWNLLPPKRPIKEVLTDIFAKVLEKGWVDSRSIHIFDTLLHMGGVYWFCNNLIKELLKETRKEHTLRAVELLYSIFCLDMQQVTLVLLGHILPGLLTDSSKWHSLMDPPGTALAKLAVWCALSSYSSHKGQASTRQKKRHREDIEDYISLFPLDDVQPSKLMRLLSSNEDDANILSSPTDRSMSSSLSASQLHTVNMRDPLNRVLANLFLLISSILGSRTAGPHTQFVQWFMEECVDCLEQGGRGSVLQFMPFTTVSELVKVSAMSSPKVVLAITDLSLPLGRQVAAKAIAAL

SEQ ID NO: 11105 - protein, 276 aa, Homo sapiens
MTSFRLALIQLQISSIKSDNVTRACSFIREAATQGAKIVSLPECFNSPYGAKYFPEYAEKIPGESTQKLSEVAKECSIYLIGGSIPEEDAGKLYNTCAVFGPDGTLLAKYRKIHLFDIDVPGKITFQESKTLSPGDSFSTFDTPYCRVGLGICYDMRFAELAQIYAQRGCQLLVYPGAFNLTTGPAHWELLQRSRAVDNQVYVATASPARDDKASYVAWGHSTVVNPWGEVLAKAGTEEAIVYSDIDLKKLAEIRQQIPVFRQKRSDLYAVEMKKP

SEQ ID NO: 11106 - protein, 2875 aa, Homo sapiens
MKEHIIYQKLYGLILMSSFIFLSVVPENMTIQEKSTTVSQQIDMTTPSQITGVKPQNTAHSSTLLSQSIPIFATDYTTISYSNTTSPPLETMTAQKILKTLVDETATFAVDVLSTSSAISLPTQSISIDNTTNSMKKTKSPSSESTKTTKMVEAMATEIFQPPTPSNFLSTSRFTKNSVVSTTSAIKSQSAVTKTTSLFSTIESTSMSTTPCLKQKSTNTGALPISTAGQEFIESTAAGTVPWFTVEKTSPASTHVGTASSFPPEPVLISTAAPVDSVFPRNQTAFPLATTDMKIAFTVHSLTLPTRLIETTPAPRTAETELTSTNFQDVSLPRVEDAMSTSMSKETSSKTFSFLTSFSFTGTESVQTVIDAEATRTALTPEITLASTVAETMLSSTITGRVYTQNTPTADGHLLTLMSTRSASTSKAPESGPTSTTDEAAHLFSSNETIWTSRPDQALLASMNTTTILTFVPNENFTSAFHENTTYTEYLSATTNITPLKASPEGKGTTANDATTARYTTAVSKLTSPWFANFSIVSGTTSITNMPEFKLTTLLLKTIPMSTKPANELPLTPRETVVPSVDIISTLACIQPNFSTEESASETTQTEINGAIVFGGTTTPVPKSATTQRLNATVTRKEATSHYLMRKSTIAAVAEVSPFSTMLEVTDESAQRVTASVTVSSFPDIEKLSTPLDNKTATTEVRESWLLTKLVKTTPRSSYNEMTEMFNFNHTYVAHWTSETSEGISAGSPTSGSTHIFGEPLGASTTRISETSFSTTPTDRTATSLSDGILPPQPTAAHSSATPVPVTHMFSLPVNGSSVVAEETEVTMSEPSTLARAFSTSVLSDVSNLSSTTMTTALVPPLDQTASTTIVIVPTHGDLIRTTSEATVISVRKTSMAVPSLTETPFHSLRLSTPVTAKAETTLFSTSVDTVTPSTHTLVCSKPPPDNIPPASSTHVISTTSTPEATQPISQVEETSTYALSFPYTFSGGGVVASLATGTTETSVVDETTPSHISANKLTTSVNSHISSSATYRVHTPVSIQLVTSTSVLSSDKDQMTISLGKTPRTMEVTEMSPSKNSFISYSRGTPSLEMTDTGFPETTKISSHQTHSPSEIPLGTPSDGNLASSPTSGSTQITPTLTSSNTVGVHIPEMSTSLGKTALPSQALTITTFLCPEKESTSALPAYTPRTVEMIVNSTYVTHSVSYGQDTSFVDTTTSSSTRISNPMDINTTFSHLHSLRTQPEVTSVASFISESTQTFPESLSLSTAGLYNDGFTVLSDRITTAFSVPNVPTMLPRESSMATSTPIYQMSSLPVNVTAFTSKKVSDTPPIVITKSSKTMHPGCLKSPCTATSGPMSEMSSIPVNNSAFTPATVSSDTSTRVGLFSTLLSSVTPRTTMTMQTSTLDVTPVIYAGATSKNKMVSSAFTTEMIEAPSRITPTTFLSPTEPTLPFVKTVPTTIMAGIVTPFVGTTAFSPLSSKSTGAISSIPKTTFSPFLSATQQSSQADEATTLGILSGITNRSLSTVNSGTGVALTDTYSRITVPENMLSPTHADSLHTSFNIQVSPSLTSFKSASGPTKNVKTTTNCFSSNTRKMTSLLEKTSLTNYATSLNTPVSYPPWTPSSATLPSLTSFVYSPHSTEAEISTPKTSPPPTSQMVEFPVLGTRMTSSNTQPLLMTSWNIPTAEGSQFPISTTINVPTSNEMETETLHLVPGPLSTFTASQTGLVSKDVMAMSSIPMSGILPNHGLSENPSLSTSLRAITSTLADVKHTFEKMTTSVTPGTTLPSILSGATSGSVISKSPILTWLLSSLPSGSPPATVSNAPHVMTSSTVEVSKSTFLTSDMISAHPFTNLTTLPSATMSTILTRTIPTPTLGGITTGFPTSLPMSINVTDDIVYISTHPEASSRTTITANPRTVSHPSSFSRKTMSPSTTDHTLSVGAMPLPSSTITSSWNRIPTASSPSTLIIPKPTLDSLLNIMTTTSTVPGASFPLISTGVTYPFTATVSSPISSFFETTWLDSTPSFLSTEASTSPTATKSTVSFYNVEMSFSVFVEEPRIPITSVINEFTENSLNSIFQNSEFSLATLETQIKSRDISEEEMVMDRAILEQREGQEMATISYVPYSCVCQVIIKASSSLASSELMRKIKSKIHGNFTHGNFTQDQLTLLVNCEHVAVKKLEPGNCKADETASKYKGTYKWLLTNPTETAQTRCIKNEDGNATRFCSISINTGKSQWEKPKFKQCKLLQELPDKIVDLANITISDENAEDVAEHILNLINESPALGKEETKIIVSKISDISQCDEISMNLTHVMLQIINVVLEKQNNSASDLHEISNEILRIIERTGHKMEFSGQIANLTVAGLALAVLRGDHTFDGMAFSIHSYEEGTDPEIFLGNVPVGGILASIYLPKSLTERIPLSNLQTILFNFFGQTSLFKTKNVTKALTTYVVSASISDDMFIQNLADPVVITLQHIGGNQNYGQVHCAFWDFENNNGLGGWNSSGCKVKETNVNYTICQCDHLTHFGVLMDLSRSTVDSVNEQILALITYTGCGISSIFLGVAVVTYIAFHKLRKDYPAKILINLCTALLMLNLVFLINSWLSSFQKVGVCITAAVALHYFLLVSFTWMGLEAVHMYLALVKVFNIYIPNYILKFCLVGWGIPAIMVAITVSVKKDLYGTLSPTTPFCWIKDDSIFYISVVAYFCLIFLMNLSMFCTVLVQLNSVKSQIQKTRRKMILHDLKGTMSLTFLLGLTWGFAFFAWGPMRNFFLYLFAIFNTLQGFFIFVFHCVMKESVREQWQIHLCCGWLRLDNSSDGSSRCQIKVGYKQEGLKKIFEHKLLTPSLKSTATSSTFKSLGSAQGTPSEISFPNDDFDKDPYCSSP

SEQ ID NO: 11107 - protein, 143 aa, Homo sapiens
MDSMPEPASRCLLLLPLLLLLLLLLPAPELGPSQAGAEENDWVRLPSKCEVCKYVAVELKSAFEETGKTKEVIGTGYGILDQKASGVKYTKSDLRLIEVTETICKRLLIIACTRRGPAAIDLPRACQRPLRHYTTWYTKGSRW

SEQ ID NO: 11108 - protein, 699 aa, Homo sapiens
MAEGEDVPPLPTSSGDGWEKDLEEALEAGGCDLETLRNIIQGRPLPADLRAKVWKIALNVAGKGDSLASWDGILDLPEQNTIHKDCLQFIDQLSVPEEKAAELLLDIESVITFYCKSRNIKYSTSLSWIHLLKPLVHLQLPRSDLYNCFYAIMNKYIPRDCSQKGRPFHLFRLLIQYHEPELCSYLDTKKITPDSYALNWLGSLFACYCSTEVTQAIWDGYLQQADPFFIYFLMLIILVNAKEVILTQESDSKEEVIKFLENTPSSLNIEDIEDLFSLAQYYCSKTPASFRKDNHHLFGSTLLGIKDDDADLSQALCLAISVSEILQANQLQGEGVRFFVVDCRPAEQYNAGHLSTAFHLDSDLMLQNPSEFAQSVKSLLEAQKQSIESGSIAGGEHLCFMGSGREEEDMYMNMVLAHFLQKNKEYVSIASGGFMALQQHLADINVDGPENGYGHWIASTSGSRSSINSVDGESPNGSSDRGMKSLVNKMTVALKTKSVNVREKVISFIENTSTPVDRMSFNLPWPDRSCTERHVSSSDRVGKPYRGVKPVFSIGDEEEYDTDEIDSSSMSDDDRKEVVNIQTWINKPDVKHHFPCKEVKESGHMFPSHLLVTATHMYCLREIVSRKGLAYIQSRQALNSVVKITSKKKHPELITFKYGNSSASGIEILAIERYLIPNAGDATKAIKQQIMKVLDALES

SEQ ID NO: 11109 - protein, 171 aa, Homo sapiens
MAGPATQSPMKLMALQLLLWHSALWTVQEATPLGPASSLPQSFLLKCLEQVRKIQGDGAALQEKLVSEAGCLSQLHSGLFLYQGLLQALEGISPELGPTLDTLQLDVADFATTIWQQMEELGMAPALQPTQGAMPAFASAFQRRAGGVLVASHLQSFLEVSYRVLRHLAQP

SEQ ID NO: 11110 - protein, 204 aa, Homo sapiens
MAGPATQSPMKLMALQLLLWHSALWTVQEATPLGPASSLPQSFLLKCLEQVRKIQGDGAALQEKLCATYKLCHPEELVLLGHSLGIPWAPLSSCPSQALQLAGCLSQLHSGLFLYQGLLQALEGISPELGPTLDTLQLDVADFATTIWQQMEELGMAPALQPTQGAMPAFASAFQRRAGGVLVASHLQSFLEVSYRVLRHLAQP

SEQ ID NO: 11111 - protein, 280 aa, Homo sapiens
MAEKFDCHYCRDPLQGKKYVQKDGHHCCLKCFDKFCANTCVECRKPIGADSKEVHYKNRFWHDTCFRCAKCLHPLANETFVAKDNKILCNKCTTREDSPKCKGCFKAIVAGDQNVEYKGTVWHKDCFTCSNCKQVIGTGSFFPKGEDFYCVTCHETKFAKHCVKCNKAITSGGITYQDQPWHADCFVCVTCSKKLAGQRFTAVEDQYYCVDCYKNFVAKKCAGCKNPITGFGKGSSVVAYEGQSWHDYCFHCKKCSVNLANKRFVFHQEQVYCPDCAKKL

SEQ ID NO: 11112 - protein, 693 aa, Homo sapiens
MKENYCLQAALVCLGMLCHSHAFAPERRGHLRPSFHGHHEKGKEGQVLQRSKRGWVWNQFFVIEEYTGPDPVLVGRLHSDIDSGDGNIKYILSGEGAGTIFVIDDKSGNIHATKTLDREERAQYTLMAQAVDRDTNRPLEPPSEFIVKVQDINDNPPEFLHETYHANVPERSNVGTSVIQVTASDADDPTYGNSAKLVYSILEGQPYFSVEAQTGIIRTALPNMDREAKEEYHVVIQAKDMGGHMGGLSGTTKVTITLTDVNDNPPKFPQSVYQMSVSEAAVPGEEVGRVKAKDPDIGENGLVTYNIVDGDGMESFEITTDYETQEGVIKLKKPVDFETKRAYSLKVEAANVHIDPKFISNGPFKDTVTVKISVEDADEPPMFLAPSYIHEVQENAAAGTVVGRVHAKDPDAANSPIRYSIDRHTDLDRFFTINPEDGFIKTTKPLDREETAWLNITVFAAEIHNRHQEAKVPVAIRVLDVNDNAPKFAAPYEGFICESDQTKPLSNQPIVTISADDKDDTANGPRFIFSLPPEIIHNPNFTVRDNRDNTAGVYARRGGFSRQKQDLYLLPIVISDGGIPPMSSTNTLTIKVCGCDVNGALLSCNAEAYILNAGLSTGALIAILACIVILLGCPSLMEPPSPREDMRLLYLGFQLMLFSYVKVNRRFCLLGVFIKLPFLYVVATESPTTLTSL

SEQ ID NO: 11113 - protein, 414 aa, Homo sapiens
MAMVVSTWRDPQDEVPGSQGSQASQAPPVPGPPPGAPHTPQTPGQGGPASTPAQTAAGGQGGPGGPGSDKQQQQQHIECVVCGDKSSGKHYGQFTCEGCKSFFKRSVRRNLSYTCRANRNCPIDQHHRNQCQYCRLKKCLKVGMRREAVQRGRMPPTQPTHGQFALTNGDPLNCHSYLSGYISLLLRAEPYPTSRFGSQCMQPNNIMGIENICELAARMLFSAVEWARNIPFFPDLQITDQVALLRLTWSELFVLNAAQCSMPLHVAPLLAAAGLHASPMSADRVVAFMDHIRIFQEQVEKLKALHVDSAEYSCLKAIVLFTSDACGLSDVAHVESLQEKSQCALEEYVRSQYPNQPTRFGKLLLRLPSLRTVSSSVIEQLFFVRLVGKTPIETLIRDMLLSGSSFNWPYMAIQ

SEQ ID NO: 11114 - protein, 88 aa, Homo sapiens
MASVVPVKDKKLLEVKLGELPSWILMRDFSPSGIFGAFQRGYYRYYNKYINVKKGSISGITMVLACYVLFSYSFSYKHLKHERLRKYH

SEQ ID NO: 11115 - protein, 82 aa, Homo sapiens
MMNADMDAVDAENQVELEEKTRLINQVLELQHTLEDLSARVDAVKEENLKLKSENQVLGQYIENLMSASSVFQTTDTKSKRK

SEQ ID NO: 11116 - protein, 428 aa, Homo sapiens
MFSLMASCCGWFKRWREPVRKVTLLMVGLDNAGKTATAKGIQGEYPEDVAPTVGFSKINLRQGKFEVTIFDLGGGIRIRGIWKNYYAESYGVIFVVDSSDEERMEETKEAMSEMLRHPRISGKPILVLANKQDKEGALGEADVIECLSLEKLVNEHKCLCQIEPCSAISGYGKKIDKSIKKGLYWLLHVIARDFDALNERIQKETTEQRALEEQEKQERAERVRKLREERKQNEQEQAELDGTSGLAELDPEPTNPFQPIASVIIENEGKLEREKKNQKMEKDSDGCHLKHKMEHEQIETQGQVNHNGQKNNEFGLVENYKEALTQQLKNEDETDRPSLESANGKKKTKKLRMKRNHRVEPLNIDDCAPESPTPPPPPPPVGWGTPKVTRLPKLEPLGETHHNDFYRKPLPPLAVPQRPNSDAHDVIS

SEQ ID NO: 11117 - protein, 76 aa, Homo sapiens
MAPSALLRPLSRLLAPARLPSGPSVRSKFYVREPPNAKPDWLKVGFTLGTTVFLWIYLIKQHNEDILEYKRRNGLE

SEQ ID NO: 11118 - protein, 115 aa, Homo sapiens
MSGEPGQTSVAPPPEEVEPGSGVRIVVEYCEPCGFEATYLELASAVKEQYPGIEIESRLGGTGAFEIEINGQLVFSKLENGGFPYEKDLIEAIRRASNGETLEKITNSRPPCVIL

SEQ ID NO: 11119 - protein, 395 aa, Homo sapiens
MESKRLRLLQEEDRRKKIARMGFNASSMLRKSQLGFLNVTNYCHLAHELRLSCMERKKVQIRSMDPSALASDRFNLILADTNSDRLFTVNDVKVGGSKYGIINLQSLKTPTLKVFMHENLYFTNRKVNSVCWASLNHLDSHILLCLMGLAETPGCATLLPASLFVNSHPGIDRPGMLCSFRIPGAWSCAWSLNIQANNCFSTGLSRRVLLTNVVTGHRQSFGTNSDVLAQQFALMAPLLFNGCRSGEIFAIDLRCGNQGKGWKATRLFHDSAVTSVRILQDEQYLMASDMAGKIKLWDLRTTKCVRQYEGHVNEYAYLPLHVHEEEGILVAVGQDCYTRIWSLHDARLLRTIPSPYPASKADIPSVAFSSRLGGSRGAPGLLMAVGQDLYCYSYS

SEQ ID NO: 11120 - protein, 581 aa, Homo sapiens
MTSAVVDSGGTILELSSNGVENQEESEKVSEYPAVIVEPVPSARLEQGYAAQVLVYDDETYMMQDVAEEQEVETENVETVEASVHSSNAHCTDKTIEAAEALLHMESPTCLRDSRSPEFIHAAMRPDVITETVVEVSTEESEPMDTSPIPTSPDSHEPMKKKKVGRKPKTQQSPISNGSPELGIKKKPREGKGNTTYLWEFLLDLLQDKNTCPRYIKWTQREKGIFKLVDSKAVSKLWGKHKNKPDMNYETMGRALRYYYQRGILAKVEGQRLVYQFKDMPKNIVVIDDDKSETCNEDLAGTTDEKSLERVSLSAESLLKAASSVRSGKNSSPINCSRAEKGVARVVNITSPGHDASSRSPTTTASVSATAAPRTVRVAMQVPVVMTSLGQKISTVAVQSVNAGAPLITSTSPTTATSPKVVIQTIPTVMPASTENGDKITMQPAKIITIPATQLAQCQLQTKSNLTGSGSINIVGTPLAVRALTPVSIAHGTPVMRLSMPTQQASGQTPPRVISAVIKGPEVKSEAVAKKQEHDVKTLQLVEEKPADGNKTVTHVVVVSAPSAIALPVTMKTEGLVTCEK

SEQ ID NO: 11121 - protein, 120 aa, Homo sapiens
MVPSAGQLALFALGIVLAACQALENSTSPLSDPPVAAAVVSHFNDCPDSHTQFCFHGTCRFLVQEDKPACVCHSGYVGARCEHADLLAVVAASQKKQAITALVVVSIVALAVLIITCVLI

SEQ ID NO: 11122 - protein, 620 aa, Homo sapiens
MRRSEVLAEESIVCLQKALNHLREIWELIGIPEDQRLQRTEVVKKHIKELLDMMIAEEESLKERLIKSISVCQKELNTLCSELHVEPFQEEGETTILQLEKDLRTQVELMRKQKKERKQELKLLQEQDQELCEILCMPHYDIDSASVPSLEELNQFRQHVTTLRETKASRREEFVSIKRQIILCMEALDHTPDTSFERDVVCEDEDAFCLSLENIATLQKLLRQLEMQKSQNEAVCEGLRTQIRELWDRLQIPEEEREAVATIMSGSKAKVRKALQLEVDRLEELKMQNMKKVIEAIRVELVQYWDQCFYSQEQRQAFAPFCAEDYTESLLQLHDAEIVRLKNYYEVHKELFEGVQKWEETWRLFLEFERKASDPNRFTNRGGNLLKEEKQRAKLQKMLPKLEEELKARIELWEQEHSKAFMVNGQKFMEYVAEQWEMHRLEKERAKQERQLKNKKQTETEMLYGSAPRTPSKRRGLAPNTPGKARKLNTTTMSNATANSSIRPIFGGTVYHSPVSRLPPSGSKPVAASTCSGKKTPRTGRHGANKENLELNGSILSGGYPGSAPLQRNFSINSVASTYSEFAKDPSLSDSSTVGLQRELSKASKSDATSGILNSTNIQS

SEQ ID NO: 11123 - protein, 376 aa, Homo sapiens
MAEERPGAWFGFGFCGFGQELGSGRGRQVHSPSPLRAGVDICRVSASWSYTAFVTRGGRLELSGSASGAAGRCKDAWASEGLLAVLRAGPGPEALLQVWAAESALRGEPLWAQNVVPEAEGEDDPAGEAQAGRLPLLPCARAYVSPRAPFYRPLAPELRARQLELGAEHALLLDAAGQVFSWGGGRHGQLGHGTLEAELEPRLLEALQGLVMAEVAAGGWHSVCVSETGDIYIWGWNESGQLALPTRNLAEDGETVAREATELNEDGSQVKRTGGAEDGAPAPFIAVQPFPALLDLPMGSDAVKASCGSRHTAVVTRTGELYTWGWGKYGQLGHEDTTSLDRPRRVEYFVDKQLQVKAVTCGPWNTYVYAVEKGKS

SEQ ID NO: 11124 - protein, 929 aa, Homo sapiens
MTASSVEQLRKEGNELFKCGDYGGALAAYTQALGLDATPQDQAVLHRNRAACHLKLEDYDKAETEASKAIEKDGGDVKALYRRSQALEKLGRLDQAVLDLQRCVSLEPKNKVFQEALRNIGGQIQEKVRYMSSTDAKVEQMFQILLDPEEKGTEKKQKASQNLVVLAREDAGAEKIFRSNGVQLLQRLLDMGETDLMLAALRTLVGICSEHQSRTVATLSILGTRRVVSILGVESQAVSLAACHLLQVMFDALKEGVKKGFRGKEGAIIVDPARELKVLISNLLDLLTEVGVSGQGRDNALTLLIKAVPRKSLKDPNNSLTLWVIDQGLKKILEVGGSLQDPPGELAVTANSRMSASILLSKLFDDLKCDAERENFHRLCENYIKSWFEGQGLAGKLRAIQTVSCLLQGPCDAGNRALELSGVMESVIALCASEQEEEQLVAVEALIHAAGKAKRASFITANGVSLLKDLYKCSEKDSIRIRALVGLCKLGSAGGTDFSMKQFAEGSTLKLAKQCRKWLCNDQIDAGTRRWAVEGLAYLTFDADVKEEFVEDAAALKALFQLSRLEERSVLFAVASALVNCTNSYDYEEPDPKMVELAKYAKQHVPEQHPKDKPSFVRARVKKLLAAGVVSAMVCMVKTESPVLTSSCRELLSRVFLALVEEVEDRGTVVAQGGGRALIPLALEGTDVGQTKAAQALAKLTITSNPEMTFPGERIYEVVRPLVSLLHLNCSGLQNFEALMALTNLAGISERLRQKILKEKAVPMIEGYMFEEHEMIRRAATECMCNLAMSKEVQDLFEAQGNDRLKLLVLYSGEDDELLQRAAAGGLAMLTSMRPTLCSRIPQVTTHWLEILQALLLSSNQELQHRGAVVVLNMVEASREIASTLMESEMMEILSVLAKGDHSPVTRAAAACLDKAVEYGLIQPNQDGE

SEQ ID NO: 11125 - protein, 321 aa, Homo sapiens
MAMATKGGTVKAASGFNAMEDAQTLRKAMKGLGTDEDAIISVLAYRNTAQRQEIRTAYKSTIGRDLIDDLKSELSGNFEQVIVGMMTPTVLYDVQELRRAMKGAGTDEGCLIEILASRTPEEIRRISQTYQQQYGRSLEDDIRSDTSFMFQRVLVSLSAGGRDEGNYLDDALVRQDAQDLYEAGEKKWGTDEVKFLTVLCSRNRNHLLHVFDEYKRISQKDIEQSIKSETSGSFEDALLAIVKCMRNKSAYFAEKLYKSMKGLGTDDNTLIRVMVSRAEIDMLDIRAHFKRLYGKSLYSFIKGDTSGDYRKVLLVLCGGDD

SEQ ID NO: 11126 - protein, 603 aa, Homo sapiens
MAGTVRTACLVVAMLLSLDFPGQAQPPPPPPDATCHQVRSFFQRLQPGLKWVPETPVPGSDLQVCLPKGPTCCSRKMEEKYQLTARLNMEQLLQSASMELKFLIIQNAAVFQEAFEIVVRHAKNYTNAMFKNNYPSLTPQAFEFVGEFFTDVSLYILGSDINVDDMVNELFDSLFPVIYTQLMNPGLPDSALDINECLRGARRDLKVFGNFPKLIMTQVSKSLQVTRIFLQALNLGIEVINTTDHLKFSKDCGRMLTRMWYCSYCQGLMMVKPCGGYCNVVMQGCMAGVVEIDKYWREYILSLEELVNGMYRIYDMENVLLGLFSTIHDSIQYVQKNAGKLTTTETEKKIWHFKYPIFFLCIGLDLQIGKLCAHSQQRQYRSAYYPEDLFIDKKVLKVAHVEHEETLSSRRRELIQKLKSFISFYSALPGYICSHSPVAENDTLCWNGQELVERYSQKAARNGMKNQFNLHELKMKGPEPVVSQIIDKLKHINQLLRTMSMPKGRVLDKNLDEEGFESGDCGDDEDECIGGSGDGMIKVKNQLRFLAELAYDLDVDDAPGNSQQATPKDNEISTFHNLGNVHSPLKLLTSMAISVVCFFFLVH

SEQ ID NO: 11127 - protein, 113 aa, Homo sapiens
MDFFASGLPLVTEETPSGEAGSEEDDEVVAMIKELLDTRIRPTVQEDGGDVIYKGFEDGIVQLKLQGSCTSCPSSIITLKNGIQNMLQFYIPEVEGVEQVMDDESDEKEANSP

SEQ ID NO: 11128 - protein, 4983 aa, Homo sapiens
MDLAPDRATGRPWLPLHTLSVSQLLRVFWLLSLLPGQAWVHGAEPRQVFQVLEEQPPGTLVGTIQTRPGFTYRLSESHALFAINSSTGALYTTSTIDRESLPSDVINLVVLSSAPTYPTEVRVLVRDLNDNAPVFPDPSIVVTFKEDSSSGRQVILDTATDSDIGSNGVDHRSYRIIRGNEAGRFRLDITLNPSGEGAFLHLVSKGGLDREVTPQYQLLVEVEDKGEPKRRGYLQVNVTVQDINDNPPVFGSSHYQAGVPEDAVVGSSVLQVAAADADEGTNADIRYRLQDEGTPFQMDPETGLITVREPLDFEARRQYSLTVQAMDRGVPSLTGRAEALIQLLDVNDNDPVVKFRYFPATSRYASVDENAQVGTVVALLTVTDADSPAANGNISVQILGGNEQRHFEVQSSKVPNLSLIKVASALDRERIPSYNLTVSVSDNYGAPPGAAVQARSSVASLVIFVNDINDHPPVFSQQVYRVNLSEEAPPGSYVSGISATDGDSGLNANLRYSIVSGNGLGWFHISEHSGLVTTGSSGGLDRELASQIVLNISARDQGVHPKVSYAQLVVTLLDVNDEKPVFSQPEGYDVSVVENAPTGTELLMLRATDGDLGDNGTVRFSLQEAETDRRSFRLDPVSGRLSTISSLDREEQAFYSLLVLATDLGSPPQSSMARINVSLLDINDNSPVFYPVQYFAHIKENEPGGSYITTVSATDPDLGTNGTVKYSISAGDRSRFQVNAQSGVISTRMALDREEKTAYQLQIVATDGGNLQSPNQAIVTITVLDTQDNPPVFSQVAYSFVVFENVALGYHVGSVSASTMDLNSNISYLITTGDQKGMFAINQVTGQLTTANVIDREEQSFYQLKVVASGGTVTGDTMVNITVKDLNDNSPHFLQAIESVNVVENWQAGHSIFQAKAVDPDEGVNGMVLYSLKQNPKNLFAINEKNGTISLLGPLDVHAGSYQIEILASDMGVPQLSSSVILTVYVHDVNDNSPVFDQLSYEVTLSESEPVNSRFFKVQASDKDSGANGEIAYTIAEGNTGDAFGIFPDGQLYIKSELDRELQDRYVLMVVASDRAVEPLSATVNVTVILEDVNDNRPLFNSTNYTFYFEEEQRAGSFVGKVSAVDKDFGPNGEVRYSFEMVQPDFELHAISGEITNTHQFDRESLMRRRGTAVFSFTVIATDQGIPQPLKDQATVHVYMKDINDNAPKFLKDFYQATISESAANLTQVLRVSASDVDEGNNGLIHYSIIKGNEERQFAIDSTSGQVTLIGKLDYEATPAYSLVIQAVDSGTIPLNSTCTLNIDILDENDNTPSFPKSTLFVDVLENMRIGELVSSVTATDSDSGDNADLYYSITGTNNHGTFSISPNTGSIFLAKKLDFETQSLYKLNITAKDQGRPPRSSTMSVVIHVRDFNDNPPSFPPGDIFKSIVENIPIGTSVISVTAHDPDADINGQLSYTIIQQMPRGNHFTIDEVKGTIYTNAEIDREFANLFELTVKANDQAVPIETRRYALKNVTILVTDLNDNVPMFISQNALAADPSAVIGSVLTTIMAADPDEGANGEIEYEIINGDTDTFIVDRYSGDLRVASALVPSQLIYNLIVSATDLGPERRKSTTELTIILQGLDGPVFTQPKYITILKEGEPIGTNVISIEAASPRGSEAPVEYYIVSVRCEEKTVGRLFTIGRHTGIIQTAAILDREQGACLYLVDVYAIEKSTAFPRTQRAEVEITLQDINDNPPVFPTDMLDLTVEENIGDGSKIMQLTAMDADEGANALVTYTIISGADDSFRIDPESGDLIATRRLDRERRSKYSLLVRADDGLQSSDMRINITVSDVNDHTPKFSRPVYSFDIPEDTIPGSLVAAILATDDDSGVNGEITYIVNEDDEDGIFFLNPITGVFNLTRLLDYEVQQYYILTVRAEDGGGQFTTIRVYFNILDVNDNPPIFSLNSYSTSLMENLPVGSTVLVFNVTDADDGINSQLTYSIASGDSLGQFTVDKNGVLKVLKALDRESQSFYNLVVQVHDLPQIPASRFTSTAQVSIILLDVNDNPPTFLSPKLTYIPENTPIDTVVFKAQATDPDSGPNSYIEYTLLNPLGNKFSIGTIDGEVRLTGELDREEVSNYTLTVVATDKGQPSLSSSTEVVVMVLDINDNNPIFAQALYKVEINENTLTGTDIIQVFAADGDEGTNGQVRYGIVNGNTNQEFRIDSVTGAITVAKPLDREKTPTYHLTVQATDRGSTPRTDTSTVSIVLLDINDFVPVFELSPYSVNVPENLGTLPRTILQVVARDDDRGSNSKLSYVLFGGNEDNAFTLSASGELGVTQSLDRETKERFVLMITATDSGSPALTGTGTINVIVDDVNDNVPTFASKAYFTTIPEDAPTGTDVLLVNASDADASKNAVISYRIIGGNSQFTINPSTGQIITSALLDRETKDNYTLVVVCSDAGSPEPLSSSTSVLVTVTDVNDNPPRFQHHPYVTHIPSPTLPGSFVFAVTVTDADIGPNSELHYSLSGRNSEKFHIDPLRGAIMAAGPLNGASEVTFSVHVKDGGSFPKTDSTTVTVRFVNKADFPKVRAKEQTFMFPENQPVSSLVTTITGSSLRGEPMSYYIASGNLGNTFQIDQLTGQVSISQPLDFEKIQKYVVWIEARDGGFPPFSSYEKLDITVLDVNDNAPIFKEDPFISEILENLSPRKILTVSAMDKDSGPNGQLDYEIVNGNMENSFSINHATGEIRSVRPLDREKVSHYVLTIKSSDKGSPSQSTSVKVMINILDENDNAPRFSQIFSAHVPENSPLGYTVTRVTTSDEDIGINAISRYSIMDASLPFTINPSTGDIVISRPLNREDTDRYRIRVSAHDSGWTVSTDVTIFVTDINDNAPRFSRTSYYLDCPELTEIGSKVTQVFATDPDEGSNGQVFYFIKSQSEYFRINATTGEIFNKQILKYQNVTGFSNVNINRHSFIVTSSDRGKPSLISETTVTINIVDSNDNAPQFLKSKYFTPVTKNVKVGTKLIRVTAIDDKDFGLNSEVEYFISNDNHLGKFKLDNDTGWISVASSLISDLNQNFFITVTAKDKGNPPLSSQATVHITVTEENYHTPEFSQSHMSATIPESHSIGSIVRTVSARDRDAAMNGLIKYSISSGNEEGIFAINSSTGILTLAKALDYELCQKHEMTISAIDGGWVARTGYCSVTVNVIDVNDNSPVFLSDDYFPTVLENAPSGTTVIHLNATDADSGTNAVIAYTVQSSDSDLFVIDPNTGVITTQGFLDFETKQSYHLTVKAFNVPDEERCSFATVNIQLKGTNEYVPRFVSKLYYFEISEAAPKGTIVGEVFASDRDLGTDGEVHYLIFGNSRKKGFQINKKTGQIYVSGILDREKEERVSLKVLAKNFGSIRGADIDEVTVNVTVLDANDPPIFTLNIYSVQISEGVPIGTHVTFVSAFDSDSIPSWSRFSYFIGSGNENGAFSINPQTGQITVTAELDRETLPIYNLSVLAVDSGTPSATGSASLLVTLEDINDNGPMLTVSEGEVMENKRPGTLVMTLQSTDPDLPPNQGPFTYYLLSTGPATSYFSLSTAGVLSTTREIDREQIADFYLSVVTKDSGVPQMSSTGTVHITVIDQNDNPSQSRTVEIFVNYYGNLFPGGILGSVKPQDPDVLDSFHCSLTSGVTSLFSIPGGTCDLNSQPRSTDGTFDLTVLSNDGVHSTVTSNIRVFFAGFSNATVDNSILLRLGVPTVKDFLTNHYLHFLRIASSQLTGLGTAVQLYSAYEENNRTFLLAAVKRNHNQYVNPSGVATFFESIKEILLRQSGVKVESVDHDSCVHGPCQNGGSCLRRLAVSSVLKSRESLPVIIVANEPLQPFLCKCLPGYAGSWCEIDIDECLPSPCHSGGTCHNLVGGFSCSCPDGFTGRACERDINECLQSPCKNGAICQNFPGSFNCVCKTGYTGKMCESSVNYCECNPCFNGGSCQSGVDSYYCHCPFGVFGKHCELNSYGFEELSYMEFPSLDPNNNYIYVKFATIKSHALLLYNYDNQTGDRAEFLALEIAEERLRFSYNLGSGTYKLTTMKKVSDGHFHTVIARRAGMAASLTVDSCSENQEPGYCTVSNVAVSDDWTLDVQPNRVTVGGIRSLEPILQRRGHVESHDFVGCIMEFAVNGRPLEPSQALAAQGILDQCPRLEGACTRSPCQHGGTCMDYWSWQQCHCKEGLTGKYCEKSVTPDTALSLEGKGRLDYHMSQNEKREYLLRQSLRGAMLEPFGVNSLEVKFRTRSENGVLIHIQESSNYTTVKIKNGKVYFTSDAGIAGKVERNIPEVYVADGHWHTFLIGKNGTATVLSVDRIYNRDIIHPTQDFGGLDVLTISLGGIPPNQAHRDAQTAGFDGCIASMWYGGESLPFSGKHSLASISKTDPSVKIGCRGPNICASNPCWGDLLCINQWYAYRCVPPGDCASHPCQNGGSCEPGLHSGFTCSCPDSHTGRTCEMVVACLGVLCPQGKVCKAGSPAGHVCVLSQGPEEISLPLWAVPAIVGSCATVLALLVLSLILCNQCRGKKAKNPKEEKKPKEKKKKGSENVAFDDPDNIPPYGDDMTVRKQPEGNPKPDIIERENPYLIYDETDIPHNSETIPSAPLASPEQEIEHYDIDNASSIAPSDADIIQHYKQFRSHTPKFSIQRHSPLGFARQSPMPLGASSLTYQPSYGQGLRTSSLSHSACPTPNPLSRHSPAPFSKSSTFYRNSPARELHLPIRDGNTLEMHGDTCQPGIFNYATRLGRRSKSPQAMASHGSRPGSRLKQPIGQIPLESSPPVGLSIEEVERLNTPRPRNPSICSADHGRSSSEEDCRRPLSRTRNPADGIPAPESSSDSDSHESFTCSEMEYDREKPMVYTSRMPKLSQVNESDADDEDNYGARLKPRRYHGRRAEGGPVGTQAAAPGTADNTLPMKLGQQAGTFNWDNLLNWGPGFGHYVDVFKDLASLPEKAAANEEGKAGTTKPVPKDGEAEQYV

SEQ ID NO: 11129 - protein, 153 aa, Homo sapiens
MLSNCRQNTLGHNTQTSIAQDFSSEQGRTAPQDQKASIQIYPWMQRMNSHSGVGYGADRRRGRQIYSRYQTLELEKEFHFNRYLTRRRRIEIANALCLTERQIKIWFQNRRMKWKKESNLTSTLSGGGGGATADSLGGKEEKREETEEEKQKE

SEQ ID NO: 11130 - protein, 140 aa, Homo sapiens [sequence omitted]

SEQ ID NO: 11131 - protein, 416 aa, Homo sapiens
MAHSPVAVQVPGMQNNIADPEELFTKLERIGKGSFGEVFKGIDNRTQQVVAIKIIDLEEAEDEIEDIQQEITVLSQCDSSYVTKYYGSYLKGSKLWIIMEYLGGGSALDLLRAGPFDEFQIATMLKEILKGLDYLHSEKKIHRDIKAANVLLSEQGDVKLADFGVAGQLTDTQIKRNTFVGTPFWMAPEVIQQSAYDSKADIWSLGITAIELAKGEPPNSDMHPMRVLFLIPKNNPPTLVGDFTKSFKEFIDACLNKDPSFRPTAKELLKHKFIVKNSKKTSYLTELIDRFKRWKAEGHSDDESDSEGSDSESTSRENNTHPEWSFTTVRKKPDPKKVQNGAEQDLVQTLSCLSMIITPAFAELKQQDENNASRNQAIEELEKSIAVAEAACPGITDKMVKKLIEKFQKCSADESP

SEQ ID NO: 11132 - protein, 748 aa, Homo sapiens
MAEEEALRGNSDPWPNSMVVEHPEFLKAGKEPGLQIWRVEKFDLVPVPTNLYGDFFTGDAYVILKTVQLRNGNLQYDLHYWLGNECSQDESGAAAIFTVQLDDYLNGRAVQHREVQGFESATFLGYFKSGLKYKKGGVASGFKHVVPNEVVVQRLFQVKGRRVVRATEVPVSWESFNNGDCFILDLGNNIHQWCGSNSNRYERLKATQVSKGIRDNERSGRARVHVSEEGTEPEAMLQVLGPKPALPAGTEDTAKEDAANRKLAKLYKVSNGAGTMSVSLVADENPFAQGALKSEDCFILDHGKDGKIFVWKGKQANTEERKAALKTASDFITKMDYPKQTQVSVLPEGGETPLFKQFFKNWRDPDQTDGLGLSYLSSHIANVERVPFDAATLHTSTAMAAQHGMDDDGTGQKQIWRIEGSNKVPVDPATYGQFYGGDSYIILYNYRHGGRQGQIIYNWQGAQSTQDEVAASAILTAQLDEELGGTPVQSRVVQGKEPAHLMSLFGGKPMIIYKGGTSREGGQTAPASTRLFQVRANSAGATRAVEVLPKAGALNSNDAFVLKTPSAAYLWVGTGASEAEKTGAQELLRVLRAQPVQVAEGSEPDGFWEALGGKAAYRTSPRLKDKKMDAHPPRLFACSNKIGRFVIEEVPGELMQEDLATDDVMLLDTWDQVFVWVGKDSQEEEKTEALTSAKRYIETDPANRDRRTPITVVKQGFEPPSFVGWFLGWDDDYWSVDPLDRAMAELAA

SEQ ID NO: 11133 - protein, 345 aa, Homo sapiens
MLAANPGKTPISLLQEYGTRIGKTPVYDLLKAEGQAHQPNFTFRVTVGDTSCTGQGPSKKAAKHKAAEVALKHLKGGSMLEPALEDSSSFSPLDSSLPEDIPVFTAAAAATPVPSVVLTRSPPMELQPPVSPQQSECNPVGALQELVVQKGWRLPEYTVTQESGPAHRKEFTMTCRVERFIEIGSGTSKKLAKRNAAAKMLLRVHTVPLDARDGNEVEPDDDHFSIGVGSRLDGLRNRGPGCTWDSLRNSVGEKILSLRSCSLGSLGALGPACCRVLSELSEEQAFHVSYLDIEELSLSGLCQCLVELSTQPATVCHGSATTREAARGEAARRALQYLKIMAGSK

SEQ ID NO: 11134 - protein, 272 aa, Homo sapiens
MSGCRVFIGRLNPAAREKDVERFFKGYGRIRDIDLKRGFGFVEFEDPRDADDAVYELDGKELCSERVTIEHARARSRGGRGRGRYSDRFSSRRPRNDRRNAPPVRTENRLIVENLSSRVSWQDLKDFMRQAGEVTFADAHRPKLNEGVVEFASYGDLKNAIEKLSGKEINGRKIKLIEGSKRHSRSRSRSRSRTRSSSRSRSRSRSRSRKSYSRSRSRSRSRSRSKSRSVSRSPVPEKSQKRGSSSRSKSPASVDRQRSRSRSRSRSVDSGN

SEQ ID NO: 11135 - protein, 1113 aa, Homo sapiens
MGPRKKSVKTCIMNNEIPEEMTADETKDYMNQLSHEVLCHIFRYLPLQDIMCMECLSRKLKEAVTLYLRVVRVVDLCAGRWWEYMPSGFTDASFLTLLKKMPDVEQLYGLHPRYLERRRVRGHEAFSIPGVLEALQACPNLVGVETSHLELVESIWTYMPHVHILGKFRNRNGAFPIPPENKLKIPIGAKIQTLHLVGVNVPEIPCIPMLRHLYMKWVRLTKPQPFKDFLCISLRTFVMRNCAGPTNSLKYVPLVTGLASARNLEHLEMVRVPFLGGLIQHVVEDSWRSGGFRNLHTIVLGACKNALEVDLGYLIITAARRLHEVRIQPSLTKDGVFSALKMAELEFPQFETLHLGYVDEFLLQSRMANADLVKYGLADVVENPGIITDIGMKAVNEVFSCIKYLAIYNCPHLHNPYNWISDHSRWTRLVDINLVRCHALKLDSFGQFIELLPSLEFISLDQMFREPPKGCARVGLSAGTGIGVSSALVSNQNSNNDDNNAQNNNANIHDNNHHHPDDSDEENDFRQDLQPGEQQFAADALNEMEDIVQEDGEVVAESGNNTPAHSQAIIPVDVDEEQAGPSGLQRVVKPTSITVHDSESDDEEDSLELQEVWIPKNGTRRYSEREEKTGESVQSRELSVSGKGKTPLRKRYNSHQMGQSKQFPLEESSCEKGCQVTSEQIKADMKAARDIPEKKKNKDVYPSCSSTTASTVGNSSSHNTASQSPDFVRTVNSGGSSEPSPTEVDVSRQCACSPGGSEDSEAMEEGDAESSVCPRCCCHRPQESQRRTSRCSDEERPSTSRACVVNGPDEVAKTKPRHAMKRKRTADKSTSTSDPVIEDDHVQVLVLKSKNLVGVTMTNCGITDLVLKDCPKMMFIHATRCRVLKHLKVENAPIVNRFDYAQCKKLNMDQVLDQILRMPPERNRIIYLRPMQQVDTLTLEQKLFSGPYPYHICIIHEFSNPPNVRNKVRIRSWMDTIANINQELIKYEFFPEATRSEEDLKKYPKYPWGREIYTLEGVVDGAPYSMISDFPWLRSLRAAEPNSFARYDFEDDEESTIYAPRRKGQLSADICMETIGEEISEMRQMKKGVFQRVVAIFIHYCDVNGEPVEDDYI

SEQ ID NO: 11136 - protein, 408 aa, Homo sapiens
MFSNANSRSKMWLLLTMASLISVLGTTHGLFGKLHPGSPEVTMNISQMITYWGYPNEEYEVVTEDGYILEVNRIPYGKKNSGNTGQRPVVFLQHGLLASATNWISNLPNNSLAFILADAGYDVWLGNSRGNTWARRNLYYSPDSVEFWAFSFDEMAKYDLPATIDFIVKKTGQKQLHYVGHSQGTTIGFIAFSTNPSLAKRIKTFYALAPVATVKYTKSLINKLRFVPQSLFKFIFGDKIFYPHNFFDQFLATEVCSREMLNLLCSNALFIICGFDSKNFNTSRLDVYLSHNPAGTSVQNMFHWTQAVKSGKFQAYDWGSPVQNRMHYDQSQPPYYNVTAMNVPIAVWNGGKDLLADPQDVGLLLPKLPNLIYHKEIPFYNHLDFIWAMDAPQEVYNDIVSMISEDKK

SEQ ID NO: 11137 - protein, 513 aa, Homo sapiens
MCSLGLFPPPPPRGQVTLYEHNNELVTGSSYESPPPDFRGQWINLPVLQLTKDPLKTPGRLDHGTRTAFIHHREQVWKRCINIWRDVGLFGVLNEIANSEEEVFEWVKTASGWALALCRWASSLHGSLFPHLSLRSEDLIAEFAQVTNCTIVPSLKHRLQRNVASLAWKPLSASVLAVACQSCILIWTLDPTSLSTRPSSGCAQVLSHPGHTPVTSLAWAPSGGRLLSASPVDAAIRVWDVSTETCVPLPWFRGGGVTNLLWSPDGSKILATTPSAVFRVWEAQMWTCERWPTLSGRCQTGCWSPDGSRLLFTVLGEPLIYSLSFPERCGEGKGCVGGAKSATIVADLSETTIQTPDGEERLGGEAHSMVWDPSGERLAVLMKGKPRVQDGKPVILLFRTRNSPVFELLPCGIIQGEPGAQPQLITFHPSFNKGALLSVGWSTGRIAHIPLYFVNAQFPRFSPVLGRAQEPPAGGGGSIHDLPLFTETSPTSAPWDPLPGPPPVLPHSPHSHL

SEQ ID NO: 11138 - protein, 312 aa, Homo sapiens
MADFGISAGQFVAVVWDKSSPVEALKGLVDKLQALTGNEGRVSVENIKQLLQSAHKESSFDIILSGLVPGSTTLHSAEILAEIARILRPGGCLFLKEPVETAVDNNSKVKTASKLCSALTLSGLVEVKELQREPLTPEEVQSVREHLGHESDNLLFVQITGKKPNFEVGSSRQLKLSITKKSSPSVKPAVDPAAAKLWTLSANDMEDDSMDLIDSDELLDPEDLKKPDPASLRAASCGEGKKRKACKNCTCGLAEELEKEKSREQMSSQPKSACGNCYLGDAFRCASCPYLGMPAFKPGEKVLLSDSNLHDA

SEQ ID NO: 11139 - protein, 1343 aa, Homo sapiens
MGLEAQRLPGAEEAPVRVALRVRPLLPKELLHGHQSCLQVEPGLGRVTLGRDRHFGFHVVLAEDAGQEAVYQACVQPLLEAFFEGFNATVFAYGQTGSGKTYTMGEASVASLLEDEQGIVPRAMAEAFKLIDENDLLDCLVHVSYLEVYKEEFRDLLEVGTASRDIQLREDERGNVVLCGVKEVDVEGLDEVLSLLEMGNAARHTGATHLNHLSSRSHTVFTVTLEQRGRAPSRLPRPAPGQLLVSKFHFVDLAGSERVLKTGSTGERLKESIQINSSLLALGNVISALGDPQRRGSHIPYRDSKITRILKDSLGGNAKTVMIACVSPSSSDFDETLNTLNYASRAQNIRNRATVNWRPEAERPPEETASGARGPPRHRSETRIIHRGRRAPGPATASAAAAMRLGAECARYRACTDAAYSLLRELQAEPGLPGAAARKVRDWLCAVEGERSALSSASGPDSGIESASVEDQAAQGAGGRKEDEGAQQLLTLQNQVARLEEENRDFLAALEDAMEQYKLQSDRLREQQEEMVELRLRLELVRPGWGGPRLLNGLPPGSFVPRPHTAPLGGAHAHVLGMVPPACLPGDEVGSEQRGEQVTNGREAGAELLTEVNRLGSGSSAASEEEEEEEEPPRRTLHLRRNRISNCSQRAGARPGSLPERKGPELCLEELDAAIPGSRAVGGSKARVQARQVPPATASEWRLAQAQQKIRELAINIRMKEELIGELVRTGKAAQALNRQHSQRIRELEQEAEQVRAELSEGQRQLRELEGKELQDAGERSRLQEFRRRVAAAQSQVQVLKEKKQATERLVSLSAQSEKRLQELERNVQLMRQQQGQLQRRLREETEQKRRLEAEMSKRQHRVKELELKHEQQQKILKIKTEEIAAFQRKRRSGSNGSVVSLEQQQKIEEQKKWLDQEMEKVLQQRRALEELGEELHKREAILAKKEALMQEKTGLESKRLRSSQALNEDIVRVSSRLEHLEKELSEKSGQLRQGSAQSQQQIRGEIDSLRQEKDSLLKQRLEIDGKLRQGSLLSPEEERTLFQLDEAIEALDAAIEYKNEAITCRQRVLRASASLLSQCEMNLMAKLSYLSSSETRALLCKYFDKVVTLREEQHQQQIAFSELEMQLEEQQRLVYWLEVALERQRLEMDRQLTLQQKEHEQNMQLLLQQSRDHLGEGLADSRRQYEARIQALEKELGRYMWINQELKQKLGGVNAVGHSRGGEKRSLCSEGRQAPGNEDELHLAPELLWLSPLTEGAPRTREETRDLVHAPLPLTWKRSSLCGEEQGSPEELRQREAAEPLVGRVLPVGEAGLPWNFGPLSKPRRELRRASPGMIDVRKNPL

SEQ ID NO: 11140 - protein, 497 aa, Homo sapiens
MSQDGASQFQEVIRQELELSVKKELEKILTTASSHEFEHTKKDLDGFRKLFHRFLQEKGPSVDWGKIQRPPEDSIQPYEKIKARGLPDNISSVLNKLVVVKLNGGLGTSMGCKGPKSLIGVRNENTFLDLTVQQIEHLNKTYNTDVPLVLMNSFNTDEDTKKILQKYNHCRVKIYTFNQSRYPRINKESLLPVAKDVSYSGENTEAWYPPGHGDIYASFYNSGLLDTFIGEGKEYIFVSNIDNLGATVDLYILNHLMNPPNGKRCEFVMEVTNKTRADVKGGTLTQYEGKLRLVEIAQVPKAHVDEFKSVSKFKIFNTNNLWISLAAVKRLQEQNAIDMEIIVNAKTLDGGLNVIQLETAVGAAIKSFENSLGINVPRSRFLPVKTTSDLLLVMSNLYSLNAGSLTMSEKREFPTVPLVKLGSSFTKVQDYLRRFESIPDMLELDHLTVSGDVTFGKNVSLKGTVIIIANHGDRIDIPPGAVLENKIVSGNLRILDH

SEQ ID NO: 11141 - protein, 576 aa, Homo sapiens
MIVFGWAVFLASRSLGQGLLLTLEEHIAHFLGTGGAATTMGNSCICRDDSGTDDSVDTQQQQAENSAVPTADTRSQPRDPVRPPRRGRGPHEPRRKKQNVDGLVLDTLAVIRTLVDNDQEPPYSMITLHEMAETDEGWLDVVQSLIRVIPLEDPLGPAVITLLLDECPLPTKDALQKLTEILNLNGEVACQDSSHPAKHRNTSAVLGCLAEKLAGPASIGLLSPGILEYLLQCLKLQSHPTVMLFALIALEKFAQTSENKLTISESSISDRLVTLESWANDPDYLKRQVGFCAQWSLDNLFLKEGRQLTYEKVNLSSIRAMLNSNDVSEYLKISPHGLEARCDASSFESVRCTFCVDAGVWYYEVTVVTSGVMQIGWATRDSKFLNHEGYGIGDDEYSCAYDGCRQLIWYNARSKPHIHPCWKEGDTVGFLLDLNEKQMIFFLNGNQLPPEKQVFSSTVSGFFAAASFMSYQQCEFNFGAKPFKYPPSMKFSTFNDYAFLTAEEKIILPRHRRLALLKQVSIRENCCSLCCDEVADTQLKPCGHSDLCMDCALQLETCPLCRKEIVSRIRQISHIS

SEQ ID NO: 11142 - protein, 1077 aa, Homo sapiens
MAERGGDGGESERFNPGELRMAQQQALRFRGPAPPPNAVMRGPPPLMRPPPPFGMMRGPPPPPRPPFGRPPFDPNMPPMPPPGGIPPPMGPPHLQRPPFMPPPMSSMPPPPGMMFPPGMPPVTAPGTPALPPTEEIWVENKTPDGKVYYYNARTRESAWTKPDGVKVIQQSELTPMLAAQAQVQAQAQAQAQAQAQAQAQAQAQAQAQAQAQAQAQAQAQAQAQAQAQAQAQAQAQAQAQAQVQAQVQAQVQAQAVGASTPTTSSPAPAVSTSTSSSTPSSTTSTTTTATSVAQTVSTPTTQDQTPSSAVSVATPTVSVSTPAPTATPVQTVPQPHPQTLPPAVPHSVPQPTTAIPAFPPVMVPPFRVPLPGMPIPLPGVLPGMAPPIVPMIHPQVAIAASPATLAGATAVSEWTEYKTADGKTYYYNNRTLESTWEKPQELKEKEKLEEKIKEPIKEPSEEPLPMETEEEDPKEEPIKEIKEEPKEEEMTEEEKAAQKAKPVATAPIPGTPWCVVWTGDERVFFYNPTTRLSMWDRPDDLIGRADVDKIIQEPPHKKGMEELKKLRHPTPTMLSIQKWQFSMSAIKEEQELMEEINEDEPVKAKKRKRDDNKDIDSEKEAAMEAEIKAARERAIVPLEARMKQFKDMLLERGVSAFSTWEKELHKIVFDPRYLLLNPKERKQVFDQYVKTRAEEERREKKNKIMQAKEDFKKMMEEAKFNPRATFSEFAAKHAKDSRFKAIEKMKDREALFNEFVAAARKKEKEDSKTRGEKIKSDFFELLSNHHLDSQSRWSKVKDKVESDPRYKAVDSSSMREDLFKQYIEKIAKNLDSEKEKELERQARIEASLREREREVQKARSEQTKEIDREREQHKREEAIQNFKALLSDMVRSSDVSWSDTRRTLRKDHRWESGSLLEREEKEKLFNEHIEALTKKKREHFRQLLDETSAITLTSTWKEVKKIIKEDPRCIKFSSSDRKKQREFEEYIRDKYITAKADFRTLLKETKFITYRSKKLIQESDQHLKDVEKILQNDKRYLVLDCVPEERRKLIVAYVDDLDRRGPPPPPTASEPTRRSTK

SEQ ID NO: 11143 - protein, 771 aa, Homo sapiens
MTANRLAESLLALSQQEELADLPKDYLLSESEDEGDNDGERKHQKLLEAISSLDGKNRRKLAERSEASLKVSEFNVSSEGSGEKLVLADLLEPVKTSSSLATVKKQLSRVKSKKTVELPLNKEEIERIHREVAFNKTAQVLSKWDPVVLKNRQAEQLVFPLEKEEPAIAPIEHVLSGWKARTPLEQEIFNLLHKNKQPVTDPLLTPVEKASLRAMSLEEAKMRRAELQRARALQSYYEAKARREKKIKSKKYHKVVKKGKAKKALKEFEQLRKVNPAAALEELEKIEKARMMERMSLKHQNSGKWAKSKAIMAKYDLEARQAMQEQLSKNKELTQKLQVASESEEEEGGTEDVEELLVPDVVNEVQMNADGPNPWMLRSCTSDTKEAATQEDPEQLPELEAHGVSESEGEERPVAEEEILLREFEERRSLRKRSELSQDAEPAGSQETKDSGSQEVLSELRVLSQKLKENHQSRKQKASSEGTIPQVQREEPAPEEEEPLLLQRPERVQTLEELEELGKEECFQNKELPRPVLEGQQSERTPNNRPDAPKEKKKKEQMIDLQNLLTTQSPSVKSLAVPTIEELEDEEERNHRQMIKEAFAGDDVIRDFLKEKREAVEASKPKDVDLTLPGWGEWGGVGLKPSAKKRRRFLIKAPEGPPRKDKNLPNVIINEKRNIHAAAHQVRVLPYPFTHHWQFERTIQTPIGSTWNTQRAFQKLTTPKVVTKPGHIINPIKAEDVGYRSSSRSDLSVIQRNPKRITTRHKKQLKKCSVD

SEQ ID NO: 11144 - protein, 1176 aa, Homo sapiens
MAERKGTAKVDFLKKIEKEIQQKWDTERVFEVNASNLEKQTSKGKYFVTFPYPYMNGRLHLGHTFSLSKCEFAVGYQRLKGKCCLFPFGLHCTGMPIKACADKLKREIELYGCPPDFPDEEEEEEETSVKTEDIIIKDKAKGKKSKAAAKAGSSKYQWGIMKSLGLSDEEIVKFSEAEHWLDYFPPLAIQDLKRMGLKVDWRRSFITTDVNPYYDSFVRWQFLTLRERNKIKFGKRYTIYSPKDGQPCMDHDRQTGEGVGPQEYTLLKLKVLEPYPSKLSGLKGKNIFLVAATLRPETMFGQTNCWVRPDMKYIGFETVNGDIFICTQKAARNMSYQGFTKDNGVVPVVKELMGEEILGASLSAPLTSYKVIYVLPMLTIKEDKGTGVVTSVPSDSPDDIAALRDLKKKQALRAKYGIRDDMVLPFEPVPVIEIPGFGNLSAVTICDELKIQSQNDREKLAEAKEKIYLKGFYEGIMLVDGFKGQKVQDVKKTIQKKMIDAGDALIYMEPEKQVMSRSSDECVVALCDQWYLDYGEENWKKQTSQCLKNLETFCEETRRNFEATLGWLQEHACSRTYGLGTHLPWDEQWLIESLSDSTIYMAFYTVAHLLQGGNLHGQAESPLGIRPQQMTKEVWDYVFFKEAPFPKTQIAKEKLDQLKQEFEFWYPVDLRVSGKDLVPNHLSYYLYNHVAMWPEQSDKWPTAVRANGHLLLNSEKMSKSTGNFLTLTQAIDKFSADGMRLALADAGDTVEDANFVEAMADAGILRLYTWVEWVKEMVANWDSLRSGPASTFNDRVFASELNAGIIKTDQNYEKMMFKEALKTGFFEFQAAKDKYRELAVEGMHRELVFRFIEVQTLLLAPFCPHLCEHIWTLLGKPDSIMNASWPVAGPVNEVLIHSSQYLMEVTHDLRLRLKNYMMPAKGKKTDKQPLQKPSHCTIYVAKNYPPWQHTTLSVLRKHFEANNGKLPDNKVIASELGSMPELKKYMKKVMPFVAMIKENLEKMGPRILDLQLEFDEKAVLMENIVYLTNSLELEHIEVKFASEAEDKIREDCCPGKPLNVFRIEPGVSVSLVNPQPSNGHFSTKIEIRQGDNCDSIIRRLMKMNRGIKDLSKVKLMRFDDPLLGPRRVPVLGKEYTEKTPISEHAVFNVDLMSKKIHLTENGIRVDIGDTIIYLVH

SEQ ID NO: 11145 - protein, 823 aa, Homo sapiens
MVNAWFAERVHTIPVCKEGIRGHTESCSCPLQQSPRADNSAPGTPTRKISASEFDRPLRPIVVKDSEGTVSFLSDSEKKEQMPLTPPRFDHDEGDQCSRLLELVKDISSHLDVTALCHKIFLHIHGLISADRYSLFLVCEDSSNDKFLISRLFDVAEGSTLEEVSNNCIRLEWNKGIVGHVAALGEPLNIKDAYEDPRFNAEVDQITGYKTQSILCMPIKNHREEVVGVAQAINKKSGNGGTFTEKDEKDFAAYLAFCGIVLHNAQLYETSLLENKRNQVLLDLASLIFEEQQSLEVILKKIAATIISFMQVQKCTIFIVDEDCSDSFSSVFHMECEELEKSSDTLTREHDANKINYMYAQYVKNTMEPLNIPDVSKDKRFPWTTENTGNVNQQCIRSLLCTPIKNGKKNKVIGVCQLVNKMEENTGKVKPFNRNDEQFLEAFVIFCGLGIQNTQMYEAVERAMAKQMVTLEVLSYHASAAEEETRELQSLAAAVVPSAQTLKITDFSFSDFELSDLETALCTIRMFTDLNLVQNFQMKHEVLCRWILSVKKNYRKNVAYHNWRHAFNTAQCMFAALKAGKIQNKLTDLEILALLIAALSHDLDHRGVNNSYIQRSEHPLAQLYCHSIMEHHHFDQCLMILNSPGNQILSGLSIEEYKTTLKIIKQAILATDLALYIKRRGEFFELIRKNQFNLEDPHQKELFLAMLMTACDLSAITKPWPIQQRIAELVATEFFDQGDRERKELNIEPTDLMNREKKNKIPSMQVGFIDAICLQLYEALTHVSEDCFPLLDGCRKNRQKWQALAEQQEKMLINGESGQAKRN

SEQ ID NO: 11146 - protein, 539 aa, Homo sapiens
MPENVAPRSGATAGAAGGRGKGAYQDRDKPAQIRFSNISAAKAVADAIRTSLGPKGMDKMIQDGKGDVTITNDGATILKQMQVLHPAARMLVELSKAQDIEAGDGTTSVVIIAGSLLDSCTKLLQKGIHPTIISESFQKALEKGIEILTDMSRPVELSDRETLLNSATTSLNSKVVSQYSSLLSPMSVNAVMKVIDPATATSVDLRDIKIVKKLGGTIDDCELVEGLVLTQKVSNSGITRVEKAKIGLIQFCLSAPKTDMDNQIVVSDYAQMDRVLREERAYILNLVKQIKKTGCNVLLIQKSILRDALSDLALHFLNKMKIMVIKDIEREDIEFICKTIGTKPVAHIDQFTADMLGSAELAEEVNLNGSGKLLKITGCASPGKTVTIVVRGSNKLVIEEAERSIHDALCVIRCLVKKRALIAGGGAPEIELALRLTEYSRTLSGMESYCVRAFADAMEVIPSTLAENAGLNPISTVTELRNRHAQGEKTAGINVRKGGISNILEELVVQPLLVSVSALTLATETVRSILKIDDVVNTR

SEQ ID NO: 11147 - protein, 474 aa, Homo sapiens
MRFTFTSRCLALFLLLNHPTPILPAFSNQTYPTIEPKPFLYVVGRKKMMDAQYKCYDRMQQLPAYQGEGPYCNRTWDGWLCWDDTPAGVLSYQFCPDYFPDFDPSEKVTKYCDEKGVWFKHPENNRTWSNYTMCNAFTPEKLKNAYVLYYLAIVGHSLSIFTLVISLGIFVFFRSLGCQRVTLHKNMFLTYILNSMIIIIHLVEVVPNGELVRRDPVSCKILHFFHQYMMACNYFWMLCEGIYLHTLIVVAVFTEKQRLRWYYLLGWGFPLVPTTIHAITRAVYFNDNCWLSVETHLLYIIHGPVMAALVVNFFFLLNIVRVLVTKMRETHEAESHMYLKAVKATMILVPLLGIQFVVFPWRPSNKMLGKIYDYVMHSLIHFQGFFVATIYCFCNNEVQTTVKRQWAQFKIQWNQRWGRRPSNRSARAAAAAAEAGDIPIYICHQELRNEPANNQGEESAEIIPLNIIEQESSA

SEQ ID NO: 11148 - protein, 517 aa, Homo sapiens
MAALGPSSQNVTEYVVRVPKNTTKKYNIMAFNAADKVNFATWNQARLERDLSNKKIYQEEEMPESGAGSEFNRKLREEARRKKYGIVLKEFRPEDQPWLLRVNGKSGRKFKGIKKGGVTENTSYYIFTQCPDGAFEAFPVHNWYNFTPLARHRTLTAEEAEEEWERRNKVLNHFSIMQQRRLKDQDQDEDEEEKEKRGRRKASELRIHDLEDDLEMSSDASDASGEEGGRVPKAKKKAPLAKGGRKKKKKKGSDDEAFEDSDDGDFEGQEVDYMSDGSSSSQEEPESKAKAPQQEEGPKGVDEQSDSSEESEEEKPPEEDKEEEEEKKAPTPQEKKRRKDSSEESDSSEESDIDSEASSALFMAKKKTPPKRERKPSGGSSRGNSRPGTPSAEGGSTSSTLRAAASKLEQGKRVSEMPAAKRLRLDTGPQSLSGKSTPQPPSGKTTPNSGDVQVTEDAVRRYLTRKPMTTKDLLKKFQTKKTGLSSEQTVNVLAQILKRLNPERKMINDKMHFSLKE

SEQ ID NO: 11149 - protein, 825 aa, Homo sapiens
MDVSLCPAKCSFWRIFLLGSVWLDYVGSVLACPANCVCSKTEINCRRPDDGNLFPLLEGQDSGNSNGNASINITDISRNITSIHIENWRSLHTLNAVDMELYTGLQKLTIKNSGLRSIQPRAFAKNPHLRYINLSSNRLTTLSWQLFQTLSLRELQLEQNFFNCSCDIRWMQLWQEQGEAKLNSQNLYCINADGSQLPLFRMNISQCDLPEISVSHVNLTVREGDNAVITCNGSGSPLPDVDWIVTGLQSINTHQTNLNWTNVHAINLTLVNVTSEDNGFTLTCIAENVVGMSNASVALTVYYPPRVVSLEEPELRLEHCIEFVVRGNPPPTLHWLHNGQPLRESKIIHVEYYQEGEISEGCLLFNKPTHYNNGNYTLIAKNPLGTANQTINGHFLKEPFPESTDNFILFDEVSPTPPITVTHKPEEDTFGVSIAVGLAAFACVLLVVLFVMINKYGRRSKFGMKGPVAVISGEEDSASPLHHINHGITTPSSLDAGPDTVVIGMTRIPVIENPQYFRQGHNCHKPDTYVQHIKRRDIVLKRELGEGAFGKVFLAECYNLSPTKDKMLVAVKALKDPTLAARKDFQREAELLTNLQHEHIVKFYGVCGDGDPLIMVFEYMKHGDLNKFLRAHGPDAMILVDGQPRQAKGELGLSQMLHIASQIASGMVYLASQHFVHRDLATRNCLVGANLLVKIGDFGMSRDVYSTDYYRVGGHTMLPIRWMPPESIMYRKFTTESDVWSFGVILWEIFTYGKQPWFQLSNTEVIECITQGRVLERPRVCPKEVYDVMLGCWQREPQQRLNIKEIYKILHALGKATPIYLDILG

SEQ ID NO: 11150 - protein, 61 aa, Homo sapiens
MDPNCSCSPVGSCACAGSCKCKECKCTSCKKSCCSCCPVGCAKCAQGCICKGTSDKCSCCA

SEQ ID NO: 11151 - protein, 799 aa, Homo sapiens
MELNFYKIPDNLPFSTKNLDLSFNPLRHLGSYSFFSFPELQVLDLSRCEIQTIEDGAYQSLSHLSTLILTGNPIQSLALGAFSGLSSLQKLVAVETNLASLENFPIGHLKTLKELNVAHNLIQSFKLPEYFSNLTNLEHLDLSSNKIQSIYCTDLRVLHQMPLLNLSLDLSLNPMNFIQPGAFKEIRLHKLTLRNNFDSLNVMKTCIQGLAGLEVHRLVLGEFRNEGNLEKFDKSALEGLCNLTIEEFRLAYLDYYLDDIIDLFNCLTNVSSFSLVSVTIERVKDFSYNFGWQHLELVNCKFGQFPTLKLKSLKRLTFTSNKGGNAFSEVDLPSLEFLDLSRNGLSFKGCCSQSDFGTTSLKYLDLSFNGVITMSSNFLGLEQLEHLDFQHSNLKQMSEFSVFLSLRNLIYLDISHTHTRVAFNGIFNGLSSLEVLKMAGNSFQENFLPDIFTELRNLTFLDLSQCQLEQLSPTAFNSLSSLQVLNMSHNNFFSLDTFPYKCLNSLQVLDYSLNHIMTSKKQELQHFPSSLAFLNLTQNDFACTCEHQSFLQWIKDQRQLLVEVERMECATPSDKQGMPVLSLNITCQMNKTIIGVSVLSVLVVSVVAVLVYKFYFHLMLLAGCIKYGRGENIYDAFVIYSSQDEDWVRNELVKNLEEGVPPFQLCLHYRDFIPGVAIAANIIHEGFHKSRKVIVVVSQHFIQSRWCIFEYEIAQTWQFLSSRAGIIFIVLQKVEKTLLRQQVELYRLLSRNTYLEWEDSVLGRHIFWRRLRKALLDGKSWNPEGTVGTGCNWQEATSI

SEQ ID NO: 11152 - protein, 1434 aa, Homo sapiens
MYERHKRRYSLCDISKVDRTVDVVLLKINRENWCTIEPCPDAASLLASKQSPECENFLDVGLGRECTSKQGVLKRESGSDSDLFHSPSDDMDSIIFPKPEEEHLACDITGSSSSTDDTASLDRHSSHGSDVSLSQILKPNRSRDRQSLDGFYSHGMGAEGRESESEPADPGDVEEEEMDSITEVPANCSVLRSSMRSLSPFRRHSWGPGKNAASDAEMNHRSFSLEGLTGGAGVGNKPSSSLEVSSANAEELRHPFSGEERVDSLVSLSEEDLESDQREHRMFDQQICHRSKQQGFNYCTSAISSPLTKSISLMTISHPGLDNSRPFHSTFHNTSANLTESITEENYNFLPHSPSKKDSEWKSGTKVSRTFSYIKNKMSSSKKSKEKEKEKDKIKEKEKDSKDKEKDKKTVNGHTFSSIPVVGPISCSQCMKPFTNKDAYTCANCSAFVHKGCRESLASCAKVKMKPKGSLQAHDTSSLPTVIMRNKPSQPKERPRSAVLLVDETATTPIFANRRSQQSVSLSKSVSIQNITGVGNDENMSNTWKFLSHSTDSLNKISKVNESTESLTDEGVGTDMNEGQLLGDFEIESKQLEAESWSRIIDSKFLKQQKKDVVKRQEVIYELMQTEFHHVRTLKIMSGVYSQGMMADLLFEQQMVEKLFPCLDELISIHSQFFQRILERKKESLVDKSEKNFLIKRIGDVLVNQFSGENAERLKKTYGKFCGQHNQSVNYFKDLYAKDKRFQAFVKKKMSSSVVRRLGIPECILLVTQRITKYPVLFQRILQCTKDNEVEQEDLAQSLSLVKDVIGAVDSKVASYEKKVRLNEIYTKTDSKSIMRMKSGQMFAKEDLKRKKLVRDGSVFLKNAAGRLKEVQAVLLTDILVFLQEKDQKYIFASLDQKSTVISLKKLIVREVAHEEKGLFLISMGMTDPEMVEVHASSKEERNSWIQIIQDTINTLNRDEDEGIPSENEEEKKMLDTRARELKEQLHQKDQKILLLLEEKEMIFRDMAECSTPLPEDCSPTHSPRVLFRSNTEEALKGGPLMKSAINEVEILQGLVSGNLGGTLGPTVSSPIEQDVVGPVSLPRRAETFGGFDSHQMNASKGGEKEEGDDGQDLRRTESDSGLKKGGNANLVFMLKRNSEQVVQSVVHLYELLSALQGVVLQQDSYIEDQKLVLSERALTRSLSRPSSLIEQEKQRSLEKQRQDLANLQKQQAQYLEEKRRREREWEARERELREREALLAQREEEVQQGQQDLEKEREELQQKKGTYQYDLERLRAAQKQLEREQEQLRREAERLSQRQTERDLCQVSHPHTKLMRIPSFFPSPEEPPSPSAPSIAKSGSLDSELSVSPKRNSISRTHKDKGPFHILSSTSQTNKGPEGQSQAPASTSASTRLFGLTKPKEKKEKKKKNKTSRSQPGDGPASEVSAEGEEIFC

SEQ ID NO: 11153 - protein, 2813 aa, Homo sapiens
MKLNPQQAPLYGDCVVTVLLAEEDKAEDDVVFYLVFLGSTLRHCTSTRKVSSDTLETIAPGHDCCETVKVQLCASKEGLPVFVVAEEDFHFVQDEAYDAAQFLATSAGNQQALNFTRFLDQSGPPSGDVNSLDKKLVLAFRHLKLPTEWNVLGTDQSLHDAGPRETLMHFAVRLGLLRLTWFLLQKPGGRGALSIHNQEGATPVSLALERGYHKLHQLLTEENAGEPDSWSSLSYEIPYGDCSVRHHRELDIYTLTSESDSHHEHPFPGDGCTGPIFKLMNIQQQLMKTNLKQMDSLMPLMMTAQDPSSAPETDGQFLPCAPEPTDPQRLSSSEETESTQCCPGSPVAQTESPCDLSSIVEEENTDRSCRKKNKGVERKGEEVEPAPIVDSGTVSDQDSCLQSLPDCGVKGTEGLSSCGNRNEETGTKSSGMPTDQESLSSGDAVLQRDLVMEPGTAQYSSGGELGGISTTNVSTPDTAGEMEHGLMNPDATVWKNVLQGGESTKERFENSNIGTAGASDVHVTSKPVDKISVPNCAPAASSLDGNKPAESSLAFSNEETSTEKTAETETSRSREESADAPVDQNSVVIPAAAKDKISDGLEPYTLLAAGIGEAMSPSDLALLGLEEDVMPHQNSETNSSHAQSQKGKSSPICSTTGDDKLCADSACQQNTVTSSGDLVAKLCDNIVSESESTTARQPSSQDPPDASHCEDPQAHTVTSDPVRDTQERADFCPFKVVDNKGQRKDVKLDKPLTNMLEVVSHPHPVVPKMEKELVPDQAVISDSTFSLANSPGSESVTKDDALSFVPSQKEKGTATPELHTATDYRDGPDGNSNEPDTRPLEDRAVGLSTSSTAAELQHGMGNTSLTGLGGEHEGPAPPAIPEALNIKGNTDSSLQSVGKATLALDSVLTEEGKLLVVSESSAAQEQDKDKAVTCSSIKENALSSGTLQEEQRTPPPGQDTQQFHEKSISADCAKDKALQLSNSPGASSAFLKAETEHNKEVAPQVSLLTQGGAAQSLVPPGASLATESRQEALGAEHNSSALLPCLLPDGSDGSDALNCSQPSPLDVGVKNTQSQGKTSACEVSGDVTVDVTGVNALQGMAEPRRENISHNTQDILIPNVLLSQEKNAVLGLPVALQDKAVTDPQGVGTPEMIPLDWEKGKLEGADHSCTMGDAEEAQIDDEAHPVLLQPVAKELPTDMELSAHDDGAPAGVREVMRAPPSGRERSTPSLPCMVSAQDAPLPKGADLIEEAASRIVDAVIEQVKAAGALLTEGEACHMSLSSPELGPLTKGLESAFTEKVSTFPPGESLPMGSTPEEATGSLAGCFAGREEPEKIILPVQGPEPAAEMPDVKAEDEVDFRASSISEEVAVGSIAATLKMKQGPMTQAINRENWCTIEPCPDAASLLASKQSPECENFLDVGLGRECTSKQGVLKRESGSDSDLFHSPSDDMDSIIFPKPEEEHLACDITGSSSSTDDTASLDRHSSHGSDVSLSQILKPNRSRDRQSLDGFYSHGMGAEGRESESEPADPGDVEEEEMDSITEVPANCSVLRSSMRSLSPFRRHSWGPGKNAASDAEMNHRSSMRVLGDVVRRPPIHRRSFSLEGLTGGAGVGNKPSSSLEVSSANAEELRHPFSGEERVDSLVSLSEEDLESDQREHRMFDQQICHRSKQQGFNYCTSAISSPLTKSISLMTISHPGLDNSRPFHSTFHNTSANLTESITEENYNFLPHSPSKKDSEWKSGTKVSRTFSYIKNKMSSSKKSKEKEKEKDKIKEKEKDSKDKEKDKKTVNGHTFSSIPVVGPISCSQCMKPFTNKDAYTCANCSAFVHKGCRESLASCAKVKMKQPKGSLQAHDTSSLPTVIMRNKPSQPKERPRSAVLLVDETATTPIFANRRSQQSVSLSKSVSIQNITGVGNDENMSNTWKFLSHSTDSLNKISKVNESTESLTDEGVGTDMNEGQLLGDFEIESKQLEAESWSRIIDSKFLKQQKKDVVKRQEVIYELMQTEFHHVRTLKIMSGVYSQGMMADLLFEQQMVEKLFPCLDELISIHSQFFQRILERKKESLVDKSEKNFLIKRIGDVLVNQFSGENAERLKKTYGKFCGQHNQSVNYFKDLYAKDKRFQAFVKKKMSSSVVRRLGIPECILLVTQRITKYPVLFQRILQCTKDNEVEQEDLAQSLSLVKDVIGAVDSKVASYEKKVRLNEIYTKTDSKSIMRMKSGQMFAKEDLKRKKLVRDGSVFLKNAAGRLKEVQAVLLTDILVFLQEKDQKYIFASLDQKSTVISLKKLIVREVAHEEKGLFLISMGMTDPEMVEVHASSKEERNSWIQIIQDTINTLNRDEDEGIPSENEEEKKMLDTRARELKEQLHQKDQKILLLLEEKEMIFRDMAECSTPLPEDCSPTHSPRVLFRSNTEEALKGGPLMKSAINEVEILQGLVSGNLGGTLGPTVSSPIEQDVVGPVSLPRRAETFGGFDSHQMNASKGGEKEEGDDGQDLRRTESDSGLKKGGNANLVFMLKRNSEQVVQSVVHLYELLSALQGVVLQQDSYIEDQKLVLSERALTRSLSRPSSLIEQEKQRSLEKQRQDLANLQKQQAQYLEEKRRREREWEARERELREREALLAQREEEVQQGQQDLEKEREELQQKKGTYQYDLERLRAAQKQLEREQEQLRREAERLSQRQTERDLCQVSHPHTKLMRIPSFFPSPEEPPSPSAPSIAKSGSLDSELSVSPKRNSISRTHKDKGPFHILSSTSQTNKGPEGQSQAPASTSASTRLFGLTKPKEKKEKKKKNKTSRSQPGDGPASEVSAEGEEIFC

SEQ ID NO: 11154 - protein, 478 aa, Homo sapiens
MASTTTCTRFTDEYQLFEELGKGAFSVVRRCMKIPTGQEYAAKIINTKKLSARDHQKLEREARICRLLKHPNIVRLHDSISEEGFHYLVFDLVTGGELFEDIVAREYYSEADASHCIQQILESVNHCHLNGIVHRDLKPENLLLASKSKGAAVKLADFGLAIEVQGDQQAWFGFAGTPGYLSPEVLRKDPYGKPVDMWACGVILYILLVGYPPFWDEDQHRLYQQIKAGAYDFPSPEWDTVTPEAKDLINKMLTINPAKRITASEALKHPWICQRSTVASMMHRQETVDCLKKFNARRKLKGAILTTMLATRNFSAAKSLLKKPDGVKESTESSNTTIEDEDVKARKQEIIKVTEQLIEAINNGDFEAYTKICDPGLTAFEPEALGNLVEGMDFHRFYFENALSKSNKPIHTIILNPHVHLVGDDAACIAYIRLTQYMDGSGMPKTMQSEETRVWHRRDGKWQNVHFHRSGSPTVPIN

SEQ ID NO: 11155 - protein, 1060 aa, Homo sapiens
MDSGAGGRRCPEAALLILGPPRMEHLRHSPGPGGQRLLLPSMLLALLLLLAPSPGHATRVVYKVPEEQPPNTLIGSLAADYGFPDVGHLYKLEVGAPYLRVDGKTGDIFTTETSIDREGLRECQNQLPGDPCILEFEVSITDLVQNGSPRLLEGQIEVQDINDNTPNFASPVITLAIPENTNIGSLFPIPLASDRDAGPNGVASYELQAGPEAQELFGLQVAEDQEEKQPQLIVMGNLDRERWDSYDLTIKVQDGGSPPRASSALLRVTVLDTNDNAPKFERPSYEAELSENSPIGHSVIQVKANDSDQGANAEIEYTFHQAPEVVRRLLRLDRNTGLITVQGPVDREDLSTLRFSVLAKDRGTNPKSARAQVVVTVKDMNDNAPTIEIRGIGLVTHQDGMANISEDVAEETAVALVQVSDRDEGENAAVTCVVAGDVPFQLRQASETGSDSKKKYFLQTTTPLDYEKVKDYTIEIVAVDSGNPPLSSTNSLKVQVVDVNDNAPVFTQSVTEVAFPENNKPGEVIAEITASDADSGSNAELVYSLEPEPAAKGLFTISPETGEIQVKTSLDREQRESYELKVVAADRGSPSLQGTATVLVNVLDCNDNDPKFMLSGYNFSVMENMPALSPVGMVTVIDGDKGENAQVQLSVEQDNGDFVIQNGTGTILSSLSFDREQQSTYTFQLKAVDGGVPPRSAYVGVTINVLDENDNAPYITAPSNTSHKLLTPQTRLGETVSQVAAEDFDSGVNAELIYSIAGGNPYGLFQIGSHSGAITLEKEIERRHHGLHRLVVKVSDRGKPPRYGTALVHLYVNETLANRTLLETLLGHSLDTPLDIDIAGDPEYERSKQRGNILFGVVAGVVAVALLIALAVLVRYCRQREAKSGYQAGKKETKDLYAPKPSGKASKGNKSKGKKSKSPKPVKPVEDEDEAGLQKSLKFNLMSDAPGDSPRIHLPLNYPPGSPDLGRHYRSNSPLPSIQLQPQSPSASKKHQVVQDLPPANTFVGTGDTTSTGSEQYSDYSYRTNPPKYPSKQVGQPFQLSTPQPLPHPYHGAIWTEVWE

SEQ ID NO: 11156 - protein, 305 aa, Homo sapiens
MSRELAPLLLLLLSIHSALAMRICSFNVRSFGESKQEDKNAMDVIVKVIKRCDIILVMEIKDSNNRICPILMEKLNRNSRRGITYNYVISSRLGRNTYKEQYAFLYKEKLVSVKRSYHYHDYQDGDADVFSREPFVVWFQSPHTAVKDFVIIPLHTTPETSVKEIDELVEVYTDVKHRWKAENFIFMGDFNAGCSYVPKKAWKNIRLRTDPRFVWLIGDQEDTTVKKSTNCAYDRIVLRGQEIVSSVVPKSNSVFDFQKAYKLTEEEALDVSDHFPVEFKLQSSRAFTNSKKSVTLRKKTKSKRS

SEQ ID NO: 11157 - protein, 932 aa, Homo sapiens
MAALQKLPHCRKLVLLCFLLATLWEARAGQIRYSVREEIDRGSFVGNIAKDLGLEPLALAEQGVRIVSRGRSQLFALNPRSGSLVTANRIDREELCAQSAPCLLNFNILLEDKLTIYSVEVEITDINDNAPRFGVEELELKISETTTPGFRIPLKNAHDADVGENALQKYALNPNDHFSLDVRRGADGNKYPELVLERSLDREEEAVHHLVLVASDGGDPVLSGTSRICVKVLDANDNAPVFTQPEYRISIPENTLVGTRILTVTATDADEGYYAQVVYFLEKSPGETSEVFELKSTSGELTIIKDLDYEDATFHEIDIEAQDGPGLLTRAKVIVTVLDVNDNAPEFYMTSATSSVSEDSLPGTIIGLFNVHDRDSGQNAFTTCSLPEDLPFKLEKSVDNYYRLVTTRALDREQFSFYNITLTAKDGGNPSLSTDAHILLQVADINDNAPAFSRTSYSTYIPENNPRGASVFSVTAHDPDSNDNAHVTYSFAEDTVQGAPLSSYISINSDTGVLYALRSFDYEQLRDLQVWVIARDSGNPPLSSNVSLSLFVLDQNDNAPEILYPAFPTDGSTGVELAPRSAEPGYLVTKVVAVDRDSGQNAWLSYHLLKASEPGLFSVGLHTGEVRTARALLDRDALKQSLVVAIQDHGQPPLSATVTLTVAVADRIPDILADLGSLEPSAIPNDSDLTLYLVVAVAAVSCVFLAFVIVLLAHRLRRWHKSRLLQASGGSLTGMQSSHFVGVDGVRAFLQTYSHEVSLTADSRKSHLIFPQPNYADTLISQESCEKKDFLSAPQSLLEEEREETFSQQAPPNTDWRFSQAQRPGTSGSQNGDDTGTWPNNQFDTEMLQAMILASASEAADGSSTLGGGAGTMGLSARYGPQFTLQHVPDYRQNVYIPGSNATLTNAAGKRDGKAPAGGNGNKKKSGKKEKK

SEQ ID NO: 11158 - protein, 154 aa, Homo sapiens
MARRAGGARMFGSLLLFALLAAGVAPLSWDLPEPRSRASKIRVHSRGNLWATGHFMGKKSLEPSSPSPLGTAPHTSLRDQRLQLSHDLLGILLLKKALGVSLSRPAPQIQEAAGTNTAEMTPIMGQTQQRGLDCAHPGKVLNGTLLMAPSGCKS

SEQ ID NO: 11159 - protein, 199 aa, Homo sapiens
MDGQKKNWKDKVVDLLYWRDIKKTGVVFGASLFLLLSLTVFSIVSVTAYIALALLSVTISFRIYKGVIQAIQKSDEGHPFRAYLESEVAISEELVQKYSNSALGHVNCTIKELRRLFLVDDLVDSLKFAVLMWVFTYVGALFNGLTLLILALISLFSVPVIYERHQAQIDHYLGLANKNVKDAMAKIQAKIPGLKRKAE

SEQ ID NO: 11160 - protein, 314 aa, Homo sapiens
MSPGEKLDPIPDSFILQPPVFHPVVPYVTTIFGGLHAGKMVMLQGVVPLDAHRFQVDFQCGCSLCPRPDIAFHFNPRFHTTKPHVICNTLHGGRWQREARWPHLALRRGSSFLILFLFGNEEVKVSVNGQHFLHFRYRLPLSHVDTLGIFGDILVEAVGFLNINPFVEGSREYPAGHPFLLMSPRLEVPCSHALPQGLSPGQVIIVRGLVLQEPKHFTVSLRDQAAHAPVTLRASFADRTLAWISRWGQKKLISAPFLFYPQRFFEVLLLFQEGGLKLALNGQGLGATSMNQQALEQLRELRISGSVQLYCVHS

SEQ ID NO: 11161 - protein, 99 aa, Homo sapiens
MKVSAALLCLLLMAATFSPQGLAQPDSVSIPITCCFNVINRKIPIQRLESYTRITNIQCPKEAVIFKTKRGKEVCADPKERWVRDSMKHLDQIFQNLKP

SEQ ID NO: 11162 - protein, 47 aa, Homo sapiens
MKASAALLCLLLTAAAFSPQGLAQPASRPNWTRRSVLTPHRSGSRTL

SEQ ID NO: 11163 - protein, 419 aa, Homo sapiens
MESISMMGSPKSLSETFLPNGINGIKDARKVTVGVIGSGDFAKSLTIRLIRCGYHVVIGSRNPKFASEFFPHVVDVTHHEDALTKTNIIFVAIHREHYTSLWDLRHLLVGKILIDVSNNMRINQYPESNAEYLASLFPDSLIVKGFNVVSAWALQLGPKDASRQVYICSNNIQARQQVIELARQLNFIPIDLGSLSSAREIENLPLRLFTLWRGPVVVAISLATFFFLYSFVRDVIHPYARNQQSDFYKIPIEIVNKTLPIVAITLLSLVYLAGLLAAAYQLYYGTKYRRFPPWLETWLQCRKQLGLLSFFFAMVHVAYSLCLPMRRSERYLFLNMAYQQVHANIENSWNEEEVWRIEMYISFGIMSLGLLSLLAVTSIPSVSNALNWREFSFIQIFCSFADTQTELELEFVFLLTLLL

SEQ ID NO: 11164 - protein, 686 aa, Homo sapiens
MVFSRRGGLGARDLLLWLLLLAAWEVGSGQLHYSIPEEAKHGTFVGRVAQDLGLELAELVPRLFRVASKTHRDLLEVNLQNGILFVNSRIDREELCQWSAECSIHLELIADRPLQVFHVEVKVKDINDNPPVFRGREQIIFIPESRLLNSRFPIEGAADADIGANALLTYTLSPSDYFSLDVEASDELSKSLWLELRKYLDREETPELHLLLTATDGGKPELQGTVELLITVLDVNDNAPLFDQAVYRVHLLETTANGTLVTTLNASDADEGVNGEVVFSFDSGISRDIQEKFKVDSSSGEIRLIDKLDYEETKSYEIQVKAVDKGSPPMSNHCKVLVKVLDVNDNAPELAVTSLYLPIREDAPLSTVIALITVSDRDSGANGQVTCSLMPHVPFKLVSTFKNYYSLVLDSALDRESLSVYELVVTARDGGSPSLWATARVSVEVADVNDNAPAFAQPEYTVFVKENNPPGCHIFTVSARDADAQENALVSYSLVERRVGERALSNYVSVHAESGKVYALQPLDHEELELLQFQPRQPNPDWRYSASLRAGMHSSVHLEEAGILRAGPGGPDQQWPTVSSATPEPEAGEVSPPVGAGVNSNSWTFKYGPGNPKQSGPGELPDKFIIPGSPAIISIRQEPTNSQIDKSDFITFGKKEETKKKKKKKKGNKTQEKKEKGNSTTDNSDQ

SEQ ID NO: 11165 - protein, 583 aa, Homo sapiens
MKLLHVFLLFLCFHLRFCKVTYTSQEDLVEKKCLAKKYTHLSCDKVFCQPWQRCIEGTCVCKLPYQCPKNGTAVCATNRRSFPTYCQQKSLECLHPGTKFLNNGTCTAEGKFSVSLKHGNTDSEGIVEVKLVDQDKTMFICKSSWSMREANVACLDLGFQQGADTQRRFKLSDLSINSTECLHVHCRGLETSLAECTFTKRRTMGYQDFADVVCYTQKADSPMDDFFQCVNGKYISQMKACDGINDCGDQSDELCCKACQGKGFHCKSGVCIPSQYQCNGEVDCITGEDEVGCAGFASVTQEETEILTADMDAERRRIKSLLPKLSCGVKNRMHIRRKRIVGGKRAQLGDLPWQVAIKDASGITCGGIYIGGCWILTAAHCLRASKTHRYQIWTTVVDWIHPDLKRIVIEYVDRIIFHENYNAGTYQNDIALIEMKKDGNKKDCELPRSIPACVPWSPYLFQPNDTCIVSGWGREKDNERVFSLQWGEVKLISNCSKFYGNRFYEKEMECAGTYDGSIDACKGDSGGPLVCMDANNVTYVWGVVSWGENCGKPEFPGVYTKVANYFDWISYHVGRPFISQYNV

SEQ ID NO: 11166 - protein, 591 aa, Homo sapiens
MKLLHVFLLFLCFHLRFCKVTYTSQEDLVEKKCLAKKYTHLSCDKVFCQPWQRCIEGTCVCKLPYQCPKNGTAVCATNRRSFPTYCQQKSLECLHPGTKFLNNGTCTAEGKFSVSLKHGNTDSEGIVEVKLVDQDKTMFICKSSWSMREANVACLDLGFQQGADTQRRFKLSDLSINSTECLHVHCRGLETSLAECTFTKRRTMGYQDFADVVCYTQKADSPMDDFFQCVNGKYISQMKACDGINDCGDQSDELCCKACQGKGFHCKSGVCIPSQYQCNGEVDCITGEDEVGCAAARHPTIQGFASVTQEETEILTADMDAERRRIKSLLPKLSCGVKNRMHIRRKRIVGGKRAQLGDLPWQVAIKDASGITCGGIYIGGCWILTAAHCLRASKTHRYQIWTTVVDWIHPDLKRIVIEYVDRIIFHENYNAGTYQNDIALIEMKKDGNKKDCELPRSIPACVPWSPYLFQPNDTCIVSGWGREKDNERVFSLQWGEVKLISNCSKFYGNRFYEKEMECAGTYDGSIDACKGDSGGPLVCMDANNVTYVWGVVSWGENCGKPEFPGVYTKVANYFDWISYHVGRPFISQYNV

SEQ ID NO: 11167 - protein, 483 aa, Homo sapiens
MSYPQGYLYQPSASLALYSCPAYSTSVISGPRTDELGRSSSGSAFSPYAGSTAFTAPSPGYNSHLQYGADPAAAAAAAFSSYVGSPYDHTPGMAGSLGYHPYAAPLGSYPYGDPAYRKNATRDATATLKAWLNEHRKNPYPTKGEKIMLAIITKMTLTQVSTWFANARRRLKKENKMTWTPRNRSEDEEEEENIDLEKNDEDEPQKPEDKGDPEGPEAGGAEQKAASGCERLQGPPTPAGKETEGSLSDSDFKEPPSEGRLDALQGPPRTGGPSPAGPAAARLAEDPAPHYPAGAPAPGPHPAAGEVPPGPGGPSVIHSPPPPPPPAVLAKPKLWSLAEIATSSDKVKDGGGGNEGSPCPPCPGPIAGQALGGSRASPAPAPSRSPSAQCPFPGGTVLSRPLYYTAPFYPGYTNYGSFGHLHGHPGPGPGPTTGPGSHFNGLNQTVLNRADALAKDPKMLRSQSQLDLCKDSPYELKKGMSDI

SEQ ID NO: 11168 - protein, 226 aa, Homo sapiens
METVVIVAIGVLATIFLASFAALVLVCRQRYCRPRDLLQRYDSKPIVDLIGAMETQSEPSELELDDVVITNPHIEAILENEDWIEDASGLMSHCIAILKICHTLTEKLVAMTMGSGAKMKTSASVSDIIVVAKRISPRVDDVVKSMYPPLDPKLLDARTTALLLSVSHLVLVTRNACHLTGGLDWIDQSLSAAEEHLEVLREAALASEPDKGLPGPEGFLQEQSAI

SEQ ID NO: 11169 - protein, 336 aa, Homo sapiens
MLQRGLWPWRTRLLPTPGTWRPARPWPLPPPPQVLRVKLCGNVKYYQSHHYSTVVPPDEITVIYRHGLPLVTLTLPSRKERCQFVVKPMLSTVGSFLQDLQNEDKGIKTAAIFTADGNMISASTLMDILLMNDFKLVINKIAYDVQCPKREKPSNEHTAEMEHMKSLVHRLFTILHLEESQKKREHHLLEKIDHLKEQLQPLEQVKAGIEAHSEAKTSGLLWAGLALLSIQGGALAWLTWWVYSWDIMEPVTYFITFANSMVFFAYFIVTRQDYTYSAVKSRQFLQFFHKKSKQQHFDVQQYNKLKEDLAKAKESLKQARHSLCLQMQVEELNEKN

SEQ ID NO: 11170 - protein, 292 aa, Homo sapiens
MNPFWSMSTSSVRKRSEGEEKTLTGDVKTSPPRTAPKKQLPSIPKNALPITKPTSPAPAAQSTNGTHASYGPFYLEYSLLAEFTLVVKQKLPGVYVQPSYRSALMWFGVIFIRHGLYQDGVFKFTVYIPDNYPDGDCPRLVFDIPVFHPLVDPTSGELDVKRAFAKWRRNHNHIWQVLMYARRVFYKIDTASPLNPEAAVLYEKDIQLFKSKVVDSVKVCTARLFDQPKIEDPYAISFSPWNPSVHDEAREKMLTQKKPEEQHNKSVHVAGLSWVKPGSVQPFSKEEKTVAT

SEQ ID NO: 11171 - protein, 117 aa, Homo sapiens [sequence omitted]

SEQ ID NO: 11172 - protein, 99 aa, Homo sapiens
MSTAQSLKSVDYEVFGRVQGVCFRMYTEDEARKIGVVGWVKNTSKGTVTGQVQGPEDKVNSMKSWLSKVGSPSSRIDRTNFSNEKTISKLEYSNFSIRY

SEQ ID NO: 11173 - protein, 494 aa, Homo sapiens
MGRKKKKQLKPWCWYCNRDFDDEKILIQHQKAKHFKCHICHKKLYTGPGLAIHCMQVHKETIDAVPNAIPGRTDIELEIYGMEGIPEKDMDERRRLLEQKTQESQKKKQQDDSDEYDDDDSAASTSFQPQPVQPQQGYIPPMAQPGLPPVPGAPGMPPGIPPLMPGVPPLMPGMPPVMPGMPPGLHHQRKYTQSFCGENIMMPMGGMMPPGPGIPPLMPGMPPGMPPPVPRPGIPPMTQAQAVSAPGILNRPPAPTATVPAPQPPVTKPLFPSAGQMGTPVTSSSTASSNSESLSASSKALFPSTAQAQAAVQGPVGTDFKPLNSTPATTTEPPKPTFPAYTQSTASTTSTTNSTAAKPAASITSKPATLTTTSATSKLIHPDEDISLEERRAQLPKYQRNLPRPGQAPIGNPPVGPIGGMMPPQPGIPQQQGMRPPMPPHGQYGGHHQGMPGYLPGAMPPYGQGPPMVPPYQGGPPRPPMGMRPPVMSQGGRY

SEQ ID NO: 11174 - protein, 493 aa, Homo sapiens
MWSRRQGRLRPTVCGVEELRRRRREREAALRKARREQQLVSKRLLRNDAPEEAGEGCVAAILGETEVQQFLRQAQRGTEEKEREGALVSLRRGLQHPETQQTFIRLEGSMRTLVGLLTSNQALLQLEAARCLHELSHSEQSTVAEACLPATSYLLTYLSSHSSDFIELCLYTLGNLIVESEAVRRQLLPQGIVPALAACIQSPHVAVLEALGYALSQLLQAEEAPEKIIPSILASTLPQHMLQMLQPGPKLNPGVAVEFAWCLHYIICSQVSNPLLIGHGALSTLGLLLLDLAGAVQKTEDAGLELLACPVLRCLSNLLTEAAVETVGGQMQLRDERVVAALFILLQFFFQKQPSLLPEGLWLLNNLTANSPSFCTSLLSLDLIEPLLQLLPVSNVVSVMVLTVLCNVAEKGPAYCQRLWPGPLLPALLHTLAFSDTEVVGQSLELLHLLFLYQPEAVQVFLQQSGLQALERHQEEAQLQDRVYALQQTALQG

SEQ ID NO: 11175 - protein, 948 aa, Homo sapiens
MNLGDGLKLETELLDGKTKLILSPYEHKSKISVKMGNKAKIAKCPLRTKTGHILKSTQDTCIGSEKLLQKKPVGSETSQAKGEKNGMTFSSTKDLCKQCIDKDCLHIQKEISPATPNMQKTRNTVNTSLVGKQKPHKKHITAENMKSSLVCLTQDQLQQILMTVNQGNRSLSLTENGKEAKSQYSLYLNSISNQPKDENIMGLFKKTEMVSSVPAENKSVLNEHQETSKQCEQKIAIENEWKPADIFSTLGERECDRSSLEAKKAQWRKELDEQVALKKKEKEVSEKWNDPWKKSESDKIIWEKHQILDQSRETVLLEHPFSAVKQELQRKWIEELNKQIEDDRQRKIEEKIIYSKGEEHDRWAMHFDSLKSYPGSQSQLFSQSTHKQPEYFCVSPDTQELADVSSVCTPTTGSQVEPSEEEHIAKPIKDVVMANSKKTNFLRSMTALLDPAQIEERDRRRQKQLEHQKAITAQVEEKRRKKQLEEEQRKKEEQEEELRLAQEREEMQKQYEEDILKQKQKEEIMTLKTNELFQTMQRAQELAQRLKQEQRIRELAQKGHDTSRLIKNLGVDTIQMEYNASNISNSRHDSDEISGKMNTYMNSTTSKKDTGVQTDDLNIGIFTNAESHCGSLMERDITNCSSPEISAELIGQFSTKKNKQELTQDKGASLEKENNRCNDQCNQFTRIEKQTKHMKKYPKRPDWNINKPPKRYIPASEKYPKQLQKQREEKKVRRQMELLHLVEKNNPGHLSQNRGISPEIFHSSHQETESKLRWHLVKKEEEPLNIHSFSKERSPSSPVPVVKNRTQQTQNTLHLPLKNSSYERENLISGSNQTELSSGISESSHFIPYVRTNEIYYLDPDAPLSGPSTQDPQYQNSQDCGQKRQLFDSDCVRDPLLNPNMVKNRDRQQAILKGLSELRQGLLQKQKELESSLLPLAENQEESFGSSF

SEQ ID NO: 11176 - protein, 463 aa, Homo sapiens
MGRKKKKQLKPWCWYCNRDFDDEKILIQHQKAKHFKCHICHKKLYTGPGLAIHCMQVHKETIDAVPNAIPGRTDIELEIYGMEGIPEKDMDERRRLLEQKTQESQKKKQQDDSDEYDDDDSAASTSFQPQPVQPQQGYIPPMAQPGLPPVPGAPGMPPGIPPLMPGVPPLMPGMPPVMPGMPPGLHHQRKYTQSFCGENIMMPMGGMMPPGPGIPPLMPGMPPGMPPPVPRPGIPPMTQAQAVSAPGILNRPPAPTATVPAPQPPVTKPLFPSAGQAQAAVQGPVGTDFKPLNSTPATTTEPPKPTFPAYTQSTASTTSTTNSTAAKPAASITSKPATLTTTSATSKLIHPDEDISLEERRAQLPKYQRNLPRPGQAPIGNPPVGPIGGMMPPQPGIPQQQGMRPPMPPHGQYGGHHQGMPGYLPGAMPPYGQGPPMVPPYQGGPPRPPMGMRPPVMSQGGRY

SEQ ID NO: 11177 - protein, 652 aa, Homo sapiens
MGKKHKKHKSDKHLYEEYVEKPLKLVLKVGGNEVTELSTGSSGHDSSLFEDKNDHDKHKDRKRKKRKKGEKQIPGEEKGRKRRRVKEDKKKRDRDRVENEAEKDLQCHAPVRLDLPPEKPLTSSLAKQEEVEQTPLQEALNQLMRQLQRKDPSAFFSFPVTDFIAPGYSMIIKHPMDFSTMKEKIKNNDYQSIEELKDNFKLMCTNAMIYNKPETIYYKAAKKLLHSGMKILSQERIQSLKQSIDFMADLQKTRKQKDGTDTSQSGEDGGCWQREREDSGDAEAHAFKSPSKENKKKDKDMLEDKFKSNNLEREQEQLDRIVKESGGKLTRRLVNSQCEFERRKPDGTTTLGLLHPVDPIVGEPGYCPVRLGMTTGRLQSGVNTLQGFKEDKRNKVTPVLYLNYGPYSSYAPHYDSTFANISKDDSDLIYSTYGEDSDLPSDFSIHEFLATCQDYPYVMADSLLDVLTKGGHSRTLQEMEMSLPEDEGHTRTLDTAKEMEQITEVEPPGRLDSSTQDRLIALKAVTNFGVPVEVFDSEEAEIFQKKLDETTRLLRELQEAQNERLSTRPPPNMICLLGPSYREMHLAEQVTNNLKELAQQVTPGDIVSTYGVRKAMGISIPSPVMENNFVDLTEDTEEPKKTDVAECGPGGS

SEQ ID NO: 11178 - protein, 336 aa, Homo sapiens
MLPAVAVSEPVVLRFMIFCRLLAKMANNDAVLKRLEQKGAEADQIIEYLKQQVSLLKEKAILQATLREEKKLRVENAKLKKEIEELKQELIQAEIQNGVKQIPFPSGTPLHANSMVSENVIQSTAVTTVSSGTKEQIKGGTGDEKKAKEKIEKKGEKKEKKQQSIAGSADSKPIDVSRLDLRIGCIITARKHPDADSLYVEEVDVGEIAPRTVVSGLVNHVPLEQMQNRMVILLCNLKPAKMRGVLSQAMVMCASSPEKIEILAPPNGSVPGDRITFDAFPGEPDKELNPKKKIWEQIQPDLHTNDECVATYKGVPFEVKGKGVCRAQTMSNSGIK

SEQ ID NO: 11179 - protein, 627 aa, Homo sapiens
MLTDSGGGGTSFEEDLDSVAPRSAPAGASEPPPPGGVGLGIRTVRLFGEAGPASGVGSSGGGGSGSGTGGGDAALDFKLAAAVLRTGGGGGASGSDEDEVSEVESFILDQEDLDNPVLKTTSEIFLSSTAEGADLRTVDPETQARLEALLEAAGIGKLSTADGKAFADPEVLRRLTSSVSCALDEAAAALTRMKAENSHNAGQVDTRSLAEACSDGDVNAVRKLLDEGRSVNEHTEEGESLLCLACSAGYYELAQVLLAMHANVEDRGNKGDITPLMAASSGGYLDIVKLLLLHDADVNSQSATGNTALTYACAGGFVDIVKVLLNEGANIEDHNENGHTPLMEAASAGHVEVARVLLDHGAGINTHSNEFKESALTLACYKGHLDMVRFLLEAGADQEHKTDEMHTALMEACMDGHVEVARLLLDSGAQVNMPADSFESPLTLAACGGHVELAALLIERGANLEEVNDEGYTPLMEAAREGHEEMVALLLAQGANINAQTEETQETALTLACCGGFSEVADFLIKAGADIELGCSTPLMEASQEGHLELVKYLLASGANVHATTATGDTALTYACENGHTDVADVLLQAGADLDKQEDMKTILEGIDPAKHQVRVAFDACKLLRKE

SEQ ID NO: 11180 - protein, 1182 aa, Homo sapiens
MCSTNPGKWVTFDDDPAVQSSQKSKNFPLENQGVCRPNGLKLNLPGLREFPSGSSSTSSTPLSSPIVDFYFSPGPPSNSPLSTPTKDFPGFPGIPKAGTHVLYPIPESSSDSPLAISGGESSLLPTRPTCLSHALLPSDHSCTHPTPKVGLPDEVNPQQAESLGFQSDDLPQFQYFREDCAFSSPFWKDEGSDSHFTLDPPGSKKMFSSRNKEMPIDQKSLNKCSLNYICEKLEHLQSAENQDSLRSLSMHCLCAEENASSFVPHTLFRSQPKSGWSFMLRIPEKKNMMSSRQWGPIFLKVLPGGILQMYYEQGLEKPFKEIQLDPYCRLSEPKVENFSVAGKIHTVKIEHVSYTEKRKYHSKTEVVHEPDIEQMLKLGSTSYHDFLDFLTTVEEELMKLPAVSKPKKNYEEQEISLEIVDNFWGKVTKEGKFVESAVITQIYCLCFVNGNLECFLTLNDLELPKRDESYYEKDSEKKGIDILDYHFHKCVNVQEFEQSRIIKFVPLDACRFELMRFKTLYNGDNLPFSLKSVVVVQGAYVELQAFVNMASLAQRSSYAGSLRSCDNIRIHFPVPSQWIKALWTMNLQRQKSLKAKMNRRACLGSLQELESEPVIQVTVGSAKYESAYQAVVWKIDRLPDKNSSLDHPHCLSYKLELGSDQEIPSDWYPFATVQFSVPDTCASRTEVRSLGVESDVQPQKHVQQRACYNIQPKLYRSVIEDVIEGVRNLFAEEGIEEQVLKDLKQLWETKVLQSKATEDFFRNSIQSPLFTLQLPHSLHQTLQSSTASLVIPAGRTLPSFTTAELGTSNSSANFTFPGYPIHVPAGVTLQTVSGHLYKVNVPIMVTETSGRAGILQHPIQQVFQQLGQPSVIQTSVPQLNPWSLQATTEKSQRIETVLQQPAILPSGPVDRKHLENATSDILVSPGNEHKIVPEALLCHQESSHYISLPGVVFSPQVSQTNSNVESVLSGSASMAQNLHDESLSTSPHGALHQHVTDIQLHILKNRMYGCDSVKQPRNIEEPSNIPVSEKDSNSQVDLSIRVTDDDIGEIIQVDGSGDTSSNEEIGSTRDADENEFLGNIDGGDLKVPEEEADSISNEDSATNSSDNEDPQVNIVEEDPLNSGDDVSEQDVPDLFDTDNVIVCQYDKIHRSKNKWKFYLKDGVMCFGGRDYVFAKAIGDAEW

SEQ ID NO: 11181 - protein, 539 aa, Homo sapiens
MATTATCTRFTDDYQLFEELGKGAFSVVRRCVKKTSTQEYAAKIINTKKLSARDHQKLEREARICRLLKHPNIVRLHDSISEEGFHYLVFDLVTGGELFEDIVAREYYSEADASHCIHQILESVNHIHQHDIVHRDLKPENLLLASKCKGAAVKLADFGLAIEVQGEQQAWFGFAGTPGYLSPEVLRKDPYGKPVDIWACGVILYILLVGYPPFWDEDQHKLYQQIKAGAYDFPSPEWDTVTPEAKNLINQMLTINPAKRITADQALKHPWVCQRSTVASMMHRQETVECLRKFNARRKLKGAILTTMLVSRNFSVGRQSSAPASPAASAAGLAGQAAKSLLNKKSDGGVKPQSNNKNSLVSPAQEPAPLQTAMEPQTTVVHNATDGIKGSTESCNTTTEDEDLKVRKQEIIKITEQLIEAINNGDFEAYTKICDPGLTSFEPEALGNLVEGMDFHKFYFENLLSKNSKPIHTTILNPHVHVIGEDAACIAYIRLTQYIDGQGRPRTSQSEETRVWHRRDGKWLNVHYHCSGAPAAPLQ

SEQ ID NO: 11182 - protein, 896 aa, Homo sapiens
MDGAAGPGDGPAREALQSLSQRLRVQEQEMELVKAALAEALRLLRLQVPPSSLQGSGTPAPPGDSLAAPPGLPPTCTPSLVSRGTQTETEVELKSSPGPPGLSNGPPAPQGASEEPSGTQSEGGGSSSSGAGSPGPPGILRPLQPPQRADTPRRNSSSSSSPSERPRQKLSRKAISSANLLVRSGSTESRGGKDPLSSPGGPGSRRSNYNLEGISVKMFLRGRPITMYIPSGIRSLEELPSGPPPETLSLDWVYGYRGRDSRSNLFVLRSGEVVYFIACVVVLYRPGGGPGGPGGGGQRHYRGHTDCVRCLAVHPDGVRVASGQTAGVDKDGKPLQPVVHIWDSETLLKLQEIGLGAFERGVGALAFSAADQGAFLCVVDDSNEHMLSVWDCSRGMKLAEIKSTNDSVLAVGFNPRDSSCIVTSGKSHVHFWNWSGGVGVPGNGTLTRKQGVFGKYKKPKFIPCFVFLPDGDILTGDSEGNILTWGRSPSDSKTPGRGGAKETYGIVAQAHAHEGSIFALCLRRDGTVLSGGGRDRRLVQWGPGLVALQEAEIPEHFGAVRAIAEGLGSELLVGTTKNALLRGDLAQGFSPVIQGHTDELWGLCTHPSQNRFLTCGHDRQLCLWDGESHALAWSIDLKETGLCADFHPSGAVVAVGLNTGRWLVLDTETREIVSDVIDGNEQLSVVRYSPDGLYLAIGSHDNVIYIYSVSSDGAKSSRFGRCMGHSSFITHLDWSKDGNFIMSNSGDYEILYWDVAGGCKQLKNRYESRDREWATYTCVLGFHVYGVWPDGSDGTDINSLCRSHNERVVAVADDFCKVHLFQYPCARAKAPSRMYGGHGSHVTSVRFTHDDSHLVSLGGKDASIFQWRVLGAGGAGPAPATPSRTPSLSPASSLDV

SEQ ID NO: 11183 - protein, 1137 aa, Homo sapiens
MKCVFVTVGTTSFDDLIACVSAPDSLQKIESLGYNRLILQIGRGTVVPEPFSTESFTLDVYRYKDSLKEDIQKADLVISHAGAGSCLETLEKGKPLVVVINEKLMNNHQLELAKQLHKEGHLFYCTCRVLTCPGQAKSIASAPGKCQDSAALTSTAFSGLDFGLLSGYLHKQALVTATHPTCTLLFPSCHAFFPLPLTPTLYKMHKGWKNYCSQKSLNEASMDEYLGSLGLFRKLTAKDASCLFRAISEQLFCSQVHHLEIRKACVSYMRENQQTFESYVEGSFEKYLERLGDPKESAGQLEIRALSLIYNRDFILYRFPGKPPTYVTDNGYEDKILLCYSSSGHYDSVYSKQFQSSAAVCQAVLYEILYKDVFVVDEEELKTAIKLFRSGSKKNRNNAVTGSEDAHTDYKSSNQNRMEEWGACYNAENIPEGYNKGTEETKSPENPSKMPFPYKVLKALDPEIYRNVEFDVWLDSRKELQKSDYMEYAGRQYYLGDKCQVCLESEGRYYNAHIQEVGNENNSVTVFIEELAEKHVVPLANLKPVTQVMSVPAWNAMPSRKGRGYQKMPGGYVPEIVISEMDIKQQKKMFKKIRGKEVYMTMAYGKGDPLLPPRLQHSMHYGHDPPMHYSQTAGNVMSNEHFHPQHPSPRQGRGYGMPRNSSRFINRHNMPGPKVDFYPGPGKRCCQSYDNFSYRSRSFRRSHRQMSCVNKESQYGFTPGNGQMPRGLEETITFYEVEEGDETAYPTLPNHGGPSTMVPATSGYCVGRRGHSSGKQTLNLEEGNGQSENGRYHEEYLYRAEPDYETSGVYSTTASTANLSLQDRKSCSMSPQDTVTSYNYPQKMMGNIAAVAASCANNVPAPVLSNGAAANQAISTTSVSSQNAIQPLFVSPPTHGRPVIASPSYPCHSAIPHAGASLPPPPPPPPPPPPPPPPPPPPPPPPPPPALDVGETSNLQPPPPLPPPPYSCDPSGSDLPQDTKVLQYYFNLGLQCYYHSYWHSMVYVPQMQQQLHVENYPVYTEPPLVDQTVPQCYSEVRREDGIQAEASANDTFPNADSSSVPHGAVYYPVMSDPYGQPPLPGFDSCLPVVPDYSCVPPWHPVGTAYGGSSQIHGAINPGPIGCIAPSPPASHYVPQGM

SEQ ID NO: 11184 - protein, 476 aa, Homo sapiens
MAAGPIRVVLVLLGVLSVCAASGHGSVAEREAGGEAEWAEPWDGAVFRPPSALGAVGVTRSSGTPRPGREEAGDLPVLLWWSPGLFPHFPGDSERIECARGACVASRNRRALRDSRTRALLFYGTDFRASAAPLPRLAHQSWALLHEESPLNNFLLSHGPGIRLFNLTSTFSRHSDYPLSLQWLPGTAYLRRPVPPPMERAEWRRRGYAPLLYLQSHCDVPADRDRYVRELMRHIPVDSYGKCLQNRELPTARLQDTATATTEDPELLAFLSRYKFHLALENAICNDYMTEKLWRPMHLGAVPVYRGSPSVRDWMPNNHSVILIDDFESPQKLAEFIDFLDKNDEEYMKYLAYKQPGGITNQFLLDSLKHREWGVNDPLLPNYLNGFECFVCDYELARLDAEKAHAASPGDSPVFEPHIAQPSHMDCPVPTPGFGNVEEIPENDSSLVQVRDHCICLRFLWPHSEKGRTHNYAAVP

SEQ ID NO: 11185 - protein, 456 aa, Homo sapiens
MRKKWKMGGMKYIFSLLFFLLLEGGKTEQVKHSETYCMFQDKKYRVGERWHPYLEPYGLVYCVNCICSENGNVLCSRVRCPNVHCLSPVHIPHLCCPRCPDSLPPVNNKVTSKSCEYNGTTYQHGELFVAEGLFQNRQPNQCTQCSCSEGNVYCGLKTCPKLTCAFPVSVPDSCCRVCRGDGELSWEHSDGDIFRQPANREARHSYHRSHYDPPPSRQAGGLSRFPGARSHRGALMDSQQASGTIVQIVINNKHKHGQVCVSNGKTYSHGESWHPNLRAFGIVECVLCTCNVTKQECKKIHCPNRYPCKYPQKIDGKCCKVCPGKKAKELPGQSFDNKGYFCGEETMPVYESVFMEDGETTRKIALETERPPQVEVHVWTIRKGILQHFHIEKISKRMFEELPHFKLVTRTTLSQWKIFTEGEAQISQMCSSRVCRTELEDLVKVLYLERSEKGHC

SEQ ID NO: 11186 - protein, 537 aa, Homo sapiens
MTCHKRYKIQKKVREHHRKLRKEAKKRGHKKPRKDPGVPNSAPFKEALLREAELRKQRLEELKQQQKLDRQKELEKKRKLETNPDIKPSNVEPMEKEFGLCKTENKAKSGKQNSKKLYCQELKKVIEASDVVLEVLDARDPLGCRCPQVEEAIVQSGQKKLVLILNKSDLVPKENLESWLNYLKKELPTVVFRASTKPKDKGKITKRVKAKKNAAPFRSEVCFGKEGLWKLLGGFQETCSKAIRVGVIGFPNVGKSSIINSLKQEQMCNVGVSMGLTRSMQVVPLDKQITIIDSPSFIVSPLNSSSALALRSPASIEVVKPMEAASAILSQADARQVVLKYTVPGYRNSLEFFTVLAQRRGMHQKGGIPNVEGAAKLLWSEWTGASLAYYCHPPTSWTPPPYFNESIVVDMKSGFNLEELEKNNAQSIRAIKGPHLANSILFQSSGLTNGIIEEKDIHEELPKRKERKQEEREDDKDSDQETVDEEVDENSSGMFAAEETGEALSEETTAGEQSTRSFILDKIIEEDDAYDFSTDYV

SEQ ID NO: 11187 - protein, 895 aa, Homo sapiens
MSKSFQQSSLSRDSQGHGRDLSAAGIGLLAAATQSLSMPASLGRMNQGTARLASLMNLGMSSSLNQQGAHSALSSASTSSHNLQSIFNIGSRGPLPLSSQHRGDADQASNILASFGLSARDLDELSRYPEDKITPENLPQILLQLKRRRTEEGPTLSYGRDGRSATREPPYRVPRDDWEEKRHFRRDSFDDRGPSLNPVLDYDHGSRSQESGYYDRMDYEDDRLRDGERCRDDSFFGETSHNYHKFDSEYERMGRGPGPLQERSLFEKKRGAPPSSNIEDFHGLLPKGYPHLCSICDLPVHSNKEWSQHINGASHSRRCQLLLEIYPEWNPDNDTGHTMGDPFMLQQSTNPAPGILGPPPPSFHLGGPAVGPRGNLGAGNGNLQGPRHMQKGRVETSRVVHIMDFQRGKNLRYQLLQLVEPFGVISNHLILNKINEAFIEMATTEDAQAAVDYYTTTPALVFGKPVRVHLSQKYKRIKKPEGKPDQKFDQKQELGRVIHLSNLPHSGYSDSAVLKLAEPYGKIKNYILMRMKSQAFIEMETREDAMAMVDHCLKKALWFQGRCVKVDLSEKYKKLVLRIPNRGIDLLKKDKSRKRSYSPDGKESPSDKKSKTDGSQKTESSTEGKEQEEKSGEDGEKDTKDDQTEQEPNMLLESEDELLVDEEEAAALLESGSSVGDETDLANLGDVASDGKKEPSDKAVKKDGSASAAAKKKLKKRRFPGSMEGFVTLDEVGDEEDSELQKLRKSGMAFKSGDKNDDGLVEIKVDKIEELDQENEAALENGIKNEENTEPGAESSENADDPNKDTSENADGQSDENKDDYTIPDEYRIGPYQPNVPVGIDYVIPKTGFYCKLCSLFYTNEEVAKNTHCSSLPHYQKLKKFLNKLAEERRQKKET

SEQ ID NO: 11188 - protein, 93 aa, Homo sapiens
MSATRAKKVKMATKSCPECDQQVPVACKSCPCGYIFISRKLLNAKHSEKSPPSTEKQEKEIDIYANLSDEKAFVFSVALAEINRKIINQRLIL

SEQ ID NO: 11189 - protein, 918 aa, Homo sapiens
MGTTAPGPIHLLELCDQKLMEFLCNMDNKDLVWLEEIQEEAERMFTREFSKEPELMPKTPSQKNRRKKRRISYVQDENRDPIRRRLSRRKSRSSQLSSRRLRSKDSVEKLATVVGENGSVLRRVTRAAAAAAAATMALAAPSSPTPESPTMLTKKPEDNHTQCQLVPVVEIGISERQNAEQHVTQLMSTEPLPRTLSPTPASATAPTSQGIPTSDEESTPKKSKARILESITVSSLMATPQDPKGQGVGTGRSASKLRIAQVSPGPRDSPAFPDSPWRERVLAPILPDNFSTPTGSRTDSQSVRHSPIAPSSPSPQVLAQKYSLVAKQESVVRRASRRLAKKTAEEPAASGRIICHSYLERLLNVEVPQKVGSEQKEPPEEAEPVAAAEPEVPENNGNNSWPHNDTEIANSTPNPKPAASSPETPSAGQQEAKTDQADGPREPPQSARRKRSYKQAVSELDEEQHLEDEELQPPRSKTPSSPCPASKVVRPLRTFLHTVQRNQMLMTPTSAPRSVMKSFIKRNTPLRMDPKCSFVEKERQRLENLRRKEEAEQLRRQKVEEDKRRRLEEVKLKREERLRKVLQARERVEQMKEEKKKQIEQKFAQIDEKTEKAKEERLAEEKAKKKAAAKKMEEVEARRKQEEEARRLRWLQQEEEERRHQELLQKKKEEEQERLRKAAEAKRLAEQREQERREQERREQERREQERREQERREQERQLAEQERRREQERLQAERELQEREKALRLQKEQLQRELEEKKKKEEQQRLAERQLQEEQEKKAKEAAGASKALNVTVDVQSPACTSYQMTPQGHRAPPKINPDNYGMDLNSDDSTDDEAHPRKPIPTWARGTPLSQAIIHQYYHPPNLLELFGTILPLDLEDIFKKSKPRYHKRTSSAVWNSPPLQGARVPSSLAYSLKKH

SEQ ID NO: 11190 - protein, 968 aa, Homo sapiens
MAEDDPYLGRPEQMFHLDPSLTHTIFNPEVFQPQMALPTDGPYLQILEQPKQRGFRFRYVCEGPSHGGLPGASSEKNKKSYPQVKICNYVGPAKVIVQLVTNGKNIHLHAHSLVGKHCEDGICTVTAGPKDMVVGFANLGILHVTKKKVFETLEARMTEACIRGYNPGLLVHPDLAYLQAEGGGDRQLGDREKELIRQAALQQTKEMDLSVVRLMFTAFLPDSTGSFTRRLEPVVSDAIYDSKAPNASNLKIVRMDRTAGCVTGGEEIYLLCDKVQKDDIQIRFYEEEENGGVWEGFGDFSPTDVHRQFAIVFKTPKYKDINITKPASVFVQLRRKSDLETSEPKPFLYYPEIKDKEEVQRKRQKLMPNFSDSFGGGSGAGAGGGGMFGSGGGGGGTGSTGPGYSFPHYGFPTYGGITFHPGTTKSNAGMKHGTMDTESKKDPEGCDKSDDKNTVNLFGKVIETTEQDQEPSEATVGNGEVTLTYATGTKEESAGVQDNLFLEKAMQLAKRHANALFDYAVTGDVKMLLAVQRHLTAVQDENGDSVLHLAIIHLHSQLVRDLLEVTSGLISDDIINMRNDLYQTPLHLAVITKQEDVVEDLLRAGADLSLLDRLGNSVLHLAAKEGHDKVLSILLKHKKAALLLDHPNGDGLNAIHLAMMSNSLPCLLLLVAAGADVNAQEQKSGRTALHLAVEHDNISLAGCLLLEGDAHVDSTTYDGTTPLHIAAGRGSTRLAALLKAAGADPLVENFEPLYDLDDSWENAGEDEGVVPGTTPLDMATSWQVFDILNGKPYEPEFTSDDLLAQGDMKQLAEDVKLQLYKLLEIPDPDKNWATLAQKLGLGILNNAFRLSPAPSKTLMDNYEVSGGTVRELVEALRQMGYTEAIEVIQAASSPVKTTSQAHSLPLSPASTRQQIDELRDSDSVCDSGVETSFRKLSFTESLTSGASLLTLNKMPHDYGQEGPLEGKI

SEQ ID NO: 11191 - protein, 515 aa, Homo sapiens
MAAPEPARAAPPPPPPPPPPPGADRVVKAVPFPPTHRLTSEEVFDLDGIPRVDVLKNHLVKEGRVDEEIALRIINEGAAILRREKTMIEVEAPITVCGDIHGQFFDLMKLFEVGGSPANTRYLFLGDYVDRGYFSIECVLYLWVLKILYPSTLFLLRGNHECRHLTEYFTFKQECKIKYSERVYEACMEAFDSLPLAALLNQQFLCVHGGLSPEIHTLDDIRRLDRFKEPPAFGPMCDLLWSDPSEDFGNEKSQEHFSHNTVRGCSYFYNYPAVCEFLQNNNLLSIIRAHEAQDAGYRMYRKSQTTGFPSLITIFSAPNYLDVYNNKAAVLKYENNVMNIRQFNCSPHPYWLPNFMDVFTWSLPFVGEKVTEMLVNVLSICSDDELMTEGEDQFDVGSAAARKEIIRNKIRAIGKMARVFSVLREESESVLTLKGLTPTGMLPSGVLAGGRQTLQSAIRGFSPPHRICSFEEAKGLDRINERMPPRKDAVQQDGFNSLNTAHATENHGTGNHTAQ

SEQ ID NO: 11192 - protein, 525 aa, Homo sapiens
MAAPEPARAAPPPPPPPPPPPGADRVVKAVPFPPTHRLTSEEVFDLDGIPRVDVLKNHLVKEGRVDEEIALRIINEGAAILRREKTMIEVEAPITVCGDIHGQFFDLMKLFEVGGSPANTRYLFLGDYVDRGYFSIECVLYLWVLKILYPSTLFLLRGNHECRHLTEYFTFKQECKIKYSERVYEACMEAFDSLPLAALLNQQFLCVHGGLSPEIHTLDDIRRLDRFKEPPAFGPMCDLLWSDPSEDFGNEKSQEHFSHNTVRGCSYFYNYPAVCEFLQNNNLLSIIRAHEAQDAGYRMYRKSQTTGFPSLITIFSAPNYLDVYNNKAAVLKYENNVMNIRQFNCSPHPYWLPNFMDVFTWSLPFVGEKVTEMLVNVLSICSDDELMTEGEDQFDVGSAAARKEIIRNKIRAIGKMARVFSVLREESESVLTLKGLTPTGMLPSGVLAGGRQTLQSATVEAIEAEKAIRGFSPPHRICSFEEAKGLDRINERMPPRKDAVQQDGFNSLNTAHATENHGTGNHTAQ

SEQ ID NO: 11193 - protein, 382 aa, Homo sapiens
MWSGPPQPDQGLPPPLAAVPVPWKSTDPCQGHRESPGALVETSAGEEAQGQEGPAAAQLDVLRLRSSSMEIREKGSEFLKEELHRAQKELKLKDEECERLSKVREQLEQELEELTASLFEEAHKMVREANMKQAASEKQLKEARGKIDMLQAEVTALKTLVITSTPASPNRELHPQLLSPTKAGPRKGHSRHKSTSSTLCPAVCPAAGHTLTPDREGKEVDTILFAEFQAWRESPTLDKTCPFLERVYREDVGPCLDFTMQELSVLVRAAVEDNTLTIEPVASQTLPTVKVAEVDCSSTNTCALSGLTRTCRHRIRLGDSKSHYYISPSSRARITAVCNFFTYIRYIQQGLVRQDAEPMFWEIMRLRKEMSLAKLGFFPQEA

SEQ ID NO: 11194 - protein, 265 aa, Homo sapiens
MGLPWGQPHLGLQMLLLALNCLRPSLSLELVPYTPQITAWDLEGKVTATTFSLEQPRCVFDGLASASDTVWLVVAFSNASRGFQNPETLADIPASPQLLTDGHYMTLPLSPDQLPCGDPMAGSGGAPVLRVGHDHGCHQQPFCNAPLPGPGPYREDPRIHRHLARAAKWQHDRHYLHPLFSGRPPTLGLLGSLYHALLQPVVAGGGPGAAADRLLHGQALHDPPHPTQRGRHTAGGLQAWPGPPPQPQPLAWPLCMGLGEMGRWE

SEQ ID NO: 11195 - protein, 511 aa, Homo sapiens
MSEPKAIDPKLSTTDRVVKAVPFPPSHRLTAKEVFDNDGKPRVDILKAHLMKEGRLEESVALRIITEGASILRQEKNLLDIDAPVTVCGDIHGQFFDLMKLFEVGGSPANTRYLFLGDYVDRGYFSIECVLYLWALKILYPKTLFLLRGNHECRHLTEYFTFKQECKIKYSERVYDACMDAFDCLPLAALMNQQFLCVHGGLSPEINTLDDIRKLDRFKEPPAYGPMCDILWSDPLEDFGNEKTQEHFTHNTVRGCSYFYSYPAVCEFLQHNNLLSILRAHEAQDAGYRMYRKSQTTGFPSLITIFSAPNYLDVYNNKAAVLKYENNVMNIRQFNCSPHPYWLPNFMDVFTWSLPFVGEKVTEMLVNVLNICSDDELGSEEDGFDGATAAARKEVIRNKIRAIGKMARVFSVLREESESVLTLKGLTPTGMLPSGVLSGGKQTLQSAIKGFSPQHKITSFEEAKGLDRINERMPPRRDAMPSDANLNSINKALTSETNGTDSNGSNSSNIQ

SEQ ID NO: 11196 - protein, 521 aa, Homo sapiens
MSEPKAIDPKLSTTDRVVKAVPFPPSHRLTAKEVFDNDGKPRVDILKAHLMKEGRLEESVALRIITEGASILRQEKNLLDIDAPVTVCGDIHGQFFDLMKLFEVGGSPANTRYLFLGDYVDRGYFSIECVLYLWALKILYPKTLFLLRGNHECRHLTEYFTFKQECKIKYSERVYDACMDAFDCLPLAALMNQQFLCVHGGLSPEINTLDDIRKLDRFKEPPAYGPMCDILWSDPLEDFGNEKTQEHFTHNTVRGCSYFYSYPAVCEFLQHNNLLSILRAHEAQDAGYRMYRKSQTTGFPSLITIFSAPNYLDVYNNKAAVLKYENNVMNIRQFNCSPHPYWLPNFMDVFTWSLPFVGEKVTEMLVNVLNICSDDELGSEEDGFDGATAAARKEVIRNKIRAIGKMARVFSVLREESESVLTLKGLTPTGMLPSGVLSGGKQTLQSATVEAIEADEAIKGFSPQHKITSFEEAKGLDRINERMPPRRDAMPSDANLNSINKALTSETNGTDSNGSNSSNIQ

SEQ ID NO: 11197 - protein, 424 aa, Homo sapiens
MELSYRLFICLLLWGSTELCYPQPLWLLQGGASHPETSVQPVLVECQEATLMVMVSKDLFGTGKLIRAADLTLGPEACEPLVSMDTEDVVRFEVGLHECGNSMQVTDDALVYSTFLLHDPRPVGNLSIVRTNRAEIPIECRYPRQGNVSSQAILPTWLPFRTTVFSEEKLTFSLRLMEENWNAEKRSPTFHLGDAAHLQAEIHTGSHVPLRLFVDHCVATPTPDQNASPYHTIVDFHGCLVDGLTDASSAFKVPRPGPDTLQFTVDVFHFANDSRNMIYITCHLKVTLAEQDPDELNKACSFSKPSNSWFPVEGSADICQCCNKGDCGTPSHSRRQPHVMSQWSRSASRNRRHVTEEADVTVGPLIFLDRRGDHEVEQWALPSDTSVVLLGVGLAVVVSLTLTAVILVLTRRCRTASHPVSASE

SEQ ID NO: 11198 - protein, 626 aa, Homo sapiens
MIPANASARKGPEGKYPLHYLVWHNRHRELEKEVRAGQVDIEQLDPRGRTPLHLATTLGHLECARVLLAHGADVGRENRSGWTVLQEAVSTRDLELVQLVLRYRDYQRVVKRLAGIPVLLEKLRKAQDFYVEMKWEFTSWVPLVSKICPSDTYKVWKSGQNLRVDTTLLGFDHMTWQRGNRSFVFRGQDTSAVVMEIDHDRRVVYTETLALAGQDRELLLAAAQPTEEQVLSRLTAPVVTTQLDTKNISFERNKTGILGWRSEKTEMVNGYEAKVYGASNVELITRTRTEHLSEQHKGKVKGCKTPLQSFLGIAEQHGGPQNGTLITQTLSQANPTAITAEEYFNPNFELGNRDMGRPMELTTKTQKFKAKLWLCEEHPLSLCEQVAPIIDLMAVSNALFAKLRDFITLRLPPGFPVKIEIPIFHILNARITFGNLNGCDEPVPSVRGSPSSETPSPGSDSSSVSSSSSTTSCRGCEISPALFEAPRGYSMMGGQREAATRDDDDDLLQFAIQQSLLEAGSEYDQVTIWEALTNSKPGTHPMSYEGRRQDRSAPPTPQRQPAPPASVPSPRPSSGPGSGGHVFRSYDEQLRLAMELSAQEQEERRRRARQEEEELERILRLSLTEQ

SEQ ID NO: 11199 - protein, 461 aa, Homo sapiens
MEDLDALLSDLETTTSHMPRSGAPKERPAEPLTPPPSYGHQPQTGSGESSGASGDKDHLYSTVCKPRSPKPAAPAAPPFSSSSGVLGTGLCELDRLLQELNATQFNITDEIMSQFPSSKVASGEQKEDQSEDKKRPSLPSSPSPGLPKASATSATLELDRLMASLSDFRVQNHLPASGPTQPPVVSSTNEGSPSPPEPTGKGSLDTMLGLLQSDLSRRGVPTQAKGLCGSCNKPIAGQVVTALGRAWHPEHFVCGGCSTALGGSSFFEKDGAPFCPECYFERFSPRCGFCNQPIRHKMVTALGTHWHPEHFCCVSCGEPFGDEGFHEREGRPYCRRDFLQLFAPRCQGCQGPILDNYISALSALWHPDCFVCRECFAPFSGGSFFEHEGRPLCENHFHARRGSLCATCGLPVTGRCVSALGRRFHPDHFTCTFCLRPLTKGSFQERAGKPYCQPCFLKLFG

SEQ ID NO: 11200 - protein, 303 aa, Homo sapiens
MARKLIHLEIKPAIRNQIIRELQVLHECNSPYIVGFYGAFYSDGEISICMEHMDGGSLDQVLKEAKRIPEEILGKVSIAVLRGLAYLREKHQIMHRDVKPSNILVNSRGEIKLCDFGVSGQLIDSMANSFVGTRSYMAPERLQGTHYSVQSDIWSMGLSLVELAVGRYPIPPPDAKELEAIFGRPVVDGEEGEPHSISPRPRPPGRPVSGHGMDSRPAMAIFELLDYIVNEPPPKLPNGVFTPDFQEFVNKCLIKNPAERADLKMLTNHTFIKRSEVEEVDFAGWLCKTLRLNQPGTPTRTAV

SEQ ID NO: 11201 - protein, 770 aa, Homo sapiens
MSRKGPRAEVCADCSAPDPGWASISRGVLVCDECCSVHRSLGRHISIVKHLRHSAWPPTLLQMVHTLASNGANSIWEHSLLDPAQVQSGRRKANPQDKVHPIKSEFIRAKYQMLAFVHKLPCRDDDGVTAKDLSKQLHSSVRTGNLETCLRLLSLGAQANFFHPEKGTTPLHVAAKAGQTLQAELLVVYGADPGSPDVNGRTPIDYARQAGHHELAERLVECQYELTDRLAFYLCGRKPDHKNGHYIIPQMADRSRQKCMSQSLDLSELAKAAKKKLQALSNRLFEELAMDVYDEVDRRENDAVWLATQNHSTLVTERSAVPFLPVNPEYSATRNQGRQKLARFNAREFATLIIDILSEAKRRQQGKSLSSPTDNLELSLRSQSDLDDQHDYDSVASDEDTDQEPLRSTGATRSNRARSMDSSDLSDGAVTLQEYLELKKALATSEAKVQQLMKVNSSLSDELRRLQREIHKLQAENLQLRQPPGPVPTPPLPSERAEHTPMAPGGSTHRRDRQAFSMYEPGSALKPFGGPPGDELTTRLQPFHSTELEDDAIYSVHVPAGLYRIRKGVSASAVPFTPSSPLLSCSQEGSRHTSKLSRHGSGADSDYENTQSGDPLLGLEGKRFLELGKEEDFHPELESLDGDLDPGLPSTEDVILKTEQVTKNIQELLRAAQEFKHDSFVPCSEKIHLAVTEMASLFPKRPALEPVRSSLRLLNASAYRLQSECRKTVPPEPGAPVDFQLLTQQVIQCAYDIAKAAKQLVTITTREKKQ

SEQ ID NO: 11202 - protein, 1707 aa, Homo sapiens
MHPGLWLLLVTLCLTEELAAAGEKSYGKPCGGQDCSGSCQCFPEKGARGRPGPIGIQGPTGPQGFTGSTGLSGLKGERGFPGLLGPYGPKGDKGPMGVPGFLGINGIPGHPGQPGPRGPPGLDGCNGTQGAVGFPGPDGYPGLLGPPGLPGQKGSKGDPVLAPGSFKGMKGDPGLPGLDGITGPQGAPGFPGAVGPAGPPGLQGPPGPPGPLGPDGNMGLGFQGEKGVKGDVGLPGPAGPPPSTGELEFMGFPKGKKGSKGEPGPKGFPGISGPPGFPGLGTTGEKGEKGEKGIPGLPGPRGPMGSEGVQGPPGQQGKKGTLGFPGLNGFQGIEGQKGDIGLPGPDVFIDIDGAVISGNPGDPGVPGLPGLKGDEGIQGLRGPSGVPGLPALSGVPGALGPQGFPGLKGDQGNPGRTTIGAAGLPGRDGLPGPPGPPGPPSPEFETETLHNKESGFPGLRGEQGPKGNLGLKGIKGDSGFCACDGGVPNTGPPGEPGPPGPWGLIGLPGLKGARGDRGSGGAQGPAGAPGLVGPLGPSGPKGKKGEPILSTIQGMPGDRGDSGSQGFRGVIGEPGKDGVPGLPGLPGLPGDGGQGFPGEKGLPGLPGEKGHPGPPGLPGNGLPGLPGPRGLPGDKGKDGLPGQQGLPGSKGDCCCREVGKGDLDTERGITLPCIIPGSYGPSGFPGTPGFPGPKGSRGLPGTPGQPGSSGSKGEPGSPGLVHLPELPGFPGPRGEKGLPGFPGLPGKDGLPGMIGSPGLPGSKGATGDIFGAENGAPGEQGLQGLTGHKGFLGDSGLPGLKGVHGKPGLLGPKGERGSPGTPGQVGQPGTPGSSGPYGIKGKSGLPGAPGFPGISGHPGKKGTRGKKGPPGSIVKKGLPGLKGLPGNPGLVGLKGSPGSPGVAGLPALSGPKGEKGSVGFVGFPGIPGLPGIPGTRGLKGIPGSTGKMGPSGRAGTPGEKGDRGNPGPVGIPSPRRPMSNLWLKGDKGSQGSAGSNGFPGPRGDKGEAGRPGPPGLPGAPGLPGIIKGVSGKPGPPGFMGIRGLPGLKGSSGITGFPGMPGESGSQGIRGSPGLPGASGLPGLKGDNGQTVEISGSPGPKGQPGESGFKGTKGRDGLIGNIGFPGNKGEDGKVGVSGDVGLPGAPGFPGVAGMRGEPGLPGSSGHQGAIGPLGSPGLIGPKGFPGFPGLHGLNGLPGTKGTHGTPGPSITGVPGPAGLPGPKGEKGYPGIGIGAPGKPGLRGQKGDRGFPGLQGPAGLPGAPGISLPSLIAGQPGDPGRPGLDGERGRPGPAGPPGPPGPSSNQGDTGDPGFPGIPGPKGPKGDQGIPGFSGLPGELGLKGMRGEPGFMGTPGKVGPPGDPGFPGMKGKAGPRGSSGLQGDPGQTPTAEAVQVPPGPLGLPGIDGIPGLTGDPGAQGPVGLQGSKGLPGIPGKDGPSGLPGPPGALGDPGLPGLQGPPGFEGAPGQQGPFGMPGMPGQSMRVGYTLVKHSQSEQVPPCPIGMSQLWVGYSLLFVEGQEKAHNQDLGFAGSCLPRFSTMPFIYCNINEVCHYARRNDKSYWLSTTAPIPMMPVSQTQIPQYISRCSVCEAPSQAIAVHSQDITIPQCPLGWRSLWIGYSFLMHTAAGAEGGGQSLVSPGSCLEDFRATPFIECSGARGTCHYFANKYSFWLTTVEERQQFGELPVSETLKAGQLHTRVSRCQVCMKSL

SEQ ID NO: 11203 - protein, 216 aa, Homo sapiens
MRLGPRTAALGLLLLCAAAAGAGKAEELHYPLGERRSDYDREALLGVQLHLKDKKRFEKANQDSGPGLSLEEFIAFEHPEEVDYMTEFVIQEALEEHDKNGDGFVSLEEFLGDYRWDPTANEDPEWILVEKDRFVNDYDKDNDGRLDPQELLPWVVPNNQGIAQEEALHLIDEMDLNGDKKLSEEEILENPDLFLTSEATDYGRQLHDDYFYHDEL

SEQ ID NO: 11204 - protein, 151 aa, Homo sapiens
MAASTSMVPVAVTAAVAPVLSINSDFSDLREIKKQLLLIAGLTRERGLLHSSKWSAELAFSLPALPLAELQPPPPITEEDAQDMDAYTLAKAYFDVKEYDRAAHFLHGCNSKKAYFLYMYSRYLVRAILKCHSAFSETSIFRTNGKVKSFK

SEQ ID NO: 11205 - protein, 317 aa, Homo sapiens
MRLGPRTAALGLLLLCAAAAGAGKAEELHYPLGERRSDYDREALLGVQEDVDEYVKLGHEEQQKRLQAIIKKIDLDSDGFLTESELSSWIQMSFKHYAMQEAKQQFVEYDKNSDDTVTWDEYNIQMYDRVIDFDENTALDDAEEESFRKLHLKDKKRFEKANQDSGPGLSLEEFIAFEHPEEVDYMTEFVIQEALEEHDKNGDGFVSLEEFLGDYRWDPTANEDPEWILVEKDRFVNDYDKDNDGRLDPQELLPWVVPNNQGIAQEEALHLIDEMDLNGDKKLSEEEILENPDLFLTSEATDYGRQLHDDYFYHDEL

SEQ ID NO: 11206 - protein, 597 aa, Homo sapiens
MAASTSMVPVAVTAAVAPVLSINSDFSDLREIKKQLLLIAGLTRERGLLHSSKWSAELAFSLPALPLAELQPPPPITEEDAQDMDAYTLAKAYFDVKEYDRAAHFLHGCNSKKAYFLYMYSRYLSGEKKKDDETVDSLGPLEKGQVKNEALRELRVELSKKHQARELDGFGLYLYGVVLRKLDLVKEAIDVFVEATHVLPLHWGAWLELCNLITDKEMLKFLSLPDTWMKEFFLAHIYTELQLIEEALQKYQNLIDVGFSKSSYIVSQIAVAYHNIRDIDKALSIFNELRKQDPYRIENMDTFSNLLYVRSMKSELSYLAHNLCEIDKYRVETCCVIGNYYSLRSQHEKAALYFQRALKLNPRYLGAWTLMGHEYMEMKNTSAAIQAYRHAIEVNKRDYRAWYGLGQTYEILKMPFYCLYYYRRAHQLRPNDSRMLVALGECYEKLNQLVEAKKCYWRAYAVGDVEKMALVKLAKLHEQLTESEQAAQCYIKYIQDIYSCGEIVEHLEESTAFRYLAQYYFKCKLWDEASTCAQKCCAFNDTREEGKALLRQILQLRNQGETPTTEVPAPFFLPASLSANNTPTRRVSPLNLSSVTP

SEQ ID NO: 11207 - protein, 471 aa, Homo sapiens
MSEGVDLIDIYADEEFNQDPEFNNTDQIDLYDDVLTATSQPSDDRSSSTEPPPPVRQEPSPKPNNKTPAILYTYSGLRNRRAAVYVGSFSWWTTDQQLIQVIRSIGVYDVVELKFAENRANGQSKGYAEVVVASENSVHKLLELLPGKVLNGEKVDVRPATRQNLSQFEAQARKRECVRVPRGGIPPRAHSRDSSDSADGRATPSENLVPSSARVDKPPSVLPYFNRPPSALPLMGLPPPPIPPPPPLSSSFGVPPPPPGIHYQHLMPPPPRLPPHLAVPPPGAIPPALHLNPAFFPPPNATVGPPPDTYMKASAPYNHHGSRDSGPPPSTVSEAEFEDIMKRNRAISSSAISKAVSGASAGDYSDAIETLLTAIAVIKQSRVANDERCRVLISSLKDCLHGIEAKSYSVGASGSSSRKRHRSRERSPSRSRESSRRHRDLLHNEDRHDDYFQERNREHERHRDRERDRHH

SEQ ID NO: 11208 - protein, 534 aa, Homo sapiens; identical to SEQ ID NO: 4496

SEQ ID NO: 11209 - protein, 890 aa, Homo sapiens
MSQGILSPPAGLLSDDDVVVSPMFESTAADLGSVVRKNLLSDCSVVSTSLEDKQQVPSEDSMEKVKVYLRVRPLLPSELERQEDQGCVRIENVETLVLQAPKDSFALKSNERGIGQATHRFTFSQIFGPEVGQASFFNLTVKEMVKDVLKGQNWLIYTYGVTNSGKTHTIQGTIKDGGILPRSLALIFNSLQGQLHPTPDLKPLLSNEVIWLDSKQIRQEEMKKLSLLNGGLQEEELSTSLKRSVYIESRIGTSTSFDSGIAGLSSISQCTSSSQLDETSHRWAQPDTAPLPVPANIRFSIWISFFEIYNELLYDLLEPPSQQRKRQTLRLCEDQNGNPYVKDLNWIHVQDAEEAWKLLKVGRKNQSFASTHLNQNSSRSHSIFSIRILHLQGEGDIVPKISELSLCDLAGSERCKDQKSGERLKEAGNINTSLHTLGRCIAALRQNQQNRSKQNLVPFRDSKLTRVFQGFFTGRGRSCMIVNVNPCASTYDETLHVAKFSAIASQLVHAPPMQLGFPSLHSFIKEHSLQVSPSLEKGAKADTGLDDDIENEADISMYGKEELLQVVEAMKTLLLKERQEKLQLEMHLRDEICNEMVEQMQQREQWCSEHLDTQKELLEEMYEEKLNILKESLTSFYQEEIQERDEKIEELEALLQEARQQSVAHQQSGSELALRRSQRLAASASTQQLQEVKAKLQQCKAELNSTTEELHKYQKMLEPPPSAKPFTIDVDKKLEEGQKNIRLLRTELQKLGESLQSAERACCHSTGAGKLRQALTTCDDILIKQDQTLAELQNNMVLVKLDLRKKAACIAEQYHTVLKLQGQVSAKKRLGTNQENQQPNQQPPGKKPFLRNLLPRTPTCQSSTDCSPYARILRSRRSPLLKSGPFGKKY

SEQ ID NO: 11210 - protein, 575 aa, Homo sapiens
MTSKKLVNSVAGCADDALAGLVACNPNLQLLQGHRVALRSDLDSLKGRVALLSGGGSGHEPAHAGFIGKGMLTGVIAGAVFTSPAVGSILAAIRAVAQAGTVGTLLIVKNYTGDRLNFGLAREQARAEGIPVEMVVIGDDSAFTVLKKAGRRGLCGTVLIHKVAGALAEAGVGLEEIAKQVNVVAKAMGTLGVSLSSCSVPGSKPTFELSADEVELGLGIHGEAGVRRIKMATADEIVKLMLDHMTNTTNASHVPVQPGSSVVMMVNNLGGLSFLELGIIADATVRSLEGRGVKIARALVGTFMSALEMPGISLTLLLVDEPLLKLIDAETTAAAWPNVAAVSITGRKRSRVAPAEPQEAPDSTAAGGSASKRMALVLERVCSTLLGLEEHLNALDRAAGDGDCGTTHSRAARAIQEWLKEGPPPASPAQLLSKLSVLLLEKMGGSSGALYGLFLTAAAQPLKAKTSLPAWSAAMDAGLEAMQKYGKAAPGDRTMLDSLWAAGQELQAWKSPGADLLQVLTKAVKSAEAAAEATKNMEAGAGRASYISSARLEQPDPGAVAAAAILRAILEVLQS

SEQ ID NO: 11211 - protein, 428 aa, Homo sapiens
MGNCHTVGPNEALVVSGGCCGSDYKQYVFGGWAWAWWCISDTQRISLEIMTLQPRCEDVETAEGVALTVTGVAQVKIMTEKELLAVACEQFLGKNVQDIKNVVLQTLEGHLRSILGTLTVEQIYQDRDQFAKLVREVAAPDVGRMGIEILSFTIKDVYDKVDYLSSLGKTQTAVVQRDADIGVAEAERDAGIREAECKKEMLDVKFMADTKIADSKRAFELQKSAFSEEVNIKTAEAQLAYELQGAREQQKIRQEEIEIEVVQRKKQIAVEAQEILRTDKELIATVRRPAEAEAHRIQQIAEGEKVKQVLLAQAEAEKIRKIGEAEAAVIEAMGKAEAERMKLKAEAYQKYGDAAKMALVLEALPQIAAKIAAPLTKVDEIVVLSGDNSKVTSEVNRLLAELPASVHALTGVDLSKIPLIKKATGVQV

SEQ ID NO: 11212 - protein, 527 aa, Homo sapiens [sequence omitted]

SEQ ID NO: 11213 - protein, 524 aa, Homo sapiens
MYALFLLASLLGAALAGPVLGLKECTRGSAVWCQNVKTASDCGAVKHCLQTVWNKPTVKSLPCDICKDVVTAAGDMLKDNATEEEILVYLEKTCDWLPKPNMSASCKEIVDSYLPVILDIIKGEMSRPGEVCSALNLCESLQKHLAELNHQKQLESNKIPELDMTEVVAPFMANIPLLLYPQDGPRSKPQPKDNGDVCQDCIQMVTDIQTAVRTNSTFVQALVEHVKEECDRLGPGMADICKNYISQYSEIAIQMMMHMQPKEICALVGFCDEVKEMPMQTLVPAKVASKNVIPALELVEPIKKHEVPAKSDVYCEVCEFLVKEVTKLIDNNKTEKEILDAFDKMCSKLPKSLSEECQEVVDTYGSSILSILLEEVSPELVCSMLHLCSGTRLPALTVHVTQPKDGGFCEVCKKLVGYLDRNLEKNSTKQEILAALEKGCSFLPDPYQKQCDQFVAEYEPVLIEILVEVMDPSFVCLKIGACPSAHKPLLGTEKCIWGPSYWCQNTETAAQCNAVEHCKRHVWN

SEQ ID NO: 11214 - protein, 760 aa, Homo sapiens
MESSPFNRRQWTSLSLRVTAKELSLVNKNKSSAIVEIFSKYQKAAEETNMEKKRSNTENLSQHFRKGTLTVLKKKWENPGLGAESHTDSLRNSSTEIRHRADHPPAEVTSHAASGAKADQEEQIHPRSRLRSPPEALVQGRYPHIKDGEDLKDHSTESKKMENCLGESRHEVEKSEISENTDASGKIEKYNVPLNRLKMMFEKGEPTQTKILRAQSRSASGRKISENSYSLDDLEIGPGQLSSSTFDSEKNESRRNLELPRLSETSIKDRMAKYQAAVSKQSSSTNYTNELKASGGEIKIHKMEQKENVPPGPEVCITHQEGEKISANENSLAVRSTPAEDDSPGDSQVKSEVQQPVHPKPLSPDSRASSLSESSPPKAMKKFQAPARETCVECQKTVYPMERLLANQQVFHISCFRCSYCNNKLSLGTYASLHGRIYCKPHFNQLFKSKGNYDEGFGHRPHKDLWASKNENEEILERPAQLANARETPHSPGVEDAPIAKVGVLAASMEAKASSQQEKEDKPAETKKLRIAWPPPTELGSSGSALEEGIKMSKPKWPPEDEISKPEVPEDVDLDLKKLRRSSSLKERSRPFTVAASFQSTSVKSPKTVSPPIRKGWSMSEQSEESVGGRVAERKQVENAKASKKNGNVGKTTWQNKESKGETGKRSKEGHSLEMENENLVENGADSDEDDNSFLKQQSPQEPKSLNWSSFVDNTFAEEFTTQNQKSQDVELWEGEVVKELSVEEQIKRNRYYDEDEDEE

SEQ ID NO: 11215 - protein, 439 aa, Homo sapiens
MPAIAVLAAAAAAWCFLQVESRHLDALAGGAGPNHGNFLDNDQWLSTVSQYDRDKYWNRFRDDDYFRNWNPNKPFDQALDPSKDPCLKVKCSPHKVCVTQDYQTALCVSRKHLLPRQKKGNVAQKHWVGPSNLVKCKPCPVAQSAMVCGSDGHSYTSKCKLEFHACSTGKSLATLCDGPCPCLPEPEPPKHKAERSACTDKELRNLASRLKDWFGALHEDANRVIKPTSSNTAQGRFDTSILPICKDSLGWMFNKLDMNYDLLLDPSEINAIYLDKYEPCIKPLFNSCDSFKDGKLSNNEWCYCFQKPGGLPCQNEMNRIQKLSKGKSLLGAFIPRCNEEGYYKATQCHGSTGQCWCVDKYGNELAGSRKQGAVSCEEEQETSGDFGSGGSVVLLDDLEYERELGPKDKEGKLRVHTRAVTEDDEDEDDDKEDEVGYIW

SEQ ID NO: 11216 - protein, 311 aa, Homo sapiens
MGVPTALEAGSWRWGSLLFALFLAASLGPVAAFKVATPYSLYVCPEGQNVTLTCRLLGPVDKGHDVTFYKTWYRSSRGEVQTCSERRPIRNLTFQDLHLHHGGHQAANTSHDLAQRHGLESASDHHGNFSITMRNLTLLDSGLYCCLVVEIRHHHSEHRVHGAMELQVQTGKDAPSNCVVYPSSSQDSENITAAALATGACIVGILCLPLILLLVYKQRQAASNRRAQELVRMDSNIQGIENPGFEASPPAQGIPEAKVRHPLSYVAQRQPSESGRHLLSEPSTPLSPPGPGDVFFPSLDPVPDSPNFEVI

SEQ ID NO: 11217 - protein, 515 aa, Homo sapiens
MAARAGFQSVAPSGGAGASGGAGAAAALGPGGTPGPPVRMGPAPGQGLYRSPMPGAAYPRPGMLPGSRMTPQGPSMGPPGYGGNPSVRPGLAQSGMDQSRKRPAPQQIQQVQQQAVQNRNHNAKKKKMADKILPQRIRELVPESQAYMDLLAFERKLDQTIMRKRLDIQEALKRPIKQKRKLRIFISNTFNPAKSDAEDGEGTVASWELRVEGRLLEDSALSKYDATKQKRKFSSFFKSLVIELDKDLYGPDNHLVEWHRTATTQETDGFQVKRPGDVNVRCTVLLMLDYQPPQFKLDPRLARLLGIHTQTRPVIIQALWQYIKTHKLQDPHEREFVICDKYLQQIFESQRMKFSEIPQRLHALLMPPEPIIINHVISVDPNDQKKTACYDIDVEVDDTLKTQMNSFLLSTASQQEIATLDNKIHETIETINQLKTQREFMLSFARDPQGFINDWLQSQCRDLKTMTDVVGNPEEERRAEFYFQPWAQEAVCRYFYSKVQQRRQELEQALGIRNT

SEQ ID NO: 11218 - protein, 484 aa, Homo sapiens
MATSILGEEPRFGTTPLAMLAATCNKIGNTSPLTTLPESSAFAKGGFHPWKRSSSSCNLGSSLSGFAVATGGRGSGGLAGGSGAANSAFCLASTSPTSSAFSSDYGGLFSNSAAAAAAAAGVSPQEAGGQSAFISKVHTTAADGLYPRVGMAHPYESWYKSGFHSTLAAGEVTNGAASSWWDVHSSPGSWLEVQNPAGGLQSSLHSGAPQASLHSQLGTYNPDFSSLTHSAFSSTGLGSSAAAASHLLSTSQHLLAQDGFKPVLPSYSDSSAAVAAAAASAMISGAAAAAAGGSSARSARRYSGRATCDCPNCQEAERLGPAGASLRRKGLHSCHIPGCGKVYGKTSHLKAHLRWHTGERPFVCNWLFCGKRFTRSDELQRHLRTHTGEKRFACPVCNKRFMRSDHLSKHIKTHNGGGGGKKGSDSDTDASNLETPRSESPDLILHDSGVSAARAAAAAAAAAAAAAAAASAGGKEAASGPNDS

SEQ ID NO: 11219 - protein, 163 aa, Homo sapiens
MGSTWGSPGWVRLALCLTGLVLSLYALHVKAARARDRDYRALCDVGTAISCSRVFSSRWGRGFGLVEHVLGQDSILNQSNSIFGCIFYTLQLLLGCLRTRWASVLMLLSSLVSLAGSVYLAWILFFVLYDFCIVCITTYAINVSLMWLSFRKVQEPQGKAKRH

SEQ ID NO: 11220 - protein, 827 aa, Homo sapiens
MEGAGGANDKKNRISSERRKEKSRDAARSRRSKESEVFYELAHQLPLPHNVSSHLDKASVMRLTISYLRVRKLLDAGDLDIEDDMKAQMNCFYLKALDGFVMVLTDDGDMIYISDNVNKYMGLTQFELTGHSVFDFTHPCDHEEMREMLTHRNGLVKKGKEQNTQRSFFLRMKCTLTSRGRTMNIKSATWKVLHCTGHIHVYDTNSNQPQCGYKKPPMTCLVLICEPIPHPSNIEIPLDSKTFLSRHSLDMKFSYCDERITELMGYEPEELLGRSIYEYYHALDSDHLTKTHHDMFTKGQVTTGQYRMLAKRGGYVWVETQATVIYNTKNSQPQCIVCVNYVVSGIIQHDLIFSLQQTECVLKPVESSDMKMTQLFTKVESEDTSSLFDKLKKEPDALTLLAPAAGDTIISLDFGSNDTETDDQQLEEVPLYNDVMLPSPNEKLQNINLAMSPLPTAETPKPLRSSADPALNQEVALKLEPNPESLELSFTMPQIQDQTPSPSDGSTRQSSPEPNSPSEYCFYVDSDMVNEFKLELVEKLFAEDTEAKNPFSTQDTDLDLEMLAPYIPMDDDFQLRSFDQLSPLESSSASPESASPQSTVTVFQQTQIQEPTANATTTTATTDELKTVTKDRMEDIKILIASPSPTHIHKETTSATSSPYRDTQSRTASPNRAGKGVIEQTEKSHPRSPNVLSVALSQRTTVPEEELNPKILALQNAQRKRKMEHDGSLFQAVGIGTLLQQPDDHAATTSLSWKRVKGCKSSEQNGMEQKTIILIPSDLACRLLGQSMDESGLPQLTSYDCEVNAPIQGSRNLLQGEELLRALDQVN

SEQ ID NO: 11221 - protein, 872 aa, Homo sapiens [sequence omitted]

SEQ ID NO: 11222 - protein, 473 aa, Homo sapiens
METPTPLPPVPASPTCNPAPRTIQIEFPQHSSSLLESLNRHRLEGKFCDVSLLVQGRELRAHKAVLAAASPYFHDKLLLGDAPRLTLPSVIEADAFEGLLQLIYSGRLRLPLDALPAHLLVASGLQMWQVVDQCSEILRELETSGGGISARGGNSYHALLSTTSSTGGWCIRSSPFQTPVQSSASTESPASTESPVGGEGSELGEVLQIQVEEEEEEEEDDDDEDQGSATLSQTPQPQRVSGVFPRPHGPHPLPMTATPRKLPEGESAPLELPAPPALPPKIFYIKQEPFEPKEEISGSGTQPGGAKEETKVFSGGDTEGNGELGFLLPSGPGPTSGGGGPSWKPVDLHGNEILSGGGGPGGAGQAVHGPVKLGGTPPADGKRFGCLCGKRFAVKPKRDRHIMLTFSLRPFGCGICNKRFKLKHHLTEHMKTHAGALHACPHCGRRFRVHACFLRHRDLCKGQGWATAHWTYK

SEQ ID NO: 11223 - protein, 275 aa, Homo sapiens
MQNNEIIKPAKYFSELEKSILLALVEKYKYVLECKKSDARTIALKQRTWQALAHEYNSQPSVSLRDFKQLKKCWENIKARTKKIMAHERREKVKRSVSPLLSTHVLGKEKIASMLPEQLYFLQSPPEEEPEYHPDASAQESFAVSNRELCDDEKEFIHFPVCEGTSQPEPSCSAVRITANKNYRSKTSQEGALKKMHEEEHHQQMSILQLQLIQMNEVHVAKIQQIERECEMAEEEHRIKMEVLNKKKMYWERKLQTFTKEWPVSSFNRPFPNSP

SEQ ID NO: 11224 - protein, 386 aa, Homo sapiens
MEELDALLEELERSTLQDSDEYSNPAPLPLDQHSRKETNLDETSEILSIQDNTSPLPAQLVYTTNIQELNVYSEAQEPKESPPPSKTSAAAQLDELMAHLTEMQAKVAVRADAGKKHLPDKQDHKASLDSMLGGLEQELQDLGIATVPKGHCASCQKPIAGKVIHALGQSWHPEHFVCTHCKEEIGSSPFFERSGLAYCPNDYHQLFSPRCAYCAAPILDKVLTAMNQTWHPEHFFCSHCGEVFGAEGFHEKDKKPYCRKDFLAMFSPKCGGCNRPVLENYLSAMDTVWHPECFVCGDCFTSFSTGSFFELDGRPFCELHYHHRRGTLCHGCGQPITGRCISAMGYKFHPEHFVCAFCLTQLSKGIFREQNDKTYCQPCFNKLFPL

SEQ ID NO: 11225 - protein, 382 aa, Homo sapiens
MGAFLDKPKMEKHNAQGQGNGLRYGLSSMQGWRVEMEDAHTAVIGLPSGLESWSFFAVYDGHAGSQVAKYCCEHLLDHITNNQDFKGSAGAPSVENVKNGIRTGFLEIDEHMRVMSEKKHGADRSGSTAVGVLISPQHTYFINCGDSRGLLCRNRKVHFFTQDHKPSNPLEKERIQNAGGSVMIQRVNGSLAVSRALGDFDYKCVHGKGPTEQLVSPEPEVHDIERSEEDDQFIILACDGIWDVMGNEELCDFVRSRLEVTDDLEKVCNEVVDTCLYKGSRDNMSVILICFPNAPKVSPEAVKKEAELDKYLECRVEEIIKKQGEGVPDLVHVMRTLASENIPSLPPGGELASKRNVIEAVYNRLNPYKNDDTDSTSTDDMW

SEQ ID NO: 11226 - protein, 314 aa, Homo sapiens
MRIAVICFCLLGITCAIPVKQADSGSSEEKQLYNKYPDAVATWLNPDPSQKQNLLAPQNAVSSEETNDFKQETLPSKSNESHDHMDDMDDEDDDDHVDSQDSIDSNDSDDVDDTDDSHQSDESHHSDESDELVTDFPTDLPATEVFTPVVPTVDTYDGRGDSVVYGLRSKSKKFRRPDIQYPDATDEDITSHMESEELNGAYKAIPVAQDLNAPSDWDSRGKDSYETSQLDDQSAETHSHKQSRLYKRKANDESNEHSDVIDSQELSKVSREFHSHEFHSHEDMLVVDPKSKEEDKHLKFRISHELDSASSEVN

SEQ ID NO: 11227 - protein, 626 aa, Homo sapiens
MPCVQAQYSPSPPGSSYAAQTYSSEYTTEIMNPDYTKLTMDLGSTEITATATTSLPSISTFVEGYSSNYELKPSCVYQMQRPLIKVEEGRAPSYHHHHHHHHHHHHHHQQQHQQPSIPPASSPEDEVLPSTSMYFKQSPPSTPTTPAFPPQAGALWDEALPSAPGCIAPGPLLDPPMKAVPTVAGARFPLFHFKPSPPHPPAPSPAGGHHLGYDPTAAAALSLPLGAAAAAGSQAAALESHPYGLPLAKRAAPLAFPPLGLTPSPTASSLLGESPSLPSPPSRSSSSGEGTCAVCGDNAACQHYGVRTCEGCKGFFKRTVQKNAKYVCLANKNCPVDKRRRNRCQYCRFQKCLSVGMVKEVVRTDSLKGRRGRLPSKPKSPLQQEPSQPSPPSPPICMMNALVRALTDSTPRDLDYSRYCPTDQAAAGTDAEHVQQFYNLLTASIDVSRSWAEKIPGFTDLPKEDQTLLIESAFLELFVLRLSIRSNTAEDKFVFCNGLVLHRLQCLRGFGEWLDSIKDFSLNLQSLNLDIQALACLSALSMITERHGLKEPKRVEELCNKITSSLKDHQSKGQALEPTESKVLGALVELRKICTLGLQRIFYLKLEDLVSPPSIIDKLFLDTLPF

SEQ ID NO: 11228 - protein, 251 aa, Homo sapiens
MSFLGGFFGPICEIDIVLNDGETRKMAEMKTEDGKVEKHYLFYDGESVSGKVNLAFKQPGKRLEHQGIRIEFVGQIELFNDKSNTHEFVNLVKELALPGELTQSRSYDFEFMQVEKPYESYIGANVRLRYFLKVTIVRRLTDLVKEYDLIVHQLATYPDVNNSIKMEVGIEDCLHIEFEYNKSKYHLKDVIVGKIYFLLVRIKIQHMELQLIKKEITGIGPSTTTETETIAKYEIMDGAPVKGDNFMEKSS

SEQ ID NO: 11229 - protein, 556 aa, Homo sapiens
MRVFCVGLLLFSVTWAAPTFQPQTEKTKQSCVEEQRITYKGHYEKHGHYVFKCVYMSPEKKNQTDVKQEEKNKDNIGFHHLGKRINQELSSKENIVQERKKDLSLSEASENKGSSKSQNYFTNRQRLNKEYSISNKENTHNGLRMSIYPKSTGNKGFEDGDDAISKLHDQEEYGAALIRNNMQHIMGPVTAIKLLGEENKENTPRNVLNIIPASMNYAKAHSKDKKKPQRDSQAQKSPVKSKSTHRIQHNIDYLKHLSKVKKIPSDFEGSGYTDLQERGDNDISPFSGDGQPFKDIPGKGEATGPDLEGKDIQTGFAGPSEAESTHLDTKKPGYNEIPEREENGGNTIGTRDETAKEADAVDVSLVEGSNDIMGSTNFKELPGREGNRVDAGSQNAHQGKVEFHYPPAPSKEKRKEGSSDAAESTNYNEIPKNGKGSTRKGVDHSNRNQATLNEKQRFPSKGKSQGLPIPSRGLDNEIKNEMDSFNGPSHENIITHGRKYHYVPHRQNNSTRNKGMPQGKGSWGRQPHSNRRFSSRRRDDSSESSDSGSSSESDGD

SEQ ID NO: 11230 - protein, 430 aa, Homo sapiens
MDEFHPFIEALLPHVRAFAYTWFNLQARKRKYFKKHEKRMSKDEERAVKDELLGEKPEVKQKWASRLLAKLRKDIRPECREDFVLSITGKKAPGCVLSNPDQKGKMRRIDCLRQADKVWRLDLVMVILFKGIPLESTDGERLVKAAQCGHPVLCVQPHHIGVAVKELDLYLAYFVRERDAEQSGSPRTGMGSDQEDSKPITLDTTDFQESFVTSGVFSVTELIQVSRTPVVTGTGPNFSLGELQGHLAYDLNPASTGLRRTLPSTSSSGSKRHKSGSMEEDVDTSPGGDYYTSPSSPTSSSRNWTEDMEGGISSPVKKTEMDKSPFNSPSPQDSPRLSSFTQHHRPVIAVHSGIARSPHPSSALHFPTTSILPQTASTYFPHTAIRYPPHLNPQDPLKDLVSLACDPASQQPGPPTLRPTRPLQTVPLWD

SEQ ID NO: 11231 - protein, 193 aa, Homo sapiens
MLPGLRRLLQAPASACLLLMLLALPLAAPSCPMLCTCYSSPPTVSCQANNFSSVPLSLPPSTQRLFLQNNLIRTLRPGTFGSNLLTLWLFSNNLSTIYPGTFRHLQALEELDLGDNRHLRSLEPDTFQGLERLQSLHLYRCQLSSLPGNIFRGLVSLQYLYLQENSLLHLQGPLPKGLCSCFSHPPSSLPTSR

SEQ ID NO: 11232 - protein, 633 aa, Homo sapiens
MEPAPARSPRPQQDPARPQEPTMPPPETPSEGRQPSPSPSPTERAPASEEEFQFLRCQQCQAEAKCPKLLPCLHTLCSGCLEASGMQCPICQAPWPLGADTPALDNVFFESLQRRLSVYRQIVDAQAVCTRCKESADFWCFECEQLLCAKCFEAHQWFLKHEARPLAELRNQSVREFLDGTRKTNNIFCSNPNHRTPTLTSIYCRGCSKPLCCSCALLDSSHSELKCDISAEIQQRQEELDAMTQALQEQDSAFGAVHAQMHAAVGQLGRARAETEELIRERVRQVVAHVRAQERELLEAVDARYQRDYEEMASRLGRLDAVLQRIRTGSALVQRMKCYASDQEVLDMHGFLRQALCRLRQEEPQSLQAAVRTDGFDEFKVRLQDLSSCITQGKDAAVSKKASPEAASTPRDPIDVDLPEEAERVKAQVQALGLAEAQPMAVVQSVPGAHPVPVYAFSIKGPSYGEDVSNTTTAQKRKCSQTQCPRKVIKMESEEGKEARLARSSPEQPRPSTSKAVSPPHLDGPPSPRSPVIGSEVFLPNSNHVASGAGEAEERVVVISSSEDSDAENSSSRELDDSSSESSDLQLEGPSTLRVLDENLADPQAEDRPLVFFDLKIDNESGFSWGYPHPFLI

SEQ ID NO: 11233 - protein, 405 aa, Homo sapiens
MAAHLLPICALFLTLLDMAQGFRGPLLPNRPFTTVWNANTQWCLERHGVDVDVSVFDVVANPGQTFRGPDMTIFYSSQLGTYPYYTPTGEPVFGGLPQNASLIAHLARTFQDILAAIPAPDFSGLAVIDWEAWRPRWAFNWDTKDIYRQRSRALVQAQHPDWPAPQVEAVAQDQFQGAARAWMAGTLQLGRALRPRGLWGFYGFPDCYNYDFLSPNYTGQCPSGIRAQNDQLGWLWGQSRALYPSIYMPAVLEGTGKSQMYVQHRVAEAFRVAVAAGDPNLPVLPYVQIFYDTTNHFLPLESCQAIKEYMDTTLGPFILNVTSGALLCSQALCSGHGRCVRRTSHPKALLLLNPASFSIQLTPGGGPLSLRGALSLEDQAQMAVEFKCRCYPGWQAPWCERKSMW

SEQ ID NO: 11234 - protein, 1218 aa, Homo sapiens
MAFTERVNSSGNSLYNDDRNLLRIREKERRNQEAHQEKEAFPEKIPLFGEPYKTAKGDELSSRIQNMLGNYEEVKEFLSTKSHTHRLDASENRLGKPKYPLIPDKGSSIPSSSFHTSVHHQSIHTPASGPLSVGNISHNPKMAQPRTEPMPSLHAKSCGPPDSQHLTQDRLGQEGFGSSHHKKGDRRADGDHCASVTDSAPERELSPLISLPSPVPPLSPIHSNQQTLPRTQGSSKVHGSSNNSKGYCPAKSPKDLAVKVHDKETPQDSLVAPAQPPSQTFPPPSLPSKSVAMQQKPTAYVRPMDGQDQAPSESPELKPLPEDYRQQTFEKTDLKVPAKAKLTKLKMPSQSVEQTYSNEVHCVEEILKEMTHSWPPPLTAIHTPSTAEPSKFPFPTKDSQHVSSVTQNQKQYDTSSKTHSNSQQGTSSMLEDDLQLSDSEDSDSEQTPEKPPSSSAPPSAPQSLPEPVASAHSSSAESESTSDSDSSSDSESESSSSDSEENEPLETPAPEPEPPTTNKWQLDNWLTKVSQPAAPPEGPRSTEPPRRHPESKGSSDSATSQEHSESKDPPPKSSSKAPRAPPEAPHPGKRSCQKSPAQQEPPQRQTVGTKQPKKPVKASARAGSRTSLQGEREPGLLPYGSRDQTSKDKPKVKTKGRPRAAASNEPKPAVPPSSEKKKHKSSLPAPSKALSGPEPAKDNVEDRTPEHFALVPLTESQGPPHSGSGSRTSGCRQAVVVQEDSRKDRLPLPLRDTKLLSPLRDTPPPQSLMVKITLDLLSRIPQPPGKGSRQRKAEDKQPPAGKKHSSEKRSSDSSSKLAKKRKGEAERDCDNKKIRLEKEIKSQSSSSSSSHKESSKTKPSRPSSQSSKKEMLPPPPVSSSSQKPAKPALKRSRREADTCGQDPPKSASSTKSNHKDSSIPKQRRVEGKGSRSSSEHKGSSGDTANPFPVPSLPNGNSKPGKPQVKFDKQQADLHMREAKKMKQKAELMTDRVGKAFKYLEAVLSFIECGIATESESQSSKSAYSVYSETVDLIKFIMSLKSFSDATAPTQEKIFAVLCMRCQSILNMAMFRCKKDIAIKYSRTLNKHFESSSKVAQAPSPCIARSTGTPSPLSPMPSPASSVGSQSSAGSVGSSGVAATISTPVTIQNMTSSYVTITSHVLTAFDLWEQAEALTRKNKEFFARLSTNVCTLALNSSLVDLVHYTRQGFQQLQELTKTP

SEQ ID NO: 11235 - protein, 250 aa, Homo sapiens
MSAEVIHQVEEALDTDEKEMLLFLCRDVAIDVVPPNVRDLLDILRERGKLSVGDLAELLYRVRRFDLLKRILKMDRKAVETHLLRNPHLVSDYRVLMAEIGEDLDKSDVSSLIFLMKDYMGRGKISKEKSFLDLVVELEKLNLVAPDQLDLLEKCLKNIHRIDLKTKIQKYKQSGGWNGTWMTKASFSLWLEIASLYILHIPDLPTPLPCIFMISAKCCQAVLNISVFKKESGICTGWQSYGHSGVLHVC

SEQ ID NO: 11236 - protein, 799 aa, Homo sapiens
MKPSPAGTAKELEPPAPARGEQRTAEPEGRWREKGEADTERQRTRERQEATLAGLAELEYLRQRQELLVRGALRGAGGAGAAAPRAGELLGEAAQRSRLEEKFLEENILLLRKQLNCLRRRDAGLLNQLQELDKQISDLRLDVEKTSEEHLETDSRPSSGFYELSDGASGSLSNSSNSVFSECLSSCHSSTCFCSPLEATLSLSDGCPKSADVNPKYQCDLVSKNGNDVYRYPSPLHAVAVQSPMFLLCLTGNPLREEDRLGNHASDICGGSELDAVKTDSSLPSPSSLWSASHPSSSKKMDGYILSLVQKKTHPVRTNKPRTSVNADPTKGLLRNGSVCVRAPGGVSQGNSVNLKNSKQACLPSGGIPSLNNGTFSPPKQWSKESKAEQAESKRVPLPEGCPSGAASDLQSKHLPKTAKPASQEHARCSAIGTGESPKESAQLSGASPKESPSRGPAPPQENKVVQPLKKMSQKNSLQGVPPATPPLLSTAFPVEERPALDFKSEGSSQSLEEAHLVKAQFIPGQQPSVRLHRGHRNMGVVKNSSLKHRGPALQGLENGLPTVREKTRAGSKKCRFPDDLDTNKKLKKASSKGRKSGGGPEAGVPGRPAGGGHRAGSRAHGHGREAVVAKPKHKRTDYRRWKSSAEISYEEALRRARRGRRENVGLYPAPVPLPYASPYAYVASDSEYSAECESLFHSTVVDTSEDEQSNYTTNCFGDSESSVSEGEFVGESTTTSDSEESGGLIWSQFVQTLPIQTVTAPDLHNHPAKTFVKIKASHNLKKKILRFRSGSLKLMTTV

SEQ ID NO: 11237 - protein, 260 aa, Homo sapiens
MKDRTQELRTAKDSDDDDDVAVTVDRDRFMDEFFEQVEEIRGFIDKIAENVEEVKRKHSAILASPNPDEKTKEELEELMSDIKKTANKVRSKLKSIEQSIEQEEGLNRSSADLRIRKTQHSTLSRKFVEVMSEYNATQSDYRERCKGRIQRQLEITGRTTTSEELEDMLESGNPAIFASGIIMDSSISKQALSEIETRHSEIIKLENSIRELHDMFMDMAMLVESQPQGAFLKSCPEPQPNPEEGALWSSGAPGPAGRDD

SEQ ID NO: 11238 - protein, 89 aa, Homo sapiens
MAAQIPESDQIKQFKEFLGTYNKLTETCFLDCVKDFTTREVKPEETTCSEHCLQKYLKMTQRISMRFQEYHIQQNEALAAKAGLLGQPR

SEQ ID NO: 11239 - protein, 167 aa, Homo sapiens
MKLWVSALLMAWFGVLSCVQAEFFTSIGHMTDLIYAEKELVQSLKEYILVEEAKLSKIKSWANKMEALTSKSAADAEGYLAHPVNAYKLVKRLNTDWPALEDLVLQDSAAGFIANLSVQRQFFPTDEDEIGAAKALMRLQDTYRLDPGTISRGELPGTKYQAMLSVD

SEQ ID NO: 11240 - protein, 1203 aa, Homo sapiens
MKAADEPAYLTVGTDVSAKYRGAFCEAKIKTVKRLVKVKVLLKQDNTTQLVQDDQVKGPLRVGAIVETRTSDGSFQEAIISKLTDASWYTVVFDDGDERTLRRTSLCLKGERHFAESETLDQLPLTNPEHFGTPVIAKKTNRGRRSSLPVTEDEKEEESSEEEDEDKRRLNDELLGKVVSVVSATERTEWYPALVISPSCNDDITVKKDQCLVRSFIDSKFYSIARKDIKEVDILNLPESELSTKPGLQKASIFLKTRVVPDNWKMDISEILESSSSDDEDGPAEENDEEKEKEAKKTEEEVPEEELDPEERDNFLQQLYKFMEDRGTPINKPPVLGYKDLNLFKLFRLVYHQGGCDNIDSGAVWKQIYMDLGIPILNSAASYNVKTAYRKYLYGFEEYCRSANIQFRTVHHHEPKVKEEKKDLEESMEEALKLDQEMPLTEVKSEPEENIDSNSESEREEIELKSPRGRRRIARDVNSIKKEIEEEKTEDKLKDNDTENKDVDDDYETAEKKENELLLGRKNTPKQKEKKIKKQEDSDKDSDEEEEKSQEREETESKCDSEGEEDEEDMEPCLTGTKVKVKYGRGKTQKIYEASIKSTEIDDGEVLYLVHYYGWNVRYDEWVKADRIIWPLDKGGPKKKQKKKAKNKEDSEKDEKRDEERQKSKRGRPPLKSTLSSNMPYGLSKTANSEGKSDSCSSDSETEDALEKNLINEELSLKDELEKNENLNDDKLDEENPKISAHILKENDRTQMQPLETLKLEVGENEQIVQIFGNKMEKTEEVKKEAEKSPKGKGRRSKTKDLSLEIIKISSFGQNEAGSEPHIEAHSLELSSLDNKNFSSATEDEIDQCVKEKKLKRKILGQSSPEKKIRIENGMEMTNTVSQERTSDCIGSEGMKNLNFEQHFERENEGMPSLIAESNQCIQQLTSERFDSPAEETVNIPLKEDEDAMPLIGPETLVCHEVDLDDLDEKDKTSIEDVAVESSESNSLVSIPPALPPVVQHNFSVASPLTLSQDESRSVKSESDITIEVDSIAEESQEGLCERESANGFETNVASGTCSIIVQERESREKGQKRPSDGNSGLMAKKQKRTPKRTSAAAKNEKNGTGQSSDSEDLPVLDNSNELDNMNSTERISFLQEKLQEIRKYYMSLKSEVATIDRRRKRLKKKDREVSHAGASMSSASSDTGMSPSSSSPPQNVLAVECR

SEQ ID NO: 11241 - protein, 226 aa, Homo sapiens
MAAMRWRWWQRLLPWRLLQARGFPQNSAPSLGLGARTYSQGDCSYSRTALYDLLGVPSTATQAQIKAAYYRQCFLYHPDRNSGSAEAAERFTRISQAYVVLGSATLRRKYDRGLLSDEDLRGPGVRPSRTPAPDPGSPRTPPPTSRTHDGSRASPGANRTMFNFDAFYQAHYGEQLERERRLRARREALRKRQEYRSMKGLRWEDTRDTAAIFLIFSIFIIIGFYI

SEQ ID NO: 11242 - protein, 653 aa, Homo sapiens
MTANHESYLLMASTQNDMEDWVKSIRRVIWGPFGGGIFGQKLEDTVRYEKRYGNRLAPMLVEQCVDFIRQRGLKEEGLFRLPGQANLVKELQDAFDCGEKPSFDSNTDVHTVASLLKLYLRELPEPVIPYAKYEDFLSCAKLLSKEEEAGVKELAKQVKSLPVVNYNLLKYICRFLDEVQSYSGVNKMSVQNLATVFGPNILRPKVEDPLTIMEGTVVVQQLMSVMISKHDCLFPKDAELQSKPQDGVSNNNEIQKKATMGQLQNKENNNTKDSPSRQCSWDKSESPQRSSMNNGSPTALSGSKTNSPKNSVHKLDVSRSPPLMVKKNPAFNKGSGIVTNGSFSSSNAEGLEKTQTTPNGSLQARRSSSLKVSGTKMGTHSVQNGTVRMGILNSDTLGNPTNVRNMSWLPNGYVTLRDNKQKEQAGELGQHNRLSTYDNVHQQFSMMNLDDKQSIDSATWSTSSCEISLPENSNSCRSSTTTCPEQDFFGGNFEDPVLDGPPQDDLSHPRDYESKSDHRSVGGRSSRATSSSDNSETFVGNSSSNHSALHSLVSSLKQEMTKQKIEYESRIKSLEQRNLTLETEMMSLHDELDQERKKFTMIEIKMRNAERAKEDAEKRNDMLQKEMEQFFSTFGELTVEPRRTERGNTIWIQ

SEQ ID NO: 11243 - protein, 748 aa, Homo sapiens
MEENNDSTENPQQGQGRQNAIKCGWLRKQGGFVKTWHTRWFVLKGDQLYYFKDEDETKPLGTIFLPGNKVSEHPCNEENPGKFLFEVVPGGDRDRMTANHESYLLMASTQNDMEDWVKSIRRVIWGPFGGGIFGQKLEDTVRYEKRYGNRLAPMLVEQCVDFIRQRGLKEEGLFRLPGQANLVKELQDAFDCGEKPSFDSNTDVHTVASLLKLYLRELPEPVIPYAKYEDFLSCAKLLSKEEEAGVKELAKQVKSLPVVNYNLLKYICRFLDEVQSYSGVNKMSVQNLATVFGPNILRPKVEDPLTIMEGTVVVQQLMSVMISKHDCLFPKDAELQSKPQDGVSNNNEIQKKATMGQLQNKENNNTKDSPSRQCSWDKSESPQRSSMNNGSPTALSGSKTNSPKNSVHKLDVSRSPPLMVKKNPAFNKGSGIVTNGSFSSSNAEGLEKTQTTPNGSLQARRSSSLKVSGTKMGTHSVQNGTVRMGILNSDTLGNPTNVRNMSWLPNGYVTLRDNKQKEQAGELGQHNRLSTYDNVHQQFSMMNLDDKQSIDSATWSTSSCEISLPENSNSCRSSTTTCPEQDFFGGNFEDPVLDGPPQDDLSHPRDYESKSDHRSVGGRSSRATSSSDNSETFVGNSSSNHSALHSLVSSLKQEMTKQKIEYESRIKSLEQRNLTLETEMMSLHDELDQERKKFTMIEIKMRNAERAKEDAEKRNDMLQKEMEQFFSTFGELTVEPRRTERGNTIWIQ

SEQ ID NO: 11244 - protein, 290 aa, Homo sapiens
MERCSRCHRLLLLLPLVLGLSAAPGWAGAPPVDVLRALRFPSLPDGVRRAKGICPADVAYRVARPAQLSAPTRQLFPGGFPKDFSLLTVVRTRPGLQAPLLTLYSAQGVRQLGLELGRPVRFLYEDQTGRPQPPSQPVFRGLSLADGKWHRVAVAVKGQSVTLIVDCKKRVTRPLPRSARPVLDTHGVIIFGARILDEEVFEGDVQELAIVPGVQAAYESCEQKELECEGGQRERPQNQQPHRAQRSPQQQPSRLHRPQNQEPQSQVRELGEPPSAAHPREGRHPGISPP

SEQ ID NO: 11245 - protein, 1057 aa, Homo sapiens
MLCWGNASFGQLGLGGIDEEIVLEPRKSDFFINKRVRDVGCGLRHTVFVLDDGTVYTCGCNDLGQLGHEKSRKKPEQVVALDAQNIVAVSCGEAHTLALNDKGQVYAWGLDSDGQLGLVGSEECIRVPRNIKSLSDIQIVQVACGYYHSLALSKASEVFCWGQNKYGQLGLGTDCKKQTSPQLLKSLLGIPFMQVAAGGAHSFVLTLSGAIFGWGRNKFGQLGLNDENDRYVPNLLKSLRSQKIVYICCGEDHTAALTKEGGVFTFGAGGYGQLGHNSTSHEINPRKVFELMGSIVTEIACGRQHTSAFVPSSGRIYSFGLGGNGQLGTGSTSNRKSPFTVKGNWYPYNGQCLPDIDSEEYFCVKRIFSGGDQSFSHYSSPQNCGPPDDFRCPNPTKQIWTVNEALIQKWLSYPSGRFPVEIANEIDGTFSSSGCLNGSFLAVSNDDHYRTGTRFSGVDMNAARLLFHKLIQPDHPQISQQVAASLEKNLIPKLTSSLPDVEALRFYLTLPECPLMSDSNNFTTIAIPFGTALVNLEKAPLKVLENWWSVLEPPLFLKIVELFKEVVVHLLKLYKIGIPPSERRIFNSFLHTALKVLEILHRVNEKMGQIIQYDKFYIHEVQELIDIRNDYINWVQQQAYGMDVNHGLTELADIPVTICTYPFVFDAQAKTTLLQTDAVLQMQMAIDQAHRQNVSSLFLPVIESVNPCLILVVRRENIVGDAMEVLRKTKNIDYKKPLKVIFVGEDAVDAGGVRKEFFLLIMRELLDPKYGMFRYYEDSRLIWFSDKTFEDSDLFHLIGVICGLAIYNCTIVDLHFPLALYKKLLKKKPSLDDLKELMPDVGRSMQQLLDYPEDDIEETFCLNFTITVENFGATEVKELVLNGADTAVNKQNRQEFVDAYVDYIFNKSVASLFDAFHAGFHKVCGGKVLLLFQPNELQAMVIGNTNYDWKELEKNTEYKGEYWAEHPTIKIFWEVFHELPLEKKKQFLLFLTGSDRIPILGMKSLKLVIQSTGGGEEYLPVSHTCFNLLDLPKYTEKETLRSKLIQAIDHNEGFSLI

SEQ ID NO: 11246 - protein, 347 aa, Homo sapiens
MLGKIHLLEGDLDKAIEVYKKAVEFSPENTELLTTLGLLYLQLGIYQKAFEHLGNALTYDPTNYKAILAAGSMMQTHGDFDVALTKYRVVACAVPESPPLWNNIGMCFFGKKKYVAAISCLKRANYLAPFDWKILYNLGLVHLTMQQYASAFHFLSAAINFQPKMGELYMLLAVALTNLEDIENAKRAYAEAVHLDKCNPLVNLNYAVLLYNQGEKKNALAQYQEMEKKVSLLKDNSSLEFDSEMVEMAQKLGAALQVGEALVWTKPVKDPKSKHQTTSTSKPASFQQPLGSNQALGQAMSSAAAYRTLPSGAGGTSQFTKPPSLPLEPEPAVESSPTETSEQIREK

SEQ ID NO: 11247 - protein, 405 aa, Homo sapiens
MGPPLAPRPAHVPGEAGPRRTRESRPGAVSFADVAVYFSPEEWECLRPAQRALYRDVMRETFGHLGALGFSVPKPAFISWVEGEVEAWSPEAQDPDGESSAAFSRGQGQEAGSRDGNEEKERLKKCPKQKEVAHEVAVKEWWPSVACPEFCNPRQSPMNPWLKDTLTRRLPHSCPDCGRNFSYPSLLASHQRVHSGERPFSCGQCQARFSQRRYLLQHQFIHTGEKPYPCPDCGRRFRQRGSLAIHRRAHTGEKPYACSDCKSRFTYPYLLAIHQRKHTGEKPYSCPDCSLRFAYTSLLAIHRRIHTGEKPYPCPDCGRRFTYSSLLLSHRRIHSDSRPFPCVECGKGFKRKTALEAHRWIHRSCSERRAWQQAVVGRSEPIPVLGGKDPPVHFRHFPDIFQECG

SEQ ID NO: 11248 - protein, 1006 aa, Homo sapiens
MAAAYLDPNLNHTPNSSTKTHLGTGMERSPGAMERVLKVFHYFESNSEPTTWASIIRHGDATDVRGIIQKIVDSHKVKHVACYGFRLSHLRSEEVHWLHVDMGVSSVREKYELAHPPEEWKYELRIRYLPKGFLNQFTEDKPTLNFFYQQVKSDYMLEIADQVDQEIALKLGCLEIRRSYWEMRGNALEKKSNYEVLEKDVGLKRFFPKSLLDSVKAKTLRKLIQQTFRQFANLNREESILKFFEILSPVYRFDKECFKCALGSSWIISVELAIGPEEGISYLTDKGCNPTHLADFTQVQTIQYSNSEDKDRKGMLQLKIAGAPEPLTVTAPSLTIAENMADLIDGYCRLVNGTSQSFIIRPQKEGERALPSIPKLANSEKQGMRTHAVSVSETDDYAEIIDEEDTYTMPSTRDYEIQRERIELGRCIGEGQFGDVHQGIYMSPENPALAVAIKTCKNCTSDSVREKFLQEALTMRQFDHPHIVKLIGVITENPVWIIMELCTLGELRSFLQVRKYSLDLASLILYAYQLSTALAYLESKRFVHRDIAARNVLVSSNDCVKLGDFGLSRYMEDSTYYKASKGKLPIKWMAPESINFRRFTSASDVWMFGVCMWEILMHGVKPFQGVKNNDVIGRIENGERLPMPPNCPPTLYSLMTKCWAYDPSRRPRFTELKAQLSTILEEEKAQQEERMRMESRRQATVSWDSGGSDEAPPKPSRPGYPSPRSSEGFYPSPQHMVQTNHYQDSTVLDLRGIGQVLPTHLMEERLIRQQQEMEEDQRWLEKEERFLKPDVRLSRGSIDREDGSLQGPIGNQHIYQPVGKPDPAAPPKKPPRPGAPGHLGSLASLSSPADSYNEGVKLQPQEISPPPTANLDRSNDKVYENVTGLVKAVIEMSSKIQPAPPEEYVPMVKEVGLALRTLLATVDETIPLLPASTHREIEMAQKLLNSDLGELINKMKLAQQYVMTSLQQEYKKQMLTAAHALAVDAKNLLDVIDQARLKMLGQTRPH

SEQ ID NO: 11249 - protein, 251 aa, Homo sapiens
MPMYQVKPYHGGGAPLRVELPTCMYRLPNVHGRSYGPAPGAGHVQDYGALKDIVINANPASPPLSLLVLHRLLCEHFRVLSTVHTHSSVKSVPENLLKCFGEQNKKQPRQDYQLGFTLIWKNVPKTQMKFSIQTMCPIEGEGNIARFLFSLFGQKHNAVNATLIDSWVDIAIFQLKEGSSKEKAAVFRSMNSALGKSPWLAGNELTVADVVLWSVLQQIGGCSVTVPANVQRWMRSCENLAPFNTALKLLK

SEQ ID NO: 11250 - protein, 197 aa, Homo sapiens
MVGQPQPRDDVGSPRPRVIVGTIRPRVIVGTIRPRVIVGSARARPPPDGTPRPQLAAEESPRPRVIFGTPRARVILGSPRPRVIVSSPWPAVVVASPRPRTPVGSPWPRVVVGTPRPRVIVGSPRARVADADPASAPSQGALQGRRQDEHSGTRAEGSRPGGAAPVPEEGGRFARAQRLPPPRHLRLPGAPDRHRGI

SEQ ID NO: 11251 - protein, 297 aa, Homo sapiens
MEDYTKIEKIGEGTYGVVYKGRHKTTGQVVAMKKIRLESEEEGVPSTAIREISLLKELRHPNIVSLQDVLMQDSRLYLIFEFLSMDLKKYLDSIPPGQYMDSSLVKSYLYQILQGIVFCHSRRVLHRDLKPQNLLIDDKGTIKLADFGLARAFGIPIRVYTHEVVTLWYRSPEVLLGSARYSTPVDIWSIGTIFAELATKKPLFHGDSEIDQLFRIFRALGTPNNEVWPEVESLQDYKNTFPKWKPGSLASHVKNLDENGLDLLSKMLIYDPAKRISGKMALNHPYFNDLDNQIKKM

SEQ ID NO: 11252 - protein, 208 aa, Homo sapiens
MALLLCLVCLTAALAHGCLHCHSNFSKKFSFYRHHVNFKSWWVGDIPVSGALLTDWSDDTMKELHLAIPAKITREKLDQVATAVYQMMDQLYQGKMYFPGYFPNELRNIFREQVHLIQNAIIESRIDCQHRCGIFQYETISCNNCTDSHVACFGYNCESSAQWKSAVQGLLNYINNWHNLVSPALRCLEPPHLANLTLEDAAECLKQH

SEQ ID NO: 11253 - protein, 232 aa, Homo sapiens
MALLLCLVCLTAALAHGCLHCHSNFSKKFSFYRHHVNFKSWWVGDIPVSGALLTDWSDDTMKELHLAIPAKITREKLDQVATAVYQMMDQLYQGKMYFPGYFPNELRNIFREQVHLIQNAIIESRIDCQHRCGIFQYETISCNNCTDSHVACFGYNCESSAQWKSAVQGLLNYINNWHKQDTSMRPRSSAFSWPGTHRATPAFLVSPALRCLEPPHLANLTLEDAAECLKQH

SEQ ID NO: 11254 - protein, 227 aa, Homo sapiens
MGHEQNQGAALLQMLPLLWLLPHSWAVPEAPTPMWPDDLQNHTFLHTVYCQDGSPSVGLSEAYDEDQLFFFDFSQNTRVPRLPEFADWAQEQGDAPAILFDKEFCEWMIQQIGPKLDGKIPVSRVNWQHHSVPVEGFGPTFVSAVDGLSFQAFSYLNFTPEPSDIFSCIVTHEIDRYTAIAYWVPRNALPSDLLENVLCGVAFGLGVLGIIVGIVLIIYFRKPCSGD

SEQ ID NO: 11255 - protein, 166 aa, Homo sapiens
MGHEQNQGAALLQMLPLLWLLPHSWAVPEGFPIAEVFTLKPLEFGKPNTLVCFVSNLFPPMLTVNWQHHSVPVEGFGPTFVSAVDGLSFQAFSYLNFTPEPSDIFSCIVTHEIDRYTAIAYWVPRNALPSDLLENVLCGVAFGLGVLGIIVGIVLIIYFRKPCSGD

SEQ ID NO: 11256 - protein, 214 aa, Homo sapiens
MALLLCLVCLTAALAHGCLHCHSNFSKKFSFYRHHVNFKSWWVGDIPVSGALLTDWSDDTMKELHLAIPAKITREKLDQVATAVYQMMDQLYQGKMYFPGYFPNELRNIFREQVHLIQNAIIESRIDCQHRCGIFQYETISCNNCTDSHVACFGYNCESSAQWKSAVQGLLNYINNWHKQDTSMSLVSPALRCLEPPHLANLTLEDAAECLKQH

SEQ ID NO: 11257 - protein, 1357 aa, Homo sapiens
MEFYESAYFIVLIPSIVITVIFLFFWLFMKETLYDEVLAKQKREQKLIPTKTDKKKAEKKKNKKKEIQNGNLHESDSESVPRDFKLSDALAVEDDQVAPVPLNVVETSSSVRERKKKEKKQKPVLEEQVIKESDASKIPGKKVEPVPVTKQPTPPSEAAASKKKPGQKKSKNGSDDQDKKVETLMVPSKRQEALPLHQETKQESGSGKKKASSKKQKTENVFVDEPLIHATTYIPLMDNADSSPVVDKREVIDLLKPDQVEGIQKSGTKKLKTETDKENAEVKFKDFLLSLKTMMFSEDEALCVVDLLKEKSGVIQDALKKSSKGELTTLIHQLQEKDKLLAAVKEDAAATKDRCKQLTQEMMTEKERSNVVITRMKDRIGTLEKEHNVFQNKIHVSYQETQQMQMKFQQVREQMEAEIAHLKQENGILRDAVSNTTNQLESKQSAELNKLRQDYARLVNELTEKTGKLQQEEVQKKNAEQAATQLKVQLQEAERRWEEVQSYIRKRTAEHEAAQQDLQSKFVAKENEVQSLHSKLTDTLVSKQQLEQRLMQLMESEQKRVNKEESLQMQVQDILEQNEALKAQIQQFHSQIAAQTSASVLAEELHKVIAEKDKQIKQTEDSLASERDRLTSKEEELKDIQNMNFLLKAEVQKLQALANEQAAAAHELEKMQQSVYVKDDKIRLLEEQLQHEISNKMEEFKILNDQNKALKSEVQKLQTLVSEQPNKDVVEQMEKCIQEKDEKLKTVEELLETGLIQVATKEEELNAIRTENSSLTKEVQDLKAKQNDQVSFASLVEELKKVIHEKDGKIKSVEELLEAELLKVANKEKTVQDLKQEIKALKEEIGNVQLEKAQQLSITSKVQELQNLLKGKEEQMNTMKAVLEEKEKDLANTGKWLQDLQEENESLKAHVQEVAQHNLKEASSASQFEELEIVLKEKENELKRLEAMLKERESDLSSKTQLLQDVQDENKLFKSQIEQLKQQNYQQASSFPPHEELLKVISEREKEISGLWNELDSLKDAVEHQRKKNNDLREKNWEAMEALASTEKMLQDKVNKTSKERQQQVEAVELEAKEVLKKLFPKVSVPSNLSYGEWLHGFEKKAKECMAGTSGSEEVKVLEHKLKEADEMHTLLQLECEKYKSVLAETEGILQKLQRSVEQEENKWKVKVDESHKTIKQMQSSFTSSEQELERLRSENKDIENLRREREHLEMELEKAEMERSTYVTEVRELKDLLTELQKKLDDSYSEAVRQNEELNLLKAQLNETLTKLRTEQNERQKVAGDLHKAQQSLELIQSKIVKAAGDTTVIENSDVSPETESSEKETMSVSLNQTVTQLQQLLQAVNQQLTKEKEHYQVLE

SEQ ID NO: 11258 - protein, 105 aa, Homo sapiens
MSIYFPIHCPDYLRSAKMTEVMMNTQPMEEIGLSPRKDGLSYQIFPDPSDFDRCCKLKDRLPSIVVEPTEGEVESGELRWPPEEFLVQEDEQDNCEETAKENKEQ

SEQ ID NO: 11259 - protein, 427 aa, Homo sapiens
MEAMAASTSLPDPGDFDRNVPRICGVCGDRATGFHFNAMTCEGCKGFFRRSMKRKALFTCPFNGDCRITKDNRRHCQACRLKRCVDIGMMKEFILTDEEVQRKREMILKRKEEEALKDSLRPKLSEEQQRIIAILLDAHHKTYDPTYSDFCQFRPPVRVNDGGGSHPSRPNSRHTPSFSGDSSSSCSDHCITSSDMMDSSSFSNLDLSEEDSDDPSVTLELSQLSMLPHLADLVSYSIQKVIGFAKMIPGFRDLTSEDQIVLLKSSAIEVIMLRSNESFTMDDMSWTCGNQDYKYRVSDVTKAGHSLELIEPLIKFQVGLKKLNLHEEEHVLLMAICIVSPDRPGVQDAALIEAIQDRLSNTLQTYIRCRHPPPGSHLLYAKMIQKLADLRSLNEEHSKQYRCLSFQPECSMKLTPLVLEVFGNEIS

SEQ ID NO: 11260 - protein, 148 aa, Homo sapiens
MEVKDANSALLSNYEVFQLLTDLKEQRKESGKNKHSSGQQNLNTITYETLKYISKTPCRHQSPEIVREFLTALKSHKLTKAEKLQLLNHRPVTAVEIQLMVEESEERLTEEQIEALLHTVTSILPAEPEAEQKKNTNSNVAMDEEDPA

SEQ ID NO: 11261 - protein, 196 aa, Homo sapiens
MAVEFDGGVVMGSDSRVSAGEAVVNRVFDKLSPLHERIYCALSGSAADAQAVADMAAYQLELHGIELEEPPLVLAAANVVRNISYKYREDLSAHLMVAGWDQREGGQVYGTLGGMLTRQPFAIGGSGSTFIYGYVDAAYKPGMSPEECRRFTTDAIALAMSRDGSSGGVIYLVTITAAGVDHRVILGNELPKFYDE

SEQ ID NO: 11262 - protein, 444 aa, Homo sapiens
MASESGKLWGGRFVGAVDPIMEKFNASIAYDRHLWEVDVQGSKAYSRGLEKAGLLTKAEMDQILHGLDKVAEEWAQGTFKLNSNDEDIHTANERRLKELIGATAGKLHTGRSRNDQVVTDLRLWMRQTCSTLSGLLWELIRTMVDRAEAERDVLFPGYTHLQRAQPIRWSHWILSHAVALTRDSERLLEVRKRINVLPLGSGAIAGNPLGVDRELLRAELNFGAITLNSMDATSERDFVAEFLFWASLCMTHLSRMAEDLILYCTKEFSFVQLSDAYSTGSSLMPQKKNPDSLELIRSKAGRVFGREDKEAVFEVSDTMSAVLQVATGVISTLQIHQENMGQALSPDMLATDLAYYLVRKGMPFRQAHEASGKAVFMAETKGVALNQLSLQELQTISPLFSGDVICVWDYGHSVEQYGALGGTARSSVDWQIRQVRALLQAQQA

SEQ ID NO: 11263 - protein, 547 aa, Homo sapiens
MPSEVARGKRAALFFAAVAIVLGLPLWWKTTETYRASLPYSQISGLNALQLRLMVPVTVVFTRESVPLDDQEKLPFTVVHEREIPLKYKMKIKCRFQKAYRRALDHEEEALSSGSVQEAEAMLDEPQEQAEGSLTVYVISEHSSLLPQDMMSYIGPKRTAVVRGIMHREAFNIIGRRIVQVAQAMSLTEDVLAAALADHLPEDKWSAEKRRPLKSSLGYEITFSLLNPDPKSHDVYWDIEGAVRRYVQPFLNALGAAGNFSVDSQILYYAMLGVNPRFDSASSSYYLDMHSLPHVINPVESRLGSSAASLYPVLNFLLYVPELAHSPLYIQDKDGAPVATNAFHSPRWGGIMVYNVDSKTYNASVLPVRVEVDMVRVMEVFLAQLRLLFGIAQPQLPPKCLLSGPTSEGLMTWELDRLLWARSVENLATATTTLTSLAQLLGKISNIVIKDDVASEVYKAVAAVQKSAEELASGHLASAFVASQEAVTSSELAFFDPSLLHLLYFPDDQKFAIYIPLFLPMAVPILLSLVKIFLETRKSWRKPEKTD

SEQ ID NO: 11264 - protein, 316 aa, Homo sapiens
MSKKPPNRPGITFEIGARLEALDYLQKWYPSRIEKIDYEEGKMLVHFERWSHRYDEWIYWDSNRLRPLERPALRKEGLKDEEDFFDFKAGEEVLARWTDCRYYPAKIEAINKEGTFTVQFYDGVIRCLKRMHIKAMPEDAKGQFLFQVKSQHPLSWCCPIDPAGSCNQSMGSEDWIALVKAAAAAAAKNKTGSKPRTSANSNKDKDKDERKWFKVPSKKEETSTCIATPDVEKKEDLPTSSETFVGLHVENVPKMVFPQPESTLSNKRKNNQGNSFQAKRARLNKITGLLASKAVGVDGAEKKEDYNETAPMLEQV

SEQ ID NO: 11265 - protein, 311 aa, Homo sapiens
MSKKPPNRPGITFEIGARLEALDYLQKWYPSRIEKIDYEEGKMLVHFERWSHRYDEWIYWDSNRLRPLERPALRKEGLKDEEDFFDFKAGEEVLARWTDCRYYPAKIEAINKEGTFTVQFYDGVIRCLKRMHIKAMPEDAKGQVKSQHPLSWCCPIDPAGSCNQSMGSEDWIALVKAAAAAAAKNKTGSKPRTSANSNKDKDKDERKWFKVPSKKEETSTCIATPDVEKKEDLPTSSETFGLHVENVPKMVFPQPESTLSNKRKNNQGNSFQAKRARLNKITGLLASKAVGVDGAEKKEDYNETAPMLEQV

SEQ ID NO: 11266 - protein, 297 aa, Homo sapiens
MDAEGLALLLPPVTLAALVDSWLREDCPGLNYAALVSGAGPSQAALWAKSPGVLAGQPFFDAIFTQLNCQVSWFLPEGSKLVPVARVAEVRGPAHCLLLGERVALNTLARCSGIASAAAAAVEAARGAGWTGHVAGTRKTTPGFRLVEKYGLLVGGAASHRYDLGGLVMVKDNHVVAAGGVEKAVRAARQAADFTLKVEVECSSLQEAVQAAEAGADLVLLDNFKPEELHPTATVLKAQFPSVAVEASGGITLDNLPQFCGPHIDVISMGMLTQAAPALDFSLKLFAKEVAPVPKIH

SEQ ID NO: 11267 - protein, 1017 aa, Homo sapiens
MSKKPPNRPGITFEIGARLEALDYLQKWYPSRIEKIDYEEGKMLVHFERWSHRYDEWIYWDSNRLRPLERPALRKEGLKDEEDFFDFKAGEEVLARWTDCRYYPAKIEAINKEGTFTVQFYDGVIRCLKRMHIKAMPEDAKGQVKSQHPLSWCCPIDPAGSCNQSMGSEDWIALVKAAAAAAAKNKTGSKPRTSANSNKDKDKDERKWFKVPSKKEETSTCIATPDVEKKEDLPTSSETFGLHVENVPKMVFPQPESTLSNKRKNNQGNSFQAKRARLNKITGLLASKAVGVDGAEKKEDYNETAPMLEQAISPKPQSQKKNEADISSSANTQKPALLSSTLSSGKARSKKCKHESGDSSGCIKPPKSPLSPELIQVEDLTLVSQLSSSVINKTSPPQPVNPPRPFKHSERRRRSQRLATLPMPDDSVEKVSSPSPATDGKVFSISSQNQQESSVPEVPDVAHLPLEKLGPCLPLDLSRGSEVTAPVASDSSYRNECPRAEKEDTQMLPNPSSKAIADGRGAPAAAGISKTEKKVKLEDKSSTAFGKRKEKDKERREKRDKDHYRPKQKKKKKKKKKSKQHDYSDYEDSSLEFLERCSSPLTRSSGSSLASRSMFTEKTTTYQYPRAILSVDLSGENLSDVDFLDDSSTESLLLSGDEYNQDFDSTNFEESQDEDDALNEIVRCICEMDEENGFMIQCEECLCWQHSVCMGLLEESIPEQYICYICRDPPGQRWSAKYRYDKEWLNNGRMCGLSFFKENYSHLNAKKIVSTHHLLADVYGVTEVLHGLQLKIGILKNKHHPDLHLWACSGKRKDQDQIIAGVEKKIAQDTVNREEKKYVQNHKEPPRLPLKMEGTYITSEHSYQKPQSFGQDCKSLADPGSSDDDDVSSLEEEQEFHMRSKNSLQYSAKEHGMPEKNPAEGNTVFVYNDKKGTEDPGDSHLQWQLNLLTHIENVQNEVTSRMDLIEKEVDVLESWLDFTGELEPPDPLARLPQLKRHIKQLLIDMGKVQQIATLCSV

SEQ ID NO: 11268 - protein, 254 aa, Homo sapiens
MAISGVPVLGFFIIAVLMSAQESWAIKEEHVIIQAEFYLNPDQSGEFMFDFDGDEIFHVDMAKKETVWRLEEFGRFASFEAQGALANIAVDKANLEIMTKRSNYTPITNVPPEVTVLTNSPVELREPNVLICFIDKFTPPVVNVTWLRNGKPVTTGVSETVFLPREDHLFRKFHYLPFLPSTEDVYDCRVEHWGLDEPLLKHWEFDAPSPLPETTENVVCALGLTVGLVGIIIGTIFIIKGLRKSNAAERRGPL

SEQ ID NO: 11269 - protein, 992 aa, Homo sapiens
MSKKPPNRPGITFEIGARLEALDYLQKWYPSRIEKIDYEEGKMLVHFERWSHRYDEWIYWDSNRLRPLERPALRKEGLKDEEDFFDFKAGEEVLARWTDCRYYPAKIEAINKEGTFTVQFYDGVIRCLKRMHIKAMPEDAKGQDWIALVKAAAAAAAKNKTGSKPRTSANSNKDKDKDERKWFKVPSKKEETSTCIATPDVEKKEDLPTSSETFVGLHVENVPKMVFPQPESTLSNKRKNNQGNSFQAKRARLNKITGLLASKAVGVDGAEKKEDYNETAPMLEQAISPKPQSQKKNEADISSSANTQKPALLSSTLSSGKARSKKCKHESGDSSGCIKPPKSPLSPELIQVEDLTLVSQLSSSVINKTSPPQPVNPPRPFKHSERRRRSQRLATLPMPDDSVEKVSSPSPATDGKVFSISSQNQQESSVPEVPDVAHLPLEKLGPCLPLDLSRGSEVTAPVASDSSYRNECPRAEKEDTQMLPNPSSKAIADGRGAPAAAGISKTEKKVKLEDKSSTAFGKRKEKDKERREKRDKDHYRPKQKKKKKKKKKSKQHDYSDYEDSSLEFLERCSSPLTRSSGSSLASRSMFTEKTTTYQYPRAILSVDLSGENLSDVDFLDDSSTESLLLSGDEYNQDFDSTNFEESQDEDDALNEIVRCICEMDEENGFMIQCEECLCWQHSVCMGLLEESIPEQYICYICRDPPGQRWSAKYRYDKEWLNNGRMCGLSFFKENYSHLNAKKIVSTHHLLADVYGVTEVLHGLQLKIGILKNKHHPDLHLWACSGKRKDQDQIIAGVEKKIAQDTVNREEKKYVQNHKEPPRLPLKMEGTYITSEHSYQKPQSFGQDCKSLADPGSSDDDDVSSLEEEQEFHMRSKNSLQYSAKEHGMPEKNPAEGNTVFVYNDKKGTEDPGDSHLQWQLNLLTHIENVQNEVTSRMDLIEKEVDVLESWLDFTGELEPPDPLARLPQLKRHIKQLLIDMGKVQQIATLCSV

SEQ ID NO: 11270 - protein, 132 aa, Homo sapiens
MAKDILGEAGLHFDELNKLRVLDPEVTQQTIELKEECKDFVDKIGQFQKIVGGLIELVDQLAKEAENEKMKAIGARNLLKSIAKQREAQQQQLQALIAEKKMQLERYRVEYEALCKVEAEQNEFIDQFIFQK

SEQ ID NO: 11271 - protein, 151 aa, Homo sapiens
MPRGSRSRTSRMAPPASRAPQMRAAPRPAPVAQPPAAAPPSAVGSSAAAPRQPGLMAQMATTAAGVAVGSAVGHTLGHAITGGFSGGSNAEPARPDITYQEPQGTQPAQQQQPCLYEIKQFLECAQNQGDIKLCEGFNEVLKQCRLANGLA

SEQ ID NO: 11272 - protein, 1952 aa, Homo sapiens
MFRQFYLWTCLASGIILGSLFEICLGQYDDDCKLARGGPPATIVAIDEESRNGTILVDNMLIKGTAGGPDPTIELSLKDNVDYWVLMDPVKQMLFLNSTGRVLDRDPPMNIHSIVVQVQCINKKVGTIIYHEVRIVVRDRNDNSPTFKHESYYATVNELTPVGTTIFTGFSGDNGATDIDDGPNGQIEYVIQYNPDDPTSNDTFEIPLMLTGNIVLRKRLNYEDKTRYFVIIQANDRAQNLNERRTTTTTLTVDVLDGDDLGPMFLPCVLVPNTRDCRPLTYQAAIPELRTPEELNPIIVTPPIQAIDQDRNIQPPSDRPGILYSILVGTPEDYPRFFHMHPRTAELSLLEPVNRDFHQKFDLVIKAEQDNGHPLPAFAGLHIEILDENNQSPYFTMPSYQGYILESAPVGATISDSLNLTSPLRIVALDKDIEDTKDPELHLFLNDYTSVFTVTQTGITRYLTLLQPVDREEQQTYTFSITAFDGVQESEPVIVNIQVMDANDNTPTFPEISYDVYVYTDMRPGDSVIQLTAVDADEGSNGEITYEILVGAQGDFIINKTTGLITIAPGVEMIVGRTYALTVQAADNAPPAERRNSICTVYIEVLPPNNQSPPRFPQLMYSLEISEAMRVGAVLLNLQATDREGDSITYAIENGDPQRVFNLSETTGILTLGKALDRESTDRYILIITASDGRPDGTSTATVNIVVTDVNDNAPVFDPYLPRNLSVVEEEANAFVGQVKATDPDAGINGQVHYSLGNFNNLFRITSNGSIYTAVKLNREVRDYYELVVVATDGAVHPRHSTLTLAIKVLDIDDNSPVFTNSTYTVLVEENLPAGTTILQIEAKDVDLGANVSYRIRSPEVKHFFALHPFTGELSLLRSLDYEAFPDQEASITFLVEAFDIYGTMPPGIATVTVIVKDMNDYPPVFSKRIYKGMVAPDAVKGTPITTVYAEDADPPGLPASRVRYRVDDVQFPYPASIFEVEEDSGRVITRVNLNEEPTTIFKLVVVAFDDGEPVMSSSATVKILVLHPGEIPRFTQEEYRPPPVSELATKGTMVGVISAAAINQSIVYSIVSGNEEDTFGINNITGVIYVNGPLDYETRTSYVLRVQADSLEVVLANLRVPSKSNTAKVYIEIQDENNHPPVFQKKFYIGGVSEDARMFTSVLRVKATDKDTGNYSVMAYRLIIPPIKEGKEGFVVETYTGLIKTAMLFHNMRRSYFKFQVIATDDYGKGLSGKADVLVSVVNQLDMQVIVSNVPPTLVEKKIEDLTEILDRYVQEQIPGAKVVVESIGARRHGDAFSLEDYTKCDLTVYAIDPQTNRAIDRNELFKFLDGKLLDINKDFQPYYGEGGRILEIRTPEAVTSIKKRGESLGYTEGALLALAFIIILCCIPAILVVLVSYRQRQAECTKTARIQAALPAAKPAVPAPAPVAAPPPPPPPPPGAHLYEELGDSSILFLLYHFQQSRGNNSVSEDRKHQQVVMPFSSNTIEAHKSAHVDGSLKSNKLKSARKFTFLSDEDDLSAHNPLYKENISQVSTNSDISQRTDFVDPFSPKIQAKSKSLRGPREKIQRLWSQSVSLPRRLMRKVPNRPEIIDLQQWQGTRQKAENENTGICTNKRGSSNPLLTTEEANLTEKEEIRQGETLMIEGTEQLKSLSSDSSFCFPRPHFSFSTLPTVSRTVELKSEPNVISSPAECSLELSPSRPCVLHSSLSRRETPICMLPIETERNIFENFAHPPNISPSACPLPPPPPISPPSPPPAPAPLAPPPDISPFSLFCPPPSPPSIPLPLPPPTFFPLSVSTSGPPTPPLLPPFPTPLPPPPPSIPCPPPPSASFLSTECVCITGVKCTTNLMPAEKIKSSMTQLSTTTVCKTDPQREPKGILRHVKNLAELEKSVANMYSQIEKNYLRTNVSELQTMCPSEVTNMEITSEQNKGSLNNIVEGTEKQSHSQSTSL

SEQ ID NO: 11273 - protein, 1915 aa, Homo sapiens
MFRQFYLWTCLASGIILGSLFEICLGQYDDDCKLARGGPPATIVAIDEESRNGTILVDNMLIKGTAGGPDPTIELSLKDNVDYWVLMDPVKQMLFLNSTGRVLDRDPPMNIHSIVVQVQCINKKVGTIIYHEVRIVVRDRNDNSPTFKHESYYATVNELTPVGTTIFTGFSGDNGATDIDDGPNGQIEYVIQYNPDDPDRAQNLNERRTTTTTLTVDVLDGDDLGPMFLPCVLVPNTRDCRPLTYQAAIPELRTPEELNPIIVTPPIQAIDQDRNIQPPSDRPGILYSILVGTPEDYPRFFHMHPRTAELSLLEPVNRDFHQKFDLVIKAEQDNGHPLPAFAGLHIEILDENNQSPYFTMPSYQGYILESAPVGATISDSLNLTSPLRIVALDKDIEDTKDPELHLFLNDYTSVFTVTQTGITRYLTLLQPVDREEQQTYTFSITAFDGVQESEPVIVNIQVMDANDNTPTFPEISYDVYVYTDMRPGDSVIQLTAVDADEGSNGEITYEILVGAQGDFIINKTTGLITIAPGVEMIVGRTYALTVQAADNAPPAERRNSICTVYIEVLPPNNQSPPRFPQLMYSLEISEAMRVGAVLLNLQATDREGDSITYAIENGDPQRVFNLSETTGILTLGKALDRESTDRYILIITASDGRPDGTSTATVNIVVTDVNDNAPVFDPYLPRNLSVVEEEANAFVGQVKATDPDAGINGQVHYSLGNFNNLFRITSNGSIYTAVKLNREVRDYYELVVVATDGAVHPRHSTLTLAIKVLDIDDNSPVFTNSTYTVLVEENLPAGTTILQIEAKDVDLGANVSYRIRSPEVKHFFALHPFTGELSLLRSLDYEAFPDQEASITFLVEAFDIYGTMPPGIATVTVIVKDMNDYPPVFSKRIYKGMVAPDAVKGTPITTVYAEDADPPGLPASRVRYRVDDVQFPYPASIFEVEEDSGRVITRVNLNEEPTTIFKLVVVAFDDGEPVMSSSATVKILVLHPGEIPRFTQEEYRPPPVSELATKGTMVGVISAAAINQSIVYSIVSGNEEDTFGINNITGVIYVNGPLDYETRTSYVLRVQADSLEVVLANLRVPSKSNTAKVYIEIQDENNHPPVFQKKFYIGGVSEDARMFTSVLRVKATDKDTGNYSVMAYRLIIPPIKEGKEGFVVETYTGLIKTAMLFHNMRRSYFKFQVIATDDYGKGLSGKADVLVSVVNQLDMQVIVSNVPPTLVEKKIEDLTEILDRYVQEQIPGAKVVVESIGARRHGDAFSLEDYTKCDLTVYAIDPQTNRAIDRNELFKFLDGKLLDINKDFQPYYGEGGRILEIRTPEAVTSIKKRGESLGYTEGALLALAFIIILCCIPAILVVLVSYRQRQAECTKTARIQAALPAAKPAVPAPAPVAAPPPPPPPPPGAHLYEELGDSSILFLLYHFQQSRGNNSVSEDRKHQQVVMPFSSNTIEAHKSAHVDGSLKSNKLKSARKFTFLSDEDDLSAHNPLYKENISQVSTNSDISQRTDFVDPFSPKIQAKSKSLRGPREKIQRLWSQSVSLPRRLMRKVPNRPEIIDLQQWQGTRQKAENENTGICTNKRGSSNPLLTTEEANLTEKEEIRQGETLMIEGTEQLKSLSSDSSFCFPRPHFSFSTLPTVSRTVELKSEPNVISSPAECSLELSPSRPCVLHSSLSRRETPICMLPIETERNIFENFAHPPNISPSACPLPPPPPISPPSPPPAPAPLAPPPDISPFSLFCPPPSPPSIPLPLPPPTFFPLSVSTSGPPTPPLLPPFPTPLPPPPPSIPCPPPPSASFLSTECVCITGVKCTTNLMPAEKIKSSMTQLSTTTVCKTDPQREPKGILRHVKNLAELEKSVANMYSQIEKNYLRTNVSELQTMCPSEVTNMEITSEQNKGSLNNIVEGTEKQSHSQSTSL

SEQ ID NO: 11274 - protein, 1932 aa, Homo sapiens
MFRQFYLWTCLASGIILGSLFEICLGQYDDGTILVDNMLIKGTAGGPDPTIELSLKDNVDYWVLMDPVKQMLFLNSTGRVLDRDPPMNIHSIVVQVQCINKKVGTIIYHEVRIVVRDRNDNSPTFKHESYYATVNELTPVGTTIFTGFSGDNGATDIDDGPNGQIEYVIQYNPDDPTSNDTFEIPLMLTGNIVLRKRLNYEDKTRYFVIIQANDRAQNLNERRTTTTTLTVDVLDGDDLGPMFLPCVLVPNTRDCRPLTYQAAIPELRTPEELNPIIVTPPIQAIDQDRNIQPPSDRPGILYSILVGTPEDYPRFFHMHPRTAELSLLEPVNRDFHQKFDLVIKAEQDNGHPLPAFAGLHIEILDENNQSPYFTMPSYQGYILESAPVGATISDSLNLTSPLRIVALDKDIEDTKDPELHLFLNDYTSVFTVTQTGITRYLTLLQPVDREEQQTYTFSITAFDGVQESEPVIVNIQVMDANDNTPTFPEISYDVYVYTDMRPGDSVIQLTAVDADEGSNGEITYEILVGAQGDFIINKTTGLITIAPGVEMIVGRTYALTVQAADNAPPAERRNSICTVYIEVLPPNNQSPPRFPQLMYSLEISEAMRVGAVLLNLQATDREGDSITYAIENGDPQRVFNLSETTGILTLGKALDRESTDRYILIITASDGRPDGTSTATVNIVVTDVNDNAPVFDPYLPRNLSVVEEEANAFVGQVKATDPDAGINGQVHYSLGNFNNLFRITSNGSIYTAVKLNREVRDYYELVVVATDGAVHPRHSTLTLAIKVLDIDDNSPVFTNSTYTVLVEENLPAGTTILQIEAKDVDLGANVSYRIRSPEVKHFFALHPFTGELSLLRSLDYEAFPDQEASITFLVEAFDIYGTMPPGIATVTVIVKDMNDYPPVFSKRIYKGMVAPDAVKGTPITTVYAEDADPPGLPASRVRYRVDDVQFPYPASIFEVEEDSGRVITRVNLNEEPTTIFKLVVVAFDDGEPVMSSSATVKILVLHPGEIPRFTQEEYRPPPVSELATKGTMVGVISAAAINQSIVYSIVSGNEEDTFGINNITGVIYVNGPLDYETRTSYVLRVQADSLEVVLANLRVPSKSNTAKVYIEIQDENNHPPVFQKKFYIGGVSEDARMFTSVLRVKATDKDTGNYSVMAYRLIIPPIKEGKEGFVVETYTGLIKTAMLFHNMRRSYFKFQVIATDDYGKGLSGKADVLVSVVNQLDMQVIVSNVPPTLVEKKIEDLTEILDRYVQEQIPGAKVVVESIGARRHGDAFSLEDYTKCDLTVYAIDPQTNRAIDRNELFKFLDGKLLDINKDFQPYYGEGGRILEIRTPEAVTSIKKRGESLGYTEGALLALAFIIILCCIPAILVVLVSYRQRQAECTKTARIQAALPAAKPAVPAPAPVAAPPPPPPPPPGAHLYEELGDSSMHNLFLLYHFQQSRGNNSVSEDRKHQQVVMPFSSNTIEAHKSAHVDGSLKSNKLKSARKFTFLSDEDDLSAHNPLYKENISQVSTNSDISQRTDFVDPFSPKIQAKSKSLRGPREKIQRLWSQSVSLPRRLMRKVPNRPEIIDLQQWQGTRQKAENENTGICTNKRGSSNPLLTTEEANLTEKEEIRQGETLMIEGTEQLKSLSSDSSFCFPRPHFSFSTLPTVSRTVELKSEPNVISSPAECSLELSPSRPCVLHSSLSRRETPICMLPIETERNIFENFAHPPNISPSACPLPPPPPISPPSPPPAPAPLAPPPDISPFSLFCPPPSPPSIPLPLPPPTFFPLSVSTSGPPTPPLLPPFPTPLPPPPPSIPCPPPPSASFLSTECVCITGVKCTTNLMPAEKIKSSMTQLSTTTVCKTDPQREPKGILRHVKNLAELEKSVANMYSQIEKNYLRTNVSELQTMCPSEVTNMEITSEQNKGSLNNIVEGTEKQSHSQSTSL

SEQ ID NO: 11275 - protein, 217 aa, Homo sapiens
MARHGLPLLPLLSLLVGAWLKLGNGQATSMVQLQGGRFLMGTNSPDSRDGDGPVREATVKPFAIDIFPVTNKDFRDFVREKKYRTEAEMFGWSFVFEDFVSDELRNKATQPMKGKFPKGDKAEDGFHGVSPVNAFPAQNNYGLYDLLGNVWEWTASPYQAAEQDMRVLRGASWIDTADGSANHRARVTTRMGNTPDSASDNLGFRCAADAGRPPGEL

SEQ ID NO: 11276 - protein, 286 aa, Homo sapiens
MARHGLPLLPLLSLLVGAWLKLGNGQATSMVQLQGGRFLMGTNSPDSRDGDGPVREATVKPFAIDIFPVTNKDFRDFVREKKYRTEAEMFGWSFVFEDFVSDELRNKATQPMKPAGPGSGIRERLEHPVLHVSWNDARAYCAWRGKRLPTEEEWEFAARGGLKGQVYPWGNWFQPNRTNLWQGKFPKGDKAEDGFHGVSPVNAFPAQNNYGLYDLLGNVWEWTASPYQAAEQDMRVLRGASWIDTADGSANHRARVTTRMGNTPDSASDNLGFRCAADAGRPPGEL

SEQ ID NO: 11277 - protein, 1540 aa, Homo sapiens
MFRQFYLWTCLASGIILGSLFEICLGQYDDDCKLARGGPPATIVAIDEESRNGTILVDNMLIKGTAGGPDPTIELSLKDNVDYWVLMDPVKQMLFLNSTGRVLDRDPPMNIHSIVVQVQCINKKVGTIIYHEVRIVVRDRNDNSPTFKHESYYATVNELTPVGTTIFTGFSGDNGATDIDDGPNGQIEYVIQYNPDDPTSNDTFEIPLMLTGNIVLRKRLNYEDKTRYFVIIQANDRAQNLNERRTTTTTLTVDVLDGDDLGPMFLPCVLVPNTRDCRPLTYQAAIPELRTPEELNPIIVTPPIQAIDQDRNIQPPSDRPGILYSILVGTPEDYPRFFHMHPRTAELSLLEPVNRDFHQKFDLVIKAEQDNGHPLPAFAGLHIEILDENNQSPYFTMPSYQGYILESAPVGATISDSLNLTSPLRIVALDKDIEDTKDPELHLFLNDYTSVFTVTQTGITRYLTLLQPVDREEQQTYTFSITAFDGVQESEPVIVNIQVMDANDNTPTFPEISYDVYVYTDMRPGDSVIQLTAVDADEGSNGEITYEILVGAQGDFIINKTTGLITIAPGVEMIVGRTYALTVQAADNAPPAERRNSICTVYIEVLPPNNQSPPRFPQLMYSLEISEAMRVGAVLLNLQATDREGDSITYAIENGDPQRVFNLSETTGILTLGKALDRESTDRYILIITASDGRPDGTSTATVNIVVTDVNDNAPVFDPYLPRNLSVVEEEANAFVGQVKATDPDAGINGQVHYSLGNFNNLFRITSNGSIYTAVKLNREVRDYYELVVVATDGAVHPRHSTLTLAIKVLDIDDNSPVFTNSTYTVLVEENLPAGTTILQIEAKDVDLGANVSYRIRSPEVKHFFALHPFTGELSLLRSLDYEAFPDQEASITFLVEAFDIYGTMPPGIATVTVIVKDMNDYPPVFSKRIYKGMVAPDAVKGTPITTVYAEDADPPGLPASRVRYRVDDVQFPYPASIFEVEEDSGRVITRVNLNEEPTTIFKLVVVAFDDGEPVMSSSATVKILVLHPGEIPRFTQEEYRPPPVSELATKGTMVGVISAAAINQSIVYSIVSGNEEDTFGINNITGVIYVNGPLDYETRTSYVLRVQADSLEVVLANLRVPSKSNTAKVYIEIQDENNHPPVFQKKFYIGGVSEDARMFTSVLRVKATDKDTGNYSVMAYRLIIPPIKEGKEGFVVETYTGLIKTAMLFHNMRRSYFKFQVIATDDYGKGLSGKADVLVSVVNQLDMQVIVSNVPPTLVEKKIEDLTEILDRYVQEQIPGAKVVVESIGARRHGDAFSLEDYTKCDLTVYAIDPQTNRAIDRNELFKFLDGKLLDINKDFQPYYGEGGRILEIRTPEAVTSIKKRGESLGYTEGALLALAFIIILCCIPAILVVLVSYRQVFKGRQAECTKTARIQAALPAAKPAVPAPAPVAAPPPPPPPPPGAHLYEELGDSSMNRNYPWSLELILARNMDKIITVMSMGMKCLNMGVAVDCYHQLDRRNMVRWLVKLRKNMRRKRKSQRKLKNQRLKLESLVRRKK

SEQ ID NO: 11278 - protein, 719 aa, Homo sapiens
MFRQFYLWTCLASGIILGSLFEICLGQYDDDCKLARGGPPATIVAIDEESRNGTILVDNMLIKGTAGGPDPTIELSLKDNVDYWVLMDPVKQMLFLNSTGRVLDRDPPMNIHSIVVQVQCINKKVGTIIYHEVRIVVRDRNDNSPTFKHESYYATVNELTPVGTTIFTGFSGDNGATDIDDGPNGQIEYVIQYNPDDPTSNDTFEIPLMLTGNIVLRKRLNYEDKTRYFVIIQANDRAQNLNERRTTTTTLTVDVLDGDDLGPMFLPCVLVPNTRDCRPLTYQAAIPELRTPEELNPIIVTPPIQAIDQDRNIQPPSDRPGILYSILVGTPEDYPRFFHMHPRTAELSLLEPVNRDFHQKFDLVIKAEQDNGHPLPAFAGLHIEILDENNQSPYFTMPSYQGYILESAPVGATISDSLNLTSPLRIVALDKDIEDEEPKKIKKPKVEIREPSEEEEVVVTIEKPPAAEPTYTTWKRARIFPMIFKKVRGLADKRGIVDLEGEEWQRRLEEEDKDYLKLTLDQEEATESTVESEEESSSDYTEYSEEESEFSESETTEEESESETPSEEEESSTPESEESESTESEGEKARKNIVLARRRPMVEEVKEVKGRKEEPQEEQKEPKMEEEEHSEEEESGPAPVEESTDPEAQDIPEEGSAESASVEGGVESEEESESGSSSSSSESQSGGPWGYQVPAYDRSKNANQKKSPGANSEGYNTAL

SEQ ID NO: 11279 - protein, 650 aa, Homo sapiens
MFRQFYLWTCLASGIILGSLFEICLGQYDDDCKLARGGPPATIVAIDEESRNGTILVDNMLIKGTAGGPDPTIELSLKDNVDYWVLMDPVKQMLFLNSTGRVLDRDPPMNIHSIVVQVQCINKKVGTIIYHEVRIVVRDRNDNSPTFKHESYYATVNELTPVGTTIFTGFSGDNGATDIDDGPNGQIEYVIQYNPDDPTSNDTFEIPLMLTGNIVLRKRLNYEDKTRYFVIIQANDRAQNLNERRTTTTTLTVDVLDGDDLGPMFLPCVLVPNTRDCRPLTYQAAIPELRTPEELNPIIVTPPIQAIDQDRNIQPPSDRPGILYSILVGTPEDYPRFFHMHPRTAELSLLEPVNRDFHQKFDLVIKEEPKKIKKPKVEIREPSEEEEVVVTIEKPPAAEPTYTTWKRARIFPMIFKKVRGLADKRGIVDLEGEEWQRRLEEEDKDYLKLTLDQEEATESTVESEEESSSDYTEYSEEESEFSESETTEEESESETPSEEEESSTPESEESESTESEGEKARKNIVLARRRPMVEEVKEVKGRKEEPQEEQKEPKMEEEEHSEEEESGPAPVEESTDPEAQDIPEEGSAESASVEGGVESEEESESGSSSSSSESQSGGPWGYQVPAYDRSKNANQKKSPGANSEGYNTAL

SEQ ID NO: 11280 - protein, 1783 aa, Homo sapiens
MFRQFYLWTCLASGIILGSLFEICLGQYDDDCKLARGGPPATIVAIDEESRNGTILVDNMLIKGTAGGPDPTIELSLKDNVDYWVLMDPVKQMLFLNSTGRVLDRDPPMNIHSIVVQVQCINKKVGTIIYHEVRIVVRDRNDNSPTFKHESYYATVNELTPVGTTIFTGFSGDNGATDIDDGPNGQIEYVIQYNPDDPTSNDTFEIPLMLTGNIVLRKRLNYEDKTRYFVIIQANDRAQNLNERRTTTTTLTVDVLDGDDLGPMFLPCVLVPNTRDCRPLTYQAAIPELRTPEELNPIIVTPPIQAIDQDRNIQPPSDRPGILYSILVGTPEDYPRFFHMHPRTAELSLLEPVNRDFHQKFDLVIKAEQDNGHPLPAFAGLHIEILDENNQSPYFTMPSYQGYILESAPVGATISDSLNLTSPLRIVALDKDIEDVPPSGVPTKDPELHLFLNDYTSVFTVTQTGITRYLTLLQPVDREEQQTYTFSITAFDGVQESEPVIVNIQVMDANDNTPTFPEISYDVYVYTDMRPGDSVIQLTAVDADEGSNGEITYEILVGAQGDFIINKTTGLITIAPGVEMIVGRTYALTVQAADNAPPAERRNSICTVYIEVLPPNNQSPPRFPQLMYSLEISEAMRVGAVLLNLQATDREGDSITYAIENGDPQRVFNLSETTGILTLGKALDRESTDRYILIITASDGRPDGTSTATVNIVVTDVNDNAPVFDPYLPRNLSVVEEEANAFVGQVKATDPDAGINGQVHYSLGNFNNLFRITSNGSIYTAVKLNREVRDYYELVVVATDGAVHPRHSTLTLAIKVLDIDDNSPVFTNSTYTVLVEENLPAGTTILQIEAKDVDLGANVSYRIRSPEVKHFFALHPFTGELSLLRSLDYEAFPDQEASITFLVEAFDIYGTMPPGIATVTVIVKDMNDYPPVFSKRIYKGMVAPDAVKGTPITTVYAEDADPPGLPASRVRYRVDDVQFPYPASIFEVEEDSGRVITRVNLNEEPTTIFKLVVVAFDDGEPVMSSSATVKILVLHPGEIPRFTQEEYRPPPVSELATKGTMVGVISAAAINQSIVYSIVSGNEEDTFGINNITGVIYVNGPLDYETRTSYVLRVQADSLEVVLANLRVPSKSNTAKVYIEIQDENNHPPVFQKKFYIGGVSEDARMFTSVLRVKATDKDTGNYSVMAYRLIIPPIKEGKEGFVVETYTGLIKTAMLFHNMRRSYFKFQVIATDDYGKGLSGKADVLVSVVNQLDMQVIVSNVPPTLVEKKIEDLTEILDRYVQEQIPGAKVVVESIGARRHGDAFSLEDYTKCDLTVYAIDPQTNRAIDRNELFKFLDGKLLDINKDFQPYYGEGGRILEIRTPEAVTSIKKRGESLGYTEGALLALAFIIILCCIPAILVVLVSYRQFKVRQAECTKTARIQAALPAAKPAVPAPAPVAAPPPPPPPPPGAHLYEELGDSSMYEMPQYGSRRRLLPPAGQEEYGEVVGEAEEEYEEEEEEPKKIKKPKVEIREPSEEEEVVVTIEKPPAAEPTYTTWKRARIFPMIFKKVRGLADKRGIVDLEGEEWQRRLEEEDKDYLKLTLDQEEATESTVESEEESSSDYTEYSEEESEFSESETTEEESESETPSEEEESSTPESEESESTESEGEKARKNIVLARRRPMVEEVKEVKGRKEEPQEEQKEPKMEEEEHSEEEESGPAPVEESTDPEAQDIPEEGSAESASVEGGVESEEESESGSSSSSSESQSGGPWGYQVPAYDRSKNANQKKSPGANSEGYNTAL

SEQ ID NO: 11281 - protein, 981 aa, Homo sapiens
MFRQFYLWTCLASGIILGSLFEICLGQYDDDCKLARGGPPATIVAIDEESRNGTILVDNMLIKGTAGGPDPTIELSLKDNVDYWVLMDPVKQMLFLNSTGRVLDRDPPMNIHSIVVQVQCINKKVGTIIYHEVRIVVRDRNDNSPTFKHESYYATVNELTPVGTTIFTGFSGDNGATDIDDGPNGQIEYVIQYNPDDPTSNDTFEIPLMLTGNIVLRKRLNYEDKTRYFVIIQANDRAQNLNERRTTTTTLTVDVLDGDDLGPMFLPCVLVPNTRDCRPLTYQAAIPELRTPEELNPIIVTPPIQAIDQDRNIQPPSDRPGILYSILVGTPEDYPRFFHMHPRTAELSLLEPVNRDFHQKFDLVIKAEQDNGHPLPAFAGLHIEILDENNQSPYFTMPSYQGYILESAPVGATISDSLNLTSPLRIVALDKDIEDTKDPELHLFLNDYTSVFTVTQTGITRYLTLLQPVDREEQQTYTFSITAFDGVQESEPVIVNIQVMDANDNTPTFPEISYDVYVYTDMRPGDSVIQLTAVDADEGSNGEITYEILVGAQGDFIINKTTGLITIAPGVEMIVGRTYALTVQAADNAPPAERRNSICTVYIEVLPPNNQSPPRFPQLMYSLEISEAMRVGAVLLNLQATDREGDSITYAIENGDPQRVFNLSETTGILTLGKALDRESTDRYILIITASDGRPDGEEPKKIKKPKVEIREPSEEEEVVVTIEKPPAAEPTYTTWKRARIFPMIFKKVRGLADKRGIVDLEGEEWQRRLEEEDKDYLKLTLDQEEATESTVESEEESSSDYTEYSEEESEFSESETTEEESESETPSEEEESSTPESEESESTESEGEKARKNIVLARRRPMVEEVKEVKGRKEEPQEEQKEPKMEEEEHSEEEESGPAPVEESTDPEAQDIPEEGSAESASVEGGVESEEESESGSSSSSSESQSGGPWGYQVPAYDRSKNANQKKSPGANSEGYNTAL

SEQ ID NO: 11282 - protein, 77 aa, Homo sapiens
MKKKTVCTLNMGDKKYEDMEGEENGDNTISTGLLYSEADRCPICLNCLLEKEVGFPESCNHVFCMTCILKWAEGLFT

SEQ ID NO: 11283 - protein, 245 aa, Homo sapiens
MSDEFSLADALPEHSPAKTSAVSNTKPGQPPQGWPGSNPWNNPSAPSSVPSGLPPSATPSTVPFGPAPTGMYPSVPPTGPPPGPPAPFPPSGPSCPPPGGPYPAPTVPGPGPTGPYPTPNMPFPELPRPYGAPTDPAAAGPLGPWGSMSSGPWAPGMGGQYPTPNMPYPSPGPYPAPPPPQAPGAAPPVPWGTVPPGAWGPPAPYPAPTGSYPTPGLYPTPSNPFQVPSGPSGAPPMPGGPHSYH

SEQ ID NO: 11284 - protein, 1151 aa, Homo sapiens
MGSAARWEGSFSREFSSLLSRGCLSTSRIDMDALEDYVWPRATSELILLPVTGLECVGDRLLAGEGPDVLVYSLDFGGHLRMIKRVQNLLGHYLIHGFRVRPEPNGDLDLEAMVAVFGSKGLRVVKISWGQGHFWELWRSGLWNMSDWIWDARWLEGNIALALGHNSVVLYDPVVGCILQEVPCTDRCTLSSACLIGDAWKELTIVAGAVSNQLLVWYPATALADNKPVAPDRRISGHVGIIFSMSYLESKGLLATASEDRSVRIWKVGDLRVPGGRVQNIGHCFGHSARVWQVKLLENYLISAGEDCVCLVWSHEGEILQAFRGHQGRGIRAIAAHERQAWVITGGDDSGIRLWHLVGRGYRGLGVSALCFKSRSRPGTLKAVTLAGSWRLLAVTDTGALYLYDVEVKCWEQLLEDKHFQSYCLLEAAPGPEGFGLCAMANGEGRVKVVPINTPTAAVDQTLFPGKVHSLSWALRGYEELLLLASGPGGVVACLEISAAPSGKAIFVKERCRYLLPPSKQRWHTCSAFLPPGDFLVCGDRRGSVLLFPSRPGLLKDPGVGGKARAGAGAPVVGSGSSGGGNAFTGLGPVSTLPSLHGKQGVTSVTCHGGYVYTTGRDGAYYQLFVRDGQLQPVLRQKSCRGMNWLAGLRIVPDGSMVILGFHANEFVVWNPRSHEKLHIVNCGGGHRSWAFSDTEAAMAFAYLKDGDVMLYRALGGCTRPHVILREGLHGREITCVKRVGTITLGPEYGVPSFMQPDDLEPGSEGPDLTDIVITCSEDTTVCVLALPTTTGSAHALTAVCNHISSVRAVAVWGIGTPGGPQDPQPGLTAHVVSAGGRAEMHCFSIMVTPDPSTPSRLACHVMHLSSHRLDEYWDRQRNRHRMVKVDPETRYMSLAVCELDQPGLGPLVAAACSDGAVRLFLLQDSGRILQLLAETFHHKRCVLKVHSFTHEAPNQRRRLLLCSAATDGSLAFWDLTTMLDHDSTVLEPPVDPGLPYRLGTPSLTLQAHSCGINSLHTLPTREGHHLVASGSEDGSLHVFVLAVEMLQLEEAVGEAGLVPQLRVLEEYSVPCAHAAHVTGLKILSPSIMVSASIDQRLTFWRLGHGEPTFMNSTVFHVPDVADMDCWPVSPEFGHRCALGGQGLEVYNWYD

SEQ ID NO: 11285 - protein, 815 aa, Homo sapiens
METGLGAPLFKAWLLISVWGLGVDPSLQIDVLTELELGESTTGVRQVPGLHNGTKAFLFQDTPRSIKASTATAEQFFQKLRNKHEFTILVTLKQTHLNSGVILSIHHLDHRYLELESSGHRNEVRLHYRSGSHRPHTEVFPYILADDKWHKLSLAISASHLILHIDCNKIYERVVEKPSTDLPLGTTFWLGQRNNAHGYFKGIMQDVQLLVMPQGFIAQCPDLNRTCPTCNDFHGLVQKIMELQDILAKTSAKLSRAEQRMNRLDQCYCERTCTMKGTTYREFESWIDGCKNCTCLNGTIQCETLICPNPDCPLKSALAYVDGKCCKECKSICQFQGRTYFEGERNTVYSSSGVCVLYECKDQTMKLVESSGCPALDCPESHQITLSHSCCKVCKGYDFCSERHNCMENSICRNLNDRAVCSCRDGFRALREDNAYCEDIDECAEGRHYCRENTMCVNTPGSFMCICKTGYIRIDDYSCTEHDECITNQHNCDENALCFNTVGGHNCVCKPGYTGNGTTCKAFCKDGCRNGGACIAANVCACPQGFTGPSCETDIDECSDGFVQCDSRANCINLPGWYHCECRDGYHDNGMFSPSGESCEDIDECGTGRHSCANDTICFNLDGGYDCRCPHGKNCTGDCIHDGKVKHNGQIWVLENDRCSVCSCQNGFVMCRRMVCDCENPTVDLFCCPECDPRLSSQCLHQNGETLYNSGDTWVQNCQQCRCLQGEVDCWPLPCPDVECEFSILPENECCPRCVTDPCQADTIRNDITKTCLDEMNVVRFTGSSWIKHGTECTLCQCKNGHICCSVDPQCLQEL

SEQ ID NO: 11286 - protein, 46 aa, Homo sapiens
MESPASSQPASMPQSKERLVISMVTIYGPQQVPICAVNPVLSTLQT

SEQ ID NO: 11287 - protein, 350 aa, Homo sapiens
MSHQTGIQASEDVKEIFARARNGKYRLLKISIENEQLVIGSYSQPSDSWDKDYDSFVLPLLEDKQPCYILFRLDSQNAQGYEWIFIAWSPDHSHVRQKMLYAATRATLKKEFGGGHIKDEVFGTVKEDVSLHGYKKYLLSQSSPAPLTAAEEELRQIKINEVQTDVGVDTKHQTLQGVAFPISREAFQALEKLNNRQLNYVQLEIDIKNEIIILANTTNTELKDLPKRIPKDSARYHFFLYKHSHEGDYLESIVFIYSMPGYTCSIRERMLYSSCKSRLLEIVERQLQMDVIRKIEIDNGDELTADFLYEEVHPKQHAHKQSFAKPKGPAGKRGIRRLIRGPAETEATTD

SEQ ID NO: 11288 - protein, 325 aa, Homo sapiens
MVSPATRKSLPKVKAMDFITSTAILPLLFGCLGVFGLFRLLQWVRGKAYLRNAVVVITGATSGLGKECAKVFYAAGAKLVLCGRNGGALEELIRELTASHATKVQTHKPYLVTFDLTDSGAIVAAAAEILQCFGYVDILVNNAGISYRGTIMDTTVDVDKRVMETNYFGPVALTKALLPSMIKRRQGHIVAISSIQGKMSIPFRSAYAASKHATQAFFDCLRAEMEQYEIEVTVISPGYIHTNLSVNAITADGSRYGVMDTTTAQGRSPVEVAQDVLAAVGKKKKDVILADLLPSLAVYLRTLAPGLFFSLMASRARKERKSKNS

SEQ ID NO: 11289 - protein, 790 aa, Homo sapiens
MRSAAKPWNPAIRAGGHGPDRVRPLPAASSGMKSSKSSTSLAFESRLSRLKRASSEDTLNKPGSTAASGVVRLKKTATAGAISELTESRLRSGTGAFTTTKRTGIPAPREFSVTVSRERSVPRGPSNPRKSVSSPTSSNTPTPTKHLRTPSTKPKQENEGGEKAALESQVRELLAEAKAKDSEINRLRSELKKYKEKRTLNAEGTDALGPNVDGTSVSPGDTEPMIRALEEKNKNFQKELSDLEEENRVLKEKLIYLEHSPNSEGAASHTGDSSCPTSITQESSFGSPTGNQMSSDIDEYKKNIHGNALRTSGSSSSDVTKASLSPDASDFEHITAETPSRPLSSTSNPFKSSKCSTAGSSPNSVSELSLASLTEKIQKMEENHHSTAEELQATLQELSDQQQMVQELTAENEKLVDEKTILETSFHQHRERAEQLSQENEKLMNLLQERVKNEEPTTQEGKIIELEQKCTGILEQGRFEREKLLNIQQQLTCSLRKVEEENQGALEMIKRLKEENEKLNEFLELERHNNNMMAKTLEECRVTLEGLKMENGSLKSHLQGEKQKATEASAVEQTAESCEVQEMLKVARAEKDLLELSCNELRQELLKANGEIKHVSSLLAKVEKDYSYLKEICDHQAEQLSRTSLKLQEKASESDAEIKDMKETIFELEDQVEQHRAVKLHNNQLISELESSVIKLEEQKSDLERQLKTLTKQMKEETEEWRRFQADLQTAVVVANDIKCEAQQELRTVKRKLLEEEEKNARLQKELGDVQGHGRVVTSRAAPPSLGSVS

SEQ ID NO: 11290 - protein, 987 aa, Homo sapiens
MGNHSGRPEDPEPGAFTTTKRTGIPAPREFSVTVSRERSVPRGPSNPRKSVSSPTSSNTPTPTKHLRTPSTKPKQENEGGEKAALESQVRELLAEAKAKDSEINRLRSELKKYKEKRTLNAEGTDALGPNVDGTSVSPGDTEPMIRALEEKNKNFQKELSDLEEENRVLKEKLIYLEHSPNSEGAASHTGDSSCPTSITQESSFGSPTGNQMSSDIDEYKKNIHGNALRTSGSSSSDVTKASLSPDASDFEHITAETPSRPLSSTSNPFKSSKCSTAGSSPNSVSELSLASLTEKIQKMEENHHSTAEELQATLQELSDQQQMVQELTAENEKLVDEKTILETSFHQHRERAEQLSQENEKLMNLLQERVKNEEPTTQEGKIIELEQKCTGILEQGRFEREKLLNIQQQLTCSLRKVEEENQGALEMIKRLKEENEKLNEFLELERHNNNMMAKTLEECRVTLEGLKMENGSLKSHLQGEKQKATEASAVEQTAESCEVQEMLKVARAEKDLLELSCNELRQELLKANGEIKHVSSLLAKVEKDYSYLKEICDHQAEQLSRTSLKLQEKASESDAEIKDMKETIFELEDQVEQHRAVKLHNNQLISELESSVIKLEEQKSDLERQLKTLTKQMKEETEEWRRFQADLQTAVVVANDIKCEAQQELRTVKRKLLEEEEKNARLQKELGDVQGHGRVVTSRAAPPPVDEEPESSEVDAAGRWPGVCVSRTSPTPPESATTVKSLIKSFDLGRPGGAGQNISVHKTPRSPLSGIPVRTAPAAAVSPMQRHSTYSSVRPASRGVTQRLDLPDLPLSDILKGRTETLKPDPHLRKSPSLESLSRPPSLGFGDTRLLSASTRAWKPQSKLSVERKDPLAALAREYGGSKRNALLKWCQKKTQGYANIDITNFSSSWSDGLAFCALLHTYLPAHIPYQELNSQEKKRNLLLAFEAAESVGIKPSLELSEMLYTDRPDWQSVMQYVAQIYKYFET

SEQ ID NO: 11291 - protein, 160 aa, Homo sapiens
MKIAVLFCFFLLIIFQTDFGKNEEIPRKQRRKIYHRRLRKSSTSHKHRSNRQLGIQQTTVFTPVARLPIVNFDYSMEEKFESFSSFPGVESSYNVLPGKKGHCLVKGITMYNKAVWSPEPCTTCLCSDGRVLCDETMCHPQRCPQTVIPEGECCPVCSAT

SEQ ID NO: 11292 - protein, 1504 aa, Homo sapiens [sequence omitted]

SEQ ID NO: 11293 - protein, 446 aa, Homo sapiens
MEKDKHSHFYNQKSDFRIEHSMLEELENKLIHSRKTERAKIQQQLAKIHNNVKKLQHQLKDVKPTPDFVEKLREMMEEIENAINTFKEEQRLIYEELIKEEKTTNNELSAISRKIDTWALGNSETEKAFRAISSKVPVDKVTPSTLPEEVLDFEKFLQQTGGRQGAWDDYDHQNFVKVRNKHKGKPTFMEEVLEHLPGKTQDEVQQHEKWYQKFLALEERKKESIQIWKTKKQQKREEIFKLKEKADNTPVLFHNKQEDNQKQKEEQRKKQKLAVEAWKKQKSIEMSMKCASQLKEEEEKEKKHQKERQRQFKLKLLLESYTQQKKEQEEFLRLEKEIREKAEKAEKRKNAADEISRFQERDLHKLELKILDRQAKEDEKSQKQRRLAKLKEKVENNVSRDPSRLYKPTKGWEERTKKIGPTGSGPLLHIPHRAIPTWRQGIQRRV

SEQ ID NO: 11294 - protein, 36 aa, Homo sapiens
MAATGANAEKAESHKSGARHCGHNRAGSGYLLQGRV

SEQ ID NO: 11295 - protein, 87 aa, Homo sapiens
MQHRGFLLLTLLALLALTSAVAKKKADCKYKFENWGACDGGTGTKVRQGTLKKARYNAQCQETIRVTKPCTPKTKAKAKAKKGKGKD

SEQ ID NO: 11296 - protein, 374 aa, Homo sapiens
MAYRRDEMWSEGRYEYERIPRERAPPRSHPSDGYNRLVNIVPKKPPLLDRPGEGSYNRYYSHVDYRDYDEGRSFSHDRRSGPPHRGDESGYRWTRDDHSASRQPEYRDMRDGFRRKSFYSSHYARERSPYKRDNTFFRESPVGRKDSPHSRSGSSVSSRSYSPERSKSYSFHQSQHRKSVRPGASYKRQNEGNPERDKERPVQSLKTSRDTSPSSGSAVSSSKVLDKPSRLTEKELAEAASKWAAEKLEKSDESNLPEISEYEAGSTAPLFTDQPEEPESNTTHGIELFEDSQLTTRSKAIASKTKEIEQVYRQDCETFGMVVKMLIEKDPSLEKSIQFALRQNLHEIGERCVEELKHFIAEYDTSTQDFGEPF

SEQ ID NO: 11297 - protein, 538 aa, Homo sapiens [sequence omitted]

SEQ ID NO: 11298 - protein, 1140 aa, Homo sapiens
MVLSLTGLIAFSFLQATLALNPEDPNVCSHWESYAVTVQESYAHPFDQIYYTRCTDILNWFKCTRHRISYKTAYRRGLRTMYRRRSQCCPGYYESGDFCIPLCTEECVHGRCVSPDTCHCEPGWGGPDCSSGCDSDHWGPHCSNRCQCQNGALCNPITGACVCAAGFRGWRCEELCAPGTHGKGCQLPCQCRHGASCDPRAGECLCAPGYTGVYCEELCPPGSHGAHCELRCPCQNGGTCHHITGECACPPGWTGAVCAQPCPPGTFGQNCSQDCPCHHGGQCDHVTGQCHCTAGYMGDRCQEECPFGSFGFQCSQHCDCHNGGQCSPTTGACECEPGYKGPRCQERLCPEGLHGPGCTLPCPCDADNTISCHPVTGACTCQPGWSGHHCNESCPVGYYGDGCQLPCTCQNGADCHSITGGCTCAPGFMGEVCAVSCAAGTYGPNCSSICSCNNGGTCSPVDGSCTCKEGWQGLDCTLPCPSGTWGLNCNESCTCANGAACSPIDGSCSCTPGWLGDTCELPCPDGTFGLNCSEHCDCSHADGCDPVTGHCCCLAGWTGIRCDSTCPPGRWGPNCSVSCSCENGGSCSPEDGSCECAPGFRGPLCQRICPPGFYGHGCAQPCPLCVHSSRPCHHISGICECLPGFSGALCNQVCAGGYFGQDCAQLCSCANNGTCSPIDGSCQCFPGWIGKDCSQACPPGFWGPACFHACSCHNGASCSAEDGACHCTPGWTGLFCTQRCPAAFFGKDCGRVCQCQNGASCDHISGKCTCRTGFTGQHCEQRCAPGTFGYGCQQLCECMNNSTCDHVTGTCYCSPGFKGIRCDQAALMMEELNPYTKISPALGAERHSVGAVTGIMLLLFLIVVLLGLFAWHRRRQKEKGRDLAPRVSYTPAMRMTSTDYSLSDLSQSSSHAHCFSNSSYHALACGGPATSQASTLDRNSPTKLSNKSLDRDTAGWTPYSYVNVLDSHFQISALEARYPPEDFYIELRHLSRPAEPHSPGACGMDRRQNTYIMDKGFKDYMKESVCSSSTCSLNSSENPYATIKDPPILTCKLPESSYVEMKSPVHMGSPYTDVPSLSTSNKNIYEVEPTVSVVQEGCGHNSSYIQNAYDLPRNSHIPGHYDLLPVRQSPANGPSQDKQS

SEQ ID NO: 11299 - protein, 100 aa, Homo sapiens
MATFPPATSAPQQPPGPEDEDSSLDESDLYSLAHSYLGPLIMPMPTSPLTPALVTGGGGRKGRTKREAAANTNRPSPGGHERKLVTKLQNSERKKRGARR

SEQ ID NO: 11300 - protein, 224 aa, Homo sapiens
MEPGLWLLFGLTVTSAAGFVPCSQSGDAGRRGVSQAPTAARSEGDCEETVAGPGEETVAGPGEGTVAPTALQGPSPGSPGQEQAAEGAPEHHRSRRCTCFTYKDKECVYYCHLDIIWINTPEQTVPYGLSNYRGSFRGKRSAGPLPGNLQLSHRPHLRCACVGRYDKACLHFCTQTLDVSRQVEVKDQQSKQALDLHHPKLMPGSGLALAPSTCPRCLFQEGAP

SEQ ID NO: 11301 - protein, 751 aa, Homo sapiens
MSCASGSGGGLRHPLRCQKPWDEECEEEAVCVIMCASVKYNIRGPALIPRMKTKHRIYYITLFSIVLLGLIATGMFQFWPHSIESSNDWNVEKRSIRDVPVVRLPADSPIPERGDLSCRMHTCFDVYRCGFNPKNKIKVYIYALKKYVDDFGVSVSNTISREYNELLMAISDSDYYTDDINRACLFVPSIDVLNQNTLRIKETAQAMAQLSRWDRGTNHLLFNMLPGGPPDYNTALDVPRDRALLAGGGFSTWTYRQGYDVSIPVYSPLSAEVDLPEKGPGPRQYFLLSSQVGLHPEYREDLEALQVKHGESVLVLDKCTNLSEGVLSVRKRCHKHQVFDYPQVLQEATFCVVLRGARLGQAVLSDVLQAGCVPVVIADSYILPFSEVLDWKRASVVVPEEKMSDVYSILQSIPQRQIEEMQRQARWFWEAYFQSIKAIALATLQIINDRIYPYAAISYEEWNDPPAVKWGSVSNPLFLPLIPPQSQGFTAIVLTYDRVESLFRVITEVSKVPSLSKLLVVWNNQNKNPPEDSLWPKIRVPLKVVRTAENKLSNRFFPYDEIETEAVLAIDDDIIMLTSDELQFGYEVWREFPDRLVGYPGRLHLWDHEMNKWKYESEWTNEVSMVLTGAAFYHKYFNYLYTYKMPGDIKNWVDAHMNCEDIAMNFLVANVTGKAVIKVTPRKKFKCPECTAIDGLSLDQTHMVERSECINKFASVFGTMPLKVVEHRADPVLYKDDFPEKLKSFPNIGSL

SEQ ID NO: 11302 - protein, 468 aa, Homo sapiens
MGRGWGFLFGLLGAVWLLSSGHGEEQPPETAAQRCFCQVSGYLDDCTCDVETIDRFNNYRLFPRLQKLLESDYFRYYKVNLKRPCPFWNDISQCGRRDCAVKPCQSDEVPDGIKSASYKYSEEANNLIEECEQAERLGAVDESLSEETQKAVLQWTKHDDSSDNFCEADDIQSPEAEYVDLLLNPERYTGYKGPDAWKIWNVIYEENCFKPQTIKRPLNPLASGQGTSEENTFYSWLEGLCVEKRAFYRLISGLHASINVHLSARYLLQETWLEKKWGHNITEFQQRFDGILTEGEGPRRLKNLYFLYLIELRALSKVLPFFERPDFQLFTGNKIQDEENKMLLLEILHEIKSFPLHFDENSFFAGDKKEAHKLKEDFRLHFRNISRIMDCVGCFKCRLWGKLQTQGLGTALKILFSEKLIANMPESGPSYEFHLTRQEIVSLFNAFGRISTSVKELENFRNLLQNIH

SEQ ID NO: 11303 - protein, 411 aa, Homo sapiens
MMGRSPGFAMQHIVGVPHVLVRRGLLGRDLFMTRTLCSPGPSQPGEKRPEEVALGLHHRLPALGRALGHSIQQRATSTAKTWWDRYEEFVGLNEVREAQGKVTEAEKVFMVARGLVREAREDLEVHQAKLKEVRDRLDRVSREDSQYLELATLEHRMLQEEKRLRTAYLRAEDSEREKFSLFSAAVRESHEKERTRAERTKNWSLIGSVLGALIGVAGSTYVNRVRLQELKALLLEAQKGPVSLQEAIREQASSYSRQQRDLHNLMVDLRGLVHAAGPGQDSGSQAGSPPTRDRDVDVLSAALKEQLSHSRQVHSCLEGLREQLDGLEKTCSQMAGVVQLVKSAAHPGLVEPADGAMPSFLLEQGSMILALSDTEQRLEAQVNRNTIYSTLVTCVTFVATLPVLYMLFKAS

SEQ ID NO: 11304 - protein, 72 aa, Homo sapiens
MSNRNNNKLPSNLPQLQNLIKRDPPAYIEEFLQQYNHYKSNVEIFKLQPNKPSKELAELVMFMAQNILNVCI

SEQ ID NO: 11305 - protein, 1294 aa, Homo sapiens
MPYEVNAGYDFTNMVRKKNPPLRNVASEGEGQILEPIGTESKVSGKNKEFSADQMSENTDQSDAAELNHKEEHSLHVQDPSSSSKKDLKSAVLSEKAGFNYESPSKGGNFPSFPHDEVTDRNMLAFSSPAAGGVCEPLKSPQRAEADDPQDMACTPSGDSLETKEDQKMSPKATEETGQAQSGQANCQGLSPVSVASKNPQVPSDGGVRLNKSKTDLLVNDNPDPAPLSPELQDFKCNICGYGYYGNDPTDLIKHFRKYHLGLHNRTRQDAELDSKILALHNMVQFSHSKDFQKVNRSVFSGVLQDINSSRPVLLNGTYDVQVTSGGTFIGIGRKTPDCQGNTKYFRCKFCNFTYMGNSSTELEQHFLQTHPNKIKASLPSSEVAKPSEKNSNKSIPALQSSDSGDLGKWQDKITVKAGDDTPVGYSVPIKPLDSSRQNGTEATSYYWCKFCSFSCESSSSLKLLEHYGKQHGAVQSGGLNPELNDKLSRGSVINQNDLAKSSEGETMTKTDKSSSGAKKKDFSSKGAEDNMVTSYNCQFCDFRYSKSHGPDVIVVGPLLRHYQQLHNIHKCTIKHCPFCPRGLCSPEKHLGEITYPFACRKSNCSHCALLLLHLSPGAAGSSRVKHQCHQCSFTTPDVDVLLFHYESVHESQASDVKQEANHLQGSDGQQSVKESKEHSCTKCDFITQVEEEISRHYRRAHSCYKCRQCSFTAADTQSLLEHFNTVHCQEQDITTANGEEDGHAISTIKEEPKIDFRVYNLLTPDSKMGEPVSESVVKREKLEEKDGLKEKVWTESSSDDLRNVTWRGADILRGSPSYTQASLGLLTPVSGTQEQTKTLRDSPNVEAAHLARPIYGLAVETKGFLQGAPAGGEKSGALPQQYPASGENKSKDESQSLLRRRRGSGVFCANCLTTKTSLWRKNANGGYVCNACGLYQKLHSTPRPLNIIKQNNGEQIIRRRTRKRLNPEALQAEQLNKQQRGSNEEQVNGSPLERRSEDHLTESHQREIPLPSLSKYEAQGSLTKSHSAQQPVLVSQTLDIHKRMQPLHIQIKSPQESTGDPGNSSSVSEGKGSSERGSPIEKYMRPAKHPNYSPPGSPIEKYQYPLFGLPFVHNDFQSEADWLRFWSKYKLSVPGNPHYLSHVPGLPNPCQNYVPYPTFNLPPHFSAVGSDNDIPLDLAIKHSRPGPTANGASKEKTKAPPNVKNEGPLNVVKTEKVDRSTQDELSTKCVHCGIVFLDEVMYALHMSCHGDSGPFQCSICQHLCTDKYDFTTHIQRGLHRNNAQVEKNGKPKE

SEQ ID NO: 11306 - protein, 423 aa, Homo sapiens
MNALLLSAWFGHLRILQILVNSGAKIHCESKDGLTLLHCAAQKGHVPVLAFIMEDLEDVALDHVDKLGRTAFHRAAEHGQLDALDFLVGSGCDHNVKDKEGNTALHLAAGRGHMAVLQRLVDIGLDLEEQNAEGLTALHSAAGGSHPDCVQLLLRAGSTVNALTQKNLSCLHYAALSGSEDVSRVLIHAGGCANVVDHQGASPLHLAVRHNFPALVRLLINSDSDVNAVDNRQQTPLHLAAEHAWQDIADMLLIAGVDLNLRDKQGKTALAVAVRSNHVSLVDMIIKADRFYRWEKDHPSDPSGKSLSFKQDHRQETQQLRSVLWRLASRYLQPREWKKLAYSWEFTEAHVDAIEQQWTGTRSYQEHGHRMLLIWLHGVATAGENPSKALFEGLVAIGRRDLAENIRKKANAAPSAPRRCTAM

SEQ ID NO: 11307 - protein, 399 aa, Homo sapiens
MNALLLSAWFGHLRILQILVNSGAKIHCESKDGLTLLHCAAQKGHVPVLAFIMEDLEDVALDHVDKLGRTAFHRAAEHGQLDALDFLVGSGCDHNVKDKEGNTALHLAAGRGHMAVLQRLVDIGLDLEEQNAEGLTALHSAAGGSHPDCVQLLLRAGSTVNALTQKNLSCLHYAALSGSEDVSRVLIHAGGCANVVDHQGASPLHLAVRHNFPALVRLLINSDSDVNAVDNRQQTPLHLAAEHAWQDIADMLLIAGVDLNLRDKDHPSDPSGKSLSFKQDHRQETQQLRSVLWRLASRYLQPREWKKLAYSWEFTEAHVDAIEQQWTGTRSYQEHGHRMLLIWLHGVATAGENPSKALFEGLVAIGRRDLAGWSTMARSQLTATSASRVQMILVPQPPE

SEQ ID NO: 11308 - protein, 1135 aa, Homo sapiens
MADLSLADALTEPSPDIEGEIKRDFIATLEAEAFDDVVGETVGKTDYIPLLDVDEKTGNSESKKKPCSETSQIEDTPSSKPTLLANGGHGVEGSDTTGSPTEFLEEKMAYQEYPNSQNWPEDTNFCFQPEQVVDPIQTDPFKMYHDDDLADLVFPSSATADTSIFAGQNDPLKDSYGMSPCNTAVVPQGWSVEALNSPHSESFVSPEAVAEPPQPTAVPLELAKEIEMASEERPPAQALEIMMGLKTTDMAPSKETEMALAKDMALATKTEVALAKDMESPTKLDVTLAKDMQPSMESDMALVKDMELPTEKEVALVKDVRWPTETDVSSAKNVVLPTETEVAPAKDVTLLKETERASPIKMDLAPSKDMGPPKENKKETERASPIKMDLAPSKDMGPPKENKIVPAKDLVLLSEIEVAQANDIISSTEISSAEKVALSSETEVALARDMTLPPETNVILTKDKALPLEAEVAPVKDMAQLPETEIAPAKDVAPSTVKEVGLLKDMSPLSETEMALGKDVTPPPETEVVLIKNVCLPPEMEVALTEDQVPALKTEAPLAKDGVLTLANNVTPAKDVPPLSETEATPVPIKDMEIAQTQKGISEDSHLESLQDVGQSAAPTFMISPETVTGTGKKCSLPAEEDSVLEKLGERKPCNSQPSELSSETSGIARPEEGRPVVSGTGNDITTPPNKELPPSPEKKTKPLATTQPAKTSTSKAKTQPTSLPKQPAPTTIGGLNKKPMSLASGLVPAAPPKRPAVASARPSILPSKDVKPKPIADAKAPEKRASPSKPASAPASRSGSKSTQTVAKTTTAAAVASTGPSSRSPSTLLPKKPTAIKTEGKPAEVKKMTAKSVPADLSRPKSTSTSSMKKTTTLSGTAPAAGVVPSRVKATPMPSRPSTTPFIDKKPTSAKPSSTTPRLSRLATNTSAPDLKNVRSKVGSTENIKHQPGGGRAKVEKKTEAAATTRKPESNAVTKTAGPIASAQKQPAGKVQIVSKKVSYSHIQSKCGSKDNIKHVPGGGNVQIQNKKVDISKVSSKCGSKANIKHKPGGGDVKIESQKLNFKEKAQAKVGSLDNVGHLPAGGAVKIETYRLTFRANARARTDHGADIVSRPPHFPGGPNSGSRVLGPLSRAVH

SEQ ID NO: 11309 - protein, 148 aa, Homo sapiens
MARIPTAALGCISLLCLQLPGSLSRSLGGDPRPVKPREPPARSPSSSLQPRHPAPRPVVWKLHRALQAQRGAGLAPVMGQPLRDGGRQHSGPRRHSGPRRTQAQLLRVGCVLGTCQVQNLSHRLWQLMGPAGRQDSAPVDPSSPHSYG

SEQ ID NO: 11310 - protein, 933 aa, Homo sapiens
MFWKFDLNTTSHVDKLLDKEHVTLQELMDEDDILQECKAQNQKLLDFLCRQQCMEELVSLITQDPPLDMEEKVRFKYPNTACELLTCDVPQISDRLGGDESLLSLLYDFLDHEPPLNPLLASFFSKTIGNLIARKTEQVITFLKKKDKFISLVLKHIGTSALMDLLLRLVSCVEPAGLRQDVLHWLNEEKVIQRLVELIHPSQDEDRQSNASQTLCDIVRLGRDQGSQLQEALEPDPLLTALESRQDCVEQLLKNMFDGDRTESCLVSGTQVLLTLLETRRVGTEGLVDSFSQGLERSYAVSSSVLHGIEPRLKDFHQLLLNPPKKKAILTTIGVLEEPLGNARLHGARLMAALLHTNTPSINQELCRLNTMDLLLDLFFKYTWNNFLHFQVELCIAAILSHAAREERTEASGSESRVEPPHENGNRSLETPQPAASLPDNTMVTHLFQKCCLVQRILEAWEANDHTQAAGGMRRGNMGHLTRIANAVVQNLERGPVQTHISEVIRGLPADCRGRWESFVEETLTETNRRNTVDLAFSDYQIQQMTANFVDQFGFNDEEFADQDDNINAPFDRIAEINFNIDADEDSPSAALFEACCSDRIQPFDDDEDEDIWEDSDTRCAARVMARPRFGAPHASESCSKNGPERGGQDGKASLEAHRDAPGAGAPPAPGKKEAPPVEGDSEGAMWTAVFDEPANSTPTAPGVVRDVGSSVWAAGTSAPEEKGWAKFTDFQPFCCSESGPRCSSPVDTECSHAEGSRSQGPEKAFSPASPCAWNVCVTRKAPLLASDSSSSGGSHSEDGDQKAASAMDAVSRGPGREAPPLPTVARTEEAVGRVGCADSRLLSPACPAPKEVTAAPAVAVPPEATVAITTALSKAGPAIPTPAVSSALAVAVPLGPIMAVTAAPAMVATLGTVTKDGKTDAPPEGAALNGPV

SEQ ID NO: 11311 - protein, 178 aa, Homo sapiens
MDRAARCSGASSLPLLLALALGLVILHCVVADGNSTRSPETNGLLCGDPEENCAATTTQSKRKGHFSRCPKQYKHYCIKGRCRFVVAEQTPSCVCDEGYIGARCERVDLFYLRGDRGQILVICLIAVMVVFIILVIGVCTCCHPLRKRRKRKKKEEEMETLGKDITPINEDIEETNIA

SEQ ID NO: 11312 - protein, 932 aa, Homo sapiens
MFWKFDLNTTSHVDKLLDKEHVTLQELMDEDDILQECKAQNQKLLDFLCRQQCMEELVSLITQDPPLDMEEKVRFKYPNTACELLTCDVPQISDRLGGDESLLSLLYDFLDHEPPLNPLLASFFSKTIGNLIARKTEQVITFLKKKDKFISLVLKHIGTSALMDLLLRLVSCVEPAGLRQDVLHWLNEEKVIQRLVELIHPSQDEDRQSNASQTLCDIVRLGRDQGSQLQEALEPDPLLTALESQDCVEQLLKNMFDGDRTESCLVSGTQVLLTLLETRRVGTEGLVDSFSQGLERSYAVSSSVLHGIEPRLKDFHQLLLNPPKKKAILTTIGVLEEPLGNARLHGARLMAALLHTNTPSINQELCRLNTMDLLLDLFFKYTWNNFLHFQVELCIAAILSHAAREERTEASGSESRVEPPHENGNRSLETPQPAASLPDNTMVTHLFQKCCLVQRILEAWEANDHTQAAGGMRRGNMGHLTRIANAVVQNLERGPVQTHISEVIRGLPADCRGRWESFVEETLTETNRRNTVDLAFSDYQIQQMTANFVDQFGFNDEEFADQDDNINAPFDRIAEINFNIDADEDSPSAALFEACCSDRIQPFDDDEDEDIWEDSDTRCAARVMARPRFGAPHASESCSKNGPERGGQDGKASLEAHRDAPGAGAPPAPGKKEAPPVEGDSEGAMWTAVFDEPANSTPTAPGVVRDVGSSVWAAGTSAPEEKGWAKFTDFQPFCCSESGPRCSSPVDTECSHAEGSRSQGPEKAFSPASPCAWNVCVTRKAPLLASDSSSSGGSHSEDGDQKAASAMDAVSRGPGREAPPLPTVARTEEAVGRVGCADSRLLSPACPAPKEVTAAPAVAVPPEATVAITTALSKAGPAIPTPAVSSALAVAVPLGPIMAVTAAPAMVATLGTVTKDGKTDAPPEGAALNGPV

SEQ ID NO: 11313 - protein, 107 aa, Homo sapiens
MARAALSAAPSNPRLLRVALLLLLLVAAGRRAAGASVATELRCQCLQTLQGIHPKNIQSVNVKSPGPHCAQTEVIATLKNGRKACLNPASPIVKKIIEKMLNSDKSN

SEQ ID NO: 11314 - protein, 825 aa, Homo sapiens
MGWLCSGLLFPVSCLVLLQVASSGNMKVLQEPTCVSDYMSISTCEWKMNGPTNCSTELRLLYQLVFLLSEAHTCIPENNGGAGCVCHLLMDDVVSADNYTLDLWAGQQLLWKGSFKPSEHVKPRAPGNLTVHTNVSDTLLLTWSNPYPPDNYLYNHLTYAVNIWSENDPADFRIYNVTYLEPSLRIAASTLKSGISYRARVRAWAQCYNTTWSEWSPSTKWHNSYREPFEQHLLLGVSVSCIVILAVCLLCYVSITKIKKEWWDQIPNPARSRLVAIIIQDAQGSQWEKRSRGQEPAKCPHWKNCLTKLLPCFLEHNMKRDEDPHKAAKEMPFQGSGKSAWCPVEISKTVLWPESISVVRCVELFEAPVECEEEEEVEEEKGSFCASPESSRDDFQEGREGIVARLTESLFLDLLGEENGGFCQQDMGESCLLPPSGSTSAHMPWDEFPSAGPKEAPPWGKEQPLHLEPSPPASPTQSPDNLTCTETPLVIAGNPAYRSFSNSLSQSPCPRELGPDPLLARHLEEVEPEMPCVPQLSEPTTVPQPEPETWEQILRRNVLQHGAAAAPVSAPTSGYQEFVHAVEQGGTQASAVVGLGPPGEAGYKAFSSLLASSAVSPEKCGFGASSGEEGYKPFQDLIPGCPGDPAPVPVPLFTFGLDREPPRSPQSSHLPSSSPEHLGLEPGEKVEDMPKPPLPQEQATDPLVDSLGSGIVYSALTCHLCGHLKQCHGQEDGGQTPVMASPCCGCCCGDRSSPPTTPLRAPDPSPGGVPLEASLCPASLAPSGISEKSKSSSSFHPAPGNAQSSSQTPKIVNFVSVGPTYMRVS

SEQ ID NO: 11315 - protein, 1011 aa, Homo sapiens
MIENSMFEEEPDVVDLAKEPCLHPLEPDEVEYEPRGSRLLVRGLGEHEMEEDEEDYESSAKLLGMSFMNRSSGLRNSATGYRQSPDGACSVPSARTMVVCAFVIVVAVSVIMVIYLLPRCTFTKEGCHKKNQSIGLIQPFATNGKLFPWAQIRLPTAVVPLRYELSLHPNLTSMTFRGSVTISVQALQVTWNIILHSTGHNISRVTFMSAVSSQEKQAEILEYAYHGQIAIVAPEALLAGHNYTLKIEYSANISSSYYGFYGFSYTDESNEKKYFAATQFEPLAARSAFPCFDEPAFKATFIIKIIRDEQYTALSNMPKKSSVVLDDGLVQDEFSESVKMSTYLVAFIVGEMKNLSQDVNGTLVSIYAVPEKIGQVHYALETTVKLLEFFQNYFEIQYPLKKLDLVAIPDFEAGAMENWGLLTFREETLLYDSNTSSMADRKLVTKIIAHELAHQWFGNLVTMKWWNDLWLNEGFATFMEYFSLEKIFKELSSYEDFLDARFKTMKKDSLNSSHPISSSVQSSEQIEEMFDSLSYFKGSSLLLMLKTYLSEDVFQHAVVLYLHNHSYASIQSDDLWDSFNEVTNQTLDVKRMMKTWTLQKGFPLVTVQKKGKELFIQQERFFLNMKPEIQPSDTSYLWHIPLSYVTEGRNYSKYQSVSLLDKKSGVINLTEEVLWVKVNINMNGYYIVHYADDDWEALIHQLKINPYVLSDKDRANLINNIFELAGLGKVPLKRAFDLINYLGNENHTAPITEALFQTDLIYNLLEKLGYMDLASRLVTRVFKLLQNQIQQQTWTDEGTPSMRELRSALLEFACTHNLGNCSTTAMKLFDDWMASNGTQSLPTDVMTTVFKVGAKTDKGWSFLLGKYISIGSEAEKNKILEALASSEDVRKLYWLMKSSLNGDNFRTQKLSFIIRTVGRHFPGHLLAWDFVKENWNKLVQKFPLGSYTIQNIVAGSTYLFSTKTHLSEVQAFFENQSEATFRLRCVQEALEVIQLNIQWMEKNLKSLTWWL

SEQ ID NO: 11316 - protein, 199 aa, Homo sapiens
MTRLLGYVDPLDPSFVAAVITITFNPLYWNVVARWEHKTRKLSRAFGSPYLACYSLSVTILLLNFLRSHCFTQAMLSQPRMESLDTPAAYSLGLALLGLGVVLVLSSFFALGFAGTFLGDYFGILKEARVTVFPFNILDNPMYWGSTANYLGWAIMHASPTGLLLTVLVALTYIVALLYEEPFTAEIYRQKASGSHKRS

SEQ ID NO: 11317 - protein, 242 aa, Homo sapiens
MSGCDAREGDCCSRRCGAQDKEHPRYLIPELCKQFYHLGWVTGTGGGISLKHGDEIYIAPSGVQKERIQPEDMFVCDINEKDISGPSPSKKLKKSQCTPLFMNAYTMRGAGAVIHTHSKAAVMATLLFPGREFKITHQEMIKGIKKCTSGGYYRYDDMLVVPIIENTPEEKDLKDRMAHAMNEYPDSCAVLVRRHGVYVWGETWEKAKTMCECYDYLFDIAVSMKKVGLDPSQLPVGENGIV

SEQ ID NO: 11318 - protein, 609 aa, Homo sapiens
MKWVESIFLIFLLNFTESRTLHRNEYGIASILDSYQCTAEISLADLATIFFAQFVQEATYKEVSKMVKDALTAIEKPTGDEQSSGCLENQLPAFLEELCHEKEILEKYGHSDCCSQSEEGRHNCFLAHKKPTPASIPLFQVPEPVTSCEAYEEDRETFMNKFIYEIARRHPFLYAPTILLWAARYDKIIPSCCKAENAVECFQTKAATVTKELRESSLLNQHACAVMKNFGTRTFQAITVTKLSQKFTKVNFTEIQKLVLDVAHVHEHCCRGDVLDCLQDGEKIMSYICSQQDTLSNKITECCKLTTLERGQCIIHAENDEKPEGLSPNLNRFLGDRDFNQFSSGEKNIFLASFVHEYSRRHPQLAVSVILRVAKGYQELLEKCFQTENPLECQDKGEEELQKYIQESQALAKRSCGLFQKLGEYYLQNAFLVAYTKKAPQLTSSELMAITRKMAATAATCCQLSEDKLLACGEGAADIIIGHLCIRHEMTPVNPGVGQCCTSSYANRRPCFSSLVVDETYVPPAFSDDKFIFHKDLCQAQGVALQTMKQEFLINLVKQKPQITEEQLEAVIADFSGLLEKCCQGQEQEVCFAEEGQKLISKTRAALGV

SEQ ID NO: 11319 - protein, 103 aa, Homo sapiens
MNAKVVVVLVLVLTALCLSDGKPVSLSYRCPCRFFESHYCTCLIRVSFHGATPLTQGSWVLYSLSCAGGETGLREPGPMVSPRVESHQEGRLGVPGPVNLGKA

SEQ ID NO: 11320 - protein, 140 aa, Homo sapiens
MNAKVVVVLVLVLTALCLSDGKPVSLSYRCPCRFFESHVARANVKHLKILNTPNCALQIVARLKNNNRQVCIDPKLKWIQEYLEKALNNLISAAPAGKRVIAGARALHPSPPRACPTARALCEIRLWPPPEWSWPSPGDV

SEQ ID NO: 11321 - protein, 103 aa, Homo sapiens; identical to SEQ ID NO: 11319

SEQ ID NO: 11322 - protein, 841 aa, Homo sapiens
MCDLRRPAAGGMMDLAYVCEWEKWSKSTHCPSVPLACAWSCRNLIAFTMDLRSDDQDLTRMIHILDTEHPWDLHSIPSEHHEAITCLEWDQSGSRLLSADADGQIKCWSMADHLANSWESSVGSLVEGDPIVALSWLHNGVKLALHVEKSGASSFGEKFSRVKFSPSLTLFGGKPMEGWIAVTVSGLVTVSLLKPSGQVLTSTESLCRLRGRVALADIAFTGGGNIVVATADGSSASPVQFYKVCVSVVSEKCRIDTEILPSLFMRCTTDLNRKDKFPAITHLKFLARDMSEQVLLCASSQTSSIVECWSLRKEGLPVNNIFQQISPVVGDKQPTILKWRILSATNDLDRVSAVALPKLPISLTNTDLKVASDTQFYPGLGLALAFHDGSVHIVHRLSLQTMAVFYSSAAPRPVDEPAMKRPRTAGPAVHLKAMQLSWTSLALVGIDSHGKLSVLRLSPSMGHPLEVGLALRHLLFLLEYCMVTGYDWWDILLHVQPSMVQSLVEKLHEEYTRQTAALQQVLSTRILAMKASLCKLSPCTVTRVCDYHTKLFLIAISSTLKSLLRPHFLNTPDKSPGDRLTEICTKITDVDIDKVMINLKTEEFVLDMNTLQALQQLLQWVGDFVLYLLASLPNQGSLLRPGHSFLRDGTSLGMLRELMVVIRIWGLLKPSCLPVYTATSDTQDSMSLLFRLLTKLWICCRDEGPASEPDEALVDECCLLPSQLLIPSLDWLPASDGLVSRLQPKQPLRLQFGRAPTLPGSAATLQLDGLARAPGQPKIDHLRRLHLGACPTEECKACTRCGCVTMLKSPNRTTAVKQWEQRWIKNCLCGGLWWRVPLSYP

SEQ ID NO: 11323 - protein, 750 aa, Homo sapiens
MSQPGQKPAASPRPRRAAAARRTHEHVSEKTSESPSKPGEKKGSDEKKAASLGSSQSSRTYAGGTASATKVSASSGATSKSSSMNPTETKAVKTEPEKKSQSTKPKSLPKQASDTGSNDAHNKKAVSRSAEQQPSEKSTEPKTKPQDMISAGGESVAGITAISGKPGDKKKEKKSLTPAVPVESKPDKPSGKSGMDAALDDLIDTLGGPEETEEENTTYTGPEVSDPMSSTYIEELGKREVTIPPKYRELLAKKEGITGPPADSSKPIGPDDAIDALSSDFTCGSPTAAGKKTEKEESTEVLKAQSAGTVRSAAPPQEKKRKVEKDTMSDQALEALSASLGTRQAEPELDLRSIKEVDEAKAKEEKLEKCGEDDETIPSEYRLKPATDKDGKPLLPEPEEKPKPRSESELIDELSEDFDRSECKEKPSKPTEKTEESKAAAPAPVSEAVCRTSMCSIQSAPPEPATLKGTVPDDAVEALADSLGKKEADPEDGKPVMDKVKEKAKEEDREKLGEKEETIPPDYRLEEVKDKDGKPLLPKESKEQLPPMSEDFLLDALSEDFSGPQNASSLKFEDAKLAAAISEVVSQTPASTTQAGAPPRDTSQSDKDLDDALDKLSDSLGQRQPDPDENKPMEDKVKEKAKAEHRDKLGERDDTIPPEYRHLLDDNGQDKPVKPPTKKSEDSKKPADDQDPIDALSGDLDSCPSTTETSQNTAKDKCKKAASSSKAPKNGGKAKDSAKTTEETSKPKDD

SEQ ID NO: 11324 - protein, 761 aa, Homo sapiens
MLASSKRMNSSSRSQILLRWKSDKAQSGPYNVEKEILTSRFLRDTETCRQNFRNFPYPDLAGPRKALSQLRELCLKWLRPEIHSKEQILELLVLEQFLTILPGEVRTWVKSQYPESSEEAVTLVEDLTQILEEEAPQNSTLSQDTPEEDPRGKHAFQTGWLNDLVTKESMTFKDVAVDITQEDWELMRPVQKELYKTVTLQNYWNMVSLGLTVYRPTVIPILEEPWMVIKEILEGPSPEWETKAQACTPVEDMSKLTKEETHTIKLEDSYDYDDRLERRGKGGFWKIHTDERGFSLKSVLSQEYDPTEECLSKYDIYRNNFEKHSNLIVQFDTQLDNKTSVYNEGRATFNHVSYGIVHRKILPGEKPYKCNVCGKKFRKYPSLLKHQSTHAKEKSYECEECGKEFRHISSLIAHQRMHTGEKPYECHQCGKAFSQRAHLTIHQRIHTGEKPYKCDDCGKDFSQRAHLTIHQRTHTGEKPYKCLECGKTFSHSSSLINHQRVHTGEKPYICNECGKTFSQSTHLLQHQKIHTGKKPYKCNECWKVFSQSTYLIRHQRIHSGEKCYKCNECGKAFAHSSTLIQHQTTHTGEKSYICNICGKAFSQSANLTQHHRTHTGEKPYKCSVCGKAFSQSVHLTQHQRIHNGEKPFKCNICGKAYRQGANLTQHQRIHTGEKPYKCNECGKAFIYSSSLNQHQRTHTGERPYKCNECDKDFSQRTCLIQHQRIHTGEKPYACRICGKTFTQSTNLIQHQRVHTGAKHRN

SEQ ID NO: 11325 - protein, 379 aa, Homo sapiens
MDGEEQQPPHEANVEPVVPSEASEPVPRVLSGDPQNLSDVDAFNLLLEMKLKRRRQRPNLPRTVTQLVAEDGSRVYVVGTAHFSDDSKRDVVKTIREVQPDVVVVELCQYRVSMLKMDESTLLREAQELSLEKLQQAVRQNGLMSGLMQMLLLKVSAHITEQLGMAPGGEFREAFKEASKVPFCKFHLGDRPIPVTFKRAIAALSFWQKVRLAWGLCFLSDPISKDDVERCKQKDLLEQMMAEMIGEFPDLHRTIVSERDVYLTYMLRQAARRLELPRASDAEPRKCVPSVVVGVVGMGHVPGIEKNWSTDLNIQEIMTVPPPSVSGRVSRLAVKAAFFGLLGYSLYWMGRRTASLVLSLPAAQYCLQRVTEARHKEKN

SEQ ID NO: 11326 - protein, 2337 aa, Homo sapiens
MSSSGYPPNQGAFSTEQSRYPPHSVQYTFPNTRHQQEFAVPDYRSSHLEVSQASQLLQQQQQQQLRRRPSLLSEFHPGSDRPQERRTSYEPFHPGPSPVDHDSLESKRPRLEQVSDSHFQRVSAAVLPLVHPLPEGLRASADAKKDPAFGGKHEAPSSPISGQPCGDDQNASPSKLSKEELIQSMDRVDREIAKVEQQILKLKKKQQQLEEEAAKPPEPEKPVSPPPVEQKHRSIVQIIYDENRKKAEEAHKIFEGLGPKVELPLYNQPSDTKVYHENIKTNQVMRKKLILFFKRRNHARKQREQKICQRYDQLMEAWEKKVDRIENNPRRKAKESKTREYYEKQFPEIRKQREQQERFQRVGQRGAGLSATIARSEHEISEIIDGLSEQENNEKQMRQLSVIPPMMFDAEQRRVKFINMNGLMEDPMKVYKDRQFMNVWTDHEKEIFKDKFIQHPKNFGLIASYLERKSVPDCVLYYYLTKKNENYKALVRRNYGKRRGRNQQIARPSQEEKVEEKEEDKAEKTEKKEEEKKDEEEKDEKEDSKENTKEKDKIDGTAEETEEREQATPRGRKTANSQGRRKGRITRSMTNEAAAASAAAAAATEEPPPPLPPPPEPISTEPVETSRWTEEEMEVAKKGLVEHGRNWAAIAKMVGTKSEAQCKNFYFNYKRRHNLDNLLQQHKQKTSRKPREERDVSQCESVASTVSAQEDEDIEASNEEENPEDSEGAENSSDTESAPSPSPVEAVKPSEDSPENATSRGNTEPAVELEPTTETAPSTSPSLAVPSTKPAEDESVETQVNDSISAETAEQMDVDQQEHSAEEGSVCDPPPATKADSVDVEVRVPENHASKVEGDNTKERDLDRASEKVEPRDEDLVVAQQINAQRPEPQSDNDSSATCSADEDVDGEPERQRMFPMDSKPSLLNPTGSILVSSPLKPNPLDLPQLQHRAAVIPPMVSCTPCNIPIGTPVSGYALYQRHIKAMHESALLEEQRQRQEQIDLECRSSTSPCGTSKSPNREWEVLQPAPHQVITNLPEGVRLPTTRPTRPPPPLIPSSKTTVASEKPSFIMGGSISQGTPGTYLTSHNQASYTQETPKPSVGSISLGLPRQQESAKSATLPYIKQEEFSPRSQNSQPEGLLVRAQHEGVVRGTAGAIQEGSITRGTPTSKISVESIPSLRGSITQGTPALPQTGIPTEALVKGSISRMPIEDSSPEKGREEAASKGHVIYEGKSGHILSYDNIKNAREGTRSPRTAHEISLKRSYESVEGNIKQGMSMRESPVSAPLEGLICRALPRGSPHSDLKERTVLSGSIMQGTPRATTESFEDGLKYPKQIKRESPPIRAFEGAITKGKPYDGITTIKEMGRSIHEIPRQDILTQESRKTPEVVQSTRPIIEGSISQGTPIKFDNNSGQSAIKHNVKSLITGPSKLSRGMPPLEIVPENIKVVERGKYEDVKAGETVRSRHTSVVSSGPSVLRSTLHEAPKAQLSPGIYDDTSARRTPVSYQNTMSRGSPMMNRTSDVTISSNKSTNHERKSTLTPTQRESIPAKSPVPGVDPVVSHSPFDPHHRGSTAGEVYRSHLPTHLDPAMPFHRALDPAAAAYLFQRQLSPTPGYPSQYQLYAMENTRQTILNDYITSQQMQVNLRPDVARGLSPREQPLGLPYPATRGIIDLTNMPPTILVPHPGGTSTPPMDRITYIPGTQITFPPRPYNSASMSPGHPTHLAAAASAEREREREREKERERERIAAASSDLYLRPGSEQPGRPGSHGYVRSPSPSVRTQETMLQQRPSVFQGTNGTSVITPLDPTAQLRIMPLPAGGPSISQGLPASRYNTAADALAALVDAAASAPQMDVSKTKEISSHRYETPSDAIEVISPASSPAPPQEKLQTYQPEVVKANQAENDPTRQYEGPLHHYRPQQESPSPQQQLPPSSQAEGMGQVPRTHRLITLADHICQIITQDFARNQVSSQTPQQPPTSTFQNSPSALVSTPVRTKTSNRYSPESQAQSVHHQRPGSRVSPENLVDKSRGSRPGKSPERSHVSSEPYEPISPPQVPVVHEKQDSLLLLSQRGAEPAEQRNDARSPGSISYLPSFFTKLENTSPMVKSKKQEIFRKLNSSGGGDSDMAAAQPGTEIFNLPAVTTSGSVSSRGHSFADPASNLGLEDIIRKALMGSFDDKVEDHGVVMSQPMGVVPGTANTSVVTSGETRREEGDPSPHSGGVCKPKLISKSNSRKSKSPIPGQGYLGTERPSSVSSVHSEGDYHRQTPGWAWEDRPSSTGSTQFPYNPLTMRMLSSTPPTPIACAPSAVNQAAPHQQNRIWEREPAPLLSAQYETLSDSDD

SEQ ID NO: 11327 - protein, 56 aa, Homo sapiens
MLSLAAKLVAFFWRTADTPREEAGQLEPELAEGGSREAAGRRVPGPRVSATREPRP

SEQ ID NO: 11328 - protein, 2343 aa, Homo sapiens
MSSSGYPPNQGAFSTEQSRYPPHSVQYTFPNTRHQQDPAFGGKHEAPSSPISGQPCGDDQNASPSKLSKEELIQSMDRVDREIAKVEQQILKLKKKQQQLEEEAAKPPEPEKPVSPPPVEQKHRSIVQIIYDENRKKAEEAHKIFEGLGPKVELPLYNQPSDTKVYHENIKTNQVMRKKLILFFKRRNHARKQREQKICQRYDQLMEAWEKKVDRIENNPRRKAKESKTREYYEKQFPEIRKQREQQERFQRVGQRGAGLSATIARSEHEISEIIDGLSEQENNEKQMRQLSVIPPMMFDAEQRRVKFINMNGLMEDPMKVYKDRQFMNVWTDHEKEIFKDKFIQHPKNFGLIASYLERKSVPDCVLYYYLTKKNENYKALVRRNYGKRRGRNQQIARPSQEEKVEEKEEDKAEKTEKKEEEKKDEEEKDEKEDSKENTKEKDKIDGTAEETEEREQATPRGRKTANSQGRRKGRITRSMTNEAAAASAAAAAATEEPPPPLPPPPEPISTEPVETSRWTEEEMEVAKKGLVEHGRNWAAIAKMVGTKSEAQCKNFYFNYKRRHNLDNLLQQHKQKTSRKPREERDVSQCESVASTVSAQEDEDIEASNEEENPEDSEGAENSSDTESAPSPSPVEAVKPSEDSPENATSRGNTEPAVELEPTTETAPSTSPSLAVPSTKPAEDESVETQVNDSISAETAEQMDVDQQEHSAEEGSVCDPPPATKADSVDVEVRVPENHASKVEGDNTKERDLDRASEKVEPRDEDLVVAQQINAQRPEPQSDNDSSATCSADEDVDGEPERQRMFPMDSKPSLLNPTGSILVSSPLKPNPLDLPQLQHRAAVIPPMVSCTPCNIPIGTPVSGYALYQRHIKAMHESALLEEQRQRQEQIDLECRSSTSPCGTSKSPNREWEVLQPAPHQVITNLPEGVRLPTTRPTRPPPPLIPSSKTTVASEKPSFIMGGSISQGTPGTYLTSHNQASYTQETPKPSVGSISLGLPRQQESAKSATLPYIKQEEFSPRSQNSQPEGLLVRAQHEGVVRGTAGAIQEGSITRGTPTSKISVESIPSLRGSITQGTPALPQTGIPTEALVKGSISRMPIEDSSPEKGREEAASKGHVIYEGKSGHILSYDNIKNAREGTRSPRTAHEISLKRSYESVEGNIKQGMSMRESPVSAPLEGLICRALPRGSPHSDLKERTVLSGSIMQGTPRATTESFEDGLKYPKQIKRESPPIRAFEGAITKGKPYDGITTIKEMGRSIHEIPRQDILTQESRKTPEVVQSTRPIIEGSISQGTPIKFDNNSGQSAIKHNVKSLITGPSKLSRGMPPLEIVPENIKVVERGKYEDVKAGETVRSRHTSVVSSGPSVLRSTLHEAPKAQLSPGIYDDTSARRTPVSYQNTMSRGSPMMNRTSDVSSNKSTNHERKSTLTPTQRESIPAKSPVPGVDPVVSHSPFDPHHRGSTAGEVYRSHLPTHLDPAMPFHRALDPAAAYLFQRQLSPTPGYPSQYQLYAMENTRQTILNDYITSQQMQVNLRPDVARGLSPREQPLGLPYPATRGIIDLTNMPPTILVPHPGGTSTPPMDRITYIPGTQITFPPRPYNSASMSPGHPTHLAAAASAEREREREREKERERERIAAASSDLYLRPGSEQPGRPGSHGYVRSPSPSVRTQETMLQQRPSVFQGTNGTSVITPLDPTAQLRIMPLPAGGPSISQGLPASRYNTAADALAALVDAAASAPQMDVSKTKESKHEAARLEENLRSRSAAVSEQQQLEQKTLEVEKRSVQCLYTSSAFPSGKPQPHSSVVYSEAGKDKGPPPKSRYEEELRTRGKTTITAANFIDVIITRQIASDKDARERGSQSSDSSSSLSSHRYETPSDAIEVISPASSPAPPQEKLQTYQPEVVKANQAENDPTRQYEGPLHHYRPQQESPSPQQQLPPSSQAEGMGQVPRTHRLITLADHICQIITQDFARNQVSSQTPQQPPTSTFQNSPSALVSTPVRTKTSNRYSPESQAQSVHHQRPGSRVSPENLVDKSRGSRPGKSPERSHVSSEPYEPISPPQVPVVHEKQDSLLLLSQRGAEPAEQRNDARSPGSISYLPSFFTKLENTSPMVKSKKQEIFRKLNSSGGGDSDMAAAQPGTEIFNLPAVTTSGSVSSRGHSFADPASNLGLEDIIRKALMGSFDDKVEDHGVVMSQPMGVVPGTANTSVVTSGETRREEGDPSPHSGVCKPKLISKSNSRKSKSPIPGQGYLGTERPSSVSSVHSEGDYHRQTPGWAWEDRPSSTGSTQFPYNPLTMRMLSSTPPTPIACAPSAVNQAAPHQQNRIWEREPAPLLSAQYETLSDSDD

SEQ ID NO: 11329 - protein, 1165 aa, Homo sapiens
MLSLAAKLVAFFWRTADTPREEAGQLEPELAEGDTKLKTVRGVVTRYCSDYGMIDDMIYFSSDAVTSRVLLNVGQEVIAVVEENKVSNGLKAIRVEAVSDKWEDDSRNHGSPSDCGPRVLIGCVTSLVEGAGCISQTTYFSLESVCEGFEPCKGDWVEAEYRIRPGTWSSEATSVKPLRYKRVDKVCISSLCGRNGVLEESIFFTLDSLKLPDGYTPRRGDVVNAVVVESSQSCYVWRALCMTLVKRRDAAPVHEATHFYGTILLKNKGDIEVTQVTHFGTLKEGRSKTMVIWIENKGDIPQNLVSCKLAGWDKSKQFRFQMLDKDQMCPVVSFVSVPEKENSSDENINSLNSHTKNKTSQMSESSLVNNRGISPGDCTCKGENGEKDNILSRKQMTEPEPGGLVPPGGKTFIVVICDGKNPGRCKELLLLCFSDFLIGRYLEVNVISGEESLIAAREPFSWKKLKSSQALTSAKTTVVVTAQKRNSRRQLPSFLPQYPIPDRLRKCVEQKIDILTFQPLLAELLNMSNYKEKFSTLLWLEEIYAEMELKEYNMSGIILRRNGDLLVLEVPGLAEGRPSLYAGDKLILKTQEYNGHAIEYISYVTEIHEEDVTLKINPEFEQAYNFEPMDVEFTYNRTTSRRCHFALEHVIHLGVKVLFPEEIILQSPQVTGNWNHAQDTKSSGQSTSKKNRKTMTDQAEHGTEERRVGDKDLPVLAPFTAEMSDWVDEIQTPKARKMEFFNPVLNENQKLAVKRILSGDCRPLPYILFGPPGTGKTVTIIEAVLQVHFALPDSRILVCAPSNSAADLVCLRLHESKVLQPATMVRVNATCRFEEIVIDAVKPYCRDGEDIWKASRFRIIITTCSSSGLFYQIGVRVGHFTHVFVDEAGQASEPECLIPLGLMSDISGQIVLAGDPMQLGPVIKSRLAMAYGLNVSFLERLMSRPAYQRDENAFGACGAHNPLLVTKLVKNYRSHEALLMLPSRLFYHRELEVCADPTVVTSLLGWEKLPKKGFPLIFHGVRGSEAREGKSPSWFNPAEAVQVLRYCCLLAHSISSQVSASDIGVITPYRKQVEKIRILLRNVDLMDIKVGSVEEFQGQEYLVIIISTDPCFGALLEYSITNGVYMGCDLPPALQSLQNCGEGVADPSYPVVPESTGPEKHQEPS

SEQ ID NO: 11330 - protein, 382 aa, Homo sapiens
MTEFWLISAPGEKTCQQTWEKLHAATSKNNNLAVTSKFNIPDLKVGTLDVLVGLSDELAKLDAFVEGVVKKVAQYMADVLEDSKDKVQENLLANGVDLVTYITRFQWDMAKYPIKQSLKNISEIIAKGVTQIDNDLKSRASAYNNLKGNLQNLERKNAGSLLTRSLAEIVKKDDFVLDSEYLVTLLVVVPKLNHNDWIKQYETLAEMVVPRSSNVLSEDQDSYLCNVTLFRKAVDDFRHKARENKFIVRDFQYNEEEMKADKEEMNRLSTDKKKQFGPLVRWLKVNFSEAFIAWIHVKALRVFVESVLRYGLPVNFQAMLLQPNKKTLKKLREVLHELYKHLDSSAAAIIDAPMDIPGLNLSQQEYYPYVYYKIDCNLLEFK

SEQ ID NO: 11331 - protein, 431 aa, Homo sapiens
MHVRSLRAAAPHSFVALWAPLFLLRSALADFSLDNEVHSSFIHRRLRSQERREMQREILSILGLPHRPRPHLQGKHNSAPMFMLDLYNAMAVEEGGGPGGQGFSYPYKAVFSTQGPPLASLQDSHFLTDADMVMSFVNLVEHDKEFFHPRYHHREFRFDLSKIPEGEAVTAAEFRIYKDYIRERFDNETFRISVYQVLQEHLGRESDLFLLDSRTLWASEEGWLVFDITATSNHWVVNPRHNLGLQLSVETLDGQSINPKLAGLIGRHGPQNKQPFMVAFFKATEVHFRSIRSTGSKQRSQNRSKTPKNQEALRMANVAENSSSDQRQACKKHELYVSFRDLGWQDWIIAPEGYAAYYCEGECAFPLNSYMNATNHAIVQTLVHFINPETVPKPCCAPTQLNAISVLYFDDSSNVILKKYRNMVVRACGCH

SEQ ID NO: 11332 - protein, 365 aa, Homo sapiens
MHVRSLRAAAPHSFVALWAPLFLLRSALADFSLDNEVHSSFIHRRLRSQERREMQREILSILGLPHRPRPHLQGKHNSAPMFMLDLYNAMAVEEGGGPGGQGFSYPYKAVFSTQGPPLASLQDSHFLTDADMVMSFVNLVEHDKEFFHPRYHHREFRFDLSKIPEGEAVTAAEFRIYKDYIRERFDNETFRISVYQVLQEHLGRESDLFLLDSRTLWASEEGWLVFDITATSNHWVVNPRHNLGLQLSVETLDENSSSDQRQACKKHELYVSFRDLGWQDWIIAPEGYAAYYCEGECAFPLNSYMNATNHAIVQTLVHFINPETVPKPCCAPTQLNAISVLYFDDSSNVILKKYRNMVVRACGCH

SEQ ID NO: 11333 - protein, 661 aa, Homo sapiens
MEGARARGAQLRLGERVRPVGRRSAPGRSRFRQPWRPGASDSAPPAGTMAQSRVLLLLLLLPPQLHLGPVLAVRAPGFGRSGGHSLSPEENEFAEEEPVLVLSPEEPGPGPAAVSCPRDCACSQEGVVDCGGIDLREFPGDLPEHTNHLSLQNNQLEKIYPEELSRLHRLETLNLQNNRLTSRGLPEKAFEHLTNLNYLYLANNKLTLAPRFLPNALISVDFAANYLTKIYGLTFGQKPNLRSVYLHNNKLADAGLPDNMFNGSSNVEVLILSSNFLRHVPKHLPPALYKLHLKNNKLEKIPPGAFSELSSLRELYLQNNYLTDEGLDNETFWKLSSLEYLDLSSNNLSRVPAGLPRSLVLLHLEKNAIRSVDANVLTPIRSLEYLLLHSNQLREQGIHPLAFQGLKRLHTVHLYNNALERVPSGLPRRVRTLMILHNQITGIGREDFATTYFLEELNLSYNRITSPQVHRDAFRKLRLLRSLDLSGNRLHTLPPGLPRNVHVLKVKRNELAALARGALVGMAQLRELYLTSNRLRSRALGPRAWVDLAHLQLLDIAGNQLTEIPEGLPESLEYLYLQNNKISAVPANAFDSTPNLKGIFLRFNKLAVGSVVDSAFRRLKHLQVLDIEGNLEFGDISKDRGRLGKEKEEEEEEEEEEEETR

SEQ ID NO: 11334 - protein, 177 aa, Homo sapiens
MQRRLVQQWSVAVFLLSYAVPSCGRSVEGLSRRLKRAVSEHQLLHDKGKSIQDLRRRFFLHHLIAEIHTAEIRATSEVSPNSKPSPNTKNHPVRFGSDDEGRYLTQETNKVETYKEQPLKTPGKKKKGKPGKRKEQEKKKRRTRSAWLDSGVTGSGLEGDHLSDTSTTSLELDSRRH

SEQ ID NO: 11335 - protein, 599 aa, Homo sapiens
MAAEEEAAAGGEVAGGEATAPGKVLREENQCIAPVVSSRVSPGTRPTAMGSFSSHMTEFPRKRKGSDSDPSQEAHSQTEKRRRDKMNNLIEELSAMIPQCNPMARKLDKLTVLRMAVQHLRSLKGLTNSYVGSNYRPSFLQDNELRHLILKTAEGFLFVVGCERGKILFVSKSVSKILNYDQASLTGQSLFDFLHPKDVAKVKEQLSSFDISPREKLIDAKTGLQVHSNLHAGRTRVYSGSRRSFFCRIKSCKISVKEEHGCLPNSKKKEHRKFYTIHCTGYLRSWPPNIVGMEEERNSKKDNSNFTCLVAIGRLQPYIVPQNSGEINVKPTEFITRFAVNGKFVYVDQRATAILGYLPQELLGTSCYEYFHQDDHNNLTDKHKAVLQSKEKILTDSYKFRAKDGSFVTLKSQWFSFTNPWTKELEYIVSVNTLVLGHSEPGEASFLPCSSQSSEESSRQSCMSVPGMSTGTVLGAGSIGTDIANEILDLQRLQSSSYLDDSSPTGLMKDTHTVNCRSMSNKELFPPSPSEMGELEATRQNQSTVAVHSHEPLLSDGAQLDFDALCDNDDTAMAAFMNYLEAEGGLGDPGDFSDIQWTL

SEQ ID NO: 11336 - protein, 299 aa, Homo sapiens
MGDPERPEAAGLDQDEVDLSKDLPHWNKLKADEKYFISHILAFFAASDGIVNENLVERFSQEVQVPEARCFYGFQILIENVHSEMYSLLIDTYIRDPKKREFLFNAIETMPYVKKKADWALRWIADRKSTFGERVVAFAAVEGVFFSGSFAAIFWLKKRGLMPGLTFSNELISRDEGLHCDFACLMFQYLVNKPSEERVREIIVDAVKIEQEFLTEALPVGLIGMNCILMKQYIEFVADRLLVELGFSKVFQAENPFDFMENISLEGKTNFFEKRVSEYQRFAVMAETTDNVFTLDADF

SEQ ID NO: 11337 - protein, 1580 aa, Homo sapiens
MEAQSHSSTTTEKKKVENSIVKCSTRTDVSEKAVASSTTSNEDESPGQTYHRERRNAITMQPQNVQGLSKVSEEPSTSSDERASLIKKEIHGSLPHVAEPSVPYRGTVFAMDPRNGYMEPHYHPPHLFPAFHPPVPIDARHHEGRYHYDPSPIPPLHMTSALSSSPTYPDLPFIRISPHRNPTAASESPFSPPHPYINPYMDYIRSLHSSPSLSMISATRGLSPTDAPHAGVSPAEYYHQMALLTGQRSPYADIIPSAATAGTGAIHMEYLHAMDSTRFSSPRLSARPSRKRTLSISPLSDHSFDLQTMIRTSPNSLVTILNNSRSSSSASGSYGHLSASAISPALSFTYSSAPVSLHMHQQILSRQQSLGSAFGHSPPLIHPAPTFPTQRPIPGIPTVLNPVQVSSGPSESSQNKPTSESAVSSTGDPMHNKRSKIKPDEDLPSPGARGQQEQPEGTTLVKEEGDKDESKQEPEVIYETNCHWEGCAREFDTQEQLVHHINNDHIHGEKKEFVCRWLDCSREQKPFKAQYMLVVHMRRHTGEKPHKCTFEGCTKAYSRLENLKTHLRSHTGEKPYVCEHEGCNKAFSNASDRAKHQNRTHSNEKPYVCKIPGCTKRYTDPSSLRKHVKTVHGPEAHVTKKQRGDIHPRPPPPRDSGSHSQSRSPGRPTQGALGEQQDLSNTTSKREECLQVKTVKAEKPMTSQPSPGGQSSCSSQQSPISNYSNSGLELPLTDGGSIGDLSAIDETPIMDSTISTATTALALQARRNPAGTKWMEHVKLERLKQVNGMFPRLNPILPPKAPAVSPLIGNGTQSNNTCSLGGPMTLLPGRSDLSGVDVTMLNMLNRRDSSASTISSAYLSSRRSSGISPCFSSRRSSEASQAEGRPQNVSVADSYDPISTDASRRSSEASQSDGLPSLLSLTPAQQYRLKAKYAAATGGPPPTPLPNMERMSLKTRLALLGDALEPGVALPPVHAPRRCSDGGAHGYGRRHLQPHDAPGHGVRRASDPVRTGSEGLALPRVPRFSSLSSCNPPAMATSAEKRSLVLQNYTRPEGGQSRNFHSSPCPPSITENVTLESLTMDADANLNDEDFLPDDVVQYLNSQNQAGYEQHFPSALPDDSKVPHGPGDFDAPGLPDSHAGQQFHALEQPCPEGSKTDLPIQWNEVSSGSADLSSSKLKCGPRPAVPQTRAFGFCNGMVVHPQNPLRSGPAGGYQTLGENSNPYGGPEHLMLHNSPGSGTSGNAFHEQPCKAPQYGNCLNRQPVAPGALDGACGAGIQASKLKSTPMQGSGGQLNFGLPVAPNESAGSMVNGMQNQDPVGQGYLAHQLLGDSMQHPGAGRPGQQMLGQISATSHINIYQGPESCLPGAHGMGSQPSSLAVVRGYQPCASFGGSRRQAMPRDSLALQSGQLSDTSQTCRVNGIKMEMKGQPHPLCSNLQNYSGQFYDQTVGFSQQDTKAGSFSISDASCLLQGTSAKNSELLSPGANQVTSTVDSLDSHDLEGVQIDFDAIIDDGDHSSLMSGALSPSIIQNLSHSSSRLTTPRASLPFPALSMSTTNMAIGDMSSLLTSLAEESKFLAVMQ

SEQ ID NO: 11338 - protein, 118 aa, Homo sapiens
MLLLLLSIIVLHVAVLVLLFVSTIVSQWIVGNGHATDLWQNCSTSSSGNVHHCFSSSPNEWLQSVQATMILSIIFSILSLFLFFCQLFTLTKGGRFYITGIFQILAESNSSQMCGYRD

SEQ ID NO: 11339 - protein, 558 aa, Homo sapiens
MAKLLSCVLGPRLYKIYRERDSERAPASVPETPTAVTAPHSSSWDTYYQPRALEKHADSILALASVFWSISYYSSPFAFFYLYRKGYLSLSKVVPFSHYAGTLLLLLAGVACLRGIGRWTNPQYRQFITILEATHRNQSSENKRQLANYNFDFRSWPVDFHWEEPSSRKESRGGPSRRGVALLRPEPLHRGTADTLLNRVKKLPCQITSYLVAHTLGRRMLYPGSVYLLQKALMPVLLQGQARLVEECNGRRAKLLACDGNEIDTMFVDRRGTAEPQGQKLVICCEGNAGFYEVGCVSTPLEAGYSVLGWNHPGFAGSTGVPFPQNEANAMDVVVQFAIHRLGFQPQDIIIYAWSIGGFTATWAAMSYPDVSAMILDASFDDLVPLALKVMPDSWRGLVTRTVRQHLNLNNAEQLCRYQGPVLLIRRTKDEIITTTVPEDIMSNRGNDLLLKLLQHRYPRVMAEEGLRVVRQWLEASSQLEEASIYSRWEVEEDWCLSVLRSYQAEHGPDFPWSVGEDMSADGRRQLALFLARKHLHNFEATHCTPLPAQNFQMPWHL

SEQ ID NO: 11340 - protein, 416 aa, Homo sapiens
MSISLSSLILLPIWINMAQIQQGGPDEKEKTTALKDLLSRIDLDELMKKDEPPLDFPDTLEGFEYAFNEKGQLRHIKTGEPFVFNYREDLHRWNQKRYEALGEIITKYVYELLEKDCNLKKVSIPVDATESEPKSFIFMSEDALTNPQKLMVLIHGSGVVRAGQWARRLIINEDLDSGTQIPFIKRAVAEGYGVIVLNPNENYIEVEKPKIHVQSSSDSSDEPAEKRERKDKVSKETKKRRDFYEKYRNPQREKEMMQLYIRENGSPEEHAIYVWDHFIAQAAAENVFFVAHSYGGLAFVELMIQREADVKNKVTAVALTDSVHNVWHQEAGKTIREWMRENCCNWVSSSEPLDTSVESMLPDCPRVSAGTDRHELTSWKSFPSIFKFFTEASEAKTSSLKPAVTRRSHRIKHEEL

SEQ ID NO: 11341 - protein, 906 aa, Homo sapiens
MERGLPLLCAVLALVLAPAGAFRNDKCGDTIKIESPGYLTSPGYPHSYHPSEKCEWLIQAPDPYQRIMINFNPHFDLEDRDCKYDYVEVFDGENENGHFRGKFCGKIAPPPVVSSGPFLFIKFVSDYETHGAGFSIRYEIFKRGPECSQNYTTPSGVIKSPGFPEKYPNSLECTYIVFVPKMSEIILEFESFDLEPDSNPPGGMFCRYDRLEIWDGFPDVGPHIGRYCGQKTPGRIRSSSGILSMVFYTDSAIAKEGFSANYSVLQSSVSEDFKCMEALGMESGEIHSDQITASSQYSTNWSAERSRLNYPENGWTPGEDSYREWIQVDLGLLRFVTAVGTQGAISKETKKKYYVKTYKIDVSSNGEDWITIKEGNKPVLFQGNTNPTDVVVAVFPKPLITRFVRIKPATWETGISMRFEVYGCKITDYPCSGMLGMVSGLISDSQITSSNQGDRNWMPENIRLVTSRSGWALPPAPHSYINEWLQIDLGEEKIVRGIIIQGGKHRENKVFMRKFKIGYSNNGSDWKMIMDDSKRKAKSFEGNNNYDTPELRTFPALSTRFIRIYPERATHGGLGLRMELLGCEVEAPTAGPTTPNGNLVDECDDDQANCHSGTGDDFQLTGGTTVLATEKPTVIDSTIQSEFPTYGFNCEFGWGSHKTFCHWEHDNHVQLKWSVLTSKTGPIQDHTGDGNFIYSQADENQKGKVARLVSPVVYSQNSAHCMTFWYHMSGSHVGTLRVKLRYQKPEEYDQLVWMAIGHQGDHWKEGRVLLHKSLKLYQVIFEGEIGKGNLGGIAVDDISINNHISQEDCARSTPGYEGEGEGDKNISRKPGNVLKTLDPILITIIAMSALGVLLGAVCGVVLYCACWHNGMSERNLSALENYNFELVDGVKLKKDKLNTQSTYSEA

SEQ ID NO: 11342 - protein, 317 aa, Homo sapiens
MRLLAGWLCLSLASVWLARRMWTLRSPLTRSLYVNMTSGPGGPAAAAGGRKENHQWYVCNREKLCESLQAVFVQSYLDQGTQIFLNNSIEKSGWLFIQLYHSFVSSVFSLFMSRTSINGLLGRGSMFVFSPDQFQRLLKINPDWKTHRLLDLGAGDGEVTKIMSPHFEEIYATELSETMIWQLQKKKYRVLGINEWQNTGFQYDVISCLNLLDRCDQPLTLLKDIRSVLEPTRGRVILALVLPFHPYVENGGKWEKPSEILEIKGQNWEEQVNSLPEVFRKAGFVIEAFTRLPYLCEGDMYNDYYVLDDAVFVLKPV

SEQ ID NO: 11343 - protein, 67 aa, Homo sapiens
MGHQQLYWSHPRKFGQGSRSCRVCSNRHGLIRKYGLNMCRQCFRQYAKDIGFIKKDLSCLPWHCLWR

SEQ ID NO: 11344 - protein, 339 aa, Homo sapiens
MSTVHEILCKLSLEGDHSTPPSAYGSVKAYTNFDAERDALNIETAIKTKGVDEVTIVNILTNRSNAQRQDIAFAYQRRTKKELASALKSALSGHLETVILGLLKTPAQYDASELKASMKGLGTDEDSLIEIICSRTNQELQEINRVYKEMYKTDLEKDIISDTSGDFRKLMVALAKGRRAEDGSVIDYELIDQDARDLYDAGVKRKGTDVPKWISIMTERSVPHLQKVFDRYKSYSPYDMLESIRKEVKGDLENAFLNLVQCIQNKPLYFADRLYDSMKGKGTRDKVLIRIMVSRSEVDMLKIRSEFKRKYGKSLYYYIQQDTKGDYQKALLYLCGGDD

SEQ ID NO: 11345 - protein, 216 aa, Homo sapiens
MSFLFSSRSSKTFKPKKNIPEGSHQYELLKHAEATLGSGNLRQAVMLPEGEDLNEWIAVNTVDFFNQINMLYGTITEFCTEASCPVMSAGPRYEYHWADGTNIKKPIKCSAPKYIDYLMTWVQDQLDDETLFPSKIGVPFPKNFMSVAKTILKRLFRVYAHIYHQHFDSVMQLQEEAHLNTSFKHFIFFVQEFNLIDRRELAPLQELIEKLGSKDR

SEQ ID NO: 11346 - protein, 221 aa, Homo sapiens
MEGATDVNESGSRSSKTFKPKKNIPEGSHQYELLKHAEATLGSGNLRMAVMLPEGEDLNEWVAVNTVDFFNQINMLYGTITDFCTEESCPVMSAGPKYEYHWADGTNIKKPIKCSAPKYIDYLMTWVQDQLDDETLFPSKIGVPFPKNFMSVAKTILKRLFRVYAHIYHQHFDPVIQLQEEAHLNTSFKHFIFFVQEFNLIDRRELAPLQELIEKLTSKDR

SEQ ID NO: 11347 - protein, 527 aa, Homo sapiens
MTAELREAMALAPWGPVKVKKEEEEEENFPGQASSQQVHSENIKVWAPVQGLQTGLDGSEEEEKGQNISWDMAVVLKATQEAPAASTLGSYSLPGTLAKSEILETHGTMNFLGAETKNLQLLVPKTEICEEAEKPLIISERIQKADPQGPELGEACEKGNMLKRQRIKREKKDFRQVIVNDCHLPESFKEEENQKCKKSGGKYSLNSGAVKNPKTQLGQKPFTCSVCGKGFSQSANLVVHQRIHTGEKPFECHECGKAFIQSANLVVHQRIHTGQKPYVCSKCGKAFTQSSNLTVHQKIHSLEKTFKCNECEKAFSYSSQLARHQKVHITEKCYECNECGKTFTRSSNLIVHQRIHTGEKPFACNDCGKAFTQSANLIVHQRSHTGEKPYECKECGKAFSCFSHLIVHQRIHTAEKPYDCSECGKAFSQLSCLIVHQRIHSGDLPYVCNECGKAFTCSSYLLIHQRIHNGEKPYTCNECGKAFRQRSSLTVHQRTHTGEKPYECEKCGAAFISNSHLMRHHRTHLVE

SEQ ID NO: 11348 - protein, 109 aa, Homo sapiens
MAYQLYRNTTLGNSLQESLDELIQSQQITPQLALQVLLQFDKAINAALAQRVRNRVNFRGSLNTYRFCDNVWTFVLNDVEFREVTELIKVDKVKIVACDGKNTGSNTTE

SEQ ID NO: 11349 - protein, 1087 aa, Homo sapiens
MDPFTEKLLERTRARRENLQRKMAERPTAAPRSMTHAKRARQPLSEASNQQPLSGGEEKSCTKPSPSKKRCSDNTEVEVSNLENKQPVESTSAKSCSPSPVSPQVQPQAADTISDSVAVPASLLGMRRGLNSRLEATAASSVKTRMQKLAEQRRRWDNDDMTDDIPESSLFSPMPSEEKAASPPRPLLSNASATPVGRRGRLANLAATICSWEDDVNHSFAKQNSVQEQPGTACLSKFSSASGASARINSSSVKQEATFCSQRDGDASLNKALSSSADDASLVNASISSSVKATSPVKSTTSITDAKSCEGQNPELLPKTPISPLKTGVSKPIVKSTLSQTVPSKGELSREICLQSQSKDKSTTPGGTGIKPFLERFGERCQEHSKESPARSTPHRTPIITPNTKAIQERLFKQDTSSSTTHLAQQLKQERQKELACLRGRFDKGNIWSAEKGGNSKSKQLETKQETHCQSTPLKKHQGVSKTQSLPVTEKVTENQIPAKNSSTEPKEVIREIEMSVDDDDINSSKVINDLFSDVLEEGELDMEKSQEEMDQALAESSEEQEDALNISSMSLLAPLAQTVGVVSPESLVSTPRLELKDTSRSDESPKPGKFQRTRVPRAESGDSLGSEDRDLLYSIDAYRSQRFKETERPSIKQVIVRKEDVTSKLDEKNNAFPCQVNIKQKMQELNNEINMQQTVIYQASQALNCCVDEEHGKGSLEEAEAERLLLIATGKRTLLIDELNKLKNEGPQRKNKASPQSEFMPSKGSVTLSEIRLPLKADFVCSTVQKPDAANYYYLIILKAGAENMVATPLASTSNSLNGDALTFTTTFTLQDVSNDFEINIEVYSLVQKKDPSGLDKKKKTSKSKAITPKRLLTSITTKSNIHSSVMASPGGLSAVRTSNFALVGSYTLSLSSVGNTKFVLDKVPFLSSLEGHIYLKIKCQVNSSVEERGFLTIFEDVSGFGAWHRRWCVLSGNCISYWTYPDDEKRKNPIGRINLANCTSRQIEPANREFCARRNTFELITVRPQREDDRETLVSQCRDTLCVTKNWLSADTKEERDLWMQKLNQVLVDIRLWQPDACYKPIGKP

SEQ ID NO: 11350 - protein, 1031 aa, Homo sapiens
MPPGRWHAAYPAQAQSSRERGRLQTVKKEEEDESYTPVQAARPQTLNRPGQELFRQLFRQLRYHESSGPLETLSRLRELCRWWLRPDVLSKAQILELLVLEQFLSILPGELRVWVQLHNPESGEEAVALLEELQRDLDGTSWRDPGPAQSPDVHWMGTGALRSAQIWSLASPLRSSSALGDHLEPPYEIEARDFLAGQSDTPAAQMPALFPREGCPGDQVTPTRSLTAQLQETMTFKDVEVTFSQDEWGWLDSAQRNLYRDVMLENYRNMASLVGPFTKPALISWLEAREPWGLNMQAAQPKGNPVAAPTGDDLQSKTNKFILNQEPLEEAETLAVSSGCPATSVSEGIGLRESFQQKSRQKDQCENPIQVRVKKEETNFSHRTGKDSEVSGSNSLDLKHVTYLRVSGRKESLKHGCGKHFRMSSHHYDYKKYGKGLRHMIGGFSLHQRIHSGLKGNKKDVCGKDFSLSSHHQRGQSLHTVGVSFKCSDCGRTFSHSSHLAYHQRLHTQEKAFKCRVCGKAFRWSSNCARHEKIHTGVKPYKCDLCEKAFRRLSAYRLHRETHAKKKFLELNQYRAALTYSSGFDHHLGDQSGEKLFDCSQCRKSFHCKSYVLEHQRIHTQEKPYKCTKCRKTFRWRSNFTRHMRLHEEEKFYKQDECREGFRQSPDCSQPQGAPAVEKTFLCQQCGKTFTRKKTLVDHQRIHTGEKPYQCSDCGKDFAYRSAFIVHKKKHAMKRKPEGGPSFSQDTVFQVPQSSHSKEEPYKCSQCGKAFRNHSFLLIHQRVHTGEKPYKCRECGKAFRWSSNLYRHQRIHSLQKQYDCHESEKTPNVEPKILTGEKRFWCQECGKTFTRKRTLLDHKGIHSGEKRYKCNLCGKSYDRNYRLVNHQRIHSTERPFKCQWCGKEFIGRHTLSSHQRKHTRAAQAERSPPARSSSQDTKLRLQKLKPSEEMPLEDCKEACSQSSRLTGLQDISIGKKCHKCSICGKTFNKSSQLISHKRFHTRERPFKCSKCGKTFRWSSNLARHMKNHIRD

SEQ ID NO: 11351 - protein, 166 aa, Homo sapiens
MPPLWALLALGCLRFGSAVNLQPQLASVTFATNNPTLTTVALEKPLCMFDSKEALTGTHEVYLYVLVDSVTPYSTIDTWPGRRSGGMIVITSILGSLPFFLLVGFAGAIALSLVDMGSSDGETTHDSQITQEAVPKSLGASESSYTSVNRGPPLDRAEVYSSKLQD

SEQ ID NO: 11352 - protein, 594 aa, Homo sapiens
MKVTLSALDTSESSFTPLVVIELAQDVKEETKEWLKNRIIAKKKDGDNNDDFLTMAECQFIIKHELENLRAKDEKMIPGYPQAKLYPGKSLLRRLLTSGIVIQVFPLHDSEALKKLEDTWYTRFALKYQPIDSIRGYFGETIALYFGFLEYFTFALIPMAVIGLPYYLFVWEDYDKYVIFASFNLIWSTVILELWKRGCANMTYRWGTLLMKRKFEEPRPGFHGVLGINSITGKEEPLYPSYKRQLRIYLVSLPFVCLCLYFSLYVMMIYFDMEVWALGLHENSGSEWTSVLLYVPSIIYAIVIEIMNRLYRYAAEFLTSWENHRLESAYQNHLILKVLVFNFLNCFASLFYIAFVLKDMKLLRQSLATLLITSQILNQIMESFLPYWLQRKHGVRVKRKVQALKADIDATLYEQVILEKEMGTYLGTFDDYLELFLQFGYVSLFSCVYPLAAAFAVLNNFTEVNSDALKMCRVFKRPFSEPSANIGVWQLAFETMSVISVVTNCALIGMSPQVNAVFPESKADLILIVVAVEHALLALKFILAFAIPDKPRHIQMKLARLEFESLEALKQQQMKLVTENLKEEPMESGKEKAT

SEQ ID NO: 11353 - protein, 279 aa, Homo sapiens
MKIIILLGFLGATLSAPLIPQRLMSASNSNELLLNLNNGQLLPLQLQGPLNSWIPPFSGILQQQQQAQIPGLSQFSLSALDQFAGLLPNQIPLTGEASFAQGAQAGQVDPLQLQTPPQTQPGPSHVMPYVFSFKMPQEQGQMFQYYPVYMVLPWEQPQQTVPRSPQQTRQQQYEEQIPFYAQFGYIPQLAEPAISGGQQQLAFDPQLGTAPEIAVMSTGEEIPYLQKEAINFRHDSAGVFMPSTSPKPSTTNVFTSAVDQTITPELPEEKDKTDSLREP

SEQ ID NO: 11354 - protein, 440 aa, Homo sapiens
MASEEVLKNRAIKKAKRRNVGFESDTGGAFKGFKGLVVPSGGGRFSGFGSGAGGKPLEGLSNGNNITSAPPFASAKAAADPKVAFGSLAANGPTTLVDKVSNPKTNGDSQQPSSSGLASSKACVGNAYHKQLAALNCSVRDWIVKHVNTNPLCDLTPIFKDYEKYLANIEQQHGNSGRNSESESNKVAAETQSPSLFGSTKLQQESTFLFHGNKTEDTPDKKMEVASEKKTDPSSLGATSASFNFGKKVDSSVLGSLSSVPLTGFSFSPGNSSLFGKDTTQSKPVSSPFPTKPLEGQAEGDSGECKGGDEEENDEPPKVVVTEVKEEDAFYSKKCKLFYKKDNEFKEKGIGTLHLKPTANQKTQLLVRADTNLGNILLNVLIPPNMPCTRTGKNNVLIVCVPNPPIDEKNATMPVTMLIRVKTSEDADELHKILLEKKDA

SEQ ID NO: 11355 - protein, 571 aa, Homo sapiens
MDHTSPTYMLANLTHLHSEQLLQGLNLLRQHHELCDIILRVGDVKIHAHKVVLASVSPYFKAMFTGNLSEKENSEVEFQCIDETALQAIVEYAYTGTVFISQDTVESLLPAANLLQIKLVLKECCAFLESQLDPGNCIGISRFAETYGCRDLYLAATKYICQNFEAVCQTEEFFELTHADLDEIVSNDCLNVATEETVFYALESWIKYDVQERQKYLAQLLNSVRLPLLSVKFLTRLYEANHLIRDDRTCKHLLNEALKYHFMPEHRLSHQTVLMTRPRCAPKVLCAVGGKSGLFACLDSVEMYFPQNDSWIGLAPLNIPRYEFGICVLDQKVYVIGGIATNVRPGVTIRKHENSVECWNPDTNTWTSLERMNESRSTLGVVVLAGELYALGGYDGQSYLQSVEKYIPKIRKWQPVAPMTTTRSCFAAAVLDGMIYAIGGYGPAHMNSVERYDPSKDSWEMVASMADKRIHFGVGVMLGFIFVVGGHNGVSHLSSIERYDPHQNQWTVCRPMKEPRTGVGAAVIDNYLYVVGGHSGSSYLNTVQKYDPISDTWLDSAGMIYCRCNFGLTAL

SEQ ID NO: 11356 - protein, 673 aa, Homo sapiens
MGQPSLTWMLMVVVASWFITTAATDTSEARTKYNCPARWSWRTPQRGGDTEQGPDEDFTSQGRWCSECHSNATCTEDEAVTTCTCQEGFTGDGLTCVDLDECAIPGAHNCSANSSCVNTPGSFSCVCPEGFRLSPGLGCTDVDECAEPGLSHCHALATCVNVVGSYLCVCPAGYRGDGWHCECSPGSCGPGLDCVPEGDALVCADPCQAHRTLDEYWRSTEYGEGYACDTDLRGWYRFVGQGGARMAETCVPVLRCNTAAPMWLNGTHPSSDEGIVSRKACAHWSGHCCLWDASVQVKACAGGYYVYNLTAPPECHLAYCTDPSSVEGTCEECSIDEDCKSNNGRWHCQCKQDFNITDISLLEHRLECGANDMKVSLGKCQLKSLGFDKVFMYLSDSRCSGFNDRDNRDWVSVVTPARDGPCGTVLTRNETHATYSNTLYLADEIIIRDLNIKINFACSYPLDMKVSLKTALQPMVSALNIRVGGTGMFTVRMALFQTPSYTQPYQGSSVTLSTEAFLYVGTMLDGGDLSRFALLMTNCYATPSSNATDPLKYFIIQDRCPHTRDSTIQVVENGESSQGRFSVQMFRFAGNYDLVYLHCEVYLCDTMNEKCKPTCSGTRFRSGSVIDQSRVLNLGPITRKGVQATVSRAFSSLGLLKVWLPLLLSATLTLTFQ

SEQ ID NO: 11357 - protein, 988 aa, Homo sapiens
MSFALEETLESDWVAVRPHVFDEREKHKFVFIVAWNEIEGKFAITCHNRTAQRQRSGSREQAGARGGAEAGGAASDGSRGPGSPAGRGRPEATASATLVRSPGPRRSSAWAEGGSPRSTRSLLGDPRLRSPGSKGAESRLRSPVRAKPIPGQKTSEADDAAGAAAAAARPAPREAQVSSVRIVSASGTVSEEIEVLEMVKEDEAPLALSDAEQPPPATELESPAEECSWAGLFSFQDLRAVHQQLCSVNSQLEPCLPVFPEEPSGMWTVLFGGAPEMTEQEIDTLCYQLQVYLGHGLDTCGWKILSQVLFTETDDPEEYYESLSELRQKGYEEVLQRARKRIQELLDKHKNTESMVELLDLYQMEDEAYSSLAEATTELYQYLLQPFRDMRELAMLRRQQIKISMENDYLGPRRIESLQKEDADWQRKAHMAVLSIQDLTVKYFEITAKAQKAVYDRMRADQKKFGKASWAAAAERMEKLQYAVSKETLQMMRAKEICLEQRKHALKEEMQSLRGGTEAIARLDQLEADYYDLQLQLYEVQFEILKCEELLLTAQLESIKRLISEKRDEVVYYDTYESMEAMLEKEEMAASAYLQREELQKLQQKARQLEARRGRVSAKKSYLRNKKEICIAKHNEKIQQRTRIEDEYRTHHTVQLKREKLHDEEERKSAWVSQERQRTLDRLRTFKQRYPGQVILKSTRLRLAHARRKGAASPVLQEDHCDSLPSVLQVEEKTEEVGEGRVKRGPSQTTEPQSLVQLEDTSLTQLEATSLPLSGVTSELPPTISLPLLNNNLEPCSVTINPLPSPLPPTPPPPPPPPPPPPPPPLPVAKDSGPETLEKDLPRKEGNEKRIPKSASAPSAHLFDSSQLVSARKKLRKTAEGLQRRRVSSPMDEVLASLKRGSFHLKKVEQRTLPPFPDEDDSNNILAQIRKGVKLKKVQKDVLRESFTLLPDTDPLTRSIHEALRRIKEASPESEDEEEALPCTDWEN

SEQ ID NO: 11358 - protein, 413 aa, Homo sapiens
MGPRGAASLPRGPGPRRLLLPVVLPLLLLLLLAPPGSGAGASRPPHLVFLLADDLGWNDVGFHGSRIRTPHLDALAAGGVLLDNYYTQPLCTPSRSQLLTGRYQIRTGLQHQIIWPCQPSCVPLDEKLLPQLLKEAGYTTHMVGKWHLGMYRKECLPTRRGFDTYFGYLLGSEDYYSHERCTLIDALNVTRCALDFRDGEEVATGYKNMYSTNIFTKRAIALITNHPPEKPLFLYLALQSVHEPLQVPEEYLKPYDFIQDKNRHHYAGMVSLMDEAVGNVTAALKSSGLWNNTVFIFSTDNGGQTLAGGNNWPLRGRKWSLWEGGVRGVGFVASPLLKQKGVKNRELIHISDWLPTLVKLARGHTNGTKPLDGFDVWKTISEGSPSPRIELLHNIDPNFVDSSPYWPECSLLL

SEQ ID NO: 11359 - protein, 650 aa, Homo sapiens
MASNMDREMILADFQACTGIENIDEAITLLEQNNWDLVAAINGVIPQENGILQSEYGGETIPGPAFNPASHPASAPTSSSSSAFRPVMPSRQIVERQPRMLDFRVEYRDRNVDVVLEDTCTVGEIKQILENELQIPVSKMLLKGWKTGDVEDSTVLKSLHLPKNNSLYVLTPDLPPPSSSSHAGALQESLNQNFMLIITHREVQREYNLNFSGSSTIQEVKRNVYDLTSIPVRHQLWEGWPTSATDDSMCLAESGLSYPCHRLTVGRRSSPAQTREQSEEQITDVHMVSDSDGDDFEDATEFGVDDGEVFGMASSALRKSPMMPENAENEGDALLQFTAEFSSRYGDCHPVFFIGSLEAAFQEAFYVKARDRKLLAIYLHHDESVLTNVFCSQMLCAESIVSYLSQNFITWAWDLTKDSNRARFLTMCNRHFGSVVAQTIRTQKTDQFPLFLIIMGKRSSNEVLNVIQGNTTVDELMMRLMAAMEIFTAQQQEDIKDEDEREARENVKREQDEAYRLSLEADRAKREAHEREMAEQFRLEQIRKEQEEEREAIRLSLEQALPPEPKEENAEPVSKLRIRTPSGEFLERRFLASNKLQIVFDFVASKGFPWDEYKLLSTFPRRDVTQLDPNKSLLEVKLFPQETLFLEAKE

SEQ ID NO: 11360 - protein, 809 aa, Homo sapiens
MEEPGVTPQPYLGLLLEELRRVVAALPEGMRPDSNLYGFPWELVICAAVVGFFAVLFFLWRSFRSVRSRLYVGREKKLALMLSGLIEEKSKLLEKFSLVQKEYEGYEVESSLKDASFEKEATEAQSLEVENQMATCEKLNRSNSELEDEILCLEKELKEEKSKHSEQDELMADISKRIQSLEDESKSLKSQVAEAKMTFKIFQMNEERLKIAIKDALNENSQLQESQKQLLQEAEVWKEQVSELNKQKVTFEDSKVHAEQVLNDKESHIKTLTERLLKMKDWAAMLGEDITDDDNLELEMNSESENGAYLDNPPKGALKKLIHAAKLNASLKTLEGERNQIYIQLSEVDKTKEELTEHIKNLQTEQASLQSENTHFENENQKLQQKLKVMTELYQENEMKLHRKLTVEENYRLEKEEKLSKVDEKISHATEELETYRKRAKDLEEELERTIHSYQGQIISHEKKAHDNWLAARNAERNLNDLRKENAHNRQKLTETELKFELLEKDPYALDVPNTAFGREHSPYGPSPLGWPSSETRAFLSPPTLLEGPLRLSPLLPGGGGRGSRGPGNPLDHQITNERGESSCDRLTDPHRAPSDTGSLSPPWDQDRRMMFPPPGQSYPDSALPPQRQDRFCSNSGRLSGPAELRSFNMPSLDKMDGSMPSEMESSRNDTKDDLGNLNVPDSSLPAENEATGPGFVPPPLAPIRGPLFPVDARGPFLRRGPPFPPPPPGAMFGASRDYFPPGDFPGPPPAPFAMRNVYPPRGFPPYLPPRPGFFPPPPHSEGRSEFPSGLIPPSNEPATEHPEPQQET

SEQ ID NO: 11361 - protein, 428 aa, Homo sapiens
MAENDVDNELLDYEDDEVETAAGGDGAEAPAKKDVKGSYVSIHSSGFRDFLLKPELLRAIVDCGFEHPSEVQHECIPQAILGMDVLCQAKSGMGKTAVFVLATLQQLEPVTGQVSVLVMCHTRELAFQISKEYERFSKYMPNVKVAVFFGGLSIKKDEEVLKKNCPHIVVGTPGRILALARNKSLNLKHIKHFILDECDKMLEQLDMRRDVQEIFRMTPHEKQVMMFSATLSKEIRPVCRKFMQDPMEIFVDDETKLTLHGLQQYYVKLKDNEKNRKLFDLLDVLEFNQVVIFVKSVQRCIALAQLLVEQNFPAIAIHRGMPQEERLSRYQQFKDFQRRILVATNLFGRGMDIERVNIAFNYDMPEDSDTYLHRVARAGRFGTKGLAITFVSDENDAKILNDVQDRFEVNISELPDEIDISSYIEQTR

SEQ ID NO: 11362 - protein, 634 aa, Homo sapiens
MESPTKEIEEFESNSLKYLQPEQIEKIWLRLRGLRKYKKTSQRLRSLVKQLERGEASVVDLKKNLEYAATVLESVYIDETRRLLDTEDELSDIQSDAVPSEVRDWLASTFTRQMGMMLRRSDEKPRFKSIVHAVQAGIFVERMYRRTSNMVGLSYPPAVIEALKDVDKWSFDVFSLNEASGDHALKFIFYELLTRYDLISRFKIPISALVSFVEALEVGYSKHKNPYHNLMHAADVTQTVHYLLYKTGVANWLTELEIFAIIFSAAIHDYEHTGTTNNFHIQTRSDPAILYNDRSVLENHHLSAAYRLLQDDEEMNILINLSKDDWREFRTLVIEMVMATDMSCHFQQIKAMKTALQQPEAIEKPKALSLMLHTADISHPAKAWDLHHRWTMSLLEEFFRQGDREAELGLPFSPLCDRKSTMVAQSQVGFIDFIVEPTFTVLTDMTEKIVSPLIDETSQTGGTGQRRSSLNSISSSDAKRSGVKTSGSEGSAPINNSVISVDYKSFKATWTEVVHINRERWRAKVPKEEKAKKEAEEKARLAAEEQQKEMEAKSQAEEGASGKAEKKTSGETKNQVNGTRANKSDNPRGKNSKAEKSSGEQQQNGDFKDGKNKTDKKDHSNIGNDSKKTDDSQE

SEQ ID NO: 11363 - protein, 915 aa, Homo sapiens
MELSDANLQTLTEYLKKTLDPDPAIRRPAEKFLESVEGNQNYPLLLLTLLEKSQDNVIKVCASVTFKNYIKRNWRIVEDEPNKICEADRVAIKANIVHLMLSSPEQIQKQLSDAISIIGREDFPQKWPDLLTEMVNRFQSGDFHVINGVLRTAHSLFKRYRHEFKSNELWTEIKLVLDAFALPLTNLFKATIELCSTHANDASALRILFSSLILISKLFYSLNFQDLPEFFEDNMETWMNNFHTLLTLDNKLLQTDLVSNAIQFLASVCERPHYKNLFEDQNTLTSICEKVIVPNMEFRAADEEAFEDNSEEYIRRDLEGSDIDTRRRAACDLVRGLCKFFEGPVTGIFSGYVNSMLQEYAKNPSVNWKHKDAAIYLVTSLASKAQTQKHGITQANELVNLTEFFVNHILPDLKSANVNEFPVLKADGIKYIMIFRNQVPKEHLLVSIPLLINHLQAESIVVHTYAAHALERLFTMRGPNNATLFTAAEIAPFVEILLTNLFKALTLPGSSENEYIMKAIMRSFSLLQEAIIPYIPTLITQLTQKLLAVSKNPSKPHFNHYMFEAICLSIRITCKANPAAVVNFEEALFLVFTEILQNDVQEFIPYVFQVMSLLLETHKNDIPSSYMALFPHLLQPVLWERTGNIPALVRLLQAFLERGSNTIASAAADKIPGLLGVFQKLIASKANDHQGFYLLNSIIEHMPPESVDQYRKQIFILLFQRLQNSKTTKFIKSFLVFINLYCIKYGALALQEIFDGIQPKMFGMVLEKIIIPEIQKVSGNVEKKICAVGITKLLTECPPMMDTEYTKLWTPLLQSLIGLFELPEDDTIPDEEHFIDIEDTPGYQTAFSQLAFAGKKEHDPVGQMVNNPKIHLAQSLHKLSTACPGRVPSMVSTSLNAEALQYLQGYLQAASVTLL

SEQ ID NO: 11364 - protein, 471 aa, Homo sapiens
MEFDCEGLRRLLGKYKFRDLTVEELRNVNVFFPHFKYSMDTYVFKDSSQKDLLNFTGTIPVMYQGNTYNIPIRFWILDSHPFAPPICFLKPTANMGILVGKHVDAQGRIYLPYLQNWSHPKSVIVGLIKEMIAKFQEELPMYSLSSSDEARQVDLLAYIAKITEGVSDTNSKSWANHENKTVNKITVVGGGELGIACTLAISAKGIADRLVLLDLSEGTKGATMDLEIFNLPNVEISKDLSASAHSKVVIFTVNSLGSSQSYLDVVQSNVDMFRALVPALGHYSQHSVLLVASQPVEIMTYVTWKLSTFPANRVIGIGCNLDSQRLQYIITNVLKAQTSGKEVWVIGEQGEDKVLTWSGQEEVVSHTSQVQLSNRAMELLRVKGQRSWSVGLSVADMVDSIVNNKKKVHSVSALAKGYYDINSEVFLSLPCILGTNGVSEVIKTTLKEDTVTEKLQSSASSIHSLQQQLKL

SEQ ID NO: 11365 - protein, 215 aa, Homo sapiens [sequence omitted]

SEQ ID NO: 11366 - protein, 69 aa, Homo sapiens
MLSVQPDTKPKGCAGCNRKIKDRYLLKALDKYWHEDCLKCACCDCRLGEVGSTLYTKANLILCRRDYLR

SEQ ID NO: 11367 - protein, 991 aa, Homo sapiens
MEEYEKFCEKSLARIQEASLSTESFLPAQSESISLIRFHGVAILSPLLNIEKRKEMQQEKQKALDVEARKQVNRKKALLTRVQEILDNVQVRKAPNASDFDQWEMETVYSNSEVRNLNVPATFPNSFPSHTEHSTAAKLDKIAGILPLDNEDQCKTDGIDLARDSEGFNSPKQCDSSNISHVENEAFPKTSSATPQETLISDGPFSVNEQQDLPLLAEVIPDPYVMSLQNLMKKSKEYIEREQSRRSLRGSINRIVNESHLDKEHDAVEVADCVKEKGQLTGKHCVSVIPDKPSLNKSNVLLQGASTQASSMSMPVLASFSKVDIPIRTGHPTVLESNSDFKVIPTFVTENNVIKSLTGSYAKLPSPEPSMSPKMHRRRSRTSSACHILINNPINACELSPKGKEQAMDLIIQDTDENTNVPEIMPKLPTDLAGVCSSKVYVGKNTSEVKEDVVLGKSNQVCQSSGNHLENKVTHGLVTVEGQLTSDERGAHIMNSTCAAMPKLHEPYASSQCIASPNFGTVSGLKPASMLEKNCSLQTELNKSYDVKNPSPLLMQNQNTRQQMDTPMVSCGNEQFLDNSFEKVKRRLDLDIDGLQKENCPYVITSGITEQERQHLPEKRYPKGSGFVNKNKMLGTSSKESEELLKSKMLAFEEMRKRLEEQHAQQLSLLIAEQEREQERLQKEIEEQEKMLKEKKAMTAEASELDINNAVELEWRKISDSSLLETMLSQADSLHTSNSNSSGFTNSAMQYSFVSANEAPFYLWGSSTSGLTKLSVTRPFGRAKTRWSQVFSLEIQAKFNKITAVAKGFLTRRLMQTDKLKQLRQTVKDTMEFIRSFQSEAPLKRGIVSAQDASLQERVLAQLRAALYGIHDIFFVMDAAERMSILHHDREVRKEKMLRQMDKMKSPRVALSAATQKSLDRKKYMKAAEMGMPNKKFLVKQNPSETRVLQPNQGQNAPVHRLLSRQGSICRKNPKKAAKCCDNLRRQHSLG

SEQ ID NO: 11368 - protein, 496 aa, Homo sapiens
MAGVVHVSLAALLLLPMAPAMHSDCIFKKEQAMCLEKIQRANELMGFNDSSPGCPGMWDNITCWKPAHVGEMVLVSCPELFRIFNPDQVWETETIGESDFGDSNSLDLSDMGVVSRNCTEDGWSEPFPHYFDACGFDEYESETGDQDYYYLSVKALYTVGYSTSLVTLTTAMVILCRFRKLHCTRNFIHMNLFVSFMLRAISVFIKDWILYAEQDSNHCFISTVECKAVMVFFHYCVVSNYFWLFIEGLYLFTLLVETFFPERRYFYWYTIIGWGTPTVCVTVWATLRLYFDDTGCWDMNDSTALWWVIKGPVVGSIMVNFVLFIGIIVILVQKLQSPDMGGNESSIYFSCVQKCYCKPQRAQQHSCKMSELSTITLRLARSTLLLIPLFGIHYTVFAFSPENVSKRERLVFELGLGSFQGFVVAVLYCFLNGEVQAEIKRKWRSWKVNRYFAVDFKHRHPSLASSGVNGGTQLSILSKSSSQIRMSGLPADNLAT

SEQ ID NO: 11369 - protein, 577 aa, Homo sapiens
MPDRTEKHSTMPDSPVDVKTQSRLTPPTMPPPPTTQGAPRTSSFTPTTLTNGTSHSPTALNGAPSPPNGFSNGPSSSSSSSLANQQLPPACGARQLSKLKRFLTTLQQFGNDISPEIGERVRTLVLGLVNSTLTIEEFHSKLQEATNFPLRPFVIPFLKANLPLLQRELLHCARLAKQNPAQYLAQHEQLLLDASTTSPVDSSELLLDVNENGKRRTPDRTKENGFDREPLHSEHPSKRPCTISPGQRYSPNNGLSYQPNGLPHPTPPPPQHYRLDDMAIAHHYRDSYRHPSHRDLRDRNRPMGLHGTRQEEMIDHRLTDREWAEEWKHLDHLLNCIMDMVEKTRRSLTVLRRCQEADREELNYWIRRYSDAEDLKKGGGSSSSHSRQQSPVNPDPVALDAHREFLHRPASGYVPEEIWKKAEEAVNEVKRQAMTELQKAVSEAERKAHDMITTERAKMERTVAEAKRQAAEDALAVINQQEDSSESCWNCGRKASETCSGCNTARYCGSFCQHKDWEKHHHICGQTLQAQQQGDTPAVSSSVTPNSGAGSPMDTPPAATPRSTTPGTPSTIETTPR

SEQ ID NO: 11370 - protein, 58 aa, Homo sapiens
MWKLLPAAGPAGGEPYRLLTGVEYVVGRKNCAILIENDQSISRNHAVLTANFSVTNLV

SEQ ID NO: 11371 - protein, 1015 aa, Homo sapiens
MYVSSEHKGRRVTALCWDTAILRVFVGDHAGKVSAIKLNTSKQAKAAAAFVMFPVQTITTVDSCVVQLDYLDGRLLISSLTRSFLCDTEREKFWKIGNKERDGEYGACFFPGRCSGGQQPLIYCARPGSRMWEVNFDGEVISTHQFKKLLSLPPLPVITLRSEPQYDHTAGSSQSLSFPKLLHLSEHCVLTWTERGIYIFIPQNVQVLLWSEVKDIQDVAVCRNELFCLHLNGKVSHLSLISVERCVERLLRRGLWNLAARTCCLFQNSVIASRARKTLTADKLEHLKSQLDHGTYNDLISQLEELILKFEPLDSACSSRRSSISSHESFSILDSGIYRIISSRRGSQSDEDSCSLHSQTLSEDERFKEFTSQQEEDLPDQCCGSHGNEDNVSHAPVMFETDKNETFLPFGIPLPFRSPSPLVSLQAVKESVSSFVRKTTEKIGTLHTSPDLKVRPELRGDEQSCEEDVSSDTCPKEEDTEEEKEVTSPPPEEDRFQELKVATAEAMTKLQDPLVLFESESLRMVLQEWLSHLEKTFAMKDFSGVSDTDNSSMKLNQDVLLVNESKKGILDEDNEKEKRDSLGNEESVDKTACECVRSPRESLDDLFQICSPCAIASGLRNDLAELTTLCLELNVLNSKIKSTSGHVDHTLQQYSPEILACQFLKKYFFLLNLKRAKESIKLSYSNSPSVWDTFIEGLKEMASSNPVYMEMEKGDLPTRLKLLDDEVPFDSPLLVVYATRLYEKFGESALRSLIKFFPSILPSDIIQLCHHHPAEFLAYLDSLVKSRPEDQRSSFLESLLQPESLRLDWLLLAVSLDAPPSTSTMDDEGYPRPHSHLLSWGYSQLILHLIKLPADFITKEKMTDICRSCGFWPGYLILCLELERRREAFTNIVYLNDMSLMEGDNGWIPETVEEWKLLLHLIQSKSTRPAPQESLNGSLSDGPSPINVENVALLLAKAMGPDRAWSLLQECGLALELSEKFTRTCDILRIAEKRQRALIQSMLEKCDRFLWSQQA

SEQ ID NO: 11372 - protein, 1186 aa, Homo sapiens
MFSSLQKSFNLAEEEIKTEQEVVEGMDISTRSKDPGSAERTAQKRKFPSPPHSSNGHSPQDTSTSPIKKKKKPGLLNSNNKEQDGRNDFYCWVCHREGQVLCCELCPRVYHAKCLRLTSEPEGDWFCPECEKITVAECIETQSKAMTMLTIEQLSYLLKFAIQKMKQPGTDAFQKPVPLEQHPDYAEYIFHPMDLCTLEKNAKKKMYGCTEAFLADAKWILHNCIIYNGGNHKLTQIAKVVIKICEHEMNEIEVCPECYLAACQKRDNWFCEPCSNPHPLVWAKLKGFPFWPAKALRDKDGQVDARFFGQHDRAWVPINNCYLMSKEIPFSVKKTKSIFNSAMQEMEVYVENIRRKFGVFNYSPFRTPYTPNSQYQMLLDPTNPSAGTAKIDKQEKVKLNFDMTASPKILMSKPVLSGGTGRRISLSDMPRSPMSTNSSVHTGSDVEQDAEKKATSSHFSASEESMDFLDKSTASPASTKTGQAGSLSGSPKPFSPQLSAPITTKTDKTSTTGSILNLNLDRSKAEMDLKELSESVQQQSTPVPLISPKRQIRSRFQLNLDKTIESCKAQLGINEISEDVYTAVEHSDSEDSEKSDSSDSEYISDDEQKSKNEPEDTEDKEGCQMDKEPSAVKKKPKPTNPVEIKEELKSTSPASEKADPGAVKDKASPEPEKDFSEKAKPSPHPIKDKLKGKDETDSPTVHLGLDSDSESELVIDLGEDHSGREGRKNKKEPKEPSPKQDVVGKTPPSTTVGSHSPPETPVLTRSSAQTSAAGATATTSTSSTVTVTAPAPAATGSPVKKQRPLLPKETAPAVQRVVWNSSSKFQTSSQKWHMQKMQRQQQQQQQQNQQQQPQSSQGTRYQTRQAVKAVQQKEITQSPSTSTITLVTSTQSSPLVTSSGSMSTLVSSVNADLPIATASADVAADIAKYTSKMMDAIKGTMTEIYNDLSKNTTGSTIAEIRRLRIEIEKLQWLHQQELSEMKHNLELTMAEMRQSLEQERDRLIAEVKKQLELEKQQAVDETKKKQWCANCKKEAIFYCCWNTSYCDYPCQQAHWPEHMKSCTQSATAPQQEADAEVNTETLNKSSQGSSSSTQSAPSETASASKEKETSAEKSKESGSTLDLSGSRETPSSILLGSNQGSDHSRSNKSSWSSSDEKRGSTRSDHNTSTSTKSLLPKESRLDTFWD

SEQ ID NO: 11373 - protein, 397 aa, Homo sapiens
MSPTVIILACLGFFLDQSVWAHVGGQDKPFCSAWPSAVVPQGGHVTLRCHYRRGFNIFTLYKKDGVPVPELYNRIFWNSFLISPVTPAHAGTYRCRGFHPHSPTEWSAPSNPLVIMVTGLYEKPSLTARPGPTVRAGENVTLSCSSQSSFDIYHLSREGEAHELRLPAVPSINGTFQADFPLGPATHGETYRCFGSFHGSPYEWSDPSDPLPVSVTGNPSSSWPSPTEPSFKTGIARHLHAVIRYSVAIILFTILPFFLLHRWCSKKKVSLTKQRPENSGPCAEAGWEHADAAVMNQEPAGHRTVNREDSDEQDPQEVTYAQLDHCIFTQRKITGPSQRSKRPSTDTSVCIELPNAEPRALSPAHEHHSQALMGSSRETTALSQTQLASSNVPAAGI

SEQ ID NO: 11374 - protein, 230 aa, Homo sapiens
MSMSPTVIILACLGFFLDQSVWAHVGLYEKPSLTARPGPTVRAGENVTLSCSSQSSFDIYHLSREGEAHELRLPAVPSINGTFQADFPLGPATHGETYRCFGSFHGSPYEWSDPSDPLPVSVTDAAVMNQEPAGHRTVNREDSDEQDPQEVTYAQLDHCIFTQRKITGPSQRSKRPSTDTSVCIELPNAEPRALSPAHEHHSQALMGSSRETTALSQTQLASSNVPAAGI

SEQ ID NO: 11375 - protein, 369 aa, Homo sapiens
MFCTSGGNSASVMSMRPVPGSLSSLLHLHNRQRQPMPASMPGTLPNPTMPGSSAVLMPMERQMSVNSSIMGMQGPNLSNPCASPQVQPMHSEAKMRLKAALTHHPAAMSNGNMNTMGHMMEMMGSRQDQTPHHHMHSHPHQHQTLPPHHPYPHQHQHPAHHPHPQPHHQQNHPHHHSHSHLHAHPAHHQTSPHPPLHTGNQAQVSPATQQMQPTQTIQPPQPTGGRRRRVVDEDPDERRRKFLERNRAAATRCRQKRKVWVMSLEKKAEELTQTNMQLQNEVSMLKNEVAQLKQLLLTHKDCPITAMQKESQGYLSPESSPPASPVPACSQQQVIQHNTITTSSSVSEVVGSSTLSQLTTHRTDLNPIL

SEQ ID NO: 11376 - protein, 501 aa, Homo sapiens
MNLEQERPFVCSAPGCSQRFPTEDHLMIHRHKHEMTLKFPSIKTDNMLSDQTPTPTRFLKNCEEVGLFSELDCSLEHEFRKAQEEESSKRNISMHNAVGGAMTGPGTHQLSSARLPNHDTNVVIQQAMPSPQSSSVITQAPSTNRQIGPVPGSLSSLLHLHNRQRQPMPASMPGTLPNPTMPGSSAVLMPMERQMSVNSSIMGMQGPNLSNPCASPQVQPMHSEAKMRLKAALTHHPAAMSNGNMNTMGHMMEMMGSRQDQTPHHHMHSHPHQHQTLPPHHPYPHQHQHPAHHPHPQPHHQQNHPHHHSHSHLHAHPAHHQTSPHPPLHTGNQAQVSPATQQMQPTQTIQPPQPTGGRRRRVVDEDPDERRRKFLERNRAAATRCRQKRKVWVMSLEKKAEELTQTNMQLQNEVSMLKNEVAQLKQLLLTHKDCPITAMQKESQGYLSPESSPPASPVPACSQQQVIQHNTITTSSSVSEVVGSSTLSQLTTHRTDLNPIL

SEQ ID NO: 11377 - protein, 634 aa, Homo sapiens
MTPILTVLICLGLSLGPRTHVQAGHLPKPTLWAEPGSVITQGSPVTLRCQGGQETQEYRLYREKKTAPWITRIPQELVKKGQFPIPSITWEHTGRYRCYYGSDTAGRSESSDPLELVVTGAYIKPTLSAQPSPVVNSGGNVTLQCDSQVAFDGFILCKEGEDEHPQCLNSQPHARGSSRAIFSVGPVSPSRRWWYRCYAYDSNSPYEWSLPSDLLELLVLGVSKKPSLSVQPGPIVAPEETLTLQCGSDAGYNRFVLYKDGERDFLQLAGAQPQAGLSQANFTLGPVSRSYGGQYRCYGAHNLSSEWSAPSDPLDILIAGQFYDRVSLSVQPGPTVASGENVTLLCQSQGWMQTFLLTKEGAADDPWRLRSTYQSQKYQAEFPMGPVTSAHAGTYRCYGSQSSKPYLLTHPSDPLELVVSAGPEDQPLTPTGSDPQSGLGRHLGVVIGILVAVILLLLLLLLLFLILRHRRQGKHWTSTQRKADFQHPAGAVGPEPTDRGLQWRSSPAADAQEENLYAAVKHTQPEDGVEMDTRSPHDEDPQAVTYAEVKHSRPRREMASPPSPLSGEFLDTKDRQAEEDRQMDTEAAASEAPQDVTYAQLHSLTLRREATEPPPSQEGPSPAVPSIYATLAIH

SEQ ID NO: 11378 - protein, 789 aa, Homo sapiens
MTSFQEVPLQTSNFAHVIFQNVAKSYLPNAHLECHYTLTPYIHPHPKDWVGIFKVGWSTARDYYTFLWSPMPEHYVEGSTVNCVLAFQGYYLPNDDGEFYQFCYVTHKGEIRGASTPFQFRASSPVEELLTMEDEGNSDMLVVTTKAGLLELKIEKTMKEKEELLKLIAVLEKETAQLREQVGRMERELNHEKERCDQLQAEQKGLTEVTQSLKMENEEFKKRFSDATSKAHQLEEDIVSVTHKAIEKETELDSLKDKLKKAQHEREQLECQLKTEKDEKELYKVHLKNTEIENTKLMSEVQTLKNLDGNKESVITHFKEEIGRLQLCLAEKENLQRTFLLTTSSKEDTCFLKEQLRKAEEQVQATRQEVVFLAKELSDAVNVRDRTMADLHTARLENEKVKKQLADAVAELKLNAMKKDQDKTDTLEHELRREVEDLKLRLQMAADHYKEKFKECQRLQKQINKLSDQSANNNNVFTKKTGNQQKVNDASVNTDPATSASTVDVKPSPSAAEADFDIVTKGQVCEMTKEIADKTEKYNKCKQLLQDEKAKCNKYADELAKMELKWKEQVKIAENVKLELAEVQDNYKELKRSLENPAERKMEGQNSQSPQCFKTCSEQNGYVLTLSNAQPVLQYGNPYASQETRDGADGAFYPDEIQRPPVRVPSWGLEDNVVCSQPARNFSRPDGLEDSEDSKEDENVPTAPDPPSQHLRGHGTGFCFDSSFDVHKKCPLCELMFPPNYDQSKFEEHVESHWKVCPMCSEQFPPDYDQQVFERHVQTHFDQNVLNFD

SEQ ID NO: 11379 - protein, 651 aa, Homo sapiens
MTPILTVLICLGLSLGPRTHVQAGHLPKPTLWAEPGSVITQGSPVTLRCQGGQETQEYRLYREKKTAPWITRIPQELVKKGQFPIPSITWEHTGRYRCYYGSDTAGRSESSDPLELVVTGAYIKPTLSAQPSPVVNSGGNVTLQCDSQVAFDGFILCKEGEDEHPQCLNSQPHARGSSRAIFSVGPVSPSRRWWYRCYAYDSNSPYEWSLPSDLLELLVLGVSKKPSLSVQPGPIVAPEETLTLQCGSDAGYNRFVLYKDGERDFLQLAGAQPQAGLSQANFTLGPVSRSYGGQYRCYGAHNLSSEWSAPSDPLDILIAGQFYDRVSLSVQPGPTVASGENVTLLCQSQGWMQTFLLTKEGAADDPWRLRSTYQSQKYQAEFPMGPVTSAHAGTYRCYGSQSSKPYLLTHPSDPLELVVSGPSGGPSSPTTGPTSTSAGPEDQPLTPTGSDPQSGLGRHLGVVIGILVAVILLLLLLLLLFLILRHRRQGKHWTSTQRKADFQHPAGAVGPEPTDRGLQWRSSPAADAQEENLYAAVKHTQPEDGVEMDTRSPHDEDPQAVTYAEVKHSRPRREMASPPSPLSGEFLDTKDRQAEEDRQMDTEAAASEAPQDVTYAQLHSLTLRREATEPPPSQEGPSPAVPSIYATLAIH

SEQ ID NO: 11380 - protein, 650 aa, Homo sapiens
MTPILTVLICLGLSLGPRTHVQAGHLPKPTLWAEPGSVITQGSPVTLRCQGGQETQEYRLYREKKTAPWITRIPQELVKKGQFPIPSITWEHTGRYRCYYGSDTAGRSESSDPLELVVTGAYIKPTLSAQPSPVVNSGGNVTLQCDSQVAFDGFILCKEGEDEHPQCLNSQPHARGSSRAIFSVGPVSPSRRWWYRCYAYDSNSPYEWSLPSDLLELLVLGVSKKPSLSVQPGPIVAPEETLTLQCGSDAGYNRFVLYKDGERDFLQLAGAQPQAGLSQANFTLGPVSRSYGGQYRCYGAHNLSSEWSAPSDPLDILIAGQFYDRVSLSVQPGPTVASGENVTLLCQSQGWMQTFLLTKEGAADDPWRLRSTYQSQKYQAEFPMGPVTSAHAGTYRCYGSQSSKPYLLTHPSDPLELVVSGPSGGPSSPTTGPTSTSGPEDQPLTPTGSDPQSGLGRHLGVVIGILVAVILLLLLLLLLFLILRHRRQGKHWTSTQRKADFQHPAGAVGPEPTDRGLQWRSSPAADAQEENLYAAVKHTQPEDGVEMDTRSPHDEDPQAVTYAEVKHSRPRREMASPPSPLSGEFLDTKDRQAEEDRQMDTEAAASEAPQDVTYAQLHSLTLRREATEPPPSQEGPSPAVPSIYATLAIH

SEQ ID NO: 11381 - protein, 651 aa, Homo sapiens
MTPILTVLICLGLSLGPRTHVQAGHLPKPTLWAEPGSVITQGSPVTLRCQGGQETQEYRLYREKKTAPWITRIPQELVKKGQFPIPSITWEHTGRYRCYYGSDTAGRSESSDPLELVVTGAYIKPTLSAQPSPVVNSGGNVTLQCDSQVAFDGFILCKEGEDEHPQCLNSQPHARGSSRAIFSVGPVSPSRRWWYRCYAYDSNSPYEWSLPSDLLELLVLGVSKKPSLSVQPGPIVAPEETLTLQCGSDAGYNRFVLYKDGERDFLQLAGAQPQAGLSQANFTLGPVSRSYGGQYRCYGAHNLSSEWSAPSDPLDILIAGQFYDRVSLSVQPGPTVASGENVTLLCQSQGWMQTFLLTKEGAADDPWRLRSTYQSQKYQAEFPMGPVTSAHAGTYRCYGSQSSKPYLLTHPSDPLELVVSGPSGGPSSPTTGPTSTSGPEDQPLTPTGSDPQSGLGRHLGVVIGILVAVILLLLLLLLLFLILRHRRQGKHWTSTQRKADFQHPAGAVGPEPTDRGLQWRSSPAADAQEENLYAAVKHTQPEDGVEMDTRQSPHDEDPQAVTYAEVKHSRPRREMASPPSPLSGEFLDTKDRQAEEDRQMDTEAAASEAPQDVTYAQLHSLTLRREATEPPPSQEGPSPAVPSIYATLAIH

SEQ ID NO: 11382 - protein, 147 aa, Homo sapiens
MGPEALSSLLLLLLVASGDADMKGHFDPAKCRYALGMQDRTIPDSDISASSSWSDSTAARHSRLESSDGDGAWCPAGSVFPKEEEYLQVDLQRLHLVALVGTQGRHAGGLGKEFSRSYRLRYSRDGRRWMGWKDRWGQEVISGNEDP

SEQ ID NO: 11383 - protein, 335 aa, Homo sapiens
MEDSGKTFSSEEEEANYWKDLAMTYKQRAENTQEELREFQEGSREYEAELETQLQQIETRNRDLLSENNRLRMELETIKEKFEVQHSEGYRQISALEDDLAQTKAIKDQLQKYIRELEQANDDLERAKRATIMSLEDFEQRLNQAIERNAFLESELDEKENLLESVQRLKDEARDLRQELAVQQKQEKPRTPMPSSVEAERTDTAVQATGSVPSTPIAHRGPSSSLNTPGSFRRGLDDSTGGTPLTPAARISALNIVGDLLRKVGALESKLASCRNLVYDQSPNRTGGPASGRSSKNRDGGERRPSSTSVPLGDKGLDTSCRWLSKSTTRSSSSC

SEQ ID NO: 11384 - protein, 481 aa, Homo sapiens
MTPTLAALLCLGLSLGPRTHVQAGPFPKPTLWAEPGSVISWGSPVTIWCQGSLEAQEYRLDKEGSPEPWDRNNPLEPKNKARFSIPSITEHHAGRYRCHYYSSAGWSEPSDPLELVMTGAYSKPTLSALPSPVVASGGNMTLQCGSQKGYHHFVLMKEGEHQLPRTLDSQQLHSGGFQALFPVGPVNPSHRWRFTCYYYYMNTPRVWSHPSDPLEILPSGVSRKPSLLTLQGPVLAPGQSLTLQCGSDVGYDRFVLYKEGERDFLQRPGQQPQAGLSQANFTLGPVSPSHGGQYRCYGAHNLSSEWSAPSDPLNILMAGQIYDTVSLSAQPGPTVASGENVTLLCQSWWQFDTFLLTKEGAAHPPLRLRSMYGAHKYQAEFPMSPVTSAHAGTYRCYGSYSSNPHLLSFPSEPLELMVSGHSGGSSLPPTGPPSTPASHAKDYTVENLIRMGMAGLVLVFLGILLFEAQHSQRNPQDAAGR

SEQ ID NO: 11385 - protein, 196 aa, Homo sapiens
MWTLGRRAVAGLLASPSPAQAQTLTRVPRPAELAPLCGRRGLRTDIDATCTPRRASSNQRGLNQIWNVKKQSVYLMNLRKSGTLGHPGSLDETTYERLAEETLDSLAEFFEDLADKPYTFEDYDVSFGSGVLTVKLGGDLGTYVINKQTPNKQIWLSSPSRYVVDLSVMTGLGKTGCTPTTACPSMSCWPQSSLKP

SEQ ID NO: 11386 - protein, 452 aa, Homo sapiens
MSETPAQCSIKQERISYTPPESPVPSYASSTPLHVPVPRALRMEEDSIRLPAHLRLQPIYWSRDDVAQWLKWAENEFSLRPIDSNTFEMNGKALLLLTKEDFRYRSPHSGDVLYELLQHILKQRKPRILFSPFFHPGNSIHTQPEVILHQNHEEDNCVQRTPRPSVDNVHHNPPTIELLHRSRSPITTNHRPSPDPEQRPLRSPLDNMIRRLSPAERAQGPRPHQENNHQESYPLSVSPMENNHCPASSESHPKPSSPRQESTRVIQLMPSPIMHPLILNPRHSVDFKQSRLSEDGLHREGKPINLSHREDLAYMNHIMVSVSPPEEHAMPIGRIADCRLLWDYVYQLLSDSRYENFIRWEDKESKIFRIVDPNGLARLWGNHKNRTNMTYEKMSRALRHYYKLNIIRKEPGQRLLFRFMKTPDEIMSGRTDRLEHLESQELDEQIYQEDEC

SEQ ID NO: 11387 - protein, 263 aa, Homo sapiens
MFRNQYDNDVTVWSPQGRIHQIEYAMEAVKQGSATVGLKSKTHAVLVALKRAQSELAAHQKKILHVDNHIGISIAGLTADARLLCNFMRQECLDSRFVFDRPLPVSRLVSLIGSKTQIPTQRYGRRPYGVGLLIAGYDDMGPHIFQTCPSANYFDCRAMSIGARSQSARTYLERHMSEFMECNLNELVKHGLRALRETLPAEQDLTTKNVSIGIVGKDLEFTIYDDDDVSPFLEGLEERPQRKAQPAQPADEPAEKADEPMEH

SEQ ID NO: 11388 - protein, 411 aa, Homo sapiens
MLLKTVLLLGHVAQVLMLDNGLLQTPPMGWLAWERFRCNINCDEDPKNCISEQLFMEMADRMAQDGWRDMGYTYLNIDDCWIGGRDASGRLMPDPKRFPHGIPFLADYVHSLGLKLGIYADMGNFTCMGYPGTTLDKVVQDAQTFAEWKVDMLKLDGCFSTPEERAQGYPKMAAALNATGRPIAFSCSWPAYEGGLPPRVNYSLLADICNLWRNYDDIQDSWWSVLSILNWFVEHQDILQPVAGPGHWNDPDMLLIGNFGLSLEQSRAQMALWTVLAAPLLMSTDLRTISAQNMDILQNPLMIKINQDPLGIQGRRIHKEKSLIEVYMRPLSNKASALVFFSCRTDMPYRYHSSLGQLNFTGSVIYEAQDVYSGDIISGLRDETNFTVIINPSGVVMWYLYPIKNLEMSQQ

SEQ ID NO: 11389 - protein, 788 aa, Homo sapiens
MDASLEKIADPTLAEMGKNLKEAVKMLEDSQRRTEEENGKKLISGDIPGPLQGSGQDMVSILQLVQNLMHGDEDEEPQSPRIQNIGEQGHMALLGHSLGAYISTLDKEKLRKLTTRILSDTTLWLCRIFRYENGCAYFHEEEREGLAKICRLAIHSRYEDFVVDGFNVLYNKKPVIYLSAAARPGLGQYLCNQLGLPFPCLCRVPCNTVFGSQHQMDVAFLEKLIKDDIERGRLPLLLVANAGTAAVGHTDKIGRLKELCEQYGIWLHVEGVNLATLALGYVSSSVLAAAKCDSMTMTPGPWLGLPAVPAVTLYKHDDPALTLVAGLTSNKPTDKLRALPLWLSLQYLGLDGFVERIKHACQLSQRLQESLKKVNYIKILVEDELSSPVVVFRFFQELPGSDPVFKAVPVPNMTPSGVGRERHSCDALNRWLGEQLKQLVPASGLTVMDLEAEGTCLRFSPLMTAAVLGTRGEDVDQLVACIESKLPVLCCTLQLREEFKQEVEATAGLLYVDDPNWSGIGVVRYEHANDDKSSLKSDPEGENIHAGLLKKLNELESDLTFKIGPEYKSMKSCLYVGMASDNVDAAELVETIAATAREIEENSRLLENMTEVVRKGIQEAQVELQKASEERLLEEGVLRQIPVVGSVLNWFSPVQALQKGRTFNLTAGSLESTEPIYVYKAQGAGVTLPPTPSGSRTKQRLPGQKPFKRSLRGSDALSETSSVSHIEDLEKVERLSSGPEQITLEASSTEGHPGAPSPQHTDQTEAFQKGVPHPEDDHSQVEGPESLR

SEQ ID NO: 11390 - protein, 503 aa, Homo sapiens
MGTPASGRKRTPVKDRFSAEDEALSNIAREAEARLAAKRAARAEARDIRMRELERQQKEEDSERARYSHRSSHHRPYLGVEDALSIRSVGSHRNHSYSHSHGMKKRSSDSHKDLLASLYNGGLYNPYGPRTLDEKSDKQYAENYTRPSSRNSASATTPLSGNSSRRGSGDTSSLIDPDTSLSELRESLSEVEEKYKKAMVSNAQLDNEKNNLIYQVDTLKDVIEEQEEQMAEFYRENEEKSKELERQKHMCSVLQHKMEELKEGLRQRDELIEEKQRMQQKIDTMTKEVFDLQETLLWKDKKIGKHGLVIIPDGTPNGDVSHEPVAGAITVVSQEAAQVLESAGEGPLDVRLRKLAGEKEELLSQIRKLKLQLEEERQKCSRNDGTVGDLAGLQNGSDLQFIEMQRDANRQISEYKFKLSKAEQDITTLEQSISRLEGQVLRYKTAAENAEKVEDELKAEKRKLQRELRTALDKIEEMEMTNSHLAKRLEKMKANRTALLAQQ

SEQ ID NO: 11391 - protein, 187 aa, Homo sapiens
MNGRADFREPNAEVPRPIPHIGPDYIPTEEERRVFAECNDESFWFRSVPLAATSMLITQGLISKGILSSHPKYGSIPKLILACIMGYFAGKLSYVKTCQEKFKKLENSPLGEALRSGQARRSSPPGHYYQKSKYDSSVSGQSSFVTSPAADNIEMLPHYEPIPFSSSMNESAPTGITDHIVQGRNFS

SEQ ID NO: 11392 - protein, 384 aa, Homo sapiens
MDLSRPRWSLWRRVFLMASLLACGICQASGQIFITQTLGIKGYRTVVALDKVPEDVQEYSWYWGANDSAGNMIISHKPPSAQQPGPMYTGRERVNREGSLLIRPTALNDTGNYTVRVVAGNETQRATGWLEVLELGSNLGISVNASSLVENMDSVAADCLTNVTNITWYVNDVPTSSSDRMTISPDGKTLVILRVSRYDRTIQCMIESFPEIFQRSERISLTVAYGPDYVLLRSNPDDFNGIVTAEIGSQVEMECICYSFLDLKYHWIHNGSLLNFSDAKMNLSSLAWEQMGRYRCTVENPVTQLIMYMDVRIQAPHEDLTCCPQRFLHLRIHGDVPHHADSAGWRLHLWSPDPCSDQPLLNQDKSGSMSVHPRPEDKTRRASR

SEQ ID NO: 11393 - protein, 584 aa, Homo sapiens
MANEDCPKAADSPFSSDKHAQLILAQINKMRNGQHFCDVQLQVGQESFKAHRLVLAASSPYFAALFTGGMKESSKDVVPILGIEAGIFQILLDFIYTGIVNIGVNNVQELIIAADMLQLTEVVHLCCEFLKGQIDPLNCIGIFQFSEQIACHDLLEFSENYIHVHFLEVHSGEEFLALTKDQLIKILRSEELSIEDEYQVFLAAMQWILKDLGKRRKHVVEVLDPIRFPLLPPQRLLKYIEGVSDFNLRVALQTLLKEYCEVCKSPKENKFCSFLQTSKVRPRKKARKYLYAVGGYTRLQGGRWSDSRALSCVERFDTFSQYWTTVSSLHQARSGLGVTVLGGMVYAIGGEKDSMIFDCTECYDPVTKQWTTVASMNHPRCGLGVCVCYGAIYALGGWVGAEIGNTIERFDPDENKWEVVGNMAVSRYYFGCCEMQGLIYVIGGISNEGIELRSFEVYDPLSKRWSPLPPMGTRRAYLGVAALNDCIYSVGGWNETQDALHTVEKYSFEEEKWVEVASMKVPRAGMCVVAVNGLLYVSGGRSSSHDFLAPGTLDSVEVYNPHSDTWTEIGNMITSRCEGGVAVL

SEQ ID NO: 11394 - protein, 511 aa, Homo sapiens
MSKVARSSSESDVQLWETEEDDMTEGDLGYGLGRKPGGIYEIEFSHRSRKRSDGKNFSPPPFPRKGEERNEASFQYSKHKSQQDTFPQVSRISNYRRQSSTVDSNSELSNEELRQCLNETLEEVEMLKTELEASQRQLRGKEEALKILQSMAILGKATSHTQAVLQKTMEQNRSLEKEINALQWEIEFDHNRFKNIEESWIQKYDRLNCENAVLKENLKVKTEEIKMLKSDNAVLNQRYLEALAMLDIKQQKMAQENMCCDKSGFAEASGLELAVLGACLCHGPGGNPCSCARMAASTRKLLLQLKQELEILQKSKEEAYVMADAFRIAFEQQLMRKNDQALQLTQMDKMHKKATKWMNWKHLKEDGFPSPRSKKTFGQRLLGMLPSENSSKRMEDQDSPQEVLKMLIDLLNDKEEALAHQRKVSYMLARALEDKDTASNENKEKNPIKENFPFNNPWRKTSEFSVLGDPIHSSVCILNSVGCICSIQHSQIDPNYRTLKRSHSLPSSIIF

SEQ ID NO: 11395 - protein, 434 aa, Homo sapiens
MFNSKFGSIPKFYVRAPGRVNIIGEHIDYCGYSVLPMAVEQDVLIAVEPVKTYALQLANTNPLYPDFSTSANNIQIDKTKPLWHNYFLCGLKGIQEHFGLSNLTGMNCLVDGNIPPSSGLSSSSALVCCAGLVTLTVLGRNLSKVELAEICAKSERYIGTEGGGMDQSISFLAEEGTAKLIEFSPLRATDVKLPSGAVFVIANSCVEMNKAATSHFNIRVMECRLAAKLLAKYKSLQWDKVLRLEEVQAKLGISLEEMLLVTEDALHPEPYNPEEICRCLGISLEELRTQILSPNTQDVLIFKLYQRAKHVYSEAARVLQFKKICEEAPENMVQLLGELMNQSHMSCRDMYECSCPELDQLVDICRKFGAQGSRLTGAGWGGCTVSMVPADKLPSFLANVHKAYYQRSDGSLAPEKQSLFATKPGGGALVLLEA

SEQ ID NO: 11396 - protein, 290 aa, Homo sapiens
MTKEEFTKMKQELEAEYLAIFKKTVAMHEVFLCRVAAHPILRRDLNFHVFLEYNQDLSVRGKNKKEKLEDFFKNMVKSADGVIVSGVKDVDDFFEHERTFLLEYHNRVKDASAKSDRMTRSHKSAADDYNRIGSSLYALGTQDSTDICKFFLKVSELFDKTRKIEARVSADEDLKLSDLLKYYLRESQAAKDLLYRRSRSLVDYENANKALDKARAKNKDVLQAETSQQLCCQKFEKISESAKQELIDFKTRRVAAFRKNLVELAELELKHAKGNLQLLQNCLAVLNGDT

SEQ ID NO: 11397 - protein, 247 aa, Homo sapiens
MPASSPFLLAPKGPPGNMGGPVREPALSVALWLSWGAALGAVACAMALLTQQTELQSLRREVSRLQGTGGPSQNGEGYPWQSLPEQSSDALEAWENGERSRKRRAVLTQKQKKQHSVLHLVPINATSKDDSDVTEVMWQPALRRGRGLQAQGYGVRIQDAGVYLLYSQVLFQDVTFTMGQVVSREGQGRQETLFRCIRSMPSHPDRAYNSCYSAGVFHLHQGDILSVIIPRARAKLNLSPHGTFLGL

SEQ ID NO: 11398 - protein, 163 aa, Homo sapiens
MSLLGPKVLLFLAAFIITSDWIPLGVNSQRGDDVTQATPETFTEDPNLVNDPATDETVLAVLADIAPSTDDLECWDEKFTCTRLYSVHRPVKQCIHQLCFTSLRRMYIVNKEICSRLVCKEHEAMKDELCRQMAGLPPRRLRRSNYFRLPPCENVDLQRPNGL

SEQ ID NO: 11399 - protein, 764 aa, Homo sapiens
MERAVQGTDGGGGSNSSSRSSSRATSAGSSPSCSLAGRGVSSRSAAAGLGGGGSRSSPGSVAASPSGGGGRRREPALEGVLSKYTNLLQGWQNRYFVLDFEAGILQYFVNEQSKHQKPRGVLSLSGAIVSLSDEAPHMLVVYSANGEMFKLRAADAKEKQFWVTQLRACAKYHMEMNSKSAPSSRSRSLTLLPHGTPNSASPCSQRHLSVGAPGVVTITHHKSPAAARRAKSQYSGQLHEVREMMNQVEGQQKNLVHAIESLPGSGPLTALDQDLLLLKATSAATLSCLGECLNLLQQSVHQAGQPSQKPGASENILGWHGSKSHSTEQLKNGTLGSLPSASANITWAILPNSAEDEQTSQPEPEPNSGSELVLSEDEKSDNEDKEETELGVMEDQRSIILHLISQLKLGMDLTKVVLPTFILEKRSLLEMYADFMAHPDLLLAITAGATPEERVICFVEYYLTAFHEGRKGALAKKPYNPIIGETFHCSWEVPKDRVKPKRTASRSPASCHEHPMADDPSKSYKLRFVAEQVSHHPPISCFYCECEEKRLCVNTHVWTKSKFMGMSVGVSMIGEGVLRLLEHGEEYVFTLPSAYARSILTIPWVELGGKVSINCAKTGYSATVIFHTKPFYGGKVHRVTAEVKHNPTNTIVCKAHGEWNGTLEFTYNNGETKVIDTTTLPVYPKKIRPLEKQGPMESRNLWREVTRYLRLGDIDAATEQKRHLEEKQRVEERKRENLRTPWKPKYFIQEGDGWVYFNPLWKAH

SEQ ID NO: 11400 - protein, 1670 aa, Homo sapiens
MSARTAPRPQVLLLPLLLVLLAAAPAASKGCVCKDKGQCFCDGAKGEKGEKGFPGPPGSPGQKGFTGPEGLPGPQGPKGFPGLPGLTGSKGVRGISGLPGFSGSPGLPGTPGNTGPYGLVGVPGCSGSKGEQGFPGLPGTLGYPGIPGAAGLKGQKGAPAKEEDIELDAKGDPGLPGAPGPQGLPGPPGFPGPVGPPGPPGFFGFPGAMGPRGPKGHMGERVIGHKGERGVKGLTGPPGPPGTVIVTLTGPDNRTDLKGEKGDKGAMGEPGPPGPSGLPGESYGSEKGAPGDPGLQGKPGKDGVPGFPGSEGVKGNRGFPGLMGEDGIKGQKGDIGPPGFRGPTEYYDTYQEKGDEGTPGPPGPRGARGPQGPSGPPGVPGSPGSSRPGLRGAPGWPGLKGSKGERGRPGKDAMGTPGSPGCAGSPGLPGSPGPPGPPGDIVFRKGPPGDHGLPGYLGSPGIPGVDGPKGEPGLLCTQCPYIPGPPGLPGLPGLHGVKGIPGRQGAAGLKGSPGSPGNTGLPGFPGFPGAQGDPGLKGEKGETLQPEGQVGVPGDPGLRGQPGRKGLDGIPGTPGVKGLPGPKGELALSGEKGDQGPPGDPGSPGSPGPAGPAGPPGYGPQGEPGLQGTQGVPGAPGPPGEAGPRGELSVSTPVPGPPGPPGPPGHPGPQGPPGIPGSLGKCGDPGLPGPDGEPGIPGIGFPGPPGPKGDQGFPGTKGSLGCPGKMGEPGLPGKPGLPGAKGEPAVAMPGGPGTPGFPGERGNSGEHGEIGLPGLPGLPGTPGNEGLDGPRGDPGQPGPPGEQGPPGRCIEGPRGAQGLPGLNGLKGQQGRRGKTGPKGDPGIPGLDRSGFPGETGSPGIPGHQGEMGPLGQRGYPGNPGILGPPGEDGVIGMMGFPGAIGPPGPPGNPGTPGQRGSPGIPGVKGQRGTPGAKGEQGDKGNPGPSEISHVIGDKGEPGLKGFAGNPGEKGNRGVPGMPGLKGLKGLPGPAGPPGPRGDLGSTGNPGEPGLRGIPGSMGNMGMPGSKGKRGTLGFPGRAGRPGLPGIHGLQGDKGEPGYSEGTRPGPPGPTGDPGLPGDMGKKGEMGQPGPPGHLGPAGPEGAPGSPGSPGLPGKPGPHGDLGFKGIKGLLGPPGIRGPPGLPGFPGSPGPMGIRGDQGRDGIPGPAGEKGETGLLRAPPGPRGNPGAQGAKGDRGAPGFPGLPGRKGAMGDAGPRGPTGIEGFPGPPGLPGAIIPGQTGNRGPPGSRGSPGAPGPPGPPGSHVIGIKGDKGSMGHPGPKGPPGTAGDMGPPGRLGAPGTPGLPGPRGDPGFQGFPGVKGEKGNPGFLGSIGPPGPIGPKGPPGVRGDPGTLKIISLPGSPGPPGTPGEPGMQGEPGPPGPPGNLGPCGPRGKPGKDGKPGTPGPAGEKGNKGSKGEPGPAGSDGLPGLKGKRGDSGSPATWTTRGFVFTRHSQTTAIPSCPEGTVPLYSGFSFLFVQGNQRAHGQDLGTLGSCLQRFTTMPFLFCNVNDVCNFASRNDYSYWLSTPALMPMNMAPITGRALEPYISRCTVCEGPAIAIAVHSQTTDIPPCPHGWISLWKGFSFIMFTSAGSEGTGQALASPGSCLEEFRASPFLECHGRGTCNYYSNSYSFWLASLNPERMFRKPIPSTVKAGELEKIISRCQVCMKKRH

SEQ ID NO: 11401 - protein, 237 aa, Homo sapiens
MSLPPPPPGPLPLRRRRRRPTLLGLCTEGLYRVSGNKTDQDNIQKQFDQDHNINLVSMEVTVNAVAGALKAFFADLPDPLIPYSLHPELLEAAKIPDKTERLHALKEIVKKFHPVNYDVFRYVITHLNRVSQQHKINLMTADNLSICFWPTLMRPDFENREFLSTTKIHQSVVETFIQQCQFFFYNGEIVETTNIVAPPPPSNPGQLVEPMVPLQLPPPLQPQLIQPQLQTDPLGII

SEQ ID NO: 11402 - protein, 765 aa, Homo sapiens
MEEKYGGDVLAGPGGGGGLGPVDVPSARLTKYIVLLCFTKFLKAVGLFESYDLLKAVHIVQFIFILKLGTAFFMVLFQKPFSSGKTITKHQWIKIFKHAVAGCIISLLWFFGLTLCGPLRTLLLFEHSDIVVISLLSVLFTSSGGGPAKTRGAAFFIIAVICLLLFDNDDLMAKMAEHPEGHHDSALTHMLYTAIAFLGVADHKGGVLLLVLALCCKVGFHTASRKLSVDVGGAKRLQALSHLVSVLLLCPWVIVLSVTTESKVESWFSLIMPFATVIFFVMILDFYVDSICSVKMEVSKCARYGSFPIFISALLFGNFWTHPITDQLRAMNKAAHQESTEHVLSGGVVVSAIFFILSANILSSPSKRGQKGTLIGYSPEGTPLYNFMGDAFQHSSQSIPRFIKESLKQILEESDSRQIFYFLCLNLLFTFVELFYGVLTNSLGLISDGFHMLFDCSALVMGLFAALMSRWKATRIFSYGYGRIEILSGFINGLFLIVIAFFVFMESVARLIDPPELDTHMLTPVSVGGLIVNLIGICAFSHAHSHAHGASQGSCHSSDHSHSHHMHGHSDHGHGHSHGSAGGGMNANMRGVFLHVLADTLGSIGVIVSTVLIEQFGWFIADPLCSLFIAILIFLSVVPLIKDACQVLLLRLPPEYEKELHIALEKIQKIEGLISYRDPHFWRHSASIVAGTIHIQVTSDVLEQRIVQQVTGILKDAGVNNLTIQVEKEAYFQHMSGLSTGFHDVLAMTKQMESMKYCKDGTYIM

SEQ ID NO: 11403 - protein, 753 aa, Homo sapiens
METYGYLQRESCFQGPHELYFKNLSKRNKQIMEKNGNNRKLRVCVATCNRADYSKLAPIMFGIKTEPEFFELDVVVLGSHLIDDYGNTYRMIEQDDFDINTRLHTIVRGEDEAAMVESVGLALVKLPDVLNRLKPDIMIVHGDRFDALALATSAALMNIRILHIEGGEVSGTIDDSIRHAITKLAHYHVCCTRSAEQHLISMCEDHDRILLAGCPSYDKLLSAKNKDYMSIIRMWLGDDVKSKDYIVALQHPVTTDIKHSIKMFELTLDALISFNKRTLVLFPNIDAGSKEMVRVMRKKGIEHHPNFRAVKHVPFDQFIQLVAHAGCMIGNSSCGVREVGAFGTPVINLGTRQIGRETGENVLHVRDADTQDKILQALHLQFGKQYPCSKIYGDGNAVPRILKFLKSIDLQEPLQKKFCFPPVKENISQDIDHILETLSALAVDLGGTNLRVAIVSMKGEIVKKYTQFNPKTYEERINLILQMCVEAAAEAVKLNCRILGVGISTGGRVNPREGIVLHSTKLIQEWNSVDLRTPLSDTLHLPVWVDNDGNCAALAERKFGQGKGLENFVTLITGTGIGGGIIHQHELIHGSSFCAAELGHLVVSLDGPDCSCGSHGCIEAYASGMALQREAKKLHDEDLLLVEGMSVPKDEAVGALHLIQAAKLGNAKAQSILRTAGTALGLGVVNILHTMNPSLVILSGVLASHYIHIVKDVIRQQALSSVQDVDVVVSDLVDPALLGAASMVLDYTTRRIY

SEQ ID NO: 11404 - protein, 902 aa, Homo sapiens
MDSERQVKDTDDIESPKRSIRDSGYIDCWDSERSDSLSPPRHGRDDSFDSLDSFGSRSRQTPSPDVVLRGSSDGRGSDSESDLPHRKLPDVKKDDMSARRTSHGEPKSAVPFNQYLPNKSNQTAYVPAPLRKKKAEREEYRKSWSTATSPLGGERPFRYGPRTPVSDDAESTSMFDMRCEEEAAVQPHSRARQEQLQLINNQLREEDDKWQDDLARWKSRRRSVSQDLIKKEEERKKMEKLLAGEDGTSERRKSIKTYREIVQEKERRERELHEAYKNARSQEEAEGILQQYIERFTISEAVLERLEMPKILERSHSTEPNLSSFLNDPNPMKYLRQQSLPPPKFTATVETTIARASVLDTSMSAGSGSPSKTVTPKAVPMLTPKPYSQPKNSQDVLKTFKVDGKVSVNGETVHREEEKERECPTVAPAHSLTKSQMFEGVARVHGSPLELKQDNGSIEINIKKPNSVPQELAATTEKTEPNSQEDKNDGGKSRKGNIELASSEPQHFTTTVTRCSPTVAFVEFPSSPQLKNDVSEEKDQKKPENEMSGKVELVLSQKVVKPKSPEPEATLTFPFLDKMPEANQLHLPNLNSQVDSPSSEKSPVMTPFKFWAWDPEEERRRQEKWQQEQERLLQERYQKEQDKLKEEWEKAQKEVEEEERRYYEEERKIIEDTVVPFTVSSSSADQLSTSSSMTEGSGTMNKIDLGNCQDEKQDRRWKKSFQGDDSDLLLKTRESDRLEEKGSLTEGALAHSGNPVSKGVHEDHQLDTEAGAPHCGTNPQLAQDPSQNQQTSNPTHSSEDVKPKTLPLDKSINHQIESPSERRKSISGKKLCSSCGLPLGKGAAMIIETLNLYFHIQCFRCGICKGQLGDAVSGTDVRIRNGLLNCNDCYMRSRSAGQPTTL

SEQ ID NO: 11405 - protein, 638 aa, Homo sapiens
MLLAQINRDSQGMTEFPGGGMEAQHVTLCLTEAVTVADGDNLENMEGVSLQAVTLADGSTAYIQHNSKDAKLIDGQVIQLEDGSAAYVQHVPIPKSTGDSLRLEDGQAVQLEDGTTAFIHHTSKDSYDQSALQAVQLEDGTTAYIHHAVQVPQSDTILAIQADGTVAGLHTGDATIDPDTISALEQYAAKVSIDGSESVAGTGMIGENEQEKKMQIVLQGHATRVTAKSQQSGEKAFRCEYDGCGKLYTTAHHLKVHERSHTGDRPYQCEHAGCGKAFATGYGLKSHVRTHTGEKPYRCSEDNCTKSFKTSGDLQKHIRTHTGERPFKCPFEGCGRSFTTSNIRKVHVRTHTGERPYYCTEPGCGRAFASATNYKNHVRIHTGEKPYVCTVPGCDKRFTEYSSLYKHHVVHTHSKPYNCNHCGKTYKQISTLAMHKRTAHNDTEPIEEEQEAFFEPPPGQGEDVLKGSQITYVTGVEGDDVVSTQVATVTQSGLSQQVTLISQDGTQHVNISQADMQAIGNTITMVTQDGTPITVPAHDAVISSAGTHSVAMVTAEGTEGEQVAIVAQDLAAFHTASSEMGHQQHSHHLVTTETRPLTLVATSNGTQIAVQLGEQPSLEEAIRIASRIQQGETPGLDD

SEQ ID NO: 11406 - protein, 550 aa, Homo sapiens
MSAAWIPALGLGVCLLLLPGPAGSEGAAPIAITCFTRGLDIRKEKADVLCPGGCPLEEFSVYGNIVYASVSSICGAAVHRGVISNSGGPVRVYSLPGRENYSSVDANGIQSQMLSRWSASFTVTKGKSSTQEATGQAVSTAHPPTGKRLKKTPEKKTGNKDCKADIAFLIDGSFNIGQRRFNLQKNFVGKVALMLGIGTEGPHVGLVQASEHPKIEFYLKNFTSAKDVLFAIKEVGFRGGNSNTGKALKHTAQKFFTVDAGVRKGIPKVVVVFIDGWPSDDIEEAGIVAREFGVNVFIVSVAKPIPEELGMVQDVTFVDKAVCRNNGFFSYHMPNWFGTTKYVKPLVQKLCTHEQMMCSKTCYNSVNIAFLIDGSSSVGDSNFRLMLEFVSNIAKTFEISDIGAKIAAVQFTYDQRTEFSFTDYSTKENVLAVIRNIRYMSGGTATGDAISFTVRNVFGPIRESPNKNFLVIVTDGQSYDDVQGPAAAAHDAGITIFSVGVAWAPLDDLKDMASKPKESHAFFTREFTGLEPIVSDVIRGICRDFLESQQ

SEQ ID NO: 11407 - protein, 467 aa, Homo sapiens
MAAAARARVAYLLRQLQRAACQCPTHSHTYSQAPGLSPSGKTTDYAFEMAVSNIRYGAAVTKEVGMDLKNMGAKNVCLMTDKNLSKLPPVQVAMDSLVKNGIPFTVYDNVRVEPTDSSFMEAIEFAQKGAFDAYVAVGGGSTMDTCKAANLYASSPHSDFLDYVSAPIGKGKPVSVPLKPLIAVPTTSGTGSETTGVAIFDYEHLKVKIGITSRAIKPTLGLIDPLHTLHMPARVVANSGFDVLCHALESYTTLPYHLRSPCPSNPITRPAYQGSNPISDIWAIHALRIVAKYLKRAVRNPDDLEARSHMHLASAFAGIGFGNAGVHLCHGMSYPISGLVKMYKAKDYNVDHPLVPHGLSVVLTSPAVFTFTAQMFPERHLEMAEILGADTRTARIQDAGLVLADTLRKFLFDLDVDDGLAAVGYSKADIPALVKGTLPQERVTKLAPCPQSEEDLAALFEASMKLY

SEQ ID NO: 11408 - protein, 259 aa, Homo sapiens
MNLVDLWLTRSLSMCLLLQSFVLMILCFHSASMCPKGCLCSSSGGLNVTCSNANLKEIPRDLPPETVLLYLDSNQITSIPNEIFKDLHQLRVLNLSKNGIEFIDEHAFKGVAETLQTLDLSDNRIQSVHKNAFNNLKARARIANNPWHCDCTLQQVLRSMASNHETAHNVICKTSVLDEHAGRPFLNAANDADLCNLPKKTTDYAMLVTMFGWFTMVISYVVYYVRQNQEDARRHLEYLKSLPSRQKKADEPDDISTVV

SEQ ID NO: 11409 - protein, 558 aa, Homo sapiens
MAAAALGSSSGSASPAVAELCQNTPETFLEASKLLLTYADNILRNPNDEKYRSIRIGNTAFSTRLLPVRGAVECLFEMGFEEGETHLIFPKKASVEQLQKIRDLIAIERSSRLDGSNKSHKVKSSQQPAASTQLPTTPSSNPSGLNQHTRNRQGQSSDPPSASTVAADSAILEVLQSNIQHVLVYENPALQEKALACIPVQELKRKSQEKLSRARKLDKGINISDEDFLLLELLHWFKEEFFHWVNNVLCSKCGGQTRSRDRSLLPSDDELKWGAKEVEDHYCDACQFSNRFPRYNNPEKLLETRCGRCGEWANCFTLCCRAVGFEARYVWDYTDHVWTEVYSPSQQRWLHCDACEDVCDKPLLYEIGWGKKLSYVIAFSKDEVVDVTWRYSCKHEEVIARRTKVKEALLRDTINGLNKQRQLFLSENRRKELLQRIIVELVEFISPKTPKPGELGGRISGSVAWRVARGEMGLQRKETLFIPCENEKISKQLHLCYNIVKDRYVRVSNNNQTISGWENGVWKMESIFRKVETDWHMITVFTPMLIFLVPLKLFWKQN

SEQ ID NO: 11410 - protein, 208 aa, Homo sapiens [sequence omitted]

SEQ ID NO: 11411 - protein, 230 aa, Homo sapiens
MLPPAIHFYLLPLACILMKSCLAFKNDATEILYSHVVKPVPAHPSSNSTLNQARNGGRHFSNTGLDRNRTESLTRQNYFWLFPGAFLRQLQEARVQVGCRELRSTKYISDGQCTSISPLKELVCAGECLPLPVLPNWIGGGYGTKYWSRRSSQEWRCVNDKTRTQRIQLQCQDGSTRTYKITVVTACKCKRYTRQHNESSHNFESMSPAKPVQHHRERKRASKSSKHSMS

SEQ ID NO: 11412 - protein, 423 aa, Homo sapiens
MLRVRCLRGGSRGAEAVHYIGSRLGRTLTGWVQRTFQSTQAATASSRNSCAADDKATEPLPKDCPVSSYNEWDPLEEVIVGRAENACVPPFTIEVKANTYEKYWPFYQKQGGHYFPKDHLKKAVAEIEEMCNILKTEGVTVRRPDPIDWSLKYKTPDFESTGLYSAMPRDILIVVGNEIIEAPMAWRSRFFEYRAYRSIIKDYFHRGAKWTTAPKPTMADELYNQDYPIHSVEDRHKLAAQGKFVTTEFEPCFDAADFIRAGRDIFAQRSQVTNYLGIEWMRRHLAPDYRVHIISFKDPNPMHIDATFNIIGPGIVLSNPDRPCHQIDLFKKAGWTIITPPTPIIPDDHPLWMSSKWLSMNVLMLDEKRVMVDANEVPIQKMFEKLGITTIKVNIRNANSLGGGFHCWTCDVRRRGTLQSYLD

SEQ ID NO: 11413 - protein, 274 aa, Homo sapiens
MGKSLSHLPLHSSKEDAYDGVTSENMRNGLVNSEVHNEDGRNGDVSQFPYVEFTGRDSVTCPTCQGTGRIPRGQENQLVALIPYSDQRLRPRRTKLYVMASVFVCLLLSGLAVFFLFPRSIDVKYIGVKSAYVSYDVQKRTIYLNITNTLNITNNNYYSVEVENITAQVQFSKTVIGKARLNNITIIGPLDMKQIDYTVPTVIAEEMSYMYDFCTLISIKVHNIVLMMQVTVTTTYFGHSEQISQERYQYVDCGRNTTYQLGQSEYLNVLQPQQ

SEQ ID NO: 11414 - protein, 858 aa, Homo sapiens
MKKLWVKKRFQKTGHSRRAFGRLTHDSETAEDDISDVQGTQRLELRDDGAFSTPTGGSDTLVGTSLDTPPTSVTGTSEEQVSWWGSGQTVLEQEAGSGGGTRRLPGSPRQAQATGAGPRHLGVEPLVRASRANLVGASWGSEDSLSVASDLYGSAFSLYRGRALSIHVSVPQSGLRREEPDLQPQLASEAPRRPAQPPPSKSALLPPPSPRVGKRSPPGPPAQPAATPTSPHRRTQEPVLPEDTTTEEKRGKKSKSSGPSLAGTAESRPQTPLSEASGRLSALGRSPRLVRAGSRILDKLQFFEERRRSLERSDSPPAPLRPWVPLRKARSLEQPKSERGAPWGTPGASQEELRAPGSVAERRRLFQQKAASLDERTRQRSPASDLELRFAQELGRIRRSTSREELVRSHESLRATLQRAPSPREPGEPPLFSRPSTPKTSRAVSPAAAQPPSPSSAEKPGDEPGRPRSRGPAGRTEPGEGPQQEVRRRDQFPLTRSRAIQECRSPVPPPAADPPEARTKAPPGRKREPPAQAVRFLPWATPGLEGAAVPQTLEKNRAGPEAEKRLRRGPEEDGPWGPWDRRGARSQGKGRRARPTSPELESSDDSYVSAGEEPLEAPVFEIPLQNVVVAPGADVLLKCIITANPPPQVSWHKDGSALRSEGRLLLRAEGERHTLLLREARAADAGSYMATATNELGQATCAASLTVRPGGSTSPFSSPITSDEEYLSPPEEFPEPGETWPRTPTMKPSPSQNRRSSDTGSKAPPTFKVSLMDQSVREGQDVIMSIRVQGEPKPVVSWLRNRQPVRPDQRRFAEEAEGGLCRLRILAAERGDAGFYTCKAVNEYGARQCEARLEVRGE

SEQ ID NO: 11415 - protein, 213 aa, Homo sapiens
MASLSRPSLPSCLCSFLLLLLLQVSSSYAGQFRVIGPRHPIRALVGDEVELPCRISPGKNATGMEVGWYRPPFSRVVHLYRNGKDQDGDQAPEYRGRTELLKDAIGEGKVTLRIRNVRFSDEGGFTCFFRDHSYQEEAAMELKVEDPFYWVSPGVLVLLAVLPVLLLQITVGLIFLCLQYRLRGKLRAEIENLHRTFGQFLEELLFHLEALSG

SEQ ID NO: 11416 - protein, 201 aa, Homo sapiens
MSTEAQRVDDSPSTSGGSSDGDQRESVQQEPEREQVQPKKKEGKISSKTAAKLSTSAKRIQKELAEITLDPPPNCSAGPKGDNIYEWRSTILGPPGSVYEGGVFFLDITFSPDYPFKPPKVTFRTRIYHCNINSQGVICLDILKDNWSPALTISKVLLSICSLLTDCNPADPLVGSIATQYMTNRAEHDRMARQWTKRYAT

SEQ ID NO: 11417 - protein, 224 aa, Homo sapiens
MASLSRPSLPSCLCSFLLLLLLQVSSSYAGQFRVIGPRHPIRALVGDEVELPCRISPGKNATGMEVGWYRPPFSRVVHLYRNGKDQDGDQAPEYRGRTELLKDAIGEGKVTLRIRNVRFSDEGGFTCFFRDHSYQEEAAMELKVEDPFYWVSPGVLVLLAVLPVLLLQITVGLIFLCLQYRLRGKLRAEIENLHRTFESFGVLGPQVKEPKKTGQFLEELRNPF

SEQ ID NO: 11418 - protein, 249 aa, Homo sapiens
MAPSRKFFVGGNWKMNGRKQSLGELIGTLNAAKVPADTEVVCAPPTAYIDFARQKLDPKIAVAAQNCYKVTNGAFTGEISPGMIKDCGATWVVLGHSERRHVFGESDELIGQKVAHALAEGLGVIACIGEKLDEREAGITEKVVFEQTKVIADNVKDWSKVVLAYEPVWAIGTGKTATPQQAQEVHEKLRGWLKSNVSDAVAQSTRIIYGGSVTGATCKELASQPDVDGFLVGGASLKPEFVDIINAKQ

SEQ ID NO: 11419 - protein, 249 aa, Homo sapiens
MAAGMYLEHYLDSIENLPFELQRNFQLMRDLDQRTEDLKAEIDKLATEYMSSARSLSSEEKLALLKQIQEAYGKCKEFGDDKVQLAMQTYEMVDKHIRRLDTDLARFEADLKEKQIESSDYDSSSSKGKKKGRTQKEKKAARARSKGKNSDEEAPKTAQKKLKLVRTSPEYGMPSVTFGSVHPSDVLDMPVDPNEPTYCLCHQVSYGEMIGCDNPDCSIEWFHFACVGLTTKPRGKWFCPRCSQERKKK

SEQ ID NO: 11420 - protein, 1557 aa, Homo sapiens
MAGGVRLLWVSLLVLLAQLGPQPGLGRLGERLRVRFTPVVCGLRCVHGPTGSRCTPTCAPRNATSVDSGAPGGAAPGGPGFRAFLCPLICHNGGVCVKPDRCLCPPDFAGKFCQLHSSGARPPAPAVPGLTRSVYTMPLANHRDDEHGVASMVSVHVEHPQEASVVVHQVERVSGPWEEADAEAVARAEAAARAEAAAPYTVLAQSAPREDGYSDASGFGYCFRELRGGECASPLPGLRTQEVCCRGAGLAWGVHDCQLCSERLGNSERVSAPDGPCPTGFERVNGSCEDVDECATGGRCQHGECANTRGGYTCVCPDGFLLDSSRSSCISQHVISEAKGPCFRVLRDGGCSLPILRNITKQICCCSRVGKAWGRGCQLCPPFGSEGFREICPAGPGYHYSASDLRYNTRPLGQEPPRVSLSQPRTLPATSRPSAGFLPTHRLEPRPEPRPDPRPGPELPLPSIPAWTGPEIPESGPSSGMCQRNPQVCGPGRCISRPSGYTCACDSGFRLSPQGTRCIDVDECRRVPPPCAPGRCENSPGSFRCVCGPGFRAGPRAAECLDVDECHRVPPPCDLGRCENTPGSFLCVCPAGYQAAPHGASCQDVDECTQSPGLCGRGACKNLPGSFRCVCPAGFRGSACEEDVDECAQEPPPCGPGRCDNTAGSFHCACPAGFRSRGPGAPCQDVDECARSPPPCTYGRCENTEGSFQCVCPMGFQPNTAGSECEDVDECENHLACPGQECVNSPGSFQCRTCPSGHHLHRGRCTDVDECSSGAPPCGPHGHCTNTEGSFRCSCAPGYRAPSGRPGPCADVNECLEGDFCFPHGECLNTDGSFACTCAPGYRPGPRGASCLDVDECSEEDLCQSGICTNTDGSFECICPPGHRAGPDLASCLDVDECRERGPALCGSQRCENSPGSYRCVRDCDPGYHAGPEGTCDDVDECQEYGPEICGAQRCENTPGSYRCTPACDPGYQPTPGGGCQDVDECRNRSFCGAHAVCQNLPGSFQCLCDQGYEGARDGRHCVDVNECETLQGVCGAALCENVEGSFLCVCPNSPEEFDPMTGRCVPPRTSAGTFPGSQPQAPASPVLPARPPPPPLPRRPSTPRQGPVGSGRRECYFDTAAPDACDNILARNVTWQECCCTVGEGWGSGCRIQQCPGTETAEYQSLCPHGRGYLAPSGDLSLRRDVDECQLFRDQVCKSGVCVNTAPGYSCYCSNGYYYHTQRLECIDNDECADEEPACEGGRCVNTVGSYHCTCEPPLVLDGSQRRCVSNESQSLDDNLGVCWQEVGADLVCSHPRLDRQATYTECCCLYGEAWGMDCALCPAQDSDDFEALCNVLRPPAYSPPRPGGFGLPYEYGPDLGPPYQGLPYGPELYPPPALPYDPYPPPPGPFARREAPYGAPRFDMPDFEDDGGPYGESEAPAPPGPGTRWPYRSRDTRRSFPEPEEPPEGGSYAGSLAEPYEELEAEECGILDGCTNGRCVRVPEGFTCRCFDGYRLDMTRMACVDINECDEAEAASPLCVNARCLNTDGSFRCICRPGFAPTHQPHHCAPARPRA

SEQ ID NO: 11421 - protein, 731 aa, Homo sapiens
LPTGFVAPILCVLLPSPTREAATVASATGDSASERESAAPAAAPTAEAPPPSVVTRPEPQALPSPAIRAPLPDLYPFGTMRGGGFGDRDRDRDRGGFGARGGGGLPPKKFGNPGERLRKKKWDLSELPKFEKNFYVEHPEVARLTPYEVDELRRKKEITVRGGDVCPKPVFAFHHANFPQYVMDVLMDQHFTEPTPIQCQGFPLALSGRDMVGIAQTGSGKTLAYLLPAIVHINHQPYLERGDGPICLVLAPTRELAQQVQQVADDYGKCSRLKSTCIYGGAPKGPQIRDLERGVEICIATPGRLIDFLESGKTNLRRCTYLVLDEADRMLDMGFEPQIRKIVDQIRPDRQTLMWSATWPKEVRQLAEDFLRDYTQINVGNLELSANHNILQIVDVCMESEKDHKLIQLMEEIMAEKENKTIIFVETKRRCDDLTRRMRRDGWPAMCIHGDKSQPERDWVLNEFRSGKAPILIATDVASRGLDVEDVKFVINYDYPNSSEDYVHRIGRTARSTNKGTAYTFFTPGNLKQARELIKVLEEANQAINPKLMQLVDHRGGGGGGGKGGRSRYRTTSSANNPNLMYQDECDRRLRGVKDGGRRDSASYRDRSETDRAGYANGSGYGSPNSAFGAQAGQYTYGQGTYGAAAYGTSSYTAQEYGAGTYGASSTTSTGRSSQSSSQQFSGIGRSGQQPQPLMSQQFAQPPGATNMIGYMGQTAYQYPPPPPPPPPSRK

SEQ ID NO: 11422 - protein, 262 aa, Homo sapiens
MEHLERCEWLLRGTLVRAAVRRYLPWALVASMLAGSLLKELSPLPESYLSNKRNVLNVYFVKVAWAWTFCLLLPFIALTNYHLTGKAGLVLRRLSTLLVGTAIWYICTSIFSNIEHYTGSCYQSPALEGVRKEHQSKQQCHQEGGFWHGFDISGHSFLLTFCALMIVEEMSVLHEVKTDRSHCLHTAITTLVVALGILTFIWVLMFLCTAVYFHNLSQKVFGTLFGLLSWYGTYGFWYPKAFSPGLPPQSCSLNLKQDSYKK

SEQ ID NO: 11423 - protein, 268 aa, Homo sapiens
MNGTANPLLDREEHCLRLGESFEKRPRASFHTIRYDFKPASIDTSCEGELQVGKGDEVTITLPHIPGSTPPMTVFKGNKRPYQKDCVLIINHDTGEYVLEKLSSSIQVKKTRAEGSSKIQARMEQQPTRPPQTSQPPPPPPPMPFRAPTKPPVGPKTSPLKDNPSPEPQLDDIKRELRAEVDIIEQMSSSSGSSSSDSESSSGSDDDSSSSGGEDNGPASPPQPSHQQPYNSRPAVANGTSRPQGSNQLMNTLRNDLQLSESGSDSDD

SEQ ID NO: 11424 - protein, 489 aa, Homo sapiens
MTVVGNPRSWSCQWLPILILLLGTGHGPGVEGVTHYKAGDPVILYVNKVGPYHNPQETYHYYQLPVCCPEKIRHKSLSLGEVLDGDRMAESLYEIRFRENVEKRILCHMQLSSAQVEQLRQAIEELYYFEFVVDDLPIRGFVGYMEESGFLPHSHKIGLWTHLDFHLEFHGDRIIFANVSVRDVKPHSLDGLRPDEFLGLTHTYSVRWSETSVERRSDRRRGDDGGFFPRTLEIHWLSIINSMVLVFLLVGFVAVILMRVLRNDLARYNLDEETTSAGSGDDFDQGDNGWKIIHTDVFRFPPYRGLLCAVLGVGAQFLALGTGIIVMALLGMFNVHRHGAINSAAILLYALTCCISGYVSSHFYRQIGGERWVWNIILTTSLFSVPFFLTWSVVNSVHWANGSTQALPATTILLLLTVWLLVGFPLTVIGGIFGKNNASPFDAPCRTKNIAREIPPQPWYKSTVIHMTVGGFLPFRYPPFIPWLLLSGS

SEQ ID NO: 11425 - protein, 393 aa, Homo sapiens
MASGRARCTRKLRNWVVEQVESGQFPGVCWDDTAKTMFRIPWKHAGKQDFREDQDAAFFKAWAIFKGKYKEGDTGGPAVWKTRLRCALNKSSEFKEVPERGRMDVAEPYKVYQLLPPGIVSGQPGTQKVPSKRQHSSVSSERKEEEDAMQNCTLSPSVLQDSLNNEEEGASGGAVHSDIGSSSSSSSPEPQEVTDTTEAPFQGDQRSLEFLLPPEPDYSLLLTFIYNGRVVGEAQVQSLDCRLVAEPSGSESSMEQVLFPKPGPLEPTQRLLSQLERGILVASNPRGLFVQRLCPIPISWNAPQAPPGPGPHLLPSNECVELFRTAYFCRDLVRYFQGLGPPPKFQVTLNFWEESHGSSHTPQNLITVKMEQAFARYLLEQTPEQQAAILSLV

SEQ ID NO: 11426 - protein, 234 aa, Homo sapiens
MCFPKVLSDDMKKLKARMVMLLPTSAQGLGAWVSACDTEDTVGHLGPWRDKDPALWCQLCLSSQHQAIERFYDKMQNAESGRGQVMSSLAELEDDFKEGYLETVAAYYEEQHPELTPLLEKERDGLRCRGNRSPVPDVEDPATEEPGESFCDKVMRWFQAMLQRLQTWWHGVLAWVKEKVVALVHAVQALWKQFQSFCCSLSELFMSSFQSYGAPRGDKEELTPQKCSEPQSSK

SEQ ID NO: 11427 - protein, 321 aa, Homo sapiens
MRCYVNIPHPTSGTISSASFHPQQFQYTLDNNVLTLEQRKFYEENGFLVIKNLVPDADIQRFRNEFEKICRKEVKPLGLTVMRDVTISKSEYAPSEKMITKVQDFQEDKELFRYCTLPEILKYVECFTGPNIMAMHTMLINKPPDSGNCKKTSRHPLHQDLHYFPFRPSDLIVCAWTAMEHISRNNGCLVVLPGTHKGSLKPHDYPKWEGGVNKMFHGIQDYEENKARVHLVMEKGDTVFFHPLLIHGSGQNKTQGFRKAISCHFASADCHYIDVKGTSQENIEKEVVGIAHKFFGAENSVNLKDIWMFRARLVKGERTNL

SEQ ID NO: 11428 - protein, 317 aa, Homo sapiens
MVRARHQPGGLCLLLLLLCQFMEDRSAQAGNCWLRQAKNGRCQVLYKTELSKEECCSTGRLSTSWTEEDVNDNTLFKWMIFNGGAPNCIPCKETCENVDCGPGKKCRMNKKNKPRCVCAPDCSNITWKGPVCGLDGKTYRNECALLKARCKEQPELEVQYQGRCKKTCRDVFCPGSSTCVVDQTNNAYCVTCNRICPEPASSEQYLCGNDGVTYSSACHLRKATCLLGRSIGLAYEGKCIKAKSCEDIQCTGGKKCLWDFKVGRGRCSLCDELCPDSKSDEPVCASDNATYASECAMKEAACSSGVLLEVKHSGSCN

SEQ ID NO: 11429 - protein, 135 aa, Homo sapiens [sequence omitted]

SEQ ID NO: 11430 - protein, 441 aa, Homo sapiens
MAALYRPGLRLNWHGLSPLGWPSCRSIQTLRVLSGDLGQLPTGIRDFVEHSARLCQPEGIHICDGTEAENTATLTLLEQQGLIRKLPKYNNCWLARTDPKDVARVESKTVIVTPSQRDTVPLPPGGARGQLGNWMSPADFQRAVDERFPGCMQGRTMYVLPFSMGPVGSPLSRIGVQLTDSAYVVASMRIMTRLGTPVLQALGDGDFVKCLHSVGQPLTGQGEPVSQWPCNPEKTLIGHVPDQREIISFGSGYGGNSLLGKKCFALRIASRLARDEGWLAEHMLILGITSPAGKKRYVAAAFPSACGKTNLAMMRPALPGWKVECVGDDIAWMRFDSEGRLRAINPENGFFGVAPGTSATTNPNAMATIQSNTIFTNVAETSDGGVYWEGIDQPLPPGVTVTSWLGKPWKPGMCGGEGVAQPPGLSTLMVEKLSPQPPTIF

SEQ ID NO: 11431 - protein, 126 aa, Homo sapiens
MPEPSKSAPAPKKGSKKAVTKAQKKDGKKRKRSRKESYSVYVYKVLKQVHPDTGISSKAMGIMNSFVNDIFERIAGEASRLAHYNKRSTITSREIQTAVRLLLPGELAKHAVSEGTKAVTKYTSSK

SEQ ID NO: 11432 - protein, 170 aa, Homo sapiens
MTELQSALLLRRQLAELNKNPVEGFSAGLIDDNDLYRWEVLIIGPPDTLYEGGVFKAHLTFPKDYPLRPPKMKFITEIWHPNVDKNGDVCISILHEPGEDKYGYEKPEERWLPIHTVETIMISVISMLADPNGDSPANVDAAKEWREDRNGEFKRKVARCVRKSQETAFE

SEQ ID NO: 11433 - protein, 311 aa, Homo sapiens
MARLGSTGGVSGRVVTQHRDSAPFLGAPRLGLRELGPIRGTAPEWHGRWNAAERSDKMYQVPLPLDRDGTLVRLRFTMVALVTVCCPLVAFLFCILWSLLFHFKETTATHCGVPNYLPSVSSAIGGEVPQRYVWRFCIGLHSAPRFLVAFAYWNHYLSCTSPCSCYRPLCRLNFGLNVVENLALLVLTYVSSSEDFTIHENAFIVFIASSLGHMLLTCILWRLTKKHTVSQEDRKSYSWKQRLFIINFISFFSALAVYFRHNMYCEAGVYTIFAILEYTVVLTNMAFHMTAWWDFGNKELLITSQPEEKRF

SEQ ID NO: 11434 - protein, 456 aa, Homo sapiens
MFLLLPFDSLIVNLLGISLTVLFTLLLVFIIVPAIFGVSFGIRKLYMKSLLKIFAWATLRMERGAKEKNHQLYKPYTNGIIAKDPTSLEEEIKEIRRSGSSKALDNTPEFELSDIFYFCRKGMETIMDDEVTKRFSAEELESWNLLSRTNYNFQYISLRLTVLWGLGVLIRYCFLLPLRIALAFTGISLLVVGTTVVGYLPNGRFKEFMSKHVHLMCYRICVRALTAIITYHDRENRPRNGGICVANHTSPIDVIILASDGYYAMVGQVHGGLMGVIQRAMVKACPHVWFERSEVKDRHLVAKRLTEHVQDKSKLPILIFPEGTCINNTSVMMFKKGSFEIGATVYPVAIKYDPQFGDAFWNSSKYGMVTYLLRMMTSWAIVCSVWYLPPMTREADEDAVQFANRVKSAIARQGGLVDLLWDGGLKREKVKDTFKEEQQKLYSKMIVGNHKDRSRS

SEQ ID NO: 11435 - protein, 920 aa, Homo sapiens
MFNKSFGTPFGGGTGGFGTTSTFGQNTGFGTTSGGAFGTSAFGSSNNTGGLFGNSQTKPGGLFGTSSFSQPATSTSTGFGFGTSTGTANTLFGTASTGTSLFSSQNNAFAQNKPTGFGNFGTSTSSGGLFGTTNTTSNPFGSTSGSLFGPSSFTAAPTGTTIKFNPPTGTDTMVKAGVSTNISTKHQCITAMKEYESKSLEELRLEDYQANRKGPQNQVGAGTTTGLFGSSPATSSATGLFSSSTTNSGFAYGQNKTAFGTSTTGFGTNPGGLFGQQNQQTTSLFSKPFGQATTTQNTGFSFGNTSTIGQPSTNTMGLFGVTQASQPGGLFGTATNTSTGTAFGTGTGLFGQTNTGFGAVGSTLFGNNKLTTFGSSTTSAPSFGTTSGGLFGFGTNTSGNSIFGSKPAPGTLGTGLGAGFGTALGAGQASLFGNNQPKIGGPLGTGAFGAPGFNTTTATLGFGAPQAPVALTDPNASAAQQAVLQQHINSLTYSPFGDSPLFRNPMSDPKKKEERLKPTNPAAQKALTTPTHYKLTPRPATRVRPKALQTTGTAKSHLFDGLDDDEPSLANGAFMPKKSIKKLVLKNLNNSNLFSPVNRDSENLASPSEYPENGERFSFLSKPVDENHQQDGDEDSLVSHFYTNPIAKPIPQTPESAGNKHSNSNSVDDTIVALNMRAALRNGLEGSSEETSFHDESLQDDREEIENNSYHMHPAGIILTKVGYYTIPSMDDLAKITNEKGECIVSDFTIGRKGYGSIYFEGDVNLTNLNLDDIVHIRRKEVVVYLDDNQKPPVGEGLNRKAEVTLDGVWPTDKTSRCLIKSPDRLADINYEGRLEAVSRKQGAQFKEYRPETGSWVFKVSHFSKYGLQDSDEEEEEHPSKTSTKKLKTAPLPPASQTTPLQMALNGKPAPPPQVEKKGQ

SEQ ID NO: 11436 - protein, 937 aa, Homo sapiens
MFNKSFGTPFGGGTGGFGTTSTFGQNTGFGTTSGGAFGTSAFGSSNNTGGLFGNSQTKPGGLFGTSSFSQPATSTSTGFGFGTSTGTANTLFGTASTGTSLFSSQNNAFAQNKPTGFGNFGTSTSSGGLFGTTNTTSNPFGSTSGSLFGPSSFTAAPTGTTIKFNPPTGTDTMVKAGVSTNISTKHQCITAMKEYESKSLEELRLEDYQANRKGPQNQVGAGTTTGLFGSSPATSSATGLFSSSTTNSGFAYGQNKTAFGTSTTGFGTNPGGLFGQQNQQTTSLFSKPFGQATTTQNTGFSFGNTSTIGQPSTNTMGLFGVTQASQPGGLFGTATNTSTGTAFGTGTGLFGQTNTGFGAVGSTLFGNNKLTTFGSSTTSAPSFGTTSGGLFGNKPTLTLGTNTNTSNFGFGTNTSGNSIFGSKPAPGTLGTGLGAGFGTALGAGQASLFGNNQPKIGGPLGTGAFGAPGFNTTTATLGFGAPQAPVALTDPNASAAQQAVLQQHINSLTYSPFGDSPLFRNPMSDPKKKEERLKPTNPAAQKALTTPTHYKLTPRPATRVRPKALQTTGTAKSHLFDGLDDDEPSLANGAFMPKKSIKKLVLKNLNNSNLFSPVNRDSENLASPSEYPENGERFSFLSKPVDENHQQDGDEDSLVSHFYTNPIAKPIPQTPESAGNKHSNSNSVDDTIVALNMRAALRNGLEGSSEETSFHDESLQDDREEIENNSYHMHPAGIILTKVGYYTIPSMDDLAKITNEKGECIVSDFTIGRKGYGSIYFEGDVNLTNLNLDDIVHIRRKEVVVYLDDNQKPPVGEGLNRKAEVTLDGVWPTDKTSRCLIKSPDRLADINYEGRLEAVSRKQGAQFKEYRPETGSWVFKVSHFSKYGLQDSDEEEEEHPSKTSTKKLKTAPLPPASQTTPLQMALNGKPAPPPQVEKKGQ

SEQ ID NO: 11437 - protein, 477 aa, Homo sapiens
MTMVDTEMPFWPTNFGISSVDLSVMEDHSHSFDIKPFTTVDFSSISTPHYEDIPFTRTDPVVADYKYDLKLQEYQSAIKVEPASPPYYSEKTQLYNKPHEEPSNSLMAIECRVCGDKASGFHYGVHACEGCKGFFRRTIRLKLIYDRCDLNCRIHKKSRNKCQYCRFQKCLAVGMSHNAIRFGRMPQAEKEKLLAEISSDIDQLNPESADLRALAKHLYDSYIKSFPLTKAKARAILTGKTTDKSPFVIYDMNSLMMGEDKIKFKHITPLQEQSKEVAIRIFQGCQFRSVEAVQEITEYAKSIPGFVNLDLNDQVTLLKYGVHEIIYTMLASLMNKDGVLISEGQGFMTREFLKSLRKPFGDFMEPKFEFAVKFNALELDDSDLAIFIAVIILSGDRPGLLNVKPIEDIQDNLLQALELQLKLNHPESSQLFAKLLQKMTDLRQIVTEHVQLLQVIKKTETDMSLHPLLQEIYKDLY

SEQ ID NO: 11438 - protein, 325 aa, Homo sapiens
MGPRARPALLLLMLLQTAVLQGRLLPLGYVDDQLFVFYDHESRRVEPRTPWVSSRISSQMWLQLSQSLKGWDHMFTVDFWTIMENHNHSKESHTLQVILGCEMQEDNSTEGYWKYGYDGQDHLEFCPDTLDWRAAEPRAWPTKLEWERHKIRARQNRAYLERDCPAQLQQLLELGRGVLDQQVPPLVKVTHHVTSSVTTLRCRALNYYPQNITMKWLKDKQPMDAKEFEPKDVLPNGDGTYQGWITLAVPPGEEQRYTCQVEHPGLDQPLIVIWEPSPSGTLVIGVISGIAVFVVILFIGILFIILRKRQGSRGAMGHYVLAERE

SEQ ID NO: 11439 - protein, 136 aa, Homo sapiens
MTVRRLSLLCRDLWALWLLLKAGADEIMHQDIVPLCAADIQDQLKKRFAYLSGGRGQDGSPVITFPDYPAFSEIPDKEFQNVMTYLTSIPSGGQESSIRPVSCRLTWEGCRGGLSSDVLVPASRKMLRMSASHQTV

SEQ ID NO: 11440 - protein, 1032 aa, Homo sapiens [sequence omitted]

SEQ ID NO: 11441 - protein, 133 aa, Homo sapiens
MAQISSGGGGQSRCLLFALVLAICVHSQGSEMGSEKEQSPEPHLPEEGEGGKPWRVDDSEGSWIPPGEKEHGQESLSDELQETHPKKPWQKVTVRARELGDPIAHPRHEADEKPFICAQCGKTFNNTSNLRTH

SEQ ID NO: 11442 - protein, 1491 aa, Homo sapiens
MYSEWRSLHLVIQNDQGHTSVLHSYPESVGREVANAVVRPLGQVLGTPSVAGSENLLKTDKEVKWTMEVICYGLTLPLDGETVKYCVDVYTDWIMALVLPKDSIPLPVIKEPNQYVQTILKHLQNLFVPRQEQGSSQIRLCLQVLRAIQKLARESSLMARETWEVLLLFLLQINDILLAPPTVQGGIAENLAEKLIGVLFEVWLLACTRCFPTPPYWKTAKEMVANWRHHPAVVEQWSKVICALTSRLLRFTYGPSFPAFKVPDEDASLIPPEMDNECVAQTWFRFLHMLSNPVDLSNPAIISSTPKFQEQFLNVSGMPQELNQYPCLKHLPQIFFRAMRGISCLVDAFLGISRPRSDSAPPTPVNRLSMPQSAAVSTTPPHNRRHRAVTVNKATMKTSTVSTAHASKVQHQTSSTSPLSSPNQTSSEPRPLPAPRRPKVNSILNLFGSWLFDAAFVHCKLHNGINRDSSMTAITTQASMEFRRKGSQMSTDTMVSNPMFDASEFPDNYEAGRAEACGTLCRIFCSKKTGEEILPAYLSRFYMLLIQGLQINDYVCHPVLASVILNSPPLFCCDLKGIDVVVPYFISALETILPDRELSKFKSYVNPTELRRSSINILLSLLPLPHHFGTVKSEVVLEGKFSNDDSSSYDKPITFLSLKLRLVNILIGALQTETDPNNTQMILGAMLNIVQDSALLEAIGCQMEMGGGENNLKSHSRTNSGISSASGGSTEPTTPDSERPAQALLRDYDSAAGLLIRSIHLVTQRLNSQWRQDMSISLAALELLSGLAKVKVMVDSGDRKRAISSVCTYIVYQCSRPAPLHSRDLHSMIVAAFQCLCVWLTEHPDMLDEKDCLKEVLEIVELGISGSKSKNNEQEVKYKGDKEPNPASMRVKDAAEATLTCIMQLLGAFPSPSGPASPCSLVNETTLIKYSRLPTINKHSFRYFVLDNSVILAMLEQPLGNEQNDFFPSVTVLVRGMSGRLAWAQQLCLLPRGAKANQKLFVPEPRPVPKNDVGFKYSVKHRPFPEEVDKIPFVKADLSIPDLHEIVTEELEERHEKLRSGMAQQIAYEIHLEQQSEEELQKRSFPDPVTDCKPPPPAQEFQTARLFLSHFGFLSLEALKEPANSRLPPHLIALDSTIPGFFDDIGYLDLLPCRPFDTVFIFYMKPGQKTNQEILKNVESSRTVQPHFLEFLLSLGWSVDVGRHPGWTGHVSTSWSINCCDDGEGSQQEEVISSEDIGASIFNGQKKVLYYADALTEIAFVVPSPVESLTDSLESNISDQDSDSNMDLMPGILKQPSLTLELFPNHTDNLNSSQRLSPSSRMRKLPQGRPVPPLGPETRVSVVWVERYDDIENFPLSELMTEISTGVETTANSSTSLRSTTLEKEVPVIFIHPLNTGLFRIKIQGATGKFNMVIPLVDGMIVSRRALGFLVRQTVINICRRKRLESDSYSPPHVRRKQKITDIVNKYRNKQLEPEFYTSLFQEVGLKNCSS

SEQ ID NO: 11443 - protein, 697 aa, Homo sapiens
MAVRALKLLTTLLAVVAAASQAEVESEAGWGMVTPDLLFAEGTAAYARGDWPGVVLSMERALRSRAALRALRLRCRTQCAADFPWELDPDWSPSPAQASGAAALRDLSFFGGLLRRAACLRRCLGPPAAHSLSEEMELEFRKRSPYNYLQVAYFKINKLEKAVAAAHTFFVGNPEHMEMQQNLDYYQTMSGVKEADFKDLETQPHMQEFRLGVRLYSEEQPQEAVPHLEAALQEYFVAYEECRALCEGPYDYDGYNYLEYNADLFQAITDHYIQVLNCKQNCVTELASHPSREKPFEDFLPSHYNYLQFAYYNIGNYTQAVECAKTYLLFFPNDEVMNQNLAYYAAMLGEEHTRSIGPRESAKEYRQRSLLEKELLFFAYDVFGIPFVDPDSWTPEEVIPKRLQEKQKSERETAVRISQEIGNLMKEIETLVEEKTKESLDVSRLTREGGPLLYEGISLTMNSKLLNGSQRVVMDGVISDHECQELQRLTNVAATSGDGYRGQTSPHTPNEKFYGVTVFKALKLGQEGKVPLQSAHLYYNVTEKVRRIMESYFRLDTPLYFSYSHLVCRTAIEEVQAERKDDSHPVHVDNCILNAETLVCVKEPPAYTFRDYSAILYLNGDFDGGNFYFTELDAKTVTAEVQPQCGRAVGFSSGTENPHGVKAVTRGQRCAIALWFTLDPRHSERVRAARAGQGAGR

SEQ ID NO: 11444 - protein, 487 aa, Homo sapiens
MSLPNSSCLLEDKMCEGNKTTMASPQLMPLVVVLSTICLVTVGLNLLVLYAVRSERKLHTVGNLYIVSLSVADLIVGAVVMPMNILYLLMSKWSLGRPLCLFWLSMDYVASTASIFSVFILCIDRYRSVQQPLRYLKYRTKTRASATILGAWFLSFLWVIPILGWNHFMQQTSVRREDKCETDFYDVTWFKVMTAIINFYLPTLLMLWFYAKIYKAVRQHCQHRELINRSLPSFSEIKLRPENPKGDAKKPGKESPWEVLKRKPKDAGGGSVLKSPSQTPKEMKSPVVFSQEDDREVDKLYCFPLDIVHMQAAAEGSSRDYVAVNRSHGQLKTDEQGLNTHGASEISEDQMLGDSQSFSRTDSDTTTETAPGKGKLRSGSNTGLDYIKFTWKRLRSHSRQYVSGLHMNRERKAAKQLGFIMAAFILCWIPYFIFFMVIAFCKNCCNEHLHMFTIWLGYINSTLNPLIYPLCNENFKKTFKRILHIRS

SEQ ID NO: 11445 - protein, 375 aa, Homo sapiens
MSSSLRPGPSRWRRAASIVLAAGWSRPETATPPSRPPPAEGFRLLLLQRSPHQGFMPGAHVFSGGVLDAADRSADWLGLFAPHHGPPRFGLGPAPFSRTAFPSLPDTDDHKTDNTGTLPEDVAFRICAVREAFEEAGVLLLRPRTSPPGPAPGPGLALEPPPGLASWRDRVRQDPRHFLRLCAHLDCTPDIWALHNWSAWLTPFLRGTTRRFDTAFFLCCLREPPPVYPDLAEVVGYQWSSPSEATESFLSKEIWLPPPQFYEVRRLANFASLSDLHKFCLGRALEGLERWLPIILLTADGMVHLLPGDELYLEDSDFLENLMSTEKKTEEIMKEGKQFHRIVTYHRHLYDIHVTVQPKYKHVYPKNSVVRKSHL

SEQ ID NO: 11446 - protein, 605 aa, Homo sapiens
MMDLELPPPGLPSQQDMDLIDILWRQDIDLGVSREVFDFSQRRKEYELEKQKKLEKERQEQLQKEQEKAFFAQLQLDEETGEFLPIQPAQHIQSETSGSANYSQVAHIPKSDALYFDDCMQLLAQTFPFVDDNEVSSATFQSLVPDIPGHIESPVFIATNQAQSPETSVAQVAPVDLDGMQQDIEQVWEELLSIPELQCLNIENDKLVETTMVPSPEAKLTEVDNYHFYSSIPSMEKEVGNCSPHFLNAFEDSFSSILSTEDPNQLTVNSLNSDATVNTDFGDEFYSAFIAEPSISNSMPSPATLSHSLSELLNGPIDVSDLSLCKAFNQNHPESTAEFNDSDSGISLNTSPSVASPEHSVESSSYGDTLLGLSDSEVEELDSAPGSVKQNGPKTPVHSSGDMVQPLSPSQGQSTHVHDAQCENTPEKELPVSPGHRKTPFTKDKHSSRLEAHLTRDELRAKALHIPFPVEKIINLPVVDFNEMMSKEQFNEAQLALIRDIRRRGKNKVAAQNCRKRKLENIVELEQDLDHLKDEKEKLLKEKGENDKSLHLLKKQLSTLYLEVFSMLRDEDGKPYSPSEYSLQQTRDGNVFLVPKSKKPDVKKN

SEQ ID NO: 11447 - protein, 80 aa, Homo sapiens
MARTLEPLAKKIFKGVLVAELVGVFGAYFLFSKMHTSQDFRQTMSKKYPFILEVYYKSTEKSGMYGIRELDQKTWLNSKN

SEQ ID NO: 11448 - protein, 239 aa, Homo sapiens
MALAALMIALGSLGLHTWQAQAVPILPLGLAPDTFDDTYVGCAEEMEEKAAPLLKEEMAHHALLRESWEAAQETWEDKRRGLTLPPGFKAQNGIAIMVYTNSSNTLYWELNQAVRTGGGSRELYMRHFPFKALHFYLIRALQLLRGSGGCSRGPGEVVFRGVGSLRFEPKRLGDSVRLGQFASSSLDKAVAHRFGEKRRGCVSAPGVQLGSQSEGASSLPPWKTLLLAPGEFQLSGVGP

SEQ ID NO: 11449 - protein, 171 aa, Homo sapiens
MKKCLLPVLITCMQTAICKDRMMMIMILLVNYRPDEFIECEDPVDHVGNATASQELGYGCLKFGGQAYSDVEHTSVQCHALDGIECASPRTFLRENKPCIKYTGHYFITTLLYSFFLGCFGVDRFCLGHTGTAVGKLLTLGGLGIWWFVDLILLITGGLMPSDGSNWCTVY

SEQ ID NO: 11450 - protein, 215 aa, Homo sapiens
MASETEKTHALLQTCSTESLISSLGLGAFCLVADRLLQFSTIQQNDWLRALSDNAVHCVIGMWSWAVVTGIKKKTDFGEIILAGFLASVIDVDHFFLAGSMSLKAALTLPRRPFLHCSTVIPVVVLTLKFTMHLFKLKDSWCFLPWMLFISWTSHHIRDGIRHGLWICPFGKTSPLPFWLYVIITSSLPHICSFVMYLTGTRQMMSSKHGVRIDV

SEQ ID NO: 11451 - protein, 820 aa, Homo sapiens
MWSWKCLLFWAVLVTATLCTARPSPTLPEQAQPWGAPVEVESFLVHPGDLLQLRCRLRDDVQSINWLRDGVQLAESNRTRITGEEVEVQDSVPADSGLYACVTSSPSGSDTTYFSVNVSDALPSSEDDDDDDDSSSEEKETDNTKPNPVAPYWTSPEKMEKKLHAVPAAKTVKFKCPSSGTPNPTLRWLKNGKEFKPDHRIGGYKVRYATWSIIMDSVVPSDKGNYTCIVENEYGSINHTYQLDVVERSPHRPILQAGLPANKTVALGSNVEFMCKVYSDPQPHIQWLKHIEVNGSKIGPDNLPYVQILKTAGVNTTDKEMEVLHLRNVSFEDAGEYTCLAGNSIGLSHHSAWLTVLEALEERPAVMTSPLYLEIIIYCTGAFLISCMVGSVIVYKMKSGTKKSDFHSQMAVHKLAKSIPLRRQVTVSADSSASMNSGVLLVRPSRLSSSGTPMLAGVSEYELPEDPRWELPRDRLVLGKPLGEGCFGQVVLAEAIGLDKDKPNRVTKVAVKMLKSDATEKDLSDLISEMEMMKMIGKHKNIINLLGACTQDGPLYVIVEYASKGNLREYLQARRPPGLEYCYNPSHNPEEQLSSKDLVSCAYQVARGMEYLASKKCIHRDLAARNVLVTEDNVMKIADFGLARDIHHIDYYKKTTNGRLPVKWMAPEALFDRIYTHQSDVWSFGVLLWEIFTLGGSPYPGVPVEELFKLLKEGHRMDKPSNCTNELYMMMRDCWHAVPSQRPTFKQLVEDLDRIVALTSNQEYLDLSMPLDQYSPSFPDTRSSTCSSGEDSVFSHEPLPEEPCLPRHPAQLANGGLKRR

SEQ ID NO: 11452 - protein, 733 aa, Homo sapiens
MWSWKCLLFWAVLVTATLCTARPSPTLPEQDALPSSEDDDDDDDSSSEEKETDNTKPNPVAPYWTSPEKMEKKLHAVPAAKTVKFKCPSSGTPNPTLRWLKNGKEFKPDHRIGGYKVRYATWSIIMDSVVPSDKGNYTCIVENEYGSINHTYQLDVVERSPHRPILQAGLPANKTVALGSNVEFMCKVYSDPQPHIQWLKHIEVNGSKIGPDNLPYVQILKHSGINSSDAEVLTLFNVTEAQSGEYVCKVSNYIGEANQSAWLTVTRPVAKALEERPAVMTSPLYLEIIIYCTGAFLISCMVGSVIVYKMKSGTKKSDFHSQMAVHKLAKSIPLRRQVTVSADSSASMNSGVLLVRPSRLSSSGTPMLAGVSEYELPEDPRWELPRDRLVLGKPLGEGCFGQVVLAEAIGLDKDKPNRVTKVAVKMLKSDATEKDLSDLISEMEMMKMIGKHKNIINLLGACTQDGPLYVIVEYASKGNLREYLQARRPPGLEYCYNPSHNPEEQLSSKDLVSCAYQVARGMEYLASKKCIHRDLAARNVLVTEDNVMKIADFGLARDIHHIDYYKKTTNGRLPVKWMAPEALFDRIYTHQSDVWSFGVLLWEIFTLGGSPYPGVPVEELFKLLKEGHRMDKPSNCTNELYMMMRDCWHAVPSQRPTFKQLVEDLDRIVALTSNQEYLDLSMPLDQYSPSFPDTRSSTCSSGEDSVFSHEPLPEEPCLPRHPAQLANGGLKRR

SEQ ID NO: 11453 - protein, 308 aa, Homo sapiens
MIHDAQMDYYGTRLATCSSDRSVKIFDVRNGGQILIADLRGHEGPVWQVAWAHPMYGNILASCSYDRKVIIWREENGTWEKSHEHAGHDSSVNSVCWAPHDYGLILACGSSDGAISLLTYTGEGQWEVKKINNAHTIGCNAVSWAPAVVPGSLIDHPSGQKPNYIKRFASGGCDNLIKLWKEEEDGQWKEEQKLEAHSDWVRDVAWAPSIGLPTSTIASCSQDGRVFIWTCDDASSNTWSPKLLHKFNDVVWHVSWSITANILAVSGGDNKVTLWKESVDGQWVCISDVNKGQGSVSASVTEGQQNEQ

SEQ ID NO: 11454 - protein, 748 aa, Homo sapiens
MADSSGQQGKGRRVQPQWSPPAGTQPCRLHLYNSLTRNKEVFIPQDGKKVTWYCCGPTVYDASHMGHARSYISFDILRRVLKDYFKFDVFYCMNITDIDDKIIKRARQNHLFEQYREKRPEAAQLLEDVQAALKPFSVKLNETTDPDKKQMLERIQHAVQLATEPLEKAVQSRLTGEEVNSCVEVLLEEAKDLLSDWLDSTLGCDVTDNSIFSKLPKFWEGDFHRDMEALNVLPPDVLTRVSEYVPEIVNFVQKIVDNGYGYVSNGSVYFDTAKFASSEKHSYGKLVPEAVGDQKALQEGEGDLSISADRLSEKRSPNDFALWKASKPGEPSWPCPWGKGRPGWHIECSAMAGTLLGASMDIHGGGFDLRFPHHDNELAQSEAYFENDCWVRYFLHTGHLTIAGCKMSKSLKNFITIKDALKKHSARQLRLAFLMHSWKDTLDYSSNTMESALQYEKFLNEFFLNVKDILRAPVDITGQFEKWGEEEAELNKNFYDKKTAIHKALCDNVDTRTVMEEMRALVSQCNLYMAARKAVRKRPNQALLENIALYLTHMLKIFGAVEEDSSLGFPVGGPGTSLSLEATVMPYLQVLSEFREGVRKIAREQKVPEILQLSDALRDNILPELGVRFEDHEGLPTVVKLVDRNTLLKEREEKRRVEEEKRKKKEEAARRKQEQEAAKLAKMKIPPSEMFLSETDKYSKFDENGLPTHDMEGKELSKGQAKKLKKLFEAQEKLYKEYLQMAQNGSFQ

SEQ ID NO: 11455 - protein, 284 aa, Homo sapiens
MIHDAQMDYYGTRLATCSSDRSVKIFDVRNGGQILIADLRGHEGPVWQVAWAHPMYGNILASCSYDRKVIIWREENGTWEKSHEHAGHDSSVNSVCWAPHDYGLILACGSSDGAISLLTYTGEGQWEVKKINNAHTIGCNAVSWAPAVVPGSLIDHPSGQKPNYIKRFASGGCDNLIKLWKEEEDGQWKEEQKLEAHSDWVRDVAWAPSIGLPTSTIASCSQDGRVFIWTCDDASSNTWSPKLLHKFNDVVWHVSWSITANILAVSGGDNKEELQMQPQIDHLP

SEQ ID NO: 11456 - protein, 638 aa, Homo sapiens
MSDKSELKAELERKKQRLAQIREEKKRKEEERKKKETDQKKEAVAPVQEESDLEKKRREAEALLQSMGLTPESPIVFSEYWVPPPMSPSSKSVSTPSEAGSQDSGDGAVGSRTLHWDTDPSVLQLHSDSDLGRGPIKLGMAKITQVDFPPREIVTYTKETQTPVMAQPKEDEEEDDDVVAPKPPIEPEEEKTLKKDEENDSKAPPHELTEEEKQQILHSEEFLSFFDHSTRIVERALSEQINIFFDYSGRDLEDKEGEIQAGAKLSLNRQFFDERWSKHRVVSCLDWSSQYPELLVASYNNNEDAPHEPDGVALVWNMKYKKTTPEYVFHCQSAVMSATFAKFHPNLVVGGTYSGQIVLWDNRSNKRTPVQRTPLSAAAHTHPVYCVNVVGTQNAHNLISISTDGKICSWSLDMLSHPQDSMELVHKQSKAVAVTSMSFPVGDVNNFVVGSEEGSVYTACRHGSKAGISEMFEGHQGPITGIHCHAAVGAVDFSHLFVTSSFDWTVKLWTTKNNKPLYSFEDNADYVYDVMWSPTHPALFACVDGMGRLDLWNLNNDTEVPTASISVEGNPALNRVRWTHSGREIAVGDSEGQIVIYDVGEQIAVPRNDEWARFGRTLAEINANRADAEEEAATRIPA

SEQ ID NO: 11457 - protein, 326 aa, Homo sapiens
MNTSPGTVGSDPVILATAGYDHTVRFWQAHSGICTRTVQHQDSQVNALEVTPDRSMIAAAGYQHIRMYDLNSNNPNPIISYDGVNKNIASVGFHEDGRWMYTGGEDCTARIWDLRSRNLQCQRIFQVNAPINCVCLHPNQAELIVGDQSGAIHIWDLKTDHNEQLIPEPEVSITSAHIDPDASYMAAVNSTGNCYVWNLTGGIGDEVTQLIPKTKIPAHTRYALQCRFSPDSTLLATCSADQTCKIWRTSNFSLMTELSIKSGNPGESSRGWMWGCAFSGDSQYIVTASSDNLARLWCVETGEIKREYGGHQKAVVCLAFNDSVLG

SEQ ID NO: 11458 - protein, 702 aa, Homo sapiens
MLLLLGLCLGLSLCVGSQEEAQSWGHSSEQDGLRVPRQVRLLQRLKTKPLMTEFSVKSTIISRYAFTTVSCRMLNRASEDQDIEFQMQIPAAAFITNFTMLIGDKVYQGEITEREKKSGDRVKEKRNKTTEENGEKGTEIFRASAVIPSKDKAAFFLSYEELLQRRLGKYEHSISVRPQQLSGRLSVDVNILESAGIASLEVLPLHNSRQRGSGRGEDDSGPPPSTVINQNETFANIIFKPTVVQQARIAQNGILGDFIIRYDVNREQSIGDIQVLNGYFVHYFAPKDLPPLPKNVVFVLDSSASMVGTKLRQTKDALFTILHDLRPQDRFSIIGFSNRIKVWKDHLISVTPDSIRDGKVYIHHMSPTGGTDINGALQRAIRLLNKYVAHSGIGDRSVSLIVFLTDGKPTVGETHTLKILNNTREAARGQVCIFTIGIGNDVDFRLLEKLSLENCGLTRRVHEEEDAGSQLIGFYDEIRTPLLSDIRIDYPPSSVVQATKTLFPNYFNGSEIIIAGKLVDRKLDHLHVEVTASNSKKFIILKTDVPVRPQKAGKDVTGSPRPGGDGEGDTNHIERLWSYLTTKELLSSWLQSDDEPEKERLRQRAQALAVSYRFLTPFTSMKLRGPVPRMDGLEEAHGMSAAMGPEPVVQSVRGAGTQPGPLLKKPYQPRIKISKTSVRGFRREEQIFSNVMKFPFASILEL

SEQ ID NO: 11459 - protein, 942 aa, Homo sapiens
MLLLLGLCLGLSLCVGSQEEAQSWGHSSEQDGLRVPRQVRLLQRLKTKPLMTEFSVKSTIISRYAFTTVSCRMLNRASEDQDIEFQMQIPAAAFITNFTMLIGDKVYQGEITEREKKSGDRVKEKRNKTTEENGEKGTEIFRASAVIPSKDKAAFFLSYEELLQRRLGKYEHSISVRPQQLSGRLSVDVNILESAGIASLEVLPLHNSRQRGSGRGEDDSGPPPSTVINQNETFANIIFKPTVVQQARIAQNGILGDFIIRYDVNREQSIGDIQVLNGYFVHYFAPKDLPPLPKNVVFVLDSSASMVGTKLRQTKDALFTILHDLRPQDRFSIIGFSNRIKVWKDHLISVTPDSIRDGKVYIHHMSPTGGTDINGALQRAIRLLNKYVAHSGIGDRSVSLIVFLTDGKPTVGETHTLKILNNTREAARGQVCIFTIGIGNDVDFRLLEKLSLENCGLTRRVHEEEDAGSQLIGFYDEIRTPLLSDIRIDYPPSSVVQATKTLFPNYFNGSEIIIAGKLVDRKLDHLHVEVTASNSKKFIILKTDVPVRPQKAGKDVTGSPRPGGDGEGDTNHIERLWSYLTTKELLSSWLQSDDEPEKERLRQRAQALAVSYRFLTPFTSMKLRGPVPRMDGLEEAHGMSAAMGPEPVVQSVRGAGTQPGPLLKKPYQPRIKISKTSVDGDPHFVVDFPLSRLTVCFNIDGQPGDILRLVSDHRDSGVTVNGELIGAPAPPNGHKKQRTYLRTITILINKPERSYLEITPSRVILDGGDRLVLPCNQSVVVGSWGLEVSVSANANVTVTIQGSIAFVILIHLYKKPAPFQRHHLGFYIANSEGLSSNCHGLLGQFLNQDARLTEDPAGPSQNLTHPLLLQVGEGPEAVLTVKGHQVPVVWKQRKIYNGEEQIDCWFARNNAAKLIDGEYKDYLASHPFDTGMTLGRGMSREL

SEQ ID NO: 11460 - protein, 513 aa, Homo sapiens [sequence omitted]

SEQ ID NO: 11461 - protein, 711 aa, Homo sapiens
MSSVQSQQEQLSQSDPSPSPNSCSSFELIDMDAGSLYEPVSPHWFYCKIIDSKETWIPFNSEDSQQLEEAYSSGKGCNGRVVPTDGGRYDVHLGERMRYAVYWDELASEVRRCTWFYKGDKDNKYVPYSESFSQVLEETYMLAVTLDEWKKKLESPNREIIILHNPKLMVHYQPVAGSDDWGSTPTEQGRPRTVKRGVENISVDIHCGEPLQIDHLVFVVHGIGPACDLRFRSIVQCVNDFRSVSLNLLQTHFKKAQENQQIGRVEFLPVNWHSPLHSTGVDVDLQRITLPSINRLRHFTNDTILDVFFYNSPTYCQTIVDTVASEMNRIYTLFLQRNPDFKGGVSIAGHSLGSLILFDILTNQKDSLGDIDSEKDSLNIVMDQGDTPTLEEDLKKLQLSEFFDIFEKEKVDKEALALCTDRDLQEIGIPLGPRKKILNYFSTRKNSMGIKRPAPQPASGANIPKESEFCSSSNTRNGDYLDVGIGQVSVKYPRLIYKPEIFFAFGSPIGMFLTVRGLKRIDPNYRFPTCKGFFNIYHPFDPVAYRIEPMVVPGVEFEPMLIPHHKGRKRMHLELREGLTRMSMDLKNNLLGSLRMAWKSFTRAPYPALQASETPEETEAEPESTSEKPSDVNTEETSVAVKEEVLPINVGMLNGGQRIDYVLQEKPIESFNEYLFALQSHLCYWESEDTVLLVLKEIYQTQGIFLDQPLQ

SEQ ID NO: 11462 - protein, 1088 aa, Homo sapiens
MYGSARSVGKVEPSSQSPGRSPRLPRSPRLGHRRTNSTGGSSGSSVGGGSGKTLSMENIQSLNAAYATSGPMYLSDHENVGSETPKSTMTLGRSGGRLPYGVRMTAMGSSPNIASSGVASDTIAFGEHHLPPVSMASTVPHSLRQARDNTIMDLQTQLKEVLRENDLLRKDVEVKESKLSSSMNSIKTFWSPELKKERALRKDEASKITIWKEQYRVVQEENQHMQMTIQALQDELRIQRDLNQLFQQDSSSRTGEPCVAELTEENFQRLHAEHERQAKELFLLRKTLEEMELRIETQKQTLNARDESIKKLLEMLQSKGLSAKATEEDHERTRRLAEAEMHVHHLESLLEQKEKENSMLREEMHRRFENAPDSAKTKALQTVIEMKDSKISSMERGLRDLEEEIQMLKSNGALSTEEREEEMKQMEVYRSHSKFMKNKIGQVKQELSRKDTELLALQTKLETLTNQFSDSKQHIEVLKESLTAKEQRAAILQTEVDALRLRLEEKETMLNKKTKQIQDMAEEKGTQAGEIHDLKDMLDVKERKVNVLQKKIENLQEQLRDKEKQMSSLKERVKSLQADTTNTDTALTTLEEALAEKERTIERLKEQRDRDEREKQEEIDNYKKDLKDLKEKVSLLQGDLSEKEASLLDLKEHASSLASSGLKKDSRLKTLEIALEQKKEECLKMESQLKKAHEAALEARASPEMSDRIQHLEREITRYKDESSKAQAEVDRLLEILKEVENEKNDKDKKIAELERQVKDQNKKVANLKHKEQVEKKKSAQMLEEARRREDNLNDSSQQLQDSLRKKDDRIEELEEALRESVQITAEREMVLAQEESARTNAEKQVEELLMAMEKVKQELESMKAKLSSTQQSLAEKETHLTNLRAERRKHLEEVLEMKQEALLAAISEKDANIALLELSSSKKKTQEEVAALKREKDRLVQQLKQQTQNRMKLMADNYEDDHFKSSHSNQTNHKPSPDQIIQPLLELDQNRSKLKLYIGHLTTLCHDRDPLILRGLTPPASYNLDDDQAAWENELQKMTRGQLQDELEKGERDNAELQEFANAILQQIADHCPDILEQVVNALEESS

SEQ ID NO: 11463 - protein, 218 aa, Homo sapiens
MGLSTVPDLLLPLVLLELLVGIYPSGVIGLVPHLGDREKRDSVCPQGKYIHPQNNSICCTKCHKGTYLYNDCPGPGQDTDCRECESGSFTASENHLRHCLSCSKCRKEMGQVEISSCTVDRDTVCGCRKNQYRHYWSENLFQCFNCSLCLNGTVHLSCQEKQNTVCTCHAGFFLRENECVSCSKVLLCRPGWNAVARSRLTATSASQIQAILLLQPPK

SEQ ID NO: 11464 - protein, 428 aa, Homo sapiens
MKSTADLHQKLGKAIELEAIKPTYQVLNVQEKKRKSLDNEVEKTANLVISNWNQQIKAKKKLMVSTKKHEALFQLVESSKQSMTEKEKRKLLNKLTKSTEKLEKEDENYYQKNMAGYSTRLKWENTLENCYQSILELEKERIQLLCNNLNQYSQHISLFGQTLTTCHTQIHCAISKIDIEKDIQAVMEETAILSTENKSEFLLTDYFEEDPNSAMDKERRKSLLKPKLLRLQRDIEKASKDKEGLERMLKTYSSTSSFSDAKSQKDTAALMDENNLKLDLLEANSYKLSSMLAELEQRPQPSHPCSNSIFRWREKEHTHSYVKISRPFLMKRLENIVSKASSGGQSNPGSSTPAPGAAQLSSRLCKALYSFQARQDDELNLEKGDIVIIHEKKEGGWWFGSLNGKKGHFPAAYVEELPSNAGNTATKA

SEQ ID NO: 11465 - protein, 152 aa, Homo sapiens
MRFKTTAKDGLLLWRGDSPMRPNSDFISLGLRDGALVFSYNLGSGVASIMVNGSFNDGRWHRVKAVRDGQSGKITVDDYGARTGKSPGMMRQLNINGALYVGGMKEIALHTNRQYMRGLVGCISHFTLSTDYHISLVEDAVDGKNINTCGAK

SEQ ID NO: 11466 - protein, 911 aa, Homo sapiens
MNFQAGGGQSPQQQQSLAAPGGGGAAAQQLVCGGQFGGAGPGAGGGGGPSQQLAGGPPQQFALSNSAAIRAEIQRFESVHPNIYAIYDLIERIEDLALQNQIREHVISIEDSFVNSQEWTLSRSVPELKVGIVGNLSSGKSALVHRYLTGTYVQEESPEGGRFKKEIVVDGQSYLLLIRDEGGPPELQFAAWVDAVVFVFSLEDEISFQTVYNYFLRLCSFRNASEVPMVLVGTQDAISAANPRVIDDSRARKLSTDLKRCTYYETCATYGLNVERVFQDVAQKVVALRKKQQLAIGPCKSLPNSPSHSAVSAASIPAVHINQATNGGGSAFSDYSSSVPSTPSISQRELRIETIAASSTPTPIRKQSKRRSNIFTSRKGADLDREKKAAECKVDSIGSGRAIPIKQGILLKRSGKSLNKEWKKKYVTLCDNGLLTYHPSLHDYMQNIHGKEIDLLRTTVKVPGKRLPRATPATAPGTSPRANGLSVERSNTQLGGGTGAPHSASSASLHSERPLSSSAWAGPRPEGLHQRSCSVSSADQWSEATTSLPPGMQHPASGPAEVLSSSPKLDPPPSPHSNRKKHRRKKSTGTPRPDGPSSATEEAEESFEFVVVSLTGQTWHFEASTAEERELWVQSVQAQILASLQGCRSAKDKTRLGNQNAALAVQAVRTVRGNSFCIDCDAPNPDWASLNLGALMCIECSGIHRHLGAHLSRVRSLDLDDWPPELLAVMTAMGNALANSVWEGALGGYSKPGPDACREEKERWIRAKYEQKLFLAPLPSSDVPLGQQLLRAVVEDDLRLLVMLLAHGSKEEVNETYGDGDGRTALHLSSAMANVVFTQLLIWYGVDVRSRDARGLTPLAYARRAGSQECADILIQHGCPGEGCGLAPTPNREPANGTNPSAELHRSPSLL

SEQ ID NO: 11467 - protein, 161 aa, Homo sapiens
MYQVVAFLAMVMGTHTYSHWPSCCPSKGQDTSEELLRWSTVPVPPLEPARPNRHPESCRASEDGPLNSRAISPWRYELDRDLNRLPQDLYHARCLCPHCVSLQTGSHMDPRGNSELLYHNQTVFYRRPCHGEKGTHKGYCLERRLYRVSLACVCVRPRVMG

SEQ ID NO: 11468 - protein, 169 aa, Homo sapiens
MAPRRARGCRTLGLPALLLLLLLRPPATREPAASSPSSNNTAATTAAIVPGSQLMPSKSPSTGTTEISSHESSHGTPSQTTAKNWELTASASHQPPGVYPQGHSDTTVAISTSTVLLCGLSAVSLLACYLKSRQTPPLASVEMEAMEALPVTWGTSSRDEDLENCSHHL

SEQ ID NO: 11469 - protein, 308 aa, Homo sapiens
MAPRRARGCRTLGLPALLLLLLLRPPATRDARDRLAVLAGRSRISESFNHEVQTHEACVRLRTMENCPQCHHHRTSRQQAGITCPPPMSVEHADIWVKSYSLYSRERYICNSGFKRKAGTSSLTECVLNKATNVAHWTTPSLKCIRDPALVHQRPAPPSTVTTAGVTPQPESLSPSGKEPAASSPSSNNTAATTAAIVPGSQLMPSKSPSTGTTEISSHESSHGTPSQTTAKNWELTASASHQPPGVYPQGHSDTTVAISTSTVLLCGLSAVSLLACYLKSSLDAFIKIRGGFSTWLLGLPHSTVGSG

SEQ ID NO: 11470 - protein, 252 aa, Homo sapiens
MAPRRARGCRTLGLPALLLLLLLRPPATRGITCPPPMSVEHADIWVKSYSLYSRERYICNSGFKRKAGTSSLTECVLNKATNVAHWTTPSLKCIRDPALVHQRPAPPSTVTTAGVTPQPESLSPSGKEPAASSPSSNNTAATTAAIVPGSQLMPSKSPSTGTTEISSHESSHGTPSQTTAKNWELTASASHQPPGVYPQGHSDTTVAISTSTVLLCGLSAVSLLACYLKSRASVCSCHPRSAGHTCSVGSVC

SEQ ID NO: 11471 - protein, 168 aa, Homo sapiens
MTATLRPYLSAVRATLQAALCLENFSSQVVERHNKPEVEVRSSKELLLQPVTISRNEKEKVLIEGSINSVRVSIAVKQADEIEKILCHKFMRFMMMRAENFFILRRKPVEGYDISFLITNFHTEQMYKHKLVDFVIHFMEEIDKEISEMKLSVNARARIVAEEFLKNF

SEQ ID NO: 11472 - protein, 538 aa, Homo sapiens
MASDPIFTLAPPLHCHYGAFPPNASGWEQPPNASGVSVASAALAASAASRVATSTDPSCSGFAPPDFNHCLKDWDYNGLPVLTTNAIGQWDLVCDLGWQVILEQILFILGFASGYLFLGYPADRFGRRGIVLLTLGLVGPCGVGGAAAGSSTGVMALRFLLGFLLAGVDLGVYLMRLELCDPTQRLRVALAGELVGVGGHFLFLGLALVSKDWRFLQRMITAPCILFLFYGWPGLFLESARWLIVKRQIEEAQSVLRILAERNRPHGQMLGEEAQEALQDLENTCPLPATSSFSFASLLNYRNIWKNLLILGFTNFIAHAIRHCYQPVGGGGSPSDFYLCSLLASGTAALACVFLGVTVDRFGRRGILLLSMTLTGIASLVLLGLWDCEHPIFPTVWAQQGNPNRDLNEAAITTFSVLGLFSSQAAAILSTLLAAEVIPTTVRGRGLGLIMALGALGGLSGPAQRLHMGHGAFLQHVVLAACALLCILSIMLLPETKRKLLPEVLRDGELCRRPSLLRQPPPTRCDHVPLLATPNPAL

SEQ ID NO: 11473 - protein, 296 aa, Homo sapiens
MAAAAAAAAAAGAAGGRGSGPGRRRHLVPGAGGEAGEGAPGGAGDYGNGLESEELEPEELLLEPEPEPEPEEEPPRPRAPPGAPGPGPGSGAPGSQEEEEEPGLVEGDPGDGAIEDPELEAIKARVREMEEEAEKLKELQNEVEKQMNMSPPPGNAGPVIMSIEEKMEADARSIYVGNVDYGATAEELEAHFHGCGSVNRVTILCDKFSGHPKGFAYIEFSDKESVRTSLALDESLFRGRQIKVIPKRTNRPGISTTDRGFPRARYRARTTNYNSSRSRFYSGFNSRPRGRVYRSG

SEQ ID NO: 11474 - protein, 39 aa, Homo sapiens
MLGAVEGPRWKQAEDIRDIYDFRDVLGTLSPGGGKDDRH

SEQ ID NO: 11475 - protein, 398 aa, Homo sapiens
MEGAALLRVSVLCIWMSALFLGVGVRAEEAGARVQQNVPSGTDTGDPQSKPLGDWAAGTMDPESSIFIEDAIKYFKEKVSTQNLLLLLTDNEAWNGFVAAAELPRNEADELRKALDNLARQMIMKDKNWHDKGQQYRNWFLKEFPRLKSELEDNIRRLRALADGVQKVHKGTTIANVVSGSLSISSGILTLVGMGLAPFTEGGSLVLLEPGMELGITAALTGITSSTMDYGKKWWTQAQAHDLVIKSLDKLKEVREFLGENISNFLSLAGNTYQLTRGIGKDIRALRRARANLQSVPHASASRPRVTEPISAESGEQVERVNEPSILEMSRGVKLTDVAPVSFFLVLDVVYLVYESKHLHEGAKSETAEELKKVAQELEEKLNILNNNYKILQADQEL

SEQ ID NO: 11476 - protein, 567 aa, Homo sapiens
MLERRCRGPLAMGLAQPRLLSGPSQESPQTLGKESRGLRQQGTSVAQSGAQAPGRAHRCAHCRRHFPGWVALWLHTRRCQARLPLPCPECGRRFRHAPFLALHRQVHAAATPDLGFACHLCGQSFRGWVALVLHLRAHSAAKRPIACPKCERRFWRRKQLRAHLRRCHPPAPEARPFICGNCGRSFAQWDQLVAHKRVHVAEALEEAAAKALGPRPRGRPAVTAPRPGGDAVDRPFQCACCGKRFRHKPNLIAHRRVHTGERPHQCPECGKRFTNKPYLTSHRRIHTGEKPYPCKECGRRFRHKPNLLSHSKIHKRSEGSAQAAPGPGSPQLPAGPQESAAEPTPAVPLKPAQEPPPGAPPEHPQDPIEAPPSLYSCDDCGRSFRLERFLRAHQRQHTGERPFTCAECGKNFGKKTHLVAHSRVHSGERPFACEECGRRFSQGSHLAAHRRDHAPDRPFVCPDCGKAFRHKPYLAAHRRIHTGEKPYVCPDCGKAFSQKSNLVSHRRIHTGERPYACPDCDRSFSQKSNLITHRKSHIRDGAFCCAICGQTFDDEERLLAHQKKHDV

SEQ ID NO: 11477 - protein, 795 aa, Homo sapiens
MTSGATRYRLSCSLRGHELDVRGLVCCAYPPGAFVSVSRDRTTRLWAPDSPNRSFTEMHCMSGHSNFVSCVCIIPSSDIYPHGLIATGGNDHNICIFSLDSPMPLYILKGHKNTVCSLSSGKFGTLLSGSWDTTAKVWLNDKCMMTLQGHTAAVWAVKILPEQGLMLTGSADKTVKLWKAGRCERTFSGHEDCVRGLAILSETEFLSCANDASIRRWQITGECLEVYYGHTNYIYSISVFPNCRDFVTTAEDRSLRIWKHGECAQTIRLPAQSIWCCCVLDNGDIVVGASDGIIRVFTESEDRTASAEEIKAFEKELSHATIDSKTGDLGDINAEQLPGREHLNEPGTREGQTRLIRDGEKVEAYQWSVSEGRWIKIGDVVGSSGANQQTSGKVLYEGKEFDYVFSIDVNEGGPSYKLPYNTSDDPWLTAYNFLQKNDLNPMFLDQVAKFIIDNTKGQMLGLGNPSFSDPFTGGGRYVPGSSGSSNTLPTADPFTGAGRYVPGSASMGTTMAGVDPFTGNSAYRSAASKTMNIYFPKKEAVTFDQANPTQILGKLKELNGTAPEEKKLTEDDLILLEKILSLICNSSSEKPTVQQLQILWKAINCPEDIVFPALDILRLSIKHPSVNENFCNEKEGAQFSSHLINLLNPKGKPANQLLALRTFCNCFVGQAGQKLMMSQRESLMSHAIELKSGSNKNIHIALATLALNYSVCFHKDHNIEGKAQCLSLISTILEVVQDLEATFRLLVALGTLISDDSNAVQLAKSLGVDSQIKKYSSVSEPAKVSECCRFILNLL

SEQ ID NO: 11478 - protein, 357 aa, Homo sapiens
MVQPFTTIPFPPPPQNGIPTEYGVPHTQDYAGQTGEHNLTLYGSTQAHGEQSSNSPSTQNGSLTQTEGGAQTDGQQSQTQSSENSESKSTPKRLHVSNIPFRFRDPDLRQMFGQFGKILDVEIIFNERGSKGFGFVTFENSADADRAREKLHGTVVEGRKIEVNNATARVMTNKKMVTPYANGWKLSPVVGAVYGPELYAASSFQADVSLGNDAAVPLSGRGGINTYIPLIIPGFPYPTAATTAAAFRGAHLRGRGRTVYGAVRAVPPTAIPAYPGVVYQDGFYGADLYGGYAAYRYAQPATATAATAAAAAAAAYSDGYGRVYTADPYHALAPAASYGVGAVASLYRGGYSRFAPY

SEQ ID NO: 11479 - protein, 1074 aa, Homo sapiens
MVYFGSSQDEEEVEEEDDETEDVKTATNNASSSCQSTPRKGKTHKHVHNGHVFNGSSRSTREKEPVQKHKSKEATPAKEKHSDHRADSRREQASANHPAAAPSTGSSAKGLAATHHHPPLHRSAQDLRKQVSKVNGVTRMSSLGAGVTSAKKMREVRPSPSKTVKYTATVTKGAVTYTKAKRELVKDTKPNHHKPSSAVNHTISGKTESSNAKTRKQVLSLGGASKSTGPAVNGLKVSGRLNPKSCTKEVGGRQLREGLQLREGLRNSKRRLEEAHQAEKPQSPPKKMKGAAGPAEGPGKKAPAERGLLNGHVKKEVPERSLERNRPKRATAGKSTPGRQAHGKADSASCENRSTSQPESVHKPQDSGKAEKGGGKAGWAAMDEIPVLRPSAKEFHDPLIYIESVRAQVEKFGMCRVIPPPDWRPECKLNDEMRFVTQIQHIHKLGRRWGPNVQRLACIKKHLKSQGITMDELPLIGGCELDLACFFRLINEMGGMQQVTDLKKWNKLADMLRIPRTAQDRLAKLQEAYCQYLLSYDSLSPEEHRRLEKEVLMEKEILEKRKGPLEGHTENDHHKFHPLPRFEPKNGLIHGVAPRNGFRSKLKEVGQAQLKTGRRRLFAQEKEVVKEEEEDKGVLNDFHKCIYKGRSVSLTTFYRTARNIMSMCFSKEPAPAEIEQEYWRLVEEKDCHVAVHCGKVDTNTHGSGFPVGKSEPFSRHGWNLTVLPNNTGSILRHLGAVPGVTIPWLNIGMVFSTSCWSRDQNHLPYIDYLHTGADCIWYCIPAEEENKLEDVVHTLLQANGTPGLQMLESNVMISPEVLCKEGIKVHRTVQQSGQFVVCFPGSFVSKVCCGYSVSETVHFATTQWTSMGFETAKEMKRRHIAKPFSMEKLLYQIAQAEAKKENGPTLSTISALLDELRDTELRQRRQLFEAGLHSSARYGSHDGSSTVADGKKKPRKWLQLETSERRCQICQHLCYLSMVVQENENVVFCLECALRHVEKQKSCRGLKLMYRYDEEQIISLVNQICGKVSGKNGSIENCLSKPTPKRGPRKRATVDVPPSRLSASSSSKSASSSS

SEQ ID NO: 11480 - protein, 308 aa, Homo sapiens
MVVGRGLLGRRSLAALGAACARRGLGPALLGVFCHTDLRKNLTVDEGTMKVEVLPALTDNYMYLVIDDETKEAAIVDPVQPQKVVDAARKHGVKLTTVLTTHHHWDHAGGNEKLVKLESGLKVYGGDDRIGALTHKITHLSTLQVGSLNVKCLATPCHTSGHICYFVSKPGGSEPPAVFTGDTLFVAGCGKFYEGTADEMCKALLEVLGRLPPDTRVYCGHEYTINNLKFARHVEPGNAAIREKLAWAKEKYSIGEPTVPSTLAEEFTYNPFMRVREKTVQQHAGETDPVTTMRAVRREKDQFKMPRD

SEQ ID NO: 11481 - protein, 218 aa, Homo sapiens
MARKKVRPRLIAELARRVRALREQLNRPRDSQLYAVDYETLTRPFSGRRLPVRAWADVRRESRLLQLLGRLPLFGLGRLVTRKSWLWQHDEPCYWRLTRVRPDYTAQNLDHGKAWGILTFKGKTESEAREIEHVMYHDWRLVPKHEEEAFTAFTPAPEDSLASVPYPPLLRAMIIAERQKNGDTSTEEPMLNVQRIRMEPWDYPAKQEDKGRAKGTPV

SEQ ID NO: 11482 - protein, 253 aa, Homo sapiens
MFGMQGDVFGLRATFMEGLQYMELIPKEKQPVTGTEGAFYRRRQLMHQLPIYDQDPSRCRGLLENELKLMEEFVKQYKSEALGVGEVALPGQGGLPKEEGKQQEKPEGAETTAATTNGSLSDPSKEVEYVCELCKGAAPPDSPVVYSDRAGYNKQWHPTCFVCAKCSEPLVDLIYFWKDGAPWCGRHYCESLRPRCSGCDEIIFAEDYQRVEDLAWHRKHFVCEGCEQLLSGRAYIVTKGQLLCPTCSKSKRS

SEQ ID NO: 11483 - protein, 34 aa, Homo sapiens
MKENVASATVFTLLLFLNTCLLNERHSCMNVQTT

SEQ ID NO: 11484 - protein, 174 aa, Homo sapiens
MAIGFVGCLGAIKENKCLLLTFFLLLLLVFLLEATIAILFFAYTDKIDRYAQQDLKKGLHLYGTQGNVGLTNAWSIIQTDFRCCGVSNYTDWFEVYNATRVPDSCCLEFSESCGLHAPGTWWKAPCYETVKVWLQENLLAVGIFGLCTALVQILGLTFAMTMYCQVVKADTYCA

SEQ ID NO: 11485 - protein, 238 aa, Homo sapiens
MARACLQAVKYLMFAFNLLFWLGGCGVLGVGIWLAATQGSFATLSSSFPSLSAANLLIITGAFVMAIGFVGCLGAIKENKCLLLTFFLLLLLVFLLEATIAILFFAYTDKIDRYAQQDLKKGLHLYGTQGNVGLTNAWSIIQTDFRCCGVSNYTDWFEVYNATRVPDSCCLEFSESCGLHAPGTWWKAPCYETVKVWLQENLLAVGIFGLCTALVQILGLTFAMTMYCQVVKADTYCA

SEQ ID NO: 11486 - protein, 646 aa, Homo sapiens
MSYTGFVQGSETTLQSTYSDTSAQPTCDYGYGTWNSGTNRGYEGYGYGYGYGQDNTTNYGYGMATSHSWEMPSSDTNANTSASGSASADSVLSRINQRLDMVPHLETDMMQGGVYGSGGERYDSYESCDSRAVLSERDLYRSGYDYSELDPEMEMAYEGQYDAYRDQFRMRGNDTFGPRAQGWARDARSGRPMASGYGRMWEDPMGARGQCMSGASRLPSLFSQNIIPEYGMFQGMRGGGAFPGGSRFGFGFGNGMKQMRRTWKTWTTADFRTKKKKRKQGGSPDEPDSKATRTDCSDNSDSDNDEGTEGEATEGLEGTEAVEKGSRVDGEDEEGKEDGREEGKEDPEKGALTTQDENGQTKRKLQAGKKSQDKQKKRQRDRMVERIQFVCSLCKYRTFYEDEMASHLDSKFHKEHFKYVGTKLPKQTADFLQEYVTNKTKKTEELRKTVEDLDGLIQQIYRDQDLTQEIAMEHFVKKVEAAHCAACDLFIPMQFGIIQKHLKTMDHNRNRRLMMEQSKKSSLMVARSILNNKLISKKLERYLKGENPFTDSPEEEKEQEEAEGGALDEGAQGEAAGISEGAEGVPAQPPVPPEPAPGAVSPPPPPPPEEEEEGAVPLLGGALQRQIRGIPGLDVEDDEEGGGGAP

SEQ ID NO: 11487 - protein, 620 aa, Homo sapiens
MRGPNSGTEKGRLVIPEKQGFDFLCMPVFHPRFKREFIQEPAKNRPGPQTRSDLLLSGRDWNTLIVGKLSPWIRPDSKVEKIRRNSEAAMLQELNFGAYLGLPAFLLPLNQEDNTNLARVLTNHIHTGHHSSMFWMRVPLVAPEDLRDDIIENAPTTHTEEYSGEEKTWMWWHNFRTLCDYSKRIAVALEIGADLPSNHVIDRWLGEPIKAAILPTSIFLTNKKGFPVLSKMHQRLIFRLLKLEVQFIITGTNHHSEKEFCSYLQYLEYLSQNRPPPNAYELFAKGYEDYLQSPLQPLMDNLESQTYEVFEKDPIKYSQYQQAIYKCLLDRVPEEEKDTNVQVLMVLGAGRGPLVNASLRAAKQADRRIKLYAVEKNPNAVVTLENWQFEEWGSQVTVVSSDMREWVAPEKADIIVSELLGSFADNELSPECLDGAQHFLKDDGVSIPGEYTSFLAPISSSKLYNEVRACREKDRDPEAQFEMPYVVRLHNFHQLSAPQPCFTFSHPNRDPMIDNNRYCTLEFPVEVNTVLHGFAGYFETVLYQDITLSIRPETHSPGMFSWFPILFPIKQPITVREGQTICVRFWRCSNSKKVWYEWAVTAPVCSAIHNPTGRSYTIGL

SEQ ID NO: 11488 - protein, 82 aa, Homo sapiens
MCTKTIPVLWGCFLLWNLYVSSSQTIYPGIKARITQRALDYGVQAGMKMIEQMLKEKKLPDLSGSESLEFLKVDYVNYNFSK

SEQ ID NO: 11489 - protein, 151 aa, Homo sapiens
MAAAAELSLLEKSLGLSKGNKYSAQGERQIPVLQTNNGPSLTGLTTIAAHLVKQANKEYLLGSTAEEKAIVQQWLEYRVTQVDGHSSKNDIHTLLKDLNSYLEDKVYLTGYNFTLADILLYYGLHRFIILEKFIQGFWITDQLFKVKLVIL

SEQ ID NO: 11490 - protein, 1026 aa, Homo sapiens
MRLPWELLVLQSFILCLADDSTLHGPIFIQEPSPVMFPLDSEEKKVKLNCEVKGNPKPHIRWKLNGTDVDTGMDFRYSVVEGSLLINNPNKTQDAGTYQCTATNSFGTIVSREAKLQFAYLDNFKTRTRSTVSVRRGQGMVLLCGPPPHSGELSYAWIFNEYPSYQDNRRFVSQETGNLYIAKVEKSDVGNYTCVVTNTVTNHKVLGPPTPLILRNDGVMGEYEPKIEVQFPETVPTAKGATVKLECFALGNPVPTIIWRRADGKPIARKARRHKSNGILEIPNFQQEDAGLYECVAENSRGKNVARGQLTFYAQPNWIQKINDIHVAMEENVFWECKANGRPKPTYKWLKNGEPLLTRDRIQIEQGTLNITIVNLSDAGMYQCLAENKHGVIFSNAELSVIAVGPDFSRTLLKRVTLVKVGGEVVIECKPKASPKPVYTWKKGRDILKENERITISEDGNLRIINVTKSDAGSYTCIATNHFGTASSTGNLVVKDPTRVMVPPSSMDVTVGESIVLPCQVTHDHSLDIVFTWSFNGHLIDFDRDGDHFERVGGQDSAGDLMIRNIQLKHAGKYVCMVQTSVDRLSAAADLIVRGPPGPPEAVTIDEITDTTAQLSWRPGPDNHSPITMYVIQARTPFSVGWQAVSTVPELIDGKTFTATVVGLNPWVEYEFRTVAANVIGIGEPSRPSEKRRTEEALPEVTPANVSGGGGSKSELVITWETVPEELQNGRGFGYVVAFRPYGKMIWMLTVLASADASRYVFRNESVHPFSPFEVKVGVFNNKGEGPFSPTTVVYSAEEEPTKPPASIFARSLSATDIEVFWASPLEKNRGRIQGYEVKYWRHEDKEENARKIRTVGNQTSTKITNLKGSVLYHLAVKAYNSAGTGPSSATVNVTTRKPPPSQPPGNIIWNSSDSKIILNWDQVKALDNESEVKGYKVLYRWNRQSSTSVIETNKTSVELSLPFDEDYIIEIKPFSDGGDGSSSEQIRIPKISNAYARGSGASTSNACTLSAISTIMISLTARSSL

SEQ ID NO: 11491 - protein, 141 aa, Homo sapiens
MWVLGIAATFCGLFLLPGFALQIQCYQCEEFQLNNDCSSPEFIVNCTVNVQDMCQKEVMEQSAGIMYRKSCASSAACLIASAGYQSFCSPGKLNSVCISCCNTPLCNGPRPKKRGSSASALRPGLRTTILFLKLALFSAHC

SEQ ID NO: 11492 - protein, 1208 aa, Homo sapiens
MEPLLLGRGLIVYLMFLLLKFSKAIEIPSSVQQVPTIIKQSKVQVAFPFDEYFQIECEAKGNPEPTFSWTKDGNPFYFTDHRIIPSNNSGTFRIPNEGHISHFQGKYRCFASNKLGIAMSEEIEFIVPSVPKFPKEKIDPLEVEEGDPIVLPCNPPKGLPPLHIYWMNIELEHIEQDERVYMSQKGDLYFANVEEKDSRNDYCCFAAFPRLRTIVQKMPMKLTVNSSNSIKQRKPKLLLPPTESGSESSITILKGEILLLECFAEGLPTPQVDWNKIGGDLPKGRETKENYGKTLKIENVSYQDKGNYRCTASNFLGTATHDFHVIVEEPPRWTKKPQSAVYSTGSNGILLCEAEGEPQPTIKWRVNGSPVDNHPFAGDVVFPREISFTNLQPNHTAVYQCEASNVHGTILANANIDVVDVRPLIQTKDGENYATVVGYSAFLHCEFFASPEAVVSWQKVEEVKPLEGRRYHIYENGTLQINRTTEEDAGSYSCWVENAIGKTAVTANLDIRNATKLRVSPKNPRIPKLHMLELHCESKCDSHLKHSLKLSWSKDGEAFEINGTEDGRIIIDGANLTISNVTLEDQGIYCCSAHTALDSAADITQVTVLDVPDPPENLHLSERQNRSVRLTWEAGADHNSNISEYIVEFEGNKEEPGRWEELTRVQGKKTTVILPLAPFVRYQFRVIAVNEVGRSQPSQPSDHHETPPAAPDRNPQNIRVQASQPKEMIIKWEPLKSMEQNGPGLEYRVTWKPQGAPVEWEEETVTNHTLRVMTPAVYAPYDVKVQAINQLGSGPDPQSVTLYSGEDYPDTAPVIHGVDVINSTLVKVTWSTVPKDRVHGRLKGYQINWWKTKSLLDGRTHPKEVNILRFSGQRNSGMVPSLDAFSEFHLTVLAYNSKGAGPESEPYIFQTPEGVPEQPTFLKVIKVDKDTATLSWGLPKKLNGNLTGYLLQYQIINDTYEIGELNDINITTPSKPSWHLSNLNATTKYKFYLRACTSQGCGKPITEESSTLGEGSKGIGKISGVNLTQKTHPIEVFEPGAEHIVRLMTKNWGDNDSIFQDVIETRGREYAGLYDDISTQGWFIGLMCAIALLTLLLLTVCFVKRNRGGKYSVKEKEDLHPDPEIQSVKDETFGEYSDSDEKPLKGSLRSLNRDMQPTESADSLVEYGEGDHGLFSEDGSFIGAYAGSKEKGSVESNGSSTATFPLRA

SEQ ID NO: 11493 - protein, 122 aa, Homo sapiens
MAALGTVLFSVRRLHCSVAAWAGGQWRLQQGLAANPSGYGPLTELPDWSYADGRPAPPMKGQLRRKAERETFARRVVLLSQEMDAGLQAWQLRQQKLQEEQRKQENALKPKGASLKSPLPSQ

SEQ ID NO: 11494 - protein, 291 aa, Homo sapiens
MRLLPRLLLLLLLVFPATVLFRGGPRGLLAVAQDLTEDEETVEDSIIEDEDDEAEVEEDEPTDLVEDKEEEDVSGEPEASPSADTTILFVKGEDFPANNIVKFLVGFTNKGTEDFIVESLDASFRYPQDYQFYIQNFTALPLNTVVPPQRQATFEYSFIPAEPMGGRPFGLVINLNYKDLNGNVFQDAVFNQTVTVIEREDGLDGETIFMYMFLAGLGLLVIVGLHQLLESRKRKRPIQKVEMGTSSQNDVDMSWIPQETLNQIMQSRRDKASPRRLPRKRAQKRSVGSDE

SEQ ID NO: 11495 - protein, 235 aa, Homo sapiens
MLSLLLLALPVLASPAYVAPAPGQALQQTGIVGGQEAPRSKWPWQVSLRVRGPYWMHFCGGSLIHPQWVLTAAHCVEPDIKDLAALRVQLREQHLYYQDQLLPVSRIIVHPQFYIIQTGADIALLELEEPVNISSHIHTVTLPPASETFPPGMPCWVTGWGDVDNNVHLPPPYPLKEVEVPVVENHLCNAEYHTGLHTGHSFQIVRDDMLCAGSENHDSCQGDSGGPLVCKVNGT

SEQ ID NO: 11496 - protein, 845 aa, Homo sapiens
MGSWALLWPPLLFTGLLVRPPGTMAQAQYCSVNKDIFEVEENTNVTEPLVDIHVPEGQEVTLGALSTPFAFRIQGNQLFLNVTPDYEEKSLLEAQLLCQSGGTLVTQLRVFVSVLDVNDNAPEFPFKTKEIRVEEDTKVNSTVIPETQLQAEDRDKDDILFYTLQEMTAGASDYFSLVSVNRPALRLDRPLDFYERPNMTFWLLVRDTPGENVEPSHTATATLVLNVVPADLRPPWFLPCTFSDGYVCIQAQYHGAVPTGHILPSPLVLRPGPIYAEDGDRGINQPIIYSIFRGNVNGTFIIHPDSGNLTVARSVPSPMTFLLLVKGQQADLARYSVTQVTVEAVAAAGSPPRFPQRLYRGTVARGAGAGVVVKDAAAPSQPLRIQAQDPEFSDLNSAITYRITNHSHFRMEGEVVLTTTTLAQAGAFYAEVEAHNTVTSGTATTVIEIQVSEQEPPSTDVPPSPEAGGTTGPWTSTTSEVPRPPEPSQGPSTTSSGGGTGPHPPSGTTLRPPTSSTPGGPPGAENSTSHQPATPGGDTAQTPKPGTSQPMPPGVGTSTSHQPATPSGGTAQTPEPGTSQPMPPSMGTSTSHQPATPGGGTAQTPEAGTSQPMPPGMGTSTSHQPTTPGGGTAQTPEPGTSQPMPLSKSTPSSGGGPSEDKRFSVVDMAALGGVLGALLLLALLGLAVLVHKHYGPRLKCCCGKAPEPQPQGFDNQAFLPDHKANWAPVPSPTHDPKPAEAPMPAEPAPPGPASPGGAPEPPAAARAGGSPTAVRSILTKERRPEGGYKAVWFGEDIGTEADVVVLNAPTLDVDGASDSGSGDEGEGAGRGGGPYDAPGGDDSYI

SEQ ID NO: 11497 - protein, 561 aa, Homo sapiens
MMYSPICLTQDEFHPFIEALLPHVRAIAYTWFNLQARKRKYFKKHEKRMSKDEERAVKDELLSEKPEIKQKWASRLLAKLRKDIRQEYREDFVLTVTGKKHPCCVLSNPDQKGKIRRIDCLRQADKVWRLDLVMVILFKGIPLESTDGERLMKSPHCTNPALCVQPHHITVSVKELDLFLAYYVQEQDSGQSGSPSHNDPAKNPPGYLEDSFVKSGVFNVSELVRVSRTPITQGTGVNFPIGEIPSQPYYHDMNSGVNLQRSLSSPPSSKRPKTISIDENMEPSPTGDFYPSPSSPAAGSRTWHERDQDMSSPTTMKKPEKPLFSSASPQDSSPRLSTFPQHHHPGIPGVAHSVISTRTPPPPSPLPFPTQAILPPAPSSYFSHPTIRYPPHLNPQDTLKNYVPSYDPSSPQTSQPNGSGQVVGKVPGHFTPVLAPSPHPSAVRPVTLSMTDTKPITTSTEAYTASGTSQANRYVGLSPRDPSFLHQQQLRICDWTMNQNGRHLYPSTSEDTLGITWQSPGTWASLVPFQVSNRTPILPANVQNYGLNIIGEPFLQAETSN

SEQ ID NO: 11498 - protein, 570 aa, Homo sapiens
MMYSPICLTQDEFHPFIEALLPHVRAIAYTWFNLQARKRKYFKKHEKRMSKDEERAVKDELLSEKPEIKQKWASRLLAKLRKDIRQEYREDFVLTVTGKKHPCCVLSNPDQKGKIRRIDCLRQADKVWRLDLVMVILFKGIPLESTDGERLMKSPHCTNPALCVQPHHITVSVKELDLFLAYYVQEQDSGQSGSPSHNDPAKNPPGYLEDSFVKSGVFNVSELVRVSRTPITQGTGVNFPIGEIPSQPYYHDMNSGVNLQRSLSSPPSSKRPKTISIDENMEPSPTGDFYPSPSSPAAGSRTWHERDQDMSSPTTMKKPEKPLFSSASPQDSSPRLSTFPQHHHPGIPGVAHSVISTRTPPPPSPLPFPTQAILPPAPSSYFSHPTIRYPPHLNPQDTLKNYVPSYDPSSPQTSQPNGSGQVVGKVPGHFTPVLAPSPHPSAVRPVTLSMTDTKPITTSTEGEAASPTATTYTASGTSQANRYVGLSPRDPSFLHQQQLRICDWTMNQNGRHLYPSTSEDTLGITWQSPGTWASLVPFQVSNRTPILPANVQNYGLNIIGEPFLQAETSN

SEQ ID NO: 11499 - protein, 544 aa, Homo sapiens
MASEELYEVERIVDKRKNKKGKTEYLVRWKGYDSEDDTWEPEQHLVNCEEYIHDFNRRHTEKQKESTLTRTNRTSPNNARKQISRSTNSNFSKTSPKALVIGKDHESKNSQLFAASQKFRKNTAPSLSSRKNMDLAKSGIKILVPKSPVKSRTAVDGFQSESPEKLDPVEQGQEDTVAPEVAAEKPVGALLGPGAERARMGSRPRIHPLVPQVPGPVTAAMATGLAVNGKGTSPFMDALTANGTTNIQTSVTGVTASKRKFIDDRRDQPFDKRLRFSVRQTESAYRYRDIVVRKQDGFTHILLSTKSSENNSLNPEVMREVQSALSTAAADDSKLVLLSAVGSVFCCGLDFIYFIRRLTDDRKRESTKMAEAIRNFVNTFIQFKKPIIVAVNGPAIGLGASILPLCDVVWANEKAWFQTPYTTFGQSPDGCSTVMFPKIMGGASANEMLLSGRKLTAQEACGKGLVSQVFWPGTFTQEVMVRIKELASCNPVVLEESKALVRCNMKMELEQANERECEVLKKIWGSAQGMDSMLKYLQRKIDEF

SEQ ID NO: 11500 - protein, 94 aa, Homo sapiens
MGLAWGLGVLFLMHVCGTNRIPESGGDNSVFDIFELTGAARKGSGRRLVKGPDPSSPAFRIEDANLIPPVPDDKFQDLVDAVRAEKGFLLLASL

SEQ ID NO: 11501 - protein, 170 aa, Homo sapiens
MTEYKLVVVGAGGVGKSALTIQLIQNHFVDEYDPTIEDSYRKQVVIDGETCLLDILDTAGQEEYSAMRDQYMRTGEGFLCVFAINNTKSFEDIHQYREQIKRVKDSDDVPMVLVGNKCDLAARTVESRQAQDLARSYGIPYIETSAKTRQGSRSGSSSSSGTLWDPPGPM

SEQ ID NO: 11502 - protein, 1505 aa, Homo sapiens
MVHVARLLLLLLTFFLRTDAETPPRFTRTPVDQTGVSGGVASFICQATGDPRPKIVWNKKGKKVSNQRFEVIEFDDGSGSVLRIQPLRTPRDEAIYECVASNNVGEISVSTRLTVLREDQIPRGFPTIDMGPQLKVVERTRTATMLCAASGNPDPEITWFKDFLPVDTSNNNGRIKQLRSESIGALQIEQSEESDQGKYECVATNSAGTRYSAPANLYVRVRRVPPRFSIPPTNHEIMPGGSVNITCVAVGSPMPYVKWMLGAEDLTPEDDMPIGRNVLELNDVRQSANYTCVAMSTLGVIEAIAQITVKALPKPPGTPVVTESTATSITLTWDSGNPEPVSYYIIQHKPKNSEELYKEIDGVATTRYSVAGLSPYSDYEFRVVAVNNIGRGPPSEPVLTQTSEQAPSSAPRDVQARMLSSTTILVQWKEPEEPNGQIQGYRVYYTMDPTQHVNNWMKHNVADSQITTIGNLVPQKTYSVKVLAFTSIGDGPLSSDIQVITQTGVPGQPLNFKAEPESETSILLSWTPPRSDTIANYELVYKDGEHGEEQRITIEPGTSYRLQGLKPNSLYYFRLAARSPQGLGASTAEISARTMQSMFAKNFHVKAVMKTSVLLSWEIPENYNSAMPFKILYDDGKMVEEVDGRATQKLIVNLKPEKSYSFVLTNRGNSAGGLQHRVTAKTAPDVLRTKPAFIGKTNLDGMITVQLPEVPANENIKGYYIIIVPLKKSRGKFIKPWESPDEMELDELLKEISRKRRSIRYGREVELKPYIAAHFDVLPTEFTLGDDKHYGGFTNKQLQSGQEYVFFVLAVMEHAESKMYATSPYSDPVVSMDLDPQPITDEEEGLIWVVGPVLAVVFIICIVIAILLYKRKRAESDSRKSSIPNNKEIPSHHPTDPVELRRLNFQTPGSDDSGYPGNLHSSSMASHPPIPILELADHIERLKANDNLKFSQEYESIDPGQQFTWEHSNLEVNKPKNRYANVIAYDHSRVLLSAIEGIPGSDYVNANYIDGYRKQNAYIATQGSLPETFGDFWRMIWEQRSATVVMMTKLEERSRVKCDQYWPSRGTETHGLVQVTLLDTVELATYCVRTFALYKNGSSEKREVRQFQFTAWPDHGVPEHPTPFLAFLRRVKTCNPPDAGPMVVHCSAGVGRTGCFIVIDAMLERIKHEKTVDIYGHVTLMRAQRNYMVQTEDQYIFIHDALLEAVTCGNTEVPARNLYAYIQKLTQIETGENVTGMELEFKRLASSKAHTSRFISANLPCNKFKNRLVNIMPYESTRVCLQPIRGVEGSDYINASFIDGYRQQKAYIATQGPLAETTEDFWRMLWEHNSTIVVMLTKLREMGREKCHQYWPAERSARYQYFVVDPMAEYNMPQYILREFKVTDARDGQSRTVRQFQFTDWPEQGVPKSGEGFIDFIGQVHKTKEQFGQDGPISVHCSAGVGRTGVFITLSIVLERMRYEGVVDIFQTVKMLRTQRPAMVQTEDQYQFSYRAALEYLGSFDHYAT

SEQ ID NO: 11503 - protein, 433 aa, Homo sapiens
MRGPEPGPQPTMEGDVLDTLEALGYKGPLLEEQALTKAAEGGLSSPEFSELCIWLGSQIKSLCNLEESITSAGRDDLESFQLEISGFLKEMACPYSVLISGDIKDRLKKKEDCLKLLLFLSTELQASQILQNKKHKNSQLDKNSEVYQEVQAMFDTLGIPKSTTSDIPHMLNQVESKVKDILSKVQKNHVGKPLLKMDLNSEQAEQLERINDALSCEYECRRRMLMKRLDVTVQSFGWSDRAKVKTDDIARIYQPKRYALSPKTTITMAHLLAAREDLSKIIRTSSGTSREKTACAINKVLMGRVPDRGGRPNEIEPPPPEMPPWQKRQEGGGGRGGWGGGGGGGGRGGGGGGGGRGGWGGGGGGWGGGGGGGGGWGGGGGGGRGGFQGRGDYGGRGGYGGRGGYGGRGYGDPYGGGGGGGGGGGGGGGYRRY

SEQ ID NO: 11504 - protein, 1502 aa, Homo sapiens
MVHVARLLLLLLTFFLRTDAETPPRFTRTPVDQTGVSGGVASFICQATGDPRPKIVWNKKGKKVSNQRFEVIEFDDGSGSVLRIQPLRTPRDEAIYECVASNNVGEISVSTRLTVLREDQIPRGFPTIDMGPQLKVVERTRTATMLCAASGNPDPEITWFKDFLPVDTSNNNGRIKQLRSGGTPIRGALQIEQSEESDQGKYECVATNSAGTRYSAPANLYVRELREVRRVPPRFSIPPTNHEIMPGGSVNITCVAVGSPMPYVKWMLGAEDLTPEDDMPIGRNVLELNDVRQSANYTCVAMSTLGVIEAIAQITVKALPKPPGTPVVTESTATSITLTWDSGNPEPVSYYIIQHKPKNSEELYKEIDGVATTRYSVAGLSPYSDYEFRVVAVNNIGRGPPSEPVLTQTSEQAPSSAPRDVQARMLSSTTILVQWKEPEEPNGQIQGYRVYYTMDPTQHVNNWMKHNVADSQITTIGNLVPQKTYSVKVLAFTSIGDGPLSSDIQVITQTGVPGQPLNFKAEPESETSILLSWTPPRSDTIANYELVYKDGEHGEEQRITIEPGTSYRLQGLKPNSLYYFRLAARSPQGLGASTAEISARTMQSMFAKNFHVKAVMKTSVLLSWEIPENYNSAMPFKILYDDGKMVEEVDGRATQKLIVNLKPEKSYSFVLTNRGNSAGGLQHRVTAKTAPDVLRTKPAFIGKTNLDGMITVQLPEVPANENIKGYYIIIVPLKKSRGKFIKPWESPDEMELDELLKEISRKRRSIRYGREVELKPYIAAHFDVLPTEFTLGDDKHYGGFTNKQLQSGQEYVFFVLAVMEHAESKMYATSPYSDPVVSMDLDPQPITDEEEGLIWVVGPVLAVVFIICIVIAILLYKSKPDRKRAESDSRKSSIPNNKEIPSHHPTDPVELRRLNFQTPGMASHPPIPILELADHIERLKANDNLKFSQEYESIDPGQQFTWEHSNLEVNKPKNRYANVIAYDHSRVLLSAIEGIPGSDYVNANYIDGYRKQNAYIATQGSLPETFGDFWRMIWEQRSATVVMMTKLEERSRVKCDQYWPSRGTETHGLVQVTLLDTVELATYCVRTFALYKNGSSEKREVRQFQFTAWPDHGVPEHPTPFLAFLRRVKTCNPPDAGPMVVHCSAGVGRTGCFIVIDAMLERIKHEKTVDIYGHVTLMRAQRNYMVQTEDQYIFIHDALLEAVTCGNTEVPARNLYAYIQKLTQIETGENVTGMELEFKRLASSKAHTSRFISANLPCNKFKNRLVNIMPYESTRVCLQPIRGVEGSDYINASFIDGYRQQKAYIATQGPLAETTEDFWRMLWEHNSTIVVMLTKLREMGREKCHQYWPAERSARYQYFVVDPMAEYNMPQYILREFKVTDARDGQSRTVRQFQFTDWPEQGVPKSGEGFIDFIGQVHKTKEQFGQDGPISVHCSAGVGRTGVFITLSIVLERMRYEGVVDIFQTVKMLRTQRPAMVQTEDQYQFSYRAALEYLGSFDHYAT

SEQ ID NO: 11505 - protein, 1505 aa, Homo sapiens [sequence omitted]

SEQ ID NO: 11506 - protein, 372 aa, Homo sapiens
MAPAKATNVVRLLLGSTALWLSQLGSGTVAASKSVTAHLAAKWPETPLLLEASEFMAEESNEKFWQFLETVQELAIYKQTESDYSYYNLILKKAGQFLDNLHINLLKFAFSIRAYSPAIQMFQQIAADEPPPDGCNAFVVIHKKHTCKINEIKKLLKKAASRTRPYLFKGDHKFPTNKENLPVVILYAEMGTRTFSAFHKVLSEKAQNEEILYVLRHYIQKPSSRKMYLSGYGVELAIKSTEYKALDDTQVKTVTNTTVEDETETNEVQGFLFGKLKEIYSDLRDNLTAFQKYLIESNKQMMPLKVWELQDLSFQAASQIMSAPVYDSIKLMKDISQNFPIKARLRMNILICLFQSTLNVKNLRSRHLYNKT

SEQ ID NO: 11507 - protein, 306 aa, Homo sapiens
MALVFEKCELATCTPREPGVAGGDVCSSDSFNEDIAVFAKQVRAEKPLFSSNPELDNLMIQAIQVLRFHLLELEKVHELCDNFCHRYISCLKGKMPIDLVIDERDGSSKSDHEELSGSSTNLADHNPSSWRDHDDATSTHSAGTPGPSSGGHASQSGDNSSEQGDGLDNSVASPGTGDDDDPDKDKKRQKKRGIFPKVATNIMRAWLFQHLTHPYPSEEQKKQLAQDTGLTILQVNNWFINARRRIVQPMIDQSNRAVSQGAAYSPEGQPMGSFVLDGQQHMGIRPAGPMSGMGMNMGMDGQWHYM

SEQ ID NO: 11508 - protein, 561 aa, Homo sapiens
MMQGEAHPSASLIDRTIKMRKETEARKVVLAWGLLNVSMAGMIYTEMTGKLISSYYNVTYWPLWYIELALASLFSLNALFDFWRYFKYTVAPTSLVVSPGQQTLLGLKTAVVQTTPPHDLAATQIPPAPPSPSIQGQSVLSYSPSRSPSTSPKFTTSCMTGYSPQLQGLSSGGSGSYSPGVTYSPVSGYNKLASFSPSPPSPYPTTVGPVESSGLRSRYRSSPTVYNSPTDKEDYMTDLRTLDTFLRSEEEKQHRVKLGSPDSTSPSSSPTFWNYSRSMGDYAQTLKKFQYQLACRSQAPCANKDEADLSSKQAAEEVWARVAMNRQLLDHMDSWTAKFRNWINETILVPLVQEIESVSTQMRRMGCPELQIGEASITSLKQAALVKAPLIPTLNTIVQYLDLTPNQEYLFERIKELSQGGCMSSFRWNRGGDFKGRKWDTDLPTDSAIIMHVFCTYLDSRLPPHPKYPDGKTFTSQHFVQTPNKPDVTNENVFCIYQSAINPPHYELIYQRHVYNLPKGRNNMFHTLLMFLYIIKTKESGMLGRVNLGLSGVNILWIFGE

SEQ ID NO: 11509 - protein, 253 aa, Homo sapiens
MATSGDCPRSESQGEEPAECSEAGLLQEGVQPEEFVAIADYAATDETQLSFLRGEKILILRQTTADWWWGERAGCCGYIPANHVGKHVDEYDPEDTWQDEEYFGSYGTLKLHLEMLADQPRTTKYHSVILQNKESLTDKVILDVGCGTGIISLFCAHYARPRAVYAVEASEMAQHTGQLVLQNGFADIITVYQQKVEDVVLPEKVDVLVSEWMGTCLLVRAGVRAAGGRSWGASEHGLGWANLRISRVVRDSF

SEQ ID NO: 11510 - protein, 1032 aa, Homo sapiens
MAFTNYSSLNRAQLTFEYLHTNSTTHEFLFGALAELVDNARDADATRIDIYAERREDLRGGFMLCFLDDGAGMDPSDAASVIQFGKSAKRTPESTQIGQYGNGLKSGSMRIGKDFILFTKKEDTMTCLFLSRTFHEEEGIDEVIVPLPTWNARTREPVTDNVEKFAIETELIYKYSPFRTEEEVMTQFMKIPGDSGTLVIIFNLKLMDNGEPELDIISNPRDIQMAETSPEGTKPERRSFRAYAAVLYIDPRMRIFIHGHKVQTKRLSCCLYKPRMYKYTSSRFKTRAEQEVKKAEHVARIAEEKAREAESKARTLEVRLGGDLTRDSRVMLRQVQNRAITLRREADVKKRIKEAKQRALKEPKELNFVFGVNIEHRDLDGMFIYNCSRLIKMYEKVGPQLEGGMACGGVVGVVDVPYLVLEPTHNKQDFADAKEYRHLLRAMGEHLAQYWKDIAIAQRGIIKFWDEFGYLSANWNQPPSSELRYKRRRAMEIPTTIQCDLCLKWRTLPFQLSSVEKDYPDTWVCSMNPDPEQDRCEASEQKQKVPLGTFRKDMKTQEEKQKQLTEKIRQQQEKLEALQKTTPIRSQADLKKLPLEVTTRPSTEEPVRRPQRPRSPPLPAVIRNAPSRPPSLPTPRPASQPRKAPVISSTPKLPALAAREEASTSRLLQPPEAPRKPANTLVKTASRPAPLVQQLSPSLLPNSKSPREVPSPKVIKTPVVKKTESPIKLSPATPSRKRSVAVSDEEEVEEEAERRKERCKRGRFVVKEEKKDSNELSDSAGEEDSADLKRAQKDKGLHVEVRVNREWYTGRVTAVEVGKHVVRWKVKFDYVPTDTTPRDRWVEKGSEDVRLMKPPSPEHQSLDTQQEGGEEEVGPVAQQAIAVAEPSTSECLRIEPDTTALSTNHETIDLLVQILRNCLRYFLPPSFPISKKQLSAMNSDELISFPLKEYFKQYEVGLQNLCNSYQSRADSRAKASEESLRTSERKLRETEEKLQKLRTNIVALLQKVQEDIDINTDDELDAYIEDLITKGD

SEQ ID NO: 11511 - protein, 573 aa, Homo sapiens
MRPRGLPPLLVVLLGCWASVSAQTDATPAVTTEGLNSTEAALATFGTFPSTRPPGTPRAPGPSSGPRPTPVTDVAVLCVCDLSPAQCDINCCCDPDCSSVDFSVFSACSVPVVTGDSQFCSQKAVIYSLNFTANPPQRVFELVDQINPSIFCIHITNYKPALSFINPEVPDENNFDTLMKTSDGFTLNAESYVSFTTKLDIPTAAKYEYGVPLQTSDSFLRFPSSLTSSLCTDNNPAGQAYWFTPVIPALWEAEARGSLEVPDSRKKVPITVQSIVIQSLNKTLTRREDTDVLQPTLVNAGHFSLCVNVVLEVKYSLTYTDAGEVTKADLSFVLGTVSSVVVPLQQKFEIHFLQENTQPVPLSGNPGYVVGLPLAAGFQPHKGSGIIQTTNRYGQLTILHSTTEQDCLALEGVRTPVLFGYTMQSGCKLRLTGALPCQLVAQKVKSLLWGQGFPDYVAPFGNSQAQDMLDWVPIHFITQSFNRKDSCQLPGALVIEVKWTKYGSLLNPQAKIVNVTANLISSSFPEANSGNERTILISTAVTFVDVSAPAEAGFRAPPAINARLPFNFFFPFV

SEQ ID NO: 11512 - protein, 179 aa, Homo sapiens
MRPRGLPPLLVVLLGCWASVSAQTDATPAVTTEGLNSTEAALATFGTFPSTRPPGTPRAPGPSSGPRPTPVTDVAVLCVCDLSPAQCDINCCCDPDCSSVDFSVFSACSVPVVTGDSQFCSQKAVIYSLNFTANPPQRVFELVDQINPSIFCIHITNSHFTPGLSRWLCESRSRILSFP

SEQ ID NO: 11513 - protein, 592 aa, Homo sapiens
MRPRGLPPLLVVLLGCWASVSAQTDATPAVTTEGLNSTEAALATFGTFPSTRPPGTPRAPGPSSGPRPTPVTDVAVLCVCDLSPAQCDINCCCDPDCSSVDFSVFSACSVPVVTGDSQFCSQKAVIYSLNFTANPPQRVFELVDQINPSIFCIHITNYKPALSFINPEVPDENNFDTLMKTSDGFTLNAESYVSFTTKLDIPTAAKYEYGVPLQTSDSFLRFPSSLTSSLCTDNNPAAFLVNQAVKCTRKINLEQCEEIEALSMAFYSSPEILRVPDSRKKVPITVQSIVIQSLNKTLTRREDTDVLQPTLVNAGHFSLCVNVVLEVKYSLTYTDAGEVTKADLSFVLGTVSSVVVPLQQKFEIHFLQENTQPVPLSGNPGYVVGLPLAAGFQPHKGSGIIQTTNRYGQLTILHSTTEQDCLALEGVRTPVLFGYTMQSGCKLRLTGALPCQLVAQKVKSLLWGQGFPDYVAPFGNSQAQDMLDWVPIHFITQSFNRKHFVLQDSCQLPGALVIEVKWTKYGSLLNPQAKIVNVTANLISSSFPEANSGNERTILISTAVTFVDVSAPAEAGFRAPPAINARLPFNFFFPFV

SEQ ID NO: 11514 - protein, 441 aa, Homo sapiens
MYSPYCLTQDEFHPFIEALLPHVRAFSYTWFNLQARKRKYFKKHEKRMSKDEERAVKDELLGEKPEIKQKWASRLLAKLRKDIRPEFREDFVLTITGKKPPCCVLSNPDQKGKIRRIDCLRQADKVWRLDLVMVILFKGIPLESTDGERLYKSPQCSNPGLCVQPHHIGVTIKELDLYLAYFVHTPESGQSDSSNQQGDADIKPLPNGHLSFQDCFVTSGVWNVTELVRVSQTPVATASGPNFSLADLESPSYYNINQVTLGRRSITSPPSTSTTKRPKSIDDSEMESPVDDVFYPGTGRSPAAGSSQSSGWPNDVDAGPASLKKSGKLDFCSALSSQGSSPRMAFTHHPLPVLAGVRPGSPRATASALHFPSTSIIQQSSPYFTHPTIRYHHHHGQDSLKEFVQFVCSDGSGQATGQHSQRQAPPLPTGLSASDPGTATF

SEQ ID NO: 11515 - protein, 438 aa, Homo sapiens
MAAGLRKRGRSGSAAQAEGLCKQWLQRAWQERRLLLREPRYTLLVAACLCLAEVGITFWVIHRVAYTEIDWKAYMAEVEGVINGTYDYTQLQGDTGPLVYPAGFVYIFMGLYYATSRGTDIRMAQNIFAVLYLATLLLVFLIYHQTCKVPPFVFFFMCCASYRVHSIFVLRLFNDPVAMVLLFLSINLLLAQRWGWGCCFFSLAVSVKMNVLLFAPGLLFLLLTQFGFRGALPKLGICAGLQVVLGLPFLLENPSGYLSRSFDLGRQFLFHWTVNWRFLPEALFLHRAFHLALLTAHLTLLLLFALCRWHRTGESILSLLRDPSKRKVPPQPLTPNQIVSTLFTSNFIGICFSRSLHYQFYVWYFHTLPYLLWAMPARWLTHLLRLLVLGLIELSWNTYPSTSCSSAALHICHAVILLQLWLGPQPFPKSTQHSKKAH

SEQ ID NO: 11516 - protein, 151 aa, Homo sapiens
MSRQEPKMFVLLYVTSFAICASGQPRGNQLKGENYSPRYICSIPGLPGPPGPPGANGSPGPHGRIGLPGRDGRDGRKGEKGEKGTAGLRGKTGPLGLAGEKGDQGETGKKGPIGPEGEKGEVGPIGPPGPKGDRGEQGDPGLPGVCRCGSI

SEQ ID NO: 11517 - protein, 454 aa, Homo sapiens
MASSEVARHLLFQSHMATKTTCMSSQGSDDEQIKRENIRSLTMSGHVGFESLPDQLVNRSIQQGFCFNILCVGETGIGKSTLIDTLFNTNFEDYESSHFCPNVKLKAQTYELQESNVQLKLTIVNTVGFGDQINKEESYQPIVDYIDAQFEAYLQEELKIKRSLFTYHDSRIHVCLYFISPTGHSLKTLDLLTMKNLDSKVNIIPVIAKADTVSKTELQKFKIKLMSELVSNGVQIYQFPTDDDTIAKVNAAMNGQLPFAVVGSMDEVKVGNKMVKARQYPWGVVQVENENHCDFVKLREMLICTNMEDLREQTHTRHYELYRRCKLEEMGFTDVGPENKPVSVQETYEAKRHEFHGERQRKEEEMKQMFVQRVKEKEAILKEAERELQAKFEHLKRLHQEERMKLEEKRRLLEEEIIAFSKKKATSEIFHSQSFLATGSNLRKDKDRKNSNFL

SEQ ID NO: 11518 - protein, 117 aa, Homo sapiens
MKMLQAPESVLAEHYQDLRRKPFYPALIRYMSSGPVVAMVWEGYNVVRASRAMIGHTDSAEAAPGTIRGDFSVHISRNVIHASDSVEGAQREIQLWFQSSELVSWADGGQHSSIHPA

SEQ ID NO: 11519 - protein, 460 aa, Homo sapiens
MVLDFVTPTPLGTRWGLGGTCVNVGCIPKKLMHQAALLGQALQDSRNYGWKVEETVKHDWDRMIEAVQNHIGSLNWGYRVALREKKVVYENAYGQFIGPHRIKATNNKGKEKIYSAERFLIATGERPRYLGIPGDKEYCISSDDLFSLPYCPGKTLVVGASYVALECAGFLAGIGLDVTVMVRSILLRGFDQDMANKIGEHMEEHGIKFIRQFVPIKVEQIEAGTPGRLRVVAQSTNSEEIIEGEYNTVMLAIGRDACTRKIGLETVGVKINEKTGKIPVTDEEQTNVPYIYAIGDILEDKVELTPVAIQAGRLLAQRLYAGSTVKCDYENVPTTVFTPLEYGACGLSEEKAVEKFGEENIEVYHSYFWPLEWTIPSRDNNKCYAKIICNTKDNERVVGFHVLGPNAGEVTQGFAAALKCGLTKKQLDSTIGIHPVCAEVFTTLSVTKRSGASILQAGCG

SEQ ID NO: 11520 - protein, 273 aa, Homo sapiens
MIFLLLMLSLELQLHQIAALFTVTVPKELYIIEHGSNVTLECNFDTGSHVNLGAITASLQKVENDTSPHRERATLLEEQLPLGKASFHIPQVQVRDEGQYQCIIIYGVAWDYKYLTLKVKASYRKINTHILKVPETDEVELTCQATGYPLAEVSWPNVSVPANTSHSRTPEGLYQVTSVLRLKPPPGRNFSCVFWNTHVRELTLASIDLQSQMEPRTHPTWLLHIFIPFCIIAFIFIATVIALRKQLCQKLYSSKDTTKRPVTTTKREVNSAI

SEQ ID NO: 11521 - protein, 1390 aa, Homo sapiens
MKAPAVLAPGILVLLFTLVQRSNGECKEALAKSEMNVNMKYQLPNFTAETPIQNVILHEHHIFLGATNYIYVLNEEDLQKVAEYKTGPVLEHPDCFPCQDCSSKANLSGGVWKDNINMALVVDTYYDDQLISCGSVNRGTCQRHVFPHNHTADIQSEVHCIFSPQIEEPSQCPDCVVSALGAKVLSSVKDRFINFFVGNTINSSYFPDHPLHSISVRRLKETKDGFMFLTDQSYIDVLPEFRDSYPIKYVHAFESNNFIYFLTVQRETLDAQTFHTRIIRFCSINSGLHSYMEMPLECILTEKRKKRSTKKEVFNILQAAYVSKPGAQLARQIGASLNDDILFGVFAQSKPDSAEPMDRSAMCAFPIKYVNDFFNKIVNKNNVRCLQHFYGPNHEHCFNRTLLRNSSGCEARRDEYRTEFTTALQRVDLFMGQFSEVLLTSISTFIKGDLTIANLGTSEGRFMQVVVSRSGPSTPHVNFLLDSHPVSPEVIVEHTLNQNGYTLVITGKKITKIPLNGLGCRHFQSCSQCLSAPPFVQCGWCHDKCVRSEECLSGTWTQQICLPAIYKVFPNSAPLEGGTRLTICGWDFGFRRNNKFDLKKTRVLLGNESCTLTLSESTMNTLKCTVGPAMNKHFNMSIIISNGHGTTQYSTFSYVDPVITSISPKYGPMAGGTLLTLTGNYLNSGNSRHISIGGKTCTLKSVSNSILECYTPAQTISTEFAVKLKIDLANRETSIFSYREDPIVYEIHPTKSFISGGSTITGVGKNLNSVSVPRMVINVHEAGRNFTVACQHRSNSEIICCTTPSLQQLNLQLPLKTKAFFMLDGILSKYFDLIYVHNPVFKPFEKPVMISMGNENVLEIKGNDIDPEAVKGEVLKVGNKSCENIHLHSEAVLCTVPNDLLKLNSELNIEWKQAISSTVLGKVIVQPDQNFTGLIAGVVSISTALLLLLGFFLWLKKRKQIKDLGSELVRYDARVHTPHLDRLVSARSVSPTTEMVSNESVDYRATFPEDQFPNSSQNGSCRQVQYPLTDMSPILTSGDSDISSPLLQNTVHIDLSALNPELVQAVQHVVIGPSSLIVHFNEVIGRGHFGCVYHGTLLDNDGKKIHCAVKSLNRITDIGEVSQFLTEGIIMKDFSHPNVLSLLGICLRSEGSPLVVLPYMKHGDLRNFIRNETHNPTVKDLIGFGLQVAKGMKYLASKKFVHRDLAARNCMLDEKFTVKVADFGLARDMYDKEYYSVHNKTGAKLPVKWMALESLQTQKFTTKSDVWSFGVLLWELMTRGAPPYPDVNTFDITVYLLQGRRLLQPEYCPDPLYEVMLKCWHPKAEMRPSFSELVSRISAIFSTFIGEHYVHVNATYVNVKCVAPYPSLLSSEDNADDEVDTRPASFWETS

SEQ ID NO: 11522 - protein, 216 aa, Homo sapiens
MTYAYLFKYIIIGDTGVGKSCLLLQFTDKRFQPVHDLTIGVEFGARMVNIDGKQIKLQIWDTAGQESFRSITRSYYRGAAGALLVYDITRRETFNHLTSWLEDARQHSSSNMVIMLIGNKSDLESRRDVKREEGEAFAREHGLIFMETSAKTACNVEEAFINTAKEIYRKIQQGLFDVHNEANGIKIGPQQSISTSVGPSASQRNSRDIGSNSGCC

SEQ ID NO: 11523 - protein, 918 aa, Homo sapiens
MLQGTCSVLLLWGILGAIQAQQQEVISPDTTERNNNCPEKTDCPIHVYFVLDTSESVTMQSPTDILLFHMKQFVPQFISQLQNEFYLDQVALSWRYGGLHFSDQVEVFSPPGSDRASFIKNLQGISSFRRGTFTDCALANMTEQIRQDRSKGTVHFAVVITDGHVTGSPCGGIKLQAERAREEGIRLFAVAPNQNLKEQGLRDIASTPHELYRNDYATMLPDSTEIDQDTINRIIKVMKHEAYGECYKVSCLEIPGPSGPKGYRGQKGAKGNMGEPGEPGQKGRQGDPGIEGPIGFPGPKGVPGFKGEKGEFGADGRKGAPGLAGKNGTDGQKGKLGRIGPPGCKGDPGNRGPDGYPGEAGSPGERGDQGGKGDPGRPGRRGPPGEIGAKGSKGYQGNSGAPGSPGVKGAKGGPGPRGPKGEPGRRGDPGTKGSPGSDGPKGEKGDPGPEGPRGLAGEVGNKGAKGDRGLPGPRGPQGALGEPGKQGSRGDPGDAGPRGDSGQPGPKGDPGRPGFSYPGPRGAPGEKGEPGPRGPEGGRGDFGLKGEPGRKGEKGEPADPGPPGEPGPRGPRGVPGPEGEPGPPGDPGLTECDVMTYVRETCGCCDCEKRCGALDVVFVIDSSESIGYTNFTLEKNFVINVVNRLGAIAKDPKSETGTRVGVVQYSHEGTFEAIQLDDERIDSLSSFKEAVKNLEWIAGGTWTPSALKFAYDRLIKESRRQKTRVFAVVITDGRHDPRDDDLNLRALCDRDVTVTAIGIGDMFHEKHESENLYSIACDKPQQVRNMTLFSDLVAEKFIDDMEDVLCPDPQIVCPDLPCQTDAPWPGGEPPVTFLRTEEGPDATFPRTIPLIQQLLNATELTQDPAAYSQLVAVLVYTAERAKFATGVERQDWMELFIDTFKLVHRDIVGDPETALALC

SEQ ID NO: 11524 - protein, 585 aa, Homo sapiens
MSNPRKRSIPMRDSNTGLEQLLAEDSFDESDFSEIDDSDNFSDSALEADKIRPLSHLESDGKSSTSSDSGRSMKWSARAMIPRQRYDFTGTPGRKVDVSDITDPLQYFELFFTEELVSKITRETNAQAALLASKPPGPKGFSRMDKWKDTDNDELKVFFAVMLLQGIVQKPELEMFWSTRPLLDTPYLRQIMTGERFLLLFRCLHFVNNSSISAGQSKAQISLQKIKPVFDFLVNKFSTVYTPNRNIAVDESLMLFKGPLAMKQYLPTKRVRFGLKLYVLCESQSGYVWNALVHTGPGMNLKDSADGLKSSRIVLTLVNDLLGQGYCVFLDNFNISPMLFRELHQNRTDAVGTARLNRKQIPNDLKKRIAKGTTVARFCGELMALKWCDGKEVTMLSTFHNDTVIEVNNRNGKKTKRPRVIVDYNENMGAVDSADQMLTSYPSERKRHKVWYKKFFHHLLHITVLNSYILFKKDNPEHTMSHINFRLALIERMLEKHHKPGQQHLRGRPCSDDVTPLRLSGRHFPKSIPATSGKQNPTGRCKICCSQYDKDGKKIRKETRYFCAECDVPLCVVPCFEIYHTKKNY

SEQ ID NO: 11525 - protein, 271 aa, Homo sapiens
MEAEGLDWLLVPLHQLVSWGAAAAMVFGGVVPYVPQYRDIRRTQNADGFSTYVCLVLLVANILRILFWFGRRFESPLLWQSAIMILTMLLMLKLCTEVRVANELNARRRSFTAADSKDEEVKVAPRRSFLDFDPHHFWQWSSFSDYVQCVLAFTGVAGYITYLSIDSALFVETLGFLAVLTEAMLGVPQLYRNHRHQSTEGMSIKMVLMWTSGDAFKTAYFLLKGAPLQFSVCGLLQVLVDLAILGQAYAFARHPQKPAPHAVHPTGTKAL

SEQ ID NO: 11526 - protein, 2174 aa, Homo sapiens
MSASFVPNGASLEDCHCNLFCLADLTGIKWKKYVWQGPTSAPILFPVTEEDPILSSFSRCLKADVLGVWRRDQRPGRRELWIFWWGEDPSFADLIHHDLSEEEDGVWENGLSYECRTLLFKAVHNLLERCLMNRNFVRIGKWFVKPYEKDEKPINKSEHLSCSFTFFLHGDSNVCTSVEINQHQPVYLLSEEHITLAQQSNSPFQVILCPFGLNGTLTGQAFKMSDSATKKLIGEWKQFYPISCCLKEMSEEKQEDMDWEDDSLAAVEVLVAGVRMIYPACFVLVPQSDIPTPSPVGSTHCSSSCLGVHQVPASTRDPAMSSVTLTPPTSPEEVQTVDPQSVQKWVKFSSVSDGFNSDSTSHHGGKIPRKLANHVVDRVWQECNMNRAQNKRKYSASSGGLCEEATAAKVASWDFVEATQRTNCSCLRHKNLKSRNAGQQGQAPSLGQQQQILPKHKTNEKQEKSEKPQKRPLTPFHHRVSVSDDVGMDADSASQRLVISAPDSQVRFSNIRTNDVAKTPQMHGTEMANSPQPPPLSPHPCDVVDEGVTKTPSTPQSQHFYQMPTPDPLVPSKPMEDRIDSLSQSFPPQYQEAVEPTVYVGTAVNLEEDEANIAWKYYKFPKKKDVEFLPPQLPSDKFKDDPVGPFGQESVTSVTELMVQCKKPLKVSDELVQQYQIKNQCLSAIASDAEQEPKIDPYAFVEGDEEFLFPDKKDRQNSEREAGKKHKVEDGTSSVTVLSHEEDAMSLFSPSIKQDAPRPTSHARPPSTSLIYDSDLAVSYTDLDNLFNSDEDELTPGSKKSANGSDDKASCKESKTGNLDPLSCISTADLHKMYPTPPSLEQHIMGFSPMNMNNKEYGSMDTTPGGTVLEGNSSSIGAQFKIEVDEGFCSPKPSEIKDFSYVYKPENCQILVGCSMFAPLKTLPSQYLPPIKLPEECIYRQSWTVGKLELLSSGPSMPFIKEGDGSNMDQEYGTAYTPQTHTSFGMPPSSAPPSNSGAGILPSPSTPRFPTPRTPRTPRTPRGAGGPASAQGSVKYENSDLYSPASTPSTCRPLNSVEPATVPSIPEAHSLYVNLILSESVMNLFKDCNFDSCCICVCNMNIKGADVGVYIPDPTQEAQYRCTCGFSAVMNRKFGNNSGLFLEDELDIIGRNTDCGKEAEKRFEALRATSAEHVNGGLKESEKLSDDLILLLQDQCTNLFSPFGAADQDPFPKSGVISNWVRVEERDCCNDCYLALEHGRQFMDNMSGGKVDEALVKSSCLHPWSKRNDVSMQCSQDILRMLLSLQPVLQDAIQKKRTVRPWGVQGPLTWQQFHKMAGRGSYGTDESPEPLPIPTFLLGYDYDYLVLSPFALPYWERLMLEPYGSQRDIAYVVLCPENEALLNGAKSFFRDLTAIYESCRLGQHRPVSRLLTDGIMRVGSTASKKLSEKLVAEWFSQAADGNNEAFSKLKLYAQVCRYDLGPYLASLPLDSSLLSQPNLVAPTSQSLITPPQMTNTGNANTPSATLASAASSTMTVTSGVAISTSVATANSTLTTASTSSSSSSNLNSGVSSNKLPSFPPFGSMNSNAAGSMSTQANTVQSGQLGGQQTSALQTAGISGESSSLPTQPHPDVSESTMDRDKVGIPTDGDSHAVTYPPAIVVYIIDPFTYENTDESTNSSSVWTLGLLRCFLEMVQTLPPHIKSTVSVQIIPCQYLLQPVKHEDREIYPQHLKSLAFSAFTQCRRPLPTSTNVKTLTGFGPGLAMETALRSPDRPECIRLYAPPFILAPVKDKQTELGETFGEAGQKYNVLFVGYCLSHDQRWILASCTDLYGELLETCIINIDVPNRARRKKSSARKFGLQKLWEWCLGLVQMSSLPWRVVIGRLGRIGHGELKDWSCLLSRRNLQSLSKRLKDMCRMCGISAADSPSILSACLVAMEPQGSFVIMPDSVSTGSVFGRSTTLNMQTSQLNTPQDTSCTHILVFPTSASVQVASATYTTENLDLAFNPNNDGADGMGIFDLLDTGDDLDPDIINILPASPTGSPVHSPGSHYPHGGDAGKGQSTDRLLSTEPHEEVPNILQQPLALGYFVSTAKAGPLPDWFWSACPQAQYQCPLFLKASLHLHVPSVQSDELLHSKHSHPLDSNQTSDVLRFVLEQYNALSWLTCDPATQDRRSCLPIHFVVLNQLYNFIMNML

SEQ ID NO: 11527 - protein, 590 aa, Homo sapiens
MAGAIASRMSFSSLKRKQPKTFTVRIVTMDAEMEFNCEMKWKGKDLFDLVCRTLGLRETWFFGLQYTIKDTVAWLKMDKKVLDHDVSKEEPVTFHFLAKFYPENAEEELVQEITQHLFFLQVKKQILDEKIYCPPEASVLLASYAVQAKYGDYDPSVHKRGFLAQEELLPKRVINLYQMTPEMWEERITAWYAEHRGRARDEAEMEYLKIAQDLEMYGVNYFAIRNKKGTELLLGVDALGLHIYDPENRLTPKISFPWNEIRNISYSDKEFTIKPLDKKIDVFKFNSSKLRVNKLILQLCIGNHDLFMRRRKADSLEVQQMKAQAREEKARKQMERQRLAREKQMREEAERTRDELERRLLQMKEEATMANEALMRSEETADLLAEKAQITEEEAKLLAQKAAEAEQEMQRIKATAIRTEEEKRLMEQKVLEAEVLALKMAEESERRAKEADQLKQDLQEAREAERRAKQKLLEIATKPTYPPMNPIPAPLPPDIPSFNLIGDSLSFDFKDTDMKRLSMEIEKEKVEYMEKSKHLQEQLNELKTEIEALKLKERETALDILHNENSDRGGSSKHNTIKKPQAQGRRPICI

SEQ ID NO: 11528 - protein, 575 aa, Homo sapiens
MPGSPVEVKIQSRSSPPTMPPLPPINPGGPRPVSFTPTALSNGINHSPPTLNGAPSPPQRFSNGPASSTSSALTNQQLPATCGARQLSKLKRFLTTLQQFGNDISPEIGEKVRTLVLALVNSTVTIEEFHCKLQEATNFPLRPFVIPFLKANLPLLQRELLHCARAAKQTPSQYLAQHEHLLLNTSIASPADSSELLMEVHGNGKRPSPERREENSFDRDTIAPEPPAKRVCTISPAPRHSPALTVPLMNPGGQFHPTPPPLQHYTLEDIATSHLYREPNKMLEHREVRDRHHSLGLNGGYQDELVDHRLTEREWADEWKHLDHALNCIMEMVEKTRRSMAVLRRCQESDREELNYWKRRYNENTELRKTGTELVSRQHSPGSADSLSNDSQREFNSRPGTGYVPVEFWKKTEEAVNKVKIQAMSEVQKAVAEAEQKAFEVIATERARMEQTIADVKRQAAEDAFLVINEQEESTENCWNCGRKASETCSGCNIARYCGSFCQHKDWERHHRLCGQNLHGQSPHGQGRPLLPVGRGSSARSADCSVPSPALDKTSATTSRSSTPASVTAIDTNGL

SEQ ID NO: 11529 - protein, 189 aa, Homo sapiens
MPGVARLPLLLGLLLLPRPGRPLDLADYTYDLAEEDDSEPLNYKDPCKAAAFLGDIALDEEDLRAFQVQQAVDLRRHTARKSSIKAAVPGNTSTPSCQSTNGQPQRGACGRWRGRSRSRRAATSRPERVWPDGVIPFVIGGNFTGSQRAVFRQAMRHWEKHTCVTFLERTDEDSYIVFTYRPCGSGPPP

SEQ ID NO: 11530 - protein, 281 aa, Homo sapiens
MGQKKQRPARAGQPHSSSDAAQAPAEQPHSSSDAAQAPCPRERCLGPPTTPGPYRSIYFSSPKGHLTRLGLEFFDQPAVPLARAFLGQVLVRRLPNGTELRGRIVETEAYLGPEDEAAHSRGGRQTPRNRGMFMKPGTLYVYIIYGMYFCMNISSQGDGACVLLRALEPLEGLETMRQLRSTLRKGTASRVLKDRELCSGPSKLCQALAINKSFDQRDLAQDEAVWLERGPLEPSEPAVVAAARVGVGHAGEWARKPLRFYVRGSPWVSVVDRVAEQDTQA

SEQ ID NO: 11531 - protein, 230 aa, Homo sapiens
MPWTILLFAAGSLAIPAPSIRLVPPYPSSQEDPIHIACMAPGNFPGANFTLYRGGQVVQLLQAPTDQRGVTFNLSGGSSKAPGGPFHCQYGVLGELNQSQLSDLSEPVNVSFPVPTWILVLSLSLAGALFLLAGLVAVALVVRKVKLRNLQKKRDRESCWAQINFDSTDMSFDNSLFTVSAKTMPEEDPATLDDHSGTTATPSNSRTRKRPTSTSSSPETPEFSTFRACQ

SEQ ID NO: 11532 - protein, 665 aa, Homo sapiens
MVEAIVEFDYQAQHDDELTISVGEIITNIRKEDGGWWEGQINGRRGLFPDNFVREIKKEMKKDPLTNKAPEKPLHEVPSGNSLLSSETILRTNKRGERRRRRCQVAFSYLPQNDDELELKVGDIIEVVGEVEEGWWEGVLNGKTGMFPSNFIKELSGESDELGISQDEQLSKSSLRETTGSESDGGDSSSTKSEGANGTVATAAIQPKKVKGVGFGDIFKDKPIKLRPRSIEVENDFLPVEKTIGKKLPATTATPDSSKTEMDSRTKSKDYCKVIFPYEAQNDDELTIKEGDIVTLINKDCIDVGWWEGELNGRRGVFPDNFVKLLPPDFEKEGNRPKKPPPPSAPVIKQGAGTTERKHEIKKIPPERPEMLPNRTEEKERPEREPKLDLQKPSVPAIPPKKPRPPKTNSLSRPGALPPRRPERPVGPLTHTRGDSPKIDLAGSSLSGILDKDLSDRSNDIDLEGFDSVVSSTEKLSHPTTSRPKATGRRPPSQSLTSSSLSSPDIFDSPSPEEDKEEHISLAHRGVDASKKTSKTVTISQVSDNKASLPPKPGTMAAGGGGPAPLSSAAPSPLSSSLGTAGHRANSPSLFGTEGKPKMEPAASSQAAVEELRTQVRELRSIIETMKDQQKREIKQLLSELDEEKKIRLRLQMEVNDIKKALQSK

SEQ ID NO: 11533 - protein, 1544 aa, Homo sapiens
MSGTQSTITDRFPLKKPIRHGSILNRESPTDKKQKVERIASHDFDPTDSSSKKTKSSSEESRSEIYGLVQRCVIIQKDDNGFGLTVSGDNPVFVQSVKEDGAAMRAGVQTGDRIIKVNGTLVTHSNHLEVVKLIKSGSYVALTVQGRPPGSPQIPLADSEVEPSVIGHMSPIMTSPHSPGASGNMERITSPVLMGEENNVVHNQKVEILRKMLQKEQERLQLLQEDYNRTPAQRLLKEIQEAKKHIPQLQEQLSKATGSAQDGAVVTPSRPLGDTLTVSEAETDPGDVLGRTDCSSGDASRPSSDNADSPKSGPKERIYLEENPEKSETIQDTDTQSLVGSPSTRIAPHIIGAEDDDFGTEHEQINGQCSCFQSIELLKSRPAHLAVFLHHVVSQFDPATLLCYLYSDLYKHTNSKETRRIFLEFHQFFLDRSAHLKVSVPDEMSADLEKRRPELIPEDLHRHYIQTMQERVHPEVQRHLEDFRQKRSMGLTLAESELTKLDAERDKDRLTLEKERTCAEQIVAKIEEVLMTAQAVEEDKSSTMQYVILMYMKHLGVKVKEPRNLEHKRGRIGFLPKIKQSMKKDKEGEEKGKRRGFPSILGPPRRPSRHDNSAIGRAMELQKARHPKHLSTPSSVSPEPQDSAKLRQSGLANEGTDAGYLPANSMSSVASGASFSQEGGKENDTGSKQVGETSAPGDTLDGTPRTLNTVFDFPPPPLDQVQEEECEVERVTEHGTPKPFRKFDSVAFGESQSEDEQFENDLETDPPNWQQLVSREVLLGLKPCEIKRQEVINELFYTERAHVRTLKVLDQVFYQRVSREGILSPSELRKIFSNLEDILQLHIGLNEQMKAVRKRNETSVIDQIGEDLLTWFSGPGEEKLKHAAATFCSNQPFALEMIKSRQKKDSRFQTFVQDAESNPLCRRLQLKDIIPTQMQRLTKYPLLLDNIAKYTEWPTEREKVKKAADHCRQILNYVNQAVKEAENKQRLEDYQRRLDTSSLKLSEYPNVEELRNLDLTKRKMIHEGPLVWKVNRDKTIDLYTLLLEDILVLLQKQDDRLVLRCHSKILASTADSKHTFSPVIKLSTVLVRQVATDNKALFVISMSDNGAQIYELVAQTVSEKTVWQDLICRMAASVKEQSTKPIPLPQSTPGEGDNDEEDPSKLKEEQHGISVTGLQSPDRDLGLESTLISSKPQSHSLSTSGKSEVRDLFVAERQFAKEQHTDGTLKEVGEDYQIAIPDSHLPVSEERWALDALRNLGLLKQLLVQQLGLTEKSVQEDWQHFPRYRTASQGPQTDSVIQNSENIKAYHSGEGHMPFRTGTGDIATCYSPRTSTESFAPRDSVGLAPQDSQASNILVMDHMIMTPEMPTMEPEGGLDDSGEHFFDAREAHSDENPSEGDGAVNKEEKDVNLRISGNYLILDGYDPVQESSTDEEVASSLTLQPMTGIPAVESTHQQQHSPQNTHSDGAISPFTPEFLVQQRWGAMEYSCFEIQSPSSCADSQSQIMEYIHKIEADLEHLKKVEESYTILCQRLAGSALTDKHSDKS

SEQ ID NO: 11534 - protein, 108 aa, Homo sapiens
MLGLRPPLLALVGLLSLGCVLSQECTKFKVSSCRECIESGPGCTWCQKLGAALGPPAHATAASSPRRRSRVAPVCPRTEQGGQAPGGNYLGQAGFFPSPFWRFSAPLK

SEQ ID NO: 11535 - protein, 712 aa, Homo sapiens
MLGLRPPLLALVGLLSLGCVLSQECTKFKVSSCRECIESGPGCTWCQKLNFTGPGDPDSIRCDTRPQLLMRGCAADDIMDPTSLAETQEDHNGGQKQLSPQKVTLYLRPGFGSFVDKTVLPFVNTHPDKLRNPCPNKEKECQPPFAFRHVLKLTNNSNQFQTEVGKQLISGNLDAPEGGLDAMMQVAACPEEIGWRNVTRLLVFATDDGFHFAGDGKLGAILTPNDGRCHLEDNLYKRSNEFDYPSVGQLAHKLAENNIQPIFAVTSRMVKTYEKLTEIIPKSAVGELSEDSSNVVHLIKNAYNKLSSRVFLDHNALPDTLKVTYDSFCSNGVTHRNQPRGDCDGVQINVPITFQVKVTATECIQEQSFVIRALGFTDIVTVQVLPQCECRCRDQSRDRSLCHGKGFLECGICRCDTGYIGKNCECQTQGRSSQELEGSCRKDNNSIICSGLGDCVCGQCLCHTSDVPGKLIYGQYCECDTINCERYNGQVCGGPGRGLCFCGKCRCHPGFEGSACQCERTTEGCLNPRRVECSGRGRCRCNVCECHSGYQLPLCQECPGCPSPCGKYISCAECLKFEKGPFGKNCSAACPGLQLSNNPVKGRTCKERDSEGCWVAYTLEQQDGMDRYLIYVDESRECVAGPNIAAIVGGTVAGIVLIGILLLVIWKALIHLSDLREYRRFEKEKLKSQWNNDNPLFKSATTTVMNPKFAES

SEQ ID NO: 11536 - protein, 197 aa, Homo sapiens
MGNHAGKRELNAEKASTNSETNRGESEKKRNLGELSRTTSEDNEVFGEADANQNNGTSSQDTAVTDSKRTADPKNAWQDAHPADPGSRPHLIRLFSRDAPGREDNTFKDRPSESDELQTIQEDSAATSESLDVMASQKRPSQRHGSKYLATASTMDHARHGFLPRHRDTGILDSIGRFFGGDRGAPKRGSGKVSSEE

SEQ ID NO: 11537 - protein, 90 aa, Homo sapiens
MKTLPVLVLSLTLLTVFSETSPILTEKQAKQLLRSRRQDRPSKPGFPDEPMREYMHHLLALEHRAEEQFLEHWLNPHCKPHCDRNRIHPV

SEQ ID NO: 11538 - protein, 683 aa, Homo sapiens
MSSESSKKRKPKVIRSDGAPAEGKRNRSDTEQEGKYYSEEAEVDLRDPGRDYELYKYTCQELQRLMAEIQDLKSRGGKDVAIEIEERRIQSCVHFMTLKKLNRLAHIRLKKGRDQTHEAKQKVDAYHLQLQNLLYEVMHLQKEITKCLEFKSKHEEIDLVSLEEFYKEAPPDISKAEVTMGDPHQQTLARLDWELEQRKRLAEKYRECLSNKEKILKEIEVKKEYLSSLQPRLNSIMQASLPVQEYLFMPFDQAHKQYETARHLPPPLYVLFVQATAYGQACDKTLSVAIEGSVDEAKALFKPPEDSQDDESDSDAEEEQTTKRRRPTLGVQLDDKRKEMLKRHPLSVMLDLKCKDDSVLHLTFYYLMNLNIMTVKAKVTTAMELITPISAGDLLSPDSVLSCLYPGDHGKKTPNPANQYQFDKVGILTLSDYVLELGHPYLWVQKLGGLHFPKEQPQQTVIADHSLSASHMETTMKLLKTRVQSRLALHKQFASLEHGIVPVTSDCQYLFPAKVVSRLVKWVTVAHEDYMELHFTKDIVDAGLAGDTNLYYMALIERGTAKLQAAVVLNPGYSSIPPVFQLCLNWKGEKTNSNDDNIRAMEGEVNVCYKELCGPWPSHQLLTNQLQRLCVLLDVYLETESHDDSVEGPKEFPQEKMCLRLFRGPSRMKPFKYNHPQGFFSHR

SEQ ID NO: 11539 - protein, 648 aa, Homo sapiens
MEVKGKKQFTGKSTKTAQEKNRFHKNSDSGSSKTFPTRKVAKEGGPKVTSRNFEKSITKLGKKGVKQFKNKQQGDKSPKNKFQPANKFNKKRKFQPDGRSDESAAKKPKWDDFKKKKKELKQSRQLSDKTNYDIVVRAKQMWEILRRKDCDKEKRVKLMSDLQKLIQGKIKTIAFAHDSTRVIQCYIQYGNEEQRKQAFEELRDDLVELSKAKYSRNIVKKFLMYGSKPQIAEIIRSFKGHVRKMLRHAEASAIVEYAYNDKAILEQRNMLTEELYGNTFQLYKSADHRTLDKVLEVQPEKLELIMDEMKQILTPMAQKEAVIKHSLVHKVFLDFFTYAPPKLRSEMIEAIREAVVYLAHTHDGARVAMHCLWHGTPKDRKVIVKTMKTYVEKVANGQYSHLVLLAAFDCIDDTKLVKQIIISEIISSLPSIVNDKYGRKVLLYLLSPRDPAHTVREIIEVLQKGDGNAHSKKDTEVRRRELLESISPALLSYLQEHAQEVVLDKSACVLVSDILGSATGDVQPTMNAIASLAATGLHPGGKDGELHIAEHPAGHLVLKWLIEQDKKMKENGREGCFAKTLVEHVGMKNLKSWASVNRGAIILSSLLQSCDLEVANKVKAALKSLIPTLEKTKSTSKGIEILLEKLST

SEQ ID NO: 11540 - protein, 107 aa, Homo sapiens
MAPGVARGPTPYWRLRLGGAALLLLLIPVAAAQEPPGAACSQNTNKTCEECLKNVSCLWCNTNKACLDYPVTSVLPPASLCKLSSARWGVCWGLFKEENPYARFENN

SEQ ID NO: 11541 - protein, 196 aa, Homo sapiens
MDDTLFQLKFTAKQLEKLAKKAEKDSKAEQAKVKKALLQKNVECARVYAENAIRKKNEGVNWLRMASRVDAVASKVQTAVTMKGVTKNMAQVTKALDKALSTMDLQKVSSVMDRFEQQVQNLDVHTSVMEDSMSSATTLTTPQEQVDSLIMQIAEENGLEVLDQLSQLPEGASAVGESSVRSQEDQLSRRLAALRN

SEQ ID NO: 11542 - protein, 533 aa, Homo sapiens
MDSSQHLVTFEDVAVDFTQEEWTLLDQAQRDLYRDVMLENYKNLIILAGSELFKRSLMSGLEQMEELRTGVTGVLQELDLQLKTKGSPLLQDISAERSPNGVQLERSNTAEKLYDSNHSGKVFNEHPFLMTHMITHIGEKTSEDNQSGKALRKNFPHSFYKKSHAEGKMPKCVKHEKAFNQFPNLTRQNKTHTQEKLCECKDCWRTFLNQSSLKLHIRSHNGDKHYVCKECGKAFSNSSHLIGHGRIHSGEKPYVCKECGKAFTQSTGLKLHIRTHSGEKPYKCKECGKAFTHSSYLTDHTRIHSGKKPYVCMECGKAFTRSTGLILHMRIHTGEKPYECKECGKAFIHSSYLTKHVRIHSGEKLYLCKACGKAFTRSSGLVLHMRTHTGEKPYECKECGKAFNNSSMLSQHVRIHTGEKPYECKECGKAFTQSSGLSTHLRTHTGEKACECKECGKAFARSTNLNMHMRTHTGEKPYACKECGKAFRYSTYLNVHTRTHTGAKPYECKKCGKNFTQSSALAKHLRTKACEKT

SEQ ID NO: 11543 - protein, 2481 aa, Homo sapiens
MEQSPPPAPEPTQGPTPARSRRRREPESPPASAPIPLFGADTIGQRSPDGPVLSKAEFVEKVRQSNQACHDGDFHTAIVLYNEALAVDPQNCILYSNRSAAYMKIQQYDKALDDAIKARLLNPKWPKAYFRQGVALQYLGRHADALAAFASGLAQDPKSLQLLVGMVEAAMKSPMRDSLEPTYQQLQKMKLDKSPFVVVSVVGQELLTAGHHGASVVVLEAALKIGTCSLKLRGSVFSALSSAYWSLGNTEKSTGYMQQDLDVAKTLGDQTGECRAHGNLGSAFFSKGNYREALTNHRHQLVLAMKLKDREAASSALSSLGHVYTAIGDYPNALASHKQCVLLAKQSKDELSEARELGNMGAVYIAMGDFENAVQCHEQHLKIAKDLGNKREEARAYSNLGSAYHYRRNFDKAMSYHNYVLELAQELMEKAIEMRAYAGLGHAARCMQDLERAKQYHEQQLGIAEDLKDRAAEGRASSNLGIIHQMKGDYDTALKLHKTHLCIAQELSDYAAQGRAYGNMGNAYNALGMYDQAVKYHRQELQISMEVNDRASQASTHGNLAVAYQALGAHDRALQHYQNHLNIARELRDIQSEARALSNLGNFHCSRGEYVQAAPYYEQYLRLAPDLQDMEGEGKVCHNLGYAHYCLGNYQEAVKYYEQDLALAKDLHDKLSQAKAYCNLGLAFKALLNFSKAEECQKYLLSLAQSLNNSQAKFRALGNLGDIFICKKDINGAIKFYEQQLGLAHQVKDRRLEASAYAALGTAYRMIQKYDKALGYHTQELEVYQELSDLPGECRAHGHLAAVYMALGKYTMAFKCYEEQLDLGQKLKDPSLEAQVYGNMGITKMNMNVMEEAIGYFEQQLAMLQQLSGNESVLDRGRAYGNLGDCYEALGDYEEAIKYYEQYLSVAQSLNRMQDQAKAYRGLGNGHRAMGSLQQALVCFEKRLVVAHELGEAFNKAQAYGELGSLHSQLGNYEQAISCLERQLNIARDMKDRALESDAACGLGGVYQQMGEYDTALQYHQLDLQIAEETNNPTCQGRAYGNLGLTYESLGTFERAVVYQEQHLSIAAQMNDLAAKTVSYSSLGRTHHALQNYSQAVMYLQEGLRLAEQLGRREDEAKIRHGLGLSLWASGNLEEAQHQLYRASALFETIRHEAQLSTDYKLSLFDLQTSSYQALQRVLVSLGHHDEALAVAERGRTRAFADLLVERQTGQQDSDPYSPVTIDQILEMVNGQRGLVLYYSLAAGYLYSWLLAPGAGIVKFHEHYLGENTVENSSDFQASSSVTLPTATGSALEQHIASVREALGVESHYSRACASSETESEAGDIMDQQFEEMNNKLNSVTDPTGFLRMVRRNNLFNRSCQSMTSLFSNTVSPTQDGTSSLPRRQSSFAKPPLRALYDLLIAPMEGGLMHSSGPVGRHRQLILVLEGELYLIPFALLKGSSSNEYLYERFGLLAVPSIRSLSVQSKSHLRKNPPTYSSSTSMAAVIGNPKLPSAVMDRWLWGPMPSAEEEAYMVSELLGCQPLVGSVATKERVMSALTQAECVHFATHISWKLSALVLTPSMDGNPASSKSSFGHPYTIPESLRVQDDASDGESISDCPPLQELLLTAADVLDLQLPVKLVVLGSSQESNSKVTADGVIALTRAFLAAGAQCVLVSLWPVPVAASKMFIHAFYSSLLNGLKASAALGEAMKVVQSSKAFSHPSNWAGFMLIGSDVKLNSPSSLIGQALTEILQHPERARDALRVLLHLVEKSLQRIQNGQRNAMYTSQQSVENKVGGIPGWQALLTAVGFRLDPPTSGLPAAVFFPTSDPGDRLQQCSSTLQSLLGLPNPALQALCKLITASETGEQLISRAVKNMVGMLHQVLVQLQAGEKEQDLASAPIQVSISVQLWRLPGCHEFLAALGFDLCEVGQEEVILKTGKQANRRTVHFALQSLLSLFDSTELPKRLSLDSSSSLESLASAQSVSNALPLGYQQPPFSPTGADSIASDAISVYSLSSIASSMSFVSKPEGGSEGGGPGGRQDHDRSKNAYLQRSTLPRSQLPPQTRPAGNKDEEEYEGFSIISNEPLATYQENRNTCFSPDHKQPQPGTAGGMRVSVSSKGSISTPNSPVKMTLIPSPNSPFQKVGKLASSDTGESDQSSTETDSTVKSQEESNPKLDPQELAQKILEETQSHLIAVERLQRSGGQVSKSNNPEDGVQAPSSTAVFRASETSAFSRPVLSHQKSQPSPVTVKPKPPARSSSLPKVSSGYSSPTTSEMSIKDSPSQHSGRPSPGCDSQTSQLDQPLFKLKYPSSPYSAHISKSPRNMSPSSGHQSPAGSAPSPALSYSSAGSARSSPADAPDIDKLKMAAIDEKVQAVHNLKMFWQSTPQHSTGPMKIFRGAPGTMTSKRDVLSLLNLSPRHNKKEEGVDKLELKELSLQQHDGAPPKAPPNGHWRTETTSLGSLPLPAGPPATAPARPLRLPSGNGYKFLSPGRFFPSSKC

SEQ ID NO: 11544 - protein, 124 aa, Homo sapiens
MAEQSDEAVKYYTLEEIQKHNHSKSTWLILHHKVYDLTKFLEEHPGGEEVLREQAGGDATENFEDVGHSTDAREMSKTFIIGELHPETLITTIDSSSSWWTNWVIPAISAVAVALMYRLYMAED

SEQ ID NO: 11545 - protein, 552 aa, Homo sapiens
MPGRTWELCLLLLLGLGLGSQEALPPPCESEIYCHGELLNQVQMAKLYQDDKQFVDMPLSIAPEQVLQTFTELSRDHNHSIPREQLQAFVHEHFQAKGQELQPWTPADWKDSPQFLQKISDAKLRAWAGQLHQLWKKLGKKMKPEVLSHPERFSLIYSEHPFIVPGGRFVEFYYCYGHVPNGGRVYYLQRSQPPLLTLMMDCYLTHTNDTAFLQENIETLALELDFWTKNRTVSVSLEGKNYLLNRYYVPYGGPRPESYSKDVELADTLPEGDREALWAELKAGAESGWDFSSRWLIGGPNPNSLSGIRTSKLVPVDLNAFLCQAEELMSNFYSRLGNDSQATKYRILRSQRLAALNTVLWDEQTGAWFDYDLEKKKKNREFYPSNLTPLWAGCFSDPGVADKALKYLEDNRILTYQYGIPTSLQKTGQQWDFPNAWAPLQDLVIRGLAKAPLRRAQEVAFQLAQNWIRTNFDVYSQKSAMYEKYDVSNGGQPGGGGEYEVQEGFGWTNGVVLMLLDRYGDRLTSGAKLAFLEPHCLAATLLPSLLLSLLPW

SEQ ID NO: 11546 - protein, 656 aa, Homo sapiens
MASTDYSTYSQAAAQQGYSAYTAQPTQGYAQTTQAYGQQSYGTYGQPTDVSYTQAQTTATYGQTAYATSYGQPPTGYTTPTAPQAYSQPVQGYGTGAYDTTTATVTTTQASYAAQSAYGTQPAYPAYGQQPAATAPTRPQDGNKPTETSQPQSSTGGYNQPSLGYGQSNYSYPQVPGSYPMQPVTAPPSYPPTSYSSTQPTSYDQSSYSQQNTYGQPSSYGQQSSYGQQSSYGQQPPTSYPPQTGSYSQAPSQYSQQSSSYGQQSSFRQDHPSSMGVYGQESGGFSGPGENRSMSGPDNRGRGRGGFDRGGMSRGGRGGGRGGMGSAGERGGFNKPGGPMDEGPDLDLGPPVDPDEDSDNSAIYVQGLNDSVTLDDLADFFKQCGVVKMNKRTGQPMIHIYLDKETGKPKGDATVSYEDPPTAKAAVEWFDGKDFQGSKLKVSLARKKPPMNSMRGGLPPREGRGMPPPLRGGPGGPGGPGGPMGRMGGRGGDRGGFPPRGPRGSRGNPSGGGNVQHRAGDWQCPNPGCGNQNFAWRTECNQCKAPKPEGFLPPPFPPPGGDRGRGGPGGMRGGRGGLMDRGGPGGMFRGGRGGDRGGFRGGRGMDRGGFGGGRRGGPGGPPGPLMEQMGGRRGGRGGPGKMDKGEHRQERRDRPY

SEQ ID NO: 11547 - protein, 535 aa, Homo sapiens
MKKISLKTLRKSFNLNKSKEETDFMVVQQPSLASDFGKDDSLFGSCYGKDMASCDINGEDEKGGKNRSKSESLMGTLKRRLSAKQKSKGKAGTPSGSSADEDTFSSSSAPIVFKDVRAQRPIRSTSLRSHHYSPAPWPLRPTNSEETCIKMEVRVKALVHSSSPSPALNGVRKDFHDLQSETTCQEQANSLKSSASHNGDLHLHLDEHVPVVIGLMPQDYIQYTVPLDEGMYPLEGSRSYCLDSSSPMEVSAVPPQVGGRAFPEDESQVDQDLVVAPEIFVDQSVNGLLIGTTGVMLQSPRAGHDDVPPLSPLLPPMQNNQIQRNFSGLTGTEAHVAESMRCHLNFDPNSAPGVARVYDSVQSSGPMVVTSLTEELKKLAKQGWYWGPITRWEAEGKLANVPDGSFLVRDSSDDRYLLSLSFRSHGKTLHTRIEHSNGRFSFYEQPDVEGHTSIVDLIEHSIRDSENGAFCYSRSRLPGSATYPVRLTNPVSRFMQVRSLQYLCRFVIRQYTRIDLIQKLPLPNKMKDYLQEKHY

SEQ ID NO: 11548 - protein, 375 aa, Homo sapiens
MKLTRKMVLTRAKASELHSVRKLNCWGSRLTDISICQEMPSLEVITLSVNSISTLEPVSRCQRLSELYLRRNRIPSLAELFYLKGLPRLRVLWLAENPCCGTSPHRYRMTVLRTLPRLQKLDNQAVTEEELSRALSEGEEITAAPEREGTGHGGPKLCCTLSSLSSAAETGRDPLDSEEEATGAQDERGLKPPSRGQFPSLSARDASSSHRGRVSGGPLGAAAASAHCTHCTETVGREHGASQGPVGREHGASQGLEELCPRGSCVCGSVNAHTRVTRAPHGAVLAPQPLLLSWSVECGPGPCWAEGNRSHVEEVPHTRPQAGLLCSDSPSVPNVLTAILLLLRELDAEGLEAVQQTVGSRLQALRGEEVQEHAE

SEQ ID NO: 11549 - protein, 710 aa, Homo sapiens
MSAQGDCEFLVQRARELVPQDLWAAKAWLITARSLYPADFNIQYEMYTIERNAERTATAGRLLYDMFVNFPDQPVVWREISIITSALRNDSQDKQTQFLRSLFETLPGRVQCEMLLKVTEQCFNTLERSEMLLLLLRRFPETVVQHGVGLGEALLEAETIEEQESPVNCFRKLFVCDVLPLIINNHDVRLPANLLYKYLNKAAEFYINYVTRSTQIENQHQGAQDTSDLMSPSKRSSQKYIIEGLTEKSSQIVDPWERLFKILNVVGMRCEWQMDKGRRSYGDILHRMKDLCRYMNNFDSEAHAKYKNQVVYSTMLVFFKNAFQYVNSIQPSLFQGPNAPSQVPLVLLEDVSNVYGDVEIDRNKHIHKKRKLAEGREKTMSSDDEDCSAKGRNRHIVVNKAELANSTEVLESFKLARESWELLYSLEFLDKEFTRICLAWKTDTWLWLRIFLTDMIIYQGQYKKAIASLHHLAALQGSISQPQITGQGTLEHQRALIQLATCHFALGEYRMTCEKVLDLMCYMVLPIQDGGKSQEEPSKVKPKFRKGSDLKLLPCTSKAIMPYCLHLMLACFKLRAFTDNRDDMALGHVIVLLQQEWPRGENLFLKAVNKICQQGNFQYENFFNYVTNIDMLEEFAYLRTQEGGKIHLELLPNQGMLIKHHTVTRGITKGVKEDFRLAMERQVSRCGENLMVVLHRFCINEKILLLQTLT

SEQ ID NO: 11550 - protein, 419 aa, Homo sapiens
MAASSLEQKLSRLEAKLKQENREARRRIDLNLDISPQRPRPTLQLPLANDGGSRSPSSESSPQHPTPPARPRHMLGLPSTLFTPRSMESIEIDQKLQEIMKQTGYLTIGGQRYQAEINDLENLGEMGSGTCGQVWKMRFRKTGHVIAVKQMRRSGNKEENKRILMDLDVVLKSHDCPYIVQCFGTFITNTDVFIAMELMGTCAEKLKKRMQGPIPERILGKMTVAIVKALYYLKEKHGVIHRDVKPSNILLDERGQIKLCDFGISGRLVDSKAKTRSAGCAAYMAPERIDPPDPTKPDYDIRADVWSLGISLVELATGQFPYKNCKTDFEVLTKVLQEEPPLLPGHMGFSGDFQSFVKDCLTKDHRKRPKYNKLLEHSFIKRYETLEVDVASWFKDVMAKTESPRTSGVLSQPHLPFFR

SEQ ID NO: 11551 - protein, 426 aa, Homo sapiens
MAASSLEQKLSRLEAKLKQENREARRRIDLNLDISPQRPRPTLQLPLANDGGSRSPSSESSPQHPTPPARPRHMLGLPSTLFTPRSMESIEIDQKLQEIMKQTGYLTIGGQRYQAEINDLENLGEMGSGTCGQVWKMRFRKTGHVIAVKQMRRSGNKEENKRILMDLDVVLKSHDCPYIVQCFGTFITNTDVFIAMELMGTCAEKLKKRMQGPIPERILGKMTVAIVKALYYLKEKHGVIHRDVKPSNILLDERGQIKLCDFGISGRLVDSKAKTRSAGCAAYMAPERIDPPDPTKPDYDIRADVWSLGISLPCPSPSQVELATGQFPYKNCKTDFEVLTKVLQEEPPLLPGHMGFSGDFQSFVKDCLTKDHRKRPKYNKLLEHSFIKRYETLEVDVASWFKDVMAKTESPRTSGVLSQPHLPFFR

SEQ ID NO: 11552 - protein, 435 aa, Homo sapiens
MAASSLEQKLSRLEAKLKQENREARRRIDLNLDISPQRPRPIIVITLSPAPAPSQRAALQLPLANDGGSRSPSSESSPQHPTPPARPRHMLGLPSTLFTPRSMESIEIDQKLQEIMKQTGYLTIGGQRYQAEINDLENLGEMGSGTCGQVWKMRFRKTGHVIAVKQMRRSGNKEENKRILMDLDVVLKSHDCPYIVQCFGTFITNTDVFIAMELMGTCAEKLKKRMQGPIPERILGKMTVAIVKALYYLKEKHGVIHRDVKPSNILLDERGQIKLCDFGISGRLVDSKAKTRSAGCAAYMAPERIDPPDPTKPDYDIRADVWSLGISLVELATGQFPYKNCKTDFEVLTKVLQEEPPLLPGHMGFSGDFQSFVKDCLTKDHRKRPKYNKLLEHSFIKRYETLEVDVASWFKDVMAKTESPRTSGVLSQPHLPFFR

SEQ ID NO: 11553 - protein, 147 aa, Homo sapiens
MALQRTHSLLLLLLLTLLGLGLVQPSYGQDGMYQRFLRQHVHPEETGGSDRYCNLMMQRRKMTLYHCKRFNTFIHEDIWNIRSICSTTNIQCKNGKMNCHEGVVKVTDCRDTGSSRAPNCRYRAIASTRRVVIACEGNPQVPVHFDG

SEQ ID NO: 11554 - protein, 508 aa, Homo sapiens
MGSCCSCPDKDTVPDNHRNKFKVINVDDDGNELGSGIMELTDTELILYTRKRDSVKWHYLCLRRYGYDSNLFSFESGRRCQTGQGIFAFKCARAEELFNMLQEIMQNNSINVVEEPVVERNNHQTELEVPRTPRTPTTPGFAAQNLPNGYPRYPSFGDASSHPSSRHPSVGSARLPSVGEESTHPLLVAEEQVHTYVNTTGVQEERKNRTSVHVPLEARVSNAESSTPKEEPSSIEDRDPQILLEPEGVKFVLGPTPVQKQLMEKEKLEQLGRDQVSGSGANNTEWDTGYDSDERRDAPSVNKLVYENINGLSIPSASGVRRGRLTSTSTSDTQNINNSAQRRTALLNYENLPSLPPVWEARKLSRDEDDNLGPKTPSLNGYHNNLDPMHNYVNTENVTVPASAHKIEYSRRRDCTPTVFNFDIRRPSLEHRQLNYIQVDLEGGSDSDNPQTPKTPTTPLPQTPTRRTELYAVIDIERTAAMSNLQKALPRDDGTSRKTRHNSTDLPM

SEQ ID NO: 11555 - protein, 313 aa, Homo sapiens
MALLVDRVRGHWRIAAGLLFNLLVSICIVFLNKWIYVYHGFPNMSLTLVHFVVTWLGLYICQKLDIFAPKSLPPSRLLLLALSFCGFVVFTNLSLQNNTIGTYQLAKAMTTPVIIAIQTFCYQKTFSTRIQLTLIPITLGVILNSYYDVKFNFLGMVFAALGVLVTSLYQVWVGAKQHELQVNSMQLLYYQAPMSSAMLLVAVPFFEPVFGEGGIFGPWSVSALLMVLLSGVIAFMVNLSIYWIIGNTSPVTYNMFGHFKFCITLFGGYVLFKDPLSINQALGILCTLFGILAYTHFKLSEQEGSRSKLAQRP

SEQ ID NO: 11556 - protein, 199 aa, Homo sapiens
METFPLLLLSLGLVLAEASESTMKIIKEEFTDEEMQYDMAKSGQEKQTIEILMNPILLVKNTSLSMSKDDMSSTLLTFRSLHYNDPKGNSSGNDKECCNDMTVWRKVSEANGSCKWSNNFIRSSTEVMRRVHRAPSCKFVQNPGISCCESLELENTVCQFTTGKQFPRCQYHSVTSLEKILTVLTGHSLMSWLVCGSKL

SEQ ID NO: 11557 - protein, 984 aa, Homo sapiens
MALDYLLLLLLASAVAAMEETLMDTRTATAELGWTANPASGWEEVSGYDENLNTIRTYQVCNVFEPNQNNWLLTTFINRRGAHRIYTEMRFTVRDCSSLPNVPGSCKETFNLYYYETDSVIATKKSAFWSEAPYLKVDTIAADESFSQVDFGGRLMKVNTEVRSFGPLTRNGFYLAFQDYGACMSLLSVRVFFKKCPSIVQNFAVFPETMTGAESTSLVIARGTCIPNAEEVDVPIKLYCNGDGEWMVPIGRCTCKPGYEPENSVACKACPAGTFKASQEAEGCSHCPSNSRSPAEASPICTCRTGYYRADFDPPEVACTSVPSGPRNVISIVNETSIILEWHPPRETGGRDDVTYNIICKKCRADRRSCSRCDDNVEFVPRQLGLTECRVSISSLWAHTPYTFDIQAINGVSSKSPFPPQHVSVNITTNQAAPSTVPIMHQVSATMRSITLSWPQPEQPNGIILDYEIRYYEKEHNEFNSSMARSQTNTARIDGLRPGMVYVVQVRARTVAGYGKFSGKMCFQTLTDDDYKSELREQLPLIAGSAAAGVVFVVSLVAISIVCSRKRAYSKEAVYSDKLQHYSTGRGSPGMKIYIDPFTYEDPNEAVREFAKEIDVSFVKIEEVIGAGEFGEVYKGRLKLPGKREIYVAIKTLKAGYSEKQRRDFLSEASIMGQFDHPNIIRLEGVVTKSRPVMIITEFMENGALDSFLRQNDGQFTVIQLVGMLRGIAAGMKYLAEMNYVHRDLAARNILVNSNLVCKVSDFGLSRYLQDDTSDPTYTSSLGGKIPVRWTAPEAIAYRKFTSASDVWSYGIVMWEVMSFGERPYWDMSNQDVINAIEQDYRLPPPMDCPAALHQLMLDCWQKDRNSRPRFAEIVNTLDKMIRNPASLKTVATITAVPSQPLLDRSIPDFTAFTTVDDWLSAIKMVQYRDSFLTAGFTSLQLVTQMTSEDLLRIGITLAGHQKKILNSIHSMRVQISQSPTAMA

SEQ ID NO: 11558 - protein, 284 aa, Homo sapiens
MAADGERSPLLSEPIDGGAGGNGLVGPGGSGAGPGGGLTPSAPPYGAGKHAPPQAFPPFPEGHPAVLPGEDPPPYSPLTSPDSGSAPMITCRVCQSLINVEGKMHQHVVKCGVCNEATPIKNAPPGKKYVRCPCNCLLICKVTSQRIACPRPYCKRIINLGPVHPGPLSPEPQPMGVRVICGHCKNTFLWTEFTDRTLARCPHCRKVSSIGRRYPRKRCICCFLLGLLLAVTATGLAFGTWKHARRYGGIYAAWAFVILLAVLCLGRALYWACMKVSHPVQNFS

SEQ ID NO: 11559 - protein, 642 aa, Homo sapiens
MATAMDWLPWSLLLFSLMCETSAFYVPGVAPINFHQNDPVEIKAVKLTSSRTQLPYEYYSLPFCQPSKITYKAENLGEVLRGDRIVNTPFQVLMNSEKKCEVLCSQSNKPVTLTVEQSRLVAERITEDYYVHLIADNLPVATRLELYSNRDSDDKKKEKDVQFEHGYRLGFTDVNKIYLHNHLSFILYYHREDMEEDQEHTYRVVRFEVIPQSIRLEDLKADEKSSCTLPEGTNSSPQEIDPTKENQLYFTYSVHWEESDIKWASRWDTYLTMSDVQIHWFSIINSVVVVFFLSGILSMIIIRTLRKDIANYNKEDDIEDTMEESGWKLVHGDVFRPPQYPMILSSLLGSGIQLFCMILIVIFVAMLGMLSPSSRGALMTTACFLFMFMGVFGGFSAGRLYRTLKGHRWKKGAFCTATLYPGVVFGICFVLNCFIWGKHSSGAVPFPTMVALLCMWFGISLPLVYLGYYFGFRKQPYDNPVRTNQIPRQIPEQRWYMNRFVGILMAGILPFGAMFIELFFIFSAIWENQFYYLFGFLFLVFIILVVSCSQISIVMVYFQLCAEDYRWWWRNFLVSGGSAFYVLVYAIFYFVNKLDIVEFIPSLLYFGYTALMVLSFWLLTGTIGFYAAYMFVRKIYAAVKID

SEQ ID NO: 11560 - protein, 89 aa, Homo sapiens
MISSVKLNLILVLSLSTMHVFWCYPVPSSKVSGKSDYFLILLNSCPTRLDRSKELAFLKPILEKMFVKRSFRNGVGTGMKKTSFQRAKS

SEQ ID NO: 11561 - protein, 271 aa, Homo sapiens
MEHGSIITQARREDALVLTKQGLVSKSSPKKPRGRNIFKALFCCFRAQHVGQSSSSTELAAYKEEANTIAKSDLLQCLQYQFYQIPGTCLLPEVTEEDQGRICVVIDLDETLVHSSFKPINNADFIVPIEIEGTTHQVYVLKRPYVDEFLRRMGELFECVLFTASLAKYADPVTDLLDRCGVFRARLFRESCVFHQGCYVKDLSRLGRDLRKTLILDNSPASYIFHPENAVPVQSWFDDMADTELLNLIPIFEELSGAEDVYTSLGQLRAP

SEQ ID NO: 11562 - protein, 874 aa, Homo sapiens
MNQRSHLGTTYLDTAKGAVETFMKLRARDPASRGDRYMLVTFEEPPYAIKAGWKENHATFMNELKNLQAEGLTTLGQSLRTAFDLLNLNRLVTGIDNYGQGRNPFFLEPAIIITITDGSKLTTTSGVQDELHLPLNSPLPGSELTKEPFRWDQRLFALVLRLPGTMSVESEQLTGVPLDDSAITPMCEVTGGRSYSVCSPRMLNQCLESLVQKVQSGVVINFEKAGPDPSPVEDGQPDISRPFGSQPWHSCHKLIYVRPNPKTGVPIGHWPVPESFWPDQNSPTLPPRTSHPVVKFSCTDCEPMVIDKLPFDKYELEPSPLTQFILERKSPQTCWQVYVSNSAKYSELGHPFGYLKASTALNCVNLFVMPYNYPVLLPLLDDLFKVHKAKPTLKWRQSFESYLKTMPPYYLGPLKKAVRMMGAPNLIADSMEYGLSYSVISYLKKLSQQAKIESDRVIGSVGKKVVQETGIKVRSRSHGLSMAYRKDFQQLLQGISEDVPHRLLDLNMKEYTGFQVALLNKDLKPQTFRNAYDIPRRNLLDHLTRMRSNLLKSTRRFLKGQDEDQVHSVPIAQMGNYQEYLKQVPSPLRELDPDQPRRLHTFGNPFKLDKKGMMIDEADEFVAGPQNKHKRPGEPNMQGIPKRRRCMSPLLRGRQQNPVVNNHIGGKGPPAPTTQAQPDLIKPLPLHKISETTNDSIIHDVVENHVADQLSSDITPNAMDTEFSASSPASLLERPTNHMEALGHDHLGTNDLTVGGFLENHEEPRDKEQCAEENIPASSLNKGKKLMHCRSHEEVNTELKAQIMKEIRKPGRKYERIFTLLKHVQGSLQTRLIFLQNVIKEASRFKKRMLIEQLENFLDEIHRRANQINHINSN

SEQ ID NO: 11563 - protein, 662 aa, Homo sapiens
MNGDSRAAVVTSPPPTTAPHKERYFDRVDENNPEYLRERNMAPDLRQDFNMMEQKKRVSMILQSPAFCEELESMIQEQFKKGKNPTGLLALQQIADFMTTNVPNVYPAAPQGGMAALNMSLGMVTPVNDLRGSDSIAYDKGEKLLRCKLAAFYRLADLFGWSQLIYNHITTRVNSEQEHFLIVPFGLLYSEVTASSLVKINLQGDIVDRGSTNLGVNQAGFTLHSAIYAARPDVKCVVHIHTPAGAAVSAMKCGLLPISPEALSLGEVAYHDYHGILVDEEEKVLIQKNLGPKSKVLILRNHGLVSVGESVEEAFYYIHNLVVACEIQVRTLASAGGPDNLVLLNPEKYKAKSRSPGSPVGEGTGSPPKWQIGEQEFEALMRMLDNLGYRTGYPYRYPALREKSKKYSDVEVPASVTGYSFASDGDSGTCSPLRHSFQKQQREKTRWLNSGRGDEASEEGQNGSSPKSKTKVWTNITHDHVKPLLQSLSSGVCVPSCITNCLWTKEDGHRTSTSAVPNLFVPLNTNPKEVQEMRNKIREQNLQDIKTAGPQSQVLCGVVMDRSLVQGELVTASKAIIEKEYQPHVIVSTTGPNPFTTLTDRELEEYRREVERKQKGSEENLDEAREQKEKSPPDQPAVPHPPPSTPIKLEEGDGCAREYLLP

SEQ ID NO: 11564 - protein, 737 aa, Homo sapiens
MNGDSRAAVVTSPPPTTAPHKERYFDRVDENNPEYLRERNMAPDLRQDFNMMEQKKRVSMILQSPAFCEELESMIQEQFKKGKNPTGLLALQQIADFMTTNVPNVYPAAPQGGMAALNMSLGMVTPVNDLRGSDSIAYDKGEKLLRCKLAAFYRLADLFGWSQLIYNHITTRVNSEQEHFLIVPFGLLYSEVTASSLVKINLQGDIVDRGSTNLGVNQAGFTLHSAIYAARPDVKCVVHIHTPAGAAVSAMKCGLLPISPEALSLGEVAYHDYHGILVDEEEKVLIQKNLGPKSKVLILRNHGLVSVGESVEEAFYYIHNLVVACEIQVRTLASAGGPDNLVLLNPEKYKAKSRSPGSPVGEGTGSPPKWQIGEQEFEALMRMLDNLGYRTGYPYRYPALREKSKKYSDVEVPASVTGYSFASDGDSGTCSPLRHSFQKQQREKTRWLNSGRGDEASEEGQNGSSPKSKTKWTKEDGHRTSTSAVPNLFVPLNTNPKEVQEMRNKIREQNLQDIKTAGPQSQVLCGVVMDRSLVQGELVTASKAIIEKEYQPHVIVSTTGPNPFTTLTDRELEEYRREVERKQKGSEENLDEAREQKEKSPPDQPAVPHPPPSTPIKLEEDLVPEPTTGDDSDAATFKPTLPDLSPDEPSEALGFPMLEKEEEAHRPPSPTEAPTEASPEPAPDPAPVAEEAAPSAVEEGAAADPGSDGSPGKSPSKKKKKFRTPSFLKKSKKKSDS

SEQ ID NO: 11565 - protein, 347 aa, Homo sapiens
MSALGAVIALLLWGQLFAVDSGNDVTDIADDGCPKPPEIAHGYVEHSVRYQCKNYYKLRTEGDGVYTLNNEKQWINKAVGDKLPECEAVCGKPKNPANPVQRILGGHLDAKGSFPWQAKMVSHHNLTTGATLINEQWLLTTAKNLFLNHSENATAKDIAPTLTLYVGKKQLVEIEKVVLHPNYSQVDIGLIKLKQKVSVNERVMPICLPSKDYAEVGRVGYVSGWGRNANFKFTDHLKYVMLPVADQDQCIRHYEGSTVPEKKTPKSPVGVQPILNEHTFCAGMSKYQEDTCYGDAGSAFAVHDLEEDTWYATGILSFDKSCAVAEYGVYVKVTSIQDWVQKTIAEN

SEQ ID NO: 11566 - protein, 208 aa, Homo sapiens
MGLGARGAWAALLLGTLQVLALLGAAHESAAMAASANIENSGLPHNSSANSTETLQHVPSDHTNETSNSTVKPPTSVASDSSNTTVTTMKPTAASNTTTPGMVSTNMTSTTLKSTPKTTSVSQNTSQISTSTMTVTHNSSVTSAASSVTITTTMHSEAKKGSKFDTGSFVGGIVLTLGVLSILYIGCKMYYSRRGIRYRTIDEHDAII

SEQ ID NO: 11567 - protein, 317 aa, Homo sapiens
MWLYLAVFVGLYYLLHWYRERQVLSHLRDKYVFITGCDSGFGKLLARQLDARGLRVLAACLTEKGAEQLRGQTSDRLETVTLDVTKTESVAAAAQWVKECVRDKGLWGLVNNAGISLPTAPNELLTKQDFVTILDVNLLGVIDVTLSLLPLVRRARGRVVNVSSVMGRVSLFGGGYCISKYGVEAFSDSLRRELSYFGVKVAMIEPGYFKTAVTSKERFLKSFLEIWDRSSPEVKEAYGEKFVADYKKSAEQMEQKCTQDLSLVTNCMEHALIACHPRTRYSAGWDAKLLYLPMSYMPTFLVDAIMYWVSPSPAKAL

SEQ ID NO: 11568 - protein, 711 aa, Homo sapiens
MSDYSTGGPPPGPPPPAGGGGGAGGAGGGPPPGPPGAGDRGGGGPGGGGPGGGSAGGPSQPPGGGGPGIRKDAFADAVQRARQIAAKIGGDAATTVNNSTPDFGFGGQKRQLEDGDQPESKKLASQGDSISSQLGPIHPPPRTSMTEEYRVPDGMVGLIIGRGGEQINKIQQDSGCKVQISPDSGGLPERSVSLTGAPESVQKAKMMLDDIVSRGRGGPPGQFHDNANGGQNGTVQEIMIPAGKAGLVIGKGGETIKQLQERAGVKMILIQDGSQNTNVDKPLRIIGDPYKVQQACEMVMDILRERDQGGFGDRNEYGSRIGGGIDVPVPRHSVGVVIGRSGEMIKKIQNDAGVRIQFKQDDGTGPEKIAHIMGPPDRCEHAARIINDLLQSLRSGPPGPPGGPGMPPGGRGRGRGQGNWGPPGGEMTFSIPTHKCGLVIGRGGENVKAINQQTGAFVEISRQLPPNGDPNFKLFIIRGSPQQIDHAKQLIEEKIEGPLCPVGPGPGGPGPAGPMGPFNPGPFNQGPPGAPPHAGGPPPHQYPPQGWGNTYPQWQPPAPHDPSKAAAAAADPNAAWAAYYSHYYQQPPGPVPGPAPAPAAPPAQGEPPQPPPTGQSDYTKAWEEYYKKIGQQPQQPGAPPQQDYTKAWEEYYKKQAQVATGGGPGAPPGSQPDYSAAWAEYYRQQAAYYGQTPGPGGPQPPPTQQGQQQAQ

SEQ ID NO: 11569 - protein, 204 aa, Homo sapiens
MASVSSATFSGHGARSLLQFLRLVGQLKRVPRTGWVYRNVQRPESVSDHMYRMAVMAMVIKDDRLNKDRCVRLALVHDMAECIVGDIAPADNIPKEEKHRREEEAMKQITQLLPEDLRKELYELWEEYETQSSAEAKFVKQLDQCEMILQASEYEDLEHKPGRLQDFYDSTAGKFNHPEIVQLVSELEAERSTNIAAAASEPHS

SEQ ID NO: 11570 - protein, 96 aa, Homo sapiens
MLPCLALLLLMELSVCTVAGDGGEEQTLSTEAETWEGAGPSIQLQLQEVKTGKASQFFGLMGKRVGAYQLEHTFQGLLGKRSLFTEGREDEAQGSE

SEQ ID NO: 11571 - protein, 426 aa, Homo sapiens
MDSALSDPHNGSAEAGGPTNSTTRPPSTPEGIALAYGSLLLMALLPIFFGALRSVRCARGKNASDMPETITSRDAARFPIIASCTLLGLYLFFKIFSQEYINLLLSMYFFVLGILALSHTISPFMNKFFPASFPNRQYQLLFTQGSGENKEEIINYEFDTKDLVCLGLSSIVGVWYLLRKHWIANNLFGLAFSLNGVELLHLNNVSTGCILLGGLFIYDVFWVFGTNVMVTVAKSFEAPIKLVFPQDLLEKGLEANNFAMLGLGDVVIPGIFIALLLRFDISLKKNTHTYFYTSFAAYIFGLGLTIFIMHIFKHAQPALLYLVPACIGFPVLVALAKGEVTEMFSYESSAEILPHTPRLTHFPTVSGSPASLADSMQQKLAGPRRRRPQNPSAIYEESNPKDPAAVTESKEGTEASASKGLEKKEK

SEQ ID NO: 11572 - protein, 326 aa, Homo sapiens
MTGLCGYSAPDMRGLRLIMIPVELLLCYLLLHPVDATSYGKQTNVLMHFPLSLESQTPSSDPLSCQFLHPKSLPGFSHMAPLPKFLVSLALRNALEEAGCQADVWALQLQLYRQGGVNATQVLIQHLRGLQKGRSTERNVSVEALASALQLLAREQQSTGRVGRSLPTEDCENEKEQAVHNVVQLLPGVGTFYNLGTALYYATQNCLGKARERGRDGAIDLGYDLLMTMAGMSGGPMGLAISAALKPALRSGVQQLIQYYQDQKDANISQPETTKEGLRAISDVSDLEETTTLASFISEVVSSAPYWGWAIIKSYDLDPGAGSLEI

SEQ ID NO: 11573 - protein, 859 aa, Homo sapiens
MQAAVAVSVPFLLLCVLGTCPPARCGQAGDASLMELEKRKENRFVERQSIVPLRLIYRSGGEDESRHDALDTRVRGDLGGPQLTHVDQASFQVDAFGTSFILDVVLNHDLLSSEYIERHIEHGGKTVEVKGGEHCYYQGHIRGNPDSFVALSTCHGLHGMFYDGNHTYLIEPEENDTTQEDFHFHSVYKSRLFEFSLDDLPSEFQQVNITPSKFILKPRPKRSKRQLRRYPRNVEEETKYIELMIVNDHLMFKKHRLSVVHTNTYAKSVVNMADLIYKDQLKTRIVLVAMETWATDNKFAISENPLITLREFMKYRRDFIKEKSDAVHLFSGSQFESSRSGAAYIGGICSLLKGGGVNEFGKTDLMAVTLAQSLAHNIGIISDKRKLASGECKCEDTWSGCIMGDTGYYLPKKFTQCNIEEYHDFLNSGGGACLFNKPSKLLDPPECGNGFIETGEECDCGTPAECVLEGAECCKKCTLTQDSQCSDGLCCKKCKFQPMGTVCREAVNDCDIRETCSGNSSQCAPNIHKMDGYSCDGVQGICFGGRCKTRDRQCKYIWGQKVTASDKYCYEKLNIEGTEKGNCGKDKDTWIQCNKRDVLCGYLLCTNIGNIPRLGELDGEITSTLVVQQGRTLNCSGGHVKLEEDVDLGYVEDGTPCGPQMMCLEHRCLPVASFNFSTCLSSKEGTICSGNGVCSNELKCVCNRHWIGSDCNTYFPHNDDAKTGITLSGNGVAGTNIIIGIIAGTILVLALILGITAWGYKNYREQRQLPQGDYVKKPGDGDSFYSDIPPGVSTNSASSSKKRSNGLSHSWSERIPDTKHISDICENGRPRSNSWQGNLGGNKKKIRGKRFRPRSNSTE

SEQ ID NO: 11574 - protein, 870 aa, Homo sapiens
MQAAVAVSVPFLLLCVLGTCPPARCGQAGDASLMELEKRKENRFVERQSIVPLRLIYRSGGEDESRHDALDTRVRGDLGGPQLTHVDQASFQVDAFGTSFILDVVLNHDLLSSEYIERHIEHGGKTVEVKGGEHCYYQGHIRGNPDSFVALSTCHGLHGMFYDGNHTYLIEPEENDTTQEDFHFHSVYKSRLFEFSLDDLPSEFQQVNITPSKFILKPRPKRSKRQLRRYPRNVEEETKYIELMIVNDHLMFKKHRLSVVHTNTYAKSVVNMADLIYKDQLKTRIVLVAMETWATDNKFAISENPLITLREFMKYRRDFIKEKSDAVHLFSGSQFESSRSGAAYIGGICSLLKGGGVNEFGKTDLMAVTLAQSLAHNIGIISDKRKLASGECKCEDTWSGCIMGDTGYYLPKKFTQCNIEEYHDFLNSGGGACLFNKPSKLLDPPECGNGFIETGEECDCGTPAECVLEGAECCKKCTLTQDSQCSDGLCCKKCKFQPMGTVCREAVNDCDIRETCSGNSSQCAPNIHKMDGYSCDGVQGICFGGRCKTRDRQCKYIWGQKVTASDKYCYEKLNIEGTEKGNCGKDKDTWIQCNKRDVLCGYLLCTNIGNIPRLGELDGEITSTLVVQQGRTLNCSGGHVKLEEDVDLGYVEDGTPCGPQMMCLEHRCLPVASFNFSTCLSSKEGTICSGNGVCSNELKCVCNRHWIGSDCNTYFPHNDDAKTGITLSGNGVAGTNIIIGIIAGTILVLALILGITAWGYKNYREQRSNGLSHSWSERIPDTKHISDICENGRPRSNSWQGNLGGNKKKIRGKRFRPRSNSTETLSPAKSPSSSTGSIASSRKYPYPMPPLPDEDKKVNRQSARLWETSI

SEQ ID NO: 11575 - protein, 899 aa, Homo sapiens
MQAAVAVSVPFLLLCVLGTCPPARCGQAGDASLMELEKRKENRFVERQSIVPLRLIYRSGGEDESRHDALDTRVRGDLGGPQLTHVDQASFQVDAFGTSFILDVVLNHDLLSSEYIERHIEHGGKTVEVKGGEHCYYQGHIRGNPDSFVALSTCHGLHGMFYDGNHTYLIEPEENDTTQEDFHFHSVYKSRLFEFSLDDLPSEFQQVNITPSKFILKPRPKRSKRQLRRYPRNVEEETKYIELMIVNDHLMFKKHRLSVVHTNTYAKSVVNMADLIYKDQLKTRIVLVAMETWATDNKFAISENPLITLREFMKYRRDFIKEKSDAVHLFSGSQFESSRSGAAYIGGICSLLKGGGVNEFGKTDLMAVTLAQSLAHNIGIISDKRKLASGECKCEDTWSGCIMGDTGYYLPKKFTQCNIEEYHDFLNSGGGACLFNKPSKLLDPPECGNGFIETGEECDCGTPAECVLEGAECCKKCTLTQDSQCSDGLCCKKCKFQPMGTVCREAVNDCDIRETCSGNSSQCAPNIHKMDGYSCDGVQGICFGGRCKTRDRQCKYIWGQKVTASDKYCYEKLNIEGTEKGNCGKDKDTWIQCNKRDVLCGYLLCTNIGNIPRLGELDGEITSTLVVQQGRTLNCSGGHVKLEEDVDLGYVEDGTPCGPQMMCLEHRCLPVASFNFSTCLSSKEGTICSGNGVCSNELKCVCNRHWIGSDCNTYFPHNDDAKTGITLSGNGVAGTNIIIGIIAGTILVLALILGITAWGYKNYREQRSNGLSHSWSERIPDTKHISDICENGRPRSNSWQGNLGGNKKKIRGKRFRPRSNSTEYLNPWFKRDYNVAKWVEDVNKNTEGPYFRTLSPAKSPSSSTGSIASSRKYPYPMPPLPDEDKKVNRQSARLWETSI

SEQ ID NO: 11576 - protein, 271 aa, Homo sapiens
MSAPRLLISIIIMVSASSSSCMGGKQMTQNYSTIFAEGNISQPVLMDINAVLCCPPIALRNLIIITWEIILRGQPSCTKAYKKETNETKETNCTVERITWVSRPDQNSDLQIRPVDTTHDGYYRGIVVTPDGNFHRGYHLQVLVTPEVNLFQSRNITAVCKAVTGKPAAQISWIPEGSILATKQEYWGNGTVTVKSTCPWEGHKSTVTCHVSHLTGNKSLSVKLNSGLRTSGSPALSLLIILYVKLSLFVVILVTTGFVFFQRINHVRKVL

SEQ ID NO: 11577 - protein, 744 aa, Homo sapiens
MAGRSMQAARCPTDELSLTNCAVVNEKDFQSGQHVIVRTSPNHRYTFTLKTHPSVVPGSIAFSLPQRKWAGLSIGQEIEVSLYTFDKAKQCIGTMTIEIDFLQKKSIDSNPYDTDKMAAEFIQQFNNQAFSVGQQLVFSFNEKLFGLLVKDIEAMDPSILKGEPATGKRQKIEVGLVVGNSQVAFEKAENSSLNLIGKAKTKENRQSIINPDWNFEKMGIGGLDKEFSDIFRRAFASRVFPPEIVEQMGCKHVKGILLYGPPGCGKTLLARQIGKMLNAREPKVVNGPEILNKYVGESEANIRKLFADAEEEQRRLGANSGLHIIIFDEIDAICKQRGSMAGSTGVHDTVVNQLLSKIDGVEQLNNILVIGMTNRPDLIDEALLRPGRLEVKMEIGLPDEKGRLQILHIHTARMRGHQLLSADVDIKELAVETKNFSGAELEGLVRAAQSTAMNRHIKASTKVEVDMEKAESLQVTRGDFLASLENDIKPAFGTNQEDYASYIMNGIIKWGDPVTRVLDDGELLVQQTKNSDRTPLVSVLLEGPPHSGKTALAAKIAEESNFPFIKICSPDKMIGFSETAKCQAMKKIFDDAYKSQLSCVVVDDIERLLDYVPIGPRFSNLVLQALLVLLKKAPPQGRKLLIIGTTSRKDVLQEMEMLNAFSTTIHVPNIATGEQLLEALELLGNFKDKERTTIAQQVKGKKVWIGIKKLLMLIEMSLQMDPEYRVRKFLALLREEGASPLDFD

SEQ ID NO: 11578 - protein, 239 aa, Homo sapiens
MRTEAEAAGPPLEPGDFVQLPVPVIQQLYHWDCGLACSRMVLRYLGQLDDSEFERALQKLQLTRSIWTIDLAYLMHHFGVRHRFCTQTLGVDKGYKNQSFYRKHFDTEETRVNQLFAQAKACKVLVEKCTVSVKDIQAHLAQGHVAIVLVNSGVLHCDLCSSPVKYCCFTPSGHHCFCRTPDYQGHFIVLRGYNRATGCIFYNNPAYADRMCSTSISNFEEARTSYGTDEDILFVYLDS

SEQ ID NO: 11579 - protein, 271 aa, Homo sapiens
MRELAIEIGVRALLFGVFVFTEFLDPFQRVIQPEEIWLYKNPLVQSDNIPTRLMFAISFLTPLAVICVVKIIRRTDKTEIKEAFLAVSLALALNGVCTNTIKLIVGRPRPDFFYRCFPDGVMNSEMHCTGDPDLVSEGRKSFPSIHSSFAFSGLGFTTFYLAGKLHCFTESGRGKSWRLCAAILPLYCAMMIALSRMCDYKHHWQDSFVGGVIGLIFAYICYRQHYPPLANTACHKPYVSLRVPASLKKEERPTADSAPSLPLEGITEGPV

SEQ ID NO: 11580 - protein, 379 aa, Homo sapiens
MRFVVALVLLNVAAAGAVPLLATESVKQEEAGVRPSAGNVSTHPSLSQRPGGSTKSHPEPQTPKDSPSKSSAEAQTPEDTPNKSGAEAKTQKDSSNKSGAEAKTQKGSTSKSGSEAQTTKDSTSKSHPELQTPKDSTGKSGAEAQTPEDSPNRSGAEAKTQKDSPSKSGSEAQTTKDVPNKSGADGQTPKDGSSKSGAEDQTPKDVPNKSGAEKQTPKDGSNKSGAEEQGPIDGPSKSGAEEQTSKDSPNKEEVKSSEPTEDVEPKEAEDDDTGPEEGSPPKEEKEKMSGSASSENREGTLSDSTGSEKDDLYPNGSGNGSAESSHFFAYLVTAAILVAVLYIAHHNKRKIIAFVLEGKRSKVTRRPKASDYQRLDQKS

SEQ ID NO: 11581 - protein, 444 aa, Homo sapiens
MGGHPQLRLVKALLLLGLNPVSASLQDQHCESLSLASNISGLQCNASVDLIGTCWPRSPAGQLVVRPCPAFFYGVRYNTTNNGYRECLANGSWAARVNYSECQEILNEEKKSKVHYHVAVIINYLGHCISLVALLVAFVLFLRLRPGCTHWGDQADGALEVGAPWSGAPFQVRRSIRCLRNIIHWNLISAFILRNATWFVVQLTMSPEVHQSNVGWCRLVTAAYNYFHVTNFFWMFGEGCYLHTAIVLTYSTDRLRKWMFICIGWGVPFPIIVAWAIGKLYYDNEKCWFGKRPGVYTDYIYQGPMILVLLINFIFLFNIVRILMTKLRASTTSETIQYRKAVKATLVLLPLLGITYMLFFVNPGEDEVSRVVFIYFNSFLESFQGFFVSVFYCFLNSEVRSAIRKRWHRWQDKHSIRARVARAMSIPTSPTRVSFHSIKQSTAV

SEQ ID NO: 11582 - protein, 587 aa, Homo sapiens
MARGYGATVSLVLLGLGLALAVIVLAVVLSRHQAPCGPQAFAHAAVAADSKVCSDIGRAILQQQGSPVDATIAALVCTSVVNPQSMGLGGGVIFTIYNVTTGKVEVINARETVPASHAPSLLDQCAQALPLGTGAQWIGVPGELRGYAEAHRRHGRLPWAQLFQPTIALLRGGHVVAPVLSRFLHNSILRPSLQASTLRQLFFNGTEPLRPQDPLPWPALATTLETVATEGVEVFYTGRLGQMLVEDIAKEGSQLTLQDLAKFQPEVVDALEVPLGDYTLYSPPPPAGGAILSFILNVLRGFNFSTESMARPEGRVNVYHHLVETLKFAKGQRWRLGDPRSHPKLQNASRDLLGETLAQLIRQQIDGRGDHQLSHYSLAEAWGHGTGTSHVSVLGEDGSAVAATSTINTPFGAMVYSPRTGIILNNELLDLCERCPRGSGTTPSPAVSGDRVGGAPGRCWPPVPGERSPSSMVPSILINKAQGSKLVIGGAGGELIISAVAQAIMSKLWLGFDLRAAIAAPILHVNSKGCVEYEPNFSQEVQRGLQDRGQNQTQRPFFLNVVQAVSQEGACVYAVSDLRKSGEAAGY

SEQ ID NO: 11583 - protein, 1142 aa, Homo sapiens
MSGPAQVPMMSPNGSVPPIYVPPGYAPQVIEDNGVRRVVVVPQAPEFHPGSHTVLHRSPHPPLPGFIPVPTMMPPPPRHMYSPVTGAGDMTTQYMPQYQSSQVYGDVDAHSTHGRSNFRDERSSKTYERLQKKLKDRQGTQKDKMSSPPSSPQKCPSPINEHNGLIKGQIAGGINTGSAKIKSGKGKGGTQVDTEIEEKDEETKAFEALLSNIVKPVASDIQARTVVLTWSPPSSLINGETDESSVPELYGYEVLISSTGKDGKYKSVYVGEETNITLNDLKPAMDYHAKVQAEYNSIKGTPSEAEIFTTLSCEPDIPNPPRIANRTKNSLTLQWKAPSDNGSKIQNFVLEWDEGKGNGEFCQCYMGSQKQFKITKLSPAMGCKFRLSARNDYGTSGFSEEVLYYTSGCAPSMPASPVLTKAGITWLSLQWSKPSGTPSDEGISYILEMEEETSGYGFKPKYDGEDLAYTVKNLRRSTKYKFKVIAYNSEGKSNPSEVVEFTTCPDKPGIPVKPSVKGKIHSHSFKITWDPPKDNGGATINKYVVEMAEGSNGNKWEMIYSGATREHLCDRLNPGCFYRLRVYCISDGGQSAVSESLLVQTPAVPPGPCLPPRLQGRPKAKEIQLRWGPPLVDGGSPISCYSVEMSPIEKDEPREVYQGSEVECTVSSLLPGKTYSFRLRAANKMGFGPFSEKCDITTAPGPPDQCKPPQVTCRSATCAQVNWEVPLSNGTDVTEYRLEWGGVEGSMQICYCGPGLSYEIKGLSPATTYYCRVQALSVVGAGPFSEVVACVTPPSVPGIVTCLQEISDDEIENPHYSPSTCLAISWEKPCDHGSEILAYSIDFGDKQSLTVGKVTSYIINNLQPDTTYRIRIQALNSLGAGPFSHMIKLKTKPLPPDPPRLECVAFSHQNLKLKWGEGTPKTLSTDSIQYHLQMEDKNGRFVSLYRGPCHTYKVQRLNESTSYKFCIQACNEAGEGPLSQEYIFTTPKSVPAALKAPKIEKVNDHICEITWECLQPMKGDPVIYSLQVMLGKDSEFKQIYKGPDSSFRYSSLQLNCEYRFRVCAIRQCQDSLGHQDLVGPYSTTVLFISQRTEPPASTNRDTVESTRTRRALSDEQCAAVILVLFAFFSILIAFIIQYFVIK

SEQ ID NO: 11584 - protein, 394 aa, Homo sapiens
MSRIYHDGALRNKAVQSVRLPGAWDPAAHQGGNGVLLEGELIDVSRHSILDTHGRKERYYVLYIRPSHIHRRKFDAKGNEIEPNFSATRKVNTGFLMSSYKVEAKGDTDRLTPEALKGLVNKPELLALTESLTPDHTVAFWMPESEMEVMELELGAGVRLKTRGDGPFLDSLAKLEAGTVTKCNFTGDGKTGASWTDNIMAQKCSKGAAAEIREQGDGAEDEEWPEEIQQQIVRETFHLVLKRDDNICNFLEGGSLIGGSDYKLIYRHYATLYFVFCVDSSESELGILDLIQVFVETLDKCFENVCELDLIFHMDKVHYILQEVVMGGMVLETNMNEIVAQIEAQNRLEKSEGGLSAAPARAVSAVKNINLPEIPRNINIGDLNIKVPNLSQFV

SEQ ID NO: 11585 - protein, 234 aa, Homo sapiens
MSVKEGAQRKWAALKEKLGPQDSDPTEANLESADPELCIRLLQMPSVVNYSGLRKRLEGSDGGWMVQFLEQSGLDLLLEALARLSGRGVARISDALLQLTCVSCVRAVMNSRQGIEYILSNQGYVRQLSQALDTSNVMVKKQVFELLAALCIYSPEGHVLTLDALDHYKTVCSQQYRFSIVMNELSGSDNVPYVVTLLSVINAVILGPEDLRARTQLRNEFIGLQLLDVLARLR

SEQ ID NO: 11586 - protein, 773 aa, Homo sapiens
MFSKRLEKIPQVPLLFPFIFIILTNYSKMEGAVESQPSFFKTSQDIVTCTWVENCYSSFSRRPLEQMFCKHQSKNIISWTGMVAHTCNPSTLGGQGLCDFAKMHHQQRMAALGTDKELSDLLDFSAMFSPPVSSGKNGPTSLASGHFTGSNVEDRSSSGSWGNGGHPSPSRNYGDGTPYDHMTSRDLGSHDNLSPPFVNSRIQSKTERGSYSSYGRESNLQGCHQQSLLGGDMDMGNPGTLSPTKPGSQYYQYSSNNPRRRPLHSSAMEVQTKKVRKVPPGLPSSVYAPSASTADYNRDSPGYPSSKPATSTFPSSFFMQDGHHSSDPWSSSSGMNQPGYAGMLGNSSHIPQSSSYCSLHPHERLSYPSHSSADINSSLPPMSTFHRSGTNHYSTSSCTPPANGTDSIMANRGSGAAGSSQTGDALGKALASIYSPDHTNNSFSSNPSTPVGSPPSLSAGTAVWSRNGGQASSSPNYEGPLHSLQSRIEDRLERLDDAIHVLRNHAVGPSTAMPGGHGDMHGIIGPSHNGAMGGLGSGYGTGLLSANRHSLMVGTHREDGVALRGSHSLLPNQVPVPQLPVQSATSPDLNPPQDPYRGMPPGLQGQSVSSGSSEIKSDDEGDENLQDTKSSEDKKLDDDKKDIKSITRSRSSNNDDEDLTPEQKAEREKERRMANNARERLRVRDINEAFKELGRMVQLHLKSDKPQTKLLILHQAVAVILSLEQQVRERNLNPKAACLKRREEEKVSSEPPPLSLAGPHPGMGDASNHMGQM

SEQ ID NO: 11587 - protein, 245 aa, Homo sapiens
MIGVSFEEAKSIITGAKLSTRLESAWEIAFIRQKSDNIQPENLSCTSLIEASGEYGPQASTLSLFSSPPEILIPKTSSTPKTNNDILSSCEIKTGYNKTVQIPITSENSTVGLSNTDVASAWTENYGLQEKISLNPSVRFKAEKLEMALNYLGIQPTKEQHQALRQQVQADSKGTVSFGDFVQVARNLFCLQLDEVNVGAHEISNILDSQLLPCDSSEADEMERLKCERDDALKEVNTLKWPGQN

SEQ ID NO: 11588 - protein, 167 aa, Homo sapiens
MERFVVTAPPARNRSKTALYVTPLDRVTEFGGELHEDGGKLFCTSCNVVLNHVRKSAISDHLKSKTHTKRKAEFEEQNVRKKQRPLTASLQCNSTAQTEKVSVIQDFVKMCLEANIPLEKADHPAVRAFLSRHVKNGGSIPKSDQLRRAYLPDGYENENQLLNSQDC

SEQ ID NO: 11589 - protein, 339 aa, Homo sapiens
MMDSQLVAGVAFKKTFSYAGFEMQPKKYHNPKIALLNVELELKAEKDNAEIRVHTVEDYQAIVDAEWNILYDKLEKIHHSGAKVVLSKLPIGDVATQYFADRDMFCAGRVPEEDLKRTMMACGGSIQTSVNALSADVLGRCQVFEETQIGGERYNFFTGCPKAKTCTFILRGGAEQFMEETERSLHDAIMIVRRAIKNDSVVAGGGAIEMELSKYLRDYSRTIPGKQQLLIGAYAKALEIIPRQLCDNAGFDATNILNKLRARHAQGGTWYGVDINNEDIADNFEAFVWEPAMVRINALTAASEAACLIVSVDETIKNPRSTVDAPTAAGRGRGRGRPH

SEQ ID NO: 11590 - protein, 400 aa, Homo sapiens
MSALEKSMHLGRLPSRPPLPGSGGSQSGAKMRMGPGRKRDFSPVPWSQYFESMEDVEVENETGKDTFRVYKSGSEGPVLLLLHGGGHSALSWAVFTAAIISRVQCRIVALDLRSHGETKVKNPEDLSAETMAKDVGNVVEAMYGDLPPPIMLIGHSMGGAIAVHTASSNLVPSLLGLCMIDVVEGTAMDALNSMQNFLRGRPKTFKSLENAIEWSVKSGQIRNLESARVSMVGQVKQCEGITSPEGSKSIVEGIIEEEEEDEEGSESISKRKKEDDMEGLPSETQNLLLFLQTKKDHPYTWRIELAKTEKYWDGWFRGLSNLFLSCPIPKLLLLAGVDRLDKDLTIGQMQGKFQMQVLPQCGHAVHEDAPDKVAEAVATFLIRHRFAEPIGGFQCVFPGC

SEQ ID NO: 11591 - protein, 94 aa, Homo sapiens
MAAFPHKIIFFLVCSTLTHVAFSGIFNKRDFTRWPKPRCKMYIPLDPDYNADCPNVTAPVCASNGHTFQNECFFCVEQREFHYRIKFEKYGKCD

SEQ ID NO: 11592 - protein, 97 aa, Homo sapiens
MTSLLTTPSPREELMTTPILQPTEALSPEDGASTALIAVVITVVFLTLLSVVILIFFYLYKNKGSYVTYEPTEGEPSAIVQMESDLAKGSEKEEYFI

SEQ ID NO: 11593 - protein, 916 aa, Homo sapiens
MKIATVSVLLPLALCLIQDAASKNEDQEMCHEFQAFMKNGKLFCPQDKKFFQSLDGIMFINKCATCKMILEKEAKSQKRARHLARAPKATAPTELNCDDFKKGERDGDFICPDYYEAVCGTDGKTYDNRCALCAENAKTGSQIGVKSEGECKSSNPEQDVCSAFRPFVRDGRLGCTRENDPVLGPDGKTHGNKCAMCAELFLKEAENAKREGETRIRRNAEKDFCKEYEKQVRNGRLFCTRESDPVRGPDGRMHGNKCALCAEIFKQRFSEENSKTDQNLGKAEEKTKVKREIVKLCSQYQNQAKNGILFCTRENDPIRGPDGKMHGNLCSMCQAYFQAENEEKKKAEARARNKRESGKATSYAELCSEYRKLVRNGKLACTRENDPIQGPDGKVHGNTCSMCEVFFQAEEEEKKKKEGKSRNKRQSKSTASFEELCSEYRKSRKNGRLFCTRENDPIQGPDGKMHGNTCSMCEAFFQQEERARAKAKREAAKEICSEFRDQVRNGTLICTREHNPVRGPDGKMHGNKCAMCASVFKLEEEEKKNDKEEKGKVEAEKVKREAVQELCSEYRHYVRNGRLPCTRENDPIEGLDGKIHGNTCSMCEAFFQQEAKEKERAEPRAKVKREAEKETCDEFRRLLQNGKLFCTRENDPVRGPDGKTHGNKCAMCKAVFQKENEERKRKEEEDQRNAAGHGSSGGGGGNTQDECAEYREQMKNGRLSCTRESDPVRDADGKSYNNQCTMCKAKLEREAERKNEYSRSRSNGTGSESGKDTCDEFRSQMKNGKLICTRESDPVRGPDGKTHGNKCTMCKEKLEREAAEKKKKEDEDRSNTGERSNTGERSNDKEDLCREFRSMQRNGKLICTRENNPVRGPYGKMHINKCAMCQSIFDREANERKKKDEEKSSSKPSNNAKVIY

SEQ ID NO: 11594 - protein, 348 aa, Homo sapiens
MRLGLLSVALLFVGSSHLYSDHYSPSGRHRLGPSPEPAASSQQAEAVRKRLRRRREGGAHAEDCGTAPLKDVLQGSRIIGGTEAQAGAWPWVVSLQIKYGRVLVHVCGGTLVRERWVLTAAHCTKDASDPLMWTAVIGTNNIHGRYPHTKKIKIKAIIIHPNFILESYVNDIALFHLKKAVRYNDYIQPICLPFDVFQILDGNTKCFISGWGRTKEEGNATNILQDAEVHYISREMCNSERSYGGIIPNTSFCAGDEDGAFDTCRGDSGGPLMCYLPEYKRFFVMGITSYGHGCGRRGFPGVYIGPSFYQKWLTEHFFHASTQGILTINILRGQILIALCFVILLATT

SEQ ID NO: 11595 - protein, 133 aa, Homo sapiens
MRQRLLPSVTSLLLVALLFPGSSQARHVNHSATEALGELRERAPGQGTNGFQLLRHAVKRDLLPPRTPPYQGDVPPGIRNTICHMQQGICRLFFCHSGEKKRDICSDPWNRCCVSNTDEEGKEKPEMDGRSGI

SEQ ID NO: 11596 - protein, 107 aa, Homo sapiens
MACRCLSFLLMGTFLSGQVAQLSCTLSPQHVTIRDYGVSWYQQRAGSAPRYLLYYRSEEDHHRPADIPDRFSAAKDEAHNACVLTISPVQPEDDADYYCSVGYGFSP

SEQ ID NO: 11597 - protein, 724 aa, Homo sapiens
MLLFVEQVASKGTGLNPNAKVWQEIAPGNTDATPVTHGTESSWHEIAATSGAHPEGNAELSEDICKEYEVMYSSSCETTRNTTGIEESTDGMILGPEDLSYQIYDVSGESNSAVSTEDLKECLKKQLEFCFSRENLSKDLYLISQMDSDQFIPIWTVANMEEIKKLTTDPDLILEVLRSSPMVQVDEKGEKVRPSHKRCIVILREIPETTPIEEVKGLFKSENCPKVISCEFAHNSNWYITFQSDTDAQQAFKYLREEVKTFQGKPIMARIKAINTFFAKNGYRLMDSSIYSHPIQTQAQYASPVFMQPVYNPHQQYSVYSIVPQSWSPNPTPYFETPLAPFPNGSFVNGFNSPGSYKTNAAAMNMGRPFQKNRVKPQFRSSGGSEHSTEGSVSLGDGQLNRYSSRNFPAERHNPTVTGHQEQTYLQKETSTLQVEQNGDYGRGRRTLFRGRRRREDDRISRPHPSTAESKAPTPKFDLLASNFPPLPGSSSRMPGELVLENRMSDVVKGVYKEKDNEELTISCPVPADEQTECTSAQQLNMSTSSPCAAELTALSTTQQEKDLIEDSSVQKDGLNQTTIPVSPPSTTKPSRASTASPCNNNINAATAVALQEPRKLSYAEVCQKPPKEPSSVLVQPLRELRSNVVSPTKNEDNGAPENSVEKPHEKPEARASKDYSGFRGNIIPRGAAGKIREQRRQFSHRAIPQGVTRRNGKEQYVPPRSPK

SEQ ID NO: 11598 - protein, 865 aa, Homo sapiens
MEGLLHYINPAHAISLLSALNEERLKGQLCDVLLIVGDQKFRAHKNVLAASSEYFQSLFTNKENESQTVFQLDFCEPDAFDNVLNYIYSSSLFVEKSSLAAVQELGYSLGISFLTNIVSKTPQAPFPTCPNRKKVFVEDDENSSQKRSVIVCQSRNEAQGKTVSQNQPDVSHTSRPSPSIAVKANTNKPHVPKPIEPLHNLSLTEKSWPKDSSVVYAKSLEHSGSLDDPNRISLVKRNAVLPSKPLQDREAMDDKPGVSGQLPKGKALELALKRPRPPVLSVCSSSETPYLLKETNKGNGQGEDRNLLYYSKLGLVIPSSGSGSGNQSIDRSGPLVKSLLRRSLSMDSQVPVYSPSIDLKSSQGSSSVSSDAPGNVLCALSQKSSLKDCSEKTALDDRPQVLQPHRLRSFSASQSTDREGASPVTEVRIKTEPSSPLSDPSDIIRVTVGDAATTAAASSSSVTRDLSLKTEDDQKDMSRLPAKRRFQADRRLPFKKLKVNEHGSPVSEDNFEEGSSPTLLDADFPDSDLNKDEFEQGSHERLCRNAAVCPYCSLRFFSPELKQEHESKCEYKKLTCLECMRTFKSSFSIWRHQVEVHNQNNMAPTENFSLPVLDHNGDVTGSSRPQSQPEPNKVNHIVTTKDDNVFSDSSEQVNFDSEDSSCLPEDLSLSKQLKIQVKEEPVEEAEEEAPEASTAPKEAGPSKEASLWPCEKCGKMFTVHKQLERHQELLCSVKPFICHVCNKAFRTNFRLWSHFQSHMSQASEESAHKESEVCPVPTNSPSPPPLPPPPPLPKIQPLEPDSPTGLSENPTPATEKLFVPQESDTLFYHAPPLSAITFKRQFMCKLCHRTFKTAFSLWSHEQTHN

SEQ ID NO: 11599 - protein, 463 aa, Homo sapiens
MQYDDLPHYGGMDGVGIPSTMYGDPHAARSMQPVHHLNHGPPLHSHQYPHTAHTNAMAPSMGSSVNDALKRDKDAIYGHPLFPLLALIFEKCELATCTPREPGVAGGDVCSSESFNEDIAVFAKQIRAEKPLFSSNPELDNLMIQAIQVLRFHLLELEKVHELCDNFCHRYISCLKGKMPIDLVIDDREGGSKSDSEDITRSANLTDQPSWNRDHDDTASTRSGGTPGPSSGGHTSHSGDNSSEQGDGLDNSVASPSTGDDDDPDKDKKRHKKRGIFPKVATNIMRAWLFQHLTHPYPSEEQKKQLAQDTGLTILQVNNWFINARRRIVQPMIDQSNRAVSQGTPYNPDGQPMGGFVMDGQQHMGIRAPGLQSMPGEYVARGGPMGVSMGQPSYTQPQMPPHPAQLRHGPPMHTYIPGHPHHPTVMMHGGPPHPGMPMSASSPTVLNTGDPTMSGQVMDIHAQ

SEQ ID NO: 11600 - protein, 2897 aa, Homo sapiens
MTDPMMDFFDDANLFGETLEGLSDDAFVQPGPVSLVDELNLGAEFEPLHIDSLNHVQGTPTHQKMTDFEQLNQFDSIKFHHVNQSFGSPAEHVLSPHSQFNCSPIHPQNQPNGLFPDVSDGSPMWGHQTATTISNQNGSPFHQQGHSHSMHQNKSFVAHHDFALFQANEQQTQCTSLRSQQNRNNLNPGQNSLSQSKNFMNVSGPHRVNVNHPPQMTNASNSQQSISMQQFSQTSNPSAHFHKCSSHQEGNFNGPSPNMTSCSVSNSQQFSSHYSFSSNHISPNSLLQSSAVLASNHTNQTLSDFTGSNSFSPHRGIKQESTQHILNPNTSLNSNNFQILHSSHPQGNYSNSKLSPVHMNFPDPVDSGTQMGHFNDHVETNGFSSLEENLLHQVESQTEPFTGLDPEDLLQEGLLPHFDESTFGQDNSSHILDHDLDRQFTSHLVTRPSDMAQTQLQSQARSWHSSFSNHQHLHDRNHLCLQRQPPSSKKSDGSGTYTKLQNTQVRVMSEKKQRKKVESESKQEKANRIISEAIAKAKERGERNIPRVMSPENFPTASVEGKEEKKGRRMKSKPKDKDSKKTKTCSKLKEKTKIGKLIITLGKKQKRKNESSDEISDAEQMPQHTLKDQDSQKRRSNRQIKRKKYAEDIEGKQSEEEVKGSMKIKKNSAPLPGEQPLQLFVENPSEEDAAIVDKILSSRTVKKEISPGVMIDTEEFFVKYKNYSYLHCEWATEEQLLKDKRIQQKIKRFKLRQAQRAHFFADMEEEPFNPDYVEVDRVLEVSFCEDKDTGEPVIYYLVKWCSLPYEDSTWELKEDVDLAKIEEFEQLQASRPDTRRLDRPPSNIWKKIDQSRDYKNGNQLREYQLEGLNWLLFNWYNRRNCILADEMGLGKTIQSITFLYEILLTGIRGPFLIIAPLSTIANWEREFRTWTDINVVVYHGSLISRQMIQQYEMYFRDSQGRIIRGAYRFQAIITTFEMILGGCGELNAIEWRCVIIDEAHRLKNKNCKLLEGLKLMNLEHKVLLTGTPLQNTVEELFSLLHFLEPLRFPSESTFMQEFGDLKTEEQVQKLQAILKPMMLRRLKEDVEKKLAPKEETIIEVELTNIQKKYYRAILEKNFSFLSKGAGQTNVPNLVNTMMELRKCCNHPYLIKGAEEKILGEFRDTYNPAASDFHLQAMIQSAGKLVLIDKLLPKMKAGGHKVLIFSQMVRCLDILEDYLIHKRYLYERIDGRVRGNLRQAAIDRFSKPDSDRFVFLLCTRAGGLGINLTAADTCIIFDSDWNPQNDLQAQARCHRIGQNKAVKVYRLVTRNSYEREMFDRASLKLGLDKAVLQSMSGRESNVGGIQQLSKKEIEDLLRRGAYGAIMEEEDEGSKFCEEDIDQILLRRTKTITIESEGRGSTFAKASFVASGNRTDISLDDPNFWQKWAKKAEIDIEAISGRNSLVIDTPRIRKQTRPFSATKDELAELSEAESEGDEKPKLRRPCDRSNGYGRTECFRVEKNLLVYGWGRWREILSHGRFKRQLNEHDVEIICRALLAYCLVHYRGDEKIKGFIWDLITPTEDGQTRELQNHLGLSAPVPRGRKGKKVKTQTSSFDIQKAEWLRKYNPEQLLQDEGYKKHIKHHCNKVLLRVRMLYYLKQEVIGNECQKVFDGVDASDIDVWVPEPDHSEVPAEWWDFDADKSLLIGVFKHGYEKYNTIRADPALCFLERVGKPDEKAVAAEQRANDYMDGDVEDPEYKPAPAIFKDDIEDDVSSPGDLVIADGDGQLMEGDKVYWPTQSALTTRLRRLITAYQRTNKNRQIQQIQPTFSVPTSVMQPIYEEATLNPKMAAKIERQQRWTRREEADFYRVVSTFGVVFDPDRGQFDWTKFRAMARLHKKTDDSLEKYLYAFMSMCRRVCRLPSKEELVDPNIFIQPITEERASRTLYRIELLRKVREQALRHPQLFERLKLCHPNPDLPVWWECGPHDRDLLIGAAKHGVSRTDYHILRDPELSFMAAQRNYSQSKMAHSRTSTPLLQQYQVALSASPLTSLPRLLDAKGIILEEMKVKSENLKEEPQSSEEESMSSVETRTLIKSEPVSPKNGVLPQATGDQKSGGKCETDRRMVAARTEPLTPNPASKKPRVHKRGSESSSDSDSDSERSSCSSRSSSSSSSSSCSHSRSGSSSSSSSSCSSASSSSSSSTSSSSSSSSSSSEESDSDEEEAQKRESTTHMKAYDEESVASLSTTQDETQDSFQMNNGTPESAYILQGGYMLAASYWPKDRVMINRLDSICQTVLKGKWPSARRSYDANTVASFYTTKLLDSPGAATEYSDPSVPTPPGAGVKEEHDQSTQMSKVKKHVREKEFTVKIKDEGGLKLTFQKQGLAQKRPFDGEDGALGQQQYLTRLRELQSASETSLVNFPKSIPVSGTSIQPTLGANGVILDNQPIVKKRRGRRKNVEGVDIFFFNRNKPPNHVSLGLTSSQISTGINPALSYTQPQGIPDTESPVPVINLKDGTRLAGDDAPKRKDLEKWLKEHPGYVEDLGAFIPRMQLHEGRPKQKRHRCRNPNKLDVNSLTGEERVQLINRRNARKVGGAFAPPLKDLCRFLKENSEYGVAPEWGDVVKQSGFLPESMYERILTGPVVREEVSRRGRRPKSGIAKATAAAAAASATSVSGNPLLANGLLPGVDLTTLQALQQNLQNLQSLQVTAGLMGMPTGLPSGGEAKNMAAMFPMLLSGMAGLPNLLGMGGLLTKPTESGTEDKKGSDSKESEGKTERTESQSSENGGENSVSSSPSTSSTAALNTAAAANPLALNPLLLSNILYPGMLLTPGLNLHIPTLSQSNTFDVQNKNSDLGSSKSVEVKEEDSRIKDQEDKGGTEPSPLNENSTDEGSEKADASSGSDSTSSSSEDSDSSNED

SEQ ID NO: 11601 - protein, 427 aa, Homo sapiens
MELRVGNRYRLGRKIGSGSFGDIYLGTDIAAGEEVAIKLECVKTKHPQLHIESKIYKMMQGGVGIPTIRWCGAEGDYNVMVMELLGPSLEDLFNFCSRKFSLKTVLLLADQMISRIEYIHSKNFIHRDVKPDNFLMGLGKKGNLVYIIDFGLAKKYRDARTHQHIPYRENKNLTGTARYASINTHLGIEQSRRDDLESLGYVLMYFNLGSLPWQGLKAATKRQKYERISEKKMSTPIEVLCKGYPSEFATYLNFCRSLRFDDKPDYSYLRQLFRNLFHRQGFSYDYVFDWNMLKFGASRAADDAERERRDREERLRHSRNPATRGLPSTASGRLRGTQEVAPPTPLTPTSHTANTSPRPVSGMERERKVSMRLHRGAPVNISSSDLTGRQDTSRMSTSQRSRDMASLRLHAARQGTRCRPQRPRRTY

SEQ ID NO: 11602 - protein, 1554 aa, Homo sapiens
MTPACPLLLSVILSLRLATAFDPAPSACSALASGVLYGAFSLQDLFPTIASGCSWTLENPDPTKYSLYLRFNRQEQVCAHFAPRLLPLDHYLVNFTCLRPSPEEAVAQAESEVGRPEEEEAEAAAGLELCSGSGPFTFLHFDKNFVQLCLSAEPSEAPRLLAPAALAFRFVEVLLINNNNSSQFTCGVLCRWSEECGRAAGRACGFAQPGCSCPGEAGAGSTTTTSPGPPAAHTLSNALVPGGPAPPAEADLHSGSSNDLFTTEMRYGEEPEEEPKVKTQWPRSADEPGLYMAQTGDPAAEEWSPWSVCSLTCGQGLQVRTRSCVSSPYGTLCSGPLRETRPCNNSATCPVHGVWEEWGSWSLCSRSCGRGSRSRMRTCVPPQHGGKACEGPELQTKLCSMAACPVEGQWLEWGPWGPCSTSCANGTQQRSRKCSVAGPAWATCTGALTDTRECSNLECPATDSKWGPWNAWSLCSKTCDTGWQRRFRMCQATGTQGYPCEGTGEEVKPCSEKRCPAFHEMCRDEYVMLMTWKKAAAGEIIYNKCPPNASGSASRRCLLSAQGVAYWGLPSFARCISHEYRYLYLSLREHLAKGQRMLAGEGMSQVVRSLQELLARRTYYSGDLLFSVDILRNVTDTFKRATYVPSADDVQRFFQVVSFMVDAENKEKWDDAQQVSPGSVHLLRVVEDFIHLVGDALKAFQSSLIVTDNLVISIQREPVSAVSSDITFPMRGRRGMKDWVRHSEDRLFLPKEVLSLSSPGKPATSGAAGSPGRGRGPGTVPPGPGHSHQRLLPADPDESSYFVIGAVLYRTLGLILPPPRPPLAVTSRVMTVTVRPPTQPPAEPLITVELSYIINGTTDPHCASWDYSRADASSGDWDTENCQTLETQAAHTRCQCQHLSTFAVLAQPPKDLTLELAGSPSVPLVIGCAVSCMALLTLLAIYAAFWRFIKSERSIILLNFCLSILASNILILVGQSRVLSKGVCTMTAAFLHFFFLSSFCWVLTEAWQSYLAVIGRMRTRLVRKRFLCLGWGLPALVVAVSVGFTRTKGYGTSSYCWLSLEGGLLYAFVGPAAVIVLVNMLIGIIVFNKLMARDGISDKSKKQRAGSERCPWASLLLPCSACGAVPSPLLSSASARNAMASLWSSCVVLPLLALTWMSAVLAMTDRRSVLFQALFAVFNSAQGFVITAVHCFLRREVQDVVKCQMGVCRADESEDSPDSCKNGQLQILSDFEKDVDLACQTVLFKEVNTCNPSTITGTLSRLSLDEDEEPKSCLVGPEGSLSFSPLPGNILVPMAASPGLGEPPPPQEANPVYMCGEGGLRQLDLTWLRPTEPGSEGDYMVLPRRTLSLQPGGGGGGGEDAPRARPEGTPRRAAKTVAHTEGYPSFLSVDHSGLGLGPAYGSLQNPYGMTFQPPPPTPSARQVPEPGERSRTMPRTVPGSTMKMGSLERKKLRYSDLDFEKVMHTRKRHSELYHELNQKFHTFDRYRSQSTAKDKPSPGERPSLSQHRRHQSWSTFKSMTLGSLPPKPRERLTLHRAAAWEPTEPPDGDFQTEV

SEQ ID NO: 11603 - protein, 1466 aa, Homo sapiens
MTPACPLLLSVILSLRLATAFDPAPSACSALASGVLYGAFSLQDLFPTIASGCSWTLENPDPTKYSLYLRFNRQEQVCAHFAPRLLPLDHYLVNFTCLRPSPEEAVAQAESEVGRPEEEEAEAAAGLELCSGSGPFTFLHFDKNFVQLCLSAEPSEAPRLLAPAALAFRFVEVLLINNNNSSQFTCGVLCRWSEECGRAAGRACGFAQPGCSCPGEAGAGSTTTTSPGPPAAHTLSNALVPGGPAPPAEADLHSGSSNDLFTTEMRYGEEPEEEPKVKTQWPRSADEPGLYMAQTGDPAAEEWSPWSVCSLTCGQGLQVRTRSCVSSPYGTLCSGPLRETRPCNNSATCPVEGQWLEWGPWGPCSTSCANGTQQRSRKCSVAGPAWATCTGALTDTRECSNLECPATDSKWGPWNAWSLCSKTCDTGWQRRFRMCQATGTQGYPCEGTGEEVKPCSEKRCPAFHEMCRDEYVMLMTWKKAAAGEIIYNKCPPNASGSASRRCLLSAQGVAYWGLPSFARCISHEYRYLYLSLREHLAKGQRMLAGEGMSQVVRSLQELLARRTYYSGDLLFSVDILRNVTDTFKRATYVPSADDVQRFFQVVSFMVDAENKEKWDDAQQVSPGSVHLLRVVEDFIHLVGDALKAFQSSLIVTDNLVISIQREPVSAVSSDITFPMRGRRGMKDWVRHSEDRLFLPKEVLSLSSPGKPATSGAAGSPGRGRGPGTVPPGPGHSHQRLLPADPDESSYFVIGAVLYRTLGLILPPPRPPLAVTSRVMTVTVRPPTQPPAEPLITVELSYIINGTTDPHCASWDYSRADASSGDWDTENCQTLETQAAHTRCQCQHLSTFAVLAQPPKDLTLELAGSPSVPLVIGCAVSCMALLTLLAIYAAFWRFIKSERSIILLNFCLSILASNILILVGQSRVLSKGVCTMTAAFLHFFFLSSFCWVLTEAWQSYLAVIGRMRTRLVRKRFLCLGWGLPALVVAVSVGFTRTKGYGTSSYCWLSLEGGLLYAFVGPAAVIVLVNMLIGIIVFNKLMARDGISDKSKKQRAGASLWSSCVVLPLLALTWMSAVLAMTDRRSVLFQALFAVFNSAQGFVITAVHCFLRREVQDVVKCQMGVCRADESEDSPDSCKNGQLQILSDFEKDVDLACQTVLFKEVNTCNPSTITGTLSRLSLDEDEEPKSCLVGPEGSLSFSPLPGNILVPMAASPGLGEPPPPQEANPVYMCGEGGLRQLDLTWLRPTEPGSEGDYMVLPRRTLSLQPGGGGGGGEDAPRARPEGTPRRAAKTVAHTEGYPSFLSVDHSGLGLGPAYGSLQNPYGMTFQPPPPTPSARQVPEPGERSRTMPRTVPGSTMKMGSLERKKLRYSDLDFEKVMHTRKRHSELYHELNQKFHTFDRYRSQSTAKDKPSPGERPSLSQHRRHQSWSTFKSMTLGSLPPKPRERLTLHRAAAWEPTEPPDGDFQTEV

SEQ ID NO: 11604 - protein, 1499 aa, Homo sapiens
MTPACPLLLSVILSLRLATAFDPAPSACSALASGVLYGAFSLQDLFPTIASGCSWTLENPDPTKYSLYLRFNRQEQVCAHFAPRLLPLDHYLVNFTCLRPSPEEAVAQAESEVGRPEEEEAEAAAGLELCSGSGPFTFLHFDKNFVQLCLSAEPSEAPRLLAPAALAFRFVEVLLINNNNSSQFTCGVLCRWSEECGRAAGRACGFAQPGCSCPGEAGAGSTTTTSPGPPAAHTLSNALVPGGPAPPAEADLHSGSSNDLFTTEMRYGEEPEEEPKVKTQWPRSADEPGLYMAQTVHGVWEEWGSWSLCSRSCGRGSRSRMRTCVPPQHGGKACEGPELQTKLCSMAACPVEGQWLEWGPWGPCSTSCANGTQQRSRKCSVAGPAWATCTGALTDTRECSNLECPATDSKWGPWNAWSLCSKTCDTGWQRRFRMCQATGTQGYPCEGTGEEVKPCSEKRCPAFHEMCRDEYVMLMTWKKAAAGEIIYNKCPPNASGSASRRCLLSAQGVAYWGLPSFARCISHEYRYLYLSLREHLAKGQRMLAGEGMSQVVRSLQELLARRTYYSGDLLFSVDILRNVTDTFKRATYVPSADDVQRFFQVVSFMVDAENKEKWDDAQQVSPGSVHLLRVVEDFIHLVGDALKAFQSSLIVTDNLVISIQREPVSAVSSDITFPMRGRRGMKDWVRHSEDRLFLPKEVLSLSSPGKPATSGAAGSPGRGRGPGTVPPGPGHSHQRLLPADPDESSYFVIGAVLYRTLGLILPPPRPPLAVTSRVMTVTVRPPTQPPAEPLITVELSYIINGTTDPHCASWDYSRADASSGDWDTENCQTLETQAAHTRCQCQHLSTFAVLAQPPKDLTLELAGSPSVPLVIGCAVSCMALLTLLAIYAAFWRFIKSERSIILLNFCLSILASNILILVGQSRVLSKGVCTMTAAFLHFFFLSSFCWVLTEAWQSYLAVIGRMRTRLVRKRFLCLGWGLPALVVAVSVGFTRTKGYGTSSYCWLSLEGGLLYAFVGPAAVIVLVNMLIGIIVFNKLMARDGISDKSKKQRAGSERCPWASLLLPCSACGAVPSPLLSSASARNAMASLWSSCVVLPLLALTWMSAVLAMTDRRSVLFQALFAVFNSAQGFVITAVHCFLRREVQDVVKCQMGVCRADESEDSPDSCKNGQLQILSDFEKDVDLACQTVLFKEVNTCNPSTITGTLSRLSLDEDEEPKSCLVGPEGSLSFSPLPGNILVPMAASPGLGEPPPPQEANPVYMCGEGGLRQLDLTWLRPTEPGSEGDYMVLPRRTLSLQPGGGGGGGEDAPRARPEGTPRRAAKTVAHTEGYPSFLSVDHSGLGLGPAYGSLQNPYGMTFQPPPPTPSARQVPEPGERSRTMPRTVPGSTMKMGSLERKKLRYSDLDFEKVMHTRKRHSELYHELNQKFHTFDRYRSQSTAKDKPSPGERPSLSQHRRHQSWSTFKSMTLGSLPPKPRERLTLHRAAAWEPTEPPDGDFQTEV

SEQ ID NO: 11605 - protein, 1093 aa, Homo sapiens
MSWFNASQLSSFAKQALSQAQKSIDRVLDIQEEEPSIWAETIPYGEPGISSPVSGGWDTSTWGLKSNTEPQSPPIASPKAITKPVRRTVVDESENFFSAFLSPTDVQTIQKSPVVSKPPAKSQRPEEEVKSSLHESLHIGQSRTPETTESQVKDSSLCVSGETLAAGTSSPKTEGKHEETVNKESDMKVPTVSLKVSESVIDVKTTMESISNTSTQSLTAETKDIALEPKEQKHEDRQSNTPSPPVSTFSSGTSTTSDIEVLDHESVISESSASSRQETTDSKSSLHLMQTSFQLLSASACPEYNRLDDFQKLTESCCSSDAFERIDSFSVQSLDSRSVSEINSDDELSGKGYALVPIIVNSSTPKSKTVESAEGKSEEVNETLVIPTEEAEMEESGRSATPVNCEQPDILVSSTPINEGQTVLDKVAEQCEPAESQPEALSEKEDVCKTVEFLNEKLEKREAQLLSLSKEKALLEEAFDNLKDEMFRVKEESSSISSLKDEFTQRIAEAEKKVQLACKERDAAKKEIKNIKEELATRLNSSETADLLKEKDEQIRGLMEEGEKLSKQQLHNSNIIKKLRAKDKENENMVAKLNKKVKELEEELQHLKQVLDGKEEVEKQHRENIKKLNSMVERQEKDLGRLQVDMDELEEKNRSIQAALDSAYKELTDLHKANAAKDSEAQEAALSREMKAKEELSAALEKAQEEARQQQETLAIQVGDLRLALQRTEQAAARKEDYLRHEIGELQQRLQEAENRNQELSQSVSSTTRPLLRQIENLQATLGSQTSSWEKLEKNLSDRLGESQTLLAAAVERERAATEELLANKIQMSSMESQNSLLRQENSRFQAQLESEKNRLCKLEDENNRYQVELENLKDEYVRTLEETRKEKTLLNSQLEMERMKVEQERKKAIFTQETIKEKERKPFSVSSTPTMSRSSSISGVDMAGLQTSFLSQDESHDHSFGPMPISANGSNLYDAVRMGAGSSIIENLQSQLKLREGEITHLQLEIGNLEKTRSIMAEELVKLTNQNDELEEKVKEIPKLRTQLRDLDQRYNTILQMYGEKAEEAEELRLDLEDVKNMYKTQIDELLRQSLS

SEQ ID NO: 11606 - protein, 953 aa, Homo sapiens
MSSGLWSQEKVTSPYWEERIFYLLLQECSVTDKQTQKLLKVPKGSIGQYIQDRSVGHSRIPSAKGKKNQIGLKILEQPHAVLFVDEKDVVEINEKFTELLLAITNCEERFSLFKNRNRLSKGLQIDVGCPVKVQLRSGEEKFPGVVRFRGPLLAERTVSGIFFGVELLEEGRGQGFTDGVYQGKQLFQCDEDCGVFVALDKLELIEDDDTALESDYAGPGDTMQVELPPLEINSRVSLKVGETIESGTVIFCDVLPGKESLGYFVGVDMDNPIGNWDGRFDGVQLCSFACVESTILLHINDIIPESVTQERRPPKLAFMSRGVGDKGSSSHNKPKATGSTSDPGNRNRSELFYTLNGSSVDSQPQSKSKNTWYIDEVAEDPAKSLTEISTDFDRSSPPLQPPPVNSLTTENRFHSLPFSLTKMPNTNGSIGHSPLSLSAQSVMEELNTAPVQESPPLAMPPGNSHGLEVGSLAEVKENPPFYGVIRWIGQPPGLNEVLAGLELEDECAGCTDGTFRGTRYFTCALKKALFVKLKSCRPDSRFASLQPVSNQIERCNSLAFGGYLSEVVEENTPPKMEKEGLEIMIGKKKGIQGHYNSCYLDSTLFCLFAFSSVLDTVLLRPKEKNDVEYYSETQELLRTEIVNPLRIYGYVCATKIMKLRKILEKVEAASGFTSEEKDPEEFLNILFHHILRVEPLLKIRSAGQKVQDCYFYQIFMEKNEKVGVPTIQQLLEWSFINSNLKFAEAPSCLIIQMPRFGKDFKLFKKIFPSLELNITDLLEDTPRQCRICGGLAMYECRECYDDPDISAGKIKQFCKTCNTQVHLHPKRLNHKYNPVSLPKDLPDWDWRHGCIPCQNMELFAVLCIETSHYVAFVKYGKDDSAWLFFDSMADRDGGQNGFNIPQVTPCPEVGEYLKMSLEDLHSLDSRRIQGCARRLLCDAYMCMYQSPTMSLYK

SEQ ID NO: 11607 - protein, 3546 aa, Homo sapiens
MCENCADLVEVLNEISDVEGGDGLQLRKEHTLKIFTYINSWTQRQCLCCFKEYKHLEIFNQVVCALINLVIAQVQVLRDQLCKHCTTINIDSTWQDESNQAEEPLNIDRECNEGSTERQKSIEKKSNSTRICNLTEEESSKSSDPFSLWSTDEKEKLLLCVAKIFQIQFPLYTAYKHNTHPTIEDISTQESNILGAFCDMNDVEVPLHLLRYVCLFCGKNGLSLMKDCFEYGTPETLPFLIAHAFITVVSNIRIWLHIPAVMQHIIPFRTYVIRYLCKLSDQELRQSAARNMADLMWSTVKEPLDTTLCFDKESLDLAFKYFMSPTLTMRLAGLSQITNQLHTFNDVCNNESLVSDTETSIAKELADWLISNNVVEHIFGPNLHIEIIKQCQVILNFLAAEGRLSTQHIDCIWAAAQLKHCSRYIHDLFPSLIKNLDPVPLRHLLNLVSALEPSVHTEQTLYLASMLIKALWNNALAAKAQLSKQSSFASLLNTNIPIGNKKEEEELRRTAPSPWSPAASPQSSDNSDTHQSGGSDIEMDEQLINRTKHVQQRLSDTEESMQGSSDETANSGEDGSSGPGSSSGHSDGSSNEVNSSHASQSAGSPGSEVQSEDIADIEALKEEDEDDDHGHNPPKSSCGTDLRNRKLESQAGICLGDSQGMSERNGTSSGTGKDLVFNTESLPSVDNRMRMLDACSHSEDPEHDISGEMNATHIAQGSQESCITRTGDFLGETIGNELFNCRQFIGPQHHHHHHHHHHHHDGHMVDDMLSADDVSCSSSQVSAKSEKNMADFDGEESGCEEELVQINSHAELTSHLQQHLPNLASIYHEHLSQGPVVHKHQFNSNAVTDINLDNVCKKGNTLLWDIVQDEDAVNLSEGLINEAEKLLCSLVCWFTDRQIRMRFIEGCLENLGNNRSVVISLRLLPKLFGTFQQFGSSYDTHWITMWAEKELNMMKLFFDNLVYYIQTVREGRQKHALYSHSAEVQVRLQFLTCVFSTLGSPDHFRLSLEQVDILWHCLVEDSECYDDALHWFLNQVRSKDQHAMGMETYKHLFLEKMPQLKPETISMTGLNLFQHLCNLARLATSAYDGCSNSELCGMDQFWGIALRAQSGDVSRAAIQYINSYYINGKTGLEKEQEFISKCMESLMIASSSLEQESHSSLMVIERGLLMLKTHLEAFRRRFAYHLRQWQIEGTGISSHLKALSDKQSLPLRVVCQPAGLPDKMTIEMYPSDQVADLRAEVTHWYENLQKEQINQQAQLQEFGQSNRKGEFPGGLMGPVRMISSGHELTTDYDEKALHELGFKDMQMVFVSLGAPRRERKGEGVQLPASCLPPPQKDNIPMLLLLQEPHLTTLFDLLEMLASFKPPSGKVAVDDSESLRCEELHLHAENLSRRVWELLMLLPTCPNMLMAFQNISDEQSNDGFNWKELLKIKSAHKLLYALEIIEALGKPNRRIRRESTGSYSDLYPDSDDSSEDQVENSKNSWSCKFVAAGGLQQLLEIFNSGILEPKEQESWTVWQLDCLACLLKLICQFAVDPSDLDLAYHDVFAWSGIAESHRKRTWPGKSRKAAGDHAKGLHIPRLTEVFLVLVQGTSLIQRLMSVAYTYDNLAPRVLKAQSDHRSRHEVSHYSMWLLVSWAHCCSLVKSSLADSDHLQDWLKKLTLLIPETAVRHESCSGLYKLSLSGLDGGDSINRSFLLLAASTLLKFLPDAQALKPIRIDDYEEEPILKPGCKEYFWLLCKLVDNIHIKDASQTTLLDLDALARHLADCIRSREILDHQDGNVEDDGLTGLLRLATSVVKHKPPFKFSREGQEFLRDIFNLLFLLPSLKDRQQPKCKSHSSRAAAYDLLVEMVKGSVENYRLIHNWVMAQHMQSHAPYKWDYWPHEDVRAECRFVGLTNLGATCYLASTIQQLYMIPEARQAVFTAKYSEDMKHKTTLLELQKMFTYLMESECKAYNPRPFCKTYTMDKQPLNTGEQKDMTEFFTDLITKIEEMSPELKNTVKSLFGGVITNNVVSLDCEHVSQTAEEFYTVRCQVADMKNIYESLDEVTIKDTLEGDNMYTCSHCGKKVRAEKRACFKKLPRILSFNTMRYTFNMVTMMKEKVNTHFSFPLRLDMTPYTEDFLMGKSERKEGFKEVSDHSKDSESYEYDLIGVTVHTGTADGGHYYSFIRDIVNPHAYKNNKWYLFNDAEVKPFDSAQLASECFGGEMTTKTYDSVTDKFMDFSFEKTHSAYMLFYKRMEPEEENGREYKFDVSSELLEWIWHDNMQFLQDKNIFEHTYFGFMWQLCSCIPSTLPDPKAVSLMTAKLSTSFVLETFIHSKEKPTMLQWIELLTKQFNNSQAACEWFLDRMADDDWWPMQILIKCPNQIVRQMFQRLCIHVIQRLRPVHAHLYLQPGMEDGSDDMDTSVEDIGGRSCVTRFVRTLLLIMEHGVKPHSKHLTEYFAFLYEFAKMGEEESQFLLSLQAISTMVHFYMGTKGPENPQVEVLSEEEGEEEEEEEDILSLAEEKYRPAALEKMIALVALLVEQSRSERHLTLSQTDMAALTGGKGFPFLFQHIRDGINIRQTCNLIFSLCRYNNRLAEHIVSMLFTSIAKLTPEAANPFFKLLTMLMEFAGGPPGMPPFASYILQRIWEVIEYNPSQCLDWLAVQTPRNKLAHSWVLQNMENWVERFLLAHNYPRVRTSAAYLLVSLIPSNSFRQMFRSTRSLHIPTRDLPLSPDTTVVLHQVYNVLLGLLSRAKLYVDAAVHGTTKLVPYFSFMTYCLISKTEKLMFSTYFMDLWNLFQPKLSEPAIATNHNKQALLSFWYNVCADCPENIRLIVQNPVVTKNIAFNYILADHDDQDVVLFNRGMLPAYYGILRLCCEQSPAFTRQLASHQNIQWAFKNLTPHASQYPGAVEELFNLMQLFIAQRPDMREEELEDIKQFKKTTISCYLRCLDGRSCWTTLISAFRILLESDEDRLLVVFNRGLILMTESFNTLHMMYHEATACHVTGDLVELLSIFLSVLKSTRPYLQRKDVKQALIQWQERIEFAHKLLTLLNSYSPPELRNACIDVLKELVLLSPHDFLHTLVPFLQHNHCTYHHSNIPMSLGPYFPCRENIKLIGGKSNIRPPRPELNMCLLPTMVETSKGKDDVYDRMLLDYFFSYHQFIHLLCRVAINCEKFTETLVKLSVLVAYEGLPLHLALFPKLWTELCQTQSAMSKNCIKLLCEDPVFAEYIKCILMDERTFLNNNIVYTFMTHFLLKVQSQVFSEANCANLISTLITNLISQYQNLQSDFSNRVEISKASASLNGDLRALALLLSVHTPKQLNPALIPTLQELLSKCRTCLQQRNSLQEQEAKERKTKDDEGATPIKRRRVSSDEEHTVDSCISDMKTETREVLTPTSTSDNETRDSSIIDPGTEQDLPSPENSSVKEYRMEVPSSFSEDMSNIRSQHAEEQSNNGRYDDCKEFKDLHCSKDSTLAEEESEFPSTSISAVLSDLADLRSCDGQALPSQDPEVALSLSCGHSRGLFSHMQQHDILDTLCRTIESTIHVVTRISGKGNQAAS

SEQ ID NO: 11608 - protein, 935 aa, Homo sapiens
MANRLQRGDRSRLLLLLCIFLGTLRGFRARQIRYSVPEETEKGSFVGNISKDLGLEPRELAKRGVRIVSRGKTQLFAVNPRSGSLITAGRIDREELCETVSSCFLNMELLVEDTLKIYGVEVEIIDINDNAPSFQEDEVEIKVSEHAIPGARFALPNARDPDVGVNSLQSYQLSPNNYFSLQLRGRTDGAKNPELVLEGSLDREKEAAHLLLLTALDGGDPIRKGAVPIRVVVLDVNDHIPMFTQSVYRVSVPENISSGTRVLMVNATDPDEGINGEVMYSFRNMESKASEIFQLDSQTGEVQVRGSLDFEKYRFYEMEIQGQDGGGLFTTTTMLITVVDVNDNAPEITITSSINSILENSPPGTVIALLNVQDQDSGENGQVSCFIPNHLPFKLEKTYGNYYKLITSRVLDRELVQSYNITLTATDQGSPPLSAETHVWLNVADDNDNPPVFPHSSYSAYIPENNPRGASIFSVTALDPDSKQNALVTYSLTDDTVQGVPLSSYVSINSNTGVLYALQSFDYEQFRDLELRVIARDSGDPPLSSNVSLSLFVLDQNDNAPEILYPALPTDGSTGVELAPRSAEPGYLVTKVVAVDKDSGQNAWLSYRLLKASEPGLFAVGEHTGEVRTARALLDRDALKQSLVVAVQDHGQPPLSATVTLTVAVADSIPEVLADLGSLESLANSETSDLSLYLVVAVAAVSCIFLVFVIVLLALRLWRWHKSRLLQASEGGLAGMPTSHFVGVDGVQAFLQTYSHEVSLIADSQKSHLIFPQPNYGDTLISQESCEKSEPLLIAEDSAIILGKCDPTSNQQAPPNTDWRFSQAQRPGTSGSQNGDDTGTWPNNQFDTEMLQAMILASASEAADGSSTLGGGAGTMGLSARYGPQFTLQHVPDYRQNVYIPGSNATLTNAAGKRDGKAPAGGNGNKKKSGKKEKK

SEQ ID NO: 11609 - protein, 929 aa, Homo sapiens
MGGSCAQRRRAGPRQVLFPLLLPLFYPTLCEPIRYSIPEELAKGSVVGNLAKDLGLSVLDVSARELRVSAEKLHFSVDAQSGDLLVKDRIDREQICKERRRCELQLEAVVENPLNIFHVIVVIEDVNDHAPQFRKDEINLEISESVSLGMGTILESAEDPDISMNSLSKYQLSPNEYFSLVEKDNPDGGKYPELVLQKTLDRETQSAHHLVLTALDGGDPPRSGTAQIRILVIDANDNPPVFSQDVYRVSLREDVPPGTSILRVKATDQDEGINSEITYSFFGVADKAQHVFSLDYTTGNILTQQPLDFEEVERYTINIEAKDRGSLSTRCKVIVEVVDENDNSPEIIITSLSDQIMEDSPPGVVVALFKTRDQDSGENGEVRCSLSRGVPFKIHSSSNNYYKLVTDEALDREQTPEYNVTIAATDRGKPPLSSSKTITLHITDVNDNAPVFGQSAYLVHVPENNQPGASIAQVSASDPDFGLNGRVSYSLIASDLESRTLSSYVSVSAQSGVVFAQRAFDHEQLRTFELTLQARDQGSPALSANVSLRVLVGDRNDNAPRVLYPALGPDGSALFDTVPRAAQPGYLVTKVVAVDADSGHNAWLSYHVVQASEPGLFSLGLRTGEVRMVRALGDKDSVRQRLLVAVRDGGQPPLSATATLHLVFADSLQEVLPDFSDHPTPSDSQAEMQFYLVVALALISVLFLLAVILAIALRLRQSFSPTAGDCFESVLCSKSGPVGPPNYSEGTLPYAYNFCVPGDQMNPEFNFFTSVDHCPATQDNLNKDSMLLASILTPSVEADKKILKQQAPPNTDWRFSQAQRPGTSGSQNGDDTGTWPNNQFDTEMLQAMILASASEAADGSSTLGGGAGTMGLSARYGPQFTLQHVPDYRQNVYIPGSNATLTNAAGKRDGKAPAGGNGNKKKSGKKEKK

SEQ ID NO: 11610 - protein, 932 aa, Homo sapiens
MAAPQSRPRRGELILLCALLGTLWEIGRGQIRYSVPEETDKGSFVGNISKDLGLDPRKLAKHGVRIVSRGRTQLFALNPRSGSLITAGRIDREELCAQSPRCLININTLVEDKGKLFGVEIEIIDINDNNPKFQVEDLEVKINEIAVPGARYPLPEAVDPDVGVNSLQSYQLSPNHHFSLDVQTGDNGAINPELVLERALDREEEAAHHLVLTASDGGKPPRSSTVRIHVTVLDTNDNAPVFPHPIYRVKVLENMPPGTRLLTVTASDPDEGINGKVAYKFRKINEKQTPLFQLNENTGEISIAKSLDYEECSFYEMEIQAEDVGALLGRTKLLISVEDVNDNRPEVIITSLFSPVLENSLPGTVIAFLSVHDQDSGKNGQVVCYTRDNLPFKLEKSIGNYYRLVTRKYLDRENVSIYNITVMASDLGTPPLSTETQIALHVADINDNPPTFPHASYSAYILENNLRGASIFSLTAHDPDSQENAQVTYSVTEDTLQGAPLSSYISINSDTGVLYALQSFDYEQIRDLQLLVTASDSGDPPLSSNMSLSLFVLDQNDNAPEILYPALPTDGSTGVELAPRSAERGYLVTKVVAVDRDSGQNAWLSYRLLKASEPGLFSVGLHTGEVRTARALLDRDALKQSLVVAVQDHGQPPLSATVTLTVAVADSIPEVLTELGSLKPSVDPNDSSLTLYLVVAVAAISCVFLAFVAVLLGLRLRRWHKSRLLQDSGGRLVGVPASHFVGVEEVQAFLQTYSQEVSLTADSRKSHLIFPQPNYADMLISQEGCEKNDSLLTSVDFHEYKNEADHGQQAPPNTDWRFSQAQRPGTSGSQNGDDTGTWPNNQFDTEMLQAMILASASEAADGSSTLGGGAGTMGLSARYGPQFTLQHVPDYRQNVYIPGSNATLTNAAGKRDGKAPAGGNGNKKKSGKKEKK

SEQ ID NO: 11611 - protein, 210 aa, Homo sapiens
MPPYTVVYFPVRGRCAALRMLLADQGQSWKEEVVTVETWQEGSLKASCLYGQLPKFQDGDLTLYQSNTILRHLGRTLGLYGKDQQEAALVDMVNDGVEDLRCKYISLIYTNYEAGKDDYVKALPGQLKPFETLLSQNQGGKTFIVGDQISFADYNLLDLLLIHEVLAPGCLDAFPLLSAYVGRLSARPKLKAFLASPEYVNLPINGNGKQ

SEQ ID NO: 11612 - protein, 936 aa, Homo sapiens
MAAQRNRSKESKDCSGLVLLCLFFGIPWEAGARQISYSIPEELEKGSFVGNISKDLGLAPRELAERGVRIVSRGRTQLFSLNPRSGSLITAGRIDREELCAQSARCVVSFNILVEDRVKLFGIEIEVTDINDNAPKFQAENLDVKINENVAAGMRFPLPEAIDPDVGVNSLQSYQLSPNKHFSLRVQSRANGVKYPELVLEHSLDREEEAIHHLVLTASDGGDPLRSGTVLVSVTVFDANDNAPVFTLPEYRVSVPENLPVGTQLLTVTATDRDEGANGEVTYSFRKLPDTQLLKFQLNKYTGEIKISENLDYEETGFYEIEIQAEDGGAYLATAKVLITVEDVNDNSPELTITSLFSPVTEDSPLGTVVALLNVHDLDSEQNGQVTCSILAYLPFKLEKSIDSYYRLVIHRALDREQVSSYNITVTATDGGSPPLSTEAHFMLQVADINDNPPTFSQVSYFTYIPENNARGASIFSVTALDPDSKENAQIIYSLAEDTIQGVPLSSYISINSDTGVLYALRSFDYEQFHELQMQVTASDSGDPPLSSNVSLSLFVLDQNDNAPEILYPALPTDGSTGVELAPRSAEPGYLVTKVVAVDRDSGQNAWLSYRLLKASEPGLFAVGEHTGEVRTARALLDRDALKQSLVVAVQDHGQPPLSATVTLTVAVADSIPQVLADLGSFESPANSETSDLTLYLVVAVAAVSCVFLAFVIVLLAHRLRRWHKSRLLQASGGGLTGVSGSHFVGVDGVRAFLQTYSHEVSLTADSRKSHLIFPQPNYADTLISQESCEKNDPLSLLDDSKFPIEDTPLVPQAPPNTDWRFSQAQRPGTSGSQNGDDTGTWPNNQFDTEMLQAMILASASEAADGSSTLGGGAGTMGLSARYGPQFTLQHVPDYRQNVYIPGSNATLTNAAGKRDGKAPAGGNGNKKKSGKKEKK

SEQ ID NO: 11613 - protein, 941 aa, Homo sapiens
MVIIGPRGPGSQRLLLSLLLLAAWEVGSGQLHYSVYEEAKHGTFVGRIAQDLGLELAELVPRLFRVASKRHGDLLEVNLQNGILFVNSRIDREKLCGRSAECSIHLEVIVDRPLQVFHVDVEVKDINDNPPVFREREQKVPVSESAPLDSHFPLEGASDADIGVNSLLTYALSLNENFELKIKTKKDKSILPELVLRKLLDREQTPKLNLLLMVIDGGKPELTGSVQIQITVLDVNDNGPAFDKPSYKVVLSENVQNDTRVIQLNASDPDEGLNGEISYGIKMILPVSEKCMFSINPDTGEIRIYGELDFEENNAYEIQVNAIDKGIPSMAGHSMVLVEVLDVNDNVPEVMVTSLSLPVQEDAQVGTVIALISVSDRDSGANGQVICSLTPHVPFKLVSTYKNYYSLVLDSALDRESVSAYELVVTARDGGSPSLWATARVSVEVADVNDNAPAFAQPEYTVFVKENNPPGCHIFTVSAWDADAQKNALVSYSLVERRVGEHALSSYVSVHAESGKVYALQPLDHEELELLQFQVSARDAGVPPLGSNVTLQVFVLDENDNAPALLATPAGSAGGAVSELVPRSVGAGHVVAKVRAVDADSGYNAWLSYELQPAAVGAHIPFHVGLYTGEISTTRILDEADAPRHRLLVLVKDHGEPALTSTATVLVSLVENGQAPKTSSRASVGAVDPEAALVDINVYLIIAICAVSSLLVLTLLLYTALRCSAPPTVSRCAPGKPTLVCSSAVGSWSYSQQRRQRVCSAESPPKTDLMAFSPSLQLSREDCLNPPSEPRQPNPDWRYSASLRAGMHSSVHLEEAGILRAGPGGPDQQWPTVSSATPEPEAGEVSPPVGAGVNSNSWTFKYGPGNPKQSGPGELPDKFIIPGSPAIISIRQEPTNSQIDKSDFITFGKKEETKKKKKKKKGNKTQEKKEKGNSTTDNSDQ

SEQ ID NO: 11614 - protein, 248 aa, Homo sapiens
MWLCPLALNLILMAASGAVCEVKDVCVGSPGIPGTPGSHGLPGRDGRDGLKGDPGPPGPMGPPGEMPCPPGNDGLPGAPGIPGECGEKGEPGERGPPGLPAHLDEELQATLHDFRHQILQTRGALSLQGSIMTVGEKVFSSNGQSITFDAIQEACARAGGRIAVPRNPEENEAIASFVKKYNTYAYVGLTEGPSPGDFRYSDGTPVNYTNWYRGEPAGRGKEQCVEMYTDGQWNDRNCLYSRLTICEF

SEQ ID NO: 11615 - protein, 487 aa, Homo sapiens
MMHFKSGLELTELQNMTVPEDDNISNDSNDFTEVENGQINSKFISDRESRRSLTNSHLEKKKCDEYIPGTTSLGMSVFNLSNAIMGSGILGLAFALANTGILLFLVLLTSVTLLSIYSINLLLICSKETGCMVYEKLGEQVFGTTGKFVIFGATSLQNTGAMLSYLFIVKNELPSAIKFLMGKEETFSAWYVDGRVLVVIVTFGIILPLCLLKNLGYLGYTSGFSLSCMVFFLIVVIYKKFQIPCIVPELNSTISANSTNADTCTPKYVTFNSKTVYALPTIAFAFVCHPSVLPIYSELKDRSQKKMQMVSNISFFAMFVMYFLTAIFGYLTFYDNVQSDLLHKYQSKDDILILTVRLAVIVAVILTVPVLFFTVRSSLFELAKKTKFNLCRHTVVTCILLVVINLLVIFIPSMKDIFGVVGVTSANMLIFILPSSLYLKITDQDGDKGTQRIWAALFLGLGVLFSLVSIPLVIYDWACSSSSDEGH

SEQ ID NO: 11616 - protein, 949 aa, Homo sapiens
MFGFQRRGLGTPRLQLWLLLLEFWEVGSGQLHYSVSEEAKHGTFVGRIAQDLGLELAELVQRLFRVASKTHGDLLEVNLQNGILFVNSRIDREELCGQSAECSIHLEVIVDRPLQVFHVNVEVKDINDNPPVFSLREQKLLIAESKQSDSRFPLEGASDADIEENALLTYRLSKNEYFSLDSPTNGKQIKRLSLILKKSLDREKTPELNLLLTATDGGKPELTGTVRLLVQVLDVNDNDPEFDKSEYKVSLMENAAKETLVLKLNATDRDEGVNGEVTYSLMSIKPNGRHLFTLDQNNGEVRVNGTLDYEENKFYKIEVQATDKGTPPMAGHCTVWVEILDTNDNSPEVAVTSLSLPVREDAQPSTVIALISVSDRDSGVNGQVTCSLTPHVPFKLVSTFKNYYSLVLDSALDRENVWAYELVVTARDGGSPSLWATARVSVEVADVNDNAPAFAQPEYTVFVKENNPPGCHIFTVSARDADAQENALVSYSLVERRLGDRALSSYVSVHAESGKVYALQPLDHEELELLQFQVSARDAGVPPLSSNVTLQVFVLDENDNAPALLATQAGSAGGAVNKLVPRSVGAGHVVAKVRAVDADSGYNAWLSYELQPAAGGSRIPFRVGLYTGEISTTRALDEADSPRHRLLVLVKDHGEPALTATATVLVSLVESGQAPKASSRTLAGAASPEAALVDVNVYLIIAICVVSSLLVLTLLLYTALWWSATPTEGACAPGKPTLVCSRAVGSWSYSQQRRQRVCSEEGPPKTDLMAFSPSLPLGLNKEEEGERQEPGSNHPGQPRQPNPDWRYSASLRAGMHSSVHLEEAGILRAGPGGPDQQWPTVSSATPEPEAGEVSPPVGAGVNSNSWTFKYGPGNPKQSGPGELPDKFIIPGSPAIISIRQEPTNSQIDKSDFITFGKKEETKKKKKKKKGNKTQEKKEKGNSTTDNSDQ

SEQ ID NO: 11617 - protein, 414 aa, Homo sapiens
MEDDAPVIYGLEFQARALTPQTAETDAIRFLVGTQSLKYDNQIHIIDFDDENNIINKNVLLHQAGEIWHISASPADRGVLTTCYNRTFCCVLSLDSFGALGKSAAQLFIALATSSDSKVLTCAAVWRMPKELESGSHESPDDSSSTAQTLELLCHLDNTAHGNMACVVWEPMGDGKKIISLADNHILLWDLQESSSQAVLASSASLEGKGQLKFTSGRWSPHHNCTQVATANDTTLRGWDTRSMSQIYCIENAHGQLVRDLDFNPNKQYYLASCGDDCKVKFWDTRNVTEPVKTLEEHSHWVWNVRYNHSHDQLVLTGSSDSRVILSNMVSISSEPFGHLVDDDDISDQEDHRSEEKSKEPLQDNVIATYEEHEDSVYAVDWSSADPWLFASLSYDGRLVINRVPRALKYHILL

SEQ ID NO: 11618 - protein, 440 aa, Homo sapiens
MRRYLRVVVLCVACGFCSLLYAFSQLAVSLEEGTGGGGGKPQAAVASWLAGGGRGAVRGAGVAGPAAHPGVSDRCKDFSLCYWNPYWMLPSDVCGMNCFWEAAFRYSLKIQPVEKMHLAVVACGERLEETMTMLKSAIIFSIKPLQFHIFAEDQLHHSFKGRLDNWSFLQTFNYTLYPITFPSENAAEWKKLFKPCASQRLFLPLILKEVDSLLYVDTDILFLRPVDDIWSLLKKFNSTQIAAMAPEHEEPRIGWYNRFARHPYYGKTGVNSGVMLMNMTRMRRKYFKNDMTTVRLQWGDILMPLLKKYKLNITWGDQDLLNIVFFHNPESLFVFPCQWNYRPDHCIYGSNCQEAEEGGIFILHGNRGVYHDDKQPAFRAVYEALRNCSFEDDNIRSLLKPLELELQKTVHTYCGKIYKIFIKQLAKSVRDRYARSPKEK

SEQ ID NO: 11619 - protein, 143 aa, Homo sapiens
MVKLFIGNLPREATEQEIRSLFEQYGKVLECDIIKNYGFVHIEDKTAAEDAIRNLHHYKLHGVNINVEASKNKSKTSTKLHVGNISPTCTNKELRAKFEEYGPVIECDIVKDYAFVHMERAEDAVEAIRGLDNTEFQGGMCVG

SEQ ID NO: 11620 - protein, 387 aa, Homo sapiens
MAPPAGGAAAAASDLGSAAVLLAVHAAVRPLGAGPDAEAQLRRLQLSADPERPGRFRLELLGAGPGAVNLEWPLESVSYTIRGPTQHELQPPPGGPGTLSLHFLNPQEAQRWAVLVRGATVEGQNGSKSNSPPALGPEACPVSLPSPPEASTLKGPPPEADLPRSPGNLTEREELAGSLARAIAGGDEKGAAQVAAVLAQHRVALSVQLQEACFPPGPIRLQVTLEDAASAASAASSAHVALQVHPHCTVAALQEQVFSELGFPPAVQRWVIGRCLCVPERSLASYGVRQDGDPAFLYLLSAPREAPATGPSPQHPQKMDGELGRLFPPSLGLPPGPQPAASSLPSPLQPSWSCPSCTFINAPDRPGCEMCSTQRPCTWDPLAAAST

SEQ ID NO: 11621 - protein, 82 aa, Homo sapiens
MKILCIFLTFVFTVSCGPSVPQKKTREVAERKRECQLVRGACKPECNSWEYVYYYCNVNPCCAVWEYQKPIINKITSKLHQK

SEQ ID NO: 11622 - protein, 147 aa, Homo sapiens
MALKRIHKELNDLARDPPAQCSAGPVGDDMFHWQATIMGPNDSPYQGGVFFLTIHFPTDYPFKPPKVAFTTRIYHPNINSNGSICLDILRSQWSPALTISKVLLSICSLLCDPNPDDPLVPEIARIYKTDREKYNRIAREWTQKYAM

SEQ ID NO: 11623 - protein, 642 aa, Homo sapiens
MTHILLLYYLVFLLPTESCRTLYQAASKSKEKVPARPHGVCDGVCTDYSQCTQPCPPDTQGNMGFSCRQKTWHKITDTCQTLNALNIFEEDSRLVQPFEDNIKISVYTGKSETITDMLLQKCPTDLSCVIRNIQQSPWIPGNIAVIVQLLHNISTAIWTGVDEAKMQSYSTIANHILNSKSISNWTFIPDRNSSYILLHSVNSFARRLFIDKHPVDISDVFIHTMGTTISGDNIGKNFTFSMRINDTSNEVTGRVLISRDELRKVPSPSQVISIAFPTIGAILEASLLENVTVNGLVLSAILPKELKRISLIFEKISKSEERRTQCVGWHSVENRWDQQACKMIQENSQQAVCKCRPSKLFTSFSILMSPHILESLILTYITYVGLGISICSLILCLSIEVLVWSQVTKTEITYLRHVCIVNIAATLLMADVWFIVASFLSGPITHHKGCVAATFFVHFFYLSVFFWMLAKALLILYGIMIVFHTLPKSVLVASLFSVGYGCPLAIAAITVAATEPGKGYLRPEICWLNWDMTKALLAFVIPALAIVVVNLITVTLVIVKTQRAAIGNSMFQEVRAIVRISKNIAILTPLLGLTWGFGVATVIDDRSLAFHIIFSLLNAFQGFFILVFGTILDPKIREALKG

SEQ ID NO: 11624 - protein, 288 aa, Homo sapiens
MPVEEFVAGWISGALGLVLGHPFDTVKVRLQTQTTYRGIVDCMVKIYRHESLLGFFKGMSFPIASIAVVNSVLFGVYSNTLLVLTATSHQERRAQPPSYMHIFLAGCTGGFLQAYCLAPFDLIKVRLQNQTEPRAQPGSPPPRYQGPVHCAASIFREEGPRGLFRGAWALTLRDTPTVGIYFITYEGLCRQYTPEGQNPSSATVLVAGGFAGIASWVAATPLDMIKSRMQMDGLRRRVYQGMLDCMVSSIRQEGLGVFFRGVTINSARAFPVNAVTFLSYEYLLRWWG

SEQ ID NO: 11625 - protein, 345 aa, Homo sapiens
MLPNTGRLAGCTVFITGASRGIGKAIALKAAKDGANIVIAAKTAQPHPKLLGTIYTAAEEIEAVGGKALPCIVDVRDEQQISAAVEKAIKKFGAYTIAKYGMSMYVLGMAEEFKGEIAVNALWPKTAIHTAAMDMLGGPGIESQCRKVDIIADAAYSIFQKPKSFTGNFVIDENILKEEGIENFDVYAIKPGHPLQPDFFLDEYPEAVSKKVESTGAVPEFKEEKLQLQPKPRSGAVEETFRIVKDSLSDDVVKATQAIYLFELSGEDGGTWFLDLKSKGGNVGYGEPSDQADVVMSMTTDDFVKMFSGKLKPTMAFMSGKLKIKGNMALAIKLEKLMNQMNARL

SEQ ID NO: 11626 - protein, 418 aa, Homo sapiens
MLPNTGRLAGCTVFITGASRGIGKAIALKAAKDGANIVIAAKTAQPHPKLLGTIYTAAEEIEAVGGKALPCIVDVRDEQQISAAVEKAIKKFGGIDILVNNASAISLTNTLDTPTKRLDLMMNVNTRGTYLASKACIPYLKKSKVAHILNISPPLNLNPVWFKQHCAYTIAKYGMSMYVLGMAEEFKGEIAVNALWPKTAIHTAAMDMLGGPGIESQCRKVDIIADAAYSIFQKPKSFTGNFVIDENILKEEGIENFDVYAIKPGHPLQPDFFLDEYPEAVSKKVESTGAVPEFKEEKLQLQPKPRSGAVEETFRIVKDSLSDDVVKATQAIYLFELSGEDGGTWFLDLKSKGGNVGYGEPSDQADVVMSMTTDDFVKMFSGKLKPTMAFMSGKLKIKGNMALAIKLEKLMNQMNARL

SEQ ID NO: 11627 - protein, 470 aa, Homo sapiens
MSVTDQAFVTLATNDIYCQGALVLGQSLRRHRLTRKLVVLITPQVSSLLRVILSKVFDEVIEVNLIDSADYIHLAFLKRPELGLTLTKLHCWTLTHYSKCVFLDADTLVLSNVDELFDRGEFSAAPDPGWPDCFNSGVFVFQPSLHTHKLLLQHAMEHGSFDGADQGLLNSFFRNWSTTDIHKHLPFIYNLSSNTMYTYSPAFKQFGSSAKVVHFLGSMKPWNYKYNPQSGSVLEQGSASSSQHQAAFLHLWWTVYQNNVLPLYKSVQAGEARASPGHTLCHSDVGGPCADSASGVGEPCENSTPSAGVPCANSPLGSNQPAQGLPEPTQIVDETLSLPEGRRSEDMIACPETETPAVITCDPLSQPSPQPADFTETETILQPANKVESVSSEETFEPSQELPAEALRDPSLQDALEVDLAVSVSQISIEEKVKELSPEEERRKWEEGRIDYMGKDAFARIQEKLDRFLQ

SEQ ID NO: 11628 - protein, 1380 aa, Homo sapiens
MGRHVATSCHVAWLLVLISGCWGQVNRLPFFTNHFFDTYLLISEDTPVGSSVTQLLAQDMDNDPLVFGVSGEEASRFFAVEPDTGVVWLRQPLDRETKSEFTVEFSVSDHQGVITRKVNIQVGDVNDNAPTFHNQPYSVRIPENTPVGTPIFIVNATDPDLGAGGSVLYSFQPPSQFFAIDSARGIVTVIRELDYETTQAYQLTVNATDQDKTRPLSTLANLAIIITDVQDMDPIFINLPYSTNIYEHSPPGTTVRIITAIDQDKGRPRGIGYTIVSGNTNSIFALDYISGVLTLNGLLDRENPLYSHGFILTVKGTELNDDRTPSDATVTTTFNILVIDINDNAPEFNSSEYSVAITELAQVGFALPLFIQVVDKDENLGLNSMFEVYLVGNNSHHFIISPTSVQGKADIRIRVAIPLDYETVDRYDFDLFANESVPDHVGYAKVKITLINENDNRPIFSQPLYNISLYENVTVGTSVLTVLATDNDAGTFGEVSYFFSDDPDRFSLDKDTGLIMLIARLDYELIQRFTLTIIARDGGGEETTGRVRINVLDVNDNVPTFQKDAYVGALRENEPSVTQLVRLRATDEDSPPNNQITYSIVSASAFGSYFDISLYEGYGVISVSRPLDYEQISNGLIYLTVMAMDAGNPPLNSTVPVTIEVFDENDNPPTFSKPAYFVSVVENIMAGATVLFLNATDLDRSREYGQESIIYSLEGSTQFRINARSGEITTTSLLDRETKSEYILIVRAVDGGVGHNQKTGIATVNITLLDINDNHPTWKDAPYYINLVEMTPPDSDVTTVVAVDPDLGENGTLVYSIQPPNKFYSLNSTTGKIRTTHAMLDRENPDPHEAELMRKIVVSVTDCGRPPLKATSSATVFVNLLDLNDNDPTFQNLPFVAEVLEGIPAGVSIYQVVAIDLDEGLNGLVSYRMPVGMPRMDFLINSSSGVVVTTTELDRERIAEYQLRVVASDAGTPTKSSTSTLTIHVLDVNDETPTFFPAVYNVSVSEDVPREFRVVWLNCTDNDVGLNAELSYFITGGNVDGKFSVGYRDAVVRTVVGLDRETTAAYMLILEAIDNGPVGKRHTGTATVFVTVLDVNDNRPIFLQSSYEASVPEDIPEGHSILQAATDADEGEFGRVWYRILHGNHGNNFRIHVSNGLLMRGPRPLDRERNSSHVLIVEAYNHDLGPMRSSVRVIVYVEDINDEAPVFTQQQYSRLGLRETAGIGTSVIVVQATDRDSGDGGLVNYRILSGAEGKFEIDESTGLIITVNYLDYETKTSYMMNVSATDQAPPFNQGFCSVYITLLNELDEAVQFSNASYEAAILENLALGTEIVRVQAYSIDNLNQITYRFNAYTSTQAKALFKIDAITVRGWGQGAPFLPI

SEQ ID NO: 11629 - protein, 1093 aa, Homo sapiens
MSQPGIPASGGAPASLQAQNGAALASGSPYTNGPVQNALLSSQESVSQGYNFQLPGSYPHPIPAKTLNPVSGQSNYGGSQGSGQTLNRPPVASNPVTPSLHSGPAPRMPLPASQNPATTPMPSSSFLPEANLPPPLNWQYNYPSTASQTNHCPRASSQPTVSGNTSLTTNHQYVSSGYPSLQNSFIKSGPSVPPLVNPPLPTTFQPGAPHGPPPAGGPPPVRALTPLTSSYRDVPQPLFNSAVNQEGITSNTNNGSMVVHSSYDEIEGGGLLATPQLTNKNPKMSRSVGYSYPSLPPGYQNTTPPGATGVPPSSLNYPSGPQAFTQTPLGANHLTTSMSGLSLQPEGLRVVNLLQERNMLPSTPLKPPVPNLHEDIQKLNCNPELFRCTLTSIPQTQALLNKAKLPLGLLLHPFKDLVQLPVVTSSTIVRCRSCRTYINPFVSFLDQRRWKCNLCYRVNDVPEEFLYNPLTRVYGEPHRRPEVQNATIEFMAPSEYMLRPPQPPVYLFVFDVSHNAVETGYLNSVCQSLLDNLDLLPGNTRTKIGFITFDSTIHFYGLQESLSQPQMLIVSDIEDVFIPMPENLLVNLNESKELVQDLLKTLPQMFTKTLETQSALGPALQAAFKLMSPTGGRMSVFQTQLPTLGVGALKPREEPNHRSSAKDIHMTPSTDFYKKLALDCSGQQVAVDLFLLSGQYSDLASLGCISRYSAGSVYYYPSYHHQHNPVQVQKLQKELQRYLTRKIGFEAVMRIRCTKGLSIHTFHGNFFVRSTDLLSLPNVNPDAGYAVQMSVEESLTDTQLVSFQSALLYTSSKGERRIRVHTLCLPVVSTLNDVFLGADVQAISGLLANMAVDRSMTASLSDARDALVNAVIDSLSAYRSSVLSNQQPGLMVPFSLRLFPLFVLALLKQKSFQTGTNARLDERIFAMCQVKNQPLVYLMLTTHPSLYRVDNLSDEGALNISDRTIPQPPILQLSVEKLSRDGAFLMDAGSVLMLWVGKNCTQNFLSQVLGVQNYASIPQPMTDLPELDTPESARIIAFISWLREQRPFFPILYVIRDESPMKANFLQNMIEDRTESALSYYEFLLHIQQQVNK

SEQ ID NO: 11630 - protein, 541 aa, Homo sapiens
MLSPQRVAAAASRGADDAMESSKPGPVQVVLVQKDQHSFELDEKALASILLQDHIRDLDVVVVSVAGAFRKGKSFILDFMLRYLYSQKESGHSNWLGDPEEPLTGFSWRGGSDPETTGIQIWSEVFTVEKPGGKKVAVVLMDTQGAFDSQSTVKDCATIFALSTMTSSVQIYNLSQNIQEDDLQQLQLFTEYGRLAMDEIFQKPFQTLMFLVRDWSFPYEYSYGLQGGMAFLDKRLQVKEHQHEEIQNVRNHIHSCFSDVTCFLLPHPGLQVATSPDFDGKLKDIAGEFKEQLQALIPYVLNPSKLMEKEINGSKVTCRGLLEYFKAYIKIYQGEDLPHPKSMLQATAEANNLAAAASAKDIYYNNMEEVCGGEKPYLSPDILEEKHCEFKQLALDHFKKTKKMGGKDFSFRYQQELEEEIKELYENFCKHNGSKNVFSTFRTPAVLFTGIVALYIASGLTGFIGLEVVAQLFNCMVGLLLIALLTWGYIRYSGQYRELGGAIDFGAAYVLEQASSHIGNSTQATVRDAVVGRPSMDKKAQ

SEQ ID NO: 11631 - protein, 74 aa, Homo sapiens
MASSTVPVSAAGSANETPEIPDNVGDWLRGVYRFATDRNDFRRNLILNLGLFAAGVWLARNLSDIDLMAPQPGV

SEQ ID NO: 11632 - protein, 1318 aa, Homo sapiens
MSGGASATGPRRGPPGLEDTTSKKKQKDRANQESKDGDPRKETGSRYVAQAGLEPLASGDPSASASHAAGITGSRHRTRLFFPSSSGSASTPQEEQTKEGACEDPHDLLATPTPELLLDWRQSAEEVIVKLRVGVGPLQLEDVDAAFTDTDCVVRFAGGQQWGGVFYAEIKSSCAKVQTRKGSLLHLTLPKKVPMLTWPSLLVEADEQLCIPPLNSQTCLLGSEENLAPLAGEKAVPPGNDPVSPAMVRSRNPGKDDCAKEEMAVAADAATLVDEPESMVNLAFVKNDSYEKGPDSVVVHVYVKEICRDTSRVLFREQDFTLIFQTRDGNFLRLHPGCGPHTTFRWQVKLRNLIEPEQCTFCFTASRIDICLRKRQSQRWGGLEAPAARVGGAKVAVPTGPTPLDSTPPGGAPHPLTGQEEARAVEKDKSKARSEDTGLDSVATRTPMEHVTPKPETHLASPKPTCMVPPMPHSPVSGDSVEEEEEEEKKVCLPGFTGLVNLGNTCFMNSVIQSLSNTRELRDFFHDRSFEAEINYNNPLGTGGRLAIGFAVLLRALWKGTHHAFQPSKLKAIVASKASQFTGYAQHDAQEFMAFLLDGLHEDLNRIQNKPYTETVDSDGRPDEVVAEEAWQRHKMRNDSFIVDLFQGQYKSKLVCPVCAKVSITFDPFLYLPVPLPQKQKVLPVFYFAREPHSKPIKFLVSVSKENSTASEVLDSLSQSVHVKPENLRLAEVIKNRFHRVFLPSHSLDTVSPSDTLLCFELLSSELAKERVVVLEVQQRPQVPSVPISKCAACQRKQQSEDEKLKRCTRCYRVGYCNQLCQKTHWPDHKGLCRPENIGYPFLVSVPASRLTYARLAQLLEGYARYSVSVFQPPFQPGRMALESQSPGCTTLLSTGSLEAGDSERDPIQPPELQLVTPMAEGDTGLPRVWAAPDRGPVPSTSGISSEMLASGPIEVGSLPAGERVSRPEAAVPGYQHPSEAMNAHTPQFFIYKIDSSNREQRLEDKGDTPLELGDDCSLALVWRNNERLQEFVLVASKELECAEDPGSAGEAARAGHFTLDQCLNLFTRPEVLAPEEAWYCPQCKQHREASKQLLLWRLPNVLIVQLKRFSFRSFIWRDKINDLVEFPVRNLDLSKFCIGQKEEQLPSYDLYAVINHYGGMIGGHYTACARLPNDRSSQRSDVGWRLFDDSTVTTVDESQVVTRYAYVLFYRRRNSPVERPPRAGHSEHHPDLGPAAEAAASQASRIWQELEAEEEPVPEGSGPLGPWGPQDWVGPLPRGPTTPDEGCLRYFVLGTVAALVALVLNVFYPLVSQSRWR

SEQ ID NO: 11633 - protein, 865 aa, Homo sapiens
MPAVSLPPKENALFKRILRCYEHKQYRNGLKFCKQILSNPKFAEHGETLAMKGLTLNCLGKKEEAYELVRRGLRNDLKSHVCWHVYGLLQRSDKKYDEAIKCYRNALKWDKDNLQILRDLSLLQIQMRDLEGYRETRYQLLQLRPAQRASWIGYAIAYHLLEDYEMAAKILEEFRKTQQTSPDKVDYEYSELLLYQNQVLREAGLYREALEHLCTYEKQICDKLAVEETKGELLLQLCRLEDAADVYRGLQERNPENWAYYKGLEKALKPANMLERLKIYEEAWTKYPRGLVPRRLPLNFLSGEKFKECLDKFLRMNFSKGCPPVFNTLRSLYKDKEKVAIIEELVVGYETSLKSCRLFNPNDDGKEEPPTTLLWVQYYLAQHYDKIGQPSIALEYINTAIESTPTLIELFLVKAKIYKHAGNIKEAARWMDEAQALDTADRFINSKCAKYMLKANLIKEAEEMCSKFTREGTSAVENLNEMQCMWFQTECAQAYKAMNKFGEALKKCHEIERHFIEITDDQFDFHTYCMRKITLRSYVDLLKLEDVLRQHPFYFKAARIAIEIYLKLHDNPLTDENKEHEADTANMSDKELKKLRNKQRRAQKKAQIEEEKKNAEKEKQQRNQKKKKDDDDEEIGGPKEELIPEKLAKVETPLEEAIKFLTPLKNLVKNKIETHLFAFEIYFRKEKFLLMLQSVKRAFAIDSSHPWLHECMIRLFNTVCESKDLSDTVRTVLKQEMNRLFGATNPKNFNETFLKRNSDSLPHRLSAAKMVYYLDPSSQKRAIELATTLDESLTNRNLQTCMEVLEALYDGSLGDCKEAAEIYRANCHKLFPYALAFMPPGYEEDMKITVNGDSSAEAEELANEI

SEQ ID NO: 11634 - protein, 204 aa, Homo sapiens
MAGNFDSEERSSWYWGRLSRQEAVALLQGQRHGVFLVRDSSTSPGDYVLSVSENSRVSHYIINSSGPRPPVPPSPAQPPPGVSPSRLRIGDQEFDSLPALLEFYKIHYLDTTTLIEPVSRSRQGSGVILRQEEAEYVRALFDFNGNDEEDLPFKKGDILRIRDKPEEQWWNAEDSEGKRGMIPVPYVEKYRPASASVSALIGGR

SEQ ID NO: 11635 - protein, 762 aa, Homo sapiens
MNEAKVKETLRRCGASGDECGRLQYALTCLRKVTGLGGEHKEDSSWSSLDARRESGSGPSTDTLSAASLPWPPGSSQLGRAGNSAQGPRSISVSALPASDSPTPSFSEGLSDTCIPLHASGRLTPRALHSFITPPTTPQLRRHTKLKPPRTPPPPSRKVFQLLPSFPTLTRSKSHESQLGNRIDDVSSMRFDLSHGSPQMVRRDIGLSVTHRFSTKSWLSQVCHVCQKSMIFGVKCKHCRLKCHNKCTKEAPACRISFLPLTRLRRTESVPSDINNPVDRAAEPHFGTLPKALTKKEHPPAMNHLDSSSNPSSTTSSTPSSPAPFPTSSNPSSATTPPNPSPGQRDSRFNFPAAYFIHHRQQFIFPVPSAGHCWKCLLIAESLKENAFNISAFAHAAPLPEAADGTRLDDQPKADVLEAHEAEAEEPEAGKSEAEDDEDEVDDLPSSRRPWRGPISRKASQTSVYLQEWDIPFEQVELGEPIGQGRWGRVHRGRWHGEVAIRLLEMDGHNQDHLKLFKKEVMNYRQTRHENVVLFMGACMNPPHLAIITSFCKGRTLHSFVRDPKTSLDINKTRQIAQEIIKGMGYLHAKGIVHKDLKSKNVFYDNGKVVITDFGLFGISGVVREGRRENQLKLSHDWLCYLAPEIVREMTPGKDEDQLPFSKAADVYAFGTVWYELQARDWPLKNQAAEASIWQIGSGEGMKRVLTSVSLGKEVSEILSACWAFDLQERPSFSLLMDMLEKLPKLNRRLSHPGHFWKSAEL

SEQ ID NO: 11636 - protein, 249 aa, Homo sapiens
MGTALDIKIKRANKVYHAGPIQIINSTIEMVKPGKFPSGKTEIPFEFPLHLKGNKVLYETYHGVFVNIQYTLRCDMKRSLLAKDLTKTCEFIVHSAPQKGKFTPSPVDFTITPETLQNVKERALLPKFLLRGHLNSTNCVITQPLTGELVVESSEAAIRSVELQLVRVETCGCAEGYARDATEIQNIQIADGDVCRGLSVPIYMVFPRLFTCPTLETTNFKVEFEVNIVVLLHPDHLITENFPLKLCRI

SEQ ID NO: 11637 - protein, 384 aa, Homo sapiens
MVVGESGLGKSTLINSLFLTDLYSPEYPGPSHRIKKTVQVEQSKVLIKEGGVQLLLTIVDTPGFGDAVDNSNCWQPVIDYIDSKFEDYLNAESRVNRRQMPDNRVQCCLYFIAPSGHGLKPLDIEFMKRLHEKVNIIPLIAKADTLTPEECQQFKKQIMKEIQEHKIKIYEFPETDDEEENKLVKKIKDRLPLAVVGSNTIIEVNGKRVRGRQYPWGVAEVENGEHCDFTILRNMLIRTHMQDLKDVTNNVHYENYRSRKLAAVTYNGVDNNKNKGQLTKSPLAQMEEERREHVAKMKKMEMEMEQVFEMKVKEKVQKLKDSEAELQRRHEQMKKNLEAQHKELEEKRRQFEDEKANWEAQQRILEQQNSSRTLEKNKKKGKIF

SEQ ID NO: 11638 - protein, 417 aa, Homo sapiens
MKQQKNLEGYVGFANLPNQVYRKSVKRGFEFTLMVVGESGLGKSTLINSLFLTDLYSPEYPGPSHRIKKTVQVEQSKVLIKEGGVQLLLTIVDTPGFGDAVDNSNCWQPVIDYIDSKFEDYLNAESRVNRRQMPDNRVQCCLYFIAPSGHGLKPLDIEFMKRLHEKVNIIPLIAKADTLTPEECQQFKKQIMKEIQEHKIKIYEFPETDDEEENKLVKKIKDRLPLAVVGSNTIIEVNGKRVRGRQYPWGVAEVENGEHCDFTILRNMLIRTHMQDLKDVTNNVHYENYRSRKLAAVTYNGVDNNKNKGQLTKSPLAQMEEERREHVAKMKKMEMEMEQVFEMKVKEKVQKLKDSEAELQRRHEQMKKNLEAQHKELEEKRRQFEDEKANWEAQQRILEQQNSSRTLEKNKKKGKIF

SEQ ID NO: 11639 - protein, 334 aa, Homo sapiens
MATRQRESSITSCCSTSSCDADDEGVRGTCEDASLCKRFAVSIGYWHDPYIQHFVRLSKERKAPEINRGYFARVHGVSQLIKAFLRKTECHCQIVNLGAGMDTTFWRLKDEDLLPSKYFEVDFPMIVTRKLHSIKCKPPLSSPILELHSEDTLQMDGHILDSKRYAVIGADLRDLSELEEKLKKCNMNTQLPTLLIAECVLVYMTPEQSANLLKWAANSFERAMFINYEQVNMGDRFGQIMIENLRRRQCDLAGVETCKSLESQKERLLSNGWETASAVDMMELYNRLPRAEVSRIESLEFLDEMELLEQLMRHYCLCWATKGGNELGLKEITY

SEQ ID NO: 11640 - protein, 224 aa, Homo sapiens
MSWKKALRIPGDLRVATVTLMLAMLSSLLAEGRDSPEDFVFQFKGMCYFTNGTERVRLVTRYIYNREEYARFDSDVGVYRAVTPQGRPDAEYWNSQKEVLEGTRAELDTVCRHNYEVAFRGILQRRVEPTVTISPSRTEALNHHNLLVCSVTDFYPGQIKVRWFRNDQEETAGVVSTPLIRNGDWTFQILVMLEMTPQRGDVYTCHVEHPSLQSPITVEWRLLH

SEQ ID NO: 11641 - protein, 134 aa, Homo sapiens
MSWKKALRIPGDLRVATVTLMLAMLSSLLAEGRDSPVEPTVTISPSRTEALNHHNLLVCSVTDFYPGQIKVRWFRNDQEETAGVVSTPLIRNGDWTFQILVMLEMTPQRGDVYTCHVEHPSLQSPITVEWRLLH

SEQ ID NO: 11642 - protein, 261 aa, Homo sapiens
MSWKKALRIPGDLRVATVTLMLAMLSSLLAEGRDSPEDFVFQFKGMCYFTNGTERVRLVTRYIYNREEYARFDSDVGVYRAVTPQGRPDAEYWNSQKEVLEGTRAELDTVCRHNYEVAFRGILQRRVEPTVTISPSRTEALNHHNLLVCSVTDFYPGQIKVRWFRNDQEETAGVVSTPLIRNGDWTFQILVMLEMTPQRGDVYTCHVEHPSLQSPITVEWRAQSESAQSKMLSGVGGFVLGLIFLGLGLIIRQRSQKGLLH

SEQ ID NO: 11643 - protein, 108 aa, Homo sapiens
MVLYLVWAFIPESWLNSLGLTYWPQKYWAVALPVYLLIAIVIGYVLLFGINMMSTSPLDSIHTITDNYAKNQQQKKYQEEAIPALRDISISEVNQMFFLAAKELYTKN

SEQ ID NO: 11644 - protein, 1233 aa, Homo sapiens
MSAPAGSSHPAASARIPPKFGGAAVSGAAAPAGPGAGPAPHQQNGPAQNQMQVPSGYGLHHQNYIAPSGHYSQGPGKMTSLPLDTQCGDYYSALYTVPTQNVTPNTVNQQPGAQQLYSRGPPAPHIVGSTLGSFQGAASSASHLHTSASQPYSSFVNHYNSPAMYSASSSVASQGFPSTCGHYAMSTVSNAAYPSVSYPSLPAGDTYGQMFTSQNAPTVRPVKDNSFSGQNTAISHPSPLPPLPSQQHHQQQSLSGYSTLTWSSPGLPSTQDNLIRNHTGSLAVANNNPTITVADSLSCPVMQNVQPPKSSPVVSTVLSGSSGSSSTRTPPTANHPVEPVTSVTQPSELLQQKGVDSSSTTSSASPMPNSYDALEGGSYPDMLSSSASSPAPDPAPEPDPASAPAPASAPAPVVPQPSKMAKPFGYGYPTLQPGYQNATAPLISGVQPSNPVYSGFQQYPQQYPGVNQLSSSIGGLSLQSSPQPESLRPVNLTQERNILPMTPVWAPVPNLNADLKKLNCSPDSFRCTLTNIPQTQALLNKAKLPLGLLLHPFRDLTQLPVITSNTIVRCRSCRTYINPFVSFIDQRRWKCNLCYRVNDVPEEFMYNPLTRSYGEPHKRPEVQNSTVEFIASSDYMLRPPQPAVYLFVLDVSHNAVEAGYLTILCQSLLENLDKLPGDSRTRIGFMTFDSTIHFYNLQEGLSQPQMLIVSDIDDVFLPTPDSLLVNLYESKELIKDLLNALPNMFTNTRETHSALGPALQAAFKLMSPTGGRVSVFQTQLPSLGAGLLQSREDPNQRSSTKVVQHLGPATDFYKKLALDCSGQQTAVDLFLLSSQYSDLASLACMSKYSAGCIYYYPSFHYTHNPSQAEKLQKDLKRYLTRKIGFEAVMRIRCTKGLSMHTFHGNFFVRSTDLLSLANINPDAGFAVQLSIEESLTDTSLVCFQTALLYTSSKGERRIRVHTLCLPVVSSLADVYAGVDVQAAICLLANMAVDRSVSSSLSDARDALVNAVVDSLSAYGSTVSNLQHSALMAPSSLKLFPLYVLALLKQKAFRTGTSTRLDDRVYAMCQIKSQPLVHLMKMIHPNLYRIDRLTDEGAVHVNDRIVPQPPLQKLSAEKLTREGAFLMDCGSVFYIWVGKGCDNNFIEDVLGYTNFASIPQKMTHLPELDTLSSERARSFITWLRDSRPLSPILHIVKDESPAKAEFFQHLIEDRTEAAFSYYEFLLHVQQQICK

SEQ ID NO: 11645 - protein, 394 aa, Homo sapiens
MAAASGYTDLREKLKSMTSRDNYKAGSREAAAAAAAAVAAAAAAAAAAEPYPVSGAKRKYQEDSDPERSDYEEQQLQKEEEARKVKSGIRQMRLFSQDECAKIEARIDEVVSRAEKGLYNEHTVDRAPLRNKYFFGEGYTYGAQLQKRGPGQERLYPPGDVDEIPEWVHQLVIQKLVEHRVIPEGFVNSAVINDYQPGGCIVSHVDPIHIFERPIVSVSFFSDSALCFGCKFQFKPIRVSEPVLSLPVRRGSVTVLSGYAADEITHCIRPQDIKERRAVIILRKTRLDAPRLETKSLSSSVLPPSYASDRLSGNNRDPALKPKRSHRKADPDAAHRPRILEMDKEENRRSVLLPTHRRRGSFSSENYWRKSYESSEDCSEAAGSPARKVKMRRH

SEQ ID NO: 11646 - protein, 100 aa, Homo sapiens
MGTSSIFLCVLFLCGALGLTMSPARGRLRCYICGFTKPCHPVPTECRDDEACGISIGTSGRTLVQWPFSRRLPTSIHPAFPVAPASACLFHPTDQSEITE

SEQ ID NO: 11647 - protein, 340 aa, Homo sapiens
MGLGRVLLFLAVAFPFAPPAAAAEPHSLRYNLMVLSQDGSVQSGFLAEGHLDGQPFLRYDRQKRRAKPQGQWAENVLGAKTWDTETEDLTENGQDLRRTLTHIKDQKGVPQSSRAQTLAMNVTNFWKEDAMKTKTHYRAMQADCLQKLQRYLKSGVAIRRTVPPMVNVTCSEVSEGNITVTCRASSFYPRNITLTWRQDGVSLSHNTQQWGDVLPDGNGTYQTWVATRIRQGEEQRFTCYMEHSGNHGTHPVPSGKALVLQSQRTDFPYVSAAMPCFVIIIILCVPCCKKKTSAAEGPELVSLQVLDQHPVGTGDHRDAAQLGFQPLMSATGSTGSTEGT

SEQ ID NO: 11648 - protein, 2298 aa, Homo sapiens
MDPEEQELLNDYRYRSYSSVIEKALRNFESSSEWADLISSLGKLNKALQSNLRYSLLPRRLLISKRLAQCLHPALPSGVHLKALETYEIIFKIVGTKWLAKDLFLYSCGLFPLLAHAAVSVRPVLLTLYEKYFLPLQKLLLPSLQAFIVGLLPGLEEGSEISDRTDALLLRLSLVVGKEVFYTALWGSVLASPSIRLPASVFVVGHINRDAPGREQKYMLGTNHQLTVKSLRASLLDSNVLVQRNNLEIVLFFFPFYTCLDSNERAIPLLRSDIVRILSAATQTLLRRDMSLNRRLYAWLLGSDIKGNTVVPESEISNSYEDQSSYFFEKYSKDLLVEGLAEILHQKFIDADVEERHHAYLKPFRVLISLLDKPEIGPQVVGNLFLEVIRAFYSYCRDALGSDLKLSYTQSGNSLISAIKENRNASEIVKTVNLLITSLSTDFLWDYMTRCFEECFRPVKQRYSVRNSVSPPPTVSELCALLVFLLDVIPLELYSEVQTQYLPQVLGCLVQPLAEDMEALSLPELTHALKTCFKVLSKVQMPPSYLDTESTSGTSSPVKGENGKIILETKAVIPGDEDASFPPLKSEDSGIGLSASSPELSEHLRVPRVSLERDDVWKKGGSMQRTFLCIQELIANFASKNIFGVQLTASGEESKSEEPAGKRDRDGTQSLAANDSSRKNSWEPKPITVPQFKQMLSDLFTARGSPFKTKSSESPSSSPSSPARKNGGEWDVEKVVIDLGGSREERREAFAAACHLLLDCATFPVYLSEEETEQLCATLFQLPGAGDSSFPSWLKSLMTICCCVTDCYLQNVAISTLLEVINHSQSLALVIEDKMKRYKSSGHNPFFGKLQMVTVPPIAPGILKVIAEKTDFYQRVARVLWNQLNKETREHHVTCVELFYRLHCLAPTANICEDIICHALLDPDKGTRLEALFRFSVIWHLTREIQGSRVTSHNRSFDRSLFVVLDSLACTDGAIGAAAQGWLVRALSLGDVARILEPVLLLLLQPKTQRTSIHCLKQENSADDLHRWFNRKKTSFREACAVPEPQESGSEEHLPLSQFTTVDREAIWAEVEKEPEKYPLRGELSEEELPYYVELPDRTAHGAPDSSEHTESADTSSCHTDSENTSSFSSPSHDLQELSNEENCCAPIPMGGRAYPKRSALLAAFQSESFKAGAKLSLVRVDSDKTQASESFSSDEEADLELQALTTSRLLKQQRERQEAVEALFKHILLYLQPYDSRRVLYAFSVLEAVLKTNPKEFIEAVSRTSMDTSSTAHLNLISNLLARHQEALIGQSFYGKLQTQVPNVCPHSLLLELLTYLCLSFLRSYYPCYLKVSHRDILGNRDVQVKSVEVLIRIMMQLVSVAKSSEGKNVEFIHSLLQRCKVQEFVLLSLSASMYTSQKRYGLATAHHGRALPEDSLFEESLINLGQDQIWSEHPLQIELLKLLQVLIVLEHHLGRAHEEAENQPDLSREWQRALNFQQAISALQYVQPHPLTSQGLLVSAVVRGLQPAYGYGMHPAWVSLVTHSLPYFGKSLGWTVTPFVVQICKNLDDLVKQYESESVKLSVSTTSKRENISPDYPLTLLEGLTTISHFCLLEQANQNKKTMAAGDPANLRNARNAILEELPRTVNTMALLWNVLRKEETQKRPVDLLGATKGSSSVYFKTTKTIRQKILDFLNPLTAHLGVQLTAAVAAVWSRKKAQRHSKMKIIPTASASQLTLVDLVCALSTLQTDTLLHLVKEVVKRPPQVKGGDEKSPLVDIPVLQFCYAFLQRLPVPALQENFSSLLGVLKESVQLNLAPPGYFLLLSMLNDFVTRTPNLENKKDQKDLQEITQKILEAVGNIAGSSLEQTSWLSRNLEVKAQPQASLEESDAEEDLYDAAAASAMVSSSAPSVYSVQALSLLAEVLASLLDMVYRSDEKEKAVPLISRLLYYVFPYLRNHSAYNAPSFRAGAQLLSSLSGYAYTKRAWRKEVLELFLDPAFFQMDTSCVHWKSIIDHLLTHEKTMFKDLMNMQSSSLKLFSSFEQKAMLLKRQAFAVFSGELDQYHLYLPLIQERLTDNLRVGQTSIVAAQMFLFFRVLLLRISPQHLTSLWPIMVSELIQTFTQLEEDLKDEDESLRSTNKVNRTKVSVPDANGPSVGEIPQSELILYLSACKFLDTALSFPPDKMPLFQIYRWAFIPEVDTEGPAFLSDVEENHQECKPHTVRILELLKLKFGEISSSDEITMKSEFPLLRQHSVSSIRQLMPFFMTLNGAFKTQRQLPADSPGTPFLDFPVTDSPRILKQLEECIEYDFLEHPEC

SEQ ID NO: 11649 - protein, 1855 aa, Homo sapiens
MAASELYTKFARVWIPDPEEVWKSAELLKDYKPGDKVLLLHLEEGKDLEYHLDPKTKELPHLRNPDILVGENDLTALSYLHEPAVLHNLRVRFIDSKLIYTYCGIVLVAINPYEQLPIYGEDIINAYSGQNMGDMDPHIFAVAEEAYKQMARDERNQSIIVSGESGAGKTVSAKYAMRYFATVSGSASEANVEEKVLASNPIMESIGNAKTTRNDNSSRFGKYIEIGFDKRYRIIGANMRTYLLEKSRVVFQAEEERNYHIFYQLCASAKLPEFKMLRLGNADNFNYTKQGGSPVIEGVDDAKEMAHTRQACTLLGISESHQMGIFRILAGILHLGNVGFTSRDADSCTIPPKHEPLCIFCELMGVDYEEMCHWLCHRKLATATETYIKPISKLQATNARDALAKHIYAKLFNWIVDNVNQALHSAVKQHSFIGVLDIYGFETFEINSFEQFCINYANEKLQQQFNMHVFKLEQEEYMKEQIPWTLIDFYDNQPCINLIESKLGILDLLDEECKMPKGTDDTWAQKLYNTHLNKCALFEKPRLSNKAFIIQHFADKVEYQCEGFLEKNKDTVFEEQIKVLKSSKFKMLPELFQDDEKAISPTSATSSGRTPLTRTPAKPTKGRPGQMAKEHKKTVGHQFRNSLHLLMETLNATTPHYVRCIKPNDFKFPFTFDEKRAVQQLRACGVLETIRISAAGFPSRWTYQEFFSRYRVLMKQKDVLSDRKQTCKNVLEKLILDKDKYQFGKTKIFFRAGQVAYLEKLRADKLRAACIRIQKTIRGWLLRKKYLRMRKAAITMQRYVRGYQARCYAKFLRRTKAATIIQKYWRMYVVRRRYKIRRAATIVLQSYLRGFLARNRYRKILREHKAVIIQKRVRGWLARTHYKRSMHAIIYLQCCFRRMMAKRELKKLKIEARSVERYKKLHIGMENKIMQLQRKVDEQNKDYKCLVEKLTNLEGIYNSETEKLRSDLERLQLSEEEAKVATGRVLSLQEEIAKLRKDLEQTRSEKKCIEEHADRYKQETEQLVSNLKEENTLLKQEKEALNHRIVQQAKEMTETMEKKLVEETKQLELDLNDERLRYQNLLNEFSRLEERYDDLKEEMTLMVHVPKPGHKRTDSTHSSNESEYIFSSEIAEMEDIPSRTEEPSEKKVPLDMSLFLKLQKRVTELEQEKQVMQDELDRKEEQVLRSKAKEEERPQIRGAELEYESLKRQELESENKKLKNELNELRKALSEKSAPEVTAPGAPAYRVLMEQLTSVSEELDVRKEEVLILRSQLVSQKEAIQPKDDKNTMTDSTILLEDVQKMKDKGEIAQAYIGLKETNRSSALDYHELNEDGELWLVYEGLKQANRLLESQLQSQKRSHENEAEALRGEIQSLKEENNRQQQLLAQNLQLPPEARIEASLQHEITRLTNENLDLMEQLEKQDKTVRKLKKQLKVFAKKIGELEVGQMENISPGQIIDEPIRPVNIPRKEKDFQGMLEYKKEDEQKLVKNLILELKPRGVAVNLIPGLPAYILFMCVRHADYLNDDQKVRSLLTSTINSIKKVLKKRGDDFETVSFWLSNTCRFLHCLKQYSGEEGFMKHNTSRQNEHCLTNFDLAEYRQVLSDLAIQIYQQLVRVLENILQPMIVSGMLEHETIQGVSGVKPTGLRKRTSSIADEGTYTLDSILRQLNSFHSVMCQHGMDPELIKQVVKQMFYIIGAITLNNLLLRKDMCSWSKGMQIRYNVSQLEEWLRDKNLMNSGAKETLEPLIQAAQLLQVKKKTDDDAEAICSMCNALTTAQIVKVLNLYTPVNEFEERVSVSFIRTIQMRLRDRKDSPQLLMDAKHIFPVTFPFNPSSLALETIQIPASLGLGFISRV

SEQ ID NO: 11650 - protein, 389 aa, Homo sapiens
MRIPVDASTSRRFTPPSTALSPGKMSEALPLGAPDAGAALAGKLRSGDRSMVEVLADHPGELVRTDSPNFLCSVLPTHWRCNKTLPIAFKVVALGDVPDGTLVTVMAGNDENYSAELRNATAAMKNQVARFNDLRFVGRSGRGKSFTLTITVFTNPPQVATYHRAIKITVDGPREPRNTRQIQPSPPWSYDQSYQYLGSIASPSVHPATPISPGRASGMTTLSAELSSRLSTAPDLTAFSDPRQFPALPSISDPRMHYPGAFTYSPTPVTSGIGIGMSAMGSATRYHTYLPPPYPGSSQAQGGPFQASSPSYHLYYGASAGSYQFSMVGGERSPPRILPPCTNASTGSALLNPSLPNQSDVVEAEGSHSNSPTNMAPSARLEEAVWRPY

SEQ ID NO: 11651 - protein, 828 aa, Homo sapiens
MDPPRPALLALLALPALLLLLLAGARAEEEMLENVSLVCPKDATRFKHLRKYTYNYEAESSSGVPGTADSRSATRINCKVELEVPQLCSFILKTSQCTLKEVYGFNPEGKALLKKTKNSEEFAAAMSRYELKLAIPEGKQVFLYPEKDEPTYILNIKRGIISALLVPPETEEAKQVLFLDTVYGNCSTHFTVKTRKGNVATEISTERDLGQCDRFKPIRTGISPLALIKGMTRPLSTLISSSQSCQYTLDAKRKHVAEAICKEQHLFLPFSYKNKYGMVAQVTQTLKLEDTPKINSRFFGEGTKKMGLAFESTKSTSPPKQAEAVLKTLQELKKLTISEQNIQRANLFNKLVTELRGLSDEAVTSLLPQLIEVSSPITLQALVQCGQPQCSTHILQWLKRVHANPLLIDVVTYLVALIPEPSAQQLREIFNMARDQRSRATLYALSHAVNNYHKTNPTGTQELLDIANYLMEQIQDDCTGDEDYTYLILRVIGNMGQTMEQLTPELKSSILKCVQSTKPSLMIQKAAIQALRKMEPKDKDQEVLLQTFLDDASPGDKRLAAYLMLMRSPSQADINKIVQILPWEQNEQVKNFVASHIANILNSEELDIQDLKKLVKEALKESQLPTVMDFRKFSRNYQLYKSVSLPSLDPASAKIEGNLIFDPNNYLPKESMLKTTLTAFGFASADLIEIGLEGKGFEPTLEALFGKQGFFPDSVNKALYWVNGQVPDGVSKVLVDHFGYTKDDKHEQDMVNGIMLSVEKLIKDLKSKEVPEARAYLRILGEELGFASLHDLQLLGKLLLMDRPDSLTIPAAQARKDACTFFRDGGLP

SEQ ID NO: 11652 - protein, 2540 aa, Homo sapiens
MAVETRAELVGKRFLCVAVGDEARSERWESGRGWRSWRAGVIRAVSHRDSRNPDLAVYVEFDDLEWDKREWVKVYEDFSTFLVEYHLIWAKRNDPSQTQGSKSKQIQWPALTFKPLVERNIPSSVTAVEFLVDKQLDFLTEDSAFQPYQDDIDSLNPVLRDNPQLHEEVKVWVKEQKVQEIFMQGPYSLNGYRVRVYRQDSATQWFTGIITHHDLFTRTMIVMNDQVLEPQNVDPSMVQMTFLDDVVHSLLKGENIGITSRRRSRANQNVNAVHSHYTRAQANSPRPAMNSQAAVPKQNTHQQQQQRSIRPNKRKGSDSSIPDEEKMKEEKYDYISRGENPKGKNKHLMNKRRKPEEDEKKLNMKRLRTDNVSDFSESSDSENSNKRIIDNSSEQKPENELKNKNTSKINGEEGKPHNNEKAGEETLKNSQPPWDQIQEDKKHEEAEKRKSVDTQLQEDMIIHSSEQSTVSDHNSNDLLPQECNMDKTHTMELLPKEKFVSRPPTPKCVIDITNDTNLEKVAQENSSTFGLQTLQKMDPNVSDSKHSIANAKFLETAKKDSDQSWVSDVVKVDLTQSSVTNASSGNDHLNMEKEKYVSYISPLSAVSVMEDKLHKRSPPPETIKSKLNTSVDTHKIKSSPSPEVVKPKITHSPDSVKSKATYVNSQATGERRLANKIEHELSRCSFHPIPTRSSTLETTKSPLIIDKNEHFTVYRDPALIGSETGANHISPFLSQHPFPLHSSSHRTCLNPGTHHPALTPAPHLLAGSSSQTPLPTINTHPLTSGPHHAVHHPHLLPTVLPGVPTASLLGGHPRLESAHASSLSHLALAHQQQQQLLQHQSPHLLGQAHPSASYNQLGLYPIIWQYPNGTHAYSGLGLPSSKWVHPENAVNAEASLRRNSPSPWLHQPTPVTSADGIGLLSHIPVRPSSAEPHRPLKITAHSSPPLTKTLVDHHKEELERKAFMEPLRSVASTSAKNDLDLNRSQTGKDCHLHRHFVDPVLNQLQRPPQETGERLNKYKEEHRRILQESIDVAPFTTKIKGLEGERENYSRVASSSSSPKSHIIKQDMDVERSVSDLYKMKHSVPQSLPQSNYFTTLSNSVVNEPPRSYPSKEVSNIYGDKQSNALAAAAANPQTLTSFITSLSKPPPLIKHQPESEGLVGKIPEHLPHQIASHSVTTFRNDCRSPTHLTVSSTNTLRSMPALHRAPVFHPPIHHSLERKEGSYSSLSPPTLTPVMPVNAGGKVQESQKPPTLIPEPKDSQANFKSSSEQSLTEMWRPNNNLSKEKTEWHVEKSSGKLQAAMASVIVRPSSSTKTDSMPAMQLASKDRVSERSSAGAHKTDCLKLAEAGETGRIILPNVNSDSVHTKSEKNFQAVSQGSVPSSVMSAVNTMCNTKTDVITSAADTTSVSSWGGSEVISSLSNTILASTSSECVSSKSVSQPVAQKQECKVSTTAPVTLASSKTGSVVQPSSGFSGTTDFIHLKKHKAALAAAQYKSSNASETEPNAIKNQTLSASLPLDSTVICSTINKANSVGNGQASQTSQPNYHTKLKKAWLTRHSEEDKNTNKMENSGNSVSEIIKPCSVNLIASTSSDIQNSVDSKIIVDKYVKDDKVNRRKAKRTYESGSESGDSDESESKSEQRTKRQPKPTYKKKQNDLQKRKGEIEEDLKPNGVLSRSAKERSKLKLQSNSNTGIPRSVLKDWRKVKKLKQTGESFLQDDSCCEIGPNLQKCRECRLIRSKKGEEPAHSPVFCRFYYFRRLSFSKNGVVRIDGFSSPDQYDDEAMSLWTHENFEDDELDIETSKYILDIIGDKFCQLVTSEKTALSWVKKDAKIAWKRAVRGVREMCDACEATLFNIHWVCQKCGFVVCLDCYKAKERKSSRDKELYAWMKCVKGQPHDHKHLMPTQIIPGSVLTDLLDAMHTLREKYGIKSHCHCTNKQNLQVGNFPTMNGVSQVLQNVLNHSNKISLCMPESQQQNTPPKSEKNGGSSPESDVGTDNKLTPPESQSPLHWLADLAEQKAREEKKENKELTLENQIKEEREQDNSESPNGRTSPLVSQNNEQGSTLRDLLTTTAGKLRVGSTDAGIAFAPVYSMGAPSSKSGRTMPNILDDIIASVVENKIPPSKTSKINVKPELKEEPEESIISAVDENNKLYSDIPHSWICEKHILWLKDYKNSSNWKLFKECWKQGQPAVVSGVHKKMNISLWKAESISLDFGDHQADLLNCKDSIISNANVKEFWDGFEEVSKRQKNKSGETVVLKLKDWPSGEDFKTMMPARYEDLLKSLPLPEYCNPEGKFNLASHLPGFFVRPDLGPRLCSAYGVVAAKDHDIGTTNLHIEVSDVVNILVYVGIAKGNGILSKAGILKKFEEEDLDDILRKRLKDSSEIPGALWHIYAGKDVDKIREFLQKISKEQGLEVLPEHDPIRDQSWYVNKKLRQRLLEEYGVRTCTLIQFLGDAIVLPAGALHQVQNFHSCIQVTEDFVSPEHLVESFHLTQELRLLKEEINYDDKLQVKNILYHAVKEMVRALKIHEDEVEDMEEN

SEQ ID NO: 11653 - protein, 58 aa, Homo sapiens
MNWKVLEHVPLLLYILAAKTLILCLTFAGVKMYQRKRLEAKQQKLEAERKKQSEKKDN

SEQ ID NO: 11654 - protein, 1001 aa, Homo sapiens
MAVVIRLLGLPFIAGPVDIRHFFTGLTIPDGGVHIIGGEIGEAFIIFATDEDARRAISRSGGFIKDSSVELFLSSKAEMQKTIEMKRTDRVGRGRPGSGTSGVDSLSNFIESVKEEASNSGYGSSINQDAGFHTNGTGHGNLRPRKTRPLKAENPYLFLRGLPYLVNEDDVRVFFSGLCVDGVIFLKHHDGRNNGDAIVKFASCVDASGGLKCHRSFMGSRFIEVMQGSEQQWIEFGGNAVKEGDVLRRSEEHSPPRGINDRHFRKRSHSKSPRRTRSRSPLGFYVHLKNLSLSIDERDLRNFFRGTDLTDEQIRFLYKDENRTRYAFVMFKTLKDYNTALSLHKTVLQYRPVHIDPISRKQMLKFIARYEKKRSGSLERDRPGHVSQKYSQEGNSGQKLCIYIRNFPFDVTKVEVQKFFADFLLAEDDIYLLYDDKGVGLGEALVKFKSEEQAMKAERLNRRRFLGTEVLLRLISEAQIQEFGVNFSVMSSEKMQARSQSRERGDHSHLFDSKDPPIYSVGAFENFRHQLEDLRQLDNFKHPQRDFRQPDRHPPEDFRHSSEDFRFPPEDFRHSPEDFRRPREEDFRRPSEEDFRRPWEEDFRRPPEDDFRHPREEDWRRPLEEDWRRPLEEDFRRSPTEDFRQLPEEDFRQPPEEDLRWLPEEDFRRPPEEDWRRPPEEDFRRPLQGEWRRPPEDDFRRPPEEDFRHSPEEDFRQSPQEHFRRPPQEHFRRPPPEHFRRPPPEHFRRPPPEHFRRPPPEHFRRPPPEHFRRPPPEHFRRPPQEHFRRPPQEHFRRSREEDFRHPPDEDFRGPPDEDFRHPPDEDFRSPQEEDFRCPSDEDFRQLPEEDLREAPEEDPRLPDNFRPPGEDFRSPPDDFRSHRPFVNFGRPEGGKFDFGKHNMGSFPEGRFMPDPKINCGSGRVTPIKIMNLPFKANVNEILDFFHGYRIIPDSVSIQYNEQGLPTGEAIVAMINYNEAMAAIKDLNDRPVGPRKVKLTLL

SEQ ID NO: 11655 - protein, 1735 aa, Homo sapiens
MNFLSTAESRTAQAAASGTTLLPQFRAPSWQTGMHSSAATELFATGPLPSTGTLPPSLSAYQHPTTFSNRNFATTSPLVLQDSTFNTTSNGILSHHDPLLQIKTSQGTVPTALAFERLGSSVLSNSIPPQSSTYRSAQESAPHLLQPQFSLLPSALGGSQQTPQAYSSTLFTSSTASIERALLRECSVIKHHQRPSGTQSIQAQLTGSQHSLHSYLSNSSVVNFQETTRQSSLSCSPIGDSTQVSNGGLQQKTSQVSVELAQSYSSAIPSSGYPPSTTKIKSCSTEQPLTSTKTPKPQSIIPPVQTLSYSKPLHNQSSVISGQAQIYSTAQLPSLLSVSQSQNYGLVQPHNVPSIVHSQVYRSSKVEKLPPLYKTLTFSGSSQTVTPENQTLNYSSNQQEVLSSVTNENYPAQTRDLSSVSQSQSYSSGHSQGLSPVSQTQVSYSSQSQVLSVVSLSESYASGESLTLTAPSLSYSSASRAQNLPDSSPTQNYISMHSSQNVQTQESSSPQSQKFLPAVQSSSFASSTHCQTLQNNITSPDPKSYAERKLDSDVYPSSKQEDGFPMQELQVLQPQASLESSTQRLSDGEINAQESTYKVSKADDRYSQSVIRSNSRLEDQVIGVALQASKKEESVVGSVTQLNQQIGQVNNAATLDLKNSTNLIQTPQIRLNTKDLKQQHPLILKVHESKVQEQHDQIINASSQIQIPNHALGHGHQASLPNTQVLLDSACDLQILQQSILQAGLGQVKASLQAQRVQSPQQIVHPFLQMEGHVIQSNGDHSQQQLHPQNSEVMKMDLSESSKPLQQHLTTKGHFSETNQHDSKNQFVSLGSMCFPEAVLLSDERNILSNVDDILAATAAACGVTPTDFSKSTSNETMQAVEDGDSKSHFQQSLDVRHVTSDFNSMTATVGKPQNINDTSLNGNQVTVNLSPVPALQSKMTLDQQHIETPGQNIPTKVTSAVVGPSHEVQEQSSGPFKKQSATNLESEEDSEAPVDSTLNNNRNQEFVSSSRSISGENATSESEFTLGGDDSGVSMNPARSALALLAMAQSGDAVSVKIEEENQDLMHFNLQKKRAKGKGQVKEEDNSNQKQLKRPAQGKRQNPRGTDIYLPYTPPSSESCHDGYQHQEKMRQKIKEVEEKQPEVKTGFIASFLDFLKSGPKQQFSTLAVRMPNRTRRPGTQMVRTFCPPPLPKPSSTTPTPLVSETGGNSPSDKVDNELKNLEHLSSFSSDEDDPGYSQDAYKSVSTPLTTLDATSDKKKKTEALQVATTSPTANTTGTATTSSTTVGAVKQEPLHSTSYAVNILENISSSESSKPIELDGLPSDQFAKGQDTVAIEGFTDEEDTESGGEGQYRERDEFVVKIEDIETFKEALKTGKEPPAIWKVQKALLQKFVPEIRDGQREFAATNSYLGYFGDAKSKYKRIYVKFIENANKKEYVRVCSKKPRNKPSQTIRTVQAKPSSSSKTSDPLASKTTTTKAPSVKPKVKQPKVKAEPPPKKRKKWKEEFSSSQSDSSPEIHTSSSDDEEFEPPAPFVTRFLNTRAMKETFKSYMELLVSIALDPDTMQALEKSNDELLLPHMKKIDGMLNDNRKRLLLNLHLDQSFKNALESFPELTIITRDSKAKSGGTAISKIKMNGKAYNKKTLRTSKTTTKSAQEFAVDPEKIQLYSLYHSLHHYKYHVYLICKDEISSVQKKNEDLGQEEIVQLCMKNVKWVEDLFEKFGELLNHVQQKCS

SEQ ID NO: 11656 - protein, 122 aa, Homo sapiens
MIRNWLTIFILFPLKLVEKCESSVSLTVPPVVKLENGSSTNVSLTLRPPLNATLVITFEITFRSKNITILELPDELVEAGGEECRDEISSHEAHQDGLQISSEPPRKQTGVKHDQSPACGNL

SEQ ID NO: 11657 - protein, 125 aa, Homo sapiens
MPRYELALILKAMQRPETAATLKRTIEALMDRGAIVRDLENLGERALPYRISAHSQQHNRGGYFLVDFYAPTAAVESMVEHLSRDIDVIRGNIVKHPLTQELKECEGIVPVPLAEKLYSTKKRKK

SEQ ID NO: 11658 - protein, 2610 aa, Homo sapiens
MADVDPDTLLEWLQMGQGDERDMQLIALEQLCMLLLMSDNVDRCFETCPPRTFLPALCKIFLDESAPDNVLEVTARAITYYLDVSAECTRRIVGVDGAIKALCNRLVVVELNNRTSRDLAEQCVKVLELICTRESGAVFEAGGLNCVLTFIRDSGHLVHKDTLHSAMAVVSRLCGKMEPQDSSLEICVESLSSLLKHEDHQVSDGALRCFASLADRFTRRGVDPAPLAKHGLTEELLSRMAAAGGTVSGPSSACKPGRSTTGAPSTTADSKLSNQVSTIVSLLSTLCRGSPVVTHDLLRSELPDSIESALQGDERCVLDTMRLVDLLLVLLFEGRKALPKSSAGSTGRIPGLRRLDSSGERSHRQLIDCIRSKDTDALIDAIDTGAFEVNFMDDVGQTLLNWASAFGTQEMVEFLCERGADVNRGQRSSSLHYAACFGRPQVAKTLLRHGANPDLRDEDGKTPLDKARERGHSEVVAILQSPGDWMCPVNKGDDKKKKDTNKDEEECNEPKGDPEMAPIYLKRLLPVFAQTFQQTMLPSIRKASLALIRKMIHFCSEALLKEVCDSDVGHNLPTILVEITATVLDQEDDDDGHLLALQIIRDLVDKGGDIFLDQLARLGVISKVSTLAGPSSDDENEEESKPEKEDEPQEDAKELQQGKPYHWRDWSIIRGRDCLYIWSDAAALELSNGSNGWFRFILDGKLATMYSSGSPEGGSDSSESRSEFLEKLQRARGQVKPSTSSQPILSAPGPTKLTVGNWSLTCLKEGEIAIHNSDGQQATILKEDLPGFVFESNRGTKHSFTAETSLGSEFVTGWTGKRGRKLKSKLEKTKQKVRTMARDLYDDHFKAVESMPRGVVVTLRNIATQLESSWELHTNRQCIESENTWRDLMKTALENLIVLLKDENTISPYEMCSSGLVQALLTVLNNSMDLDMKQDCSQLVERINVFKTAFSENEDDESRPAVALIRKLIAVLESIERLPLHLYDTPGSTYNLQILTRRLRFRLERAPGETALIDRTGRMLKMEPLATVESLEQYLLKMVAKQWYDFDRSSFVFVRKLREGQNFIFRHQHDFDENGIIYWIGTNAKTAYEWVNPAAYGLVVVTSSEGRNLPYGRLEDILSRDNSALNCHSNDDKNAWFAIDLGLWVIPSAYTLRHARGYGRSALRNWVFQVSKDGQNWTSLYTHVDDCSLNEPGSTATWPLDPPKDEKQGWRHVRIKQMGKNASGQTHYLSLSGFELYGTVNGVCEDQLGKAAKEAEANLRRQRRLVRSQVLKYMVPGARVIRGLDWKWRDQDGSPQGEGTVTGELHNGWIDVTWDAGGSNSYRMGAEGKFDLKLAPGYDPDTVASPKPVSSTVSGTTQSWSSLVKNNCPDKTSAAAGSSSRKGSSSSVCSVASSSDISLGSTKTERRSEIVMEHSIVSGADVHEPIVVLSSAENVPQTEVGSSSSASTSTLTAETGSENAERKLGPDSSVRTPGESSAISMGIVSVSSPDVSSVSELTNKEAASQRPLSSSASNRLSVSSLLAAGAPMSSSASVPNLSSRETSSLESFVRRVANIARTNATNNMNLSRSSSDNNTNTLGRNVMSTATSPLMGAQSFPNLTTPGTTSTVTMSTSSVTSSSNVATATTVLSVGQSLSNTLTTSLTSTSSESDTGQEAEYSLYDFLDSCRASTLLAELDDDEDLPEPDEEDDENEDDNQEDQEYEEVMILRRPSLQRRAGSRSDVTHHAVTSQLPQVPAGAGSRPIGEQEEEEYETKGGRRRTWDDDYVLKRQFSALVPAFDPRPGRTNVQQTTDLEIPPPGTPHSELLEEVECTPSPRLALTLKVTGLGTTREVELPLTNFRSTIFYYVQKLLQLSCNGNVKSDKLRRIWEPTYTIMYREMKDSDKEKENGKMGCWSIEHVEQYLGTDELPKNDLITYLQKNADAAFLRHWKLTGTNKSIRKNRNCSQLIAAYKDFCEHGTKSGLNQGAISTLQSSDILNLTKEQPQAKAGNGQNSCGVEDVLQLLRILYIVASDPYSRISQEDGDEQPQFTFPPDEFTSKKITTKILQQIEEPLALASGALPDWCEQLTSKCPFLIPFETRQLYFTCTAFGASRAIVWLQNRREATVERTRTTSSVRRDDPGEFRVGRLKHERVKVPRGESLMEWAENVMQIHADRKSVLEVEFLGEEGTGLGPTLEFYALVAAEFQRTDLGAWLCDDNFPDDESRHVDLGGGLKPPGYYVQRSCGLFTAPFPQDSDELERITKLFHFLGIFLAKCIQDNRLVDLPISKPFFKLMCMGDIKSNMSKLIYESRGDRDLHCTESQSEASTEEGHDSLSVGSFEEDSKSEFILDPPKPKPPAWFNGILTWEDFELVNPHRARFLKEIKDLAIKRRQILSNKGLSEDEKNTKLQELVLKNPSGSGPPLSIEDLGLNFQFCPSSRIYGFTAVDLKPSGEDEMITMDNAEEYVDLMFDFCMHTGIQKQMEAFRDGFNKVFPMEKLSSFSHEEVQMILCGNQSPSWAAEDIINYTEPKLGYTRDSPGFLRFVRVLCGMSSDERKAFLQFTTGCSTLPPGGLANLHPRLTVVRKVDATDASYPSVNTCVHYLKLPEYSSEEIMRERLLAATMEKGFHLN

SEQ ID NO: 11659 - protein, 1222 aa, Homo sapiens
MLVGQGAGPLGPAVVTAAVVLLLSGVGPAHGSEDIVVGCGGFVKSDVEINYSLIEIKLYTKHGTLKYQTDCAPNNGYFMIPLYDKGDFILKIEPPLGWSFEPTTVELHVDGVSDICTKGGDINFVFTGFSVNGKVLSKGQPLGPAGVQVSLRNTGTEAKIQSTVTQPGGKFAFFKVLPGDYEILATHPTWALKEASTTVRVTNSNANAASPLIVAGYNVSGSVRSDGEPMKGVKFLLFSSLVTKEDVLGCNVSPVPGFQPQDESLVYLCYTVSREDGSFSFYSLPSGGYTVIPFYRGERITFDVAPSRLDFTVEHDSLKIEPVFHVMGFSVTGRVLNGPEGDGVPEAVVTLNNQIKVKTKADGSFRLENITTGTYTIHAQKEHLYFETVTIKIAPNTPQLADIVATGFSVCGQISIIRFPDTVKQMNKYKVVLSSQDKDKSLVTVETDAHGSFCFKANPGTYKVQVMVPEAETRAGLTLKPQTFPLTVTDRPVMDVAFVQFLASVSGKVSCLDTCGDLLVTLQSLSRQGEKRSLQLSGKVNAMTFTFDNVLPGKYKISIMHEDWCWKNKSLEVEVLEDDVSAVEFRQTGYMLRCSLSHAITLEFYQDGNGRENVGIYNLSKGVNRFCLSKPGVYKVTPRSCHRFEQAFYTYDTSSPSILTLTAIRHHVLGTITTDKMMDVTVTIKSSIDSEPALVLGPLKSVQELRREQQLAEIEARRQEREKNGNEEGEERMTKPPVQEMVDELQGPFSYDFSYWARSGEKITVTPSSKELLFYPPSMEAVVSGESCPGKLIEIHGKAGLFLEGQIHPELEGVEIVISEKGASSPLITVFTDDKGAYSVGPLHSDLEYTVTSQKEGYVLTAVEGTIGDFKAYALAGVSFEIKAEDDQPLPGVLLSLSGGLFRSNLLTQDNGILTFSNLSPGQYYFKPMMKEFRFEPSSQMIEVQEGQNLKITITGYRTAYSCYGTVSSLNGEPEQGVAMEAVGQNDCSIYGEDTVTDEEGKFRLRGLLPGCVYHVQLKAEGNDHIERALPHHRVIEVGNNDIDDVNIIVFRQINQFDLSGNVITSSEYLPTLWVKLYKSENLDNPIQTVSLGQSLFFHFPPLLRDGENYVVLLDSTLPRSQYDYILPQVSFTAVGYHKHITLIFNPTRKLPEQDIAQGSYIALPLTLLVLLAGYNHDKLIPLLLQLTSRLQGVGALGQAASDNSGPEDAKRQAKKQKTRRT

SEQ ID NO: 11660 - protein, 1215 aa, Homo sapiens
MAQFPTPFGGSLDIWAITVEERAKHDQQFHSLKPISGFITGDQARNFFFQSGLPQPVLAQIWALADMNNDGRMDQVEFSIAMKLIKLKLQGYQLPSALPPVMKQQPVAISSAPAFGMGGIASMPPLTAVAPVPMGSIPVVGMSPTLVSSVPTAAVPPLANGAPPVIQPLPAFAHPAATLPKSSSFSRSGPGSQLNTKLQKAQSFDVASVPPVAEWAVPQSSRLKYRQLFNSHDKTMSGHLTGPQARTILMQSSLPQAQLASIWNLSDIDQDGKLTAEEFILAMHLIDVAMSGQPLPPVLPPEYIPPSFRRVRSGSGISVISSTSVDQRLPEEPVLEDEQQQLEKKLPVTFEDKKRENFERGNLELEKRRQALLEQQRKEQERLAQLERAEQERKERERQEQERKRQLELEKQLEKQRELERQREEERRKEIERREAAKRELERQRQLEWERNRRQELLNQRNKEQEDIVVLKAKKKTLEFELEALNDKKHQLEGKLQDIRCRLTTQRQEIESTNKSRELRIAEITHLQQQLQESQQMLGRLIPEKQILNDQLKQVQQNSLHRDSLVTLKRALEAKELARQHLRDQLDEVEKETRSKLQEIDIFNNQLKELREIHNKQQLQKQKSMEAERLKQKEQERKIIELEKQKEEAQRRAQERDKQWLEHVQQEDEHQRPRKLHEEEKLKREESVKKKDGEEKGKQEAQDKLGRLFHQHQEPAKPAVQAPWSTAEKGPLTISAQENVKVVYYRALYPFESRSHDEITIQPGDIVMVDESQTGEPGWLGGELKGKTGWFPANYAEKIPENEVPAPVKPVTDSTSAPAPKLALRETPAPLAVTSSEPSTTPNNWADFSSTWPTSTNEKPETDNWDAWAAQPSLTVPSAGQLRQRSAFTPATATGSSPSPVLGQGEKVEGLQAQALYPWRAKKDNHLNFNKNDVITVLEQQDMWWFGEVQGQKGWFPKSYVKLISGPIRKSTSMDSGSSESPASLKRVASPAAKPVVSGEEFIAMYTYESSEQGDLTFQQGDVILVTKKDGDWWTGTVGDKAGVFPSNYVRLKDSEGSGTAGKTGSLGKKPEIAQVIASYTATGPEQLTLAPGQLILIRKKNPGGWWEGELQARGKKRQIGWFPANYVKLLSPGTSKITPTEPPKSTALAAVCQVIGMYDYTAQNDDELAFNKGQIINVLNKEDPDWWKGEVNGQVGLFPSNYVKLTTDMDPSQQ

SEQ ID NO: 11661 - protein, 2925 aa, Homo sapiens
MGVLASALCWLLCVWLPWGEQAAESLRVQRLGERVVDSGRSGARGMRNVKGMRNGPAQTRVSSSSSHQEATLAMGDKATVVGGQQAEAPDSVAMSSWERRLHRAKCAPSYLFSCFNGGECVHPAFCDCRRFNATGPRCQMVYNAGPERDSICRAWGQHHVETFDGLYYYLSGKGSYTLVGRHEPEGQSFSIQVHNDPQCGSSPYTCSRAVSLFFVGEQEIHLAKEVTHGGMRVQLPHVMGSARLQQLAGYVIVRHQSAFTLAWDGASAVYIKMSPELLGWTHGLCGNNNADPKDDLVTSSGKLTDDVVEFVHSWQEQAPNQPPGPTTSSLPRPPCLQQNPGTMQGVYEQCEALLRPPFDACHAYVSPLPFTASCTSDLCQSMGDVATWCRALAEYARACAQAGRPLQGWRTQLRQCTVHCKEKAFTYNECIACCPASCHPRASCVDSEIACVDGCYCPNGLIFEDGGCVAPAECPCEFHGTLYPPGSVVKEDCNTCTCTSGKWECSTAVCPAECSVTGDIHFTTFDGRRYTFPATCQYILAKSRSSGTFTVTLQNAPCGLNQDGACVQSVSVILHQDPRRQVTLTQAGDVLLFDQYKIIPPYTDDAFEIRRLSSVFLRVRTNVGVRVLYDREGLRLYLQVDQRWVEDTVGLCGTFNGNTQDDFLSPVGVPESTPQLFGNSWKTLSACSPLVSGSPLDPCDVHLQAASYSVQACSVLTGEMFAPCSAFLSPVPYFEQCRRDACRCGQPCLCATLAHYAHLCRRHGLPVDFRARLPACALSCEASKEYSPCVAPCGRTCQDLASPEACGVDGGDDLSRDECVEGCACPPDTYLDTQADLCVPRNQCSCHFQGVDYPPGDSDIPSLGHCHCKDGVMSCDSRAPAAACPAGQVFVNCSDLHTDLELSRERTCEQQLLNLSVSARGPCLSGCACPQGLLRHGDACFLPEECPCTWKGKEYFPGDQVMSPCHTCVCQRGSFQCTLHPCASTCTAYGDRHYRTFDGLPFDFVGACKVHLVKSTSDVSFSVIVENVNCYSSGMICRKFISINVGNSLIVFDDDSGNPSPESFLDDKQEVHTWRVGFFTLVHFPQEHITLLWDQRTTVHVQAGPQWQGQLAGLCGNFDLKTINEMRTPENLELTNPQEFGSSWAAVECPDTLDPRDMCVLNPLREPFAKKECSILLSEVFEICHPVVDVTWFYSNCLTDTCGCSQGGDCECFCASVSAYAHQCCQHGVAVDWRTPRLCPYDCDFFNKVLGKGPYQLSSLAAGGALVGMKAVGDDIVLVRTEDVAPADIVSFLLTAALYKAKAHDPDVVSLEAADRPNFFLHVTANGSLELAKWQGRDTFQQHASFLLHRGTRQAGLVALESLAKPSSFLYVSGAVLALRLYEHTEVFRRGTLFRLLDAKPSGAAYPICEWRYDACASPCFQTCRDPRAASCRDVPRVEGCVPVCPTPQVLDEVTQRCVYLEDCVEPAVWVPTEALGNETLPPSQGLPTPSDEEPQLSQESPRTPTHRPALTPAAPLTTALNPPVTATEEPVVSPGPTQTTLQQPLELTASQLPAGPTESPASKGVTASLLAIPHTPESSSLPVALQTPTPGMVSGAMETTRVTVIFAGSPNITVSSRSPPAPRFPLMTKAVTVRGHGSLPVRTTPPQPSLTASPSSRPVASPGAISRSPTSSGSHKAVLTPAVTKVISRTGVPQPTQAQSASSPSTPLTVAGTAAEQVPVSPLATRSLEIVLSTEKGEAGHSQPMGSPASPQPHPLPSAPPRPAQHTTMATRSPALPPETPAAASLSTATDGLAATPFMSLESTRPSQLLSGLPPDTSLPLAKVGTSAPVATPGPKASVITTPLQPQATTLPAQTLSPVLPFTPAAMTQAHPPTHIAPPAAGTAPGLLLGATLPTSGVLPVAEGTASMVSVVPRKSTTGKVAILSKQVSLPTSMYGSAEGGPTELTPATSHPLTPLVAEPEGAQAGTALPVPTSYALSRVSARTAPQDSMLVLLPQLAEAHGTSAGPHLAAEPVDEATTEPSGRSAPALSIVEGLAEALATTTEANTSTTCVPIAEQDCVRHICLEGQLIRVNQSQHCPQGAAPPRCGILGLAVRVGGDRCCPLWECACRCSIFPDLSFVTFDGSHVALFKEAIYILSQSPDEMLTVHVLDCKSANLGHLNWPPFCLVMLNMTHLAHQVTIDRFNRKVTVDLQPVWPPVSRYGFRIEDTGHMYMILTPSDIQIQWLHSSGLMIVEASKTSKAQGHGLCGICDGDAANDLTLKDGSVVGGAEDPAPFLDSWQVPSSLTSVGQTRFRPDSCATTDCSPCLRMVSNRTFSACHRFVPPESFCELWIRDTKYVQQPCVALTVYVAMCHKFHVCIEWRRSDYCPFLCSSDSTYQACVTACEPPKTCQDGILGPLDPEHCQVLGEGCVCSEGTILHRRHSALCIPEAKCACTDSMGVPRALGETWNSSLSGCCQHQCQAPDTIVPVDLGCPSPRPESCLRFGEVALLLPTKDPCCLGTVCVCNQTLCEGLAPTCRPGHRLLTHFQEDSCCPSYSCECDPDLCEAELVPSCRQDQILITGRLGDSCCTSYFCACGDCPDSIPECQEGEALTVHRNTTELCCPLYQCVCENFRCPQVQCGLGTALVEVWSPDRCCPYKSCECDCDTIPVPRCHLWEKSQLDEEFMHSVENVCGCAKYECVKAPVCLSRELGVMQPGQTVVELSADGVCHTSRCTTVLDPLTNFYQINTTSVLCDIHCEANQEYEHPRDLAACCGSCRNVSCLFTFPNGTTSLFLPGASWIADCARHHCSSTPLGAVLVRSPISCPPLNETECAKVGGSVVPSLEGCCRTCKEDGRSCKKVTIRMTIRKNECRSSTPVNLVSCDGRCPSASIYNYNINTYARFCKCCREVGLQRRSVQLFCATNATWVPYTVQEPTDCACQWS

SEQ ID NO: 11662 - protein, 2913 aa, Homo sapiens
MGVLASALCWLLCVWLPWGEQAAESLRVQRLAAAPVLWGSAEPQPEPAGQPSSSHQEATLAMGDKATVVGGQQAEAPDSVAMSSWERRLHRAKCAPSYLFSCFNGGECVHPAFCDCRRFNATGPRCQMVYNAGPERDSICRAWGQHHVETFDGLYYYLSGKGSYTLVGRHEPEGQSFSIQVHNDPQCGSSPYTCSRAVSLFFVGEQEIHLAKEVTHGGMRVQLPHVMGSARLQQLAGYVIVRHQSAFTLAWDGASAVYIKMSPELLGWTHGLCGNNNADPKDDLVTSSGKLTDDVVEFVHSWQEQAPNQPPGPTTSSLPRPPCLQQNPGTMQGVYEQCEALLRPPFDACHAYVSPLPFTASCTSDLCQSMGDVATWCRALAEYARACAQAGRPLQGWRTQLRQCTVHCKEKAFTYNECIACCPASCHPRASCVDSEIACVDGCYCPNGLIFEDGGCVAPAECPCEFHGTLYPPGSVVKEDCNTCTCTSGKWECSTAVCPAECSVTGDIHFTTFDGRRYTFPATCQYILAKSRSSGTFTVTLQNAPCGLNQDGACVQSVSVILHQDPRRQVTLTQAGDVLLFDQYKIIPPYTDDAFEIRRLSSVFLRVRTNVGVRVLYDREGLRLYLQVDQRWVEDTVGLCGTFNGNTQDDFLSPVGVPESTPQLFGNSWKTLSACSPLVSGSPLDPCDVHLQAASYSVQACSVLTGEMFAPCSAFLSPVPYFEQCRRDACRCGQPCLCATLAHYAHLCRRHGLPVDFRARLPACALSCEASKEYSPCVAPCGRTCQDLASPEACGVDGGDDLSRDECVEGCACPPDTYLDTQADLCVPRNQCSCHFQGVDYPPGDSDIPSLGHCHCKDGVMSCDSRAPAAACPAGQVFVNCSDLHTDLELSRERTCEQQLLNLSVSARGPCLSGCACPQGLLRHGDACFLPEECPCTWKGKEYFPGDQVMSPCHTCVCQRGSFQCTLHPCASTCTAYGDRHYRTFDGLPFDFVGACKVHLVKSTSDVSFSVIVENVNCYSSGMICRKFISINVGNSLIVFDDDSGNPSPESFLDDKQEVHTWRVGFFTLVHFPQEHITLLWDQRTTVHVQAGPQWQGQLAGLCGNFDLKTINEMRTPENLELTNPQEFGSSWAAVECPDTLDPRDMCVLNPLREPFAKKECSILLSEVFEICHPVVDVTWFYSNCLTDTCGCSQGGDCECFCASVSAYAHQCCQHGVAVDWRTPRLCPYDCDFFNKVLGKGPYQLSSLAAGGALVGMKAVGDDIVLVRTEDVAPADIVSFLLTAALYKAKAHDPDVVSLEAADRPNFFLHVTANGSLELAKWQGRDTFQQHASFLLHRGTRQAGLVALESLAKPSSFLYVSGAVLALRLYEHTEVFRRGTLFRLLDAKPSGAAYPICEWRYDACASPCFQTCRDPRAASCRDVPRVEGCVPVCPTPQVLDEVTQRCVYLEDCVEPAVWVPTEALGNETLPPSQGLPTPSDEEPQLSQESPRTPTHRPALTPAAPLTTALNPPVTATEEPVVSPGPTQTTLQQPLELTASQLPAGPTESPASKGVTASLLAIPHTPESSSLPVALQTPTPGMVSGAMETTRVTVIFAGSPNITVSSRSPPAPRFPLMTKAVTVRGHGSLPVRTTPPQPSLTASPSSRPVASPGAISRSPTSSGSHKAVLTPAVTKVISRTGVPQPTQAQSASSPSTPLTVAGTAAEQVPVSPLATRSLEIVLSTEKGEAGHSQPMGSPASPQPHPLPSAPPRPAQHTTMATRSPALPPETPAAASLSTATDGLAATPFMSLESTRPSQLLSGLPPDTSLPLAKVGTSAPVATPGPKASVITTPLQPQATTLPAQTLSPVLPFTPAAMTQAHPPTHIAPPAAGTAPGLLLGATLPTSGVLPVAEGTASMVSVVPRKSTTGKVAILSKQVSLPTSMYGSAEGGPTELTPATSHPLTPLVAEPEGAQAGTALPVPTSYALSRVSARTAPQDSMLVLLPQLAEAHGTSAGPHLAAEPVDEATTEPSGRSAPALSIVEGLAEALATTTEANTSTTCVPIAEQDCVRHICLEGQLIRVNQSQHCPQGAAPPRCGILGLAVRVGGDRCCPLWECACRCSIFPDLSFVTFDGSHVALFKEAIYILSQSPDEMLTVHVLDCKSANLGHLNWPPFCLVMLNMTHLAHQVTIDRFNRKVTVDLQPVWPPVSRYGFRIEDTGHMYMILTPSDIQIQWLHSSGLMIVEASKTSKAQGHGLCGICDGDAANDLTLKDGSVVGGAEDPAPFLDSWQVPSSLTSVGQTRFRPDSCATTDCSPCLRMVSNRTFSACHRFVPPESFCELWIRDTKYVQQPCVALTVYVAMCHKFHVCIEWRRSDYCPFLCSSDSTYQACVTACEPPKTCQDGILGPLDPEHCQVLGEGCVCSEGTILHRRHSALCIPEAKCACTDSMGVPRALGETWNSSLSGCCQHQCQAPDTIVPVDLGCPSPRPESCLRFGEVALLLPTKDPCCLGTVCVCNQTLCEGLAPTCRPGHRLLTHFQEDSCCPSYSCECDPDLCEAELVPSCRQDQILITGRLGDSCCTSYFCACGDCPDSIPECQEGEALTVHRNTTELCCPLYQCVCENFRCPQVQCGLGTALVEVWSPDRCCPYKSCECDCDTIPVPRCHLWEKSQLDEEFMHSVENVCGCAKYECVKAPVCLSRELGVMQPGQTVVELSADGVCHTSRCTTVLDPLTNFYQINTTSVLCDIHCEANQEYEHPRDLAACCGSCRNVSCLFTFPNGTTSLFLPGASWIADCARHHCSSTPLGAVLVRSPISCPPLNETECAKVGGSVVPSLEGCCRTCKEDGRSCKKVTIRMTIRKNECRSSTPVNLVSCDGRCPSASIYNYNINTYARFCKCCREVGLQRRSVQLFCATNATWVPYTVQEPTDCACQWS

SEQ ID NO: 11663 - protein, 647 aa, Homo sapiens
MFEIDYSRDSFLKDGQPFRYISGSIHYSRVPRFYWKDRLLKMKMAGLNAIQTYVPWNFHEPWPGQYQFSEDHDVEYFLRLAHELGLLVILRPGPYICAEWEMGGLPAWLLEKESILLRSSDPDYLAAVDKWLGVLLPKMKPLLYQNGGPVITVQVENEYGSYFACDFDYLRFLQKRFRHHLGDDVVLFTTDGAHKTFLKCGALQGLYTTVDFGTGSNITDAFLSQRKCEPKGPLINSEFYTGWLDHWGQPHSTIKTEAVASSLYDILARGASVNLYMFIGGTNFAYWNGANSPYAAQPTSYDYDAPLSEAGDLTEKYFALRNIIQKFEKVPEGPIPPSTPKFAYGKVTLEKLKTVGAALDILCPSGPIKSLYPLTFIQVKQHYGFVLYRTTLPQDCSNPAPLSSPLNGVHDRAYVAVDGIPQGVLERNNVITLNITGKAGATLDLLVENMGRVNYGAYINDFKGLVSNLTLSSNILTDWTIFPLDTEDAVCSHLGGWGHRDSGHHDEAWAHNSSNYTLPAFYMGNFSIPSGIPDLPQDTFIQFPGWTKGQVWINGFNLGRYWPARGPQLTLFVPQHILMTSAPNTITVLELEWAPCSSDDPELCAVTFVDRPVIGSSVTYDHPSKPVEKRLMPPPPQKNKDSWLDHV

SEQ ID NO: 11664 - protein, 1531 aa, Homo sapiens
MALRGFCSADGSDPLWDWNVTWNTSNPDFTKCFQNTVLVWVPCFYLWACFPFYFLYLSRHDRGYIQMTPLNKTKTALGFLLWIVCWADLFYSFWERSRGIFLAPVFLVSPTLLGITMLLATFLIQLERRKGVQSSGIMLTFWLVALVCALAILRSKIMTALKEDAQVDLFRDITFYVYFSLLLIQLVLSCFSDRSPLFSETIHDPNPCPESSASFLSRITFWWITGLIVRGYRQPLEGSDLWSLNKEDTSEQVVPVLVKNWKKECAKTRKQPVKVVYSSKDPAQPKESSKVDANEEVEALIVKSPQKEWNPSLFKVLYKTFGPYFLMSFFFKAIHDLMMFSGPQILKLLIKFVNDTKAPDWQGYFYTVLLFVTACLQTLVLHQYFHICFVSGMRIKTAVIGAVYRKALVITNSARKSSTVGEIVNLMSVDAQRFMDLATYINMIWSAPLQVILALYLLWLNLGPSVLAGVAVMVLMVPVNAVMAMKTKTYQVAHMKSKDNRIKLMNEILNGIKVLKLYAWELAFKDKVLAIRQEELKVLKKSAYLSAVGTFTWVCTPFLVALCTFAVYVTIDENNILDAQTAFVSLALFNILRFPLNILPMVISSIVQASVSLKRLRIFLSHEELEPDSIERRPVKDGGGTNSITVRNATFTWARSDPPTLNGITFSIPEGALVAVVGQVGCGKSSLLSALLAEMDKVEGHVAIKGSVAYVPQQAWIQNDSLRENILFGCQLEEPYYRSVIQACALLPDLEILPSGDRTEIGEKGVNLSGGQKQRVSLARAVYSNADIYLFDDPLSAVDAHVGKHIFENVIGPKGMLKNKTRILVTHSMSYLPQVDVIIVMSGGKISEMGSYQELLARDGAFAEFLRTYASTEQEQDAEENGVTGVSGPGKEAKQMENGMLVTDSAGKQLQRQLSSSSSYSGDISRHHNSTAELQKAEAKKEETWKLMEADKAQTGQVKLSVYWDYMKAIGLFISFLSIFLFMCNHVSALASNYWLSLWTDDPIVNGTQEHTKVRLSVYGALGISQGIAVFGYSMAVSIGGILASRCLHVDLLHSILRSPMSFFERTPSGNLVNRFSKELDTVDSMIPEVIKMFMGSLFNVIGACIVILLATPIAAIIIPPLGLIYFFVQRFYVASSRQLKRLESVSRSPVYSHFNETLLGVSVIRAFEEQERFIHQSDLKVDENQKAYYPSIVANRWLAVRLECVGNCIVLFAALFAVISRHSLSAGLVGLSVSYSLQVTTYLNWLVRMSSEMETNIVAVERLKEYSETEKEAPWQIQETAPPSSWPQVGRVEFRNYCLRYREDLDFVLRHINVTINGGEKVGIVGRTGAGKSSLTLGLFRINESAEGEIIIDGINIAKIGLHDLRFKITIIPQDPVLFSGSLRMNLDPFSQYSDEEVWTSLELAHLKDFVSALPDKLDHECAEGGENLSVGQRQLVCLARALLRKTKILVLDEATAAVDLETDDLIQSTIRTQFEDCTVLTIAHRLNTIMDYTRVIVLDKGEIQEYGAPSDLLQQRGLFYSMAKDAGLV

SEQ ID NO: 11665 - protein, 1125 aa, Homo sapiens
MWNRYFVFYLLLLSAFTSQTVSGQRKKGPKSNLLARKSDVQGSICFIDIVFIVDSSESSKIALFDKQKDFVDSLSDKIFQLTPGRSLEYDIKLAALQFSSSVQIDPPFSSWKDLQTFKQKVKSMNLIGQGTFSYYAISNATRLLKREGRKDGVKVVLLMTDGIDHPKNPDVQSISEDARISGISFITIALSTVVNEAKLRLISGDSSSEPTLLLSDPTLVDKIQDRLDILFEKKCERKICECEKGDPGDPGPPGTHGNPGIKGERGPKGNPGNAQKGEAGERGPGGIPGYKGDKGERGECGKPGIKGDKGSPGPYGPKGPRGIQGITGPPGDPGPKGFQGNKGEPGPPGPYGSPGAPGIGQQGIKGERGQEGRPGAPGPIGVGEPGQPGPRGPEGVPGERGLPGEGFPGPKGEKGSEGPTGPQGLQGLSIKGEKGDIGPVGPQGPMGIPGIGSQGEQGIQGPIGPPGPQGPAGQGLPGSKGEVGQMGPTGPRGPVGIGVQGPKGEPGSIGLPGQPGVPGEDGAAGKKGEAGLPGARGPEGPPGKGQPGPKGDEGKKGSKGNQGQRGLPGPEGPKGEPGIMGPFGMPGTSIPGPPGPKGDRGGPGIPGFKGEPGLSIRGPKGVQGPRGPVGAPGLKGDGYPGVPGPRGLPGPPGPMGLRGVGDTGAKGEPGVRGPPGPSGPRGVGTQGPKGDTGQKGLPGPPGPPGYGSQGIKGEQGPQGFPGPKGTMGHGLPGQKGEHGERGDVGKKGDKGEIGEPGSPGKQGLQGPKGDLGLTKEEIIKLITEICGCGPKCKETPLELVFVIDSSESVGPENFQIIKNFVKTMADRVALDLATARIGIINYSHKVEKVANLKQFSSKDDFKLAVDNMQYLGEGTYTATALQAANDMFEDARPGVKKVALVITDGQTDSRDKEKLTEVVKNASDTNVEIFVIGVVKKNDPNFEIFHKEMNLIATDPEHVYQFDDFFTLQDTLKQKLFQKICEDFDSYLVQIFGSSSPQPGFGMSGEELSESTPEPQKEISESLSVTRDQDEDDKAPEPTWADDLPATTSSEATTTPRPLLSTPVDGAEDPRCLEALKPGNCGEYVVRWYYDKQVNSCARFWFSGCNGSGNRFNSEKECQETCIQG

SEQ ID NO: 11666 - protein, 417 aa, Homo sapiens
MEVNPPKQEHLLALKVMRLTKPTLFTNIPVTCEEKDLPGDLFNQLMRDDPSTVNGAEVLMLGEMLTLPQNFGNIFLGETFSSYISVHNDSNQVVKDILVKADLQTSSQRLNLSASNAAVAELKPDCCIDDVIHHEVKEIGTHILVCAVSYTTQAGEKMYFRKFFKFQVLKPLDVKTKFYNAESDLSSVTDEVFLEAQIQNMTTSPMFMEKVSLEPSIMYNVTELNSVSQAGECVSTFGSRAYLQPMDTRQYLYCLKPKNEFAEKAGIIKGVTVIGKLDIVWKTNLGERGRLQTSQLQRMAPGYGDVRLSLEAIPDTVNLEEPFHITCKITNCSERTMDLVLEMCNTNSIHWCGISGRQLGKLHPSSSLCLALTLLSSVQGLQSISGLRLTDTFLKRTYEYDDIAQVCVVSSAIKVES

SEQ ID NO: 11667 - protein, 1053 aa, Homo sapiens
MAFLKLRDQPSLVQAIFNGDPDEVRALIFKKEDVNFQDNEKRTPLHAAAYLGDAEIIELLILSGARVNAKDSKWLTPLHRAVASCSEEAVQVLLKHSADVNARDKNWQTPLHIAAANKAVKCAEALVPLLSNVNVSDRAGRTALHHAAFSGHGEMVKLLLSRGANINAFDKKDRRAIHWAAYMGHIEVVKLLVSHGAEVTCKDKKSYTPLHAAASSGMISVVKYLLDLGVDMNEPNAYGNTPLHVACYNGQDVVVNELIDCGAIVNQKNEKGFTPLHFAAASTHGALCLELLVGNGADVNMKSKDGKTPLHMTALHGRFSRSQTIIQSGAVIDCEDKNGNTPLHIAARYGHELLINTLITSGADTAKRGIHGMFPLHLAALSGFSDCCRKLLSSGFDIDTPDDFGRTCLHAAAAGGNLECLNLLLNTGADFNKKDKFGRSPLHYAAANCNYQCLFALVGSGASVNDLDERGCTPLHYAATSDTDGKCLEYLLRNDANPGIRDKQGYNAVHYSAAYGHRLCLQLIASETPLDVLMETSGTDMLSDSDNRATISPLHLAAYHGHHQALEVLVQSLLDLDVRNSSGRTPLDLAAFKGHVECVDVLINQGASILVKDYILKRTPIHAAATNGHSECLRLLIGNAEPQNAVDIQDGNGQTPLMLSVLNGHTDCVYSLLNKGANVDAKDKWGRTALHRGAVTGHEECVDALLQHGAKCLLRDSRGRTPIHLSAACGHIGVLGALLQSAASMDANPATADNHGYTALHWACYNGHETCVELLLEQEVFQKTEGNAFSPLHCAVINDNEGAAEMLIDTLGASIVNATDSKGRTPLHAAAFTDHVECLQLLLSHNAQVNSVDSTGKTPLMMAAENGQTNTVEMLVSSASAELTLQDNSKNTALHLACSKGHETSALLILEKITDRNLINATNAALQTPLHVAARNGLTMVVQELLGKGASVLAVDENGYTPALACAPNKDVADCLALILATMMPVSSSSPLSSLTFNAINRYTNTSKTVSFEALPIMRNEPSSYCSFNNIGGEQEYLYTDVDELNDSDSETY

SEQ ID NO: 11668 - protein, 1375 aa, Homo sapiens
MVPGEENQLVPKEDVFWRCRQNIFDEMKKKFLQIENAAEEPRVLCIIQDTTNSKTVNERITLNLPASTPVRKLFEDVANKVGYINGTFDLVWGNGINTADMAPLDHTSDKSLLDANFEPGKKNFLHLTDKDGEQPQILLEDSSAGEDSVHDRFIGPLPREGSGGSTSDYVSQSYSYSSILNKSETGYVGLVNQAMTCYLNSLLQTLFMTPEFRNALYKWEFEESEEDPVTSIPYQLQRLFVLLQTSKKRAIETTDVTRSFGWDSSEAWQQHDVQELCRVMFDALEQKWKQTEQADLINELYQGKLKDYVRCLECGYEGWRIDTYLDIPLVIRPYGSSQAFASVEEALHAFIQPEILDGPNQYFCERCKKKCDARKGLRFLHFPYLLTLQLKRFDFDYTTMHRIKLNDRMTFPEELDMSTFIDVEDEKSPQTESCTDSGAENEGSCHSDQMSNDFSNDDGVDEGICLETNSGTEKISKSGLEKNSLIYELFSVMVHSGSAAGGHYYACIKSFSDEQWYSFNDQHVSRITQEDIKKTHGGSSGSRGYYSSAFASSTNAYMLIYRLKDPARNAKFLEVDEYPEHIKNLVQKERELEEQEKRQREIERNTCKIKLFCLHPTKQVMMENKLEVHKDKTLKEAVEMAYKMMDLEEVIPLDCCRLVKYDEFHDYLERSYEGEEDTPMGLLLGGVKSTYMFDLLLETRKPDQVFQSYKPGEVMVKVHVVDLKAESVAAPITVRAYLNQTVTEFKQLISKAIHLPAETMRIVLERCYNDLRLLSVSSKTLKAEGFFRSNKVFVESSETLDYQMAFADSHLWKLLDRHANTIRLFVLLPEQSPVSYSKRTAYQKAGGDSGNVDDDCERVKGPVGSLKSVEAILEESTEKLKSLSLQQQQDGDNGDSSKSTETSDFENIESPLNERDSSASVDNRELEQHIQTSDPENFQSEERSDSDVNNDRSTSSVDSDILSSSHSSDTLCNADNAQIPLANGLDSHSITSSRRTKANEGKKETWDTAEEDSGTDSEYDESGKSRGEMQYMYFKAEPYAADEGSGEGHKWLMVHVDKRITLAAFKQHLEPFVGVLSSHFKVFRVYASNQEFESVRLNETLSSFSDDNKITIRLGRALKKGEYRVKVYQLLVNEQEPCKFLLDAVFAKGMTVRQSKEELIPQLREQCGLELSIDRFRLRKKTWKNPGTVFLDYHIYEEDINISSNWEVFLEVLDGVEKMKSMSQLAVLSRRWKPSEMKLDPFQEVVLESSSVDELREKLSEISGIPLDDIEFAKGRGTFPCDISVLDIHQDLDWNPKVSTLNVWPLYICDDGAVIFYRDKTEELMELTDEQRNELMKKESSRLQKTGHRVTYSPRKEKALKIYLDGAPNKDLTQD

SEQ ID NO: 11669 - protein, 1562 aa, Homo sapiens
MAAGSGGSGGSGGGPGPGPGGGGGPSGSGSGPGSNGGLGSGGELHPRTGRLVSLSACGRTARRQQPGQEFNHGLVLSREPLRDGRVFTVRIDRKVNSWSGSIEIGVTALDPSVLDFPSSATGLKGGSWVVSGCSVLRDGRSVLEEYGQDLDQLGEGDRVGVERTVAGELRLWVNGRDCGVAATGLPPRVWAVVDLYGKCTQITVLPPEPGFSPPTPIPTPPLEPLAPTEDSALAEQGTSADEAFMVSPAQARPETFPNSLESHNDFANMELSEVVSNTILSAYNGGLLNVNLSSPPAGEGLGSSGAATSPILTSNDALLFHEKCGTLIKLSNNNKTAERRRPLDEFNNGVVMTNRPLRDNEMFEIRIDKLVDKWSGSIEIGVTTHNPNSLEYPATMTNLQSGTIMMSGCGILTNGKGTRREYCEFSLDELQEGDHIGLTRKSNSALHFFINGIDQGVATPLTPPVVYGVVDLYGMAVKVTIVHNNNHSDRLRRNNAILRALSPEGALRRAAPAAQAEPERLLFHPNCGQKAAITHEGRTALRPHATDDFNHGVVLSSRALRDGEVFQVRIDKMVDKWAGSIEIGVTTHNPAYLQLPSTMTNLRSGTWMMTGNGVMHNGTTILDEYGHNLDRLKAGDTVGVVRREDGTLHFFVNGMTQGPAAWNVPPGVYAVVDLYGQAAQATIVDDVEVAPVPEPLPEGNNQVSPSSPSSGAGGSDLRFHQLHGSNAVITNGGRTALRHNCRSEFNDAIVISNRALRDGELFEIVIQKMVDRWSGSIEAGVTAIRPEDLEFPNTMTDIDYDTWMLSGTAIMQDGNTMRNNYGCDLDALGTGARIGMMRTAKGDLHYFINGQDQGAACSGLPPGKEVYAVVDLYGQCVQVSITNATGPMDNSLATSNTATEKSFPLHSPVAGVAHRFHSTCGKNVTLEEDGTRAVRAAGYAHGLVFSTKELRAEEVFEVKVEELDEKWAGSLRLGLTTLAPGEMGPGAGGGGPGLPPSLPELRTKTTWMVSSCEVRRDGQLQRMNYGRNLERLGVGSRVGVRRGADDTMHILVDGEDMGPAATGIAKNVWAVLDLYGPVRGVSIVSSTRLEESEGTQPPSPSSDTGSEGEEDDEGEEHGLGGQNEVGIIPTTLEFLENHGKNILLSNGNRTATRVASYNQGIVVINQPLVPQLLVQVRIDFLNRQWTSSLVLGVITCAPERLNFPASACALKRAAWLLRGRGVFHNGLKICEKFGPNLDTCPEGTILGLRLDSSGGLHLHVNGVDQGVAVPDVPQPCHALVDLYGQCEQVTIVNPEPGAASGKSAGTQGDMEKADMVDGIKESVCWGPPPAASPLKSCEYHALCSRFQELLLLPEDYFMPPPKRSLCYCESCRKLRGDEAHRRRGEPPREYALPFGWCRFNLRVNPRLEAGTLTKKWHMAYHGSNVAAVRRVLDRGELGAGTASILSCRPLKGEPGVGFEEPGENCAPPREEQPPPVLLSPSLQYAGAETLASKVQFRDPKSQRTHQAQVAFQVCVRPGSYTPGPPSAALGEPPDPHFSPAELEWVTKEKGATLLCALLVRVE

SEQ ID NO: 11670 - protein, 808 aa, Homo sapiens
MGRKLDPTKEKRGPGRKARKQKGAETELVRFLPAVSDENSKRLSSRARKRAAKRRLGSVEAPKTNKSPEAKPLPGKLPKGAVQTAGKKGPQSLFNAPRGKKRPAPGSDEEEEEEDSEEDGMVNHGDLWGSEDDADTVDDYGADSNSEDEEEGEALLPIERAARKQKAREAAAGIQWSEEETEDEEEEKEVTPESGPPKVEEADGGLQINVDEEPFVLPPAGEMEQDAQAPDLQRVHKRIQDIVGILRDFGAQREEGRSRSEYLNRLKKDLAIYYSYGDFLLGKLMDLFPLSELVEFLEANEVPRPVTLRTNTLKTRRRDLAQALINRGVNLDPLGKWSKTGLVVYDSSVPIGATPEYLAGHYMLQGASSMLPVMALAPQEHERILDMCCAPGGKTSYMAQLMKNTGVILANDANAERLKSVVGNLHRLGVTNTIISHYDGRQFPKVVGGFDRVLLDAPCSGTGVISKDPAVKTNKDEKDILRCAHLQKELLLSAIDSVNATSKTGGYLVYCTCSITVEENEWVVDYALKKRNVRLVPTGLDFGQEGFTRFRERRFHPSLRSTRRFYPHTHNMDGFFIAKFKKFSNSIPQSQTGNSETATPTNVDLPQVIPKSENSSQPAKKAKGAAKTKQQLQKQQHPKKASFQKLNGISKGADSELSTVPSVTKTQASSSFQDSSQPAGKAEGIREPKVTGKLKQRSPKLQSSKKVAFLRQNAPPKGTDTQTPAVLSPSKTQATLKPKDHHQPLGRAKGVEKQQLPEQPFEKAAFQKQNDTPKGPQPPTVSPIRSSRPPPAKRKKSQSRGNSQLLLS

SEQ ID NO: 11671 - protein, 1512 aa, Homo sapiens
MAAAAGNRASSSGFPGARATSPEAGGGGGALKASSAPAAAAGLLREAGSGGRERADWRRRQLRKVRSVELDQLPEQPLFLAASPPASSTSPSPEPADAAGSGTGFQPVAVPPPHGAASRGGAHLTESVAAPDSGASSPAAAEPGEKRAPAAEPSPAAAPAGREMENKETLKGLHKMDDRPEERMIREKLKATCMPAWKHEWLERRNRRGPVVVKPIPVKGDGSEMNHLAAESPGEVQASAASPASKGRRSPSPGNSPSGRTVKSESPGVRRKRVSPVPFQSGRITPPRRAPSPDGFSPYSPEETNRRVNKVMRARLYLLQQIGPNSFLIGGDSPDNKYRVFIGPQNCSCARGTFCIHLLFVMLRVFQLEPSDPMLWRKTLKNFEVESLFQKYHSRRSSRIKAPSRNTIQKFVSRMSNSHTLSSSSTSTSSSENSIKDEEEQMCPICLLGMLDEESLTVCEDGCRNKLHHHCMSIWAEECRRNREPLICPLCRSKWRSHDFYSHELSSPVDSPSSLRAAQQQTVQQQPLAGSRRNQESNFNLTHYGTQQIPPAYKDLAEPWIQVFGMELVGCLFSRNWNVREMALRRLSHDVSGALLLANGESTGNSGGSSGSSPSGGATSGSSQTSISGDVVEACCSVLSMVCADPVYKVYVAALKTLRAMLVYTPCHSLAERIKLQRLLQPVVDTILVKCADANSRTSQLSISTLLELCKGQAGELAVGREILKAGSIGIGGVDYVLNCILGNQTESNNWQELLGRLCLIDRLLLEFPAEFYPHIVSTDVSQAEPVEIRYKKLLSLLTFALQSIDNSHSMVGKLSRRIYLSSARMVTTVPHVFSKLLEMLSVSSSTHFTRMRRRLMAIADEVEIAEAIQLGVEDTLDGQQDSFLQASVPNNYLETTENSSPECTVHLEKTGKGLCATKLSASSEDISERLASISVGPSSSTTTTTTTTEQPKPMVQTKGRPHSQCLNSSPLSHHSQLMFPALSTPSSSTPSVPAGTATDVSKHRLQGFIPCRIPSASPQTQRKFSLQFHRNCPENKDSDKLSPVFTQSRPLPSSNIHRPKPSRPTPGNTSKQGDPSKNSMTLDLNSSSKCDDSFGCSSNSSNAVIPSDETVFTPVEEKCRLDVNTELNSSIEDLLEASMPSSDTTVTFKSEVAVLSPEKAENDDTYKDDVNHNQKCKEKMEAEEEEALAIAMAMSASQDALPIVPQLQVENGEDIIIIQQDTPETLPGHTKAKQPYREDTEWLKGQQIGLGAFSSCYQAQDVGTGTLMAVKQVTYVRNTSSEQEEVVEALREEIRMMSHLNHPNIIRMLGATCEKSNYNLFIEWMAGGSVAHLLSKYGAFKESVVINYTEQLLRGLSYLHENQIIHRDVKGANLLIDSTGQRLRIADFGAAARLASKGTGAGEFQGQLLGTIAFMAPEVLRGQQYGRSCDVWSVGCAIIEMACAKPPWNAEKHSNHLALIFKIASATTAPSIPSHLSPGLRDVALRCLELQPQDRPPSRELLKHPVFRTTW

SEQ ID NO: 11672 - protein, 3277 aa, Homo sapiens
MAAAARPRGRALGPVLPPTPLLLLVLRVLPACGATARDPGAAAGLSLHPTYFNLAEAARIWATATCGERGPGEGRPQPELYCKLVGGPTAPGSGHTIQGQFCDYCNSEDPRKAHPVTNAIDGSERWWQSPPLSSGTQYNRVNLTLDLGQLFHVAYILIKFANSPRPDLWVLERSVDFGSTYSPWQYFAHSKVDCLKEFGREANMAVTRDDDVLCVTEYSRIVPLENGEVVVSLINGRPGAKNFTFSHTLREFTKATNIRLRFLRTNTLLGHLISKAQRDPTVTRRYYYSIKDISIGGQCVCNGHAEVCNINNPEKLFRCECQHHTCGETCDRCCTGYNQRRWRPAAWEQSHECEACNCHGHASNCYYDPDVERQQASLNTQGIYAGGGVCINCQHNTAGVNCEQCAKGYYRPYGVPVDAPDGCIPCSCDPEHADGCEQGSGRCHCKPNFHGDNCEKCAIGYYNFPFCLRIPIFPVSTPSSEDPVAGDIKGCDCNLEGVLPEICDAHGRCLCRPGVEGPRCDTCRSGFYSFPICQACWCSALGSYQMPCSSVTGQCECRPGVTGQRCDRCLSGAYDFPHCQGSSSACDPAGTINSNLGYCQCKLHVEGPTCSRCKLLYWNLDKENPSGCSECKCHKAGTVSGTGECRQGDGDCHCKSHVGGDSCDTCEDGYFALEKSNYFGCQGCQCDIGGALSSMCSGPSGVCQCREHVVGKVCQRPENNYYFPDLHHMKYEIEDGSTPNGRDLRFGFDPLAFPEFSWRGYAQMTSVQNDVRITLNVGKSSGSLFRVILRYVNPGTEAVSGHITIYPSWGAAQSKEIIFLPSKEPAFVTVPGNGFADPFSITPGIWVACIKAEGVLLDYLVLLPRDYYEASVLQLPVTEPCAYAGPPQENCLLYQHLPVTRFPCTLACEARHFLLDGEPRPVAVRQPTPAHPVMVDLSGREVELHLRLRIPQVGHYVVVVEYSTEAAQLFVVDVNVKSSGSVLAGQVNIYSCNYSVLCRSAVIDHMSRIAMYELLADADIQLKGHMARFLLHQVCIIPIEEFSAEYVRPQVHCIASYGRFVNQSATCVSLAHETPPTALILDVLSGRPFPHLPQQSSPSVDVLPGVTLKAPQNQVTLRGRVPHLGRYVFVIHFYQAAHPTFPAQVSVDGGWPRAGSFHASFCPHVLGCRDQVIAEGQIEFDISEPEVAATVKVPEGKSLVLVRVLVVPAENYDYQILHKKSMDKSLEFITNCGKNSFYLDPQTASRFCKNSARSLVAFYHKGALPCECHPTGATGPHCSPEGGQCPCQPNVIGRQCTRCATGHYGFPRCKPCSCGRRLCEEMTGQCRCPPRTVRPQCEVCETHSFSFHPMAGCEGCNCSRRGTIEAAMPECDRDSGQCRCKPRITGRQCDRCASGFYRFPECVPCNCNRDGTEPGVCDPGTGACLCKENVEGTECNVCREGSFHLDPANLKGCTSCFCFGVNNQCHSSHKRRTKFVDMLGWHLETADRVDIPVSFNPGSNSMVADLQELPATIHSASWVAPTSYLGDKVSSYGGYLTYQAKSFGLPGDMVLLEKKPDVQLTGQHMSIIYEETNTPRPDRLHHGRVHVVEGNFRHASSRAPVSREELMTVLSRLADVRIQGLYFTETQRLTLSEVGLEEASDTGSGRIALAVEICACPPAYAGDSCQGCSPGYYRDHKGLYTGRCVPCNCNGHSNQCQDGSGICVNCQHNTAGEHCERCQEGYYGNAVHGSCRACPCPHTNSFATGCVVNGGDVRCSCKAGYTGTQCERCAPGYFGNPQKFGGSCQPCSCNSNGQLGSCHPLTGDCINQEPKDSSPAEECDDCDSCVMTLLNDLATMGEQLRLVKSQLQGLSASAGLLEQMRHMETQAKDLRNQLLNYRSAISNHGSKIEGLERELTDLNQEFETLQEKAQVNSRKAQTLNNNVNRATQSAKELDVKIKNVIRNVHMLNRIRTWQKTHQGENNGLANSIRDSLNEYEAKLSDLRARLQEAAAQAKQANGLNQENERALGAIQRQVKEINSLQSDFTKYLTTADSSLLQTNIALQLMEKSQKEYEKLAASLNEARQELSDKVRELSRSAGKTSLVEEAEKHARSLQELAKQLEEIKRNASGDELVRCAVDAATAYENILNAIKAAEDAANRAASASESALQTVIKEDLPRKAKTLSSNSDKLLNEAKMTQKKLKQEVSPALNNLQQTLNIVTVQKEVIDTNLTTLRDGLHGIQRGDIDAMISSAKSMVRKANDITDEVLDGLNPIQTDVERIKDTYGRTQNEDFKKALTDADNSVNKLTNKLPDLWRKIESINQQLLPLGNISDNMDRIRELIQQARDAASKVAVPMRFNGKSGVEVRLPNDLEDLKGYTSLSLFLQRPNSRENGGTENMFVMYLGNKDASRDYIGMAVVDGQLTCVYNLGDREAELQVDQILTKSETKEAVMDRVKFQRIYQFARLNYTKGATSSKPETPGVYDMDGRNSNTLLNLDPENVVFYVGGYPPDFKLPSRLSFPPYKGCIELDDLNENVLSLYNFKKTFNLNTTEVEPCRRRKEESDKNYFEGTGYARVPTQPHAPIPTFGQTIQTTVDRGLLFFAENGDRFISLNIEDGKLMVRYKLNSELPKERGVGDAINNGRDHSIQIKIGKLQKRMWINVDVQNTIIDGEVFDFSTYYLGGIPIAIRERFNISTPAFRGCMKNLKKTSGVVRLNDTVGVTKKCSEDWKLVRSASFSRGGQLSFTDLGLPPTDHLQASFGFQTFQPSGILLDHQTWTRNLQVTLEDGYIELSTSDSGGPIFKSPQTYMDGLLHYVSVISDNSGLRLLIDDQLLRNSKRLKHISSSRQSLRLGGSNFEGCISNVFVQRLSLSPEVLDLTSNSLKRDVSLGGCSLNKPPFLMLLKGSTRFNKTKTFRINQLLQDTPVASPRSVKVWQDACSPLPKTQANHGALQFGDIPTSHLLFKLPQELLKPRSQFAVDMQTTSSRGLVFHTGTKNSFMALYLSKGRLVFALGTDGKKLRIKSKEKCNDGKWHTVVFGHDGEKGRLVVDGLRAREGSLPGNSTISIRAPVYLGSPPSGKPKSLPTNSFVGCLKNFQLDSKPLYTPSSSFGVSSCLGGPLEKGIYFSEEGGHVVLAHSVLLGPEFKLVFSIRPRSLTGILIHIGSQPGKHLCVYLEAGKVTASMDSGAGGTSTSVTPKQSLCDGQWHSVAVTIKQHILHLELDTDSSYTAGQIPFPPASTQEPLHLGGAPANLTTLRIPVWKSFFGCLRNIHVNHIPVPVTEALEVQGPVSLNGCPDQ

SEQ ID NO: 11673 - protein, 248 aa, Homo sapiens
MKLTFFLGLLALISCFTPSESQRFSRRPYLPGQLPPPPLYRPRWVPPSPPPPYDSRLNSPLSLPFVPGRVPPSSFSRFSQAVILSQLFPLESIRQPRLFPGYPNLHFPLRPYYVGPIRILKPPFPPIPFFLAIYLPISNPEPQINITTADTTITTNPPTTATATTSTSTKPTMTISSSTVPISSTPEPATSISAATPAASTENTTQILANRPHTVLLNATVQVTTSNQTILSSPAFKSFWQKLFAIFG

SEQ ID NO: 11674 - protein, 552 aa, Homo sapiens
MGSILSRRIAGVEDIDIQANSAYRYPPKSGNYFASHFFMGGEKFDTPHPEGYLFGENMDLNFLGSRPVQFPYVTPAPHEPVKTLRSLVNIRKDSLRLVRYKDDADSPTEDGDKPRVLYSLEFTFDADARVAITIYCQASEEFLNGRAVYSPKSPSLQSETVHYKRGVSQQFSLPSFKIDFSEWKDDELNFDLDRGVFPVVIQAVVDEGDVVEVTGHAHVLLAAFEKHMDGSFSVKPLKQKQIVDRVSYLLQEIYGIENKNNQETKPSDDENSDNSNECVVCLSDLRDTLILPCRHLCLCTSCADTLRYQANNCPICRLPFRALLQIRAVRKKPGALSPVSFSPVLAQSLEHDEHSCPFKKSKPHPASLASKKPKRETNSDSVPPGYEPISLLEALNGLRAVSPAIPSAPLYEEITYSGISDGLSQASCPLAAIDHILDSSRQKGRPQSKAPDSTLRSPSSPIHEEDEEKLSEDVDAPPPLGGAELALRESSSPESFITEEVDESSSPQQGTRAASIENVLQDSSPEHCGRGPPADIYLPALGPDSCSVGIDE

SEQ ID NO: 11675 - protein, 331 aa, Homo sapiens
MAEGGGPEPGEQERRSSGPRPPSARDLQLALAELYEDEVKCKSSKSNRPKATVFKSPRTPPQRFYSSEHEYSGLNIVRPSTGKIVNELFKEAREHGAVPLNEATRASGDDKSKSFTGGGYRLGSSFCKRSEYIYGENQLQDVQILLKLWSNGFSLDDGELRPYNEPTNAQFLESVKRGEIPLELQRLVHGGQVNLDMEDHQDQEYIKPRLRFKAFSGEGQKLGSLTPEIVSTPSSPEEEDKSILNAVVLIDDSVPTTKIQIRLADGSRLIQRFNSTHRILDVRNFIVQSRPEFAALDFILVTSFPNKELTDESLTLLEADILNTVLLQQLK

SEQ ID NO: 11676 - protein, 208 aa, Homo sapiens
MSSEPPPPYPGGPTAPLLEEKSGAPPTPGRSSPAVMQPPPGMPLPPADIGPPPYEPPGHPMPQPGFIPPHMSADGTYMPPGFYPPPGPHPPMGYYPPGPYTPGPYPGPGGHTATVLVPSGAATTVTVLQGEIFEGAPVQTVCPHCQQAITTKISYEIGLMNFVLGFFCCFMGCDLGCCLIPCLINDFKDVTHTCPSCKAYIYTYKRLC

SEQ ID NO: 11677 - protein, 473 aa, Homo sapiens
MRALVLLGCLLASLLFSGQAEETEDANEEAPLRDRSHIEKTLMLNEDKPSDDYSAVLQRLRKIYHSSIKPLEQSYKYNELRQHEITDGEITSKPMVLFLGPWSVGKSTMINYLLGLENTRYQLYTGAEPTTSEFTVLMHGPKLKTIEGIVMAADSARSFSPLEKFGQNFLEKLIGIEVPHKLLERVTFVDTPGIIENRKQQERGYPFNDVCQWFIDRADLIFVVFDPTKLDVGLELEMLFRQLKGRESQIRIILNKADNLATQMLMRVYGALFWSLAPLINVTEPPRVYVSSFWPQEYKPDTHQELFLQEEISLLEDLNQVIENRLENKIAFIRQHAIRVRIHALLVDRYLQTYKDKMTFFSDGELVFKDIVEDPDKFYIFKTILAKTNVSKFDLPNREAYKDFFGINPISSFKLLSQQCSYMGGCFLEKIERAITQELPGLLGSLGLGKNPGALNCDKTGCSETPKNRYRKH

SEQ ID NO: 11678 - protein, 687 aa, Homo sapiens
MDGGALTDTSLTDSYFSTSFIGVNGFGSPVETKYPLMQRMTNSSSSPSLLNDSAKPYSAHDPLTSPASSLFNDFGALNISQRRKTPNPTASEFIPKGGSTSRLSNVSQSNMSAFSQVFSHPSMGSPATAGLAPGMSLSAGSSPLHSPKITPHTSPAPRRRSHTPNPASYMVPSSASTSVNNPVSQTPSSGQVIQKETVGGTTYFYTDTTPAPLTGMVFPNYHIYPPTAPHVAYMQPKANAPSFFMADELRQELINRHLITMAQIDQADMPAVPTEVDSYHSLFPLEPLPPPNRIQKSSNFGYITSCYKAVNSKDDLPYCLRRIHGFRLVNTKCMVLVDMWKKIQHSNIVTLREVFTTKAFAEPSLVFAYDFHAGGETMMSRHFNDPNADAYFTKRKWGQHEGPLPRQHAGLLPESLIWAYIVQLSSALRTIHTAGLACRVMDPTKILITGKTRLRVNCVGVFDVLTFDNSQNNNPLALMAQYQQADLISLGKVVLALACNSLAGIQRENLQKAMELVTINYSSDLKNLILYLLTDQNRMRSVNDIMPMIGARFYTQLDAAQMRNDVIEEDLAKEVQNGRLFRLLAKLGTINERPEFQKDPTWSETGDRYLLKLFRDHLFHQVTEAGAPWIDLSHIISCLNKLDAGVPEKISLISRDEKSVLVVTYSDLKRCFENTFQELIAAANGQL

SEQ ID NO: 11679 - protein, 122 aa, Homo sapiens
MEEDQELERKAIEELLKEAKRGKTRAETMGPMGWMKCPLASTNKRFLINTIKNTLPSHKEQDHEQKEGDKEPAKSQAQKEENPKKHRSHPYKHSFRARGSASYSPPRKRSSQDKYEKRSNRR

SEQ ID NO: 11680 - protein, 195 aa, Homo sapiens
MDCEVNNGSSLRDECITNLLVFGFLQSCSDNSFRRELDALGHELPVLAPQWEGYDELQTDGNRSSHSRLGRIEADSESQEDIIRNIARHLAQVGDSMDRSIPPGLVNGLALQLRNTSRSEEDRNRDLATALEQLLQAYPRDMEKEKTMLVLALLLAKKVASHTPSLLRDVFHTTVNFINQNLRTYVRSLARNGMD

SEQ ID NO: 11681 - protein, 201 aa, Homo sapiens
MASSSTVPLGFHYETKYVVLSYLGLLSQEKLQEQHLSSPQGVQLDIASQSLDQEILLKVKTEIEEELKSLDKEISEAFTSTGFDRHTSPVFSPANPESSMEDCLAHLGEKVSQELKEPLHKALQMLLSQPVTYQAFRECTLETTVHASGWNKILVPLVLLRQMLLELTRRGQEPLSALLQFGVTYLEDYSAEYIIQQGGWV

SEQ ID NO: 11682 - protein, 1690 aa, Homo sapiens
MAGVGPGGYAAEFVPPPECPVFEPSWEEFTDPLSFIGRIRPLAEKTGICKIRPPKDWQPPFACEVKSFRFTPRVQRLNELEAMTRVRLDFLDQLAKFWELQGSTLKIPVVERKILDLYALSKIVASKGGFEMVTKEKKWSKVGSRLGYLPGKGTGSLLKSHYERILYPYELFQSGVSLMGVQMPNLDLKEKVEPEVLSTDTQTSPEPGTRMNILPKRTRRVKTQSESGDVSRNTELKKLQIFGAGPKVVGLAMGTKDKEDEVTRRRKVTNRSDAFNMQMRQRKGTLSVNFVDLYVCMFCGRGNNEDKLLLCDGCDDSYHTFCLIPPLPDVPKGDWRCPKCVAEECSKPREAFGFEQAVREYTLQSFGEMADNFKSDYFNMPVHMVPTELVEKEFWRLVSSIEEDVIVEYGADISSKDFGSGFPVKDGRRKILPEEEEYALSGWNLNNMPVLEQSVLAHINVDISGMKVPWLYVGMCFSSFCWHIEDHWSYSINYLHWGEPKTWYGVPSHAAEQLEEVMRELAPELFESQPDLLHQLVTIMNPNVLMEHGVPVYRTNQCAGEFVVTFPRAYHSGFNQGYNFAEAVNFCTADWLPIGRQCVNHYRRLRRHCVFSHEELIFKMAADPECLDVGLAAMVCKELTLMTEEETRLRESVVQMGVLMSEEEVFELVPDDERQCSACRTTCFLSALTCSCNPERLVCLYHPTDLCPCPMQKKCLRYRYPLEDLPSLLYGVKVRAQSYDTWVSRVTEALSANFNHKKDLIELRVMLEDAEDRKYPENDLFRKLRDAVKEAETCASVAQLLLSKKQKHRQSPDSGRTRTKLTVEELKAFVQQLFSLPCVISQARQVKNLLDDVEEFHERAQEAMMDETPDSSKLQMLIDMGSSLYVELPELPRLKQELQQARWLDEVRLTLSDPQQVTLDVMKKLIDSGVGLAPHHAVEKAMAELQELLTVSERWEEKAKVCLQARPRHSVASLESIVNEAKNIPAFLPNVLSLKEALQKAREWTAKVEAIQSGSNYAYLEQLESLSAKGRPIPVRLEALPQVESQVAAARAWRERTGRTFLKKNSSHTLLQVLSPRTDIGVYGSGKNRRKKVKELIEKEKEKDLDLEPLSDLEEGLEETRDTAMVVAVFKEREQKEIEAMHSLRAANLAKMTMVDRIEEVKFCICRKTASGFMLQCELCKDWFHNSCVPLPKSSSQKKGSSWQAKEVKFLCPLCMRSRRPRLETILSLLVSLQKLPVRLPEGEALQCLTERAMSWQDRARQALATDELSSALAKLSVLSQRMVEQAAREKTEKIISAELQKAAANPDLQGHLPSFQQSAFNRVVSSVSSSPRQTMDYDDEETDSDEDIRETYGYDMKDTASVKSSSSLEPNLFCDEEIPIKSEEVVTHMWTAPSFCAEHAYSSASKSCSQGSSTPRKQPRKSPLVPRSLEPPVLELSPGAKAQLEELMMVGDLLEVSLDETQHIWRILQATHPPSEDRFLHIMEDDSMEEKPLKVKGKDSSEKKRKRKLEKVEQLFGEGKQKSKELKKMDKPRKKKLKLGADKSKELNKLAKKLAKEEERKKKKEKAAAAKVELVKESTEKKREKKVLDIPSKYDWSGAEESDDENAVCAAQNCQRPCKDKVDWVQCDGGCDEWFHQVCVGVSPEMAENEDYICINCAKKQGPVSPGPAPPPSFIMSYKLPMEDLKETS

SEQ ID NO: 11683 - protein, 196 aa, Homo sapiens
MALSDADVQKQIKHMMAFIEQEANEKAEEIDAKAEEEFNIEKGRLVQTQRLKIMEYYEKKEKQIEQQKKIQMSNLMNQARLKVLRARDDLITGLYQLLEPRMIVRCRKQDFPLVKAAVQKAIPMYKIATKNDVDVQIDQESYLPEDIAGGVEIYNGDRKIKVSNTLESRLDLIAQQMMPEVRGALFGANANRKFLD

SEQ ID NO: 11684 - protein, 1354 aa, Homo sapiens
MSTGDSFETRFEKMDNLLRDPKSEVNSDCLLDGLDALVYDLDFPALRKNKNIDNFLSRYKDTINKIRDLRMKAEDYEVVKVIGRGAFGEVQLVRHKSTRKVYAMKLLSKFEMIKRSDSAFFWEERDIMAFANSPWVVQLFYAFQDDRYLYMVMEYMPGGDLVNLMSNYDVPEKWARFYTAEVVLALDAIHSMGFIHRDVKPDNMLLDKSGHLKLADFGTCMKMNKEGMVRCDTAVGTPDYISPEVLKSQGGDGYYGRECDWWSVGVFLYEMLVGDTPFYADSLVGTYSKIMNHKNSLTFPDDNDISKEAKNLICAFLTDREVRLGRNGVEEIKRHLFFKNDQWAWETLRDTVAPVVPDLSSDIDTSNFDDLEEDKGEEETFPIPKAFVGNQLPFVGFTYYSNRRYLSSANPNDNRTSSNADKSLQESLQKTIYKLEEQLHNEMQLKDEMEQKCRTSNIKLDKIMKELDEEGNQRRNLESTVSQIEKEKMLLQHRINEYQRKAEQENEKRRNVENEVSTLKDQLEDLKKVSQNSQLANEKLSQLQKQLEEANDLLRTESDTAVRLRKSHTEMSKSISQLESLNRELQERNRILENSKSQTDKDYYQLQAILEAERRDRGHDSEMIGDLQARITSLQEEVKHLKHNLEKVEGERKEAQDMLNHSEKEKNNLEIDLNYKLKSLQQRLEQEVNEHKVTKARLTDKHQSIEEAKSVAMCEMEKKLKEEREAREKAENRVVQIEKQCSMLDVDLKQSQQKLEHLTGNKERMEDEVKNLTLQLEQESNKRLLLQNELKTQAFEADNLKGLEKQMKQEINTLLEAKRLLEFELAQLTKQYRGNEGQMRELQDQLEAEQYFSTLYKTQVKELKEEIEEKNRENLKKIQELQNEKETLATQLDLAETKAESEQLARGLLEEQYFELTQESKKAASRNRQEITDKDHTVSRLEEANSMLTKDIEILRRENEELTEKMKKAEEEYKLEKEEEISNLKAAFEKNINTERTLKTQAVNKLAEIMNRKDFKIDRKKANTQDLRKKEKENRKLQLELNQEREKFNQMVVKHQKELNDMQAQLVEECAHRNELQMQLASKESDIEQLRAKLLDLSDSTSVASFPSADETDGNLPESRIEGWLSVPNRGNIKRYGWKKQYVVVSSKKILFYNDEQDKEQSNPSMVLDIDKLFHVRPVTQGDVYRAETEEIPKIFQILYANEGECRKDVEMEPVQQAEKTNFQNHKGHEFIPTLYHFPANCDACAKPLWHVFKPPPALECRRCHVKCHRDHLDKKEDLICPCKVSYDVTSARDMLLLACSQDEQKKWVTHLVKKIPKNPPSGFVRASPRTLSTRSTANQSFRKVVKNTSGKTS

SEQ ID NO: 11685 - protein, 1125 aa, Homo sapiens
MDAVNAFNQELFSLMDMKPPISRAKMILITKAAIKAIKLYKHVVQIVEKFIKKCKPEYKVPGLYVIDSIVRQSRHQFGTDKDVFGPRFSKNITATFQYLYLCPSEDKSKIVRVLNLWQKNGVFKIEIIQPLLDMAAGTSNAAPVAENVTNNEGSPPPPVKVSSEPPTQATPNSVPAVPQLPSSDAFAAVAQLFQTTQGQQLQQILQTFQQPPKPQSPALDNAVMAQVQAITAQLKTTPTQPSEQKAAFPPPEQKTAFDKKLLDRFDYDDEPEAVEESKKEDTTAVTTTAPAAAVPPAPTATVPAAAAPAAASPPPPQAPFGFPGDGMQQPAYTQHQNMDQFQPRMMGIQQDPMHHQVPLPPNGQMPGFGLLPTPPFPPMAQPVIPPTPPVQQPFQASFQAQNEPLTQKPHQQEMEVEQPCIQEVKRHMSDNRKSRSRSASRSPKRRRSRSGSRSRRSRHRRSRSRSRDRRRHSPRSRSQERRDREKERERRQKGLPQVKPETASVCSTTLWVGQLDKRTTQQDVASLLEEFGPIESINMIPPRGCAYIVMVHRQDAYRALQKLSRGNYKVNQKSIKIAWALNKGIKADYKQYWDVELGVTYIPWDKVKPEELESFCEGGMLDSDTLNPDWKGIPKKPENEVAQNGGAETSHTEPVSPIPKPLPVPVPPIPVPAPITVPPPQVPPHQPGPPVVGALQPPAFTPPLGIPPPGFGPGVPPPPPPPPFLRPGFNPMHLPPGFLPPGPPPPITPPVSIPPPHTPPISIPNLVSGARGNAESGDSVKMYGSAVPPAAPTNLPTPPVTQPVSLLGTQGVAPGPVIGLQAPSTGLLGARPGLIPLQRPPGMPPPHLQRFPLMPPRPMPPHMMHRGPPPGPGGFAMPPPHGMKGPFPPHGPFVRPGGMPGLGGPGPGPGGPEDRDGRQQPPQQPQQQPQPQAPQQPQQQQQQQPPPSQQPPPTQQQPQQFRNDNRQQFNSGRDQERFGRRSFGNRVENDRERYGNRNDDRDNSNRDRREWGRRSPDRDRHRDLEERNRRSSGHRDRERDSRDRESRREKEEARGKEKPEVTDRAGGNKTVEPPISQVGNVDTASELEKGVSEAAVLKPSEELPAEATSSVEPEKDSGSAAEAPR

SEQ ID NO: 11686 - protein, 133 aa, Homo sapiens
MNHTVQTFFSPVNSGQPPNYEMLKEEHEVAVLGAPHNPAPPTSTVIHIRSETSVPDHVVWSLFNTLFMNPCCLGFIAFAYSVKSRDRKMVGDVTGAQAYASTAKCLNIWALILGILMTILLIVIPVLIFQAYG

SEQ ID NO: 11687 - protein, 132 aa, Homo sapiens
MNHIVQTFSPVNSGQPPNYEMLKEEQEVAMLGVPHNPAPPMSTVIHIRSETSVPDHVVWSLFNTLFMNTCCLGFIAFAYSVKSRDRKMVGDVTGAQAYASTAKCLNIWALILGIFMTILLIIIPVLVVQAQR

SEQ ID NO: 11688 - protein, 1342 aa, Homo sapiens
MKRIFSLLEKTWLGAPIQFAWQKTSGNYLAVTGADYIVKIFDRHGQKRSEINLPGNCVAMDWDKDGDVLAVIAEKSSCIYLWDANTNKTSQLDNGMRDQMSFLLWSKVGSFLAVGTVKGNLLIYNHQTSRKIPVLGKHTKRITCGCWNAENLLALGGEDKMITVSNQEGDTIRQTQVRSEPSNMQFFLMKMDDRTSAAESMISVVLGKKTLFFLNLNEPDNPADLEFQQDFGNIVCYNWYGDGRIMIGFSCGHFVVISTHTGELGQEIFQARNHKDNLTSIAVSQTLNKVATCGDNCIKIQDLVDLKDMYVILNLDEENKGLGTLSWTDDGQLLALSTQRGSLHVFLTKLPILGDACSTRIAYLTSLLEVTVANPVEGELPITVSVDVEPNFVAVGLYHLAVGMNNRAWFYVLGENAVKKLKDMEYLGTVASICLHSDYAAALFEGKVQLHLIESEILDAQEERETRLFPAVDDKCRILCHALTSDFLIYGTDTGVVQYFYIEDWQFVNDYRHPVSVKKIFPDPNGTRLVFIDEKSDGFVYCPVNDATYEIPDFSPTIKGVLWENWPMDKGVFIAYDDDKVYTYVFHKDTIQGAKVILAGSTKVPFAHKPLLLYNGELTCQTQSGKVNNIYLSTHGFLSNLKDTGPDELRPMLAQNLMLKRFSDAWEMCRILNDEAAWNELARACLHHMEVEFAIRVYRRIGNVGIVMSLEQIKGIEDYNLLAGHLAMFTNDYNLAQDLYLASSCPIAALEMRRDLQHWDSALQLAKHLAPDQIPFISKEYAIQLEFAGDYVNALAHYEKGITGDNKEHDEACLAGVAQMSIRMGDIRRGVNQALKHPSRVLKRDCGAILENMKQFSEAAQLYEKGLYYDKAASVYIRSKNWAKVGDLLPHVSSPKIHLQYAKAKEADGRYKEAVVAYENAKQWQSVIRIYLDHLNNPEKAVNIVRETQSLDGAKMVARFFLQLGDYGSAIQFLVMSKCNNEAFTLAQQHNKMEIYADIIGSEDTTNEDYQSIALYFEGEKRYLQAGKFFLLCGQYSRALKHFLKCPSSEDNVAIEMAIETVGQAKDELLTNQLIDHLLGENDGMPKDAKYLFRLYMALKQYREAAQTAIIIAREEQSAGNYRNAHDVLFSMYAELKSQKIKIPSEMATNLMILHSYILVKIHVKNGDHMKGARMLIRVANNISKFPSHIVPILTSTVIECHRAGLKNSAFSFAAMLMRPEYRSKIDAKYKKKIEGMVRRPDISEIEEATTPCPFCKFLLPECELLCPGCKNSIPYCIATGRHMLKDDWTVCPHCDFPALYSELKIMLNTESTCPMCSERLNAAQLKKISDCTQYLRTEEEL

SEQ ID NO: 11689 - protein, 155 aa, Homo sapiens
MFRLWLLLAGLCGLLASRPGFQNSLLQIVIPEKIQTNTNDSSEIEYEQISYIIPIDEKLYTVHLKQRYFLADNFMIYLYNQGSMNTYSSDIQTQCYYQGNIEGYPDSMVTLSTCSGLRSLKEQPMDDNIFISEKSEPAVPDLFPLYLEMHIVVDK

SEQ ID NO: 11690 - protein, 714 aa, Homo sapiens
MLDTMEAPGHSRQLLLQLNNQRTKGFLCDVIIVVQNALFRAHKNVLAASSAYLKSLVVHDNLLNLDHDMVSPAVFRLVLDFIYTGRLADGAEAAAAAAVAPGAEPSLGAVLAAASYLQIPDLVALCKKRLKRHGKYCHLRGGGGGGGGYAPYGRPGRGLRAATPVIQACYPSPVGPPPPPAAEPPSGPEAAVNTHCAELYASGPGPAAALCASERRCSPLCGLDLSKKSPPGSAAPERPLAERELPPRPDSPPSAGPAAYKEPPLALPSLPPLPFQKLEEAAPPSDPFRGGSGSPGPEPPGRPDGPSLLYRWMKHEPGLGSYGDELGRERGSPSERCEERGGDAAVSPGGPPLGLAPPPRYPGSLDGPGAGGDGDDYKSSSEETGSSEDPSPPGGHLEGYPCPHLAYGEPESFGDNLYVCIPCGKGFPSSEQLNAHVEAHVEEEEALYGRAEAAEVAAGAAGLGPPFGGGGDKVAGAPGGLGELLRPYRCASCDKSYKDPATLRQHEKTHWLTRPYPCTICGKKFTQRGTMTRHMRSHLGLKPFACDACGMRFTRQYRLTEHMRIHSGEKPYECQVCGGKFAQQRNLISHMKMHAVGGAAGAAGALAGLGGLPGVPGPDGKGKLDFPEGVFAVARLTAEQLSLKQQDKAAAAELLAQTTHFLHDPKVALESLYPLAKFTAELGLSPDKAAEVLSQGAHLAAGPDGRTIDRFSPT

SEQ ID NO: 11691 - protein, 423 aa, Homo sapiens
MASDDFDIVIEAMLEAPYKKEEDEQQRKEVKKDYPSNTTSSTSNSGNETSGSSTIGETSNRSRDRDRYRRRNSRSRSPGRQCRHRSRSWDRRHGSESRSRDHRREDRVHYRSPPLATGYRYGHSKSPHFREKSPVREPVDNLSPEERDARTVFCMQLAARIRPRDLEDFFSAVGKVRDVRIISDRNSRRSKGIAYVEFCEIQSVPLAIGLTGQRLLGVPIIVQASQAEKNRLAAMANNLQKGNGGPMRLYVGSLHFNITEDMLRGIFEPFGKIDNIVLMKDSDTGRSKGYGFITFSDSECARRALEQLNGFELAGRPMRVGHVTERLDGGTDITFPDGDQELDLGSAGGRFQLMAKLAEGAGIQLPSTAAAAAAAAAQAAALQLNGAVPLGALNPAALTALSPALNLASQCFQLSSLFTPQTM

SEQ ID NO: 11692 - protein, 2103 aa, Homo sapiens
MSVPGTPGAMEPAGEEERPPPAAEGEDDEEEVAAAAQTSGPAHGRSASSLEDADDQEEEMEAMVIGGGCCKEQELTYELQQGYRILGEFLQEKHRGLTAPFLQPLGGVATAEEEVAEGPRSGGRGGRAFPQQPGQGMCLLQMEEKFASGQYGGITEFVADFRLMLETCYRLHGVDHWISKQGQKLEMMLEQKLALLSRHLREKTTIAVTSRGYYGLEDEKGTACTSTRRRSTPRSLAGLTSGVFESIMVQVLRQEEQLRAKEEKRLREQERKEAEEASQKEIEEWERKLLAQAAPTCMETMWEIPAIGHFLCLAQQILNLPEIVFYELERCLLMPQCNAFLSKIMTSLLSPPHRRPTLHRRPTLPYRTWEAALRQKVQQWYTAVGQTENPDNCAEKLGLCPQFFKVLGEVNPLEEKPFHELPFYQKVWLLKGLCDFVYETQKEVQDAVLGQPIHECREVILGYDYLENAYVHFPQFCGADVRIYKQRPFQAPEFPIPPIKIQRVPRIKLEKLKCDYVSTSNGEHRCSRDSLPSSFKKEQENNFDPACCPAKMILDNHDISVEMGVKSNYEIRIRRPCEIKKTDCCKENLEKPRSPGEVTGFGEPLSPGEIRFIENQEKYGEASRIKIEPSPLKENTLKSCQIHVNGSHSDHPEINCHKVVRDILLEQSLQSHKKLKLTKMRAKKKKKKKKKLKDVLNENLQRKREGLHSLAFKSYKPEIQNKLLIIKKKAKHKKHKSGKKSVSKKAITKKRKTVIKSPTVPEFQLICTNLDELRELITKIENELKDLENSRKKSGKWYHRRQAVKELHSTLIRLLNELLPWEPKLMKAFQRNRSRLKKDYDDFRRQPDHDTFNRELWTTDEGEGDLGKDSPKGEISKSIDSTEPLDILEKDHFDSDDMKLSEIDFPMARSKLLKKELPSKDLPKTLLKTLKRQSKQTDYVDDSTKELSPRKKAKLSTNETTVENLESDVQIDCFSESKHTEPSFPESFASLDSVPVSTLQKGTKPIQALLAKNIGNKVTLTNQLPPSTGRNALAVEKPVLSPPEASPIKPALTCHTNTKGPLQMVYKMPCGQWLPIDLQNSSVKIQVQPMVDPKTGEKIMQQVLILPKNFVIQHKEGKAVAKEVPPLQQKGTEQHCSSFPQTTNINSSLASVFVNSPGTVSTQLPNTAFNKTITPLSNISSARPQPLSPVTSVSNLLTPSVKTSQSEAGKAKNAVSAATFSLPSASPTISSTGQPLSSTTTLNGSTNPGSSFNCFAQQTADSSEAKQELKTVCIRDSQSILVRTRGGNTGVVKVQTNPDQNSPNTVSSSSVFTFAPQLQAFLVPKSTTSSSAFSPVAGTTTTSSLSPFSQTPTSVSIPASFAPSMGKNLKLTLGHTTGSGDLGHVIDKTSHMPSSPLKSSICSSTLLPSTTSSSVSVISISAANFGQNNANIIHTPTKQQQVDYITKSYPVTRSEATAATNGDVISGTPVQKLMLVSAPSILSSGNGTAINMTPALTSTGVSAQKLVFINAPVPSGTSTPTLVAESLKQTLPPPLHKAYVKTPEQPQIVLIPSTVGTPIKINSSPAVSQIKDVKIGLNIGQAIVNTSGTVPAIPSINILQNVTPKGEDKSSKGYILPLSTSGNSVPVSSNFVSQNITPVNESVVSSARAVNVLSVTGANLSLGSFPVTSASASAGAQPPVLVSGNDTSSRIMPILSNRLCSSSLGNTVAISTVKTGHLASSVLISTTQPVVSPKCLTSALQIPVTVALPTPATTSPKIINTVPHSAAVPGATRSVSISKRQSRTSLQFHSPGISTTVPTNVNTNKPQTELSSLSTSPGKITNTSNFASLPNQQALVKTPSYSSAPGGTTIHTASAPSNVTSLVGSQFSEPCIQQKIVINTSTPLAPGTQIMINGTRFIVPPQGLGAGSHVLLISTNPKYGAPLVLNSGQGIQSTPIDNSAQKITLASNNSLSGQPLQHPLRSPTKFINSFGNASSIPTVHTSPQLINTTAKVPVPPPVPTVSLTSVIKSPATLLAKTSLVSAICPSNPPLPSSTSVFHLDPPVKKLLVSPEGAILNTINTPASKVSSLSPSLSQIVVSASRSPASVFPAFQSSGLEKPDRAAS

SEQ ID NO: 11693 - protein, 822 aa, Homo sapiens
MGKKRTKGKTVPIDDSSETLEPVCRHIRKGLEQGNLKKALVNVEWNICQDCKTDNKVKDKAEEETEEKPSVWLCLKCGHQGCGRNSQEQHALKHYLTPRSEPHCLVLSLDNWSVWCYVCDNEVQYCSSNQLGQVVDYVRKQASITTPKPEKDNGNIELENKKLEKESKNEQEREKKENMAKENPPMNSPCQITVKGLSNLGNTCFFNAVMQNLSQTPVLRELLKEVKMSGTIVKIEPPDLALTEPLEINLEPPGPLTLAMSQFLNEMQETKKGVVTPKELFSQVCKKAVRFKGYQQQDSQELLRYLLDGMRAEEHQRVSKGILKAFGNSTEKLDEELKNKVKDYEKKKSMPSFVDRIFGGELTSMIMCDQCRTVSLVHESFLDLSLPVLDDQSGKKSVNDKNLKKTVEDEDQDSEEEKDNDSYIKERSDIPSGTSKHLQKKAKKQAKKQAKNQRRQQKIQGKVLHLNDICTIDHPEDSEYEAEMSLQGEVNIKSNHISQEGVMHKEYCVNQKDLNGQAKMIESVTDNQKSTEEVDMKNINMDNDLEVLTSSPTRNLNGAYLTEGSNGEVDISNGFKNLNLNAALHPDEINIEILNDSHTPGTKVYEVVNEDPETAFCTLANREVFNTDECSIQHCLYQFTRNEKLRDANKLLCEVCTRRQCNGPKANIKGERKHVYTNAKKQMLISLAPPVLTLHLKRFQQAGFNLRKVNKHIKFPEILDLAPFCTLKCKNVAEENTRVLYSLYGVVEHSGTMRSGHYTAYAKARTANSHLSNLVLHGDIPQDFEMESKGQWFHISDTHVQAVPTTKVLNSQAYLLFYERIL

SEQ ID NO: 11694 - protein, 205 aa, Homo sapiens
MENFSTMSKSAVKISLDLLSNPLCEQDQDLLNMVTALDTAMKRMDAFNQEKVNQIQKTVIEPLKKFGSVFPSLNMAVKRREQALQDYRRLQAKVEKYEEKEKTGPVLAKLHQAREELRPVREDFEAKNRQLLEEMPRFYGSRLDYFQPSFESLIRAQVVYYSEMHKIFGDLSHQLDQPGHSDEQRERENEAKLSELRALSIVADD

SEQ ID NO: 11695 - protein, 2581 aa, Homo sapiens
MADPIMDLFDDPNLFGLDSLTDDSFNQVTQDPIEEALGLPSSLDSLDQMNQDGGGGDVGNSSASELVPPPEETAPTELSKESTAPAPESITLHDYTTQPASQEQPAQPVLQTSTPTSGLLQVSKSQEILSQGNPFMGVSATAVSSSSAGGQPPQSAPKIVILKAPPSSSVTGAHVAQIQAQGITSTAQPLVAGTANGGKVTFTKVLTGTPLRPGVSIVSGNTVLAAKVPGNQAAVQRIVQPSRPVKQLVLQPVKGSAPAGNPGATGPPLKPAVTLTSTPTQGESKRITLVLQQPQSGGPQGHRHVVLGSLPGKIVLQGNQLAALTQAKNAQGQPAKVVTIQLQVQQPQQKIQIVPQPPSSQPQPQQPPSTQPVTLSSVQQAQIMGPGQSPGQRLSVPVKVVLQPQAGSSQGASSGLSVVKVLSASEVAALSSPASSAPHSGGKTGMEENRRLEHQKKQEKANRIVAEAIARARARGEQNIPRVLNEDELPSVRPEEEGEKKRRKKSAGERLKEEKPKKSKTSGASKTKGKSKLNTITPVVGKKRKRNTSSDNSDVEVMPAQSPREDEESSIQKRRSNRQVKRKKYTEDLDIKITDDEEEEEVDVTGPIKPEPILPEPVQEPDGETLPSMQFFVENPSEEDAAIVDKVLSMRIVKKELPSGQYTEAEEFFVKYKNYSYLHCEWATISQLEKDKRIHQKLKRFKTKMAQMRHFFHEDEEPFNPDYVEVDRILDESHSIDKDNGEPVIYYLVKWCSLPYEDSTWELKEDVDEGKIREFKRIQSRHPELKRVNRPQASAWKKLELSHEYKNRNQLREYQLEGVNWLLFNWYNRQNCILADEMGLGKTIQSIAFLQEVYNVGIHGPFLVIAPLSTITNWEREFNTWTEMNTIVYHGSLASRQMIQQYEMYCKDSRGRLIPGAYKFDALITTFEMILSDCPELREIEWRCVIIDEAHRLKNRNCKLLDSLKHMDLEHKVLLTGTPLQNTVEELFSLLHFLEPSQFPSESEFLKDFGDLKTEEQVQKLQAILKPMMLRRLKEDVEKNLAPKQETIIEVELTNIQKKYYRAILEKNFSFLSKGAGHTNMPNLLNTMMELRKCCNHPYLINGAEEKILTEFREACHIIPHDFHLQAMVRSAGKLVLIDKLLPKLKAGGHKVLIFSQMVRCLDILEDYLIQRRYLYERIDGRVRGNLRQAAIDRFSKPDSDRFVFLLCTRAGGLGINLTAADTCIIFDSDWNPQNDLQAQARCHRIGQSKAVKVYRLITRNSYEREMFDKASLKLGLDKAVLQSMSGRDGNITGIQQFSKKEIEDLLRKGAYAAIMEEDDEGSKFCEEDIDQILLRRTTTITIESEGKGSTFAKASFVASENRTDISLDDPNFWQKWAKKADLDMDLLNSKNNLVIDTPRVRKQTRHFSTLKDDDLVEFSDLESEDDERPRSRRHDRHHAYGRTDCFRVEKHLLVYGWGRWRDILSHGRFKRRMTERDVETICRAILVYCLLHYRGDENIKGFIWDLISPAENGKTKELQNHSGLSIPVPRGRKGKKVKSQSTFDIHKADWIRKYNPDTLFQDESYKKHLKHQCNKVLLRVRMLYYLRQEVIGDQAEKVLGGAIASEIDIWFPVVDQLEVPTTWWDSEADKSLLIGVFKHGYEKYNTMRADPALCFLEKAGRPDDKAIAAEHRVLDNFSDIVEGVDFDKDCEDPEYKPLQGPPKDQDDEGDPLMMMDEEISVIDGDEAQVTQQPGHLFWPPGSALTARLRRLVTAYQRSYKREQMKIEAAERGDRRRRRCEAAFKLKEIARREKQQRWTRREQTDFYRVVSTFGVEYDPDTMQFHWDRFRTFARLDKKTDESLTKYFHGFVAMCRQVCRLPPAAGDEPPDPNLFIEPITEERASRTLYRIELLRRLREQVLCHPLLEDRLALCQPPGPELPKWWEPVRHDGELLRGAARHGVSQTDCNIMQDPDFSFLAARMNYMQNHQAGAPAPSLSRCSTPLLHQQYTSRTASPLPLRPDAPVEKSPEETATQVPSLESLTLKLEHEVVARSRPTPQDYEMRVSPSDTTPLVSRSVPPVKLEDEDDSDSELDLSKLSPSSSSSSSSSSSSSSTDESEDEKEEKLTDQSRSKLYDEESLLSLTMSQDGFPNEDGEQMTPELLLLQERQRASEWPKDRVLINRIDLVCQAVLSGKWPSSRRSQEMVTGGILGPGNHLLDSPSLTPGEYGDSPVPTPRSSSAASMAEEEASAVSTAAAQFTKLRRGMDEKEFTVQIKDEEGLKLTFQKHKLMANGVMGDGHPLFHKKKGNRKKLVELEVECMEEPNHLDVDLETRIPVINKVDGTLLVGEDAPRRAELEMWLQGHPEFAVDPRFLAYMEDRRKQKWQRCKKNNKAELNCLGMEPVQTANSRNGKKGHHTETVFNRVLPGPIAPESSKKRARRMRPDLSKMMALMQGGSTGSLSLHNTFQHSSSGLQSVSSLGHSSATSASLPFMPFVMGGAPSSPHVDSSTMLHHHHHHPHPHHHHHHHPGLRAPGYPSSPVTTASGTTLRLPPLQPEEDDDEDEEDDDDLSQGYDSSERDFSLIDDPMMPANSDSSEDADD

SEQ ID NO: 11696 - protein, 249 aa, Homo sapiens
MASASGAMAKHEQILVLDPPTDLKFKGPFTDVVTTNLKLRNPSDRKVCFKVKTTAPRRYCVRPNSGIIDPGSTVTVSVMLQPFDYDPNEKSKHKFMVQTIFAPPNTSDMEAVWKEAKPDELMDSKLRCVFEMPNENDKLNDMEPSKAVPLNASKQDGPMPKPHSVSLNDTETRKLMEECKRLQGEMMKLSEENRHLRDEGLRLRKVAHSDKPGSTSTASFRDNVTSPLPSLLVVIAAIFIGFFLGKFIL

SEQ ID NO: 11697 - protein, 2039 aa, Homo sapiens
MPKSGFTKPIQSENSDSDSNMVEKPYGRKSKDKIASYSKTPKIERSDVSKEMKEKSSMKRKLPFTISPSRNEERDSDTEKEGPEKKKTKKEAGNKKSTPVSILFGYPLSERKQMALLMQMTARDNSPDSTPNHPSQTTPAQKKTPSSSSRQKDKVNKRNERGETPLHMAAIRGDVKQVKELISLGANVNVKDFAGWTPLHEACNVGYYDVAKILIAAGADVNTQGLDDDTPLHDSASSGHRDIVKLLLRHGGNPFQANKHGERPVDVAETEELELLLKREVPLSDDDESYTDSEEAQSVNPSSVDENIDSETEKDSLICESKQILPSKTPLPSALDEYEFKDDDDEEINKMIDDRHILRKEQRKENEPEAEKTHLFAKQEKAFYPKSFKSKKQKPSRVLYSSTESSDEEALQNKKISTSCSVIPETSNSDMQTKKEYVVSGEHKQKGKVKRKLKNQNKNKENQELKQEKEGKENTRITNLTVNTGLDCSEKTREEGNFRKSFSPKDDTSLHLFHISTGKSPKHSCGLSEKQSTPLKQEHTKTCLSPGSSEMSLQPDLVRYDNTESEFLPESSSVKSCKHKEKSKHQKDFHLEFGEKSNAKIKDEDHSPTFENSDCTLKKMDKEGKTLKKHKLKHKEREKEKHKKEIEGEKEKYKTKDSAKELQRSVEFDREFWKENFFKSDETEDLFLNMEHESLTLEKKSKLEKNIKDDKSTKEKHVSKERNFKEERDKIKKESEKSFREEKIKDLKEERENIPTDKDSEFTSLGMSAIEESIGLHLVEKEIDIEKQEKHIKESKEKPEKRSQIKEKDIEKMERKTFEKEKKIKHEHKSEKDKLDLSECVDKIKEKDKLYSHHTEKCHKEGEKSKNTAAIKKTDDREKSREKMDRKHDKEKPEKERHLAESKEKHLMEKKNKQSDNSEYSKSEKGKNKEKDRELDKKEKSRDKESINITNSKHIQEEKKSSIVDGNKAQHEKPLSLKEKTKDEPLKTPDGKEKDKKDKDIDRYKERDKHKDKIQINSLLKLKSEADKPKPKSSPASKDTRPKEKRLVNDDLMQTSFERMLSLKDLEIEQWHKKHKEKIKQKEKERLRNRNCLELKIKDKEKTKHTPTESKNKELTRSKSSEVTDAYTKEKQPKDAVSNRSQSVDTKNVMTLGKSSFVSDNSLNRSPRSENEKPGLSSRSVSMISVASSEDSCHTTVTTPRPPVEYDSDFMLESSESQMSFSQSPFLSIAKSPALHERELDSLADLPERIKPPYANRLSTSHLRSSSVEDVKLIISEGRPTIEVRRCSMPSVICEHTKQFQTISEESNQGSLLTVPGDTSPSPKPEVFSNVPERDLSNVSNIHSSFATSPTGASNSKYVSADRNLIKNTAPVNTVMDSPVHLEPSSQVGVIQNKSWEMPVDRLETLSTRDFICPNSNIPDQESSLQSFCNSENKVLKENADFLSLRQTELPGNSCAQDPASFMPPQQPCSFPSQSLSDAESISKHMSLSYVANQEPGILQQKNAVQIISSALDTDNESTKDTENTFVLGDVQKTDAFVPVYSDSTIQEASPNFEKAYTLPVLPSEKDFNGSDASTQLNTHYAFSKLTYKSSSGHEVENSTTDTQVISHEKENKLESLVLTHLSRCDSDLCEMNAGMPKGNLNEQDPKHCPESEKCLLSIEDEESQQSILSSLENHSQQSTQPEMHKYGQLVKVELEENAEDDKTENQIPQRMTRNKANTMANQSKQILASCTLLSEKDSESSSPRGRIRLTEDDDPQIHHPRKRKVSRVPQPVQVSPSLLQAKEKTQQSLAAIVDSLKLDEIQPYSSERANPYFEYLHIRKKIEEKRKLLCSVIPQAPQYYDEYVTFNGSYLLDGNPLSKICIPTITPPPSLSDPLKELFRQQEVVRMKLRLQHSIEREKLIVSNEQEVLRVHYRAARTLANQTLPFSACTVLLDAEVYNVPLDSQSDDSKTSVRDRFNARQFMSWLQDVDDKFDKLKTCLLMRQQHEAAALNAVQRLEWQLKLQELDPATYKSISIYEIQEFYVPLVDVNDDFELTPI

SEQ ID NO: 11698 - protein, 79 aa, Homo sapiens
MKLHSLISVLLLFVTLIPKGKTGVIPGQKQCIALKGVCRDKLCSTLDDTIGICNEGKKCCRRWWILEPYPTPVPKGKSP

SEQ ID NO: 11699 - protein, 113 aa, Homo sapiens; identical to SEQ ID NO: 5445

SEQ ID NO: 11700 - protein, 102 aa, Homo sapiens
MGRDQRAVAGPALRRWLLLGTVTVGFLAQSVLAGVKKFDVPCGGRDCSGGCQCYPEKGGRGQPGPVGPQGYNGPPGLQGFPGLQGRKGDKGERGAPGVTGPK

SEQ ID NO: 11701 - protein, 200 aa, Homo sapiens
MALLLCFVLLCGVVDFARSLSITTPEEMIEKAKGETAYLPCKFTLSPEDQGPLDIEWLISPADNQKVDQVIILYSGDKIYDDYYPDLKGRVHFTSNDLKSGDASINVTNLQLSDIGTYQCKVKKAPGVANKKIHLVVLGKMCHLQRAVRPLPEATSAVIIHPWGPCLLPTWKDIPRLSITKYQVKTLNALLRVRLSHLLR

SEQ ID NO: 11702 - protein, 252 aa, Homo sapiens
MALLLCFVLLCGVVDFARSLSITTPEEMIEKAKGETAYLPCKFTLSPEDQGPLDIEWLISPADNQKVDQVIILYSGDKIYDDYYPDLKGRVHFTSNDLKSGDASINVTNLQLSDIGTYQCKVKKAPGVANKKIHLVVLVKPSGARCYVDGSEEIGSDFKIKCEPKEGSLPLQYEWQKLSDSQKMPTSWLAGKMCHLQRAVRPLPEATSAVIIHPWGPCLLPTWKDIPRLSITKYQVKTLNALLRVRLSHLLR

SEQ ID NO: 11703 - protein, 352 aa, Homo sapiens
MALLLCFVLLCGVVDFARSLSITTPEEMIEKAKGETAYLPCKFTLSPEDQGPLDIEWLISPADNQKVDQVIILYSGDKIYDDYYPDLKGRVHFTSNDLKSGDASINVTNLQLSDIGTYQCKVKKAPGVANKKIHLVVLVKPSGARCYVDGSEEIGSDFKIKCEPKEGSLPLQYEWQKLSDSQKMPTSWLAEMTSSVISVKNASSEYSGTYSCTVRNRVGSDQCLLRLNVVPPSNKAGLIAGAIIGTLLALALIGLIIFCCRKKRREEKYEKEVHHDIREDVPPPKSRTSTARSYIGSNHSSLGSMSPSNMEGYSKTQYNQVPSEDFERTPQSPTLPPAKFKYPYKTDGITVV

SEQ ID NO: 11704 - protein, 876 aa, Homo sapiens
MLSGKKAAAAAAAAAAAATGTEAGPGTAGGSENGSEVAAQPAGLSGPAEVGPGAVGERTPRKKEPPRASPPGGLAEPPGSAGPQAGPTVVPGSATPMETGIAETPEGRRTSRRKRAKVEYREMDESLANLSEDEYYSEEERNAKAEKEKKLPPPPPQAPPEEENESEPEEPSGQAGGLQDDSSGGYGDGQASGVEGAAFQSRLPHDRMTSQEAACFPDIISGPQQTQKVFLFIRNRTLQLWLDNPKIQLTFEATLQQLEAPYNSDTVLVHRVHSYLERHGLINFGIYKRIKPLPTKKTGKVIIIGSGVSGLAAARQLQSFGMDVTLLEARDRVGGRVATFRKGNYVADLGAMVVTGLGGNPMAVVSKQVNMELAKIKQKCPLYEANGQADTVKVPKEKDEMVEQEFNRLLEATSYLSHQLDFNVLNNKPVSLGQALEVVIQLQEKHVKDEQIEHWKKIVKTQEELKELLNKMVNLKEKIKELHQQYKEASEVKPPRDITAEFLVKSKHRDLTALCKEYDELAETQGKLEEKLQELEANPPSDVYLSSRDRQILDWHFANLEFANATPLSTLSLKHWDQDDDFEFTGSHLTVRNGYSCVPVALAEGLDIKLNTAVRQVRYTASGCEVIAVNTRSTSQTFIYKCDAVLCTLPLGVLKQQPPAVQFVPPLPEWKTSAVQRMGFGNLNKVVLCFDRVFWDPSVNLFGHVGSTTASRGELFLFWNLYKAPILLALVAGEAAGIMENISDDVIVGRCLAILKGIFGSSAVPQPKETVVSRWRADPWARGSYSYVAAGSSGNDYDLMAQPITPGPSIPGAPQPIPRLFFAGEHTIRNYPATVHGALLSGLREAGRIADQFLGAMYTLPRQATPGVPAQQSPSM

SEQ ID NO: 11705 - protein, 3388 aa, Homo sapiens
MTAWRRFQSLLLLLGLLVLCARLLTAAKGQNCGGLVQGPNGTIESPGFPHGYPNYANCTWIIITGERNRIQLSFHTFALEEDFDILSVYDGQPQQGNLKVRLSGFQLPSSIVSTGSILTLWFTTDFAVSAQGFKALYEVLPSHTCGNPGEILKGVLHGTRFNIGDKIRYSCLPGYILEGHAILTCIVSPGNGASWDFPAPFCRAEGACGGTLRGTSSSISSPHFPSEYENNADCTWTILAEPGDTIALVFTDFQLEEGYDFLEISGTEAPSIWLTGMNLPSPVISSKNWLRLHFTSDSNHRRKGFNAQFQVKKAIELKSRGVKMLPSKDGSHKNSVLSQGGVALVSDMCPDPGIPENGRRAGSDFSRVGANVQFSCEDNYVLQGSKSITCQRVTETLAAWSDHRPICRARTCGSNLRGPSGVITSPNYPVQYEDNAHCVWVITTTDPDKVIKLAFEEFELERGYDTLTVGDAGKVGDTRSVLYVLTGSSVPDLIVSMSNQMWLHLQSDDSIGSPGFKAVYQEIEKGGCGDPGIPAYGKRTGSSFLHGDTLTFECPAAFELVGERVITCQQNNQWSGNKPSCVFSCFFNFTASSGIILSPNYPEEYGNNMNCVWLIISEPGSRIHLIFNDFDVEPQFDFLAVKDDGISDITVLGTFSGNEVPSQLASSGHIVRLEFQSDHSTTGRGFNITYTTFGQNECHDPGIPINGRRFGDRFLLGSSVSFHCDDGFVKTQGSESITCILQDGNVVWSSTVPRCEAPCGGHLTASSGVILPPGWPGYYKDSLHCEWIIEAKPGHSIKITFDRFQTEVNYDTLEVRDGPASSSPLIGEYHGTQAPQFLISTGNFMYLLFTTDNSRSSIGFLIHYESVTLESDSCLDPGIPVNGHRHGGDFGIRSTVTFSCDPGYTLSDDEPLVCERNHQWNHALPSCDALCGGYIQGKSGTVLSPGFPDFYPNSLNCTWTIEVSHGKGVQMIFHTFHLESSHDYLLITEDGSFSEPVARLTGSVLPHTIKAGLFGNFTAQLRFISDFSISYEGFNITFSEYDLEPCDDPGVPAFSRRIGFHFGVGDSLTFSCFLGYRLEGATKLTCLGGGRRVWSAPLPRCVAECGASVKGNEGTLLSPNFPSNYDNNHECIYKIETEAGKGIHLRTRSFQLFEGDTLKVYDGKDSSSRPLGTFTKNELLGLILNSTSNHLWLEFNTNGSDTDQGFQLTYTSFDLVKCEDPGIPNYGYRIRDEGHFTDTVVLYSCNPGYAMHGSNTLTCLSGDRRVWDKPLPSCIAECGGQIHAATSGRILSPGYPAPYDNNLHCTWIIEADPGKTISLHFIVFDTEMAHDILKVWDGPVDSDILLKEWSGSALPEDIHSTFNSLTLQFDSDFFISKSGFSIQFSTSIAATCNDPGMPQNGTRYGDSREAGDTVTFQCDPGYQLQGQAKITCVQLNNRFFWQPDPPTCIAACGGNLTGPAGVILSPNYPQPYPPGKECDWRVKVNPDFVIALIFKSFNMEPSYDFLHIYEGEDSNSPLIGSYQGSQAPERIESSGNSLFLAFRSDASVGLSGFAIEFKEKPREACFDPGNIMNGTRVGTDFKLGSTITYQCDSGYKILDPSSITCVIGADGKPSWDQVLPSCNAPCGGQYTGSEGVVLSPNYPHNYTAGQICLYSITVPKEFVVFGQFAYFQTALNDLAELFDGTHAQARLLSSLSGSHSGETLPLATSNQILLRFSAKSGASARGFHFVYQAVPRTSDTQCSSVPEPRYGRRIGSEFSAGSIVRFECNPGYLLQGSTALHCQSVPNALAQWNDTIPSCVVPCSGNFTQRRGTILSPGYPEPYGNNLNCIWKIIVTEGSGIQIQVISFATEQNWDSLEIHDGGDVTAPRLGSFSGTTVPALLNSTSNQLYLHFQSDISVAAAGFHLEYKTVGLAACQEPALPSNSIKIGDRYMVNDVLSFQCEPGYTLQGRSHISCMPGTVRRWNYPSPLCIATCGGTLSTLGGVILSPGFPGSYPNNLDCTWRISLPIGYGAHIQFLNFSTEANHDFLEIQNGPYHTSPMIGQFSGTDLPAALLSTTHETLIHFYSDHSQNRQGFKLAYQAYELQNCPDPPPFQNGYMINSDYSVGQSVSFECYPGYILIGHPVLTCQHGINRNWNYPFPRCDAPCGYNVTSQNGTIYSPGFPDEYPILKDCIWLITVPPGHGVYINFTLLQTEAVNDYIAVWDGPDQNSPQLGVFSGNTALETAYSSTNQVLLKFHSDFSNGGFFVLNFHAFQLKKCQPPPAVPQAEMLTEDDDFEIGDFVKYQCHPGYTLVGTDILTCKLSSQLQFEGSLPTCEAQCPANEVRTGSSGVILSPGYPGNYFNSQTCSWSIKVEPNYNITIFVDTFQSEKQFDALEVFDGSSGQSPLLVVLSGNHTEQSNFTSRSNQLYLRWSTDHATSKKGFKIRYAAPYCSLTHPLKNGGILNRTAGAVGSKVHYFCKPGYRMVGHSNATCRRNPLGMYQWDSLTPLCQAVSCGIPESPGNGSFTGNEFTLDSKVVYECHEGFKLESSQQATAVCQEDGLWSNKGKPPTCKPVACPSIEAQLSEHVIWRLVSGSLNEYGAQVLLSCSPGYYLEGWRLLRCQANGTWNIGDERPSCRAGHCGSPDPIVNGHISGDGFSYRDTVVYQCNPGFRLVGTSVRICLQDHKWSGQTPVCVPITCGHPGNPAHGFTNGSEFNLNDVVNFTCNTGYLLQGVSRAQCRSNGQWSSPLPTCRVVNCSDPGFVENAIRHGQQNFPESFEYGMSILYHCKKGFYLLGSSALTCMANGLWDRSLPKCLAISCGHPGVPANAVLTGELFTYGAVVHYSCRGSESLIGNDTRVCQEDSHWSGALPHCTGNNPGFCGDPGTPAHGSRLGDDFKTKSLLRFSCEMGHQLRGSPERTCLLNGSWSGLQPVCEAVLCPQPPPVQNGTVEGSDFRWGSSISYSCMDGYQLSHSAILSCEGRGVWKGEIPQCLPVFCGDPGIPAEGRLSGKSFTYKSEVFFQCKSPFILVGSSRRVCQADGTWSGIQPTCIDPAHNTCPDPGTPHFGIQNSSRGYEVGSTVFFRCRKGYHIQGSTTRTCLANLTWSGIQTECIPHACRQPETPAHADVRAIDLPTFGYTLVYTCHPGFFLAGGSEHRTCKADMKWTGKSPVCKSKGVREVNETVTKTPVPSDVFFVNSLWKGYYEYLGKRQPATLTVDWFNATSSKVNATFSEASPVELKLTGIYKKEEAHLLLKAFQIKGQADIFVSKFENDNWGLDGYVSSGLERGGFTFQGDIHGKDFGKFKLERQDPLNPDQDSSSHYHGTSSGSVAAAILVPFFALILSGFAFYLYKHRTRPKVQYNGYAGHENSNGQASFENPMYDTNLKPTEAKAVRFDTTLNTVCTVV

SEQ ID NO: 11706 - protein, 1055 aa, Homo sapiens
MALRRLGAALLLLPLLAAVEETLMDSTTATAELGWMVHPPSGWEEVSGYDENMNTIRTYQVCNVFESSQNNWLRTKFIRRRGAHRIHVEMKFSVRDCSSIPSVPGSCKETFNLYYYEADFDSATKTFPNWMENPWVKVDTIAADESFSQVDLGGRVMKINTEVRSFGPVSRSGFYLAFQDYGGCMSLIAVRVFYRKCPRIIQNGAIFQETLSGAESTSLVAARGSCIANAEEVDVPIKLYCNGDGEWLVPIGRCMCKAGFEAVENGTVCRGCPSGTFKANQGDEACTHCPINSRTTSEGATNCVCRNGYYRADLDPLDMPCTTIPSAPQAVISSVNETSLMLEWTPPRDSGGREDLVYNIICKSCGSGRGACTRCGDNVQYAPRQLGLTEPRIYISDLLAHTQYTFEIQAVNGVTDQSPFSPQFASVNITTNQAAPSAVSIMHQVSRTVDSITLSWSQPDQPNGVILDYELQYYEKELSEYNATAIKSPTNTVTVQGLKAGAIYVFQVRARTVAGYGRYSGKMYFQTMTEAEYQTSIQEKLPLIIGSSAAGLVFLIAVVVIAIVCNRRGFERADSEYTDKLQHYTSGHMTPGMKIYIDPFTYEDPNEAVREFAKEIDISCVKIEQVIGAGEFGEVCSGHLKLPGKREIFVAIKTLKSGYTEKQRRDFLSEASIMGQFDHPNVIHLEGVVTKSTPVMIITEFMENGSLDSFLRQNDGQFTVIQLVGMLRGIAAGMKYLADMNYVHRDLAARNILVNSNLVCKVSDFGLSRFLEDDTSDPTYTSALGGKIPIRWTAPEAIQYRKFTSASDVWSYGIVMWEVMSYGERPYWDMTNQDVINAIEQDYRLPPPMDCPSALHQLMLDCWQKDRNHRPKFGQIVNTLDKMIRNPNSLKAMAPLSSGINLPLLDRTIPDYTSFNTVDEWLEAIKMGQYKESFANAGFTSFDVVSQMMMEDILRVGVTLAGHQKKILNSIQVMRAQMNQIQSVEGQPLARRPRATGRTKRCQPRDVTKKTCNSNDGKKKGMGKKKTDPGRGREIQGIFFKEDSHKESNDCSCGG

SEQ ID NO: 11707 - protein, 362 aa, Homo sapiens
MSYKSRPKHSGTHSIVQEFQVPDYVPWQQSKQETKPSTLPPVQQANSLHTSKMKTLTRVQPVFHFKPTTVVTSCQPKNPRELHRRRKLDPGKMHAKIWLMKTSLRSGRAALRELRSRENFLSKLNRELIETIQEMENSTTLHVRALLQQQDTLATIIDILEYSNKKRLQQLKSELQEWEEKKKCKMSYLEQQAEQLNAKIEKTQEEVNFLSTYMDHEYSIKSVQISTLMRQLQQVKDSQQDELDDLGEMRRKVLESLSDKIQKKKKKILSSVVAETQRPYEEALLQKMWESQDFLKCMQRFREIIDQFEENMPVLRAEVEELQAQTREPREVIFEDVLLRRPKCTPDMDVILNIPVEEPLPF

SEQ ID NO: 11708 - protein, 145 aa, Homo sapiens
MSLLLPPLALLLLLAALVAPATAATAYRPDWNRLSGLTRARVETCGGUQLNRLKEVKAFVTQDIPFYHNLVMKHLPGADPELVLLGRRYEELERIPLSEMTREEINALVQELGFYRKAAPDAQVPPEYVWAPAKPPEETSDHADL

SEQ ID NO: 11709 - protein, 370 aa, Homo sapiens
MGEGDAFWAPSVLPHSTLSTLSHHPQPQFGRRMESKVSEGGLNVTLTIRLLMHGKEVGSIIGKKGETVKKMREESGARINISEGNCPERIVTITGPTDAIFKAFAMIAYKFEEDIINSMSNSPATSKPPVTLRLVVPASQCGSLIGKGGSKIKEIRESTGAQVQVAGDMLPNSTERAVTISGTPDAIIQCVKQICVVMLESPPKGATIPYRPKPASTPVIFAGGQAYTIQGQYAIPHPDLTKLHQLAMQQTPFPPLGQTNPAFPGEKLPLHSSEEAQNLMGQSSGLDASPPASTHELTIPNDLIGCIIGRQGTKINEIRQMSGAQIKIANATEGSSERQITITGTPANISLAQYLINARLTSEVTGMGTL

SEQ ID NO: 11710 - protein, 371 aa, Homo sapiens
MGEGDAFWAPSVLPHSTLSTLSHHPQPQFGRRMESKVSEGGLNVTLTIRLLMHGKEVGSIIGKKGETVKKMREESGARINISEGNCPERIVTITGPTDAIFKAFAMIAYKFEEDIINSMSNSPATSKPPVTLRLVVPASQCGSLIGKGGSKIKEIRESTGAQVQVAGDMLPNSTERAVTISGTPDAIIQCVKQICVVMLESPPKGATIPYRPKPASTPVIFAGGQAYTIQGQYAIPHPDQLTKLHQLAMQQTPFPPLGQTNPAFPGEKLPLHSSEEAQNLMGQSSGLDASPPASTHELTIPNDLIGCIIGRQGTKINEIRQMSGAQIKIANATEGSSERQITITGTPANISLAQYLINARLTSEVTGMGTL

SEQ ID NO: 11711 - protein, 1193 aa, Homo sapiens
MERHQPRLHHPAQGSAAGTPYPSSASLRGCRESKMPRRKGPQHPPPPSGPEEPGEKRPKFHLNIRTLTDDMLDKFASIRIPGSKKERPPLPNLKTAFASSDCSAAPLEMMENFPKPLSENELLELFEKMMEDMNLNEDKKAPLREKDFSIKKEMVMQYINTASKTGSLKRSRQISPQEFIHELKMGSADERLVTCLESLRVSLTSNPVSWVESFGHEGLGLLLDILEKLISGKIQEKVVKKNQHKVIQCLKALMNTQYGLERIMSEERSLSLLAKAVDPRHPNMMTDVVKLLSAVCIVGEESILEEVLEALTSAGEEKKIDRFFCIVEGLRHNSVQLQVACMQLINALVTSPDDLDFRLHIRNEFMRCGLKEILPNLKCIKNDGLDIQLKVFDEHKEEDLFELSHRLEDIRAELDEAYDVYNMVWSTVKETRAEGYFISILQHLLLIRNDYFIRQQYFKLIDECVSQIVLHRDGMDPDFTYRKRLDLDLTQFVDICIDQAKLEEFEEKASELYKKFEKEFTDHQETQAELQKKEAKINELQAELQAFKSQFGALPADCNIPLPPSKEGGTGHSALPPPPPLPSGGGVPPPPPPPPPPPLPGMRMPFSGPVPPPPPLGFLGGQNSPPLPILPFGLKPKKEFKPEISMRRLNWLKIRPHEMTENCFWIKVNENKYENVDLLCKLENTFCCQQKERREEEDIEEKKSIKKKIKELKFLDSKIAQNLSIFLSSFRVPYEEIRMMILEVDETRLAESMIQNLIKHLPDQEQLNSLSQFKSEYSNLCEPEQFVVVMSNVKRLRPRLSAILFKLQFEEQVNNIKPDIMAVSTACEEIKKSKSFSKLLELVLLMGNYMNAGSRNAQTFGFNLSSLCKLKDTKSADQKTTLLHFLVEICEEKYPDILNFVDDLEPLDKASKVSVETLEKNLRQMGRQLQQLEKELETFPPPEDLHDKFVTKMSRFVISAKEQYETLSKLHENMEKLYQSIIGYYAIDVKKVSVEDFLTDLNNFRTTFMQAIKENIKKREAEEKEKRVRIAKELAERERLERQQKKKRLLEMKTEGDETGVMDNLLEALQSGAAFRDRRKRTPMPKDVRQSLSPMSQRPVLKVCNHENQKVQLTEGSRSHYNINCNSTRTPVAKELNYNLDTHTSTGRIKAAEKKEACNVESNRKKETELLGSFSKNESVPEVEALLARLRAL

SEQ ID NO: 11712 - protein, 458 aa, Homo sapiens
MAPPAARLALLSAAALTLAARPAPSPGLGPGPECFTANGADYRGTQNWTALQGGKPCLFWNETFQHPYNTLKYPNGEGGLGEHNYCRNPDGDVSPWCYVAEHEDGVYWKYCEIPACQMPGNLGCYKDHGNPPPLTGTSKTSNKLTIQTCISFCRSQRFKFAGMESGYACFCGNNPDYWKYGEAASTECNSVCFGDHTQPCGGDGRIILFDTLVGACGGNYSAMSSVVYSPDFPDTYATGRVCYWTIRVPGASHIHFSFPLFDIRDSADMVELLDGYTHRVLARFHGRSRPPLSFNVSLDFVILYFFSDRINQAQGFAVLYQAVKEELPQERPAVNQTVAEVITEQANLSVSAARSSKVLYVITTSPSHPPQTVPGWTVYGLATLLILTVTAIVAKILLHVTFKSHRVPASGDLRDCHQPGTSGEIWSIFYKPSTSISIFKKKLKGQSQQDDRNPLVSD

SEQ ID NO: 11713 - protein, 185 aa, Homo sapiens
MRLGSPGLLFLLFSSLRAANFSVPVVSAPHSPSQDELTFTCTSINGYPRPNVYWINKTDNSLLDQALQNDTVFLNMRGLYDVVSVLRIARTPSVNIGCCIENVLLQQNLTVGSQTGNDIGERDKITENPVSTGEKNAATWSILAVLCLLVVVAVAIGWVCRDRCLQHSYAGAWAVSPETELTGHV

SEQ ID NO: 11714 - protein, 473 aa, Homo sapiens
MRLGSPGLLFLLFSSLRADTQEKEVRAMVGSDVELSCACPEGSRFDLNDVYVYWQTSESKTVVTYHIPQNSSLENVDSRYRNRALMSPAGMLRGDFSLRLFNVTPQDEQKFHCLVLSQSLGFQEVLSVEVTLHVAANFSVPVVSAPHSPSQDELTFTCTSINGYPRPNVYWINKTDNSLLDQALQNDTVFLNMRGLYDVVSVLRIARTPSVNIGCCIENVLLQQNLTVGSQTGNDIGERDKITENPVSTGEKNAATWSILAVLCLLVVVAVAIGWVCRDRCLQHSYAGAWAVSPETELTGEFAVGSSRFWGAQGRLGCQLSFRVSKNFQKAKVPCLEQLLFLETQRSPRWCAWHFLQPPLGMGWHPGVHFVTLRWDFPNMHRSRETSARPPRSPVPSPDQGVQGGSRHRRPAPMGCPEWVQAPAPSPRGVSRAGPGTGAQPLWGVRSGSGHRQLLSVAATPAALVCPSVPGAT

SEQ ID NO: 11715 - protein, 1621 aa, Homo sapiens
MNSQPQTRSPFFQRPQIQPPRATIPNSSPSIRPGAQTPTAVYQANQHIMMVNHLPMPYPVPQGPQYCIPQYRHSGPPYVGPPQQYPVQPPGPGPFYPGPGPGDFPNAYGTPFYPSQPVYQSAPIIVPTQQQPPPAKREKKTIRIRDPNQGGKDITEEIMSGGGSRNPTPPIGRPTSTPTPPQLPSQVPEHSPVVYGTVESAHLAASTPVTAASDQKQEEKPKPDPVLKSPSPVLRLVLSGEKKEQEGQTSETTAIVSIAELPLPPSPTTVSSVARSTIAAPTSSALSSQPIFTTAIDDRCELSSPREDTIPIPSLTSCTETSDPLPTNENDDDICKKPCSVAPNDIPLVSSTNLINEINGVSEKLSATESIVEIVKQEVLPLTLELEILENPPEEMKLECIPAPITPSTVPSFPPTPPTPPASPPHTPVIVPAAATTVSSPSAAITVQRVLEEDESIRTCLSEDAKEIQNKIEVEADGQTEEILDSQNLNSRRSPVPAQIAITVPKTWKKPKDRTRTTEEMLEAELELKAEEELSIDKVLESEQDKMSQGFHPERDPSDLKKVKAVEENGEEAEPVRNGAESVSEGEGIDANSGSTDSSGDGVTFPFKPESWKPTDTEGKKQYDREFLLDFQFMPACIQKPEGLPPISDVVLDKINQPKLPMRTLDPRILPRGPDFTPAFADFGRQTPGGRGVPICKVQSRHGLPILEQSKAPTCPPLVMSHPPMKSLPLGLLNVGSRRSQPGQRREPRKIITVSVKEDVHLKKAENAWKPSQKRDSQADDPENIKTQELFRKVRSILNKLTPQMFNQLMKQVSGLTVDTEERLKGVIDLVFEKAIDEPSFSVAYANMCRCLVTLKVPMADKPGNTVNFRKLLLNRCQKEFEKDKADDDVFEKKQKELEAASAPEERTRLHDELEEAKDKARRRSIGNIKFIGELFKLKMLTEAIMHDCVVKLLKNHDEESLECLCRLLTTIGKDLDFEKAKPRMDQYFNQMEKIVKERKTSSRIRFMLQDVIDLRLCNWVSRRADQGPKTIEQIHKEAKIEEQEEQRKVQQLMTKEKRRPGVQRVDEGGWNTVQGAKNSRVLDPSKFLKITKPTIDEKIQLVPKAQLGSWGKGSSGGAKASETDALRSSASSLNRFSALQPPAPSGSTPSTPVEFDSRRTLTSRGSMGREKNDKPLPSATARPNTFMRGGSSKDLLDNQSQEEQRREMLETVKQLTGGVDVERNSTEAERNKTRESAKPEISAMSAHDKAALSEEELERKSKSIIDEFLHINDFKEAMQCVEELNAQGLLHVFVRVGVESTLERSQITRDHMGQLLYQLVQSEKLSKQDFFKGFSETLELADDMAIDIPHIWLYLAELVTPMLKEGGISMRELTIEFSKPLLPVGRAGVLLSEILHLLCKQMSHKKVGALWREADLSWKDFLPEGEDVHNFLLEQKLDFIESDSPCSSEALSKKELSAEELYKRLEKLIIEDKANDEQIFDWVEANLDEIQMSSPTFLRALMTAVCKAAIIADSSTFRVDTAVIKQRVPILLKYLDSDTEKELQALYALQASIVKLDQPANLLRMFFDCLYDEEVISEDAFYKWESSKDPAEQNGKGVALKSVTAFFTWLREAEEESEDN

SEQ ID NO: 11716 - protein, 946 aa, Homo sapiens
MPLSRRGRGSRLAGSRAATSNLPRATALSPKHAQLLTRRRHSSEQVPPESEPRADFRSGKWLQEPATGDARDSRQALRARMSSKHRICSQEEVVIPCAYDSDSESVDLELSNLEIIKKGSSSIELTDLDIPDIPGLHCEPLSHSPRHLTQQDPLSEAIVEKLIQSIQKVFNGELKGELEKLKFLGDLSSLSQALPYDETAKSFIHSHIADIVHTLNVLVQEERPHSLSSSMRQEVFVTIADLSYQDVHLLLGSEDRAELFSLTIKSIITLPSVRTLTQIQEIMPNGTCNTECLYRQTFQAFSEMLQSLVVKDPHLENLDTIIKHLVPWLQSVKDHERERATASMAQVLKCLSKHLNLKLPLRFQRLGHLVALMALLCGDPQEKVAEEAAEGIHSLLHITLRLKYITHDKKDQQNLKRALTKCREFLELHSSAAKCFYNCPFRIAQVFEGFLDSNELCQFIMTTFDTLKTLKHPCIQRSAGELLLTLAKNTESQFEKVPEIMGVICAQLSIISQPRVRQQIINTVSLFISRPKYTDIVLSFLLCHPVPYNRHLAEVWRMLSVELPSTTWILWRLLRKLQKCHNEPAQEKMAYVAVAATDALYEVFLGNRLRAATFRLFPQLLMTLLIQIHHSIGLTMSDVDIPSGLYTEQEVPSEVTPLCFAMQATKTLLLRTCCLQEFNIMEKNKGWALLGGKDGHLQGLFLLANALLERNQLLAQKVMYLLVPLLNRGNDKHKLTSAGFFVELLRSPVAKRLPSIYSVARFKDWLQDGNHLFRILGLRGLYNLVGHQEMREDIKSLLPYIVDSLRETDEKIVLSAIQILLQLVRTMDFTTLAAMMRTLFSLFGDVRSDVHRFSVTLFGAAIKSVKNPDKKSIENQVLDSLVPLLLYSQDENDAVAEESRQVLTICAQFLKWKLPQEVYSKDPWHIKPTEAGTICRFFGKKVQGEN

SEQ ID NO: 11717 - protein, 2012 aa, Homo sapiens
MWILALSLFQSFANVFSEDLHSSLYFVNASLQEVVFASTTGTLVPCPAAGIPPVTLRWYLATGEEIYDVPGIRHVHPNGTLQIFPFPPSSFSTLIHDNTYYCTAENPSGKIRSQDVHIKAVLREPYTVRVEDQKTMRGNVAVFKCIIPSSVEAYITVVSWEKDTVSLVSGSRFLITSTGALYIKDVQNEDGLYNYRCITRHRYTGETRQSNSARLFVSDPANSAPSILDGFDHRKAMAGQRVELPCKALGHPEPDYRWLKDNMPLELSGRFQKTVTGLLIENIRPSDSGSYVCEVSNRYGTAKVIGRLYVKQPLKATISPRKVKSSVGSQVSLSCSVTGTEDQELSWYRNGEILNPGKNVRITGINHENLIMDHMVKSDGGAYQCFVRKDKLSAQDYVQVVLEDGTPKIISAFSEKVVSPAEPVSLMCNVKGTPLPTITWTLDDDPILKGGSHRISQMITSEGNVVSYLNISSSQVRDGGVYRCTANNSAGVVLYQARINVRGPASIRPMKNITAIAGRDTYIHCRVIGYPYYSIKWYKNSNLLPFNHRQVAFENNGTLKLSDVQKEVDEGEYTCNVLVQPQLSTSQSVHVTVKVPPFIQPFEFPRFSIGQRVFIPCVVVSGDLPITITWQKDGRPIPGSLGVTIDNIDFTSSLRISNLSLMHNGNYTCIARNEAAAVEHQSQLIVRVPPKFVVQPRDQDGIYGKAVILNCSAEGYPVPTIVWKFSKGAGVPQFQPIALNGRIQVLSNGSLLIKHVVEEDSGYYLCKVSNDVGADVSKSMYLTVKIPAMITSYPNTTLATQGQKKEMSCTAHGEKPIIVRWEKEDRIINPEMARYLVSTKEVGEEVISTLQILPTVREDSGFFSCHAINSYGEDRGIIQLTVQEPPDPPEIEIKDVKARTITLRWTMGFDGNSPITGYDIECKNKSDSWDSAQRTKDVSPQLNSATIIDIHPSSTYSIRMYAKNRIGKSEPSNELTITADEAAPDGPPQEVHLEPISSQSIRVTWKAPKKHLQNGIIRGYQIGYREYSTGGNFQFNIISVDTSGDSEVYTLDNLNKFTQYGLVVQACNRAGTGPSSQEIITTTLEDVPSYPPENVQAIATSPESISISWSTLSKEALNGILQGFRVIYWANLMDGELGEIKNITTTQPSLELDGLEKYTNYSIQVLAFTRAGDGVRSEQIFTRTKEDVPGPPAGVKAAAASASMVFVSWLPPLKLNGIIRKYTVFCSHPYPTVISEFEASPDSFSYRIPNLSRNRQYSVWVVAVTSAGRGNSSEIITVEPLAKAPARILTFSGTVTTPWMKDIVLPCKAVGDPSPAVKWMKDSNGTPSLVTIDGRRSIFSNGSFIIRTVKAEDSGYYSCIANNNWGSDEIILNLQVQVPPDQPRLTVSKTTSSSITLSWLPGDNGGSSIRGYILQYSEDNSEQWGSFPISPSERSYRLENLKCGTWYKFTLTAQNGVGPGRISEIIEAKTLGKEPQFSKEQELFASINTTRVRLNLIGWNDGGCPITSFTLEYRPFGTTVWTTAQRTSLSKSYILYDLQEATWYELQMRVCNSAGCAEKQANFATLNYDGSTIPPLIKSVVQNEEGLTTNEGLKMLVTISCILVGVLLLFVLLLVVRRRRREQRLKRLRDAKSLAEMLMSKNTRTSDTLSKQQQTLRMHIDIPRAQLLIEERDTMETIDDRSTVLLTDADFGEAAKQKSLTVTHTVHYQSVSQATGPLVDVSDARPGTNPTTRRNAKAGPTARNRYASQWTLNRPHPTISAHTLTTDWRLPTPRAAGSVDKESDSYSVSPSQDTDRARSSMVSTESASSTYEELARAYEHAKMEEQLRHAKFTITECFISDTSSEQLTAGTNEYTDSLTSSTPSESGICRFTASPPKPQDGGRVMNMAVPKAHRPGDLIHLPPYLRMDFLLNRGGPGTSRDLSLGQACLEPQKSRTLKRPTVLEPIPMEAASSASSTREGQSWQPGAVATLPQREGAELGQAAKMSSSQESLLDSRGHLKGNNPYAKSYTLV

SEQ ID NO: 11718 - protein, 242 aa, Homo sapiens
MIQTPDADLDVTNIIQADEPTTLTTNALDLNSVLGKDYGALKDIVINANPASPPLSLLVLHRLLCEHFRVLSTVHTHSSVKSVPENLLKCFGEQNKKQPRQDYQLGFTLIWKNVPKTQMKFSIQTMCPIEGEGNIARFLFSLFGQKHNAVNATLIDSWVDIAIFQLKEGSSKEKAAVFRSMNSALGKSPWLAGNELTVADVVLWSVLQQIGGCSVTVPANVQRWMRSCENLAPFNTALKLLK

SEQ ID NO: 11719 - protein, 939 aa, Homo sapiens
MAAQPPRGIRLSALCPKFLHTNSTSHTWPFSAVAELIDNAYDPDVNAKQIWIDKTVINDHICLTFTDNGNGMTSDKLHKMLSFGFSDKVTMNGHVPVGLYGNGFKSGSMRLGKDAIVFTKNGESMSVGLLSQTYLEVIKAEHVVVPIVAFNKHRQMINLAESKASLAAILEHSLFSTEQKLLAELDAIIGKKGTRIIIWNLRSYKNATEFDFEKDKYDIRIPEDLDEITGKKGYKKQERMDQIAPESDYSLRAYCSILYLKPRMQIILRGQKVKTQLVSKSLAYIERDVYRPKFLSKTVRITFGFNCRNKDHYGIMMYHRNRLIKAYEKVGCQLRANNMGVGVVGIIECNFLKPTHNKQDFDYTNEYRLTITALGEKLNDYWNEMKVKKNTEYPLNLPVEDIQKRPDQTWVQCDACLKWRKLPDGMDQLPEKWYCSNNPDPQFRNCEVPEEPEDEDLVHPTYEKTYKKTNKEKFRIRQPEMIPRINAELLFRPTALSTPSFSSPKESVPRRHLSEGTNSYATRLLNNHQVPPQSEPESNSLKRRLSTRSSILNAKNRRLSSQFENSVYKGDDDDEDVIILEENSTPKPAVDHDIDMKSEQSHVEQGGVQVEFVGDSEPCGQTGSTSTSSSRCDQGNTAATQTEVPSLVVKKEETVEDEIDVRNDAVILPSCVEAEAKIHETQETTDKSADDAGCQLQELRNQLLLVTEEKENYKRQCHMFTDQIKVLQQRILEMNDKYVKKETCHQSTETDAVFLLESINGKSESPDHMVSQYQQALEEIERLKKQCSALQHVKAECSQCSNNESKSEMDEMAVQLDDVFRQLDKCSIERDQYKSEVELLEMEKSQIRSQCEELKTEVEQLKSTNQQTATDVSTSSNIEESVNHMDGESLKLRSLRVNVGQLLAMIVPDLDLQQVNYDVDVVDEILGQVVEQMSEISST

SEQ ID NO: 11720 - protein, 312 aa, Homo sapiens
MARRSRHRLLLLLLRYLVVALGYHKAYGFSAPKDQQVVTAVEYQEAILACKTPKKTVSSRLEWKKLGRSVSFVYYQQTLQGDFKNRAEMIDFNIRIKNVTRSDAGKYRCEVSAPSEQGQNLEEDTVTLEVLVAPAVPSCEVPSSALSGTVVELRCQDKEGNPAPEYTWFKDGIRLLENPRLGSQSTNSSYTMNTKTGTLQFNTVSKLDTGEYSCEARNSVGYRRCPGKRMQVDDLNISGIIAAVVVVALVISVCGLGVCYAQRKGYFSKETSFQKSNSSSKATTMSENVQWLTPVIPALWKAAAGGSRGQEF

SEQ ID NO: 11721 - protein, 206 aa, Homo sapiens
MGSGPRGALSLLLLLLAPPSRPAAGCPAPCSCAGTLVDCGRRGLTWASLPTAFPVDTTELVLTGNNLTALPPGLLDALPALRTAHLGANPWRCDCRLVPLRAWLAGRPERAPYRDLRCVAPPALRGRLLPYLAEDELRAACAPGPLCWGALAAQLALLGLGLLHALLLVLLLCRLRRLRARARARAAARLSLTDPLVAERAGTDES

SEQ ID NO: 11722 - protein, 837 aa, Homo sapiens
MSLLLSFYLLGLLVSSGQALLQVTISLSKVELSVGESKFFTCTAIGEPESIDWYNPQGEKIISTQRVVVQKEGVRSRLTIYNANIEDAGIYRCQATDAKGQTQEATVVLEIYQKLTFREVVSPQEFKQGEDAEVVCRVSSSPAPAVSWLYHNEEVTTISDNRFAMLANNNLQILNINKSDEGIYRCEGRVEARGEIDFRDIIVIVNVPPAISMPQKSFNATAERGEEMTFSCRASGSPEPAISWFRNGKLIEENEKYILKGSNTELTVRNIINSDGGPYVCRATNKAGEDEKQAFLQVFVQPHIIQLKNETTYENGQVTLVCDAEGEPIPEITWKRAVDGFTFTEGDKSLDGRIEVKGQHGSSSLHIKDVKLSDSGRYDCEAASRIGGHQKSMYLDIEYAPKFISNQTIYYSWEGNPINISCDVKSNPPASIHWRRDKLVLPAKNTTNLKTYSTGRKMILEIAPTSDNDFGRYNCTATNHIGTRFQEYILALADVPSSPYGVKIIELSQTTAKVSFNKPDSHGGVPIHHYQVDVKEVASEIWKIVRSHGVQTMVVLNNLEPNTTYEIRVAAVNGKGQGDYSKIEIFQTLPVREPSPPSIHGQPSSGKSFKLSITKQDDGGAPILEYIVKYRSKDKEDQWLEKKVQGNKDHIILEHLQWTMGYEVQITAANRLGYSEPTVYEFSMPPKPNIIKDTLFNGLGLGAVIGLGVAALLLILVVTDVSCFFIRQCGLLMCITRRMCGKKSGSSGKSKELEEGKAAYLKDGSKEPIVEMRTEDERVTNHEDGSPVNEPNETTPLTEPEKLPLKEEDGKEALNPETIEIKVSNDIIQSKEDDSKA

SEQ ID NO: 11723 - protein, 102 aa, Homo sapiens
MSVMKPCLMTIAILMILAQKTPGGLFRSHNGKSREPWNPCELYQGMCRNACREYEIQYLTCPNDQKCCLKLSVKITSSKNVKEDYDSNSNLSVTNSSSYSHI

SEQ ID NO: 11724 - protein, 88 aa, Homo sapiens
MLPDHFSPLSGDIKLSVLALVVLVVLAQTAPDGWIRRCYYGTGRCRKSCKEIERKKEKCGEKHICCVPKEKDKLSHIHDQKETSELYI

SEQ ID NO: 11725 - protein, 933 aa, Homo sapiens
MADLSLLQEDLQEDADGSLDFVSQDEMLTPLGRLDKYAASENIFNRQMVARSLLDTLREVCDDERDCIAVLERISRLADDSEPTVRAELMEQVPHIALFCQENRPSIPYAFSKFLLPIVVRYLADQNNQVRKTSQAALLALLEQELIERFDVETKVCPVLIELTAPDSNDDVKTEAVAIMCKMAPMVGKDITERLILPRFCEMCCDCRMFHVRKVCAANFGDICSVVGQQATEEMLLPRFFQLCSDNVWGVRKACAECFMAVSCATCQEIRRTKLSALFINLISDPSRWVRQAAFQSLGPFISTFANPSSSGQYFKEESKSSEEMSVENKNRTRDQEAPEDVQVRPEDTPSDLSVSNSSVILENTMEDHAAEASGKPLGEISVPLDSSLLCTLSSESHQEAASNENDKKPGNYKSMLRPEVGTTSQDSALLDQELYNSFHFWRTPLPEIDLDIELEQNSGGKPSPEGPEEESEGPVPSSPNITMATRKELEEMIENLEPHIDDPDVKAQVEVLSAALRASSLDAHEETISIEKRSDLQDELDINELPNCKINQEDSVPLISDAVENMDSTLHYIHSDSDLSNNSSFSPDEERRTKVQDVVPQALLDQYLSMTDPSRAQTVDTEIAKHCAYSLPGVALTLGRQNWHCLRETYETLASDMQWKVRRTLAFSIHELAVILGDQLTAADLVPIFNGFLKDLDEVRIGVLKHLHDFLKLLHIDKRREYLYQLQEFLVTDNSRNWRFRAELAEQLILLLELYSPRDVYDYLRPIALNLCADKVSSVRWISYKLVSEMVKKLHAATPPTFGVDLINELVENFGRCPKWSGRQAFVFVCQTVIEDDCLPMDQFAVHLMPHLLTLANDRVPNVRVLLAKTLRQTLLEKDYFLASASCHQEAVEQTIMALQMDRDSDVKYFASIHPASTKISEDAMSTASSTY

SEQ ID NO: 11726 - protein, 950 aa, Homo sapiens
MADLSLLQEDLQEDADGFGVDDYSSESDVIIIPSALDFVSQDEMLTPLGRLDKYAASENIFNRQMVARSLLDTLREVCDDERDCIAVLERISRLADDSEPTVRAELMEQVPHIALFCQENRPSIPYAFSKFLLPIVVRYLADQNNQVRKTSQAALLALLEQELIERFDVETKVCPVLIELTAPDSNDDVKTEAVAIMCKMAPMVGKDITERLILPRFCEMCCDCRMFHVRKVCAANFGDICSVVGQQATEEMLLPRFFQLCSDNVWGVRKACAECFMAVSCATCQEIRRTKLSALFINLISDPSRWVRQAAFQSLGPFISTFANPSSSGQYFKEESKSSEEMSVENKNRTRDQEAPEDVQVRPEDTPSDLSVSNSSVILENTMEDHAAEASGKPLGEISVPLDSSLLCTLSSESHQEAASNENDKKPGNYKSMLRPEVGTTSQDSALLDQELYNSFHFWRTPLPEIDLDIELEQNSGGKPSPEGPEEESEGPVPSSPNITMATRKELEEMIENLEPHIDDPDVKAQVEVLSAALRASSLDAHEETISIEKRSDLQDELDINELPNCKINQEDSVPLISDAVENMDSTLHYIHSDSDLSNNSSFSPDEERRTKVQDVVPQALLDQYLSMTDPSRAQTVDTEIAKHCAYSLPGVALTLGRQNWHCLRETYETLASDMQWKVRRTLAFSIHELAVILGDQLTAADLVPIFNGFLKDLDEVRIGVLKHLHDFLKLLHIDKRREYLYQLQEFLVTDNSRNWRFRAELAEQLILLLELYSPRDVYDYLRPIALNLCADKVSSVRWISYKLVSEMVKKLHAATPPTFGVDLINELVENFGRCPKWSGRQAFVFVCQTVIEDDCLPMDQFAVHLMPHLLTLANDRVPNVRVLLAKTLRQTLLEKDYFLASASCHQEAVEQTIMALQMDRDSDVKYFASIHPASTKISEDAMSTASSTY

SEQ ID NO: 11727 - protein, 172 aa, Homo sapiens
MRAPLCLLLLVAHAVDMLALNRRKKQVGTGLGGNCTGCIICSEENGCSTCQQRLFLFIRREGIRQYGKCLHDCPPGYFGIRGQEVNRCKKCGATCESCFSQDFCIRCKRQFYLYKGKCLPTCPPGTLAHQNTRECQERSPGQKKGRKDRRPRKDRKLDRRLDVRPRQPGLQP

SEQ ID NO: 11728 - protein, 477 aa, Homo sapiens
MPPCQPQRPLLLLLLLLACQPQVPSAQVMDFLFEKWKLYGDQCHHNLSLLPPPTELVCNRTFDKYSCWPDTPANTTANISCPWYLPWHHKVQHRFVFKRCGPDGQWVRGPRGQPWRDASQCQMDGEEIEVQKEVAKMYSSFQVMYTVGYSLSLGALLLALAILGGLSKLHCTRNAIHANLFASFVLKASSVLVIDGLLRTRYSQKIGDDLSVSTWLSDGAVAGCRVAAVFMQYGIVANYCWLLVEGLYLHNLLGLATLPERSFFSLYLGIGWGAPMLFVVPWAVVKCLFENVQCWTSNDNMGFWWILRFPVFLAILINFFIFVRIVQLLVAKLRARQMHHTDYKFRLAKSTLTLIPLLGVHEVVFAFVTDEHAQGTLRSAKLFFDLFLSSFQGLLVAVLYCFLNKEVQSELRRRWHRWRLGKVLWEERNTSNHRASSSPGHGPPSKELQFGRGGGSQDSSAETPLAGGLPRLAESPF

SEQ ID NO: 11729 - protein, 167 aa, Homo sapiens
MLTVALLALLCASASGNAIQARSSSYSGEYGGGGGKRFSHSGNQLDGPITALRVRVNTYYIVGLQVRYGKVWSDYVGGRNGDLEEIFLHPGESVIQVSGKYKWYLKKLVFVTDKGRYLSFGKDSGTSFNAVPLHPNTVLRFISGRSGSLIDAIGLHWDVYPSSCSRC

SEQ ID NO: 11730 - protein, 83 aa, Homo sapiens
MAARRGALIVLEGVDRAGKSTQSRKLVEALCAAGHRAELLRFPERSTEIGKLLSSYLQKKSDVEDHSVHLLFSANRWEQVIFP

SEQ ID NO: 11731 - protein, 495 aa, Homo sapiens
MDLPVGPGAAGPSNVPAFLTKLWTLVSDPDTDALICWSPSGNSFHVFDQGQFAKEVLPKYFKHNNMASFVRQLNMYGFRKVVHIEQGGLVKPERDDTEFQHPCFLRGQEQLLENIKRKVTSVSTLKSEDIKIRQDSVTKLLTDVQLMKGKQECMDSKLLAMKHENEALWREVASLRQKHAQQQKVVNKLIQFLISLVQSNRILGVKRKIPLMLNDSGSAHSMPKYSRQFSLEHVHGSGPYSAPSPAYSSSSLYAPDAVASSGPIISDITELAPASPMASPGGSIDERPLSSSPLVRVKEEPPSPPQSPRVEEASPGRPSSVDTLLSPTALIDSILRESEPAPASVTALTDARGHTDTEGRPPSPPPTSTPEKCLSVACLDNLARTPQMSRVARLFPCPSSSPHGQVQPGNELSDHLDAMDSNLDNLQTMLSSHGFSVDTSALLDIQELLSPQEPPRPPEAENSSPDSAGALHSAAAVPAGPRLRGHREQRPAGAV

SEQ ID NO: 11732 - protein, 141 aa, Homo sapiens
METAGAATGQPASGLEAPGSTNDRLFLVKGGIFLGTVAAAGMLAGFITTLSLAKKKSPEWFNKGSMATAALPESGSSLALRALGWGSLYAWCGVGVISFAVWKALGVHSMNDFRSKMQSIFPTIPKNSESAVEWEETLKSK

SEQ ID NO: 11733 - protein, 520 aa, Homo sapiens
MAAAAAAAGAAGSAAPAAAAGAPGSGGAPSGSQGVLIGDRLYSGVLITLENCLLPDDKLRFTPSMSSGLDTDTETDLRVVGCELIQAAGILLRLPQVAMATGQVLFQRFFYTKSFVKHSMEHVSMACVHLASKIEEAPRRIRDVINVFHRLRQLRDKKKPVPLLLDQDYVNLKNQIIKAERRVLKELGFCVHVKHPHKIIVMYLQVLECERNQHLVQTSWNYMNDSLRTDVFVRFQPESIACACIYLAARTLEIPLPNRPHWFLLFGATEEEIQEICLKILQLYARKKVDLTHLEGEVEKRKHAIEEAKAQARGLLPGGTQVLDGTSGFSPAPKLVESPKEGKGSKPSPLSVKNTKRRLEGAKKAKADSPVNGLPKGRESRSRSRSREQSYSRSPSRSASPKRRKSDSGSTSGGSKSQSRSRSRSDSPPRQAPRSAPYKGSEIRGSRKSKDCKYPQKPHKSRSRSSSRSRSRSRERADNPGKYKKKSHYYRDQRRERSRSYERTGRRYERDHPGHSRHRR

SEQ ID NO: 11734 - protein, 686 aa, Homo sapiens
MRLLTLLGLLCGSVATPLGPKWPEPVFGRLASPGFPGEYANDQERRWTLTAPPGYRLRLYFTHFDLELSHLCEYDFVKLSSGAKVLATLCGQESTDTERAPGKDTFYSLGSSLDITFRSDYSNEKPFTGFEAFYAAEDIDECQVAPGEAPTCDHHCHNHLGGFYCSCRAGYVLHRNKRTCSALCSGQVFTQRSGELSSPEYPRPYPKLSSCTYSISLEEGFSVILDFVESFDVETHPETLCPYDFLKIQTDREEHGPFCGKTLPHRIETKSNTVTITFVTDESGDHTGWKIHYTSTAQPCPYPMAPPNGHVSPVQAKYILKDSFSIFCETGYELLQGHLPLKSFTAVCQKDGSWDRPMPACSIVDCGPPDDLPSGRVEYITGPGVTTYKAVIQYSCEETFYTMKVNDGKYVCEADGFWTSSKGEKSLPVCEPVCGLSARTTGGRIYGGQKAKPGDFPWQVLILGGTTAAGALLYDNWVLTAAHAVYEQKHDASALDIRMGTLKRLSPHYTQAWSEAVFIHEGYTHDAGFDNDIALIKLNNKVVINSNITPICLPRKEAESFMRTDDIGTASGWGLTQRGFLARNLMYVDIPIVDHQKCTAAYEKPPYPRGSVTANMLCAGLESGGKDSCRGDSGGALVFLDSETERWFVGGIVSWGSMNCGEAGQYGVYTKVINYIPWIENIISDF

SEQ ID NO: 11735 - protein, 185 aa, Homo sapiens
MRLLTLLGLLCGSVATPLGPKWPEPVFGRLASPGFPGEYANDQERRWTLTAPPGYRLRLYFTHFDLELSHLCEYDFVKLSSGAKVLATLCGQESTDTERAPGKDTFYSLGSSLDITFRSDYSNEKPFTGFEAFYAAEDIDECQVAPGEAPTCDHHCHNHLGGFYCSCRAGYVLHRNKRTCSEQSL

SEQ ID NO: 11736 - protein, 116 aa, Homo sapiens
MSAPAQPPAEGTEGTAPGGGPPGPPPNMTSNRRLQQTQAQVEEVVDIIRVNVDKVLERDQKLSELDDRADALQAGASQFESSAAKLKRKYWWKNCKMMIMLGAICAIIVVVIVRRD

SEQ ID NO: 11737 - protein, 1435 aa, Homo sapiens
MAAGGGGGSSKASSSSASSAGALESSLDRKFQSVTNTMESIQGLSSWCIENKKHHSTIVYHWMKWLRRSAYPHRLNLFYLANDVIQNCKRKNAIIFRESFADVLPEAAALVKDPSVSKSVERIFKIWEDRNVYPEEMIVALREALTSTNPKAALKSKIVAEFRSQALIEELLLYKRSEDQIELKEKQLSTMRVDVCSTETLKCLKDKTGGKKFSKEFEEASSKLEEFVNGLDKQVKNGPSLTEALENAGIFYEAQYKEVKVVANAYKTFANRVNNLKKKLDQLKSTLPDPEESPVPSPSMDAPSPTGSESPFQGMGGEESQSPTMESEKSATPEPVTDNRDVEDMELSDVEDDGSKIIVEDRKEKPAEKSAVSTSVPTKPTENISKASSCTPVPVTMTATPPLPKPVNTSLSPSPALALPNLANVDLAKISSILSSLTSVMKNTGVSPASRPSPGTPTSPSNLTSGLKTPAPATTTSHNPLANILSKVEITPESILSALSKTQTQSAPALQGLSSLLQSVTGNPVPASEAASQSTSASPANTTVSTIKGRNLPSSAQPFIPKSFNYSPNSSTSEVSSTSASKASIGQSPGLPSTTFKLPSNSLGFTATHNTSPAAPPTEVTICQSSEVSKPKLESESTSPSLEMKIHNFLKGNPGFSGLNLNIPILSSLGSSAPSESHPSDFQRGPTSTSIDNIDGTPVRDERSGTPTQDEMMDKPTSSSVDTMSLLSKIISPGSSTPSSTRSPPPGRDESYPRELSNSVSTYRPFGLGSESPYKQPSDGMERPSSLMDSSQEKFYPDTSFQEDEDYRDFEYSGPPPSAMMNLEKKPAKSILKSSKLSDTTEYQPILSSYSHRAQEFGVKSAFPPSVRALLDSSENCDRLSSSPGLFGAFSVRGNEPGSDRSPSPSKNDSFFTPDSNHNSLSQSTTGHLSLPQKQYPDSPHPVPHRSLFSPQNTLAAPTGHPPTSGVEKVLASTISTTSTIEFKNMLKNASRKPSDDKHFGQAPSKGTPSDGVSLSNLTQPSLTATDQQQQEEHYRIETRVSSSCLDLPDSTEEKGAPIETLGYHSASNRRMSGEPIQTVESIRVPGKGNRGHGREASRVGWFDLSTSGSSFDNGPSSASELASLGGGGSGGLTGFKTAPYKERAPQFQESVGSFRSNSFNSTFEHHLPPSPLEHGTPFQREPVGPSSAPPVPPKDHGGIFSRDAPTHLPSVDLSNPFTKEAALAHAAPPPPPGEHSGIPFPTPPPPPPPGEHSSSGGSGVPFSTPPPPPPPVDHSGVVPFPAPPLAEHGVAGAVAVFPKDHSSLLQGTLAEHFGVLPGPRDHGGPTQRDLNGPGLSRVRESLTLPSHSLEHLGPPHGGGGGGGSNSSSGPPLGPSHRDTISRSGIILRSPRPDFRPREPFLSRDPFHSLKRPRPPFARGPPFFAPKRPFFPPRY

SEQ ID NO: 11738 - protein, 1299 aa, Homo sapiens
MESSSSDYYNKDNEEESLLANVASLRHELKITEWSLQSLGEELSSVSPSENSDYAPNPSRSEKLILDVQPSHPGLLNYSPYENVCKISGSSTDFQKKPRDKMFSSSAPVDQEIKSLREKLNKLRQQNACLVTQNHSLMTKFESIHFELTQSRAKVSMLESAQQQAASVPILEEQIINLEAEVSAQDKVLREAENKLEQSQKMVIEKEQSLQESKEECIKLKVDLLEQTKQGKRAERQRNEALYNAEELSKAFQQYKKKVAEKLEKVQAEEEILERNLTNCEKENKRLQERCGLYKSELEILKEKLRQLKEENNNGKEKLRIMAVKNSEVMAQLTESRQSILKLESELENKDEILRDKFSLMNENRELKVRVAAQNERLDLCQQEIESSRVELRSLEKIISQLPLKRELFGFKSYLSKYQMSSFSNKEDRCIGCCEANKLVISELRIKLAIKEAEIQKLHANLTANQLSQSLITCNDSQESSKLSSLETEPVKLGGHQVAESVKDQNQHTMNKQYEKERQRLVTGIEELRTKLIQIEAENSDLKVNMAHRTSQFQLIQEELLEKASNSSKLESEMTKKCSQLLTLEKQLEEKIVAYSSIAAKNAELEQELMEKNEKIRSLETNINTEHEKICLAFEKAKKIHLEQHKEMEKQIERLEAQLEKKDQQFKEQEKTMSMLQQDIICKQHHLESLDRLLTESKGEMKKENMKKDEALKALQNQVSEETIKVRQLDSALEICKEELVLHLNQLEGNKEKFEKQLKKKSEEVYCLQKELKIKNHSLQETSEQNVILQHTLQQQQQMLQQETIRNGELEDTQTKLEKQVSKLEQELQKQRESSAEKLRKMEEKCESAAHEADLKRQKVIELTGTARQVKIEMDQYKEELSKMEKEIMHLKRDGENKAMHLSQLDMILDQTKTELEKKTNAVKELEKLQHSTETELTEALQKREVLETELQNAHGELKSTLRQLQELRDVLQKAQLSLEEKYTTIKDLTAELRECKMEIEDKKQELLEMDQALKERNWELKQRAAQVTHLDMTIREHRGEMEQKIIKLEGTLEKSELELKECNKQIESLNDKLQNAKEQLREKEFIMLQNEQEISQLKKEIERTQQRMKEMESVMKEQEQYIATQYKEAIDLGQELRLTREQVQNSHTELAEARHQQVQAQREIERLSSELEDMKQLSKEKDAHGNHLAEELGASKVREAHLEARMQAEIKKLSAEVESLKEAYHMEMISHQENHAKWKISADSQKSSVQQLNEQLEKAKLELEEAQDTVSNLHQQVQDRNEVIEAANEALLTKGENV

SEQ ID NO: 11739 - protein, 144 aa, Homo sapiens
MVAMAAGPSGCLVPAFGLRLLLATVLQAVSAFGAEFSSEACRELGFSSNLLCSSCDLLGQFNLLQLDPDCRGCCQEEAQFETKKYSSIVSKQECHHSNCMQELFLKFVDENWEGSLKSKLLLGVINPNCSEDCKSSMSVVQTLY

SEQ ID NO: 11740 - protein, 565 aa, Homo sapiens
MDGASSGGGGSSEGGGGSSGSGYGVVARFSQCLAEFRTWLRTNWLRFNADKTDVMLPSVESSSPGGSATSDDHEFDPSADMLVHDFDDERTLEEEEMMEGETNFSSEIEDLAREGDMPIHELLSLYGYGSTVRLPEEDEEEEEEEEEGEDDEDADNDDNSGCSGENKEENIKDSSGQEDETQSSNDDPSQSVASQDAQEIIRPRRCKYFDTNSEVEEESEEDEDYIPSEDWKKEIMVGSMFQAEIPVGICRYKENEKVYENDDQLLWDPEYLPEDKVIIFLKDASRRTGDEKGVEAIPEGSHIKDNEQALYELVKCNFDTEEALRRLRFNVKAAREELSVWTEEECRNFEQGLKAYGKDFHLIQANKVRTRSVGECVAFYYMWKKSERYDFFAQQTRFGKKKYNLHPGVTDYMDRLLDESESAASSRAPSPPPTASNSSNSQSEKEDGTVSTANQNGVSSNGPGEILNKEEVKVEGLHINGPTGGNKKPLHADMDTNGYETDNLTTDPKLAHMTARNENDFDEKSERPAKRRRVNSNGKESPGSSEFFQEAVSHGKFEELENTDD

SEQ ID NO: 11741 - protein, 282 aa, Homo sapiens
MEPKVAELKQKIEDTLCPFGFEVYPFQVAWYNELLPPAFHLPLPGPTLAFLVLSTPAMFDRALKPFLQSCHLRMLTDPVDQCVAYHLGRVRESLPELQIEIIADYEVHPNRRPKILAQTAAHVAGAAYYYQRQDVEADPWGNQRISGVCIHPRFGGWFAIRGVVLLPGIEVPDLPPRKPHDCVPTRADRIALLEGFNFHWRDWTYRDAVTPQERYSEEQKAYFSTPPAQRLALLGLAQPSEKPSSPSPDLPFTTPAPKKPGNPSRARSWLSPRVSPPASPGP

SEQ ID NO: 11742 - protein, 1094 aa, Homo sapiens
MAARAPPAAPAAEEPGNPGGPPRRKKSRSGASGLRRAFSWLRGKRRKKKAAGAEGAEPAAPRAKKAEDKAKRAKGKGRGSAKAENDKHLSVGPGQGPGSAVDEHQDNVFFPSGRPPHLEELHTQAQEGLRSLQHQEKQKLNKGGWDHGDTQSIQSSRTGPDEDNISFCSQTTSYVAESSTAEDALSIRSEMIQRKGSTFRPHDSFPKSGKSGRRRRERRSTVLGLPQHVQKELGLRNEREAPGTPRAPGARDAVRIPTVDGRPRGTSGMGARVSLQALEAEAEAGAETEAMLQRHIDRVYRDDTFVGRSTGTRAPPLTRPMSLAVPGLTGGAGPAEPLSPAMSISPQATYLSKLIPHAVLPPTVDVVALGRCSLRTLSRCSLHSASPASVRSLGRFSSVSSPQPRSRHPSSSSDTWSHSQSSDTIVSDGSTLSSKGGSEGQPESSTASNSVVPPPQGGSGRGSPSGGSTAEASDTLSIRSSGQLSGRSVSLRKLKRPPPPPRRTHSLHQRGLAVPDGPLGLPPKPERKQQPQLPRPPTTGGSEGAGAAPCPPNPANSWVPGLSPGGSRRPPRSPERTLSPSSGYSSQSGTPTLPPKGLAGPPASPGKAQPPKPERVTSLRSPGASVSSSLTSLCSSSSDPAPSDRSGPQILTPLGDRFVIPPHPKVPAPFSPPPSKPRSPNPAAPALAAPAVVPGPVSTTDASPQSPPTPQTTLTPLQESPVISKDQSPPPSPPPSYHPPPPPTKKPEVVVEAPSASETAEEPLQDPNWPPPPPPAPEEQDLSMADFPPPEEAFFSVASPEPAGPSGSPELVSSPAASSSSATALQIQPPGSPDPPPAPPAPAPASSAPGHVAKLPQKEPVGCSKGGGPPREDVGAPLVTPSLLQMVRLRSVGAPGGAPTPALGPSAPQKPLRRALSGRASPVPAPSSGLHAAVRLKACSLAASEGLSSAQPNGPPEAEPRPPQSPASTASFIFSKGSRKLQLERPVSPETQADLQRNLVAELRSISEQRPPQAPKKSPKAPPPVARKPSVGVPPPASPSYPRAEPLTAPPTNGLPHTQDRTKRELAENGGVLQLVGPEEKMGLPGSDSQKELA

SEQ ID NO: 11743 - protein, 152 aa, Homo sapiens
MEDEEVAESWEEAADSGEIDRRLEKKLKITQKESRKSKSPPKVPIVIQDDSLPAGPPPQIRILKRPTSNGVVSSPNSTSRPTLPVKSLAQREAEYAEARKRILGSASPEEEQEKPILDRPTRISQPEDSRQPNNVIRQPLGPDGSQGFKQRR

SEQ ID NO: 11744 - protein, 937 aa, Homo sapiens
MYNMRRLSLSPTFSMGFHLLVTVSLLFSHVDHVIAETEMEGEGNETGECTGSYYCKKGVILPIWEPQDPSFGDKIARATVYFVAMVYMFLGVSIIADRFMSSIEVITSQEKEITIKKPNGETTKTTVRIWNETVSNLTLMALGSSAPEILLSVIEVCGHNFTAGDLGPSTIVGSAAFNMFIIIALCVYVVPDGETRKIKHLRVFFVTAAWSIFAYTWLYIILSVISPGVVEVWEGLLTFFFFPICVVFAWVADRRLLFYKYVYKRYRAGKQRGMIIEHEGDRPSSKTEIEMDGKVVNSHVENFLDGALVLEVDERDQDDEEARREMARILKELKQKHPDKEIEQLIELANYQVLSQQQKSRAFYRIQATRLMTGAGNILKRHAADQARKAVSMHEVNTEVTENDPVSKIFFEQGTYQCLENCGTVALTIIRRGGDLTNTVFVDFRTEDGTANAGSDYEFTEGTVVFKPGDTQKEIRVGIIDDDIFEEDENFLVHLSNVKVSSEASEDGILEANHVSTLACLGSPSTATVTIFDDDHAGIFTFEEPVTHVSESIGIMEVKVLRTSGARGNVIVPYKTIEGTARGGGEDFEDTCGELEFQNDEIVKIITIRIFDREEYEKECSFSLVLEEPKWIRRGMKGGFTITDEYDDKQPLTSKEEEERRIAEMGRPILGEHTKLEVIIEESYEFKSTVDKLIKKTNLALVVGTNSWREQFIEAITVSAGEDDDDDECGEEKLPSCFDYVMHFLTVFWKVLFAFVPPTEYWNGWACFIVSILMIGLLTAFIGDLASHFGCTIGLKDSVTAVVFVALGTSVPDTFASKVAATQDQYADASIGNVTGSNAVNVFLGIGVAWSIAAIYHAANGEQFKVSPGTLAFSVTLFTIFAFINVGVLLYRRRPEIGGELGGPRTAKLLTSCLFVLLWLLYIFFSSLEAYCHIKGF

SEQ ID NO: 11745 - protein, 196 aa, Homo sapiens
MRTLACLLLLGCGYLAHVLAEEAEIPREVIERLARSQIHSIRDLQRLLEIDSVGSEDSLDTSLRAHGVHATKHVPEKRPLPIRRKRSIEEAVPAVCKTRTVIYEIPRSQVDPTSANFLIWPPCVEVKRCTGCCNTSSVKCQPSRVHHRSVKVAKVEYVRKKPKLKEVQVRLEEHLECACATTSLNPDYREEDTDVR

SEQ ID NO: 11746 - protein, 837 aa, Homo sapiens
MSLSHLYRDGEGRIDDDDDERENFEITDWDLQNEFNPNRQRHWQTKEEATYGVWAERDSDDERPSFGGKRARDYSAPVNFISAGLKKGAAEEAELEDSDDEEKPVKQDDFPKDFGPRKLKTGGNFKPSQKGFAGGTKSFMDFGSWERHTKGIGQKLLQKMGYVPGRGLGKNAQGIINPIEAKQRKGKGAVGAYGSERTTQSMQDFPVVDSEEEAEEEFQKELSQWRKDPSGSKKKPKYSYKTVEELKAKGRISKKLTAPQKELSQVKVIDMTGREQKVYYSYSQISHKHNVPDDGLPLQSQQLPQSGKEAKAPGFALPELEHNLQLLIDLTEQEIIQNDRQLQYERDMVVNLFHELEKMTEVLDHEERVISNLSKVLEMVEECERRMQPDCSNPLTLDECARIFETLQDKYYEEYRMSDRVDLAVAIVYPLMKEYFKEWDPLKDCTYGTEIISKWKSLLENDQLLSHGGQDLSADAFHRLIWEVWMPFVRNIVTQWQPRNCDPMVDFLDSWVHIIPVWILDNILDQLIFPKLQKEVENWNPLTDTVPIHSWIHPWLPLMQARLEPLYSPIRSKLSSALQKWHPSDSSAKLILQPWKDVFTPGSWEAFMVKNIVPKLGMCLGELVINPHQQHMDAFYWVIDWEGMISVSSLVGLLEKHFFPKWLQVLCSWLSNSPNYEEITKWYLGWKSMFSDQVLAHPSVKDKFNEALDIMNRAVSSNVGAYMQPGARENIAYLTHTERRKDFQYEAMQERREAENMAQRGIGVAASSVPMNFKDLIETKAEEHNIVFMPVIGKRHEGKQLYTFGRIVIYIDRGVVFVQGEKTWVPTSLQSLIDMAK

SEQ ID NO: 11747 - protein, 486 aa, Homo sapiens
MPRPAPARRLPGLLLLLWPLLLLPSAAPDPVARPGFRRLETRGPGGSPGRRPSPAAPDGAPASGTSEPGRARGAGVCKSRPLDLVFIIDSSRSVRPLEFTKVKTFVSRIIDTLDIGPADTRVAVVNYASTVKIEFQLQAYTDKQSLKQAVGRITPLSTGTMSGLAIQTAMDEAFTVEAGAREPSSNIPKVAIIVTDGRPQDQVNEVAARAQASGIELYAVGVDRADMASLKMMASEPLEEHVFYVETYGVIEKLSSRFQETFCALDPCVLGTHQCQHVCISDGEGKHHCECSQGYTLNADKKTCSALDRCALNTHGCEHICVNDRSGSYHCECYEGYTLNEDRKTCSAQDKCALGTHGCQHICVNDRTGSHHCECYEGYTLNADKKTCSVRDKCALGSHGCQHICVSDGAASYHCDCYPGYTLNEDKKTCSATEEARRLVSTEDACGCEATLAFQDKVSSYLQRLNTKLDDILEKLKINEYGQIHR

SEQ ID NO: 11748 - protein, 399 aa, Homo sapiens
MWQLLAAACWMLLLGSMYGYDKKGNNANPEANMNISQIISYWGYPYEEYDVTTKDGYILGIYRIPHGRGCPGRTAPKPAVYLQHGLIASASNWICNLPNNSLAFLLADSGYDVWLGNSRGNTWSRKHLKLSPKSPEYWAFSLDEMAKYDLPATINFIIEKTGQKRLYYVGHSQGTTIAFIAFSTNPELAKKIKIFFALAPVVTVKYTQSPMKKLTTLSRRVVKVLFGDKMFHPHTLFDQFIATKVCNRKLFRRICSNFLFTLSGFDPQNLNMSRLDVYLSHNPAGTSVQNMLHWAQAVNSGQLQAFDWGNSDQNMMHFHQLTPPLYNITKMEVPTAIWNGGQDIVADPKDVENLLPQIANLIYYKLIPHYNHVDFYLGEDAPQEIYQDLIILMEEYLQN

SEQ ID NO: 11749 - protein, 392 aa, Homo sapiens
MARAMAAAWPLLLVALLVLSWPPPGTGDVVVQAPTQVPGFLGDSVTLPCYLQVPNMEVTHVSQLTWARHGESGSMAVFHQTQGPSYSESKRLEFVAARLGAELRNASLRMFGLRVEDEGNYTCLFVTFPQGSRSVDIWLRVLAKPQNTAEVQKVQLTGEPVPMARCVSTGGRPPAQITWHSDLGGMPNTSQVPGFLSGTVTVTSLWILVPSSQVDGKNVTCKVEHESFEKPQLLTVNLTVYYPPEVSISGYDNNWYLGQNEATLTCDARSNPEPTGYNWSTTMGPLPPFAVAQGAQLLIRPVDKPINTTLICNVTNALGARQAELTVQVKEGPPSEHSGMSRNAIIFLVLGILVFLILLGIGIYFYWSKCSREVLWHCHLCPSSEHHQSCRN

SEQ ID NO: 11750 - protein, 344 aa, Homo sapiens
MFTSTGSSGLYKAPLSKSLLLVPSALSLLLALLLPHCQKLFVYDLHAVKNDFQIWRLICGRIICLDLKDTFCSSLLIYNFRIFERRYGSRKFASFLLGSWVLSALFDFLLIEAMQYFFGITAASNLPSGFLAPVFALFVPFYCSIPRVQVAQILGPLSITNKTLIYILGLQLFTSGSYIWIVAISGLMSGLCYDSKMFQVHQVLCIPSWMAKFFSWTLEPIFSSSEPTSEARIGMGATLDIQRQQRMELLDRQLMFSQFAQGRRQRQQQGGMINWNRLFPPLRQRQNVNYQGGRQSEPAAPPLEVSEEQVARLMEMGFSRGDALEALRASNNDLNVATNFLLQH

SEQ ID NO: 11751 - protein, 398 aa, Homo sapiens
MMWLLLTTTCLICGTLNAGGFLDLENEVNPEVWMNTSEIIIYNGYPSEEYEVTTEDGYILLVNRIPYGRTHARSTGPRPVVYMQHALFADNAYWLENYANGSLGFLLADAGYDVWMGNSRGNTWSRRHKTLSETDEKFWAFSFDEMAKYDLPGVIDFIVNKTGQEKLYFIGHSLGTTIGFVAFSTMPELAQRIKMNFALGPTISFKYPTGIFTRFFLLPNSIIKAVFGTKGFFLEDKKTKIASTKICNNKILWLICSEFMSLWAGSNKKNMNQSRMDVYMSHAPTGSSVHNILHIKQLYHSDEFRAYDWGNDADNMKHYNQSHPPIYDLTAMKVPTAIWAGGHDVLVTPQDVARILPQIKSLHYFKLLPDWNHFDFVWGLDAPQRMYSEIIALMKAYS

SEQ ID NO: 11752 - protein, 560 aa, Homo sapiens
MLRGTLLCAVLGLLRAQPFPCPPACKCVFRDAAQCSGGDVARISALGLPTNLTHILLFGMGRGVLQSQSFSGMTVLQRLMISDSHISAVAPGTFSDLIKLKTLRLSRNKITHLPGALLDKMVLLEQLFLDHNALRGIDQNMFQKLVNLQELALNQNQLDFLPASLFTNLENLKLLDLSGNNLTHLPKGLLGAQAKLERLLLHSNRLVSLDSGLLNSLGALTELQFHRNHIRSIAPGAFDRLPNLSSLTLSRNHLAFLPSALFLHSHNLTLLTLFENPLAELPGVLFGEMGGLQELWLNRTQLRTLPAAAFRNLSRLRYLGVTLSPRLSALPQGAFQGLGELQVLALHSNGLTALPDGLLRGLGKLRQVSLRRNRLRALPRALFRNLSSLESVQLDHNQLETLPGDVFGALPRLTEVLLGHNSWRCDCGLGPFLGWLRQHLGLVGGEEPPRCAGPGAHAGLPLWALPGGDAECPGPRGPPPRPAADSSSEAPVHPALAPNSSEPWVWAQPVTTGKGQDHSPFWGFYFLLLAVQAMITVIIVFAMIKIGQLFRKLIRERALG

SEQ ID NO: 11753 - protein, 402 aa, Homo sapiens
MRLPRRAALGLLPLLLLLPPAPEAAKKPTPCHRCRGLVDKFNQGMVDTAKKNFGGGNTAWEEKTLSKYESSEIRLLEILEGLCESSDFECNQMLEAQEEHLEAWWLQLKSEYPDLFEWFCVKTLKVCCSPGTYGPDCLACQGGSQRPCSGNGHCSGDGSRQGDGSCRCHMGYQGPLCTDCMDGYFSSLRNETHSICTVRTGLSDSYPPCCLSLGCWRGVGHAWIRGRNTHTQPGYSSRVWIAAFSPACDESCKTCSGLTNRDCGECEVGWVLDEGACVDVDECAAEPPPCSAAQFCKNANGSYTCEECDSSCVGCTGEGPGNCKECISGYAREHGQCADVDECSLAEKTCVRKNENCYNTPGSYVCVCPDGFEETEDACVPPAEAEATEGESPTQLPSREDL

SEQ ID NO: 11754 - protein, 1442 aa, Homo sapiens
MSIAIPLGVTTSDTSYSDMAAGSDPESVEASPAVNEKSVYSTHNYGTTQRHGCRGLPYATIIPRSDLNGLPSPVEERCGDSPNSEGETVPTWCPCGLSQDGFLLNCDKCRGMSRGKVIRLHRRKQDNISGGDSSATESWDEELSPSTVLYTATQHTPTSITLTVRRTKPKKRKKSPEKGRAAPKTKKIKNSPSEAQNLDENTTEGWENRIRLWTDQYEEAFTNQYSADVQNALEQHLHSSKEFVGKPTILDTINKTELACNNTVIGSQMQLQLGRVTRVQKHRKILRAARDLALDTLIIEYRGKVMLRQQFEVNGHFFKKPYPFVLFYSKFNGVEMCVDARTFGNDARFIRRSCTPNAEVRHMIADGMIHLCIYAVSAITKDAEVTIAFDYEYSNCNYKVDCACHKGNRNCPIQKRNPNATELPLLPPPPSLPTIGAETRRRKARRKELEMEQQNEASEENNDQQSQEVPEKVTVSSDHEEVDNPEEKPEEEKEEVIDDQENLAHSRRTREDRKVEAIMHAFENLEKRKKRRDQPLEQSNSDVEITTTTSETPVGEETKTEAPESEVSNSVSNVTIPSTPQSVGVNTRRSSQAGDIAAEKLVPKPPPAKPSRPRPKSRISRYRTSSAQRLKRQKQANAQQAELSQAALEEGGSNSLVTPTEAGSLDSSGENRPLTGSDPTVVSITGSHVNRAASKYPKTKKYLVTEWLNDKAEKQECPVECPLRITTDPTVLATTLNMLPGLIHSPLICTTPKHYIRFGSPFIPERRRRPLLPDGTFSSCKKRWIKQALEEGMTQTSSVPQETRTQHLYQSNENSSSSSICKDNADLLSPLKKWKSRYLMEQNVTKLLRPLSPVTPPPPNSGSKSPQLATPGSSHPGEEECRNGYSLMFSPVTSLTTASRCNTPLQFELCHRKDLDLAKVGYLDSNTNSCADRPSLLNSGHSDLAPHPSLGPTSETGFPSRSGDGHQTLVRNSDQAFRTEFNLMYAYSPLNAMPRADGLYRGSPLVGDRKPLHLDGGYCSPAEGFSSRYEHGLMKDLSRGSLSPGGERACEGVPSAPQNPPQRKKVSLLEYRKRKQEAKENSAGGGGDSAQSKSKSAGAGQGSSNSVSDTGAHGVQGSSARTPSSPHKKFSPSHSSMSHLEAVSPSDSRGTSSSHCRPQENISSRWMVPTSVERLREGGSIPKVLRSSVRVAQKGEPSPTWESNITEKDSDPADGEGPETLSSALSKGATVYSPSRYSYQLLQCDSPRTESQSLLQQSSSPFRGHPTQSPGYSYRTTALRPGNPPSHGSSESSLSSTSYSSPAHPVSTDSLAPFTGTPGYFSSQPHSGNSTGSNLPRRSCPSSAASPTLQGPSDSPTSDSVSQSSTGTLSSTSFPQNSRSSLPSDLRTISLPSAGQSAVYQASRVSAVSNSQHYPHRGSGGVHQYRLQPLQGSGVKTQTGLS

SEQ ID NO: 11755 - protein, 128 aa, Homo sapiens; identical to SEQ ID NO: 295

SEQ ID NO: 11756 - protein, 537 aa, Homo sapiens
MLADKHAKEIEEESETTVEADLTDKQKHQLKHRELFLSRQYESLPATHIRGKCSVALLNETESVLSYLDKEDTFFYSLVYDPSLKTLLADKGEIRVGPRYQADIPEMLLEGESDEREQSKLEVKVWDPNSPLTDRQIDQFLVVARAVGTFARALDCSSSVRQPSLHMSAAAASRDITLFHAMDTLYRHSYDLSSAISVLVPLGGPVLCRDEMEEWSASEASLFEEALEKYGKDFNDIRQDFLPWKSLTSIIEYYYMWKTTDRYVQQKRLKAAEAESKLKQVYIPTYKPNPNQISTSNGKPGAVNGAVGTTFQPQNPLLGRACESCYATQSHQWYSWGPPNMQCRLCAICWLYWKKYGGLKMPTQSEEEKLSPSPTTEDPRVRSHVSRQAMQGMPVRNTGSPKSAVKTRQAFFLHTTYFTKFARQVCKNTLRLRQAARRPFVAINYAAIRAEYADRHAELSGSPLKSKSTRKPLACIIGYLEIHPAKKPNVIRSTPSLQTPTTKRMLTTPNHTSLSILGKRNYSHHNGLDELTCCVSD

SEQ ID NO: 11757 - protein, 1081 aa, Homo sapiens
MDSLASLVLCGVSLLLSGTVEGAMDLILINSLPLVSDAETSLTCIASGWRPHEPITIGRDFEALMNQHQDPLEVTQDVTREWAKKVVWKREKASKINGAYFCEGRVRGEAIRIRTMKMRQQASFLPATLTMTVDKGDNVNISFKKVLIKEEDAVIYKNGSFIHSVPRHEVPDILEVHLPHAQPQDAGVYSARYIGGNLFTSAFTRLIVRRCEAQKWGPECNHLCTACMNNGVCHEDTGECICPPGFMGRTCEKACELHTFGRTCKERCSGQEGCKSYVFCLPDPYGCSCATGWKGLQCNEGIQRMTPKIVDLPDHIEVNSGKFNPICKASGWPLPTNEEMTLVKPDGTVLHPKDFNHTDHFSVAIFTIHRILPPDSGVWVCSVNTVAGMVEKPFNISVKVLPKPLNAPNVIDTGHNFAVINISSEPYFGDGPIKSKKLLYKPVNHYEAWQHIQVTNEIVTLNYLEPRTEYELCVQLVRRGEGGEGHPGPVRRFTTASIGLPPPRGLNLLPKSQTTLNLTWQPIFPSSEDDFYVEVERRSVQKSDQQNIKVPGNLTSVLLNNLHPREQYVVRARVNTKAQGEWSEDLTAWTLSDILPPQPENIKISNITHSSAVISWTILDGYSISSITIRYKVQGKNEDQHVDVKIKNATITQYQLKGLEPETAYQVDIFAENNIGSSNPAFSHELVTLPESQAPADLGGGKMLLIAILGSAGMTCLTVLLAFLIILQLKRANVQRRMAQAFQNVREEPAVQFNSGTLALNRKVKNNPDPTIYPVLDWNDIKFQDVIGEGNFGQVLKARIKKDGLRMDAAIKRMKEYASKDDHRDFAGELEVLCKLGHHPNIINLLGACEHRGYLYLAIEYAPHGNLLDFLRKSRVLETDPAFAIANSTASTLSSQQLLHFAADVARGMDYLSQKQFIHRDLAARNILVGENYVAKIADFGLSRGQEVYVKKTMGRLPVRWMAIESLNYSVYTTNSDVWSYGVLLWEIVSLGGTPYCGMTCAELYEKLPQGYRLEKPLNCDDEVYDLMRQCWREKPYERPSFAQILVSLNRMLEERKTYVNTTLYEKFTYAGIDCSAEEAA

SEQ ID NO: 11758 - protein, 376 aa, Homo sapiens
MMMMALSKTFGQKPVKFQLEDDGEFYMIGSEVGNYLRMFRGSLYKRYPSLWRRLATVEERKKIVASSHDHGYTTLATSVTLLKASEVEEILDGNDEKYKAVSISTEPPTYLREQKAKRNSQWVPTLPNSSHHLDAVPCSTTINRNRMGRDKKRTFPLCFDDHDPAVIHENASQPEVLVPIRLDMEIDGQKLRDAFTWNMNEKLMTPEMFSEILCDDLDLNPLTFVPAIASAIRQQIESYPTDSILEDQSDQRVIIKLNIHVGNISLVDQFEWDMSEKENSPEKFALKLCSELGLGGEFVTTIAYSIRGQLSWHQKTYAFSENPLPTVEIAIRNTGDADQWCPLLETLTDAEMEKKIRDQDRNTRRMRRLANTAPAW

SEQ ID NO: 11759 - protein, 454 aa, Homo sapiens
MELATRYQIPKEVADIFNAPSDDEEFVGFRDDVPMETLSSEESCDSFDSLESGKQQDVRFHSKYFTEELRRIFIEDTDSETEDFAGFTQSDLNGKTNPEVMVVESDLSDDGKASLVSEEEEDEEEDKATPRRSRSRRSSIGLRVAFQFPTKKLANKPDKNSSSEQLFSSARLQNEKKTILERKKDCRQVIQREDSTSESEDDSRDESQESSDALLKRTMNIKENKAMLAQLLAELNSMPDFFPVRTPTSASRKKTVRRAFSEGQITRRMNPTRSARPPEKFALENFTVSAAKFAEEFYSFRRRKTIGGKCREYRRRHRISSFRPVEDITEEDLENVAITVRDKIYDKVLGNTCHQCRQKTIDTKTVCRNQGCCGVRGQFCGPCLRNRYGEDVRSALLDPDWVCPPCRGICNCSYCRKRDGRCATGILIHLAKFYGYDNVKEYLESLQKELVEDN

SEQ ID NO: 11760 - protein, 717 aa, Homo sapiens
MSRRSQRLTRYSQGDDDGSSSSGGSSVAGSQSTLFKDSPLRTLKRKSSNMKRLSPAPQLGPSSDAHTSYYSESLVHESWFPPRSSLEELHGDANWGEDLRVRRRRGTGGSESSRASGLVGRKATEDFLGSSSGYSSEDDYVGYSDVDQQSSSSRLRSAVSRAGSLLWMVATSPGRLFRLLYWWAGTTWYRLTTAASLLDVFVLTRRFSSLKTFLWFLLPLLLLTCLTYGAWYFYPYGLQTFHPALVSWWAAKDSRRPDEGWEARDSSPHFQAEQRVMSRVHSLERRLEALAAEFSSNWQKEAMRLERLELRQGAPGQGGGGGLSHEDTLALLEGLVSRREAALKEDFRRETAARIQEELSALRAEHQQDSEDLFKKIVRASQESEARIQQLKSEWQSMTQESFQESSVKELRRLEDQLAGLQQELAALALKQSSVAEEVGLLPQQIQAVRDDVESQFPAWISQFLARGGGGRVGLLQREEMQAQLRELESKILTHVAEMQGKSAREAAASLSLTLQKEGVIGVTEEQVHHIVKQALQRYSEDRIGLADYALESGGASVISTRCSETYETKTALLSLFGIPLWYHSQSPRVILQPDVHPGNCWAFQGPQGFAVVRLSARIRPTAVTLEHVPKALSPNSTISSAPKDFAIFGFDEDLQQEGTLLGKFTYDQDGEPIQTFHFQAPTMATYQVVELRILTNWGHPEYTCIYRFRVHGEPAH

SEQ ID NO: 11761 - protein, 2514 aa, Homo sapiens
MSGSTQPVAQTWRATEPRYPPHSLSYPVQIARTHTDVGLLEYQHHSRDYASHLSPGSIIQPQRRRPSLLSEFQPGNERSQELHLRPESHSYLPELGKSEMEFIESKRPRLELLPDPLLRPSPLLATGQPAGSEDLTKDRSLTGKLEPVSPPSPPHTDPELELVPPRLSKEELIQNMDRVDREITMVEQQISKLKKKQQQLEEEAAKPPEPEKPVSPPPIESKHRSLVQIIYDENRKKAEAAHRILEGLGPQVELPLYNQPSDTRQYHENIKINQAMRKKLILYFKRRNHARKQWEQKFCQRYDQLMEAWEKKVERIENNPRRRAKESKVREYYEKQFPEIRKQRELQERMQSRVGQRGSGLSMSAARSEHEVSEIIDGLSEQENLEKQMRQLAVIPPMLYDADQQRIKFINMNGLMADPMKVYKDRQVMNMWSEQEKETFREKFMQHPKNFGLIASFLERKTVAECVLYYYLTKKNENYKSLVRRSYRRRGKSQQQQQQQQQQQQQQQQQPMPRSSQEEKDEKEKEKEAEKEEEKPEVENDKEDLLKEKTDDTSGEDNDEKEAVASKGRKTANSQGRRKGRITRSMANEANSEEAITPQQSAELASMELNESSRWTEEEMETAKKGLLEHGRNWSAIARMVGSKTVSQCKNFYFNYKKRQNLDEILQQHKLKMEKERNARRKKKKAPAAASEEAAFPPVVEDEEMEASGVSGNEEEMVEEAEALHASGNEVPRGECSGPATVNNSSDTESIPSPHTEAAKDTGQNGPKPPATLGADGPPPGPPTPPPEDIPAPTEPTPASEATGAPTPPPAPPSPSAPPPVVPKEEKEEETAAAPPVEEGEEQKPPAAEELAVDTGKAEEPVKSECTEEAEEGPAKGKDAEAAEATAEGALKAEKKEGGSGRATTAKSSGAPQDSDSSATCSADEVDEAEGGDKNRLLSPRPSLLTPTGDPRANASPQKPLDLKQLKQRAAAIPPIQVTKVHEPPREDAAPTKPAPPAPPPPQNLQPESDAPQQPGSSPRGKSRSPAPPADKEAFAAEAQKLPGDPPCWTSGLPFPVPPREVIKASPHAPDPSAFSYAPPGHPLPLGLHDTARPVLPRPPTISNPPPLISSAKHPSVLERQIGAISQGMSVQLHVPYSEHAKAPVGPVTMGLPLPMDPKKLAPFSGVKQEQLSPRGQAGPPESLGVPTAQEASVLRGTALGSVPGGSITKGIPSTRVPSDSAITYRGSITHGTPADVLYKGTITRIIGEDSPSRLDRGREDSLPKGHVIYEGKKGHVLSYEGGMSVTQCSKEDGRSSSGPPHETAAPKRTYDMMEGRVGRAISSASIEGLMGRAIPPERHSPHHLKEQHHIRGSITQGIPRSYVEAQEDYLRREAKLLKREGTPPPPPPSRDLTEAYKTQALGPLKLKPAHEGLVATVKEAGRSIHEIPREELRHTPELPLAPRPLKEGSITQGTPLKYDTGASTTGSKKHDVRSLIGSPGRTFPPVHPLDVMADARALERACYEESLKSRPGTASSSGGSIARGAPVIVPELGKPRQSPLTYEDHGAPFAGHLPRGSPVTTREPTPRLQEGSLSSSKASQDRKLTSTPREIAKSPHSTVPEHHPHPISPYEHLLRGVSGVDLYRSHIPLAFDPTSIPRGIPLDAAAAYYLPRHLAPNPTYPHLYPPYLIRGYPDTAALENRQTIINDYITSQQMHHNAATAMAQRADMLRGLSPRESSLALNYAAGPRGIIDLSQVPHLPVLVPPTPGTPATAMDRLAYLPTAPQPFSSRHSSSPLSPGGPTHLTKPTTTSSSERERDRDRERDRDREREKSILTSTTTVEHAPIWRPGTEQSSGSSGGGGGSSSRPASHSHAHQHSPISPRTQDALQQRPSVLHNTGMKGIITAVEPSTPTVLRSTSTSSPVRPAATFPPATHCPLGGTLDGVYPTLMEPVLLPKEAPRVARPERPRADTGHAFLAKPPARSGLEPASSPSKGSEPRPLVPPVSGHATIARTPAKNLAPHHASPDPPAPPASASDPHREKTQSKPFSIQELELRSLGYHGSSYSPEGVEPVSPVSSPSLTHDKGLPKHLEELDKSHLEGELRPKQPGPVKLGGEAAHLPHLRPLPESQPSSSPLLQTAPGVKGHQRVVTLAQHISEVITQDYTRHHPQQLSAPLPAPLYSFPGASCPVLDLRRPPSDLYLPPPDHGAPARGSPHSEGGKRSPEPNKTSVLGGGEDGIEPVSPPEGMTEPGHSRSAVYPLLYRDGEQTEPSRMGSKSPGNTSQPPAFFSKLTESNSAMVKSKKQEINKKLNTHNRNEPEYNISQPGTEIFNMPAITGTGLMTYRSQAVQEHASTNMGLEAIIRKALMGKYDQWEESPPLSANAFNPLNASASLPAAMPITAADGRSDHTLTSPGGGGKAKVSGRPSSRKAKSPAPGLASGDRPPSVSSVHSEGDCNRRTPLTNRVWEDRPSSAGSTPFPYNPLIMRLQAGVMASPPPPGLPAGSGPLAGPHHAWDEEPKPLLCSQYETLSDSE

SEQ ID NO: 11762 - protein, 411 aa, Homo sapiens
MRLSFIVFSSQATIILPLTGDRGKISKGLEDLKRVSPVGETYIHEGLKLANEQIQKAGGLKTSSIIIALTDGKLDGLVPSYAEKEAKISRSLGASVYCVGVLDFEQAQLERIADSKEQVFPVKGGFQALKGIINSILAQSCTEILELQPSSVCVGEEFQIVLSGRGFMLGSRNGSVLCTYTVNETYTTSVKPVSVQLNSMLCPAPILNKAGETLDVSVSFNGGKSVISGSLIVTATECSNGIAAIIVILVLLLLLGIGLMWWFWPLCCKVVIKDPPPPPAPAPKEEEEEPLPTKKWPTVDASYYGGRGVGGIKRMEVRWGDKGSTEEGARLEKAKNAVVKIPEETEEPIRPRPPRPKPTHQPPQTKWYTPIKGRLDALWALLRRQYDRVSLMRPQEGDEGRCINFSRVPSQ

SEQ ID NO: 11763 - protein, 195 aa, Homo sapiens
MAADGQCSLPASWRPVTLTHVEYPAGDLSGHLLAYLSLSPVFVIVGFVTLIIFKRELHTISFLGGLALNEGVNWLIKNVIQEPRPCGGPHTAVGTKYGMPSSHSQFMWFFSVYSFLFLYLRMHQTNNARFLDLLWRHVLSLGLLAVAFLVSYSRPVSEFFLIRDTSLIPNVLWFEYTVTRAEARNRQRKLGTKLQ

SEQ ID NO: 11764 - protein, 897 aa, Homo sapiens
MVLAQGLLSMALLALCWERSLAGAEETIPLQTLRCYNDYTSHITCRWADTQDAQRLVNVTLIRRVNEDLLEPVSCDLSDDMPWSACPHPRCVPRRCVIPCQSFVVTDVDYFSFQPDRPLGTRLTVTLTQHVQPPEPRDLQISTDQDHFLLTWSVALGSPQSHWLSPGDLEFEVVYKRLQDSWEDAAILLSNTSQATLGPEHLMPSSTYVARVRTRLAPGSRLSGRPSKWSPEVCWDSQPGDEAQPQNLECFFDGAAVLSCSWEVRKEVASSVSFGLFYKPSPDAGEEECSPVLREGLGSLHTRHHCQIPVPDPATHGQYIVSVQPRRAEKHIKSSVNIQMAPPSLNVTKDGDSYSLRWETMKMRYEHIDHTFEIQYRKDTATWKDSKTETLQNAHSMALPALEPSTRYWARVRVRTSRTGYNGIWSEWSEARSWDTESVLPMWVLALIVIFLTIAVLLALRFCGIYGYRLRRKWEEKIPNPSKSHLFQNGSAELWPPGSMSAFTSGSPPHQGPWGSRFPELEGVFPVGFGDSEVSPLTIEDPKHVCDPPSGPDTTPAASDLPTEQPPSPQPGPPAASHTPEKQASSFDFNGPYLGPPHSRSLPDILGQPEPPQEGGSQKSPPPGSLEYLCLPAGGQVQLVPLAQAMGPGQAVEVERRPSQGAAGSPSLESGGGPAPPALGPRVGGQDQKDSPVAIPMSSGDTEDPGVASGYVSSADLVFTPNSGASSVSLVPSLGLPSDQTPSLCPGLASGPPGAPGPVKSGFEGYVELPPIEGRSPRSPRNNPVPPEAKSPVLNPGERPADVSPTSPQPEGLLVLQQVGDYCFLPGLGPGPLSLRSKPSSPGPGPEIKNLDQAFQVKKPPGQAVPQVPVIQLFKALKQQDYLSLPPWEVNKPGEVC

SEQ ID NO: 11765 - protein, 725 aa, Homo sapiens
MLQTKDLIWTLFFLGTAVSLQVDIVPSQGEISVGESKFFLCQVAGDAKDKDISWFSPNGEKLTPNQQRISVVWNDDSSSTLTIYNANIDDAGIYKCVVTGEDGSESEATVNVKIFQKLMFKNAPTPQEFREGEDAVIVCDVVSSLPPTIIWKHKGRDVILKKDVRFIVLSNNYLQIRGIKKTDEGTYRCEGRILARGEINFKDIQVIVNVPPTIQARQNIVNATANLGQSVTLVCDAEGFPEPTMSWTKDGEQIEQEEDDEKYIFSDDSSQLTIKKVDKNDEAEYICIAENKAGEQDATIHLKVFAKPKITYVENQTAMELEEQVTLTCEASGDPIPSITWRTSTRNISSEEKTLDGHMVVRSHARVSSLTLKSIQYTDAGEYICTASNTIGQDSQSMYLEVQYAPKLQGPVAVYTWEGNQVNITCEVFAYPSATISWFRDGQLLPSSNYSNIKIYNTPSASYLEVTPDSENDFGNYNCTAVNRIGQESLEFILVQADTPSSPSIDQVEPYSSTAQVQFDEPEATGGVPILKYKAEWRAVGEEVWHSKWYDAKEASMEGIVTIVGLKPETTYAVRLAALNGKGLGEISAASEFKTQPVREPSAPKLEGQMGEDGNSIKVNLIKQDDGGSPIRHYLVRYRALSSEWKPEIRLPSGSDHVMLKSLDWNAEYEVYVVAENQQGKSKAAHFVFRTSAQPTAIPATLGGNSASYTFVSLLFSAVTLLLLC

SEQ ID NO: 11766 - protein, 1174 aa, Homo sapiens
MARQPPPPWVHAAFLLCLLSLGGAIEIPMDLTQPPTITKQSAKDHIVDPRDNILIECEAKGNPAPSFHWTRNSRFFNIAKDPRVSMRRRSGTLVIDFRSGGRPEEYEGEYQCFARNKFGTALSNRIRLQVSKSPLWPKENLDPVVVQEGAPLTLQCNPPPGLPSPVIFWMSSSMEPITQDKRVSQGHNGDLYFSNVMLQDMQTDYSCNARFHFTHTIQQKNPFTLKVLTNHPYNDSSLRNHPDMYSARGVAERTPSFMYPQGTASSQMVLRGMDLLLECIASGVPTPDIAWYKKGGDLPSDKAKFENFNKALRITNVSEEDSGEYFCLASNKMGSIRHTISVRVKAAPYWLDEPKNLILAPGEDGRLVCRANGNPKPTVQWMVNGEPLQSAPPNPNREVAGDTIIFRDTQISSRAVYQCNTSNEHGYLLANAFVSVLDVPPRMLSPRNQLIRVILYNRTRLDCPFFGSPIPTLRWFKNGQGSNLDGGNYHVYENGSLEIKMIRKEDQGIYTCVATNILGKAENQVRLEVKDPTRIYRMPEDQVARRGTTVQLECRVKHDPSLKLTVSWLKDDEPLYIGNRMKKEDDSLTIFGVAERDQGSYTCVASTELDQDLAKAYLTVLGRPDRPRDLELTDLAERSVRLTWIPGDANNSPITDYVVQFEEDQFQPGVWHDHSKYPGSVNSAVLRLSPYVNYQFRVIAINEVGSSHPSLPSERYRTSGAPPESNPGDVKGEGTRKNNMEITWTPMNATSAFGPNLRYIVKWRRRETREAWNNVTVWGSRYVVGQTPVYVPYEIRVQAENDFGKGPEPESVIGYSGEDYPRAAPTEVKVRVMNSTAISLQWNRVYSDTVQGQLREYRAYYWRESSLLKNLWVSQKRQQASFPGDRLRGVVSRLFPYSNYKLEMVVVNGRGDGPRSETKEFTTPEGVPSAPRRFRVRQPNLETINLEWDHPEHPNGIMIGYTLKYVAFNGTKVGKQIVENFSPNQTKFTVQRTDPVSRYRFTLSARTQVGSGEAVTEESPAPPNEATPTAAYTNNQADIATQGWFIGLMCAIALLVLILLIVCFIKRSRGGKYPVREKKDVPLGPEDPKEEDGSFDYSDEDNKPLQGSQTSLDGTIKQQESDDSLVDYGEGGEGQFNEDGSFIGQYTVKKDKEETEGNESSEATSPVNAIYSLA

SEQ ID NO: 11767 - protein, 368 aa, Homo sapiens
MGHLSAPLHRVRVPWQGLLLTASLLTFWNPPTTAQLTTESMPFNVAEGKEVLLLVHNLPQQLFGYSWYKGERVDGNRQIVGYAIGTQQATPGPANSGRETIYPNASLLIQNVTQNDTGFYTLQVIKSDLVNEEATGQFHVYPELPKPSISSNNSNPVEDKDAVAFTCEPETQDTTYLWWINNQSLPVSPRLQLSNGNRTLTLLSVTRNDTGPYECEIQNPVSANRSDPVTLNVTYGPDTPTISPSDTYYRPGANLSLSCYAASNPPAQYSWLINGTFQQSTQELFIPNITVNNSGSYTCHANNSVTGCNRTTVKTIIVTDNALPQENGLSPGAIAGIVIGVVALVALIAVALACFLHFGKTGSSGPLQ

SEQ ID NO: 11768 - protein, 1395 aa, Homo sapiens
MDTKLMCLLFFFSLPPLLVSNHTGRIKVVFTPSICKVTCTKGSCQNSCEKGNTTTLISENGHAADTLTATNFRVVICHLPCMNGGQCSSRDKCQCPPNFTGKLCQIPVHGASVPKLYQHSQQPGKALGTHVIHSTHTLPLTVTSQQGVKVKFPPNIVNIHVKHPPEASVQIHQVSRIDGPTGQKTKEAQPGQSQVSYQGLPVQKTQTIHSTYSHQQVIPHVYPVAAKTQLGRCFQETIGSQCGKALPGLSKQEDCCGTVGTSWGFNKCQKCPKKPSYHGYNQMMECLPGYKRVNNTFCQDINECQLQGVCPNGECLNTMGSYRCTCKIGFGPDPTFSSCVPDPPVISEEKGPCYRLVSSGRQCMHPLSVHLTKQLCCCSVGKAWGPHCEKCPLPGTAAFKEICPGGMGYTVSGVHRRRPIHHHVGKGPVFVKPKNTQPVAKSTHPPPLPAKEEPVEALTFSREHGPGVAEPEVATAPPEKEIPSLDQEKTKLEPGQPQLSPGISTIHLHPQFPVVIEKTSPPVPVEVAPEASTSSASQVIAPTQVTEINECTVNPDICGAGHCINLPVRYTCICYEGYRFSEQQRKCVDIDECTQVQHLCSQGRCENTEGSFLCICPAGFMASEEGTNCIDVDECLRPDVCGEGHCVNTVGAFRCEYCDSGYRMTQRGRCEDIDECLNPSTCPDEQCVNSPGSYQCVPCTEGFRGWNGQCLDVDECLEPNVCANGDCSNLEGSYMCSCHKGYTRTPDHKHCRDIDECQQGNLCVNGQCKNTEGSFRCTCGQGYQLSAAKDQCEDIDECQHRHLCAHGQCRNTEGSFQCVCDQGYRASGLGDHCEDINECLEDKSVCQRGDCINTAGSYDCTCPDGFQLDDNKTCQDINECEHPGLCGPQGECLNTEGSFHCVCQQGFSISADGRTCEDIDECVNNTVCDSHGFCDNTAGSFRCLCYQGFQAPQDGQGCVDVNECELLSGVCGEAFCENVEGSFLCVCADENQEYSPMTGQCRSRTSTDLDVDVDQPKEEKKECYYNLNDASLCDNVLAPNVTKQECCCTSGVGWGDNCEIFPCPVLGTAEFTEMCPKGKGFVPAGESSSEAGGENYKDADECLLFGQEICKNGFCLNTRPGYECYCKQGTYYDPVKLQCFDMDECQDPSSCIDGQCVNTEGSYNCFCTHPMVLDASEKRCIRPAESNEQIEETDVYQDLCWEHLSDEYVCSRPLVGKQTTYTECCCLYGEAWGMQCALCPLKDSDDYAQLCNIPVTGRRQPYGRDALVDFSEQYTPEADPYFIQDRFLNSFEELQAEECGILNGCENGRCVRVQEGYTCDCFDGYHLDTAKMTCVDVNECDELNNRMSLCKNAKCINTDGSYKCLCLPGYVPSDKPNYCTPLNTALNLEKDSDLE

SEQ ID NO: 11769 - protein, 445 aa, Homo sapiens
MSWSLHPRNLILYFYALLFLSSTCVAYVATRDNCCILDERFGSYCPTTCGIADFLSTYQTKVDKDLQSLEDILHQVENKTSEVKQLIKAIQLTYNPDESSKPNMIDAATLKSRKMLEEIMKYEASILTHDSSIRYLQEIYNSNNQKIVNLKEKVAQLEAQCQEPCKDTVQIHDITGKVKVDSPSLDCQDIANKGAKQSGLYFIKPLKANQQFLVYCEIDGSGNGWTVFQKRLDGSVDFKKNWIQYKEGFGHLSPTGTTEFWLGNEKIHLISTQSAIPYALRVELEDWNGRTSTADYAMFKVGPEADKYRLTYAYFAGGDAGDAFDGFDFGDDPSDKFFTSHNGMQFSTWDNDNDKFEGNCAEQDGSGWWMNKCHAGHLNGVYYQGGTYSKASTPNGYDNGIIWATWKTRWYSMKKTTMKIIPFNRLTIGEGQQHHLGGAKQAGDV

SEQ ID NO: 11770 - protein, 240 aa, Homo sapiens
MMGIFLVYVGFVFFSVLYVQQGLSSQAKFTEFPRNVTATEGQNVEMSCAFQSGSASVYLEIQWWFLRGPEDLDPGAEGAGAQVELLPDRDPDSDGTKISTVKVQGNDISHKLQISKVRKKDEGLYECRVTDANYGELQEHKAQAYLKVNANSHARRMQAFEASPMWLQDMKPRKNVSAAIPSSIHGSANQRTHSTSSPQVVAKIPKQSPQSAKSKSPVKSTERTAKLTLNSKHHPAPTVL

SEQ ID NO: 11771 - protein, 325 aa, Homo sapiens
MRLPRRAALGLLPLLLLLPPAPEAAKKPTPCHRCRGLVDKFNQGMVDTAKKNFGGGNTAWEEKTLSKYESSEIRLLEILEGLCESSDFECNQMLEAQEEHLEAWWLQLKSEYPDLFEWFCVKTLKVCCSPGTYGPDCLACQGGSQRPCSGNGHCSGDGSRQGDGSCRCHMGYQGPLCTDCMDGYFSSLRNETHSICTACDESCKTCSGLTNRDCGECEVGWVLDEGACVECDSSCVGCTGEGPGNCKECISGYAREHGQCADVDECSLAEKTCVRKNENCYNTPGSYVCVCPDGFEETEDACVPPAEAEATEGESPTQLPSREDL

SEQ ID NO: 11772 - protein, 1461 aa, Homo sapiens
MSIAIPLGVTTSDTSYSDMAAGSDPESVEASPAVNEKSVYSTHNYGTTQRHGCRGLPYADHNYGAPPPPTPPASPPVQTIIPRSDLNGLPSPVEERCGDSPNSEGETVPTWCPCGLSQDGFLLNCDKCRGMSRGKVIRLHRRKQDNISGGDSSATESWDEELSPSTVLYTATQHTPTSITLTVRRTKPKKRKKSPEKGRAAPKTKKIKNSPSEAQNLDENTTEGWENRIRLWTDQYEEAFTNQYSADVQNALEQHLHSSKEFVGKPTILDTINKTELACNNTVIGSQMQLQLGRVTRVQKHRKILRAARDLALDTLIIEYRGKVMLRQQFEVNGHFFKKPYPFVLFYSKFNGVEMCVDARTFGNDARFIRRSCTPNAEVRHMIADGMIHLCIYAVSAITKDAEVTIAFDYEYSNCNYKVDCACHKGNRNCPIQKRNPNATELPLLPPPPSLPTIGAETRRRKARRKELEMEQQNEASEENNDQQSQEVPEKVTVSSDHEEVDNPEEKPEEEKEEVIDDQENLAHSRRTREDRKVEAIMHAFENLEKRKKRRDQPLEQSNSDVEITTTTSETPVGEETKTEAPESEVSNSVSNVTIPSTPQSVGVNTRRSSQAGDIAAEKLVPKPPPAKPSRPRPKSRISRYRTSSAQRLKRQKQANAQQAELSQAALEEGGSNSLVTPTEAGSLDSSGENRPLTGSDPTVVSITGSHVNRAASKYPKTKKYLVTEWLNDKAEKQECPVECPLRITTDPTVLATTLNMLPGLIHSPLICTTPKHYIRFGSPFIPERRRRPLLPDGTFSSCKKRWIKQALEEGMTQTSSVPQETRTQHLYQSNENSSSSSICKDNADLLSPLKKWKSRYLMEQNVTKLLRPLSPVTPPPPNSGSKSPQLATPGSSHPGEEECRNGYSLMFSPVTSLTTASRCNTPLQFELCHRKDLDLAKVGYLDSNTNSCADRPSLLNSGHSDLAPHPSLGPTSETGFPSRSGDGHQTLVRNSDQAFRTEFNLMYAYSPLNAMPRADGLYRGSPLVGDRKPLHLDGGYCSPAEGFSSRYEHGLMKDLSRGSLSPGGERACEGVPSAPQNPPQRKKVSLLEYRKRKQEAKENSAGGGGDSAQSKSKSAGAGQGSSNSVSDTGAHGVQGSSARTPSSPHKKFSPSHSSMSHLEAVSPSDSRGTSSSHCRPQENISSRWMVPTSVERLREGGSIPKVLRSSVRVAQKGEPSPTWESNITEKDSDPADGEGPETLSSALSKGATVYSPSRYSYQLLQCDSPRTESQSLLQQSSSPFRGHPTQSPGYSYRTTALRPGNPPSHGSSESSLSSTSYSSPAHPVSTDSLAPFTGTPGYFSSQPHSGNSTGSNLPRRSCPSSAASPTLQGPSDSPTSDSVSQSSTGTLSSTSFPQNSRSSLPSDLRTISLPSAGQSAVYQASRVSAVSNSQHYPHRGSGGVHQYRLQPLQGSGVKTQTGLS

SEQ ID NO: 11773 - protein, 822 aa, Homo sapiens
MDFSRLHMYSPPQCVPENTGYTYALSSSYSSDALDFETEHKLDPVFDSPRMSRRSLRLATTACTLGDGEAVGADSGTSSAVSLKNRAARTTKQRRSTNKSAFSINHVSRQVTSSGVSHGGTVSLQDAVTRRPPVLDESWIREQTTVDHFWGLDDDGDLKGGNKAAIQGNGDVGAAAATAHNGFSCSNCSMLSERKDVLTAHPAAPGPVSRVYSRDRNQKCDDCKGKRHLDAHTAAHSQSPRLPGRAGTLWHIWACAGYFLLQILRRIGAVGQAVSRTAWSALWLAVVAPGKAASGVFWWLGIGWYQFVTLISWLNVFLLTRCLRNICKFLVLLIPLFLLLAGLSLRGQGNFFSFLPVLNWASMHRTQRVDDPQDVFKPTTSRLKQPLQGDSEAFPWHWMSGVEQQVASLSGQCHHHGENLRELTTLLQKLQARVDQMEGGAAGPSASVRDAVGQPPRETDFMAFHQEHEVRMSHLEDILGKLREKSEAIQKELEQTKQKTISAVGEQLLPTVEHLQLELDQLKSELSSWRHVKTGCETVDAVQERVDVQVREMVKLLFSEDQQGGSLEQLLQRFSSQFVSKGDLQTMLRDLQLQILRNVTHHVSVTKQLPTSEAVVSAVSEAGASGITEAQARAIVNSALKLYSQDKTGMVDFALESGGGSILSTRCSETYETKTALMSLFGIPLWYFSQSPRVVIQPDIYPGNCWAFKGSQGYLVVRLSMMIHPAAFTLEHIPKTLSPTGNISSAPKDFAVYGLENEYQEEGQLLGQFTYDQDGESLQMFQALKRPDDTAFQIVELRIFSNWGHPEYTCLYRFRVHGEPVK

SEQ ID NO: 11774 - protein, 295 aa, Homo sapiens
MTGPGGRRNDPWGRQRAREGAHTSKHPTPRTGWTARRRRGAWALRPGTAGGWAKGQDFPSQFHLLIPAPPGDFVQLPVPVIQQLYHWDCGLACSRMVLRYLGQLDDSEFERALQKLQLTRSIWTIDLAYLMHHFGVRHRFCTQTLGVDKGYKNQSFYRKHFDTEETRVNQLFAQAKACKVLVEKCTVSVKDIQAHLAQGHVAIVLVNSGVLHCDLCSSPVKYCCFTPSGHHCFCRTPDYQGHFIVLRGYNRATGCIFYNNPAYADRMCSTSISNFEEARTSYGTDEDILFVYLDS

SEQ ID NO: 11775 - protein, 206 aa, Homo sapiens
MLMLFVFGVLLHEVSLSGQNEAPPNTHSIPGEPLYNYASIRLPEEHIPFFLHNNRHIATVCRKDSLCPYKKHLEKLKYCWGYEKSCKPEFRFGYPVCSYVDMGWTDTLESAEDIFWKQADFGYARERLEEMHVLCQPKETSDSSLVCSRYLQYCRATNLYLDLRNIKRNHDRFKEDFFQSGEIGGHCKLDIRTLTSEGQRKSPLQS

SEQ ID NO: 11776 - protein, 120 aa, Homo sapiens
MEAALLGLCNWSTLGVCAALKLPQISAVLAARSARGLSLPSLLLELAGFLVFLRYQCYYGYPPLTYLEYPILIAQDVILLLCIFHFNGNVKQATPYIAVLVSSWFILALQKWIIDLAMQE

SEQ ID NO: 11777 - protein, 1160 aa, Homo sapiens
MASVWKRLQRVGKHASKFQFVASYQELMVECTKKWQPDKLVVVWTRRSRRKSSKAHSWQPGIKNPYRGVVVWPVPENIEITVTLFKDPHAEEFEDKEWTFVIENESPSGRRKALATSSINMKQYASPMPTQTDVKLKFKPLSKKVVSAALQFSLSCIFLREGKATDEDMQSLASLMSMKQADIGNLDDFEEDNEDDDENRVNQEEKAAKITELINKLNFLDEAEKDLATVNSNPFDDPDAAELNPFGDPDSEEPITETASPRKTEDSFYNNSYNPFKEVQTPQYLNPFDEPEAFVTIKDSPPQSTKRKNIRPVDMSKYLYADSSKTEEEELDESNPFYEPKSTPPPNNLVNPVQELETERRVKRKAPAPPVLSPKTGVLNENTVSAGKDLSTSPKPSPIPSPVLGRKPNASQSLLVWCKEVTKNYRGVKITNFTTSWRNGLSFCAILHHFRPDLIDYKSLNPQDIKENNKKAYDGFASIGISRLLEPSDMVLLAIPDKLTVMTYLYQIRAHFSGQELNVVQIEENSSKSTYKVGNYETDTNSSVDQEKFYAELSDLKREPELQQPISGAVDFLSQDDSVFVNDSGVGESESEHQTPDDHLSPSTASPYCRRTKSDTEPQKSQQSSGRTSGSDDPGICSNTDSTQAQVLLGKKRLLKAETLELSDLYVSDKKKDMSPPFICEETDEQKLQTLDIGSNLEKEKLENSRSLECRSDPESPIKKTSLSPTSKLGYSYSRDLDLAKKKHASLRQTESDPDADRTTLNHADHSSKIVQHRLLSRQEELKERARVLLEQARRDAALKAGNKHNTNTATPFCNRQLSDQQDEERRRQLRERARQLIAEARSGVKMSELPSYGEMAAEKLKERSKASGEQNSKLVDLKLKKLLEVQPQVANSPSSAAQKAVTESSEQDMKSGTEDLRTERLQKTTERFRNPVVFSKDSTVRKTQLQSFSQYIENRPEMKRQRSIQEDTKKGNEEKAAITETQRKPSEDEVLNKGFKDTSQYVVGELAALENEQKQIDTRAALVEKRLRYLMDTGRNTEEEEAMMQEWFMLVNKKNALIRRMNQLSLLEKEHDLERRYELLNRELRAMLAIEDWQKTEAQKRREQLLLDELVALVNKRDALVRDLDAQEKQAEEEDEHLERTLEQNKGKMAKKEEKCVLQ

SEQ ID NO: 11778 - protein, 626 aa, Homo sapiens
MLPARGCVRKRTVWPRLARVLIVTLLTLELSYAPLPCQLSGVPYNTGDPVGRWARPCIWPCPWHTTINALKGRISELQWSVMDQEMRVKRLESEKQELQEQLDLQHKKCQEANQKIQELQASQEARADHEQQIKDLEQKLSLQEQDAAIVKNMKSELVRLPRLERELKQLREESAHLREMRETNGLLQEELEGLQRKLGRQEKMQETLVGLELENERLLAKLQSWERLDQTMGLSIRTPEDLSRFVVELQQRELALKDKNSAVTSSARGLEKARQQLQEELRQVSGQLLEERKKRETHEALARRLQKRVLLLTKERDGMRAILGSYDSELTPAEYSPQLTRRMREAEDMVQKVHSHSAEMEAQLSQALEELGGQKQRADMLEMELKMLKSQSSSAEQSFLFSREEADTLRLKVEELEGERSRLEEEKRMLEAQLERRALQGDYDQSRTKVLHMSLNPTSVARQRLREDHSQLQAECERLRGLLRAMERGGTVPADLEAAAASLPSSKEVAELKKQVESAELKNQRLKEVFQTKIQEFRKACYTLTGYQIDITTENQYRLTSLYAEHPGDCLIFKATSPSGSKMQLLETEFSHTVGELIEVHLRRQDSIPAFLSSLTLELFSRQTVA

SEQ ID NO: 11779 - protein, 1170 aa, Homo sapiens
MAAALGASGGAGAGDDDFDQFDKPGAERSWRRRAADEDWDSELEDDLLGEDLLSGKKNQSDLSDEELNDDLLQSDNEDEENFSSQGVTISLNATSGMVTSFELSDNTNDQSGEQESEYEQEQGEDELVYHKSDGSELYTQEYPEEGQYEGHEAELTEDQIEYVEEPEEEQLYTDEVLDIEINEPLDEFTGGMETLELQKDIKEESDEEEEDDEESGRLRFKTERKEGTIIRLSDVTRERRNIPETLELSAEAKAALLEFEERERQHKQGRYSSRRGGRRGGPLMCRGVGDQRRESTERGRMKDHRPALLPTQPPVVPQAPPPPPPPPQQQPIRSLFQPQPLQPLLPVQHPHHPSPPQGMHMPPQLETPRMMMTPPPVTPQQPKNIHINPHFKGTVVTPVQVPLLPVPSQPRPAVGPQRFPGPPEFPQHTPGPVPNSFSQPPRLPLQDQWRAPPPPQDRDPFFLGVSGEPRFPSHLFLEQRSPPPPPPPPTLLNSSHPVPTQSPLPFTQPGPAFNQQGQQPVFPRERPVRPALQPPGPVGILHFSQPGSATTRPFIPPRQPFLPGPGQPFLPTHTQPNLQGPLHPPLPPPHQPQPQQPQQQPPPQHQPPHQPPHQPPPQHQPPPQHPPQHPPQHQHHHHHHHLSVPPPPLMPMSQPQFRPHVQTAQPQASSSRMQCPQRQGLRHNTTSQNVSKRPMQQMQPTAPRNSNLRELPIAPSHVIEMSSSRCSATPSAQVKPIVSASPPSRAVAGSRSSQGKTEVKVKPASPVAQPKEEAKTETEFPDEDEETRLYRLKIEEQKRLREEILKQKELRRQQQAGARKKELLERLAQQQQQLYAPPPPAEQEEQALSPSPTNGNPLLPFPGAQVRQNVKNRLLVKNQDVSISNVQPKTSNFVPSSANMQYQGQQMKALKHLRQTRTVPQSQTQPLHKVLPIKPADVEEPAVPQTPRVASIQGRPQDTKPGVKRTVTHRTNSGGGDGPHISSKVRVIKLSGGGGESDGFFHPEGQPQRLPQPPEVGPQPARKVTLTRGGLQQPPHLPAGPHAHSPVPPGIKSIQGIHPAKKAIMHGRGRGVAGPMGRGRLMPNKQNLRVVECKPQPCVVSVEGLSSSTTDAQLKSLLMSVGPIQSLQMLPQQRKAIAKFKEPAHALAFQQKFHRHMIDLSHINVALIVE

SEQ ID NO: 11780 - protein, 1231 aa, Homo sapiens
MVLLWEPAGAWLALGLALALGPSVAAAAPRQDCTGVECPPLENCIEEALEPGACCATCVQQGCACEGYQYYDCLQGGFVRGRVPAGQSYFVDFGSTECSCPPGGGKISCQFMLCPELPPNCIEAVVVADSCPQCGQVGCVHAGHKYAAGHTVHLPPCRACHCPDAGGELICYQLPGCHGNFSDAEEGDPERHYEDPYSYDQEVAEVEAATALGGEVQAGAVQAGAGGPPAALGGGSQPLSTIQAPPWPAVLPRPTAAAALGPPAPVQAKARRVTEDSEEEEEEEEEREEMAVTEQLAAGGHRGLDGLPTTAPAGPSLPIQEERAEAGARAEAGARPEENLILDAQATSRSTGPEGVTHAPSLGKAALVPTQAVPGSPRDPVKPSPHNILSTSLPDAAWIPPTREVPRKPQVLPHSHVEEDTDPNSVHSIPRSSPEGSTKDLIETCCAAGQQWAIDNDECLEIPESGTEDNVCRTAQRHCCVSYLQEKSCMAGVLGAKEGETCGAEDNDSCGISLYKQCCDCCGLGLRVRAEGQSCESNPNLGYPCNHVMLSCCEGEEPLIVPEVRRPPEPAAAPRRVSEAEMAGREALSLGTEAELPNSLPGDDQDECLLLPGELCQHLCINTVGSYHCACFPGFSLQDDGRTCRPEGHPPQPEAPQEPALKSEFSQVASNTIPLPLPQPNTCKDNGPCKQVCSTVGGSAICSCFPGYAIMADGVSCEDQDECLMGAHDCSRRQFCVNTLGSFYCVNHTVLCADGYILNAHRKCVDINECVTDLHTCSRGEHCVNTLGSFHCYKALTCEPGYALKDGECEDVDECAMGTHTCQPGFLCQNTKGSFYCQARQRCMDGFLQDPEGNCVDINECTSLSEPCRPGFSCINTVGSYTCQRNPLICARGYHASDDGTKCVDVNECETGVHRCGEGQVCHNLPGSYRCDCKAGFQRDAFGRGCIDVNECWASPGRLCQHTCENTLGSYRCSCASGFLLAADGKRCEDVNECEAQRCSQECANIYGSYQCYCRQGYQLAEDGHTCTDIDECAQGAGILCTFRCLNVPGSYQCACPEQGYTMTANGRSCKDVDECALGTHNCSEAETCHNIQGSFRCLRFECPPNYVQVSKTKCERTTCHDFLECQNSPARITHYQLNFQTGLLVPAHIFRIGPAPAFTGDTIALNIIKGNEEGYFGTRRLNAYTGVVYLQRAVLEPRDFALDVEMKLWRQGSVTTFLAKMHIFFTTFAL

SEQ ID NO: 11781 - protein, 1151 aa, Homo sapiens
MSRRKQSKPRQIKRPLEDAIEDEEEECPSEETDIISKGDFPLEESFSTEFGPENLSCEEVEYFCNKGDDEGIQETAESDGDTQSEKPGQPGVETDDWDGPGELEVFQKDGERKIQSRQQLPVGTTWGPFPGKMDLNNNSLKTKAQVPMVLTAGPKWLLDVTWQGVEDNKNNCIVYSKGGQLWCTTTKAISEGEELIAFVVDFDSRLQAASQMTLTEGMYPARLLDSIQLLPQQAAMASILPTAIVNKDIFPCKSCGIWYRSERNLQAHLMYYCSGRQREAAPVSEENEDSAHQISSLCPFPQCTKSFSNARALEMHLNSHSGVKMEEFLPPGASLKCTVCSYTADSVINFHQHLFSHLTQAAFRCNHCHFGFQTQRELLQHQELHVPSGKLPRESDMEHSPSATEDSLQPATDLLTRSELPQSQKAMQTKDASSDTELDKCEKKTQLFLTNQRPEIQPTTNKQSFSYTKIKSEPSSPRLASSPVQPNIGPSFPVGPFLSQFSFPQDITMVPQASEILAKMSELVHRRLRHGSSSYPPVIYSPLMPKGATCFECNITFNNLDNYLVHKKHYCSSRWQQMAKSPEFPSVSEKMPEALSPNTGQTSINLLNPAAHSADPENPLLQTSCINSSTVLDLIGPNGKGHDKDFSTQTKKLSTSSNNDDKINGKPVDVKNPSVPLVDGESDPNKTTCEACNITFSRHETYMVHKQYYCATRHDPPLKRSASNKVPAMQRTMRTRKRRKMYEMCLPEQEQRPPLVQQRFLDVANLNNPCTSTQEPTEGLGECYHPRCDIFPGIVSKHLETSLTINKCVPVSKCDTTHSSVSCLEMDVPIDLSKKCLSQSERTTTSPKRLLDYHECTVCKISFNKVENYLAHKQNFCPVTAHQRNDLGQLDGKVFPNPESERNSPDVSYERSIIKCEKNGNLKQPSPNGNLFSSHLATLQGLKVFSEAAQLIATKEENRHLFLPQCLYPGAIKKAKGADQLSPYYGIKPSDYISGSLVIHNTDIEQSRNAENESPKGQASSNGCAALKKDSLPLLPKNRGMVIVNGGLKQDERPAANPQQENISQNPQHEDDHKSPSWISENPLAANENVSPGIPSAEEQLSSIAKGVNGSSQAPTSGKYCRLCDIQFNNLSNFITHKKFYCSSHAAEHVK

SEQ ID NO: 11782 - protein, 684 aa, Homo sapiens
MSASGVLSFTQQGWEQVLAKVKRAVVYLDAACAESLHWGCGSTRLLEAVGGPDCHLREFEPDAIGGGAKQPKAVFVLSCLLKGRTVEILRDIICRSHFQYCVVVTTVSHAVHLTANHVPAAAAAEMEGQQPVFEQLEEKLCEWMGNMNYTAEVFHVPLLLAPVAPHFALTPAFASLFPLLPQDVHLLNSARPDKRKLGSLGDVDSTTLTPELLLQIRCLVSGLSSLCEHLGVREECFAVGSLSQVIAADLANYAPAKNRKKTAAGRASVVFVDRTLDLTGAVGHHGDNLVEKIISALPQLPGHTNDVMVNMIALTALHTEEENYNVVAPGCLSQSSDTTAKALWEALLNTKHKEAVMEVRRHLVEAASRENLPIKMSMGRVTPGQLMSYIQLFKNNLKALMNHCGLLQLGLATAQTLKHPQTAKWDNFLAFERLLLQSIGESAMSVVLNQLLPMIKPVTQRTNEDYSPEELLILLIYIYSVTGELTVDKDLCEAEEKVKKALAQVFCEESGLSPLLQKITDWDSSINLTFHKSKIAVDELFTSLRDIAGARSLLKQFKSVYVPGNHTHQASYKPLLKQVVEEIFHPERPDSVDIEHMSSGLTDLLKTGFSMFMKVSRPHPSDYPLLILFVVGGVTVSEVKMVKDLVASLKPGTQVIVLSTRLLKPLNIPELLFATDRLHPDLGF

SEQ ID NO: 11783 - protein, 1445 aa, Homo sapiens
LRPGIFLLELLLLLGQGTPQIHTSPRKSTLEGQLWPETLKNSPFPCNPNKLGVNMPSKSVHSLKPSDIKFVAAIGNLEIPPDPGTGDLEKQDWTERPQQVCMGVMTVLSDIIRYFSPSVPMPVCHTGKRVIPHDGAEDLWIQAQELVRNMKENLQLDFQFDWKLINVFFSNASQCYLCPSAQQAPSLSTVLLSQNGLAAGGVDELMGVLDYLQQEVPRAFVNLVDLSEVAEVSRQYHGTWLSPAPEPCNCSEETTRLAKVVMQWSYQEAWNSLLASSRYSEQESFTVVFQPFFYETTPSLHSEDPRLQDSTTLAWHLWNRMMEPAGEKDEPLSVKHGRPMKCPSQESPYLFSYRNSNYLTRLQKPQDKLEVREGAEIRCPDKDPSDTVPTSVHRLKPADINVIGALGDSLTAGNGAGSTPGNVLDVLTQYRGLSWSVGGDENIGTVTTLANILREFNPSLKGFSVGTGKETSPNAFLNQAVAGGRAEDLPVQARRLVDLMKNDTRIHFQEDWKIITLFIGGNDLCDFCNDLVPRAFVNLVTVLEIVNLRELYQEKKVYCPRMILRSLCPCVLKFDDNSTELATLIEFNKKFQEKTHQLIESGRYDTREDFTVVVQPFFENVDMPKTSEGLPDNSFFAPDCFHFSSKSHSRAASALWNNMLEPVGQKTTRHKFENKINITCPNQVQPFLRTYKNSMQGHGTWLPCRDRAPSALHPTSVHALRPADIQVVAALGDSLTAGNGIGSKPDDLPDVTTQYRGLSYSAGGDGSLENVTTLPNILREFNRNLTGYAVGTGDANDTNAFLNQAVPGAKAEDLMSQVQTLMQKMKDDHRVNFHEDWKVITVLIGGSDLCDYCTDSNLYSAANFVHHLRNALDVLHREVPRVLVNLVDFLNPTIMRQVFLGNPDKCPVQQASVLCNCVLTLRENSQELARLEAFSRAYRSSMRELVGSGRYDTQEDFSVVLQPFFQNIQLPVLADGLPDTSFFAPDCIHPNQKFHSQLARALWTNMLEPLGSKTETLDLRAEMPITCPTQNEPFLRTPRNSNYTYPIKPAIENWGSDFLCTEWKASNSVPTSVHQLRPADIKVVAALGDSLTTAVGARPNNSSDLPTSWRGLSWSIGGDGNLETHTTLPNILKKFNPYLLGFSTSTWEGTAGLNVAAEGARARDMPAQAWDLVERMKNSPDINLEKDWKLVTLFIGVNDLCHYCENPEAHLATEYVQHIQQALDILSEELPRAFVNVVEVMELASLYQGQGGKCAMLAAQNNCTCLRHSQSSLEKQELKKVNWNLQHGISSFSYWHQYTQREDFAVVVQPFFQNTLTPLNERGDTDLTFFSEDCFHFSDRGHAEMAIALWNNMLEPVGRKTTSNNFTHSRAKLKCPSPESPYLYTLRNSRLLPDQAEEAPEVLYWAVPVAAGVGLVVGIIGTVVWRCRRGGRREDPPMSLRTVAL

SEQ ID NO: 11784 - protein, 293 aa, Homo sapiens
MEAVLTEELDEEEQLLRRHRKEKKELQAKIQGMKNAVPKNDKKRRKQLTEDVAKLEKEMEQKHREELEQLKLTTKENKIDSVAVNISNLVLENQPPRISKAQKRREKKAALEKEREERIAEAEIENLTGARHMESEKLAQILAARQLEIKQIPSDGHCMYKAIEDQLKEKDCALTVVALRSQTAEYMQSHVEDFLPFLTNPNTGDMYTPEEFQKYCEDIVNTAAWGGQLELRALSHILQTPIEIIQADSPPIIVGEEYSKKPLILVYMRHAYGLGEHYNSVTRLVNIVTENCS

SEQ ID NO: 11785 - protein, 437 aa, Homo sapiens
MFVLFLCNLSLVPAAASKNKVKGSQGQFPLTQNVTVVEGGTAILTCRVDQNDNTSLQWSNPAQQTLYFDDKKALRDNRIELVRASWHELSISVSDVSLSDEGQYTCSLFTMPVKTSKAYLTVLGVPEKPQISGFSSPVMEGDLMQLTCKTSGSKPAADIRWFKNDKEIKDVKYLKEEDANRKTFTVSSTLDFRVDRSDDGVAVICRVDHESLNATPQVAMQVLEIHYTPSVKIIPSTPFPQEGQPLILTCESKGKPLPEPVLWTKDGGELPDPDRMVVSGRELNILFLNKTDNGTYRCEATNTIGQSSAEYVLIVHDVPNTLLPTTIIPSLTTATVTTTVAITTSPTTSATTSSIRDPNALAGQNGPDHALIGGIVAVVVFVTLCSIFLLGRYLARHKGTYLTNEAKGAEDAPDADTAIINAEGSQVNAEEKKEYFI

SEQ ID NO: 11786 - protein, 1036 aa, Homo sapiens
MGFALERFAEAVDPALECKLCGQVLEEPLCTPCGHVFCASCLLPWAVRRRRCPLQCQPLAPGELYRVLPLRSLIQKLRVQCDYRARGCGHSVRLHELEAHVEHCDFGPARRLRSRGGCASGLGGGEVPARGGCGPTPRAGRGGGARGGPPGGRWGRGRGPGPRVLAWRRREKALLAQLWALQGEVQLTARRYQEKFTQYMAHVRNFVGDLGGGHRRDGEHKPFTIVLERENDTLGFNIIGGRPNQNNQEGTSTEGIYVSKILENGPADRADGLEIHDKIMEVNGKDLSKATHEEAVEAFRNAKEPIVVQVLRRTPLSRPAYGMASEVQLMNASTQTDITFEHIMALAKLRPPTPPVPDICPFLLSDSCHSLHPMEHEFYEDNEYISSLPADADRTEDFEYEEVELCRVSSQEKLGLTVCYRTDDEEDTGIYVSEVDPNSIAAKDGRIREGDRILQINGEDVQNREEAVALLSNDECKRIVLLVARPEIQLDEGWLEDERNEFLEELNLEMLEEEHNEAMQPTANEVEQPKKQEEEEGTTDTATSSSNNHEKDSGVGRTDESLRNDESSEQENAAEDPNSTSLKSKRDLGQSQDTLGSVELQYNESLVSGEYIDSDCIGNPDEDCERFRQLLELKCKIRNHGEYDLYYSSSTIECNQGEQEGVEHELQLLNEELRNIELECQNIMQAHRLQKVTDQYGDIWTLHDGGFRNYNTSIDMQRGKLDDIMEHPEKSDKDSSSAYNTAESCRSTPLTVDRSPDSSLPRVINLTNKKNLRSTMAATQSSSGQSSKESTSTKAKTTEQGCSAESKEKVLEGSKLPDQEKAVSEHIPYLSPYHSSSYRYANIPAHARHYQSYMQLIQQKSAVEYAQSQLSLVSMCKESQKCSEPKMEWKVKIRSDGTRYITKRPVRDRILKERALKIKEERSGMTTDDDTMSEMKMGRYWSKEERKQHLVRAKEQRRRREFMMRSRLECLKESPQSGSEGKKEINIIELSHKKMMKKRNKKILDNWMTIQELMTHGAKSPDGTRVHNAFLSVTTV

SEQ ID NO: 11787 - protein, 1027 aa, Homo sapiens
MYEGKHIHFSEVDNKPLCSYSPKLCKQRRLNGYAFCIRHVLEDKTAPFKQCEYVAKYNSQRCTNPIPKSEDRRYCNSHLQVLGFIPKKERKKKNDPIDEVKVRHQMDTMAFSLTVPTLALKMPNGLDGMSLSPPGARVPLHYLETELEDPFAFNEEDDDLKKGATVRKKLQSKLAQNRQRQRETEILKVRQEHFSPPPAPSQQQPPQQHSHLSPLSTSLKPPAPPQGSVCKSPQPQNTSLPMQGVAPTTHTIAQARQLSHKRPLPLLPSSRAPTVDPPRTDRILMKATAFSPHFSCISRLQRLVKLCTQKHQLDTDLFPHLGLDWSEESGEEPEDSEQASPYQVAWSIRETLRYQRHASDDDDAESRSSRVTQLCTYFQQKYKHLCRLERAESRQKKCRHTFRKALLQAASKEPECTGQLIQELRRAACSRTSISRTKLREVEPAACSGTVKGEQCANKALPFTRHCFQHILLNHSQQLFSSCTAKFADGQQCSVPVFDITHQTPLCEEHAKKMDNFLRGDNSRKVQHQQQRKPRKKTKPPALTKKHKKKRRRGPRRPQKPIPPAVPQGNLSMPASVSLPVEASHIRSPSTPELSADELPDDIANEITDIPHDLELNQEDFSDVLPRLPDDLQDFDFFEGKNGDLLPTTEEAEELERALQAVTSLECLSTIGVLAQSDGVPVQELSDRGIGVFSTGTGASGIQSLSREVNTDLGELLNGRIVHDNFSSLELDENLLRSATLSNPPTPLAGQIQGQFSAPANVGLTSATLISQSALGERAFPGQFHGLHDGSHASQRPHPAQLLSKADDLITSRQQYSSDHSHSSPHGSHYDSEHVPSPYSDHITSPHTTSYSGDNMAATFSAEMPIMAQHLLPTQLEVPLGGVVNPRTHWGNLPVNLGDPSPFSNLLGADGHLLSTSLSTPPTTSNSETTQPAFATVTPSSSSVLPGLPQTSFSGMGPSAELMASTSPKQQLPQFSAAFGHQLSSHSGIPKDLQPSHSSIAPPTGFTVTGATATSTNNASSPFPSPN

SEQ ID NO: 11788 - protein, 671 aa, Homo sapiens
MSELEEDFAKILMLKEERIKELEKRLSEKEEEIQELKRKLHKCQSVLPVPSTHIGPRTTRAQGISAEPQTYRSFHDLRQAFRKFTKSERSKDLIKEAILDNDFMKNLELSQIQEIVDCMYPVEYGKDSCIIKEGDVGSLVYVMEDGKVEVTKEGVKLCTMGPGKVFGELAILYNCTRTATVKTLVNVKLWAIDRQCFQTIMMRTGLIKHTEYMEFLKSVPTFQSLPEEILSKLADVLEETHYENGEYIIRQGARGDTFFIISKGTVNVTREDSPSEDPVFLRTLGKGDWFGEKALQGEDVRTANVIAAEAVTCLVIDRDSFKHLIGGLDDVSNKAYEDAEAKAKYEAEAAFFANLKLSDFNIIDTLGVGGFGRVELVQLKSEESKTFAMKILKKRHIVDTRQQEHIRSEKQIMQGAHSDFIVRLYRTFKDSKYLYMLMEACLGGELWTILRDRGSFEDSTTRFYTACVVEAFAYLHSKGIIYRDLKPENLILDHRGYAKLVDFGFAKKIGFGKKTWTFCGTPEYVAPEIILNKGHDISADYWSLGILMYELLTGSPPFSGPDPMKTYNIILRGIDMIEFPKKIAKNAANLIKKLCRDNPSERLGNLKNGVKDIQKHKWFEGFNWEGLRKGTLTPPIIPSVASPTDTSNFDSFPEDNDEPPPDDNSGWDIDF

SEQ ID NO: 11789 - protein, 2458 aa, Homo sapiens
MSGSTQPVAQTWRATEPRYPPHSLSYPVQIARTHTDVGLLEYQHHSRDYASHLSPGSIIQPQRRRPSLLSEFQPGNERSQELHLRPESHSYLPELGKSEMEFIESKRPRLELLPDPLLRPSPLLATGQPAGSEDLTKDRSLTGKLEPVSPPSPPHTDPELELVPPRLSKEELIQNMDRVDREITMVEQQISKLKKKQQQLEEEAAKPPEPEKPVSPPPIESKHRSLVQIIYDENRKKAEAAHRILEGLGPQVELPLYNQPSDTRQYHENIKINQAMRKKLILYFKRRNHARKQWEQKFCQRYDQLMEAWEKKVERIENNPRRRAKESKVREYYEKQFPEIRKQRELQERMQRVGQRGSGLSMSAARSEHEVSEIIDGLSEQENLEKQMRQLAVIPPMLYDADQQRIKFINMNGLMADPMKVYKDRQVMNMWSEQEKETFREKFMQHPKNFGLIASFLERKTVAECVLYYYLTKKNENYKSLVRRSYRRRGKSQQQQQQQQQQQQQQQQQPMPRSSQEEKDEKEKEKEAEKEEEKPEVENDKEDLLKEKTDDTSGEDNDEKEAVASKGRKTANSQGRRKGRITRSMANEANSEEAITPQQSAELASMELNESSRWTEEEMETAKKGLLEHGRNWSAIARMVGSKTVSQCKNFYFNYKKRQNLDEILQQHKLKMEKERNARRKKKKAPAAASEEAAFPPVVEDEEMEASGVSGNEEEMVEEAEATVNNSSDTESIPSPHTEAAKDTGQNGPKPPATLGADGPPPGPPTPPPEDIPAPTEPTPASEATGAPTPPPAPPSPSAPPPVVPKEEKEEETAAAPPVEEGEEQKPPAAEELAVDTGKAEEPVKSECTEEAEEGPAKGKDAEAAEATAEGALKAEKKEGGSGRATTAKSSGAPQDSDSSATCSADEVDEAEGGDKNRLLSPRPSLLTPTGDPRANASPQKPLDLKQLKQRAAAIPPIQVTKVHEPPREDAAPTKPAPPAPPPPQNLQPESDAPQQPGSSPRGKSRSPAPPADKEAEKPVFFPAFAAEAQKLPGDPPCWTSGLPFPVPPREVIKASPHAPDPSAFSYAPPGHPLPLGLHDTARPVLPRPPTISNPPPLISSAKHPSVLERQIGAISQGMSVQLHVPYSEHAKAPVGPVTMGLPLPMDPKKLAPFSGVKQEQLSPRGQAGPPESLGVPTAQEASVLRGTALGSVPGGSITKGIPSTRVPSDSAITYRGSITHGTPADVLYKGTITRIIGEDSPSRLDRGREDSLPKGHVIYEGKKGHVLSYEGGMSVTQCSKEDGRSSSGPPHETAAPKRTYDMMEGRVGRAISSASIEGLMGRAIPPERHSPHHLKEQHHIRGSITQGIPRSYVEAQEDYLRREAKLLKREGTPPPPPPSRDLTEAYKTQALGPLKLKPAHEGLVATVKEAGRSIHEIPREELRHTPELPLAPRPLKEGSITQGTPLKYDTGASTTGSKKHDVRSLIGSPGRTFPPVHPLDVMADARALERACYEESLKSRPGTASSSGGSIARGAPVIVPELGKPRQSPLTYEDHGAPFAGHLPRGSPVTTREPTPRLQEGSLSSSKASQDRKLTSTPREIAKSPHSTVPEHHPHPISPYEHLLRGVSGVDLYRSHIPLAFDPTSIPRGIPLDAAAAYYLPRHLAPNPTYPHLYPPYLIRGYPDTAALENRQTIINDYITSQQMHHNAATAMAQRADMLRGLSPRESSLALNYAAGPRGIIDLSQVPHLPVLVPPTPGTPATAMDRLAYLPTAPQPFSSRHSSSPLSPGGPTHLTKPTTTSSSERERDRDRERDRDREREKSILTSTTTVEHAPIWRPGTEQSSGSSGGGGGSSSRPASHSHAHQHSPISPRTQDALQQRPSVLHNTGMKGIITAVEPSTPTVLRSTSTSSPVRPAATFPPATHCPLGGTLDGVYPTLMEPVLLPKEAPRVARPERPRADTGHAFLAKPPARSGLEPASSPSKGSEPRPLVPPVSGHATIARTPAKNLAPHHASPDPPAPPASASDPHREKTQSKPFSIQELELRSLGYHGSSYSPEGVEPVSPVSSPSLTHDKGLPKHLEELDKSHLEGELRPKQPGPVKLGGEAAHLPHLRPLPESQPSSSPLLQTAPGVKGHQRVVTLAQHISEVITQDYTRHHPQQLSAPLPAPLYSFPGASCPVLDLRRPPSDLYLPPPDHGAPARGSPHSEGGKRSPEPNKTSVLGGGEDGIEPVSPPEGMTEPGHSRSAVYPLLYRDGEQTEPSRMGSKSPGNTSQPPAFFSKLTESNSAMVKSKKQEINKKLNTHNRNEPEYNISQPGTEIFNMPAITGTGLMTYRSQAVQEHASTNMGLEAIIRKALMGGGGKAKVSGRPSSRKAKSPAPGLASGDRPPSVSSVHSEGDCNRRTPLTNRVWEDRPSSAGSTPFPYNPLIMRLQAGVMASPPPPGLPAGSGPLAGPHHAWDEEPKPLLCSQYETLSDSE

SEQ ID NO: 11790 - protein, 1192 aa, Homo sapiens
MPRRAGSGQLPLPRGWEEARDYDGKVFYIDHNTRRTSWIDPRDRLTKPLSFADCVGDELPWGWEAGFDPQIGVYYIDHINKTTQIEDPRKQWRGEQEKMLKDYLSVAQDALRTQKELYHVKEQRLALALDEYVRLNDAYKEKSSSHTSLFSGSSSSTKYDPDILKAEISTTRLRVKKLKRELSQMKQELLYKEQGFETLQQIDKKMSGGQSGYELSEAKAILTELKSIRKAISSGEKEKQDLMQSLAKLQERFHLDQNIGRSEPDLRCSPVNSHLCLSRQTLDAGSQTSISGDIGVRSRSNLAEKVRLSLQYEEAKRSMANLKIELSKLDSEAWPGALDIEKEKLMLINEKEELLKELQFVTPQKRTQDELERLEAERQRLEEELLSVRGTPSRALAERLRLEERRKELLQKLEETTKLTTYLHSQLKSLSASTLSMSSGSSLGSLASSRGSLNTSSRGSLNSLSSTELYYSSQSDQIDVDYQYKLDFLLQEKSGYIPSGPITTIHENEVVKSPSQPGQSGLCGVAAAATGHTPPLAEAPKSVASLSSRSSLSSLSPPGSPLVLEGTFPMSSSHDASLHQFTADFEDCELSSHFADISLIENQILLDSDSGGASQSLSEDKDLNECAREPLYEGTADVEKSLPKRRVIHLLGEKTTCVSAAVSDESVAGDSGVYEAFVKQPSEMEDVTYSEEDVAIVETAQVQIGLRYNAKSSSFMVIIAQLRNLHAFLIPHTSKVYFRVAVLPSSTDVSCLFRTKVHPPTESILFNDVFRVAISQTALQQKTLRVDLCSVSKHRREECLAGTQISLADLPFSSEVFTLWYNLLPSKQMPCKKNEENEDSVFQPNQPLVDSIDLDAVSALLARTSAELLAVEQELAQEEEEESGQEEPRGPDGDWLTMLREASDEIVAEKEAEVKLPEDSSCTEDLSSCTSVPEMNEDGNRKESNCAKDLRSQPPTRIPTLVDKETNTDEAANDNMAVRPKERSSLSSRQHPFVRSSVIVRSQTFSPGERNQYICRLNRSDSDSSTLAKKSLFVRNSTERRSLRVKRTVCQSVLRRTTQECPVRTSLDLELDLQASLTRQSRLNDELQALRDLRQKLEELKAQGETDLPPGVLEDERFQRLLKQAEKQAEQSKEEQKQGLNAEKLMRQVSKDVCRLREQSQKVPRQVQSFREKIAYFTRAKISIPSLPADDV

SEQ ID NO: 11791 - protein, 393 aa, Homo sapiens
MDAATLTYDTLRFAEFEDFPETSEPVWILGRKYSIFTEKDEILSDVASRLWFTYRKNFPAIGGTGPTSDTGWGCMLRCGQMIFAQALVCRHLGRDWRWTQRKRQPDSYFSVLNAFIDRKDSYYSIHQIAQMGVGEGKSIGQWYGPNTVAQVLKKLAVFDTWSSLAVHIAMDNTVVMEEIRRLCRTSVPCAGATAFPADSDRHCNGFPAGAEVTNRPSPWRPLVLLIPLRLGLTDINEAYVETLKHCFMMPQSLGVIGGKPNSAHYFIGYVGEELIYLDPHTTQPAVEPTDGCFIPDESFHCQHPPCRMSIAELDPSIAVGFFCKTEDDFNDWCQQVKKLSLLGGALPMFELVELQPSHLACPDVLNLSLDSSDVERLERFFDSEDEDFEILSL

SEQ ID NO: 11792 - protein, 252 aa, Homo sapiens
MNIHRSTPITIARYGRSRNKTQDFEELSSIRSAEPSQSFSPNLGSPSPPETPNLSHCVSCIGKYLLLEPLEGDHVFRAVHLHSGEELVCKVFDISCYQESLAPCFCLSAHSNINQITEIILGETKAYVFFERSYGDMHSFVRTCKKLREEEAARLFYQIASAVAHCHDGGLVLRDLKLRKFIFKDEERCLCPWSLEMFPLVLPSIPSVILDWSFVCFHPPPTSLIFLLLLPSVCCIGSKVFSINNKLVYVLL

SEQ ID NO: 11793 - protein, 894 aa, Homo sapiens
MGVKKKKEMQVAALTICHQDLETLKSFADVEGKNLASLLLHCVQLTDGVSQIHYIKQIVPLLEKADKNGMCDPTIQSCLDILAGIYLSLSLKNPLKKVLASSLNSLPDFFLPEAMHRFTSRLQEELNTTDLYSYRKVTDNISSCMENFNLGRASVNNLLKNVLHFLQKSLIEILEENRKCAGNHIIQTQLMNDLLVGIRVSMMLVQKVQDFQGNLWKTSDSPIWQNMCGLLSIFTKVLSDDDLLQTVQSTSGLAIILFIKTMFHPSEKIPHLISSVLLRSVDCTSVPEWFMSSCRSLCCGDISQSAVLFLCQGTLAMLDWQNGSMGRSGEALLLDTAHVLFTLSSQIKEPTLEMFLSRILASWTNSAIQVLESSSPSLTDSLNGNSSIVGRLLEYVYTHWEHPLDALRHQTKIMFKNLLQMHRLTVEGADFVPDPFFVELTESLLRLEWHIKGKYTCLGCLVECIGVEHILAIDKTIPSQILEVMGDQSLVPYASDLLETMFRNHKSHLKSQTAESSWIDQWHETWVSPLLFILCEGNLDQKSYVIDYYLPKLLSYSPESLQYMVKILQTSIDAKTGQEQSFPSLGSCNSRGALGALMACLRIARAHGHLQSATDTWENLVSDARIKQGLIHQHCQVRIDTLGLLCESNRSTEIVSMEEMQWIQFFITYNLNSQSPGVRQQICSLLKKLFCRIQESSQVLYKLEQSKSKREPENELTKQHPSVSLQQYKNFMSSICNSLFEALFPGSSYSTRFSALTILGSIAEVFHVPEGRIYTVYQLSHDIDVGRFQTLMECFTSTFEDVKILAFDLLMKLSKTAVHFQDSGKLQGLFQAALELSTSTKPYDCVTASYLLNFLIWQDALPSSLSAYLTQQVACDNGDRPAAVVERNTLMGLY

SEQ ID NO: 11794 - protein, 551 aa, Homo sapiens
MDELFPLIFPAEPAQASGPYVEIIEQPKQRGMRFRYKCEGRSAGSIPGERSTDTTKTHPTIKINGYTGPGTVRISLVTKDPPHRPHPHELVGKDCRDGFYEAELCPDRCIHSFQNLGIQCVKKRDLEQAISQRIQTNNNPFQVPIEEQRGDYDLNAVRLCFQVTVRDPSGRPLRLPPVLSHPIFDNRAPNTAELKICRVNRNSGSCLGGDEIFLLCDKVQKEDIEVYFTGPGWEARGSFSQADVHRQVAIVFRTPPYADPSLQAPVRVSMQLRRPSDRELSEPMEFQYLPDTDDRHRIEEKRKRTYETFKSIMKKSPFSGPTDPRPPPRRIAVPSRSSASVPKPAPQPYPFTSSLSTINYDEFPTMVFPSGQISQASALAPAPPQVLPQAPAPAPAPAMVSALAQAPAPVPVLAPGPPQAVAPPAPKPTQAGEGTLSEALLQLQFDDEDLGALLGNSTDPAVFTDLASVDNSEFQQLLNQGIPVAPHTTEPMLMEYPEAITRLVTGAQRPPDPAPAPLGAPGLPNGLLSGDEDFSSIADMDFSALLSQISS

SEQ ID NO: 11795 - protein, 1587 aa, Homo sapiens
MVQKKKFCPRLLDYLVIVGARHPSSDSVAQTPELLRRYPLEDHTEFPLPPDVVFFCQPEGCLSVRQRRMSLRDDTSFVFTLTDKDTGVTRYGICVNFYRSFQKRISKEKGEGGAGSRGKEGTHATCASEEGGTESSESGSSLQPLSADSTPDVNQSPRGKRRAKAGSRSRNSTLTSLCVLSHYPFFSTFRECLYTLKRLVDCCSERLLGKKLGIPRGVQRDTMWRIFTGSLLVEEKSSALLHDLREIEAWIYRLLRSPVPVSGQKRVDIEVLPQELQPALTFALPDPSRFTLVDFPLHLPLELLGVDACLQVLTCILLEHKVVLQSRDYNALSMSVMAFVAMIYPLEYMFPVIPLLPTCMASAEQLLLAPTPYIIGVPASFFLYKLDFKMPDDVWLVDLDSNRVIAPTNAEVLPILPEPESLELKKHLKQALASMSLNTQPILNLEKFHEGQEIPLLLGRPSNDLQSTPSTEFNPLIYGNDVDSVDVATRVAMVRFFNSANVLQGFQMHTRTLRLFPRPVVAFQAGSFLASRPRQTPFAEKLARTQAVEYFGEWILNPTNYAFQRIHNNMFDPALIGDKPKWYAHQLQPIHYRVYDSNSQLAEALSVPPERDSDSEPTDDSGSDSMDYDDSSSSYSSLGDFVSEMMKCDINGDTPNVDPLTHAALGDASEVEIDELQNQKEAEEPGPDSENSQENPPLRSSSSTTASSSPSTVIHGANSEPADSTEMDDKAAVGVSKPLPSVPPSIGKSNVDRRQAEIGEGSVRRRIYDNPYFEPQYGFPPEEDEDEQGESYTPRFSQHVSGNRAQKLLRPNSLRLASDSDAESDSRASSPNSTVSNTSTEGFGGIMSFASSLYRNHSTSFSLSNLTLPTKGAREKATPFPSLKGNRRALVDQKSSVIKHSPTVKREPPSPQGRSSNSSENQQFLKEVVHSVLDGQGVGWLNMKKVRRLLESEQLRVFVLSKLNRMVQSEDDARQDIIPDVEISRKVYKGMLDLLKCTVLSLEQSYAHAGLGGMASIFGLLEIAQTHYYSKEPDKRKRSPTESVNTPVGKDPGLAGRGDPKAMAQLRVPQLGPRAPSATGKGPKELDTRSLKEENFIASIGPEVIKPVFDLGETEEKKSQISADSGVSLTSSSQRTDQDSVIGVSPAVMIRSSSQDSEVSTVSNSSGETLGADSDLSSNAGDGPGGEGSVHLASSRGTLSDSEIETNSATSTIFGKAHSLKPSIKEKLAGSPIRTSEDVSQRVYLYEGLLGKERSTLWDQMQFWEDAFLDAVMLEREGMGMDQGPQEMIDRYLSLGEHDRKRLEDDEDRLLATLLHNLISYMLLMKVNKNDIRKKVRRLMGKSHIGLVYSQQINEVLDQLANLNGRDLSIWSSGSRHMKKQTFVVHAGTDTNGDIFFMEVCDDCVVLRSNIGTVYERWWYEKLINMTYCPKTKVLCLWRRNGSETQLNKFYTKKCRELYYCVKDSMERAAARQQSIKPGPELGGEFPVQDLKTGEGGLLQVTLEGINLKFMHNQVFIELNHIKKCNTVRGVFVLEEFVPEIKEVVSHKYKTPMAHEICYSVLCLFSYVAAVHSSEEDLRTPPRPVSS

SEQ ID NO: 11796 - protein, 408 aa, Homo sapiens
MTSKGPEEEHPSVTLFRQYLRIRTVQPKPDYGAAVAFFEETARQLGLGCQKVEVAPGYVVTVLTWPGTNPTLSSILLNSHTDVVPVFKEHWSHDPFEAFKDSEGYIYARGAQDMKCVSIQYLEAVRRLKVEGHRFPRTIHMTFVPDEEVGGHQGMELFVQRPEFHALRAGFALDEGIANPTDAFTVFYSERSPWWVRVTSTGRPGHASRFMEDTAAEKLHKVVNSILAFREKEWQRLQSNPHLKEGSVTSVNLTKLEGGVAYNVIPATMSASFDFRVAPDVDFKAFEEQLQSWCQAAGEGVTLEFAQKWMHPQVTPTDDSNPWWAAFSRVCKDMNLTLEPEIMPAATDNRYIRAVGVPALGFSPMNRTPVLLHDHDERLHEAVFLRGVDIYTRLLPALASVPALPSDS

SEQ ID NO: 11797 - protein, 45 aa, Homo sapiens
MKKQSDSVKGKRRDDGLSAAARKQRDSEIMQQKQKKANEKKEEPK

SEQ ID NO: 11798 - protein, 677 aa, Homo sapiens
MAAGGGGSCDPLAPAGVPCAFSPHSQAYFALASTDGHLRVWETANNRLHQEYVPSAHLSGTCTCLAWAPARLQAKESPQRKKRKSEAVGMSNQTDLLALGTAVGSILLYSTVKGELHSKLISGGHDNRVNCIQWHQDSGCLYSCSDDKHIVEWNVQTCKVKCKWKGDNSSVSSLCISPDGKMLLSAGRTIKLWVLETKEVYRHFTGHATPVSSLMFTTIRPPNESQPFDGITGLYFLSGAVHDRLLNVWQVRSENKEKSAVMSFTVTDEPVYIDLTLSENKEEPVKLAVVCRDGQVHLFEHILNGYCKKPLTSNCTIQIATPGKGKKSTPKPIPILAAGFCSDKMSLLLVYGSWFQPTIERVALNSREPHMCLVRDISNCWAPKVETAITKVRTPVMNSEAKVLVPGIPGHHAAIKPAPPQTEQVESKRKSGGNEVSIEERLGAMDIDTHKKGKEDLQTNSFPVLLTQGLESNDFEMLNKVLQTRNVNLIKKTVLRMPLHTIIPLLQELTKRLQGHPNSAVLMVQWLKCVLTVHASYLSTLPDLVPQLGTLYQLMESRVKTFQKLSHLHGKLILLITQVTASEKTKGATSPGQKAKLVYEEESSEEESDDEIADKDSEDNWDEDEEESESEKDEDVEEEDEDAEGKDEENGEDRDTASEKELNGDSDLDPENESEEE

SEQ ID NO: 11799 - protein, 180 aa, Homo sapiens
MPSPSVSTSAASVLEGVCGRARSTYRTPEEGEEQSWSAIMAGEEINEDYPVEIHEYLSAFENSIGAVDEMLKTMMSVSRNELLQKLDPLEQAKVDLVSAYTLNSMFWVYLATQGVNPKEHPVKQELERIRVYMNRVKEITDKKKAGKLDRGAASRFVKNALWEPKSKNASKVANKGKSKS

SEQ ID NO: 11800 - protein, 1477 aa, Homo sapiens
MGTALLQRGGCFLLCLSLLLLGCWAELGSGLEFPGAEGQWTRFPKWNACCESEMSFQLKTRSARGLVLYFDDEGFCDFLELILTRGGRLQLSFSIFCAEPATLLADTPVNDGAWHSVRIRRQFRNTTLFIDQVEAKWVEVKSKRRDMTVFSGLFVGGLPPELRAAALKLTLASVREREPFKGWIRDVRVNSSQVLPVDSGEVKLDDEPPNSGGGSPCEAGEEGEGGVCLNGGVCSVVDDQAVCDCSRTGFRGKDCSQEDNNVEGLAHLMMGDQGKSKGKEEYIATFKGSEYFCYDLSQNPIQSSSDEITLSFKTLQRNGLMLHTGKSADYVNLALKNGAVSLVINLGSGAFEALVEPVNGKFNDNAWHDVKVTRNLRQHSGIGHAMVTISVDGILTTTGYTQEDYTMLGSDDFFYVGGSPSTADLPGSPVSNNFMGCLKEVVYKNNDVRLELSRLAKQGDPKMKIHGVVAFKCENVATLDPITFETPESFISLPKWNAKKTGSISFDFRTTEPNGLILFSHGKPRHQKDAKHPQMIKVDFFAIEMLDGHLYLLLDMGSGTIKIKALLKKVNDGEWYHVDFQRDGRSGTISVNTLRTPYTAPGESEILDLDDELYLGGLPENKAGLVFPTEVWTALLNYGYVGCIRDLFIDGQSKDIRQMAEVQSTAGVKPSCSKETAKPCLSNPCKNNGMCRDGWNRYVCDCSGTGYLGRSCEREATVLSYDGSMFMKIQLPVVMHTEAEDVSLRFRSQRAYGILMATTSRDSADTLRLELDAGRVKLTVNLDCIRINCNSSKGPETLFAGYNLNDNEWHTVRVVRRGKSLKLTVDDQQAMTGQMAGDHTRLEFHNIETGIITERRYLSSVPSNFIGHLQSLTFNGMAYIDLCKNGDIDYCELNARFGFRNIIADPVTFKTKSSYVALATLQAYTSMHLFFQFKTTSLDGLILYNSGDGNDFIVVELVKGYLHYVFDLGNGANLIKGSSNKPLNDNQWHNVMISRDTSNLHTVKIDTKITTQITAGARNLDLKSDLYIGGVAKETYKSLPKLVHAKEGFQGCLASVDLNGRLPDLISDALFCNGQIERGCEGPSTTCQEDSCSNQGVCLQQWDGFSCDCSMTSFSGPLCNDPGTTYIFSKGGGQITYKWPPNDRPSTRADRLAIGFSTVQKEAVLVRVDSSSGLGDYLELHIHQGKIGVKFNVGTDDIAIEESNAIINDGKYHVVRFTRSGGNATLQVDSWPVIERYPAGRQLTIFNSQATIIIGGKEQGQPFQGQLSGLYYNGLKVLNMAAENDANIAIVGNVRLVGEVPSSMTTESTATAMQSEMSTSIMETTTTLATSTARRGKPPTKEPISQTTDDILVASAECPSDDEDIDPCEPSSGGLANPTRAGGREPYPGSAEVIRESSSTTGMVVGIVAAAALCILILLYAMYKYRNRDEGSYHVDESRNYISNSAQSNGAVVKEKQPSSAKSSNKNKKNKDKEYYV

SEQ ID NO: 11801 - protein, 248 aa, Homo sapiens
MAGSSSLEAVRRKIRSLQEQADAAEERAGTLQRELDHERKLRETAEADVASLNRRIQLVEEELDRAQERLATALQKLEEAEKAADESERGMKVIESRAQKDEEKMEIQEIQLKEAKHIAEDADRKYEEVARKLVIIESDLERAEERAELSEGQVRQLEEQLRIMDQTLKALMAAEDKYSQKEDRYEEEIKVLSDKLKEAETRAEFAERSVTKLEKSIDDLEEKVAHAKEENLSMHQMLDQTLLELNNM

SEQ ID NO: 11802 - protein, 355 aa, Homo sapiens
MEDLEETLFEEFENYSYDLDYYSLESDLEEKVQLGVVHWVSLVLYCLAFVLGIPGNAIVIWFTGFKWKKTVTTLWFLNLAIADFIFLLFLPLYISYVAMNFHWPFGIWLCKANSFTAQLNMFASVFFLTVISLDHYIHLIHPVLSHRHRTLKNSLIVIIFIWLLASLIGGPALYFRDTVEFNNHTLCYNNFQKHDPDLTLIRHHVLTWVKFIIGYLFPLLTMSICYLCLIFKVKKRSILISSRHFWTILVVVVAFVVCWTPYHLFSIWELTIHHNSYSHHVMQAGIPLSTGLAFLNSCLNPILYVLISKKFQARFRSSVAEILKYTLWEVSCSGTVSEQLRNSETKNLCLLETAQ

SEQ ID NO: 11803 - protein, 192 aa, Homo sapiens
MEPPKMNPVVEPLSWMLGTWLSDPPGAGTYPTLQPFQYLEEVHISHVGQPMLNFSFNSFHPDTRKPMHRECGFIRLKPDTNKVAFVSAQNTGVVEVEEGEVNGQELCIASHSIARISFAKEPHVEQVSPALLPARSCLLFAAVCGVSLFLFREITRKFRLNSEGKLEQTVSMATTTQPMTQHLHVTYKKVTP

SEQ ID NO: 11804 - protein, 1340 aa, Homo sapiens
MDTKLMCLLFFFSLPPLLVSNHTGRIKVVFTPSICKVTCTKGSCQNSCEKGNTTTLISENGHAADTLTATNFRVVICHLPCMNGGQCSSRDKCQCPPNFTGKLCQIPVHGASVPKLYQHSQQPGKALGTHVIHSTHTLPLTVTSQQGVKVKFPPNIVNIHVKHPPEASVQIHQVSRIDGPTGQKTKEAQPGQSQVSYQGLPVQKTQTIHSTYSHQQVIPHVYPVAAKTQLGRCFQETIGSQCGKALPGLSKQEDCCGTVGTSWGFNKCQKCPKKPSYHGYNQMMECLPGYKRVNNTFCQDINECQLQGVCPNGECLNTMGSYRCTCKIGFGPDPTFSSCVPDPPVISEEKGPCYRLVSSGRQCMHPLSVHLTKQLCCCSVGKAWGPHCEKCPLPGTAKEEPVEALTFSREHGPGVAEPEVATAPPEKEIPSLDQEKTKLEPGQPQLSPGISTIHLHPQFPVVIEKTSPPVPVEVAPEASTSSASQVIAPTQVTEINECTVNPDICGAGHCINLPVRYTCICYEGYRFSEQQRKCVDIDECTQVQHLCSQGRCENTEGSFLCICPAGFMASEEGTNCIDVDECLRPDVCGEGHCVNTVGAFRCEYCDSGYRMTQRGRCEDIDECLNPSTCPDEQCVNSPGSYQCVPCTEGFRGWNGQCLDVDECLEPNVCANGDCSNLEGSYMCSCHKGYTRTPDHKHCRDIDECQQGNLCVNGQCKNTEGSFRCTCGQGYQLSAAKDQCEDIDECQHRHLCAHGQCRNTEGSFQCVCDQGYRASGLGDHCEDINECLEDKSVCQRGDCINTAGSYDCTCPDGFQLDDNKTCQDINECEHPGLCGPQGECLNTEGSFHCVCQQGFSISADGRTCEDIDECVNNTVCDSHGFCDNTAGSFRCLCYQGFQAPQDGQGCVDVNECELLSGVCGEAFCENVEGSFLCVCADENQEYSPMTGQCRSRTSTDVDVDQPKEEKKECYYNLNDASLCDNVLAPNVTKQECCCTSGVGWGDNCEIFPCPVLGTAEFTEMCPKGKGFVPAGESSSEAGGENYKDADECLLFGQEICKNGFCLNTRPGYECYCKQGTYYDPVKLQCFDMDECQDPSSCIDGQCVNTEGSYNCFCTHPMVLDASEKRCIRPAESNEQIEETDVYQDLCWEHLSDEYVCSRPLVGKQTTYTECCCLYGEAWGMQCALCPLKDSDDYAQLCNIPVTGRRQPYGRDALVDFSEQYTPEADPYFIQDRFLNSFEELQAEECGILNGCENGRCVRVQEGYTCDCFDGYHLDTAKMTCVDVNECDELNNRMSLCKNAKCINTDGSYKCLCLPGYVPSDKPNYCTPLNTALNLEKDSDLE

SEQ ID NO: 11805 - protein, 297 aa, Homo sapiens
MQTPRPAMRMEAGEAAPPAGAGGRAAGGWGKWVRLNVGGTVFLTTRQTLCREQKSFLSRLCQGEELQSDRDETGAYLIDRDPTYFGPILNFLRHGKLVLDKDMAEEGVLEEAEFYNIGPLIRIIKDRMEEKDYTVTQVPPKHVYRVLQCQEEELTQMVSTMSDGWRFEQLVNIGSSYNYGSEDQAEFLCVVSKELHSTPNGLSSESSRKTKSTEEQLEEQQQQEEEVEEVEVEQVQVEADAQEKGSRPHPLRPEAELAVRASPRPLARPQSCHPCCYKPEAPGCEAPDHLQGLGVPI

SEQ ID NO: 11806 - protein, 651 aa, Homo sapiens
MPSSLGQPDGGGGGGGGGGGVGAAGEDPGPGPAPPPEGAQEAAPAPRPPPEPDDAAAALRLALDQLSALGLGGAGDTDEEGAAGDGAAAAGGADGGAAPEPVPPDGPEAGAPPTLAPAVAPGSLPLLDPNASPPPPPPPRPSPPDVFAGFAPHPAALGPPTLLADQMSVIGSRKKSVNMTECVPVPSSEHVAEIVGRQGCKIKALRAKTNTYIKTPVRGEEPVFIVTGRKEDVEMAKREILSAAEHFSIIRATRSKAGGLPGAAQGPPNLPGQTTIQVRVPYRVVGLVVGPKGATIKRIQQRTHTYIVTPGRDKEPVFAVTGMPENVDRAREEIEAHITLRTGAFTDAGPDSDFHANGTDVCLDLLGAAASLWAKTPNQGRRPPTATAGLRGDTALGAPSAPEAFYAGSRGGPSVPDPGPASPYSGSGNGGFAFGAEGPGAPVGTAAPDDCDFGFDFDFLALDLTVPAAATIWAPFERAAPLPAFSGCSTVNGAPGPPAAGARRSSGAGTPRHSPTLPEPGGLRLELPLSRRGAPDPVGALSWRPPQGPVSFPGGAAFSTATSLPSSPAAAACAPLDSGASENSRKPPSASSAPALARECVVCAEGEVMAALVPCGHNLFCMDCAVRICGKSEPECPACRTPATQAIHIFS

SEQ ID NO: 11807 - protein, 395 aa, Homo sapiens
MAAEATAVAGSGAVGGCLAKDGLQQSKCPDTTPKRRRASSLSRDAERRAYQWCREYLGGAWRRVQPEELRVYPVSGGLSNLLFRCSLPDHLPSVGEEPREVLLRLYGAILQGVDSLVLESVMFAILAERSLGPQLYGVFPEGRLEQYIPSRPLKTQELREPVLSAAIATKMAQFHGMEMPFTKEPHWLFGTMERYLKQIQDLPPTGLPEMNLLEMYSLKDEMGNLRKLLESTPSPVVFCHNDIQEGNILLLSEPENADSLMLVDFEYSSYNYRGFDIGNHFCEWVYDYTHEEWPFYKARPTDYPTQEQQLHFIRHYLAEAKKGETLSQEEQRKLEEDLLVEVSRYALASHFFWGLWSILQASMSTIEFGYLDYAQSRFQFYFQQKGQLTSVHSSS

SEQ ID NO: 11808 - protein, 976 aa, Homo sapiens
MNAGPGCEPCTKRPRWGAATTSPAASDARSFPSRQRRVLDPKDAHVQFRVPPSSPACVPGRAGQHRGSATSLVFKQKTITSWMDTKGIKTAESESLDSKENNNTRIESMMSSVQKDNFYQHNVEKLENVSQLSLDKSPTEKSTQYLNQHQTAAMCKWQNEGKHTEQLLESEPQTVTLVPEQFSNANIDRSPQNDDHSDTDSEENRDNQQFLTTVKLANAKQTTEDEQAREAKSHQKCSKSCDPGEDCASCQQDEIDVVPESPLSDVGSEDVGTGPKNDNKLTRQESCLGNSPPFEKESEPESPMDVDNSKNSCQDSEADEETSPGFDEQEDGSSSQTANKPSRFQARDADIEFRKRYSTKGGEVRLHFQFEGGESRTGMNDLNAKLPGNISSLNVECRNSKQHGKKDSKITDHFMRLPKAEDRRKEQWETKHQRTERKIPKYVPPHLSPDKKWLGTPIEEMRRMPRCGIRLPLLRPSANHTVTIRVDLLRAGEVPKPFPTHYKDLWDNKHVKMPCSEQNLYPVEDENGERTAGSRWELIQTALLNKFTRPQNLKDAILKYNVAYSKKWDFTALIDFWDKVLEEAEAQHLYQSILPDMVKIALCLPNICTQPIPLLKQKMNHSITMSQEQIASLLANAFFCTFPRRNAKMKSEYSSYPDINFNRLFEGRSSRKPEKLKTLFCYFRRVTEKKPTGLVTFTRQSLEDFPEWERCEKPLTRLHVTYEGTIEENGQGMLQVDFANRFVGGGVTSAGLVQEEIRFLINPELIISRLFTEVLDHNECLIITGTEQYSEYTGYAETYRWSRSHEDGSERDDWQRRCTEIVAIDALHFRRYLDQFVPEKMRRELNKAYCGFLRPGVSSENLSAVATGNWGCGAFGGDARLKALIQILAAAAAERDVVYFTFGDSELMRDIYSMHIFLTERKLTVGDVYKLLLRYYNEECRNCSTPGPDIKLYPFIYHAVESCAETADHSGQRTGT

SEQ ID NO: 11809 - protein, 522 aa, Homo sapiens
MSRQLLPVLLLLLLRASCPWGQEQGARSPSEEPPEEEIPKEDGILVLSRHTLGLALREHPALLVEFYAPWCGHCQALAPEYSKAAAVLAAESMVVTLAKVDGPAQRELAEEFGVTEYPTLKFFRNGNRTHPEEYTGPRDAEGIAEWLRRRVGPSAMRLEDEAAAQALIGGRDLVVIGFFQDEDVATFLALAQDALDMTFGLTDRPRLFQQFGLTKDTVVLFKKFDEGRADFPVDEELGLDLGDLSRFLVTHSMRLVTEFNSQTSAKIFAARILNHLLLFVNQTLAAHRELLAGFGEAAPRFRGQVLFVVVDVAADNEHVLQYFGLKAEAAPTLRLVNLETTKKYAPVDGGPVTAASITAFCHAVLNGQVKPYLLSQEIPPDWDQRPVKTLVGKNFEQVAFDETKNVFVKFYAPWCTHCKEMAPAWEALAEKYQDHEDIIIAELDATANELDAFAVHGFPTLKYFPAGPGRKVIEYKSTRDLETFSKFLDNGGVLPTEEPPEEPAAPFPEPPANSTMGSKEEL

SEQ ID NO: 11810 - protein, 248 aa, Homo sapiens
MLAVHFDKPGGPENLYVKEVAKPSPGEGEVLLKVAASALNRADLMQRQGQYDPPPGASNILGLEASGHVAELGPGCQGHWKIGDTAMALLPGGGQAQYVTVPEGLLMPIPEGLTLTQAAAIPEAWLTAFQLLHLVGNVQAGDYVLIHAGLSGVGTAAIQLTRMAGAIPLVTAGSQKKLQMAEKLGAAAGFNYKKEDFSEATLKFTKVQANAGECFHGANSASLLHGGPPTSAAGSGQNLPSDRNPGGP

SEQ ID NO: 11811 - protein, 644 aa, Homo sapiens
MATKTAGVGRWEVVKKGRRPGVGAGAGGRGGGRNRRALGEANGVWKYDLTPAIQTTSTLYERGFENIMKRQNKEQVPPPAVEPKKPGNKKQPKKVATPPNQNQKQGRFRSLEEALKALDVADLQKELDKSQSVFSGNPSIWLKDLASYLNYKLQAPLSEPTLSQHTHGESLHGYRICIQAILQDKPKIATANLGKFLELLRSHQSRPAKCLTIMWALGQAGFANLTEGLKVWLGIMLPVLGIKSLSPFAITYLDRLLLMHPNLTKGFGMIGPKDFFPLLDFAYMPNNSLTPSLQEQLCQLYPRLKVLAFGAKPDSTLHTYFPSFLSRATPSCPPEMKKELLSSLTECLTVDPLSASVWRQLYPKHLSQSSLLLEHLLSSWEQIPKKVQKSLQETIQSLKLTNQELLRKGSSNNQDVVTCDMACKGLLQQVQGPRLPWTRLLLLLLVFAVGFLCHDLRSHSSFQASLTGRLLRSSGFLPASQQACAKLYSYSLQGYSWLGETLPLWGSHLLTVVRPSLQLAWAHTNATVSFLSAHCASHLAWFGDSLTSLSQRLQIQLPDSVNQLLRYLRELPLLFHQNVLLPLWHLLLEALAWAQEHCHEACRGEVTWDCMKTQLSEAVHWTWLCLQDITVAFLDWALALISQQ

SEQ ID NO: 11812 - protein, 900 aa, Homo sapiens
MKPPRPVRTCSKVLVLLSLLAIHQTTTAEKNGIDIYSLTVDSRVSSRFAHTVVTSRVVNRANTVQEATFQMELPKKAFITNFSMIIDGMTYPGIIKEKAEAQAQYSAAVAKGKSAGLVKATGRNMEQFQVSVSVAPNAKITFELVYEELLKRRLGVYELLLKVRPQQLVKHLQMDIHIFEPQGISFLETESTFMTNQLVDALTTWQNKTKAHIRFKPTLSQQQKSPEQQETVLDGNLIIRYDVDRAISGGSIQIENGYFVHYFAPEGLTTMPKNVVFVIDKSGSMSGRKIQQTREALIKILDDLSPRDQFNLIVFSTEATQWRPSLVPASAENVNKARSFAAGIQALGGTNINDAMLMAVQLLDSSNQEERLPEGSVSLIILLTDGDPTVGETNPRSIQNNVREAVSGRYSLFCLGFGFDVSYAFLEKLALDNGGLARRIHEDSDSALQLQDFYQEVANPLLTAVTFEYPSNAVEEVTQNNFRLLFKGSEMVVAGKLQDRGPDVLTATVSGKLPTQNITFQTESSVAEQEAEFQSPKYIFHNFMERLWAYLTIQQLLEQTVSASDADQQALRNQALNLSLAYSFVTPLTSMVVTKPDDQEQSQVAEKPMEGESRNRNVHSAGAAGSRMNFRPGVLSSRQLGLPGPPDVPDHAAYHPFRRLAILPASAPPATSNPDPAVSRVMNMKIEETTMTTQTPAPIQAPSAILPLPGQSVERLCVDPRHRQGPVNLLSDPEQGVEVTGQYEREKAGFSWIEVTFKNPLVWVHASPEHVVVTRNRRSSAYKWKETLFSVMPGLKMTMDKTGLLLLSDPDKVTIGLLFWDGRGEGLRLLLRDTDRFSSHVGGTLGQFYQEVLWGSPAASDDGRRTLRVQGNDHSATRERRLDYQEGPPGVEISCWSVEL

SEQ ID NO: 11813 - protein, 311 aa, Homo sapiens
MELRVGNKYRLGRKIGSGSFGDIYLGANIASGEEVAIKLECVKTKHPQLHIESKFYKMMQGGVGIPSIKWCGAEGDYNVMVMELLGPSLEDLFNFCSRKFSLKTVLLLADQMISRIEYIHSKNFIHRDVKPDNFLMGLGKKGNLVYIIDFGLAKKYRDARTHQHIPYRENKNLTGTARYASINTHLGIEQSRRDDLESLGYVLMYFNLGSLPWQGLKAATKRQKYERISEKKMSTPIEVLCKGYPSEFSTYLNFCRSLRFDDKPDYSYLRQLFRNLFHRQGFSYDYVFDWNMLKFTDTVQDGSHWPHATHF

SEQ ID NO: 11814 - protein, 302 aa, Homo sapiens
MRLGSPGLLFLLFSSLRADTQEKEVRAMVGSDVELSCACPEGSRFDLNDVYVYWQTSESKTVVTYHIPQNSSLENVDSRYRNRALMSPAGMLRGDFSLRLFNVTPQDEQKFHCLVLSQSLGFQEVLSVEVTLHVAANFSVPVVSAPHSPSQDELTFTCTSINGYPRPNVYWINKTDNSLLDQALQNDTVFLNMRGLYDVVSVLRIARTPSVNIGCCIENVLLQQNLTVGSQTGNDIGERDKITENPVSTGEKNAATWSILAVLCLLVVVAVAIGWVCRDRCLQHSYAGAWAVSPETELTGHV

SEQ ID NO: 11815 - protein, 445 aa, Homo sapiens
MGGPRAWALLCLGLLLPGGGAAWSIGAAPFSGRRNWCSYVVTRTISCHVQNGTYLQRVLQNCPWPMSCPGSSYRTVVRPTYKVMYKIVTAREWRCCPGHSGVSCEEVAASSASLEPMWSGSTMRRMALRPTAFSGCLNCSKVSELTERLKVLEAKMTMLTVIEQPVPPTPATPEDPAPLWGPPPAQGSPGDGGLQDQVGAWGLPGPTGPKGDAGSRGPMGMRGPPGPQGPPGSPGRAGAVGTPGERGPPGPPGPPGPPGPPAPVGPPHARISQHGDPLLSNTFTETNNHWPQGPTGPPGPPGPMGPPGPPGPTGVPGSPGHIGPPGPTGPKGISGHPGEKGERGLRGEPGPQGSAGQRGEPGPKGDPGEKSHWAPSLQSFLQQQAQLELLARRVTLLEAIIWPEPELGSGAGPAGTGTPSLLRGKRGGHATNYRIVAPRSRDERG

SEQ ID NO: 11816 - protein, 836 aa, Homo sapiens
MHPLGLCNNNDEEDLYEYGWVGVVKLEQPELDPKPCLTVLGKAKRAVQRGATAVIFDVSENPEAIDQLNQGSEDPLKRPVVYVKGADAIKLMNIVNKQKVARARIQHRPPRQPTEYFDMGIFLAFFVVVSLVCLILLVKIKLKQRRSQNSMNRLAVQALEKMETRKFNSKSKGRREGSCGALDTLSSSSTSDCAICLEKYIDGEELRVIPCTHRFHRKCVDPWLLQHHTCPHCRHNIIEQKGNPSAVCVETSNLSRGRQQRVTLPVHYPGRVHRTNAIPAYPTRTSMDSHGNPVTLLTMDRHGEQSLYSPQTPAYIRSYPPLHLDHSLAAHRCGLEHRAYSPAHPFRRPKLSGRSFSKAACFSQYETMYQHYYFQGLSYPEQEGQSPPSLAPRGPARAFPPSGSGSLLFPTVVHVAPPSHLESGSTSSFSCYHGHRSVCSGYLADCPGSDSSSSSSSGQCHCSSSDSVVDCTEVSNQGVYGSCSTFRSSLSSDYDPFIYRSRSPCRASEAGGSGSSGRGPALCFEGSPPPEELPAVHSHGAGRGEPWPGPASPSGDQVSTCSLEMNYSSNSSLEHRGPNSSTSEVGLEASPGAAPDLRRTWKGGHELPSCACCCEPQPSPAGPSAGAAGSSTLFLGPHLYEGSGPAGGEPQSGSSQGLYGLHPDHLPRTDGVKYEGLPCCFYEEKQVARGGGGGSGCYTEDYSVSVQYTLTEEPPPGCYPGARDLSQRIPIIPEDVDCDLGLPSDCQGTHSLGSWGGTRGPDTPRPHRGLGATREEERALCCQARALLRPGCPPEEAGAVRANFPSALQDTQESSTTATEAAGPRSHSADSSSPGA

SEQ ID NO: 11817 - protein, 278 aa, Homo sapiens
MKLFQRSTPAITLESPDIKYPLRLIDREIISHDTRRFRFALPSPQHILGLPVGQHIYLSARIDGNLVVRPYTPISSDDDKGFVDLVIKVYFKDTHPKFPAGGKMSQYLESMQIGDTIEFRGPSGLLVYQGKGKFAIRPDKKSNPIIRTVKSVGMIAGGTGITPMLQVIRAIMKDPDDHTVCHLLFANQTEKDILLRPELEELRNKHSARFKLWYTLDRAPEAWDYGQGFVNEEMIRDHLPPPEEEPLVLMCGPPPMIQYACLPNLDHVGHPTERCFVF

SEQ ID NO: 11818 - protein, 168 aa, Homo sapiens
MWCIVLFSLLAWVYAEPTMYGEILSPNYPQAYPSEVEKSWDIEVPEGYGIHLYFTHLDIELSENCAYDSVQIISGDTEEGRLCGQRSSNNPHSPIVEEFQVPYNKLQVIFKSDFSNEERFTGFAAYYVATDINECTDFVDVPCSHFCNNFIGGYFCSCPPEYFLHDDM

SEQ ID NO: 11819 - protein, 1740 aa, Homo sapiens
MAKPTSKDSGLKEKFKILLGLGTPRPNPRSAEGKQTEFIITAEILRELSMECGLNNRIRMIGQICEVAKTKKFEEHAVEALWKAVADLLQPERPLEARHAVLALLKAIVQGQGERLGVLRALFFKVIKDYPSNEDLHERLEVFKALTDNGRHITYLEEELADFVLQWMDVGLSSEFLLVLVNLVKFNSCYLDEYIARMVQMICLLCVRTASSVDIEVSLQVLDAVVCYNCLPAESLPLFIVTLCRTINVKELCEPCWKLMRNLLGTHLGHSAIYNMCHLMEDRAYMEDAPLLRGAVFFVGMALWGAHRLYSLRNSPTSVLPSFYQAMACPNEVVSYEIVLSITRLIKKYRKELQVVAWDILLNIIERLLQQLQTLDSPELRTIVHDLLTTVEELCDQNEFHGSQERYFELVERCADQRPESSLLNLISYRAQSIHPAKDGWIQNLQALMERFFRSESRGAVRIKVLDVLSFVLLINRQFYEEELINSVVISQLSHIPEDKDHQVRKLATQLLVDLAEGCHTHHFNSLLDIIEKVMARSLSPPPELEERDVAAYSASLEDVKTAVLGLLVILQTKLYTLPASHATRVYEMLVSHIQLHYKHSYTLPIASSIRLQAFDFLLLLRADSLHRLGLPNKDGVVRFSPYCVCDYMEPERGSEKKTSGPLSPPTGPPGPAPAGPAVRLGSVPYSLLFRVLLQCLKQESDWKVLKLVLGRLPESLRYKVLIFTSPCSVDQLCSALCSMLSGPKTLERLRGAPEGFSRTDLHLAVVPVLTALISYHNYLDKTKQREMVYCLEQGLIHRCASQCVVALSICSVEMPDIIIKALPVLVVKLTHISATASMAVPLLEFLSTLARLPHLYRNFAAEQYASVFAISLPYTNPSKFNQYIVCLAHHVIAMWFIRCRLPFRKDFVPFITKGLRSNVLLSFDDTPEKDSFRARSTSLNERPKRIQTSLTSASLGSADENSVAQADDSLKNLHLELTETCLDMMARYVFSNFTAVPKRSPVGEFLLAGGRTKTWLVGNKLVTVTTSVGTGTRSLLGLDSGELQSGPESSSSPGVHVRQTKEAPAKLESQAGQQVSRGARDRVRSMSGGHGLRVGALDVPASQFLGSATSPGPRTAPAAKPEKASAGTRVPVQEKTNLAAYVPLLTQGWAEILVRRPTGNTSWLMSLENPLSPFSSDINNMPLQELSNALMAAERFKEHRDTALYKSLSVPAASTAKPPPLPRSNTDSAVVMEEGSPGEVPVLVEPPGLEDVEAALGMDRRTDAYSRSSSVSSQEEKSLHAEELVGRGIPIERVVSSEGGRPSVDLSFQPSQPLSKSSSSPELQTLQDILGDPGDKADVGRLSPEVKARSQSGTLDGESAAWSASGEDSRGQPEGPLPSSSPRSPSGLRPRGYTISDSAPSRRGKRVERDALKSRATASNAEKVPGINPSFVFLQLYHSPFFGDESNKPILLPNESQSFERSVQLLDQIPSYDTHKIAVLYVGEGQSNSELAILSNEHGSYRYTEFLTGLGRLIELKDCQPDKVYLGGLDVCGEDGQFTYCWHDDIMQAVFHIATLMPTKDVDKHRCDKKRHLGNDFVSIVYNDSGEDFKLGTIKGQFNFVHVIVTPLDYECNLVSLQCRKDMEGLVDTSVAKIVSDRNLPFVARQMALHANMASQVHHSRSNPTDIYPSKWIARLRHIKRLRQRICEEAAYSNPSLPLVHPPSHSKAPAQTPAEPTPGYEVGQRKRLISSVEDFTEFV

SEQ ID NO: 11820 - protein, 121 aa, Homo sapiens
MATEGDVELELETETSGPERPPEKPRKHDSGAADLERVTDYAEEKEIQSSNLETAMSVIGDRRSREQKAKQEREKELAKVTIKKEDLELIMTEMEISRAAAERSLREHMGNVVEALIALTN

SEQ ID NO: 11821 - protein, 412 aa, Homo sapiens
MELSAVGERVFAAESIIKRRIRKGRIEYLVKWKGWAIKYSTWEPEENILDSRLIAAFEQKERERELYGPKKRGPKPKTFLLKARAQAEALRISDVHFSVKPSASASSPKLHSSAAVHRLKKDIRRCHRMSRRPLPRPDPQGGSPGLRPPISPFSETVRIINRKVKPREPKRNRIILNLKVIDKGAGGGGAGQGAGALARPKVPSRNRVIGKSKKFSESVLRTQIRHMKFGAFALYKPPPAPLVAPSPGKAEASAPGPGLLLAAPAAPYDARSSGSSGCPSPTPQSSDPDDTPPKLLPETVSPSAPSWREPEVLDLSLPPESAATSKRAPPEVTAAAGPAPPTAPEPAGASSEPEAGDWRPEMSPCSNVVVTDVTSNLLTVTIKEFCNPEDFEKVAAGVAGAAGGGGSIGASK

SEQ ID NO: 11822 - protein, 579 aa, Homo sapiens
MRTLLPPALLTCWLLAPVSAPATPAPRRLGPGSPLPRRALLPPVFAFLPGAGARAGSGRGSGVARGPELPPGEREALSSGPAGLRDSGWEAACALPRAPPSGVCWKRDRFFLDASTMSSFGAVPGAGSCGRLRGLRVSRGDRGWRWPQMPLGPSLYLLVNSIHPECRFHLEIQEEETKCAELLRSQTEKHKACSGVWDNITCWRPANVGETVTVPCPKVFSNFYSKAGNISKNCTSDGWSETFPDFVDACGYSDPEDESKITFYILVKAIYTLGYSVSLMSLATGSIILCLFRKLHCTRNYIHLNLFLSFILRAISVLVKDDVLYSSSGTLHCPDQPSSWVGCKLSLVFLQYCIMANFFWLLVEGLYLHTLLVAMLPPRRCFLAYLLIGWGLPTVCIGAWTAARLYLEDTGCWDTNDHSVPWWVIRIPILISIIVNFVLFISIIRILLQKLTSPDVGGNDQSQYKRLAKSTLLLIPLFGVHYMVFAVFPISISSKYQILFELCLGSFQGLVVAVLYCFLNSEVQCELKRKWRSRCPTPSASRDYRVCGSSFSRNGSEGALQFHRGSRAQSFLQTETSVI

SEQ ID NO: 11823 - protein, 2162 aa, Homo sapiens
MAALVLEDGSVLRGQPFGAAVSTAGEVVFQTGMVGYPEALTDPSYKAQILVLTYPLIGNYGIPPDEMDEFGLCKWFESSGIHVAALVVGECCPTPSHWSATRTLHEWLQQHGIPGLQGVDTRELTKKLREQGSLLGKLVQNGTEPSSLPFLDPNARPLVPEVSIKTPRVFNTGGAPRILALDCGLKYNQIRCLCQRGAEVTVVPWDHALDSQEYEGLFLSNGPGDPASYPSVVSTLSRVLSEPNPRPVFGICLGHQLLALAIGAKTYKMRYGNRGHNQPCLLVGSGRCFLTSQNHGFAVETDSLPADWAPLFTNANDGSNEGIVHNSLPFFSVQFHPEHQAGPSDMELLFDIFLETVKEATAGNPGGQTVRERLTERLCPPGIPTPGSGLPPPRKVLILGSGGLSIGQAGEFDYSGSQAIKALKEENIQTLLINPNIATVQTSQGLADKVYFLPITPHYVTQVIRNERPDGVLLTFGGQTALNCGVELTKAGVLARYGVRVLGTPVETIELTEDRRAFAARMAEIGEHVAPSEAANSLEQAQAAAERLGYPVLVRAAFALGGLGSGFASNREELSALVAPAFAHTSQVLVDKSLKGWKEIEYEVVRDAYGNCVTYYIIEVNARLSRSSALASKATGYPLAYVAAKLALGIPLPELRNSVTGGTAAFEPSVDYCVVKIPRWDLSKFLRVSTKIGSCMKSVGEVMGIGRSFEEAFQKALRMVDENCVGFDHTVKPVSDMELETPTDKRIFVVAAALWAGYSVDRLYELTRIDRWFLHRMKRIIAHAQLLEQHRGQPLPPDLLQQAKCLGFSDKQIALAVLSTELAVRKLRQELGICPAVKQIDTVAAEWPAQTNYLYLTYWGTTHDLTFRTPHVLVLGSGVYRIGSSVEFDWCAVGCIQQLRKMGYKTIMVNYNPETVSTDYDMCDRLYFDEISFEVVMDIYELENPEGVILSMGGQLPNNMAMALHRQQCRVLGTSPEAIDSAENRFKFSRLLDTIGISQPQWRELSDLESARQFCQTVGYPCVVRPSYVLSGAAMNVAYTDGDLERFLSSAAAVSKEHPVVISKFIQEAKEIDVDAVASDGVVAAIAISEHVENAGVHSGDATLVTPPQDITAKTLERIKAIVHAVGQELQVTGPFNLQLIAKDDQLKVIECNVRVSRSFPFVSKTLGVDLVALATRVIMGEEVEPVGLMTGSGVVGVKVPQFSFSRLAGADVVLGVEMTSTGEVAGFGESRCEAYLKAMLSTGFKIPKKNILLTIGSYKNKSELLPTVRLLESLGYSLYASLGTADFYTEHGVKVTAVDWHFEEAVDGECPPQRSILEQLAEKNFELVINLSMRGAGGRRLSSFVTKGYRTRRLAADFSVPLIIDIKCTKLFVEALGQIGPAPPLKVHVDCMTSQKLVRLPGLIDVHVHLREPGGTHKEDFASGTAAALAGGITMVCAMPNTRPPIIDAPALALAQKLAEAGARCDFALFLGASSENAGTLGTVAGSAAGLKLYLNETFSELRLDSVVQWMEHFETWPSHLPIVAHAEQQTVAAVLMVAQLTQRSVHICHVARKEEILLIKAAKARGLPVTCEVAPHHLFLSHDDLERLGPGKGEVRPELGSRQDVEALWENMAVIDCFASDHAPHTLEEKCGSRPPPGFPGLETMLPLLLTAVSEGRLSLDDLLQRLHHNPRRIFHLPPQEDTYVEVDLEHEWTIPSHMPFSKAHWTPFEGQKVKGTVRRVVLRGEVAYIDGQVLVPPGYGQDVRKWPQGAVPQLPPSAPATSEMTTTPERPRRGIPGLPDGRFHLPPRIHRASDPGLPAEEPKEKSSRKVAEPELMGTPDGTCYPPPPVPRQASPQNLGTPGLLHPQTSPLLHSLVGQHILSVQQFTKDQMSHLFNVAHTLRMMVQKERSLDILKGKVMASMFYEVSTRTSSSFAAAMARLGGAVLSFSEATSSVQKGESLADSVQTMSCYADVVVLRHPQPGAVELAAKHCRRPVINAGDGVGEHPTQALLDIFTIREELGTVNGMTITMVGDLKHGRTVHSLACLLTQYRVSLRYVAPPSLRMPPTVRAFVASRGTKQEEFESIEEALPDTDVLYMTRIQKERFGSTQEYEACFGQFILTPHIMTRAKKKMVVMHPMPRVNEISVEVDSDPRAAYFRQAENGMYIRMALLATVLGRF

SEQ ID NO: 11824 - protein, 626 aa, Homo sapiens
MADQRMDISSTISDFMSPGPTDLLSSSLGTSGVDCNRKRKGSSTDYQESMDTDKDDPHGRLEYTEHQGRIKNAREAHSQIEKRRRDKMNSFIDELASLVPTCNAMSRKLDKLTVLRMAVQHMKTLRGATNPYTEANYKPTFLSDDELKHLILRAADGFLFVVGCDRGKILFVSESVFKILNYSQNDLIGQSLFDYLHPKDIAKVKEQLSSSDTAPRERLIDAKTGLPVKTDITPGPSRLCSGARRSFFCRMKCNRPSVKVEDKDFPSTCSKKKADRKSFCTIHSTGYLKSWPPTKMGLDEDNEPDNEGCNLSCLVAIGRLHSHVVPQPVNGEIRVKSMEYVSRHAIDGKFVFVDQRATAILAYLPQELLGTSCYEYFHQDDIGHLAECHRQVLQTREKITTNCYKFKIKDGSFITLRSRWFSFMNPWTKEVEYIVSTNTVVLANVLEGGDPTFPQLTASPHSMDSMLPSGEGGPKRTHPTVPGIPGGTRAGAGKIGRMIAEEIMEIHRIRGSSPSSCGSSPLNITSTPPPDASSPGGKKILNGGTPDIPSSGLLSGQAQENPGYPYSDSSSILGENPHIGIDMIDNDQGSSSPSNDEAAMAVIMSLLEADAGLGGPVDFSDLPWPL

SEQ ID NO: 11825 - protein, 509 aa, Homo sapiens
MYSPLCLTQDEFHPFIEALLPHVRAFAYTWFNLQARKRKYFKKHEKRMSKEEERAVKDELLSEKPEVKQKWASRLLAKLRKDIRPEYREDFVLTVTGKKPPCCVLSNPDQKGKMRRIDCLRQADKVWRLDLVMVILFKGIPLESTDGERLVKSPQCSNPGLCVQPHHIGVSVKELDLYLAYFVHAADSSQSESPSQPSDADIKDQPENGHLGFQDSFVTSGVFSVTELVRVSQTPIAAGTGPNFSLSDLESSSYYSMSPGAMRRSLPSTSSTSSTKRLKSVEDEMDSPGEEPFYTGQGRSPGSGSQSSGWHEVEPGMPSPTTLKKSEKSGFSSPSPSQTSSLGTAFTQHHRPVITGPRASPHATPSTLHFPTSPIIQQPGPYFSHPAIRYHPQETLKEFVQLVCPDAGQQAGQVGFLNPNGSSQGKVHNPFLPTPMLPPPPPPPMARPVPLPVPDTKPPTTSTEGGAASPTSPTYSTPSTSPANRFVSVGPRDPSFVNIPQQTQSWYLG

SEQ ID NO: 11826 - protein, 271 aa, Homo sapiens
MQAACWYVLFLLQPTVYLVTCANLTNGGKSELLKSGSSKSTLKHIWTESSKDLSISRLLSQTFRGKENDTDLDLRYDTPEPYSEQDLWDWLRNSTDLQEPRPRAKRRPIVKTGKFKKMFGWGDFHSNIKTVKLNLLITGKIVDHGNGTFSVYFRHNSTGQGNVSVSLVPPTKIVEFDLAQQTVIDAKDSKSFNCRIEYEKVDKATKNTLCNYDPSKTCYQEQTQSHVSWLCSKPFKVICIYISFYSTDYKLVQKVCPDYNYHSDTPYFPSG

SEQ ID NO: 11827 - protein, 461 aa, Homo sapiens
MSWSLHPRNLILYFYALLFLSSTCVAYVATRDNCCILDERFGSYCPTTCGIADFLSTYQTKVDKDLQSLEDILHQVENKTSEVKQLIKAIQLTYNPDESSKPNMIDAATLKSRKMLEEIMKYEASILTHDSSIRYLQEIYNSNNQKIVNLKEKVAQLEAQCQEPCKDTVQIHDITGKVKVDSPSLDCQDIANKGAKQSGLYFIKPLKANQQFLVYCEIDGSGNGWTVFQKRLDGSVDFKKNWIQYKEGFGHLSPTGTTEFWLGNEKIHLISTQSAIPYALRVELEDWNGRTSTADYAMFKVGPEADKYRLTYAYFAGGDAGDAFDGFDFGDDPSDKFFTSHNGMQFSTWDNDNDKFEGNCAEQDGSGWWMNKCHAGHLNGVYYQGGTYSKASTPNGYDNGIIWATWKTRWYSMKKTTMKIIPFNRLTIGEGQQHHLGGAKQVRPEHPAETEYDSLYPEDDL

SEQ ID NO: 11828 - protein, 160 aa, Homo sapiens
MASRLTLLTLLLLLLAGDRASSNPNATSSSSQDPESLQDRGEGKVATTVISKMLFVEPILEVSSLPTTNSTTNSATKITANTTDEPTTQPTTEPTTQPTIQPTQPTTQLPTDSPTQPTTGSFCPGPVTLCSDLESHSTEAVLGDALVDFSLKLYHAFSAM

SEQ ID NO: 11829 - protein, 527 aa, Homo sapiens
MSDTLTADVIGRRVEVNGEHATVRFAGVVPPVAGPWLGVEWDNPERGKHDGSHEGTVYFKCRHPTGGSFIRPNKVNFGTDFLTAIKNRYVLEDGPEEDRKEQIVTIGNKPVETIGFDSIMKQQSQLSKLQEVSLRNCAVSCAGEKGGVAEACPNIRKVDLSKNLLSSWDEVIHIADQLRHLEVLNVSENKLKFPSGSVLTGTLSVLKVLVLNQTGITWAEVLRCVAGCPGLEELYLESNNIFISERPTDVLQTVKLLDLSSNQLIDENQLYLIAHLPRLEQLILSDTGISSLHFPDAGIGCKTSMFPSLKYLVVNDNQISQWSFFNELEKLPSLRALSCLRNPLTKEDKEAETARLLIIASIGQLKTLNKCEILPEERRRAELDYRKAFGNEWKQAGGHKDPEKNRLSEEFLTAHPRYQFLCLKYGAPEDWELKTQQPLMLKNQLLTLKIKYPHQLDQKVLEKQLPGSMTIQKVKGLLSRLLKVPVSDLLLSYESPKKPGREIELENDLKSLQFYSVENGDCLLVRW

SEQ ID NO: 11830 - protein, 435 aa, Homo sapiens
MIWKRSAVLRFYSVCGLLLQGSQGQFPLTQNVTVVEGGTAILTCRVDQNDNTSLQWSNPAQQTLYFDDKKALRDNRIELVRASWHELSISVSDVSLSDEGQYTCSLFTMPVKTSKAYLTVLGVPEKPQISGFSSPVMEGDLMQLTCKTSGSKPAADIRWFKNDKEIKDVKYLKEEDANRKTFTVSSTLDFRVDRSDDGVAVICRVDHESLNATPQVAMQVLEIHYTPSVKIIPSTPFPQEGQPLILTCESKGKPLPEPVLWTKDGGELPDPDRMVVSGRELNILFLNKTDNGTYRCEATNTIGQSSAEYVLIVHDVPNTLLPTTIIPSLTTATVTTTVAITTSPTTSATTSSIRDPNALAGQNGPDHALIGGIVAVVVFVTLCSIFLLGRYLARHKGTYLTNEAKGAEDAPDADTAIINAEGSQVNAEEKKEYFI

SEQ ID NO: 11831 - protein, 152 aa, Homo sapiens
MRGPGHPLLLGLLLVLGAAGRGRGGAEPREPADGQALLRLVVELVQELRKHHSAEHKGLQLLGRDCALGRAEAAGLGPSPEQRVEIVPRDLRMKDKFLKHLTGPLYFSPKCSKHFHRLYHNTRDCTIPAYYKRCARLLTRLAVSPVCMEDKQ

SEQ ID NO: 11832 - protein, 169 aa, Homo sapiens
MRRAALWLWLCALALSLQPALPQIVATNLPPEDQDGSGDDSDNFSGSGAGALQDITLSQQTPSTWKDTQLLTAIPTSPEPTGLEATAASTSTLPAGEGPKEGEAVVLPEVEPGLTAREQEATPRPRETTQLPTTHLASTTTATTAQEPATSHPHRDMQPVHFVSWGGLI

SEQ ID NO: 11833 - protein, 735 aa, Homo sapiens
MCSTNPGKWVTFDDDPAVQSSQKSKNFPLENQGVCRPNGLKLNLPGLREFPSGSSSTSSTPLSSPIVDFYFSPGPPSNSPLSTPTKDFPGFPGIPKAGTHVLYPIPESSSDSPLAISGGESSLLPTRPTCLSHALLPSDHSCTHPTPKVGLPDEVNPQQAESLGFQSDDLPQFQYFREDCAFSSPFWKDEGSDSHFTLDPPGSKKMFSSRNKEMPIDQKSLNKCSLNYICEKLEHLQSAENQDSLRSLSMHCLCAEENASSFVPHTLFRSQPKSGWSFMLRIPEKKNMMSSRQWGPIFLKVLPGGILQMYYEQGLEKPFKEIQLDPYCRLSEPKVENFSVAGKIHTVKIEHVSYTEKRKYHSKTEVVHEPDIEQMLKLGSTSYHDFLDFLTTVEEELMKLPAVSKPKKNYEEQEISLEIVDNFWGKVTKEGKFVESAVITQIYCLCFVNGNLECFLTLNDLELPKRDESYYEKDSEKKGIDILDYHFHKCVNVQEFEQSRIIKFVPLDACRFELMRFKTLYNGDNLPFSLKSVVVVQGAYVELQAFVNMASLAQRSSYAGSLRSCDNIRIHFPVPSQWIKALWTMNLQRQKSLKAKMNRRACLGSLQELESEPVIQVTVGSAKYESAYQAVVWKIDRLPDKNSSLDHPHCLSYKLELGSDQEIPSDWYPFATVQFSVPDTCASRTEVRSLGVESDVQPQKHVQQRACYNIQVEIEKKWIKIDGEDPDKIGDCITQ

SEQ ID NO: 11834 - protein, 640 aa, Homo sapiens
MSERKEGRGKGKGKKKERGSGKKPESAAGSQSPALPPRLKEMKSQESAAGSKLVLRCETSSEYSSLRFKWFKNGNELNRKNKPQNIKIQKKPGKSELRINKASLADSGEYMCKVISKLGNDSASANITIVESNEIITGMPASTEGAYVSSESPIRISVSTEGANTSSSTSTSTTGTSHLVKCAEKEKTFCVNGGECFMVKDLSNPSRYLCKCQPGFTGARCTENVPMKVQNQEKAEELYQKRVLTITGICIALLVVGIMCVVAYCKTKKQRKKLHDRLRQSLRSERNNMMNIANGPHHPNPPPENVQLVNQYVSKNVISSEHIVEREAETSFSTSHYTSTAHHSTTVTQTPSHSWSNGHTESILSESHSVIVMSSVENSRHSSPTGGPRGRLNGTGGPRECNSFLRHARETPDSYRDSPHSERYVSAMTTPARMSPVDFHTPSSPKSPPSEMSPPVSSMTVSMPSMAVSPFMEEERPLLLVTPPRLREKKFDHHPQQFSSFHHNPAHDSNSLPASPLRIVEDEEYETTQEYEPAQEPVKKLANSRRAKRTKPNGHIANRLEVDSNTSSQSSNSESETEDERVGEDTPFLGIQNPLAASLEATPAFRLADSRTNPAGRFSTQEEIQARLSSVIANQDPIAV

SEQ ID NO: 11835 - protein, 186 aa, Homo sapiens
MGGRGADAGSSGGTGPTEGYSPPAASTRAAARAKARGGGRGGRRNTTPSVPSLRGAAPRSFHPPAAMSERLRPRKRRRNGNEEDNHLPPQTKRSSRNPVFQDSWDTESSGSDSGGSSSSSSSSINSPDRASGPEGSLSQTMAGSSPNTPQPVPEQSALCQGLYFHINQTLREAHFHSLQHRGRPLT

SEQ ID NO: 11836 - protein, 1198 aa, Homo sapiens
MDEETRHSLECIQANQIFPRKQLIREDENLQVPFLELHGESTEFVGRAEDAIIALSNYRLHIKFKESLVNVPLQLIESVECRDIFQLHLTCKDCKVIRCQFSTFEQCQEWLKRLNNAIRPPAKIEDLFSFAYHAWCMEVYASEKEQHGDLCRPGEHVTSRFKNEVERMGFDMNNAWRISNINEKYKLCGSYPQELIVPAWITDKELESVSSFRSWKRIPAVIYRHQSNGAVIARCGQPEVSWWGWRNADDEHLVQSVAKACASDSRSSGSKLSTRNTSRDFPNGGDLSDVEFDSSLSNASGAESLAIQPQKLLILDARSYAAAVANRAKGGGCECPEYYPNCEVVFMGMANIHSIRRSFQSLRLLCTQMPDPGNWLSALESTKWLHHLSVLLKSALLVVHAVDQDQRPVLVHCSDGWDRTPQIVALAKLLLDPYYRTIEGFQVLVEMEWLDFGHKFADRCGHGENSDDLNERCPVFLQWLDCVHQLQRQFPCSFEFNEAFLVKLVQHTYSCLFGTFLCNNAKERGEKHTQERTCSVWSLLRAGNKAFKNLLYSSQSEAVLYPVCHVRNLMLWSAVYLPCPSPTTPVDDSCAPYPAPGTSPDDPPLSRLPKTRSYDNLTTACDNTVPLASRRCSDPSLNEKWQEHRRSLELSSLAGPGEDPLSADSLGKPTRVPGGAELSVAAGVAEGQMENILQEATKEESGVEEPAHRAGIEIQEGKEDPLLEKESRRKTPEASAIGLHQDPELGDAALRSHLDMSWPLFSQGISEQQSGLSVLLSSLQVPPRGEDSLEVPVEQFRIEEIAEGREEAVLPIPVDAKVGYGTSQSCSLLPSQVPFETRGPNVDSSTDMLVEDKVKSVSGPQGHHRSCLVNSGKDRLPQTMEPSPSETSLVERPQVGSVVHRTSLGSTLSLTRSPCALPLAECKEGLVCNGAPETENRASEQPPGLSTLQMYPTPNGHCANGEAGRSKDSLSRQLSAMSCSSAHLHSRNLHHKWLHSHSGRPSATSSPDQPSRSHLDDDGMSVYTDTIQQRLRQIESGHQQEVETLKKQVQELKSRLESQYLTSSLHFNGDFGDEVTSIPDSESNLDQNCLSRCSTEIFSEASWEQVDKQDTEMTRWLPDHLAAHCYACDSAFWLASRKHHCRNCGNVFCSSCCNQKVPVPSQQLFEPSRVCKSCYSSLHPTSSSIDLELDKPIAATSN

SEQ ID NO: 11837 - protein, 706 aa, Homo sapiens
MRPMRIFVNDDRHVMAKHSSVYPTQEELEAVQNMVSHTERALKAVSDWIDEQEKGSSEQAESDNMDVPPEDDSKEGAGEQKTEHMTRTLRGVMRVGLVAKGLLLKGDLDLELVLLCKEKPTTALLDKVADNLAIQLAAVTEDKYEILQSVDDAAIVIKNTKEPPLSLTIHLTSPVVREEMEKVLAGETLSVNDPPDVLDRQKCLAALASLRHAKWFQARANGLKSCVIVIRVLRDLCTRVPTWGPLRGWPLELLCEKSIGTANRPMGAGEALRRVLECLASGIVMPDGSGIYDPCEKEATDAIGHLDRQQREDITQSAQHALRLAAFGQLHKVLGMDPLPSKMPKKPKNENPVDYTVQIPPSTTYAITPMKRPMEEDGEEKSPSKKKKKIQKKEEKAEPPQAMNALMRLNQLKPGLQYKLVSQTGPVHAPIFTMSVEVDGNSFEASGPSKKTAKLHVAVKVLQDMGLPTGAEGRDSSKGEDSAEETEAKPAVVAPAPVVEAVSTPSAAFPSDATAENVKQQGPILTKHGKNPVMELNEKRRGLKYELISETGGSHDKRFVMEVEVDGQKFQGAGSNKKVAKAYAALAALEKLFPDTPLALDANKKKRAPVPVRGGPKFAAKPHNPGFGMGGPMHNEVPPPPNLRGRGRGGSIRGRGRGRGFGGANHGGYMNAGAGYGSYGYGGNSATAGYSDFFTDCYGYHDFGSS

SEQ ID NO: 11838 - protein, 1727 aa, Homo sapiens
MNGGKECDGGDKEGGLPAIQVPVGWQRRVDQNGVLYVSPSGSLLSCLEQVKTYLLTDGTCKCGLECPLILPKVFNFDPGAAVKQRTAEDVKADEDVTKLCIHKRKIIAVATLHKSMEAPHPSLVLTSPGGGTNATPVVPSRAATPRSVRNKSHEGITNSVMPECKNPFKLMIGSSNAMGRLYVQELPGSQQQELHPVYPRQRLGSSEHGQKSPFRGSHGGLPSPASSGSQIYGDGSISPRTDPLGSPDVFTRSNPGFHGAPNSSPIHLNRTPLSPPSVMLHGSPVQSSCAMAGRTNIPLSPTLTTKSPVMKKPMCNFSTNMEIPRAMFHHKPPQGPPPPPPPSCALQKKPLTSEKDPLGILDPIPSKPVNQNPVIINPTSFHSNVHSQVPMMNVSMPPAVVPLPSNLPLPTVKPGHMNHGSHVQRVQHSASTSLSPSPVTSPVHMMGTGIGRIEASPQRSRSSSTSSDHGNFMMPPVGPQATSSGIKVPPRSPRSTIGSPRPSMPSSPSTKSDGHHQYKDIPNPLIAGISNVLNTPSSAAFPTASAGSSSVKSQPGLLGMPLNQILNQHNAASFPASSLLSAAAKAQLANQNKLAGNNSSSSSNSGAVAGSGNTEGHSTLNTMFPPTANMLLPTGEGQSGRAALRDKLMSQQKDALRKRKQPPTTVLSLLRQSQMDSSAVPKPGPDLLRKQGQGSFPISSMSQLLQSMSCQSSHLSSNSTPGCGASNTALPCSANQLHFTDPSMNSSVLQNIPLRGEAVHCHNANTNFVHSNSPVPNHHLAGLINQIQASGNCGMLSQSGMALGNSLHPNPPQSRISTSSTPVIPNSIVSSYNQTSSEAGGSGPSSSIAIAGTNHPAITKTTSVLQDGVIVTTAAGNPLQSQLPIGSDFPFVGQEHALHFPSNSTSNNHLPHPLNPSLLSSLPISLPVNQQHLLNQNLLNILQPSAGEGKSEINLHPLGFLNPNVNAALAFLSSDMDGQVLQPVHFQLLAALLQNQAQAAAMLPLPSFNLTISDLLQQQNTPLPSLTQMTAPPDHLPSNQSDNSRAETLLTSPLGNPLPSFAGSDTTFNPLFLPAVNGASGLMTLNPQLLGGVLNSASANTANHPEVSIATSSQATTTTTTTSSAVAALTVSTLGGTAVVSMAETLLNISNNAGNTPGPAKLNSNSVVPQLLNPLLGTGLLGDMSSINNTLSNHQLTHLQSLLNNNQMFPPNQQQQQLLQGYQNLQAFQGQSTIPCPANNNPMACLFQNFQVRMQEDAALLNKRISTQPGLTALPENPNTTLPPFQDTPCELQPRIDPSLGQQVKDGLVVGGPGDASVDAIYKAVVDAASKGMQVVITTAVNSTTQISPIPALSAMSAFTASIGDPLNLSSAVSAVIHGRNMGGVDHDGRLRNSRGARLPKNLDHGKNVNEGDGFEYFKSASCHTSKKQWDGEQSPRGERNRWKYEEFLDHPGHIHSSPCHERPNNVSTLPFLPGEQHPILLPPRNCPGDKILEENFRYNNYKRTMMSFKERLENTVERCAHINGNRPRQSRGFGELLSTAKQDLVLEEQSPSSSNSLENSLVKDYIHYNGDFNAKSVNGCVPSPSDAKSISSEDDLRNPDSPSSNELIHYRPRTFNVGDLVWGQIKGLTSWPGKLVREDDVHNSCQQSPEEGKVEPEKLKTLTEGLEAYSRVRKRNRKSGKLNNHLEAAIHEAMSELDKMSGTVHQIPQGDRQMRPPKPKRRKISR

SEQ ID NO: 11839 - protein, 86 aa, Homo sapiens
MRTLACLLLLGCGYLAHVLAEEAEIPREVIERLARSQIHSIRDLQRLLEIDSVGSEDSLDTSLRAHGVHATKHVPEKRPLPIRRKR

SEQ ID NO: 11840 - protein, 1333 aa, Homo sapiens [sequence omitted]

SEQ ID NO: 11841 - protein, 501 aa, Homo sapiens
MDEFHPFIEALLPHVRAFAYTWFNLQARKRKYFKKHEKRMSKEEERAVKDELLSEKPEVKQKWASRLLAKLRKDIRPEYREDFVLTVTGKKPPCCVLSNPDQKGKMRRIDCLRQADKVWRLDLVMVILFKGIPLESTDGERLVKSPQCSNPGLCVQPHHIGVSVKELDLYLAYFVHAADSSQSESPSQPSDADIKDQPENGHLGFQDSFVTSGVFSVTELVRVSQTPIAAGTGPNFSLSDLESSSYYSMSPGAMRRSLPSTSSTSSTKRLKSVEDEMDSPGEEPFYTGQGRSPGSGSQSSGWHEVEPGMPSPTTLKKSEKSGFSSPSPSQTSSLGTAFTQHHRPVITGPRASPHATPSTLHFPTSPIIQQPGPYFSHPAIRYHPQETLKEFVQLVCPDAGQQAGQVGFLNPNGSSQGKVHNPFLPTPMLPPPPPPPMARPVPLPVPDTKPPTTSTEGGAASPTSPTYSTPSTSPANRFVSVGPRDPSFVNIPQQTQSWYLG

SEQ ID NO: 11842 - protein, 1556 aa, Homo sapiens
MASELGARDDGGCTELAKPLYLQYLERALRLDHFLRQTSAIFNRNISSDDSEDGLDDSNPLLPQSGDPLIQVKEEPPNSLLGETSGAGSSGMLNTYSLNGVLQSESKCDKGNLYNFSKLKKSRKWLKSILLSDESSEADSQSEDDDEEELNLSREELHNMLRLHKYKKLHQNKYSKDKELQQYQYYSAGLLSTYDPFYEQQRHLLGPKKKKFKEEKKLKAKLKKVKKKRRRDEELSSEESPRRHHHQTKVFAKFSHDAPPPGTKKKHLSIEQLNARRRKVWLSIVKKELPKANKQKASARNLFLTNSRKLAHQCMKEVRRAALQAQKNCKETLPRARRLTKEMLLYWKKYEKVEKEHRKRAEKEALEQRKLDEEMREAKRQQRKLNFLITQTELYAHFMSRKRDMGHDGIQEEILRKLEDSSTQRQIDIGGGVVVNITQEDYDSNHFKAQALKNAENAYHIHQARTRSFDEDAKESRAAALRAANKSGTGFGESYSLANPSIRAGEDIPQPTIFNGKLKGYQLKGMNWLANLYEQGINGILADEMGLGKTVQSIALLAHLAERENIWGPFLIISPASTLNNWHQEFTRFVPKFKVLPYWGNPHDRKVIRRFWSQKTLYTQDAPFHVVITSYQLVVQDVKYFQRVKWQYMVLDEAQALKSSSSVRWKILLQFQCRNRLLLTGTPIQNTMAELWALLHFIMPTLFDSHEEFNEWFSKDIESHAENKSAIDENQLSRLHMILKPFMLRRIKKDVENELSDKIEILMYCQLTSRQKLLYQALKNKISIEDLLQSSMGSTQQAQNTTSSLMNLVMQFRKVCNHPELFERQETWSPFHISLKPYHISKFIYRHGQIRVFNHSRDRWLRVLSPFAPDYIQRSLFHRKGINEESCFSFLRFIDISPAEMANLMLQGLLARWLALFLSLKASYRLHQLRSWGAPEGESHQRYLRNKDFLLGVNFPLSFPNLCSCPLLKSLVFSSHCKAVSGYSDQVVHQRRSATSSLRRCLLTELPSFLCVASPRVTAVPLDSYCNDRSAEYERRVLKEGGSLAAKQCLLNGAPELAADWLNRRSQFFPEPAGGLWSIRPQNGWSFIRIPGKESLITDSGKLYALDVLLTRLKSQGHRVLIYSQMTRMIDLLEEYMVYRKHTYMRLDGSSKISERRDMVADFQNRNDIFVFLLSTRAGGLGINLTAADTVIFYDSDWNPTVDQQAMDRAHRLGQTKQVTVYRLICKGTIEERILQRAKEKSEIQRMVISGGNFKPDTLKPKEVVSLLLDDEELEKKLRLRQEEKRQQEETNRVKERKRKREKYAEKKKKEDELDGKRRKEGVNLVIPFVPSADNSNLSADGDDSFISVDSAMPSPFSEISISSELHTGSIPLDESSSDMLVIVDDPASSAPQSRATNSPASITGSVSDTVNGISIQEMPAAGRGHSARSRGRPKGSGSTAKGAGKGRSRKSTAGSAAAMAGAKAGAAAASAAAYAAYGYNVSKGISASSPLQTSLVRPAGLADFGPSSASSPLSSPLSKGNNVPGNPKNLHMTSSLAPDSLVRKQGKGTNPSGGR

SEQ ID NO: 11843 - protein, 191 aa, Homo sapiens
MLEEPRPRPPPSGLAGLLFLALCSRALSNEILGLKLPGEPPLTANTVCLTLSGLSKRQLGLCLRNPDVTASALQGLHIAVHECQHQLRDQRWNCSALEGGGRLPHHSAILKRGFRESAFSFSMLAAGVMHAVATACSLGKLVSCGCGWKGSGEQDRLRAKLLQLQALSRGKLPGTSRHECESTTTGWGARW

SEQ ID NO: 11844 - protein, 494 aa, Homo sapiens
MKWVTFISLLFLFSSAYSRGVFRRDAHKSEVAHRFKDLGEENFKALYLYEIARRHPYFYAPELLFFAKRYKAAFTECCQAADKAACLLPKLDELRDEGKASSAKQRLKCASLQKFGERAFKAWAVARLSQRFPKAEFAEVSKLVTDLTKVHTECCHGDLLECADDRADLAKYICENQDSISSKLKECCEKPLLEKSHCIAEVENDEMPADLPSLAADFVESKDVCKNYAEAKDVFLGMFLYEYARRHPDYSVVLLLRLAKTYETTLEKCCAAADPHECYAKVFDEFKPLVEEPQNLIKQNCELFEQLGEYKFQNALLVRYTKKVPQVSTPTLVEVSRNLGKVGSKCCKHPEAKRMPCAEDYLSVVLNQLCVLHEKTPVSDRVTKCCTESLVNRRPCFSALEVDETYVPKEFNAETFTFHADICTLSEKERQIKKQTALVELVKHKPKATKEQLKAVMDDFAAFVEKCCKADDKETCFAEEGKKLVAASQAALGL

SEQ ID NO: 11845 - protein, 309 aa, Homo sapiens
MMGIFLVYVGFVFFSVLYVQQGLSSQAKFTEFPRNVTATEGQNVEMSCAFQSGSASVYLEIQWWFLRGPEDLDPGAEGAGAQVELLPDRDPDSDGTKISTVKVQGNDISHKLQISKVRKKDEGLYECRVTDANYGELQEHKAQAYLKVNANSHARRMQAFEASPMWLQDMKPRKNVSAAIPSSIHGSANQRTHSTSSPQVVAKIPKQSPQSVSPILPEVKHLHRPPLLVLPFFSLSSLFSTDPLPTFPTSHRTVKRLPAPLPQPGHGSTPGVQSCVLAPPAKSKSPVKSTERTAKLTLNSKHHPAPTVL

SEQ ID NO: 11846 - protein, 695 aa, Homo sapiens
MALLLVSLLAFLSLGSGCHHRICHCSNRVFLCQESKVTEIPSDLPRNAIELRFVLTKLRVIQKGAFSGFGDLEKIEISQNDVLEVIEADVFSNLPKLHEIRIEKANNLLYINPEAFQNLPNLQYLLISNTGIKHLPDVHKIHSLQKVLLDIQDNINIHTIERNSFVGLSFESVILWLNKNGIQEIHNCAFNGTQLDELNLSDNNNLEELPNDVFHGASGPVILDISRTRIHSLPSYGLENLKKLRARSTYNLKKLPTLEKLVALMEASLTYPSHCCAFANWRRQISELHPICNKSILRQEVDYMTQARGQRSSLAEDNESSYSRGFDMTYTEFDYDLCNEVVDVTCSPKPDAFNPCEDIMGYNILRVLIWFISILAITGNIIVLVILTTSQYKLTVPRFLMCNLAFADLCIGIYLLLIASVDIHTKSQYHNYAIDWQTGAGCDAAGFFTVFASELSVYTLTAITLERWHTITHAMQLDCKVQLRHAASVMVMGWIFAFAAALFPIFGISSYMKVSICLPMDIDSPLSQLYVMSLLVLNVLAFVVICGCYIHIYLTVRNPNIVSSSSDTRIAKRMAMLIFTDFLCMAPISFFAISASLKVPLITVSKAKILLVLFHPINSCANPFLYAIFTKNFRRDFFILLSKCGCYEMQAQIYRTETSSTVHNTHPRNGHCSSAPRVTSGSTYILVPLSHLAQN

SEQ ID NO: 11847 - protein, 464 aa, Homo sapiens
MGHLSAPLHRVRVPWQGLLLTASLLTFWNPPTTAQLTTESMPFNVAEGKEVLLLVHNLPQQLFGYSWYKGERVDGNRQIVGYAIGTQQATPGPANSGRETIYPNASLLIQNVTQNDTGFYTLQVIKSDLVNEEATGQFHVYPELPKPSISSNNSNPVEDKDAVAFTCEPETQDTTYLWWINNQSLPVSPRLQLSNGNRTLTLLSVTRNDTGPYECEIQNPVSANRSDPVTLNVTYGPDTPTISPSDTYYRPGANLSLSCYAASNPPAQYSWLINGTFQQSTQELFIPNITVNNSGSYTCHANNSVTGCNRTTVKTIIVTELSPVVAKPQIKASKTTVTGDKDSVNLTCSTNDTGISIRWFFKNQSLPSSERMKLSQGNTTLSINPVKREDAGTYWCEVFNPISKNQSDPIMLNVNYNALPQENGLSPGAIAGIVIGVVALVALIAVALACFLHFGKTGSSGPLQ

SEQ ID NO: 11848 - protein, 387 aa, Homo sapiens
MVGGSVPVFDEIILSTARMNRVLSFHSVSGILVCQAGCVLEELSRYVEERDFIMPLDLGAKGSCHIGGNVATNAGGLRFLRYGSLHGTVLGLEVVLADGTVLDCLTSLRKDNTGYDLKQLFIGSEGTLGIITTVSILCPPKPRAVNVAFLGCPGFAEVLQTFSTCKGMLGEILSAFEFMDAVCMQLVGRHLHLASPVQESPFYVLIETSGSNAGHDAEKLGHFLEHALGSGLVTDGTMATDQRKVKMLWALRERITEALSRDGYVYKYDLSLPVERLYDIVTDLRARLGPHAKHVVGYGHLGDGNLHLNVTAEAFSPSLLAALEPHVYEWTAGQQGSVSAEHGVGFRKRDVLGYSKPPGALQLMQQLKALLDPKGILNPYKTLPSQA

SEQ ID NO: 11849 - protein, 146 aa, Homo sapiens
MLKEDCASELKVHLAKSLPLPSSVNRPRIDLIVFVVNLHSKYSLQNTEESLRHVDASFFLGKVCFLATGAGRESHCSIHRHTVVKLAHTYQSPLLYCDLEVEGFRATMAQRLVRVLQICAGHVPGVSALNLLSLLRSSEGPSLEDL

SEQ ID NO: 11850 - protein, 893 aa, Homo sapiens
MPAELRQEQSPGSQASLATMPEAPDVLEETVTVEEDPGTPTSHVSIVTSEDGTTRRTETKVTKTVKTVTTRTVRQVPVGPDGLPLLDGGPPLGPFADGALDRHFLLRGGGPVATLSRAYLSSGGGFPEGPEPRDSPSYGSLSRGLGMRPPRAGPLGPGPGDGCFTLPGHREAFPVGPEPGPPGGRSLPERFQAEPYGLEDDTRSLAADDEGGPELEPDYGTATRRRPECGRGLHTRAYEDTADDGGELADERPAFPMVTAPLAQPERGSMGSLDRLVRRSPSVDSARKEPRWRDPELPEVLAMLRHPVDPVKANAAAYLQHLCFENEGVKRRVRQLRGLPLLVALLDHPRAEVRRRACGALRNLSYGRDTDNKAAIRDCGGVPALVRLLRAARDNEVRELVTGTLWNLSSYEPLKMVIIDHGLQTLTHEVIVPHSGWEREPNEDSKPRDAEWTTVFKNTSGCLRNVSSDGAEARRRLRECEGLVDALLHALQSAVGRKDTDNKSVENCVCIMRNLSYHVHKEVPGADRYQEAEPGPLGSAVGSQRRRRDDASCFGGKKAKGKKDGEMDRNFDTLDLPKRTEAAKGFELLYQPEVVRLYLSLLTESRNFNTLEAAAGALQNLSAGNWMWATYIRATVRKERGLPVLVELLQSETDKVVRAVAIALRNLSLDRRNKDLIGSYAMAELVRNVRNAQAPPRPGACLEEDTVVAVLNTIHEIVSDSLDNARSLLQARGVPALVALVASSQSVREAKAASHVLQTVWSYKELRGTLQKDGWTKARFQSAAATAKGPKGALSPGGFDDSTLPLVDKSLEGEKTGSRDVIPMDALGPDGYSTVDRRERRPRGASSAGEASEKEPLKLDPSRKAPPPGPSRPAVRLVDAVGDAKPQPVDSWV

SEQ ID NO: 11851 - protein, 1339 aa, Homo sapiens
MDLLSGTYIFAVLLACVVFHSGAQEKNYTIREEMPENVLIGDLLKDLNLSLIPNKSLTTAMQFKLVYKTGDVPLIRIEEDTGEIFTTGARIDREKLCAGIPRDEHCFYEVEVAILPDEIFRLVKIRFLIEDINDNAPLFPATVINISIPENSAINSKYTLPAAVDPDVGINGVQNYELIKSQNIFGLDVIETPEGDKMPQLIVQKELDREEKDTYVMKVKVEDGGFPQRSSTAILQVSVTDTNDNHPVFKETEIEVSIPENAPVGTSVTQLHATDADIGENAKIHFSFSNLVSNIARRLFHLNATTGLITIKEPLDREETPNHKLLVLASDGGLMPARAMVLVNVTDVNDNVPSIDIRYIVNPVNDTVVLSENIPLNTKIALITVTDKDADHNGRVTCFTDHEIPFRLRPVFSNQFLLETAAYLDYESTKEYAIKLLAADAGKPPLNQSAMLFIKVKDENDNAPVFTQSFVTVSIPENNSPGIQLTKVSAMDADSGPNAKINYLLGPDAPPEFSLDCRTGMLTVVKKLDREKEDKYLFTILAKDNGVPPLTSNVTVFVSIIDQNDNSPVFTHNEYNFYVPENLPRHGTVGLITVTDPDYGDNSAVTLSILDENDDFTIDSQTGVIRPNISFDREKQESYTFYVKAEDGGRVSRSSSAKVTINVVDVNDNKPVFIVPPSNCSYELVLPSTNPGTVVFQVIAVDNDTGMNAEVRYSIVGGNTRDLFAIDQETGNITLMEKCDVTDLGLHRVLVKANDLGQPDSLFSVVIVNLFVNESVTNATLINELVRKSTEAPVTPNTEIADVSSPTSDYVKILVAAVAGTITVVVVIFITAVVRCRQAPHLKAAQKNKQNSEWATPNPENRQMIMMKKKKKKKKHSPKNLLLNFVTIEETKADDVDSDGNRVTLDLPIDLEEQTMGKYNWVTTPTTFKPDSPDLARHYKSASPQPAFQIQPETPLNSKHHIIQELPLDNTFVACDSISKCSSSSSDPYSVSDCGYPVTTFEVPVSVHTRPPMKEVVRSCTPMKESTTMEIWIHPQPQRKSEGKVAGKSQRRVTFHLPEGSQESSSDGGLGDHDAGSLTSTSHGLPLGYPQEEYFDRATPSNRTEGDGNSDPESTAEITVQPTVEEASDNCTQECLIYGHSDACWMPASLDHSSSSQAQASALCHSPPLSQASTQHHSPRVTQTIALCHSPPVTQTIALCHSPPPIQVSALHHSPPLVQATALHHSPPSAQASALCYSPPLAQAAAISHSSPLPQVIALHRSQAQSSVSLQQGWVQGADGLCSVDQGVQGSATSQFYTMSERLHPSDDSIKVIPLTTFTPRQQARPSRGDSPIMEEHPL

SEQ ID NO: 11852 - protein, 263 aa, Homo sapiens
SPFTPFSPLLSFFLSPFFFLFPSLSHSLPTPSLPLPSPFPSPSPVREPLPLPSSPFRLSPSPSVSFSLSARRATLLLPPTLMAASSEDDIDRRPIRRVRSKSDTPYLAEARISFNLGAAEEVERLAAMRSDSLVPGTHTPPIRRRSKFANLGRIFKPWKWRKKKSEKFKHTSAALERKISMRQSREELIKRGVLKEIYDKDGELSISNEEDSLENGQSLSSSQLSLPALSEMEPVPMPRDPCSYEVLQPSDIMDGPVSEESPS

SEQ ID NO: 11853 - protein, 1023 aa, Homo sapiens
MPAARPPAAGLRGISLFLALLLGSPAAALERDALPEGDASPLGPYLLPSGAPERGSPGKEHPEERVVTAPPSSSQSAEVLGELVLDGTAPSAHHDIPALSPLLPEEARPKHALPPKKKLPSLKQVNSARKQLRPKATSAATVQRAGSQPASQGLDLLSSSTEKPGPPGDPDPIVASEEASEVPLWLDRKESAVPTTPAPLQISPFTSQPYVAHTLPQRPEPGEPGPDMAQEAPQEDTSPMALMDKGENELTGSASEESQETTTSTIITTTVITTEQAPALCSVSFSNPEGYIDSSDYPLLPLNNFLECTYNVTVYTGYGVELQVKSVNLSDGELLSIRGVDGPTLTVLANQTLLVEGQVIRSPTNTISVYFRTFQDDGLGTFQLHYQAFMLSCNFPRRPDSGDVTVMDLHSGGVAHFHCHLGYELQGAKMLTCINASKPHWSSQEPICSAPCGGAVHNATIGRVLSPSYPENTNGSQFCIWTIEAPEGQKLHLHFERLLLHDKDRMTVHSGQTNKSALLYDSLQTESVPFEGLLSEGNTIRIEFTSDQARAASTFNIRFEAFEKGHCYEPYIQNGNFTTSDPTYNIGTIVEFTCDPGHSLEQGPAIIECINVRDPYWNDTEPLCRAMCGGELSAVAGVVLSPNWPEPYVEGEDCIWKIHVGEEKRIFLDIQFLNLSNSDILTIYDGDEVMPHILGQYLGNSGPQKLYSSTPDLTIQFHSDPAGLIFGKGQGFIMNYIEVSRNDSCSDLPEIQNGWKTTSHTELVRGARITYQCDPGYDIVGSDTLTCQWDLSWSSDPPFCEKIMYCTDPGEVDHSTRLISDPVLLVGTTIQYTCNPGFVLEGSSLLTCYSRETGTPIWTSRLPHCVSEESLACDNPGLPENGYQILYKRLYLPGESLTFMCYEGFELMGEVTIRCILGQPSHWNGPLPVCKVNQDSFEHALEAEAAAETSLEGGNMALAIFIPVLIISLLLGGAYIYITRCRYYSNLRLPLMYSHPYSQITVETEFDNPIYETGETREYEVSI

SEQ ID NO: 11854 - protein, 1172 aa, Homo sapiens
MSPDVPLLNDYKQDFFLKRFPQTVLGGPRFKLGYCAPPYIYVNQIILFLMPWVWGGVGTLLYQLGILKDYYTAALSGGLMLFTAFVIQFTSLYAKNKSTTVERILTTDILAEEDEHEFTSCTGAETVKFLIPGKKYVANTVFHSILAGLACGLGTWYLLPNRITLLYGSTGGTALLFFFGWMTLCIAEYSLIVNTATETATFQTQDTYEIIPLMRPLYIFFFVSVDLAHRFVVNMPALEHMNQILHILFVFLPFLWALGTLPPPDALLLWAMEQVLEFGLGGSSMSTHLRLLVMFIMSAGTAIASYFIPSTVGVVLFMTGFGFLLSLNLSDMGHKIGTKSKDLPSGPEKHFSWKECLFYIIILVLALLETSLLHHFAGFSQISKSNSQAIVGYGLMILLIILWILREIQSVYIIGIFRNPFYPKDVQTVTVFFEKQTRLMKIGIVRRILLTLVSPFAMIAFLSLDSSLQGLHSVSVCIGFTRAFRMVWQNTENALLETVIVSTVHLISSTDIWWNRSLDTGLRLLLVGIIRDRLIQFISKLQFAVTVLLTSWTEKKQRRKTTATLCILNIVFSPFVLVIIVFSTLLSSPLLPLFTLPVFLVGFPRPIQSWPGAAGTTACVCADTVYYYQMVPRLTAVLQTAMAAGSLGLLLPGSHYLGRFQDRLMWIMILECGYTYCSINIKGLELQETSCHTAEARRVDEVFEDAFEQEYTRVCSLNEHFGNVLTPCTVLPVKLYSDARNVLSGIIDSHENLKEFKGDLIKVLVWILVQYCSKRPGMKENVHNTENKGKAPLMLPALNTLPPPKSPEDIDSLNSETFNDWSDDNIFDDEPTIKKVIEEKHQLKDLPGTNLFIPGSVESQRVGDHSTGTVPENDLYKAVLLGYPAVDKGKQEDMPYIPLMEFSCSHSHLVCLPAEWRTSCMPSSKMKEMSSLFPEDWYQFVLRQLECYHSEEKASNVLEEIAKDKVLKDFYVHTVMTCYFSLFGIDNMAPSPGHILRVYGGVLPWSVALDWLTEKPELFQLALKAFRYTLKLMIDKASLGPIEDFRELIKYLEEYERDWYIGLVSDEKWKEAILQEKPYLFSLGYDSNMGIYTGRVLSLQELLIQVGKLNPEAVRGQWANLSWELLYATNDDEERYSIQAHPLLLRNLTVQAAEPPLGYPIYSSKPLHIHLY

SEQ ID NO: 11855 - protein, 927 aa, Homo sapiens
MNSVRAANRRPRRVSRPRPVQQQQQQPPQQPPPQPPQQQPPQQQPPPPPQQQQQQQPPPPPPPPPPLPQERNNVGERDDDVPADMVAEESGPGAQNSPYQLRRKTLLPKRTACPTKNSMEGASTSTTENFGHRAKRARVSGKSQDLSAAPAEQYLQEKLPDEVVLKIFSYLLEQDLCRAACVCKRFSELANDPILWKRLYMEVFEYTRPMMHPEPGKFYQINPEEYEHPNPWKESFQQLYKGAHVKPGFAEHFYSNPARYKGRENMLYYDTIEDALGGVQEAHFDGLIFVHSGIYTDEWIYIESPITMIGAAPGKVADKVIIENTRDSTFVFMEGSEDAYVGYMTIRFNPDDKSAQHHNAHHCLEITVNCSPIIDHCIIRSTCTVGSAVCVSGQGACPTIKHCNISDCENVGLYITDHAQGIYEDNEISNNALAGIWVKNHGNPIIRRNHIHHGRDVGVFTFDHGMGYFESCNIHRNRIAGFEVKAYANPTVVRCEIHHGQTGGIYVHEKGRGQFIENKIYANNFAGVWITSNSDPTIRGNSIFNGNQGGVYIFGDGRGLIEGNDIYGNALAGIQIRTNSCPIVRHNKIHDGQHGGIYVHEKGQGVIEENEVYSNTLAGVWVTTGSTPVLRRNRIHSGKQVGVYFYDNGHGVLEDNDIYNHMYSGVQIRTGSNPKIRRNKIWGGQNGGILVYNSGLGCIEDNEIFDNAMAGVWIKTDSNPTLRRNKIHDGRDGGICIFNGGRGLLEENDIFRNAQAGVLISTNSHPILRKNRIFDGFAAGIEITNHATATLEGNQIFNNRFGGLFLASGVNVTMKDNKIMNNQDAIEKAVSRGQCLYKISSYTSYPMHDFYRCHTCNTTDRNAICVNCIKKCHQGHDVEFIRHDRFFCDCGAGTLSNPCTLAGEPTHDTDTLYDSAPPIESNTLQHN

SEQ ID NO: 11856 - protein, 317 aa, Homo sapiens
MPPKLLCAGRCVGQDGAAQAWHCPPGQGHSVWDAVRMPLGAGTPVNVQRREDSATEGSHRLILAANRDEFYSRPSKLADFWGNNNEILSGLDMEEGKEGGTWLGISTRGKLAALTNYLQPQLDWQARGRGELVTHFLTTDVDSLSYLKKVSMEGHLYNGFNLIAADLSTAKGDVICYYGNRGEPDPIVLTPGTYGLSNALLETPWRKLCFGKQLFLEAVERSQALPKDVLIASLLDVLNNEEAQLPDPAIEDQGGEYVQPMLSKYAAVCVRCPGYGTRTNTIILVDADGHVTFTERSMMDKDLSHWETRTYEFTLQS

SEQ ID NO: 11857 - protein, 207 aa, Homo sapiens
MGGRGADAGSSGGTGPTEGYSPPAASTRAAARAKARGGGRGGRRNTTPSVPSLRGAAPRSFHPPAAMSERLRPRKRRRNGNEEDNHLPPQTKRSSRNPVFQDSWDTETVPVMRNSKENRLRGNKAFCASSGSDSGGSSSSSSSSINSPDRASGPEGSLSQTMAGSSPNTPQPVPEQSALCQGLYFHINQTLREAHFHSLQHRGRPLT

SEQ ID NO: 11858 - protein, 878 aa, Homo sapiens
MATGTGKHKLLSTGPTEPWSIREKLCLASSVMRSGDQNWVSVSRAIKPFAEPGRPPDWFSQKHCASQYSELLETTETPKRKRGEKGEVVETVEDVIVRKLTAERVEELKKVIKETQERYRRLKRDAELIQAGHMDSRLDELCNDIATKKKLEEEEAEVKRKATDAAYQARQAVKTPPRRLPTVMVRSPIDSASPGGDYPLGDLTPTTMEEATSGVNESEMAVASGHLNSTGVLLEVGGVLPMIHGGEIQQTPNTVAASPAASGAPTLSRLLEAGPTQFTTPLASFTTVASEPPVKLVPPPVESVSQATIVMMPALPAPSSAPAVSTTESVAPVSQPDNCVPMEAVGDPHTVTVSMDSSEISMIINSIKEECFRSGVAEAPVGSKAPSIDGKEELDLAEKMDIAVSYTGEELDFETVGDIIAIIEDKVDDHPEVLDVAAVEAALSFCEENDDPQSLPGPWEHPIQQERDKPVPLPAPEMTVKQERLDFEETENKGIHELVDIREPSAEIKVEPAEPEPVISGAEIVAGVVPATSMEPPELRSQDLDEELGSTAAGEIVEADVAIGKGDETPLTNVKTEASPESMLSPSHGSNPIEDPLEAETQHKFEMSDSLKEESGTIFGSQIKDAPGEDEEEDGVSEAASLEEPKEEDQGEGYLSEMDNEPPVSESDDGFSIHNATLQSHTLADSIPSSPASSQFSVCSEDQEAIQAQKIWKKAIMLVWRAAANHRYANVFLQPVTDDIAPGYHSIVQRPMDLSTIKKNIENGLIRSTAEFQRDIMLMFQNAVMYNSSDHDVYHMAVEMQRDVLEQIQQFLATQLIMQTSESGISAKSLRGRDSTRKQDASEKDSVPMGSPAFLLSLFDGGTRGRRCAIEADMKMKK

SEQ ID NO: 11859 - protein, 437 aa, Homo sapiens
MSWSLHPRNLILYFYALLFLSSTCVAYVATRDNCCILDERFGSYCPTTCGIADFLSTYQTKVDKDLQSLEDILHQVENKTSEVKQLIKAIQLTYNPDESSKPNMIDAATLKSRKMLEEIMKYEASILTHDSSIRYLQEIYNSNNQKIVNLKEKVAQLEAQCQEPCKDTVQIHDITGKDCQDIANKGAKQSGLYFIKPLKANQQFLVYCEIDGSGNGWTVFQKRLDGSVDFKKNWIQYKEGFGHLSPTGTTEFWLGNEKIHLISTQSAIPYALRVELEDWNGRTSTADYAMFKVGPEADKYRLTYAYFAGGDAGDAFDGFDFGDDPSDKFFTSHNGMQFSTWDNDNDKFEGNCAEQDGSGWWMNKCHAGHLNGVYYQGGTYSKASTPNGYDNGIIWATWKTRWYSMKKTTMKIIPFNRLTIGEGQQHHLGGAKQAGDV

SEQ ID NO: 11860 - protein, 1071 aa, Homo sapiens
MPAIMTMLADHAARQLLDFSQKLDINLLDNVVNCLYHGEGAQQRMAQEVLTHLKEHPDAWTRVDTILEFSQNMNTKYYGLQILENVIKTRWKILPRNQCEGIKKYVVGLIIKTSSDPTCVEKEKVYIGKLNMILVQILKQEWPKHWPTFISDIVGASRTSESLCQNNMVILKLLSEEVFDFSSGQITQVKSKHLKDSMCNEFSQIFQLCQFVMENSQNAPLVHATLETLLRFLNWIPLGYIFETKLISTLIYKFLNVPMFRNVSLKCLTEIAGVSVSQYEEQFVTLFTLTMMQLKQMLPLNTNIRLAYSNGKDDEQNFIQNLSLFLCTFLKEHDQLIEKRLNLRETLMEALHYMLLVSEVEETEIFKICLEYWNHLAAELYRESPFSTSASPLLSGSQHFDVPPRRQLYLPMLFKVRLLMVSRMAKPEEVLVVENDQGEVVREFMKDTDSINLYKNMRETLVYLTHLDYVDTERIMTEKLHNQVNGTEWSWKNLNTLCWAIGSISGAMHEEDEKRFLVTVIKDLLGLCEQKRGKDNKAIIASNIMYIVGQYPRFLRAHWKFLKTVVNKLFEFMHETHDGVQDMACDTFIKIAQKCRRHFVQVQVGEVMPFIDEILNNINTIICDLQPQQVHTFYEAVGYMIGAQTDQTVQEHLIEKYMLLPNQVWDSIIQQATKNVDILKDPETVKQLGSILKTNVRACKAVGHPFVIQLGRIYLDMLNVYKCLSENISAAIQANGEMVTKQPLIRSMRTVKRETLKLISGWVSRSNDPQMVAENFVPPLLDAVLIDYQRNVPAAREPEVLSTMAIIVNKLGGHITAEIPQIFDAVFECTLNMINKDFEEYPEHRTNFFLLLQAVNSHCFPAFLAIPPTQFKLVLDSIIWAFKHTMRNVADTGLQILFTLLQNVAQEEAAAQSFYQTYFCDILQHIFSVVTDTSHTAGLTMHASILAYMFNLVEEGKISTSLNPGNPVNNQIFLQEYVANLLKSAFPHLQDAQVKLFVTGLFSLNQDIPAFKEHLRDFLVQIKEFAGEDTSDLFLEEREIALRQADEEKHKRQMSVPGIFNPHEIPEEMCD

SEQ ID NO: 11861 - protein, 1324 aa, Homo sapiens
MRHGVAWALLVAAALGLGARGVRGAVALADFYPFGAERGDAVTPKQDDGGSGLRPLSVPFPFFGAEHSGLYVNNNGIISFLKEVSQFTPVAFPIAKDRCVVAAFWADVDNRRAGDVYYREATDPAMLRRATEDVRHYFPELLDFNATWVFVATWYRVTFFGGSSSSPVNTFQTVLITDGKLSFTIFNYESIVWTTGTHASSGGNATGLGGIAAQAGFNAGDGQRYFSIPGSRTADMAEVETTTNVGVPGRWAFRIDDAQVRVGGCGHTTSVCLALRPCLNGGKCIDDCVTGNPSYTCSCLSGFTGRRCHLDVNECASQPCQNGGTCTHGINSFRCQCPAGFGGPTCETAQSPCDTKECQHGGQCQVENGSAVCVCQAGYTGAACEMDVDDCSPDPCLNGGSCVDLVGNYTCLCAEPFKGLRCETGDHPVPDACLSAPCHNGGTCVDADQGYVCECPEGFMGLDCRERVPDDCECRNGGRCLGANTTLCQCPLGFFGLLCEFEITAMPCNMNTQCPDGGYCMEHGGSYLCVCHTDHNASHSLPSPCDSDPCFNGGSCDAHDDSYTCECPRGFHGKHCEKARPHLCSSGPCRNGGTCKEAGGEYHCSCPYRFTGRHCEIGKPDSCASGPCHNGGTCFHYIGKYKCDCPPGFSGRHCEIAPSPCFRSPCVNGGTCEDRDTDFFCHCQAGYMGRRCQAEVDCGPPEEVKHATLRFNGTRLGAVALYACDRGYSLSAPSRIRVCQPHGVWSEPPQCLEIDECRSQPCLHGGSCQDRVAGYLCLCSTGYEGAHCELERDECRAHPCRNGGSCRNLPGAYVCRCPAGFVGVHCETEVDACDSSPCQHGGRCESGGGAYLCVCPESFFGYHCETVSDPCFSSPCGGRGYCLASNGSHSCTCKVGYTGEDCAKELFPPTALKMERVEESGVSISWNPPNGPAARQMLDGYAVTYVSSDGSYRRTDFVDRTRSSHQLQALAAGRAYNISVFSVKRNSNNKNDISRPAVLLARTRPRPVEGFEVTNVTASTISVQWALHRIRHATVSGVRVSIRHPEALRDQATDVDRSVDRFTFRALLPGKRYTIQLTTLSGLRGEEHPTESLATAPTHVWTRPLPPANLTAARVTATSAHVVWDAPTPGSLLEAYVINVTTSQSTKSRYVPNGKLASYTVRDLLPGRRYQLSVIAVQSTELGPQHSEPAHLYIITSPRDGADRRWHQGGHHPRVLKNRPPPARLPELRLLNDHSAPETPTQPPRFSELVDGRGRVSARFGGSPSKAATVRSQPTASAQLENMEEAPKRVSLALQLPEHGSKDIGSESAALVGTLGLTDCSQGP

SEQ ID NO: 11862 - protein, 619 aa, Homo sapiens
MARQPPPPWVHAAFLLCLLSLGGAIEIPMDPSIQNELTQPPTITKQSAKDHIVDPRDNILIECEAKGNPAPSFHWTRNSRFFNIAKDPRVSMRRRSGTLVIDFRSGGRPEEYEGEYQCFARNKFGTALSNRIRLQVSKSPLWPKENLDPVVVQEGAPLTLQCNPPPGLPSPVIFWMSSSMEPITQDKRVSQGHNGDLYFSNVMLQDMQTDYSCNARFHFTHTIQQKNPFTLKVLTTRGVAERTPSFMYPQGTASSQMVLRGMDLLLECIASGVPTPDIAWYKKGGDLPSDKAKFENFNKALRITNVSEEDSGEYFCLASNKMGSIRHTISVRVKAAPYWLDEPKNLILAPGEDGRLVCRANGNPKPTVQWMVNGEPLQSAPPNPNREVAGDTIIFRDTQISSRAVYQCNTSNEHGYLLANAFVSVLDVPPRMLSPRNQLIRVILYNRTRLDCPFFGSPIPTLRWFKNGQGSNLDGGNYHVYENGSLEIKMIRKEDQGIYTCVATNILGKAENQVRLEVKDPTRIYRMPEDQVARRGTTVQLECRVKHDPSLKLTVSWLKDDEPLYIGNRMKKEDDSLTIFGVAERDQGSYTCVASTELDQDLAKAYLTVLGNCPCSPWH

SEQ ID NO: 11863 - protein, 250 aa, Homo sapiens
MTLSPLLLFLPPLLLLLDVPTAAVQASPLQALDFFGNGPPVNYKTGNLYLRGPLKKSNAPLVNVTLYYEALCGGCRAFLIRELFPTWLLVMEILNVTLVPYGNAQEQNVSGRWEFKCQHGEEECKFNKVEACVLDELDMELAFLTIVCMEEFEDMERSLPLCLQLYAPGLSPDTIMECAMGDRGMQLMHANAQRTDALQPPHEYVPWVTVNGKPLEDQTQLLTLVCQLYQGKKPDVCPSSTSSLRSVCFK

SEQ ID NO: 11864 - protein, 634 aa, Homo sapiens
MTEEACRTRSQKRALERDPTEDDVESKKIKMERGLLASDLNTDGDMRVTPEPGAGPTQGLLRATEATAMAMGRGEGLVGDGPVDMRTSHSDMKSERRPPSPDVIVLSDNEQPSSPRVNGLTTVALKETSTEALMKSSPEERERMIKQLKEELRLEEAKLVLLKKLRQSQIQKEATAQKPTGSVGSTVTTPPPLVRGTQNIPAGKPSLQTSSARMPGSVIPPPLVRGGQQASSKLGPQASSQVVMPPLVRGAQQIHSIRQHSSTGPPPLLLAPRASVPSVQIQGQRIIQQGLIRVANVPNTSLLVNIPQPTPASLKGTTATSAQANSTPTSVASVVTSAESPASRQAAAKLALRKQLEKTLLEIPPPKPPAPEMNFLPSAANNEFIYLVGLEEVVQNLLETQAGRMSAATVLSREPYMCAQCKTDFTCRWREEKSGAIMCENCMTTNQKKALKVEHTSRLKAAFVKALQQEQEIEQRLLQQGTAPAQAKAEPTAAPHPVLKQVIKPRRKLAFRSGEARDWSNGAVLQASSQLSRGSATTPRGVLHTFSPSPKLQNSASATALVSRTGRHSERTVSAGKGSATSNWKKTPLSTGGTLAFVSPSLAVHKSSSAVDRQREYLLDMIPPRSIPQSATWK

SEQ ID NO: 11865 - protein, 348 aa, Homo sapiens
MNMTQARVLVAAVVGLVAVLLYASIHKIEEGHLAVYYRGGALLTSPSGPGYHIMLPFITTFRSVQTTLQTDEVKNVPCGTSGGVMIYIDRIEVVNMLAPYAVFDIVRNYTADYDKTLIFNKIHHELNQFCSAHTLQEVYIELFDQIDENLKQALQKDLNLMAPGLTIQAVRVTKPKIPEAIRRNFELMEAEKTKLLIAAQKQKVVEKEAETERKKAVIEAEKIAQVAKIRFQQKVMEKETEKRISEIEDAAFLAREKAKADAEYYAAHKYATSNKHKLTPEYLELKKYQAIASNSKIYFGSNIPNMFVDSSCALKYSDIRTGRESSLPSKEALEPSGENVIQNKESTG

SEQ ID NO: 11866 - protein, 128 aa, Homo sapiens
MVVALRYVWPLLLCSPCLLIQIPEELMEPPVITEQSPRRLVVFPTDDISLKCEASGKPEVQFRWTRDGVHFKPKEELGVTVYQSPHSGSFTITGNNSNFAQRFQGIYRCFASNKLGTAMSHEIRLMAE

SEQ ID NO: 11867 - protein, 400 aa, Homo sapiens
MRHLGAFLFLLGVLGALTEMCEIPEMDSHLVEKLGQHLLPWMDRLSLEHLNPSIYVGLRLSSLQAGTKEDLYLHSLKLGYQQCLLGSAFSEDDGDCQGKPSMGQLALYLLALRANWHDHKGHPHTSYYQYGLGILALCLHQKRVHDSVVDKLLYAVEPFHQGHHSVDTAAMAGLAFTCLKRSNFNPGRRQRITMAIRTVREEILKAQTPEGHFGNVYSTPLALQFLMTSPMRGAELGTACLKARVALLASLQDGAFQNALMISQLLPVLNHKTYIDLIFPDCLAPRVMLEPAAETIPQTQEIISVTLQVLSLLPPYRQSISVLAGSTVEDVLKKAHELGGFTYETQASLSGPYLTSVMGKAAGEREFWQLLRDPNTPLLQGIADYRPKDGETIELRLVSW

SEQ ID NO: 11868 - protein, 3574 aa, Homo sapiens
MWPRLAFCCWGLALVSGWATFQQMSPSRNFSFRLFPETAPGAPGSIPAPPAPGDEAAGSRVERLGQAFRRRVRLLRELSERLELVFLVDDSSSVGEVNFRSELMFVRKLLSDFPVVPTATRVAIVTFSSKNYVVPRVDYISTRRARQHKCALLLQEIPAISYRGGGTYTKGAFQQAAQILLHARENSTKVVFLITDGYSNGGDPRPIAASLRDSGVEIFTFGIWQGNIRELNDMASTPKEEHCYLLHSFEEFEALARRALHEDLPSGSFIQDDMVHCSYLCDEGKDCCDRMGSCKCGTHTGHFECICEKGYYGKGLQYECTACPSGTYKPEGSPGGISSCIPCPDENHTSPPGSTSPEDCVCREGYRASGQTCELVHCPALKPPENGYFIQNTCNNHFNAACGVRCHPGFDLVGSSIILCLPNGLWSGSESYCRVRTCPHLRQPKHGHISCSTREMLYKTTCLVACDEGYRLEGSDKLTCQGNSQWDGPEPRCVERHCSTFQMPKDVIISPHNCGKQPAKFGTICYVSCRQGFILSGVKEMLRCTTSGKWNVGVQAAVCKDVEAPQINCPKDIEAKTLEQQDSANVTWQIPTAKDNSGEKVSVHVHPAFTPPYLFPIGDVAIVYTATDLSGNQASCIFHIKVIDAEPPVIDWCRSPPPVQVSEKVHAASWDEPQFSDNSGAELVITRSHTQGDLFPQGETIVQYTATDPSGNNRTCDIHIVIKGSPCEIPFTPVNGDFICTPDNTGVNCTLTCLEGYDFTEGSTDKYYCAYEDGVWKPTYTTEWPDCAKKRFANHGFKSFEMFYKAARCDDTDLMKKFSEAFETTLGKMVPSFCSDAEDIDCRLEENLTKKYCLEYNYDYENGFAIGPGGWGAANRLDYSYDDFLDTVQETATSIGNAKSSRIKRSAPLSDYKIKLIFNITASVPLPDERNDTLEWENQQRLLQTLETITNKLKRTLNKDPMYSFQLASEILIADSNSLETKKASPFCRPGSVLRGRMCVNCPLGTYYNLEHFTCESCRIGSYQDEEGQLECKLCPSGMYTEYIHSRNISDCKAQCKQGTYSYSGLETCESCPLGTYQPKFGSRSCLSCPENTSTVKRGAVNISACGVPCPEGKFSRSGLMPCHPCPRDYYQPNAGKAFCLACPFYGTTPFAGSRSITECSSFSSTFSAAEESVVPPASLGHIKKRHEISSQVFHECFFNPCHNSGTCQQLGRGYVCLCPLGYTGLKCETDIDECSPLPCLNNGVCKDLVGEFICECPSGYTGQRCEENINECSSSPCLNKGICVDGVAGYRCTCVKGFVGLHCETEVNECQSNPCLNNAVCEDQVGGFLCKCPPGFLGTRCGKNVDECLSQPCKNGATCKDGANSFRCLCAAGFTGSHCELNINECQSNPCRNQATCVDELNSYSCKCQPGFSGKRCETEQSTGFNLDFEVSGIYGYVMLDGMLPSLHALTCTFWMKSSDDMNYGTPISYAVDNGSDNTLLLTDYNGWVLYVNGREKITNCPSVNDGRWHHIAITWTSANGIWKVYIDGKLSDGGAGLSVGLPIPGMLGGGALVLGQEQDKKGEGFSPAESFVGSISQLNLWDYVLSPQQVKSLATSCPEELSKGNVLAWPDFLSGIVGKVKIDSKSIFCSDCPRLGGSVPHLRTASEDLKPGSKVNLFCDPGFQLVGNPVQYCLNQGQWTQPLPHCERISCGVPPPLENGFHSADDFYAGSTVTYQCNNGYYLLGDSRMFCTDNGSWNGVSPSCLDVDECAVGSDCSEHASCLNVDGSYICSCVPPYTGDGKNCAEPIKCKAPGNPENGHSSGEIYTVGAEVTFSCQEGYQLMGVTKITCLESGEWNHLIPYCKAVSCGKPAIPENGCIEELAFTFGSKVTYRCNKGYTLAGDKESSCLANSSWSHSPPVCEPVKCSSPENINNGKYILSGLTYLSTASYSCDTGYSLQGPSIIECTASGIWDRAPPACHLVFCGEPPAIKDAVITGNNFTFRNTVTYTCKEGYTLAGLDTIECLADGKWSRSDQQCLAVSCDEPPIVDHASPETAHRLFGDIAFYYCSDGYSLADNSQLLCNAQGKWVPPEGQDMPRCIAHFCEKPPSVSYSILESVSKAKFAAGSVVSFKCMEGFVLNTSAKIECMRGGQWNPSPMSIQCIPVRCGEPPSIMNGYASGSNYSFGAMVAYSCNKGFYIKGEKKSTCEATGQWSSPIPTCHPVSCGEPPKVENGFLEHTTGRIFESEVRYQCNPGYKSVGSPVFVCQANRHWHSESPLMCVPLDCGKPPPIQNGFMKGENFEVGSKVQFFCNEGYELVGDSSWTCQKSGKWNKKSNPKCMPAKCPEPPLLENQLVLKELTTEVGVVTFSCKEGHVLQGPSVLKCLPSQQWNDSFPVCKIVLCTPPPLISFGVPIPSSALHFGSTVKYSCVGGFFLRGNSTTLCQPDGTWSSPLPECVPVECPQPEEIPNGIIDVQGLAYLSTALYTCKPGFELVGNTTTLCGENGHWLGGKPTCKAIECLKPKEILNGKFSYTDLHYGQTVTYSCNRGFRLEGPSALTCLETGDWDVDAPSCNAIHCDSPQPIENGFVEGADYSYGAIIIYSCFPGFQVAGHAMQTCEESGWSSSIPTCMPIDCGLPPHIDFGDCTKLKDDQGYFEQEDDMMEVPYVTPHPPYHLGAVAKTWENTKESPATHSSNFLYGTMVSYTCNPGYELLGNPVLICQEDGTWNGSAPSCISIECDLPTAPENGFLRFTETSMGSAVQYSCKPGHILAGSDLRLCLENRKWSGASPRCEAISCKKPNPVMNGSIKGSNYTYLSTLYYECDPGYVLNGTERRTCQDDKNWDEDEPICIPVDCSSPPVSANGQVRGDEYTFQKEIEYTCNEGFLLEGARSRVCLANGSWSGATPDCVPVRCATPPQLANGVTEGLDYGFMKEVTFHCHEGYILHGAPKLTCQSDGNWDAEIPLCKPVNCGPPEDLAHGFPNGFSFIHGGHIQYQCFPGYKLHGNSSRRCLSNGSWSGSSPSCLPCRCSTPVIEYGTVNGTDFDCGKAARIQCFKGFKLLGLSEITCEADGQWSSGFPHCEHTSCGSLPMIPNAFISETSSWKENVITYSCRSGYVIQGSSDLICTEKGVWSQPYPVCEPLSCGSPPSVANAVATGEAHTYESEVKLRCLEGYTMDTDTDTFTCQKDGRWFPERISCSPKKCPLPENITHILVHGDDFSVNRQVSVSCAEGYTFEGVNISVCQLDGTWEPPFSDESCSPVSCGKPESPEHGFVVGSKYTFESTIIYQCEPGYELEGNRERVCQENRQWSGGVAICKETRCETPLEFLNGKADIENRTTGPNVVYSCNRGYSLEGPSEAHCTENGTWSHPVPLCKPNPCPVPFVIPENALLSEKEFYVDQNVSIKCREGFLLQGHGIITCNPDETWTQTSAKCEKISCGPPAHVENAIARGVHYQYGDMITYSCYSGYMLEGFLRSVCLENGTWTSPPICRAVCRFPCQNGGICQRPNACSCPEGWMGRLCEEPICILPCLNGGRCVAPYQCDCPPGWTGSRCHTAVCQSPCLNGGKCVRPNRCHCLSSWTGHNCSRKRRTGF

SEQ ID NO: 11869 - protein, 200 aa, Homo sapiens
MAAAKDTHEDHDTSTENTDESNHDPQFEPIVSLPEQEIKTLEEDEEELFKMRAKLFRFASENDLPEWKERGTGDVKLLKHKEKGAIRLLMRRDKTLKICANHYITPMMELKPNAGSDRAWVWNTHADFADECPKPELLAIRFLNAENAQKFKTKFEECRKEIEEREKKGSGKNDHAEKVAEKLEALSVKEETKEDAEEKQ

SEQ ID NO: 11870 - protein, 992 aa, Homo sapiens
MDGFAGSLDDSISAASTSDVQDRLSALESRVQQQEDEITVLKAALADVLRRLAISEDHVASVKKSVSSKGQPSPRAVIPMSCITNGSGANRKPSHTSAVSIAGKETLSSAAKSGTEKKKEKPQGQREKKEESHSNDQSPQIRASPSPQPSSQPLQIHRQTPESKNATPTKSIKRPSPAEKSHNSWENSDDSRNKLSKIPSTPKLIPKVTKTADKHKDVIINQAKMSTREKNSQEGEYIKMFMRGRPITMFIPSDVDNYDDIRTELPPEKLKLEWAYGYRGKDCRANVYLLPTGKIVYFIASVVVLFNYEERTQRHYLGHTDCVKCLAIHPDKIRIATGQIAGVDKDGRPLQPHVRVWDSVTLSTLQIIGLGTFERGVGCLDFSKADSGVHLCIIDDSNEHMLTVWDWQKKAKGAEIKTTNEVVLAVEFHPTDANTIITCGKSHIFFWTWSGNSLTRKQGIFGKYEKPKFVQCLAFLGNGDVLTGDSGGVMLIWSKTTVEPTPGKGPKGVYQISKQIKAHDGSVFTLCQMRNGMLLTGGGKDRKIILWDHDLNPEREIEVPDQYGTIRAVAEGKADQFLVGTSRNFILRGTFNDGFQIEVQGHTDELWGLATHPFKDLLLTCAQDRQVCLWNSMEHRLEWTRLVDEPGHCADFHPSGTVVAIGTHSGRWFVLDAETRDLVSIHTDGNEQLSVMRYSIDGTFLAVGSHDNFIYLYVVSENGRKYSRYGRCTGHSSYITHLDWSPDNKYIMSNSGDYEILYWDIPNGCKLIRNRSDCKDIDWTTYTCVLGFQVFGVWPEGSDGTDINALVRSHNRKVIAVADDFCKVHLFQYPCSKAKAPSHKYSAHSSHVTNVSFTHNDSHLISTGGKDMSIIQWKLVEKLSLPQNETVADTTLTKAPVSSTESVIQSNTPTPPPSQPLNETAEEESRISSSPTLLENSLEQTVEPSEDHSEEESEEGSGDLGEPLYEEPCNEISKEQAKATLLEDQQDPSPSS

SEQ ID NO: 11871 - protein, 769 aa, Homo sapiens
MAQWNQLQQLDTRYLEQLHQLYSDSFPMELRQFLAPWIESQDWAYAASKESHATLVFHNLLGEIDQQYSRFLQESNVLYQHNLRRIKQFLQSRYLEKPMEIARIVARCLWEESRLLQTAATAAQQGGQANHPTAAVVTEKQQMLEQHLQDVRKRVQDLEQKMKVVENLQDDFDFNYKTLKSQGDMQDLNGNNQSVTRQKMQQLEQMLTALDQMRRSIVSELAGLLSAMEYVQKTLTDEELADWKRRQQIACIGGPPNICLDRLENWITSLAESQLQTRQQIKKLEELQQKVSYKGDPIVQHRPMLEERIVELFRNLMKSAFVVERQPCMPMHPDRPLVIKTGVQFTTKVRLLVKFPELNYQLKIKVCIDKDSGDVAALRGSRKFNILGTNTKVMNMEESNNGSLSAEFKHLTLREQRCGNGGRANCDASLIVTEELHLITFETEVYHQGLKIDLETHSLPVVVISNICQMPNAWASILWYNMLTNNPKNVNFFTKPPIGTWDQVAEVLSWQFSSTTKRGLSIEQLTTLAEKLLGPGVNYSGCQITWAKFCKENMAGKGFSFWVWLDNIIDLVKKYILALWNEGYIMGFISKERERAILSTKPPGTFLLRFSESSKEGGVTFTWVEKDISGKTQIQSVEPYTKQQLNNMSFAEIIMGYKIMDATNILVSPLVYLYPDIPKEEAFGKYCRPESQEHPEADPGAAPYLKTKFICVTPTTCSNTIDLPMSPRTLDSLMQFGNNGEGAEPSAGGQFESLTFDMELTSECATSPM

SEQ ID NO: 11872 - protein, 367 aa, Homo sapiens
MEKKKMVTQGNQEPTTTPDAMVQPFTTIPFPPPPQNGIPTEYGVPHTQDYAGQTGEHNLTLYGSTQAHGEQSSNSPSTQNGSLTQTEGGAQTDGQQSQTQSSENSESKSTPKRLHVSNIPFRFRDPDLRQMFGQFGKILDVEIIFNERGSKGFGFVTFENSADADRAREKLHGTVVEGRKIEVNNATARVMTNKKMVTPYANGWKLSPVVGAVYGPELYAASSFQADVSLGNDAAVPLSGRGGINTYIPLIIPGFPYPTAATTAAAFRGAHLRGRGRTVYGAVRAVPPTAIPAYPGVDMQPTDMHSLLLQPQPPLLQPLQPLTVTVMAGCTQPTPTMPLPLPLAMELALWRVYTEVATADLPPTEVT

SEQ ID NO: 11873 - protein, 436 aa, Homo sapiens
MNLASQSGEAGAGQLLFANFNQDNTSLAVGSKSGYKFFSLSSVDKLEQIYECTDTEDVCIVERLFSSSLVAIVSLKAPRKLKVCHFKKGTEICNYSYSNTILAVKLNRQRLIVCLEESLYIHNIRDMKVLHTIRETPPNPAGLCALSINNDNCYLAYPGSATIGEVQVFDTINLRAANMIPAHDSPLAALAFDASGTKLATASEKGTVIRVFSIPEGQKLFEFRRGVKRCVSICSLAFSMDGMFLSASSNTETVHIFKLETVKEKPPEEPTTWTGYFGKVLMASTSYLPSQVTEMFNQGRAFATVRLPFCGHKNICSLATIQKIPRLLVGAADGYLYMYNLDPQEGGECALMKQHRLDGSLETTNEILDSASHDCPLVTQTYGAAAGKGTYVPSSPTRLAYTDDLGAVGGACLEDEASALRLDEDSEHPPMILRTD

SEQ ID NO: 11874 - protein, 625 aa, Homo sapiens
MIFLYQVVHFILFTSVSGECVTQLLKDTCFEGGDITTVFTPSAKYCQVVCTYHPRCLLFTFTAESPSEDPTRWFTCVLKDSVTETLPRVNRTAAISGYSFKQCSHQISACNKDIYVDLDMKGINYNSSVAKSAQECQERCTDDVHCHFFTYATRQFPSLEHRNICLLKHTQTGTPTRITKLDKVVSGFSLKSCALSNLACIRDIFPNTVFADSNIDSVMAPDAFVCGRICTHHPGCLFFTFFSQEWPKESQRNLCLLKTSESGLPSTRIKKSKALSGFSLQSCRHSIPVFCHSSFYHDTDFLGEELDIVAAKSHEACQKLCTNAVRCQFFTYTPAQASCNEGKGKCYLKLSSNGSPTKILHGRGGISGYTLRLCKMDNECTTKIKPRIVGGTASVRGEWPWQVTLHTTSPTQRHLCGGSIIGNQWILTAAHCFYGVESPKILRVYSGILNQSEIKEDTSFFGVQEIIIHDQYKMAESGYDIALLKLETTVNYTDSQRPICLPSKGDRNVIYTDCWVTGWGYRKLRDKIQNTLQKAKIPLVTNEECQKRYRGHKITHKMICAGYREGGKDACKGDSGGPLSCKHNEVWHLVGITSWGEGCAQRERPGVYTNVVEYVDWILEKTQAV

SEQ ID NO: 11875 - protein, 62 aa, Homo sapiens
MAAATLTSKLYSLLFRRTSTFALTIIVGVMFFERAFDQGADAIYDHINEGVRACAIPDLGPA

SEQ ID NO: 11876 - protein, 328 aa, Homo sapiens
MDGEDIPDFSSLKEETAYWKELSLKYKQSFQEARDELVEFQEGSRELEAELEAQLVQAEQRNRDLQADNQRLKYEVEALKEKLEHQYAQSYKQVSVLEDDLSQTRAIKEQLHKYVRELEQANDDLERAKRATIVSLEDFEQRLNQAIERNAFLESELDEKESLLVSVQRLKDEARDLRQELAVRERQQEVTRKSAPSSPTLDCEKMDSAVQASLSLPATPVGKGTENTFPSPKAIPNGFGTSPLTPSARISALNIVGDLLRKVGALESKLAACRNFAKDQASRKSYISGNVNCGVLNGNGTKFSRSGHTSFFDKGQEKVIFPTLFMGQ

SEQ ID NO: 11877 - protein, 148 aa, Homo sapiens
MFIKVMFGAGCSVLVNTSCRLVNLTAHLRQKAGLPPDATIALLAEDGNLVSLEEDLKEGASRAQTMGNSLLKERAIYVLVRIIKGEDMASTRYESLLENLDDHYPELAEELRRLSGLSSVGHNWRKRMGTRRGRHEQSPTSRPRKGPD

SEQ ID NO: 11878 - protein, 236 aa, Homo sapiens
MMGIFLVYVGFVFFSVLYVQQGLSSQAKFTEFPRNVTATEGQNVEMSCAFQSGSASVYLEIQWWFLRGPEDLDPGAEGAGAQVELLPDRDPDSDGTKISTVKVQGNDISHKLQISKVRKKDEGLYECRVTDANYGELQEHKAQAYLKVNANSHARRMQAFEASPMWLQDMKPRKNVSAAIPSSIHGSANQRTHSTSSPQVVAKIPKQSPQSGARIATSHGLSVLLLVCGFVKGALL

SEQ ID NO: 11879 - protein, 720 aa, Homo sapiens
MPVPWFLLSLALGRSPVVLSLERLVGPQDATHCSPGLSCRLWDSDILCLPGDIVPAPGPVLAPTHLQTELVLRCQKETDCDLCLRVAVHLAVHGHWEEPEDEEKFGGAADSGVEEPRNASLQAQVVLSFQAYPTARCVLLEVQVPAALVQFGQSVGSVVYDCFEAALGSEVRIWSYTQPRYEKELNHTQQLPDCRGLEVWNSIPSCWALPWLNVSADGDNVHLVLNVSEEQHFGLSLYWNQVQGPPKPRWHKNLTGPQIITLNHTDLVPCLCIQVWPLEPDSVRTNICPFREDPRAHQNLWQAARLQLLTLQSWLLDAPCSLPAEAALCWRAPGGDPCQPLVPPLSWENVTVDKVLEFPLLKGHPNLCVQVNSSEKLQLQECLWADSLGPLKDDVLLLETRGPQDNRSLCALEPSGCTSLPSKASTRAARLGEYLLQDLQSGQCLQLWDDDLGALWACPMDKYIHKRWALVWLACLLFAAALSLILLLKKDHAKGWLRLLKQDVRSGAAARGRAALLLYSADDSGFERLVGALASALCQLPLRVAVDLWSRRELSAQGPVAWFHAQRRQTLQEGGVVVLLFSPGAVALCSEWLQDGVSGPGAHGPHDAFRASLSCVLPDFLQGRAPGSYVGACFDRLLHPDAVPALFRTVPVFTLPSQLPDFLGALQQPRAPRSGRLQERAEQVSRALQPALDSYFHPPGTPAPGRGVGPGAGPGAGDGT

SEQ ID NO: 11880 - protein, 331 aa, Homo sapiens
MCSHFDADEIKRLGKRFKKLDLDNSGSLSVEEFMSLPELQQNPLVQRVIDIFDTDGNGEVDFKEFIEGVSQFSVKGDKEQKLRFAFRIYDMDKDGYISNGELFQVLKMMVGNNLKDTQLQQIVDKTIINADKDGDGRISFEEFCARGGKTGLFAGLASSVSMRPASPPSPAADSCSACRFFARRPPLRVTWVKPSSALALCVSISDSIPGNLKALPAETRAQLHHAEASLSQPPLQLRPFPKTSQAGDLQDLGPYVCVRKAVGKGDKQIRAVVKEHSVRSQERIWHYPGITTANMPGHLGQNTESGRDKLPMFGVWFPGCRFWGLWVWRLP

SEQ ID NO: 11881 - protein, 354 aa, Homo sapiens
MAAPALGLVCGRCPELGLVLLLLLLSLLCGAAGSQEAGTGAGAGSLAGSCGCGTPQRPGAHGSSAAAHRYSREANAPGPVPGERQLAHSKMVPIPAGVFTMGTDDPQIKQDGEAPARRVTIDAFYMDAYEVSNTEFEKFVNSTGYLTEAEKFGDSFVFEGMLSEQVKTNIQQAVAAAPWWLPVKGANWRHPEGPDSTILHRPDHPVLHVSWNDAVAYCTWAGKRLPTEAEWEYSCRGGLHNRLFPWGNKLQPKGQHYANIWQGEFPVTNTGEDGFQGTAPVDAFPPNGYGLYNIVGNAWEWTSDWWTVHHSVEETLNPSYCYRYRCAARSQNTPDSSASNLGFRCAADRLPTMD

SEQ ID NO: 11882 - protein, 379 aa, Homo sapiens
MAPGNLWHMRNNFLFGSRCWMTRFSAENIFKSVSFRLFGVKCHNTDSEPLKNEDLLKNLLTMGVDIDMARKRQPGVFHRMITNEQDLKMFLLSKGASKEVIASIISRYPRAITRTPENLSKRWDLWRKIVTSDLEIVNILERSPESFFRSNNNLNLENNIKFLYSVGLTRKCLCRLLTNAPRTFSNSLDLNKQMVEFLQAAGLSLGHNDPADFVRKIIFKNPFILIQSTKRVKANIEFLRSTFNLNSEELLVLICGPGAEILDLSNDYARRSYANIKEKLFSLGCTEEEVQKFVLSYPDVIFLAEKKFNDKIDCLMEENISISQIIENPRVLDSSISTLKSRIKELVNAGCNLSTLNITLLSWSKKRYEAKLKKLSRFA

SEQ ID NO: 11883 - protein, 577 aa, Homo sapiens
MVICCAAVNCSNRQGKGEKRAVSFHRFPLKDSKRLIQWLKAVQRDNWTPTKYSFLCSEHFTKDSFSKRLEDQHRLLKPTAVPSIFHLTEKKRGAGGHGRTRRKDASKATGGVRGHSSAATSRGAAGWSPSSSGNPMAKPESRRLKQAALQGEATPRAAQEAASQEQAQQALERTPGDGLATMVAGSQGKAEASATDAGDESATSSIEGGVTDKSGISMDDFTPPGSGACKFIGSLHSYSFSSKHTRERPSVPREPIDRKRLKKDVEPSCSGSSLGPDKGLAQSPPSSSLTATPQKPSQSPSAPPADVTPKPATEAVQSEHSDASPMSINEVILSASGACKLIDSLHSYCFSSRQNKSQVCCLREQVEKKNGELKSLRQRVSRSDSQVRKLQEKLDELRRVSVPYPSSLLSPSREPPKMNPVVEPLSWMLGTWLSDPPGAGTYPTLQPFQYLEEVHISHVGQPMLNFSFNSFHPDTRKPMHRECGFIRLKPDTNKVAFVSAQNTGVVEVEEGEVNGQELCIASHSIARISFAKEPHVEQITRKFRLNSEGKLEQTVSMATTTQPMTQHLHVTYKKVTP

SEQ ID NO: 11884 - protein, 284 aa, Homo sapiens
MAELPGPFLCGALLGFLCLSGLAVEVKVPTEPLSTPLGKTAELTCTYSTSVGDSFALEWSFVQPGKPISESHPILYFTNGHLYPTGSKSKRVSLLQNPPTVGVATLKLTDVHPSDTGTYLCQVNNPPDFYTNGLGLINLTVLVPPSNPLCSQSGQTSVGGSTALRCSSSEGAPKPVYNWVRLGTFPTPSPGSMVQDEVSGQLILTNLSLTSSGTYRCVATNQMGSASCELTLSVTEPSQGRVAGALIGVLLGVLLLSVAAFCLVRFQKERGKKPKETYGGSDLR

SEQ ID NO: 11885 - protein, 1507 aa, Homo sapiens
MGTALLQRGGCFLLCLSLLLLGCWAELGSGLEFPGAEGQWTRFPKWNACCESEMSFQLKTRSARGLVLYFDDEGFCDFLELILTRGGRLQLSFSIFCAEPATLLADTPVNDGAWHSVRIRRQFRNTTLFIDQVEAKWVEVKSKRRDMTVFSGLFVGGLPPELRAAALKLTLASVREREPFKGWIRDVRVNSSQVLPVDSGEVKLDDEPPNSGGGSPCEAGEEGEGGVCLNGGVCSVVDDQAVCDCSRTGFRGKDCSQEDNNVEGLAHLMMGDQGKSKGKEEYIATFKGSEYFCYDLSQNPIQSSSDEITLSFKTLQRNGLMLHTGKSADYVNLALKNGAVSLVINLGSGAFEALVEPVNGKFNDNAWHDVKVTRNLRQHSGIGHAMVTISVDGILTTTGYTQEDYTMLGSDDFFYVGGSPSTADLPGSPVSNNFMGCLKEVVYKNNDVRLELSRLAKQGDPKMKIHGVVAFKCENVATLDPITFETPESFISLPKWNAKKTGSISFDFRTTEPNGLILFSHGKPRHQKDAKHPQMIKVDFFAIEMLDGHLYLLLDMGSGTIKIKALLKKVNDGEWYHVDFQRDGRSGTISVNTLRTPYTAPGESEILDLDDELYLGGLPENKAGLVFPTEVWTALLNYGYVGCIRDLFIDGQSKDIRQMAEVQSTAGVKPSCSKETAKPCLSNPCKNNGMCRDGWNRYVCDCSGTGYLGRSCEREATVLSYDGSMFMKIQLPVVMHTEAEDVSLRFRSQRAYGILMATTSRDSADTLRLELDAGRVKLTVNLDCIRINCNSSKGPETLFAGYNLNDNEWHTVRVVRRGKSLKLTVDDQQAMTGQMAGDHTRLEFHNIETGIITERRYLSSVPSNFIGHLQSLTFNGMAYIDLCKNGDIDYCELNARFGFRNIIADPVTFKTKSSYVALATLQAYTSMHLFFQFKTTSLDGLILYNSGDGNDFIVVELVKGYLHYVFDLGNGANLIKGSSNKPLNDNQWHNVMISRDTSNLHTVKIDTKITTQITAGARNLDLKSDLYIGGVAKETYKSLPKLVHAKEGFQGCLASVDLNGRLPDLISDALFCNGQIERGCEGPSTTCQEDSCSNQGVCLQQWDGFSCDCSMTSFSGPLCNDPGTTYIFSKGGGQITYKWPPNDRPSTRADRLAIGFSTVQKEAVLVRVDSSSGLGDYLELHIHQGKIGVKFNVGTDDIAIEESNAIINDGKYHVVRFTRSGGNATLQVDSWPVIERYPAGNNDNERLAIARQRIPYRLGRVVDEWLLDKGRQLTIFNSQATIIIGGKEQGQPFQGQLSGLYYNGLKVLNMAAENDANIAIVGNVRLVGEVPSSMTTESTATAMQSEMSTSIMETTTTLATSTARRGKPPTKEPISQTTDDILVASAECPSDDEDIDPCEPSSGGLANPTRAGGREPYPGSAEVIRESSSTTGMVVGIVAAAALCILILLYAMYKYRNRDEGSYHVDESRNYISNSAQSNGAVVKEKQPSSAKSSNKNKKNKDKEYYV

SEQ ID NO: 11886 - protein, 194 aa, Homo sapiens [sequence omitted]

SEQ ID NO: 11887 - protein, 280 aa, Homo sapiens
MAAERGAGQQQSQEMMEVDRRVESEESGDEEGKKHSSGIVADLSEQSLKDGEERGEEDPEEEHELPVDMETINLDRDAEDVDLNHYRIGKIEGFEVLKKVKTLCLRQNLIKCIENLEELQSLRELDLYDNQIKKIENLEALTELEILDISFNLLRNIEGVDKLTRLKKLFLVNNKISKIENLSNLHQLQMLELGSNRIRAIENIDTLTNLESLFLGKNKITKLQNLDALTNLTVLSMQSNRLTKIEGLQNLVNLRELYLSHNGIEVIEGLENNVQDSLTY

SEQ ID NO: 11888 - protein, 937 aa, Homo sapiens
MISAPDVVAFTKEEEYEEEPYNEPALPEEYSVPLFPFASQGANPWSKLSGAKFSRDFILISEFSEQVGPQPLLTIPNDTKVFGTFDLNYFSLRIMSVDYQASFVGHPPGSAYPKLNFVEDSKVVLGDSKEGAFAYVHHLTLYDLEARGFVRPFCMAYISADQHKIMQQFQELSAEFSRASECLKTGNRKAFAGELEKKLKDLDYTRTVLHTETEIQKKANDKGFYSSQAIEKANELASVEKSIIEHQDLLKQIRSYPHRKLKGHDLCPGEMEHIQDQASQASTTSNPDESADTDLYTCRPAYTPKLIKAKSTKCFDKKLKTLEELCDTEYFTQTLAQLSHIEHMFRGDLCYLLTSQIDRALLKQQHITNFLFEDFVEVDDRMVEKQESIPSKPSQDRPPSSSLEECPIPKVLISVGSYKSSVESVLIKMEQELGDEEYKEVEVTELSSFDPQENLDYLDMDMKGSISSGESIEVLGTEKSTSVLSKSDSQASLTVPLSPQVVRSKAVSHRTISEDSIEVLSTCPSEALIPDDFKASYPSAINEEESYPDGNEGAIRFQASISPPELGETEEGSIENTPSQIDSSCCIGKESDGQLVLPSTPAHTHSDEDGVVSSPPQRHRQKDQGFRVDFSVENANPSSRDNSCEGFPAYELDPSHLLASRDISKTSLDNYSDTTSYVSSVASTSSDRIPSAYPAGLSSDRHKKRAGQNALKFIRQYPFAHPAIYSLLSGRTLVVLGEDEAIVRKLVTALAIFVPSYGCYAKPVKHWASSPLHIMDFQKWKLIGLQRVASPAGAGTLHALSRYSRYTSILDLDNKTLRCPLYRGTLVPRLADHRTQIKRGSTYYLHVQSMLTQLCSKAFLYTFCHHLHLPTHDKETEELVASRQMSFLKLTLGLVNEDVRVVQYLAELLKLHYMQESPGTSHPMLRFDYVPSFLYKI

SEQ ID NO: 11889 - protein, 529 aa, Homo sapiens
MGPSCPVFLSFTKLSLWWLLLTPAGGEEAKRPPPRAPGDPLSSPSPTALPQGGSHTETEDRLFKHLFRGYNRWARPVPNTSDVVIVRFGLSIAQLIDVDEKNQMMTTNVWLKQEWSDYKLRWNPTDFGNITSLRVPSEMIWIPDIVLYNNADGEFAVTHMTKAHLFSTGTVHWVPPAIYKSSCSIDVTFFPFDQQNCKMKFGSWTYDKAKIDLEQMEQTVDLKDYWESGEWAIVNATGTYNSKKYDCCAEIYPDVTYAFVIRRLPLFYTINLIIPCLLISCLTVLVFYLPSDCGEKITLCISVLLSLTVFLLLITEIIPSTSLVIPLIGEYLLFTMIFVTLSIVITVFVLNVHHRSPSTHTMPHWVRGALLGCVPRWLLMNRPPPPVELCHPLRLKLSPSYHWLESNVDAEEREVVVEEEDRWACAGHVAPSVGTLCSHGHLHSGASGPKAEALLQEGELLLSPHMQKALEGVHYIADHLRSEDADSSVKEDWKYVAMVIDRIFLWLFIIVCFLGTIGLFLPPFLAGMI

SEQ ID NO: 11890 - protein, 686 aa, Homo sapiens
MAIDRRREAAGGGPGRQPAPAEENGSLPPGDAAASAPLGGRAGPGGGAEIQPLPPLHPGGGPHPSCCSAAAAPSLLLLDYDGSVLPFLGGLGGGYQKTLVLLTWIPALFIGFSQFSDSFLLDQPNFWCRGAGKGTELAGVTTTGRGGDMGNWTSLPTTPFATAPWEAAGNRSNSSGADGGDTPPLPSPPDKGDNASNCDCRAWDYGIRAGLVQNVVSKWDLVCDNAWKVHIAKFSLLVGLIFGYLITGCIADWVGRRPVLLFSIIFILIFGLTVALSVNVTMFSTLRFFEGFCLAGIILTLYALRIELCPPGKRFMITMVASFVAMAGQFLMPGLAALCRDWQVLQALIICPFLLMLLYWSIFPESLRWLMATQQFESAKRLILHFTQKNRMNPEGDIKGVIPELEKELSRRPKKVCIVKVVGTRNLWKNIVVLCVNSLTGYGIHHCFARSMMGHEVKVPLLENFYADYYTTASIALVSCLAMCVVVRFLGRRGGLLLFMILTALASLLQLGLLNLIGKYSQHPDSGMSDSVKDKFSIAFSIVGMFASHAVGSLSVFFCAEITPTVIRCGGLGLVLASAGFGMLTAPIIELHNQKGYFLHHIIFACCTLICIICILLLPESRDQNLPENISNGEHYTRQPLLPHKKGEQPLLLTNAELKDYSGLHDAAAAGDTLPEGATANGMKAM

SEQ ID NO: 11891 - protein, 258 aa, Homo sapiens
MSIGVNCTQITATECDFTAASPSAGFPMDFNVTLRLRAELGALHSAWVTMPWFQHYRNVTVGPPENIEVTPGEGSLIIRFSSPFDIADTSTAFFCYYVHYWEKGGIQQVKGPFRSNSISLDNLKPSRVYCLQVQAQLLWNKSNIFRVGHLSNISCYETMADASTELQQVILISVGTFSLLSVLAGACFFLVLKYRGLIKYWFHTPPSIPLQIEEYLKDPTQPILEALDKDSSPKDDVWDSVSIISFPEKEQEDVLQTL

SEQ ID NO: 11892 - protein, 384 aa, Homo sapiens
MKPHFRNTVERMYRDTFSYNFYNRPILSRRNTVWLCYEVKTKGPSRPPLDAKIFRGQVYSELKYHPEMRFFHWFSKWRKLHRDQEYEVTWYISWSPCTKCTRDMATFLAEDPKVTLTIFVARLYYFWDPDYQEALRSLCQKRDGPRATMKIMNYDEFQHCWSKFVYSQRELFEPWNNLPKYYILLHIMLGEILRHSMDPPTFTFNFNNEPWVRGRHETYLCYEVERMHNDTWVLLNQRRGFLCNQAPHKHGFLEGRHAELCFLDVIPFWKLDLDQDYRVTCFTSWSPCFSCAQEMAKFISKNKHVSLCIFTARIYDDQGRCQEGLRTLAEAGAKISIMTYSEFKHCWDTFVDHQGCPFQPWDGLDEHSQDLSGRLRAILQNQEN

SEQ ID NO: 11893 - protein, 291 aa, Homo sapiens
MTNDSEGKMGFKHPKIMGNFRGHALPGTFFFIIGLWWCTKSILKYICKKQKRTCYLGSKTLFYRLEILEGITIVGMALTGMAGEQFIPGGPHLMLYDYKQGHWNQLLGWHHFTMYFFFGLLGVADILCFTISSLPVSLTKLMLSNALFVEAFIFYNHTHGREMLDIFVHQLLVLVVFLTGLVAFLEFLVRNNVLLELLRSSLILLQGSWFFQIGFVLYPPSGGPAWDLMDHENILFLTICFCWHYAVTIVIVGMNYAFITWLVKSRLKRLCSSEVGLLKNAEREQESEEEM

SEQ ID NO: 11894 - protein, 132 aa, Homo sapiens
MLPLTMTVLILLLLPTGQAAPKDGVTRPDSEVQHQLLPNPFQPGQEQLGLLQSYLKGLGRTEVQLEHLSREQVLLYLFALHDYDQSGQLDGLELLSMLTAALAPGAANSPTTNPGNLDARLDGGEKAMQPQW

SEQ ID NO: 11895 - protein, 284 aa, Homo sapiens
MDAIKKKMQMLKLDKENALDRAEQAEADKKAAEDRSKQLEDELVSLQKKLKGTEDELDKYSEALKDAQEKLELAEKKATDAEADVASLNRRIQLVEEELDRAQERLATALQKLEEAEKAADESERGMKVIESRAQKDEEKMEIQEIQLKEAKHIAEDADRKYEEVARKLVIIESDLERAEERAELSEGKCAELEEELKTVTNNLKSLEAQAEKYSQKEDRYEEEIKVLSDKLKEAETRAEFAERSVTKLEKSIDDLEDELYAQKLKYKAISEELDHALNDMTSI

SEQ ID NO: 11896 - protein, 353 aa, Homo sapiens
MAADGDWQDFYEFQEPARSLLDQENCNASPEPGAEAGAEAGGGADGFPAPACSLEEKLSLCFRPSDPGAEPPRTAVRPITERSLLQGDEIWNALTDNYGNVMPVDWKSSHTRTLHLLTLNLSEKGVSDSLLFDTSDDEELREQLDMHSIIVSCVNDEPLFTADQVIEEIEEMMQESPDPEDDETPTQSDRLSMLSQEIQTLKRSSTGSYEERVKRLSVSELNEILEEIETAIKEYSEELVQQLALRDELEFEKEVKNSFISVLIEVQNKQKEHKETAKKKKKLKNGSSQNGKNERSHMPGTYLTTVIPYEKKNGPPSVEDLQILTKILRAMKEDSEKVPSLLTDYILKVLCPT

SEQ ID NO: 11897 - protein, 704 aa, Homo sapiens
MEDERKNGAYGTPQKYDPTFKGPIYNRGCTDIICCVFLLLAIVGYVAVGIIAWTHGDPRKVIYPTDSRGEFCGQKGTKNENKPYLFYFNIVKCASPLVLLEFQCPTPQICVEKCPDRYLTYLNARSSRDFEYYKQFCVPGFKNNKGVAEVLQDGDCPAVLIPSKPLARRCFPAIHAYKGVLMVGNETTYEDGHGSRKNITDLVEGAKKANGVLEARQLAMRIFEDYTVSWYWIIIGLVIAMAMSLLFIILLRFLAGIMVWVMIIMVILVLGYGIFHCYMEYSRLRGEAGSDVSLVDLGFQTDFRVYLHLRQTWLAFMIILSILEVIIILLLIFLRKRILIAIALIKEASRAVGYVMCSLLYPLVTFFLLCLCIAYWASTAVFLSTSNEAVYKIFDDSPCPFTAKTCNPETFPSSNESRQCPNARCQFAFYGGESGYHRALLGLQIFNAFMFFWLANFVLALGQVTLAGAFASYYWALRKPDDLPAFPLFSAFGRALRYHTGSLAFGALILAIVQIIRVILEYLDQRLKAAENKFAKCLMTCLKCCFWCLEKFIKFLNRNAYIMIAIYGTNFCTSARNAFFLLMRNIIRVAVLDKVTDFLFLLGKLLIVGSVGILAFFFFTHRIRIVQDTAPPLNYYWVPILTVIVGSYLIAHGFFSVYGMCVDTLFLCFLEDLERNDGSAERPYFMSSTLKKLLNKTNKKAAES

SEQ ID NO: 11898 - protein, 1547 aa, Homo sapiens
MGTALLQRGGCFLLCLSLLLLGCWAELGSGLEFPGAEGQWTRFPKWNACCESEMSFQLKTRSARGLVLYFDDEGFCDFLELILTRGGRLQLSFSIFCAEPATLLADTPVNDGAWHSVRIRRQFRNTTLFIDQVEAKWVEVKSKRRDMTVFSGLFVGGLPPELRAAALKLTLASVREREPFKGWIRDVRVNSSQVLPVDSGEVKLDDEPPNSGGGSPCEAGEEGEGGVCLNGGVCSVVDDQAVCDCSRTGFRGKDCSQEIKFGLQCVLPVLLHDNDQGKYCCINTAKPLTEKDNNVEGLAHLMMGDQGKSKGKEEYIATFKGSEYFCYDLSQNPIQSSSDEITLSFKTLQRNGLMLHTGKSADYVNLALKNGAVSLVINLGSGAFEALVEPVNGKFNDNAWHDVKVTRNLRQHSGIGHAMVNKLHCSVTISVDGILTTTGYTQEDYTMLGSDDFFYVGGSPSTADLPGSPVSNNFMGCLKEVVYKNNDVRLELSRLAKQGDPKMKIHGVVAFKCENVATLDPITFETPESFISLPKWNAKKTGSISFDFRTTEPNGLILFSHGKPRHQKDAKHPQMIKVDFFAIEMLDGHLYLLLDMGSGTIKIKALLKKVNDGEWYHVDFQRDGRSGTISVNTLRTPYTAPGESEILDLDDELYLGGLPENKAGLVFPTEVWTALLNYGYVGCIRDLFIDGQSKDIRQMAEVQSTAGVKPSCSKETAKPCLSNPCKNNGMCRDGWNRYVCDCSGTGYLGRSCEREATVLSYDGSMFMKIQLPVVMHTEAEDVSLRFRSQRAYGILMATTSRDSADTLRLELDAGRVKLTVNLDCIRINCNSSKGPETLFAGYNLNDNEWHTVRVVRRGKSLKLTVDDQQAMTGQMAGDHTRLEFHNIETGIITERRYLSSVPSNFIGHLQSLTFNGMAYIDLCKNGDIDYCELNARFGFRNIIADPVTFKTKSSYVALATLQAYTSMHLFFQFKTTSLDGLILYNSGDGNDFIVVELVKGYLHYVFDLGNGANLIKGSSNKPLNDNQWHNVMISRDTSNLHTVKIDTKITTQITAGARNLDLKSDLYIGGVAKETYKSLPKLVHAKEGFQGCLASVDLNGRLPDLISDALFCNGQIERGCEGPSTTCQEDSCSNQGVCLQQWDGFSCDCSMTSFSGPLCNDPGTTYIFSKGGGQITYKWPPNDRPSTRADRLAIGFSTVQKEAVLVRVDSSSGLGDYLELHIHQGKIGVKFNVGTDDIAIEESNAIINDGKYHVVRFTRSGGNATLQVDSWPVIERYPAGNNDNERLAIARQRIPYRLGRVVDEWLLDKGRQLTIFNSQATIIIGGKEQGQPFQGQLSGLYYNGLKVLNMAAENDANIAIVGNVRLVGEVPSSMTTESTATAMQSEMSTSIMETTTTLATSTARRGKPPTKEPISQTTDDILVASAECPSDDEDIDPCEPSSGGLANPTRAGGREPYPGSAEVIRESSSTTGMVVGIVAAAALCILILLYAMYKYRNRDEGSYHVDESRNYISNSAQSNGAVVKEKQPSSAKSSNKNKKNKDKEYYV

SEQ ID NO: 11899 - protein, 222 aa, Homo sapiens
MFKNIVLIQGRILLLTICAAGIGGTFQFGYNLSIINAPTLHIQEFTNETWQARTGEPLPDHLVLLMWSLIVSLYPLGGLFGALLAGPLAITLGRKKSLLVNNIFVVSAAILFGFSRKAGSFEMIMLGRLLVGVNAGVSMNIQPMYLGESAPKELRGAVAMSSAIFTALGIVMGQVVGLRSGSKEQVFTEERVKIWAFKDKRVPVIPEKRGEGRAWTLGKRSC

SEQ ID NO: 11900 - protein, 716 aa, Homo sapiens
MATSHRVAKLVASSLQTPVNPITGARVAQYEREDPLKALAAAEAILEDEEEEKVAQPAGASADLNTSFSGVDEHAPISYEDFVNFPDIHHSNEEYFKKVEELKAAHIETMAKLEKMYQDKLHLKEVQPVVIREDSLSDSSRSVSEKNSYHPVSLMTSFSEPDLGQSSSLYVSSSEEELPNLEKEYPRKNRMMTYAKELINNMWTDFCVEDYIRCKDTGFHAAEKRRKKRKEWVPTITVPEPFQMMIREQKKKEESMKSKSDIEMVHKALKKQEEDPEYKKKFRANPVPASVFLPLYHDLVKQKEERRRSLKEKSKEALLASQKPFKFIAREEQKRAAREKQLRDFLKYKKKTNRFKARPIPRSTYGSTTNDKLKEEELYRNLRTQLRAQEHLQNSSPLPCRSACGCRNPRCPEQAVKLKCKHKVRCPTPDFEDLPERYQKHLSEHKSPKLLTVCKPFDLHASPHASIKREKILADIEADEENLKETRWPYLSPRRKSPVRCAGVNPVPCNCNPPVPTVSSRGREQAVRRSLEEKKMLEEERNRILTKQKQRMKELQKLLTTRAKAYDSHQSLAQISKSRVKCLRKSEKERMREYQRELEEREEKLKKRPLLFERVAQKNARMAAEKHYSNTLKALGISDEFVSKKGQSGKVLEYFNNQETKSVTEDKESFNEEEKIEERENGEENYFIDTNSQDSYKEKDEANEESEEEKSVEESH

SEQ ID NO: 11901 - protein, 352 aa, Homo sapiens
MTQKPHKKPGPGEPLVFGKTFTDHMLMVEWNDKGWGQPRIQPFQNLTLHPASSSLHYSLQLFEGMKAFKGKDQQVRLFRPWLNMDRMLRSAMRLCLPSFDKLELLECIRRLIEVDKDWVPDAAGTSLYVRPVLIGNEPSLGVSQPTRALLFVILCPVGAYFPGGSVTPVSLLADPAFIRAWVGGVGNYKLGGNYGPTVLVQQEALKRGCEQVLWLYGPDHQLTEVGTMNIFVYWTHEDGVLELVTPPLNGVILPGVVRQSLLDMAQTWGEFRVVERTITMKQLLRALEEGRVREVFGSGTACQVCPVHRILYKDRNLHIPTMENGPELILRFQKELKEIQYGIRAHEWMFPV

SEQ ID NO: 11902 - protein, 51 aa, Homo sapiens
MIIIIVVGCLCFLTCTMKGLDDFYYCPHFTGFKRGADPGMPEPTVLSLLWG

SEQ ID NO: 11903 - protein, 234 aa, Homo sapiens
MLLAWVQAFLVSNMLLAEAYGSGGCFWDNGHLYREDQTSPAPGLRCLNWLDAQSGLASAPVSGAGNHSYCRNPDEDPRGPWCYVSGEAGVPEKRPCEDLRCPETTSQALPAFTTEIQEASEGPGADEVQVFAPANALPARSEAAAVQPVIGISQRVRMNSKEKKDLGTLGYVLGITMMVIIIAIGAGIILGYSYKRSVASLLGPLRRRGGRYTKSNFVAFLPKRKQDVENQLKM

SEQ ID NO: 11904 - protein, 461 aa, Homo sapiens
MPPSGPRGTLLLLPLLLLLLLRAVLAVPLERGAPNKEETPATESPDTGLYYHRYLQEVIDVLETDGHFREKLQAANAEDIKSGKLSRELDFVSHHVRTKLDELKRQEVSRLRMLLKAKMDAEQDPNVQVDHLNLLKQFEHLDPQNQHTFEARDLELLIQTATRDLAQYDAAHHEEFKRYEMLKEHERRRYLESLGEEQRKEAERKLEEQQRRHREHPKVNVPGSQAQLKEVWEELDGLDPNRFNPKTFFILHDINSDGVLDEQELEALFTKELEKVYDPKNEEDDMREMEEERLRMREHVMKNVDTNQDRLVTLEEFLASTQRKEFGDTGEGWETVEMHPAYTEEELRRFEEELAAREAELNAKAQRLSQETEALGRSQGRLEAQKRELQQAVLHMEQRKQQQQQQQGHKAPAAHPEGQLKFHPDTDDVPVPAPAGDQKEVDTSEKKLLERLPEVEVPQHL

SEQ ID NO: 11905 - protein, 1403 aa, Homo sapiens
MANCSQEELDEEFEQFMKELSDDSFENSDKTARQSKKEMKKKDTVPWWITEDDFKDDGLLGTNVSYLKTKKTSQPVMEIEEESAEKIQFLKSSGTSLLSTDSLETNELVVSELNHSSLGVGLDTLEEQEEKEQFFARLEKGLTSSIDYSRLNKELDSNDSTHFKALHSNQANAELTDDEHENESKHEELAENYSDDFEDEYVGAPLTTKDEEMPSKENSKSEKISVPKQEEEKTGMLANVVLLDSLDSVAEVNLDEQDKITPKPRCLPEMTENEMTGTGVSYGQSSSDVEALHQAYCHIAHSLGDEDKQKIESNTVEDIKSSVKGHPQENEENSKNISTMESDLPTVEELMKPIRIDSFGISGFDLQPVSSEKVAERKETEFFSSLPLKMNPNILSQDSQHVNLFFDKNDENVILQKTTNESMENSCPQVTEVTATEEHVDKMYLNILRKKITVNSSSLSQDDKINKTYRSQLSSEEEGAVMGKQVPYKKARSAPPLLKRKPQSGLYASVRSSGYGKPSSPLKMFSTLEKKTSEDIIKSKNLRSISTSNQPRKKEILSGTKLIKPAALDKPAHKTESCLSTRKKSENPTETDSCIQFQTDSLGYCGENKEKKLLMFKRVQEAEDKWRGAQALIEQIKATFSEKEKELENKLEELKKQQEKELFKLNQDNYILQAKLSSFEETNKKQRWLHFGEAADPVTGEKLKQIQKEIQEQETLLQGYQQENERLYNQVKDLQEQNKKNEERMFKENQSLFSEVASLKEQMHKSRFLSQVVEDSEPTRNQNFTDLLAELRMAQKEKDSLLEDIKRLKQDKQALEVDFEKMKKERDQAKDQIAYVTGEKLYEIKILEETHKQEISRLQKRLQWYAENQELLDKDALRLREANEEIEKLKLEIEKLKAESGNPSIRQKIRLKDKAADAKKIQDLERQVKEMEGILKRRYPNSLPALILAASAAGDTVDKNTVEFMEKRIKKLEADLEGKDEDAKKSLRTMEQQFQKMKIQYEQRLEQQEQLLACKLNQHDSPRIKALEKELDDIKEAHQITVRNLEAEIDVLKHQNAELDVKKNDKDDEDFQSIEFQVEQAHAKAKLVRLNEELAAKKREIQDLSKTVERLQKDRRMMLSNQNSKGREEMSAKRAKKDVLHSSKGNANSFPGTLDSKLYQPHTFTDSHVSEVLQENYRLKNELEGLISEKNELKMKSEAVMNQFENSMRRVKEDTAAHIASLKASHQREIEKLLCQNAVENSSSKVAELNRKIATQEVLIRHFQSQVNELQSKQESLVVSEVREEILQKEITKLLEELREAKENHTPEMKHFVGLEKKIKQMEMRHAQREQELQQIIQQTHQVVETEQNKEVEKWKRLAQLKNRELEKFRTELDSILDVLRELHRQGVVVPVAFADEMNAPEY

SEQ ID NO: 11906 - protein, 181 aa, Homo sapiens
MRRRRAAVAAGFCASFLLGSVLNVLFAPGSEPPRPGQSPEPSPAPGPGRRGGRGELARQIRARYEEAGPRLPAQAPPARARAWAAPRFATCPARSTWAQATPRPCTGSACPAVPRWRSRRWTLAATIWAAACASSGYGGAAIGWRPTSCLRRWCCWSGCGTPTCCSSMATATRTARTSQTP

SEQ ID NO: 11907 - protein, 198 aa, Homo sapiens
MNSFSTSAFGPVAFSLGLLLVLPAAFPAPVPPGEDSKDVAAPHRQPLTSSERIDKQIRYILDGISALRKETCNKSNMCESSKEALAENNLNLPKMAEKDGCFQSGFNEETCLVKIITGLLEFEVYLEYLQNRFESSEEQARAVQMSTKVLIQFLQKKVGVSSFPQLGVGEDRLKDSVLDNSGMQCHFQKRRLHVNKRV

SEQ ID NO: 11908 - protein, 245 aa, Homo sapiens
MESRKDITNQEEIWKMKPRRNLEDNDYLQTAHADEFDCPSELQHAQELFPQWHLPIKIAAVMASLTFLYTLLREVIHPLATSHQQYFYKIPILVINKVLPMVSITLLALVYLPGVIAAIVQVHNGTKYKKFPHWLDKWMLTRKQFGLLSLFFAVLHAIYTLSYAMRRSYRYKLLNWAYQQVQQNKEDAWIEHDVWRMEIYVSLGIVGLAILALLAVTSIPSVSDSLTWREFHYIQVHGRINFLTL

SEQ ID NO: 11909 - protein, 514 aa, Homo sapiens
MAANMYRVGDYVYFENSSSNPYLIRRIEELNKTASGNVEAKVVCFYRRRDISNTLIMLADKHAKEIEEESETTVEADLTDKQKHQLKHRELFLSRQYESLPATHIRGKCSVALLNETESVLSYLDKEDTFFYSLVYDPSLKTLLADKGEIRVGPRYQADIPEMLLEGESDEREQSKLEVKVWDPNSPLTDRQIDQFLVVARAVGTFARALDCSSSVRQPSLHMSAAAASRDITLFHAMDTLYRHSYDLSSAISVLVPLGGPVLCRDEMEEWSASEASLFEEALEKYGKDFNDIRQDFLPWKSLTSIIEYYYMWKTTDRYVQQKRLKAAEAESKLKQVYIPTYKPNPNQISTSNGKPGAVNGAVGTTFQPQNPLLGRACESCYATQSHQWYSWGPPNMQCRLCAICWLYWKKYGGLKMPTQSEEEKLSPSPTTEDPRVRSHVSRQAMQGMPVRNTGSPKSAVKTRQAFFLHTTYFTKFARQVCKNTLRLRQAARRPFVAINYAAIRAECKMLLNS

SEQ ID NO: 11910 - protein, 326 aa, Homo sapiens
MSNGYEDHMAEDCRGDIGRTNLIVNYLPQNMTQDELRSLFSSIGEVESAKLIRDKVAGHSLGYGFVNYVTAKDAERAINTLNGLRLQSKTIKVSYARPSSEVIKDANLYISGLPRTMTQKDVEDMFSRFGRIINSRVLVDQTTGLSRGVAFIRFDKRSEAEEAITSFNGHKPPGSSEPITVKFAANPNQNKNVALLSQLYHSPARRFGGPVHHQAQRFRFSPMGVDHMSGLSGVNVPGNASSGWCIFIYNLGQDADEGILWQMFGPFGAVTNVKVIRDFNTNKCKGFGFVTMTNYEEAAMAIASLNGYRLGDKILQVSFKTNKSHK

SEQ ID NO: 11911 - protein, 148 aa, Homo sapiens
MVDSKPVNLGLWDTAGQEDYDRLRPLSYPQTDVFLICFSLVSPASYENVRAKWFPEVRHHCPSTPIILVGTKLDLRDDKDTIEKLKEKKLAPITYPQGLALAKEIDSVKYLECSALTQRGLKTVFDEAIRAVLCPQPTRQQKRACSLL

SEQ ID NO: 11912 - protein, 903 aa, Homo sapiens
MVLAQGLLSMALLALCWERSLAGAEETIPLQTLRCYNDYTSHITCRWADTQDAQRLVNVTLIRRVNEDLLEPVSCDLSDDMPWSACPHPRCVPRRCVIPCQSFVVTDVDYFSFQPDRPLGTRLTVTLTQHVQPPEPRDLQISTDQDHFLLTWSVALGSPQSHWLSPGDLEFEVVYKRLQDSWEDAAILLSNTSQATLGPEHLMPSSTYVARVRTRLAPGSRLSGRPSKWSPEVCWDSQPGDEAQPQNLECFFDGAAVLSCSWEVRKEVASSVSFGLFYKPSPDAGSAVLLREEECSPVLREGLGSLHTRHHCQIPVPDPATHGQYIVSVQPRRAEKHIKSSVNIQMAPPSLNVTKDGDSYSLRWETMKMRYEHIDHTFEIQYRKDTATWKDSKTETLQNAHSMALPALEPSTRYWARVRVRTSRTGYNGIWSEWSEARSWDTESVLPMWVLALIVIFLTIAVLLALRFCGIYGYRLRRKWEEKIPNPSKSHLFQNGSAELWPPGSMSAFTSGSPPHQGPWGSRFPELEGVFPVGFGDSEVSPLTIEDPKHVCDPPSGPDTTPAASDLPTEQPPSPQPGPPAASHTPEKQASSFDFNGPYLGPPHSRSLPDILGQPEPPQEGGSQKSPPPGSLEYLCLPAGGQVQLVPLAQAMGPGQAVEVERRPSQGAAGSPSLESGGGPAPPALGPRVGGQDQKDSPVAIPMSSGDTEDPGVASGYVSSADLVFTPNSGASSVSLVPSLGLPSDQTPSLCPGLASGPPGAPGPVKSGFEGYVELPPIEGRSPRSPRNNPVPPEAKSPVLNPGERPADVSPTSPQPEGLLVLQQVGDYCFLPGLGPGPLSLRSKPSSPGPGPEIKNLDQAFQVKKPPGQAVPQVPVIQLFKALKQQDYLSLPPWEVNKPGEVC

SEQ ID NO: 11913 - protein, 820 aa, Homo sapiens
MLRLGLCAAALLCVCRPGAVRADCWLIEGDKGYVWLAICSQNQPPYETIPQHINSTVHDLRLNENKLKAVLYSSLNRFGNLTDLNLTKNEISYIEDGAFLGQSSLQVLQLGYNKLSNLTEGMLRGMSRLQFLFVQHNLIEVVTPTAFSECPSLISIDLSSNRLSRLDGATFASLASLMVCELAGNPFNCECDLFGFLAWLVVFNNVTKNYDRLQCESPREFAGYPLLVPRPYHSLNAITVLQAKCRNGSLPARPVSHPTPYSTDAQREPDENSGFNPDEILSVEPPASSTTDASAGPAIKLHHVTFTSATLVVIIPHPYSKMYILVQYNNSYFSDVMTLKNKKEIVTLDKLRAHTEYTFCVTSLRNSRRFNHTCLTFTTRDPVPGDLAPSTSTTTHYIMTILGCLFGMVIVLGAVYYCLRKRRMQEEKQKSVNVKKTILEMRYGADVDAGSIVHAAQKLGEPPVLPVSRMASIPSMIGEKLPTAKGLEAGLDTPKVATKGNYIEVRTGAGGDGLARPEDDLPDLENGQGSAAEISTIAKEVDKVNQIINNCIDALKLDSASFLGGGSSSGDPELAFECQSLPAAAAASSATGPGALERPSFLSPPYKESSHHPLQRQLSADAAVTRKTCSVSSSGSIKSAKVFSLDVPDHPAATGLAKGDSKYIEKGSPLNSPLDRLPLVPAGSGGGSGGGGGIHHLEVKPAYHCSEHRHSFPALYYEEGADSLSQRVSFLKPLTRSKRDSTYSQLSPRHYYSGYSSSPEYSSESTHKIWERFRPYKKHHREEVYMAAGHALRKKVQFAKDEDLHDILDYWKGVSAQQKL

SEQ ID NO: 11914 - protein, 566 aa, Homo sapiens
MKSCGKRFHDEVGKFRFLNELIKVVSPKYLGSRTSEKVKNKILELLYSWTVGLPEEVKIAEAYQMLKKQGIVKSDPKLPDDTTFPLPPPRPKNVIFEDEEKSKMLARLLKSSHPEDLRAANKLIKEMVQEDQKRMEKISKRVNAIEEVNNNVKLLTEMVMSHSQGGAAAGSSEDLMKELYQRCERMRPTLFRLASDTEDNDEALAEILQANDNLTQVINLYKQLVRGEEVNGDATAGSIPGSTSALLDLSGLDLPPAGTTYPAMPTRPGEQASPEQPSASVSLLDDELMSLGLSDPTPPSGPSLDGTGWNSFQSSDATEPPAPALAQAPSMESRPPAQTSLPASSGLDDLDLLGKTLLQQSLPPESQQVRWEKQQPTPRLTLRDLQNKSSSCSSPSSSATSLLHTVSPEPPRPPQQPVPTELSLASITVPLESIKPSNILPVTVYDQHGFRILFHFARDPLPGRSDVLVVVVSMLSTAPQPIRNIVFQSAVPKVMKVKLQPPSGTELPAFNPIVHPSAITQVLLLANPQKEKVRLRYKLTFTMGDQTYNEMGDVDQFPPPETWGSL

SEQ ID NO: 11915 - protein, 443 aa, Homo sapiens
MNLASQSGEAGAGQLLFANFNQDNTEVKGASRAAGLGRRAVVWSLAVGSKSGYKFFSLSSVDKLEQIYECTDTEDVCIVERLFSSSLVAIVSLKAPRKLKVCHFKKGTEICNYSYSNTILAVKLNRQRLIVCLEESLYIHNIRDMKVLHTIRETPPNPAGLCALSINNDNCYLAYPGSATIGEVQVFDTINLRAANMIPAHDSPLAALAFDASGTKLATASEKGTVIRVFSIPEGQKLFEFRRGVKRCVSICSLAFSMDGMFLSASSNTETVHIFKLETVKEKPPEEPTTWTGYFGKVLMASTSYLPSQVTEMFNQGRAFATVRLPFCGHKNICSLATIQKIPRLLVGAADGYLYMYNLDPQEGGECALMKQHRLDGSLETTNEILDSASHDCPLVTQTYGAAAGKAYTDDLGAVGGACLEDEASALRLDEDSEHPPMILRTD

SEQ ID NO: 11916 - protein, 278 aa, Homo sapiens
MGTALLQRGGCFLLCLSLLLLGCWAELGSGLEFPGAEGQWTRFPKWNACCESEMSFQLKTRSARGLVLYFDDEGFCDFLELILTRGGRLQLSFSIFCAEPATLLADTPVNDGAWHSVRIRRQFRNTTLFIDQVEAKWVEVKSKRRDMTVFSGLFVGGLPPELRAAALKLTLASVREREPFKGWIRDVRVNSSQVLPVDSGEVKLDDEPPNSGGGSPCEAGEEGEGGVCLNGGVCSVVDDQAVCDCSRTGFRGKDCSQEDNNVEGLAHLMMGDQGKSKD

SEQ ID NO: 11917 - protein, 783 aa, Homo sapiens
MSGGHQLQLAALWPWLLMATLQAGFGRTGLVLAAAVESERSAEQKAIIRVIPLKMDPTGKLNLTLEGVFAGVAEITPAEGKLMQSHPLYLCNASDDDNLEPGFISIVKLESPRRAPRPCLSLASKARMAGERGASAVLFDITEDRAAAEQLQQPLGLTWPVVLIWGNDAEKLMEFVYKNQKAHVRIELKEPPAWPDYDVWILMTVVGTIFVIILASVLRIRCRPRHSRPDPLQQRTAWAISQLATRRYQASCRQARGEWPDSGSSCSSAPVCAICLEEFSEGQELRVISCLHEFHRNCVDPWLHQHRTCPLCMFNITEGDSFSQSLGPSRSYQEPGRRLHLIRQHPGHAHYHLPAAYLLGPSRSAVARPPRPGPFLPSQEPGMGPRHHRFPRAAHPRAPGEQQRLAGAQHPYAQGWGLSHLQSTSQHPAACPVPLRRARPPDSSGSGESYCTERSGYLADGPASDSSSGPCHGSSSDSVVNCTDISLQGVHGSSSTFCSSLSSDFDPLVYCSPKGDPQRVDMQPSVTSRPRSLDSVVPTGETQVSSHVHYHRHRHHHYKKRFQWHGRKPGPETGVPQSRPPIPRTQPQPEPPSPDQQVTRSNSAAPSGRLSNPQCPRALPEPAPGPVDASSICPSTSSLFNLQKSSLSARHPQRKRRGGPSEPTPGSRPQDATVHPACQIFPHYTPSVAYPWSPEAHPLICGPPGLDKRLLPETPGPCYSNSQPVWLCLTPRQPLEPHPPGEGPSEWSSDTAEGRPCPYPHCQVLSAQPGSEEELEELCEQAV

SEQ ID NO: 11918 - protein, 372 aa, Homo sapiens
MARAMAAAWPLLLVALLVLSWPPPGTGDVVVQAPTQVPGFLGDSVTLPCYLQVPNMEVTHVSQLTWARHGESGSMAVFHQTQGPSYSESKRLEFVAARLGAELRNASLRMFGLRVEDEGNYTCLFVTFPQGSRSVDIWLRVLAKPQNTAEVQKVQLTGEPVPMARCVSTGGRPPAQITWHSDLGGMPNTSQVPGFLSGTVTVTSLWILVPSSQVDGKNVTCKVEHESFEKPQLLTVNLTVYYPPEVSISGYDNNWYLGQNEATLTCDARSNPEPTGYNWSTTMGPLPPFAVAQGAQLLIRPVDKPINTTLICNVTNALGARQAELTVQVKEGPPSEHSGTEHASASANGHVSYSAVSRENSSSQDPQTEGTR

SEQ ID NO: 11919 - protein, 567 aa, Homo sapiens
MAGVGDAAAPGEGGGGGVDGPQRDGRGEAEQPGGSGGQGPPPAPQLTETLGFYESDRRRERRRGRTELSLLRFLSAELTRGYFLEHNEAKYTERRERVYTCLRIPRELEKLMVFGIFLCLDAFLYVFTLLPLRVFLALFRLLTLPCYGLRDRRLLQPAQVCDILKGVILVICYFMMHYVDYSMMYHLIRGQSVIKLYIIYNMLEVADRLFSSFGQDILDALYWTATEPKERKRAHIGVIPHFFMAVLYVFLHAILIMVQATTLNVAFNSHNKSLLTIMMSNNFVEIKGSVFKKFEKNNLFQMSNSDIKERFTNYVLLLIVCLRNMEQFSWNPDHLWVLFPDVCMVIASEIAVDIVKHAFITKFNDITADVYSEYRASLAFDLVSSRQKNAYTDYSDSVARRMGFIPLPLAVLLIRVVTSSIKVQGILSYACVILFYFGLISLKVLNSIVLLGKSCQYVKEAKMEEKLSNPPATCTPGKPSSKSQNKCKPSQGLSTEENLSASITKQPIHQKENIIPLLVTSNSDQFLTTPDGDEKDITQDNSELKHRSSKKDLLEIDRFTICGNRID

SEQ ID NO: 11920 - protein, 1342 aa, Homo sapiens
MDTKLMCLLFFFSLPPLLVSNHTGRIKVVFTPSICKVTCTKGSCQNSCEKGNTTTLISENGHAADTLTATNFRVVICHLPCMNGGQCSSRDKCQCPPNFTGKLCQIPVHGASVPKLYQHSQQPGKALGTHVIHSTHTLPLTVTSQQGVKVKFPPNIVNIHVKHPPEASVQIHQVSRIDGPTGQKTKEAQPGQSQVSYQGLPVQKTQTIHSTYSHQQVIPHVYPVAAKTQLGRCFQETIGSQCGKALPGLSKQEDCCGTVGTSWGFNKCQKCPKKPSYHGYNQMMECLPGYKRVNNTFCQDINECQLQGVCPNGECLNTMGSYRCTCKIGFGPDPTFSSCVPDPPVISEEKGPCYRLVSSGRQCMHPLSVHLTKQLCCCSVGKAWGPHCEKCPLPGTAKEEPVEALTFSREHGPGVAEPEVATAPPEKEIPSLDQEKTKLEPGQPQLSPGISTIHLHPQFPVVIEKTSPPVPVEVAPEASTSSASQVIAPTQVTEINECTVNPDICGAGHCINLPVRYTCICYEGYRFSEQQRKCVDIDECTQVQHLCSQGRCENTEGSFLCICPAGFMASEEGTNCIDVDECLRPDVCGEGHCVNTVGAFRCEYCDSGYRMTQRGRCEDIDECLNPSTCPDEQCVNSPGSYQCVPCTEGFRGWNGQCLDVDECLEPNVCANGDCSNLEGSYMCSCHKGYTRTPDHKHCRDIDECQQGNLCVNGQCKNTEGSFRCTCGQGYQLSAAKDQCEDIDECQHRHLCAHGQCRNTEGSFQCVCDQGYRASGLGDHCEDINECLEDKSVCQRGDCINTAGSYDCTCPDGFQLDDNKTCQDINECEHPGLCGPQGECLNTEGSFHCVCQQGFSISADGRTCEDIDECVNNTVCDSHGFCDNTAGSFRCLCYQGFQAPQDGQGCVDVNECELLSGVCGEAFCENVEGSFLCVCADENQEYSPMTGQCRSRTSTDLDVDVDQPKEEKKECYYNLNDASLCDNVLAPNVTKQECCCTSGVGWGDNCEIFPCPVLGTAEFTEMCPKGKGFVPAGESSSEAGGENYKDADECLLFGQEICKNGFCLNTRPGYECYCKQGTYYDPVKLQCFDMDECQDPSSCIDGQCVNTEGSYNCFCTHPMVLDASEKRCIRPAESNEQIEETDVYQDLCWEHLSDEYVCSRPLVGKQTTYTECCCLYGEAWGMQCALCPLKDSDDYAQLCNIPVTGRRQPYGRDALVDFSEQYTPEADPYFIQDRFLNSFEELQAEECGILNGCENGRCVRVQEGYTCDCFDGYHLDTAKMTCVDVNECDELNNRMSLCKNAKCINTDGSYKCLCLPGYVPSDKPNYCTPLNTALNLEKDSDLE

SEQ ID NO: 11921 - protein, 145 aa, Homo sapiens
MSWAPVLLMLFVYCTGCGPQPVLHQPPAMSSALGTTIRLTCTLRNDHDIGVYSVYWYQQRPGHPPRFLLRYFSQSDKSQGPQVPPRFSGSKDVARNRGYLSISELQPEDEAMYYCAMGARSSEKEEREREWEEEMEPTAARTRVP

SEQ ID NO: 11922 - protein, 839 aa, Homo sapiens
MEQWRQCGRWLIDCKVLPPNHRVVWPSAVVFDLAQALRDGVLLCQLLHNLSPGSIDLKDINFRPQMSQFLCLKNIRTFLKVCHDKFGLRNSELFDPFDLFDVRDFGKVISAVSRLSLHSIAQNKGIRPFPSEETTENDDDVYRSLEELADEHDLGEDIYDCVPCEDGGDDIYEDIIKVEVQQPMKMGMTEDDKRNCCLLEIQETEAKYYRTLEDIEKNYMSPLRLVLSPADMAAVFINLEDLIKVHHSFLRAIDVSVMVGGSTLAKVFLDFKERLLIYGEYCSHMEHAQNTLNQLLASREDFRQKVEECTLKVQDGKFKLQDLLVVPMQRVLKYHLLLKELLSHSAERPERQQLKEALEAMQDLAMYINEVKRDKETLRKISEFQSSIENLQVKLEEFGRPKIDGELKVRSIVNHTKQDRYLFLFDKVVIVCKRKGYSYELKEIIELLFHKMTDDPMNNKDVKKWSYGFYLIHLQGKQGFQFFCKTEDMKRKWMEQFEMAMSNIKPDKANANHHSFQMYTFDKTTNCKACKMFLRGTFYQGYMCTKCGVGAHKECLEVIPPCKFTSPADLDASGAGPGPKMVAMQNYHGNPAPPGKPVLTFQTGDVLELLRGDPESPWWEGRLVQTRKSGYFPSSSVKPCPVDGRPPISRPPSREIDYTAYPWFAGNMERQQTDNLLKSHASGTYLIRERPAEAERFAISIKFNDEVKHIKVVEKDNWIHITEAKKFDSLLELVEYYQCHSLKESFKQLDTTLKYPYKSRERSASRASSRSPVFTPRVIGTAVARYNFAARDMRELSLREGDVVRIYSRIGGDQGWWKGETNGRIGWFPSTYVEEEGIQ

SEQ ID NO: 11923 - protein, 221 aa, Homo sapiens
MPVMRLFPCFLQLLAGLALPAVPPQQWALSAGNGSSEVEVVPFQEVWGRSYCRALERLVDVVSEYPSEVEHMFSPSCVSLLRCTGCCGDENLHCVPVETANVTMQLLKIRSGDRPSYVELTFSQHVRCECRHSPGRQSPDMPGDFRADAPSFLPPRRSLPMLFRMEWGCALTGSQSAVWPSSPVPEEIPRMHPGRNGKKQQRKPLREKMKPERCGDAVPRR

SEQ ID NO: 11924 - protein, 284 aa, Homo sapiens
MAGGRHRRVVGTLHLLLLVAALPWASRGVSPSASAWPEEKHIMQRIQRLQADWVLEIDTFLSQTPYGYRSFSNIISTLNPTAKRHLVLACHYDSKYFSHWNNRVFVGATDSAVPCAMMLELARALDKKLLSLKTVSDSKPDLSLQLIFFDGEEAFLHWSPQDSLYGSRHLAAKMASTPHPPGARGTSQLHGMDLLVLLDLIGAPNPTFPNFFPNSARWFERLQAIEHELHELGLLKDHSLEGRYFQNYSYGGVIQDDHIPFLRRGVPVLHLIPSPFPEVWHTMD

SEQ ID NO: 11925 - protein, 1559 aa, Homo sapiens
MEPGSDDFLPPPECPVFEPSWAEFRDPLGYIAKIRPIAEKSGICKIRPPADWQPPFAVEVDNFRFTPRIQRLNELEAQTRVKLNYLDQIAKFWEIQGSSLKIPNVERRILDLYSLSKIVVEEGGYEAICKDRRWARVAQRLNYPPGKNIGSLLRSHYERIVYPYEMYQSGANLVCNTRPFDNEEKDKEYKPHSIPLRQSVQPSKFNSYGRRAKRLQPDPEPTEEDIEKNPELKKLQIYGAGPKMMGLGLMAKDKTLRKKDKEGPECPPTVVVKEELGGDVKVESTSPKTFLESKEELSHSPEPCTKMTMRLRRNHSNAQFIESYVCRMCSRGDEDDKLLLCDGCDDNYHIFCLLPPLPEIPKGVWRCPKCVMAECKRPPEAFGFEQATREYTLQSFGEMADSFKADYFNMPVHMVPTELVEKEFWRLVNSIEEDVTVEYGADIHSKEFGSGFPVSDSKRHLTPEEEEYATSGWNLNVMPVLEQSVLCHINADISGMKVPWLYVGMVFSAFCWHIEDHWSYSINYLHWGEPKTWYGVPSLAAEHLEEVMKKLTPELFDSQPDLLHQLVTLMNPNTLMSHGVPVVRTNQCAGEFVITFPRAYHSGFNQGYNFAEAVNFCTADWLPAGRQCIEHYRRLRRYCVFSHEELICKMAACPEKLDLNLAAAVHKEMFIMVQEERRLRKALLEKGITEAEREAFELLPDDERQCIKCKTTCFLSALACYDCPDGLVCLSHINDLCKCSSSRQYLRYRYTLDELPAMLHKLKVRAESFDTWANKVRVALEVEDGRKRSLEELRALESEARERRFPNSELLQQLKNCLSEAEACVSRALGLVSGQEAGPHRVAGLQMTLTELRAFLDQMNNLPCAMHQIGDVKGVLEQVEAYQAEAREALASLPSSPGLLQSLLERGRQLGVEVPEAQQLQRQVEQARWLDEVKRTLAPSARRGTLAVMRGLLVAGASVAPSPAVDKAQAELQELLTIAERWEEKAHLCLEARQKHPPATLEAIIREAENIPVHLPNIQALKEALAKARAWIADVDEIQNGDHYPCLDDLEGLVAVGRDLPVGLEELRQLELQVLTAHSWREKASKTFLKKNSCYTLLEVLCPCADAGSDSTKRSRWMEKELGLYKSDTELLGLSAQDLRDPGSVIVAFKEGEQKEKEGILQLRRTNSAKPSPLASSSTASSTTSICVCGQVLAGAGALQCDLCQDWFHGRCVSVPRLLSSPRPNPTSSPLLAWWEWDTKFLCPLCMRSRRPRLETILALLVALQRLPVRLPEGEALQCLTERAISWQGRARQALASEDVTALLGRLAELRQRLQAEPRPEEPPNYPAAPASDPLREGSGKDMPKVQGLLENGDSVTSPEKVAPEEGSGKRDLELLSSLLPQLTGPVLELPEATRAPLEELMMEGDLLEVTLDENHSIWQLLQAGQPPDLERIRTLLELEKAERHGSRARGRALERRRRRKVDRGGEGDDPAREELEPKRVRSSGPEAEEVQEEEELEEETGGEGPPAPIPTTGSPSTQENQNGLEPAEGTTSGPSAPFSTLTPRLHLPCPQQPPQQQL

SEQ ID NO: 11926 - protein, 112 aa, Homo sapiens
MAEQATKSVLFVCLGNICRSPIAEAVFRKLVTDQNISENWRVDSAATSGYEIGNPPDYRGQSCMKRHGIPMSHVARQVPSLDLKLCVLCFSGSLTAVLFLTGTWAGPQTQEL

SEQ ID NO: 11927 - protein, 325 aa, Homo sapiens
MKQRFSALQLLKLLLLLQPPLPRALREALCPEPCNCVPDGALRCPGPTAGLTRLSLAYLPVKVIPSQAFRGLNEVIKIEISQIDSLERIEANAFDNLLNLSEILIQNTKNLRYIEPGAFINLPRLKYLSICNTGIRKFPDVTKVFSSESNFILEICDNLHITTIPGNAFQGMNNESVTLKLYGNGFEEVQSHAFNGTTLTSLELKENVHLEKMHNGAFRGATGPKTLDISSTKLQALPSYGLESIQRLIATSSYSLKKLPSRETFVNLLEATLTYPSHCCAFRNLPTKEQNFSHSISENFSKQCESTVRKVNNKTLSKPRINGYQ

SEQ ID NO: 11928 - protein, 709 aa, Homo sapiens
MADAGIRRVVPSDLYPLVLGFLRDNQLSEVANKFAKATGATQQDANASSLLDIYSFWLKSAKVPERKLQANGPVAKKAKKKASSSDSEDSSEEEEEVQGPPAKKAAVPAKRVGLPPGKAAAKASESSSSEESSDDDDEEDQKKQPVQKGVKPQAKAAKAPPKKAKSSDSDSDSSSEDEPPKNQKPKITPVTVKAQTKAPPKPARAAPKIANGKAASSSSSSSSSSSSDDSEEEKAAATPKKVWTITSVRAETVPKKQVVAKAPVKAATTPTRKSSSSEDSSSDEEEEQKKPMKNKPGPYSSVPPPSAPPPKKSLGTQPPKKAVEKQQPVESSEDSSDESDSSSEEEKKPPTKAVVSKATTKPPPAKKAAESSSDSSDSDSSEDDEAPSKPAGTTKNSSNKPAVTTKSPAVKPAAAPKQPVGGGQKLLTRKADSSSSEEESSSSEEEKTKKMVATTKPKATAKAALSLPAKQAPQGSRDSSSDSDSSSSEEEEEKTSKSAVKKKPQKVAGGAAPSKPASAKKGKAESSNSSSSDDSSEEEEEKLKGKGSPRPQAPKANGTSALTAQNGKAAKNSEEEEEEKKKAAVVVSKSGSLKKRKQNEAAKEAETPQAKKIKLQTPNTFPKRKKGEKRASSPFRRVREEEIEVDSRVADNSFDAKRGAAGDWGERANQVLKFTKGKSFRHEKTKKKRGSYRGGSISVQVNSIKFDSE

SEQ ID NO: 11929 - protein, 422 aa, Homo sapiens
MGGPRAWALLCLGLLLPGGGAAWSIGAAPFSGRRNWCSYVVTRTISCHVQNGTYLQRVLQNCPWPMSCPGSSYRTVVRPTYKVMYKIVTAREWRCCPGHSGVSCEEVAASSASLEPMWSGSTMRRMALRPTAFSGCLNCSKVSELTERLKVLEAKMTMLTVIEQPVPPTPATPEDPAPLWGPPPAQGSPGDGGLQDQVGAWGLPGPTGPKGDAGSRGPMGMRGPPGPQGPPGSPGRAGAVGTPGERGPPGPPGPPGPPGPPAPVGPPHARISQHGDPLLSNTFTETNNHWPQGPTGPPGPPGPMGPPGPPGPTGVPGSPGHIGLRGEPGPQGSAGQRGEPGPKGDPGEKSHWGEGLHQLREALKILAERVLILETMIGLYEPELGSGAGPAGTGTPSLLRGKRGGHATNYRIVAPRSRDERG

SEQ ID NO: 11930 - protein, 473 aa, Homo sapiens
MAPPAARLALLSAAALTLAARPAPSPGLGPECFTANGADYRGTQNWTALQGGKPCLFWNETFQHPYNTLKYPNGEGGLGEHNYCRNPDGDVSPWCYVAEHEDGVYWKYCEIPACQMPGNLGCYKDHGNPPPLTGTSKTSNKLTIQTCISFCRSQRFKFAGMESGYACFCGNNPDYWKYGEAASTECNSVCFGDHTQPCGGDGRIILFDTLVGACGGNYSAMSSVVYSPDFPDTYATGRVCYWTIRVPGASHIHFSFPLFDIRDSADMVELLDGYTHRVLARFHGRSRPPLSFNVSLDFVILYFFSDRINQAQGFAVLYQAVKEELPQERPAVNQTVAEVITEQANLSVSAARSSKVLYVITTSPSHPPQTVPGSNSWAPPMGAGSHRVEGWTVYGLATLLILTVTAIVAKILLHVTFKSHRVPASGDLRDCHQPGTSGEIWSIFYKPSTSISIFKKKLKGQSQQDDRNPLVSD

SEQ ID NO: 11931 - protein, 198 aa, Homo sapiens
MSFIFDWIYSGFSSVLQFLGLYKKTGKLVFLGLDNAGKTTLLHMLKDDRLGQHVPTLHPTSEELTIAGMTFTTFDLGGHVQARRVWKNYLPAINGIVFLVDCADHERLLESKEELDSLMTDETIANVPILILGNKIDRPEAISEERLREMFGLYGQTTGKGSISLKELNARPLEVFMCSVLKRQGYGEGFRWMAQYID

SEQ ID NO: 11932 - protein, 1462 aa, Homo sapiens
MSKVIQKKNHWTSRVHECTVKRGPQGELGVTVLGGAEHGEFPYVGAVAAVEAAGLPGGGEGPRLGEGELLLEVQGVRVSGLPRYDVLGVIDSCKEAVTFKAVRQGGRLNKDLRHFLNQRFQKGSPDHELQQTIRDNLYRHAVPCTTRSPREGEVPGVDYNFLTVKEFLDLEQSGTLLEVGTYEGNYYGTPKPPSQPVSGKVITTDALHSLQSGSKQSTPKRTKSYNDMQNAGIVHAENEEEDDVPEMNSSFTADSGEQEEHTLQETALPPVNSSIIAAPITDPSQKFPQYLPLSAEDNLGPLPENWEMAYTENGEVYFIDHNTKTTSWLDPRCLNKQQKPLEECEDDEGVHTEELDSELELPAGWEKIEDPVYGIYYVDHINRKTQYENPVLEAKRKKQLEQQQQQQQQQQQQQQQQQQQQTEEWTEDHSALVPPVIPNHPPSNPEPAREVPLQGKPFFTRNPSELKGKFIHTKLRKSSRGFGFTVVGGDEPDEFLQIKSLVLDGPAALDGKMETGDVIVSVNDTCVLGHTHAQVVKIFQSIPIGASVDLELCRGYPLPFDPDDPNTSLVTSVAILDKEPIIVNGQETYDSPASHSSKTGKVNGMKDARPSSPADVASNSSHGYPNDTVSLASSIATQPELITVHIVKGPMGFGFTIADSPGGGGQRVKQIVDSPRCRGLKEGDLIVEVNKKNVQALTHNQVVDMLVECPKGSEVTLLVQRGGLPVPKKSPKSQPLERKDSQNSSQHSVSSHRSLHTASPSHSTQVLPEFPPAEAQAPDQTDSSGQKKPDPFKIWAQSRSMYENRLPDYQEQDIFLWRKETGFGFRILGGNEPGEPIYIGHIVPLGAADTDGRLRSGDELICVDGTPVIGKSHQLVVQLMQQAAKQGHVNLTVRRKVVFAVPKTENEVPSPASSHHSSNQPASLTEEKRTPQGSQNSLNTVSSGSGSTSGIGSGGGGGSGVVSTVVQPYDVEIRRGENEGFGFVIVSSVSRPEAGTTFGNACVAMPHKIGRIIEGSPADRCGKLKVGDRILAVNGCSITNKSHSDIVNLIKEAGNTVTLRIIPGDESSNATLLTNAEKIATITTTHTPSQQGTQETRNTTKPKQESQFEFKAPQATQEQDFYTVELERGAKGFGFSLRGGREYNMDLYVLRLAEDGPAERCGKMRIGDEILEINGETTKNMKHSRAIELIKNGGRRVRLFLKRGDGSVPEYDPSSDRHGPATGPQGVPEVRAGPDRRQHPSLESSYPPDLHKSSPHGEKRAHARDPKGSREYSRQPNEHHTWNGTSRKPDSGACRPKDRAPEGRRDAQAERAAAANGPKRRSPEKRREGTRSADNTLERREKHEKRRDVSPERRRERSPTRRRDGSPSRRRRSLERLLEQRRSPERRRGGSPERRAKSTDRRRARSPERRRERSLDKRNREDRASHREREEANLKQDAGRSSRHPPEQRRRPYKECSTDLSI

SEQ ID NO: 11933 - protein, 136 aa, Homo sapiens [sequence omitted]

SEQ ID NO: 11934 - protein, 721 aa, Homo sapiens
MERAAPSRRVPLPLLLLGGLALLAAGVDADVLLEACCADGHRMATHQKDCSLPYATESKECRAVGLASLCQDLNGAWAVWKVGRASQAEGTASARAQRRGMVQEQCCHSQLEELHCATGISLANEQDRCATPHGDNASLEATFVKRCCHCCLLGRAAQAQGQSCEYSLMVGYQCGQVFQACCVKSQETGDLDVGGLQETDKIIEVEEEQEDPYLNDRCRGGGPCKQQCRDTGDEVVCSCFVGYQLLSDGVSCEDVNECITGSHSCRLGESCINTVGSFRCQRDSSCGTGYELTEDNSCKDIDECESGIHNCLPDFICQNTLGSFRCRPKLQCKSGFIQDALGNCIDINECLSISAPCPIGHTCINTEGSYTCQKNVPNCGRGYHLNEEGTRCVDVDECAPPAEPCGKGHRCVNSPGSFRCECKTGYYFDGISRMCVDVNECQRYPGRLCGHKCENTLGSYLCSCSVGFRLSVDGRSCEDINECSSSPCSQECANVYGSYQCYCRRGYQLSDVDGVTCEDIDECALPTGGHICSYRCINIPGSFQCSCPSSGYRLAPNGRNCQDIDECVTGIHNCSINETCFNIQGGFRCLAFECPENYRRSAATRCERLPCHENRECSKLPLRITYYHLSFPTNIQAPAVVFRMGPSSAVPGDSMQLAITGGNEEGFFTTRKVSPHSGVVALTKPVPEPRDLLLTVKMDLSRHGTVSSFVAKLFIFVSAEL

SEQ ID NO: 11935 - protein, 1196 aa, Homo sapiens
MASVWKRLQRVGKHASKFQFVASYQELMVECTKKWQPDKLVVVWTRRSRRKSSKAHSWQPGIKNPYRGVVVWPVPENIEITVTLFKDPHAEEFEDKEWTFVIENESPSGRRKALATSSINMKQYASPMPTQTDVKLKFKPLSKKVVSAALQFSLSCIFLREGKATDEDMQSLASLMSMKQADIGNLDDFEEDNEDDDENRVNQEEKAAKITELINKLNFLDEAEKDLATVNSNPFDDPDAAELNPFGDPDSEEPITETASPRKTEDSFYNNSYNPFKEVQTPQYLNPFDEPEAFVTIKDSPPQSTKRKNIRPVDMSKYLYADSSKTEEEELDESNPFYEPKSTPPPNNLVNPVQELETERRVKRKAPAPPVLSPKTGVLNENTVSAGKDLSTSPKPSPIPSPVLGRKPNASQSLLVWCKEVTKNYRGVKITNFTTSWRNGLSFCAILHHFRPDLIDYKSLNPQDIKENNKKAYDGFASIGISRLLEPSDMVLLAIPDKLTVMTYLYQIRAHFSGQELNVVQIEENSSKSTYKVGNYETDTNSSVDQEKFYAELSDLKREPELQQPISGAVDFLSQDDSVFVNDSGVGESESEHQTPDDHLSPSTASPYCRRTKSDTEPQKSQQSSGRTSGSDDPGICSNTDSTQAQVLLGKKRLLKAETLELSDLYVSDKKKDMSPPFICEETDEQKLQTLDIGSNLEKEKLENSRSLECRSDPESPIKKTSLSPTSKLGYSYSRDLDLAKKKHASLRQTESDPDADRTTLNHADHSSKIVQHRLLSRQEELKERARVLLEQARRDAALKAGNKHNTNTATPFCNRQLSDQQDEERRRQLRERARQLIAEARSGVKMSELPSYGEMAAEKLKERSKASGDENDNIEIDTNEEIPEGFVVGGGDELTNLENDLDTPEQNSKLVDLKLKKLLEVQPQVANSPSSAAQKAVTESSEQDMKSGTEDLRTERLQKTTERFRNPVVFSKDSTVRKTQLQSFSQYIENRPEMKRQRSIQEDTKKGNEEKAAITETQRKPSEDEVLNKGFKDTSQYVVGELAALENEQKQIDTRAALVEKRLRYLMDTGRNTEEEEAMMQEWFMLVNKKNALIRRMNQLSLLEKEHDLERRYELLNRELRAMLAIEDWQKTEAQKRREQLLLDELVALVNKRDALVRDLDAQEKQAEEEDEHLERTLEQNKGKMAKKEEKCVLQ

SEQ ID NO: 11936 - protein, 911 aa, Homo sapiens
MKGSNRNKDHSAEGEGVGKRPKRKCLQWHPLLAKKLLDFSEEEEEEDEEEDIDKVQLLGADGLEQDVGETEDDESPEQRARRPMNAFLLFCKRHRSLVRQEHPRLDNRGATKILADWWAVLDPKEKQKYTDMAKEYKDAFMKANPGYKWCPTTNKPVKSPTPTVNPRKKLWAFPSDSSRDLPSPKKAKTEEMPQLNFGMADPTQMGGLSMLLLAGEHALGTPEVSSGTCRPDVSESPELRQKSPLFQFAEISSSTSHSDASTKQCQTSALFQFAEISSNTSQLGGAEPVKRCGKSALFQLAEMCLASEGMKMEESKLIKAKESDGGRIKELEKGKEEKEIKMEKTDETRLQKEAEFEKSAKENLRDSKELRNFEALQIDDIMAIKMEDPKEIRKEELEEDHKCSHFPDFSYSASSKIIISDVPSRKDHMCHPHGIMIIEDPAALNKPEKLKKKKKKSKMDRHGNDKSTPKKTCKKRQSSESDIESVIYTIEAVAKGDWGIEKLGDTPRKKVRTSSSGKGSILDAKPPKKKVKSREKKMSKEKSSDTTKESRPPDFISISASKNISGETPEGIKAEPLTPMEDALPPSLSGQAKPEDSDCHRKIETCGSRKSERSCKGALYKTLVSEGMLTSLRANVDRGKRSSGKGNSSDHEGCWNEESWTFSQSGTSGSKKFKKTKPKEDCLLGSAKLDEEFEKKFNSLPQYSPVTFDRKCVPVPRKKKKTGNVSSEPTKTSKGSGDKWSNKQLFLDAIHPTEAIFSEDRNTMEPVHKVKNIPSIFNTPEPTTTQEPLVGSQKRKARKTKITHLVRTADGRVSPAGGTLDDKPKEQLQRSLPKATETDCNDKCSHNTEVGETRSSTPEMPAVSAFFSLAALAEVAAMENVHRGQRSTPLTHDGQPKEMPQAPVLISCADQ

SEQ ID NO: 11937 - protein, 729 aa, Homo sapiens
LPTGFVAPILCVLLPSPTREAATVASATGDSASERESAAPAAAPTAEAPPPSVVTRPEPQALPSPAIRAPLPDLYPFGTMRGGGFGDRDRDRDRGGFGARGGGGLPPKKFGNPGERLRKKKWDLSELPKFEKNFYVEHPEVARLTPYEVDELRRKKEITVRGGDVCPKPVFAFHHANFPQYVMDVLMDQHFTEPTPIQCQGFPLALSGRDMVGIAQTGSGKTLAYLLPAIVHINHQPYLERGDGPICLVLAPTRELAQQVQQVADDYGKCSRLKSTCIYGGAPKGPQIRDLERGVEICIATPGRLIDFLESGKTNLRRCTYLVLDEADRMLDMGFEPQIRKIVDQIRPDRQTLMWSATWPKEVRQLAEDFLRDYTQINVGNLELSANHNILQIVDVCMESEKDHKLIQLMEEIMAEKENKTIIFVETKRRCDDLTRRMRRDGWPAMCIHGDKSQPERDWVLNEFRSGKAPILIATDVASRGLDVEDVKFVINYDYPNSSEDYVHRIGRTARSTNKGTAYTFFTPGNLKQARELIKVLEEANQAINPKLMQLVDHRGGGGGGGGRSRYRTTSSANNPNLMYQDECDRRLRGVKDGGRRDSASYRDRSETDRAGYANGSGYGSPNSAFGAQAGQYTYGQGTYGAAAYGTSSYTAQEYGAGTYGASSTTSTGRSSQSSSQQFSGIGRSGQQPQPLMSQQFAQPPGATNMIGYMGQTAYQYPPPPPPPPPSRK

SEQ ID NO: 11938 - protein, 2108 aa, Homo sapiens
MNSVAGNKERLAVSTRGKKYGVNEVCSPTKPAAPFSPESWYRKAYEESRAGSRPTPEGAGSALGSSGTPSPGSGTSSPSSFTGSPGPASPGIGTSSPGSLGGSPGFGTGSPGSGSGGGSSPGSDRGVWCENCNARLVELKRQALRLLLPGPFPGKDPAFSAVIHDKLQVPNTIRKAWNDRDNRCDICATHLNQLKQEAIQMVLTLEQAAGSEHYDASPCSPPPLSNIPTLVGSRHVGGLQQPRDWAFVPAPCATSNYTGFANKHGSKPSSLGVSNGAEKKSGSPTHQAKVSLQMATSPSNGNILNSVAIQAHQYLDGTWSLSRTNGVTLYPYQISQLMTESSREGLTEAVLNRYNADKPSACSVPASQGSCVASETSTGTSVAASFFARAAQKLNLSSKKKKHRPSTSSAAEPPLFATSFSGILQTSPPPAPPCLLRAVNKVKDTPGLGKVKVMLRICSTLARDTSESSSFLKVDPRKKQITLYDPLTCGGQNAFQKRGNQVPPKMFAFDAVFPQDASQAEVCAGTVAEVIQSVVNGADGCVFCFGHAKLGKSYTMIGKDDSMQNLGIIPCAISWLFKLINERKEKTGARFSVRVSAVEVWGKEENLRDLLSEVATGSLQDGQSPGVYLCEDPICGTQLQNQSELRAPTAEKAAFFLDAAIASRRSHQQDCDEDDHRNSHVFFTLHIYQYRMEKSGKGGMSGGRSRLHLIDLGSCVKALSKNREGGSGLCLSLSALGNVILALVNGSKHIPYKESKLAMLLRESLGNMNCRTTMIAHISAAVGSYAETLSTIQIASRVLRMKKKKTKYTSSSSGGESSCEEGRMRRPTQLRPFHTRATVDPDFPIAHLSSDPDYSSSSEQSCDTVIYIGPNGTALSDKELTDNEGPPDFVPIVPALQKTRGDSRPAEAGEAAAGKSERDCLKCNTFAELQERLDCIDGSEEPSSFPFEELPAQFGPEQASRGPRLSQAAGASPLSESDKEDNGSEGQLTNREGPELPASKMQRSHSPVPAAAPAHSPSPASPRSVPGSSSQHSASPLVQSPSLQSSRESLNSCGFVEGKPRPMGSPRLGIASLSKTSEYKPPSSPSQRCKVYTQKGVLPSPAPLPPSSKDSGVASRESLLQPEVRTPPVGMSPQVLKKSMSAGSEGFPETPVDDEQQAATPSESKKEILSTTMVTVQQPLELNGEDELVFTLVEELTISGVLDSGRPTSIISFNSDCSARALASGSRPVSIISSISEDLECYSSTAPVSEVSITQFLPLPKMSLDEKAQDAGSRRSSISSWLSEMSAGSEGEQSCHSFIAQTCFGHGEAMAEPVASEFVSSLQNTAVVCREKPKASPDNLLILSEMGDDSFNKAAPIKGCKISTVSKAMVTISNTANLSSCEGYIPMKTNITVYPCIAMSPRNIQEPEAPTATPKAGPTLAQSRESKENSAKKEMKFEDPWLKREEEVKKETAHPNEEGMMRCETATGPSNAETRAEQEQDGKPSPGDRLSSSSGEVSASPVTDNFRRVVDGCEMALPGLATQSPVHPNKSVKSSSLPRAFQKASRQEEPDSLSYYCAAETNGVGAASGTPPSKATLEGKVASPKHCVLARPKGTPPLPPVRKSSLDQKNRASPQHSASGSGTSSPLNQPAAFPAGLPDEPSGKTKDASSSSKLFSAKLEQLASRSNSLGRATVSHYECLSLERAESLSSVSSRLHAGKDGTMPRAGRSLGRSAGTSPPSSGASPKAGQSKISAVSRLLLASPRARGPSASTTKTLSFSTKSLPQAVGQGSSSPPGGKHTPWSTQSLSRNRSSGLASKLPLRAVSGRISELLQGGAGARGLQLRAGPEAEARGGALAEDEPAAAHLLPSPYSKITPPRRPHRCSSGHGSDNSSVLSGELPPAMGKTALFYHSGGSSGYESVMRDSEATGSASSAQDSTSENSSSVGGRCRSLKTPKKRSNPGSQRRRLIPALSLDTSSPVRKPPNSTGVRWVDGPLRSSPRGLGEPFEIKVYEIDDVERLQRRRGGASKEAMCFNAKLKILEHRQQRIAEVRAKYEWLMKELEATKQYLMLDPNKWLSEFDLEQVWELDSLEYLEALECVTERLESRVNFCKAHLMMITCFDITSRRR

SEQ ID NO: 11939 - protein, 488 aa, Homo sapiens
MVAERSPARSPGSWLFPGLWLLVLSGPGGLLRAQEQPSCRRAFDLYFVLDKSGSVANNWIEIYNFVQQLAERFVSPEMRLSFIVFSSQATIILPLTGDRGKISKGLEDLKRVSPVGETYIHEGLKLANEQIQKAGGLKTSSIIIALTDGKLDGLVPSYAEKEAKISRSLGASVYCVGVLDFEQAQLERIADSKEQVFPVKGGFQALKGIINSILAQSCTEILELQPSSVCVGEEFQIVLSGRGFMLGSRNGSVLCTYTVNETYTTSVKPVSVQLNSMLCPAPILNKAGETLDVSVSFNGGKSVISGSLIVTATECSNGIAAIIVILVLLLLLGIGLMWWFWPLCCKVVIKDPPPPPAPAPKEEEEEPLPTKKWPTVDASYYGGRGVGGIKRMEVRWGDKGSTEEGARLEKAKNAVVKIPEETEEPIRPRPPRPKPTHQPPQTKWYTPIKGRLDALWALLRRQYDRVSLMRPQEGDEGRCINFSRVPSQ

SEQ ID NO: 11940 - protein, 425 aa, Homo sapiens
MALTGYSWLLLSATFLNVGAEISITLEPAQPSEGDNVTLVVHGLSGELLAYSWYAGPTLSVSYLVASYIVSTGDETPGPAHTGREAVRPDGSLDIQGILPRHSGTYILQTFNRQLQTEVGYGHVQVHEILAQPTVLANSTALVERRDTLRLMCSSPSPTAEVRWFFNGGALPVALRLGLSPDGRVLARHGIRREEAGAYQCEVWNPVSVSRSEPINLTVYFGPERVAILQDSTTRTGCTIKVDFNTSLTLWCVSRSCPEPEYVWTFNGQALKNGQDHLNISSMTAAQEGTYTCIAKNTKTLLSGSASVVVKLSAAAVATMIVPVPTKPTEGQDVTLTVQGYPKDLLVYAWYRGPASEPNRLLSQLPSGTWIAGPAHTGREVGFPNCSLLVQKLNLTDTGRYTLKTVTVQGKTETLEVELQVAPLG

SEQ ID NO: 11941 - protein, 343 aa, Homo sapiens
MLAPGGTRIDDGDKTKMTNHCVFSANEDHETIRNYAQVFNKLIRRYKYLEKAFEDEMKKLLLFLKAFSETEQTKLAMLSGILLGNGTLPATILTSLFTDSLVKEGIAASFAVKLFKAWMAEKDANSVTSSLRKANLDKRLLELFPVNRQSVDHFAKYFTDAGLKELSDFLRVQQSLGTRKELQKELQERLSQECPIKEVVLYVKEEMKRNDLPETAVIGLLWTCIMNAVEWNKKEELVAEQALKHLKQYAPLLAVFSSQGQSELILLQKVQEYCYDNIHFMKAFQKIVVLFYKADVLSEEAILKWYKEAHVAKGKSVFLDQMKKFVEWLQNAEEESESEGEEN

SEQ ID NO: 11942 - protein, 718 aa, Homo sapiens
MSRGYSENNNFLNNNNQMVLDMILYPLIGIPQTINWETIARLVPGLTPKECAKRFDELKSSGSSPVDNQYNSLMAAGESPVETLATYIKSSLLDIHGEFQETPVGHDAVSKTGRHSIASTRNCSSESENCTTHNGGEMTEESEGPNMVIHVCDEAKNLKEDFTCPRDLLISEMKYFAEYLSMDAQRWEEVDISVHCDVHIFNWLIKYIKRNTKENKDCEMPTLEPGNVISILISSEFLKMDSLVEQCIQYCHKNMNAIVATPCNMNCINANLLTRIADLFSHNEVDDLKDKKDKFKSKLFCKKIERLFDPEYLNPDSRSNAATLYRCCLCKKLLTKETERRIPCIPGKINVDRRGNIVYIHIRDKTWDVHEYLNSLFEELKSWRDVYWRLWGTINWLTCSRCYQAFLCIEFSHCQYHSETVVYPTAASSLNTVGTGIYPCCNQKVLRFDPTQLTKGCKVRDHMVTLRDQGEGGDLPSCPTARMLDDLHKYRDVIVVPFSKDTVSDVGVGLCDEKGIECDVLLEPNTPWGPKTGELNAFLSLKNWTLQLKQQSLFSEEEEYTTGSEVTEDEVGDEEEVSKKQRKKEKPKKFTRQPKKQVSSPCAQRKEKALEKSASRDVSPFVMSMQKNKWDATRSLRFNQDAQREDDQRRMTEITGHLIKMRLGDLDRVKSKEAKEFAGGIYSRLEAQIKASVPVSARQSSSEKNTRSKSRFGQGRPA

SEQ ID NO: 11943 - protein, 659 aa, Homo sapiens
MPSGSSAALALAAAPAPLPQPPPPPPPPPPPLPPPSGGPELEGDGLLLRERLAALGLDDPSPAEPGAPALRAPAAAAQGQARRAAELSPEERAPPGRPGAPEAAELELEEDEEEGEEAELDGDLLEEEELEEAEEEDRSSLLLLSPPAATASQTQQIPGGSLGSVLLPAARFDAREAAAAAAAAGVLYGGDDAQGMMAAMLSHAYGPGGCGAAAAALNGEQAALLRRKSVNTTECVPVPSSEHVAEIVGRQGCKIKALRAKTNTYIKTPVRGEEPIFVVTGRKEDVAMAKREILSAAEHFSMIRASRNKNGPALGGLSCSPNLPGQTTVQVRVPYRVVGLVVGPKGATIKRIQQQTHTYIVTPSRDKEPVFEVTGMPENVDRAREEIEMHIAMRTGNYIELNEENDFHYNGTDVSFEGGTLGSAWLSSNPVPPSRARMISNYRNDSSSSLGSGSTDSYFGSNRLADFSPTSPFSTGNFWFGDTLPSVGSEDLAVDSPAFDSLPTSAQTIWTPFEPVNPLSGFGSDPSGNMKTQRRGSQPSTPRLSPTFPESIEHPLARRVRSDPPSTGNHVGLPIYIPAFSNGTNSYSSSNGGSTSSSPPESRRKHDCVICFENEVIAALVPCGHNLFCMECANKICEKRTPSCPVCQTAVTQAIQIHS

SEQ ID NO: 11944 - protein, 706 aa, Homo sapiens
MATANFGKIQIGIYVEIKRSDGRIHQAMVTSLNEDNESVTVEWIENGDTKGKEIDLESIFSLNPDLVPDEEIEPSPETPPPPASSAKVNKIVKNRRTVASIKNDPPSRDNRVVGSARARPSQFPEQSSSAQQNGSVSDISPVQAAKKEFGPPSRRKSNCVKEVEKLQEKREKRRLQQQELREKRAQDVDATNPNYEIMCMIRDFRGSLDYRPLTTADPIDEHRICVCVRKRPLNKKETQMKDLDVITIPSKDVVMVHEPKQKVDLTRYLENQTFRFDYAFDDSAPNEMVYRFTARPLVETIFERGMATCFAYGQTGSGKTHTMGGDFSGKNQDCSKGIYALAARDVFLMLKKPNYKKLELQVYATFFEIYSGKVFDLLNRKTKLRVLEDGKQQVQVVGLQEREVKCVEDVLKLIDIGNSCRTSGQTSANAHSSRSHAVFQIILRRKGKLHGKFSLIDLAGNERGADTSSADRQTRLEGAEINKSLLALKECIRALGRNKPHTPFRASKLTQVLRDSFIGENSRTCMIATISPGMASCENTLNTLRYANRVKELTVDPTAAGDVRPIMHHPPNQIDDLETQWGVGSSPQRDDLKLLCEQNEEEVSPQLFTFHEAVSQMVEMEEQVVEDHRAVFQESIRWLEDEKALLEMTEEVDYDVDSYATQLEAILEQKIDILTELRDKVKSFRAALQEEEQASKQINPKRPRAL

SEQ ID NO: 11945 - protein, 470 aa, Homo sapiens
MPTTPVKAKRVSTFQEFESNTSDAWDAGEDDDELLAMAAESLNSEVVMETANRVLRNHSQRQGRPTLQEGPGLQQKPRPEAEPPSPPSGDLRLVKSVSESHTSCPAESASDAAPLQRSQSLPHSATVTLGGTSDPSTLSSSALSEREASRLDKFKQLLAGPNTDLEELRRLSWSGIPKPVRPMTWKLLSGYLPANVDRRPATLQRKQKEYFAFIEHYYDSRNDEVHQDTYRQIHIDIPRMSPEALILQPKVTEIFERILFIWAIRHPASGYVQGINDLVTPFFVVFICEYIEAEEVDTVDVSGVPAEVLCNIEADTYWCMSKLLDGIQDNYTFAQPGIQMKVKMLEELVSRIDEQVHRHLDQHEVRYLQFAFRWMNNLLMREVPLRCTIRLWDTYQSEPDGFSHFHLYVCAAFLVRWRKEILEEKDFQELLLFLQNLPTAHWDDEDISLLLAEAYRLKFAFADAPNHYKK

SEQ ID NO: 11946 - protein, 657 aa, Homo sapiens
MRTVVLTMKASVIEMFLVLLVTGVHSNKETAKKIKRPKFTVPQINCDVKAGKIIDPEFIVKCPAGCQDPKYHVYGTDVYASYSSVCGAAVHSGVLDNSGGKILVRKVAGQSGYKGSYSNGVQSLSLPRWRESFIVLESKPKKGVTYPSALTYSSSKSPAAQAGETTKAYQRPPIPGTTAQPVTLMQLLAVTVAVATPTTLPRPSPSAASTTSIPRPQSVGHRSQEMDLWSTATYTSSQNRPRADPGIQRQDPSGAAFQKPVGADVSLDCKIDLSFLIDGSTSIGKRRFRIQKQLLADVAQALDIGPAGPLMGVVQYGDNPATHFNLKTHTNSRDLKTAIEKITQRGGLSNVGRAISFVTKNFFSKANGNRSGAPNVVVVMVDGWPTDKVEEASRLARESGINIFFITIEGAAENEKQYVVEPNFANKAVCRTNGFYSLHVQSWFGLHKTLQPLVKRVCDTDRLACSKTCLNSADIGFVIDGSSSVGTGNFRTVLQFVTNLTKEFEISDTDTRIGAVQYTYEQRLEFGFDKYSSKPDILNAIKRVGYWSGGTSTGAAINFALEQLFKKSKPNKRKLMILITDGRSYDDVRIPAMAAHLKGVITYAIGVAWAAQEELEVIATHPARDHSFFVDEFDNLHQYVPRIIQNICTEFNSQPRN

SEQ ID NO: 11947 - protein, 171 aa, Homo sapiens
MALWRAYQRALAAHPWKVQVLTAGSLMGLGDIISQQLVERRGLQEHQRGRTLTMVSLGCGFVGPVVGGWYKVLDRFIPGTTKVDALKKMLLDQGGFAPCFLGCFLPLVGALNGLSAQDNWAKLQRDYPDALITNYYLWPAVQLANFYLVPLHYREDPASTTLVSIPPELRL

SEQ ID NO: 11948 - protein, 1157 aa, Homo sapiens
MARQPPPPWVHAAFLLCLLSLGGAIEIPMDLTQPPTITKQSAKDHIVDPRDNILIECEAKGNPAPSFHWTRNSRFFNIAKDPRVSMRRRSGTLVIDFRSGGRPEEYEGEYQCFARNKFGTALSNRIRLQVSKSPLWPKENLDPVVVQEGAPLTLQCNPPPGLPSPVIFWMSSSMEPITQDKRVSQGHNGDLYFSNVMLQDMQTDYSCNARFHFTHTIQQKNPFTLKVLTTRGVAERTPSFMYPQGTASSQMVLRGMDLLLECIASGVPTPDIAWYKKGGDLPSDKAKFENFNKALRITNVSEEDSGEYFCLASNKMGSIRHTISVRVKAAPYWLDEPKNLILAPGEDGRLVCRANGNPKPTVQWMVNGEPLQSAPPNPNREVAGDTIIFRDTQISSRAVYQCNTSNEHGYLLANAFVSVLDVPPRMLSPRNQLIRVILYNRTRLDCPFFGSPIPTLRWFKNGQGSNLDGGNYHVYENGSLEIKMIRKEDQGIYTCVATNILGKAENQVRLEVKDPTRIYRMPEDQVARRGTTVQLECRVKHDPSLKLTVSWLKDDEPLYIGNRMKKEDDSLTIFGVAERDQGSYTCVASTELDQDLAKAYLTVLGRPDRPRDLELTDLAERSVRLTWIPGDANNSPITDYVVQFEEDQFQPGVWHDHSKYPGSVNSAVLRLSPYVNYQFRVIAINEVGSSHPSLPSERYRTSGAPPESNPGDVKGEGTRKNNMEITWTPMNATSAFGPNLRYIVKWRRRETREAWNNVTVWGSRYVVGQTPVYVPYEIRVQAENDFGKGPEPESVIGYSGEDYPRAAPTEVKVRVMNSTAISLQWNRVYSDTVQGQLREYRAYYWRESSLLKNLWVSQKRQQASFPGDRLRGVVSRLFPYSNYKLEMVVVNGRGDGPRSETKEFTTPEGVPSAPRRFRVRQPNLETINLEWDHPEHPNGIMIGYTLKYVAFNGTKVGKQIVENFSPNQTKFTVQRTDPVSRYRFTLSARTQVGSGEAVTEESPAPPNEATPTAAYTNNQADIATQGWFIGLMCAIALLVLILLIVCFIKRSRGGKYPVREKKDVPLGPEDPKEEDGSFDYSDEDNKPLQGSQTSLDGTIKQQESDDSLVDYGEGGEGQFNEDGSFIGQYTVKKDKEETEGNESSEATSPVNAIYSLA

SEQ ID NO: 11949 - protein, 1158 aa, Homo sapiens
MCSTNPGKWVTFDDDPAVQSSQKSKNFPLENQGVCRPNGLKLNLPGLREFPSGSSSTSSTPLSSPIVDFYFSPGPPSNSPLSTPTKDFPGFPGIPKAGTHVLYPIPESSSDSPLAISGGESSLLPTRPTCLSHALLPSDHSCTHPTPKVGLPDEVNPQQAESLGFQSDDLPQFQYFREDCAFSSPFWKDEGSDSHFTLDPPGSKKMFSSRNKEMPIDQKSLNKCSLNYICEKLEHLQSAENQDSLRSLSMHCLCAEENASSFVPHTLFRSQPKSGWSFMLRIPEKKNMMSSRQWGPIFLKVLPGGILQMYYEQGLEKPFKEIQLDPYCRLSEPKVENFSVAGKIHTVKIEHVSYTEKRKYHSKTEVVHEPDIEQMLKLGSTSYHDFLDFLTTVEEELMKLPAVSKPKKNYEEQEISLEIVDNFWGKVTKEGKFVESAVITQIYCLCFVNGNLECFLTLNDLELPKRDESYYEKDSEKKGIDILDYHFHKCVNVQEFEQSRIIKFVPLDACRFELMRFKTLYNGDNLPFSLKSVVVVQGAYVELQAFVNMASLAQRSSYAGSLRSCDNIRIHFPVPSQWIKALWTMNLQRQKSLKAKMNRRACLGSLQELESEPVIQVTVGSAKYESAYQAVVWKIDRLPDKNSSLDHPHCLSYKLELGSDQEIPSDWYPFATVQFSVPDTCASRTEVRSLGVESDVQPQKHVQQRACYNIQPKLYRSVIEDVIEGVRNLFAEEGIEEQVLKDLKQLWETKVLQSKATEDFFRNSIQSPLFTLQLPHSLHQTLQSSTASLVIPAGRTLPSFTTAELGTSNSSANFTFPGYPIHVPAGVTLQTVSGHLYKVNVPIMVTETSGRAGILQHPIQQVFQQLGQPSVIQTSVPQLNPWSLQATTEKSQRIETVLQQPAILPSGPVDRKHLENATSDILVSPGNEHKIVPEALLCHQESSHYISLPGVVFSPQVSQTNSNVESVLSGSASMAQNLHDESLSTSPHGALHQHVTDIQLHILKNRMYGCDSVKQPRNIEEPSNIPVSEKDSNSQVDLSIRVTDDDIGEIIQVDGSGDTSSNEEIGSTRDADENEFLGNIDGGDLKVPEEEADSISNEDSATNSSDNEDPQVNIVEEDPLNSGDDVSEQDVPDLFDTDNVIVCQYDKQGDTRVRHGQQ

SEQ ID NO: 11950 - protein, 168 aa, Homo sapiens
MGKNKLLHPSLVLLLLVLLPTDASVSGKPQYMVLVPSLLHTETTEKGCVLLSYLNETVTVSASLESVRGNRSLFTDLEAENDVLHCVAFAVPKSSSNEEVMFLTVQVKGPTQEFKKRTTVMVKNEDSLVFVQTDKSIYKPGQTVKFRVVSMDENFHPLNELIPLVYIQ

SEQ ID NO: 11951 - protein, 132 aa, Homo sapiens
MQLFLLAVSVPLPAMPFLELDTNLPANRVPAGLEKRLCAAAASILGKPADRVNVTVRPGLAMALSGSTEPCAQLSISSIGVVGTAEDNRSHSAHFFEFLTKELALGQDRILIRFFPLESWQIGKIGTVMTFL

SEQ ID NO: 11952 - protein, 1499 aa, Homo sapiens
MMMARKQDVRIPTYNISVVGLSGTEKEKGQCGIGKSCLCNRFVRPSADEFHLDHTSVLSTSDFGGRVVNNDHFLYWGEVSRSLEDCVECKMHIVEQTEFIDDQTFQPHRSTALQPYIKRAAATKLASAEKLMYFCTDQLGLEQDFEQKQMPDGKLLVDGFLLGIDVSRGMNRNFDDQLKFVSNLYNQLAKTKKPIVVVLTKCDEGVERYIRDAHTFALSKKNLQVVETSARSNVNVDLAFSTLVQLIDKSRGKTKIIPYFEALKQQSQQIATAKDKYEWLVSRIVKNHNENWLSVSRKMQASPEYQDYVYLEGTQKAKKLFLQHIHRLKHEHIERRRKLYLAALPLAFEALIPNLDEIDHLSCIKAKKLLETKPEFLKWFVVLEETPWDATSHIDNMENERIPFDLMDTVPAEQLYEAHLEKLRNERKRVEMRRAFKENLETSPFITPGKPWEEARSFIMNEDFYQWLEESVYMDIYGKHQKQIIDKAKEEFQELLLEYSELFYELELDAKPSKEKMGVIQDVLGEEQRFKALQKLQAERDALILKHIHFVYHPTKETCPSCPACVDAKIEHLISSRFIRPSDRNQKNSLSDPNIDRINLVILGKDGLARELANEIRALCTNDDKYVIDGKMYELSLRPIEGNVRLPVNSFQTPTFQPHGCLCLYNSKESLSYVVESIEKSRESTLGRRDNHLVHLPLTLILVNKRGDTSGETLHSLIQQGQQIASKLQCVFLDPASAGIGYGRNINEKQISQVLKGLLDSKRNLNLVSSTASIKDLADVDLRIVMCLMCGDPFSADDILFPVLQSQTCKSSHCGSNNSVLLELPIGLHKKRIELSVLSYHSSFSIRKSRLVHGYIVFYSAKRKASLAMLRAFLCEVQDIIPIQLVALTDGAVDVLDNDLSREQLTEGEEIAQEIDGRFTSIPCSQPQHKLEIFHPFFKDVVEKKNIIEATHMYDNAAEACSTTEEVFNSPRAGSPLCNSNLQDSEEDIEPSYSLFREDTSLPSLSKDHSKLSMELEGNDGLSFIMSNFESKLNNKVPPPVKPKPPVHFEITKGDLSYLDQGHRDGQRKSVSSSPWLPQDGFDPSDYAEPMDAVVKPRNEEENIYSVPHDSTQGKIITIRNINKAQSNGSGNGSDSEMDTSSLERGRKVSIVSKPVLYRTRCTRLGRFASYRTSFSVGSDDELGPIRKKEEDQASQGYKGDNAVIPYETDEDPRRRNILRSLRRNTKKPKPKPRPSITKATWESNYFGVPLTTVVTPEKPIPIFIERCIEYIEATGLSTEGIYRVSGNKSEMESLQRQFDQDHNLDLAEKDFTVNTVAGAMKSFFSELPDPLVPYNMQIDLVEAHKINDREQKLHALKEVLKKFPKENHEVFKYVISHLNKVSHNNKVNLMTSENLSICFWPTLMRPDFSTMDALTATRTYQTIIELFIQQCPFFFYNRPITEPPGARPSSPSAVASTVPFLTSTPVTSQPSPPQSPPPTPQSPMQPLLPSQLQAEHTL

SEQ ID NO: 11953 - protein, 2190 aa, Homo sapiens
MNRAKPTTVRRPSAAAKPSGHPPPGDFIALGSKGQANESKTASTLLKPAPSGLPSERKRDAAAALSSASALTGLTKRPKLSSTPPLSALGRLAEAAVAEKRAISPSIKEPSVVPIEVLPTVLLDEIEAAELEGNDDRIEGVLCGAVKQLKVTRAKPDSTLYLSLMYLAKIKPNIFATEGVIEALCSLLRRDASINFKAKGNSLVSVLACNLLMAAYEEDENWPEIFVKVYIEDSLGERIWVDSPHCKTFVDNIQTAFNTRMPPRSVLLQGEAGRVAGDLGAGSSPHPSLTEEEDSQTELLIAEEKLSPEQEGQLMPRYEELAESVEEYVLDMLRDQLNRRQPIDNVSRNLLRLLTSTCGYKEVRLLAVQKLEMWLQNPKLTRPAQDLLMSVCMNCNTHGSEDMDVISHLIKIRLKPKVLLNHFMLCIRELLSAHKDNLGTTIKLVIFNELSSARNPNNMQVLYTALQHSSELAPKFLAMVFQDLLTNKDDYLRASRALLREIIKQTKHEINFQAFCLGLMQERKEPQYLEMEFKERFVVHITDVLAVSMMLGITAQVKEAGIAWDKGEKRNLEVLRSFQNQIAAIQRDAVWWLHTVVPSISKLAPKDYVHCLHKVLFTEQPETYYKWDNWPPESDRNFFLRLCSEVPILEDTLMRILVIGLSRELPLGPADAMELADHLVKRAAAVQADDVEVLKVGRTQLIDAVLNLCTYHHPENIQLPPGYQPPNLAISTLYWKAWPLLLVVAAFNPENIGLAAWEEYPTLKMLMEMVMTNNYSYPPCTLTDEETRTEMLNRELQTAQREKQEILAFEGHLAAASTKQTITESSSLLLSQLTSLDPQGPPRRPPPHILDQVKSLNQSLRLGHLLCRSRNPDFLLHIIQRQASSQSMPWLADLVQSSEGSLDVLPVQCLCEFLLHDAVDDAASGEEDDEGESKEQKAKKRQRQQKQRQLLGRLQDLLLGPKADEQTTCEVLDYFLRRLGSSQVASRVLAMKGLSLVLSEGSLRDGEEKEPPMEEDVGDTDVLQGYQWLLRDLPRLPLFDSVRSTTALALQQAIHMETDPQTISAYLIYLSQHTPVEEQAQHSDLALDVARLVVERSTIMSHLFSKLSPSAASDAVLSALLSIFSRYVRRMRQSKEGEEVYSWSESQDQVFLRWSSGETATMHILVVHAMVILLTLGPPRADDSEFQALLDIWFPEEKPLPTAFLVDTSEEALLLPDWLKLRMIRSEVLRLVDAALQDLEPQQLLLFVQSFGIPVSSMSKLLQFLDQAVAHDPQTLEQNIMDKNYMAHLVEVQHERGASGGQTFHSLLTASLPPRRDSTEAPKPKSSPEQPIGQGRIRVGTQLRVLGPEDDLAGMFLQIFPLSPDPRWQSSSPRPVALALQQALGQELARVVQGSPEVPGITVRVLQALATLLSSPHGGALVMSMHRSHFLACPLLRQLCQYQRCVPQDTGFSSLFLKVLLQMLQWLDSPGVEGGPLRAQLRMLASQASAGRRLSDVRGGLLRLAEALAFRQDLEVVSSTVRAVIATLRSGEQCSVEPDLISKVLQGLIEVRSPHLEELLTAFFSATADAASPFPACKPVVVVSSLLLQEEEPLAGGKPGADGGSLEAVRLGPSSGLLVDWLEMLDPEVVSSCPDLQLRLLFSRRKGKGQAQVPSFRPYLLTLFTHQSSWPTLHQCIRVLLGKSREQRFDPSASLDFLWACIHVPRIWQGRDQRTPQKRREELVLRVQGPELISLVELILAEAETRSQDGDTAACSLIQARLPLLLSCCCGDDESVRKVTEHLSGCIQQWGDSVLGRRCRDLLLQLYLQRPELRVPVPEVLLHSEGAASSSVCKLDGLIHRFITLLADTSDSRALENRGADASMACRKLAVAHPLLLLRHLPMIAALLHGRTHLNFQEFRQQNHLSCFLHVLGLLELLQPHVFRSEHQGALWDCLLSFIRLLLNYRKSSRHLAAFINKFVQFIHKYITYNAPAAISFLQKHADPLHDLSFDNSDLVMLKSLLAGLSLPSRDDRTDRGLDEEGEEESSAGSLPLVSVSLFTPLTAAEMAPYMKRLSRGQTVEDLLEVLSDIDEMSRRRPEILSFFSTNLQRLMSSAEECCRNLAFSLALRSMQNSPSIAAAFLPTFMYCLGSQDFEVVQTALRNLPEYALLCQEHAAVLLHRAFLVGMYGQMDPSAQISEALRILHMEAVM

SEQ ID NO: 11954 - protein, 655 aa, Homo sapiens
MASTDYSTYSQAAAQQGYSAYTAQPTQGYAQTTQAYGQQSYGTYGQPTDVSYTQAQTTATYGQTAYATSYGQPPTGYTTPTAPQAYSQPVQGYGTGAYDTTTATVTTTQASYAAQSAYGTQPAYPAYGQQPAATAPTRPQDGNKPTETSQPQSSTGGYNQPSLGYGQSNYSYPQVPGSYPMQPVTAPPSYPPTSYSSTQPTSYDQSSYSQQNTYGQPSSYGQQSSYGQQSSYGQQPPTSYPPQTGSYSQAPSQYSQQSSSYGQQSSFRQDHPSSMGVYGQESGGFSGPGENRSMSGPDNRGRGRGGFDRGGMSRGGRGGGRGGMGAGERGGFNKPGGPMDEGPDLDLGPPVDPDEDSDNSAIYVQGLNDSVTLDDLADFFKQCGVVKMNKRTGQPMIHIYLDKETGKPKGDATVSYEDPPTAKAAVEWFDGKDFQGSKLKVSLARKKPPMNSMRGGLPPREGRGMPPPLRGGPGGPGGPGGPMGRMGGRGGDRGGFPPRGPRGSRGNPSGGGNVQHRAGDWQCPNPGCGNQNFAWRTECNQCKAPKPEGFLPPPFPPPGGDRGRGGPGGMRGGRGGLMDRGGPGGMFRGGRGGDRGGFRGGRGMDRGGFGGGRRGGPGGPPGPLMEQMGGRRGGRGGPGKMDKGEHRQERRDRPY

SEQ ID NO: 11955 - protein, 201 aa, Homo sapiens
MPSETLWEIAKAEVEKRGINGSEGDGAEIAEKFVFFIGSKNGGKTTIILRCLDRDEPPKPTLALEYTYGRRAKGHNTPKDIAHFWELGGGTSLLDLISIPITGDTLRTFSLVLVLDLSKPNDLWPTMENLLQATKSHVDKVIMKLGKTNAKAVSEMRQKIWNNMPKDHPVSCCLGLLLESLVPFIVNDNITNNFFRFLCMT

SEQ ID NO: 11956 - protein, 543 aa, Homo sapiens
MSRESDVEAQQSHGSSACSQPHGSVTQSQGSSSQSQGISSSSTSTMPNSSQSSHSSSGTLSSLETVSTQELYSIPEDQEPEDQEPEEPTPAPWARLWALQDGFANLECVNDNYWFGRDKSCEYCFDEPLLKRTDKYRTYSKKHFRIFREVGPKNSYIAYIEDHSGNGTFVNTELVGKGKRRPLNNNSEIALSLSRNKVFVFFDLTVDDQSVYPKALRDEYIMSKTLGSGACGEVKLAFERKTCKKVAIKIISKRKFAIGSAREADPALNVETEIEILKKLNHPCIIKIKNFFDAEDYYIVLELMEGGELFDKVVGNKRLKEATCKLYFYQMLLAVQYLHENGIIHRDLKPENVLLSSQEEDCLIKITDFGHSKILGETSLMRTLCGTPTYLAPEVLVSVGTAGYNRAVDCWSLGVILFICLSGYPPFSEHRTQVSLKDQITSGKYNFIPEVWAEVSEKALDLVKKLLVVDPKARFTTEEALRHPWLQDEDMKRKFQDLLSEENESTALPQVLAQPSTSRKRPREGEAEGAETTKRPAVCAAVL

SEQ ID NO: 11957 - protein, 185 aa, Homo sapiens
MQQKSQKKAELLDNEKPAAVVAPITTGYTVKISNYGWDQSDKFVKIYITLTGVHQVPTENVQVHFTERSFDLLVKNLNGKSYSMIVNNLLKPISVEGSSKKVKTDTVLILCRKKVENTRWDYLTQVEKECKEKEKPSYDTETDPSEGLMNVLKKIYEDGDDDMKRTINKAWVESREKQAKGDTEF

SEQ ID NO: 11958 - protein, 661 aa, Homo sapiens
MRVLGGRCGALLACLLLVLPVSEANFLSKQQASQVLVRKRRANSLLEETKQGNLERECIEELCNKEEAREVFENDPETDYFYPKYLVCLRSFQTGLFTAARQSTNAYPDLRSCVNAIPDQCSPLPCNEDGYMSCKDGKASFTCTCKPGWQGEKCEFDINECKDPSNINGGCSQICDNTPGSYHCSYVDECSLKPSICGTAVCKNIPGDFECECPEGYRYNLKSKSCEDIDECSENMCAQLCVNYPGGYTCYCDGKKGFKLAQDQKSCEVVSVCLPLNLDTKYELLYLAEQFAGVVLYLKFRLPEISRFSAEFDFRTYDSEGVILYAESIDHSAWLLIALRGGKIEVQLKNEHTSKITTGGDVINNGLWNMVSVEELEHSISIKIAKEAVMDINKPGPLFKPENGLLETKVYFAGFPRKVESELIKPINPRLDGCIRSWNLMKQGASGIKEIIQEKQNKHCLVTVEKGSYYPGSGIAQFHIDYNNVSSAEGWHVNVTLNIRPSTGTGVMLALVSGNNTVPFAVSLVDSTSEKSQDILLSVENTVIYRIQALSLCSDQQSHLEFRVNRNNLELSTPLKIETISHEDLQRQLAVLDKAMKAKVATYLGGLPDVPFSATPVNAFYNGCMEVNINGVQLDLDEAISKHNDIRAHSCPSVWKKTKNS

SEQ ID NO: 11959 - protein, 725 aa, Homo sapiens
MWGFLKRPVVVTADINLSLVALTGMGLLSRLWRLTYPRAVVFDEVYYGQYISFYMKQIFFLDDSGPPFGHMVLALGGYLGGFDGNFLWNRIGAEYSSNVPVWSLRLLPALAGALSVPMAYQIVLELHFSHCAAMGAALLMLIENALITQSRLMLLESVLIFFNLLAVLSYLKFFNCQKHSPFSLSWWFWLTLTGVACSCAVGIKYMGVFTYVLVLGVAAVHAWHLLGDQTLSNVCVFCHLLARAVALLVIPVVLYLLFFYVHLILVFRSGPHDQIMSSAFQASLEGGLARITQGQPLEVAFGSQVTLRNVFGKPVPCWLHSHQDTYPMIYENGRGSSHQQQVTCYPFKDVNNWWIVKDPRRHQLVVSSPPRPVRHGDMVQLVHGMTTRSLNTHDVAAPLSPHSQEVSCYIDYNISMPAQNLWRLEIVNRGSDTDVWKTILSEVRFVHVNTSAVLKLSGAHLPDWGYRQLEIVGEKLSRGYHGSTVWNVEEHRYGASQEQRERERELHSPAQVDVSRNLSFMARFSELQWRMLALRSDDSEHKYSSSPLEWVTLDTNIAYWLHPRTSAQIHLLGNIVIWVSGSLALAIYALLSLWYLLRRRRNVHDLPQDAWLRWVLAGALCAGGWAVNYLPFFLMEKTLFLYHYLPALTFQILLLPVVLQHISDHLCRSQLQRSIFSALVVAWYSSACHVSNTLRPLTYGDKSLSPHELKALRWKDSWDILIRKH

SEQ ID NO: 11960 - protein, 116 aa, Homo sapiens
MDLLQFLAFLFVLLLSGMGATGTLRTSLDPSLEIYKKMFEVKRREQLLALKNLAQLNDIHQQYKILDVMLKGLFKFIPSTDPFQKALREEEKRRKKEEKRKEIRKGPRISRSQSEL

SEQ ID NO: 11961 - protein, 698 aa, Homo sapiens
MRLAVGALLVCAVLGLCLAVPDKTVRWCAVSEHEATKCQSFRDHMKSVIPSDGPSVACVKKASYLDCIRAIAANEADAVTLDAGLVYDAYLAPNNLKPVVAEFYGSKEDPQTFYYAVAVVKKDSGFQMNQLRGKKSCHTGLGRSAGWNIPIGLLYCDLPEPRKPLEKAVANFFSGSCAPCADGTDFPQLCQLCPGCGCSTLNQYFGYSGAFKCLKDGAGDVAFVKHSTIFENLANKADRDQYELLCLDNTRKPVDEYKDCHLAQVPSHTVVARSMGGKEDLIWELLNQAQEHFGKDKSKEFQLFSSPHGKDLLFKDSAHGFLKVPPRMDAKMYLGYEYVTAIRNLREGTCPEAPTDECKPVKWCALSHHERLKCDEWSVNSVGKIECVSAETTEDCIAKIMNGEADAMSLDGGFVYIAGKCGLVPVLAENYNKSDNCEDTPEAGYFAIAVVKKSASDLTWDNLKGKKSCHTAVGRTAGWNIPMGLLYNKINHCRFDEFFSEGCAPGSKKDSSLCKLCMGSGLNLCEPNNKEGYYGYTGAFRCLVEKGDVAFVKHQTVPQNTGGKNPDPWAKNLNEKDYELLCLDGTRKPVEEYANCHLARAPNHAVVTRKDKEACVHKILRQQQHLFGSNVTDCSGNFCLFRSETKDLLFRDDTVCLAKLHDRNTYEKYLGEEYVKAVGNLRKCSTSSLLEACTFRRP

SEQ ID NO: 11962 - protein, 990 aa, Homo sapiens
MSNSNTTQETLEIMKESEKKLVEESVNKNKFISKTPSKEEIEKECEDTSLRQETQRRTSNHGHARKRAKSNSKLKLVRSLAVCEESSTPFADGPLETQDIIQLHISCPSDKEEEKSTKDVSEKEDKDKNKEKIPRKMLSRDSSQEYTDSTGIDLHEFLVNTLKKNPRDRMMLLKLEQEILEFINDNNNQFKKFPQMTSYHRMLLHRVAAYFGMDHNVDQTGKAVIINKTSNTRIPEQRFSEHIKDEKNTEFQQRFILKRDDASMDRDDNQIRVPLQDGRRSKSIEEREEEYQRVRERIFARETGQNGYLNDIRGNREGLSRTSSSRQSSTDSELKSLEPRPWSSTDSDGSVRSMRPPVTKASSFSGISILTRGDSIGSSKGGSAGRISRPGMALGAPEVCNQVTSSQSVRGLLPCTAQQQQQQQQQQLPALPPTPQQQPPLNNHMISQADDLSNPFGQMSLSRQGSTEAADPSAALFQTPLISQHPQQTSFIMASTGQPLPTSNYSTSSHAPPTQQVLPPQGYMQPPQQIQVSYYPPGQYPNSNQQYRPLSHPVAYSPQRGQQLPQPSQQPGLQPMMPNQQQAAYQGMIGVQQPQNQGLLSSQRSSMGGQMQGLVVQYTPLPSYQVPVGSDSQNVVQPPFQQPMLVPVSQSVQGGLPAAGVPVYYSMIPPAQQNGTSPSVGFLQPPGSEQYQMPQSPSPCSPPQMPQQYSGVSPSGPGVVVMQLNVPNGPQPPQNPSMVQWSHCKYYSMDQRGQKPGDLYSPDSSPQANTQMSSSPVTSPTQSPAPSPVTSLSSVCTGLSPLPVLTQFPRPGGPAQGDGRYSLLGQPLQYNLSICPPLLHGQSTYTVHQGQSGLKHGNRGKRQALKSASTDLGTADVVLGRVLEVTDLPEGITRTEADKLFTQLAMSGAKIQWLKDAQGLPGGGGGDNSGTAENGRHSDLAALYTIVAVFPSPLAAQNASLRLNNSVSRFKLRMAKKNYDLRILERASSQ

SEQ ID NO: 11963 - protein, 329 aa, Homo sapiens
MKQRFSALQLLKLLLLLQPPLPRALREALCPEPCNCVPDGALRCPGPTAGLTRLSLAYLPVKVIPSQAFRGLNEVIKIEISQIDSLERIEANAFDNLLNLSEILIQNTKNLRYIEPGAFINLPRLKYLSICNTGIRKFPDVTKVFSSESNFILEICDNLHITTIPGNAFQGMNNESVTLKLYGNGFEEVQSHAFNGTTLTSLELKENVHLEKMHNGAFRGATGPKTLDISSTKLQALPSYGLESIQRLIATSSYSLKKLPSRETFVNLLEATLTYPSHCCAFRNLPTKEQNFSHSISENFSKQCESTVRKVNNKTLLLHGALSAAHSLS

SEQ ID NO: 11964 - protein, 1205 aa, Homo sapiens
MKVTVCFGRTGIVVPCKEGQLRVGELTQQALQRYLKTREKGPGYWVKIHHLEYTDGGILDPDDVLADVVEDKDKLIAVFEEQEPLHKIESPSGNPADRQSPDAFETEVAAQLAAFKPIGGEIEVTPSALKLGTPLLVRRSSDPVPGPPADTQPSASHPGGQSLKLVVPDSTQNLEDREVLNGVQTELLTSPRTKDTLSDMTRTVEISGEGGPLGIHVVPFFSSLSGRILGLFIRGIEDNSRSKREGLFHENECIVKINNVDLVDKTFAQAQDVFRQAMKSPSVLLHVLPPQNREQYEKSVIGSLNIFGNNDGVLKTKVPPPVHGKSGLKTANLTGTDSPETDASASLQQNKSPRVPRLGGKPSSPSLSPLMGFGSNKNAKKIKIDLKKGPEGLGFTVVTRDSSIHGPGPIFVKNILPKGAAIKDGRLQSGDRILEVNGRDVTGRTQEELVAMLRSTKQGETASLVIARQEGHFLPRELKGEPDCCALSLETSEQLTFEIPLNDSGSAGLGVSLKGNKSRETGTDLGIFIKSIIHGGAAFKDGRLRMNDQLIAVNGESLLGKSNHEAMETLRRSMSMEGNIRGMIQLVILRRPERPMEDPAECGAFSKPCFENCQNAVTTSRRNDNSILHPLGTCSPQDKQKGLLLPNDGWAESEVPPSPTPHSALGLGLEDYSHSSGVDSAVYFPDQHINFRSVTPARQPESINLKASKSMDLVPDESKVHSLAGQKSESPSKDFGPTLGLKKSSSLESLQTAVAEVRKNDLPFHRPRPHMVRGRGCNESFRAAIDKSYDGPEEIEADGLSDKSSHSGQGALNCESAPQGNSELEDMENKARKVKKTKEKEKKKEKGKLKVKEKKRKEENEDPERKIKKKGFGAMLRFGKKKEDKGGKAEQKGTLKHGGLREEELEKMKEERERIGAKHQELREKQARGLLDYATGAIGSVYDMDDDEMDPNYARVNHFREPCTSANVFRSPSPPRAGPFGYPRDGHPLSPERDHLEGLYAKVNKPYHPLVPADSGRPTGGSTDRIQKLRKEYYQARREGFPLYEDDEGRARPSEYDLLWVPGRGPDGNAHNLRFEGMERQYASLPRGGPADPVDYLPAAPRGLYKERELPYYPGAHPMHPPKGSYPRPTELRVADLRYPQHYPPPPAPQHKGPFRQDVPPSPPQHQRMPAYQETGRPGPRGGSPDQYPYRTQDSRQKNPMTAAV

SEQ ID NO: 11965 - protein, 1189 aa, Homo sapiens
MRRKGRCHRGSAARHPSSPCSVKHSPTRETLTYAQAQRMVEIEIEGRLHRISIFDPLEIILEDDLTAQEMSECNSNKENSERPPVCLRTKRHKNNRVKKKNEALPSAHGTPASASALPEPKVRIVEYSPPSAPRRPPVYYKFIEKSAEELDNEVEYDMDEEDYAWLEIVNEKRKGDCVPAVSQSMFEFLMDRFEKESHCENQKQGEQQSLIDEDAVCCICMDGECQNSNVILFCDMCNLAVHQECYGVPYIPEGQWLCRHCLQSRARPADCVLCPNKGGAFKKTDDDRWGHVVCALWIPEVGFANTVFIEPIDGVRNIPPARWKLTCYLCKQKGVGACIQCHKANCYTAFHVTCAQKAGLYMKMEPVKELTGGGTTFSVRKTAYCDVHTPPGCTRRPLNIYGDVEMKNGVCRKESSVKTVRSTSKVRKKAKKAKKALAEPCAVLPTVCAPYIPPQRLNRIANQVAIQRKKQFVERAHSYWLLKRLSRNGAPLLRRLQSSLQSQRSSQQRENDEEMKAAKEKLKYWQRLRHDLERARLLIELLRKREKLKREQVKVEQVAMELRLTPLTVLLRSVLDQLQDKDPARIFAQPVSLKEVPDYLDHIKHPMDFATMRKRLEAQGYKNLHEFEEDFDLIIDNCMKYNARDTVFYRAAVRLRDQGGVVLRQARREVDSIGLEEASGMHLPERPAAAPRRPFSWEDVDRLLDPANRAHLGLEEQLRELLDMLDLTCAMKSSGSRSKRAKLLKKEIALLRNKLSQQHSQPLPTGPGLEGFEEDGAALGPEAGEEGDKSPPKLEPSDALPLPSNSETNSEPPTLKPVELNPEQSKLFKRVTFDNESHSACTQSALVSGRPPEPTRASSGDVPAAAASAVAEPASDVNRRTSVLFCKSKSVSPPKSAKNTETQPTSPQLGTKTFLSVVLPRLETLLQPRKRSRSTCGDSEVEEESPGKRLDAGLTNGFGGARSEQEPGGGLGRKATPRRRCASESSISSSNSPLCDSSFNAPKCGRGKPALVRRHTLEDRSELISCIENGNYAKAARIAAEVGQSSMWISTDAAASVLEPLKVVWAKCSGYPSYPALIIDPKMPRVPGHHNGVTIPAPPLDVLKIGEHMQTKSDEKLFLVLFFDNKRSWQWLPKSKMVPLGIDETIDKLKMMEGRNSSIRKAVRIAFDRAMNHLSRVHGEPTSDLSDID

SEQ ID NO: 11966 - protein, 2006 aa, Homo sapiens
MVKLANPLYTEWILEAIKKVKKQKQRPSEERICNAVSSSHGLDRKTVLEQLELSVKDGTILKVSNKGLNSYKDPDNPGRIALPKPRNHGKLDNKQNVDWNKLIKRAVEGLAESGGSTLKSIERFLKGQKDVSALFGGSAASGFHQQLRLAIKRAIGHGRLLKDGPLYRLNTKATNVDGKESCESLSCLPPVSLLPHEKDKPVAEPIPICSFCLGTKEQNREKKPEELISCADCGNSGHPSCLKFSPELTVRVKALRWQCIECKTCSSCRDQGKNADNMLFCDSCDRGFHMECCDPPLTRMPKGMWICQICRPRKKGRKLLQKKAAQIKRRYTNPIGRPKNRLKKQNTVSKGPFSKVRTGPGRGRKRKITLSSQSASSSSEEGYLERIDGLDFCRDSNVSLKFNKKTKGLIDGLTKFFTPSPDGRKARGEVVDYSEQYRIRKRGNRKSSTSDWPTDNQDGWDGKQENEERLFGSQEIMTEKDMELFRDIQEQALQKVGVTGPPDPQVRCPSVIEFGKYEIHTWYSSPYPQEYSRLPKLYLCEFCLKYMKSRTILQQHMKKCGWFHPPANEIYRKNNISVFEVDGNVSTIYCQNLCLLAKLFLDHKTLYYDVEPFLFYVLTQNDVKGCHLVGYFSKEKHCQQKYNVSCIMILPQYQRKGYGRFLIDFSYLLSKREGQAGSPEKPLSDLGRLSYMAYWKSVILECLYHQNDKQISIKKLSKLTGICPQDITSTLHHLRMLDFRSDQFVIIRREKLIQDHMAKLQLNLRPVDVDPECLRWTPVIVSNSVVSEEEEEEAEEGENEEPQCQERELEISVRVGKSVSHENKEQDSYSVESEKKPEVMAPVSSTRLSKQVLPHDSLPANSQPSRRGRWGRKNRKTQERFGDKDSKLLLEETSSAPQEQYGECGEKSEATQEQYTESEEQLVASEEQPSQDGKPDLPKRRLSEGVEPWRGQLKKSPEALKCRLTEGSERLPRRYSEGDRAVLRGFSESSEEEEEPESPRSSSPPILTKPTLKRKKPFLHRRRRVRKRKHHNSSVVTETISETTEVLDEPFEDSDSERPMPRLEPTFEIDEEEEEEDENELFPREYFRRLSSQDVLRCQSSSKRKSKDEEEDEESDDADDTPILKPVSLLRKRDVKNSPLEPDTSTPLKKKKGWPKGKSRKPIHWKKRPGRKPGFKLSREIMPVSTQACVIEPIVSIPKAGRKPKIQESEETVEPKEDMPLPEERKEEEEMQAEAEEAEEGEEEDAASSEVPAASPADSSNSPETETKEPEVEEEEEKPRVSEEQRQSEEEQQELEEPEPEEEEDAAAETAQNDDHDADDEDDGHLESTKKKELEEQPTREDVKEEPGVQESFLDANMQKSREKIKDKEETELDSEEEQPSHDTSVVSEQMAGSEDDHEEDSHTKEELIELKEEEEIPHSELDLETVQAVQSLTQEESSEHEGAYQDCEETLAACQTLQSYTQADEDPQMSMVEDCHASEHNSPISSVQSHPSQSVRSVSSPNVPALESGYTQISPEQGSLSAPSMQNMETSPMMDVPSVSDHSQQVVDSGFSDLGSIESTTENYENPSSYDSTMGGSICGNSSSQSSCSYGGLSSSSSLTQSSCVVTQQMASMGSSCSMMQQSSVQPAANCSIKSPQSCVVERPPSNQQQQPPPPPPQQPQPPPPQPQPAPQPPPPQQQPQQQPQPQPQQPPPPPPPQQQPPLSQCSMNNSFTPAPMIMEIPESGSTGNISIYERIPGDFGAGSYSQPSATFSLAKLQQLTNTIMDPHAMPYSHSPAVTSYATSVSLSNTGLAQLAPSHPLAGTPQAQATMTPPPNLASTTMNLTSPLLQCNMSATNIGIPHTQRLQGQMPVKGHISIRSKSAPLPSAAAHQQQLYGRSPSAVAMQAGPRALAVQRGMNMGVNLMPTPAYNVNSMNMNTLNAMNSYRMTQPMMNSSYHSNPAYMNQTAQYPMQMQMGMMGSQAYTQQPMQPNPHGNMMYTGPSHHSYMNAAGVPKQSLNGPYMRR

SEQ ID NO: 11967 - protein, 236 aa, Homo sapiens
MAFVKSGWLLRQSTILKRWKKNWFDLWSDGHLIYYDDQTRQNIEDKVHMPMDCINIRTGQECRDTQPPDGKSKDCMLQIVCRDGKTISLCAESTDDCLAWKFTLQDSRTNTAYVGSAVMTDETSVVSSPPPYTAYAAPAPEQAYGYGPYGGAYPPGTQVVYAANGQAYAVPYQYPYAETILMTRHCTAVSRGLYGQQPANQVIIRERYRDNDSDLALGMLAGAATGMALGSLFWVF

SEQ ID NO: 11968 - protein, 100 aa, Homo sapiens
MAAALALVAGVLSGAVLPLWSALPQYKKKITDRCFHHSECYSGCCLMDLDSGGAFCAPRARITMICLPQTKGATNIICPCRMGLTCISKDLMCSRRCHMI

SEQ ID NO: 11969 - protein, 95 aa, Homo sapiens
MTSKLAVALLAAFLISAALCEGAVLPRSAKELRCQCIKTYSKPFHPKFIKELRVIESGPHCANTEIIVKLSDGRELCLDPKENWVQRVVEKFLKR

SEQ ID NO: 11970 - protein, 135 aa, Homo sapiens
MDSDDEMVEEAVEGHLDDDGLPHGFCTVTYSSTDRFEGNFVHGEKNGRGKFFFFDGSTLEGYYVDDALQGQGVYTYEDGGVLQGTYVDGELNGPAQEYDTDGRLIFKGQYKDNIRHGVCWIYYPVSRVTVHSAGK

SEQ ID NO: 11971 - protein, 423 aa, Homo sapiens
MRHLGAFLFLLGVLGALTEMCEIPEMDSHLVEKLGQHLLPWMDRLSLEHLNPSIYVGLRLSSLQAGTKEDLYLHSLKLGYQQCLLGEDDGDCQGKPSMGQLALYLLALRANCEFVRGHKGDRLVSQLKWFLEDEKRAIGHDHKGHPHTSYYQYGLGILALCLHQKRVHDSVVDKLLYAVEPFHQGHHSVDTAAMAGLAFTCLKRSNFNPGRRQRITMAIRTVREEILKAQTPEGHFGNVYSTPLALQFLMTSPMRGAELGTACLKARVALLASLQDGAFQNALMISQLLPVLNHKTYIDLIFPDCLAPRVMLEPAAETIPQTQEIISVTLQVLSLLPPYRQSISVLAGSTVEDVLKKAHELGGFTYETQASLSGPYLTSVMGKAAGEREFWQLLRDPNTPLLQGIADYRPKDGETIELRLVSW

SEQ ID NO: 11972 - protein, 143 aa, Homo sapiens
MASGTTTTAVKIGIIGGTGLDDPEILEGRTEKYVDTPFGKPSDALILGKIKNVDCVLLARHGRQHTIMPSKVNYQANIWALKEEGCTHVIVTTACGSLREEIQPGDIVIIDQFIDRTICHDISKDSKREYWCPCCDDSSAPLI

SEQ ID NO: 11973 - protein, 314 aa, Homo sapiens
MALAARLWRLLPFRRGAAPGSRLPAGTSGSRGHCGPCRFRGFEVMGNPGTFKRGLLLSALSYLGFETYQVISQAAVVHATAKVEEILEQADYLYESGETEKLYQLLTQYKESEDAELLWRLARASRDVAQLSRTSEEEKKLLVYEALEYAKRALEKNESSFASHKWYAICLSDVGDYEGIKAKIANAYIIKEHFEKAIELNPKDATSIHLMGIWCYTFAEMPWYQRRIAKMLFATPPSSTYEKALGYFHRAEQVDPNFYSKNLLLLGKTYLKLHNKKLAAFWLMKAKDYPAHTEEDKQIQTEAAQLLTSFSEKN

SEQ ID NO: 11974 - protein, 697 aa, Homo sapiens
MNKSLGPVSFKDVAVDFTQEEWQQLDPEQKITYRDVMLENYSNLVSVGYHIIKPDVISKLEQGEEPWIVEGEFLLQSYPDEVWQTDDLIERIQEEENKPSRQTVFIETLIEERGNVPGKTFDVETNPVPSRKIAYKNSLCDSCEKCLTSVSEYISSDGSYARMKADECSGCGKSLLHIKLEKTHPGDQAYEFNQNGEPYTLNEESLYQKIRILEKPFEYIECQKAFQKDTVFVNHMEEKPYKWNGSEIAFLQMSDLTVHQTSHMEMKPYECSECGKSFCKKSKFIIHQRTHTGEKPYECNQCGKSFCQKGTLTVHQRTHTGEKPYECNECGKNFYQKLHLIQHQRTHSGEKPYECSYCGKSFCQKTHLTQHQRTHSGERPYVCHDCGKTFSQKSALNDHQKIHTGVKLYKCSECGKCFCRKSTLTTHLRTHTGEKPYECNECGKFFSRLSYLTVHYRTHSGEKPYECNECGKTFYLNSALMRHQRVHTGEKPYECNECGKLFSQLSYLTIHHRTHSGVKPYECSECGKTFYQNSALCRHRRIHKGEKPYECYICGKFFSQMSYLTIHHRIHSGEKPYECSECGKTFCQNSALNRHQRTHTGEKAYECYECGKCFSQMSYLTIHHRIHSGEKPFECNECGKAFSRMSYLTVHYRTHSGEKPYECTECGKKFYHKSAFNSHQRIHRRGNMNVIDVGRLL

SEQ ID NO: 11975 - protein, 311 aa, Homo sapiens
MQNVINTVKGKALEVAEYLTPVLKESKFKETGVITPEEFVAAGDHLVHHCPTWQWATGEELKVKAYLPTGKQFLVTKNVPCYKRCKQMEYSDELEAIIEEDDGDGGWVDTYHNTGITGITEAVKEITLENKDNIRLQDCSALCEEEEDEDEGEAADMEEYEESGLLETDEATLDTRKIVEACKAKTDAGGEDAILQTRTYDLYITYDKYYQTPRLWLFGYDEQRQPLTVEHMYEDISQDHVKKTVTIENHPHLPPPPMCSVHPCRHAEVMKKIIETVAEGGGELGVHMYPSLYVRLVAKWLLTIFFLRNLV

SEQ ID NO: 11976 - protein, 320 aa, Homo sapiens
MNKNTSTVVSPSLLEKDPAFQMITIAKETGLGLKVLGGINRNEGPLVYIQEIIPGGDCYKDGRLKPGDQLVSVNKESMIGVSFEEAKSIITGAKLRLESAWEIAFIRQKSDNIQPENLSCTSLIEASGEYGPQASTLSLFSSPPEILIPKTSSTPKTNNDILSSCEIKTGYNKTVQIPITSENSTVGLSNTDVASAWTENYGLQEKISLNPSVRFKAEKLEMALNYLGIQPTKEQHQALRQQVQADSKGTVSFGDFVQVARNLFCLQLDEVNVGAHEISNILDSQLLPCDSSEADEMERLKCERDDALKEVNTLKWPGQN

SEQ ID NO: 11977 - protein, 223 aa, Homo sapiens
MAAEEEDEVEWVVESIAGFLRGPDWSIPILDFVEQKCEVFDDEEESKLTYTEIHQEYKELVEKLLEGYLKEIGINEDQFQEACTSPLAKTHTSQAILQPVLAAEDFTIFKAMMVQKNIEMQLQAIRIIQERNGVLPDCLTDGSDVVSDLEHEEMKILREVLRKSKEEYDQEEERKRKKQVPTEHITEVFYCCYLLLSLHLDLTIKIYTYVELHNFKYNVNIDQ

SEQ ID NO: 11978 - protein, 350 aa, Homo sapiens
MSKEPLILWLMIEFWWLYLTPVTSETVVTEVLGHRVTLPCLYSSWSHNSNSMCWGKDQCPYSGCKEALIRTDGMRVTSRKSAKYRLQGTIPRGDVSLTILNPSESDSGVYCCRIEVPGWFNDVKINVRLNLQRASTTTHRTATTTTRRTTTTSPTTTRQMTTTPAALPTTVVTTPDLTTGTPLQMTTIAVFTTANTCLSLTPSTLPEEATGLLTPEPSKEGPILTAESETVLPSDSWSSVESTSADTVLLTSKASDTAVPEQNKTTKTGQMDGIPMSMKNEMPISQLLMIIAPSLGFVLFALFVAFLLRGKLMETYCSQKHTRLDYIGDSKNVLNDVQHGREDEDGLFTL

SEQ ID NO: 11979 - protein, 173 aa, Homo sapiens
MLEEPRPRPPPSGLAGLLFLALCSRALSNEILGLKLPGEPPLTANTVCLTLSGLSKRQLGLCLRNPDVTASALQGLHIAVHECQHQLRDQRWNCSALEGGGRLPHHSAILKRGFRESAFSFSMLAAGVMHAVATACSLGKLVSCGCGWKGSGKLPGTSRHECESTTTGWGARW

SEQ ID NO: 11980 - protein, 644 aa, Homo sapiens
MFSMRIVCLVLSVVGTAWTADSGEGDFLAEGGGVRGPRVVERHQSACKDSDWPFCSDEDWNYKCPSGCRMKGLIDEVNQDFTNRINKLKNSLFEYQKNNKDSHSLTTNIMEILRGDFSSANNRDNTYNRVSEDLRSRIEVLKRKVIEKVQHIQLLQKNVRAQLVDMKRLEVDIDIKIRSCRGSCSRALAREVDLKDYEDQQKQLEQVIAKDLLPSRDRQHLPLIKMKPVPDLVPGNFKSQLQKVPPEWKALTDMPQMRMELERPGGNEITRGGSTSYGTGSETESPRNPSSAGSWNSGSSGPGSTGNRNPGSSGTGGTATWKPGSSGPGSTGSWNSGSSGTGSTGNQNPGSPRPGSTGTWNPGSSERGSAGHWTSESSVSGSTGQWHSESGSFRPDSPGSGNARPNNPDWGTFEEVSGNVSPGTRREYHTEKLVTSKGDKELRTGKEKVTSGSTTTTRRSCSKTVTKTVIGPDGHKEVTKEVVTSEDGSDCPEAMDLGTLSGIGTLDGFRHRHPDEAAFFDTASTGKTFPGFFSPMLGEFVSETESRGSESGIFTNTKESSSHHPGIAEFPSRGKSSSYSKQFTSSTSYNRGDSTFESKSYKMADEAGSEADHEGTHSTKRGHAKSRPVRGIHTSPLGKPSLSP

SEQ ID NO: 11981 - protein, 1953 aa, Homo sapiens
MGVKKKKEMQVAALTICHQDLETLKSFADVEGKNLASLLLHCVQLTDGVSQIHYIKQIVPLLEKADKNGMCDPTIQSCLDILAGIYLSLSLKNPLKKVLASSLNSLPDFFLPEAMHRFTSRLQEELNTTDLYSYRKVTDNISSCMENFNLGRASVNNLLKNVLHFLQKSLIEILEENRKCAGNHIIQTQLMNDLLVGIRVSMMLVQKVQDFQGNLWKTSDSPIWQNMCGLLSIFTKVLSDDDLLQTVQSTSGLAIILFIKTMFHPSEKIPHLISSVLLRSVDCTSVPEWFMSSCRSLCCGDISQSAVLFLCQGTLAMLDWQNGSMGRSGEALLLDTAHVLFTLSSQIKEPTLEMFLSRILASWTNSAIQVLESSSPSLTDSLNGNSSIVGRLLEYVYTHWEHPLDALRHQTKIMFKNLLQMHRLTVEGADFVPDPFFVELTESLLRLEWHIKGKYTCLGCLVECIGVEHILAIDKTIPSQILEVMGDQSLVPYASDLLETMFRNHKSHLKSQTAESSWIDQWHETWVSPLLFILCEGNLDQKSYVIDYYLPKLLSYSPESLQYMVKILQTSIDAKTGQEQSFPSLGSCNSRGALGALMACLRIARAHGHLQSATDTWENLVSDARIKQGLIHQHCQVRIDTLGLLCESNRSTEIVSMEEMQWIQFFITYNLNSQSPGVRQQICSLLKKLFCRIQESSQVLYKLEQSKSKREPENELTKQHPSVSLQQYKNFMSSICNSLFEALFPGSSYSTRFSALTILGSIAEVFHVPEGRIYTVYQLSHDIDVGRFQTLMECFTSTFEDVKILAFDLLMKLSKTAVHFQDSGKLQGLFQAALELSTSTKPYDCVTASYLLNFLIWQDALPSSLSAYLTQQVACDNGDRPAAVVERNTLMVIKCLMENLEEEVSQAENSLLQAAAAFPMYGRVHCITGALQKLSLNSLQLVSEWRPVVEKLLLMSYRLSTVVSPVIQSSSPEGLIPMDTDSESASRLQMILNEIQPRDTNDYFNQAKILKEHDSFDMKDLNASVVNIDTSTEIKGKEVKTCDVTAQMVLVCCWRSMKEVALLLGMLCQLLPMQPVPESSDGLLTVEQVKEIGDYFKQHLLQSRHRGAFELAYTGFVKLTEVLNRCPNVSLQKLPEQWLWSVLEEIKCSDPSSKLCATRRSAGIPFYIQALLASEPKKGRMDLLKITMKELISLAGPTDDIQSTVPQVHALNILRALFRDTRLGENIIPYVADGAKAAILGFTSPVWAVRNSSTLLFSALITRIFGVKRAKDEHSKTNRMTGREFFSRFPELYPFLLKQLETVANTVDSDMGEPNRHPSMFLLLLVLERLYASPMDGTSSALSMGPFVPFIMRCGHSPVYHSREMAARALVPFVMIDHIPNTIRTLLSTLPSCTDQCFRQNHIHGTLLQVFHLLQAYSDSKHGTNSDFQHELTDITVCTKAKLWLAKRQNPCLVTRAVYIDILFLLTCCLNRSAKDNQPVLESLGFWEEVRGIISGSELITGFPWAFKVPGLPQYLQSLTRLAIAAVWAAAAKSGERETNVPISFSQLLESAFPEVRSLTLEALLEKFLAAASGLGEKGVPPLLCNMGEKFLLLAMKENHPECFCKILKILHCMDPGEWLPQTEHCVHLTPKEFLIWTMDIASNERSEIQSVALRLASKVISHHMQTCVENRELIAAELKQWVQLVILSCEDHLPTESRLAVVEVLTSTTPLFLTNPHPILELQDTLALWKCVLTLLQSEEQAVRDAATETVTTAMSQENTCQSTEFAFCQVDASIALALALAVLCDLLQQWDQLAPGLPILLGWLLGESDDLVACVESMHQVEEDYLFEKAEVNFWAETLIFVKYLCKHLFCLLSKSGWRPPSPEMLCHLQRMVSEQCHLLSQFFRELPPAAEFVKTVEFTRLRIQEERTLACLRLLAFLEGKEGEDTLVLSVWDSYAESRQLTLPRTEAAC

SEQ ID NO: 11982 - protein, 1352 aa, Homo sapiens
MRHGVAWALLVAAALGLGARGVRGAVALADFYPFGAERGDAVTPKQDDGGSGLRPLSVPFPFFGAEHSGLYVNNNGIISFLKEVSQFTPVAFPIAKDRCVVAAFWADVDNRRAGDVYYREATDPAMLRRATEDVRHYFPELLDFNATWVFVATWYRVTFFGGSSSSPVNTFQTVLITDGKLSFTIFNYESIVWTTGTHASSGGNATGLGGIAAQAGFNAGDGQRYFSIPGSRTADMAEVETTTNVGVPGRWAFRIDDAQVRVGGCGHTTSVCLALRPCLNGGKCIDDCVTGNPSYTCSCLSGFTGRRCHLDVNECASQPCQNGGTCTHGINSFRCQCPAGFGGPTCETAQSPCDTKECQHGGQCQVENGSAVCVCQAGYTGAACEMDVDDCSPDPCLNGGSCVDLVGNYTCLCAEPFKGLRCETGDHPVPDACLSAPCHNGGTCVDADQGYVCECPEGFMGLDCRERVPDDCECRNGGRCLGANTTLCQCPLGFFGLLCEFEITAMPCNMNTQCPDGGYCMEHGGSYLCVCHTDHNASHSLPSPCDSDPCFNGGSCDAHDDSYTCECPRGFHGKHCEKARPHLCSSGPCRNGGTCKEAGGEYHCSCPYRFTGRHCEIGKPDSCASGPCHNGGTCFHYIGKYKCDCPPGFSGRHCEIAPSPCFRSPCVNGGTCEDRDTDFFCHCQAGYMGRRCQAEVDCGPPEEVKHATLRFNGTRLGAVALYACDRGYSLSAPSRIRVCQPHGVWSEPPQCLEIDECRSQPCLHGGSCQDRVAGYLCLCSTGYEGAHCELERDECRAHPCRNGGSCRNLPGAYVCRCPAGFVGVHCETEVDACDSSPCQHGGRCESGGGAYLCVCPESFFGYHCETVSDPCFSSPCGGRGYCLASNGSHSCTCKVGYTGEDCAKELFPPTALKMERVEESGVSISWNPPNGPAARQMLDGYAVTYVSSDGSYRRTDFVDRTRSSHQLQALAAGRAYNISVFSVKRNSNNKNDISRPAVLLARTRPRPVEGFEVTNVTASTISVQWALHRIRHATVSGVRVSIRHPEALRDQATDVDRSVDRFTFRALLPGKRYTIQLTTLSGLRGEEHPTESLATAPTHVWTRPLPPANLTAARVTATSAHVVWDAPTPGSLLEAYVINVTTSQSTKSRYVPNGKLASYTVRDLLPGRRYQLSVIAVQSTELGPQHSEPAHLYIITSPRDGADRRWHQGGHHPRVLKNRPPPARLPELRLLNDHSAPETPTQPPRFSELVDGRGRVSARFGGSPSKAATVRSHVPGNCSENPCQNGGTCVPGADAHSCDCGPGFKGRRCELACIKVSRPCTRLFSETKAFPVWEGGVCHHVKQSKSQTLEKS

SEQ ID NO: 11983 - protein, 163 aa, Homo sapiens
MMLHSALGLCLLLVTVSSNLAIAIKKEKRPPQTLSRGWGDDITWVQTYEEGLFYAQKSKKPLMVIHHLEDCQYSQALKKVFAQNEEIQEMAQNKFIMLNLMHETTDKNLSPDGQYVPRIMFVDPSLTVRADIAGRYSNRLYTYEPRDLPLCKYSQMISNSGHS

SEQ ID NO: 11984 - protein, 188 aa, Homo sapiens
MEKIPVSAFLLLVALSYTLARDTTVKPGAKKDTKDSRPKLPQTLSRGWGDQLIWTQTYEEALYKSKTSNKPLMIIHHLDECPHSQALKKVFAENKEIQKLAEQFVLLNLVYETTDKHLSPDGQYVPRIMFVDPSLTVRADITGRYSNRLYAYEPADTALCKCDLQFGCCPRVEHLYCCSDGTRGCMVR

SEQ ID NO: 11985 - protein, 465 aa, Homo sapiens
MPYFTRLILFLFCLMVLVESRKPKRKRWTGQVEMPKPSHLYKKNLDVTKIRKGKPQQLLRVDEHDFSMRPAFGGPAIPVGVDVQVESLDSISEVDMDFTMTLYLRHYWKDERLAFSSASNKSMTFDGRLVKKIWVPDVFFVHSKRSFTHDTTTDNIMLRVFPDGHVLYSMRITVTAMCNMDFSHFPLDSQTCSLELESYAYTDEDLMLYWKNGDESLKTDEKISLSQFLIQKFHTTSRLAFYSSTGWYNRLYINFTLRRHIFFFLLQTYFPATLMVMLSWVSFWIDRRAVPARVSLGITTVLTMTTIITGVNASMPRVSYVKAVDIYLWVSFVFVFLSVLEYAAVNYLTTVQERKERKLREKFPCMCGMLHSKTMMLDGSYSESEANSLAGYPRSHILTEEERQDKIVVHLGLSGEANAARKKGLLKGQTGFRIFQNTHAIDKYSRLIFPASYIFFNLIYWSVFS

SEQ ID NO: 11986 - protein, 134 aa, Homo sapiens
MRPQQAPVSGKVFIQRDYSSGTRCQFQTKFPAELENRIDRQQFEETVRTLNNLYAEAEKLGGQSYLEGCLACLTAYTIFLCMETHYEKVLKKVSKYIQEQNEKIYAPQGLLLTDPIERGLRVFRLKLPFMKTEA

SEQ ID NO: 11987 - protein, 672 aa, Homo sapiens
MKQRFSALQLLKLLLLLQPPLPRALREALCPEPCNCVPDGALRCPGPTAGLTRLSLAYLPVKVIPSQAFRGLNEVIKIEISQIDSLERIEANAFDNLLNLSEILIQNTKNLRYIEPGAFINLPRLKYLSICNTGIRKFPDVTKVFSSESNFILEICDNLHITTIPGNAFQGMNNESVTLKLYGNGFEEVQSHAFNGTTLTSLELKENVHLEKMHNGAFRGATGPKTLDISSTKLQALPSYGLESIQRLIATSSYSLKKLPSRETFVNLLEATLTYPSHCCAFRNLPTKDYSSMLAESELSGWDYEYGFCLPKTPRCAPEPDAFNPCEDIMGYDFLRVLIWLINILAIMGNMTVLFVLLTSRYKLTVPRFLMCNLSFADFCMGLYLLLIASVDSQTKGQYYNHAIDWQTGSGCSTAGFFTVFASELSVYTLTVITLERWHTITYAIHLDQKLRLRHAILIMLGGWLFSSLIAMLPLVGVSNYMKVSICFPMDVETTLSQVYILTILILNVVAFFIICACYIKIYFAVRNPELMATNKDTKIAKKMAILIFTDFTCMAPISFFAISAAFKVPLITVTNSKVLLVLFYPINSCANPFLYAIFTKTFQRDFFLLLSKFGCCKRRAELYRRKDFSAYTSNCKNGFTGSNKPSQSTLKLSTLHCQGTALLDKTRYTEC

SEQ ID NO: 11988 - protein, 321 aa, Homo sapiens
MRLPRRAALGLLPLLLLLPPAPEAAKKPTPCHRCRGLVDKFNQGMVDTAKKNFGGGNTAWEEKTLSKYESSEIRLLEILEGLCESSDFECNQMLEAQEEHLEAWWLQLKSEYPDLFEWFCVKTLKVCCSPGTYGPDCLACQGGSQRPCSGNGHCSGDGSRQGDGSCRCHMGYQGPLCTDCMDGYFSSLRNETHSICTACDESCKTCSGLTNRDCGECEVGWVLDEGACVDVDECAAEPPPCSAAQFCKNANGSYTCEDVDECSLAEKTCVRKNENCYNTPGSYVCVCPDGFEETEDACVPPAEAEATEGESPTQLPSREDL

SEQ ID NO: 11989 - protein, 1721 aa, Homo sapiens
MAGAWLRWGLLLWAGLLASSAHGRLRRITYVVHPGPGLAAGALPLSGPPRSRTFNVALNARYSRSSAAAGAPSRASPGVPSERTRRTSKPGGAALQGLRPPPPPPPEPARPAVPGGQLHPNPGGHPAAAPFTKQGRQVVRSKVPQETQSGGGSRLQVHQKQQLQGVNVCGGRCCHGWSKAPGSQRCTKPSCVPPCQNGGMCLRPQLCVCKPGTKGKACETIAAQDTSSPVFGGQSPGAASSWGPPEQAAKHTSSKKADTLPRVSPVAQMTLTLKPKPSVGLPQQIHSQVTPLSSQSVVIHHGQTQEYVLKPKYFPAQKGISGEQSTEGSFPLRYVQDQVAAPFQLSNHTGRIKVVFTPSICKVTCTKGSCQNSCEKGNTTTLISENGHAADTLTATNFRVVICHLPCMNGGQCSSRDKCQCPPNFTGKLCQIPVHGASVPKLYQHSQQPGKALGTHVIHSTHTLPLTVTSQQGVKVKFPPNIVNIHVKHPPEASVQIHQVSRIDGPTGQKTKEAQPGQSQVSYQGLPVQKTQTIHSTYSHQQVIPHVYPVAAKTQLGRCFQETIGSQCGKALPGLSKQEDCCGTVGTSWGFNKCQKCPKKPSYHGYNQMMECLPGYKRVNNTFCQDINECQLQGVCPNGECLNTMGSYRCTCKIGFGPDPTFSSCVPDPPVISEEKGPCYRLVSSGRQCMHPLSVHLTKQLCCCSVGKAWGPHCEKCPLPGTAAFKEICPGGMGYTVSGVHRRRPIHHHVGKGPVFVKPKNTQPVAKSTHPPPLPAKEEPVEALTFSREHGPGVAEPEVATAPPEKEIPSLDQEKTKLEPGQPQLSPGISTIHLHPQFPVVIEKTSPPVPVEVAPEASTSSASQVIAPTQVTEINECTVNPDICGAGHCINLPVRYTCICYEGYRFSEQQRKCVDIDECTQVQHLCSQGRCENTEGSFLCICPAGFMASEEGTNCIDVDECLRPDVCGEGHCVNTVGAFRCEYCDSGYRMTQRGRCEDIDECLNPSTCPDEQCVNSPGSYQCVPCTEGFRGWNGQCLDVDECLEPNVCANGDCSNLEGSYMCSCHKGYTRTPDHKHCRDIDECQQGNLCVNGQCKNTEGSFRCTCGQGYQLSAAKDQCEDIDECQHRHLCAHGQCRNTEGSFQCVCDQGYRASGLGDHCEDINECLEDKSVCQRGDCINTAGSYDCTCPDGFQLDDNKTCQDINECEHPGLCGPQGECLNTEGSFHCVCQQGFSISADGRTCEDIDECVNNTVCDSHGFCDNTAGSFRCLCYQGFQAPQDGQGCVDVNECELLSGVCGEAFCENVEGSFLCVCADENQEYSPMTGQCRSRTSTDLDVDVDQPKEEKKECYYNLNDASLCDNVLAPNVTKQECCCTSGVGWGDNCEIFPCPVLGTAEFTEMCPKGKGFVPAGESSSEAGGENYKDADECLLFGQEICKNGFCLNTRPGYECYCKQGTYYDPVKLQCFDMDECQDPSSCIDGQCVNTEGSYNCFCTHPMVLDASEKRCIRPAESNEQIEETDVYQDLCWEHLSDEYVCSRPLVGKQTTYTECCCLYGEAWGMQCALCPLKDSDDYAQLCNIPVTGRRQPYGRDALVDFSEQYTPEADPYFIQDRFLNSFEELQAEECGILNGCENGRCVRVQEGYTCDCFDGYHLDTAKMTCVDVNECDELNNRMSLCKNAKCINTDGSYKCLCLPGYVPSDKPNYCTPLNTALNLEKDSDLE

SEQ ID NO: 11990 - protein, 71 aa, Homo sapiens
MVLLRVLILLLSWAAGMGDRDFDDGVLGLAWVGAPSGSSGGICEKSKLYSDVPTMGKLHSKEKPIKSSSPN

SEQ ID NO: 11991 - protein, 939 aa, Homo sapiens
MTDSKYFTTTKKGEIFELKAELNSDKKEKKKEAVKKVIASMTVGKDVSALFPDVVNCMQTDNLELKKLVYLYLMNYAKSQPDMAIMAVNTFVKDCEDPNPLIRALAVRTMGCIRVDKITEYLCEPLRKCLKDEDPYVRKTAAVCVAKLHDINAQLVEDQGFLDTLKDLISDSNPMVVANAVAALSEIAESHPSSNLLDLNPQSINKLLTALNECTEWGQIFILDCLANYMPKDDREAQSICERVTPRLSHANSAVVLSAVKVLMKFMEMLSKDLDYYGTLLKKLAPPLVTLLSAEPELQYVALRNINLIVQKRPEILKHEMKVFFVKYNDPIYVKLEKLDIMIRLASQANIAQVLAELKEYATEVDVDFVRKAVRAIGRCAIKVEQSAERCVSTLLDLIQTKVNYVVQEAIVVIKDIFRKYPNKYESVIATLCENLDSLDEPEARAAMIWIVGEYAERIDNADELLESFLEGFHDESTQVQLQLLTAIVKLFLKKPTETQELVQQVLSLATQDSDNPDLRDRGYIYWRLLSTDPVAAKEVVLAEKPLISEETDLIEPTLLDELICYIGTLASVYHKPPSAFVEGGRGVVHKSLPPRTASSESAESPETAPTGAPPGEQPDVIPAQGDLLGDLLNLDLGPPVSGPPLATSSVQMGAVDLLGGGLDSLIGGTNFVAPPTAAVPANLGAPIGSGLSDLFDLTSGVGTLSGSYVAPKAVWLPAMKAKGLEISGTFTRQVGSISMDLQLTNKALQVMTDFAIQFNRNSFGLAPAAPLQVHAPLSPNQTVEISLPLSTVGSVMKMEPLNNLQVAVKNNIDVFYFSTLYPLHILFVEDGKMDRQMFLATWKDIPNENEAQFQIRDCPLNAEAASSKLQSSNIFTVAKRNVEGQDMLYQSLKLTNGIWVLAELRIQPGNPSCTLSLKCRAPEVSQHVYQAYETILKN

SEQ ID NO: 11992 - protein, 359 aa, Homo sapiens
MPSSVSWGILLLAGLCCLVPVSLAEDPQGDAAQKTDTSHHDQDHPTFNKITPNLAEFAFSLYRQLAHQSNSTNIFFSPVSIATAFAMLSLGTKADTHDEILEGLNFNLTEIPEAQIHEGFQELLRTLNQPDSQLQLTTGNGLFLSEGLKLVDKFLEDVKKLYHSEAFTVNFGDTEEAKKQINDYVEKGTQGKIVDLVKELDRDTVFALVNYIFFKGKWERPFEVKDTEEEDFHVDQVTTVKVPMMKRLGMFNIQHCKKLSSWVLLMKYLGNATAIFFLPDEGKLQHLENELTHDIITKFLENEDRRSASLHLPKLSITGTYDLKSVLGQLGITKVFSNGADLSGVTEEAPLKLSKVRSP

SEQ ID NO: 11993 - protein, 351 aa, Homo sapiens
MTHIVREVDRPGSKVNKKEVVEAVTIVETPPMVVVGIVGYVETPRGLRTFKTVFAEHISDECKRRFYKNWHKSKKKAFTKYCKKWQDEDGKKQLEKDFSSMKKYCQVIRVIAHTQMRLLPLRQKKAHLMEIQVNGGTVAEKLDWARERLEQQVPVNQVFGQDEMIDVIGVTKGKGYKGVTSRWHTKKLPRKTHRGLRKVACIGAWHPARVAFSVARAGQKGYHHRTEINKKIYKIGQGYLIKDGKLIKNNASTDYDLSDKSINPLGGFVHYGEVTNDFVMLKGCVVGTKKRVLTLRKSLLVQTKRRALEKIDLKFIDTTSKFGHGRFQTMEEKKAFMGPLKKDRIAKEEGA

SEQ ID NO: 11994 - protein, 476 aa, Homo sapiens
MAGRGGSALLALCGALAACGWLLGAEAQEPGAPAAGMRRRRRLQQEDGISFEYHRYPELREALVSVWLQCTAISRIYTVGRSFEGRELLVIELSDNPGVHEPGEPEFKYIGNMHGNEAVGRELLIFLAQYLCNEYQKGNETIVNLIHSTRIHIMPSLNPDGFEKAASQPGELKDWFVGRSNAQGIDLNRNFPDLDRIVYVNEKEGGPNNHLLKNMKKIVDQNTKLAPETKAVIHWIMDIPFVLSANLHGGDLVANYPYDETRSGSAHEYSSSPDDAIFQSLARAYSSFNPAMSDPNRPPCRKNDDDSSFVDGTTNGGAWYSVPGGMQDFNYLSSNCFEITVELSCEKFPPEETLKTYWEDNKNSLISYLEQIHRGVKGFVRDLQGNPIANATISVEGIDHDVTSAKDGDYWRLLIPGNYKLTASAPGYLAITKKVAVPYSPAAGVDFELESFSERKEEEKEELMEWWKMMSETLNF

SEQ ID NO: 11995 - protein, 469 aa, Homo sapiens
MFSEQAAQRAHTLLSPPSANNATFARVPVATYTNSSQPFRLGERSFSRQYAHIYATRLIQMRPFLENRAQQHWGSGVGVKKLCELQPEEKCCVVGTLFKAMPLQPSILREVSEEHNLLPQPPRSKYIHPDDELVLEDELQRIKLKGTIDVSKLVTGTVLAVFGSVRDDGKFLVEDYCFADLAPQKPAPPLDTDRFVLLVSGLGLGGGGGESLLGTQLLVDVVTGQLGDEGEQCSAAHVSRVILAGNLLSHSTQSRDSINKAKYLTKKTQAASVEAVKMLDEILLQLSASVPVDVMPGEFDPTNYTLPQQPLHPCMFPLATAYSTLQLVTNPYQATIDGVRFLGTSGQNVSDIFRYSSMEDHLEILEWTLRVRHISPTAPDTLGCYPFYKTDPFIFPECPHVYFCGNTPSFGSKIIRGPEDQTVLLVTVPDFSATQTACLVNLRSLACQPISFSGFGAEDDDLGGLGLGP

SEQ ID NO: 11996 - protein, 88 aa, Homo sapiens
MTEVMMNTQPMEEIGLSPRKDGLSYQIFPDPSDFDRCCKLKDRLPSIVVEPTEGEVESGELRWPPEEFLVQEDEQDNCEETAKENKEQ

SEQ ID NO: 11997 - protein, 1446 aa, Homo sapiens
MLRTSGLALLALVSAVGPSQASGFTEKGLSLLGYQLCSHRVTHTVQKVEAVQTSYTSYVSCGGWIPWRRCPKMVYRTQYLVVEVPESRNVTDCCEGYEQLGLYCVLPLNQSGQFTSRPGACPAEGPEPSTSPCSLDIDCPGLEKCCPWSGGRYCMAPAPQAPERDPVGSWYNVTILVKMDFKELQQVDPRLLNHMRLLHSLVTSALQPMASTVHHLHSAPGNASTTVSRLLLGLPRPLPVADVSTLLGDIAKRVYEVISVQVQDVNECFYEELNACSGRELCANLEGSYWCVCHQEAPATSPRKLNLEWEDCPPVSDYVVLNVTSDSFQVSWRLNSTQNHTFHVRVYRGMELLRSARTQSQALAVAGLEAGVLYRVKTSYQGCGADVSTTLTIKTNAQVFEVTIKIVNHNLTEKLLNRSSVEYQDFSRQLLHEVESSFPPVVSDLYRSGKLRMQIVSLQAGSVVVRLKLTVQDPGFPMGISTLAPILQPLLASTVFQIDRQGTRVQDWDECVDSAEHDCSPAAWCINLEGSYTCQCRTTRDATPSRAGRACEGDLVSPMGGGLSAATGVTVPGLGTGTAALGLENFTLSPSPGYPQGTPAAGQAWTPEPSPRRGGSNVVGYDRNNTGKGVEQEVPSTAPGLGMDQGSPSQVNPSQGSPSQGSLRQESTSQASPSQRSTSQGSPSQVNPSQRSTSHANSSQGSPSQGSPSQESPSQGSTSQASPSHRNTIGVIGTTSSPKATGSTHSFPPGATDGPLALPGQLQGNSIMEPPSWPSPTEDPTGHFLWHATRSTRETLLNPTWLRNEDSGPSGSVDLPLTSTLTALKTPACVPVSIGRIMVSNVTSTGFHLAWEADLAMDSTFQLTLTSMWSPAVVLETWNTSVTLSGLEPGVLHLVEIMAKACGKEGARAHLKVRTAARKLIGKVRIKNVRYSESFRNASSQEYRDFLELFFRMVRGSLPATMCQHMDAGGVRMEVVSVTNGSIVVEFHLLIIADVDVQEVSAAFLTAFQTVPLLEVIRGDTFIQDYDECERKEDDCVPGTSCRNTLGSFTCSCEGGAPDFPVEYSERPCEGDSPGNETWATSPERPLTTAGTKAAFVQGTSPTPQGLPQRLNLTGAVRVLCEIEKVVVAIQKRFLQQESIPESSLYLSHPSCNVSHSNGTHVLLEAGWSECGTLMQSNMTNTVVRTTLRNDLSQEGIIHHLKILSPIYCAFQNDLLTSSGFTLEWGVYTIIEDLHGAGNFVTEMQLFIGDSPIPQNYSVSASDDVRIEVGLYRQKSNLKVVLTECWATPSSNARDPITFSFINNSCPVPNTYTNVIENGNSNKAQFKLRIFSFINDSIVYLHCKLRVCMESPGATCKINCNNFRLLQNSETSATHQMSWGPLIRSEGEPPHAEAGLGAGYVVLIVVAIFVLVAGTATLLIVRYQRMNGRYNFKIQSNNFSYQVFYE

SEQ ID NO: 11998 - protein, 691 aa, Homo sapiens
MIRGRNSATSADEQPHIGNYRLLKTIGKGNFAKVKLARHILTGKEVAVKIIDKTQLNSSSLQKLFREVRIMKVLNHPNIVKLFEVIETEKTLYLVMEYASGGEVFDYLVAHGRMKEKEARAKFRQIVSAVQYCHQKFIVHRDLKAENLLLDADMNIKIADFGFSNEFTFGNKLDTFCGSPPYAAPELFQGKKYDGPEVDVWSLGVILYTLVSGSLPFDGQNLKELRERVLRGKYRIPFYMSTDCENLLKKFLILNPSKRGTLEQIMKDRWMNVGHEDDELKPYVEPLPDYKDPRRTELMVSMGYTREEIQDSLVGQRYNEVMATYLLLGYKSSELEGDTITLKPRPSADLTNSSAPSPSHKVQRSVSANPKQRRFSDQAGPAIPTSNSYSKKTQSNNAENKRPEEDRESGRKASSTAKVPASPLPGLERKKTTPTPSTNSVLSTSTNRSRNSPLLERASLGQASIQNGKDSTAPQRVPVASPSAHNISSSGGAPDRTNFPRGVSSRSTFHAGQLRQVRDQQNLPYGVTPASPSGHSQGRRGASGSIFSKFTSKFVRRNLNEPESKDRVETLRPHVVGSGGNDKEKEEFREAKPRSLRFTWSMKTTSSMEPNEMMREIRKVLDANSCQSELHEKYMLLCMHGTPGHEDFVQWEMEVCKLPRLSLNGVRFKRISGTSMAFKNIASKIANELKL

SEQ ID NO: 11999 - protein, 1318 aa, Homo sapiens
MLRTSGLALLALVSAVGPSQASGFTEKGLSLLGYQLCSHRVTHTVQKVEAVQTSYTSYVSCGGWIPWRRCPKMVYRTQYLVVEVPESRNVTDCCEGYEQLGLYCVLPLNQSGQFTSRPGACPAEGPEPSTSPCSLDIDCPGLEKCCPWSGGRYCMAPAPQAPERDPVGSWYNVTILVKMDFKELQQVDPRLLNHMRLLHSLVTSALQPMASTVHHLHSAPGNASTTVSRLLLGLPRPLPVADVSTLLGDIAKRVYEVISVQVQDVNECFYEELNACSGRELCANLEGSYWCVCHQEAPATSPRKLNLEWEDCPPVSDYVVLNVTSDSFQVSWRLNSTQNHTFHVRVYRGMELLRSARTQSQALAVAGLEAGVLYRVKTSYQGCGADVSTTLTIKTNAQVFEVTIKIVNHNLTEKLLNRSSVEYQDFSRQLLHEVESSFPPVVSDLYRSGKLRMQIVSLQAGSVVVRLKLTVQDPGFPMGISTLAPILQPLLASTVFQIDRQGTRVQDWDECVDSAEHDCSPAAWCINLEGSYTCQCRTTRDATPSRAGRACEGDLVSPMGGGLSAATGVTVPGLGTGTAALGLENFTLSPSPGYPQGTPAAGQAWTPEPSPRRGGSNVVGYDRNNTGKGVEQELQGNSIMEPPSWPSPTEDPTGHFLWHATRSTRETLLNPTWLRNEDSGPSGSVDLPLTSTLTALKTPACVPVSIGRIMVSNVTSTGFHLAWEADLAMDSTFQLTLTSMWSPAVVLETWNTSVTLSGLEPGVLHLVEIMAKACGKEGARAHLKVRTAARKLIGKVRIKNVRYSESFRNASSQEYRDFLELFFRMVRGSLPATMCQHMDAGGVRMEVVSVTNGSIVVEFHLLIIADVDVQEVSAAFLTAFQTVPLLEVIRGDTFIQDYDECERKEDDCVPGTSCRNTLGSFTCSCEGGAPDFPVEYSERPCEGDSPGNETWATSPERPLTTAGTKAAFVQGTSPTPQGLPQRLNLTGAVRVLCEIEKVVVAIQKRFLQQESIPESSLYLSHPSCNVSHSNGTHVLLEAGWSECGTLMQSNMTNTVVRTTLRNDLSQEGIIHHLKILSPIYCAFQNDLLTSSGFTLEWGVYTIIEDLHGAGNFVTEMQLFIGDSPIPQNYSVSASDDVRIEVGLYRQKSNLKVVLTECWATPSSNARDPITFSFINNSCPVPNTYTNVIENGNSNKAQFKLRIFSFINDSIVYLHCKLRVCMESPGATCKINCNNFRLLQNSETSATHQMSWGPLIRSEGEPPHAEAGLGAGYVVLIVVAIFVLVAGTATLLIVRYQRMNGRYNFKIQSNNFSYQVFYE

SEQ ID NO: 12000 - protein, 204 aa, Homo sapiens
MEAAGSPAATETGKYIASTQRPDGTWRKQRRVKEGYVPQEEVPVYENKYVKFFKSKPELPPGLSPEATAPVTPSRPEGGEPGLSKTAKRNLKRKEKRRQQQEKGEAEALSRTLDKVSLEETAQLPSAPQGSRAAPTAASDQPDSAATTEKAKKIKNLKKKLRQVEELQQRIQAGEVSQPSKEQLEKLARRRALEEELEDLELGL

SEQ ID NO: 12001 - protein, 226 aa, Homo sapiens
MAAAAAAAGAAGSAAPAAAAGAPGSGGAPSGSQGVLIGDRLYSGVLITLENCLLPDDKLRFTPSMSSGLDTDTETDLRVVGCELIQAAGILLRLPQVAMATGQVLFQRFFYTKSFVKHSMEHVSMACVHLASKIEEAPRRIRDVINVFHRLRQLRDKKKPVPLLLDQDYVNLKNQIIKAERRVLKELGFCVHVKHPHKIIVMYLQVLECERNQHLVQTSWVASEGK

SEQ ID NO: 12002 - protein, 269 aa, Homo sapiens
MSAALFSLDGPARGAPWPAEPAPFYEPGRAGKPGRGAEPGALGEPGAAAPAMYDDESAIDFSAYIDSMAAVPTLELCHDELFADLFNSNHKAGGAGPLELLPGGPARPLGPGPAAPRLLKREPDWGDGDAPGSLLPAQVAACAQTVVSLAAAGQPTPPTSPEPPRSSPRQTPAPGPAREKSAGKRGPDRGSPEYRQRRERNNIAVRKSRDKAKRRNQEMQQKLVELSAENEKLHQRVEQLTRDLAGLRQFFKQLPSPPFLPAAGTADCR

SEQ ID NO: 12003 - protein, 866 aa, Homo sapiens
MGNRGMEELIPLVNKLQDAFSSIGQSCHLDLPQIAVVGGQSAGKSSVLENFVGRDFLPRGSGIVTRRPLILQLIFSKTEHAEFLHCKSKKFTDFDEVRQEIEAETDRVTGTNKGISPVPINLRVYSPHVLNLTLIDLPGITKVPVGDQPPDIEYQIKDMILQFISRESSLILAVTPANMDLANSDALKLAKEVDPQGLRTIGVITKLDLMDEGTDARDVLENKLLPLRRGYIGVVNRSQKDIEGKKDIRAALAAERKFFLSHPAYRHMADRMGTPHLQKTLNQQLTNHIRESLPALRSKLQSQLLSLEKEVEEYKNFRPDDPTRKTKALLQMVQQFGVDFEKRIEGSGDQVDTLELSGGARINRIFHERFPFELVKMEFDEKDLRREISYAIKNIHGVRTGLFTPDMAFEAIVKKQIVKLKEPSLKCVDLVVSELATVIKKCAEKLSSYPRLREETERIVTTYIREREGRTKDQILLLIDIEQSYINTNHEDFIGFANAQQRSTQLNKKRAIPNQVIRRGWLTINNISLMKGGSKEYWFVLTAESLSWYKDEEEKEKKYMLPLDNLKIRDVEKGFMSNKHVFAIFNTEQRNVYKDLRQIELACDSQEDVDSWKASFLRAGVYPEKDQAENEDGAQENTFSMDPQLERQVETIRNLVDSYVAIINKSIRDLMPKTIMHLMINNTKAFIHHELLAYLYSSADQSSLMEESADQAQRRDDMLRMYHALKEALNIIGDISTSTVSTPVPPPVDDTWLQSASSHSPTPQRRPVSSIHPPGRPPAVRGPTPGPPLIPVPVGAAASFSAPPIPSRPGPQSVFANSDLFPAPPQIPSRPVRIPPGIPPGVPSRRPPAAPSRPTIIRPAEPSLLD

SEQ ID NO: 12004 - protein, 544 aa, Homo sapiens
MVGEGSIQSSRYKKESKSGLVKPGSEADFSSSSSTGSISAPEVHMSTAGSKRSSSSRNRGPHGRSNGASSHKPGSSPSSPREKDLLSMLCRNQLSPVNIHPSYAPSSPSSSNSGSYKGSDCSPIMRRSGRYMSCGENHGVRPPNPEQYLTPLQQKEVTVRHLKTKLKESERRLHERESEIVELKSQLARMREDWIEEECHRVEAQLALKEARKEIKQLKQVIETMRSSLADKDKGIQKYFVDINIQNKKLESLLQSMEMAHSGSLRDELCLDFPCDSPEKSLTLNPPLDTMADGLSLEEQVTGEGADRELLVGDSIANSTDLFDEIVTATTTESGDLELVHSTPGANVLELLPIVMGQEEGSVVVERAVQTDVVPYSPAISELIQSVLQKLQDPCPSSLASPDESEPDSMESFPESLSALVVDLTPRNPNSAILLSPVETPYANVDAEVHANRLMRELDFAACVEERLDGVIPLARGGVVRQYWSSSFLVDLLAVAAPVVPTVLWAFSTQRGGTDPVYNIGALLRGCCVVALHSLRRTAFRIKT

SEQ ID NO: 12005 - protein, 90 aa, Homo sapiens
MNMKPATASALLLLLLGLAWTQGSHGWGADASSLQKRAGRDDQNYNYNQHAYPTAYGGKYSVKTPAKGGVSPSSSASRVQPGLLQWVKFW

SEQ ID NO: 12006 - protein, 430 aa, Homo sapiens
MALEGMSKRKRKRSVQEGENPDDGVRGSPPEDYRLGQVASSLFRGEHHSRGGTGRLASLFSSLEPQIQPVYVPVPKQTIKKTKRNEEEESTSQIERPLSQEPAKKVKAKKKHTNAEKKLADRESALASADLEEEIHQKQGQKRKNSQPGVKVADRKILDDTEDTVVSQRKKIQINQEEERLKNERTVFVGNLPVTCNKKKLKSFFKEYGQIESVRFRSLIPAEGTLSKKLAAIKRKIHPDQKNINAYVVFKEESAATQALKRNGAQIADGFRIRVDLASETSSRDKRSVFVGNLPYKVEESAIEKHFLDCGSIMAVRIVRDKMTGIGKGFGYVLFENTDSVHLALKLNNSELMGRKLRVMRSVNKEKFKQQNSNPRLKNVSKPKQGLNFTSKTAEGHPKSLFIGEKAVLLKTKKKGQKKSGRPKKQRKQK

SEQ ID NO: 12007 - protein, 518 aa, Homo sapiens
MGFHLITQLKGMSVVLVLLPTLLLVMLTGAQRACPKNCRCDGKIVYCESHAFADIPENISGGSQGLSLRFNSIQKLKSNQFAGLNQLIWLYLDHNYISSVDEDAFQGIRRLKELILSSNKITYLHNKTFHPVPNLRNLDLSYNKLQTLQSEQFKGLRKLIILHLRSNSLKTVPIRVFQDCRNLDFLDLGYNRLRSLSRNAFAGLLKLKELHLEHNQFSKINFAHFPRLFNLRSIYLQWNRIRSISQGLTWTWSSLHNLDLSGNDIQGIEPGTFKCLPNLQKLNLDSNKLTNISQETVNAWISLISITLSGNMWECSRSICPLFYWLKNFKGNKESTMICAGPKHIQGEKVSDAVETYNICSEVQVVNTERSHLVPQTPQKPLIIPRPTIFKPDVTQSTFETPSPSPGFQIPGAEQEYEHVSFHKIIAGSVALFLSVAMILLVIYVSWKRYPASMKQLQQHSLMKRRRKKARESERQMNSPLQEYYVDYKPTNSETMDISVNGSGPCTYTISGSRECEV

SEQ ID NO: 12008 - protein, 127 aa, Homo sapiens
MELKLMMEKLGAPQTHLGLKSMIKEVDEDFDGKLSFREFLLIFHKAAAGELQEDSGLMALAKLSEIDVALEGVKGAKNFFEAKVQALSSASKFEAELKAEQDERKREEEERRLRQAAFQKLKANFNT

SEQ ID NO: 12009 - protein, 419 aa, Homo sapiens
MFTSEKGVVEEWLSEFKTLPETSLPNYATNLKDKSSLVSSLYKVIQEPQSELLEPVCHQLFEFYRSGEEQLLQFTLQFLPELIWCYLAVSASRNVHSSGCIEALLLGVYNLEIVDKQGHTKVLSFTIPSLSKPSVYHEPSSIGSMALTESALSQHGLSKVVYSGPHPQREMLTAQNRFEVLTFLLLCYNAALTYMPSVSLQSLCQICSRICVCGYPRQHVRKYKGISSRIPVSSGFMVQMLTGIYFAFYNGEWDLAQKALDDIIYRAQLELYPEPLLVANAIKASLPHGPMKSNKEGTRCIQVEITPTSSRISRNAVTSMSIRGHRWKRHEQPDNNNDATELGILVIPEISVTNVAGERTGNGEKGRTLGEIDAQHIQGVQETATDPRTESKGLPEIRRQKSVRKMMEDGINSPGRVQF

SEQ ID NO: 12010 - protein, 495 aa, Homo sapiens
MEFCVEDSTDVHVLIEDHRIVFSCKNADGVELYNEIEFYAKVNSKDSQDKRSSRSITCFVRKWKEKVAWPRLTKEDIKLLKKVSTKRPPPAMDDLDFTTTVVSCCPAELQTEGSNGKKEVLSGFQVVLEDTVLFPEGGGQPDDRGTINDISVLRVTRRGEQADHFTQTPLDPGSQVLVRVDWERRFDHMQQHSGQHLITAVADHLFKLKTTSWELGRFRSAIELDTPSMTAEQVAAIEQSVNEKIRDRLPVNVRELSLDDPEVEQVSGRGLPDDHAGPIRVVNIEGVDSNMCCGTHVSNLSDLQVIKILGTEKGKKNRTNLIFLSGNRVLKWMERSHGTEKALTALLKCGAEDHVEAVKKLQNSTKILQKNNLNLLRDLAVHIAHSLRNSPDWGGVVILHRKEGDSEFMNIIANEIGSEETLLFLTVGDEKGGGLFLLAGPPASVETLGPRVAEVLEGKGAGKKGRFQGKATKMSRRMEAQALLQDYISTQSAKE

SEQ ID NO: 12011 - protein, 177 aa, Homo sapiens
MAASAFAGAVRAASGILRPLNILASSTYRNCVKNASLISALSTGRFSHIQTPVVSSTPRLTTSERNLTCGHTSVILNRMAPVLPSVLKLPVRSLTYFSARKGKRKTVKAVIDRFLRLHCGLWVRRKAGYKKKLWKKTPARKKRLREFVFCNKTQSKLLDKMTTSFWKRRNWHSPICR

SEQ ID NO: 12012 - protein, 408 aa, Homo sapiens
MRTDSGARLEEGHLRPPRALPPVPSQDDIPLSRPKKKKPRTKNTPASASLEGLAQTAGRRPSEGNEPSTKELKEHPEAPVQRRQKKTRLPLELETSSTQKKSSSSSLLRNENGIDAEPAEEAVIQKPRRKTKKTQPAELQYANELGVEDEDIITDEQTTVEQQSVFTAPTGISQPVGKVFVEKSRRFQAADRSELIKTTENIDVSMDVKPSWTTRDVALTVHRAFRMIGLFSHGFLAGCAVWNIVVIYVLAGDQLSNLSNLLQQYKTLAYPFQSLLYLLLALSTISAFDRIDFAKISVAIRNFLALDPTALASFLYFTALILSLSQQMTSDRIHLYTPSSVNGSLWEAGIEEQILQPWIVVNLVVALLVGLSWLFLSYRPGMDLSEELMFSSEVEEYPDKEKEIKASS

SEQ ID NO: 12013 - protein, 62 aa, Homo sapiens
MTTHLKKLKESYCQRQGVPMNSLRFLFEGQRIADNHTPKELGMEEEDVIEVYQEQTGGHSTV

SEQ ID NO: 12014 - protein, 95 aa, Homo sapiens
MCCTKSLLLAALMSVLLLHLCGESEASNFDCCLGYTDRILHPKFIVGFTRQLANEGCDINAIIFHTKKKLSVCANPKQTWVKYIVRLLSKKVKNM

SEQ ID NO: 12015 - protein, 949 aa, Homo sapiens
MAGIFYFALFSCLFGICDAVTGSRVYPANEVTLLDSRSVQGELGWIASPLEGGWEEVSIMDEKNTPIRTYQVCNVMEPSQNNWLRTDWITREGAQRVYIEIKFTLRDCNSLPGVMGTCKETFNLYYYESDNDKERFIRENQFVKIDTIAADESFTQVDIGDRIMKLNTEIRDVGPLSKKGFYLAFQDVGACIALVSVRVFYKKCPLTVRNLAQFPDTITGADTSSLVEVRGSCVNNSEEKDVPKMYCGADGEWLVPIGNCLCNAGHEERSGECQACKIGYYKALSTDATCAKCPPHSYSVWEGATSCTCDRGFFRADNDAASMPCTRPPSAPLNLISNVNETSVNLEWSSPQNTGGRQDISYNVVCKKCGAGDPSKCRPCGSGVHYTPQQNGLKTTKVSITDLLAHTNYTFEIWAVNGVSKYNPNPDQSVSVTVTTNQAAPSSIALVQAKEVTRYSVALAWLEPDRPNGVILEYEVKYYEKDQNERSYRIVRTAARNTDIKGLNPLTSYVFHVRARTAAGYGDFSEPLEVTTNTVPSRIIGDGANSTVLLVSVSGSVVLVVILIAAFVISRRRSKYSKAKQEADEEKHLNQGVRTYVDPFTYEDPNQAVREFAKEIDASCIKIEKVIGVGEFGEVCSGRLKVPGKREICVAIKTLKAGYTDKQRRDFLSEASIMGQFDHPNIIHLEGVVTKCKPVMIITEYMENGSLDAFLRKNDGRFTVIQLVGMLRGIGSGMKYLSDMSYVHRDLAARNILVNSNLVCKVSDFGMSRVLEDDPEAAYTTRGGKIPIRWTAPEAIAYRKFTSASDVWSYGIVMWEVMSYGERPYWDMSNQDVIKAIEEGYRLPPPMDCPIALHQLMLDCWQKERSDRPKFGQIVNMLDKLIRNPNSLKRTGTESSRPNTALLDPSSPEFSAVVSVGDWLQAIKMDRYKDNFTAAGYTTLEAVVHVNQE

SEQ ID NO: 12016 - protein, 343 aa, Homo sapiens
MDNQAERESEAGVGLQRDEDDAPLCEDVELQDGDLSPEEKIFLREFPRLKEDLKGNIDKLRALADDIDKTHKKFTKANMVATSTAVISGVMSLLGLALAPATGGGSLLLSTAGQGLATAAGVTSIVSGTLERSKNKEAQARAEDILPTYDQEDREDEEEKADYVTAAGKIIYNLRNTLKYAKKNVRAFWKLRANPRLANATKRLLTTGQVSSRSRVQVQKAFAGTTLAMTKNARVLGGVMSAFSLGYDLATLSKEWKHLKEGARTKFAEELRAKALELERKLTELTQLYKSLQQKVRSRARGVGKDLTGTCETEAYWKELREHVWMWLWLCVCLCVCVYVQFT

SEQ ID NO: 12017 - protein, 330 aa, Homo sapiens
MQPQSVLHSGYFHPLLRAWQTATTTLNASNLIYPIFVTDVPDDIQPITSLPGVARYGVKRLEEMLRPLVEEGLRCVLIFGVPSRVPKDERGSAADSEESPAIEAIHLLRKTFPNLLVACDVCLCPYTSHGHCGLLSENGAFRAEESRQRLAEVALAYAKAGCQVVAPSDMMDGRVEAIKEALMAHGLGNRVSVMSYSAKFASCFYGPFRDAAKSSPAFGDRRCYQLPPGARGLALRAVDRDVREGADMLMVKPGMPYLDIVREVKDKHPDLPLAVYHVSGEFAMLWHGAQAGAFDLKAAVLEAMTAFRRAGADIIITYYTPQLLQWLKEE

SEQ ID NO: 12018 - protein, 2088 aa, Homo sapiens
MLCCLLVRASNLPSAKKDRRSDPVASLTFRGVKKRTKVIKNSVNPVWNEGFEWDLKGIPLDQGSELHVVVKDHETMGRNRFLGEAKVPLREVLATPSLSASFNAPLLDTKKQPTGASLVLQVSYTPLPGAVPLFPPPTPLEPSPTLPDLDVVADTGGEEDTEDQGLTGDEAEPFLDQSGGPGAPTTPRKLPSRPPPHYPGIKRKRSAPTSRKLLSDKPQDFQIRVQVIEGRQLPGVNIKPVVKVTAAGQTKRTRIHKGNSPLFNETLFFNLFDSPGELFDEPIFITVVDSRSLRTDALLGEFRMDVGTIYREPRHAYLRKWLLLSDPDDFSAGARGYLKTSLCVLGPGDEAPLERKDPSEDKEDIESNLLRPTGVALRGAHFCLKVFRAEDLPQMDDAVMDNVKQIFGFESNKKNLVDPFVEVSFAGKMLCSKILEKTANPQWNQNITLPAMFPSMCEKMRIRIIDWDRLTHNDIVATTYLSMSKISAPGGEIEVDDYLGFLPTFGPCYINLYGSPREFTGFPDPYTELNTGKGEGVAYRGRLLLSLETKLVEHSEQKVEDLPADDILRVEKYLRRRKYSLFAAFYSATMLQDVDDAIQFEVSIGNYGNKFDMTCLPLASTTQYSRAVFDGCHYYYLPWGNVKPVVVLSSYWEDISHRIETQNQLLGIADRLEAGLEQVHLALKAQCSTEDVDSLVAQLTDELIAGCSQPLGDIHETPSATHLDQYLYQLRTHHLSQITEAALALKLGHSELPAALEQAEDWLLRLRALAEEPQNSLPDIVIWMLQGDKRVAYQRVPAHQVLFSRRGANYCGKNCGKLQTIFLKYPMEKVPGARMPVQIRVKLWFGLSVDEKEFNQFAEGKLSVFAETYENETKLALVGNWGTTGLTYPKFSDVTGKIKLPKDSFRPSAGWTWAGDWFVCPEKTLLHDMDAGHLSFVEEVFENQTRLPGGQWIYMSDNYTDVNGEKVLPKDDIECPLGWKWEDEEWSTDLNRAVDEQGWEYSITIPPERKPKHWVPAEKMYYTHRRRRWVRLRRRDLSQMEALKRHRQAEAEGEGWEYASLFGWKFHLEYRKTDAFRRRRWRRRMEPLEKTGPAAVFALEGALGGVMDDKSEDSMSVSTLSFGVNRPTISCIFDYGNRYHLRCYMYQARDLAAMDKDSFSDPYAIVSFLHQSQKTVVVKNTLNPTWDQTLIFYEIEIFGEPATVAEQPPSIVVELYDHDTYGADEFMGRCICQPSLERMPRLAWFPLTRGSQPSGELLASFELIQREKPAIHHIPGFEVQETSRILDESEDTDLPYPPPQREANIYMVPQNIKPALQRTAIEILAWGLRNMKSYQLANISSPSLVVECGGQTVQSCVIRNLRKNPNFDICTLFMEVMLPREELYCPPITVKVIDNRQFGRRPVVGQCTIRSLESFLCDPYSAESPSPQGGPDDVSLLSPGEDVLIDIDDKEPLIPIQLADGLSSLAPTNTASPPSSPHEEEFIDWWSKFFASIGEREKCGSYLEKDFDTLKVYDTQLENVEAFEGLSDFCNTFKLYRGKTQEETEDPSVIGEFKGLFKIYPLPEDPAIPMPPRQFHQLAAQGPQECLVRIYIVRAFGLQPKDPNGKCDPYIKISIGKKSVSDQDNYIPCTLEPVFGKMFELTCTLPLEKDLKITLYDYDLLSKDEKIGETVVDLENRLLSKFGARCGLPQTYCVSGPNQWRDQLRPSQLLHLFCQQHRVKAPVYRTDRVMFQDKEYSIEEIEAGRIPNPHLGPVEERLALHVLQQQGLVPEHVESRPLYSPLQPDIEQGKLQMWVDLFPKALGRPGPPFNITPRRARRFFLRCIIWNTRDVILDDLSLTGEKMSDIYVKGWMIGFEEHKQKTDVHYRSLGGEGNFNWRFIFPFDYLPAEQVCTIAKKDAFWRLDKTESKIPARVVFQIWDNDKFSFDDFLGSLQLDLNRMPKPAKTAKKCSLDQLDDAFHPEWFVSLFEQKTVKGWWPCVAEEGEKKILAGKLEMTLEIVAESEHEERPAGQGRDEPNMNPKLEDPRRPDTSFLWFTSPYKTMKFILWRRFRWAIILFIILFILLLFLAIFIYAFPNYAAMKLVKPFS

SEQ ID NO: 12019 - protein, 519 aa, Homo sapiens
MPGFHLITQLKGMSVVLVLLPTLLLVMLTGAQRACPKNCRCDGKIVYCESHAFADIPENISGGSQGLSLRFNSIQKLKSNQFAGLNQLIWLYLDHNYISSVDEDAFQGIRRLKELILSSNKITYLHNKTFHPVPNLRNLDLSYNKLQTLQSEQFKGLRKLIILHLRSNSLKTVPIRVFQDCRNLDFLDLGYNRLRSLSRNAFAGLLKLKELHLEHNQFSKINFAHFPRLFNLRSIYLQWNRIRSISQGLTWTWSSLHNLDLSGNDIQGIEPGTFKCLPNLQKLNLDSNKLTNISQETVNAWISLISITLSGNMWECSRSICPLFYWLKNFKGNKESTMICAGPKHIQGEKVSDAVETYNICSEVQVVNTERSHLVPQTPQKPLIIPRPTIFKPDVTQSTFETPSPSPGFQIPGAEQEYEHVSFHKIIAGSVALFLSVAMILLVIYVSWKRYPASMKQLQQHSLMKRRRKKARESERQMNSPLQEYYVDYKPTNSETMDISVNGSGPCTYTISGSRECEV

SEQ ID NO: 12020 - protein, 417 aa, Homo sapiens
MGPRQGRWWLLLWLPPLATLPVRGEAAAAALSVRRCKALKEKDLIRTSESDCYCYNQNSQVEWKYIWSTMQVKITSPGLFRIVYIAERHNCQYPENILSFIKCVIHNFWIPKESNEITIIINPYRETVCFSVEPVKKIFNYMIHVNRNIMDFKLFLVFVAGVFLFFYARTLSQSPTFYYSSGTVLGVLMTLVFVLLLVKRFIPKYSTFWALMVGCWFASVYIVCQLMEDLKWLWYENRIYVLGYVLIVGFFSFVVCYKHGPLADDRSRSLLMWMLRLLSLVLVYAGVAVPQFAYAAIILLMSSWSLHYPLRACSYMRWKMEQWFTSKELVVKYLTEDEYREQADAETNSALEELRRACRKPDFPSWLVVSRLHTPSKFADFVLGGSHLSPEEISLHEEQYGLGGAFLEEQLFNPSTA

SEQ ID NO: 12021 - protein, 366 aa, Homo sapiens
MVPSSPRALFLLLLILACPEPRASQNCLSKQQLLSAIRQLQQLLKGQETRFAEGIRHMKSRLAALQNSVGRVGPDALPVSCPALNTPADGRKFGSKYLVDHEVHFTCNPGFRLVGPSSVVCLPNGTWTGEQPHCRGISECSSQPCQNGGTCVEGVNQYRCICPPGRTGNRCQHQAQTAAPEGSVAGDSAFSRAPRCAQVERAQHCSCEAGFHLSGAAGDSVCQDVNECELYGQEGRPRLCMHACVNTPGSYRCTCPGGYRTLADGKSCEDVDECVGLQPVCPQGTTCINTGGSFQCVSPECPEGSGNVSYVKTSPLTWRGLRRWRWTSTCRNTWTAPSRPTTCPRSPSLYPPMTSEGTQGHWGVES

SEQ ID NO: 12022 - protein, 130 aa, Homo sapiens
MGRPLHLVLLSASLAGLLLLGESLFIRREQANNILARVTRANSFLEEMKKGHLERECMEETCSYEEAREVFEDSDKTNEFWNKYKDGDQCETSPCQNQGKCKDGLGEYTCTCLEGFEGKNCELCMLIFAL

SEQ ID NO: 12023 - protein, 370 aa, Homo sapiens
MAPPSPSTTSSNNNSSSSSNSGWDQLSKTNLYIRGLPPHTTDQDLVKLCQPYGKIVSTKAILDKTTNKCKGYGFVDFDSPAAAQKAVSALKASGVQAQMAKQQEQDPTNLYISNLPLSMDEQELENMLKPFGQVISTRILRDSSGTSRGVGFARMESTEKCEAVIGHFNGKFIKTPPGVSAPTEPLLCKFADGGQKKRQNPNKYIPNGRPWHREGEAGMTLTYDPTTAAIQNGFYPSPYSIATNRMITQTSITPYIASPVSAYQVQSPSWMQPQPYILQHPGAVLTPSMEHTMSLQPASMISPLAQQMSHLSLGSTGTYMPATSAMQGAYLPQYAHMQTTAVPVEEASGQQQVAVETSNDHSPYTFQPNK

SEQ ID NO: 12024 - protein, 564 aa, Homo sapiens
MAPKKLSCLRSLLLPLSLTLLLPQADTRSFVVDRGHDRFLLDGAPFRYVSGSLHYFRVPRVLWADRLLKMRWSGLNAIQFYVPWNYHEPQPGVYNFNGSRDLIAFLNEAALANLLVILRPGPYICAEWEMGGLPSWLLRKPEIHLRTSDPADNMTKIFTLLRKYEPHGPLVNSEYYTGWLDYWGQNHSTRSVSAVTKGLENMLKLGASVNMYMFHGGTNFGYWNGADKKGRFLPITTSYDYDAPISEAGDPTPKLFALRDVISKFQEVPLGPLPPPSPKMMLGPVTLHLVGHLLAFLDLLCPRGPIHSILPMTFEAVKQDHGFMLYRTYMTHTIFEPTPFWVPNNGVHDRAYVMVDGVFQGVVERNMRDKLFLTGKLGSKLDILVENMGRLSFGSNSSDFKGLLKPPILGQTILTQWMMFPLKIDNLVKWWFPLQLPKWPYPQAPSGPTFYSKTFPILGSVGDTFLYLPGWTKGQVWINGFNLGRYWTKQGPQQTLYVPRFLLFPRGALNKITLLELEDVPLQPQVQFLDKPILNSTSTLHRTHINSLSADTLSASEPMELSGH

SEQ ID NO: 12025 - protein, 818 aa, Homo sapiens
MVGCGVAVLCLWVSCGAAAGQLEYSVPEETERGVAVGNLSADLRLPAAAMSSRNFRFLSSHRELYFGVDLPSGNLVVREPADREQLCRAKAACVLTYDLVLEDPLELHKIRIHVLDTNDNSPLFPAGDVQLHIPEFLTPGARFTLPNAQDDDEGSNGILSYSLSPSQHFRLDMGSRVDGSEYPELVLEKALDREQRATHLLVLTARDGGLPARSGDAQVTIIVVDTNDNAPVFERSVYRTKVPETAPNGTVLFRVQALDPDEGSNGEVQYSLSNSTQAELRHRFHVHPKSGEVQVAASLGPPETLLEAYIEARDEGVFGLASTAKLLVEVTDVNDHAPELDFLTLSNPVPEDAAPGTVIALFSVKDEDLDSNGRVICGMSSAGPFQLTASFDNYYSLLIDGPLDREQISEYQVLITASDSGSPPLSTRRTITVSVADVNDNTPNFPQPQQELFVAENNGPGASLGRVFAQDPDLGKNGLVSYELLDVISEGPSASSLLAVESSSGAITAKTSFDFEQLRGFHFQVEGRDGGIPPRSATVTINLFVVDRNDNYPVILFPLPRNGSVPVEIVPRSARTGHLVTKVVAEDADSGSNAWLSYHISRASDSSLFRISANIGELRTARLVLPTDAVKQRVVVVVRDHGDPPLSSSVTLGVLLSNSVPQLLPDFEDVWEPGGQLSAQNLYLVIALACISFLFLGCLLFFVCTKLHQSPGCCAQSCCRSTEDLRYGSKMVSNPCMTSATIDVTTVERLSQTYLYRASLGLGSDNNSLLLRGEYNAADLRNLATGVGLNLPISCIQIRNRKGDHANVNAMVSKFYGI

SEQ ID NO: 12026 - protein, 590 aa, Homo sapiens
MGFHLITQLKGMSVVLVLLPTLLLVMLTGAQRACPKNCRCDGKIVYCESHAFADIPENISGGSQGLSLRFNSIQKLKSNQFAGLNQLIWLYLDHNYISSVDEDAFQGIRRLKELILSSNKITYLHNKTFHPVPNLRNLDLSYNKLQTLQSEQFKGLRKLIILHLRSNSLKTVPIRVFQDCRNLDFLDLGYNRLRSLSRNAFAGLLKLKELHLEHNQFSKINFAHFPRLFNLRSIYLQWNRIRSISQGLTWTWSSLHNLDLSGNDIQGIEPGTFKCLPNLQKLNLDSNKLTNISQETVNAWISLISITLSGNMWECSRSICPLFYWLKNFKGNKESTMICAGPKHIQGEKVSDAVETYNICSEVQVVNTERSHLVPQTPQKPLIIPRPTIFKPDVTQSTFETPSPSPGFQIPGAEQEYEHVSFHKIIAGSVALFLSVAMILLVIYVSWKRYPASMKQLQQHSLMKRRRKKARESERQMNSPLQEYYVDYKPTNSETMDISVNGSGPCTYTISGSRECEMPHHMKPLPYYSYDQPVIGYCQAHQPLHVTKGYETVSPEQDESPGLELGRDHSFIATIARSAAPAIYLERIAN

SEQ ID NO: 12027 - protein, 190 aa, Homo sapiens
MAGDVGGRSCTDSELLLHPELLSQEFLLLTLEQKNIAVETDVRVNKDSLTDLYVQHAIPLPQRDLPKNRWGKMMEKKREQHEIKNETKRSSTVDGLRKRPLIVFDGSSTSTSIKVKKTENGDNDRLKPPPQNHDLTHRKSPSGPVKSPPLSPVGTTPVKLKRAAPKEEAEAMNNLKPPQAKRKIQHVTWP

SEQ ID NO: 12028 - protein, 395 aa, Homo sapiens
MWSGLPSRGSTCHTTTLPALVRTPTLMMQPSLDIKPFMSFPVDSSSAVGLFPNFNTMDPVQKAVINHTFGVSIPPKKKQVISCNVCQLRFNSDSQAEAHYKGSKHAKKVKALDATKNKPKMVPSKDSAKANPSCSITPITGNNSDKSEDKGKLKASSSSQPSSSESGSFLLKSGTTPLPPGAATSPSKSTNGAPGTVVESEEEKAKKLLYCSLCKVAVNSLSQLEAHNTGSKHKTMVEARNGAGPIKSYPRPGSRLKMQNGSKGSGLQNKTFHCEICDVHVNSEIQLKQHISSRRHKDRVAGKPLKPKYSPYNKLQRSPSILAAKLAFQKDMMKPLAPAFLSSPLAAAAAVSSALSLPPRPSASLFQAPAIPPALLRPGHGPIRATPASILFAPY

SEQ ID NO: 12029 - protein, 569 aa, Homo sapiens
MKVLLRLICFIALLISSLEADKCKEREEKIILVSSANEIDVRPCPLNPNEHKGTITWYKDDSKTPVSTEQASRIHQHKEKLWFVPAKVEDSGHYYCVVRNSSYCLRIKISAKFVENEPNLCYNAQAIFKQKLPVAGDGGLVCPYMEFFKNENNELPKLQWYKDCKPLLLDNIHFSGVKDRLIVMNVAEKHRGNYTCHASYTYLGKQYPITRVIEFITLEENKPTRPVIVSPANETMEVDLGSQIQLICNVTGQLSDIAYWKWNGSVIDEDDPVLGEDYYSVENPANKRRSTLITVLNISEIESRFYKHPFTCFAKNTHGIDAAYIQLIYPVTNFQKHMIGICVTLTVIIVCSVFIYKIFKIDIVLWYRDSCYDFLPIKASDGKTYDAYILYPKTVGEGSTSDCDIFVFKVLPEVLEKQCGYKLFIYGRDDYVGEDIVEVINENVKKSRRLIIILVRETSGFSWLGGSSEEQIAMYNALVQDGIKVVLLELEKIQDYEKMPESIKFIKQKHGAIRWSGDFTQGPQSAKTRFWKNVRYHMPVQRRSPSSKHQLLSPATKEKLQREAHVPLG

SEQ ID NO: 12030 - protein, 182 aa, Homo sapiens
MLSSVVFWGLIALIGTSRGSYPFSHSMKPHLHPRLYHGCYGDIMTMKTSGATCDANSVMNCGIRGSEMFAEMDLRAIKPYQTLIKEVGQRHCVDPAVIAAIISRESHGGSVLQDGWDHRGLKFGLMQLDKQTYHPVGAWDSKEHLSQATGILTERIKAIQKKFPTWSVAQHLKGRLYSEYFV

SEQ ID NO: 12031 - protein, 336 aa, Homo sapiens
MSDALANAVCQRCQARFSPAERIVNSNGELYHEHCFVCAQCFRPFPEGLFYEFEGRKYCEHDFQMLFAPCCGSCGEFIIGRVIKAMNNNWHPGCFRCELCDVELADLGFVKNAGRHLCRPCHNREKAKGLGKYICQRCHLVIDEQPLMFRSDAYHPDHFNCTHCGKELTAEARELKGELYCLPCHDKMGVPICGACRRPIEGRVVNALGKQWHVEHFVCAKCEKPFLGHRHYEKKGLAYCETHYNQLFGDVCYNCSHVIEGDVVSALNKAWCVSCFSCSTCNSKLTLKNKFVEFDMKPVCKRCYEKFPLELKKRLKKLSELTSRKAQPKATDLNSA

SEQ ID NO: 12032 - protein, 212 aa, Homo sapiens
MAAPPQLRALLVVVNALLRKRRYHAALAVLKGFRNGAVYGAKIRAPHALVMTFLFRNGSLQEKLWAILQATYIHSWNLARFVFTYKGLRALQSYIQGKTYPAHAFLAAFLGGILVFGENNNINSQINMYLLSRVLFALSRLAVEKGYIPEPRWDPFPLLTAVVWGLVLWLFEYHRSTLQPSLQSSMTYLYEDSNVWHDISDFLVYNKSRPSN

SEQ ID NO: 12033 - protein, 377 aa, Homo sapiens
MLSSCVRPVPTTVRFVDSLICNSSRSFMDLKALLSSLNDFASLSFAESWDNVGLLVEPSPPHTVNTLFLTNDLTEEVMEEVLQKKADLILSYHPPIFRPMKRITWNTWKERLVIRALENRVGIYSPHTAYDAAPQGVNNWLAKGLGACTSRPIHPSKAPNYPTEGNHRVEFNVNYTQDLDKVMSAVKGIDGVSVTSFSARTGNEEQTRINLNCTQKALMQVVDFLSRNKQLYQKTEILSLEKPLLLHTGMGRLCTLDESVSLATMIDRIKRHLKLSHIRLALGVGRTLESQVKVVALCAGSGSSVLQGVEADLYLTGEMSHHDTLDAASQGINVILCEHSNTERGFLSDLRDMLDSHLENKINIILSETDRDPLQVV

SEQ ID NO: 12034 - protein, 524 aa, Homo sapiens
MAGVVHVSLAALLLLPMAPAMHSDCIFKKEQAMCLEKIQRANELMGFNDSSPGCPGMWDNITCWKPAHVGEMVLVSCPELFRIFNPDQVWETETIGESDFGDSNSLDLSDMGVVSRNCTEDGWSEPFPHYFDACGFDEYESETGDQDYYYLSVKALYTVGYSTSLVTLTTAMVILCRFRKLHCTRNFIHMNLFVSFMLRAISVFIKDWILYAEQDSNHCFISTVECKAVMVFFHYCVVSNYFWLFIEGLYLFTLLVETFFPERRYFYWYTIIGWGTPTVCVTVWATLRLYFDDTGCWDMNDSTALWWVIKGPVVGSIMVNFVLFIGIIVILVQKLQSPDMGGNESSIYLTNLSPRVPKKAREDPLPVPSDQHSLPFLSCVQKCYCKPQRAQQHSCKMSELSTITLRLARSTLLLIPLFGIHYTVFAFSPENVSKRERLVFELGLGSFQGFVVAVLYCFLNGEVQAEIKRKWRSWKVNRYFAVDFKHRHPSLASSGVNGGTQLSILSKSSSQIRMSGLPADNLAT

SEQ ID NO: 12035 - protein, 480 aa, Homo sapiens
MAGGGGDLSTRRLNECISPVANEMNHLPAHSHDLQRMFTEDQGVDDRLLYDIVFKHFKRNKVEISNAIKKTFPFLEGLRDRDLITNKMFEDSQDSCRNLVPVQRVVYNVLSELEKTFNLPVLEALFSDVNMQEYPDLIHIYKGFENVIHDKLPLQESEEEEREERSGLQLSLEQGTGENSFRSLTWPPSGSPSHAGTTPPENGLSEHPCETEQINAKRKDTTSDKDDSLGSQQTNEQCAQKAEPTESCEQIAVQVNNGDAGREMPCPLPCDEESPEAELHNHGIQINSCSVRLVDIKKEKPFSNSKVECQAQARTHHNQASDIIVISSEDSEGSTDVDEPLEVFISAPRSEPVINNDNPLESNDEKEGQEATCSRPQIVPEPMDFRKLSTFRESFKKRVIGQDHDFSESSEEEAPAEASSGALRSKHGEKAPMTSRSTSTWRIPSRKRRFSSSDFSDLSNGEELQETCSSSLRRGSGKED

SEQ ID NO: 12036 - protein, 397 aa, Homo sapiens
MNWHLPLFLLASVTLPSICSHFNPLSLEELGSNTGIQVFNQIVKSRPHDNIVISPHGIASVLGMLQLGADGRTKKQLAMVMRYGVNGVGKILKKINKAIVSKKNKDIVTVANAVFVKNASEIEVPFVTRNKDVFQCEVRNVNFEDPASACDSINAWVKNETRDMIDNLLSPDLIDGVLTRLVLVNAVYFKGLWKSRFQPENTKKRTFVAADGKSYQVPMLAQLSVFRCGSTSAPNDLWYNFIELPYHGESISMLIALPTESSTPLSAIIPHISTKTIDSWMSIMVPKRVQVILPKFTAVAQTDLKEPLKVLGITDMFDSSKANFAKITRSENLHVSHILQKAKIEVSEDGTKASAATTAILIARSSPPWFIVDRPFLFFIRHNPTGAVLFMGQINKP

SEQ ID NO: 12037 - protein, 1705 aa, Homo sapiens
MASGSRWRPTPPPLLLLLLLALAARADGLEFGGGPGQWARYARWAGAASSGELSFSLRTNATRALLLYLDDGGDCDFLELLLVDGRLRLRFTLSCAEPATLQLDTPVADDRWHMVLLTRDARRTALAVDGEARAAEVRSKRREMQVASDLFVGGIPPDVRLSALTLSTVKYEPPFRGLLANLKLGERPPALLGSQGLRGATADPLCAPARNPCANGGLCTVLAPGEVGCDCSHTGFGGKFCSEEEHPMEGPAHLTLNSEVGSLLFSEGGAGRGGAGDVHQPTKGKEEFVATFKGNEFFCYDLSHNPIQSSTDEITLAFRTLQRNGLMLHTGKSADYVNLSLKSGAVWLVINLGSGAFEALVEPVNGKFNDNAWHDVRVTRNLRQHAGIGHAMVTISVDGILTTTGYTQEDYTMLGSDDFFYIGGSPNTADLPGSPVSNNFMGCLKDVVYKNNDFKLELSRLAKEGDPKMKLQGDLSFRCEDVAALDPVTFESPEAFVALPRWSAKRTGSISLDFRTTEPNGLLLFSQGRRAGGGAGSHSSAQRADYFAMELLDGHLYLLLDMGSGGIKLRASSRKVNDGEWCHVDFQRDGRKGSISVNSRSTPFLATGDSEILDLESELYLGGLPEGGRVDLPLPPEVWTAALRAGYVGCVRDLFIDGRSRDLRGLAEAQGAVGVAPFCSRETLKQCASAPCRNGGVCREGWNRFICDCIGTGFLGRVCEREATVLSYDGSMYMKIMLPNAMHTEAEDVSLRFMSQRAYGLMMATTSRESADTLRLELDGGQMKLTVNLDCLRVGCAPSKGPETLFAGHKLNDNEWHTVRVVRRGKSLQLSVDNVTVEGQMAGAHMRLEFHNIETGIMTERRFISVVPSNFIGHLSGLVFNGQPYMDQCKDGDITYCELNARFGLRAIVADPVTFKSRSSYLALATLQAYASMHLFFQFKTTAPDGLLLFNSGNGNDFIVIELVKGYIHYVFDLGNGPSLMKGNSDKPVNDNQWHNVVVSRDPGNVHTLKIDSRTVTQHSNGARNLDLKGELYIGGLSKNMFSNLPKLVASRDGFQGCLASVDLNGRLPDLIADALHRIGQVERGCDGPSTTCTEESCANQGVCLQQWDGFTCDCTMTSYGGPVCNDPGTTYIFGKGGALITYTWPPNDRPSTRMDRLAVGFSTHQRSAVLVRVDSASGLGDYLQLHIDQGTVGVIFNVGTDDITIDEPNAIVSDGKYHVVRFTRSGGNATLQVDSWPVNERYPAGNFDNERLAIARQRIPYRLGRVVDEWLLDKGRQLTIFNSQAAIKIGGRDQGRPFQGQVSGLYYNGLKVLALAAESDPNVRTEGHLRLVGEGPSVLLSAETTATTLLADMATTIMETTTTMATTTTRRGRSPTLRDSTTQNTDDLLVASAECPSDDEDLEECEPSTGGELILPIITEDSLDPPPVATRSPFVPPPPTFYPFLTGVGATQDTLPPPAARRPPSGGPCQAERDDSDCEEPIEASGFASGEVFDSSLPPTDDEDFYTTFPLVTDRTTLLSPRKPAPRPNLRTDGATGAPGVLFAPSAPAPNLPAGKMNHRDPLQPLLENPPLGPGAPTSFEPRRPPPLRPGVTSAPGFPHLPTANPTGPGERGPPGAVEVIRESSSTTGMVVGIVAAAALCILILLYAMYKYRNRDEGSYQVDQSRNYISNSAQSNGAVVKEKAPAAPKTPSKAKKNKDKEYYV

SEQ ID NO: 12038 - protein, 550 aa, Homo sapiens
MASASSGPSSSVGFSSFDPAVPSCTLSSAASGIKRPMASEVPYASGMPIKKIGHRSVDSSGETTYKKTTSSALKGAIQLGITHTVGSLSTKPERDVLMQDFYVVESIFFPSEGSNLTPAHHYNDFRFKTYAPVAFRYFRELFGIRPDDYLYSLCSEPLIELCSSGASGSLFYVSSDDEFIIKTVQHKEAEFLQKLLPGYYMNLNQNPRTLLPKFYGLYCVQAGGKNIRIVVMNNLLPRSVKMHIKYDLKGSTYKRRASQKEREKPLPTFKDLDFLQDIPDGLFLDADMYNALCKTLQRDCLVLQSFKIMDYSLLMSIHNIDHAQREPLSSETQYSVDTRRPAPQKALYSTAMESIQGEARRGGTMETDDHMGGIPARNSKGERLLLYIGIIDILQSYRFVKKLEHSWKALVHDGDTVSVHRPGFYAERFQRFMCNTVFKKIPLKPSPSKKFRSGSSFSRRAGSSGNSCITYQPSVSGEHKAQVTTKAEVEPGVHLGRPDVLPQTPPLEEISEGSPIPDPSFSPLVGETLQMLTTSTTLEKLEVAESEFTH

SEQ ID NO: 12039 - protein, 482 aa, Homo sapiens
MASPEPRRGGDGAAQAARKTRVEANSPLPKNSGSLNEAEALNPEVTLSSEGSLNLEDILYLEDTGDLDETLYVQETEKAEEALYIEEAMQPDEALHVEEPGNPEETVCVEETTEPDRIQFVEGPVEPGKPTSPEHVVYEGETVTRAEKSNPEESLRAEQSPSMEENLSIEDLELLEGRFQQCVQAVAQLEEERDQLIHELVLLREPALQEVQQVHQDILAAYKLHAQAELERDGLREEIRLVKQKLFKVTKECVAYQYQLECRQQDVAQFADFREVLTTRATQLSEELAQLRDAYQKQKEQLRQQLEAPPSQRDGHFLQESRRLSAQFENLMAESRQDLEEEYEPQFLRLLERKEAGTKALQRTQAEIQEMKEALRPLQAEARQLRLQNRNLEDQIALVRQKRDEEVQQYREQLEEMEERQRQLRNGVQLQQQKNKEMEQLRLSLAEELSTYKAMLLPKSLEQADAPTSQAGGMETQSQGAV

SEQ ID NO: 12040 - protein, 1471 aa, Homo sapiens
MEPRMESCLAQVLQKDVGKRLQVGQELIDYFSDKQKSADLEHDQTMLDKLVDGLATSWVNSSNYKVVLLGMDILSALVTRLQDRFKAQIGTVLPSLIDRLGDAKDSVREQDQTLLLKIMDQAANPQYVWDRMLGGFKHKNFRTREGICLCLIATLNASGAQTLTLSKIVPHICNLLGDPNSQVRDAAINSLVEIYRHVGERVRADLSKKGLPQSRLNVIFTKFDEVQKSGNMIQSANDKNFDDEDSVDGNRPSSASSTSSKAPPSSRRNVGMGTTRRLGSSTLGSKSSAAKEGAGAVDEEDFIKAFDDVPVVQIYSSRDLEESINKIREILSDDKHDWEQRVNALKKIRSLLLAGAAEYDNFFQHLRLLDGAFKLSAKDLRSQVVREACITLGHLSSVLGNKFDHGAEAIMPTIFNLIPNSAKIMATSGVVAVRLIIRHTHIPRLIPVITSNCTSKSVAVRRRCFEFLDLLLQEWQTHSLERHISVLAETIKKGIHDADSEARIEARKCYWGFHSHFSREAEHLYHTLESSYQKALQSHLKNSDSIVSLPQSDRSSSSSQESLNRPLSAKRSPTGSTTSRASTVSTKSVSTTGSLQRSRSDIDVNAAASAKSKVSSSSGTTPFSSAAALPPGSYASLGRIRTRRQSSGSATNVASTPDNRGRSRAKVVSQSQRSRSANPAGAGSRSSSPGKLLGSGYGGLTGGSSRGPPVTPSSEKRSKIPRSQGCSRETSPNRIGLDRFGLGQPGRIPGSVNAMRVLSTSTDLEAAVADALLLGDSRSKKKPVRRRYEPYGMYSDDDANSDASSVCSERSYGSRNGGIPHYLRQTEDVAEVLNHCASSNWSERKEGLLGLQNLLKSQRTLSRVELKRLCEIFTRMFADPHSKRVFSMFLETLVDFIIIHKDDLQDWLFVLLTQLLKKMGADLLGSVQAKVQKALDVTRDSFPFDQQFNILMRFIVDQTQTPNLKVKVAILKYIESLARQMDPTDFVNSSETRLAVSRIITWTTEPKSSDVRKAAQIVLISLFELNTPEFTMLLGALPKTFQDGATKLLHNHLKNSSNTSVGSPSNTIGRTPSRHTSSRTSPLTSPTNCSHGGLSPSMLDYDTENLNSEEIYSSLRGVTEAIEKFSFRSQEDLNEPIKRDGKKECDIVSRDGGAASPATEGRGGSEVEGGRTALDNKTSLLNTQPPRAFPGPRARDYNPYPYSDAINTYDKTALKEAVFDDDMEQLRDVPIDHSDLVADLLKELSNHNERVEERKGALLELLKITREDSLGVWEEHFKTILLLLLETLGDKDHSIRALALRVLREILRNQPARFKNYAELTIMKTLEAHKDSHKEVVRAAEEAASTLASSIHPEQCIKVLCPIIQTADYPINLAAIKMQTKVVERIAKESLLQLLVDIIPGLLQGYDNTESSVRKASVFCLVAIYSVIGEDLKPHLAQLTGSKMKLLNLYIKRAQTTNSNSSSSSDVSTHS

SEQ ID NO: 12041 - protein, 453 aa, Homo sapiens
MRFVVALVLLNVAAAGAVPLLATESVKQEEAGVRPSAGNVSTHPSLSQRPGGSTKSHPEPQTPKDSPSKSSAEAQTPEDTPNKSGAEAKTQKDSSNKSGAEAKTQKGSTSKSGSEAQTTKDSTSKSHPELQTPKDSTGKSGAEAQTPEDSPNRSGAEAKTQKDSPSKSGSEAQTTKDVPNKSGADGQTPKDGSSKSGAEDQTPKDVPNKSGAEKQTPKDGSNKSGAEEQGPIDGPSKSGAEEQTSKDSPNKVVPEQPSRKDHSKPISNPSDNKELPKADTNQLADKGKLSPHAFKTESGEETDLISPPQEEVKSSEPTEDVEPKEAEDDDTGPEEGSPPKEEKEKMSGSASSENREGTLSDSTGSEKDDLYPNGSGNGSAESSHFFAYLVTAAILVAVLYIAHHNKRKIIAFVLEGKRSKVTRRPKASDYQRLDQKIFFPLSPNRMVYSSGKR

SEQ ID NO: 12042 - protein, 961 aa, Homo sapiens
MKKFFDSRREQGGSGLGSGSSGGGGSTSGLGSGYIGRVFGIGRQQVTVDEVLAEGGFAIVFLVRTSNGMKCALKRMFVNNEHDLQVCKREIQIMRDLSGHKNIVGYIDSSINNVSSGDVWEVLILMDFCRGGQVVNLMNQRLQTGFTENEVLQIFCDTCEAVARLHQCKTPIIHRDLKVENILLHDRGHYVLCDFGSATNKFQNPQTEGVNAVEDEIKKYTTLSYRAPEMVNLYSGKIITTKADIWALGCLLYKLCYFTLPFGESQVAICDGNFTIPDNSRYSQDMHCLIRYMLEPDPDKRPDIYQVSYFSFKLLKKECPIPNVQNSPIPAKLPEPVKASEAAAKKTQPKARLTDPIPTTETSIAPRQRPKAGQTQPNPGILPIQPALTPRKRATVQPPPQAAGSSNQPGLLASVPQPKPQAPPSQPLPQTQAKQPQAPPTPQQTPSTQAQGLPAQAQATPQHQQQLFLKQQQQQQQPPPAQQQPAGTFYQQQQAQTQQFQAVHPATQKPAIAQFPVVSQGGSQQQLMQNFYQQQQQQQQQQQQQQLATALHQQQLMTQQAALQQKPTMAAGQQPQPQPAAAPQPAPAQEPAIQAPVRQQPKVQTTPPPAVQGQKVGSLTPPSSPKTQRAGHRRILSDVTHSAVFGVPASKSTQLLQAAAAEASLNKSKSATTTPSGSPRTSQQNVYNPSEGSTWNPFDDDNFSKLTAEELLNKDFAKLGEGKHPEKLGGSAESLIPGFQSTQGDAFATTSFSAGTAEKRKGGQTVDSGLPLLSVSDPFIPLQVPDAPEKLIEGLKSPDTSLLLPDLLPMTDPFGSTSDAVIEKADVAVESLIPGLEPPVPQRLPSQTESVTSNRTDSLTGEDSLLDCSLLSNPTTDLLEEFAPTAISAPVHKAAEDSNLISGFDVPEGSDKVAEDEFDPIPVLITKNPQGGHSRNSSGSSESSLPNLARSLLLVDQLIDL

SEQ ID NO: 12043 - protein, 971 aa, Homo sapiens
MRMSDTVTVKDETATMKDLEAEVKDTTRVENLIKSENYGKILVEKNEHCIENNIDLQEKIQIQLTQSFEKEEKPSKDEAEKEKASDKLPRKMLSRDSSQEYTDSTGIDLHEFLVNTLKNNPRDRMMLLKLEQEILDFIGNNESPRKKFPPMTSYHRMLLHRVAAYFGLDHNVDQSGKSVIVNKTSNTRIPDQKFNEHIKDDKGEDFQKRYILKRDNSSFDKDDNQMRIRLKDDRRSKSIEEREEEYQRARDRIFSQDSLCSQENYIIDKRLQDEDASSTQQRRQIFRVNKDASGRSTNSHQSSTENELKYSEPRPWSSTDSDSSLRNLKPAVTKASSFSGISVLTRGDSSGSSKSIGRLSKTGQPFINPDGSPVVYNPPMTQQPVRSQVPGPPQPPLPAPPQQPAANHIFSQQDNLGSQFSHMSLARQPSADGSDPHAAMFQSTVVLQSPQQSGYIMTAAPPPHPPPPPPPPPPPPPLPPGQPVPTAGYPASGHPVSQPVLQQQGYIQQPSPQMPACYCAPGHYHSSQPQYRPVPSVHYNSHLNQPLPQPAQQTGYQVIPNQQQNYQGIVGVQQPQSQSLVSGQPNSIGNQIQGVVIPYTSVPTYQVSLPQGSQGIPHQTYQQPVMFPNQSNQGSMPTTGMPVYYSVIPPGQQNNLSSSVGYLQHPGSEQVQFPRTTSPCSSQQLQGHQCTAGPPPPPGGGMVMMQLSVPNNPQSCAHSPPQWKQNKYYCDHQRGQKCVEFSSVDNIVQHSPQLSSPIISPAQSPAPAQLSTLKTVRPSGPPLSIMPQFSRPFVPGQGDSRYPLLGQPLQYNPPAVLHGHIPNQQGQPGSRHGNRGRRQAKKAASTDLGAGETVVGKVLEITELPDGITRMEAEKLFGELFKIGAKIRWLRDPQSQPRRHPLCCGSGDNTANPERSKPSDLASTYTVLATFPSISAAQNALKKQINSVNKFKLRTSKKHYDFHILERASSQ

SEQ ID NO: 12044 - protein, 930 aa, Homo sapiens
MCSGSGRRRSSLSPTMRPGTGAERGGLMMGHPGMHYAPMGMHPMGQRANMPPVPHGMMPQMMPPMGGPPMGQMPGMMSSVMPGMMMSHMSQASMQPALPPGVNSMDVAAGTASGAKSMWTEHKSPDGRTYYYNTETKQSTWEKPDDLKTPAEQLLSKCPWKEYKSDSGKPYYYNSQTKESRWAKPKELEDLEGYQNTIVAGSLITKSNLHAMIKAEESSKQEECTTTSTAPVPTTEIPTTMSTMAAAEAAAAVVAAAAAAAAAAAAANANASTSASNTVSGTVPVVPEPEVTSIVATVVDNENTVTISTEEQAQLTSTPAIQDQSVEVSSNTGEETSKQETVADFTPKKEEEESQPAKKTYTWNTKEEAKQAFKELLKEKRVPSNASWEQAMKMIINDPRYSALAKLSEKKQAFNAYKVQTEKEEKEEARSKYKEAKESFQRFLENHEKMTSTTRYKKAEQMFGEMEVWNAISERDRLEIYEDVLFFLSKKEKEQAKQLRKRNWEALKNILDNMANVTYSTTWSEAQQYLMDNPTFAEDEELQNMDKEDALICFEEHIRALEKEEEEEKQKSLLRERRRQRKNRESFQIFLDELHEHGQLHSMSSWMELYPTISSDIRFTNMLGQPGSTALDLFKFYVEDLKARYHDEKKIIKDILKDKGFVVEVNTTFEDFVAIISSTKRSTTLDAGNIKLAFNSLLEKAEAREREREKEEARKMKRKESAFKSMLKQAAPPIELDAVWEDIRERFVKEPAFEDITLESERKRIFKDFMHVLEHECQHHHSKNKKHSKKSKKHHRKRSRSRSGSDSDDDDSHSKKKRQRSESRSASEHSSSAESERSYKKSKKHKKKSKKRRHKSDSPESDAEREKDKKEKDRESEKDRTRQRSESKHKSPKKKTGKDSGNWDTSGSELSEGELEKRRRTLLEQLDDDQ

SEQ ID NO: 12045 - protein, 275 aa, Homo sapiens
MATMGLLMLLTLAASPHFLSICFHHVHTFRGPHWCEYCANFMWGLIAQGVKCADCGLNVHKQCSKMVPNDCKPDLKHVKKVYSCDLTTLVKAHTTKRPMVVDMCIREIESRGLNSEGLYRVSGFSDLIEDVKMAFDRDGEKADISVNMYEDINIITGALKLYFRDLPIPLITYDAYPKFIESAKIMDPDEQLETLHEALKLLPPAHCETLRYLMAHLKRVTLHEKENLMNAENLGIVFGPTLMRSPELDAMAALNDIRYQRLVVELLIKNEDILF

SEQ ID NO: 12046 - protein, 419 aa, Homo sapiens
MNNQKQQKPTLSGQRFKTRKRDEKERFDPTQFQDCIIQGLTETGTDLEAVAKFLDASGAKLDYRRYAETLFDILVAGGMLAPGGTLADDMMRTDVCVFAAQEDLETMQAFAQVFNKLIRRYKYLEKGFEDEVKKLLLFLKGFSESERNKLAMLTGVLLANGTLNASILNSLYNENLVKEGVSAAFAVKLFKSWINEKDINAVAASLRKVSMDNRLMELFPANKQSVEHFTKYFTEAGLKELSEYVRNQQTIGARKELQKELQEQMSRGDPFKDIILYVKEEMKKNNIPEPVVIGIVWSSVMSTVEWNKKEELVAEQAIKHLKQYSPLLAAFTTQGQSELTLLLKIQEYCYDNIHFMKAFQKIVVLFYKAEVLSEEPILKWYKDAHVAKGKSVFLEQMKKFVEWLKNAEEESESEAEEGD

SEQ ID NO: 12047 - protein, 206 aa, Homo sapiens
MECLYYFLGFLLLAARLPLDAAKRFHDVLGNERPSAYMREHNQLNGWSSDENDWNEKLYPVWKRGDMRWKNSWKGGRVQAVLTSDSPALVGSNITFAVNLIFPRCQKEDANGNIVYEKNCRNEAGLSADPYVYNWTAWSEDSDGENGTGQSHHNVFPDGKPFPHHPGWRRWNFIYVFHTLGWLLQTPKLLLYLSLKFQPSLFLLYN

SEQ ID NO: 12048 - protein, 70 aa, Homo sapiens
MGIELLCLFFLFLGRNDHVQGGCALGGAETCEDCLLIGPQCAWCAQENFTHPSGVGERWCADSAGACPPD

SEQ ID NO: 12049 - protein, 447 aa, Homo sapiens
MKVLLRLICFIALLISSLEADKCKEREEKIILVSSANEIDVRPCPLNPNEHKGTITWYKDDSKTPVSTEQASRIHQHKEKLWFVPAKVEDSGHYYCVVRNSSYCLRIKISAKFVENEPNLCYNAQAIFKQKLPVAGDGGLVCPYMEFFKNENNELPKLQWYKDCKPLLLDNIHFSGVKDRLIVMNVAEKHRGNYTCHASYTYLGKQYPITRVIEFITLEENKPTRPVIVSPANETMEVDLGSQIQLICNVTGQLSDIAYWKWNGSVIDEDDPVLGEDYYSVENPANKRRSTLITVLNISEIESRFYKHPFTCFAKNTHGIDAAYIQLIYPVTNFQKHMIGICVTLTVIIVCSVFIYKIFKIDIVLWYRDSCYDFLPIKASDGKTYDAYILYPKTVGEGSTSDCDIFVFKVLPEVLEKQCGYKLFIYGRDDYVGEGMCVMEQSKGLLL

SEQ ID NO: 12050 - protein, 291 aa, Homo sapiens [sequence omitted]

SEQ ID NO: 12051 - protein, 368 aa, Homo sapiens
MATAERRALGIGFQWLSLATLVLICAGQGGRREDGGPACYGGFDLYFILDKSGSVLHHWNEIYYFVEQLAHKFISPQLRMSFIVFSTRGTTLMKLTEDREQIRQGLEELQKVLPGGDTYMHEGFERASEQIYYENRQGYRTASVIIALTDGELHEDLFFYSEREANRSRDLGAIVYCVGVKDFNETQLARIADSKDHVFPVNDGFQALQGIIHSILKKSCIEILAAEPSTICAGESFQVVVRGNGFRHARNVDRVLCSFKINDSVTLNEKPFSVEDTYLLCPAPILKEVGMKAALQVSMNDGLSFISSSVIITTTHCSDGSILAIALLILFLLLALALLWWFWPLCCTVIIKEVPPPPAEESEENKIK

SEQ ID NO: 12052 - protein, 906 aa, Homo sapiens
MFGRSRSWVGGGHGKTSRNIHSLDHLKYLYHVLTKNTTVTEQNRNLLVETIRSITEILIWGDQNDSSVFDFFLEKNMFVFFLNILRQKSGRYVCVQLLQTLNILFENISHETSLYYLLSNNYVNSIIVHKFDFSDEEIMAYYISFLKTLSLKLNNHTVHFFYNEHTNDFALYTEAIKFFNHPESMVRIAVRTITLNVYKVDNQAMLHYIRDKTAVPYFSNLVWFIGSHVIELDDCVQTDEEHRNRGKLSDLVAEHLDHLHYLNDILIINCEFLNDVLTDHLLNRLFLPLYVYSLENQDKGGERPKISLPVSLYLLSQVFLIIHHAPLVNSLAEVILNGDLSEMYAKTEQDIQRSSAKPSIRCFIKPTETLERSLEMNKHKGKRRVQKRPNYKNVGEEEDEEKGPTEDAQEDAEKAKEIEMVIMERSKLSELAASTSVQEQNTTDEEKSAAATCSESTQWSRPFLDMVYHALDSPDDDYHALFVLCLLYAMSHNKGMDPEKLERIQLPVPNAAEKTTYNHPLAERLIRIMNNAAQPDGKIRLATLELSCLLLKQQVLMSAGCIMKDVHLACLEGAREESVHLVRHFYKGEDIFLDMFEDEYRSMTMKPMNVEYLMMDASILLPPTGTPLTGIDFVKRLPCGDVEKTRRAIRVFFMLRSLSLQLRGEPETQLPLTREEDLIKTDDVLDLNNSDLIACTVITKDGGMVQRFLAVDIYQMSLVEPDVSRLGWGVVKFAGLLQDMQVTGVEDDSRALNITIHKPASSPHSKPFPILQATFIFSDHIRCIIAKQRLAKGRIQARRMKMQRIAALLDLPIQPTTEVLGFGLGSSTSTQHLPFRFYDQGRRGSSDPTVQRSVFASVDKVPGEPAPRPAPQLVHHGGRSRSFSLWSLCELPFLSQKPRRLAAPAS

SEQ ID NO: 12053 - protein, 159 aa, Homo sapiens
MKIFVGNVDGADTTPEELAALFAPYGTVMSCAVMKQFAFVHMRENAGALRAIEALHGHELRPGRALVVEMSRPRPLNTWKIFVGNVSAACTSQELRSLFERRGRVIECDVVKGDVKIFILCCSSSLLLLLSPGSWTTRLFTWRRKQMPKPQSRSSTAKK

SEQ ID NO: 12054 - protein, 1467 aa, Homo sapiens
MSDESASGSDPDLDPDVELEDAEEEEEEEEVAVEECDRDDEEDLLDDPSLEGMCGTEHAQLGEDGQQPPRCTSTTSSQSEPSEQLRRHQGKNLASEDPKKKRAQKPSHMRRNIRKLLREDQLEPVTKAAQQEELERRKRLEQQRKDYAAPIPTVPLEFLPEEIALRASDGPQLPPRVLAQEVICLDSSSGSEDEKSSRDEVIELSSGEEDTLHIVDSSESVSEDDEEEEKGGTHVNDVLNQRDALGRVLVNLNHPPEEENVFLAPQLARAVKPHQIGGIRFLYDNLVESLERFKTSSGFGCILAHSMGLGKTLQVISFIDVLFRHTPAKTVLAIVPVNTLQNWLAEFNMWLPPPEALPADNKPEEVQPRFFKVHILNDEHKTMASRAKVMADWVSEGGVLLMGYEMYRLLTLKKSFATGRPKKTKKRSHPVIIDLDEEDRQQEFRREFEKALCRPGPDVVICDEGHRIKNCQASTSQALKNIRSRRRVVLTGYPLQNNLIEYWCMVDFVRPDFLGTRQEFSNMFERPILNGQCIDSTPQDVRLMRYRSHVLHSLLEGFVQRRGHTVLKIHLPAKEENVILVRLSKIQRDLYTQFMDRFRDCGSSGWLGLNPLKAFCVCCKIWNHPDVLYEALQKESLANEQDLDVEELGSAGTSARCPPQGTKGKGEDSTLASSMGEATNSKFLQGVGFNPFQERGNNIVTYEWAKDLLTNYQTGVLENSPKMVLLFHLIEESVKLGDKILVFSQSLSTLALIEEFLGKREVPCPPGTEGQGAQKWVRNISYFRLDGSTPAFERERLINQFNDPSNLTTWLFLLSTRAGCLGVNLIGANRVVVFDASWNPCHDAQAVCRVYRYGQKKPCYIYRLVADYTLEKKIYDRQISKQGMSDRVVDDLNPMLNFTRKEVENLLHFVEKEPAPQVSLNVKGIKESVLQLACLKYPHLITKEPFEHESLLLNRKDHKLTKAEKKAAKKSYEEDKRTSVPYTRPSYAQYYPASDQSLTSIPAFSQRNWQPTLKGDEKPVASVRPVQSTPIPMMPRHVPLGGSVSSASSTNPSMNFPINYLQRAGVLVQKVVTTTDIVIPGLNSSTDVQARINAGESIHIIRGTKGTYIRTSDGRIFAVRATGKPKVPEDGRMAASGSQGPSCESTSNGRHSASSPKAPDPEGLARPVSPDSPEIISELQQYADVAAARESRQSSPSTNAALPGPPAQLMDSSAVPGTALGTEPRLGGHCLNSSLLVTGQPCGDRHPVLDLRGHKRKLATPPAAQESSRRRSRKGHLPAPVQPYEHGYPVSGGFAMPPVSLNHNLTTPFTSQAGENSLFMGSTPSYYQLSNLLADARLVFPVTTDPLVPAGPVSSSSTATSVTASNPSFMLNPSVPGILPSYSLPFSQPLLSEPRMFAPFPSPVLPSNLSRGMSIYPGYMSPHAGYPAGGLLRSQVPPFDSHEVAEVGFSSNDDEDKDDDVIEVTGK

SEQ ID NO: 12055 - protein, 157 aa, Homo sapiens
MKCIPYSVLLKDLEMRNLRELEDLIIEAVYTDIIQGKLDQRNQLLEVDFCIGRDIRKKDINNIVKTLHEWCDGCEAVLLGIEQQVLRANQYKENHNRTQQQVEAEVTNIKKTLKATASSSAQEMEQQLAERECPPHAEQRQPTKKMSKVKGLVSSRH

SEQ ID NO: 12056 - protein, 95 aa, Homo sapiens
MAPPPACRSPMSPPPPPLLLLLLSLALLGARARAEPAGSAVPAQSRPCVDCHAFEFMQRALQDLRKTACSLDARTETLLLQAERRALCACWPAGH

SEQ ID NO: 12057 - protein, 1609 aa, Homo sapiens
MGSKRRRATSPSSSVSGDFDDGHHSVSTPGPSRKRRRLSNLPTVDPIAVCHELYNTIRDYKDEQGRLLCELFIRAPKRRNQPDYYEVVSQPIDLMKIQQKLKMEEYDDVNLLTADFQLLFNNAKSYYKPDSPEYKAACKLWDLYLRTRNEFVQKGEADDEDDDEDGQDNQGTVTEGSSPAYLKEILEQLLEAIVVATNPSGRLISELFQKLPSKVQYPDYYAIIKEPIDLKTIAQRIQNGSYKSIHAMAKDIDLLAKNAKTYNEPGSQVFKDANSIKKIFYMKKAEIEHHEMAKSSLRMRTPSNLAAARLTGPSHSKGSLGEERNPTSKYYRNKRAVQGGRLSAITMALQYGSESEEDAALAAARYEEGESEAESITSFMDVSNPFYQLYDTVRSCRNNQGQLIAEPFYHLPSKKKYPDYYQQIKMPISLQQIRTKLKNQEYETLDHLECDLNLMFENAKRYNVPNSAIYKRVLKLQQVMQAKKKELARRDDIEDGDSMISSATSDTGSAKRKSKKNIRKQRMKILFNVVLEAREPGSGRRLCDLFMVKPSKKDYPDYYKIILEPMDLKIIEHNIRNDKYAGEEGMIEDMKLMFRNARHYNEEGSQVYNDAHILEKLLKEKRKELGPLPDDDDMASPKLKLSRKSGISPKKSKYMTPMQQKLNEVYEAVKNYTDKRGRRLSAIFLRLPSRSELPDYYLTIKKPMDMEKIRSHMMANKYQDIDSMVEDFVMMFNNACTYNEPESLIYKDALVLHKVLLETRRDLEGDEDSHVPNVTLLIQELIHNLFVSVMSHQDDEGRCYSDSLAEIPAVDPNFPNKPPLTFDIIRKNVENNRYRRLDLFQEHMFEVLERARRMNRTDSEIYEDAVELQQFFIKIRDELCKNGEILLSPALSYTTKHLHNDVEKERKEKLPKEIEEDKLKREEEKREAEKSEDSSGAAGLSGLHRTYSQDCSFKNSMYHVGDYVYVEPAEANLQPHIVCIERLWEDSAEKEVFKSDYYNKVPVSKILGKCVVMFVKEYFKLCPENFRDEDVFVCESRYSAKTKSFKKIKLWTMPISSVRFVPRDVPLPVVRVASVFANADKGDDEKNTDNSEDSRAEDNFNLEKEKEDVPVEMSNGEPGCHYFEQLHYNDMWLKVGDCVFIKSHGLVRPRVGRIEKVWVRDGAAYFYGPIFIHPEETEHEPTKMFYKKEVFLSNLEETCPMTCILGKCAVLSFKDFLSCRPTEIPENDILLCESRYNESDKQMKKFKGLKRFSLSAKVVDDEIYYFRKPIVPQKEPSPLLEKKIQLLEAKFAELEGGDDDIEEMGEEDSEVIEPPSLPQLQTPLASELDLMPYTPPQSTPKSAKGSAKKEGSKRKINMSGYILFSSEMRAVIKAQHPDYSFGELSRLVGTEWRNLETAKKAEYEGMMGGYPPGLPPLQGPVDGLVSMGSMQPLHPGGPPPHHLPPGVPGLPGIPPPGVMNQGVAPMVGTPAPGGSPYGQQVGVLGPPGQQAPPPYPGPHPAGPPVIQQPTTPMFVAPPPKTQRLLHSEAYLKYIEGLSAESNSISKWDQTLAARRRDVHLSKEQESRLPSHWLKSKGAHTTMADALWRLRDLMLRDTLNIRQAYNLENV

SEQ ID NO: 12058 - protein, 866 aa, Homo sapiens
MTTFGAVAEWRLPSLRRATLWIPQWFAKKAIFNSPLEAAMAFPHLQQPSFLLASLKADSINKPFAQQCQDLVKVIEDFPAKELHTIFPWLVESIFGSLDGVLVGWNLRCLQGRVNPVEYSIVMEFLDPGGPMMKLVYKLQAEDYKFDFPVSYLPGPVKASIQECILPDSPLYHNKVQFTPTGGLGLNLALNPFEYYIFFFALSLITQKPLPVSLHVRTSDCAYFILVDRYLSWFLPTEGSVPPPLSSSPGGTSPSPPPRTPAIPFASYGLHHTSLLKRHISHQTSVNADPASHEIWRSETLLQVFVEMWLHHYSLEMYQKMQSPHAKLEVLHYRLSVSSALYSPAQPSLQALHAYQESFTPTEEHVLVVRLLLKHLHAFANSLKPEQASPSAHSHATSPLEEFKRAAVPRFVQQKLYLFLQHCFGHWPLDASFRAVLEMWLSYLQPWRYAPDKQAPGSDSQPRCVSEKWAPFVQENLLMYTKLFVGFLNRALRTDLVSPKHALMVFRVAKVFAQPNLAEMIQKGEQLFLEPELVIPHRQHRLFTAPTFTGSFLSPWPPAVTDASFKVKSHVYSLEGQDCKYTPMFGPEARTLVLRLAQLITQAKHTAKSISDQCAESPAGHSFLSWLGFSSMDTNGSYTANDLDEMGQDSVRKTDEYLEKALEYLRQIFRLSEAQLRQFTLALGTTQDENGKKQLPDCIVGEDGLILTPLGRYQIINGLRRFEIEYQGDPELQPIRSYEIASLVRTLFRLSSAINHRFAGQMAALCSRDDFLGSFCRYHLTEPGLASRHLLSPVGRRQVAGHTRGPRLSLRFLGSYRTLVSLLLAFFVASLFCVGPLPCTLLLTLGYVLYASAMTLLTERGKLHQP

SEQ ID NO: 12059 - protein, 778 aa, Homo sapiens
MLIGEIFELMQFLFVVAFTTFLVSCVDYDILFANKMVNHSLHPTEPVKVTLPDAFLPAQVCSARIQENGSLITILVIAGVFWIHRLIKFIYNICCYWEIHSFYLHALRIPMSALPYCTWQEVQARIVQTQKEHQICIHKRELTELDIYHRILRFQNYMVALVNKSLLPLRFRLPGLGEAVFFTRGLKYNFELILFWGPGSLFLNEWSLKAEYKRGGQRLELAQRLSNRILWIGIANFLLCPLILIWQILYAFFSYAEVLKREPGALGARCWSLYGRCYLRHFNELEHELQSRLNRGYKPASKYMNCFLSPLLTLLAKNGAFFAGSILAVLIALTIYDEDVLAVEHVLTTVTLLGVTVTVCRSFIPDQHMVFCPEQLLRVILAHIHYMPDHWQGNAHRSQTRDEFAQLFQYKAVFILEELLSPIVTPLILIFCLRPRALEIIDFFRNFTVEVVGVGDTCSFAQMDVRQHGHPQWLSAGQTEASVYQQAEDGKTELSLMHFAITNPGWQPPRESTAFLGFLKEQVQRDGAAASLAQGGLLPENALFTSIQSLQSESEPLSLIANVVAGSSCRGPPLPRDLQGSRHRAEVASALRSFSPLQPGQAPTGRAHSTMTGSGVDARTASSGSSVWEGQLQSLVLSEYASTEMSLHALYMHQLHKQQAQAEPERHVWHRRESDESGESAPDEGGEGARAPQSIPRSASYPCAAPRPGAPETTALHGGFQRRYGGITDPGTVPRVPSHFSRLPLGGWAEDGQSASRHPEPVPEEGSEDELPPQVHKV

SEQ ID NO: 12060 - protein, 808 aa, Homo sapiens
METGTAPLVAPPRRHGAPAAPSPPPRGSRAGPVVVVAPGPPVTTATSAPVTLVAPGEARPAWVPGSAETSAPAPAPAPAPAPAVTGSTVVVLTLEASPEAPKPQLPSGPESPEPAAVAGVETSRALAAGADSPKTEEARPSPAPGPGTPTGTPTRTPSRTAPGALTAKPPLAPKPGTTVASGVTARSASGQVTGGHGAAAATSASAGQAPEDPSGPGTGPSGTCEAPVAVVTVTPAPEPAENSQDLGSTSSLGPGISGPRGQAPDTLSYLDSVSLMSGTLESLADDVSSMGSDSEINGLALRKTDKYGFLGGSQYSGSLESSIPVDVARQRELKWLDMFSNWDKWLSRRFQKVKLRCRKGIPSSLRAKAWQYLSNSKELLEQNPGKFEELERAPGDPKWLDVIEKDLHRQFPFHEMFAARGGHGQQDLYRILKAYTIYRPDEGYCQAQAPVAAVLLMHMPAEQAFWCLVQICDKYLPGYYSAGLEAIQLDGEIFFALLRRASPLAHRHLRRQRIDPVLYMTEWFMCIFARTLPWASVLRVWDMFFCEGVKIIFRVALVLLRHTLGSVEKLRSCQGMYETMEQLRNLPQQCMQEDFLVHEVTNLPVTEALIERENAAQLKKWRETRGELQYRPSRRLHGSRAIHEERRRQQPPLGPSSSLLSLPGLKSRGSRAAGGAPSPPPPVRRASAGPAPGPVVTAEGLHPSLPSPTGNSTPLGSSKETRKQEKERQKQEKERQKQEKEREKERQKQEKEREKQEKEREKQEKERQKQEKKAQGRKLSLRRKADGPPGPHDGGDRPSAEARQDAYF

SEQ ID NO: 12061 - protein, 310 aa, Homo sapiens
MDRLLRLGGGMPGLGQGPPTDAPAVDTAEQVYISSLALLKMLKHGRAGVPMEVMGLMLGEFVDDYTVRVIDVFAMPQSGTGVSVEAVDPVFQAKMLDMLKQTGRPEMVVGWYHSHPGFGCWLSGVDINTQQSFEALSERAVAVVVDPIQSVKGKVVIDAFRLINANMMVLGHEPRQTTSNLGHLNKPSIQALIHGLNRHYYSITINYRKNELEQKMLLNLHKKSWMEGLTLQDYSEHCKHNESVVKEMLELAKNYNKAVEEEDKMTPEQLAIKNVGKQDPKRHLEEHVDVLMTSNIVQCLAAMLDTVVFK

SEQ ID NO: 12062 - protein, 137 aa, Homo sapiens
MGDLPGLVRLSIALRIQPNDGPVFYKVDGQRFGQNRTIKLLTGSSYKVEVKIKPSTLQVENISIGGVLVPLELKSKEPDGDRVVYTGTYDTEGVTPTKSGERQPIQITMPVRLACGYRSMVPWKMETTEKKTITISL

SEQ ID NO: 12063 - protein, 586 aa, Homo sapiens
MRPVSVWQWSPWGLLLCLLCSSCLGSPSPSTGPEKKAGSQGLRFRLAGFPRKPYEGRVEIQRAGEWGTICDDDFTLQAAHILCRELGFTEATGWTHSAKYGPGTGRIWLDNLSCSGTEQSVTECASRGWGNSDCTHDEDAGVICKDQRLPGFSDSNVIEARVRLKGGAHPGEGRVEVLKASTWGTVCDRKWDLHAASVVCRELGFGSAREALSGARMGQGMGAIHLSEVRCSGQELSLWKCPHKNITAEDCSHSQDAGVRCNLPYTGAETRIRLSGGRSQHEGRVEVQIGGPGPLRWGLICGDDWGTLEAMVACRQLGLGYANHGLQETWYWDSGNITEVVMSGVRCTGTELSLDQCAHHGTHITCKRTGTRFTAGVICSETASDLLLHSALVQETAYIEDRPLHMLYCAAEENCLASSARSANWPYGHRRLLRFSSQIHNLGRADFRPKAGRHSWVWHECHGHYHSMDIFTHYDILTPNGTKVAEGHKASFCLEDTECQEDVSKRYECANFGEQGITVGCWDLYRHDIDCQWIDITDVKPGNYILQVVINPNFEVAESDFTNNAMKCNCKYDGHRIWVHNCHIGI

SEQ ID NO: 12064 - protein, 173 aa, Homo sapiens
MKVLLRLICFIALLISSLEADKCKEREEKIILVSSANEIDVRPCPLNPNEHKGTITWYKDDSKTPVSTEQASRIHQHKEKLWFVPAKVEDSGHYYCVVRNSSYCLRIKISAKFVENEPNLCYNAQAIFKQKLPVAGDGGLVCPYMEFFKNENNELPKLQWYKVAVSRVWATAL

SEQ ID NO: 12065 - protein, 132 aa, Homo sapiens
MGPRVLQPPLLLLLLALLLAALPCGAEEASPLRPAQVTLSPPPAVTNGSQPGAPHNSTHTRPPGASGSALTRSFYVILGFCGLTALYFLIRAFRLKKPQRRRYGLLANTEDPTEMASLDSDEETVFESRNLR

SEQ ID NO: 12066 - protein, 632 aa, Homo sapiens
MSDKSELKAELERKKQRLAQIREEKKRKEEERKKKETDQKKEAVAPVQEESDLEKKRREAEALLQSMGLTPESPIVPPPMSPSSKSVSTPSEAGSQDSGDGAVGSRTLHWDTDPSVLQLHSDSDLGRGPIKLGMAKITQVDFPPREIVTYTKETQTPVMAQPKEDEEEDDDVVAPKPPIEPEEEKTLKKDEENDSKAPPHELTEEEKQQILHSEEFLSFFDHSTRIVERALSEQINIFFDYSGRDLEDKEGEIQAGAKLSLNRQFFDERWSKHRVVSCLDWSSQYPELLVASYNNNEDAPHEPDGVALVWNMKYKKTTPEYVFHCQSAVMSATFAKFHPNLVVGGTYSGQIVLWDNRSNKRTPVQRTPLSAAAHTHPVYCVNVVGTQNAHNLISISTDGKICSWSLDMLSHPQDSMELVHKQSKAVAVTSMSFPVGDVNNFVVGSEEGSVYTACRHGSKAGISEMFEGHQGPITGIHCHAAVGAVDFSHLFVTSSFDWTVKLWTTKNNKPLYSFEDNADYVYDVMWSPTHPALFACVDGMGRLDLWNLNNDTEVPTASISVEGNPALNRVRWTHSGREIAVGDSEGQIVIYDVGEQIAVPRNDEWARFGRTLAEINANRADAEEEAATRIPA

SEQ ID NO: 12067 - protein, 37 aa, Homo sapiens
MEKKCTLYFLVLLPFFMILVTAELEESPEDSIQLGVT

SEQ ID NO: 12068 - protein, 1597 aa, Homo sapiens
MGSKRRRATSPSSSVSGDFDDGHHSVSTPGPSRKRRRLSNLPTVDPIAVCHELYNTIRDYKDEQGRLLCELFIRAPKRRNQPDYYEVVSQPIDLMKIQQKLKMEEYDDVNLLTADFQLLFNNAKSYYKPDSPEYKAACKLWDLYLRTRNEFVQKGEADDEDDDEDGQDNQGTVTEGSSPAYLKEILEQLLEAIVVATNPSGRLISELFQKLPSKVQYPDYYAIIKEPIDLKTIAQRIQNGSYKSIHAMAKDIDLLAKNAKTYNEPGSQVFKDANSIKKIFYMKKAEIEHHEMAKSSLRMRTPSNLAAARLTGPSHSKGSLGEERNPTSKYYRNKRAVQGGRLSAITMALQYGSESEEDAALAAARYEEGESEAESITSFMDVSNPFYQLYDTVRSCRNNQGQLIAEPFYHLPSKKKYPDYYQQIKMPISLQQIRTKLKNQEYETLDHLECDLNLMFENAKRYNVPNSAIYKRVLKLQQVMQAKKKELARRDDIEDGDSMISSATSDTGSAKRKRNTHDSEMLGLRRLSSKKNIRKQRMKILFNVVLEAREPGSGRRLCDLFMVKPSKKDYPDYYKIILEPMDLKIIEHNIRNDKYAGEEGMIEDMKLMFRNARHYNEEGSQVYNDAHILEKLLKEKRKELGPLPDDDDMASPKLKLSRKSGISPKKSKYMTPMQQKLNEVYEAVKNYTDKRGRRLSAIFLRLPSRSELPDYYLTIKKPMDMEKIRSHMMANKYQDIDSMVEDFVMMFNNACTYNEPESLIYKDALVLHKVLLETRRDLEGDEDSHVPNVTLLIQELIHNLFVSVMSHQDDEGRCYSDSLAEIPAVDPNFPNKPPLTFDIIRKNVENNRYRRLDLFQEHMFEVLERARRMNRTDSEIYEDAVELQQFFIKIRDELCKNGEILLSPALSYTTKHLHNDVEKERKEKLPKEIEEDKLKREEEKREAEKSEDSSGAAGLSGLHRTYSQDCSFKNSMYHVGDYVYVEPAEANLQPHIVCIERLWEDSAGEKWLYGCWFYRPNETFHLATRKFLEKEVFKSDYYNKVPVSKILGKCVVMFVKEYFKLCPENFRDEDVFVCESRYSAKTKSFKKIKLWTMPISSVRFVPRDVPLPVVRVASVFANADKGDDEKNTDNSEDSRAEDNFNLEKEKEDVPVEMSNGEPGCHYFEQLHYNDMWLKVGDCVFIKSHGLVRPRVGRIEKVWVRDGAAYFYGPIFIHPEETEHEPTKMFYKKEVFLSNLEETCPMTCILGKCAVLSFKDFLSCRPTEIPENDILLCESRYNESDKQMKKFKGLKRFSLSAKVVDDEIYYFRKPIVPQKEPSPLLEKKIQLLEAKFAELEGGDDDIEEMGEEDSEVIEPPSLPQLQTPLASELDLMPYTPPQSTPKSAKGSAKKEGSKRKINMSGYILFSSEMRAVIKAQHPDYSFGELSRLVGTEWRNLETAKKAEYEGVMNQGVAPMVGTPAPGGSPYGQQVGVLGPPGQQAPPPYPGPHPAGPPVIQQPTTPMFVAPPPKTQRLLHSEAYLKYIEGLSAESNSISKWDQTLAARRRDVHLSKEQESRLPSHWLKSKGAHTTMADALWRLRDLMLRDTLNIRQAYNLENV

SEQ ID NO: 12069 - protein, 200 aa, Homo sapiens
MRPLPSGRRKTRGISLGLFALCLAAARCLQSQGVSLYIPQATINATVKEDILLSVEYSCHGVPTIEWTYSSNWGTQKIVEWKPGTQANISQSHKDRVCTFDNGSIQLFSVGVRDSGYYVITVTERLGSSQFGTIVLHVSEILYEDLHFVAVILAFLAAVAAVLISLMWVCNKCAYKFQRKRRHKLKESTTEEIELEDVEC

SEQ ID NO: 12070 - protein, 1941 aa, Homo sapiens
MAQGSGGREGALRTPAGGWHSPPSPDMQELLRSVERDLSIDPRQLAPAPGGTHVVALVPARWLASLRDRRLPLGPCPRAEGLGEAEVRTLLQRSVQRLPAGWTRVEVHGLRKRRLSYPLGGGLPFEDGSCGPETLTRFMQEVAAQNYRNLWRHAYHTYGQPYSHSPAPSAVPALDSVRQALQRVYGCSFLPVGETTQCPSYAREGPCPPRGSPACPSLLRAEALLESPEMLYVVHPYVQFSLHDVVTFSPAKLTNSQAKVLFILFRVLRAMDACHRQGLACGALSLYHIAVDEKLCSELRLDLSAYERPEEDENEEAPVARDEAGIVSQEEQGGQPGQPTGQEELRSLVLDWVHGRISNFHYLMQLNRLAGRRQGDPNYHPVLPWVVDFTTPHGRFRDLRKSKFRLNKGDKQLDFTYEMTRQAFVAGGAGGGEPPHVPHHISDVLSDITYYVYKARRTPRSVLCGHVRAQWEPHEYPASMERMQNWTPDECIPEFYTDPSIFRSIHPDMPDLDVPAWCSSSQEFVAAHRALLESREVSRDLHHWIDLTFGYKLQGKEAVKEKNVCLHLVDAHTHLASYGVVQLFDQPHPQRLAGAPALAPEPPLIPKLLVQTIQETTGREDFTENPGQLPNGVGRPVLEATPCEASWTRDRPVAGEDDLEQATEALDSISLAGKAGDQLGSSSQASPGLLSFSVASASRPGRRNKAAGADPGEGEEGRILLPEGFNPMQALEELEKTGNFLAKGLGGLLEVPEQPRVQPAVPLQCLLHRDMQALGVLLAEMVFATRVRTLQPDAPLWVRFQAVRGLCTRHPKEVPVSLQPVLDTLLQMSGPEVPMGAERGKLDQLFEYRPVSQGLPPPCPSQLLSPFSSVVPFPPYFPALHRFILLYQARRVEDEAQGRELVFALWQQLGAVLKDITPEGLEILLPFVLSLMSEEHTAVYTAWYLFEPVAKALGPKNANKYLLKPLIGAYESPCQLHGRFYLYTDCFVAQLMVRLGLQAFLTHLLPHVLQVLAGAEASQEESKDLAGAAEEEESGLPGAGPGSCAFGEEIPMDGEPPASSGLGLPDYTSGVSFHDQADLPETEDFQAGLYVTESPQPQEAEAVSLGRLSDKSSTSETSLGEERAPDEGGAPVDKSSLRSGDSSQDLKQSEGSEEEEEEEDSCVVLEEEEGEQEEVTGASELTLSDTVLSMETVVAGGSGGDGEEEEEALPEQSEGKEQKILLDTACKMVRWLSAKLGPTVASRHVARNLLRLLTSCYVGPTRQQFTVSSGESPPLSAGNIYQKRPVLGDIVSGPVLSCLLHIARLYGEPVLTYQYLPYISYLVAPGSASGPSRLNSRKEAGLLAAVTLTQKIIVYLSDTTLMDILPRISHEVLLPVLSFLTSLVTGFPSGAQARTILCVKTISLIALICLRIGQEMVQQHLSEPVATFFQVFSQLHELRQQDLKLDPAGRGEGQLPQVVFSDGQQRPVDPALLDELQKVFTLEMAYTIYVPFSCLLGDIIRKIIPNHELVGELAALYLESISPSSRNPASVEPTMPGTGPEWDPHGGGCPQDDGHSGTFGSVLVGNRIQIPNDSRPENPGPLGPISGVGGGGLGSGSDDNALKQELPRSVHGLSGNWLAYWQYEIGVSQQDAHFHFHQIRLQSFPGHSGAVKCVAPLSSEDFFLSGSKDRTVRLWPLYNYGDGTSETAPRLVYTQHRKSVFFVGQLEAPQHVVSCDGAVHVWDPFTGKTLRTVEPLDSRVPLTAVAVMPAPHTSITMASSDSTLRFVDCRKPGLQHEFRLGGGLNPGLVRALAISPSGRSVVAGFSSGFMVLLDTRTGLVLRGWPAHEGDILQIKAVEGSVLVSSSSDHSLTVWKELEQKPTHHYKSASDPIHTFDLYGSEVVTGTVSNKIGVCSLLEPPSQATTKLSSENFRGTLTSLALLPTKRHLLLGSDNGVIRLLA

SEQ ID NO: 12071 - protein, 377 aa, Homo sapiens
MEPWPLLLLFSLCSAGLVLGSEHETRLVAKLFKDYSSVVRPVEDHRQVVEVTVGLQLIQLINVDEVNQIVTTNVRLKQQWVDYNLKWNPDDYGGVKKIHIPSEKIWRPDLVLYNNADGDFAIVKFTKVLLQYTGHITWTPPAIFKSYCEIIVTHFPFDEQNCSMKLGTWTYDGSVVAINPESDQPDLSNFMESGEWVIKESRGWKHSVTYSCCPDTPYLDITYHFVMQRLPLYFIVNVIIPCLLFSFLTGLVFYLPTDSGEKMTLSISVLLSLTVFLLVIVELIPSTSSAVPLIGKYMLFTMVFVIASIIITVIVINTHHRSPSTHVMPNWVRKAAAEWKYVAMVMDHILLGVFMLVCIIGTLAVFAGRLIELNQQG

SEQ ID NO: 12072 - protein, 954 aa, Homo sapiens
MGVTVQSQGPGGKVVTCAHRYEKRQHVNTKQESRDIFGRCYVLSQNLRIEDDMDGGDWSFCDGRLRGHEKFGSCQQGVAATFTKDFHYIVFGAPGTYNWKGLLFLTSVSYTDPDQFVYKTRPPREQPDTFPDVMMNSYLGFSLDSGKGIVSKDEITFVSGAPRANHSGAVVLLKRDMKSAHLLPEHIFDGEGLASSFGYDVAVVDLNKDGWQDIVIGAPQYFDRDGEVGGAVYVYMNQQGRWNNVKPIRLNGTKDSMFGIAVKNIGDINQDGYPDIAVGAPYDDLGKVFIYHGSANGINTKPTQVLKGISPYFGYSIAGNMDLDRNSYPDVAVGSLSDSVTIFRSRPVINIQKTITVTPNRIDLRQKTACGAPSGICLQVKSCFEYTANPAGYNPSISIVGTLEAEKERRKSGLSSRVQFRNQGSEPKYTQELTLKRQKQKVCMEETLWLQDNIRDKLRPIPITASVEIQEPSSRRRVNSLPEVLPILNSDEPKTAHIDVHFLKEGCGDDNVCNSNLKLEYKFCTREGNQDKFSYLPIQKGVPELVLKDQKDIALEITVTNSPSNPRNPTKDGDDAHEAKLIATFPDTLTYSAYRELRAFPEKQLSCVANQNGSQADCELGNPFKRNSNVTFYLVLSTTEVTFDTPDLDINLKLETTSNQDNLAPITAKAKVVIELLLSVSGVAKPSQVYFGGTVVGEQAMKSEDEVGSLIEYEFRVINLGKPLTNLGTATLNIQWPKEISNGKWLLYLVKVESKGLEKVTCEPQKEINSLNLTESHNSRKKREITEKQIDDNRKFSLFAERKYQTLNCSVNVNCVNIRCPLRGLDSKASLILRSRLWNSTFLEEYSKLNYLDILMRAFIDVTAAAENIRLPNAGTQVRVTVFPSKTVAQYSGVPWWIILVAILAGILMLALLVFILWKCGFFKRNKKDHYDATYHKAEIHAQPSDKERLTSDA

SEQ ID NO: 12073 - protein, 314 aa, Homo sapiens
MGFWILAILTILMYSTAAKFSKQSWGLENEALIVRCPRQGKPSYTVDWYYSQTNKSIPTQERNRVFASGQLLKFLPAAVADSGIYTCIVRSPTFNRTGYANVTIYKKQSDCNVPDYLMYSTVSGSEKNSKIYCPTIDLYNWTAPLEWFKNCQALQGSRYRAHKSFLVIDNVMTEDAGDYTCKFIHNENGANYSVTATRSFTVKDEQGFSLFPVIGAPAQNEIKEVEIGTQFLAAVLWQLNGTKITDFGEPRIQQEEGQNQSFSNGLACLDMVLRIADVKEEDLLLQYDCLALNLHGLRRHTVRLSRKNPSKECF

SEQ ID NO: 12074 - protein, 114 aa, Homo sapiens
MFTSEKGVVEEWLSEFKTLPETSLPNYATNLKDKSSLVSSLYKVIQEPQSELLEPVCHQLFEFYRSGEEQLLQFTLQFLPELIWCYLAVSASRNVHSSGCIEALLLGVYNLVCI

SEQ ID NO: 12075 - protein, 305 aa, Homo sapiens
MNCQQLWLGFLLPMTVSGRVLGLAEVAPVDYLSQYGYLQKPLEGSNNFKPEDITEALRAFQEASELPVSGQLDDATRARMRQPRCGLEDPFNQKTLKYLLLGRWRKKHLTFRILNLPSTLPPHTARAALRQAFQDWSNVAPLTFQEVQAGAADIRLSFHGRQSSYCSNTFDGPGKKSPVIRDEEEEETELPTVPPVPTEPSPMPDPCSSELDAMMLGEAPPLQAVGRRWGQPADPEAWTNGSDMGLQHEQWRAPWEDLCFQGGLCVDCIRFRTGPLVPSVCPLGGAPRKPGCCCLLASNTMDSLL

SEQ ID NO: 12076 - protein, 950 aa, Homo sapiens
MRRPRRPGGLGGSGGLRLLLCLLLLSSRPGGCSAVSAHGCLFDRRLCSHLEVCIQDGLFGQCQVGVGQARPLLQVTSPVLQRLQGVLRQLMSQGLSWHDDLTQYVISQEMERIPRLRPPEPRPRDRSGLAPKRPGPAGELLLQDIPTGSAPAAQHRLPQPPVGKGGAGASSSLSPLQAELLPPLLEHLLLPPQPPHPSLSYEPALLQPYLFHQFGSRDGSRVSEGSPGMVSVGPLPKAEAPALFSRTASKGIFGDHPGHSYGDLPGPSPAQLFQDSGLLYLAQELPAPSRARVPRLPEQGSSSRAEDSPEGYEKEGLGDRGEKPASPAVQPDAALQRLAAVLAGYGVELRQLTPEQLSTLLTLLQLLPKGAGRNPGGVVNVGADIKKTMEGPVEGRDTAELPARTSPMPGHPTASPTSSEVQQVPSPVSSEPPKAARPPVTPVLLEKKSPLGQSQPTVAGQPSARPAAEEYGYIVTDQNVVGPALTFRIRHNEQNLSLADVTQQAGLVKSELEAQTGLQILQTGVGQREEAAAVLPQTAHSTSPMRSVLLTLVALAGVAGLLVALAVALCVRQHARQQDKERLAALGPEGAHGDTTFEYQDLCRQHMATKSLFNRAEGPPEPSRVSSVSSQFSDAAQASPSSHSSTPSWCEEPAQANMDISTGHMILAYMEDHLRNRDRLAKEWQALCAYQAEPNTCATAQGEGNIKKNRHPDFLPYDHARIKLKVESSPSRSDYINASPIIEHDPRMPAYIATQGPLSHTIADFWQMVWESGCTVIVMLTPLVEDGVKQCDRYWPDEGASLYHVYEVNLVSEHIWCEDFLVRSFYLKNVQTQETRTLTQFHFLSWPAEGTPASTRPLLDFRRKVNKCYRGRSCPIIVHCSDGAGRTGTYILIDMVLNRMAKGVKEIDIAATLEHVRDQRPGLVRSKDQFEFALTAVAEEVNAILKALPQ

SEQ ID NO: 12077 - protein, 118 aa, Homo sapiens
MDVFLMIRRHKTTIFTDAKESSTVFELKRIVEGILKRPPDEQRLYKDDQLLDDGKTLGECGFTSQTARPQAPATVGLAFRADDTFEALCIEPFSSPPELPDVMKPQDSGSSANEQAVQ

SEQ ID NO: 12078 - protein, 222 aa, Homo sapiens
MAFVKSGWLLRQSTILKRWKKNWFDLWSDGHLIYYDDQTRQNIEDKVHMPMDCINIRTGQECRDTQPPDGKSKDCMLQIVCRDGKTISLCAESTDDCLAWKFTLQDSRTNTAYVGSAVMTDETSVVSSPPPYTAYAAPAPEQAYGYGPYGGAYPPGTQVVYAANGQAYAVPYQYPYAGLYGQQPANQVIIRERYRDNDSDLALGMLAGAATGMALGSLFWVF

SEQ ID NO: 12079 - protein, 495 aa, Homo sapiens
MWQLTSLLLFVATWGISGTPAPLDSVFSSSERAHQVLRIRKRANSFLEELRHSSLERECIEEICDFEEAKEIFQNVDDTLAFWSKHVDGDQCLVLPLEHPCASLCCGHGTCIDGIGSFSCDCRSGWEGRFCQRGEGERWMLAGGGAGLGPGWGRGTSTSCPRPPLPAEVSFLNCSLDNGGCTHYCLEEVGWRRCSCAPGYKLGDDLLQCHPAVKFPCGRPWKRMEKKRSHLKRDTEDQEDQVDPRLIDGKMTRRGDSPWQVVLLDSKKKLACGAVLIHPSWVLTAAHCMDESKKLLVRLGEYDLRRWEKWELDLDIKEVFVHPNYSKSTTDNDIALLHLAQPATLSQTIVPICLPDSGLAERELNQAGQETLVTGWGYHSSREKEAKRNRTFVLNFIKIPVVPHNECSEVMSNMVSENMLCAGILGDRQDACEGDSGGPMVASFHGTWFLVGLVSWGEGCGLLHNYGVYTKVSRYLDWIHGHIRDKEAPQKSWAP

SEQ ID NO: 12080 - protein, 486 aa, Homo sapiens
MAAALPRTLGELQLYRILQKANLLSYFDAFIQQGGDDVQQLCEAGEEEFLEIMALVGMASKPLHVRRLQKALRDWVTNPGLFNQPLTSLPVSSIPIYKLPEGSPTWLGISCSSYERSSNAREPHLKIPKCAATTCVQSLGQGKSDVVGSLALQSVGESRLWQGHHATESEHSLSPADLGSPASPKESSEALDAAAALSVAECVERMAPTLPKSDLNEVKELLKTNKKLAKMIGHIFEMNDDDPHKEEEIRKYSAIYGRFDSKRKDGKHLTLHELTVNEAAAQLCVKDNALLTRRDELFALARQISREVTYKYTYRTTKSKCGERDELSPKRIKVEDGFPDFQDSVQTLFQQARAKSEELAALSSQPEKVMAKQMEFLCNQAGYERLQHAERRLSAGLYRQSSEEHSPNGLTSDNSDGQGERPLNLRMPNLQNRQPHHFVVDGELSRLYPSEAKSHSSESLGILKDYPHSAFTLEKKVIKTEPEDSR

SEQ ID NO: 12081 - protein, 269 aa, Homo sapiens
MEPWPLLLLFSLCSAGLVLGSEHETRLVAKLFKDYSSVVRPVEDHRQVVEVTVGLQLIQLINVDEVNQIVTTNVRLKQQWVDYNLKWNPDDYGGVKKIHIPSEKIWRPDLVLYNNADGDFAIVKFTKVLLQYTGHITWTPPAIFKSYCEIIVTHFPFDEQNCSMKLGTWTYDGSVVAINPESDQPDLSNFMESGEWVIKESRGWKHSVTYSCCPDTPYLDITYHFVMQRLPLYFIVNVIIPCLLFSFLTGLVFYLPTDSGGCGCHDCCC

SEQ ID NO: 12082 - protein, 697 aa, Homo sapiens
MRPVSVWQWSPWGLLLCLLCSSCLGSPSPSTGPEKKAGSQGLRFRLAGFPRKPYEGRVEIQRAGEWGTICDDDFTLQAAHILCRELGFTEATGWTHSAKYGPGTGRIWLDNLSCSGTEQSVTECASRGWGNSDCTHDEDAGVICKDQRLPGFSDSNVIEVEHHLQVEEVRIRPAVGWGRRPLPVTEGLVEVRLPDGWSQVCDKGWSAHNSHVVCGMLGFPSEKRVNAAFYRLLAQRQQHSFGLHGVACVGTEAHLSLCSLEFYRANDTARCPGGGPAVVSCVPGPVYAASSGQKKQQQSKPQGEARVRLKGGAHPGEGRVEVLKASTWGTVCDRKWDLHAASVVCRELGFGSAREALSGARMGQGMGAIHLSEVRCSGQELSLWKCPHKNITAEDCSHSQDAGVRCNLPYTGAETRETWYWDSGNITEVVMSGVRCTGTELSLDQCAHHGTHITCKRTGTRFTAGVICSETASDLLLHSALVQETAYIEDRPLHMLYCAAEENCLASSARSANWPYGHRRLLRFSSQIHNLGRADFRPKAGRHSWVWHECHGHYHSMDIFTHYDILTPNGTKVAEGHKASFCLEDTECQEDVSKRYECANFGEQGITVGCWDLYRHDIDCQWIDITDVKPGNYILQVVINPNFEVAESDFTNNAMKCNCKYDGHRIWVHNCHIGDAFSEEANRRFERYPGQTSNQII

SEQ ID NO: 12083 - protein, 128 aa, Homo sapiens
MAPAKKGGEKKKGRSAINEVVTREYTINIHKRIHGVGFKKRAPRALKEIRKFAMKEMGTPDVRIDTRLNKAVWAKGIRNVPYRIRVRLSRKRNEDEDSPNKLYTLVTYVPVTTFKISVLNSVTVAKSP

SEQ ID NO: 12084 - protein, 483 aa, Homo sapiens
MTTLAGAVPRMMRPGPGQNYPRSGFPLEVSTPLGQGRVNQLGGVFINGRPLPNHIRHKIVEMAHHGIRPCVISRQLRVSHGCVSKILCRYQETGSIRPGAIGGSKPKVTTPDVEKKIEEYKRENPGMFSWEIRDKLLKDAVCDRNTVPSVSSISRILRSKFGKGEEEEADLERKEAEESEKKAKHSIDGILSERASAPQSDEGSDIDSEPDLPLKRKQRRSRTTFTAEQLEELERAFERTHYPDIYTREELAQRAKLTEARVQVWFSNRRARWRKQAGANQLMAFNHLIPGGFPPTAMPTLPTYQLSETSYQPTSIPQAVSDPSSTVHRPQPLPPSTVHQSTIPSNPDSSSAYCLPSTRHGFSSYTDSFVPPSGPSNPMNPTIGNGLSPQVMGLLTNHGGVPHQPQTDYALSPLTGGLEPTTTVSASCSQRLDHMKSLDSLPTSQSYCPPTYSTTGYSMDPVTGYQYGQYGQSAFHYLKPDIA

SEQ ID NO: 12085 - protein, 590 aa, Homo sapiens
MAANMYRVGDYVYFENSSSNPYLIRRIEELNKTASGNVEAKVVCFYRRRDISNTLIMLADKHAKEIEEESETTVEADLTDKQKHQLKHRELFLSRQYESLPATHIRGKCSVALLNETESVLSYLDKEDTFFYSLVYDPSLKTLLADKGEIRVGPRYQADIPEMLLEGESDEREQSKLEVKVWDPNSPLTDRQIDQFLVVARAVGTFARALDCSSSVRQPSLHMSAAAASRDITLFHAMDTLYRHSYDLSSAISVLVPLGGPVLCRDEMEEWSASEASLFEEALEKYGKDFNDIRQDFLPWKSLTSIIEYYYMWKTTDRYVQQKRLKAAEAESKLKQVYIPTYKPNPNQISTSNGKPGAVNGAVGTTFQPQNPLLGRACESCYATQSHQWYSWGPPNMQCRLCAICWLYWKKYGGLKMPTQSEEEKLSPSPTTEDPRVRSHVSRQAMQGMPVRNTGSPKSAVKTRQAFFLHTTYFTKFARQVCKNTLRLRQAARRPFVAINYAAIRAEYADRHAELSGSPLKSKSTRKPLACIIGYLEIHPAKKPNVIRSTPSLQTPTTKRMLTTPNHTSLSILGKRNYSHHNGLDEKLMK

SEQ ID NO: 12086 - protein, 529 aa, Homo sapiens
MDDHVTIRKKHLQRPIFRLRCLVKQLERGDVNVVDLKKNIEYAASVLEAVYIDETRRLLDTEDELSDIQTDSVPSEVRDWLASTFTRKMGMTKKKPEEKPKFRSIVHAVQAGIFVERMYRKTYHMVGLAYPAAVIVTLKDVDKWSFDVFALNEASGEHSLKFMIYELFTRYDLINRFKIPVSCLITFAEALEVGYSKYKNPYHNLIHAADVTQTVHYIMLHTGIMHWLTELEILAMVFAAAIHDYEHTGTTNNFHIQTRSDVAILYNDRSVLENHHVSAAYRLMQEEEMNILINLSKDDWRDLRNLVIEMVLSTDMSGHFQQIKNIRNSLQQPEGIDRAKTMSLILHAADISHPAKSWKLHYRWTMALMEEFFLQGDKEAELGLPFSPLCDRKSTMVAQSQIGFIDFIVEPTFSLLTDSTEKIVIPLIEEASKAETSSYVASSSTTIVGLHIADALRRSNTKGSMSDGSYSPDYSLAAVDLKSFKNNLVDIIQQNKERWKELAAQGESDLHKNSEDLVNAEEKHDETHS

SEQ ID NO: 12087 - protein, 538 aa, Homo sapiens
MKVLLRLICFIALLISSLEADKCKEREEKIILVSSANEIDVRPCPLNPNEHKGTITWYKDDSKTPVSTEQASRIHQHKEKLWFVPAKVEDSGHYYCVVRNSSYCLRIKISAKFVENEPNLCYNAQAIFKQKLPVAGDGGLVCPYMEFFKNENNELPKLQWYKDCKPLLLDNIHFSGVKDRLIVMNVAEKHRGNYTCHASYTYLGKQYPITRVIEFITLEENKPTRPVIVSPANETMEVDLGSQIQLICNVTGQLSDIAYWKWNGSVIDEDDPVLGEDYYSVENPANKRRSTLITVLNISEIESRFYKHPFTCFAKNTHGIDAAYIQLIYPVTNFQKHMIGICVTLTVIIVCSVFIYKIFKIDIVLWYRDSCYDFLPIKVLPEVLEKQCGYKLFIYGRDDYVGEDIVEVINENVKKSRRLIIILVRETSGFSWLGGSSEEQIAMYNALVQDGIKVVLLELEKIQDYEKMPESIKFIKQKHGAIRWSGDFTQGPQSAKTRFWKNVRYHMPVQRRSPSSKHQLLSPATKEKLQREAHVPLG

SEQ ID NO: 12088 - protein, 1610 aa, Homo sapiens
MAGLRRPQPGCYCRTAAAVNLLLGVFQVLLPCCRPGGAQGQAIEPLPNVVELWQAEEGELLLPTQGDSEEGLEEPSQEQSFSDKLFSGKGLHFQPSVLDFGIQFLGHPVAKILHAYNPSRDSEVVVNSVFAAAGHFHVPPVPCRVIPAMGKTSFRIIFLPTEEGSIESSLFINTSSYGVLSYHVSGIGTRRISTEGSAKQLPNAYFLLPKVQSIQLSQMQAETTNTSLLQVQLECSLHNKVCQQLKGCYLESDDVLRLQMSIMVTMENFSKEFEENTQHLLDHLSIVYVATDESETSDDSAVNMYILHSGNSLIWIQDIRHFSQRDALSLQFEPVLLPTSTTNFTKIASFTCKAATSCDSGIIEDVKKTTHTPTLKACLFSSVAQGYFRMDSSATQFHIETHENTSGLWSIWYRNHFDRSVVLNDVFLSKETKHMLKILNFTGPLFLPPGCWNIFSLKLAVKDIAINLFTNVFLTTNIGAIFAIPLQIYSAPTKEGSLGFEVIAHCGMHYFMGKSKAGNPNWNGSLSLDQSTWNVDSELANKLYERWKKYKNGDVCKRNVLGTTRFAHLKKSKESESFVFFLPRLIAEPGLMLNFSATALRSRMIKYFVVQNPSSWPVSLQLLPLSLYPKPEALVHLLHRWFGTDMQMINFTTGEFQLTEACPYLGTHSEESRFGILHLHLQPLEMKRVGVVFTPADYGKVTSLILIRNNLTVIDMIGVEGFGARELLKVGGRLPGAGGSLRFKVPESTLMDCRRQLKDSKQILSITKNFKVENIGPLPITVSSLKINGYNCQGYGFEVLDCHQFSLDPNTSRDISIVFTPDFTSSWVIRDLSLVTAADLEFRFTLNVTLPHHLLPLCADVVPGPSWEESFWRLTVFFVSLSLLGVILIAFQQAQYILMEFMKTRQRQNASSSSQQNNGPMDVISPHSYKSNCKNFLDTYGPSDKGRGKNCLPVNTPQSRIQNAAKRSPATYGHSQKKHKCSVYYSKHKTSTAAASSTSTTTEEKQTSPLGSSLPAAKEDICTDAMRENWISLRYASGINVNLQKNLTLPKNLLNKEENTLKNTIVFSNPSSECSMKEGIQTCMFPKETDIKTSENTAEFKERELCPLKTSKKLPENHLPRNSPQYHQPDLPEISRKNNGNNQQVPVKNEVDHCENLKKVDTKPSSEKKIHKTSREDMFSEKQDIPFVEQEDPYRKKKLQEKREGNLQNLNWSKSRTCRKNKKRGVAPVSRPPEQSDLKLVCSDFERSELSSDINVRSWCIQESTREVCKADAEIASSLPAAQREAEGYYQKPEKKCVDKFCSDSSSDCGSSSGSVRASRGSWGSWSSTSSSDGDKKPMVDAQHFLPAGDSVSQNDFPSEAPISLNLSHNICNPMTVNSLPQYAEPSCPSLPAGPTGVEEDKGLYSPGDLWPTPPVCVTSSLNCTLENGVPCVIQESAPVHNSFIDWSATCEGQFSSAYCPLELNDYNAFPEENMNYANGFPCPADVQTDFIDHNSQSTWNTPPNMPAAWGHASFISSPPYLTSTRSLSPMSGLFGSIWAPQSDVYENCCPINPTTEHSTHMENQAVVCKEYYPGFNPFRAYMNLDIWTTTANRNANFPLSRDSSYCGNV

SEQ ID NO: 12089 - protein, 235 aa, Homo sapiens
MSRYGRYGGETKVYVGNLGTGAGKGELERAFSYYGPLRTVWIARNPPGFAFVEFEDPRDAEDAVRGLDGKVICGSRVRVELSTGMPRRSRFDRPPARRPFDPNDRCYECGEKGHYAYDCHRYSRRRRSRSRSRSHSRSRGRRYSRSRSRSRGRRSRSASPRRSRSISLRRSRSASLRRSRSGSIKGSRSPSRSRSRSRSISRPRSSRSKSRSPSPKRSRSPSGSPRRSASPERMD

SEQ ID NO: 12090 - protein, 128 aa, Homo sapiens
MRVARRTRNVCRCPRAAGPGVPEPRAAPLPLLAMAPPPACRSPMSPPPPPLLLLLLSLALLGARARAEPAGSAVPAQSRPCVDCHAFEFMQRALQDLRKTACSLDARTETLLLQAERRALCACWPAGH

SEQ ID NO: 12091 - protein, 904 aa, Homo sapiens
MLSSWQGGPRPRQLLLWLLILAAWETGSGQLHYSVPEEAKHGTFVGRIAQDLGLELAELVPRLFRVASKRHGDLLEVNLQNGILFVNSRIDREELCGRSAECSIHLEVIVDRPLQVFHVEVKVRDINDNPPIFPESKKRIIIAESRPPETRFPLDGASDADIGVNSALTYRLDPNDYFTLDAQNSLEQMSSLSLVLRKTLDREEIQEHSLLLTASDGGKPELTGTVQLLITILDVNDNAPEFYQSVYKVTVLENAFNGTLVIKLNATDPDDGTNGDIVYSFRRPVWPAVVYAFTINPNNGEIRTKGKLDFEEKKLYEISVEAVDKGNIPMAGHCTLLVEVLDVNDNAPEVTITSLSLPIREDTQPSAIIALISVSDRDSGSNGQVTCTLTPHVPFKLVSTYKNYYSLVLDSALDRESVSAYELVVTARDGGSPSLWATASVSVGVADVNDNAPAFAQPEYTVFVKENNPPGCHIFTVSAQDADAQENALVSYSLVERRVGERALSSYVSVHAESGKVYALQPLDHEELELLQFQVSARDSGVPPLGSNVTLQVFVLDENDNAPALLTPGAGSAGGTVSELMPRSVGAGHVVAKVRAVDADSGYNAWLSYELQLAAVGARIPFRVGLYTGEISTTRPLDEVDAPHHRLLVLVKDHGEPALTATATVLLSLVESGQAPQASSRASAGAVGPEAALVDVNVYLIIAICAVSSLLVLTLLLYTALRCSAPPTEGACAPGKPTLVCSSAAGSWSYSQQRRPRVCSGEGPHKTDLMAFSPSLPPCLGSAEGTGQREEDSECLKEPRQPNPDWRYSASLRAGMHSSVHLEEAGILRAGPGGPDQQWPTVSSATPEPEAGEVSPPVGAGVNSNSWTFKYGPGNPKQSGPEPKKQTQVSFLLRRKGEASQPRQ

SEQ ID NO: 12092 - protein, 305 aa, Homo sapiens
MVPSSPRALFLLLLILACPEPRASQNCLSKQQLLSAIRQLQQLLKGQETRFAEGIRHMKSRLAALQNSVGRVGPDALPVSCPALNTPADGRKFGSKYLVDHEVHFTCNPGFRLVGPSSVVCLPNGTWTGEQPHCRDVDECVGLQPVCPQGTTCINTGGSFQCVSPECPEGSGNVSYVKTSPFQCERNPCPMDSRPCRHLPKTISFHYLSLPSNLKTPITLFRMATASAPGRAGPNSLRFGIVGGNSRGHFVMQRSDRQTGDLILVQNLEGPQTLEVDVDMSEYLDRSFQANHVSKVTIFVSPYDF

SEQ ID NO: 12093 - protein, 681 aa, Homo sapiens
MGIELLCLFFLFLGRNDHVQGGCALGGAETCEDCLLIGPQCAWCAQENFTHPSGVGERCDTPANLLAKGCQLNFIENPVSQVEILKNKPLSVGRQKNSSDIVQIAPQSLILKLRPGGAQTLQVHVRQTEDYPVDLYYLMDLSASMDDDLNTIKELGSRLSKEMSKLTSNFRLGFGSFVEKPVSPFVKTTPEEIANPCSSIPYFCLPTFGFKHILPLTNDAERFNEIVKNQKISANIDTPEGGFDAIMQAAVCKEKIGWRNDSLHLLVFVSDADSHFGMDSKLAGIVIPNDGLCHLDSKNEYSMSTVLEYPTIGQLIDKLVQNNVLLIFAVTQEQVHLYENYAKLIPGATVGLLQKDSGNILQLIISAYEELRSEVELEVLGDTEGLNLSFTAICNNGTLFQHQKKCSHMKVGDTASFSVTVNIPHCERRSRHIIIKPVGLGDALELLVSPECNCDCQKEVEVNSSKCHHGNGSFQCGVCACHPGHMGPRCECGEDMLSTDSCKEAPDHPSCSGRGDCYCGQCICHLSPYGNIYGPYCQCDNFSCVRHKGLLCGDFSKDGSVSCSLQGENECLITFLITTDNEGKTIIHSINEKDCPKPPNIPMIMLGVSLAILLIGVVLLCIWKLLVSFHDRKEVAKFEAERSKAKWQTGTNPLYRGSTSTFKNVTYKHREKQKVDLSTDC

SEQ ID NO: 12094 - protein, 1251 aa, Homo sapiens
MDSFDLALLQEWDLESLWGEDILNQRNDSLVVEFQSSASRCRSVYEPDRNALRRKERERRNQETQQDDGTFNSSYSLFSEPYKTNKGDELSNRIQNTLGNYDEMKDFLTDRSNQSHLVGVPKPGVPQTPVNKIDEHFVADSRAQNQPSSICSTTTSTPAAVPVQQSKRGTMGWQKAGHPPSDGQQRATQQGSLRTLLGDGVGRQQPRAKQVCNVEVGLQTQERPPAMAAKHSSSGHCVQNFPPSLASKPSLVQQKPTAYVRPMDGQDQAPDESPKLKSSSETSVHCTSYRGVPASKPEPARAKAKLSKFSIPKQGEESRSGETNSCVEEIIREMTWLPPLSAIQAPGKVEPTKFPFPNKDSQLVSSGHNNPKKGDAEPESPDNGTSNTSMLEDDLKLSSDEEENEQQAAQRTALRALSDSAVVQQPNCRTSVPSSKGSSSSSSSGSSSSSSDSESSSGSDSETESSSSESEGSKPPHFSSPEAEPASSNKWQLDKWLNKVNPHKPPILIQNESHGSESNQYYNPVKEDVQDCGKVPDVCQPSLREKEIKSTCKEEQRPRTANKAPGSKGVKQKSPPAAVAVAVSAAAPPPAVPCAPAENAPAPARRSAGKKPTRRTERTSAGDGANCHRPEEPAAADALGTSVVVPPEPTKTRPCGNNRASHRKELRSSVTCEKRRTRGLSRIVPKSKEFIETESSSSSSSSDSDLESEQEEYPLSKAQTVAASASSGNDQRLKEAAANGGSGPRAPVGSINARTTSDIAKELEEQFYTLVPFGRNELLSPLKDSDEIRSLWVKIDLTLLSRIPEHLPQEPGVLSAPATKDSESAPPSHTSDTPAEKALPKSKRKRKCDNEDDYREIKKSQGEKDSSSRLATSTSNTLSANHCNMNINSVAIPINKNEKMLRSPISPLSDASKHKYTSEDLTSSSRPNGNSLFTSASSSKKPKADSQLQPHGGDLTKAAHNNSENIPLHKSRPQTKPWSPGSNGHRDCKRQKLVFDDMPRSADYFMQEAKRMKHKADAMVEKFGKALNYAEAALSFIECGNAMEQGPMESKSPYTMYSETVELIRYAMRLKTHSGPNATPEDKQLAALCYRCLALLYWRMFRLKRDHAVKYSKALIDYFKNSSKAAQAPSPWGASGKSTGTPSPMSPNPSPASSVGSQGSLSNASALSPSTIVSIPQRIHQMAANHVSITNSILHSYDYWEMADNLAKENREFFNDLDLLMGPVTLHSSMEHLVQYSQQGLHWLRNSAHLS

SEQ ID NO: 12095 - protein, 1253 aa, Homo sapiens
MAQSKRHVYSRTPSGSRMSAEASARPLRVGSRVEVIGKGHRGTVAYVGATLFATGKWVGVILDEAKGKNDGTVQGRKYFTCDEGHGIFVRQSQIQVFEDGADTTSPETPDSSASKVLKREGTDTTAKTSKLPTRPASTGVAGASSSLGPSGSASAGELSSSEPSTPAQTPLAAPIIPTPVLTSPGAVPPLPSPSKEEEGLRAQVRDLEEKLETLRLKRAEDKAKLKELEKHKIQLEQVQEWKSKMQEQQADLQRRLKEARKEAKEALEAKERYMEEMADTADAIEMATLDKEMAEERAESLQQEVEALKERVDELTTDLEILKAEIEEKGSDGAASSYQLKQLEEQNARLKDALVRMRDLSSSEKQEHVKLQKLMEKKNQELEVVRQQRERLQEELSQAESTIDELKEQVDAALGAEEMVEMLTDRNLNLEEKVRELRETVGDLEAMNEMNDELQENARETELELREQLDMAGARVREAQKRVEAAQETVADYQQTIKKYRQLTAHLQDVNRELTNQQEASVERQQQPPPETFDFKIKFAETKAHAKAIEMELRQMEVAQANRHMSLLTAFMPDSFLRPGGDHDCVLVLLLMPRLICKAELIRKQAQEKFELSENCSERPGLRGAAGEQLSFAAGLVYSLSLLQATLHRYEHALSQCSVDVYKKVGSLYPEMSAHERSLDFLIELLHKDQLDETVNVEPLTKAIKYYQHLYSIHLAEQPEDCTMQLADHIKFTQSALDCMSVEVGRLRAFLQGGQEATDIALLLRDLETSCSDIRQFCKKIRRRMPGTDAPGIPAALAFGPQVSDTLLDCRKHLTWVVAVLQEVAAAAAQLIAPLAENEGLLVAALEELAFKASEQIYGTPSSSPYECLRQSCNILISTMNKLATAMQEGEYDAERPPSKPPPVELRAAALRAEITDAEGLGLKLEDRETVIKELKKSLKIKGEELSEANVRLSLLEKKLDSAAKDADERIEKVQTRLEETQALLRKKEKEFEETMDALQADIDQLEAEKAELKQRLNSQSKRTIEGLRGPPPSGIATLVSGIAGGAIPGQAPGSVPGPGLVKDSPLLLQQISAMRLHISQLQHENSILKGAQMKASLASLPPLHVAKLSHEGPGSELPAGALYRKTSQLLETLNQLSTHTHVVDITRTSPAAKSPSAQLMEQVAQLKSLSDTVEKLKDEVLKETVSQRPGATVPTDFATFPSSAFLRAKEEQQDDTVYMGKVTFSCAAGFGQRHRLVLTQEQLHQLHSRLIS

SEQ ID NO: 12096 - protein, 1214 aa, Homo sapiens
MKQPIMADGPRCKRRKQANPRRKNVVNYDNVVDTGSETDEEDKLHIAEDDGIANPLDQETSPASVPNHESSPHVSQALLPREEEEDEIREGGVEHPWHNNEILQASVDGPEEMKEDYDTMGPEATIQTAINNGTVKNANCTSDFEEYFAKRKLEERDGHAVSIEEYLQRSDTAIIYPEAPEELSRLGTPEANGQEENDLPPGTPDAFAQLLTCPYCDRGYKRLTSLKEHIKYRHEKNEENFSCPLCSYTFAYRTQLERHMVTHKPGTDQHQMLTQGAGNRKFKCTECGKAFKYKHHLKEHLRIHSGEKPYECPNCKKRFSHSGSYSSHISSKKCIGLISVNGRMRNNIKTGSSPNSVSSSPTNSAITQLRNKLENGKPLSMSEQTGLLKIKTEPLDFNDYKVLMATHGFSGTSPFMNGGLGATSPLGVHPSAQSPMQHLGVGMEAPLLGFPTMNSNLSEVQKVLQIVDNTVSRQKMDCKAEEISKLKGYHMKDPCSQPEEQGVTSPNIPPVGLPVVSHNGATKSIIDYTLEKVNEAKACLQSLTTDSRRQISNIKKEKLRTLIDLVTDDKMIENHNISTPFSCQFCKESFPGPIPLHQHERYLCKMNEEIKAVLQPHENIVPNKAGVFVDNKALLLSSVLSEKGMTSPINPYKDHMSVLKAYYAMNMEPNSDELLKISIAVGLPQEFVKEWFEQRKVYQYSNSRSPSLERSSKPLAPNSNPPTKDSLLPRSPVKPMDSITSPSIAELHNSVTNCDPPLRLTKPSHFTNIKPVEKLDHSRSNTPSPLNLSSTSSKNSHSSSYTPNSFSSEELQAEPLDLSLPKQMKEPKSIIATKNKTKASSISLDHNSVSSSSENSDEPLNLTFIKKEFSNSNNLDNKSTNPVFSMNPFSAKPLYTALPPQSAFPPATFMPPVQTSIPGLRPYPGLDQMSFLPHMAYTYPTGAATFADMQQRRKYQRKQGFQGELLDGAQDYMSGLDDMTDSDSCLSRKKIKKTESGMYACDLCDKTFQKSSSLLRHKYEHTGKRPHQCQICKKAFKHKHHLIEHSRLHSGEKPYQCDKCGKRFSHSGSYSQHMNHRYSYCKREAEEREAAEREAREKGHLEPTELLMNRAYLQSITPQGYSDSEERESMPRDGESEKEHEKEGEDGYGKLGRQDGDEEFEEEEEESENKSMDTDPETIRDEEETGDHSMDDSSEDGKMETKSDHEEDNMEDGM

SEQ ID NO: 12097 - protein, 193 aa, Homo sapiens
MEPPGDWGPPPWRSTPKTDVLRLVLYLTFLGAPCYAPALPSCKEDEYPVGSECCPKCSPGYRVKEACGELTGTVCEPCPPGTYIAHLNGLSKCLQCQMCDPAMGLRASRNCSRTENAVCGCSPGHFCIVQDGDHCAACRAYATSSPGQRVQKGGTESQDTLCQNCPPGTFSPNGTLEECQHQTNRAWKSQTDL

SEQ ID NO: 12098 - protein, 905 aa, Homo sapiens
MVRSGARPGQVLSSGRHTGPAKLTNGKKATYLRKIPRFNADSGYSIHSDSESQAETVHGLDGCASLLRDILRNEDSGSETAYLENRSNSRPLESKRYGSKKKRHEKHTIPLVVQKETSSSDNKKQIPNEASARSERDTSDLEQNWSLQDHYRMYSPIIYQALCEHVQTQMSLMNDLTSKNIPNGIPAVPCHAPSHSESQATPHSSYGLCTSTPVWSLQRPPCPPKVHSEVQTDGNSQFASQGKTVSATCTDVLRNSFNTSPGVPCSLPKTDISAIPTLQQLGLVNGILPQQGIHKETDLLKCIQTYLSLFRSHGKETHLDSQTHRSPTQSQPAFLATNEEKCAREQIREATSERKDLNIHVRDTKTVKDVQKAKNVNKTAEKVRIIKYLLGELKALVAEQEDSEIQRLITEMEACISVLPTVSGNTDIQVEIALAMQPLRSENAQLRRQLRILNQQLREQQKTQKPSGAVDCNLELFSLQSLNMSLQNQLEESLKSQELLQSKNEELLKVIENQKDENKKFSSIFKDKDQTILENKQQYDIEITRIKIELEEALVNVKSSQFKLETAEKENQILGITLRQRDAEVTRLRELTRTLQTSMAKLLSDLSVDSARCKPGNNLTKSLLNIHDKQLQHDPAPAHTSIMSYLNKLETNYSFTHSEPLSTIKNEETIEPDKTYENVLSSRGPQNSNTRGMEEASAPGIISALSKQDSDEGSETMALIEDEHNLDNTIYIPFARSTPEKKSPLSKRLSPQPQIRAATTQLVSNSGLAVSGKENKLCTPVICSSSTKEAEDAPEKLSRASDMKDTQLLKKIKEAIGKIPAATKEPEEQTACHGPSGCLSNSLQVKGNTVCDGSVFTSDLMSDWSISSFSTFTSRDEQDFRNGLAALDANIARLQKSLRTGLLEK

SEQ ID NO: 12099 - protein, 128 aa, Homo sapiens
MGDLPGLVRLSIALRIQPNDGPVFYKVDGQRFGQNRTIKLLTGSSYKVEVKIKPSTLQVENISIGGVLVPLELKSKEPDGDRVVYTGTYDTEGVTPTKSGERQPIQITMPECLEQRPQEISLTYECEE

SEQ ID NO: 12100 - protein, 637 aa, Homo sapiens
MSDKSELKAELERKKQRLAQIREEKKRKEEERKKKETDQKKEAVAPVQEESDLEKKRREAEALLQSMGLTPESPIVFSEYWVPPPMSPSSKSVSTPSEAGSQDSGDGAVGSRTLHWDTDPSVLQLHSDSDLGRGPIKLGMAKITQVDFPPREIVTYTKETQTPVMAQPKEDEEEDDDVVAPKPPIEPEEEKTLKKDEENDSKAPPHELTEEEKQQILHSEEFLSFFDHSTRIVERALSEQINIFFDYSGRDLEDKEGEIQAGAKLSLNRQFFDERWSKHRVVSCLDWSSQYPELLVASYNNNEDAPHEPDGVALVWNMKYKKTTPEYVFHCQSAVMSATFAKFHPNLVVGGTYSGQIVLWDNRSNKRTPVQRTPLSAAAHTHPVYCVNVVGTQNAHNLISISTDGKICSWSLDMLSHPQDSMELVHKQSKAVAVTSMSFPVGDVNNFVVGSEEGSVYTACRHGSKAGISEMFEGHQGPITGIHCHAAVGAVDFSHLFVTSSFDWTVKLWTTKNNKPLYSFEDNADYVYDVMWSPTHPALFACVDGMGRLDLWNLNNDTEVPTASISVEGNPALNRVRWTHSGREIAVGDSEGQIVIYDVGEIAVPRNDEWARFGRTLAEINANRADAEEEAATRIPA

SEQ ID NO: 12101 - protein, 1091 aa, Homo sapiens
MAAAGQLCLLYLSAGLLSRLGAAFNLDTREDNVIRKYGDPGSLFGFSLAMHWQLQPEDKRLLLVGAPRAEALPLQRANRTGGLYSCDITARGPCTRIEFDNDADPTSESKEDQWMGVTVQSQGPGGKVVTCAHRYEKRQHVNTKQESRDIFGRCYVLSQNLRIEDDMDGGDWSFCDGRLRGHEKFGSCQQGVAATFTKDFHYIVFGAPGTYNWKGIVRVEQKNNTFFDMNIFEDGPYEVGGETEHDESLVPVPANSYLGFSLDSGKGIVSKDEITFVSGAPRANHSGAVVLLKRDMKSAHLLPEHIFDGEGLASSFGYDVAVVDLNKDGWQDIVIGAPQYFDRDGEVGGAVYVYMNQQGRWNNVKPIRLNGTKDSMFGIAVKNIGDINQDGYPDIAVGAPYDDLGKVFIYHGSANGINTKPTQVLKGISPYFGYSIAGNMDLDRNSYPDVAVGSLSDSVTIFRSRPVINIQKTITVTPNRIDLRQKTACGAPSGICLQVKSCFEYTANPAGYNPSISIVGTLEAEKERRKSGLSSRVQFRNQGSEPKYTQELTLKRQKQKVCMEETLWLQDNIRDKLRPIPITASVEIQEPSSRRRVNSLPEVLPILNSDEPKTAHIDVHFLKEGCGDDNVCNSNLKLEYKFCTREGNQDKFSYLPIQKGVPELVLKDQKDIALEITVTNSPSNPRNPTKDGDDAHEAKLIATFPDTLTYSAYRELRAFPEKQLSCVANQNGSQADCELGNPFKRNSNVTFYLVLSTTEVTFDTPDLDINLKLETTSNQDNLAPITAKAKVVIELLLSVSGVAKPSQVYFGGTVVGEQAMKSEDEVGSLIEYEFRVINLGKPLTNLGTATLNIQWPKEISNGKWLLYLVKVESKGLEKVTCEPQKEINSLNLTESHNSRKKREITEKQIDDNRKFSLFAERKYQTLNCSVNVNCVNIRCPLRGLDSKASLILRSRLWNSTFLEEYSKLNYLDILMRAFIDVTAAAENIRLPNAGTQVRVTVFPSKTVAQYSGVPWWIILVAILAGILMLALLVFILWKCGFFKRSRYDDSVPRYHAVRIRKEEREIKDEKYIDNLEKKQWITKWNENESYS

SEQ ID NO: 12102 - protein, 1044 aa, Homo sapiens
MVLSLTGLIAFSFLQATLALNPEDPNVCSHWESYAVTVQESYAHPFDQIYYTRCTDILNWFKCTRHRISYKTAYRRGLRTMYRRRSQCCPGYYESGDFCIPLCTEECVHGRCVSPDTCHCEPGWGGPDCSSGCDSDHWGPHCSNRCQCQNGALCNPITGACVCAAGFRGWRCEELCAPGTHGKGCQLPCQCRHGASCDPRAGECLCAPGYTGVYCEELCPPGSHGAHCELRCPCQNGGTCHHITGECACPPGWTGAVCAQPCPPGTFGQNCSQDCPCHHGGQCDHVTGQCHCTAGYMGDRCQEECPFGSFGFQCSQHCDCHNGGQCSPTTGACECEPGYKGPRCQERLCPEGLHGPGCTLPCPCDADNTISCHPVTGACTCQPGWSGHHCNESCPVGYYGDGCQLPCTCQNGADCHSITGGCTCAPGFMGEVCAVSCAAGTYGPNCSSICSCNNGGTCSPVDGSCTCKEGWQGLDCTLPCPSGTWGLNCNESCTCANGAACSPIDGSCSCTPGWLGDTCELPCPDGTFGLNCSEHCDCSHADGCDPVTGHCCCLAGWTGIRCDSTCPPGRWGPNCSVSCSCENGGSCSPEDGSCECAPGFRGPLCQRICPPGFYGHGCAQPCPLCVHSSRPCHHISGICECLPGFSGALCNQVCAGGYFGQDCAQLCSCANNGTCSPIDGSCQCFPGWIGKDCSQACPPGFWGPACFHACSCHNGASCSAEDGACHCTPGWTGLFCTQRCPAAFFGKDCGRVCQCQNGASCDHISGKCTCRTGFTGQHCEQRCAPGTFGYGCQQLCECMNNSTCDHVTGTCYCSPGFKGIRCDQAALMMEELNPYTKISPALGAERHSVGAVTGIMLLLFLIVVLLGLFAWHRRRQKEKGRDLAPRVSYTPAMRMTSTDYSLSGACGMDRRQNTYIMDKGFKDYMKESVCSSSTCSLNSSENPYATIKDPPILTCKLPESSYVEMKSPVHMGSPYTDVPSLSTSNKNIYEVEPTVSVVQEGCGHNSSYIQNAYDLPRNSHIPGHYDLLPVRQSPANGPSQDKQS

SEQ ID NO: 12103 - protein, 220 aa, Homo sapiens
MNVFRILGDLSHLLAMILLLGKIWRSKCCKGISGKSQILFALVFTTRYLDLFTNFISIYNTVMKVVFLLCAYVTVYMIYGKFRKTFDSENDTFRLEFLLVPVIGLSFLENYSFTLLEILWTFSIYLESVAILPQLFMISKTGEAETITTHYLFFLGLYRALYLANWIRRYQTENFYDQIAVVSGVVQTIFYCDFFYLYVTKGRSWDDSNADTGLRSYSSI

SEQ ID NO: 12104 - protein, 672 aa, Homo sapiens
MQNGFSRTLKSGDGITFGVFGSKFRIEYEPLVACSSCLDVSGKTALNQAILQLGGFTVNNWTEECTHLVMVSVKVTIKTICALICGRPIVKPEYFTEFLKAVESKKQPPQIESFYPPLDEPSIGSKNVDLSGRQERKQIFKGKTFIFLNAKQHKKLSSAVVFGGGEARLITEENEEEHNFFLAPGTCVVDTGITNSQTLIPDCQKKWIQSIMDMLQRQGLRPIPEAEIGLAVIFMTTKNYCDPQGHPSTGLKTTTPGPSLSQGVSVDEKLMPSAPVNTTTYVADTESEQADTWDLSERPKEIKVSKMEQKFRMLSQDAPTVKESCKTSSNNNSMVSNTLAKMRIPNYQLSPTKLPSINKSKDRASQQQQTNSIRNYFQPSTKKRERDEENQEMSSCKSARIETSCSLLEQTQPATPSLWKNKEQHLSENEPVDTNSDNNLFTDTDLKSIVKNSASKSHAAEKLRSNKKREMDDVAIEDEVLEQLFKDTKPELEIDVKVQKQEEDVNVRKRPRMDIETNDTFSDEAVPESSKISQENEIGKKRELKEDSLWSAKEISNNDKLQDDSEMLPKKLLLTEFRSLVIKNSTSRNPSGINDDYGQLKNFKKFKKVTYPGAGKLPHIIGGSDLIAHHARKNTELEEWLRQEMEVQNQHAKEESLADDLFRYNPYLKRRR

SEQ ID NO: 12105 - protein, 333 aa, Homo sapiens
MCEEETTALVCDNGSGLCKAGFAGDDAPRAVFPSIVGRPRHQIWHHSFYNELRVAPEEHPTLLTEAPLNPKANREKMTQIMFETFNVPAMYVAIQAVLSLYASGRTTGIVLDSGDGVTHNVPIYEGYALPHAIMRLDLAGRDLTDYLMKILTERGYSFVTTAEREIVRDIKEKLCYVALDFENEMATAASSSSLEKSYELPDGQVITIGNERFRCPETLFQPSFIGMESAGIHETTYNSIMKCDIDIRKDLYANNVLSGGTTMYPGIADRMQKEITALAPSTMKIKIIAPPERKYSVWIGGSILASLSTFQQMWISKPEYDEAGPSIVHRKCF

SEQ ID NO: 12106 - protein, 507 aa, Homo sapiens
MASEQDVRARLQRAGQEHLLRFWAELAPEPRAALLAELALLEPEALREHCRRAAEACARPHGPPPDLAARLRPLPPERVGRASRSDPETRRRWEEEGFRQISLNKVAVLLLAGGQGTRLGVTYPKGMYRVGLPSRKTLYQLQAERIRRVEQLAGERHGTRCTVPWYVMTSEFTLGPTAEFFREHNFFHLDPANVVMFEQRLLPAVTFDGKVILERKDKVAMAPDGNGGLYCALEDHKILEDMERRGVEFVHVYCVDNILVRLADPVFIGFCVLQGADCGAKVVEKAYPEEPVGVVCQVDGVPQVVEYSEISPETAQLRASDGSLLYNAGNICNHFFTRGFLKAVTREFEPLLKPHVAVKKVPYVDEEGNLVKPLKPNGIKMEKFVFDVFRFAKNFAALEVLREEEFSPLKNAEPADRDSPRTARQALLTQHYRWALRAGARFLDAHGAWLPELPSLPPNGDPPAICEISPLVSYSGEGLEVYLQGREFQSPLILDEDQAREPQLQES

SEQ ID NO: 12107 - protein, 214 aa, Homo sapiens
MGPLPRTVELFYDVLSPYSWLGFEILCRYQNIWNINLQLRPSLITGIMKDSGNKPPGLLPRKGLYMANDLKLLRHHLQIPIHFPKDFLSVMLEKGSLSAMRFLTAVNLEHPEMLEKASRELWMRVWSRAAEKAGMSAEQAQGLLEKIATPKVKNQLKETTEAACRYGAFGLPITVAHVDGQTHMLFGSDRMELLAHLLGEKWMGPIPPAVNARL

SEQ ID NO: 12108 - protein, 262 aa, Homo sapiens
MKGGFTGGDEYQKHFLPRDYLATYYSFDGSPSPEAEMLKFNLECLHKTFGPGLQGDTLIDIGSGPTIYQVLAACDSFQDITLSDFTDRNREELEKWLKKEPGAYDWTPAVKFACELEGNSGRWEEKEEKLRAAVKRVLKCDVHLGNPLAPAVLPLADCVLTLLAMECACCSLDAYRAALCNLASLLKPGGHLVTTVTLRLPSYMVGKREFSCVALEKEEVEQAVLDAGFDIEQLLHSPQSYSVTNAANNGVCFIVARKKPGP

SEQ ID NO: 12109 - protein, 234 aa, Homo sapiens
MNNKFDALKDDDSGDHDQNEENSTQKDGEKEKTERDKNQSSSKRKAVVPGPAEHPLQYNYTFWYSRRTPGRPTSSQSYEQNIKQIGTFASVEQFWRFYSHMVRPGDLTGHSDFHLFKEGIKPMWEDDANKNGGKWIIRLRKGLASRCWENLILAMLGEQFMVGEEICGAVVSVRFQEDIISIWNKTASDQATTARIRDTLRRVLNLPPNTIMEYKTHTDSIKDNSSFRNTKITL

SEQ ID NO: 12110 - protein, 144 aa, Homo sapiens
MLGGTDCRTFLTSHINLKKTLCDVILMVQERKIPAHRVVLAAASHFFNLMFTTNMLESKSFEVELKDAEPDIIEQLVEFAYTARISVNSNNVQSLLDAANQYQIEPVKKMCVDFLKEQVDASNCLGEAEKVDQSLPECGMLFTV

SEQ ID NO: 12111 - protein, 393 aa, Homo sapiens
MVPSSPRALFLLLLILACPEPRASQNCLSKQQLLSAIRQLQQLLKGQETRFAEGIRHMKSRLAALQNSVGRVGPDALPVSCPALNTPADGRKFGSKYLVDHEVHFTCNPGFRLVGPSSVVCLPNGTWTGEQPHCRGISECSSQPCQNGGTCVEGVNQYRCICPPGRTGNRCQHQAQTDVNECELYGQEGRPRLCMHACVNTPGSYRCTCPGGYRTLADGKSCEDVDECVGLQPVCPQGTTCINTGGSFQCVSPECPEGSGNVSYVKTSPFQCERNPCPMDSRPCRHLPKTISFHYLSLPSNLKTPITLFRMATASAPGRAGPNSLRFGIVGGNSRGHFVMQRSDRQTGDLILVQNLEGPQTLEVDVDMSEYLDRSFQANHVSKVTIFVSPYDF

SEQ ID NO: 12112 - protein, 908 aa, Homo sapiens
MKSSVAQIKPSSGHDRRENLNSYQRNSSPEDRYEEQERSPRDRDYFDYSRSDYEHSRRGRSYDSSMESRNRDREKRRERERDTDRKRSRKSPSPGRRNPETSVTQSSSAQDEPATKKKKDELDPLLTRTGGAYIPPAKLRMMQEQITDKNSLAYQRMSWEALKKSINGLINKVNISNISIIIQELLQENIVRGRGLLSRSVLQAQSASPIFTHVYAALVAIINSKFPQIGELILKRLILNFRKGYRRNDKQLCLTASKFVAHLINQNVAHEVLCLEMLTLLLERPTDDSVEVAIGFLKECGLKLTQVSPRGINAIFERLRNILHESEIDKRVQYMIEVMFAVRKDGFKDHPIILEGLDLVEEDDQFTHMLPLEDDYNPEDVLNVFKMDPNFMENEEKYKAIKKEILDEGDTDSNTDQDAGSSEEDEEEEEEEGEEDEEGQKVTIHDKTEINLVSFRRTIYLAIQSSLDFEECAHKLLKMEFPESQTKELCNMILDCCAQQRTYEKFFGLLAGRFCMLKKEYMESFEGIFKEQYDTIHRLETNKLRNVAKMFAHLLYTDSLPWSVLECIKLSEETTTSSSRIFVKIFFQELCEYMGLPKLNARLKDETLQPFFEGLLPRDNPRNTRFAINFFTSIGLGGLTDELREHLKNTPKVIVAQKPDVEQNKSSPSSSSSASSSSESDSSDSDSDSSDSSSESSSEESDSSSISSHSSASANDVRKKGHGKTRSKEVDKLIRNQQTNDRKQKERRQEHGHQETRTERERRSEKHRDQNSSGSNWRDPITKYTSDKDVPSERNNYSRVANDRDQEMHIDLENKHGDPKKKRGERRNSFSENEKHTHRIKDSENFRRKDRSKSKEMNRKHSGSRSDEDRYQNGAERRWEKSSRYSEQSRESKKNQDRRREKSPAKQK

SEQ ID NO: 12113 - protein, 342 aa, Homo sapiens
MLENSLYSPTWEGSQFWVTVQRTEAAERCGLHGSYVLRVEAERLTLLTVGAQSQILEPLLSWPYTLLRRYGRDKVMFSFEAGRRCPSGPGTFTFQTAQGNDIFQAVETAIHRQKAQGKAGQGHDVLRADSHEGEVAEGKLPSPPGPQELLDSPPALYAEPLDSLRIAPCPSQDSLYSDPLDSTSAQAGEGVQRKKPLYWDLYEHAQQQLLKAKLTDPKEDPIYDEPEGLAPVPPQGLYDLPREPKDAWWCQARVKEEGYELPYNPATDDYAVPPPRSTKPLLAPKPQGPAFPEPGTATGSGIKSHNSALYSQVQKSGASGSWDCGLSRVGTDKTGVKSEGST

SEQ ID NO: 12114 - protein, 420 aa, Homo sapiens
MVSKALLRLVSAVNRRRMKLLLGIALLAYVASVWGNFVNMRSIQENGELKIESKIEEMVEPLREKIRDLEKSFTQKYPPVKFLSEKDRKRILITGGAGFVGSHLTDKLMMDGHEVTVVDNFFTGRKRNVEHWIGHENFELINHDVVEPLYIEVDQIYHLASPASPPNYMYNPIKTLKTNTIGTLNMLGLAKRVGARLLLASTSEVYGDPEVHPQSEDYWGHVNPIGPRACYDEGKRVAETMCYAYMKQEGVEVRVARIFNTFGPRMHMNDGRVVSNFILQALQGEPLTVYGSGSQTRAFQYVSDLVNGLVALMNSNVSSPVNLGNPEEHTILEFAQLIKNLVGSGSEIQFLSEAQDDPQKRKPDIKKAKLMLGWEPVVPLEEGLNKAIHYFRKELEYQANNQYIPKPKPARIKKGRTRHS

SEQ ID NO: 12115 - protein, 285 aa, Homo sapiens
MLSSCVRPVPTTVRFVDSLICNSSRSFMDLKALLSSLNDFASLSFAESWDNVGLLVEPSPPHTVNTLFLTNDLTEEVMEEVLQKKADLILSYHPPIFRPMKRITWNTWKERLVIRALENRVGIYSPHTAYDAAPQGVNNWLAKGLGACTSRPIHPSKAPNYPTEGNHRVEFNVNYTQDLDKVMSAVKGIDGVSVTSFSARTGNEEQTRINLNCTQKALMQVVDFLSRNKQLYQKTEILSLEKSLKSKSWPCVLVLGAAFCRVLRLTFTSQVRCPIMILWMLLPKE

SEQ ID NO: 12116 - protein, 375 aa, Homo sapiens
MEPWPLLLLFSLCSAGLVLGSEHETRLVAKLFKDYSSVVRPVEDHRQVVEVTVGLQLIQLINVDEVNQIVTTNVRLKQNCSMKLGTWTYDGSVVAINPESDQPDLSNFMESGEWVIKESRGWKHSVTYSCCPDTPYLDITYHFVMQRLPLYFIVNVIIPCLLFSFLTGLVFYLPTDSGEKMTLSISVLLSLTVFLLVIVELIPSTSSAVPLIGKYMLFTMVFVIASIIITVIVINTHHRSPSTHVMPNWVRKVFIDTIPNIMFFSTMKRPSREKQDKKIFTEDIDISDISGKPGPPPMGFHSPLIKHPEVKSAIEGIKYIAETMKSDQESNNAAAEWKYVAMVMDHILLGVFMLVCIIGTLAVFAGRLIELNQQG

SEQ ID NO: 12117 - protein, 767 aa, Homo sapiens
MNIMNTEQSQNSIVSRIKVFEGQTNIETSGLPKKPEITPRSLPPKPTVSSGKPSVAPKPAANRASGEWDSGTENRLKVTSKEGLTPYPPLQEAGSIPVTKPELPKKPNPGLIRSVNPEIPGRGPLAESSDSGKKVPTPAPRPLLLKKSVSSENPTYPSAPLKPVTVPPRLAGASQAKAYKSLGEGPPANPPVPVLQSKPLVDIDLISFDDDVLPTPSGNLAEESVGSEMVLDPFQLPAKTEPIKERAVQPAPTRKPTVIRIPAKPGKCLHEDPQSPPPLPAEKPIGNTFSTVSGKLSNVERTRNLESNHPGQTGGFVRVPPRLPPRPVNGKTIPTQQPPTKVPPERPPPPKLSATRRSNKKLPFNRSSSDMDLQKKQSNLATGLSKAKSQVFKNQDPVLPPRPKPGHPLYSKYMRGDVLVMLKQTENNYLECQKGEDTGRVHLSQMKIITPLDEHLRSRPNDPSHAQKPVDSGAPHAVVLHDFPAEQVDDLNLTSGEIVYLLEKIDTDWYRGNCRNQIGIFPANYVKVIIDIPEGGNGKRECVSSHCVKGSRCVARFEYIGEQKDELSFSEGEIIILKEYVNEEWARGEVRGRTGIFPLNFVEPVEDYPTSGANVLSTKVPLKTKKEDSGSNSQVNSLPAEWCEALHSFTAETSDDLSFKRGDRIQILERLDSDWCRGRLQDREGIFPAVFVRPCPAEAKSMLAIVPKGRKAKALYDFRGENEDELSFKAGDIITELESVDDDWMSGELMGKSGIFPKNYIQFLQIS

SEQ ID NO: 12118 - protein, 454 aa, Homo sapiens
MRFVVALVLLNVAAAGAVPLLATESVKQEEAGVRPSAGNVSTHPSLSQRPGGSTKSHPEPQTPKDSPSKSSAEAQTPEDTPNKSGAEAKTQKDSSNKSGAEAKTQKGSTSKSGSEAQTTKDSTSKSHPELQTPKDSTGKSGAEAQTPEDSPNRSGAEAKTQKDSPSKSGSEAQTTKDVPNKSGADGQTPKDGSSKSGAEDQTPKDVPNKSGAEKQTPKDGSNKSGAEEQGPIDGPSKSGAEEQTSKDSPNKVVPEQPSRKDHSKPISNPSDNKELPKADTNQLADKGKLSPHAFKTESGEETDLISPPQEEVKSSEPTEDVEPKEAEDDDTGPEEGSPPKEEKEKMSGSASSENREGTLSDSTGSEKDDLYPNGSGNGSAESSHFFAYLVTAAILVAVLYIAHHNKRKIIAFVLEGKRSKVTRRPKASDYQRLDQKYVLILNVFPAPPKRSFFP

SEQ ID NO: 12119 - protein, 535 aa, Homo sapiens
MGSSATEIEELENTTFKYLTGEQTEKMWQRLKGILRCLVKQLERGDVNVVDLKKNIEYAASVLEAVYIDETRRLLDTEDELSDIQTDSVPSEVRDWLASTFTRKMGMTKKKPEEKPKFRSIVHAVQAGIFVERMYRKTYHMVGLAYPAAVIVTLKDVDKWSFDVFALNEASGEHSLKFMIYELFTRYDLINRFKIPVSCLITFAEALEVGYSKYKNPYHNLIHAADVTQTVHYIMLHTGIMHWLTELEILAMVFAAAIHDYEHTGTTNNFHIQTRSDVAILYNDRSVLENHHVSAAYRLMQEEEMNILINLSKDDWRDLRNLVIEMVLSTDMSGHFQQIKNIRNSLQQPEGIDRAKTMSLILHAADISHPAKSWKLHYRWTMALMEEFFLQGDKEAELGLPFSPLCDRKSTMVAQSQIGFIDFIVEPTFSLLTDSTEKIVIPLIEEASKAETSSYVASSSTTIVGLHIADALRRSNTKGSMSDGSYSPDYSLAAVDLKSFKNNLVDIIQQNKERWKELAAQEARTSSQKCEFIHQ

SEQ ID NO: 12120 - protein, 4557 aa, Homo sapiens
MDIIMGHCVGTRPPACCLILLLFKLLATVSQGLPGTGPLGFHFTHSIYNATVYENSAARTYVNSQSRMGITLIDLSWDIKYRIVSGDEEGFFKAEEVIIADFCFLRIRTKGGNSAILNREIQDNYLLIVKGSVRGEDLEAWTKVNIQVLDMNDLRPLFSPTTYSVTIAESTPLRTSVAQVTATDADIGSNGEFYYYFKNKVDLFSVHPTSGVISLSGRLNYDEKNRYDLEILAVDRGMKLYGNNGVSSTAKLYVHIERINEHAPTIHVVTHVPFSLEKEPTYAVVTVDDLDDGANGEIESVSIVAGDPLDQFFLAKEGKWLNEYKIKERKQIDWESFPYGYNLTLQAKDKGSPQKCSALKAVYIGNPTRDTVPIRFEKEVYDVSISEFSPPGVVVAIVKLSPEPIDVEYKLSPGEDAVYFKINPRSGLIVTARPLNTVKKEVYKLEVTNKEGDLKAQVTISIEDANDHTPEFQQPLYDAYVNESVPVGTSVLTVSASDKDKGENGYITYSIASLNLLPFVINQFTGVISTTEELDFESSPEIYRFIVRASDWGSPYRHESEVNVTIRIGNVNDNSPLFEKVACQGVISYDFPVGGHITAVSAIDIDELELVKYKIISGNELGFFYLNPDSGVLQLKKSLTNSGIKNGNFALRITATDGENLADPMSINISVLHGKVSSKSFSCRETRVAQKLAEKLLIKAKANGKLNLEDGFLDFYSINRQGPYFDKSFPSDVAVKEDLPVGANILKIKAYDADSGFNGKVLFTISDGNTDSCFNIDMETGQLKVLMPMDREHTDLYLLNITIYDLGNPQKSSWRLLTINVEDANDNSPVFIQDSYSVNILESSGIGTEIIQVEARDKDLGSNGEVTYSVLTDTQQFAINSSTGIVYVADQLDRESKANYSLKIEARDKAESGQQLFSVVTLKVFLDDVNDCSPAFIPSSYSVKVLEDLPVGTVIAWLETHDPDLGLGGQVRYSLVNDYNGRFEIDKASGAIRLSKELDYEKQQFYNLTVRAKDKGRPVSLSSVSFVEVEVVDVNENLHTPYFPDFAVVGSVKENSRIGTSVLQVTARDEDSGRDGEIQYSIRDGSGLGRFSIDDESGVITAADILDRETMGSYWLTVYATDRGVVPLYSTIEVYIEVEDVNDNAPLTSEPIYYPVVMENSPKDVSVIQIQAEDPDSSSNEKLTYRITSGNPQNFFAINIKTGLITTTSRKLDREQQAEHFLEVTVTDGGPSPKQSTIWVVVQVLDENDNKPQFPEKVYQIKLPERDRKKRGEPIYRAFAFDRDEGPNAEISYSIVDGNDDGKFFIDPKTGMVSSRKQFTAGSYDILTIKAVDNGRPQKSSTARLHIEWIKKPPPSPIPLTFDEPFYNFTVMESDRVTEIVGVVSVQPANTPLWFDIVGGNFDSAFDAEKGVGTIVIAKPLDAEQRSIYNMSVEVTDGTNVAVTQVFIKVLDNNDNGPEFSQPNYDVTISEDVLPDTEILQIEATDRDEKHKLSYTVHSSIDSISMRKFRIDPSTGVLYTAERLDHEAQDKHILNIMVRDQEFPYRRNLARVIVNVEDANDHSPYFTNPLYEASVFESAALGSAVLQVTALDKDKGENAELIYTIEAGNTGNMFKIEPVLGIITICKEPDMTTMGQFVLSIKVTDQGSPPMSATAIVRISVTMSDNSHPKFIHKDYQAEVNENVDIGTSVILISAISQSTLIYEVKDGDINGIFTINPYSGVITTQKALDYERTSSYQLIIQATNMAGMASNATVNIQIVDENDNAPVFLFSQYSGSLSEAAPINSIVRSLDNSPLVIRATDADSNRNALLVYQIVESTAKKFFTVDSSTGAIRTIANLDHETIAHFHFHVHVRDSGSPQLTAESPVEVNIEVTDVNDNPPVFTQAVFETILLLPTYVGVEVLKVSATDPDSEVPPELTYSLMEGSLDHFLIDSNSGVLTIKNNNLSKDHYMLIVKVSDGKFYSTSMVTIMVKEAMDSGLHFTQSFYSTSISENNTNITKVAIVNAVGNRLNEPLKYSILNPGNKFKIKSTSGVIQTTGVPFDREEQELYELVVEASRELDHLRVARVVVRVNIEDINDNSPVFVGLPYYAAVQVDAEPGTLIYQVTAIDKDKGPNGEVTYVLQDDYGHFEINPNSGNVILKEAFNSDLSNIEYGVTILAKDGGKPSLSTSVELPITIVNKAMPVFDKPFYTASVNEDIRMNTPILSINATSPEGQGIIYIIIDGDPFKQFNIDFDTGVLKVVSPLDYEVTSAYKLTIRASDALTGARAEVTVDLLVNDVNDNPPIFDQPTYNTTLSEASLIGTPVLQVVSIDADSENNKMVHYQIVQDTYNSTDYFHIDSSSGLILTARMLDHELVQHCTLKVRSIDSGFPSLSSEVLVHIYISDVNDNPPVFNQLIYESYVSELAPRGHFVTCVQASDADSSDFDRLEYSILSGNDRTSFLMDSKSGVITLSNHRKQRMEPLYSLNVSVSDGLFTSTAQVHIRVLGANLYSPAFSQSTYVAEVRENVAAGTKVIHVRATDGDPGTYGQISYAIINDFAKDRFLIDSNGQVITTERLDRENPLEGDVSIFVRALDGGGRTTFCTVRVIVVDENDNAPQFMTVEYRASVRADVGRGHLVTQVQAIDPDDGANSRITYSLYSEASVSVADLLEIDPDNGWMVTKGNFNQLKNTVLSFFVKAVDGGIPVKHSLIPVYIHVLPPETFLPSFTQSQYSFTIAEDTAIGSTVDTLRILPSQNVWFSTVNGERPENNKGGIFVIEQETGTIKLDKRLDRETSPAFHFKVAATIPLDKVDIVFTVDVDIKVLDLNDNKPVFETSSYDTIIMEGMPVGTKLTQVRAIDMDWGANGQVTYSLHSDSQPEKVMEAFNIDSNTGWISTLKDLDHETDPTFTFSVVASDLGEAFSLSSTALVSVRVTDINDNAPVFAQEVYRGNVKESDPPGEVVAVLSTWDRDTSDVNRQVSYHITGGNPRGRFALGLVQSEWKVYVKRPLDREEQDIYFLNITATDGLFVTQAMVEVSVSDVNDNSPVCDQVAYTALLPEDIPSNKIILKVSAKDADIGSNGYIRYSLYGSGNSEFFLDPESGELKTLALLDRERIPVYSLMAKATDGGGRFCQSNIHLILEDVNDNPPVFSSDHYNTCVYENTATKALLTRVQAVDPDIGINRKVVYSLADSAGGVFSIDSSSGIIILEQPLDREQQSSYNISVRATDQSPGQSLSSLTTVTITVLDINDNPPVFERRDYLVTVPEDTSPGTQVLAVFATSKDIGTNAEITYLIRSGNEQGKFKINPKTGGISVSEVLDYELCKRFYLVVEAKDGGTPALSAVATVNINLTDVNDNPPKFSQDVYSAVISEDALVGDSVILLIAEDVDSQPNGQIHFSIVNGDRDNEFTVDPVLGLVKVKKKLDRERVSGYSLLVQAVDSGIPAMSSTATVNIDISDVNDNSPVFTPANYTAVIQENKPVGTSILQLVVTDRDSFHNGPPFSFSILSGNEEEEFVLDPHGILRSAVVFQHTESLEYVLCVQAKDSGKPQQVSHTYIRVRVIEESTHKPTAIPLEIFIVTMEDDFPGGVIGKIHATDQDMYDVLTFALKSEQKSLFKVNSHDGKIIALGGLDSGKYVLNVSVSDGRFQVPIDVVVHVEQLVHEMLQNTVTIRFENVSPEDFVGLHMHGFRRTLRNAVLTQKQDSLRIISIQPVAGTNQLDMLFAVEMHSSEFYKPAYLIQKLSNARRHLENIMRISAILEKNCSGLDCQEQHCEQGLSLDSHALMTYSTARISFVCPRFYRNVRCTCNGGLCPGSNDPCVEKPCPGDMQCVSYEASRRPFLCQCPPGKLGECSGHTSLSFAGNSYIKYRLSENSKEEDFKLALRLRTLQSNGIIMYTRANPCIILKIVDGKLWFQLDCGSGPGILGISGRAVNDGSWHSVFLELNRNFTSLSLDDSYVERRRAPLYFQTLSTESSIYFGALVQADNIRSLTDTRVTQVLSGFQGCLDSVILNNNELPLQNKRSSFAEVVGLTELKLGCVLYPDACKRSPCQHGGSCTGLPSGGYQCTCLSQFTGRNCESEITACFPNPCRNGGSCDPIGNTFICNCKAGLTGVTCEEDINECEREECENGGSCVNVFGSFLCNCTPGYVGQYCGLRPVVVPNIQAGHSYVGKEELIGIAVVLFVIFILVVLFIVFRKKVFRKNYSRNNITLVQDPATAALLNKSNGIPFRNLRGSGDGRNVYQEVGPPQVPVRPMAYTPCFQSDSRSNLDKIVDGLGGEHQEMTTFHPESPRILTARRGVVVCSVAPNLPAVSPCRSDCDSIRKNGWDAGTENKGVDDPGEVTCFAGSNKGSNSEVQSLSSFQSDSGDDNAYHWDTSDWMPGARLSDIEEVPNYENQDGGSAHQGSTRELESDYYLGGYDIDSEYPPPHEEEFLSQDQLPPPLPEDFPDQYEALPPSQPVSLASTLSPDCRRRPQFHPSQYLPPHPFPNETDLVGPPASCEFSTFAVSMNQGTEPTGPADSVSLSLHNSRGTSSSDVSANCGFDDSEVAMSDYESVGELSLASLHIPFVETQHQTQV

SEQ ID NO: 12121 - protein, 333 aa, Homo sapiens
MATAERRALGIGFQWLSLATLVLICAGQGGRREDGGPACYGGFDLYFILDKSGSVLHHWNEIYYFVEQLAHKFISPQLRMSFIVFSTRGTTLMKLTEDREQIRQGLEELQKVLPGGDTYMHEGFERASEQIYYENRQGYRTASVIIALTDGELHEDLFFYSEREANRSRDLGAIVYCVGVKDFNETQLARIADSKDHVFPVNDGFQALQGIIHSILKKSCIEILAAEPSTICAGESFQVVVRGNGFRHARNVDRVLCSFKINDSVTLNEKPFSVEDTYLLCPAPILKEVGMKAALQVSMNDGLSFISSSVIITTTHCSLHKIASGPTTAACME

SEQ ID NO: 12122 - protein, 154 aa, Homo sapiens
MTTTTTFKGVDPNSRNSSRVLRPPGGGSNFSLGFDEPTEQPVRKNKMASNIFGTPEENQASWAKSAGAKSSGGREDLESSGLQRRNSSEASSGDFLDLKGEGDIHENVDTDLPGSLGQSEEKPVPAAPVPSPVAPAPVPSRRNPPGGKSSLVLG

SEQ ID NO: 12123 - protein, 1293 aa, Homo sapiens
MAAETQTLNFGPEWLRALSSGGSITSPPLSPALPKYKLADYRYGREEMLALFLKDNKIPSDLLDKEFLPILQEEPLPPLALVPFTEEEQRNFSMSVNSAAVLRLTGRGGGGTVVGAPRGRSSSRGRGRGRGECGFYQRSFDEVEGVFGRGGGREMHRSQSWEERGDRRFEKPGRKDVGRPNFEEGGPTSVGRKHEFIRSESENWRIFREEQNGEDEDGGWRLAGSRRDGERWRPHSPGWREHMERRRRFEFDFRDRDDERGYRRVRSGSGSIDDDRDSLPEWCLEDAEEEMGTFDSSGAFLSLKKVQKEPIPEEQEMDFRPVDEGEECSDSEGSHNEEAKEPDKTNKKEGEKTDRVGVEASEETPQTSSSSARPGTPSDHQSQEASQFERKDEPKTEQTEKAEEETRMENSLPAKVPSRGDEMVADVQQPLSQIPSDTASPLLILPPPVPNPSPTLRPVETPVVGAPGMGSVSTEPDDEEGLKHLEQQAEKMVAYLQDSALDDERLASKLQEHRAKGVSIPLMHEAMQKWYYKDPQGEIQGPFNNQEMAEWFQAGYFTMSLLVKRACDESFQPLGDIMKMWGRVPFSPGPAPPPHMGELDQERLTRQQELTALYQMQHLQYQQFLIQQQYAQVLAQQQKAALSSQQQQQLALLLQQFQTLKMRISDQNIIPSVTRSVSVPDTGSIWELQPTASQPTVWEGGSVWDLPLDTTTPGPALEQLQQLEKAKAAKLEQERREAEMRAKREEEERKRQEELRRQQEEILRRQQEEERKRREEEELARRKQEEALRRQREQEIALRRQREEEERQQQEEALRRLEERRREEEERRKQEELLRKQEEEAAKWAREEEEAQRRLEENRLRMEEEAARLRHEEEERKRKELEVQRQKELMRQRQQQQEALRRLQQQQQQQQLAQMKLPSSSTWGQQSNTTACQSQATLSLAEIQKLEEERERQLREEQRRQQRELMKALQQQQQQQQQKLSGWGNVSKPSGTTKSLLEIQQEEARQMQKQQQQQQQHQQPNRARNNTHSNLHTSIGNSVWGSINTGPPNQWASDLVSSIWSNADTKNSNMGFWDDAVKEVGPRNSTNKNKNNASLSKSVGVSNRQNKKVEEEEKLLKLFQGVNKAQDGFTQWCEQMLHALNTANNLDVPTFVSFLKEVESPYEVHDYIRAYLGDTSEAKEFAKQFLERRAKQKANQQRQQQQLPQQQQQQPPQQPPQQPQQQDSVWGMNHSTLHSVFQTNQSNNQQSNFEAVQSGKKKKKQKMVRADPSLLGFSVNASSERLNMGEIETLDDY

SEQ ID NO: 12124 - protein, 505 aa, Homo sapiens
MSPWSWFLLQTLCLLPTGAASRRGAPGTANCELKPQQSELNSFLWTIKRDPPSYFFGTIHVPYTRVWDFIPDNSKEAFLQSSIVYFELDLTDPYTISALTSCQMLPQGENLQDVLPRDIYCRLKRHLEYVKLMMPLWMTPDQRGKGLYADYLFNAIAGNWERKRPVWVMLMVNSLTEVDIKSRGVPVLDLFLAQEAERLRKQTGAVEKVEEQCHPLNGLNFSQVIFALNQTLLQQESLRAGSLQIPYTTEDLIKHYNCGDLSSVILSHDSSQVPNFINATLPPQERITAQEIDSYLRRELIYKRNERIGKRVKALLEEFPDKGFFFAFGAGHFMGNNTVLDVLRREGYEVEHAPAGRPIHKGKSKKTSTRPTLSTIFAPKVPTLEVPAPEAVSSGHSTLPPLVSRPGSADTPSEAEQRFRKKRRRSQRRPRLRQFSDLWVRLEESDIVPQLQVPVLDRHISTELRLPRRGHSHHSQMVASSACLSLWTPVFWVLVLAFQTETPLL

SEQ ID NO: 12125 - protein, 89 aa, Homo sapiens
MEHKEVVLLLLLFLKSGQGEPLDDYVNTQGPSLFSVTKKQLGAGSREECAAKCEEDKEFTCRYFHRRCTYPEICNSDGHSNITVKSNNV

SEQ ID NO: 12126 - protein, 334 aa, Homo sapiens
MGRPLHLVLLSASLAGLLLLGESLFIRREQANNILARVTRANSFLEEMKKGHLERECMEETCSYEEAREVFEDSDKTNEFWNKYKDGDQCETSPCQNQGKCKDGLGEYTCTCLEGFEGKNCELFTRKLCSLDNGDCDQFCHEEQNSVVCSCARGYTLADNGKACIPTGPYPCGKQTLERRKRSVAQATSSSGEAPDSITWKPYDAADLDPTENPFDLLDFNQTQPERGDNNLTRIVGGQECKDGECPWQALLINEENEGFCGGTILSEFYILTAAHCLYQAKRFKVRGTGTRSRRRAVRRCTRWRWSSSTTGSQRRPMTSTSPCSGSRPPSPSA

SEQ ID NO: 12127 - protein, 638 aa, Homo sapiens
MDAFEKVRTKLETQPQEEYEIINVEVKHGGFVYYQEGCCLVRSKDEEADNDNYEVLFNLEELKLDQPFIDCIRVAPDEKYVAAKIRTEDSEASTCVIIKLSDQPVMEASFPNVSSFEWVKDEEDEDVLFYTFQRNLRCHDVYRATFGDNKRNERFYTEKDPSYFVFLYLTKDSRFLTINIMNKTTSEVWLIDGLSPWDPPVLIQKRIHGVLYYVEHRDDELYILTNVGEPTEFKLMRTAADTPAIMNWDLFFTMKRNTKVIDLDMFKDHCVLFLKHSNLLYVNVIGLADDSVRSLKLPPWACGFIMDTNSDPKNCPFQLCSPIRPPKYYTYKFAEGKLFEETGHEDPITKTSRVLRLEAKSKDGKLVPMTVFHKTDSEDLQKKPLLVHVYGAYGMDLKMNFRPERRVLVDDGWILAYCHVRGGGELGLQWHADGRLTKKLNGLADLEACIKTLHGQGFSQPSLTTLTAFSAGGVLAGALCNSNPELVRAVTLEAPFLDVLNTMMDTTLPLTLEELEEWGNPSSDEKHKNYIKRYCPYQNIKPQHYPSIHITAYENDERVPLKGIVSYTEKLKEAIAEHAKDTGEGYQTPNIILDIQPGGNHVIEDSHKKITAQIKFLYEELGLDSTSVFEDLKKYLKF

SEQ ID NO: 12128 - protein, 764 aa, Homo sapiens
MEDAGEDPTTFAAHSLPSDPRLLATVTNAYLGTRVFHDTLHVSGVYNGAGGDTHRAMLPSPLNVRLEAPAGMGEQLTETFALDTNTGSFLHTLEGPRFRASQCIYAHRTLPHVLAFRVSIARLAPGSGPITLLLRSAFSPESPDLDLHQGPDFQGARYLYGHTLTPEQPGGPQQEVHMLWTPAPPDLTLGEGEEARTWDFLTAVGGSQAEAQACLTEALQLQARGALYTAHAQAWAQLWVECGLDVVGPLQLRQALRGSLYYLLSALPQPKAPGYICHGLSPGGLSNGSREECYWGHVFWDQDLWMFPSILMFHPEAARAILEYRIRTLDGALENAQNLGYQGAKFAWESADSGLEVCPEDIYGVQEVHVNGAVVLAFELYYHTTQDLQLFREAGGWDVVRAVAEFWCSRVEWSPREEKHLTCASPTLTTGVEGRPLRLCTEHHLGLVCPGVMSPDEYHSGVNNSVYTNVLVQNSLRFAAALAQDLGLPIPSQWLAVADKIKVPFDVEQNFHPEFDGYEPGEVVKQADVVLLGYPVPFSLSPDVRRKNLEIYEAVTSPQGPAMTWSMFAVGWMELKDAVRARGLLDRSFANMAEPFKVWTENADGSGAVNFLTGMGGFLQAVVFGCTGFRVTRAGVTFDPVCLSGISRVSVSGIFYQGNKLNFSFSEDSVTVEVTARAGPWAPHLEAELWPSQSRLSLLPGHKVSFPRSAGRIQMSPPKLPGSSSSEFPGRTFSDVRDPLQSPLWVTLGSSSPTESLTVDPASE

SEQ ID NO: 12129 - protein, 711 aa, Homo sapiens
MAALGRPGSGPRAAVPAWKREILERKRAKLAALGGGAGPGAAEPEQRVLAESLGPLRENPFMLLEAERRRGGGAAGARLLERYRRVPGVRALRADSVLIIETVPGFPPAPPAPGAAQIRAAEVLVYGAPPGRVSRLLERFDPPAAPRRRGSPERARPPPPPPPPAPPRPPPAAPSPPAAPGPRGGGASPGARRSDFLQKTGSNSFTVHPRGLHRGAGARLLSNGHSAPEPRAGPANRLAGSPPGSGQWKPKVESGDPSLHPPPSPGTPSATPASPPASATPSQRQCVSAATSTNDSFEIRPAPKPVMETIPLGDLQARALASLRANSRNSFMVIPKSKASGAPPPEGRQSVELPKGDLGPASPSQELGSQPVPGGDGAPALGKSPLEVEAQWAVEEGACPRTATALADRAIRWQRPSSPPPFLPAASEEAEPAEGLRVPGLAKNSREYVRPGLPVTFIDEVDSEEAPQAAKLPYLPHPARPLHPARPGCVAELQPRGSNTFTVVPKRKPGTLQDQHFSQANREPRPREAEEEEASCLLGPTLKKRYPTVHEIEVIGGYLALQKSCLTKAGSSRKKMKISFNDKSLQTTFEYPSESSLEQEEEVDQQEEEEEEEEEEEEEEEGSGSEEKPFALFLPRATFVSSVRPESSRLPEGSSGLSSYTPKHSVAFSKWQEQALEQAPREAEPPPVEAMLTPASQNDLSDFRSEPALYF

SEQ ID NO: 12130 - protein, 471 aa, Homo sapiens
MRPVSVWQWSPWGLLLCLLCSSCLGSPSPSTGPEKKAGSQGLRFRLAGFPRKPYEGRVEIQRAGEWGTICDDDFTLQAAHILCRELGFTEATGWTHSAKYGPGTGRIWLDNLSCSGTEQSVTECASRGWGNSDCTHDEDAGVICKDQRLPGFSDSNVIEVEHHLQVEEVRIRPAVGWGRRPLPVTEGLVEVRLPDGWSQVCDKGWSAHNSHVVCGMLGFPSEKRVNAAFYRLLAQRQQHSFGLHGVACVGTEAHLSLCSLEFYRANDTARCPGGGPAVVSCVPGPVYAASSGQKKQQQSKPQGEARVRLKGGAHPGEGRVEVLKASTWGTVCDRKWDLHAASVVCRELGFGSAREALSGARMGQDVSKRYECANFGEQGITVGCWDLYRHDIDCQWIDITDVKPGNYILQVVINPNFEVAESDFTNNAMKCNCKYDGHRIWVHNCHIGDAFSEEANRRFERYPGQTSNQII

SEQ ID NO: 12131 - protein, 129 aa, Homo sapiens
MLPPMALPSVSWMLLSCLILLCQVQGEETQKELPSPRISCPKGSKAYGSPCYALFLSPKSWMDADGSEPDGDGWEWSSTDVMNYFAWEKNPSTILNPGHCGSLSRSTGFLKWKDYNCDAKLPYVCKFKD

SEQ ID NO: 12132 - protein, 79 aa, Homo sapiens
MAPAKKGGEKKKGRSAINEVVTREYTINIHKRIHGVGFKKRAPRALKEIRKFAMKEMGTPDVRIDTRLNKAVWAKGIRC

SEQ ID NO: 12133 - protein, 977 aa, Homo sapiens
MGPPLPLLLLLLLLLPPRVLPAAPSSVPRGRQLPGRLGCLLEEGLCGASEACVNGFTWQDDYTQYVMDQELADLPKTYLRRPEASSPARPSKHSVGSERRYSREGGAALANALRRHLPFLEALSQAPASDVLARTHTAQDRPPAEGDDRFSESILTYVAHTSALTYPPGSRTQLREDLLPRTLGQLQPDELSPKVDSGVDRHHLMAALSAYAAQRPPAPPGEGSLEPQYLLRAPSRMPRPLLAPAAPQKWPSPLGDSEDPSSTGDGARIHTLLKDLQRQPAEVRGLSGLELDGMAELMAGLMQGVDHGVARGSPGRAALGESGEQADGPKATLRGDSFPDDGVQDDDDRLYQEVHRLSATLGGLLQDHGSRLLPGALPFARPLDMERKKSEHPESSLSSEEETAGVENVKSQTYSKDLLGQQPHSEPGAAAFGELQNQMPGPSKEEQSLPAGAQEALSDGLQLEVQPSEEEARGYIVTDRDPLRPEEGRRLVEDVARLLQVPSSAFADVEVLGPAVTFKVSANVQNVTTEDVEKATVDNKDKLEETSGLKILQTGVGSKSKLKFLPPQAEQEDSTKFIALTLVSLACILGVLLASGLIYCLRHSSQHRLKEKLSGLGGDPGADATAAYQELCRQRMATRPPDRPEGPHTSRISSVSSQFSDGPIPSPSARSSASSWSEEPVQSNMDISTGHMILSYMEDHLKNKNRLEKEWEALCAYQAEPNSSFVAQREENVPKNRSLAVLTYDHSRVLLKAENSHSHSDYINASPIMDHDPRNPAYIATQGPLPATVADFWQMVWESGCVVIVMLTPLAENGVRQCYHYWPDEGSNLYHIYEVNLVSEHIWCEDFLVRSFYLKNLQTNETRTVTQFHFLSWYDRGVPSSSRSLLDFRRKVNKCYRGRSCPIIVHCSDGAGRSGTYVLIDMVLNKMAKGAKEIDIAATLEHLRDQRPGMVQTKEQFEFALTAVAEEVNAILKALPQ

SEQ ID NO: 12134 - protein, 104 aa, Homo sapiens
MLLEHRKQQNESAEDEQELSEVFMKTLNYTARFSRFKNRETIASVRSLLLQKKLHKFELACLANLCPETAEESKALIPSLEGRFEDEELQQILDDIQTKRSFQY

SEQ ID NO: 12135 - protein, 332 aa, Homo sapiens
MQKCVISEHMQVEEKCGGIVGIQTKTVQVSATEDGNVTKDSNVVLEIPAATTIAYGVIELYVKLDGQFEFCLLRGKQGGFENKKRIDSVYLDPLVFREFAFIDMPDAAHGISSQDGPLSVLKQATLLLERNFHPFAELPEPQQTALSDIFQAVLFDDELLMVLEPVCDDLVSGLSPTVAVLGELKPRQQQDLVAFLQLVGCSLQGGCPGPEDAGSKQLFMTAYFLVSALAEMPDSAAALLGTCCKLQIIPTLCHLLRALSDDGVSDLEDPTLTPLKDTERFGIVQRLFASADISLERLKSSVKAVILKDSKVFPLLLCITLNGLCALGREHS

SEQ ID NO: 12136 - protein, 1053 aa, Homo sapiens
MFGRSRSWVGGGHGKTSRNIHSLDHLKYLYHVLTKNTTVTEQNRNLLVETIRSITEILIWGDQNDSSVFDFFLEKNMFVFFLNILRQKSGRYVCVQLLQTLNILFENISHETSLYYLLSNNYVNSIIVHKFDFSDEEIMAYYISFLKTLSLKLNNHTVHFFYNEHTNDFALYTEAIKFFNHPESMVRIAVRTITLNVYKVSLDNQAMLHYIRDKTAVPYFSNLVWFIGSHVIELDDCVQTDEEHRNRGKLSDLVAEHLDHLHYLNDILIINCEFLNDVLTDHLLNRLFLPLYVYSLENQDKGGERPKISLPVSLYLLSQVFLIIHHAPLVNSLAEVILNGDLSEMYAKTEQDIQRSSAKPSIRCFIKPTETLERSLEMNKHKGKRRVQKRPNYKNVGEEEDEEKGPTEDAQEDAEKAKGTEGGSKGIKTSGESEEIEMVIMERSKLSELAASTSVQEQNTTDEEKSAAATCSESTQWSRPFLDMVYHALDSPDDDYHALFVLCLLYAMSHNKGMDPEKLERIQLPVPNAAEKTTYNHPLAERLIRIMNNAAQPDGKIRLATLELSCLLLKQQVLMSAGCIMKDVHLACLEGAREESVHLVRHFYKGEDIFLDMFEDEYRSMTMKPMNVEYLMMDASILLPPTGTPLTGIDFVKRLPCGDVEKTRRAIRVFFMLRSLSLQLRGEPETQLPLTREEDLIKTDDVLDLNNSDLIACTVITKDGGMVQRFLAVDIYQMSLVEPDVSRLGWGVVKFAGLLQDMQVTGVEDDSRALNITIHKPASSPHSKPFPILQATFIFSDHIRCIIAKQRLAKGRIQARRMKMQRIAALLDLPIQPTTEVLGFGLGSSTSTQHLPFRFYDQGRRGSSDPTVQRSVFASVDKVPGFAVAQCINQHSSPSLSSQSPPSASGSPSGSGSTSHCDSGGTSSSSTPSTAQSPADAPMSPELPKPHLPDQLVIVNETEADSKPSKNVARSAAVETASLSPSLVPARQPTISLLCEDTADTLSVESLTLVPPVDPHSLRSLTGMPPLSTPAAACTEPVGEEAACAEPVGTAED

SEQ ID NO: 12137 - protein, 539 aa, Homo sapiens
MWRLPRALCVHAAKTSKLSGPWSRPAAFMSTLLINQPQYAWLKELGLREENEGVYNGSWGGRGEVITTYCPANNEPIARVRQASVADYEETVKKAREAWKIWADIPAPKRGEIVRQIGDALREKIQVLGSLVSLEMGKILVEGVGEVQEYVDICDYAVGLSRMIGGPILPSERSGHALIEQWNPVGLVGIITAFNFPVAVYGWNNAIAMICGNVCLWKGAPTTSLISVAVTKIIAKVLEDNKLPGAICSLTCGGADIGTAMAKDERVNLLSFTGSTQVGKQVGLMVQERFGRSLLELGGNNAIIAFEDADLSLVVPSALFAAVGTAGQRCTTARRLFIHESIHDEVVNRLKKAYAQIRVGNPWDPNVLYGPLHTKQAVSMFLGAVEEAKKEGGTVVYGGKVMDRPGNYVEPTIVTGLGHDASIAHTETFAPILYVFKFKNEEEVFAWNNEVKQGLSSSIFTKDLGRIFRWLGPKGSDCGIVNVNIPTSGAEIGGAFGGEKHTGGGRESGSDAWKQYMRRSTCTINYSKDLPLAQGIKFQ

SEQ ID NO: 12138 - protein, 1606 aa, Homo sapiens
MFPKSNLTVTCWVWRSMRKLFLLLSLLLSHAAHLEGKKDNQFIWKPGPWGRCTGDCGPGGVQSRAVWCFHVDGWTSHLSNCGESNRPPKERSCFRVCDWHSDLFQWEVSDWHHCVLVPYARGEVKPRTAECVTAQHGLQHRMVRCIQKLNRTVVANEICEHFALQPPTEQACLIPCPRDCVVSEFLPWSNCSKGCGKKLQHRTRAVIAPPLFGGLQCPNLTESRACDAPISCPLGEEEYTFSLKVGPWSKCRLPHLKEINPSGRTVLDFNSDSNERVTFKHQSYKAHHHSKSWAIEIGYQTRQVSCTRSDGQNAMLSLCLQDSFPLTVQSCIMPKDCETSQWSSWSPCSKTCRSGSLLPGFRSRSRNVKHMAIGGGKECPELLEKEACIVEGELLQQCPRYSWRTSEWKECQVSLLLEQQDPHWHVTGPVCGGGIQTREVYCAQSVPAAAALRAKEVSRPVEKALCVGPAPLPSQLCNIPCSTDCIVSSWSAWGLCIHENCHDPQGKKGFRTRQRHVLMESTGPAGHCPHLVESVPCEDPMCYRWLASEGICFPDHGKCGLGHRILKAVCQNDRGEDVSGSLCPVPPPPERKSCEIPCRMDCVLSEWTEWSSCSQSCSNKNSDGKQTRSRTILALAGEGGKPCPPSQALQEHRLCNDHSCMQLHWETSPWGPCSEDTLVTALNATIGWNGEATCGVGIQTRRVFCVKSHVGQVMTKRCPDSTRPETVRPCFLPCKKDCIVTAFSEWTPCPRMCQAGNATVKQSRYRIIIQEAANGGQECPDTLYEERECEDVSLCPVYRWKPQKWSPCILVPESVWQGITGSSEACGKGLQTRAVSCISDDNRSAEMMECLKQTNGMPLLVQECTVPCREDCTFTAWSKFTPCSTNCEATKSRRRQLTGKSRKKEKCQDSDLYPLVETELCPCDEFISQPYGNWSDCILPEGRREPHRGLRVQADSKECGEGLRFRAVACSDKNGRPVDPSFCSSSGYIQEKCVIPCPFDCKLSDWSSWGSCSSSCGIGVRIRSKWLKEKPYNGGRPCPKLDLKNQVHEAVPCYSECNQYSWVVEHWSSCKINNELRSLRCGGGTQSRKIRCVNTADGEGGAVDSNLCNQDEIPPETQSCSLMCPNECVMSEWGLWSKCPQSCDPHTMQRRTRHLLRPSLNSRTCAEDSQVQPCLLNENCFQFQYNLTEWSTCQLSENAPCGQGVRTRLLSCVCSDGKPVSMDQCEQHNLEKPQRMSIPCLVECVVNCQLSGWTAWTECSQTCGHGGRMSRTRFIIMPTQGEGRPCPTELTQEKTCPVTPCYSWVLGNWSACKLEGGDCGEGVQIRSLSCMVHSGSISHAAGRVEDALCGEMPFQDSILKQLCSVPCPGDCHLTEWSEWSTCELTCIDGRSFETVGRQSRSRTFIIQSFENQDSCPQQVLETRPCTGGKCYHYTWKASLWNNNERTVWCQRSDGVNVTGGCSPQARPAAIRQCIPACRKPFSYCTQGGVCGCEKGYTEIMKSNGFLDYCMKVPGSEDKKADVKNLSGKNRPVNSKIHDIFKGWSLQPLDPDGRVKIWVYGVSGGAFLIMIFLIFTSYLVCKKPKPHQSTPPQQKPLTLAYDGDLDM

SEQ ID NO: 12139 - protein, 160 aa, Homo sapiens
MCSHFDADEIKRLGKRFKKLDLDNSGSLSVEEFMSLPELQQNPLVQRVIDIFDTDGNGEVDFKEFIEGVSQFSVKGDKEQKLRFAFRIYDMDKDGYISNGELFQVLKMMVGNNLKDTQLQQIVDKTIINADKDGDGRISFEEFCAVVGGLDIHKKMVVDV

SEQ ID NO: 12140 - protein, 77 aa, Homo sapiens
MGSSGLLSLLVLFVLLANVQGPGLTDWLFPRRCPKIREECEFQERDVCTKDRQCQDNKKCCVFSCGKKCLDLKQGKQ

SEQ ID NO: 12141 - protein, 500 aa, Homo sapiens
MALRRLLLLLLLSLESLDLLPSVHGARGRAANRTLSAGGAAVGGRRAGGALARGGRELNGTARAPGIPEAGSRRGQPAAAVAAAASAAVTYETCWGYYDVSGQYDKEFECNNSESGYLYCCGTCYYRFCCKKRHEKLDQRQCTNYQSPVWVQTPSTKVVSPGPENKYDPEKDKTNFTVYITCGVIAFVIVAGVFAKVSYDKAHRPPREMNIHRALADILRQQGPIPIAHCERETISAIDTSPKENTPVRSSSKNHYTPVRTAKQTPEKPRMNNILTSATEPYDLSFSRSFQNLAHLPPSYESAVKTNPSKYSSLKRLTDKEADEYYMRRRHLPDLAARGTLPLNVIQMSQQKPLPRERPRRPIRAMSQDRVLSPDRGLPDEFSMPYDRILSDEQLLSTERLHSQDPLLSPERTAFPEQSLSRAISHTDVFVSTPVLDRYRMSKMHSHPSASNNSYATLGQSQTAAKRHAFASRRHNTVEQLHYIPGHHTCYTASKTEVTV

SEQ ID NO: 12142 - protein, 443 aa, Homo sapiens
MLTNGKEQVIKSCVSLPELNAQVFCHSSNNVTKTECCFTDFCNNITLHLPTASPNAPKLGPMELAIIITVPVCLLSIAAMLTVWACQGRQCSYRKKKRPNVEEPLSECNLVNAGKTLKDLIYDVTASGSGSGLPLLVQRTIARTIVLQEIVGKGRFGEVWHGRWCGEDVAVKIFSSRDERSWFREAEIYQTVMLRHENILGFIAADNKDNGTWTQLWLVSEYHEQGSLYDYLNRNIVTVAGMIKLALSIASGLAHLHMEIVGTQGKPAIAHRDIKSKNILVKKCETCAIADLGLAVKHDSILNTIDIPQNPKVGTKRYMAPEMLDDTMNVNIFESFKRADIYSVGLVYWEIARRCSVGGIVEEYQLPYYDMVPSDPSIEEMRKVVCDQKFRPSIPNQWQSCEALRVMGRIMRECWYANGAARLTALRIKKTISQLCVKEDCKA

SEQ ID NO: 12143 - protein, 1320 aa, Homo sapiens
MAAETQTLNFGPEWLRALSSGGSITSPPLSPALPKYKLADYRYGREEMLALFLKDNKIPSDLLDKEFLPILQEEPLPPLALVPFTEEEQRNFSMSVNSAAVLRLTGRGGGGTVVGAPRGRSSSRGRGRGRGECGFYQRSFDEVEGVFGRGGGREMHRSQSWEERGDRRFEKPGRKDVGKKNGYYCMYSPVLLLGQPLCQGRPNFEEGGPTSVGRKHEFIRSESENWRIFREEQNGEDEDGGWRLAGSRRDGERWRPHSPDGPRSAGWREHMERRRRFEFDFRDRDDERGYRRVRSGSGSIDDDRDSLPEWCLEDAEEEMGTFDSSGAFLSLKKVQKEPIPEEQEMDFRPVDEGEECSDSEGSHNEEAKEPDKTNKKEGEKTDRVGVASEETPQTSSSSARPGTPSDHQSQEASQFERKDEPKTEQTEKAEEETRMENSLPAKVPSRGDEMVADVQQPLSQIPSDTASPLLILPPPVPNPSPTLRPVETPVVGAPGMGSVSTEPDDEEGLKHLEQQAEKMVAYLQDSALDDERLASKLQEHRAKGVSIPLMHEAMQKWYYKDPQGEIQGPFNNQEMAEWFQAGYFTMSLLVKRACDESFQPLGDIMKMWGRVPFSPGPAPPPHMGELDQERLTRQQELTALYQMQHLQYQQFLIQQQYAQVLAQQQKAALSSQQQQQLALLLQQFQTLKMRISDQNIIPSVTRSVSVPDTGSIWELQPTASQPTVWEGGSVWDLPLDTTTPGPALEQLQQLEKAKAAKLEQERREAEMRAKREEEERKRQEELRRQQEEILRRQQEEERKRREEEELARRKQEEALRRQREQEIALRRQREEEERQQQEEALRRLEERRREEEERRKQEELLRKQEEEAAKWAREEEEAQRRLEENRLRMEEEAARLRHEEEERKRKELEVQRQKELMRQRQQQQEALRRLQQQQQQQQLAQMKLPSSSTWGQQSNTTACQSQATLSLAEIQKLEEERERQLREEQRRQQRELMKALQQQQQQQQQKLSGWGNVSKPSGTTKSLLEIQQEEARQMQKQQQQQQQHQQPNRARNNTHSNLHTSIGNSVWGSINTGPPNQWASDLVSSIWSNADTKNSNMGFWDDAVKEVGPRNSTNKNKNNASLSKSVGVSNRQNKKVEEEEKLLKLFQGVNKAQDGFTQWCEQMLHALNTANNLDVPTFVSFLKEVESPYEVHDYIRAYLGDTSEAKEFAKQFLERRAKQKANQQRQQQQLPQQQQQQPPQQPPQQPQQQDSVWGMNHSTLHSVFQTNQSNNQQSNFEAVQSGKKKKKQKMVRADPSLLGFSVNASSERLNMGEIETLDDY

SEQ ID NO: 12144 - protein, 177 aa, Homo sapiens
MEICRGLRSHLITLLLFLFHSETICRPSGRKSSKMQAFRIWDVNQKTFYLRNNQLVAGYLQGPNVNLEEKIDVVPIEPHALFLGIHGGKMCLSCVKSGDETRLQLEAVNITDLSENRKQDKRFAFIRSDSGPTTSFESAACPGWFLCTAMEADQPVSLTNMPDEGVMVTKFYFQEDE

SEQ ID NO: 12145 - protein, 333 aa, Homo sapiens
MSPWSWFLLQTLCLLPTGAASRRGAPGTANCELKPQQSELNSFLWTIKRDPPSYFFGTIHVPYTRVWDFIPDNSKEAFLQSSIVYFELDLTDPYTISALTSCQMLPQGENLQDVLPRDIYCRLKRHLEYVKLMMPLWMTPDQRGKGLYADYLFNAIAGNWERKRPVWVMLMVNSLTEVDIKSRGVPVLDLFLAQEAERLRKQTGAVEKVEEQCHPLNGLNFSQVIFALNQTLLQQESLRAGSLQIPYTTEDLIKHYNCGDLSSVILSHDSSQVPNFINATLPPQERITAQEIDSYLRRELIYKRNERIGKRVKALLEEFPDKGFFFAFGAASQ

SEQ ID NO: 12146 - protein, 737 aa, Homo sapiens
MEDAGEDPTTFAAHSLPSDPRLLATVTNAYLGTRVFHDTLHVSGVYNGAGGDTHRAMLPSPLNVRLEAPAGMGEQLTETFALDTNTGSFLHTLEGPRFRASQCIYAHRTLPHVLAFRVSIARLAPGSGPITLLLRSAFSPESPDLDLHQGPDFQGARYLYGHTLTPEQPGGPQQEVHMLWTPAPPDLTLGEGEEARTWDFLTAVGGSQAEAQACLTEALQLQARGALYTAHAQAWAQLWVECGLDVVGPLQLRQALRGSLYYLLSALPQPKAPGYICHGLSPGGLSNGSREECYWGHVFWDQDLWMFPSILMFHPEAARAILEYRIRTLDGALENAQNLGYQGAKFAWESADSGLEVCPEDIYGVQEVHVNGAVVLAFELYYHTTQDLQLFREAGGWDVVRAVAEFWCSRVEWSPREEKYHLRGVMSPDEYHSGVNNSVYTNVLVQNSLRFAAALAQDLGLPIPSQWLAVADKIKVPFDVEQNFHPEFDGYEPGEVVKQADVVLLGYPVPFSLSPDVRRKNLEIYEAVTSPQGPAMTWSMFAVGWMELKDAVRARGLLDRSFANMAEPFKVWTENADGSGAVNFLTGMGGFLQAVVFGCTGFRVTRAGVTFDPVCLSGISRVSVSGIFYQGNKLNFSFSEDSVTVEVTARAGPWAPHLEAELWPSQSRLSLLPGHKVSFPRSAGRIQMSPPKLPGSSSSEFPGRTFSDVRDPLQSPLWVTLGSSSPTESLTVDPASE

SEQ ID NO: 12147 - protein, 326 aa, Homo sapiens
MATEIGSPPRFFHMPRFQHQAPRQLFYKRPDFAQQQAMQQLTFDGKRMRKAVNRKTIDYNPSVIKYLENRIWQRDQRDMRAIQPDAGYYNDLVPPIGMLNNPMNAVTTKFVRTSTNKVKCPVFVVRWTPEGRRLVTGASSGEFTLWNGLTFNFETILQAHDSPVRAMTWSHNDMWMLTADHGGYVKYWQSNMNNVKMFQAHKEAIREARFIHNIPFSVVPIVMVKLFSKCILGAEMHGLCQFLGNFLHPINTIFFFVFTHSPFCWHLSEVVLSRYQPLQYVRDVLSAAFCTGFLFSFMINNVYTLFLFIIYCVRQEYFIPNKEFSL

SEQ ID NO: 12148 - protein, 400 aa, Homo sapiens
MGKNPVRPPRALPPVPSQDDIPLSRPKKKKPRTKNTPASASLEGLAQTAGRRPSEGNEPSTKELKEHPEAPVQRRQKKTRLPLELETSSTQKKSSSSSLLRNENGIDAEPAEEAVIQKPRRKTKKTQPAELQYANELGVEDEDIITDEQTTVEQQSVFTAPTGISQPVGKVFVEKSRRFQAADRSELIKTTENIDVSMDVKPSWTTRDVALTVHRAFRMIGLFSHGFLAGCAVWNIVVIYVLAGDQLSNLSNLLQQYKTLAYPFQSLLYLLLALSTISAFDRIDFAKISVAIRNFLALDPTALASFLYFTALILSLSQQMTSDRIHLYTPSSVNGSLWEAGIEEQILQPWIVVNLVVALLVGLSWLFLSYRPGMDLSEELMFSSEVEEYPDKEKEIKASS

SEQ ID NO: 12149 - protein, 560 aa, Homo sapiens
MAASAKRKQEEKHLKMLRDMTGLPHNRKCFDCDQRGPTYVNMTVGSFVCTSCSGSLRGLNPPHRVKSISMTTFTQQEIEFLQKHGNEVCKQIWLGLFDDRSSAIPDFRDPQKVKEFLQEKYEKKRWYVPPEQAKVVASVHASISGSSASSTSSTPEVKPLKSLLGDSAPTLHLNKGTPSQSPVVGRSQGQQQEKKQFDLLSDLGSDIFAAPAPQSTATANFANFAHFNSHAAQNSANADFANFDAFGQSSGSSNFGGFPTASHSPFQPQTTGGSAASVNANFAHFDNFPKSSSADFGTFNTSQSHQTASAVSKVSTNKAGLQTADKYAALANLDNIFSAGQGGDQGSGFGTTGKAPVGSVVSVPSQSSASSDKYAALAELDSVFSSAATSSNAYTSTSNASSNVFGTVPVVASAQTQPASSSVPAPFGATPSTNPFVAAAGPSVASSTNPFQTNARGATAATFGTASMSMPTGFGTPAPYSLPTSFSGSFQQPAFPAQAAFPQQTAFSQQPNGFAAFGQTKPVVTPFGQVAAAGVSSNPFMTGAPTGQFPTGSSSTNPFL

SEQ ID NO: 12150 - protein, 711 aa, Homo sapiens
MLRACQLSGVTAAAQSCLCGKFVLRPLRPCRRYSTSGSSGLTTGKIAGAGLLFVGGGIGGTILYAKWDSHFRESVEKTIPYSDKLFEMVLGPAAYNVPLPKKSIQSGPLKISSVSEVMKESKQPASQLQKQKGDTPASATEASSSSIRERPPEEVAARLAQQEKQEQVKIESLAKSLEDALRQTASVTLQAIAAQNAAVQAVNAHSNILKAAMDNSEIAGEKKSAQWRTVEGALKERRKAVDEAADALLKAKEELEKMKSVIENAKKKEVAGAKPHITAAEGKLHNMIVDLDNVVKKVQAAQSEAKVVSQYHELVVQARDDFKRELDSITPEVLPGWKGMSVSDLADKLSTDDLNSLIAHAHRRIDQLNRELAEQKATEKQHITLALEKQKLEEKRAFDSAVAKALEHHRSEIQAEQDRKIEEVRDAMENEMRTQLRRQAAAHTDHLRDVLRVQEQELKSEFEQNLSEKLSEQELQFRRLSQEQVDNFTLDINTAYARLRGIEQAVQSHAVAEEEARKAHQLWLSVEALKYSMKTSSAETPTIPLGSAVEAIKANCSDNEFTQALTAAIPPESLTRGVYSEETLRARFYAVQKLARRVAMIDETRNSLYQYFLSYLQSLLLFPPQQLKPPPELCPEDINTFKLLSYASYCIEHGDLELAAKFVNQLKGESRRVAQDWLKEARMTLETKQIVEILTAYASAVGIGTTQVQPE

SEQ ID NO: 12151 - protein, 591 aa, Homo sapiens
MPGFHLITQLKGMSVVLVLLPTLLLVMLTGAQRACPKNCRCDGKIVYCESHAFADIPENISGGSQGLSLRFNSIQKLKSNQFAGLNQLIWLYLDHNYISSVDEDAFQGIRRLKELILSSNKITYLHNKTFHPVPNLRNLDLSYNKLQTLQSEQFKGLRKLIILHLRSNSLKTVPIRVFQDCRNLDFLDLGYNRLRSLSRNAFAGLLKLKELHLEHNQFSKINFAHFPRLFNLRSIYLQWNRIRSISQGLTWTWSSLHNLDLSGNDIQGIEPGTFKCLPNLQKLNLDSNKLTNISQETVNAWISLISITLSGNMWECSRSICPLFYWLKNFKGNKESTMICAGPKHIQGEKVSDAVETYNICSEVQVVNTERSHLVPQTPQKPLIIPRPTIFKPDVTQSTFETPSPSPGFQIPGAEQEYEHVSFHKIIAGSVALFLSVAMILLVIYVSWKRYPASMKQLQQHSLMKRRRKKARESERQMNSPLQEYYVDYKPTNSETMDISVNGSGPCTYTISGSRECEMPHHMKPLPYYSYDQPVIGYCQAHQPLHVTKGYETVSPEQDESPGLELGRDHSFIATIARSAAPAIYLERIAN

SEQ ID NO: 12152 - protein, 903 aa, Homo sapiens
MSSDEKGISPAHKTSTPTHRSASSSTSSQRDSRQSIHILERTASSSTEPSVSRQLLEPEPVPLSKEADSWEIIEGLKIGQTNVQKPDKHEGFMLKKRKWPLKGWHKRFFVLDNGMLKYSKAPLDIQKGKVHGSIDVGLSVMSIKKKARRIDLDTEEHIYHLKVKSQDWFDAWVSKLRHHRLYRQNEIVRSPRDASFHIFPSTSTAESSPAANVSVMDGKMQPNSFPWQSPLPCSNSLPATCTTGQSKVAAWLQDSEEMDRCAEDLAHCQSNLVELSKLLQNLEILQRTQSAPNFTDMQVPFSATMSPVRLHSSNPNLCADIEFQTPPSHLTDPLESSTDYTKLQEEFCLIAQKVHSLLKSAFNSIAIEKEKLKQMVSEQDHSKGHSTQMARLRQSLSQALNQNAELRSRLNRIHSESIICDQVVSVNIIPSPDEAGEQIHVSLPLSQQVANESRLSMSESVSEFFDAQEVLLSASSSENEASDDESYISDVSDNISEDNTSVADNISRQILNGELTGGAFRNGRRACLPAPCPDTSNINLWNILRNNIGKDLSKVSMPVELNEPLNTLQHLCEEMEYSELLDKASETDDPYERMVLVAAFAVSGYCSTYFRAGSKPFNPVLGETYECIREDKGFRFFSEQVSHHPPISACHCESKNFVFWQDIRWKNKFWGKSMEILPVGTLNVMLPKYGDYYVWNKVTTCIHNILSGRRWIEHYGEVTIRNTKSSVCICKLTFVKVNYWNSNMNEVQGVVIDQEGKAVYRLFGKWHEGLYCGVAPSAKCIWRPGSMPTNYELYYGFTRFAIELNELDPVLKDLLPPTDARFRPDQRFLEEGNLEAAASEKQRVEELQRSRRRYMEENNLEHIPKFFKKVIDANQREAWVSNDTYWELRKDPGFSKVDSPVLW

SEQ ID NO: 12153 - protein, 334 aa, Homo sapiens
MTRSLFKGNFWSADILSTIGYDNIIQHLNNGRKNCKEFEDFLKERAAIEERYGKDLLNLSRKKPCGQSEINTLKRALEVFKQQVDNVAQCHIQLAQSLREEARKMEEFREKQKLQRKKTELIMDAIHKQKSLQFKKTMDAKKNYEQKCRDKDEAEQAVSRSANLVNPKQQEKLFVKLATSKTAVEDSDKAYMLHIGTLDKVREEWQSEHIKACEAFEAQECERINFFRNALWLHVNQLSQQCVTSDEMYEQVRKSLEMCSIQRDIEYFVNQRKTGQIPPAPIMYENFYSSQKNAVPAGKATGPNLARRGPLPIPKSSPDDPNYSLVDDYSLLYQ

SEQ ID NO: 12154 - protein, 205 aa, Homo sapiens
MSSMNPEYDYLFKLLLIGDSGVGKSCLLLRFADDTYTESYISTIGVDFKIRTIELDGKTIKLQIWDTAGQERFRTITSSYYRGAHGIIVVYDVTDQESFNNVKQWLQEIDRYASENVNKLLVGNKCDLTTKKVVDYTTAKEFADSLGIPFLETSAKNATNVEQSFMTMAAEIKKRMGPGATAGGAEKSNVKIQSTPVKQSGGGCC

SEQ ID NO: 12155 - protein, 175 aa, Homo sapiens
MGTPLDGGSRVPIGCPAKLRRVTRKKVAPDLEGWLSLAKARYAMGAKSVGPLQYASHMEPQVCLHASEAQEGLQKFKVVRAGVHAPEEVGPREAGLRRRKGPTKTPEPESSEAPQDPLNWFGILVPHSLRQAQASFRDGLQLAADIASLQNRIDWGRSQLRGLQEKLKQLEPGAA

SEQ ID NO: 12156 - protein, 1382 aa, Homo sapiens
MLRKLTIEQINDWFTIGKTVTNVELLGAPPAFPAGAAREEVQRQDVAPGAGPAAQAPALAQAPARPAAAFERSLSQRSSEVEYINKYRQLEAQELDVCRSVQPTSGPGPRPSLAKLSSVTCIPGTTYKYPDLPISRYKEEVVSLIESNSVVIIHGATGSGKSTQLPQYILDHYVQRSAYCSIVVTQPRKIGASSIARWISKERAWTLGGVVGYQVGLEKIATEDTRLIYMTTGVLLQKIVSAKSLMEFTHIIIDEVHERTEEMDFLLLVVRKLLRTNSRFVKVVLMSATISCKEFADYFAVPVQNKMNPAYIFEVEGKPHSVEEYYLNDLEHIHHSKLSPHLLEEPVITKDIYEVAVSLIQMFDDLDMKESGNKAWSGAQFVLERSSVLVFLPGLGEINYMHELLTSLVHKRLQVYPLHSSVALEEQNNVFLSPVPGYRKIILSTNIAESSVTVPDVKYVIDFCLTRTLVCDEDTNYQSLRLSWASKTSCNQRKGRAGRVSRGYCYRLVHKDFWDNSIPDHVVPEMLRCPLGSTILKVKLLDMGEPRALLATALSPPGLSDIERTILLLKEVGALAVSGQREDENPHDGELTFLGRVLAQLPVNQQLGKLIVLGHVFGCLDECLIIAAALSLKNFFAMPFRQHLDGYRNKVNFSGSSKSDCIALVEAFKTWKACRQTGELRYPKDELNWGRLNYIQIKRIREVAELYEELKTRISQFNMHVDSRRPVMDQEYIYKQRFILQVVLAGAFYPNYFTFGQPDEEMAVRELAGKDPKTTVVLKHIPPYGFLYYKQLQSLFRQCGQVKSIVFDGAKAFVEFSRNPTERFKTLPAVYMAIKMSQLKVSLELSVHSAEEIEGKVQGMNVSKLRNTRVNVDFQKQTVDPMQVSFNTSDRSQTVTDLLLTIDVTEVVEVGHFWGYRIDENNSEILKKLTAEINQLTLVPLPTHPHPDLVCLAPFADFDKQRYFRAQVLYVSGNSAEVFFVDYGNKSHVDLHLLMEIPCQFLELPFQALEFKICKMRPSAKSLVCGKHWSDGASQWFASLVSGCTLLVKVFSVVHSVLHVDVYQYSGVQDAINIRDVLIQQGYAELTEESYESKQSHEVLKGLFSKSVENMTDGSVPFPMKDDEKYLIRILLESFSTNKLGTPNCKAELHGPFNPYELKCHSLTRISKFRCVWIEKESINSVIISDAPEDLHQRMLVAASLSINATGSTMLLRETSLMPHIPGLPALLSMLFAPVIELRIDQNGKYYTGVLCGLGWNPATGASILPEHDMELAFDVQFSVEDVVEVNILRAAINKLVCDGPNGCKCLGPERVAQLQDIARQKLLGLFCQSKPREKIVPKWHEKPYEWNQVDPKLVMEQADRESSRGKNTFLYQLHKLVVLGT

SEQ ID NO: 12157 - protein, 496 aa, Homo sapiens
MGRGVRVLLLLSLLHCAGGSEGRKTWRRRGQQPPPPPRTEAAPAAGQPVESFPLDFTAVEGNMDSFMAQVKSLAQSLYPCSAQQLNEDLRLHLLLNTSVTCNDGSPAGYYLKESRGSRRWLLFLEGGWYCFNRENCDSRYDTMRRLMSSRDWPRTRTGTGILSSQPEENPYWWNANMVFIPYCSSDVWSGASSKSEKNEYAFMGALIIQEVVRELLGRGLSGAKVLLLAGSSAGGTGVLLNVDRVAEQLEKLGYPAIQVRGLADSGWFLDNKQYRHTDCVDTITCAPTEAIRRGIRYWNGVVPERCRRQFQEGEEWNCFFGYKVYPTLRCPVFVVQWLFDEAQLTVDNVHLTGQPVQEGLRLYIQNLGRELRHTLKDVPASFAPACLSHEIIIRSHWTDVQVKGTSLPRALHCWDRSLHDSHKASKTPLKGCPVHLVDSCPWPHCNPSCPTVRDQFTGQEMNVAQFLMHMGFDMQTVAQPQGLEPSELLGMLSNGS

SEQ ID NO: 12158 - protein, 455 aa, Homo sapiens
MAGGGGDLSTRMFTEDQGVDDRLLYDIVFKHFKRNKVEISNAIKKTFPFLEGLRDRDLITNKMFEDSQDSCRNLVPVQRVVYNVLSELEKTFNLPVLEALFSDVNMQEYPDLIHIYKGFENVIHDKLPLQESEEEEREERSGLQLSLEQGTGENSFRSLTWPPSGSPSHAGTTPPENGLSEHPCETEQINAKRKDTTSDKDDSLGSQQTNEQCAQKAEPTESCEQIAVQVNNGDAGREMPCPLPCDEESPEAELHNHGIQINSCSVRLVDIKKEKPFSNSKVECQAQARTHHNQASDIIVISSEDSEGSTDVDEPLEVFISAPRSEPVINNDNPLESNDEKEGQEATCSRPQIVPEPMDFRKLSTFRESFKKRVIGQDHDFSESSEEEAPAEASSGALRSKHGEKAPMTSRSTSTWRIPSRKRRFSSSDFSDLSNGEELQETCSSSLRRGSGKED

SEQ ID NO: 12159 - protein, 198 aa, Homo sapiens
MALPVTALLLPLALLLHAARPSQFRVSPLDRTWNLGETVELKCQVLLSNPTSGCSWLFQPRGAAASPTFLLYLSQNKPKAAEGLDTQRFSGKRLGDTFVLTLSDFRRENEGYYFCSALSNSIMYFSHFVPVFLPVHTRGLDFACDIYIWAPLAGTCGVLLLSLVITLYCNHRNRRRVCKCPRPVVKSGDKPSLSARYV

SEQ ID NO: 12160 - protein, 447 aa, Homo sapiens
MAGVVHVSLAALLLLPMAPAMHSDCIFKKEQAMCLEKIQRANELMGFNDSSPGCPGMWDNITCWKPAHVGEMVLVSCPELFRIFNPDQDMGVVSRNCTEDGWSEPFPHYFDACGFDEYESETGDQDYYYLSVKALYTVGYSTSLVTLTTAMVILCRFRKLHCTRNFIHMNLFVSFMLRAISVFIKDWILYAEQDSNHCFISTVECKAVMVFFHYCVVSNYFWLFIEGLYLFTLLVETFFPERRYFYWYTIIGWGTPTVCVTVWATLRLYFDDTGCWDMNDSTALWWVIKGPVVGSIMVNFVLFIGIIVILVQKLQSPDMGGNESSIYLRLARSTLLLIPLFGIHYTVFAFSPENVSKRERLVFELGLGSFQGFVVAVLYCFLNGEVQAEIKRKWRSWKVNRYFAVDFKHRHPSLASSGVNGGTQLSILSKSSSQIRMSGLPADNLAT

SEQ ID NO: 12161 - protein, 2530 aa, Homo sapiens
MTTLLWVFVTLRVITAAVTVETSDHDNSLSVSIPQPSPLRVLLGTSLTIPCYFIDPMHPVTTAPSTAPLAPRIKWSRVSKEKEVVLLVATEGRVRVNSAYQDKVSLPNYPAIPSDATLEVQSLRSNDSGVYRCEVMHGIEDSEATLEVVVKGIVFHYRAISTRYTLDFDRAQRACLQNSAIIATPEQLQAAYEDGFHQCDAGWLADQTVRYPIHTPREGCYGDKDEFPGVRTYGIRDTNETYDVYCFAEEMEGEVFYATSPEKFTFQEAANECRRLGARLATTGQLYLAWQAGMDMCSAGWLADRSVRYPISKARPNCGGNLLGVRTVYVHANQTGYPDPSSRYDAICYTGEDFVDIPENFFGVGGEEDITVQTVTWPDMELPLPRNITEGEARGSVILTVKPIFEVSPSPLEPEEPFTFAPEIGATAFAEVENETGEATRPWGFPTPGLGPATAFTSEDLVVQVTAVPGQPHLPGGVVFHYRPGPTRYSLTFEEAQQACLRTGAVIASPEQLQAAYEAGYEQCDAGWLRDQTVRYPIVSPRTPCVGDKDSSPGVRTYGVRPSTETYDVYCFVDRLEGEVFFATRLEQFTFQEALEFCESHNATLATTGQLYAAWSRGLDKCYAGWLADGSLRYPIVTPRPACGGDKPGVRTVYLYPNQTGLPDPLSRHHAFCFRGISAVPSPGEEEGGTPTSPSGVEEWIVTQVVPGVAAVPVEEETTAVPSGETTAILEFTTEPENQTEWEPAYTPVGTSPLPGILPTWPPTGAATEESTEGPSATEVPSASEEPSPSEVPFPSEEPSPSEEPFPSVRPFPSVELFPSEEPFPSKEPSPSEEPSASEEPYTPSPPVPSWTELPSSGEESGAPDVSGDFTGSGDVSGHLDFSGQLSGDRASGLPSGDLDSSGLTSTVGSGLPVESGLPSGDEERIEWPSTPTVGELPSGAEILEGSASGVGDLSGLPSGEVLETSASGVGDLSGLPSGEVLETTAPGVEDISGLPSGEVLETTAPGVEDISGLPSGEVLETTAPGVEDISGLPSGEVLETTAPGVEDISGLPSGEVLETTAPGVEDISGLPSGEVLETTAPGVEDISGLPSGEVLETAAPGVEDISGLPSGEVLETAAPGVEDISGLPSGEVLETAAPGVEDISGLPSGEVLETAAPGVEDISGLPSGEVLETAAPGVEDISGLPSGEVLETAAPGVEDISGLPSGEVLETAAPGVEDISGLPSGEVLETAAPGVEDISGLPSGEVLETAAPGVEDISGLPSGEVLETAAPGVEDISGLPSGEVLETAAPGVEDISGLPSGEVLETAAPGVEDISGLPSGEVLETAAPGVEDISGLPSGEVLETAAPGVEDISGLPSGEVLETAAPGVEDISGLPSGEVLETAAPGVEDISGLPSGEVLETTAPGVEEISGLPSGEVLETTAPGVDEISGLPSGEVLETTAPGVEEISGLPSGEVLETSTSAVGDLSGLPSGGEVLEISVSGVEDISGLPSGEVVETSASGIEDVSELPSGEGLETSASGVEDLSRLPSGEEVLEISASGFGDLSGLPSGGEGLETSASEVGTDLSGLPSGREGLETSASGAEDLSGLPSGKEDLVGSASGDLDLGKLPSGTLGSGQAPETSGLPSGFSGEYSGVDLGSGPPSGLPDFSGLPSGFPTVSLVDSTLVEVVTASTASELEGRGTIGISGAGEISGLPSSELDISGRASGLPSGTELSGQASGSPDVSGEIPGLFGVSGQPSGFPDTSGETSGVTELSGLSSGQPGISGEASGVLYGTSQPFGITDLSGETSGVPDLSGQPSGLPGFSGATSGVPDLVSGTTSGSGESSGITFVDTSLVEVAPTTFKEEEGLGSVELSGLPSGEADLSGKSGMVDVSGQFSGTVDSSGFTSQTPEFSGLPSGIAEVSGESSRAEIGSSLPSGAYYGSGTPSSFPTVSLVDRTLVESVTQAPTAQEAGEGPSGILELSGAHSGAPDMSGEHSGFLDLSGLQSGLIEPSGEPPGTPYFSGDFASTTNVSGESSVAMGTSGEASGLPEVTLITSEFVEGVTEPTISQELGQRPPVTHTPQLFESSGKVSTAGDISGATPVLPGSGVEVSSVPESSSETSAYPEAGFGASAAPEASREDSGSPDLSETTSAFHEANLERSSGLGVSGSTLTFQEGEASAAPEVSGESTTTSDVGTEAPGLPSATPTASGDRTEISGDLSGHTSQLGVVISTSIPESEWTQQTQRPAETHLEIESSSLLYSGEETHTVETATSPTDASIPASPEWKRESESTAAAPARSCAEEPCGAGTCKETEGHVICLCPPGYTGEHCNIDQEVCEEGWNKYQGHCYRHFPDRETWVDAERRCREQQSHLSSIVTPEEQEFVNNNAQDYQWIGLNDRTIEGDFRWSDGHPMQFENWRPNQPDNFFAAGEDCVVMIWHEKGEWNDVPCNYHLPFTCKKGTVACGEPPVVEHARTFGQKKDRYEINSLVRYQCTEGFVQRHMPTIRCQPSGHWEEPQITCTDPTTYKRRLQKRSSRHPRRSRPSTAH

SEQ ID NO: 12162 - protein, 1393 aa, Homo sapiens
MVEPGQDLLLAALSESGISPNDLFDIDGGDAGLATPMPTPSVQQSVPLSALELGLETEAAVPVKQEPETVPTPALLNVRQQPPSTTTFVLNQINHLPPLGSTIVMTKTPPVTTNRQTITLTKFIQTTASTRPSVSAPTVRNAMTSAPSKDQVQLKDLLKNNSLNELMKLKPPANIAQPVATAATDVSNGTVKKESSNKEGARMWINDMKMRSFSPTMKVPVVKEDDEPEEEDEEEMGHAETYAEYMPIKLKIGLRHPDAVVETSSLSSVTPPDVWYKTSISEETIDNGWLSALQLEAITYAAQQHETFLPNGDRAGFLIGDGAGVGKGRTIAGIIYENYLLSRKRALWFSVSNDLKYDAERDLRDIGAKNILVHSLNKFKYGKISSKHNGSVKKGVIFATYSSLIGESQSGGKYKTRLKQLLHWCGDDFDGVIVFDECHKAKNLCPVGSSKPTKTGLAVLELQNKLPKARVVYASATGASEPRNMAYMNRLGIWGEGTPFREFSDFIQAVERRGVGAMEIVAMDMKLRGMYIARQLSFTGVTFKIEEVLLSQSYVKMYNKAVKLWVIARERFQQAADLIDAEQRMKKSMWGQFWSAHQRFFKYLCIASKVKRVVQLAREEIKNGKCVVIGLQSTGEARTLEALEEGGGELNDFVSTAKGVLQSLIEKHFPAPDRKKLYSLLGIDLTAPSNNSSPRDSPCKENKIKKRKGEEITREAKKARKVGGLTGSSSDDSGSESDASDNEESDYESSKNMSSGDDDDFNPFLDESNEDDENDPWLIRKDHKKNKEKKKKKSIDPDSIQSALLASGLGSKRPSFSSTPVISPAPNSTPANSNTNSNSSLITSQDAVERAQQMKKDLLDKLEKLAEDLPPNTLDELIDELGGPENVAEMTGRKGRVVSNDDGSISYESRSELDVPVEILNITEKQRFMDGDKNIAIISEAASSGISLQADRRAKNQRRRVHMTLELPWSADRAIQQFGRTHRSNQVTAPEYVFLISELAGEQRFASIVAKRLESLGALTHGDRRATESRDLSRFNFDNKYGRNALEIVMKSIVNLDSPMVSPPPDYPGEFFKDVRQGLIGVGLINVEDRSGILTLDKDYNNIGKFLNRILGMEVHQQNALFQYFADTLTAVVQNAKKNGRYDMGILDLGSGDEKVRKSDVKKFLTPGYSTSGHVELYTISVERGMSWEEATKIWAELTGPDDGFYLSLQIRNNKKTAILVKEVNPKKKLFLVYRPNTGKQLKLEIYADLKKKYKKVVSDDALMHWLDQYNSSADTCTHAYWRGNCKKASLGLVCEIGLRCRTYYVLCGSVLSVWTKVEGVLASVSGTNVKMQIVRLRTEDGQRIVGLIIPANCVSPLVNLLSTSDQSQQLAVQQKQLWQQHHPQSITNLSNA

SEQ ID NO: 12163 - protein, 1073 aa, Homo sapiens
MTDQENNNNISSNPFAALFGSLADAKQFAAIQKEQLKQQSDELPASPDDSDNSVSESLDEFDYSVAEISRSFRSQQEICEQLNINHMIQRIFLITLDNSDPSLKSGNGIPSRCVYLEEMAVELEDQDWLDMSNVEQALFARLLLQDPGNHLINMTSSTTLNLSADRDAGERHIFCYLYSCFQRAKEEITKVPENLLPFAVQCRNLTVSNTRTVLLTPEIYVDQNIHEQLVDLMLEAIQGAREYMNKIYFEDVTEFLEEVIEALILDEEVRTFPEVMIPVFDILLGRIKDLELCQILLYAYLDILLYFTRQKDMAKVFVEYIQPKDPTNGQMYQKTLLGVILSISCLLKTPGVVENHGYFLNPSRSSPQEIKVQEANIHQFMAQFHEKIYQMLKNLLQLSPETKHCILSWLGNCLHANAGRTKIWANQMPEIFFQMYASDAFFLNLGAALLKLCQPFCKPRSSRLLTFNPTYCALKELNDEERKIKNVHMRGLDKETCLIPAVQEPKFPQNYNLVTENLALTEYTLYLGFHRLHDQMVKINQNLHRLQVAWRDAQQSSSPAADNLREQFERLMTIYLSTKTAMTEPQMLQNCLNLQVSMAVLLVQLAIGNEGSQPIELTFPLPDGYSSLAYVPEFFADNLGDFLIFLRRFADDILETSADSLEHVLHFITIFTGSIERMKNPHLRAKLAEVLEAVMPHLDQTPNPLVSSVFHRKRVFCNFQYAPQLAEALIKVFVDIEFTGDPHQFEQKFNYRRPMYPILRYMWGTDTYRESIKDLADYASKNLEAMNPPLFLRFLNLLMNDAIFLLDEAIQYLSKIKIQQIEKDRGEWDSLTPEARREKEAGLQMFGQLARFHNIMSNETIGTLAFLTSEIKSLFVHPFLAERIISMLNYFLQHLVGPKMGALKVKDFSEFDFKPQQLVSDICTIYLNLGDEENFCATVPKDGRSYSPTLFAQTVRVLKKINKPGNMIMAFSNLAERIKSLADLQQQEEETYADACDEFLDPIMSTLMCDPVVLPSSRVTVDRSTIARHLLSDQTDPFNRSPLTMDQIRPNTELKEKIQRWLAERKQQKEQLE

SEQ ID NO: 12164 - protein, 501 aa, Homo sapiens
MNRSRQVTCVAWVRCGVAKETPDKVELSKEEVKRLIAEAKEKLQEEGGGSDEEETGSPSEDGMQSARTQARPREPLEDGDPEDDRTLDDDELAEYDLDKYDEEGDPDAETLGESLLGLTVYGSNDQDPYVTLKDTEQYEREDFLIKPSDNLIVCGRAEQDQCNLEVHVYNQEEDSFYVHHDILLSAYPLSVEWLNFDPSPDDSTGNYIAVGNMTPVIEVWDLDIVDSLEPVFTLGSKLSKKKKKKGKKSSSAEGHTDAVLDLSWNKLIRNVLASASADNTVILWDMSLGKPAASLAVHTDKVQTLQFHPFEAQTLISGSYDKSVALYDCRSPDESHRMWRFSGQIERVTWNHFSPCHFLASTDDGFVYNLDARSDKPIFTLNAHNDEISGLDLSSQIKGCLVTASADKYVKIWDILGDRPSLVHSRDMKMGVLFCSSCCPDLPFIYAFGGQKEGLRVWDISTVSSVNEAFGRRERLVLGSARNSSISGPFGSRSSDTPMES

SEQ ID NO: 12165 - protein, 1038 aa, Homo sapiens
MANDSPAKSLVDIDLSSLRDPAGIFELVEVVGNGTYGQVYKGRHVKTGQLAAIKVMDVTEDEEEEIKLEINMLKKYSHHRNIATYYGAFIKKSPPGHDDQLWLVMEFCGAGSITDLVKNTKGNTLKEDWIAYISREILRGLAHLHIHHVIHRDIKGQNVLLTENAEVKLDETEYEYSGSEEEEEEVPEQEGEPSSIVNVPGESTLRRDFLRLQQENKERSEALRRQQLLQEQQLREQEEYKRQLLAERQKRIEQQKEQRRRLEEQQRREREARRQQEREQRRREQEEKRRLEELERRRKEEEERRRAEEEKRRVEREQEYIRRQLEEEQRHLEVLQQQLLQEQAMLLECRWREMEEHRQAERLQRQLQQEQAYLLSLQHDHRRPHPQHSQQPPPPQQERSKPSFHAPEPKAHYEPADRAREVPVRTTSRSPVLSRRDSPLQGSGQQNSQAGQRNSTSIEPRLLWERVEKLVPRPGSGSSSGSSNSGSQPGSHPGSQSGSGERFRVRSSSKSEGSPSQRLENAVKKPEDKKEVFRPLKPADLTALAKELRAVEDVRPPHKVTDYSSSSEESGTTDEEDDDVEQEGADESTSGPEDTRAASSLNLSNGETESVKTMIVHDDVESEPAMTPSKEGTLIVRQTQSASSTLQKHKSSSSFTPFIDPRLLQISPSSGTTVTSVVGFSCDGMRPEAIRQDPTRKGSVVNVNPTNTRPQSDTPEIRKYKKRFNSEILCAALWGVNLLVGTESGLMLLDRSGQGKVYPLINRRRFQQMDVLEGLNVLVTISGKKDKLRVYYLSWLRNKILHNDPEVEKKQGWTTVGDLEGCVHYKVVKYERIKFLVIALKSSVEVYAWAPKPYHKFMAFKSFGELVHKPLLVDLTVEEGQRLKVIYGSCAGFHAVDVDSGSVYDIYLPTHIQCSIKPHAIIILPNTDGMELLVCYEDEGVYVNTYGRITKDVVLQWGEMPTSVAYIRSNQTMGWGEKAIEIRSVETGHLDGVFMHKRAQRLKFLCERNDKVFFASVRSGGSSQVYFMTLGRTSLLSW

SEQ ID NO: 12166 - protein, 356 aa, Homo sapiens
MTLLWCVVSLYFYGILQSDASERCDDWGLDTMRQIQVFEDEPARIKCPLFEHFLKFNYSTAHSAGLTLIWYWTRQDRDLEEPINFRLPENRISKEKDVLWFRPTLLNDTGNYTCMLRNTTYCSKVAFPLEVVQKDSCFNSPMKLPVHKLYIEYGIQRITCPNVDGYFPSSVKPTITWYMGCYKIQNFNNVIPEGMNLSFLIALISNNGNYTCVVTYPENGRTFHLTRTLTVKVVGSPKNAVPPVIHSPNDHVVYEKEPGEELLIPCTVYFSFLMDSRNEVWWTIDGKKPDDITIDVTINESISHSRTEDETRTQILSIKKVTSEDLKRSYVCHARSAKGEVAKAAKVKQKGNRCGQ

SEQ ID NO: 12167 - protein, 328 aa, Homo sapiens
MLEKLEFEDEAVEDSESGVYMRFMRSHKCYDIVPTSSKLVVFDTTLQVKKAFFALVANGVRAAPLWESKKQSFVGMLTITDFINILHRYYKSPMVQIYELEEHKIETWRELYLQETFKPLVNISPDASLFDAVYSLIKNKIHRLPVIDPISGNALYILTHKRILKFLQLFMSDMPKPAFMKQNLDELGIGTYHNIAFIHPDTPIIKALNIFVERRISALPVVDESGKVVDIYSKFDVINLAAEKTYNNLDITVTQALQHRSQYFEGVVKCNKLEILETIVDRIVRAEVHRLVVVNEADSIVGIISLSDILQALILTPAGAKQKETETE

SEQ ID NO: 12168 - protein, 53 aa, Homo sapiens
MGLKALCLGLLCVLFVSHFYTPMPDNIEESWKIMALDAIAKTCTFTNRGLLTS

SEQ ID NO: 12169 - protein, 362 aa, Homo sapiens
MAPKPGAEWSTALSHLVLGVVSLHAAVSTAEASRGAAAGFLLQVLAATTTLAPGLSTHEDCLAGAWVATVIGLPLLAFDFHWCTNGHLMCAGCFIHLLADARLKEEQATCPNCRCEISKSLCCRNLAVEKAVSELPSECGFCLRQFPRSLLERHQKEECQDRVTQCKYKRIGCPWHGPFHELTVHEAACAHPTKTGSELMEILDGMDQSHRKEMQLYNSIFSLLSFEKIGYTEVQFRPYRTDDFITRLYYETPRFTVLNQTWVLKARVNDSERNPNLSCKRTLSFQLLLKSKVTAPLECSFLLLKGPYDDVRISPVIYHFVFTNESNETDYVPLPIIDSVECNKLLAAKNINLRLFLFQIQK

SEQ ID NO: 12170 - protein, 636 aa, Homo sapiens
MAAAALGSSSGSASPAVAELCQNTPETFLEASKLLLTYADNILRNPNDEKYRSIRIGNTAFSTRLLPVRGAVECLFEMGFEEGETHLIFPKKASVEQLQKIRDLIAIERSSRLDGSNKSHKVKSSQQPAASTQLPTTPSSNPSGLNQHTRNRQGQSSDPPSASTVAADSAILEVLQSNIQHVLVYENPALQEKALACIPVQELKRKSQEKLSRARKLDKGINISDEDFLLLELLHWFKEEFFHWVNNVLCSKCGGQTRSRDRSLLPSDDELKWGAKEVEDHYCDACQFSNRFPRYNNPEKLLETRCGRCGEWANCFTLCCRAVGFEARYVWDYTELQRTLSLKLTTLKEIGKTFLRISKRQKLIQVVDVTWRYSCKHEEVIARRTKVKEALLRDTINGLNKQRQLFLSENRRKELLQRIIVELVEFISPKTPKPGELGGRISGSVAWRVARGEMGLQRKETLFIPCENEKISKQLHLCYNIVKDRYVRVSNNNQTISGWENGVWKMESIFRKVETDWHMVYLARKEGSSFAYISWKFECGSVGLKVDSISIRTSSQTFQTGTVEWKLRSDTAQVELTGDNSLHSYADFSGATEVILEAELSRGDGDVAWQHTQLFRQSLNDHEENCLEIIIKFSDL

SEQ ID NO: 12171 - protein, 871 aa, Homo sapiens
MSFSEMNRRTLAFRGGGLVTASGGGSTNNNAGGEASAWPPQPQPRQPPPPAPPALQPPNGRGADEEVELEGLEPQDLEASAGPAAGAAEEAKELLLPQDAGGPTSLGGGAGGPLLAERNRRTLAFRGGGGGGLGNNGSSRGRPETSVWPLRHFNGRGPATVDLELDALEGKELMQDGASLSDSTEDEEEGASLGDGSGAEGGSCSSSRRSGGDGGDEVEGSGVGAGEGETVQHFPLARPKSLMQKLQCSFQTSWLKDFPWLRYSKDTGLMSCGWCQKTPADGGSVDLPPVGHDELSRGTRNYKKTLLLRHHVSTEHKLHEANAQESEIPSEEGYCDFNSRPNENSYCYQLLRQLNEQRKKGILCDVSIVVSGKIFKAHKNILVAGSRFFKTLYCFSNKESPNQNNTTHLDIAAVQGFSVILDFLYSGNLVLTSQNAIEVMTVASYLQMSEVVQTCRNFIKDALNISIKSEAPESVVVDYNNRKPVNRDGLSSSRDQKIASFWATRNLTNLASNVKIENDGCNVDEGQIENYQMNDSSWVQDGSPEMAENESEGQTKVFIWNNMGSQGIQETGKTRRKNQTTKRFIYNIPPNNETNLEDCSVMQPPVAYPEENTLLIKEEPDLDGALLSGPDGDRNVNANLLAEAGTSQDGGDAGTSHDFKYGLMPGPSNDFKYGLIPGTSNDFKYGLIPGASNDFKYGLLPESWPKQETWENGESSLIMNKLKCPHCSYVAKYRRTLKRHLLIHTGVRSFSCDICGKLFTRREHVKRHSLVHKKDKKYKCMVCKKIFMLAASVGIRHGSRRYGVCVDCADKSQPGGQEGVDQGQDTEFPRDEEYEENEVGEADEELVDDGEDQNDPSRWDESGEVCMSLDD

SEQ ID NO: 12172 - protein, 161 aa, Homo sapiens
MALQLWALTLLGLLGAGASLRPRKLDFFRSEKELNHLAVDEASGVVYLGAVNALYQLDAKLQLEQQVATGPALDNKKCTPPIEASQCHEAEMTDNVNQLLLLDPPRKRLVECGSLFKGICALRALSNISLRLFYEDGSGEKSFVASNDEGVATVGLVSSTG

SEQ ID NO: 12173 - protein, 163 aa, Homo sapiens
MVGGGGVGGGLLENANPLIYQRSGERPVTAGEEDEQVPDSIDAREIFDLIRSINDPEHPLTLEELNVVEQVRVQVSDPESTVAVAFTPTIPHCSMATLIGLSIKVKLLRSLPQRFKMDVHITPGTHASEHAVNKQLADKERVAAALENTHLLEVVNQCLSARS

SEQ ID NO: 12174 - protein, 161 aa, Homo sapiens
MVPSAGQLALFALGIVLAACQALENSTSPLSDPPVAAAVVSHFNDCPDSHTQFCFHGTCRFLVQEDKPACVCHSGYVGARCEHADLLAVVAASQKKQAITALVVVSIVALAVLIITCVLIHCCQVRKHCEWCRALICRHEKPSALLKGRTACCHSETATLG

SEQ ID NO: 12175 - protein, 269 aa, Homo sapiens
MTCLELERYLQTEPRRISETFGEDLDCFLHASPPPCIEESFRRLDPLLLPVEAAICEKSSAVDILLSRDKLLSETCLSLQPASSSLDSYTAVNQAQLNAVTSLTPPSSPELSRHLVKTSQTLSAVDGTVTLKLVAKKAALSSVKVGGVATAAAAVTAAGAVKSGQSDSDQGGLGAEACPENKKRVHRCQFNGCRKVYTKSSHLKAHQRTHTGEKPYKCSWEGCEWRFARSDELTRHYRKHTGAKPFKCNHCDRCFSRSDHLALHMKRHI

SEQ ID NO: 12176 - protein, 555 aa, Homo sapiens
MDMFPLTWVFLALYFSRHQVRGQPDPPCGGRLNSKDAGYITSPGYPQDYPSHQNCEWIVYAPEPNQKIVLNFNPHFEIEKHDCKYDFIEIRDGDSESADLLGKHCGNIAPPTIISSGSMLYIKFTSDYARQGAGFSLRYEIFKTGSEDCSKNFTSPNGTIESPGFPEKYPHNLDCTFTILAKPKMEIILQFLIFDLEHDPLQVGEGDCKYDWLDIWDGIPHVGPLIGKYCGTKTPSELRSSTGILSLTFHTDMAVAKDGFSARYYLVHQEPLENFQCNVPLGMESGRIANEQISASSTYSDGRWTPQQSRLHGDDNGWTPNLDSNKEYLQVDLRFLTMLTAIATQGAISRETQNGYYVKSYKLEVSTNGEDWMVYRHGKNHKVFQANNDATEVVLNKLHAPLLTRFVRIRPQTWHSGIALRLELFGCRVTDAPCSNMLGMLSGLIADSQISASSTQEYLWSPSAARLVSSRSGWFPRIPQAQPGEEWLQVDLGTPKTVKGVIIQGARGGDSITAVEARAFVRKFKVSYSLNGKDWEYIQDPRTQQPKVGCSWRPL

SEQ ID NO: 12177 - protein, 61 aa, Homo sapiens
MTMRSLLRTPFLCGLLWAFCAPGARAEEPAASFSQPGSMGLDKNTVHDQEHIMEHLEGVIN

SEQ ID NO: 12178 - protein, 461 aa, Homo sapiens
MQSWSRVYCSLAKRGHFNRISHGLQGLSAVPLRTYADQPIDADVTVIGSGPGGYVAAIKAAQLGFKTVCIEKNETLGGTCLNVGCIPSKALLNNSHYYHMAHGKDFASRGIEMSEVRLNLDKMMEQKSTAVKALTGGIAHLFKQNKIDEDTIVSSTGALSLKKVPEKMVVIGAGVIGVELGSVWQRLGADVTAVEFLGHVGGVGIDMEISKNFQRILQKQGFKFKLNTKVTGATKKSDGKIDVSIEAASGGKAEVITCDVLLVCIGRRPFTKNLGLEELGIELDPRGRIPVNTRFQTKIPNIYAIGDVVAGPMLAHKAEDEGIICVEGMAGGAVHIDYNCVPSVIYTHPEVAWVGKSEEQLKEEGIEYKVGKFPFAANSRAKTNADTDGMVKILGQKSTDRVLGAHILGPGAGEMVNEAALALEYGASCEDIARVCHAHPTLSEAFREANLAASFGKSINF

SEQ ID NO: 12179 - protein, 459 aa, Homo sapiens
MRTPQLALLQVFFLVFPDGVRPQPSSSPSGAVPTSLELQRGTDGGTLQSPSEATATRPAVPGLPTVVPTLVTPSAPGNRTVDLFPVLPICVCDLTPGACDINCCCDRDCYLLHPRTVFSFCLPGSVRSSSWVCVDNSVIFRSNSPFPSRVFMDSNGIRQFCVHVNNCFLESKSTTCTRFFKNLASSCTLDSALNAASYYNFTVLKVPRSMTDPQNMEAFQQSTAASLTSPRSGNPGYIVGKPLLALTDDISYSMTLLQSQGNGSCSVKRHEVQFGVNAISGCKLRLKKADCSHLQQEIYQTLHGRPRPEYVAIFGNADPAQKGGWTRILNRHCSISAINCTSCCLIPVSLEIQVLWAYVGLLSNPQAHVSGVRFLYQCQSIQDSQQVTEVSLTTLVNFVDITQKPQPPRGQPKMDWKWPFDFFPFKVAFSRGVFSQKCSVSPILILCLLLLGVLNLETM

SEQ ID NO: 12180 - protein, 219 aa, Homo sapiens
MVTSSFPISVAVFALITLQVGTQDSFIAAVYEHAVILPNKTETPVSQEDALNLMNENIDILETAIKQAAEQGARIIVTPEDALYGWKFTRETVFPYLEDIPDPQVNWIPCQDPHRFGHTPVQARLSCLAKDNSIYVLANLGDKKPCNSRDSTCPPNGYFQYNTNVVYNTEGKLVARYHKYHLYSEPQFNVPEKPELVTFNTAFGRKWYLCTKWSQSVSL

SEQ ID NO: 12181 - protein, 175 aa, Homo sapiens
MAQVLIVGAGMTGSLCAALLRRQTSGPLYLAVWDKAEDSGGRMTTACSPHNPQCTADLGAQYITCTPHYAKKHQRFYDELLAYGVLRPLSSPIEGMVMKEGDCNFVAPQGISSIIKHYLKESGAEVYFRHRVTQINLRDDKWEVSKQTGSPEQFDLIVLTMPVPEILQLQGDITT

SEQ ID NO: 12182 - protein, 2154 aa, Homo sapiens
MPGLDRPLSRQNPHDGVVTPAASPSLPQPGLQMPGQWGPVQGGPQPSGQHRSPCPEGPVPSGVPCATSVPHFPTPSILHQGPGHEQHSPLVAPPAALPSDGRDEVSHLQSGSHLANNSDPESTFRQNPRIVNHWASPELRQNPGVKNEHRPASALVNPLARGDSPENRTHHPLGAGAGSGCAPLEADSGASGALAMFFQGGETENEENLSSEKAGLSGQADFDDFCSSPGLGRPPAPTHVGAGSLCQALLPGPSNEAAGDVWGDTASTGVPDASGSQYENVENLEFVQNQEVLPSEPLNLDPSSPSDQFRYGPLPGPAVPRHGAVCHTGAPDATLHTVHPDSVSSSYSSRSHGRLSGSARPQELVGTFIQQEVGKPEDEASGSFFKQIDSSPVGGETDETTVSQNYRGSVSQPSTPSPPKPTGIFQTSANSSFEPVKSHLVGVKPFEADRANVVGEVRETCVRQKQCRPAAALPDASPGNLEQPPDNMETLCAPQVCPLPLNSTTEAVHMLPHAGAPPLDTVYPAPEKRPSARTQGPVKCESPATTLWAQSELPDFGGNVLLAPAAPALYVCAKPQPPVVQPPEEAMSGQQSRNPSSAAPVQSRGGIGASENLENPPKMGEEEALQSQASSGYASLLSSPPTESLQNPPVLIAQPDHSYNLAQPINFSVSLSNSHEKNQSWREALVGDRPAVSSWALGGDSGENTSLSGIPTSSVLSLSLPSSVAQSNFPQGSGASEMVSNQPANLLVQPPSQPVPENLVPESQKDRKAGSALPGFANSPAGSTSVVLVPPAHGTLVPDGNKANHSSHQEDTYGALDFTLSRTLENPVNVYNPSHSDSLASQQSVASHPRQSGPGAPNLDRFYQQVTKDAQGQPGLERAQQELVPPQQQASPPQLPKAMFSELSNPESLPAQGQAQNSAQSPASLVLVDAGQQLPPRPPQSSSVSLVSSGSGQAAVPSEQPWPQPVPALAPGPPPQDLAAYYYYRPLYDAYQPQYSLPYPPEPGAASLYYQDVYSLYEPRYRPYDGAASAYAQNYRYPEPERPSSRASHSSERPPPRQGYPEGYYSSKSGWSSQSDYYASYYSSQYDYGDPGHWDRYHYSARVRDPRTYDRRYWCDAEYDAYRREHSAFGDRPEKRDNNWRYDPRFTGSFDDDPDPHRDPYGEEVDRRSVHSEHSARSLHSAHSLASRRSSLSSHSHQSQIYRSHNVAAGSYEAPLPPGSFHGDFAYGTYRSNFSSGPGFPEYGYPADTVWPAMEQVSSRPTSPEKFSVPHVCARFGPGGQLIKVIPNLPSEGQPALVEVHSMEALLQHTSEQEEMRAFPGPLAKDDTHKVDVINFAQNKAMKCLQNENLIDKESASLLWNFIVLLCRQNGTVVGTDIAELLLRDHRTVWLPGKSPNEANLIDFTNEAVEQVEEEESGEAQLSFLTGGPAAAASSLERETERFRELLLYGRKKDALESAMKNGLWGHALLLASKMDSRTHARVMTRFANSLPINDPLQTVYQLMSGRMPAASTCCGDEKWGDWRPHLAMVLSNLNNNMDVESRTMATMGDTLASRGLLDAAHFCYLMAQAGFGVYTKKTTKLVLIGSNHSLPFLKFATNEAIQRTEAYEYAQSLGAETCPLPSFQVFKFIYSCRLAEMGLATQAFHYCEAIAKSILTQPHLYSPVLISQLVQMASQLRLFDPQLKEKPEEESLAAPTWLVHLQQVERQIKEGAGVWHQDGALPQQCPGTPSSEMEQLDRPGLSQPGALGIANPLLAVPAPSPEHSSPSVRLLPSAPQTLPDGPLASPARVPMFPVPLPPGPLEPGPGCVTPGPALGFLEPSGPGLPPGVPPLQERRHLLQEARSPDPGIVPQEAPVGNSLSELSEENFDGKFANLTPSRTVPDSEAPPGWDRADSGPTQPPLSLSPAPETKRPGQAAKKETKEPKKGESWFFRWLPGKKKTEAYLPDDKNKSIVWDEKKNQWVNLNEPEEEKKAPPPPPTSMPKTVQAAPPALPGPPGAPVNMYSRRAAGTRARYVDVLNPSGTQRSEPALAPADFVAPLAPLPIPSNLFVPTPDAEEPQLPDGTGREGPAAARGLANPEPAPEPKLSRCSSMSSLSREVSQHFNQAPGDLPAAGGPPSGAMPFYNPAQLAQACATSGSSRLGRIGQRKHLVLN

SEQ ID NO: 12183 - protein, 113 aa, Homo sapiens
MAVLPGPLQLLGVLLTISLSSIRLIQAGAYYGIKPLPPQIPPQMPPQIPQYQPLGQQVPHMPLAKDGLAMGKEMPHLQYGKEYPHLPQYMKEIQPAPRMGKEAVPKKGKEIPL

SEQ ID NO: 12184 - protein, 1990 aa, Homo sapiens
MFRNSLKMLLTGGKSSRKNRSSDGGSEEPPDRRQSSVDSRQSRSGQGGISTESDCAFEPDYAVPPLPVSEGDAEQELGPPPSVDEAANTLMTRLGFLLGEKVTEVQPGDQYSMEVQDENQTSAITQRISPCSTLTSSTASPPASSPCSTLPPISTNATAKDCSYGAVTSPTSTLESRDSGIIATLTSYSENVERTKYAGESSKELGSGGNIKPWQSQKSSMDSCLYRVDENMTASTYSLNKIPERNLETVLSQSVQSIPLYLMPRPNSVAATSSAHLEDLAYLDEQRHTPLRTSLRMPRQSMGGARTQQDLRVRFAPYRPPDISLKPLLFEVPSITTESVFVGRDWVFHEIDAQLQSSNASVNQGVVIVGNIGFGKTAIISRLVALSCHGTRMRQIASDSPHASPKHVDANRELPLTQPPSAHSSITSGSCPGTPEMRRRQEEAMRRLASQVVAYHYCQADNAYTCLVPEFVHNVAALLCRSPQLTAYREQLLREPHLQSMLSLRSCVQDPMASFRRGVLEPLENLHKERKIPDEDFIILIDGLNEAEFHKPDYGDTIVSFLSKMIGKFPSWLKLIVTVRTSLQEITKLLPFHRIFLDRLEENEAIDQDLQAYILHRIHSSSEIQNNISLNGKMDNTTFGKLSSHLKTLSQGSYLYLKLTFDLIEKGYLVLKSSSYKVVPVSLSEVYLLQCNMKFPTQSSFDRVMPLLNVAVASLHPLTDEHIFQAINAGSIEGTLEWEDFQQRMENLSMFLIKRRDMTRMFVHPSFREWLIWREEGEKTKFLCDPRSGHTLLAFWFSRQEGKLNRQQTIELGHHILKAHIFKGLSKKVGVSSSILQGLWISYSTEGLSMALASLRNLYTPNIKVSRLLILGGANINYRTEVLNNAPILCVQSHLGYTEMVALLLEFGANVDASSESGLTPLGYAAAAGYLSIVVLLCKKRAKVDHLDKNGQCALVHAALRGHLEVVKFLIQCDWTMAGQQQGVFKKSHAIQQALIAAASMGYTEIVSYLLDLPEKDEEEVERAQINSFDSLWGETALTAAAGRGKLEVCRLLLEQGAAVAQPNRRGAVPLFSTVRQGHWQIVDLLLTHGADVNMADKQGRTPLMMAASEGHLGTVDFLLAQGASIALMDKEGLTALSWACLKGHLSVVRSLVDNGAATDHADKNGRTPLDLAAFYGDAEVVQFLVDHGAMIEHVDYSGMRPLDRAVGCRNTSVVVTLLKKGAKIGPATWAMATSKPDIMIILLSKLMEEGDMFYKKGKVKEAAQRYQYALKKFPREGFGEDLKTFRELKVSLLLNLSRCRRKMNDFGMAEEFATKALELKPKSYEAYYARARAKRSSRQFAAALEDLNEAIKLCPNNREIQRLLLRVEEECRQMQQPQQPPPPPQPQQQLPEEAEPEPQHEDIYSVQDIFEEEYLEQDVENVSIGLQTEARPSQGLPVIQSPPSSPPHRDSAYISSSPLGSHQVFDFRSSSSVGSPTRQTYQSTSPALSPTHQNSHYRPSPPHTSPAHQGGSYRFSPPPVGGQGKEYPSPPPSPLRRGPQYRASPPAESMSVYRSQSGSPVRYQQETSVSQLPGRPKSPLSKMAQRPYQMPQLPVAVPQQGLRLQPAKAQIVRSNQPSPAVHSSTVIPTGAYGQVAHSMASKYQSSQGDIGVSQSRLVYQGSIGGIVGDGRPVQHVQASLSAGAICQHGGLTKEDLPQRPSSAYRGGVRYSQTPQIGRSQSASYYPVCHSKLDLERSSSQLGSPDVSHLIRRPISVNPNEIKPHPPTPRPLLHSQSVGLRFSPSSNSISSTSNLTPTFRPSSSIQQMEIPLKPAYERSCDELSPVSPTQGGYPSEPTRSRTTPFMGIIDKTARTQQYPHLHQQNRTWAVSSVDTVLSPTSPGNLPQPESFSPPSSISNIAFYNKTNNAQNGHLLEDDYYSPHGMLANGSRGDLLERVSQASSYPDVKVARTLPVAQAYQDNLYRQLSRDSRQGQTSPIKPKRPFVESNV

SEQ ID NO: 12185 - protein, 172 aa, Homo sapiens
MWSLLLCGLSIALPLSVTADGCKDIFMKNEILSASQPFAFNCTFPPITSGEVSVTWYKNSSKIPVSKIIQSRIHQDETWILFLPMEWGDSGVYQCVIKGRDSCHRIHVNLTVFEKHWCDTSIGGLPNLSDEYKQILHLGKDDSLTCHLHFPKSCVLGPIKWYKDCNEIKGER

SEQ ID NO: 12186 - protein, 505 aa, Homo sapiens
MGRVVAELVSSLLGLWLLLCSCGCPEGAELRAPPDKIAIIGAGIGGTSAAYYLRQKFGKDVKIDLFEREEVGGRLATMMVQGQEYEAGGSVIHPLNLHMKRFVKDLGLSAVQASGGLLGIYNGETLVFEESNWFIINVIKLVWRYGFQSLRMHMWVEDVLDKFMRIYRYQSHDYAFSSVEKLLHALGGDDFLGMLNRTLLETLQKAGFSEKFLNEMIAPVMRVNYGQSTDINAFVGAVSLSCSDSGLWAVEGGNKLVCSGLLQASKSNLISGSVMYIEEKTKTKYTGNPTKMYEVVYQIGTETRSDFYDIVLVATPLNRKMSNITFLNFDPPIEEFHQYYQHIVTTLVKGELNTSIFSSRPIDKFGLNTVLTTDNSDLFINSIGIVPSVREKEDPEPSTDGTYVWKIFSQETLTKAQILKLFLSYDYAVKKPWLAYPHYKPPEKCPSIILHDRLYYLNGIECAASAMEMSAIAAHNAALLAYHRWNGHTDMIDQDGLYEKLKTEL

SEQ ID NO: 12187 - protein, 1319 aa, Homo sapiens
MAGLRGNAVAGLLWMLLLWSGGGGCQAQRAGCKSVHYDLVFLLDTSSSVGKEDFEKVRQWVANLVDTFEVGPDRTRVGVVRYSDRPTTAFELGLFGSQEEVKAAARRLAYHGGNTNTGDALRYITARSFSPHAGGRPRDRAYKQVAILLTDGRSQDLVLDAAAAAHRAGIRIFAVGVGEALKEELEEIASEPKSAHVFHVSDFNAIDKIRGKLRRRLCENVLCPSVRVEGDRFKHTNGGTKEITGFDLMDLFSVKEILGKRENGAQSSYVRMGSFPVVQSTEDVFPQGLPDEYAFVTTFRFRKTSRKEDWYIWQVIDQYSIPQVSIRLDGENKAVEYNAVAGPQGEKGDVGPAGPPGVPGSVVQQEGLKGEQGAPGPRGHQGAPGPPGARGPIGPEGRDGPPGLQGLRGKKGDMGPPGIPGLLGLQGPPGPPGVPGPPGPGGSPGLPGEIGFPGKPGPPGPTGPPGKDGPNGPPGPPGTKGEPGERGEDGLPGKPGLRGEIGEQGLAGRPGEKGEAGLPGAPGFPGVRGEKGDQGEKGELGLPGLKGDRGEKGEAGPAGPPGLPGTTSLFTPHPRMPGEQGPKGEKGDPGLPGEPGLQGRPGELGPQGPTGPPGAKGQEGAHGAPGAAGNPGAPGHVGAPGPSGPPGSVGAPGLRGTPGKDGERGEKGAAGEEGSPGPVGPRGDPGAPGLPGPPGKGKDGEPGLRGSPGLPGPLGTKGDRGAPGIPGSPGSRGDPGIGVAGPPGPSGPPGDKGSPGSRGLPGFPGPQGPAGRDGAPGNPGERGPPGKPGLSSLLSPGDINLLAKDVCNDCPPGPPGLPGLPGFKGDKGVPGKPGREGTEGKKGEAGPPGLPGPPGIAGPQGSQGERGADGEVGQKGDQGHPGVPGFMGPPGNPGPPGADGIAGAAGPPGIQGSPGKEGPPGPQGPSGLPGIPGEEGKEGRDGKPGPPGEPGKAGEPGLPGPEGARGPPGFKGHTGDSGAPGPRGESGAMGLPGQEGLPGKDGDTGPTGPQGPQGPRGPPGKNGSPGSPGEPGPSGTPGQKGSKGENGSPGLPGFLGPRGPPGEPGEKGVPGKEGVPGKPGEPGFKGERGDPGIKGDKGPPGGKGQPGDPGIPGHKGHTGLMGPQGLPGENGPVGPPGPPGQPGFPGLRGESPSMETLRRLIQEELGKQLETRLAYLLAQMPPAYMKSSQGRPGPPGPPGKDGLPGRAGPMGEPGRPGQGGLEGPSGPIGPKGERGAKGDPGAPGVGLRGEMGPPGIPGQPGEPGYAKDGLPGIPGPQGETGPAGHPGLPGPPGPPGQCDPSQCAYFASLAARPGNVKGP

SEQ ID NO: 12188 - protein, 180 aa, Homo sapiens; identical to SEQ ID NO: 9636

SEQ ID NO: 12189 - protein, 74 aa, Homo sapiens
MVSQALRLLCLLLGLQGCLAAGGSPRRPAPAPARQRVPGGAAAGLPGEGVQGGAVLLRGGPGDLQGRGEDVVSG

SEQ ID NO: 12190 - protein, 529 aa, Homo sapiens
MTLKWTSVLLLIHLSCYFSSGSCGKVLVWAAEYSHWMNMKTILKELVQRGHEVTVLASSASILFDPNDASTLKFEVYPTSLTKTEFENIIMQQVKRWSDIRKDSFWLYFSQEQEILWELYDIFRNFCKDVVSNKKVMKKLQESRFDIVFADAVFPCGELLAALLNIRFVYSLRFTPGYTIERHSGGLIFPPSYIPIVMSKLSDQMTFMERVKNMIYVLYFDFWFQMSDMKKWDQFYSEVLGRPTTLFETMGKADIWLMRNSWSFQFPHPFLPNVDFVGGFHCKPAKPLPKEMEEFVQSSGENGVVVFSLGSVISNMTAERANVIATALAKIPQKVLWRFDGNKPDALGLNTRLYKWIPQNDLLGHPKTRAFITHGGANGIYEAIYHGIPMVGIPLFFDQPDNIAHMKAKGAAVRLDFNTMSSTDLLNALKTVINDPLYKENIMKLSRIQHDQPVKPLDRAVFWIEFVMPHKGAKHLRVAAHDLTWFQYHSLDVIGFLLACVATVIFIITKFCLFCFWKFARKGKKGKRD

SEQ ID NO: 12191 - protein, 341 aa, Homo sapiens
MTMESGAENQQSGDAAVTEAENQQMTVQAQPQIATLAQVSMPAAHATSSAPTVTLVQLPNGQTVQVHGVIQAAQPSVIQSPQVQTVQSSCKDLKRLFSGTQISTIAESEDSQESVDSVTDSQKRREILSRRPSYRKILNDLSSDAPGVPRIEEEKSEEETSAPAITTVTVPTPIYQTSSGQYIAITQGGAIQLANNGTDGVQGLQTLTMTNAAATQPGTTILQYAQTTDGQQILVPSNQVVVQAASGDVQTYQIRTAPTSTIAPGVVMASSPALPTQPAEEAARKREVRLMKNREAARECRRKKKEYVKCLENRVAVLENQNKTLIEELKALKDLYCHKSD

SEQ ID NO: 12192 - protein, 810 aa, Homo sapiens
MNKVEQKSQESVSFKDVTVGFTQEEWQHLDPSQRALYRDVMLENYSNLVSVGYCVHKPEVIFRLQQGEEPWKQEEEFPSQSFPVWTADHLKERSQENQSKHLWEVVFINNEMLTKEQGDVIGIPFNVDVSSFPSRKMFCQCDSCGMSFNTVSELVISKINYLGKKSDEFNACGKLLLNIKHDETHTQEKNEVLKNRNTLSHHEETLQHEKIQTLEHNFEYSICQETLLEKAVFNTQKRENAEENNCDYNEFGRTLCDSSSLLFHQISPSRDNHYEFSDCEKFLCVKSTLSKPHGVSMKHYDCGESGNNFRRKLCLSHLQKGDKGEKHFECNECGKAFWEKSHLTRHQRVHTGQKPFQCNECEKAFWDKSNLTKHQRSHTGEKPFECNECGKAFSHKSALTLHQRTHTGEKPYQCNACGKTFCQKSDLTKHQRTHTGLKPYECYECGKSFRVTSHLKVHQRTHTGEKPFECLECGKSFSEKSNLTQHQRIHIGDKSYECNACGKTFYHKSLLTRHQIIHTGWKPYECYECGKTFCLKSDLTVHQRTHTGQKPFACPECGKFFSHKSTLSQHYRTHTGEKPYECHECGKIFYNKSYLTKHNRTHTGEKPYECNECGKAFYQKSQLTQHQRIHIGEKPYKCNECGKAFCHKSALIVHQRTHTQEKPYKCNECGKSFCVKSGLIFHERKHTGEKPYECNECGKFFRHKSSLTVHHRAHTGEKSCQCNECGKIFYRKSELAQHQRSHTGEKPYECNTCRKTFSQKSNLIVHQRRHIGENLMNEMDIRNFQPQVSLHNASEYSHCGESPDDILNVQ

SEQ ID NO: 12193 - protein, 61 aa, Homo sapiens
MKTGPFAEHSNQLWNISAVPSWSKVNQGLIRMYKAECLEKFPVIQHFKFGSLLPIHPVTSG

SEQ ID NO: 12194 - protein, 400 aa, Homo sapiens
MSDGFDRAPEQTRPLRAPPSSQDKIPQQNSESAMAKPQVVVAPVLMSKLSVNAPEFYPSGYSSSYTESYEDGCEDYPTLSEYVQDFLNHLTEQPGSFETEIEQFAETLNGCVTTDDALQELVELIYQQATSIPNFSYMGARLCNYLSHHLTISPQSGNFRQLLLQRCRTEYEVKDQAAKGDEVTRKRFHAFVLFLGELYLNLEIKGTNGQVTRADILQVGLRELLNALFSNPMDDNLICAVKLLKLTGSVLEDAWKEKGKMDMEEIIQRIENVVLDANCSRDVKQMLLKLVELRSSNWGRVHATSTYREATPENDPNYFMNEPTFYTSDGVPFTAADPDYQEKYQELLEREDFFPDYEENGTDLSGAGDPYLDDIDDEMDPEIEEAYEKFCLESERKRKQ

SEQ ID NO: 12195 - protein, 746 aa, Homo sapiens
MAAADGSLFDNPRTFSRRPPAQASRQAKATKRKYQASSEAPPAKRRNETSFLPAKKTSVKETQRTFKGNAQKMFSPKKHSVSTSDRNQEERQCIKTSSLFKNNPDIPELHRPVVKQVQEKVFTSAAFHELGLHPHLISTINTVLKMSSMTSVQKQSIPVLLEGRDALVRSQTGSGKTLAYCIPVVQSLQAMESKIQRSDGPYALVLVPTRELALQSFDTVQKLLKPFTWIVPGVLMGGEKRKSEKARLRKGINILISTPGRLVDHIKSTKNIHFSRLRWLVFDEADRILDLGFEKDITVILNAVNAECQKRQNVLLSATLTEGVTRLADISLHDPVSISVLDKSHDQLNPKDKAVQEVCPPPAGDKLDSFAIPESLKQHVTVVPSKLRLVCLAAFILQKCKFEEDQKMVVFFSSCELVEFHYSLFLQTLLSSSGAPASGQLPSASMRLKFLRLHGGMEQEERTAVFQEFSHSRRGVLLCTDVAARGLDLPQVTWIVQYNAPSSPAEYIHRIGRTARIGCHGSSLLILAPSEAEYVNSLASHKINVSEIKMEDILCVLTRDDCFKGKRWGAQKSHAVGPQEIRERATVLQTVFEDYVHSSERRVSWAKKALQSFIQAYATYPRELKHIFHVRSLHLGHVAKSFGLRDAPRNLSALTRKKRKAHVKRPDLHKKTQSKHSLAEILRSEYSSGMEADIAKVKKQNAPGEPGGRPLQHSLQPTPCFGRGKTLKWRKTQKGVQRDSKTSQKV

SEQ ID NO: 12196 - protein, 627 aa, Homo sapiens
MAFGGGLELALGCHYRIAHAEAQVGLPEVTLGLLPGARGTQLLPRLTGVPAALDLITSGRRILADEALKLGILDKVVNSDPVEEAIRFAQRVSDQPLESRRLCNKPIQSLPNMDSIFSEALLKMRRQHPGCLAQEACVRAVQAAVQYPYEVGIKKEEELFLYLLQSGQARALQYAFFAERKANKWSTPSGASWKTASARPVSSVGVVGLGTMGRGIVISFARARIPVIAVDSDKNQLATANKMITSVLEKEASKMQQSGHPWSGPKPRLTSSVKELGGVDLVIEAVFEEMSLKKQVFAELSAVCKPEAFLCTNTSALDVDEIASSTDRPHLVIGTHFFSPAHVMKLLEVIPSQYSSPTTIATVMNLSKKIKKIGVVVGNCFGFVGNRMLNPYYNQAYFLLEEGSKPEEVDQVLEEFGFKMGPFRVSDLAGLDVGWKSRKGQGLTGPTLLPGTPARKRGNRRYCPIPDVLCELGRFGQKTGKGWYQYDKPLGRIHKPDPWLSKFLSRYRKTHHIEPRTISQDEILERCLYSLINEAFRILGEGIAASPEHIDVVYLHGYGWPRHKGGPMFYASTVGLPTVLEKLQKYYRQNPDIPQLEPSDYLKKLASQGNPPLKEWQSLAGSPSSKL

SEQ ID NO: 12197 - protein, 70 aa, Homo sapiens
MSPAFRAMDVEPRAKGVLLEPFVHQVGGHSCVLRFNETTLCKPLVPREHQFYETLPAEMRKFTPQYKGVS

SEQ ID NO: 12198 - protein, 229 aa, Homo sapiens
MRLPRRAALGLLPLLLLLPPAPEAAKKPTPCHRCRGLVDKFNQGMVDTAKKNFGGGNTAWEEKTLSKYESSEIRLLEILEGLCESSDFECNQMLEAQEEHLEAWWLQLKSEYPDLFEWFCVKTLKVCCSPGTYGPDCLACQGGSQRPCSGNGHCSGDGSRQGDGSCRCHMGYQGPLCTDCMDGYFSSLRNETHSICTACDESCKTCSGLTNRDCGECEVGWVLDEGACV

SEQ ID NO: 12199 - protein, 682 aa, Homo sapiens
MSRIKSTLNSVSKAVFGNQNEMISRLAQFKPSSQILRKVSDSGWLKQKNIKQAIKSLKKYSDKSAEKSPFPEEKSHIIDKEEDIGKRSLFHYTSSITTKFGDSFYFLSNHINSYFKRKEKMSQQKENEHFRDKSELEDKKVEEGKLRSPDPGILAYKPGSESVHTVDKPTSPSAIPDVLQVSTKQSIANFLSRPTEGVQALVGGYIGGLVPKLKYDSKSQSEEQEEPAKTDQAVSKDRNAEEKKRLSLQREKIIARVSIDNRTRALVQALRRTTDPKLCITRVEELTFHLLEFPEGKGVAVKERIIPYLLRLRQIKDETLQAAVREILALIGYVDPVKGRGIRILSIDGGGTRGVVALQTLRKLVELTQKPVHQLFDYICGVSTGAILAFMLGLFHMPLDECEELYRKLGSDVFSQNVIVGTVKMSWSHAFYDSQTWENILKDRMGSALMIETARNPTCPKVAAVSTIVNRGITPKAFVFRNYGHFPGINSHYLGGCQYKMWQAIRASSAAPGYFAEYALGNDLHQDGGLLLNNPSALAMHECKCLWPDVPLECIVSLGTGRYESDVRNTVTYTSLKTKLSNVINSATDTEEVHIMLDGLLPPDTYFRFNPVMCENIPLDESRNEKLDQLQLEGLKYIERNEQKMKKVAKILSQEKTTLQKINDWIKLKTDMYEGLPFFSKL

SEQ ID NO: 12200 - protein, 234 aa, Homo sapiens
MGAPAASLLLLLLLFACCWAPGGANLSQDDSQPWTSDETVVAGGTVVLKCQVKDHEDSSLQWSNPAQQTLYFGEKRALRDNRIQLVTSTPHELSISISNVALADEGEYTCSIFTMPVRTAKSLVTVLGIPQKPIITGYKSSLREKDTATLNCQSSGSKPAARLTWRKGDQELHGEPTRIQEDPNDTPTAMIRPDPPHPREGQKLLLHCEGRGNPVPQQYLWEKEGSVPPLKMTQ

SEQ ID NO: 12201 - protein, 156 aa, Homo sapiens
MKSLSLLLAVALGLATAVSAGPAVIECWFVEDASGKGLAKRPGALLLRQGPGEPPPRPDLDPELYLSVHDPAGALQAAFRRYPRGAPAPHCEMSRFVPLPASAKWASGLTPAQNCPRALDGAWLMVSISSMGHAMPVEFTIPACLPRGAALRSPWR

SEQ ID NO: 12202 - protein, 41 aa, Homo sapiens
MRMSVGLSLLLPLSGRTFLLLLSVVMAQSHWPSEPSEAVRD

SEQ ID NO: 12203 - protein, 242 aa, Homo sapiens
MAETEALSKLREDFRMQNKSVFILGASGETGRVLLKEILEQGLFSKVTLIGRRKLTFDEEAYKNVNQEVVDFEKLDDYASAFQGHDVGFCCLGTTRGKAGAEGFVRVDRDYVLKSAELAKAGGCKHFNLLSSKGADKSSNFLYLQVKGEVEAKVEELKFDRYSVFRPGVLLCDRQESRPGEWLVRKFFGSLPDSWASGHSVPVVTVVRAMLNNVVRPRDKQMELLENKAIHDLGKAHGSLKP

SEQ ID NO: 12204 - protein, 363 aa, Homo sapiens
MAAGTAVGAWVLVLSLWGAVVGAQNITARIGEPLVLKCKGAPKKPPQRLEWKLNTGRTEAWKVLSPQGGGPWDSVARVLPNGSLFLPAVGIQDEGIFRCQAMNRNGKETKSNYRVRVYQIPGKPEIVDSASELTAGVPNKVVEESRRSRKRPCEQEVGTCVSEGSYPAGTLSWHLDGKPLVPNEKGVSVKEQTRRHPETGLFTLQSELMVTPARGGDPRPTFSCSFSPGLPRHRALRTAPIQPRVWEPVPLEEVQLVVEPEGGAVAPGGTVTLTCEVPAQPSPQIHWMKDGVPLPLPPSPVLILPEIGPQDQGTYSCVATHSSHGPQESRAVSISIIEPGEEGPTAGEGFDKVREAEDSPQHM

SEQ ID NO: 12205 - protein, 639 aa, Homo sapiens
MEIIRSNFKSNLHKVYQAIEEADFFAIDGEFSGISDGPSVSALTNGFDTPEERYQKLKKHSMDFLLFQFGLCTFKYDYTDSKYITKSFNFYVFPKPFNRSSPDVKFVCQSSSIDFLASQGFDFNKVFRNGIPYLNQEEERQLREQYDEKRSQANGAGALSYVSPNTSKCPVTIPEDQKKFIDQVVEKIEDLLQSEENKNLDLEPCTGFQRKLIYQTLSWKYPKGIHVETLETEKKERYIVISKVDEEERKRREQQKHAKEQEELNDAVGFSRVIHAIANSGKLVIGHNMLLDVMHTVHQFYCPLPADLSEFKEMTTCVFPRLLDTKLMASTQPFKDIINNTSLAELEKRLKETPFNPPKVESAEGFPSYDTASEQLHEAGYDAYITGLCFISMANYLGSFLSPPKIHVSARSKLIEPFFNKLFLMRVMDIPYLNLEGPDLQPKRDHVLHVTFPKEWKTSDLYQLFSAFGNIQISWIDDTSAFVSLSQPEQVKIAVNTSKYAESYRIQTYAEYMGRKQEEKQIKRKWTEDSWKEADSKRLNPQCIPYTLQNHYYRNNSFTAPSTVGKRNLSPSQEEAGLEDGVSGEISDTELEQTDSCAEPLSEGRKKAKKLKRMKKELSPAGSISKNSPATLFEVPDTW

SEQ ID NO: 12206 - protein, 1061 aa, Homo sapiens
MPNEGIPHSSQTQEQDCLQSQPVSNNEEMAIKQESGGDGEVEEYLSFRSVGDGLSTSAVGCASAAPRRGPALLHIDRHQIQAVEPSAQALELQGLGVDVYDQDVLEQGVLQQVDNAIHEASRASQLVDVEKEYRSVLDDLTSCTTSLRQINKIIEQLSPQAATSRDINRKLDSVKRQKYNKEQQLKKITAKQKHLQAILGGAEVKIELDHASLEEDAEPGPSSLGSMLMPVQETAWEELIRTGQMTPFGTQIPQKQEKKPRKIMLNEASGFEKYLADQAKLSFERKKQGCNKRAARKAPAPVTPPAPVQNKNKPNKKARVLSKKEERLKKHIKKLQKRALQFQGKVGLPKARRPWESDMRPEAEGDSEGEESEYFPTEEEEEEEDDEVEGAEADLSGDGTDYELKPLPKGGKRQKKVPVQEIDDDFFPSSGEEAEAASVGEGGGGGRKVGRYRDDGDEDYYKQRLSPKMPRTLSLHEITDLLETDDSIEASAIVIQPPENATAPVSDEESGDEEGGTINNLPGSLLHTAAYLIQDGSDAESDSDDPSYAPKDDSPDEVPSTFTVQQPPPSRRRKMTKILCKWKKADLTVQPVAGRVTAPPNDFFTVMRTPTEILELFLDDEVIELIVKYSNLYACSKGVHLGLTSSEFKCFLGIIFLSGYVSVPRRRMFWEQRTDVHNVLVSAAMRRDRFETIFSNLHVADNANLDPVDKFSKLRPLISKLNERCMKFVPNETYFSFDEFMVPYFGRHGCKQFIRGKPIRFGYKFWCGATCLGYICWFQPYQGKNPNTKHEEYGVGASLVLQFSEALTEAHPGQYHFVFNNFFTSIALLDKLSSMGHQATGTVRKDHIDRVPLESDVALKKKERGTFDYRIDGKGNIVCRWNDNSVVTVASSGAGIHPLCLVSRYSQKLKKKIQVQQPNMIKVYNQFMGGVDRADENIDKYRASIRGKKWYSSPLLFCFELVLQNAWQLHKTYDEKPVDFLEFRRRVVCHYLETHGHPPEPGQKGRPQKRNIDSRYDGINHVIVKQGKQTRCAECHKNTTFRCEKCDVALHVKCSVEYHTE

SEQ ID NO: 12207 - protein, 426 aa, Homo sapiens
MSNSVPLLCFWSLCYCFAAGSPVPFGPEGRLEDKLHKPKATQTEVKPSVRFNLRTSKDPEHEGCYLSVGHSQPLEDCSFNMTAKTFFIIHGWTMSGIFENWLHKLVSALHTREKDANVVVVDWLPLAHQLYTDAVNNTRVVGHSIARMLDWLQEKDDFSLGNVHLIGYSLGAHVAGYAGNFVKGTVGRITAITEVVKCEHERAVHLFVDSLVNQDKPSFAFQCTDSNRFKKGICLSCRKNRCNSIGYNAKKMRNKRNSKMYLKTRAGMPFRVYHYQMKIHVFSYKNMGEIEPTFYVTLYGTNADSQTLPLEIVERIEQNATNTFLVYTEEDLGDLLKIQLTWEGASQSWYNLWKEFRSYLSQPRNPGRELNIRRIRVKSGETQRKLTFCTEDPENTSISPGRELWFRKCRDGWRMKNETSPTVELP

SEQ ID NO: 12208 - protein, 147 aa, Homo sapiens
MPGFLVRILPLLLVLLLLGPTRGLRSRFLPWAFHLPRQAPKSQLPLHKRGTKTAPNEHASSNRSGRRRRRQQWNATQRMFEIDYSRDSFLKDGQPFRYISGSIHYSRVPRFYWKDRLLKMKMAGLNAIQTYVPWNFHEPWPGQYQFS

SEQ ID NO: 12209 - protein, 246 aa, Homo sapiens
MPRSCCSRSGALLLALLLQASMEVRGWCLESSQCQDLTTESNLLECIRACKPDLSAETPMFPGNGDEQPLTENPRKYVMGHFRWDRFGRRNSSSSGSSGAGQKREDVSAGEDCGPLPEGGPEPRSDGAKPGPREGKRSYSMEHFRWGKPVGKKRRPVKVYPNGAEDESAEAFPLEFKRELTGQRLREGDGPDGPADDGAGAQADLEHSLLVAAEKKDEGPYRMEHFRWGSPPKDKRYGGFMTSEKS

SEQ ID NO: 12210 - protein, 318 aa, Homo sapiens
MDTGVIEGGLNVTLTIRLLMHGKEVGSIIGKKGESVKKMREESGARINISEGNCPERIITLAGPTNAIFKAFAMIIDKLEEDISSSMTNSTAASRPPVTLRLVVPASQCGSLIGKGGCKIKEIRESTGAQVQVAGDMLPNSTERAITIAGIPQSIIECVKQICVVMLESPPKGVTIPYRPKPSSSPVIFAGGQAYTIQGQYAIPQPDLTKLHQLAMQQSHFPMTHGNTGFSAGLDASAQTTSHELTIPNDLIGCIIGRQGAKINEIRQMSGAQIKIANPVEGSTDRQVTITGSAASISLAQYLINVRLSSETGGMGSS

SEQ ID NO: 12211 - protein, 332 aa, Homo sapiens
MWPLWLCWALWVLPLAGPGAALTEEQLLGSLLRQLQLSEVPVLDRADMEKLVIPAHVRAQYVVLLRRSHGDRSRGKRFSQSFREVAGRFLASEAALHRHGRLSPRSAQARVTVEWLRVRDDGSNRTSLIDSRLVSVHESGWKAFDVTEAVNFWQQLSRPRQPLLLQVSVQREHLGPLASGAHKLVRFASQGAPAGLGEPQLELHTLDLRDYGAQGDCDPEAPMTEGTRCCRQEMYIDLQGMKWAKNWVLEPPGFLAYECVGTCQQPPEALAFNWPFLGPRQCIASETASLPMIVSIKEGGRTRPQVVSLPNMRVQKCSCASDGALVPRRLQP

SEQ ID NO: 12212 - protein, 1428 aa, Homo sapiens
MQGPPLLTAAHLLCVCTAALAVAPGPRFLVTAPGIIRPGGNVTIGVELLEHCPSQVTVKAELLKTASNLTVSVLEAEGVFEKGSFKTLTLPSLPLNSADEIYELRVTGRTQDEILFSNSTRLSFETKRISVFIQTDKALYKPKQEVKFRIVTLFSDFKPYKTSLNILIKDPKSNLIQQWLSQQSDLGVISKTFQLSSHPILGDWSIQVQVNDQTYYQSFQVSEYVLPKFEVTLQTPLYCSMNSKHLNGTITAKYTYGKPVKGDVTLTFLPLSFWGKKKNITKTFKINGSANFSFNDEEMKNVMDSSNGLSEYLDLSSPGPVEILTTVTESVTGISRNVSTNVFFKQHDYIIEFFDYTTVLKPSLNFTATVKVTRADGNQLTLEERRNNVVITVTQRNYTEYWSGSNSGNQKMEAVQKINYTVPQSGTFKIEFPILEDSSELQLKAYFLGSKSSMAVHSLFKSPSKTYIQLKTRDENIKVGSPFELVVSGNKRLKELSYMVVSRGQLVAVGKQNSTMFSLTPENSWTPKACVIVYYIEDDGEIISDVLKIPVQLVFKNKIKLYWSKVKAEPSEKVSLRISVTQPDSIVGIVAVDKSVNLMNASNDITMENVVHELELYNTGYYLGMFMNSFAVFQECGLWVLTDANLTKDYIDGVYDNAEYAERFMEENEGHIVDIHDFSLGSSPHVRKHFPETWIWLDTNMGYRIYQEFEVTVPDSITSWVATGFVISEDLGLGLTTTPVELQAFQPFFIFLNLPYSVIRGEEFALEITIFNYLKDATEVKVIIEKSDKFDILMTSNEINATGHQQTLLVPSEDGATVLFPIRPTHLGEIPITVTALSPTASDAVTQMILVKAEGIEKSYSQSILLDLTDNRLQSTLKTLSFSFPPNTVTGSERVQITAIGDVLGPSINGLASLIRMPYGCGEQNMINFAPNIYILDYLTKKKQLTDNLKEKALSFMRQGYQRELLYQREDGSFSAFGNYDPSGSTWLSAFVLRCFLEADPYIDIDQNVLHRTYTWLKGHQKSNGEFWDPGRVIHSELQGGNKSPVTLTAYIVTSLLGYRKYQPNIDVQESIHFLESEFSRGISDNYTLALITYALSSVGSPKAKEALNMLTWRAEQEGGMQFWVSSESKLSDSWQPRSLDIEVAAYALLSHFLQFQTSEGIPIMRWLSRQRNSLGGFASTQDTTVALKALSEFAALMNTERTNIQVTVTGPSSPSPLAVVQPTAVNISANGFGFAICQLNVVYNVKASGSSRRRRSIQNQEAFDLDVAVKENKDDLNHVDLNVCTSFSGPGRSGMALMEVNLLSGFMVPSEAISLSETVKKVEYDHGKLNLYLDSVNETQFCVNIPAVRNFKVSNTQDASVSIVDYYEPRRQAVRSYNSEVKLSSCDLCSDVQGCRPCEDGASGSHHHSSVIFIFCFKLLYFMELWL

SEQ ID NO: 12213 - protein, 256 aa, Homo sapiens
MAAPVPWACCAVLAAAAAVVYAQRHSPQEAPHVQYERLGSDVTLPCGTANWDAAVTWRVNGTDLAPDLLNGSQLVLHGLELGHSGLYACFHRDSWHLRHQVLLHVGLPPREPVLSCRSNTYPKGFYCSWHLPTPTYIPNTFNVTVLHGSKIMVCEKDPALKNRCHIRYMHLFSTIKYKVSISVSNALGHNATAITFDEFTIVKPDPPENVVARPVPSNPRRLEVTWQTPSTWPDPESFPLKFFLRYRPLILDQWQH

SEQ ID NO: 12214 - protein, 533 aa, Homo sapiens
MGSSRLAALLLPLLLIVIDLSDSAGIGFRHLPHWNTRCPLASHTDDSFTGSSAYIPCRTWWALFSTKPWCVRVWHCSRCLCQHLLSGGSGLQRGLFHLLVQKSKKSSTFKFYRRHKMPAPAQRKLLPRRHLSEKSHHISIPSPDISHKGLRSKRTQPSDPETWESLPRLDSQRHGGPEFSFDLLPEARAIRVTISSGPEVSVRLCHQWALECEELSSPYDVQKIVSGGHTVELPYEFLLPCLCIEASYLQEDTVRRKKCPFQSWPEAYGSDFWKSVHFTDYSQHTQMVMALTLRCPLKLEAALCQRHDWHTLCKDLPNATARESDGWYVLEKVDLHPQLCFKFSFGNSSHVECPHQTGSLTSWNVSMDTQAQQLILHFSSRMHATFSAAWSLPGLGQDTLVPPVYTVSQARGSSPVSLDLIIPFLRPGCCVLLHASLSSPGGEDAWLIGVGGSVPSGVAVRCPVCLEAPLVSGCLLQTPGALDPGTAGPPHPTGCCSGPHLPAPTVRPGPSAASAPPARGGLGGAAAPGGSAG

SEQ ID NO: 12215 - protein, 269 aa, Homo sapiens
MRLLAWLIFLANWGGARAEPEEAQGPCAQEKGKGPPPTSILASLAPGLEAGKFWHIADLHLDPDYKVSKDPFQVCPSAGSQPVPDAGPWGDYLCDSPWALINSSIYAMKEIEPEPDFILWTGDDTPHVPDEKLGEAAVLEIVERLTKLIREVFPDTKVYAALGNHDFHPKNQFPAGSNNIYNQIAELWKPWLSNESIALFKKGAFYCEKLPGPSGAGRIVVLNTNLYYTSNALTADMADPGQQFQWLEDVLTDASKAGDMVYIVGHVPP

SEQ ID NO: 12216 - protein, 128 aa, Homo sapiens
MQIFVKTLTGKTITLEVEPSDTIENVKAKIQDKEGIPPDQQRLIFAGKQLEDGRTLSDYNIQKESTLHLVLRLRGGIIEPSLRQLAQKYNCDKMICRKCYARLHPRAVNCRKKKCGHTNNLRPKKKVK

SEQ ID NO: 12217 - protein, 327 aa, Homo sapiens
MTPILTVLICLGLSLGPRTHVQAGHLPKPTLWAEPGSVIIQGSPVTLRCQGSLQAEEYHLYRENKSASWVRRIQEPGKNGQFPIPSITWEHAGRYHCQYYSHNHSSEYSDPLELVVTGAYSKPTLSALPSPVVTSGGNVTLQCVSQVAFDGFILCKEGEDEHPQRLNSHSHARGWSWAIFSVGPVSPSRRWSYRCYAYDSNSPYVWSLPSDLLELLVPGVSKKPSLSVQPGPMVAPGESLTLQCVSDVGYDRFVLYKEGERDFLQRPGWQPQAGLSQANFTLGPVSPSHGGQYRCYSAHNLSSEWSAPSDPLDILITGQFYDRPSLS

SEQ ID NO: 12218 - protein, 326 aa, Homo sapiens
MWRSRWDASVLKAEALALLPCGLGMAFSQSHVMAARRHQHSRLIIEVDEYSSNPTQAFTFYNINQGRFQPPHVQMVDPVPHDAPKPPGYTRFVCVSDTHSRTDPIQMPYGDVLIHAGDFTELGLPSEVKKFNEWLGSLPYEYKIVIAGNHELTFDQEFMADLIKQDFYYFPSVSKLKPENYENVQSLLTNCIYLQDSEVTVRGFRIYGSPWQPWFYGWGFNLPRGQALLEKWNLIPEGVDILITHGPPLGFLDWVPKKMQRVGCVELLNTVQRRVQPRLHVFGHIHEGYGVMADGTTTYVNASVCTVNYQPVNPPIVIDLPTPRNS

SEQ ID NO: 12219 - protein, 106 aa, Homo sapiens
MIYTMKKVHALWASVCLLLNLAPAPLNADSEEDEEHTIITDTELPPLKLMHSFCAFKADDGPCKAIMKRFFFNIFTRQCEEFIYGGCEGNQNRFESLEECKKMCTR

SEQ ID NO: 12220 - protein, 268 aa, Homo sapiens
MTPGTQSPFFLLLLLTVLTATTAPKPATVVTGSGHASSTPGGEKETSATQRSSVPSSTEKNALSTGVSFFFLSFHISNLQFNSSLEDPSTDYYQELQRDISEMFLQIYKQGGFLGLSNIKFRPGSVVVQLTLAFREGTINVHDVETQFNQYKTEAASRYNLTISDVSVSDVPFPFSAQSGAGVPGWGIALLVLVCVLVALAIVYLIALAVCQCRRKNYGQLDIFPARDTYHPMSEYPTYHTHGRYVPPSSTDRSPYEKEWRVDRERLA

SEQ ID NO: 12221 - protein, 422 aa, Homo sapiens
MTESSMKKLASTLLDAITDKDPLVQEQVCSALCSLGEARPVETLRACEEYLRQHDKLAHPYRAAVLRAMERVLSSRASELDKDTASTIILLASSEMTKTKDLVWDWQQAASGVLVAVGRQFISKVMEELLRRLHPGTLPHCAVLHTLASLSVANAFGVVPFLPSVLSSLLPVLGVAKQDTVRVAFCSALQRFSEGALEYLANLDRAPDPTVRKDAFATDIFSAYDVLFHQWLQSREAKLRLAVVEALGPMSHLLPSERLEEQLPKLLPGILALYKKHAETFYLSKSLGQILEAAVSVGSRTLETQLDALLAALHSQICVPVESSSPLVMSNQKEVLRCFTVLACSSPDRLLAFLLPRLDTSNERTRVGTLQVVRHVINSAGSTNTRITLMLPSAVTRLKHEDCPARAAPQPADLTAAPASVA

SEQ ID NO: 12222 - protein, 4574 aa, Homo sapiens
MSGEDAEVRAVSEDVSNGSSGSPSPGDTLPWNLGKTQRSRRSGGGAGSNGSVLDPAERAVIRIADERDRVQKKTFTKWVNKHLIKAQRHISDLYEDLRDGHNLISLLEVLSGDSLPREKGRMRFHKLQNVQIALDYLRHRQVKLVNIRNDDIADGNPKLTLGLIWTIILHFQISDIQVSGQSEDMTAKEKLLLWSQRMVEGYQGLRCDNFTSSWRDGRLFNAIIHRHKPLLIDMNKVYRQTNLENLDQAFSVAERDLGVTRLLDPEDVDVPQPDEKSIITYVSSLYDAMPRVPDVQDGVRANELQLRWQEYRELVLLLLQWMRHHTAAFEERRFPSSFEEIEILWSQFLKFKEMELPAKEADKNRSKGIYQSLEGAVQAGQLKVPPGYHPLDVEKEWGKLHVAILEREKQLRSEFERLECLQRIVTKLQMEAGLCEEQLNQADALLQSDVRLLAAGKVPQRAGEVERDLDKADSMIRLLFNDVQTLKDGRHPQGEQMYRRVYRLHERLVAIRTEYNLRLKAGVAAPATQVAQVTLQSVQRRPELEDSTLRYLQDLLAWVEENQHRVDGAEWGVDLPSVEAQLGSHRGLHQSIEEFRAKIERARSDEGQLSPATRGAYRDCLGRLDLQYAKLLNSSKARLRSLESLHSFVAAATKELMWLNEKEEEEVGFDWSDRNTNMTAKKESYSALMRELELKEKKIKELQNAGDRLLREDHPARPTVESFQAALQTQWSWMLQLCCCIEAHLKENAAYFQFFSDVREAEGQLQKLQEALRRKYSCDRSATVTRLEDLLQDAQDEKEQLNEYKGHLSGLAKRAKAVVQLKPRHPAHPMRGRLPLLAVCDYKQVEVTVHKGDECQLVGPAQPSHWKVLSSSGSEAAVPSVCFLVPPPNQEAQEAVTRLEAQHQALVTLWHQLHVDMKSLLAWQSLRRDVQLIRSWSLATFRTLKPEEQRQALHSLELHYQAFLRDSQDAGGFGPEDRLMAEREYGSCSHHYQQLLQSLEQGAQEESRCQRCISELKDIRLQLEACETRTVHRLRLPLDKEPARECAQRIAEQQKAQAEVEGLGKGVARLSAEAEKVLALPEPSPAAPTLRSELELTLGKLEQVRSLSAIYLEKLKTISLVIRGTQGAEEVLRAHEEQLKEAQAVPATLPELEATKASLKKLRAQAEAQQPTFDALRDELRGAQEVGERLQQRHGERDVEVERWRERVAQLLERWQAVLAQTDVRQRELEQLGRQLRYYRESADPLGAWLQDARRRQEQIQAMPLADSQAVREQLRQEQALLEEIERHGEKVEECQRFAKQYINAIKDYELQLVTYKAQLEPVASPAKKPKVQSGSESVIQEYVDLRTHYSELTTLTSQYIKFISETLRRMEEEERLAEQQRAEERERLAEVEAALEKQRQLAEAHAQAKAQAEREAKELQQRMQEEVVRREEAAVDAQQQKRSIQEELQQLRQSSEAEIQAKARQAEAAERSRLRIEEEIRVVRLQLEATERQRGGAEGELQALRARAEEAEAQKRQAQEEAERLRRQVQDESQRKRQAEVELASRVKAEAEAAREKQRALQALEELRLQAEEAERRLRQAEVERARQVQVALETAQRSAEAELQSKRASFAEKTAQLERSLQEEHVAVAQLREEAERRAQQQAEAERAREEAERELERWQLKANEALRLRLQAEEVAQQKSLAQAEAEKQKEEAEREARRRGKAEEQAVRQRELAEQELEKQRQLAEGTAQQRLAAEQELIRLRAETEQGEQQRQLLEEELARLQREAAAATQKRQELEAELAKVRAEMEVLLASKARAEEESRSTSEKSKQRLEAEAGRFRELAEEAARLRALAEEAKRQRQLAEEDAARQRAEAERVLAEKLAAIGEATRLKTEAEIALKEKEAENERLRRLAEDEAFQRRRLEEQAAQHKADIEERLAQLRKASDSELERQKGLVEDTLRQRRQVEEEILALKASFEKAAAGKAELELELGRIRSNAEDTLRSKEQAELEAARQRQLAAEEERRRREAEERVQKSLAAEEEAARQRKAALEEVERLKAKVEEARRLRERAEQESARQLQLAQEAAQKRLQAEEKAHAFAVQQKEQELQQTLQQEQSVLDQLRGEAEAARRAAEEAEEARVQAEREAAQSRRQVEEAERLKQSAEEQAQARAQAQAAAEKLRKEAEQEAARRAQAEQAALRQKQAADAEMEKHKKFAEQTLRQKAQVEQELTTLRLQLEETDHQKNLLDEELQRLKAEATEAARQRSQVEEELFSVRVQMEELSKLKARIEAENRALILRDKDNTQRFLQEEAEKMKQVAEEAARLSVAAQEAARLRQLAEEDLAQQRALAEKMLKEKMQAVQEATRLKAEAELLQQQKELAQEQARRLQEDKEQMAQQLAEETQGFQRTLEAERQRQLEMSAEAERLKLRVAEMSRAQARAEEDAQRFRKQAEEIGEKLHRTELATQEKVTLVQTLEIQRQQSDHDAERLREAIAELEREKEKLQQEAKLLQLKSEEMQTVQQEQLLQETQALQQSFLSEKDSLLQRERFIEQEKAKLEQLFQDEVAKAQQLREEQQRQQQQMEQERQRLVASMEEARRRQHEAEEGVRRKQEELQQLEQQRRQQEELLAEENQRLREQLQLLEEQHRAALAHSEEVTASQVAATKTLPNGRDALDGPAAEAEPEHSFDGLRRKVSAQRLQEAGILSAEELQRLAQGHTTVDELARREDVRHYLQGRSSIAGLLLKATNEKLSVYAALQRQLLSPGTALILLEAQAASGFLLDPVRNRRLTVNEAVKEGVVGPELHHKLLSAERAVTGYKDPYTGQQISLFQAMQKGLIVREHGIRLLEAQIATGGVIDPVHSHRVPVDVAYRRGYFDEEMNRVLADPSDDTKGFFDPNTHENLTYLQLLERCVEDPETGLCLLPLTDKAAKGGELVYTDSEARDVFEKATVSAPFGKFQGKTVTIWEIINSEYFTAEQRRDLLRQFRTGRITVEKIIKIIITVVEEQEQKGRLCFEGLRSLVPAAELLESRVIDRELYQQLQRGERSVRDVAEVDTVRRALRGANVIAGVWLEEAGQKLSIYNALKKDLLPSDMAVALLEAQAGTGHIIDPATSARLTVDEAVRAGLVGPEFHEKLLSAEKAVTGYRDPYTGQSVSLFQALKKGLIPREQGLRLLDAQLSTGGIVDPSKSHRVPLDVACARGCLDEETSRALSAPRADAKAYSDPSTGEPATYGELQQRCRPDQLTGLSLLPLSEKAARARQEELYSELQARETFEKTPVEVPVGGFKGRTVTVWELISSEYFTAEQRQELLRQFRTGKVTVEKVIKILITIVEEVETLRQERLSFSGLRAPVPASELLASGVLSRAQFEQLKDGKTTVKDLSELGSVRTLLQGSGCLAGIYLEDTKEKVSIYEAMRRGLLRATTAALLLEAQAATGFLVDPVRNQRLYVHEAVKAGVVGPELHEQLLSAEKAVTGYRDPYSGSTISLFQAMQKGLVLRQHGIRLLEAQIATGGIIDPVHSHRVPVDVAYQRGYFSEEMNRVLADPSDDTKGFFDPNTHENLTYRQLLERCVEDPETGLRLLPLKGAEKAEVVETTQVYTEEETRRAFEETQIDIPGGGSHGGSTMSLWEVMQSDLIPEEQRAQLMADFQAGRVTKERMIIIIIEIIEKTEIIRQQGLASYDYVRRRLTAEDLFEARIISLETYNLLREGTRSLREALEAESAWCYLYGTGSVAGVYLPGSRQTLSIYQALKKGLLSAEVARLLLEAQAATGFLLDPVKGERLTVDEAVRKGLVGPELHDRLLSAERAVTGYRDPYTEQTISLFQAMKKELIPTEEALRLLDAQLATGGIVDPRLGFHLPLEVAYQRGYLNKDTHDQLSEPSEVRSYVDPSTDERLSYTQLLRRCRRDDGTGQLLLPLSDARKLTFRGLRKQITMEELVRSQVMDEATALQLREGLTSIEEVTKNLQKFLEGTSCIAGVFVDATKERLSVYQAMKKGIIRPGTAFELLEAQAATGYVIDPIKGLKLTVEEAVRMGIVGPEFKDKLLSAERAVTGYKDPYSGKLISLFQAMKKGLILKDHGIRLLEAQIATGGIIDPEESHRLPVEVAYKRGLFDEEMNEILTDPSDDTKGFFDPNTEENLTYLQLMERCITDPQTGLCLLPLKEKKRERKTSSKSSVRKRRVVIVDPETGKEMSVYEAYRKGLIDHQTYLELSEQECEWEEITISSSDGVVKSMIIDRRSGRQYDIDDAIAKNLIDRSALDQYRAGTLSITEFADMLSGNAGGFRSRSSSVGSSSSYPISPAVSRTQLASWSDPTEETGPVAGILDTETLEKVSITEAMHRNLVDNITGQRLLEAQACTGGIIDPSTGERFPVTDAVNKGLVDKIMVDRINLAQKAFCGFEDPRTKTKMSAAQALKKGWLYYEAGQRFLEVQYLTGGLIEPDTPGRVPLDEALQRGTVDARTAQKLRDVGAYSKYLTCPKTKLKISYKDALDRSMVEEGTGLRLLEAAAQSTKGYYSPYSVSGSGSTAGSRTGSRTGSRAGSRRGSFDATGSGFSMTFSSSSYSSSGYGRRYASGSSASLGGPESAVA

SEQ ID NO: 12223 - protein, 158 aa, Homo sapiens
MTPALTALLCLGLSLGPRTRMQAGPFPKPTLWAEPGSVISWGSPVTIWCQGSLEAQEYQLDKEGSPEPWDRNNPLEPKNKARFSIPSMTQHHAGRYRCHYYSSAGWSEPSDPLELVMTGFYNKPTLSALPSPVVASGGNMTLRCGSQKGYHHFVLMKE

SEQ ID NO: 12224 - protein, 1198 aa, Homo sapiens
MNFEGLDPGLAEYAPAMHSALDPVLDAHLNPSLLQNVELDPEGVALEALPVQESVHIMEGVYSELHSVVAEVGVPVSVSHFDLHEEMLWVGSHGGHATSFFGPALERYSSFQVNGSDDIRQIQSLENGILFLTKNNLKYMARGGLIIFDYLLDENEDMHSLLLTDSSTLLVGGLQNHIIEIDLNTVQETQKYAVETPGVTIMRQTNRFFFCGHTSGKVSLRDLRTFKVEHEFDAFSGSLSDFDVHGNLLAACGFSSRLTGLACDRFLKVYDLRMMRAITPLQVHVDPAFLRFIPTYTSRLAIISQSGQCQFCEPTGLANPADIFHVNPVGPLLMTFDVSASKQALAFGDSEGCVHLWTDSPEPSFNPYSRETEFALPCLVDSLPPLDWSQDLLPLSLIPVPLTTDTLLSDWPAANSAPAPRRAPPVDAEILRTMKKVGFIGYAPNPRTRLRNQIPYRLKESDSEFDSFSQVTESPVGREEEPHLHMVSKKYRKVTIKYSKLGLEDFDFKHYNKTLFAGLEPHIPNAYCNCMIQVLYFLEPVRCLIQNHLCQKEFCLACELGFLFHMLDLSRGDPCQGNNFLRAFRTIPEASALGLILADSDEASGKGNLARLIQRWNRFILTQLHQDMQELEIPQAYRGAGGSSFCSSGDSVIGQLFSCEMENCSLCRCGSETVRASSTLLFTLSYPDDKTGKNYDFAQVLKRSICLDQNTQAWCDTCEKYQPTIQTRNIRHLPDILVINCEVNSSKEADFWRMQAEVAFKMAVKKHGGEISKNKEFALADWKELGSPEGVLVCPSIEELKNVWLPFSIRMKMTKNKGLDVCNWTDGDEMQWGPARAEEEHGVYVYDLMATVVHILDSRTGGSLVAHIKVGETYHQRKEGVTHQQWYLFNDFLIEPIDKHEAVQFDMNWKVPAILYYVKRNLNSRYNLNIKNPIEASVLLAEASLARKQRKTHTTFIPLMLNEMPQIGDLVGLDAEFVTLNEEEAELRSDGTKSTIKPSQMSVARITCVRGQGPNEGIPFIDDYISTQEQVVDYLTQYSGIKPGDLDAKISSKHLTTLKSTYLKLRFLIDIGVKFVGHGLQKDFRVINLMVPKDQVLDTVYLFHMPRKRMISLRFLAWYFLDLKIQGETHDSIEDARTALQLYRKYLELSKNGTEPESFHKVLKGLYEKGRKMDWKVPEPEGQTSPKNAAVFSSVLAL

SEQ ID NO: 12225 - protein, 490 aa, Homo sapiens
MSSCVSSQPSSNRAAPQDELGGRGSSSSESQKPCEALRGLSSLSIHLGMESFIVVTECEPGCAVDLGLARDRPLEADGQEVPLDTSGSQARPHLSGRKLSLQERSQGGLAAGGSLDMNGRCICPSLPYSPVSSPQSSPRLPRRPTVESHHVSITGMQDCVQLNQYTLKDEIGKGSYGVVKLAYNENDNTYYAMKVLSKKKLIRQAGFPRRPPPRGTRPAPGGCIQPRGPIEQVYQEIAILKKLDHPNVVKLVEVLDDPNEDHLYMVFELVNQGPVMEVPTLKPLSEDQARFYFQDLIKGIEYLHYQKIIHRDIKPSNLLVGEDGHIKIADFGVSNEFKGSDALLSNTVGTPAFMAPESLSETRKIFSGKALDVWAMGVTLYCFVFGQCPFMDERIMCLHSKIKSQALEFPDQPDIAEDLKDLITRMLDKNPESRIVVPEIKILVKTMIRKRSFGNPFEGSRREERSLSAPGNLLTKKPTRECESLSELKT

SEQ ID NO: 12226 - protein, 970 aa, Homo sapiens
MALSQGLLTFRDVAIEFSQEEWKCLDPAQRTLYRDVMLENYRNLVSLDISSKCMMKEFSSTAQGNTEVIHTGTLQRHERHHIGDFCFQEMEKDIHDFEFQWKEDERNSHEAPMTEIKQLTGSTNRHDQRHAGNKPIKDQLGSSFHSHLPELHMFQTEGKIGNQVEKSINSASLVSTSQRISCRPKTHISKNYGNNFLNSSLLTQKQEVHMREKSFQCNESGKAFNYSSVLRKHQIIHLGAKQYKCDVCGKVFNQKRYLACHRRCHTGKKPYKCNDCGKTFSQELTLTCHHRLHTGEKHYKCSECGKTFSRNSALVIHKAIHTGEKSYKCNECGKTFSQTSYLVYHRRLHTGEKPYKCEECDKAFSFKSNLERHRKIHTGEKPYKCNECSRTFSRKSSLTRHRRLHTGEKPYKCNDCGKTFSQMSSLVYHRRLHTGEKPYKCEECDEAFSFKSNLERHRRIHTGEKPYKCNDCGKTFSQTSSLVYHRRLHTGEKPYKCEECDEAFSFKSNLERHRIIHTGEKLYKCNECGKTFSRKSSLTRHCRLHTGEKPYQCNECGKAFRGQSALIYHQAIHGIGKLYKCNDCHQVFSNATTIANHWRIHNEERSYKCNRCGKFFRHRSYLAVHWRTHSGEKPYKCEECDEAFSFKSNLQRHRRIHTGEKPYRCNECGKTFSRKSYLTCHRRLHTGEKPYKCNECGKTFGRNSALIIHKAIHTGEKPYKCNECGKAFSQKSSLTCHLRLHTGEKPYKCEECDKVFSRKSSLEKHRRIHTGEKPYKCKVCDKAFGRDSHLAQHTRIHTGEKPYKCNECGKNFRHNSALVIHKAIHSGEKPYKCNECGKTFRHNSALEIHKAIHTGEKPYKCSECGKVFNRKANLSRHHRLHTGEKPYKCNKCGKVFNQQAHLACHHRIHTGEKPYKCNECGKTFRHNSVLVIHKTIHTGEKPYKCNECGKVFNRKAKLARHHRIHTGKKH

SEQ ID NO: 12227 - protein, 515 aa, Homo sapiens
MCQVGEDYGEPAPEEPPPAPRPSREQKCVKCKEAQPVVVIRAGDAFCRDCFKAFYVHKFRAMLGKNRLIFPGEKVLLAWSGGPSSSSMVWQVLEGLSQDSAKRLRFVAGVIFVDEGAACGQSLEERSKTLAEVKPILQATGFPWHVVALEEVFSLPPSVLWCSAQELVGSEGAYKAAVDSFLQQQHVLGAGGGPGPTQGEEQPPQPPLDPQNLARPPAPAQTEALSQLFCSVRTLTAKEELLQTLRTHLILHMARAHGYSKVMTGDSCTRLAIKLMTNLALGRGAFLAWDTGFSDERHGDVVVVRPMRDHTLKEVAFYNRLFSVPSVFTPAVDTKAPEKASIHRLMEAFILRLQTQFPSTVSTVYRTSEKLVKGPRDGPAAGDSGPRCLLCMCALDVDAADSATAFGAQTSSRLSQMQSPIPLTETRTPPGPCCSPGVGWAQRCGQGACRREDPQACIEEQLCYSCRVNMKDLPSLDPLPPYILAEAQLRTQRAWGLQEIRDCLIEDSDDEAGQS

SEQ ID NO: 12228 - protein, 531 aa, Homo sapiens
MLGFLSRGPSMKLCMGLACVLSLWNTVSGIKGEAKKEKGMTFLPTTVSGLREEERKEKGVAFLATTELPARSIDLSALNLTELVNGMLSRALKDSKKFFSLLSVTSYSSFAFHKFSVAVYNISNLKTVDPAKFPTRYCYCLNNRTNDLSDFTALLVDIIGNSTSYLTEIFKSTSILSVNQSNESDCIFICVMTGKSGRNLSDFWEIEEKYPIINYTFTSGLSGVLGAATRGTARTSKPTTKSQKTLPSTSPGHWTQSTPWASALRSSPWTETAAPSETEETLNTGRPPELPARATATWFSASHTLPALATRRVARTQWLTADRQTWASISSVPWAQTISEKKPGGSLWETRSSPPTTAGTEEAMNTTSLLAPAAEIMATPGSPSQASPTLGAFTHGTQTPSPTKATAPRYPQTGDLSAEWPFTAGEEPVLVPRPHQVSRCPQPLFKVGAMAAAPLTLAIQRLNPCLMELCQFFQQCLCMSQRSPRTEDMRYCLEYYSWFLKNATYICQRVKRVSHSHTLKQKCLENICKSV

SEQ ID NO: 12229 - protein, 241 aa, Homo sapiens
MSGFQINLNPLKEPLGFIKVLEWIASIFAFATCGGFKGQTEIQVNCPPAVTENKTVTATFGYPFRLNEASFQPPPGVNICDVNWKDYVLIGDYSSSAQFYVTFAVFVFLYCIAALLLYVGYTSLYLDSRKLPMIDFVVTLVATFLWLVSTSAWAKALTDIKIATGHNIIDELPPCKKKAVLCYFGSVTSMGSLNVSVIFGFLNMILWGGNAWFVYKETSLHSPSNTSAPHSQGGIPPPTGI

SEQ ID NO: 12230 - protein, 625 aa, Homo sapiens
MLNMWKVRELVDKATNVVMNYSEIESKVREATNDDPWGPSGQLMGEIAKATFMYEQFPELMNMLWSRMLKDNKKNWRRVYKSLLLLAYLIRNGSERVVTSAREHIYDLRSLENYHFVDEHGKDQGINIRQKVKELVEFAQDDDRLREERKKAKKNKDKYVGVSSDSVGGFRYSERYDPEPKSKWDEEWDKNKSAFPFSDKLGELSDKIGSTIDDTISKFRRKDREDSPERCSDSDEEKKARRGRSPKGEFKDEEETVTTKHIHITQATETTTTRHKRTANPSKTIDLGAAAHYTGDKASPDQNASTHTPQSSVKTSVPSSKSSGDLVDLFDGTSQSTGGSADLFGGFADFGSAAASGSFPSQVTATSGNGDFGDWSAFNQAPSGPVASSGEFFGSASQPAVELVSGSQSALGPPPAASNSSDLFDLMGSSQATMTSSQSMNFSMMSTNTVGLGLPMSRSQNTDMVQKSVSKTLPSTWSDPSVNISLDNLLPGMQPSKPQQPSLNTMIQQQNMQQPMNVMTQSFGAVNLSSPSNMLPVRPQTNALIGGPMPMSMPNVMTGTMGMAPLGNTPMMNQSMMGMNMNIGMSAAGMGLTGTMGMGMPNIAMTSGTVQPKQDAFANFANFSK

SEQ ID NO: 12231 - protein, 25 aa, Homo sapiens
MVLYLVWAFIPESWLNSLGLTYWPQ

SEQ ID NO: 12232 - protein, 464 aa, Homo sapiens
MLRRALLCLAVAALVRADAPEEEDHVLVLRKSNFAEALAAHKYLLVEFYAPWCGHCKALAPEYAKAAGKLKAEGSEIRLAKVDATEESDLAQQYGVRGYPTIKFFRNGDTASPKEYTGDVESDSAKQFLQAAEAIDDIPFGITSNSDVFSKYQLDKDGVVLFKKFDEGRNNFEGEVTKENLLDFIKHNQLPLVIEFTEQTAPKIFGGEIKTHILLFLPKSVSDYDGKLSNFKTAAESFKGKILFIFIDSDHTDNQRILEFFGLKKEECPAVRLITLEEEMTKYKPESEELTAERITEFCHRFLEGKIKPHLMSQELPEDWDKQPVKVLVGKNFEDVAFDEKKNVFVEFYAPWCGHCKQLAPIWDKLGETYKDHENIVIAKMDSTANEVEAVKVHSFPTLKFFPASADRTVIDYNGERTLDGFKKFLESGGQDGAGDDDDLEDLEEAEEPDMEEDDDQKAVKDEL

SEQ ID NO: 12233 - protein, 398 aa, Homo sapiens
MKFQGPLACLLLALCLGSGEAGPLQSGEESTGTNIGEALGHGLGDALSEGVGKAIGKEAGGAAGSKVSEALGQGTREAVGTGVRQVPGFGVADALGNRVGEAAHALGNTGHEIGRQAEDVIRHGADAVRGSWQGVPGHNGAWETSGGHGIFGSQGGLGGQGQGNPGGLGTPWVHGYPGNSAGSFGMNPQGAPWGQGGNGGPPNFGTNTQGAVAQPGYGSVRASNQNEGCTNPPPSGSGGGSSNSGGGSGSQSGSSGSGSNGDNNNGSSSGGSSSGSSSGGSSGGSSGGSSGNSGGSRGDSGSESSWGSSTGSSSGNHGGSGGGNGHKPGCEKPGNEARGSGESGIQGFRGQGVSSNMRNSETSPGMFNFDTFWKNFKSKLGFINWDAINKDQRSSRIP

SEQ ID NO: 12234 - protein, 2764 aa, Homo sapiens
MVSEEEEEEDGDAEETQDSEDDEEDEMEEDDDDSDYPEEMEDDDDDASYCTESSFRSHSTYSSTPGRRKPRVHRPRSPILEEKDIPPLEFPKSSEDLMVPNEHIMNVIAIYEVLRNFGTVLRLSPFRFEDFCAALVSQEQCTLMAEMHVVLLKAVLREEDTSNTTFGPADLKDSVNSTLYFIDGMTWPEVLRVYCESDKEYHHVLPYQEAEDYPYGPVENKIKVLQFLVDQFLTTNIAREELMSEGVIQYDDHCRVCHKLGDLLCCETCSAVYHLECVKPPLEEVPEDEWQCEVCVAHKVPGVTDCVAEIQKNKPYIRHEPIGYDRSRRKYWFLNRRLIIEEDTENENEKKIWYYSTKVQLAELIDCLDKDYWEAELCKILEEMREEIHRHMDITEDLTNKARGSNKSFLAAANEEILESIRAKKGDIDNVKSPEETEKDKNETENDSKDAEKNREEFEDQSLEKDSDDKTPDDDPEQGKSEEPTEVGDKGNSVSANLGDNTTNATSEETSPSEGRSPVGCLSETPDSSNMAEKKVASELPQDVPEEPNKTCESSNTSATTTSIQPNLENSNSSSELNSSQSESAKAADDPENGERESHTPVSIQEEIVGDFKSEKSNGELSESPGAGKGASGSTRIITRLRNPDSKLSQLKSQQVAAAAHEANKLFKEGKEVLVVNSQGEISRLSTKKEVIMKGNINNYFKLGQEGKYRVYHNQYSTNSFALNKHQHREDHDKRRHLAHKFCLTPAGEFKWNGSVHGSKVLTISTLRLTITQLENNIPSSFLHPNWASHRANWIKAVQMCSKPREFALALAILECAVKPVVMLPIWRESLGHTRLHRMTSIEREEKEKVKKKEKKQEEEETMQQATWVKYTFPVKHQVWKQKGEEYRVTGYGGWSWISKTHVYRFVPKLPGNTNVNYRKSLEGTKNNMDENMDESDKRKCSRSPKKIKIEPDSEKDEVKGSDAAKGADQNEMDISKITEKKDQDVKELLDSDSDKPCKEEPMEVDDDMKTESHVNCQESSQVDVVNVSEGFHLRTSYKKKTKSSKLDGLLERRIKQFTLEEKQRLEKIKLEGGIKGIGKTSTNSSKNLSESPVITKAKEGCQSDSMRQEQSPNANNDQPEDLIQGCSESDSSVLRMSDPSHTTNKLYPKDRVLDDVSIRSPETKCPKQNSIENDIEEKVSDLASRGQEPSKSKTKGNDFFIDDSKLASADDIGTLICKNKKPLIQEESDTIVSSSKSALHSSVPKSTNDRDATPLSRAMDFEGKLGCDSESNSTLENSSDTVSIQDSSEEDMIVQNSNESISEQFRTREQDVEVLEPLKCELVSGESTGNCEDRLPVKGTEANGKKPSQQKKLEERPVNKCSDQIKLKNTTDKKNNENRESEKKGQRTSTFQINGKDNKPKIYLKGECLKEISESRVVSGNVEPKVNNINKIIPENDIKSLTVKESAIRPFINGDVIMEDFNERNSSETKSHLLSSSDAEGNYRDSLETLPSTKESDSTQTTTPSASCPESNSVNQVEDMEIETSEVKKVTSSPITSEEESNLSNDFIDENGLPINKNENVNGESKRKTVITEVTTMTSTVATESKTVIKVEKGDKQTVVSSTENCAKSTVTTTTTTVTKLSTPSTGGSVDIISVKEQSKTVVTTTVTDSLTTTGGTLVTSMTVSKEYSTRDKVKLMKFSRPKKTRSGTALPSYRKFVTKSSKKSIFVLPNDDLKKLARKGGIREVPYFNYNAKPALDIWPYPSPRPTFGITWRYRLQTVKSLAGVSLMLRLLWASLRWDDMAAKAPPGGGTTRTETSETEITTTEIIKRRDVGPYGIRSEYCIRKIICPIGVPETPKETPTPQRKGLRSSALRPKRPETPKQTGPVIIETWVAEEELELWEIRAFAERVEKEKAQAVEQQAKKRLEQQKPTVIATSTTSPTSSTTSTISPAQKVMVAPISGSVTTGTKMVLTTKVGSPATVTFQQNKNFHQTFATWVKQGQSNSGVVQVQQKVLGIIPSSTGTSQQTFTSFQPRTATVTIRPNTSGSGGTTSNSQVITGPQIRPGMTVIRTPLQQSTLGKAIIRTPVMVQPGAPQQVMTQIIRGQPVSTAVSAPNTVSSTPGQKSLTSATSTSNIQSSASQPPRPQQGQVKLTMAQLTQLTQGHGGNQGLTVVIQGQGQTTGQLQLIPQGVTVLPGPGQQLMQAAMPNGTVQRFLFTPLATTATTASTTTTTVSTTAAGTGEQRQSKLSPQMQVHQDKTLPPAQSSSVGPAEAQPQTAQPSAQPQPQTQPQSPAQPEVQTQPEVQTQTTVSSHVPSEAQPTHAQSSKPQVAAQSQPQSNVQGQSPVRVQSPSQTRIRPSTPSQLSPGQQSQVQTTTSQPIPIQPHTSLQIPSQGQPQSQPQVVMKHNAVIEHLKQKKSMTPAEREENQRMIVCNQVMKYILDKIDKEEKQAAKKRKREESVEQKRSKQNATKLSALLFKHKEQLRAEILKKRALLDKDLQIEVQEELKRDLKIKKEKDLMQLAQATAVAAPCPPVTPAPPAPPAPPPSPPPPPAVQHTGLLSTPTLPAASQKRKREEEKDSSSKSKKKKMISTTSKETKKDTKLYCICKTPYDESKFYIGCDRCQNWYHGRCVGILQSEAELIDEYVCPQCQSTEDAMTVLTPLTEKDYEGLKRVLRSLQAHKMAWPFLEPVDPNDAPDYYGVIKEPMDLATMEERVQRRYYEKLTEFVADMTKIFDNCRYYNPSDSPFYQCAEVLESFFVQKLKGFKASRSHNNKLQSTAS

SEQ ID NO: 12235 - protein, 325 aa, Homo sapiens
MEPSALGPWSLFPDLAPRDQEGQVLAPRRCFRRECGQNEKVVIMCASSDTIRSIMLVAHRHGMTSGDYAFFNIELFNSSSYGDGSWKRGDKHDFEAKQAYSSLQTVTLLRTVKPEFEKFSMEVKSSVEKQGLNMEDYVNMFVEGFHDAILLYVLALHEVLRAGYSKKDGGKIIQQTWNRTFEGIAGQVSIDANGDRYGDFSVIAMTDVEAGTQEVIGDYFGKEGRFEMRPNVKYPWGPLKLRIDENRIVEHTNSSPCKSSGGLEESAVTGIVVGALLGAGLLMAFYFFRKKYRITIERRTQQEESNLGKHRELREDSIRSHFSVA

SEQ ID NO: 12236 - protein, 290 aa, Homo sapiens
MKMRFLGLVVCLVLWTLHSEGSGGKLTAVDPETNMNVSEIISYWGFPSEEYLVETEDGYILCLNRIPHGRKNHSDKGPKPVVFLQHGLLADSSNWVTNLANSSLGFILADAGFDVWMGNSRGNTWSRKHKTLSVSQDEFWAFSYDEMAKYDLPASINFILNKTGQEQVYYVGHSQGTTIGFIAFSQIPELAKRIKMFFALGPVASVAFCTSPMAKLGRLPDHLIKDLFGDKEFLPQSAFLKWLGTHVCTHVILKELCGNLCFLLCGFNERNLNMSRVDVYTTHSPAGTSV

SEQ ID NO: 12237 - protein, 44 aa, Homo sapiens
MWMAWCVAALSVVAVCGTSHETNTVLRVTKDVLSNGFSPISWTI

SEQ ID NO: 12238 - protein, 108 aa, Homo sapiens
MVDFPGYNLSGAVASFLFILLTMKQSDFRVIGPAHPILAGVGEDALLTCQLLPKRTTMHVEVRWYRSEPSTPVFVHRDGVEVTEMQMEEYRGWVEWIENGIAKGNVAL

SEQ ID NO: 12239 - protein, 3460 aa, Homo sapiens [sequence omitted]

SEQ ID NO: 12240 - protein, 425 aa, Homo sapiens
MPTSSAVLLRVLSIPLLTVLILARDLSALGGCPWGPLPLRCHCLLPDPLFCAGEVQAFYEDLSGRQYVNEVFNFSVDKLYDLLFTNSPFQRDFMEQRRFSDIIFHPWKKEENGNQSRVILYTITLTNPLAPKTATVRETQTMYKASQESECYVIDAEVLTHDVPYHDYFYTINRYTLTRVARNKSRLRVSTELRYRKQPWGLVKTFIEKNFWSGLEDYFRHLESELAKTESTYLAEMHRQSPKEKASKTTTVRRRKRPHAHLRVPHLEEVMSPVTTPTDEDVGHRIKHVAGSTQTRHIPEDTPNGFHLQSVSKLLLVISCVLVLLVILNMMLFYKLWMLEYTTQTLTAWQGLRLQERLPQSQTEWAQLLESQQKYHDTELQKWREIIKSSVMLLDQMKDSLINLQNGIRSRDYTSESEEKRNRYH

SEQ ID NO: 12241 - protein, 466 aa, Homo sapiens
MGLYAAAAGVLAGVESRQGSIKGLVYSSNFQNVKQLYALVCETQRYSAVLDAVIASAGLLRAEKKLRPHLAKVLVYELLLGKGFRGGGGRWKALLGRHQARLKAELARLKVHRGVSRNEDLLEVGSRPGPASQLPRFVRVNTLKTCSDDVVDYFKRQGFSYQGRASSLDDLRALKGKHFLLDPLMPELLVFPAQTDLHEHPLYRAGHLILQDRASCLPAMLLDPPPGSHVIDACAAPGNKTSHLAALLKNQGKIFAFDLDAKRLASMATLLARAGVSCCELAEEDFLAVSPSDPRYHEVHYILLDPSCSGSGMPSRQLEEPGAGTPSPVRLHALAGFQQRALCHALTFPSLQRLVYSTCSLCQEENEDVVRDALQQNPGAFRLAPALPAWPHRGLSTFPGAEHCLRASPETTLSSGFFVAVIERVEVPSSASQAKASAPERTPSPAPKRKKRQQRAAAGACTPPCT

SEQ ID NO: 12242 - protein, 471 aa, Homo sapiens
MSDFDEFERQLNENKQERDKENRHRKRSHSRSRSRDRKRRSRSRDRRNRDQRSASRDRRRRSKPLTRGAKEEHGGLIRSPRHEKKKKVRKYWDVPPPGFEHITPMQYKAMQAAGQIPATALLPTMTPDGLAVTPTPVPVVGSQMTRQARRLYVGNIPFGITEEAMMDFFNAQMRLGGLTQAPGNPVLAVQINQDKNFAFLEFRSVDETTQAMAFDGIIFQGQSLKIRRPHDYQPLPGMSENPSVYVPGVVSTVVPDSAHKLFIGGLPNYLNDDQVKELLTSFGPLKAFNLVKDSATGLSKGYAFCEYVDINVTDQAIAGLNGMQLGDKKLLVQRASVGAKNATLSTINQTPVTLQVPGLMSSQVQMGGHPTEVLCLMNMVLPEELLDDEEYEEIVEDVRDECSKYGLVKSIEIPRPVDGVEVPGCGKIFVEFTSVFDCQKAMQGLTGRKFANRVVVTKYCDPDSYHRRDFW

SEQ ID NO: 12243 - protein, 45 aa, Homo sapiens
MRPPSPLPARWLCVLAGALAWALGPAAAARCGTTSPAGQPPLGAR

SEQ ID NO: 12244 - protein, 710 aa, Homo sapiens
MSRSPDAKEDPVECPLCMEPLEIDDINFFPCTCGYQICRFCWHRIRTDENGLCPACRKPYPEDPAVYKPLSQEELQRIKNEKKQKQNERKQKISENRKHLASVRVVQKNLVFVVGLSQRLADPEVLKRPEYFGKFGKIHKVVINNSTSYAGSQGPSASAYVTYIRSEDALRAIQCVNNVVVDGRTLKASLGTTKYCSYFLKNMQCPKPDCMYLHELGDEAASFTKEEMQAGKHQEYEQKLLQELYKLNPNFLQLSTGSVDKNKNKVTPLQSPIDKPSDSLSIGNGDNSQQISNSDTPSPPPGLSKSNPVIPISSSNHSARSPFEGAVTESQSLFSDNFRHPNPIPSGLPPFPSSPQTSSDWPTAPEPQSLFTSETIPVSSSTDWQAAFGFGSSKQPEDDLGFDPFDVTRKALADLIEKELSVQDQPSLSPTSLQNSSSHTTTAKGPGSGFLHPAAATNANSLNSTFSVLPQRFPQFQQHRAVYNSFSFPGQAARYPWMAFPRNSIMHLNHTANPTSNSNFLDLNLPPQHNTGLGGIPVADNSSSVESLNMKEWQDGLRALLPNININFGGLPNSSSPSNANHSAPTSNTATTDSLSWDSPGSWTDPAIITGIPASSGNSLDSLQDDNPPHWLKSLQALTEMDGPSAAPSQTHHSAPFSTQIPLHRASWNPYPPPSNPSSFHSPPPGFQTAFRPPSKTPTDLLQSSTLDRH

SEQ ID NO: 12245 - protein, 214 aa, Homo sapiens
MGELMAFLLPLIIVLMVKHSDSRTHSLRYFRLGVSDPIHGVPEFISVGYVDSHPITTYDSVTRQKEPRAPWMAENLAPDHWERYTQLLRGWQQMFKVELKRLQRHYNHSGSHTYQRMIGCELLEDGSTTGFLQYAYDGQDFLIFNKDTLSWLAVDNVAHTIKQAWEANQHELLYQKNWLEEECIAWLKRFLEYGKDTLQRTEQNGAIYLPTPDR

SEQ ID NO: 12246 - protein, 454 aa, Homo sapiens
MATNKERLFAAGALGPGSGYPGAGFPFAFPGALRGSPPFEMLSPSFRGLGQPDLPKEMASLSVETQSTSSEEMVPSSPSPPPPPRVYKPCFVCNDKSSGYHYGVSSCEGCKGFFRRSIQKNMVYTCHRDKNCIINKVTRNRCQYCRLQKCFEVGMSKEAVRNDRNKKKKEVKEEGSPDSYELSPQLEELITKVSKAHQETFPSLCQLGKYTTNSSADHRVQLDLGLWDKFSELATKCIIKIVEFAKRLPGFTGLSIADQITLLKAACLDILMLRICTRYTPEQDTMTFSDGLTLNRTQMHNAGFGPLTDLVFAFAGQLLPLEMDDTETGLLSAICLICGDRMDLEEPEKVDKLQEPLLEALRLYARRRRPSQPYMFPRMLMKITDLRGISTKGAERAITLKMEIPGPMPPLIREMLENPEMFEDDSSQPGPHPNASSEDEVPGGQGKGGLKSPA

SEQ ID NO: 12247 - protein, 115 aa, Homo sapiens
MDTWLVCWAIFSLLKAGLTEPEVTQTPSHQVTQMGQEVILRCVPISNHLYFYWYRQILGQKVEFLVSFYNNEISEKSEIFDDQFSVERPDGSNFTLKIRSTKLEDSAMYFCASSE

SEQ ID NO: 12248 - protein, 997 aa, Homo sapiens
MVCSAAPLLLLATTLPLLGSPVAQASQPGQSQAGGESGSGQLLDQENGAGESALVSVYVHLDFPDKTWPPELSRTLTLPAASASSSPRPLLTGLRLTTECNVNHKGNFYCACLSGYQWNTSICLHYPPCQSLHNHQPCGCLVFSHPEPGYCQLLPPGSPVTCLPAVPGILNLNSQLQMPGDTLSLTLHLSQEATNLSWFLRHPGSPSPILLQPGTQVSVTSSHGQAALSVSNMSHHWAGEYMSCFEAQGFKWNLYEVVRVPLKATDVARLPYQLSISCATSPGFQLSCCIPSTNLAYTAAWSPGEGSKASSFNESGSQCFVLAVQRCPMADTTYACDLQSLGLAPLRVPISITIIQDGDITCPEDASVLTWNVTKAGHVAQAPCPESKRGIVRRLCGADGVWGPVHSSCTDARLLALFTRTKLLQAGQGSPAEEVPQILAQLPGQAAEASSPSDLLTLLSTMKYVAKVVAEARIQLDRRALKNLLIATDKVLDMDTRSLWTLAQARKPWAGSTLLLAVETLACSLCPQDHPFAFSLPNVLLQSQLFGPTFPADYSISFPTRPPLQAQIPRHSLAPLVRNGTEISITSLVLRKLDHLLPSNYGQGLGDSLYATPGLVLVISIMAGDRAFSQGEVIMDFGNTDGSPHCVFWDHSLFQGRGGWSKEGCQAQVASASPTAQCLCQHLTAFSVLMSPHTVPEEPALALLTQVGLGASILALLVCLGVYWLVWRVVVRNKISYFRHAALLNMVFCLLAADTCFLGAPFLSPGPRSPLCLAAAFLCHFLYLATFFWMLAQALVLAHQLLFVFHQLAKHRVLPLMVLLGYLCPLGLAGVTLGLYLPQGQYLREGECWLDGKGGALYTFVGPVLAIIGVNGLVLAMAMLKLLRPSLSEGPPAEKRQALLGVIKALLILTPIFGLTWGLGLATLLEEVSTVPHYIFTILNTLQGVFILLFGCLMDRKIQEALRKRFCRAQAPSSTISLATNEGCILEHSKGGSDTAR

SEQ ID NO: 12249 - protein, 443 aa, Homo sapiens
MARPPGGSGPLLDSEHSSLQNNEQPSLATSSNQTSMQDEQPSDSFQGQAAQSGVWNDDSMLGPSQNFEAESIQDNAHMAEGTGFYPSEPMLCSESVEGQVPHSLETLYQSADCSDANDALIVLIHLLMLESGYIPQGTEAKALSMPEKWKLSGVYKLQYMHPLCEGSSATLTCVPLGNLIVVNATLKINNEIRSVKRLQLLPESFICKEKLGENVANIYKDLQKLSRLFKDQLVYPLLAFTRQALNLPDVFGLVVLPLELKLRIFRLLDVRSVLSLSAVCRDLFTASNDPLLWRFLYLRDFRDNTVRVQDTDWKELYRKRHIQRKESPKGRFVMLLPSSTHTIPFYPNPLHPRPFPSSRLPPGIIGGEYDQRPTLPYVGDPISSLIPGPGETPSQFPPLRPRFDPVGPLPGPNPILPGRGGPNDRFPFRPSRGRPTDGRLSFM

SEQ ID NO: 12250 - protein, 169 aa, Homo sapiens
MLNKSGESRYPALFPVLGGSSMSSDFPHYNFRMPNIGFQNLPLNIYIVVFGTAIFVFILSLLFCCYLIRLRHQAHKEFYAYKQVILKEKVKELNLHELCAVCLEDFKPRDELGICPCKHAFHRKCLIKWLEVRKVCPLCNMPVLQLAQLHSKQDRGPPQGPLPGAENIV

SEQ ID NO: 12251 - protein, 211 aa, Homo sapiens
MVSRMVSTMLSGLLFWLASGWTPAFAYSPRTPDRVSEADIQRLLHGVMEQLGIARPRVEYPAHQAMNLVGPQSIEGGAHEGLQHLGPFGNIPNIVAELTGDNIPKDFSEDQGYPDPPNPCPVGKTDDGCLENTPDTAEFSREFQLHQHLFDPEHDYPGLGKWNKKLLYEKMKGGERRKRRSVNPYLQGQRLDNVVAKKSVPHFSDEDKDPE

SEQ ID NO: 12252 - protein, 377 aa, Homo sapiens
MAEGNHRKKPLKVLESLGKDFLTGVLDNLVEQNVLNWKEEEKKKYYDAKTEDKVRVMADSMQEKQRMAGQMLLQTFFNIDQISPNKKAHPNMEAGPPESGESTDALKLCPHEEFLRLCKERAEEIYPIKERNNRTRLALIICNTEFDHLPPRNGADFDITGMKELLEGLDYSVDVEENLTARDMESALRAFATRPEHKSSDSTFLVLMSHGILEGICGTVHDEKKPDVLLYDTIFQIFNNRNCLSLKDKPKVIIVQACRGANRGELWVRDSPASLEVASSQSSENLEEDAVYKTHVEKDFIAFCSSTPHNVSWRDSTMGSIFITQLITCFQKYSWCCHLEEVFRKVQQSFETPRAKAQMPTIERLSMTRYFYLFPGN

SEQ ID NO: 12253 - protein, 374 aa, Homo sapiens
MTLDVGPEDELPDWAAAKEFYQKYDPKDVIGRGVSSVVRRCVHRATGHEFAVKIMEVTAERLSPEQLEEVREATRRETHILRQVAGHPHIITLIDSYESSSFMFLVFDLMRKGELFDYLTEKVALSEKETRSIMRSLLEAVSFLHANNIVHRDLKPENILLDDNMQIRLSDFGFSCHLEPGEKLRELCGTPGYLAPEILKCSMDETHPGYGKEVDLWACGVILFTLLAGSPPFWHRRQILMLRMIMEGQYQFSSPEWDDRSSTVKDLISRLLQVDPEARLTAEQALQHPFFERCEGSQPWNLTPRQRFRVAVWTVLAAGRVALSTHRVRPLTKNALLRDPYALRSVRHLIDNCAFRLYGHWIRKQWIGKLMACV

SEQ ID NO: 12254 - protein, 118 aa, Homo sapiens
MWVTKLLPALLLQHVLLHLLLLPIAIPYAEGQRKRRNTIHEFKKSAKTTLIKIDPALKIKTKKVNTADQCANRCTRNKGLPFTCKAFVFDKARKQCLWFPFNSMSSGVKKEFGHEFDL

SEQ ID NO: 12255 - protein, 547 aa, Homo sapiens
MCRLISDFQRHSISDDDSGCASEEYAWVPPGLKPEQVYQFFSCLPEDKVPYVNSPGEKYRIKQLLHQLPPHDSEAQYCTALEEEEKKELRAFSQQRKRENLGRGIVRIFPVTITGAICEECGKQIGGGDIAVFASRAGLGACWHPQCFVCTTCQELLVDLIYFYHVGKVYCGRHHAECLRPRCQACDEIIFSPECTEAEGRHWHMDHFCCFECEASLGGQRYVMRQSRPHCCACYEARHAEYCDGCGEHIGLDQGQMAYEGQHWHASDRCFCCSRCGRALLGRPFLPRRGLIFCSRACSLGSEPTAPGPSRRSWSAGPVTAPLAASTASFSAVKGASETTTKGTSTELAPATGPEEPSRFLRGAPHRHSMPELGLRSVPEPPPESPGQPNLRPDDSAFGRQSTPRVSFRDPLVSEGGPRRTLSAPPAQRRRPRSPPPRAPSRRRHHHHNHHHHHNRHPSRRRHYQCDAGSGSDSESCSSSPSSSSSESSEDDGFFLGERIPLPPHLCRPMPAQDTAMETFNSPSLSLPRDSRAGMPRQARDKNCIVA

SEQ ID NO: 12256 - protein, 762 aa, Homo sapiens
MWSCGRLREITWTSWTTRLLNNAFEELVAFQRALKDFVASIDATYAKQYEEFYVGLEGSFGSKHVSPRTLTSCFLSCVVCVEGIVTKCSLVRPKVVRSVHYCPATKKTIERRYSDLTTLVAFPSSSVYPTKDEENNPLETEYGLSVYKDHQTITIQEMPEKAPAGQLPRSVDVILDDDLVDKAKPGDRVQVVGTYRCLPGKKGGYTSGTFRTVLIACNVKQMSKDAQPSFSAEDIAKIKKFSKTRSKDIFDQLAKSLAPSIHGHDYVKKAILCLLLGGVERDLENGSHIRGDINILLIGDPSVAKSQLLRYVLCTAPRAIPTTGRGSSGVGLTAAVTTDQETGERRLEAGAMVLADRGVVCIDEFDKMSDMDRTAIHEVMEQGRVTIAKAGIHARLNARCSVLAAANPVYGRYDQYKTPMENIGLQDSLLSRFDLLFIMLDQMDPEQDREISDHVLRMHRYRAPGEQDGDAMPLGSAVDILATDDPNFSQEDQQDTQIYEKHDNLLHGTKKKKEKMVSAAFMKKYIHVAKIIKPVLTQESATYIAEEYSRLRSQDSMSSDTARTSPVTARTLETLIRLATAHAKARMSKTVDLQDAEEAVELVQYAYFKKVLEKEKKRKKRSEDESETEDEEEKSQEDQEQKRKRRKTRQPDAKDGDSYDPYDFSDTEEEMPQVHTPKTADSQETKESQKVELSESRLKAFKVALLDVFREAHAQSIGMNRLTESINRDSEEPFSSVEIQAALSKMQDDNQVMVSEGIIFLI

SEQ ID NO: 12257 - protein, 141 aa, Homo sapiens
MQRGDPGEHLGARSWHLGAVGGGGDSCEVKDANSALLSNYETLKYISKTPCRHQSPEIVREFLTALKSHKLTKAEKLQLLNHRPVTAVEIQLMVEESEERLTEEQIEALLHTVTSILPAEPEAEQKKNTNSNVAMDEEDPA

SEQ ID NO: 12258 - protein, 678 aa, Homo sapiens
MAVKVQTTKRGDPHELRNIFLQYASTEVDGERYMTPEDFVQRYLGLYNDPNSNPKIVQLLAGVADQTKDGLISYQEFLAFESVLCAPDSMFIVAFQLFDKSGNGEVTFENVKEIFGQTIIHHHIPFNWDCEFIRLHFGHNRKKHLNYTEFTQFLQELQLEHARQAFALKDKSKSGMISGLDFSDIMVTIRSHMLTPFVEENLVSAAGGSISHQVSFSYFNAFNSLLNNMELVRKIYSTLAGTRKDVEVTKEEFAQSAIRYGQVTPLEIDILYQLADLYNASGRLTLADIERIAPLAEGALPYNLAELQRQQSPGLGRPIWLQIAESAYRFTLGSVAGAVGATAVYPIDLVKTRMQNQRGSGSVVGELMYKNSFDCFKKVLRYEGFFGLYRGLIPQLIGVAPEKAIKLTVNDFVRDKFTRRDGSVPLPAEVLAGGCAGGSQVIFTNPLEIVKIRLQVAGEITTGPRVSALNVLRDLGIFGLYKGAKACFLRDIPFSAIYFPVYAHCKLLLADENGHVGGLNLLAAGAMAGVPAASLVTPADVIKTRLQVAARAGQTTYSGVIDCFRKILREEGPSAFWKGTAARVFRSSPQFGVTLVTYELLQRWFYIDFGGLKPAGSEPTPKSRIADLPPANPDHIGGYRLATATFAGIENKFGLYLPKFKSPSVAVVQPKAAVAATQ

SEQ ID NO: 12259 - protein, 532 aa, Homo sapiens
MALRRLLLLLLLSLESLDLLPSVHGARGRAANRTLSAGGAAVGGRRAGGALARGGRELNGTARAPGIPEAGSRRGQPAAAVAAAASAAVTYETCWGYYDVSGQYDKEFECNNSESGYLYCCGTCYYRFCCKKRHEKLDQRQCTNYQSPVWVQTPSTKVVSPGPENKYDPEKDKTNFTVYITCGVIAFVIVAGVFAKVSYDKAHRPPREMNIHRALADILRQQGPIPIAHCERETISAIDTSPKENTPVRSSSKNHYTPVRTAKQTPGHYGKDAYRSGGPDLHNFISSGFVTLGRGHTKEKPRMNNILTSATEPYDLSFSRSFQNLAHLPPSYESAVKTNPSKYSSLKRLTDKEADEYYMRRRHLPDLAARGTLPLNVIQMSQQKPLPRERPRRPIRAMSQDRVLSPDRGLPDEFSMPYDRILSDEQLLSTERLHSQDPLLSPERTAFPEQSLSRAISHTDVFVSTPVLDRYRMSKMHSHPSASNNSYATLGQSQTAAKRHAFASRRHNTVEQLHYIPGHHTCYTASKTEVTV

SEQ ID NO: 12260 - protein, 275 aa, Homo sapiens
MSSFGYRTLTVALFTLICCPGSDEKVFEVHVRPKKLAVEPKGSLEVNCSTTCNQPEVGGLETSLDKILLDEQAQWKHYLVSNISHDTVLQCHFTCSGKQESMNSNVSVYQPPRQVILTLQPTLVAVGKSFTIECRVPTVEPLDSLTLFLFRGNETLHYETFGKAAPAPQEATATFNSTADREDGHRNFSCLAVLDLMSRGGNIFHKHSAPKMLEIYEPVSDSQMVIIVTVVSVLLSLFVTSVLLCFIFGQHLRQQRMGTYGVRAAWRRLPQAFRP

SEQ ID NO: 12261 - protein, 363 aa, Homo sapiens
MSKLWRRGSTSGAMEAPEPGEALELSLAGAHGHGVHKKKHKKHKKKHKKKHHQEEDAGPTQPSPAKPQLKLKIKLGGQVLGTKSVPTFTVIPEGPRSPSPLMVVDNEEEPMEGVPLEQYRAWLDEDSNLSPSPLRDLSGGLGGQEEEEEQRWLDALEKGELDDNGDLKKEINERLLTARQRALLQKARSQPSPMLPLPVAEGCPPPALTEEMLLKREERARKRRLQAARRAEEHKNQTIERLTKTAATSGRGGRGGARGERRGGRAAAPAPMVRYCSGAQGSTLSFPPGVPAPTAVSQRPSPSGPPPRCSVPGCPHPRRYACSRTGQALCSLQCYRINLQMRLGGPEGPGSPLLATFESCAQE

SEQ ID NO: 12262 - protein, 801 aa, Homo sapiens
MNLQPIFWIGLISSVCCVFAQTDENRCLKANAKSCGECIQAGPNCGWCTNSTFLQEGMPTSARCDDLEALKKKGCPPDDIENPRGSKDIKKNKNVTNRSKGTAEKLKPEDITQIQPQQLVLRLRSGEPQTFTLKFKRAEDYPIDLYYLMDLSYSMKDDLENVKSLGTDLMNEMRRITSDFRIGFGSFVEKTVMPYISTTPAKLRNPCTSEQNCTSPFSYKNVLSLTNKGEVFNELVGKQRISGNLDSPEGGFDAIMQVAVCGSLIGWRNVTRLLVFSTDAGFHFAGDGKLGGIVLPNDGQCHLENNMYTMSHYYDYPSIAHLVQKLSENNIQTIFAVTEEFQPVYKELKNLIPKSAVGTLSANSSNVIQLIIDAYNSLSSEVILENGKLSEGVTISYKSYCKNGVNGTGENGRKCSNISIGDEVQFEISITSNKCPKKDSDSFKIRPLGFTEEVEVILQYICECECQSEGIPESPKCHEGNGTFECGACRCNEGRVGRHCECSTDEVNSEDMDAYCRKENSSEICSNNGECVCGQCVCRKRDNTNEIYSGKFCECDNFNCDRSNGLICGGNGVCKCRVCECNPNYTGSACDCSLDTSTCEASNGQICNGRGICECGVCKCTDPKFQGQTCEMCQTCLGVCAEHKECVQCRAFNKGEKKDTCTQECSYFNITKVESRDKLPQPVQPDPVSHCKEKDVDDCWFYFTYSVNGNNEVMVHVVENPECPTGPDIIPIVAGVVAGIVLIGLALLLIWKLLMIIHDRREFAKFEKEKMNAKWDTQENPIYKSPINNFKNPNYGRKAGL

SEQ ID NO: 12263 - protein, 576 aa, Homo sapiens
MLQTVWFQGLGRNLLFQEPVTFEDVAVYFTQNEWASLHPTQRALYREVMLENYANVTSLSAFPFPKPDLIFQLEQGEAAWGPDPWTLAGGEALRGMCTGGKTKTENEEKTAQLNISKESESHRLIVEGLLMDVPQHPDFKDRLEKSQLHDTGNKTKIGDCTDLTVQDHESSTTEREEIARKLEESSVSTHLITKQGFAKEQVFYKCGECGSYYNPHSDFHLHQRVHTNEKPYTCKECGKTFRYNSKLSRHQKIHTGEKPYSCEECGQAFSQNSHLLQHQKLHGGQRPYECTDCGKTFSYNSKLIRHQRIHTGEKPFKCKECGKAFSCSYDCIIHERIHNGEKPYECKECGKSLSSNSVLIQHQRIHTGEKPYECKECGKAFHRSSVFLQHQRFHTGEQLYKCNECWKTFSCSSRFIVHQRIHNGEKPYECQECGKTFSQKITLVQHQRVHTGEKPYECKECGKAFRWNASFIQHQKWHTRKKLINGTGLSAVKPYCPCAILSPLPPQHTCSALAPPGPPLSSSHAVVLPPSVPFFLLLPSSEKANPSPVQIAHFFQDLAFPGKSSLQSPNPLSHSL

SEQ ID NO: 12264 - protein, 154 aa, Homo sapiens
MALLILLLVPLLLPDSGSEAYSGCEFFKEYKDRDYMAEGLIFNWKQDYVDAPLSIPDFLTHSLNIDWSQYQCWDLVQQTQNYLKLLLSLVNSDDDSGLLVHCISGWDRTPLFISLLRLSLWADGLIHTSLKPTEILYLTVAYDWFLFGHMLVDR

SEQ ID NO: 12265 - protein, 372 aa, Homo sapiens
MAYHSFLVEPISCHAWNKDRTQIAICPNNHEVHIYEKSGAKWTKVHELKEHNGQVTGIDWAPESNRIVTCGTDRNAYVWTLKGRTWKPTLVILRINRAARCVRWAPNENKFAVGSGSRVISICYFEQENDWWVCKHIKKPIRSTVLSLDWHPNNVLLAAGSCDFKCRIFSAYIKEVEERPAPTPWGSKMPFGELMFESSSSCGWVHGVCFSASGSRVAWVSHDSTVCLADADKKMAVATLASETLPLLALTFITDNSLVAAGHDCFPVLFTYDAAAGMLSFGGRLDVPKQSSQRGLTARERFQNLDKKASSEGGTAAGAGLDSLHKNSVSQISVLSGGKAKCSQFCTTGMDGGMSIWDVKSLESALKDLKIK

SEQ ID NO: 12266 - protein, 115 aa, Homo sapiens
MVSRKAVAALLVVHVAAMLASQTEAFVPIFTYGELQRMQEKERNKGQKKSLSVWQRSGEEGPVDPAEPIREEENEMIKLTAPLEIGMRMNSRQLEKYPATLEGLLSEMLPQHAAK

SEQ ID NO: 12267 - protein, 237 aa, Homo sapiens
MKRLTCFFICFFLSEVSGFEIPINGLSERSLPGESEEMMEEVDQVTLYSYKVQSTITSRMATTMIQSKVVNNSPQPQNVVFDVQIPKGAFISNFSMTVDGKTFRSSIKEKTVGRALYAQARAKGKTAGLVRSSALDMENFRTEVNVLPGAKVQFELHYQEVKWRKLGSYEHRIYLQPGRLAKHLEVDVWVIEPQGLRFLHVPDTFEGHFDGVPVISKGQQKAHVSFKPTVAQQRICP

SEQ ID NO: 12268 - protein, 539 aa, Homo sapiens
MAELTVEVRGSNGAFYKGFIKDVHEDSLTVVFENNWQPERQVPFNEVRLPPPPDIKKEISEGDEVEVYSRANDQEPCGWWLAKVRMMKGEFYVIEYAACDATYNEIVTFERLRPVNQNKTVKKNTFFKCTVDVPEDLREACANENAHKDFKKAVGACRIFYHPETTQLMILSASEATVKRVNILSDMHLRSIRTKLMLMSRNEEATKHLECTKQLAAAFHEEFVVREDLMGLAIGTHGSNIQQARKVPGVTAIELDEDTGTFRIYGESADAVKKARGFLEFVEDFIQVPRNLVGKVIGKNGKVIQEIVDKSGVVRVRIEGDNENKLPREDGMVPFVFVGTKESIGNVQVLLEYHIAYLKEVEQLRMERLQIDEQLRQIGSRSYSGRGRGRRGPNYTSGYGTNSELSNPSETESERKDELSDWSLAGEDDRDSRHQRDSRRRPGGRGRSVSGGRGRGGPRGGKSSISSVLKDPDSNPYSLLDNTESDQTADTDASESHHSTNRRRRSRRRRTDEDAVLMDGMTESDTASVNENGLGKRCD

SEQ ID NO: 12269 - protein, 117 aa, Homo sapiens
MRMSVGLSLLLPLSGRTFLLLLSVVMAQSHWPSEPSEAVRDWENQLEASMHSVLSDLHEAVPTVVGIPDGTAVVGRSFRVTIPTDLIASSGDIIKVSAAGKEALPSWLHWDSQSHTL

SEQ ID NO: 12270 - protein, 185 aa, Homo sapiens
MPGWLTLPTLCRFLLWAFTIFHKAQGDPASHPGPHYLLPPIHEVIHSHRGATATLPCVLGTTPPSYKVRWSKVEPGELRETLILITNGLHARGYGPLGGRARMRRGHRLDASLVIAGVRLEDEGRYRCELINGIEDESVALTLSLEGVVFPYQPSRGRYQFNYYEAKQACEEQDGRLATYSQLYQ

SEQ ID NO: 12271 - protein, 301 aa, Homo sapiens
MAVTDSLSRAATVLATVLLLSFGSVAASHIEVTVENFLRVLTGRIPPSTPRSKRLLSDDRSNILIYMTGHGGNGFLKFQDSEEITNIELADAFEQMWQKRRYNELLFIIDTCQGASMYERFYSPNIMALASSQVGEDSLSHQPDPAIGVHLMDRYTFYVLEFLEEINPASQTNMNDLFQVCPKSLCVSTPGHRTDLFQRDPKNVLITDFFGSVRKVEITTETIKLQQDSEIMESSYKEDQMDEKLMEPLKYAEQLPVAQIIHQKPKLKDWHPPGGFILGLWALIIMVFFKTYGIKHMKFIF

SEQ ID NO: 12272 - protein, 325 aa, Homo sapiens
MIIVAHVLLILLGATEILQADLLPDEKISLLPPVNFTIKVTGLAQVLLQWKPNPDQEQRNVNLEYQVKINAPKEDDYETRITESKCVTILHKGFSASVRTILQNDHSLLASSWASAELHAPPGSPGTSIVNLTCTTNTTEDNYSRLRSYQVSLHCTWLVGTDAPEDTQYFLYYRYGSWTEECQEYSKDTLGRNIACWFPRTFILSKGRDWLAVLVNGSSKHSAIRPFDQLFALHAIGNDEHKPLREWFVIVIMATICFILLILSLICKICHLWIKLFPPIPAPKSNIKDLFVTTNYEKAGSSETEIEVICYIEKPGVETLEDSVF

SEQ ID NO: 12273 - protein, 293 aa, Homo sapiens
MESRGPLATSRLLLLLLLLLLRHTRQGWALRPVLPTQSAHDPPAVHLSNGPGQEPIAVMTFDLTKITKTSSSFEVRTWDPEGVIFYGDTNPKDDWFMLGLRDGRPEIQLHNHWAQLTVGAGPRLDDGRWHQVEVKMEGDSVLLEVDGEEVLRLRQVSGPLTSKRHPIMRIALGGLLFPASNLRLPLVPALDGCLRRDSWLDKQAEISASAPTSLRSCDVESNPGIFLPPGTQAEFNLRDIPQPHAEPWAFSLDLGLKQAAGSGHLLALGTPENPSWLSLHLQDQEKTLPPLFA

SEQ ID NO: 12274 - protein, 1309 aa, Homo sapiens
MLLNGDCPESLKKEAAAAEPPRENGLDEAGPGDETTGQEVIVIQDTGFSVKILAPGIEPFSLQVSPQEMVQEIHQVLMDREDTCHRTCFSLHLDGNVLDHFSELRSVEGLQEGSVLRVVEEPYTVREARIHVRHVRDLLKSLDPSDAFNGVDCNSLSFLSVFTDGDLGDSGKRKKGLEMDPIDCTPPEYILPGSRERPLCPLQPQNRDWKPLQCLKVLTMSGWNPPPGNRKMHGDLMYLFVITAEDRQVSITASTRGFYLNQSTAYHFNPKPASPRFLSHSLVELLNQISPTFKKNFAVLQKKRVQRHPFERIATPFQVYSWTAPQAEHAMDCVRAEDAYTSRLGYEEHIPGQTRDWNEELQTTRELPRKNLPERLLRERAIFKVHSDFTAAATRGAMAVIDGNVMAINPSEETKMQMFIWNNIFFSLGFDVRDHYKDFGGDVAAYVAPTNDLNGVRTYNAVDVEGLYTLGTVVVDYRGYRVTAQSIIPGILERDQEQSVIYGSIDFGKTVVSHPRYLELLERTSRPLKILRHQVLNDRDEEVELCSSVECKGIIGNDGRHYILDLLRTFPPDLNFLPVPGEELPEECARAGFPRAHRHKLCCLRQELVDAFVEHRYLLFMKLAALQLMQQNASQLETPSSLENGGPSSLESKSEDPPGQEAGSEEEGSSASGLAKVKELAETIAADDGTDPRSREVIRNACKAVGSISSTAFDIRFNPDIFSPGVRFPESCQDEVRDQKQLLKDAAAFLLSCQIPGLVKDCMEHAVLPVDGATLAEVMRQRGINMRYLGKVLELVLRSPARHQLDHVFKIGIGELITRSAKHIFKTYLQGVELSGLSAAISHFLNCFLSSYPNPVAHLPADELVSKKRNKRRKNRPPGAADNTAWAVMTPQELWKNICQEAKNYFDFDLECETVDQAVETYGLQKITLLREISLKTGIQVLLKEYSFDSRHKPAFTEEDVLNIFPVVKHVNPKASDAFHFFQSGQAKVQQGFLKEGCELINEALNLFNNVYGAMHVETCACLRLLARLHYIMGDYAEALSNQQKAVLMSERVMGTEHPNTIQEYMHLALYCFASSQLSTALSLLYRARYLMLLVFGEDHPEMALLDNNIGLVLHGVMEYDLSLRFLENALAVSTKYHGPKALKVALSHHLVARVYESKAEFRSALQHEKEGYTIYKTQLGEDHEKTKESSEYLKCLTQQAVALQRTMNEIYRNGSSANIPPLKFTAPSMASVLEQLNVINGILFIPLSQKDLENLKAEVARRHQLQEASRNRDRAEEPMATEPAPAGAPGDLGSQPPAAKDPSPSVQG

SEQ ID NO: 12275 - protein, 1211 aa, Homo sapiens
MGRHVATSCHVAWLLVLISGCWGQVNRLPFFTNHFFDTYLLISEDTPVGSSVTQLLAQDMDNDPLVFGVSGEEASRFFAVEPDTGVVWLRQPLDRETKSEFTVEFSVSDHQGVITRKVNIQVGDVNDNAPTFHNQPYSVRIPENTPVGTPIFIVNATDPDLGAGGSVLYSFQPPSQFFAIDSARGIVTVIRELDYETTQAYQLTVNATDQDKTRPLSTLANLAIIITDVQDMDPIFINLPYSTNIYEHSPPGTTVRIITAIDQDKGRPRGIGYTIVSGNTNSIFALDYISGVLTLNGLLDRENPLYSHGFILTVKGTELNDDRTPSDATVTTTFNILVIDINDNAPEFNSSEYSVAITELAQVGFALPLFIQVVDKDENLGLNSMFEVYLVGNNSHHFIISPTSVQGKADIRIRVAIPLDYETVDRYDFDLFANESVPDHVGYAKVKITLINENDNRPIFSQPLYNISLYENVTVGTSVLTVLATDNDAGTFGEVSYFFSDDPDRFSLDKDTGLIMLIARLDYELIQRFTLTIIARDGGGEETTGRVRINVLDVNDNVPTFQKDAYVGALRENEPSVTQLVRLRATDEDSPPNNQITYSIVSASAFGSYFDISLYEGYGVISVSRPLDYEQISNGLIYLTVMAMDAGNPPLNSTVPVTIEVFDENDNPPTFSKPAYFVSVVENIMAGATVLFLNATDLDRSREYGQESIIYSLEGSTQFRINARSGEITTTSLLDRETKSEYILIVRAVDGGVGHNQKTGIATVNITLLDINDNHPTWKDAPYYINLVEMTPPDSDVTTVVAVDPDLGENGTLVYSIQPPNKFYSLNSTTGKIRTTHAMLDRENPDPHEAELMRKIVVSVTDCGRPPLKATSSATVFVNLLDLNDNDPTFQNLPFVAEVLEGIPAGVSIYQVVAIDLDEGLNGLVSYRMPVGMPRMDFLINSSSGVVVTTTELDRERIAEYQLRVVASDAGTPTKSSTSTLTIHVLDVNDETPTFFPAVYNVSVSEDVPREFRVVWLNCTDNDVGLNAELSYFITGGNVDGKFSVGYRDAVVRTVVGLDRETTAAYMLILEAIDNGPVGKRHTGTATVFVTVLDVNDNRPIFLQSSYEASVPEDIPEGHSILQEDLASPCISPAPPRRAFQSSGEKETSQFPGKELRREPGPSKAQNRAAFTEPLAEAPLLGSKQAQEERAPLPREQAQQLQGSEGEKGGP

SEQ ID NO: 12276 - protein, 687 aa, Homo sapiens
MGTENTPGGKASPDPQDVRPSVFHNIKLFVLCHSLLQLAQLMISGYLKSSISTVEKRFGLSSQTSGLLASFNEVGNTALIVFVSYFGSRVHRPRMIGYGAILVALAGLLMTLPHFISEPYRYDNTSPEDMPQDFKASLCLPTTSAPASAPSNGNCSSYTETQHLSVVGIMFVAQTLLGVGGVPIQPFGISYIDDFAHNSNSPLYLGILFAVTMMGPGLAFGLGSLMLRLYVDINQMPEGGISLTIKDPRWVGAWWLGFLIAAGAVALAAIPYFFFPKEMPKEKRELQFRRKVLAVTDSPARKGKDSPSKQSPGESTKKQDGLVQIAPNLTVIQFIKVFPRVLLQTLRHPIFLLVVLSQVCLSSMAAGMATFLPKFLERQFSITASYANLLIGCLSFPSVIVGIVVGGVLVKRLHLGPVGCGALCLLGMLLCLFFSLPLFFIGCSSHQIAGITHQTSAHPGLELSPSCMEACSCPLDGFNPVCDPSTRVEYITPCHAGCSSWVVQDALDNSQVFYTNCSCVVEGNPVLAGSCDSTCSHLVVPFLLLVSLGSALACLTHTPSFMLILRGVKKEDKTLAVGIQFMFLRILAWMPSPVIHGSAIDTTCVHWALSCGRRAVCRYYNNDLLRNRFIGLQFFFKTGSVICFALVLAVLRQQDKEARTKESRSSPAVEQQLLVSGPGKKPEDSRV

SEQ ID NO: 12277 - protein, 289 aa, Homo sapiens
MFVLLYVTSFAICASGQPRGNQLKGENYSPRYICSIPGLPGPPGPPGANGSPGPHGRIGLPGRDGRDGRKGEKGEKGTAGLRGKTGPLGLAGEKGDQGETGKKGPIGPEGEKGEVGPIGPPGPKGDRGEQGDPGLPGVCRCGSIVLKSAFSVGITTSYPEERLPIIFNKVLFNEGEHYNPATGKFICAFPGIYYFSYDITLANKHLAIGLVHNGQYRIKTFDANTGNHDVASGSTVIYLQPEDEVWLEIFFTDQNGLFSDPGWADSLFSGFLLYVDTDYLDSISEDDEL

SEQ ID NO: 12278 - protein, 188 aa, Homo sapiens
MRPFFLLCFALPGLLHAQQACSRGACYPPVGDLLVGRTRFLRASSTCGLTKPETYCTQYGEWQMKCCKCDSRQPHNYYSHRVENVASSSGPMRWWQSQNDVNPVSLQLDLDRRFQLQEVMMEFQGPMPAGMLIERSSDFGKTWRVYQYLAADCTSTFPRVRQGRPQSWQDVRCQSLPQRPNARLNGGK

SEQ ID NO: 12279 - protein, 859 aa, Homo sapiens
MDFTLGDWEQLGLEQGDTFWDTALDNCQDLFLLDPPRPNLTSHPDGSEDLEPLAGGSPEATSPDVTETKNSPLMEDFFEEGFSQEIIEMLSKDGFWNSNFGEACIEDTWLDSLLGDPESLLRSDIATNGESPTECKSHELKRGLSPVSTVSTGEDSMVHNVSEKTLTPAKSKEYRGEFFSYSDHSQQDSVQEGEKPYQCSECGKSFSGSYRLTQHWITHTREKPTVHQECEQGFDRNASLSVYPKTHTGYKFYVCNEYGTTFSQSTYLWHQKTHTGEKPCKSQDSDHPPSHDTQPGEHQKTHTDSKSYNCNECGKAFTRIFHLTRHQKIHTRKRYECSKCQATFNLRKHLIQHQKTHAAKTTSECQECGKIFRHSSLLIEHQALHAGEEPYKCNERGKSFRHNSTLKIHQRVHSGEKPYKCSECGKAFHRHTHLNEHRRIHTGYRPHKCQECVRSFSRPSHLMRHQAIHTAEKPYSCAECKETFSDNNRLVQHQKMHTVKTPYECQECGERFICGSTLKCHESVHAREKQGFFVSGKILDQNPEQKEKCFKCNKCEKTFSCSKYLTQHERIHTRGVKPFECDQCGKAFGQSTRLIHHQRIHSRVRLYKWGEQGKAISSASLIKLQSFHTKEHPFKCNECGKTFSHSAHLSKHQLIHAGENPFKCSKCDRVFTQRNYLVQHERTHARKKPLVCNECGKTFRQSSCLSKHQRIHSGEKPYVCDYCGKAFGLSAELVRHQRIHTGEKPYVCQECGKAFTQSSCLSIHRRVHTGEKPYRCGECGKAFAQKANLTQHQRIHTGEKPYSCNVCGKAFVLSAHLNQHLRVHTQETLYQCQRCQKAFRCHSSLSRHQRVHNKQQYCL

SEQ ID NO: 12280 - protein, 182 aa, Homo sapiens
MSRYLRPPNTSLFVRNVADDTRSEDLRREFGRYGPIVDVYVPLDFYTRRPRGFAYVQFEDVRDAEDALHNLDRKWICGRQIEIQFAQGDRKTPNQMKAKEGRNVYSSSRYDDYDRYRRSRSRSYERRRSRSRSFDYNYRRSYSPRNRPTGRPRRSRSHSDNDRPNCSWNTQYSSAYYTSRKI

SEQ ID NO: 12281 - protein, 435 aa, Homo sapiens
MSASAVYVLDLKGKVLICRNYRGDVDMSEVEHFMPILMEKEEEGMLSPILAHGGVRFMWIKHNNLYLVATSKKNACVSLVFSFLYKVVQVFSEYFKELEEESIRDNFVIIYELLDELMDFGYPQTTDSKILQEYITQEGHKLETGAPRPPATVTNAVSWRSEGIKYRKNEVFLDVIESVNLLGKYPGVGWLGHTVSANGNVLRSEIVGSIKMRVFLSGMPELRLGLNDKVLFDNTGRGKSKSVELEDVKFHQCVRLSRFENDRTISFIPPDGEFELMSYRLNTHVKPLIWIESVIEKHSHSRIEYMIKAKSQFKRRSTANNVEIHIPVPNDADSPKFKTTVGSVKWVPENSEIVWSIKSFPGGKEYLMRAHFGLPSVEAEDKEGKPPISVKFEIPYFTTSGIQVRYLKIIEKSGYQALPWVRYITQNGDYQLRTQ

SEQ ID NO: 12282 - protein, 267 aa, Homo sapiens
MPPSGPRGTLLLLPLLLLLLLRAVLAVPLERGAPNKEETPATESPDTGLYYHRYLQEVIDVLETDGHFREKLQAANAEDIKSGKLSRELDFVSHHVRTKLDELKRQEVSRLRMLLKAKMDAEQDPNVQVDHLNLLKQFEHLDPQNQHTFEARDLELLIQTATRDLAQYDAAHHEEFKRYEMLKEHERRRYLESLGEEQRKEAERKLEEQQRRHREHPKVNVPGSQAQLKEVWEELDGLDPNRDLTHPVLGPLRYLAILFPSDINSDG

SEQ ID NO: 12283 - protein, 3197 aa, Homo sapiens
MEIRLEILTSTGIKQKKPWPRVSWLGKEKEAVFLLDDKFINEINLLSGKIKKKIPSLQPFLKDVIVLTTSSNDAWLAGVLTTGELFLWNKDQDCLKTIPITEKPKEMIKATVASSLRLYLYVSGNGKRIVLITPSGCIFLWEYLELKNILSSKSLSLAGRWSQVIPEEAVLLPSTEDKEAVVNAVFIKNELFGDCCLCSFTFYSGECLKLTFLAIRWHENVFTSVRSLPYHVHWAQQDCHLCSLIPKCESVKSRGALISAFSRDGLTLAVTLNQKDPKATQVLFINTLNFVTLCGSLKGCSNKSPVVPATLIRSYWVGDISWTHDSLFLACMLKRGSLVLLTCQGELLTLITFGCSIEFGPAEFIPLHPLITYRPQQFTFQDSNNSVDSSASDSDPMRQRFSIKAHSRLPYLVISDGYMVTTLRFLDSLSPSVHMRSLLLDSTQRLEKIYQSVILSKPKGKGLNLRSLNSLRSSLLEHQGNESSADFTVPKFLQAEETINENAADFQDFEAEETNEGRHFPDNLCPFWNKRDDVLCSSMKEGRLEFASMFDTIHAKDDSEETDRTITELHSIQKSLLAAWTIGISKTVTEKNLMLNYIVVCITHFFYILQFIKCPFPKLDLVLSKSSRHNAWILCIFQLFHQCLSIHYWDIRYKQDVGHLIKLTSNTVKLLLTQQQKGQLFSEKLLACFYLLKMVADNLNGVYILQPEVISASADGSKITAQDSLVVPIFQMFQDSGFQKNWSWNSFFKIHPQVVNPVQQPGHRLLILWRILYKKTLWYQAQLNRRVPEADSQLTEKMTHEASTVKSLLCHLQANLQSTGDCLNQTLELKSINGEECFLLGSYEKSVQLWKKALQEIEEKGGRRTYFLQIRYYLSLLYCHLYSYNLNDAQGLCDQLAREILRWSQLPVKENKDFSGAAKSHFECGMVGGVHPEAAVRVVQSMARFMAAYFTNQQLCILPPHHVNVLPPLHIKTEQSFRLIPLQHSKVASVVRDQNLSNVWTVEYALELLFIGGLVPEAVWLAYKLGDWKTSVSIGVAFQLFCKRDSNFMRSKKKSLNLPLRMTPAQIFQEKLQCVLGQPASLEAKNEMGSKYKQFTDPIEEEDANLLFGSVQEVLKASVMADADILSETFQLLIDSAKDFSKRLWGLVPFGLYLPAPPLYCPQPAILSEEDGDDLLLKAEKNNRQKVSGILQRVLLLFRAAQCSFPVAQWYILQLRWARKVMQKIRMKGSLPSLSPFPQSLLNYCKGGIAFFRPGAAGDHKLDEVSIRAIGCFRELCALCWMLHVRDKLSYSCRQYQKARENVKGEKDLEVEFDSCMIEHCLSAVEWAYRMLPFSRFFNMEELIQDIILSLIGELPPIRKVAEIFVKAFPYPEDVRVPLRDKYHSLHQRLRHCVVKGPQTEEMMSVVMHSIQKVRVKALKRVQRNIGSFEVNIWEPIEEEKPDEAPGVDRYSLGTSLSRSTLTELGDSVVHSDADTFSEALSVEEKSRINIYQRNAPNHMELTSIHKPTDKRKMCNQKENPTKKEDHEKLSQNTLPVIGVWEFERDDDEYIKFLDLFLSYILERDLPYSRDADIPFLTSFSGKLREHELNSLLFDVHTTLKRHQSKTKSQNVFRAGSCFVVAPESYESEKSSSLNDEYGMHLENQKLSSSVLVNQGIKPFLQYPSNEVNKNEGMSGLFGLKQRSIYKIQDDTREKCLIQRSSNHIFWTPKSIKTRRCIFKAIQCNDINPQEDLPLALNTFGSIGRLLEWMIRWSNRRLLCDSGITESSSEYSPVIRVKTSTAAILTSLWLLEQPYFATYKAKNAIIKMVENRDTGCQIGPNIERESKSDAGGSVAVATPGGTEERNGQNKSCQNILNRMPTEAKNPDIKEINDDIISITHNTKKEFIDIDENLLEVEAFTEEEMDMHISDYEEDIEESVGGFRSPSLAICMMTLPQQLEEEFTEEVQCQREEPLETIMEEKSTEQKGMIEAFSHPGHTTPQSMQVDTSSEISSAQISTYKEKSSSVPLLISNGVNVASQPPAPTPQKTQRNEFTAQLPDCSESVRQMLQDEMFKLVQLQQINFMSLMQIVGSSFANLPDTQQLVQQSQSVHLGESQESNLRGCGDVEDSNKNLKERFFIKPQSMGENAREPRKNSPHCHEGTIPSGQNSTGNVQNVPHGSIPLCQLNGQPRKKGPIPSSQNLPSTSFYPAPAGNTHLYLLSTPSVVQKAPRLIPHAKTFSPGDGFPLLQFKSKQEFQPLFLHTGSIPQVPFRPLPQPREAWGLSDSFQPALPQRAAQTTPASHLNVSQYNTEARKKEVEQKTWAETVITEIPNHVNLDQYVGQENLTPQQDSSVFIKPEKLFDVKPGTLEISPHHSFGLPLLYLPLKPPNMFPSTSRASITVPSTPIQPIAEERKYPRLSLLHSHLSPENRCKKTQLIPLENLIAFKQSQQKLTHNLFEQGDAGHLQLLKVKIEPPEVRQGKDSKKRQRRRAEKELQEKRCEKLRRKPNVTFRPENSIINNDDSEIIKKPKEQQEHCGSHPLDDFDVPFEMLQDDNTSAGLHFMASVKKKAIGSQDASTNTDPEHEPLTAPQLLVPDVYLNLKLSSEMSEKPWSPSIPHTVTNLELPVREEPSNDNVIKQQSDHLAVPSSAELHYMAASVTNAVPPHNFKSQGLPKPEFRFKGQSTKSDSAEDYLLWKRLQGVSAACPAPSSAAHQLEHLSAKLQKIDEQLLAIQNIAENIEQDFPKPEMLDLHCDKIGPVDHIEFSSGPEFKKTLASKTISISEEVRFLTHMDEEDQSDKKETSEPEFSITENYSGQKTCVFPTADSAVSLSSSSDQNTTSPGMNSSDELCESVSVHPLQMTGLTDIADIIDDLIIKDGVSSEELGLTEQAMGTSRIQHYSGRHSQRTDKERREIQAWMKRKRKERMAKYLNELAEKRGQEHDPFCPRSNPLYMTSREIRLRQKMKHEKDRLLLSEHYSRRISQAYGLMNELLSESVQLPTLPQKPLPNKPSPTQSSSCQHCPSPRGENQHGHSFLINRPGKVKYMSKPSYIHKRKSFGQPQGSPWPHGTATFTIQKKAGGAKAAVRKATQSPVTFQKGSNAPCHSLQHTKKHGSAGLAPQTKQVCVEYEREETVVSPWTIPSEIHKILHESHNSLLQDLSPTEEEEPEHPFGVGGVDSVSESTGSILSKLDWNAIEDMVASVEDQGLSVHWALDL

SEQ ID NO: 12284 - protein, 199 aa, Homo sapiens
MAPPQVLAFGLLLAAATATFAAAQEGEARIGAELWSWAGLGGSGPRPSAPETGIIGRGPRGRAFQRGDRTVRPCSGSGPPRGRKRRGPSRGAASLRSFARLECVCENYKLAVNCFVNNNRQCQCTSVGAQNTVICSKLAAKCLVMKAEMNGSKLGRRAKPEGALQNNDGLYDPDCDESGLFKAKQCNGTSMCWCVNTAG

SEQ ID NO: 12285 - protein, 825 aa, Homo sapiens
MGLGKTCQTIALFIYLAGRLNDEGPFLILCPLSVLSNWKEEMQRFAPGLSCVTYAGDKEERACLQQDLKQESRFHVLLTTYEICLKDASFLKSFPWSVLVVDEAHRLKNQSSLLHKTLSEFSVVFSLLLTGTPIQNSLQELYSLLSFVEPDLFSKEEVGDFIQRYQDIEKESESASELHKLLQPFLLRRVKAEVATELPKKTEVVIYHGMSALQKKYYKAILMKDLDAFENETAKKVKLQNILSQLRKCVDHPYLFDGVEPEPFEVGDHLTEASGKLHLLDKLLAFLYSGGHRVLLFSQMTQMLDILQDYMDYRGYSYERVDGSVRGEERHLAIKNFGQQPIFVFLLSTRAGGVGMNLTAADTVIFVDSDFNPQNDLQAAARAHRIGQNKSVKVIRLIGRDTVEEIVYRKAASKLQLTNMIIEGGHFTLGAQKPAADADLQLSEILKFGLDKLLASEGSTMDEIDLESILGETKDGQWVSDALPAAEGGSRDQEEGKNHMYLFEGKDYSKEPSKEDRKSFEQLVNLQKTLLEKASQEGRSLRNKGSVLIPGLVEGSTKRKRVLSPEELEDRQKKRQEAAAKRRRLIEEKKRQKEEAEHKKKMAWWESNNYQSFCLPSEESEPEDLENGEESSAELDYQDPDATSLKYVSGDVTHPQAGAEDALIVHCVDDSGHWGRGGLFTALEKRSAEPRKIYELAGKMKDLSLGGVLLFPVDDKESRNKGQDLLALIVAQHRDRSNVLSGIKMAALEEGLKKIFLAAKKKKASVHLPRIGHATKGFNWYGTERLIRKHLAARGIPTYIYYFPRSKSAVLHSQSSSSSSRQLVP

SEQ ID NO: 12286 - protein, 229 aa, Homo sapiens
MTPGTQSPFFLLLLLTVLTVVTGSGHASSTPGGEKETSATQRSSVPSSTEKNAIYKQGGFLGLSNIKFRPGSVVVQLTLAFREGTINVHDVETQFNQYKTEAASRYNLTISDVSVSDVPFPFSAQSGAGVPGWGIALLVLVCVLVALAIVYLIALAVCQCRRKNYGQLDIFPARDTYHPMSEYPTYHTHGRYVPPSSTDRSPYEKVSAGNGGSSLSYTNPAVAATSANL

SEQ ID NO: 12287 - protein, 156 aa, Homo sapiens [sequence omitted]

SEQ ID NO: 12288 - protein, 226 aa, Homo sapiens
MRAPPLLLLLAACAPPPCAAAAPTPPGWEPTPDAPWCPYKVLPEGPEAGGGRLCFRSPARGFRCQAPGCVLHAPAGRSLRASVLRNRSVLLQWRLAPAAARRVRAFALNCSWRGAYTRFPCERVLLGASCRDYLLPDVHDSVLYRLCLQPLPLRAGPAAAAPETPEPAECVEFTAEPAGMQDIVVAMTAVGGSICVMLVVICLLVAYITENLMRPALARPGLRRHP

SEQ ID NO: 12289 - protein, 551 aa, Homo sapiens
MSWGTELWDQFDNLEKHTQWGIDILEKYIKFVKERTEIELSYAKQLRNLSKKYQPKKNSKEEEEYKYTSCKAFISNLNEMNDYAGQHEVISENMASQIIVDLARYVQELKQERKSNFHDGRKAQQHIETCWKQLESSKRRFERDCKEADRAQQYFEKMDADINVTKADVEKARQQAQIRHQMAEDSKADYSSILQKFNHEQHEYYHTHIPNIFQKIQEMEERRIVRMGESMKTYAEVDRQVIPIIGKCLDGIVKAAESIDQKNDSQLVIEAYKSGFEPPGDIEFEDYTQPMKRTVSDNSLSNSRGEGKPDLKFGGKSKGKLWPFIKKNKGATPEDFSNLPPEQRRKKLQQKVDELNKEIQKEMDQRDAITKMKDVYLKNPQMGDPASLDHKLAEVSQNIEKLRVETQKFEAWLAEVEGRLPARSEQARRQSGLYDSQNPPTVNNCAQDRESPDGSYTEEQSQESEMKVLATDFDDEFDDEEPLPAIGTCKALYTFEGQNEGTISVVEGETLYVIEEDKGDGWTRIRRNEDEEGYVPTSYVEVCLDKNAKDS

SEQ ID NO: 12290 - protein, 639 aa, Homo sapiens
MLLPLLLSSLLGGSQAMDGRFWIRVQESVMVPEGLCISVPCSFSYPRQDWTGSTPAYGYWFKAVTETTKGAPVATNHQSREVEMSTRGRFQLTGDPAKGNCSLVIRDAQMQDESQYFFRVERGSYVRYNFMNDGFFLKVTVLSFTPRPQDHNTDLTCHVDFSRKGVSAQRTVRLRVAYAPRDLVISISRDNTPALEPQPQGNVPYLEAQKGQFLRLLCAADSQPPATLSWVLQNRVLSSSHPWGPRPLGLELPGVKAGDSGRYTCRAENRLGSQQRALDLSVQYPPENLRVMVSQANRTVLENLGNGTSLPVLEGQSLCLVCVTHSSPPARLSWTQRGQVLSPSQPSDPGVLELPRVQVEHEGEFTCHARHPLGSQHVSLSLSVHYSPKLLGPSCSWEAEGLHCSCSSQASPAPSLRWWLGEELLEGNSSQDSFEVTPSSAGPWANSSLSLHGGLSSGLRLRCEAWNVHGAQSGSILQLPDKKGLISTAFSNGAFLGIGITALLFLCLALIIMKILPKRRTQTETPRPRFSRHSTILDYINVVPTAGPLAQKRNQKATPNSPRTPLPPGAPSPESKKNQKKQYQLPSFPEPKSSTQAPESQESQEELHYATLNFPGVRPRPEARMPKGTQADYAEVKFQ

SEQ ID NO: 12291 - protein, 390 aa, Homo sapiens
MLLLLLLLPLLWGTKGMEGDRQYGDGYLLQVQELVTVQEGLCVHVPCSFSYPQDGWTDSDPVHGYWFRAGDRPYQDAPVATNNPDREVQAETQGRFQLLGDIWSNDCSLSIRDARKRDKGSYFFRLERGSMKWSYKSQLNYKTKQLSVFVTASTALGNGSSLSVLEGQSLRLVCAVNSNPPARLSWTRGSLTLCPSRSSNPGLLELPRVHVRDEGEFTCRAQNAQGSQHISLSLSLQNEGTGTSRPVSQVTLAAVGGAGATALAFLSFCIIFIIVRSCRKKSARPAAGVGDTGMEDAKAIRGSASQGPLTESWKDGNPLKKPPPAVAPSSGEEGELHYATLSFHKVKPQDPQGQEATDSEYSEIKIHKRETAETQACLRNHNPSSKEVRG

SEQ ID NO: 12292 - protein, 532 aa, Homo sapiens
MDDYSLDEFRRRWQEELAQAQAPKKRRRPEAAERRARRPENEMNDVPFFDIQLPYELAINIFQYLDRKELGRCAQVSKTWKVIAEDEVLWYRLCQQEGHLPDSSISDYSCWKLIFQECRAKEHMLRTNWKNRKGAVSELEHVPDTVLCDVHSHDGVVIAGYTSGDVRVWDTRTWDYVAPFLESEDEEDEPGMQPNVSFVRINSSLAVAAYEDGFLNIWDLRTGKYPVHRFEHDARIQALALSQDDATVATASAFDVVMLSPNEEGYWQIAAEFEVPKLVQYLEIVPETRRYPVAVAAAGDLMYLLKAEDSARTLLYAHGPPVTCLDVSANQVAFGVQGLGWVYEGSKILVYSLEAGRRLLKLGNVLRDFTCVNLSDSPPNLMVSGNMDGRVRIHDLRSGNIALSLSAHQLRVSAVQMDDWKIVSGGEEGLVSVWDYRMNQKLWEVYSGHPVQHISFSSHSLITANVPYQTVMRNADLDSFTTHRRHRGLIRAYEFAVDQLAFQSPLPVCRSSCDAMATHYYDLALAFPYNHV

SEQ ID NO: 12293 - protein, 113 aa, Homo sapiens
MTLLWCVVSLYFYGILQSDASERCDDWGLDTMRQIQVFEDEPARIKCPLFEHFLKFNYSTAHSAGLTLIWYWTRQDRDLEEPINFRLPENRISKEKDVLWFRPTLLNDTGNYT

SEQ ID NO: 12294 - protein, 322 aa, Homo sapiens
MAVFADLDLRAGSDLKALRGLVETAAHLGYSVVAINHIVDFKEKKQEIEKPVAVSELFTTLPIVQGKSRPIKILTRLTIIVSDPSHCNVLRATSSRARLYDVVAVFPKTEKLFHIACTHLDVDLVCITVTEKLPFYFKRPPINVAIDRGLAFELVYSPAIKDSTMRRYTISSALNLMQICKGKNVIISSAAERPLEIRGPYDVANLGLLFGLSESDAKAAVSTNCRAALLHGETRKTAFGIISTVKKPRPSEGDEDCLPASKKAKWSHSVTQAGVQWHNLGSLQPLPLGLKPSSHLSLPRTRIQQRQLLISHQRDHTPKNRL

SEQ ID NO: 12295 - protein, 290 aa, Homo sapiens
MDLSAASHRIPLSDGNSIPIIGLGTYSEPKSTPKGACATSVKVAIDTGYRHIDGAYIYQNEHEVGEAIREKIAEGKVRREDIFYCGKLWATNHVPEMVRPTLERTLRVLQLDYVDLYIIEVPMAFKPGDEIYPRDENGKWLYHKSNLCATWEAMEACKDAGLVKSLGVSNFNRRQLELILNKPGLKHKPVSNQVECHPYFTQPKLLKFCQQHDIVITAYSPLGTSRNPIWVNVSSPPLLKDALLNSLGKRYNKTAAQIVLRFNIQRGVVVIPKSFNLERIKENFQVARSS

SEQ ID NO: 12296 - protein, 168 aa, Homo sapiens
MAGLTAAAPRPGVLLLLLSILHPSRPGGVPGAIPGGVPGGVFYPGAGLGALGGGALGPGGKPLKPGVGPFGGPQPGVPLGYPIKAPKLPGYGPGGVAGAAGKAGYPTGTGVGPQAAAAAAAKAAAKFGAGAAGVLPGVGGAGVPGVPGAIPGIGGIAGVGTPAAAAAA

SEQ ID NO: 12297 - protein, 113 aa, Homo sapiens
MKGLYFQQSSTDEEITFVFQEKEDLPVTEDNFVKLQVKACALSQINTKLLAEMKMKKDLFPVGREIAGIVLDVGSKVSFFQPDDEVVEVLSRLGAVAHVCNPSTLGGQGGRIT

SEQ ID NO: 12298 - protein, 245 aa, Homo sapiens
MISLPGPLVTNLLRFLFLGLSALAPPSRAQLQLHLPANRLQAVEGGEVVLPAWYTLHGEVSSSQPWEVPFVMWFFKQKEKEDQVLSYINGVTTSKPGVSLVYSMPSRNLSLRLEGLQEKDSGPYSCSVNVQDKQGKSRGHSIKTLELNVLVPPAPPSCRLQGVPHVGANVTLSCQSPRSKPAVQYQWDRQLPSFQTFFAPALDVIRGSLSLTNLSSSMAGVYVCKAHNEVGTAQCNVTLEVSTGQ

SEQ ID NO: 12299 - protein, 210 aa, Homo sapiens
MALLFLLPLVMQGVSRAEMGTADLGPSSVPTPTNVTIESYNMNPIVYWEYQIMPQVPVFTVEVKNYGVKARVGQKESAYAKSEEFAVCRDGKIGPPKLDIRKEEKQIMIDIFHPSVFVNGDEQEVDYDPETTCYIRVYNVYVRMNGSEIQYKILTQKEDDCDEIQCQLAIPVSSLNSQYCVSAEGVLHVWGVTTEKSKEVCITIFNSSIK

SEQ ID NO: 12300 - protein, 595 aa, Homo sapiens
MDFLLALVLVSSLYLQAAAEFDGRWPRQIVSSIGLCRYGGRIDCCWGWARQSWGQCQPVCQPRCKHGECIGPNKCKCHPGYAGKTCNQDEHIPAPLDQGSEQPLFQPLDHQATSLPSRDLNECGLKPRPCKHRCMNTYGSYKCYCLNGYMLMPDGSCSSALTCSMANCQYGCDVVKGQIRCQCPSPGLQLAPDGRTCVDVDECATGRASCPRFRQCVNTFGSYICKCHKGFDLMYIGGKYQCHDIDECSLGQYQCSSFARCYNIRGSYKCKCKEGYQGDGLTCVYIPKVMIEPSGPIHVPKGNGTILKGDTGNNNWIPDVGSTWWPPKTPYIPPIITNRPTSKPTTRPTPKPTPIPTPPPPPPLPTELRTPLPPTTPERPTTGLTTIAPAASTPPGGITVDNRVQTDPQKPRGDVFIPRQPSNDLFEIFEIERGVSADDEAKDDPGVLVHSCNFDHGLCGWIREKDNDLHWEPIRDPAGGQYLTVSAAKAPGGKAARLVLPLGRLMHSGDLCLSFRHKVTGLHSGTLQVFVRKHGAHGAALWGRNGGHGWRQTQITLRGADIKSVVFKGEKRRGHTGEIGLDDVSLKKGHCSEER

SEQ ID NO: 12301 - protein, 837 aa, Homo sapiens
MFKCWSVVLVLGFIFLESEGRPTKEGGYGLKSYQPLMRLRHKEKNQESSRVKGFMIQDGPFGSCENKYCGLGRHCVTSRETGQAECACMDLCKRHYKPVCGSDGEFYENHCEVHRAACLKKQKITIVHNEDCFFKGDKCKTTEYSKMKNMLLDLQNQKYIMQENENPNGDDISRKKLLVDQMFKYFDADSNGLVDINELTQVIKQEELGKDLFDCTLYVLLKYDDFNADKHLALEEFYRAFQVIQLSLPEDQKLSITAATVGQSAVLSCAIQGTLRPPIIWKRNNIILNNLDLEDINDFGDDGSLYITKVTTTHVGNYTCYADGYEQVYQTHIFQVNVPPVIRVYPESQAREPGVTASLRCHAEGIPKPQLGWLKNGIDITPKLSKQLTLQANGSEVHISNVRYEDTGAYTCIAKNEAGVDEDISSLFVEDSARKTRLGIGNMFYVFYEDGIKVIQPIECEFQRHIKPSEKLLGFQDEVCPKAEGDEVQRCVWASAVNVKDKFIYVAQPTLDRVLIVDVQSQKVVQAVSTDPVPVKLHYDKSHDQVWVLSWGTLEKTSPTLQVITLASGNVPHHTIHTQPVGKQFDRVDDFFIPTTTLIITHMRFGFILHKDEAALQKIDLETMSYIKTINLKDYKCVPQSLAYTHLGGYYFIGCKPDSTGAVSPQVMVDGVTDSVIGFNSDVTGTPYVSPDGHYLVSINDVKGLVRVQYITIRGEIQEAFDIYTNLHISDLAFQPSFTEAHQYNIYGSSSTQTDVLFVELSSGKVKMIKSLKEPLKAEEWPWNRKNRQIQDSGLFGQYLMTPSKDSLFILDGRLNKLNCEITEVEKGNTVIWVGDA

SEQ ID NO: 12302 - protein, 295 aa, Homo sapiens
MSHSSVTREAPQLLSQRQRREVRGVWGWGCLPGPRGGPALFGLVTFGQSGDCCTDSGTMNIFDRKINFDALLKFSHITPSTQQHLKKVYASFALCMFVAAAGAYVHMVTHFIQAGLLSALGSLILMIWLMATPHSHETEQKRLGLLAGFAFLTGVGLGPALEFCIAVNPSILPTAFMGTAMIFTCFTLSALYARRRSYLFLGGILMSALSLLLLSSLGNVFFGSIWLFQANLYVGLVVMCGFVLFDTQLIIEKAEHGDQDYIWHCIDLFLDFITVFRKLMMILAMNEKDKKKEKK

SEQ ID NO: 12303 - protein, 254 aa, Homo sapiens
MAAMRKALPRRLVGLASLRAVSTSSMGTLPKRVKIVEVGPRDGLQNEKNIVSTPVKIKLIDMLSEAGLSVIETTSFVSPKWVPQMGDHTEVLKGIQKFPGINYPVLTPNLKGFEAAVTKKFYSMGCYEISLGDTIGVGTPGIMKDMLSAVMQEVPLAALAVHCHDTYGQALANTLMALQMGVSVVDSSVAGLGGCPYAQGASGNLATEDLVYMLEGLGIHTGVNLQKLLEAGNFICQALNRKTSSKVAQATCKL

SEQ ID NO: 12304 - protein, 232 aa, Homo sapiens
MGGTTSTRRVTFEADENENITVVKGIRLSENVIDRMKESSPSGSKSQRYSGAYGASVSDEELKRRVAEELALEQAKKESEDQKRLKQAKELDRERAAANEQLTRAILRERICSEEERAKAKHLDIEDKARQLEEKDRVLKKQDAFYKEQLARLEERSSEFYRVTTEQYQKAAEEVEAKFKRYESHPVCADLQAKILQCYRENTHQTLKCSALATQYMHCVNHAKQSMLEKGG

SEQ ID NO: 12305 - protein, 87 aa, Homo sapiens
MLKALFLTMLTLALVKSQDTEETITYTQCTDGYEWDPVRQQCKDIDECDIVPDACKGGMKCVNHYGGYLCLPKTAQIIVNNEQPQQE

SEQ ID NO: 12306 - protein, 149 aa, Homo sapiens
MKVIAILTLLLFCSPTHSSFWQFQRRVKHITGRSAFFSYYGYGCYCGLGDKGIPVDDTDRHSPSSPSPYEKLKEFSCQPVLNSYQFHIVNGAVVCGCTLGPGASCHCRLKACECDKQSVHCFKESLPTYEKNFKQFSSQPRCGRHKPWC

SEQ ID NO: 12307 - protein, 1478 aa, Homo sapiens
MEPRMESCLAQVLQKDVGKRLQVGQELIDYFSDKQKSADLEHDQTMLDKLVDGLATSWVNSSNYKVVLLGMDILSALVTRLQDRFKAQIGTVLPSLIDRLGDAKDSVREQDQTLLLKIMDQAANPQYVWDRMLGGFKHKNFRTREGICLCLIATLNASGAQTLTLSKIVPHICNLLGDPNSQVRDAAINSLVEIYRHVGERVRADLSKKGLPQSRLNVIFTKFDEVQKSGNMIQSANDKNFDDEDSVDGNRPSSASSTSSKAPPSSRRNVGMGTTRRLGSSTLGSKSSAAKEGAGAVDEEDFIKAFDDVPVVQIYSSRDLEESINKIREILSDDKHDWEQRVNALKKIRSLLLAGAAEYDNFFQHLRLLDGAFKLSAKDLRSQVVREACITLGHLSSVLGNKFDHGAEAIMPTIFNLIPNSAKIMATSGVVAVRLIIRHTHIPRLIPVITSNCTSKSVAVRRRCFEFLDLLLQEWQTHSLERHISVLAETIKKGIHDADSEARIEARKCYWGFHSHFSREAEHLYHTLESSYQKALQSHLKNSDSIVSLPQSDRSSSSSQESLNRPLSAKRSPTGSTTSRASTVSTKSVSTTGSLQRSRSDIDVNAAASAKSKVSSSSGTTPFSSAAALPPGSYASLDGTTTKAEGRIRTRRQSSGSATNVASTPDNRGRSRAKVVSQSQRSRSANPAGAGSRSSSPGKLLGSGYGGLTGGSSRGPPVTPSSEKRSKIPRSQGCSRETSPNRIGLDRFGLGQPGRIPGSVNAMRVLSTSTDLEAAVADALLLGDSRSKKKPVRRRYEPYGMYSDDDANSDASSVCSERSYGSRNGGIPHYLRQTEDVAEVLNHCASSNWSERKEGLLGLQNLLKSQRTLSRVELKRLCEIFTRMFADPHSKVFSMFLETLVDFIIIHKDDLQDWLFVLLTQLLKKMGADLLGSVQAKVQKALDVTRDSFPFDQQFNILMRFIVDQTQTPNLKVKVAILKYIESLARQMDPTDFVNSSETRLAVSRIITWTTEPKSSDVRKAAQIVLISLFELNTPEFTMLLGALPKTFQDGATKLLHNHLKNSSNTSVGSPSNTIGRTPSRHTSSRTSPLTSPTNCSHGGLSPSMLDYDTENLNSEEIYSSLRGVTEAIEKFSFRSQEDLNEPIKRDGKKECDIVSRDGGAASPATEGRGGSEVEGGRTALDNKTSLLNTQPPRAFPGPRARDYNPYPYSDAINTYDKTALKEAVFDDDMEQLRDVPIDHSDLVADLLKELSNHNERVEERKGALLELLKITREDSLGVWEEHFKTILLLLLETLGDKDHSIRALALRVLREILRNQPARFKNYAELTIMKTLEAHKDSHKEVVRAAEEAASTLASSIHPEQCIKVLCPIIQTADYPINLAAIKMQTKVVERIAKESLLQLLVDIIPGLLQGYDNTESSVRKASVFCLVAIYSVIGEDLKPHLAQLTGSKMKLLNLYIKRAQTTNSNSSSSSDVSTHS

SEQ ID NO: 12308 - protein, 1088 aa, Homo sapiens
MTTAQRDSLLWKLAGLLRESGDVVLSGCSTLSLLTPTLQQLNHVFELHLGPWGPGQTGFVALPSHPADSPVILQLQFLFDVLQKTLSLKLVHVAGPGPTGPIKIFPFKSLRHLELRGVPLHCLHGLRGIYSQLETLICSRSLQALEELLSACGGDFCSALPWLALLSANFSYNALTALDSSLRLLSALRFLNLSHNQVQDCQGFLMDLCELHHLDISYNRLHLVPRMGPSGAALGVLILRGNELRSLHGLEQLRNLRHLDLAYNLLEGHRELSPLWLLAELRKLYLEGNPLWFHPEHRAATAQYLSPRARDAATGFLLDGKVLSLTDFQTHTSLGLSPMGPPLPWPVGSTPETSGGPDLSDSLSSGGVVTQPLLHKVKSRVRVRRASISEPSDTDPEPRTLNPSPAGWFVQQHPELELMSSFRERFGRNWLQYRSHLEPSGNPLPATPTTSAPSAPPASSQGPDTAPRPSPPQEEARGPQESPQKMSEEVRAEPQEEEEEKEGKEEKEEGEMVEQGEEEAGEEEEEEQDQKEVEAELCRPLLVCPLEGPEGVRGRECFLRVTSAHLFEVELQAARTLERLELQSLEAAEIEPEAQAQRSPRPTGSDLLPGAPILSLRFSYICPDRQLRRYLVLEPDAHAAVQELLAVLTPVTNVAREQLGEARDLLLGRFQCLRCGHEFKPEEPRMGLDSEEGWRPLFQKTESPAVCPNCGSDHVVLLAVSRGTPNRERKQGEQSLAPSPSASPVCHPPGHGDHLDRAKNSPPQAPSTRDHGSWSLSPPPERCGLRSVDHRLRLFLDVEVFSDAQEEFQCCLKVPVALAGHTGEFMCLVVVSDRRLYLLKVTGEMREPPASWLQLTLAVPLQDLSGIELGLAGQSLRLEWAAGAGRCVLLPRDARHCRAFLEELLDVLQSLPPAWRNCVSATEEEVTPQHRLWPLLEKDSSLEARQFFYLRAFLVEGPSTCLVSLLLTPSTLFLLDEDAAGSPAEPSPPAASGEASEKVPPSGPGPAVRVREQQPLSSLSSVLLYRSAPEDLRLLFYDEVSRLESFWALRVVCQEQLTALLAWIREPWEELFSIGLRTVIQEALALDR

SEQ ID NO: 12309 - protein, 43 aa, Homo sapiens
MLSKVLPVLLGILLILQSRTCIQRSAQIISVQLMSCQNMTTAV

SEQ ID NO: 12310 - protein, 296 aa, Homo sapiens
MRTRRTLRGHLAKIYAMHWGTDSRLLVSASQDGKLIIWDSYTTNKVHAIPLRSSWVMTCAYAPSGNFVACGGLDNICSIYSLKTREGNVRVSRELPGHTGYLSCCRFLDDNQIITSSGDTTCALWDIETGQQTVGFAGHSGDVMSLSLAPDGRTFVSGACDASIKLWDVRDSMCRQTFIGHESDINAVAFFPNGYAFTTGSDDATCRLFDLRADQELLMYSHDNIICGITSVAFSRSGRLLLAGYDDFNCNIWDAMKGDRAGVLAGHDNRVSCLGVTDDGMAVATGSWDSFLKIWN

SEQ ID NO: 12311 - protein, 677 aa, Homo sapiens
MKVLGRSFFWVLFPVLPWAVQAVEHEEVAQRVIKLHRGRGVAAMQSRQWVRDSCRKLSGLLRQKNAVLNKLKTAIGAVEKDVGLSDEEKLFQVHTFEIFQKELNESENSVFQAVYGLQRALQGDYKDVVNMKESSRQRLEALREAAIKEETEYMELLAAEKHQVEALKNMQHQNQSLSMLDEILEDVRKAADRLEEEIEEHAFDDNKSVKGVNFEAVLRVEEEEANSKQNITKREVEDDLGLSMLIDSQNNQYILTKPRDSTIPRADHHFIKDIVTIGMLSLPCGWLCTAIGLPTMFGYIICGVLLGPSGLNSIKSIVQVETLGEFGVFFTLFLVGLEFSPEKLRKVWKISLQGPCYMTLLMIAFGLLWGHLLRIKPTQSVFISTCLSLSSTPLVSRFLMGSARGDKEGDIDYSTVLLGMLVTQDVQLGLFMAVMPTLIQAGASASSSIVVEVLRILVLIGQILFSLAAVFLLCLVIKKYLIGPYYRKLHMESKGNKEILILGISAFIFLMLTVTELLDVSMELGCFLAGALVSSQGPVVTEEIATSIEPIRDFLAIVFFASIGLHVFPTFVAYELTVLVFLTLSVVVMKFLLAALVLSLILPRSSQYIKWIVSAGLAQVSEFSFVLGSRARRAGVISREVYLLILSVTTLSLLLAPVLWRAAITRCVPRPERRSSL

SEQ ID NO: 12312 - protein, 120 aa, Homo sapiens
MIVTGQYGRLFAVVHFASRQWKVTSEDLILIGNELDLACGERIRLEKVLLVGADNFTLLGKPLLGKDLVRVEATVIEKTESWPRIIMRFRKRKNFKKKRIVTTPQTVLRINSIEIAPCLL

SEQ ID NO: 12313 - protein, 166 aa, Homo sapiens
MEHKEVVLLLLLFLKSGQGEPLDDYVNTQGASLFSVTKKQLGAGSIEECAAKCEEDEEFTCRYFHCRCTYAGICNSDGKAFQYHSKEQQCVIMAENRKSSIIIRMRDVVLFEKKVYLSECKTGNGKNYRGTMSKTKNGITCQKWSSTSPHRPRFSPATHPSEGLEE

SEQ ID NO: 12314 - protein, 123 aa, Homo sapiens
MAVSAGSARTSPSSDKVQKDKAELISGPRQDSRIGKLLGFEWTDLSSWRRLVTLLNRPTDPASLAVFRFLFGFLMVLDIPQERGLSSLDRKYLDGLDVCRFPLLDALRPLPLDWMETGPVVIS

SEQ ID NO: 12315 - protein, 164 aa, Homo sapiens
MENEPDHENVEQSLCAKTSEEELNKSFNLEASLSKFSYIDMDKELEFKNDLIDDKEFDIPQVDTPPTLESILNETDDEDESFILEDPTLLNIDTIDSHSYDTSSVASSDSGDRTNLKRKKKLPDSFSLHGSVMRHSLLKGISAQIVSAADKVDAGLPTAIVSIL

SEQ ID NO: 12316 - protein, 204 aa, Homo sapiens
MKLWVSALLMAWFGVLSCVQAEFFTSIGHMTDLIYAEKELVQSLKEYILVEEAKLSKIKSWANKMEALTSKSAADAEGYLAHPVNAYKLVKRLNTDWPALEDLVLQDSAAGFIANLSVQRQFFPTDEDEIGAAKALMRLQDTYRLDPGTISRGELPGTKYQAMLSVDDCFGMGRSAYNEGDYYHTVLWMEQVLKQLDAGEEATT

SEQ ID NO: 12317 - protein, 708 aa, Homo sapiens
MRKHRHLPLVAVFCLFLSGFPTTHAQQQQADVKNGAAADIIFLVDSSWTIGEEHFQLVREFLYDVVKSLAVGENDFHFALVQFNGNPHTEFLLNTYRTKQEVLSHISNMSYIGGTNQTGKGLEYIMQSHLTKAAGSRAGDGVPQVIVVLTDGHSKDGLALPSAELKSADVNVFAIGVEDADEGALKEIASEPLNMHMFNLENFTSLHDIVGNLVSCVHSSVSPERAGDTETLKDITAQDSADIIFLIDGSNNTGSVNFAVILDFLVNLLEKLPIGTQQIRVGVVQFSDEPRTMFSLDTYSTKAQVLGAVKALGFAGGELANIGLALDFVVENHFTRAGGSRVEEGVPQVLVLISAGPSSDEIRYGVVALKQASVFSFGLGAQAASRAELQHIATDDNLVFTVPEFRSFGDLQEKLLPYIVGVAQRHIVLKPPTIVTQVIEVNKRDIVFLVDGSSALGLANFNAIRDFIAKVIQRLEIGQDLIQVAVAQYADTVRPEFYFNTHPTKREVITAVRKMKPLDGSALYTGSALDFVRNNLFTSSAGYRAAEGIPKLLVLITGGKSLDEISQPAQELKRSSIMAFAIGNKGADQAELEEIAFDSSLVFIPAEFRAAPLQGMLPGLLAPLRTLSGTPEESKRDILFLFDGSANLVGQFPVVRDFLYKIIDELNVKPEGTRIAVAQYSDDVKVESRFDEHQSKPEILNLVKRMKI

SEQ ID NO: 12318 - protein, 455 aa, Homo sapiens
MWLKVFTTFLSFATGACSGLKVTVPSHTVHGVRGQALYLPVHYGFHTPASDIQIIWLFERPHTMPKYLLGSVNKSVVPDLEYQHKFTMMPPNASLLINPLQFPDEGNYIVKVNIQGNGTLSASQKIQVTVDDPVTKPVVQIHPPSGAVEYVGNMTLTCHVEGGTRLAYQWLKNGRPVHTSSTYSFSPQNNTLHIAPVTKEDIGNYSCLVRNPVSEMESDIIMPIIYYGPYGLQVNSDKGLKVGEVFTVDLGEAILFDCSADSHPPNTYSWIRRTDNTTYIIKHGPRLEVASEKVAQKTMDYVCCAYNNITGRQDETHFTVIITSVGLEKLAQKGKSLSPLASITGISLFLIISMCLLFLWKKYQPYKGQKQNTGKLKHFQAMKMLWMTSEYMNLLLFQMFLVFPGSQAGLFQPLIVYRGKICTVQCMKLFSTSLPSSKTIQSELSWAKQYIRVKF

SEQ ID NO: 12319 - protein, 217 aa, Homo sapiens [sequence omitted]

SEQ ID NO: 12320 - protein, 723 aa, Homo sapiens
MAEEEGPPVELRQRKKPKSSENKESAKEEKISDIPIPERAPKHVLFQRFAKIFIGCLAAVTSGMMYALYLSAYHERKFWFSNRQELEREITFQGDSAIYYSYYKDMLKAPSFERGVYELTHNNKTVSLKTINAVQQMSLYPELIASILYQATGSNEIIEPVYFYIGIVFGLQGIYVTALFVTSWLMSGTWLAGMLTVAWFVINRVDTTRIEYSIPLRENWALPYFACQIAALTGYLKSNLNTYGERFCYLLMSASTYTFMMMWEYSHYLLFLQAISLFLLDTFSVEQSDKVYEVYKIYIFSLFLGYLLQFENPALLVSPLLSLVAALMLAKCLQLNVKKGSFVAKIIKVINFYLVCTLTITLNIIMKMFVPHKENGHMLKFLEVKFGLNMTKNFTMNWLLCQESLQAPSQDFFLRLTQSSLLPFYILVLIICFLSMLQVIFRRINGKSLKETVTLEDGRIGERPEIIYHVIHTILLGSLAMVIEGLKYIWIPYVCMLAAFGVCSPELWMTLFKWLRLRTVHPILLALILSMAVPTIIGLSLWKEFFPRLMTELMELQEFYDPDTVELMTWIKRQAPVAAVFAGSPQLMGAIKLCTGWMVTSLPLYNDDDLLKRNENIYQIYSKRSAEDIYKILTSYKANYLIVEDAICNEVGPMRGCRVKDLLDIANGHMVCEEGDKLTYSKYGRFCHEVKINYSPYVNYFTRVYWNRSYFVYKINTVISFQS

SEQ ID NO: 12321 - protein, 560 aa, Homo sapiens
MAAETLLSSLLGLLLLGLLLPASLTGGVGSLNLEELSEMRYGIEILPLPVMGGQSQSSDVVIVSSKYKQRYECRLPAGAIHFQREREEETPAYQGPGIPELLSPMRDAPCLLKTKDWWTYEFCYGRHIQQYHMEDSEIKGEFLCDEGAGISGDYIDRVDEPLSCSYVLTIRTPRLCPHPLLRPPPSAAPQAILCHPSLQPEEYMAYVQRQADSKQYGDKIIEELQDLGPQVWSETKSGVAPQKMAGASPTKDDSKDSDFWKMLNEPEDQAPGGEEVPAEEQDPSPEAADSASGAPNDFQNNVQVKVIRSPADLIRFIEELKGGTKKGKPNIGQEQPVDDAAEVPQREPEKERGDPERQREMEEEEDEDEDEDEDEDERQLLGEFEKELEGILLPSDRDRLRSEVKAGMERELENIIQETEKELDPDGLKKESERDRAMLALTSTLNKLIKRLEEKQSPELVKKHKKKRVVPKKPPPSPQPTGKIEIKIVRPWAEGTEEGARWLTDEDTRNLKEIFFNILVPGAEEAQKERQRQKELESNYRRVWGSPGGEGTGDLDEFDF

SEQ ID NO: 12322 - protein, 189 aa, Homo sapiens
MACLLRSFQRISAGVFFLALWGMVVGDKLLVVPQDGSHWLSMKDIVEVLSDRGHEIVVVVPEVNLLLKESKYYTRKIYPVPYDQEELKNRYQSFGNNHFAERSFLTAPQTEYRNNMIVIGLYFINCQSLLQDRDTLNFFKESKFDALFTDPALPCGVILAEYLGLPSVYLFRGFPCSLEHTFSRSPDPV

SEQ ID NO: 12323 - protein, 126 aa, Homo sapiens
MKVHMHTKFCLICLLTFIFHHCNHCHEEHDHGPEALHRQHRGMTELEPSKFSKQAAENEKKYYIEKLFERYGENGRLSFFGLEKLLTNLGLGERKVVEINHEDLGHDHVSHLDILAVQEGKHFHSH

SEQ ID NO: 12324 - protein, 110 aa, Homo sapiens
MNAPLGGIWLWLPLLLTWLTPEVNSSWWYMRATGGSSRVMCDNVPGLVSSQRQLCHRHPDVMRAISQGVAEWTAECQHQFRQHRWNCNTLDRDHSLFGRVLLRRPVAKEK

SEQ ID NO: 12325 - protein, 90 aa, Homo sapiens
MALVPYEETTEFGLQKFHKPLATFSFANHTIQIRQDWRHLGVAAVVWDAAIVLSTYLEMGAVELRGRSAVELGAGTGLVGIVAALLGGGI

SEQ ID NO: 12326 - protein, 141 aa, Homo sapiens
MRGRELPLVLLALVLCLAPRGRAVPLPAGGGTVLTKMYPRGNHWAVGHLMGKKSTGESSSVSERGSLKQQLREYIRWEEAARNLLGLIEAKENRNHQPPQPKALGNQQPSWDSEDSSNFKDVGSKGKGSQREGRNPQLNQQ

SEQ ID NO: 12327 - protein, 294 aa, Homo sapiens
PPSGPRGTLLLLPLLLLLLLRAVLAVPLERGAPNKEETPATESPDTGLYYHRYLQEVIDVLETDGHFREKLQAANAEDIKSGKLSRELDFVSHHVRTKLDELKRQEFEHLDPQNQHTFEARDLELLIQTATRDLAQYDAAHHEEFKRYEMLKEHERRRYLESLGEEQRKEAERKLEEQQRRHREHPKVNVPGSQAQLKEVWEELDGLDPNRFNPKTFFILHDINSDGVLDEQELEALFTKELEKVYDPKNEEDDMREMEEERLRMREHVMKNVDTNQDRLVTLEEFLASTQRKE

SEQ ID NO: 12328 - protein, 173 aa, Homo sapiens
MSPPLCPLLLLAVGLRLAGTLNPSDPNTCSFWESFTTTTKESHSRPFSLLPSEPCERPWEGPHTCPQPTVVYRTVYRQVVKTDHRQRLQCCHGFYESRGFCVPLCAQECVHGRCVAPNQCQCVPGWRGDDCSSECAPGMWGPQCDKPCSCGNNSSCDPKSGVCSCPSGLQPPN

SEQ ID NO: 12329 - protein, 263 aa, Homo sapiens
MVSGRFYLSCLLLGSLGSMCILFTIYWMQYWRGGFAWNGSIYMFNWHPVLMVAGMVVFYGGASLVYRLPQSWVGPKLPWKLLHAALHLMAFVLTVVGLVAVFTFHNHGRTANLYSLHSWLGITTVFLFACQWFLGFAVFLLPWASMWLRSLLKPIHVFFGAAILSLSIASVISGINEKLFFSLKNTTRPYHSLPSEAVFANSTGMLVVAFGLLVLYILLASSWKRPEPGILTDRQLLLQLRPGSRPFPVTYVSVTGRQPYKSW

SEQ ID NO: 12330 - protein, 1154 aa, Homo sapiens
MANDSPAKSLVDIDLSSLRDPAGIFELVEVVGNGTYGQVYKGRHVKTGQLAAIKVMDVTEDEEEEIKLEINMLKKYSHHRNIATYYGAFIKKSPPGHDDQLWLVMEFCGAGSITDLVKNTKGNTLKEDWIAYISREILRGLAHLHIHHVIHRDIKGQNVLLTENAEVKLVDFGVSAQLDRTVGRRNTFIGTPYWMAPEVIACDENPDATYDYRSDLWSCGITAIEMAEGAPPLCDMHPMRALFLIPRNPPPRLKSKKWSKKFFSFIEGCLVKNYMQRPSTEQLLKHPFIRDQPNERQVRIQLKDHIDRTRKKRGEKDETEYEYSGSEEEEEEVPEQEGEPSSIVNVPGESTLRRDFLRLQQENKERSEALRRQQLLQEQQLREQEEYKRQLLAERQKRIEQQKEQRRRLEEQQRREREARRQQEREQRRREQEEKRRLEELERRRKEEEERRRAEEEKRRVEREQEYIRRQLEEEQRHLEVLQQQLLQEQAMLLHDHRRPHPQHSQQPPPPQQERSKPSFHAPEPKAHYEPADRAREVPVRTTSRSPVLSRRDSPLQGSGQQNSQAGQRNSTSIEPRLLWERVEKLVPRPGSGSSSGSSNSGSQPGSHPGSQSGSGERFRVRSSSKSEGSPSQRLENAVKKPEDKKEVFRPLKPADLTALAKELRAVEDVRPPHKVTDYSSSSEESGTTDEEDDDVEQEGADESTSGPEDTRAASSLNLSNGETESVKTMIVHDDVESEPAMTPSKEGTLIVRQTQSASSTLQKHKSSSSFTPFIDPRLLQISPSSGTTVTSVVGFSCDGMRPEAIRQDPTRKGSVVNVNPTNTRPQSDTPEIRKYKKRFNSEILCAALWGVNLLVGTESGLMLLDRSGQGKVYPLINRRRFQQMDVLEGLNVLVTISGKKDKLRVYYLSWLRNKILHNDPEVEKKQGWTTVGDLEGCVHYKVVKYERIKFLVIALKSSVEVYAWAPKPYHKFMAFKSFGELVHKPLLVDLTVEEGQRLKVIYGSCAGFHAVDVDSGSVYDIYLPTHIQCSIKPHAIIILPNTDGMELLVCYEDEGVYVNTYGRITKDVVLQWGEMPTSVAYIRSNQTMGWGEKAIEIRSVETGHLDGVFMHKRAQRLKFLCERNDKVFFASVRSGGSSQVYFMTLGRTSLLSW

SEQ ID NO: 12331 - protein, 54 aa, Homo sapiens
MNLVDLWLTRSLSMCLLLQSFVLMILCFHSASMCPKGCLCSSSGGLNVTCSNAN

SEQ ID NO: 12332 - protein, 279 aa, Homo sapiens
MVDHLANTEINSQRIAAVESCFGASGQPLALPGRVLLGEGVLTKECRKKAKPRIFFLFNDILVYGSIVLNKRKYRSQHIIPLEEVTLELLPETLQAKNRWMIKTAKKSFVVSAASATERQEWISHIEECVRRQLRATGRPPSTEHAAPWIPDKATDICMRCTQTRFSALTRRHHCRKCGFVVCAECSRQRFLLPRLSPKPVRVCSLCYRELAAQQRQEEAEEQGAGSPGQPAHLARPICGASSGDDDDSDEDKEGSRDGDWPSSVEFYASGVAWSAFHS

SEQ ID NO: 12333 - protein, 195 aa, Homo sapiens
MAQLCGLRRSRAFLALLGSLLLSGVLAADRERSIHENATGDLATSRNAADSSVPSAPRRQDSEDHSSDMFNYEEYCTANAVTGPCRASFPRWYFDVERNSCNNFIYGGCRGNKNSYRSEEACMLRCFRQQENPPLPLGSKVVVLAGLFVMVLILFLGASMVYLIRVARRNQERALRTVWSSGDDKEQLVKNTYVL

SEQ ID NO: 12334 - protein, 69 aa, Homo sapiens
MAGPFSRLLSARPGLRLLALAGAGSLAAGFLLRPEPVRAASERRRLYPPRLFPSSIRSVVSWEERTEQI

SEQ ID NO: 12335 - protein, 333 aa, Homo sapiens
MGTARIAPGLALLLCCPVLSSAYALVDADDVMTKEEQIFLLHRAQAQCEKRLKEVLQRPASIMESDKGWTSASTSGKPRKDKASGKLYPESEEDKEAPTGSRYRGRPCLPEWDHILCWPLGAPGEVVAVPCPDYIYDFNHKGHAYRRCDRNGSWELVPGHNRTWANYSECVKFLTNETREREVFDRLGMIYTVGYSVSLASLTVAVLILAYFRRLHCTRNYIHMHLFLSFMLRAVSIFVKDAVLYSGATLDEAERLTEEELRAIAQAPPPPATAAAGYAGCRVAVTFFLYFLATNYYWILVEGLYLHSLIFMAFFSEKKYLWGFTVFGWGAGT

SEQ ID NO: 12336 - protein, 44 aa, Homo sapiens
MLCLGWIFLWLVAGERIKGFNISGCSTKKLLWTYSTRSEEEFVL

SEQ ID NO: 12337 - protein, 699 aa, Homo sapiens
MDKFWWHAAWGLCLVPLSLAQIDLNITCRFAGVFHVEKNGRYSISRTEAADLCKAFNSTLPTMAQMEKALSIGFETCRYGFIEGHVVIPRIHPNSICAANNTGVYILTSNTSQYDTYCFNASAPPEEDCTSVTDLPNAFDGPITITIVNRDGTRYVQKGEYRTNPEDIYPSNPTDDDVSSGSSSERSSTSGGYIFYTFSTVHPIPDEDSPWITDSTDRIPATSTSSNTISAGWEPNEENEDERDRHLSFSGSGIDDDEDFISSTISTTPRAFDHTKQNQDWTQWNPSHSNPEVLLQTTTRMTDVDRNGTTAYEGNWNPEAHPPLIHHEHHEEEETPHSTSTIQATPSSTTEETATQKEQWFGNRWHEGYRQTPKEDSHSTTGTAAASAHTSHPMQGRTTPSPEDSSWTDFFNPISHPMGRGHQAGRRMDMDSSHSITLQPTANPNTGLVEDLDRTGPLSMTTQQSNSQSFSTSHEGLEEDKDHPTTSTLTSSNRNDVTGGRRDPNHSEGSTTLLEGYTSHYPHTKESRTFIPVTSAKTGSFGVTAVTVGDSNSNVNRSLSGDQDTFHPSGGSHTTHGSESDGHSHGSQEGGANTTSGPIRTPQIPEWLIILASLLALALILAVCIAVNSRRRCGQKKKLVINSGNGAVEDRKPSGLNGEASKSQEMVHLVNKESSETPDQFMTADETRNLQNVDMKIGV

SEQ ID NO: 12338 - protein, 681 aa, Homo sapiens
MFVGSDTVNEFKSEDGAIHVIERRCKLDVDAPRLLKKIAGVDYVYFVQKNSLNSRERTLHIEAYNETFSNRVIINEHCCYTVHPENEDWTCFEQSASLDIKSFFGFESTVEKIAMKQYTSNIKKGKEIIEYYLRQLEEEGITFVPRWSPPSITTSSETSSSSSKKQAASMAVVIPEAALKEGLSGDALSSPSAPEPVVGTPDDKLDADYIKRYLGDLTPLQESCLIRLRQWLQETHKGKIPKDEHILRFLRARDFNIDKAREIMCQSLTWRKQHQVDYILETWTPPQVLQDYYAGGWHHHDKDGRPLYVLRLGQMDTKGLVRALGEEALLRYVLSINEEGLRRCEENTKVFGRPISSWTCLVDLEGLNMRHLWRPGVKALLRIIEVVEANYPETLGRLLILRAPRVFPVLWTLVSPFIDDNTRRKFLIYAGNDYQGPGGLLDYIDKEIIPDFLSGECMCEVPEGGLVPKSLYRTAEELENEDLKLWTETIYQSASVFKGAPHEILIQIVDASSVITWDFDVCKGDIVFNIYHSKRSPQPPKKDSLGAHSITSPGGNNVQLIDKVWQLGRDYSMVESPLICKEGESVQGSHVTRWPGFYILQWKFHSMPACAASSLPRVDDVLASLQVSSHKCKVMYYTEVIGSEDFRGSMTSLESSHSGFSQLSAATTSSSQSHSSSMISR

SEQ ID NO: 12339 - protein, 290 aa, Homo sapiens
MWVTKLLPALLLQHVLLHLLLLPIAIPYAEGQRKRRNTIHEFKKSAKTTLIKIDPALKIKTKKVNTADQCANRCTRNKGLPFTCKAFVFDKARKQCLWFPFNSMSSGVKKEFGHEFDLYENKDYIRNCIIGKGRSYKGTVSITKSGIKCQPWSSMIPHEHSFLPSSYRGKDLQENYCRNPRGEEGGPWCFTSNPEVRYEVCDIPQCSEVECMTCNGESYRGLMDHTESGKICQRWDHQTPHRHKFLPERYPDKGFDDNYCRNPDGQPRPWCYTLDPHTRWEYCAIKTCET

SEQ ID NO: 12340 - protein, 127 aa, Homo sapiens
MGRPLLLPLLLLLQPPAFLQPGGSTGSGPSYLYGVTQPKHLSASMGGSVEIPFSFYYPWELAIVPNVRISWRRGHFHGQSFYSTRPPSIHKDYVNRLFLNWTEGQESGFLRISNLRKEDQSVYFCRV

SEQ ID NO: 12341 - protein, 706 aa, Homo sapiens
MAGLTAAAPRPGVLLLLLSILHPSRPGGVPGAIPGGVPGGVFYPGAGLGALGGGALGPGGKPLKPVPGGLAGAGLGAGLGAFPAVTFPGALVPGGVADAAAAYKAAKAGAGLGGVPGVGGLGVSAGAVVPQPGAGVKPGKVPGVGLPGVYPGGVLPGARFPGVGVLPGVPTGAGVKPKAPGVGGAFAGIPGVGPFGGPQPGVPLGYPIKAPKLPGGYGLPYTTGKLPYGYGPGGVAGAAGKAGYPTGTGVGPQAAAAAAAKAAAKFGAGAAGVLPGVGGAGVPGVPGAIPGIGGIAGVGTPAAAAAAAAAAKAAKYGAAAGLVPGGPGFGPGVVGVPGAGVPGVGVPGAGIPVVPGAGIPGAAVPGVVSPEAAAKAAAKAAKYGARPGVGVGGIPTYGVGAGGFPGFGVGVGGIPGVAGVPGVGGVPGVGGVPGVGISPEAQAAAAAKAAKYGVGTPAAAAAKAAAKAAQFGLVPGVGVAPGVGVAPGVGVAPGVGLAPGVGVAPGVGVAPGVGVAPGIGPGGVAAAAKSAAKVAAKAQLRAAAGLGAGIPGLGVGVGVPGLGVGAGVPGLGVGAGVPGFGAVPGALAAAKAAKYGAAVPGVLGGLGALGGVGIPGGVVGAGPAAAAAAAKAAAKAAQFGLVGAAGLGGLGVGGLGVPGVGGLGGIPPAAAAKAAKYGVAARPGFGLSPIFPGGACLGKACGRKRK

SEQ ID NO: 12342 - protein, 287 aa, Homo sapiens
MSGSFDRKLSSILTDISSSLSCHAGSKDSPTLPESSVTDLGYYSAPQHDYYSGQPYGQTVNPYTYHHQFNLNGLAGTGAYSPKSEYTYGASYRQYGAYREQPLPAQDPVSVKEEPEAEVRMVNGKPKKVRKPRTIYSSYQLAALQRRFQKAQYLALPERAELAAQLGLTQTQVKIWFQNRRSKFKKLYKNGEVPLEHSPNNSDSMACNSPPSPALWDTSSHSTPAPARSQLPPPLPYSASPSYLDDPTNSWYHAQNLSGPHLQQQPPQPATLHHASPGPPPNPGAVY

SEQ ID NO: 12343 - protein, 330 aa, Homo sapiens
MTPKISWTSKFSVCPESAMACAAVMIPGLLRCSVGAIRIEAASLRLTLSTLRHLTLTSIMKSKRKTDHMERTASVLRREIVSAAKVCGAASESPSVKSLRLLVADQDFSFKAGQWVDFFIPGVSVVGGFSICSSPRLLEQERVIELAVKYTNHPPALWVHNTCTLDCEVAVRVGGEFFFDPQPADASRNLVLIAGGVGINPLLSILRHAADLLREQANKRNGYEIGTIKLFYSAKNTSELLFKKNILDLVNEFPEKIACSLHVTKQTTQINAELKPYITEGRITEKEIRDHISKETLFYICGPPPMTDFFSKQLENNHVPKEHICFEKWW

SEQ ID NO: 12344 - protein, 213 aa, Homo sapiens
MAQLFLPLLAALVLAQAPAALADVLEGDSSEDRAFRVRIAGDAPLQGVLGGALTIPCHVHYLRPPPSRRAVLGSPRVKWTFLSRGREAEVLVARGVRVKVNEAYRFRVALPAYPASLTDVSLALSELRPNDSGIYRCEVQHGIDDSSDAVEVKVKGVVFLYREGSARYAFSFSGAQEACARIGAHIATPEQLYAAYLGGYEQCDAGWLSDQTV

SEQ ID NO: 12345 - protein, 336 aa, Homo sapiens
MEVEAALGCSGQGRGCGGVAPAGRGRERASERGTRVRISKGLSGAGGSVRKADFQLNSHLSTLANIHKIYHTLNKLNLTEDIGQDDHQTGSLRSCSSSDCFNKVMPPRKKRRPASGDDLSAKKSRHDSMYRKYDSTRIKTEEEAFSSKRCLEWFYEYAGTDDVVGPEGMEKFCEDIGVEPENVVMLVLAWKLDAQNMGYFTLQEWLKGMTSLQCDTTEKLRNTLDYLRSFLNDSTNFKLIYRYAFDFAREKDQRSLDINTAKCMLGLLLGKIWPLFPVFHQFLEQSKYKVINKDQWCNVLEFSRTINLDLSNYDEDGAWPVLLDEFVEWYKDKQMS

SEQ ID NO: 12346 - protein, 590 aa, Homo sapiens
MPSPQLLVLFGSQTGTAQDVSERLGREARRRRLGCRVQALDSYPVVNLINEPLVIFVCATTGQGDPPDNMKNFWRFIFRKNLPSTALCQMDFAVLGLGDSSYAKFNFVAKKLHRRLLQLGGSALLPVCLGDDQHELGPDAAVDPWLRDLWDRVLGLYPPPPGLTEIPPGVPLPSKFTLLFLQEAPSTGSEGQRVAHPGSQEPPSESKPFLAPMISNQRVTGPSHFQDVRLIEFDILGSGISFAAGDVVLIQPSNSAAHVQRFCQVLGLDPDQLFMLQPREPDVSSPTRLPQPCSMRHLVSHYLDIASVPRRSFFELLACLSLHELEREKLLEFSSAQGQEELFEYCNRPRRTILEVLCDFPHTAAAIPPDYLLDLIPVIRPRAFSIASSLLILVAVVQFQTRLKEPRRGLCSSWLASLDPGQGPVRVPLWVRPGSLAFPETPDTPVIMVGPGTGVAPFRAAIQERVAQGQTGNFLFFGCRWRDQDFYWEAEWQELEKRDCLTLIPAFSREQEQKVYVQHRLRELGSLVWELLDRQGAYFYLAGNAKSMPADVSEALMSIFQEEGGLCSPDAAAYLARLQQTRRFQTETWA

SEQ ID NO: 12347 - protein, 1056 aa, Homo sapiens
MLSVVENGLDPQAAIPVIKKKLVGSVKALQKQYVSLDTVVTSEDGDANTMCSALEAVFIHGLHAKHIRAEAGGKRKKSAHQKPLPQPVFWPLLKAVTHKHIISELEHLTFVNTDVGRCRAWLRLALNDGLMECYLKLLLQEQARLHEYYQPTALLRDAEEGEFLLSFLQGLTSLSFELSYKSAILNEWTLTPLALSGLCPLSELDPLSTSGAELQRKESLDSISHSSGSEDIEVHHSGHKIRRNQKLTASSLSLDTASSSQLSCSLNSDSCLLQENGSKSPDHCEEPMSCDSDLGTANAEDSDRSLQEVLLEFSKAQVNSVPTNGLSQETEIPTPQASLSLHGLNTSTYLHCEAPAEPLPAQAASGTQDGVHVQEPRPQAPSPLDLQQPVESTSGQQPSSTVSETAREVGQGNGLQKAQAHDGAGLKLVVSSPTSPKNKSWISEDDFYRPSREQPLESASDHPIASYRGTPGSRPGLHRHFSQEPRKNCSLGALDQACVPSPGRRQAQAAPSQGHKSFRVVHRRQMGLSNPFRGLMKLGTVERRGAMGIWKELFCELSPLEFRLYLSNEEHTCVENCSLLRCESVGPAHSDGRFELVFSGKKLALRASSQDEAEDWLDRVREALQKVRPQQEDEWVNVQYPDQPEEPPEAPQGCLSPSDLLSEPAALQGTQFDWSSAQVPEPDAIKESLLYLYMDRTWMPYIFSLSLEALKCFRIRNNEKMLSDSHGVETIRDILPDTSLGGPSFFKIITAKAVLKLQAGNAEEAALWRDLVRKVLASYLETAEEAVTLGGSLDENCQEVLKFATRENGFLLQYLVAIPMEKGLDSQGCFCAGCSRQIGFSFVRPKLCAFSGLYYCDICHQDDASVIPARIIHNWDLTKRPICRQALKFLTQIRAQPLINLQMVNASLYEHVERMHLIGRRREQLKLLGDYLGLCRSGALKELSKRLNHRNYLLESPHRFSVADLQQIADGVYEGFLKALIEFASQHVYHCDLCTQRGFICQICQHHDIIFPFEFDTTVRCAECKTVFHQSCQAVVKKGCPRCARRRKYQEQNIFA

SEQ ID NO: 12348 - protein, 246 aa, Homo sapiens
MGCFECCIKCLGGVPYASLVATILCFSGVALFCGCGHVALAGTVAILEQHFSTNASDHALLSEVIQLMQYVIYGIASFFFLYGIILLAEGFYTTSAVKELHGEFKTTACGRCISGMFVFLTYVLGVAWLGVFGFSAVPVFMFYNIWSTCEVIKSPQTNGTTGVEQICVDIRQYGIIPWNAFPGKICGSALENICNTNEFYMSYHLFIVACAGAGATVIALLIYMMATTYNYAVLKFKSREDCCTKF

SEQ ID NO: 12349 - protein, 151 aa, Homo sapiens
MRGPGHPLLLGLLLVLGAAGRGRGGAEPREPADGQALLRLVVELVQELRKHHSAEHKGLQLLGRDCALGRAEAAGLGPSPEQRVEIVPRDLRMKDKFLKHLTGPLYFSPKCSKHFHRLYHNTRDCTIPAYYKRCARLLTRLAVSPVCMEDK

SEQ ID NO: 12350 - protein, 300 aa, Homo sapiens
MAEEVSTLMKATVLMRQPGRVQEIVGALRKGGGDRLQVISDFDMTLSRFAYNGKRCPSSYNILDNSKIISEECRKELTALLHHYYPIEIDPHRTVKEKLPHMVEWWTKAHNLLCQQKIQKFQIAQVVRESNAMLREGYKTFFNTLYHNNIPLFIFSAGIGDILEEIIRQMKVFHPNIHIVSNYMDFNEDGFLQGFKGQLIHTYNKNSSACENSGYFQQLEGKTNVILLGDSIGDLTMADGVPGVQNILKIGFLNDKVEERRERYMDSYDIVLEKDETLDVVNGLLQHILCQGVQLEMQGP

SEQ ID NO: 12351 - protein, 995 aa, Homo sapiens
MATRGGAGVAMAVWSLLSARAVTAFLLLFLPRFLQAQTFSFPFQQPEKCDNNQYFDISALSCVPCGANQRQDARGTSCVCLPGFQMISNNGGPAIICKKCPENMKGVTEDGWNCISCPSDLTAEGKCHCPIGHILVERDINGTLLSQATCELCDGNENSFMVVNALGDRCVRCEPTFVNTSRSCACSEPNILTGGLCFSSTGNFPLRRISAARYGEVGMSLTSEWFAKYLQSSAAACWVYANLTSCQALGNMCVMNMNSYDFATFDACGLFQFIFENTAGLSTVHSISFWRQNLPWLFYGDQLGLAPQVLSSTSLPTNFSFKGENQNTKLKFVAASYDIRGNFLKWQTLEGGVLQLCPDTETRLNAAYSFGTTYQQNCEIPISKILIDFPTPIFYDVYLEYTDENQHQYILAVPVLNLNLQHNKIFVNQDSNSGKWLLTRRIFLVDAVSGRENDLGTQPRVIRVATQISLSVHLVPNTINGNIYPPLITIAYSDIDIKDANSQSVKVSFSVTYEMDHGEAHVQTDIALGVLGGLAVLASLLKTAGWKRRIGSPMIDLQTVVKFLVYYAGDLANVFFIITVGTGLYWLIFFKAQKSVSVLLPMPIQEERFVTYVGCAFALKALQFLHKLISQITIDVFFIDWERPKGKVLKAVEGEGGVRSATVPVSIWRTYFVANEWNEIQTVRKINSLFQVLTVLFFLEVVGFKNLALMDSSSSLSRNPPSYIAPYSCILRYAVSAALWLAIGIIQVVFFAVFYERFIEDKIRQFVDLCSMSNISVFLLSHKCFGYYIHGRSVHGHADTNMEEMNMNLKREAENLCSQRGLVPNTDGQTFEIAISNQMRQHYDRIHETLIRKNGPARLLSSSASTFEQSIKAYHMMNKFLGSFIDHVHKEMDYFIKDKLLLERILGMEFMEPMEKSIFYNDEGYSFSSVLYYGNEATLLIFDLLFFCVVDLACQNFILASFLTYLQQEIFRYIRNTVGQKNLASKTLVDQRFLI

SEQ ID NO: 12352 - protein, 403 aa, Homo sapiens
MRPPQCLLHTPSLASPLLLLLLWLLGGGVGAEGREDAELLVTVRGGRLRGIRLKTPGGPVSAFLGIPFAEPPMGPRRFLPPEPKQPWSGVVDATTFQSVCYQYVDTLYPGFEGTEMWNPNRELSEDCLYLNVWTPYPRPTSPTPVLVWIYGGGFYSGASSLDVYDGRFLVQAERTVLVSMNYRVGAFGFLALPGSREAPGNVGLLDQRLALQWVQENVAAFGGDPTSVTLFGESAGAASVGMHLLSPPSRGLFHRAVLQSGAPNGPWATVGMGEARRRATQLAHLVGCPPGGTGGNDTELVACLRTRPAQVLVNHEWHVLPQESVFRFSFVPVVDGDFLSDTPEALINAGDFHGLQVLVGVVKDEGSYFLVYGAPGFSKDNESLISRAEFLAGVRVGVPQGSQ

SEQ ID NO: 12353 - protein, 348 aa, Homo sapiens
MPAPPCASCHAARAALRRPLSGQALCGACFCAAFEAEVLHTVLAGRLLPPGAVVAVGASGGKDSTVLAHVLRALAPRLGISLQLVAVDEGIGGYRDAALAAVRRQAARWELPLTVVAYEDLFGGWTMDAVARSTAGSGRSRSCCTFCGVLRRRALEEGARRVGATHIVTGHNADDMAETVLMNFLRGDAGRLARGGGLGSPGEGGALPRCRPLQFASQKEVVLYAHFRRLDYFSEECVYAPEAFRGHARDLLKRLEAARPSAVLDLVHSAERLALAPAARPPRPGACSRCGALASRALCQACALLDGLNRGRPRLAIGKGRRGLDEEATPGTPGDPARPPASKAVPTF

SEQ ID NO: 12354 - protein, 273 aa, Homo sapiens
MGSGWVPWVVALLVNLTRLDSSMTQGTDSPEDFVIQAKADCYFTNGTEKVQFVVRFIFNLEEYVRFDSDVGMFVALTKLGQPDAEQWNSRLDLLERSRQAVDGVCRHNYRLGAPFTVGRKVQPEVTVYPERTPLLHQHNLLHCSVTGFYPGDIKIKWFLNGQEERAGVMSTGPIRNGDWTFQTVVMLEMTPELGHVYTCLVDHSSLLSPVSVEWRAQSEYSWRKMLSGIAAFLLGLIFLLVGIVIQLRAQKGYVRTQMSGNEVSRAVLLPQSC

SEQ ID NO: 12355 - protein, 226 aa, Homo sapiens
MGRPLLLPLLPLLLPPAFLQPSGSTGSGPSYLYGVTQPKHLSASMGGSVEIPFSFYYPWELATAPDVRISWRRGHFHRQSFYSTRPPSIHKDYVNRLFLNWTEGQKSGFLRISNLQKQDQSVYFCRVELDTRSSGRQQWQSIEGTKLSITQGQQRTKATTPAREPFQNTEEPYENIRNEGQNTDPKLNPKLHLTQSTSQPPSPQEPPERDPVLCLKGLTNGQPSQD

SEQ ID NO: 12356 - protein, 87 aa, Homo sapiens
MKMLTRLQVLTLALFSKGFLLSLGDHNFLRREIKIEGDLVLGGLFPINEKGTGTEECGRINEDRGIQRLEAMLFAIDEINKDDYLLP

SEQ ID NO: 12357 - protein, 156 aa, Homo sapiens
MPVPWFLLSLALGRSPVVLSLERLVGPQDATHCSPGLSCRLWDSDILCLPGDIVPAPGPVLAPTHLQTELVLRCQKETDCDLCLRVAVHLAVHGHWEEPEDEEKFGGAADSGVEEPRNASLQAQVVLSFQAYPTARCVLLEVQVPAALVQFGLCGI

SEQ ID NO: 12358 - protein, 551 aa, Homo sapiens
MALRRLLLLLLLSLESLDLLPSVHGARGRAANRTLSAGGAAVGGRRAGGALARGGRELNGTARAPGIPEAGSRRGQPAAAVAAAASAAVTYETCWGYYDVSGQYDKEFECNNSESGYLYCCGTCYYRFCCKKRHEKLDQRQCTNYQSPVWVQTPSTKVVSPGPENKYDPEKDKTNFTVYITCGVIAFVIVAGVFAKVSYDKAHRPPREMNIHRALADILRQQGPIPIAHCERETISAIDTSPKENTPVRSSSKNHYTPVRTAKQTPGHYGKDAYRSGGPDLHNFISSGFVTLGRGHTKGDHQYNHPILSSVTQIPPHEKPRMNNILTSATEPYDLSFSRSFQNLAHLPPSYESAVKTNPSKYSSLKRLTDKEADEYYMRRRHLPDLAARGTLPLNVIQMSQQKPLPRERPRRPIRAMSQDRVLSPDRGLPDEFSMPYDRILSDEQLLSTERLHSQDPLLSPERTAFPEQSLSRAISHTDVFVSTPVLDRYRMSKMHSHPSASNNSYATLGQSQTAAKRHAFASRRHNTVEQLHYIPGHHTCYTASKTEVTV

SEQ ID NO: 12359 - protein, 324 aa, Homo sapiens
MRCALALSALLLLLSTPPLLPSSPSPSPSPSQNATQTTTDSSNKTAPTPASSVTIMATDTAQQSTVPTSKANEILASVKATTLGVSSDSPGTTTLAQQVSGPVNTTVARGGGSGNPTTTIESPKSTKSADTTTVATSTATAKPNTTSSQNGAEDTTNSGGKSSHSVTTDLTSTKAEHLTTPHPTSPLSPRQPTSTHPVATPTSSGHDHLMKISSSSSTVAIPGYTFTSPGMTTTLPSSVISQRTQQTSSQMPASSTAPSSQETVQPTSPATALRTPTLPETMSSSPTAASTTHRYPKTPSPTVAHESNWVTPAGVGQVGEPRLG

SEQ ID NO: 12360 - protein, 4861 aa, Homo sapiens
MATMIPPVKLKWLEHLNSSWITEDSESIATREGVAVLYSKLVSNKEVVPLPQQVLCLKGPQLPDFERESLSSDEQDHYLDALLSSQLALAKMVCSDSPFAGALRKRLLVLQRVFYALSNKYHDKGKVKQQQHSPESSSGSADVHSVSERPRSSTDALIEMGVRTGLSLLFALLRQSWMMPVSGPGLSLCNDVIHTAIEVVSSLPPLSLANESKIPPMGLDCLSQVTTFLKGVTIPNSGADTLGRRLASELLLGLAAQRGSLRYLLEWIEMALGASAVVHTMEKGKLLSSQEGMISFDCFMTILMQMRRSLGSSADRSQWREPTRTSDGLCSLYEAALCLFEEVCRMASDYSRTCASPDSIQTGDAPIVSETCEVYVWGSNSSHQLVEGTQEKILQPKLAPSFSDAQTIEAGQYCTFVISTDGSVRACGKGSYGRLGLGDSNNQSTLKKLTFEPHRSIKKVSSSKGSDGHTLAFTTEGEVFSWGDGDYGKLGHGNSSTQKYPKLIQGPLQGKVVVCVSAGYRHSAAVTEDGELYTWGEGDFGRLGHGDSNSRNIPTLVKDISNVGEVSCGSSHTIALSKDGRTVWSFGGGDNGKLGHGDTNRVYKPKVIEALQGMFIRKVCAGSQSSLALTSTGQVYAWGCGACLGCGSSEATALRPKLIEELAATRIVDVSIGDSHCLALSHDNEVYAWGNNSMGQCGQGNSTGPITKPKKVSGLDGIAIQQISAGTSHSLAWTALPRDRQVVAWHRPYCVDLEESTFSHLRSFLERYCDKINSEIPPLPFPSSREHHSFLKLCLKLLSNHLALALAGGVATSILGRQAGPLRNLLFRLMDSTVPDEIQEVVIETLSVGATMLLPPLRERMELLHSLLPQGPDRWESLSKGQRMQLDIILTSLQDHTHVASLLGYSSPSDAADLSSVCTGYGNLSDQPYGTQSCHPDTHLAEILMKTLLRNLGFYTDQAFGELEKNSDKFLLGTSSSENSQPAHLHELLCSLQKQLLAFCHINNISENSSSVALLHKHLQLLLPHATDIYSRSANLLKESPWNGSVGEKLRDVIYVSAAGSMLCQIVNSLLLLPVSVARPLLSYLLDLLPPLDCLNRLLPAADLLEDQELQWPLHGGPELIDPAGLPLPQPAQSWVWLVDLERTIALLIGRCLGGMLQGSPVSPEEQDTAYWMKTPLFSDGVEMDTPQLDKCMSCLLEVALSGNEEQKPFDYKLRPEIAVYVDLALGCSKEPARSLWISMQDYAVSKDWDSATLSNESLLDTVSRFVLAALLKHTNLLSQACGESRYQPGKHLSEVYRCVYKVRSRLLACKNLELIQTRSSSRDRWISENQDSADVDPQEHSFTRTIDEEAEMEEQAERDREEGHPEPEDEEEEREHEVMTAGKIFQCFLSAREVARSRDRDRMNSGAGSGARADDPPPQSQQERRVSTDLPEGQDVYTAACNSVIHRCALLILGVSPVIDELQKRREEGQLQQPSTSASEGGGLMTRSESLTAESRLVHTSPNYRLIKSRSESDLSQPESDEEGYALSGRRNVDLDLAASHRKRGPMHSQLESLSDSWARLKHSRDWLCNSSYSFESDFDLTKSLGVHTLIENVVSFVSGDVGNAPGFKEPEESMSTSPQASIIAMEQQQLRAELRLEALHQILVLLSGMEEKGSISLAGSRLSSGFQSSTLLTSVRLQFLAGCFGLGTVGHTGGKGESGRLHHYQDGIRAAKRNIQIEIQVAVHKIYQQLSATLERALQANKHHIEAQQRLLLVTVFALSVHYQPVDVSLAISTGLLNVLSQLCGTDTMLGQPLQLLPKTGVSQLSTALKVASTRLLQILAITTGTYADKLSPKVVQSLLDLLCSQLKNLLSQTGVLHMASFGEGEQEDGEEEEKKVDSSGETEKKDFRAALRKQHAAELHLGDFLVFLRRVVSSKAIQSKMASPKWTEVLLNIASQKCSSGIPLVGNLRTRLLALHVLEAVLPACESGVEDDQMAQIVERLFSLLSDCMWETPIAQAKHAIQIKEKEQEIKLQKQGELEEEDENLPIQEVSFDPEKAQCCLVENGQILTHGSGGKGYGLASTGVTSGCYQWKFYIVKENRGNEGTCVGVSRWPVHDFNHRTTSDMWLYRAYSGNLYHNGEQTLTLSSFTQGDFITCVLDMEARTISFGKNGEEPKLAFEDVDAAELYPCVMFYSSNPGEKVKICDMQMRGTPRDLLPGDPICSPVAAVLAEATIQLIRILHRTDRWTYCINKKMMERLHKIKICIKESGQKLKKSRSVQSREENEMREEKESKEEEKGKHTRHGLADLSELQLRTLCIEVWPVLAVIGGVDAGLRVGGRCVHKQTGRHATLLGVVKEGSTSAKVQWDEAEITISFPTFWSPSDTPLYNLEPCEPLPFDVARFRGLTASVLLDLTYLTGVHEDMGKQSTKRHEKKHRHESEEKGDVEQKPESESALDMRTGLTSDDVKSQSTTSSKSENEIASFSLDPTLPSVESQHQITEGKRKNHEHMSKNHDVAQSEIRAVQLSYLYLGAMKSLSALLGCSKYAELLLIPKVLAENGHNSDCASSPVVHEDVEMRAALQFLMRHMVKRAVMRSPIKRALGLADLERAQAMIYKLVVHGLLEDQFGGKIKQEIDQQAEESDPAQQAQTPVTTSPSASSTTSFMSSSLEDTTTATTPVTDTETVPASESPGVMPLSLLRQMFSSYPTTTVLPTRRAQTPPISSLPTSPSDEVGRRQSLTSPDSQSARPANRTALSDPSSRLSTSPPPPAIAVPLLEMGFSLRQIAKAMEATGARGEADAQNITVLAMWMIEHPGHEDEEEPQSGSTADSRPGAAVLGSGGKSNDPCYLQSPGDIPSADAAEMEEGFSESPDNLDHTENAASGSGPSARGRSAVTRRHKFDLAARTLLARAAGLYRSVQAHRNQSRREGISLQQDPGALYDFNLDEELEIDLDDEAMEAMFGQDLTSDNDILGMWIPEVLDWPTWHVCESEDREEVVVCELCECSVVSFNQHMKRNHPGCGRSANRQGYRSNGSYVDGWFGGECGSGNPYYLLCGTCREKYLAMKTKSKSTSSERYKGQAPDLIGKQDSVYEEDWDMLDVDEDEKLTGEEEFELLAGPLGLNDRRIVPEPVQFPDSDPLGASVAMVTATNSMEETLMQIGCHGSVEKSSSGRITLGEQAAALANPHDRVVALRRVTAAAQVLLARTMVMRALSLLSVSGSSCSLAAGLESLGLTDIRTLVRLMCLAAAGRAGLSTSPSAMASTSERSRGGHSKANKPISCLAYLSTAVGCLASNAPSAAKLLVQLCTQNLISAATGVNLTTVDDSIQRKFLPSFLRGIAEENKLVTSPNFVVTQALVALLADKGAKLRPNYDKSEVEKKGPLELANALAACCLSSRLSSQHRQWAAQQLVRTLAAHDRDNQTTLQTLADMGGDLRKCSFIKLEAHQNRVMTCVWCNKKGLLATSGNDGTIRVWNVTKKQYSLQQTCVFNRLEGDAEESLGSPSDPSFSPVSWSISGKYLAGALEKMVNIWQVNGGKGLVDIQPHWVSALAWPEEGPATAWSGESPELLLVGRMDGSLGLIEVVDVSTMHRRELEHCYRKDVSVTCIAWFSEDRPFAVGYFDGKLLLGTKEPLEKGGIVLIDAHKDTLISMKWDPTGHILMTCAKEDSVKLWGSISGCWCCLHSLCHPSIVNGIAWCRLPGKGSKLQLLMATGCQSGLVCVWRIPQDTTQTNVTSAEGWWEQESNCQDGYRKSSGAKCVYQLRGHITPVRTVAFSSDGLALVSGGLGGLMNIWSLRDGSVLQTVVIGSGAIQTTVWIPEVGVAACSNRSKDVLVVNCTAEWAAANHVLATCRTALKQQGVLGLNMAPCMRAFLERLPMMLQEQYAYEKPHVVCGDQLVHSPYMQCLASLAVGLHLDQLLCNPPVPPHHQNCLPDPASWNPNEWAWLECFSTTIKAAEALTNGAQFPESFTVPDLEPVPEDELVFLMDNSKWINGMDEQIMSWATSRPEDWHLGGKCDVYLWGAGRHGQLAEAGRNVMVPAAAPSFSQAQQVICGQNCTFVIQANGTVLACGEGSYGRLGQGNSDDLHVLTVISALQGFVVTQLVTSCGSDGHSMALTESGEVFSWGDGDYGKLGHGNSDRQRRPRQIEALQGEEVVQMSCGFKHSAVVTSDGKLFTFGNGDYGRLGLGNTSNKKLPERVTALEGYQIGQVACGLNHTLAVSADGSMVWAFGDGDYGKLGLGNSTAKSSPQKIDVLCGIGIKKVACGTQFSVALTKDGHVYTFGQDRLIGLPEGRARNHNRPQQIPVLAGVIIEDVAVGAEHTLALASNGDVYAWGSNSEGQLGLGHTNHVREPTLVTGLQGKNVRQISAGRCHSAAWTAPPVPPRAPGVSVPLQLGLPDTVPPQYGALREVSIHTVRARLRLLYHFSDLMYSSWRLLNLSPNNQNSTSHYNAGTWGIVQGQLRPLLAPRVYTLPMVRSIGKTMVQGKNYGPQITVKRISTRGRKCKPIFVQIARQVVKLNASDLRLPSRAWKVKLVGEGADDAGGVFDDTITEMCQELETGIVDLLIPSPNATAEVGYNRDRFLFNPSACLDEHLMQFKFLGILMGVAIRTKKPLDLHLAPLVWKQLCCVPLTLEDLEEVDLLYVQTLNSILHIEDSGITEESFHEMIPLDSFVGQSADGKMVPIIPGGNSIPLTFSNRKEYVERAIEYRLHEMDRQVAAVREGMSWIVPVPLLSLLTAKQLEQMVCGMPEISVEVLKKVVRYREVDEQHQLVQWFWHTLEEFSNEERVLFMRFVSGRSRLPANTADISQRFQIMKVDRPYDSLPTSQTCFFQLRLPPYSSQLVMAERLRYAINNCRSIDMDNYMLSRNVDNAEGSDTDY

SEQ ID NO: 12361 - protein, 138 aa, Homo sapiens
MKLLSLVAVVGCLLVPPAEANKSSEDIRCKCICPPYRNISGHIYNQNVSQKDCNCLHVVEPMPVPGHDVEAYCLLCECRYEERSTTTIKVIIVIYLSVVGALLLYMAFLMLVDPLIRKPDAYTEQLHNEEENEDARSM

SEQ ID NO: 12362 - protein, 28 aa, Homo sapiens
MRRAALWLWLCALALSLQPALPSLSHGR

SEQ ID NO: 12363 - protein, 205 aa, Homo sapiens
ELPHTLKLPGLPLFPNKFLISLVLLILVSSPADVAEKADRIITMLPTSINAIEAYSGANGILKKVKKGSLLIDSSTIDPAVSKELAKEVEKMGAVFMDAPVSGGVGAARSGNLTFMVGGVEDEFAAAQELLGCMGSNVVYCGAVGTGQAAKICNNMLLAISMIGTAEAMNLGIRLGLDPKLLAKILNMSSGRCWSSDTYNPVPGV

SEQ ID NO: 12364 - protein, 226 aa, Homo sapiens
MKLFWLLFTIGFCWAQYSSNTQQGRTSIVHLFEWRWVDIALECERYLAPKGFGGVQVSPPNENVAIHNPFRPWWERYQPVSYKLCTRSGNEDEFRNMVTRCNNVGVRIYVDAVINHMCGNAVSAGTSSTCGSYFNPGSRDFPAVPYSGWDFNDGKCKTGSGDIENYNDATQVRDCRLSGLLDLALGKDYVRSKIAEYMNHLIDIGVAGFRIDASKHMWPGDIKAIL

SEQ ID NO: 12365 - protein, 179 aa, Homo sapiens
MPPPRTGRGLLWLGLVLSSVCVALGSETQANSTTDALNVLLIIVDDLRPSLGCYGDKLVRSPNIDQLASHSLLFQNAFAQQAVCAPSRVSFLTGRRPDTTRLYDFNSYWRVHAGNFSTIPQYFKENGYVTMSVGKVFHPGTAPCPESGFSWFVVSESSIPILGMGLSLQSPLLAGRVPR

SEQ ID NO: 12366 - protein, 85 aa, Homo sapiens
MATAMDWLPWSLLLFSLMCETSAFYVPGVAPINFHQNDPVEIKAVKLTSSRTQLPYEYYSLPFCQPSKITYKAENLGRRKERTGS

SEQ ID NO: 12367 - protein, 221 aa, Homo sapiens
PCGPPSRALALSCAWTWFCLLDNLSGVRLLRQDPIECLFSFICSSNNNIARITGMVERLCQAFGPRLIQLDDVTYHGFPSLQALAGPEVEAHLRKLGLGYRARYVSASARAILEEQGGLAWLQQLRESSYEEAHKALCILPGVGTKVADCICLMALDKPQAVPVDVHMWHIAQRDYSWHPTTSQAKGPSPQTNKELGNFFRSLWGPYAGWAQAVSVPRCPP

SEQ ID NO: 12368 - protein, 178 aa, Homo sapiens
MLSSVVFWGLIALIGTSRGSYPFSHSMKPHLHPRLYHGCYGDIMTMKTSGATCDANSVMNCGIRGSEMFAEMDLRAIKPYQTLIKEVGQRHCVDPAVIAAIISRESHGGSVLQDGWDHRGLKFGLMQLDKQTYHPVGAWDSKEHLSQATGILTERIKAIQKKFPTWSVAQHLKGFFLL

SEQ ID NO: 12369 - protein, 137 aa, Homo sapiens
MGFGATLAVGLTIFVLSVVTIIICFTCSCCCLYKTCRRPRPVVTTTTSTTVVHAPYPQPPSVPPSYPGPSYQGYHTMPPQPGMPAAPYPMQYPPPYPAQPMGPPAYHETLAGGAAAPYPASQPPYNPAYMDAPKAAL

SEQ ID NO: 12370 - protein, 255 aa, Homo sapiens
MATAGGGSGADPGSRGLLRLLSFCVLLAGLCRGNSVERKIYIPLNKTAPCVRLLNATHQIGCQSSISGDTGVIHVVEKEEDLQWVLTDGPNPPYMVLLESKHFTRDLMEKLKGRTSRIAGLAVSLTKPSPASGFSPSVQCPNDGFGVYSNSYGPEFAHCREIQWNSLGNGLAYEDFSFPIFLLEDENETKVIKQETFDYIGSSRMVYDMEKGKFPVQLENVDSFVELGQVALRTSLELWMHTDPVSQKNESVRNQ

SEQ ID NO: 12371 - protein, 180 aa, Homo sapiens
MLQGTCSVLLLWGILGAIQAQQQEVISPDTTERNNNCPEKTDCPIHVYFVLDTSESVTMQSPTDILLFHMKQFVPQFISQLQNEFYLDQVALSWRYGGLHFSDQVEVFSPPGSDRASFIKNLQGISSFRRGTFTDCALANMTEQIRQDRSKGTVHFAVVITDGHVTGSPCGGIKLQAERA

SEQ ID NO: 12372 - protein, 431 aa, Homo sapiens
MQLKIMPKKKRLSAGRVPLILFLCQMISALEVPLDLVQPPTITQQSPKDYIIDPRENIVIQCEAKGKPPPSFSWTRNGTHFDIDKDPLVTMKPGTGTLIINIMSEGKAETYEGVYQCTARNERGAAVSNNIVVRPSRSPLWTKEKLEPITLQSGQSLVLPCRPPIGLPPPIIFWMDNSFQRLPQSERVSQGLNGDLYFSNVLPEDTREDYICYARFNHTQTIQQKQPISVKVISVDELNDTIAANLSDTEFYGAKSSRERPPTFLTPEGNASNKEELRGNVLSLECIAEGLPTPIIYWAKEDGMLPKNRTVYKNFEKTLQIIHVSEADSGNYQCIAKNALGAIHHTISVRVKAAPYWITAPQNLVLSPGEDGTLICRANGNPKPRISWLTNGVPIEIAPDDPSRKIDGDTIIFSNVQERSSAVYQCNASNE

SEQ ID NO: 12373 - protein, 227 aa, Homo sapiens
MALQIPGGFWAAAVTVMLVMLSTPVAEARDFPKDFLVQFKGMCYFTNGTERVRGVARYIYNREEYGRFDSDVGEFQAVTELGRSIEDWNNYKDFLEQERAAVDKVCRHNYEAELRTTLQRQVEPTVTISPSRTEALNHHNLLVCSVTDFYPAQIKVRWFRNDQEETAGVVSTSLIRNGDWTFQILVMLEITPQRGDIYTCQVEHPSLQSPITVEWRPRGPPPAGLLH

SEQ ID NO: 12374 - protein, 84 aa, Homo sapiens
MEPLLLGRGLIVYLMFLLLKFSKAIEIPSSVQQVPTIIKQSKVQVAFPFDEYFQIECEAKGNPEPTFSWTKDGNPFYFTDHRII

SEQ ID NO: 12375 - protein, 1261 aa, Homo sapiens
MAAAAASGAGGAAGAGTGGAGPAGRLLPPPAPGSPAAPAAVSPAAGQPRPPAPASRGPMPARIGYYEIDRTIGKGNFAVVKRATHLVTKAKVAIKIIDKTQLDEENLKKIFREVQIMKMLCHPHIIRLYQVMETERMIYLVTEYASGGEIFDHLVAHGRMAEKEARRKFKQIVTAVYFCHCRNIVHRDLKAENLLLDANLNIKIADFGFSNLFTPGQLLKTWCGSPPYAAPELFEGKEYDGPKVDIWSLGVVLYVLVCGALPFDGSTLQNLRARVLSGKFRIPFFMSTECEHLIRHMLVLDPNKRLSMEQICKHKWMKLGDADPNFDRLIAECQQLKEERQVDPLNEDVLLAMEDMGLDKEQTLQAEQAGTAMNISVPQVQLINPENQIVEPDGTLNLDSDEGEEPSPEALVRYLSMRRHTVGVADPRTEVMEDLQKLLPGFPGVNPQAPFLQVAPNVNFMHNLLPMQNLQPTGQLEYKEQSLLQPPTLQLLNGMGPLGRRASDGGANIQLHAQQLLKRPRGPSPLVTMTPAVPAVTPVDEESSDGEPDQEAVQRYLANRSKRHTLAMTNPTAEIPPDLQRQLGQQPFRSRVWPPHLVPDQHRSTYKDSNTLHLPTERFSPVRRFSDGAASIQAFKAHLEKMGNNSSIKQLQQECEQLQKMYGGQIDERTLEKTQQQHMLYQQEQHHQILQQQIQDSICPPQPSPPLQAACENQPALLTHQLQRLRIQPSSPPPNHPNNHLFRQPSNSPPPMSSAMIQPHGAASSSQFQGLPSRSAIFQQQPENCSSPPNVALTCLGMQQPAQSQQVTIQVQEPVDMLSNMPGTAAGSSGRGISISPSAGQMQMQHRTNLMATLSYGHRPLSKQLSADSAEAHSAHQQPPHYTTSALQQALLSPTPPDYTRHQQVPHILQGLLSPRHSLTGHSDIRLPPTEFAQLIKRQQQQRQQQQQQQQQQEYQELFRHMNQGDAGSLAPSLGGQSMTERQALSYQNADSYHHHTSPQHLLQIRAQECVSQASSPTPPHGYAHQPALMHSESMEEDCSCEGAKDGFQDSKSSSTLTKGCHDSPLLLSTGGPGDPESLLGTVSHAQELGIHPYGHQPTAAFSKNKVPSREPVIGNCMDRSSPGQAVELPDHNGLGYPARPSVHEHHRPRALQRHHTIQNSDDAYVQLDNLPGMSLVAGKALSSARMSDAVLSQSSLMGSQQFQDGENEECGASLGGHEHPDLSDGSQHLNSSCYPSTCITDILLSYKHPEVSFSMEQAGV

SEQ ID NO: 12376 - protein, 102 aa, Homo sapiens
MERGAGAKLLPLLLLLRATGFTCAQTDGRNGYTAVIEVTSGGPWGDWAWPEMCPDGFFASGFSLKVEPPQGIPGDDTALNGIRLHCARGNVLGNTHVLGRME

SEQ ID NO: 12377 - protein, 560 aa, Homo sapiens
MAAVAAEAAATAASPGEGGAGEAEPEMEPIPGSEAGTDPLPVTATEASVPDGETDGQQSAPQADEPPLPPPPPPPGELARSPEAVGPELEAEEKLSVRVAESAAAAPQGGPELPPSPASPPEQPPAPEEREEPPLPQPVAPALVPPAGGDSTVSQLIPGSEVRVTLDHIIEDALVVSFRFGEKLFSGVLMDLSKRFGPHGIPVTVFPKREYKDKPEAMPLQSNTFQEGTEVKCEANGAVPDDPSPVPHPELSLAESLWTSKPPPLFHEGAPYPPPLFIRDTYNQSIPQPPPRKIKRPKRKMYREEPTSIMNAIKLRPRQVLCDKCKNSVVAEKKEIRKGSSATDSSKYEDKKRRNESVTTVNKKLKTDHKVDGKNQNESQKRNAVVKVSNIAHSRGRVVKVSAQANTSKAQLSTKKVLQSKNMDHAKAREVLKIAKEKAQKKQNETSTSKNAHSKVHFTRRYQNPSSGSLPPRVRLKPQRYRNEENDSSLKTGLEKMRSGKMAPKPQSRCTSTRSAGLNKWQLLHQTVTSPAAPLQCLTDHCGFRLGALKLTVKRAAQRH

SEQ ID NO: 12378 - protein, 476 aa, Homo sapiens
MAESAGASSFFPLVVLLLAGSGGSGPRGVQALLCACTSCLQANYTCETDGACMVSIFNLDGMEHHVRTCIPKVELVPAGKPFYCLSSEDLRNTHCCYTDYCNRIDLRVPSGHLKEPEHPSMWGPVELVGIIAGPVFLLFLIIIIVFLVINYHQRVYHNRQRLDMEDPSCEMCLSKDKTLQDLVYDLSTSGSGSGLPLFVQRTVARTIVLQEIIGKGRFGEVWRGRWRGGDVAVKIFSSREERSWFREAEIYQTVMLRHENILGFIAADNKDNGTWTQLWLVSDYHEHGSLFDYLNRYTVTIEGMIKLALSAASGLAHLHMEIVGTQGKPGIAHRDLKSKNILVKKNGMCAIADLGLAVRHDAVTDTIDIAPNQRVGTKRYMAPEVLDETINMKHFDSFKCADIYALGLVYWEIARRCNSGGVHEEYQLPYYDLVPSDPSIEEMRKVVCDQKLRPNIPNWWQSYEVRSWPPAAFPSA

SEQ ID NO: 12379 - protein, 157 aa, Homo sapiens
MANIAVQRIKREFKEVLKSEETSKNQIKVDLVDENFTELRGEIAGPPDTPYEGGRYQLEIKIPETYPFNPPKVRFITKIWHPNISSVTGAICLDILKDQWAAAMTLRTVLLSLQALLAAAEPDDPQDAVVANQNAVIVALSSKSWDVETATELLLSN

SEQ ID NO: 12380 - protein, 566 aa, Homo sapiens
MWLRAFILATLSASAAWGHPSSPPVVDTVHGKVLGKFVSLEGFAQPVAIFLGIPFAKPPLGPLRFTPPQPAEPWSFVKNATSYPPMCTQDPKAGQLLSELFTNRKENIPLKLSEDCLYLNIYTPADLTKKNRLPVMVWIHGGGLMVGAASTYDGLALAAHENVVVVTIQYRLGIWGFFSTGDEHSRGNWGHLDQVAALRWVQDNIASFGGNPGSVTIFGESAGGESVSVLVLSPLAKNLFHRAISESGVALTSVLVKKGDVKPLAEQIAITAGCKTTTSAVMVHCLRQKTEEELLETTLKMKFLSLDLQGDPRESQPLLGTVIDGMLLLKTPEELQAERNFHTVPYMVGINKQEFGWLIPMLMSYPLSEGQLDQKTAMSLLWKSYPLVCIAKELIPEATEKYLGGTDDTVKKKDLFLDLIADVMFGVPSVIVARNHRDAGAPTYMYEFQYRPSFSSDMKPKTVIGDHGDELFSVFGAPFLKEGASEEEIRLSKMVMKFWANFARNGNPNGEGLPHWPEYNQKEGYLQIGANTQAAQKLKDKEVAFWTNLFAKKAVEKPPQTEHIEL

SEQ ID NO: 12381 - protein, 491 aa, Homo sapiens
MEQPPAPKSKLKKLSEDSLTKQPEEVFDVLEKLGEGSYGSVFKAIHKESGQVVAIKQVPVESDLQEIIKEISIMQQCDSPYVVKYYGSYFKNTDLWIVMEYCGAGSVSDIIRLRNKTLIEDEIATILKSTLKGLEYLHFMRKIHRDIKAGNILLNTEGHAKLADFGVAGQLTDTMAKRNTVIGTPFWMAPEVIQEIGYNCVADIWSLGITSIEMAEGKPPYADIHPMRAIFMIPTNPPPTFRKPELWSDDFTDFVKKCLVKNPEQRATATQLLQHPFIKNAKPVSILRDLITEAMEIKAKRHEEQQRELEEEEENSDEDELDSHTMVKTSVESVGTMRATSTMSEGAQTMIEHNSTMLESDLGTMVINSEDEEEEDGTMKRNATSPQVQRPSFMDYFDKQDFKNKSHENCNQNMHEPFPMSKNVFPDNWKVPQDGDFDFLKNLSLEELQMRLKALDPMMEREIEELRQRYTAKRQPILDAMDAKKRRQQNF

SEQ ID NO: 12382 - protein, 129 aa, Homo sapiens
MNPVYSPVQPGAPYGNPKNMAYTGYPTAYPAAAPAYNPSLYPTNSPSYAPATLLMKQAWPQNSSSCGTEGTFHLPVDTGTENRTYQASSAAFSTLLTTPQHTAIGAHPVSMPTYRAQGTPAYSYVPPHW

SEQ ID NO: 12383 - protein, 54 aa, Homo sapiens
MRLPWELLVLQSFILCLADDSTLHGPIFIQEPSPVMFPLDSEEKKVKLNCEVKG

SEQ ID NO: 12384 - protein, 117 aa, Homo sapiens
MREWWVQVGLLAVPLLAAYLHIPPPQLSPALHSWKSSGKFFTYKGLRIFYQDSVGVVGSPEIVVLLHGFPTSSYDWYKIWEGLTLRFHRVIALDFLGFGFSDKPRPHHYSIFEQASI

SEQ ID NO: 12385 - protein, 267 aa, Homo sapiens
MGPEALSSLLLLLLVASGDADMKGHFDPAKCRYALGMQDRTIPDSDISASSSWSDSTAARHSRLESSDGDGAWCPAGSVFPKEEEYLQVDLQRLHLVALVGTQGRHAGGLGKEFSRSYRLRYSRDGRRWMGWKDRWGQEVISGNEDPEGVVLKDLGPPMVARLVRFYPRADRVMSVCLRVELYGCLWRDGLLSYTAPVGQTMYLSEAVYLNDSTYDGHTVGGLQYGGLGQLADGVVGLDDFRKSQELRVWPGYDYVGWSNHSFSSGY

SEQ ID NO: 12386 - protein, 128 aa, Homo sapiens
MMLRVLVGAVLPAMLLAAPPPINKLALFPDKSAWCEAKNITQIVGHSGCEAKSIQNRACLGQCFSYSVPNTFPQSTESLVHCDSCMPAQSMWEIVTLECPGHEEVPRVDKLVEKILHCSCQACGKEPS

SEQ ID NO: 12387 - protein, 482 aa, Homo sapiens
MVDFPGYNLSGAVASFLFILLTMKQSEDFRVIGPAHPILAGVGEDALLTCQLLPKRTTMHVEVRWYRSEPSTPVFVHRDGVEVTEMQMEEYRGWVEWIENGIAKGNVALKIHNIQPSDNGQYWCHFQDGNYCGETSLLLKVAGLGSAPSIHMEGPGESGVQLVCTARGWFPEPQVYWEDIRGEKLLAVSEHRIQDKDGLFYAEATLVVRNASAESVSCLVHNPVLTEEKGSVISLPEKLQTELASLKVNGPSQPILVRVGEDIQLTCYLSPKANAQSMEVRWDRSHRYPAVHVYMDGDHVAGEQMAEYRGRTVLVSDAIDEGRLTLQILSARPSDDGQYRCLFEKDDVYQEASLDLKVVSLGSSPLITVEGQEDGEMQPMCSSDGWFPQPHVPWRDMEGKTIPSSSQALTQGSHGLFHVQTLLRVTNISAVDVTCSISIPFLGEEKIATFSLSESRMTFLWKTLLVWGLLLAVAVGLPRKRS

SEQ ID NO: 12388 - protein, 216 aa, Homo sapiens
MGKAAAAVAFGAEVGVRLALFAAFLVTELLPPFQRLIQPEEMWLYRNPYVEAEYFPTKPMFVIAFLSPLSLIFLAKFLKKADTRDSRQACLAASLALALNGVFTNTIKLIVGRPRPDFFYRCFPDGLAHSDLMCTGDKDVVNEGRKSFPSGHSSFAFAGLAFASFYLAGKLHCFTPQGRGKSWRFCAFLSPLLFAAVIALSRTCDYKHHWQGPFKW

SEQ ID NO: 12389 - protein, 216 aa, Homo sapiens
MELMKLTPEKVQNWNSEILAKQKPLIAKPSAKLLFVNRLKGKKYKTNSSTKVLQDASNSIDHRIPNSQRKISADTIGDEGFFDLLSRFQSNRMDDQRCCLQEKNCHTASTTTSSTPPKMMLKTSSVPVVSPNTDEFLDLLASSQSRRLDDQRASFSNLPGLRLTQNSQSVLSHLMTNDNKEADEDFFDILVKCQVCLYIFFVLHTAQIPLKTLVVL

SEQ ID NO: 12390 - protein, 223 aa, Homo sapiens
MALRHLALLAGLLVGVASKSMENTAQLPECCVDVVGVNASCPGASLCGPGCYRRWNADGSASCVRCGNGTLPAYNGSECRSFAGPGAPFPMNRSSGTPGRPHPGAPRVAASLFLGTFFISSGLILSVAGFFYLKRSSKLPRACYRRNKAPALQPGEAAAMIPPPQSSAPPEDRRSRPPPGPPEQPSLQWCWVRRTQESARTEAALRQAGAAPGQGHGSRCLPG

SEQ ID NO: 12391 - protein, 592 aa, Homo sapiens
MWLFFGITGLLTAALSGHPSPAPPDQLNTSSAESELWEPGERLPVRLTNGSSSCSGTVEVRLEASWEPACGALWDSRAAEAVCRALGCGGAEAASQLAPPTPELPPPPAAGNTSVAANATLAGAPALLCSGAEWRLCEVVEHACRSDGRRARVTCAENRALRLVDGGGACAGRVEMLEHGEWGSVCDDTWDLEDAHVVCRQLGCGWAVQALPGLHFTPGRGPIHRDQVNCSGAEAYLWDCPGLPGQHYCGHKEDAGAVCSEHQSWRLTGGADRCEGQVEVHFRGVWNTVCDSEWYPSEAKVLCQSLGCGTAVERPKGLPHSLSGRMYYSCNGEELTLSNCSWRFNNSNLCSQSLAARVLCSASRSLHNLSTPEVPASVQTVTIESSVTVKIENKESRELMLLIPSIVLGILLLGSLIFIAFILLRIKGKYALPVMVNHQHLPTTIPAGSNSYQPVPITIPKEDSQRHRVTDEEVQQSRFQMPPLEEGLEELHASHIPTANPGHCITDPPSLGPQYHPRSNSESSTSSGEDYCNSPKSKLPPWNPQVFSSERSSFLEQPPNLELAGTQPAFSGSPSPQPDSTDNDDYDDISAA

SEQ ID NO: 12392 - protein, 816 aa, Homo sapiens
MESRVLLRTFCLIFGLGAVWGLGVDPSLQIDVLTELELGESTTGVRQVPGLHNGTKAFLFQDTPRSIKASTATAEQFFQKLRNKHEFTILVTLKQTHLNSGVILSIHHLDHRYLELESSGHRNEVRLHYRSGSHRPHTEVFPYILADDKWHKLSLAISASHLILHIDCNKIYERVVEKPSTDLPLGTTFWLGQRNNAHGYFKGIMQDVQLLVMPQGFIAQCPDLNRTCPTCNDFHGLVQKIMELQDILAKTSAKLSRAEQRMNRLDQCYCERTCTMKGTTYREFESWIDGCKNCTCLNGTIQCETLICPNPDCPLKSALAYVDGKCCKECKSICQFQGRTYFEGERNTVYSSSGVCVLYECKDQTMKLVESSGCPALDCPESHQITLSHSCCKVCKGYDFCSERHNCMENSICRNLNDRAVCSCRDGFRALREDNAYCEDIDECAEGRHYCRENTMCVNTPGSFMCICKTGYIRIDDYSCTEHDECITNQHNCDENALCFNTVGGHNCVCKPGYTGNGTTCKAFCKDGCRNGGACIAANVCACPQGFTGPSCETDIDECSDGFVQCDSRANCINLPGWYHCECRDGYHDNGMFSPSGESCEDIDECGTGRHSCANDTICFNLDGGYDCRCPHGKNCTGDCIHDGKVKHNGQIWVLENDRCSVCSCQNGFVMCRRMVCDCENPTVDLFCCPECDPRLSSQCLHQNGETLYNSGDTWVQNCQQCRCLQGEVDCWPLPCPDVECEFSILPENECCPRCVTDPCQADTIRNDITKTCLDEMNVVRFTGSSWIKHGTECTLCQCKNGHICCSVDPQCLQEL

SEQ ID NO: 12393 - protein, 348 aa, Homo sapiens
MWSEGRYEYERIPRERAPPRSHPSDGYNRLVNIVPKKPPLLDRPGEGSYNRYYSHVDYRDYDEGRSFSHDRRSGPPHRGDESGYRWTRDDHSASRQPEYRDMRDGFRRKSFYSSHYARERSPYKRDNTFFRESPVGRKDSPHSRSGSSVSSRSYSPERSKSYSFHQSQHRNKERPVQSLKTSRDTSPSSGSAVSSSKVLDKPSRLTEKELAEAASKWAAEKLEKSDESNLPEISEYEAGSTAPLFTDQPEEPESNTTHGIELFEDSQLTTRSKAIASKTKEIEQVYRQDCETFGMVVKMLIEKDPSLEKSIQFALRQNLHEIGERCVEELKHFIAEYDTSTQDFGEPF

SEQ ID NO: 12394 - protein, 1134 aa, Homo sapiens
MHQMNAKMHFRFVFALLIVSFNHDVLGKNLKYRIYEEQRVGSVIARLSEDVADVLLKLPNPSTVRFRAMQRGNSPLLVVNEDNGEISIGATIDREQLCQKNLNCSIEFDVITLPTEHLQLFHIEVEVLDINDNSPQFSRSLIPIEISESAAVGTRIPLDSAFDPDVGENSLHTYSLSANDFFNIEVRTRTDGAKYAELIVVRELDRELKSSYELQLTASDMGVPQRSGSSILKISISDSNDNSPAFEQQSYIIQLLENSPVGTLLLDLNATDPDEGANGKIVYSFSSHVSPKIMETFKIDSERGHLTLFKQVDYEITKSYEIDVQAQDLGPNSIPAHCKIIIKVVDVNDNKPEININLMSPGKEEISYIFEGDPIDTFVALVRVQDKDSGLNGEIVCKLHGHGHFKLQKTYENNYLILTNATLDREKRSEYSLTVIAEDRGTPSLSTVKHFTVQINDINDNPPHFQRSRYEFVISENNSPGAYITTVTATDPDLGENGQVTYTILESFILGSSITTYVTIDPSNGAIYALRIFDHEEVSQITFVVEARDGGSPKQLVSNTTVVLTIIDENDNVPVVIGPALRNNTAEITIPKGAESGFHVTRIRAIDRDSGVNAELSCAIVAGNEENIFIIDPRSCDIHTNVSMDSVPYTEWELSVIIQDKGNPQLHTKVLLKCMIFEYAESVTSTAMTSVSQASLDVSMIIIISLGAICAVLLVIMVLFATRCNREKKDTRSYNCRVAESTYQHHPKRPSRQIHKGDITLVPTINGTLPIRSHHRSSPSSSPTLERGQMGSRQSHNSHQSLNSLVTISSNHVPENFSLELTHATPAVEVSQLLSMLHQGQYQPRPSFRGNKYSRSYRYALQDMDKFSLKDSGRGDSEAGDSDYDLGRDSPIDRLLGEGFSDLFLTDGRIPAAMRLCTEECRVLGHSDQCWMPPLPSPSSDYRSNMFIPGEEFPTQPQQQHPHQSLEDDAQPADSGEKKKSFSTFGKDSPNDEDTGDTSTSSLLSEMSSVFQRLLPPSLDTYSECSEVDRSNSLERRKGPLPAKTVGYPQGVAAWAASTHFQNPTTNCGPPLGTHSSVQPSSKWLPAMEEIPENYEEDDFDNVLNHLNDGKHELMDASELVAEINKLLQDVRQS

SEQ ID NO: 12395 - protein, 98 aa, Homo sapiens
MAQFDTEYQRLEASYSDSPPGEEDLLVHVAEGSKSPWHHIENLDLFFSRTFIICTRRMASHVCSSGRSLSSCSSSLWLPSLPSWSAAWTMTSYLPTRW

SEQ ID NO: 12396 - protein, 378 aa, Homo sapiens
MIIVAHVLLILLGATEILQADLLPDEKISLLPPVNFTIKVTGLAQVLLQWKPNPDQEQRNVNLEYQVKINAPKEDDYETRITESKCVTILHKGFSASVRTILQNDHSLLASSWASAELHAPPGSPGTSIVNLTCTTNTTEDNYSRLRSYQVSLHCTWLVGTDAPEDTQYFLYYRYGSWTEECQEYSKDTLGRNIACWFPRTFILSKGRDWLAVLVNGSSKHSAIRPFDQLFALHAIDQINPPLNVTAEIEGTRLSIQWEKPVSAFPIHCFDYEVKIHNTRNGYLQIEKLMTNAFISIIDDLSKYDVQVRAAVSSMCREAGLWSEWSQPIYVGNDEHKPLREWFVIVIMATICFILLILSLICKIKLGPVRRKLKSSVI

SEQ ID NO: 12397 - protein, 146 aa, Homo sapiens
MRMCTPIRGLLMALAVMFGTAMAFAPIPRITWEHREVHLVQFHEPDIYNYSALLLSEDKDTLYIGAREAVFAVNALNISEKQHEVYWKVSEDKKAKCAEKGKSKQTECLNYIRVLQPLSATSLYVCGTNAFQPACDHLNLTSFKFL

SEQ ID NO: 12398 - protein, 138 aa, Homo sapiens
MDSWFILVLLGSGLICVSANNATTVAPSVGITRLINSSTAEPVKEEAKTSNPTSSLTSLSVAPTFSPNITLGPTYLTTVNSSDSDNGTTRTASTNSIGITISPNGTWLPDNQFTDARTEPWEGNSSTAATTPETFPPS

SEQ ID NO: 12399 - protein, 642 aa, Homo sapiens
MAAAAAATAAAAASIRERQTVALKRMLNFNVPHIKNSTGEPVWKVLIYDRFGQDIISPLLSVKELRDMGITLHLLLHSDRDPIPDVPAVYFVMPTEENIDRMCQDLRNQLYESYYLNFISAISRSKLEDIANAALAASAVTQVAKVFDQYLNFITLEDDMFVLCNQNKELVSYRAINRPDITDTEMETVMDTIVDSLFCFFVTLGAVPIIRCSRGTAAEMVAVKLDKKLRENLRDARNSLFTGDTLGAGQFSFQRPLLVLVDRNIDLATPLHHTWTYQALVHDVLDFHLNRVNLEESSGVENSPAGARPKRKNKKSYDLTPVDKFWQKHKGSPFPEVAESVQQELESYRAQEDEVKRLKSIMGLEGEDEGAISMLSDNTAKLTSAVSSLPELLEKKRLIDLHTNVATAVLEHIKARKLDVYFEYEEKIMSKTTLDKSLLDIISDPDAGTPEDKMRLFLIYYISTQQAPSEADLEQYKKALTDAGCNLNPLQYIKQWKAFTKMASAPASYGSTTTKPMGLLSRVMNTGSQFVMEGVKNLVLKQQNLPVTRILDNLMEMKSNPETDDYRYFDPKMLRGNDSSVPRNKNPFQEAIVFVVGGGNYIEYQNLVDYIKGKQGKHILYGCSELFNATQFIKQLSQLGQK

SEQ ID NO: 12400 - protein, 208 aa, Homo sapiens
FFLLLFTIGFCWAQYSPNTQQGRTSIVHLFEWRWVDIALECERYLAPKGFGGVQVSPPNENVAIYNPFRPWWERYQPVSYKLCTRSGNEDEFRNMVTRCNNVGVRIYVDAVINHMCGNAVSAGTSSTCGSYFNPGSRDFPAVPYSGWDFNDGKCKTGSGDIENYNDATQVIDLGGEPIKSSDYFGNGRVTEFKYGAKLGTVIRKWNGE

SEQ ID NO: 12401 - protein, 121 aa, Homo sapiens
MRPAALRGALLGCLCLALLCLGGADKRLRDNHEWKKLIMVQHWPETVCEKIQNDCRDPPDYWTIHGLWPDKSEGCNRSWPFNLEEIKKNWMEITDSSLPSPSTLPIINIFYSVLHLLQLMN

SEQ ID NO: 12402 - protein, 118 aa, Homo sapiens
MQLKIMPKKKRLSAGRVPLILFLCQMISALEVPLDPKLLEDLVQPPTITQQSPKDYIIDPRENIVIQCEAKGKPPPSFSWTRNGTHFDIDKDPLVTMKPGTGTLIINIMSEGKAETYE

SEQ ID NO: 12403 - protein, 107 aa, Homo sapiens
MALQTLQSSWVTFRKILSHFPEELSLAFVYGSGVYRQAGPSSDQKSYLTAASRTCWLPYPQSTFLQHGSLPFPVLPPVLPASLFNSRVLQDSDLSSLGEFLPPVPLI

SEQ ID NO: 12404 - protein, 209 aa, Homo sapiens
MRPEDRMFHIRAVILRALSLAFLLSLRGAGAIKADHVSTYAAFVQTHRPTGEFMFEFDEDEMFYVDLDKKETVWHLEEFGQAFSFEAQGGLANIAILNNNLNTLIQRSNHTQATNDPPEVTVFPKEPVELGQPNTLICHIDKFFPPVLNVTWLCNGELVTEGVAESLFLPRTDYSFHKFHYLTFVPSAEDFYDCRVEHWGLDQPLLKHW

SEQ ID NO: 12405 - protein, 305 aa, Homo sapiens
MAADGDWQDFYEFQEPARSLLDQENCNASPEPGAEAGAEAGGGADGFPAPACSLEEKLSLCFRPSDPGAEPPRTAVRPITERSLLQGDEIWNALTDNYGNVMPVDWKSSHTRTLHLLTLNLSEKGVSDSLLFDTSDDEELREQLDMHSIIVSCVNDEPLFTADQVIEEIEEMMQESPDPEDDETPTQSDRLSMLSQEIQTLKRSSTGSYEERVKRLSVSELNEILEEIETAIKEYSEELVQQLALRDELEFEKEVKNSFISVLIEVQNKQKEHKETAKKKKKLKNGSSQNGKNERSHMPGTFFVP

SEQ ID NO: 12406 - protein, 972 aa, Homo sapiens
MRGARGAWDFLCVLLLLLRVQTGSSQPSVSPGEPSPPSIHPGKSDLIVRVGDEIRLLCTDPGFVKWTFEILDETNENKQNEWITEKAEATNTGKYTCTNKHGLSNSIYVFVRDPAKLFLVDRSLYGKEDNDTLVRCPLTDPEVTNYSLKGCQGKPLPKDLRFIPDPKAGIMIKSVKRAYHRLCLHCSVDQEGKSVLSEKFILKVRPAFKAVPVVSVSKASYLLREGEEFTVTCTIKDVSSSVYSTWKRENSQTKLQEKYNSWHHGDFNYERQATLTISSARVNDSGVFMCYANNTFGSANVTTTLEVVDKGFINIFPMINTTVFVNDGENVDLIVEYEAFPKPEHQQWIYMNRTFTDKWEDYPKSENESNIRYVSELHLTRLKGTEGGTYTFLVSNSDVNAAIAFNVYVNTKPEILTYDRLVNGMLQCVAAGFPEPTIDWYFCPGTEQRCSASVLPVDVQTLNSSGPPFGKLVVQSSIDSSAFKHNGTVECKAYNDVGKTSAYFNFAFKEQIHPHTLFTPLLIGFVIVAGMMCIIVMILTYKYLQKPMYEVQWKVVEEINGNNYVYIDPTQLPYDHKWEFPRNRLSFGKTLGAGAFGKVVEATAYGLIKSDAAMTVAVKMLKPSAHLTEREALMSELKVLSYLGNHMNIVNLLGACTIGGPTLVITEYCCYGDLLNFLRRKRDSFICSKQEDHAEAALYKNLLHSKESSCSDSTNEYMDMKPGVSYVVPTKADKRRSVRIGSYIERDVTPAIMEDDELALDLEDLLSFSYQVAKGMAFLASKNCIHRDLAARNILLTHGRITKICDFGLARDIKNDSNYVVKGNARLPVKWMAPESIFNCVYTFESDVWSYGIFLWELFSLGSSPYPGMPVDSKFYKMIKEGFRMLSPEHAPAEMYDIMKTCWDADPLKRPTFKQIVQLIEKQISESTNHIYSNLANCSPNRQKPVVDHSVRINSVGSTASSSQPLLVHDDV

SEQ ID NO: 12407 - protein, 171 aa, Homo sapiens
MRALAVLSVTLVMACTEAFFPFISRGKELLWGKPEESRVSSVLEESKRLVDTAMYATMQRNLKKRGILSPAQLLSFSKLPEPTSGVIARAAEIMETSIQAMKRKVNLKTQQSQHPTDALSEDLLSIIANMSGCLPYMLPPKCPNTCLANKYRPITGACNNRDHPRWGASNT

SEQ ID NO: 12408 - protein, 286 aa, Homo sapiens
MSPHPTALLGLVLCLAQTIHTQEDLPRPSISAEPGTVIPLGSHVTFVCRGPVGVQTFRLERDSRSTYNDTEDVSQASPSESEARFRIDSVREGNAGLYRCIYYKPPKWSEQSDYLELLVKESSGGPDSPDTEPGSSAGPTQRPSDNSHNEHAPASQGLKAEHLYILIGVSVVFLFCLLLLVLFCLHRQNQIKQGPPRSKDEEQKPQQRPDLAVDVLERTADKATVNGLPEKDRETDTSALAAGSSQEVTYAQLDHWALTQRTARAVSPQSTKPMAESITYAAVARH

SEQ ID NO: 12409 - protein, 465 aa, Homo sapiens
MKFQGPLACLLLALCLGSGEAGPLQSGEESTGTNIGEALGHGLGDALSEGVGKAIGKEAGGAAGSKVSEALGQGTREAVGTGVRQVPGFGVADALGNRVGEAAHALGNTGHEIGRQAEDVIRHGADAVRGSWQGVPGHNGAWETSGGHGIFGSQGGLGGQGQGNPGGLGTPWVHGYPGNSAGSFGMNPQGAPWGQGGNGGPPNFGTNTQGAVAQPGYGSVRASNQNEGCTNPPPSGSGGGSSNSGGSSTGSSSGNHGGSGGGNGHKPGCEKPGNEARGSGESGIQGFRGQGVSSNMREISKEGNRLLGGSGDNYRGQGSSWGSGGGDAVGGVNTVNSETSPGMFNFDTFWKNFKSKLGFINWDAINKNQVPPPSTRALLYFSRLWEDFKQNTPFLNWKAIIEGADASSLQKRAGRDDQNYNYNQHAYPTAYGGKYSVKTPAKGGVSPSSSASRVQPGLLQWVKFW

SEQ ID NO: 12410 - protein, 399 aa, Homo sapiens
MSQVTFSDVAIDFSHEEWACLDSAQRDLYKDVMVQNYENLVSVGLSVTKPYVIMLLEDGKEPWMMEKKLSKDWESRWENKELSTKKDIYDEDSPQPVTMEKVVKQSYEFSNSNKNLEYTECDTFRSTFHSKSTLSEPQNNSAEGNSHKYDILKKNLSKKSVIKSERINGGKKLLNSNKSGAAFNQSKSLTLPQTCNREKIYTCSECGKAFGKQSILSRHWRIHTGEKPYECRECGKTFSHGSSLTRHQISHSGEKPYKCIECGKAFSHGSSLTNHQSTHTGEKPYECMNCGKSFSRVSLLIQHLRIHTQEKRYECRICGKAFIHSSSLIHHQKSHTGEKPYECRECGKAFCCSSHLTQHQRIHSMKKKYECNKCLKVFSSFSFLVQHQSIHTEEKPFEV

SEQ ID NO: 12411 - protein, 660 aa, Homo sapiens
MSSGIWQRGKEEEGVYGFLIEDIRKEVNRASKLKCCVCKKNGASIGCVAPRCKRSYHFPCGLQRECIFQFTGNFASFCWDHRPVQIITSNNYRESLPCTICLEFIEPIPSYNILRSPCCKNAWFHRDCLQVQAINAGVFFFRCTICNNSDIFQKEMLRMGIHIPEKDASWELEENAYQELLQHYERCDVRRCRCKEGRDYNAPDSKWEIKRCQCCGSSGTHLACSSLRSWEQNWECLECRGIIYNSGEFQKAKKHVLPNSNNVGITDCLLEESSPKLPRQSPGSQSKDLLRQGSKFRRNVSTLLIELGFQIKKKTKRLYINKANIWNSALDAFRNRNFNPSYAIEVAYVIENDNFGSEHPGSKQEFLSLLMQHLENSSLFEGSLSKNLSLNSQALKENLYYEAGKMLAISLVHGGPSPGFFSKTLFNCLVYGPENTQPILDDVSDFDVAQIIIRINTATTVADLKSIINECYNYLELIGCLRLITTLSDKYMLVKDILGYHVIQRVHTPFESFKQGLKTLGVLEKIQAYPEAFCSILCHKPESLSAKILSELFTVHTLPDVKALGFWNSYLQAVEDGKSTTTMEDILIFATGCSSIPPAGFKPTPSIECLHVDFPVGNKCNNCLAIPITNTYKEFQENMDFTIRNTLRLEKEESSHYIGH

SEQ ID NO: 12412 - protein, 639 aa, Homo sapiens
MGIFVSFLRSETQHRGSAPHSESDLPEQEEEILGSDDDEQEDPNDYCKGGYHLVKIGDLFNGRYHVIRKLGWGHFSTVWLSWDIQGKKFVAMKVVKSAEHYTETALDEIRLLKSVRNSDPNDPNREMVVQLLDDFKISGVNGTHICMVFEVLGHHLLKWIIKSNYQGLPLPCVKKIIQQVLQGLDYLHTKCRIIHTDIKPENILLSVNEQYIRRLAAEATEWQRSGAPPPSGSAVSTAPQPKPADKMSKNKKKKLKKKQKRQAELLEKRMQEIEEMEKESGPGQKRPNKQEESESPVERPLKENPPNKMTQEKLEESSTIGQDQTLMERDTEGGAAEINCNGVIEVINYTQNSNNETLRHKEDLHNANDCDVQNLNQESSFLSSQNGDSSTSQETDSCTPITSEVSDTMVCQSSSTVGQSFSEQHISQLQESIRAEIPCEDEQEQEHNGPLDNKGKSTAGNFLVNPLEPKNAEKLKVKIADLGNACWVHKHFTEDIQTRQYRSLEVLIGSGYNTPADIWSTACMAFELATGDYLFEPHSGEEYTRDEDHIALIIELLGKVPRKLIVAGKYSKEFFTKKGDLKHITKLKPWGLFEVLVEKYEWSQEEAAGFTDFLLPMLELIPEKRATAAECLRHPWLNS

SEQ ID NO: 12413 - protein, 61 aa, Homo sapiens
MGKLVALVLLGVGLSLVGEMFLAFRERVNASREVEPVEPENCHLIEELGIKISRHAKLCAR

SEQ ID NO: 12414 - protein, 75 aa, Homo sapiens
MRLRRLALFPGVALLLAAARLAAASDVLELTDDNFESRISDTGSAGLMLVEFFAPWLQNSPSQRDPSATLWLLKR

SEQ ID NO: 12415 - protein, 259 aa, Homo sapiens
MGFWILAILTILMYSTAAKFSKQSWGLENEALIVRCPRQGKPSYTVDWYYSQTNKSIPTQERNRVFASGQLLKFLPAAVADSGIYTCIVRSPTFNRTGYANVTIYKKQSDCNVPDYLMYSTVSGSEKNSKIYCPTIDLYNWTAPLEWFKNCQALQGSRYRAHKSFLVIDNVMTEDAGDYTCKFIHNENGANYSVTATRSFTVKVWCQSFCKLKKSLIFSNTHWIQSLMRGFVMVYYGVHKCCRVVFNLCLQYFQHHQWP

SEQ ID NO: 12416 - protein, 331 aa, Homo sapiens
MSRYLLPLSALGTVAGAAVLLKDYVTGGACPSKATIPGKTVIVTGANTGIGKQTALELARRGGNIILACRDMEKCEAAAKDIRGETLNHHVNARHLDLASLKSIREFAAKIIEEEERVDILINNAGVMRCPHWTTEDGFEMQFGVNHLGHFLLTNLLLDKLKASAPSRIINLSSLAHVAGHIDFDDLNWQTRKYNTKAAYCQSKLAIVLFTKELSRRLQGSGVTVNALHPGVARTELGRHTGIHGSTFSSTTLGPIFWLLVKSPELAAQPSTYLAVAEELADVSGKYFDGLKQKAPAPEAEDEEVARRLWAESARLVGLEAPSVREQPLPR

SEQ ID NO: 12417 - protein, 692 aa, Homo sapiens
MAGLTAAAPRPGVLLLLLSILHPSRPGGVPGAIPGGVPGGVFYPGAGLGALGGGALGPGGKPLKPVPGGLAGAGLGAGLGAFPAVTFPGALVPGGVADAAAAYKAAKAGAGLGGVPGVGGLGVSAAPSVPGAVVPQPGAGVKPGKVPGVGLPGVYPGGVLPGARFPGVGVLPGVPTGAGVKPKAPGVGGAFAGIPGVGPFGGPQPGVPLGYPIKAPKLPGGYGLPYTTGKLPYGYGPGGVAGAAGKAGYPTGTGVGPQAAAAAAAKAAAKFGAGAAGVLPGVGGAGVPGVPGAIPGIGGIAGVGTPAAAAAAAAAAKAAKYGAAAGLVPGGPGFGPGVVGVPGAGVPGVGVPGAGIPVVPGAGIPGAAVPGVVSPEAAAKAAAKAAKYGARPGVGVGGIPTYGVGAGGFPGFGVGVGGIPGVAGVPGVGGVPGVGGVPGVGISPEAQAAAAAKAAKYGLVPGVGVAPGVGVAPGVGVAPGVGLAPGVGVAPGVGVAPGVGVAPGIGPGGVAAAAKSAAKVAAKAQLRAAAGLGAGIPGLGVGVGVPGLGVGAGVPGLGVGAGVPGFGAVPGALAAAKAAKYGAAVPGVLGGLGALGGVGIPGGVVGAGPAAAAAAAKAAAKAAQFGLVGAAGLGGLGVGGLGVPGVGGLGGIPPAAAAKAAKYGVAARPGFGLSPIFPGGACLGKACGRKRK

SEQ ID NO: 12418 - protein, 238 aa, Homo sapiens
MRVTLATIAWMVSFVSNYSHTANILPDIENEDFIKDCVRIHNKFRSEVKPTASDMLYMTWDPALAQIAKAWASNCQFSHNTRLKPPHKLHPNFTSLGENIWTGSVPIFSVSSAITNWYDEIQDYDFKTRICKKVCGHYTQVSQERGRDPNPKRGFLNLARENPGLFGQIVTKLAAQFNFALKFLALTLFPMEHILYATTDQEGITQLGHIREEPPAVPAPIMTSVWTISVLTDSETKS

SEQ ID NO: 12419 - protein, 180 aa, Homo sapiens
MQYGGAPGGPAFPGQTQDPLYGYFAAVAGQDGQIDADELQRCLTQSGIAGGYKPFNLETCRLMVSMLDRDMSGTMGFNEFKELWAVLNGWRQHFISFDTDRSGTVDPQELQKALTTMGFRLSPQAVNSIAKRYSTNGKITFDDYIACCVKLRALTDSFRRRDTAQQGVVNFPYDDVSLRN

SEQ ID NO: 12420 - protein, 124 aa, Homo sapiens
TNDGNIFFSPVGILTAIGMVLLGTRGATASQLEEVFHSEKETKSSRIKAEEKEVSTSKSVQMMTQSHSFSFTFLEDLQAKILGIPYKNNDLSMFVLLPNDIDGLEKVNHCSEDGVCNTSYASYF

SEQ ID NO: 12421 - protein, 447 aa, Homo sapiens
MRFVVALVLLNVAAAGAVPLLATESVKQEEAGVRPSAGNVSTHPSLSQRPGGSTKSHPEPQTPKDSPSKSSAEAQTPEDTPNKSGAEAKTQKDSSNKSGAEAKTQKGSTSKSGSEAQTTKDSTSKSHPELQTPKDSTGKSGAEAQTPEDSPNRSGAEAKTQKDSPSKSGSEAQTTKDVPNKSGADGQTPKDGSSKSGAEDQTPKDVPNKSGAEKQTPKDGSNKSGAEEQGPIDGPSKSGAEEQTSKDSPNKVVPEQPSRKDHSKPISNPSDNKELPKADTNQLADKGKLSPHAFKTESGEETDLISPPQEEVKSSEPTEDVEPKEAEDDDTGPEEGSPPKEEKEKMSGSASSENREGTLSDSTGSEKDDLYPNGSGNGSAESSHFFAYLVTAAILVAVLYIAHHNKRKIIAFVLEGKRSKVTRRPKASDYQRLDQKVRKEEPGPWEG

SEQ ID NO: 12422 - protein, 141 aa, Homo sapiens
MEGAALLRVSVLCIWMSALFLGVGVRAEEAGARVQQNVPSGTDTGDPQSKPLGDWAAGTMDPGPAGSRGDSGEPCTLRPACRGQRQHGGASRISAEGPAPMPRRRTPSTAHLRVPKTSRRNLLCMRAVSLLRMPLSISRKK

SEQ ID NO: 12423 - protein, 66 aa, Homo sapiens
MLFWVLGLLILCGFLWTRKGKLKIEDITDKYIFITGCDSGFGNLAARTFDKKGFHVIAACLTESGS

SEQ ID NO: 12424 - protein, 52 aa, Homo sapiens
MWQLTSLLLFVATWGISGTPAPLGAADPQTCQLLPGGAPSQQPGAGVHRGDL

SEQ ID NO: 12425 - protein, 432 aa, Homo sapiens
MSASKIPLFKMKDLILILCLLEMSFAVPFFPQQSGTPGMASLSLETMRQLGSLQRLNTLSQYSRYGFGKSFNSLWMHGLLPPHSSLPWMRPREHETQQPSLKPQQPGLKPFLQSAAATTNQATALKEALQPPIHLGHLPLQEGELPLVQQQVAPSDKPPKPELPGVDFADPQGPSLPGMDFPDPQGPSLPGLDFADPQGSTIFQIARLISHGPMPQNKQSPLYPGMLYVPFGANQLNAPARLGIMSSEEVAGGREDPMAYGAMFPGFGGMRPGFEGMPHNPAMGGDFTLEFDSPVAATKGPENEEGGAQGSPMPEANPDNLENPAFLTELEPAPHAGLLALPKDDIPGLPRSPSGKMKGLPSVTPAAADPLMTPELADVYRTYDADMTTSVDFQEEATMDTTMAPNSLQTSMPGNKAQEPEMMHDAWHFQEP

SEQ ID NO: 12426 - protein, 723 aa, Homo sapiens
MWVTKLLPALLLQHVLLHLLLLPIAIPYAEGQRKRRNTIHEFKKSAKTTLIKIDPALKIKTKKVNTADQCANRCTRNKGLPFTCKAFVFDKARKQCLWFPFNSMSSGVKKEFGHEFDLYENKDYIRNCIIGKGRSYKGTVSITKSGIKCQPWSSMIPHEHSYRGKDLQENYCRNPRGEEGGPWCFTSNPEVRYEVCDIPQCSEVECMTCNGESYRGLMDHTESGKICQRWDHQTPHRHKFLPERYPDKGFDDNYCRNPDGQPRPWCYTLDPHTRWEYCAIKTCADNTMNDTDVPLETTECIQGQGEGYRGTVNTIWNGIPCQRWDSQYPHEHDMTPENFKCKDLRENYCRNPDGSESPWCFTTDPNIRVGYCSQIPNCDMSHGQDCYRGNGKNYMGNLSQTRSGLTCSMWDKNMEDLHRHIFWEPDASKLNENYCRNPDDDAHGPWCYTGNPLIPWDYCPISRCEGDTTPTIVNLDHPVISCAKTKQLRVVNGIPTRTNIGWMVSLRYRNKHICGGSLIKESWVLTARQCFPSRDLKDYEAWLGIHDVHGRGDEKCKQVLNVSQLVYGPEGSDLVLMKLARPAVLDDFVSTIDLPNYGCTIPEKTSCSVYGWGYTGLINYDGLLRVAHLYIMGNEKCSQHHRGKVTLNESEICAGAEKIGSGPCEGDYGGPLVCEQHKMRMVLGVIVPGRGCAIPNRPGIFVRVAYYAKWIHKIILTYKVPQS

SEQ ID NO: 12427 - protein, 586 aa, Homo sapiens
MKKSYSGGTRTSSGRLRRLGDSSGPALKRSFEVEEVETPNSTPPRRVQTPLLRATVASSTQKFQDLGVKNSEPSARHVDSLSQRSPKASLRRVELSGPKAAEPVSRRTELSIDISSKQVENAGAIGPSRFGLKRAEVLGHKTPEPAPRRTEITIVKPQESAHRRMEPPASKVPEVPTAPATDAAPKRVEIQMPKPAEAPTAPSPAQTLENSEPAPVSQLQSRLEPKPQPPVAEATPRSQEATEAAPSCVGDMADTPRDAGLKQAPASRNEKAPVDFGYVGIDSILEQMRRKAMKQGFEFNIMVVGQSGLGKSTLINTLFKSKISRKSVQPTSEERIPKTIEIKSITHDIEEKGVRMKLTVIDTPGFGDHINNENCWQPIMKFINDQYEKYLQEEVNINRKKRIPDTRVHCCLYFIPATGHSLRPLDIEFMKRLSKVVNIVPVIAKADTLTLEERVHFKQRITADLLSNGIDVYPQKEFDEDSEDRLVNEKFREMIPFAVVGSDHEYQVNGKRILGRKTKWGTIEVENTTHCEFAYLRDLLIRTHMQNIKDITSSIHFEAYRVKRLNEGSSAMANGMEEKEPEAPEM

SEQ ID NO: 12428 - protein, 278 aa, Homo sapiens
MAARPLPVSPARALLLALAGALLAPCEARGVSLWNQGRADEVVSASVGSGDLWIPVKSFDSKNHPEVLNIRLQRESKELIINLERNEGLIASSFTETHYLQDGTDVSLARNYTGHCYYHGHVRGYSDSAVSLSTCSGLRGLIVFENESYVLEPMKSATNRYKLFPAKKLKSVRGSCGSHHNTPNLAAKNVFPPPSQTWARRHKRETLKATKYVELVIVADNREFQRQGKDLEKVKQRLIEIANHVDKFYRPLNIRIVLVGVEVWNDMDKCSVSQDPFT

SEQ ID NO: 12429 - protein, 109 aa, Homo sapiens
MIIVAHVLLILLGATEILQADLLPDEKISLLPPVNFTIKVTGLAQVLLQWKPNPDQEQRNVNLEYQVKINAPKEDDYETRITESKCVTILHKGFSASVRTILQNDHSLL

SEQ ID NO: 12430 - protein, 557 aa, Homo sapiens
MDDLDALLADLESTTSHISKRPVFLSEETPYSYPTGNHTYQEIAVPPPVPPPPSSEALNGTILDPLDQWQPSSSRFIHQQPQSSSPVYGSSAKTSSVSNPQDSVGSPCSRVGEEEHVYSFPNKQKSAEPSPTVMSTSLGSNLSELDRLLLELNAVQHNPPGFPADEANSSPPLPGALSPLYGVPETNSPLGGKAGPLTKEKPKRNGGRGLEDVRPSVESLLDELESSVPSPVPAITVNQGEMSSPQRVTSTQQQTRISASSATRELDELMASLSDFKFMAQGKTGSSSPPGGPPKPGSQLDSMLGSLQSDLNKLGVATVAKGVCGACKKPIAGQVVTAMGKTWHPEHFVCTHCQEEIGSRNFFERDGQPYCEKDYHNLFSPRCYYCNGPILDKVVTALDRTWHPEHFFCAQCGAFFGPEGFHEKDGKAYCRKDYFDMFAPKCGGCARAILENYISALNTLWHPECFVCRECFTPFVNGSFFEHDGQPYCEVHYHERRGSLCSGCQKPITGRCITAMAKKFHPEHFVCAFCLKQLNKGTFKEQNDKPYCQNCFLKLFC

SEQ ID NO: 12431 - protein, 94 aa, Homo sapiens
MISYIVLLSILLWPLVVYHELIQRMYTRLEPLLMQLDYSMKAEANALHHKHDKRKRQGKNAPPGGDEPLAETESESEAELAGFSPVVDVKKTAL

SEQ ID NO: 12432 - protein, 211 aa, Homo sapiens
MKRSGNPGAEADFCVMTRLLGYVDPLDPSFVAAVITITFNPLYWNVVARWEHKTRKLSRAFGSPYLACYSLSVTILLLNFLRSHCFTQAMLSQPRMESLDTPAAYSLGLALLGLGVVLVLSSFFALGFAGTFLGDYFGILKEARVTVFPFNILDNPMYWGSTANYLGWAIISPAPAGAVGSEARQPHGPAPDGAGGPHLHSGSPIRRALHR

SEQ ID NO: 12433 - protein, 159 aa, Homo sapiens
MEGAALLRVSVLCIWMSALFLGVGVRAEEAGARVQQNVPSGTDTGDPQSKPLGDWAAGTMDPESSIFIEDAIKYFKEKVSTQNLLLLLTDNEAWNGFVAAAELPRNEADELRKALDNLARQMIMKDKNWHDKGQQYRNWFLKEFPRLKSELEDNIRRLR

SEQ ID NO: 12434 - protein, 148 aa, Homo sapiens
MILIPRMLLVLFLLLPILSSAKAQVNPAICRYPLGMSGGQIPDEDITASSQWSESTAAKYGRLDSEEGDGAWCPEIPVEPDDLKEFLQIDLHTLHFITLVGTQGRHAGGHGIEFAPMYKINYSRDGTRWISWRNRHGKQVLDGNSNPY

SEQ ID NO: 12435 - protein, 342 aa, Homo sapiens
MQAAVAVSVPFLLLCVLGTCPPARCGQAGDASLMELEKRKENRFVERQSIVPLRLIYRSGGEDESRHDALDTRVRGDLGGPQLTHVDQASFQVDAFGTSFILDVVLNHDLLSSEYIERHIEHGGKTVEVKGGEHCYYQGHIRGNPDSFVALSTCHGLHGMFYDGNHTYLIEPEENDTTQEDFHFHSVYKSRLFEFSLDDLPSEFQQVNITPSKFILKPRPKRSKRQLRRYPRNVEEETKYIELMIVNDHLMFKKHRLSVVHTNTYAKSVVNMADLIYKDQLKTRIVLVAMETWATDNKFAISENPLITLREFMKYRRDFIKEKSDAVHLFSYVTSVMMYYFF

SEQ ID NO: 12436 - protein, 140 aa, Homo sapiens
MVGKLKQNLLLACLVISSVTVFYLGQHAMECHHRIEERSQPVKLESTRTTVRTGLDLKANKTFAYHKDMPLIFIGGVPRSGTTLMRAMLDAHPDIRCGEETRVIPRILALKQMWSRSSKEKIRLDEAGVTDEVLDSAMQA

SEQ ID NO: 12437 - protein, 203 aa, Homo sapiens
MGPLMVLFCLLFLYPGLADSAPSCPQNVNISGGTFTLSHGWAPGSLLTYSCPQGLYPSPASRLCKSSGQWQTPGATRSLSKAVCKPGHCPNPGISLGAVRTGFRFGHGDKVRYRCSSNLVLTGSSERECQGNGVWSGTEPICRQPYSYDFPEDVAPALGTSFSHMLGATNPTQKTKESLGRKIQIQRSGHLNLYLLLDCSQSV

SEQ ID NO: 12438 - protein, 996 aa, Homo sapiens
PGLLYLSSHGLWLITIAKCGILCIRDVYTLETFAWCRSHSHQGHGIQSMRISMDGQNILVNGRDDGTLVYLKWKRFGGHLASEILDYYQKLLISLSSAMDKENHYLSTTPKVSVDLGSDSEHTKQKASTDLSQDELVLTDVKKEIPWIQQKSQEAIKKEVNLFSKKRKEIKQGIKSLSKTILNMMEENDKLENIAKLDQQEFGLDLEELERLHDESQEEVAKMIKDVEMHNLAKSYLAELIKEECWNSMAVKGRALKCFHIPCVVENFPMKARTVEELKELERVLQQKKIEAECLKLRKEIVEAQSGVKLIKQRHEEDDEEEEEEDKTVKYSNLPNYLLGSLSTDFGVDTSLLSSQLELHSREEKINQIILLKDIIYKVKTVFNNEFDAAYKQKEFEIARVKERNVRIREIILDLELEEAVWQPEFEDCEKPERTLVVQDEEITAHKHIKPWHKAKELIVNHEKEHWLLIQDASTRLRALMDMMGGVLEVKKEDILRMVIPQPAFMAKPDAVWTEEERKQFKDYEKKVKELNEERDKYRKSLEAELKKLQNSIQESTQAFDEHLKRLFERRVKAEMVTNQEELKISNLAFSLLLDEELSSREKFLNNYLTRKQHEKVMDRSFKKEFSEIPGHQVDILYKLFKRRPRISKQKTHSETTSVVPFGELPGSGKLNKDAFAQLMKAMDELDNISNMPEGLDPLVWNHFCMTRRAKVENEQKVKQKAADLLEMATFLQKRVEEEEKVQQEIERVFHELILLQEEKVRFQLNLTIQILLKQGQVELENFQLVLEYSDAILINKNIIEDLNSVIRTQGQKKVASMMESKDVHKRILQIEWEHKKMEMEREDLNQKAWDIQMLFFSRDRQKYLNEPNYEALISIQIGIMEQTIAVLDKMHKKNVENCKKLLKKLGKFSNQKDIANYALSCNLREELVAVSERKDICNAMGSKLTCEKIVKERYENMMQQQKLTNISKQQAEQISILQTEVERLRMKTFPALVQM

SEQ ID NO: 12439 - protein, 290 aa, Homo sapiens
MRFTFTSRCLALFLLLNHPTPILPAFSNQTYPTIEPKPFLYVVGRKKMMDAQYKCYDRMQQLPAYQGEGPYCNRTWDGWLCWDDTPAGVLSYQFCPDYFPDFDPSEKVTKYCDEKGVWFKHPENNRTWSNYTMCNAFTPEKLKNAYVLYYLAIVGHSLSIFTLVISLGIFVFFRKLTTIFPLNWKYRKALSLGCQRVTLHKNMFLTYILNSMIIIIHLVEVVPNGELVRRDPVSCKILHFFHQYMMACNYFWMLCEGIYLHTLIVVAVFTEKQRLRWYYLLGWAPAFHRD

SEQ ID NO: 12440 - protein, 505 aa, Homo sapiens
MARGSAVAWAALGPLLWGCALGLQGGMLYPQESPSRECKELDGLWSFRADFSDNRRRGFEEQWYRRPLWESGPTVDMPVPSSFNDISQDWRLRHFVGWVWYEREVILPERWTQDLRTRVVLRIGSAHSYAIVWVNGVDTLEHEGGYLPFEADISNLVQVQLTAQTSLGPVSDFYTLPVGIRTVAVTKSQFLINGKPFYFHGVNKHEDADIRGKGFDWPLLVKDFNLLRWLGANAFRTSHYPYAEEVMQMCDRYGIVVIDECPGVGLALPQFFNNVSLHHHMQVMEEVVRRDKNHPAVVMWSVANEPASHLESAGYYLKMVIAHTKSLDPSRPVTFVSNSNYAADKGAPYVDVICLNSYYSWYHDYGHLELIQLQLATQFENWYKKYQKPIIQSEYGAETIAGFHQDPPLMFTEEYQKSLLEQYHLGLDQKRRKYVVGELIWNFADFMTEQSPTRVLGNKKGIFTRQRQPKSAAFLLRERYWKIANETRYPHSVAKSQCLENSLFT

SEQ ID NO: 12441 - protein, 336 aa, Homo sapiens
MIYTCHRDKNCVINKVTRNRCQYCRLQKCFEVGMSKESVRNDRNKKKKETSKQECTESYEMTAELDDLTEKIRKAHQETFPSLCQLGKYTTNSSADHRVRLDLGLWDKFSELATKCIIKIVEFAKRLPGFTGLTIADQITLLKAACLDILILRICTRYTPEQDTMTFSDGLTLNRTQMHNAGFGPLTDLVFTFANQLLPLEMDDTETGLLSAICLICGDRQDLEEPTKVDKLQEPLLEALKIYIRKRRPSKPHMFPKILMKITDLRSISAKGAERVITLKMEIPGSMPPLIQEMLENSEGHEPLTPSSSGNTAEHSPSISPSSVENSGVSQSPLVQ

SEQ ID NO: 12442 - protein, 788 aa, Homo sapiens
MVLLRLLVFLFAPVVSDLCSLPCFINVSESQGPGTVLQFLSFNCSSYTPTPTLELLNVQPPTTFFNPPSLARWQGTYVGKLTLSSSAQLDALMVNHYKVQLKFTCGNHVMEGSLSVDVQRDLSHIQCAGQFASPAGEMIQVPETVTPGARLYTLLLPGLELHGAQMSIISAQDLPHFPGPFSINEQGWLQAPSQGLLGQAQKVFQLQISVSFGQRQSCQGMVIVKVLPVPSSQVSFLEQAQNITIPENLAPGSEVVQVQARGVDLRYEILSPVPSPLFSIGRADGVVRTTTPLELARTSGTAVSRLQVKAFEQGQLWASAKLNLTMNVQLVNLWPPRCLPALLVSQIPETAPVGTVLNTLTCEDPDSVGATLDYKLWFRSSSNPASLCLYDRVLEVNATLDCDTPGACFQHAASILVLDGGQPQMTTEVPVLVMVTPINEFSPACAPRTFRVQEDAAPHTLLGSVVGTDMDYPHDNIEYYTSGGPTTFAVDRLSGEVHLLGPLDYEQQRLYRLTVLVIDHGQDQNPNHHLSGSCTITIEVEDVNDHAPECEPPFQELTIYAPLGRSVEVTKMSCQIPQEPQRLIYSYSIVGGNSQNRFILQGAILVHSDLVLGPFWPEQPRTYELLICVADAGPSTPHLSTTATIIVHLVPRRASTVATSTHRTTVPSTMTPMLVTDTEAFWQPQPWFVVVLTATGALLLLALGWLLGRLLQGLAQLLQAPSKPAQALLLNSIQGTEGSIEGFLEAPKMEMSQAPSSVMSLHFDGRAQDSRTGRDYLFNTHTGARRWL

SEQ ID NO: 12443 - protein, 929 aa, Homo sapiens
MKKMSRNVLLQMEEEEDDDDGDIVLENLGQTIVPDLGSLESQHDFRTPEFEEFNGKPDSLFFNDGQRRIDFVLVYEDESRKETNKKGTNEKQRRKRQAYESNLICHGLQLEATRSVLDDKLVFVKVHAPWEVLCTYAEIMHIKLPLKPNDLKNRSSAFGTLNWFTKVLSVDESIIKPEQEFFTAPFEKNRMNDFYIVDRDAFFNPATRSRIVYFILSRVKYQVINNVSKFGINRLVNSGIYKAAFPLHDCKFRRQSEDPSCPNERYLLYREWAHPRSIYKKQPLDLIRKYYGEKIGIYFAWLGYYTQMLLLAAVVGVACFLYGYLNQDNCTWSKEVCHPDIGGKIIMCPQCDRLCPFWKLNITCESSKKLCIFDSFGTLVFAVFMGVWVTLFLEFWKRRQAELEYEWDTVELQQEEQARPEYEARCTHVVINEITQEEERIPFTAWGKCIRITLCASAVFFWILLIIASVIGIIVYRLSVFIVFSAKLPKNINGTDPIQKYLTPQTATSITASIISFIIIMILNTIYEKVAIMITNFELPRTQTDYENSLTMKMFLFQFVNYYSSCFYIAFFKGKFVGYPGDPVYWLGKYRNEECDPGGCLLELTTQLTIIMGGKAIWNNIQEVLLPWIMNLIGRFHRVSGSEKITPRWEQDYHLQPMGKLGLFYEYLEMIIQFGFVTLFVASFPLAPLLALVNNILEIRVDAWKLTTQFRRLVPEKAQDIGAWQPIMQGIAILAVVTNAMIIAFTSDMIPRLVYYWSFSVPPYGDHTSYTMEGYINNTLSIFKVADFKNKSKGNPYSDLGNHTTCRYRDFRYPPGHPQEYKHNIYYWHVIAAKLAFIIVMEYLALLPRLGHSGMILAHCNLRLPVDCCMCYRFVDEIRLLEQLTSDFIDSLYYIFSISIISIFFSVTFFFLLLSLGPTPCFSVSNFLS

SEQ ID NO: 12444 - protein, 96 aa, Homo sapiens
MKFFLLLFTIGFCWAQYSPNTQQGRTSIVHLFEWRWVDIALECERYLAPKGFGGVQVSPPNENVAIHNPFRPWWERYQPVSYKLCTRSGNEDEFRN

SEQ ID NO: 12445 - protein, 256 aa, Homo sapiens
MKPALCLVAMGALVMDSSPQCTKQLLSERFGRGSRTVDLELELQIELLRETKRKYESVLQLGRALTAHLYSLLQTQHALGDAFADLSQKSPELQEEFGYNAETQKLLCKNGETLLGAVNFFVSSINTLVTKTMEDTLMTVKQYEAARLEYDAYRTDLEELSLGPRDAGTRGRLESAQATFQAHRDKYEKLRGDVAIKLKFLEENKIKVMHKQLLLFHNAVSAYFAGNQKQLEQTLQQFNIKLRPPGAEKPSWLEEQ

SEQ ID NO: 12446 - protein, 517 aa, Homo sapiens
MAAPEQPLAISRGCTSSSSLSPPRGDRTLLVRHLPAELTAEEKEDLLKYFGAQSVRVLSDKGRLKHTAFATFPNEKAAIKALTRLHQLKLLGHTLVVEFAKEQDRVHSPCPTSGSEKKKRSDDPVEDDKEKKELGYLTVENGIAPNHGLTFPLNSCLKYMYPPPSSTILANIVNALASVPKFYVQVLHLMNKMNLPTPFGPITARPPMYEDYMPLHAPLPPTSPQPPEEPPLPDEDEELSSEESEYESTDDEDRQRMNKLMELANLQPKRPKTIKQRHVRKKRKIKDMLNTPLCPSHSSLHPVLLPSDVFDQPQPVGNKRIEFHISTDMPAAFKKDLEKEQNCEEKNHDLPATEVDASNIGFGKIFPKPNLDITEEIKEDSDEMPSECISRRELEKGRISREEMETLSVFRSYEPGEPNCRIYVKNLAKHVQEKDLKYIFGRYVDFSSETQRIMFDIRLMKEGRMKGQAFIGLPNEKAAAKALKEANGYVLFGKPMVVQFARSARPKQDPKEGKRKC

SEQ ID NO: 12447 - protein, 1435 aa, Homo sapiens
MREKGRRKKGRTWAEAAKTVLEKYPNTPMSHKEILQVIQREGLKEIRSGTSPLACLNAMLHTNSRGEEGIFYKVPGRMGVYTLKKDVPDGVKELSEGSEESSDGQSDSQSSENSSSSSDGGSNKEGKKSRWKRKVSSSSPQSGCPSPTIPAGKVISPSQKHSKKALKQALKQQQQKKQQQQCRPSISISSNQHLSLKTVKAASDSVPAKPATWEGKQSDGQTGSPQNSNSSFSSSVKVENTLLGLGKKSFQRSERLHTRQMKRTKCADIDVETPDSILVNTNLRALINKHTFSVLPGDCQQRLLLLLPEVDRQVGPDGLMKLNGSALNNEFFTSAAQGWKERLSEGEFTPEMQVRIRQEIEKEKKVEPWKEQFFESYYGQSSGLSLEDSKKLTASPSDPKVKKTPAEQPKSMPVSEASLIRIVPVVSQSECKEEALQMSSPGRKEECESQGEVQPNFSTSSEPLLSSALNTHELSSILPIKCPKDEDLLEQKPVTSAEQESEKNHLTTASNYNKSESQESLVTSPSKPKSPGVEKPIVKPTAGAGPQETNMKEPLATLVDQSPESLKRKSSLTQEEAPVSWEKRPRVTENRQHQQPFQVSPQPFLNRGDRIQVRKVPPLKIPVSRISPMPFHPSQVSPRARFPVSITSPNRTGARTLADIKAKAQLVKAQRAAAAAAAAAAAAASVGGTIPGPGPGGGQGPGEGGEGQTARGGSPGSDRVSETGKGPTLELAGTGSRGGTRELLPCGPETQPQSETKTTPSQAQPHSVSGAQLQQTPPVPPTPAVSGACTSVPSPAHIEKLDNEKLNPTRATATVASVSHPQGPSSCRQEKAPSPTGPALISGASPVHCAADGTVELKAGPSKNIPNPSASSKTDASVPVAVTPSPLTSLLTTATLEKLPVPQVSATTAPAGSAPPSSTLPAASSLKTPGTSLNMNGPTLRPTSSIPANNPLVTQLLQGKDVPMEQILPKPLTKVEMKTVPLTAKEERGMGALIATNTTENSTREEVNERQSHPATQQQLGKTLQSKQLPQVPRPLQLFSAKELRDSSIDTHQYHEGLSKATQDQILQTLIQRVRRQNLLSVVPPSQFNFAHSGFQLEDISTSQRFMLGFAGRRTSKPAMAGHYLLNISTYGRGSESFRRTHSVNPEDRFCLSSPTEALKMGYTDCKNATGESSSSKEDDTDEESTGDEQESVTVKEEPQVSQSAGKGDTSSGPHSRETLSTSDCLASKNVKAEIPLNEQTTLSKENYLFTRGQTFDEKTLARDLIQAAQKQMAHAVRGKAIRSSPELFSSTVLPLPADSPTHQPLLLPPLQTPKLYGSPTQIGPSYRGMINVSTSSDMDHNSAVPGSQVSSNVGDVMSFSVTVTTIPASQAMNPSSHGQTIPVQAFSEENSIEGTPSKCYCRLKAMIMCKGCGAFCHDDCIGPSKLCVSCLVVR

SEQ ID NO: 12448 - protein, 1167 aa, Homo sapiens
MQYDEDDDEITPDLWQEACWIVISSYFDEKGLVRQQLDSFDEFIQMSVQRIVEDAPPIDLQAEAQHASGEVEEPPRYLLKFEQIYLSKPTHWERDGAPSPMMPNEARLRNLTYSAPLYVDITKTVIKEGEEQLQTQHQKTFIGKIPIMLRSTYCLLNGLTDRDLCELNECPLDPGGYFIINGSEKVLIAQEKMATNTVYVFAKKDSKYAYTGECRSCLENSSRPTSTIWVSMLARGGQGAKKSAIGQRIVATLPYIKQEVPIIIVFRALGFVSDRDILEHIIYDFEDPEMMEMVKPSLDEAFVIQEQNVALNFIGSRGAKPGVTKEKRIKYAKEVLQKEMLPHVGVSDFCETKKAYFLGYMVHRLLLAALGRRELDDRDHYGNKRLDLAGPLLAFLFRGMFKNLLKEVRIYAQKFIDRGKDFNLELAIKTRIISDGLKYSLATGNWGDQKKAHQARAGVSQVLNRLTFASTLSHLRRLNSPIGRDGKLAKPRQLHNTLWGMVCPAETPEGHAVGLVKNLALMAYISVGSQPSPILEFLEEWSMENLEEISPAAIADATKIFVNGCWVGIHKDPEQLMNTLRKLRRQMDIIVSEVSMIRDIREREIRIYTDAGRICRPLLIVEKQKLLLKKRHIDQLKEREYNNYSWQDLVASGVVEYIDTLEEETVMLAMTPDDLQEKEVAYCSTYTHCEIHPSMILGVCASIIPFPDHNQSPRNTYQSAMGKQAMGVYITNFHVRMDTLAHVLYYPQKPLVTTRSMEYLRFRELPAGINSIVAIASYTGYNQEDSVIMNRSAVDRGFFRSVFYRSYKEQESKKGFDQEEVFEKPTRETCQGMRHAIYDKLDDDGLIAPGVRVSGDDVIIGKTVTLPENEDELESTNRRYTKRDCSTFLRTSETGIVDQVMVTLNQEGYKFCKIRVRSVRIPQIGDKFASRHGQKGTCGIQYRQEDMPFTCEGITPDIIINPHAIPSRMTIGHLIECLQGKVSANKGEIGDATPFNDAVNVQKISNLLSDYGYHLRGNEVLYNGFTGRKITSQIFIGPTYYQRLKHMVDDKIHSRARGPIQILNRQPMEGRSRDGGLRFGEMERDCQIAHGAAQFLRERLFEASDPYQVHVCNLCGIMAIANTRTHTYECRGCRNKTQISLVRMPYACKLLFQELMSMSIAPRMMSV

SEQ ID NO: 12449 - protein, 228 aa, Homo sapiens
MAAQIPIVATTSTPGIVRNSKKRPASPSHNGSSGGGYGASKKKKASASSFAQTCLSPSTMIVRPPQPRGTTCLLPSAMIVRPPQPRGNGISMEAMSENKMVPSEFSTGPVEKAAKPLPFKDPNFVHSGHGGAVAGKKNRTWKNLKQILASERALPWQLNDPNYFSIDAPPSFKPAKKYSDVSGLLANYTDPQSKLRFSTIEEFSYIRRLPSDVVTGYLALRKATSIVP

SEQ ID NO: 12450 - protein, 170 aa, Homo sapiens
MEAPAELLAALPALATALALLLAWLLVRRGAAASPEPARAPPEPAPPAEATGAPAPSRPCAPEPAASPAGPEEPGEPAGLGELGEPAGPGEPEGPGDPAAAPAEAEEQAVEARQEEEQDLDGEKGPSSEGPEEEDGEGFSFKYSPGKLRGNQYKKMMTKEELEEEQRTEE

SEQ ID NO: 12451 - protein, 175 aa, Homo sapiens
MEKIPVSAFLLLVALSYTLARDTTVKPGAKKDTKDSRPKLPQTLSRGWGDQLIWTQTYEEALYKSKTSNKPLMIIHHLDECPHSQALKKVFAENKEIQKLAEQFVLLNLVYETTDKHLSPDGQYVPRIMFVDPSLTVRADITGRYSNRLYAYEPADTALLLDNMKKALKLLKTEL

SEQ ID NO: 12452 - protein, 242 aa, Homo sapiens
MSNYVNDMWPGSPQEKDSPSTSRSGGSSRLSSRSRSRSFSRSSRSHSRVSSRFSSRSRRSKSRSRSRRRHQRKYRRYSRSYSRSRSRSRSRRYRERRYGFTRRYYRSPSRYRSRSRSRSRSRGRSYCGRAYAIARGQRYYGFGRTVYPEEHSRWRDRSRTRSRSRTPFRLSEKDRMELLEIAKTNAAKALGTTNIDLPASLRTVPSAKETSRGIGVSSNGAKPEVSILGLSEQNFQKANCQI

SEQ ID NO: 12453 - protein, 38 aa, Homo sapiens
MAGIFYFALFSCLFGICDAVTGSRVYPANEVGGSEYHG

SEQ ID NO: 12454 - protein, 585 aa, Homo sapiens
MDALLGTGPRRARGCLGAAGPTSSGRAARTPAAPWARFSAWLECVCVVTFDLELGQALELVYPNDFRLTDKEKSSICYLSFPDSHSGCLGDTQFSFRMRQCGGQRSPWHADDRHYNSRAPVALQREPAHYFGYVYFRQVKDSSVKRGYFQKSLVLVSRLPFVRLFQALLSLIAPEYFDKLAPCLEAVCSEIDQWPAPAPGQTLNLPVMGVVVQVRIPSRVDKSESSPPKQFDQENLLPAPVVLASVHELDLFRCFRPVLTHMQTLWELMLLGEPLLVLAPSPDVSSEMVLALTSCLQPLRFCCDFRPYFTIHDSEFKEFTTRTQAPPNVVLGVTNPFFIKTLQHWPHILRVGEPKMSGDLPKQVKLKKPSRLKTLDTKPGLYTAYTAHLHRDKALLKRLLKGVQKKRPSDVQSALLRRHLLELTQSFIIPLEHYMASLMPLQKSITPWKTPPQIQPFSQDDFLRSLEHAGPQLTCILKGDWLGLYRRFFKSPHFDGWYRQRHKEMALKLEALHLEAICEANIETWMKDKSEVEVVDLVLKLREKLVRAQGHQLPVKEATLQRAQLYIETVIGSLPKDLQAVLCPP

SEQ ID NO: 12455 - protein, 122 aa, Homo sapiens
MLSLLHTSTLAVLGALCVYGAGHLEQPQISSTKTLSKTARLECVVSGITISATSVYWYRERPGEVIQFLVSISYDGTVRKESGIPSGKFEVDRIPETSTSTLTIHNVEKQDIATYYCALWEV

SEQ ID NO: 12456 - protein, 331 aa, Homo sapiens
GLLGALHLVMTLVVAAARAEKEAFVQSESIIEVLRFDDGGLLQTETTLGLSSYQQKSISLYRGNCRPIRFEPPMLDFHEQPVGMPKMEKVYLHNPSSEETITLVSISATTSHFHASFFQNRKILPGGNTSFDVVFLARVVGNVENTLFINTSNHGVFTYQVFGVGVPNPYRLRPFLGARVPVNSSFSPIINIHNPHSEPLQVVEMYSSGGDLHLELPTGQQGGTRKLWEIPPYETKGVMRASFSSREADNHTAFIRIKTNASDSTEFIILPVEVEVTTAPGIYSSTEMLDFGTLRTQDLPKVLNLHLLNSGTKDVPITHRRQKSHLSFLGK

SEQ ID NO: 12457 - protein, 165 aa, Homo sapiens
MSHRTSSTFRAERSFHSSSSSSSSSTSSSASRALPAQDPPMEKALSMFSDDFGSFMRPHSEPLAFPARPGGAGNIKTLGDAYEFAVDVRDFSPEDIIVTTSNNHIELAADGTVMNTFAHKCQLPEDVDPTSVTSALREDGSLTIRARRHPHTEHVQQTFRTEIKI

SEQ ID NO: 12458 - protein, 604 aa, Homo sapiens
MLGMNMLLITLFLLLPLSMLKGEPWEGCLHCTHTTWSGNIMTKTLLYHTYYECAGTCLGTCTHNQTTYSVCDPGRGQPYVCYDPKSSPGTWFEIHVGSKEGDLLNQTKVFPSGKDVVSLYFDVCQIVSMGSLFPVIFSSMEYYSSCHKNRYAHPACSTDSPVTTCWDCTTWSTNQQSLGPIMLTKIPLEPDCKTSTCNSVNLTILEPDQPIWTTGLKAPLGARVSGEEIGPGAYVYLYIIKKTRTRSTQQFRVFESFYEHVNQKLPEPPPLASNLFAQLAENIASSLHVASCYVCGGMNMGDQWPWEARELMPQDNFTLTASSLEPAPSSQSIWFLKTSIIGKFCIARWGKAFTDPVGELTCLGQQYYNETLGKTLWRGKSNNSESPHPSPFSRFPSLNHSWYQLEAPNTWQAPSGLYWICGPQAYRQLPAKWSGACVLGTIRPSFFLMPLKQGEALGYPIYDETKRKSKRGITIGDWKDNEWPPERIIQYYGPATWAEDGMWGYRTPVYMLNRIIRLQAVLEIITNETAGALNLLAQQATKMRNVIYQNRLALDYLLAQEEGVCGKFNLTNCCLELDDEGKVIKEITAKIQKLAHIPVQTWKG

SEQ ID NO: 12459 - protein, 108 aa, Homo sapiens
MVMLLLLLSALAGLFGAAEGQAFHLGKCPNPPVQENFDVNKTESHFVTQGGVQHHHLGSLQPPPPGFKQFSCLSLPSSWDYSISEDGTKLRRSQQPLRMDAASRPTTH

SEQ ID NO: 12460 - protein, 47 aa, Homo sapiens
MFSVRIVTADYYMASPLQGLDTCQSPLTQAPVKKVPVVRVFGATPAE

SEQ ID NO: 12461 - protein, 833 aa, Homo sapiens
MVHGSVTFRDVAIDFSQEEWECLQPDQRTLYRDVMLENYSHLISLGSSISKPDVITLLEQEKEPWIVVSKETSRWYPDLESKYGPEKISPENDIFEINLPKHVIKQISKTLGLEAFYFRNDSEYRSRFEGRQGHQEGYINQKIISYEEMPAYTHASPIHNTHKPYECKECGKYFSCGSNLIQHQSIHTGEKPYKCKECGKAFQLHIQLTRHQKFHTGEKTFECKECGKAFNLPTQLNRHKNIHTVKKLFECKECGKSFNRSSNLTQHQSIHAGVKPYQCKECGKAFNRGSNLIQHQKIHSNEKPFVCRECEMAFRYHYQLIEHCRIHTGEKPFECKECRKAFTLLTKLVRHQKIHMGEKPFECRECGKAFSLLNQLNRHKNIHTGEKPFECKECGKSFNRSSNLIQHQSIHADVKPYECKECGKGFNRGANLIQHQKIHSNEKPFVCRECEMAFRYHYQLIQHCQIHTGGKPFECKECGKAFSLLTQLARHKNIHTGEKPFECKDCGKAFNRGSNLVQHQSIHTGEKPYECKECGKAFRLHLQLSQHEKTHTGEKPFECKECGKFFRRGSNLNQHRSIHTGKKPFECKECGKAFRLHMHLIRHQKFHTGEKPFECKECGKAFSLHTQLNHHKNIHTGEKPFKCKECGKSFNRVSNLVQHQSIHAGVKPYECKECGKGFSRVSNLIQHQKTHSSAKPFVCKECRKTFRYHYQLTEHYRIHTGEKPFECKECGKAFGLLTQLAQHQIIHTGEKPFKCKECGKAFNRGSNLVQPQSIHTGEKPYECKECGKAFRLHLQLSLHQKLVQVRNPLNVRNVGQPSDISSNLLNIRKFILG

SEQ ID NO: 12462 - protein, 143 aa, Homo sapiens
MSGMFLSSKLTTILLLFTNKSLDPGQKIQENTLLSVYGNSSWHFDEVRNQCYFHQFMKEQPDLNFRNPDVQEEIKEILRFWLTKGVDGFSLDAVKFLLEAKHLRDEIQVNKTQIPDTVTQYSELYHDFTTTQVGMHDIVRSFR

SEQ ID NO: 12463 - protein, 159 aa, Homo sapiens
MTTQLGPALVLGVALCLGCGQPLPQVPERPFSVLWNVPSAHCEARFGVHLPLNALGIIANRGQHFHGQNMTIFYKNQLGLYPYFGPRGTAHNGGIPQALPLDRHLALAAYQIHHSLRPGFAGPAVLDWEEWCPLWAGNWGRRRAYQAASWAWAQQVFPD

SEQ ID NO: 12464 - protein, 69 aa, Homo sapiens
MAAHLLPICALFLTLLDMAQGFRGPLLPNRPFTTVWNANTQWCLERHGVDVDVSVFDVVANPGQTFRGP

SEQ ID NO: 12465 - protein, 380 aa, Homo sapiens
MEKKKMVTQGNQEPTTTPDAMVQPFTTIPFPPPPQNGIPTEYGVPHTQDYAGQTGEHNLTLYGSTQAHGEQSSNSPSTQNGSLTTEGGAQTDGQQSQTQSSENSESKSTPKRLHVSNIPFRFRDPDLRQMFGQFGKILDVEIIFNERGSKGFGFVTFENSADADRAREKLHGTVVEGRKIEVNNATARVMTNKKMVTPYANGWKLSPVVGAVYGPELYAASSFQADVSLGNDAAVPLSGRGGINTYIPLISLPLVPGFPYPTAATTAAAFRGAHLRGRGRTVYGAVRAVPPTAIPAYPGVVYQDGFYGADLYGGYAAYRYAQPATATAATAAAAAAAAYSDGYGRVYTADPYHALAPAASYGVGAVASLYRGGYSRFAPY

SEQ ID NO: 12466 - protein, 1124 aa, Homo sapiens
MAPPSEETPLIPQRSCSLLSTEAGALHVLLPARGPGPPQRLSFSFGDHLAEDLCVQAAKASGILPVYHSLFALATEDLSCWFPPSHIFSVEDASTQVLLYRIRFYFPNWFGLEKCHRFGLRKDLASAILDLPVLEHLFAQHRSDLVSGRLPVGLSLKEQGECLSLAVLDLARMAREQAQRPGELLKTVSYKACLPPSLRDLIQGLSFVTRRRIRRTVRRALRRVAACQADRHSLMAKYIMDLERLDPAGAAETFHVGLPGALGGHDGLGLLRVAGDGGIAWTQGEQEVLQPFCDFPEIVDISIKQAPRVGPAGEHRLVTVTRTDNQILEAEFPGLPEALSFVALVDGYFRLTTDSQHFFCKEVAPPRLLEEVAEQCHGPITLDFAINKLKTGGSRPGSYVLRRSPQDFDSFLLTVCVQNPLGPDYKGCLIRRSPTGTFLLVGLSRPHSSLRELLATCWDGGLHVDGVAVTLTSCCIPRPKEKSNLIVVQRGHSPPTSSLVQPQSQYQLSQMTFHKIPADSLEWHENLGHGSFTKIYRGCRHEVVDGEARKTEVLLKVMDAKHKNCMESFLEAASLMSQVSYRHLVLLHGVCMAGDSTMVQEFVHLGAIDMYLRKRGHLVPASWKLQVVKQLAYALNYLEDKGLPHGNVSARKVLLAREGADGSPPFIKLSDPGVSPAVLSLEMLTDRIPWVAPECLREAQTLSLEADKWGFGATVWEVFSGVTMPISALDPAKKLQFYEDRQQLPAPKWTELALLIQQCMAYEPVQRPSFRAVIRDLNSLISSDYELLSDPTPGALAPRDGLWNGAQLYACQDPTIFEERHLKYISQLGKGNFGSVELCRYDPLGDNTGALVAVKQLQHSGPDQQRDFQREIQILKALHSDFIVKYRGVSYGPGRQSLRLVMEYLPSGCLRDFLQRHRARLDASRLLLYSSQICKGMEYLGSRRCVHRDLAARNILVESEAHVKIADFGLAKLLPLDKDYYVVREPGQSPIFWYAPESLSDNIFSRQSDVWSFGVVLYELFTYCDKSCSPSAEFLRMMGCERDVPALCRLLELLEEGQRLPAPPACPAEVHELMKLCWAPSPQDRPSFSALGPQLDMLWSGSRGCETHAFTAHPEGKHHSLSFS

SEQ ID NO: 12467 - protein, 789 aa, Homo sapiens
ANCQIAILYQRFQRVVFGISQLLCFSALISELTNQKEVAAWTYHYSTKAYSWNISRKYCQNRYTDLVAIQNKNEIDYLNKVLPYYSSYYWIGIRKNNKTWTWVGTKKALTNEAENWADNEPNNKRNNEDCVEIYIKSPSAPGKWNDEHCLKKKHALCYTASCQDMSCSKQGECLETIGNYTCSCYPGFYGPECEYVRECGELELPQHVLMNCSHPLGNFSFNSQCSFHCTDGYQVNGPSKLECLASGIWTNKPPQCLAAQCPPLKIPERGNMTCLHSAKAFQHQSSCSFSCEEGFALVGPEVVQCTASGVWTAPAPVCKAVQCQHLEAPSEGTMDCVHPLTAFAYGSSCKFECQPGYRVRGLDMLRCIDSGHWSAPLPTCEAISCEPLESPVHGSMDCSPSLRAFQYDTNCSFRCAEGFMLRGADIVRCDNLGQWTAPAPVCQALQCQDLPVPNEARVNCSHPFGAFRYQSVCSFTCNEGLLLVGASVLQCLATGNWNSVPPECQAIPCTPLLSPQNGTMTCVQPLGSSSYKSTCQFICDEGYSLSGPERLDCTRSGRWTDSPPMCEAIKCPELFAPEQGSLDCSDTRGEFNVGSTCHFSCDNGFKLEGPNNVECTTSGRWSATPPTCKGIASLPTPGVQCPALTTPGQGTMYCRHHPGTFGFNTTCYFGCNAGFTLIGDSTLSCRPSGQWTAVTPACRAVKCSELHVNKPIAMNCSNLWGNFSYGSICSFHCLEGQLLNGSAQTACQENGHWSTTVPTCQDDGKCPLNPHSHLGTYGVFTNAAFDPSP

SEQ ID NO: 12468 - protein, 1188 aa, Homo sapiens
MSVACVLKRKAVLWQDSFSPHLKHHPQEPANPNMPVVLTSGTGSQAQPQPAANQALAAGTHSSPVPGSIGVAGRSQDDAMVDYFFQRQHGEQLGGGGSGGGGYNNSKHRWPTGDNIHAEHQVRSMDELNHDFQALALEGRAMGEQLLPGKKFWETDESSKDGPKGIFLGDQWRDSAWGTSDHSVSQPIMVQRRPGQSFHVNSEVNSVLSPRSESGGLGVSMVEYVLSSSPGDSCLRKGGFGPRDADSDENDKGEKKNKGTFDGDKLGDLKEEGDVMDKTNGLPVQNGIDADVKDFSRTPGNCQNSANEVDLLGPNQNGSEGLAQLTSTNGAKPVEDFSNMESQSVPLDPMEHVGMEPLQFDYSGTQVPVDSAAATVGLFDYNSQQQLFQRPNALAVQQLTAAQQQQYALAAAHQPHIGLAPAAFVPNPYIISAAPPGTDPYTAGLAAAATLGPAVVPHQYYGVTPWGVYPASLFQQQAAAAAAATNSANQQTTPQAQQGQQQVLRGGASQRPLTPNQNQQGQQTDPLVAAAAVNSALAFGQGLAAGMPGYPVLAPAAYYDQTGALVVNAGARNGLGAPVRLVAPAPVIISSSAAQAAVAAAAASANGAAGGLAGTTNGPFRPLGTQQPQPQPQQQPNNNLASSSFYGNNSLNSNSQSSSLFSQGSAQPANTSLGFGSSSSLGATLGSALGGFGTAVANSNTGSGSRRDSLTGSSDLYKRTSSSLTPIGHSFYNGLSFSSSPGPVGMPLPSQGPGHSQTPPPSLSSHGSSSSLNLGGLTNGSGRYISAAPGAEAKYRSASSASSLFSPSSTLFSSSRLRYGMSDVMPSGRSRLLEDFRNNRYPNLQLREIAGHIMEFSQDQHGSRFIQLKLERATPAERQLVFNEILQAAYQLMVDVFGNYVIQKFFEFGSLEQKLALAERIRGHVLSLALQMYGCRVIQKALEFIPSDQQVINEMVRELDGHVLKCVKDQNGNHVVQKCIECVQPQSLQFIIDAFKGQVFALSTHPYGCRVIQRILEHCLPDQTLPILEELHQHTEQLVQDQYGNYVIQHVLEHGRPEDKSKIVAEIRGNVLVLSQHKFASNVVEKCVTHASRTERAVLIDEVCTMNDGPHSALYTMMKDQYANYVVQKMIDVAEPGQRKIVMHKIRPHIATLRKYTYGKHILAKLEKYYMKNGVDLGPICGPPNGII

SEQ ID NO: 12469 - protein, 904 aa, Homo sapiens
MPVRKQDTQRALHLLEEYRSKLSQTEDRQLRSSIERVINIFQSNLFQALIDIQEFYEVTLLDNPKCIDRSKPSEPIQPVNTWEISSLPSSTVTSETLPSSLSPSVEKYRYQDEDTPPQEHISPQITNEVIGPELVHVSEKNLSEIENVHGFVSHSHISPIKPTEAVLPSPPTVPVIPVLPVPAENTVILPTIPQANPPPVLVNTDSLETPTYVNGTDADYEYEEITLERGNSGLGFSIAGGTDNPHIGDDSSIFITKIITGGAAAQDGRLRVNDCILRVNEVDVRDVTHSKAVEALKEAGSIVRLYVKRRKPVSEKIMEIKLIKGPKGLGFSIAGGVGNQHIPGDNSIYVTKIIEGGAAHKDGKLQIGDKLLAVNNVCLEEVTHEEAVTALKNTSDFVYLKVAKPTSMYMNDGYAPPDITNSSSQPVDNHVSPSSFLGQTPASPARYSPVSKAVLGDDEITREPRKVVLHRGSTGLGFNIVGGEDGEGIFISFILAGGPADLSGELRKGDRIISVNSVDLRAASHEQAAAALKNAGQAVTIVAQYRPEEYSRFEAKIHDLREQMMNSSISSGSGSLRTSQKRSLYVRALFDYDKTKDSGLPSQGLNFKFGDILHVINASDDEWWQARQVTPDGESDEVGVIPSKRRVEKKERARLKTVKFNSKTRDKGEIPDDMGSKGLKHVTSNASDSESSYRGQEEYVLSYEPVNQQEVNYTRPVIILGPMKDRINDDLISEFPDKFGSCVPHTTRPKRDYEVDGRDYHFVTSREQMEKDIQEHKFIEAGQYNNHLYGTSVQSVREVAEKGKHCILDVSGNAIKRLQIAQLYPISIFIKPKSMENIMEMNKRLTEEQARKTFERAMKLEQEFTEHFTAIVQGDTLEDIYNQVKQIIEEQSGSYIWVPAKEKL

SEQ ID NO: 12470 - protein, 409 aa, Homo sapiens
MATSVGHRCLGLLHGVAPWRSSLHPCEITALSQSLQPLRKLPFRAFRTDARKIHTAPARTMFLLRPLPILLVTGGGYAGYRQYEKYRERELEKLGLEIPPKLAGHWEVALYKSVPTRLLSRAWGRLNQVELPHWLRRPVYSLYIWTFGVNMKEAAVEDLHHYRNLSEFFRRKLKPQARPVCGLHSVISPSDGRILNFGQVKNCEVEQVKGVTYSLESFLGPRMCTEDLPFPPAASCDSFKNQLVTREGNELYHCVIYLAPGDYHCFHSPTDWTVSHRRHFPGSLMSVNPGMARWIKELFCHNERVVLTGDWKHGFFSLTAVGATNVGSIRIYFDRDLHTNSPRHSKGSYNDFSFVTHTNREGVPMRKGEHLGEFNLGSTIVLIFEAPKDFNFQLKTGQKIRFGEALGSL

SEQ ID NO: 12471 - protein, 227 aa, Homo sapiens
MGRPLLLPLLLLLQPPAFLQPGGSTGSGPSYLYGVTQPKHLSASMGGSVEIPFSFYYPWELAIVPNVRISWRRGHFHGQSFYSTRPPSIHKDYVNRLFLNWTEGQESGFLRISNLRKEDQSVYFCRVELDTRRSGRQQLQSIKGTKLTITQAVTTTTTWRPSSTTTIAGLRVTESKGHSESWHLSLDTAIRVALAVAVLKTVILGLLCLLLLWWRRRKGSRAPSSDF

SEQ ID NO: 12472 - protein, 551 aa, Homo sapiens
MADGVDHIDIYADVGEEFNQEAEYGGHDQIDLYDDVISPSANNGDAPEDRDYMDTLPPTVGDDVGKGAAPNVVYTYTGKRIALYIGNLTWWTTDEDLTEAVHSLGVNDILEIKFFENRANGQSKGFALVGVGSEASSKKLMDLLPKRELHGQNPVVTPCNKQFLSQFEMQSRKTTQSGQMSGEGKAGPPGGSSRAAFPQGGRGRGRFPGAVPGGDRFPGPAGPGGPPPPFPAGQTPPRPPLGPPGPPGPPGPPPPGQVLPPPLAGPPNRGDRPPPPVLFPGQPFGQPPLGPLPPGPPPPVPGYGPPPGPPPPQQGPPPPPGPFPPRPPGPLGPPLTLAPPPHLPGPPPGAPPPAPHVNPAFFPPPTNSGMPTSDSRGPPPTDPYGRPPPYDRGDYGPPGREMDTARTPLSEAEFEEIMNRNRAISSSAISRAVSDASAGDYGSAIETLVTAISLIKQSKVSADDRCKVLISSLQDCLHGIESKSYGSGSRRERSRERDHSRSREKSRRHKSRSRDRHDDYYRERSRERERHRDRDRDRDRERDREREYRHR

SEQ ID NO: 12473 - protein, 77 aa, Homo sapiens
MNLRLCVQALLLLWLSLTAVCGGSLMPLPDGNGLEDGNVRHLVQPRGSRNGPGPWQGGRRKFRRQRPRLSHKGPMPF

SEQ ID NO: 12474 - protein, 526 aa, Homo sapiens
MQSESGIVPDFEVGEEFHEEPKTYYELKSQPLKSSSSAEHPGASKPPISSSSMTSRILLRQQLMREQMQEQERREQQQKLQAAQFMQQRVPVSQTPAINVSVPTTLPSATQVPMEVLKVQTHLENPTKYHIQQAQRQQVKQYLSTTLANKHANQVLSLPCPNQPGDHVMPPVPGSSAPNSPMAMLTLNSNCEKEGFYKFEEQNRAESECPGMNTHSRASCMQMDDVIDDIISLESSYNEEILGLMDPALQMANTLPVSGNLIDLYGNQGLPPPGLTISNSCPANLPNIKRELTACIFPTESEARALAKERQKKDNHNLIERRRRFNINDRIKELGTLIPKSNDPDMRWNKGTILKASVDYIRKLQREQQRAKELENRQKKLEHANRHLLLRIQELEMQARAHGLSLIPSTGLCSPDLVNRIIKQEPVLENCSQDLLQHHADLTCTTTLDLTDGTITFNNNLGTGTEANQAYSVPTKMGSKLEDILMDDTLSPVGVTDPLLSSVSPGASKTSSRRSSMSMEETEHTC

SEQ ID NO: 12475 - protein, 539 aa, Homo sapiens
MATSAPLRSLEEEVTCSICLDYLRDPVTIDCGHVFCRSCTTDVRPISGSRPVCPLCKKPFKKENIRPVWQLASLVENIERLKVDKGRQPGEVTREQQDAKLCERHREKLHYYCEDDGKLLCVMCRESREHRPHTAVLMEKAAQPHREKILNHLSTLRRDRDKIQGFQAKGEADILAALKKLQDQRQYIVAEFEQGHQFLREREEHLLEQLAKLEQELTEGREKFKSRGVGELARLALVISELEGKAQQPAAELMQDTRDFLNRYPRKKFWVGKPIARVVKKKTGEFSDKLLSLQRGLREFQGKLLRDLEYKTVSVTLDPQSASGYLQLSEDWKCVTYTSLYKSAYLHPQQFDCEPGVLGSKGFTWGKVYWEVEVEREGWSEDEEEGDEEEEGEEEEEEEEAGYGDGYDDWETDEDEESLGDEEEEEEEEEEEVLESCMVGVARDSVKRKGDLSLRPEDGVWALRLSSSGIWANTSPEAELFPALRPRRVGIALDYEGGTVTFTNAESQELIYTFTATFTRRLVPFLWLKWPGTRLLLRP

SEQ ID NO: 12476 - protein, 332 aa, Homo sapiens
MEKTHRGPGLAPGQIYTYPARCWRKKRRLNILEDPRLRPCEYKIDCEAPLKKEGGLPEGPVLEALLCAETGEKKIELKEEETIMDCQKQQLLEFPHDLEVEDLEDDIPRRKNRAKGKAYGIGGLRKRQDTASLEDRDKPYVCDICGKRYKNRPGLSYHYTHTHLAEEEGEENAERHALPFHRKNNHKQFYKELAWVPEAQRKHTAKKAPDGTVIPNGYCDFCLGGSKKTGCPEDLISCADCGRSGHPSCLQFTVNMTAAVRTYRWQCIECKSCSLCGTSENDDQLLFCDDCDRGYHMYCLSPPMAEPPEGSWSCHLCLRHLKEKASAYITLT

SEQ ID NO: 12477 - protein, 286 aa, Homo sapiens
MELILSTSPAELTLDPACQPKLPLDSTCQPEMTFNPGPTELTLDPEHQPEETPAPSLAELTLEPVHRRPELLDACADLINDQWPRSRTSRLHSLGQSSDAFPLCLMLLSPHPTLEAAPVVVGHARLSRVLNQPQSLLVETVVVARALRGRGFGRRLMEGLEVFARARGFRKLHLTTHDQVHFYTHLGYQLGEPVQGLVFTSRRLPATLLNAFPTAPSPRPPRKAPNLTAQAAPRGPKGPPLPPPPPLPECLTISPPVPSGPPSKSLLETQYQNVRGRPIFWMEKDI

SEQ ID NO: 12478 - protein, 149 aa, Homo sapiens
MGWLTRIVCLFWGVLLTARANYQNGKNNVPRLKLSYKEMLESNNVITFNGLANSSSYHTFLLDEERSRLYVGAKDHIFSFDLVNIKDFQKIVWPVSYTRRDECKWAGKDILKECANFIKVLKAYNQTHLYACGTGAFHPICTYIEIGHH

SEQ ID NO: 12479 - protein, 125 aa, Homo sapiens
MVLLRVLILLLSWAAGMGGQYGNPLNKYIRHYEGLSYNVDSLHQKHQRAKRAVSHEDQFLRLDFHAHGRHFNLRMKRDTSLFSDEFKVETSNKVLDYDTSHIYTGHIYDYPHKYGPQGGCADHSV

SEQ ID NO: 12480 - protein, 1698 aa, Homo sapiens
MRLLWGLIWASSFFTLSLQKPRLLLFSPSVVHLGVPLSVGVQLQDVPRGQVVKGSVFLRNPSRNNVPCSPKVDFTLSSERDFALLSLQVPLKDAKSCGLHQLLRGPEVQLVAHSPWLKDSLSRTTNIQGINLLFSSRRGHLFLQTDQPIYNPGQRVRYRVFALDQKMRPSTDTITVMVENSHGLRVRKKEVYMPSSIFQDDFVIPDISEPGTWKISARFSDGLESNSSTQFEVKKYVLPNFEVKITPGKPYILTVPGHLDEMQLDIQARYIYGKPVQGVAYVRFGLLDEDGKKTFFRGLESQTKLVNGQSHISLSKAEFQDALEKLNMGITDLQGLRLYVAAAIIESPGGEMEEAELTSWYFVSSPFSLDLSKTKRHLVPGAPFLLQALVREMSGSPASGIPVKVSATVSSPGSVPEVQDIQQNTDGSGQVSIPIIIPQTISELQLSVSAGSPHPAIARLTVAAPPSGGPGFLSIERPDSRPPRVGDTLNLNLRAVGSGATFSHYYYMILSRGQIVFMNREPKRTLTSVSVFVDHHLAPSFYFVAFYYHGDHPVANSLRVDVQAGACEGKLELSVDGAKQYRNGESVKLHLETDSLALVALGALDTALYAAGSKSHKPLNMGKVFEAMNSYDLGCGPGGGDSALQVFQAAGLAFSDGDQWTLSRKRLSCPKEKTTRKKRNVNFQKAINEKLGQYASPTAKRCCQDGVTRLPMMRSCEQRAARVQQPDCREPFLSCCQFAESLRKKSRDKGQAGLQRALEILQEEDLIDEDDIPVRSFFPENWLWRVETVDRFQILTLWLPDSLTTWEIHGLSLSKTKGLCVATPVQLRVFREFHLHLRLPMSVRRFEQLELRPVLYNYLDKNLTVSVHVSPVEGLCLAGGGGLAQQVLVPAGSARPVAFSVVPTAATAVSLKVVARGSFEFPVGDAVSKVLQIEKEGAIHREELVYELNPLDHRGRTLEIPGNSDPNMIPDGDFNSYVRVTASDPLDTLGSEGALSPGGVASLLRLPRGCGEQTMIYLAPTLAASRYLDKTEQWSTLPPETKDHAVDLIQKGYMRIQQFRKADGSYAAWLSRGSSTWLTAFVLKVLSLAQEQVGGSPEKLQETSNWLLSQQQADGSFQDLSPVIHRSMQGGLVGNDETVALTAFVTIALHHGLAVFQDEGAEPLKQRVEASISKASSFLGEKASAGLLGAHAAAITAYALTLTKAPADLRGVAHNNLMAMAQETGDNLYWGSVTGSQSNAVSPTPAPRNPSDPMPQAPALWIETTAYALLHLLLHEGKAEMADQAAAWLTRQGSFQGGFRSTQDTVIALDALSAYWIASHTTEERGLNVTLSSTGRNGFKSHALQLNNRQIRGLEEELQFSLGSKINVKVGGNSKGTLKVLRTYNVLDMKNTTCQDLQIEVTVKGHVEYTMEANEDYEDYEYDELPAKDDPDAPLQPVTPLQLFEGRRNRRRREAPKLTSLSDRYVSHFETEGPHVLLYFDSVPTSRECVGFEAVQEVPVGLVQPASATLYDYYNPERRCSVFYGAPSKSRLLATLCSAEVCQCAEGKCPRQRRALERGLQDEDGYRMKFACYYPRVEYGFQVKVLREDSRAAFRLFETKITQVLHFTKDVKAAANQMRNFLVRASCRLRLEPGKEYLIMGLDGATYDLEGHPQYLLDSNSWIEEMPSERLCRSTRQRAACAQLNDFLQEYGTQGCQV

SEQ ID NO: 12481 - protein, 1559 aa, Homo sapiens
MNTPSQPRQHFYPSRAQPPSSAASRVQSAAPARPGPAAHVYPAGSQVMMIPSQISYPASQGAYYIPGQGRSTYVVPTQQYPVQPGAPGFYPGASPTEFGTYAGAYYPAQGVQQFPTGVAPTPVLMNQPPQIAPKRERKTIRIRDPNQGGKDITEEIMSGARTASTPTPPQTGGGLEPQANGETPQVAVIVRPDDRSQGAIIADRPGLPGPEHSPSESQPSSPSPTPSPSPVLEPGSEPNLAVLSIPGDTMTTIQMSVEESTPISRETGEPYRLSPEPTPLAEPILEVEVTLSKPVPESEFSSSPLQAPTPLASHTVEIHEPNGMVPSEDLEPEVESSPELAPPPACPSESPVPIAPTAQPEELLNGAPSPPAVDLSPVSEPEEQAKEVTASMAPPTIPSATPATAPSATSPAQEEEMEEEEEEEEGEAGEAGEAESEKGGEELLPPESTPIPANLSQNLEAAAATQVAVSVPKRRRKIKELNKKEAVGDLLDAFKEANPAVPEVENQPPAGSNPGPESEGSGVPPRPEEADETWDSKEDKIHNAENIQPGEQKYEYKSDQWKPLNLEEKKRYDREFLLGFQFIFASMQKPEGLPHISDVVLDKANKTPLRPLDPTRLQGINCGPDFTPSFANLGRTTLSTRGPPRGGPGGELPRGPAGLGPRRSQQGPRKEPRKIIATVLMTEDIKLNKAEKAWKPSSKRTAADKDRGEEDADGSKTQDLFRRVRSILNKLTPQMFQQLMKQVTQLAIDTEERLKGVIDLIFEKAISEPNFSVAYANMCRCLMALKVPTTEKPTVTVNFRKLLLNRCQKEFEKDKDDDEVFEKKQKEMDEAATAEERGRLKEELEEARDIARRRSLGNIKFIGELFKLKMLTEAIMHDCVVKLLKNHDEESLECLCRLLTTIGKDLDFEKAKPRMDQYFNQMEKIIKEKKTSSRIRFMLQDVLDLRGSNWVPRRGDQGPKTIDQIHKEAEMEEHREHIKVQQLMAKGSDKRRGGPPGPPISRGLPLVDDGGWNTVPISKGSRPIDTSRLTKITKPGSIDSNNQLFAPGGRLSWGKGSSGGSGAKPSDAASEAARPATSTLNRFSALQQAVPTESTDNRRVVQRSSLSRERGEKAGDRGDRLERSERGGDRGDRLDRARTPATKRSFSKEVEERSRERPSQPEGLRKAASLTEDRDRGRDAVKREAALPPVSPLKAALSEEELEKKSKAIIEEYLHLNDMKEAVQCVQELASPSLLFIFVRHGVESTLERSAIAREHMGQLLHQLLCAGHLSTAQYYQGLYEILELAEDMEIDIPHVWLYLAELVTPILQEGGVPMGELFREITKPLRPLGKAASLLLEILGLLCKSMGPKKVGTLWREAGLSWKEFLPEGQDIGAFVAEQKVEYTLGEESEAPGQRALPSEELNRQLEKLLKEGSSNQRVFDWIEANLSEQQIVSNTLVRALMTAVCYSAIIFETPLRVDVAVLKARAKLLQKYLCDEQKELQALYALQALVVTLEQPPNLLRMFFDALYDEDVVKEDAFYSWESSKDPAEQQGKGVALKSVTAFFKWLREAEEESDHN

SEQ ID NO: 12482 - protein, 126 aa, Homo sapiens
MMALWSLLHLTFLGFSITLLLVHGQGFQGTAAIWPSLFNVNLSKKVQESIQIPNNGSAPLLVDVRVFVSNVFNVSSVLPRATALHSHGDCSGSAPCSKARGSGCHGLTPGNHLKVQPPCINPSGDI

SEQ ID NO: 12483 - protein, 647 aa, Homo sapiens
MRSGKASCTLETVWEDKHKYEEAERRFYEHEATQAAASAQQLPAEGPAMNGPGQDDPEDADEAEAPDGGSRRDPRKSQDSRKPLQKKRKRSPKSGLGPADLALLGLSAERVWLDKSLFDQAESSYRQKLADVAAQAAWPPALAPWGLCTHGNQVACHHVTWGIWVNKSSFDQAERAFVEWSQALLLAPDGSRRQGTPNTGQQVAVPDLAHQPSPPVNGQPPLGSLQALVREVWLEKPRYDAAERGFYEALFDGHPPGKVRLQERAGLAEGARRGRRDRRGRNILGNKRAGLRRADGEAPSALPYCYFLQKDAEAPWLSKPAYDSAECRHHAAEALRVAWCLEAASLSHRPGPRSGLSVSSLRPNRKMATNFLAHEKIWFDKFKYDDAERRFYEQMNGPVAGASRQENGASVILRDIARARENIQKSLAGSSGPGASSGTSGDHGELVVRIASLEVENQSLRGVVQELQQAISKLEARLNVLEKSSPGHRATAPQTQHVSPMRQVEPPAKKPATPAEDDEDDDIDLFGSDNEEEDKEAAQLREERLRQYAEKKAKKPALVAKSSILLDVKPWDDETDMAQLEACVRSIQLDGLVWGASKLVPVGYGIRKLQIQCVVEDDKVGTDLLEEEITKFEEHVQSVDIAAFNKI

SEQ ID NO: 12484 - protein, 213 aa, Homo sapiens
MAETEERSLDNFFAKRDKKKKKERSNRAASAAGAAGSAGGSSGAAGAAGGGAGAGTRPGDGGTASAGAAGPGAATKAVTKDEDEWKELEQKEVDYSGLRVQAMQISSEKEEDDNEKRQDPGDNWEEGGGGGGGMEKSSGPWNKTAPVQAPPAPVIVTETPEPAMTSGVYRPPGARLTTTRKTPQGPPEIYSDTQFPSLQSTAKHVESRNRYLK

SEQ ID NO: 12485 - protein, 1300 aa, Homo sapiens
MEFYESAYFIVLIPSIVITVIFLFFWLFMKETLYDEVLAKQKREQKLIPTKTDKKKAEKKKNKKKEIQNGNLHESDSESVPRDFKLSDALAVEDDQVAPVPLNVVETSSSVRERKKKEKKQKPVLEEQVIKESDASKIPGKKVEPVPVTKQPTPPSEAAASKKKPGQKKSKNGSDDQDKKVETLMVPSKRQEALPLHQETKQESGSGKKKASSKKQKTENVFVDEPLIHATTYIPLMDNADSSPVVDKREVIDLLKPDQVEGIQKSGTKKLKTETDKENAEVKFKDFLLSLKTMMFSEDEALCVVDLLKEKSGVIQDALKKSSKGELTTLIHQLQEKDKLLAAVKEDAAATKDRCKQLTQEMMTEKERSNVVITRMKDRIGTLEKEHNVFQNKIHVSYQETQQMQMKFQQVREQMEAEIAHLKQENGILRDAVSNTTNQLESKQSAELNKLRQDYARLVNELTEKTGKLQQEEVQKKNAEQAATQLKVQLQEAERRWEEVQSYIRKRTAEHEAAQQDLQSKFVAKENEVQSLHSKLTDTLVSKQQLEQRLMQLMESEQKRVNKEESLQMQVQDILEQNEALKAQIQQFHSQIAAQTSASVLAEELHKVIAEKDKQIKQTEDSLASERDRLTSKEEELKDIQNMNFLLKAEVQKLQALANEQAAAAHELEKMQQSVYVKDDKIRLLEEQLQHEISNKMEEFKILNDQNKALKSEVQKLQTLVSEQPNKDVVEQMEKCIQEKDEKLKTVEELLETGLIQVATKEEELNAIRTENSSLTKEVQDLKAKQNDQVSFASLVEELKKVIHEKDGKIKSVEELLEAELLKVANKEKTVQDLKQEIKALKEEIGNVQLEKAQQLSITSKVQELQNLLKGKEEQMNTMKAVLEEKEKDLANTGKWLQDLQEENESLKAHVQEVAQHNLKEASSASQFEELEIVLKEKENELKRLEAMLKERESDLSSKTQLLQDVQDENKLFKSQIEQLKQQNYQQASSFPPHEELLKVISEREKEISGLWNELDSLKDAVEHQRKKNNERQQQVEAVELEAKEVLKKLFPKVSVPSNLSYGEWLHGFEKKAKECMAGTSGSEEVKVLEHKLKEADEMHTLLQLECEKYKSVLAETEGILQKLQRSVEQEENKWKVKVDESHKTIKQMQSSFTSSEQELERLRSENKDIENLRREREHLEMELEKAEMERSTYVTEVRELKAQLNETLTKLRTEQNERQKVAGDLHKAQQSLELIQSKIVKAAGDTTVIENSDVSPETESSEKETMSVSLNQTVTQLQQLLQAVNQQLTKEKEHYQVLE

SEQ ID NO: 12486 - protein, 129 aa, Homo sapiens
MAGPFSRLLSARPGLRLLALAGAGSLAAGFLLRPEPVRAASERRRLYPPSAEYPDLRKHNNCMASHLTPAVYARLCDKTTPTGWTLDQCIQTGVDNPGHPFIKTVGMVAGDEETYEVFADLFDPVIQER

SEQ ID NO: 12487 - protein, 114 aa, Homo sapiens
MKTFTWTLGVLFFLLVDTGHCRGGQFKIKKINQRRYPRATDGKEEAKKCAYTFLVPEQRITGPICVNTKGQDASTIKDMITRMDLENLKDVLSRQKREIDVLQLVVDVDGNIVN

SEQ ID NO: 12488 - protein, 666 aa, Homo sapiens
MDLVAFEDVAVNFTQEEWSLLDPSQKNLYREVMQETLRNLASIGEKWKDQNIEDQYKNPRNNLRSLLGERVDENTEENHCGETSSQIPDDTLNKKTSPGVKSCESSVCGEVFVGHSSLNRHIRADTAHKPSEYQEYGQEPYKCQQRKKAFRCHPSFQMQEKAHTGEKLYDCKECGKTFISHSSIQRHMIMHNGDGTYKCKFCGKACPCLSIYLIHERVHTGEKPYKCKQCGKAFSYSTSLQIHERTHTGEKPYECKECGKAFGSPNSLYEHRRTHTGEKPYECKQCGKAFRWFHSFQIHERTHSEEKAYECTKCGKAFKCPSYLCRHEVTHSGKKPCECKQCGKALSYLNFQRHMKMHTRMRPYKCKTVEKPLILPVRFEDMKELTLERNLMNASTVVKPSIVPVPFTIMKGLTLERNPMNVSSVVKPSFLPLPFDIMKGLTLERNRMSVSNVGKPSDLPHTFKCMEGLTLKRNPMNVSSVVKPSFFPLPFDIMKGLTLERNPMSVSNVGKPSHLPHTFKCMKGLTLESNCMNLNNVKKPLDLSETFKFMKRHTLERNPIRNMEKHSTISLPFKYMQQCTEDRMPMNVKSVTKHSYLPRSFEYMQEHTLERNPMNVRNAEKRSIIFLLCVYTKGCTLERNHINVRIVGKHSVCLVPFVDIKGLTLE

SEQ ID NO: 12489 - protein, 683 aa, Homo sapiens
PRSSTHVPLVLPLLVLLLLAPARQAAAQRCPQACICDNSRRHVACRYQNLTEVPDAIPELTQRLDLQGNLLKVIPAAAFQGVPHLTHLDLRHCEVELVAEGAFRGLGRLLLLNLASNHLRELPQEALDGLGSLRRLELEGNALEELRPGTFGALGALATLNLAHNALVYLPAMAFQGLLRVRWLRLSHNALSVLAPEALAGLPALRRLSLHHNELQALPGPVLSQARGLARLELGHNPLTYAGEEDGLALPGLRELLLDGGALQALGPRAFAHCPRLHTLDLRGNQLDTLPPLQGPGQLRRLRLQGNPLWCGCQARPLLEWLARARVRSDGACQGPRRLRGEALDALRPWDLRCPGDAAQEEEELEERAVAGPRAPPRGPPRGPGEERAVAPCPRACVCVPESRHSSCEGCGLQAVPRGFPSDTQLLDLRRNHFPSVPRAAFPGLGHLVSLHLQHCGIAELEAGALAGLGRLIYLYLSDNQLAGLSAAALEGAPRLGYLYLERNRFLQVPGAALRALPSLFSLHLQDNAVDRLAPGDLGRTRALRWVYLSGNRITEVSLGALGPARELEKLHLDRNQLREVPTGALEGLPALLELQLSGNPLRALRDGAFQPVGRSLQHLFLNSSGLEQICPGAFSGLGPGLQSLHLQKNQLRALPALPSARRTPIKGRQCGADKVGKEKGRL

SEQ ID NO: 12490 - protein, 172 aa, Homo sapiens
MLKALFLTMLTLALVKSQDTEETITYTQCTDGYEWDPVRQQCKDIDECDIVPDACKGGMKCVNHYGGYLCLPKTAQIIVNNEQPQQETQPAEGTSGATTGVVAASSMATSGVLPGGGFVASAAAVAGPEMQTGRNNFVIRRNPADPQRIPSNPSHRIQCAAGYEQSEHNVCQ

SEQ ID NO: 12491 - protein, 333 aa, Homo sapiens
MIIVAHVLLILLGATEILQADLLPDEKISLLPPVNFTIKVTGLAQVLLQWKPNPDQEQRNVNLEYQVKINAPKEDDYETRITESKCVTILHKGFSASVRTILQNDHSLLASSWASAELHAPPGSPGTSIVNLTCTTNTTEDNYSRLRSYQVSLHCTWLVGTDAPEDTQYFLYYRYGSWTEECQEYSKDTLGRNIACWFPRTFILSKGRDWLAVLVNGSSKHSAIRPFDQLFALHAIDQINPPLNVTAEIEGTRLSIQWEKPVSAFPIHCFDYEVKIHNTRNGYLQIEKLMTNAFISIIDDLSKYDVQVRAAVSSMCREAGLWSEWSQPIYVGK

SEQ ID NO: 12492 - protein, 289 aa, Homo sapiens
MACAGLLTVCLLRPPAPQPQPQTPRHPQLAPDPGPAGHTLFQDVFRRADKNDDGKLSFEEFQNYFADGVLSLGELQELFSGIDGHLTDNLETEKLCDYFSEHLGVYRPVLAALESLNRAVLAAMDATKLEYERASKVDQFVTRFLLRETVSQLQALQSSLEGASDTLEAQAHGWRSDAESVEAQSRLCGSRRAGRRALRSVSRSSTWSPGSSDTGRSSEAEMQWRLQVNRLQELIDQLECKHILMAQRQVQVAEEGLQDFHRALRCYVDFTGAQSHCLHVSAQKMLDGA

SEQ ID NO: 12493 - protein, 839 aa, Homo sapiens
MAAAGPRRSVRGAVCLHLLLTLVIFSRAGEACKKVILNVPSKLEADKIIGRVNLEECFRSADLIRSSDPDFRVLNDGSVYTARAVALSDKKRSFTIWLSDKRKQTQKEVTVLLEHQKKVSKTRHTRETVLRRAKRRWAPIPCSMQENSLGPFPLFLQQVESDAAQNYTVFYSISGRGVDKEPLNLFYIERDTGNLFCTRPVDREEYDVFDLIAYASTADGYSADLPLPLPIRVEDENDNHPVFTEAIYNFEVLESSRPGTTVGVVCATDRDEPDTMHTRLKYSILQQTPRSPGLFSVHPSTGVITTVSHYLDREVVDKYSLIMKVQDMDGQFFGLIGTSTCIITVTDSNDNAPTFRQNAYEAFVEENAFNVEILRIPIEDKDLINTANWRVNFTILKGNENGHFKISTDKETNEGVLSVVKPLNYEENRQVNLEIGVNNEAPFARDIPRVTALNRALVTVHVRDLDEGPECTPAAQYVRIKENLAVGSKINGYKAYDPENRNGNGLRYKKLHDPKGWITIDEISGSIITSKILDREVETPKNELYNITVLAIDKDDRSCTGTLAVNIEDVNDNPPEILQEYVVICKPKMGYTDILAVDPDEPVHGAPFYFSLPNTSPEISRLWSLTKVNDTAARLSYQKNAGFQEYTIPITVKDRAGQAATKLLRVNLCECTHPTQCRATSRSTGVILGKWAILAILLGIALLFSVLLTLVCGVFGATKGKRFPEDLAQQNLIISNTEAPGDDRVCSANGFMTQTTNNSSQGFCGTMGSGMKNGGQETIEMMKGGNQTLESCRGAGHHHTLDSCRGGHTEVDNCRYTYSEWHSFTQPRLGEESIRGHTG

SEQ ID NO: 12494 - protein, 331 aa, Homo sapiens
MSSTPHDPFYSSPFGPFYRRHTPYMVQPEYRIYEMNKRLQSRTEDSDNLWWDAFATEFFEDDATLTLSFCLEDGPKRYTIGRTLIPRYFSTVFEGGVTDLYYILKHSKESYHNSSITVDCDQCTMVTQHGKPMFTKVCTEGRLILEFTFDDLMRIKTWHFTIRQYRELVPRSILAMHAQDPQVLDQLSKNITRMGLTNFTLNYLRLCVILEPMQELMSRHKTYNLSPRDCLKTCLFQKWQRMVAPPAEPTRQPTTKRRKRKNSTSSTSNSSAGNNANSTGSKKKTTAANLSLSSQVPGLGAIPNCSLNPGRDGDLCHSTAVTPSGQFKEKH

SEQ ID NO: 12495 - protein, 972 aa, Homo sapiens
MDTDLYDEFGNYIGPELDSDEDDDELGRETKDLDEMDDDDDDDDVGDHDDDHPGMEVVLHEDKKYYPTAEEVYGPEVETIVQEEDTQPLTEPIIKPVKTKKFTLMEQTLPVTVYEMDFLADLMDNSELIRNVTLCGHLHHGKTCFVDCLIEQTHPEIRKRYDQDLCYTDILFTEQERGVGIKSTPVTVVLPDTKGKSYLFNIMDTPGHVNFSDEVTAGLRISDGVVLFIDAAEGVMLNTERLIKHAVQERLAVTVCINKIDRLILELKLPPTDAYYKLRHIVDEVNGLISMYSTDENLILSPLLGNVCFSSSQYSICFTLGSFAKIYADTFGDINYQEFAKRLWGDIYFNPKTRKFTKKAPTSSSQRSFVEFILEPLYKILAQVVGDVDTSLPRTLDELGIHLTKEELKLNIRPLLRLVCKKFFGEFTGFVDMCVQHIPSPKVGAKPKIEHTYTGGVDSDLGEAMSDCDPDGPLMCHTTKMYSTDDGVQFHAFGRVLSGTIHAGQPVKVLGENYTLEDEEDSQICTVGRLWISVARYHIEVNRVPAGNWVLIEGVDQPIVKTATITEPRGNEEAQIFRPLKFNTTSVIKIAVEPVNPSELPKMLDGLRKVNKSYPSLTTKVEESGEHVILGTGELYLDCVMHDLRKMYSEIDIKVADPVVTFCETVVETSSLKCFAETPNKKNKITMIAEPLEKGLAEDIENEVVQITWNRKKLGEFFQTKYDWDLLAARSIWAFGPDATGPNILVDDTLPSEVDKALLGSVKDSIVQGFQWGTREGPLCDELIRNVKFKILDAVVAQEPLHRGGGQIIPTARRVVYSAFLMATPRLMEPYYFVEVQAPADCVSAVYTVLARRRGHVTQDAPIPGSPLYTIKAFIPAIDSFGFETDLRTHTQGQAFSLSVFHHWQIVPGDPLDKSIVIRPLEPQPAPHLAREFMIKTRRRKGLSEDVSISKFFDDPMLLELAKQDVVLNYPM

SEQ ID NO: 12496 - protein, 342 aa, Homo sapiens
MAPLDLDKYVEIARLCKYLPENDLKVSPICGLAPSGCGAPAGRPFLSPGPPPVFHFLRFLKERLCDYVCDLLLEESNVQPVSTPVTVCGDIHGQFYDLCELFRTGGQVPDTNYIFMGDFVDRGYYSLETFTYLLALKAKWPDRITLLRGNHESRQITQVYGFYDECQTKYGNANAWRYCTKVFDMLTVAALIDEQILCVHGGLSPDIKTLDQIRTIERNQEIPHKGAFCDLVWSDPEDVDTWAISPRGAGWLFGAKVTNEFVHINNLKLICRAHQLVHEGYKFMFDEKLVTVWSAPNYCYRCGNIASIMVFKDVNTREPKLFRAVPDSERVIPPRTTTPYFL

SEQ ID NO: 12497 - protein, 734 aa, Homo sapiens
MLHHIEEPCSLGAHAAVIVPPTWIIKVKKPQNSLKASNRKKKRTSFKRKASKRGMEQENKGRPFVIKPISSPLMKPLLVFVNPKSGGNQGTKVLQMFMWYLNPRQVFDLSQEGPKDALELYRKVPNLRILACGGDGTVGWILSILDELQLSPQPPVGVLPLGTGNDLARTLNWGGGYTDEPVSKILCQVEDGTVVQLDRWNLHVERNPDLPPEELEDGVCKLPLNVFNNYFSLGFDAHVTLEFHESREANPEKFNSRFRNKMFYAGAAFSDFLQRSSRDLSKHVKVVCDGTDLTPKIQELKFQCIVFLNIPRYCAGTMPWGNPGDHHDFEPQRHDDGYIEVIGFTMASLAALQVGGHGERLHQCREVMLLTYKSIPMQVDGEPCRLAPAMIRISLRNQANMVQKSKRRTSMPLLNDPQSVPDRLRIRVNKISLQDYEGFHYDKEKLREASISDWLRTIAGELVQSFGAIPLGILVVRGDCDLETCRMYIDRLQEDLQSVSSGSQRVHYQDHETSFPRALSAQRLSPRWCFLDATSADRFYRIDRSQEHLHFVMEISQDEIFILDPDMVVSQPAGTPPGMPDLVVEQASGSPVSSEDHAILQAVIAGDLMKLIESYKNGGSLLIQGPDHCSLLHYAAKTGNGEIVKYILDHGPSELLDMADSETGETALHKAACQRNRAVCQLLVDAGASLRKTDSKGKTPQERAQQAGDPDLAAYLESRQNYKVIGHEDLETAV

SEQ ID NO: 12498 - protein, 734 aa, Homo sapiens
MGCWGQLLVWFGAAGAILCSSPGSQETFLRSSPLPLASPSPRDPKVSAPPSILEPASPLNSPGTEGSWLFSTCGASGRHGPTQTQCDGAYAGTSVVVTVGAAGQLRGVQLWRVPGPGQYLISAYGAAGGKGAKNHLSRAHGVFVSAIFSLGLGESLYILVGQQGEDACPGGSPESQLVCLGESRAVEEHAAMDGSEGVPGSRRWAGGGGGGGGATYVFRVRAGELEPLLVAAGGGGRAYLRPRDRGRTQASPEKLENRSEAPGSGGRGGAAGGDASETDNLWADGEDGVSFIHPSSELFLQPLAVTENHGEVEIRRHLNCSHCPLRDCQWQAELQLAECLCPEGMELAVDNVTCMDLHKPPGPLVLMVAVVATSTLSLLMVCGVLILGGAWPGPVLASATRCHRGFPSQCYSAQTLPELCSPQDELDFLMEALIISKFRHQNIVRCVGLSLRATPRLILLELMSGGDMKSFLRHSRPHLGQPSPLVMRDLLQLAQDIAQGCHYLEENHFIHRDIAARNCLLSCAGPSRVAKIGDFGMARDIYRASYYRRGDRALLPVKWMPPEAFLEGIFTSKTDSWSFGVLLWEIFSLGYMPYPGRTNQEVLDFVVGGGRMDPPRGCPGPVYRIMTQCWQHEPELRPSFASILERLQYCTQDPDVLNSLLPMELGPTPEEEGTSGLGNRSLECLRPPQPQELSPEKLKSWGGSPLGPWLSSGLKPLKSRGLQPQNLWNPTYRS

SEQ ID NO: 12499 - protein, 836 aa, Homo sapiens
METQELRGALALLLLCFFTSASQDLQVIDLLTVGESRQMVAVAEKIRTALLTAGDIYLLSTFRLPPKQGGVLFGLYSRQDNTRWLEASVVGKINKVTNALHSILGEQTKALVTQLTLFNQILVELRDDIRDQVKEMSLIRNTIMECQVCGFHEQRSHCSPNPCFRGVDCMEVYEYPGYRCGPCPPGLQGNGTHCSDINECAHADPCFPGSSCINTMPGFHCEACPRGYKGTQVSGVGIDYARASKQVCNDIDECNDGNNGGCDPNSICTNTVGSFKCGPCRLGFLGNQSQGCLPARTCHSPAHSPCHIHAHCLFERNGAVSCQCNVGWAGNGNVCGTDTDIDGYPDQALPCMDNNKHCKQDNCLLTPNSGQEDADNDGVGDQCDDDADGDGIKNVEDNCRLFPNKDQQNSDTDSFGDACDNCPNVPNNDQKDTDGNGEGDACDNDVDGDGIPNGLDNCPKVPNPLQTDRDEDGVGDACDSCPEMSNPTQTDADSDLVGDVCDTNEDSDGDGHQDTKDNCPQLPNSSQLDSDNDGLGDECDGDDDNDGIPDYVPPGPDNCRLVPNPNQKDSDGNGVGDVCEDDFDNDAVVDPLDVCPESAEVTLTDFRAYQTVVLDPEGDAQIDPNWVVLNQGMEIVQTMNSDPGLAVGYTAFNGVDFEGTFHVNTVTDDDYAGFLFSYQDSGRFYVVMWKQTEQTYWQATPFRAVAQPGLQLKAVTSVSGPGEHLRNALWHTGHTPDQVRLLWTDPRNVGWRDKTSYRWQLLHRPQVGYIRVKLYEGPQLVADSGVIIDTSMRGGRLGVFCFSQENIIWSNLQYRCNDTVPEDFEPFRRQLLQGRV

SEQ ID NO: 12500 - protein, 181 aa, Homo sapiens
MFFWCACCLMVAWRVSASDAEHCPELPPVDNSIFVAKEVEGQILGTYVCIKGYHLVGKKTLFCNASKEWDNTTTECRLGHCPDPVLVNGEFSSSGPVNVSDKITFMCNDHYILKGSNRSQCLEDHTWAPPFPICKSRDCDPPGNPVHGYFEGNNFTLGSTISYYCEDRYYLVGVQEQQCVD

SEQ ID NO: 12501 - protein, 691 aa, Homo sapiens
MGQGWATAGLPSLLFLLLCYGHPLLVPSQEASQQVTVTHGTSSQATTSSQTTTHQATAHQTSAQSPNLVTDEAEASKFVEEYDRTSQVVWNEYAEANWNYNTNITTETSKILLQKNMQIANHTLKYGTQARKFDVNQLQNTTIKRIIKKVQDLERAALPAQELEEYNKILLDMETTYSVATVCHPNGSCLQLEPDLTNVMATSRKYEDLLWAWEGWRDKAGRAILQFYPKYVELINQAARLNGYVDAGDSWRSMYETPSLEQDLERLFQELQPLYLNLHAYVRRALHRHYGAQHINLEGPIPAHLLGNMWAQTWSNIYDLVVPFPSAPSMDTTEAMLKQGWTPRRMFKEADDFFTSLGLLPVPPEFWNKSMLEKPTDGREVVCHASAWDFYNGKDFRIKQCTTVNLEDLVVAHHEMGHIQYFMQYKDLPVALREGANPGFHEAIGDVLALSVSTPKHLHSLNLLSSEGGSDEHDINFLMKMALDKIAFIPFSYLVDQWRWRVFDGSITKENYNQEWWSLRLKYQGLCPPVPRTQGDFDPGAKFHIPSSVPYIRTAMKLGFSRPWPEAMQLITGQPNMSASAMLSYFKPLLDWLRTENELHGEKLGWPQYNWTPNSARSEGPLPDSGRVSFLGLDLDAQQARVGQWLLLFLGIALLVATLGLSQRLFSIRHRSLHRHSHGPQFGSEVELRHS

SEQ ID NO: 12502 - protein, 350 aa, Homo sapiens
MAMRQTPLTCSGHTRPVVDLAFSGITPYGYFLISACKDGKPMLRQGDTGDWIGTFLGHKGAVWGATLNKDATKAATAAADFTAKVWDAVSGDELMTLAHKHIVKTVDFTQDSNYLLTGGQDKLLRIYDLNKPEAEPKEISGHTSGIKKALWCSEDKQILSADDKTVRLWDHATMTEVKSLNFNMSVSSMEYIPEGEILVITYGRSIAFHSAVSLDPIKSFEAPATINSASLHPEKEFLVAGGEDFKLYKYDYNSGEELESYKGHFGPIHCVRFSPDGELYASGSEDGTLRLWQTVVGKTYGLWKCVLPEEDSGELAKPKIGFPETTEEELEEIASENSDCIFPSAPDVKA

SEQ ID NO: 12503 - protein, 226 aa, Homo sapiens
LLPVLLLLLLRASCPWGQEQGARSPSEEPPEEEIPKEDGILVLSRHTLGLALREHPALLVEFYAPWCGHCQALAPEYSKAAAVLAAESMVVTLAKVDGPAQRELAEEFGVTEYPTLKFFRNGNRTHPEEYTGPRDAEGIAEWLRRRVGPSAMRLEDEAAAQALIGGRDLVVIGFFQDALDMTFGLTDRPRLFQQFGLTKDTVVLFKKFDEGRADFPVDEELGLDLG

SEQ ID NO: 12504 - protein, 53 aa, Homo sapiens
MEPGPALAWLLLLSLLADCLKAAQSRDFTVKDIIYLHPSTTPYPGGFKCFTCE

SEQ ID NO: 12505 - protein, 203 aa, Homo sapiens
MASPGCLWLLAVALLPWTCASRALQHLDPPAPLPLVIWHGMGVFGLPRCPGESSHICDFIRKTLNAGAYSKVVQERLVQAEYWHDPIKEDVYRNHSIFLADINQERGINESYKKNLMALKKFVMVKFLNDSIVDPVDSEWFGFYRSGQAKETIPLQETSLYTQDRLGLKEMDNAGQLVFLATEGDHLQLSEEWFYAHIIPFLG

SEQ ID NO: 12506 - protein, 442 aa, Homo sapiens
MPRARKGNTLRKGGQRRGGGARSSAQADSGSSDDEAASEARSTASECPSLLSTTAEDSLGGDVVDEQGQQEDLEEKLKEYVDCLTDKSAKTRQGALESLRLALASRLLPDFLLERRLTLADALEKCLKKGKGEEQALAAAVLGLLCVQLGPGPKGEELFHSLQPLLVSVLSDSTASPAARLHCASALGLGCYVAAADIQDLVSCLACLESVFSRFYGLGGSSTSPVVPASLHGLLSAALQAWALLLTICPSTQISHILDRQLPRLPQLLSSESVNLRIAAGETIALLFELARDLEEEFVYEDMEALCSVLRTLATDSNKYRAKADRRRQRSTFRAVLHSVEGGECEEEIVRFGFEVLYMDSWARHRIYAAFKEVLGSGMHHHLQNNELLRDIFGLGPVLLLDATALKACKVPRFEKHLYNAAAFKARTKARSRVRDKRADIL

SEQ ID NO: 12507 - protein, 782 aa, Homo sapiens
MDSSIHLSSLISRHDDEATRTSTSEGLEEGEVEGETLLIVESEDQASVDLSHDQSGDSLNSDEGDVSWMEEQLSYFCDKCQKWIPASQLREQLSYLKGDNFFRFTCSDCSADGKEQYERLKLTWQQVVMLAMYNLSLEGSGRQGYFRWKEDICAFIEKHWTFLLGNRKKTSTWWSTVAGCLSVGSPMYFRSGAQEFGEPGWWKLVHNKPPTMKPEGEKLSASTLKIKAASKPTLDPIITVEGLRKRASRNPVESAMELKEKRSRTQEAKDIRRAQKEAAGFLDRSTSSTPVKFISRGRRPDVILEKGEVIDFSSLSSSDRTPLTSPSPSPSLDFSAPGTPASHSATPSLLSEADLIPDVMPPQALFHDDDEMEGDGVIDPGMEYVPPPAGSVASGPVVGVRKKVRGPEQIKQEVESEEEKPDRMDIDSEDTDSNTSLQTRAREKRKPQLEKDTKPKEPRYTPVSIYEEKLLLKRLEACPGAVAMTPEARRLKRKLIVRQAKRDRGLPLFDLDQVVNAALLLVDGIYGAKEGGISRLPAGQATYRTTCQDFRILDRYQTSLPSRKGFRHQTTKFLYRLVGSEDMAVDQSIVSPYTSRILKPYIRRDYETKPPKLQLLSQIRSHLHRSDPHWTPEPDAPLDYCYVRPNHIPTINSMCQEFFWPGIDLSECLQYPDFSVVVLYKKVIIAFGFMVPDVKYNEAYISFLFVHPEWRRAGIATFMIYHLIQTCMGKDVTLHVSASNPAMLLYQKFGFKTEEYVLDFYDKYYPLESTECKHAFFLRLRR

SEQ ID NO: 12508 - protein, 63 aa, Homo sapiens
MWAMESGHLLWALLFMQSLWPQLTDGATRVYYLGIRDVQWNYAPKGRNVITNQPLDSDIYVKM

SEQ ID NO: 12509 - protein, 313 aa, Homo sapiens
MGAEASSSWCPGTALPEERLSVKRASEISGFLGQGSSGEAALDVLTHVLEGAGNKLTSSCGKPSSNRMSLQWTAVATFLYAEVFVVLLLCIPFISPKRWQKIFKSRLVELLVSYGNTFFVVLIVILVLLVIDAVREIRKYDDVTEKVNLQNNPGAMEHFHMKLFRAQRNLYIAGFSLLLSFLLRRLVTLISQQATLLASNEAFKKQAESASEAAKKYMEENDQLKKGAAVDGGKLDVGNAEVKLEEENRSLKADLQKLKDELASTKQKLEKAENQVLAMRKQSEGLTKEYDRLLEEHAKLQAAVDGPMDKKEE

SEQ ID NO: 12510 - protein, 493 aa, Homo sapiens
MDKFWWHAAWGLCLVPLSLAQIDLNITCRFAGVFHVEKNGRYSISRTEAADLCKAFNSTLPTMAQMEKALSIGFETCRYGFIEGHVVIPRIHPNSICAANNTGVYILTSNTSQYDTYCFNASAPPEEDCTSVTDLPNAFDGPITITIVNRDGTRYVQKGEYRTNPEDIYPSNPTDDDVSSGSSSERSSTSGGYIFYTFSTVHPIPDEDSPWITDSTDRIPATNMDSSHSITLQPTANPNTGLVEDLDRTGPLSMTTQQSNSQSFSTSHEGLEEDKDHPTTSTLTSSNRNDVTGGRRDPNHSEGSTTLLEGYTSHYPHTKESRTFIPVTSAKTGSFGVTAVTVGDSNSNVNRSLSGDQDTFHPSGGSHTTHGSESDGHSHGSQEGGANTTSGPIRTPQIPEWLIILASLLALALILAVCIAVNSRRRCGQKKKLVINSGNGAVEDRKPSGLNGEASKSQEMVHLVNKESSETPDQFMTADETRNLQNVDMKIGV

SEQ ID NO: 12511 - protein, 1433 aa, Homo sapiens
MARAQALVLALTFQLCAPETETPAAGCTFEEASDPAVPCEYSQAQYDDFQWEQVRIHPGTRAPADLPHGSYLMVNTSQHAPGQRAHVIFQSLSENDTHCVQFSYFLYSRDGHSPGTLGVYVRVNGGPLGSAVWNMTGSHGRQWHQAELAVSTFWPNEYQVLFEALISPDRRGYMGLDDILLLSYPCAKAPHFSRLGDVEVNAGQNASFQCMAAGRAAEAERFLLQRQSGALVPAAGVRHISHRRFLATFPLAAVSRAEQDLYRCVSQAPRGAGVSNFAELIVKEPPTPIAPPQLLRAGPTYLIIQLNTNSIIGDGPIVRKEIEYRMARGPWAEVHAVSLQTYKLWHLDPDTEYEISVLLTRPGDGGTGRPGPPLISRTKCAEPMRAPKGLAFAEIQARQLTLQWEPLGYNVTRCHTYTVSLCYHYTLGSSHNQTIRECVKTEQGVSRYTIKNLLPYRNVHVRLVLTNPEGRKEGKEVTFQTDEDVPSGIAAESLTFTPLEDMIFLKWEEPQEPNGLITQYEISYQSIESSDPAVNVPGPRRTISKLRNETYHVFSNLHPGTTYLFSVRARTGKGFGQAALTEITTNISAPSFDYADMPSPLGESENTITVLLRPAQGRGAPISVYQVIVEEERARRLRREPGGQDCFPVPLTFEAALARGLVHYFGAELAASSLPEAMPFTVGDNQTYRGFWNPPLEPRKAYLIYFQAASHLKGETRLNCIRIARKAACKESKRPLEVSQRSEEMGLILGICAGGLAVLILLLGAIIVIIRKGKPVNMTKATVNYRQEKTHMMSAVDRSFTDQSTLQEDERLGLSFMDTHGYSTRGDQRSGGVTEASSLLGGSPRRPCGRKGSPYHTGQLHPAVRVADLLQHINQMKTAEGYGFKQEYESFFEGWDATKKKDKVKGSRQEPMPAYDRHRVKLHPMLGDPNADYINANYIDGYHRSNHFIATQGPKPEMVYDFWRMVWQEHCSSIVMITKLVEVKCSRYWPEDSDTYGDIKIMLVKTETLAEYVVRTFALERRGYSARHEVRQFHFTAWPEHGVPYHATGLLAFIRRVKASTPPDAGPIVIHCSAGTGRTGCYIVLDVMLDMAECEGVVDIYNCVKTLCSRRVNMIQTEEQYIFIHDAILEACLCGETTIPVSEFKATYKEMIRIDPQSNSSQLREEFQTLNSVTPPLDVEECSIALLPRNRDKNRSMDVLPPDRCLPFLISTDGDSNNYINAALTDSYTRSAAFIVTLHPLQSTTPDFWRLVYDYGCTSIVMLNQLNQSNSAWPCLQYWPEPGRQQYGLMEVEFMSGTADEDLVARVFRVQNISRLQEGHLLVRHFQFLRWSAYRDTPDSKKAFLHLLAEVDKWQAESGDGRTIVHCLNGGGRSGTFCACATVLEMIRCHNLVDVFFAAKTLRNYKPNMVETMDQYHFCYDVALEYLEGLESR

SEQ ID NO: 12512 - protein, 186 aa, Homo sapiens
MASILRSPQALQLTLALIKPDAVAHPLILEAVHQQILSNKFLIVRMRELLWRKEDCQRFYREHEGRFFYQRLVEFMASGPIRAYILAHKDAIQLWRTLMGPTRVFRARHVAPDSIRGSFGLTDTRNTTHGSDSVVSASREIAAFFPDFSEQRWYEEEEPQLRCGPVCYSPEGGVHYVAGTGGLGPA

SEQ ID NO: 12513 - protein, 162 aa, Homo sapiens
MEGLVVAAGGDVSLHNFSARLWEQLVHFHVMRLTDSLFLWVGATPHLRNLAVAMCSRYDSIPVSTSLLGDTSDTTSTGLAQRLGLGGKTGLACECGVEWGLSKGHEAECSTLPTPQHTSCGPARKTNKQVFVSYNLQNTDSNFALLVENRIKEEMEAFPEKF

SEQ ID NO: 12514 - protein, 221 aa, Homo sapiens
MTTQLRVVHLLPLLLACFVQTSPKQEKMKMDCHKDEKGTIYDYEAIALNKNEYVSFKQYVGKHILFVNVATYCGLTAQYPELNALQEELKPYGLVVLGFPCNQFGKQEPGDNKEILPGLKYVRPGGGFVPSFQLFEKGDVNGEKEQKVFSFLKHSCPHPSEILGTFKSISWDPVKVHDIRWNFEKFLVGPDGIPVMRWSHRATVSSVKTDILAYLKQFKTK

SEQ ID NO: 12515 - protein, 58 aa, Homo sapiens
MGPEALSSLLLLLLVASGDADMKGHFDPAKCRYALGMQDRTIPDSDISASSSWSDSTA

SEQ ID NO: 12516 - protein, 3460 aa, Homo sapiens
MERSGWARQTFLLALLLGATLRARAAAGYYPRFSPFFFLCTHHGELEGDGEQGEVLISLHIAGNPTYYVPGQEYHVTISTSTFFDGLLVTGLYTSTSVQASQSIGGSSAFGFGIMSDHQFGNQFMCSVVASHVSHLPTTNLSFIWIAPPAGTGCVNFMATATHRGQVIFKDALAQQLCEQGAPTDVTVHPHLAEIHSDSIILRDDFDSYHQLQLNPNIWVECNNCETGEQCGAIMHGNAVTFCEPYGPRELITTGLNTTTASVLQFSIGSGSCRFSYSDPSIIVLYAKNNSADWIQLEKIRAPSNVSTIIHILYLPEDAKGENVQFQWKQENLRVGEVYEACWALDNILIINSAHRQVVLEDSLDPVDTGNWLFFPGATVKHSCQSDGNSIYFHGNEGSEFNFATTRDVDLSTEDIQEQWSEEFESQPTGWDVLGAVIGTECGTIESGLSMVFLKDGERKLCTPSMDTTGYGNLRFYFVMGGICDPGNSHENDIILYAKIEGRKEHITLDTLSYSSYKVPSLVSVVINPELQTPATKFCLRQKNHQGHNRNVWAVDFFHVLPVLPSTMSHMIQFSINLGCGTHQPGNSVSLEFSTNHGRSWSLLHTECLPEICAGPHLPHSTVYSSENYSGWNRITIPLPNAALTRNTRIRWRQTGPILGNMWAIDNVYIGPSCLKFCSGRGQCTRHGCKCDPGFSGPACEMASQTFPMFISESFGSSRLSSYHNFYSIRGAEVSFGCGVLASGKALVFNKDGRRQLITSFLDSSQSRFLQFTLRLGSKSVLSTCRAPDQPGEGVLLHYSYDNGITWKLLEHYSYLSYHEPRIISVELPGDAKQFGIQFRWWQPYHSSQREDVWAIDEIIMTSVLFNSISLDFTNLVEVTQSLGFYLGNVQPYCGHDWTLCFTGDSKLASSMRYVETQSMQIGASYMIQFSLVMGCGQKYTPHMDNQVKLEYSTNHGLTWHLVQEECLPSMPSCQEFTSASIYHASEFTQWRRVIVLLPQKTWSSATRFRWSQSYYTAQDEWALDSIYIGQQCPNMCSGHGSCDHGICRCDQGYQGTECHPEAALPSTIMSDFENQNGWESDWQEVIGGEIVKPEQGCGVISSGSSLYFSKAGKRQLVSWDLDTSWVDFVQFYIQIGGESASCNKPDSREEGVLLQYSNNGGIQWHLLAEMYFSDFSKPRFVYLELPAAAKTPCTRFRWWQPVFSGEDYDQWAVDDIIILSEKQKQIIPVINPTLPQNFYEKPAFDYPMNQMSVWLMLANEGMVKNETFCAATPSAMIFGKSDGDRFAVTRDLTLKPGYVLQFKLNIGCANQFSSTAPVLLQYSHDAGMSWFLVKEGCYPASAGKGCEGNSRELSEPTMYHTGDFEEWTRITIVIPRSLASSKTRFRWIQESSSQKNVPPFGLDGVYISEPCPSYCSGHGDCISGVCFCDLGYTAAQGTCVSNVPNHNEMFDRFEGKLSPLWYKITGAQVGTGCGTLNDGKSLYFNGPGKREARTVPLDTRNIRLVQFYIQIGSKTSGITCIKPRTRNEGLIVQYSNDNGILWHLLRELDFMSFLEPQIISIDLPQDAKTPATAFRWWQPQHGKHSAQWALDDVLIGMNDSSQTGFQDKFDGSIDLQANWYRIQGGQVDIDCLSMDTALIFTENIGKPRYAETWDFHVSASTFLQFEMSMGCSKPFSNSHSVQLQYSLNNGKDWHLVTEECVPPTIGCLHYTESSIYTSERFQNWKRITVYLPLSTISPRTRFRWIQANYTVGADSWAIDNVVLASGCPWMCSGRGICDAGRCVCDRGFGGPYCVPVVPLPSILKDDFNGNLHPDLWPEVYGAERGNLNGETIKSGTSLIFKGEGLRMLISRDLDCTNTMYVQFSLRFIAKSTPERSHSILLQFSISGGITWHLMDEFYFPQTTNILFINVPLPYTAQTNATRFRLWQPYNNGKKEEIWIVDDFIIDGNNVNNPVMLLDTFDFGPREDNWFFYPGGNIGLYCPYSSKGAPEEDSAMVFVSNEVGEHSITTRDLNVNENTIIQFEINVGCSTDSSSADPVRLEFSRDFGATWHLLLPLCYHSSSHVSSLCSTEHHPSSTYYAGTMQGWRREVVHFGKLHLCGSVRFRWYQGFYPAGSQPVTWAIDNVYIGPQCEEMCNGQGSCINGTKCICDPGYSGPTCKISTKNPDFLKDDFEGQLESDRFLLMSGGKPSRKCGILSSGNNLFFNEDGLRMLMTRDLDLSHARFVQFFMRLGCGKGVPDPRSQPVLLQYSLNGGLSWSLLQEFLFSNSSNVGRYIALEIPLKARSGSTRLRWWQPSENGHFYSPWVIDQILIGGNISGNTVLEDDFTTLDSRKWLLHPGGTKMPVCGSTGDALVFIEKASTRYVVSTDVAVNEDSFLQIDFAASCSVTDSCYAIELEYSVDLGLSWHPLVRDCLPTNVECSRYHLQRILVSDTFNKWTRITLPLPPYTRSQATRFRWHQPAPFDKQQTWAIDNVYIGDGCIDMCSGHGRCIQGNCVCDEQWGGLYCDDPETSLPTQLKDNFNRAPSSQNWLTVNGGKLSTVCGAVASGMALHFSGGCSRLLVTVDLNLTNAEFIQFYFMYGCLITPNNRNQGVLLEYSVNGGITWNLLMEIFYDQYSKPGFVNILLPPDAKEIATRFRWWQPRHDGLDQNDWAIDNVLISGSADQRTVMLDTFSSAPVPQHERSPADAGPVGRIAFDMFMEDKTSVNEHWLFHDDCTVERFCDSPDGVMLCGSHDGREVYAVTHDLTPTEGWIMQFKISVGCKVSEKIAQNQIHVQYSTDFGVSWNYLVPQCLPADPKCSGSVSQPSVFFPTKGWKRITYPLPESLVGNPVRFRFYQKYSDMQWAIDNFYLGPGCLDNCRGHGDCLREQCICDPGYSGPNCYLTHTLKTFLKERFDSEEIKPDLWMSLEGGSTCTECGILAEDTALYFGGSTVRQAVTQDLDLRGAKFLQYWGRIGSENNMTSCHRPICRKEGVLLDYSTDGGITWTLLHEMDYQKYISVRHDYILLPEDALTNTTRLRWWQPFVISNGIVVSGVERAQWALDNILIGGAEINPSQLVDTFDDEGTSHEENWSFYPNAVRTAGFCGNPSFHLYWPNKKKDKTHNALSSRELIIQPGYMMQFKIVVGCEATSCGDLHSVMLEYTKDARSDSWQLVQTQCLPSSSNSIGCSPFQFHEATIYNSVNSSSWKRITIQLPDHVSSSATQFRWIQKGEETEKQSWAIDHVYIGEACPKLCSGHGYCTTGAICICDESFQGDDCSVFSHDLPSYIKDNFESARVTEANWETIQGGVIGSGCGQLAPYAHGDSLYFNGCQIRQAATKPLDLTRASKIMFVLQIGSMSQTDSCNSDLSGPHAVDKAVLLQYSVNNGITWHVIAQHQPKDFTQAQRVSYNVPLEARMKGVLLRWWQPRHNGTGHDQWALDHVEVVLVSTRKQNYMMNFSRQHGLRHFYNRRRRSLRRYP

SEQ ID NO: 12517 - protein, 399 aa, Homo sapiens
MAGNAEPPPAGAACPQDRRSCSGRAGGDRVWEDGEHPAKKLKSGGDEERREKPPKRKIVLLMAYSGKGYHGMQRNVGSSQFKTIEDDLVSALVRSGCIPENHGEDMRKMSFQRCARTDKGVSAAGQVVSLKVWLIDDILEKINSHLPSHIRILGLKRVTGGFNSKNRCDARTYCYLLPTFAFAHKDRDVQDETYRLSAETLQQVNRLLACYKGTHNFHNFTSQKGPQDPSACRYILEMYCEEPFVREGLEFAVIRVKGQSFMMHQIRKMVGLVVAIVKGYAPESVLERSWGTEKVDVPKAPGLGLVLERVHFEKYNQRFGNDGLHEPLDWAQEEGKVAAFKEEHIYPTIIGTERDERSMAQWLSTLPIHNFSATALTAGGTGAKVPSPLEGSEGDGDTD

SEQ ID NO: 12518 - protein, 409 aa, Homo sapiens
MSVGCACPGCSSKSFKLYSPKEPPNGNAFPPFHPGTMLDRDVGPTPMYPPTYLEPGIGRHTPYGNQTDYRIFELNKRLQNWTEECDNLWWDAFTTEFFEDDAMLTITFCLEDGPKRYTIGRTLIPRYFRSIFEGGATELYYVLKHPKEAFHSNFVSLDCDQGSMVTQHGKPMFTQVCVEGRLYLEFMFDDMMRIKTWHFSIRQHRELIPRSILAMHAQDPQMLDQLSKNITRCGLSNSTLNYLRLCVILEPMQELMSRHKTYSLSPRDCLKTCLFQKWQRMVAPPAEPTRQQPSKRRKRKMSGGSTMSSGGGNTNNSNSKKKSPASTFALSSQDVMVVGEPTLMGGEFGDEDERLITRLENTQFDAANGIDDEDSFNNSPALGANSPWNSKPPSSQESKSENPTSQASQ

SEQ ID NO: 12519 - protein, 515 aa, Homo sapiens
MATARTFGPEREAEPAKEARVVGSELVDTYTVYIIQVTDGSHEWTVKHRYSDFHDLHEKLVAERKIDKNLLPPKKIIGKNSRSLVEKREKDLEVYLQKLLAAFPGVTPRVLAHFLHFHFYEINGITAALAEELFEKGEQLLGAGEVFAIGPLQLYAVTEQLQQGKPTCASGDAKTDLGHILDFTCRLKYLKVSGTEGPFGTSNIQEQLLPFDLSIFKSLHQVEISHCDAKHIRGLVASKPTLATLSVRFSATSMKEVLVPEASEFDEWEPEGTTLEGPVTAVIPTWQALTTLDLSHNSVSEIDESVKLIPKIEFLDLSHNGLLVVDNLQHLYNLVHLDLSYNKLSSLEGLHTKLGNIKTLNLAGNLLESLSGLHKLYSLVNLDLRDNRIEQMEEVRSIGSLPCLEHVSLLNNPLSIIPDYRTKVLAQFGERASEVCLDDTVTTEKELDTVEVLKAIQKAKEVKSKLSNPEKKGGEDSRLSAAPCIRPSSSPPTVAPASASLPQPILSNQGILGDE

SEQ ID NO: 12520 - protein, 329 aa, Homo sapiens
MALTPPLLLLSAGTMTLGSPRKGLLMLLMALVTQGKGRYGEVWRGLWHGESVAVKIFSSRDEQSWFRETEIYNTVLLRHDNILGFIASDMTSRNSSTQLWLITHYHEHGSLYDFLQRQTLEPHLALRLAVSAACGLAHLHVEIFGTQGKPAIAHRDFKSRNVLVKSNLQCCIADLGLAVMHSQGSDYLDIGNNPRVGTKRYMAPEVLDEQIRTDCFESYKWTDIWAFGLVLWEIARRTIVNGIVEDYRPPFYDVVPNDPSFEDMKKVVCVDQQTPTIPNRLAADPVLSGLAQMMRECWYPNPSARLTALRIKKTLQKISNSPEKPKVIQ

SEQ ID NO: 12521 - protein, 90 aa, Homo sapiens
MVVALRYVWPLLLCSPCLLIQIPEELMEPPVITEQSPRRLVVFPTDDISLKCEASGKPEVQFRWTRDGVHFKPKEELGVTVYQSPHSGSF

SEQ ID NO: 12522 - protein, 264 aa, Homo sapiens [sequence omitted]

SEQ ID NO: 12523 - protein, 79 aa, Homo sapiens; identical to SEQ ID NO: 11698

SEQ ID NO: 12524 - protein, 700 aa, Homo sapiens
MAGLTAAAPRPGVLLLLLSILHPSRPGGVPGAIPGGVPGGVFYPALGPGGKPLKPVPGGLAGAGLGAGLGAFPAVTFPGALVPGGVADAAAAYKAAKAGAGLGGVPGVGGLGVSAAPSVPGAVVPQPGAGVKPGKVPGVGLPGVYPGGVLPGARFPGVGVLPGVPTGAGVKPKAPGVGGAFAGIPGVGPFGGPQPGVPLGYPIKAPKLPGGYGLPYTTGKLPYGYGPGGVAGAAGKAGYPTGTGVGPQAAAAAAAKAAAKFGAGAAGVLPGVGGAGVPGVPGAIPGIGGIAGVGTPAAAAAAAAAAKAAKYGAAAGLVPGGPGFGPGVVGVPGAGVPGVGVPGAGIPVVPGAGIPGAAVPGVVSPEAAAKAAAKAAKYGARPGVGVGGIPTYGVGAGGFPGFGVGVGGIPGVAGVPGVGGVPGVGGVPGVGISPEAQAAAAAKAAKYGLVPGVGVAPGVGVAPGVGVAPGVGLAPGVGVAPGVGVAPGVGVAPGIGPGGVAAAAKSAAKVAAKAQLRAAAGLGAGIPGLGVGVGVPGLGVGAGVPGLGVGAGVPGFGAVPGALAAAKAAKYGAAVPGVLGGLGALGGVGIPGGVVGAGPAAAAAAAKAAAKAAQFGLVGAAGLGGLGVGGLGVPGVGGLGGIPPAAAAKAAKYGAAGLGGVLGGAGQFPLGGVAARPGFGLSPIFPGGACLGKACGRKRK

SEQ ID NO: 12525 - protein, 264 aa, Homo sapiens
MLVAGLLLWASLLTGAWPSFPTQDHLPATPRVRLSFKELKATGTAHFFNFLLNTTDYRILLKDEDHDRMYVGSKDYVLSLDLHDINREPLIIHWAASPQRIEECVLSGKDVNGECGNFVRLIQPWNRTHLYVCGTGAYNPMCTYVNRGRRAQDYIFYLEPERLESGKGKCPYDPKLDTASALINEELYAGVYIDFMGTDAAIFRTLGKQTAMRTDQYNSRWLNDPSFIHAELIPDSAERNDDKLYFFFRERSAEAPQSPAVYAR

SEQ ID NO: 12526 - protein, 889 aa, Homo sapiens
MSQGLSWHDDLTQYVISQEMERIPRLRPPEPRPRDRSGLAPKRPGPAGELLLQDIPTGSAPAAQHRLPQPPVGKGGAGASSSLSPLQAELLPPLLEHLLLPPQPPHPSLSYEPALLQPYLFHQFGSRDGSRVSEGSPGMVSVGPLPKAEAPALFSRTASKGIFGDHPGHSYGDLPGPSPAQLFQDSGLLYLAQELPAPSRARVPRLPEQGSSSRAEDSPEGYEKEGLGDRGEKPASPAVQPDAALQRLAAVLAGYGVELRQLTPEQLSTLLTLLQLLPKGAGRNPGGVVNVGADIKKTMEGPVEGRDTAELPARTSPMPGHPTASPTSSEVQQVPSPVSSEPPKAARPPVTPVLLEKKSPLGQSQPTVAGQPSARPAAEEYGYIVTDQKPLSLAAGVKLLEILAEHVHMSSGSFINISVVGPALTFRIRHNEQNLSLADVTQQAGLVKSELEAQTGLQILQTGVGQREEAAAVLPQTAHSTSPMRSVLLTLVALAGVAGLLVALAVALCVRQHARQQDKERLAALGPEGAHGDTTFEYQDLCRQHMATKSLFNRAEGPPEPSRVSSVSSQFSDAAQASPSSHSSTPSWCEEPAQANMDISTGHMILAYMEDHLRNRDRLAKEWQALCAYQAEPNTCATAQGEGNIKKNRHPDFLPYDHARIKLKVESSPSRSDYINASPIIEHDPRMPAYIATQGPLSHTIADFWQMVWESGCTVIVMLTPLVEDGVKQCDRYWPDEGASLYHVYEVNLVSEHIWCEDFLVRSFYLKNVQTQETRTLTQFHFLSWPAEGTPASTRPLLDFRRKVNKCYRGRSCPIIVHCSDGAGRTGTYILIDMVLNRMAKGVKEIDIAATLEHVRDQRPGLVRSKDQFEFALTAVAEEVNAILKALPQ

SEQ ID NO: 12527 - protein, 1194 aa, Homo sapiens
MFSLDSFRKDRAQHRQRQCKLPPPRLPPMCVNPTPGGTISRASRDLLKEFPQPKNLLNSVIGRALGISHAKDKLVYVHTNGPKKKKVTLHIKWPKSVEVEGYGSKKIDAERQAAAAACQLFKGWGLLGPRNELFDAAKYRVLADRFGSPADSWWRPEPTMPPTSWRQLNPESIRPGGPGGLSRSLGREEEEDEEEELEEGTIDVTDFLSMTQQDSHAPLRDSRGSSFEMTDDDSAIRALTQFPLPKNLLAKVIQIATSSSTAKNLMQFHTVGTKTKLSTLTLLWPCPMTFVAKGRRKAEAENKAAALACKKLKSLGLVDRNNEPLTHAMYNLASLRELGETQRRPCTIQVPEPILRKIETFLNHYPVESSWIAPELRLQSDDILPLGKDSGPLSDPITGKPYVPLLEAEEVRLSQSLLELWRRRGPVWQEAPQLPVDPHRDTILNAIEQHPVVVISGDTGCGKTTRIPQLLLERYVTEGRGARCNVIITQPRRISAVSVAQRVSHELGPSLRRNVGFQVRLESKPPSRGGALLFCTVGILLRKLQSNPSLEGVSHVIVDEVHERDVNTDFLLILLKGLQRLNPALRLVLMSATGDNERFSRYFGGCPVIKVPGFMYPVKEHYLEDILAKLGKHQYLHRHRHHESEDECALDLDLVTDLVLHIDARGEPGGILCFLPGWQEIKGVQQRLQEALGMHESKYLILPVHSNIPMMDQKAIFQQPPVGVRKIVLATNIAETSITINDIVHVVDSGLHKEERYDLKTKVSCLETVWVSRANVIQRRGRAGRCQSGFAYHLFPRSRLEKMVPFQVPEILRTPLENLVLQAKIHMPEKTAVEFLSKAVDSPNIKAVDEAVILLQEIGVLDQREYLTTLGQRLAHISTDPRLAKAIVLAAIFRCLHPLLVVVSCLTRDPFSSSLQNRAEVDKVKALLSHDSGSDHLAFVRAVAGWEEVLRWQDRSSRENYLEENLLYAPSLRFIHGLIKQFSENIYEAFLVGKPSDCTLASAQCNEYSEEEELVKGVLMAGLYPNLIQVRQGKVTRQGKFKPNSVTYRTKSGNILLHKSTINREATRLRSRWLTYFMAVKSNGSVFVRDSSQVHPLAVLLLTDGDVHIRDDGRRATISLSDSDLLRLEGDSRTVRLLKELRRALGRMVERSLRSELAALPPSVQEEHGQLLALLAELLRGPCGSFDVRKTADD

SEQ ID NO: 12528 - protein, 531 aa, Homo sapiens
MSGRGAGGFPLPPLSPGGGAVAAALGAPPPPAGPGMLPGPALRGPGPAGGVGGPGAAAFRPMGPAGPAAQYQRPGMSPGNRMPMAGLQVGPPAGSPFGAAAPLRPGMPPTMMDPFRKRLLVPQAQPPMPAQRRGLKRRKMADKVLPQRIRELVPESQAYMDLLAFERKLDQTIARKRMEIQEAIKKPLTQKRKLRIYISNTFSPSKAEGDSAGTAGTPGGTPAGDKVASWELRVEGKLLDDPSKQKRKFSSFFKSLVIELDKELYGPDNHLVEWHRMPTTQETDGFQVKRPGDLNVKCTLLLMLDHQPPQYKLDPRLARLLGVHTQTRAAIMQALWLYIKHNQLQDGHEREYINCNRYFRQIFSCGRLRFSEIPMKLAGLLQHPDPIVINHVISVDPNDQKKTACYDIDVEVDDPLKAQMSNFLASTTNQQEIASLDVKIHETIESINQLKTQRDFMLSFSTDPQDFIQEWLRSQRRDLKIITDVIGNPEEERRAAFYHQPWAQEAVGRHIFAKVQQRRQELEQVLGIRLT

SEQ ID NO: 12529 - protein, 477 aa, Homo sapiens
MALQLWALTLLGLLGAGASLRPRKLDFFRSEKELNHLAVDEASGVVYLGAVNALYQLDAKLQLEQQVATGPALDNKKCTPPIEASQCHEAEMTDNVNQLLLLDPPRKRLVECGSLFKGICALRALSNISLRLFYEDGSGEKSFVASNDEGVATVGLVSSTGPGGDRVLFVGKGNGPHDNGIIVSTRLLDRTDSREAFEAYTDHATYKAGYLSTNTQQFVAAFEDGPYVFFVFNQQDKHPARNRTLLARMCREDPNYYSYLEMDLQCRDPDIHAAAFGTCLAASVAAPGSGRVLYAVFSRDSRSSGGPGAGLCLFPLDKVHAKMEANRNACYTGTREARDIFYKPFHGDIQCGGHAPGSSKSFPCGSEHLPYPLGSRDGLRGTAVLQRGGLNLTAVTVAAENNHTVAFLGTSDGRILKVYLTPDGTSSEYDSILVEINKRVKRDLVLSGDLGSLYAMTQDKVFRLPVQECLSYPTCTQ

SEQ ID NO: 12530 - protein, 195 aa, Homo sapiens
MATHHTLWMGLALLGVLGDLQAAPEAQVSVQPNFQQDKFLGRWFSAGLASNSSWLREKKAALSMCKSVVAPATDGGLNLTSTFLRKNQCETRTMLLQPAGSLGSYSYRSPREWGLHRPPGPSLGATLAGTTLGQPPAAEIHGVGDWGSTYSVSVVETDYDQYALLYSQGSKGPGEDFRMATLYSRTQTPRAELKE

SEQ ID NO: 12531 - protein, 93 aa, Homo sapiens
MWPLALVIASLTLALSGGEDFKEPSQGPRDVMAASRPEAFPKGLTLEPRPEKGGICGCLAPGTILGLKVGWLFSSGDTPWIHARATPECHTLG

SEQ ID NO: 12532 - protein, 54 aa, Homo sapiens
MWSWKCLLFWAVLVTATLCTARPSPTLPEQDALPSSEDDDDDDDSSSEEKETDN

SEQ ID NO: 12533 - protein, 374 aa, Homo sapiens
MLLGSPAGSSSILSDGVYERHMDPLLLPGELASPSQALGAGEIPAPSETPWLSPDPLFLEQRRVREAKTEEDGPANTEQKLKSFPEDPQHLGEWGHLDPAEENLKSYRKLLLWGYQLSQPDAASRLDTEELRLVERDPQGSSLPGGRRQESAGCACEEAAPAGVLPELPTEAPPGDALADPPSGTTEEEEEQPGKAPDPQDPQDAESDSATGSQRQSVIQQPAPDRGTAKLGTKRPHPEDGDGQSLEGVSSSGDSAGLEAGQGPGADEPGLSRGKPYACGECGEAFAWLSHLMEHHSSHGGRKRYACQGCWKTFHFSLALAEHQKTHEKEKSYALGGARGPQPSTREAQAGARAGGPPESVEGEAPPAPPEAQR

SEQ ID NO: 12534 - protein, 79 aa, Homo sapiens
MPSPRPVLLRGARAALLLLLPPRLLARPSLLLRRSLSAASCPPISLPAAASRSSMDGAGAEEVLAPLRLAVRQQAVWNQ

SEQ ID NO: 12535 - protein, 192 aa, Homo sapiens
MACGATLKRPMEFEAALLSPGSPKRRRCAPLPGPTPGLRPPDAEPPPPFQTQTPPQSLQQPAPPGSERRLPTPEQIFQNIKQEYSRYQRWRHLEVVLNQSEACASESQPHSSALTAPSSPGSSWMKKDQPTFTLRQVGIICERLLKDYEDKIREEYEQILNTKLAEQYESFVKFTHDQIMRRYGTRPTSYVS

SEQ ID NO: 12536 - protein, 51 aa, Homo sapiens
MLPQIPFLLLVSLNLVHGVFYAERYQMPTGIKGPLPNTKTQFFIPYTIKSK

SEQ ID NO: 12537 - protein, 145 aa, Homo sapiens
MAQLFLPLLAALVLAQAPAALADVLEGDSSEDRAFRVRIAGDAPLQGVLGGALTIPCHVHYLRPPPSRRAVLGSPRVKWTFLSRGREAEVLVARGVRVKVNEAYRFRVALPAYPASLTDVSLALSELRPNDSGIYRCEVQHGIDD

SEQ ID NO: 12538 - protein, 552 aa, Homo sapiens
MSPLWWGFLLSCLGCKILPGAQGQFPRVCMTVDSLVNKECCPRLGAESANVCGSQQGRGQCTEVRADTRPWSGPYILRNQDDRELWPRKFFHRTCKCTGNFAGYNCGDCKFGWTGPNCERKKPPVIRQNIHSLSPQEREQFLGALDLAKKRVHPDYVITTQHWLGLLGPNGTQPQFANCSVYDFFVWLHYYSVRDTLLGPGRPYRAIDFSHQGPAFVTWHRYHLLCLERDLQRLIGNESFALPYWNFATGRNECDVCTDQLFGAARPDDPTLISRNSRFSSWETVCDSLDDYNHLVTLCNGTYEGLLRRNQMGRNSMKLPTLKDIRDCLSLQKFDNPPFFQNSTFSFRNALEGFDKADGTLDSQVMSLHNLVHSFLNGTNALPHSAANDPIFVVISNRLLYNATTNILEHVRKEKATKELPSLHVLVLHSFTDAIFDEWMKRFNPPADAWPQELAPIGHNRMYNMVPFFPPVTNEELFLTSDQLGYSYAIDLPVSVEETPGWPTTLLVVMGTLVALVGLFVLLAFLQYRRLRKGYTPLMETHLSSKRYTEEA

SEQ ID NO: 12539 - protein, 492 aa, Homo sapiens
MKAMPWNWTCLLSHLLMVGMGSSTLLTRQPAPLSQKQRSFVTFRGEPAEGFNHLVVDERTGHIYLGAVNRIYKLSSDLKVLVTHETGPDEDNPKCYPPRIVQTCNEPLTTTNNVNKMLLIDYKENRLIACGSLYQGICKLLRLEDLFKLGEPYHKKEHYLSGVNESGSVFGVIVSYSNLDDKLFIATAVDGKPEYFPTISSRKLTKNSEADGMFAYVFHDEFVASMIKIPSDTFTIIPDFDIYYVYGFSSGNFVYFLTLQPEMVSPPGSTTKEQVYTSKLVRLCKEDTAFNSYVEVPIGCERSGVEYRLLQAAYLSKAGAVLGRTLGVHPDDDLLFTVFSKGQKRKMKSLDESALCIFILKQINDRIKERLQSCYRGEGTLDLAWLKVKDIPCSSALLTIDDNFCGLDMNAPLGVSDMVRGIPVFTEDRDRMTSVIAYVYKNHSLAFVGTKSGKLKKMPGTSLCPTLELQTGPRSHRATVTLELLFSSCSSN

SEQ ID NO: 12540 - protein, 350 aa, Homo sapiens
MPSLPAPPAPLLLLGLLLLGSRPARGAGPEPPVLPIRSEKEPLPVRGAAGCTFGGKVYALDETWHPDLGEPFGVMRCVLCACEAPQWGRRTRGPGRVSCKNIKPECPTPACGQPRQLPGHCCQTCPQERSSSERQPSGLSFEYPRDPEHRSYSDRGEPGAEERARGDGHTDFVALLTGPRSQAVARARVSLLRSSLRFSISYRRLDRPTRIRFSDSNGSVLFEHPAAPTQDGLVCGVWRAVPRLSLRLLRAEQLHVALVTLTHPSGEVWGPLIRHRALAAETFSAILTLEGPPQQGVGGITLLTLSDTEDSLHFLLLFRGLLEPRSGDSTPGAATARTSGQCLSPGTRLC

SEQ ID NO: 12541 - protein, 137 aa, Homo sapiens
MPDSNFAERSEEQVSGAKVIAQALKTQDVEYIFGIVGIPVTEIAIAAQQLGIKYIGMRNEQAACYAASAIGYLTSRPGVCLVVSGPGLIHALGGMANANMNCWPLLVIGGSSERNQETMGAFQEFPQVHGTLHVTSY

SEQ ID NO: 12542 - protein, 595 aa, Homo sapiens
MANQVNGNAVQLKEEEEPMDTSSVTHTEHYKTLIEAGLPQKVAERLDEIFQTGLVAYVDLDERAIDALREFNEEGALSVLQQFKESDLSHVQNKSAFLCGVMKTYRQREKQGSKVQESTKGPDEAKIKVFVGKIPRDLYEDELVPLFEKAGPIWDLRLMMDPLSGQNRGYAFITFCGKEAAQEAVKLCDSYEIRPGKHLGVCISVANNRLFVGSIPKNKTKENILEEFSKVTEGLVDVILYHQPDDKKKNRGFCFLEYEDHKSAAQARRRLMSGKVKVWGNVVTVEWADPVEEPDPEVMAKVKVLFVRNLATTVTEEILEKSFSEFGKLERVKKLKDYAFVHFEDRGAAVKAMDEMNGKEIEGEEIEIVLAKPPDKKRKERQAARQASRSTAYEDYYYHPPPRMPPPIRGRGRGGGRGGYGYPPDYYGYEDYYDDYYGYDYHDYRGGYEDPYYGYDDGYAVRGRGGGRGGRGAPPPPRGRGAPPPRGRAGYSQRGAPLGPPRGSRGGRGGPAQQQRGRGSRGSRGNRGGNVGGKRKADGYNQPDSKRRQTNNQQNWGSQPIAQQPLQQGGDYSGNYGYNNDNQEFYQDTYGQQWK

SEQ ID NO: 12543 - protein, 580 aa, Homo sapiens
MILQAHLHSLCLLMLYLATGYGQEGKFSGPLKPMTFSIYEGQEPSQIIFQFKANPPAVTFELTGETDNIFVIEREGLLYYNRALDRETRSTHNLQVAALDANGIIVEGPVPITIKVKDINDNRPTFLQSKYEGSVRQNSRPGNSIGTLTAHDRDEENTANSFLNYRIVEQTPKLPMDGLFLIQTYAGMLQLAKQSLKKQDTPQYNLTIEVSDKDFKTLCFVQINVIDINDQIPIFEKSDYGNLTLAEDTNIGSTILTIQATDADEPFTGSSKILYHIIKGDSEGRLGVDTDPHTNTGYVIIKKPLDFETAAVSNIVFKAENPEPLVFGVKYNASSFAKFTLIVTDVNEAPQFSQHVFQAKVSEDVAIGTKVGNVTAKDPEGLDISYSLRGDTRGWLKIDHVTGEIFSVAPLDREAGSPYRVQVVATEVGGSSLSSVSEFHLILMDVNDNPPRLAKDYTGLFFCHPLSAPGSLIFEATDDDQHLFRGPHFTFSLGSGSLQNDWEVSKINGTHARLSTRHTEFEEREYVVLIRINDGGRPPLEGIVSLPGIILAVVFIRIKKDKGKDNVESAQASEVKPLRS

SEQ ID NO: 12544 - protein, 1272 aa, Homo sapiens
MANDSPAKSLVDIDLSSLRDPAGIFELVEVVGNGTYGQVYKGRHVKTGQLAAIKVMDVTEDEEEEIKLEINMLKKYSHHRNIATYYGAFIKKSPPGHDDQLWLVMEFCGAGSITDLVKNTKGNTLKEDWIAYISREILRGLAHLHIHHVIHRDIKGQNVLLTENAEVKLVDFGVSAQLDRTVGRRNTFIGTPYWMAPEVIACDENPDATYDYRSDLWSCGITAIEMAEGAPPLCDMHPMRALFLIPRNPPPRLKSKKWSKKFFSFIEGCLVKNYMQRPSTEQLLKHPFIRDQPNERQVRIQLKDHIDRTRKKRGEKDETEYEYSGSEEEEEEVPEQEGEPSSIVNVPGESTLRRDFLRLQQENKERSEALRRQQLLQEQQLREQEEYKRQLLAERQKRIEQQKEQRRRLEEQQRREREARRQQEREQRRREQEEKRRLEELERRRKEEEERRRAEEEKRRVEREQEYIRRQLEEEQRHLEVLQQQLLQEQAMLLHDHRRPHPQHSQQPPPPQQERSKPSFHAPEPKAHYEPADRAREVEDRFRKTNHSSPEAQSKQTGRVLEPPVPSRSESFSNGNSESVHPALQRPAEPQVPVRTTSRSPVLSRRDSPLQGSGQQNSQAGQRNSTSIEPRLLWERVEKLVPRPGSGSSSGSSNSGSQPGSHPGSQSGSGERFRVRSSSKSEGSPSQRLENAVKKPEDKKEVFRPLKPADLTALAKELRAVEDVRPPHKVTDYSSSSEESGTTDEEDDDVEQEGADESTSGPEDTRAASSLNLSNGETESVKTMIVHDDVESEPAMTPSKEGTLIVRQSTVDQKRASHHESNGFAGRIHLLPDLLQQSHSSSTSSTSSSPSSSQPTPTMSPQTPQDKLTANETQSASSTLQKHKSSSSFTPFIDPRLLQISPSSGTTVTSVVGFSCDGMRPEAIRQDPTRKGSVVNVNPTNTRPQSDTPEIRKYKKRFNSEILCAALWGVNLLVGTESGLMLLDRSGQGKVYPLINRRRFQQMDVLEGLNVLVTISGKKDKLRVYYLSWLRNKILHNDPEVEKKQGWTTVGDLEGCVHYKVVKYERIKFLVIALKSSVEVYAWAPKPYHKFMAFKSFGELVHKPLLVDLTVEEGQRLKVIYGSCAGFHAVDVDSGSVYDIYLPTHIQCSIKPHAIIILPNTDGMELLVCYEDEGVYVNTYGRITKDVVLQWGEMPTSVAYIRSNQTMGWGEKAIEIRSVETGHLDGVFMHKRAQRLKFLCERNDKVFFASVRSGGSSQVYFMTLGRTSLLSW

SEQ ID NO: 12545 - protein, 142 aa, Homo sapiens
MEGAALLRVSVLCIWMSALFLGVGVRAEEAGARVQQNVPSGTDTGDPQSKPLGDWAAGTMDPGPAGSRGDSGEPCTLRPACRGQRQHGGASRISAEGPAPMPRRRTPSTAHLRVPKTSRRNLLCMVVVLNAVEFETLFLNFK

SEQ ID NO: 12546 - protein, 366 aa, Homo sapiens
MTSCLPALRFIATPRLSAMPHIDNDVKLDFKDVLLRPKRSTLKSRSEVDLTRSFSFRNSKQTYSGVPIIAANMDTVGTFEMAKVLCKFSLFTAVHKHYSLVQWQEFAGQNPDCLEHLAASSGTGSSDFEQLEQILEAIPQVKYICLDVANGYSEHFVEFVKDVRKRFPQHTIMAGNVVTGEMVEELILSGADIIKVGIGPGSVCTTRKKTGVGYPQLSAVMECADAAHGLKGHIISDGGCSCPGDVAKAFGAGADFVMLGGMLAGHSESGGELIERDGKKYKLFYGMSSEMAMKKYAGGVAEYRASEGKTVEVPFKGDVEHTIRDILGGIRSTCTYVGAAKLKELSRRTTFIRVTQQVNPIFSEAC

SEQ ID NO: 12547 - protein, 236 aa, Homo sapiens
MALPALGLDPWSLLGLFLFQLLQLLLPTTTAGGGGQGPMPRVRYYAGDERRALSFFHQKGLQDFDTLLLSGDGNTLYVGAREAILALDIQDPGVPRLKNMIPWPASDRKKSECAFKKKSNEELQDSYLLPISEDKVMEGKGQSPFDPAHKHTAVLVDGMLYSGTMNNFLGSEPILMRTLGSQPVLKTDNFLRWLHHDASFVAAIPSTQVVYFFFEETASEFDFFERLHTSRVARVC

SEQ ID NO: 12548 - protein, 76 aa, Homo sapiens
MAETDPKTVQDLTSVVQTLLQQMQDKFQTMSDQIIGRIDDMSSRIDDLEKNIADLMTQAGVEELESENKIPATQKS

SEQ ID NO: 12549 - protein, 302 aa, Homo sapiens
MVARGLVREAREDLEVHQAKLKEVRDRLDRVSREDSQYLELATLEHRMLQEEKRLRTAYLRAEDSEREKFSLFSAAVRESHEKERTRAERTKNWSLIGSVLGALIGVAGSTYVNRVRLQELKALLLEAQKGPVSLQEAIREQASSYSRQQRDLHNLMVDLRGLVHAAGPGQDSGSQAGSPPTRDRDVDVLSAALKEQLSHSRQVHSCLEGLREQLDGLEKTCSQMAGVVQLVKSAAHPGLVEPADGAMPSFLLEQGSMILALSDTEQRLEAQVNRNTIYSTLVTCVTFVATLPVLYMLFKAS

SEQ ID NO: 12550 - protein, 150 aa, Homo sapiens
MAGILFEDIFDVKDIDPEGKKFDRVSRLHCESESFKMDLILDVNIQIYPVDLGDKFRLVIASTLYEDGTLDDGEYNPTDDRPSRADQFEYVMYGKVYRIEGDETSTEAATRLSAYVSYGGLLMRLQGDANNLHGFEVDSRVYLLMKKLAF

SEQ ID NO: 12551 - protein, 363 aa, Homo sapiens
MSKRPSYAPPPTPAPATQMPSTPGFVGYNPYSHLAYNNYRLGGNPGTNSRVTASSGITIPKPPKPPDKPLMPYMRYSRKVWDQVKASNPDLKLWEIGKIIGGMWRDLTDEEKQEYLNEYEAEKIEYNESMKAYHNSPAYLAYINAKSRAEAALEEESRQRQSRMEKGEPYMSIQPAEDPDDYDDGFSMKHTATARFQRNHRLISEILSESVVPDVRSVVTTARMQVLKRQVQSLMVHQRKLEAELLQIEERHQEKKRKFLESTDSFNNELKRLCGLKVEVDMEKIAAEIAQAEEQARKRQEEREKEAAEQAERSQSSIVPEEEQAANKGEEKKDDENIPMETEKNCQLCPRKTLTSRYTDFPD

SEQ ID NO: 12552 - protein, 312 aa, Homo sapiens
MCGRTSCHLPRDVLTRACAYQDRRGQQRLPEWRDPDKYCPSYNKSPQSNSPVLLSRLHFEKDADSSERIIAPMRWGLVPSWFKESDPSKLQFNTTNCRSDTVMEKRSFKSGSIGAADSPENWEKVWDNWRLLTMAGIFDCWEPPEGGDVLYSYTIITVDSCKGLSDIHHRMPAILDGEEAVSKWLDFGEVSTQEALKLIHPTENITFHAVSSVVNNSRNNTPECLAPVDLVVKKELRASGSSQRMLQWLATKSPKKEDSKTPQKEESDVPQWSSQFLQKSPLPTKRGTAGLLEQWLKREKEEEPVAKRPYSQ

SEQ ID NO: 12553 - protein, 570 aa, Homo sapiens
MAARRRRSTGGGRARALNESKRVNNGNTAPEDSSPAKKTRRCQRQESKKMPVAGGKANKDRTEDKQDESVKALLLKGKAPVDPECTAKVGKAHVYCEGNDVYDVMLNQTNLQFNNNKYYLIQLLEDDAQRNFSVWMRWGRVGKMGQHSLVACSGNLNKAKEIFQKKFLDKTKNNWEDREKFEKVPGKYDMLQMDYATNTQDEEETKKEESLKSPLKPESQLDLRVQELIKLICNVQAMEEMMMEMKYNTKKAPLGKLTVAQIKAGYQSLKKIEDCIRAGQHGRALMEACNEFYTRIPHDFGLRTPPLIRTQKELSEKIQLLEALGDIEIAIKLVKTELQSPEHPLDQHYRNLHCALRPLDHESYEFKVISQYLQSTHAPTHSDYTMTLLDLFEVEKDGEKEAFREDLHNRMLLWHGSRMSNWVGILSHGLRIAPPEAPITGYMFGKGIYFADMSSKSANYCFASRLKNTGLLLLSEVALGQCNELLEANPKAEGLLQGKHSTKGLGKMAPSSAHFVTLNGSTVPLGPASDTGILNPDGYTLNYNEYIVYNPNQVRMRYLLKVQFNFLQLW

SEQ ID NO: 12554 - protein, 276 aa, Homo sapiens
MAGPAALSAAAAAALAAALLLLRREDPGPGAGPSMAETEALSKLREDFRMQNKSVFILGASGETGRVLLKEILEQGLFSKVTLIGRRKLTFDEEAYKNVNQEVVDFEKLDDYASAFQGHDVGFCCLGTTRGKAGAEGFVRVDRDYVLKSAELAKAGGCKHFNLLSSKGADKSSNFLYLQVKGEVEAKVEELKFDRYSVFRPGVLLCDRQESRPGEWLVRKFFGSLPDSWASGHSVPVVTVVRAMLNNVVRPRDKQMELLENKAIHDLGKAHGSLKP

SEQ ID NO: 12555 - protein, 103 aa, Homo sapiens
MHYPTALLFLILANGAQAFRICAFNAQRLTLAKVAREQVMDTLVRILARCDIMVLQEVVDSSGSAIPLLLRELNRFDGSGPYSTLSSPQLGRSTYMETYVYFY

SEQ ID NO: 12556 - protein, 271 aa, Homo sapiens
MASGILVNVKEEVTCPICLELLTQPLSLDCGHSFCQACLTANHKKSMLDKGESSCPVCRISYQPENIRPNRHVANIVEKLREVKLSPEGQKVDHCARHGEKLLLFCQEDGKVICWLCERSQEHRGHHTFLTEEVAREYQVKLQAALEMLRQKQQEAEELEADIREEKASWKTQIQYDKTNVLADFEQLRDILDWEESNELQNLEKEEEDILKSLTNSETEMVQQTQSLRELISDLEHRLQGSVMELLQDGERDLEEARNFSKKSKESVSSS

SEQ ID NO: 12557 - protein, 1353 aa, Homo sapiens
MDTKLMCLLFFFSLPPLLVSNHTGRIKVVFTPSICKVTCTKGSCQNSCEKGNTTTLISENGHAADTLTATNFRVVICHLPCMNGGQCSSRDKCQCPPNFTGKLCQIPVHGASVPKLYQHSQQPGKALGTHVIHSTHTLPLTVTSQQGVKVKFPPNIVNIHVKHPPEASVQIHQVSRIDGPTGQKTKEAQPGQSQVSYQGLPVQKTQTIHSTYSHQQVIPHVYPVAAKTQLGRCFQETIGSQCGKALPGLSKQEDCCGTVGTSWGFNKCQKCPKKPSYHGYNQMMECLPGYKRVNNTFCQDINECQLQGVCPNGECLNTMGSYRCTCKIGFGPDPTFSSCVPDPPVISEEKGPCYRLVSSGRQCMHPLSVHLTKQLCCCSVGKAWGPHCEKCPLPGTAAFKEICPGGMGYTVSGVHRRRPIHHHVGKGPVFVKPKNTQPVAKSTHPPPLPAKEEPVEALTFSREHGPGVAEPEVATAPPEKEIPSLDQEKTKLEPGQPQLSPGISTIHLHPQFPVVIEKTSPPVPVEVAPEASTSSASQVIAPTQVTEINECTVNPDICGAGHCINLPVRYTCICYEGYRFSEQQRKCVDIDECTQVQHLCSQGRCENTEGSFLCICPAGFMASEEGTNCIDVDECLRPDVCGEGHCVNTVGAFRCEYCDSGYRMTQRGRCEDIDECLNPSTCPDEQCVNSPGSYQCVPCTEGFRGWNGQCLDVDECLEPNVCANGDCSNLEGSYMCSCHKGYTRTPDHKHCRDIDECQQGNLCVNGQCKNTEGSFRCTCGQGYQLSAAKDQCEDIDECQHRHLCAHGQCRNTEGSFQCVCDQGYRASGLGDHCEDINECLEDKSVCQRGDCINTAGSYDCTCPDGFQLDDNKTCQDINECEHPGLCGPQGECLNTEGSFHCVCQQGFSISADGRTCEDVNECELLSGVCGEAFCENVEGSFLCVCADENQEYSPMTGQCRSRTSTDLDVDVDQPKEEKKECYYNLNDASLCDNVLAPNVTKQECCCTSGVGWGDNCEIFPCPVLGTAEFTEMCPKGKGFVPAGESSSEAGGENYKDADECLLFGQEICKNGFCLNTRPGYECYCKQGTYYDPVKLQCFDMDECQDPSSCIDGQCVNTEGSYNCFCTHPMVLDASEKRCIRPAESNEQIEETDVYQDLCWEHLSDEYVCSRPLVGKQTTYTECCCLYGEAWGMQCALCPLKDSDDYAQLCNIPVTGRRQPYGRDALVDFSEQYTPEADPYFIQDRFLNSFEELQAEECGILNGCENGRCVRVQEGYTCDCFDGYHLDTAKMTCVDVNECDELNNRMSLCKNAKCINTDGSYKCLCLPGYVPSDKPNYCTPLNTALNLEKDSDLE

SEQ ID NO: 12558 - protein, 210 aa, Homo sapiens
MLPGCIFLMILLIPQVKEKFILGVEGQQLVRPKKLPLIQKRDTGHTHDDDILKTYEEELLYEIKLNRKTLVLHLLRSREFLGSNYSETFYSMKGEAFTRHPQIMDHCFYQGSIVHEYDSAASISTCNGLRGFFRINDQRYLIEPVKYSDEGEHLVFKYNLRVPYGANYSCTELNFTRKTVPGDNESEEDSKIKVSTLLLSLPQMKHLLFS

SEQ ID NO: 12559 - protein, 149 aa, Homo sapiens
MVMLLLLLSALAGLFGAAEGQAFHLGKCPNPPVQENFDVNKYLGRWYEIEKIPTTFENGRCIQANYSLMENGKIKVLNQELRADGTVNQIEGEATPVNLTEPAKLEVKFSWFMPSAPYWILATDYENYALVYSCTCIIQLFHVDFAWIL

SEQ ID NO: 12560 - protein, 621 aa, Homo sapiens
MEFPGGNDNYLTITGPSHPFLSGAETFHTPSLGDEEFEIPPISLDSDPSLAVSDVVGHFDDLADPSSSQDGSFSAQYGVQTLDMPVGMTHGLMEQGGGLLSGGLTMDLDHSIGTQYSANPPVTIDVPMTDMTSGLMGHSQLTTIDQSELSSQLGLSLGGGTILPPAQSPEDRLSTTPSPTSSLHEDGVEDFRRQLPSQKTVVVEAGKKQKAPKKRKKKDPNEPQKPVSAYALFFRDTQAAIKGQNPNATFGEVSKIVASMWDSLGEEQKQVYKRKTEAAKKEYLKALAAYKDNQECQATVETVELDPAPPSQTPSPPPMATVDPASPAPASIEPPALSPSIVVNSTLSSYVANQASSGAGGQPNITKLIITKQMLPSSITMSQGGMVTVIPATVVTSRGLQLGQTSTATIQPSQQAQIVTRSVLQAAAAAAAAASMQLPPPRLQPPPLQQMPQPPTQQQVTILQQPPPLQAMQQPPPQKVRINLQQQPPPLQIKSVPLPTLKMQTTLVPPTVESSPERPMNNSPEAHTVEAPSPETICEMITDVVPEVESPSQMDVELVSGSPVALSPQPRCVRSGCENPPIVSKDWDNEYCSNECVVKHCRDVFLAWVASRNSNTVVFVK

SEQ ID NO: 12561 - protein, 213 aa, Homo sapiens
MRLAGPLRIVVLVVSVGVTWIVVSILLGGPGSGFPRIQQLFTSPESSVTAAPRARKYKCGLPQPCPEEHLAFRVVSGAANVIGPKICLEDKMLMSSVKDNVGRGLNIALVNDVNDLLKFIRPLHEGTLVFVASYDDPATKMNEETRKLFSELGSRNAKELAFRDSWVFVGAKGVQNKSPFEQHVKNSKHSNKYEGWPEALEMEGCIPRRSTAS

SEQ ID NO: 12562 - protein, 806 aa, Homo sapiens
MSSSPVNVKKLKVSELKEELKKRRLSDKGLKAELMERLQAALDDEEAGGRPAMEPGNGSLDLGGDSAGRSGAGLEQEAAAGGDEEEEEEEEEEEGISALDGDQMELGEENGAAGAADSGPMEEEEAASEDENGDDQGFQEGEDELGDEEEGAGDENGHGEQQPQPPATQQQQPQQQRGAAKEAAGKSSGPTSLFAVTVAPPGARQGQQQAGGDGKTEQKGGDKKRGVKRPREDHGRGYFEYIEENKYSRAKSPQPPVEEEDEHFDDTVVCLDTYNCDLHFKISRDRLSASSLTMESFAFLWAGGRASYGVSKGKVCFEMKVTEKIPVRHLYTKDIDIHEVRIGWSLTTSGMLLGEEEFSYGYSLKGIKTCNCETEDYGEKFDENDVITCFANFESDEVELSYAKNGQDLGVAFKISKEVLAGRPLFPHVLCHNCAVEFNFGQKEKPYFPIPEEYTFIQNVPLEDRVRGPKGPEEKKDCEVVMMIGLPGAGKTTWVTKHAAENPGKYNILGTNTIMDKMMVAGFKKQMADTGKLNTLLQRAPQCLGKFIEIAARKKRNFILDQTNVSAAAQRRKMCLFAGFQRKAVVVCPKDEDYKQRTQKKAEVEGKDLPEHAVLKMKGNFTLPEVAECFDEITYVELQKEEAQKLLEQYKEESKKALPPEKKQNTGSKKSNKNKSGKNQFNRGGGHRGRGGFNMRGGNFRGGAPGNRGGYNRRGNMPQRGGGGGGSGGIGYPYPRAPVFPGRGSYSNRGNYNRGGMPNRGNYNQNFRGRGNNRGYKNQSQGYNQWQQGQFWGQKPWSQHYHQGYY

SEQ ID NO: 12563 - protein, 1507 aa, Homo sapiens
MTTVVVHVDSKAELTTLLEQWEKEHGSGQDMVPILTRMSQLIEKETEEYRKGDPDPFDDRHPGRADPECMLGHLLRILFKNDDFMNALVNAYVMTSREPPLNTAACRLLLDIMPGLETAVVFQEKEGIVENLFKWAREADQPLRTYSTGLLGGAMENQDIAANYRDENSQLVAIVLRRLRELQLQEVALRQENKRPSPRKLSSEPLLPLDEEAVDMDYGDMAVDVVDGDQEEASGDMEISFHLDSGHKTSSRVNSTTKPEDGGLKKNKSAKQGDRENFRKAKQKLGFSSSDPDRMFVELSNSSWSEMSPWVIGTNYTLYPMTPAIEQRLILQYLTPLGEYQELLPIFMQLGSRELMMFYIDLKQTNDVLLTFEALKHLASLLLHNKFATEFVAHGGVQKLLEIPRPSMAATGVSMCLYYLSYNQDAMERVCMHPHNVLSDVVNYTLWLMECSHASGCCHATMFFSICFSFRAVLELFDRYDGLRRLVNLISTLEILNLEDQGALLSDDEIFASRQTGKHTCMALRKYFEAHLAIKLEQVKQSLQRTEGGILVHPQPPYKACSYTHEQIVEMMEFLIEYGPAQLYWEPAEVFLKLSCVQLLLQLISIACNWKTYYARNDTVRFALDVLAILTVVPKIQLQLAESVDVLDEAGSTVSTVGISIILGVAEGEFFIHDAEIQKSALQIIINCVCGPDNRISSIGKFISGTPRRKLPQNPKSSEHTLAKMWNVVQSNNGIKVLLSLLSIKMPITDADQIRALACKALVGLSRSSTVRQIISKLPLFSSCQIQQLMKEPVLQDKRSDHVKFCKYAAELIERVSGKPLLIGTDVSLARLQKADVVAQSRISFPEKELLLLIRNHLISKGLGETATVLTKEADLPMTAASHSSAFTPVTAAASPVSLPRTPRIANGIATRLGSHAAVGASAPSAPTAHPQPRPPQGPLALPGPSYAGNSPLIGRISFIRERPSPCNGRKIRVLRQKSDHGAYSQSPAIKKQLDRHLPSPPTLDSIITEYLREQHARCKNPVATCPPFSLFTPHQCPEPKQRRQAPINFTSRLNRRASFPKYGGVDGGCFDRHLIFSRFRPISVFREANEDESGFTCCAFSARERFLMLGTCTGQLKLYNVFSGQEEASYNCHNSAITHLEPSRDGSLLLTSATWSQPLSALWGMKSVFDMKHSFTEDHYVEFSKHSQDRVIGTKGDIAHIYDIQTGNKLLTLFNPDLANNYKRNCATFNPTDDLVLNDGVLWDVRSAQAIHKFDKFNMNISGVFHPNGLEVIINTEIWDLRTFHLLHTVPALDQCRVVFNHTGTVMYGAMLQADDEDDLMEERMKSPFGSSFRTFNATDYKPIATIDVKRNIFDLCTDTKDCYLAVIENQGSMDALNMDTVCRLYEVGRQRLAEDEDEEEDQEEEEQEEEDDDEDDDDTDDLDELDTDQLLEAELEEDDNNENAGEDGDNDFSPSDEELANLLEEGEDGEDEDSDADEEVELILGDTDSSDNSDLEDDIILSLNE

SEQ ID NO: 12564 - protein, 1026 aa, Homo sapiens
MASSWKLMLFLSVTMCLSESVDYGPVFVQEPDDIIFPTDSDEKKVALNCEVRGNPVPSYRWLRNGTEIDLESDYRYSLIDGTFIISNPSEAKDSGHYQCLATNTVGSILSREATLQFAYLGNFSGRTRSAVSVREGQGVVLMCSPPPHSPEIIYSWVFNEFPSFVAEDSRRFISQETGNLYISKVQTSDVGSYICLVKNTVTNARVLSPPTPLTLRNDGVMGEYEPKIEVHFPFTVTAAKGTTVKMECFALGNPVPTITWMKVNGYIPSKARLRKSQAVLEIPNVQLDDAGIYECRAENSRGKNSFRGQLQVYTYPHWVEKLNDTQLDSGSPLRWECKATGKPRPTYRWLKNGVPLSPQSRVEMVNGVLMIHNVNQSDAGMYQCLAENKYGAIYASAELKILASAPTFALNQLKKTIIVTKDQEVVIECKPQGSPKPTISWKKGDRAVRENKRIAILPDGSLRILNASKSDEGKYVCRGENVFGSAEIIASLSVKEPTRIELTPKRTELTVGESIVLNCKAIHDASLDVTFYWTLKGQPIDFEEEGGHFESIRAQASSADLMIRNILLMHAGRYGCRVQTTADSVSDEAELLVRGPPGPPGIVIVEEITESTATLSWSPAADNHSPISSYNLQARSPFSLGWQTVKTVPEIITGDMESAMAVDLNPWVEYEFRVVATNPIGTGDPSTPSRMIRTNEAVPKTAPTNVSGRSGRRHELVIAWEPVSEEFQNGEGFGYIVAFRPNGTRGWKEKMVTSSEASKFIYRDESVPPLTPFEVKVGVYNNKGDGPFSQIVVICSAEGEPSAAPTDVKATSVSVSEILVAWKHIKESLGRPQGFEVGYWKDMEQEDTAETVKTRGNESFVILTGLEGNTLYHFTVRAYNGAGYGPPSSEVSATTKKSPPSQAPSNLRWEQQGSQVSLGWEPVIPLANESEVVGYKVFYRQEGHSNSQVIETQKLQAVVPLPDAGVYIIEVRAYSEGGDGTASSQIRVPSYSGGKITSAQSTLHSLSTSSSSVTLLLALMIPSTSW

SEQ ID NO: 12565 - protein, 620 aa, Homo sapiens
MESSPESLQPLEHGVAAGPASGTGSSQEGLQETRLAAGDGPGVWAAETSGGNGLGAAAARRSLPDSASPAGSPEVPGPCSSSAGLDLKDSGLESPAAAEAPLRGQYKVTASPETAVAGVGHELGTAGDAGARPDLAGTCQAELTAAGSEEPSSAGGLSSSCSDPSPPGESPSLDSLESFSNLHSFPSSCEFNSEEGAENRVPEEEEGAAVLPGAVPLCKEEEGEETAQVLAASKERFPGQSVYHIKWIQWKEENTPIITQNENGPCPLLAILNVLLLAWKVKLPPMMEIITAEQLMEYLGDYMLDAKPKEISEIQRLNYEQNMSDAMAILHKLQTGLDVNVRFTGVRVFEYTPECIVFDLLDIPLYHGWLVDPQIDDIVKAVGNCSYNQLVEKIISCKQSDNSELVSEGFVAEQFLNNTATQLTYHGLCELTSTVQEGELCVFFRNNHFSTMTKYKGQLYLLVTDQGFLTEEKVVWESLHNVDGDGNFCDSEFHLRPPSDPETVYKGQQDQIDQDYLMALSLQQEQQSQEINWEQIPEGISDLELAKKLQEEEDRRASQYYQEQEQAAAAAAAASTQAQGQPAQASPSSGRQSGNSERKRKEPREKDKEKEKEKNSCVIL

SEQ ID NO: 12566 - protein, 152 aa, Homo sapiens [sequence omitted]

SEQ ID NO: 12567 - protein, 114 aa, Homo sapiens
MKVLLRLICFIALLISSLEADKCKEREEKIILVSSANEIDVRPCPLNPNEHKGTITWYKDDSKTPVSTEQASRIHQHKEKLWFVPAKVEDSGHYYCVVRNSSYCLRIKISAKFV

SEQ ID NO: 12568 - protein, 1498 aa, Homo sapiens [sequence omitted]

SEQ ID NO: 12569 - protein, 530 aa, Homo sapiens
MGSILSRRIAGVEDIDIQANSAYRYPPKSGNYFASHFFMGGEKFDTPHPEGYLFGENMDLNFLGSRPVQFPYVTPAPHEPVKTLRSLVNIRKDSLRLVRYKDDADSPTEDGDKPRVLYSLEFTFDADARVAITIYCQASEEFLNGRAVYSPKSPSLQSETVHYKRGVSQQFSLPSFKIDFSEWKDDELNFDLDRGVFPVVIQAVVDEGDVVEVTGHAHVLLAAFEKHMDGSFSVKPLKQKQIVDRVSYLLQEIYGIENKNNQETKPSDDENSDNSNECVVCLSDLRDTLILPCRHLCLCTSCADTLRYQANNCPICRLPFRALLQIRAVRKKPGALSPVSFSPVLAQSLEHDEHSNSDSVPPGYEPISLLEALNGLRAVSPAIPSAPLYEEITYSGISDGLSQASCPLAAIDHILDSSRQKGRPQSKAPDSTLRSPSSPIHEEDEEKLSEDVDAPPPLGGAELALRESSSPESFITEEVDESSSPQQGTRAASIENVLQDSSPEHCGRGPPADIYLPALGPDSCSVGIDE

SEQ ID NO: 12570 - protein, 910 aa, Homo sapiens
MAAPLIPLSQQIPTGNSLYESYYKQVDPAYTGRVGASEAALFLKKSGLSDIILGKIWDLADPEGKGFLDKQGFYVALRLVACAQSGHEVTLSNLNLSMPPPKFHDTSSPLMVTPPSAEAHWAVRVEEKAKFDGIFESLLPINGLLSGDKVKPVLMNSKLPLDVLGRVWDLSDIDKDGHLDRDEFAVAMHLVYRALEKEPVPSALPPSLIPPSKRKKTVFPGAVPVLPASPPPKDSLRSTPSHGSVSSLNSTGSLSPKHSLKQTQPTVNWVVPVADKMRFDEIFLKTDLDLDGYVSGQEVKEIFMHSGLTQNLLAHIWALADTRQTGKLSKDQFALAMYFIQQKVSKGIDPPQVLSPDMVPPSERGTPGPDSSGSLGSGEFTGVKELDDISQEIAQLQREKYSLEQDIREKEEAIRQKTSEVQELQNDLDRETSSLQELEAQKQDAQDRLDEMDQQKAKLRDMLSDVRQKCQDETQMISSLKTQIQSQESDLKSQEDDLNRAKSELNRLQQEETQLEQSIQAGRVQLETIIKSLKSTQDEINQARSKLSQLHESRQEAHRSLEQYDQVLDGAHGASLTDLANLSEGVSLAERGSFGAMDDPFKNKALLFSNNTQELHPDPFQTEDPFKSDPFKGADPFKGDPFQNDPFAEQQTTSTDPFGGDPFKESDPFRGSATDDFFKKQTKNDPFTSDPFTKNPSLPSKLDPFESSDPFSSSSVSSKGSDPFGTLDPFGSGSFNSAEGFADFSQMSKPPPSGPFTSSLGGAGFSDDPFKSKQDTPALPPKKPAPPRPKPPSGKSTPVSQLGSADFPEAPDPFQPLGADSGDPFQSKKGFGDPFSGKDPFVPSSAAKPSKASASGFADFTSFGNEEQQLAWAKRESEKAEQERLARLRRQEQEDLELAIALSKADMPAA

SEQ ID NO: 12571 - protein, 280 aa, Homo sapiens
MAPSGSLAVPLAVLVLLLWGAPWTHGRRSNVRVITDENWRELLEGDWMIEFYAPWCPACQNLQPEWESFAEWGEDLEVNIAKVDVTEQPGLSGRFIITALPTIYHCKDGEFRRYQGPRTKKDFINFISDKEWKSIEPVSSWFGPGSVLMSSMSALFQLSMWIRTCHNYFIEDLGLPVWGSYTVFALATLFSGLLLGLCMIFVADCLCPSKRRRPQPYPYPSKKLLSESAQPLKKVEEEQEADEEDVSEEEAESKEGTNKDFPQNAIRQRSLGPSLATDKS

SEQ ID NO: 12572 - protein, 246 aa, Homo sapiens
MAAKVFESIGKFGLALAVAGGVVNSALYNVDAGHRAVIFDRFRGVQDIVVGEGTHFLIPWVQKPIIFDCRSRPRNVPVITGSKDLQNVNITLRILFRPVASQLPRIFTSIGEDYDERVLPSITTEILKSVVARFDAGELITQRELVSRQVSDDLTERAATFGLILDDVSLTHLTFGKEFTEAVEAKQVAQQEAERARFVVEKAEQQKKAAIISAEGDSKAAELIANSLATAGDGLIELRKLEAAED

SEQ ID NO: 12573 - protein, 224 aa, Homo sapiens
MALPPAAAPPAGAREPPGSRAAAAAAAPEPPLGLQQLSALQPEPGGVPLHSSWTFWLDRSLPGATAAECASNLKKIYTVQTVQIFWSVYNNIPPVTSLPLRCSYHLMRGERRPLWEEESNAKGGVWKMKVPKDSTSTVWKELLLATIGEQFTDCAAADDEVIGVSVSVRDREDVVQVWNVNASLVGEATVLEKIYELLPHITFKAVFYKPHEEHHAFEGGRGKH

SEQ ID NO: 12574 - protein, 39 aa, Homo sapiens
MLKNPYTIKKQPLHQFVQRPLFPLPAAFYHPGSYLGLKE

SEQ ID NO: 12575 - protein, 208 aa, Homo sapiens
MHYPTALLFLILANGAQAFRICAFNAQRLTLAKVAREQVMDTLVRILARCDIMVLQEVVDSSGSAIPLLLRELNRFDGSGPYSTLSSPQLGRSTYMETYVYFYRSHKTQVLSSYVYNDEDDVFAREPFVAQFSLPSNVLPSLVLVPLHTTPKAVEKELNALYDVFLEVSQHWQSKDVILLGDFNADCASLTKKRLDKLELRTEPGFHW

SEQ ID NO: 12576 - protein, 118 aa, Homo sapiens
MTMYLWLKLLAFGFAFLDTEVFVTGQSPTPSPTGLTTAKMPSVPLSSDPLPTHTTAFSPASTFERENDFSETTTSLSPDNTSTQVSPDSLDNASAFNTTGVSSVQTPHLPTHADSQTP

SEQ ID NO: 12577 - protein, 110 aa, Homo sapiens [sequence omitted]

SEQ ID NO: 12578 - protein, 480 aa, Homo sapiens
MFPNSILGRPPFTPNHQQHNNFFTLSPTVYSHQQLIDAQFNFQNADLSRAVSLQQLTYGNVSPIQTSASPLFRGRKRLSDEKNLPLDGKRQRFHSPHQEPTVVNQIVPLSGERRYSMPPLFHTHYVPDIVRCVPPFREIAFLEPREITLPEAKDKLSQQILELFETCQQQISDLKKKELCRTQLQREIQLLFPQSRLFLVGSSLNGFGTRSSDGDLCLVVKEEPVNQKTEARHILTLVHKHFCTRLSGYIERPQLIRAKVPIVKFRDKVSCVEFDLNVNNIVGIRNTFLLRTYAYLENRVRPLVLVIKKWASHHQINDASRGTLSSYSLVLMVLHYLQTLPEPILPSLQKIYPESFSPAIQLHLVHQAPCNVPPYLSKNESNLGDLLLGFLKYYATEFDWNSQMISVREAKAIPRPDGIEWRNKYICVEEPFDGTNTARAVHEKQKFDMIKDQFLKSWHRLKNKRDLNSILPVRAAVLKR

SEQ ID NO: 12579 - protein, 150 aa, Homo sapiens
MARHGLPLLPLLSLLVGAWLKLGNGQATSMVQLQGGRFLMGTNSPDSRDGDGPVREATVKPFAIDIFPVTNKDFRDFVREKKYRTEAEMFGWSFVFEDFVSDELRNKATQPMKVKFTHGGTGSSQTAPTCGRESSPRETKLRMASMESPQ

SEQ ID NO: 12580 - protein, 63 aa, Homo sapiens
AAAWLLLGAATGLTRGPAAAFTAARSDAGIRAMCSEIILRQEVLKDGFHRNSKYMYTRLLDIV

SEQ ID NO: 12581 - protein, 287 aa, Homo sapiens
MESRGPLATSRLLLLLLLLLLRHTRQGWALRPVLPTQSAHDPPAVHLSNGPGQEPIAVMTFDLTKITKTSSSFEVRTWDPEGVIFYGDTNPKDDWFMLGLRDGRPEIQLHNHWAQLTVGAGPRLDDGRWHQVEVKMEGDSVLLEVDGEEVLRLRQVSGPLTSKRHPIMRIALGGLLFPASNLRLPLVPALDGCLRRDSWLDKQAEISASAPTSLRSCDVESNPGIFLPPGTQAEFNLRGEDSSTSFCLNGLWAQGQRLDVDQALNRSHEIWTHSCPQSPGNGTDASH

SEQ ID NO: 12582 - protein, 419 aa, Homo sapiens
FAVLQLYSFSTFPFISPFFPLLCSQDFPPLAATDAVKPAIYKVQCVATLQVGSMQATDPSECGQCLSLAWMPTRPHQHLAAGYYNGMVVFWNLPTNSPLQRIRLSDGSLKLYPFQCFLAHDQAVRTLQWCKANSHFLVSAGSDRKIKFWDLRRPYEPINSIKRFLSTELAWLLPYNGVTVAQDNCYASYGLCGIHYIDAGYLGFKAYFTAPRKGTVWSLSGSDWLGTIAAGDISGELIAAILPDMALNPINVKRPVERRFPIYKADLIPYQDSPEGPDHSSASSGVPNPPKARTYTETVNHHYLLFQDTDLGSFHDLLRREPMLRMQEGEGHSQLCLDRLQLEAIHKVRFSPNLDSYGWLVSGGQSGLVRIHFVRGLASPLGHRMQLESRAHFNAMFQPSSPTRRPGFSPTSHRLLPTP

SEQ ID NO: 12583 - protein, 181 aa, Homo sapiens
MRGPSGALWLLLALRTVLGGMEVRWCATSDPEQHKCGNMSEAFREAGIQPSLLCVRGTSADHCVQLIAAQEADAITLDGGAIYEAGKEHGLKPVVGEVYDQEVGTSYYAVAVVRRSSHVTIDTLKGVKSCHTGINRTVGWNVPVGYLVESGRLSVMGCDVLKGPKRGADLHPESSQVAHQP

SEQ ID NO: 12584 - protein, 120 aa, Homo sapiens
MRLPAQLLGLLMLWVSGSSGDIVMTQSPLSLPVTPGEPASISCRSSQSLLHSNGYNYLDWYLQKPGQSPQLLIYLGSNRASGVPDRFSGSGSGTDFTLKISRVEAEDVGVYYCMQALQTP

SEQ ID NO: 12585 - protein, 469 aa, Homo sapiens
MDTVTEAGMAIAMALTGGIGFIHHNCTPEFQANEVRKVKKYEQGFITDPVVLSPKDRVRDVFEAKARHGFCGIPITDTGRMGSRLVGIISSRDIDFLKEEEHDCFLEEIMTKREDLVVAPAGITLKEANEILQRSKKGKLPIVNEDDELVAIIARTDLKKNRDYPLASKDAKKQLLCGAAIGTHEDDKYRLDLLAQAGVDVVVLDSSQGNSIFQINMIKYIKDKYPNLQVIGGNVVTAAQAKNLIDAGVDALRVGMGSGSICITQEVAPKIPPDIKSHSPKCPSTVTGCYMLACGRPQATAVYKVSEYARRFGVPVIADGGIQNVGHIAKALALGASTVMMGSLLAATTEAPGEYFFSDGIRLKKYRGMGSLDAMDKHLSSQNRYFSEADKIKVAQGVSGAVQDKGSIHKFVPYLIAGIQHSCQDIGAKSLTQVRAMMYSGELKFEKRTSSAQVEGGVHSLHSYEKRLF

SEQ ID NO: 12586 - protein, 724 aa, Homo sapiens
TDMILFSLIVGLLTYWFLFRKKKEEVPEFTKIQTLTSSVRESSFVEKMKKTGRNIIVFYGSQTGTAEEFANRLSKDAHRYGMRGMSADPEEYDLADLSSLPEIDNALVVFCMATYGEGDPTDNAQDFYDWLQETDVDLSGVKFAVSHPETAMGSRWPAVPPWGLQIHVSERQPSRPPPCPQQPGQATCETLSSAPDPSTTRMSPPCPQPQSAPGGIGCWRLKVFGLGNKTYEHFNAMGKYVDKRLEQLGAQRIFELGLGDDDGNLEEDFITWREQFWPAVCEHFGVEATGEESSIRQYELVVHTDIDAAKVYMGEMGRLKSYENQKPPFDAKNPFLAAVTTNRKLNQGTERHLMHLELDISDSKIRYESGDHVAVYPANDSALVNQLGKILGADLDVVMSLNNLDEESNKKHPFPCPTSYRTALTYYLDITNPPRTNVLYELAQYASEPSEQELLRKMASSSGEGKELYLSWVVEARRHILAILQDCPSLRPPIDHLCELLPRLQARYYSIASSSKVHPNSVHICAVVVEYETKAGRINKGVATNWLRAKEPAGENGGRALVPMFVRKSQFRLPFKATTPVIMVGPGTGVAPFIGFIQERAWLRQQGKEVGETLLYYGCRRSDEDYLYREELAQFHRDGALTQLNVAFSREQSHKVYVQHLLKQDREHLWKLIEGGAHIYVCGTPSSCPGMHGTWPGMCRTPSTTSWLSSGPWSTRRRWTTSRN

SEQ ID NO: 12587 - protein, 186 aa, Homo sapiens
MVKLAAKCILAGDPAVGKTALAQIFRSDGAHFQKSYTLTTGMDLVVKTVPVPDTGDSVELFIFDSAGKELFSEMLDKLWESPNVLCLVYDVTNEESFNNCSKWLEKARSQAPGISLPGVLVGNKTDLAGRRAVDSAEARAWALGQGLECFETSVKEMENFEAPFHCLAKQFHQLYREKVEVFRALA

SEQ ID NO: 12588 - protein, 203 aa, Homo sapiens
MRTVVLTMKASVIEMFLVLLVTGVHSNKETAKKIKRPKFTVPQINCDVKAGKIIDPEFIVKCPAGCQDPKYHVYGTDVYASYSSVCGAAVHSGVLDNSGGKILVRKVAGQSGYKGSYSNGVQSLSLPRWRESFIVLESKPKKGVTYPSALTYSSSKSPAAQAGKCSRVIESKPSESMNTRRVLGDSGEINILTGQAPLALAIF

SEQ ID NO: 12589 - protein, 260 aa, Homo sapiens
MRPEDRMFHIRAVILRALSLAFLLSLRGAGAIKADHVSTYAAFVQTHRPTGEFMFEFDEDEMFYVDLDKKETVWHLEEFGQAFSFEAQGGLANIAILNNNLNTLIQRSNHTQATNDPPEVTVFPKEPVELGQPNTLICHIDKFFPPVLNVTWLCNGELVTEGVAESLFLPRTDYSFHKFHYLTFVPSAEDFYDCRVEHWGLDQPLLKHWEAQEPIQMPETTETVLCALGLVLGLVGIIVGTVLIIKSLRSGHDPRAQGTL

SEQ ID NO: 12590 - protein, 777 aa, Homo sapiens
MAAAGLVAVAAAAEYSGTVASGGNLPGVHCGPSSGAGPGFGPGSWSRSLDRALEEAAVTGVLSLSGRKLREFPRGAANHDLTDTTRADLSRNRLSEIPIEACHFVSLENLNLYQNCIRYIPEAILNLQALTFLNISRNQLSTLPVHLCNLPLKVLIASNNKLVSLPEEIGHLRHLMELDVSCNEIQTIPSQIGNLEALRDLNVRRNHLVHLPEELAELPLIRLDFSCNKITTIPVCYRNLRHLQTITLDNNPLQSPPAQICIKGKVHIFKYLNIQACKIAPDLPDYDRRPLGFGSCHEELYSSRPYGALDSGFNSVDSGDKRWSGNEPTDEFSDLPLRVAEITKEQRLRRESQYQENRGSLVVTNGGVEHDLDQIDYIDSCTAEEEEAEVRQPKGPDPDSLSSQFMAYIEQRRISHEGSPVKPVAIREFQKTEDMRRYLHQNRVPAEPSSLLSLSASHNQLSHTDLELHQRREQLVERTRREAQLAALQYEEEKIRTKQIQRDAVLDFVKQKASQSPQKQHPLLDGVDGECPFPSRRSQHTDDSALCMSLSGLNQVGCAATLPHSSAFTPLKSDDRPNALLSSPATETVHHSPAYSFPAAIQRNQPQRPESFLFRAGVRAETNKGHASPLPPSAAPTTDSTDSITGQNSRQREEELELIDQLRKHIEYRLKVSLPCDLGAALTDGVVLCHLANHVRPRSVPSIHVPSPAVPKLTMAKCRRNVENFLEACRKIGVPQEQLCLPLHILEEKGLSQVAVTVQALLELAPPKQQQHQLSAV

SEQ ID NO: 12591 - protein, 1080 aa, Homo sapiens
MKGTRAIGSVPERSPAGVDLSLTGLPPPVSRRPGSAATTKPIVRSVSVVTGSEQKRKVLEATGPGGSQAINNLRRSNSTTQVSQPRSGSPRPTEPTDFLMLFEGSPSGKKRPASLSTAPSEKGATWNVLDDQPRGFTLPSNARSSSALDSPAGPRRKECTVALAPNFTANNRSNKGAVGNCVTTMVHNRYTPSERAPPLKSSNQTAPSLNNIIKAATCEGSESSGFGKLPKNVSSATHSARNNTGGSTGLPRRKEVTEEEAERFIHQVNQATVTIQRWYRHQVQRRGAGAARLEHLLQAKREEQRQRSGEGTLLDLHQQKEAARRKAREEKARQARRAAIQELQQKRALRAQKASTAERGPPENPRETRVPGMRQPAQELSPTPGGTAHQALKANNTGGGLPAAGPGDRCLPTSDSSPEPQQPPEDRTQDVLAQDAAGDNLEMMAPSRGSAKSRGPLEELLHTLQLLEKEPDVLPRPRTHHRGRYAWASEEDDASSLTADNLEKFGKLSAFPEPPEDGTLLSEAKLQSIMSFLDEMEKSGQDQLDSQQEGWVPEAGPGPLELGSEVSTSVMRLKLEVEEKKQAMLLLQRALAQQRDLTARRVKETEKALSRQLQRQREHYEATIQRHLAFIDQLIEDKKVLSEKCEAVVAELKQEDQRCTERVAQAQAQHELEIKKLKELMSATEKARREKWISEKTKKIKEVTVRGLEPEIQKLIARHKQEVRRLKSLHEAELLQSDERASQRCLRQAEELREQLEREKEALGQQERERARQRFQQHLEQEQWALQQQRQRLYSEVAEERERLGQQAARQRAELEELRQQLEESSSALTRALRAEFEKGREEQERRHQMELNTLKQQLELERQAWEAGRTRKEEAWLLNREQELREEIRKGRDKEIELVIHRLEADMALAKEESEKAAESRIKRLRDKYEAELSELEQSERKLQERCSELKGQLGEAEGENLRLQGLVRQKERALEDAQAVNEQLSSERSNLAQVIRQEFEDRLAASEEETRQAKAELATLQARQQLELEEVHRRVKTALARKEEAVSSLRTQHEAAVKRADHLEELLEQHRRPTPSTK

SEQ ID NO: 12592 - protein, 105 aa, Homo sapiens
MKLFWLLFTIGFCWAQYSSNTQQGRTSIVHLFEWRWVDIALECERYLAPKGFGGVQVSPPNENVAIHNPFRPWWERYQPVSYKLCTRSGNEDEFRNMVTRCNNVG

SEQ ID NO: 12593 - protein, 4857 aa, Homo sapiens
MVTGGGAAPPGTVTEPLPSVIVLSAGRKMAAAAAAASGPGCSSAAGAGAAGVSEWLVLRDGCMHCDADGLHSLSYHPALNAILAVTSRGTIKVIDGTSGATLQASALSAKPGGQVKCQYISAVDKVIFVDDYAVGCRKDLNGILLLDTALQTPVSKQDDVVQLELPVTEAQQLLSACLEKVDISSTEGYDLFITQLKDGLKNTSHETAANHKVAKWATVTFHLPHHVLKSIASAIVNELKKINQNVAALPVASSVMDRLSYLLPSARPELGVGPGRSVDRSLMYSEANRRETFTSWPHVGYRWAQPDPMAQAGFYHQPASSGDDRAMCFTCSVCLVCWEPTDEPWSEHERHSPNCPFVKGEHTQNVPLSVTLATSPAQFPCTDGTDRISCFGSGSCPHFLAAATKRGKICIWDVSKLMKVHLKFEINAYDPAIVQQLILSGDPSSGVDSRRPTLAWLEDSSSCSDIPKLEGDSDDLLEDSDSEEHSRSDSVTGHTSQKEAMEVSLDITALSILQQPEKLQWEIVANVLEDTVKDLEELGANPCLTNSKSEKTKEKHQEQHNIPFPCLLAGGLLTYKSPATSPISSNSHRSLDGLSRTQGESISEQGSTDNESCTNSELNSPLVRRTLPVLLLYSIKESDEKAGKIFSQMNNIMSKSLHDDGFTVPQIIEMELDSQEQLLLQDPPVTYIQQFADAAANLTSPDSEKWNSVFPKPGTLVQCLRLPKFAEEENLCIDSITPCADGIHLLVGLRTCPVESLSAINQVEALNNLNKLNSALCNRRKGELESNLAVVNGANISVIQHESPADVQTPLIIQPEQRNVSGGYLVLYKMNYATRIVTLEEEPIKIQHIKDPQDTITSLILLPPDILDNREDDCEEPIEDMQLTSKNGFEREKTSDISTLGHLVITTQGGYVKILDLSNFEILAKVEPPKKEGTEEQDTFVSVIYCSGTDRLCACTKGGELHFLQIGGTCDDIDEADILVDGSLSKGIEPSSEGSKPLSNPSSPGISGVDLLVDQPFTLEILTSLVELTRFETLTPRFSATVPPCWVEVQQEQQQRRHPQHLHQQHHGDAAQHTRTWKLQTDSNSWDEHVFELVLPKACMVGHVDFKFVLNSNITNIPQIQVTLLKNKAPGLGKVNALNIEVEQNGKPSLVDLNEEMQHMDVEESQCLRLCPFLEDHKEDILCGPVWLASGLDLSGHAGMLTLTSPKLVKGMAGGKYRSFLIHVKAVNERGTEEICNGGMRPVVRLPSLKHQSNKGYSLASLLAKVAAGKEKSSNVKNENTSGTRKSENLRGCDLLQEVSVTIRRFKKTSISKERVQRCAMLQFSEFHEKLLNTLCRKTDDGQITEHAQSLVLDTLCWLAGVHSNGPGSSKEGNENLLSKTRKFLSDIVRVCFFEAGRSIAHKCARFLALCISNGKCDPCQPAFGPVLLKALLDNMSFLPAATTGGSVYWYFVLLNYVKDEDLAGCSTACASLLTAVSRQLQDRLTPMEALLQTRYGLYSSPFDPVLFDLEMSGSSCKNVYNSSIGVQSDEIDLSDVLSGNGKVSSCTAAEGSFTSLTGLLEVEPLHFTCVSTSDGTRIERDDAMSSFGVTPAVGGLSSGTVGEASTALSSAAQVALQSLSHAMASAEQQLQVLQEKQQQLLKLQQQKAKLEAKLHQTTAAAAAAASAVGPVHNSVPSNPVAAPGFFIHPSDVIPPTPKTTPLFMTPPLTPPNEAVSVVINAELAQLFPGSVIDPPAVNLAAHNKNSNKSRMNPLGSGLALAISHASHFLQPPPHQSIIIERMHSGARRFVTLDFGRPILLTDVLIPTCGDLASLSIDIWTLGEEVDGRRLVVATDISTHSLILHDLIPPPVCRFMKITVIGRYGSTNARAKIPLGFYYGHTYILPWESELKLMHDPLKGEGESANQPEIDQHLAMMVALQEDIQCRYNLACHRLETLLQSIDLPPLNSANNAQYFLRKPDKAVEEDSRVFSAYQDCIQLQLQLNLAHNAVQRLKVALGASRKMLSETSNPEDLIQTSSTEQLRTIIRYLLDTLLSLLHASNGHSVPAVLQSTFHAQACEELFKHLCISGTPKIRLHTGLLLVQLCGGERWWGQFLSNVLQELYNSEQLLIFPQDRVFMLLSCIGQRSLSNSGVLESLLNLLDNLLSPLQPQLPMHRRTEGVLDIPMISWVVMLVSRLLDYVATVEDEAAAAKKPLNGNQWSFINNNLHTQSLNRSSKGSSSLDRLYSRKIRKQLVHHKQQLNLLKAKQKALVEQMEKEKIQSNKGSSYKLLVEQAKLKQATSKHFKDLIRLRRTAEWSRSNLDTEVTTAKESPEIEPLPFTLAHERCISVVQKLVLFLLSMDFTCHADLLLFVCKVLARIANATRPTIHLCEIVNEPQLERLLLLLVGTDFNRGDISWGGAWAQYSLTCMLQDILAGELLAPVAAEAMEEGTVGDDVGATAGDSDDSLQQSSVQLLETIDEPLTHDITGAPPLSSLEKDKEIDLELLQDLMEVDIDPLDIDLEKDPLAAKVFKPISSTWYDYWGADYGTYNYNPYIGGLGIPVAKPPANTEKNGSQTVSVSVSQALDARLEVGLEQQAELMLKMMSTLEADSILQALTNTSPTLSQSPTGTDDSLLGGLQAANQTSQLIIQLSSVPMLNVCFNKLFSMLQVHHVQLESLLQLWLTLSLNSSSTGNKENGADIFLYNANRIPVISLNQASITSFLTVLAWYPNTLLRTWCLVLHSLTLMTNMQLNSGSSSAIGTQESTAHLLVSDPNLIHVLVKFLSGTSPHGTNQHSPQVGPTATQAMQEFLTRLQVHLSSTCPQIFSEFLLKLIHILSTERGAFQTGQGPLDAQVKLLEFTLEQNFEVVSVSTISAVIESVTFLVHHYITCSDKVMSRSGSDSSVGARACFGGLFANLIRPGDAKAVCGEMTRDQLMFDLLKLVNILVQLPLSGNREYSARVSVTTNTTDSVSDEEKVSGGKDGNGSSTSVQGSPAYVADLVLANQQIMSQILSALGLCNSSAMAMIIGASGLHLTKHENFHGGLDAISVGDGLFTILTTLSKKASTVHMMLQPILTYMACGYMGRQGSLATCQLSEPLLWFILRVLDTSDALKAFHDMGGVQLICNNMVTSTRAIVNTARSMVSTIMKFLDSGPNKAVDSTLKTRILASEPDNAEGIHNFAPLGTITSSSPTAQPAEVLLQATPPHRRARSAAWSYIFLPEEAWCDLTIHLPAAVLLKEIHIQPHLASLATCPSSVSVEVSADGVNMLPLSTPVVTSGLTYIKIQLVKAEVASAVCLRLHRPRDASTLGLSQIKLLGLTAFGTTSSATVNNPFLPSEDQVSKTSIGWLRLLHHCLTHISDLEGMMASAAAPTANLLQTCAALLMSPYCGMHSPNIEVVLVKIGLQSTRIGLKLIDILLRNCAASGSDPTDLNSPLLFGRLNGLSSDSTIDILYQLGTTQDPGTKDRIQALLKWVSDSARVAAMKRSGRMNYMCPNSSTVEYGLLMPSPSHLHCVAAILWHSYELLVEYDLPALLDQELFELLFNWSMSLPCNMVLKKAVDSLLCSMCHVHPNYFSLLMGWMGITPPPVQCHHRLSMTDDSKKQDLSSSLTDDSKNAQAPLALTESHLATLASSSQSPEAIKQLLDSGLPSLLVRSLASFCFSHISSSESIAQSIDISQDKLRRHHVPQQCNKMPITADLVAPILRFLTEVGNSHIMKDWLGGSEVNPLWTALLFLLCHSGSTSGSHNLGAQQTSARSASLSSAATTGLTTQQRTAIENATVAFFLQCISCHPNNQKLMAQVLCELFQTSPQRGNLPTSGNISGFIRRLFLQLMLEDEKVTMFLQSPCPLYKGRINATSHVIQHPMYGAGHKFRTLHLPVSTTLSDVLDRVSDTPSITAKLISEQKDDKEKKNHEEKEKVKAENGFQDNYSVVVASGLKSQSKRAVSATPPRPPSRRGRTIPDKIGSTSGAEAANKIITVPVFHLFHKLLAGQPLPAEMTLAQLLTLLYDRKLPQGYRSIDLTVKLGSRVITDPSLSKTDSYKRLHPEKDHGDLLASCPEDEALTPGDECMDGILDESLLETCPIQSPLQVFAGMGGLALIAERLPMLYPEVIQQVSAPVVTSTTQEKPKDSDQFEWVTIEQSGELVYEAPETVAAEPPPIKSAVQTMSPIPAHSLAAFGLFLRLPGYAEVLLKERKHAQCLLRLVLGVTDDGEGSHILQSPSANVLPTLPFHVLRSLFSTTPLTTDDGVLLRRMALEIGALHLILVCLSALSHHSPRVPNSSVNQTEPQVSSSHNPTSTEEQQLYWAKGTGFGTGSTASGWDVEQALTKQRLEEEHVTCLLQVLASYINPVSSAVNGEAQSSHETRGQNSNALPSVLLELLSQSCLIPAMSSYLRNDSVLDMARHVPLYRALLELLRAIASCAAMVPLLLPLSTENGEEEEEQSECQTSVGTLLAKMKTCVDTYTNRLRSKRENVKTGVKPDASDQEPEGLTLLVPDIQKTAEIVYAATTSLRQANQEKKLGEYSKKAAMKPKPLSVLKSLEEKYVAVMKKLQFDTFEMVSEDEDGKLGFKVNYHYMSQVKNANDANSAARARRLAQEAVTLSTSLPLSSSSSVFVRCDEERLDIMKVLITGPADTPYANGCFEFDVYFPQDYPSSPPLVNLETTGGHSVRFNPNLYNDGKVCLSILNTWHGRPEEKWNPQTSSFLQVLVSVQSLILVAEPYFNEPGYERSRGTPSGTQSSREYDGNIRQATVKWAMLEQIRNPSPCFKEVIHKHFYLKRVEIMAQCEEWIADIQQYSSDKRVGRTMSHHAAALKRHTAQLREELLKLPCPEGLDPDTDDAPEVCRATTGAEETLMHDQVKPSSSKELPSDFQL

SEQ ID NO: 12594 - protein, 861 aa, Homo sapiens
MRELVNIPLVHILTLVAFSGTEKLPKAPVITTPLETVDALVEEVATFMCAVESYPQPEISWTRNKILIKLFDTRYSIRENGQLLTILSVEDSDDGIYCCTANNGVGGAVESCGALQVKMKPKITRPPINVKIIEGLKAVLPCTTMGNPKPSVSWIKGDSPLRENSRIAVLESGSLRIHNVQKEDAGQYRCVAKNSLGTAYSKVVKLEVEVFARILRAPESHNVTFGSFVTLHCTATGIPVPTITWIENGNAVSSGSIQESVKDRVIDSRLQLFITKPGLYTCIATNKHGEKFSTAKAAATISIAEWSKPQKDNKGYCAQYRGEVCNAVLAKDALVFLNTSYADPEEAQELLVHTAWNELKVVSPVCRPAAEALLCNHIFQECSPGVVPTPIPICREYCLAVKELFCAKEWLVMEEKTHRGLYRSEMHLLSVPECSKLPSMHWDPTACARLPHLAFPPMTSSKPSVDIPNLPSSSSSSFSVSPTYSMTVIISIMSSFAIFVLLTITTLYCCRRRKQWKNKKRESAAVTLTTLPSELLLDRLHPNPMYQRMPLLLNPKLLSLEYPRNNIEYVRDIGEGAFGRVFQARAPGLLPYEPFTMVAVKMLKEEASADMQADFQREAALMAEFDNPNIVKLLGVCAVGKPMCLLFEYMAYGDLNEFLRSMSPHTVCSLSHSDLSMRAQVSSPGPPPLSCAEQLCIARQVAAGMAYLSERKFVHRDLATRNCLVGENMVVKIADFGLSRNIYSADYYKANENDAIPIRWMPPESIFYNRYTTESDVWAYGVVLWEIFSYGLQPYYGMAHEEVIYYVRDGNILSCPENCPVELYNLMRLCWSKLPADRPSFTSIHRILERMCERAEGTVSV

SEQ ID NO: 12595 - protein, 212 aa, Homo sapiens
MGLHLRPYRVGLLPDGLLFLLLLLMLLADPALPAGRHPPVVLGDNNRIPVIGPLKIREQQRSAVSTSWLLPYNYTWSPEKVFVQTPTINYTLRDYRKFFQDIGFEDGWLMRQDTEGLVEATMPPGVQLHCLYGTGVPTPDSFYYESFPDRDPKICFGDGDGTVNLKSALQCQAWQSRQEHQVLLQELPGSEHIEMLANATTLAYLKRVLLGP

SEQ ID NO: 12596 - protein, 532 aa, Homo sapiens
MLGGSGSHGRRSLAALSQIAYQRNDDDEEEAARERRRRARQERLRQKQEEESLGQVTDQVEVNAQNSVPDEEAKTTTTNTQVEGDDEAAFLERLARREERRQKRLQEALERQKEFDPTITDASLSLPSRRMQNDTAENETTEKEEKSESRQERYEIEETETVTKSYQKNDWRDAEENKKEDKEKEEEEEEKPKRGSIGENQIKDEKIKKDKEPKEEVKSFMDRKKGFTEVKSQNGEFMTHKLKHTENTFSRPGGRASVDTKEAEGAPQVEAGKRLEELRRRRGETESEEFEKLKQKQQEAALELEELKKKREERRKVLEEEEQRRKQEEADRKLREEEEKRRLKEEIERRRAEAAEKRQKMPEDGLSDDKKPFKCFTPKGSSLKIEERAEFLNKSVQKSSGVKSTHQAAIVSKIDSRLEQYTSAIEGTKSAKPTKPAASDLPVPAEGVRNIKSMWEKGNVFSSPTAAGTPNKETAGLKVGVSSRINEWLTKTPDGNKSPAPKPSDLRPGDVSSKRNLWEKQSVDKVTSPTKV

SEQ ID NO: 12597 - protein, 90 aa, Homo sapiens
MWVPVVFLTLSVTWIGAAPLILSRIVGGWECEKHSQPWQVLVASRGRAVCGGVLVHPQWVLTAAHCIRNKSVILLGRHSLFHPEDTGQAR

SEQ ID NO: 12598 - protein, 153 aa, Homo sapiens
MTIHILILLLLLAFSAQGDLDTAARRGQHQVPQHRGHVCYLGVCRTHRLAEIIYWIRCLHQGALGEGQPRAPGPLQLWAPPVARGGSPARFPGFRPAARGLAQCPARWVTSGTARPLLGFSLPICMLELLLHISSPLTPAPETVFPSPSPGCD

SEQ ID NO: 12599 - protein, 61 aa, Homo sapiens
MQLKIMPKKKRLSAGRVPLILFLCQMISALEVPLDPKLLEDLVQPPTITQQSPKDYIIDPR

SEQ ID NO: 12600 - protein, 540 aa, Homo sapiens
MLQGLLPVSLLLSVAVSAIKELPGVKKYEVVYPIRLHPLHKREAKEPEQQEQFETELKYKMTINGKIAVLYLKKNKNLLAPGYTETYYNSTGKEITTSPQIMDDCYYQGHILNEKVSDASISTCRGLRGYFSQGDQRYFIEPLSPIHRDGQEHALFKYNPDEKNYDSTCGMDGVLWAHDLQQNIALPATKLVKLKDRKVQEHEKYIEYYLVLDNGEFKRYNENQDEIRKRVFEMANYVNMLYKKLNTHVALVGMEIWTDKDKIKITPNASFTLENFSKWRGSVLSRRKRHDIAQLITATELAGTTVGLAFMSTMCSPYSVGVVQDHSDNLLRVAGTMAHEMGHNFGMFHDDYSCKCPSTICVMDKALSFYIPTDFSSCSRLSYDKFFEDKLSNCLFNAPLPTDIISTPICGNQLVEMGEDCDCGTSEECTNICCDAKTCKIKATFQCALGECCEKCQFKKAGMVCRPAKDECDLPEMCNGKSGNCPDDRFQVNGFPCHHGKGHCLMGTCPTLQEQCTELWGPGRRTNPFPCACAKENHFR

SEQ ID NO: 12601 - protein, 188 aa, Homo sapiens
MREWWVQVGLLAVPLLAAYLHIPPPQLSPALHSWKSSGKFFTYKGLRIFYQDSVGVVGSPEIVVLLHGFPTSSYDWYKIWEGLTLRFHRVIALDFLGFGFSDKPRPHHYSIFEQASIVEALLRHLGLQNRRINLLSHDYGDIVAQELLYRYKQNRSGRLTIKSLCLSNGGIFPETHRPLLLQKLLKDG

SEQ ID NO: 12602 - protein, 551 aa, Homo sapiens
MAEGENEVRWDGLCSRDSTTRETALENIRQTILRKTEYLRSVKETPHRPSDGLSNTESSDGLNKLLAHLLMLSKRCPFKDVREKSEFILKSIQELGIRIPRPLGQGPSRFIPEKEILQVGSEDAQMHALFADSFAALGRLDNITLVMVFHPQYLESFLKTQHYLLQMDGPLPLHYRHYIGIMAAARHQCSYLVNLHVNDFLHVGGDPKWLNGLENAPQKLQNLGELNKVLAHRPWLITKEHIEGLLKAEEHSWSLAELVHAVVLLTHYHSLASFTFGCGISPEIHCDGGHTFRPPSVSNYCICDITNGNHSVDEMPVNSAENVSVSDSFFEVEALMEKMRQLQECRDEEEASQEEMASRFEIEKRESMFVFSSDDEEVTPARAVSRHFEDTSYGYKDFSRHGMHVPTFRVQDYCWEDHGYSLVNRLYPDVGQLIDEKFHIAYNLTYNTMAMHKDVDTSMLRRAIWNYIHCMFGIRYDDYDYGEINQLLDRSFKVYIKTVVCTPEKVTKRMYDSFWRQFKHSEKVHVNLLLIEARMQAELLYALRAITRYMT

SEQ ID NO: 12603 - protein, 601 aa, Homo sapiens
MERAAPSRRVPLPLLLLGGLALLAAGVDADVLLEACCADGHRMATHQKDCSLPYATESKECRMVQEQCCHSQLEELHCATGISLANEQDRCATPHGDNASLEATFVKRCCHCCLLGRAAQAQGQSCEYSLMVGYQCGQVFQACCVKSQETGDLDVGGLQETDKIIEVEEEQEDPYLNDRCRGGGPCKQQCRDTGDEVVCSCFVGYQLLSDGVSCEDVNECITGSHSCRLGESCINTVGSFRCQRDSSCGTGYELTEDNSCKDIDECESGIHNCLPDFICQNTLGSFRCRPKLQCKSGFIQDALGNCIDINECLSISAPCPIGHTCINTEGSYTCQKNVPNCGRGYHLNEEGTRCVDVDECAPPAEPCGKGHRCVNSPGSFRCECKTGYYFDGISRMCVDVNECQRYPGRLCGHKCENTLGSYLCSCSVGFRLSVDGRSCEDINECSSSPCSQECANVYGSYQCYCRRGYQLSDVDGVTCEDIDECALPTGGHICSYRCINIPGSFQCSCPSSGYRLAPNGRNCQDIDECVTGIHNCSINETCFNIQGGFRCLAFECPENYRRSAATQKSKKGRQNTPAGSSKEDCRVLPWKQGLEDTHLDA

SEQ ID NO: 12604 - protein, 40 aa, Homo sapiens
MAFRTICVLVGVFICSICVKGSSQPQARVYLTFDGPSFHD

SEQ ID NO: 12605 - protein, 444 aa, Homo sapiens
MGPLQFRDVAIEFSLEEWHCLDAAQRNLYRDVMLENYRNLIFLGIVVSKPNLITCLEQGKKPLTMKRHEMIAKPPVMYSHFAQDLWSEQSIKDSFQKVILRRYEKCRHDNLQLKKGCESVDECPVHKRGYNGLKQCLATTQRKIFQCDEYVKFLHKFSNSNKHKIRDTGKKSFKCIEYGKTFNQSSTRTTYKKIDAGEKRYKCEECGKAYKQSSHLTTHKKIHTGEKPYKCEECGKAYKQSCNLTTHKIIHTGEKPYRCRECGKAFNHPATLFSHKKIHTGEKPYKCDKCGKAFISSSTLTKHEIIHTGEKPYKCEECGKAFNRSSNLTKHKRIHTGDVPYKCDECGKTFTWYSSLSKHKRAHTGEKPYKCEECGKAFTAFSTLTEHKIIHTGEKPYKCEECGKAFNWSSALNKHKKIHIRQKPCIVKNVENLLNVPQPLISIR

SEQ ID NO: 12606 - protein, 202 aa, Homo sapiens
MASQGRRRRPLRRPETVVPGEATETDSERSASSSEEEELYLGPSGPTRGRPTGLRVAGEAAETDSEPEPEPEPTAAPRDLPPLVVQRESAEEAWGTEEAPAPAPARSLLQLRLAESQARLDHDVAAAVSGVYRRAGRDVAALASRLAAAQAAGLAAAHSVRLARGDLCALAERLDIVAGCRLLPDIRGVPGTEPEKDPGPRA

SEQ ID NO: 12607 - protein, 3062 aa, Homo sapiens
MEEFLQRAKSKLNRSKRLEKVHVVIGPKSCDLDSLISTFTYAYFLDKVSPPGVLCLPVLNIPRTEFNYFTETRFILEELNISESFHIFRDEINLHQLNDEGKLSITLVGSSVLASEDKTLESAVVKVINPVEQSDANVEFRESSSSLVLKEILQEAPELITEQLAHRLRGSILFKWMTMESEKISEKQEEILSILEEKFPNLPPREDIINVLQETQFSAQGLSIEQTMLKDLKELSDGEIKVAISTVSMNLENCLFHSNITSDLKAFTDKFGFDVLILFSSYLSEEQQPRRQIAVYSENMELCSQICCELEECQNPCLELEPFDCGCDEILVYQQEDPSVTCDQVVLVVKEVINRRCPEMVSNSRTSSTEAVAGSAPLSQGSSGIMELYGSDIEPQPSSVNFIENPPDLNDSNQAQVDANVDLVSPDSGLATIRSSRSSKESSVFLSDDSPVGEGAGPHHTLLPGLDSYSPIPEGAVAEEHAWSGEHGEHFDLFNFDPAPMASGQSQQSSHSADYSPADDFFPNSDLSEGQLPAGPEGLDGMGTNMSNYSSSSLLSGAGKDSLVEHDEEFVQRQDSPRDNSERNLSLTDFVGDESPSPERLKNTGKRIPPTPMNSLVESSPSTEEPASLYTEDMTQKATDTGHMGPPQTHARCSSWWGGLEIDSKNIADAWSSSEQESVFQSPESWKEHKPSSIDRRASDSVFQPKSLEFTKSGPWESEFGQPELGSNDIQDKNEESLPFQNLPMEKSPLPNTSPQGTNHLIEDFASLWHSGRSPTAMPEPWGNPTDDGEPAAVAPFPAWSAFGKEDHDEALKNTWNLHPTSSKTPSVRDPNEWAMAKSGFAFSSSELLDNSPSEINNEAAPEIWGKKNNDSRDHIFAPGNPSSDLDHTWTNSKPPKEDQNGLVDPKTRGKVYEKVDSWNLFEENMKKGGSDVLVPWEDSFLSYKCSDYSASNLGEDSVPSPLDTNYSTSDSYTSPTFAGDEKETEHKPFAKEEGFESKDGNSTAEETDIPPQSLQQSSRNRISSGPGNLDMWASPHTDNSSEINTTHNLDENELKTEHTDGKNISMEDDVGESSQSSYDDPSMMQLYNETNRQLTLLHSSTNSRQTAPDSLDLWNRVILEDTQSTATISDMDNDLDWDDCSGGAAIPSDGQTEGYMAEGSEPETRFTVRQLEPWGLEYQEANQVDWELPASDEHTKDSAPSEHHTLNEKSGQLIANSIWDSVMRDKDMSSFMLPGSSHITDSEQRELPPEIPSHSANVKDTHSPDAPAASGTSESEALISHLDKQDTERETLQSDAASLATRLENPGYFPHPDPWKGHGDGQSESEKEAQGATDRGHLDEEEVIASGVENASGISEKGQSDQELSSLVASEHQEICIKSGKISSLAVTFSPQTEEPEEVLEYEEGSYNLDSRDVQTGMSADNLQPKDTHEKHLMSQRNSGETTETSDGMNFTKYVSVPEKDLEKTEECNFLEPENVGGGPPHRVPRSLDFGDVPIDSDVHVSSTCSEITKNLDVKGSENSLPGAGSSGNFDRDTISSEYTHSSASSPELNDSSVALSSWGQQPSSGYQEENQGNWSEQNHQESELITTDGQVEIVTKVKDLEKNRINEFEKSFDRKTPTFLEIWNDSVDGDSFSSLSSPETGKYSEHSGTHQESNLIASYQEKNEHDISATVQPEDARVISTSSGSDDDSVGGEESIEEEIQVANCHVAEDESRAWDSLNESNKFLVTADPKSENIYDYLDSSEPAENENKSNPFCDNQQSSPDPWTFSPLTETEMQITAVEKEKRSSPETGTTGDVAWQISPKASFPKNEDNSQLEMLGFSADSTEWWKASPQEGRLIESPFERELSDSSGVLEINSSVHQNASPWGVPVQGDIEPVETHYTNPFSDNHQSPFLEGNGKNSHEQLWNIQPRQPDPDADKFSQLVKLDQIKEKDSREQTFVSAAGDELTPETPTQEQCQDTMLPVCDHPDTAFTHAEENSCVTSNVSTNEGQETNQWEQEKSYLGEMTNSSIATENFPAVSSPTQLIMKPGSEWDGSTPSEDSRGTFVPDILHGNFQEGGQLASAAPDLWIDAKKPFSLKADGENPDILTHCEHDSNSQASDSPDICHDSEAKQETEKHLSACMGPEVESSELCLTEPEIDEEPIYEPGREFVPSNAELDSENATVLPPIGYQADIKGSSQPASHKGSPEPSEINGDNSTGLQVSEKGASPDMAPILEPVDRRIPRIENVATSIFVTHQEPTPEGDGSWISDSFSPESQPGARALFDGDPHLSTENPALVPDALLASDTCLDISEAAFDHSFSDASGLNTSTGTIDDMSKLTLSEGHPETPVDGDLGKQDICSSEASWGDFEYDVMGQNIDEDLLREPEHFLYGGDPPLEEDSLKQSLAPYTPPFDLSYLTEPAQSAETIEEAGSPEDESLGCRAAEIVLSALPDRRSEGNQAETKNRLPGSQLAVLHIREDPESVYLPVGAGSNILSPSNVDWEVETDNSDLPAGGDIGPPNGASKEISELEEEKTIPTKEPEQIKSEYKEERCTEKNEDRHALHMDYILVNREENSHSKPETCEERESIAELELYVGSKETGLQGTQLASFPDTCQPASLNERKGLSAEKMSSKSDTRSSFESPAQDQSWMFLGHSEVGDPSLDARDSGPGWSGKTVEPFSELGLGEGPQLQILEEMKPLESLALEEASGPVSQSQKSKSRGRAGPDAVTLQAVTHDNEWEMLSPQPVQKNMIPDTEMEEETEFLELGTRISRPNGLLSEDVGMDIPFEEGVLSPSAADMRPEPPNSLDLNDTHPRRIKLTAPNINLSLDQSEGSILSDDNLDSPDEIDINVDELDTPDEADSFEYTGHDPTANKDSGQESESIPEYTAEEEREDNRLWRTVVIGEQEQRIDMKVIEPYRRVISHGGDSGYYGDGLNAIIVFAACFLPDSSRADYHYVMENLFLYVISTLELMVAEDYMIVYLNGATPRRRMPGLGWMKKCYQMIDRRLRKNLKSFIIVHPSWFIRTILAVTRPFISSKFSSKIKYVNSLSELSGLIPMDCIHIPESIINIDLKLKEKP

SEQ ID NO: 12608 - protein, 165 aa, Homo sapiens
MGPLPVCLPIMLLLLLPSLLLLLLLPGPGSGEASRILRVHRRGILELAGTVGCVGPRTPIAYMKYGCFCGLGGHGQPRDAIDWCCHGHDCCYTRAEEAGCSPKTERYSWQCVNQSVLCGPAENKCQELLCKCDQEIANCLAQTEYNLKYLFYPQFLCEPDSPKCD

SEQ ID NO: 12609 - protein, 119 aa, Homo sapiens
MGLLLPLALCILVLCCGAMSPPQLALNPSALLSRGCNDSDVLAVAGFALRDINKDRKDGYVLRLNRVNDAQEYRRGGLGSLFYLTLDVLETDCHVLRKKAWQDCGMRIFFESFQKKRFT

SEQ ID NO: 12610 - protein, 367 aa, Homo sapiens
MKSLVLLLCLAQLWGCHSAPHGPGLIYRQPNCDDPETEEAALVAIDYINQNLPWGYKHTLNQIDEVKVWPQQPSGELFEIEIDTLETTCHVLDPTPVARCSVRQLKEHAVEGDCDFQLLKLDGKFSVVYAKCDSSPDSAEDVRKVCQDCPLLAPLNDTRVVHAAKAALAAFNAQNNGSNFQLEEISRAQLVPLPPSTYVEFTVSGTDCVAKEATEAAKCNLLAEKQYGFCKATLSEKLGGAEVAVTCMVFQTQPVSSQPQPEGANEAVPTPVVDPDAPPSPPLGAPGLPPAGSPPDSHVLLAAPPGHQLHRAHYDLRHTFMGVVSLGSPSGEVSHPRKTRTVVQPSVGAAAGPVVPPCPGRIRHFKV

SEQ ID NO: 12611 - protein, 72 aa, Homo sapiens
MTVRGDVLAPDPASPTTAAASPSVSVIPEGSPTAMEQPVFLMTTAAQAISGFFVWTALLITCHQPRARLGQV

SEQ ID NO: 12612 - protein, 783 aa, Homo sapiens
MAACRYCCSCLRLRPLSDGPFLLPRRDRALTQLQVRALWSSAGSRAVAVDLGNRKLEISSGKLARFADGSAVVQSGDTAVMVTAVSKTKPSPSQFMPLVVDYRQKAAAAGRIPTNYLRREIGTSDKEILTSRIIDRSIRPLFPAGYFYDTQVLCNLLAVDGVNEPDVLAINGASVALSLSDIPWNGPVGAVRIGIIDGEYVVNPTRKEMSSSTLNLVVAGAPKSQIVMLEASAENILQQDFCHAIKVGVKYTQQIIQGIQQLVKETGVTKRTPQKLFTPSPEIVKYTHKLAMERLYAVFTDYEHDKVSRDEAVNKIRLDTEEQLKEKFPEADPYEIIESFNVVAKEVFRSIVLNEYKRCDGRDLTSLRNVSCEVDMFKTLHGSALFQRGQTQVLCTVTFDSLESGIKSDQVITAINGIKDKNFMLHYEFPPYATNEIGKVTGLNRRELGHGALAEKALYPVIPRDFPFTIRVTSEVLESNGSSSMASACGGSLALMDSGVPISSAVAGVAIGLVTKTDPEKGEIEDYRLLTDILGIEDYNGDMDFKIAGTNKGITALQADIKLPGIPIKIVMEAIQQASVAKKEILQIMNKTISKPRASRKENGPVVETVQVPLSKRAKFVGPGGYNLKKLQAETGVTISQVDEETFSVFAPTPSAMHEARDFITEICKDDQEQQLEFGAVYTATITEIRDTGVMVKLYPNMTAVLLHNTQLDQRKIKHPTALGLEVGQEIQVKYFGRDPADGRMRLSRKVLQSPATTVVRTLNDRSSIVMGEPISQSSSNSQ

SEQ ID NO: 12613 - protein, 673 aa, Homo sapiens
MDPQRSPLLEVKGNIELKRPLIKAPSQLPLSGSRLKRRPDQMEDGLEPEKKRTRGLGATTKITTSHPRVPSLTTVPQTQGQTTAQKVSKKTGPRCSTAIATGLKNQKPVPAVPVQKSGTSGVPPMAGGKKPSKRPAWDLKGQLCDLNAELKRCRERTQTLDQENQQLQDQLRDAQQQVKALGTERTTLEGHLAKVQAQAEQGQQELKNLRACVLELEERLSTQEGLVQELQKKQVELQEERRGLMSQLEEKERRLQTSEAALSSSQAEVASLRQETVAQAALLTEREERLHGLEMERRRLHNQLQELKGNIRVFCRVRPVLPGEPTPPPGLLLFPSGPGGPSDPPTRLSLSRSDERRGTLSGAPAPPTRHDFSFDRVFPPGSGQDEVFEEIAMLVQSALDGYPVCIFAYGQTGSGKTFTMEGGPGGDPQLEGLIPRALRHLFSVAQELSGQGWTYSFVASYVEIYNETVRDLLATGTRKGQGGECEIRRAGPGSEELTVTNARYVPVSCEKEVDALLHLARQNRAVARTAQNERSSRSHSVFQLQISGEHSSRGLQCGAPLSLVDLAGSERLDPGLALGPGERERLRETQAINSSLSTLGLVIMALSNKESHVPYRNSKLTYLLQNSLGGSAKMLMFVNISPLEENVSESLNSLRFASKVNQCVIGTAQANRK

SEQ ID NO: 12614 - protein, 643 aa, Homo sapiens
MKIAVLFCFFLLIIFQTDFGKNEEIPRKQRRKIYHRRLRKSSTSHKHRSNRQLGIQQTTVFTPVARLPIVNFDYSMEEKFESFSSFPGVESSYNVLPGKKGHCLVKGITMYNKAVWSPEPCTTCLCSDGRVLCDETMCHPQRCPQTVIPEGECCPVCSATEQREPTNLLHKQLPPPQVGMDRIVRKEALQSEEDEEVKEEDTEQKRETPESRNQGQLYSEGDSRGGDRKQRPGEERRLAHQQQRQGREEEEDEEEEGEEGEEDEEDEEDPVRGDMFRMPSRSPLPAPPRGTLRLPSGCSLSYRTISCINAMLTQIPPLTAPQITSLELTGNSIASIPDEAFNGLPNLERLDLSKNNITSSGIGPKAFKLLKKLMRLNMDGNNLIQIPSQLPSTLEELKVNENNLQAIDEESLSDLNQLVTLELEGNNLSEANVNPLAFKPLKSLAYLRLGKNKFRIIPQGLPGSIEELYLENNQIEEITEICFNHTRKINVIVLRYNKIEENRIAPLAWINQENLESIDLSYNKLYHVPSYLPKSLLHLVLLGNQIERIPGYVFGHMEPGLEYLYLSFNKLADDGMDRVSFYGAYHSLRELFLDHNDLKSIPPGIQEMKALHFLRLNNNKIRCVSDAVLETVTNRSDVAFPLW

SEQ ID NO: 12615 - protein, 131 aa, Homo sapiens
MSKRYLQKATKGKLLIIIFIVTLWGKVVSSANHHKAHHVKTGTCEVVALHRCCNKNKIEERSQTVKCSCFPGQVAGTTRAAPSCVDASIVEQKWWCHMQPCLEGEECKVLPDRKGWSCSSGNKVKTTRVTH

SEQ ID NO: 12616 - protein, 426 aa, Homo sapiens
MLPSASRERPGYRAGVAAPDLLDPKSAAQNSKPRLSFSTKPTVLASRVESDTTINVMKWKTVSTIFLVVVLYLIIGATVFKALEQPHEISQRTTIVIQKQTFISQHSCVNSTELDELIQQIVAAINAGIIPLGNTSNQISHWDLGSSFFFAGTVITTIGFGNISPRTEGGKIFCIIYALLGIPLFGFLLAGVGDQLGTIFGKGIAKVEDTFIKWNVSQTKIRIISTIIFILFGCVLFVALPAIIFKHIEGWSALDAIYFVVITLTTIGFGDYVAGGSDIEYLDFYKPVVWFWILVGLAYFAAVLSMIGDWLRVISKKTKEEVGEFRAHAAEWTANVTAEFKETRRRLSVEIYDKFQRATSIKRKLSAELAGNHNQELTPCRRTLSVNHLTSERDVLPPLLKTESIYLNGLTPHCAGEEIAVIENIK

SEQ ID NO: 12617 - protein, 144 aa, Homo sapiens
MKPKMKYSTNKISTAKWKNTASKALCFKLGNKVLLSYYESQHPSNESGDGVDGKMLMVTLSPTKDFWLHANNKEHSVELHKCEKPLPDQAFFVLHNMHSNCVSFECKTDPGVFIGVKDNHLALIKVDSSENLCTENILFKLSET

SEQ ID NO: 12618 - protein, 447 aa, Homo sapiens [sequence omitted]

SEQ ID NO: 12619 - protein, 163 aa, Homo sapiens
MLRVLVGAVLPAMLLAAPPPINKLALFPDKSAWCEAKNITQIVGHSGCEAKSIQNRACLGQCFSYSVPNTFPQSTESLVHCDSCMPAQSMWEIVTLECPGHEEVPRVDKLVEKILHCSCQACGKEPSHEGLSVYVQGEDGPGSQPGTHPHPHPHPHPGGQTPE

SEQ ID NO: 12620 - protein, 574 aa, Homo sapiens
MGTTGLESLSLGDRGAAPTVTSSERLVPDPPNDLRKEDVAMELERVGEDEEQMMIKRSSECNPLLQEPIASAQFGATAGTECRKSVPCGWERVVKQRLFGKTAGRFDVYFISPQGLKFRSKSSLANYLHKNGETSLKPEDFDFTVLSKRGIKSRYKDCSMAALTSHLQNQSNNSNWNLRTRSKCKKDVFMPPSSSSELQESRGLSNFTSTHLLLKEDEGVDDVNFRKVRKPKGKVTILKGIPIKKTKKGCRKSCSGFVQSDSKRESVCNKADAESEPVAQKSQLDRTVCISDAGACGETLSVTSEENSLVKKKERSLSSGSNFCSEQKTSGIINKFCSAKDSEHNEKYEDTFLESEEIGTKVEVVERKEHLHTDILKRGSEMDNNCSPTRKDFTEDTIPRTQIERRKTSLYFSSKYNKEALSPPRRKAFKKWTPPRSPFNLVQETLFHDPWKLLIATIFLNRTSGKMAIPVLWKFLEKYPSAEVARTADWRDVSELLKPLGLYDLRAKTIVKFSDEYLTKQWKYPIELHGIGKYGNDSYRIFCVNEWKQVHPEDHKLNKYHDWLWENHEKLSLS

SEQ ID NO: 12621 - protein, 86 aa, Homo sapiens
MGLDKMKKTACGFCFVEYYSRADAENAMRYINGTRLDDRIIRTDWDAGFKEGRQYGRGRSGGQVRDEYRQDYDAGRGGYGKLAQNQ

SEQ ID NO: 12622 - protein, 335 aa, Homo sapiens
MDTGVIEGGLNVTLTIRLLMHGKEVGSIIGKKGESVKKMREESGARINISEGNCPERIITLAGPTNAIFKAFAMIIDKLEEDISSSMTNSTAASRPPVTLRLVVPASQCGSLIGKGGCKIKEIRESTGAQVQVAGDMLPNSTERAITIAGIPQSIIECVKQICVVMLETLSQSPPKGVTIPYRPKPSSSPVIFAGGQAYTIQGQYAIPQPDLTKLHQLAMQQSHFPMTHGNTGFSGIESSSPEVKGYWAGLDASAQTTSHELTIPNDLIGCIIGRQGAKINEIRQMSGAQIKIANPVEGSTDRQVTITGSAASISLAQYLINVRLSSETGGMGSS

SEQ ID NO: 12623 - protein, 245 aa, Homo sapiens
MAAGSRTSLLLAFGLLCLSWLQEGSAFPTIPLSRLFDNAMLRARRLYQLAYDTYQEFEEAYILKEQKYSFLQNPQTSLCFSESIPTPSNRVKTQQKSNLELLRISLLLIQSWLEPVQLLRSVFANSLVYGASDSNVYRHLKDLEEGIQTLIGWKMAAPGLGRSSISPTASLTQNRTTMTHCSRTTGCSTASGRTWTRSRHSCASCSAALWRAAVASSCPGGIPVTPPQCLSWSWKVLLQCPPALS

SEQ ID NO: 12624 - protein, 82 aa, Homo sapiens
MASILRSPQALQLTLALIKPDAVAHPLILEAVHQQILSNKFLIVRMRELLWRKEDCQRFYREHEGKEVEVQKVALGTRMKVS

SEQ ID NO: 12625 - protein, 175 aa, Homo sapiens
MDSWFILVLLGSGLICVSANNATTVAPSVGITRLINSSTAEPVKEEAKTSNPTSSLTSLSVAPTFSPNITLGPTYLTTVNSSDSDNGTTRTASTNSIGITISPNGTWLPDNQFTDARTEPWEGNSSTAATTPETFPPSGNSDSKDRRDETPIIAVMVALSSLLVIVFIIIVLYML

SEQ ID NO: 12626 - protein, 305 aa, Homo sapiens
MGILLGLLLLGHLTVDTYGRPILEVPESVTGPWKGDVNLPCTYDPLQGYTQVLVKWLVQRGSDPVTIFLRDSSGDHIQQAKYQGRLHVSHKVPGDVSLQLSTLEMDDRSHYTCEVTWQTPDGNQVVRDKITELRVQKHSSKLLKTKTEAPTTMTYPLKATSTVKQSWDWTTDMDGYLGETSAGPGKSLPVFAIILIISLCCMVVFTMAYIMLCRKTSQQEHVYEAARAHAREANDSGETMRVAIFASGCSSDEPTSQNLGNNYSDEPCIGQEYQIIAQINGNYARLLDTVPLDYEFLATEGKSVC

SEQ ID NO: 12627 - protein, 1086 aa, Homo sapiens
MAAAGQLCLLYLSAGLLSRLGAAFNLDTREDNVIRKYGDPGSLFGFSLAMHWQLQPEDKRLLLVGAPRAEALPLQRANRTGGLYSCDITARGPCTRIEFDNDADPTSESKEDQWMGVTVQSQGPGGKVVTCAHRYEKRQHVNTKQESRDIFGRCYVLSQNLRIEDDMDGGDWSFCDGRLRGHEKFGSCQQGVAATFTKDFHYIVFGAPGTYNWKGLLFLTSVSYTDPDQFVYKTRPPREQPDTFPDVMMNSYLGFSLDSGKGIVSKDEITFVSGAPRANHSGAVVLLKRDMKSAHLLPEHIFDGEGLASSFGYDVAVVDLNKDGWQDIVIGAPQYFDRDGEVGGAVYVYMNQQGRWNNVKPIRLNGTKDSMFGIAVKNIGDINQDGYPDIAVGAPYDDLGKVFIYHGSANGINTKPTQVLKGISPYFGYSIAGNMDLDRNSYPDVAVGSLSDSVTIFRSRPVINIQKTITVTPNRIDLRQKTACGAPSGICLQVKSCFEYTANPAGYNPSISIVGTLEAEKERRKSGLSSRVQFRNQGSEPKYTQELTLKRQKQKVCMEETLWLQDNIRDKLRPIPITASVEIQEPSSRRRVNSLPEVLPILNSDEPKTAHIDVHFLKEGCGDDNVCNSNLKLEYKFCTREGNQDKFSYLPIQKGVPELVLKDQKDIALEITVTNSPSNPRNPTKDGDDAHEAKLIATFPDTLTYSAYRELRAFPEKQLSCVANQNGSQADCELGNPFKRNSNVTFYLVLSTTEVTFDTPDLDINLKLETTSNQDNLAPITAKAKVVIELLLSVSGVAKPSQVYFGGTVVGEQAMKSEDEVGSLIEYEFRVINLGKPLTNLGTATLNIQWPKEISNGKWLLYLVKVESKGLEKVTCEPQKEINSLNLTESHNSRKKREITEKQIDDNRKFSLFAERKYQTLNCSVNVNCVNIRCPLRGLDSKASLILRSRLWNSTFLEEYSKLNYLDILMRAFIDVTAAAENIRLPNAGTQVRVTVFPSKTVAQYSGVPWWIILVAILAGILMLALLVFILWKCGFFKRSRYDDSVPRYHAVRIRKEEREIKDEKYIDNLEKKQWITKWNENESYS

SEQ ID NO: 12628 - protein, 124 aa, Homo sapiens
MIQAILVFNNHGKPRLVRFYQRFPEEIQQQIVRETFHLVLKRDDNICNFLEGGSLIGGSDYKLIYRHYATLYFVFCVDSSESELGILDLIQLKKRERKKSQCNTLQTGTLALWEQGPDIRTRRL

SEQ ID NO: 12629 - protein, 116 aa, Homo sapiens
MVGGEAAAAVEELVSGVRQAADFAEQFRSYSESEKQWKARMEFILRHLPDYRDPPDGSGRLDQLLSLSMVWANHLFLGCSYNKDLLDKVMEMADGIEVEDLPQFTTRSELMKKHQS

SEQ ID NO: 12630 - protein, 105 aa, Homo sapiens
MIYTMKKVHALWASVCLLLNLAPAPLNADSEEDEEHTIITDTELPPLKLMHSFCAFKADDGPCKAIMKRFFFNIFTRQCEEFIYGGCEGNQNRFESLEECKKMCT

SEQ ID NO: 12631 - protein, 104 aa, Homo sapiens
MRVVTIVILLCFCKAAELRKASPGSVRSRVNHGRAGGGRRGSNPVKRYAPGLPCDVYTYLHEKYLDCQERKLVYVLPGWPQDLLHMLLARNKIRTLKNNMFSKF

SEQ ID NO: 12632 - protein, 62 aa, Homo sapiens
MYGKIIFVLLLSEIVSISALSTTEVAMHTSTSSSVTKSYISSQTNGETGQLVHRFTVPVFAD

SEQ ID NO: 12633 - protein, 232 aa, Homo sapiens
MWQLLLPTALLLLVSAGMRTDLPKAVVFLEPQWYSVLEKDSVTLKCQGAYSPEDNSTQWFHNENLISSQASSYFIDAATVNDSGEYRCQTNLSTLSDPVQLEVHIGWLLLQAPRWVFKEEDPIHLRCHSWKNTALHKVTYLQNGKDRKYFHHNSDFHIPKATLKDSGSYFCRGLVGSKNVSSETVNITITQGLAVSTISSFSPPGYQVSFCLVMVLLFAVDTGLYFSVKTNI

SEQ ID NO: 12634 - protein, 434 aa, Homo sapiens
MLLLVTSLLLCELPHPAFLLIPEKSDLRTVAPASSLNVRFDSRTMNLSWDCQENTTFSKCFLTDKKNRVVEPRLSNNECSCTFREICLHEGVTFEVHVNTSQRGFQQKLLYPNSGREGTAAQNFSCFIYNADLMNCTWARGPTAPRDVQYFLYIRNSKRRREIRCPYYIQDSGTHVGCHLDNLSGLTSRNYFLVNGTSREIGIQFFDSLLDTKKIERFNPPSNVTVRCNTTHCLVRWKQPRTYQKLSYLDFQYQLDVHRKNTQPGTENLLINVSGDLENRYNFPSSEPRAKHSVKIRAADVRILNWSSWSEAIEFGSHSVTQAGVQWHNLGSLQPPSPRLKRFSCLRLPGSDDGNLGSVYIYVLLIVGTLVCGIVLGFLFKRFLRIQRLFPPVPQIKDKLNDNHEVEDEIIWEEFTPEEGKGYREEVLTVKEIT

SEQ ID NO: 12635 - protein, 1095 aa, Homo sapiens
MEADGAGEQMRPLLTRGPDEEAVVDLGKTSSTVNTKFEKEELESHRAVYIGVHVPFSKESRRRHRHRGHKHHHRRRKDKESDKEDGRESPSYDTPSQRVQFILGTEDDDEEHIPHDLFTEMDELCYRDGEEYEWKETARWLKFEEDVEDGGDRWSKPYVATLSLHSLFELRSCILNGTVMLDMRASTLDEIADMVLDNMIASGQLDESIRENVREALLKRHHHQNEKRFTSRIPLVRSFADIGKKHSDPHLLERNGILASPQSAPGNLDNSKSGEIKGNGSGGSRENSTVDFSKVDMNFMRKIPTGAEASNVLVGEVDFLERPIIAFVRLAPAVLLTGLTEVPVPTRFLFLLLGPAGKAPQYHEIGRSIATLMTDEIFHDVAYKAKDRNDLLSGIDEFLDQVTVLPPGEWDPSIRIEPPKSVPSQEKRKIPVFHNGSTPTLGETPKEAAHHAGPELQRTGRLFGGLILDIKRKAPFFLSDFKDALSLQCLASILFLYCACMSPVITFGGLLGEATEGRISAIESLFGASLTGIAYSLFAGQPLTILGSTGPVLVFEKILYKFCRDYQLSYLSLRTSIGLWTSFLCIVLVATDASSLVCYITRFTEEAFAALICIIFIYEALEKLFDLGETYAFNMHNNLDKLTSYSCVCTEPPNPSNETLAQWKKDNITAHNISWRNLTVSECKKLRGVFLGSACGHHGPYIPDVLFWCVILFFTTFFLSSFLKQFKTKRYFPTKVRSTISDFAVFLTIVIMVTIDYLVGVPSPKLHVPEKFEPTHPERGWIISPLGDNPWWTLLIAAIPALLCTILIFMDQQITAVIINRKEHKLKKGAGYHLDLLMVGVMLGVCSVMGLPWFVAATVLSISHVNSLKVESECSAPGEQPKFLGIREQRVTGLMIFILMGLSVFMTSVLKFIPMPVLYGVFLYMGVSSLKGIQLFDRIKLFGMPAKHQPDLIYLRYVPLWKVHIFTVIQLTCLVLLWVIKVSAAAVVFPMMVLALVFVRKLMDLCFTKRELSWLDDLMPESKKKKEDDKKKKEKEEAERMLQDDDDTVHLPFEGGSLLQIPVKALKYSPDKPVSVKISFEDEPRKKYVDAETSL

SEQ ID NO: 12636 - protein, 153 aa, Homo sapiens
MGPEALSSLLLLLLVASGDADMKGHFDPAKCRYALGMQDRTIPDSDISASSSWSDSTAARHSRLESSDGDGAWCPAGSVFPKEEEYLQVDLQRLHLVALVGTQGRHAGGLGKEFSRSYRLRYSRDGRRWMGWKDRWGQEVISGNEDPEGVVLK

SEQ ID NO: 12637 - protein, 251 aa, Homo sapiens
MSGARSKLALFLCGCYVVALGAHTGEESVADHHEAEYYVAAVYEHPSILSLNPLALISRQEALELMNQNLDIYEQQVMTAAQKDVQIIVFPEDGIHGFNFTRTSIYPFLDFMPSPQVVRWNPCLEPHRFNDTEVLQRLSCMAIRGDMFLVANLGTKEPCHSSDPRCPKDGRYQFNTNVVFSNNGTLVDRYRKHNLYFEAAFDVPLKVDLITFDTPFAGRFGIFTCFDILFFDPAIRVLRDYKVKHVVYPTA

SEQ ID NO: 12638 - protein, 240 aa, Homo sapiens
MWFLTTLLLWGWLLLQVSSRVFTEGEPLALRCHAWKDKLVYNVLYYRNGKAFKFFHWNSNLTILKTNISHNGTYHCSGMGKHRYTSAGISVTVKELFPAPVLNASVTSPLLEGNLVTLSCETKLLLQRPGLQLYFSFYMGSKTLRGRNTSSEYQILTARREDSGLYWCEAATEDGNVLKRSPELELQVLGLQLPTPVWFHVLFYLAVGIMFLVNTVLWVTIRKELKRKKKWDLEISLDSG

SEQ ID NO: 12639 - protein, 174 aa, Homo sapiens
MLRAALPALLLPLLGLAAAAVADCPSSTWIQFQDSCYIFLQEAIKVESIEDVRNQCTDHGADMISIHNEEENAFILDTLKKQWKGPDDILLGMFYDTDVPYKRKYLSDNHILISALVIASTVILTVLGAIIWFLYKKHSDSRFTTVFSTAPQSPYNEDCVLVVGEENEYPVQFD

SEQ ID NO: 12640 - protein, 57 aa, Homo sapiens
MLPLTMTVLILLLLPTGQAAPKDGVTRPDSEVQHQLLPNPFQPGQEQLGSPLPLCPP

SEQ ID NO: 12641 - protein, 521 aa, Homo sapiens
MPSPQLLVLFGSQTGTAQDVSERLGREARRRRLGCRVQALDSYPVVNLINEPLVIFVCATTGQGDPPDNMKNFWRFIFRKNLPSTALCQMDFAVLGLGDSSYAKFNFVAKKLHRRLLQLGGSALLPVCLGDDQHELGLPSKFTLLFLQEAPSTGSEGQRVAHPGSQEPPSESKPFLAPMISNQRVTGPSHFQDVRLIEFDILGSGISFAAGDVVLIQPSNSAAHVQRFCQVLGLDPDQLFMLQPREPDVSSPTRLPQPCSMRHLVSHYLDIASVPRRSFFELLACLSLHELEREKLLEFSSAQGQEELFEYCNRPRRTILEVLCDFPHTAAAIPPDYLLDLIPVIRPRAFSIASSLLTHPSRLQILVAVVQFQTRLKEPRRGLCSSWLASLDPGQGPVRVPLWVRPGSLAFPETPDTPVIMVGPGTGVAPFRAAIQERVAQGQTGNFLFFGCRWRDQDFYWEAEWQELEKRDCLTLIPAFSREQEQKVYVQHRLRELGSLVWELLDRQATPSPCQRTSRKP

SEQ ID NO: 12642 - protein, 218 aa, Homo sapiens
MFLSTSKHGRQEAMLLFLLSALVLLTQPLGYLEAEMKTYSHRTMPSACTLVMCSSVESGLPGRDGRDGREGPRGEKGDPGLPGAAGQAGMPGQAGPVGPKGDNGSVGEPGPKGDTGPSGPPGPPGVPGPAGREGPLGKQGNIGPQGKPGPKGEAGPKGEVGAPGMQGSAGARGLAGPKGERGVPGERGVPGNTGAAGSAGAMGPQGSPGARGPPGLKG

SEQ ID NO: 12643 - protein, 866 aa, Homo sapiens
MATGTGKHKLLSTGPTEPWSIREKLCLASSVMRSGDQNWVSVSRAIKPFAEPGRPPDWFSQKHCASQYSELLETTETPKRKRGEKGEVVETVEDVIVRKLTAERVEELKKVIKETQERYRRLKRDAELIQAGHMDSRLDELCNDIATKKKLEEEEAEVKRKATDAAYQARQAVKTPPRRLPTVMVRSPIDSASPGGDYPLGDLTPTTMEEATSGVTPGTLPSTPVTSFPGIPDTLPPGSAPLEAPMTPVTDDSPQKKMLGQKATPPPSPLLSELLKKGSLLPTSPRLVNESEMAVASGHLNSTGVLLEVGGVLPMIHGGEIQQTPNTVAASPAASVSQPDNCVPMEAVGDPHTVTVSMDSSEISMIINSIKEECFRSGVAEAPVGSKAPSIDGKEELDLAEKMDIAVSYTGEELDFETVGDIIAIIEDKVDDHPEVLDVAAVEAALSFCEENDDPQSLPGPWEHPIQQERDKPVPLPAPEMTVKQERLDFEETENKGIHELVDIREPSAEIKVEPAEPEPVISGAEIVAGVVPATSMEPPELRSQDLDEELGSTAAGEIVEADVAIGKGDETPLTNVKTEASPESMLSPSHGSNPIEDPLEAETQHKFEMSDSLKEESGTIFGSQIKDAPGEDEEEDGVSEAASLEEPKEEDQGEGYLSEMDNEPPVSESDDGFSIHNATLQSHTLADSIPSSPASSQFSVCSEDQEAIQAQKIWKKAIMLVWRAAANHRYANVFLQPVTDDIAPGYHSIVQRPMDLSTIKKNIENGLIRSTAEFQRDIMLMFQNAVMYNSSDHDVYHMAVEMQRDVLEQIQQFLATQLIMQTSESGISAKSLRGRDSTRKQDASEKDGGTRGRRCAIEADMKMKK

SEQ ID NO: 12644 - protein, 273 aa, Homo sapiens
MWKRWLALALALVAVAWVRAEQCKPHKRPVCGSNGKTYLNHCELHRDACLTGSKIQVDYDGHCKEKKSVSPSASPVVCYQSNRDELRRRIIQWLEAEIIPDGWFSKGSNYSEILDKYFKNFDNGDSRLDSSEFLKFVEQNETAINITTYPDQENNKLLRGLCVDALIELSDENADWKLSFQEFLKCLNPSFNPPEKKCALEDETYADGAETEVDCNRCVCACGNWVCTAMTCDGKNQKGAQTQTEEEMTRYVQELQKHQETAEKTKRVSTKEI

SEQ ID NO: 12645 - protein, 372 aa, Homo sapiens
MDSVVFEDVDVNFTQEEWALLDPSQKNLYRDVMQETFRNLASVGKKWKDQKIEDEYKNPRRNLRGLMGERLLESKKDHQHGEILTQVPDDMLKKKTPRVKSCGEVSVGHASLNRHHRADTGHKPYEYQEYGQKPYKCTYCKKAFSDLPYFRTHEWAHTGGKPYDCEECGKSFISRSSIRRHRIMHSGDGPYKCNFCGKALMCLSLYLIHKRTHTGEKPYECKQCGKAFSHSGSLRIHERTHTGEKPYECSECGKAFHSSTCLHAHKITHTGEKPYECKQCGKAFVSFNSVRYHERTHTGEKPYECKQCGKAFRSASHLRTHGRTHTGEKPYECKQCGKAFGCASSVKIHERTHTGEKPCSSNTSKGQGEKIA

SEQ ID NO: 12646 - protein, 390 aa, Homo sapiens
MRKMLAAVSRVLSGASQKPASRVLVASRNFANDATFEIKKCDLHRLEEGPPVTTVLTREDGLKYYRMMQTVRRMELKADQLYKQKIIRGFCHLCDGQEACCVGLEAGINPTDHLITAYRAHGFTFTRGLSVREILAELTGRKGGCAKGKGGSMHMYAKNFYGGNGIVGAQVPLGAGIALACKYNGKDEVCLTLYGDGAANQGQIFEAYNMAALWKLPCIFICENNRYGMGTSVERAAASTDYYKRGDFIPGLRVDGMDILCVREATRFAAAYCRSGKGPILMELQTYRYHGHSMSDPGVSYRTREEIQEVRSKSDPIMLLKDRMVNSNLASVEELKEIDVEVRKEIEDAAQFATADPEPPLEELGYHIYSSDPPFEVRGANQWIKFKSVS

SEQ ID NO: 12647 - protein, 283 aa, Homo sapiens
MPHRKERPSGSSLHTHGSTGTAEGGNMSRLSLTRSPVSPLAAQGIPLPAQLTKSNAPVHIDVGGHMYTSSLATLTKYPDSRISRLFNGTEPIVLDSLKQHYFIDRDGEIFRYVLSFLRTSKLLLPDDFKDFSLLYEEARYYQLQPMVRELERWQQEQEQRRRSRACDCLVVRVTPDLGERIALSGEKALIEEVFPETGDVMCNSVNAGWNQDPTHVIRFPLNGYCRLNSVQVLERLFQRGFSVAASCGGGVDSSQFSEYVLCREERRPQPTPTAVRIKQEPLD

SEQ ID NO: 12648 - protein, 599 aa, Homo sapiens
MDPGDAAILESSLRILYRLFESVLPPLPAALQSRMNVIDHVRDMAAAGLHSNVRLLSSLLLTMSNNNPELFSPPQKYQLLVYHADSLFHDKEYRNAVSKYTMALQQKKALSKTSKVRPSTGNSASTPQSQCLPSEIEVKYKMAECYTMLKQDKDAIAILDGIPSRQRTPKINMMLANLYKKAGQERPSVTSYKEVLRQCPLALDAILGLLSLSVKGAEVASMTMNVIQTVPNLDWLSVWIKAYAFVHTGDNSRAISTICSLEKKSLLRDNVDLLGSLADLYFRAGDNKNSVLKFEQAQMLDPYLIKGMDVYGYLLAREGRLEDVENLGCRLFNISDQHAEPWVVSGCHSFYSKRYSRALYLGAKAIQLNSNSVQALLLKGAALRNMGRVQEAIIHFREAIRLAPCRLDCYEGLIECYLASNSIREAMVMANNVYKTLGANAQTLTLLATVCLEDPVTQEKAKTLLDKALTQRPDYIKAVVKKAELLSREQKYEDGIALLRNALANQSDCVLHRILGDFLVAVNEYQEAMDQYSIALSLDPNDQKSLEGMQKMEKEESPTDATQEEDVDDMEGSGEEGDLEGSDSEAAQWADQEQWFGMQ

SEQ ID NO: 12649 - protein, 522 aa, Homo sapiens
MAAVAVAVREDSGSGMKAELPPGPGAVGREMTKEEKLQLRKEKKQQKKKRKEEKGAEPETGSAVSAAQCQGPTRELPESGIQLGTPREKVPAGRSKAELRAERRAKQEAERALKQARKGEQGGPPPKASPSTAGETPSGVKRLPEYPQVDDLLLRRLVKKPERQQVPTRKDYGSKVSLFSHLPQYSRQNSLTQFMSIPSSVIHPAMVRLGLQYSQGLVSGSNARCIALLRALQQVIQDYTTPPNEELSRDLVNKLKPYMSFLTQCRPLSASMHNAIKFLNKEITSVGSSKREEEAKSELRAAIDRYVQEKIVLAAQAISRFAYQKISNGDVILVYGCSSLVSRILQEAWTEGRRFRVVVVDSRPWLEGRHTLRSLVHAGVPASYLLIPAASYVLPEVSKVLLGAHALLANGSVMSRVGTAQLALVARAHNVPVLVCCETYKFCERVQTDAFVSNELDDPDDLQCKRGEHVALANWQNHASLRLLNLVYDVTPPELVDLVITELGMIPCSSVPVVLRVKSSDQ

SEQ ID NO: 12650 - protein, 339 aa, Homo sapiens
MEKTCIDALPLTMNSSEKQETVCIFGTGDFGRSLGLKMLQCGYSVVFGSRNPQKTTLLPSGAEVLSYSEAAKKSGIIIIAIHREHYDFLTELTEVLNGKILVDISNNLKINQYPESNAEYLAHLVPGAHVVKAFNTISAWALQSGALDASRQVFVCGNDSKAKQRVMDIVRNLGLTPMDQGSLMAAKEIEKYPLQLFPMWRFPFYLSAVLCVFLFFYCVIRDVIYPYVYEKKDNTFRMAISIPNRIFPITALTLLALVYLPGVIAAILQLYRGTKYRRFPDWLDHWMLCRKQLGLVALGFAFLHVLYTLVIPIRYYVRWRLGNLTVTQVNLFLYIFFCS

SEQ ID NO: 12651 - protein, 198 aa, Homo sapiens
MSTVDLARVGACILKHAVTGEAVELRSLWREHACVVAGLRRFGCVVCRWIAQDLSSLAGLLDQHGVRLVGVGPEALGLQEFLDGDYFAGELYLDESKQLYKELGFKRYNSLSILPAALGKPVRDVAAKAKAVGIQGNLSGDLLQSGGLLVVSKGGDKVLLHFVQKSPGDYVPKEHILQVLGISAEVCASDPPQCDREV

SEQ ID NO: 12652 - protein, 2240 aa, Homo sapiens
MLRGPGPGLLLLAVQCLGTAVPSTGASKSKRQAQQMVQPQSPVAVSQSKPGCYDNGKHYQINQQWERTYLGNALVCTCYGGSRGFNCESKPEAEETCFDKYTGNTYRVGDTYERPKDSMIWDCTCIGAGRGRISCTIANRCHEGGQSYKIGDTWRRPHETGGYMLECVCLGNGKGEWTCKPIAEKCFDHAAGTSYVVGETWEKPYQGWMMVDCTCLGEGSGRITCTSRNRCNDQDTRTSYRIGDTWSKKDNRGNLLQCICTGNGRGEWKCERHTSVQTTSSGSGPFTDVRAAVYQPQPHPQPPPYGHCVTDSGVVYSVGMQWLKTQGNKQMLCTCLGNGVSCQETAVTQTYGGNSNGEPCVLPFTYNGRTFYSCTTEGRQDGHLWCSTTSNYEQDQKYSFCTDHTVLVQTRGGNSNGALCHFPFLYNNHNYTDCTSEGRRDNMKWCGTTQNYDADQKFGFCPMAAHEEICTTNEGVMYRIGDQWDKQHDMGHMMRCTCVGNGRGEWTCIAYSQLRDQCIVDDITYNVNDTFHKRHEEGHMLNCTCFGQGRGRWKCDPVDQCQDSETGTFYQIGDSWEKYVHGVRYQCYCYGRGIGEWHCQPLQTYPSSSGPVEVFITETPSQPNSHPIQWNAPQPSHISKYILRWRPKNSVGRWKEATIPGHLNSYTIKGLKPGVVYEGQLISIQQYGHQEVTRFDFTTTSTSTPVTSNTVTGETTPFSPLVATSESVTEITASSFVVSWVSASDTVSGFRVEYELSEEGDEPQYLDLPSTATSVNIPDLLPGRKYIVNVYQISEDGEQSLILSTSQTTAPDAPPDTTVDQVDDTSIVVRWSRPQAPITGYRIVYSPSVEGSSTELNLPETANSVTLSDLQPGVQYNITIYAVEENQESTPVVIQQETTGTPRSDTVPSPRDLQFVEVTDVKVTIMWTPPESAVTGYRVDVIPVNLPGEHGQRLPISRNTFAEVTGLSPGVTYYFKVFAVSHGRESKPLTAQQTTKLDAPTNLQFVNETDSTVLVRWTPPRAQITGYRLTVGLTRRGQPRQYNVGPSVSKYPLRNLQPASEYTVSLVAIKGNQESPKATGVFTTLQPGSSIPPYNTEVTETTIVITWTPAPRIGFKLGVRPSQGGEAPREVTSDSGSIVVSGLTPGVEYVYTIQVLRDGQERDAPIVNKVVTPLSPPTNLHLEANPDTGVLTVSWERSTTPDITGYRITTTPTNGQQGNSLEEVVHADQSSCTFDNLSPGLEYNVSVYTVKDDKESVPISDTIIPAVPPPTDLRFTNIGPDTMRVTWAPPPSIDLTNFLVRYSPVKNEEDVAELSISPSDNAVVLTNLLPGTEYVVSVSSVYEQHESTPLRGRQKTGLDSPTGIDFSDITANSFTVHWIAPRATITGYRIRHHPEHFSGRPREDRVPHSRNSITLTNLTPGTEYVVSIVALNGREESPLLIGQQSTVSDVPRDLEVVAATPTSLLISWDAPAVTVRYYRITYGETGGNSPVQEFTVPGSKSTATISGLKPGVDYTITVYAVTGRGDSPASSKPISINYRTEIDKPSQMQVTDVQDNSISVKWLPSSSPVTGYRVTTTPKNGPGPTKTKTAGPDQTEMTIEGLQPTVEYVVSVYAQNPSGESQPLVQTAVTTIPAPTDLKFTQVTPTSLSAQWTPPNVQLTGYRVRVTPKEKTGPMKEINLAPDSSSVVVSGLMVATKYEVSVYALKDTLTSRPAQGVVTTLENVSPPRRARVTDATETTITISWRTKTETITGFQVDAVPANGQTPIQRTIKPDVRSYTITGLQPGTDYKIYLYTLNDNARSSPVVIDASTAIDAPSNLRFLATTPNSLLVSWQPPRARITGYIIKYEKPGSPPREVVPRPRPGVTEATITGLEPGTEYTIYVIALKNNQKSEPLIGRKKTVQKTPFVTHPGYDTGNGIQLPGTSGQQPSVGQQMIFEEHGFRRTTPPTTATPIRHRPRPYPPNVGQEALSQTTISWAPFQDTSEYIISCHPVGTDEEPLQFRVPGTSTSATLTGLTRGATYNVIVEALKDQQRHKVREEVVTVGNSVNEGLNQPTDDSCFDPYTVSHYAVGDEWERMSESGFKLLCQCLGFGSGHFRCDSSRWCHDNGVNYKIGEKWDRQGENGQMMSCTCLGNGKGEFKCDPHEATCYDDGKTYHVGEQWQKEYLGAICSCTCFGGQRGWRCDNCRRPGGEPSPEGTTGQSYNQYSQRYHQRTNTNVNCPIECFMPLDVQADREDSRE

SEQ ID NO: 12653 - protein, 117 aa, Homo sapiens
MEFGLSWVFLVAILKGVQCEVQLVESGGGLVQPGGSLRLSCAASGFTFSSYWMHWVRQAPGKGLVWVSRINSDGSSTSYADSVKGRFTISRDNAKNTLYLQMNSLRAEDTAVYYCAR

SEQ ID NO: 12654 - protein, 543 aa, Homo sapiens
MRLHRLRARLSAVACGLLLLLVRGQGQDSASPIRTTHTGQVLGSLVHVKGANAGVQTFLGIPFAKPPLGPLRFAPPEPPESWSGVRDGTTHPAMCLQDLTAVESEFLSQFNMTFPSDSMSEDCLYLSIYTPAHSHEGSNLPVMVWIHGGALVFGMASLYDGSMLAALENVVVVIIQYRLGVLGFFSTGDKHATGNWGYLDQVAALRWVQQNIAHFGGNPDRVTIFGESAGGTSVSSLVVSPISQGLFHGAIMESGVALLPGLIASSADVISTVVANLSACDQVDSEALVGCLRGKSKEEILAINKPFKMIPGVVDGVFLPRHPQELLASADFQPVPSIVGVNNNEFGWLIPKVMRIYDTQKEMDREASQAALQKMLTLLMLPPTFGDLLREEYIGDNGDPQTLQAQFQEMMADSMFVIPALQVAHFQCSRAPVYFYEFQHQPSWLKNIRPPHMKADHVKFTEEEEQLSRKMMKYWANFARNGNPNGEGLPHWPLFDQEEQYLQLNLQPAVGRALKAHRLQFWKKALPQKIQELEEPEERHTEL

SEQ ID NO: 12655 - protein, 92 aa, Homo sapiens
MFRQFYLWTCLASGIILGSLFEICLGQYDDDCKLARGGPPATIVAIDEESRNGTILVDNMLIKGTAGGPDPTIELSLKDNVDYWVLMDPVKQ

SEQ ID NO: 12656 - protein, 492 aa, Homo sapiens
MDFLLGNPFSSPVGQRIEKATDGSLQSEDWALNMEICDIINETEEGPKDALRAVKKRIVGNKNFHEVMLALTVLETCVKNCGHRFHVLVASQDFVESVLVRTILPKNNPPTIVHDKVLNLIQSWADAFRSSPDLTGVVTIYEDLRRKGLEFPMTDLDMLSPIHTPQRTVFNSETQSGQDSVGTDSSQQEDSGQHAAPLPAPPILSGDTPIAPTPEQIGKLRSELEMVSGNVRVMSEMLTELVPTQAEPADLELLQELNRTCRAMQQRVLELIPQIANEQLTEELLIVNDNLNNVFLRHERFERFRTGQTTKAPSEAEPAADLIDMGPDPAATGNLSSQLAGMNLGSSSVRAGLQSLEASGRLEDEFDMFALTRGSSLADQRKEVKYEAPQATDGLAGALDARQQSTGAIPVTQACLMEDIEQWLSTDVGNDAEEPKGVTSEEFDKFLEERAKAADRLPNLSSPSAEGPPGPPSGPAPRKKTQEKDDDMLFAL

SEQ ID NO: 12657 - protein, 189 aa, Homo sapiens
MASPFALLMALVVLSCKSSCSLGCDLPETHSLDNRRTLMLLAQMSRISPSSCLMDRHDFGFPQEEFDGNQFQKAPAISVLHELIQQIFNLFTTKDSSAAWDEDLLDKFCTELYQQLNDLEACVMQEERVGETPLMNADSILAVKKYFRRITLYLTEKKYSPCAWEVVRAEIMRSLSLSTNLQERLRRKE

SEQ ID NO: 12658 - protein, 2036 aa, Homo sapiens
MDRNYPSAGFGDPLGAGAGWSYERSAKASLVYGSSRTSHPETDILHRQAYAAPHPLQSYATNHHPAGLSGLFDTGLHHAGSAGPDASVMNLISALESRGPQPGPSASSLLSQFRSPSWQTAMHTPGPTELFISGALPGSSTFPSSSALSAYQHPASFGSRPFPVPSSLSLQDPPFSPPANGLLSPHDVLHLKPSQAPTVPSSLGFERLAGGGVLGPAGLGPAQTPPYRPGPPDPPPPPRHLPTQFNLLASSSAAAAAAEQSSPQLYNFSGAAPGPPPPERALPRQDTVIKHYQRPASAQPPPPPPPAHALQHYLSCGGSYPSMGHRANLACSPLGGGEPSPGAGEPSKAGPSGATAGASGRATGPEAAGGGGAGGGGGGYRPIIQSPGYKTGKGGYGAAAGGATRPPPPRSTATPKCQSLGGPAAAYATGKASGAGGAGGQAYSPGQPQGLLGPQAYGQGFGGGQAQDLSKAPSYSGGPPQPPSGPPPPGLATCQSYSPDQLQGQLYGVQGEPYPGPAAHSQGLPTASPSLSYSTGHSPALSGHGGGWGPSSLGGGGEASPSHIIRPLQSPPATGRPPGVGSPGAPGKYLSSVLASAPFLAPPGAGSYAAGAGGYKGKGDGSELLAGPGGPPAERTEDEEFLIQHLLQAPSPPRTSGADGLVGEDGAADASKGLGGSGGAGGPPGTPYELAKEDPQRYHLQSVIRTSASLDEGATAALELGLGRLKEKKKGPERGGETPEGLATSVVHYGAGAKELGAFLQKSPPPPPPTAQSTQPTPHGLLLEAGGPDLPLVLPPPPPQLLPSVLSHAPSPSPSASKVGVHLLEPATRDGAPQPPPPPPPPPPPMPLQLEAHLRSHGLEPAAPSPRLRPEESLDPPGAMQELLGALEPLPPAPGDTGVGPPNSEGKDPAGAYRSPSPQGTKAPRFVPLTSICFPDSLLQDEERSFFPTMEEMFGGGAADDYGKAGPPEDEGDPKAGAGPPPGPPAYDPYGPYCPGRASGAGPETPGLGLDPNKPPELPSTVNAEPLGLIQSGPHQAAPPPPPPPPPPPAPASEPKGGLTSPIFCSTKPKKLLKTSSFHLLRRRDPPFQTPKKLYAQEYEFEADEDKADVPADIRLNPRRLPDLVSSCRSRPALSPLGDIDFCPPNPGPDGPRRRGRKPTKAKRDGPPRPRGRPRIRPLEVPTTAGPASASTPTDGAKKPRGRGRGRGRKAEEAGGTRLEPLKPLKIKLSVPKAGEGLGTSSGDAISGTDHNSLDSSLTREKIEAKIKEVEEKQPEMKSGFMASFLDFLKSGKRHPPLYQAGLTPPLSPPKSVPPSVPARGLQPQPPATPAVPHPPPSGAFGLGGALEAAESEGLGLGCPSPCKRLDEELKRNLETLPSFSSDEEDSVAKNRDLQESISSAISALDDPPLAGPKDTSTPDGPPLAPAAAVPGPPPLPGLPSANSNGTPEPPLLEEKPPPTPPPAPTPQPQPPPPPPPPQPALPSPPPLVAPTPSSPPPPPLPPPPPPAMPSPPPPPPPAAAPLAAPPEEPAAPSPEDPELPDTRPLHLAKKQETAAVCGETDEEAGESGGEGIFRERDEFVIRAEDIPSLKLALQTGREPPPIWRVQKALLQKFTPEIKDGQRQFCATSNYLGYFGDAKNRYQRLYVKFLENVNKKDYVRVCARKPWHRPPVPVRRSGQAKNPVSAGGSSAPPPKAPAPPPKPETPEKTTSEKPPEQTPETAMPEPPAPEKPSLLRPVEKEKEKEKVTRGERPLRGERATSGRQTRPERSLATGQPATSRLPKARPTKVKAEPPPKKRKKWLKEAGGNATAGGGPPGSSSDSESSPGAPSEDERAVPGRLLKTRAMREMYRSYVEMLVSTALDPDMIQALEDTHDELYLPPMRKIDGLLNEHKKKVLKRLSLSPALQDALHTFPQLQVEQSGEGSPEEGAVRLRPAGEPYNRKTLSKLKRSVVRAQEFKVELEKSGYYTLYHSLHHYKYHTFLRCRDQTLAIEGGAEDLGQEEVVQQCMRNQPWLEQLFDSFSDLLAQAQAHSRCG

SEQ ID NO: 12659 - protein, 42 aa, Homo sapiens
MNWHLPLFLLASVTLPSICSHFNPLSLEELGSNTGIQVFNQI

SEQ ID NO: 12660 - protein, 103 aa, Homo sapiens
MAAHLLPICALFLTLLDMAQGFRGPLLPNRPFTTVWNANTQWCLERHGVDVDVSVFDVVANPGQTFRGPDMTIFYSSQLGTYPYYTPTGEPVFGGLPQNASLI

SEQ ID NO: 12661 - protein, 1610 aa, Homo sapiens
MKKEGSSGSFRLQPNTGSLSRAVSWINFSSLSRQTKRLFRSDGELSVCGQQVEVDDENWIYRAQPRKAVSNLDEESRWTVHYTAPWHQQENVFLPTTRPPCVEDLHRQAKLNLKSVLRECDKLRHDGYRSSQYYSQGPTFAANASPFCDDYQDEDEETDQKCSLSSSEEERFISIRRPKTPASSDFSDLNTQTNWTKSLPLPTPEEKMRQQAQTVQADVVPINITASGTGQDDADGHSVYTPDHYSTLGRFNSCRSAGQRSETRDSSCQTEDVKVVPPSMRRIRAQKGQGIAAQMGHFSGSSGNMSVLSDSAGIVFPSRLDSDAGFHSLPRSGARANIQSLEPRLGALGPAGDMNGTFLYQRGHPQADENLGHLGGASGTGTLLRPKSQELRHFESENIMSPACVVSPHATYSTSIIPNATLSSSSEVIAIPTAQSAGQRESKSSGSSHARIKSRDHLISRHAVKGDPQSPGRHWNEGHATILSQDLDPHSPGEPALLSLCDSAVPLNAPANRENGSQAMPYNCRNNLAFPAHPQDVDGKSESSYSGGGGHSSSEPWEYKSSGNGRASPLKPHLATPGYSTPTSNMSSCSLDQTSNKEDAGSLYSEDHDGYCASVHTDSGHGSGNLCNSSDGFGNPRHSVINVFVGRAQKNQGDRSNYQDKSLSRNISLKKAKKPPLPPSRTDSLRRIPKKSSQCNGQVLNESLIATLQHSLQLSLPGKSGSSPSQSPCSDLEEPWLPRSRSQSTVSAGSSMTSATTPNVYSLCGATPSQSDTSSVKSEYTDPWGYYIDYTGMQEDPGNPAGGCSTSSGVPTGNGPVRHVQEGSRATMPQVPGGSVKPKIMSPEKSHRVISPSSGYSSQSNTPTALTPVPVFLKSVSPANGKGKPKPKVPERKSSLISSVSISSSSTSLSSSTSTEGSGTMKKLDPAVGSPPAPPPPPVPSPPFPCPADRSPFLPPPPPVTDCSQGSPLPHSPVFPPPPPEALIPFCSPPDWCLSPPRPALSPILPDSPVSLPLPPPLLPSSEPPPAPPLDPKFMKDTRPPFTNSGQPESSRGSLRPPSTKEETSRPPMPLITTEALQMVQLRPVRKNSGAEAAQLSERTAQEQRTPVAPQYHLKPSAFLKSRNSTNEMESESQPASVTSSLPTPAKSSSQGDHGSAAERGGPVSRSPGAPSAGEAEARPSPSTTPLPDSSPSRKPPPISKKPKLFLVVPPPQKDFAVEPAENVSEALRAVPSPTTGEEGSVHSREAKESSAAQAGSHATHPGTSVLEGGAAGSMSPSRVEANVPMVQPDVSPAPKQEEPAENSADTGGDGESCLSQQDGAAGVPETNAAGSSSEACDFLKEDGNDEVMTPSRPRTTEDLFAAIHRSKRKVLGRRDSDDDHSRNHSPSPPVTPTGAAPSLASPKQVGSIQRSIRKSSTSSDNFKALLLKKGSRSDTSARMSAAEMLKNTDPRFQRSRSEPSPDAPESPSSCSPSKNRRAQEEWAKNEGLMPRSLSFSGPRYGRSRTPPSAASSRYSMRNRIQSSPMTVISEGEGEAVEPVDSIARGALGAAEGCSLDGLAREEMDEGGLLCGEGPAASLQPQAPGPVDGTASAEGREPSPQCGGSLSEES

SEQ ID NO: 12662 - protein, 444 aa, Homo sapiens
MAPGRAVAGLLLLAAAGLGGVAEGPGLAFSEDVLSVFGANLSLSAAQLQHLLEQMGAASRVGVPEPGQLHFNQCLTAEEIFSLHGFSNATQITSSKFSVICPAVLQQLNFHPCEDRPKHKTRPSHSEVWGYGFLSVTIINLASLLGLILTPLIKKSYFPKILTFFVGLAIGTLFSNAIFQLIPEAFGFDPKVDSYVEKAVAVFGGFYLLFFFERMLKMLLKTYGQNGHTHFGNDNFGPQEKTHQPKALPAINGVTCYANPAVTEANGHIHFDNVSVVSLQDGKKEPSSCTCLKGPKLSEIGTIAWMITLCDALHNFIDGLAIGASCTLSLLQGLSTSIAILCEEFPHELGDFVILLNAGMSTRQALLFNFLSACSCYVGLAFGILVGNNFAPNIIFALAGGMFLYISLADMFPEMNDMLREKIIKWATDDIKSQLHLLWIYTAR

SEQ ID NO: 12663 - protein, 151 aa, Homo sapiens
MAGLTAAAPRPGVLLLLLSILHPSRPGGVPGAIPGGVPGGVFYPALGPGGKPLKPGLGAFPAVTFPGALVPGGVADAAAAYKAAKAGAGLGGVPGVGGLGVSAGAVVPQPGAGVKPGKVPGVGLPGVYPGGVLPGARFPGVGVLPGVPTGA

SEQ ID NO: 12664 - protein, 674 aa, Homo sapiens
MQPRTPLVLCVLLSQVLLLTSAEDLDCTPGFQQKVFHINQPAEFIEDQSILNLTFSDCKGNDKLRYEVSSPYFKVNSDGGLVALRNITAVGKTLFVHARTPHAEDMAELVIVGGKDIQGSLQVVDSDRPERSKFRLTGKGVDQEPKGIFRINENTGSVSVTRTLDREVIAVYQLFVETTDVNGKTLEGPVPLEVIVIDQNDNRPIFREGPYIGHVMEGSPTGTTVMRMTAFDADDPATDNALLRYNIRQQTPDKPSPNMFYIDPEKGDIVTVVSPALLDRETLENPKYELIIEAQDMAGLDVGLTGTATATIMIDDKNDHSPKFTKKEFQATVEEGAVGVIVNLTVEDKDDPTTGAWRAAYTIINGNPGQSFEIHTNPQTNEGMLSVVKPLDYEISAFHTLLIKVENEDPLVPDVSYGPSSTATVHITVLDVNEGPVFYPDPMMVTRQEDLSVGSVLLTVNATDPDSLQHQTIRYSVYKDPAGWLNINPINGTVDTTAVLDRESPFVDNSVYTALFLAIDSGNPPATGTGTLLITLEDVNDNAPFIYPTVAEVCDDAKNLSVVILGASDKDLHPNTDPFKFEIHKQAVPDKVWKISKINNTHALVSLLQNLNKANYNLPIMVTDSGKPPMTNITDLRVQVCSCRNSKVDCNAAGALRFSLPSVLLLSLFSLACL

SEQ ID NO: 12665 - protein, 424 aa, Homo sapiens
MSDSKCDSQFYSVQVADSTFTVLKRYQQLKPIGSGAQGIVCAAFDTVLGINVAVKKLSRPFQNQTHAKRAYRELVLLKCVNHKNIISLLNVFTPQKTLEEFQDVYLVMELMDANLCQVIHMELDHERMSYLLYQMLCGIKHLHSAGIIHRDLKPSNIVVKSDCTLKILDFGLARTACTNFMMTPYVVTRYYRAPEVILGMGYKENVDIWSVGCIMGELVKGCVIFQGTDHIDQWNKVIEQLGTPSAEFMKKLQPTVRNYVENRPKYPGIKFEELFPDWIFPSESERDKIKTSQARDLLSKMLVIDPDKRISVDEALRHPYITVWYDPAEAEAPPPQIYDAQLEEREHAIEEWKELIYKEVMDWEERSKNGVVKDQPSDAAVSSNATPSQSSSINDISSMSTEQTLASDTDSSLDASTGPLEGCR

SEQ ID NO: 12666 - protein, 286 aa, Homo sapiens
MSAPLDAALHALQEEQARLKMRLWDLQQLRKELGDSPKDKVPFSVPKIPLVFRGHTQQDPEVPKSLVSNLRIHCPLLAGSALITFDDPKVAEQVLQQKEHTINMEECRLRVQVQPLELPMVTTIQMSSQLSGRRVLVTGFPASLRLSEEELLDKLEIFFGKTRNGGGDVDVRELLPGSVMLGFARDGVAQRLCQIGQFTVPLGGQQVPLRVSPYVNGEIQKAEIRSQPVPRSVLVLNIPDILDGPELHDVLEIHFQKPTRGGGEVEALTVVPQGQQGLAVFTSESG

SEQ ID NO: 12667 - protein, 178 aa, Homo sapiens
MKPLSLLIEILIILGVTIKTIKAEEHNKRQKERNVTTQVSVNEIKQYLSHILEQRTSSNVINKRENLLEKKKNQRKIRIKGIQNKDILKRNKNHLQKQAEKNFTDEGDQLFKMGIKVLQQSKSQKQKEEILMPTWMFLCLRSFLPGLLCSSFCPRAAYFSLSMDGLYIKSLPTFCQSS

SEQ ID NO: 12668 - protein, 324 aa, Homo sapiens
MLWFRGALGVWVWLAAASQPCKNSNAGRRGQHPRRPAGSCVQRLTMRNTSKELQGATHRYAPCDWYYHVPVKRSEKAVDAPPASQIPGLSNLGDSHSENLPGTRRYWIKETDSEYVKLAKQGGRPDLLKHFAPGTRKGSPVAYSLPDWYIHHSKPPTASQQEVRAVSMPDYMVHEEFNPDQANGSYASRRGPFDFDMKTVWQREAEELEKEKKKLRLPAIDSKYLSKAGTPLGPKNPAGSRLSFPPVNGYKDEWLQQQQRADSDKRTPKTSRASVLSQSPRDLEGPQDAARLQDAEASEGPEDTPESSQSPEESVSASTPAELK

SEQ ID NO: 12669 - protein, 1153 aa, Homo sapiens
MKALDEPPYLTVGTDVSAKYRGAFCEAKIKTAKRLVKVKVTFRHDSSTVEVQDDHIKGPLKVGAIVEVKNLDGAYQEAVINKLTDASWYTVVFDDGDEKTLRRSSLCLKGERHFAESETLDQLPLTNPEHFGTPVIGKKTNRGRRSNHIPEEESSSSSSDEDEDDRKQIDELLGKVVCVDYISLDKKKALWFPALVVCPDCSDEIAVKKDNILVRSFKDGKFTSVPRKDVHEITSDTAPKPDAVLKQAFEQALEFHKSRTIPANWKTELKEDSSSSEAEEEEEEEDDEKEKEDNSSEEEEEIEPFPEERENFLQQLYKFMEDRGTPINKRPVLGYRNLNLFKLFRLVHKLGGFDNIESGAVWKQVYQDLGIPVLNSAAGYNVKCAYKKYLYGFEEYCRSANIEFQMALPEKVVNKQCKECENVKEIKVKEENETEIKEIKMEEERNIIPREEKPIEDEIERKENIKPSLGSKKNLLESIPTHSDQEKEVNIKKPEDNENLDDKDDDTTRVDESLNIKVEAEEEKAKSGDETNKEEDEDDEEAEEEEEEEEEEEDEDDDDNNEEEEFECYPPGMKVQVRYGRGKNQKMYEASIKDSDVEGGEVLYLVHYCGWNVRYDEWIKADKIVRPADKNVPKIKHRKKIKNKLDKEKDKDEKYSPKNCKLRRLSKPPFQTNPSPEMVSKLDLTDAKNSDTAHIKSIEITSILNGLQASESSAEDSEQEDERGAQDMDNNGKEESKIDHLTNNRNDLISKEEQNSSSLLEENKVHADLVISKPVSKSPERLRKDIEVLSEDTDYEEDEVTKKRKDVKKDTTDKSSKPQIKRGKRRYCNTEECLKTGSPGKKEEKAKNKESLCMENSSNSSSDEDEEETKAKMTPTKKYNGLEEKRKSLRTTGFYSGFSEVAEKRIKLLNNSDERLQNSRAKDRKDVWSSIQGQWPKKTLKELFSDSDTEAAASPPHPAPEEGVAEESLQTVAEEESCSPSVELEKPPPVNVDSKPIEEKTVEVNDRKAEFPSSGSNSVLNTPPTTPESPSSVTVTEGSRQQSSVTVSEPLAPNQEEVRSIKSETDSTIEVDSVAGELQDLQSEGNSSPAGFDASVSSSSSNQPEPEHPEKACTGQKRVKDAQGGGSSSKKQKRSHKATVVNNKKKGKGSAPH

SEQ ID NO: 12670 - protein, 791 aa, Homo sapiens
MQLSQDYNNEDEFGRKLRFLLQQLPPVNYSLLKFLCRFLANVASHHEEIWSANSLAAVFGPDVFHIYTDVEDMKEQEIVSRIMAGLLENYYEFFENEEEDFSSNDLSSITEQVNELSEEEEEDEKLEHIEELPEEGAEKSNDMPEVVQLRMTENILESNSVTATSTHISPISILPASTDILERTIRAAVEQHLFDLQSSIDHDLKNLQQQSVVCNNEAESIHCDGEGSNNQIDIADDIINASESNRDCSKPVASTNLDNEAMQQDCVFENEENTQSVGILLEPCSDRGDSEDGCLEREEYLLFDSDKLSHLILDSSSKICDLNANTESEVPGGQSVGVQGEAACVSIPHLDLKNVSDGDKWEASCPITFPLIDFKTMHLQRDGEEPFPAFKSWQEDSESGEAQLSPQAGRMNHHPLEEDCPPVLSHRSLDFGQSQRFLHDPEKLDSSSKALSFTRIRRSSFSSKDEKREDRTPYQLVKKLQKKIRQFEEQFERERNSKPSYSDIAANPKVLKWMTELTKLRKQIKDAKHKNSDGEFVPQTRPRSNTLPKSFGSSLDHEDEENEDEPKVIQKEKKPSKEATLELILKRLKEKRIERCLPEDIKVTKEERHIVKPLYDRYRLVKQMLTRASITPVLGSPSTKRRGQMLQPIIEGETAHFFEEIKEEEEDGVNLSSELGDMLKTAVQVQSSLENSESDVEENQEKLALDLRLSSSRAASMPELLEQLWKARAEKKKLRKTLREFEEAFYQQNGRNAQKEDRVPVLEEYREYKKIKAKLRLLEVLISKQDSSKSI

SEQ ID NO: 12671 - protein, 1222 aa, Homo sapiens
MAAARRLMALAAGISPRLQPLGPRAAGRQGRSRGFSSSCAHPDHTKEAAEAESGMAPGGPGEGDGSLVNASRDLLKEFPQPKNLLNSVIGRALGISHAKDKLVYVHTNGPKKKKVTLHIKWPKSVEVEGYGSKKIDAERQAAAAACQLFKGWGLLGPRNELFDAAKYRVLADRFGSPADSWWRPEPTMPPTSWRQLNPESIRPGGPGGLSRSLGREEEEDEEEELEEGTIDVTDFLSMTQQDSHAPLRDSRGSSFEMTDDDSAIRALTQFPLPKNLLAKVIQIATSSSTAKNLMQFHTVGTKTKLSTLTLLWPCPMTFVAKGRRKAEAENKAAALACKKLKSLGLVDRNNEPLTHAMYNLASLRELGETQRRPCTIQVPEPILRKIETFLNHYPVESSWIAPELRLQSDDILPLGKDSGPLSDPITGKPYVPLLEAEEVRLSQSLLELWRRRGPVWQEAPQLPVDPHRDTILNAIEQHPVVVISGDTGCGKTTRIPQLLLERYVTEGRGARCNVIITQPRRISAVSVAQRVSHELGPSLRRNVGFQVRLESKPPSRGGALLFCTVGILLRKLQSNPSLEGVSHVIVDEVHERDVNTDFLLILLKGLQRLNPALRLVLMSATGDNERFSRYFGGCPVIKVPGFMYPVKEHYLEDILAKLGKHQYLHRHRHHESEDECALDLDLVTDLVLHIDARGEPGGILCFLPGWQEIKGVQQRLQEALGMHESKYLILPVHSNIPMMDQKAIFQQPPVGVRKIVLATNIAETSITINDIVHVVDSGLHKEERYDLKTKVSCLETVWVSRANVIQRRGRAGRCQSGFAYHLFPRSRLEKMVPFQVPEILRTPLENLVLQAKIHMPEKTAVEFLSKAVDSPNIKAVDEAVILLQEIGVLDQREYLTTLGQRLAHISTDPRLAKAIVLAAIFRCLHPLLVVVSCLTRDPFSSSLQNRAEVDKVKALLSHDSGSDHLAFVRAVAGWEEVLRWQDRSSRENYLEENLLYAPSLRFIHGLIKQFSENIYEAFLVGKPSDCTLASAQCNEYSEEEELVKGVLMAGLYPNLIQVRQGKVTRQGKFKPNSVTYRTKSGNILLHKSTINREATRLRSRWLTYFMAVKSNGSVFVRDSSQVHPLAVLLLTDGDVHIRDDGRRATISLSDSDLLRLEGDSRTVRLLKELRRALGRMVERSLRSELAALPPSVQEEHGQLLALLAELLRGPCGSFDVRKTADD

SEQ ID NO: 12672 - protein, 1012 aa, Homo sapiens
MLLKSIFIVYIFFYSISELSLDSTLHAVNLHCNNISKIEAIDHIWNLQHLDLSSNQISRIEGLNTLTKLCTLNLSCNLITKVEGLEELINLTRLNVSYNHIDDLSGLIPLHGIKHKLRYIDLHSNRIDSIHHLLQCMVGLHFLTNLILEKDGDDNPVCRLPGYRAVILQTLPQLRILDCKNIFGEPVNLTEINSSQLQCLEGLLDNLVSSDSPLNISEDEIIDRMPVITAPIDELVPLEQFASTPSDAVLTSFMSVCQSSEPEKNNHENDLQNEIKLQKLDDQILQLLNETSNSIDNVLEKDPRPKRDTDITSESDYGNRKECNRKVPRRSKIPYDAKTIQTIKHHNKNYNSFVSCNRKMKPPYLKELYVSSSLANCPMLQESEKPKTEIIKVDQSHSEDNTYQSLVEQLDQEREKRWRAEQAENKLMDYIDELHKHANEKEDIHSLALLTTDRLKEIIFRERNSKGQLEVMVHKLQNEIKKLTVELMKAKDQQEDHLKHLRTLEKTLEKMERQKRQQQAAQIRLIQEVELKASAADREIYLLRTSLHREREQAQQLHQLLALKEQEHRKELETREFFTDADFQDALAKEIAKEEKKHEQMIKEYQEKIDVLSQQYMDLENEFRIALTVEARRFQDVKDGFENVATELAKSKHALIWAQRKENESSSLIKDLTCMVKEQKTKLAEVSKLKQETAANLQNQINTLEILIEDDKQKSIQIELLKHEKVQLISELAAKESLIFGLRTERKVWGHELAQQGSSLAQNRGKLEAQIESLSRENECLRKTNESDSDALRIKCKIIDDQTETIRKLKDCLQEKDEHIKRLQEKITEIEKCTQEQLDEKSSQLDEVLEKLERHNERKEKLKQQLKGKEVELEEIRKAYSTLNRKWHDKGELLCHLETQVKEVKEKFENKEKKLKAERDKSIELQKNAMEKLHSMDDAFKRQVDAIVEAHQAEIAQLANEKQKCIDSANLKVHQIEKEMRELLEETCKNKKTMEAKIKQLAFALNEIQQDM

SEQ ID NO: 12673 - protein, 168 aa, Homo sapiens
MNSKGQYPTQPTYPVQPPGNPVYPQTLHLPQAPPYTDAPPAYSELYRPSFVHPGAATVPTMSAAFPGASLYLPMAQSVAVGPLGSTIPMAYYPVGPIYPPGSTVLVEGGYDAGARFGAGATAGNIPPPPPGCPPNAAQLAVMQGANVLVTQRKGNFFMGGSDGGYTIW

SEQ ID NO: 12674 - protein, 769 aa, Homo sapiens
MYPQGRHPAPHQPGQPGFKFTVAESCDRIKDEFQFLQAQYHSLKVEYDKLANEKTEMQRHYVMYYEMSYGLNIEMHKQTEIAKRLNTILAQIMPFLSQEHQQQVAQAVERAKQVTMTELNAIIGQQQLQAQHLSHATHGPPVQLPPHPSGLQPPGIPPVTGSSSGLLALGALGSQAHLTVKDEKNHHELDHRERESSANNSVSPSESLRASEKHRGSADYSMEAKKRKAEEKDSLSRYDSDGDKSDDLVVDVSNEDPATPRVSPAHSPPENGLDKARSLKKDAPTSPASVASSSSTPSSKTKDLGHNDKSSTPGLKSNTPTPRNDAPTPGTSTTPGLRSMPGKPPGMDPIASALRTPISITSSYAAPFAMMSHHEMNGSLTSPGAYAGLHNIPPQMSAAAAAAAAAYGRSPMVSFGAVGFDPHPPMRATGLPSSLASIPGGKPAYSFHVSADGQMQPVPFPHDALAGPGIPRHARQINTLSHGEVVCAVTISNPTRHVYTGGKGCVKIWDISQPGSKSPISQLDCLNRDNYIRSCKLLPDGRTLIVGGEASTLTIWDLASPTPRIKAELTSSAPACYALAISPDAKVCFSCCSDGNIAVWDLHNQTLVRQFQGHTDGASCIDISHDGTKLWTGGLDNTVRSWDLREGRQLQQHDFTSQIFSLGYCPTGEWLAVGMESSNVEVLHHTKPDKYQLHLHESCVLSLKFAYCGKWFVSTGKDNLLNAWRTPYGASIFQSKESSSVLSCDISADDKYIVTGSGDKKATVYEVIY

SEQ ID NO: 12675 - protein, 111 aa, Homo sapiens
AAAWLLLGAATGLTRGPAAAFTAARSDAGIRAMCSEIILRQEVLKDGFHRDLLIKVKFGESIEDLHTCRLLIKQDIPAGLYVDPYELASLRERNITEEKTSWRRLWLPSDN

SEQ ID NO: 12676 - protein, 1163 aa, Homo sapiens
MDRNREAEMELRRGPSPTRAGRGHEVDGDKATCHTCCICGKSFPFQSSLSQHMRKHTGEKPYKCPYCDHRASQKGNLKIHIRSHRTGTLIQGHEPEAGEAPLGEMRASEGLDACASPTKSASACNRLLNGASQADGARVLNGASQADSGRVLLRSSKKGAEGSACAPGEAKAAVQCSFCKSQFERKKDLELHVHQAHKPFKCRLCSYATLREESLLSHIERDHITAQGPGSGEACVENGKPELSPGEFPCEVCGQAFSQTWFLKAHMKKHRGSFDHGCHICGRRFKEPWFLKNHMKAHGPKTGSKNRPKSELDPIATINNVVQEEVIVAGLSLYEVCAKCGNLFTNLDSLNAHNAIHRRVEASRTRAPAEEGAEGPSDTKQFFLQCLNLRPSAAGDSCPGTQAGRRVAELDPVNSYQAWQLATRGKVAEPAEYLKYGAWDEALAGDVAFDKDRREYVLVSQEKRKREQDAPAAQGPPRKRASGPGDPAPAGHLDPRSAARPNRRAAATTGQGKSSECFECGKIFRTYHQMVLHSRVHRRARRERDSDGDRAARARCGSLSEGDSASQPSSPGSACAAADSPGSGLADEAAEDSGEEGAPEPAPGGQPRRCCFSEEVTSTELSSGDQSHKMGDNASERDTGESKAGIAASVSILENSSRETSRRQEQHRFSMDLKMPAFHPKQEVPVPGDGVEFPSSTGAEGQTGHPAEKLSDLHNKEHSGGGKRALAPDLMPLDLSARSTRDDPSNKETASSLQAALVVHPCPYCSHKTYYPEVLWMHKRIWHRVSCNSVAPPWIQPNGYKSIRSNLVFLSRSGRTGPPPALGGKECQPLLLARFTRTQVPGGMPGSKSGSSPLGVVTKAASMPKNKESHSGGPCALWAPGPDGYRQTKPCHGQEPHGAATQGPLAKPRQEASSKPVPAPGGGGFSRSATPTPTVIARAGAQPSANSKPVEKFGVPPAGAGFAPTNKHSAPDSLKAKFSAQPQGPPPAKGEGGAPPLPPREPPSKAAQELRTLATCAAGSRGDAALQAQPGVAGAPPVLHSIKQEPVAEGHEKRLDILNIFKTYIPKDFATLYQGWGVSGPGLEHRGTLRTQARPGEFVCIECGKSFHQPGHLRAHMRAHSVVFESDGPRGSEVHTTSADAPKQGRDHSNTGTVQTVPLRKGT

SEQ ID NO: 12677 - protein, 442 aa, Homo sapiens
MAATDLERFSNAEPEPRSLSLGGHVGFDSLPDQLVSKSVTQGFSFNILCVGETGIGKSTLMNTLFNTTFETEEASHHEACVRLRPQTYDLQESNVQLKLTIVDAVGFGDQINKDESYRPIVDYIDAQFENYLQEELKIRRSLFDYHDTRIHVCLYFITPTGHSLKSLDLVTMKKLDSKVNIIPIIAKADTISKSELHKFKIKIMGELVSNGVQIYQFPTDDEAVAEINAVMNAHLPFAVVGSTEEVKVGNKLVRARQYPWGVVQVENENHCDFVKLREMLIRVNMEDLREQTHSRHYELYRRCKLEEMGFQDSDGDSQPFSLQETYEAKRKEFLSELQRKEEEMRQMFVNKVKETELELKEKERELHEKFEHLKRVHQEEKRKVEEKRRELEEETNAFNRRKAAVEALQSQALHATSQQPLRKDKDKKKASGWSSIYSVTIP

SEQ ID NO: 12678 - protein, 644 aa, Homo sapiens
MDDIADRMRMDAGEVTLVNHNSVFKTHLLPQTGFPEDQLSLSDQQILSSRQGHLDRSFTCSTRSAAYNPSYYSDNPSSDSFLGSGDLRTFGQSANGQWRNSTPSSSSSLQKSRNSRSLYLETRKTSSGLSNSFAGKSNHHCHVSAYEKSFPIKPVPSPSWSGSCRRSLLSPKKTQRRHVSTAEETVQEEEREIYRQLLQMVTGKQFTIAKPTTHFPLHLSRCLSSSKNTLKDSLFKNGNSCASQIIGSDTSSSGSASILTNQEQLSHSVYSLSSYTPDVAFGSKDSGTLHHPHHHHSVPHQPDNLAASNTQSEGSDSVILLKVKDSQTPTPSSTFFQAELWIKELTSVYDSRARERLRQIEEQKALALQLQNQRLQEREHSVHDSVELHLRVPLEKEIPVTVVQETQKKGHKLTDSEDEFPEITEEMEKEIKNVFRNGNQDEVLSEAFRLTITRKDIQTLNHLNWLNDEIINFYMNMLMERSKEKGLPSVHAFNTFFFTKLKTAGYQAVKRWTKKVDVFSVDILLVPIHLGVHWCLAVVDFRKKNITYYDSMGGINNEACRILLQYLKQESIDKKRKEFDTNGWQLFSKKSQEIPQQMNGSDCGMFACKYADCITKDRPINFTQQHMPYFRKRMVWEILHRKLL

SEQ ID NO: 12679 - protein, 2490 aa, Homo sapiens
MHVSLAEALEVRGGPLQEEEIWAVLNQSAESLQELFRKVSLADPAALGFIISPWSLLLLPSGSVSFTDENISNQDLRAFTAPEVLQNQSLTSLSDVEKIHIYSLGMTLYWGADYEVPQSQPIKLGDHLNSILLGMCEDVIYARVSVRTVLDACSAHIRNSNCAPSFSYVKHLVKLVLGNLSGTDQLSCNSEQKPDRSQAIRDRLRGKGLPTGRSSTSDVLDIQKPPLSHQTFLNKGLSKSMGFLSIKDTQDENYFKDILSDNSGREDSENTFSPYQFKTSGPEKKPIPGIDVLSKKKIWASSMDLLCTADRDFSSGETATYRRCHPEAVTVRTSTTPRKKEARYSDGSIALDIFGPQKMDPIYHTRELPTSSAISSALDRIRERQKKLQVLREAMNVEEPVRRYKTYHGDVFSTSSESPSIISSESDFRQVRRSEASKRFESSSGLPGVDETLSQGQSQRPSRQYETPFEGNLINQEIMLKRQEEELMQLQAKMALRQSRLSLYPGDTIKASMLDITRDPLREIALETAMTQRKLRNFFGPEFVKMTIEPFISLDLPRSILTKKGKNEDNRRKVNIMLLNGQRLELTCDTKTICKDVFDMVVAHIGLVEHHLFALATLKDNEYFFVDPDLKLTKVAPEGWKEEPKKKTKATVNFTLFFRIKFFMDDVSLIQHTLTCHQYYLQLRKDILEERMHCDDETSLLLASLALQAEYGDYQPEVHGVSYFRMEHYLPARVMEKLDLSYIKEELPKLHNTYVGASEKETELEFLKVCQRLTEYGVHFHRVHPEKKSQTGILLGVCSKGVLVFEVHNGVRTLVLRFPWRETKKISFSKKKITLQNTSDGIKHGFQTDNSKICQYLLHLCSYQHKFQLQMRARQSNQDAQDIERASFRSLNLQAESVRGFNMGRAISTGSLASSTLNKLAVRPLSVQAEILKRLSCSELSLYQPLQNSSKEKNDKASWEEKPREMSKSYHDLSQASLYPHRKNVIVNMEPPPQTVAELVGKPSHQMSRSDAESLAGVTKLNNSKSVASLNRSPERRKHESDSSSIEDPGQAYVLGMTMHSSGNSSSQVPLKENDVLHKRWSIVSSPEREITLVNLKKDAKYGLGFQIIGGEKMGRLDLGIFISSVAPGGPADLDGCLKPGDRLISVNSVSLEGVSHHAAIEILQNAPEDVTLVISQPKEKISKVPSTPVHLTNEMKNYMKKSSYMQDSAIDSSSKDHHWSRGTLRHISENSFGPSGGLREGSLSSQDSRTESASLSQSQVNGFFASHLGDQTWQESQHGSPSPSVISKATEKETFTDSNQSKTKKPGISDVTDYSDRGDSDMDEATYSSSQDHQTPKQESSSSVNTSNKMNFKTFSSSPPKPGDIFEVELAKNDNSLGISVTVLFDKGGVNTSVRHGGIYVKAVIPQGAAESDGRIHKGDRVLAVNGVSLEGATHKQAVETLRNTGQVVHLLLEKGQSPTSKEHVPVTPQCTLSDQNAQGQGPEKVKKTTQVKDYSFVTEENTFEVKLFKNSSGLGFSFSREDNLIPEQINASIVRVKKLFPGQPAAESGKIDVGDVILKVNGASLKGLSQQEVISALRGTAPEVFLLLCRPPPGVLPEIDTALLTPLQSPAQVLPNSSKDSSQPSCVEQSTSSDENEMSDKSKKQCKSPSRRDSYSDSSGSGEDDLVTAPANISNSTWSSALHQTLSNMVSQAQSHHEAPKSQEDTICTMFYYPQKIPNKPEFEDSNPSPLPPDMAPGQSYQPQSESASSSSMDKYHIHHISEPTRQENWTPLKNDLENHLEDFELEVELLITLIKSEKGSLGFTVTKGNQRIGCYVHDVIQDPAKSDGRLKPGDRLIKVNDTDVTNMTHTDAVNLLRAASKTVRLVIGRVLELPRIPMLPHLLPDITLTCNKEELGFSLCGGHDSLYQVVYISDINPRSVAAIEGNLQLLDVIHYVNGVSTQGMTLEEVNRALDMSLPSLVLKATRNDLPVVPSSKRSAVSAPKSTKGNGSYSVGSCSQPALTPNDSFSTVAGEEINEISYPKGKCSTYQIKGSPNLTLPKESYIQEDDIYDDSQEAEVIQSLLDVVDEEAQNLLNENNAAGYSCGPGTLKMNGKLSEERTEDTDCDGSPLPEYFTEATKMNGCEEYCEEKVKSESLIQKPQEKKTDDDEITWGNDELPIERTNHEDSDKDHSFLTNDELAVLPVVKVLPSGKYTGANLKSVIRVLRGLLDQGIPSKELENLQELKPLDQCLIGQTKENRRKNRYKNILPYDATRVPLGDEGGYINASFIKIPVGKEEFVYIACQGPLPTTVGDFWQMIWEQKSTVIAMMTQEVEGEKIKCQRYWPNILGKTTMVSNRLRLALVRMQQLKGFVVRAMTLEDIQTREVRHISHLNFTAWPDHDTPSQPDDLLTFISYMRHIHRSGPIITHCSAGIGRSGTLICIDVVLGLISQDLDFDISDLVRCMRLQRHGMVQTEDQYIFCYQVILYVLTRLQAEEEQKQQPQLLK

SEQ ID NO: 12680 - protein, 210 aa, Homo sapiens
MRPRLWLLLAAQLTVLHGNSVLQQTPAYIKVQTNKMVMLSCEAKISLSNMRIYWLRQRQAPSSDSHHEFLALWDSAKGTIHGEEVEQEKIAVFRDASRFILNLTSVKPEDSGIYFCMIVGSPELTFGKGTQLSVVDFLPTTAQPTKKSTLKKRVCRLPRPETQKGPLCSPITLGLLVAGVLVLLVSLGVAIHLCCRRRRARLRFMKQLYK

SEQ ID NO: 12681 - protein, 964 aa, Homo sapiens
MSSHHTTFPFDPERRVRSTLKKVFGFDSFKTPLQESATMAVVKGITIVVSPLIALIQDQVDHLLTLKVRVSSLNSKLSAQERKELLADLEREKPQTKILYITPEMAASSSFQPTLNSLVSRHLLSYLVVDEAHCVSQWGHDFRPDYLRLGALRSRLGHAPCVALTATATPQVQEDVFAALHLKKPVAIFKTPCFRANLFYDVQFKELISDPYGNLKDFCLKALGQEADKGLSGCGIVYCRTREACEQLAIELSCRGVNAKAYHAGLKASERTLVQNDWMEEKVPVIVATISFGMGVDKANVRFVAHWNIAKSMAGYYQESGRAGRDGKPSWCRLYYSRNDRDQVSFLIRKEVAKLQEKRGNKASDKATIMAFDALVTFCEELGCRHAAIAKYFGDALPACAKGCDHCQNPTAVRRRLEALERSSSWSKTCIGPSQGNGFDPELYEGGRKGYGDFSRYDEGSGGSGDEGRDEAHKREWNLFYQKQMQLRKGKDPKIEEFVPPDENCPLKEASSRRIPRLTVKAREHCLRLLEEALSSNRQSTRTADEADLRAKAVELEHETFRNAKVANLYKASVLKKVADIHRASKDGQPYDMGGSAKSCSAQAEPPEPNEYDIPPASHVYSLKPKRVGAGFPKGSCPFQTATELMETTRIREQAPQPERGGEHEPPSRPCGLLDEDGSEPLPGPRGEVPGGSAHYGGPSPEKKAKSSSGGSSLAKGRASKKQQLLATAAHKDSQSIARFFCRRVESPALLASAPEAEGACPSCEGVQGPPMAPEKYTGEEDGAGGHSPAPPQTEECLRERPSTCPPRDQGTPEVQPTPAKDTWKGKRPRSQQENPESQPQKRPRPSAKPSVVAEVKGSVSASEQGTLNPTAQDPFQLSAPGVSLKEAANVVVKCLTPFYKEGKFASKELFKGFARHLSHLLTQKTSPGRSVKEEAQNLIRHFFHGRARCESEADWHGLCGPQR

SEQ ID NO: 12682 - protein, 281 aa, Homo sapiens
MGEIKVSPDYNWFRGTVPLKKIIVDDDDSKIWSLYDAGPRSIRCPLIFLPPVSGTADVFFRQILALTGWGYRVIAVHLFGASLGGFLAQKFAEYTHKSPRVHSLILCNSFSDTSIFNQTWTANSFWLMPAFMLKKIVLGNFSSGPVDPMMADAIDFMVDRLESLGQSELASRLTLNCQNSYVEPHKIRDIPVTIMDVFDQSALSTEAKEEMYKLYPNARRAHLKTGGNFPYLCRSAEVNLYVQIHLLQFHGTKYAAIDPSMVSAEELEVQKGSLGISQEEQ

SEQ ID NO: 12683 - protein, 189 aa, Homo sapiens
MVAWRSAFLVCLAFSLATLVQRGSGDFDDFNLEDAVKETSSVKQPWDHTTTTTTNRPGTTRAPAKPPGSGLDLADALDDQDDGRRKPGIGGRGDGRYGSNDDPGSGMVAEPGTIAGVASALAMALIGAVSSYISYQQKKFCFSIQQGLNADYVKGENLEAVVCEEPQVKYSTLHTQSAEPPPPPEPARI

SEQ ID NO: 12684 - protein, 305 aa, Homo sapiens
MASPGCLWLLAVALLPWTCASRALQHLDPPAPLPLVIWHGMDSCCNPLSMGAIKKMVEKKIPGIYVLSLEIGKTLMEDVENSFFLNVNSQVTTVCQALAKDPKLQQGYNAMGFSQGGQFLRAVAQRCPSPPMINLISVGGQHQGVFGLPRCPGESSHICDFIRKTLNAGAYSKVVQERLVQAEYWHDPIKEDVYRNHSIFLADINQERGINESYKKNLMALKKFVMVKFLNDSIVDPVDSEWFGFYRSGQAKETIPLQETSLYTQDRLGLKEMDNAGQLVFLATEGDHLQLSEEWFYAHIIPFLG

SEQ ID NO: 12685 - protein, 50 aa, Homo sapiens
MKVFFLFAVLFCLVQTNSVHISHQEARGPSFKICVGFLGPRWARGCSTGN

SEQ ID NO: 12686 - protein, 375 aa, Homo sapiens
MMEDDGQPRTLYVGNLSRDVTEVLILQLFSQIGPCKSCKMITEHTSNDPYCFVEFYEHRDAAAALAAMNGRKILGKEVKVNWATTPSSQKKDTSNHFHVFVGDLSPEITTEDIKSAFAPFGKISDARVVKDMATGKSKGYGFVSFYNKLDAENAIVHMGGQWLGGRQIRTNWATRKPPAPKSTQENNTKQLRFEDVVNQSSPKNCTVYCGGIASGLTDQLMRQTFSPFGQIMEIRVFPEKGYSFVRFSTHESAAHAIVSVNGTTIEGHVVKCYWGKESPDMTKNFQQVDYSQWGQWSQVYGNPQQYGQYMANGWQVPPYGVYGQPWNQQGFGVDQSPSAAWMGGFGAQPPQGQAPPPVIPPPNQAGYGMASYQTQ

SEQ ID NO: 12687 - protein, 436 aa, Homo sapiens
MKFQGPLACLLLALCLGSGEAGPLQSGEESTGTNIGEALGHGLGDALSEGVGKAIGKEAGGAAGSKVSEALGQGTREAVGTGVRQVPGFGVADALGNRVGEAAHALGNTGHEIGRQAEDVIRHGADAVRGSWQGVPGHNGAWETSGGHGIFGSQGGLGGQGQGNPGGLGTPWVHGYPGNSAGSFGMNPQGAPWGQGGNGGPPNFGTNTQGAVAQPGYGSVRASNQNEGCTNPPPSGSGGGSSNSGGGSGSQSGSSGSGSNGDNNNGSSSGGSSSGSSSGGSSGGSSGGSSGNSGGSRGDSGSESSWGSSTGSSSGNHGGSGGGNGHKPGCEKPGNEARGSGESGIQGFRGQGVSSNMREISKEGNRLLGGSGDNYRGQGSSWGSGGGDAVGGVNTVNSETSPGMFNFDTFWKNFKSKLGFINWDAINKDQRSSRIP

SEQ ID NO: 12688 - protein, 201 aa, Homo sapiens
MALSWVLTVLSLLPLLEAQIPLCANLVPVPITNATLDRITGKWFYIASAFRNEEYNKSVQEIQATFFYFTPNKTEDTIFLREYQTRQNQCFYNSSYLNVQRENGTVSRYEGGREHVAHLLFLRDTKTLMFGSYLDDEKNWGLSFYADKPETTKEQLGEFYEALDCLCIPRSDVMYTDWKKDKCEPLEKQHEKERKQEEGES

SEQ ID NO: 12689 - protein, 119 aa, Homo sapiens
MKMASFLAFLLLNFRVCLLLLQLLMPHSAQFSVLGPSGPILAMVGEDADLPCHLFPTMSAETMELKWVSSSLRQVVNVYADGKEVEDRQSAPYRGRTSILRDGITAGKAALRIHNVTAS

SEQ ID NO: 12690 - protein, 101 aa, Homo sapiens
MKLWVSALLMAWFGVLSCVQAEFFTSIGHMTDLIYAEKELVQSLKEYILVEEAKLSKIKSWANKMEALTSKSAADAEGYLAHPVNAYKLVKRLNTDWPALE

SEQ ID NO: 12691 - protein, 333 aa, Homo sapiens
KILFLSSIIPFDCLLTVRALGGLLKFLGRRRIGVELEDYNVSVPILGFKKFMLTHLVNIDQDTYSVLQIFKSESHPSVYKVASGLKEGLSLFGILNRCHCKWGEKLLRLWFTRPTHDLGELSSRLDVIQFFLLPQNLDMAQMLHRLLGHIKNVPLILKRMKLSHTKVSDWQVLYKTVYSALGLRDACRSLPQSIQLFRDIAQEFSDDLHHIASLIGKVYLSPQVDFEGSLAENRFTVLPNIDPEIDEKKRRLMGLPSFLTEVARKELENLDSRIPSCSVIYIPLIGFLLSIPRLPSMVEASDFEINGLDFMFLSEEKLHYRSARTKELDALLG

SEQ ID NO: 12692 - protein, 98 aa, Homo sapiens
MPVPWFLLSLALGRSPVVLSLERLVGPQDATHCSPGLSCRLWDSDILCLPGDIVPAPGPVLAPTHLQTELVLRCQKETDCDLCLRVAVHLAVHGLCGI

SEQ ID NO: 12693 - protein, 438 aa, Homo sapiens
MDTSPLCFSILLVLCIFIQSSALGQSLKPEPFGRRAQAVETNKTLHEMKTRFLLFGETNQGCQIRINHPDTLQECGFNSSLPLVMIIHGWSESVQLSRSHVHLIGYSLGAHVSGFAGSSIGGTHKIGRITGLDAAGPLFEGSAPSNRLSPDDANFVDAIHTFTREHMGLSVGIKQPIGHYDFYPNGGSFQPGCHFLELYRHIAQHGFNAITQTIKCSHERSVHLFIDSLLHAGTQSMAYPCGDMNSFSQGLCLSCKKGRCNTLGYHVRQEPRSKSKRLFLVTRAQSPFKVYHYQFKIQFINQTETPIQTTFTMSLLGTKEKMQKIPITLGKGIASNKTYSFLITLDVDIGELIMIKFKWENSAVWANVWDTVQTIIPWSTGPRHSGLVLKTIRVKAGETQQRMTFCSENTDDLLLRPTQEKIFVKCEIKSKTSKRKIR

SEQ ID NO: 12694 - protein, 645 aa, Homo sapiens
MAEAVAAPISPWTMAATIQAMERKIESQAARLLSLEGRTGMAEKKLADCEKTAVEFGNQLEGKWAVLGTLLQEYGLLQRRLENVENLLRNRNFWILRLPPGSKGESPKEWGKLEDWQKELYKHVMRGNYETLVSLDYAISKPEVLSQIEQGKEPCNWRRPGPKIPDVPVDPSPGSGPPVPAPDLLMQIKQEGELQLQEQQALGVEAWAAGQPDIGEEPWGLSQLDSGAGDISTDATSGVHSNFSTTIPPTSWQTDLPPHHPSSACSDGTLKLNTAASTEADVKIVIKTEVQEEEVVATPVHPTDLEAHGTLFGPGQATRFFPSPAQEGAWESQGSSFPSQDPVLGLREPARPERDMGELSPAVAQEETPPGDWLFGGVRWGWNFRCKPPVGLNPRTGPEGLPYSSPDNGEAILDPSQAPRPFNEPCKYPGRTKGFGHKPGLKKHPAAPPGGRPFTCATCGKSFQLQVSLSAHQRSCGAPDGSGPGTGGGGSGSGGGGGGSGGGSARDGSALRCGECGRCFTRPAHLIRHRMLHTGERPFPCTECEKRFTERSKLIDHYRTHTGVRPFTCTVCGKSFIRKDHLRKHQRNHAAGAKTPARGQPLPTPPAPPDPFKSPASKGPLASTDLVTDWTCGLSVLGPTDGGDM

SEQ ID NO: 12695 - protein, 203 aa, Homo sapiens
MSSDFEGYEQDFAVLTAEITSKIARVPRLPPDEKKQMVANVEKQLEEAKELLEQMDLEVREIPPQSRGMYSNRMRSYKQEMGKLETDFKRSRIAYSDEVRNELLGDDGNSSENQRAHLLDNTERLERSSRRLEAGYQIAVETEQIGQEMLENLSHDREKIQRARERLRETDANLGKSSRILTGMLRRGCSVKKQCNLSLAPKA

SEQ ID NO: 12696 - protein, 1216 aa, Homo sapiens
MALAGLCALLACCWGPAAVLATAAGDVDPSKELECKLKSITVSALPFLRENDLSIMHSPSASEPKLLFSVRNDFPGEMVVVDDLENTELPYFVLEISGNTEDIPLVRWRQQWLENGTLLFHIHHQDGAPSLPGQDPTEEPQHESAEEELRILHISVMGGMIALLLSILCLVMILYTRRRWCKRRRVPQPQKSASAEAANEIHYIPSVLIGGHGRESLRNARVQGHNSSGTLSIRETPILDGYEYDITDLRHHLQRECMNGGEDFASQVTRTLDSLQGCNEKSGMDLTPGSDNAKLSLMNKYKDNIIATSPVDSNHQQATLLSHTSSSQRKRINNKARAGSAFLNPEGDSGTEAENDPQLTFYTDPSRSRRRSRVGSPRSPVNKTTLTLISITSCVIGLVCSSHVNCPLVVKITLHVPEHLIADGSRFILLEGSQLDASDWLNPAQVVLFSQQNSSGPWAMDLCARRLLDPCEHQCDPETGECLCYEGYMKDPVHKHLCIRNEWGTNQGPWPYTIFQRGFDLVLGEQPSDKIFRFTYTLGEGMWLPLSKSFVIPPAELAINPSAKCKTDMTVMEDAVEVREELMTSSSFDSLEVLLDSFGPVRDCSKDNGGCSKNFRCISDRKLDSTGCVCPSGLSPMKDSSGCYDRHIGVDCSDGFNGGCEQLCLQQMAPFPDDPTLYNILMFCGCIEDYKLGVDGRSCQLITETCPEGSDCGESRELPMNQTLFGEMFFGYNNHSKEVAAGQVLKGTFRQNNFARGLDQQLPDGLVVATVPLENQCLEEISEPTPDPDFLTGMVNFSEVSGYPVLQHWKVRSVMYHIKLNQVAISQALSNALHSLDGATSRADFVALLDQFGNHYIQEAIYGFEESCSIWYPNKQVQRRLWLEYEDISKGNSPSDESEERERDPKVLTFPEYITSLSDSGTKHMAAGVRMECHSKGRCPSSCPLCHVTSSPDTPAEPVLLEVTKAAPIYELVTNNQTQRLLQEATMSSLWCSGTGDVIEDWCRCDSTAFGADGLPTCAPLPQPVLRLSTVHEPSSTLVVLEWEHSEPPIGVQIVDYLLRQEKVTDRMDHSKVETETVLSFVDDIISGAKSPCAMPSQVPDKQLTTISLIIRCLEPDTIYMFTLWGVDNTGRRSRPSDVIVKTPCPVVDDVKAQEIADKIYNLFNGYTSGKEQQTAYNTLLDLGSPTLHRVLYHYNQHYESFGEFTWRCEDELGPR

SEQ ID NO: 12697 - protein, 231 aa, Homo sapiens
RFQIQLLILLCVLNFLSPFYFFAHVFMVLDEPHHCAVAWVKNHTFNLSAAEQLVLSVPLDTAGHPEPCLMFRPPPANASLQDILSHRFNETQPCDMGWEYPENRLPSLKNEFNLVCDRKHLKDTTQSVFMAGLLVGTLMFGPLCDRDRMGGALMEDAGRGPGPVQLLPRADGACGTRLRFPQLEAPSDHRHCAWLTALLLLLGSARICTLAPDPWEDGRGDTTDPEGGLGQ

SEQ ID NO: 12698 - protein, 823 aa, Homo sapiens
MDLDKPSVWGSLKQRTRPLLINLSKKKVKKNPSKPPDLRARHHLDRRLSLSVPDLLEAEALAPEGRPYSGPQSSYTSVPSSLSTAGIFPKSSSSSLKQSEEELDWSQEEASHLHVVETDSEEAYASPAERRRVSSNGIFDLQKTSLGGDAPEEPEKLCGSSDLNASMTSQHFEEQSVPGEASDGLSNLPSPFAYLLTIHLKEGRNLVVRDRCGTSDPYVKFKLNGKTLYKSKVIYKNLNPVWDEIVVLPIQSLDQKLRVKVYDRDLTTSDFMGSAFVILSDLELNRTTEHILKLEDPNSLEDDMGVIVLNLNLVVKQGDFKRHRWSNRKRLSASKSSLIRNLRLSESLKKNQLWNGIISITLLEGKNVSGGSMTEMFVQLKLGDQRYKSKTLCKSANPQWQEQFDFHYFSDRMGILDIEVWGKDNKKHEERLGTCKVDISALPLKQANCLELPLDSCLGALLMLVTLTPCAGVSVSDLCVCPLADLSERKQITQRYCLQNSLKDVKDVGILQVKVLKAADLLAADFSGKSDPFCLLELGNDRLQTHTVYKNLNPEWNKVFTFPIKDIHDVLEVTVFDEDGDKPPDFLGKVAIPLLSIRDGQPNCYVLKNKDLEQAFKGVIYLEMDLIYNPVKASIRTFTPREKRFVEDSRKLSKKILSRDVDRVKRITMAIWNTMQFLKSCFQWESTLRSTIAFAESEKKGLIERIYMVQDIVSTVQNVLEEIASFGERIKNTFNWTVPFLSSLACLILAAATIILYFIPLRYIILIWGINKFTKKLRNPYSIDNNELLDFLSRVPSDVQKVQYAELKLCSSHSPLRKKRSAL

SEQ ID NO: 12699 - protein, 172 aa, Homo sapiens
MAPRRARGCRTLGLPALLLLLLLRPPATRGITCPPPMSVEHADIWVKSYSLYSRERYICNSGFKRKAGTSSLTECVLNKATNVAHWTTPSLKCIKPAASSPSSNNTAATTAAIVPGSQLMPSKSPSTGTTEISSHESSHGTPSQTTAKNWELTASASHQPPGVYPQGHSDTT

SEQ ID NO: 12700 - protein, 436 aa, Homo sapiens
MWRCPLGLLLLLPLAGHLALGAQQGRGRRELAPGLHLRGIRDAGGRYCQEQDLCCRGRADDCALPYLGAICYCDLFCNRTVSDCCPDFWDFCLGVPPPFPPIQGCMHGGRIYPVLGTYWDNCNRCWQAGNHSAFWGMTLDEGIRYRLGTIRPSSSVMNMHEIYTVLNPGEVLPTAFEASEKWPNLIHEPLDQGNCAGSWAFSTAAVASDRVSIHSLGHMTPVLSPQNLLSCDTHQQQGCRGGRLDGAWWFLRRRGVVSDHCYPFSGRERDEAGPAPPCMMHSRAMGRGKRQATAHCPNSYVNNNDIYQVTPVYRLGSNDKEIMKELMENGPVQALMEVHEDFFLYKGGIYSHTPVSLGRPERYRRHGTHSVKITGWGEETLPDGRTLKYWTAANSWGPAWGERGHFRIVRGVNECDIESFVLGVWGRVGMEDMGHH

SEQ ID NO: 12701 - protein, 1093 aa, Homo sapiens
MGTGDFICISMTGGAPWGFRLQGGKEQKQPLQVAKIRNQSKASGSGLCEGDEVVSINGNPCADLTYPEVIKLMESITDSLQMLIKRPSSGISEALISENENKNLEHLTHGGYVESTTLQIRPATKTQCTEFFLAPVKTEVPLAENQRSGPDCAGSLKEETGPSYQRAPQMPDSQRGRVAEELILREKVEAVQPGPVVELQLSLSQERHKGASGPLVALPGAEKSKSPDPDPNLSHDRIVHINSIPTNEKADPFLRSSKIIQISSGRELRVIQESEAGDAGLPRVEVILDCSDRQKTEGCRLQAGKECVDSPVEGGQSEAPPSLVSFAVSSEGTEQGEDPRSEKDHSRPHKHRARHARLRRSESLSEKQVKEAKSKCKSIALLLTDAPNPNSKGVLMFKKRRRRARKYTLVSYGTGELEREADEEEEGDKEDTCEVAFLGASESEVDEELLSDVDDNTQVVNFDWDSGLVDIEKKLNRGDKMEMLPDTTGKGALMFAKRRERMDQITAQKEEDKVGGTPSREQDAAQTDGLRTTTSYQRKEEESVRTQSSVSKSYIEVSHGLGHVPQQNGFSGTSETANIQRMVPMNRTAKPFPGSVNQPATPFSPTRNMTSPIADFPAPPPYSAVTPPPDAFSRGVSSPIAGPAQPPPWPQPAPWSQPAFYDSSERIASRDERISVPAKRTGILQEAKRRSTTKPMFTFKEPKVSPNPELLSLLQNSEGKRGTGAGGDSGPEEDYLSLGAEACNFMQSSSAKQKTPPPVAPKPAVKSSSSQPVTPVSPVWSPGVAPTQPPAFPTSNPSKGTVVSSIKIAQPSYPPARPASTLNVAGPFKGPQAAVASQNYTPKPTVSTPTVNAVQPGAVGPSNELPGMSGRGAQLFAKRQSRMEKYVVDSDTVQAHAARAQSPTPSLPASWKYSSNVRAPPPVAYNPIHSPSYPLAALKSQPSAAQPSKMGKKKGKKPLNALDVMKHQPYQLNASLFTFQPPDAKDGLPQKSSVKVNSALAMKQALPPRPVNAASPTNVQASSVYSVPAYTSPPSFFAEASSPVSASPVPVGIPTSPKQESASSSYFVAPRPKFSAKKSGVTIQVWKPSVVEE

SEQ ID NO: 12702 - protein, 572 aa, Homo sapiens
MDALCGSGELGSKFWDSNLSVHTENPDLTPCFQNSLLAWVPCIYLWVALPCYLLYLRHHCRGYIILSHLSKLKMVLGVLLWCVSWADLFYSFHGLVHGRAPAPVFFVTPLVVGVTMLLATLLIQYERLQGVQSSGVLIIFWFLCVVCAIVPFRSKILLAKAEGEISDPFRFTTFYIHFALVLSALILACFREKPPFFSAKNVDPNPYPETSAGFLSRLFFWWFTKMAIYGYRHPLEEKDLWSLKEEDRSQMVVQQLLEAWRKQEKQTARHKASAAPGKNASGEDEVLLGARPRPRKPSFLKALLATFGSSFLISACFKLIQDLLSFINPQLLSILIRFISNPMAPSWWGFLVAGLMFLCSMMQSLILQHYYHYIFVTGVKFRTGIMGVIYRKALVITNSVKRASTVGEIVNLMSVDAQRFMDLAPFLNLLWSAPLQIILAIYFLWQNLGPSVLAGVAFMVLLIPLNGAVAVKMRAFQVKQMKLKDSRIKLMSEILNGIKVLKLYAWEPSFLKQVEGIRQGELQLLRTAAYLHTTTTFTWMCSPFLVRLGTGLGPCLQGSGCPGMARAHWTLP

SEQ ID NO: 12703 - protein, 72 aa, Homo sapiens
MRLLLALLGVLLSVPGPPVLSLEASEEVELASIHLSLCLRERTGLAGRRALSWAAELVSPAWLPAWSSKSRS

SEQ ID NO: 12704 - protein, 696 aa, Homo sapiens
MGFQPPAALLLRLFLLQGILRLLWGDLAFIPPFIRMSGPAVSASLVGDTEGVTVSLAVLQDEAGILPIPTCGVLNNETEDWSVTVIPGAVLEVTVRWKRGLDWCSSNETDSFSESPCILQTLLVSASHNSSCSAHLLIQVEIYANSSLTHNASENVTVIPNQVYQPLGPCPCNLTAGACDVRCCCDQECSSNLTTLFRRSCFTGVFGGDVNPPFDQLCSAGTTTRGVPDWFPFLCVQSPLANTPFLGYFYHGAVSPKQDSSFEVYVDTDAKDFADFGYKQGDPIMTVKKAYFTIPQVSLAGQCMQNAPVAFLHNFDVKCVTNLELYQERDGIINAKIKNVALGGIVTPKVIYEEATDLDKFITNTETPLNNGSTPRIVNVEEHYIFKWNNNTISEINVKIFRAEINAHQKGIMTQRFVVKFLSYNSGNEEELSGNPGYQLGKPVRALNINRMNNVTTLHLWQSAGRGLCTSATFKPILFGENVLSGCLLEVGINENCTQLRENAVERLDSLIQATHVAMRGNSDYADLSDGWLEIIRVDAPDPGADPLASSVNGMCLDIPAHLSIRILISDAGAVEGITQQEILGVETRFSSVNWQYQCGLTCEHKADLLPISASVQFIKIPAQLPHPLTRFQINYTEYDCNRNEVCWPQLLYPWTQYYQGELHSQCVAKGLLLLLFLTLALFLSNPWTRICKAYS

SEQ ID NO: 12705 - protein, 523 aa, Homo sapiens
MAALLRRLLQRERPSAASGRPVGRREANLGTDAGVAVRVRFAPSPTGFLHLGGLRTALYNYIFAKKYQGSFILRLEDTDQTRVVPGAAENIEDMLEWAGIPPDESPRRGGPAGPYQQSQRLELYAQATEALLKTGAAYPCFCSPQRLELLKKEALRNHQTPRYDNRCRNMSQEQVAQKLAKDPKPAIRFRLEQVVPAFQDLVYGWNRHEVASVEGDPVIMKSDGFPTYHLACVVDDHHMGISHVLRGSEWLVSTAKHLLLYQALGWQPPHFAHLPLLLNRDGSKLSKRQGDVFLEHFAADGFLPDSLLDIITNCGSGFAENQMGRTLPELITQFNLTQVTCHSALLDLEKLPEFNRLHLQRLVSNESQRRQLVGKLQVLVEEAFGCQLQNRDVLNPVYVERILLLRQGHICRLQDLVSPVYSYLWTRPAVGRAQLDAISEKVDVIAKRVLGLLERSSMSLTQDMLNGELKKLSEGLEGTKYSNVMKLLRMALSGQQQGPPVAEMMLALGPKEVRERIQKVVSS

SEQ ID NO: 12706 - protein, 324 aa, Homo sapiens
MIDKNQTCGVGQDSVPYMICLIHILEEWFGVEQLEDYLNFANYLLWVFTPLILLILPYFTIFLLYLTIIFLHIYKRKNVLKEAYSHNLWDGARKTVATLWDGHAAVWHGYEVHGMEKIPEDGPALIIFYHGAIPIDFYYFMAKIFIHKGRTCRVVADHFVFKIPGFSLLLDVFCALHGPREKCVEILRSGHLLAISPGGVREALISDETYNIVWGHRRGFAQVAIDAKVPIIPMFTQNIREGFRSLGGTRLFRWLYEKFRYPFAPMYGGFPVKLRTYLGDPIPYDPQITAEELAEKTKNAVQALIDKHQRIPGNIMSALLERFH

SEQ ID NO: 12707 - protein, 130 aa, Homo sapiens
MRFSVSGMRTDYPRSVLAPAYVSVCLLLLCPREVIAPAGSEPWLCQPAPRCGDKIYNPLEQCCYNDAIVSLSETRQCGPPCTFWPCFELCCLDSFGLTNDFVVKLKVQGVNSQCHSSPISSKCESRRRFP

SEQ ID NO: 12708 - protein, 548 aa, Homo sapiens
MRMCTPIRGLLMALAVMFGTAMAFAPIPRITWEHREVHLVQFHEPDIYNYSALLLSEDKDTLYIGAREAVFAVNALNISEKQHEVYWKVSEDKKAKCAEKGKSKQTECLNYIRVLQPLSATSLYVCGTNAFQPACDHLNLTSFKFLGKNEDGKGRCPFDPAHSYTSVMVDGELYSGTSYNFLGSEPIISRNSSHSPLRTEYAIPWLNEPSFVFADVIRKSPDSPDGEDDRVYFFFTEVSVEYEFVFRVLIPRIARVCKGDQGGLRTLQKKWTSFLKARLICSRPDSGLVFNVLRDVFVLRSPGLKVPVFYALFTPQLNNVGLSAVCAYNLSTAEEVFSHGKYMQSTTVEQSHTKWVRYNGPVPKPRPGACIDSEARAANYTSSLNLPDKTLQFVKDHPLMDDSVTPIDNRPRLIKKDVNYTQIVVDRTQALDGTVYDVMFVSTDRGALHKAISLEHAVHIIEETQLFQDFEPVQTLLLSSKKVLQTFALSGRRMGELWRPVSLCRPMHCPMAGPMHSAGCRTPSGKALSIAALSSPQQGTRLRRCRLL

SEQ ID NO: 12709 - protein, 129 aa, Homo sapiens
MFEDSEDSCRNLVPVQRVVYNVLSELEKTFNLSVLEALFSEVNMQEYPDLIHIYKSFKNAIQDKLSFQESDRKEREERPDIKLSLKQGEVPESPEARKESDQACGKMDTVDIANNSTLGKPKRKRSKNK

SEQ ID NO: 12710 - protein, 1165 aa, Homo sapiens
MRPSGTAGAALLALLAALCPASRALEEKKVCQGTSNKLTQLGTFEDHFLSLQRMFNNCEVVLGNLEITYVQRNYDLSFLKTIQEVAGYVLIALNTVERIPLENLQIIRGNMYYENSYALAVLSNYDANKTGLKELPMRNLQGQKCDPSCPNGSCWGAGEENCQKLTKIICAQQCSGRCRGKSPSDCCHNQCAAGCTGPRESDCLVCRKFRDEATCKDTCPPLMLYNPTTYQMDVNPEGKYSFGATCVKKCPRNYVVTDHGSCVRACGADSYEMEEDGVRKCKKCEGPCRKVCNGIGIGEFKDSLSINATNIKHFKNCTSISGDLHILPVAFRGDSFTHTPPLDPQELDILKTVKEITGFLLIQAWPENRTDLHAFENLEIIRGRTKQHGQFSLAVVSLNITSLGLRSLKEISDGDVIISGNKNLCYANTINWKKLFGTSGQKTKIISNRGENSCKATGQVCHALCSPEGCWGPEPRDCVSCRNVSRGRECVDKCNLLEGEPREFVENSECIQCHPECLPQAMNITCTGRGPDNCIQCAHYIDGPHCVKTCPAGVMGENNTLVWKYADAGHVCHLCHPNCTYGCTGPGLEGCPTNGPKIPSIATGMVGALLLLLVVALGIGLFMRRRHIVRKRTLRRLLQERELVEPLTPSGEAPNQALLRILKETEFKKIKVLGSGAFGTVYKGLWIPEGEKVKIPVAIKELREATSPKANKEILDEAYVMASVDNPHVCRLLGICLTSTVQLITQLMPFGCLLDYVREHKDNIGSQYLLNWCVQIAKGMNYLEDRRLVHRDLAARNVLVKTPQHVKITDFGLAKLLGAEEKEYHAEGGKVPIKWMALESILHRIYTHQSDVWSYGVTVWELMTFGSKPYDGIPASEISSILEKGERLPQPPICTIDVYMIMVKCWMIDADSRPKFRELIIEFSKMARDPQRYLVIQGDERMHLPSPTDSNFYRALMDEEDMDDVVDADEYLIPQQGFFSSPSTSRTPLLSSLSATSNNSTVACIDRNGLQSCPIKEDSFLQRYSSDPTGALTEDSIDDTFLPVPEYINQSVPKRPAGSVQNPVYHNQPLNPAPSRDPHYQDPHSTAVGNPEYLNTVQPTCVNSTFDSPAHWAQKGSHQISLDNPDYQQDFFPKEAKPNGIFKGSTAENAEYLRVAPQSSEFIGA

SEQ ID NO: 12711 - protein, 221 aa, Homo sapiens
MRRVLRLLLGCFLTELCARVCRAQERAGHGQLAQLGGVLLLAGGNRSGAASGEASEGAEASDAPPTRAPTPDFCRGYFDVMGQWDPPFNCSSGDFIFCCGTCGFRFCCTFKKRRLNQSTCTNYDTPLWLNTGKPPARKDDPLHDPTKDKTNLIVYIICGVVAVMVLVGIFTKLGLEKAHRPQREHMSRLYDNLLFMEAQISFQEDEPAPGEWSVGLQTWTV

SEQ ID NO: 12712 - protein, 1384 aa, Homo sapiens
MSGGASATGPRRGPPGLEDTTSKKKQKDRANQESKDGDPRKETGSRYVAQAGLEPLASGDPSASASHAAGITGSRHRTRLFFPSSSGSASTPQEEQTKEGACEDPHDLLATPTPELLLDWRQSAEEVIVKLRVGVGPLQLEDVDAAFTDTDCVVRFAGGQQWGGVFYAEIKSSCAKVQTRKGSLLHLTLPKKVPMLTWPSLLKKPLGTQELVPGLRCQENGQELSPIALEPGPEPHRAKQEARNQKRAQGRGEVGAGAGPGAQAGPSAKRAVHLCRGPEGDGSRDDPGPRGDAPPFVADPATQVEADEQLCIPPLNSQTCLLGSEENLAPLAGEKAVPPGNDPVSPAMVRSRNPGKDDCAKEEMAVAADAATLVDEPESMVNLAFVKNDSYEKGPDSVVVHVYVKEICRDTSRVLFREQDFTLIFQTRDGNFLRLHPGCGPHTTFRWQVKLRNLIEPEQCTFCFTASRIDICLRKRQSQRWGGLEAPAARGAVGGAKVAVPTGPTPLDSTPPGGAPHPLTGQEEARAVEKDKSKARSEDTGLDSVATRTPMEHVTPKPETHLASPKPTCMVPPMPHSPVSGDSVEEEEEEEKKVCLPGFTGLVNLGNTCFMNSVIQSLSNTRELRDFFHDRSFEAEINYNNPLGTGGRLAIGFAVLLRALWKGTHHAFQPSKLKAIVASKASQFTGYAQHDAQEFMAFLLDGLHEDLNRIQNKPYTETVDSDGRPDEVVAEEAWQRHKMRNDSFIVDLFQGQYKSKLVCPVCAKVSITFDPFLYLPVPLPQKQKVLPVFYFAREPHSKPIKFLVSVSKENSTASEVLDSLSQSVHVKPENLRLAEVIKNRFHRVFLPSHSLDTVSPSDTLLCFELLSSELAKERVVVLEVQQRPQVPSVPISKCAACQRKQQSEDEKLKRCTRCYRVGYCNQLCQKTHWPDHKGLCRPENIGYPFLVSVPASRLTYARLAQLLEGYARYSVSVFQPPFQPGRMALESQSPGCTTLLSTGSLEAGDSERDPIQPPELQLVTPMAEGDTGLPRVWAAPDRGPVPSTSGISSEMLASGPIEVGSLPAGERVSRPEAAVPGYQHPSEAMNAHTPQFFIYKIDSSNREQRLEDKGDTPLELGDDCSLALVWRNNERLQEFVLVASKELECAEDPGSAGEAARAGHFTLDQCLNLFTRPEVLAPEEAWYCPQCKQHREASKQLLLWRLPNVLIVQLKRFSFRSFIWRDKINDLVEFPVRNLDLSKFCIGQKEEQLPSYDLYAVINHYGGMIGGHYTACARLPNDRSSQRSDVGWRLFDDSTVTTVDESQVVTRYAYVLFYRRRNSPVERPPRAGHSEHHPDLGPAAEAAASQGLGPGQAPEVAPTRTAPERFAPPVDRPAPTYSNMEEVD

SEQ ID NO: 12713 - protein, 67 aa, Homo sapiens
MTSALENYINRTVAVITSDGRMIVGTLKGFDQTINLILDESHERVFSSSQGVEQVVLGLYIVRGDNV

SEQ ID NO: 12714 - protein, 553 aa, Homo sapiens
MSTETELQVAVKTSAKKDSRKKGQDRSEATLIKRFKGEGVRYKAKLIGIDEVSAARGDKLCQDSMMKLKGVVAGARSKGEHKQKIFLTISFGGIKIFDEKTGALQHHHAVHEISYIAKDITDHRAFGYVCGKEGNHRFVAIKTAQAAEPVILDLRDLFQLIYELKQREELEKKAQKDKQCEQAVYQVPTSQKKEGVYDVPKSQPVSNGYSFEDFEERFAAATPNRNLPTDFDEIFEATKAVTQLELFGDMSTPPDITSPPTPATPGDAFIPSSSQTLPASADVFSSVPFGTAAVPSGYVAMGAVLPSFWGQQPLVQQQMVMGAQPPVAQVMPGAQPIAWGQPGLFPATQQPWPTVAGQFPPAAFMPTQTVMPLPAAMFQGPLTPLATVPGTSDSTRSSPQTDKPRQKMGKETFKDFQMAQPPPVPSRKPDQPSLTCTSEAFSSYFNKVGVAQDTDDCDDFDISQLNLTPVTSTTPSTNSPPTPAPRQSSPSKSSASHASDPTTDDIFEEGFESPSKSEEQEAPDGSQASSNSDPFGEPSGEPSGDNISPQAGS

SEQ ID NO: 12715 - protein, 534 aa, Homo sapiens
MDTQAGSVDEENGRQLGEVELQCGICTKWFTADTFGIDTSSCLPFMTNYSFHCNVCHHSGNTYFLRKQANLKEMCLSALANLTWQSRTQDEHPKTMFSKDKDIIPFIDKYWECMTTRQRPGKMTWPNNIVKTMSKERDVFLVKEHPDPGSKDPEEDYPKFGLLDQDLSNIGPAYDNQKQSSAVSTSGNLNGGIAAGSSGKGRGAKRKQQDGGTTGTTKKARSDPLFSAQRLPPHGYPLEHPFNKDGYRYILAEPDPHAPDPEKLELDCWAGKPIPGDLYRACLYERVLLALHDRAPQLKISDDRLTVVGEKGYSMVRASHGVRKGAWYFEITVDEMPPDTAARLGWSQPLGNLQAPLGYDKFSYSWRSKKGTKFHQSIGKHYSSGYGQGDVLGFYINLPEDTETAKSLPDTYKDKALIKFKSYLYFEEKDFVDKAEKSLKQTPHSEIIFYKNGVNQGVAYKDIFEGVYFPAISLYKSCTVSINFGPCFKYPPKDLTYRPMSDMGWGAVVEHTLADVLYHVETEVDGRRSPPWEP

SEQ ID NO: 12716 - protein, 244 aa, Homo sapiens
MQEIIASVDHIKFDLEIAVEQQLGAQPLPFPGMDKSGAAVCEFFLKAACGKGGMCPFRHISGEKTVVCKHWLRGLCKKGDQCEFLHEYDMTKMPECYFYSKFGECSNKECPFLHIDPESKIKDCPWYDRGFCKHGPLCRHRHTRRVICVNYLVGFCPEGPSCKFMHPRFELPMGTTEQPPLPQQTQPPAKQRTPQVIGVMQSQNSSAGNRGPRPLEQVTCYKCGEKGHYANRCTKGHLAFLSGQ

SEQ ID NO: 12717 - protein, 690 aa, Homo sapiens
MPVPWFLLSLALGRSPVVLSLERLVGPQDATHCSPGLSCRLWDSDILCLPGDIVPAPGPVLAPTHLQTELVLRCQKETDCDLCLRVAVHLAVHGHWEEPEDEEKFGGAADSGVEEPRNASLQAQVVLSFQAYPTARCVLLEVQVPAALVQFGQSVGSVVYDCFEAALGSEVRIWSYTQPRYEKELNHTQQLPDCRGLEVWNSIPSCWALPWLNVSADGDNVHLVLNVSEEQHFGLSLYWNQVQGPPKPRWHKNLTGPQIITLNHTDLVPCLCIQVWPLEPDSVRTNICPFREDPRAHQNLWQAARLQLLTLQSWLLDAPCSLPAEAALCWRAPGGDPCQPLVPPLSWENVTVDVNSSEKLQLQECLWADSLGPLKDDVLLLETRGPQDNRSLCALEPSGCTSLPSKASTRAARLGEYLLQDLQSGQCLQLWDDDLGALWACPMDKYIHKRWALVWLACLLFAAALSLILLLKKDHAKAAARGRAALLLYSADDSGFERLVGALASALCQLPLRVAVDLWSRRELSAQGPVAWFHAQRRQTLQEGGVVVLLFSPGAVALCSEWLQDGVSGPGAHGPHDAFRASLSCVLPDFLQGRAPGSYVGACFDRLLHPDAVPALFRTVPVFTLPSQLPDFLGALQQPRAPRSGRLQERAEQVSRALQPALDSYFHPPGTPAPGRGVGPGAGPGAGDGT

SEQ ID NO: 12718 - protein, 288 aa, Homo sapiens
MAYSTVQRVALASGLVLALSLLLPKAFLSRGKRQEPPPTPEGKLGRFPPMMHHHQAPSDGQTPGARFQRSHLAEAFAKAKGSGGGAGGGGSGRGLMGQIIPIYGFGIFLYILYILFKLSKGKTTAEDGKCYTAMPGNTHRKISYPEETYPIYDLSDCIKRRQETILVDYPDPKELSAEEIAERMGMIEEEESDHLGWESLPTDPRAQEDNSVTSCDPKPETCSCCFHEDEDPAVLAENAGFSADSYPEQEETTKEEWSQDFKDEGLGISTDKAYTGSMLRKRNPQGLE

SEQ ID NO: 12719 - protein, 134 aa, Homo sapiens
MTEEPIKEILGAPKAHMAATMEKSPKSEVVITTVPLVSEIQLMAATGGTELSCYRCIIPFAVVVFIAGIVVTAVAYSFNSHGSIISIFGLVVLSSGLFLLASSALCWKVRQRSKKAKRRESQTALVANQRSLFA

SEQ ID NO: 12720 - protein, 292 aa, Homo sapiens
MSLYPSLEDLKAQTAFSANPANPAILSEASAPIPHDGNLYPRLYPELSQYMGLSLNEEEIRANVAVVSGAPLQGQLVARPSSINYMVAPVTGNDVGIRRAEIKQGIREVILCKDQDGKIGLRLKSIDNGIFVQLVQANSPASLVGLRFGDQVLQINGENCAGWSSDKAHKVLKQAFGEKITMTIRDRPFERTITMHKDSTGHVGFIFKNGKITSIVKDSSAARNGLLTEHNICEINGQNVIGLKDSQIADILSTSGTVVTITIMPAFIFEHIIKRMAPSIMKSLMDHTIPEV

SEQ ID NO: 12721 - protein, 442 aa, Homo sapiens
MASVVLPSGSQCAAAAAAAAPPGLRLRLLLLLFSAAALIPTGDGQNLFTKDVTVIEGEVATISCQVNKSDDSVIQLLNPNRQTIYFRDFRPLKDSRFQLLNFSSSELKVSLTNVSISDEGRYFCQLYTDPPQESYTTITVLVPPRNLMIDIQKDTAVEGEEIEVNCTAMASKPATTIRWFKGNTELKGKSEVEEWSDMYTVTSQLMLKVHKEDDGVPVICQVEHPAVTGNLQTQRYLEVQYKPQVHIQMTYPLQGLTREGDALELTCEAIGKPQPVMVTWVRVDDEMPQHAVLSGPNLFINNLNKTDNGTYRCEASNIVGKAHSDYMLYVYDPPTTIPPPTTTTTTTTTTTTTILTIITDSRAGEEGSIRAVDHAVIGGVVAVVVFAMLCLLIILGRYFARHKGTYFTHEAKGADDAADADTAIINAEGGQNNSEEKKEYFI

SEQ ID NO: 12722 - protein, 233 aa, Homo sapiens
MTAPVPAPRILLPLLLLLLLTPPPGARGEVCMASRGLSLFPESCPDFCCGTCDDQYCCSDVLKKFVWSEESVPASVEPVEQLGSALRFRPGYNDPMSGFGATLAVGLTIFVLSVVTIIICFTCSCCCLYKTCRRPRPVVTTTTSTTVVHAPYPQPPSVPPSYPGPSYQGYHTMPPQPGMPAAPYPMQYPPPYPAQPMGPPAYHETLAGGAAAPYPASQPPYNPAYMDAPKAAL

SEQ ID NO: 12723 - protein, 142 aa, Homo sapiens
MAPGVARGPTPYWRLRLGGAALLLLLIPVAAAQEPPGAACSQNTNKTCEECLKNVSACLKKKTRMLDLKTTKALQHISPDASCEVHAPQPSPAGRPRGHCGLLTLASEPASLPGQAAGELPLKDSPLVLQTGDLLFPVHLCF

SEQ ID NO: 12724 - protein, 63 aa, Homo sapiens
MAFRTICVLVGVFICSICVKGSSQPQARVYLTFDEPTLYNAVCYICGYKKKCGVNLVLSNHLL

SEQ ID NO: 12725 - protein, 530 aa, Homo sapiens
MATATIALGTDSIKMENGQSTAAKLGLPPLTPEQQEALQKAKKYAMEQSIKSVLVKQTIAHQQQQLTNLQMAAVTMGFGDPLSPLQSMAAQRQRALAIMCRVYVGSIYYELGEDTIRQAFAPFGPIKSIDMSWDSVTMKHKGFAFVEYEVPEAAQLALEQMNSVMLGGRNIKVGRPSNIGQAQPIIDQLAEEARAFNRIYVASVHQDLSDDDIKSVFEAFGKIKSCTLARDPTTGKHKGYGFIEYEKAQSSQDAVSSMNLFDLGGQYLRVGKAVTPPMPLLTPATPGGLPPAAAVAAAAATAKITAQEAVAGAAVLGTLGTPGLVSPALTLAQPLGTLPQAVMAAQAPGVITGVTPARPPIPVTIPSVGVVNPILASPPTLGLLEPKKEKEEEELFPESERPEMLSEQEHMSISGSSARHMVMQKLLRKQESTVMVLRNMVDPKDIDDDLEGEVTEECGKFGAVNRVIIYQEKQGEEEDAEIIVKIFVEFSIASETHKAIQALNGRWFAGRKVVAEVYDQERFDNSDLSA

SEQ ID NO: 12726 - protein, 649 aa, Homo sapiens
MASVSALTEELDSITSELHAVEIQIQELTERQQELIQKKKVLTKKIKQCLEDSDAGASNEYDSSPAAWNKEDFPWSGKVKDILQNVFKLEKFRPLQLETINVTMAGKEVFLVMPTGGGKSLCYQLPALCSDGFTLVICPLISLMEDQLMVLKQLGISATMLNASSSKEHVKWVHAEMVNKNSELKLIYVTPEKIAKSKMFMSRLEKAYEARRFTRIAVDEVHCCSQWGHDFRPDYKALGILKRQFPNASLIGLTATATNHVLTDAQKILCIEKCFTFTASFNRPNLYYEVRQKPSNTEDFIEDIVKLINGRYKGQSGIIYCFSQKDSEQVTVSLQNLGIHAGAYHANLEPEDKTTVHRKWSANEIQVVVATVAFGMGIDKPDVRFVIHHSMSKSMENYYQESGRAGRDDMKADCILYYGFGDIFRISSMVVMENVGQQKLYEMVSYCQNISKCRRVLMAQHFDEVWNSEACNKMCDNCCKDSAFERKNITEYCRDLIKILKQAEELNEKLTPLKLIDSWMGKGAAKLRVAGVVAPTLPREDLEKIIAHFLIQQYLKEDYSFTAYATISYLKIGPKANLLNNEAHAITMQVTKSTQNSFRAESSQTCHSEQGDKKMEEKNSGNFQKKAANMLQQSGSKNTGAKKRKIDDA

SEQ ID NO: 12727 - protein, 111 aa, Homo sapiens
MLSLLLLLLGLGSVFSAVISQKPSRDICQRGTSLTIQCQVDSQVTMMFWYRQQPGQSLTLIATANQGSEATYESGFVIDKFPISRPNLTFSTLTVSNMSPEDSSIYLCSVE

SEQ ID NO: 12728 - protein, 1011 aa, Homo sapiens
MGAYARASGVCARGCLDSAGPWTMSRALRPPLPPLCFFLLLLAAAGARAGGYETCPTVQPNMLNVHLLPHTHDDVGWLKTVDQYFYGIKNDIQHAGVQYILDSVISALLADPTRRFIYVEIAFFSRWWHQQTNATQEVVRDLVRQGRLEFANGGWVMNDEAATHYGAIVDQMTLGLRFLEDTFGNDGRPRVAWHIDPFGHSREQASLFAQMGFDGFFFGRLDYQDKWVRMQKLEMEQVWRASTSLKPPTADLFTGVLPNGYNPPRNLCWDVLCVDQPLVEDPRSPEYNAKELVDYFLNVATAQGRYYRTNHTVMTMGSDFQYENANMWFKNLDKLIRLVNAQQAKGSSVHVLYSTPACYLWELNKANLTWSVKHDDFFPYADGPHQFWTGYFSSRPALKRYERLSYNFLQVCNQLEALVGLAANVGPYGSGDSAPLNEAMAVLQHHDAVSGTSRQHVANDYARQLAAGWGPCEVLLSNALARLRGFKDHFTFCQQLNISICPLSQTAARFQVIVYNPLGRKVNWMVRLPVSEGVFVVKDPNGRTVPSDVVIFPSSDSQAHPPELLFSASLPALGFSTYSVAQVPRWKPQARAPQPIPRRSWSPALTIENEHIRATFDPDTGLLMEIMNMNQQLLLPVRQTFFWYNASIGDNESDQASGAYIFRPNQQKPLPVSRWAQIHLVKTPLVQEVHQNFSAWCSQVVRLYPGQRHLELEWSVGPIPVGDTWGKEVISRFDTPLETKGRFYTDSNGREILERRRDYRPTWKLNQTEPVAGNYYPVNTRIYITDGNMQLTVLTDRSQGGSSLRDGSLELMVHRRLLKDDGRGVSEPLMENGSGAWVRGRHLVLLDTAQAAAAGHRLLAEQEVLAPQVVLAPGGGAAYNLGAPPRTQFSGLRRDLPPSVHLLTLASWGPEMVLLRLEHQFAVGEDSGRNLSAPVTLNLRDLFSTFTITRLQETTLVANQLREAASRLKWTTNTGPTPHQTPYQLDPANITLEPMEIRTFLASVQWKEVDG

SEQ ID NO: 12729 - protein, 454 aa, Homo sapiens
MLLPLLLSSLLGGSQAMDGRFWIRVQESVMVPEGLCISVPCSFSYPRQDWTGSTPAYGYWFKAVTETTKGAPVATNHQSREVEMSTRGRFQLTGDPAKGNCSLVIRDAQMQDESQYFFRVERGSYVRYNFMNDGFFLKVTVLSFTPRPQDHNTDLTCHVDFSRKGVSAQRTVRLRVAYAPRDLVISISRDNTPDPPENLRVMVSQANRTVLENLGNGTSLPVLEGQSLCLVCVTHSSPPARLSWTQRGQVLSPSQPSDPGVLELPRVQVEHEGEFTCHARHPLGSQHVSLSLSVHYKKGLISTAFSNGAFLGIGITALLFLCLALIIMKILPKRRTQTETPRPRFSRHSTILDYINVVPTAGPLAQKRNQKATPNSPRTPLPPGAPSPESKKNQKKQYQLPSFPEPKSSTQAPESQESQEELHYATLNFPGVRPRPEARMPKGTQADYAEVKFQ

SEQ ID NO: 12730 - protein, 1114 aa, Homo sapiens
MEAAVGVPDGGDQGGAGPREDATPMDAYLRKLGLYRKLVAKDGSCLFRAVAEQVLHSQSRHVEVRMACIHYLRENREKFEAFIEGSFEEYLKRLENPQEWVGQVEISALSLMYRKDFIIYREPNVSPSQVTENNFPEKVLLCFSNGNHYDIVYPIKYKESSAMCQSLLYELLYEKVFKTDVSKIVMELDTLEVADEDNSEISDSEDDSCKSKTAAAAADVNGFKPLSGNEQLKNNGNSTSLPLSRKVLKSLNPAVYRNVEYEIWLKSKQAQQKRDYSIAAGLQYEVGDKCQVRLDHNGKFLNADVQGIHSENGPVLVEELGKKHTSKNLKAPPPESWNTVSGKKMKKPSTSGQNFHSDVDYRGPKNPSKPIKAPSALPPRLQHPSGVRQHAFSSHSSGSQSQKFSSEHKNLSRTPSQIIRKPDRERVEDFDHTSRESNYFGLSPEERREKQAIEESRLLYEIQNRDEQAFPALSSSSVNQSASQSSNPCVQRKSSHVGDRKGSRRRMDTEERKDKDSIHGHSQLDKRPEPSTLENITDDKYATVSSPSKSKKLECPSPAEQKPAEHVSLSNPAPLLVSPEVHLTPAVPSLPATVPAWPSEPTTFGPTGVPAPIPVLSVTQTLTTGPDSAVSQAHLTPSPVPVSIQAVNQPLMPLPQTLSLYQDPLYPGFPCNEKGDRAIVPPYSLCQTGEDLPKDKNILRFFFNLGVKAYSCPMWAPHSYLYPLHQAYLAACRMYPKVPVPVYPHNPWFQEAPAAQNESDCTCTDAHFPMQTEASVNGQMPQPEIGPPTFSSPLVIPPSQVSESHGQLSYQADLESETPGQLLHADYEESLSGKNMFPQPSFGPNPFLGPVPIAPPFFPHVWYGYPFQGFIENPVMRQNIVLPSDEKGELDLSLENLDLSKDCGSVSTVDEFPEARGEHVHSLPEASVSSKPDEGRTEQSSQTRKADTALASIPPVAEGKAHPPTQILNRERETVPVELEPKRTIQSLKEKTEKVKDPKTAADVVSPGANSVDSRVQRPKEESSEDENEVSNILRSGRSKQFYNQTYGSRKYKSDWGYSGRGGYQHVRSEESWKGQPSRSRDEGYQYHRNVRGRPFRGDRRRSGMGDGHRGQHT

SEQ ID NO: 12731 - protein, 299 aa, Homo sapiens
MMLIPTHHFRNIERKPEYLQPEKCVPPPYPGPVGTMWFIRDGCGIACAIVTWFLVLYAEFVVLFVMLIPSRDYVYSIINGIVFNLLAFLALASHCRAMLTDPGAVPKGNATKEFIESLQLKPGQVVYKCPKCCSIKPDRAHHCSVCKRCIRKMDHHCPWVNNCVGENNQKYFVLFTMYIALISLHALIMVGFHFLHCFEEDWTKCSSFSPPTTVILLILLCFEGLLFLIFTSVMFGTQVHSICTDETGIEQLKKEERRWAKKTKWMNMKAVFGHPFSLGWASPFATPDQGKADPYQYVV

SEQ ID NO: 12732 - protein, 98 aa, Homo sapiens
MNKHFLFLFLLYCLIVAVTSLQCITCHLRTRTDRCRRGFGVCTAQKGEACMLLRIYQRNTLQISYMVCQKFCRDMTFDLRNRTYVHTCCNYNYCNFKL

SEQ ID NO: 12733 - protein, 158 aa, Homo sapiens
MWLCPLALNLILMAASGAVCEVKDVCVGSPGIPGTPGSHGLPGRDGRDGLKGDPGPPGPMGPPGEMPCPPGNDGLPGAPGIPGECGEKGEPGERGPPGLPAHLDEELQATLHDFRHQILQTRGALSLQGSIMTVGEKVFSSNGQSITFDAIQEACARA

SEQ ID NO: 12734 - protein, 498 aa, Homo sapiens [sequence omitted]

SEQ ID NO: 12735 - protein, 55 aa, Homo sapiens
QLFMTAYFLVSALAEMPDSAAALLGTCCKLQIIPTLCHLVSNLPGGTLEWIGMGK

SEQ ID NO: 12736 - protein, 183 aa, Homo sapiens
MARHGLPLLPLLSLLVGAWLKLGNGQATSMVQLQGGRFLMGTNSPDSRDGDGPVREATVKPFAIDIFPVTNKDFRDFVREKKYRTEAEMFGWSFVFEDFVSDELRNKATQPMKSVLWWLPVEKAFWRQPAGPGSGIRERLEHPVLHVKFTHGGTGSSQTAPTCGRESSPRETKLRMASMESPQ

SEQ ID NO: 12737 - protein, 499 aa, Homo sapiens
MDTSPLCFSILLVLCIFIQSSALGQSLKPEPFGRRAQAVETNKTLHEMKTRFLLFGETNQGCQIRINHPDTLQECGFNSSLPLVMIIHGWSVDGVLENWIWQMVAALKSQPAQPVNVGLVDWITLAHDHYTIAVRNTRLVGKEVAALLRWLEESVQLSRSHVHLIGYSLGAHVSGFAGSSIGGTHKIGRITGLDAAGPLFEGSAPSNRLSPDDANFVDAIHTFTREHMGLSVGIKQPIGHYDFYPNGGSFQPGCHFLELYRHIAQHGFNAITQTIKCSHERSVHLFIDSLLHAGTQSMAYPCGDMNSFSQGLCLSCKKGRCNTLGYHVRQEPRSKSKRLFLVTRAQSPFKVYHYQFKIQFINQTETPIQTTFTMSLLGTKEKMQKIPITLGKGIASNKTYSFLITLDVDIGELIMIKFKWENSAVWANVWDTVQTIIPWSTGPRHSGLVLKTIRVKAGETQQRSPNRINLGRLNCSLLFCTELFSHDSLAHWSSAASEL

SEQ ID NO: 12738 - protein, 611 aa, Homo sapiens
MEPAPARSPRPQQDPARPQEPTMPPPETPSEGRQPSPSPSPTERAPASEEEFQFLRCQQCQAEAKCPKLLPCLHTLCSGCLEASGMQCPICQAPWPLGADTPALDNVFFESLQRRLSVYRQIVDAQAVCTRCKESADFWCFECEQLLCAKCFEAHQWFLKHEARPLAELRNQSVREFLDGTRKTNNIFCSNPNHRTPTLTSIYCRGCSKPLCCSCALLDSSHSELKCDISAEIQQRQEELDAMTQALQEQDSAFGAVHAQMHAAVGQLGRARAETEELIRERVRQVVAHVRAQERELLEAVDARYQRDYEEMASRLGRLDAVLQRIRTGSALVQRMKCYASDQEVLDMHGFLRQALCRLRQEEPQSLQAAVRTDGFDEFKVRLQDLSSCITQGKDAAVSKKASPEAASTPRDPIDVDLPEEAERVKAQVQALGLAEAQPMAVVQSVPGAHPVPVYAFSIKGPSYGEDVSNTTTAQKRKCSQTQCPRKVIKMESEEGKEARLARSSPEQPRPSTSKAVSPPHLDGPPSPRSPVIGSEVFLPNSNHVASGAGEAEERVVVISSSEDSDAENSVSGPEVQPRTPASPHFRSQGAQPQQVTLRLALRLGNFPVRH

SEQ ID NO: 12739 - protein, 182 aa, Homo sapiens
MRLILFFGALFGHIYCLETFVGDQVLEIVPSNEEQIKNLLQLEAQEHLQLDFWKSPTTPGETAHVRVPFVNVQAVKVFLESQGIAYSIMIEDVQVLLDKENEEMLFNRRRERSGNFNFGAYHTLEEISQEMDNLVAEHPGLVSKVNIGSSFENRPMNVLKKSSGRMQKDDGQLNPKPQRQTP

SEQ ID NO: 12740 - protein, 288 aa, Homo sapiens
MSAPLDAALHALQEEQARLKMRLWDLQQLRKELGDSPKDKVPFSVPKIPLVFRGHTQQDPEVPKSLVSNLRIHCPLLAGSALITFDDPKVAEQVLQQKEHTINMEECRLRVQVQPLELPMVTTIQVMMSSQLSGRRVLVTGFPASLRLSEEELLDKLEIFFGKTRNGGGDVDVRELLPGSVMLGFARDGVAQRLCQIGQFTVPLGGQQVPLRVSPYVNGEIQKAEIRSQPVPRSVLVLNIPDILDGPELHDVLEIHFQKPTRGGGEVEALTVVPQGQQGLAVFTSESG

SEQ ID NO: 12741 - protein, 436 aa, Homo sapiens
MGKRLDQPQMYPQYTYYYPHYLQTKSYAPAPHPMAPPSPSTNSSSNNSSNNSSGEQLSKTNLYIRGLPPGTTDQDLIKLCQPYGKIVSTKAILDKNTNQCKGYGFVDFDSPAAAQKAVASLKANGVQAQMAKQQEQDPTNLYISNLPISMDEQELENMLKPFGHVISTRILRDANGVSRGVGFARMESTEKCEVVIQHFNGKYLKTPPGIPAPSEPLLCKFADGGQKKRQNQSKYTQNGRPWPREGEAGMALTYDPTAAIQNGFYSSPYSIATNRMIPQTSITPFIAASPVSTYQVQSTSWMPHPPYVMQPTGAVITPTMDHPMSMQPANMMGPLTQQMNHLSLGTTGTIQSQDRIMILHQLLCQYMTAAAPMQGTYIPQYTPVPPTAVSIEGVVADTSPQTVAPSSQDTSGQQQQIAVDTSNEHAPAYSYQQSKP

SEQ ID NO: 12742 - protein, 123 aa, Homo sapiens
MATKCGNCGPGYSTPLEAMKGPREEIVYLPCIYRNTGTEAPDYLATVDVDPKSPQYCQVIHRLPMPNLKDELHHSGWNTCSSCFGDSTKSRTKLVLPSLISSRIYVVDVGSEPRAPKLHKACH

SEQ ID NO: 12743 - protein, 118 aa, Homo sapiens
MKHLWFFLLLVAAPRWVLSQLQLQESGSGLVKPSQTLSLTCAVSGGSISSGGYSWSWIRQPPGKGLEWIGYIYHSGSTYYNPSLKSRVTISVDRSKNQFSLKLSSVTAADTAVYYCAR

SEQ ID NO: 12744 - protein, 123 aa, Homo sapiens
MFVLVEMVDTVRIPPWQFERKLNDSIAEELNKKLANKVVYNVGLCICLFDITKLEDAYVFPGDGASHTKVHFRCVVFHPFLDEILIGKIKGCSPEGVHGNSGPDASDKTWEHCGGRSLSRLLR

SEQ ID NO: 12745 - protein, 620 aa, Homo sapiens
MGPLMVLFCLLFLYPAGHCPNPGISLGAVRTGFRFGHGDKVRYRCSSNLVLTGSSERECQGNGVWSGTEPICRQPYSYDFPEDVAPALGTSFSHMLGATNPTQKTKESLGRKIQIQRSGHLNLYLLLDCSQSVSENDFLIFKESASLMVDRIFSFEINVSVAIITFASEPKVLMSVLNDNSRDMTEVISSLENANYKDHENGTGTNTYAALNSVYLMMNNQMRLLGMETMAWQEIRHAIILLTDGKSNMGGSPKTAVDHIREILNINQKRNDYLDIYAIGVGKLDVDWRELNELGSKKDGERHAFILQDTKALHQVFEHMLDVSKLTDTICGVGNMSANASDQERTPWHVTIKPKSQETCRGALISDQWVLTAAHCFRDGNDHSLWRVNVGDPKSQWGKEFLIEKAVISPGFDVFAKKNQGILEFYGDDIALLKLAQKVKMSTHARPICLPCTMEANLALRRPQGSTCRDHENELLNKQSVPAHFVALNGSKLNINLKMGVEWTSCAEVVSQEKTMFPNLTDVREVVTDQFLCSGTQEDESPCKGESGGAVFLERRFRFFQVGLVSWGLYNPCLGSADKNSRKRAPRSKVPPPRDFHINLFRMQPWLRQHLGDVLNFLPL

SEQ ID NO: 12746 - protein, 928 aa, Homo sapiens
MEPRDGSPEARSSDSESASASSSGSERDAGPEPDKAPRRLNKRRFPGLRLFGHRKAITKSGLQHLAPPPPTPGAPCSESERQIRSTVDWSESATYGEHIWFETNVSGDFCYVGEQYCVARMLKSVSRRKCAACKIVVHTPCIEQLEKINFRCKPSFRESGSRNVREPTFVRHHWVHRRRQDGKCRHCGKGFQQKFTFHSKEIVAISCSWCKQAYHSKVSCFMLQQIEEPCSLGVHAAVVIPPTWILRARRPQNTLKASKKKKRASFKRKSSKKGPEEGRWRPFIIRPTPSPLMKPLLVFVNPKSGGNQGAKIIQSFLWYLNPRQVFDLSQGGPKEALEMYRKVHNLRILACGGDGTVGWILSTLDQLRLKPPPPVAILPLGTGNDLARTLNWGGGYTDEPVSKILSHVEEGNVVQLDRWDLHAEPNPEAGPEDRDEGATDRLPLDVFNNYFSLGFDAHVTLEFHESREANPEKFNSRFRNKMFYAGTAFSDFLMGSSKDLAKHIRVVCDGMDLTPKIQDLKPQCVVFLNIPRYCAGTMPWGHPGEHHDFEPQRHDDGYLEVIGFTMTSLAALQVGGHGERLTQCREVVLTTSKAIPVQVDGEPCKLAASRIRIALRNQATMVQKAKRRSAAPLHSDQQPVPEQLRIQVSRVSMHDYEALHYDKEQLKEASVPLGTVVVPGDSDLELCRAHIERLQQEPDGAGAKSPTCQKLSPKWCFLDATTASRFYRIDRAQEHLNYVTEIAQDEIYILDPELLGASARPDLPTPTSPLPTSPCSPTPRSLQGDAAPPQGEELIEAAKRNDFCKLQELHRAGGDLMHRDEQSRTLLHHAVSTGSKDVVRYLLDHAPPEILDAVEENGETCLHQAAALGQRTICHYIVEAGASLMKTDQQGDTPRQRAEKAQDTELAAYLENRQHYQMIQREDQETAV

SEQ ID NO: 12747 - protein, 448 aa, Homo sapiens
MKSLSLLLAVALGLATAVSAGPAVIECWFVEDASGKGLAKRPGALLLRQGPGEPPPRPDLDPELYLSVHDPAGALQAAFRRYPRGAPAPHCEMSRFVPLPASAKWASGLTPAQNCPRALDGAWLMVSISSPVLSLSSLLRPQPEPQQEPVLITMATVVLTVLTHTPAPRVRLGQDALLDLSFAYMPPTSEAASSLAPGPPPFGLEWRRQHLGKGHLLLAATPGLNGQMPAAQEGAVAFAAWDDDEPWGPWTGNGTFWLPTVQPFQEGTYLATIHLPYLQGQVTLELAVYKPPKVSLMPATLARAAPGEAPPELLCLVSHFYPSGGLEVEWELRGGPGGRSQKAEGQRWLSALRHHSDGSVSLSGHLQPPPVTTEQHGARYACRIHHPSLPASGRSAEVTLEVAGLSGPSLEDSVGLFLSAFLLLGLFKALGWAAVYLSTCKDSKKKAE

SEQ ID NO: 12748 - protein, 563 aa, Homo sapiens
MDDFERRRELRRQKREEMRLEAERIAYQRNDDDEEEAARERRRRARQERLRQKQEEESLGQVTDQVEVNAQNSVPDEEAKTTTTNTQVEGDDEAAFLERLARREERRQKRLQEALERQKEFDPTITDASLSLPSRRMQNDTAENETTEKEEKSESRQERYEIEETETVTKSYQKNDWRDAEENKKEDKEKEEEEEEKPKRGSIGENQGEEKGTKVQAKREKLQEDKPTFKKEEIKDEKIKKDKEPKEEVKSFMDRKKGFTEVKSQNGEFMTHKLKHTENTFSRPGGRASVDTKEAEGAPQVEAGKRLEELRRRRGETESEEFEKLKQKQQEAALELEELKKKREERRKVLEEEEQRRKQEEADRKLREEEEKRRLKEEIERRRAEAAEKRQKMPEDGLSDDKKPFKCFTPKGSSLKIEERAEFLNKSVQKSGVKSTHQAAIVSKIDSRLEQYTSAIEGTKSAKPTKPAASDLPVPAEGVRNIKSMWEKGNVFSSPTAAGTPNKETAGLKVGVSSRINEWLTKTPDGNKSPAPKPSDLRPGDVSSKRNLWEKQSVDKVTSPTKV

SEQ ID NO: 12749 - protein, 259 aa, Homo sapiens
MALRRPPRLRLCARLPDFFLLLLFRGCLIGAVNLKSSNRTPVVQEFESVELSCIITDSQTSDPRIEWKKIQDEQTTYVFFDNKIQVKPVTPVCRVPKAVPVGKMATLHCQESEGHPRPHYSWYRNDVPLPTDSRANPRFRNSSFHLNSETGTLVFTAVHKDDSGQYYCIASNDAGSARCEEQEMEVYDLNIGGIIGGVLVVLAVLALITLGICCAYRRGYFINNKQDGESYKNPGKPDGVNYIRTDEEGDFRHKSSFVI

SEQ ID NO: 12750 - protein, 324 aa, Homo sapiens
MPHLENVVLCRESQVSILQSLFGERHHFSFPSIFIYGHTASGKTYVTQTLLKTLELPHVFVNCVECFTLRLLLEQILNKLNHLSSSEDGCSTEITCETFNDFVRLFKQVTTAENLKDQTVYIVLDKAEYLRDMEANLLPGFLRLQELADRNVTVLFLSEIVWEKFRPNTGCFEPFVLYFPDYSIGNLQKILSHDHPPEYSADFYAAYINILLGVFYTVCRDLKELRHLAVLNFPKYCEPVVKGEASERDTRKLWRNIEPHLKKAMQTVYLREISSSQWEKLQKDDTDPGQLKGIRGSIETVTGDTSSANYQDTKVNTKEHSVRK

SEQ ID NO: 12751 - protein, 360 aa, Homo sapiens
MSLVDLGKKLLEAARAGQDDEVRILMANGAPFTTDWLGTSPLHLAAQYGHYSTTEVLLRAGVSRDARTKVDRTPLHMAASEGHASIVEVLLKHGADVNAKDMLKMTALHWATEHNHQEVVELLIKYGADVHTQSKFCKTAFDISIDNGNEDLAEILQIAMQNQINTNPESPDTVTIHAATPQFIIGPGGVVNLTGLVSSENSSKATDETGVSAVQFGNSSTSVLATLAALAEASAPLSNSSETPVVATEEVVTAESVDGAIQQVVSSGGQQVITIVTDGIQLGNLHSIPTSGIGQPIIVTMPDGQQVLTVPATDIAEETVISEEPPAKRQCIEIIENRVESAEIEVRSLLPGVLCRSHPK

SEQ ID NO: 12752 - protein, 549 aa, Homo sapiens
MKRPKLKKASKRMTCHKRYKIQKKVREHHRKLRKEAKKRGHKKPRKDPGVPNSAPFKEALLREAELRKQRLEELKQQQKLDRQKELEKKRKLETNPDIKPSNVEPMEKEFGLCKTENKAKSGKQNSKKLYCQELKKVIEASDVVLEVLDARDPLGCRCPQVEEAIVQSGQKKLVLILNKSDLVPKENLESWLNYLKKELPTVVFRASTKPKDKGKITKRVKAKKNAAPFRSEVCFGKEGLWKLLGGFQETCSKAIRVGVIGFPNVGKSSIINSLKQEQMCNVGVSMGLTRSMQVVPLDKQITIIDSPSFIVSPLNSSSALALRSPASIEVVKPMEAASAILSQADARQVVLKYTVPGYRNSLEFFTVLAQRRGMHQKGGIPNVEGAAKLLWSEWTGASLAYYCHPPTSWTPPPYFNESIVVDMKSGFNLEELEKNNAQSIRAIKGPHLANSILFQSSGLTNGIIEEKDIHEELPKRKERKQEEREDDKDSDQETVDEEVDENSSGMFAAEETGEALSEETTAGEQSTRSFILDKIIEEDDAYDFSTDYV

SEQ ID NO: 12753 - protein, 81 aa, Homo sapiens
MEPWPLLLLFSLCSAGLVLGSEHETRLVAKLFKDYSSVVRPVEDHRQVVEVTVGLQLIQLINVDEVNQIVTTNVRLKQCRW

SEQ ID NO: 12754 - protein, 919 aa, Homo sapiens
MKVARFQKIPNGENETMIPVLTSKKASELPVSEVASILQADLQNGLNKCEVSHRRAFHGWNEFDISEDEPLWKKYISQFKNPLIMLLLASAVISVLMHQFDDAVSITVAILIVVTVAFVQEYRSEKSLEELSKLVPPECHCVREGKLEHTLARDLVPGDTVCLSVGDRVPADLRLFEAVDLSIDESSLTGETTPCSKVTAPQPAATNGDLASRSNIAFMGTLVRCGKAKGVVIGTGENSEFGEVFKMMQAEEAPKTPLQKSMDLLGKQLSFYSFGIIGIIMLVGWLLGKDILEMFTISVSLAVAAIPEGLPIVVTVTLALGVMRMVKKRAIVKKLPIVETLGCCNVICSDKTGTLTKNEMTVTHIFTSDGLHAEVTGVGYNQFGEVIVDGDVVHGFYNPAVSRIVEAGCVCNDAVIRNNTLMGKPTEGALIALAMKMGLDGLQQDYIRKAEYPFSSEQKWMAVKCVHRTQQDRPEICFMKGAYEQVIKYCTTYQSKGQTLTLTQQQRDVYQQEKARMGSAGLRVLALASGPELGQLTFLGLVGIIDPPRTGVKEAVTTLIASGVSIKMITGDSQETAVAIASRLGLYSKTSQSVSGEEIDAMDVQQLSQIVPKVAVFYRASPRHKMKIIKSLQKNGSVVAMTGDGVNDAVALKAADIGVAMGQTGTDVCKEAADMILVDDDFQTIMSAIEEGKGIYNNIKNFVRFQLSTSIAALTLISLATLMNFPNPLNAMQILWINIIMDGPPAQSLGVEPVDKDVIRKPPRNWKDSILTKNLILKILVSSIIIVCGTLFVFWRELRDNVITPRDTTMTFTCFVFFDMFNALSSRSQTKSVFEIGLCSNRMFCYAVLGSIMGQLLVIYFPPLQKVFQTESLSILDLLFLLGLTSSVCIVAEIIKKVERSREKIQKHVSSTSSSFLEV

SEQ ID NO: 12755 - protein, 147 aa, Homo sapiens
MKIFVGNVDGADTTPEELAALFAPYGTVMSCAVMKQFAFVHMRENAGALRAIEALHGHELRPGRALVVEMSRPRPLNTWKIFVGNVSAACTSQELRSLFERRGRVIECDVVKGSCQDGEAVHRKPAPGGYRAGDSLTLRAVWEGAGM

SEQ ID NO: 12756 - protein, 177 aa, Homo sapiens
MAGIFYFALFSCLFGICDAVTGSRVYPANEGPPSAPLNLISNVNETSVNLEWSSPQNTGGRQDISYNVVCKKCGAGDPSKCRPCGSGVHYTPQQNGLKTTKVSITDLLAHTNYTFEIWAVNGVSKYNPNPDQSVSVTVTTNQAAPSSIALVQAKEVTRYSVALAWLEPDRPNGVILE

SEQ ID NO: 12757 - protein, 219 aa, Homo sapiens
MQGLLFSTLLLAGLAQFCCRVQGTGPLDTTPEGRPGEVSDAPQRKQFCHWPCKCPQQKPRCPPGVSLVRDGCGCCKICAKQPGEICNEADLCDPHKGLYCDYSVDRPRYETGVCAYLVAVGCEFNQVHYHNGQVFQPNPLFSCLCVSGAIGCTPLFIPKLAGSHCSGAKGGKKSDQSNCSLEPLLQQLSTSYKTMPDVCQASNLLPALRSLNCCLPSSL

SEQ ID NO: 12758 - protein, 64 aa, Homo sapiens
MALRHLALLAGLLVGVASKSMENTDTDVPAPEVLTRSTAGVRGACASQRGALRCLLGPAARVLC

SEQ ID NO: 12759 - protein, 533 aa, Homo sapiens
MAPKPKPWVQTEGPEKKKGRQAGREEDPFRSTAEALKAIPAEKRIIRVDPTCPLSSNPGTQVYEDYNCTLNQTNIENNNNKFYIIQLLQDSNRFFTCWNRWGRVGEVGQSKINHFTRLEDAKKDFEKKFREKTKNNWAERDHFVSHPGKYTLIEVQAEDEAQEAVVKVDRGPVRTVTKRVQPCSLDPATQKLITNIFSKEMFKNTMALMDLDVKKMPLGKLSKQQIARGFEALEALEEALKGPTDGGQSLEELSSHFYTVIPHNFGHSQPPPINSPELLQAKKDMLLVLADIELAQALQAVSEQEKTVEEVPHPLDRDYQLLKCQLQLLDSGAPEYKVIQTYLEQTGSNHRCPTLQHIWKVNQEGEEDRFQAHSKLGNRKLLWHGTNMAVVAAILTSGLRIMPHSGGRVGKGIYFASENSKSAGYVIGMKCGAHHVGYMFLGEVALGREHHINTDNPSLKSPPPGFDSVIARGHTEPDPTQDTELELDGQQVVVPQGQPVPCPEFSSSTFSQSEYLIYQESQCRLRYLLEVHL

SEQ ID NO: 12760 - protein, 80 aa, Homo sapiens
MDKFWWHAAWGLCLVPLSLAQIDLNITCRFAGVFHVEKNGRYSISRTEAADLCKAFNSTLPTMAQMEKALSIGFETCSST

SEQ ID NO: 12761 - protein, 50 aa, Homo sapiens
MKLWVSALLMAWFGVLSCVQAEFFTSIGHMTDLIYAEKELVQSLKEYILV

SEQ ID NO: 12762 - protein, 963 aa, Homo sapiens
MAVFPWHSRNRNYKAEFASCRLEAVPLEFGDYHPLKPITVTESKTKKVNRKGSTSSTSSSSSSSVVDPLSSVLDGTDPLSMFAATADPAALAAAMDSSRRKRDRDDNSVVGSDFEPWTNKRGEILARYTTTEKLSINLFMGSEKGKAGTATLAMSEKVRTRLEELDDFEEGSQKELLNLTQQDYVNRIEELNQSLKDAWASDQKVKALKIVIQCSKLLSDTSVIQFYPSKFVLITDILDTFGKLVYERIFSMCVDSRSVLPDHFSPENANDTAKETCLNWFFKIASIRELIPRFYVEASILKCNKFLSKTGISECLPRLTCMIRGIGDPLVSVYARAYLCRVGMEVAPHLKETLNKNFFDFLLTFKQIHGDTVQNQLVVQGVELPSYLPLYPPAMDWIFQCISYHAPEALLTEMMERCKKLGNNALLLNSVMSAFRAEFIATRSMDFIGMIKECDESGFPKHLLFRSLGLNLALADPPESDRLQILNEAWKVITKLKNPQDYINCAEVWVEYTCKHFTKREVNTVLADVIKHMTPDRAFEDSYPQLQLIIKKVIAHFHDFSVLFSVEKFLPFLDMFQKESVRVEVCKCIMDAFIKHQQEPTKDPVILNALLHVCKTMHDSVNALTLEDEKRMLSYLINGFIKMVSFGRDFEQQLSFYVESRSMFCNLEPVLVQLIHSVNRLAMETRKVMKGNHSRKTAAFVRACVAYCFITIPSLAGIFTRLNLYLHSGQVALANQCLSQADAFFKAAISLVPEVPKMINIDGKMRPSESFLLEFLCNFFSTLLIVPDHPEHGVLFLVRELLNVIQDYTWEDNSDEKIRIYTCVLHLLSAMSQETYLYHIDKVDSNDSLYGGDSKFLAENNKLCETVMAQILEHLKTLAKDEALKRQSSLGLSFFNSILAHGDLRNNKLNQLSVNLWHLAQRHGCADTRTMVKTLEYIKKQSKQPDMTHLTELALRLPLQTRT

SEQ ID NO: 12763 - protein, 35 aa, Homo sapiens
MTSHYVIAIFALMSSCLATAGPEPGALCELSPVSA

SEQ ID NO: 12764 - protein, 729 aa, Homo sapiens
MPALGPALLQALWAGWVLTLQPLPPTAFTPNGTYLQHLARDPTSGTLYLGATNFLFQLSPGLQLEATVSTGPVLDSRDCLPPVMPDECPQAQPTNNPNQLLLVSPGALVVCGSVHQGVCEQRRLGQLEQLLLRPERPGDTQYVAANDPAVSTVGLVAQGLAGEPLLFVGRGYTSRGVGGGIPPITTRALWPPDPQAAFSYEETAKLAVGRLSEYSHHFVSAFARGASAYFLFLRRDLQAQSRAFRAYVSRVCLRDQHYYSYVELPLACEGGRYGLIQAAAVATSREVAHGEVLFAAFSSAAPPTVGRPPSAAAGASGASALCAFPLDEVDRLANRTRDACYTREGRAEDGTEVAYIEYDVNSDCAQLPVDTLDAYPCGSDHTPSPMASRVPLEATPILEWPGIQLTAVAVTMEDGHTIAFLGDSQGQLHRVYLGPGSDGHPYSTQSIQQGSAVSRDLTFDGTFEHLYVMTQSTLLKVPVASCAQHLDCASCLAHRDPYCGWCVLLGRCSRRSECSRGQGPEQWLWSFQPELGCLQVAAMSPANISREETREVFLSVPDLPPLWPGESYSCHFGEHQSPALLTGSGVMCPSPDPSEAPVLPRGADYVSVSVELRFGAVVIAKTSLSFYDCVAVTELRPSAQCQACVSSRWGCNWCVWQHLCTHKASCDAGPMVASHQVMETQQSLRALPPPSSSRPASTTSMTPPGSGSWKRRPWGQAPAPVWRAFRAPR

SEQ ID NO: 12765 - protein, 190 aa, Homo sapiens
MSREPTPPLPGDMSTGPIAESWCYTQVKVVKFSYMWTINNFSFCREEMGEVLKSSTFSSGPSDKMKWCLRVNPKGLDDESKDYLSLYLLLVSCPKSEVRAKFKFSLLNAKREETKAMESQRAYRFVQGKDWGFKKFIRRDFLLDEANGLLPDDKLTLFCENLQHCLQKRRKHCTTLPKELPPPPPLQVVL

SEQ ID NO: 12766 - protein, 391 aa, Homo sapiens
MKLITILFLCSRLLLSLTQESQSEEIDCNDKDLFKAVDAALKKYNSQNQSNNQFVLYRITEATKTVGSDTFYSFKYEIKEGDCPVQSGKTWQDCEYKDAAKAATGECTATVGKRSSTKFSVATQTCQITPAEGPVVTAQYDCLGCVHPISTQSPDLEPILRHGIQYFNNNTQHSSLFMLNEVKRAQRQDTGECTDNAYIDIQLRIASFSQNCDIYPGKDFVQPPTKICVGCPRDIPTNSPELEETLTHTITKLNAENNATFYFKIDNVKKARVQVVAGKKYFIDFVARETTCSKESNEELTESCETKKLGQSLDCNAEVYVVPWEKKIYPTVNCQPLGMISLMKRPPGFSPFRSSRIGEIKEETTSHLRSCEYKGRPPKAGAEPASEREVS

SEQ ID NO: 12767 - protein, 180 aa, Homo sapiens
MEALIPVINKLQDVFNTVGADIIQLPQIVVVGTQSSGKSSVLESLVGRDLLPRGTGIVTRRPLILQLVHVSQEDKRKTTGEENGVEAEEWGKFLHTKNKLYTDFDEIRQEIENETERISGNNKVPVGDQPKDIELQIRELILRFISNPNSIILAVTAANTDMATSEALKISREVDPDGAS

SEQ ID NO: 12768 - protein, 114 aa, Homo sapiens
MDKSLLLELPILLCCFRALSGSLSMRNDAVIEIVQCRMCHLQFPGEKCSRGRGICTATTEEACMVGRMFKRDGNPWLTFMGCLKNCADVKGIRWSVYLVNFRCCRSHDLCNEDL

SEQ ID NO: 12769 - protein, 390 aa, Homo sapiens
MTHALEWPSLTAQWLPDVTRPEGKDFSIHRLVLGTHTSDEQNHLVIASVQLPNDDAQFDASHYDSEKGEFGGFGSVSGKIEIEIKINHEGEVNRARYMPQNPCIIATKTPSSDVLVFDYTKHPSKPDPSGECNPDLRLRGHQKEGYGLSWNPNLSGHLLSASDDHTICLWDISAVPKEGKVVDAKTIFTGHTAVVEDVSWHLLHESLFGSVADDQKLMIWDTRSNNTSKPSHSVDAHTAEVNCLSFNPYSEFILATGSADKTVALWDLRNLKLKLHSFESHKDEIFQVQWSPHNETILASSGTDRRLNVWDLSKIGEEQSPEDAEDGPPELLFIHGGHTAKISDFSWNPNEPWVICSVSEDNIMQVWQMAENIYNDEDPEGSVDPEGQGS

SEQ ID NO: 12770 - protein, 707 aa, Homo sapiens
MPVPWFLLSLALGRSPVVLSLERLVGPQDATHCSPGLSCRLWDSDILCLPGDIVPAPGPVLAPTHLQTELVLRCQKETDCDLCLRVAVHLAVHGHWEEPEDEEKFGGAADSGVEEPRNASLQAQVVLSFQAYPTARCVLLEVQVPAALVQFGQSVGSVVYDCFEAALGSEVRIWSYTQPRYEKELNHTQQLPDCRGLEVWNSIPSCWALPWLNVSADGDNVHLVLNVSEEQHFGLSLYWNQVQGPPKPRWHKNLTGPQIITLNHTDLVPCLCIQVWPLEPDSVRTNICPFREDPRAHQNLWQAARLQLLTLQSWLLDAPCSLPAEAALCWRAPGGDPCQPLVPPLSWENVTVDKVLEFPLLKGHPNLCVQVNSSEKLQLQECLWADSLGPLKDDVLLLETRGPQDNRSLCALEPSGCTSLPSKASTRAARLGEYLLQDLQSGQCLQLWDDDLGALWACPMDKYIHKRWALVWLACLLFAAALSLILLLKKDHAKAAARGRAALLLYSADDSGFERLVGALASALCQLPLRVAVDLWSRRELSAQGPVAWFHAQRRQTLQEGGVVVLLFSPGAVALCSEWLQDGVSGPGAHGPHDAFRASLSCVLPDFLQGRAPGSYVGACFDRLLHPDAVPALFRTVPVFTLPSQLPDFLGALQQPRAPRSGRLQERAEQVSRALQPALDSYFHPPGTPAPGRGVGPGAGPGAGDGT

SEQ ID NO: 12771 - protein, 1591 aa, Homo sapiens
MKLYVFLVNTGTTLTFDTELTVQTVADLKHAIQSKYKIAIQHQVLVVNGGECMAADRRVCTYSAGTDTNPIFLFNKEMILCDRPPAIPKTTFSTENDMEIKVEESLMMPAVFHTVASRTQLALEMYEVAKKLCSFCEGLVHDEHLQHQGWAAIMANLEDCSNSYQKLLFKFESIYSNYLQSIEDIKLKLTHLGTAVSVMAKIPLLECLTRHSYRECLGRLDSLPEHEDSEKAEMKRSTELVLSPDMPRTTNESLLTSFPKSVEHVSPDTADAESGKEIRESCQSTVHQQDETTIDTKDGDLPFFNVSLLDWINVQDRPNDVESLVRKCFDSMSRLDPRIIRPFIAECRQTIAKLDNQNMKAIKGLEDRLYALDQMIASCGRLVNEQKELAQGFLANQKRAENLKDASVLPDLCLSHANQLMIMLQNHRKLLDIKQKCTTAKQELANNLHVRLKWCCFVMLHADQDGEKLQALLRLVIELLERVKIVEALSTVPQMYCLAVVEVVRRKMFIKHYREWAGALVKDGKRLYEAEKSKRESFGKLFRKSFLRNRLFRGLDSWPPSFCTQKPRKFDCELPDISLKDLQFLQSFCPSEVQPFLRVPLLCDFEPLHQHVLALHNLVKAAQSLDEMSQTITDLLSEQKASVSQTSPQSASSPRMESTAGITTTTSPRTPPPLTVQDPLCPAVCPLEELSPDSIDAHTFDFETIPHPNIEQTIHQVSLDLDSLAESPESDFMSAVNEFVIEENLSSPNPISDPQSPEMMVESLYSSVINAIDSRRMQDTNVCGKEDFGDHTSLNVQLERCRVVAQDSHFSIQTIKEDLCHFRTFVQKEQCDFSNSLKCTAVEIRNIIEKVKCSLEITLKEKHQKELLSLKNEYEGKLDGLIKETEENENKIKKLKGELVCLEEVLQNKDNEFALVKHEKEAVICLQNEKDQKLLEMENIMHSQNCEIKELKQSREIVLEDLKKLHVENDEKLQLLRAELQSLEQSHLKELEDTLQVRHIQEFEKVMTDHRVSLEELKKENQQIINQIQESHAEIIQEKEKQLQELKLKVSDLSDTRCKLEVELALKEAETDEIKILLEESRAQQKETLKSLLEQETENLRTEISKLNQKIQDNNENYQVGLAELRTLMTIEKDQCISELISRHEEESNILKAELNKVTSLHNQAFEIEKNLKEQIIELQSKLDSELSALERQKDEKITQQEEKYEAIIQNLEKDRQKLVSSQEQDREQLIQKLNCEKDEAIQTALKEFKLEREVVEKELLEKVKHLENQIAKSPAIDSTRGDSSSLVAELQEKLQEEKAKFLEQLEEQEKRKNEEMQNVRTSLIAEQQTNFNTVLTREKMRKENIINDLSDKLKSTMQQQERDKDLIESLSEDRARLLEEKKKLEEEVSKLRSSSFVPSPYVATAPELYGACAPELPGESDRSAVETADEGRVDSAMETSMMSVQENIHMLSEEKQRIMLLERTLQLKEEENKRLNQRLMSQSMSSVSSRHSEKIAIRDFQVGDLVLIILDERHDNYVLFTVSPTLYFLHSESLPALDLKPASGASRRPWVLGKVMEKEYCQAKKAQNRFKVPLGTKFYRVKAVSWNKKV

SEQ ID NO: 12772 - protein, 1888 aa, Homo sapiens
MAAAAAAAVGGQQPSQPELPAPGLALDKAATAAHLKAALSRPDNRAGAEELQALLERVLSAERPLAAAAGGEDAAAAGGGGGPGAAEEEALEWCKCLLAGGGGYDEFCAAVRAYDPAALCGLVWTANFVAYRCRTCGISPCMSLCAECFHQGDHTGHDFNMFRSQAGGACDCGDSNVMRESGFCKRHQIKSSSNIPCVPKDLLMMSEFVLPRFIFCLIQYLREGYNEPAADGPSEKDLNKVLQLLEPQISFLEDLTKMGGAMRSVLTQVLTNQQNYKDLTSGLGENACVKKSHEKYLIALKSSGLTYPEDKLVYGVQEPSAGTSSLAVQGFIGATGTLGQVDSSDEDDQDGSQGLGKRKRVKLSSGTKDQSIMDVLKHKSFLEELLFWTIKYEFPQKMVTFLLNMLPDQEYKVAFTKTFVQHYAFIMKTLKKSHESDTMSNRIVHISVQLFSNEELARQVTEECQLLDIMVTVLLYMMESCLIKSELQDEENSLHVVVNCGEALLKNNTYWPLVSDFINILSHQSVAKRFLEDHGLLVTWMNFVSFFQGMNLNKRELNEHVEFESQTYYAAFAAELEACAQPMWGLLSHCKVRETQEYTRNVVRYCLEALQDWFDAINFVDEPAPNQVTFHLPLHRYYAMFLSKAVKCQELDLDSVLPDQEMLMKLMIHPLQIQASLAEIHSNMWVRNGLQIKGQAMTYVQSHFCNSMIDPDIYLLQVCASRLDPDYFISSVFERFKVVDLLTMASQHQNTVLDAEHERSMLEGALTFLVILLSLRLHLGMSDDEILRAEMVAQLCMNDRTHSSLLDLIPENPNPKSGIIPGSYSFESVLSAVADFKAPVFEPGGSMQQGMYTPKAEVWDQEFDPVMVILRTVYRRDVQSAMDRYTAFLKQSGKFPGNPWPPYKKRTSLHPSYKGLMRLLHCKTLHIVLFTLLYKILMDHQNLSEHVLCMVLYLIELGLENSAEEESDEEASVGGPERCHDSWFPGSNLVSNMRHFINYVRVRVPETAPEVKRDSPASTSSDNLGSLQNSGTAQVFSLVAERRKKFQEIINRSSSEANQVVRPKTSSKWSAPGSAPQLTTAILEIKESILSLLIKLHHKLSGKQNSYYPPWLDDIEILIQPEIPKYSHGDGITAVERILLKAASQSRMNKRIIEEICRKVTPPVPPKKVTAAEKKTLDKEERRQKARERQQKLLAEFASRQKSFMETAMDVDSPENDIPMEITTAEPQVSEAVYDCVICGQSGPSSEDRPTGLVVLLQASSVLGQCRDNVEPKKLPISEEEQIYPWDTCAAVHDVRLSLLQRYFKDSSCLLAVSIGWEGGVYVQTCGHTLHIDCHKSYMESLRNDQVLQGFSVDKGEFTCPLCRQFANSVLPCYPGSNVENNPWQRPSNKSIQDLIKEVEELQGRPGAFPSETNLSKEMESVMKDIKNTTQKKYRDYSKTPGSPDNDFLFMYSVARTNLELELIHRGGNLCSGGASTAGKRSCLNQLFHVLALHMRLYSIDSEYNPWRKLTQLEEMNPQLGYEEQQPEVPILYHDVTSLLLIQILMMPQPLRKDHFTCIVKVLFTLLYTQALAALSVKCSEEDRSAWKHAGALKKSTCDAEKSYEVLLSFVISELFKGKLYHEEGTQECAMVNPIAWSPESMEKCLQDFCLPFLRITSLLQHHLFGEDLPSCQEEEEFSVLASCLGLLPTFYQTEHPFISASCLDWPVPAFDIITQWCFEIKSFTERHAEQGKALLIQESKWKLPHLLQLPENYNTIFQYYHRKTCSVCTKVPKDPAVCLVCGTFVCLKGLCCKQQSYCECVLHSQNCGAGTGIFLLINASVIIIIRGHRFCLWGSVYLDAHGEEDRDLRRGKPLYICKERYKVLEQQWISHTFDHINKRWGPHYNGL

SEQ ID NO: 12773 - protein, 83 aa, Homo sapiens
MVVALRYVWPLLLCSPCLLIQIPEEYEGHHVMEPPVITEQSPRRLVVFPTDDISLKCEASGKPEVQFRWTRDGVHFKPKEELG

SEQ ID NO: 12774 - protein, 227 aa, Homo sapiens
MVPVLLSLLLLLGPAVPQENQDGRYSLTYIYTGLSKHVEDVPAFQALGSLNDLQFFRYNSKDRKSQPMGLWRQVEGMEDWKQDSQLQKAREDIFMETLKDIVEYYNDSNGSHVLQGRFGCEIENNRSSGAFWKYYYDGKDYIEFNKEIPAWVPFDPAAQITKQKWEAEPVYVQRAKAYLEEECPATLRKYLKYSKNILDRQGTHCFLLPSTEPRIKDDLRLGAQATS

SEQ ID NO: 12775 - protein, 526 aa, Homo sapiens
MQGPLLLPGLCFLLSLFGAVTQKTKTSCAKCPPNASCVNNTHCTCNHGYTSGSGQKLFTFPLETCNAIETQAITDNCSEERKTFNLNVQMNSMDIRCSDIIQGDTQGPSAIAFISYSSLGNIINATFFEEMDKKDQVYLNSQVVSAAIGPKRNVSLSKSVTLTFQHVKMTPSTKKVFCVYWKSTGQGSQWSRDGCFLIHVNKSHTMCNCSHLSSFAVLMALTSQEEDPVLTVITYVGLSVSLLCLLLAALTFLLCKAIRNTSTSLHLQLSLCLFLAHLLFLVGIDRTEPKVLCSIIAGALHYLYLAAFTWMLLEGVHLFLTARNLTVVNYSSINRLMKWIMFPVGYGVPAVTVAISAASWPHLYGTADRCWLHLDQGFMWSFLGPVCAIFSANLVLFILVFWILKRKLSSLNSEVSTIQNTRMLAFKATAQLFILGCTWCLGLLQVGPAAQVMAYLFTIINSLQGFFIFLVYCLLSQQVQKQYQKWFREIVKSKSESETYTLSSKMGPDSKPSEGDVFPGQVKRKY

SEQ ID NO: 12776 - protein, 435 aa, Homo sapiens
MRKLLTNLPAAAVLSAQVYSAVLQGLWEENVCGTPGRTRVCTALLYGQVCPFQDSTDGLRTITSILFNWPPENTSVYYQPPQRSSFRIKLAFRNLSWPGLGLEDHQEIVLGQLVLPEPNEAKPDDPAPRPGQHALTMPALEPAPPLLADLGPALEPESPAALGPPGYLHSAPGPAPAPGEGPPPGTVLEPQSAPESSCPCRGSVKNQPSEELPDMTTFPPRLLAEQLTLMDAELFKKVVLHECLGCIWGQGHLKGNEHMAPTVRATIAHFNRLTNCITTSCLGDHSMRARDRARVVEHWIKVARECLSLNNFSSVHVIVSALCSNPIGQLHKTWAGVSSKSMKELKELCKKDTAVKRDLLIKRDDGENNGNSYRKLSPQRPCEVAVVCITLYRRGNSLREARLQDWVTHTGSVDLGQWRGALRWPPRRGTPRESR

SEQ ID NO: 12777 - protein, 51 aa, Homo sapiens
MAWTKYQLFLAGLMLVTGSINTLSAKWADNFMAEGCGGSKEHSFQHPFLQL

SEQ ID NO: 12778 - protein, 50 aa, Homo sapiens
MAPKKLSCLRSLLLPLSLTLLLPQTGPRSAMCLAACTTFGYRGCFGPTGF

SEQ ID NO: 12779 - protein, 557 aa, Homo sapiens
MPERDSEPFSNPLAPDGHDVDDPHSFHQSKLTNEDFRKLLMTPRAAPTSAPPSKSRHHEMPREYNEDEDPAARRRKKKSYYAKLRQQEIERERELAEKYRDRAKERRDGVNKDYEETELISTTANYRAVGPTAEADKSAAEKRRQLIQESKFLGGDMEHTHLVKGLDFALLQKVRAEIASKEKEEEELMEKPQKETKKDEDPENKIEFKTRLGRNVYRMLFKSKAYERNELFLPGRMAYVVDLDDEYADTDIPTTLIRSKADCPTMEAQTTLTTNDIVISKLTQILSYLRQGTRNKKLKKKDKGKLEEKKPPEADMNIFEDIGDYVPSTTKTPRDKERERYRERERDRERDRDRDRERERERDRERERERDREREEEKKRHSYFEKPKVDDEPMDVDKGPGSTKELIKSINEKFAGSAGWEGTESLKKPEDKKQLGDFFGMSNSYAECYPATMDDMAVDSDEEVDYSKMDQGNKKGPLGRWDFDTQEEYSEYMNNKEALPKAAFQYGIKMSEGRKTRRFKETNDKAELDRQWKKISAIIEKRKKMEADGVEVKRPKY

SEQ ID NO: 12780 - protein, 141 aa, Homo sapiens
MWVTKLLPALLLQHVLLHLLLLPIAIPYAEGQRKRRNTIHEFKKSAKTTLIKIDPALKIKTKKVNTADQCANRCTRNKGLPFTCKAFVFDKARKQCLWFPFNSMSSGVKKEFGHEFDLYENKDYIRNCIIGKGRSYKGTVS

SEQ ID NO: 12781 - protein, 264 aa, Homo sapiens
MALQIPGGFWAAAVTVMLVMLSTPVAEARDFPKDFLVQFKGMCYFTNGTERVRGVARYIYNREEYGRFDSDVGEFQAVTELGRSIEDWNNYKDFLEQERAAVDKVCRHNYEAELRTTLQRQVEPTVTISPSRTEALNHHNLLVCSVTDFYPAQIKVRWFRNDQEETAGVVSTSLIRNGDWTFQILVMLEITPQRGDIYTCQVEHPSLQSPITVEWRAQSESAQSKMLSGIGGFVLGLIFLGLGLIIRHRGQKGPRGPPPAGLLH

SEQ ID NO: 12782 - protein, 158 aa, Homo sapiens
MRPPQCLLHTPSLASPLLLLLLWLLGGGVGAEGREDAELLVTVRGGRLRGIRLKTPGGPVSAFLGIPFAEPPMGPRRFLPPEPKQPWSGVVDATTFQSVCYQYVDTLYPGFEGTEMWNPNRELSEDCLYLNVWTPYPRPTSPTPVLVWIYGGGFYSGA

SEQ ID NO: 12783 - protein, 229 aa, Homo sapiens
MAHVGSRKRSRSRSRSRGRGSEKRKKKSRKDTSRNCSASTSQGRKASTAPGAEERSKQKARRRTRSSSSSSSSSSSSSSSSSSSSSSSSSDGRKKRGKYKDKRRKKKKKRKKLKKKGKEKAEAQQVEALPGPSLDQWHRSAGEEEDGPVLTDEQKSRIQAMKPMTKEEWDARQSIIRKVVDPETGRTRLIKGDGEVLEEIVTKERHREINKQATRGDCLAFQMRAGLLP

SEQ ID NO: 12784 - protein, 233 aa, Homo sapiens
MLITLCYLYLWARWGRRPAELVRATVRRLRASRCSFTFCGAAAQPPGARVCLSRGGRVFCVSDSQSIEDLNKWALFLVSPFILEAEHIAFVTESIWVQSENLQRSSSSETIVKWSDCCLPLACRPGDPYRLIAEASVDNFSKLGVAFMEDRLHMDNGLVPQKIVSVHLQDSTLKEVKDQVSNKQAQILEPKPEPSLEIKPEQDGMEHVGRDDPKALGEEPKQRRGSASGSEPA

SEQ ID NO: 12785 - protein, 417 aa, Homo sapiens
MLRFYLFISLLCLSRSDAEETCPSFTRLSFHSAVVGTGLNVRLMLYTRKNLTCAQTINSSAFGNLNVTKKTTFIVHGFRPTGSPPVWMDDLVKGLLSVEDMNVVVVDWNRGATTLIYTHASSKTRKVAMVLKEFIDQMLAEGASLDDIYMIGVSLGAHISGFVGEMYDGWLGRITALGYKEPLGNIDFYPNGGLDQPGCPKTILGGFQYFKCDHQRSVYLYLSSLRESCTITAYPCDSYQDYRNGKCVSCGTSQKESCPLLGYYADNWKDHLRGKDPPMTKAFFDTAEESPFCMYHYFVDIITWNKNVRRGDITIKLRDKAGNTTESKINHEPTTFQKYHQVSLLARFNQDLDKVAAISLMFSTGSLIGPRYKLRILRMKLRSLAHPERPQLCRYDLVLMENVETVFQPILCPELQL

SEQ ID NO: 12786 - protein, 549 aa, Homo sapiens
MPVWCCRCSLAGHFRNYSDTETEGEIFNSLVQYFGDNLGRKVKAMPLVEETSLLEDSSVTFPVVIIGNGPSGICLSYMLSGYRPYLSSEAIHPNTILNSKLEEARHLSIVDQDLEYLSEGLEGRSSNPVAVLFDTLLHPDADFGYDYPSVLHWKLEQHHYIPHVVLGKGPPGGAWHNMEGSMLTISFGSWMELPGLKFKDWVSSKRRSLKGDRVMPEEIARYYKHYVKVMGLQKNFRENTYITSVSRLYRDQDDDDIQDRDISTKHLQIEKSNFIKRNWEIRGYQRIADGSHVPFCLFAENVALATGTLDSPAHLEIEGEDFPFVFHSMPEFGAAINKGKLRGKVDPVLIVGSGLTAADAVLCAYNSNIPVIHVFRRRVTDPSLIFKQLPKKLYPEYHKVYHMMCTQSYSVDSNLLSDYTSFPEHRVLSFKSDMKCVLQSVSGLKKIFKLSAAVVLIGSHPNLSFLKDQGCYLGHKSSQPITCKGNPVEIDTYTYECIKEANLFALGPLVGDNFVRFLKGGALGVTRCLATRQKKKHLFVERGGGDGIA

SEQ ID NO: 12787 - protein, 973 aa, Homo sapiens [sequence omitted]

SEQ ID NO: 12788 - protein, 146 aa, Homo sapiens
MKLWVSALLMAWFGVLSCVQAEFFTSIGHMTDLIYAEKELVQSLKEYILVEEAKLSKIKSWANKMEALTSKSAADAEGYLAHPVNAYKLVKRLNTDWPALEDLVLQDSAAGFIANLSVQRQFFPTDEDEIGAAKALMRLQDTYRLD

SEQ ID NO: 12789 - protein, 169 aa, Homo sapiens
MREWWVQVGLLAVPLLAAYLHIPPPQLSPALHSWKSSGKFFTYKGLRIFYQDSVGVVGSPEIVVLLHGFPTSSYDWYKIWEGLTLRFHRVIALDFLGFGFSDKPRPHHYSIFEQASIVEALLRHLGLQNRRINLLSHDYGDIVAQELLYRYKQNRSGRLTIKSLCLSNG

SEQ ID NO: 12790 - protein, 288 aa, Homo sapiens
MILLQHAVLPPPKQPSPSPPMSVATRSTGTLQLPPQKPFGQEASLPLAGEEELSKGGEQDCALEELCKPLYCKLCNVTLNSAQQAQAHYQGKNHGKKLRNYYAANSCPPPARMSNVVEPAATPVVPVPPQMGSFKPGGRVILATENDYCKLCDASFSSPAVAQAHYQGKNHAKRLRLAEAQSNSFSESSELGQRRARKEGNEFKMMPNRRNMYTVQNNSGPYFNPRSRQRIPRDLAMCVTPSGQFYCSMCNVGAGEEMEFRQHLESKQHKSKVSEQRYRNEMENLGYV

SEQ ID NO: 12791 - protein, 292 aa, Homo sapiens
MDSKYSTLTARVKGGDGIRIYKRNRMIMTNPIATGKDPTFDTITYEWAPPGVTQKLGLQYMELIPKEKQPVTGTEGAFYRRRQLMHQLPIYDQDPSRCRGLLENELKLMEEFVKQYKSEALGVGEVALPGQGGLPKEEGKQQEKPEGAETTAATTNGSLSDPSKEVEYVCELCKGAAPPDSPVVYSDRAGYNKQWHPTCFVCAKCSEPLVDLIYFWKDGAPWCGRHYCESLRPRCSGCDEIIFAEDYQRVEDLAWHRKHFVCEGCEQLLSGRAYIVTKGQLLCPTCSKSKRS

SEQ ID NO: 12792 - protein, 133 aa, Homo sapiens
MARRSVLYFILLNALINKGQACFCDHYAWTQWTSCSKTCNSGTQSRHRQIVVDKYYQENFCEQICSKQETRECNWQRCPINCLLGDFGPWSDCDPCIEKQSKVRSVLRPSQFGGQPCTAPLVAFQPCIPSKLC

SEQ ID NO: 12793 - protein, 105 aa, Homo sapiens
MWQLLLPTALLLLVSAGMRTDLPKAVVFLEPQWYRVLEKDSVTLKCQGAYSPEDNSTQWFHNESLISSQASSYFIDAATVDDSGEYRCQTNLSTLSDPVQLEVHI

SEQ ID NO: 12794 - protein, 242 aa, Homo sapiens
MLPKRRRARVGSPSGDAASSTPPSTRFPGVAIYLVEPRMGRSRRAFLTGLARSKGFRVLDACSSEATHVVMEETSAEEAVSWQERRMAAAPPGCTPPALLDISWLTESLGAGQPVPVECRHRLEVAGPRKGPLSPAWMPAYACQRPTPLTHHNTGLSEALEILAEAAGFEGSEGRLLTFCRAASVLKALPSPVTTLSQLQGLPHFGEHSSRVVQELLEHGVCEEVERVRRSESSSPRSSGSV

SEQ ID NO: 12795 - protein, 145 aa, Homo sapiens
MAVWLAQWLGPLLLVSLWGLLAPASLLRRLGEHIQQFQESSAQGLGLSLGPGAAALPKVGWLEQLLDPFNVSDRRSFLQRYWVNDQHWVGQDGPIFLHLGGEGSLGPGSVMRDCLAQPGPEVFKLFPSRDSGTAEEHRTSTVWCG

SEQ ID NO: 12796 - protein, 2272 aa, Homo sapiens
MSCNGGSHPRINTLGRMIRAESGPDLRYEVTSGGGGTSRMYYSRRGVITDQNSDGYCQTGTMSRHQNQNTIQELLQNCSDCLMRAELIVQPELKYGDGIQLTRSRELDECFAQANDQMEILDSLIREMRQMGQPCDAYQKRLLQLQEQMRALYKAISVPRVRRASSKGGGGYTCQSGSGWDEFTKHVTSECLGWMRQQRAEMDMVAWGVDLASVEQHINSHRGIHNSIGDYRWQLDKIKADLREKSAIYQLEEEYENLLKASFERMDHLRQLQNIIQATSREIMWINDCEEEELLYDWSDKNTNIAQKQEAFSIRMSQLEVKEKELNKLKQESDQLVLNQHPASDKIEAYMDTLQTQWSWILQITKCIDVHLKENAAYFQFFEEAQSTEAYLKGLQDSIRKKYPCDKNMPLQHLLEQIKELEKEREKILEYKRQVQNLVNKSKKIVQLKPRNPDYRSNKPIILRALCDYKQDQKIVHKGDECILKDNNERSKWYVTGPGGVDMLVPSVGLIIPPPNPLAVDLSCKIEQYYEAILALWNQLYINMKSLVSWHYCMIDIEKIRAMTIAKLKTMRQEDYMKTIADLELHYQEFIRNSQGSEMFGDDDKRKIQSQFTDAQKHYQTLVIQLPGYPQHQTVTTTEITHHGTCQDVNHNKVIETNRENDKQETWMLMELQKIRRQIEHCEGRMTLKNLPLADQGSSHHITVKINELKSVQNDSQAIAEVLNQLKDMLANFRGSEKYCYLQNEVFGLFQKLENINGVTDGYLNSLCTVRALLQAILQTEDMLKVYEARLTEEETVCLDLDKVEAYRCGLKKIKNDLNLKKSLLATMKTELQKAQQIHSQTSQQYPLYDLDLGKFGEKVTQLTDRWQRIDKQIDFRLWDLEKQIKQLRNYRDNYQAFCKWLYDAKRRQDSLESMKFGDSNTVMRFLNEQKNLHSEISGKRDKSEEVQKIAELCANSIKDYELQLASYTSGLETLLNIPIKRTMIQSPSGVILQEAADVHARYIELLTRSGDYYRFLSEMLKSLEDLKLKNTKIEVLEEELRLARDANSENCNKNKFLDQNLQKYQAECSQFKAKLASLEELKRQAELDGKSAKQNLDKCYGQIKELNEKITRLTYEIEDEKRRRKSVEDRFDQQKNDYDQLQKARQCEKENLGWQKLESEKAIKEKEYEIERLRVLLQEEGTRKREYENELAKASNRIQESKNQCTQVVQERESLLVKIKVLEQDKARLQRLEDELNRAKSTLEAETRVKQRLECEKQQIQNDLNQWKTQYSRKEEAIRKIESEREKSEREKNSLRSEIERLQAEIKRIEERCRRKLEDSTRETQSQLETERSRYQREIDKLRQRPYGSHRETQTECEWTVDTSKLVFDGLRKKVTAMQLYECQLIDKTTLDKLLKGKKSVEEVASEIQPFLRGAGSIAGASASPKEKYSLVEAKRKKLISPESTVMLLEAQAATGGIIDPHRNEKLTVDSAIARDLIDFDDRQQIYAAEKAITGFDDPFSGKTVSVSEAIKKNLIDRETGMRLLEAQIASGGVVDPVNSVFLPKDVALARGLIDRDLYRSLNDPRDSQKNFVDPVTKKKVSYVQLKERCRIEPHTGLLLLSVQKRSMSFQGIRQPVTVTELVDSGILRPSTVNELESGQISYDEVGERIKDFLQGSSCIAGIYNETTKQKLGIYEAMKIGLVRPGTALELLEAQAATGFIVDPVSNLRLPVEEAYKRGLVGIEFKEKLLSAERAVTGYNDPETGNIISLFQAMNKELIEKGHGIRLLEAQIATGGIIDPKESHRLPVDIAYKRGYFNEELSEILSDPSDDTKGFFDPNTEENLTYLQLKERCIKDEETGLCLLPLKEKKKQVQTSQKNTLRKRRVVIVDPETNKEMSVQEAYKKGLIDYETFKELCEQECEWEEITITGSDGSTRVVLVDRKTGSQYDIQDAIDKGLVDRKFFDQYRSGSLSLTQFADMISLKNGVGTSSSMGSGVSDDVFSSSRHESVSKISTISSVRNLTIRSSSFSDTLEESSPIAAIFDTENLEKISITEGIERGIVDSITGQRLLEAQACTGGIIHPTTGQKLSLQDAVSQGVIDQDMATRLKPAQKAFIGFEGVKGKKKMSAAEAVKEKWLPYEAGQRFLEFQYLTGGLVDPEVHGRISTEEAIRKGFIDGRAAQRLQDTSSYAKILTCPKTKLKISYKDAINRSMVEDITGLRLLEAASVSSKGLPSPYNMSSAPGSRSGSRSGSRSGSRSGSRSGSRRGSFDATGNSSYSYSYSFSSSSIGH

SEQ ID NO: 12797 - protein, 183 aa, Homo sapiens
PAWTEIFGVLSVATIKFEMLSTAPQSQLFLALADSSISTKGTKSGTFVMYNCARLATLFESYKCSMEQGLYPTFPPVSSLDFSLLHDEGEWLLLFNSILPFPDLLSRTAVLDCTAPGLHIAVRTEMICKFLVQLSMDFSSYYNREPRPHLFGQMFVRLQLLRAVREVLHTGLAMLGLPPLSHI

SEQ ID NO: 12798 - protein, 39 aa, Homo sapiens
MWVLGIAATFCGLFLLPGENTQRPAAEARLCAANPVLPV

SEQ ID NO: 12799 - protein, 847 aa, Homo sapiens
MGKKGKVGKSRRDKFYHLAKETGYRSRSAFKLIQLNRRFQFLQKARALLDLCAAPGGWLQVAAKFMPVSSLIVGVDLVPIKPLPNVVTLQQDITTERCRQALRKELKTWKVDVVLNDGAPNVGASWVHDAYSQAHLTLMALRLACDFLARGGSFITKVFRSRDYQPLLWIFQQLFRRVQATKPQASRHESAEIFVVCQGFLAPDKVDSKFFDPKFAFKEVEVQAKTVTELVTKKKPKAEGYAEGDLTLYHRTSVTDFLRAANPVDFLSKASEIMVDDEELAQHPATTEDIRVCCQDIRVLGRKELRSLLNWRTKLRRYVAKKLKEQAKALDISLSSGEEDEGDEEDSTAGTTKQPSKEEEEEEEEEQLNQTLAEMKAQEVAELKRKKKKLLREQRKQRERVELKMDLPGVSIADEGETGMFSLSTIRGHQLLEEVTQGDMSAADTFLSDLPRDDIYVSDVEDDGDDTSLDSDLDPEELAGVRGHQGLRDQKRMRLTEVQDDKEEEEEENPLLVPLEEKAVLQEEQANLWFSKGSFAGIEDDADEALEISQAQLLFENRRKGRQQQQKQQLPQTPPSCLKTEIMSPLYQDEAPKGTEASSGTEAATGLEGEEKDGISDSDSSTSSEEEESWEPLRGKKRSRGPKSDDDGFEIVPIEDPAKHRILDPEGLALGAVIASSKKAKRDLIDNSFNRYTFNEDEGELPEWFVQEEKQHRIRQLPVGKKEVEHYRKRWREINARPIKKVAEAKARKKRRMLKRLEQTRKKAEAVVNTVDISEREKVAQLRSLYKKAGLGKEKRHVTYVVAKKGVGRKVRRPAGVRGHFKVVDSRMKKDQRAQQRKEQKKKHKRK

SEQ ID NO: 12800 - protein, 378 aa, Homo sapiens
MKMASFLAFLLLNFRVCLLLLQLLMPHSAQFSVLGPSGPILAMVGEDADLPCHLFPTMSAETMELKWVSSSLRQVVNVYADGKEVEDRQSAPYRGRTSILRDGITAGKAALRIHNVTASDSGKYLCYFQDGDFYEKALVELKVAALGSDLHVDVKGYKDGGIHLECRSTGWYPQPQIQWSNNKGENIPTVEAPVVADGVGLYAVAASVIMRGSSGEGVSCTIRSSLLGLEKTASISIADPFFRSAQRWIAALAGTLPVLLLLLGGAGYFLWQQQEEKKTQFRKKKREQELREMAWSTMKQEQSTRVKLLEELRWRSIQYASRGERHSAYNEWKKALFKPGPPIGQTQQQTRGQGSPVALSQESAQRTDSWGPEEGGES

SEQ ID NO: 12801 - protein, 1744 aa, Homo sapiens
MRLLWGLIWASSFFTLSLQKPRLLLFSPSVVHLGVPLSVGVQLQDVPRGQVVKGSVFLRNPSRNNVPCSPKVDFTLSSERDFALLSLQVPLKDAKSCGLHQLLRGPEVQLVAHSPWLKDSLSRTTNIQGINLLFSSRRGHLFLQTDQPIYNPGQRVRYRVFALDQKMRPSTDTITVMVENSHGLRVRKKEVYMPSSIFQDDFVIPDISEPGTWKISARFSDGLESNSSTQFEVKKYVLPNFEVKITPGKPYILTVPGHLDEMQLDIQARYIYGKPVQGVAYVRFGLLDEDGKKTFFRGLESQTKLVNGQSHISLSKAEFQDALEKLNMGITDLQGLRLYVAAAIIESPGGEMEEAELTSWYFVSSPFSLDLSKTKRHLVPGAPFLLQALVREMSGSPASGIPVKVSATVSSPGSVPEVQDIQQNTDGSGQVSIPIIIPQTISELQLSVSAGSPHPAIARLTVAAPPSGGPGFLSIERPDSRPPRVGDTLNLNLRAVGSGATFSHYYYMILSRGQIVFMNREPKRTLTSVSVFVDHHLAPSFYFVAFYYHGDHPVANSLRVDVQAGACEGKLELSVDGAKQYRNGESVKLHLETDSLALVALGALDTALYAAGSKSHKPLNMGKVFEAMNSYDLGCGPGGGDSALQVFQAAGLAFSDGDQWTLSRKRLSCPKEKTTRKKRNVNFQKAINEKLGQYASPTAKRCCQDGVTRLPMMRSCEQRAARVQQPDCREPFLSCCQFAESLRKKSRDKGQAGLQRALEILQEEDLIDEDDIPVRSFFPENWLWRVETVDRFQILTLWLPDSLTTWEIHGLSLSKTKGLCVATPVQLRVFREFHLHLRLPMSVRRFEQLELRPVLYNYLDKNLTVSVHVSPVEGLCLAGGGGLAQQVLVPAGSARPVAFSVVPTAAAAVSLKVVARGSFEFPVGDAVSKVLQIEKEGAIHREELVYELNPLDHRGRTLEIPGNSDPNMIPDGDFNSYVRVTASDPLDTLGSEGALSPGGVASLLRLPRGCGEQTMIYLAPTLAASRYLDKTEQWSTLPPETKDHAVDLIQKGYMRIQQFRKADGSYAAWLSRDSSTWLTAFVLKVLSLAQEQVGGSPEKLQETSNWLLSQQQADGSFQDPCPVLDRSMQGGLVGNDETVALTAFVTIALHHGLAVFQDEGAEPLKQRVEASISKANSFLGEKASAGLLGAHAAAITAYALTLTKAPVDLLGVAHNNLMAMAQETGDNLYWGSVTGSQSNAVSPTPAPRNPSDPMPQAPALWIETTAYALLHLLLHEGKAEMADQASAWLTRQGSFQGGFRSTQDTVIALDALSAYWIASHTTEERGLNVTLSSTGRNGFKSHALQLNNRQIRGLEEELQFSLGSKINVKVGGNSKGTLKVLRTYNVLDMKNTTCQDLQIEVTVKGHVEYTMEANEDYEDYEYDELPAKDDPDAPLQPVTPLQLFEGRRNRRRREAPKVVEEQESRVHYTVCIWRNGKVGLSGMAIADVTLLSGFHALRADLEKLTSLSDRYVSHFETEGPHVLLYFDSVPTSRECVGFEAVQEVPVGLVQPASATLYDYYNPERRCSVFYGAPSKSRLLATLCSAEVCQCAEGKCPRQRRALERGLQDEDGYRMKFACYYPRVEYGFQVKVLREDSRAAFRLFETKITQVLHFTKDVKAAANQMRNFLVRASCRLRLEPGKEYLIMGLDGATYDLEGHPQYLLDSNSWIEEMPSERLCRSTRQRAACAQLNDFLQEYGTQGCQV

SEQ ID NO: 12802 - protein, 1621 aa, Homo sapiens
MAKSGGCGAGAGVGGGNGALTWVNNAAKKEESETANKNDSSKKLSVERVYQKKTQLEHILLRPDTYIGSVEPLTQFMWVYDEDVGMNCREVTFVPGLYKIFDEILVNAADNKQRDKNMTCIKVSIDPESNIISIWNNGKGIPVVEHKVEKVYVPALIFGQLLTSSNYDDDEKKVTGGRNGYGAKLCNIFSTKFTVETACKEYKHSFKQTWMNNMMKTSEAKIKHFDGEDYTCITFQPDLSKFKMEKLDKDIVALMTRRAYDLAGSCRGVKVMFNGKKLPVNGFRSYVDLYVKDKLDETGVALKVIHELANERWDVCLTLSEKGFQQISFVNSIATTKGGRHVDYVVDQVVGKLIEVVKKKNKAGVSVKPFQVKNHIWVFINCLIENPTFDSQTKENMTLQPKSFGSKCQLSEKFFKAASNCGIVESILNWVKFKAQTQLNKKCSSVKYSKIKGIPKLDDANDAGGKHSLECTLILTEGDSAKSLAVSGLGVIGRDRYGVFPLRGKILNVREASHKQIMENAEINNIIKIVGLQYKKSYDDAESLKTLRYGKIMIMTDQDQDGSHIKGLLINFIHHNWPSLLKHGFLEEFITPIVKASKNKQELSFYSIPEFDEWKKHIENQKAWKIKYYKGLGTSTAKEAKEYFADMERHRILFRYAGPEDDAAITLAFSKKKIDDRKEWLTNFMEDRRQRRLHGLPEQFLYGTATKHLTYNDFINKELILFSNSDNERSIPSLVDGFKPGQRKVLFTCFKRNDKREVKVAQLAGSVAEMSAYHHGEQALMMTIVNLAQNFVGSNNINLLQPIGQFGTRLHGGKDAASPRYIFTMLSTLARLLFPAVDDNLLKFLYDDNQRVEPEWYIPIIPMVLINGAEGIGTGWACKLPNYDAREIVNNVRRMLDGLDPHPMLPNYKNFKGTIQELGQNQYAVSGEIFVVDRNTVEITELPVRTWTQVYKEQVLEPMLNGTDKTPALISDYKEYHTDTTVKFVVKMTEEKLAQAEAAGLHKVFKLQTTLTCNSMVLFDHMGCLKKYETVQDILKEFFDLRLSYYGLRKEWLVGMLGAESTKLNNQARFILEKIQGKITIENRSKKDLIQMLVQRGYESDPVKAWKEAQEKAAEEDETQNQHDDSSSDSGTPSGPDFNYILNMSLWSLTKEKVEELIKQRDAKGREVNDLKRKSPSDLWKEDLAAFVEELDKVESQEREDVLAGMSGKAIKGKVGKPKVKKLQLEETMPSPYGRRIIPEITAMKADASKKLLKKKKGDLDTAAVKVEFDEEFSGAPVEGAGEEALTPSVPINKGPKPKREKKEPGTRVRKTPTSSGKPSAKKVKKRNPWSDDESKSESDLEETEPVVIPRDSLLRRAAAERPKYTFDFSEEEDDDADDDDDDNNDLEELKVKASPITNDGEDEFVPSDGLDKDEYTFSPGKSKATPEKSLHDKKSQDFGNLFSFPSYSQKSEDDSAKFDSNEEDSASVFSPSFGLKQTDKVPSKTVAAKKGKPSSDTVPKPKRAPKQKKVVEAVNSDSDSEFGIPKKTTTPKGKGRGAKKRKASGSENEGDYNPGRKTSKTTSKKPKKTSFDQDSDVDIFPSDFPTEPPSLPRTGRARKEVKYFAESDEEEDDVDFAMFN

SEQ ID NO: 12803 - protein, 103 aa, Homo sapiens
MAGPFSRLLSARPGLRLLALAGAGSLAAGFLLRPEPVRAASERRRLYPPSAEYPDLRKHNNCMASHLTPAVYARLCDKTTPTGWTLDQCIQTGVDNPGHPFIK

SEQ ID NO: 12804 - protein, 232 aa, Homo sapiens
MRLPWELLVLQSFILCLADDSTLHGPIFIQEPSPVMFPLDSEEKKVKLNCEVKGNPKPHIRWKLNGTDVDTGMDFRYSVVEGSLLINNPNKTQDAGTYQCTATNSFGTIVSREAKLQFAYLDNFKTRTRSTVSVRRGQGMVLLCGPPPHSGELSYAWIFNEYPSYQDNRRFVSQETGNLYIAKVEKSDVGNYTCVVTNTVTNHKVLGPPTPLILRNDVQYQLLSGEELMESQ

SEQ ID NO: 12805 - protein, 355 aa, Homo sapiens
MGVCGYLFLPWKCLVVVSLRLLFLVPTGVPVRSGDATFPKAMDNVTVRQGESATLRCTIDNRVTRVAWLNRSTILYAGNDKWCLDPRVVLLSNTQTQYSIEIQNVDVYDEGPYTCSVQTDNHPKTSRVHLIVQVSPKIVEISSDISINEGNNISLTCIATGRPEPTVTWRHISPKAVGFVSEDEYLEIQGITREQSGDYECSASNDVAAPVVRRVKVTVNYPPYISEAKGTGVPVGQKGTLQCEASAVPSAEFQWYKDDKRLIEGKKGVKVENRPFLSKLIFFNVSEHDYGNYTCVASNKLGHTNASIMLFEVKTTALTPWKGPGAVSEVSNGTSRRAGCVWLLPLLVLHLLLKF

SEQ ID NO: 12806 - protein, 226 aa, Homo sapiens
MAHVGSRKRSRSRSRSRGRGSEKRKKKSRKDTSRNCSASTSQASPSPCITERSKQKARRRTRSSSSSSSSSSSSSSSSSSSSSSSSSDGRKKRGKYKDKRRKKKKKRKKLKKKGKEKAEAQQVEALPGPSLDQWHRSAGEEEDGPVLTDEQKSRIQAMKPMTKEEWDARQSIIRKVVDPETGRTRLIKGDGEVLEEIVTKERHREINKQATRGDCLAFQMRAGLLP

SEQ ID NO: 12807 - protein, 878 aa, Homo sapiens
MAHRGGERDFQTSARRMGTSLLFQLSVHERELDLVFLDHSYAKPWSAHPDASSARPTRMLFVTPRRQHESTIESDVPIDVETVTSTPMPLYDNQKARSVMNECERHVIFARTDADAPPPPEDWEEHVNRTGWTMAQNKLFNKILKALQSDRLARLANEGACNEPVLRRVAVDKCARRVRQALASVSWDTKLIQWLHTTLVETLSLPMLAAYLDALQTLKGKIPTLIDRMLVSSNTKTGAAGAEALSLLLKRPWDPAVGVLSHNKPSKLPGSPLILIASSGPSSSVFPTSRRHRFWQSQLSCLGKVIPVATHLLNNGSGVGVLQCLEHMIGAVRSKVLEIHSHFPHKPIILIGWNTGALVACHVSVMEYVTAVVCLGFPLLTVDGPRGDVDDPLLDMKTPVLFVIGQNSLQCHPEAMEDFREKIRAENSLVVVGGADDNLRISKAKKKSEGLTQSMVDRCIQDEIVDFLTGVLTRAEGHMGSEPRDQDAEKKKKPRDVARRDLAFEVPERGSRPASPAAKLPASPSGSEDLSSVSSSPTSSPKTKVTTVTSAQKSSQIGSSQLLKRHVQRTEAVLTHKQAQVPISSEPPEEGEKEDLRVQLKRHHPSSPLPGSKTSKRPKIKVSLISQGDTAGGPCAPSQGSAPEAAGGKPITMTLGQASAGAKELTGLLTTAKSSSSEGGVSASPVPSVVSSSTAPSALHTLQSRLVATSPGSSLPGATSASSLLQGLSFSLQDISSKTSGLPANPSPGPAPQATSVKLPTPMQSLGAITTGTSTIVRTIPVATTLSSLGATPGGKPTAIHQLLTNGGLAKLASSLPGLAQISNQASGLKVPTTITLTLRGQPSRITTLSPMGSGAAPSEESSSQVLPSSSQRLPPAP

SEQ ID NO: 12808 - protein, 723 aa, Homo sapiens
MGCLWGLALPLFFFCWEVGVSGSSAGPSTRRADTAMTTDDTEVPAMTLAPGHAALETQTLSAETSSRASTPAGPIPEAETRGAKRISPARETRSFTKTSPNFMVLIATSVETSAASGSPEGAGMTTVQTITGSDPREAIFDTLCTDDSSEEAKTLTMDILTLAHTSTEAKGLSSESSASSDSPHPVITPSRASESSASSDGPHPVITPSRASESSASSDGPHPVITPSRASESSASSDGPHPVITPSRASESSASSDGPHPVITPSRASESSASSDGPHPVITPSRASESSASSDGPHPVITPSRASESSASSDGPHPVITPSRASESSASSDGPHPVITPSRASESSASSDGLHPVITPSRASESSASSDGPHPVITPSRASESSASSDGPHPVITPSWSPGSDVTLLAEALVTVTNIEVINCSITEIETTTSSIPGASDTDLIPTEGVKASSTSDPPALPDSTEAKPHITEVTASAETLSTAGTTESAAPDATVGTPLPTNSATEREVTAPGATTLSGALVTVSRNPLEETSALSVETPSYVKVSGAAPVSIEAGSAVGKTTSFAGSSASSYSPSEAALKNFTPSETPTMDIATKGPFPTSRDPLPSVPPTTTNSSRGTNSTLAKITTSAKTTMKPPTATPTTARTRPTTDVSAGENGGFLLLRLSVASPEDLTDPRVAERLMQQMERSLALSPRLECSGVISAHCKLHLLGSRDSPASAS

SEQ ID NO: 12809 - protein, 889 aa, Homo sapiens
MPASISSIFPGPTLLLSCGSEELDSEDAPPCCRLALGEPPPYGAAPIGIPRPPPPRPGMHSPPPRPAPSPGTWESQPARSVRLGGPGGGAGGAGGGRVLECPSIRITSISPTPEPPAALEDNPDAWGDGSPRDYPPPEGFGGYREAGGQGGGAFFSPSPGSSSLSSWSFFSDASDEAALYAACDEVESELNEAASRFGLGSPLPSPRASPRPWTPEDPWSLYGPSPGGRGPEDSWLLLSAPGPTPASPRPASPCGKRRYSSSGTPSSASPALSRRGSLGEEGSEPPPPPPLPLARDPGSPGPFDYVGAPPAESIPQKTRRTSSEQAVALPRSEEPASCNGKLPLGAEESVAPPGGSRKEVAGMDYLAVPSPLAWSKARIGGHSPIFRTSALPPLDWPLPSQYEQLELRIEVQPRAHHRAHYETEGSRGAVKAAPGGHPVVKLLGYSEKPLTLQMFIGTADERNLRPHAFYQVHRITGKMVATASYEAVVSGTKVLEMTLLPENNMAANIDCAGILKLRNSDIELRKGETDIGRKNTRVRLVFRVHVPQGGGKVVSVQAASVPIECSQRSAQELPQVEAYSPSACSVRGGEELVLTGSNFLPDSKVVFIERGPDGKLQWEEEATVNRLQSNEVTLTLTVPEYSNKRVSRPVQVYFYVSNGRRKRSPTQSFRFLPVICKEEPLPDSSLRGFPSASATPFGTDMDFSPPRPPYPSYPHEDPACETPYLSEGFGYGMPPLYPQTGPPPSYRPGLRMFPETRGTTGCAQPPAVSFLPRPFPSDPYGGRGSSFSLGLPFSPPAPFRPPPLPASPPLEGPFPSQSDVHPLPAEGYNKVGPGYGPGEGAPEQEKSRGGYSSGFRDSVPIQGITLEEGGCGTGGCECECVQEIALHVC

SEQ ID NO: 12810 - protein, 126 aa, Homo sapiens
MTVSDAILRYAMSNCGWAQEERQSSSHLAKGDQPKSCCFLPRSGRRSSPSPPPSEEKDHLEVWAPVVDSEVPSLESPTLPPLSSPLCCDFGRPKEGTSTLQSVRRAVGGDHAVPLDPGQLETVLEK

SEQ ID NO: 12811 - protein, 613 aa, Homo sapiens
MEQKTVIPGMPTVIPPGLTREQERAYIVQLQIEDLTRKLRTGDLGIPPNPEDRSPSPEPIYNSEGKRLNTREFRTRKKLEEERHNLITEMVALNPDFKPPADYKPPATRVSDKVMIPQDEYPEINFVGLLIGPRGNTLKNIEKECNAKIMIRGKGSVKEGKVGRKDGQMLPGEDEPLHALVTANTMENVKKAVEQIRNILKQGIETPEDQNDLRKMQLRELARLNGTLREDDNRILRPWQSSETRSITNTTVCTKCGGAGHIASDCKFQRPGDPQSAQDKARMDKEYLSLMAELGEAPVPASVGSTSGPATTPLASAPRPAAPANNPPPPSLMSTTQSRPPWMNSGPSESRPYHGMHGGGPGGPGGGPHSFPHPLPSLTGGHGGHPMQHNPNGPPPPWMQPPPPPMNQGPHPPGHHGPPPMDQYLGSTPVGSGVYRLHQGKGMMPPPPMGMMPPPPPPPSGQPPPPPSGPLPPWQQQQQQPPPPPPPSSSMASSTPLPWQQNTTTTTTSAGTGSIPPWQQQQAAAAASPGAPQMQGNPTMVPLPPGVQPPLPPGAPPPPPPPPPGSAGMMYAPPPPPPPPMDPSNFVTMMGMGVAGMPPFGMPPAPPPPPPQN

SEQ ID NO: 12812 - protein, 1863 aa, Homo sapiens
MIEDKGPRVADYFVVAGLTDVSKPLEEEIHFNDACHKVAKPKEPITDVSVIIKSLGEEVPQDYICIDVTPTGLSADLNNGSLVGPQIYLCYRRGRDKPPLTDLGVLYDWKERLKQGCEIIQSTPYGRPANISGSTSSQRIYITYRRASENMTQNTLAVTDICIIIPSKGESPPHTFCKVDKNLNNSMWGSAVYLCYKKSVAKTNTVSYKAGLICRYPQEDYESFSLPESVPLFCLPMGATIECWPSNSKYPLPVFSTFVLTGASAEKVYGAAIQFYEPYSEENLTEKQRLLLGLTSADGKSDSSKTIHTNKCICLLSHWPFFDAFRKFLTFLYRYSISGPHVLPIEKHISHFMHKVPFPSPQRPRILVQLSPHDNLILSQPVSSPLPLSGGKFSTLLQNLGPENAVTLLVFAVTEHKILIHSLRPSVLTSVTEALVSMIFPFHWPCPYVPLCPLALADVLSAPCPFIVGIDSRYFDLYDPPPDVSCVDVDTNTISQIGDKKNVAWKILPKKPCKNLMNTLNNLHQQLAKLQQRPRDDGLMDLAINDYDFNSGKRLHMIDLEIQEAFLFFMASILKGYRSYLRPITQAPSETATDAASLFALQAFLRSRDRSHQKFYNMMTKTQMFIRFIEECSFVSDKDASLAFFDDCVDKVDMDKSGEVRLIELDESFKSEHTVFVTPPEIPHLPNGEEPPLQYSYNGFPVLRNNLFERPEGFLQAKKNKLPSKSSSPNSPLPMFRRTKQEIKSAHKIAKRYSSIPQMWSRCLLRHCYGLWFICLPAYVKVCHSKVRALKTAYDVLKKMQSKKMDPPDEVCYRILMQLCGQYDQPVLAVRVLFEMQKAGIDPNAITYGYYNKAVLESTWPSRSRSGYFLWTKVRNVVLGVTQFKRALKKHAHLSQTTLSGGQSDLGYNSLSKDEVRRGDTSTEDIQEEKDKKGSDCSSLSESESTKGSADCLPKLSYQNSSSIVRLTGTSNNSAGKISGESMESTPELLLISSLEDTNETRNIQSRCFRKRHKSDNETNLQQQVVWGNRNRNLSGGVLMGFMLNRINQEATPGDIVEKLGADAKILSNVISKSTRPNTLDIGKPPLRSKRDSLEKESSDDDTPFDGSNYLADKVDSPVIFDLEDLDSETDVSKAGCVATQNPKRIQRMNSSFSVKPFEKTDVATGFDPLSLLVAETEQQQKEEEEEDEDDSKSISTPSARRDLAEEIVMYMNNMSSPLTSRTPSIDLQRACDDKLNKKSPPLVKACRRSSLPPNSPKPVRLTKSKSYTKSEEKPRDRLWSSPAFSPTCPFREESQDTLTHSSPSFNLDTLLVPKLDVLRNSMFTAGKGVAEKASKWYSRFTMYTTSSKDQSSDRTSLSSVGAQDSESTSLTDEDVCHELEGPISSQETSATSGTKRIDLSRISLESSASLEGSLSKFALPGKSEVTSSFNASNTNIFQNYAMEVLISSCSRCRTCDCLVHDEEIMAGWTADDSNLNTTCPFCGNIFLPFLNIEIRDLRRPGRYFLKSSPSTENMHFPSSISSQTRQSCISTSASGLDTSALSVQGNFDLNSKSKLQENFCTRSIQIPANRSKTAMSKCPIFPMARSISTSGPLDKEDTGRQKLISTGSLPATLQGATDSLGLEWHLPSPDPVTVPYLSPLVVWKELESLLENEGDHAITVADFVDHHPIVFWNLVWYFRRLDLPSNLPGLILSSEHCNKYSKIPRHCMSEDSKYVLIQMLWDNMKLHQDPGQPLYILWNAHTQKYPMVHLLQKSDNSFNQELLKSMVKSIKMNDVYGPMSQILETLNKCPHFKRQRSLYREILFLSLVALGRENIDIDAFDKEYKMAYDRLTPSQVKSTHNCDRPPSTGVMECRKTFGEPYL

SEQ ID NO: 12813 - protein, 508 aa, Homo sapiens
MYSSPLCLTQDEFHPFIEALLPHVRAFAYTWFNLQARKRKYFKKHEKRMSKDEERAVKDELLGEKPEVKQKWASRLLAKLRKDIRPECREDFVLSITGKKAPGCVLSNPDQKGKMRRIDCLRQADKVWRLDLVMVILFKGIPLESTDGERLVKAAQCGHPVLCVQPHHIGVAVKELDLYLAYFVRERDAEQSGSPRTGMGSDQEDSKPITLDTTDFQESFVTSGVFSVTELIQVSRTPVVTGTGPNFSLGELQGHLAYDLNPASTGLRRTLPSTSSSGSKRHKSGSMEEDVDTSPGGDYYTSPSSPTSSSRNWTEDMEGGISSPVKKTEMDKSPFNSPSPQDSPRLSSFTQHHRPVIAVHSGIARSPHPSSALHFPTTSILPQTASTYFPHTAIRYPPHLNPQDPLKDLVSLACDPASQQPGPLNGSGQLKMPSHCLSAQMLAPPPPGLPRLALPPATKPATTSEGGATSPTSPSYSPPDTSPANRSFVGLGPRDPAGIYQAQSWYLG

SEQ ID NO: 12814 - protein, 545 aa, Homo sapiens
MKQEDNQGVCAHQDSEDKGMGSDFEDSEDREGDPEEREMGSNPHDTNKREGHPEPEMGSNPQDSRHREAVPDICTEGQLSEEEGVSVRGEEDDQSGVADMAMFPGLSESDSISRSLREDDDESAGENRLEEEEEQPAPPVLPWRRHLSLGSRHRGDKPAHRRFHRLHHPMAVDLGELDSLVASIMDAPTICPDCGESFSPGAAFLQHQRIHRLAEAAAAASLEPFGLAGECDAMVGMMGVGVAGGFGAGPPLARPPREKPFRCGECGKGFSRNTYLTNHLRLHTGERPNLCADCGKSFSWRADLLKHRRLHTGEKPYPCPECGEAFSLSSHLLSHRRAHAAASGAGAAALRPFACGECGKGFVRRSHLANHQRIHTGEKPHGCGECGKRFSWRSDLVKHQRVHTGEKPYMCSECGETFSVSSHLFTHKRTHSGERPYVCRECGKGFGRNSHLVNHLRVHTGEKPFRCGQCEKRFSDFSTLTQHQRTHTGEKPYTCIECGKSFIQSSHLIRHRRIHTGNKPHKCAGCGKGFRYKTHLAQHQKLHLC

SEQ ID NO: 12815 - protein, 33 aa, Homo sapiens
MGLTPLRGRGLRSQEKLRKLSKPVYLRSHDEVS

SEQ ID NO: 12816 - protein, 146 aa, Homo sapiens
MTLRPSLLPLHLLLLLLLSAAVCRAEAGLETESPVRTLQVETLVEPPEPCAEPAAFGDTLHIHYTGSLVDGRIIDTSLTRDPLVIELGQKQVIPGLEQSLLDMCVGEKRRAIIPSHLAYGKRGFPPSVPGTKDNLMRPPGMTSSSQ

SEQ ID NO: 12817 - protein, 665 aa, Homo sapiens
MQTADHPEVVPFLYNRQQRAHSLFLASAEFCNILSRVLSRARSRPAKLYVYINELCTVLKAHSAKKKLNLAPAATTSNEPSGNNPPTHLSLDPTNAENTASQSPRTRGSRRQIQRLEQLLALYVAEIRRLQEKELDLSELDDPDSAYLQEARLKRKLIRLFGRLCELKDCSSLTGRVIEQRIPYRGTRYPEVNRRIERLINKPGPDTFPDYGDVLRAVEKAAARHSLGLPRQQLQLMAQDAFRDVGIRLQERRHLDLIYNFGCHLTDDYRPGVDPALSDPVLARRLRENRSLAMSRLDEVISKYAMLQDKSEEGERKKRRARLQGTSSHSADTPEASLDSGEGPSGMASQGCPSASRAETDDEDDEESDEEEEEEEEEEEEEATDSEEEEDLEQMQEGQEDDEEEDEEEEAAAGKDGDKSPMSSLQISNEKNLEPGKQISRSSGEQQNKGRIVSPSLLSEEPLAPSSIDAESNGEQPEELTLEEESPVSQLFELEIEALPLDTPSSVETDISSSRKQSEEPFTTVLENGAGMVSSTSFNGGVSPHNWGDSGPPCKKSRKEKKQTGSGPLGNSYVERQRSVHEKNGKKICTLPSPPSPLASLAPVADSSTRVDSPSHGLVTSSLCIPSPARLSQTPHSQPPRPGTCKTSVATQCDPEEIIVLSDSD

SEQ ID NO: 12818 - protein, 241 aa, Homo sapiens
MPPLLPLRLCRLWPRNPPSRLLGAAAGQRSRPSTYYELLGVHPGASTEEVKRAFFSKSKELHPDRDPGNPSLHSRFVELSEAYRVLSREQSRRSYDDQLRSGSPPKSPRTTVHDKSAHQTHSSWTPPNAQYWSQFHSVRPQGPQLRQQQHKQNKQVLGYCLLLMLAGMGLHYIAFRKVKQMHLNFMDEKDRIITAFYNEARARARANRGILQQERQRLGQRQPPPSEPTQGPEIVPRGAGP

SEQ ID NO: 12819 - protein, 208 aa, Homo sapiens
MESGHLLWALLFMQSLWPQLTDGATRVYYLGIRDVQWNYAPKGRNVITNQPLDSDIVASSFLKSDKNRIGGTYKKTIYKEYKDDSYTDEVAQPAWLGFLGPVLQAEVGDVILIHLKNFATRPYTIHPHGVFYEKDSEGSLYPDGSSGPLKADDSVPPGGSHIYNWTIPEGHAPTDADPACLTWIYHSHVDAPRDIATGLIGPLITCKR

SEQ ID NO: 12820 - protein, 268 aa, Homo sapiens
MGRLLALVVGAALVSSACGGCVEVDSETEAVYGMTFKILCISCKRRSETNAETFTEWTFRQKGTEEFVKILRYENEVLQLEEDERFEGRVVWNGSRGTKDLQDLSIFITNVTYNHSGDYECHVYRLLFFENYEHNTSVVKKIHIEVVDKGESGAACPFTVTHRRARWRDRWQAVDRTGWLCAWPANRPQQRAEGEGSSPSCPLQLWPLFLSSPRRGQSMPVPHRRSGYRTQLCHLCCMTSGRCLLSLSQRVVLGLPGIIIRCVSRGVV

SEQ ID NO: 12821 - protein, 378 aa, Homo sapiens
MKDVPGFLQQSQNSGPGQPAVWHRLEELYTKNFMKTLSVNLNTGKSLSSVFHFENECIDARRCSKAGGFYFRVNPLSLVEIILHVVRQMTDPNVALTFLEKTREKVKSSDEAVILCKTAIGALKLNIGDLQVTKETIEDVEEMLNNLPGVTSVHSRFYDLSSKYYQTIGNHASYYKDALRFLGCVDIKDLPVSEQQERAFTLGLAGLLGEGVFNFGELLMHPVLESLRNTDRQWLIDTLYAFNSGNVERFQTLKTAWGQQPDLAANEAQLLRKIQLLCLMEMTFTRPANHRQLTFEEIAKSAKITVNEVELLVMKALSVGLVKGSIDEVDKRVHMTWVQPRVLDLQQIKGMKDRLEFWCTDVKSMEMLVEHQAHDILT

SEQ ID NO: 12822 - protein, 150 aa, Homo sapiens
MAPALWRACNGLMAAFFALAALVQVVYTIPAVLTLLVGLNPEVTGNVIWKSISAIHILFCTVWAVGLASYLLHRTQQNILHEEEGRELSGLVIITAWIILCHSSSKNPVGGRIQLAIAIVITLFPFISWVYIYINKEMRSSWPTHCKTVI

SEQ ID NO: 12823 - protein, 780 aa, Homo sapiens
MTHTRRKSLPMLSSGLTGRREPLQMEDSNMEQGVEGVEPGMPESPGHLTGRRKNYPLRKRPLVPEKPKACKVLLTRLENVAGPRSADEADELPPDLPKPPSPAPSSEDPGLAQPRKRRLASLNAEALNNLLLEREDTSSLAGTRRSRAGDPHRSRDRDRATGGWSSSKKRPRLGDLGGGSRDLSPEPAPDEGPRRDGDPAPKRLASLNAAAFLKLSQERELPLRLPRAHAEVDGRSTEPPAPKAPRPKWPKVNGKNYPKAWQGASSGEAAGPPGWQGCPDEPWPSATPCGPSVQPSHQPLSKALESPLGLRPHLPLLMGGQAALKPEPGRPGEESPAPKQELHQPSFPTPQLSPLPMPGNPADYNGLCVGPELTALGSFYLYCGQEGLQCGGYSPCPMLPEGKLSPVAAPHEEGLLLAPSSVPSGTPFQHPPWGSSRYCSSEDTGVNGYSICGVLPLSVTHAGTTCGGCPYKMPFAAEGCRSLGQLEFPLPEAGHPASPAHPLLGCPVPSVPPAAEPVPHLQTPTSEPQTVARACPQSAKPPSGSKSGLRTGSSCRHTARSKAARRPSHPKQPRVQRPRPRRRRRRRTNGWVPVGAACEKAVYVLDEPEPAIRKSYQAVERHGETIRVRDTVLLKSGPRKTSTPYVAKISALWENPESGELMMSLLWYYRPEHLQGGRSPSMHEPLQNEVFASRHQDQNSVACIEEKCYVLTFAEYCRFCAMAKRRGEGLPSRKTALVPPSADYSTPPHRTVPEDTDPELVFLCRHVYDFRHGRILKNPQ

SEQ ID NO: 12824 - protein, 134 aa, Homo sapiens
MADSELQLVEQRIRSFPDFPTPGVVFRDISPVLKDPASFRAAIGLLARHLKATHGGRIDYIAGLDSRGFLFGPSLAQELGLGCVLIRKRGKLPGPTLWASYSLEYGKAELEIQKDALEPGQRVVVVDDLLATGV

SEQ ID NO: 12825 - protein, 263 aa, Homo sapiens
MRPCQVPGAATGPRAMWLCPLALNLILMAASGAVCEVKDVCVGSPGIPGTPGSHGLPGRDGRDGLKGDPGPPGPMGPPGEMPCPPGNDGLPGAPGIPGECGEKGEPGERGPPGLPAHLDEELQATLHDFRHQILQTRGALSLQGSIMTVGEKVFSSNGQSITFDAIQEACARAGGRIAVPRNPEENEAIASFVKKYNTYAYVGLTEGPSPGDFRYSDGTPVNYTNWYRGEPAGRGKEQCVEMYTDGQWNDRNCLYSRLTICEF

SEQ ID NO: 12826 - protein, 76 aa, Homo sapiens
MAGGKAGKDSGKAKAKAVSRSQRAGLQVLELAGNASKDLKVKRITPRHLQLAIRGDEELDSLIKATIAGGEKRRCS

SEQ ID NO: 12827 - protein, 111 aa, Homo sapiens
MLCSLLALLLGTFFGVRSQTIHQWPATLVQPVGSPLSLECTVEGTSNPNLYWYRQAAGRGLQLLFYSVGIGQISSEVPQNLSASRPQDRQFILSSKKLLLSDSGFYLCAWS

SEQ ID NO: 12828 - protein, 397 aa, Homo sapiens
MRPPQCLLHTPSLASPLLLLLLWLLGGGVGAEGREDAELLVTVRGGRLRGIRLKTPGGPVSAFLGIPFAEPPMGPRRFLPPEPKQPWSGVVDATTFQSVCYQYVDTLYPGFEGTEMWNPNRELSEDCLYLNVWTPYPRPTSPTPVLVWIYGGGFYSGASSLDVYDGRFLVQAERTVLVSMNYRVGAFGFLALPGSREAPGNVGLLDQRLALQWVQENVAAFGGDPTSVTLFGESAGAASVGMHLLSPPSRGLFHRAVLQSGAPNGPWATVGMGEARRRATQLAHLVGCPPGGTGGNDTELVACLRTRPAQVLVNHEWHVLPQESVFRFSFVPVVDGDFLSDTPEALINAGDFHGLQTRSTRRSASGRPSSTAGAPTWCTGRTSSTTTASRIAAQTCD

SEQ ID NO: 12829 - protein, 193 aa, Homo sapiens
MIRCGLACERCRWILPLLLLSAIAFDIIALAGRGWLQSSDHGQTSSLWWKCSQEGGGSGSYEEGCQSLMEYAWGRAAAAMLFCGFIILVICFILSFFALCGPQMLVFLRVIGGLLALAAVFQIISLVIYPVKYTQTFTLHANPAVTYIYNWAYGFGWAATIILIGCAFFFCCLPNYEDDLLGNAKPRYFYTSA

SEQ ID NO: 12830 - protein, 302 aa, Homo sapiens
MYNMMLLIQKRKGIGSQLLRAGEAEGDRGAGTAERSSDWLDGRSWAIKETPTGLAGRRSEDSDNIFTGEEAKYAQSRSHSSSCRISFLLANSKLLNKMCKGLAGLPASCLRSAKDMKHRLGFLLQKSDSCEHNSSHNKKDKVVICQRVSQEEVKKWAESLENLISHECGLAAFKAFLKSEYSEENIDFWISCEEYKKIKSPSKLSPKAKKIYNEFISVQATKEVNLDSCTREETSRNMLEPTITCFDEAQKKIFNLMEKDSYRRFLKSRFYLDLVNPSSCGAEKQKGAKSSADCASLVPQCA

SEQ ID NO: 12831 - protein, 396 aa, Homo sapiens
MNGQLDLSGKLIIKAQLGEDIRRIPIHNEDITYDELVLMMQRVFRGKLLSNDEVTIKYKDEDGDLITIFDSSDLSFAIQCSRILKLTLFVNGQPRPLESSQVKYLRRELIELRNKVNRLLDSLEPPGEPGPSTNIPENDTVDGREEKSASDSSGKQSTQVMAASMSAFDPLKNQDEINKNVMSAFGLTDDQVSGPPSAPAEDRSGTPDSIASSSSAAHPPGVQPQQPPYTGAQTQAGQMYQQYQQQAGYGAQQPQAPPQQPQQYGIQYSASYSQQTGPQQPQQFQGYGQQPTSQAPAPAFSGQPQQLPAQPPQQYQASNYPAQTYTAQTSQPTNYTVAPASQPGMAPSQPGAYQPRPGFTSLPGSTMTPPPSGPNPYARNRPPFGQGYTQPGPGYR

SEQ ID NO: 12832 - protein, 110 aa, Homo sapiens
MPPSGPRGTLLLLPLLLLLLLRAVLAVPLERGAPNKEETPATESPDTGLYYHRYLQEVIDVLETDGHFREKLQAANAEDIKSGKLSRELDFVSHHVRTKLDELKRQEVSR

SEQ ID NO: 12833 - protein, 462 aa, Homo sapiens
MSEGVDLIDIYADEEFNQDPEFNNTDQIDLYDDVLTATSQPSDDRSSSTEPPPPVRQEPSPKPNNKTPAILYTYSGLRNRRAAVYVGSFSWWTTDQQLIQVIRSIGVYDVVELKFAENRANGQSKGYAEVVVASENSVHKLLELLPGKVLNGEKVDVRPATRQNLSQFEAQARKRIPPRAHSRDSSDSADGRATPSENLVPSSARVDKPPSVLPYFNRPPSALPLMGLPPPPIPPPPPLSSSFGVPPPPPGIHYQHLMPPPPRLPPHLAVPPPGAIPPALHLNPAFFPPPNATVGPPPDTYMKASAPYNHHGSRDSGPPPSTVSEAEFEDIMKRNRAISSSAISKAVSGASAGDYSDAIETLLTAIAVIKQSRVANDERCRVLISSLKDCLHGIEAKSYSVGASGSSSRKRHRSRERSPSRSRESSRRHRDLLHNEDRHDDYFQERNREHERHRDRERDRHH

SEQ ID NO: 12834 - protein, 153 aa, Homo sapiens
MALIPDLAMETWLLLAVSLVLLYLHNRCDLISVSLCRYGTHSHGLFKKLGIPGPTPLPFLGNILSYHKGFCMFDMECHKKYGKVWGFYDGQQPVLAITDPDMIKTVLVKECYSVFTNRRPFGPVGFMKSAISIAEDEEWKRLRSLLSPTFTSG

SEQ ID NO: 12835 - protein, 632 aa, Homo sapiens
MGGPAAPRGAGRLRALLLALVVAGIPAGAYNLDPQRPVHFQGPADSFFGYAVLEHFHDNTRWVLVGAPKADSKYSPSVKSPGAVFKCRVHTNPDRRCTELDMARGKNRGTSCGKTCREDRDDEWMGVSLARQPKADGRVLACAHRWKNIYYEADHILPHGFCYIIPSNLQAKGRTLIPCYEEYKKKYGEEHGSCQAGIAGFFTEELVVMGAPGSFYWAGTIKVLNLTDNTYLKLNDEVIMNRRYTYLGYAVTAGHFSHPSTIDVVGGAPQDKGIGKVYIFRADRRSGTLIKIFQASGKKMGSYFGSSLCAVDLNGDGLSDLLVGAPMFSEIRDEGQVTVYINRGNGALEEQLALTGDGAYNAHFGESIASLDDLDNDGFPDVAIGAPKEDDFAGAVYIYHGDAGGIVPQYSMKLSGQKINPVLRMFGQSISGGIDMDGNGYPDVTVGAFMSDSVVLLRARPVITVDVSIFLPGSINITAPQCHDGQQPVNCLNVTTCFSFHGKHVPGEIGLNYVLMADVAKKEKGQMPRVYFVLLGETMGQVTEKLQLTYMEETCRHYVAHVKRRVQDVISPIVFEAAYSLSEHVTGEEERELPPLTPVLRWKKGQKIAQKNQVRTLKLILSTQGGSCTEQK

SEQ ID NO: 12836 - protein, 270 aa, Homo sapiens
MVTFATILQVNKVMSILFYVIFLAYLRGIQGNNMDQRSLPEDSLNSLIIKLIQADILKNKLSKQMVDVKENYQSTLPKAEAPREPERGGPAKSAFQPVIAMDTELLRQQRRYNSPRVLLSDSTPLEPPPLYLMEDYVGSPVVANRTSRRKRYAEHKSHRGEYSVCDSESLWVTDKSSAIDIRGHQVTVLGEIKTGNSPVKQYFYETRCKEARPVKNGCRGIDDKHWNSQCKTSQTYVRALTSENNKLVGWRWIRIDTSCVCALSRKIGRT

SEQ ID NO: 12837 - protein, 334 aa, Homo sapiens
MLALAKILLISTLFYSLLSGSHGKENQDINTTQNIAEVFKTMENKPISLESEANLNSDKENITTSNLKASHSPPLNLPNNSHGITDFSSNSSAEHSLGSLKPTSTISTSPPLIHSFVSKVPWNAPIADEDLLPISAHPNATPALSSENFTWSLVNDTVKTPDNSSITVSILSSEPTSPSVTPLIVEPSGWLTTNSDSFTGFTPYQEKTTLQPTLKFTNNSKLFPNTSDPQKENRNTGIVFGAILGAILGVSLLTLVGYLLCGKRKTDSFSHRRLYDDRNEPVLRLDNAPEPYDVSFGNSSYYNPTLNDSAMPESEENARDGIPMDDIPPLRTSV

SEQ ID NO: 12838 - protein, 158 aa, Homo sapiens
MWLCPLALTLILMAASGAACEVKDVCVGSPGIPGTPGSHGLPGRDGRDGVKGDPGPPGPMGPPGETPCPPGNNGLPGAPGVPGERGEKGEAGERGPPGLPAHLDEELQATLHDFRHQILQTRGALSLQGSIMTVGEKVFSSNGQSITFDAIQEACARA

SEQ ID NO: 12839 - protein, 254 aa, Homo sapiens
MAPRSLLLLLSGALALTDTWAGSHSLRYFSTAVSRPGRGEPRYIAVEYVDDTQFLRFDSDAAIPRMEPREPWVEQEGPQYWEWTTGYAKANAQTDRVALRNLLRRYNQSEAGSHTLQGMNGCDMGPDGRLLRGYHQHAYDGKDYISLNEDLRSWTAADTVAQITQRFYEAEEYAEEFRTYLEGECLELLRRYLENGKETLQRAEQSPQPTIPIVGIVAGLVVLGAVVTGAVVAAVMWRKKSSDRNRGSYSQAAV

SEQ ID NO: 12840 - protein, 118 aa, Homo sapiens
MGSKAKKRVLLPTRPAPPTVEQILEDVRGAPAEDPVFTILAPEDPPVPFRMMEDAEAPGEQLYQQSRAYVAANQRLQQAGNVLRQRCELLQRAGEDLEREVAQMKQAALPAAEAASSG

SEQ ID NO: 12841 - protein, 315 aa, Homo sapiens
MRRMLVVEVANGRSLVWGAEAVQALRERLGVGGRTVGALPRGPRQNSRLGLPLLLMPEEARLLAEIGAVTLVSAPRPDSRHHSLALTSFKRQQEESFQEQSALAAEARETRRQELLEKITEGQAAKKQKLEQASGASSSQEAGSSQAAKEDETSDGQASGEQEEAGPSSSQAGPSNGVAPLPRSALLVQLATARPRPVKARPLDWRVQSKDWPHAGRPAHELRYSIYRDLWERGFFLSAAGKFGGDFLVYPGDPLRFHAHYIAQCWAPEDTIPLQDLVAAGRLGTSVRKTLLLCSPQPDGFKSQEVSINLVYKCS

SEQ ID NO: 12842 - protein, 42 aa, Homo sapiens
NLLLLAWYFGSLLVIFCVELACGVWTYEQELMSEESHLAIEQ

SEQ ID NO: 12843 - protein, 158 aa, Homo sapiens
MAAPWASLRLVAPMWNGRIRGIHRLGAAVAPEGNQKKKRTILQFLTNYFYDVEALRDYLLQREMYKVHEKNRFRDKEWIRPDKYGHFSQEFWNFCEVPVEAVDAGDCDINYEGLDNLRTSAGWTSRTSLPCPTLASLRYWWRRCCPIARLWESTGLRA

SEQ ID NO: 12844 - protein, 142 aa, Homo sapiens
MARYMLLLLLAVWVLTGELWPGAEARAAPYGVRLCGREFIRAVIFTCGGSRWRRSDILAHEAMGDTFPDADADEDSLAGELDEAMGSSEWLALTKSPQAFYRGRPSWQGTPGVLRGSRDVLAGLSSSCCKWGCSKSEISSLC

SEQ ID NO: 12845 - protein, 1073 aa, Homo sapiens
MHQPPESTAAAAAAADISARKMAHPAMFPRRGSGSGSASALNAAGTGVGSNATSSEDFPPPSLLQPPPPAASSTSGPQPPPPQSLNLLSQAQLQAQPLAPGGTQMKKKSGFQITSVTPAQISASISSNNSIAEDTESYDDLDESHTEDLSSSEILDVSLSRATDLGEPERSSSEETLNNFQEAETPGAVSPNQPHLPQPHLPHLPQQNVVINGNAHPHHLHHHHQIHHGHHLQHGHHHPSHVAVASASITGGPPSSPVSRKLSTTGSSDSITPVAPTSAVSSSGSPASVMTNMRAPSTTGGIGINSVTGTSTVNNVNITAVGSFNPNVTSSMLGNVNISTSNIPSAAGVSVGPGVTSGVNVNILSGMGNGTISSSAAVSSVPNAAAGMTGGSVSSQQQQPTVNTSRFRVVKLDSSSEPFKKGRWTCTEFYEKENAVPATEGVLINKVVETVKQNPIEVTSERESTSGSSVSSSVSTLSHYTESVGSGEMGAPTVVVQQQQQQQQQQQQQPALQGVTLQQMDFGSTGPQSIPAVSIPQSISQSQISQVQLQSQELSYQQKQGLQPVPLQATMSAATGIQPSPVNVVGVTSALGQQPSISSLAQPQLPYSQAAPPVQTPLPGAPPPQQLQYGQQQPMVSTQMAPGHVKSVTQNPASEYVQQQPILQTAMSSGQPSSAGVGAGTTVIPVAQPQGIQLPVQPTAVPAQPAGASVQPVGQAPAAVSAVPTGSQIANIGQQANIPTAVQQPSTQVPPSVIQQGAPPSSQVVPPAQTGIIHQGVQTSAPSLPQQLVIASQSSLLTVPPQPQGVEPVAQGIVSQQLPAVSSLPSASSISVTSQVSSTGPSGMPSAPTNLVPPQNIAQTPATQNGNLVQSVSQPPLIATNTNLPLAQQIPLSSTQFSAQSLAQAIGSQIEDARRAAEPSLVGLPQTISGDSGGMSAVSDGSSSSLAASASLFPLKVLPLTTPLVDGEDESSSGASVVAIDNKIEQAMDLVKSHLMYAVREEVEVLKEQIKELIEKNSQLEQENNLLKTLASPEQLAQFQAQLQTGSPPATTQPQGTTQPPAQPASQGSGPTA

SEQ ID NO: 12846 - protein, 657 aa, Homo sapiens
MAEGSGEVVAVSATGAANGLNNGAGGTSATTCNPLSRKLHKILETRLDNDKEMLEALKALSTFFVENSLRTRRNLRGDIERKSLAINEEFVSIFKEVKEELESISEDVQAMSNCCQDMTSRLQAAKEQTQDLIVKTTKLQSESQKLEIRAQVADAFLSKFQLTSDEMSLLRGTREGPITEDFFKALGRVKQIHNDVKVLLRTNQQTAGLEIMEQMALLQETAYERLYRWAQSECRTLTQESCDVSPVLTQAMEALQDRPVLYKYTLDEFGTARRSTVVRGFIDALTRGGPGGTPRPIEMHSHDPLRYVGDMLAWLHQATASEKEHLEALLKHVTTQGVEENIQEVVGHITEGVCRPLKVRIEQVIVAEPGAVLLYKISNLLKFYHHTISGIVGNSATALLTTIEEMHLLSKKIFFNSLSLHASKLMDKVELPPPDLGPSSALNQTLMLLREVLASHDSSVVPLDARQADFVQVLSCVLDPLLQMCTVSASNLGTADMATFMVNSLYMMKTTLALFEFTDRRLEMLQFQIEAHLDTLINEQASYVLTRVGLSYIYNTVQQHKPEQGSLANMPNLDSVTLKAAMVQFDRYLSAPDNLLIPQLNFLLSATVKEQIVKQSTELVCRAYGEVYAAVMNPINEYKDPENILHRSPQQVQTLLS

SEQ ID NO: 12847 - protein, 181 aa, Homo sapiens
MEPLLLGRGLIVYLMFLLLKFSKAIEIPSSVQQVPTIIKQSKVQVAFPFDEYFQIECEAKGNPEPTFSWTKDGNPFYFTDHRIIPSNNSGTFRIPNEGHISHFQGKYRCFASNKLGIAMSEEIEFIVPSVPKFPKEKIDPLEVEEGDPIVLPCNPPKGLPPLHIYWMNIELEHIEQDERVY

SEQ ID NO: 12848 - protein, 205 aa, Homo sapiens
MGNGMNKILPGLYIGNFKDARDAEQLSKNKVTHILSVHDSARPMLEGVKYLCIPAADSPSQNLTRHFKESIKFIHECRLRGESCLVHCLAGVSRSVTLVIAYIMTVTDFGWEDALHTVRAGRSCANPNVGFQRQLQEFEKHEVHQYRQWLKEEYGESPLQDAEEAKNILGKYKEQGRTEPQPGARRWSSFPALAPLTYDNYTTET

SEQ ID NO: 12849 - protein, 301 aa, Homo sapiens
MGALRPTLLPPSLPLLLLLMLGMGCWAREVLVPEGPLYRVAGTAVSISCNVTGYEGPAQQNFEWFLYRPEAPDTALGIVSTKDTQFSYAVFKSRVVAGEVQVQRLQGDAVVLKIARLQAQDAGIYECHTPSTDTRYLGSYSGKVELRVLPDVLQVSAAPPGPRGRQAPTSPPRMTVHEGQELALGCLARTSTQKHTHLAVSFGRSVPEAPVGRSTLQEVVGIRSDLAVEAGAPYAERLAAGELRLGKEGTDRYRMVVGGAQAGDAGTYHCTAAEWIQDPDGSWAQIAEKRAVLAHVDVQTL

SEQ ID NO: 12850 - protein, 277 aa, Homo sapiens
MFPGATTPLPKAAAYPGVYGSNGRTPQPAYLSEAMKLTQSEQAHLSLELQRDSHMKQLLLIQERWKRAQREERLKAQQNTDKDAAAHLQTSHKPSAEDAEGQSPLSQKYSPSTEKCLPEIQGIFDRDPDTLLYLLQQKSEPAEPCIGSKAPKDDKTIIEEQATKIADLKRHVEFLVAENERLRKENKQLKAEKARLLKGPIEKELDVDADFVETSELWSLPPHAETATASSTWQKFAANTGKAKDIPIPNLPPLDFPSPELPLMELSEDILKGFMNN

SEQ ID NO: 12851 - protein, 687 aa, Homo sapiens
MLTFFLVSGGSLWLFVEFVLSLLEKMQTQEILRILRLPELGDLGQFFRSLSATTLDSGGARRSVIGSGPQLLTHYYDDARTMYQVFRRGLSISGNGPCLGFRKPKQPYQWLSYQEVADRAEFLGSGLLQHNCKACTDQFIGVFAQNRPEWIIVELACYTYSMVVVPLYDTLGPGAIRYIINTADISTVIVDKPQKAVLLLEHVERKETPGLKLIILMDPFEEALKERGQKCGVVIKSMQAVEDCGQENHQAPVPPQPDDLSIVCFTSGTTGNPKGAMLTHGNVVADFSGFLKVTEKVIFPRQDDVLISFLPLAHMFERVIQSVVYCHGGRVGFFQGDIRLLSDDMKALCPTIFPVVPRLLNRMYDKIFSQANTPLKRWLLEFAAKRKQAEVRSGIIRNDSIWDELFFNKIQASLGGCVRMIVTGAAPASPTVLGFLRAALGCQVYEGYGQTECTAGCTFTTPGDWTSGHVGAPLPCNHIKLVDVEELNYWACKGEGEICVRGPNVFKGYLKDPDRTKEALDSDGWLHTGDIGKWLPAGTLKIIDRKKHIFKLAQGEYVAPEKIENIYIRSQPVAQIYVHGDSLKAFLVGIVVPDPEVMPSWAQKRGIEGTYADLCTNKDLKKAILEDMVRLGKESGLHSFEQVKAIHIHSDMFSVQNGLLTPTLKAKRPELREYFKKQIEELYSISM

SEQ ID NO: 12852 - protein, 106 aa, Homo sapiens
MQLKIMPKKKRLSAGRVPLILFLCQMISALEVPLDLVQPPTITQQSPKDYIIDPRENIVIQCEAKGKPPPSFSWTRNGTHFDIDKDPLVTMKPGTGTLIINIMSEG

SEQ ID NO: 12853 - protein, 487 aa, Homo sapiens
MAESAGASSFFPLVVLLLAGSGGSGPRGVQALLCACTSCLQANYTCETDGACMVSIFNLDGMEHHVRTCIPKVELVPAGKPFYCLSSEDLRNTHCCYTDYCNRIDLRVPSGHLKEPEHPSMWGPVELVGIIAGPVFLLFLIIIIVFLVINYHQRVYHNRQRLDMEDPSCEMCLSKDKTLQDLVYDLSTSGSGSGLPLFVQRTVARTIVLQEIIGKGRFGEVWRGRWRGGDVAVKIFSSREERSWFREAEIYQTVMLRHENILGFIAADNKDNGTWTQLWLVSDYHEHGSLFDYLNRYTVTIEGMIKLALSAASGLAHLHMEIVGTQGKPGIAHRDLKSKNILVKKNGMCAIADLGLAVRHDAVTDTIDIAPNQRVGTKRYMAPEVLDETINMKHFDSFKCADIYALGLVYWEIARRCNSGGTFLFCLCSYLPFQDAGSPKAVLLPPFFLQPVGCLLPEPESSFKVAIKGVEVAVLRVRLFFRDQFVE

SEQ ID NO: 12854 - protein, 429 aa, Homo sapiens
MSGGVYGGDEVGALVFDIGSYTVRAGYAGEDCPKVDFPTAIGMVVERDDGSTLMEIDGDKGKQGGPTYYIDTNALRVPRENMEAISPLKNGMVEDWDSFQAILDHTYKMHVKSEASLHPVLMSEAPWNTRAKREKLTELMFEHYNIPAFFLCKTAVLTAFANGRSTGLILDSGATHTTAIPVHDGYVLQQGIVKSPLAGDFITMQCRELFQEMNIELVPPYMIASKEAVREGSPANWKRKEKLPQVTRSWHNYMCNCVIQDFQASVLQVSDSTYDEQVAAQMPTVHYEFPNGYNCDFGAERLKIPEGLFDPSNVKGLSGNTMLGVSHVVTTSVGMCDIDIRPGLYGSVIVAGGNTLIQSFTDRLNRELSQKTPPSMRLKLIANNTTVERRFSSWIGGSILASLGTFQQMWISKQEYEEGGKQCVERKCP

SEQ ID NO: 12855 - protein, 241 aa, Homo sapiens
MVDYYEVLGVQRHASPEDIKKAYRKLALKWHPDKNPENKEEAERKFKQVAEAYEVLSDAKKRDIYDKYGKEGLNGGGGGGSHFDSPFEFGFTFRNPDDVFREFFGGRDPFSFDFFEDPFEDFFGNRRGPRGSRSRGTGSFFSAFSGFPSFGSGFSSFDTGFTSFGSLGHGGLTSFSSTSFGGSGMGNFKSISTSTKMVNGRKITTKRIVENGQERVEVEEDGQLKSLTINGKEQLLRLDNK

SEQ ID NO: 12856 - protein, 976 aa, Homo sapiens
MALLGKRCDVPTNGCGPDRWNSAFTRKDEIITSLVSALDSMCSALSKLNAEVACVAVHDESAFVVGTEKGRMFLNARKELQSDFLRFCLSAAQHRAATSQLEGRVVRRVLTVASRALCPTGGPPWKDPEAEHPKKVQRGEGGGRSLPRSSLEHGSDVYLLRKMVEEVFDVLYSEALGRASVVPLPYERLLREPGLLAVQGLPEGLAFRRPAEYDPKALMAILEHSHRIRFKLKRPLEDGGRDSKALVELNGVSLIPKGSRDCGLHGQAPKVPPQDLPPTATSSSMASFLYSTALPNHAIRELKQEAPSCPLAPSDLGLSRPMPEPKATGAQDFSDCCGQKPTGPGGPLIQNVHASKRILFSIVHDKSEKWDAFIKETEDINTLRECVQILFNSRYAEALGLDHMVPVPYRKIACDPEAVEIVGIPDKIPFKRPCTYGVPKLKRILEERHSIHFIIKRMFDERIFTGNKFTKDTTKLEPASPPEDTSAEVSRATVLDLAGNARSDKGSMSEDCGPGTSGELGGLRPIKIEPEDLDIIQVTVPDPSPTSEEMTDSMPGHLPSEDSGYGMEMLTDKGLSEDARPEERPVEDSHGDVIRPLRKQVELLFNTRYAKAIGISEPVKVPYSKFLMHPEELFVVGLPEGISLRRPNCFGIAKLRKILEASNSIQFVIKRPELLTEGVKEPIMDSQERDSGDPLVDESLKRQGFQENYDARLSRIDIANTLREQVQDLFNKKYGEALGIKYPVQVPYKRIKSNPGSVIIEGLPPGIPFRKPCTFGSQNLERILAVADKIKFTVTRPFQGLIPKPDEDDANRLGEKVILREQVKELFNEKYGEALGLNRPVLVPYKLIRDSPDAVEVTGLPDDIPFRNPNTYDIHRLEKILKAREHVRMVIINQLQPFAEICNDAKVPAKDSSIPKRKRKRVSEGNSVSSSSSSSSSSSSNPDSVASANQISLVQWPMYMVDYAGLNVQLPGPLNY

SEQ ID NO: 12857 - protein, 1508 aa, Homo sapiens
MAVEGSTITSRIKNLLRSPSIKLRRSKAGNRREDLSSKVTLEKVLGITVSGGRGLACDPRSGLVAYPAGCVVVLFNPRKHKQHHILNSSRKTITALAFSPDGKYLVTGESGHMPAVRVWDVAEHSQVAELQEHKYGVACVAFSPSAKYIVSVGYQHDMIVNVWAWKKNIVVASNKVSSRVTAVSFSEDCSYFVTAGNRHIKFWYLDDSKTSKVNATVPLLGRSGLLGELRNNLFTDVACGRGKKADSTFCITSSGLLCEFSDRRLLDKWVELRTTVAHCISVSQDYIFCGCADGTVRLFNPSNLHFLSTLPRPHALGTDIASVTEASRLFSGVANARYPDTIALTFDPTNQWLSCVYNDHSIYVWDVRDPKKVGKVYSALYHSSCVWSVEVYPEVKDSNQACLPPSSFITCSSDNTIRLWNTESSGVHGSTLHRNILSSDLIKIIYVDGNTQALLDTELPGGDKADASLLDPRVGIRSVCVSPNGQHLASGDRMGTLRVHELQSLSEMLKVEAHDSEILCLEYSKPDTGLKLLASASRDRLIHVLDAGREYSLQQTLDEHSSSITAVKFAASDGQVRMISCGADKSIYFRTAQKSGDGVQFTRTHHVVRKTTLYDMDVEPSWKYTAIGCQDRNIRIFNISSGKQKKLFKGSQGEDGTLIKVQTDPSGIYIATSCSDKNLSIFDFSSGECVATMFGHSEIVTGMKFSNDCKHLISVSGDSCIFVWRLSSEMTISMRQRLAELRQRQRGGKQQGPSSPQRASGPNRHQAPSMLSPGPALSSDSDKEGEDEGTEEELPALPVLAKSTKKALASVPSPALPRSLSHWEMSRAQESVGFLDPAPAANPGPRRRGRWVQPGVELSVRSMLDLRQLETLAPSLQDPSQDSLAIIPSGPRKHGQEALETSLTSQNEKPPRPQASQPCSYPHIIRLLSQEEGVFAQDLEPAPIEDGIVYPEPSDNPTMDTSEFQVQAPARGTLGRVYPGSRSSEKHSPDSACSVDYSSSCLSSPEHPTEDSESTEPLSVDGISSDLEEPAEGDEEEEEEEGGMGPYGLQEGSPQTPDQEQFLKQHFETLASGAAPGAPVQVPERSESRSISSRFLLQVQTRPLREPSPSSSSLALMSRPAQVPQASGEQPRGNGANPPGAPPEVEPSSGNPSPQQAASVLLPRCRLNPDSSWAPKRVATASPFSGLQKAQSVHSLVPQERHEASLQAPSPGALLSREIEAQDGLGSLPPADGRPSRPHSYQNPTTSSMAKISRSISVGENLGLVAEPQAHAPIRVSPLSKLALPSRAHLVLDIPKPLPDRPTLAAFSPVTKGRAPGEAEKPGFPVGLGKAHSTTERWACLGEGTTPKPRTECQAHPGPSSPCAQQLPVSSLFQGPENLQPPPPEKTPNPMECTKPGAALSQDSEPAVSLEQCEQLVAELRGSVRQAVRLYHSVAGCKMPSAEQSRIAQLLRDTFSSVRQELEAVAGAVLSSPGSSPGAVGAEQTQALLEQYSELLLRAVERRMERKL

SEQ ID NO: 12858 - protein, 511 aa, Homo sapiens
MKFFLLLFTIGFCWAQYSPNTQQGRTSIVHLFEWRWVDIALECERYLAPKGFGGVQVSPPNENVAIYNPFRPWWERYQPVSYKLCTRSGNEDEFRNMVTRCNNVGVRIYVDAVINHMCGNAVSAGTSSTCGSYFNPGSRDFPAVPYSGWDFNDGKCKTGSGDIENYNDATQVRDCRLTGLLDLALEKDYVRSKIAEYMNHLIDIGVAGFRLDASKHMWPGDIKAILDKLHNLNSNWFPAGSKPFIYQEVIDLGGEPIKSSDYFGNGRVTEFKYGAKLGTVIRKWNGEKMSYLKNWGEGWGFVPSDRALVFVDNHDNQRGHGAGGASILTFWDARLYKMAVGFMLAHPYGFTRVMSSYRWPRQFQNGNDVNDWVGPPNNNGVIKEVTINPDTTCGNDWVCEHRWRQIRNMVIFRNVVDGQPFTNWYDNGSNQVAFGRGNRGFIVFNNDDWSFSLTLQTGLPAGTYCDVISGDKINGNCTGIKIYVSDDGKAHFSISNSAEDPFIAIHAESKL

SEQ ID NO: 12859 - protein, 1242 aa, Homo sapiens
MGAASGRRGPGLLLPLPLLLLLPPQPALALDPGLQPGNFSADEAGAQLFAQSYNSSAEQVLFQSVAASWAHDTNITAENARRQEEAALLSQEFAEAWGQKAKELYEPIWQNFTDPQLRRIIGAVRTLGSANLPLAKRQQYNALLSNMSRIYSTAKVCLPNKTATCWSLDPDLTNILASSRSYAMLLFAWEGWHNAAGIPLKPLYEDFTALSNEAYKQDGFTDTGAYWRSWYNSPTFEDDLEHLYQQLEPLYLNLHAFVRRALHRRYGDRYINLRGPIPAHLLGDMWAQSWENIYDMVVPFPDKPNLDVTSTMLQQGWNATHMFRVAEEFFTSLELSPMPPEFWEGSMLEKPADGREVVCHASAWDFYNRKDFRIKQCTRVTMDQLSTVHHEMGHIQYYLQYKDLPVSLRRGANPGFHEAIGDVLALSVSTPEHLHKIGLLDRVTNDTESDINYLLKMALEKIAFLPFGYLVDQWRWGVFSGRTPPSRYNFDWWYLRTKYQGICPPVTRNETHFDAGAKFHVPNVTPYIRYFVSFVLQFQFHEALCKEAGYEGPLHQCDIYRSTKAGAKLRKVLQAGSSRPWQEVLKDMVGLDALDAQPLLKYFQPVTQWLQEQNQQNGEVLGWPEYQWHPPLPDNYPEGIDLVTDEAEASKFVEEYDRTSQVVWNEYAEANWNYNTNITTETSKILLQKNMQIANHTLKYGTQARKFDVNQLQNTTIKRIIKKVQDLERAALPAQELEEYNKILLDMETTYSVATVCHPNGSCLQLEPDLTNVMATSRKYEDLLWAWEGWRDKAGRAILQFYPKYVELINQAARLNGYVDAGDSWRSMYETPSLEQDLERLFQELQPLYLNLHAYVRRALHRHYGAQHINLEGPIPAHLLGNMWAQTWSNIYDLVVPFPSAPSMDTTEAMLKQGWTPRRMFKEADDFFTSLGLLPVPPEFWNKSMLEKPTDGREVVCHASAWDFYNGKDFRIKQCTTVNLEDLVVAHHEMGHIQYFMQYKDLPVALREGANPGFHEAIGDVLALSVSTPKHLHSLNLLSSEGGSDEHDINFLMKMALDKIAFIPFSYLVDQWRWRVFDGSITKENYNQEWWSLRLKYQGLCPPVPRTQGDFDPGAKFHIPSSVPYIRYFVSFIIQFQFHEALCQAAGHTGPLHKCDIYQSKEAGQRLATAMKLGFSRPWPEAMQLITGQPNMSASAMLSYFKPLLDWLRTENELHGEKLGWPQYNWTPNSGTATHPTSSLGS

SEQ ID NO: 12860 - protein, 144 aa, Homo sapiens
MRTHTRGAPSVFFIYLLCFVSAYITDENPEVMIPFTNANYDSHPMLYFSRAEVAELQLRAASSHEHIAARLTEAVHTMLSSPLEYLPPWDPKDYSARWNEIFGNNLGALAMFCVLYPENIEARDMAKDYMERMAAQPSWLVKDA

SEQ ID NO: 12861 - protein, 55 aa, Homo sapiens
MAWTKYQLFLAGLMLVTGSINTLSAKQWACSWENSPAWLPSTSSDAELQGNQTPA

SEQ ID NO: 12862 - protein, 112 aa, Homo sapiens
MVNVPKTRRTFCKKCGKHQPHKVTQYKKGKDSLYAQGKRRYDRKQSGYGGQTKPIFRKKAKTTKKIVLRLECVEPNCRSKRMLAIKRCKHFELGGDKKRKVYNYGWKVQSFS

SEQ ID NO: 12863 - protein, 327 aa, Homo sapiens
MAGEITETGELYSSYVFVRVVKPNKIAMLFIMLIPGWARWLTPVIPALWEAEAGRSPEVRSSRPAWPTCFVTTTFVIEAMAAANAQLHWKRMENLKEEEDDDSSTASDSDVLIRDNYERAEKRPILSVQRRGSPNPFEITDRVEMGQMASMFFNKVGVNLFYFCIIVYLYGDLAIYAAAVPFSLMQVTCSATGNDSCGVEADTKYNDTDRCWGPLRRVDAYRIYLAIFTLLLGPFTFFDVQKTKYLQILTSLMRWIDGPPGSVMGRAEEDASPAWPRSRCRCGGKLKLNSLYPTSATCMAPDAPGAGQVKVGVNFLCLPPHRSTRPT

SEQ ID NO: 12864 - protein, 410 aa, Homo sapiens
MRACISLVLAVLCGLAWAGKIESCASRCNEKFNRDAACQCDRRCLWHGNCCEDYEHLCTEDHKESEPLPQLEEETEEALASNLYSAPTSCQGRCYEAFDKHHQCHCNARCQEFGNCCKDFESLCSDHEVSHSSDAITKEEIQSISEKIYRADTNKAQKEDIVLNSQNCISPSETRNQVDRCPKPLFTYVNEKLFSKPTYAAFINLLNNYQRATGHGEHFSAQELAEQDAFLREIMKTAVMKELYSFLHHQNRYGSEQEFVDDLKNMWFGLYSRGNEEGDSSGFEHVFSGEVKKGKVTGFHNWIRFYLEEKEGLVDYYSHIYDGPWDSYPDVLAMQFNWDGYYKEVGSAFIGSSPEFEFALYSLCFIARPGKVCQLSLGGYPLAVRTYTWDKSTYGNGKKYIATAYIVSST

SEQ ID NO: 12865 - protein, 77 aa, Homo sapiens
MRAPGCGRLVLPLLLLAAAALAEGDAKGLKEGETPGNFMEDEQWLSSISQYSGKIKHWNRFRDVPSSDPPSTTQATP

SEQ ID NO: 12866 - protein, 1014 aa, Homo sapiens
METCAGPHPLRLFLCRMQLCLALLLGPWRPGTAEEVILLDSKASQAELGWTALPSNGWEEISGVDEHDRPIRTYQVCNVLEPNQDNWLQTGWISRGRGQRIFVELQFTLRDCSSIPGAAGTCKETFNVYYLETEADLGRGRPRLGGSRPRKIDTIAADESFTQGDLGERKMKLNTEVREIGPLSRRGFHLAFQDVGACVALVSVRVYYKQCRATVRGLATFPATAAESAFSTLVEVAGTCVAHSEGEPGSPPRMHCGADGEWLVPVGRCSCSAGFQERGDFCEACPPGFYKVSPRRPLCSPCPEHSRALENASTFCVCQDSYARSPTDPPSASCTRPPSAPRDLQYSLSRSPLVLRLRWLPPADSGGRSDVTYSLLCLRCGREGPAGACEPCGPRVAFLPRQAGLRERAATLLHLRPGARYTVRVAALNGVSGPAAAAGTTYAQVTVSTGPGAPWEEDEIRRDRVEPQSVSLSWREPIPAGAPGANDTEYEIRYYEKGQSEQTYSMVKTGAPTVTVTNLKPATRYVFQIRAASPGPSWEAQSFNPSIEVQTLGEAASGSRDQSPAIVVTVVTISALLVLGSVMSVLAIWRRPCSYGKGGGDAHDEEELYFHFKVPTRRTFLDPQSCGDLLQAVHLFAKELDAKSVTLERSLGGGRFGELCCGCLQLPGRQELLVAVHMLRDSASDSQRLGFLAEALTLGQFDHSHIVRLEGVVTRGSTLMIVTEYMSHGALDGFLRRHEGQLVAGQLMGLLPGLASAMKYLSEMGYVHRGLAARHVLVSSDLVCKISGFGRGPRDRSEAVYTTMSGRSPALWAAPETLQFGHFSSASDVWSFGIIMWEVMAFGERPYWDMSGQDVIKAVEDGFRLPPPRNCPNLLHRLMLDCWQKDPGERPRFSQIHSILSKMVQDPEPPKCALTTCPRPPTPLADRAFSTFPSFGSVGAWLEALDLCRYKDSFAAAGYGSLEAVAEMTAQDLVSLGISLAEHREALLSGISALQARVLQLQGQGVQVIIKTCL

SEQ ID NO: 12867 - protein, 171 aa, Homo sapiens
MAASPHTLSSRLLTGCVGGSVWYLERRTIQDSPHKFLHLLRNVNKQWITFQHFSFLKRMYVTQLNRSHNQQVRPKPEPVASPFLEKTSSGQAKAEIYEMRPLSPPSLSLSRKPNEKELIELEPDSVIEDSIDVGKETKEEKRWKEMKLQVYDLPGILARLSKIKLTGTLFF

SEQ ID NO: 12868 - protein, 285 aa, Homo sapiens
MAAPKGSLWVRTQLGLPPLLLLTMALAGGSGTASAEAFDSVLGDTASCHRACQLTYPLHTYPKVSASLYTVDHIEEELYACQRGCRLFSICQFVDDGIDLNRTKLECESACTEAYSQSDEQYACHLGCQNQLPFAELRQEQLMSLMPKMHLLFPLTLVRSFWSDMMDSAQSFITSSWTFYLQADDGKIVIFQSKPEIQYAPHLEQEPTNLRESSLSKMSYLQMRNSQAHRNFLEDGESDGFLRCLSLNSGWILTTTLVLSVMVLLWICCATVATAVEQYVPSEVN

SEQ ID NO: 12869 - protein, 158 aa, Homo sapiens
MAGFLDNFRWPECECIDWSERRNAVASVVAGILFFTGWWIMIDAAVVYPKPEQLNHAFHTCGVFSTLAFFMINAVSNAQVRGDSYESGCLGRTGARVWLFIGFMLMFGSLIASMWILFGAYVTQNTDVYPGLAVFFQNALIFFSTLIYKFGRTEELWT

SEQ ID NO: 12870 - protein, 1679 aa, Homo sapiens
MSTPDPPLGGTPRPGPSPGPGPSPGAMLGPSPGPSPGSAHSMMGPSPGPPSAGHPIPTQGPGGYPQDNMHQMHKPMESMHEKGMSDDPRYNQMKGMGMRSGGHAGMGPPPSPMDQHSQGYPSPLGGSEHASSPVPASGPSSGPQMSSGPGGAPLDGADPQALGQQNRGPTPFNQNQLHQLRAQIMAYKMLARGQPLPDHLQMAVQGKRPMPGMQQQMPTLPPPSVSATGPGPGPGPGPGPGPGPAPPNYSRPHGMGGPNMPPPGPSGVPPGMPGQPPGGPPKPWPEGPMANAAAPTSTPQKLIPPQPTGRPSPAPPAVPPAASPVMPPQTQSPGQPAQPAPMVPLHQKQSRITPIQKPRGLDPVEILQEREYRLQARIAHRIQELENLPGSLAGDLRTKATIELKALRLLNFQRQLRQEVVVCMRRDTALETALNAKAYKRSKRQSLREARITEKLEKQQKIEQERKRRQKHQEYLNSILQHAKDFKEYHRSVTGKIQKLTKAVATYHANTEREQKKENERIEKERMRRLMAEDEEGYRKLIDQKKDKRLAYLLQQTDEYVANLTELVRQHKAAQVAKEKKKKKKKKKAENAEGQTPAIGPDGEPLDETSQMSDLPVKVIHVESGKILTGTDAPKAGQLEAWLEMNPGYEVAPRSDSEESGSEEEEEEEEEEQPQAAQPPTLPVEEKKKIPDPDSDDVSEVDARHIIENAKQDVDDEYGVSQALARGLQSYYAVAHAVTERVDKQSALMVNGVLKQYQIKGLEWLVSLYNNNLNGILADEMGLGKTIQTIALITYLMEHKRINGPFLIIVPLSTLSNWAYEFDKWAPSVVKVSYKGSPAARRAFVPQLRSGKFNVLLTTYEYIIKDKHILAKIRWKYMIVDEGHRMKNHHCKLTQVLNTHYVAPRRLLLTGTPLQNKLPELWALLNFLLPTIFKSCSTFEQWFNAPFAMTGEKVDLNEEETILIIRRLHKVLRPFLLRRLKKEVEAQLPEKVEYVIKCDMSALQRVLYRHMQAKGVLLTDGSEKDKKGKGGTKTLMNTIMQLRKICNHPYMFQHIEESFSEHLGFTGGIVQGLDLYRASGKFELLDRILPKLRATNHKVLLFCQMTSLMTIMEDYFAYRGFKYLRLDGTTKAEDRGMLLKTFNEPGSEYFIFLLSTRAGGLGLNLQSADTVIIFDSDWNPHQDLQAQDRAHRIGQQNEVRVLRLCTVNSVEEKILAAAKYKLNVDQKVIQAGMFDQKSSSHERRAFLQAILEHEEQDESRHCSTGSGSASFAHTAPPPAGVNPDLEEPPLKEEDEVPDDETVNQMIARHEEEFDLFMRMDLDRRREEARNPKRKPRLMEEDELPSWIIKDDAEVERLTCEEEEEKMFGRGSRHRKEVDYSDSLTEKQWLKKITGKDIHDTASSVARGLQFQRGLQFCTRASKAIEEGTLEEIEEEVRQKKSSRKRKRDSDAGSSTPTTSTRSRDKDDESKKQKKRGRPPAEKLSPNPPNLTKKMKKIVDAVIKYKDSSSGRQLSEVFIQLPSRKELPEYYELIRKPVDFKKIKERIRNHKYRSLNDLEKDVMLLCQNAQTFNLEGSLIYEDSIVLQSVFTSVRQKIEKEDDSEGEESEEEEEGEEEGSESESRSVKVKIKLGRKEKAQDRLKGGRRRPSRGSRAKPVVSDDDSEEEQEEDRSGSGSEED

SEQ ID NO: 12871 - protein, 692 aa, Homo sapiens
MGPWGWKLRWTVALLLAAAGTAVGDRCERNEFQCQDGKCISYKWVCDGSAECQDGSDESQETCLSVTCKSGDFSCGGRVNRCIPQFWRCDGQVDCDNGSDEQGCLTLCEGPNKFKCHSGECITLDKVCNMARDCRDWSDEPIKECGTNECLDNNGGCSHVCNDLKIGYECLCPDGFQLVAQRRCEDIDECQDPDTCSQLCVNLEGGYKCQCEEGFQLDPHTKACKAVGSIAYLFFTNRHEVRKMTLDRSEYTSLIPNLRNVVALDTEVASNRIYWSDLSQRMICSTQLDRAHGVSSYDTVISRDIQAPDGLAVDWIHSNIYWTDSVLGTVSVADTKGVKRKTLFRENGSKPRAIVVDPVHGFMYWTDWGTPAKIKKGGLNGVDIYSLVTENIQWPNGITLDLLSGRLYWVDSKLHSISSIDVNGGNRKTILEDEKRLAHPFSLAVFEDKVFWTDIINEAIFSANRLTGSDVNLLAENLLSPEDMVLFHNLTQPRGVNWCERTTLSNGGCQYLCLPAPQINPHSPKFTCACPDGMLLARDMRSCLTEAEAAVATQETSTVRLKVSSTAVRTQHTTTRPVPDTSRLPGATPGLTTVEIVTMSHQALGDVAGRGNEKKPSSVRALSIVLPIVLLVFLCLGVFLLWKNWRLKNINSINFDNPVYQKTTEDEVHICHNQDGYSYPSRQMVSLEDDVA

SEQ ID NO: 12872 - protein, 77 aa, Homo sapiens
MSPPLCPLLLLAVGLRLAGTLNPSDPNTCSFWESFTTTTKESHSRPFSLLPSEPCERPWEGPHTCPQPTNSEETPGF

SEQ ID NO: 12873 - protein, 81 aa, Homo sapiens
MSRSSKVVLGLSVLLTAATVAGVHVKQQWDQQRLRDGVIRDIERQIRKKENIRLLGEQIILTEQLEAEREKMLLAKGSQKS

SEQ ID NO: 12874 - protein, 2695 aa, Homo sapiens
MSDKMSSFLHIGDICSLYAEGSTNGFISTLGLVDDRCVVQPETGDLNNPPKKFRDCLFKLCPMNRYSAQKQFWKAAKPGANSTTDAVLLNKLHHAADLEKKQNETENRKLLGTVIQYGNVIQLLHLKSNKYLTVNKRLPALLEKNAMRVTLDEAGNEGSWFYIQPFYKLRSIGDSVVIGDKVVLNPVNAGQPLHASSHQLVDNPGCNEVNSVNCNTSWKIVLFMKWSDNKDDILKGGDVVRLFHAEQEKFLTCDEHRKKQHVFLRTTGRQSATSATSSKALWEVEVVQHDPCRGGAGYWNSLFRFKHLATGHYLAAEVDPDQDASRSRLRNAQEKMVYSLVSVPEGNDISSIFELDPTTLRGGDSLVPRNSYVRLRHLCTNTWVHSTNIPIDKEEEKPVMLKIGTSPVKEDKEAFAIVPVSPAEVRDLDFANDASKVLGSIAGKLEKGTITQNERRSVTKLLEDLVYFVTGGTNSGQDVLEVVFSKPNRERQKLMREQNILKQIFKLLQAPFTDCGDGPMLRLEELGDQRHAPFRHICRLCYRVLRHSQQDYRKNQEYIAKQFGFMQKQIGYDVLAEDTITALLHNNRKLLEKHITAAEIDTFVSLVRKNREPRFLDYLSDLCVSMNKSIPVTQELICKAVLNPTNADILIETKLVLSRFEFEGVSSTGENALEAGEDEEEVWLFWRDSNKEIRSKSVRELAQDAKEGQKEDRDVLSYYRYQLNLFARMCLDRQYLAINEISGQLDVDLILRCMSDENLPYDLRASFCRLMLHMHVDRDPQEQVTPVKYARLWSEIPSEIAIDDYDSSGASKDEIKERFAQTMEFVEEYLRDVVCQRFPFSDKEKNKLTFEVVNLARNLIYFGFYNFSDLLRLTKILLAILDCVHVTTIFPISKMAKGEENKGSNVMRSIHGVGELMTQVVLRGGGFLPMTPMAAAPEGNVKQAEPEKEDIMVMDTKLKIIEILQFILNVRLDYRISCLLCIFKREFDESNSQTSETSSGNSSQEGPSNVPGALDFEHIEEQAEGIFGGSEENTPLDLDDHGGRTFLRVLLHLTMHDYPPLVSGALQLLFRHFSQRQEVLQAFKQVQLLVTSQDVDNYKQIKQDLDQLRSIVEKSELWVYKGQGPDETMDGASGENEHKKTEEGNNKPQKHESTSSYNYRVVKEILIRLSKLCVQESASVRKSRKQQQRLLRNMGAHAVVLELLQIPYEKAEDTKMQEIMRLAHEFLQNFCAGNQQNQALLHKHINLFLNPGILEAVTMQHIFMNNFQLCSEINERVVQHFVHCIETHGRNVQYIKFLQTIVKAEGKFIKKCQDMVMAELVNSGEDVLVFYNDRASFQTLIQMMRSERDRMDENSPLMYHIHLVELLAVCTEGKNVYTEIKCNSLLPLDDIVRVVTHEDCIPEVKIAYINFLNHCYVDTEVEMKEIYTSNHMWKLFENFLVDICRACNNTSDRKHADSILEKYVTEIVMSIVTTFFSSPFSDQSTTLQTRQPVFVQLLQGVFRVYHCNWLMPSQKASVESCIRVLSDVAKSRAIAIPVDLDSQVNNLFLKSHSIVQKTAMNWRLSARNAARRDSVLAASRDYRNIIERLQDIVSALEDRLRPLVQAELSVLVDVLHRPELLFPENTDARRKCESGGFICKLIKHTKQLLEENEEKLCIKVLQTLREMMTKDRGYGEKGEALRQVLVNRYYGNVRPSGRRESLTSFGNGPLSAGGPGKPGGGGGGSGSSSMSRGEMSLAEVQCHLDKEGASNLVIDLIMNASSDRVFHESILLAIALLEGGNTTIQHSFFCRLTEDKKSEKFFKVFYDRMKVAQQEIKATVTVNTSDLGNKKKDDEVDRDAPSRKKAKEPTTQITEEVRDQLLEASAATRKAFTTFRREADPDDHYQPGEGTQATADKAKDDLEMSAVITIMQPILRFLQLLCENHNRDLQNFLRCQNNKTNYNLVCETLQFLDCICGSTTGGLGLLGLYINEKNVALINQTLESLTEYCQGPCHENQNCIATHESNGIDIITALILNDINPLGKKRMDLVLELKNNASKLLLAIMESRHDSENAERILYNMRPKELVEVIKKAYMQGEVEFEDGENGEDGAASPRNVGHNIYILAHQLARHNKELQSMLKPGGQVDGDEALEFYAKHTAQIEIVRLDRTMEQIVFPVPSICEFLTKESKLRIYYTTERDEQGSKINDFFLRSEDLFNEMNWQKKLRAQPVLYWCARNMSFWSSISFNLAVLMNLLVAFFYPFKGVRGGTLEPHWSGLLWTAMLISLAIVIALPKPHGIRALIASTILRLIFSVGLQPTLFLLGAFNVCNKIIFLMSFVGNCGTFTRGYRAMVLDVEFLYHLLYLVICAMGLFVHEFFYSLLLFDLVYREETLLNVIKSVTRNGRSIILTAVLALILVYLFSIVGYLFFKDDFILEVDRLPNETAVPETGESLASEFLFSDVCRVESGENCSSPAPREELVPAEETEQDKEHTCETLLMCIVTVLSHGLRSGGGVGDVLRKPSKEEPLFAARVIYDLLFFFMVIIIVLNLIFGVIIDTFADLRSEKQKKEEILKTTCFICGLERDKFDNKTVTFEEHIKEEHNMWHYLCFIVLVKVKDSTEYTGPESYVAEMIKERNLDWFPRMRAMSLVSSDSEGEQNELRNLQEKLESTMKLVTNLSGQLSELKDQMTEQRKQKQRIGLLGHPPHMNVNPQQPA

SEQ ID NO: 12875 - protein, 421 aa, Homo sapiens
MGKRLDQPQMYPQYTYYYPHYLQTKQSYAPAPHPMAPPSPSTNSSSNNSSNNSSGEQLSKTNLYIRGLPPGTTDQDLIKLCQPYGKIVSTKAILDKNTNQCKGYGFVDFDSPAAAQKAVASLKANGVQAQMAKQQEQDPTNLYISNLPISMDEQELENMLKPFGHVISTRILRDANGVSRGVGFARMESTEKCEVVIQHFNGKYLKTPPGIPAPSEPLLCKFADGGQKKRQNQSKYTQNGRPWPREGEAGMALTYDPTAAIQNGFYSSPYSIATNRMIPQTSITPFIAASPVSTYQVQSTSWMPHPPYVMQPTGAVITPTMDHPMSMQPANMMGPLTQQMNHLSLGTTGTYMTAAAPMQGTYIPQYTPVPPTAVSIEGVVADTSPQTVAPSSQDTSGQQQQIAVDTSNEHAPAYSYQQSKP

SEQ ID NO: 12876 - protein, 71 aa, Homo sapiens
MRLRRLALFPGVALLLAAARLAAASDVLELTDDNFESRISDTGSAGLMLVEFFAPCSIPAGFEEESLLQPH

SEQ ID NO: 12877 - protein, 540 aa, Homo sapiens
MPSLLVLTFSPCVLLGWALLAGGTGGGGVGGGGGGAGIGGGRQEREALPPQKIEVLVLLPQDDSYLFSLTRVRPAIEYALRSVEGNGTGRRLLPPGTRFQVAYEDSDCGNRALFSLVDRVAAARGAKPDLILGPVCEYAAAPVARLASHWDLPMLSAGALAAGFQHKDSEYSHLTRVAPAYAKMGEMMLALFRHHHWSRAALVYSDDKLERNCYFTLEGVHEVFQEEGLHTSIYSFDETKDLDLEDIVRNIQASERVVIMCASSDTIRSIMLVAHRHGMTSGDYAFFNIELFNSSSYGDGSWKRGDKHDFEAKQAYSSLQTVTLLRTVKPEFEKFSMEVKSSVEKQGLNMEDYVNMFVEGFHDAILLYVLALHEVLRAGYSKKDGGKIIQQTWNRTFEGIAGQVSIDANGDRYGDFSVIAMTDVEAGTQEVIGDYFGKEGRFEMRPNVKYPWGPLKLRIDENRIVEHTNSSPCKSCGLEESAVTGIVVGALLGAGLLMAFYFFRKKYRITIERRTQQEESNLGKHRELREDSIRSHFSVA

SEQ ID NO: 12878 - protein, 136 aa, Homo sapiens
MNLQPIFWIGLISSVCCVFAQTDENRCLKANAKSCGECIQAGPNCGWCTNSTFLQEGMPTSARCDDLEALKKKGCPPDDIENPRGSKDIKKNKNVTNRSKGTAEKLKPEDITQIQPQQLVLRLRSGEPQTFTLKFK

SEQ ID NO: 12879 - protein, 692 aa, Homo sapiens
MTPQSLLQTTLFLLSLLFLVQASASSGAHGRGHREDFRFCSQRNQTHRSSLHYKPTPDLRISIENSEEALTVHAPFPAAHPASRSFPDPRGLYHFCLYWNRHAGRLHLLYGKRDFLLSDKASSLLCFQHQEESLAQGPPLLATSVTSWWSPQNISLPSAASFTFSFHSPPHTAAHNASVDMCELKRDLQLLSQFLKHPQKASRRPSAAPASQQLQSLESKLTSVRFMGDMVSFEEDRINATVWKLQPTAGLQDLHIHSRQEEEQSEIMEYSVLLPRTLFQRTKGRSGEAEKRLLLVDFSSQALFQDKNSSQVLGEKVLGIVVQNTKVANLTEPVVLTFQHQLQPKNVTLQCVFWVEDPTLSSPGHWSSAGCETVRRETQTSCFCNHLTYFAVLMVSSVEVDAVHKHYLSLLSYVGCVVSALACLVTIAAYLCSRRKPRDYTIKVHMNLLLAVFLLDTSFLLSEPVALTGSEAGCRASAIFLHFSLLTCLSWMGLEGYNLYRLVVEVFGTYVPGYLLKLSAMGWGFPIFLVTLVALVDVDNYGPIILAVHRTPEGVIYPSMCWIRDSLVSYITNLGLFSLVFLFNMAMLATMVVQILRLRPHTQKWSHVLTLLGLSLVLGLPWALIFFSFASGTFQLVVLYLFSIITSFQGFLIFIWYWSMRLQARGGPSPLKSNSDSARLPISSGSTSSSRI

SEQ ID NO: 12880 - protein, 224 aa, Homo sapiens
MGIMAASRPLSRFWEWGKNIVCVGRNYADHVREMRSAVLSEPVLFLKPSTAYAPEGSPILMPAYTRNLHHELELGVVMGKRCRAVPEAAAMDYVGGYALCLDMTARDVQDECKKKGLPWTLAKSFTASCPVSAFVPKEKIPDPHKLKLWLKVNGELRQEGETSSMIFSIPYIISYVSKIITLEEGDIILTGTPKGVGPVKENDEIEAGIHGLVSMTFKVEKPEY

SEQ ID NO: 12881 - protein, 811 aa, Homo sapiens
MESGHLLWALLFMQSLWPQLTDGATRVYYLGIRDVQWNYAPKGRNVITNQPLDSDIVASSFLKSDKNRIGGTYKKTIYKEYKDDSYTDEVAQPAWLGFLGPVLQAEVGDVILIHLKNFATRPYTIHPHGVFYEKDSEGSLYPDGSSGPLKADDSVPPGGSHIYNWTIPEGHAPTDADPACLTWIYHSHVDAPRDIATGLIGPLITCKRGALDGNSPPQRQDVDHDFFLLFSVVDENLSWHLNENIATYCSDPASVDKEDETFQESNRMHAINGFVFGNLPELNMCAQKRVAWHLFGMGNEIDVHTAFFHGQMLTTRGHHTDVANIFPATFVTAEMVPWEPGTWLISCQVNSHFRDGMQALYKVKSCSMAPPVDLLTGKVRQYFIEAHEIQWDYGPMGHDGSTGKNLREPGSISDKFFQKSSSRIGGTYWKVRYEAFQDETFQEKMHLEEDRHLGILGPVIRAEVGDTIQVVFYNRASQPFSMQPHGVFYEKDYEGTVYNDDPIRDTNSGLVGPLLVCRAGALGADGKQKGVDKEFFLLFTVLDENKSWYSNANQAAAMLDFRLLSEDIEGFQDSNRMHAINGFLFSNLPRLDMCKGDTVAWHLLGLGTETDVHGVMFQGNTVQLQGMRKGAAMLFPHTFVMAIMQPDNLGTFEIYCQAGSHREAGMRAIYNVSQCPGHQATPRQRYQAARIYYIMAEEVEWDYCPDRSWEREWHNQSEKDSYGYIFLSNKDGLLGSRYKKAVFREYTDGTFRIPRPRTGPEEHLGILGPLIKGEVGDILTVVFKNNASRPYSVHAHGVLESTTVWPLAAEP

SEQ ID NO: 12882 - protein, 293 aa, Homo sapiens
DKFWWHAAWGLCLVPLSLAQIDLNITCRFAGVFHVEKNGRYSISRTEAADLCKAFNSTLPTMAQMEKALSIGFETCRYGFIEGHVVIPRIHPNSICAANNTGVYILTSNTSQYDTYCFNASAPPEEDCTSVTDLPNAFDGPITITIVNRDGTRYVQKGEYRTNPEDIYPSNPTDDDVSSGSSSERSSTSGGYIFYTFSTVHPIPDEDSPWITDSTDRIPATRDQDTFHPSGGSHTTHGSESDGHSHGSQEGGANTTSGPIRTPQIPEWLIILASLLALALILAVCIAVNSRRS

SEQ ID NO: 12883 - protein, 196 aa, Homo sapiens
MIIVAHVLLILLGATEILQADLLPDEKISLLPPVNFTIKVTGLAQVLLQWKPNPDQEQRNVNLEYQVKINAPKEDDYETRITESKCVTILHKGFSASVRTILQNDHSLLASSWASAELHAPPGSPGTSIVNLTCTTNTTEDNYSRLRSYQVSLHCTWLVGTDAPEDTQYFLYYRYGSWTEECQEYSKDTLGRNIAC

SEQ ID NO: 12884 - protein, 637 aa, Homo sapiens
MDPGSGGGGGGGGGGGSSSGSSSSDSAPDCWDQADMEAPGPGPCGGGGSLAAAAEAQRENLSAAFSRQLNVNAKPFVPNVHAAEFVPSFLRGPAAPPPPVGGAANNHGAGSGAGGRAAPVESSQEEQSLCEGSNSAVSMELSEPIVENGETEMSPEESWEHKEEISEAEPGGGSLGDGRPPEESAHEMMEEEEEIPKPKSVVAPPGAPKKEHVNVVFIGHVDAGKSTIGGQIMYLTGMVDKRTLEKYEREAKEKNRETWYLSWALDTNQEERDKGKTVEVGRAYFETEKKHFTILDAPGHKSFVPNMIGGASQADLAVLVISARKGEFETGFEKGGQTREHAMLAKTAGVKHLIVLINKMDDPTVNWSNERYEECKEKLVPFLKKVGFNPKKDIHFMPCSGLTGANLKEQSDFCPWYIGLPFIPYLDNLPNFNRSVDGPIRLPIVDKYKDMGTVVLGKLESGSICKGQQLVMMPNKHNVEVLGILSDDVETDTVAPGENLKIRLKGIEEEEILPGFILCDPNNLCHSGRTFDAQIVIIEHKSIICPGYNAVLHIHTCIEEVEITALICLVDKKSGEKSKTRPRFVKQDQVCIARLRTAGTICLETFKDFPQMGRFTLRDEGKTIAIGKVLKLVPEKD

SEQ ID NO: 12885 - protein, 171 aa, Homo sapiens
MEGPVLTLGLLAALAVCGSWGLNEEERLIRHLFQEKGYNKELRPVAHKEESVDVALALTLSNLISLKEVEETLTTNVWIEHGWTDNRLKWNAEEFGNISVLRLPPDMVWLPEIVLENNNDGSFQISYSCNVLVYHYGFVYWLPPAIFRSSCPISVTYFPFDWQNCSLKFRW

SEQ ID NO: 12886 - protein, 114 aa, Homo sapiens
SFWWTVQIILASWNPKLSLMIYCSSLLTLAPNALMTDETISNVPILILGNKIDRTDAISEEKLREIFGLYGQTTGKGNVTLKELNARPMEVFMCSVLKRQGYGEGFRWLSQYID

SEQ ID NO: 12887 - protein, 205 aa, Homo sapiens
MGSKVADLLYWKDTRTSGVVFTGLMVSLLCLLHFSIVSVAAHLALLLLCGTISLRVYRKVLQAVHRGDGANPFQAYLDVDLTLTREQTERLSHQITSRVVSAATQLRHFFLVEDLVDSLKLALLFYILTFVGAIFNGLTLLILGVIGLFTIPLLYRQHQAQIDQYVGLVTNQLSHIKAKIRAKIPGTGALASAAAAVSGSKAKAE

SEQ ID NO: 12888 - protein, 163 aa, Homo sapiens
MNLVDLWLTRSLSMCLLLQSFVLMILCFHSASMCPKGCLCSSSGGLNVTCSNANLKEIPRDLPPETVLLYLDSNQITSIPNEIFKDLHQLRVLNLSKNGIEFIDEHAFKGVAETLQTLDLSDNRIQSVHKNAFNNLKARARIANNPWHCDCTLQQVLRSMASN

SEQ ID NO: 12889 - protein, 179 aa, Homo sapiens
MLSRCRSGLLHVLGLSFLLQTRRPILLCSPRLMKPLVVFVLGGPGAGKGTQCARIVEEMDQTMAANAQKNKFLIDGFPRNQDNLQGWNKTMDGKADVSFVLFFDCNNEICIERCLERGKSSGRSDDNRESLEKRIQTYLQSTKPIIDLYEEMGKVKKIDASKSVDEVFDEVVQIFDKEG

SEQ ID NO: 12890 - protein, 178 aa, Homo sapiens
MSEVSCKKRDDYLEWPEYFMAVAFLSAQRSKDPNSQVGACIVNSENKIVGIGYNGMPNGCSDDVLPWRRTAENKLDTKYPYVCHAELNAIMNKNSTDVKGCSMYVALFPCNECAKLIIQAGIKEVIFMSDKYHDSDEATAARLLFNMAGVTFRKFIPKCSKIVIDFDSINSRPSQKLQ

SEQ ID NO: 12891 - protein, 637 aa, Homo sapiens
MKLYCLSGHPTLPCNVLKFKSTTIMLDCGLDMTSTLNFLPLPLVQSPRLSNLPGWSLKDGNAFLDKTELIDLSTVDVILISNYHCMMALPYITEHTGFTGTVYATEPTVQIGRLLMEELVNFIERVPKAQSASLWKNKDIQRLLPSPLKDAVEVSTWRRCYTMQEVNSALSKIQLVGYSQKIELFGAVQVTPLSSGYALGSSNWIIQSHYEKVSYVSGSSLLTTHPQPMDQASLKNSDVLVLTGLTQIPTANPDGMVGEFCSNLALTVRNGGNVLVPCYPSGVIYDLLECLYQYIDSAGLSSVPLYFISPVANSSLEFSQIFAEWLCHNKQSKVYLPEPPFPHAELIQTNKLKHYPSIHGDFSNDFRQPCVVFTGHPSLRFGDVVHFMELWGKSSLNTVIFTEPDFSYLEALAPYQPLAMKCIYCPIDTRLNFIQVSKLLKEVQPLHVVCPEQYTQPPPAQSHRMDLMIDCQPPAMSYRRAEVLALPFKRRYEKIEIMPELADSLVPMEIKPGISLATVSAVLHTKDNKHLLQPPPRPAQPTSGKKRKRVSDDVPDCKVLKPLLSGSIPVEQFVQTLEKHGFSDIKVEDTAKGHIVLLQEAETLIQIEEDSTHIICDNDEMLRVRLRDLVLKFLQKF

SEQ ID NO: 12892 - protein, 424 aa, Homo sapiens
MADKEAFDDAVEERVINEEYKIWKKNTPFLYDLVMTHALEWPSLTAQWLPDVTRPEGKDFSIHRLVLGTHTSDEQNHLVIASVQLPNDDAQFDASHYDSEKGEFGGFGSVSGKIEIEIKINHEGEVNRARYMPQNPCIIATKTPSSDVLVFDYTKHPSKPDPSGECNPDLRLRGHQKEGYGLSWNPNLSGHLLSASDDHTICLWDISAVPKEGKVVDAKTIFTGHTAVVEDVSWHLLHESLFGSVADDQKLMIWDTRSNNTSKPSHSVDAHTAEVNCLSFNPYSEFILATGSADKTVALWDLRNLKLKLHSFESHKDEIFQVQWSPHNETILASSGTDRRLNVWDLSKIGEEQSPEDAEDGPPELLFIHGGHTAKISDFSWNPNEPWVICSVSEDNIMQVWQMAENIYNDEDPEGSVDPEGQGS

SEQ ID NO: 12893 - protein, 303 aa, Homo sapiens
MRPVSVWQWSPWGLLLCLLCSSCLGSPSPSTGPEKKAGSQGLRFRLAGFPRKPYEGRVEIQRAGEWGTICDDDFTLQAAHILCRELGFTEATGWTHSAKYGPGTGRIWLDNLSCSGTEQSVTECASRGWGNSDCTHDEDAGVICKDQRLPGFSDSNVIEVEHHLQVEEVRIRPAVGWGRRPLPVTEGLVEVRLPDGWSQVCDKGWSAHNSHVVCGMLGFPSEKRVNAAFYRLLAQRQQHSFGLHGVACVGTEAHLSLCSLEFYRANDTARCPGGGPAVVSCVPGPVYAASSGQKKQQQSKPQG

SEQ ID NO: 12894 - protein, 528 aa, Homo sapiens
MEVVPAEIAKKPRTPTSGPVITKLIFAKPINSKAVTGQTTQVSPPVIAGRVLSQSTPGTPSKTITISESGVIGSTLNSTTQTPNKIAISPLKSPNKAVKSTVQTITVGGVSTSQFKTIIPLATAPNVQQIQVPGSKFHYVRLVTATSASSSTQPVSQNPSTNTQPLQQAKPVVVNTTPVRMSVPIVSAQAVKQVVPKPINPTSQIVTTSQPQQRLIMPATPLPQIQPNLTNLPPGTVLAPAPGTGNVGYAVLPAQYVTQLQQSSYVSIASNSTFTGTSGIQTQARLPFNGIIPSESASRPRKPCNCTKSLCLKLYCDCFANGEFCNNCNCTNCYNNLEHENERQKAIKACLDRNPEAFKPKIGKGKEGESDRRHSKGCNCKRSGCLKNYCECYEAKIMCSSICKCIGCKNFEESPERKTLMHLADAAEVRVQQQTAAKTKLSSQISDLLTRPTPALNSGGGKLPFTFVTKEVAEATCNCLLAQAEQADKKGKSKAAAERMILEEFGRCLMSVINSAGKAKSDPCAMNC

SEQ ID NO: 12895 - protein, 219 aa, Homo sapiens
MRGQRLPLDIQIFYCARPDEEPFVKIITVEEAKRRKSTCSYYEDEDEEVLPVLRPHSALLENMHIEQLARRLPARVQGYPWRLAYSTLEHGTSLKTLYRKSASLDSPVLLVIKDMDNQIFGAYATHPFKFSDHYYGTGETFLYTFSPHFKVFKWSGENSYFINGDISSLELGGGGGRFGLWLDADLYHGRSNSCSTFNNDILSKKEDFIVQDLEVWAFD

SEQ ID NO: 12896 - protein, 84 aa, Homo sapiens
MAARVGAFLKNAWDKEPVLVVSFVVGGLAVILPPLSPYFKYSVMINKATPYNYPVPVRDDGNMPDVPSHPQDPQGPSLEWLKKL

SEQ ID NO: 12897 - protein, 106 aa, Homo sapiens
MLKALFLTMLTLALVKSQDTEETITYTQCTDGYEWDPVRQQCKDIDECDIVPDACKGGMKCVNHYGGYLCLPKTAQIIVNNEQPQQETQPAEGTSGATTGVVAASS

SEQ ID NO: 12898 - protein, 293 aa, Homo sapiens
MAAAAAAAVAGVGRGGGGAEPRQERSRARGWAGVERSEGRSRMEPGEELEEEGSPGGREDGFTAEHLAAEAMAADMDPWLVFDARTTPATELDAWLAKYPPSQVTRYGDPGSPNSEPVGWIAVYGQGYSPNSGDVQGLQAAWEALQTSGRPITPGTLRQLAITHHVLSGKWLMHLAPGFKLDHAWAGIARAVVEGQLQVAKVSPRAKEGGRQVICVYTDDFTDRLGVLEADSAIRAAGIKCLLTYKPDVYTYLGIYRANRWHLCPTLYESRFQLGGSARGSRVLDRANNVELT

SEQ ID NO: 12899 - protein, 123 aa, Homo sapiens
MSLSFLLLLFFSHLILSAWAHGEKRLAPKGQPGPAATDRNPRGSSSRQSSSSAMSSSSASSSPAASLGSQGSGLEQSSFQWSPSGRRTGSLYCRVGIGFHLQIYPDGKVNGSHEANMLSQVHR

SEQ ID NO: 12900 - protein, 224 aa, Homo sapiens
MAKRSRGPGRRCLLALVLFCAWGTLAVVAQKPGAGCPSRCLCFRTTVRCMHLLLEAVPAVAPQTSILDLRFNRIREIQPGAFRRLRNLNTLLLNNNQIKRIPSGAFEDLENLKYLYLHFNQIETLDPDSFQHLPKLERLFLHNNRITHLVPGTFNHLESMKRLRLDSNTLHCDCEILWLADLLKTYAESGNAQAAAICEYPRRIQGRSVATITPEELNCERPRI

SEQ ID NO: 12901 - protein, 408 aa, Homo sapiens
MSGGSADYNSREHGGPEGMDPDGVIESNWNEIVDNFDDMNLKESLLRGIYAYGFEKPSAIQQRAIIPCIKGYDVIAQAQSGTGKTATFAISILQQLEIEFKETQALVLAPTRELAQQIQKVILALGDYMGATCHACIGGTNVRNEMQKLQAEAPHIVVGTPGRVFDMLNRRYLSPKWIKMFVLDEADEMLSRGFKDQIYEIFQKLNTSIQVVLLSATMPTDVLEVTKKFMRDPIRILVKKEELTLEGIKQFYINVEREEWKLDTLCDLYETLTITQAVIFLNTRRKVDWLTEKMHARDFTVSALHGDMDQKERDVIMREFRSGSSRVLITTDLLARGIDVQQVSLVINYDLPTNRENYIHRIGRGGRFGRKGVAINFVTEEDKRILRDIETFYNTTVEEMPMNVADLI

SEQ ID NO: 12902 - protein, 27 aa, Homo sapiens
MLKALFLTMLTLALVKSQDTEETITYT

SEQ ID NO: 12903 - protein, 1147 aa, Homo sapiens
MAVDSAMELLFLDTFKHPSAEQSSHIDVVRFPCVVYINEVRVIPPGVRAHSSLPDNRAYGETSPHTFQLDLFFNNVSKPSAPVFDRLGSLEYDENTSIIFRPNSKVNTDGLVLRGWYNCLTLAIYGSVDRVISHDRDSPPPPPPPPPPPQPQPSLKRNPKHADGEKEDQFNGSPPRPQPRGPRTPPGPPPPDDDEDDPVPLPVSGDKEEDAPHREDYFEPISPDRNSVPQEGQYSDEGEVEEEQQEEGEEDEDDVDVEEEEDEDEDDRRTVDSIPEEEEEDEEEEGEEDEEGEGDDGYEQISSDEDGIADLERETFKYPNFDVEYTAEDLASVPPMTYDPYDRELVPLLYFSCPYKTTFEIEISRMKDQGPDKENSGAIEASVKLTELLDLYREDRGAKWVTALEEIPSLIIKGLSYLQLKNTKQDSLGQLVDWTMQALNLQVALRQPIALNVRQLKAGTKLVSSLAECGAQGVTGLLQAGVISGLFELLFADHVSSSLKLNAFKALDSVISMTEGMEAFLRGRQNEKSGYQKLLELILLDQTVRVVTAGSAILQKCHFYEVLSEIKRLGDHLAEKTSSLPNHSEPDHDTDAGLERTNPEYENEVEASMDMDLLESSNISEGEIERLINLLEEVFHLMETAPHTMIQQPVKSFPTMARITGPPERDDPYPVLFRYLHSHHFLELVTLLLSIPVTSAHPGVLQATKDVLKFLAQSQKGLLFFMSEYEATNLLIRALCHFYDQDEEEGLQSDGVIDDAFALWLQDSTQTLQCITELFSHFQRCTASEETDHSDLLGTLHNLYLITFNPVGRSAVGHVFSLEKNLQSLITLMEYYSKEALGDSKSKKSVAYNYACILILVVVQSSSDVQMLEQHAASLLKLCKADENNAKLQELGKWLEPLKNLRFEINCIPNLIEYVKQNIDNLMTPEGVGLTTALRVLCNVACPPPPVEGQQKDLKWNLAVIQLFSAEGMDTFIRVLQKLNSILTQPWRLHVNMGTTLHRVTTISMARCTLTLLKTMLTELLRGGSFEFKDMRVPSALVTLHMLLCSIPLSGRLDSDEQKIQNDIIDILLTFTQGVNEKLTISEETLANNTWSLMLKEVLSSILKVPEGFFSGLILLSELLPLPLPMQTTQVSLPYNMHLINDCSNTF

SEQ ID NO: 12904 - protein, 379 aa, Homo sapiens
MLVAGLLLWASLLTGAWPSFPTQDHLPATPRVRLSFKELKATGTAHFFNFLLNTTDYRILLKDEDHDRMYVGSKDYVLSLDLHDINREPLIIHWAASPQRIEECVLSGKDVNGECGNFVRLIQPWNRTHLYVCGTGAYNPMCTYVNRGRRAQDYIFYLEPERLESGKGKCPYDPKLDTASALINEELYAGVYIDFMGTDAAIFRTLGKQTAMRTDQYNSRWLNDPSFIHAELIPDSAERNDDKLYFFFRERSAEAPQSPAVYARIGRICLNDDGGHCCLVNKWSTFLKARLVCSVPGEDGIETHFDELQDVFVQQTQDVRNPVIYAVFTSSGSVFRGSAVCVYSMADIRMVFNGPFAHKEGPNYQWMPFSGKMPYPRPG

SEQ ID NO: 12905 - protein, 42 aa, Homo sapiens
MDRSSKRRQVKPLAASLLEALDYDSSDDSDFKVGDASGLADS

SEQ ID NO: 12906 - protein, 234 aa, Homo sapiens
MAAGTAVGAWVLVLSLWGAVVGAQNITARIGEPLVLKCKGAPKKPPQRLEWKLNTGRTEAWKVLSPQGGGPWDSVARVLPNGSLFLPAVGIQDEGIFRCQAMNRNGKETKSNYRSLRTFTITASDWIFPPSEIPGKPEIVDSASELTAGVPNKVGTCVSEGSYPAGTLSWHLDGKPLVPNEKGVSVKEQTRRHPETGLFTLQSELMVTPARGGDPRPTFSCSFSPGLPRHRALR

SEQ ID NO: 12907 - protein, 132 aa, Homo sapiens
MLEEPRPRPPPSGLAGLLFLALCSRALSNEILGLKLPGEPPLTANTVCLTLSGLSKRQLGLCLRNPDVTASALQGLHIAVHECQHQLRDQRWNCSALEGGGRLPHHSAILKRGPGVGEGLDTQMVSEKVLFP

SEQ ID NO: 12908 - protein, 784 aa, Homo sapiens
MGLPRGPLASLLLLQVCWLQCAASEPCRAVFREAEVTLEAGGAEQEPGQALGKVFMGCPGQEPALFSTDNDDFTVRNGETVQERRSLKERNPLKIFPSKRILRRHKRDWVVAPISVPENGKGPFPQRLNQLKSNKDRDTKIFYSITGPGADSPPEGVFAVEKETGWLLLNKPLDREEIAKYELFGHAVSENGASVEDPMNISIIVTDQNDHKPKFTQDTFRGSVLEGVLPGTSVMQVTATDEDDAIYTYNGVVAYSIHSQEPKDPHDLMFTIHRSTGTISVISSGLDREKVPEYTLTIQATDMDGDGSTTTAVAVVEILDANDNAPMFDPQKYEAHVPENAVGHEVQRLTVTDLDAPNSPAWRATYLIMGGDDGDHFTITTHPESNQGILTTRKGLDFEAKNQHTLYVEVTNEAPFVLKLPTSTATIVVHVEDVNEAPVFVPPSKVVEVQEGIPTGEPVCVYTAEDPDKENQKISYRILRDPAGWLAMDPDSGQVTAVGTLDREDEQFVRNNIYEVMVLAMDNGSPPTTGTGTLLLTLIDVNDHGPVPEPRQITICNQSPVRQVLNITDKDLSPHTSPFQAQLTDDSDIYWTAEVNEEGDTVVLSLKKFLKQDTYDVHLSLSDHGNKEQLTVIRATVCDCHGHVETCPGPWKGGFILPVLGAVLALLFLLLVLLLLVRKKRKIKEPLLLPEDDTRDNVFYYGEEGGGEEDQDYDITQLHRGLEARPEVVLRNDVAPTIIPTPMYRPRPANPDEIGNFIIEGRGERGSQRGNGGLQLARGRTRRS

SEQ ID NO: 12909 - protein, 161 aa, Homo sapiens
MWLEILLTSVLGFAIYWFISRDKEETLPLEDGWWGPGTRSAAREDDSIRPFKVETSDEEIHDLHQRIDKFRFTPPLEDSCFHYGFNSNYLKKVISYWRNEFDWKKQVEILNRYPHFKTKIEGLDIHFIHVKPPQLPAGHTPKPLLMVHGWPGSFYEFYKII

SEQ ID NO: 12910 - protein, 239 aa, Homo sapiens
MAALKSWLSRSVTSFFRYRQCLCVPVVANFKKRCFSELIRPWHKTVTIGFGVTLCAVPIAQKSEPHSLSSEALMRRAVSLVTDSTSTFLSQTTYALIEAITEYTKAVYTLTSLYRQYTSLLGKMNSEEEDEVWQVIIGARAEMTSKHQEYLKLETTWMTAVGLSEMAAEAAYQTGADQASITARNHIQLVKLQVEEVHQLSRKAETKLAEAQIEELRQKTQEEGEERAESEQEAYLRED

SEQ ID NO: 12911 - protein, 330 aa, Homo sapiens
MAPEENAGTELLLQSFERRFLAARTLRSFPWQSLEAKLRDSSDSELLRDILHKTVKHPVCVKHPPSVKYARCFLSELIKKHEAVHTEPLDELYEALAETLMAKESTQGHRSYLLPSGGSVTLSESTAIISYGTTGLVTWDAALYLAEWAIENPAVFTNRTVLELGSGAGLTGLAICKMCRPRAYIFSDCHSRVLEQLRGNVLLNGLSLEADITAKLDSPRVTVAQLDWDVATVHQLSAFQPDVVIAADVLYCPEAIMSLVGVLRRLAACREHQRAPEVYVAFTVRNPETCQLFTTELGRAGIRWEVEPRHEQKLFPYEEHLEMAMLNLTL

SEQ ID NO: 12912 - protein, 75 aa, Homo sapiens
MKATIILLLLAQVSWAGPFQQRGLFDFMLEDEASGIGPEVPDDRDFEPSLGPVCPFRCQCHLRVVQCSDLGCLPS

SEQ ID NO: 12913 - protein, 242 aa, Homo sapiens
MRGQRSLLLGPARLCLRLLLLLGYRRRCPPLLRGLVQRWRYGKVCLRSLLYNSFGGSDTAVDAAFEPVYWLVDNVIRWFGVGRNDIATVSICKKCIYPKPARTHHCSICNRCVLKMDHHCPWLNNCVGHYNHRYFFSFCFFMTLGCVYCSYGSWDLFREAYAAIEKMKQLDKNKLQAVANQTYHQTPPPTFSFRERMTHKSLVYLWFLCSSVALALGALTVWHAVLISRGETSIERHINKKE

SEQ ID NO: 12914 - protein, 81 aa, Homo sapiens
MNKILSSTVCFGLLTLLSVLSFLQSVHGRPYLTQGNEIFPDKKYTNREELLLALLNKNFDFQRPFNTAGKAKRTASGGEGF

SEQ ID NO: 12915 - protein, 80 aa, Homo sapiens
MKVFFLFAVLFCLVQTNSGDVPPGIRNTICHMQQGICRLFFCHSGEKKRDICSDPWNRCCVSNTDEEGKEKPEMDGRSGI

SEQ ID NO: 12916 - protein, 163 aa, Homo sapiens
MKLLSLVAVVGCLLVPPAEANKVREVSLQHLVTTTVHGHPVYRADSESSEDIRCKCICPPYRNISGHIYNQNVSQKDCNCLHVVEPMPVPGHDVEAYCLLCECRYEERSTTTIKVIIVIYLSVVGALLLYMAFLMLVDPLIRKPDAYTEQLHNEEENEDARSM

SEQ ID NO: 12917 - protein, 449 aa, Homo sapiens
MPGMMEKGPELLGKNRSANGSAKSPAGGGGSGASSTNGGLHYSEPESGCSSDDEHDVGMRVGAEYQARIPEFDPGATKYTDKDNGGMLVWSPYHSIPDAKLDEYIAIAKEKHGYNVEQALGMLFWHKHNIEKSLADLPNFTPFPDEWTVEDKVLFEQAFSFHGKSFHRIQQMLPDKTIASLVKYYYSWKKTRSRTSLMDRQARKLANRHNQGDSDDDVEETHPMDGNDSDYDPKKEAKKEGNTEQPVQTSKIGLGRREYQSLQHRHHSQRSKCRPPKGMYLTQEDVVAVSCSPNAANTILRQLDMELISLKRQVQNAKQVNSALKQKMEGGIEEFKPPESNQKINARWTTEEQLLAVQGVRKYGKDFQAIADVIGNKTVGQVKNFFVNYRRRFNLEEVLQEWEAEQGTQASNGDASTLGEETKSASNVPSGKSTDEEEEVCLCMEFELI

SEQ ID NO: 12918 - protein, 337 aa, Homo sapiens
MALQTLQSSWVTFRKILSHFPEELSLAFVYGSGVYRQAGPSSDQKNAMLDFVFTVDDPVAWHSKNLKKNWSHYSFLKVLGPKIITSIQNNYGAGVYYNSLIMCNGRLIKYGVISTNVLIEDLLNWNNLYIAGRLQKPVKIISVNEDVTLRSALDRNLKSAVTAAFLMLPESFSEEDLFIEIAGLSYSGDFRMVVGEDKTKVLNIVKPNIAHFRELYGSILQENPQVVYKSQQGWLEIDKSPEGQFTQLMTLPKTLQQQINHIMDPPGKNRDVEETLFQVAHDPDCGDVVRLGLSAIVRPSSIRQSTKGIFTAGLKKSVIYSSLKLHKMWKGWLRKTS

SEQ ID NO: 12919 - protein, 742 aa, Homo sapiens
MDKFWWHAAWGLCLVPLSLAQIDLNITCRFAGVFHVEKNGRYSISRTEAADLCKAFNSTLPTMAQMEKALSIGFETCRYGFIEGHVVIPRIHPNSICAANNTGVYILTSNTSQYDTYCFNASAPPEEDCTSVTDLPNAFDGPITITIVNRDGTRYVQKGEYRTNPEDIYPSNPTDDDVSSGSSSERSSTSGGYIFYTFSTVHPIPDEDSPWITDSTDRIPATTLMSTSATATETATKRQETWDWFSWLFLPSESKNHLHTTTQMAGTSSNTISAGWEPNEENEDERDRHLSFSGSGIDDDEDFISSTISTTPRAFDHTKQNQDWTQWNPSHSNPEVLLQTTTRMTDVDRNGTTAYEGNWNPEAHPPLIHHEHHEEEETPHSTSTIQATPSSTTEETATQKEQWFGNRWHEGYRQTPKEDSHSTTGTAAASAHTSHPMQGRTTPSPEDSSWTDFFNPISHPMGRGHQAGRRMDMDSSHSITLQPTANPNTGLVEDLDRTGPLSMTTQQSNSQSFSTSHEGLEEDKDHPTTSTLTSSNRNDVTGGRRDPNHSEGSTTLLEGYTSHYPHTKESRTFIPVTSAKTGSFGVTAVTVGDSNSNVNRSLSGDQDTFHPSGGSHTTHGSESDGHSHGSQEGGANTTSGPIRTPQIPEWLIILASLLALALILAVCIAVNSRRRCGQKKKLVINSGNGAVEDRKPSGLNGEASKSQEMVHLVNKESSETPDQFMTADETRNLQNVDMKIGV

SEQ ID NO: 12920 - protein, 625 aa, Homo sapiens
MKTNGGRCRIRALCWSRREWRGAGMAQKKYLQAKLTQFLREDRIQLWKPPYTDENKKVGLALKDLAKQYSDRLECCENEVEKVIEEIRCKAIERGTGNDNYRTTGIATIEVFLPPRLKKDRKNLLETRLHITGRELRSKIAETFGLQENYIKIVINKKQLQLGKTLEEQGVAHNVKAMVLELKQSEEDARKNFQLEEEEQNEAKLKEKQIQRTKRGLEILAKRAAETVVDPEMTPYLDIANQTGRSIRIPPSERKALMLAMGYHEKGRAFLKRKEYGIALPCLLDADKYFCECCRELLDTVDNYAVLQLDIVWCYFRLEQLECLDDAEKKLNLAQKCFKNCYGENHQRLVHIKGNCGKEKVLFLRLYLLQGIRNYHSGNDVEAYEYLNKARQLFKELYIDPSKVDNLLQLGFTAQEARLGLRACDGNVDHAATHITNRREELAQIRKEEKEKKRRRLENIRFLKGMGYSTHAAQQILLSNPQMWWLNDSNPETDNRQESPSQENIDRLVYMGFDALVAEAALRVFRGNVQLAAQTLAHNGGSLPPELPLSPEDSLSPPATSPSDSAGTSSASTDEDMETEAVNEILEDIPEHEEDYLDSTLEDEEIIIAEYLSYVENRKSATKKN

SEQ ID NO: 12921 - protein, 412 aa, Homo sapiens
MHVRSLRAAAPHSFVALWAPLFLLRSALADFSLDNEVHSSFIHRRLRSQERREMQREILSILGLPHRPRPHLQGKHNSAPMFMLDLYNAMAVEEGGGPGGQGFSYPYKAVFSTQGPPLASLQDSHFLTDADMVMSFVNLVEHDKEFFHPRYHHREFRFDLSKIPEGEAVTAAEFRIYKDYIRERFDNETFRISVYQVLQEHLGRESDLFLLDSRTLWASEEGWLVFDITATSNHWVVNPRHNLGLQLSVETLDGQSINPKLAGLIGRHGPQNKQPFMVAFFKATEVHFRSIRSTGSKQRSQNRSKTPKNQEALRMANVAENSSSDQRQACKKHELYVSFRDLGWQDWIIAPEGYAAYYCEGECAFPLNSYMNATNHAIVQTLVGVTPSWGVVTWAGQAAGPPDPAASKLGPE

SEQ ID NO: 12922 - protein, 314 aa, Homo sapiens
GWEMTFLILSIAPVLAVTGMIETAAMTGFANKDKQELKHAGKIATEALENIRTIVSLTREKAFEQMYEEMLQTQHRNTSKKAQIIGSCYAFSHAFIYFAYAAGFRFGAYLIQAGRMTPEGMFIVFTAIAYGAMAIGETLVLAPEYSKAKSGAAHLFALLEKKPNIDSRSQEGKKPDTCEGNLEFREVSFFYPCRPDVFILRGLSLSIERGKTVAFVGSSGCGKSTSVQLLQRLYDPVQGQVLFDGVDAKELNVQWLRSQIAIVPQEPVLFNCSIAENIAYGDNSRVVPLDEIKEAANAANIHSFIEGLPESLEC

SEQ ID NO: 12923 - protein, 117 aa, Homo sapiens
MRAGPGPTVTLALVLAVSWAMELKPTAPPIFTGRPFVVAWDVPTQDCGPRLKVPLDLNAFDVQASPNEGFVNQNITIFYRDRLGLYPRFDSAGRSVHGGVPQNVSLWAHRKMLQKRV

SEQ ID NO: 12924 - protein, 45 aa, Homo sapiens
MKRMVSWSFHKLKTMKHLLLLLLCVFLVKSQGVNDNEEMRKLGHR

SEQ ID NO: 12925 - protein, 418 aa, Homo sapiens
MRTLFNLLWLALACSPVHTTLSKSDAKKAASKTLLEKVKFCSCCPGWSAMARSWLTATSATQSQFSDKPVQDRGLVVTDLKAESVVLEHRSYCSAKARDRHFAGDVLGYVTPWNSHGYDVTKVFGSKFTQISPVWLQLKRRGREMFEVTGLHDVDQGWMRAVRKHAKGLHIVPRLLFEDWTYDDFRNVLDSEDEIEELSKTVVQVAKNQHFDGFVVEVWNQLLSQKRVGLIHMLTHLAEALHQARLLALLVIPPAITPGTDQLGMFTHKEFEQLAPVLDGFSLMTYDYSTAHQPGPNAPLSWVRACVQVLDPKSKWRSKILLGLNFYGMDYATSKDAREPVVGARYIQTLKDHRPRMVWDSQASEHFFEYKKSRSGRHVVFYPTLKSLQVRLELARELGVGVSIWELGQGLDYFYDLL

SEQ ID NO: 12926 - protein, 37 aa, Homo sapiens
VFGVLWITVLLFFWVTKRKLEVPTGPEVQTPKGSSQS

SEQ ID NO: 12927 - protein, 652 aa, Homo sapiens
MERPEEGKQSPPPQPWGRLLRLGAEEGEPHVLLRKREWTIGRRRGCDLSFPSNKLVSGDHCRIVVDEKSGQVTLEDTSTSGTVINKLKVVKKQTCPLQTGDVIYLVYRKNEPEHNVAYLYESLSEKQGMTQESFDTSGAGAGRGADPRVPPSSPATQVCFEEPQPSTSTSDLFPTASASSTEPSPAGRERSSSCGSGGGGISPKGSGPSVASDEVSSFASALPDRKTASFSSLEPQDQEDLEPVKKKMRGDGDLDLNGQLLVAQPRRNAQTVHEDVRAAAGKPDKMEETLTCIICQDLLHDCVSLQPCMHTFCAACYSGWMERSSLCPTCRCPVERICKNHILNNLVEAYLIQHPDKSRSEEDVQSMDARNKITQDMLQPKVRRSFSDEEGSSEDLLELSDVDSESSDISQPYVVCRQCPEYRRQAAQPPHCPAPEGEPGAPQALGDAPSTSVSLTTAVQDYVCPLQGSHALCTCCFQPMPDRRAEREQDPRVAPQQCAVCLQPFCHLYWGCTRTGCYGCLAPFCELNLGDKCLDGVLNNNSYESDILKNYLATRGLTWKNMLTESLVALQRGVFLLSDYRVTGDTVLCYCCGLRSFRELTYQYRQNIPASELPVAVTSRPDCYWGRNCRTQVKAHHAMKFNHICEQTRFKN

SEQ ID NO: 12928 - protein, 381 aa, Homo sapiens [sequence omitted]

SEQ ID NO: 12929 - protein, 444 aa, Homo sapiens
MPRPAPARRLPGLLLLLWPLLLLPSAAPDPVARPGFRRLETRGPGGSPGRRPSPAAPDGAPASGTSEPGRARGAGVCKSRPLDLVFIIDSSRSVRPLEFTKVKTFVSRIIDTLDIGPADTRVAVVNYASTVKIEFQLQAYTDKQSLKQAVGRITPLSTGTMSGLAIQTAMDEAFTVEAGAREPSSNIPKVAIIVTDGRPQDQVNEVAARAQASGIELYAVGVDRADMASLKMMASEPLEEHVFYVETYGVIEKLSSRFQETFCALDRCALNTHGCEHICVNDRSGSYHCECYEGYTLNEDRKTCSAQDKCALGTHGCQHICVNDRTGSHHCECYEGYTLNADKKTCSVRDKCALGSHGCQHICVSDGAASYHCDCYPGYTLNEDKKTCSATEEARRLVSTEDACGCEATLAFQDKVSSYLQRLNTKLDDILEKLKINEYGQIHR

SEQ ID NO: 12930 - protein, 537 aa, Homo sapiens
MKMLTRLQVLTLALFSKGFLLSLGDHNFLRREIKIEGDLVLGGLFPINEKGTGTEECGRINEDRGIQRLEAMLFAIDEINKDDYLLPGVKLGVHILDTCSRDTYALEQSLEFVRASLTKVDEAEYMCPDGSYAIQENIPLLIAGVIGGSYSSVSIQVANLLRLFQIPQISYASTSAKLSDKSRYDYFARTVPPDFYQAKAMAEILRFFNWTYVSTVASEGDYGETGIEAFEQEARLRNICIATAEKVGRSNIRKSYDSVIRELLQKPNARVVVLFMRSDDSRELIAAASRANASFTWVASDGWGAQESIIKGSEHVAYGAITLELASQPVRQFDRYFQSLNPYNNHRNPWFRDFWEQKFQCSLQNKRNHRRVCDKHLAIDSSNYEQESKIMFVVNAVYAMAHALHKMQRTLCPNTTKLCDAMKILDGKKLYKDYLLKINFTGADDNHVHLCQPEWLCGLGLFVCTQGSHHPVSTPEECCHTQTAPQQVQCQWNWDHILSVLCKHVCANGVQWAGSPRLHHLISVIVNCSSVLVFLDC

SEQ ID NO: 12931 - protein, 68 aa, Homo sapiens
MKYVFYLGVLAGTFFFADSSVQKEDPAPYLVYLKSHFNPCVGVLIKPSWVLAPAHCYLPMNAFYHLKI

SEQ ID NO: 12932 - protein, 46 aa, Homo sapiens
LGVWFSLGCAYLALEDYQGSAKAFQRCVTLEPDVCAYSTVLFTETL

SEQ ID NO: 12933 - protein, 1898 aa, Homo sapiens
MAPEPAPGRTMVPLVPALVMLGLVAGAHGDSKPVFIKVPEDQTGLSGGVASFVCQATGEPKPRITWMKKGKKVSSQRFEVIEFDDGAGSVLRIQPLRVQRDEAIYECTATNSLGEINTSAKLSVLEEEQLPPGFPSIDMGPQLKVVEKARTATMLCAAGGNPDPEISWFKDFLPVDPATSNGRIKQLRSGALQIESSEESDQGKYECVATNSAGTRYSAPANLYVRVRRVAPRFSIPPSSQEVMPGGSVNLTCVAVGAPMPYVKWMMGAEELTKEDEMPVGRNVLELSNVVRSANYTCVAISSLGMIEATAQVTVKALPKPPIDLVVTETTATSVTLTWDSGNSEPVTYYGIQYRAAGTEGPFQEVDGVATTRYSIGGLSPFSEYAFRVLAVNSIGRGPPSEAVRARTGEQAPSSPPRRVQARMLSASTMLVQWEPPEEPNGLVRGYRVYYTPDSRRPPNAWHKHNTDAGLLTTVGSLLPGITYSLRVLAFTAVGDGPPSPTIQVKTQQGVPAQPADFQAEVESDTRIQLSWLLPPQERIIMYELVYWAAEDEDQQHKVTFDPTSSYTLEDLKPDTLYRFQLAARSDMGVGVFTPTIEARTAQSTPSAPPQKVMCVSMGSTTVRVSWVPPPADSRNGVITQYSVAYEAVDGEDRGRHVVDGISREHSSWDLVGLEKWTEYRVWVRAHTDVGPGPESSPVLVRTDEDVPSGPPRKVEVEPLNSTAVHVYWKLPVPSKQHGQIRGYQVTYVRLENGEPRGLPIIQDVMLAEAQETTISGLTPETTYSVTVAAYTTKGDGARSKPKIVTTTGAVPGRPTMMISTTAMNTALLQWHPPKELPGELLGYRLQYCRADEARPNTIDFGKDDQHFTVTGLHKGTTYIFRLAAKNRAGLGEEFEKEIRTPEDLPSGFPQNLHVTGLTTSTTELAWDPPVLAERNGRIISYTVVFRDINSQQELQNITTDTRFTLTGLKPDTTYDIKVRAWTSKGSGPLSPSIQSRTMPVEQVFAKNFRVAAAMKTSVLLSWEVPDSYKSAVPFKILYNGQSVEVDGHSMRKLIADLQPNTEYSFVLMNRGSSAGGLQHLVSIRTAPDLLPHKPLPASAYIEDGRFDLSMPHVQDPSLVRWFYIVVVPIDRVGGSMLTPRWSTPEELELDELLEAIEQGGEEQRRRRRQAERLKPYVAAQLDVLPETFTLGDKKNYRGFYNRPLSPDLSYQCFVLASLKEPMDQKRYASSPYSDEIVVQVTPAQQQEEPEMLWVTGPVLAVILIILIVIAILLFKRKRTHSPSSKDEQSIGLKDSLLAHSSDPVEMRRLNYQTPGMRDHPPIPITDLADNIERLKANDGLKFSQEYESIDPGQQFTWENSNLEVNKPKNRYANVIAYDHSRVILTSIDGVPGSDYINANYIDGYRKQNAYIATQGPLPETMGDFWRMVWEQRTATVVMMTRLEEKSRVKCDQYWPARGTETCGLIQVTLLDTVELATYTVRTFALHKSGSSEKRELRQFQFMAWPDHGVPEYPTPILAFLRRVKACNPLDAGPMVVHCSAGVGRTGCFIVIDAMLERMKHEKTVDIYGHVTCMRSQRNYMVQTEDQYVFIHEALLEAATCGHTEVPARNLYAHIQKLGQVPPGESVTAMELEFKLLASSKAHTSRFISANLPCNKFKNRLVNIMPYELTRVCLQPIRGVEGSDYINASFLDGYRQQKAYIATQGPLAESTEDFWRMLWEHNSTIIVMLTKLREMGREKCHQYWPAERSARYQYFVVDPMAEYNMPQYILREFKVTDARDGQSRTIRQFQFTDWPEQGVPKTGEGFIDFIGQVHKTKEQFGQDGPITVHCSAGVGRTGVFITLSIVLERMRYEGVVDMFQTVKTLRTQRPAMVQTEDQYQLCYRAALEYLGSFDHYAT

SEQ ID NO: 12934 - protein, 2715 aa, Homo sapiens
MAAAAGGGSCPGPGSARGRFPGRPRGAGGGGGRGGRGNGAERVRVALRRGGGATGPGGAEPGEDTALLRLLGLRRGLRRLRRLWAGPRVQRGRGRGRGRGWGPSRGCVPEEESSDGESDEEEFQGFHSDEDVAPSSLRSALRSQRGRAPRGRGRKHKTTPLPPPRLADVAPTPPKTPARKRGEEGTERMVQALTELLRRAQAPQAPRSRACEPSTPRRSRGRPPGRPAGPCRRKQQAVVVAEAAVTIPKPEPPPPVVPVKHQTGSWKCKEGPGPGPGTPRRGGQSSRGGRGGRGRGRGGGLPFVIKFVSRAKKVKMGQLSLGLESGQGQGQHEESWQDVPQRRVGSGQGGSPCWKKQEQKLDDEEEEKKEEEEKDKEGEEKEERAVAEEMMPAAEKEEAKLPPPPLTPPAPSPPPPLPPPSTSPPPPLCPPPPPPVSPPPLPSPPPPPAQEEQEESPPPVVPATCSRKRGRPPLTPSQRAEREAARAGPEGTSPPTPTPSTATGGPPEDSPTVAPKSTTFLKNIRQFIMPVVSARSSRVIKTPRRFMDEDPPKPPKVEVSPVLRPPITTSPPVPQEPAPVPSPPRAPTPPSTPVPLPEKRRSILREPTFRWTSLTRELPPPPPAPPPPPAPSPPPAPATSSRRPLLLRAPQFTPSEAHLKIYESVLTPPPLGAPEAPEPEPPPADDSPAEPEPRAVGRTNHLSLPRFAPVVTTPVKAEVSPHGAPALSNGPQTQAQLLQPLQALQTQLLPQALPPPQPQLQPPPSPQQMPPLEKARIAGVGSLPLSGVEEKMFSLLKRAKVQLFKIDQQQQQKVAASMPLSPGGQMEEVAGAVKQISDRGPVRSEDESVEAKRERPSGPESPVQGPRIKHVCRHAAVALGQARAMVPEDVPRLSALPLRDRQDLATEDTSSASETESVPSRSRRGKVEAAGPGGESEPTGSGGTLAHTPRRSLPSHHGKKMRMARCGHCRGCLRVQDCGSCVNCLDKPKFGGPNTKKQCCVYRKCDKIEARKMERLAKKGRTIVKTLLPWDSDESPEASPGPPGPRRGAGAGGPREEVVAHPGPEEQDSLLQRKSARRCVKQRPSYDIFEDSDDSEPGGPPAPRRRTPRENELPLPEPEEQSRPRKPTLQPVLQLKARRRLDKDALAPGPFASFPNGWTGKQKSPDGVHRVRVDFKEDCDLENVWLMGGLSVLTSVPGGPPMVCLLCASKGLHELVFCQVCCDPFHPFCLEEAERPLPQHHDTWCCRRCKFCHVCGRKGRGSKHLLECERCRHAYHPACLGPSYPTRATRKRRHWICSACVRCKSCGATPGKNWDVEWSGDYSLCPRCTQLYEKGNYCPICTRCYEDNDYESKMMQCAQCDHWVHAKCEGLSDEDYEILSGLPDSVLYTCGPCAGAAQPRWREALSGALQGGLRQVLQGLLSSKVVGPLLLCTQCGPDGKQLHPGPCGLQAVSQRFEDGHYKSVHSFMEDMVGILMRHSEEGETPDRRAGGQMKGLLLKLLESAFGWFDAHDPKYWRRSTRLPNGVLPNAVLPPSLDHVYAQWRQQEPETPESGQPPGDPSAAFQGKDPAAFSHLEDPRQCALCLKYGDADSKEAGRLLYIGQNEWTHVNCAIWSAEVFEENDGSLKNVHAAVARGRQMRCELCLKPGATVGCCLSSCLSNFHFMCARASYCIFQDDKKVFCQKHTDLLDGKEIVNPDGFDVLRRVYVDFEGINFKRKFLTGLEPDAINVLIGSIRIDSLGTLSDLSDCEGRLFPIGYQCSRLYWSTVDARRRCWYRCRILEYRPWGPREEPAHLEAAEENQTIVHSPAPSSEPPGGEDPPLDTDVLVPGAPERHSPIQNLDPPLRPDSGSAPPPAPRSFSGARIKVPNYSPSRRPLGGVSFGPLPSPGSPSSLTHHIPTVGDPDFPAPPRRSRRPSPLAPRPPPSRWASPPLKTSPQLRVPPPTSVVTALTPTSGELAPPGPAPSPPPPEDLGPDFEDMEVVSGLSAADLDFAASLLGTEPFQEEIVAAGAMGSSHGGPGDSSEEESSPTSRYIHFPVTVVSAPGLAPSATPGAPRIEQLDGVDDGTDSEAEAVQQPRGQGTPPSGPGVVRAGVLGAAGDRARPPEDLPSEIVDFVLKNLGGPGDGGAGPREESLPPAPPLANGSQPSQGLTASPADPTRTFAWLPGAPGVRVLSLGPAPEPPKPATSKIILVNKLGQVFVKMAGEGEPVPPPVKQPPLPPTISPTAPTSWTLPPGPLLGVLPVVGVVRPAPPPPPPPLTLVLSSGPASPPRQAIRVKRVSTFSGRSPPAPPPYKAPRLDEDGEASEDTPQVPGLGSGGFSRVRMKTPTVRGVLDLDRPGEPAGEESPGPLQERSPLLPLPEDGPPQVPDGPPDLLLESQWHHYSGEASSSEEEPPSPDDKENQAPKRTGPHLRFEISSEDGFSVEAESLEGAWRTLIEKVQEARGHARLRHLSFSGMSGARLLGIHHDAVIFLAEQLPGAQRCQHYKFRYHQQGEGQEEPPLNPHGAARAEVYLRKCTFDMFNFLASQHRVLPEGATCDEEEDEVQLRSTRRATSLELPMAMRFRHLKKTSKEAVGVYRSAIHGRGLFCKRNIDAGEMVIEYSGIVIRSVLTDKREKFYDGKGIGCYMFRMDDFDVVDATMHGNAARFINHSCEPNCFSRVIHVEGQKHIVIFALRRILRGEELTYDYKFPIEDASNKLPCNCGAKRCRRFLN

SEQ ID NO: 12935 - protein, 180 aa, Homo sapiens
MLGLCGQRLPAAWVLLLLPFLPLLLLAAPAPHRASYKPVIVVHGLFDSSYSFRHLLEYINETHPGTVVTVLDLFDGRESLRPLWEQVQGFREAVVPIMAKAPQGVHLICYSQGGLVCRALLSVMDDHNVDSFISLSSPQMGQYGDTDYLKWLFPTSMRSNLYRICYSPWGQEFSICNYWH

SEQ ID NO: 12936 - protein, 268 aa, Homo sapiens
MPPMPVASVAPSASMPGSHLPPLYLDGHVFASQPRLVPQTIPQQQSYQQAAAAQQIPISLHTSLQAQAQLGLRGGLPVSQSQEIFSSLQPFRSQVYMHPSLSPPSTMILSGGTALKPPYSAFPGMQPLEMVKPQSGSPYQPMSGNQALVYEGQLSQAAGLGASQMLDSQLPQLTMPLPRYGSGQQPLILPQSIQLPPGQSLSVGAPRRIPPPGSQPPVLNTSREPSQMEMKGFHFADSKQNVPSGGPVPSPQTYRQNNEWMRNPAWEP

SEQ ID NO: 12937 - protein, 1213 aa, Homo sapiens
MGVDFDVKTFCHNLRATKPPYECPVETCRKVYKSYSGIEYHLYHYDHDNPPPPQQTPLRKHKKKGRQSRPANKQSPSPSEVSQSPGREVMSYAQAQRMVEVDLHGRVHRISIFDNLDVVSEDEEAPEEAPENGSNKENTETPAATPKSGKHKNKEKRKDSNHHHHHNVSASTTPKLPEVVYRELEQDTPDAPPRPTSYYRYIEKSAEELDEEVEYDMDEEDYIWLDIMNERRKTEGVSPIPQEIFEYLMDRLEKESYFESHNKGDPNALVDEDAVCCICNDGECQNSNVILFCDMCNLAVHQECYGVPYIPEGQWLCRRCLQSPSRAVDCALCPNKGGAFKQTDDGRWAHVVCALWIPEVCFANTVFLEPIDSIEHIPPARWKLTCYICKQRGSGACIQCHKANCYTAFHVTCAQQAGLYMKMEPVRETGANGTSFSVRKTAYCDIHTPPGSARRLPALSHSEGEEDEDEEEDEGKGWSSEKVKKAKAKSRIKMKKARKILAEKRAAAPVVSVPCIPPHRLSKITNRLTIQRKSQFMQRLHSYWTLKRQSRNGVPLLRRLQTHLQSQRNCDQVGRDSEDKNWALKEQLKSWQRLRHDLERARLLVELIRKREKLKRETIKVQQIAMEMQLTPFLILLRKTLEQLQEKDTGNIFSEPVPLSEVPDYLDHIKKPMDFFTMKQNLEAYRYLNFDDFEEDFNLIVSNCLKYNAKDTIFYRAAVRLREQGGAVLRQARRQAEKMGIDFETGMHIPHSLAGDEATHHTEDAEEERLVLLENQKHLPVEEQLKLLLERLDEVNASKQSVGRSRRAKMIKKEMTALRRKLAHQRETGRDGPERHGPSSRGSLTPHPAACDKDGQTDSAAEESSSQETSKGLGPNMSSTPAHEVGRRTSVLFSKKNPKTAGPPKRPGRPPKNRESQMTPSHGGSPVGPPQLPIMSSLRQRKRGRSPRPSSSSDSDSDKSTEDPPMDLPANGFSGGNQPVKKSFLVYRNDCSLPRSSSDSESSSSSSSSAASDRTSTTPSKQGRGKPSFSRGTFPEDSSEDTSGTENEAYSVGTGRGVGHSMVRKSLGRGAGWLSEDEDSPLDALDLVWAKCRGYPSYPALIIDPKMPREGMFHHGVPIPVPPLEVLKLGEQMTQEAREHLYLVLFFDNKRTWQWLPRTKLVPLGVNQDLDKEKMLEGRKSNIRKSVQIAYHRALQHRSKVQGEQSSETSDSD

SEQ ID NO: 12938 - protein, 86 aa, Homo sapiens
MPKTMHFLFRFIVFFYLWGLFTAQRQKKEESTEEVKIEVLHRPENCSKTSKKGDLLNAHYDGYLAKDGSKFYCSRRQDSTGCYIDF

SEQ ID NO: 12939 - protein, 460 aa, Homo sapiens
MEICDIINETEEGPKDALRAVKKRIVGNKNFHEVMLALTVLETCVKNCGHRFHVLVASQDFVESVLVRTILPKNNPPTIVHDKVLNLIQSWADAFRSSPDLTGVVTIYEDLRRKGLEFPMTDLDMLSPIHTPQRTVFNSETQSGQDSVGTDSSQQEDSGQHAAPLPAPPILSGDTPIAPTPEQIGKLRSELEMVSGNVRVMSEMLTELVPTQAEPADLELLQELNRTCRAMQQRVLELIPQIANEQLTEELLIVNDNLNNVFLRHERFERFRTGQTTKAPSEAEPAADLIDMGPDPAATGNLSSQLAGMNLGSSSVRAGLQSLEASGRLEDEFDMFALTRGSSLADQRKEVKYEAPQATDGLAGALDARQQSTGAIPVTQACLMEDIEQWLSTDVGNDAEEPKGVTSEGKFDKFLEERAKAADRLPNLSSPSAEGPPGPPSGPAPRKKTQEKDDDMLFAL

SEQ ID NO: 12940 - protein, 714 aa, Homo sapiens
MLPGLALLLLAAWTARALEVYPELQITNVVEANQPVTIQNWCKRGRKQCKTHPHFVIPYRCLVGEFVSDALLVPDKCKFLHQERMDVCETHLHWHTVAKETCSEKSTNLHDYGMLLPCGIDKFRGVEFVCCPLAEESDNVDSADAEEDDSDVWWGGADTDYADGSEDKVVEVAEEEEVAEVEEEEADDDEDDEDGDEVEEEAEEPYEEATERTTSIATTTTTTTESVEEVVREVCSEQAETGPCRAMISRWYFDVTEGKCAPFFYGGCGGNRNNFDTEEYCMAVCGSAMSQSLLKTTQEPLARDPVKLPTTAASTPDAVDKYLETPGDENEHAHFQKAKERLEAKHRERMSQVMREWEEAERQAKNLPKADKKAVIQHFQEKVESLEQEAANERQQLVETHMARVEAMLNDRRRLALENYITALQAVPPRPRHVFNMLKKYVRAEQKDRQHTLKHFEHVRMVDPKKAAQIRSQVMTHLRVIYERMNQSLSLLYNVPAVAEEIQDEVDELLQKEQNYSDDVLANMISEPRISYGNDALMPSLTETKTTVELLPVNGEFSLDDLQPWHSFGADSVPANTENEVEPVDARPAADRGLTTRPGSGLTNIKTEEISEVKMDAEFRHDSGYEVHHQKLVFFAEDVGSNKGAIIGLMVGGVVIATVIVITLVMLKKKQYTSIHHGVVEVDAAVTPEERHLSKMQQNGYENPTYKFFEQMQN

SEQ ID NO: 12941 - protein, 1490 aa, Homo sapiens
MPNSERHGGKKDGSGGASGTLQPSSGGGSSNSRERHRLVSKHKRHKSKHSKDMGLVTPEAASLGTVIKPLVEYDDISSDSDTFSDDMAFKLDRRENDERRGSDRSDRLHKHRHHQHRRSRDLLKAKQTEKEKSQEVSSKSGSMKDRISGSSKRSNEETDDYGKAQVAKSSSKESRSSKLHKEKTRKERELKSGHKDRSKSHRKRETPKSYKTVDSPKRRSRSPHRKWSDSSKQDDSPSGASYGQDYDLSPSRSHTSSNYDSYKKSPGSTSRRQSVSPPYKEPSAYQSSTRSPSPYSRRQRSVSPYSRRRSSSYERSGSYSGRSPSPYGRRRSSSPFLSKRSLSRSPLPSRKSMKSRSRSPAYSRHSSSHSKKKRSSSRSRHSSISPVRLPLNSSLGAELSRKKKERAAAAAAAKMDGKESKGSPVFLPRKENSSVEAKDSGLESKKLPRSVKLEKSAPDTELVNVTHLNTEVKNSSDTGKVKLDENSEKHLVKDLKAQGTRDSKPIALKEEIVTPKETETSEKETPPPLPTIASPPPPLPTTTPPPQTPPLPPLPPIPALPQQPPLPPSQPAFSQVPASSTSTLPPSTHSKTSAVSSQANSQPPVQVSVKTQVSVTAAIPHLKTSTLPPLPLPPLLPGDDDMDSPKETLPSKPVKKEKEQRTRHLLTDLPLPPELPGGDLSPPDSPEPKAITPPQQPYKKRPKICCPRYGERRQTESDWGKRCVDKFDIIGIIGEGTYGQVYKAKDKDTGELVALKKVRLDNEKEGFPITAIREIKILRQLIHRSVVNMKEIVTDKQDALDFKKDKGAFYLVFEYMDHDLMGLLESGLVHFSEDHIKSFMKQLMEGLEYCHKKNFLHRDIKCSNILLNNSGQIKLADFGLARLYNSEESRPYTNKVITLWYRPPELLLGEERYTPAIDVWSCGCILGELFTKKPIFQANLELAQLELISRLCGSPCPAVWPDVIKLPYFNTMKPKKQYRRRLREEFSFIPSAALDLLDHMLTLDPSKRCTAEQTLQSDFLKDVELSKMAPPDLPHWQDCHELWSKKRRRQRQSGVVVEEPPPSKTSRKETTSGTSTEPVKNSSPAPPQPAPGKVESGAGDAIGLADITQQLNQSELAVLLNLLQSQTDLSIPQMAQLLNIHSNPEMQQQLEALNQSISALTEATSQQQDSETMAPEESLKEAPSAPVILPSAEQTTLEASSTPADMQNILAVLLSQLMKTQEPAGSLEENNSDKNSGPQGPRRTPTMPQEEAAACPPHILPPEKRPPEPPGPPPPPPPPPLVEGDLSSAPQELNPAVTAALLQLLSQPEAEPPGHLPHEHQALRPMEYSTRPRPNRTYGNTDGPETGFSAIDTDERNSGPALTESLVQTLVKNRTFSGSLSHLGESSSYQGTGSVQFPGDQDLRFARVPLALHPVVGQPFLKAEGSSNSVVHAETKLQNYGELGPGTTGASSSGAGLHWGGPTQSSAYGKLYRGPTRVPPRGGRGRGVPY

SEQ ID NO: 12942 - protein, 302 aa, Homo sapiens
MVTEQEVDAIGQTLVDPKQPLQARFRALFTLRGLGGPGAIAWISQAFDDDSALLKHELAYCLGQMQDARAIPMLVDVLQDTRQEPMVRHEAGEALGAIGDPEVLEILKQYSSDPVIEVAETCQLAVRRLEWLQQHGGEPAAGPYLSVDPAPPAEERDVGRLREALLDESRPLFERYRAMFALRNAGGEEAALALAEGLHCGSALFRHEVGYVLGQLQHEAAVPQLAAALARCTENPMVRHECAEALGAIARPACLAALQAHADDPERVVRESCEVALDMYEHETGRAFQYADGLEQLRGAPS

SEQ ID NO: 12943 - protein, 167 aa, Homo sapiens
MRELRIRKLCLNICVGESGDRLTRAAKVLEQLTGQTPVFSKARYTVRSFGIRRNEKIAVHCTVRGAKAEEILEKGLKVREYELRKNNFSDTGNFGFGIQEHIDLGIKYDPSIGIYGLDFYVVLGRPGFSIADKKRRTGCIGAKHRISKEEAMRWFQQKYDGIILPGK

SEQ ID NO: 12944 - protein, 263 aa, Homo sapiens
MITFLPLLLGLSLGCTGAGGFVAHVESTCLLDDAGTPKDFTYCISFNKDLLTCWDPEENKMAPCEFGVLNSLANVLSQHLNQKDTLMQRLRNGLQNCATHTQPFWGSLTNRTRPPSVQVAKTTPFNTREPVMLACYVWGFYPAEVTITWRKNGKLVMPHSSAHKTAQPNGDWTYQTLSHLALTPSYGDTYTCVVEHTGAPEPILRDWTPGLSPMQTLKVSVSAVTLGLGLIIFSLGVISWRRAGHSSYTPLPGSNYSEGWHIS

SEQ ID NO: 12945 - protein, 657 aa, Homo sapiens
MLRGPGPGLLLLAVQCLGTAVPSTGASKSKRQAQQMVQPQSPVAVSQSKPGCYDNGKHYQINQQWERTYLGNALVCTCYGGSRGFNCESKPEAEETCFDKYTGNTYRVGDTYERPKDSMIWDCTCIGAGRGRISCTIANRCHEGGQSYKIGDTWRRPHETGGYMLECVCLGNGKGEWTCKPIAEKCFDHAAGTSYVVGETWEKPYQGWMMVDCTCLGEGSGRITCTSRNRCNDQDTRTSYRIGDTWSKKDNRGNLLQCICTGNGRGEWKCERHTSVQTTSSGSGPFTDVRAAVYQPQPHPQPPPYGHCVTDSGVVYSVGMQWLKTQGNKQMLCTCLGNGVSCQETAVTQTYGGNSNGEPCVLPFTYNGRTFYSCTTEGRQDGHLWCSTTSNYEQDQKYSFCTDHTVLVQTRGGNSNGALCHFPFLYNNHNYTDCTSEGRRDNMKWCGTTQNYDADQKFGFCPMAAHEEICTTNEGVMYRIGDQWDKQHDMGHMMRCTCVGNGRGEWTCIAYSQLRDQCIVDDITYNVNDTFHKRHEEGHMLNCTCFGQGRGRWKCDPVDQCQDSETGTFYQIGDSWEKYVHGVRYQCYCYGRGIGEWHCQPLQTYPSSSGPVEVFITETPSQPNSHPIQWNAPQPSHISKYILRWRPVSIPPRNLGY

SEQ ID NO: 12946 - protein, 83 aa, Homo sapiens
MVWRLVLLALWVWPSTQAGHQDKDTTFDLFSISNINRKTIGAKQFRGPDPGVPAYRFVRFDYIPPVNADDLSKITKIMRQKEG

SEQ ID NO: 12947 - protein, 462 aa, Homo sapiens
MQLPRWWELGDPCAWTGQGRGTRRMSPATTGTFLLTVYSIFSKVHSDRNVYPSAGVLFVHVLEREYFKGEFPPYPKPGEISNDPITFNTNLMGYPDRPGWLRYIQRTPYSDGVLYGSPTAENVGKPTIIEITAYNRRTFETARHNLIINIMSAEDFPLPYQAEFFIKNMNVEEMLASEVLGDFLGAVKNVWQPERLNAINITSALDRGGRVPLPINDLKEGVYVMVGADVPFSSCLREVENPQNQLRCSQEMEPVITCDKKFRTQFYIDWCKISLVDKTKQVSTYQEVIRGEGILPDGGEYKPPSDSLKSRDYYTDFLITLAVPSAVALVLFLILAYIMCCRREGVEKRNMQTPDIQLVHHSAIQKSTKELRDMSKNREIAWPLSTLPVFHPVTGEIIPPLHTDNYDSTNMPLMQTQQWSFAPVAQAGVQWSDLGSLQPPPPRNLPHQTQIPQQQTTGKWYP

SEQ ID NO: 12948 - protein, 581 aa, Homo sapiens
MPRRKRNAGSSSDGTEDSDFSTDLEHTDSSESDGTSRRSARVTRSSARLSQSSQDSSPVRNLQSFGTEEPAYSTRRVTRSQQQPTPVTPKKYPLRQTRSSGSETEQVVDFSDRETKNTADHDESPPRTPTGNAPSSESDIDISSPNVSHDESIAKDMSLKDSGSDLSHRPKRRRFHESYNFNMKCPTPGCNSLGHLTGKHERHFSISGCPLYHNLSADECKAPTERQLRYKEKVAELRKKRNSGLSKEQKEKYMEHRQTYGNTREPLLENLTSEYDLDLFRRAQARASEDLEKLRLQGQITEGSNMIKTIAFGRYELDTWYHSPYPEEYARLGRLYMCEFCLKYMKSQTILRRHMAKCVWKHPPGDEIYRKGSISVFEVDGKKNKIYCQNLCLLAKLFLDHKTLYYDVEPFLFYVMTEADNTGCHLIGYFSKEKNSFLNYNVSCILTMPQYMRQGYGKMLIDFSYLLSKVEEKVGSPERPLSDLGLISYRSYWKEVLLRYLHNFQGKEISIKEISQETAVNPVDIVSTLQALQMLKYWKGKHLVLKRQDLIDEWIAKEAKRSNSNKTMDPSCLKWTPPKGT

SEQ ID NO: 12949 - protein, 148 aa, Homo sapiens
MAGPFSRLLSARPGLRLLALAGAGSLAAGFLLRPEPVRAASERRRLYPPSAEYPDLRKHNNCMASHLTPAVYARLCDKTTPTGWTLDQCIQTGVDNPGHPFIKTVGMVAGDEETYEVFADLFDPVIQERHNGYDPRTMKHTTDLDASK

SEQ ID NO: 12950 - protein, 259 aa, Homo sapiens
MGKNFSDSFLSRECVIRMVSGRFYLSCLLLGSLGSMCILFTIYWMQYWRGGFAWNGSIYMFNWHPVLMVAGMVVFYGGASLVYRLPQSWVGPKLPWKLLHAALHLMAFVLTVVGLVAVFTFHNHGRTANLYSLHSWLGITTVFLFACQWFLGFAVFLLPWASMWLRSLLKPIHVFFGAAILSLSIASVISGINEKLFFSLKNTTRPYHSLPSEAVFANSTGMLVVAFGLLVLYILLASSWKRPEPGILTDRQPLLHDGE

SEQ ID NO: 12951 - protein, 1306 aa, Homo sapiens
MDSLPRLTSVLTLLFSGLWHLGLTATNYNCDDPLASLLSPMAFSSSSDLTGTHSPAQLNWRVGTGGWSPADSNAQQWLQMDLGNRVEITAVATQGRYGSSDWVTSYSLMFSDTGRNWKQYKQEDSIWTFAGNMNADSVVHHKLLHSVRARFVRFVPLEWNPSGKIGMRVEVYGCSYKSDVADFDGRSSLLYRFNQKLMSTLKDVISLKFKSMQGDGVLFHGEGQRGDHITLELQKGRLALHLNLGDSKARLSSSLPSATLGSLLDDQHWHSVLIERVGKQVNFTVDKHTQHFRTKGETDALDIDYELSFGGIPVPGKPGTFLKKNFHGCIENLYYNGVNIIDLAKRRKHQIYTGNVTFSCSEPQIVPITFVNSSGSYLLLPGTPQIDGLSVSFQFRTWNKDGLLLSTELSEGSGTLLLSLEGGILRLVIQKMTERVAEILTGSNLNDGLWHSVSINARRNRITLTLDDEAAPPAPDSTWVQIYSGNSYYFGGCPDNLTDSQCLNPIKAFQGCMRLIFIDNQPKDLISVQQGSLGNFSDLHIDLCSIKDRCLPNYCEHGGSCSQSWTTFYCNCSDTSYTGATCHNSIYEQSCEVYRHQGNTAGFFYIDSDGSGPLGPLQVYCNITEDKIWTSVQHNNTELTRVRGANPEKPYAMALDYGGSMEQLEAVIDGSEHCEQEVAYHCRRSRLLNTPDGTPFTWWIGRSNERHPYWGGSPPGVQQCECGLDESCLDIQHFCNCDADKDEWTNDTGFLSFKDHLPVTQIVITDTDRSNSEAAWRIGPLRCYGDRRFWNAVSFYTEASYLHFPTFHAEFSADISFFFKTTALSGVFLENLGIKDFIRLEISSPSEITFAIDVGNGPVELVVQSPSLLNDNQWHYVRAERNLKETSLQVDNLPRSTRETSEEGHFRLQLNSQLFVGGTSSRQKGFLGCIRSLHLNGQKMDLEERAKVTSGVRPGCPGHCSSYGSICHNGGKCVEKHNGYLCDCTNSPYEGPFCKKEVSAVFEAGTSVTYMFQEPYPVTKNISLSSSAIYTDSAPSKENIALSFVTTQAPSLLLFINSSSQDFVVVLLCKNGSLQVRYHLNKEETHVFTIDADNFANRRMHHLKINREGRELTIQMDQQLRLSYNFSPEVEFRVIRSLTLGKVTENLGLDSEVAKANAMGFAGCMSSVQYNHIAPLKAALRHATVAPVTVHGTLTESSCGFMVDSDVNAVTTVHSSSDPFGKTDEREPLTNAVRSDSAVIGGVIAVVIFIIFCIIGIMTRFLYQHKQSHRTSQMKEKEYPENLDSSFRNEIDLQNTVSECKREYFI

SEQ ID NO: 12952 - protein, 527 aa, Homo sapiens
MGSLKEELLKAIWHAFTALDQDHSGKVSKSQLKVLSHNLCTVLKVPHDPVALEEHFRDDDEGPVSNQGYMPYLNRFILEKIEYLLKKLTEAMGGGWQQEQFEHYKINFDDSKNGLSAWELIELIGNGQFSKGMDRQTVSMAINEVFNELILDVLKQGYMMKKGHRRKNWTERWFVLKPNIISYYVSEDLKDKKGDILLDENCCVESLPDKDGKKCLFLVKCFDKTFEISASDKKKKQEWIQAIHSTIHLLKLGSPPPHKEARQRRKELRKKQLAEQEELERQMKELQAANESKQQELEAVRKKLEEAASRAAEEEKKRLQTQVELQARFSTELEREKLIRQQMEEQVAQKSSELEQYLQRVRELEDMYLKLQEALEDERQARQDEETVRKLQARLLEEESSKRAELEKWHLEQQQAIQTTEAEKQELENQRVLKEQALQEAMEQLEQLELERKQALEQYEEVKKKLEMATNKTKSWKDKVAHHEGLIRLIEPGSKNPHLITNWGPAAFTEAELEEREKNWKEKKTTE

SEQ ID NO: 12953 - protein, 102 aa, Homo sapiens
MRCSPGGVWLALAASLLHVSLQGEFQRKLYKELVKNYNPLERPVANDSQPLTVYFSLSLLQIMDVDEKNQVLTTNIWLQMAYSRVPATSMYAGFPLMCSTAN

SEQ ID NO: 12954 - protein, 398 aa, Homo sapiens
MAWRRREASVGARGVLALALLALALCVPGARGRALEWFSAVVNIEYVDPQTNLTVWSVSESGRFGDSSPKEGAHGLVGVPWAPGGDLEGCAPDTRFFVPEPGGRGAAPWVALVARGGCTFKDKVLVAARRNASAVVLYNEERYGNITLPMSHAGTGNIVVIMISYPKGREILELVQKGIPVTMTIGVGTRHVQEFISGQSVVFVAIAFITMMIISLAWLIFYYIQRFLYTGSQIGSQSHRKETKKVIGQLLLHTVKHGEKGIDVDAENCAVCIENFKVKDIIRILPCKHIFHRICIDPWLLDHRTCPMCKLDVIKALGYWGEPGDVQEMPAPESPPGRDPAANLSLALPDDDGSDDSSPPSASPAESEPQCDPSFKGDAGENTALLGAMCSHVMWTSI

SEQ ID NO: 12955 - protein, 572 aa, Homo sapiens
MSRSPDAKEDPVECPLCMEPLEIDDINFFPCTCGYQICRFCWHRIRTDENGLCPACRKPYPEDPAVYKPLSQEELQRIKNEKKQKQNERKQKISENRKHLASVRVVQKNLVFVVGLSQRLADPEVLKRPEYFGKFGKIHKVVINNSTSYAGSQGPSASAYVTYIRSEDALRAIQCVNNVVVDGRTLKASLGTTKYCSYFLKNMQCPKPDCMYLHELGDEAASFTKEEMQAGKHQEYEQKLLQELYKLNPNFLQLSTGSVDKNKNKVTPLQSPIDKPSDSLSIGNGDNSQQISNSDTPSPPPGLSKSNPVIPISSSNHSARSPFEGAVTESQSLFSDNFRHPNPIPSGLPPFPSSPQTSSDWPTAPEPQSLFTSETIPVSSSTDWQAAFGFGSSKQPEDDLGFDPFDVTRKALADLIEKELSVQDQPSLSPTSLQNSSSHTTTAKGPGSGFLHPAAATNANSLNSTFSVLPQRFPQFQQHRAVYNSFSFPGQAARYPWMAFPRNSIMHLNHTANPTSNSNFLDLNLPPQHNTGLGGIPVAGEEEVKVSTMPLSTSSHSLQQGQQPTSLHTTVA

SEQ ID NO: 12956 - protein, 524 aa, Homo sapiens
MAGLRARGGPGPGLLALSALGFCLMLQVSAKRPPKTPPCPPSCSCTRDTAFCVDSKAVPRNLPSEVISLTLVNAAFSEIQDGAFSHLPLLQFLLLNSNKFTLIGDNAFTGLSHLQYLSLANNNLQTLPRDIFRPLDILNDLDLRGNSLNCDCKVKWLVEWLAHTNTTVAPIYCASPPRFQEHKVQDLPLREFDCITTDFVLYQTLAFPAVSAEPFLYSSDLYLALAQPGVSACTILKWDYVERQLRDYDRIPAPSAVHCKPMVVDSQLYVVVAQLFGGSYIYHWDPNTTRFTRLQDIDPQRVRKPNDLEAFRIDGDWYFAVADSSKAGATSLYRWHQNGFYSHQALHPWHRDTDLEFVDGEGKPRLIVSSSSQAPVIYQWSRTQKQFVAQGEVTQVPDAQAVKHFRAGRDSYLCLSRYIGDSKILRWEGTRFSEVQALPSRGSLALQPFLVGGRRYLALGSDFSFTQIYQWDEGRQKFVRFQELAVQAPRAFCYMPAGDAQLLLAPSFKGQTLVYRHIVVDLSA

SEQ ID NO: 12957 - protein, 134 aa, Homo sapiens
MPRCRWLSLILLTIPLALVARKDPKKNETGVLRKLKPVNASNANVKQCLWFAMQEYNKESEDKYVFLVVKTLQAQLQVTNLLEYLIDVEIARSDCRKPLSTNEICAIQENSKLKRKLSCSFLVGALPWNGEFTV

SEQ ID NO: 12958 - protein, 840 aa, Homo sapiens
MACRWSTKESPRWRSALLLLFLAGVYACGETPEQIRAPSGIITSPGWPSEYPAKINCSWFIRANPGEIITISFQDFDIQGSRRCNLDWLTIETYKNIESYRACGSTIPPPYISSQDHIWIRFHSDDNISRKGFRLAYFSGKSEEPNCACDQFRCGNGKCIPEAWKCNNMDECGDSSDEEICAKEANPPTAAAFQPCAYNQFQCLSRFTKVYTCLPESLKCDGNIDCLDLGDEIDCDVPTCGQWLKYFYGTFNSPNYPDFYPPGSNCTWLIDTGDHRKVILRFTDFKLDGTGYGDYVKIYDGLEENPHKLLRVLTAFDSHAPLTVVSSSGQIRVHFCADKVNAARGFNATYQVDGFCLPWEIPCGGNWGCYTEQQRCDGYWHCPNGRDETNCTMCQKEEFPCSRNGVCYPRSDRCNYQNHCPNGSDEKNCFFCQPGNFHCKNNRCVFESWVCDSQDDCGDGSDEENCPVIVPTRVITAAVIGSLICGLLLVIALGCTCKLYSLRMFERRSFETQLSRVEAELLRREAPPSYGQLIAQGLIPPVEDFPVCSPNQASVLENLRLAVRSQLGFTSVRLPMAGRSSNIWNRIFNFARSRHSGSLALVSADGDEVVPSQSTSREPERNHTHRSLFSVESDDTDTENERRDMAGASGGVAAPLPQKVPPTTAVEATVGACASSSTQSTRGGHADNGRDVTSVEPPSVSPARHQLTSALSRMTQGLRWVRFTLGRSSSLSQNQSPLRQLDNGVSGREDDDDVEMLIPISDGSSDFDVNDCSRPLLDLASDQGQGLRQPYNATNPGVRPSNRDGPCERCGIVHTAQIPDTCLEVTLKNETSDDEALLLC

SEQ ID NO: 12959 - protein, 362 aa, Homo sapiens
MLVMAPRTVLLLLSAALALTETWAGSHSMRYFYTSVSRPGRGEPRFISVGYVDDTQFVRFDSDAASPREEPRAPWIEQEGPEYWDRNTQIYKAQAQTDRESLRNLRGYYNQSEAGSHTLQSMYGCDVGPDGRLLRGHDQYAYDGKDYIALNEDLRSWTAADTAAQITQRKWEAAREAEQRRAYLEGECVEWLRRYLENGKDKLERADPPKTHVTHHPISDHEATLRCWALGFYPAEITLTWQRDGEDQTQDTELVETRPAGDRTFQKWAAVVVPSGEEQRYTCHVQHEGLPKPLTLRWEPSSQSTVPIVGIVAGLAVLAVVVIGAVVAAVMCRRKSSGGKGGSYSQAACSDSAQGSDVSLTA

SEQ ID NO: 12960 - protein, 479 aa, Homo sapiens
MATDSWALAVDEQEAAAESLSNLHLKEEKIKPDTNGAVVKTNANAEKTDEEEKEDRAAQSLLNKLIRSNLVDNTNQVEVLQRDPNSPLYSVKSFEELRLKPQLLQGVYAMGFNRPSKIQENALPMMLAEPPQNLIAQSQSGTGKTAAFVLAMLSRVEPSDRYPQCLCLSPTYELALQTGKVIEQMGKFYPELKLAYAVRGNKLERGQKISEQIVIGTPGTVLDWCSKLKFIDPKKIKVFVLDEADVMIATQGHQDQSIRIQRMLPRNCQMLLFSATFEDSVWKFAQKVVPDPNVIKLKREEETLDTIKQYYVLCSSRDEKFQALCNLYGAITIAQAMIFCHTRKTASWLAAELSKEGHQVALLSGEMMVEQRAAVIERFREGKEKVLVTTNVCARGIDVEQVSVVINFDLPVDKDGNPDNETYLHRIGRTGRFGKRGLAVNMVDSKHSMNILNRIQEHFNKKIERLDTDDLDEIEKIAN

SEQ ID NO: 12961 - protein, 313 aa, Homo sapiens
MEPERCRIQTEFNQLRNILDRVEQRELKKLEQEEKKGLRIIEEAENDLVHQTQSLRELISDLERRCQGSTMELLQDVSDVTERSEFWTLRKPEALPTKLRSMFRAPDLKRMLRVCRELTDVQSYWVDVTLNPHTANLNLVLAKNRRQVRFVGAKVSGPSCLEKHYDCSVLGSQHFSSGKHYWEVDVAKKTAWILGVCSNSLGPTFSFNHFAQNHSAYSRYQPQSGYWVIGLQHNHEYRAYEDSSPSLLLSMTVPPRRVGVFLDYEAGTVSFYNVTNHGFPIYTFSKYYFPTTLCPYFNPCNCVIPMTLRRPSS

SEQ ID NO: 12962 - protein, 450 aa, Homo sapiens
MALPSRILLWKLVLLQSSAVLLHSGSSVPAAAGSSVVSESAVSWEAGARAVLRCQSPRMVWTQDRLHDRQRVLHWDLRGPGGGPARRLLDLYSAGEQRVYEARDRGRLELSASAFDDGNFSLLIRAVEETDAGLYTCNLHHHYCHLYESLAVRLEVTDGPPATPAYWDGEKEVLAVARGAPALLTCVNRGHVWTDRHVEEAQQVVHWDRQPPGVPHDRADRLLDLYASGERRAYGPLFLRDRVAVGADAFERGDFSLRIEPLEVADEGTYSCHLHHHYCGLHERRVFHLTVAEPHAEPPPRGSPGNGSSHSGAPGPDPTLARGHNVINVIVPESRAHFFQQLGYVLATLLLFILLLVTVLLAARRRRGGYEYSDQKSGKSKGKDVNLAEFAVAAGDQMLYRSEDIQLASSPPTDYKNNILKERAELAHSPLPAKYIDLDKDPSGLCPLGA

SEQ ID NO: 12963 - protein, 389 aa, Homo sapiens
MEGSEPVAAHQGEEASCSSWGTGSTNKNLPIMSTASVEIDDALYSRQRYVLGDTAMQKMAKSHVFLSGMGGLGLEIAKNLVLAGIKAVTIHDTEKCQAWDLGTNFFLSEDDVVNKRNRAEAVLKHIAELNPYVHVTSSSVPFNETTDLSFLDKYQCVVLTEMKLPLQKKINDFCRSQCPPIKFISADVHGIWSRLFCDFGDEFEVLDTTGEEPKEIFISNITQANPGIVTCLENHPHKLETGQFLTFREINGMTGLNGSIQQITVISPFSFSIGDTTELEPYLHGGIAVQVKTPKTVFFESLERQLKHPKCLIVDFSNPEAPLEIHTAMLALDQFQEKYSRKPNVGCQQDSEELLKLATSISETLEEKVTIEIYGCPNICLLIHKCSVY

SEQ ID NO: 12964 - protein, 690 aa, Homo sapiens
MQPPPRKVKPAQEVKLRFLEQLSILQTWQQREADLLEDIRSYSKQRAAIEREYGQALQKLAGPFLKREGHRSGEMDSRGRTVFGAWRCLLDATVAGGQTRLQASDRYRDLAGGTGRSAKEQVLRKGTENLQRAQAEVLQSVRELSRSRKLYGQRERVWALAQEKAADVQARLNRSDHGIFHSRTSLQKLSTKLSAQSAQYSQQLQAARNEYLLNLVATNAHLDHYYQEELPALLKALVSELSEHLRDPLTSLSHTELEAAEVILEHAHRGEQTTSQVSWEQDLKLFLQEPGVFSPTPPQQFQPAGTDQVCVLEWGAEGVAGKSGLEKEVQRLTSRAARDYKIQNHGHRVLQRLEQRRQQASEREAPSIEQRLQEVRESIRRAQVSQVKGAARLALLQGAGLDVERWLKPAMTQAQDEVEQERRLSEARLSQRDLSPTAEDAELSDFEECEETGELFEEPAPQALATRALPCPAHVVFRYQAGREDELTITEGEWLEVIEEGDADEWVKARNQHGEVGFVPERYLNFPDLSLPESSQDSDNPCGAEPTAFLAQALYSYTGQSAEELSFPEGALIRLLPRAQDGVDDGFWRGEFGGRVGVFPSLLVEELLGPPGPPELSDPEQMLPSPSPPSFSPPAPTSVLDGPPAPVLPGDKALDFPGFLDMMAPRLRPMRPPPPPPAKAPDPGHPDPLT

SEQ ID NO: 12965 - protein, 231 aa, Homo sapiens
MEPPGDWGPPPWRSTPKTDVLRLVLYLTFLGAPCYAPALPSCKEDEYPVGSECCPKCSPGYRVKEACGELTGTVCEPCPPGTYIAHLNGLSKCLQCQMCDPAMGLRASRNCSRTENAVCGCSPGHFCIVQDGDHCAACRAYATSSPGQRVQKGGTESQDTLCQNCPPGTFSPNGTLEECQHQTKCSWLVTKAGAGTSSSHWVWWFLSGSLVIVIVCSTVGLIICVKRRKPR

SEQ ID NO: 12966 - protein, 21 aa, Homo sapiens
MVDGVMILPVLIMIALPSPSM

SEQ ID NO: 12967 - protein, 135 aa, Homo sapiens
MGAPLLSPGWGAGAAGRRWWMLLAPLLPALLLVRPAGALVEGLYCGTRDCYEVLGVSRSAGKAEIARAYRQLARRYHPDRYRPQPGDEGPGRTPQSAEEAFLLVATAYETLKSSCICPRGLGVEWTPAEAPQLFL

SEQ ID NO: 12968 - protein, 109 aa, Homo sapiens
MMLRVLVGAVLPAMLLAAPPPINKLALFPDKSAWCEAKNITQIVGHSGCEAKSIQNRACLGQCFSYSVPNTFPQSTESLVHCDSCMPAQSMWEIVTLECPGHEEVPRVD

SEQ ID NO: 12969 - protein, 343 aa, Homo sapiens
MAGLNCGVSIALLGVLLLGAARLPRGAEAFEIALPRESNITVLIKLGTPTLLAKPCYIVISKRHITMLSIKSGERIVFTFSCQSPENHFVIEIQKNIDCMSGPCPFGEVQLQPSTSLLPTLNRTFIWDVKAHKSIGLELQFSIPRLRQIGPGESCPDGVTHSISGRIDATVVRIGTFCSNGTVSRIKMQEGVKMALHLPWFHPRNVSGFSIANRSSIKRLCIIESVFEGEGSATLMSANYPEGFPEDELMTWQFVVPAHLRASVSFLNFNLSNCERKEERVEYYIPGSTTNPEVFKLEDKQPGNMAGNFNLSLQGCDQDAQSPGILRLQFQVLVQHPQNESSE

SEQ ID NO: 12970 - protein, 43 aa, Homo sapiens
MKMASFLAFLLLNFRVCLLLLQLLMPHSAQFSVLGPSGPILAM

SEQ ID NO: 12971 - protein, 242 aa, Homo sapiens
MPVPWFLLSLALGRSPVVLSLERLVGPQDATHCSPGLSCRLWDSDILCLPGDIVPAPGPVLAPTHLQTELVLRCQKETDCDLCLRVAVHLAVHASLQAQVVLSFQAYPTARCVLLEVQVPAALVQFGQSVGSVVYDCFEAALGSEVRIWSYTQPRYEKELNHTQQLPALPWLNVSADGDNVHLVLNVSEEQHFGLSLYWNQVQGPPKPRWHKNLVRPPPSQVHSHCRPMPVQRTQCHIREDP

SEQ ID NO: 12972 - protein, 1233 aa, Homo sapiens
MSIDHLKQKIPPALFYKETYLGPNEVLKNGMYCSLYEVVEKTRIGSNMESLLQKLDREKLVLVKPLGDRGYLFLLSPYQMVPPYEYQTAKSRVLHALFLFQEPRSIVTSQKGSTNAAPQERHESMPDVLKIAQFLQFSLIQCRKEFKNISAINFHSVVEKYVSEFFKRGFGSGKREFIMFPYDSRLDDKKFLYSAPRNKSHIDTCLHAYIFRPEVYQLPICKLKELFEENRKLQQFSPLSDYEGQEEEMNGTKMKFGKRNNSRGEAIISGKQRSSHSLDYDKDRVKELINLIQCRKKSVGGDSDTEDMRSKTVLKRKLEDLPENMRKLAKTSNLSENCHLYEESPQPIGSLGHDADLRRQQQDTCNSGIADIHRLFNWLSETLANARHSDASLTDTVNKALGLSTDDAYEELRQKHEYELNSTPDKKDYEQPTCAKVENAQFKGTQSLLLEVDATSKYSVAISTSEVGTDHKLHLKEDPNLISVNNFEDCSLCPSVPIEHGFRRQQSKSNNVEETEIHWKLIPITGGNARSPEDQLGKHGEKQTPDTLKGTTEDDVLTGQVEEQCVPAAEAEPPAVSETTERTVLGEYNLFSRKIEEILKQKNVSYVSTVSTPIFSTQEKMKRLSEFIYSKTSKAGVQEFVDGLHEKLNTIIIKASAKGGNLPPVSPNDSGAKIASNPLERHVIPVSSSDFNNKHLLEPLCSDPLKDTNSDEQHSTSALTEVEMNQPQHATELMVTSDHIVPGDMAREPVEETTKSPSDVNISAQPALSNFISQLEPEVFNSLVKIMKDVQKNTVKFYIHEEEESVLCKEIKEYLIKLGNTECHPEQFLERRSKLDKLLIIIQNEDIAGFIHKIPGLVTLKKLPCVSFAGVDSLDDVKNHTYNELFVSGGFIVSDESILNPEVVTVENLKNFLTFLEELSTPEGKWQWKVHCKFQKKLKELGRLNAKALSLLTLLNVYQKKHLVEILSYHNCDSQTRNAPELDCLIRLQAQNIQQRHIVFLTEKNIKMLSSYTDNGIVVATAEDFMQNFKNLVGYHNSITEENLPQLGANENLESQSALLENDEKDEEDMSLDSGDEISHIEVCSNFHSEIWEKETKGSRGTDQKKNTQIELQSSPDVQNSLLEDKTYLDSEERTSIDIVCSEGENSNSTEQDSYSNFQVYHSQLNMSHQFSHFNVLTHQTFLGTPYALSSSQSQENENYFLSAYTESLDRDKSPPPLSWGKSDSSRPYSQEK

SEQ ID NO: 12973 - protein, 622 aa, Homo sapiens
MCGLQFSLPCLRLFLVVTCYLLLLLHKEILGCSSVCQLCTGRQINCRNLGLSSIPKNFPESTVFLYLTGNNISYINESELTGLHSLVALYLDNSNILYVYPKAFVQLRHLYFLFLNNNFIKRLDPGIFKGLLNLRNLYLQYNQVSFVPRGVFNDLVSVQYLNLQRNRLTVLGSGTFVGMVALRILDLSNNNILRISESGFQHLENLACLYLGSNNLTKVPSNAFEVLKSLRRLSLSHNPIEAIQPFAFKGLANLEYLLLKNSRIRNVTRDGFSGINNLKHLILSHNDLENLNSDTFSLLKNLIYLKLDRNRIISIDNDTFENMGASLKILNLSFNNLTALHPRVLKPLSSLIHLQANSNPWECNCKLLGLRDWLASSAITLNIYCQNPPSMRGRALRYINITNCVTSSINVSRAWAVVKSPHIHHKTTALMMAWHKVTTNGSPLENTETENITFWERIPTSPAGRFFQENAFGNPLETTAVLPVQIQLTTSVTLNLEKNSALPNDAASMSGKTSLICTQEVEKLNEAFDILLAFFILACVLIIFLIYKVVQFKQKLKASENSRENRLEYYSFYQSARYNVTASICNTSPNSLESPGLEQIRLHKQIVPENEAQVILFEHSAL

SEQ ID NO: 12974 - protein, 322 aa, Homo sapiens
MLALVLVVMVWYSISREDRYIELFYFPIPEKKEPCLQGEAESKASKLFGNYSRDQPIFLRLEDYFWVKTPSAYELPYGTKGSEDLLLRVLAITSSSIPKNIQSLRCRRCVVVGNGHRLRNSSLGDAINKYDVVIRLNNAPVAGYEGDVGSKTTMRLFYPESAHFDPKVENNPDTLLVLVAFKAMDFHWIETILSDKKRVRKGFWKQPPLIWDVNPKQIRILNPFFMEIAADKLLSLPMQQPRKIKQKPTTGLLAITLALHLCDLVHIAGFGYPDAYNKKQTIHYYEQITLKSMAGSGHNVSQEALAIKRMLEMGAIKNLTSF

SEQ ID NO: 12975 - protein, 299 aa, Homo sapiens
MEPPIPQSAPLTPNSVMVQPLLDSRMSHSRLQHPLTILPIDQVKTSHVENDYIDNPSLALTTGPKRTRGGAPELAPTPARCDQDVTHHWISFSGRPSSVSSSSSTSSDQRLLDHMAPPPVADQASPRAVRIQPKVVHCQPLDLKGPAVPPELDKHFLLCEACGKCKCKECASPRTLPSCWVCNQECLCSAQTLVNYGTCMCLVQGIFYHCTNEDDEGSCADHPCSCSRSNCCARWSFMGALSVVLPCLLCYLPATGCVKLAQRGYDRLRRPGCRCKHTNSVICKAASGDAKTSRPDKPF

SEQ ID NO: 12976 - protein, 61 aa, Homo sapiens
MLKALFLTMLTLALVKSQDTEETITYTQCTDGYEWDPVRQQCKDIDECDIVPDACKGGMKC

SEQ ID NO: 12977 - protein, 178 aa, Homo sapiens
MSSNECFKCGRSGHWARECPTGGGRGRGMRSRGRGGFTSDRGFQFVSSSLPDICYRCGESGHLAKDCDLQEDEACYNCGRGGHIAKDCKEPKREREQCCYNCGKPGHLARDCDHADEQKCYSCGEFGHIQKDCTKVKCYRCGETGHVAINCSKTSEVNCYRCGESGHLARECTIEATA

SEQ ID NO: 12978 - protein, 174 aa, Homo sapiens
MRLLAFLSLLALVLQETGTASLPRKERKRREEQMPREGDSFEVLPLRNDVLNPDNYGEVIDLSNYEELTDYGDQLPEVKVTSLAPATSISPAKSTTAPGTPSSNPTMTRPTTAGLLLSSQPNHEDIPPLPRRTAYLYARFNRISRIRAEDFKGLTKLKRIDLSNNLISSIDNDA

SEQ ID NO: 12979 - protein, 166 aa, Homo sapiens
MAGLTAAAPRPGVLLLLLSILHPSRPGGVPGAIPGGVPGGVFYPGAGLGALGGGALGPGGKPLKPVPGGLAGAGLGAGLGAFPAVTFPGALVPGGVADAAAAYKAAKAGVGPFGGPQPGVPLGYPIKAPKLPGGYGLPYTTGKLPYGYGPGGVAGAAGKAGYPTGT

SEQ ID NO: 12980 - protein, 4302 aa, Homo sapiens
MPPAAPARLALALGLGLWLGALAGGPGRGCGPCEPPCLCGPAPGAACRVNCSGRGLRTLGPALRIPADATALDVSHNLLRALDVGLLANLSALAELDISNNKISTLEEGIFANLFNLSEINLSGNPFECDCGLAWLPRWAEEQQVRVVQPEAATCAGPGSLAGQPLLGIPLLDSGCGEEYVACLPDNSSGTVAAVSFSAAHEGLLQPEACSAFCFSTGQGLAALSEQGWCLCGAAQPSSASFACLSLCSGPPPPPAPTCRGPTLLQHVFPASPGATLVGPHGPLASGQLAAFHIAAPLPVTATRWDFGDGSAEVDAAGPAASHRYVLPGRYHVTAVLALGAGSALLGTDVQVEAAPAALELVCPSSVQSDESLDLSIQNRGGSGLEAAYSIVALGEEPARAVHPLCPSDTEIFPGNGHCYRLVVEKAAWLQAQEQCQAWAGAALAMVDSPAVQRFLVSRVTRSLDVWIGFSTVQGVEVGPAPQGEAFSLESCQNWLPGEPHPATAEHCVRLGPTGWCNTDLCSAPHSYVCELQPGGPVQDAENLLVGAPSGDLQGPLTPLAQQDGLSAPHEPVEVMVFPGLRLSREAFLTTAEFGTQELRRPAQLRLQVYRLLSTAGTPENGSEPESRSPDNRTQLAPACMPGGRWCPGANICLPLDASCHPQACANGCTSGPGLPGAPYALWREFLFSVPAGPPAQYSVTLHGQDVLMLPGDLVGLQHDAGPGALLHCSPAPGHPGPRAPYLSANASSWLPHLPAQLEGTWACPACALRLLAATEQLTVLLGLRPNPGLRLPGRYEVRAEVGNGVSRHNLSCSFDVVSPVAGLRVIYPAPRDGRLYVPTNGSALVLQVDSGANATATARWPGGSVSARFENVCPALVATFVPGCPWETNDTLFSVVALPWLSEGEHVVDVVVENSASRANLSLRVTAEEPICGLRATPSPEARVLQGVLVRYSPVVEAGSDMVFRWTINDKQSLTFQNVVFNVIYQSAAVFKLSLTASNHVSNVTVNYNVTVERMNRMQGLQVSTVPAVLSPNATLALTAGVLVDSAVEVAFLWTFGDGEQALHQFQPPYNESFPVPDPSVAQVLVEHNVMHTYAAPGEYLLTVLASNAFENLTQQVPVSVRASLPSVAVGVSDGVLVAGRPVTFYPHPLPSPGGVLYTWDFGDGSPVLTQSQPAANHTYASRGTYHVRLEVNNTVSGAAAQADVRVFEELRGLSVDMSLAVEQGAPVVVSAAVQTGDNITWTFDMGDGTVLSGPEATVEHVYLRAQNCTVTVGAASPAGHLARSLHVLVFVLEVLRVEPAACIPTQPDARLTAYVTGNPAHYLFDWTFGDGSSNTTVRGCPTVTHNFTRSGTFPLALVLSSRVNRAHYFTSICVEPEVGNVTLQPERQFVQLGDEAWLVACAWPPFPYRYTWDFGTEEAAPTRARGPEVTFIYRDPGSYLVTVTASNNISAANDSALVEVQEPVLVTSIKVNGSLGLELQQPYLFSAVGRGRPASYLWDLGDGGWLEGPEVTHAYNSTGDFTVRVAGWNEVSRSEAWLNVTVKRRVRGLVVNASRTVVPLNGSVSFSTSLEAGSDVRYSWVLCDRCTPIPGGPTISYTFRSVGTFNIIVTAENEVGSAQDSIFVYVLQLIEGLQVVGGGRYFPTNHTVQLQAVVRDGTNVSYSWTAWRDRGPALAGSGKGFSLTVLEAGTYHVQLRATNMLGSAWADCTMDFVEPVGWLMVAASPNPAAVNTSVTLSAELAGGSGVVYTWSLEEGLSWETSEPFTTHSFPTPGLHLVTMTAGNPLGSANATVEVDVQVPVSGLSIRASEPGGSFVAAGSSVPFWGQLATGTNVSWCWAVPGGSSKRGPHVTMVFPDAGTFSIRLNASNAVSWVSATYNLTAEEPIVGLVLWASSKVVAPGQLVHFQILLAAGSAVTFRLQVGGANPEVLPGPRFSHSFPRVGDHVVSVRGKNHVSWAQAQVRIVVLEAVSGLQVPNCCEPGIATGTERNFTARVQRGSRVAYAWYFSLQKVQGDSLVILSGRDVTYTPVAAGLLEIQVRAFNALGSENRTLVLEVQDAVQYVALQSGPCFTNRSAQFEAATSPSPRRVAYHWDFGDGSPGQDTDEPRAEHSYLRPGDYRVQVNASNLVSFFVAQATVTVQVLACREPEVDVVLPLQVLMRRSQRNYLEAHVDLRDCVTYQTEYRWEVYRTASCQRPGRPARVALPGVDVSRPRLVLPRLALPVGHYCFVFVVSFGDTPLTQSIQANVTVAPERLVPIIEGGSYRVWSDTRDLVLDGSESYDPNLEDGDQTPLSFHWACVASTQREAGGCALNFGPRGSSTVTIPRERLAAGVEYTFSLTVWKAGRKEEATNQTVLIRSGRVPIVSLECVSCKAQAVYEVSRSSYVYLEGRCLNCSSGSKRGRWAARTFSNKTLVLDETTTSTGSAGMRLVLRRGVLRDGEGYTFTLTVLGRSGEEEGCASIRLSPNRPPLGGSCRLFPLGAVHALTTKVHFECTGWHDAEDAGAPLVYALLLRRCRQGHCEEFCVYKGSLSSYGAVLPPGFRPHFEVGLAVVVQDQLGAAVVALNRSLAITLPEPNGSATGLTVWLHGLTASVLPGLLRQADPQHVIEYSLALVTVLNEYERALDVAAEPKHERQHRAQIRKNITETLVSLRVHTVDDIQQIAAALAQCMGPSRELVCRSCLKQTLHKLEAMMLILQAETTAGTVTPTAIGDSILNITGDLIHLASSDVRAPQPSELGAESPSRMVASQAYNLTSALMRILMRSRVLNEEPLTLAGEEIVAQGKRSDPRSLLCYGGAPGPGCHFSIPEAFSGALANLSDVVQLIFLVDSNPFPFGYISNYTVSTKVASMAFQTQAGAQIPIERLASERAITVKVPNNSDWAARGHRSSANSANSVVVQPQASVGAVVTLDSSNPAAGLHLQLNYTLLDGHYLSEEPEPYLAVYLHSEPRPNEHNCSASRRIRPESLQGADHRPYTFFISPGSRDPAGSYHLNLSSHFRWSALQVSVGLYTSLCQYFSEEDMVWRTEGLLPLEETSPRQAVCLTRHLTAFGASLFVPPSHVRFVFPEPTADVNYIVMLTCAVCLVTYMVMAAILHKLDQLDASRGRAIPFCGQRGRFKYEILVKTGWGRGSGTTAHVGIMLYGVDSRSGHRHLDGDRAFHRNSLDIFRIATPHSLGSVWKIRVWHDNKGLSPAWFLQHVIVRDLQTARSAFFLVNDWLSVETEANGGLVEKEVLAASDAALLRFRRLLVAELQRGFFDKHIWLSIWDRPPRSRFTRIQRATCCVLLICLFLGANAVWYGAVGDSAYSTGHVSRLSPLSVDTVAVGLVSSVVVYPVYLAILFLFRMSRSKVAGSPSPTPAGQQVLDIDSCLDSSVLDSSFLTFSGLHAEAFVGQMKSDLFLDDSKSLVCWPSGEGTLSWPDLLSDPSIVGSNLRQLARGQAGHGLGPEEDGFSLASPYSPAKSFSASDEDLIQQVLAEGVSSPAPTQDTHMETDLLSSLSSTPGEKTETLALQRLGELGPPSPGLNWEQPQAARLSRTGLVEGLRKRLLPAWCASLAHGLSLLLVAVAVAVSGWVGASFPPGVSVAWLLSSSASFLASFLGWEPLKVLLEALYFSLVAKRLHPDEDDTLVESPAVTPVSARVPRVRPPHGFALFLAKEEARKVKRLHGMLRSLLVYMLFLLVTLLASYGDASCHGHAYRLQSAIKQELHSRAFLAITRSEELWPWMAHVLLPYVHGNQSSPELGPPRLRQVRLQEALYPDPPGPRVHTCSAAGGFSTSDYDVGWESPHNGSGTWAYSAPDLLGAWSWGSCAVYDSGGYVQELGLSLEESRDRLRFLQLHNWLDNRSRAVFLELTRYSPAVGLHAAVTLRLEFPAAGRALAALSVRPFALRRLSAGLSLPLLTSVCLLLFAVHFAVAEARTWHREGRWRVLRLGAWARWLLVALTAATALVRLAQLGAADRQWTRFVRGRPRRFTSFDQVAQLSSAARGLAASLLFLLLVKAAQQLRFVRQWSVFGKTLCRALPELLGVTLGLVVLGVAYAQLAILLVSSCVDSLWSVAQALLVLCPGTGLSTLCPAESWHLSPLLCVGLWALRLWGALRLGAVILRWRYHALRGELYRPAWEPQDYEMVELFLRRLRLWMGLSKVKEFRHKVRFEGMEPLPSRSSRGSKVSPDVPPPSAGSDASHPSTSSSQLDGLSVSLGRLGTRCEPEPSRLQAVFEALLTQFDRLNQATEDVYQLEQQLHSLQGRRSSRAPAGSSRGPSPGLRPALPSRLARASRGVDLATGPSRTPLRAKNKVHPSST

SEQ ID NO: 12981 - protein, 2267 aa, Homo sapiens
MLRGPGPGLLLLAVQCLGTAVPSTGASKSKRQAQQMVQPQSPVAVSQSKPGCYDNGKHYQINQQWERTYLGNALVCTCYGGSRGFNCESKPEAEETCFDKYTGNTYRVGDTYERPKDSMIWDCTCIGAGRGRISCTIANRCHEGGQSYKIGDTWRRPHETGGYMLECVCLGNGKGEWTCKPIAEKCFDHAAGTSYVVGETWEKPYQGWMMVDCTCLGEGSGRITCTSRNRCNDQDTRTSYRIGDTWSKKDNRGNLLQCICTGNGRGEWKCERHTSVQTTSSGSGPFTDVRAAVYQPQPHPQPPPYGHCVTDSGVVYSVGMQWLKTQGNKQMLCTCLGNGVSCQETAVTQTYGGNSNGEPCVLPFTYNGRTFYSCTTEGRQDGHLWCSTTSNYEQDQKYSFCTDHTVLVQTRGGNSNGALCHFPFLYNNHNYTDCTSEGRRDNMKWCGTTQNYDADQKFGFCPMAAHEEICTTNEGVMYRIGDQWDKQHDMGHMMRCTCVGNGRGEWTCIAYSQLRDQCIVDDITYNVNDTFHKRHEEGHMLNCTCFGQGRGRWKCDPVDQCQDSETGTFYQIGDSWEKYVHGVRYQCYCYGRGIGEWHCQPLQTYPSSSGPVEVFITETPSQPNSHPIQWNAPQPSHISKYILRWRPKNSVGRWKEATIPGHLNSYTIKGLKPGVVYEGQLISIQQYGHQEVTRFDFTTTSTSTPVTSNTVTGETTPFSPLVATSESVTEITASSFVVSWVSASDTVSGFRVEYELSEEGDEPQYLDLPSTATSVNIPDLLPGRKYIVNVYQISEDGEQSLILSTSQTTAPDAPPDTTVDQVDDTSIVVRWSRPQAPITGYRIVYSPSVEGSSTELNLPETANSVTLSDLQPGVQYNITIYAVEENQESTPVVIQQETTGTPRSDTVPSPRDLQFVEVTDVKVTIMWTPPESAVTGYRVDVIPVNLPGEHGQRLPISRNTFAEVTGLSPGVTYYFKVFAVSHGRESKPLTAQQTTKLDAPTNLQFVNETDSTVLVRWTPPRAQITGYRLTVGLTRRGQPRQYNVGPSVSKYPLRNLQPASEYTVSLVAIKGNQESPKATGVFTTLQPGSSIPPYNTEVTETTIVITWTPAPRIGFKLGVRPSQGGEAPREVTSDSGSIVVSGLTPGVEYVYTIQVLRDGQERDAPIVNKVVTPLSPPTNLHLEANPDTGVLTVSWERSTTPDITGYRITTTPTNGQQGNSLEEVVHADQSSCTFDNLSPGLEYNVSVYTVKDDKESVPISDTIIPEVPQLTDLSFVDITDSSIGLRWTPLNSSTIIGYRITVVAAGEGIPIFEDFVDSSVGYYTVTGLEPGIDYDISVITLINGGESAPTTLTQQTAVPPPTDLRFTNIGPDTMRVTWAPPPSIDLTNFLVRYSPVKNEEDVAELSISPSDNAVVLTNLLPGTEYVVSVSSVYEQHESTPLRGRQKTGLDSPTGIDFSDITANSFTVHWIAPRATITGYRIRHHPEHFSGRPREDRVPHSRNSITLTNLTPGTEYVVSIVALNGREESPLLIGQQSTVSDVPRDLEVVAATPTSLLISWDAPAVTVRYYRITYGETGGNSPVQEFTVPGSKSTATISGLKPGVDYTITVYAVTGRGDSPASSKPISINYRTEIDKPSQMQVTDVQDNSISVKWLPSSSPVTGYRVTTTPKNGPGPTKTKTAGPDQTEMTIEGLQPTVEYVVSVYAQNPSGESQPLVQTAVTTIPAPTDLKFTQVTPTSLSAQWTPPNVQLTGYRVRVTPKEKTGPMKEINLAPDSSSVVVSGLMVATKYEVSVYALKDTLTSRPAQGVVTTLENVSPPRRARVTDATETTITISWRTKTETITGFQVDAVPANGQTPIQRTIKPDVRSYTITGLQPGTDYKIYLYTLNDNARSSPVVIDASTAIDAPSNLRFLATTPNSLLVSWQPPRARITGYIIKYEKPGSPPREVVPRPRPGVTEATITGLEPGTEYTIYVIALKNNQKSEPLIGRKKTGQEALSQTTISWAPFQDTSEYIISCHPVGTDEEPLQFRVPGTSTSATLTGLTRGATYNVIVEALKDQQRHKVREEVVTVGNSVNEGLNQPTDDSCFDPYTVSHYAVGDEWERMSESGFKLLCQCLGFGSGHFRCDSSRWCHDNGVNYKIGEKWDRQGENGQMMSCTCLGNGKGEFKCDPHEATCYDDGKTYHVGEQWQKEYLGAICSCTCFGGQRGWRCDNCRRPGGEPSPEGTTGQSYNQYSQRYHQRTNTNVNCPIECFMPLDVQADREDSRE

SEQ ID NO: 12982 - protein, 499 aa, Homo sapiens
MELSEPIVENGETEMSPEESWEHKEEISEAEPGGGSLGDGRPPEESAHEMMEEEEEIPKPKSVVAPPGAPKKEHVNVVFIGHVDAGKSTIGGQIMYLTGMVDKRTLEKYEREAKEKNRETWYLSWALDTNQEERDKGKTVEVGRAYFETEKKHFTILDAPGHKSFVPNMIGGASQADLAVLVISARKGEFETGFEKGGQTREHAMLAKTAGVKHLIVLINKMDDPTVNWSNERYEECKEKLVPFLKKVGFNPKKDIHFMPCSGLTGANLKEQSDFCPWYIGLPFIPYLDNLPNFNRSVDGPIRLPIVDKYKDMGTVVLGKLESGSICKGQQLVMMPNKHNVEVLGILSDDVETDTVAPGENLKIRLKGIEEEEILPGFILCDPNNLCHSGRTFDAQIVIIEHKSIICPGYNAVLHIHTCIEEVEITALICLVDKKSGEKSKTRPRFVKQDQVCIARLRTAGTICLETFKDFPQMGRFTLRDEGKTIAIGKVLKLVPEKD

SEQ ID NO: 12983 - protein, 282 aa, Homo sapiens
MEAAVKEEISLEDEAVDKNIFRDCNKIAFYRRQKQWLSKKSTYQALLDSVTTDEDSTRFQIINEASKVRCQDQSPTTLDAFKGKETTVQEETQDLSTRQHLAQKEAEEPDKQGQITWDISNVAPKTENFEDLLEQTPCSACLQGFTRDNTSSSFSEDAGISLSTSVKLPLASSSKPNENEALPNQPPSQQIRHNYRLLASTVSAEMARNRQLIWELARQSEAHLDRPVVLGEQASAQREVASILCRKSVLAINQLAATVEGTISVLQQFNELLDHPLDPGRS

SEQ ID NO: 12984 - protein, 163 aa, Homo sapiens
MMPGQIPDPSVTTGSLPGLGPLTGLPSSALTVEELKYADIRNLGAMIAPLHFLEVKLGKRPQPVKSELDEEEERRKRRREKNKVAAARCRNKKKERTEFLQRESERLELMNAELKTQIEELKQERQQLILMLNRHRPTCIVRTDSVKTPESEGNPLLEQLEKK

SEQ ID NO: 12985 - protein, 829 aa, Homo sapiens
MFALGLPFLVLLVASVESHLGVLGPKNVSQKDAEFERTYVDEVNSELVNIYTFNHTVTRNRTEGVRVSVNVLNKQKGAPLLFVVRQKEAVVSFQVPLILRGMFQRKYLYQKVERTLCQPPTKNESEIQFFYVDVSTLSPVNTTYQLRVSRMDDFVLRTGEQFSFNTTAAQPQYFKYEFPEGVDSVIVKVTSNKAFPCSVISIQDVLCPVYDLDNNVAFIGMYQTMTKKAAITVQRKDFPSNSFYVVVVVKTEDQACGGSLPFYPFAEDEPVDQGHRQKTLSVLVSQAVTSEAYVSGMLFCLGIFLSFYLLTVLLACWENWRQKKKTLLVAIDRACPESASLLGHPRVLADSFPGSSPYEGYNYGSFENVSGSTDGLVDSAGTGDLSYGYQGTRPRVDSMSSVEEDDYDTLTDIDSDKNVIRTKQYLYVADLARKDKRVLRKKYQIYFWNIATIAVFYALPVVQLVITYQTVVNVTGNQDICYYNFLCAHPLGNLSAFNNILSNLGYILLGLLFLLIILQREINHNRALLRNDLCALECGIPKHFGLFYAMGTALMMEGLLSACYHVCPNYTNFQFDTSFMYMIAGLCMLKLYQKRHPDINASAYSAYACLAIVIFFSVLGVVFGKGNTAFWIVFSIIHIIATLLLSTQLYYMGRWKLDSGIFRRILHVLYTDCIRQCSGPLYVDRMVLLVMGNVINWSLAAYGLIMRPNDFASYLLAIGICNLLLYFAFYIIMKLRSGERIKLIPLLCIVCTSVVWGFALFFFFQGLSTWQKTPAESREHNRDCILLDFFDDHDIWHFLSSIAMFGSFLVLLTLDDDLDTVQRDKIYVF

SEQ ID NO: 12986 - protein, 41 aa, Homo sapiens
MVGKLKQNLLLACLVISSVTVFYLGQHAMECHHRIEERSQP

SEQ ID NO: 12987 - protein, 86 aa, Homo sapiens
MNWHLPLFLLASVTLPSICSHFNPLSLEELGSNTGIQVFNQIVKSRPHDNIVISPHGIASVLGMLQLGADGRTKKQLAMVMRYGVN

SEQ ID NO: 12988 - protein, 194 aa, Homo sapiens
MNGRADFREPNAEVPRPIPHIGPDYIPTEEERRVFAECNDESFWFRSVPLAATSMLITQGLISKGILSSHPKYGSIPKLILACIMGYFAGKLSYVKTCQEKFKKLENSPLGEALRSGQARRSSPPGHYYQKSKYDSSVSGQSSFVTSPAADNIEMLPHYEPIPFSSSMNESAPTGITDHIVQVKVNKYGDTWDE

SEQ ID NO: 12989 - protein, 121 aa, Homo sapiens
MRAGPGPTVTLALVLAVSWAMELKPTAPPIFTGRPFVVAWDVPTQDCGPRLKVPLDLNAFDVQASPNEGFVNQNITIFYRDRLGLYPRFDSAGRSVHGGVPQNVSLWAHRKMLQKRVEHYI

SEQ ID NO: 12990 - protein, 1404 aa, Homo sapiens
MAWKTLPIYLLLLLSVFVIQQVSSQDLSSCAGRCGEGYSRDATCNCDYNCQHYMECCPDFKRVCTAELSCKGRCFESFERGRECDCDAQCKKYDKCCPDYESFCAEVHNPTSPPSSKKAPPPSGASQTIKSTTKRSPKPPNKKKTKKVIESEEITEEHSVSENQESSSSSSSSSSSSTIRKIKSSKNSAANRELQKKLKVKDNKKNRTKKKPTPKPPVVDEAGSGLDNGDFKVTTPDTSTTQHNKVSTSPKITTAKPINPRPSLPPNSDTSKETSLTVNKETTVETKETTTTNKQTSTDGKEKTTSAKETQSIEKTSAKDLAPTSKVLAKPTPKAETTTKGPALTTPKEPTPTTPKEPASTTPKEPTPTTIKSAPTTPKEPAPTTTKSAPTTPKEPAPTTTKEPAPTTPKEPAPTTTKEPAPTTTKSAPTTPKEPAPTTPKKPAPTTPKEPAPTTPKEPTPTTPKEPAPTTKEPAPTTPKEPAPTAPKKPAPTTPKEPAPTTPKEPAPTTTKEPSPTTPKEPAPTTTKSAPTTTKEPAPTTTKSAPTTPKEPSPTTTKEPAPTTPKEPAPTTPKKPAPTTPKEPAPTTPKEPAPTTTKKPAPTTPKEPAPTTPKETAPTTPKKLTPTTPEKLAPTTPEKPAPTTPEELAPTTPEEPTPTTPEEPAPTTPKAAAPNTPKEPAPTTPKEPAPTTPKEPAPTTPKETAPTTPKGTAPTTLKEPAPTTPKKPAPKELAPTTTKEPTSTTSDKPAPTTPKGTAPTTPKEPAPTTPKEPAPTTPKGTAPTTLKEPAPTTPKKPAPKELAPTTTKGPTSTTSDKPAPTTPKETAPTTPKEPAPTTPKKPAPTTPETPPPTTSEVSTPTTTKEPTTIHKSPDESTPELSAEPTPKALENSPKEPGVPTTKTPAATKPEMTTTAKDKTTERDLRTTPETTTAAPKMTKETATTTEKTTESKITATTTQVTSTTTQDTTPFKITTLKTTTLAPKVTTTKKTITTTEIMNKPEETAKPKDRATNSKATTPKPQKPTKAPKKPTSTKKPKTMPRVRKPKTTPTPRKMTSTMPELNPTSRIAEAMLQTTTRPNQTPNSKLVEVNPKSEDAGGAEGETPHMLLRPHVFMPEVTPDMDYLPRVPNQGIIINPMLSDETNICNGKPVDGLTTLRNGTLVAFRGHYFWMLSPFSPPSPARRITEVWGIPSPIDTVFTRCNCEGKTFFFKDSQYWRFTNDIKDAGYPKPIFKGFGGLTGQIVAALSTAKYKNWPESVYFFKRGGSIQQYIYKQEPVQKCPGRRPALNYPVYGETTQVRRRRFERAIGPSQTHTIRIQYSPARLAYQDKGVLHNEVKVSILWRGLPNVVTSAISLPNIRKPDGYDYYAFSKDQYYNIDVPSRTARAITTRSGQTLSKVWYNCP

SEQ ID NO: 12991 - protein, 107 aa, Homo sapiens
MLPCLALLLLMELSVCTVAGDGGEEQTLSTEAETWEGAGPSIQLQLQEVKTGKASQFFGLMGKRVGGRPLIQPRRKKAYQLEHTFQGLLGKRSLFTEGREDEAQGSE

SEQ ID NO: 12992 - protein, 148 aa, Homo sapiens
MKRCETPEILHHQIKCCGDLIVLKTNTVTAQVTVRPKMCILTELERGMVGPVTLHKKIHTTTVLFIVQIHILLIQAITQAKLQMHLMILQMTGLSILALLGKSTTTIVEQKFHNGKNQKSGLKENRDKKKQTRWQSTASQKIGITEER

SEQ ID NO: 12993 - protein, 44 aa, Homo sapiens
MSPHPTALLGLVLCLAQTIHTQEVDAEILLCFPPRRSAQTLHLG

SEQ ID NO: 12994 - protein, 344 aa, Homo sapiens
MAAATELNRPSSGDRNLERRCRPNLSREVLYEIFRSLHTLVGQLDLRDDVVKITIDWNKLQSLSAFQPALLFSALEQHILYLQPFLAKLQSPIKEENTTAVEEIGRTEMGNKNEVNDKFSIGDLQEEEKHKESDLRDVKKTQIHFDPEVVQIKAGKAEIDRRISAFIERKQAEINENNVREFCNVIDCNQENSCARTDAIFTPYPGFKSHVKVSRVVNTYGPQTRPEGIPGSGHKPNSMLRDCGNQAVEERLQNIEAHLRLQTGGPVPRDIYQRIKKLEDKILELEGISPEYFQSVSFSGKRRKVQPPQQNYSLAELDEKISALKQALLRKSREAESMATHHLP

SEQ ID NO: 12995 - protein, 434 aa, Homo sapiens
MRPPQCLLHTPSLASPLLLLLLWLLGGGVGAEGREDAELLVTVRGGRLRGIRLKTPGGPVSAFLGIPFAEPPMGPRRFLPPEPKQPWSGVVDATTFQSVCYQYVDTLYPGFEGTEMWNPNRELSEDCLYLNVWTPYPRPTSPTPVLVWIYGGGFYSGASSLDVYDGRFLVQAERTVLVSMNYRVGAFGFLALPGSREAPGNVGLLDQRLALQWVQENVAAFGGDPTSVTLFGESAGAASVGMHLLSPPSRGLFHRAVLQSGAPNGPWATVGMGEARRRATQLAHLVGCPPGGTGGNDTELVACLRTRPAQVLVNHEWHVLPQESVFRFSFVPVVDGDFLSDTPEALINAGDFHGLQVLVGVVKDEGSYFLVYGAPGFSKDNESLISRAEFLAGTRSTRRSASGRPSSTAGAPTWCTGRTSSTTTASRIAAQTCD

SEQ ID NO: 12996 - protein, 457 aa, Homo sapiens
MRKKWKMGGMKYIFSLLFFLLLEGGKTEQVKHSETYCMFQDKKYRVGERWHPYLEPYGLVYCVNCICSENGNVLCSRVRCPNVHCLSPVHIPHLCCPRCPDSLPPVNNKVTSKSCEYNGTTYQHGELFVAEGLFQNRQPNQCTQCSCSEGNVYCGLKTCPKLTCAFPVSVPDSCCRVCRGDGELSWEHSDGDIFRQPANREARHSYHRSHYDPPPSRQAGGLSRFPGARSHRGALMDSQQASGTIVQIVINNKHKHGQVCVSNGKTYSHGESWHPNLRAFGIVECVLCTCNVTKQECKKIHCPNRYPCKYPQKIDGKCCKVCPGKKAKEELPGQSFDNKGYFCGEETMPVYESVFMEDGETTRKIALETERPPQVEVHVWTIRKGILQHFHIEKISKRMFEELPHFKLVTRTTLSQWKIFTEGEAQISQMCSSRVCRTELEDLVKVLYLERSEKGHC

SEQ ID NO: 12997 - protein, 1400 aa, Homo sapiens
MAARRGRRDGVAPPPSGGPGPDPGGGARGSGWGSRSQAPYGTLGAVSGGEQVLLHEEAGDSGFVSLSRLGPSLRDKDLEMEELMLQDETLLGTMQSYMDASLISLIEDFGSLGESRLSLEDQNEVSLLTALTEILDNADSENLSPFDSIPDSELLVSPREGSSLHKLLTLSRTPPERDLITPVDPLGPSTGSSRGSGVEMSLPDPSWDFSPPSFLETSSPKLPSWRPPRSRPRWGQSPPPQQRSDGEEEEEVASFSGQILAGELDNCVSSIPDFPMHLACPEEEDKATAAEMAVPAAGDESISSLSELVRAMHPYCLPNLTHLASLEDELQEQPDDLTLPEGCVVLEIVGQAATAGDDLEIPVVVRQVSPGPRPVLLDDSLETSSALQLLMPTLESETEAAVPKVTLCSEKEGLSLNSEEKLDSACLLKPREVVEPVVPKEPQNPPANAAPGSQRARKGRKKKSKEQPAACVEGYARRLRSSSRGQSTVGTEVTSQVDNLQKQPQEELQKESGPLQGKGKPRAWARAWAAALENSSPKNLERSAGQSSPAKEGPLDLYPKLADTIQTNPIPTHLSLVDSAQASPMPVDSVEADPTAVGPVLAGPVPVDPGLVDLASTSSELVEPLPAEPVLINPVLADSAAVDPAVVPISDNLPPVDAVPSGPAPVDLALVDPVPNDLTPVDPVLVKSRPTDPRRGAVSSALGGSAPQLLVESESLDPPKTIIPEVKEVVDSLKIESGTSATTHEARPRPLSLSEYRRRRQQRQAETEERSPQPPTGKWPSLPETPTGLADIPCLVIPPAPAKKTALQRSPETPLEICLVPVGPSPASPSPEPPVSKPVASSPTEQVPSQEMPLLARPSPPVQSVSPAVPTPPSMSAALPFPAGGLGMPPSLPPPPLQPPSLPLSMGPVLPDPFTHYAPLPSWPCYPHVSPSGYPCLPPPPTVPLVSGTPGAYAVPPTCSVPWAPPPAPVSPYSSTCTYGPLGWGPGPQHAPFWSTVPPPPLPPASIGRAVPQPKMESRGTPAGPPENVLPLSMAPPLSLGLPGHGAPQTEPTKVEVKPVPASPHPKHKVSALVQSPQMKALACVSAEGVTVEEPASERLKPETQETRPREKPPLPATKAVPTPRQSTVPKLPAVHPARLRKLSFLPTPRTQGSEDVVQAFISEIGIEASDLSSLLEQFEKSEAKKECPPPAPADSLAVGNSGSSCSSSGRSRRCSSSSSSSSSSSSSSSSSSSSRSRSRSPSPRRRSDRRRRYSSYRSHDHYQRQRVLQKERAIEERRVVFIGKIPGRMTRSELKQRFSVFGEIEECTIHFRVQGDNYGFVTYRYAEEAFAAIESGHKLRQADEQPFDLCFGGRRQFCKRSYSDLDSNREDFDPAPVKSKFDSLDFDTLLKQAQKNLRR

SEQ ID NO: 12998 - protein, 175 aa, Homo sapiens
MGGPRAWALLCLGLLLPGGGAAWSIGAAPFSGRRNWCSYVVTRTISCHVQNGTYLQRVLQNCPWPMSCPGSSYRTVVRPTYKVMYKIVTAREWRCCPGHSGVSCEEGCLNCSKVSELTERLKVLEAKMTMLTVIEQPVPPTPATPEDPAPLWGPPPAQGSPGDGGLQDQVGAWGL

SEQ ID NO: 12999 - protein, 506 aa, Homo sapiens
MAETPPPPTAGAESCSEEPARGGEWRPEEPRRAPAGGTDREGEAGPPPASPAGQSEPDSPVAAPFFLLYPGDGGAGFGVRPPPQQQRSWRTPPSPGSPLPFLLLSYPSGGGGSSGSGKHHPNYLMANERMNLMNMAKLSIKGLIESALNLGRTLDSDYAPLQQFFVVMEHCLKHGLKAKKTFLGQNKSFWGPLELVEKLVPEAAEITASVKDLPGLKTPVGRGRAWLRLALMQKKLSEYMKALINKKELLSEFYEPNALMMEEEGAIIAGLLVGLNVIDANFCMKGEDLDSQVGVIDFSMYLKDGNSSKGTEGDGQITAILDQKNYVEELNRHLNATVNNLQAKVDALEKSNTKLTEELAVANNRIITLQEEMERVKEESSYILESNRKGPKQDRTAEGQALSEARKHLKEETQLRLDVEKELEMQISMRQEMELAMKMLEKDVCEKQDALVSLRQQLDDLRALKHELAFKLQSSDLGVKQKSELNSRLEEKTNQMAATIKQLEQR

SEQ ID NO: 13000 - protein, 172 aa, Homo sapiens
MKATIILLLLAQVSWAGPFQQRGLFDFMLEDEASGIGPEVPDDRDFEPSLGPVCPFRCQCHLRVVQCSDLGLDKVPKDLPPDTTLLDLQNNKITEIKDGDFKNLKNLHVVYLHNNNISVVGSSDFCPPGHNTKKASYSGVSLFSNPVQYWEIQPSTFRCVYVRSAIQLGNYK

SEQ ID NO: 13001 - protein, 118 aa, Homo sapiens
MEFGLSWVFLVAILKGVQCEVQLVESGGVVVQPGGSLRLSCAASGFTFDDYTMHWVRQAPGKGLEWVSLISWDGGSTYYADSVKGRFTISRDNSKNSLYLQMNSLRTEDTALYYCAKD

SEQ ID NO: 13002 - protein, 226 aa, Homo sapiens; identical to SEQ ID NO: 12364

SEQ ID NO: 13003 - protein, 184 aa, Homo sapiens
MEGERKNNNKRWYFTREQLENSPSRRFGVDPDKELSYRQQAANLLQDMGQRLNVSQLTINTAIVYMHRFYMIQSFTQFPGNSVAPAALFLAAKVEEQPKKLEHVIKVAHTCLHPQESLPDTRSEAYLQQVQDLVILESIILQTLGFELTIDHPHTHVVKCTQLVRASKDLAQTSYFMATNRTDT

SEQ ID NO: 13004 - protein, 927 aa, Homo sapiens
MADAEPEAGGGSEDGGGGGGPAPPGQSGSVARVAPLGPEQLRQVLEQVTKAQPPPPPPPFVLRDAARRLRDAAQQAALQRGRGTEPPRLPRLLPPQQLEAICVKVTSGETKGQERPMLLPTTIQPQTARKSQLPRGNSCLVGLHIASPQLLRVQPLVRTEPQSCFLSDLCQPPAQGFVQRPLPALQVVPAKRVPAPKAPDEQGSMLTPLSASDPLAVTSLSSSSAHPFISNLHTRHTEKLKKSLKVKTRSGRVSRPPKYKAKDYKFIKTEDLADGHLSDSDDYSELCVEEDEDQRERHALFDLSSCSLRPKSFKCQTCEKSYIGKGGLARHFKLNPGHGQLDPEMVLSEKASGSTLRGCTEERTLSLTSLGLSMPADPCEGGARSCLVTESARGGLQNGQSVDVEETLPSEPENGALLRSERYQGPRRRACSETLAESRTAVLQQRRAAQLPGGPAAAGEQRASPSKARLKEFLQQCDREDLVELALPQLAQVVTVYEFLLMKVEKDHLAKPFFPAIYKEFEELHKMVKKMCQDYLSSSGLCSQETLEINNDKVAESLGITEFLRKKEIHPDNLGPKHLSRDMDGEQLEGASSEKREREAAEEGLASVKRPRREALSNDTTESLAANSRGREKPRPLHALAAGFSPPVNVTVSPRSEESHTTTVSGGNGSVFQAGPQLQALANLEARRGSIGAALSSRDVSGLPVYAQSGEPRRLTQAQVAAFPGENALEHSSDQDTWDSLRSPGFCSPLSSGGGAESLPPGGPGHAEAGHLGKVCDFHLNHQQPSPTSVLPTEVAAPPLEKILSVDSVAVDCAYRTVPKPGPQPGPHGSLLTEGCLRSLSGDLNRFPCGMEVHSGQRELESVVAVGEAMAFEISNGSHELLSQGQKQIFIQTSDGLILSPPGTIVSQEEDIVTVTDAEGRACGWAR

SEQ ID NO: 13005 - protein, 69 aa, Homo sapiens
VFGVLWITVLLFFWVTKRKLEVPTGPEVQTPKVWSLFFKVAGMSPWAPQVPVSPTPPYQRGHLPTAFGR

SEQ ID NO: 13006 - protein, 100 aa, Homo sapiens
MWCIVLFSLLAWVYAEPTMYGEILSPNYPQAYPSEVEKSWDIEVPEGYGIHLYFTHLDIELSENCAYDSVQIISGDTEEGRLCGQRSSNNPHSPIVEEFQ

SEQ ID NO: 13007 - protein, 2694 aa, Homo sapiens
MASRERLFELWMLYCTKKDPDYLKLWLDTFVSSYEQFLDVDFEKLPTRVDDMPPGISLLPDNILQVLRIQLLQCVQKMADGLEEQQQALSILLVKFFIILCRNLSNVEEIGTCSYINYVITMTTLYIQQLKSKKKEKEMADQTCIEEFVIHALAFCESLYDPYRNWRHRISGRILSTVEKSRQKYKPASLTVEFVPFFYQCFQESEHLKESLKCCLLHLFGAIVAGGQRNALQAISPATMEVLMRVLADCDSWEDGDPEEVGRKAELTLKCLTEVVHILLSSNSDQRQVETSTILENYFKLLNSDHSALPNQRRSRQWENRFIALQIKMLNTITAMLDCTDRPVLQAIFLNSNCFEHLIRLLQNCKVFQGQLDCLAISTIQALTAVMNKSPAAKEVFKERIGYTHMLEVLKSLGQPPLELLKELMNMAVEGDHTSVGILGISNVQPLLLLIQWLPELQSHDLQIFISDWLKRICCINRQSRTTCVNANMGIRIIETLDLHSSLHQTCAENLIAIHGSLGSQSVSSEEIRRLLRLLRVDESESVHPYVTPVTRAILTMARKLSLESALQYFNLSHSMAGISVPPIQKWPGSAFSFSAWFCLDQDQLTLGIANKGGKRKQLYSFFTGSGMGFEAFITHSGMLVVAVCTKREYATVMLPDHSFCDSLWHNITVVHMPGKRPFGQSFVYIYDNGQQKVSAPLRFPAMNEPFTSCCIGSAGQRTTTPPPSQIPDPPFSSPITPHRTSFGGILSSASWGGTIEKSKLITKLISAGTQDSEWGCPTSLEGQLGSVIIFYEPLQPPQVKALYLAGPNCLSPWKCQESDMADLPGNILLYYTAKACKNSICLDLSTNCLHGRLTGNKVVNWDIKDIINCIGGLNVLFPLLEQISHFSEGQIPEEKNESTVPESVTPVEGDWLVWTSTKASESRLERNLVATFILIVKHFIQRHPINQGNLIHSHGVATLGALLQKVPSTLMDVNVLMAVQLLIEQVSLEKNMQLLQQMYQYLLFDFRIWNRGDFPFRIGHIQYLSTIIKDSRRVFRKKYGVQFLLDTLRIYYGNGCKYNELSLDDIRTIRTSLYGLIKYFLCKGGSHEEIQSIMGYIAATNEEEQLFGILDVLFSLLRTSPTRGQLFLLLFEPGNADILYALLLNQKYSDRLREIIFKIMEQMLKCTNVYERSKQHIRLREVGYSGLGLLLNEALVNTSLIKNLTHQIINTDPVINFKDLLSVVYISHRAHINVRVAICRKVLQILQFQPDAAHQISQQVGWQDTLVRLFLKAKFENGNTLHKHSRAVLMKDNDKNMSTEDTKKNSDEKTDEEKITSFASANVSSDQWSLEDRHSLDSNTPLFPEDSSVGELSFKSENQEEFWHSNPSHLSLDLSGIDSCEMSDSGSQVPDSLPSTPSPVESTKSFSVHSDRESSITNDMGFSDDFSLLESQERCEEELLQLLTHILNYVMCKGLEKSDDDTWIERGQVFSALSKPGISSELLRPSDEIKLTLLQKMLEWAISENREAKTNPVTAENAFRLVLIIQDFLQSEGLVNSNMWTEKLLEDMMLLFDCLSVCYSESPVWVKLSQIQIQLLLGFIGRGNLQVCAMASAKLNTLLQTKVIENQDEACYILGKLEHVLSQSIKEQTEIYSFLIPLVRTLVSKIYELLFMNLHLPSLPFTNGSSSFFEDFQEYCNSNEWQVYIEKYIVPYMKQYEAHTFYDGHENMALYWKDCYEALMVNMHKRDREGGESKLKFQELFVEPFNRKARQENLRYNNMLKQLSSQQLATLRRWKAIQLYLTCERGPWAKRKQNPIHWKLANVENYSRMRLKLVPNYNFKTHEEASALRDNLGIQHSQPSSDTLLLEVVKQVKVSDMVEDKLDLPEEDITARVNVDEKEEQDQKEKLVLMEDCELITIIDVIPGRLEITTQHIYFYDGSIEKEDGVGFDFKWPHSQIREIHLRRYNLRRSALEIFHVDQSNYFLNFKKEVRNKIYSRLLSLHSPNSYYGSRSPQELFKASGLTQKWVNREISNFDYLIQINTMAGRTYNDLAQYPVFPWILQDYTSEELDLNNPAVFRDLSKPIGVVNEKNAKAMREKYENFEDPMGTIDKFHYGTHYSNSAGVMHYLIRVEPFTTLHIQLQSGRFDCADRQFHSIPATWQALMDNPYDVKELIPEFFYFPEFLENQNQFNLGRLQISKELVNDVILPKWAKSAEDFIYKHRKALESEYVSAHLHEWIDLIFGYKQRGPAAVEALNVFYYCSYEGAVDLDALTDEKERKALEGMINNFGQTPCQLLKEPHPPRLSAEEAVQKPTKIDTSTLNLFQHLPELKSFFIEGISDGIPLLKATIPKNQYRSFMSQGSPELLITISMNYVIGTHGWLPYDRNISNYFTFIKDQTVTNPKTQRSINGSFAPGLEITSKLFVVSHDAKLLFSAGYWDNSIQVMSLTKGKIISHIIRHMDIVTCLATDYCGIHLISGSRDTTCMIWQITQQGGVPVGLASKPFQILYGHTNEVLSVGISTELDMAVSGSRDGTVIIHTIQKGQYMRTLRPPCESSLFLTIPNLAISWEGHIVVYSSTEEKTTLKDKNALHLFSINGKYLGSQILKEQVSDICIIGEHIVTGSIQGFLSIRDLHSLNLSINPLAMRLPIHCVCVTKEYSHILVGLEDGKLIVVGVGKPAEMRSGQLSRKFWGSSKRLSQISAGETEYNTQDSK

SEQ ID NO: 13008 - protein, 539 aa, Homo sapiens
MDCQLSILLLLSCSVLDSFGELIPQPSNEVNLLDSKTIQGELGWISYPSHGWEEISGVDEHYTPIRTYQVCNVMDHSQNNWLRTNWVPRNSAQKIYVELKFTLRDCNSIPLVLGTCKETFNLYYMESDDDHGVKFREHQFTKIDTIAADESFTQMDLGDRILKLNTEIREVGPVNKKGFYLAFQDVGACVALVSVRVYFKKCPFTVKNLAMFPDTVPMDSQSLVEVRGSCVNNSKEEDPPRMYCSTEGEWLVPIGKCSCNAGYEERGFMCQACRPGFYKALDGNMKCAKCPPHSSTQEDGSMNCRCENNYFRADKDPPSMACTRPPSSPRNVISNINETSVILDWSWPLDTGGRKDVTFNIICKKCGWNIKQCEPCSPNVRFLPRQFGLTNTTVTVTDLLAHTNYTFEIDAVNGVSELSSPPRQFAAVSITTNQAAPSPVLTIKKDRTSRNSISLSWQEPEHPNGIILDYEVKYYEKQEQETSYTILRARGTNVTISSLKPDTIYVFQIRARTAAGYGTNSRKFEFETSPDCMYYFNAV

SEQ ID NO: 13009 - protein, 715 aa, Homo sapiens
MPLPEPSEQEGESVKAGQEPSPKPGTDVIPAAPRKPREFSKLVLLTASDQDEDGVGSKPQEVHCVLSLEMAGPATLASTLQILPVEEQGGVVQPALEMPEQKCSKLDAAPQSLEFLRTPFGGRLLVLESFLYKQEKAVGDKVYWKCRQHAELGCRGRAITRGLRATVMRGHCHAPDEQGLEARRQREKLPSLALPEGLGEPQGPEGPGGRVEEPLEGVGPWQCPEEPEPTPGLVLSKPALEEEEAPRALSLLSLPPKKRSILGLGQARPLEFLRTCYGGSFLVHESFLYKREKAVGDKVYWTCRDHALHGCRSRAITQGQRVTVMRGHCHQPDMEGLEARRQQEKAVETLQAGQDGPGSQVDTLLRGVDSLLYRRGPGPLTLTRPRPRKRAKVEDQELPTQPEAPDEHQDMDADPGGPEFLKTPLGGSFLVYESFLYRREKAAGEKVYWTCRDQARMGCRSRAITQGRRVTVMRGHCHPPDLGGLEALRQREKRPNTAQRGSPGGPEFLKTPLGGSFLVYESFLYRREKAAGEKVYWTCRDQARMGCRSRAITQGRRVMVMRRHCHPPDLGGLEALRQREHFPNLAQWDSPDPLRPLEFLRTSLGGRFLVHESFLYRKEKAAGEKVYWMCRDQARLGCRSRAITQGHRIMVMRSHCHQPDLAGLEALRQRERLPTTAQQEDPEKIQVQLCFKTCSPESQQIYGDIKDVRLDGESQ

SEQ ID NO: 13010 - protein, 474 aa, Homo sapiens
MLLWPLLLLLLLLPTLALLRQQRSQDARLSWLAGLQHRVAWGALVWAATWQRRRLEQSTLHVHQSQQQALRWCLQGAQRPHCSLRRSTDISTFRNHLPLTKASQTQQEDSGEQPLPPTSNQDLGEASLQATLLGLAALNKAYPEVLAQGRTARVTLTSPWPRPLPWPGNTLGQVGTPGTKDPRALLLDALRSPGLRALEAGTAVELLDVFLGLETDGEELAGAIAAGNPGAPLRERAAELREALEQGPRGLALRLWPKLQVVVTLDAGGQAEAVAALGALWCQGLAFFSPAYAASGGVLGLNLQPEQPHGLYLLPPGAPFIELLPVKEGTQEEAASTLLLAEAQQGKEYELVLTDRASLTRCRLGDVVRVVGAYNQCPVVRFICRLDQTLSVRGEDIGEDLFSEALGRAVGQWAGAKLLDHGCVESSILEWGRTDRAEDTRLGSCPFTGSMCAHGVYSQIPLRALLPTTRCLWR

SEQ ID NO: 13011 - protein, 1464 aa, Homo sapiens
MSGMGENTSDPSRAETRKRKECPDQLGPSPKRNTEKRNREQENKYIEELAELIFANFNDIDNFNFKPDKCAILKETVKQIRQIKEQEKAAAANIDEVQKSDVSSTGQGVIDKDALGPMMLEALDGFFFVVNLEGNVVFVSENVTQYLRYNQEELMNKSVYSILHVGDHTEFVKNLLPKSIVNGGSWSGEPPRRNSHTFNCRMLVKPLPDSEEEGHDNQEAHQKYETMQCFAVSQPKSIKEEGEDLQSCLICVARRVPMKERPVLPSSESFTTRQDLQGKITSLDTSTMRAAMKPGWEDLVRRCIQKFHAQHEGESVSYAKRHHHEVLRQGLAFSQIYRFSLSDGTLVAAQTKSKLIRSQTTNEPQLVISLHMLHREQNVCVMNPDLTGQTMGKPLNPISSNSPAHQALCSGNPGQDMTLSSNINFPINGPKEQMGMPMGRFGGSGGMNHVSGMQATTPQGSNYALKMNSPSQSSPGMNPGQPTSMLSPRHRMSPGVAGSPRIPPSQFSPAGSLHSPVGVCSSTGNSHSYTNSSLNALQALSEGHGVSLGSSLASPDLKMGNLQNSPVNMNPPPLSKMGSLDSKDCFGLYGEPSEGTTGQAESSCHPGEQKETNDPNLPPAVSSERADGQSRLHDSKGQTKLLQLLTTKSDQMEPSPLASSLSDTNKDSTGSLPGSGSTHGTSLKEKHKILHRLLQDSSSPVDLAKLTAEATGKDLSQESSSTAPGSEVTIKQEPVSPKKKENALLRYLLDKDDTKDIGLPEITPKLERLDSKTDPASNTKLIAMKTEKEEMSFEPGDQPGSELDNLEEILDDLQNSQLPQLFPDTRPGAPAGSVDKQAIINDLMQLTAENSPVTPVGAQKTALRISQSTFNNPRPGQLGRLLPNQNLPLDITLQSPTGAGPFPPIRNSSPYSVIPQPGMMGNQGMIGNQGNLGNSSTGMIGNSASRPTMPSGEWAPQSSAVRVTCAATTSAMNRPVQGGMIRNPAASIPMRPSSQPGQRQTLQSQVMNIGPSELEMNMGGPQYSQQQAPPNQTAPWPESILPIDQASFASQNRQPFGSSPDDLLCPHPAAESPSDEGALLDQLYLALRNFDGLEEIDRALGIPELVSQSQAVDPEQFSSQDSNIMLEQKAPVFPQQYASQAQMAQGSYSPMQDPNFHTMGQRPSYATLRMQPRPGLRPTGLVQNQPNQLRLQLQHRLQAQQNRQPLMNQISNVSNVNLTLRPGVPTQAPINAQMLAQRQREILNQHLRQRQMHQQQQVQQRTLMMRGQGLNMTPSMVAPSGMPATMSNPRIPQANAQQFPFPPNYGISQQPDPGFTGATTPQSPLMSPRMAHTQSPMMQQSQANPAYQAPSDINGWAQGNMGGNSMFSQQSPPHFGQQANTSMYSNNMNINVSMATNTGGMSSMNQMTGQISMTSVTSVPTSGLSSMGPEQVNDPALRGGNLFPNQLPGMDMIKQEGDTTRKYC

SEQ ID NO: 13012 - protein, 714 aa, Homo sapiens
MTKRRLQTITACLQLREGSPSLHRGLHPSREEKRDSRMAEEKKLKLSNTVLPSESMKVVAESMGIAQIQEETCQLLTDEVSYRIKEIAQDALKFMHMGKRQKLTTSDIDYALKLKNVEPLYGFHAQEFIPFRFASGGGRELYFYEEKEVDLSDIINTPLPRVPLDVCLKAHWLSIEGCQPAIPENPPPAPKEQQKAEATEPLKSAKPGQEEDGPLKGKGQGATTADGKGKEKKAPPLLEGAPLRLKPRSIHELSVEQQLYYKEITEACVGSCEAKRAEALQSIATDPGLYQMLPRFSTFISEGVRVNVVQNNLALLIYLMRMVKALMDNPTLYLEKYVHELIPAVMTCIVSRQLCLRPDVDNHWALRDFAARLVAQICKHFSTTTNNIQSRITKTFTKSWVDEKTPWTTRYGSIAGLAELGHDVIKTLILPRLQQEGERIRSVLDGPVLSNIDRIGADHVQSLLLKHCAPVLAKLRPPPDNQDAYRAEFGSLGPLLCSQVVKARAQAALQAQQVNRTTLTITQPRPTLTLSQAPQPGPRTPGLLKVPGSIALPVQTLVSARAAAPPQPSPPPTKFIVMSSSSSAPSTQQVLSLSTSAPGSGSTTTSPVTTTVPSVQPIVKLVSTATTAPPSTAPSGPGSVQKYIVVSLPPTGEGKGGPTSHPSPVPPPASSPSPLSGSALCGGKQEAGDSPPPAPGTPKANGSQPNSGSPQPAP

SEQ ID NO: 13013 - protein, 1337 aa, Homo sapiens
MKPAAREARLPPRSPGLRWALPLLLLLLRLGQILCAGGTPSPIPDPSVATVATGENGITQISSTAESFHKQNGTGTPQVETNTSEDGESSGANDSLRTPEQGSNGTDGASQKTPSSTGPSPVFDIKAVSISPTNVILTWKSNDTAASEYKYVVKHKMENEKTITVVHQPWCNITGLRPATSYVFSITPGIGNETWGDPRVIKVITEPIPVSDLRVALTGVRKAALSWSNGNGTASCRVLLESIGSHEELTQDSRLQVNISGLKPGVQYNINPYLLQSNKTKGDPLGTEGGLDASNTERSRAGSPTAPVHDESLVGPVDPSSGQQSRDTEVLLVGLEPGTRYNATVYSQAANGTEGQPQAIEFRTNAIQVFDVTAVNISATSLTLIWKVSDNESSSNYTYKIHVAGETDSSNLNVSEPRAVIPGLRSSTFYNITVCPVLGDIEGTPGFLQVHTPPVPVSDFRVTVVSTTEIGLAWSSHDAESFQMHITQEGAGNSRVEITTNQSIIIGGLFPGTKYCFEIVPKGPNGTEGASRTVCNRTVPSAVFDIHVVYVTTTEMWLDWKSPDGASEYVYHLVIESKHGSNHTSTYDKAITLQGLIPGTLYNITISPEVDHVWGDPNSTAQYTRPSNVSNIDVSTNTTAATLSWQNFDDASPTYSYCLLIEKAGNSSNATQVVTDIGITDATVTELIPGSSYTVEIFAQVGDGIKSLEPGRKSFCTDPASMASFDCEVVPKEPALVLKWTCPPGANAGFELEVSSGAWNNATHLESCSSENGTEYRTEVTYLNFSTSYNISITTVSCGKMAAPTRNTCTTGITDPPPPDGSPNITSVSHNSVKVKFSGFEASHGPIKAYAVILTTGEAGHPSADVLKYTYEDFKKGASDTYVTYLIRTEEKGRSQSLSEVLKYEIDVGNESTTLGYYNGKLEPLGSYRACVAGFTNITFHPQNKGLIDGAESYVSFSRYSDAVSLPQDPGVICGAVFGCIFGALVIVTVGGFIFWRKKRKDAKNNEVSFSQIKPKKSKLIRVENFEAYFKKQQADSNCGFAEEYEDLKLVGISQPKYAAELAENRGKNRYNNVLPYDISRVKLSVQTHSTDDYINANYMPGYHSKKDFIATQGPLPNTLKDFWRMVWEKNVYAIIMLTKCVEQGRTKCEEYWPSKQAQDYGDITVAMTSEIVLPEWTIRDFTVKNIQTSESHPLRQFHFTSWPDHGVPDTTDLLINFRYLVRDYMKQSPPESPILVHCSAGVGRTGTFIAIDRLIYQIENENTVDVYGIVYDLRMHRPLMVQTEDQYVFLNQCVLDIVRSQKDSKVDLIYQNTTAMTIYENLAPVTTFGKTNGYIA

SEQ ID NO: 13014 - protein, 87 aa, Homo sapiens
MASLALLQRQFDVDILISGHTHKFEAFEHENKFYINPGSATGAYNALETNIIPSFVLMDIQASTVVTYVYQLIGDDVKVERIEYKKP

SEQ ID NO: 13015 - protein, 622 aa, Homo sapiens
MEGPGLGSQCRNHSHGPHPPGFGRYGICAHENKELANAREALPLIEDSSNCDIVKATQYGIFERCKELVEAGYDVRQPDKENVSLLHWAAINNRLDLVKFYISKGAVVDQLGGDLNSTPLHWAIRQGHLPMVILLLQHGADPTLIDGEGFSSIHLAVLFQHMPIIAYLISKGQSVNMTDVNGQTPLMLSAHKVIGPEPTGFLLKFNPSLNVVDKIHQNTPLHWAVAAGNVNAVDKLLEAGSSLDIQNVKGETPLDMALQNKNQLIIHMLKTEAKMRANQKFRLWRWLQKCELFLLLMLSVITMWAIGYILDFNSDSWLLKGCLLVTLFFLTSLFPRFLVGYKNLVYLPTAFLLSSVFWIFMTWFILFFPDLAGAPFYFSFIFSIVAFLYFFYKTWATDPGFTKASEEEKKVNIITLAETGSLDFRTFCTSCLIRKPLRSLHCHVCNCCVARYDQHCLWTGRCIGFGNHHYYIFFLFFLSMVCGWIIYGSFIYLSSHCATTFKEDGLWTYLNQIVACSPWVLYILMLATFHFSWSTFLLLNQLFQIAFLGLTSHERISLQKQSKHMKQTLSLRKTPYNLGFMQNLADFFQCGCFGLVKPCVVDWTSQYTMVFHPAREKVLRSV

SEQ ID NO: 13016 - protein, 561 aa, Homo sapiens
MADHNPDSDSTPRTLLRRVLDTADPRTPRRPRSARAGARRALLETASPRKLSGQTRTIARGRSHGARSVGRSAHIQASGHLEEQTPRTLLKNILLTAPESSILMPESVVKPVPAPQAVQPSRQESSCGSLELQLPELEPPTTLAPGLLAPGRRKQRLRLSVFQQGVDQGLSLSQEPQGNADASSLTRSLNLTFATPLQPQSVQRPGLARRPPARRAVDVGAFLRDLRDTSLAPPNIVLEDTQPFSQPMVGSPNVYHSLPCTPHTGAEDAEQAAGRKTQSSGPGLQKNSPGKPAQFLAGEAEEVNAFALGFLSTSSGVSGEDEVEPLHDGVEEAEKKMEEEGVSVSEMEATGAQGPSRVEEAEGHTEVTEAEGSQGTAEADGPGASSGDEDASGRAASPESASSTPESLQARRHHQFLEPAPAPGAAVLSSEPAEPLLVRHPPRPRTTGPRPRQDPHKAGLSHYVKLFSFYAKMPMERKALEMVEKCLDKYFQHLCDDLEVFAAHAGRKTVKPEDLELLMRRQGLVTDQVSLHVLVERHLPLEYRQLLIPCAYSGNSVFPAQ

SEQ ID NO: 13017 - protein, 402 aa, Homo sapiens
MRRRLRLRRDALLTLLLGASLGLLLYAQRDGAAPTASAPRGRGRAAPRPTPGPRAFQLPDAGAAPPAYEGDTPAPPTPTGPFDFARYLRAKDQRRFPLLINQPHKCRGDGAPGGRPDLLIAVKSVAEDFERRQAVRQTWGAEGRVQGALVRRVFLLGVPRGAGSGGADEVGEGARTHWRALLRAESLAYADILLWAFDDTFFNLTLKEIHFLAWASAFCPDVRFVFKGDADVFVNVGNLLEFLAPRDPAQDLLAGDVIVHARPIRTRASKYYIPEAVYGLPAYPAYAGGGGFVLSGATLHRLAGACAQVELFPIDDVFLGMCLQRLRLTPEPHPAFRTFGIPQPSAAPHLSTFDPCFYRELVVVHGLSAADIWLMWRLLHGPHGPACAHPQPVAAGPFQWDS

SEQ ID NO: 13018 - protein, 189 aa, Homo sapiens
MMVVLLGATTLVLVAVAPWVLSAAAGGKNLKSPQKVEVDIIDDNFILRWNRSDESVGNVTFSFDYQKTGMDNWIKLSGCQNITSTKCNFSSLKLNVYEEIKLRIRAEKENTSSWYEVDSFTPFRKVENELPPPENIEVSVQNQNYVLKWDYTYANMTFQVQWLHAFLKRNPGNHLYKWKQIPDCENVKT

SEQ ID NO: 13019 - protein, 822 aa, Homo sapiens [sequence omitted]

SEQ ID NO: 13020 - protein, 193 aa, Homo sapiens
MAAIRKKLVIVGDGACGKTCLLIVFSKDQFPEVYVPTVFENYVADIEVDGKQVELALWDTAGQEDYDRLRPLSYPDTDVILMCFSIDSPDSLENIPEKWTPEVKHFCPNVPIILVGNKKDLRNDEHTRRELAKMKQEPVKPEEGRDMANRIGAFGYMECSAKTKDGVREVFEMATRAALQARRGKKKSGCLVL

SEQ ID NO: 13021 - protein, 76 aa, Homo sapiens
MIYTMKKVHALWASVCLLLNLAPAPLNADSEEDEEHTIITDTELPPLKLMHSFCAFKADDGPCKAIMKRFFFNIFT

SEQ ID NO: 13022 - protein, 74 aa, Homo sapiens
MSANGAVWGRVRSRLRAFPERLAACGAEAAAYGRCVQASTAPGGRLSKDFCAREFEALRSCFAAAAKKTLEGGC

SEQ ID NO: 13023 - protein, 638 aa, Homo sapiens
MENLQTNFSLVQGSTKKLNGMGDDGSPPAKKMITDIHANGKTINKVPTVKKEHLDDYGEAPVETDGEHVKRTCTSVPETLHLNPSLKHTLAQFHLSSQSSLGGPAAFSARHSQESMSPTVFLPLPSPQVLPGPLLIPSDSSTELTQTVLEGESISCFQVGGEKRLCLPQVLNSVLREFTLQQINTVCDELYIYCSRCTSDQLHILKVLGILPFNAPSCGLITLTDAQRLCNALLRPRTFPQNGSVLPAKSSLAQLKETGSAFEVEHECLGKCQGLFAPQFYVQPDAPCIQCLECCGMFAPQTFVMHSHRSPDKRTCHWGFESAKWHCYLHVNQKYLGTPEEKKLKIILEEMKEKFSMRSGKRNQSKTDAPSGMELQSWYPVIKQEGDHVSQTHSFLHPSYYLYMCDKVVAPNVSLTSAVSQSKELTKTEANASISNNSTSKRKSESATCNLVRDINKVGIGLVAAASSPLLVKDVICEDDKGKIMEEVMRTYLKQQEKLNLILQKKQQLQMEVKMLSSSKSMKELTEEQQNLQKELESLQNEHAQRMEEFYVEQKDLEKKLEQIMKQKCTCDSNLEKDKEAEYAGQLAELRQRLDHAEADRQELQDELRQEREARQKLEMMIKELKLQILKSSKTAKE

SEQ ID NO: 13024 - protein, 1805 aa, Homo sapiens
MAGPRPSPWARLLLAALISVSLSGTLANRCKKAPVKSCTECVRVDKDCAYCTDEMFRDRRCNTQAELLAAGCQRESIVVMESSFQITEETQIDTTLRRSQMSPQGLRVRLRPGEERHFELEVFEPLESPVDLYILMDFSNSMSDDLDNLKKMGQNLARVLSQLTSDYTIGFGKFVDKVSVPQTDMRPEKLKEPWPNSDPPFSFKNVISLTEDVDEFRNKLQGERISGNLDAPEGGFDAILQTAVCTRDIGWRPDSTHLLVFSTESAFHYEADGANVLAGIMSRNDERCHLDTTGTYTQYRTQDYPSVPTLVRLLAKHNIIPIFAVTNYSYSYYEKLHTYFPVSSLGVLQEDSSNIVELLEEAFNRIRSNLDIRALDSPRGLRTEVTSKMFQKTRTGSFHIRRGEVGIYQVQLRALEHVDGTHVCQLPEDQKGNIHLKPSFSDGLKMDAGIICDVCTCELQKEVRSARCSFNGDFVCGQCVCSEGWSGQTCNCSTGSLSDIQPCLREGEDKPCSGRGECQCGHCVCYGEGRYEGQFCEYDNFQCPRTSGFLCNDRGRCSMGQCVCEPGWTGPSCDCPLSNATCIDSNGGICNGRGHCECGRCHCHQQSLYTDTICEINYSAIHPGLCEDLRSCVQCQAWGTGEKKGRTCEECNFKVKMVDELKRAEEVVVRCSFRDEDDDCTYSYTMEGDGAPGPNSTVLVHKKKDCPPGSFWWLIPLLLLLLPLLALLLLLCWKYCACCKACLALLPCCNRGHMVGFKEDHYMLRENLMASDHLDTPMLRSGNLKGRDVVRWKVTNNMQRPGFATHAASINPTELVPYGLSLRLARLCTENLLKPDTRECAQLRQEVEENLNEVYRQISGVHKLQQTKFRQQPNAGKKQDHTIVDTVLMAPRSAKPALLKLTEKQVEQRAFHDLKVAPGYYTLTADQDARGMVEFQEGVELVDVRVPLFIRPEDDDEKQLLVEAIDVPAGTATLGRRLVNITIIKEQARDVVSFEQPEFSVSRGDQVARIPVIRRVLDGGKSQVSYRTQDGTAQGNRDYIPVEGELLFQPGEAWKELQVKLLELQEVDSLLRGRQVRRFHVQLSNPKFGAHLGQPHSTTIIIRDPDELDRSFTSQMLSSQPPPHGDLGAPQNPNAKAAGSRKIHFNWLPPSGKPMGYRVKYWIQGDSESEAHLLDSKVPSVELTNLYPYCDYEMKVCAYGAQGEGPYSSLVSCRTHQEVPSEPGRLAFNVVSSTVTQLSWAEPAETNGEITAYEVCYGLVNDDNRPIGPMKKVLVDNPKNRMLLIENLRESQPYRYTVKARNGAGWGPEREAIINLATQPKRPMSIPIIPDIPIVDAQSGEDYDSFLMYSDDVLRSPSGSQRPSVSDDTEHLVNGRMDFAFPGSTNSLHRMTTTSAAAYGTHLSPHVPHRVLSTSSTLTRDYNSLTRSEHSHSTTLPRDYSTLTSVSSHGLPPIWEHGRSRLPLSWALGSRSRAQMKGFPPSRGPRDSIILAGRPAAPSWGPDSRLTAGVPDTPTRLVFSALGPTSLRVSWQEPRCERPLQGYSVEYQLLNGGELHRLNIPNPAQTSVVVEDLLPNHSYVFRVRAQSQEGWGREREGVITIESQVHPQSPLCPLPGSAFTLSTPSAPGPLVFTALSPDSLQLSWERPRRPNGDIVGYLVTCEMAQGGGPATAFRVDGDSPESRLTVPGLSENVPYKFKVQARTTEGFGPEREGIITIESQDGGPFPQLGSRAGLFQHPLQSEYSSITTTHTSATEPFLVDGLTLGAQHLEAGGSLTRHVTQEFVSRTLTTSGTLSTHMDQQFFQT

SEQ ID NO: 13025 - protein, 528 aa, Homo sapiens
MELKAEEEEVGGVQPVSIQAFASSSTLHGLAHIFSYERLSLKRALWALCFLGSLAVLLCVCTERVQYYFHYHHVTKLDEVAASQLTFPAVTLCNLNEFRFSQVSKNDLYHAGELLALLNNRYEIPDTQMADEKQLEILQDKANFRSFKPKPFNMREFYDRAGHDIRDMLLSCHFRGEVCSAEDFKVVFTRYGKCYTFNSGRDGRPRLKTMKGGTGNGLEIMLDIQQDEYLPVWGETDETSFEAGIKVQIHSQDEPPFIDQLGFGVAPGFQTFVACQEQRLIYLPPPWGTCKAVTMDSDLDFFDSYSITACRIDCETRYLVENCNCRMVHMPGDAPYCTPEQYKECADPALDFLVEKDQEYCVCEMPCNLTRYGKELSMVKIPSKASAKYLAKKFNKSEQYIGENILVLDIFFEVLNYETIEQKKAYEIAGLLGDIGGQMGLFIGASILTVLELFDYAYEVIKHKLCRRGKCQKEAKRSSADKGVALSLDDVKRHNPCESLRGHPAGMTYAANILPHHPARGTFEDFTC

SEQ ID NO: 13026 - protein, 629 aa, Homo sapiens
MRVLLHLPALLASLILLQAAASTTRDPSLDLTSLSLEVGCGAPAPVVRCDPCSPYRTITGDCNNRRKPALGAANRALARWLPAEYEDGLSLPFGWTPGKTRNGFPLPLAREVSNKIVGYLNEEGVLDQNRSLLFMQWGQIVDHDLDFAPDTELGSSEYSKAQCDEYCIQGDNCFPIMFPPNDPKAGTQGKCMPFFRAGFVCPTPPYKSLAREQINALTSFLDASFVYSSEPSLASRLRNLSSPLGLMAVNQEVSDHGLPYLPYDSKKPSPCEFINTTARVPCFLAGDSRASEHILLATSHTLFLREHNRLARELKRLNPQWDGEKLYQEARKILGAFVQIITFRDYLPILLGDHMQKWIPPYQGYSESVDPRISNVFTFAFRFGHLEVPSSMFRLDENYQPWGPEPELPLHTLFFNTWRMVKDGGIDPLVRGLLAKKSKLMKQNKMMTGELRNKLFQPTHRIHGFDLAAINTQRCRDHGQPGYNSWRAFCDLSQPQTLEELNTVLKSKMLAKKLLGLYGTPDNIDIWIGAIAEPLVERGRVGPLLACLLGKQFQQIRDGDRFWWENPGVFTNEQKDSLQKMSFSRLVCDNTRITKVPRDPFWANSYPYDFVDCSAIDKLDLSPWASVKN

SEQ ID NO: 13027 - protein, 137 aa, Homo sapiens
MSRYGRYGGETKVYVGNLGTGAGKGELERAFSYYGPLRTVWIARNPPGFAFVEFEDPRDAEDAVRGLDGKVICGSRVRVELSTGMPRRSRFDRPPARRPFDPNDRCYECGEKGHYAYDCHRYSRRRRSRFLRLSQSP

SEQ ID NO: 13028 - protein, 116 aa, Homo sapiens
MMLRVLVGAVLPAMLLAAPPPINKLALFPDKSAWCEAKNITQIVGHSGCEAKSIQNRACLGQCFSYSVPNTFPQSTESLVHCDSCMPAQSMWEIVTLECPGHEEVPRVDKLVEKIL

SEQ ID NO: 13029 - protein, 2504 aa, Homo sapiens
MSGSTQPVAQTWRATEPRYPPHSLSYPVQIARTHTDVGLLEYQHHSRDYASHLSPGSIIQPQRRRPSLLSEFQPGNERSQELHLRPESHSYLPELGKSEMEFIESKRPRLELLPDPLLRPSPLLATGQPAGSEDLTKDRSLTGKLEPVSPPSPPHTDPELELVPPRLSKEELIQNMDRVDREITMVEQQISKLKKKQQQLEEEAAKPPEPEKPVSPPPIESKHRSLVQIIYDENRKKAEAAHRILEGLGPQVELPLYNQPSDTRQYHENIKINQAMRKKLILYFKRRNHARKQWEQKFCQRYDQLMEAWEKKVERIENNPRRRAKESKVREYYEKQFPEIRKQRELQERMQRVGQRGSGLSMSAARSEHEVSEIIDGLSEQENLEKQMRQLAVIPPMLYDADQQRIKFINMNGLMADPMKVYKDRQVMNMWSEQEKETFREKFMQHPKNFGLIASFLERKTVAECVLYYYLTKKNENYKSLVRRSYRRRGKSQQQQQQQQQQQQQQQQQPMPRSSQEEKDEKEKEKEAEKEEEKPEVENDKEDLLKEKTDDTSGEDNDEKEAVASKGRKTANSQGRRKGRITRSMANEANSEEAITPQQSAELASMELNESSRWTEEEMETAKKGLLEHGRNWSAIARMVGSKTVSQCKNFYFNYKKRQNLDEILQQHKLKMEKERNARRKKKKAPAAASEEAAFPPVVEDEEMEASGVSGNEEEMVEEAEATVNNSSDTESIPSPHTEAAKDTGQNGPKPPATLGADGPPPGPPTPPPEDIPAPTEPTPASEATGAPTPPPAPPSPSAPPPVVPKEEKEEETAAAPPVEEGEEQKPPAAEELAVDTGKAEEPVKSECTEEAEEGPAKGKDAEAAEATAEGALKAEKKEGGSGRATTAKSSGAPQDSDSSATCSADEVDEAEGGDKNRLLSPRPSLLTPTGDPRANASPQKPLDLKQLKQRAAAIPPIQVTKVHEPPREDAAPTKPAPPAPPPPQNLQPESDAPQQPGSSPRGKSRSPAPPADKEAEKPVFFPAFAAEAQKLPGDPPCWTSGLPFPVPPREVIKASPHAPDPSAFSYAPPGHPLPLGLHDTARPVLPRPPTISNPPPLISSAKHPSVLERQIGAISQGMSVQLHVPYSEHAKAPVGPVTMGLPLPMDPKKLAPFSGVKQEQLSPRGQAGPPESLGVPTAQEASVLRGTALGSVPGGSITKGIPSTRVPSDSAITYRGSITHGTPADVLYKGTITRIIGEDSPSRLDRGREDSLPKGHVIYEGKKGHVLSYEGGMSVTQCSKEDGRSSSGPPHETAAPKRTYDMMEGRVGRAISSASIEGLMGRAIPPERHSPHHLKEQHHIRGSITQGIPRSYVEAQEDYLRREAKLLKREGTPPPPPPSRDLTEAYKTQALGPLKLKPAHEGLVATVKEAGRSIHEIPREELRHTPELPLAPRPLKEGSITQGTPLKYDTGASTTGSKKHDVRSLIGSPGRTFPPVHPLDVMADARALERACYEESLKSRPGTASSSGGSIARGAPVIVPELGKPRQSPLTYEDHGAPFAGHLPRGSPVTTREPTPRLQEGSLSSSKASQDRKLTSTPREIAKSPHSTVPEHHPHPISPYEHLLRGVSGVDLYRSHIPLAFDPTSIPRGIPLDAAAAYYLPRHLAPNPTYPHLYPPYLIRGYPDTAALENRQTIINDYITSQQMHHNAATAMAQRADMLRGLSPRESSLALNYAAGPRGIIDLSQVPHLPVLVPPTPGTPATAMDRLAYLPTAPQPFSSRHSSSPLSPGGPTHLTKPTTTSSSERERDRDRERDRDREREKSILTSTTTVEHAPIWRPGTEQSSGSSGGGGGSSSRPASHSHAHQHSPISPRTQDALQQRPSVLHNTGMKGIITAVEPSTPTVLRSTSTSSPVRPAATFPPATHCPLGGTLDGVYPTLMEPVLLPKEAPRVARPERPRADTGHAFLAKPPARSGLEPASSPSKGSEPRPLVPPVSGHATIARTPAKNLAPHHASPDPPAPPASASDPHREKTQSKPFSIQELELRSLGYHGSSYSPEGVEPVSPVSSPSLTHDKGLPKHLEELDKSHLEGELRPKQPGPVKLGGEAAHLPHLRPLPESQPSSSPLLQTAPGVKGHQRVVTLAQHISEVITQDYTRHHPQQLSAPLPAPLYSFPGASCPVLDLRRPPSDLYLPPPDHGAPARGSPHSEGGKRSPEPNKTSVLGGGEDGIEPVSPPEGMTEPGHSRSAVYPLLYRDGEQTEPSRMGSKSPGNTSQPPAFFSKLTESNSAMVKSKKQEINKKLNTHNRNEPEYNISQPGTEIFNMPAITGTGLMTYRSQAVQEHASTNMGLEAIIRKALMGKYDQWEESPPLSANAFNPLNASASLPAAMPITAADGRSDHTLTSPGGGGKAKVSGRPSSRKAKSPAPGLASGDRPPSVSSVHSEGDCNRRTPLTNRVWEDRPSSAGSTPFPYNPLIMRLQAGVMASPPPPGLPAGSGPLAGPHHAWDEEPKPLLCSQYETLSDSE

SEQ ID NO: 13030 - protein, 1100 aa, Homo sapiens
MESLLLPVLLLLAILWTQAAALINLKYSVEEEQRAGTVIANVAKDAREAGFALDPRQASAFRVVSNSAPHLVDINPSSGLLVTKQKIDRDLLCRQSPKCIISLEVMSSSMEICVIKVEIKDLNDNAPSFPAAQIELEISEAASPGTRIPLDSAYDPDSGSFGVQTYELTPNELFGLEIKTRGDGSRFAELVVEKSLDRETQSHYSFRITALDGGDPPRLGTVGLSIKVTDSNDNNPVFSESTYAVSVPENSPPNTPVIRLNASDPDEGTNGQVVYSFYGYVNDRTRELFQIDPHSGLVTVTGALDYEEGHVYELDVQAKDLGPNSIPAHCKVTVSVLDTNDNPPVINLLSVNSELVEVSESAPPGYVIALVRVSDRDSGLNGRVQCRLLGNVPFRLQEYESFSTILVDGRLDREQHDQYNLTIQARDGGVPMLQSAKSFTVLITDENDNHPHFSKPYYQVIVQENNTPGAYLLSVSARDPDLGLNGSVSYQIVPSQVRDMPVFTYVSINPNSGDIYALRSFNHEQTKAFEFKVLAKDGGLPSLQSNATVRVIILDVNDNTPVITAPPLINGTAEVYIPRNSGIGYLVTVVKAEDYDEGENGRVTYDMTEGDRGFFEIDQVNGEVRTTRTFGESSKSSYELIVVAHDHGKTSLSASALVLIYLSPALDAQESMGSVNLSLIFIIALGSIAGILFVTMIFVAIKCKRDNKEIRTYNCRIAEYSYGHQKKSSKKKKISKNDIRLVPRDVEETDKMNVVSCSSLTSSLNYFDYHQQTLPLGCRRSESTFLNVENQNTRNTSANHIYHHSFNSQGPQQPDLIINGVPLPETENYSFDSNYVNSRAHLIKSSTFKDLEGNSLKDSGHEESDQTDSEHDVQRSLYCDTAVNDVLNTSVTSMGSQMPDHDQNEGFHCREECRILGHSDRCWMPRNPMPIRSKSPEHVRNIIALSIEATAADVEAYDDCGPTKRTFATFGKDVSDHPAEERPTLKGKRTVDVTICSPKVNSVIREAGNGCEAISPVTSPLHLKSSLPTKPSVSYTIALAPPARDLEQYVNNVNNGPTRPSEAEPRGADSEKVMHEVSPILKEGRNKESPGVKRLKDIVL

SEQ ID NO: 13031 - protein, 541 aa, Homo sapiens
MADEDGEGIHPSAPHRNGGGGGGGGSGLHCAGNGGGGGGGPRVVRIVKSESGYGFNVRGQVSEGGQLRSINGELYAPLQHVSAVLPGGAADRAGVRKGDRILEVNHVNVEGATHKQVVDLIRAGEKELILTVLSVPPHEADNLDPSDDSLGQSFYDYTEKQAVPISVPRYKHVEQNGEKFVVYNVYMAGRQLCSKRYREFAILHQNLKREFANFTFPRLPGKWPFSLSEQQLDARRRGLEEYLEKVCSIRVIGESDIMQEFLSESDENYNGVSDVELRVALPDGTTVTVRVKKNSTTDQVYQAIAAKVGMDSTTVNYFALFEVISHSFVRKLAPNEFPHKLYIQNYTSAVPGTCLTIRKWLFTTEEEILLNDNDLAVTYFFHQAVDDVKKGYIKAEEKSYQLQKLYEQRKMVMYLNMLRTCEGYNEIIFPHCACDSRRKGHVITAISITHFKLHACTEEGQLENQVIAFEWDEMQRWDTDEEGMAFCFEYARGEKKPRWVKIFTPYFNYMHECFERVFCELKWRKENIFQMARSQQRDVAT

SEQ ID NO: 13032 - protein, 111 aa, Homo sapiens
MDFLRNLFSQTLSLGSQKERLLDELTLEGVARYMQSERCRRVICLVGAGISTSAGIPDFRSPSTGLYDNLEKYHLPYPEAIFEISYFKKHPEPFFALAKELYPGQFKFPHL

SEQ ID NO: 13033 - protein, 120 aa, Homo sapiens
MRLSVRRVLLAAGCALVLVLAVQLGQQVLECRAVLAGLRSPRGAMRPEQEELVMVGTNHVEYRYGKAMPLIFVGGVPRSGTTLMRAMLDAHPEVRCGEETRIIPRVLAMRQAWSKSGREK

SEQ ID NO: 13034 - protein, 3122 aa, Homo sapiens
MPGAAGVLLLLLLSGGLGGVQAQRPQQQRQSQAHQQRGLFPAVLNLASNALITTNATCGEKGPEMYCKLVEHVPGQPVRNPQCRICNQNSSNPNQRHPITNAIDGKNTWWQSPSIKNGIEYHYVTITLDLQQVFQIAYVIVKAANSPRPGNWILERSLDDVEYKPWQYHAVTDTECLTLYNIYPRTGPPSYAKDDEVICTSFYSKIHPLENGEIHISLINGRPSADDPSPELLEFTSARYIRLRFQRIRTLNADLMMFAHKDPREIDPIVTRRYYYSVKDISVGGMCICYGHARACPLDPATNKSRCECEHNTCGDSCDQCCPGFHQKPWRAGTFLTKTECEACNCHGKAEECYYDENVARRNLSLNIRGKYIGGGVCINCTQNTAGINCETCTDGFFRPKGVSPNYPRPCQPCHCDPIGSLNEVCVKDEKHARRGLAPGSCHCKTGFGGVSCDRCARGYTGYPDCKACNCSGLGSKNEDPCFGPCICKENVEGGDCSRCKSGFFNLQEDNWKGCDECFCSGVSNRCQSSYWTYGKIQDMSGWYLTDLPGRIRVAPQQDDLDSPQQISISNAEARQALPHSYYWSAPAPYLGNKLPAVGGQLTFTISYDLEEEEEDTERVLQLMIILEGNDLSISTAQDEVYLHPSEEHTNVLLLKEESFTIHGTHFPVRRKEFMTVLANLKRVLLQITYSFGMDAIFRLSSVNLESAVSYPTDGSIAAAVEVCQCPPGYTGSSCESCWPRHRRVNGTIFGGICEPCQCFGHAESCDDVTGECLNCKDHTGGPYCDKCLPGFYGEPTKGTSEDCQPCACPLNIPSNNFSPTCHLDRSLGLICDGCPVGYTGPRCERCAEGYFGQPSVPGGSCQPCQCNDNLDFSIPGSCDSLSGSCLICKPGTTGRYCELCADGYFGDAVDAKNCQPCRCNAGGSFSEVCHSQTGQCECRANVQGQRCDKCKAGTFGLQSARGCVPCNCNSFGSKSFDCEESGQCWCQPGVTGKKCDRCAHGYFNFQEGGCTACECSHLGNNCDPKTGRCICPPNTIGEKCSKCAPNTWGHSITTGCKACNCSTVGSLDFQCNVNTGQCNCHPKFSGAKCTECSRGHWNYPRCNLCDCFLPGTDATTCDSETKKCSCSDQTGQCTCKVNVEGIHCDRCRPGKFGLDAKNPLGCSSCYCFGTTTQCSEAKGLIRTWVTLKAEQTILPLVDEALQHTTTKGIVFQHPEIVAHMDLMREDLHLEPFYWKLPEQFEGKKLMAYGGKLKYAIYFEAREETGFSTYNPQVIIRGGTPTHARIIVRHMAAPLIGQLTRHEIEMTEKEWKYYGDDPRVHRTVTREDFLDILYDIHYILIKATYGNFMRQSRISEISMEVAEQGRGTTMTPPADLIEKCDCPLGYSGLSCEACLPGFYRLRSQPGGRTPGPTLGTCVPCQCNGHSSLCDPETSICQNCQHHTAGDFCERCALGYYGIVKGLPNDCQQCACPLISSSNNFSPSCVAEGLDDYRCTACPRGYEGQYCERCAPGYTGSPGNPGGSCQECECDPYGSLPVPCDPVTGFCTCRPGATGRKCDGCKHWHAREGWECVFCGDECTGLLLGDLARLEQMVMSINLTGPLPAPYKMLYGLENMTQELKHLLSPQRAPERLIQLAEGNLNTLVTEMNELLTRATKVTADGEQTGQDAERTNTRAKSLGEFIKELARDAEAVNEKAIKLNETLGTRDEAFERNLEGLQKEIDQMIKELRRKNLETQKEIAEDELVAAEALLKKVKKLFGESRGENEEMEKDLREKLADYKNKVDDAWDLLREATDKIREANRLFAVNQKNMTALEKKKEAVESGKRQIENTLKEGNDILDEANRLADEINSIIDYVEDIQTKLPPMSEELNDKIDDLSQEIKDRKLAEKVSQAESHAAQLNDSSAVLDGILDEAKNISFNATAAFKAYSNIKDYIDEAEKVAKEAKDLAHEATKLATGPRGLLKEDAKGCLQKSFRILNEAKKLANDVKENEDHLNGLKTRIENADARNGDLLRTLNDTLGKLSAIPNDTAAKLQAVKDKARQANDTAKDVLAQITELHQNLDGLKKNYNKLADSVAKTNAVVKDPSKNKIIADADATVKNLEQEADRLIDKLKPIKELEDNLKKNISEIKELINQARKQANSIKVSVSSGGDCIRTYKPEIKKGSYNNIVVNVKTAVADNLLFYLGSAKFIDFLAIEMRKGKVSFLWDVGSGVGRVEYPDLTIDDSYWYRIVASRTGRNGTISVRALDGPKASIVPSTHHSTSPPGYTILDVDANAMLFVGGLTGKLKKADAVRVITFTGCMGETYFDNKPIGLWNFREKEGDCKGCTVSPQVEDSEGTIQFDGEGYALVSRPIRWYPNISTVMFKFRTFSSSALLMYLATRDLRDFMSVELTDGHIKVSYDLGSGMASVVSNQNHNDGKWKSFTLSRIQKQANISIVDIDTNQEENIATSSSGNNFGLDLKADDKIYFGGLPTLRNLSMKARPEVNLKKYSGCLKDIEISRTPYNILSSPDYVGVTKGCSLENVYTVSFPKPGFVELSPVPIDVGTEINLSFSTKNESGIILLGSGGTPAPPRRKRRQTGQAYYAILLNRGRLEVHLSTGARTMRKIVIRPEPNLFHDGREHSVHVERTRGIFTVQVDENRRYMQNLTVEQPIEVKKLFVGGAPPEFQPSPLRNIPPFEGCIWNLVINSVPMDFARPVSFKNADIGRCAHQKLREDEDGAAPAEIVIQPEPVPTPAFPTPTPVLTHGPCAAESEPALLIGSKQFGLSRNSHIAIAFDDTKVKNRLTIELEVRTEAESGLLFYMARINHADFATVQLRNGLPYFSYDLGSGDTHTMIPTKINDGQWHKIKIMRSKQEGILYVDGASNRTISPKKADILDVVGMLYVGGLPINYTTRRIGPVTYSIDGCVRNLHMAEAPADLEQPTSSFHVGTCFANAQRGTYFDGTGFAKAVGGFKVGLDLLVEFEFRTTTTTGVLLGISSQKMDGMGIEMIDEKLMFHVDNGAGRFTAVYDAGVPGHLCDGQWHKVTANKIKHRIELTVDGNQVEAQSPNPASTSADTNDPVFVGGFPDDLKQFGLTTSIPFRGCIRSLKLTKGTGKPLEVNFAKALELRGVQPVSCPAN

SEQ ID NO: 13035 - protein, 40 aa, Homo sapiens
MLAFAARTVDRSQGCGVTSAARQSLSSSQVFPHQNDLRRF

SEQ ID NO: 13036 - protein, 280 aa, Homo sapiens
MAQPPPDVEGDDCLPAYRHLFCPDLLRDKVAFITGGGSGIGFRIAEIFMRHGCHTAARKLAGATGRRCLPLSMDVRAPPAVMAAVDQALKEFGRIDILINCAAGNFLCPAGALSFNAFKTVMDIDTSGTFNVSRVLYEKFFRDHGGVIVNITATLGNRGQALQVHAGSAKAAVDAMTRHLAVEWGPQNIRVNSLAPGPISGTEGLRRLGGPQASLSTKVTASPLQRLGNKTEIAHSVLYLASPLASYVTGAVLVADGGAWLTFPNGVKGLPDFASFSAKL

SEQ ID NO: 13037 - protein, 1255 aa, Homo sapiens
MLDPSSSEEESDEGLEEESRDVLVAAGSSQRAPPAPTREGRRDAPGRAGGGGAARSVSPSPSVLSEGRDEPQRQLDDEQERRIRLQLYVFVVRCIAYPFNAKQPTDMARRQQKLNKQQLQLLKERFQAFLNGETQIVADEAFCNAVRSYYEVFLKSDRVARMVQSGGCSANDFREVFKKNIEKRVRSLPEIDGLSKETVLSSWIAKYDAIYRGEEDLCKQPNRMALSAVSELILSKEQLYEMFQQILGIKKLEHQLLYNACQLDNADEQAAQIRRELDGRLQLADKMAKERKFPKFIAKDMENMYIEELRSSVNLLMANLESLPVSKGGPEFKLQKLKRSQNSAFLDIGDENEIQLSKSDVVLSFTLEIVIMEVQGLKSVAPNRIVYCTMEVEGEKLQTDQAEASRPQWGTQGDFTTTHPRPVVKVKLFTESTGVLALEDKELGRVILYPTSNSSKSAELHRMVVPKNSQDSDLKIKLAVRMDKPAHMKHSGYLYALGQKVWKRWKKRYFVLVQVSQYTFAMCSYREKKSEPQELMQLEGYTVDYTDPHPGLQGGCMFFNAVKEGDTVIFASDDEQDRILWVQAMYRATGQSYKPVPAIQTQKLNPKGGTLHADAQLYADRFQKHGMDEFISANPCKLDHAFLFRILQRQTLDHRLNDSYSCLGWFSPGQVFVLDEYCARYGVRGCHRHLCYLAELMEHSENGAVIDPTLLHYSFAFCASHVHGNRPDGIGTVSVEEKERFEEIKERLSSLLENQISHFRYCFPFGRPEGALKATLSLLERVLMKDIATPIPAEEVKKVVRKCLEKAALINYTRLTEYAKIEETMNQASPARKLEEILHLAELCIEVLQQNEEHHAEAFAWWPDLLAEHAEKFWALFTVDMDTALEAQPQDSWDSFPLFQLLNNFLRNDTLLCNGKFHKHLQEIFVPLVVRYVDLMESSIAQSIHRGFEQETWQPVNNGSATSEDLFWKLDALQMFVFDLHWPEQEFAHHLEQRLKLMASDMLEACVKRTRTAFELKLQKASKTTDLRIPASVCTMFNVLVDAKKQSTKLCALDGGQEFGSQWQQYHSKIDDLIDNSVKEIISLLVSKFVSVLEGVLSKLSRYDEGTFFSSILSFTVKAAAKYVDVPKPGMDLADTYIMFVRQNQDILREKVNEEMYIEKLFDQWYSSSMKVICVWLTDRLDLQLHIYQLKTLIKIVKKTYRDFRLQGVLEGTLNSKTYDTVHRRLTVEEATASVSEGGGLQGITMKDSDEEEEG

SEQ ID NO: 13038 - protein, 260 aa, Homo sapiens
RVMAPRALLLLLSGGLALTETWACSHSMRYFDTAVSRPGRGEPRFISVGYVDDTQFVRFDSDAASPRGEPRAPWVEQEGPEYWDRETQKYKRQAQADRVSLRNLRGYYNQSEDGSHTLQRMSGCDLGPDGRLLRGYDQSAYDGKDYIALNEDLRSWTAADTAAQITQRKLEAARAAEQLRAYLEGTCVEWLRRYLENGKETLQRAEPPKTHVTHHPLSDHEASRRWNLPEVGSCGGAFWTRAEIHVPYAARGAARAPHPE

SEQ ID NO: 13039 - protein, 345 aa, Homo sapiens
MPTGHLGSPLALALLPVATNRPAVQWSCTAPQPTSLAAGTIGAARRRPMASSARRARGSRRYSWVSEEPLNYVGWQDGEPQQPGGCTYVDVDGAWRTTSCDTKLQGAVCGVSSGPPPPRRISYHGSCPQGLADSAWIPFREHCYSFHMELLLGHKEARQRCQRAGGAVLSILDEMENVFVWEHLQSYEGQSRGAWLGMNFNPKGGTLVWQDNTAVNYSNWGPPGLGPSMLSHNSCYWIQSNSGLWRPGACTNITMGVVCKLPRAEQSSFSPSALPENPAALVVVLMAVLLLLALLTAALILYRRRQSIERGAFEGARYSRSSSSPTEATEKNILVSDMEMNEQQE

SEQ ID NO: 13040 - protein, 225 aa, Homo sapiens
MASGCKIGPSILNSDLANLGAECLRMLDSGADYLHLDVMDGHFVPNITFGHPVVESLRKQLGQDPFFDMHMMVSKPEQWVKPMAVAGANQYTFHLEATENPGALIKDIRENGMKVGLAIKPGTSVEYLAPWANQIDMALVMTVEPGFGGQKFMEDMMPKVHWLRTQFPSLDIEVDGGVGPDTVHKCAEIGVQWRDLCSLQSLPAGFKRFSCLSLLSSWDYRQELT

SEQ ID NO: 13041 - protein, 364 aa, Homo sapiens
MPYQYPALTPEQKKELSDIAHRIVAPGKGILAADESTGSIAKRLQSIGTENTEENRRFYRQLLLTADDRVNPCIGGVILFHETLYQKADDGRPFPQVIKSKGGVVGIKVDKGVVPLAGTNGETTTQGLDGLSERCAQYKKDGADFAKWRCVLKIGEHTPSALAIMENANVLARYASICQQNGIVPIVEPEILPDGDHDLKRCQYVTEKVLAAVYKALSDHHIYLEGTLLKPNMVTPGHACTQKFSHEEIAMATVTALRRTVPPAVTGITFLSGGQSEEEASINLNAINKCPLLKPWALTFSYGRALQASALKAWGGKKENLKAAQEEYVKRALANSLACQGKYTPSGQAGAAASESLFVSNHAY

SEQ ID NO: 13042 - protein, 250 aa, Homo sapiens
MGSQHSAAARPSSCRRKQEDDRDGLLAEREQEEAIAQFPYVEFTGRDSITCLTCQGTGYIPTEQVNELVALIPHSDQRLRPQRTKQYVLLSILLCLLASGLVVFFLFPHSVLVDDDGIKVVKVTFNKQDSLVILTIMATLKIRNSNFYTVAVTSLSSQIQYMNTVVSTYVTTNVSLIPPRSEQLVNFTGKAEMGGPFSYVYFFCTVPEILVHNIVIFMRTSVKISYIGLMTQSSLETHHYVDCGGNSTAI

SEQ ID NO: 13043 - protein, 1299 aa, Homo sapiens [sequence omitted]

SEQ ID NO: 13044 - protein, 48 aa, Homo sapiens
MITSAAGIISLLDEDEPQLKEFALHKLNAVVNDFWAEISESVDKIKMH

SEQ ID NO: 13045 - protein, 61 aa, Homo sapiens
MTAPVPAPRILLPLLLLLLLTPPPGGLQMVPLPWSPVAQAGLKLLEGTDISWTPAAGPARG

SEQ ID NO: 13046 - protein, 395 aa, Homo sapiens
MPRYCAAICCKNRRGRNNKDRKLSFYPFPLHDKERLEKWLKNMKRDSWVPSKYQFLCSDHFTPDSLDIRWGIRYLKQTAVPTIFSLPEDNQGKDPSKKKSQKKNLEDEKEVCPKAKSEESFVLNETKKNIVNTDVPHQHPELLHSSSLVKPPAPKTGSIQNNMLTLNLVKQHTGKPESTLETSVNQDTGRGGFHTCFENLNSTTITLTTSNSESIHQSLETQEVLEVTTSHLANPNFTSNSMEIKSAQENPFLFSTINQTVEELNTNKESVIAIFVPAENSKPSVNSFISAQKETTEMEDTDIEDSLYKDVDYGTEVLQIEHSYCRQDINKEHLWQKVSKLHSKITLLELKEQQTLGRLKSLEALIRQLKQENWLSEENVKIIENHFTTYEVTMI

SEQ ID NO: 13047 - protein, 49 aa, Homo sapiens
MNLQPIFWIGLISSVCCVFAQTDENRCLKANAKSCGECIQAGPNCGWCT

SEQ ID NO: 13048 - protein, 92 aa, Homo sapiens
MLVAGLLLWASLLTGAWPSFPTQDHLPATPRVRLSFKELKATGTAHFFNFLLNTTDYRILLKDEDHDRMYVGSKDYVLSLDLHDINREPLIV

SEQ ID NO: 13049 - protein, 92 aa, Homo sapiens
MAYRGQGQKVQKVMVQPINLIFRYLQNRSRIQVWLYEQVNMRIEGCIIGFDEYMNLVLDDAEEIHSKTKSRKQLGRIMLKGDNITLLQSVSN

SEQ ID NO: 13050 - protein, 789 aa, Homo sapiens
MAAAPVAAGSGAGRGRRSAATVAAWGGWGGRPRPGNILLQLRQGQLTGRGLVRAVQFTETFLTERDKQSKWSGIPQLLLKLHTTSHLHSDFVECQNILKEISPLLSMEAMAFVTEERKLTQETTYPNTYIFDLFGGVDLLVEILMRPTISIRGQKLKISDEMSKDCLSILYNTCVCTEGVTKRLAEKNDFVIFLFTLMTSKKTFLQTATLIEDILGVKKEMIRLDEVPNLSSLVSNFDQQQLANFCRILAVTISEMDTGNDDKHTLLAKNAQQKKSLSLGPSAAEINQAALLSIPGFVERLCKLATRKVSESTGTASFLQELEEWYTWLDNALVLDALMRVANEESEHNQGASEENGLPHTSARTQLPQSMKIMHEIMYKLEVLYVLCVLLMGRQRNQVHRMIAEFKLIPGLNNLFDKLIWRKHSASALVLHGHNQNCDCSPDITLKIQFLRLLQSFSDHHENKYLLLNNQELNELSAISLKANIPEVEAVLNTDRSLVCDGKRGLLTRLLQVMKKEPAESSFRFWQARAVESFLRGTTSYADQMFLLKRGLLEHILYCIVDSECKSRDVLQSYFDLLGELMKFNVDAFKRFNKYINTDAKFQVFLKQINSSLVDSNMLVRCVTLSLDRFENQVDMKVAEVLSECRLLAYISQVPTQMSFLFRLINIIHVQTLTQENVSCLNTSLVILMLARRKERLPLYLRLLQRMEHSKKYPGFLLNNFHNLLRFWQQHYLHKDKDSTCLENSSCISFSYWKETVSILLNPDRQSPSALVSYIEEPYMDIDRDFTEE

SEQ ID NO: 13051 - protein, 106 aa, Homo sapiens
MWSWKCLLFWAVLVTATLCTARPSPTLPEQAQPWGAPVEVESFLVHPGDLLQLRCRLRDDVQSINWLRDGVQLAESNRTRITGEEVEVQDSVPADSGLYACVTSSP

SEQ ID NO: 13052 - protein, 386 aa, Homo sapiens
MKLCSLAVLVPIVLFCEQHVFAFQSGQVLAALPRTSRQVQVLQNLTTTYEIVLWQPVTADLIVKKKQVHFFVNASDVDNVKAHLNVSGIPCSVLLADVEDLIQQQISNDTVSPRASASYYEQYHSLNEIYSWIEFITERHPDMLTKIHIGSSFEKYPLYVLKVSGKEQAAKNAIWIDCGIHAREWISPAFCLWFIGHNRMWRKNRSFYANNHCIGTDLNRNFASKHWCEEGASSSSCSETYCGLYPESEPEVKAVASFLRRNINQIKAYISMHSYSQHIVFPYSYTRSKSKDHEELSLVASEAVRAIEKISKNTRYTHGHGSETLYLAPGGGDDWIYDLGIKYSFTIELRDTGTYGFLLPERYIKPTCREAFAAVSKIAWHVIRNV

SEQ ID NO: 13053 - protein, 377 aa, Homo sapiens
MADFLPSRSVLSVCFPGCLLTSGEAEQQRKSKEIDKCLSREKTYVKRLVKILLLGAGESGKSTFLKQMRIIHGQDFDQRAREEFRPTIYSNVIKGMRVLVDAREKLHIPWGDNSNQQHGDKMMSFDTRAPMAAQGMVETRVFLQYLPAIRALWADSGIQNAYDRRREFQLGESVKYFLDNLDKLGEPDYIPSQQDILLARRPTKGIHEYDFEIKNVPFKMVDVGGQRSERKRWFECFDSVTSILFLVSSSEFDQVLMEDRLTNRLTESLNIFETIVNNRVFSNVSIILFLNKTDLLEEKVQIVSIKDYFLEFEGDPHCLRDVQKFLVECFRNKRRDQQQKPLYHHFTTAINTENIRLVFRDVKDTILHDNLKQLMLQ

SEQ ID NO: 13054 - protein, 114 aa, Homo sapiens
MAPKKLSCLRSLLLPLSLTLLLPQADTRSFVVDRGHDRFLLDGAPFRYVSGSLHYFRVPRVLWADRLLKMRWSGLNAIQFYVPWNYHEPQPGVYNFNGSRDLIAFLNEAALANL

SEQ ID NO: 13055 - protein, 440 aa, Homo sapiens
MIIPSLEELDSLKYSDLQNLAKSLGLRANLRATKLLKALKGYIKHEARKGNENQDESQTSASSCDETEIQISNQEEAERQPLGHVTKTRRRCKTVRVDPDSQQNHSEIKISNPTEFQNHEKQESQDLRATAKVPSPPDEHQEAENAVSSGNRDSKVPSEGKKSLYTDESSKPGKNKRTAITTPNFKKLHEAHFKEMESIDQYIERKKKHFEEHNSMNELKQPINKGGVRTPVPPRGRLSVASTPISQRRSQGRSCGPASQSTLGLKGSLKRSAISAAKTGVRFSAATKDNEHKRSLTKTPARKSAHVTVSGGTPKGEAVLGTHKLKTITGNSAAVITPFKLTTEATQTPVSNKKPVFDLKASLSRPLNYEPHKGKLKPWGQSKENNYLNQHVNRINFYKKTYKQPHLQTKEEQRKKREQERKEKKAKVLGMRRGLILAED

SEQ ID NO: 13056 - protein, 1309 aa, Homo sapiens
MREPLPGSASWGTPGPPSAGTMSQLQLWLQFEALNKDSSYFEDFSNISIFSSSVDSLSDIVDTPDFLPADSLNQVSTIWDDNPAPSTHDKLFQLSRPFAGFEDFLPSHSTPLLVSYQEQSVQSQPEEEDEAEEEEAEELGHTETYADYVPSKSKIGKQHPDRVVETSTLSSVPPPDITYTLALPSDSGALSALQLEAITYACQQHEVLLPSGQRAGFLIGDGAGVGKGRTVAGVILENHLRGRKKALWFSVSNDLKYDAERDLRDIEATGIAVHALSKIKYGDTTTSEGVLFATYSALIGESQAGGQHRTRLRQILDWCGEAFEGVIVFDECHKAKNAGSTKMGKAVLDLQNKLPLARVVYASATGASEPRNMIYMSRLGIWGEGTPFRNFEEFLHAIEKRGVGAMEIVAMDMKVSGMYIARQLSFSGVTFRIEEIPLAPAFECVYNRAALLWAEALNVFQQAADWIGLESRKSLWGQFWSAHQRFFKYLCIAAKVRRLVELAREELARDKCVVIGLQSTGEARTREVLGENDGHLNCFVSAAEGVFLSLIQKHFPSTKRKRDRGAGSKRKRRPRGRGAKAPRLACETAGVIRISDDSSTESDPGLDSDFNSSPESLVDDDVVIVDAVGLPSDDRGPLCLLQRDPHGPGVLERVERLKQDLLDKVRRLGRELPVNTLDELIDQLGGPQRVAEMTGRKGRVVSRPDGTVAFESRAEQGLSIDHVNLREKQRFMSGEKLVAIISEASSSGVSLQADRRVQNQRRRVHMTLELPWSADRAIQQFGRTHRSNQVSAPEYVFLISELAGERRFASIVAKRLESLGALTHGDRRATESRDLSKYNFENKYGTRALHCVLTTILSQTENKVPVPQGYPGGVPTFFRDMKQGLLSVGIGGRESRNGCLDVEKDCSITKFLNRILGLEVHKQNALFQYFSDTFDHLIEMDKREGKYDMGILDLAPGIEEIYEESQQVFLAPGHPQDGQVVFYKISVDRGLKWEDAFAKSLALTGPYDGFYLSYKVRGNKPSCLLAEQNRGQFFTVYKPNIGRQSQLEALDSLRRKFHRVTAEEAKEPWESGYALSLTHCSHSAWNRHCRLAQEGKDCLQGLRLRHHYMLCGALLRVWGRIAAVMADVSSSSYLQIVRLKTKDRKKQVGIKIPEGCVRRVLQELRLMDADVKRRQAPALGCPAPPAPRPLALPCGPGEVLDLTYSPPAEAFPPPPHFSFPAPLSLDAGPGVVPLGTPDAQADPAALAHQGCDINFKEVLEDMLRSLHAGPPSEGALGEGAGAGGAAGGGPERQSVIQFSPPFPGAQAPL

SEQ ID NO: 13057 - protein, 173 aa, Homo sapiens
MGSSRLAALLLPLLLIVIDLSDSAGIGFRHLPHWNTRCPLASHTDDSFTGLQRGLFHLLVQKSKKSSTFKFYRRHKMPAPAQRKLLPRRHLSEKSHHISIPSPDISHKGLRSKRTQPSDPETWESLPRLDSQRHGGPEFSFDLLPEARAIRVTISSGPEVSVRLCHQWALECE

SEQ ID NO: 13058 - protein, 87 aa, Homo sapiens
MSPAFRAMDVEPRAKGVLLEPFVHQVGGHSCVLRFNETTLCKPLVPREHQFYETLPAEMRKFTPQYKGDISSHQHGGVFVGEWGSLL

SEQ ID NO: 13059 - protein, 374 aa, Homo sapiens
MAAQRGMPSSAVRVLEEALGMGLTAAGDARDTADAVAAEGAYYLEQVTITEASEDDYEYEEIPDDNFSIPEGEEDLAKAIQMAQEQATDTEILERKTVLPSKHAVPEVIEDFLCNFLIKMGMTRTLDCFQSEWYELIQKGVTELRTVGNVPDVYTQIMLLENENKNLKKDLKHYKQAADKAREDLLKIQKERDFHRMHHKRIVQEKNKLINDLKGLKLHYASYEPTIRVLHEKHHTLLKEKMLTSLERDKVVGQISGLQETLKKLQRGHSYHGPQIKVDHSREKENAPEGPTQKGLREAREQNKCKTKMKGNTKVMRRREELWPFREPRPRSSTSQCCDTLFGAVQFQMFPSIQTPLNSHPDLGAHSRSCLECI

SEQ ID NO: 13060 - protein, 412 aa, Homo sapiens
MAFWCQRDSYAREFTTTVVSCCPAELQTEGSNGKKEVLSGFQVVLEDTVLFPEGGGQPDDRGTINDISVLRVTRRGEQADHFTQTPLDPGSQVLVRVDWERRFDHMQQHSGQHLITAVADHLFKLKTTSWELGRFRSAIELDTPSMTAEQVAAIEQSVNEKIRDRLPVNVRELSLDDPEVEQVSGRGLPDDHAGPIRVVNIEGVDSNMCCGTHVSNLSDLQVIKILGTEKGKKNRTNLIFLSGNRVLKWMERSHGTEKALTALLKCGAEDHVEAVKKLQNSTKILQKNNLNLLRDLAVHIAHSLRNSPDWGGVVILHRKEGDSEFMNIIANEIGSEETLLFLTVGDEKGGGLFLLAGPPASVETLGPRVAEVLEGKGAGKKGRFQGKATKMSRRMEAQALLQDYISTQSAKE

SEQ ID NO: 13061 - protein, 700 aa, Homo sapiens
MTTFKEGLTFKDVAVVFTEEELGLLDPVQRNLYQDVMLENFRNLLSVGHHPFKHDVFLLEKEKKLDIMKTATQRKGKSADKIQSEVETVPEAGRHEELYWGQIWKQIASDLIKYEDSMISISRFPRQGDLSCQVRAGLYTTHTGQKFYQCDEYKKSFTDVFNFDLHQQLHSGEKSHTCDECGKSFCYISALHIHQRVHMGEKCYKCDVCGKEFSQSSHLQTHQRVHTVEKPFKCVECGKGFSRRSTLTVHCKLHSGEKPYNCEECGRAFIHASHLQEHQRIHTGEKPFKCDTCGKNFRRRSALNNHCMVHTGEKPYKCEDCGKCFTCSSNLRIHQRVHTGEKPYKCEECGKCFIQPSQFQAHRRIHTGEKPYVCKVCGKGFIYSSSFQAHQGVHTGEKPYKCNECGKSFRMKIHYQVHLVVHTGEKPYKCEVCGKAFRQSSYLKIHLKAHSVQKPFKCEECGQGFNQSSRLQIHQLIHTGEKPYKCEECGKGFSRRADLKIHCRIHTGEKPYNCEECGKVFSQASHLLTHQRVHSGEKPFKCEECGKSFSRSAHLQAHQKVHTGEKPYKCGECGKGFKWSLNLDMHQRVHTGEKPYTCGECGKHFSQASSLQLHQSVHTGEKPYKCDVCGKVFSRSSQLQYHRRVHTGEKPYKCEICGKRFSWRSNLVSHHKIHAAGTFYENDENSKNIRELSEGGSSTR

SEQ ID NO: 13062 - protein, 74 aa, Homo sapiens
MAGVVHVSLAALLLLPMAPAMHSDCIFKKEQAMCLEKIQRANELMGFNDSSPGCPGMWDNITCWKPAHVGEMVL

SEQ ID NO: 13063 - protein, 2344 aa, Homo sapiens
MIPWSIFLLHVLLFSLQEYICASSILMGTSKNGFNENRQKRALLAAQFEATSPRYFFHDAINWGESKIKGSCPYECLNGAFCSKTGTCDCQIFQALGTRCQIIPNMGNGRDGICKTWGQYHFETFDGIYYYFPGNCSYIFAKDCGDLEPRYTVWVHNSPKCLGSVYSCYRSISLFFSNQEEIRIYGHEIKKNGISLTLPQTIGQIFIEKLADYILVKTTFGFSLAWDGISGIYLKLSEDHKGKSCGLCGNYNDIQSDDFIILQEDYTEDIAMFANSWSVQTPDDTKCVLTPSDFPNPCSSGMPAFEAIFFKCQILLQFPFLSCHEYIDPYLYIASCVNDLCKTDDDETYCRAATEYARACSHAGYPIQDWRDDFPACTDKCDDSFVHRDCISCCPPTCTFEKQCLGSNLHCLDGCYCPDGLVMDNGTCISLENCPCGFHGLAYSVGSKIEQECTECVCVGGVWNCTEQDCPVQCSVVGDSHFTTFDGRHYSFIGMCQYILVKGTGKDKFTITLQKAPCEQNLGLVCLQSITLILEDDFNKQVTLGRGGQILTSPNQGFNLNGIVEIQTLSSLFILLKTTFGLKILFAIDGERIYIQLTSAWKRRTLGLCGTFNGNIRDDFLSPSGMIEGTPQLHANAWRVSSTCFAPVHVPVVDPCNINQQNIGYAAHCDVIHQELFAPCHIYISPGLYYQLCRHDACKCGSSCLCNALAHYAYLCGQHGVPIDFRTQISFCAVVCQKGMLYHHCSSFCLHSCISLSSPEQCSDDCAEGCNCPEGKFYEDTLNFCVPIFHCRCHYRGSVYQPGELIPTPSGLCQCSNGTVKCDELATPSAVHICPEGKEYFDCRFPDPELPAGGVNCETTCANLAMNFTCTPSSPCISGCVCAPGMAEHRGKCYVPESCPCIWKDWEYLSGEVIATPCYTCVCRRGMFNCTYYPCPAVCTIYGDRHYYSFDGLEYDYISDCQVFLIKSADDSDISVIAQNKKCFDNDIVCSKSVLISVGDTEIYLNDTPYKQKQSGFFLENKSTYQLWKAGYYIVVYFPEKDITILWDRKTTIHIKVGPQWKNKLSGLCGNFDKCTSNDMTTSNNLEVRNARVFGDSWALGQCESPDETIKPCEAHQNKFPYAKKECSILYSDIFASCRNVIDVTSFAKNCHEDTCNCNLGGDCECLCTSIAAYAYKCCQEGISIHWRSSTVCSLDCEYYNEGLGEGPYMLASYGQSGLVLGANMTSRSVFCLPRSSVHTSLFFYFMITPGLFKEKVSSLALVSLESAERPNYFLYVHDNDTLSLELWEANSAFHRRATFFHHQGLWIPGYSAFELYSKKGFFIIFTDSSVKASKYDDSEEFKHSSSFSIEEIQAAVPYRKMCEWRYEPCATPCFKTCSDPEALACKFLPPVEGCLPYCPKNMILDEVTLKCVYPRDCIPVIPTEPTLMPPAKPTVPMFTVWEMITPSDITVFDMLTPTTGLECEPQKFDPVYDCSQYICLNMEWQLYNWSLNCPKDVEMPDCGFRGRPVQVNSDICCPEWECPCRCSMLSELSIITFDGNNAALYSMASYILVRIPGEIIVAHIEKCSMNQNGNSLKKLAPSGRISGLCFKKLNVTTPIHKIIVNRLARKVEVDSIVVPLPFSSQELSIEDSGSMYVITTPAGLIIKWSHLTGIIDIHFGFRFNLSSYTEGLCGICNEDPDDDLRMQNGTIITNMEDIGLFIESWEIEKSFEVTMRRPVRNCTEHDCSQCIDLLNRRIFIPCHDKVSPEDFCEKMWINYTYFWNYECDALSAYVALCNKFDICIQWRTPDYCSLSCPEGKEYQPCVRPCEARTCLNQWFYGHTSCLNLREDCVCKVGTILHRPHSAQCIPEKECACTDSEDQPRTAGEIWNGGIDECTLYKCLENGSIIPIEPDCDEEPTPVCEREAEVVMGIIDKWTCCSKEVCGCDTTLCETSIPTCTNSQKLIVGHSPLSCCPQYKCECDPLKCPSISTPECREDQFMIQVRQEEPCCFSPFCVCESCTKPVPLCHDGEFLTVDLNSTHFCCPQYYCVCEPNLCPMPLLNCAEDMNLVKENVSGQCCPTWHCECNCENLIMPTCEVGEFTAIDHNFQSDCGCIQYLCEKDDVCVFQEVSVLNPGQSMIKYLEEDFCYAIECLEEKDNHTGFHTLNFTLVNCSKKCDVHQVYTPSPSDYGCCGTCKNVSCKFHMENGTSVVYAVGSTWHYNCTTYECVKTDEGAIILNYTMVCPPFNETECKMNEGIVKLYNEGCCKICKREERICQKVIIKSVIRKQDCMSQSPINVASCDGKCPSATIYNINIESHLRFCKCCRENGVRNLSVPLYCSGNGTEIMYTLQEPIDCTCQWN

SEQ ID NO: 13064 - protein, 301 aa, Homo sapiens
MARHGLPLLPLLSLLVGAWLKLGNGQATSMVQLQGGRFLMGTNSPDSRDGDGPVREATVKPFAIDIFPVTNKDFRDFVREKKYRTEAEMFGWSFVFEDFVSDELRNKATQPMKSVLWWLPVEKAFWRQPAGPGSGIRERLEHPVLHVSWNDARAYCAWRGKRLPTEEEWEFAARGGLKGQVYPWGNWFQPNRTNLWQGKFPKGDKAEDGFHGVSPVNAFPAQNNYGLYDLLGNVWEWTASPYQAAEQDMRVLRGASWIDTADGSANHRARVTTRMGNTPDSASDNLGFRCAADAGRPPGEL

SEQ ID NO: 13065 - protein, 316 aa, Homo sapiens
MRAHAGHKRSECGGEWRETPRKQKQHGKASISPSSGARRTVTPTRKRPYECKVCGKAFNSPNLFQIHQRTHTGKRSYKCREIVRAFTVSSFFRKHGKMHTGEKRYECKYCGKPIDYPSLFQIHVRTHTGEKPYKCKQCGKAFISAGYLRTHEIRSHALEKSHQCQECGKKLSCSSSLHRHERTHSGGKLYECQKCAKVFRCPTSLQAHERAHTGERPYECNKCGKTFNYPSCFRRHKKTHSGEKPYECTRCGKAFGWCSSLRRHEMTHTGEKPFDCKQCGKVFTFSNYLRLHERTHLAGRSQCFGRRQGDHLSPGV

SEQ ID NO: 13066 - protein, 527 aa, Homo sapiens
MGTARIAPGLALLLCCPVLSSAYALVDADDVMTKEEQIFLLHRAQAQCEKRLKEVLQRPASIMESDKGWTSASTSGKPRKDKASGKLYPESEEDKEAPTGSRYRGRPCLPEWDHILCWPLGAPGEVVAVPCPDYIYDFNHKGHAYRRCDRNGSWELVPGHNRTWANYSECVKFLTNETREREVFDRLGMIYTVGYSVSLASLTVAVLILAYFRRLHCTRNYIHMHLFLSFMLRAVSIFVKDAVLYSGATLDEAERLTEEELRAIAQAPPPPATAAAGYAGCRVAVTFFLYFLATNYYWILVEGLYLHSLIFMAFFSEKKYLWGFTVFGWGLPAVFVAVWVSVRATLANTGCWDLSSGNKKWIIQVPILASIVLNFILFINIVRVLATKLRETNAGRCDTRQQYRKLLKSTLVLMPLFGVHYIVFMATPYTEVSGTLWQVQMHYEMLFNSFQGFFVAIIYCFCNGEVQAEIKKSWSRWTLALDFKRKARSGSSSYSYGPMVSHTSVTNVGPRVGLGLPLSPRLLPTAT

SEQ ID NO: 13067 - protein, 88 aa, Homo sapiens
MAAPALSWRLPLLILLLPLATSWASAAVNGTSQFTCFYNSRANISCVWSQDGALQDTSCQVHAWPDRRRWNQTCELLPVSQASWACNL

SEQ ID NO: 13068 - protein, 212 aa, Homo sapiens
MKATIILLLLAQVSWAGPFQQRGLFDFMLEDEASGIGPEVPDDRDFEPSLGPVCPFRCQCHLRVVQCSDLGLPPSLTELHLDGNKISRVDAASLKGLNNLAKLGLSFNSISAVDNGSLANTPHLRELHLDNNKLTRVPGGLAEHKYIQVVYLHNNNISVVGSSDFCPPGHNTKKASYSGVSLFSNPVQYWEIQPSTFRCVYVRSAIQLGNYK

SEQ ID NO: 13069 - protein, 534 aa, Homo sapiens
MSLSRSEEMHRLTENVYKTIMEQFNPSLRNFIAMGKNYEKALAGVTYAAKGYFDALVKMGELASESQGSKELGDVLFQMAEVHRQIQNQLEEMLKSFHNELLTQLEQKVELDSRYLSAALKKYQTEQRSKGDALDKCQAELKKLRKKSQGSKNPQKYSDKELQYIDAISNKQGELENYVSDGYKTALTEERRRFCFLVEKQCAVAKNSAAYHSKGKELLAQKLPLWQQACADPSKIPERAVQLMQQVASNGATLPSALSASKSNLVISDPIPGAKPLPVPPELAPFVGRMSAQESTPIMNGVTGPDGEDYSPWADRKAAQPKSLSPPQSQSKLSDSYSNTLPVRKSVTPKNSYATTENKTLPRSSSMAAGLERNGRMRVKAIFSHAAGDNSTLLSFKEGDLITLLVPEARDGWHYGESEKTKMRGWFPFSYTRVLDSDGSDRLHMSLQQGKSSSTGNLLDKDDLAIPPPDYGAASRAFPAQTASGFKQRPYSVAVPAFSQGLDDYGARSMSRNPFAHVQLKPTVTNDRSAPLLS

SEQ ID NO: 13070 - protein, 38 aa, Homo sapiens
MNKILSSTVCFGLLTLLSVLSFLQSVHGRPYLTQGNEI

SEQ ID NO: 13071 - protein, 19 aa, Homo sapiens
MASCLALRMALLLVSGVLA

SEQ ID NO: 13072 - protein, 416 aa, Homo sapiens
MPVPWFLLSLALGRSPVVLSLERLVGPQDATHCSPGLSCRLWDSDILCLPGDIVPAPGPVLAPTHLQTELVLRCQKETDCDLCLRVAVHLAVHASLQAQVVLSFQAYPTARCVLLEVQVPAALVQFGQSVGSVVYDCFEAALGSEVRIWSYTQPRYEKELNHTQQLPDCRGLEVWNSIPSCWALPWLNVSADGDNVHLVLNVSEEQHFGLSLYWNQVQGPPKPRWHKNLTGPQIITLNHTDLVPCLCIQVWPLEPDSVRTNICPFREDPRAHQNLWQAARLQLLTLQSWLLDAPCSLPAEAALCWRAPGGDPCQPLVPPLSWENVTVDKVLEFPLLKGHPNLCVQVNSSEKLQLQECLWADSLGPLKDDVLLLETRGPQDNRSLCALEPSGCTSLPSKASTRAARLGEYLLQDLQS

SEQ ID NO: 13073 - protein, 381 aa, Homo sapiens
MSCLHPRQTWKGAALVHRKAWWMGRSLDGRLQVSHRKGLPHVIYCRLWRWPDLHSHHELRAMELCEFAFNMKKDEVCVNPYHYQRVETPVLPPVLVPRHTEIPAEFPPLDDYSHSIPENTNFPAGIEPQSNIPETPPPGYLSEDGETSDHQMNHSMDAGSPNLSPNPMSPAHNNLDLQPVTYCEPAFWCSISYYELNQRVGETFHASQPSMTVDGFTDPSNSERFCLGLLSNVNRNAAVELTRRHIGRGVRLYYIGGEVFAECLSDSAIFVQSPNCNQRYGWHPATVCKIPPGCNLKIFNNQEFAALLAQSVNQGFEAVYQLTRMCTIRMSFVKGWGAEYRRQTVTSTPCWIELHLNGPLQWLDKVLTQMGSPSIRCSSVS

SEQ ID NO: 13074 - protein, 48 aa, Homo sapiens
MRLSVRRVLLAAGCALVLVLAVQLGQQVLECRAVLAGLRSPRGAMRPE

SEQ ID NO: 13075 - protein, 185 aa, Homo sapiens
MECCRRATPGTLLLFLAFLLLSSRTARSEEDRDGLWDAWGPWSECSRTCGGGASYSLRRCLSSKSCEGRNIRYRTCSNVDCPPEAGDFRAQQCSAHNDVKHHGQFYEWLPVSNDPDNPCSLKCQAKGTTLVVELAPKVLDGTRCYTESLDMCISGLCQVSADLFSFNLSRGFQCLCVNGLHSLTL

SEQ ID NO: 13076 - protein, 86 aa, Homo sapiens
MVDGVMILPVLIMIALPSPSMEDEKPKVNPKLYMCVCEGLSCGNEDHCEGQQCFSSLSINDGFHVYQKGCFQVYEQGKMTCKTPPS

SEQ ID NO: 13077 - protein, 1419 aa, Homo sapiens
MSGGASATGPRRGPPGLEDTTSKKKQKDRANQESKDGDPRKETGSRYVAQAGLEPLASGDPSASASHAAGITGSRHRTRLFFPSSSGSASTPQEEQTKEGACEDPHDLLATPTPELLLDWRQSAEEVIVKLRVGVGPLQLEDVDAAFTDTDCVVRFAGGQQWGGVFYAEIKSSCAKVQTRKGSLLHLTLPKKVPMLTWPSLLKKPLGTQELVPGLRCQENGQELSPIALEPGPEPHRAKQEARNQKRAQGRGEVGAGAGPGAQAGPSAKRAVHLCRGPEGDGSRDDPGPRGDAPPFVADPATQVEADEQLCIPPLNSQTCLLGSEENLAPLAGEKAVPPGNDPVSPAMVRSRNPGKDDCAKEEMAVAADAATLVDEPESMVNLAFVKNDSYEKGPDSVVVHVYVKEICRDTSRVLFREQDFTLIFQTRDGNFLRLHPGCGPHTTFRWQVKLRNLIEPEQCTFCFTASRIDICLRKRQSQRWGGLEAPAARVGGAKVAVPTGPTPLDSTPPGGAPHPLTGQEEARAVEKDKSKARSEDTGLDSVATRTPMEHVTPKPETHLASPKPTCMVPPMPHSPVSGDSVEEEEEEEKKVCLPGFTGLVNLGNTCFMNSVIQSLSNTRELRDFFHDRSFEAEINYNNPLGTGGRLAIGFAVLLRALWKGTHHAFQPSKLKAIVASKASQFTGYAQHDAQEFMAFLLDGLHEDLNRIQNKPYTETVDSDGRPDEVVAEEAWQRHKMRNDSFIVDLFQGQYKSKLVCPVCAKVSITFDPFLYLPVPLPQKQKVLPVFYFAREPHSKPIKFLVSVSKENSTASEVLDSLSQSVHVKPENLRLAEVIKNRFHRVFLPSHSLDTVSPSDTLLCFELLSSELAKERVVVLEVQQRPQVPSVPISKCAACQRKQQSEDEKLKRCTRCYRVGYCNQLCQKTHWPDHKGLCRPENIGYPFLVSVPASRLTYARLAQLLEGYARYSVSVFQPPFQPGRMALESQSPGCTTLLSTGSLEAGDSERDPIQPPELQLVTPMAEGDTGLPRVWAAPDRGPVPSTSGISSEMLASGPIEVGSLPAGERVSRPEAAVPGYQHPSEAMNAHTPQFFIYKIDSSNREQRLEDKGDTPLELGDDCSLALVWRNNERLQEFVLVASKELECAEDPGSAGEAARAGHFTLDQCLNLFTRPEVLAPEEAWYCPQCKQHREASKQLLLWRLPNVLIVQLKRFSFRSFIWRDKINDLVEFPVRNLDLSKFCIGQKEEQLPSYDLYAVINHYGGMIGGHYTACARLPNDRSSQRSDVGWRLFDDSTVTTVDESQVVTRYAYVLFYRRRNSPVERPPRAGHSEHHPDLGPAAEAAASQASRIWQELEAEEEPVPEGSGPLGPWGPQDWVGPLPRGPTTPDEGCLRYFVLGTVAALVALVLNVFYPLVSQSRWR

SEQ ID NO: 13078 - protein, 597 aa, Homo sapiens
MALNSPQPGPVESELGKQLLKTGWEGSPLPRSPTQDAAGVGPPASQGRGPAGEPMGPEAGSKAELPPTVSRPPLLRGLSWDSGPEEPGPRLQKVLAKLPLAEEEKRFAGKAGGKLAKAPGLKDFQIQVQPVRMQKLTKLREEHILMRNQNLVGLKLPDLSEAAEQEKGLPSELSPAIEEEESKSGLDVMPNISDVLLRKLRVHRSLPGSAPPLTEKEVENVFVQLSLAFRNDSYTLESRINQAERERNLTEENTEKELENFKASITSSASLWHHCEHRETYQKLLEDIAVLHRLAARLSSRAEVVGAVRQEKRMSKATEVMMQYVENLKRTYEKDHAELMEFKKLANQNSSRSCGPSEDGVPRTARSMSLTLGKNMPRRRVSVAVVPKFNALNLPGQTPSSSSIPSLPALSESPNGKGSLPVTSALPALLENGKTNGDPDCEASAPALTLSCLEELSQETKARMEEEAYSKGFQEGLKKTKELQDLKEEEEEQKSESPEEPEEVEETEEEEKGPRSSKLEELVHFLQVMYPKLCQHWQVIWMMAAVMLVLTVVLGLYNSYNSCAEQADGPLGRSTCSAAQRDSWWSSGLQHEQPTEQ

SEQ ID NO: 13079 - protein, 406 aa, Homo sapiens
MSLVELLLWWNCFSRTGVAASLEVSESPGSIQVARGQPAVLPCTFTTSAALINLNVIWMVTPLSNANQPEQVILYQGGQMFDGAPRFHGRVGFTGTMPATNVSIFINNTQLSDTGTYQCLVNNLPDIGGRNIGVTGLTVLVPPSAPHCQIQGSQDIGSDVILLCSSEEGIPRPTYLWEKLDNTLKLPPTATQDQVQGTVTIRNISALSSAQPRNIGLIAGAIGTGAVIIIFCIALILGAFFYWRSKNKEEEEEEIPNEIREDDLPPKCSSAKAFHTEISSSDNNTLTSSNAYNSRYWSNNPKVHRNTESVSHFSDLGQSFSFHSGNANIPSIYANGTHLVPGQHKTLVVTANRGSSPQVMSRSNGSVSRKPRPPHTHSYTISHATLERIGAVPVMVPAQSRAGSLV

SEQ ID NO: 13080 - protein, 99 aa, Homo sapiens
MRGPSGPPGLLYVPHLLLCLLCLLPPPLQYAAGQSQMPKDQPLWALLEQYCHTIMTLTNLSVTPGAHSHSLSARGCGTRWTRHCSTACWRPTAAWRWLK

SEQ ID NO: 13081 - protein, 41 aa, Homo sapiens
MPGFLVRILPLLLVLLLLGPTRGLRITWQLWTSGWESFCPR

SEQ ID NO: 13082 - protein, 491 aa, Homo sapiens
MDHTDNELQGTNSSGSLGGLDVRRRIPIKLISKQANKAKPAPRTQRTINRMPAKAPPGDEEGFDYNEEERYDCKGGELFANQRRFPGHLFWDFQINILGEKDDTPVHFCDKCGLPIKIYGRMIPCKHVFCYDCAILHEKKGDKMCPGCSDPVQRIEQCTRGSLFMCSIVQGCKRTYLSQRDLQAHINHRHMRAGKPVTRASLENVHPPIAPPPTEIPERFIMPPDKHHMSHIPPKQHIMMPPPPLQHVPHEHYNQPHEDIRAPPAELSMAPPPPRSVSQETFRISTRKHSNLITVPIQDDSNSGAREPPPPAPAPAHHHPEYQGQPVVSHPHHIMPPQQHYAPPPPPPPPISHPMPHPPQAAGTPHLVYSQAPPPPMTSAPPPITPPPGHIIAQMPPYMNHPPPGPPPPQHGGPPVTAPPPHHYNPNSLPQFTEDQGTLSPPFTQPGGMSPGIWPAPRGPPPPPRLQGPPSQTPLPGPHHPDQTRYRPYYQ

SEQ ID NO: 13083 - protein, 301 aa, Homo sapiens
MIREKNPDGFLSAAEMPLFKLYMVMSACFLAAGIFWVSILCRNTYSVFKIHWLMAALAFTKSISLLFHSINYYFINSQGHPIEGLAVMYYIAHLLKGALLFITIALIGSGWAFIKYVLSDKEKKVFGIVIPMQVLANVAYIIIESREEGASDYVLWKEILFLVDLICCGAILFPVVWSIRHLQDASGTDGKVAVNLAKLKLFRHYYVMVICYVYFTRIIAILLQVAVPFQWQWLYQLLVEGSTLAFFVLTGYKFQPTGNNPYLQLPQEDEEDVQMEQVMTDSGFREGLSKVNKTASGRELL

SEQ ID NO: 13084 - protein, 584 aa, Homo sapiens
MDLLPPKPKYNPLRNESLSSLEEGASGSTPPEELPSPSASSLGPILPPLPGDDSPTTLCSFFPRMSNLRLANPAGGRPGSKGEPGRAADDGEGIVGAAMPDSGPLPLLQDMNKLSGGGGRRTRVEGGQLGGEEWTRHGSFVNKPTRGWLHPNDKVMGPGVSYLVRYMGCVEVLQSMRALDFNTRTQVTREAISLVCEAVPGAKGATRRRKPCSRPLSSILGRSNLKFAGMPITLTVSTSSLNLMAADCKQIIANHHMQSISFASGGDPDTAEYVAYVAKDPVNQRACHILECPEGLAQDVISTIGQAFELRFKQYLRNPPKLVTPHDRMAGFDGSAWDEEEEEPPDHQYYNDFPGKEPPLGGVVDMRLREGAAPGAARPTAPNAQTPSHLGATLPVGQPVGGDPEVRKQMPPPPPCPAGRELFDDPSYVNVQNLDKARQAVGGAGPPNPAINGSAPRDLFDMKPFEDALRVPPPPQSVSMAEQLRGEPWFHGKLSRREAEALLQLNGDFLVRESTTTPGQYVLTGLQSGQPKHLLLVDPEGVVRTKDHRFESVSHLISYHMDNHLPIISAGSELCLQQPVERKL

SEQ ID NO: 13085 - protein, 328 aa, Homo sapiens
MGPAGCAFTLLLLLGISVCGQPVYSSRVVGGQDAAAGRWPWQVSLHFDHNFICGGSLVSERLILTAAHCIQPTWTTFSYTVWLGSITVGDSRKRVKYYVSKIVIHPKYQDTTADVALLKLSSQVTFTSAILPICLPSVTKQLAIPPFCWVTGWGKVKESSDRDYHSALQEAEVPIIDRQACEQLYNPIGIFLPALEPVIKEDKICAGDTQNMKDSCKGDSGGPLSCHIDGVWIQTGVVSWGLECGKSLPGVYTNVIYYQKWINATISRANNLDFSDFLFPIVLLSLALLRPSCAFGPNTIHRVGTVAEAVACIQGWEENAWRFSPRGR

SEQ ID NO: 13086 - protein, 771 aa, Homo sapiens
MGRAGTGTGGEAVAAVVAGPLLLLLLARPPPASAGYSGKSEVGLVSEHFSQAPQRLSFYSWYGSARLFRFRVPPDAVLLRWLLQVSRESGAACTDAEITVHFRSGAPPVINPLGTSFPDDTAVQPSFQVGVPLSTTPRSNASVNVSHPAPGDWFVAAHLPPSSQKIELKGLAPTCAYVFQPELLVTRVVEISIMEPDVPLPQTLLSHPSYLKVFVPDYTRELLLELRDCVSNGSLGCPVRLTVGPVTLPSNFQKVLTCTGAPWPCRLLLPSPPWDRWLQVTAESLVGPLGTVAFSAVAALTACRPRSVTIQPLLQSSQNQSFNASSGLLSPSPDHQDLGRSGRVDRSPFCLTNYPVTREDMDVVSVHFQPLDRVSVRVCSDTPSVMRLRLNTGMDSGGSLTISLRANKTEMRNETVVVACVNAASPFLGFNTSLNCTTAFFQGYPLSLSAWSRRANLIIPYPETDNWYLSLQLMCPENAEDCEQAVVHVETTLYLVPCLNDCGPYGQCLLLRRHSYLYASCSCKAGWRGWSCTDNSTAQTVAQQRAATLLLTLSNLMFLAPIAVSVRRFFLVEASVYAYTMFFSTFYHACDQPGEAVLCILSYDTLQYCDFLGSGAAIWVTILCMARLKTVLKYVLFLLGTLVIAMSLQLDRRGMWNMLGPCLFAFVIMASMWAYRCGHRRQCYPTSWQRWAFYLLPGVSMASVGIAIYTSMMTSDNYYYTHSIWHILLAGSAALLLPPPDQPAEPWACSQKFPCHYQICKNDREELYAVT

SEQ ID NO: 13087 - protein, 281 aa, Homo sapiens
MILTKAQYDEIAQCLVSVPPTRQSLRKLKQRFPSQSQATLLSIFSQEYQKHIKRTHAKHHTSEAIESYYQRYLNGVVKNGAAPVLLDLANEVDYAPSLMARLILERFLQEHEETPPSKSIINSMLRDPSQIPDGVLANQVYQCIVNDCCYGPLVDCIKHAIGHEHEVLLRDLLLEKNLSFLDEDQLRAKGYDKTPDFILQVPVAVEGHIIHWIESKASFGDECSHHAYLHDQFWSYWNRFGPGLVIYWYGFIQELDCNRERGILLKACFPTNIVTLCHSIA

SEQ ID NO: 13088 - protein, 67 aa, Homo sapiens
MDHTDNELQGTNSSGSLGGLDVRRRIPIKLISKQANKAKPAPRTQRTINRMPAKAPPGDEVLGPKES

SEQ ID NO: 13089 - protein, 74 aa, Homo sapiens
MWRSRWDASVLKAEALALLPCGLGMAFSQSHVMAARRHQHSRLIIEVDEYSSNPTQAFTFYNINQGRFQPPHVQ

SEQ ID NO: 13090 - protein, 118 aa, Homo sapiens
MRMSVGLSLLLPLSGRTFLLLLSVVMAQSHWPSEPSEAVRDWENQLEASMHSVLSDLHEAVPTVVGIPDGTAVVGRSFRVTIPTDLIASSGDIIKVSAAGKEALPSWLHWDSQSHTLE

SEQ ID NO: 13091 - protein, 321 aa, Homo sapiens
MALPALGLDPWSLLGLFLFQLLQLLLPTTTAGGGGQGPMPRVRYYAGDERRALSFFHQKGLQDFDTLLLSGDGNTLYVGAREAILALDIQDPGVPRLKNMIPWPASDRKKSECAFKKKSNETQCFNFIRVLVSYNVTHLYTCGTFAFSPACTFIELQDSYLLPISEDKVMEGKGQSPFDPAHKHTAVLVDGMLYSGTMNNFLGSEPILMRTLGSQPVLKTDNFLRWLHHDASFVAAIPSTQVVYFFFEETASEFDFFERLHTSRVARVCKNDVGGEKLLQKKWTTFLKAQLLCTQPGQLPFNVIRHAVLLPADSPTAPHIY

SEQ ID NO: 13092 - protein, 178 aa, Homo sapiens
METFPLLLLSLGLVLAEASESTMKIIKEEFTDEEMQYDMAKSGQEKQTIEILMNPILLVKNTSLSMSKDDMSSTLLTFRSLHYNDPKGNSSGNDKECCNDMTVWRKVSEANGSCKWSNNFIRSSTEVMRRVHRAPSCKFVQNPGISCCESLELENTVCQFTTGKQFPRCQYHSVTSLE

SEQ ID NO: 13093 - protein, 185 aa, Homo sapiens
MGPAGCAFTLLLLLGISDRDYHSALQEAEVPIIDRQACEQLYNPIGIFLPALEPVIKEDKICAGDTQNMKDSCKGDSGGPLSCHIDGVWIQTGVVSWGLECGKSLPGVYTNVIYYQKWINATISRANNLDFSDFLFPIVLLSLALLRPSCAFGPNTIHRVGTVAEAVACIQGWEENAWRFSPRGR

SEQ ID NO: 13094 - protein, 832 aa, Homo sapiens
MMEEEELEFVEELEAVLQLTPEVQLAIEQVFPSQDPLDRADFNAVEYINTLFPTEQSLANIDEVVNKIRLKIRRLDDNIRTVVRGQTNVGQDGRQALEEAQKAIQQLFGKIKDIKDKAEKSEQMVKEITRDIKQLDHAKRHLTTSITTLNHLHMLAGGVDSLEAMTRRRQYGEVANLLQGVMNVLEHFHKYMGIPQIRQLSERVKAAQTELGQQILADFEEAFPSQGTKRPGGPSNVLRDACLVANILDPRIKQEIIKKFIKQHLSEYLVLFQENQDVAWLDKIDRRYAWIKRQLVDYEEKYGRMFPREWCMAERIAVEFCHVTRAELAKIMRTRAKEIEVKLLLFAIQRTTNFEGFLAKRFSGCTLTDGTLKKLESPPPSTNPFLEDEPTPEMEELATEKGDLDQPKKPKAPDNPFHGIVSKCFEPHLYVYIESQDKNLGELIDRFVADFKAQGPPKPNTDEGGAVLPSCADLFVYYKKCMVQCSQLSTGEPMIALTTIFQKYLREYAWKILSGNLPKTTTSSGGLTISSLLKEKEGSEVAKFTLEELCLICNILSTAEYCLATTQQLEEKLKEKVDVSLIERINLTGEMDTFSTVISSSIQLLVQDLDAACDPALTAMSKMQWQNVEHVGDQSPYVTSVILHIKQNVPIIRDNLASTRKYFTQFCVKFANSFIPKFITHLFKCKPISMVGAEQLLLDTHSLKMVLLDLPSISSQVVRKAPASYTKIVVKGMTRAEMILKVVMAPHEPLVVFVDNYIKLLTDCNTETFQKILDMKGLKRSEQSSMLELLRQRLPAPPSGAESSGSLSLTAPTPEQESSRIRKLEKLIKKRL

SEQ ID NO: 13095 - protein, 456 aa, Homo sapiens
MEGSWFHRKRFSFYLLLGFLLQGRGVTFTINCSGFGQHGADPTALNSVFNRKPFRPVTNISVPTQVNISFAMSAILDVNEQLHLLSSFLWLEMVWDNPFISWNPEECEGITKMSMAAKNLWLPDIFIIELMDVDKTPKGLTAYVSNEGRIRYKKPMKVDSICNLDIFYFPFDQQNCTLTFSSFLYTVDSMLLDMEKEVWEITDASRNILQTHGEWELLGLSKATAKLSRGGNLYDQIVFYVAIRRRPSLYVINLLVPSGFLVAIDALSFYLPVKSGNRVPFKITLLLGYNVFLLMMSDLLPTSGTPLIGVYFALCLSLMVGSLLETIFITHLLHVATTQPPPLPRWLHSLLLHCNSPGRCCPTAPQKENKGPGLTPTHLPGVKEPEVSAGQMPGPAEAELTGGSEWTRAQREHEAQKQHSVELWLQFSHAMDAMLFRLYLLFMASSIITVICLWNT

SEQ ID NO: 13096 - protein, 977 aa, Homo sapiens
MPARRLLLLLTLLLPGLGIFGSTSTVTLPETLLFVSTLDGSLHAVSKRTGSIKWTLKEDPVLQVPTHVEEPAFLPDPNDGSLYTLGSKNNEGLTKLPFTIPELVQASPCRSSDGILYMGKKQDIWYVIDLLTGEKQQTLSSAFADSLCPSTSLLYLGRTEYTITMYDTKTRELRWNATYFDYAASLPEDDVDYKMSHFVSNGDGLVVTVDSESGDVLWIQNYASPVVAFYVWQREGLRKVMHINVAVETLRYLTFMSGEVGRITKWKYPFPKETEAKSKLTPTLYVGKYSTSLYASPSMVHEGVAVVPRGSTLPLLEGPQTDGVTIGDKGECVITPSTDVKFDPGLKSKNKLNYLRNYWLLIGHHETPLSASTKMLERFPNNLPKHRENVIPADSEKKSFEEVINLVDQTSENAPTTVSRDVEEKPAHAPARPEAPVDSMLKDMATIILSTFLLIGWVAFIITYPLSMHQQQQLQHQQFQKELEKIQLLQQQQQQLPFHPPGDTAQDGELLDTSGPYSESSGTSSPSTSPRASNHSLCSGSSASKAGSSPSLEQDDGDEETSVVIVGKISFCPKDVLGHGAEGTIVYRGMFDNRDVAVKRILPECFSFADREVQLLRESDEHPNVIRYFCTEKDRQFQYIAIELCAATLQEYVEQKDFAHLGLEPITLLQQTTSGLAHLHSLNIVHRDLKPHNILISMPNAHGKIKAMISDFGLCKKLAVGRHSFSRRSGVPGTEGWIAPEMLSEDCKENPTYTVDIFSAGCVFYYVISEGSHPFGKSLQRQANILLGACSLDCLHPEKHEDVIARELIEKMIAMDPQKRPSAKHVLKHPFFWSLEKQLQFFQDVSDRIEKESLDGPIVKQLERGGRAVVKMDWRENITVPLQTDLRKFRTYKGGSVRDLLRAMRNKKHHYRELPAEVRETLGSLPDDFVCYFTSRFPHLLAHTYRAMELCSHERLFQPYYFHEPPEPQPPVTPDAL

SEQ ID NO: 13097 - protein, 150 aa, Homo sapiens
LISTGLTTLILGIVMARAISLGPHIPKTEDAWVFAKPNAIQAVGVMSFGDLFENYCRNDDLVTFGRFCYGVTVILTYPMECFVTREVIANVFFGGNLSSVFHIVVTVMVITVATLVSLLIDCLGIVLELNGVLCATPLIFIIPSACYLKL

SEQ ID NO: 13098 - protein, 139 aa, Homo sapiens
FKLVLLGSGSVGAFFTKVVDVGATSLKLEIWDTAGQEKYHSVCHLYFRGANAALLVYDITRKDSFLKAQQWLKDLEEELHPGEVLVMLVGNKTDLSQEREVTFQDEDRVNSCRQVADGETPHTLEAGAGEDPTQGLDRR

SEQ ID NO: 13099 - protein, 453 aa, Homo sapiens
MQGAQEASASEMLPLLLPLLWAGALAQERRFQLEGPESLTVQEGLCVLVPCRLPTTLPASYYGYGYWFLEGADVPVATNDPDEEVQEETRGRFHLLWDPRRKNCSLSIRDARRRDNAAYFFRLKSKWMKYGYTSSKLSVRVMALTHRPNISIPGTLESGHPSNLTCSVPWVCEQGTPPIFSWMSAAPTSLGPRTTQSSVLTITPRPQDHSTNLTCQVTFPGAGVTMERTIQLNVSYAPQKVAISIFQGNSAAFKILQNTSSLPVLEGQALRLLCDADGNPPAHLSWFQGFPALNATPISNTGVLELPQVGSAEEGDFTCRAQHPLGSLQISLSLFVHWKPEGRAGGVLGAVWGASITTLVFLCVCFIFRVKTRRKKAAQPVQNTDDVNPVMVSGSRGHQHQFQTGIVSDHPAEAGPISEDEQELHYAVLHFHKVQPQEPKVTDTEYSEIKIHK

SEQ ID NO: 13100 - protein, 115 aa, Homo sapiens
MRLAVGALLVCAVLGLCLAVPDKTVRWCAVSEHEATKCQSFRDHMKSVIPSDGPSVACVKKASYLDCIRAIAVSRCCLKESGRKPYFLCFQSLWNNSLLTGKRSGCCDTGCRFGV

SEQ ID NO: 13101 - protein, 188 aa, Homo sapiens
MSPLLRRLLLAALLQLAPAQAPVSQPDAPGHQRKVVSWIDVYTRATCQPREVVVPLTVELMGTVAKQLVPSCVTVQRCGGCCPDDGLECVPTGQHQVRMQILMIRYPSSQLGEMSLEEHSQCECRPKKKDSAVKPDSPRPLCPRCTQHHQRPDPRTCRCRCRRRSFLRCQGRGLELNPDTCRCRKLRR

SEQ ID NO: 13102 - protein, 105 aa, Homo sapiens
MQRLPAATRATLILSLAFASLHSACSAEASSSNSSSLTAHHPDPGTLEQCLRSGYLANLRGEADQLWKFCTVLCFWESRRSSSRIALMREAEEWPGWRSSVELVG

SEQ ID NO: 13103 - protein, 31 aa, Homo sapiens
MARRSVLYFILLNALINKGQACFCDHYAWTQ

SEQ ID NO: 13104 - protein, 45 aa, Homo sapiens
MNFASVFAVLFNGCTGIMAGANMSGPCCRKTMGSSAPSACGPHWC

SEQ ID NO: 13105 - protein, 43 aa, Homo sapiens
MSGAGEALAPGPVGPQRVAEAGGGQLGSTAQGLFSRSRTAAAL

SEQ ID NO: 13106 - protein, 86 aa, Homo sapiens
MKFFLLLFTIGFCWAQYSPNTQQGRTSIVHLFEWRWVDIALECERYLAPKGFGGVQVSPPNENVAIHNPFRPWWERYQPVSYKLCT

SEQ ID NO: 13107 - protein, 59 aa, Homo sapiens
MTAWILLPVSLSAFSITGIWTVYAMAVMNHHVCPVENWYEGLCRQPCSKASFISVPSWA

SEQ ID NO: 13108 - protein, 80 aa, Homo sapiens
MKVLLRLICFIALLISSLEADKCKEREEKIILVSSANEIDVRPCPLNPNEHKGTITWYKDDSKTPVSTEQASRIHQHKEK

SEQ ID NO: 13109 - protein, 281 aa, Homo sapiens
MQAVWDLEQGKYGFAVQRGRMPPTQPTHGQFALTNGDPLNCHSYLSGYISLLLRAEPYPTSRFGSQCMQPNNIMGIENICELAARMLFSAVEWARNIPFFPDLQITDQVALLRLTWSELFVLNAAQCSMPLHVAPLLAAAGLHASPMSADRVVAFMDHIRIFQEQVEKLKALHVDSAEYSCLKAIVLFTSDACGLSDVAHVESLQEKSQCALEEYVRSQYPNQPTRFGKLLLRLPSLRTVSSSVIEQLFFVRLVGKTPIETLIRDMLLSGSSFNWPYMAIQ

SEQ ID NO: 13110 - protein, 986 aa, Homo sapiens
MTLLGSEHSLLIRSKFRSVLQLRLQQRRTQEQLANQGIIPPLKRPAEFHEQRKHLDSDKAKNSLKRKARNRCNSADLVNMHILQASTAERSIPTAQMKLKRARLADDLNEKIALRPGPLELVEKNILPVDSAVKEAIKGNQVSFSKSTDAFAFEEDSSSDGLSPDQTRSEDPQNSAGSPPDAKASDTPSTGSLGTNQDLASGSENDRNDSASQPSHQSDAGKQGLGPPSTPIAVHAAVKSKSLGDSKNRHKKPKDPKPKVKKLKYHQYIPPDQKAEKSPPPMDSAYARLLQQQQLFLQLQILSQQQQQQQHRFSYLGMHQAQLKEPNEQMVRNPNSSSTPLSNTPLSPVKNSFSGQTGVSSFKPGPLPPNLDDLKVSELRQQLRIRGLPVSGTKTALMDRLRPFQDCSGNPVPNFGDITTVTFPVTPNTLPNYQSSSSTSALSNGFYHFGSTSSSPPISPASSDLSVAGSLPDTFNDASPSFGLHPSPVHVCTEESLMSSLNGGSVPSELDGLDSEKDKMLVEKQKVINELTWKLQQEQRQVEELRMQLQKQKRNNCSEKKPLPFLAASIKQEEAVSSCPFASQVPVKRQSSSSECHPPACEAAQLQPLGNAHCVESSDQTNVLSSTFLSPQCSPQHSPLGAVKSPQHISLPPSPNNPHFLPSSSGAQGEGHRVSSPISSQVCTAQNSGAHDGHPPSFSPHSSSLHPPFSGAQADSSHGAGGNPCPKSPCVQQKMAGLHSSDKVGPKFSIPSPTFSKSSSAISEVTQPPSYEDAVKQQMTRSQQMDELLDVLIESGEMPADAREDHSCLQKVPKIPRSSRSPTAVLTKPSASFEQASSGSQIPFDPYATDSDEHLEVLLNSQSPLGKMSDVTLLKIGSEEPHFDGIMDGFSGKAAEDLFNAHEILPGPLSPMQTQFSPSSVDSNGLQLSFTESPWETMEWLDLTPPNSTPGFSALTTSSPSIFNIDFLDVTDLNLNSSMDLHLQQW

SEQ ID NO: 13111 - protein, 1302 aa, Homo sapiens
MPGGACVLVIALMFLAWGEAQECSPGGHQFLRSPYRSVRFDSWHLQQSAVQDLICDHSLSPGWYRFLILDRPAEMPTKCVEMNHCGTQAPIWLSLRDSETLPSPGEIKQLTACATWQFLFSTTKDCCLFQIPVSVRNCGNFSVYLLQPTQGCMGYCAEAISDARLHPCGSDETETGGDCVRQLAASLPPPPAGRPEVLVELIESRLFCRCSFDVPATKNSVGFHIAWSRLSSQEVKEELTQETTVQAFSLLELDGINLRLGDRIFCSASVFFLENPHVQSVAIESQEFFAGFKLQPELSTISEDGKEYYLRIESTVPIICSEFSELDQECKISLKLKTIGQGREHLGLNLALSSCHVDLLQTSSCANGTCSHTFVYYTAVTDFSRDGDRVSNIVVQPIVNEDFLWNNYIPDSIQIKVKDVPTAYCYTFTDPHIITFDGRVYDNFKTGTFVLYKSMSRDFEVHVRQWDCRSLHYPVSCNCGFVAQEGGDIVTFDMCNGQLRESQPYLFIKSQDVTRNIKISESYLGRKVTIWFSSGAFIRADLGEWGMSLTIRAPSVDYRNTLGLCGTFDENPENDFHDKNGMQIDQNFNNYVAFINEWRILPGKSMSDTLPVSMTSPGKPSYCSCSLDTAAYPSSEDLDSVSRSEIALGCKDLNHVSLSSLIPELDVTSEYINSDTLVREINKHTSPEEYNLNLFLQEKKHINLTKLGLNVQKHPGNEKEDSLQYLANKKYTQGRGSHSQEMRYNRQNRWKRQNFHEFPPLFAFPSLSQTDLEELTYFFPEDHAEDVQQEFFPSWPTPSGLTEYSTLTLCQETLANSSIGRLCLAFLGKRLDSVIEMCVKDVLLKDDLSWAEAGVALLENECEKRIVEEGKYNTEEYGTSIEDILSVLKCPNLCSGNGQCMEWGCACSPSFSSYDCSDSYDKAPEITELGNAGFCDVQKYNCMMVRVFGKGFKELPSIKCEVTKLQYNSSEWMPGEPIYTQTVFHNSRAVDCQLPTDVQQFDTMDLVGGKPTGKWQLKVSNDGYKFSNPKITVIYDGACQVCGLYKNDSCTIKENVCIIDGLCYVEGDKNPTSPCLICRPKISRFTWSFLENNQPPVIQALQDKLQTFYGENFEYQFVAFDPEGSDIHFTLDSGPEGASVSSAGLFMWKTDLLTTQQITVRLNDDCDAETRVTIEVTVKSCDCLNGGSCVSDRNFSPGSGVYLCVCLPGFHGSLCEVDISGCQSNPCGLGSYISGFHSYSCDCPPELKGKNCQEDVDECDSKPCFEGVACLNTFGSYHCGSCPEGFYGDGKICHGKSFYFLL

SEQ ID NO: 13112 - protein, 258 aa, Homo sapiens
MGSRAELCTLLGGFSFLLLLIPGEGAKGGSLRESQGVCSKQTLVVPLHYNESYSQPVYKPYLTLCAGRRICSTYRTMYRVMWREVRREVQQTHAVCCQGWKKRHPGALTCEAICAKPCLNGGVCVRPDQCECAPGWGGKHCHVGSFTCGCPHDLVLGVDGRTCMEGSPEPPTSASILSVAVREAEKDERALKQEIHELRGRLERLEQWAGQAGAWVRAVLPVPPEELQPEQVAELWGRGDRIESLSDQVLLLEERLGA

SEQ ID NO: 13113 - protein, 826 aa, Homo sapiens
MVPSRRTWNLGATPSLRGLWRVGRAPEPEPGMARPAPAPASPAARPFPHTGPGRLRTGRGKDTPVCGDEDSSARSAARPALAQCRALSVDWAGPGSPHGLYLTLQVEHLKEKLISQAQEVSRLRSELGGTDLEKHRDLLMVENERLRQEMRRCEAELQELRTKPAGPCPGCEHSQESAQLRDKLSQLQLEMAESKGMLSELNLEVQQKTDRLAEVELRLKDCLAEKAQEEERLSRRLRDSHETIASLRAQSPPVKYVIKTVEVESSKTKQALSESQARNQHLQEQVAMQRQVLKEMEQQLQSSHQLTARLRAQIAMYESELERAHGQMLEEMQSLEEDKNRAIEEAFARAQVEMKAVHENLAGVRTNLLTLQPALRTLTNDYNGLKRQVRGFPLLLQEALRSVKAEIGQAIEEVNSNNQELLRKYRRELQLRKKCHNELVRLKGNIRVIARVRPVTKEDGEGPEATNAVTFDADDDSIIHLLHKGKPVSFELDKVFSPQASQQDVFQEVQALVTSCIDGFNVCIFAYGQTGAGKTYTMEGTAENPGINQRALQLLFSEVQEKASDWEYTITVSAAEIYNEVLRDLLGKEPQEKLEIRLCPDGSGQLYVPGLTEFQVQSVDDINKVFEFGHTNRTTEFTNLNEHSSRSHALLIVTVRGVDCSTGLRTTGKLNLVDLAGSERVGKSGAEGSRLREAQHINKSLSALGDVIAALRSRQGHVPFRNSKLTYLLQDSLSGDSKTLMVVQVSPVEKNTSETLYSLKFAERVRSVELGPGLRRAELGSWSSQEHLEWEPACQTPQPSARAHSAPSSGTSSRPGSIRRKLQPSA

SEQ ID NO: 13114 - protein, 1195 aa, Homo sapiens
MDLRDFYLLAALIACLRLDSAIAQELIYTIREELPENVPIGNIPKDLNISHINAATGTSASLVYRLVSKAGDAPLVKVSSSTGEIFTTSNRIDREKLCAGASYAEENECFFELEVVILPNDFFRLIKIKIIVKDTNDNAPMFPSPVINISIPENTLINSRFPIPSATDPDTGFNGVQHYELLNGQSVFGLDIVETPEGEKWPQLIVQQNLDREQKDTYVMKIKVEDGGTPQKSSTAILQVTVSDVNDNRPVFKEGQVEVHIPENAPVGTSVIQLHATDADIGSNAEIRYIFGAQVAPATKRLFALNNTTGLITVQRSLDREETAIHKVTVLASDGSSTPARATVTINVTDVNDNPPNIDLRYIISPINGTVYLSEKDPVNTKIALITVSDKDTDVNGKVICFIEREVPFHLKAVYDNQYLLETSSLLDYEGTKEFSFKIVASDSGKPSLNQTALVRVKLEDENDNPPIFNQPVIELSVSENNRRGLYLTTISATDEDSGKNADIVYQLGPNASFFDLDRKTGVLTASRVFDREEQERFIFTVTARDNGTPPLQSQAAVIVTVLDENDNSPKFTHNHFQFFVSENLPKYSTVGVITVTDADAGENKAVTLSILNDNDNFVLDPYSGVIKSNVSFDREQQSSYTFDVKATDGGQPPRSSTAKVTINVMDVNDNSPVVISPPSNTSFKLVPLSAIPGSVVAEVFAVDVDTGMNAELKYTIVSGNNKGLFRIDPVTGNITLEEKPAPTDVGLHRLVVNISDLGYPKSLHTLVLVFLYVNDTAGNASYIYDLIRRTMETPLDRNIGDSSQPYQNEDYLTIMIAIIAGAMVVIVVIFVTVLVRCRHASRFKAAQRSKQGAEWMSPNQENKQNKKKKRKKRKSPKSSLLNFVTIEESKPDDAVHEPINGTISLPAELEEQSIGRFDWGPAPPTTFKPNSPDLAKHYKSASPQPAFHLKPDTPVSVKKHHVIQELPLDNTFVGGCDTLSKRSSTSSDHFSASECSSQGGFKTKGPLHTRQCNSHSKSDNIPVTPQKCPSSTGFHIQENEESHYEPQDEFYDQASPDKRTEADGNSDPNSDGPLGPRGLAEATEMCTQECLVLGHSDNCWMPPGLGPYQHPKSPLSTFAPQKEWVKKDKLVNGHTLTRAWKEDSNRNQFNDRKQYGSNEGHFNNGSHMTDIPLANLKSYKQAGGATESPKEHQL

SEQ ID NO: 13115 - protein, 118 aa, Homo sapiens
MMEFGLSWVFLVAIFKGVQCEVQLVESGEGLVQPGGSLRLSCAASGFTFSSYAMHWVRQAPGKGLEYVSAISSNGGSTYYADSVKGRFTISRDNSKNTLYLQMGSLRAEDMAVYYCAR

SEQ ID NO: 13116 - protein, 231 aa, Homo sapiens
MAQLFLPLLAALVLAQAPAALADVLEGDSSGIYRCEVQHGIDDSSDAVEVKVKGVVFLYREGSARYAFSFSGAQEACARIGAHIATPEQLYAAYLGGYEQCDAGWLSDQTVRYPIQTPREACYGDMDGFPGVRNYGVVDPDDLYDVYCYAEDLNGELFLGDPPEKLTLEEARAYCQERGAEIATTGQLYAAWDGGLDHCSPGWLADGSVRYPIVTPSQRCGGGLPGVKTLF

SEQ ID NO: 13117 - protein, 205 aa, Homo sapiens
MAAARPSLGRVLPGSSVLFLCDMQEKFRHNIAYFPQIVSVAARMLKVARLLEVPVMLTEQYPQGLGPTVPELGTEGLRPLAKTCFSMVPALQQELDSRPQLRSVLLCGIEAQACILNTTLDLLDRGLQVHVVVDACSSRSQVDRLVALARMRQSGAFLSTSEGLILQLVGDAVHPQFKEIQKLIKEPAPDSGLLGLFQGQNSLLH

SEQ ID NO: 13118 - protein, 604 aa, Homo sapiens
MGPGARLAALLAVLALGTGDPERAAARGDTFSALTSVARALAPERRLLGLLRRYLRGEEARLRDLTRFYDKVLSLHEDSTTPVANPLLAFTLIKRLQSDWRNVVHSLEASENIRALKDGYEKVEQDLPAFEDLEGAARALMRLQDVYMLNVKGLARGVFQRVTGSAITDLYSPKRLFSLTGDDCFQVGKVAYDMGDYYHAIPWLEEAVSLFRGSYGEWKTEDEASLEDALDHLAFAYFRAGNVSCALSLSREFLLYSPDNKRMARNVLKYERLLAESPNHVVAEAVIQRPNIPHLQTRDTYEGLCQTLGSQPTLYQIPSLYCSYETNSNAYLLLQPIRKEVIHLEPYIALYHDFVSDSEAQKIRELAEPWLQRSVVASGEKQLQVEYRISKSAWLKDTVDPKLVTLNHRIAALTGLDVRPPYAEYLQVVNYGIGGHYEPHFDHATSPSSPLYRMKSGNRVATFMIYLSSVEAGGATAFIYANLSVPVVRHCFGGTCTGVVKGTVTHFMLAVLSWWEISGWPTSGYMSMDRNSADPAAPALKTELLAERSWWSPVAFQRSQEPKAGVGEEKAEQPPGRRPCQLCLCLANQRQGRGCYQGTLRMYI

SEQ ID NO: 13119 - protein, 301 aa, Homo sapiens
MAKSLLKTASLSGRTKLLHQTGLSLYSTSHGFYEEEVKKTLQQFPGGSIDLQKEDNGIGILTLNNPSRMNAFSGVMMLQLLEKVIELENWTEGKGLIVRGAKNTFSSGSDLNAVKSLGTPEDGMAVCMFMQNTLTRFMRLPLISVALVQGWALGGGAEFTTACDFRLMTPESKIRFVHKEMGIIPSWGGTTRLVEIIGSRQALKVLSGALKLDSKNALNIGMVEEVLQSSDETKSLEEAQEWLKQFIQGPPEVIRALKKSVCSGRELYLEEALQNERDLLGTVWGGPANLEAIAKKGKFNK

SEQ ID NO: 13120 - protein, 1162 aa, Homo sapiens
MSVACVLKRKAVLWQDSFSPHLKHHPQEPANPNMPVVLTSGTGSQAQPQPAANQALAAGTHSSPVPGSIGVAGRSQDDAMVDYFFQRQHGEQLGGGGSGGGGYNNSKHRWPTGDNIHAEHQVRSMDELNHDFQALALEGRAMGEQLLPGKKFWETDESSKDGPKGIFLGDQWRDSAWGTSDHSVSQPIMVQRRPGQSFHVNSEVNSVLSPRSESGGLGVSMVEYVLSSSPGDSCLRKGGFGPRDADSDENDKGEKKNKGTFDGDKLGDLKEEGDVMDKTNGLPVQNGIDADVKDFSRTPGNCQNSANEVDLLGPNQNGSEGLAQLTSTNGAKPVEDFSNMESQSVPLDPMEHVGMEPLQFDYSGTQVPVDSAAATVGLFDYNSQQQLFQRPNALAVQQLTAAQQQQYALAAAHQPHIAGLAPAAFVPNPYIISAAPPGTDPYTAGLAAAATLGPAVVPHQYYGVTPWGVYPASLFQQQAAAAAAATNSANQQTTPQAQQGQQQVLRGGASQRPLTPNQNQQGQQTDPLVAAAAVNSALAFGQGLAAGMPGYPVLAPAAYYDQTGALVVNAGARNGLGAPVRLVAPAPVIISSSAAQAGTQQPQPQPQQQPNNNLASSSFYGNNSLNSNSQSSSLFSQGSAQPANTSLGFGSSSSLGATLGSALGGFGTAVANSNTGSGSRRDSLTGSSDLYKRTSSSLTPIGHSFYNGLSFSSSPGPVGMPLPSQGPGHSQTPPPSLSSHGSSSSLNLGGLTNGSGRYISAAPGAEAKYRSASSASSLFSPSSTLFSSSRLRYGMSDVMPSGRSRLLEDFRNNRYPNLQLREIAGHIMEFSQDQHGSRFIQLKLERATPAERQLVFNEILQAAYQLMVDVFGNYVIQKFFEFGSLEQKLALAERIRGHVLSLALQMYGCRVIQKALEFIPSDQQVINEMVRELDGHVLKCVKDQNGNHVVQKCIECVQPQSLQFIIDAFKGQVFALSTHPYGCRVIQRILEHCLPDQTLPILEELHQHTEQLVQDQYGNYVIQHVLEHGRPEDKSKIVAEIRGNVLVLSQHKFASNVVEKCVTHASRTERAVLIDEVCTMNDGPHSALYTMMKDQYANYVVQKMIDVAEPGQRKIVMHKIRPHIATLRKYTYGKHILAKLEKYYMKNGVDLGPICGPPNGII

SEQ ID NO: 13121 - protein, 389 aa, Homo sapiens
MADPRDKALQDYRKKLLEHKEIDGRLKELREQLKELTKQYEKSENDLKALQSVGQIVGEVLKQLTEEKFIVKATNGPRYVVGCRRQLDKSKLKPGTRVALDMTTLTIMRYLPREVDPLVYNMSHEDPGNVSYSEIGGLSEQIRELREVIELPLTNPELFQRVGIIPPKGCLLYGPPGTGKTLLARAVASQLDCNFLKVVSSSIVDKYIGESARLIREMFNYARDHQPCIIFMDEIDAIGGRRFSEGTSADREIQRTLMELLNQMDGFDTLHRVKMIMATNRPDTLDPALLRPGRLDRKIHIDLPNEQARLDILKIHAGPITKHGEIDYEAIVKLSDGFNGADLRNVCTEAGMFAIRADHDFVVQEDFMKAVRKVADSKKLESKLDYKPV

SEQ ID NO: 13122 - protein, 417 aa, Homo sapiens
MKWVTFISLLFLFSSAYSRGVFRRDAHKSEVAHRFKDLGEENFKALAVARLSQRFPKAEFAEVSKLVTDLTKVHTECCHGDLLECADDRADLAKYICENQDSISSKLKECCEKPLLEKSHCIAEVENDEMPADLPSLAADFVESKDVCKNYAEAKDVFLGMFLYEYARRHPDYSVVLLLRLAKTYETTLEKCCAAADPHECYAKVFDEFKPLVEEPQNLIKQNCELFEQLGEYKFQNALLVRYTKKVPQVSTPTLVEVSRNLGKVGSKCCKHPEAKRMPCAEDYLSVVLNQLCVLHEKTPVSDRVTKCCTESLVNRRPCFSALEVDETYVPKEFNAETFTFHADICTLSEKERQIKKQTALVELVKHKPKATKEQLKAVMDDFAAFVEKCCKADDKETCFAEEGKKLVAASQAALGL

SEQ ID NO: 13123 - protein, 84 aa, Homo sapiens
MNLWLLACLVAGFLGAWAPAVHTQGVFEDCCLAYHYPIGWAVLRRAWTYRIQEVSGSCNLPAAIRPSCCKEVEFWKLQVIIVQV

SEQ ID NO: 13124 - protein, 441 aa, Homo sapiens
MEGSWFHRKRFSFYLLLGFLLQGRGVTFTINCSGFGQHGADPTALNSVFNRKPFRPVTNISVPTQVNISFAMSAILDVVWDNPFISWNPEECEGITKMSMAAKNLWLPDIFIIELMDVDKTPKGLTAYVSNEGRIRYKKPMKVDSICNLDIFYFPFDQQNCTLTFSSFLYTVDSMLLDMEKEVWEITDASRNILQTHGEWELLGLSKATAKLSRGGNLYDQIVFYVAIRRRPSLYVINLLVPSGFLVAIDALSFYLPVKSGNRVPFKITLLLGYNVFLLMMSDLLPTSGTPLIGVYFALCLSLMVGSLLETIFITHLLHVATTQPPPLPRWLHSLLLHCNSPGRCCPTAPQKENKGPGLTPTHLPGVKEPEVSAGQMPGPAEAELTGGSEWTRAQREHEAQKQHSVELWLQFSHAMDAMLFRLYLLFMASSIITVICLWNT

SEQ ID NO: 13125 - protein, 532 aa, Homo sapiens
MGWLEELNWQLHIFLLILLSMHTRANFLDNMLLRSAGKLNVGTKKEDGESTAPTPRPKVLRCKCHHHCPEDSVNNICSTDGYCFTMIEEDDSGLPVVTSGCLGLEGSDFQCRDTPIPHQRRSIECCTERNECNKDLHPTLPPLKNRDFVDGPIHHRALLISVTVCSLLLVLIILFCYFRYKRQETRPRYSIGLEQDETYIPPGESLRDLIEQSQSSGSGSGLPLLVQRTIAKQIQMVKQIGKGRYGEVWMGKWRGEKVAVKVFFTTEEASWFRETEIYQTVLMRHENILGFIAADIKGTGSWTQLYLITDYHENGSLYDYLKSTTLDAKSMLKLAYSSVSGLCHLHTEIFSTQGKPAIAHRDLKSKNILVKKNGTCCIADLGLAVKFISDTNEVDIPPNTRVGTKRYMPPEVLDESLNRNHFQSYIMADMYSFGLILWEVARRCVSGGIVEEYQLPYHDLVPSDPSYEDMREIVCIKKLRPSFPNRWSSDECLRQMGKLMTECWAHNPASRLTALRVKKTLAKMSESQDIKL

SEQ ID NO: 13126 - protein, 271 aa, Homo sapiens
MGIVCAQCSFILLLSIIRARPPPFLFCPLSSQRTESPYKPVHLGLGPTDKVAAIAMARIIDLVPWDDGSTHVYASPAILLPMERQRNQLAGVKQQLYHPALPTLRHMDRDTVKACLPDEHCQSTTYCRKDEFDNAHFTLLGVPNKPLQCLDITATGQKLRNRYHEGKLAPIAPGINRVDWPCFTRAIEDWSHFVSSAGEFKLPCLRKRAEGLSGYAVRYLKPDVTQTWRYCLSQNPSLDRYGQKPLPFDSLNTFRSFGSSYSRVNYLTPWH

SEQ ID NO: 13127 - protein, 174 aa, Homo sapiens
MTAEFLSLLCLGLCLGYEDEKKNEKPPKPSLHAWPSSVVEAESNVTLKCQAHSQNVTFVLRKVNDSGYKQEQSSAENEAEFPFTDLKPKDAGRYFCAYKTTASHEWSESSEHLQLVVTDKHDELEAPSMKTDTRTIFVAIFSCISILLLFLSVFIIYRCSQHSELRERKGREGE

SEQ ID NO: 13128 - protein, 221 aa, Homo sapiens
MAGPFSRLLSARPGLRLLALAGAGSLAAGFLLRPEPVRAASERRRLYPPSQTWPTGQLPGNCTRSRRLCPPSMVTGYPLPSAEYPDLRKHNNCMASHLTPAVYARLCDKTTPTGWTLDQCIQTGVDNPGHPFIKTVGMVAGDEETYEVFADLFDPVIQERHNGYDPRTMKHTTDLDASKIRSGYFDERYVLSSRVRTGRSIRGLSLPPACTRAERREVERV

SEQ ID NO: 13129 - protein, 64 aa, Homo sapiens
MRGPSGPPGLLYVPHLLLCLLCLLPPPLQYAAGQSQMPKDQPLWALLEQYCHTIMTLTNLSGWS

SEQ ID NO: 13130 - protein, 310 aa, Homo sapiens
MSQRDTLVHLFAGGCGGTVGAILTCPLEVVKTRLQSSSVTLYISEVQLNTMAGASVNRVVSPGPLHCLKVILEKEGPRSLFRGLGPNLVGVAPSRAIYFAAYSNCKEKLNDVFDPDSTQVHMISAAMAGFTAITATNPIWLIKTRLQLDARNRGERRMGAFECVRKVYQTDGLKGFYRGMSASYAGISETVIHFVIYESIKQKLLEYKTASTMENDEESVKEASDFVGMMLAAATSKTCATTIAYPHVVRTRLREEGTKYRSFFQTLSLLVQEEGYGSLYRGLTTHLVRQIPNTAIMMATYELVVYLLNG

SEQ ID NO: 13131 - protein, 399 aa, Homo sapiens
MIPTFTALLCLGLSLGPRTHMQAGPLPKPTLWAEPGSVISWGNSVTIWCQGTLEAREYRLDKEESPAPWDRQNPLEPKNKARFSIPSMTEDYAGRYRCYYRSPVGWSQPSDPLELVMTGAYSKPTLSALPSPLVTSGKSVTLLCQSRSPMDTFLLIKERAAHPLLHLRSEHGAQQHQAEFPMSPVTSVHGGTYRCFSSHGFSHYLLSHPSDPLELIVSGSLEGPRPSPTRSVSTAGPEDQPLMPTGSVPHSGLRRHWEVLIGVLVVSILLLSLLLFLLLQHWRQGKHRTLAQRQADFQRPPGAAEPEPKDGGLQRRSSPAADVQGENFCAAVKNTQPEDGVEMDTRQSPHDEDPQAVTYAKVKHSRPRREMASPPSPLSGEFLDTKDRQAEEDRQMDTE

SEQ ID NO: 13132 - protein, 102 aa, Homo sapiens
MATELEYESVLCVKPDVSVYRIPPRASNRGYRASDWKLDQPDWTGRLRITSKGKTAYIKLEDKVSGELFAQAPVEQYPGIAVETVTDSSRYFVIRIQDGTGG

SEQ ID NO: 13133 - protein, 540 aa, Homo sapiens
MPFAEDKTYKYICRNFSNFCNVDVVEILPYLPCLTARDQDRLRATCTLSGNRDTLWHLFNTLQRRPGWVEYFIAALRGCELVDLADEVASVYQSYQPRTSDRPPDPLEPPSLPAERPGPPTPAAAHSIPYNSCREKEPSYPMPVQETQAPESPGENSEQALQTLSPRAIPRNPDGGPLESSSDLAALSPLTSSGHQEQDTELGSTHTAGATSSLTPSRGPVSPSVSFQPLARSTPRASRLPGPTGSVVSTGTSFSSSSPGLASAGAAEGKQGAESDQAEPIICSSGAEAPANSLPSKVPTTLMPVNTVALKVPANPASVSTVPSKLPTSSKPPGAVPSNALTNPAPSKLPINSTRAGMVPSKVPTSMVLTKVSASTVPTDGSSRNEETPAAPTPAGATGGSSAWLDSSSENRGLGSELSKPGVLASQVDSPFSGCFEDLAISASTSLGMGPCHGPEENEYKSEGTFGIHVAENPSIQLLEGNPGPPADPDGGPRPQADRKFQEREVPCHRPSPGALWLQVAVTGVLVVTLLVVLYRRRLH

SEQ ID NO: 13134 - protein, 129 aa, Homo sapiens
MEERGDSEPTPGCSGLGPGGVRGFGDGGGAPSWAPEDAWMGTHPKYLEMMELDIGDATQVYVAFLVYLDLMESKSWHEVNCVGLPELQLICLVGTEIEGEGLQTVVPTPITASLSHNRIFLLEDDIHVS

SEQ ID NO: 13135 - protein, 264 aa, Homo sapiens
MALLWGLLVLSWSCLQGPCSVFSPVSAMEPLGRQLTSGPNQEQVSPLTLLKLGNQEPGGQTALKSPPGVCSRDPTPEQTHRLARAMMAFTADLFSLVAQTSTCPNLILSPLSVALALSHLALGFWRNKFDPSLTQRDSFHLDEQFTVPVEMMQARTYPLRWFLLEQPEIQVAHFPFKNNMSFVVLVPTHFEWNVSQVLANLSWDTLHPPLVWERPTKVRLPKLYLKHQMDLVATLSQLGLQELFQAPDLRGISEQSLVVSGVQH

SEQ ID NO: 13136 - protein, 417 aa, Homo sapiens
MARAMAAAWPLLLVALLVLSWPPPGTGDVVVQAPTQVPGFLGDSVTLPCYLQVPNMEVTHVSQLTWARHGESGSMAVFHQTQGPSYSESKRLEFVAARLGAELRNASLRMFGLRVEDEGNYTCLFVTFPQGSRSVDIWLRVLAKPQNTAEVQKVQLTGEPVPMARCVSTGGRPPAQITWHSDLGGMPNTSQVPGFLSGTVTVTSLWILVPSSQVDGKNVTCKVEHESFEKPQLLTVNLTVYYPPEVSISGYDNNWYLGQNEATLTCDARSNPEPTGYNWSTTMGPLPPFAVAQGAQLLIRPVDKPINTTLICNVTNALGARQAELTVQVKEGPPSEHSGMSRNAIIFLVLGILVFLILLGIGIYFYWSKCSREVLWHCHLCPSSTEHASASANGHVSYSAVSRENSSSQDPQTEGTR

SEQ ID NO: 13137 - protein, 646 aa, Homo sapiens
MSFLSRQQPPPPRRAGAACTLRQKLIFSPCSDCEEEEEEEEEEGSGHSTGEDSAFQEPDSPLPPARSPTEPGPERRRSPGPAPGSPGELEEDLLLPGACPGADEAGGGAEGDSWEEEGFGSSSPVKSPAAPYFLGSSFSPVRCGGPGDASPRGCGARRAGEGRRSPRPDHPGTPPHKTFRKLRLFDTPHTPKSLLSKARGIDSSSVKLRGSSLFMDTEKSGKREFDVRQTPQVNINPFTPDSLLLHSSGQCRRRKRTYWNDSCGEDMEASDYELEDETRPAKRITITESNMKSRYTTEFHELEKIGSGEFGSVFKCVKRLDGCIYAIKRSKKPLAGSVDEQNALREVYAHAVLGQHSHVVRYFSAWAEDDHMLIQNEYCNGGSLADAISENYRIMSYFKEAELKDLLLQVGRGLRYIHSMSLVHMDIKPSNIFISRTSIPNAASEEGDEDDWASNKVMFKIGDLGHVTRISSPQVEEGDSRFLANEVLQENYTHLPKADIFALALTVVCAAGAEPLPRNGDQWHEIRQGRLPRIPQVLSQEFTELLKVMIHPDPERRPSAMALVKHSVLLSASRKSAEQLRIELNAEKFKNSLLQKELKKAQMAKAAAEERALFTDRMATRSTTQSNRTSRLIGKKMNRSVSLTIY

SEQ ID NO: 13138 - protein, 37 aa, Homo sapiens
MGWLTRIVCLFWGVLLTARANYQNGKNNVPRLKLSYK

SEQ ID NO: 13139 - protein, 659 aa, Homo sapiens
MSTRTPLPTVNERDTENHTSHGDGRQEVTSRTSRSGARCRNSIASCADEQPHIGNYRLLKTIGKGNFAKVKLARHILTGREVAIKIIDKTQLNPTSLQKLFREVRIMKILNHPNIVKLFEVIETEKTLYLIMEYASGGEVFDYLVAHGRMKEKEARSKFRQIVSAVQYCHQKRIVHRDLKELRERVLRGKYRIPFYMSTDCENLLKRFLVLNPIKRGTLEQIMKDRWINAGHEEDELKPFVEPELDISDQKRIDIMVGMGYSQEEIQESLSKMKYDEITATYLLLGRKSSELDASDSSSSSNLSLAKVRPSSDLNNSTGQSPHHKVQRSVSSSQKQRRYSDHAGPAIPSVVAYPKRSQTSTADSDLKEDGISSRKSSGSAVGGKGIAPASPMLGNASNPNKADIPERKKSSTVPSSNTASGGMTRRNTYVCSERTTADRHSVIQNGKENSTIPDQRTPVASTHSISSAATPDRIRFPRGTASRSTFHGQPRERRTATYNGPPASPSLSHEATPLSQTRSRGSTNLFSKLTSKLTRRNMSFRFIKSRNVSAEQKDENKEAKPRSLRFTWSMKTTSSMDPGDMMREIRKVLDANNCDYEQRERFLLFCVHGDGHAENLVQWEMEVCKLPRLSLNGVRFKRISGTSIAFKNIASKIANELKL

SEQ ID NO: 13140 - protein, 96 aa, Homo sapiens
MGPAPLPLLLGLFLPALWRRAITEAREEAKPYPLFPGPFPGSLQTDHTPLLSLPHASGYQPALMFSPTQPGRPHTGNVAIPQHNQCAAFRQWVVYL

SEQ ID NO: 13141 - protein, 536 aa, Homo sapiens
MRKLLTNLPAAAVLSAQVYSAVLQGLWEENVCGTPGRTRVCTALLYGQVCPFQDSTDGLRTITSILFNWPPENTSVYYQPPQRSSFRIKLAFRNLSWPGLGLEDHQEIVLGQLVLPEPNEAKPDDPAPRPGQHALTMPALEPAPPLLADLGPALEPESPAALGPPGYLHSAPGPAPAPGEGPPPGTVLEPQSAPESSCPCRGSVKNQPSEELPDMTTFPPRLLAEQLTLMDAELFKKVVLHECLGCIWGQGHLKGNEHMAPTVRATIAHFNRLTNCITTSCLGDHSMRARDRARVVEHWIKVARECLSLNNFSSVHVIVSALCSNPIGQLHKTWAGVSSKSMKELKELCKKDTAVKRDLLIKAGSFKVATQERNPQRVQMRLRRQKKGVVPFLGDFLTELQRLDSAIPDDLDGNTNKRSKEVRVLQEMQLLQVAAMNYRLRPLEKFVTYFTRMEQLSDKERWGFTMMSRIVSNSWPQAIHPPQPPKVLTLQLQAVLPAGARKPVGWQHPAVAGNPPGCWPEHRLCTIPHPDRRHQG

SEQ ID NO: 13142 - protein, 1207 aa, Homo sapiens
MANGGGGGGGSSGGGGGGGGSSLRMSSNIHANHLSLDASSSSSSSSSSSSSSSSSSSSSSVHEPKMDALIIPVTMEVPCDSRGQRMWWAFLASSMVTFFGGLFIILLWRTLKYLWTVCCHCGGKTKEAQKINNGSSQADGTLKPVDEKEEAVAAEVGWMTSVKDWAGVMISAQTLTGRVLVVLVFALSIGALVIYFIDSSNPIESCQNFYKDFTLQIDMAFNVFFLLYFGLRFIAANDKLWFWLEVNSVVDFFTVPPVFVSVYLNRSWLGLRFLRALRLIQFSEILQFLNILKTSNSIKLVNLLSIFISTWLTAAGFIHLVENSGDPWENFQNNQALTYWECVYLLMVTMSTVGYGDVYAKTTLGRLFMVFFILGGLAMFASYVPEIIELIGNRKKYGGSYSAVSGRKHIVVCGHITLESVSNFLKDFLHKDRDDVNVEIVFLHNISPNLELEALFKRHFTQVEFYQGSVLNPHDLARVKIESADACLILANKYCADPDAEDASNIMRVISIKNYHPKIRIITQMLQYHNKAHLLNIPSWNWKEGDDAICLAELKLGFIAQSCLAQGLSTMLANLFSMRSFIKIEEDTWQKYYLEGVSNEMYTEYLSSAFVGLSFPTVCELCFVKLKLLMIAIEYKSANRESRILINPGNHLKIQEGTLGFFIASDAKEVKRAFFYCKACHDDITDPKRIKKCGCKRLKVAARSRYSKDPFEFKKETPNSRLVTEPVEDEQPSTLSPKKKQRNGGMRNSPNTSPKLMRHDPLLIPGNDQIDNMDSNVKKYDSTGMFHWCAPKEIEKVILTRSEAAMTVLSGHVVVCIFGDVSSALIGLRNLVMPLRASNFHYHELKHIVFVGSIEYLKREWETLHNFPKVSILPGTPLSRADLRAVNINLCDMCVILSANQNNIDDTSLQDKECILASLNIKSMQFDDSIGVLQANSQGFTPPGMDRSSPDNSPVHGMLRQPSITTGVNIPIITELVNDTNVQFLDQDDDDDPDTELYLTQPFACGTAFAVSVLDSLMSATYFNDNILTLIRTLVTGGATPELEALIAEENALRGGYSTPQTLANRDRCRVAQLALLDGPFADLGDGGCYGDLFCKALKTYNMLCFGIYRLRDAHLSTPSQCTKRYVITNPPYEFELVPTDLIFCLMQFDHNAGQSRASLSHSSHSSQSSSKKSSSVHSIPSTANRQNRPKSRESRDKQKYVQEERL

SEQ ID NO: 13143 - protein, 183 aa, Homo sapiens
MAGGVLPLRGLRALCRVLLFLSQFCILSGGESTEIPPYVMKCPSNGLCSRLPADCIDCTTNFSCTYGKPVTFDCAVKPSVTCVDQDFKSQKNFIINMTCRFCWQLPETDYECTNSTSCMTVSCPRQRYPANCTVRDHVHCLGNRTFPKMLYCNWTGGYKWSTALALSLQAQVGLHVQLTVGLH

SEQ ID NO: 13144 - protein, 477 aa, Homo sapiens
MAHNPNMTHLKINLPVTALPPLWVRCDSSDPEGTCWLGAELITTNNSITGIVLYVVSCKADKNYSVNLENLKNLHKKRHHLSTVTSKGFAQYELFKSSALDDTITASQTAIALDISWSPVDEILQIPPLSSTATLNIKVESGEPRGPLNHLYRELKFLLVLADGLRTGVTEWLEPLEAKSAVELVQEFLNDLNKLDGFGDSTKKDTEVETLKHDTAAVDRSVKRLFKVRSDLDFAEQLWCKMSSSVISYQDLVKCFTLIIQSLQRGDIQPWLHSGSNSLLSKLIHQSYHGTMDTVSLSGTIPVQMLLEIGLDKLKKDYISFFIGQELASLNHLEYFIAPSVDIQEQVYRVQKLHHILEILVSCMPFIKSQHELLFSLTQICIKYYKQNPLDEQHIFQLPVRPTAVKNLYQSEKPQKWRVEIYSGQKKIKTVWQLSDSSPIDHLNFHKPDFSELTLNGSLEERIFFTNMVTCSQVHFK

SEQ ID NO: 13145 - protein, 423 aa, Homo sapiens
MVFAFWKVFLILSCLAGQVSVVQVTIPDGFVNVTVGSNVTLICIYTTTVASREQLSIQWSFFHKKEMEPISHSSCLSTEGMEEKAVSQCLKMTHARDARGRCSWTSEIYFSQGGQAVAIGQFKDRITGSNDPGNASITISHMQPADSGIYICDVNNPPDFLGQNQGILNVSVLVKPSKPLCSVQGRPETGHTISLSCLSALGTPSPVYYWHKLEGRDIVPVKENFNPTTGILVIGNLTNFEQGYYQCTAINRLGNSSCEIDLTSSHPEVGIIVGALIGSLVGAAIIISVVCFARNKAKAKAKERNSKTIAELEPMTKINPRGESEAMPREDATQLEVTLPSSIHETGPDTIQEPDYEPKPTQEPAPEPAPGSEPMAVPDLDIELELEPETQSELEPEPEPEPESEPGVVVEPLSEDEKGVVKA

SEQ ID NO: 13146 - protein, 191 aa, Homo sapiens
MCPFRHISGEKTVVCKHWLRGLCKKGDQCEFLHEYDMTKMPECYFYSKFGECSNKECPFLHIDPESKIKDCPWYDRGFCKHGPLCRHRHTRRVICVNYLVGFCPEGPSCKFMHPRFELPMGTTEQPPLPQQTQPPAKQRTPQVIGVMQSQNSSAGNRGPRPLEQVTCYKCGEKGHYANRCTKGHLAFLSGQ

SEQ ID NO: 13147 - protein, 432 aa, Homo sapiens
MAQALPWLLLWMGAGVLPAHGTQHGIRLPLRSGLGGAPLGLRLPRETDEEPEEPGRRGSFVEMVDNLRGKSGQGYYVEMTVGSPPQTLNILVDTGSSNFAVGAAPHPFLHRYYQRQLSSTYRDLRKGVYVPYTQGKWEGELGTDLLCGAGFPLNQSEVLASVGGSMIIGGIDHSLYTGSLWYTPIRREWYYEVIIVRVEINGQDLKMDCKEYNYDKSIVDSGTTNLRLPKKVFEAAVKSIKAASSTEKFPDGFWLGEQLVCWQAGTTPWNIFPVISLYLMGEVTNQSFRITILPQQYLRPVEDVATSQDDCYKFAISQSSTGTVMGAVIMEGFYVVFDRARKRIGFAVSACHVHDEFRTAAVEGPFVTLDMEDCGYNIPQTDESTLMTIAYVMAAICALFMLPLCLMVCQWRCLRCLRQQHDDFADDISLLK

SEQ ID NO: 13148 - protein, 189 aa, Homo sapiens
MSRLSRSLLWAATCLGVLCVLSADKNTTQHPNVTTLAPISNVTSAPVTSLPLVTTPAPETCEGRNSCVSCFNVSVVNTTCFWIECKDESYCSHNSTVSDCQVGNTTDFCSVSTATPVPTANSTAKPTVQPSPSTTSKTVTTSGTTNNTVTPTSQPVRKSTFDAASFIGGIVLVLEIRCHTRNYIPDLKK

SEQ ID NO: 13149 - protein, 1386 aa, Homo sapiens
MYFLSGWPKRLLCPLGSPAEAPFHVQSDPQRAFFAVLAAARLSIWYSRPSVLIVTYKEPAKSSTQFGSYKQAEWRPDSTMIAVSTANGYILFFHITSTRGDKYLYEPVYPKGSPQMKGTPHFKEEQCAPALNLEMRKILDLQAPIMSLQSVLEDLLVATSDGLLHLIHWEGMTNGRKAINLCTVPFSVDLQSSRVGSFLGFTDVHIRDMEYCATLDGFAVVFNDGKVGFITPVSSRFTAEQLHGVWPQDVVDGTCVAVNNKYRLMAFGCVSGSVQVYTIDNSTGAMLLSHKLELTAKQYPDIWNKTGAVKLMRWSPDNSVVIVTWEYGGLSLWSVFGAQLICTLGGDFAYRSDGTKKDPLKINSMSWGAEGYHLWVISGFGSQNTEIESDLRSVVKQPSILLFQFIKSVLTVNPCMSNQEQVLLQGEDRLYLNCGEASQTQNPRSSSTHSEHKPSREKSPFADGGLESQGLSTLLGHRHWHVVQISSTYLESNWPIREQNMIVTGGLAWWNDFMVLACYNINDRQEELRVYLRTSNLDNAFAHVTKAQAETLLLSVFQDMVIVFRADCSICLYSIERKSDGPNTTAGIQVLQEVSMSRYIPHPFLVVSVTLTSVSTENGITLKMPQQARGAESIMLNLAGQLIMMQRDRSGPQIREKDSNPNNQRKLLPFCPPVVLAQSVENVWTTCRANKQKRHLLEALWLSCGGAGMKVWLPLFPRDHRKPHSFLSQRIMLPFHINIYPLAVLFEDALVLGAVNDTLLYDSLYTRNNAREQLEVLFPFCVVERTSQIYLHHILRQLLVRNLGEQALLLAQSCATLPYFPHVLELMLHEVLEEEATSREPIPDPLLPTVAKFITEFPLFLQTVVHCARKTEYALWNYLFAAVGNPKDLFEECLMAQDLDTAASYLIILQNMEVPAVSRQHATLLFNTALEQGKWDLCRHMIRFLKAIGSGESETPPSTPTAQEPSSSGGFEFFRNRSISLSQSAENVPASKFSLQKTLSMPSGPSGKRWSKDSDCAENMYIDMMLWRHARRLLEDVRLKDLGCFAAQLGFELISWLCKERTRAARVDNFVIALKRLHKDFLWPLPIIPASSISSPFKNGKYRTVGEQLLKSQSADPFLNLEMDAGISNIQRSQSWLSNIGPTHHEIDTASSHGPQMQDAFLSPLSNKGDECSIGSATDLTESSSMVDGDWTMVDENFSTLSLTQSELEHISMELASKGPHKSQVQLRYLLHIFMEAGCLDWCIVIGLILRESSIINQILVITQSSEVDGEMLQNIKTGLHAVDRWASTDCPGYKPFLNIIKPQLQKLSEITEEQVQPDAFQPITMGKTPEQTSPRAEESRGSSSHGSIPQGEVGSSNMVSRKEEDTAQAEEEEPFQDGTYDCSVS

SEQ ID NO: 13150 - protein, 170 aa, Homo sapiens
MKTPWKVLLGLLGAAALVTIITVPVVLLNKGNDATADSRKTYTLTDYLKNTYRLKLYSLRWISDHEYLYKQENNILVFNAEYGNSSVFLENSTFDEFGHSINDYSISPDGQFILLEYNYVKQWRHSYTASYDIYDLNKRQLITEERIPNNTQWVTWSPVGHKLVSICLEQ

SEQ ID NO: 13151 - protein, 226 aa, Homo sapiens
MSRYGRYGGETKVYVGNLGTGAGKGELERAFSYYGPLRTVWIARNPPGFAFVEFEDPRDAEDAVRGLDGKVICGSRVRVELSTGMPRRSRFDRPPARRPFDPNDRCYECGEKGHYAYDCHRYSRRRRSRSRSRSHSRSRGRRYSRSRSRSRGRRSRSASPRRSRSISLRRSRSASLRRSRSGSIKGSRYFQSPSRSRSRSRSISRPRSSRSPSGSPRRSASPERMD

SEQ ID NO: 13152 - protein, 255 aa, Homo sapiens
MALLWGLLVLSWSCLQGPCSVFSPVSAMEPLGRQLTSGPNQEQVSPLTLLKLGNQEPGGQTALKSPPGVCSRDPTPEQTHRLARAMMAFTADLFSLVAQTSTCPNLILSPLSVALALSHLALGAQNHTLQRLQQVLHAGSGPCLPHLLSRLCQDLGPGAFRLAARMYLQKGFPIKEDFLEQSEQLFGAKPVSLTGKQEDDLANINQWVKEATEGKIQEFLSGLPEDTVLLLLNAIHFQGFWRNKFDPSLTQRDSF

SEQ ID NO: 13153 - protein, 317 aa, Homo sapiens
MTSRTRVTWPSPPRPLPVPAAAAVAFGAKGTDPAEARSSRGIEEAGPRAHGRAGREPERRRSRQQRRGGLQARRSTLLKTCARARATAPGAMKMVAPWTRFYSNSCCLCCHVRTGTILLGVWYLIINAVVLLILLSALADPDQYNFSSSELGGDFEFMDDANMCIAIAISLLMILICAMATYGAYKQRAAWIIPFFCYQIFDFALNMLVAITVLIYPNSIQEYIRQLPPNFPYRDDVMSVNPTCLVLIILLFISIILTFKGYLISCVWNCYRYINGRNSSDVLVYVTSNDTTVLLPPYDDATVNGAAKEPPPPYVSA

SEQ ID NO: 13154 - protein, 342 aa, Homo sapiens
MSLHGKRKEIYKYEAPWTVYAMNWSVRPDKRFRLALGSFVEEYNNKVQLVGLDEESSEFICRNTFDHPYPTTKLMWIPDTKGVYPDLLATSGDYLRVWRVGETETRLECLLNNNKNSDFCAPLTSFDWNEVDPYLLGTSSIDTTCTIWGLETGQVLGRVNLVSGHVKTQLIAHDKEVYDIAFSRAGGGRDMFASVGADGSVRMFDLRHLEHSTIIYEDPQHHPLLRLCWNKQDPNYLATMAMDGMEVVILDVRVPCTPVARLNNHRACVNGIAWAPHSSCHICTAADDHQALIWDIQQMPRAIEDPILAYTAEGEINNVQWASTQPDWIAICYNNCLEILRV

SEQ ID NO: 13155 - protein, 175 aa, Homo sapiens
MSRVLVPCHVKGSVALQVGDVRTSQGRPGVLVIDVTFPSVAPFELQEITFKNYYTAFLSIRVRQYTSAHTPAKWVTCLRDYCLMPDPHSEEGAQEYVSLFKHQSPSVTFPKWLSHPVPCEQPALLREGLPDPSRVSSEVQQMWALTEMIRASHTSARIGRFDVDGCYDLNLLSYT

SEQ ID NO: 13156 - protein, 306 aa, Homo sapiens
MDTLDRVVKPKTKRAKRFLEKREPKLNENIKNAMLIKGGNANATVTKVLKDVYALKKPYGVLYKKKNITRPFEDQTSLEFFSKKSDCSLFMFGSHNKKRPNNLVIGRMYDYHVLDMIELGIENFVSLKDIKNSKCPEGTKPMLIFAGDDFDVTEDYRRLKSLLIDFFRGPTVSNIRLAGLEYVLHFTALNGKIYFRSYKLLLKKSGCRTPRIELEEMGPSLDLVLRRTHLASDDLYKLSMKMPKALKPKKKKNISHDTFGTTYGRIHMQKQDLSKLQTRKMKGLKKRPAERITEDHEKKSKRIKKN

SEQ ID NO: 13157 - protein, 871 aa, Homo sapiens
MIKKFDKKDEESGSGSNPFQHLEKSAVLQEARIFNETPINPRRCLHILTKILYLLNQGEHFGTTEATEAFFAMTRLFQSNDQTLRRMCYLTIKEMATISEDVIIVTSSLTKDMTGKEDVYRGPAIRALCRITDGTMLQAIERYMKQAIVDKVSSVSSSALVSSLHMMKISYDVVKRWINEAQEAASSDNIMVQYHALGVLYHLRKNDRLAVSKMLNKFTKSGLKSQFAYCMLIRIASRLLKETEDGHESPLFDFIESCLRNKHEMVIYEAASAIIHLPNCTARELAPAVSVLQLFCSSPKPALRYAAVRTLNKVAMKHPSAVTACNLDLENLITDSNRSIATLAITTLLKTGSESSVDRLMKQISSFVSEISDEFKVVVVQAISALCQKYPRKHSVMMTFLSNMLRDDGGFEYKRAIVDCIISIVEENPESKEAGLAHLCEFIEDCEHTVLATKILHLLGKEGPRTPVPSKYIRFIFNRVVLENEAVRAAAVSALAKFGAQNESLLPSILVLLQRCMMDTDDEVRDRATFYLNVLQQRQMALNATYIFNGLTVSVPGMEKALHQYTLEPSEKPFDMKSIPLAMAPVFEQKAEITLVATKPEKLAPSRQDIFQEQLAAIPEFLNIGPLFKSSEPVQLTEAETEYFVRCIKHMFTNHIVFQFDCTNTLNDQLLEKVTVQMEPSDSYEVLSCIPAPSLPYNQPGICYTLVRLPDDDPTAVAGSFSCTMKFTVRDCDPNTGVPDEDGYDDEYVLEDLEVTVSDHIQKVLKPNFAAAWEEVGDTFEKEETFALSSTKTLEEAVNNIITFLGMQPCERSDKVPENKNSHSLYLAGIFRGGYDLLVRSRLALADGVTMQVTVRSKERTPVDVILASVG

SEQ ID NO: 13158 - protein, 772 aa, Homo sapiens
MQFQLTLFLHLGWLSYSKAQDDCNRGACHPTTGDLLVGRNTQLMASSTCGLSRAQKYCILSYLEGEQKCFICDSRFPYDPYDQPNSHTIENVIVSFEPDREKKWWQSENGLDHVSIRLDLEALFRFSHLILTFKTFRPAAMLVERSTDYGHNWKVFKYFAKDCATSFPNITSGQAQGVGDIVCDSKYSDIEPSTGGEVVLKVLDPSFEIENPYSPYIQDLVTLTNLRINFTKLHTLGDALLGRRQNDSLDKYYYALYEMIVRGSCFCNGHASECRPMQKMRGDVFSPPGMVHGQCVCQHNTDGPNCERCKDFFQDAPWRPAADLQDNACRSCSCNSHSSRCHFDMTTYLASGGLSGGVCEDCQHNTEGQHCDRCRPLFYRDPLKTISDPYACIPCECDPDGTISGGICVSHSDPALGSVAGQCLCKENVEGAKCDQCKPNHYGLSATDPLGCQPCDCNPLGSLPFLTCDVDTGQCLCLSYVTGAHCEECTVGYWGLGNHLHGCSPCDCDIGGAYSNVCSPKNGQCECRPHVTGRSCSEPAPGYFFAPLNFYLYEAEEATTLQGLAPLGSETFGQSPAVHVVLGEPVPGNPVTWTGPGFARVLPGAGLRFAVNNIPFPVDFTIAIHYETQSAADWTVQIVVNPPGGSEHCIPKTLQSKPQSFALPAATRIMLLPTPICLEPDVQYSIDVYFSQPLQGESHAHSHVLVDSAAVQWHNLGSLQPPPPECKQFSCFSFPSSWDYRHPPPHLANFCIFSRDGVSPHWPGWSQTPDLR

SEQ ID NO: 13159 - protein, 396 aa, Homo sapiens
MPPKRNEKYKLPIPFPEGKVLDDMEGNQWVLGKKIGSGGFGLIYLAFPTNKPEKDARHVVKVEYQENGPLFSELKFYQRVAKKDCIKKWIERKQLDYLGIPLFYGSGLTEFKGRSYRFMVMERLGIDLQKISGQNGTFKKSTVLQLGIRMLDVLEYIHENEYVHGDIKAANLLLGYKNPDQVYLADYGLSYRYCPNGNHKQYQENPRKGHNGTIEFTSLDAHKGVALSRRSDVEILGYCMLRWLCGKLPWEQNLKDPVAVQTAKTNLLDELPQSVLKWAPSGSSCCEIAQFLVCAHSLAYDEKPNYQALKKILNPHGIPLGPLDFSTKGQSINVHTPNSQKVDSQKAATKQVNKAHNRLIEKKVHSERSAESCATWKVQKEEKLIGLMNNEAAQFR

SEQ ID NO: 13160 - protein, 193 aa, Homo sapiens
MARERGQLVFLEGLKSAVDVVFQAQKEPHPLQFLREANAGNLKPLFEFVREALKPVDSGEARWTYPVLLVDDLSVLLSLGMGAVAVLDFIHYCRATVCWELKGNMVVLVHDSGDAEDEENDILLNGLSHQSHLILRAEGLATGFCRDVHGQLRILWRRPSQPAVHRDQSFTYQYKIQDKSVSFFAKGMSPAVL

SEQ ID NO: 13161 - protein, 150 aa, Homo sapiens
MVVALRYVWPLLLCSPCLLIQIPEEYEGHHVMEPPVITEQSPRRLVVFPTDDISLKCEASGKPEVQFRWTRDGVHFKPKEELGVTVYQSPHSGSFTITGNNSNFAQRFQGIYRCFASNKLGTAMSHEIRLMAEGAPKWPKETVKPVEVEE

SEQ ID NO: 13162 - protein, 91 aa, Homo sapiens
MGIQGGSVLFGLLLVLAVFCHSGHSLQCYNCPNPTADCKTAVNCSSDFDACLITKADTHPLRGGGQDSYACSYKLRSVVFQALHGIGVTSV

SEQ ID NO: 13163 - protein, 244 aa, Homo sapiens
MCSTMSAPTCLAHLPPCFLLLALVLVPSDASGQSSRNDWQVLQPEGPMLVAEGAGDPEPDLWIIQPQELVLGTTGDTVFLNCTVLGDGPPGPIRWFQGAGLSREAIYNFGGISHPKETAVQASNNDFSILLQNVSSEDAGTYYCVKFQRKPNRQYLSGQGTSLKVKAKSTSSKEAEFTSEPATEMSPTGLLVVFAPVVLGLKAITLAALLLALATSRRSPGQEDVKTTGPAGAMNTLAWSKGQE

SEQ ID NO: 13164 - protein, 154 aa, Homo sapiens
MNGLPSAEAPGGAGCALAGLPPLPRGLSGLLNASGGSWRELERVYSQRSRIHDELSRAARAPDGPRHAAGAANAGPAAGPRRPVNLDSALAALRKEMLSAGGAAAVGHVLVVPAVGPVRVNPGLQTPVPRPELLPGPVILPPFGQLLPTGCGPV

SEQ ID NO: 13165 - protein, 50 aa, Homo sapiens
MLTPAFDLSQDPDFLTIAIRVPYARVSEFDVYFEGSDFKFYAKPYFLRTS

SEQ ID NO: 13166 - protein, 955 aa, Homo sapiens
MLPGRLCWVPLLLALGVGSGSGGGGDSRQRRLLAAKVNKHKPWIETSYHGVITENNDTVILDPPLVALDKDAPVPFAGEICAFKIHGQELPFEAVVLNKTSGEGRLRAKSPIDCELQKEYTFIIQAYDCGAGPHETAWKKSHKAVVHIQVKDVNEFAPTFKEPAYKAVVTEGKIYDSILQVEAIDEDCSPQYSQICNYEIVTTDVPFAIDRNGNIRNTEKLSYDKQHQYEILVTAYDCGQKPAAQDTLVQVDVKPVCKPGWQDWTKRIEYQPGSGSMPLFPSIHLETCDGAVSSLQIVTELQTNYIGKGCDRETYSEKSLQKLCGASSGIIDLLPSPSAATNWTAGLLVDSSEMIFKFDGRQGAKVPDGIVPKNLTDQFTITMWMKHGPSPGVRAEKETILCNSDKTEMNRHHYALYVHNCRLVFLLRKDFDQADTFRPAEFHWKLDQICDKEWHYYVINVEFPVVTLYMDGATYEPYLVTNDWPIHPSHIAMQLTVGACWQGGEVTKPQFAQFFHGSLASLTIRPGKMESQKVISCLQACKEGLDINSLESLGQGIKYHFNPSQSILVMEGDDIGNINRALQKVSYINSRQFPTAGVRRLKVSSKVQCFGEDVCISIPEVDAYVMVLQAIEPRITLRGTDHFWRPAAQFESARGVTLFPDIKIVSTFAKTEAPGDVKTTDPKSEVLEEMLHNLDFCDILVIGGDLDPRQECLELNHSELHQRHLDATNSTAGYSIYGVGSMSRYEQVLHHIRYRNWRPASLEARRFRIKCSELNGRYTSNEFNLEVSILHEDQVSDKEHVNHLIVQPPFLQSVHHPESRSSIQHSSVVPSIATVVIIISVCMLVFVVAMGVYRVRIAHQHFIQETEAAKESEMDWDDSALTITVNPMEKHEGPGHGEDETEGEEEEEAEEEMSSSSGSDDSEEEEEEEGMGRGRHGQNGARQAQLEWDDSTLPY

SEQ ID NO: 13167 - protein, 1885 aa, Homo sapiens
MSGALLWPLLPLLLLLLSARDGVRAAQPQAPGYLIAAPSVFRAGVEEVISVTIFNSPREVTVQAQLVAQGEPVVQSQGAILDKGTIKLKVPTGLRGQALLKVWGRGWQAEEGPLFHNQTSVTVDGRGASVFIQTDKPVYRPQHRVLISIFTVSPNLRPVNEKLEAYILDPRGSRMIEWRHLKPFCCGITNMSFPLSDQPVLGEWFIFVEMQGHAYNKSFEVQKYVLPKFELLIDPPRYIQDLDACETGTVRARYTFGKPVAGALMINMTVNGVGYYSHEVGRPVLRTTKILGSRDFDICVRDMIPADVPEHFRGRVSIWAMVTSVDGSQQVAFDDSTPVQRQLVDIRYSKDTRKQFKPGLAYVGKVELSYPDGSPAEGVTVQIKAELTPKDNIYTSEVVSQRGLVGFEIPSIPTSAQHVWLETKVMALNGKPVGAQYLPSYLSLGSWYSPSQCYLQLQPPSHPLQVGEEAYFSVKSTCPCNFTLYYEVAARGNIVLSGQQPAHTTQQRSKRAAPALEKPIRLTHLSETEPPPAPEAEVDVCVTSLHLAVTPSMVPLGRLLVFYVRENGEGVADSLQFAVETFFENQVSVTYSANETQPGEVVDLRIRAARGSCVCVAAVDKSVYLLRSGFRLTPAQVFQELEDYDVSDSFGVSREDGPFWWAGLTAQRRRRSSVFPWPWGITKDSGFAFTETGLVVMTDRVSLNHRQDGGLYTDEAVPAFQPHTGSLVAVAPSRHPPRTEKRKRTFFPETWIWHCLNISDPSGEGTLSVKVPDSITSWVGEAVALSTSQGLGIAEPSLLKTFKPFFVDFMLPALIIRGEQVKIPLSVYNYMGTCAEVYMKLSVPKGIQFVGHPGKRHVTKKMCVAPGEAEPIWVVLSFSDLGLNNITAKALAYGDTNCCRDGRSSKHPEENHADRRVPIGVDHVRRSVMVEAEGVPRAYTYSAFFCPSERVHISTPNKYEFQYVQRPLRLTRFDVAVRAHNDARVALSSGPQDTAGMIEIVLGGHQNTRSWISTSKMGEPVASAHTAKILSWDEFRTFWISWRGGLIQVGHGPEPSNESVIVAWTLPRPPEVQFIGFSTGWGSMGEFRIWRKMEVDESYSEAFTLGVPHGAIPGSERATASIIGDVMGPTLNHLNNLLRLPFGCGEQNMIHFAPNVFVLKYLQKTQQLSPEVERETTDYLVQGYQRQLTYKRQDGSYSAFGERDASGSMWLTAFVLKSFAQARSFIFVDPRELAAAKSWIIQQQQADGSFLAVGRVLNKDIQGGIHGTVPLTAYVVVALLETGTASEEERGSTDKARHFLESAAPLAMDPYSCALTTYALTLLRSPAAPEALRKLRSLAIMRDGVTHWSLSNSWDVDKGTFLSFSDRVSQSVVSAEVEMTAYALLTYTLLGDVAAALPVVKWLSQQRNALGGFSSTQDTCVALQALAEYAILSYAGGINLTVSLASTNLDYQETFELHRTNQKVLQTAAIPSLPTGLFVSAKGDGCCLMQIDVTYNVPDPVAKPAFQLLVSLQEPEAQGRPPPMPASAAEGSRGDWPPADDDDPAADQHHQEYKVMLEVCTRWLHAGSSNMAVLEVPLLSGFRADIESLEQLLLDKHMGMKRYEVAGRRVLFYFDEIPSRCLTCVRFRALRECVVGRTSALPVSVYDYYEPAFEATRFYNVSTHSPLARELCAGPACNEVERAPARGPGWFPGESGPAVAPEEGAAIARCGCDHDCGAQGNPVCGSDGVVYASACRLREAACRQAAPLEPAPPSCCALEQRLPASSSSTYGDDLASVAPGPLQQDVKLNGAGLEVEDSDPEPEGEAEDRVTAGPRPPVSSGNLESSTQSASPFHRWGQTPAPQRHSGRVVGAHRPGLLSPVFVYSPAFQSGGEEGLWMSNTCTLR

SEQ ID NO: 13168 - protein, 698 aa, Homo sapiens
MRRFLLLYATQQGQAKAIAEEICEQAVVHGFSADLHCISESDKYDLKTETAPLVVVVSTTGTGDPPDTARKFVKEIQNQTLPVDFFAHLRYGLLGLGDSEYTYFCNGGKIIDKRLQELGARHFYDTGHADDCVGLELVVEPWIAGLWPALRKHFRSSRGQEEISGALPVASPASSRTDLVKSELLHIESQVELLRFDDSGRKDSEVLKQNAVNSNQSNVVIEDFESSLTRSVPPLSQASLNIPGLPPEYLQVHLQESLGQEESQVSVTSADPVFQVPISKAVQLTTNDAIKTTLLVELDISNTDFSYQPGDAFSVICPNSDSEVQSLLQRLQLEDKREHCVLLKIKADTKKKGATLPQHIPAGCSLQFIFTWCLEIRAIPKKAFLRALVDYTSDSAEKRRLQELCSKQGAADYSRFVRDACACLLDLLLAFPSCQPPLSLLLEHLPKLQPRPYSCASSSLFHPGKLHFVFNIVEFLSTATTEVLRKGVCTGWLALLVASVLQPNIHASHEDSGKALAPKISISPRTTNSFHLPDDPSIPIIMVGPGTGIAPFIGFLQHREKLQEQHPDGNFGAMWLFFGCRHKDRDYLFRKELRHFLKHGILTHLKVSFSRDAPVGEEEAPAKYVQDNIQLHGQQVARILLQENGHIYVCGDAKNMAKDVHDALVQIISKEVGVEKLEAMKTLATLKEEKRYLQDIWS

SEQ ID NO: 13169 - protein, 122 aa, Homo sapiens
MAPGSRTSLLLAFALLCLPWLQEAGAVQTVPLSRLFDHAMLQAHRAHQLAIDTYQEFRLEDGSRRTGQILKQTYSKFDTNSHNHDALLKNYGLLYCFRKDMDKVETFLRMVQCRSVEGSCGF

SEQ ID NO: 13170 - protein, 228 aa, Homo sapiens
MAAAGARPVELGFAESAPAWRLRSEQFPSKVGGRPAWLGAAGLPGPQALACELCGRPLSFLLQVYAPLPGRPDAFHRCIFLFCCREQPCCAGLRVFRNQLPRKNDFYSYEPPSENPPPETGESVCLQLKSGAHLCRVCGCLGPKTCSRCHKAYYCSKEHQTLDWRLGHKQACAQPDHLDHIIPDHNFLFPEFEIVIETEDEIMPEVVEKEDYSEIIGSMGKQFQDFIH

SEQ ID NO: 13171 - protein, 238 aa, Homo sapiens
MWPLWRLVSLLALSQALPFEQRGFWDFTLDDGPFMMNDEEASGADTSGVLDPDSVTPTYSAMCPFGCHCHLRVVQCSDLGLKSVPKEISPDTTLLDLQNNDISELRKDDFKGLQHLYVRSWEEPAGLQQRAGVRALVLVNNKISKIHEKAFSPLRKLQKLYISKNHLVEIPPNLPSSLVELRIHDNRIRKVPKGVFSGLRNMNCIEMGGNPLENSGFEPGAFDGLKLNYLRISEAKLT

SEQ ID NO: 13172 - protein, 777 aa, Homo sapiens
MFSLKPPKPTFRSYLLPPPQTDDKINSEPKIKKLEPVLLPGEIVVNEVNFVRKCIATDTSQYDLWGKLICSNFKISFITDDPMPLQKFHYRNLLLGEHDVPLTCIEQIVTVNDHKRKQKVLGPNQKLKFNPTELIIYCKDFRIVRFRFDESGPESAKKVCLAIAHYSQPTDLQLLFAFEYVGKKYHNSANKINGIPSGDGGGGGGGGNGAGGGSSQKTPLFETYSDWDREIKRTGASGWRVCSINEGYMISTCLPEYIVVPSSLADQDLKIFSHSFVGRRMPLWCWSHSNGSALVRMALIKDVLQQRKIDQRICNAITKSHPQRSDVYKSDLDKTLPNIQEVQAAFVKLKQLCVNEPFEETEEKWLSSLENTRWLEYVRAFLKHSAELVYMLESKHLSVVLQEEEGRDLSCCVASLVQVMLDPYFRTITGFQSLIQKEWVMAGYQFLDRCNHLKRSEKESPLFLLFLDATWQLLEQYPAAFEFSETYLAVLYDSTRISLFGTFLFNSPHQRVKQSTEFAISKNIQLGDEKGLKFPSVWDWSLQFTAKDRTLFHNPFYIGKSTPCIQNGSVKSFKRTKKSYSSTLRGMPSALKNGIISDQELLPRRNSLILKPKPDPAQQTDSQNSDTEQYFREWFSKPANLHGVILPRVSGTHIKLWKLCYFRWVPEAQISLGGSITAFHKLSLLADEVDVLSRMLRQQRSGPLEACYGELGQSRMYFNASGPHHTDTSGTPEFLSSSFPFSPVGNLCRRSILGTPLSKFLSGAKIWLSTETLANED

SEQ ID NO: 13173 - protein, 955 aa, Homo sapiens
MEVTCLLLLALIPFHCRGQGVYAPAQAQIVHAGQACVVKEDNISERVYTIREGDTLMLQCLVTGHPRPQVRWTKTAGSASDKFQETSVFNETLRIERIARTQGGRYYCKAENGVGVPAIKSIRVDVQYLDEPMLTVHQTVSDVRGNFYQEKTVFLRCTVNSNPPARFIWKRGSDTLSHSQDNGVDIYEPLYTQGETKVLKLKNLRPQDYASYTCQVSVRNVCGIPDKAITFRLTNTTAPPALKLSVNETLVVNPGENVTVQCLLTGGDPLPQLQWSHGPGPLPLGALAQGGTLSIPSVQARDSGYYNCTATNNVGNPAKKTVNLLVRSMKNATFQITPDVIKESENIQLGQDLKLSCHVDAVPQEKVTYQWFKNGKPARMSKRLLVTRNDPELPAVTSSLELIDLHFSDYGTYLCMASFPGAPVPDLSVEVNISSETVPPTISVPKGRAVVTVREGSPAELQCEVRGKPRPPVLWSRVDKEAALLPSGLPLEETPDGKLRLERVSRDMSGTYRCQTARYNGFNVRPREAQVQLNVQFPPEVEPSSQDVRQALGRPVLLRCSLLRGSPQRIASAVWRFKGQLLPPPPVVPAAAEAPDHAELRLDAVTRDSSGSYECSVSNDVGSAACLFQVSAKAYSPEFYFDTPNPTRSHKLSKNYSYVLQWTQREPDAVDPVLNYRLSIRQLNQHNAVVKAIPVRRVEKGQLLEYILTDLRVPHSYEVRLTPYTTFGAGDMASRIIHYTEPINSPNLSDNTCHFEDEKICGYTQDLTDNFDWTRQNALTQNPKRSPNTGPPTDISGTPEGYYMFIETSRPRELGDRARLVSPLYNASAKFYCVSFFYHMYGKHIGSLNLLVRSRNKGALDTHAWSLSGNKGNVWQQAHVPISPSGPFQIIFEGVRGPGYLGDIAIDDVTLKKGECPRKQTDPNKVVVMPGSGAPCQSSPQLWGPMAIFLLALQR

SEQ ID NO: 13174 - protein, 197 aa, Homo sapiens
MAAWKSWTALRLCATVVVLDMVVCKGFVEDLDESFKENRNDDIWLVDFYAPWCGHCKKLEPIWNEVGLEMKSIGSPVKVGKMDATSYSSIASEFGVRGYPTIKLALIRPLPSQQMFEHMQKRHRVFFVYVGGESPLKEKYIDAASELIVYTYFFSASEEVVPEYVTLKEMPAVLVFKDETYFVYDGKFQIFNSCKTF

SEQ ID NO: 13175 - protein, 34 aa, Homo sapiens
MGGPRAWALLCLGLLLPGGGAAWSIGAAPFSGRR

SEQ ID NO: 13176 - protein, 1211 aa, Homo sapiens
MKNLLTEKCISSHNFHQKVIKQRMEKKVDSRYFKDGAVKKPYSAKTLSNKKSSASFGIRRELPSTSHLVQYRGTHTCTRQGRLRELRIRCVARKFLYLWIRMTFGRVFPSKARFYYEQRLLRKVFEEWKEEWWVFQHEWKLCVRADCHYRYYLYNLMFQTWKTYVRQQQEMRNKYIRAEVHDAKQKMRQAWKSWLIYVVVRRTKLQMQTTALEFRQRIILRVWWSTWRQRLGQVRVSRALHASALKHRALSLQVQAWSQWREQLLYVQKEKQKVVSAVKHHQHWQKRRFLKAWLEYLQVRRVKRQQNEMAERFHHVTVLQIYFCDWQQAWERRESLYAHHAQVEKLARKMALRRAFTHWKHYMLLCAEEAAQFEMAEEHHRHSQLLLHRFWNLWRSQIEQKKERELLPLLHAAWDHYRIALLCKCIELWLQYTQKRRYKQLLQARADGHFQQRALPAAFHTWNRLWRWRHQENVLSARATRFHRETLEKQVFSLWRQKMFQHRENRLAERMAILHAERQLLYRSWFMWHQQAAARHQEQEWQTVACAHHRHGRLKKAFCLWRESAQGLRTERTGRVRAAEFHMAQLLRWAWSQWRECLALRGAERQKLMRADLHHQHSVLHRALQAWVTYQGRVRSILREVAARESQHNRQLLRGALRRWKENTMARVDEAKKTFQASTHYRRTICSKVLVQWREAVSVQMYYRQQEDCAIWEAQKVLDRGCLRTWFQRWWDCSRRSAQQRLQLERAVQHHHRQLLLEGLARWKTHHLQCVRKRLLHRQSTQLLAQRLSRTCFRQWRQQLAARRQEQRATVRALWFWAFSLQAKVWATWLAFVLERRRKKARLQWALQAYQGQLLQEGATRLLRFAASMKASRQQLQAQQQVQAAHSLHRAVRRCATLWKQKVLGRGGKPQPLAAIAPSRKVTFEGPLLNRIAAGAGDGTLETKRPQASRPLGALGRLAAEEPHALELNTAHSARKQPRRPHFLLEPAQSQRPQKPQEHGLGMAQPAAPSLTRPFLAEAPTALVPHSPLPGALSSAPGPKQPPTASTGPELLLLPLSSFMPCGAAAPARVSAQRATPRDKPPVPSSLASVPDPHLLLPGDFSATRAGPGLSTAGSLDLEAELEEIQQQLLHYQTTKQNLWSCRRQASSLRRWLELNREEPGPEDQEVEQQVQKELEQVEMQIQLLAEELQAQRQPIGACVARIQALRQALC

SEQ ID NO: 13177 - protein, 146 aa, Homo sapiens
MAAPALSWRLPLLILLLPLATSWASAAVNGTSQFTCFYNSRANISCVWSQDGALQDTSCQVHAWPDRRRWNQTCELLPVSQASWACNLILGAPDSQKLTTVDIVTLRVLCREGVRWRVMAIQDFKPFENLRLMAPISLQVVHVETH

SEQ ID NO: 13178 - protein, 77 aa, Homo sapiens
MRTLLPPALLTCWLLAPVNSIHPECRFHLEIQEEETKCAELLRSQTEKHKGHTKGFILIHAGGLKRILDPHTYPLAP

SEQ ID NO: 13179 - protein, 81 aa, Homo sapiens
MHDFYRCHTCNTTDRNAICVNCIKKCHQGHDVEFIRHDRFFCDCGAGTLSNPCTLAGEPTHDTDTLYDSAPPIESNTLQHN

SEQ ID NO: 13180 - protein, 122 aa, Homo sapiens
MARSLGVLVALPFPLPVGFNAEEAHNIVKECVDGVLGGEDYNHNNINQWTASIVEQSLTHLVKLGKAYKYIVTCAVVQKSAYGFHTASSCFWDTTSDGTCTVRWENRTMNCIVNVFAIAIVL

SEQ ID NO: 13181 - protein, 510 aa, Homo sapiens
MRKPAAGFLPSLLKVLLLPLAPAAAQDSTQASTPGSPLSPTEYERFFALLTPTWKAETTCRLRATHGCRNPTLVQLDQYENHGLVPDGAVCSNLPYASWFESFCQFTHYRCSNHVYYAKRVLCSQPVSILSPNTLKEIEASAEVSPTTMTSPISPHFTAPEHKQEQGVEHRQEPTQEHKQEEGQKQEEQEEEQEEEGKQEEGQGTKEGREAVSQLQTDSEPKFHSESLSSNPSSFAPRVREVESTPMIMENIQELIRSAQEIDEMNEIYDENSYWRNQNPGSLLQLPHTEALLVLCYSIVENTCIITPTAKAWKYMEEEILGFGKSVCDSLGRRHMSTCALCDFCSLKLEQCHSEASLQRQQCDTSHKTPFVSPLLASQSLSIGNQVGSPESGRFYGLDLYGGLHMDFWCARLATKGCEDVRVSGWLQTEFLSFQDGDFPTKICDTDYIQYPNYCSFKSQQCLMRNRNRKVSRMRCLQNETYSALSPGKSEDVVLRWSQEFSTLTLGQFG

SEQ ID NO: 13182 - protein, 242 aa, Homo sapiens
MAAVGAGGSTAAPGPGAVSAGALEPGTASAAHRRLKYISLAVLVVQNASLILSIRYARTLPGDRFFATTAVVMAEVLKGLTCLLLLFAQKRGNVKHLVLFLHEAVLVQYVDTLKLAVPSLIYTLQNNLQYVAISNLPAATFQPSPRCSQSHSLCLCLRLRALRSPAASRAATTTAAVFPPWRPHHGALSAKVSAGEVRAGSNGGTQGRGTGVEGVGHLQDPSRHPPGPGSSGFGRWSFLPGH

SEQ ID NO: 13183 - protein, 722 aa, Homo sapiens
RGPGRRCLLALVLFCAWGTLAVVAQKPGAGCPSRCLCFRTTVRCMHLLLEAVPAVAPQTSILDLRFNRIREIQPGAFRRLRNLNTLLLNNNQIKRIPSGAFEDLENLKYLYLYKNEIQSIDRQAFKGLASLEQLYLHFNQIETLDPDSFQHLPKLERLFLHNNRITHLVPGTFNHLESMKRLRLDSNTLHCDCEILWLADLLKTYAESGNAQAAAICEYPRRIQGRSVATITPEELNCERPRITSEPQDADVTSGNTVYFTCRAEGNPKPEIIWLRNNNELSMKTDSRLNLLDDGTLMIQNTQETDQGIYQCMAKNVAGEVKTQEVTLRYFGSPARPTFVIQPQNTEVLVGESVTLECSATGHPPPRISWTRGDRTPLPVDPRVNITPSGGLYIQNVVQGDSGEYACSATNNIDSVHATAFIIVQALPQFTVTPQDRVVIEGQTVDFQCEAKGNPPPVIAWTKGGSQLSVDRRHLVLSSGTLRISGVALHDQGQYECQAVNIIGSQKVVAHLTVQPRVTPVFASIPSDTTVEVGANVQLPCSSQGEPEPAITWNKDGVQVTESGKFHISPEGFLTINDVGPADAGRYECVARNTIGSASVSMVLSVNVPDVSRNGDPFVATSIVEAIATVDRAINSTRTHLFDSRPRSPNDLLALFRYPRDPYTVEQARAGEIFERTLQLIQEHVQHGLMVDLNGTSQCQSLFFLLHGLSNGVEHASVKSHS

SEQ ID NO: 13184 - protein, 390 aa, Homo sapiens
MFPAQAKENAGFSGCGGDTEIDWKAYMAEVEGVINGTYDYTQLQGDTGPLVYPAGFVYIFMGLYYATSRGTDIRMAQNIFAVLYLATLLLVFLIYHQTCKVPPFVFFFMCCASYRVHSIFVLRLFNDPVAMVLLFLSINLLLAQRWGWGCCFFSLAVSVKMNVLLFAPGLLFLLLTQFGFRGALPKLGICAGLQVVLGLPFLLENPSGYLSRSFDLGRQFLFHWTVNWRFLPEALFLHRAFHLALLTAHLTLLLLFALCRWHRTGESILSLLRDPSKRKVPPQPLTPNQIVSTLFTSNFIGICFSRSLHYQFYVWYFHTLPYLLWAMPARWLTHLLRLLVLGLIELSWNTYPSTSCSSAALHICHAVILLQLWLGPQPFPKSTQHSKKAH

SEQ ID NO: 13185 - protein, 107 aa, Homo sapiens
MPPPWHPPPRLLAVCLLTTTQATVVRDLVAVRMAEEQEFTQLCKLPAQPSHPHCVNNTYRSAQHSQALLRGLLALRDSGILFDVVLVVEGRHIEAHRILLAASCDYF

SEQ ID NO: 13186 - protein, 169 aa, Homo sapiens
MKHTLALLAPLLGLGLGLALSQLAAGATDCKFLGPAEHLTFTPAARARWLAPRVRAPGLLDSLYGTVRRFLSVVQLNPFPSELVKALLNELASVKVNEAEARAGQWGSGHPSCPAACPGGAVRGGLRGMRCDRGPLPAAGAHCRALLLLLPLPPALRGTSEDRAQGAGL

SEQ ID NO: 13187 - protein, 668 aa, Homo sapiens
MDLVLKRCLLHLAVIGALLAVGATKVPRNQDWLGVSRQLRTKAWNRQLYPEWTEAQRLDCWRGGQVSLKVSNDGPTLIGANASFSIALNFPGSQKVLPDGQVIWVNNTIINGSQVWGGQPVYPQETDDACIFPDGGPCPSGSWSQKRSFVYVWKTWGQYWQVLGGPVSGLSIGTGRAMLGTHTMEVTVYHRRGSRSYVPLAHSSSAFTITDQVPFSVSVSQLRALDGGNKHFLRNQPLTFALQLHDPSGYLAEADLSYTWDFGDSSGTLISRALVVTHTYLEPGPVTAQVVLQAAIPLTSCGSSPVPGTTDGHRPTAEAPNTTAGQVPTTEVVGTTPGQAPTAEPSGTTSVQVPTTEVISTAPVQMPTAESTGMTPEKVPVSEVMGTTLAEMSTPEATGMTPAEVSIVVLSGTTAAQVTTTEWVETTARELPIPEPEGPDASSIMSTESITGSLGPLLDGTATLRLVKRQVPLDCVLYRYGSFSVTLDIVQGIESAEILQAVPSGEGDAFELTVSCQGGLPKEACMEISSPGCQPPAQRLCQPVLPSPACQLVLHQILKGGSGTYCLNVSLADTNSLAVVSTQLIMPVPGILLTGQEAGLGQVPLIVGILLVLMAVVLASLIYRRRLMKQDFSVPQLPHSSSHWLRLPRIFCSCPIGENSPLLSGQQV

SEQ ID NO: 13188 - protein, 506 aa, Homo sapiens
MAWNSPSRRPVWQGGAPREDGGARGVWLPSSGQVSAQRTGRRLVGLEPTPTGSLTPRPPRPVPGMPRARKGNTLRKGGQRRGGGARSSAQADSGSSDDEAASEARSTASECPSLLSTTAEDSLGGDVVDEQGQQEDLEEKLKEYVDCLTDKSAKTRQGALESLRLALASRLLPDFLLERRLTLADALEKCLKKGKGEEQALAAAVLGLLCVQLGPGPKGEELFHSLQPLLVSVLSDSTASPAARLHCASALGLGCYVAAADIQDLVSCLACLESVFSRFYGLGGSSTSPVVPASLHGLLSAALQAWALLLTICPSTQISHILDRQLPRLPQLLSSESVNLRIAAGETIALLFELARDLEEEFVYEDMEALCSVLRTLATDSNKYRAKADRRRQRSTFRAVLHSVEGGECEEEIVRFGFEVLYMDSWARHRIYAAFKEVLGSGMHHHLQNNELLRDIFGLGPVLLLDATALKACKVPRFEKHLYNAAAFKARTKARSRVRDKRADIL

SEQ ID NO: 13189 - protein, 311 aa, Homo sapiens
MGLTLLLLLLLGLEGQGIVGSLPEVLQAPVGSSILVQCHYRLQDVKAQKVWCRFLPEGCQPLVSSAVDRRAPAGRRTFLTDLGGGLLQVEMVTLQEEDAGEYGCMVDGARGPQILHRVSLNILPPEEEEETHKIGSLAENAFSDPAGSANPLEPSQDEKSIPLIWGAVLLVGLLVAAVVLFAVMAKRKQGNRLGVCGRFLSSRVSGMNPSSVVHHVSDSGPAAELPLDVPHIRLDSPPSFDNTTYTSLPLDSPSGKPSLPAPSSLPPLPPKVLVCSKPVTYATVIFPGGNKGGGTSCGPAQNPPNNQTPSS

SEQ ID NO: 13190 - protein, 326 aa, Homo sapiens
MAAPEPLRPRLCRLVRGEQGYGFHLHGEKGRRGQFIRRVEPGSPAEAAALRAGDRLVEVNGVNVEGETHHQVVQRIKAVEGQTRLLVVDQETDEELRRRQLTCTEEMAQRGLPPAHDPWEPKPDWAHTGSHSSEAGKKDVSGPLRELRPRLCHLRKGPQGYGFNLHSDKSRPGQYIRSVDPGSPAARSGLRAQDRLIEVNGQNVEGLRHAEVVASIKAREDEARLLVVDPETDEHFKRLRVTPTEEHVEGPLPSPVTNGTSPAQLNGGSACSSRSDLPGSDKDTEESGLHLSPTAAEAKEKARAMRVNKRAPQMDWNRKREIFSNF

SEQ ID NO: 13191 - protein, 276 aa, Homo sapiens
MGSKALPAPIPLHPSLQLTNYSFLQAVNTFPATVDHLQGLYGLSAVQTMHMNHWTLGYPNVHEITRSTITEMAAAQGLVDARFPFPALPFTTHLFHPKQGAIAHVLPALHKDRPRFDFANLAVAATQEDPPKMGDLSKLSPGLGSPISGLSKLTPDRKPSRGRLPSKTKKEFICKFCGRHFTKSYNLLIHERTHTDERPYTCDICHKAFRRQDHLRDHRYIHSKEKPFKCQECGKGFCQSRTLAVHKTLHMQTSSPTAASSAAKCSGETVICGGTA

SEQ ID NO: 13192 - protein, 582 aa, Homo sapiens
MDFLLALVLVSSLYLQAAAEFDGRWPRQIVSSIGLCRYGGRIDCCWGWARQSWGQCQPFYVLRQRIARIRCQLKAVCQPRCKHGECIGPNKCKCHPGYAGKTCNQDLNECGLKPRPCKHRCMNTYGSYKCYCLNGYMLMPDGSCSSALTCSMANCQYGCDVVKGQIRCQCPSPGLQLAPDGRTCVDVDECATGRASCPRFRQCVNTFGSYICKCHKGFDLMYIGGKYQCHDIDECSLGQYQCSSFARCYNIRGSYKCKCKEGYQGDGLTCVYIPKVMIEPSGPIHVPKGNGTILKGDTGNNNWIPDVGSTWWPPKTPYIPPIITNRPTSKPTTRPTPKPTPIPTPPPPPPLPTELRTPLPPTTPERPTTGLTTIAPAASTPPGGITVDNRVQTDPQKPRGDVFIPRQPSNDLFEIFEIERGVSADDEAKDDPGVLVHSCNFDHGLCGWIREKDNDLHWEPIRDPAGGQYLTVSAAKAPGGKAARLVLPLGRLMHSGDLCLSFRHKVTGLHSGTLQVFVRKHGAHGAALWGRNGGHGWRQTQITLRGADIKSVVFKGEKRRGHTGEIGLDDVSLKKGHCSEER

SEQ ID NO: 13193 - protein, 156 aa, Homo sapiens
MMGSPVSHLLAGFCVWVVLGWVGGSVPNLGPAEQEQNHYLAQLFGLYGENGTLTAGGLARLLHSLGLGRVQGLRLGQHGPLTGRAASPAADNSTHRPQNPELSVDVWAGMPLGPSGWGDLEESKAPHLPRGPAPSGLDLLHRLLLLDHSLADHLNE

SEQ ID NO: 13194 - protein, 289 aa, Homo sapiens
MLLLFLLFEGLCCPGENTADPFEIQILAGCRMNAPQIFLNMAYQGSDFLSFQGISWEPSPGAGIRAQNICKVLNRYLDIKEILQSLLGHTCPRFLAGLMEAGESELKRKVKPEAWLSCGPSPGPGRLQLVCHVSGFYPKPVWVMWMRGEQEQRGTQRGDVLPNADETWYLRATLDVAAGEAAGLSCRVKHSSLGGHDLIIHWGGYSIFLILICLTVIVTLVILVVVDSRLKKQSSNKNILSPHTPSPVFLMGANTQDTKNSRHQFCLAQVSWIKNRVLKKWKTRLNQLW

SEQ ID NO: 13195 - protein, 119 aa, Homo sapiens
MEPWKPQHSFFFLLLLWLPDTTGEIVMTQSPATLSLSPGERATLSCRASQSVSSSYLSWYQQKPGQAPRLLIYGASTRATGIPARFSGSGSGTDFTLTISSLQPEDFAVYYCQQDYNLP

SEQ ID NO: 13196 - protein, 114 aa, Homo sapiens
MLTRKIKLWDINAHITCRLCSGYLIDATTVTECLHTSQARQKQEPGPGAETILKISQKSHFTLKVLWVVSEQMRPRLGERNTGETPHSSHGAARPVAAVTVLTAGSFQISRGVP

SEQ ID NO: 13197 - protein, 61 aa, Homo sapiens
MIYTMKKVHALWASVCLLLNLAPAPLNADSEEDEEHTIITDTELPPLKLMHSFCAFKADDG

SEQ ID NO: 13198 - protein, 172 aa, Homo sapiens
MERAAPSRRVPLPLLLLGGLALLAAGVDADVLLEACCADGHRMATHQKDCSLPYATESKECRMVQEQCCHSQLEELHCATGISLANEQDRCATPHGDNASLEATFVKRCCHCCLLGRAAQAQGQSCEYSLMVGYQCGQVFQACCVKSQETGDLDVGGLQETGGGPCKQQCRD

SEQ ID NO: 13199 - protein, 468 aa, Homo sapiens
MMYFVIAAMKAQIEIIPCKICGDKSSGIHYGVITCEGCKGFFRRSQQSNATYSCPRQKNCLIDRTSRNRCQHCRLQKCLAVGMSRDAVKFGRMSKKQRDSLYAEVQKHRMQQQQRDHQQQPGEAEPLTPTYNISANGLTELHDDLSNYIDGHTPEGSKADSAVSSFYLDIQPSPDQSGLDINGIKPEPICDYTPASGFFPYCSFTNGETSPTVSMAELEHLAQNISKSHLETCQYLREELQQITWQTFLQEEIENYQNKQREVMWQLCAIKITEAIQYVVEFAKRIDGFMELCQNDQIVLLKAGSLEVVFIRMCRAFDSQNNTVYFDGKYASPDVFKSLGCEDFISFVFEFGKSLCSMHLTEDEIALFSAFVLMSADRSWLQEKVKIEKLQQKIQLALQHVLQKNHREDGILTKLICKVSTLRALCGRHTEKLMAFKAIYPDIVRLHFPPLYKELFTSEFEPAMQIDG

SEQ ID NO: 13200 - protein, 566 aa, Homo sapiens
MPCCSHRRCREDPGTSESQEMDPVAFDDVAVNFTQEEWALLDISQRKLYKEVMLETFRNLTSVGKSWKDQNIEYEYQNPRRNFRSLIEKKVNEIKDDSHCGETFTQVPDDRLNFQEKKASPEIKSCDSFVCGEVGLGNSSFNMNIRGDIGHKAYEYQEYGPKPCKCQQPKKAFRYHPSFRTPQRDHTGEKPYACKECGKTFISHSSIQRHVVMHSGDGPYKCKFCGKAFHCLSLYLIHERIHTGEKPYECKQCGKSFSYSATLRIHERTHTGEKPYECQQCGKAFHSPRCYRRHERIHTGEKAYQCKECGKAFTCPQYVRIHERTHSRKKPYECTQCGKALSSLTSFQTHIRMHSGERPYECKICGKGFCSANSFQRHEKTHSGEKPYKCKQCGKAFIHSSSLRYHERIHTGEKPYECKQCGKAFRSSSHLQLHGRTHTGEKPYECQECGKAFRSMKNLQSHERTQTHVRIHSGERPYKCKLCGKGFYCPKSLQRHEKTHTGEKLYECKQCGEAFSSSSSFRYHERTHTGEKPYKCKQCGKAFRAASVLRMHGRTHPEDKPYECKQ

SEQ ID NO: 13201 - protein, 87 aa, Homo sapiens
MVDGVMILPVLIMIALPSPSMEDEKPKVNPKLYMCVCEGLSCGNEDHCEGQQCFSSLSINDGFHVYQKGCFQVYEQGKMTCKTPPSP

SEQ ID NO: 13202 - protein, 283 aa, Homo sapiens
MPRRSLHAAAVLLLVILKEQPSSPAPVNGSKWTYFVKLNLPSDMHIQGLQSRYSATQLHLHWGNPNDPHGSEHTVSGQHFAAELHIVHYNSDLYPDASTASNKSEGLAVLAVLIEMGSFNPSYDKIFSHLQHVKYKGQEAFVPGFNIEELLPERTAEYYRYRGSLTTPPCNPTVLWTVFRNPVQISQEQLLALETALYCTHMDDPSPREMINNFRQVQKFDERLVYTSFSQGIILSLALAGILGICIVVVVSIWLFRRKSIKKGDNKGVIYKPATKMETEAHA

SEQ ID NO: 13203 - protein, 535 aa, Homo sapiens
MSGYSSDRDRGRDRGFGAPRFGGSRAGPLSGKKFGNPGEKLVKKKWNLDELPKFEKNFYQEHPDLARRTAQEVETYRRSKEITVRGDGPICLVLAPTRELAQQVQQVAAEYCRACRLKSTCIYGGAPKGPQIRDLERGVEICIATPGRLIDFLECGKTNLRRTTYLVLDEADRMLDMGFEPQIRKIVDQIRPDRQTLMWSATWPKEVRQLAEDFLKDYIHINIGALELSANHNILQIVDVCHDVEKDEKLIRLMEEIMSEKENKTIVFVETKRRCDELTRKMRRDGWPAMGIHGDKSQQERDWVLNEFKHGKAPILIATDVASRGLDVEDVKFVINYDYPNSSEDYIHRIGRTARSTKTGTAYTFFTPNNIKQVSDLISVLREANQAINPKLLQLVEDRGSGRSRGRGGMKDDRRDRYSAGKRGGFNTFRDRENYDRGYSSLLKRDFGAKTQNGVYSAANYTNGSFGSNFVSAGIQTSFRTGNPTGTYQNGYDSTQQYGSNVPNMHNGMNQQAYAYPATAAAPMIGYPMPTGYSQ

SEQ ID NO: 13204 - protein, 45 aa, Homo sapiens
MSLVPATNYIYTPLNQLKGGTIVNVYGVVKFFKPPYLSKGTDSSI

SEQ ID NO: 13205 - protein, 118 aa, Homo sapiens
MEPLVTWVVPLLFLFLLSRQGAACRTSECCFQDPPYPDADSGSLPGSASGPRDLRCYRISSDRYECSWQYEGPTAGVSHFLRCCLSSGRCCYFAAGSATRLQFSDQAGVSVLYTVTLW

SEQ ID NO: 13206 - protein, 714 aa, Homo sapiens
MAGLTAAAPRPGVLLLLLSILHPSRPGGVPGAIPGGVPGGVFYPALGPGGKPLKPVPGGLAGAGLGAGLGAFPAVTFPGALVPGGVADAAAAYKAAKAGAGLGGVPGVGGLGVSAGAVVPQPGAGVKPGKVPGVGLPGVYPGGVLPGARFPGVGVLPGVPTGAGVKPKAPGVGGAFAGIPGVGPFGGPQPGVPLGYPIKAPKLPGGYGLPYTTGKLPYGYGPGGVAGAAGKAGYPTGTGVGPQAAAAAAAKAAAKFGAGAAGVLPGVGGAGVPGVPGAIPGIGGIAGVGTPAAAAAAAAAAKAAKYGAAAGLVPGGPGFGPGVVGVPGAGVPGVGVPGAGIPVVPGAGIPGAAVPGVVSPEAAAKAAAKAAKYGARPGVGVGGIPTYGVGAGGFPGFGVGVGGIPGVAGVPGVGGVPGVGGVPGVGISPEAQAAAAAKAAKYGVGTPAAAAAKAAAKAAQFGLVPGVGVAPGVGVAPGVGVAPGVGLAPGVGVAPGVGVAPGVGVAPGIGPGGVAAAAKSAAKVAAKAQLRAAAGLGAGIPGLGVGVGVPGLGVGAGVPGLGVGAGVPGFGAVPGALAAAKAAKYGAAVPGVLGGLGALGGVGIPGGVVGAGPAAAAAAAKAAAKAAQFGLVGAAGLGGLGVGGLGVPGVGGLGGIPPAAAAKAAKYGAAGLGGVLGGAGQFPLGGVAARPGFGLSPIFPGGACLGKACGRKRK

SEQ ID NO: 13207 - protein, 1292 aa, Homo sapiens
MKPATGLWVWVSLLVAAGTVQPSDSQSVCAGTENKLSSLSDLEQQYRALRKYYENCEVVMGNLEITSIEHNRDLSFLRSVREVTGYVLVALNQFRYLPLENLRIIRGTKLYEDRYALAIFLNYRKDGNFGLQELGLKNLTEILNGGVYVDQNKFLCYADTIHWQDIVRNPWPSNLTLVSTNGSSGCGRCHKSCTGRCWGPTENHCQTLTRTVCAEQCDGRCYGPYVSDCCHRECAGGCSGPKDTDCFACMNFNDSGACVTQCPQTFVYNPTTFQLEHNFNAKYTYGAFCVKKCPHNFVVDSSSCVRACPSSKMEVEENGIKMCKPCTDICPKACDGIGTGSLMSAQTVDSSNIDKFINCTKINGNLIFLVTGIHGDPYNAIEAIDPEKLNVFRTVREITGFLNIQSWPPNMTDFSVFSNLVTIGGRVLYSGLSLLILKQQGITSLQFQSLKEISAGNIYITDNSNLCYYHTINWTTLFSTINQRIVIRDNRKAENCTAEGMVCNHLCSSDGCWGPGPDQCLSCRRFSRGRICIESCNLYDGEFREFENGSICVECDPQCEKMEDGLLTCHGPGPDNCTKCSHFKDGPNCVEKCPDGLQGANSFIFKYADPDRECHPCHPNCTQGCNGPTSHDCIYYPWTGHSTLPQHARTPLIAAGVIGGLFILVIVGLTFAVYVRRKSIKKKRALRRFLETELVEPLTPSGTAPNQAQLRILKETELKRVKVLGSGAFGTVYKGIWVPEGETVKIPVAIKILNETTGPKANVEFMDEALIMASMDHPHLVRLLGVCLSPTIQLVTQLMPHGCLLEYVHEHKDNIGSQLLLNWCVQIAKGMMYLEERRLVHRDLAARNVLVKSPNHVKITDFGLARLLEGDEKEYNADGGKMPIKWMALECIHYRKFTHQSDVWSYGVTIWELMTFGGKPYDGIPTREIPDLLEKGERLPQPPICTIDVYMVMVKCWMIDADSRPKFKELAAEFSRMARDPQRYLVIQGDDRMKLPSPNDSKFFQNLLDEEDLEDMMDAEEYLVPQAFNIPPPIYTSRARIDSNRNQFVYRDGGFAAEQGVSVPYRAPTSTIPEAPVAQGATAEIFDDSCCNGTLRKPVAPHVQEDSSTQRYSADPTVFAPERSPRGELDEEGYMTPMRDKPKQEYLNPVEENPFVSRRKNGDLQALDNPEYHNASNGPPKAEDEYVNEPLYLNTFANTLGKAEYLKNNILSMPEKAKKAFDNPDYWNHSLPPRSTLQHPDYLQEYSTKYFYKQNGRIRPIVAENPEYLSEFSLKPGTVLPPPPYRHRNTVV

SEQ ID NO: 13208 - protein, 282 aa, Homo sapiens
MASPGCLWLLAVALLPWTCASRALQHLDPPAPLPLVIWHGMGDSCCNPLSMGAIKKMVEKKIPGIYVLSLEIGKTLMEDVENSFFLNVNSQVTTVCQALAKDPKLQQGYNAMGFSQGGQFLRAVAQRCPSPPMINLISVGGQHQGVFGLPRCPGESSHICDFIRKTLNAGAYSKVVQERLVQAEYWHDPIKEDVYRNHSIFLADINQERGINESYKKNLMALKKFVMVKFLNDSIVDPVDSEDRLGLKEMDNAGQLVFLATEGDHLQLSEEWFYAHIIPFLG

SEQ ID NO: 13209 - protein, 149 aa, Homo sapiens
MAGSPTCLTLIYILWQLTEHLSKPKVTMGLQSNKNGTCVTNLTCCMEHGEEDVIYTWKALGQAANESHNGSILPISWRWGESDMTFICVARNPVSRNFSSPILARKLCEENNPKGRSSKYGLLHCGNTEKDGKSPLTAHDARHTKAICL

SEQ ID NO: 13210 - protein, 65 aa, Homo sapiens
MEPLLLGRGLIVYLMFLLLKFSKAIEIPSSVQQVPTIIKQSKVQVAFPFDEYFQIECEAKGNPEP

SEQ ID NO: 13211 - protein, 375 aa, Homo sapiens
MESNKDEAERCISIALKAIQSNQPDRALRFLEKAQRLYPTPRVRALIESLNQKPQTAGDQPPPTDTTHATHRKAGGTDAPSANGEAGGESTKGYTAEQVAAVKRVKQCKDYYEILGVSRGASDEDLKKAYRRLALKFHPDKNHAPGATEAFKAIGTAYAVLSNPEKRKQYDQFGDDKSQAARHGHGHGDFHRGFEADISPEDLFNMFFGGGFPSSNVHVYSNGRMRYTYQQRQDRRDNQGDGGLGVFVQLMPILILILVSALSQLMVSSPPYSLSPRPSVGHIHRRVTDHLGVVYYVGDTFSEEYTGSSLKTVERNVEDDYIANLRNNCWKEKQQKEGLLYRARYFGDTDMYHRAQKMGTPSCSRLSEVQASLHG

SEQ ID NO: 13212 - protein, 139 aa, Homo sapiens
MGPLMVLFCLLFLYPGLADSAPSCPQNVNISGGTFTLSHGWAPGSLLTYSCPQGLYPSPASRLCKSSGQWQTPGATRSLSKAVCKPVRCPAPVSFENGIYTPRLGSYPVGGNVSFECEDGFILRGSPVRQCRPNGMWDG

SEQ ID NO: 13213 - protein, 182 aa, Homo sapiens
AKSGVAGGILLVVPNVMGMMCWSPPLDKMGNSVKGIHFCHDLVSLCNFHNYDNLRHFAKKLDPRREGGDQRVKSVINLLFAAYTGDVSALRRFALSAMDMEQRDYDSRTALHVAAAEGGITLPWMKHCTLDTMMYLKFSKNTKSSTHLKEILTTGRKIKPSIRILMDCCNGLKSQDLNHLPI

SEQ ID NO: 13214 - protein, 212 aa, Homo sapiens
MPLLLLLPLLWADLTHRPKILIPGTLEPGHSKNLTCSVSWACEQGTPPIFSWLSAAPTSLGPRTTHSSVLIITPRPQDHGTNLTCQVKFAGAGVTTERTIQLNVTYVPQNPTTGIFPGDGSGKQETRAGVVHGAIGGAGVTALLALCLCLIFFIVKTHRRKAARTAVGRNDTHPTTGSASPVSDGASWHPVCPADTSSQCGPPSCPIQHFQN

SEQ ID NO: 13215 - protein, 460 aa, Homo sapiens
MIGGLFIYNHKGEVLISRVYRDDIGSRQAADSAVFSSSGPFPGEWLEANRRNAVDAFRVNVIHARQQVRSPVTNIARTSFFHVKRSNIWLAAVTKQNVNAAMVFEFLYKMCDVMAAYFGKISEENIKNNFVLIYELLDEILDFGYPQNSETGALKTFITQQGIKSQHQTKEEQSQITSQVTGQIGWRREGIKYRRNELFLDVLESVNLLMSPQGQVLSAHVSGRVVMKSYLSGMPECKFGMNDKIVIEKQGKGTADETSKSGKQSIAIDDCTFHQCVRLSKFDSERSISFIPPDGEFELMRYRTTKDIILPFRVIPLVREVGRTKLEVKVVIKSNFKPSLLAQKIEVRIPTPLNTSGVQVICMKGKAKYKASENAIVWKIKRMAGMKESQISAEIELLPTNDKKKWARPPISMNFEVPFAPSGLKVRYLKVFEPKLNYSDHDVIKWVRYIGRSGIYETRC

SEQ ID NO: 13216 - protein, 521 aa, Homo sapiens
MFTSEKGVVEEWLSEFKTLPETSLPNYATNLKDKSSLVSSLYKVIQEPQSELLEPVCHQLFEFYRSGEEQLLQFTLQFLPELIWCYLAVSASRNVHSSGCIEALLLGVYNLEIVDKQGHTKVLSFTIPSLSKPSVYHEPSSIGSMALTESALSQHGLSKVVYSGPHPQREMLTAQNRFEVLTFLLLCYNAALTYMPSVSLQSLCQICSRICVCGYPRQHVRKYKGISSRIPVSSGFMVQMLTGIYFAFYNGEWDLAQKALDDIIYRAQLELYPEPLLVANAIKASLPHGPMKSNKEGTRCIQVEITPTSSRISRNAVTSMSIRGHRWKRHGNTELTGQEELMEISEVDEGFYSRAASSTSQSGLSNSSHNCSNKPSIGKNHRRSGGSKTGGKEKETTGESCKDHFARKQTQRAQSENLELLSLKRLTLTTSQSLPKPSSHGLAKTAATVFSKSFEQVSGVTVPHNPSSAVGCGAGTDANRFSACSLQEEKLIYVSERTELPMKHQSGQQRPPSISITLSTD

SEQ ID NO: 13217 - protein, 632 aa, Homo sapiens
MQREEGFNTKMADGPDEYDTEAGCVPLLHPEEIKPQSHYNHGYGEPLGRKTHIDDYSTWDIVKATQYGIYERCRELVEAGYDVRQPDKENVTLLHWAAINNRIDLVKYYISKGAIVDQLGGDLNSTPLHWATRQGHLSMVVQLMKYGADPSLIDGEGCSCIHLAAQFGHTSIVAYLIAKGQDVDMMDQNGMTPLMWAAYRTHSVDPTRLLLTFNVSVNLGDKYHKNTALHWAVLAGNTTVISLLLEAGANVDAQNIKGESALDLAKQRKNVWMINHLQEARQAKGYDNPSFLRKLKADKEFRQKVMLGTPFLVIWLVGFIADLNIDSWLIKGLMYGGVWATVQFLSKSFFDHSMHSALPLGIYLATKFWMYVTWFFWFWNDLNFLFIHLPFLANSVALFYNFGKSWKSDPGIIKATEEQKKKTIVELAETGSLDLSIFCSTCLIRKPVRSKHCGVCNRCIAKFDHHCPWVGNCVGAGNHRYFMGYLFFLLFMICWMIYGCISYWGLHCETTYTKDGFWTYITQIATCSPWMFWMFLNSVFHFMWVAVLLMCQMYQISCLGITTNERMNARRYKHFKVTTTSIESPFNHGCVRNIIDFFEFRCCGLFRPVIVDWTRQYTIEYDQISGSGYQLV

SEQ ID NO: 13218 - protein, 807 aa, Homo sapiens
MSENSSDSDSSCGWTVISHEGSDIEMLNSVTPTDSCEPAPECSSLEQEELQALQIEQGESSQNGTVLMEETAYPALEETSSTIEAEEQKIPEDSIYIGTASDDSDIVTLEPPKLEEIGNQEVVIVEEAQSSEDFNMGSSSSSQYTFCQPETVFSSQPSDDESSSDETSNQPSPAFRRRRARKKTVSASESEDRLVAEQETEPSKELSKRQFSSGLNKCVILALVIAISMGFGHFYGTIQIQKRQQLVRKIHEDELNDMKDYLSQCQQEQESFIDYKSLKENLARCWTLTEAEKMSFETQKTNLATENQYLRVSLEKEEKALSSLQEELNKLREQIRILEDKGTSTELVKENQKLKQHLEEEKQKKHSFLSQRETLLTEAKMLKRELERERLVTTALRGELQQLSGSQLHGKSDSPNVYTEKKEIAILRERLTELERKLTFEQQRSDLWERLYVEAKDQNGKQGTDGKKKGGRGSHRAKNKSKETFLGSVKETFDAMKNSTKEFVRHHKEKIKQAKEAVKENLKKFSDSVKSTFRHFKDTTKNIFDEKGNKRFGATKEAAEKPRTVFSDYLHPQYKAPTENHHNRGPTMQNDGRKEKPVHFKEFRKNTNSKKCSPGHDCRENSHSFRKACSGVFDCAQQESMSLFNTVVNPIRMDEFRQIIQRYMLKELDTFCHWNELDQFINKFFLNGVFIHDQKLFTDFVNDVKDYLRNMKEYEVDNDGVFEKLDEYIYRHFFGHTFSPPYGPSRPDKKQRMVNIENSRHRKQEQKHLQPQPYKREGKWHKYGRTNGRQMANLEIELGQLPFDPQY

SEQ ID NO: 13219 - protein, 526 aa, Homo sapiens
MASDLESSLTSIDWLPQLTLRATIEKLGSASQAGPPGSSRKCSPGSPTDPNATLSKDEAAVHQDGKPRYSYATLITYAINSSPAKKMTLSEIYRWICDNFPYYKNAGIGWKNSIRHNLSLNKCFRKVPRPRDDPGKGSYWTIDTCPDISRKRRHPPDDDLSQDSPEQEASKSPRGGVAGSGEASLPPEGNPQMSLQSPTSIASYSQGTGSVDGGAVAAGASGRESAEGPPPLYNTNHDFKFSYSEINFQDLSWSFRNLYKSMLEKSSSSSQHGFSSLLGDIPPSNNYYMYQQQQPPPPQQQQQQQQPPQPPPQQSQPQQQQAPAQGPSAVGGAPPLHTPSTDGCTPPGGKQAGAEGYGPPPVMAMHPPPLQHGGYHPHQHHPHSHPAQQPPPPQPQAQGQAPINNTGFAFPSDWCSNIDSLKESFKMVNRLNWSSIEQSQFSELMESLRQAEQKNWTLDQHHIANLCDSLNHFLTQTGHVPPQGGTHRPPAPARIADSCALTSGKQESAMSQGTAPSQLPWRWRLC

SEQ ID NO: 13220 - protein, 373 aa, Homo sapiens
MELPSGPGPERLFDSHRLPGDCFLLLVLLLYAPVGFCLLVLRLFLGIHVFLVSCALPDSVLRRFVVRTMCAVLGLVARQEDSGLRDHSVRVLISNHVTPFDHNIVNLLTTCSTPLLNSPPSFVCWSRGFMEMNGRGELVESLKRFCASTRLPPTPLLLFPEEEATNGREGLLRFSSWPFSIQDVVQPLTLQVQRPLVSVTVSDASWVSELLWSLFVPFTVYQVRWLRPVHRQLGEANEEFALRVQQLVAKELGQTGTRLTPADKAEHMKRQRHPRLRPQSAQSSFPPSPGPSPDVQLATLAQRVKEVLPHVPLGVIQRDLAKTGCVDLTITNLLEGAVAFMPEDITKGTQSLPTASASKAFDACLMMMTPQAL

SEQ ID NO: 13221 - protein, 905 aa, Homo sapiens
MAGRVPSLLVLLVFPSSCLAFRSPLSVFKRFKETTRPFSNECLGTTRPVVPIDSSDFALDIRMPGVTPKQSDTYFCMSMRIPVDEEAFVIDFKPRASMDTVHHMLLFGCNMPSSTGSYWFCDEGTCTDKANILYAWARNAPPTRLPKGVGFRVGGETGSKYFVLQVHYGDISAFRDNNKDCSGVSLHLTRLPQPLIAGMYLMMSVDTVIPAGEKVVNSDISCHYKNYPMHVFAYRVHTHHLGKVVSGYRVRNGQWTLIGRQSPQLPQAFYPVGHPVDVSFGDLLAARCVFTGEGRTEATHIGGTSSDEMCNLYIMYYMEAKHAVSFMTCTQNVAPDMFRTIPPEANIPIPVKSDMVMMHEHHKETEYKDKIPLLQQPKREEEEVLDQGDFYSLLSKLLGEREDVVHVHKYNPTEKAESESDLVAEIANVVQKKDLGRSDAREGAEHERGNAILVRDRIHKFHRLVSTLRPPESRVFSLQQPPPGEGTWEPEHTGDFHMEEALDWPGVYLLPGQVSGVALDPKNNLVIFHRGDHVWDGNSFDSKFVYQQIGLGPIEEDTILVIDPNNAAVLQSSGKNLFYLPHGLSIDKDGNYWVTDVALHQVFKLDPNNKEGPVLILGRSMQPGSDQNHFCQPTDVAVDPGTGAIYVSDGYCNSRIVQFSPSGKFITQWGEESSGSSPLPGQFTVPHSLALVPLLGQLCVADRENGRIQCFKTDTKEFVREIKHSSFGRNVFAISYIPGLLFAVNGKPHFGDQEPVQGFVMNFSNGEIIDIFKPVRKHFDMPHDIVASEDGTVYIGDAHTNTVWKFTLTEKLEHRSVKKAGIEVQEIKDSEHKLETSSGRVLGRFRGKGSGGLNLGNFFASRKGYSRKGFDRLSTEGSDQEKEDDGSESEEEYSAPLPALAPSSS

SEQ ID NO: 13222 - protein, 526 aa, Homo sapiens
MRPPQCLLHTPSLASPLLLLLLWLLGGGVGAEGREDAELLVTVRGGRLRGIRLKTPGGPVSAFLGIPFAEPPMGPRRFLPPEPKQPWSGVVDATTFQSVCYQYVDTLYPGFEGTEMWNPNRELSEDCLYLNVWTPYPRPTSPTPVLVWIYGGGFYSGASSLDVYDGRFLVQAERTVLVSMNYRVGAFGFLALPGSREAPGNVGLLDQRLALQWVQENVAAFGGDPTSVTLFGESAGAASVGMHLLSPPSRGLFHRAVLQSGAPNGPWATVGMGEARRRATQLAHLVGCPPGGTGGNDTELVACLRTRPAQVLVNHEWHVLPQESVFRFSFVPVVDGDFLSDTPEALINAGDFHGLQLAGRLAAQGARVYAYVFEHRASTLSWPLWMGVPHGYEIEFIFGIPLDPSRNYTAEEKIFAQRLMRYWANFARTGDPNEPRDPKAPQWPPYTAGAQQYVSLDLRPLEVRRGLRAQACAFWNRFLPKLLSATDTLDEAERQWKAEFHRWSSYMVHWKNQFDHYSKQDRCSDL

SEQ ID NO: 13223 - protein, 219 aa, Homo sapiens
MRPPSPLPARWLCVLAGALAWALGPAGGQAARLQEECDYVQMIEVQHKQCLEEAQLENETIGCSKMWDNLTCWPATPRGQVVVLACPLIFKLFSSIQGRNVSRSCTDEGWTHLEPGPYPIACGLDDKAASLDEQQTMFYGSVKTGYTIGYGLSLATLLVATAILSLFRWAVRQPWSFSNIVSWLTSSGCWWRASTCTPCLPSPSSLSGSTSGGTYSSAG

SEQ ID NO: 13224 - protein, 113 aa, Homo sapiens; identical to SEQ ID NO: 10872

SEQ ID NO: 13225 - protein, 592 aa, Homo sapiens
MSVSLVVIRLELAEHSPVPAGFGFSAAAGEMSDEEIKKTTLASAVACLEGKSPGEKVAIIHQHLGRREMTDVIIETMKSNPDELKTTVEERKSSEASPTAQRSKDHSKECINAAPDSPSKQLPDQISFFSGNPSVEIVHGIMHLYKTNKMTSLKEDVRRSAMLCILTVPAAMTSHDLMKFVAPFNEVIEQMKIIRDSTPNQYMVLIKFRAQADADSFYMTCNGRQFNSIEDDVCQLVYVERAEVLKSEDGASLPVMDLTELPKCTVCLERMDESVNGILTTLCNHSFHSQCLQRWDDTTCPVCRYCQTPEPVEENKCFECGVQENLWICLICGHIGCGRYVSRHAYKHFEETQHTYAMQLTNHRVWDYAGDNYVHRLVASKTDGKIVQYECEGDTCQEEKIDALQLEYSYLLTSQLESQRIYWENKIVRIEKDTAEEINNMKTKFKETIEKCDNLEHKLNDLLKEKQSVERKCTQLNTKVAKLTNELKEEQEMNKCLRANQVLLQNKLKEEERVLKETCDQKDLQITEIQEQLRDVMFYLETQQKINHLPAETRQEIQEGQINIAMASASSPASSGGSGKLPSRKGRSKRGK

SEQ ID NO: 13226 - protein, 269 aa, Homo sapiens
MSAPSATPIFAPGENCSPAWGAAPAAYDAADTHLRILGKPVMERWETPYMHALAAAASSKGGRVLEVGFGMAIAASKVQEAPIDEHWIIECNDGVFQRLRDWAPRQTHKVIPLKGLWEDVAPTLPDGHFDGILYDTYPLSEETWHTHQFNFIKNHAFRLLKPGGVLTYCNLTSWGELMKSKYSDITIMFEVRPPEVPHGSPGSDLGWGWEGAAGATLLPGEGPFLTPWVGWTVLVHLEIKVLCLAQWLPGAVAQVYNPSTVEGRGGQIA

SEQ ID NO: 13227 - protein, 165 aa, Homo sapiens; identical to SEQ ID NO: 4074

SEQ ID NO: 13228 - protein, 115 aa, Homo sapiens
MEAPAQLLFLLLLWLPDTTGEIVMTQSPATLSVSPGERATLSCRASQSVSSNLAWYQQKPGQAPRLLIYGASIRATGIPARFSGSGSGTEFTLTISILQSEDFAVYYCQQYNNWP

SEQ ID NO: 13229 - protein, 204 aa, Homo sapiens
MNRVNDPLIFIRDIKPGLKNLNVVFIVLEIGRVTKTKDGHEVRSCKVADKTGSITISVWDEIGGLIQPGDIIRLTRGYASMWKGCLTLYTGRGGELQKIGEFCMVYSEVPNFSEPNPDYRGQQNKGAQSEQKNNSMNSNMGTGTFGPVGNGVHTGPESREHQFSHAGRSNGRGLINPQLQGTASNQTVMTTISNGRDPRRAFKR

SEQ ID NO: 13230 - protein, 457 aa, Homo sapiens
MAQALPWLLLWMGAGVLPAHGTQHGIRLPLRSGLGGAPLGLRLPRETDEEPEEPGRRGSFVEMVDNLRGKSGQGYYVEMTVGSPPQTLNILVDTGSSNFAVGAAPHPFLHRYYQRQLSSTYRDLRKGVYVPYTQGKWEGELGTDLPDDSLEPFFDSLVKQTHVPNLFSLQLCGAGFPLNQSEVLASVGGSMIIGGIDHSLYTGSLWYTPIRREWYYEVIIVRVEINGQDLKMDCKEYNYDKSIVDSGTTNLRLPKKVFEAAVKSIKAASSTEKFPDGFWLGEQLVCWQAGTTPWNIFPVISLYLMGEVTNQSFRITILPQQYLRPVEDVATSQDDCYKFAISQSSTGTVMGAVIMEGFYVVFDRARKRIGFAVSACHVHDEFRTAAVEGPFVTLDMEDCGYNIPQTDESTLMTIAYVMAAICALFMLPLCLMVCQWRCLRCLRQQHDDFADDISLLK

SEQ ID NO: 13231 - protein, 188 aa, Homo sapiens
MAAPALSWRLPLLILLLPLATSWASAAVNGTSQFTCFYNSRANISCVWSQDGALQDTSCQVHAWPDRRRWNQTCELLPVSQASWACNLILGAPDSQKLTTVDIVTLRVLCREGVRWRVMAIQDFKPFENLRLMAPISLQVVHVETHRCNISWEISQASHYFERHLEFEARTLSPGHTWEEAPLLTLKQ

SEQ ID NO: 13232 - protein, 447 aa, Homo sapiens
MLTFMASDSEEEVCDERTSLMSAESPTPRSCQEGRQGPEDGENTAQWRSQENEEDGEEDPDRYVCSGVPGRPPGLEEELTLKYGAKHVIMLFVPVTLCMIVVVATIKSVRFYTEKNGQLIYTPFTEDTPSVGQRLLNSVLNTLIMISVIVVMTIFLVVLYKYRCYKFIHGWLIMSSLMLLFLFTYIYLGEVLKTYNVAMDYPTLLLTVWNFGAVGMVCIHWKGPLVLQQAYLIMISALMALVFIKYLPEWSAWVILGAISVYDLVAVLCPKGPLRMLVETAQERNEPIFPALIYSSAMVWTVGMAKLDPSSQGALQLPYDPEMEDSYDSFGEPSYPEVFEPPLTGYPGEELEEEEERGVKLGLGDFIFYSVLVGKAAATGSGDWNTTLACFVAILIGLCLTLLLLAVFKKALPALPISITFGLIFYFSTDNLVRPFMDTLASHQLYI

SEQ ID NO: 13233 - protein, 386 aa, Homo sapiens
MLTFLQQLRVDWPAASERASSHTLRSHALEELTSANDGRTLSPGILGRLCLKELVEEQGRTAGYDPNLDNCLVTEDLLSVLAELQEALWHWPEDSHPGLAGASDTGTGGCLVVHVVSCEEEFQQQKLDLLWQKLVDKAPLRQKHLICGPVKVAGAPGTLMTAPEYYEFRHTQVCKASALKHGGDLAQDPAWTEIFGVLSVATIKFEMLSTAPQSQLFLALADSSISTKGTKSGTFVMYNCARLATLFESYKCSMEQGLYPTFPPVSSLDFSLLHDEGEWLLLFNSILPFPDLLSRTAVLDCTAPGLHIAVRTEMVRHRQPGHSTLYSLFWPGAQEQRDGPVTQSLSLDMQVPGTAQHGFQLLLQPGASTTPLWSDVRPPAASESCA

SEQ ID NO: 13234 - protein, 159 aa, Homo sapiens
MSGARSKLALFLCGCYVVALGAHTGEESVADHHEAEYYVAAVYEHPSILSLNPLALISRQEALELMNQNLDIYEQQVMTAAQKDVQIIVFPEDGIHGFNFTRTSIYPFLDFMPSPQVVRWNPCLEPHRFNDTEVIPAFFLSRLRVHRGDLSQGPEAVTC

SEQ ID NO: 13235 - protein, 139 aa, Homo sapiens
MALHIHEACILLLVIPGLVTSAAISHEDYPADEGDQISSNDNLIFDDYRGKGCVDDSGFVYKLGERFFPGHSNCPCVCALDGPVCDQPECPKIHPKCTKVEHNGCCPECKEVKNFCEYHGKNYKILEEFKVQTALQERR

SEQ ID NO: 13236 - protein, 980 aa, Homo sapiens
MRPVALLLLPSLLALLAHGLSLEAPTVGKGQAPGIEETDGELTAAPTPEQPERGVHFVTTAPTLKLLNHHPLLEEFLQEGLEKGDEELRPALPFQPDPPAPFTPSPLPRLANQDSRPVFTSPTPAMAAVPTQPQSKEGPWSPESESPMLRITAPLPPGPSMAVPTLGPGEIASTTPPSRAWTPTQEGPGDMGRPWVAEVVSQGAGIGIQGTITSSTASGDDEETTTTTTIITTTITTVQTPGPCSWNFSGPEGSLDSPTDLSSPTDVGLDCFFYISVYPGYGVEIKVQNISLREGETVTVEGLGGPDPLPLANQSFLLRGQVIRSPTHQAALRFQSLPPPAGPGTFHFHYQAYLLSCHFPRRPAYGDVTVTSLHPGGSARFHCATGYQLKGARHLTCLNATQPFWDSKEPVCIAACGGVIRNATTGRIVSPGFPGNYSNNLTCHWLLEAPEGQRLHLHFEKVSLAEDDDRLIIRNGDNVEAPPVYDSYEVEYLPIEGLLSSGKHFFVELSTDSSGAAAGMALRYEAFQQGHCYEPFVKYGNFSSSTPTYPVGTTVEFSCDPGYTLEQGSIIIECVDPHDPQWNETEPACRAVCSGEITDSAGVVLSPNWPEPYGRGQDCIWGVHVEEDKRIMLDIRVLRIGPGDVLTFYDGDDLTARVLGQYSGPRSHFKLFTSMADVTIQFQSDPGTSVLGYQQGFVIHFFEVPRNDTCPELPEIPNGWKSPSQPELVHGTVVTYQCYPGYQVVGSSVLMCQWDLTWSEDLPSCQRVTSCHDPGDVEHSRRLISSPKFPVGATVQYICDQGFVLMGSSILTCHDRQAGSPKWSDRAPKCLLEQLKPCHGLSAPENGARSPEKQLHPAGATIHFSCAPGYVLKGQASIKCVPGHPSHWSDPPPICRAVAKAPAASSTLDAAHIAAAIFLPLVAMVLLVGGVYFYFSRLQGKSSLQLPRPRPRPYNRITIESAFDNPTYETGETREYEVSI

SEQ ID NO: 13237 - protein, 704 aa, Homo sapiens
MVPDTACVLLLTLAALGASGQGQSPLGSDLGPQMLRELQETNAALQDVRELLRQQVREITFLKNTVMECDACGMQQSVRTGLPSVRPLLHCAPGFCFPGVACIQTESGARCGPCPAGFTGNGSHCTDVNECETGQHNCVPNSVCINTRGSFQCGPCQPGFVGDQASGCQRRAQRFCPDGSPSECHEHADCVLERDGSRSCVCAVGWAGNGILCGRDTDLDGFPDEKLRCPERQCRKDNCVTVPNSGQEDVDRDGIGDACDPDADGDGVPNEKDNCPLVRNPDQRNTDEDKWGDACDNCRSQKNDDQKDTDQDGRGDACDDDIDGDRIRNQADNCPRVPNSDQKDSDGDGIGDACDNCPQKSNPDQADVDHDFVGDACDSDQDQDGDGHQDSRDNCPTVPNSAQEDSDHDGQGDACDDDDDNDGVPDSRDNCRLVPNPGQEDADRDGVGDVCQDDFDADKVVDKIDVCPENAEVTLTDFRAFQTVVLDPEGDAQIDPNWVVLNQGREIVQTMNSDPGLAVGYTAFNGVDFEGTFHVNTVTDDDYAGFIFGYQDSSSFYVVMWKQMEQTYWQANPFRAVAEPGIQLKAVKSSTGPGEQLRNALWHTGDTESQVRLLWKDPRNVGWKDKKSYRWFLQHRPQVGYIRVRFYEGPELVADSNVVLDTTMRGGRLGVFCFSQENIIWANLRYRCNDTIPEDYETHQLRQA

SEQ ID NO: 13238 - protein, 74 aa, Homo sapiens
MPKTMHFLFRFIVFFYLWGLFTAQRQKKEESTEEVKIEVLHRPENCSKTSKKGDLLNAHYDGYLAKDGSKFYCR

SEQ ID NO: 13239 - protein, 212 aa, Homo sapiens
MGGPRAWALLCLGLLLPGGGAAWSIGAAPFSGRRNWCSYVVTRTISCHVQNGTYLQRVLQNCPWPMSCPGSSYRTVVRPTYKVMYKIVTAREWRCCPGHSGVSCEEVAASSASLEPMWSGSTMRRMALRPTAFSGCLNCSKVSELTERLKVLEAKMTMLTVIEQPVPPTPATPEDPAPLWGPPPAQGSPGDGGLQGDPLLSNTFTETNNHWP

SEQ ID NO: 13240 - protein, 154 aa, Homo sapiens
MAGPVKDREAFQRLNFLYQAAHCVLAQDPENQALARFYCYTERTIAKRLVLRRDPSVKRTLCRGCSSLLVPGLTCTQRQRRCRGQRWTVQTCLTCQRSQRFLNDPGHLLWGDRPEAQLGSQADSKPLQPLPNTAHSISDRLPEEKMQTQGSSNQ

SEQ ID NO: 13241 - protein, 138 aa, Homo sapiens
MAASRWARKAVVLLCASDLLLLLLLLPPPGSCAAEGSPGTPDESTPPPRKKKKDIRDYNDADMARLLEQWETPEPLPVLPEVPSTCACLSSASLIWTCFSHLSPHALVKRVWPPAKQGLGGKESPASAWLPHRGGELK

SEQ ID NO: 13242 - protein, 862 aa, Homo sapiens
MRLALLWALGLLGAGSPLPSWPLPNIGGTEEQQAESEKAPREPLEPQVLQDDLPISLKKVLQTSLPEPLRIKLELDGDSHILELLQNRELVPGRPTLVWYQPDGTRVVSEGHTLENCCYQGRVRGYAGSWVSICTCSGLRGLVVLTPERSYTLEQGPGDLQGPPIISRIQDLHLPGHTCALSWRESVHTQKPPEHPLGQRHIRRRRDVVTETKTVELVIVADHSEAQKYRDFQHLLNRTLEVALLLDTFFRPLNVRVALVGLEAWTQRDLVEISPNPAVTLENFLHWRRAHLLPRLPHDSAQLVTGTSFSGPTVGMAIQNSICSPDFSGGVNMDHSTSILGVASSIAHELGHSLGLDHDLPGNSCPCPGPAPAKTCIMEASTDFLPGLNFSNCSRRALEKALLDGMGSCLFERLPSLPPMAAFCGNMFVEPGEQCDCGFLDDCVDPCCDSLTCQLRPGAQCASDGPCCQNCQLRPSGWQCRPTRGDCDLPEFCPGDSSQCPPDVSLGDGEPCAGGQAVCMHGRCASYAQQCQSLWGPGAQPAAPLCLQTANTRGNAFGSCGRNPSGSYVSCTPRDAICGQLQCQTGRTQPLLGSIRDLLWETIDVNGTELNCSWVHLDLGSDVAQPLLTLPGTACGPGLVCIDHRCQRVDLLGAQECRSKCHGHGVCDSNRHCYCEEGWAPPDCTTQLKATSSLTTGLLLSLLVLLVLVMLGASYWYRARLHQRLCQLKGPTCQYRAAQSGPSERPGPPQRALLARGTKASALSFPAPPSRPLPPDPVSKRLQAELADRPNPPTRPLPADPVVRSPKSQGPAKPPPPRKPLPADPQGRCPSGDLPGPGAGIPPLVVPSRPAPPPPTVSSLYL

SEQ ID NO: 13243 - protein, 1682 aa, Homo sapiens
MLASPEPKGLVPFTKESFELIKQHIAKTHNEDHEEEDLKPTPDLEVGKKLPFIYGNLSQGMVSEPLEDVDPYYYKKKNTFIVLNKNRTIFRFNAASILCTLSPFNCIRRTTIKVLVHPFFQLFILISVLIDCVFMSLTNLPKWRPVLENTLLGIYTFEILVKLFARGVWAGSFSFLGDPWNWLDFSVTVFEVIIRYSPLDFIPTLQTARTLRILKIIPLNQGLKSLVGVLIHCLKQLIGVIILTLFFLSIFSLIGMGLFMGNLKHKCFRWPQENENETLHNRTGNPYYIRETENFYYLEGERYALLCGNRTDAGQCPEGYVCVKAGINPDQGFTNFDSFGWALFALFRLMAQDYPEVLYHQILYASGKVYMIFFVVVSFLFSFYMASLFLGILAMAYEEEKQRVGEISKKIEPKFQQTGKELQEGNETDEAKTIQIEMKKRSPISTDTSLDVLEDATLRHKEELEKSKKICPLYWYKFAKTFLIWNCSPCWLKLKEFVHRIIMAPFTDLFLIICIILNVCFLTLEHYPMSKQTNTLLNIGNLVFIGIFTAEMIFKIIAMHPYGYFQVGWNIFDSMIVFHGLIELCLANVAGMALLRLFRMLRIFKLGKYWPTFQILMWSLSNSWVALKDLVLLLFTFIFFSAAFGMKLFGKNYEEFVCHIDKDCQLPRWHMHDFFHSFLNVFRILCGEWVETLWDCMEVAGQSWCIPFYLMVILIGNLLVLYLFLALVSSFSSCKDVTAEENNEAKNLQLAVARIKKGINYVLLKILCKTQNVPKDTMDHVNEVYVKEDISDHTLSELSNTQDFLKDKEKSSGTEKNATENESQSLIPSPSVSETVPIASGESDIENLDNKEIQSKSGDGGSKEKIKQSSSSECSTVDIAISEEEEMFYGGERSKHLKNGCRRGSSLGQISGASKKGKIWQNIRKTCCKIVENNWFKCFIGLVTLLSTGTLAFEDIYMDQRKTIKILLEYADMIFTYIFILEMLLKWMAYGFKAYFSNGWYRLDFVVVIVFCLSLIGKTREELKPLISMKFLRPLRVLSQFERMKVVVRALIKTTLPTLNVFLVCLMIWLIFSIMGVDLFAGRFYECIDPTSGERFPSSEVMNKSRCESLLFNESMLWENAKMNFDNVGNGFLSLLQVATFNGWITIMNSAIDSVAVNIQPHFEVNIYMYCYFINFIIFGVFLPLSMLITVIIDNFNKHKIKLGGSNIFITVKQRKQYRRLKKLMYEDSQRPVPRPLNKLQGFIFDVVTSQAFNVIVMVLICFQAIAMMIDTDVQSLQMSIALYWINSIFVMLYTMECILKLIAFRCFYFTIAWNIFDFMVVIFSITGLCLPMTVGSYLVPPSLVQLILLSRIIHMLRLGKGPKVFHNLMLPLMLSLPALLNIILLIFLVMFIYAVFGMYNFAYVKKEAGINDVSNFETFGNSMLCLFQVAIFAGWDGMLDAIFNSKWSDCDPDKINPGTQVRGDCGNPSVGIFYFVSYILISWLIIVNMYIVVVMEFLNIASKKKNKTLSEDDFRKFFQVWKRFDPDRTQYIDSSKLSDFAAALDPPLFMAKPNKGQLIALDLPMAVGDRIHCLDILLAFTKRVMGQDVRMEKVVSEIESGFLLANPFKITCEPITTTLKRKQEAVSATIIQRAYKNYRLRRNDKNTSDIHMIDGDRDVHATKEGAYFDKAKEKSPIQSQI

SEQ ID NO: 13244 - protein, 270 aa, Homo sapiens
MGKLVALVLLGVGLSLVGEMFLAFRERVNASREVEPVEPENCHLIEELESGSEDIDILPSGLAFISSGLKYPGMPNFAPDEPGKIFLMDLNEQNPRAQALEISGGFDKELFNPHGISIFIDKDNTVYLYVVNHPHMKSTVEIFKFEEQQRSLVYLKTIKHELLKSVNDIVVLGPEQFYATRDHYFTNSLLSFFEMILDLRWTYVLFYSPREVKVVAKGFCSANGITVSADQKYVYVADVAAKNIHIMEKHDNWDLTQLKETFWQDAILIL

SEQ ID NO: 13245 - protein, 127 aa, Homo sapiens
MSDNEDNFDGDDFDDVEEDEGLDDLENAEEEGQENVEILPSGERPQANQKRITTPYMTKYERARVLGTRALQIAMCAPVMVELEGETDPLLIAMKELKARKIPIIIRRYLPDGSYEDWGVDELIITD

SEQ ID NO: 13246 - protein, 141 aa, Homo sapiens
MRLSVRRVLLAAGCALVLVLAVQLGQQVLECRAVLAGLRSPRGAMRPEQEELVMVGTNHVEYRYGKAMPLIFVGGVPRSGTTLMRAMLDAHPEVRCGEETRIIPRVLAMRQAWSKSGREKLRLDEAGVTDEVLDAAMQAFI

SEQ ID NO: 13247 - protein, 427 aa, Homo sapiens
MALLWGLLVLSWSCLQGPCSVFSPVSAMEPLGRQLTSGPNQEQVSPLTLLKLGNQVQPGAQNHTLQRLQQVLHAGSGPCLPHLLSRLCQDLGPGAFRLAARMYLQKGFPIKEDFLEQSEQLFGAKPVSLTGKQEDDLANINQWVKEATEGKIQEFLSGLPEDTVLLLLNAIHFQGFWRNKFDPSLTQRDSFHLDEQFTVPVEMMQARTYPLRWFLLEQPEIQVAHFPFKNNMSFVVLVPTHFEWNVSQVLANLSWDTLHPPLVWERPTKVRLPKLYLKHQMDLVATLSQLGLQELFQAPDLRGISEQSLVVSGVQHQSTLELSEVGVEAAAATSIAMSRMSLSSFSVNRPFLFFIFEDTTGLPLFVGSVRNPNPSAPRELKEQQDSPGNKDFLQSLKGFPRGDKLFGPDLKLVPPMEEDYPQFGSPK

SEQ ID NO: 13248 - protein, 114 aa, Homo sapiens
MKLWVSALLMAWFGVLSCVQAEFFTSIGHMTDLIYAEKELVQSLKEYILVEEAKLSKIKSWANKMEALTSKSAADAEGYLAHPVNAYKLVKRLNTDWPALEDLVLQDSAAGFIA

SEQ ID NO: 13249 - protein, 167 aa, Homo sapiens
MISYIVLLSILLWPLVVYHELIQRMYTRLEPLLMQLDYSMKAEANALHHKHDKRKRQGKNAPPGGDEPLAETESESEAELAGFSPVVDVKKTALALAITDSELSDEEASILESGGFSVSRATTPQLTDVSEDLDQQSLPSEPEETLSRDLGEGEEGELAPPEDLLGR

SEQ ID NO: 13250 - protein, 424 aa, Homo sapiens
MDQPSGRSFMQVLCEKYSPENFPYRRGPGMGVHVPATPQGSPMKDRLNLPSVLVLNSCGITCAGDEKEIAAFCAHVSELDLSDNKLEDWHEVSKIVSNVPQLEFLNLSSNPLNLSVLERTCAGSFSGVRKLVLNNSKASWETVHMILQELPDLEELFLCLNDYETVSCPSICCHSLKLLHITDNNLQDWTEIRKLGVMFPSLDTLVLANNHLNAIEEPDDSLARLFPNLRSISLHKSGLQSWEDIDKLNSFPKLEEVRLLGIPLLQPYTTEERRKLVIARLPSVSKLNGSVVTDGEREDSERFFIRYYVDVPQEEVPFRYHELITKYGKLEPLAEVDLRPQSSAKVEVHFNDQVEEMSIRLDQTVAELKKQLKTLVQLPTSNMLLYYFDHEAPFGPEEMKYSSRALHSFGIRDGDKIYVESKTK

SEQ ID NO: 13251 - protein, 176 aa, Homo sapiens
MAGLTAAAPRPGVLLLLLSILHPSRPGGVPGAIPGGVPGGVFYPGAGLGALGGGALGPGGKPLKPVPGGLAGAGLGAGLGAFPAVTFPGALVPGGVADAAAAYKAAKAGAGLGGVPGVGGLGVSAGAVVPQPGAGVKPGKVPGVGGAFAGIPGVGPFGGPQPGVPLGYPIKAPKLP

SEQ ID NO: 13252 - protein, 295 aa, Homo sapiens
MPPPWHPPPRLLAVCLLTTTQATVVRDLVAVRMAEEQEFTQLCKLPAQPSHPHCVNNTYRSAQHSQALLRGLLALRDSGILFDVVLVVEGRHIEAHRILLAASCDYFRGMFAGGLKEMEQEEVLIHGVSYNAMCQILHFIYTSELELSLSNVQETLVAACQLQIPEIIHFCCDFLMSWVDEENILDVYRLAELFDLSRLTEQLDTYILKNFVAFSRTDKYRQLPLEKVYSLLSSNRLEVSCETEVYEGALLYHYSLEQVQADQISLHEPPKLLETVRFPLMEAEVLQRLHDKLDP

SEQ ID NO: 13253 - protein, 1087 aa, Homo sapiens
MSDSEDSNFSEEEDSERSSDGEEAEVDEERRSAAGSEKEEEPEDEEEEEEEEEYDEEEEEEDDDRPPKKPRHGGFILDEADVDDEYEDEDQWEDGAEDILEKEEIEASNIDNVVLDEDRSGARRLQNLWRDQREEELGEYYMKKYAKSSVGETVYGGSDELSDDITQQQLLPGVKDPNLWTVKCKIGEERATAISLMRKFIAYQFTDTPLQIKSVVAPEHVKGYIYVEAYKQTHVKQAIEGVGNLRLGYWNQQMVPIKEMTDVLKVVKEVANLKPKSWVRLKRGIYKDDIAQVDYVEPSQNTISLKMIPRIDYDRIKARMSLKDWFAKRKKFKRPPQRLFDAEKIRSLGGDVASDGDFLIFEGNRYSRKGFLFKSFAMSAVITEGVKPTLSELEKFEDQPEGIDLEVVTESTGKEREHNFQPGDNVEVCEGELINLQGKILSVDGNKITIMPKHEDLKDMLEFPAQELRKYFKMGDHVKVIAGRFEGDTGLIVRVEENFVILFSDLTMHELKVLPRDLQLCSETASGVDVGGQHEWGELVQLDPQTVGVIVRLERETFQVLNMYGKVVTVRHQAVTRKKDNRFAVALDSEQNNIHVKDIVKVIDGPHSGREGEIRHLFRSFAFLHCKKLVENGGMFVCKTRHLVLAGGSKPRDVTNFTVGGFAPMSPRISSPMHPSAGGQRGGFGSPGGGSGGMSRGRGRRDNELIGQTVRISQGPYKGYIGVVKDATESTARVELHSTCQTISVDRQRLTTVGSRRPGGMTSTYGRTPMYGSQTPMYGSGSRTPMYGSQTPLQDGSRTPHYGSQTPLHDGSRTPAQSGAWDPNNPNTPSRAEEEYEYAFDDEPTPSPQAYGGTPNPQTPGYPDPSSPQVNPQYNPQTPGTPAMYNTDQFSPYAAPSPQGSYQPSPSPQSYHQVAPSPAGYQNTHSPASYHPTPSPMAYQASPSPSPVGYSPMTPGAPSPGGYNPHTPGSGIEQNSSDWVTTDIQVKVRDTYLDTQVVGQTGVIRSVTGGMCSVYLKDSEKVVSISSEHLEPITPTKNNKVKVILGEDREATGVLLSIDGEDGIVRMDLDEQLKILNLRFLGKLLEA

SEQ ID NO: 13254 - protein, 400 aa, Homo sapiens
METQELRGALALLLLCFFTSASQDLQVIDLLTVGESRQMVAVAEKIRTALLTAGDIYLLSTFRLPPKQGGVLFGLYSRQDNTRWLEASVVGKINKVTNALHSILGEGNVPDPKHHYGVSGFHEQRSHCSPNPCFRGVDCMEVYEYPGYRCGPCPPGLQGNGTHCSDINECAHADPCFPGSSCINTMPGFHCEACPRGYKGTQVSGVGIDYARASKQVCNDIDECNDGNNGGCDPNSICTNTVGSFKCGPCRLGFLGNQSQGCLPARTCHSPAHSPCHIHAHCLFERNGAVSCQCNVGWAGNGNVCGTDTDIDGYPDQALPCMDNNKHCKQDNCLLTPNSGQEDADNDGVGDQCDDDADGDGIKNVEASPMDWTIALKSPTHYRQTGMRTGWEMLATAALK

SEQ ID NO: 13255 - protein, 227 aa, Homo sapiens
MAGVGAGPLRAMGRQALLLLALCATGAQGLYFHIGETEKRCFIEEIPDETMVIGNYRTQMWDKQKEVFLPSTPGLGMHVEVKDPDGKVVLSRQYGSEGRFTFTSHTPGDHQICLHSNSTRMALFAGGKLRVHLDIQVGEHANNYPEIAAKDKLTELQLRARQLLDQVEQIQKEQDYQRYREERFRLTSESTNQRVLWWSIAQTVILILTGIWQMRHLKSFFEAKKLV

SEQ ID NO: 13256 - protein, 979 aa, Homo sapiens
MELAALCRWGLLLALLPPGAASTQDNYLSTDVGSCTLVCPLHNQEVTAEDGTQRCEKCSKPCARVCYGLGMEHLREVRAVTSANIQEFAGCKKIFGSLAFLPESFDGDPASNTAPLQPEQLQVFETLEEITGYLYISAWPDSLPDLSVFQNLQVIRGRILHNGAYSLTLQGLGISWLGLRSLRELGSGLALIHHNTHLCFVHTVPWDQLFRNPHQALLHTANRPEDECVGEGLACHQLCARGHCWGPGPTQCVNCSQFLRGQECVEECRVLQGLPREYVNARHCLPCHPECQPQNGSVTCFGPEADQCVACAHYKDPPFCVARCPSGVKPDLSYMPIWKFPDEEGACQPCPINCTHSCVDLDDKGCPAEQRASPLTSIISAVVGILLVVVLGVVFGILIKRRQQKIRKYTMRRLLQETELVEPLTPSGAMPNQAQMRILKETELRKVKVLGSGAFGTVYKGIWIPDGENVKIPVAIKVLRENTSPKANKEILDEAYVMAGVGSPYVSRLLGICLTSTVQLVTQLMPYGCLLDHVRENRGRLGSQDLLNWCMQIAKGMSYLEDVRLVHRDLAARNVLVKSPNHVKITDFGLARLLDIDETEYHADGGKVPIKWMALESILRRRFTHQSDVWSYGVTVWELMTFGAKPYDGIPAREIPDLLEKGERLPQPPICTIDVYMIMVKCWMIDSECRPRFRELVSEFSRMARDPQRFVVIQNEDLGPASPLDSTFYRSLLEDDDMGDLVDAEEYLVPQQGFFCPDPAPGAGGMVHHRHRSSSTRSGGGDLTLGLEPSEEEAPRSPLAPSEGAGSDVFDGDLGMGAAKGLQSLPTHDPSPLQRYSEDPTVPLPSETDGYVAPLTCSPQPEYVNQPDVRPQPPSPREGPLPAARPAGATLERPKTLSPGKNGVVKDVFAFGGAVENPEYLTPQGGAAPQPHPPPAFSPAFDNLYYWDQDPPERGAPPSTFKGTPTAENPEYLGLDVPV

SEQ ID NO: 13257 - protein, 956 aa, Homo sapiens
MPRVSAPLVLLPAWLVMVACSPHSLRIAAILDDPMECSRGERLSITLAKNRINRAPERLGKAKVEVDIFELLRDSEYETAETMCQILPKGVVAVLGPSSSPASSSIISNICGEKEVPHFKVAPEEFVKFQFQRFTTLNLHPSNTDISVAVAGILNFFNCTTACLICAKAECLLNLEKLLRQFLISKDTLSVRMLDDTRDPTPLLKEIRDDKTATIIIHANASMSHTILLKAAELGMVSAYYTYIFTNLEFSLQRMDSLVDDRVNILGFSIFNQSHAFFQEFAQSLNQSWQENCDHVPFTGPALSSALLFDAVYAVVTAVQELNRSQEIGVKPLSCGSAQIWQHGTSLMNYLRMVELEGLTGHIEFNSKGQRSNYALKILQFTRNGFRQIGQWHVAEGLSMDSHLYASNISDTLFNTTLVVTTILENPYLMLKGNHQEMEGNDRYEGFCVDMLKELAEILRFNYKIRLVGDGVYGVPEANGTWTGMVGELIARKADLAVAGLTITAEREKVIDFSKPFMTLGISILYRVHMGRKPGYFSFLDPFSPGVWLFMLLAYLAVSCVLFLVARLTPYEWYSPHPCAQGRCNLLVNQYSLGNSLWFPVGGFMQQGSTIAPRALSTRCVSGVWWAFTLIIISSYTANLAAFLTVQRMDVPIESVDDLADQTAIEYGTIHGGSSMTFFQNSRYQTYQRMWNYMYSKQPSVFVKSTEEGIARVLNSNYAFLLESTMNEYYRQRNCNLTQIGGLLDTKGYGIGMPVGSVFRDEFDLAILQLQENNRLEILKRKWWEGGKCPKEEDHRAKGLGMENIGGIFVVLICGLIVAIFMAMLEFLWTLRHSEATEVSVCQEMVTELRSIILCQDSIHPRRRRAAVPPPRPPIPEERRPRGTATLSNGKLCGAGEPDQLAQRLAQEAALVARGCTHIRVCPECRRFQGLRARPSPARSEESLEWEKTTNSSEPE

SEQ ID NO: 13258 - protein, 423 aa, Homo sapiens
MAAVVLPPTAASQREGHTEGGELVNELLKSWLKGLVTFEDVAVEFTQEEWALLDPAQRTLYRDVMLENCRNLASLGNQVDKPRLISQLEQEDKVMTEERGILSGTCPDVENPFKAKGLTPKLHVFRKEQSRNMKMERNHLGATLNECNQCFKVFSTKSSLTRHRKIHTGERPYGCSECGKSYSSRSYLAVHKRIHNGEKPYECNDCGKTFSSRSYLTVHKRIHNGEKPYECSDCGKTFSNSSYLRPHLRIHTGEKPYKCNQCFREFRTQSIFTRHKRVHTGEGHYVCNQCGKAFGTRSSLSSHYSIHTGEYPYECHDCGRTFRRRSNLTQHIRTHTGEKPYTCNECGKSFTNSFSLTIHRRIHNGEKSYECSDCGKSFNVLSSVKKHMRTHTGKKPYECNYCGKSFTSNSYLSVHTRMHNRQM

SEQ ID NO: 13259 - protein, 137 aa, Homo sapiens
MRLPWELLVLQSFILCLAGSQTDFWSLLGVLPALEADDSTLHGPIFIQEPSPVMFPLDSEEKKVKLNCEVKGNPKPHIRWKLNGTDVDTGMDFRYSVVEGSLLINNPNKTQDAGTYQCTATNSFGTIVSREAKLQFA

SEQ ID NO: 13260 - protein, 91 aa, Homo sapiens
MAGIFYFALFSCLFGICDAVTGSRVYPANEVTLLDSRSVQGELGWIASPLEGGWEEVSIMDEKNTPIRTYQVCNVMEPSQNNWLRTDWITR

SEQ ID NO: 13261 - protein, 148 aa, Homo sapiens
MAGAGERKGKKDDNGIGTAIDFVLSNARLVLGVGGAAMLGIATLAVKRMYDRAISAPTSPTRLSHSGKRSWEEPNWMGSPRLLNRDMKTGLSRSLQTLPTDSSTFDTGETSYLLPEPGSHPCWRAGSGQASCCGHMCRAPELPAGQVA

SEQ ID NO: 13262 - protein, 159 aa, Homo sapiens
MVPSAGQLALFALGIVLAACQALENSTSPLSDPPVAAAVVSHFNDCPDSHTQFCFHGTCRFLVQEDKPACVCHSGYVGARCEHADLLAVVAASQKKQAITALVVVSIVALAVLIITCVLIHCCQVRKHCEWCRALICRHEKPSALLKGRTACCHSETVV

SEQ ID NO: 13263 - protein, 898 aa, Homo sapiens
MRPMRIFVNDDRHVMAKHSSVYPTQEELEAVQNMVSHTERALKAVSDWIDEQEKGSSEQAESDNMDVPPEDDSKEGAGEQKTEHMTRTLRGVMRVGLVAKGLLLKGDLDLELVLLCKEKPTTALLDKVADNLAIQLAAVTEDKYEILQSVDDAAIVIKNTKEPPLSLTIHLTSPVVREEMEKVLAGETLSVNDPPDVLDRQKCLAALASLRHAKWFQARANGLKSCVIVIRVLRDLCTRVPTWGPLRGWPLELLCEKSIGTANRPMGAGEALRRVLECLASGIVMPDGSGIYDPCEKEATDAIGHLDRQQREDITQSAQHALRLAAFGQLHKVLGMDPLPSKMPKKPKNENPVDYTVQIPPSTTYAITPMKRPMEEDGEEKSPSKKKKKIQKKEEKAEPPQAMNALMRLNQLKPGLQYKLVSQTGPVHAPIFTMSVEVDGNSFEASGPSKKTAKLHVAVKVLQDMGLPTGAEGRDSSKGEDSAEETEAKPAVVAPAPVVEAVSTPSAAFPSDATAENVKQQGPILTKHGKNPVMELNEKRRGLKYELISETGGSHDKRFVMEVEVDGQKFQGAGSNKKVAKAYAALAALEKLFPDTPLALDANKKKRAPVPVRGGPKFAAKPHNPGFGMGGPMHNEVPPPPNLRGRGRGGSIRGRGRGRGFGGANHGGYMNAGAGYGSYGYGGNSATAGYSQFYSNGGHSGNASGGGGGGGGGSSGYGSYYQGDNYNSPVPPKHAGKKQPHGGQQKPSYGSGYQSHQGQQQSYNQSPYSNYGPPQGKQKGYNHGQGSYSYSNSYNSPGGGGGSDYNYESKFNYSGSGGRSGGNSYGSGGASYNPGSHGGYGGGSGGGSSYQGKQGGYSQSNYNSPGSGQNYSGPPSSYQSSQGGYGRNADHSMNYQYR

SEQ ID NO: 13264 - protein, 166 aa, Homo sapiens
MFKIGRGALDLFSELLSFGGIVLAACQALENSTSPLSADPPVAAAVVSHFNDCPDSHTQFCFHGTCRFLVQEDKPACVCHSGYVGARCEHADLLAVVAASQKKQAITALVVVSIVALAVLIITCVLIHCCQVRKHCEWCRALICRHEKPSALLKGRTACCHSETVV

SEQ ID NO: 13265 - protein, 68 aa, Homo sapiens
MAGLTAAAPRPGVLLLLLSILHPSRPGGVPGAIPGGVPGGVFYPGNVHETSTHPGHADDADVHNRCTF

SEQ ID NO: 13266 - protein, 283 aa, Homo sapiens
METGPEDPSSMPEESSPRRTPQSIPYQDLPHLVNADGQYLFCRYWKPTGTPKALIFVSHGAGEHSGRYEELARMLMGLDLLVFAHDHVGHGQSEGERMVVSDFHVFVRDVLQHVDSMQKDYPGLPVFLLGHSMGGAIAILTAAERPGHFAGMVLISPLVLANPESATTFKVDIYNSDPLICRAGLKVCFGIQLLNAVSRVERALPKLTVPFLLLQGSADRLCDSKGAYLLMELAKSQDKTLKIYEGAYHVLHKELPEVTNSVFHEINMWVSQRTATAGTASPP

SEQ ID NO: 13267 - protein, 123 aa, Homo sapiens
MMGSPVSHLLAGFCVWVVLGWVGGSVPNLGPAEQEQNHYLAQLFGLYGENGTLTAGGLARLLHSLGLGRVQGLRLGQHGPLTGRAASPAADNSTHRPQNPELSVDVWAGMPLGPSGWGDLEES

SEQ ID NO: 13268 - protein, 390 aa, Homo sapiens
MVMERLGIDLQKISGQNGTFKKSTVLQLGIRMLDVLEYIHENEYVHGDIKAANLLLGYKNPDQVYLADYGLSYRYCPNGNHKQYQENPRKGHNGTIEFTSLDAHKGVALSRRSDVEILGYCMLRWLCGKLPWEQNLKDPVAVQTAKTNLLDELPQSVLKWAPSGSSCCEIAQFLVCAHSLAYDEKPNYQALKKILNPHGIPLGPLDFSTKGQSINVHTPNSQKVDSQKAATKQVNKAHNRLIEKKVHSERSAESCATWKVQKEEKLIGLMNNEAAQESTRRRQKYQESQEPLNEVNSFPQKISYTQFPNSFYEPHQDFTSPDIFKKSRSPSWYKYTSTVSTGITDLESSTGLWPTISQFTLSEETNADVYYYRIIIPVLLMLVFLALFFL

SEQ ID NO: 13269 - protein, 1966 aa, Homo sapiens
MWIPTEHEKYGVVIASFRGTVPYGLSLEIGDTVQILEKCDGWYRGFALKNPNIKGIFPSSYVHLKNACVKNKGQFEMVIPTEDSVITEMTSTLRDWGTMWKQLYVRNEGDLFHRLWHIMNEILDLRRQVLVGHLTHDRMKDVKRHITARLDWGNEQLGLDLVPRKEYAMVDPEDISITELYRLMEHRHRKKDTPVQASSHHLFVQMKSLMCSNLGEELEVIFSLFDSKENRPISERFFLRLNRNGLPKAPDKPERHCSLFVDLGSSELRKDIYITVHIIRIGRMGAGEKKNACSVQYRRPFGCAVLSIADLLTGETKDDLILKVYMCNTESEWYQIHENIIKKLNARYNLTGSNAGLAVSLQLLHGDIEQIRREYSSVFSHGVSITRKLGFSNIIMPGEMRNDLYITIERGEFEKGGKSVARNVEVTMFIVDSSGQTLKDFISFGSGEPPASEYHSFVLYHNNSPRWSELLKLPIPVDKFRGAHIRFEFRHCSTKEKGEKKLFGFSFVPLMQEDGRTLPDGTHELIVHKCEENTNLQDTTRYLKLPFSKGIFLGNNNQAMKATKESFCITSFLCSTKLTQNGDMLDLLKWRTHPDKITGCLSKLKEIDGSEIVKFLQDTLDTLFGILDENSQKYGSKVFDSLVHIINLLQDSKFHHFKPVMDTYIESHFAGALAYRDLIKVLKWYVDRITEAERQEHIQEVLKAQEYIFKYIVQSRRLFSLATGGQNEEEFRCCIQELLMSVRFFLSQESKGSGALSQSQAVFLSSFPAVYSELLKLFDVREVANLVQDTLGSLPTILHVDDSLQAIKLQCIGKTVESQLYTNPDSRYILLPVVLHHLHIHLQEQKDLIMCARILSNVFCLIKKNSSEKSVLEEIDVIVASLLDILLRTILEITSRPQPSSSAMRFQFQDVTGEFVACLLSLLRQMTDRHYQQLLDSFNTKEELRDFLLQIFTVFRILIRPEMFPKDWTVMRLVANNVIITTVLYLSDALRKNFLNENFDYKIWDSYFYLAVIFINQLCLQLEMFTPSKKKKVLEKYGDMRVTMGCEIFSMWQNLGEHKLHFIPALIGPFLEVTLIPQPDLRNVMIPIFHDMMDWEQRRSGNFKQVEAKLIDKLDSLMSEGKGDETYRELFNSILLKKIERETWRESGVSLIATVTRLMERLLDYRDCMKMGEVDGKKIGCTVSLLNFYKTELNKEEMYIRYIHKLYDLHLKAQNFTEAAYTLLLYDELLEWSDRPLREFLTYPMQTEWQRKEHLHLTIIQNFDRGKCWENGIILCRKIAEQYESYYDYRNLSKMRMMEASLYDKIMDQQRLEPEFFRVGFYGKKFPFFLRNKEFVCRGHDYERLEAFQQRMLNEFPHAIAMQHANQPDETIFQAEAQYLQIYAVTPIPESQEVLQREGVPDNIKSFYKVNHIWKFRYDRPFHKGTKDKENEFKSLWVERTSLYLVQSLPGISRWFEVEKREVVEMSPLENAIEVLENKNQQLKTLISQCQTRQMQNINPLTMCLNGVIDAAVNGGVSRYQEAFFVKEYILSHPEDGEKIARLRELMLEQAQILEFGLAVHEKFVPQDMRPLHKKLVDQFFVMKSSLGIQEFSACMQASPVHFPNGSPRVCRNSAPASVSPDGTRVIPRRSPLSYPAVNRYSSSSLSSQASAEVSNITGQSESSDEVFNMQPSPSTSSLSSTHSASPNVTSSAPSSARASPLLSDKHKHSRENSCLSPRERPCSAIYPTPVEPSQRMLFNHIGDGALPRSDPNLSAPEKAVNPTPSSWSLDSGKEAKNMSDSGKLISPPVPPRPTQTASPARHTTSVSPSPAGRSPLKGSVQSFTPSPVEYHSPGLISNSPVLSGSYSSGISSLSRCSTSETSGFENQVNEQSAPLPVPVPVPVPSYGGEEPVRKESKTPPPYSVYERTLRRPVPLPHSLSIPVTSEPPALPPKPLAARSSHLENGARRTDPGPRPRPLPRKVSQL

SEQ ID NO: 13270 - protein, 376 aa, Homo sapiens
MAVLGVQLVVTLLTATLMHRLAPHCSFARWLLCNGSLFRYKHPSEEELRALAGKPRPRGRKERWANGLSEEKPLSVPRDAPFQLETCPLTTVDALGLASMTQNLEPLLKKQGWDWALPVAKLAIRVGLAVVGSVLGAFLTFPGLRLAQTHRDALTMSEDRPMLQFLLHTSFLSPLFILWLWTKPIARDFLHQPPFGETRFSLLSDSAFDSGRLWLLVVLCLLRLAVTRPHLQAYLCLAKARVEQLRREAGRIEAREIQQRVVRVYCYVTVVSLQYLTPLILTLNCTLLLKTLGGYSWGLGPAPLLSPDPSSASAAPIGSGEDEVQQTAARIAGALGGLLTPLFLRGVLAYLIWWTAACQLLASLFGLYFHQHLAGS

SEQ ID NO: 13271 - protein, 509 aa, Homo sapiens
MKRGRLPSSSEDSDDNGSLSTTWSQNSRSQHRRSSCSRHEDRKPSEVFRTDLITAMKLHDSYQLNPDEYYVLADPWRQEWEKGVQVPVSPGTIPQPVARVVSEEKSLMFIRPKKYIVSSGSEPPELGYVDIRTLADSVCRYDLNDMDAAWLELTNEEFKEMGMPELDEYTMERVLEEFEQRCYDNMNHAIETEEGLGIEYDEDVVCDVCQSPDGEDGNEMVFCDKCNICVHQACYGILKVPEGSWLCRTCALGVQPKCLLCPKKGGAMKPTRSGTKWVHVSCALWIPEVSIGSPEKMEPITKVSHIPSSRWALVCSLCNEKFGASIQCSVKNCRTAFHVTCAFDRGLEMKTILAENDEVKFKSYCPKHSSHRKPEESLGKGAAQENGAPECSPRNPLEPFASLEQNREEAHRVSVRKQKLQQLEDEFYTFVNLLDVARALRLPEEVVDFLYQYWKLKRKVNFNKPLITPKKDEEDNLAKREQDVLFRRLQLFTHLRQDLERVMIDTDTL

SEQ ID NO: 13272 - protein, 296 aa, Homo sapiens
MLFMKMDLLNYQYLDKMNNNIGILCYEGEAALRGEPRIQTLPVASALSSHRTGPPPISPSKRKFSMEPGDEDLDCDNDHVSKMSRIFNPHLNKTANGDCRRDPRERSRSPIERAVAPTMSLHGSHLYTSLPSLGLEQPLALTKNSLDASRPAGLSPTLTPGERQQNRPSVITCASAGARNCNLSHCPIAHSGCAAPGPASYRRPPSAATTCDPVVEEHFRRSLGKNYKEPEPAPNSVSITGSVDDHFAKALGDTWLQIKAAKDGASSSPESASRRGQPASPSAHMVSHSHSPSVVS

SEQ ID NO: 13273 - protein, 218 aa, Homo sapiens
MEQRPRGCAAVAAALLLVLLGARAQGGTRSPRCDCAGDFHKKIGLFCCRGCPAGHYLKAPCTEPCGNSTCLVCPQDTFLAWENHHNSECARCQACDEQASQVALENCSAVADTRCGCKPGWFVECQVSQCVSSSPFYCQPCLDCGALHRHTRLLCSRRDTDCGTCLPGFYEHGDGCVSCPTVLGPGAPGWPCGPPPAWGHPDLHIPPLLASQAPGYCR

SEQ ID NO: 13274 - protein, 101 aa, Homo sapiens
MDMFPLTWVFLALYFSRHQVRGQPDPPCGGRLNSKDAGYITSPGYPQDYPSHQNCEWIVYAPEPNQKIVLNFNPHFEIEKHDCKYDFIEIRDGDSESADLL

SEQ ID NO: 13275 - protein, 1002 aa, Homo sapiens
MLLGTLLLILYILMLCRMFLLVGAPKANTTQPGIVEGGQVLKCDWSSTRRCQPIEFDATGNRDYAKDDPLEFKSHQWFGASVRSKQDKILACAPLYHWRTEMKQEREPVGTCFLQDGTKTVEYAPCRSQDIDADGQGFCQGGFSIDFTKADRVLLGGPGSFYWQGQLISDQVAEIVSKYDPNVYSIKYNNQLATRTAQAIFDDSYLGYSVAVGDFNGDGIDDFVSGVPRAARTLGMVYIYDGKNMSSLYNFTGEQMAAYFGFSVAATDINGDDYADVFIGAPLFMDRGSDGKLQEVGQVSVSLQRASGDFQTTKLNGFEVFARFGSAIAPLGDLDQDGFNDIAIAAPYGGEDKKGIVYIFNGRSTGLNAVPSQILEGQWAARSMPPSFGYSMKGATDIDKNGYPDLIVGAFGVDRAILYRARPVITVNAGLEVYPSILNQDNKTCSLPGTALKVSCFNVRFCLKADGKGVLPRKLNFQVELLLDKLKQKGAIRRALFLYSRSPSHSKNMTISRGGLMQCEELIAYLRDESEFRDKLTPITIFMEYRLDYRTAADTTGLQPILNQFTPANISRQAHILLDCGEDNVCKPKLEVSVDSDQKKIYIGDDNPLTLIVKAQNQGEGAYEAELIVSIPLQADFIGVVRNNEALARLSCAFKTENQTRQVVCDLGNPMKAGTQLLAGLRFSVHQQSEMDTSVKFDLQIQSSNLFDKVSPVVSHKVDLAVLAAVEIRGVSSPDHVFLPIPNWEHKENPETEEDVGPVVQHIYELRNNGPSSFSKAMLHLQWPYKYNNNTLLYILHYDIDGPMNCTSDMEINPLRIKISSLQTTEKNDTVAGQGERDHLITKRDLALSEGDIHTLGCGVAQCLKIVCQVGRLDRGKSAILYVKSLLWTETFMNKENQNHSYSLKSSASFNVIEFPYKNLPIEDITNSTLVTTNVTWGIQPAPMPVPVWVIILAVLAGLLLLAVLVFVMYRMGFFKRVRPPQEEQEREQLQPHENGEGNSET

SEQ ID NO: 13276 - protein, 2290 aa, Homo sapiens
MGRIQEVGWVTAGLVIWAGTCYYIYKFTKGRAQSVRTLARNGSTVKMETVVGVQSQTLAINEAEIKTKPQVEIGAETGARSGPRAEVETKATAIAIHRANSQAKAMVGAEPETQSESKVVAGTLVMTEAVTLTEVKAKAREVAMKEAVTQTDAEAGKIVKKEAVTQTKAKAWALVAKTEAKREAMTQTKAETHILAEKETEINRVMVTQSETLAVPREVAKMGATNKTGIVDETKTRALEETVSVAKTQSEARPGATVDARGNPNGMSREVAGVDMKSCAQSQAVTKIQGDDMPGTGVEDMGNCKTMSRAESGADTRASAQPQIFAKTQTEAIPGAKIDAGGNTNAMCKVGAGADVRACIQPQTVAKKQAEVTSGARVDGRGNTNVISKAITGADMRAAAQPQAVASTHAEAMSDAKVKNRGNPNAMTKAGAKANLRANSQVEALPDARDKSRGNPNVMAKVGDGTDMLSCTQPQLVASVQADTLSDGKIKVRGNVNTMPKEGAGVDMKAQGMAQSQGEALPNTRGKARGKAKAKCKTGPGMDMKTCTQPQAGVKTPAEALLDSRVDGRGNPNATSKAGTKADQRVCGQPLVVANPQGEALPGAKNKVKGNPHTVLKVGAGEGTTDSAQPEAVVSFQGEALLGTKNKVKGNPNVVLKAEVGEGAMGTAQLQIMASSKGEALLDSKNKVKGNSNAVSKAGAGTDTTGSVQPQIVANSQGEVLPGAKNKIRGNPTTVPNSGVGPYTTDSARLQAVANSQGEVLPGAKNKVKANLNAVSKAEAGMGATGSVQPQAVANSHCETLPGAKNKVRGNWNAVSKAGAGMDTRGSAQPQAVANSQGEVLPGAKNKVKGNPNVVSKAGAREDTVGSTQPQVLASSQRETLPGARNKVKGNSNVVSKAGAREDTMGSAQPQVVANSQRETLPGARNKVKGNSNAISKAEAGAGIMGSVQVQVVASFQGEVLPGAKNKVRGNSNAVPKAEAGADTVGSAQPQAVANSQSETLLGARNKVKGNTIAVPKAGTGAGTRHSAQPQIVAGSQGETLPGARDKSMSTSEAEATAEDEAYAKPEAEAMPTSESEGGSGTQACRKTQPNIHDYYWNGIGVEDWIAAERWIKFRFQTMDGDWENSVSWADDENEASIGSWSGASDKAGIIRSWAVACDETSVKSWAGARAENVVGIGTWARAGEQASGGLWAGGQTSEGTWAGDKASGGAWTGAENQASGGSWALAGNQAIGELWAAGQASDGSWPGGQASGVSWVGEEAIGGSWTGAENQASEGSWAGAGAGNMSSVSYWAGVVDQAGGGSWAGTSDQSGGGSKPRFEDQASGEGSWAGAGGQASGGSMLGPEDQSSGRSWADTADQASGGSRLGHVDQSSGGAWAGTLDQSGGGSKPRFENQTTEEGSWAGAGGQAGGGSKVGPEDQSSGRSWANSGDQISGGFLVGIVDQANGGSWTGAGHPASVGPKPIFEDQVSGRGSWADAREQVVGDSRLGLRDQSSGDSWAGTGDQASGWFCVCPGSQTNGGSWGGASGQDVGGSRPGPTNQSSAGSWDSPGSQVSGSCWTGAGAVDQAGGCSKPGFEDQAIGGGFWPGAGDQTGGGSRPGSEDQSSGIGSWGVAGGQVLGGARPGPADQSSGGSWAGTGNQSSGRSWIGPGDQAVDCSKPEFEDQACGGGSWAGAGSQASGESWAGSRPGNEAIGGSRMGSEDQATGGSWARSEDQASGRFQVSFEVEANEGFWFGPGAEAVIGSWCWTEEKADIVSRPDDKDEATTASRSGAGEEAMICSRIEAENKASSGSWIRSEEVAYMGSCVGAEAGAGAEAGAGAEAGAGAGAEAGAEAGAGAGAGPGTESGAGIWSWDGDATTVESRLGAGEEAGVESWTLARNVGEDELSRESSPDIEEISLRSLFWAESENSNTFRSKSGKDASFESGAGDNTSIKDKFEAAGGVDIGSWFCAGNENTSEDKSAPKAKAKKSSESRGIYPYMVPGAGMGSWDGAMIWSETKFAHQSEASFPVEDESRKQTRTGEKTRPWSCRCKHEANMDPRDLEKLICMIEMTEDPSVHEIANNALYNSADYSYSHEVVRNVGGISVIESLLNNPYPSVRQKALNALNNISVAAENHRKVKTYLNQVCEDTVTYPLNSNVQLAGLRLIRHLTITSEYQHMVTNYISEFLRLLTVGSGETKDHVLGMLLNFSKNPSMTKDLLIANAPTSLINIFSKKETKENILNALSLFENINYHFKRRAKAFTQDKFSKNSLYFLFQRPKACAKKLRALAAECNDPEVKERVELLISKL

SEQ ID NO: 13277 - protein, 673 aa, Homo sapiens
MGKKYKNIVLLKGLEVINDYHFRMVKSLLSNDLKLNLKMREEYDKIQIADLMEEKFRGDAGLGKLIKIFEDIPTLEDLAETLKKEKLKVKGPALSRKRKKEVDATSPAPSTSSTVKTEGAEATPGAQKRKKSTKEKAGPKGSKVSEEQTQPPSPAGAGMSTAMGRSPSPKTSLSAPPNSSSTENPKTVAKCQVTPRRNVLQKRPVIVKVLSTTKPFEYETPEMEKKIMFHATVATQTQFFHVKVLNTSLKEKFNGKKIIIISDYLEYDSLLEVNEESTVSEAGPNQTFEVPNKIINRAKETLKIDILHKQASGNIVYGVFMLHKKTVNQKTTIYEIQDDRGKMDVVGTGQCHNIPCEEGDKLQLFCFRLRKKNQMSKLISEMHSFIQIKKKTNPRNNDPKSMKLPQEQRQLPYPSEASTTFPESHLRTPQMPPTTPSSSFFTKLKPRLKTEPEEVSIEDSAQSDLKEVMVLNATESFVYEPKEQKKMFHATVATENEVFRVKVFNIDLKEKFTPKKIIAIANYVCRNGFLEVYPFTLVADVNADRNMEIPKGLIRSASVTPKINQLCSQTKGSFVNGVFEVHKKNVRGEFTYYEIQDNTGKMEVVVHGRLTTINCEEGDKLKLTCFELAPKSGNTGELRSVIHSHIKVIKTRKNKKDILNPDSSMETSPDFFF

SEQ ID NO: 13278 - protein, 616 aa, Homo sapiens
MPFTLHLRSRLPSAIRSLILQKKPNIRNTSSMAGELRPASLVVLPRSLAPAFERFCQVNTGPLPLLGQSEPEKWMLPPQGAISETRMGHPQFWKYEFGACTGSLASLEQYSEQLKDMVAFFLGCSFSLEEALEKAGLPRRDPAGHSQTTVPCVTHAGFCCPLVVTMRPIPKDKLEGLVRACCSLGGEQGQPVHMGDPELLGIKELSKPAYGDAMVCPPGEVPVFWPSPLTSLGAVSSCETPLAFASIPGCTVMTDLKDAKAPPGCLTPERIPEVHHISQDPLHYSIASVSASQKIRELESMIGIDPGNRGIGHLLCKDELLKASLSLSHARSVLITTGFPTHFNHEPPEETDGPPGAVALVAFLQALEKEVAIIVDQRAWNLHQKIVEDAVEQGVLKTQIPILTYQGGSVEAAQAFLCKNGDPQTPRFDHLVAIERAGRAADGNYYNARKMNIKHLVDPIDDLFLAAKKIPGISSTGVGDGGNELGMGKVKEAVRRHIRHGDVIACDVEADFAVIAGVSNWGGYALACALYILYSCAVHSQYLRKAVGPSRAPGDQAWTQALPSVIKEEKMLGILVQHKVRSGVSGIVGMEVDGLPFHNTHAEMIQKLVDVTTAQV

SEQ ID NO: 13279 - protein, 257 aa, Homo sapiens
MAVWLAQWLGPLLLVSLWGLLAPASLLRRLGEHIQQFQESSAQGLGLSLGPGAAALPKVGWLEQLLDPFNVSDRRSFLQIVLHSLGQKCLSFSRAETVAQLRSTEPQLSGVGDRQWLYQTCTEFGFYVTCENPRCPFSQLPALPSQLDLCEQVFGLSALSVAQAVAQTNSYYGGQTPGANKVLFVNGDTDPWHVLSVTQALGSSESTLLIRTGSHCLDMAPERPSDSPSLRLGRQNIFQQLQTWLKLAKESQIKGEV

SEQ ID NO: 13280 - protein, 379 aa, Homo sapiens
MEGNRDEAEKCVEIAREALNAGNREKAQRFLQKAEKLYPLPSARALLEIIMKNGSTAGNSPHCRKPSGSGDQSKPNCTKDSTSGSGEGGKGYTKDQVDGVLSINKCKNYYEVLGVTKDAGDEDLKKAYRKLALKFHPDKNHAPGATDAFKKIGNAYAVLSNPEKRKQYDLTGNEEQACNHQNNGRFNFHRGCEADITPEDLFNIFFGGGFPSGSVHSFSNGRAGYSQQHQHRHSGHEREEERGDGGFSVFIQLMPIIVLILVSLLSQLMVSNPPYSLYPRSGTGQTIKMQTENLGVVYYVNKDFKNEYKGMLLQKVEKSVEEDYVTNIRNNCWKERQQKTDMQYAAKVYRDDRLRRKADALSMDNCKELERLTSLYKGG

SEQ ID NO: 13281 - protein, 426 aa, Homo sapiens
MAAPALGLVCGRCPELGLVLLLLLLSLLCGAAGSQEAGTGAGAGSLAGSCGCGTPQRPGAHGSSAAAHRYSREANAPGPVPGERQLAHSKMVPIPAGVFTMGTDDPQIKQDGEAPARRVTIDAFYMDAYEVSNTEFEKFVNSTGYLTEAEKFGDSFVFEGMLSEQVKTNIQQAVAAAPWWLPVKGANWRHPEGPDSTILHRPDHPVLHVSWNDAVAYCTWAGKRLPTEAEWEYSCRGGLHNRLFPWGNKLQPKGQHYANIWQGEFPVTNTGEDGFQGTAPVDAFPPNGYGLYNIVGNAWEWTSDWWTVHHSVEETLNPKGPPSGKDRVKKGGSYMCHRSQEYYDPYFQDVASEMLRRHTASRWKAFSSLEPCCSIRRHQQYAAIERLTCGKFELRCASLRKIDCLNTNIACSYSMRQDGPRLHCVD

SEQ ID NO: 13282 - protein, 60 aa, Homo sapiens
MLSVQPDTKPKGCAGCNRKIKDRYLLKALDKYWHEDCLKCACCDCRLGEALWCNGKLRCL

SEQ ID NO: 13283 - protein, 952 aa, Homo sapiens
MDLRVGQRPPVEPPPEPTLLALQRPQRLHHHLFLAGLQQQRSVEPMRLSMDTPMPELQVGPQEQELRQLLHKDKSKRSAVASSVVKQKLAEVILKKQQAALERTVHPNSPGIPYRTLEPLETEGATRSMLSSFLPPVPSLPSDPPEHFPLRKTVSEPNLKLRYKPKKSLERRKNPLLRKESAPPSLRRRPAETLGDSSPSSSSTPASGCSSPNDSEHGPNPILGSEALLGQRLRLQETSVAPFALPTVSLLPAITLGLPAPARADSDRRTHPTLGPRGPILGSPHTPLFLPHGLEPEAGGTLPSRLQPILLLDPSGSHAPLLTVPGLGPLPFHFAQSLMTTERLSGSGLHWPLSRTRSEPLPPSATAPPPPGPMQPRLEQLKTHVQVIKRSAKPSEKPRLRQIPSAEDLETDGGGPGQVVDDGLEHRELGHGQPEARGPAPLQQHPQVLLWEQQRLAGRLPRGSTGDTVLLPLAQGGHRPLSRAQSSPAAPASLSAPEPASQARVLSSSETPARTLPFTTGLIYDSVMLKHQCSCGDNSRHPEHAGRIQSIWSRLQERGLRSQCECLRGRKASLEELQSVHSERHVLLYGTNPLSRLKLDNGKLAGLLAQRMFVMLPCGGVGVDTDTIWNELHSSNAARWAAGSVTDLAFKVASRELKNGFAVVRPPGHHADHSTAMGFCFFNSVAIACRQLQQQSKASKILIVDWDVHHGNGTQQTFYQDPSVLYISLHRHDDGNFFPGSGAVDEVGAGSGEGFNVNVAWAGGLDPPMGDPEYLAAFRIVVMPIAREFSPDLVLVSAGFDAAEGHPAPLGGYHVSAKCFGYMTQQLMNLAGGAVVLALEGGHDLTAICDASEACVAALLGNRVDPLSEEGWKQKPNLNAIRSLEAVIRVHSKYWGCMQRLASCPDSWVPRVPGADKEEVEAVTALASLSVGILAEDRPSEQLVEEEEPMNL

SEQ ID NO: 13284 - protein, 128 aa, Homo sapiens
MAYSTVQRVALASGLVLALSLLLPKAFLSRGKRQEPPPTPEGKLGRFPPMMHHHQAPSDGQTPGARFQRSHLAEAFAKAKGSGGGAGGGGSGRGLMGQIIPIYGFGIFLYILYILFKVSRIILIILHQ

SEQ ID NO: 13285 - protein, 434 aa, Homo sapiens
MGMGRGAGRSALGFWPTLAFLLCSFPAATSPCKILKCNSEFWSATSGSHAPASDDTPEFCAALRSYALCTRRTARTCRGDLAYHSAVHGIEDLMSQHNCSKDGPTSQPRLRTLPPAGDSQERSDSPEICHYEKSFHKHSATPNYTHCGLFGDPHLRTFTDRFQTCKVQGAWPLIDNNYLNVQVTNTPVLPGSAATATSKLTIIFKNFQECVDQKVYQAEMDELPAAFVDGSKNGGDKHGANSLKITEKVSGQHVEIQAKYIGTTIVVRQVGRYLTFAVRMPEEVVNAVEDWDSQGLYLCLRGCPLNQQIDFQAFHTNAEGTGARRLAAASPAPTAPETFPYETAVAKCKEKLPVEDLYYQACVFDLLTTGDVNFTLAAYYALEDVKMLHSNKDKLHLYERTRDLPGRAAAGLPLAPRPLLGALVPLLALLPVFC

SEQ ID NO: 13286 - protein, 429 aa, Homo sapiens
MDKFWWHAAWGLCLVPLSLAQIDLNITCRFAGVFHVEKNGRYSISRTEAADLCKAFNSTLPTMAQMEKALSIGFETCRYGFIEGHVVIPRIHPNSICAANNTGVYILTSNTSQYDTYCFNASAPPEEDCTSVTDLPNAFDGPITITIVNRDGTRYVQKGEYRTNPEDIYPSNPTDDDVSSGSSSERSSTSGGYIFYTFSTVHPIPDEDSPWITDSTDRIPATNRNDVTGGRRDPNHSEGSTTLLEGYTSHYPHTKESRTFIPVTSAKTGSFGVTAVTVGDSNSNVNRSLSGDQDTFHPSGGSHTTHGSESDGHSHGSQEGGANTTSGPIRTPQIPEWLIILASLLALALILAVCIAVNSRRRCGQKKKLVINSGNGAVEDRKPSGLNGEASKSQEMVHLVNKESSETPDQFMTADETRNLQNVDMKIGV

SEQ ID NO: 13287 - protein, 406 aa, Homo sapiens
MVPPPPSRGGAARGQLGRSLGPLLLLLALGHTWTYREEPEDGDREICSESKIATTKYPCLKSSGELTTCYRKKCCKGYKFVLGQCIPEDYDVCAEAPCEQQCTDNFGRVLCTCYPGYRYDRERHRKREKPYCLDIDECASSNGTLCAHICINTLGSYRCECREGYIREDDGKTCTRGDKYPNDTGHEKSENMVKAGTCCATCKEFYQMKQTVLQLKQKIALLPNNAADLGKYITGDKVLASNTYLPGPPGLPGGQGPPGSPGPKGSPGFPGMPGPPGQPGPRGSMGPMGPSPDLSHIKQGRRGPVGPPGAPGRDGSKGERGAPGPRGSPGPPGSFDFLLLMLADIRNDITELQEKVFGHRTHSSAEEFPLPQEFPSYPEAMDLGSGDDHPRRTETRDLRAPRDFYP

SEQ ID NO: 13288 - protein, 1368 aa, Homo sapiens
MQGPPLLTAAHLLCVCTAALAVAPGPRFLVTAPGIIRPGGNVTIGVELLEHCPSQVTVKAELLKTASNLTVSVLEAEGVFEKGSFKTLTLPSDPKSNLIQQWLSQQSDLGVISKTFQLSSHPILGDWSIQVQVNDQTYYQSFQVSEYVLPKFEVTLQTPLYCSMNSKHLNGTITAKYTYGKPVKGDVTLTFLPLSFWGKKKNITKTFKINGSANFSFNDEEMKNVMDSSNGLSEYLDLSSPGPVEILTTVTESVTGISRNVSTNVFFKQHDYIIEFFDYTTVLKPSLNFTATVKVTRADGNQLTLEERRNNVVITVTQRNYTEYWSGSNSGNQKMEAVQKINYTVPQSGTFKIEFPILEDSSELQLKAYFLGSKSSMAVHSLFKSPSKTYIQLKTRDENIKVGSPFELVVSGNKRLKELSYMVVSRGQLVAVGKQNSTMFSLTPENSWTPKACVIVYYIEDDGEIISDVLKIPVQLVFKNKIKLYWSKVKAEPSEKVSLRISVTQPDSIVGIVAVDKSVNLMNASNDITMENVVHELELYNTGYYLGMFMNSFAVFQECGLWVLTDANLTKDYIDGVYDNAEYAERFMEENEGHIVDIHDFSLGSSPHVRKHFPETWIWLDTNMGYRIYQEFEVTVPDSITSWVATGFVISEDLGLGLTTTPVELQAFQPFFIFLNLPYSVIRGEEFALEITIFNYLKDATEVKVIIEKSDKFDILMTSNEINATGHQQTLLVPSEDGATVLFPIRPTHLGEIPITVTALSPTASDAVTQMILVKAEGIEKSYSQSILLDLTDNRLQSTLKTLSFSFPPNTVTGSERVQITAIGDVLGPSINGLASLIRMPYGCGEQNMINFAPNIYILDYLTKKKQLTDNLKEKALSFMRQGYQRELLYQREDGSFSAFGNYDPSGSTWLSAFVLRCFLEADPYIDIDQNVLHRTYTWLKGHQKSNGEFWDPGRVIHSELQGGNKSPVTLTAYIVTSLLGYRKYQPNIDVQESIHFLESEFSRGISDNYTLALITYALSSVGSPKAKEALNMLTWRAEQEGGMQFWVSSESKLSDSWQPRSLDIEVAAYALLSHFLQFQTSEGIPIMRWLSRQRNSLGGFASTQDTTVALKALSEFAALMNTERTNIQVTVTGPSSPSPVKFLIDTHNRLLLQTAELAVVQPTAVNISANGFGFAICQLNVVYNVKASGSSRRRRSIQNQEAFDLDVAVKENKDDLNHVDLNVCTSFSGPGRSGMALMEVNLLSGFMVPSEAISLSETVKKVEYDHGKLNLYLDSVNETQFCVNIPAVRNFKVSNTQDASVSIVDYYEPRRQAVRSYNSEVKLSSCDLCSDVQGCRPCEDGASGSHHHSSVIFIFCFKLLYFMELWL

SEQ ID NO: 13289 - protein, 421 aa, Homo sapiens
MASSPWGCVCGLLLLLLPLLGTGPALGRGFPRPLENSEIPMIPGAHPKGSVGSEPQAFDVFPENPRADSHRNSDVRHAPAEEMPEKPVASPLGPALYGPKAAQGAQRERLPVTDDLQMAQGPSSHGWTGPLDSQELLQQEAVAPHPVGHPHLTFIPTTPRRQLRVATVPPSLQHEGQEGQWPPRDEGLKAKTKSRVPPTSPSDHQGPPHTLVSHSGTVKRPVLEGQGGFEEHLQEAAQGPHFTQQDPAAPDVGSVPPVEVVYSQEPGAQPDLALARSLPPAEELPVETPKRAGAEVSWEVSSPGPPPKQADLPDAKDSPGPQPTDPPASEAPDRPSKPERAAMNGADPISPQRVRGAVEAPGTPKSLIPGPSDPGPAVNRTESPMGALQPGESMAGVWGEGVLCLVTENLCWGCMGAEGGE

SEQ ID NO: 13290 - protein, 160 aa, Homo sapiens
LQAFMYILGICLIMELIGGVVALTFRNQTIDFLNDNIRRGIENYYDDLDFKNIMDFVQKKFKCCGGEDYRDWSKNQYHDCSAPGPLACGVPYTCCIRNTTEVVNTMCGYKTIDKERFSVQDVIYVRGCTNAVIIWFMDNYTIMAGILLGILLPQITGVSD

SEQ ID NO: 13291 - protein, 89 aa, Homo sapiens
MNLQPIFWIGLISSVCCVFAQTDENRCLKANAKSCGECIQAGPNCGWCTNSTFLQEGMPTSARCDDLEALKKKGCPPDDIENPRGSKDI

SEQ ID NO: 13292 - protein, 290 aa, Homo sapiens [sequence omitted]

SEQ ID NO: 13293 - protein, 320 aa, Homo sapiens
MSVAGLKKQFYKASQLVSEKVGGAEGTKLDDDFKEMEKKVDVTSKAVTEVLARTIEYLQPNPGDALLDAGESMKRLAEVKDSLDIEVKQNFIDPLQNLCEKDLKEIQHHLKKLEGRRLDFDYKKKRQGKIPDEELRQALEKFEESKEVAETSMHNLLETDIEQVSQLSALVDAQLDYHRQAVQILDELAEKLKRRMREASSRPKREYKPKPREPFDLGEPEQSNGGFPCTTAPKIAASSSFRSSDKPIRTPSRSMPPLDQPSCKALYDFEPENDGELGFHEGDVITLTNQIDENWYEGMLDGQSGFFPLSYVEVLVPLPQ

SEQ ID NO: 13294 - protein, 76 aa, Homo sapiens
MALDPADFTKCCKNSGVLMVVKCRKENSALKECLTAYYNDPAFYEECKMEYLKEREEFRKTGIPTKKRLQKLPTSM

SEQ ID NO: 13295 - protein, 866 aa, Homo sapiens
MEEGNNNEEVIHLNNFHCHRGQEWINLRDGPITISDSSDEERIPMLVTPAPQQHEEEDLDDDVILTEDDSEDDYGEFLDLGPPGISEFTKPSGQTEREPKPGPSHNQAANDIVNPRSEQKVIILEEGSLLYTESDPLETQNQSSEDSETELLSNLGESAALADDQAIEEDCWLDHPYFQSLNQQPREITNQVVPQERQPEAELGRLLFQHEFPGPAFPRPEPQQGGISGPSSPQPAHPLGEFEDQQLASDDEEPGPAFPMQESQEPNLENIWGQEAAEVDQELVELLVKETEARFPDVANGFIEEIIHFKNYYDLNVLCNFLLENPDYPKREDRIIINPSSSLLASQDETKLPKIDFFDYSKLTPLDQRCFIQAADLLMADFKVLSSQDIKWALHELKGHYAITRKALSDAIKKWQELSPETSGKRKKRKQMNQYSYIDFKFEQGDIKIEKRMFFLENKRRHCRSYDRRALLPAVQQEQEFYEQKIKEMAEHEDFLLALQMNEEQYQKDGQLIECRCCYGEFPFEELTQCADAHLFCKECLIRYAQEAVFGSGKLELSCMEGSCTCSFPTSELEKVLPQTILYKYYERKAEEEVAAAYADELVRCPSCSFPALLDSDVKRFSCPNPHCRKETCRKCQGLWKEHNGLTCEELAEKDDIKYRTSIEEKMTAARIRKCHKCGTGLIKSEGCNRMSCRCGAQMCYLCRVSINGYDHFCQHPRSPGAPCQECSRCSLWTDPTEDDEKLIEEIQKEAEEEQKRKNGENTFKRIGPPLEKPVEKVQRVEALPRPVPQNLPQPQMPPYAFAHPPFPLPPVRPVFNNFPLNMGPIPAPYVPPLPNVRVNYDFGPIHMPLEHNLPMHFGPQPRHRF

SEQ ID NO: 13296 - protein, 228 aa, Homo sapiens
MKIPWGSIPVLMLLLLLGLIDISQAQLSCTGPPAIPGIPGIPGTPGPDGQPGTPGIKGEKGLPGLAGDHGEFGEKGDPGIPGNPGKVGPKGPMGPKGGPGAPGAPGPKGESGDYKATQKIAFSATRTINVPLRRDQTIRFDHVITNMNNNYEPRSGKFTCKVPGLYYFTYHASSRGNLCVNLMRGRERAQKVVTFCDYAYNTFQVTTGGMVLKLEQGENVFLQATDKN

SEQ ID NO: 13297 - protein, 342 aa, Homo sapiens
MGRLVAVGLLGIALALLGERLLALRNRLKASREVESVDLPHCHLIKGIEAGSEDIDILPNGLAFFSVGLKFPGLHSFAPDKPGGILMMDLKEEKPRARELRISRGFDLASFNPHGISTFIDNEFKNTVEIFKFEEAENSLLHLKTVKHELLPSVNDITAVGPAHFYATNDHYFSDPFLKYLETYLNLHWANVVYYSPNEVKVVAEGFDSANGINISPDDKYIYVADILAHEIHVLEKHTNMNLTQLKVLELDTLVDNLSIDPSSGDIWVGCHPNGQKLFVYDPNNPPSSEVLRIQNILSEKPTVTTVYANNGSVLQGSSVASVYDGKLLIGTLYHRALYCEL

SEQ ID NO: 13298 - protein, 114 aa, Homo sapiens
MGTRLFFYVALCLLWAGHRDAGITQSPRYKITETGRQVTLMCHQTWSHSYMFWYRQDLGHGLRLIYYSAAADITDKGEVPDGYVVSRSKTENFPLTLESATRSQTSVYFCASSE

SEQ ID NO: 13299 - protein, 747 aa, Homo sapiens
MEIPNPPTSKCITYWKRKVKSEYMRLRQLKRLQANMGAKALYVANFAKVQEKTQILNEEWKKLRVQPVQSMKPVSGHPFLKKCTIESIFPGFASQHMLMRSLNTVALVPIMYSWSPLQQNFMVEDETVLCNIPYMGDEVKEEDETFIEELINNYDGKVHGEEEMIPGSVLISDAVFLELVDALNQYSDEEEEGHNDTSDGKQDDSKEDLPVTRKRKRHAIEGNKKSSKKQFPNDMIFSAIASMFPENGVPDDMKERYRELTEMSDPNALPPQCTPNIDGPNAKSVQREQSLHSFHTLFCRRCFKYDCFLHPFHATPNVYKRKNKEIKIEPEPCGTDCFLLLEGAKEYAMLHNPRSKCSGRRRRRHHIVSASCSNASASAVAETKEGDSDRDTGNDWASSSSEANSRCQTPTKQKASPAPPQLCVVEAPSEPVEWTGAEESLFRVFHGTYFNNFCSIARLLGTKTCKQVFQFAVKESLILKLPTDELMNPSQKKKRKHRLWAAHCRKIQLKKDNSSTQVYNYQPCDHPDRPCDSTCPCIMTQNFCEKFCQCNPDCQNRFPGCRCKTQCNTKQCPCYLAVRECDPDLCLTCGASEHWDCKVVSCKNCSIQRGLKKHLLLAPSDVAGWGTFIKESVQKNEFISEYCGELISQDEADRRGKVYDKYMSSFLFNLNNDFVVDATRKGNKIRFANHSVNPNCYAKVVMVNGDHRIGIFAKRAIQAGEELFFDYRYSQADALKYVGIERETDVL

SEQ ID NO: 13300 - protein, 724 aa, Homo sapiens
MAEAGLRGWLLWALLLRLAQSEPYTTIHQPGYCAFYDECGKNPELSGSLMTLSNVSCLSNTPARKITGDHLILLQKICPRLYTGPNTQACCSAKQLVSLEASLSITKALLTRCPACSDNFVNLHCHNTCSPNQSLFINVTRVAQLGAGQLPAVVAYEAFYQHSFAEQSYDSCSRVRVPAAATLAVGTMCGVYGSALCNAQRWLNFQGDTGNGLAPLDITFHLLEPGQAVGSGIQPLNEGVARCNESQGDDVATCSCQDCAASCPAIARPQALDSTFYLGQMPGSLVLIIILCSVFAVVTILLVGFRVAPARDKSKMVDPKKGTSLSDKLSFSTHTLLGQFFQGWGTWVASWPLTILVLSVIPVVALAAGLVFTELTTDPVELWSAPNSQARSEKAFHDQHFGPFFRTNQVILTAPNRSSYRYDSLLLGPKNFSGILDLDLLLELLELQERLRHLQVWSPEAQRNISLQDICYAPLNPDNTSLYDCCINSLLQYFQNNRTLLLLTANQTLMGQTSQVDWKDHFLYCANAPLTFKDGTALALSCMADYGAPVFPFLAIGGYKGKDYSEAEALIMTFSLNNYPAGDPRLAQAKLWEEAFLEEMRAFQRRMAGMFQVTFMAERSLEDEINRTTAEDLPIFATSYIVIFLYISLALGSYSSWSRVMVDSKATLGLGGVAVVLGAVMAAMGFFSYLGIRSSLVILQVVPFLVLSVGADNIFIFVLEYQGP

SEQ ID NO: 13301 - protein, 377 aa, Homo sapiens
MAATEDERLAGSGEGERLDFLRDRHVRFFQRCLQVLPERYSSLETSRLTIAFFALSGLDMLDSLDVVNKDDIIEWIYSLQVLPTEDRSNLNRCGFRGSSYLGIPFNPSKAPGTAHPYDSGHIAMTYTGLSCLVILGDDLSRVNKEACLAGLRALQLEDGSFCAVPEGSENDMRFVYCASCICYMLNNWSGMDMKKAITYIRRSMSYDNGLAQGAGLESHGGSTFCGIASLCLMGKLEEVFSEKELNRIKRWCIMRQQNGYHGRPNKPVDTCYSFWVGATLKLLKIFQYTNFEKNRNYILSTQDRLVGGFAKWPDSHPDALHAYFGICGLSLMEESGICKVHPALNVSTRTSERLLDLHQSWKTKDSKQCSENVHIST

SEQ ID NO: 13302 - protein, 758 aa, Homo sapiens
MGLADASGPRDTQALLSATQAMDLRRRDYHMERPLLNQEHLEELGRWGSAPRTHQWRTWLQCSRARAYALLLQHLPVLVWLPRYPVRDWLLGDLLSGLSVAIMQLPQGLAYALLAGLPPVFGLYSSFYPVFIYFLFGTSRHISVGTFAVMSVMVGSVTESLAPQALNDSMINETARDAARVQVASTLSVLVGLFQVGLGLIHFGFVVTYLSEPLVRGYTTAAAVQVFVSQLKYVFGLHLSSHSGPLSLIYTVLEVCWKLPQSKVGTVVTAAVAGVVLVVVKLLNDKLQQQLPMPIPGELLTLIGATGISYGMGLKHRFEVDVVGNIPAGLVPPVAPNTQLFSKLVGSAFTIAVVGFAIAISLGKIFALRHGYRVDSNQELVALGLSNLIGGIFQCFPVSCSMSRSLVQESTGGNSQVAGAISSLFILLIIVKLGELFHDLPKAVLAAIIIVNLKGMLRQLSDMRSLWKANRADLLIWLVTFTATILLNLDLGLVVAVIFSLLLVVVRTQMPHYSVLGQVPDTDIYRDVAEYSEAKEVRGVKVFRSSATVYFANAEFYSDALKQRCGVDVDFLISQKKKLLKKQEQLKLKQLQKEEKLRKQAASPKGASVSINVNTSLEDMRSNNVEDCKMMVSSGDKMEDATANGQEDSKAPDGSTLKALGLPQPDFHSLILDLGALSFVDTVCLKSLKNIFHDFREIEVEVYMAACHSPVVSQLEAGHFFDASITKKHLFASVHDAVTFALQHPRPVPDSPVSVTRL

SEQ ID NO: 13303 - protein, 139 aa, Homo sapiens
MQAACWYVLFLLQPTVYLVTCANLTNGGKSELLKSGSSKSTLKHIWTESSKDLSISRLLSQTFRGKENDTDLDLRYDTPEPYSEQDLWDWLRNSTDLQEPRPRAKRRPIVKTGKFKKMFGWGDFHSNIKTVKLNLLITG

SEQ ID NO: 13304 - protein, 26 aa, Homo sapiens
MAPKKLSCLRSLLLPLSLTLLLPQAD

SEQ ID NO: 13305 - protein, 1426 aa, Homo sapiens
MENEPDHENVEQSLCAKTSEEELNKSFNLEASLSKFSYIDMDKELEFKNDLIDDKEFDIPQVDTPPTLESILNETDDEDESFILEDPTLLNIDTIDSHSYDTSSVASSDSGDRTNLKRKKKLPDSFSLHGSVMRHSLLKGISAQIVSAADKVDAGLPTAIAVSSLIAVGTSHGLALIFDQNQALRLCLGSTSVGGQYGAISALSINNDCSRLLCGFAKGQITMWDLASGKLLRSITDAHPPGTAILHIKFTDDPTLAICNDSGGSVFELTFKRVMGVRTCESRCLFSGSKGEVCCIEPLHSKPELKDHPITQFSLLAMASLTKILVIGLKPSLKVWMTFPYGRMDPSSVPLLAWHFVAVQNYVNPMLAFCRGDVVHFLLVKRDESGAIHVTKQKHLHLYYDLINFTWINSRTVVLLDSVEKLHVIDRQTQEELETVEISEVQLVYNSSHFKSLATGGNVSQALALVGEKACYQSISSYGGQIFYLGTKSVYVMMLRSWRERVDHLLKQDCLTEALALAWSFHEGKAKAVVGLSGDASKRKAIVADRMVEILFHYADRALKKCPDQGKIQVMEQHFQDMVPVIVDYCLLLQRKDLLFSQMYDKLSENSVAKGVFLECLEPYILSDKLVGITPQVMKDLIVHFQDKKLMENVEALIVHMDITSLDIQQVVLMCWENRLYDAMIYVYNRGMNEFISPMEKLFRVIAPPLNAGKTLTDEQVVMGNKLLVYISCCLAGRAYPLGDIPEDLVPLVKNQVFEFLIRLHSAEASPEEEIYPYIRTLLHFDTREFLNVLALTFEDFKNDKQAVEYQQRIVDILLKVMVENSDFTPSQVGCLFTFLARQLAKPDNTLFVNRTLFDQVLEFLCSPDDDSRHSERQQVLLELLQAGGIVQFEESRLIRMAEKAEFYQICEFMYEREHQYDKIIDCYLRDPLREEEVFNYIHNILSIPGHSAEEKQSVWQKAMDHIEELVSLKPCKAAELVATHFSGHIETVIKKLQNQVLLFKFLRSLLDPREGIHVNQELLQISPCITEQFIELLCQFNPTQVIETLQVLECYRLEETIQITQKYQLHEVTAYLLEKKGDIHGAFLIMLERLQSKLQEVTHQGENTKEDPSLKDVEDTMVETIALCQRNSHNLNQQQREALWFPLLEAMMAPQKLSSSAIPHLHSEALKSLTMQVLNSMAAFIALPSILQRILQDPVYGKGKLGEIQGLILGMLDTFNYEQTLLETTTSLLNQDLHWSLCNLRASVTRGLNPKQDYCSICLQQYKRRQEMADEIIVFSCGHLYHSFCLQNKECTVEFEGQTRWTCYKCSSSNKVGKLSENSSEIKKGRITPSQVKMSPSYHQSKGDPTAKKGTSEPVLDPQQIQAFDQLCRLYRGSSRLALLTELSQNRSSESYRPFSGSQSAPAFNSIFQNENFQLQLIPPPVTED

SEQ ID NO: 13306 - protein, 79 aa, Homo sapiens
MPACRLGPLAAALLLSLLLFGFTLVSGTGAEKTGVCPELQADQNCTQECVSDSECADNLKCCSAGCATFCSLPNGQLAE

SEQ ID NO: 13307 - protein, 70 aa, Homo sapiens [sequence omitted]

SEQ ID NO: 13308 - protein, 19 aa, Homo sapiens
MGWLTRIVCLFWGVLLTAR

SEQ ID NO: 13309 - protein, 105 aa, Homo sapiens
MGAQDRPQCHFDIEINREPVGRIMFQLFSDICPKTCKNFLCLCSGEKGLGKTTGKKLCYKGSTFHRVVKNFMIQGGDFSEGNGKGGESIYGGYFKENVVFCKMKR

SEQ ID NO: 13310 - protein, 504 aa, Homo sapiens
MKSLSLLLAVALGLATAVSAGPAVIECWFVEDASGKGLAKRPGALLLRQGPGEPPPRPDLDPELYLSVHDPAGALQAAFRRYPRGAPAPHCEMSRFVPLPASAKWASGLTPAQNCPRALDGAWLMVSISSPVLSLSSLLRPQPEPQQEPVLITMATVVLTVLTHTPAPRVRLGQDALLDLSFAYMPPTSEAASSLAPGPPPFGLEWRRQHLGKGHLLLAATPGLNGQMPAAQEGAVAFAAWDDDEPWGPWTGNGTFWLPTVQPFQEGTYLATIHLPYLQGQVTLELAVYKPPKVSLMPATLARAAPGEAPPELLCLVSHFYPSGGLEVEWELRGGPGGRSQKAEGQRWLSALRHHSDGSVSLSGHLQPPPVTTEQHGARYACRIHHPSLPASGRSAEVTLEVAGLSGPSLEDSVGLFLSAFLLLGLFKALGWAAVYLSTCKDSKKVQCSTSLYLSLVTLSPHPISKPMEGGCWCGRQNLGLEFTLIWVKTWHYILTVGLFEHAT

SEQ ID NO: 13311 - protein, 562 aa, Homo sapiens
MADLANEEKPAIAPPVFVFQKDKGQKSPAEQKNLSDSGEEPRGEAEAPHHGTGHPESAGEHALEPPAPAGASASTPPPPAPEAQLPPFPRELAGRSAGGSSPEGGEDSDREDGNYCPPVKRERTSSLTQFPPSQSEERSSGFRLKPPTLIHGQAPSAGLPSQKPKEQQRSVLRPAVLQAPQPKALSQTVPSSGTNGVSLPADCTGAVPAASPDTAAWRSPSEAADEEKEPQKNESSNASEEEACEKKDPATQQAFVFGQNLRDRVKLINESVDEADMENAGHPSADTPTATNYFLQYISSSLENSTNSADASSNKFVFGQNMSERVLSPPKLNEVSSDANRENAAAESGSESSSQEATPEKESLAESAAAYTKATARKCLLEKVEVITGEEAESNVLQMQCKLFVFDKTSQSWVERGRGLLRLNDMASTDDGTLQSRLVMRTQGSLRLILNTKLWAQMQIDKASEKSIRITAMDTEDQGVKVFLISASSKDTGQLYAALHHRILALRSRVEQEQEAKMPAPEPGAAPSNEEDDSDDDDVLAPSGATAAGAGDEGDGQTTGST

SEQ ID NO: 13312 - protein, 306 aa, Homo sapiens
MASNVTNKTDPRSMNSRVFIGNLNTLVVKKSDVEAIFSKYGKIVGCSVHKGFAFVQYVNERNARAAVAGEDGRMIAGQVLDINLAAEPKVNRGKAGVKRSAAEMYGSVTEHPSPSPLLSSSFDLDYDFQRDYYDRMYSYPARVPPPPPIARAVVPSKRQRVSGNTSRRGKSGFNSKSGQRGSSKSGKLKGDDLQAIKKELTQIKQKVDSLLENLEKIEKEQSKQAVEMKNDKSEEEQSSSSVKKDETNVKMESEGGADDSAEEGDLLDDDDNEDRGDDQLELIKDDEKEAEEGEDDRDSANGEDDS

SEQ ID NO: 13313 - protein, 87 aa, Homo sapiens
MENQLAKSTEERTFQYQDSLPSLPVPSLEESLKKYLESVKPFANQEEYKKTEEIVQKFQSGIGEKLHQKLLERAKGKRNWVFVVIIE

SEQ ID NO: 13314 - protein, 102 aa, Homo sapiens
MLEEPRPRPPPSGLAGLLFLALCSRALSNEILGLKLPGEPPLTANTVCLTLSGLSKRQLGLCLRNPDVTASALQGLHIAVHECQHQLRDQRWNCSALEGGGR

SEQ ID NO: 13315 - protein, 276 aa, Homo sapiens
MQPSSLLPLALCLLAAPASALVRIPLHKFTSIRRTMSEVGGSVEDLIAKGPVSKYSQAVPAVTEGPIPEVLKNYMDAQYYGEIGIGTPPQCFTVVFDTGSSNLWVPSIHCKLLDIACWIHHKYNSDKSSTYVKNGTSFDIHYGSGSLSGYLSQDTVSVPCQSASSASALGGVKVERQVFGEATKQPGITFIAAKFDGILGMAYPRISVNNVLPVFDNLMQQKLVDQNIFSFYLSRDPDAQPGGELMLGGTDSKYYKGSLSYLNVTRKAYWQVHLDQ

SEQ ID NO: 13316 - protein, 1165 aa, Homo sapiens
MPNSVLWAVDLFGRVYTLSTAGQYWEMCKDSQLEFKRVSATTQCCWGIACDNQVYVYVCASDVPIRRREEAYENQRWNPMGGFCEKLLLSDRWGWSDVSGLQHRPLDRVALPSPHWEWESDWYVDENFGGEPTEKGGWTYAIDFPATYTKDKKWNSCVRRRKWIRYRRYKSRDIWAKIPSKDDPKELPDPFNDLSVGGWEITEEPVGRLSVWAVSLQGKVWYREDVSHSNPEGSSWSLLDTPGEVVQISCGPHDLLWATLWEGQALVREGINRSNPKGSSWSIVEPPGSENGVMHISVGVSVVWAVTKDWKVWFRRGVNSHNPCGTSWIEMVGEMTMVNVGMNDQVWGIGCEDRAVYFRQGVTPSELSGKTWKAIIAARECDRSHSGSSSSLLSAGCFFGDEVRGSGESAPSDTDASSEVERPGPGQILPAEPLDDSKNATGNSASGLGAGRTAEDTVEDACPAEGSREARPNTHPGPAPTPAELPWTNIDLKEAKKVPSHSAAGFPETTSLSSLGLLPLGLEEPYGVDDHPLWAWVSGGGCVVEACAMPRWFTVQAGLSSSVHMLSLSITPAQTAAWRKQIFQQLTERTKRELENFRHYEQAVEQSVWVKTGALQWWCDWKPHKWVDVRLALEQFTGHDGVRDSILFIYYVVHEEKKYIHIFLNEVVALVPVLNETKHSFALYTPERTRQRWPVRLAAATEQDMNDWLALLSLSCCESRKVQGRPSPQAIWSITCKGDIFVSEPSPDLEAHEHPLPCDQMFWRQMGGHLRMVEANSRGVVWGIGYDHTAWVYTGGYGGGCFQGLASSTSNIYTQSDVKCVHIYENQRWNPVTGYTSRGLPTDRYMWSDASGLQECTKAGTKPPSLQWAWVSDWFVDFSVPGGTDQEGWQYASDFPASYHGSKTMKDFVRRRCWARKCKLVTSGPWLEVPPIALRDVSIIPESPGAEGSGHSIALWAVSDKGDVLCRLGVSELNPAGSSWLHVGTDQPFASISIGACYQVWAVARDGSAFYRGSVYPSQPAGDCWYHIPSPPRQRLKQVSAGQTSVYALDENGNLWYRQGITPSYPQGSSWEHVSNNVCRVSVGPLDQVWVIANKVQGSHSLSRGTVCHRTGVQPHEPKGHGWDYGIGGGWDHISVRANATRAPRSSSQEQEPSAPPEAHGPVCC

SEQ ID NO: 13317 - protein, 118 aa, Homo sapiens
MQWALAVLLAFLSPASQKSSNLEGRTKSVIRQTGSSAEITCDLAEGSNGYIHWYLHQEGKAPQRLQYYDSYNSKVVLESGVSPGKYYTYASTRNNLRLILRNLIENDFGVYYCATWDG

SEQ ID NO: 13318 - protein, 172 aa, Homo sapiens
MEGPVLTLGLLAALAVCGSWGLNEEERLIRHLFQEKGYNKELRPVAHKEESVDVALALTLSNLISLGWTDNRLKWNAEEFGNISVLRLPPDMVWLPEIVLENNNDGSFQISYSCNVLVYHYGFVYWLPPAIFRSSCPISVTYFPFDWQNCSLKFSSLKYTAKEITLSLKQDA

SEQ ID NO: 13319 - protein, 137 aa, Homo sapiens
MGPWSRVRVAKCQMLVTCFFILVTAAGPLCGHHGDSYLLRGPLCCHPPSVPGEEPVPGCAPMGLLCGVEPGGPPDSGSRAERCSHREGGPGPHGRGLPVLLPGVLRTGAGGVLETPQPHPAPILPSWMLTCLEEGPA

SEQ ID NO: 13320 - protein, 33 aa, Homo sapiens
MPSPGTVCSLLLLGMLWLDLAMAGSSFLSPEHQ

SEQ ID NO: 13321 - protein, 1148 aa, Homo sapiens
MSVPDYMQCAEDHQTLLVVVQPVGIVSEENFFRIYKRICSVSQISVRDSQRVLYIRYRHHYPPENNEWGDFQTHRKVVGLITITDCFSAKDWPQTFEKFHVQKEIYGSTLYDSRLFVFGLQGEIVEQPRTDVAFYPNYEDCQTVEKRIEDFIESLFIVLESKRLDRATDKSGDKIPLLCVPFEKKDFVGLDTDSRHYKKRCQGRMRKHVGDLCLQAGMLQDSLVHYHMSVELLRSVNDFLWLGAALEGLCSASVIYHYPGGTGGKSGARRFQGSTLPAEAANRHRPGAQEVLIDPGALTTNGINPDTSTEIGRAKNCLSPEDIIDKYKEAISYYSKYKNAGVIELEACIKAVRVLAIQKRSMEASEFLQNAVYINLRQLSEEEKIQRYSILSELYELIGFHRKSAFFKRVAAMQCVAPSIAEPGWRACYKLLLETLPGYSLSLDPKDFSRGTHRGWAAVQMRLLHELVYASRRMGNPALSVRHLSFLLQTMLDFLSDQEKKDVAQSLENYTSKCPGTMEPIALPGGLTLPPVPFTKLPIVRHVKLLNLPASLRPHKMKSLLGQNVSTKSPFIYSPIIAHNRGEERNKKIDFQWVQGDVCEVQLMVYNPMPFELRVENMGLLTSGVEFESLPAALSLPAESGLYPVTLVGVPQTTGTITVNGYHTTVFGVFSDCLLDNLPGIKTSGSTVEVIPALPRLQISTSLPRSAHSLQPSSGDEISTNVSVQLYNGESQQLIIKLENIGMEPLEKLEVTSKVLTTKEKLYGDFLSWKLEETLAQFPLQPGKVATFTINIKVKLDFSCQENLLQDLSDDGISVSGFPLSSPFRQVVRPRVEGKPVNPPESNKAGDYSHVKTLEAVLNFKYSGGPGHTEGYYRNLSLGLHVEVEPSVFFTRVSTLPATSTRQCHLLLDVFNSTEHELTVSTRSSEALILHAGECQRMAIQVDKFNFESFPESPGEKGQFANPKQLEEERREARGLEIHSKLGICWRIPSLKRSGEASVEGLLNQLVLEHLQLAPLQWDVLVDGQPCDREAVAACQVGDPVRLEVRLTNRSPRSVGPFALTVVPFQDHQNGVHNYDLHDTVSFVGSSTFYLDAVQPSGQSACLGALLFLYTGDFFLHIRFHEDSTSKELPPSWFCLPSVHVCALEAQA

SEQ ID NO: 13322 - protein, 360 aa, Homo sapiens
MNSLLIGELSPEQPSFEPTKNKELTDEFRELRATVERMGLMKANHVFFLLYLLHILLLDGAAWLTLWVFGTSFLPFLLCAVLLSAVQAQAGWLQHDFGHLSVFSTSKWNHLLHHFVIGHLKGAPASWWNHMHFQHHAKPNCFRKDPDINMHPFFFALGKILSVELGKQKKKYMPYNHQHKYFFLIGPPALLPLYFQWYIFYFVIQRKKWVDLAWMITFYVRFFLTYVPLLGLKAFLGLFFIVRFLESNWFVWVTQMNHIPMHIDHDRNMDWVSTQLQATCNVHKSAFNDWFSGHLNFQIEHHLFPTMPRHNYHKVAPLVQSLCAKHGIEYQSKPLLSAFADIIHSLKESGQLWLDAYLHQ

SEQ ID NO: 13323 - protein, 315 aa, Homo sapiens
MKWMVVVLVCLQLLEAAVVKVPLKKFKSIRETMKEKGLLGEFLRTHKYDPAWKYRFGDLSVTYEPMAYMDAAYFGEISIGTPPQNFLVLFDTGSSNLWVPSVYCQSQACTSHSRFNPSESSTYSTNGQTFSLQYGSGSLTGFFGYDTLTVQSIQVPNQEFGLSENEPGTNFVYAQFDGIMGLAYPALSVDEATTAMQGMVQEGALTSPVFSVYLSNLVLESSGLGPLLTPSRAAPPSSTLQLPEKPLEQTWNILTPFTKTLPVSNLSRKVTSWAGVGIPVTCLPEAGSGGERRAECGLGVPTTRGPPRSQHHSGA

SEQ ID NO: 13324 - protein, 152 aa, Homo sapiens
MNSFSTSAFGPVAFSLGLLLVLPAAFPAPVPPGEDSKDVAAPHRQPLTSSERIDKQIRYILDGISALRKETCNKSNMCESSKEALAENNLNLPKMAEKDGCFQSGFNEETCLVKIITGLLEFEVYLEYLQNRFESSEEQARAVQMSTKVLIQ

SEQ ID NO: 13325 - protein, 164 aa, Homo sapiens
MPCSEETPAISPSKRARPAEVGGMQLRFARLSEHATAPTRGSARAAGYDLYSAYDYTIPPMEKAVVKTDIQIALPSGCYGRVAPRSGLAAKHFIDVGAGVIDEDYRGNVGVVLFNFGKEKFEVKKGDRIAQLICERIFYPEIEEVQALDDTERGSGGFGSTGKN

SEQ ID NO: 13326 - protein, 160 aa, Homo sapiens
MEEGSSSPVSPVDSLGTSEEELERQPKRFGRKRRYSKKSSEDGSPTPGKRGKKGSPSAQSFEELQSQRILANVRERQRTQSLNEAFAALRKIIPTLPSDKLSKIQTLKLAARYIDFLYQVLQSDEMDNKMTSCSYVAHERLSYAFSVWRMEGAWSMSASH

SEQ ID NO: 13327 - protein, 50 aa, Homo sapiens
MGRLVAVGLLGIALALLGERLLALRNRLKASREVESVDLPHCHLIKGIVW

SEQ ID NO: 13328 - protein, 840 aa, Homo sapiens
MALTQGQVTFRDVAIEFSQEEWTCLDPAQRTLYRDVMLENYRNLASLAGISCFDLSIISMLEQGKEPFTLESQVQIAGNPDGWEWIKAVITALSSEFVMKDLLHKGKSNTGEVFQTVMLERQESQDIEGCSFREVQKNTHGLEYQCRDAEGNYKGVLLTQEGNLTHGRDEHDKRDARNKLIKNQLGLSLQSHLPELQLFQYEGKIYECNQVEKSFNNNSSVSPPQQMPYNVKTHISKKYLKDFISSLLLTQGQKANNWGSPYKSNGCGMVFPQNSHLASHQRSHTKEKPYKCYECGKAFRTRSNLTTHQVIHTGEKRYKCNECGKVFSRNSQLSQHQKIHTGEKPYKCNECGKVFTQNSHLVRHRGIHTGEKPYKCNECGKAFRARSSLAIHQATHSGEKPYKCNECGKVFTQNSHLTNHWRIHTGEKPYKCNECGKAFGVRSSLAIHLVIHTGEKPYKCHECGKVFRRNSHLARHQLIHTGEKPYKCNECGKAFRAHSNLTTHQVIHTGEKPYKCNECGKVFTQNSHLANHQRIHTGVKPYMCNECGKAFSVYSSLTTHQVIHTGEKPYKCNECGKVFTQNSHLARHRGIHTGEKPYKCNECGKVFRHNSYLSRHQRIHTGEKPYKYNEYGKAFSEHSNLTTHQVIHTGEKPYKCNECGKVFTQNSHLARHRRVHTGGKPYQCNECGKAFSQTSKLARHQRVHTGEKPYECNQCGKAFSVRSSLTTHQAIHTGKKPYKCNECGKVFTQNSHLARHRGIHTGEKPYKCNECGKAFSQTSKLARHQRIHTGEKPYECGKPFSICSSLTTHQTIHTGGKPYKCNVWKVLKSEFKPCKPSQNS

SEQ ID NO: 13329 - protein, 70 aa, Homo sapiens
ATQGLAVALALSVLPGSRALRPGDCEVCISYLGRFYQDLKDRDVTFSPATIENELIKFCREARGKENRLV

SEQ ID NO: 13330 - protein, 590 aa, Homo sapiens
MAAPYPGSGGGSEVKCVGGRGASVPWDFLPGLMVKAPSGPCLQAQRKEKSRNAARSRRGKENLEFFELAKLLPLPGAISSQLDKASIVRLSVTYLRLRRFAALGAPPWGLRAAGPPAGLAPGRRGPAALVSEVFEQHLGGHILQSLDGFVFALNQEGKFLYISETVSIYLGLSQVEMTGSSVFDYIHPGDHSEVLEQLGLRTPTPGPPTPPSVSSSSSSSSSLADTPEIEASLTKVPPSSLVQERSFFVRMKSTLTKRGLHVKASGYKVIHVTGRLRAHALGLVALGHTLPPAPLAELPLHGHMIVFRLSLGLTILACESRVSDHMDLGPSELVGRSCYQFVHGQDATRIRQSHVDLLDKGQVMTGYYRWLQRAGGFVWLQSVATVAGSGKSPGEHHVLWVSHVLSQAEGGQTPLDAFQLPASVACEEASSPGPEPTEPEPPTEGKQAAPAENEAPQTQGKRIKVEPGPRETKGSEDSGDEDPSSHPATPRPEFTSVIRAGVLKQDPVRPWGLAPPGDPPPTLLHAGFLPPVVRGLCTPGTIRYGPAELGLVYPHLQRLGPGPALPEAFYPPLGLPYPGPAGTRLPRKGD

SEQ ID NO: 13331 - protein, 52 aa, Homo sapiens
MDVKCPGCYKITTVFSHAQTVVLCVGCSTVLCQPTGGKARLTEGCSFRRKQH

SEQ ID NO: 13332 - protein, 151 aa, Homo sapiens
MKLLSLVAVVGCLLVPPAEANKSSEDIRCKCICPPYRNISGHIYNQNVSQKDCPVSLCCSNCLHVVEPMPVPGHDVEAYCLLCECRYEERSTTTIKVIIVIYLSVVGALLLYMAFLMLVDPLIRKPDAYTEQLHNEEENEDARSMAAAAAS

SEQ ID NO: 13333 - protein, 48 aa, Homo sapiens
RVLWGGLSLLRVLWCLLPQTGYVHPDEFFQSPEVMAGSGRSWGRGLAW

SEQ ID NO: 13334 - protein, 406 aa, Homo sapiens
MAANLSRNGPALQEAYVRVVTEKSPTDWALFTYEGNSNDIRVAGTGEGGLEEMVEELNSGKVMYAFCRVKDPNSGLPKFVLINWGAHVTINARAEEDVEPECIMEKVAKASGANYSFHKESGRFQDVGPQAPVGSVYQKTNAVSEIKRVGKDSFWAKAEKEEENRRLEEKRRAEEAQRQLEQERRERELREAARREQRYQEQGGEASPQSRTWEQQQEVVSRNRNEQESAVHPREIFKQKERAMSTTSISSPQPGKLRSPFLQKQLTQPETHFGREPAAAISRPRADLPAEEPAPSTPPCLVQAEEEAVYEEPPEQETFYEQPPLVQQQGAGSEHIDHHIQGQGLSGQGLCARALYDYQAADDTEISFDPENLITGIEVIDEGWWRGYGPDGHFGMFPANYVELIE

SEQ ID NO: 13335 - protein, 283 aa, Homo sapiens
MRPLLLLALLGWLLLAEAKGDAKPEDNLLVLTVATKETEGFRRFKRSAQFFNYKIQALGLGEDWNVEKGTSAGGGQKVRLLKKALEKHADKEDLVILFADSYDVLFASGPRELLKKFRQARSQVVFSAEELIYPDRRLETKYPVVSDGKRFLGSGGFIGYAPNLSKLVAEWEGQDSDSDQLFYTKIFLDPEKREQINITLDHRCRIFQNLDGALVSPWGQGHLPGACYELTASVLTSELSVMPSFPAVVLQLNYLGNYIPRFWTFETGCTVCDEGLRSLKGIG

SEQ ID NO: 13336 - protein, 95 aa, Homo sapiens
MPVYSAWPAEPTMAPFEPLASGILLLLWLIAPSRACTCVPPHPQTAFCNSDLVIRAKFVGTPEVNQTTLYQRYEIKMTKMYKGFQALGDAADIRF

SEQ ID NO: 13337 - protein, 309 aa, Homo sapiens
MAAGCLLALTLTLFQSLLIGPSSEEPFPSAVTIKSWVDKMQEDLVTLAKTASGVNQLVDIYEKYQDLYTVEPNNARQLVEIAARDIEKLLSNRSKALVRLALEAEKVQAAHQWREDFASNEVVYYNAKDDLDPEKNDSEPGSQRIKPVFIEDANFGRQISYQHAAVHIPTDIYEGSTIVLNELNWTSALDEVFKKNREEDPSLLWQVFGSATGLARYYPASPWVDNSRTPNKIDLYDVRRRPWYIQGAASPKDMLILVDVSGSVSGLTLKLIRTSVSEMLETLSDDDFVNVASDSKEISPSPEEIFNAE

SEQ ID NO: 13338 - protein, 184 aa, Homo sapiens
MKLWVSALLMAWFGVLSCVQAEFFTSIGHMTDLIYAEKELVQSLKEYILVEEAKLSKIKSWANKMEALTSKSAADAEGYLAHPVNAYKLVKRLNTDWPALEDLVLQDSAAGFIANLSVQRQFFPTDEDEIGAAKALMRLQDTYRLDPGTISRGELPGTKYQAMLSVDDCFGMGRSAYNEGDYYH

SEQ ID NO: 13339 - protein, 404 aa, Homo sapiens
MERGWFHGKGFLLGFILHLLLQDSHLQLVTSFLWLNMWNPDECGGIKKSGMATENLWLSDVFIEESVDQTPAGLMASMSIVKATSNTISQCGWSASANWTPSISPSMDRGERSPSALSPTQVTRAWRRMSRSFQIHHRTSFRTRREWVLLGIQKRTIKVTVATNQYEQAIFHVAIRRRCRPSPYVVNFLVPSGILIAIDALSFYLPLESGNCAPFKMTVLLGYSVFLLMMNDLLPATSTSSHASLVRPHPSRDQKRGVYFALCLSLMVGSLLETIFITHLLHVATTQPLPLPRWLHSLLLHCTGQGRCCPTAPQKGNKGPGLTPTHLPGVKEPEVSAGQMPGPGEAELTGGSEWTRAQREHEAQKQHSVELWVQFSHAMDALLFRLYLLFMASSIITVICLWNT

SEQ ID NO: 13340 - protein, 66 aa, Homo sapiens
MLLILMLSLSFNEQASHPAPGPHLPAPPALPHPGACGIAGENAAMEPGRTQIKLDPRYTADLLEVL

SEQ ID NO: 13341 - protein, 92 aa, Homo sapiens
MGLLLPLALCILVLCCGAMSPPQLALNPSALLSRGCNDSDVLAVAGFALRDINKDRKDGYVLRLNRVNDAQEYRRARWPGISVLSYTGCARD

SEQ ID NO: 13342 - protein, 169 aa, Homo sapiens
MLSSVVFWGLIALIGTSRGSYPFSHSMKPHLHPRLYHGCYGDIMTMKTSGATCDANSVMNCGIRGSEMFAEMDLRAIKPYQTLIKEVGQRHCVDPAVIAAIISRESHGGSVLQDGWDHRGLKFGLMQLDKQTYHPVGAWDSKEHLSQATGILTERIKAIQKKFPTWSVA

SEQ ID NO: 13343 - protein, 623 aa, Homo sapiens
MESYHKPDQQKLQALKDTANRLRISSIQATTAAGSGHPTSCCSAAEIMAVLFFHTMRYKSQDPRNPHNDRFVLSKGHAAPILYAVWAEAGFLAEAELLNLRKISSDLDGHPVPKQAFTDVATGSLGQGLGAACGMAYTGKYFDKASYRVYCLLGDGELSEGSVWEAMAFASIYKLDNLVAILDINRLGQSDPAPLQHQMDIYQKRCEAFGWHAIIVDGHSVEELCKAFGQAKHQPTAIIAKTFKGRGITGVEDKESWHGKPLPKNMAEQIIQEIYSQIQSKKKILATPPQEDAPSVDIANIRMPSLPSYKVGDKIATRKAYGQALAKLGHASDRIIALDGDTKNSTFSEIFKKEHPDRFIECYIAEQNMVSIAVGCATRNRTVPFCSTFAAFFTRAFDQIRMAAISESNINLCGSHCGVSIGEDGPSQMALEDLAMFRSVPTSTVFYPSDGVATEKAVELAANTKGICFIRTSRPENAIIYNNNEDFQVGQAKVVLKSKDDQVTVIGAGVTLHEALAAAELLKKEKINIRVLDPFTIKPLDRKLILDSARATKGRILTVEDHYYEGGIGEAVSSAVVGEPGITVTHLAVNRVPRSGKPAELLKMFGIDRDAIAQAVRGLITKA

SEQ ID NO: 13344 - protein, 91 aa, Homo sapiens
MPSPGTVCSLLLLGMLWLDLAMAGSSFLSPEHQRVQQRKESKKPPAKLQPRALAGWLRPEDGGQAEGAEDELEVRRPQPTSDRPQALLTSL

SEQ ID NO: 13345 - protein, 424 aa, Homo sapiens
MGTPASGRKRTPVKDRFSAEDEALSNIAREAEARLAAKRAARAEARDIRMRELERQQKELDEKSDKQYAENYTRPSSRNSASATTPLSGNSSRRGSGDTSSLIDPDTSLSELRDIYDLKDQIQDVEGRYMQGLKELKESLSEVEEKYKKAMVSNAQLDNEKNNLIYQVDTLKDVIEEQEEQMAEFYRENEEKSKELERQKHMCSVLQHKMEELKEGLRQRDELIEKHGLVIIPDGTPNGDVSHEPVAGAITVVSQEAAQVLESAGEGPLDVRLRKLAGEKEELLSQIRKLKLQLEEERQKCSRNDGTVGDLAGLQNGSDLQFIEMQRDANRQISEYKFKLSKAEQDITTLEQSISRLEGQVLRYKTAAENAEKVEDELKAEKRKLQRELRTALDKIEEMEMTNSHLAKRLEKMKANRTALLAQQ

SEQ ID NO: 13346 - protein, 87 aa, Homo sapiens
MTMYLWLKLLAFGFAFLDTEVFVTGQSPTPSPTGHLQAEEQGSQSKSPNLKSREADSSAFSWWPKAREPLTNHWSKSKSPKAEELGV

SEQ ID NO: 13347 - protein, 449 aa, Homo sapiens
MKFQGPLACLLLALCLGSGEAGPLQSGEESTGTNIGEALGHGLGDALSEGVGKAIGKEAGGAAGSKVSEALGQGTREAVGTGVRQVPGFGVADALGNRVGEAAHALGNTGHEIGRQAEDVIRHGADAVRGSWQGVPGHNGAWETSGGHGIFGSQGGLGGQGQGNPGGLGTPWVHGYPGNSAGSFGMNPQGAPWGQGGNGGPPNFGTNTQGAVAQPGYGSVRASNQNEGCTNPPPSGSGGGSSNSGGSSTGSSSGNHGGSGGGNGHKPGCEKPGNEARGSGESGIQGQGSSWGSGGGDAVGGVNTVNSETSPGMFNFDTFWKNFKSKLGFINWDAINKNQVPPPSTRALLYFSRLWEDFKQNTPFLNWKAIIEGADASSLQKRAGRDDQPGAGWQEVAAVTSKNYNYNQHAYPTAYGGKYSVKTPAKGGVSPSSSASRVQPGLLQWVKFW

SEQ ID NO: 13348 - protein, 1752 aa, Homo sapiens
MAGPRPSPWARLLLAALISVSLSGTLANRCKKAPVKSCTECVRVDKDCAYCTDEMFRDRRCNTQAELLAAGCQRESIVVMESSFQITEETQIDTTLRRSQMSPQGLRVRLRPGEERHFELEVFEPLESPVDLYILMDFSNSMSDDLDNLKKMGQNLARVLSQLTSDYTIGFGKFVDKVSVPQTDMRPEKLKEPWPNSDPPFSFKNVISLTEDVDEFRNKLQGERISGNLDAPEGGFDAILQTAVCTRDIGWRPDSTHLLVFSTESAFHYEADGANVLAGIMSRNDERCHLDTTGTYTQYRTQDYPSVPTLVRLLAKHNIIPIFAVTNYSYSYYEKLHTYFPVSSLGVLQEDSSNIVELLEEAFNRIRSNLDIRALDSPRGLRTEVTSKMFQKTRTGSFHIRRGEVGIYQVQLRALEHVDGTHVCQLPEDQKGNIHLKPSFSDGLKMDAGIICDVCTCELQKEVRSARCSFNGDFVCGQCVCSEGWSGQTCNCSTGSLSDIQPCLREGEDKPCSGRGECQCGHCVCYGEGRYEGQFCEYDNFQCPRTSGFLCNDRGRCSMGQCVCEPGWTGPSCDCPLSNATCIDSNGGICNGRGHCECGRCHCHQQSLYTDTICEINYSAIHPGLCEDLRSCVQCQAWGTGEKKGRTCEECNFKVKMVDELKRAEEVVVRCSFRDEDDDCTYSYTMEGDGAPGPNSTVLVHKKKDCPPGSFWWLIPLLLLLLPLLALLLLLCWKYCACCKACLALLPCCNRGHMVGFKEDHYMLRENLMASDHLDTPMLRSGNLKGRDVVRWKVTNNMQRPGFATHAASINPTELVPYGLSLRLARLCTENLLKPDTRECAQLRQEVEENLNEVYRQISGVHKLQQTKFRQQPNAGKKQDHTIVDTVLMAPRSAKPALLKLTEKQVEQRAFHDLKVAPGYYTLTADQDARGMVEFQEGVELVDVRVPLFIRPEDDDEKQLLVEAIDVPAGTATLGRRLVNITIIKEQARDVVSFEQPEFSVSRGDQVARIPVIRRVLDGGKSQVSYRTQDGTAQGNRDYIPVEGELLFQPGEAWKELQVKLLELQEVDSLLRGRQVRRFHVQLSNPKFGAHLGQPHSTTIIIRDPDELDRSFTSQMLSSQPPPHGDLGAPQNPNAKAAGSRKIHFNWLPPSGKPMGYRVKYWIQGDSESEAHLLDSKVPSVELTNLYPYCDYEMKVCAYGAQGEGPYSSLVSCRTHQEVPSEPGRLAFNVVSSTVTQLSWAEPAETNGEITAYEVCYGLVNDDNRPIGPMKKVLVDNPKNRMLLIENLRESQPYRYTVKARNGAGWGPEREAIINLATQPKRPMSIPIIPDIPIVDAQSGEDYDSFLMYSDDVLRSPSGSQRPSVSDDTEHLVNGRMDFAFPGSTNSLHRMTTTSAAAYGTHLSPHVPHRVLSTSSTLTRDYNSLTRSEHSHSTTLPRDYSTLTSVSSHDSRLTAGVPDTPTRLVFSALGPTSLRVSWQEPRCERPLQGYSVEYQLLNGGELHRLNIPNPAQTSVVVEDLLPNHSYVFRVRAQSQEGWGREREGVITIESQVHPQSPLCPLPGSAFTLSTPSAPGPLVFTALSPDSLQLSWERPRRPNGDIVGYLVTCEMAQGGGPATAFRVDGDSPESRLTVPGLSENVPYKFKVQARTTEGFGPEREGIITIESQDGGPFPQLGSRAGLFQHPLQSEYSSITTTHTSATEPFLVDGLTLGAQHLEAGGSLTRHVTQEFVSRTLTTSGTLSTHMDQQFFQT

SEQ ID NO: 13349 - protein, 708 aa, Homo sapiens
MKLVFLVLLFLGALGLCLAGRRRSVQWCAVSQPEATKCFQWQRNMRKVRGPPVSCIKRDSPIQCIQAIAENRADAVTLDGGFIYEAGLAPYKLRPVAAEVYGTERQPRTHYYAVAVVKKGGSFQLNELQGLKSCHTGLRRTAGWNVPIGTLRPFLNWTGPPEPIEAAVARFFSASCVPGADKGQFPNLCRLCAGTGENKCAFSSQEPYFSYSGAFKCLRDGAGDVAFIRESTVFEDLSDEAERDEYELLCPDNTRKPVDKFKDCHLARVPSHAVVARSVNGKEDAIWNLLRQAQEKFGKDKSPKFQLFGSPSGQKDLLFKDSAIGFSRVPPRIDSGLYLGSGYFTAIQNLRKSEEEVAARRARVVWCAVGEQELRKCNQWSGLSEGSVTCSSASTTEDCIALKGEADAMSLDGGYVYTAGKCGLVPVLAENYKSQQSSDPDPNCVDRPVEGYLAVAVVRRSDTSLTWNSVKGKKSCHTAVDRTAGWNIPMGLLFNQTGSCKFDEYFSQSCAPGSDPRSNLCALCIGDEQGENKCVPNSNERYYGYTGAFRCLAENAGDVAFVKDVTVLQNTDGNNNEAWAKDLKLADFALLCLDGKRKPVTEARSCHLAMAPNHAVVSRMDKVERLKQVLLHQQAKFGRNGSDCPDKFCLFQSETKNLLFNDNTECLARLHGKTTYEKYLGPQYVAGITNLKKCSTSPLLEACEFLRK

SEQ ID NO: 13350 - protein, 1249 aa, Homo sapiens
MSPAAAAAGAGERRRPIASVRDGRGRGCGGPARAVLLGLSLVGLLLYLVPAAAALAWLTVGATAAWWGLSREPRGSRPLSSFVRKARHRRPLSSFVRKARHRRTLFASPLAKSTANGNLLEPRTLLEGPDPAELLLMGSYLGKPGPPQPAAAPEGQDLRDRPGRRPPARPAPRSPPPRSPPPRSPPPSPPTHRAHHVYPSLPTPLLRPSRRPSPRDCGTLPNRFVITPRRRYPIHQAQYSCLGVLPTVCWNGYHKKAVLSPRNSRMVCSPVTVRIAPPDRRFSRSAIPEQIISSTLSSPSSNAPDPCAKETVLSALKEKEKKRTVEEEDQIFLDGQENKRRRHDSSGSGHSAFEPLVANGVPASFVPKPGSLKRGLNSQSSDDHLNKRSRSSSMSSLTGAYASGIPSSSRNAITSSYSSTRGISQLWKRNGPSSSPFSSPASSRSQTPERPAKKIREEELCHHSSSSTPLAADRESQGEKAADTTPRKKQNSNSQSTPGSSGQRKRKVQLLPSRRGEQLTLPPPPQLGYSITAEDLDLEKKASLQWFNQALEDKSDAASNSVTETPPITQPSFTFTLPAAAPASPPTSLLAPSTNPLLESLKKMQTPPSLPPCPESAGAATTEALSPPKTPSLLPPLGLSQSGPPGLLPSPSFDSKPPTTLLGLIPAPSMVPATDTKAPPTLQAETATKPQATSAPSPAPKQSFLFGTQNTSPSSPAAPAASSAPPMFKPIFTAPPKSEKEGPTPPGPSVTATAPSSSSLPTTTSTTAPTFQPVFSSMGPPASVPLPAPFFKQTTTPATAPTTTAPLFTGLASATSAVAPITSASPSTDSASKPAFGFGINSVSSSSVSTTTSTATAASQPFLFGAPQASAASFTPAMGSIFQFGKPPALPTTTTVTTFSQSLHTAVPTATSSSAADFSGFGSTLATSAPATSSQPTLTFSNTSTPTFNIPFGSSAKSPLPSYPGANPQPAFGAAEGQPPGAAKPALAPSFGSSFTFGNSAAPAAAPTPAPPSMIKVVPAYVPTPIHPIFGGATHSAFGLKATASAFGAPASSQPAFGGSTAVFFGAATSSGFGATTQTASSGSSSSVFGSTTPSPFTFGGSAAPAGSGSFGINVATPGSSTTTGAFSFGAGQSGSTATSTPFAGGLGQNALGTTGQSTPFAFNVSSTTESKPVFGGTATPTFGLNTPAPGVGTSGSSLSFGASSAPAQGFVGVAPFGSAALSFSIGAGSKTPGARQRLQARRQHTRKK

SEQ ID NO: 13351 - protein, 373 aa, Homo sapiens
MSLLLLLLLVSYYVGTLGTHTEIKRVAEEKVTLPCHHQLGLPEKDTLDIEWLLTDNEGNQKVVITYSSRHVYNNLTEEQKGRVAFASNFLAGDASLQIEPLKPSDEGRYTCKVKNSGRYVWSHVILKVLVRPSKPKCELEGELTEGSDLTLQCESSSGTEPIVYYWQRIREKEGEDERLPPKSRIDYNHPGRVLLQNLTMSYSGLYQCTAGNEAGKESCVVRVTVQYVQSIGMVAGAVTGIVAGALLIFLLVWLLIRRKDKERYEEEERPNEIREDAEAPKARLVKPSSSSSGSRSSRSGSSSTRSTANSASRSQRTLSTDAAPQPGLATQAYSLVGPEVRGSEPKKVHHANLTKAETTPSMIPSQSRAFQTV

SEQ ID NO: 13352 - protein, 869 aa, Homo sapiens
MKIIFPILSNPVFRRTVKLLLCLLWIGYSQGTTHVLRFGGIFEYVESGPMGAEELAFRFAVNTINRNRTLLPNTTLTYDTQKINLYDSFEASKKACDQLSLGVAAIFGPSHSSSANAVQSICNALGVPHIQTRWKHQVSDNKDSFYVSLYPDFSSLSRAILDLVQFFKWKTVTVVYDDSTGLIRLQELIKAPSRYNLRLKIRQLPADTKDAKPLLKEMKRGKEFHVIFDCSHEMAAGILKQALAMGMMTEYYHYIFTTLDLFALDVEPYRYSGVNMTGFRILNTENTQVSSIIEKWSMERLQAPPKPDSGLLDGFMTTDAALMYDAVHVVSVAVQQFPQMTVSSLQCNRHKPWRFGTRFMSLIKEAHWEGLTGRITFNKTNGLRTDFDLDVISLKEEGLEKIGTWDPASGLNMTESQKGKPANITDSLSNRSLIVTTILEEPYVLFKKSDKPLYGNDRFEGYCIDLLRELSTILGFTYEIRLVEDGKYGAQDDANGQWNGMVRELIDHKADLAVAPLAITYVREKVIDFSKPFMTLGISILYRKPNGTNPGVFSFLNPLSPDIWMYILLAYLGVSCVLFVIARFSPYEWYNPHPCNPDSDVVENNFTLLNSFWFGVGALMQQGSELMPKALSTRIVGGIWWFFTLIIISSYTANLAAFLTVERMESPIDSADDLAKQTKIEYGAVEDGATMTFFKKSKISTYDKMWAFMSSRRQSVLVKSNEEGIQRVLTSDYAFLMESTTIEFVTQRNCNLTQIGGLIDSKGYGVGTPMGSPYRDKITIAILQLQEEGKLHMMKEKWWRGNGCPEEESKEASALGVQNIGGIFIVLAAGLVLSVFVAVGEFLYKSKKNAQLEKESSIWLVPPYHPDTV

SEQ ID NO: 13353 - protein, 1241 aa, Homo sapiens
MSSAPRRPAKGADSFCTPEPESLGPGTPGFPEQEEDELHRTLGVERFEEILQEAGSRGGEEPGRSYGEEDFEYHRQSSHHIHHPLSTHLPPDARRRKTPQGPGRKPRRRPGASPTGETPTIEEGEEDEDEASEAEGARALTQPSPVSTPSSVQFFLQEDDSADRKAERTSPSSPAPLPHQEATPRASKGAQAGTQVEEAEAEAVAVASGTAGGDDGGASGRPLPKAQPGHRSYNLQERRRIGSMTGAEQALLPRVPTDEIEAQTLATADLDLMKSHRFEDVPGVRRHLVRKNAKGSTQSGREGREPGPTPRARPRAPHKPHEVFVELNELLLDKNQEPQWRETARWIKFEEDVEEETERWGKPHVASLSFRSLLELRRTLAHGAVLLDLDQQTLPGVAHQVVEQMVISDQIKAEDRANVLRALLLKHSHPSDEKDFSFPRNISAGSLGSLLGHHHGQGAESDPHVTEPLMGGVPETRLEVERERELPPPAPPAGITRSKSKHELKLLEKIPENAEATVVLVGCVEFLSRPTMAFVRLREAVELDAVLEVPVPVRFLFLLLGPSSANMDYHEIGRSISTLMSDKQFHEAAYLADEREDLLTAINAFLDCSVVLPPSEVQGEELLRSVAHFQRQMLKKREEQGRLLPTGAGLEPKSAQDKALLQMVEAAGAAEDDPLRRTGRPFGGLIRDVRRRYPHYLSDFRDALDPQCLAAVIFIYFAALSPAITFGGLLGEKTQDLIGVSELIMSTALQGVVFCLLGAQPLLVIGFSGPLLVFEEAFFSFCSSNHLEYLVGRVWIGFWLVFLALLMVALEGSFLVRFVSRFTQEIFAFLISLIFIYETFYKLVKIFQEHPLHGCSASNSSEVDGGENMTWAGARPTLGPGNRSLAGQSGQGKPRGQPNTALLSLVLMAGTFFIAFFLRKFKNSRFFPGRIRRVIGDFGVPIAILIMVLVDYSIEDTYTQKLSVPSGFSVTAPEKRGWVINPLGEKSPFPVWMMVASLLPAILVFILIFMETQITTLIISKKERMLQKGSGFHLDLLLIVAMGGICALFGLPWLAAATVRSVTHANALTVMSKAVAPGDKPKIQEVKEQRVTGLLVALLVGLSIVIGDLLRQIPLAVLFGIFLYMGVTSLNGIQFYERLHLLLMPPKHHPDVTYVKKVRTLRMHLFTALQLLCLALLWAVMSTAASLAFPFILILTVPLRMVVLTRIFTDREMKCLDANEAEPVFDEREGVDEYNEMPMPV

SEQ ID NO: 13354 - protein, 204 aa, Homo sapiens
MAGSPTCLTLIYILWQLTGSAASGPVKELVGSVGGAVTFPLKSKVKQVDSIVWTFNTTPLVTIQPEGGTIIVTQNRNRERVDFPDGGYSLKLSKLKKNDSGIYYVGIYSSSLQQPSTQEYVLHVYEYIEEKKRVDICRETPNICPHSGENTEYDTIPHTNRTILKEDPANTVYSTVEIPKKMENPHSLLTMPDTPRLFAYENVI

SEQ ID NO: 13355 - protein, 337 aa, Homo sapiens
MVTKPKAVSTPAPATTQQSAPASTTAVTSSTTTTVAQAPTPVPALAPTSTPASITPASATASSEPAPASAAKQEKPAEKPAETPVATSPTATDSTSGDSSRSNLFEDATSALVTGQSYENMVTEIMSMGYEREQVIAALRASFNNPDRAVEYLLMGIPGDRESQAVVDPPQAASTGAPQSSAVAAAAATTTATTTTTSSGGHPLEFLRNQPQFQQMRQIIQQNPSLLPALLQQIGRENPQLLQQISQHQEHFIQMLNEPVQEAGGQGGGGGGGSGGIAEAGSGHMNYIQVTPQEKEAIERLKALGFPEGLVIQAYFACEKNENLAANFLLQQNFDED

SEQ ID NO: 13356 - protein, 142 aa, Homo sapiens
MNSLEQAEAPRVVSLIPAVVSGNCQDLKAFERRLTEYIHCLQPATGRWRMLLIVVSVCTATGAWNWLIDPETQKVSFFTSLWNHPFFTISCITLIGLFFAGIHKRVVAPSIIAARCRTVLAEYNMSCDDTGKLILKPRPHVQ

SEQ ID NO: 13357 - protein, 376 aa, Homo sapiens
MEKKKMVTQGNQEPTTTPDAMVQPFTTIPFPPPPQNGIPTEYGVPHTQDYAGQTGEHNLTLYGSTQAHGEQSSNSPSTQNGSLTTEGGAQTDGQQSQTQSSENSESKSTPKRLHVSNIPFRFRDPDLRQMFGQFGKILDVEIIFNERGSKGFGFVTFENSADADRAREKLHGTVVEGRKIEVNNATARVMTNKKMVTPYANGWKLSPVVGAVYGPELYAASSFQADVSLGNDAAVPLSGRGGINTYIPLIIPGFPYPTAATTAAAFRGAHLRGRGRTVYGAVRAVPPTAIPAYPGVVYQDGFYGADLYGGYAAYRYAQPATATAATAAAAAAAAYSDGYGRVYTADPYHALAPAASYGVGAVASLYRGGYSRFAPY

SEQ ID NO: 13358 - protein, 257 aa, Homo sapiens
MVQLRPRASRAPASAEAMVDEGQLASEEEEAEHGLLLGQPSSGAAAEPLEEDEEGDDEFDDEAPEELTFASAQAEAREEERRVRETVRRDKTLLKEKRKRREELFIEQKKRKLLPDTILEKLTTASQTNIKKSPGKVKEVNLQKKNEDCEKGNDSKKVKVQKVQSVSQNKSYLAVRLKDQDLRDSRQQAAQAFIHNSLYGPGTNRTTVNKFLSLANKRLPVKRAAVQFLNNAWGIQKKQNAKRFKRRWMVRKMKTKK

SEQ ID NO: 13359 - protein, 51 aa, Homo sapiens
MLKALFLTMLTLALVKSQDTEETITYTQCTDGYEWDPVRQQCKDIDECDIV

SEQ ID NO: 13360 - protein, 273 aa, Homo sapiens
PPATMRIWLLGGLLPFLLLLSGLQRPTEGSEVAIKIDFDFAPGSFDDQYQGCSKQVMEKLTQGDYFTKDIEAQKNYFRMWQKAHLAWLNQGKVLPQNMTTTHAVAILFYTLNSNVHSDFTRAMASVARTPQQYERSFHFKYLHYYLTSAIQLLRKDSIMENGTLCYEVHYRTKDVHFNAYTGATIRFGQFLSTSLLKEEAQEFGNQTLFTIFTCLGAPVQYFSLKKEVLIPPYELFKVINMSYHPRGDWLQLRSTGNLSTYNCQLLKGILYLN

SEQ ID NO: 13361 - protein, 188 aa, Homo sapiens
MLCPWRTANLGLLLILTIFLVAEAEGAAQPNNSLMLQTSKENHALASSSLCMDEKQITQNYSKVLAEVNTSWPVKMATNAVLCCPPIALRNLIIITWEIILRGQPSCTKAYKKETNETKETNCTDERITWVSRPDQNSDLQIRTVAITHDGYYRCIMVTPDGNFHRGYHLQVLGKEHHILRYFTSPDL

SEQ ID NO: 13362 - protein, 666 aa, Homo sapiens
MTDLKEGVCLSAFWYSHEQCCWTSNETTFEDRDKCPLWQKWSELLVNQSEGASAYILNYLMYILWALLFAFLAVSLVRVFAPYACGSGIPEIKTILSGFIIRGYLGKWTLLIKTVTLVLVVSSGLSLGKEGPLVHVACCCGNFFSSLFSKYSKNEGKRREVLSAAAAAGVSVAFGAPIGGVLFSLEEVSYYFPLKTLWRSFFAALVAAFTLRSINPFGNSRLVLFYVEYHTPWYMAELFPFILLGVFGGLWGTLFIRCNIAWCRRRKTTRLGKYPVLEVIVVTAITAIIAYPNPYTRQSTSELISELFNDCGALESSQLCDYINDPNMTRPVDDIPDRPAGVGVYTAMWQLALALIFKIVVTIFTFGMKIPSGLFIPSMAVGAIAGRMVGIGVEQLAYHHHDWIIFRNWCRPGADCVTPGLYAMVGAAACLGGVTRMTVSLVVIMFELTGGLEYIVPLMAAAVTSKWVADAFGKEGIYEAHIHLNGYPFLDVKDEFTHRTLATDVMRPRRGEPPLSVLTQDSMTVEDVETLIKETDYNGFPVVVSRDSERLIGFAQRRELILAIKNARQRQEGIVSNSIMYFTEEPPELPANSPHPLKLRRILNLSPFTVTDHTPMETVVDIFRKLGLRQCLVTRSGRLLGIITKKDVLRHMAQMANQDPESIMFN

SEQ ID NO: 13363 - protein, 1441 aa, Homo sapiens
MSKSLKKKSHWTSKVHESVIGRNPEGQLGFELKGGAENGQFPYLGEVKPGKVAYESGSKLVSEELLLEVNETPVAGLTIRDVLAVIKHCKDPLRLKCVKQGGIVDKDLRHYLNLRFQKGSVDHELQQIIRDNLYLRTVPCTTRPHKEGEVPGVDYIFITVEDFMELEKSGALLESGTYEDNYYGTPKPPAEPAPLLLNVTDQILPGATPSAEGKRKRNKSVSNMEKASIEPPEEEEEERPVVNGNGVVVTPESSEHEDKSAGASGEMPSQPYPAPVYSQPEELKEQMDDTKPTKPEDNEEPDPLPDNWEMAYTEKGEVYFIDHNTKTTSWLDPRLAKKAKPPEECKENELPYGWEKIDDPIYGTYYVDHINRRTQFENPVLEAKRKLQQHNMPHTELGTKPLQAPGFREKPLFTRDASQLKGTFLSTTLKKSNMGFGFTIIGGDEPDEFLQVKSVIPDGPAAQDGKMETGDVIVYINEVCVLGHTHADVVKLFQSVPIGQSVNLVLCRGYPLPFDPEDPANSMVPPLAIMERPPPVMVNGRHNYETYLEYISRTSQSVPDITDRPPHSLHSMPTDGQLDGTYPPPVHDDNVSMASSGATQAELMTLTIVKGAQGFGFTIADSPTGQRVKQILDIQGCPGLCEGDLIVEINQQNVQNLSHTEVVDILKDCPIGSETSLIIHRGGFFSPWKTPKPIMDRWENQGSPQTSLSAPAIPQNLPFPPALHRSSFPDSTEAFDPRKPDPYELYEKSRAIYESRRPDYKELDVHLRRMESGFGFRILGGDEPGQPILIGAVIAMGSADRDGRLHPGDELVYVDGIPVAGKTHRYVIDLMHHAARNGQVNLTVRRKVLCGGEPCPENGRSPGSVSTHHSSPRSDYATYTNSNHAAPSSNASPPEGFASHSLQTSDVVIHRKENEGFGFVIISSLNRPESGSTITVPHKIGRIIDGSPADRCAKLKVGDRILAVNGQSIINMPHADIVKLIKDAGLSVTLRIIPQEELNSPTSAPSSEKQSPMAQQSPLAQQSPLAQPSPATPNSPIAQPAPPQPLQLQGHENSYRSEVKARQDVKPDIRQPPFTDYRQPPLDYRQPPGGDYQQPPPLDYRQPPLLDYRQHSPDTRQYPLSDYRQPQDFDYFTVDMEKGAKGFGFSIRGGREYKMDLYVLRLAEDGPAIRNGRMRVGDQIIEINGESTRDMTHARAIELIKSGGRRVRLLLKRGTGQVPEYDEPAPWSSPAAAAPGLPEVGVSLDDGLAPFSPSHPAPPSDPSHQISPGPTWDIKREHDVRKPKELSACGQKKQRLGEQRERSASPQRAARPRLEEAPGGQGRPEAGRPASEARAPGLAAADAADAARAGGKEAPRAAAGSELCRREGPGAAPAFAGPGGGGSGALEAEGRAGARAGPRPGPRPPGGAPARKAAVAPGPWKVPGSDKLPSVLKPGASAASR

SEQ ID NO: 13364 - protein, 152 aa, Homo sapiens
MALLLVSLLAFLSLGSGCHHRICHCSNRVFLCQESKVTEIPSDLPRNAIELRFVLTKLRVIQKGAFSGFGDLEKIEISQNDVLEVIEADVFSNLPKLHEIRIEKANNLLYINPEAFQNLPNLQYLSFSSFVLENAKVENGDHRAFSDRTNAL

SEQ ID NO: 13365 - protein, 24 aa, Homo sapiens
MILNKALLLGALALTTVMSPCGGE

SEQ ID NO: 13366 - protein, 1023 aa, Homo sapiens
MCARMAGRTTAAPRGPYGPWLCLLVALALDVVRVDCGQAPLDPVYLPAALELLDAPEHFRVQQVGHYPPANSSLSSRSETFLLLQPWPRAQPLLRASYPPFATQQVVPPRVTEPHQRPVPWDVRAVSVEAAVTPAEPYARVLFHLKGQDWPPGSGSLPCARLHATHPAGTAHQACRFQPSLGACVVELELPSHWFSQASTTRAELAYTLEPAAEGPGGCGSGEENDPGEQALPVGGVELRPADPPQYQEVPLDEAVTLRVPDMPVRPGQLFSATLLLRHNFTASLLTLRIKVKKGLHVTAARPAQPTLWTAKLDRFKGSRHHTTLITCHRAGLTEPDSSPLELSEFLWVDFVVENSTGGGVAVTRPVTWQLEYPGQAPEAEKDKMVWEILVSERDIRALIPLAKAEELVNTAPLTGVPQHVPVRLVTVDGGGALVEVTEHVGCESANTQVLQVSEACDAVFVAGKESRGARGVRVDFWWRRLRASLRLTVWAPLLPLRIELTDTTLEQVRGWRVPGPAEGPAEPAAEASDEAERRARGCHLQYQRAGVRFLAPFAAHPLDGGRRLTHLLGPDWLLDVSHLVAPHARVLDSRVASLEGGRVVVGREPGVTSIEVRSPLSDSILGEQALAVTDDKVSVLELRVQPVMGISLTLSRGTAHPGEVTATCWAQSALPAPKQEVALSLWLSFSDHTVAPAELYDRRDLGLSVSAEEPGAILPAEEQGAQLGVVVSGAGAEGLPLHVALHPPEPCRRGRHRVPLASGTAWLGLPPASTPAPALPSSPAWSPPATEATMGGKRQVAGSVGGNTGVRGKFERAEEEARKEETEAREEEEEEEEEMVPAPQHVTELELGMYALLGVFCVAIFIFLVNGVVFVLRYQRKEPPDSATDPTSPQPHNWVWLGTDQEELSRQLDRQSPGPPKGEGSCPCESGGGGEAPTLAPGPPGGTTSSSSTLARKEAGGRRKRVEFVTFAPAPPAQSPEEPVGAPAVQSILVAGEEDIRWVCEDMGLKDPEELRNYMERIRGSS

SEQ ID NO: 13367 - protein, 784 aa, Homo sapiens
MTSGSVFFYILIFGKYFSHGGGQDVKCSLGYFPCGNITKCLPQLLHCNGVDDCGNQADEDNCGDNNGWSLQFDKYFASYYKMTSQYPFEAETPECSFHFFLFITLLFLVPHCHHALPLPLDSVVGSVPVQCLCQGLELDCDETNLRAVPSVSSNVTAMSLQWNLIRKLPPDCFKNYHDLQKLYLQNNKITSISIYAFRGLNSLTKLYLSHNRITFLKPGVFEDLHRLEWLIIEDNHLSRISPPTFYGLNSLILLVLMNNVLTRLPDKPLCQHMPRLHWLDLEGNHIHNLRNLTFISCSNLTVLVMRKNKINHLNENTFAPLQKLDELDLGSNKIENLPPLIFKDLKELSQLNLSYNPIQKIQANQFDYLVKLKSLSLEGIEISNIQQRMFRPLMNLSHIYFKKFQYCGYAPHVRSCKPNTDGISSLENLLASIIQRVFVWVVSAVTCFGNIFVICMRPYIRSENKLYAMSIISLCCADCLMGIYLFVIGGFDLKFRGEYNKHAQLWMESTHCQLVGSLAILSTEVSVLLLTFLTLEKYICIVYPFRCVRPGKCRTITVLILIWITGFIVAFIPLSNKEFFKNYYGTNGVCFPLHSEDTESIGAQIYSVAIFLGINLAAFIIIVFSYGSMFYSVHQSAITATEIRNQVKKEMILAKRFFFIVFTDALCWIPIFVVKFLSLLQVEIPGTITSWVVIFILPINSALNPILYTLTTRPFKEMIHRFWYNYRQRKSMDSKGQKTYAPSFIWVEMWPLQEMPPELMKPDLFTYPCEMSLISQSTRLNSYS

SEQ ID NO: 13368 - protein, 166 aa, Homo sapiens
MVTLAELLVLLAALLATVSGYFVSIDAHAEECFFERVTSGTKMGLIFEVAEGGFLDIDVEITGPDNKGIYKGDRESSGKYTFAAHMDGTYKFCFSNRMSTMTPKIVMFTIDIGEAPKGQDMETEGGGDTWDAHQNKLEEMINELAVAMTAVKHEQEYMEVRERIHR

SEQ ID NO: 13369 - protein, 47 aa, Homo sapiens
MRAGPGPTVTLALVLAVSWAMELKPTAPPIFTGRPFVVAWDVPTQDC

SEQ ID NO: 13370 - protein, 88 aa, Homo sapiens
MRMSVGLSLLLPLSGRTFLLLLSVVMAQSHWPSEPSEAVRDWENQLEASMHSVLSDLHEAVPTVVGIPDGTAVVGRSFRVTIPTDLIA

SEQ ID NO: 13371 - protein, 353 aa, Homo sapiens
MVVQAKKRELKEAQRRKKQLEERCRVEESIGNAVLTWNNEILPNWETMWCSRKVRDLWWQGIPPSVRGKVWSLAIGNELNITHELFDICLARAKERWRSLSTGGSEVENEDAGFSAADREASLELIKLDISRTFPNLCIFQQGGPYHDMLHSILGAYTCYRPDVGYVQGMSFIAAVLILNLDTADAFIAFSNLLNKPCQMAFFRVDHGLMLTYFAAFEVFFEENLPKLFAHFKKNNLTPDIYLIDWIFTLYSKSLPLDLACRIWDVFCRDGEEFLFRTALGILKLFEDILTKMDFIHMAQFLTRLPEDLPAEELFASIATIQMQSRNKKWAQVLTALQKDSREMEKGSPSLRH

SEQ ID NO: 13372 - protein, 579 aa, Homo sapiens
MSDPAVNAQLDGIISDFEALKRSFEVEEVETPNSTPPRRVQTPLLRATVASSTQKFQDLGVKNSEPSARHVDSLSQRSPKASLRRVELSGPKAAEPVSRRTELSIDISSKQVENAGAIGPSRFGLKRAEVLGHKTPEPAPRRTEITIVKPQESAHRRMEPPASKVPEVPTAPATDAAPKRVEIQMPKPAEAPTAPSPAQTLENSEPAPVSQLQSRLEPKPQPPVAEATPRSQEATEAAPSCVGDMADTPRDAGLKQAPASRNEKAPVDFGYVGIDSILEQMRRKAMKQGFEFNIMVVGQSGLGKSTLINTLFKSKISRKSVQPTSEERIPKTIEIKSITHDIEEKGVRMKLTVIDTPGFGDHINNENCWQPIMKFINDQYEKYLQEEVNINRKKRIPDTRVHCCLYFIPATGHSLRPLDIEFMKRLSKVVNIVPVIAKADTLTLEERVHFKQRITADLLSNGIDVYPQKEFDEDSEDRLVNEKFREMIPFAVVGSDHEYQVNGKRILGRKTKWGTIEVENTTHCEFAYLRDLLIRTHMQNIKDITSSIHFEAYRVKRLNEGSSAMANGMEEKEPEAPEM

SEQ ID NO: 13373 - protein, 430 aa, Homo sapiens
MDEQPRLMHSHAGVGMAGHPGLSQHLQDGAGGTEGEGGRKQDIGDILQQIMTITDQSLDEAQARKHALNCHRMKPALFNVLCEIKEKTVLSIRGAQEEEPTDPQLMRLDNMLLAEGVAGPEKGGGSAAAAAAAAASGGAGSDNSVEHSDYRAKLSQIRQIYHTELEKYEQACNEFTTHVMNLLREQSRTRPISPKEIERMVSIIHRKFSSIQMQLKQSTCEAVMILRSRFLDARRKRRNFNKQATEILNEYFYSHLSNPYPSEEAKEELAKKCGITVSQVSNWFGNKRIRYKKNIGKFQEEANIYAAKTAVTATNVSAHGSQANSPSTPNSAGSSSSFNMSNSGDLFMSVQSLNGDSYQGAQVGANVQSQVDTLRHVISQTGGYSDGLAASQMYSPQGISANGGWQDATTPSSVTSPTEGPGSVHSDTSN

SEQ ID NO: 13374 - protein, 224 aa, Homo sapiens
MPRPGSAQRWAAVAGRWGCRLLALLLLVPGPGGASEITFELPDNAKQCFYEDIAQGTKCTLEFQVITGGHYDVDCRLEDPDGKVLYKEMKKQYDSFTFTASKNGTYKFCFSNEFSTFTHKTVYFDFQVGEDPPLFPSENRVSALTQMESACVSIHEALKSVIDYQTHFRLREAQGRSRAEDLNTRVAYWSVGEALILLVVSIGQVFLLKSFFSDKRTTTTRVGS

SEQ ID NO: 13375 - protein, 53 aa, Homo sapiens
MADGPRCKRRKQANPRRNNVFSLNSQLAIGRKLPSEDMIIQMSFCDLATVCLT

SEQ ID NO: 13376 - protein, 95 aa, Homo sapiens
MADEKPKEGVKTENNDHINLKVAGQDGSVVQFKIKRHTPLSKLMKAYCERQGLSMRQIRFRFDGQPINETDTPAQLEMEDEDTIDVFQQQTGGVY

SEQ ID NO: 13377 - protein, 709 aa, Homo sapiens
MRGFNLLLFWGCCVMHSWEGHIRPTRKPNTKGNNCRDSTLCPAYATCTNTVDSYYCACKQGFLSSNGQNHFKDPGVRCKDIDECSQSPQPCGPNSSCKNLSGRYKCSCLDGFSSPTGNDWVPGKPGNFSCTDINECLTSRVLFKCKEDVIPDNKQIQQCQEGTAVKPAYVSFCAQINNIFSVLDKVCENKTTVVSLKNTTESFVPVLKQISTWTKFTKEETSSLATVFLESVESMTLASFWKPSANITPAVRTEYLDIESKVINKECSEENVTLDLVAKGDKMKIGCSTIEESESTETTGVAFVSFVGMESVLNERFFKDHQAPLTTSEIKLKMNSRVVGGIMTGEKKDGFSDPIIYTLENIQPKQKFERPICVSWSTDVKGGRWTSFGCVILEASETYTICSCNQMANLAVIMASGELTMDFSLYIISHVGIIISLVCLVLAIATFLLCRSIRNHNTYLHLHLCVCLLLAKTLFLAGIHKTDNKMGCAIIAGFLHYLFLACFFWMLVEAVILFLMVRNLKVVNYFSSRNIKMLHICAFGYGLPMLVVVISASVQPQGYGMHNRCWLNTETGFIWSFLGPVCTVIVINSLLLTWTLWILRQRLSSVNAEVSTLKDTRLLTFKAFAQLFILGCSWVLGIFQIGPVAGVMAYLFTIINSLQGAFIFLIHCLLNGQVREEYKRWITGKTKPSSQSQTSRILLSSMPSASKTG

SEQ ID NO: 13378 - protein, 1179 aa, Homo sapiens
MAACGRVRRMFRLSAALHLLLLFAAGAEKLPGQGVHSQGQGPGANFVSFVGQAGGGGPAGQQLPQLPQSSQLQQQQQQQQQQQQPQPPQPPFPAGGPPARRGGAGAGGGWKLAEEESCREDVTRVCPKHTWSNNLAVLECLQDVREPENEISSDCNHLLWNYKLNLTTDPKFESVAREVCKSTITEIKECADEPVGKGYMVSCLVDHRGNITEYQCHQYITKMTAIIFSDYRLICGFMDDCKNDINILKCGSIRLGEKDAHSQGEVVSCLEKGLVKEAEEREPKIQVSELCKKAILRVAELSSDDFHLDRHLYFACRDDRERFCENTQAGEGRVYKCLFNHKFEESMSEKCREALTTRQKLIAQDYKVSYSLAKSCKSDLKKYRCNVENLPRSREARLSYLLMCLESAVHRGRQVSSECQGEMLDYRRMLMEDFSLSPEIILSCRGEIEHHCSGLHRKGRTLHCLMKVVRGEKGNLGMNCQQALQTLIQETDPGADYRIDRALNEACESVIQTACKHIRSGDPMILSCLMEHLYTEKMVEDCEHRLLELQYFISRDWKLDPVLYRKCQGDASRLCHTHGWNETSEFMPQGAVFSCLYRHAYRTEEQGRRLSRECRAEVQRILHQRAMDVKLDPALQDKCLIDLGKWCSEKTETGQELECLQDHLDDLVVECRDIVGNLTELESEDIQIEALLMRACEPIIQNFCHDVADNQIDSGDLMECLIQNKHQKDMNEKCAIGVTHFQLVQMKDFRFSYKFKMACKEDVLKLCPNIKKKVDVVICLSTTVRNDTLQEAKEHRVSLKCRRQLRVEELEMTEDIRLEPDLYEACKSDIKNFCSAVQYGNAQIIECLKENKKQLSTRCHQKVFKLQETEMMDPELDYTLMRVCKQMIKRFCPEADSKTMLQCLKQNKNSELMDPKCKQMITKRQITQNTDYRLNPMLRKACKADIPKFCHGILTKAKDDSELEGQVISCLKLRYADQRLSSDCEDQIRIIIQESALDYRLDPQLQLHCSDEISSLCAEEAAAQEQTGQVEECLKVNLLKIKTELCKKEVLNMLKESKADIFVDPVLHTACALDIKHHCAAITPGRGRQMSCLMEALEDKRVRLQPECKKRLNDRIEMWSYAAKVAPADGFSDLAMQVMTSPSKNYILSVISGSICILFLIGLMCGRITKRVTRELKDR

SEQ ID NO: 13379 - protein, 767 aa, Homo sapiens
MGPEALSSLLLLLLVASGDADMKGHFDPAKCRYALGMQDRTIPDSDISASSSWSDSTAARHSRLESSDGDGAWCPAGSVFPKEEEYLQVDLQRLHLVALVGTQGRHAGGLGKEFSRSYRLRYSRDGRRWMGWKDRWGQEVISGNEDPEGVVLKDLGPPMVARLVRFYPRADRVMSVCLRVELYGCLWRDGLLSYTAPVGQTMYLSEAVYLNDSTYDGHTVGGLQYGGLGQLADGVVGLDDFRKSQELRVWPGYDYVGWSNHSFSSGYVEMEFEFDRLRAFQAMQVHCNNMHTLGARLPGGVECRFRRGPAMAWEGEPMRHNLGGNLGDPRARAVSVPLGGRVARFLQCRFLFAGPWLLFSEISFISDVVNNSSPALGGTFPPAPWWPPGPPPTNFSSLELEPRGQQPVAKAEGSPTAILIGCLVAIILLLLLIIALMLWRLHWRRLLSKVLESHPRTRSPGLVGIRPTPLPVSPMALVHLCEVDSPQDLVSLDFPLNVRKGHPLLVAVKILRPDATKNARNDFLKEVKIMSRLKDPNIIRLLGVCVQDDPLCMITDYMENGDLNQFLSAHQLEDKAAEGAPGDGQAAQGPTISYPMLLHVAAQIASGMRYLATLNFVHRDLATRNCLVGENFTIKIADFGMSRNLYAGDYYRVQGRAVLPIRWMAWECILMGKFTTASDVWAFGVTLWEVLMLCRAQPFGQLTDEQVIENAGEFFRDQGRQVYLSRPPACPQGLYELMLRCWSRESEQRPPFSQLHRFLAEDALNTV

SEQ ID NO: 13380 - protein, 1462 aa, Homo sapiens
MALYYDHQIEAPDAAGSPSFISWHPVHPFLAVAYISTTSTGSVDIYLEQGECVPDTHVERPFRVASLCWHPTRLVLAVGWETGEVTVFNKQDKEQHTMPLTHTADITVLRWSPSGNCLLSGDRLGVLLLWRLDQRGRVQGTPLLKHEYGKHLTHCIFRLPPPGEDLVQLAKAAVSGDEKALDMFNWKKSSSGSLLKMGSHEGLLFFVSLMDGTVHYVDEKGKTTQVVSADSTIQMLFYMEKREALVVVTENLRLSLYTVPPEGKAEEVMKVKLSGKTGRRADIALIEGSLLVMAVGEAALRFWDIERGENYILSPDEKFGFEKGENMNCVCYCKVKGLLAAGTDRGRVAMWRKVPDFLGSPGAEGKDRWALQTPTELQGNITQIQWGSRKNLLAVNSVISVAILSERAMSSHFHQQVAAMQVSPSLLNVCFLSTGVAHSLRTDMHISGVFATKDAVAVWNGRQVAIFELSGAAIRSAGTFLCETPVLAMHEENVYTVESNRVQVRTWQGTVKQLLLFSETEGNPCFLDICGNFLVVGTDLAHFKSFDLSRREAKAHCSCRSLAELVPGVGGIASLRCSSSGSTISILPSKADNSPDSKICFYDVEMDTVTVFDFKTGQIDRRETLSFNEQETNKSHLFVDEGLKNYVPVNHFWDQSEPRLFVCEAVQETPRSQPQSANGQPQDGRAGPAADVLILSFFISEEHGFLLHESFPRPATSHSLLGMEVPYYYFTRKPEEADREDEVEPGCHHIPQMVSRRPLRDFVGLEDCDKATRDAMLHFSFFVTIGDMDEAFKSIKLIKSEAVWENMARMCVKTQRLDVAKVCLGNMGHARGARALREAEQEPELEARVAVLATQLGMLEDAEQLYRKCKRHDLLNKFYQAAGRWQEALQVAEHHDRVHLRSTYHRYAGHLEASADCSRALSYYEKSDTHRFEVPRMLSEDLPSLELYVNKMKDKTLWRWWAQYLESQGEMDAALHYYELARDHFSLVRIHCFQGNVQKAAQIANETGNLAASYHLARQYESQEEVGQAVHFYTRAQAFKNAIRLCKENGLDDQLMNLALLSSPEDMIEAARYYEEKGVQMDRAVMLYHKAGHFSKALELAFATQQFVALQLIAEDLDETSDPALLARCSDFFIEHSQYERAVELLLAARKYQEALQLCLGQNMSITEEMAEKMTVAKDSSDLPEESRRELLEQIADCCMRQGSYHLATKKYTQAGNKLKAMRALLKSGDTEKITFFASVSRQKEIYIMAANYLQSLDWRKEPEIMKNIIGFYTKGRALDLLAGFYDACAQVEIDEYQNYDKAHGALTEAYKCLAKAKAKSPLDQETRLAQLQSRMALVKRFIQARRTYTEDPKESIKQCELLLEEPDLDSTIRIGDVYGFLVEHYVRKEEYQTAYRFLEEMRRRLPLANMSYYVSPQAVDAVHRGLGLPLPRTVPEQVRHNSMEDARELDEEVVEEADDDP

SEQ ID NO: 13381 - protein, 83 aa, Homo sapiens
MSTDTGVSLPSYEEDQGSKLIRKAKEAPFVPVGIAGFAAIVAYGLYKLKSRGNTKMSIHLIHMRVAAQGFVVGAMTVGQDGSR

SEQ ID NO: 13382 - protein, 106 aa, Homo sapiens
MFPWMRPQAAPGRRRGRQTYSRFQTLELEKEFLFNPYLTRKRRIEVSHALALTERQVKIWFQNRRMKWKKENNKDKFPVSRQEVKDGETKKEAQELEEDRAEGLTN

SEQ ID NO: 13383 - protein, 190 aa, Homo sapiens
MGSSRLAALLLPLLLIVIDLSDSAGIGFRHLPHWNTRCPLASHTRKLLPRRHLSEKSHHISIPSPDISHKGLRSKRTQPSDPETWESLPRLDSQRHGGPEFSFDLLPEARAIRVTISSGPEVSVRLCHQWALECEELSSPYDVQKIVSGGHTVELPYEFLLPCLCIEMARTSGSQCTSLTTASTLRWSWP

SEQ ID NO: 13384 - protein, 65 aa, Homo sapiens
MADQLTEEQIAEFKEAFSLFDKDGDGTITTKELGTVMRSLGQNPTEAELQDMINEVDADGWQWLY

SEQ ID NO: 13385 - protein, 700 aa, Homo sapiens
MERAVQGTDGGGGSNSSSRSSSRATSAGSSPSCSLAGRGVSSRSAAAGLGGGGSRSSPGSVAASPSGGGGRRREPALEGVLSKYTNLLQGWQNRYFVLDFEAGILQYFVNEQSKHQKPRGVLSLSGAIVSLSDEAPHMLVVYSANGEMFKLRAADAKEKQFWVTQLRACAKYHMEMNSKMMNQVEGQQKNLVHAIESLPGSGPLTALDQDLLLLKATSAATLSCLGECLNLLQQSVHQAGQPSQKPGASENILGWHGSKSHSTEQLKNGTLGSLPSASANITWAILPNSAEDEQTSQPEPEPNSGSELVLSEDEKSDNEDKEETELGVMEDQRSIILHLISQLKLGMDLTKVVLPTFILEKRSLLEMYADFMAHPDLLLAITAGATPEERVICFVEYYLTAFHEGRKGALAKKPYNPIIGETFHCSWEVPKDRVKPKRTASRSPASCHEHPMADDPSKSYKLRFVAEQVSHHPPISCFYCECEEKRLCVNTHVWTKSKFMGMSVGVSMIGEGVLRLLEHGEEYVFTLPSAYARSILTIPWVELGGKVSINCAKTGYSATVIFHTKPFYGGKVHRVTAEVKHNPTNTIVCKAHGEWNGTLEFTYNNGETKVIDTTTLPVYPKKIRPLEKQGPMESRNLWREVTRYLRLGDIDAATEQKRHLEEKQRVEERKRENLRTPWKPKYFIQEGDGWVYFNPLWKAH

SEQ ID NO: 13386 - protein, 729 aa, Homo sapiens
MHLKIVLAFLALSLITIFALAYVLLTSPGGSSQPPHCPSVSHRAQPWPHPGQSQLFADLSREELTAVMRFLTQRLGPGLVDAAQAQPSDNCIFSVELQLPPKAAALAHLDRGSPPPAREALAIVLFGGQPQPNVSELVVGPLPHPSYMRDVTVERHGGPLPYHRRPVLRAEFTQMWRHLKEVELPKAPIFLSSTFNYNGSTLAAVHATPRGLRSGDRATWMALYHNISGVGLFLHPVGLELLLDHRALDPAHWTVQQVFYLGHYYADLGQLEREFKSGRLEVVRVPLPPPNGASSLRSRNSPGPLPPLQFSPQGSQYSVQGNLVVSSLWSFTFGHGVFSGLRIFDVRFQGERIAYEVSVQECVSIYGADSPKTMLTRYLDSSFGLGRNSRGLVRGVDCPYQATMVDIHILVGKGAVQLLPGAVCVFEEAQGLPLRRHHNYLQNHFYGGLASSALVVRSVSSVGNYDYIWDFVLYPNGALEGRVHATGYINTAFLKGGEEGLLFGNRVGERVLGTVHTHAFHFKLDLDVAGLKNWVVAEDVVFKPVAAPWNPEHWLQRPQLTRQVLGKEDLTAFSLGSPLPRYLYLASNQTNAWGHQRGYQLVVTQRKEEESQSSSIYHQNDIWTPTVTFADFINNETLLGEDLVAWVTASFLHIPHAEDIPNTVTLGNRVGFLLRPYNFFDEDPSIFSPGSVYFEKGQDAGLCSINPVACLPDLAACVPDLPPFSYHGF

SEQ ID NO: 13387 - protein, 188 aa, Homo sapiens
MEAALLGLCNWSTLGVCAALKLPQISAVLAARSARGLSLPSLLLELAGFLVFLRYQCYYGYPPLTYLEYPILIAQDVILLLCIFHFNGNVKQATPYIAVLVSSWFILALQKWIIDLAMNLCTFISAASKFAQLQCLWKTRDSGTVSALTWSLSSYTCAILLRFVIMLALNIWVTVTVLRYRKTAIKAE

SEQ ID NO: 13388 - protein, 41 aa, Homo sapiens
MRLRVRLLKRTWPLEVPETEPTLGHLRSHLRQSLLCTWGYS

SEQ ID NO: 13389 - protein, 371 aa, Homo sapiens
MAAAEAANCIMENFVATLANGMSLQPPLEEVSCGQAESSEKPNAEDMTSKDYYFDSYAHFGIHEEMLKDEVRTLTYRNSMFHNRHLFKDKVVLDVGSGTGILCMFAAKAGARKVIGIECSSISDYAVKIVKANKLDHVVTIIKGKVEEVELPVEKVDIIISEWMGYCLFYESMLNTVLYARDKWLAPDGLIFPDRATLYVTAIEDRQYKDYKIHWWENVYGFDMSCIKDVAIKEPLVDVVDPKQLVTNACLIKEVDIYTVKVEDLTFTSPFCLQVKRNDYVHALVAYFNIEFTRCHKRTGFSTSPESPYTHWKQTVFYMEDYLTVKTGEEIFGTIGMRPNAKNNRDLDFTIDLDFKGQLCELSCSTDYRMR

SEQ ID NO: 13390 - protein, 328 aa, Homo sapiens
MGPLMVLFCLLFLYPGLADSAPSCPQNVNISGGTFTLSHGWAPGSLLTYSCPQGLYPSPASRLCKSSGQWQTPGATRSLSKAVCKPVRCPAPVSFENGIYTPRLGSYPVGGNVSFECEDGFILRGSPVRQCRPNGMWDGETAVCDNGAGHCPNPGISLGAVRTGFRFGHGDKVRYRCSSNLVLTGSSERECQGNGVWSGTEPICRQPYSYDFPEDVAPALGTSFSHMLGATNPTQKTKESLGRKIQIQRSGHLNLYLLLDCSQSVSENDFLIFKESASLMVDRVRNQESACSRGLPVLTISLCLLPLLRTPLTAHLLQEVFSDYTHAM

SEQ ID NO: 13391 - protein, 818 aa, Homo sapiens
MALTQVRLTFRDVAIEFSQEEWKCLDPAQRILYRDVMLENYWNLVSLGLCHFDMNIISMLEEGKEPWTVKSCVKIARKPRTPECVKGVVTDIPPKCTIKDLLPKEKSSTEAVFHTVVLERHESPDIEDFSFKEPQKNVHDFECQWRDDTGNYKGVLMAQKEGKRDQRDRRDIENKLMNNQLGVSFHSHLPELQLFQGEGKMYECNQVEKSTNNGSSVSPLQQIPSSVQTHRSKKYHELNHFSLLTQRRKANSCGKPYKCNECGKAFTQNSNLTSHRRIHSGEKPYKCSECGKTFTVRSNLTIHQVIHTGEKPYKCHECGKVFRHNSYLATHRRIHTGEKPYKCNECGKAFRGHSNLTTHQLIHTGEKPFKCNECGKLFTQNSHLISHWRIHTGEKPYKCNECGKAFSVRSSLAIHQTIHTGEKPYKCNECGKVFRYNSYLGRHRRVHTGEKPYKCNECGKAFSMHSNLATHQVIHTGTKPFKCNECSKVFTQNSQLANHRRIHTGEKPYKCNECGKAFSVRSSLTTHQAIHSGEKPYKCIECGKSFTQKSHLRSHRGIHSGEKPYKCNECGKVFAQTSQLARHWRVHTGEKPYKCNDCGRAFSDRSSLTFHQAIHTGEKPYKCHECGKVFRHNSYLATHRRIHTGEKPYKCNECGKAFSMHSNLTTHKVIHTGEKPYKCNQCGKVFTQNSHLANHQRTHTGEKPYRCNECGKAFSVRSSLTTHQAIHTGKKPYKCNECGKVFTQNAHLANHRRIHTGEKPYRCTECGKAFRVRSSLTTHMAIHTGEKRYKCNECGKVFRQSSNLASHHRMHTGEKPYK

SEQ ID NO: 13392 - protein, 4588 aa, Homo sapiens
MGRHLALLLLLLLLFQHFGDSDGSQRLEQTPLQFTHLEYNVTVQENSAAKTYVGHPVKMGVYITHPAWEVRYKIVSGDSENLFKAEEYILGDFCFLRIRTKGGNTAILNREVKDHYTLIVKALEKNTNVEARTKVRVQVLDTNDLRPLFSPTSYSVSLPENTAIRTSIARVSATDADIGTNGEFYYSFKDRTDMFAIHPTSGVIVLTGRLDYLETKLYEMEILAADRGMKLYGSSGISSMAKLTVHIEQANECAPVITAVTLSPSELDRDPAYAIVTVDDCDQGANGDIASLSIVAGDLLQQFRTVRSFPGSKEYKVKAIGGIDWDSHPFGYNLTLQAKDKGTPPQFSSVKVIHVTSPQFKAGPVKFEKDVYRAEISEFAPPNTPVVMVKAIPAYSHLRYVFKSTPGKAKFSLNYNTGLISILEPVKRQQAAHFELEVTTSDRKASTKVLVKVLGANSNPPEFTQTAYKAAFDENVPIGTTVMSLSAVDPDEGENGYVTYSIANLNHVPFAIDHFTGAVSTSENLDYELMPRVYTLRIRASDWGLPYRREVEVLATITLNNLNDNTPLFEKINCEGTIPRDLGVGEQITTVSAIDADELQLVQYQIEAGNELDFFSLNPNSGVLSLKRSLMDGLGAKVSFHSLRITATDGENFATPLYINITVAASHKLVNLQCEETGVAKMLAEKLLQANKLHNQGEVEDIFFDSHSVNAHIPQFRSTLPTGIQVKENQPVGSSVIFMNSTDLDTGFNGKLVYAVSGGNEDSCFMIDMETGMLKILSPLDRETTDKYTLNITVYDLGIPQKAAWRLLHVVVVDANDNPPEFLQESYFVEVSEDKEVHSEIIQVEATDKDLGPNGHVTYSIVTDTDTFSIDSVTGVVNIARPLDRELQHEHSLKIEARDQAREEPQLFSTVVVKVSLEDVNDNPPTFIPPNYRVKVREDLPEGTVIMWLEAHDPDLGQSGQVRYSLLDHGEGNFDVDKLSGAVRIVQQLDFEKKQVYNLTVRAKDKGKPVSLSSTCYVEVEVVDVNENLHPPVFSSFVEKGTVKEDAPVGSLVMTVSAHDEDARRDGEIRYSIRDGSGVGVFKIGEETGVIETSDRLDRESTSHYWLTVFATDQGVVPLSSFIEIYIEVEDVNDNAPQTSEPVYYPEIMENSPKDVSVVQIEAFDPDSSSNDKLMYKITSGNPQGFFSIHPKTGLITTTSRKLDREQQDEHILEVTVTDNGSPPKSTIARVIVKILDENDNKPQFLQKFYKIRLPEREKPDRERNARREPLYHVIATDKDEGPNAEISYSIEDGNEHGKFFIEPKTGVVSSKRFSAAGEYDILSIKAVDNGRPQKSSTTRLHIEWISKPKPSLEPISFEESFFTFTVMESDPVAHMIGVISVEPPGIPLWFDITGGNYDSHFDVDKGTGTIIVAKPLDAEQKSNYNLTVEATDGTTTILTQVFIKVIDTNDHRPQFSTSKYEVVIPEDTAPETEILQISAVDQDEKNKLIYTLQSSRDPLSLKKFRLDPATGSLYTSEKLDHEAVHQHTLTVMVRDQDVPVKRNFARIVVNVSDTNDHAPWFTASSYKGRVYESAAVGSVVLQVTALDKDKGKNAEVLYSIESGNIGNSFMIDPVLGSIKTAKELDRSNQAEYDLMVKATDKGSPPMSEITSVRIFVTIADNASPKFTSKEYSVELSETVSIGSFVGMVTAHSQSSVVYEIKDGNTGDAFDINPHSGTIITQKALDFETLPIYTLIIQGTNMAGLSTNTTVLVHLQDENDNAPVFMQAEYTGLISESASINSVVLTDRNVPLVIRAADADKDSNALLVYHIVEPSVHTYFAIDSSTGAIHTVLSLDYEETSIFHFTVQVHDMGTPRLFAEYAANVTVHVIDINDCPPVFAKPLYEASLLLPTYKGVKVITVNATDADSSAFSQLIYSITEGNIGEKFSMDYKTGALTVQNTTQLRSRYELTVRASDGRFAGLTSVKINVKESKESHLKFTQDVYSAVVKENSTEAETLAVITAIGNPINEPLFYHILNPDRRFKISRTSGVLSTTGTPFDREQQEAFDVVVEVTEEHKPSAVAHVVVKVIVEDQNDNAPVFVNLPYYAVVKVDTEVGHVIRYVTAVDRDSGRNGEVHYYLKEHHEHFQIGPLGEISLKKQFELDTLNKEYLVTVVAKDGGNPAFSAEVIVPITVMNKAMPVFEKPFYSAEIAESIQVHSPVVHVQANSPEGLKVFYSITDGDPFSQFTINFNTGVINVIAPLDFEAHPAYKLSIRATDSLTGAHAEVFVDIIVDDINDNPPVFAQQSYAVTLSEASVIGTSVVQVRATDSDSEPNRGISYQMFGNHSKSHDHFHVDSSTGLISLLRTLDYEQSRQHTIFVRAVDGGMPTLSSDVIVTVDVTDLNDNPPLFEQQIYEARISEHAPHGHFVTCVKAYDADSSDIDKLQYSILSGNDHKHFVIDSATGIITLSNLHRHALKPFYSLNLSVSDGVFRSSTQVHVTVIGGNLHSPAFLQNEYEVELAENAPLHTLVMEVKTTDGDSGIYGHVTYHIVNDFAKDRFYINERGQIFTLEKLDRETPAEKVISVRLMAKDAGGKVAFCTVNVILTDDNDNAPQFRATKYEVNIGSSAAKGTSVVKVLASDADEGSNADITYAIEADSESVKENLEINKLSGVITTKESLIGLENEFFTFFVRAVDNGSPSKESVVLVYVKILPPEMQLPKFSEPFYTFTVSEDVPIGTEIDLIRAEHSGTVLYSLVKGNTPESNRDESFVIDRQSGRLKLEKSLDHETTKWYQFSILARCTQDDHEMVASVDVSIQVKDANDNSPVFESSPYEAFIVENLPGGSRVIQIRASDADSGTNGQVMYSLDQSQSVEVIESFAINMETGWITTLKELDHEKRDNYQIKVVASDHGEKIQLSSTAIVDVTVTDVNDSPPRFTAEIYKGTVSEDDPQGGVIAILSTTDADSEEINRQVTYFITGGDPLGQFAVETIQNEWKVYVKKPLDREKRDNYLLTITATDGTFSSKAIVEVKVLDANDNSPVCEKTLYSDTIPEDVLPGKLIMQISATDADIRSNAEITYTLLGSGAEKFKLNPDTGELKTSTPLDREEQAVYHLLVRATDGGGRFCQASIVLTLEDVNDNAPEFSADPYAITVFENTEPGTLLTRVQATDADAGLNRKILYSLIDSADGQFSINELSGIIQLEKPLDRELQAVYTLSLKAVDQGLPRRLTATGTVIVSVLDINDNPPVFEYREYGATVSEDILVGTEVLQVYAASRDIEANAEITYSIISGNEHGKFSIDSKTGAVFIIENLDYESSHEYYLTVEATDGGTPSLSDVATVNVNVTDINDNTPVFSQDTYTTVISEDAVLEQSVITVMADDADGPSNSHIHYSIIDGNQGSSFTIDPVRGEVKVTKLLDRETISGYTLTVQASDNGSPPRVNTTTVNIDVSDVNDNAPVFSRGNYSVIIQENKPVGFSVLQLVVTDEDSSHNGPPFFFTIVTGNDEKAFEVNPQGVLLTSSAIKRKEKDHYLLQVKVADNGKPQLSSLTYIDIRVIEESIYPPAILPLEIFITSSGEEYSGGVIGKIHATDQDVYDTLTYSLDPQMDNLFSVSSTGGKLIAHKKLDIGQYLLNVSVTDGKFTTVADITVHIRQVTQEMLNHTIAIRFANLTPEEFVGDYWRNFQRALRNILGVRRNDIQIVSLQSSEPHPHLDVLLFVEKPGSAQISTKQLLHKINSSVTDIEEIIGVRILNVFQKLCAGLDCPWKFCDEKVSVDESVMSTHSTARLSFVTPRHHRAAVCLCKEGRCPPVHHGCEDDPCPEGSECVSDPWEEKHTCVCPSGRFGQCPGSSSMTLTGNSYVKYRLTENENKLEMKLTMRLRTYSTHAVVMYARGTDYSILEIHHGRLQYKFDCGSGPGIVSVQSIQVNDGQWHAVALEVNGNYARLVLDQVHTASGTAPGTLKTLNLDNYVFFGGHIRQQGTRHGRSPQVGNGFRGCMDSIYLNGQELPLNSKPRSYAHIEESVDVSPGCFLTATEDCASNPCQNGGVCNPSPAGGYYCKCSALYIGTHCEISVNPCSSKPCLYGGTCVVDNGGFVCQCRGLYTGQRCQLSPYCKDEPCKNGGTCFDSLDGAVCQCDSGFRGERCQSDIDECSGNPCLHGALCENTHGSYHCNCSHEYRGRHCEDAAPNQYVSTPWNIGLAEGIGIVVFVAGIFLLVVVFVLCRKMISRKKKHQAEPKDKHLGPATAFLQRPYFDSKLNKNIYSDIPPQVPVRPISYTPSIPSDSRNNLDRNSFEGSAIPEHPEFSTFNPESVHGHRKAVAVCSVAPNLPPPPPSNSPSDSDSIQKPSWDFDYDTKVVDLDPCLSKKPLEEKPSQPYSARESLSEVQSLSSFQSESCDDNGYHWDTSDWMPSVPLPDIQEFPNYEVIDEQTPLYSADPNAIDTDYYPGGYDIESDFPPPPEDFPAADELPPLPPEFSNQFESIHPPRDMPAAGSLGSSSRNRQRFNLNQYLPNFYPLDMSEPQTKGTGENSTCREPHAPYPPGYQRHFEAPAVESMPMSVYASTASCSDVSACCEVESEVMMSDYESGDDGHFEEVTIPPLDSQQHTEV

SEQ ID NO: 13393 - protein, 56 aa, Homo sapiens
MKTGLFFLCLLGTAAAIPTNARLLSDHSKPTAETVAPDNTAIPSLRAEAEENEKET

SEQ ID NO: 13394 - protein, 2697 aa, Homo sapiens
MNGDMPHVPITTLAGIASLTDLLNQLPLPSPLPATTTKSLLFNARIAEEVNCLLACRDDNLVSQLVHSLNQVSTDHIELKDNLGSDDPEGDIPVLLQAVLARSPNVFREKSMQNRYVQSGMMMSQYKLSQNSMHSSPASSNYQQTTISHSPSSRFVPPQTSSGNRFMPQQNSPVPSPYAPQSPAGYMPYSHPSSYTTHPQMQQASVSSPIVAGGLRNIHDNKVSGPLSGNSANHHADNPRHGSSEDYLHMVHRLSSDDGDSSTMRNAASFPLRSPQPVCSPAGSEGTPKGSRPPLILQSQSLPCSSPRDVPPDILLDSPERKQKKQKKMKLGKDEKEQSEKAAMYDIISSPSKDSTKLTLRLSRVRSSDMDQQEDMISGVENSNVSENDIPFNVQYPGQTSKTPITPQDINRPLNAAQCLSQQEQTAFLPANQVPVLQQNTSVAAKQPQTSVVQNQQQISQQGPIYDEVELDALAEIERIERESAIERERFSKEVQDKDKPLKKRKQDSYPQEAGGATGGNRPASQETGSTGNGSRPALMVSIDLHQAGRVDSQASITQDSDSIKKPEEIKQCNDAPVSVLQEDIVGSLKSTPENHPETPKKKSDPELSKSEMKQSESRLAESKPNENRLVETKSSENKLETKVETQTEELKQNESRTTECKQNESTIVEPKQNENRLSDTKPNDNKQNNGRSETTKSRPETPKQKGESRPETPKQKSDGHPETPKQKGDGRPETPKQKGESRPETPKQKNEGRPETPKHRHDNRRDSGKPSTEKKPEVSKHKQDTKSDSPRLKSERAEALKQRPDGRSVSESLRRDHDNKQKSDDRGESERHRGDQSRVRRPETLRSSSRNEHGIKSDSSKTDKLERKHRHESGDSRERPSSGEQKSRPDSPRVKQGDSNKSRSDKLGFKSPTSKDDKRTEGNKSKVDTNKAHPDNKAEFPSYLLGGRSGALKNFVIPKIKRDKDGNVTQETKKMEMKGEPKDKVEKIGLVEDLNKGAKPVVVLQKLSLDDVQKLIKDREDKSRSSLKPIKNKPSKSNKGSIDQSVLKELPPELLAEIESTMPLCERVKMNKRKRSTVNEKPKYAEISSDEDNDSDEAFESSRKRHKKDDDKAWEYEERDRRSSGDHRRSGHSHEGRRSSGGGRYRNRSPSDSDMEDYSPPPSLSEVARKMKKKEKQKKRKAYEPKLTPEEMMDSSTFKRFTASIENILDNLEDMDFTAFGDDDEIPQELLLGKHQLNELGSESAKIKAMGIMDKLSTDKTVKVLNILEKNIQDGSKLSTLLNHNNDTEEEERLWRDLIMERVTKSADACLTTINIMTSPNMPKAVYIEDVIERVIQYTKFHLQNTLYPQYDPVYRLDPHGGGLLSSKAKRAKCSTHKQRVIVMLYNKVCDIVSSLSELLEIQLLTDTTILQVSSMGITPFFVENVSELQLCAIKLVTAVFSRYEKHRQLILEEIFTSLARLPTSKRSLRNFRLNSSDMDGEPMYIQMVTALVLQLIQCVVHLPSSEKDSNAEEDSNKKIDQDVVITNSYETAMRTAQNFLSIFLKKCGSKQGEEDYRPLFENFVQDLLSTVNKPEWPAAELLLSLLGRLLVHQFSNKSTEMALRVASLDYLGTVAARLRKDAVTSKMDQGSIERILKQVSGGEDEIQQLQKALLDYLDENTETDPSLVFSRKFYIAQWFRDTTLETEKAMKSQKDEESSEGTHHAKEIETTGQIMHRAENRKKFLRSIIKTTPSQFSTLKMNSDTVDYDDACLIVRYLASMRPFAQSFDIYLTQILRVLGENAIAVRTKAMKCLSEVVAVDPSILARLDMQRGVHGRLMDNSTSVREAAVELLGRFVLCRPQLAEQYYDMLIERILDTGISVRKRVIKILRDICIEQPTFPKITEMCVKMIRRVNDEEGIKKLVNETFQKLWFTPTPHNDKEAMTRKILNITDVVAACRDTGYDWFEQLLQNLLKSEEDSSYKPVKKACTQLVDNLVEHILKYEESLADSDNKGVNSGRLVACITTLFLFSKIRPQLMVKHAMTMQPYLTTKCSTQNDFMVICNVAKILELVVPLMEHPSETFLATIEEDLMKLIIKYGMTVVQHCVSCLGAVVNKVTQNFKFVWACFNRYYGAISKLKSQHQEDPNNTSLLTNKPALLRSLFTVGALCRHFDFDLEDFKGNSKVNIKDKVLELLMYFTKHSDEEVQTKAIIGLGFAFIQHPSLMFEQEVKNLYNNILSDKNSSVNLKIQVLKNLQTYLQEEDTRMQQADRDWKKVAKQEDLKEMGDVSSGMSSSIMQLYLKQVLEAFFHTQSSVRHFALNVIALTLNQGLIHPVQCVPYLIAMGTDPEPAMRNKADQQLVEIDKKYAGFIHMKAVAGMKMSYQVQQAINTCLKDPVRGFRQDESSSALCSHLYSMIRGNRQHRRAFLISLLNLFDDTAKTDVTMLLYIADNLACFPYQTQEEPLFIMHHIDITLSVSGSNLLQSFKESMVKDKRKERKSSPSKENESSDSEEEVSRPRKSRKRVDSDSDSDSEDDINSVMKCLPENSAPLIEFANVSQGILLLLMLKQHLKNLCGFSDSKIQKYSPSESAKVYDKAINRKTGVHFHPKQTLDFLRSDMANSKITEEVKRSIVKQYLDFKLLMEHLDPDEEEEEGEVSASTNARNKAITSLLGGGSPKNNTAAETEDDESDGEDRGGGTSGVRRRRSQRISQRIT

SEQ ID NO: 13395 - protein, 66 aa, Homo sapiens
MRLFLWNAVLTLFVTSLIGALIPEPEVKIEVLQKPFICHRKTKGGDLMLVHYEGYLEKDGSLFHST

SEQ ID NO: 13396 - protein, 573 aa, Homo sapiens
MLQPGPHPPSPQAAAPGEAWPGPSQAPWQSLEEKMGSPEDDLIGIPFPDHSSELLSCLNEQRQLGHLCDLTIRTQGLEYRTHRAVLAACSHYFKKLFTEGGGGAVMGAGGSGTATGGAGAGVCELDFVGPEALGALLEFAYTATLTTSSANMPAVLQAARLLEIPCVIAACMEILQGSGLEAPSPDEDDCERARQYLEAFATATASGVPNGEDSPPQVPLPPPPPPPPRPVARRSRKPRKAFLQTKGARANHLVPEVPTVPAHPLTYEEEEVAGRVGSSGGSGPGDSYSPPTGTASPPEGPQSYEPYEGEEEEEELVYPPAYGLAQGGGPPLSPEELGSDEDAIDPDLMAYLSSLHQDNLAPGLDSQDKLVRKRRSQMPQECPVCHKIIHGAGKLPRHMRTHTGEKPFACEVCGVRFTRNDKLKIHMRKHTGERPYSCPHCPARFLHSYDLKNHMHLHTGDRPYECHLCHKAFAKEDHLQRHLKGQNCLEVRTRRRRKDDAPPHYPPPSTAAASPAGLDLSNGHLDTFRLSLARFWEQSAPTGPPVSTPGPPDDDEEEGAPTTPQAEGAMESS

SEQ ID NO: 13397 - protein, 2302 aa, Homo sapiens
MKGESKRITLVLQQPQSGGPQGHRHVVLGSLPGKIVLQGNQLAALTQAKNAQGQPAKVVTIQLQVQQPQQKIQIVPQPPSSQPQPQQPPSTQPVTLSSVQQAQIMGPGQSPGQRLSVPVKVVLQPQAGSSQGASSGLSVVKVLSASEVAALSSPASSAPHSGGKTGMEENRRLEHQKKQEKANRIVAEAIARARARGEQNIPRVLNEDELPSVRPEEEGEKKRRKKSAGERLKEEKPKKSKTSGASKTKGKSKLNTITPVVGKKRKRNTSSDNSDVEVMPAQSPREDEESSIQKRRSNRQVKRKKYTEDLDIKITDDEEEEEVDVTGPIKPEPILPEPVQEPDGETLPSMQFFVENPSEEDAAIVDKVLSMRIVKKELPSGQYTEAEEFFVKYKNYSYLHCEWATISQLEKDKRIHQKLKRFKTKMAQMRHFFHEDEEPFNPDYVEVDRILDESHSIDKDNGEPVIYYLVKWCSLPYEDSTWELKEDVDEGKIREFKRIQSRHPELKRVNRPQASAWKKLELSHEYKNRNQLREYQLEGVNWLLFNWYNRQNCILADEMGLGKTIQSIAFLQEVYNVGIHGPFLVIAPLSTITNWEREFNTWTEMNTIVYHGSLASRQMIQQYEMYCKDSRGRLIPGAYKFDALITTFEMILSDCPELREIEWRCVIIDEAHRLKNRNCKLLDSLKHMDLEHKVLLTGTPLQNTVEELFSLLHFLEPSQFPSESEFLKDFGDLKTEEQVQKLQAILKPMMLRRLKEDVEKNLAPKQETIIEVELTNIQKKYYRAILEKNFSFLSKGAGHTNMPNLLNTMMELRKCCNHPYLINGAEEKILTEFREACHIIPHDFHLQAMVRSAGKLVLIDKLLPKLKAGGHKVLIFSQMVRCLDILEDYLIQRRYLYERIDGRVRGNLRQAAIDRFSKPDSDRFVFLLCTRAGGLGINLTAADTCIIFDSDWNPQNDLQAQARCHRIGQSKAVKVYRLITRNSYEREMFDKASLKLGLDKAVLQSMSGRDGNITGIQQFSKKEIEDLLRKGAYAAIMEEDDEGSKFCEEDIDQILLRRTTTITIESEGKGSTFAKASFVASENRTDISLDDPNFWQKWAKKADLDMDLLNSKNNLVIDTPRVRKQTRHFSTLKDDDLVEFSDLESEDDERPRSRRHDRHHAYGRTDCFRVEKHLLVYGWGRWRDILSHGRFKRRMTERDVETICRAILVYCLLHYRGDENIKGFIWDLISPAENGKTKELQNHSGLSIPVPRGRKGKKVKSQSTFDIHKADWIRKYNPDTLFQDESYKKHLKHQCNKVLLRVRMLYYLRQEVIGDQAEKVLGGAIASEIDIWFPVVDQLEVPTTWWDSEADKSLLIGVFKHGYEKYNTMRADPALCFLEKAGRPDDKAIAAEHRVLDNFSDIVEGVDFDKDCEDPEYKPLQGPPKDQDDEGDPLMMMDEEISVIDGDEAQVTQQPGHLFWPPGSALTARLRRLVTAYQRSYKREQMKIEAAERGDRRRRRCEAAFKLKEIARREKQQRWTRREQTDFYRVVSTFGVEYDPDTMQFHWDRFRTFARLDKKTDESLTKYFHGFVAMCRQVCRLPPAAGDEPPDPNLFIEPITEERASRTLYRIELLRRLREQVLCHPLLEDRLALCQPPGPELPKWWEPVRHDGELLRGAARHGVSQTDCNIMQDPDFSFLAARMNYMQNHQAGAPAPSLSRCSTPLLHQQYTSRTASPLPLRPDAPVEKSPEETATQVPSLESLTLKLEHEVVARSRPTPQDYEMRVSPSDTTPLVSRSVPPVKLEDEDDSDSELDLSKLSPSSSSSSSSSSSSSSTDESEDEKEEKLTDQSRSKLYDEESLLSLTMSQDGFPNEDGEQMTPELLLLQERQRASEWPKDRVLINRIDLVCQAVLSGKWPSSRRSQEMVTGGILGPGNHLLDSPSLTPGEYGDSPVPTPRSSSAASMAEEEASAVSTAAAQFTKLRRGMDEKEFTVQIKDEEGLKLTFQKHKLMANGVMGDGHPLFHKKKGNRKKLVELEVECMEEPNHLDVDLETRIPVINKVDGTLLVGEDAPRRAELEMWLQGHPEFAVDPRFLAYMEDRRKQKWQRCKKNNKAELNCLGMEPVQTANSRNGKKGHHTETVFNRVLPGPIAPESSKKRARRMRPDLSKMMALMQGGSTGSLSLHNTFQHSSSGLQSVSSLGHSSATSASLPFMPFVMGGAPSSPHVDSSTMLHHHHHHPHPHHHHHHHPGLRAPGYPSSPVTTASGTTLRLPPLQPEEDDDEDEEDDDDLSQGYDSSERDFSLIDDPMMPANSDSSEDADD

SEQ ID NO: 13398 - protein, 116 aa, Homo sapiens
MWQLTSLLLFVATWGISGTPAPLDSVFSSSERAHQVLRIRKRANSFLEELRHSSLERECIEEICDFEEAKEIFQNVDDTLAFWSKHVDGDQCLVLPLEHPCASLCCGHGTCIDGIG

SEQ ID NO: 13399 - protein, 941 aa, Homo sapiens
MVFLPLKWSLATMSFLLSSLLALLTVSTPSWCQSTEASPKRSDGTPFPWNKIRLPEYVIPVHYDLLIHANLTTLTFWGTTKVEITASQPTSTIILHSHHLQISRATLRKGAGERLSEEPLQVLEHPRQEQIALLAPEPLLVGLPYTVVIHYAGNLSETFHGFYKSTYRTKEGELRILASTQFEPTAARMAFPCFDEPAFKASFSIKIRREPRHLAISNMPLVKSVTVAEGLIEDHFDVTVKMSTYLVAFIISDFESVSKITKSGVKVSVYAVPDKINQADYALDAAVTLLEFYEDYFSIPYPLPKQDLAAIPDFQSGAMENWGLTTYRESALLFDAEKSSASSKLGITMTVAHELAHQWFGNLVTMEWWNDLWLNEGFAKFMEFVSVSVTHPELKVGDYFFGKCFDAMEVDALNSSHPVSTPVENPAQIREMFDDVSYDKGACILNMLREYLSADAFKSGIVQYLQKHSYKNTKNEDLWDSMASICPTDGVKGMDGFCSRSQHSSSSSHWHQEGVDVKTMMNTWTLQKGFPLITITVRGRNVHMKQEHYMKGSDGAPDTGYLWHVPLTFITSKSDMVHRFLLKTKTDVLILPEEVEWIKFNVGMNGYYIVHYEDDGWDSLTGLLKGTHTAVSSNDRASLINNAFQLVSIGKLSIEKALDLSLYLKHETEIMPVFQGLNELIPMYKLMEKRDMNEVETQFKAFLIRLLRDLIDKQTWTDEGSVSERMLRSQLLLLACVHNYQPCVQRAEGYFRKWKESNGNLSLPVDVTLAVFAVGAQSTEGWDFLYSKYQFSLSSTEKSQIEFALCRTQNKEKLQWLLDESFKGDKIKTQEFPQILTLIGRNPVGYPLAWQFLRKNWNKLVQKFELGSSSIAHMVMGTTNQFSTRTRLEEVKGFFSSLKENGSQLRCVQQTIETIEENIGWMDKNFDKIRVWLQSEKLERM

SEQ ID NO: 13400 - protein, 236 aa, Homo sapiens
MDLQGRGVPSIDRLRVLLMLFHTMAQIMAEQEVENLSGLSTNPEKDIFVVRENGTTCLMAEFAAKFIVPYDVWASNYVDESHNMSKGPEATWRLSKVQFVYDSSEKTHFKDAVSAGKHTANSHHLSALVTPAGKSYECQAQQTISLASSDPQKTVTMILSAVHIQPFDIISDFVFSEEHKCPVDEREQLEETLPLILGLILGLVIMVTLAIYHVHHKMTANQVQIPRDRSQYKHMG

SEQ ID NO: 13401 - protein, 135 aa, Homo sapiens
MAAARPSLGRVLPGSSVLFLCDMQEKFRHNIAYFPQIVSVAARMLKNTTLDLLDRGLQVHVVVDACSSRSQVDRLVALARMRQSGAFLSTSEGLILQLVGDAVHPQFKEIQKLIKEPAPDSGLLGLFQGQNSLLH

SEQ ID NO: 13402 - protein, 1338 aa, Homo sapiens
MGAGGRRMRGAPARLLLPLLPWLLLLLAPEARGAPGCPLSIRSCKCSGERPKGLSGGVPGPARRRVVCSGGDLPEPPEPGLLPNGTVTLLLSNNKITGLRNGSFLGLSLLEKLDLRNNIISTVQPGAFLGLGELKRLDLSNNRIGCLTSETFQGLPRLLRLNISGNIFSSLQPGVFDELPALKVVDLGTEFLTCDCHLRWLLPWAQNRSLQLSEHTLCAYPSALHAQALGSLQEAQLCCEGALELHTHHLIPSLRQVVFQGDRLPFQCSASYLGNDTRIRWYHNRAPVEGDEQAGILLAESLIHDCTFITSELTLSHIGVWASGEWECTVSMAQGNASKKVEIVVLETSASYCPAERVANNRGDFRWPRTLAGITAYQSCLQYPFTSVPLGGGAPGTRASRRCDRAGRWEPGDYSHCLYTNDITRVLYTFVLMPINASNALTLAHQLRVYTAEAASFSDMMDVVYVAQMIQKFLGYVDQIKELVEVMVDMASNLMLVDEHLLWLAQREDKACSRIVGALERIGGAALSPHAQHISVNARNVALEAYLIKPHSYVGLTCTAFQRREGGVPGTRPGSPGQNPPPEPEPPADQQLRFRCTTGRPNVSLSSFHIKNSVALASIQLPPSLFSSLPAALAPPVPPDCTLQLLVFRNGRLFHSHSNTSRPGAAGPGKRRGVATPVIFAGTSGCGVGNLTEPVAVSLRHWAEGAEPVAAWWSQEGPGEAGGWTSEGCQLRSSQPNVSALHCQHLGNVAVLMELSAFPREVGGAGAGLHPVVYPCTALLLLCLFATIITYILNHSSIRVSRKGWHMLLNLCFHIAMTSAVFAGGITLTNYQMVCQAVGITLHYSSLSTLLWMGVKARVLHKELTWRAPPPQEGDPALPTPSPMLRFYLIAGGIPLIICGITAAVNIHNYRDHSPYCWLVWRPSLGAFYIPVALILLITWIYFLCAGLRLRGPLAQNPKAGNSRASLEAGEELRGSTRLRGSGPLLSDSGSLLATGSARVGTPGPPEDGDSLYSPGVQLGALVTTHFLYLAMWACGALAVSQRWLPRVVCSCLYGVAASALGLFVFTHHCARRRDVRASWRACCPPASPAAPHAPPRALPAAAEDGSPVFGEGPPSLKSSPSGSSGHPLALGPCKLTNLQLAQSQVCEAGAAAGGEGEPEPAGTRGNLAHRHPNNVHHGRRAHKSRAKGHRAGEACGKNRLKALRGGAAGALELLSSESGSLHNSPTDSYLGSSRNSPGAGLQLEGEPMLTPSEGSDTSAAPLSEAGRAGQRRSASRDSLKGGGALEKESHRRSYPLNAASLNGAPKGGKYDDVTLMGAEVASGGCMKTGLWKSETTV

SEQ ID NO: 13403 - protein, 117 aa, Homo sapiens
MDMRVPAQLLGLLLLWLRGARCDIQMTQSPSSLSASVGDRVTITCRASQSISSYLNWYQQKPGKAPKLLIYAASSLQSGVPSRFSGSGSGTDFTLTISSLQPEDFATYYCQQSYSTP

SEQ ID NO: 13404 - protein, 352 aa, Homo sapiens
MARHGLPLLPLLSLLVGAWLKLGNGQATSMVQLQGGRFLMGTNSPDSRDGDGPVREATVKPFAIDIFPVTNKDFRDFVREKKYRTEAEMFGWSFVFEDFVSDELRNKATQPMKSVLWWLPVEKAFWRQPAGPGSGIRERLEHPVLHVSWNDARAYCAWRGKRLPTEEEWEFAARGGLKGQVYPWGNWFQPNRTNLWQGKFPKGDKAEDGFHGVSPVNAFPAQNNYGLYDLLGNVWEWTASPYQAAEQDMRVLRGASWIDTADGSANHRARVTTRVLLCCPGWSAVAQSQLTTASNCQALAILPPQLLKYLGLQDGQHSRFSLRQPRFPLCCRRRPAARGAVSSRVVTRRKAF

SEQ ID NO: 13405 - protein, 494 aa, Homo sapiens
MAAAAECDVVMAATEPELLDDQEAKREAETFKEQGNAYYAKKDYNEAYNYYTKAIDMCPKNASYYGNRAATLMMLGRFREALGDAQQSVRLDDSFVRGHLREGKCHLSLGNAMAACRSFQRALELDHKNAQAQQEFKNANAVMEYEKIAETDFEKRDFRKVVFCMDRALEFAPACHRFKILKAECLAMLGRYPEAQSVASDILRMDSTNADALYVRGLCLYYEDCIEKAVQFFVQALRMAPDHEKACIACRNAKALKAKKEDGNKAFKEGNYKLAYELYTEALGIDPNNIKTNAKLYCNRGTVNSKLRKLDDAIEDCTNAVKLDDTYIKAYLRRAQCYMDTEQYEEAVRDYEKVYQTEKTKEHKQLLKNAQLELKKSKRKDYYKILGVDKNASEDEIKKAYRKRALMHHPDRHSGASAEVQKEEEKKFKEVGEAFTILSDPKKKTRYDSGQDLDEEGMNMGDFDPNNIFKAFFGGPGGFSFEASGPGNFFFQFG

SEQ ID NO: 13406 - protein, 591 aa, Homo sapiens
MTLTLSVLICLGLSVGPRTCVQAGTLPKPTLWAEPASVIARGKPVTLWCQGPLETEEYRLDKEGLPWARKRQNPLEPGAKAKFHIPSTVYDSAGRYRCYYETPAGWSEPSDPLELVATGFYAEPTLLALPSPVVASGGNVTLQCDTLDGLLTFVLVEEEQKLPRTLYSQKLPKGPSQALFPVGPVTPSCRWRFRCYYYYRKNPQVWSNPSDLLEILVPGVSRKPSLLIPQGSVVARGGSLTLQCRSDVGYDIFVLYKEGEHDLVQGSGQQPQAGLSQANFTLGPVSRSHGGQYRCYGAHNLSPRWSAPSDPLDILIAGLIPDIPALSVQPGPKVASGENVTLLCQSWHQIDTFFLTKEGAAHPPLCLKSKYQSYRHQAEFSMSPVTSAQGGTYRCYSAIRSYPYLLSSPSYPQELVVSGPSGDPSLSPTGSTPTPAGPEDQPLTPTGLDPQSGLGRHLGVVTGVSVAFVLLLFLLLFLLLRHRHQSKHRTSAHFYRPAGAAGPEPKDQGLQKRASPVADIQEEILNAAVKDTQPKDGVEMDAPAAASEAPQDVTYAQLHSLTLRREATEPPPSQEREPPAEPSIYAPLAIH

SEQ ID NO: 13407 - protein, 1312 aa, Homo sapiens
MGDPAPARSLDDIDLSALRDPAGIFELVEVVGNGTYGQVYKGRHVKTGQLAAIKVMDVTEDEEEEIKQEINMLKKYSHHRNIATYYGAFIKKSPPGNDDQLWLVMEFCGAGSVTDLVKNTKGNALKEDCIAYICREILRGLAHLHAHKVIHRDIKGQNVLLTENAEVKLVDFGVSAQLDRTVGRRNTFIGTPYWMAPEVIACDENPDATYDYRSDIWSLGITAIEMAEGAPPLCDMHPMRALFLIPRNPPPRLKSKKWSKKFIDFIDTCLIKTYLSRPPTEQLLKFPFIRDQPTERQVRIQLKDHIDRSRKKRGEKEETEYEYSGSEEEDDSHGEEGEPSSIMNVPGESTLRREFLRLQQENKSNSEALKQQQQLQQQQQRDPEAHIKHLLHQRQRRIEEQKEERRRVEEQQRREREQRKLQEKEQQRRLEDMQALRREEERRQAEREQEYKRKQLEEQRQSERLQRQLQQEHAYLKSLQQQQQQQQLQKQQQQQLLPGDRKPLYHYGRGMNPADKPAWAREVEERTRMNKQQNSPLAKSKPGSTGPEPPIPQASPGPPGPLSQTPPMQRPVEPQEGPHKSLQDQPTRNLAAFPASHDPDPAIPAPTATPSARGAVIRQNSDPTSEGPGPSPNPPAWVRPDNEAPPKVPQRTSSIATALNTSGAGGSRPAQAVRARPRSNSAWQIYLQRRAERGTPKPPGPPAQPPGPPNASSNPDLRRSDPGWERSDSVLPASHGHLPQAGSLERNRVGVSSKPDSSPVLSPGNKAKPDDHRSRPGRPADFVLLKERTLDEAPRPPKKAMDYSSSSEEVESSEDDEEEGEGGPAEGSRDTPGGRSDGDTDSVSTMVVHDVEEITGTQPPYGGGTMVVQRTPEEERNLLHADSNGYTNLPDVVQPSHSPTENSKGQSPPSKDGSGDYQSRGLVKAPGKSSFTMFVDLGIYQPGGSGDSIPITALVGGEGTRLDQLQYDVRKGSVVNVNPTNTRAHSETPEIRKYKKRFNSEILCAALWGVNLLVGTENGLMLLDRSGQGKVYGLIGRRRFQQMDVLEGLNLLITISGKRNKLRVYYLSWLRNKILHNDPEVEKKQGWTTVGDMEGCGHYRVVKYERIKFLVIALKSSVEVYAWAPKPYHKFMAFKSFADLPHRPLLVDLTVEEGQRLKVIYGSSAGFHAVDVDSGNSYDIYIPVHIQSQITPHAIIFLPNTDGMEMLLCYEDEGVYVNTYGRIIKDVVLQWGEMPTSVAYICSNQIMGWGEKAIEIRSVETGHLDGVFMHKRAQRLKFLCERNDKVFFASVRSGGSSQVYFMTLNRNCIMNW

SEQ ID NO: 13408 - protein, 932 aa, Homo sapiens
MKQLPAATVRLLSSSQIITSVVSVVKELIENSLDAGATSVDVKLENYGFDKIEVRDNGEGIKAVDAPVMAMKYYTSKINSHEDLENLTTYGFRGEALGSICCIAEVLITTRTAADNFSTQYVLDGSGHILSQKPSHLGQGTTVTALRLFKNLPVRKQFYSTAKKCKDEIKKIQDLLMSFGILKPDLRIVFVHNKAVIWQKSRVSDHKMALMSVLGTAVMNNMESFQYHSEESQIYLSGFLPKCDADHSFTSLSTPERSFIFINSRPVHQKDILKLIRHHYNLKCLKESTRLYPVFFLKIDVPTADVDVNLTPDKSQVLLQNKESVLIALENLMTTCYGPLPSTNSYENNKTDVSAADIVLSKTAETDVLFNKVESSGKNYSNVDTSVIPFQNDMHNDESGKNTDDCLNHQISIGDFGYGHCSSEISNIDKNTKNAFQDISMSNVSWENSQTEYSKTCFISSVKHTQSENGNKDHIDESGENEEEAGLENSSEISADEWSRGNILKNSVGENIEPVKILVPEKSLPCKVSNNNYPIPEQMNLNEDSCNKKSNVIDNKSGKVTAYDLLSNRVIKKPMSASALFVQDHRPQFLIENPKTSLEDATLQIEELWKTLSEEEKLKYEEKATKDLERYNSQMKRAIEQESQMSLKDGRKKIKPTSAWNLAQKHKLKTSLSNQPKLDELLQSQIEKRRSQNIKMVQIPFSMKNLKINFKKQNKVDLEEKDEPCLIHNLRFPDAWLMTSKTEVMLLNPYRVEEALLFKRLLENHKLPAEPLEKPIMLTESLFNGSHYLDVLYKMTADDQRYSGSTYLSDPRLTANGFKIKLIPGVSITENYLEIEGMANCLPFYGVADLKEILNAILNRNAKEVYECRPRKVISYLEGEAVRLSRQLPMYLSKEDIQDIIYRMKHQFGNEIKECVHGRPFFHHLTYLPETT

SEQ ID NO: 13409 - protein, 178 aa, Homo sapiens
MLHLHHSCLCFRSWLPAMLAVLLSLAPSASSDISASRPNILLLMADDLGIGDIGCYGNNTMRTPNIDRLAEDGVKLTQHISAASLCTPSRAAFLTGRYPVRSGMVSSIGYRVLQWTGASGGLPTNETTFAKILKEKGYATGLIGKWHLGLNCESASDHCHHPLHHGFDHFYGMPFSLM

SEQ ID NO: 13410 - protein, 216 aa, Homo sapiens
MVTSSFPISVAVFALITLQVGTQDSFIAAVYEHAVILPNKTETPVSQEDALNLMNENIDILETAIKQAAEQGARIIVTPEDALYGWKFTRETVFPYLEDIPDPQVNWIPCQDPHRFGHTPVQARLSCLAKDNSIYVLANLGDKKPCNSRDSTCPPNGYFQYNTNVVYNTEGKLVARYHKYHLYSEPQFNVPEKPELVTFNTAFGSLDERFAPFDSY

SEQ ID NO: 13411 - protein, 149 aa, Homo sapiens
MGAPLAVALGALHYLALFLQLGGATRPAGHAPWDNHVSGHALFTETPHDMTARTGEDVEMACSFRGSGSPSYSLEIQWWYVRSHRDWTDKQAWASNQVVKVVGSNISHKLRLSRVKPTDEGTYECRVIDFSDGKARHHKVKAYLRVQPG

SEQ ID NO: 13412 - protein, 417 aa, Homo sapiens; identical to SEQ ID NO: 3997

SEQ ID NO: 13413 - protein, 169 aa, Homo sapiens
MEAALLGLCNWSTLGVCAALKLPQISAVLAARSARGLSLPSLLLELAGFLVFLRYQCYYGYPPLTYLEYPILIAQDVILLLCIFHFNGNVKQATPYIAVLVSSWFILALQKWIIDLAMNLCTFISAASKFAQLQCLWKTRDSGTVSALTWSLSSYTCARSRSLSQAGVQ

SEQ ID NO: 13414 - protein, 38 aa, Homo sapiens
MKVHMHTKFCLICLLTFIFHHCNHCHEEHDHGPEALHR

SEQ ID NO: 13415 - protein, 79 aa, Homo sapiens
MLQNGKKFDSSRDRNKPFKFRIGKQEVIKGFEEGAAQMSLGQRAKLTCTPDVAYGATGHPGVIPPNATLIFDVELLNLE

SEQ ID NO: 13416 - protein, 346 aa, Homo sapiens [sequence omitted]

SEQ ID NO: 13417 - protein, 180 aa, Homo sapiens
MMKFKPNQTRTYDREGFKKRAACLCFRSEQEDEVLLVSSSRYPDQWIVPGGGMEPEEEPGGAAVREVYEEAGVKGKLGRLLGIFENQDRKHRTYVYVLTVTEILEDWEDSVNIGRKREWFKVEDAIKVLQCHKPVHAEYLEKLKLGCSPANGNSTVPSLPDNNALFVTAAQTSGLPSSVR

SEQ ID NO: 13418 - protein, 103 aa, Homo sapiens
MWCIVLFSLLAWVYAEPTMYGEILSPNYPQAYPSEVEKSWDIEVPEGYGIHLYFTHLDIELSENCAYDSVQIISGDTEEGRLCGQRSSNNPHSPIVEEFQVPY

SEQ ID NO: 13419 - protein, 461 aa, Homo sapiens
MKMASFLAFLLLNFRVCLLLLQLLMPHSAQFSVLGPSGPILAMVGEDADLPCHLFPTMSAETMELKWVSSSLRQVVNVYADGKEVEDRQSAPYRGRTSILRDGITAGKAALRIHNVTASDSGKYLCYFQDGDFYEKALVELKVADGVGLYAVAASVIMRGSSGEGVSCTIRSSLLGLEKTASISIADPFFRSAQRWIAALAGTLPVLLLLLGGAGYFLWQQQEEKKTQFRKKKREQELREMAWSTMKQEQSTRVKLLEELRWRSIQYASRGERHSAYNEWKKALFKPADVILDPKTANPILLVSEDQRSVQRAKEPQDLPDNPERFNWHYCVLGCESFISGRHYWEVEVGDRKEWHIGVCSKNVQRKGWVKMTPENGFWTMGLTDGNKYRTLTEPRTNLKLPKPPKKVGVFLDYETGDISFYNAVDGSHIHTFLDVSFSEALYPVFRILTLEPTALTICPA

SEQ ID NO: 13420 - protein, 136 aa, Homo sapiens
MAPFEPLASGILLLLWLIAPSRACTCVPPHPQTAFCNSDLVIRAKFVGTPEVNQTTLYQRYEIKMTKMYKGFQALGDAADIRFVYTPAMESVCGYFHRSHNRSEEFLIAGEAPSPRPVPHQPVPGARPSNHEGARL

SEQ ID NO: 13421 - protein, 325 aa, Homo sapiens
MLRNFIQTEAVVSKPFSLFDLSSVGLFGAETQQSKVAPSSAASRPVLSSRSDQSQKNEVFLDVVERLSVLIASNGSLLKVDVQGEIRLKSFLPSGSEMRIGLTEEFCVGKSELRGYGPGIRVDEVSFHSSVNLDEFESHRILRLQPPQGELTVMRYQLSDDLPSPLPFRLFPSVQWDRGSGRLQVYLKLRCDLLSKSQALNVRLHLPLPRGVVSLSQELSSPEQKAELAEGALRWDLPRVQGGSQLSGLFQMDVPGPPGPPSHGLSTSASPLGLGPASLSFELPRHTCSGLQVRFLRLAFRPCGNANPHKWVRHLSHSDAYVIRI

SEQ ID NO: 13422 - protein, 1130 aa, Homo sapiens
MAAAGQLCLLYLSAGLLSRLGAAFNLDTREDNVIRKYGDPGSLFGFSLAMHWQLQPEDKRLLLVGAPRAEALPLQRANRTGGLYSCDITARGPCTRIEFDNDADPTSESKEDQWMGVTVQSQGPGGKVVTCAHRYEKRQHVNTKQESRDIFGRCYVLSQNLRIEDDMDGGDWSFCDGRLRGHEKFGSCQQGVAATFTKDFHYIVFGAPGTYNWKGIVRVEQKNNTFFDMNIFEDGPYEVGGETEHDESLVPVPANSYLGLLFLTSVSYTDPDQFVYKTRPPREQPDTFPDVMMNSYLGFSLDSGKGIVSKDEITFVSGAPRANHSGAVVLLKRDMKSAHLLPEHIFDGEGLASSFGYDVAVVDLNKDGWQDIVIGAPQYFDRDGEVGGAVYVYMNQQGRWNNVKPIRLNGTKDSMFGIAVKNIGDINQDGYPDIAVGAPYDDLGKVFIYHGSANGINTKPTQVLKGISPYFGYSIAGNMDLDRNSYPDVAVGSLSDSVTIFRSRPVINIQKTITVTPNRIDLRQKTACGAPSGICLQVKSCFEYTANPAGYNPSISIVGTLEAEKERRKSGLSSRVQFRNQGSEPKYTQELTLKRQKQKVCMEETLWLQDNIRDKLRPIPITASVEIQEPSSRRRVNSLPEVLPILNSDEPKTAHIDVHFLKEGCGDDNVCNSNLKLEYKFCTREGNQDKFSYLPIQKGVPELVLKDQKDIALEITVTNSPSNPRNPTKDGDDAHEAKLIATFPDTLTYSAYRELRAFPEKQLSCVANQNGSQADCELGNPFKRNSNVTFYLVLSTTEVTFDTPDLDINLKLETTSNQDNLAPITAKAKVVIELLLSVSGVAKPSQVYFGGTVVGEQAMKSEDEVGSLIEYEFRVINLGKPLTNLGTATLNIQWPKEISNGKWLLYLVKVESKGLEKVTCEPQKEINSLNLTESHNSRKKREITEKQIDDNRKFSLFAERKYQTLNCSVNVNCVNIRCPLRGLDSKASLILRSRLWNSTFLEEYSKLNYLDILMRAFIDVTAAAENIRLPNAGTQVRVTVFPSKTVAQYSGVPWWIILVAILAGILMLALLVFILWKCGFFKRSRYDDSVPRYHAVRIRKEEREIKDEKYIDNLEKKQWITKWNENESYS

SEQ ID NO: 13423 - protein, 121 aa, Homo sapiens
MRFMTLLFLTALAGALVCAYDPEAASAPGSGNPCHEASAAQKENAGEDPGLARQAPKPRKQRSSLLEKGLDGAKKAVGGLGKLGKDAVEDLESVGKGGEERLVFGAPVNLTSIPLTSVSRP

SEQ ID NO: 13424 - protein, 642 aa, Homo sapiens
MSRSPDAKEDPVECPLCMEPLEIDDINFFPCTCGYQICRFCWHRIRTDENGLCPACRKPYPEDPAVYKPLSQEELQRIKNEKKQKQNERKQKISENRKHLASVRVVQKNLVFVVGLSQRLADPEVLKRPEYFGKFGKIHKVVINNSTSYAGSQGPSASAYVTYIRSEDALRAIQCVNNVVVDGRTLKASLGTTKYCSYFLKNMQCPKPDCMYLHELGDEAASFTKEEMQAGKHQEYEQKLLQELYKLNPNFLQLSTGSVDKNKNKVTPLQRYDTPIDKPSDSLSIGNGDNSQQISNSDTPSPPPGLSKSNPVIPISSSNHSARSPFEGAVTESQSLFSDNFRHPNPIPSGLPPFPSSPQTSSDWPTAPEPQSLFTSETIPVSSSTDWQAAFGFGSSKQPEDDLGFDPFDVTRKALADLIEKELSVQDQPSLSPTSLQNSSSHTTTAKGPGSGFLHPAAATNANSLNSTFSVLPQRFPQFQQHRAVYNSFSFPGQAARYPWMAFPRNSIMHLNHTANPTSNSNFLDLNLPPQHNTGLGGIPVAGIPASSGNSLDSLQDDNPPHWLKSLQALTEMDGPSAAPSQTHHSAPFSTQIPLHRASWNPYPPPSNPSSFHSPPPGFQTAFRPPSKTPTDLLQSSTLDRH

SEQ ID NO: 13425 - protein, 190 aa, Homo sapiens
MGPLPRTVELFYDVLSPYSWLGFEILCRYQNIWNINLQLRPSLITGIMKDSGNKPPGLLPRKGLYMANDLKLLRHHLQIPIHFPKDFLSVMLEKGSLSAMRFLTAVNLEHPEMLEKASRELWMRVWSRNEDITEPQSILAAAEKAGMSAEQAQGLLEKIATPKVKNQLKETTEAACRYGERSGWALYLQP

SEQ ID NO: 13426 - protein, 2439 aa, Homo sapiens
MVQRWLLLSCCGALLSAGLANTSYTSPGLQRLKDSPQTAPDKGQCSTWGAGHFSTFDHHVYDFSGTCNYIFAATCKDAFPTFSVQLRRGPDGSISRIIVELGASVVTVSEAIISVKDIGVISLPYTSNGLQITPFGQSVRLVAKQLELELEVVWGPDSHLMVLVERKYMGQMCGLCGNFDGKVTNEFVSEEGKFLEPHKFAALQKLDDPGEICTFQDIPSTHVRQAQHARICTQLLTLVAPECSVSKEPFVLSCQADVAAAPQPGPQNSSCATLSEYSRQCSMVGQPVRRWRSPGLCSVGQCPANQVYQECGSACVKTCSNPQHSCSSSCTFGCFCPEGTVLNDLSNNHTCVPVTQCPCVLHGAMYAPGEVTIAACQTCRCTLGRWVCTERPCPGHCSLEGGSFVTTFDARPYRFHGTCTYILLQSPQLPEDGALMAVYDKSGVSHSETSLVAVVYLSRQDKIVISQDEVVTNNGEAKWLPYKTRNITVFRQTSTHLQMATSFGLELVVQLRPIFQAYVTVGPQFRGQTRGLCGNFNGDTTDDFTTSMGIAEGTASLFVDSWRAGNCPAALERETDPCSMSQLNKVCAETHCSMLLRTGTVFERCHATVNPAPFYKRCVYQACNYEETFPHICAALGDYVHACSLRGVLLWGWRSSVDNCTIPCTGNTTFSYNSQACERTCLSLSDRATECHHSAVPVDGCNCPDGTYLNQKGECVRKAQCPCILEGYKFILAEQSTVINGITCHCINGRLSCPQRPQMFLASCQAPKTFKSCSQSSENKFGAACAPTCQMLATGVACVPTKCEPGCVCAEGLYENADGQCVPPEECPCEFSGVSYPGGAELHTDCRTCSCSRGRWACQQGTHCPSTCTLYGEGHVITFDGQRFVFDGNCEYILATDVCGVNDSQPTFKILTENVICGNSGVTCSRAIKIFLGGLSVVLADRNYTVTGEEPHVQLGVTPGALSLVVDISIPGRYNLTLIWNRHMTILIRIARASQDPLCGLCGNFNGNMKDDFETRSRYVASSELELVNSWKESPLCGDVSFVTDPCSLNAFRRSWAERKCSVINSQTFATCHSKVYHLPYYEACVRDACGCDSGGDCECLCDAVAAYAQACLDKGVCVDWRTPAFCPIYCGFYNTHTQDGHGEYQYTQEANCTWHYQPCLCPSQPQSVPGSNIEGCYNCSQDEYFDHEEGVCVPCMPPTTPQPPTTPQLPTTGSRPTQVWPMTGTSTTIGLLSSTGPSPSSNHTPASPTQTPLLPATLTSSKPTASSGEPPRPTTAVTPQATSGLPPTATLRSTATKPTVTQATTRATASTASPATTSTAQSTTRTTMTLPTPATSGTSPTLPKSTNQELPGTTATQTTGPRPTPASTTGPTTPQPGQPTRPTATETTQTRTTTEYTTPQTPHTTHSPPTAGSPVPSTGPVTATSFHATTTYPTPSHPETTLPTHVPPFSTSLVTPSTHTVITPTHAQMATSASNHSAPTGTIPPPTTLKATGSTHTAPPITPTTSGTSQAHSSFSTNKTPTSLHSHTSSTHHPEVTPTSTTTITPNPTSTRTRTPVAHTNSATSSRPPPPFTTHSPPTGSSPFSSTGPMTATSFKTTTTYPTPSHPQTTLPTHVPPFSTSLVTPSTHTVITPTHAQMATSASIHSMPTGTIPPPTTLKATGSTHTAPTMTLTTSGTSQALSSLNTAKTSTSLHSHTSSTHHAEATSTSTTNITPNPTSTGTPPMTVTTSGTSQSRSSFSTAKTSTSLHSHTSSTHHPEVTSTSTTSITPNHTSTGTRTPVAHTTSATSSRLPTPFTTHSPPTGTTPISSTGPVTATSFQTTTTYPTPSHPHTTLPTHVPSFSTSLVTPSTHTVIIPTHTQMATSASIHSMPTGTIPPPTTIKATGSTHTAPPMTPTTSGTSQSPSSFSTAKTSTSLPYHTSSTHHPEVTPTSTTNITPKHTSTGTRTPVAHTTSASSSRLPTPFTTHSPPTGSSPFSSTGPMTATSFQTTTTYPTPSHPQTTLPTHVPPFSTSLVTPSTHTVIITTHTQMATSASIHSTPTGTVPPPTTLKATGSTHTAPPMTVTTSGTSQTHSSFSTATASSSFISSSSWLPQNSSSRPPSSPITTQLPHLSSATTPVSTTNQLSSSFSPSPSAPSTVSSYVPSSHSSPQTSSPSVGTSSSFVSAPVHSTTLSSGSHSSLSTHPTTASVSASPLFPSSPAASTTIRATLPHTISSPFTLSALLPISTVTVSPTPSSHLASSTIAFPSTPRTTASTHTAPAFSSQSTTSRSTSLTTRVPTSGFVSLTSGVTGIPTSPVTNLTTRHPGPTLSPTTRFLTSSLTAHGSTPASAPVSSLGTPTPTSPGVCSVREQQEEITFKGCMANVTVTRCEGACISAASFNIITQQVDARCSCCRPLHSYEQQLELPCPDPSTPGRRLVLTLQVFSHCVCSSVACGD

SEQ ID NO: 13427 - protein, 339 aa, Homo sapiens
MTEGVKTLGWTKQKGGCHWGRSEGAGESGKSTIVKQMKIIHEDGYSEEECRQYRAVVYSNTIQSIMAIVKAMGNLQIDFADPSRADDARQLFALSCTAEEQGVLPDDLSGVIRRLWADHGVQACFGRSREYQLNDSAAYYLNDLERIAQSDYIPTQQDVLRTRVKTTGIVETHFTFKDLHFKMFDVGGQRSERKKWIHCFEGVTAIIFCVALSAYDLVLAEDEEMNRMHESMKLFDSICNNKWFTDTSIILFLNKKDLFEEKITHSPLTICFPEYTGANKYDEAASYIQSKFEDLNKRKDTKEIYTHFTCATDTKNVQFVFDAVTDVIIKNNLKDCGLF

SEQ ID NO: 13428 - protein, 264 aa, Homo sapiens
MRPLLGLLLVFAGCTFALYLLSTRLPRGRRLGSTEEAGGRSLWFPSDLAELRELSEVLREYRKEHQAYVFLLFCGAYLYKQGFAIPGSSFLNVLAGALFGPWLGLLLCCVLTSVGATCCYLLSSIFGKQLVVSYFPDKVALLQRKVEENRNSLFFFLLFLRLFPMTPNWFLNLSAPILNIPIVQFFFSVLIGLIPYNFICVQTGSILSTLTSLDALFSWDTVFKLLAIAMVALIPGTLIKKFSQKHLQLNETSTANHIHSRKDT

SEQ ID NO: 13429 - protein, 1192 aa, Homo sapiens
MAACGRVRRMFRLSAALHLLLLFAAGAEKLPGQGVHSQGQGPGANFVSFVGQAGGGGPAGQQLPQLPQSSQLQQQQQQQQQQQQPQPPQPPFPAGGPPARRGGAGAGGGWKLAEEESCREDVTRVCPKHTWSNNLAVLECLQDVRELLWNYKLNLTTDPKFESVAREVCKSTITEIKECADEPVGKGYMVSCLVDHRGNITEYQCHQYITKMTAIIFSDYRLICGFMDDCKNDINILKCGSIRLGEKDAHSQGEVVSCLEKGLVKEAEEREPKIQVSELCKKAILRVAELSSDDFHLDRHLYFACRDDRERFCENTQAGEGRVYKCLFNHKFEESMSEKCREALTTRQKLIAQDYKVSYSLAKSCKSDLKKYRCNVENLPRSREARLSYLLMCLESAVHRGRQVSSECQGEMLDYRRMLMEDFSLSPEIILSCRGEIEHHCSGLHRKGRTLHCLMKVVRGEKGNLGMNCQQALQTLIQETDPGADYRIDRALNEACESVIQTACKHIRSGDPMILSCLMEHLYTEKMVEDCEHRLLELQYFISRDWKLDPVLYRKCQGDASRLCHTHGWNETSEFMPQGAVFSCLYRHAYRTEEQGRRLSRECRAEVQRILHQRAMDVKLDPALQDKCLIDLGKWCSEKTETGQELECLQDHLDDLVVECRDIVGNLTELESEDIQIEALLMRACEPIIQNFCHDVADNQIDSGDLMECLIQNKHQKDMNEKCAIGVTHFQLVQMKDFRFSYKFKMACKEDVLKLCPNIKKKVDVVICLSTTVRNDTLQEAKEHRVSLKCRRQLRVEELEMTEDIRLEPDLYEACKSDIKNFCSAVQYGNAQIIECLKENKKQLSTRCHQKVFKLQETEMMDPELDYTLMRVCKQMIKRFCPEADSKTMLQCLKQNKNSELMDPKCKQMITKRQITQNTDYRLNPMLRKACKADIPKFCHGILTKAKDDSELEGQVISCLKLRYADQRLSSDCEDQIRIIIQESALDYRLDPQLQLHCSDEISSLCAEEAAAQEQTGQVEECLKVNLLKIKTELCKKEVLNMLKESKADIFVDPVLHTACALDIKHHCAAITPGRGRQMSCLMEALEDKRVRLQPECKKRLNDRIEMWSYAAKVAPADGFSDLAMQVMTSPSKNYILSVISGSICILFLIGLMCGRITKRVTRELKDRLQYRSETMAYKGLVWSQDVTGSPA

SEQ ID NO: 13430 - protein, 294 aa, Homo sapiens
MAGLTAAAPRPGVLLLLLSILHPSRPGGVPGAIPGGVPGGVFYPGAGLGALGGGALGPGGKPLKPGLGAFPAVTFPGALVPGGVADAAAAYKAAKAGAGLGGVPGVGGLGVSAGAVVPQPGAGVKPGKVPGVGLPGVYPGGVLPGARFPGVGVLPGVPTGAGVKPKAPGVGPFGGPQPGVPLGYPIKAPKLPGGYGLPYTTGKLPYGYGPGGVAGAAGKAGYPTGTGVGPQAAAAAAAKAAAKFGAGAAGVLPGVGGAGVPGVPGAIPGIGGIAGVGTPAAAAAAAAAAKAAKY

SEQ ID NO: 13431 - protein, 540 aa, Homo sapiens
MKIAHRGPDAFRFENVNGYTNCCFGFHRLAVVDPLFGMQPIRVKKYPYLWLCYNGEIYNHKKMQQHFEFEYQTKVDGEIILHLYDKGGIEQTICMLDGVFAFVLLDTANKKVFLGRDTYGVRPLFKAMTEDGFLAVCSEAKGLVTLKHSATPFLKVEPFLPGHYEVLDLKPNGKVASVEMVKYHHCRDVPLHALYDNVEKLFPGFEIETVKNNLRILFNNAVKKRLMTDRRIGCLLSGGLDSSLVAATLLKQLKEAQVQYPLQTFAIGMEDSPDLLAARKVADHIGSEHYEVLFNSEEGIQALDEVIFSLETYDITTVRASVGMYLISKYIRKNTDSVVIFSGEGSDELTQGYIYFHKAPSPEKAEEESERLLRELYLFDVLRADRTTAAHGLELRVPFLDHRFSSYYLSLPPEMRIPKNGIEKHLLRETFEDSNLIPKEILWRPKEAFSDGITSVKNSWFKILQEYVEHQVDDAMMANAAQKFPFNTPKTKEGYYYRQVFERHYPGRADWLSHYWMPKWINATDPSARTLTHYKSAVKA

SEQ ID NO: 13432 - protein, 171 aa, Homo sapiens
MTSQSSVISNSCVTMERLSHMMERKAWCSQESALSEEEEDTTRPLETVTFKDVAVDLTQEEWEQMKPAQRNLYRDVMLENYSNLVTVGCQVTKPDVIFKLEQEEEPWVMEEEMFGRHCPEPRRGENCCASEVMAEMEFCPCCPGWSAMARSQLTATSASRVEVILLPQPPE

SEQ ID NO: 13433 - protein, 119 aa, Homo sapiens
MKVLLRLICFIALLISSLEADKCKEREEKIILVSSANEIDVRPCPLNPNEHKGTITWYKDDSKTPVSTEQASRIHQHKEKLWFVPAKVEDSGHYYCVVRIANLYFLTIYTLVESKIGSS

SEQ ID NO: 13434 - protein, 383 aa, Homo sapiens
MAAVAPAGPGDSASAALDELSLNFTYGAPGAGNGSLSGDWYRRNQIHLFGVLLAILGNLVISISLNIQKYSHLQLAQQEHPRPYFKSVLWWGGVLLMAVGETGNFAAYGFAPITLIAPLGCVSVTGSAIISVTFLKDNLRASDLLGTTLAFAGTYLLVNFAPNITQAISARTVQYYLVGWQFLIYVILEILIFCILLYFYKRKGMKHMVILLTLVAILASLTVISVKAVSGMITFSVMDKMQLTYPIFYIMFIIMIASCVFQVKFLNQATKLYNTTTVVPVNHIFFTISAIIAGIIFYQEFLGAPFLTVFIYLFGCFLSFLGVFLVTRNREKEHLQQSYIDFGNIPGKQMLDKIQPDSHSLSYGTLPDGSDSTKSQSGEKKEV

SEQ ID NO: 13435 - protein, 168 aa, Homo sapiens
MVFAFWKVFLILSCLAGQVSVVQVTIPDGFVNVTVGSNVTLICIYTTTVASREQLSIQWSFFHKKEMEPISHSSCLSTEGMEEKAVSQCLKMTHARDARGRCSWTSEIYFSQGGQAVAIGQFKDRITGSNDPGNASITISHMQPADSGIYICDVNNPPDFLGQNQGIL

SEQ ID NO: 13436 - protein, 543 aa, Homo sapiens
MLGFLSRGPSMKLCMGLACVLSLWNTVSGIKGEAKKEKGMTFLPTTGKWVIRAPFQLTCLEIKMLRRKKMGHSRAALNPDLLLSGLREEERKEKGVAFLATTELPARSIDLSALNLTELVNGMLSRALKDSKKFFSLLSVTSYSSFAFHKFSVAVYNISNLKTVDPAKFPTRYCYCLNNRTNDLSDFTALLVDIIGNSTSYLTEIFKSTSILSVNQSNESDCIFICVMTGKSGRNLSDFWEIEEKYPIINYTFTSGLSGVLGAATRGTARTSKPTTKSQKTLPSTSPGHWTQSTPWASALRSSPWTETAAPSETEETLNTGRPPELPARATATWFSASHTLPALATRRVARTQWLTADRQTWASISSVPWAQTISEKKPGGSLWETRSSPPTTAGTEEAMNTTSLLAPAAEIMATPGSPSQASPTLGAFTHGTQTPSPTKATAPRYPQTGDLSAEWPFTAGEEPVLVPRPHQVSRCPQPLFKVGAMAAAPLTLAIQRLNPCLMELCQFFQQCLCMSQRSPRTEDMSSFINPYQSSTSKISWKT

SEQ ID NO: 13437 - protein, 315 aa, Homo sapiens
MKVLLLTGLGALFFAYYWDDNFDPASLQGARVLLTGANAGVGEELAYHYARLGSHLVLTAHTEALLQKVVGNCRKLGAPKVFYIAADMASPEAPESVVQFALDKLGGLDYLVLNHIGGAPAGTRARSPQATRWLMQVNFVSYVQLTSRALPSLTDSKGSLVVVSSLLGRVPTSFSTPYSAAKFALDGFFGSLRRELDVQDVNVAITMCVLGLRDRASAAEAVRSSTSRPRQPEHRGVPLQSQTAMFLPPTVPGARTLTETPLRGWPQPKMKSSRQKSKTEKNDGHLEPVTAWEVQVPRVRRLCRGLARPHLFGHD

SEQ ID NO: 13438 - protein, 607 aa, Homo sapiens
MADNLSDTLKKLKITAVDKTEDSLEGCLDCLLQALAQNNTETSEKIQASGILQLFASLLTPQSSCKAKVANIIAEVAKNEFMRIPCVDAGLISPLVQLLNSKDQEVLLQTGRALGNICYDSHEGRSAVDQAGGAQIVIDHLRSLCSITDPANEKLLTVFCGMLMNYSNENDSLQAQLINMGVIPTLVKLLGIHCQNAALTEMCLVAFGNLAELESSKEQFASTNIAEELVKLFKKQIEHDKREMIFEVLAPLAENDAIKLQLVEAGLVECLLEIVQQKVDSDKEDDITELKTGSDLMVLLLLGDESMQKLFEGGKGSVFQRVLSWIPSNNHQLQLAGALAIANFARNDANCIHMVDNGIVEKLMDLLDRHVEDGNVTVQHAALSALRNLAIPVINKAKMLSAGVTEAVLKFLKSEMPPVQFKLLGTLRMLIDAQEAAEQLGKNVKLVERLVEWCEAKDHAGVMGESNRLLSALIRHSKSKDVIKTIVQSGGIKHLVTMATSEHVIMQNEALVALALIAALELGTAEKDLESAKLVQILHRLLADERSAPEIKYNSMVLICALMGSECLHKEVQDLAFLDVVSKLRSHENKSVAQQASLTEQRLTVES

SEQ ID NO: 13439 - protein, 752 aa, Homo sapiens
MARHLLLPLVMLVISPIPGAFQDSALSPTQEEPEDLDCGRPEPSARIVGGSNAQPGTWPWQVSLHHGGGHICGGSLIAPSWVLSAAHCFMTNGTLEPAAEWSVLLGVHSQDGPLDGAHTRAVAAIVVPANYSQVELGADLALLRLASPASLGPAVWPVCLPRASHRFVHGTACWATGWGDVQEADPLPLPWVLQEVELRLLGEATCQCLYSQPGPFNLTLQILPGMLCAGYPEGRRDTCQGDSGGPLVCEEGGRWFQAGITSFGFGCGRRNRPGVFTAVATYEAWIREQVMGSEPGPAFPTQPQKTQSDPQEPREENCTIALPECGKAPRPGAWPWEAQVMVPGSRPCHGALVSESWVLAPASCFLDPNSSDSPPRDLDAWRVLLPSRPRAERVARLVQHENASWDNASDLALLQLRTPVNLSAASRPVCLPHPEHYFLPGSRCRLARWGRGEPALGPGALLEAELLGGWWCHCLYGRQGAAVPLPGDPPHALCPAYQEKEEVGSCWNDSRWSLLCQEEGTWFLAGIRDFPSGCLRPRAFFPLQTHGPWISHVTRGAYLEDQLAWDWGPDGEETETQTCPPHTEHGACGLRLEAAPVGVLWPWLAEVHVAGDRVCTGILLAPGWVLAATHCVLRPGSTTVPYIEVYLGRAGASSLPQGHQMTSAPPLLCQMTEGSWILVGMAVQGSRELFAAIGPEEAWISQTVGEANFLPPSGSPHWPTGGSNLCPPELAKASGSPHAVYFLLLLTLLIQS

SEQ ID NO: 13440 - protein, 736 aa, Homo sapiens
MASIMEGPLSKWTNVMKGWQYRWFVLDYNAGLLSYYTSKDKMMRGSRRGCVRLRGAVIGIDDEDDSTFTITVDQKTFHFQARDADEREKWIHALEETILRHTLQLQGLDSGFVPSVQDFDKKLTEADAYLQILIEQLKLFDDKLQNCKEDEQRKKIETLKETTNSMVESIKHCIVLLQIAKDQSNAEKHADGMISTINPVDAIYQPSPLEPVISTMPSQTVLPPEPVQLCKSEQRPSSLPVGPVLATLGHHQTPTPNSTGSGHSPPSSSLTSPSHVNLSPNTVPEFSYSSSEDEFYDADEFHQSGSSPKRLIDSSGSASVLTHSSSGNSLKRPDTTESLNSSLSNGTSDADLFDSHDDRDDDAEAGSVEEHKSVIMHLLSQVRLGMDLTKVVLPTFILERRSLLEMYADFFAHPDLFVSISDQKDPKDRMVQVVKWYLSAFHAGRKGSVAKKPYNPILGEIFQCHWTLPNDTEENTELVSEGPVPWVSKNSVTFVAEQVSHHPPISAFYAECFNKKIQFNAHIWTKSKFLGMSIGVHNIGQGCVSCLDYDEHYILTFPNGYGRSILTVPWVELGGECNINCSKTGYSANIIFHTKPFYGGKKHRITAEIFSPNDKKSFCSIEGEWNGVMYAKYATGENTVFVDTKKLPIIKKKVRKLEDQNEYESRSLWKDVTFNLKIRDIDAATEAKHRLEERQRAEARERKEKEIQWETRLFHEDGECWVYDEPLLKRLGAAKH

SEQ ID NO: 13441 - protein, 897 aa, Homo sapiens
MDWQPDEQGLQQVLQLLKDSQSPNTATQRIVQDKLKQLNQFPDFNNYLIFVLTRLKSEDEPTRSLSGLILKNNVKAHYQSFPPPVADFIKQECLNNIGDASSLIRATIGILITTIASKGELQMWPELLPQLCNLLNSEDYNTCEGAFGALQKICEDSSELLDSDALNRPLNIMIPKFLQFFKHCSPKIRSHAIACVNQFIMDRAQALMDNIDTFIEHLFALAVDDDPEVRKNVCRALVMLLEVRIDRLIPHMHSIIQYMLQRTQDHDENVALEACEFWLTLAEQPICKEVLASHLVQLIPILVNGMKYSEIDIILLKGDVEEDEAVPDSEQDIKPRFHKSRTVTLPHEAERPDGSEDAEDDDDDDALSDWNLRKCSAAALDVLANVFREELLPHLLPLLKGLLFHPEWVVKESGILVLGAIAEGCMQGMVPYLPELIPHLIQCLSDKKALVRSIACWTLSRYAHWVVSQPPDMHLKPLMTELLKRILDGNKRVQEAACSAFATLEEEACTELVPYLSYILDTLVFAFGKYQHKNLLILYDAIGTLADSVGHHLNQPEYIQKLMPPLIQKWNELKDEDKDLFPLLECLSSVATALQSGFLPYCEPVYQRCVTLVQKTLAQAMMYTQHPEQYEAPDKDFMIVALDLLSGLAEGLGGHVEQLVARSNIMTLLFQCMQDSMPEVRQSSFALLGDLTKACFIHVKPCIAEFMPILGTNLNPEFISVCNNATWAIGEICMQMGAEMQPYVQMVLNNLVEIINRPNTPKTLLENTGRLTSPSAIPAITIGRLGYVCPQEVAPMLQQFIRPWCTSLRNIRDNEEKDSAFRGICMMIGVNPGGVVQDFIFFCDAVASWVSPKDDLRDMFYKILHGFKDQVGEDNWQQFSEQFPPLLKERLAAFYGV

SEQ ID NO: 13442 - protein, 525 aa, Homo sapiens
MGWLFLKVLLAGVSFSGFLYPLVDFCISGKTRGQKPNFVIILADDMGWGDLGANWAETKDTANLDKMASEGMRFVDFHAAASTCSPSRASLLTGRLGLRNGVTRNFAVTSVGGLPLNETTLAEVLQQAGYVTGIIGKWHLGHHGSYHPNFRGFDYYFGIPYSHDMGCTDTPGYNHPPCPACPQGDGPSRNLQRDCYTDVALPLYENLNIVEQPVNLSSLAQKYAEKATQFIQRASTSGRPFLLYVALAHMHVPLPVTQLPAAPRGRSLYGAGLWEMDSLVGQIKDKVDHTVKENTFLWFTGDNGPWAQKCELAGSVGPFTGFWQTRQGGSPAKQTTWEGGHRVPALAYWPGRVPVNVTSTALLSVLDIFPTVVALAQASLPQGRRFDGVDVSEVLFGRSQPGHRVLFHPNSGAAGEFGALQTVRLERYKAFYITGGARACDGSTGPELQHKFPLIFNLEDDTAEAVPLERGGAEYQAVLPEVRKVLADVLQDIANDNISSADYTQDPSVTPCCNPYQIACRCQAA

SEQ ID NO: 13443 - protein, 213 aa, Homo sapiens
MREWWVQVGLLAVPLLAAYLHIPPPQLSPALHSWKSSGKFFTYKGLRIFYQDSVGVVGSPEIVVLLHGFPTSSYDWYKIWEGLTLRFHRVIALDFLGFGFSDKPRPHHYSIFEQASIVEALLRHLGLQNRRINLLSHDYGDIVAQELLYRYKQNRSGRLTIKSLCLSNGGIFPETHRPLLLQKLLKDGGVLSPILTRLMNFFVFSRGLTPVFG

SEQ ID NO: 13444 - protein, 2485 aa, Homo sapiens
MHVSLAEALEVRGGPLQEEEIWAVLNQSAESLQELFRKVSLADPAALGFIISPWSLLLLPSGSVSFTDENISNQDLRAFTAPEVLQNQSLTSLSDVEKIHIYSLGMTLYWGADYEVPQSQPIKLGDHLNSILLGMCEDVIYARVSVRTVLDACSAHIRNSNCAPSFSYVKHLVKLVLGNLSGTDQLSCNSEQKPDRSQAIRDRLRGKGLPTGRSSTSDVLDIQKPPLSHQTFLNKGLSKSMGFLSIKDTQDENYFKDILSDNSGREDSENTFSPYQFKTSGPEKKPIPGIDVLSKKKIWASSMDLLCTADRDFSSGETATYRRCHPEAVTVRTSTTPRKKEARYSDGSIALDIFGPQKMDPIYHTRELPTSSAISSALDRIRERQKKLQVLREAMNVEEPVRRYKTYHGDVFSTSSESPSIISSESDFRQVRRSEASKRFESSSGLPGVDETLSQGQSQRPSRQYETPFEGNLINQEIMLKRQEEELMQLQAKMALRQSRLSLYPGDTIKASMLDITRDPLREIALETAMTQRKLRNFFGPEFVKMTIEPFISLDLPRSILTKKGKNEDNRRKVNIMLLNGQRLELTCDTKTICKDVFDMVVAHIGLVEHHLFALATLKDNEYFFVDPDLKLTKVAPEGWKEEPKKKTKATVNFTLFFRIKFFMDDVSLIQHTLTCHQYYLQLRKDILEERMHCDDETSLLLASLALQAEYGDYQPEVHGVSYFRMEHYLPARVMEKLDLSYIKEELPKLHNTYVGASEKETELEFLKVCQRLTEYGVHFHRVHPEKKSQTGILLGVCSKGVLVFEVHNGVRTLVLRFPWRETKKISFSKKKITLQNTSDGIKHGFQTDNSKICQYLLHLCSYQHKFQLQMRARQSNQDAQDIERASFRSLNLQAESVRGFNMGRAISTGSLASSTLNKLAVRPLSVQAEILKRLSCSELSLYQPLQNSSKEKNDKASWEEKPREMSKSYHDLSQASLYPHRKNVIVNMEPPPQTVAELVGKPSHQMSRSDAESLAGVTKLNNSKSVASLNRSPERRKHESDSSSIEDPGQAYVLGMTMHSSGNSSSQVPLKENDVLHKRWSIVSSPEREITLVNLKKDAKYGLGFQIIGGEKMGRLDLGIFISSVAPGGPADLDGCLKPGDRLISVNSVSLEGVSHHAAIEILQNAPEDVTLVISQPKEKISKVPSTPVHLTNEMKNYMKKSSYMQDSAIDSSSKDHHWSRGTLRHISENSFGPSGGLREGSLSSQDSRTESASLSQSQVNGFFASHLGDQTWQESQHGSPSPSVISKATEKETFTDSNQSKTKKPGISDVTDYSDRGDSDMDEATYSSSQDHQTPKQESSSSVNTSNKMNFKTFSSSPPKPGDIFEVELAKNDNSLGISVTGGVNTSVRHGGIYVKAVIPQGAAESDGRIHKGDRVLAVNGVSLEGATHKQAVETLRNTGQVVHLLLEKGQSPTSKEHVPVTPQCTLSDQNAQGQGPEKVKKTTQVKDYSFVTEENTFEVKLFKNSSGLGFSFSREDNLIPEQINASIVRVKKLFPGQPAAESGKIDVGDVILKVNGASLKGLSQQEVISALRGTAPEVFLLLCRPPPGVLPEIDTALLTPLQSPAQVLPNSSKDSSQPSCVEQSTSSDENEMSDKSKKQCKSPSRRDSYSDSSGSGEDDLVTAPANISNSTWSSALHQTLSNMVSQAQSHHEAPKSQEDTICTMFYYPQKIPNKPEFEDSNPSPLPPDMAPGQSYQPQSESASSSSMDKYHIHHISEPTRQENWTPLKNDLENHLEDFELEVELLITLIKSEKGSLGFTVTKGNQRIGCYVHDVIQDPAKSDGRLKPGDRLIKVNDTDVTNMTHTDAVNLLRAASKTVRLVIGRVLELPRIPMLPHLLPDITLTCNKEELGFSLCGGHDSLYQVVYISDINPRSVAAIEGNLQLLDVIHYVNGVSTQGMTLEEVNRALDMSLPSLVLKATRNDLPVVPSSKRSAVSAPKSTKGNGSYSVGSCSQPALTPNDSFSTVAGEEINEISYPKGKCSTYQIKGSPNLTLPKESYIQEDDIYDDSQEAEVIQSLLDVVDEEAQNLLNENNAAGYSCGPGTLKMNGKLSEERTEDTDCDGSPLPEYFTEATKMNGCEEYCEEKVKSESLIQKPQEKKTDDDEITWGNDELPIERTNHEDSDKDHSFLTNDELAVLPVVKVLPSGKYTGANLKSVIRVLRGLLDQGIPSKELENLQELKPLDQCLIGQTKENRRKNRYKNILPYDATRVPLGDEGGYINASFIKIPVGKEEFVYIACQGPLPTTVGDFWQMIWEQKSTVIAMMTQEVEGEKIKCQRYWPNILGKTTMVSNRLRLALVRMQQLKGFVVRAMTLEDIQTREVRHISHLNFTAWPDHDTPSQPDDLLTFISYMRHIHRSGPIITHCSAGIGRSGTLICIDVVLGLISQDLDFDISDLVRCMRLQRHGMVQTEDQYIFCYQVILYVLTRLQAEEEQKQQPQLLK

SEQ ID NO: 13445 - protein, 66 aa, Homo sapiens
MGTSSIFLCVLFLCGALGLTMSPARGRLRCYICGFTKPCHPVPTECRDDEACGISIGTSDQSEITE

SEQ ID NO: 13446 - protein, 256 aa, Homo sapiens
MTAPGAAGRCPPTTWLGSLLLLVCLLASRSITEEVSEYCSHMIGSGHLQSLQRLIDSQMETSCQITFEFVDQEQLKDPVCYLKKAFLLVQDIMEDTMRFRDNTPNAIAIVQLQELSLRLKSCFTKDYEEHDKACVRTFYETPLQLLEKVKNVFNETKNLLDKDWNIFSKNCNNSFAECSSQGHERQSEGSFSPQLQESVFHLLVPSVILVLLAVGGLLFYRWRRRSHQEPQRADSPLEQPEGSPLTQDDRQVELPV

SEQ ID NO: 13447 - protein, 151 aa, Homo sapiens
MILLAVLFLCFISSYSASVKGHTTGLSLNNDRLYKLTYSTEVLLDRGKGKLQDSVGYRISSNVDVALLWRNPDGDDDQLIQITMKDVNVENVNQQRGEKSIFKGKSPSKIMGKENLEALQRPTLLHLIHGKVKGRLDSTTFSPTSYFSSLQ

SEQ ID NO: 13448 - protein, 77 aa, Homo sapiens
MAKLIALTLLGMGLALFRNHQSSYQTRLNALREVQPVELPNCNLVKGIETGSEDLEILPNGLAFISSSWKNTSDGPE

SEQ ID NO: 13449 - protein, 538 aa, Homo sapiens
MAAETLLSSLLGLLLLGLLLPASLTGGVGSLNLEELSEMRYGIEILPLPVMGGQTKDWWTYEFCYGRHIQQYHMEDSEIKGEVLYLGYYQSAFDWDDETAKASKQHRLKRYHSQTYGNGSKCDLNGRPREAEVRFLCDEGAGISGDYIDRVDEPLSCSYVLTIRTPRLCPHPLLRPPPSAAPQAILCHPSLQPEEYMAYVQRQADSKQYGDKIIEELQDLGPQVWSETKSGVAPQKMAGASPTKDDSKDSDFWKMLNEPEDQAPGGEEVPAEEQDPSPEAADSASGAPNDFQNNVQVKVIRSPADLIRFIEELKGGTKKGKPNIGQEQPVDDAAEVPQREPEKERGDPERQREMEEEEDEDEDEDEDEDERQLLGEFEKELEGILLPSDRDRLRSETEKELDPDGLKKESERDRAMLALTSTLNKLIKRLEEKQSPELVKKHKKKRVVPKKPPPSPQPTGKIEIKIVRPWAEGTEEGARWLTDEDTRNLKEIFFNILVPGAEEAQKERQRQKELESNYRRVWGSPGGEGTGDLDEFDF

SEQ ID NO: 13450 - protein, 1131 aa, Homo sapiens
MEADGAGEQMRPLLTRGPDEEAVVDLGKTSSTVNTKFEKEELESHRAVYIGVHVPFSKESRRRHRHRGHKHHHRRRKDKESDKEDGRESPSYDTPSQRVQFILGTEDDDEEHIPHDLFTEMDELCYRDGEEYEWKETARWLKFEEDVEDGGDRWSKPYVATLSLHSLFELRSCILNGTVMLDMRASTLDEIADMVLDNMIASGQLDESIRENVREALLKRHHHQNEKRFTSRIPLVRSFADIGKKHSDPHLLERNGILASPQSAPGNLDNSKSGEIKGNGSGGSRENSTVDFSKVDMNFMRKIPTGAEASNVLVGEVDFLERPIIAFVRLAPAVLLTGLTEVPVPTRFLFLLLGPAGKAPQYHEIGRSIATLMTDEIFHDVAYKAKDRNDLLSGIDEFLDQVTVLPPGEWDPSIRIEPPKSVPSQEKRKIPVFHNGSTPTLGETPKEAAHHAGPELQRTGRLFGGLILDIKRKAPFFLSDFKDALSLQCLASILFLYCACMSPVITFGGLLGEATEGRISAIESLFGASLTGIAYSLFAGQPLTILGSTGPVLVFEKILYKFCRDYQLSYLSLRTSIGLWTSFLCIVLVATDASSLVCYITRFTEEAFAALICIIFIYEALEKLFDLGETYAFNMHNNLDKLTSYSCVCTEPPNPSNETLAQWKKDNITAHNISWRNLTVSECKKLRGVFLGSACGHHGPYIPDVLFWCVILFFTTFFLSSFLKQFKTKRYFPTKVRSTISDFAVFLTIVIMVTIDYLVGVPSPKLHVPEKFEPTHPERGWIISPLGDNPWWTLLIAAIPALLCTILIFMDQQITAVIINRKEHKLKKGAGYHLDLLMVGVMLGVCSVMGLPWFVAATVLSISHVNSLKVESECSAPGEQPKFLGIREQRVTGLMIFILMGLSVFMTSVLKFIPMPVLYGVFLYMGVSSLKGIQLFDRIKLFGMPAKHQPDLIYLRYVPLWKVHIFTVIQLTCLVLLWVIKVSAAAVVFPMMVLALVFVRKLMDLCFTKRELSWLDDLMPESKKKKEDDKKKKEKEEAERMLQDDDDTVHLPFEGGSLLQIPVKALKYSVDPSIVNISDEMAKTAQWKALSMNTENAKVTRSNMSPDKPVSVKISFEDEPRKKYVDAETSL

SEQ ID NO: 13451 - protein, 126 aa, Homo sapiens
MMGSPVSHLLAGFCVWVVLGWVGGSVPNLGPAEQEQNHYLAQLFGLYGENGTLTAGGLARLLHSLGLGRVQGLRLGQHGPLTGRAASPAADNSTHRPQNPELSVDVWAGMPLGPSGWGDLEESKAP

SEQ ID NO: 13452 - protein, 654 aa, Homo sapiens
MAMRELVEAECGGANPLMKLAGHFTQDKALRQEGLRPGPWPPGAPASEAVSVLEVESPGAASEAASKPLGVASEDELVAEFLQDQNAPLVSRAPQTFKMDDLLAEMQQIEQSNFRQAPQRAPGVADLALSENWAQEFLAAGDAVDVTQDYNETDWSQEFISEVTDPLSVSPARWAEEYLEQSEEKLWLGEPEGTATDRWYDEYHPEEDLQHTASDFVAKVDDPKLANSEFLKFVRQIGEGQVSLESGAGSGRAQAEQWAAEFIQQQGTSDAWVDQFTRPVNTSALDMEFERAKSAIESDVDFWDKLQAELEEMAKRDAEAHPWLSDYDDLTSATYDKGYQFEEENPLRDHPQPFEEGLRRLQEGDLPNAVLLFEAAVQQDPKHMEAWQYLGTTQAENEQELLAISALRRCLELKPDNQTALMALAVSFTNESLQRQACETLRDWLRYTPAYAHLVTPAEEGAGGAGLGPSKRILGSLLSDSLFLEVKELFLAAVRLDPTSIDPDVQCGLGVLFNLSGEYDKAVDCFTAALSVRPNDYLLWNKLGATLANGNQSEEAVAAYRRALELQPGYIRSRYNLGISCINLGAHREAVEHFLEALNMQRKSRGPRGEGGAMSENIWSTLRLALSMLGQSDAYGAADARDLSTLLTMFGLPQ

SEQ ID NO: 13453 - protein, 944 aa, Homo sapiens
MTVSGPGTPEPRPATPGASSVEQLRKEGNELFKCGDYGGALAAYTQALGLDATPQDQAVLHRNRAACHLKLEDYDKAETEASKAIEKDGGDVKALYRRSQALEKLGRLDQAVLDLQRCVSLEPKNKVFQEALRNIGGQIQEKVRYMSSTDAKVEQMFQILLDPEEKGTEKKQKASQNLVVLAREDAGAEKIFRSNGVQLLQRLLDMGETDLMLAALRTLVGICSEHQSRTVATLSILGTRRVVSILGVESQAVSLAACHLLQVMFDALKEGVKKGFRGKEGAIIVDPARELKVLISNLLDLLTEVGVSGQGRDNALTLLIKAVPRKSLKDPNNSLTLWVIDQGLKKILEVGGSLQDPPGELAVTANSRMSASILLSKLFDDLKCDAERENFHRLCENYIKSWFEGQGLAGKLRAIQTVSCLLQGPCDAGNRALELSGVMESVIALCASEQEEEQLVAVEALIHAAGKAKRASFITANGVSLLKDLYKCSEKDSIRIRALVGLCKLGSAGGTDFSMKQFAEGSTLKLAKQCRKWLCNDQIDAGTRRWAVEGLAYLTFDADVKEEFVEDAAALKALFQLSRLEERSVLFAVASALVNCTNSYDYEEPDPKMVELAKYAKQHVPEQHPKDKPSFVRARVKKLLAAGVVSAMVCMVKTESPVLTSSCRELLSRVFLALVEEVEDRGTVVAQGGGRALIPLALEGTDVGQTKAAQALAKLTITSNPEMTFPGERIYEVVRPLVSLLHLNCSGLQNFEALMALTNLAGISERLRQKILKEKAVPMIEGYMFEEHEMIRRAATECMCNLAMSKEVQDLFEAQGNDRLKLLVLYSGEDDELLQRAAAGGLAMLTSMRPTLCSRIPQVTTHWLEILQALLLSSNQELQHRGAVVVLNMVEASREIASTLMESEMMEILSVLAKGDHSPVTRAAAACLDKAVEYGLIQPNQDGE

SEQ ID NO: 13454 - protein, 81 aa, Homo sapiens
MKMLTRLQVLTLALFSKGFLLSLGDHNFLRREIKIEGDLVLGGLFPINEKGTGTEECGRINEDRGIQRLEAMLFAIDEINK

SEQ ID NO: 13455 - protein, 97 aa, Homo sapiens
MKGICSDAILVLATSMWMAFAIDFPLPMASERGQLDKTIVECLKNVNKCWFLSYIKPSEPICGSDQVTYSSDCHLCSKILFEGLNITKLYDGQCENS

SEQ ID NO: 13456 - protein, 1375 aa, Homo sapiens
MEAPLQTGMMGTSSHGLATNSSGAKVAERDGFQDVLAPGEGSAGRICGAQPVPFVPQVLGVMIGAGVAVVVTAVLILLVVRRLRVPKTPAPDGPRYRFRKRDKVLFYGRKIMRKVSQSTSSLVDTSVSATSRPRMRKKLKMLNIAKKILRIQKETPTLQRKEPPPAVLEADLTEGDLANSHLPSEVLYMLKNVRVLGHFEKPLFLELCRHMVFQRLGQGDYVFRPGQPDASIYVVQDGLLELCLPGPDGKECVVKEVVPGDSVNSLLSILDVITGHQHPQRTVSARAARDSTVLRLPVEAFSAVFTKYPESLVRVVQIIMVRLQRVTFLALHNYLGLTNELFSHEIQPLRLFPSPGLPTRTSPVRGSKRMVSTSATDEPRETPGRPPDPTGAPLPGPTGDPVKPTSLETPSAPLLSRCVSMPGDISGLQGGPRSDFDMAYERGRISVSLQEEASGGSLAAPARTPTQEPREQPAGACEYSYCEDESATGGCPFGPYQGRQTSSIFEAAKQELAKLMRIEDPSLLNSRVLLHHAKAGTIIARQGDQDVSLHFVLWGCLHVYQRMIDKAEDVCLFVAQPGELVGQLAVLTGEPLIFTLRAQRDCTFLRISKSDFYEIMRAQPSVVLSAAHTVAARMSPFVRQMDFAIDWTAVEAGRALYRQGDRSDCTYIVLNGRLRSVIQRGSGKKELVGEYGRGDLIGVVEALTRQPRATTVHAVRDTELAKLPEGTLGHIKRRYPQVVTRLIHLLSQKILGNLQQLQGPFPAGSGLGVPPHSELTNPASNLATVAILPVCAEVPMVAFTLELQHALQAIGPTLLLNSDIIRARLGASALDSIQEFRLSGWLAQQEDAHRIVLYQTDASLTPWTVRCLRQADCILIVGLGDQEPTLGQLEQMLENTAVRALKQLVLLHREEGAGPTRTVEWLNMRSWCSGHLHLRCPRRLFSRRSPAKLHELYEKVFSRRADRHSDFSRLARVLTGNTIALVLGGGGARGCSHIGVLKALEEAGVPVDLVGGTSIGSFIGALYAEERSASRTKQRAREWAKSMTSVLEPVLDLTYPVTSMFTGSAFNRSIHRVFQDKQIEDLWLPYFNVTTDITASAMRVHKDGSLWRYVRASMTLSGYLPPLCDPKDGHLLMDGGYINNLPADIARSMGAKTVIAIDVGSQDETDLSTYGDSLSGWWLLWKRLNPWADKVKVPDMAEIQSRLAYVSCVRQLEVVKSSSYCEYLRPPIDCFKTMDFGKFDQIYDVGYQYGKAVFGGWSRGNVIEKMLTDRRSTDLNESRRADVLAFPSSGFTDLAEIVSRIEPPTSYVSDGCADGEESDCLTEYEEDAGPDCSRDEGGSPEGASPSTASEMEEEKSILRQRRCLPQEPPGSATDA

SEQ ID NO: 13457 - protein, 536 aa, Homo sapiens
MLGGSGSHGRRSLAALSQIAYQRNDDDEEEAARERRRRARQERLRQKQEEESLGQVTDQVEVNAQNSVPDEEAKTTTTNTQVEGDDEAAFLERLARREERRQKRLQEALERQKEFDPTITDASLSLPSRRMQNDTAENETTEKEEKSESRQERYEIEETETVTKSYQKNDWRDAEENKKEDKEKEEEEEEKPKRGSIGENQIKDEKIKKDKEPKEEVKSFMDRKKGFTEVKSQNGEFMTHKLKHTENTFSRPGGRASVDTKEAEGAPQVEAGKRLEELRRRRGETESEEFEKLKQKQQEAALELEELKKKREERRKVLEEEEQRRKQEEADRKLREEEEKRRLKEEIERRRAEAAEKRQKMPEDGLSDDKKPFKCFTPKGSSLKIEERAEFLNKSVQKSSGVKSTHQAAIVSKIDSRLEQYTSAIEGTKSAKPTKPAASDLPVPAEGVRNIKSMWEKGNVFSSPTAAGTPNKETAGLKVGVSSRINEWLTKTPDGNKSPAPKPSLTFCSSLFGLWLIGNLLLLPSFLPLLPEWVFL

SEQ ID NO: 13458 - protein, 70 aa, Homo sapiens
MRPTLLWSLLLLLGVFAAAAAAPPAQLTLETYQEWCNDSAATHEMGDGEQACGGRNNGPQRCPRPHPQSP

SEQ ID NO: 13459 - protein, 531 aa, Homo sapiens
MRCSPGGVWLALAASLLHGKATASPPSTPPWDPGHIPGASVRPAPGPVSLQGEFQRKLYKELVKNYNPLERPVANDSQPLTVYFSLSLLQIMDVDEKNQVLTTNIWLQMSWTDHYLQWNVSEYPGVKTVRFPDGQIWKPDILLYNSADERFDATFHTNVLVNSSGHCQYLPPGIFKSSCYIDVRWFPFDVQHCKLKFGSWSYGGWSLDLQMQEADISGYIPNGEWDLVGIPGKRSERFYECCKEPYPDVTFTVTMRRRTLYYGLNLLIPCVLISALALLVFLLPADSGEKISLGITVLLSLTVFMLLVAEIMPATSDSVPLIAQYFASTMIIVGLSVVVTVIVLQYHHHDPDGGKMPKWTRVILLNWCAWFLRMKRPGEDKVRPACQHKQRRCSLASVEMSAVAPPPASNGNLLYIGFRGLDGVHCVPTPDSGVVCGRMACSPTHDEHLLHGGQPPEGDPDLAKILEEVRYIANRFRCQDESEAVCSEWKFAACVVDRLCLMAFSVFTIICTIGILMSAPNFVEAVSKDFA

SEQ ID NO: 13460 - protein, 612 aa, Homo sapiens
MSWGTELWDQFDNLEKHTQWGIDILEKYIKFVKERTEIELSYAKQLRNLSKKYQPKKNSKEEEEYKYTSCKAFISNLNEMNDYAGQHEVISENMASQIIVDLARYVQELKQERKSNFHDGRKAQQHIETCWKQLESSKRRFERDCKEADRAQQYFEKMDADINVTKADVEKARQQAQIRHQMAEDSKADYSSILQKFNHEQHEYYHTHIPNIFQKIQEMEERRIVRMGESMKTYAEVDRQVIPIIGKCLDGIVKAAESIDQKNDSQLVIEAYKSGFEPPGDIEFEDYTQPMKRTVSDNSLSNSRGEGKPDLKFGGKSKGKLWPFIKKNKLMSLLTSPHQPPPPPPASASPSAVPNGPQSPKQQKEPLSHRFNEFMTSKPKIHCFRSLKRGGATPEDFSNLPPEQRRKKLQQKVDELNKEIQKEMDQRDAITKMKDVYLKNPQMGDPASLDHKLAEVSQNIEKLRVETQKFEAWLAEVEGRLPARSEQARRQSGLYDSQNPPTVNNCAQDRESPDGSYTEEQSQESEMKVLATDFDDEFDDEEPLPAIGTCKALYTFEGQNEGTISVVEGETLYVIEEDKGDGWTRIRRNEDEEGYVPTSYVEVCLDKNAKDS

SEQ ID NO: 13461 - protein, 476 aa, Homo sapiens
MSGARCRTLYPFSGERHGQGLRFAAGELITLLQVPDGGWWEGEKEDGLRGWFPASYVQLLEKPGMVPPPPGEESQTVILPPGWQSYLSPQGRRYYVNTTTNETTWERPSSSPGIPASPGSHRSSLPPTVNGYHASGTPAHPPETAHMSVRKSTGDSQNLGSSSPSKKQSKENTITINCVTFPHPDTMPEQQLLKPTEWSYCDYFWADKKDPQGNGTVAGFELLLQKQLKGKQMQKEMSEFIRERIKIEEDYAKNLAKLSQNSLASQEEGSLGEAWAQVKKSLADEAEVHLKFSAKLHSEVEKPLMNFRENFKKDMKKCDHHIADLRKQLASRYASVEKARKALTERQRDLEMKTQQLEIKLSNKTEEDIKKARRKSTQAGDDLMRCVDLYNQAQSKWFEEMVTTTLELERLEVERVEMIRQHLCQYTQLRHETDMFNQSTVEPVDQLLRKVDPAKDRELWVREHKTGNIRPVDMEI

SEQ ID NO: 13462 - protein, 123 aa, Homo sapiens
MAAAMPLALLVLLLLGPGGWCLAEPPRDSLREELVITPLPSGDVAATFQFRTRWDSELQREGVSHYRLFPKALGQLISKYSLRELHLSFTQGFWRTRYWGPPFLQAPSGAELWVWFQDTVTEH

SEQ ID NO: 13463 - protein, 909 aa, Homo sapiens
MDMFPLTWVFLALYFSRHQVRGQPDPPCGGRLNSKDAGYITSPGYPQDYPSHQNCEWIVYAPEPNQKIVLNFNPHFEIEKHDCKYDFIEIRDGDSESADLLGKHCGNIAPPTIISSGSMLYIKFTSDYARQGAGFSLRYEIFKTGSEDCSKNFTSPNGTIESPGFPEKYPHNLDCTFTILAKPKMEIILQFLIFDLEHDPLQVGEGDCKYDWLDIWDGIPHVGPLIGKYCGTKTPSELRSSTGILSLTFHTDMAVAKDGFSARYYLVHQEPLENFQCNVPLGMESGRIANEQISASSTYSDGRWTPQQSRLHGDDNGWTPNLDSNKEYLQVDLRFLTMLTAIATQGAISRETQNGYYVKSYKLEVSTNGEDWMVYRHGKNHKVFQANNDATEVVLNKLHAPLLTRFVRIRPQTWHSGIALRLELFGCRVTDAPCSNMLGMLSGLIADSQISASSTQEYLWSPSAARLVSSRSGWFPRIPQAQPGEEWLQVDLGTPKTVKGVIIQGARGGDSITAVEARAFVRKFKVSYSLNGKDWEYIQDPRTQQPKLFEGNMHYDTPDIRRFDPIPAQYVRVYPERWSPAGIGMRLEVLGCDWTDSKPTVETLGPTVKSEETTTPYPTEEEATECGENCSFEDDKDLQLPSGFNCNFDFLEEPCGWMYDHAKWLRTTWASSSSPNDRTFPDDRNFLRLQSDSQREGQYARLISPPVHLPRSPVCMEFQYQATGGRGVALQVVREASQESKLLWVIREDQGGEWKHGRIILPSYDMEYQIVFEGVIGKGRSGEIAIDDIRISTDVPLENCMEPISAFADEYEVDWSNSSSATSGSGAPSTDKEKSWLYTLDPILITIIAMSSLGVLLGATCAGLLLYCTCSYSGLSSRSCTTLENYNFELYDGLKHKVKMNHQKCCSEA

SEQ ID NO: 13464 - protein, 111 aa, Homo sapiens
MLFLALGSPWAVELPLCGRRTALCAAAALRGPRASVSRASSSSGPSGPVAGWSTGPSGAARLLRRPGRAQIPVYWEGYVRFLNTPSDKSEDGRLIYTGNMARAVFGWSAVA

SEQ ID NO: 13465 - protein, 1481 aa, Homo sapiens
MPNSERHGGKKDGSGGASGTLQPSSGGGSSNSRERHRLVSKHKRHKSKHSKDMGLVTPEAASLGTVIKPLVEYDDISSDSDTFSDDMAFKLDRRENDERRGSDRSDRLHKHRHHQHRRSRDLLKAKQTEKEKSQEVSSKSGSMKDRISGSSKRSNEETDDYGKAQVAKSSSKESRSSKLHKEKTRKERELKSGHKDRSKSHRKRETPKSYKTVDSPKRRSRSPHRKWSDSSKQDDSPSGASYGQDYDLSPSRSHTSSNYDSYKKSPGSTSRRQSVSPPYKEPSAYQSSTRSPSPYSRRQRSVSPYSRRRSSSYERSGSYSGRSPSPYGRRRSSSPFLSKRSLSRSPLPSRKSMKSRSRSPAYSRHSSSHSKKKRSSSRSRHSSISPVRLPLNSSLGAELSRKKKERAAAAAAAKMDGKESKGSPVFLPRKENSSVEAKDSGLESKKLPRSVKLEKSAPDTELVNVTHLNTEVKNSSDTGKVKLDENSEKHLVKDLKAQGTRDSKPIALKEEIVTPKETETSEKETPPPLPTIASPPPPLPTTTPPPQTPPLPPLPPIPALPQQPPLPPSQPAFSQVPASSTSTLPPSTHSKTSAVSSQANSQPPVQVSVKTQVSVTAAIPHLKTSTLPPLPLPPLLPGDDDMDSPKETLPSKPVKKEKEQRTRHLLTDLPLPPELPGGDLSPPDSPEPKAITPPQQPYKKRPKICCPRYGERRQTESDWGKRCVDKFDIIGIIGEGTYGQVYKAKDKDTGELVALKKVRLDNEKEGFPITAIREIKILRQLIHRSVVNMKEIVTDKQDALDFKKDKGAFYLVFEYMDHDLMGLLESGLVHFSEDHIKSFMKQLMEGLEYCHKKNFLHRDIKCSNILLNNSGQIKLADFGLARLYNSEESRPYTNKVITLWYRPPELLLGEERYTPAIDVWSCGCILGELFTKKPIFQANLELAQLELISRLCGSPCPAVWPDVIKLPYFNTMKPKKQYRRRLREEFSFIPSAALDLLDHMLTLDPSKRCTAEQTLQSDFLKDVELSKMAPPDLPHWQDCHELWSKKRRRQRQSGVVVEEPPPSKTSRKETTSGTSTEPVKNSSPAPPQPAPGKVESGAGDAIGLADITQQLNQSELAVLLNLLQSQTDLSIPQMAQLLNIHSNPEMQQQLEALNQSISALTEATSQQQDSETMAPEESLKEAPSAPVILPSAEQTTLEASSTPADMQNILAVLLSQLMKTQEPAGSLEENNSDKNSGPQGPRRTPTMPQEEAAEKRPPEPPGPPPPPPPPPLVEGDLSSAPQELNPAVTAALLQLLSQPEAEPPGHLPHEHQALRPMEYSTRPRPNRTYGNTDGPETGFSAIDTDERNSGPALTESLVQTLVKNRTFSGSLSHLGESSSYQGTGSVQFPGDQDLRFARVPLALHPVVGQPFLKAEGSSNSVVHAETKLQNYGELGPGTTGASSSGAGLHWGGPTQSSAYGKLYRGPTRVPPRGGRGRGVPY

SEQ ID NO: 13466 - protein, 300 aa, Homo sapiens
MGARGALLLALLLARAGLRKPESQEAAPLSGPCGRRVITSRIVGGEDAELGRWPWQGSLRLWDSHVCGVSLLSHRWALTAAHCFETYSDLSDPSGWMVQFGQLTSMPSFWSLQAYYTRYFVSNIYLSPRYLGNSPYDIALVKLSAPVTYTKHIQPICLQASTFEFENRTDCWVTGWGYIKEDEALPSPHTLQEVQVAIINNSMCNHLFLKYSFRKDIFGDMGDSGGPLACNKNGLWYQIGVVSWGVGCGRPNRPGVYTNISHHFEWIQKLMAQSGMSQPDPSWPLLFFPLLWALPLLGPV

SEQ ID NO: 13467 - protein, 1099 aa, Homo sapiens
MNLQAQPKAQNKRKRCLFGGQEPAPKEQPPPLQPPQQSIRVKEEQYLGHEGPGGAVSTSQPVELPPPSSLALLNSVVYGPERTSAAMLSQQVASVKWPNSVMAPGRGPERGGGGGVSDSSWQQQPGQPPPHSTWNCHSLSLYSATKGSPHPGVGVPTYYNHPEALKREKAGGPQLDRYVRPMMPQKVQLEVGRPQAPLNSFHAAKKPPNQSLPLQPFQLAFGHQVNRQVFRQGPPPPNPVAAFPPQKQQQQQQPQQQQQQQQAALPQMPLFENFYSMPQQPSQQPQDFGLQPAGPLGQSHLAHHSMAPYPFPPNPDMNPELRKALLQDSAPQPALPQVQIPFPRRSRRLSKEGILPPSALDGAGTQPGQEATGNLFLHHWPLQQPPPGSLGQPHPEALGFPLELRESQLLPDGERLAPNGREREAPAMGSEEGMRAVSTGDCGQVLRGGVIQSTRRRRRASQEANLLTLAQKAVELASLQNAKDGSGSEEKRKSVLASTTKCGVEFSEPSLATKRAREDSGMVPLIIPVSVPVRTVDPTEAAQAGGLDEDGKGPEQNPAEHKPSVIVTRRRSTRIPGTDAQAQAEDMNVKLEGEPSVRKPKQRPRPEPLIIPTKAGTFIAPPVYSNITPYQSHLRSPVRLADHPSERSFELPPYTPPPILSPVREGSGLYFNAIISTSTIPAPPPITPKSAHRTLLRTNSAEVTPPVLSVMGEATPVSIEPRINVGSRFQAEIPLMRDRALAAADPHKADLVWQPWEDLESSREKQRQVEDLLTAACSSIFPGAGTNQELALHCLHESRGDILETLNKLLLKKPLRPHNHPLATYHYTGSDQWKMAERKLFNKGIAIYKKDFFLVQKLIQTKTVAQCVEFYYTYKKQVKIGRNGTLTFGDVDTSDEKSAQEEVEVDIKTSQKFPRVPLPRRESPSEERLEPKREVKEPRKEGEEEVPEIQEKEEQEEGRERSRRAAAVKATQTLQANESASDILILRSHESNAPGSAGGQASEKPREGTGKSRRALPFSEKKKKTETFSKTQNQENTFPCKKCGRVFYKVKSRSAHMKSHAEQEKKAAALRLKEKEAAAAAAAAHQQALREESGAGDKG

SEQ ID NO: 13468 - protein, 757 aa, Homo sapiens
MLRACQLSGVTAAAQSCLCGKFVLRPLRPCRRYSTSGSSGLTTGKIAGAGLLFVGGGIGGTILYAKWDSHFRESVEKTIPYSDKLFEMVLGPAAYNVPLPKKSIQSGPLKISSVSEVMKESKQPASQLQKQKGDTPASATAPTEAAQIISAAGDTLSVPAPAVQPEESLKTDHPEIGEGKPTPALSEASSSSIRERPPEEVAARLAQQEKQEQVKIESLAKSLEDALRQTASVTLQAIAAQNAAVQAVNAHSNILKAAMDNSEIAGEKKSAQWRTVEGALKERRKAVDEAADALLKAKEELEKMKSVIENAKKKEVAGAKPHITAAEGKLHNMIVDLDNVVKKVQAAQSEAKVVSQYHELVVQARDDFKRELDSITPEVLPGWKGMSVSDLADKLSTDDLNSLIAHAHRRIDQLNRELAEQKATEKQHITLALEKQKLEEKRAFDSAVAKALEHHRSEIQAEQDRKIEEVRDAMENEMRTQLRRQAAAHTDHLRDVLRVQEQELKSEFEQNLSEKLSEQELQFRRLSQEQVDNFTLDINTAYARLRGIEQAVQSHAVAEEEARKAHQLWLSVEALKYSMKTSSAETPTIPLGSAVEAIKANCSDNEFTQALTAAIPPESLTRGVYSEETLRARFYAVQKLARRVAMIDETRNSLYQYFLSYLQSLLLFPPQQLKPPPELCPEDINTFKLLSYASYCIEHGDLELAAKFVNQLKGESRRVAQDWLKEARMTLETKQIVEILTAYASAVGIGTTQVQPE

SEQ ID NO: 13469 - protein, 198 aa, Homo sapiens
MSRSATLLLCLLGCHVWKAVTKTLREPGAGAQEVTLKVHISDASTHQPVADALIEIFTNQASIASGTSGTDGVAFIKFQYKLGSQLIVTASKHAYVPNSAPWKPIRLPVFSSLSLGLLPERSATLMVYEDVVQIVSGFQGNSTRHDLTPVTAVSVHLLSSNGTPVLVDGPIYVTVPLATQSSLRHNAYVAAWRFDQKL

SEQ ID NO: 13470 - protein, 366 aa, Homo sapiens
MTVRNIASICNMGTNASALEKDIGPEQFPINEHYFGLVNFGNTCYCNSVLQALYFCRPFRENVLAYKAQQKKKENLLTCLADLFHSIATQKKKVGVIPPKKFISRLRKENDLFDNYMQQDAHEFLNYLLNTIADILQEEKKQEKQNGKLKNGNMNEPAENNKPELTWVHEIFQGTLTNETRCLNCETVSSKDEDFLDLSVDVEQNTSITHCLRDFSNTETLCSEQKYYCETCCSKQEAQKRMRVKKLPMILALHLKRFKYMEQLHRYTKLSYRVVFPLELRLFNTSSDAVNLDRMYDLVAVVVHCGSGPNRGHYITIVKSHGFWLLFDDDIVEKIDAQAIEEFYGLTSDISKNSESGYILFYQSRE

SEQ ID NO: 13471 - protein, 201 aa, Homo sapiens
MAAKVFESIGKFGLALAVAGGVVNSALYNVDAGHRAVIFDRFRGVQDIVVGEGTHFLIPWVQKPIIFDCRSRPRNVPVITGSKDLQNVNITLRILFRPVASQLPRIFTSIGEDYDERVLPSITTEILKSVVARFDAGELITQRELVSRQVSDDLTERAATFGLILDDVSLTHLTFGKEFTEAVEAKQVAQQEAERARFVVE

SEQ ID NO: 13472 - protein, 165 aa, Homo sapiens
MARHGLPLLPLLSLLVGAWLKLGNGQATSMVQLQGGRFLMGTNSPDSRDGDGPVREATVKPFAIDIFPVTNKDFRDFVREKKYRTEAEMFGWSFVFEDFVSDELRNKATQPMKSVLWWLPVEKAFWRQVKFTHGGTGSSQTAPTCGRESSPRETKLRMASMESPQ

SEQ ID NO: 13473 - protein, 215 aa, Homo sapiens
MLLQVVREGKFSGFLTSCSLLLPRAAQILAAEAGLPSSRSFMGFAAPFTNKRKAYSERRIMGYSMQEMYEVVSNVQEYREFVPWCKKSLVVSSRKGHLKAQLEVGFPPVMERYTSAVSMVKPHMVKAVCTDGKLFNHLETIWRFSPGIPAYPRTCTVDFSISFEFRSLLHSQLATMFFDEVVKQNVAAFERRAATKFGPETAIPRELMFHEVHQT

SEQ ID NO: 13474 - protein, 370 aa, Homo sapiens
MEKKKMVTQGNQEPTTTPDAMVQPFTTIPFPPPPQNGIPTEYGVPHTQDYAGQTGEHNLTLYGSTQAHGEQSSNSPSTQNGSLTTEGGAQTDGQQSQTQSSENSESKSTPKRLHVSNIPFRFRDPDLRQMFGQFGKILDVEIIFNERGSKGFGFVTFENSADADRAREKLHGTVVEGRKIEVNNATARVMTNKKMVTPYANGWKLSPVVGAVYGPELYAASSFQADVSLGNDAAVPLSGRGGINTYIPLISLPLVPGFPYPTAATTAAAFRGAHLRGRGRTVYGAVRAVPPTAIPAYPGVDMQPTDMHSLLLQPQPPLLQPLQPLTVTVMAGCTQPTPTMPLPLPLAMELALWRVYTEVATADLPPTEVT

SEQ ID NO: 13475 - protein, 1211 aa, Homo sapiens
MQLKIMPKKKRLSAGRVPLILFLCQMISALEVPLDPKLLEDLVQPPTITQQSPKDYIIDPRENIVIQCEAKGKPPPSFSWTRNGTHFDIDKDPLVTMKPGTGTLIINIMSEGKAETYEGVYQCTARNERGAAVSNNIVVRPSRSPLWTKEKLEPITLQSGQSLVLPCRPPIGLPPPIIFWMDNSFQRLPQSERVSQGLNGDLYFSNVLPEDTREDYICYARFNHTQTIQQKQPISVKVISVDELNDTIAANLSDTEFYGAKSSRERPPTFLTPEGNASNKEELRGNVLSLECIAEGLPTPIIYWAKEDGMLPKNRTVYKNFEKTLQIIHVSEADSGNYQCIAKNALGAIHHTISVRVKAAPYWITAPQNLVLSPGEDGTLICRANGNPKPRISWLTNGVPIEIAPDDPSRKIDGDTIIFSNVQERSSAVYQCNASNEYGYLLANAFVNVLAEPPRILTPANTLYQVIANRPALLDCAFFGSPLPTIEWFKGAKGSALHEDIYVLHENGTLEIPVAQKDSTGTYTCVARNKLGMAKNEVHLEIKDPTWIVKQPEYAVVQRGSMVSFECKVKHDHTLSLTVLWLKDNRELPSDERFTVDKDHLVVADVSDDDSGTYTCVANTTLDSVSASAVLSVVAPTPTPAPVYDVPNPPFDLELTDQLDKSVQLSWTPGDDNNSPITKFIIEYEDAMHKPGLWHHQTEVSGTQTTAQLKLSPYVNYSFRVMAVNSIGKSLPSEASEQYLTKASEPDKNPTAVEGLGSEPDNLVITWKPLNGFESNGPGLQYKVSWRQKDGDDEWTSVVVANVSKYIVSGTPTFVPYLIKVQALNDMGFAPEPAVVMGHSGEDLPMVAPGNVRVNVVNSTLAEVHWDPVPLKSIRGHLQGYRIYYWKTQSSSKRNRRHIEKKILTFQGSKTHGMLPGLEPFSHYTLNVRVVNGKGEGPASPDRVFNTPEGVPSAPSSLKIVNPTLDSLTLEWDPPSHPNGILTEYTLKYQPINSTHELGPLVDLKIPANKTRWTLKNLNFSTRYKFYFYAQTSAGSGSQITEEAVTTVDEAGILPPDVGAGKAMASRQVDIATQGWFIGLMCAVALLILILLIVCFIRRNKGGKYPVKEKEDAHADPEIQPMKEDDGTFGEYSDAEDHKPLKKGSRTPSDRTVKKEDSDDSLVDYGEGVNGQFNEDGSFIGQYSGKKEKEPAEGNESSEAPSPVNAMNSFV

SEQ ID NO: 13476 - protein, 436 aa, Homo sapiens
MDAMKRGLCCVLLLCGAVFVSPSQEIHARFRRGARSYQVICRDEKTQMIYQQHQSWLRPVLRSNRVEYCWCNSGRAQCHSVPVKRNSDCYFGNGSAYRGTHSLTESGASCLPWNSMILIGKVYTAQNPSAQALGLGKHNYCRNPDGDAKPWCHVLKNRRLTWEYCDVPSCSTCGLRQYSQPQFRIKGGLFADIASHPWQAAIFAKHRRSPGERFLCGGILISSCWILSAAHCFQERFPPHHLTVILGRTYRVVPGEEEQKFEVEKYIVHKEFDDDTYDNDIALLQLKSDSSRCAQESSVVRTVCLPPADLQLPDWTECELSGYGKHEALSPFYSERLKEAHVRLYPSSRCTSQHLLNRTVTDNMLCAGDTRSGGPQANLHDACQGDSGGPLVCLNDGRMTLVGIISWGLGCGQKDVPGVYTKVTNYLDWIRDNMRP

SEQ ID NO: 13477 - protein, 53 aa, Homo sapiens
MRLAGPLRIVVLVVSVGVTWIVVSILLGGPGSGFPRIQQLFTSPESSVTADLR

SEQ ID NO: 13478 - protein, 688 aa, Homo sapiens
MPVPWFLLSLALGRSPVVLSLERLVGPQDATHCSPGLSCRLWDSDILCLPGDIVPAPGPVLAPTHLQTELVLRCQKETDCDLCLRVAVHLAVHGHWEEPEDEEKFGGAADSGVEEPRNASLQAQVVLSFQAYPTARCVLLEVQVPAALVQFGQSVGSVVYDCFEAALGSEVRIWSYTQPRYEKELNHTQQLPALPWLNVSADGDNVHLVLNVSEEQHFGLSLYWNQVQGPPKPRWHKNLTGPQIITLNHTDLVPCLCIQVWPLEPDSVRTNICPFREDPRAHQNLWQAARLQLLTLQSWLLDAPCSLPAEAALCWRAPGGDPCQPLVPPLSWENVTVDVNSSEKLQLQECLWADSLGPLKDDVLLLETRGPQDNRSLCALEPSGCTSLPSKASTRAARLGEYLLQDLQSGQCLQLWDDDLGALWACPMDKYIHKRWALVWLACLLFAAALSLILLLKKDHAKGWLRLLKQDVRSGAAARGRAALLLYSADDSGFERLVGALASALCQLPLRVAVDLWSRRELSAQGPVAWFHAQRRQTLQEGGVVVLLFSPGAVALCSEWLQDGVSGPGAHGPHDAFRASLSCVLPDFLQGRAPGSYVGACFDRLLHPDAVPALFRTVPVFTLPSQLPDFLGALQQPRAPRSGRLQERAEQVSRALQPALDSYFHPPGTPAPGRGVGPGAGPGAGDGT

SEQ ID NO: 13479 - protein, 295 aa, Homo sapiens
MGRGVRVLLLLSLLHCAGGSEGRKTWRRRGQQPPPPPRTEAAPAAGQPVESFPLDFTAVEGNMDSFMAQVKSLAQSLYPCSAQQLNEDLRLHLLLNTSVTCNDGSPAGYYLKESRGSRRWLLFLEGGWYCFNRENCDSRYDTMRRLMSSRDWPRTRTGTGILSSQPEENPYWWNANMVFIPYCSSDVWSGASSKSEKNEYAFMGALIIQEVVRELLGRGLSGAKVLLLAGSSAGGTGVLLNVDRVAEQLEKLGYPAIQVRGLADSGWFLDNKQYRHTDCVDTITCAPTEAIRRGI

SEQ ID NO: 13480 - protein, 46 aa, Homo sapiens
MAGFGAMEKFLVEYKSAVEKKLAEYKCNTNTAIELKLVKLLLVTRV

SEQ ID NO: 13481 - protein, 326 aa, Homo sapiens
MAPAAASPPEVIRAAQKDEYYRGGLRSAAGGALHSLAGARKWLEWRKEVELLSDVAYFGLTTLAGYQTLGEEYVSIIQVDPSRIHVPSSLRRGVLVTLHAVLPYLLDKALLPLEQELQADPDSGRPLQGSLGPGGRGCSGARRWMRHHTATLTEQQRRALLRAVFVLRQGLACLQRLHVAWFYIHGVFYHLAKRLTGITYLRVRSLPGEDLRARVSYRLLGVISLLHLVLSMGLQLYGFRQRQRARKEWRLHRGLSHRRASLEERAVSRNPLCTLCLEERRHPTATPCGHLFCWECITAWCSSKAECPLCREKFPPQKLIYLRHYR

SEQ ID NO: 13482 - protein, 1032 aa, Homo sapiens
MELLPPLPQSFLLLLLLPAKPAAGEDWQCPRTPYAASRDFDVKYVVPSFSAGGLVQAMVTYEGDRNESAVFVAIRNRLHVLGPDLKSVQSLATGPAGDPGCQTCAACGPGPHGPPGDTDTKVLVLDPALPALVSCGSSLQGRCFLHDLEPQGTAVHLAAPACLFSAHHNRPDDCPDCVASPLGTRVTVVEQGQASYFYVASSLDAAVAASFSPRSVSIRRLKADASGFAPGFVALSVLPKHLVSYSIEYVHSFHTGAFVYFLTVQPASVTDDPSALHTRLARLSATEPELGDYRELVLDCRFAPKRRRRGAPEGGQPYPVLRVAHSAPVGAQLATELSIAEGQEVLFGVFVTGKDGGPGVGPNSVVCAFPIDLLDTLIDEGVERCCESPVHPGLRRGLDFFQSPSFCPNPPGLEALSPNTSCRHFPLLVSSSFSRVDLFNGLLGPVQVTALYVTRLDNVTVAHMGTMDGRILQVELVRSLNYLLYVSNFSLGDSGQPVQRDVSRLGDHLLFASGDQVFQVPIQGPGCRHFLTCGRCLRAWHFMGCGWCGNMCGQQKECPGSWQQDHCPPKLTEFHPHSGPLRGSTRLTLCGSNFYLHPSGLVPEGTHQVTVGQSPCRPLPKDSSKLRPVPRKDFVEEFECELEPLGTQAVGPTNVSLTVTNMPPGKHFRVDGTSVLRGFSFMEPVLIAVQPLFGPRAGGTCLTLEGQSLSVGTSRAVLVNGTECLLARVSEGQLLCATPPGATVASVPLSLQVGGAQVPGSWTFQYREDPVVLSISPNCGYINSHITICGQHLTSAWHLVLSFHDGLRAVESRCERQLPEQQLCRLPEYVVRDPQGWVAGNLSARGDGAAGFTLPGFRFLPPPHPPSANLVPLKPEEHAIKFEYIGLGAVADCVGINVTVGGESCQHEFRGDMVVCPLPPSLQLGQDGAPLQVCVDGECHILGRVVRPGPDGVPQSTLLGILLPLLLLVAALATALVFSYWWRRKQLAPHSLSPQHSLPLMVWIPPLVSMEHPSPIVKMNPVCHCCGKSPSS

SEQ ID NO: 13483 - protein, 273 aa, Homo sapiens
MKDMPLRIHVLLGLAITTLVQAVDKKVDCPRLCTCEIRPWFTPRSIYMEASTVDCNDLGLLTFPARLPANTQILLLQTNNIAKIEYSTDFPVNLTGLDLSQNNLSSVTNINVKKMPQLLSVYLEENKLTELPEKCLSELSNLQELYINHNLLSTISPGAFIGLHNLLRLHLNSNRLQMINSKWFDALPNLEILMIGENPIIRIKDMNFKPLINLRSLVIAGINLTEIPDNALVGLENLESISFYDNRLIKVPHVALQKVVNLKFLDLNKNPIN

SEQ ID NO: 13484 - protein, 102 aa, Homo sapiens
MARHGLPLLPLLSLLVGAWLKLGNGQATSMVQLQGGRFLMGTNSPDSRDGDGPVREATVKPFAIDIFPVTNKDFRSSLPMGELVPAKPHQPVAGKVPQGRQS

SEQ ID NO: 13485 - protein, 1258 aa, Homo sapiens
MEKYVRLQKIGEGSFGKAILVKSTEDGRQYVIKEINISRMSSKEREESRREVAVLANMKHPNIVQYRESFEENGSLYIVMDYCEGGDLFKRINAQKGVLFQEDQILDWFVQICLALKHVHDRKILHRDIKSQNIFLTKDGTVQLGDFGIARVLNSTVELARTCIGTPYYLSPEICENKPYNNKSDIWALGCVLYELCTLKHAFEAGSMKNLVLKIISGSFPPVSLHYSYDLRSLVSQLFKRNPRDRPSVNSILEKGFIAKRIEKFLSPQLIAEEFCLKTFSKFGSQPIPAKRPASGQNSISVMPAQKITKPAAKYGIPLAYKKYGDKKLHEKKPLQKHKQAHQTPEKRVNTGEERRKISEEAARKRRLEFIEKEKKQKDQIISLMKAEQMKRQEKERLERINRAREQGWRNVLSAGGSGEVKAPFLGSGGTIAPSSFSSRGQYEHYHAIFDQMQQQRAEDNEAKWKREIYGRGLPERGILPGVRPGFPYGAAGHHHFPDADDIRKTLKRLKAVSKQANANRQKGQLAVERAKQVEEFLQRKREAMQNKARAEGHMVYLARLRQIRLQNFNERQQIKAKLRGEKKEANHSEGQEGSEEADMRRKKIESLKAHANARAAVLKEQLERKRKEAYEREKKVWEEHLVAKGVKSSDVSPPLGQHETGGSPSKQQMRSVISVTSALKEVGVDSSLTDTRETSEEMQKTNNAISSKREILRRLNENLKAQEDEKGKQNLSDTFEINVHEDAKEHEKEKSVSSDRKKWEAGGQLVIPLDELTLDTSFSTTERHTVGEVIKLGPNGSPRRAWGKSPTDSVLKILGEAELQLQTELLENTTIRSEISPEGEKYKPLITGEKKVQCISHEINPSAIVDSPVETKSPEFSEASPQMSLKLEGNLEEPDDLETEILQEPSGTNKDESLPCTITDVWISEEKETKETQSADRITIQENEVSEDGVSSTVDQLSDIHIEPGTNDSQHSKCDVDKSVQPEPFFHKVVHSEHLNLVPQVQSVQCSPEESFAFRSHSHLPPKNKNKNSLLIGLSTGLFDANNPKMLRTCSLPDLSKLFRTLMDVPTVGDVRQDNLEIDEIEDENIKEGPSDSEDIVFEETDTDLQELQASMEQLLREQPGEEYSEEEESVLKNSDVEPTANGTDVADEDDNPSSESALNEEWHSDNSDGEIASECECDSVFNHLEELRLHLEQEMGFEKFFEVYEKIKAIHEDEDENIEICSKIVQNILGNEHQHLYAKILHLVMADGAYQEDNDE

SEQ ID NO: 13486 - protein, 1200 aa, Homo sapiens
MLGESDERCTNAGSGCRRSSPGTSAQQLDATFSTNASLEIFELDLSDPSLDMKSCATFSSSHRYHKLIWGPYKMDSKGDVSGVLIAGGENGNIILYDPSKIIAGDKEVVIAQNDKHTGPVRALDVNIFQTNLVASGANESEIYIWDLNNFATPMTPGAKTQPPEDISCIAWNRQVQHILASASPSGRATVWDLRKNEPIIKVSDHSNRMHCSGLAWHPDVATQMVLASEDDRLPVIQMWDLRFASSPLRVLENHARGILAIAWSMADPELLLSCGKDAKILCSNPNTGEVLYELPTNTQWCFDIQWCPRNPAVLSAASFDGRISVYSIMGGSTDGLRQKQVDKLSSSFGNLDPFGTGQPLPPLQIPQQTAQHSIVLPLKKPPKWIRRPVGASFSFGGKLVTFENVRMPSHQGAEQQQQQHHVFISQVVTEKEFLSRSDQLQQAVQSQGFINYCQKKIDASQTEFEKNVWSFLKVNFEDDSRGKYLELLGYRKEDLGKKIALALNKVDGANVALKDSDQVAQSDGEESPAAEEQLLGEHIKEEKEESEFLPSSGGTFNISVSGDIDGLITQALLTGNFESAVDLCLHDNRMADAIILAIAGGQELLARTQKKYFAKSQSKITRLITAVVMKNWKEIVESCDLKNWREALAAVLTYAKPDEFSALCDLLGTRLENEGDSLLQTQACLCYICAGNVEKLVACWTKAQDGSHPLSLQDLIEKVVILRKAVQLTQAMDTSTVGVLLAAKMSQYANLLAAQGSIAAALAFLPDNTNQPNIMQLRDRLCRAQGEPVAGHESPKIPYEKQQLPKGRPGPVAGHHQMPRVQTQQYYPHGENPPPPGFIMHGNVNPNAAGQLPTSPGHMHTQVPPYPQPQPYQPAQPYPFGTGGSAMYRPQQPVAPPTSNAYPNTPYISSASSYTGQSQLYAAQHQASSPTSSPATSFPPPPSSGASFQHGGPGAPPSSSAYALPPGTTGPQNGWNDPPALNRVPKKKKMPENFMPPVPITSPIMNPLGDPQSQMLQQQPSAPVPLSSQSSFPQPHLPGGQPFHGVQQPLGQTGMPPSFSKPNIEGAPGAPIGNTFQHVQSLPTKKITKKPIPDEHLILKTTFEDLIQRCLSSATDPQTKRKLDDASKRLEFLYDKLREQTLSPTITSGLHNIARSIETRNYSEGLTMHTHIVSTSNFSETSAFMPVLKVVLTQANKLGV

SEQ ID NO: 13487 - protein, 354 aa, Homo sapiens
MAPAAWLRSAAARALLPPMLLLLLQPPPLLARALPPDAHHLHAERRGPQPWHAALPSSPAPAPATQEAPRPASSLRPPRCGVPDPSDGLSARNRQKRILRFPWQLVQEQVRQTMAEALKVWSDVTPLTFTEVHEGRADIMIDFARYWHGDDLPFDGPGGILAHAFFPKTHREGDVHFDYDETWTIGDDQGTDLLQVAAHEFGHVLGLQHTTAAKALMSAFYTFRYPLSLSPDDCRGVQHLYGQPWPTVTSRTPALGPQAGIDTNEIAPLEPDAPPDACEASFDAVSTIRGELFFFKAGFVWRLRGGQLQPGYPALASRHWQGLPSPVDAAFEDAQGHIWFFQGTTGVSTPAPGV

SEQ ID NO: 13488 - protein, 70 aa, Homo sapiens
MFVLVEMVDTVRIPPWQFERKLNDSIAEELNKKLANKVVYNVGLCICLFDITKLEDAYVFPGDGASHTKG

SEQ ID NO: 13489 - protein, 132 aa, Homo sapiens
MLMLFVFGVLLHEVSLSGQNEAPPNTHSIPGEPLYNYASIRLPEEHIPFFLHNNRHIATVCRKDSLCPYKKHLEKLKYCWGYEKSCKPEFRFGYPVCSYVDMGWTDTLESAEDIFWKQADFGYARERLEEMH

SEQ ID NO: 13490 - protein, 182 aa, Homo sapiens
MKVLLRLICFIALLISSLEADKCKEREEKIILVSSANEIDVRPCPLNPNEHKGTITWYKDDSKTPVSTEQASRIHQHKEKLWFVPAKVEDSGHYYCVVRNSSYCLRIKISAKFVENEPNLCYNAQAIFKQKLPVAGDGGLVCPYMEFFKNENNELPKLQWYKDCKPLLLDNIHFSGVKDRLI

SEQ ID NO: 13491 - protein, 761 aa, Homo sapiens
TASLGEETLASASSSSDSDTGGASPPPRKKPRASAAEGVGEPGASAGRAGLSPPSSSSSSSSSSSSSVVVVVGLPPAAAPPAAAAVPHRSSGHSLVSGSIMQANGAGGGGGGGGGGGGGGGGGGGQGQTPELACLSAQNGESSPSSSSSAGDLAHANGLLPSAPSAASNNSNSLNVNNGVPGGAAAASSATVAAASATTAASSSLATPELGSSLKKKKRLSQSDEDVIRLIGQHLNGLGLNQTVDLLMQESGCRLEHPSATKFRNHVMEGDWDKAENDLNELKPLVHSPHAIVVRGALEISQTLLGIIVRMKFLLLQQKYLEYLEDGKVLEALQVLRCELTPLKYNTERIHVLSGYLMCSHAEDLRAKAEWEGKGTASRSKLLDKLQTYLPPSVMLPPRRLQTLLRQAVELQRDRCLYHNTKLDNNLDSVSLLIDHVCSRRQFPCYTQQILTEHCNEVWFCKFSNDGTKLATGSKDTTVIIWQVDPDTHLLKLLKTLEGHAYGVSYIAWSPDDNYLVACGPDDCSELWLWNVQTGELRTKMSQSHEDSLTSVAWNPDGKRFVTGGQRGQFYQCDLDGNLLDSWEGVRVQCLWCLSDGKTVLASDTHQRIRGYNFEDLTDRNIVQEDHPIMSFTISKNGRLALLNVATQGVHLWDLQDRVLVRKYQGVTQGFYTIHSCFGGHNEDFIASGSEDHKVYIWHKRSELPIAELTGHTRTVNCVSWNPQIPSMMASASDDGTVRIWGPAPFIDHQNIEEECSSMDS

SEQ ID NO: 13492 - protein, 258 aa, Homo sapiens
MMVLQVSAAPRTVALTALLMVLLTSVVQGRATPENYLFQGRQECYAFNGTQRFLERYIYNREEFARFDSDVGEFRAVTELGRPAAEYWNSQKDILEEKRAVPDRMCRHNYELGGPMTLQRRVQPRVNVSPSKKGPLQHHNLLVCHVTDFYPGSIQVRWFLNGQEETAGVVSTNLIRNGDWTFQILVMLEMTPQQGDVYTCQVEHTSLDSPVTVEWKAQSDSARSKTLTGAGGFVLGLIICGVGIFMHRRSKKVQRGSA

SEQ ID NO: 13493 - protein, 114 aa, Homo sapiens
MERGAGAKLLPLLLLLRATGFTCAQTDGRNGYTAVIEVTSGGPWGDWAWPEMCPDGFFASGFSLKVEPPQGIPGDDTALNGIRLHCARGNVLGNTHVVESQSGRWGAGVEDPLG

SEQ ID NO: 13494 - protein, 791 aa, Homo sapiens
MWFFARDPVRDFPFELIPEPPEGGLPGPWALHRGRKKATGSPVSIFVYDVKPGAEEQTQVAKAAFKRFKTLRHPNILAYIDGLETEKCLHVVTEAVTPLGIYLKARVEAGGLKELEISWGLHQIVKALSFLVNDCSLIHNNVCMAAVFVDRAGEWKLGGLDYMYSAQGNGGGPPRKGIPELEQYDPPELADSSGRVVREKWSADMWRLGCLIWEVFNGPLPRAAALRNPGKIPKTLVPHYCELVGANPKVRPNPARFLQNCRAPGGFMSNRFVETNLFLEEIQIKEPAEKQKFFQELSKSLDAFPEDFCRHKVLPQLLTAFEFGNAGAVVLTPLFKVGKFLSAEEYQQKIIPVVVKMFSSTDRAMRIRLLQQMEQFIQYLDEPTVNTQIFPHVVHGFLDTNPAIREQTVKSMLLLAPKLNEANLNVELMKHFARLQAKDEQGPIRCNTTVCLGKIGSYLSASTRHRVLTSAFSRATRDPFAPSRVAGVLGFAATHNLYSMNDCAQKILPVLCGLTVDPEKSVRDQAFKAIRSFLSKLESVSEDPTQLEEVEKDVHAASSPGMGGAAASWAGWAVTGVSSLTSKLIRSHPTTAPTETNIPQRPTPEGHWETQEEDKDTAEDSSTADRWDDEDWGSLEQEAESVLAQQDDWSTGGQVSRASQVSNSDHKSSKSPESDWSSWEAEGSWEQGWQEPSSQEPPPDGTRLASEYNWGGPESSDKGDPFATLSARPSTQPRPDSWGEDNWEGLETDSRQVKAELARKKREERRREMEAKRAERKVAKGPMKLGARKLD

SEQ ID NO: 13495 - protein, 119 aa, Homo sapiens
MLKALFLTMLTLALVKSQDTEETITYTQCTDGYEWDPVRQQCKDIDECDIVPDACKGGMKCVNHYGGYLCLPKTAQIIVNNEQPQQETQPAEGTSGATTGVVAASSMATSGVLPGGGFV

SEQ ID NO: 13496 - protein, 89 aa, Homo sapiens
MAAGRLFLSRLRAPFSSMAKSPLEGVSSSRGLHAGRGPRRLSIEGNIGLHCPKSWKLAGYDVPGASTMVLHIPDIFLFEPPESTAGALP

SEQ ID NO: 13497 - protein, 143 aa, Homo sapiens
MQAACWYVLFLLQPTVYLVTCANLTNGGKSELLKSGSSKSTLKHIWTESSKDLSISRLLSQTFRGKENDTDLDLRYDTPEPYSEQDLWDWLRNSTDLQEPRPRAKRRPIVKTGKFKKMFGWGDFHSNIKTVKLNLLITGKIVD

SEQ ID NO: 13498 - protein, 44 aa, Homo sapiens [sequence omitted]

SEQ ID NO: 13499 - protein, 153 aa, Homo sapiens
MNSKGQYPTQPTYPVQPPGNPVYPQTLHLPQAPPYTDAPPAYSELYRPSFVHPGAATVPTMSAAFPGASLYLPMAQSVAVGPLGSTIPMAYYPVGPIYPPGSTVLVEGGYDAGARFGAGATAGNIPVKEDQDHDREQGEEDNGDNNLERRGKM

SEQ ID NO: 13500 - protein, 285 aa, Homo sapiens
MWVTKLLPALLLQHVLLHLLLLPIAIPYAEGQRKRRNTIHEFKKSAKTTLIKIDPALKIKTKKVNTADQCANRCTRNKGLPFTCKAFVFDKARKQCLWFPFNSMSSGVKKEFGHEFDLYENKDYIRNCIIGKGRSYKGTVSITKSGIKCQPWSSMIPHEHSYRGKDLQENYCRNPRGEEGGPWCFTSNPEVRYEVCDIPQCSEVECMTCNGESYRGLMDHTESGKICQRWDHQTPHRHKFLPERYPDKGFDDNYCRNPDGQPRPWCYTLDPHTRWEYCAIKTCET

SEQ ID NO: 13501 - protein, 96 aa, Homo sapiens
MSTDTGVSLPSYEEDQGSKLIRKAKEAPFVPVGIAGFAAIVAYGLYKLKSRGNTKMSIHLIHMRVAAQGFVVGAMTVAFFFFRYGLFHVSGILGKT

SEQ ID NO: 13502 - protein, 340 aa, Homo sapiens
METSALKQQEQPAATKIRNLPWVEKYRPQTLNDLISHQDILSTIQKFINEDRLPHLLLYGPPGTGKTSTILACAKQLYKDKEFGSMVLELNASDDRGIDIIRGPILSFASTRTIFKKGFKLVILDEADAMTQDAQNALRRVIEKFTENTRFCLICNYLSKIIPALQSRCTRFRFGPLTPELMVPRLEHVVEEEKVDISEDGMKALVTLSSGDMRRALNILQSTNMAFGKVTEETVYTCTGHPLKSDIANILDWMLNQDFTTAYRNITELKTLKGLALHDILTEIHLFVHRVDFPSSVRIHLLTKMADIEYRLSVGTNEKIQLSSLIAAFQVTRDLIVAEA

SEQ ID NO: 13503 - protein, 180 aa, Homo sapiens
MAVISLLFLAVMYVVHHPLMVSDRMDLDTLARSRQLEKRMSEEMRLLEMEFEERKRAAEQRQKAENFWTGDTSSDQLVLGKKDMGWPFQADGQEGPLGWMLGNLWNTGLFCLFLVFELLRQNMQHEPAFDSSSEEEEEEVRVVPVTSYNWLTDFPSQEALDSFYKHYVQNAIRDLPCTCE

SEQ ID NO: 13504 - protein, 275 aa, Homo sapiens
MAAAMPLALLVLLLLGPGGWCLAEPPRDSLREELVITPLPSGDVAATFQFRTRWDSELQREGDTDHYFLRYAVLPREVVCTENLTPWKKLLPCSSKAGLSVLLKADRLFHTSYHSQAVHIRPVCRNARCTSISWELRQTLSVVFDAFITGQGKKDWSLFRMFSRTLTEPCPLASESRVYVDITTYNQDNETLEVHPPPTTTYQDVILGTRKTYAIYDLLDTAMINNSRNLNIQLKWKRPPENGYIHYQPAQDRLQPHLLEMLIQLPANSVTKVSI

SEQ ID NO: 13505 - protein, 2466 aa, Homo sapiens
MHVSLAEALEVRGGPLQEEEIWAVLNQSAESLQELFRKVSLADPAALGFIISPWSLLLLPSGSVSFTDENISNQDLRAFTAPEVLQNQSLTSLSDVEKIHIYSLGMTLYWGADYEVPQSQPIKLGDHLNSILLGMCEDVIYARVSVRTVLDACSAHIRNSNCAPSFSYVKHLVKLVLGNLSGTDQLSCNSEQKPDRSQAIRDRLRGKGLPTGRSSTSDVLDIQKPPLSHQTFLNKGLSKSMGFLSIKDTQDENYFKDILSDNSGREDSENTFSPYQFKTSGPEKKPIPGIDVLSKKKIWASSMDLLCTADRDFSSGETATYRRCHPEAVTVRTSTTPRKKEARYSDGSIALDIFGPQKMDPIYHTRELPTSSAISSALDRIRERQKKLQVLREAMNVEEPVRRYKTYHGDVFSTSSESPSIISSESDFRQVRRSEASKRFESSSGLPGVDETLSQGQSQRPSRQYETPFEGNLINQEIMLKRQEEELMQLQAKMALRQSRLSLYPGDTIKASMLDITRDPLREIALETAMTQRKLRNFFGPEFVKMTIEPFISLDLPRSILTKKGKNEDNRRKVNIMLLNGQRLELTCDTKTICKDVFDMVVAHIGLVEHHLFALATLKDNEYFFVDPDLKLTKVAPEGWKEEPKKKTKATVNFTLFFRIKFFMDDVSLIQHTLTCHQYYLQLRKDILEERMHCDDETSLLLASLALQAEYGDYQPEVHGVSYFRMEHYLPARVMEKLDLSYIKEELPKLHNTYVGASEKETELEFLKVCQRLTEYGVHFHRVHPEKKSQTGILLGVCSKGVLVFEVHNGVRTLVLRFPWRETKKISFSKKKITLQNTSDGIKHGFQTDNSKICQYLLHLCSYQHKFQLQMRARQSNQDAQDIERASFRSLNLQAESVRGFNMGRAISTGSLASSTLNKLAVRPLSVQAEILKRLSCSELSLYQPLQNSSKEKNDKASWEEKPREMSKSYHDLSQASLYPHRKNVIVNMEPPPQTVAELVGKPSHQMSRSDAESLAGVTKLNNSKSVASLNRSPERRKHESDSSSIEDPGQAYVLDVLHKRWSIVSSPEREITLVNLKKDAKYGLGFQIIGGEKMGRLDLGIFISSVAPGGPADLDGCLKPGDRLISVNSVSLEGVSHHAAIEILQNAPEDVTLVISQPKEKISKVPSTPVHLTNEMKNYMKKSSYMQDSAIDSSSKDHHWSRGTLRHISENSFGPSGGLREGSLSSQDSRTESASLSQSQVNGFFASHLGDQTWQESQHGSPSPSVISKATEKETFTDSNQSKTKKPGISDVTDYSDRGDSDMDEATYSSSQDHQTPKQESSSSVNTSNKMNFKTFSSSPPKPGDIFEVELAKNDNSLGISVTGGVNTSVRHGGIYVKAVIPQGAAESDGRIHKGDRVLAVNGVSLEGATHKQAVETLRNTGQVVHLLLEKGQSPTSKEHVPVTPQCTLSDQNAQGQGPEKVKKTTQVKDYSFVTEENTFEVKLFKNSSGLGFSFSREDNLIPEQINASIVRVKKLFPGQPAAESGKIDVGDVILKVNGASLKGLSQQEVISALRGTAPEVFLLLCRPPPGVLPEIDTALLTPLQSPAQVLPNSSKDSSQPSCVEQSTSSDENEMSDKSKKQCKSPSRRDSYSDSSGSGEDDLVTAPANISNSTWSSALHQTLSNMVSQAQSHHEAPKSQEDTICTMFYYPQKIPNKPEFEDSNPSPLPPDMAPGQSYQPQSESASSSSMDKYHIHHISEPTRQENWTPLKNDLENHLEDFELEVELLITLIKSEKGSLGFTVTKGNQRIGCYVHDVIQDPAKSDGRLKPGDRLIKVNDTDVTNMTHTDAVNLLRAASKTVRLVIGRVLELPRIPMLPHLLPDITLTCNKEELGFSLCGGHDSLYQVVYISDINPRSVAAIEGNLQLLDVIHYVNGVSTQGMTLEEVNRALDMSLPSLVLKATRNDLPVVPSSKRSAVSAPKSTKGNGSYSVGSCSQPALTPNDSFSTVAGEEINEISYPKGKCSTYQIKGSPNLTLPKESYIQEDDIYDDSQEAEVIQSLLDVVDEEAQNLLNENNAAGYSCGPGTLKMNGKLSEERTEDTDCDGSPLPEYFTEATKMNGCEEYCEEKVKSESLIQKPQEKKTDDDEITWGNDELPIERTNHEDSDKDHSFLTNDELAVLPVVKVLPSGKYTGANLKSVIRVLRGLLDQGIPSKELENLQELKPLDQCLIGQTKENRRKNRYKNILPYDATRVPLGDEGGYINASFIKIPVGKEEFVYIACQGPLPTTVGDFWQMIWEQKSTVIAMMTQEVEGEKIKCQRYWPNILGKTTMVSNRLRLALVRMQQLKGFVVRAMTLEDIQTREVRHISHLNFTAWPDHDTPSQPDDLLTFISYMRHIHRSGPIITHCSAGIGRSGTLICIDVVLGLISQDLDFDISDLVRCMRLQRHGMVQTEDQYIFCYQVILYVLTRLQAEEEQKQQPQLLK

SEQ ID NO: 13506 - protein, 317 aa, Homo sapiens
MVGEMETKEKPKPTPDYLMQLMNDKKLMSSLPNFCGIFNHLERLLDEEISRVRKDMYNDTLNGSTEKRSAELPDAVGPIVQLQEKLYVPVKEYPDFNFVGRILGPRGLTAKQLEAETGCKIMVRGKGSMRDKKKEEQNRGKPNWEHLNEDLHVLITVEDAQNRAEIKLKRAVEEVKKLLVPAAEGEDSLKKMQLMELAILNGTYRDANIKSPTAQAAPRIITGPAPVLPPAALRTPTPAGPTIMPLIRQIQTAVMPNGTPHPTAAIVPPGPEAGLIYTPYEYPYTLAPATSILEYPIEPSGVLEWIEMPVMPDISAH

SEQ ID NO: 13507 - protein, 105 aa, Homo sapiens; identical to SEQ ID NO: 12592

SEQ ID NO: 13508 - protein, 544 aa, Homo sapiens
MLLPLLLSSLLGGSQAMDGRFWIRVQESVMVPEGLCISVPCSFSYPRQDWTGSTPAYGYWFKAVTETTKGAPVATNHQSREVEMSTRGRFQLTGDPAKGNCSLVIRDAQMQDESQYFFRVERGSYVRYNFMNDGFFLKVTVLSFTPRPQDHNTDLTCHVDFSRKGVSAQRTVRLRVAYAPRDLVISISRDNTPALEPQPQGNVPYLEAQKGQFLRLLCAADSQPPATLSWVLQNRVLSSSHPWGPRPLGLELPGVKAGDSGRYTCRAENRLGSQQRALDLSVQYPPENLRVMVSQANRTVLENLGNGTSLPVLEGQSLCLVCVTHSSPPARLSWTQRGQVLSPSQPSDPGVLELPRVQVEHEGEFTCHARHPLGSQHVSLSLSVHYKKGLISTAFSNGAFLGIGITALLFLCLALIIMKILPKRRTQTETPRPRFSRHSTILDYINVVPTAGPLAQKRNQKATPNSPRTPLPPGAPSPESKKNQKKQYQLPSFPEPKSSTQAPESQESQEELHYATLNFPGVRPRPEARMPKGTQADYAEVKFQ

SEQ ID NO: 13509 - protein, 449 aa, Homo sapiens
MLTCNKAGSRMVVDAANSNGPFQPVVLLHIRDVPPADQEKLFIQKLRQCCVLFDFVSDPLSDLKWKEVKRAALSEMVEYITHNRNVITEPIYPEVVHMFAVNMFRTLPPSSNPTGAEFDPEEDEPTLEAAWPHLQLVYEFFLRFLESPDFQPNIAKKYIDQKFVLQLLELFDSEDPRERDFLKTTLHRIYGKFLGLRAYIRKQINNIFYRFIYETEHHNGIAELLEILGSIINGFALPLKEEHKIFLLKVLLPLHKVKSLSVYHPQLAYCVVQFLEKDSTLTEPVVMALLKYWPKTHSPKEVMFLNELEEILDVIEPSEFVKIMEPLFRQLAKCVSSPHFQVAERALYYWNNEYIMSLISDNAAKILPIMFPSLYRNSKTHWNKTIHGLIYNALKLFMEMNQKLFDDCTQQFKAEKLKEKLKMKEREEAWVKIENLAKANPQVLKKRIT

SEQ ID NO: 13510 - protein, 636 aa, Homo sapiens
MDPGSGGGGGGGGGGGSSSGSSSSDSAPDCWDQADMEAPGPGPCGGGGSLAAAAEAQRENLSAAFSRQLNVNAKPFVPNVHAAEFVPSFLRGPAAPPPPVGGAANNHGAGSGAGGRAAPVESSQEEQSLCEGSNSAVSMELSEPIENGETEMSPEESWEHKEEISEAEPGGGSLGDGRPPEESAHEMMEEEEEIPKPKSVVAPPGAPKKEHVNVVFIGHVDAGKSTIGGQIMYLTGMVDKRTLEKYEREAKEKNRETWYLSWALDTNQEERDKGKTVEVGRAYFETEKKHFTILDAPGHKSFVPNMIGGASQADLAVLVISARKGEFETGFEKGGQTREHAMLAKTAGVKHLIVLINKMDDPTVNWSNERYEECKEKLVPFLKKVGFNPKKDIHFMPCSGLTGANLKEQSDFCPWYIGLPFIPYLDNLPNFNRSVDGPIRLPIVDKYKDMGTVVLGKLESGSICKGQQLVMMPNKHNVEVLGILSDDVETDTVAPGENLKIRLKGIEEEEILPGFILCDPNNLCHSGRTFDAQIVIIEHKSIICPGYNAVLHIHTCIEEVEITALICLVDKKSGEKSKTRPRFVKQDQVCIARLRTAGTICLETFKDFPQMGRFTLRDEGKTIAIGKVLKLVPEKD

SEQ ID NO: 13511 - protein, 92 aa, Homo sapiens
MALWMRLLPLLALLALWGPDPAAAFVNQHLCGSHLVEALYLVCGERGFFYTPKTRREAEDLQAGELLQLDAARRQPHTRRLLHRERWNKALE

SEQ ID NO: 13512 - protein, 411 aa, Homo sapiens
MVCFRLFPVPGSGLVLVCLVLGAVRSYALELNLTDSENATCLYAKWQMNFTVRYETTNKTYKTVTISDHGTVTYNGSICGDDQNGPKIAVQFGPGFSWIANFTKAASTYSIDSVSFSYNTGDNTTFPDAEDKGILTVDELLAIRIPLNDLFRCNSLSTLEKNDVVQHYWDVLVQAFVQNGTVSTNEFLCDKDKTSTVAPTIHTTVPSPTTTPTPKEKPEAGTYSVNNGNDTCLLATMGLQLNITQDKVASVININPNTTHSTGSCRSHTALLRLNSSTIKYLDFVFAVKNENRFYLKEVNISMYLVNGSVFSIANNNLSYWDAPLGSSYMCNKEQTVSVSGAFQINTFDLRVQPFNVTQGKYSTAEECSADSDLNFLIPVAVGVALGFLIIVVFISYMIGRRKSRTGYQSV

SEQ ID NO: 13513 - protein, 281 aa, Homo sapiens
MKRLVCVLLVCSSAVAQLHKDPTLDHHWHLWKKTYGKQYKEKNEEAVRRLIWEKNLKFVMLHNLEHSMGMHSYDLGMNHLGDMGSCGACWAFSAVGALEAQLKLKTGKLVSLSAQNLVDCSTEKYGNKGCNGGFMTTAFQYIIDNKGIDSDASYPYKAMDQKCQYDSKYRAATCSKYTELPYGREDVLKEAVANKGPVSVGVDARHPSFFLYRSGVYYEPSCTQNVNHGVLVVGYGDLNGKEYWLVKNSWGHNFGEEGYIRMARNKGNHCGIASFPSYPEI

SEQ ID NO: 13514 - protein, 229 aa, Homo sapiens
MLRLYVLVMGVSAFTLQPAAHTGAARSCRFRGRHYKREFRLEGEPVALRCPQVPYWLWASVSPRINLTWHKNDSARTVPGEEETRMWAQDGALWLLPALQEDSGTYVCTTRNASYCDKMSIELRVFENTDAFLPFISYPQILTLSTSGVLVCPDLSEFTRDKTDVKIQWYKDSLLLDKDNEKFLSVRGTTHLLVHDVALEDAGYYRCVLTFAHEGQQYNITRSIELRIK

SEQ ID NO: 13515 - protein, 121 aa, Homo sapiens
MGRPLLLPLLLLLQPPAFLQPGGSTGSGPSYLYGVTQPKHLSASMGGSVEIPFSFYYPWELAIVPNVRISWRRGHFHGQSFYSTRPPSIHKDYVNRLFLNWTEGQESGFLRISNLRKEDQS

SEQ ID NO: 13516 - protein, 275 aa, Homo sapiens
MNWHLPLFLLASVTLPSICSHFNPLSLEELGSNTGIQVFNQIVKSRPHDNIVISPHGIASVLGMLQLGADGRTKKQLAMVMRYGVNGVGKILKKINKAIVSKKNKDIVTVANAVFVKNASEIEVPFVTRNKDVFQCEVRNVNFEDPASACDSINAWVKNETRDMIDNLLSPDLIDGVLTRLVLVNAVYFKGLWKSRFQPENTKKRTFVAADGKSYQVPMLAQLSVFRCGSTSAPNDLWYNFIELPYHGESISMLIALPTESSTPLSAIIPHISTK

SEQ ID NO: 13517 - protein, 39 aa, Homo sapiens
MGDREQLLQRARLAEQAERYDDMASAMKAVRRICVSLHS

SEQ ID NO: 13518 - protein, 136 aa, Homo sapiens
MWLEILLTSVLGFAIYWFISRDKEETLPLEDGWWGPGTRSAAREDDSIRPFKVETSDEEIHDLHQRIDKFRFTPPLEDSCFHYGFNSNYLKKVISYWRNEFDWKKQVEILNRYPHFKTKIEGLDIHFIHVKPPQLP

SEQ ID NO: 13519 - protein, 128 aa, Homo sapiens
AQALWRMPWLPVFLSLAAAAAAAAAEQQVPLVLWSSDRDLWAPAADTHEGHITSDLQLSTYLDPALELGPRNVLLFLQDKLSIEDFTAYGGVFGNKQDSAFSNLEHTQVRRCPIHSGPHSGPPFQGGP

SEQ ID NO: 13520 - protein, 202 aa, Homo sapiens
MATGSRTSLLLAFGLLCLPWLQEGSAFPTIPLSRLFDNAMLRAHRLHQLAFDTYQEFNPQTSLCFSESIPTPSNREETQQKSNLELLRISLLLIQSWLEPVQFLRSVFANSLVYGASDSNVYDLLKDLEEGIQTLMGRLEDGSPRTGQIFKQTYSKFDTNSHNDDALLKNYGLLYCFRKDMDKVETFLRIVQCRSVEGSCGF

SEQ ID NO: 13521 - protein, 608 aa, Homo sapiens
MGRIGISCLFPASWHFSISPVGCPRILNTNLRQIMVISVLAAAVSLLYFSVVIIRNKYGRLTRDKKFQRYLARVTDIEATDTNNPNVNYGIVVDCGSSGSRVFVYCWPRHNGNPHDLLDIRQMRDKNRKPVVMKIKPGISEFATSPEKVSDYISPLLNFAAEHVPRAKHKETPLYILCTAGMRILPESQQKAILEDLLTDIPVHFDFLFSDSHAEVISGKQEGVYAWIGINFVLGRFEHIEDDDEAVVEVNIPGSESSEAIVRKRTAGILDMGGVSTQIAYEVPKTEEVAKNLLAEFNLGCDVHQTEHVYRVYVATFLGFGGNAARQRYEDRIFANTIQKNRLLGKQTGLTPDMPYLDPCLPLDIKDEIQQNGQTIYLRGTGDFDLCRETIQPFMNKTNETQTSLNGVYQPPIHFQNSEFYGFSEFYYCTEDVLRMGGDYNAAKFTKAAKDYCATKWSILRERFDRGLYASHADLHRLKYQCFKSAWMFEVFHRGFSFPVNYKSLKTALQVYDKEVQWTLGAILYRTRFLPLRDIQQEAFRASHTHWRGVSFVYNHYLFSGCFLVVLLAILLYLLRLRRIHRRTPRSSSAAALWMEEGLPAQNAPGTL

SEQ ID NO: 13522 - protein, 320 aa, Homo sapiens
MLKMLSFKLLLLAVALGFFEGDAKFGERNEGSGARRRRCLNGNPPKRLKRRDRRMMSQLELLSGGEMLCGGFYPRLSCCLRSDSPGLGRLENKIFSVTNNTECGKLLEEIKCALCSPHSQSLFHSPEREVLERDLVLPLLCKDYCKEFFYTCRGHIPGFLQTTADEFCFYYARKDGGLCFPDFPRKQVRGPASNYLDQMEEYDKVEEISRKHKHNCFCIQEVVSGLRQPVGALHSGDGSQRLFILEKEGYVKILTPEGEIFKEPYLDIHKLVQSGIKVGFLNFIYFCAGYVNFILVLPSSLKVFLCNKRKNLAGENKGAT

SEQ ID NO: 13523 - protein, 116 aa, Homo sapiens
MRLPWELLVLQSFILCLADDSTLHGPIFIQEPSPVMFPLDSEEKKVKLNCEVKGNPKPHIRWKLNGTDVDTGMDFRYSVVEGSLLINNPNKTQDAGTYQCTATNSFGTIVSREAKL

SEQ ID NO: 13524 - protein, 445 aa, Homo sapiens
MARGLQVPLPRLATGLLLLLSVQPWAESGKVLVVPTDGSPWLSMREALRELHARGHQAVVLTPEVNMHIKEEKFFTLTAYAVPWTQKEFDRVTLGYTQGFFETEHLLKRYSRSMAIMNNVSLALHRCCVELLHNEALIRHLNATSFDVVLTDPVNLCGAVLAKYLSIPAVFFWRYIPCDLDFKGTQCPNPSSYIPKLLTTNSDHMTFLQRVKNMLYPLALSYICHTFSAPYASLASELFQREVSVVDLVSYASVWLFRGDFVMDYPRPIMPNMVFIGGINCANGKPLSQEFEAYINASGEHGIVVFSLGSMVSEIPEKKAMAIADALGKIPQTVLWRYTGTRPSNLANNTILVKWLPQNDLLGHPMTRAFITHAGSHGVYESICNGVPMVMMPLFGDQMDNAKRMETKGAGVTLNVLEMTSEDLENALKAVINDKRKKQQSGRQM

SEQ ID NO: 13525 - protein, 94 aa, Homo sapiens
MPSLPAPPAPLLLLGLLLLGSRPARGAGPEPPVLPIRSEKEPLPVRGAAGCTFGGKVYALDETWHPDLGEPFGVMRCVLCACEATGTLRPREMK

SEQ ID NO: 13526 - protein, 163 aa, Homo sapiens
MRPRKAFLLLLLLGLVQLLAVAGAEGPDEDFRQVQANSRRTRPGSGKGEGEPLERRGEGVKKQVRVLWNSKHSFSKCDSSNRENAIEDEEEEEEEDDDEEEDDLEVKEENGVLVLNDANFDNFVADKDTVLLEFYAPWCGHCKQFAPEYEKIANILKDKDPPI

SEQ ID NO: 13527 - protein, 248 aa, Homo sapiens
MEYAMKSLSLLYPKSLSRHVSVRTSVVTQQLLSEPSPKAPRARPCRVSTADRSVRKGIMAYSLEDLLLKTRNPEARSQEVRDTLMLADKPFFLVLEEDGTTVETEEYFQALAGDTVFMVLQKGQKWQPPSEQGTRHPLSLSHKPAKKIDVARVTFDLYKLNPQDFIGCLNVKATFYDTYSLSYDLHCCGAKRIMKEAFRWALFSMQATGHVLLGTSCYLQQLLDATEEGQPPKGKASSLIPTCLKILQ

SEQ ID NO: 13528 - protein, 190 aa, Homo sapiens
MQPRTPLVLCVLLSQVLLLTSAEDLDCTPGFQQKVFHINQPAEFIEDQSILNLTFSDCKGNDKLRYEVSSPYFKVNSDGGLVALRNITAVGKTLFVHARTPHAEDMAELVIVGGKDIQGSLQDIFKFARTSPVPRQKRSIVVSPILIPENQRQPFPRDVGKRTHNPINSELLLNEGITADLNPCITILAI

SEQ ID NO: 13529 - protein, 75 aa, Homo sapiens
MIRNWLTIFILFPLKLVEKCESSVSLTVPPVVKLENGSSTNVSLTLRPPLNATLVITFEITFRSKNITILELPDE

SEQ ID NO: 13530 - protein, 216 aa, Homo sapiens
MSRLWYGKKGRRHQPINHKYTLITTREDINSKQVATVKADLESESFRPNLSDPSELLLPDQIEKLTKHLPPRTIGYPWTLVYGTGKHGTSLKTLYRTMTGLDTPVLMVIKDSDGQVFGALASEPLKVSDGFYGTGETFVFTFCPEFEVFKWTGDNMFFIKGDMDSLAFGGGGGEFALWLDGDLYHGRSHSCKTFGNRTLSKKEDFFIQDIEIWAFE

SEQ ID NO: 13531 - protein, 672 aa, Homo sapiens
MADVFPGNDSTASQDVANRFARKGALRQKNVHEVKDHKFIARFFKQPTFCSHCTDFIWGFGKQGFQCQVCCFVVHKRCHEFVTFSCPGADKGPDTDDPRSKHKFKIHTYGSPTFCDHCGSLLYGLIHQGMKCDTCDMNVHKQCVINVPSLCGMDHTEKRGRIYLKAEVADEKLHVTVRDAKNLIPMDPNGLSDPYVKLKLIPDPKNESKQKTKTIRSTLNPQWNESFTFKLKPSDKDRRLSVEIWDWDRTTRNDFMGSLSFGVSELMKMPASGWYKLLNQEEGEYYNVPIPEGDEEGNMELRQKFEKAKLGPAGNKVISPSEDRKQPSNNLDRVKLTDFNFLMVLGKGSFGKVMLADRKGTEELYAIKILKKDVVIQDDDVECTMVEKRVLALLDKPPFLTQLHSCFQTVDRLYFVMEYVNGGDLMYHIQQVGKFKEPQAVFYAAEISIGLFFLHKRGIIYRDLKLDNVMLDSEGHIKIADFGMCKEHMMDGVTTRTFCGTPDYIAPEIIAYQPYGKSVDWWAYGVLLYEMLAGQPPFDGEDEDELFQSIMEHNVSYPKSLSKEAVSVCKGLMTKHPAKRLGCGPEGERDVREHAFFRRIDWEKLENREIQPPFKPKVCGKGAENFDKFFTRGQPVLTPPDQLVIANIDQSDFEGFSYVNPQFVHPILQSAV

SEQ ID NO: 13532 - protein, 390 aa, Homo sapiens
MRWRTILLQYCFLLITCLLTALEAVPIDIDKTKVQNIHPVESAKIEPPDTGLYYDEYLKQVIDVLETDKHFREKLQKADIEEIKSGRLSKELDLVSHHVRTKLDELKRQEVGRLRMLIKAKLDSLQDIGMDHQALLKQFDHLNHLNPDKFESTDLDMLIKAATSDLEHYDKTRHEEFKKYEMMKEHERREYLKTLNEEKRKEEESKFEEMKKKHENHPKVNHPGSKDQLKEVWEETDGLDPNDFDPKTFFKLHDVNSDGFLDEQELEALFTKELEKVYDPKNEEDDMVEMEEERLRMREHVMNETLDQQQFFTEEELKEYENIIALQENELKKKADELQKQKEELQRQHDQLEAQKLEYHQVIQQMEQKKLQQGIPPSGPAGELKFEPHI

SEQ ID NO: 13533 - protein, 24 aa, Homo sapiens
MSVVLVLLPTLLLVMLTGAQRACP

SEQ ID NO: 13534 - protein, 1721 aa, Homo sapiens
MSVSRTMEDSCELDLVYVTERIIAVSFPSTANEENFRSNLREVAQMLKSKHGGNYLLFNLSERRPDITKLHAKVLEFGWPDLHTPALEKICSICKAMDTWLNADPHNVVVLHNKGNRGRIGVVIAAYMHYSNISASADQALDRFAMKRFYEDKIVPIGQPSQRRYVHYFSGLLSGSIKMNNKPLFLHHVIMHGIPNFESKGGCRPFLRIYQAMQPVYTSGIYNIPGDSQTSVCITIEPGLLLKGDILLKCYHKKFRSPARDVIFRVQFHTCAIHDLGVVFGKEDLDDAFKDDRFPEYGKVEFVFSYGPEKIQGMEHLENGPSVSVDYNTSDPLIRWDSYDNFSGHRDDGMEEVVGHTQGPLDGSLYAKVKKKDSLHGSTGAVNATRPTLSATPNHVEHTLSVSSDSGNSTASTKTDKTDEPVPGASSATAALSPQEKRELDRLLSGFGLEREKQGAMYHTQHLRSRPAGGSAVPSSGRHVVPAQVHVNGGALASERETDILDDELPNQDGHSAGSMGTLSSLDGVTNTSEGGYPEALSPLTNGLDKSYPMEPMVNGGGYPYESASRAGPAHAGHTAPMRPSYSAQEGLAGYQREGPHPAWPQPVTTSHYAHDPSGMFRSQSFSEAEPQLPPAPVRGGSSREAVQRGLNSWQQQQQQQQQPRPPPRQQERAHLESLVASRPSPQPLAETPIPSLPEFPRAASQQEIEQSIETLNMLMLDLEPASAAAPLHKSQSVPGAWPGASPLSSQPLSGSSRQSHPLTQSRSGYIPSGHSLGTPEPAPRASLESVPPGRSYSPYDYQPCLAGPNQDFHSKSPASSSLPAFLPTTHSPPGPQQPPASLPGLTAQPLLSPKEATSDPSRTPEEEPLNLEGLVAHRVAGVQAREKQPAEPPAPLRRRAASDGQYENQSPEATSPRSPGVRSPVQCVSPELALTIALNPGGRPKEPHLHSYKEAFEEMEGTSPSSPPPSGVRSPPGLAKTPLSALGLKPHNPADILLHPTGVTRRRIQPEPRSYVESVARTAVAGPRAQDSEPKSFSAPATQAYGHEIPLRNGTLGGSFVSPSPLSTSSPILSADSTSVGSFPSGESSDQGPRTPTQPLLESGFRSGSLGQPSPSAQRNYQSSSPLPTVGSSYSSPDYSLQHFSSSPESQARAQFSVAGVHTVPGSPQARHRTVGTNTPPSPGFGWRAINPSMAAPSSPSLSHHQMMGPPGTGFHGSTVSSPQSSAATTPGSPSLCRHPAGVYQVSGLHNKVATTPGSPSLGRHPGAHQGNLASGLHSNAIASPGSPSLGRHLGGSGSVVPGSPCLDRHVAYGGYSTPEDRRPTLSRQSSASGYQAPSTPSFPVSPAYYPGLSSPATSPSPDSAAFRQGSPTPALPEKRRMSVGDRAGSLPNYATINGKVSSPVASGMSSPSGGSTVSFSHTLPDFSKYSMPDNSPETRAKVKFVQDTSKYWYKPEISREQAIALLKDQEPGAFIIRDSHSFRGAYGLAMKVSSPPPTIMQQNKKDMTHELVRHFLIETGPRGVKLKGCPNEPNFGSLSALVYQHSIIPLALPCKLVIPNRDPTDESKDSSGPANSTADLLKQGAACNVLFVNSVDMESLTGPQAISKATSETLAADPTPAATIVHFKVSAQGITLTDNQRKLFFRRHYPLNTVTFCDLDPQERKWMKTEGGAPAKLFGFVARKQGSTTDNACHLFAELDPNQPASAIVNFVSKVMLNAGQKR

SEQ ID NO: 13535 - protein, 223 aa, Homo sapiens
MPKKFQGENTKSAAARARRAEAKAAADAKKQKELEDAYWKDDDKHVMRKEQRKEEKEKRRLDQLERKKETQRLLEEEDSKLKGGKAPRVATSSKVTRAQIEDTLRRDHQLREAPDTAEKAKSHLEVPLEENVNRRVLEEGSVEARTIEDAIAVLSVAEEAADRHPERRMRAAFTAFEEAQLPRLKQENPNMRLSQLKQLLKKEWLRSPDNPMNQRAVPFNAPK

SEQ ID NO: 13536 - protein, 45 aa, Homo sapiens
MADSSGQQGKGRRVQPQWSPPAGTQPCRLHLYNSLTRNKCFLHFL

SEQ ID NO: 13537 - protein, 203 aa, Homo sapiens
MAGPELLLDSNIRLWVVLPIVIITFFVGMIRHYVSILLQSDKKLTQEQVSDRKYLSGLVQWLTPIIPALWGAEMGGSLEPRNLRPTLAACQVLIRSRVLRENGKYIPKQSFLTRKYYFNNPEDGFFKKTKRKVVPPSPMTDPTMLTDMMKGNVTNVLPMILIGGWINMTFSGFVTTKVPFPLTLRFKPMLQQGIELLTLDASW

SEQ ID NO: 13538 - protein, 235 aa, Homo sapiens
MEGPVLTLGLLAALAVCGSWGLNEEERLIRHLFQEKGYNKELRPVAHKEESVDVALALTLSNLISLKEVEETLTTNVWIEHGWTDNRLKWNAEEFGNISVLRLPPDMVWLPEIVLENNNDGSFQISYSCNVLVYHYGFVYWLPPAIFRSSCPISVTYFPFDWQNCSLKFRERGVGDSPPAGQGQRGPQSPSGQPQPPGHHLLPHHPPQAPLLHHQHPGALRAHLLHGQPGLLPTG

SEQ ID NO: 13539 - protein, 118 aa, Homo sapiens
MLPHQRLRGSGGGALGSDAPAMTSSPVSRVVYNGKRTSSPRSPPSSSEIFTPAHEENVRFIYEAWQGVERDLRGQVPGGERGLVEEYVEKVPNPSLKTFKPIDLSDLKRRSTQDAKKS

SEQ ID NO: 13540 - protein, 415 aa, Homo sapiens
MAAMETETAPLTLESLPTDPLLLILSFLDYRDLINCCYVSRRLSQLSSHDPLWRRHCKKYWLISEEEKTQKNQCWKSLFIDTYSDVGRYIDHYAAIKKAWDDLKKYLEPRCPRMVLSLKEGAREEDLDAVEAQIGCKLPDDYRCSYRIHNGQKLVVPGLLGSMALSNHYRSEDLLDVDTAAGGFQQRQGLKYCLPLTFCIHTGLSQYIAVEAAEGRNKNEVFYQCPDQMARNPAAIDMFIIGATFTDWFTSYVKNVVSGGFPIIRDQIFRYVHDPECVATTGDITVSVSTSFLPELSSVHPPHYFFTYRIRIEMSKDALPEKACQLDSRYWRITNAKGDVEEVQGPGVVGEFPIISPGRVYEYTSCTTFSTTSGYMEGYYTFHFLYFKDKIFNVAIPRFHMACPTFRVSIARLVS

SEQ ID NO: 13541 - protein, 315 aa, Homo sapiens
MDLRQFLMCLSLCTAFALSKPTEKKDRVHHEPQLSDKVHNDAQSFDYDHDAFLGAEEAKTFDQLTPEESKERLGMIVDKIDADKDGFVTEGELKSWIKHAQKKYIYDNVENQWQEFDMNQDGLISWDEYRNVTYGTYLDDPDPDDGFNYKQMMVRDERRFKMADKDGDLIATKEEFTAFLHPEEYDYMKDIVVQETMEDIDKNADGFIDLEEYIGDMYSHDGNTDEPEWVKTEREQFVEFRDKNRDGKMDKEETKDWILPSDYDHAEAEARHLVYESDQNKDGKLTKEEIVDKYDLFVGSQATDFGEALVRHDEF

SEQ ID NO: 13542 - protein, 568 aa, Homo sapiens
MGRHCGYLALVSALACGADWVFLPESPPEEGWEEQMCVKLSENRARKKRLNIIIVAEGAIDTQNKPITSEKIKELVVTQLGYDTRVTILGHVQRGGTPSAFDRILASRMGVEAVIALLEATPDTPACVVSLNGNHAVRLPLMECVQMTQDVQKAMDERRFQDAVRLRGRSFAGNLNTYKRLAIKLPDDQIPKTNCNVAVINVGAPAAGMNAAVRSAVRVGIADGHRMLAIYDGFDGFAKGQIKEIGWTDVGGWTGQGGSILGTKRVLPGKYLEEIATQMRTHSINALLIIGGFEAYLGLLELSAAREKHEEFCVPMVMVPATVSNNVPGSDFSIGADTALNTITDTCDRIKQSASGTKRRVFIIETMGGYCGYLANMGGLAAGADAAYIFEEPFDIRDLQSNVEHLTEKMKTTIQRGLVLRNESCSENYTTDFIYQLYSEEGKGVFDCRKNVLGHMQQGGAPSPFDRNFGTKISARAMEWITAKLKEARGRGKKFTTDDSICVLGISKRNVIFQPVAELKKQTDFEHRIPKEQWWLKLRPLMKILAKYKASYDVSDSGQLEHVQPWSV

SEQ ID NO: 13543 - protein, 334 aa, Homo sapiens
MSTEGGFGGTSSSDAQQSLQSFWPRVMEEIRNLTVKDFRVQELPLARIKKIMKLDEDVKMISAEAPVLFAKAAQIFITELTLRAWIHTEDNKRRTLQRNDIAMAITKFDQFDFLIDIVPRDELKPPKRQEEVRQSVTPAEPVQYYFTLAQQPTAVQVQGQQQGQQTTSSTTTIQPGQIIIAQPQQGQTTPVTMQVGEGQQVQIVQAQPQGQAQQAQSGTGQTMQVMQQIITNTGEIQQIPVQLNAGQLQYIRLAQPVSGTQVVQGQIQTLATNAQQITQTEVQQGQQQFSQFTDGQLYQIQQVTMPAGQDLAQPMFIQSANQPSDGQAPQVTGD

SEQ ID NO: 13544 - protein, 334 aa, Homo sapiens
MFPLRALWLVWALLGVAGSCPEPCACVDKYAHQFADCAYKELREVPEGLPANVTTLSLSANKITVLRRGAFADVTQVTSLWLAHNEVRTVEPGALAVLSQLKNLDLSHNFISSFPWSDLRNLSALQLLKMNHNRLGSLPRDALGALPDLRSLRINNNRLAGEACHVQVVFSTKKELPSLLVIVAVSVFLLVLATVPLLGAACCHLLAKHPGKPYRLILRPQAPDPMEKRIAADFDPRASYLESEKSYPAGGEAGGEEPEDVQGEGLDEDAEQGDPSGDLQREESLAACSLVESQSKANQEEFEAGSEYSDRLPLGAEAVNIAQEINGNYRQTAG

SEQ ID NO: 13545 - protein, 323 aa, Homo sapiens
MAPKQDPKPKFQEGERVLCFHGPLLYEAKCVKVAIKDKQVKYFIHYSGWNKNWDEWVPESRVLKYVDTNLQKQRELQKANQEQYAEGKMRGAAPGKKTSGLQQKNVEVKTKKNKQKTPGNGDGGSTSETPQPPRKKRARVDPTVENEETFMNRVEVKVKIPEELKPWLVDDWDLITRQKQLFYLPAKKNVDSILEDYANYKKSRGNTDNKEYAVNEVVAGIKEYFNVMLGTQLLYKFERPQYAEILADHPDAPMSQVYGAPHLLRLFVRIGAMLAYTPLDEKSLALLLNYLHDFLKYLAKNSATLFSASDYEVAPPEYHRKAV

SEQ ID NO: 13546 - protein, 594 aa, Homo sapiens
MGSLLALLALLLLWGAVAEGPAKKVLTLEGDLVLGGLFPVHQKGGPAEDCGPVNEHRGIQRLEAMLFALDRINRDPHLLPGVRLGAHILDSCSKDTHALEQALDFVRASLSRGADGSRHICPDGSYATHGDAPTAITGVIGGSYSDVSIQVANLLRLFQIPQISYASTSAKLSDKSRYDYFARTVPPDFFQAKAMAEILRFFNWTYVSTVASEGDYGETGIEAFELEARARNICVATSEKVGRAMSRAAFEGVVRALLQKPSARVAVLFTRSEDARELLAASQRLNASFTWVASDGWGALESVVAGSEGAAEGAITIELASYPISDFASYFQSLDPWNNSRNPWFREFWEQRFRCSFRQRDCAAHSLRAVPFEQESKIMFVVNAVYAMAHALHNMHRALCPNTTRLCDAMRPVNGRRLYKDFVLNVKFDAPFRPADTHNEVRFDRFGDGIGRYNIFTYLRAGSGRYRYQKTRKCPENFNEAKFIGFTMYTTCIIWLAFLPIFYVTSSDYRVQTTTMCVSVSLSGSVVLGCLFAPKLHIILFQPQKNVVSHRAPTSRFGSAAARASSSLGQGSGSQFVPTVCNGREVVDSTTSSL

SEQ ID NO: 13547 - protein, 597 aa, Homo sapiens
MERGLPLLCAVLALVLAPAGAFRNDKCGDTIKIESPGYLTSPGYPHSYHPSEKCEWLIQAPDPYQRIMINFNPHFDLEDRDCKYDYVEVFDGENENGHFRGKFCGKIAPPPVVSSGPFLFIKFVSDYETHGAGFSIRYEIFKRGPECSQNYTTPSGVIKSPGFPEKYPNSLECTYIVFVPKMSEIILEFESFDLEPDSNPPGGMFCRYDRLEIWDGFPDVGPHIGRYCGQKTPGRIRSSSGILSMVFYTDSAIAKEGFSANYSVLQSSVSEDFKCMEALGMESGEIHSDQITASSQYSTNWSAERSRLNYPENGWTPGEDSYREWIQVDLGLLRFVTAVGTQGAISKETKKKYYVKTYKIDVSSNGEDWITIKEGNKPVLFQGNTNPTDVVVAVFPKPLITRFVRIKPATWETGISMRFEVYGCKITDYPCSGMLGMVSGLISDSQITSSNQGDRNWMPENIRLVTSRSGWALPPAPHSYINEWLQIDLGEEKIVRGIIIQGGKHRENKVFMRKFKIGYSNNGSDWKMIMDDSKRKAKVRAGDWEEVIPYVLDFNQGPLAFSRGRASYFLPAMTLEEVCDGVSKTLDSRKTGIWHEK

SEQ ID NO: 13548 - protein, 365 aa, Homo sapiens
MDTGVIEGGLNVTLTIRLLMHGKEVGSIIGKKGESVKKMREESGARINISEGNCPERIITLAGPTNAIFKAFAMIIDKLEEDISSSMTNSTAASRPPVTLRLVVPASQCGSLIGKGGCKIKEIRESTGAQVQVAGDMLPNSTERAITIAGIPQSIIECVKQICVVMLETLSQSPPKGVTIPYRPKPSSSPVIFAGGQDRYSTGSDSASFPHTTPSMCLNPDLEGPPLEAYTIQGQYAIPQPDLTKLHQLAMQQSHFPMTHGNTGFSGIESSSPEVKGYWGLDASAQTTSHELTIPNDLIGCIIGRQGAKINEIRQMSGAQIKIANPVEGSTDRQVTITGSAASISLAQYLINVRLSSETGGMGSS

SEQ ID NO: 13549 - protein, 465 aa, Homo sapiens
MAFGKSHRDPYATSVGHLIEKATFAGVQTEDWGQFMHICDIINTTQDGPKDAVKALKKRISKNYNHKEIQLTLSLIDMCVQNCGPSFQSLIVKKEFVKENLVKLLNPRYNLPLDIQNRILNFIKTWSQGFPGGVDVSEVKEVYLDLVKKGVQFPPSEAEAETARQETAQISSNPPTSVPTAPALSSVIAPKNSTVTLVPEQIGKLHSELDMVKMNVRVMSAILMENTPGSENHEDIELLQKLYKTGREMQERIMDLLVVVENEDVTVELIQVNEDLNNAILGYERFTRNQQRILEQNKNQKEATNTTSEPSAPSQDLLDLSPSPRMPRATLGELNTMNNQLSGLNFSLPSSDVTNNLKPSLHPQMNLLALENTEIPPFAQRTSQNLTSSHAYDNPVSLQTIAAAPSNQSLPPLPSNHPAMTKSDLQPPNYYEVMEFDPLAPAVTTEAIYEEIDAHQHKGAQNDGD

SEQ ID NO: 13550 - protein, 954 aa, Homo sapiens
MPSLPAPPAPLLLLGLLLLGSRPARGAGPEPPVLPIRSEKEPLPVRGAAGCTFGGKVYALDETWHPDLGEPFGVMRCVLCACEAPQWGRRTRGPGRVSCKNIKPECPTPACGQPRQLPGHCCQTCPQERSSSERQPSGLSFEYPRDPEHRSYSDRGEPGAEERARGDGHTDFVALLTGPRSQAVARARVSLLRSSLRFSISYRRLDRPTRIRFSDSNGSVLFEHPAAPTQDGLVCGVWRAVPRLSLRLLRAEQLHVALVTLTHPSGEVWGPLIRHRALAAETFSAILTLEGPPQQGVGGITLLTLSDTEDSLHFLLLFRGLLEPRSGGLTQVPLRLQILHQGQLLRELQANVSAQEPGFAEVLPNLTVQEMDWLVLGELQMALEWAGRPGLRISGHIAARKSCDVLQSVLCGADALIPVQTGAAGSASLTLLGNGSLIYQVQVVGTSSEVVAMTLETKPQRRDQRTVLCHMAGLQPGGHTAVGICPGLGARGAHMLLQNELFLNVGTKDFPDGELRGHVAALPYCGHSARHDTLPVPLAGALVLPPVKSQAAGHAWLSLDTHCHLHYEVLLAGLGGSEQGTVTAHLLGPPGTPGPRRLLKGFYGSEAQGVVKDLEPELLRHLAKGMASLMITTKGSPRGELRGQVHIANQCEVGGLRLEAAGAEGVRALGAPDTASAAPPVVPGLPALAPAKPGGPGRPRDPNTCFFEGQQRPHGARWAPNYDPLCSLCTCQRRTVICDPVVCPPPSCPHPVQAPDQCCPVCPEKQDVRDLPGLPRSRDPGEGCYFDGDRSWRAAGTRWHPVVPPFGLIKCAVCTCKGGTGEVHCEKVQCPRLACAQPVRVNPTDCCKQCPVGSGAHPQLGDPMQADGPRGCRFAGQWFPESQSWHPSVPPFGEMSCITCRCGAGVPHCERDDCSLPLSCGSGKESRCCSRCTAHRRPPETRTDPELEKEAEGS

SEQ ID NO: 13551 - protein, 447 aa, Homo sapiens
MIPTFTALLCLGLSLGPRTHMQAGPLPKPTLWAEPGSVISWGNSVTIWCQGTLEAREYRLDKEESPAPWDRQNPLEPKNKARFSIPSMTEDYAGRYRCYYRSPVGWSQPSDPLELVMTGAYSKPTLSALPSPLVTSGKSVTLLCQSRSPMDTFLLIKERAAHPLLHLRSEHGAQQHQAEFPMSPVTSVHGGTYRCFSSHGFSHYLLSHPSDPLELIVSGSLEGPRPSPTRSVSTAAGPEDQPLMPTGSVPHSGLRRHWEVLIGVLVVSILLLSLLLFLLLQHWRQGKHRTLAQRQADFQRPPGAAEPEPKDGGLQRRSSPAADVQGENFCAAVKNTQPEDGVEMDTRSPHDEDPQAVTYAKVKHSRPRREMASPPSPLSGEFLDTKDRQAEEDRQMDTEAAASEAPQDVTYARLHSFTLRQKATEPPPSQEGASPAEPSVYATLAIH

SEQ ID NO: 13552 - protein, 196 aa, Homo sapiens
MTGDCMPVLVLMAAVLTVTGAVPVARLRGALPDARGCHIAQFKSLSPQELQAFKRAKDALEESLLLKDCKCRSRLFPRTWDLRQLQVRERPVALEAELALTLKVLEATADTDPALGDVLDQPLHTLHHILSQLRACIQPQPTAGPRTRGRLHHWLHRLQEAPKKESPGCLEASVTFNLFRLLTRDLNCVASGDLCV

SEQ ID NO: 13553 - protein, 97 aa, Homo sapiens
MTSSPVSRVVYNGKRTSSPRSPPSSSEIFTPAHEENVRFIYEAWQGVERDLRGQVPGGERGLVEEYVEKVPNPSLKTFKPIDLSDLKRRSTQDAKKS

SEQ ID NO: 13554 - protein, 663 aa, Homo sapiens
MAAKEKLEAVLNVALRVPSIMLLDVLYRWDVSSFFQQIQRSSLSNNPLFQYKYLALNMHYVGYILSVVLLTLPRQHLVQLYLYFLTALLLYAGHQISRDYVRSELEFAYEGPMYLEPLSMNRFTTALIGQLVVCTLCSCVMKTKQIWLFSAHMLPLLARLCLVPLETIVIINKFAMIFTGLEVLYFLGSNLLVPYNLAKSAYRELVQVVEVYGLLALGMSLWNQLVVPVLFMVFWLVLFALQIYSYFSTRDQPASRERLLFLFLTSIAECCSTPYSLLGLVFTVSFVALGVLTLCKFYLQGYRAFMNDPAMNRGMTEGVTLLILAVQTGLIELQVVHRAFLLSIILFIVVASILQSMLEIADPIVLALGASRDKSLWKHFRAVSLCLFLLVFPAYMAYMICQFFHMDFWLLIIISSSILTSLQVLGTLFIYVLFMVEEFRKEPVENMDDVIYYVNGTYRLLEFLVALCVVAYGVSETIFGEWTVMGSMIIFIHSYYNVWLRAQLGWKSFLLRRDAVNKIKSLPIATKEQLEKHNDICAICYQDMKSAVITPCSHFFHAGCLKKWLYVQETCPLCHCHLKNSSQLPGLGTEPVLQPHAGAEQNVMFQEGTEPPGQEHTPGTRIQEGSRDNNEYIARRPDNQEGAFDPKEYPHSAKDEAHPVESA

SEQ ID NO: 13555 - protein, 931 aa, Homo sapiens
MKKMSRNVLLQMEEEEDDDDGDIGDVPASRRPFLTPHTHLPSSLVLENLGQTIVPDLGSLESQHDFRTPEFEEFNGKPDSLFFNDGQRRIDFVLVYEDESRKETNKKGTNEKQRRKRQAYESNLICHGLQLEATRSVLDDKLVFVKVHAPWEVLCTYAEIMHIKLPLKPNDLKNRSSAFGTLNWFTKVLSVDESIIKPEQEFFTAPFEKNRMNDFYIVDRDAFFNPATRSRIVYFILSRVKYQVINNVSKFGINRLVNSGIYKAAFPLHDCKFRRQSEDPSCPNERYLLYREWAHPRSIYKKQPLDLIRKYYGEKIGIYFAWLGYYTQMLLLAAVVGVACFLYGYLNQDNCTWSKEVCHPDIGGKIIMCPQCDRLCPFWKLNITCESSKKLCIFDSFGTLVFAVFMGVWVTLFLEFWKRRQAELEYEWDTVELQQEEQARPEYEARCTHVVINEITQEEERIPFTAWGKCIRITLCASAVFFWILLIIASVIGIIVYRLSVFIVFSAKLPKNINGTDPIQKYLTPQTATSITASIISFIIIMILNTIYEKVAIMITNFELPRTQTDYENSLTMKMFLFQFVNYYSSCFYIAFFKGKFVGYPGDPVYWLGKYRNEECDPGGCLLELTTQLTIIMGGKAIWNNIQEVLLPWIMNLIGRFHRVSGSEKITPRWEQDYHLQPMGKLGLFYEYLEMIIQFGFVTLFVASFPLAPLLALVNNILEIRVDAWKLTTQFRRLVPEKAQDIGAWQPIMQGIAILAVVTNAMIIAFTSDMIPRLVYYWSFSVPPYGDHTSYTMEGYINNTLSIFKVADFKNKSKGNPYSDLGNHTTCRYRDFRYPPGHPQEYKHNIYYWHVIAAKLAFIIVMEHVIYSVKFFISYAIPDVSKRTKSKIQREKYLTQKLLHENHLKDMTKNMGVIAERMIEAVDNNLRPKSE

SEQ ID NO: 13556 - protein, 754 aa, Homo sapiens
MASVPALQLTPANPPPPEVSNPKKPGRVTNQLQYLHKVVMKALWKHQFAWPFRQPVDAVKLGLPDYHKIIKQPMDMGTIKRRLENNYYWAASECMQDFNTMFTNCYIYNKPTDDIVLMAQTLEKIFLQKVASMPQEEQELVVTIPKNSHKKGAKLAALQGSVTSAHQVPAVSSVSHTALYTPPPEIPTTVLNIPHPSVISSPLLKSLHSAGPPLLAVTAAPPAQPLAKKKGVKRKADTTTPTPTAILAPGSPASPPGSLEPKAARLPPMRRESGRPIKPPRKDLPDSQQQHQSSKKGKLSEQLKHCNGILKELLSKKHAAYAWPFYKPVDASALGLHDYHDIIKHPMDLSTVKRKMENRDYRDAQEFAADVRLMFSNCYKYNPPDHDVVAMARKLQDVFEFRYAKMPDEPLEPGPLPVSTAMPPGLAKSSSESSSEESSSESSSEEEEEEDEEDEEEEESESSDSEEERAHRLAELQEQLRAVHEQLAALSQGPISKPKRKREKKEKKKKRKAEKHRGRAGADEDDKGPRAPRPPQPKKSKKASGSGGGSAALGPSGFGPSGGSGTKLPKKATKTAPPALPTGYDSEEEEESRPMSYDEKRQLSLDINKLPGEKLGRVVHIIQAREPSLRDSNPEEIEIDFETLKPSTLRELERYVLSCLRKKPRKPYTIKKPVGKTKEELALEKKRELEKRLQDVSGQLNSTKKPPKKANEKTESSSAQQVAVSRLSASSSSSDSSSSSSSSSSSDTSDSDSG

SEQ ID NO: 13557 - protein, 527 aa, Homo sapiens
MWGQDSTLQDTPPPDPEIFRQRFRRFCYQNTFGPREALSRLKELCHQWLRPEINTKEQILELLVLEQFLSILPKELQVWLQEYRPDSGEEAVTLLEDLELDLSGQQVPGQVHGPEMLARGMVPLDPVQESSSFDLHHEATQSHFKHSSRKPRLLQSRALPAAHIPAPPHEGSPRDQAMASALFTADSQAMVKIEDMAVSLILEEWGCQNLARRNLSRDNRQENYGSAFPQGGENRNENEESTSKAETSEDSASRGETTGRSQKEFGEKRDQEGKTGERQQKNPEEKTRKEKRDSGPAIGKDKKTITGERGPREKGKGLGRSFSLSSNFTTPEEVPTGTKSHRCDECGKCFTRSSSLIRHKIIHTGEKPYECSECGKAFSLNSNLVLHQRIHTGEKPHECNECGKAFSHSSNLILHQRIHSGEKPYECNECGKAFSQSSDLTKHQRIHTGEKPYECSECGKAFNRNSYLILHRRIHTREKPYKCTKCGKAFTRSSTLTLHHRIHARERASEYSPASLDAFGAFLKSCV

SEQ ID NO: 13558 - protein, 215 aa, Homo sapiens
MIYTMKKVHALWASVCLLLNLAPAPLNADSEEDEEHTIITDTELPPLKLMHSFCAFKADDGPCKAIMKRFFFNIFTRQCEEFIYGGCEGNQNRFESLEECKKMCTREKPDFCFLEEDPGICRGYITRYFYNNQTKQCERFKYGGCLGNMNNFETLEECKNICEDGPNGFQVDNYGTQLNAVNNSLTPQSTKVPSLFEFHGPSWCLTPADRGLCRA

SEQ ID NO: 13559 - protein, 418 aa, Homo sapiens
MEVNPPKQEHLLALKVMRLTKPTLFTNIPVTCEEKDLPGDLFNQLMRDDPSTVNGAEVLMLGEMLTLPQNFGNIFLGETFSSYISVHNDSNQVVKDILVKADLQTSSQRLNLSASNAAVAELKPDCCIDDVIHHEVKEIGTHILVCAVSYTTQAGEKMYFRKFFKFQVLKPLDVKTKFYNAESDLSSVTDEVFLEAQIQNMTTSPMFMEKVSLEPSIMYNVTELNSVSQAGECVSTFGSRAYLQPMDTRQYLYCLKPKNEFAEKAGIIKGVTVIGKLDIVWKTNLGERGRLQTSQLQRMAPGYGDVRLSLEAIPDTVNLEEPFHITCKITNCSSERTMDLVLEMCNTNSIHWCGISGRQLGKLHPSSSLCLALTLLSSVQGLQSISGLRLTDTFLKRTYEYDDIAQVCVVSSAIKVES

SEQ ID NO: 13560 - protein, 136 aa, Homo sapiens
MNRPAPVEISYENMRFLITHNPTNATLNKFTEDWPFDDGAPPPNQIVDDWLNLLKTKFREEPGCCVAVHCVAGLGRAPVLVALALIECGMKYEDAVQFIRQKRRGAFNSKQLLYLEKYRPKMRLRFRDTNGHCCVQ

SEQ ID NO: 13561 - protein, 130 aa, Homo sapiens
MKVHMHTKFCLICLLTFIFHHCNHCHEEHDHGPEALHRQHRGMTELEPSKFSKQAAENEKKYYIEKLFERYGENGRLSFFGLEKLLTNLGLGERKVVEINHEDLGHDHVSHLDILAVQEGKHFHSHNHQH

SEQ ID NO: 13562 - protein, 217 aa, Homo sapiens
MAAGSRTSLLLAFGLLCLSWLQEGSAFPTIPLSRLFDNAMLRARRLYQLAYDTYQEFEEAYILKEQKYSFLQNPQTSLCFSESIPTPSNRVKTQQKSNLELLRISLLLIQSWLEPVQLLRSVFANSLVYGASDSNVYRHLKDLEEGIQTLMWRLEDGSPRTGQIFNQSYSKFDTKSHNDDALLKNYGLLYCFRKDMDKVETFLRIVQCRSVEGSCGF

SEQ ID NO: 13563 - protein, 1390 aa, Homo sapiens
MDGASAEQDGLQEDRSHSGPSSLPEAPLKPPGPLVPPDQQDKVQCAEVNRASTEGESPDGPGQGGLCQNGPTPPFPDPPSSLDPTTSPVGPDASPGVAGFHDNLRKSQGTSAEGSVRKEALQSLRLSLPMQETQLCSTDSPLPLEKEEQVRLQARKWLEEQLKQYRVKRQQERSSQPATKTRLFSTLDPELMLNPENLPRASTLAMTKEYSFLRTSVPRGPKVGSLGLPAHPREKKTSKSSKIRSLADYRTEDSNAGNSGGNVPAPDSTKGSLKQNRSSAASVVSEISLSPDTDDRLENTSLAGDSVSEVDGNDSDSSSYSSASTRGTYGILSKTVGTQDTPYMVNGQEIPADTLGQFPSIKDVLQAAAAEHQDQGQEVNGEVRSRRDSICSSVSLESSAAETQEEMLQVLKEKMRLEGQLEALSLEASQALKEKAELQAQLAALSTKLQAQVECSHSSQQRQDSLSSEVDTLKQSCWDLERAMTDLQNMLEAKNASLASSNNDLQVAEEQYQRLMAKVEDMQRSMLSKDNTVHDLRQQMTALQSQLQQVQLERTTLTSKLKASQAEISSLQSVRQWYQQQLALAQEARVRLQGEMAHIQVGQMTQAGLLEHLKLENVSLSQQLTETQHRSMKEKGRIAAQLQGIEADMLDQEAAFMQIQEAKTMVEEDLQRRLEEFEGERERLQRMADSAASLEQQLEQVKLTLLQRDQQLEALQQEHLDLMKQLTLTQEALQSREQSLDALQTHYDELQARLGELQGEAASREDTICLLQNEKIILEAALQAAKSGKEELDRGARRLEEGTEETSETLEKLREELAIKSGQVEHLQQETAALKKQMQKIKEQFLQQKVMVEAYRRDATSKDQLISELKATRKRLDSELKELRQELMQVHGEKRTAEAELSRLHREVAQVRQHMADLEGHLQSAQKERDEMETHLQSLQFDKEQMVAVTEANEALKKQIEELQQEARKAITEQKQKMRRLGSDLTSAQKEMKTKHKAYENAVGILSRRLQEALAAKEAADAELGQLRAQGGSSDSSLALHERIQALEAELQAVSHSKTLLEKELQEVIALTSQELEESREKVLELEDELQESRGFRKKIKRLEESNKKLALELEHEKGKLTGLGQSNAALREHNSILETALAKREADLVQLNLQVQAVLQRKEEEDRQMKHLVQALQASLEKEKEKVNSLKEQVAAAKVEAGHNRRHFKAASLELSEVKKELQAKEHLVQKLQAEADDLQIREGKHSQEIAQFQAELAEARAQLQLLQKQLDEQLSKQPVGNQEMENLKWEVDQKEREIQSLKQQLDLTEQQGRKELEGLQQLLQNVKSELEMAQEDLSMTQKDKFMLQAKVSELKNNMKTLLQQNQQLKLDLRRGAAKTVLRPASLPG

SEQ ID NO: 13564 - protein, 190 aa, Homo sapiens
MEAETKTLPLENASILSEGSLQEGHRLWIGNLDPKITEYHLLKLLQKFGKVKQFDFLFHKSGALEGQPRGYCFVNFETKQEAEQAIQCLNGKLALSKKLVVRWAHAQVKRYDHNKNDKILPISLEPSSSTEPTQSNLSVTAKIKAIEAKLKMMAENPDAEYPAAPVYSYFKPPDKKRTTPYSRTAWKSRR

SEQ ID NO: 13565 - protein, 279 aa, Homo sapiens
SKCLPAVFLAHWVLLLVLRVFLPCDENRLIPTELRREALALQGSLEFDDAGGEGVTSHVDDEYRWAGVEDPKVMITTSRDPSSRLKMFAKELKLVFPGAQRMNRGRHEVGALVRACKANGVTDLLVVHEHRGTPVGLIVSHLPFGPTAYFTLCNVVMRHDIPDLGTMSEAKPHLITHGFSSRLGKRVSDILRYLFPVPKDDSHRVITFANQDDYISFRHHVYKKTDHRNVELTEVGPRFELKLYMIRLGTLEQEATADVEWRWHPYTNTARKRVFLSTE

SEQ ID NO: 13566 - protein, 209 aa, Homo sapiens
MASLSRPSLPSCLCSFLLLLLLQVSSSYAGQFRVIGPRHPIRALVGDEVELPCRISPGKNATGMEVGWYRPPFSRVVHLYRNGKDQDGDQAPEYRGRTELLKDAIGEGKVTLRIRNVRFSDEGGFTCFFRDHSYQEEAAMELKVEGKLRAEIENLHRTFDPHFLRVPCWKITLFVIVPVLGPLVALIICYNWLHRRLAGQFLEELRNPF

SEQ ID NO: 13567 - protein, 46 aa, Homo sapiens
MGRPLLLPLLLLLQPPAFLQPEGQESGFLRISNLRKEDQSVYFCRV

SEQ ID NO: 13568 - protein, 38 aa, Homo sapiens
MGFWILAILTILMYSTAAKFSKQSWGLENEALIVRCPR

SEQ ID NO: 13569 - protein, 511 aa, Homo sapiens
MYCAYTIPGMGGNSLMYYYNGKAVYAPSASTADYNRDSPGYPSSKPATSTFPSSFFMQDGHHSSDPWSSSSGMNQPGYAGMLGNSSHIPQSSSYCSLHPHERLSYPSHSSADINSSLPPMSTFHRSGTNHYSTSSCTPPANGTDSIMANRGSGAAGSSQTGDALGKALASIYSPDHTNNSFSSNPSTPVGSPPSLSAGTAVWSRNGGQASSSPNYEGPLHSLQSRIEDRLERLDDAIHVLRNHAVGPSTAMPGGHGDMHGIIGPSHNGAMGGLGSGYGTGLLSANRHSLMVGTHREDGVALRGSHSLLPNQVPVPQLPVQSATSPDLNPPQDPYRGMPPGLQGQSVSSGSSEIKSDDEGDENLQDTKSSEDKKLDDDKKDIKSITRSRSSNNDDEDLTPEQKAEREKERRMANNARERLRVRDINEAFKELGRMVQLHLKSDKPQTKLLILHQAVAVILSLEQQVRERNLNPKAACLKRREEEKVSSEPPPLSLAGPHPGMGDASNHMGQM

SEQ ID NO: 13570 - protein, 193 aa, Homo sapiens
MAQASLLACEGLAGVSLVPTAASKKMMLSQIASKQAENGERAGSPDVLRCSSQGHRKDSDKSRSRKDDDSLSEASHSKKTVKKVVVVEQNGSFQVKIPKNFVCEHCFGAFRSSYHLKRHILIHTGEKPFECDICDMRFIQKYHLERHKRVHSGEKPYQCERCHQCFSRTDRLLRHKRMCQGCQSKTSDGQFSL

SEQ ID NO: 13571 - protein, 590 aa, Homo sapiens
MAPSGLKAVVGEKILSGVIRSVKKDGEWKVLIMDHPSMRILSSCCKMSDILAEGITIVEDINKRREPIPSLEAIYLLSPTEKALIKDFQGTPTFTYKAAHIFFTDTCPEPLFSELGRSRLAKVVKTLKEIHLAFLPYEAQVFSLDAPHSTYNLYCPFRAEERTRQLEVLAQQIATLCATLQEYPAIRYRKGPEDTAQLAHAVLAKLNAFKADTPSLGEGPEKTRSQLLIMDRAADPVSPLLHELTFQAMAYDLLDIEQDTYRYETTGLSEAREKAVLLDEDDDLWVELRHMHIADVSKKVTELLRTFCESKRLTTDKANIKDLSQILKKMPQYQKELNKYSTHLHLADDCMKHFKGSVEKLCSVEQDLAMGSDAEGEKIKDSMKLIVPVLLDAAVPAYDKIRVLLLYILLRNGVSEENLAKLIQHANVQAHSSLIRNLEQLGGTVTNPGGSGTSSRLEPRERMEPTYQLSRWTPVIKDVMEDAVEDRLDRNLWPFVSDPAPTASSQAAVSARFGHWHKNKAGIEARAGPRLIVYVMGGVAMSEMRAAYEVTRATEGKWEVLIGSSHILTPTRFLDDLKALDKKLEDIALP

SEQ ID NO: 13572 - protein, 3507 aa, Homo sapiens
MGRRSQWIWAMRCQMLVPVLSLHIGLARALGCGCIASKIECLIRCNAPFPLLDAVGSVASQELQSLTGTVGVTSGAAAYPRWNLARARAPPHLPGTQDPLRRVRDPTPIVASSPGRRRGSWSGGYGQEASEPGVVGLCCAVLPIHPSLALAGVGGPDLRRFQEGPQRPSDHGAAEKHMETFIPIDLTTENQEMDKEETKTKPRLLRYEEKKYEDVKPLETQPAEIAEKETLEYKTVRTFSESLKSEKTEEPKDDDVIRNIIRLREKLGWQTILPQHSLKYGSSKIAIQKITLKKPLEDDGEFVYCLPRKSPKSLYNPYDLQVVSAHTAKHCKEFWVITASFISKLDSSRTYSLDEFCEEQLQQATQALKQLEDIRNKAISEMKSTFLKVAEKNEIKEYFESKLSEDDTTHFKLPKYRRLLETFFKFVMLVDYIFQELIRQLMNTAVTLLLELFNGSAGMPFSVEKKNENLIRTFKDNSFPTGKTTNDCEELVDNSKLHAISVQKSEVKTDTDINEILNSVEVGKDLRKTYAPIFEVNLCLRIPAESDSSENSKENFHESDQCPEECVMFEDEMSENKDNCVKKHSSEELLPKAKKSKEISYNLEDIISATITPLCQDPQLSIFIDLVSIMDLPNKTGSIIHYKEQTRWPDCHILFETDPAYQNIIVNLLTIIGNSMGLVNAYSHKFIKYCTMTEKAKIMSMKISSMGELTSKEFEAILNRFRNYFRHIVNMAIEKRIGIFNVVVESSLQQLECDPTEIEEFLEHFIFLNAISSKISKLEKEFLTMSQLYSVAKHHQIHISEEQIAIFQVLLLKFSQLKSSMKLSKINKDTAITKFRDNLEACISGLHVDVGNLKAKIRTPLLLCAGTQVSTAMEMIQTLSGEAASLTNKAKAYSHYQDCFSDSQSHMHSVNVEEITQIVLSEISDIEGDLTLRKKLWEAQEEWKRASWEWRNSSLQSIDVESVQRNVSKLMHIISVLEKEIYSIFIIPSIDDISAQLEESQVILATIKGSPHIGPIKSQIMFYNDCVKSFVSSYSREKLEKVHAGLMCHLEEVADLVVLDTSNSRTKAILGALLILYVHCRDIVINLLLKNIFNAEDFEWTRHLQYKWNEKQKLCYVSQGNASFTYGYEYLGCTSRLVITPLTDRCWLTLMEALHLNLGGCPAGPAGTGKTETVKDLAKCALFAFKCNTALIKLPNSLIVLTCFGLEKTVLVMNTVMSFRFVLEGKEIRINMSCAVFITMNPRYGGGVELPDNLKSLFRPVAMMVPHYQMIAEIILFSFGFKSANSLSGKLTNLYELARKQLSQQDHYNFGLRSLKIVLIMAGTKKREFKCDTSDSLSEADETLIVIEAIREASLPKCPPEDVPLFENIIGDIFPEVTVLKVNQLALEKVIYTATQQLGLQNWSSQKEKIIQFYNQLQVCVGVMLVGPTGGGKTTVRRILEKALTLLPIADFLSVAERKSASKISERKGKVDICVLNPKCVTLSELYGQLDPNTMEWTDGLLSATIRSYVYFNTPKNTKKDIDLRLKSRISDLSNVFKLDSSDTTETDDNIFEEIEKVVKIPENHNFDWQWIILDGPVDTFWVENLNSVLDDTRTLCLANSERIALTNKIRVIFEVDNLSQASPATVSRCAMVYMDPVDLGWEPYVKSWLLKTSKIISQSGVDCLEFMIKNSVTDGLQFIRNRQKFQPYPMEDITVVITLCRILDAFFDFMGKNGGFEQSDDLNDTSSKEANSQRESVTFKDIEKRDENTWYPEKNPDKLTKIIQKLFVFAFTWAFGGALNREDEHRENIPFCPSLEPDSLAKVTYDFDKLVHELFGNSSQVGINLPTGECSIFGYFVDIEQCEFIPWSDLVPNDQTLIQRDNPTKKPEVRTNKKLLKNNDHKGVVVSTINFSTNVTAAKTKEMILKKLIRRTKDTLGAPKNNRILIFIDDMNMPVSDMYGAQPPLELIRQLLDLGGVYDTEKNTWKNIQDLSIVAACVPVVNDISPRLLKHFSMLVLPHPSQDILCTIFQIGIDGCGKKTCATLACYLTDNKLYRVPISHKCAYIEFKEVFKKVFIHAGLKGKPTVLMVPNLNIEQDSFLEDLNYIISSGRIPDLFENVELDSIAMKIRYLTEQSGHMDNRQSLLSFFQKRIYKNLHIFVIMSPEGPSFRQNCRVYPSMISSCTIDWYERWPEEALLIVANSFLKEKVNFENRENLKEKLAPTCVQIHKSMKDLNRKYFEETGRFYYTTPNSYLQFMETFAHILRAREEEMQTKRDRFHMGLSTILEATTLVTEMQEELLILGPQVEQKTKETETLMEKLRKDSQVVEKVQMLVKQDEEIVAEEVRIVEDYAQKTANELKSVLPAFDKAIVALNALDKADVAELRVYTRPPFLVLTVMNAVCILLQKKPNWATAKLLLSETGFLKKLINLDKDSIPDKVFVKLKKIVTLPDFNPHKISLVSVACCSLCQWVIALNNYHEVQKVVGPKQIQVAEAQNVLKIARQRLAEKQRGLQLISRWHNQGLPHGQYSVENAILIKNGQQWPLLIDPHRQAHKWIRQMEGSRLQKLSIEDSNYTKKIENAMKTGGSVLLQSCQASTWRKKLYLSTEIDNPHFLPSVYNFVTMINFTVTFQGLQDQLLSTVVTHEVPHLEDQRSKLLESISLDAITLEELEEKTLNLLQKALGSILDDDKIVDTLRKSKMTSNEISKRIEATKKAESEIQAIRKNYLPIATRGALLYFLVADLTQINYMYQFSLDWFHQVFVSSVVSKSKEQEHSFKREKVSPKEVHEFISISKEPNLENEKNLLDKHIKSAIDMLTKSIFKVVSSALFNEDKLCFSFRLCTVIMQNNANGNLIQDDIGFLPEEEWNIFLYSGILINIKSALSQSRLTSTFEIGESQHLQWLSDSRWRQCQYVSTHLEPFSLLCKSLLSNVSQWDTFKNSKAVYSLISTPFSSENASLEENTKPPEEKHTFCLLLRAINHTGTDLGPVGRGQWLTSTACDRHTDVCSFSFALNDGVPDVEHVQDIFYGHCVDKYHVKVLRPESLNNSVRKFITEKMGNKYLQRTGVNLKDAYKGSNARTPLILIQTHGSASIKDYIHIIQSLPDDDLPEVLGIHPEAIRSCWETQGEKFIENLIAMQPKTTTANLMIRPEQSKDELVMEILSDLLKRLPLTVEKEEIAVGTPSTLKSMMSSSIWESLSKNLKDHDPLIHCVLLTFLKQEIKRFDKLLFVIHKSLKDLQLAIKGEIILTQELEEIFNSFLNMRVPTLWQKHAYRSCKPLSSWIDDLIQRLNFFNTWAKVAYTAIQRRYMRFVTVWKQSIPSTSQKCKHPEDSENNFFEGFPSRYWLPAFFFPQAFLAAVLQDYGRSRGIAVDALTFTHHVISNTTDKDEKFSVFMPKKLNIVRRAFKGSASSHTGVYIFGLFIEGARWNREQKILEDSLPLEMCCDFPDIYFLPTKISTKTPNASNQTDSELYAFECPVYQTPERSRILATTGLPTNFLTSVYLSTKKPPSHWITMRVALLCEKNEK

SEQ ID NO: 13573 - protein, 425 aa, Homo sapiens
MSLKDSGSDLSHRPKRRRFHESYNFNMKCPTPGCNSLGHLTGKHERHFSISGCPLYHNLSADECKAPTERQLRYKEKVAELRKKRNSGLSKEQKEKYMEHRQTYGNTREPLLENLTSEYDLDLFRRAQARASEDLEKLRLQGQITEGSNMIKTIAFGRYELDTWYHSPYPEEYARLGRLYMCEFCLKYMKSQTILRRHMAKCVWKHPPGDEIYRKGSISVFEVDGKKNKIYCQNLCLLAKLFLDHKTLYYDVEPFLFYVMTEADNTGCHLIGYFSKEKNSFLNYNVSCILTMPQYMRQGYGKMLIDFSYLLSKVEEKVGSPERPLSDLGLISYRSYWKEVLLRYLHNFQGKEISIKEISQETAVNPVDIVSTLQALQMLKYWKGKHLVLKRQDLIDEWIAKEAKRSNSNKTMDPSCLKWTPPKGT

SEQ ID NO: 13574 - protein, 265 aa, Homo sapiens
MEKWILKKIKYLQSGGLSASYYSYKVDSFRERITSEAEDLVANFFPKKLLELDSFLKEPILNIHDLTQIHSDMNLPVPDPILLTNSHDGLDGPTYKKRRLDECEEAFQGTKVFVMPNGMLKSNQQLVDIIEKVKPEIRLLIEKCNTVKMWVQLLIPRIEDGNNFGVSIQEETVAELRTVESEAASYLDQISRYYITRAKLVSKIAKYPHVEDYRRTVTEIDEKEYISLRLIISELRNQYVTLHDMILKNIEKIKRPRSSNAETLY

SEQ ID NO: 13575 - protein, 369 aa, Homo sapiens
MKFQGPLACLLLALCLGSGEAGPLQSGEESTGTNIGEALGHGLGDALSEGVGKAIGKEAGGAAGSKVSEALGQGTREAVGTGVRQVPGFGVADALGNRVGEAAHALGNTGHEIGRQAEDVIRHGADAVRGSWQGVPGHNGAWETSGGHGIFGSQGGLGGQGQGNPGGLGTPWVHGYPGNSAGSFGMNPQGAPWGQGGNGGPPNFGTNTQGAVAQPGYGSVRASNQNEGCTNPPPSGSGGGSSNSGGGSGSQSGSSGSGSNGDNNNGSSSGGSSSGSSSGGSSGGSSGGSSGNSGGSRGDSGSESSWGSSTGSSSGNHGGSGGGNGHKPGNSETSPGMFNFDTFWKNFKSKLGFINWDAINKDQRSSRIP

SEQ ID NO: 13576 - protein, 256 aa, Homo sapiens
MAGTWLLLLLALGCPALPTGPVSFPSSPEAATTGPIWFSAGNGSALDAFTYGPSPATDGTWTNLAHLSLPSEELASWEPLVCHTGPGAEGHSRSTQPMHLSGEASTARTCPQEPLRGTPGGALWLGVLRLLLFKLLLFDLLLTCSCLCDPAGPLPSPATTTRLRALGSHRLHPATETGGREATSSPRPQPRDRRWGDTPPGRKPGSPVWGEGSYLSSYPTCPAQAWCSRSALRAPSSSLGAFFAGDLPPPLQAGAA

SEQ ID NO: 13577 - protein, 391 aa, Homo sapiens
MESETEPEPVTLLVKSPNQRHRDLELSGDRGWSVGHLKAHLSRVYPERPRPEDQRLIYSGKLLLDHQCLRDLLPKQEKRHVLHLVCNVKSPSKMPEINAKVAESTEEPAGSNRGQYPEDSSSDGLRQREVLRNLSSPGWENISRPEAAQQAFQGLGPGFSGYTPYGWLQLSWFQQIYARQYYMQYLAATAASGAFVPPPSAQEIPVVSAPAPAPIHNQFPAENQPANQNAAPQVVVNPGANQNLRMNAQGGPIVEEDDEINRDWLDWTYSAATFSVFLSILYFYSSLSRFLMVMGATVVMYLHHVGWFPFRPRPVQNFPNDGPPPDVVNQDPNNNLQEGTDPETEDPNHLPPDRDVLDGEQTSPSFMSTAWLVFKTFFASLLPEGPPAIAN

SEQ ID NO: 13578 - protein, 123 aa, Homo sapiens
MLGWILITLATIAALVSCCVAKCCSPLTSLQHCYWTSHLQNERELFEQAAEQHSRLLMMHRIKKLFGFIPGSEDVKHIRIPSCQDWKDISVPTLLCMGDDLQGHYSFLGNRVDEDNEEDRSRG

SEQ ID NO: 13579 - protein, 418 aa, Homo sapiens
MGDKGTRVFKKASPNGKLTVYLGKRDFVDHIDLVDPVDGVVLVDPEYLKERRVYVTLTCAFRYGREDLDVLGLTFRKDLFVANVQSFPPAPEDKKPLTRLQERLIKKLGEHAYPFTFEIPPNLPCSVTLQPGPEDTGKACGVDYEVKAFCAENLEEKIHKRNSVRLVIRKVQYAPERPGPQPTAETTRQFLMSDKPLHLEASLDKEIYYHGEPISVNVHVTNNTNKTVKKIKISVRQYADICLFNTAQYKCPVAMEEADDTVAPSSTFCKVYTLTPFLANNREKRGLALDGKLKHEDTNLASSTLLREGANREILGIIVSYKVKVKLVVSRGGLLGDLASSDVAVELPFTLMHPKPKEEPPHREVPENETPVDTNLIELDTNDDDIVFEDFARQRLKGMKDDKEEEEDGTGSPQLNNR

SEQ ID NO: 13580 - protein, 87 aa, Homo sapiens
MKVLLLTGLGALFFAYYWDDNFDPASLQGARVLLTGANAGVGEELAYHYARLGSHLVLTAHTEALLQKARWLTLVVSTLGGRGKWIT

SEQ ID NO: 13581 - protein, 81 aa, Homo sapiens
MRAGPGPTVTLALVLAVSWAMELKPTAPPIFTGRPFVVAWDVPTQDCGPRLKVPLDLNAFDVQASPNEGFVNQNITIFYRD

SEQ ID NO: 13582 - protein, 468 aa, Homo sapiens
MAQLRRGHLTFRDVAIEFSQEEWKCLDPVQKALYRDVMLENYRNLVSLGICLPDLSIISMMKQRTEPWTVENEMKVAKNPDRWEGIKDINTGRSCAVRSKAGNKPITNQLGLTFQLPLPELEIFQGEGKIYECNQVQKFISHSSSVSPLQRIYSGVKTHIFNKHRNDFVDFPLLSQEQKAHIRRKPYECNEQGKVFRVSSSLPNHQVIHTADKPNRCHECGKTVRDKSGLAEHWRIRTGEKPYKCKECGKLFNRIAYLARHEKVHTGESPYKCNECGKVFSRITYLVRHQKIHTREKPHKCNKCGKVYSSSSYLAQHWRIHTGEKLYKCNKCGKEFSGHSSLTTHLLIHTGEKPYKCKECDKAFRHKFSLTVHQRNHNGEKPYKCHECGKVFTQVSHLARHQKIHTGEKPYKCNECGKVFTQNSHLANHQRIHTGEKPYKCHVCGKVFRHSSWFVQHQRSVHERVLTN

SEQ ID NO: 13583 - protein, 141 aa, Homo sapiens
MSEEKPKEGVKTENDHINLKVAGQDGSVVQFKIKRHTPLSKLMKAYCERQVRHLAPPQSLPVCALVLCVPGIPRARASRGWTQMQLPEGLSMRQIRFRFDGQPINETDTPAQLEMEDEDTIDVFQQQTGGVPESSLAGHSF

SEQ ID NO: 13584 - protein, 292 aa, Homo sapiens
MAAAAAAAVAGVGRGGGGAEPRQERSRARGWAGVERSEGRRMEPGEELEEEGSPGGREDGFTAEHLAAEAMAADMDPWLVFDARTTPATELDAWLAKYPPSQVTRYGDPGSPNSEPVGWIAVYGQGYSPNSGDVQGLQAAWEALQTSGRPITPGTLRQLAITHHVLSGKWLMHLAPGFKLDHAWAGIARAVVEGQLQVAKVSPRAKEGGRQVICVYTDDFTDRLGVLEADSAIRAAGIKCLLTYKPDVYTYLGIYRANRWHLCPTLYESRFQLGGSARGSRVLDRANNVELT

SEQ ID NO: 13585 - protein, 209 aa, Homo sapiens
MGPEALSSLLLLLLVASGDADMKGHFDPAKCRYALGMQDRTIPDSDISASSSWSDSTAARHSRLESSDGDGAWCPAGSVFPKEEEYLQVDLQRLHLVALVGTQGRHAGGLGKEFSRSYRLRYSRDGRRWMGWKDRWGQEVISGNEDPEGVVLKDLGPPMVARLVRFYPRADRVMSVCLRVELYGCLWRDGLLSYTAPVGQTMYLSEAVY

SEQ ID NO: 13586 - protein, 86 aa, Homo sapiens
MGLSAAAPLWGPPGLLLAIALHPALSVPPRRDYCVLGAGPAGLQMAYFLQRAGRDYAVFERAPRPGSFFTRYPRHRKLISINKRYT

SEQ ID NO: 13587 - protein, 35 aa, Homo sapiens
MAAAARARVAYLLRQLQRAAWLFQILDMEQQLQRK

SEQ ID NO: 13588 - protein, 539 aa, Homo sapiens
MKPAAREARLPPRSPGLRWALPLLLLLLRLGQILCAGGTPSPIPDPSVATVATGENGITQISSTAESFHKQNGTGTPQVETNTSEDGESSGANDSLRTPEQGSNGTDGASQKTPSSTGPSPVFDIKAVSISPTNVILTWKSNDTAASEYKYVVKHKMENEKTITVVHQPWCNITGLRPATSYVFSITPGIGNETWGDPRVIKVITEPIPVSDLRVALTGVRKAALSWSNGNGTASCRVLLESIGSHEELTQDSRLQVNISGLKPGVQYNINPYLLQSNKTKGDPLGTEGGLDASNTERSRAGSPTAPVHDESLVGPVDPSSGQQSRDTEVLLVGLEPGTRYNATVYSQAANGTEGQPQAIEFRTNAIQVFDVTAVNISATSLTLIWKVSDNESSSNYTYKIHVAGETDSSNLNVSEPRAVIPGLRSSTFYNITVCPVLGDIEGTPGFLQVHTPPVPVSDFRVTVVSTTEIGLAWSSHDAESFQMHITQEGAGNSRVEITTNQSIIIGGLFPGTKYCFEIVPKGPNGTEGASRTVCNRTG

SEQ ID NO: 13589 - protein, 632 aa, Homo sapiens
MAANVGSMFQYWKRFDLQQLQRELDATATVLANRQDESEQSRKRLIEQSREFKKNTPEDLRKQVAPLLKSFQGEIDALSKRSKEAEAAFLNVYKRLIDVPEVTIKALKEKIREYEQTLKNQAETIALEKEQKLQNDFAEKERKLQETQMSTTSKLEEAEHKVQSLQTALEKTRTELFDLKTKYDEETTAKADEIEMIMTDLERANQRAEVAQREAETLREQLSSANHSLQLASQIQKAPDVEQAIEVLTRSSLEVELAAKEREIAQLVEDVQRLQASLTKLRENSASQISQLEQQLSAKNSTLKQLEEKLKGQADYEEVKKELNILKSMEFAPSEGAGTQDAAKPLEVLLLEKNRSLQSENAALRISNSDLSGRCAELQVRITEAVATATEQRELIARLEQDLSIIQSIQRPDAEGAAEHRLEKIPEPIKEATALFYGPAAPASGALPEGQVDSLLSIISSQRERFRARNQELEAENRLAQHTLQALQSELDSLRADNIKLFEKIKFLQSYPGRGSGSDDTELRYSSQYEERLDPFSSFSKRERQRKYLSLSPWDKATLSMGRLVLSNKMARTIGFFYTLFLHCLVFLVLYKLAWSESMERDCATFCAKKFADHLHKFHENDNGAAAGDLWQ

SEQ ID NO: 13590 - protein, 160 aa, Homo sapiens
MREWWVQVGLLAVPLLAAYLHIPPPQLSPALHSWKSSGKFFTYKGLRIFYQDSVGVVGSPEIVVLLHGFPTSSYDWYKIWEGLTLRFHRVIALDFLGFGFSDKPRPHHYSIFEQASIVEALLRHLGLQNRRINLLSHDYGDIVAQELLYRYKQNRSGRLT

SEQ ID NO: 13591 - protein, 221 aa, Homo sapiens
MFCQNPGAANSQLSTSQPSLRHKVNEHEQDGNELQTTPEFRAHVAKKLGALLDSFITISEAAKEPAKAKVQKVALEDDGFRLFFTSVPGGREKEESPQPRRKRQPSSSSSEDSDEEWRRCREAAVSASDILQESAIHSPGTVEKEAKKKRKLKKKAKKVASVDSAVAATTPTSMATVQKQKSGELNGDQVSLGTKKKKKAKKASETSPFPPAKSATAIPAN

SEQ ID NO: 13592 - protein, 1225 aa, Homo sapiens
MDRGPAAVACTLLLALVACLAPASGQECDSAHFRCGSGHCIPADWRCDGTKDCSDDADEIGCAVVTCQQGYFKCQSEGQCIPNSWVCDQDQDCDDGSDERQDCSQSTCSSHQITCSNGQCIPSEYRCDHVRDCPDGADENDCQYPTCEQLTCDNGACYNTSQKCDWKVDCRDSSDEINCTEICLHNEFSCGNGECIPRAYVCDHDNDCQDGSDEHACNYPTCGGYQFTCPSGRCIYQNWVCDGEDDCKDNGDEDGCESGPHDVHKCSPREWSCPESGRCISIYKVCDGILDCPGREDENNTSTGKYCSMTLCSALNCQYQCHETPYGGACFCPPGYIINHNDSRTCVEFDDCQIWGICDQKCESRPGRHLCHCEEGYILERGQYCKANDSFGEASIIFSNGRDLLIGDIHGRSFRILVESQNRGVAVGVAFHYHLQRVFWTDTVQNKVFSVDINGLNIQEVLNVSVETPENLAVDWVNNKIYLVETKVNRIDMVNLDGSYRVTLITENLGHPRGIAVDPTVGKTVVHGGSLIPHPFGVSLFEGQVFFTDWTKMAVLKANKFTETNPQVYYQASLRPYGVTVYHSLRQPYATNPCKDNNGGCEQVCVLSHRTDNDGLGFRCKCTFGFQLDTDERHCIGREILAANRVENVESLAFDWISKNLYWTDSHYKSISVMRLADKTRRTVVQYLNNPRSVVVHPFAGYLFFTDWFRPAKIMRAWSDGSHLLPVINTTLGWPNGLAIDWAASRLYWVDAYFDKIEHSTFDGLDRRRLGHIEQMTHPFGLAIFGEHLFFTDWRLGAIIRVRKADGGEMTVIRSGIAYILHLKSYDVNIQTGSNACNQPTHPNGDCSHFCFPVPNFQRVCGCPYGMRLASNHLTCEGDPTNEPPTEQCGLFSFPCKNGRCVPNYYLCDGVDDCHDNSDEQLCGTLNNTCSSSAFTCGHGECIPAHWRCDKRNDCVDGSDEHNCPTHAPASCLDTQYTCDNHQCISKNWVCDTDNDCGDGSDEKNCNSTETCQPSQFNCPNHRCIDLSFVCDGDKDCVDGSDEVGCVLNCTASQFKCASGDKCIGVTNRCDGVFDCSDNSDEAGCPTRPPGMCHSDEFQCQEDGICIPNFWECDGHPDCLYGSDEHNACVPKTCPSSYFHCDNGNCIHRAWLCDRDNDCGDMSDEKDCPTQPFRCPSWQWQCLGHNICVNLSVVCDGIFDCPNGTDESPLCSKFPDHSLLAINSF

SEQ ID NO: 13593 - protein, 754 aa, Homo sapiens
MLVAGLLLWASLLTGAWPSFPTQDHLPATPRVRLSFKELKATGTAHFFNFLLNTTDYRILLKDEDHDRMYVGSKDYVLSLDLHDINREPLIIHWAASPQRIEECVLSGKDVNGECGNFVRLIQPWNRTHLYVCGTGAYNPMCTYVNRGRRAQDYIFYLEPERLESGKGKCPYDPKLDTASALINEELYAGVYIDFMGTDAAIFRTLGKQTAMRTDQYNSRWLNDPSFIHAELIPDSAERNDDKLYFFFRERSAEAPQSPAVYARIGRICLNDDGGHCCLVNKWSTFLKARLVCSVPGEDGIETHFDELQDVFVQQTQDVRNPVIYAVFTSSGSVFRGSAVCVYSMADIRMVFNGPFAHKEGPNYQWMPFSGKMPYPRPGTCPGGTFTPSMKSTKDYPDEVINFMRSHPLMYQAVYPLQRRPLVVRTGAPYRLTTIAVDQVDAADGRYEVLFLGTDRGTVQKVIVLPKDDQELEELMLEEVEVFKDPAPVKTMTISSKRQQLYVASAVGVTHLSLHRCQAYGAACADCCLARDPYCAWDGQACSRYTASSKRRSRRQDVRHGNPIRQCRGFNSNANKNAVESVQYGVAGSAAFLECQPRSPQATVKWLFQRDPGDRRREIRAEDRFLRTEQGLLLRALQLSDRGLYSCTATENNFKHVVTRVQLHVLGRDAVHAALFPPLSMSAPPPPGAGPPTPPYQELAQLLAQPEVGLIHQYCQGYWRHVPPSPREAPGAPRSPEPQDQKKPRNRRHHPPDT

SEQ ID NO: 13594 - protein, 113 aa, Homo sapiens
MAPAAWLRSAAARALLPPMLLLLLQPPPLLARALPPDAHHLHAERRGPQPWHAALPSSPAPAPATQEAPRPASSLRPPRCGVPDPSDGLSARNRQKRFVLSGGRWEKTDLTYR

SEQ ID NO: 13595 - protein, 190 aa, Homo sapiens
MWPPRCKDPGRQSAEILQIIQLDLDLKFKTNIRELFEEFDSFLPGAIIGIAREMQPVYRHTFWQFRHENPQTRVGGPPPEGLPGFNSGVMLLNLEAMRQSPLYSRLLEPAQVQQLADKYHFRGHLGDQDFFTMIGMEHPKLFHVLDCTWNRQLCTWWRDHGYSDVFEAYFRCEGHVKIYHGNCNTPIPED

SEQ ID NO: 13596 - protein, 548 aa, Homo sapiens
MNIEVVEVLTLNQEVAGPRNAQIQALYAEDGSLSADAPSEQVQQQGKHPGDPEAARQRFRQFRYKDMTGPREALDQLRELCHQWLQPKARSKEQILELLVLEQFLGALPVKLRTWVESQHPENCQEVVALVEGVTWMSEEEVLPAGQPAEGTTCCLEVTAQQEEKQEDAAICPVTVLPEEPVTFQDVAVDFSREEWGLLGPTQRTEYRDVMLETFGHLVSVGWETTLENKELAPNSDIPEEEPAPSLKVQESSRDCALSSTLEDTLQGGVQEVQDTVLKQMESAQEKDLPQKKHFDNRESQANSGALDTNQVSLQKIDNPESQANSGALDTNQVLLHKIPPRKRLRKRDSQVKSMKHNSRVKIHQKSCERQKAKEGNGCRKTFSRSTKQITFIRIHKGSQVCRCSECGKIFRNPRYFSVHKKIHTGERPYVCQDCGKGFVQSSSLTQHQRVHSGERPFECQECGRTFNDRSAISQHLRTHTGAKPYKCQDCGKAFRQSSHLIRHQRTHTGERPYACNKCGKAFTQSSHLIGHQRTHNRTKRKKKQPTS

SEQ ID NO: 13597 - protein, 158 aa, Homo sapiens
MLGLCGQRLPAAWVLLLLPFLPLLLLAAPAPHRASYKPVIVVHGLFDSSYSFRHLLEYINEMGQYGDTDYLKWLFPTSMRSNLYRICYSPWGQEFSICNYWHDPHHDDLYLNASSFLALINGERDHPNATVWRKNFLRVGHLVLIGGPDDGVITPWQS

SEQ ID NO: 13598 - protein, 185 aa, Homo sapiens
MAKEEPQSISRDLQELQKKLSLLIDSFQNNSKLPQHSRISLDSDDGVSRLGSAGSKVVAFMKSPVGQYLDSHPFLAFTLLVFIVMSAVPVGFFLLIVVLTTLAALLGVIILEGLVISVGGFSLLCILCGLGFVSLAMSGMMIASYVVVSSLISCWFSPRPLTQQNTSCDFLPAMKSAEFEGLYQE

SEQ ID NO: 13599 - protein, 140 aa, Homo sapiens
MLPAAMKGLGLALLAVLLCSAPAHGLWCQDCTLTTNSSHCTPKQCQPSDTVCASVRITDPSSSRKDHSVNKMCASSCDFVKRHFFSDYLMGFINSGILKVDVDCCEKDLCNGAAGAGHSPWALAGGLLLSLGPALLWAGP

SEQ ID NO: 13600 - protein, 137 aa, Homo sapiens
MNFLLSWVHWSLALLLYLHHAKWSQAAPMAEGGGQNHHEVVKFMDVYQRSYCHPIETLVDIFQEYPDEIEYIFKPSCVPLMRCGGCCNDEGLECVPTEESNITMQIMRIKPHQGQHIGEMSFLQHNKCECRCDKPRR

SEQ ID NO: 13601 - protein, 832 aa, Homo sapiens
MQEPGQIVETYTEEDPEGAMSVVSVETSDDGTTRRTETTVKKVVKTVTTRTVQPVAMGPDGLPVDASSVSNNYIQTLGRDFRKNGNGGPGPYVGQAGTATLPRNFHYPPDGYSRHYEDGYPGGSDNYGSLSRVTRIEERYRPSMEGYRAPSRQDVYGPQPQVRVGGSSVDLHRFHPEPYGLEDDQRSMGYDDLDYGMMSDYGTARRTGTPSDPRRRLRSYEDMIGEEVPSDQYYWAPLAQHERGSLASLDSLRKGGPPPPNWRQPELPEVIAMLGFRLDAVKSNAAAYLQHLCYRNDKVKTDVRKLKGIPVLVGLLDHPKKEVHLGACGALKNISFGRDQDNKIAIKNCDGVPALVRLLRKARDMDLTEVITGTLWNLSSHDSIKMEIVDHALHALTDEVIIPHSGWEREPNEDCKPRHIEWESVLTNTAGCLRNVSSERSEARRKLRECDGLVDALIFIVQAEIGQKDSDSKLVENCVCLLRNLSYQVHREIPQAERYQEAAPNVANNTGPHAASCFGAKKGKGKKPIEDPANDTVDFPKRTSPARGYELLFQPEVVRIYISLLKESKTPAILEASAGAIQNLCAGRWTYGRYIRSALRQEKALSAIADLLTNEHERVVKAASGALRNLAVDARNKELIGKHAIPNLVKNLPGGQQNSSWNFSEDTVISILNTINEVIAENLEAAKKLRETQGIEKLVLINKSGNRSEKEVRAAALVLQTIWGYKELRKPLEKEGWKKSDFQVNLNNASRSQSSHSYDDSTLPLIDRNQKSDKKPDREEIQMSNMGSNTKSLDNNYSTPNERGDHNRTLDRSGDLGDMEPLKGTTPLMQKI

SEQ ID NO: 13602 - protein, 151 aa, Homo sapiens
MAGFLDNFRWPECECIDWSERRNAVASVVAGILFFTGWWIMIDAAVVYPKPEQLNHAFHTCGVFSTLAFFMINAVSNAQVRGDSYESGCLGRTGARVWLFIGFMLMFGSLIASMWILFGAYVTQMLAIGGKGASYCFLSSFDVARTSNYFD

SEQ ID NO: 13603 - protein, 723 aa, Homo sapiens
MAAAATMAAAARELVLRAGTSDMEEEEGPLAGGPGLQEPLQLGELDITSDEFILDEVDVHIQANLEDELVKEALKTGVDLRHYSKQVELELQQIEQKSIRDYIQESENIASLHNQITACDAVLERMEQMLGAFQSDLSSISSEIRTLQEQSGAMNIRLRNRQAVRGKLGELVDGLVVPSALVTAILEAPVTEPRFLEQLQELDAKAAAVREQEARGTAACADVRGVLDRLRVKAVTKIREFILQKIYSFRKPMTNYQIPQTALLKYRFFYQFLLGNERATAKEIRDEYVETLSKIYLSYYRSYLGRLMKVQYEEVAEKDDLMGVEDTAKKGFFSKPSLRSRNTIFTLGTRGSVISPTELEAPILVPHTAQRGEQRYPFEALFRSQHYALLDNSCREYLFICEFFVVSGPAAHDLFHAVMGRTLSMTLKHLDSYLADCYDAIAVFLCIHIVLRFRNIAAKRDVPALDRYWEQVLALLWPRFELILEMNVQSVRSTDPQRLGGLDTRPHYITRRYAEFSSALVSINQTIPNERTMQLLGQLQVEVENFVLRVAAEFSSRKEQLVFLINNYDMMLGVLMERAADDSKEVESFQQLLNARTQEFIEELLSPPFGGLVAFVKEAEALIERGQAERLRGEEARVTQLIRGFGSSWKSSVESLSQDVMRSFTNFRNGTSIIQGALTQLIQLYHRFHRVLSQPQLRALPARAELINIHHLMVELKKHKPNF

SEQ ID NO: 13604 - protein, 532 aa, Homo sapiens
MDQFGDILEGEVDHSFFDSDFEEGKKCETNSVFDKQNDDPKERIDKDTKNVNSNTGMQTTENYLTEKGNERNVKFPPEHPVENDVTQTVSSFSLPASSRSKKLCDVTTGLKIHVSIPNRIPKIVKEGEDDYYTDGEESSDDGKKYHVKSKSAKPSTNVKKSIRKKYCKVSSSSSSSLSSSSSGSGTDCLDAGSDSHLSDSSPSSKSSKKHVSGITLLSPKHKYKSGIKSTETQPSSTTPKCGHYPEESEDTVTDVSPLSTPDISPLQSFELGIANDQKVKIKKQENVSQEIYEDVEDLKNNSKYLKAAKKGKEKHEPDVSSKSSSVLDSSLDHRHKQKVLHDTMDLNHLLKAFLQLDKKGPQKHHFDQPSVAPGKNYSFTREEVRQIDRENQRLLKELSRQAEKPGSKSTIPRSADHPPKLYHSALNRQKEQQRIERENLALLKRLEAVKPTVGMKRSEQLMDYHRNMGYLNSSPLSRRARSTLGQYSPLRASRTSSATSGLSCRSERSAVDPSSGHPRRRPKPPNVRTAWL

SEQ ID NO: 13605 - protein, 188 aa, Homo sapiens
MAGSPTCLTLIYILWQLTEHLSKPKVTMGLQSNKNGTCVTNLTCCMEHGEEDVIYTWKALGQAANESHNGSILPISWRWGESDMTFICVARNPVSRNFSSPILARKLCEEYIEEKKRVDICRETPNICPHSGENTEYDTIPHTNRTILKEDPANTVYSTVEIPKKMENPHSLLTMPDTPRLFAYENVI

SEQ ID NO: 13606 - protein, 358 aa, Homo sapiens
MEPGRRGAAALLALLCVACALRAGRAQYERYSFRSFPRDELMPLESAYRHALDKYSGEHWAESVGYLEISLRLHRLLRDSEAFCHRNCSAAPQPEPAAGLASYPELRLFGGLLRRAHCLKRCKQGLPAFRQSQPSREVLADFQRREPYKFLQFAYFKANNLPKAIAAAHTFLLKHPDDEMMKRNMAYYKSLPGAEDYIKDLETKSYESLFIRAVRAYNGENWRTSITDMELALPDFFKAFYECLAACEGSREIKDFKDFYLSIAVNDLKNAAPCAVSYLLFDQNDKVMQQNLVYYQYHRDTWGLSDEHFQPRPEAVQFFNVTTLQKELYDFAKENIMDDDEGEVVEYVDDLLELEETS

SEQ ID NO: 13607 - protein, 779 aa, Homo sapiens
MRTLEDSSGTVLHRLIQEQLRYGNLTETRTLLAIQQQALRGGAGTGGTGSPQASLEILAPEDSQVLQQATRQEPQGQEHQGGENHLAENTLYRLCPQPSKGEELPTYEEAKAHSQYYAAQQAGTRPHAGDRDPRGAPGGSRRQDEALRELRHGHVRSLSERLLQLSLERNGARAPSHMSSSHSFPQLARNQQGPPLRGPPAEGPESRGPPPQYPHVVLAHETTTAVTDPRYRARGSPHFQHAEVRILQAQVPPVFLQQQQQYQYLQQSQEHPPPPHPAALGHGPLSSLSPPAVEGPVSAQASSATSGSAHLAQMEAVLRENARLQRDNERLQRELESSAEKAGRIEKLESEIQRLSEAHESLTRASSKREALEKTMRNKMDSEMRRLQDFNRDLRERLESANRRLASKTQEAQAGSQDMVAKLLAQSYEQQQEQEKLEREMALLRGAIEDQRRRAELLEQALGNAQGRAARAEEELRKKQAYVEKVERLQQALGQLQAACEKREQLELRLRTRLEQELKALRAQQRQAGAPGGSSGSGGSPELSALRLSEQLREKEEQILALEADMTKWEQKYLEERAMRQFAMDAAATAAAQRDTTLIRHSPQPSPSSSFNEGLLTGGHRHQEMESRLKVLHAQILEKDAVIKVLQQRSRRDPGKAIQGSLRPAKSVPSVFAAAAAGTQGWQGLSSSERQTADAPARLTTDRAPTEEPVVTAPPAAHAKHGSRDGSTQTEGPPDSTSTCLPPEPDSLLGCSSSQRAASLDSVATSRVQDLSDMVEILI

SEQ ID NO: 13608 - protein, 1448 aa, Homo sapiens
MRILKRFLACIQLLCVCRLDWANGYYRQQRKLVEEIGWSYTGALNQKNWGKKYPTCNSPKQSPINIDEDLTQVNVNLKKLKFQGWDKTSLENTFIHNTGKTVEINLTNDYRVSGGVSEMVFKASKITFHWGKCNMSSDGSEHSLEGQKFPLEMQIYCFDADRFSSFEEAVKGKGKLRALSILFEVGTEENLDFKAIIDGVESVSRFGKQAALDPFILLNLLPNSTDKYYIYNGSLTSPPCTDTVDWIVFKDTVSISESQLAVFCEVLTMQQSGYVMLMDYLQNNFREQQYKFSRQVFSSYTGKEEIHEAVCSSEPENVQADPENYTSLLVTWERPRVVYDTMIEKFAVLYQQLDGEDQTKHEFLTDGYQDLGAILNNLLPNMSYVLQIVAICTNGLYGKYSDQLIVDMPTDNPELDLFPELIGTEEIIKEEEEGKDIEEGAIVNPGRDSATNQIRKKEPQISTTTHYNRIGTKYNEAKTNRSPTRGSEFSGKGDVPNTSLNSTSQPVTKLATEKDISLTSQTVTELPPHTVEGTSASLNDGSKTVLRSPHMNLSGTAESLNTVSITEYEEESLLTSFKLDTGAEDSSGSSPATSAIPFISENISQGYIFSSENPETITYDVLIPESARNASEDSTSSGSEESLKDPSMEGNVWFPSSTDITAQPDVGSGRESFLQTNYTEIRVDESEKTTKSFSAGPVMSQGPSVTDLEMPHYSTFAYFPTEVTPHAFTPSSRQQDLVSTVNVVYSQTTQPVYNEASNSSHESRIGLAEGLESEKKAVIPLVIVSALTFICLVVLVGILIYWRKCFQTAHFYLEDSTSPRVISTPPTPIFPISDDVGAIPIKHFPKHVADLHASSGFTEEFEEVQSCTVDLGITADSSNHPDNKHKNRYINIVAYDHSRVKLAQLAEKDGKLTDYINANYVDGYNRPKAYIAAQGPLKSTAEDFWRMIWEHNVEVIVMITNLVEKGRRKCDQYWPADGSEEYGNFLVTQKSVQVLAYYTVRNFTLRNTKIKKGSQKGRPSGRVVTQYHYTQWPDMGVPEYSLPVLTFVRKAAYAKRHAVGPVVVHCSAGVGRTGTYIVLDSMLQQIQHEGTVNIFGFLKHIRSQRNYLVQTEEQYVFIHDTLVEAILSKETEVLDSHIHAYVNALLIPGPAGKTKLEKQFQLLSQSNIQQSDYSAALKQCNREKNRTSSIIPVERSRVGISSLSGEGTDYINASYIMGYYQSNEFIITQHPLLHTIKDFWRMIWDHNAQLVVMIPDGQNMAEDEFVYWPNKDEPINCESFKVTLMAEEHKCLSNEEKLIIQDFILEATQDDYVLEVRHFQCPKWPNPDSPISKTFELISVIKEEAANRDGPMIVHDEHGGVTAGTFCALTTLMHQLEKENSVDVYQVAKMINLMRPGVFADIEQYQFLYKVILSLVSTRQEENPSTSLDSNGAALPDGNIAESLESLV

SEQ ID NO: 13609 - protein, 189 aa, Homo sapiens
MGPPSLVLCLLSATVFSLLGGSSAFLSHHRLKGRFQRDRRNIRPNIILVLTDDQDVELGSMQVMNKTRRIMEQGGAHFINAFVTTPMCCPSRSSILTGKYVHNHNTYTNNENCSSPSWQAQHESRTFAVYLNSTGYRTAFFGKYLNEYNGSYVPPGWKEWVGLLKNSRFYNYTLCRNGVKEKHGSDYSK

SEQ ID NO: 13610 - protein, 282 aa, Homo sapiens
MSLFGLLLLTSALAGQRQGTQAESNLSSKFQFSSNKEQNGVQDPQHERIITVSTNGSIHSPRFPHTYPRNTVLVWRLVAVEENVWIQLTFDERFGLEDPEDDICKYDFVEVEEPSDGTILGRWCGSGTVPGKQISKGNQIRIRFVSDEYFPSEPGFCIHYNIVMPQFTEAVSPSVLPPSALPLDLLNNAITAFSTLEDLIRYLEPERWQLDLEDLYRPTWQLLGKAFVFGRKSRVVDLNLLTEEVLQLRPKTGVRGLHKSLTDVALEHHEECDCVCRGSTGG

SEQ ID NO: 13611 - protein, 442 aa, Homo sapiens
MEASRCRLSPSGDSVFHEEMMKMRQAKLDYQRLLLEKRQRKKRLEPFMVQPNPEARLRRAKPRASDEQTPLVNCHTPHSNVILHGIDGPAAVLKPDEVHAPSVSSSVVEEDAENTVDTASKPGLQERLQKHDISESVNFDEETDGISQSACLERPNSASSQNSTDTGTSGSATAAQPADNLLGDIDDLEDFVYSPAPQGVTVRCRIIRDKRGMDRGLFPTYYMYLEKEENQKIFLLAARKRKKSKTANYLISIDPVDLSREGESYVGKLRSNLMGTKFTVYDRGICPMKGRGLVGAAHTRQELAAISYETNVLGFKGPRKMSVIIPGMTLNHKQIPYQPQNNHDSLLSRWQNRTMENLVELHNKAPVWNSDTQSYVLNFRGRVTQASVKNFQIVHKNDPDYIVMQFGRVADDVFTLDYNYPLCAVQAFGIGLSSFDSKLACE

SEQ ID NO: 13612 - protein, 242 aa, Homo sapiens
MAAPALGLVCGRCPELGLVLLLLLLSLLCGAAGSQEAGTGAGAGSLAGSCGCGTPQRPGAHGSSAAAHRYSREANAPGPVPGERQLAHSKMVPIPAGVFTMGTDDPQIKQDGEAPARRVTIDAFYMDAYEVSNTEFEKFVNSTGYLTEVDAFPPNGYGLYNIVGNAWEWTSDWWTVHHSVEETLNPKGPPSGKDRVKKGGSYMCHRSYCYRYRCAARSQNTPDSSASNLGFRCAADRLPTMD

SEQ ID NO: 13613 - protein, 605 aa, Homo sapiens
MEDVEARFAHLLQPIRDLTKNWEVDVAAQLGEYLEELDQICISFDEGKTTMNFIEAALLIQGSACVYSKKVEYLYSLVYQALDFISGKRRAKQLSSVQEDRANGVASSGVPQEAENEFLSLDDFPDSRTNVDLKNDQTPSEVLIIPLLPMALVAPDEMEKNNNPLYSRQGEVLASRKDFRMNTCVPHPRGAFMLEPEGMSPMEPAGVSPMPGTQKDTGRTEEQPMEVSVCRSPVPALGFSQEPGPSPEGPMPLGGGEDEDAEEAVELPEASAPKAALEPKESRSPQQSAALPRRYMLREREGAPEPASCVKETPDPWQSLDPFDSLESKPFKKGRPYSVPPCVEEALGQKRKRKGAAKLQDFHQWYLAAYADHADSRRLRRKGPSFADMEVLYWTHVKEQLETLRKLQRREVAEQWLRPAEEDHLEDSLEDLGAADDFLEPEEYMEPEGADPREAADLDAVPMSLSYEELVRRNVELFIATSQKFVQETELSQRIRDWEDTVQPLLQEQEQHVPFDIHTYGDQLVSRFPQLNEWCPFAELVAGQPAFEVCRSMLASLQLANDYTVEITQQPGLEMAVDTMSLRLLTHQRAHKRFQTYAAPSMAQP

SEQ ID NO: 13614 - protein, 272 aa, Homo sapiens
MAVFVVLLALVAGVLGNEFSILKSPGSVVFRNGNWPIPGERIPDVAALSMGFSVKEDLSWPGLAVGNLFHRPRATVMVMVKGVNKLALPPGSVISYPLENVDLLFLSELQVLHDISSLLSRHKHLAKDHSPDLYSLELAGLDEIGKRYGEDSEQFRDASKILVDALQKFADDMYSLYGGNAVVELVTVKSFDTSLIRKTRTILEAKQAKNPASPYNLAYKYNFEYSVVFNMVLWIMIALALAVIITSYNIWNMDPGYDSIIYRMTNQKIRMD

SEQ ID NO: 13615 - protein, 412 aa, Homo sapiens
MVPPPPGEESQTVILPPGWQSYLSPQGRRYYVNTTTNETTWERPSSSPGIPASPGSHRSSLPPTVNGYHASGTPAHPPETAHMSVRKSTGDSQNLGSSSPSKKQSKENTITINCVTFPHPDTMPEQQLLKPTEWSYCDYFWADKKDPQGNGTVAGFELLLQKQLKGKQMQKEMSEFIRERIKIEEDYAKNLAKLSQNSLASQEEGSLGEAWAQVKKSLADEAEVHLKFSAKLHSEVEKPLMNFRENFKKDMKKCDHHIADLRKQLASRYASVEKARKALTERQRDLEMKTQQLEIKLSNKTEEDIKKARRKSTQAGDDLMRCVDLYNQAQSKWFEEMVTTTLELERLEVERVEMIRQHLCQYTQLRHETDMFNQSTVEPVDQLLRKVDPAKDRELWVREHKTGNIRPVDMEI

SEQ ID NO: 13616 - protein, 237 aa, Homo sapiens
MPLLLLLPLLWADLTHRPKILIPGTLEPGHSKNLTCSVSWACEQGTPPIFSWLSAAPTSLGPRTTHSSVLIITPRPQDHGTNLTCQVKFAGAGVTTERTIQLNVTYVPQNPTTGIFPGDGSGKQETRAGVVHGAIGGAGVTALLALCLCLIFFIVKTHRRKAARTAVGRNDTHPTTGSASPKHQKKSKLHGPTETSSCSGAAPTVEMDEELHYASLNFHGMNPSKDTSTEYSEVRTQ

SEQ ID NO: 13617 - protein, 89 aa, Homo sapiens
MYMQDYWRTWLKGLRGFFFVGVLFSAVSIAAFCTFLVLAITRHQSLTDPTSYYLSSVWSFISFKWAFLLSLYAHRYRADFADISILSDF

SEQ ID NO: 13618 - protein, 134 aa, Homo sapiens
MRMSVGLSLLLPLSGRTFLLLLSVVMAQSHWPSEPSEAVRDWENQLEASMHSVLSDLHEAVPTVVGIPDGTAVVGRSFRVTIPTDLIASSGDIIKVSAAGKEALPSWLHWDSQSHTLEGLPLDTDKGVHYISVS

SEQ ID NO: 13619 - protein, 510 aa, Homo sapiens
MTPILTVLICLGLSLGPRTHVQAGHLPKPTLWAEPGSVITQGSPVTLRCQGGQETQEYRLYREKKTAPWITRIPQELVKKGQFPIPSITWEHTGRYRCYYGSDTAGRSESSDPLELVVTGAYIKPTLSAQPSPVVNSGGNVTLQCDSQVAFDGFILCKEGEDEHPQCLNSQPHARGSSRAIFSVGPVSPSRRWWYRCYAYDSNSPYEWSLPSDLLELLVLGVSKKPSLSVQPGPIVAPEETLTLQCGSDAGYNRFVLYKDGERDFLQLAGAQPQAGLSQANFTLGPVSRSYGGQYRCYGAHNLSSEWSAPSDPLDILIAGQFYDRVSLSVQPGPTVASGENVTLLCQSQGWMQTFLLTKEGAADDPWRLRSTYQSQKYQAEFPMGPVTSAHAGTYRCYGSQSSKPYLLTHPSDPLELVVSGPSGGPSSPTTGPTSTSGPEDQPLTPTGSDPQSGLGRHLGVVIGILVAVILLLLLLLLLFLILRHRRQGKHWTSSPAQLPMPRKKTSMLP

SEQ ID NO: 13620 - protein, 68 aa, Homo sapiens
MVKKIEISQHAKYTCSFCGKTKMKRRAVGIWHCGSCMKTVAGGAWTYNTTSAVTVKSAIRRLKELKDQ

SEQ ID NO: 13621 - protein, 118 aa, Homo sapiens
MKTPWKVLLGLLGAAALVTIITVPVVLLNKGTDDATADSRKTYTLTDYLKNTYRLKLYSLRWISDHEYLYKQENNILVFNAEYGNSSVFLENSTFHMAKWIFLSFLKCSLPWLLFSLL

SEQ ID NO: 13622 - protein, 284 aa, Homo sapiens
MAGRLLGKALAAVSLSLALASVTIRSSRCRGIQAFRNSFSSSWFHLNTNVMSGSNGSKENSHNKARTSPYPGSKVERSQVPNEKVGWLVEWQDYKPVEYTAVSVLAGPRWADPQIRNPAGRTGLVGRGLLGRWGPNHAADPIITRWKRDSSGNKIMHPVSGKHILQFVAIKRKDCGEWAIPGGMVDPGEKISATLKREFGEEALNSLQKTSAEKREIEEKLHKLFSQDHLVIYKGYVDDPRNTDNAWMETEAVNYHDETGEIMDNLMLEAGDDAGKVKWVDIND

SEQ ID NO: 13623 - protein, 151 aa, Homo sapiens
MAATALLEAGLARVLFYPTLLYTLFRGKVPGRAHRDWYHRIDPTVLLGALPLRSLTRQVSRAGEPGPLPRPRRSVPVGPLGSPPSLLSHLFASAAGTGRERARGDHHERGVRDEVPVQLFTGAQMESRGGCKSHRQDPVIHPHQAWPAGCS

SEQ ID NO: 13624 - protein, 26 aa, Homo sapiens
MHYPTALLFLILANGAQAFRICAFNA

SEQ ID NO: 13625 - protein, 822 aa, Homo sapiens
MVSWGRFICLVVVTMATLSLARPSFSLVEDTTLEPEEPPTKYQISQPEVYVAAPGESLEVRCLLKDAAVISWTKDGVHLGPNNRTVLIGEYLQIKGATPRDSGLYACTASRTVDSETWYFMVNVTDAISSGDDEDDTDGAEDFVSENSNNKRAPYWTNTEKMEKRLHAVPAANTVKFRCPAGGNPMPTMRWLKNGKEFKQEHRIGGYKVRNQHWSLIMESVVPSDKGNYTCVVENEYGSINHTYHLDVVERSPHRPILQAGLPANASTVVGGDVEFVCKVYSDAQPHIQWIKHVEKNGSKYGPDGLPYLKVLKHSGINSSNAEVLALFNVTEADAGEYICKVSNYIGQANQSAWLTVLPKQQAPGREKEITASPDYLEIAIYCIGVFLIACMVVTVILCRMKNTTKKPDFSSQPAVHKLTKRIPLRRQVTVSAESSSSMNSNTPLVRITTRLSSTADTPMLAGVSEYELPEDPKWEFPRDKLTLGKPLGEGCFGQVVMAEAVGIDKDKPKEAVTVAVKMLKDDATEKDLSDLVSEMEMMKMIGKHKNIINLLGACTQDGPLYVIVEYASKGNLREYLRARRPPGMEYSYDINRVPEEQMTFKDLVSCTYQLARGMEYLASQKCIHRDLAARNVLVTENNVMKIADFGLARDINNIDYYKKTTNGRLPVKWMAPEALFDRVYTHQSDVWSFGVLMWEIFTLGGSPYPGIPVEELFKLLKEGHRMDKPANCTNELYMMMRDCWHAVPSQRPTFKQLVEDLDRILTLTTNEEYLDLSQPLEQYSPSYPDTRSSCSSGDDSVFSPDPMPYEPCLPQYPHINGSVKT

SEQ ID NO: 13626 - protein, 558 aa, Homo sapiens
MATTATCTRFTDDYQLFEELGKGAFSVVRRCVKKTSTQEYAAKIINTKKLSARDHQKLEREARICRLLKHPNIVRLHDSISEEGFHYLVFDLVTGGELFEDIVAREYYSEADASHCIHQILESVNHIHQHDIVHRDLKPENLLLASKCKGAAVKLADFGLAIEVQGEQQAWFGFAGTPGYLSPEVLRKDPYGKPVDIWACGVILYILLVGYPPFWDEDQHKLYQQIKAGAYDFPSPEWDTVTPEAKNLINQMLTINPAKRITADQALKHPWVCQRSTVASMMHRQETVECLRKFNARRKLKGAILTTMLVSRNFSAAKSLLNKKSDGGVKKRKSSSSVHLMPQSNNKNSLVSPAQEPAPLQTAMEPQTTVVHNATDGIKGSTESCNTTTEDEDLKGRVPEGRSSRDRTAPSAGMQPQPSLCSSAMRKQEIIKITEQLIEAINNGDFEAYTKICDPGLTSFEPEALGNLVEGMDFHKFYFENLLSKNSKPIHTTILNPHVHVIGEDAACIAYIRLTQYIDGQGRPRTSQSEETRVWHRRDGKWLNVHYHCSGAPAAPLQ

SEQ ID NO: 13627 - protein, 1676 aa, Homo sapiens
MFRQFYLWTCLASGIILGSLFEICLGQYDDDCKLARGGPPATIVAIDEESRNGTILVDNMLIKGTAGGPDPTIELSLKDNVDYWVLMDPVKQMLFLNSTGRVLDRDPPMNIHSIVVQVQCINKKVGTIIYHEVRIVVRDRNDNSPTFKHESYYATVNELTPVGTTIFTGFSGDNGATDIDDGPNGQIEYVIQYNPDDPTSNDTFEIPLMLTGNIVLRKRLNYEDKTRYFVIIQANDRAQNLNERRTTTTTLTVDVLDGDDLGPMFLPCVLVPNTRDCRPLTYQAAIPELRTPEELNPIIVTPPIQAIDQDRNIQPPSDRPGILYSILVGTPEDYPRFFHMHPRTAELSLLEPVNRDFHQKFDLVIKAEQDNGHPLPAFAGLHIEILDENNQSPYFTMPSYQGYILESAPVGATISDSLNLTSPLRIVALDKDIEDTKDPELHLFLNDYTSVFTVTQTGITRYLTLLQPVDREEQQTYTFSITAFDGVQESEPVIVNIQVMDANDNTPTFPEISYDVYVYTDMRPGDSVIQLTAVDADEGSNGEITYEILVGAQGDFIINKTTGLITIAPGVEMIVGRTYALTVQAADNAPPAERRNSICTVYIEVLPPNNQSPPRFPQLMYSLEISEAMRVGAVLLNLQATDREGDSITYAIENGDPQRVFNLSETTGILTLGKALDRESTDRYILIITASDGRPDGTSTATVNIVVTDVNDNAPVFDPYLPRNLSVVEEEANAFVGQVKATDPDAGINGQVHYSLGNFNNLFRITSNGSIYTAVKLNREVRDYYELVVVATDGAVHPRHSTLTLAIKVLDIDDNSPVFTNSTYTVLVEENLPAGTTILQIEAKDVDLGANVSYRIRSPEVKHFFALHPFTGELSLLRSLDYEAFPDQEASITFLVEAFDIYGTMPPGIATVTVIVKDMNDYPPVFSKRIYKGMVAPDAVKGTPITTVYAEDADPPGLPASRVRYRVDDVQFPYPASIFEVEEDSGRVITRVNLNEEPTTIFKLVVVAFDDGEPVMSSSATVKILVLHPGEIPRFTQEEYRPPPVSELATKGTMVGVISAAAINQSIVYSIVSGNEEDTFGINNITGVIYVNGPLDYETRTSYVLRVQADSLEVVLANLRVPSKSNTAKVYIEIQDENNHPPVFQKKFYIGGVSEDARMFTSVLRVKATDKDTGNYSVMAYRLIIPPIKEGKEGFVVETYTGLIKTAMLFHNMRRSYFKFQVIATDDYGKGLSGKADVLVSVVNQLDMQVIVSNVPPTLVEKKIEDLTEILDRYVQEQIPGAKVVVESIGARRHGDAFSLEDYTKCDLTVYAIDPQTNRAIDRNELFKFLDGKLLDINKDFQPYYGEGGRILEIRTPEAVTSIKKRGESLGYTEGALLALAFIIILCCIPAILVVLVSYRQVFKGRQAECTKTARIQAALPAAKPAVPAPAPVAAPPPPPPPPPGAHLYEELGDSSMYEMPQYGSRRRLLPPAGQEEYGEVVGEAEEEYEEEEWARKRMIKLVVDREYETSSTGEDSAPECQRNRLHHPSIHSNINGNIYIAQNGSVVRTRRACLTDNLKVASPVRLGGPFKKLDKLAVTHEENVPLNTLSKGPFSTEKMNARPTLVTFAPCPVGTDNTAVKPLRNRLKSTVEQESMIDSKNIKEALEFHSDHTQSDDEELWMGPWNNLHIPMTKL

SEQ ID NO: 13628 - protein, 545 aa, Homo sapiens
MGSSATEIEELENTTFKYLTGEQTEKMWQRLKGILRCLVKQLERGDVNVVDLKKNIEYAASVLEAVYIDETRRLLDTEDELSDIQTDSVPSEVRDWLASTFTRKMGMTKKKPEEKPKFRSIVHAVQAGIFVERMYRKTYHMVGLAYPAAVIVTLKDVDKWSFDVFALNEASGEHSLKFMIYELFTRYDLINRFKIPVSCLITFAEALEVGYSKYKNPYHNLIHAADVTQTVHYIMLHTGIMHWLTELEILAMVFAAAIHDYEHTGTTNNFHIQTRSDVAILYNDRSVLENHHVSAAYRLMQEEEMNILINLSKDDWRDLRNLVIEMVLSTDMSGHFQQIKNIRNSLQQPEGIDRAKTMSLILHAADISHPAKSWKLHYRWTMALMEEFFLQGDKEAELGLPFSPLCDRKSTMVAQSQIGFIDFIVEPTFSLLTDSTEKIVIPLIEEASKAETSSYVASSSTTIVGLHIADALRRSNTKGSMSDGSYSPDYSLAAVDLKSFKNNLVDIIQQNKERWKELAAQGESDLHKNSEDLVNAEEKHDETHS

SEQ ID NO: 13629 - protein, 51 aa, Homo sapiens
MWFMYLLSWLSLFIQVAFITLAVAAGLYYLAELIEEYTVATSRIIKYMIWD

SEQ ID NO: 13630 - protein, 493 aa, Homo sapiens
MDQDYERRLLRQIVIQNENTMPRVTEMRRTLTPASSPVSSPSKHGDRFIPSRAGANWSVNFHRINENEKSPSQNRKAKDATSDNGKDGLAYSALLKNELLGAGIEKVQDPQTEDRRLQPSTPEKKGLFTYSLSTKRSSPDDGNDVSPYSLSPVSNKSQKLLRSPRKPTRKISKIPFKVLDAPELQDDFYLNLVDWSSLNVLSVGLGTCVYLWSACTSQVTRLCDLSVEGDSVTSVGWSERGNLVAVGTHKGFVQIWDAAAGKKLSMLEGHTARVGALAWNAEQLSSGSRDRMILQRDIRTPPLQSERRLQGHRQEVCGLKWSTDHQLLASGGNDNKLLVWNHSSLSPVQQYTEHLAAVKAIAWSPHQHGLLASGGGTADRCIRFWNTLTGQPLQCIDTGSQVCNLAWSKHANELVSTHGYSQNQILVWKYPSLTQVAKLTGHSYRVLYLAMSPDGEAIVTGAGDETLRFWNVFSKTRSTKESVSVLNLFTRIR

SEQ ID NO: 13631 - protein, 359 aa, Homo sapiens
MRPPQCLLHTPSLASPLLLLLLWLLGGGVGAEGREDAELLVTVRGGRLRGIRLKTPGGPVSAFLGIPFAEPPMGPRRFLPPEPKQPWSGVVDATTFQSVCYQYVDTLYPGFEGTEMWNPNRELSEDCLYLNVWTPYPRPTSPTPVLVWIYGGGFYSGASSLDVYDGRFLVQAERTVLVSMNYRVGAFGFLALPGSREAPGNVGLLDQRLALQWVQENVAAFGGDPTSVTLFGESAGAASVGMHLLSPPSRGLFHRAVLQSGAPNGPWATVGMGEARRRATQLAHLVGCPPGGTGGNDTELVACLRTRPAQVLVNHEWHVLPQESVFRFSFVPVVDGDFLSDTPEALINAGDFHGLQGSQ

SEQ ID NO: 13632 - protein, 279 aa, Homo sapiens
MADDLGDEWWENQPTGAGSSPEASDGEGEGDTEVMQQETVPVPVPSEKTKQPKECFLIQPKERKENTTKTRKRRKKKITDVLAKSEPKPGLPEDLQKLMKDYYSSRRLVIELEELNLPDSCFLKANDLTHSLSSYLKEICPKWVKLRKNHSEKKSVLMLIICSSAVRALELIRSMTAFRGDGKVIKLFAKHIKVQAQVKLLEKRVVHLGVGTPGRIKELVKQGGLNLSPLKFLVFDWNWRDQKLRRMMDIPEIRKEVFELLEMGVLSLCKSESLKLGLF

SEQ ID NO: 13633 - protein, 410 aa, Homo sapiens
MAAPSPSGGGGSGGGSGSGTPGPVGSPAPGHPAVSSMQGFQINFCEKAQSKRKALKLNFANPPFKSTARFTLNPNPTGVQNPHIERLRTHSIESSGKLKISPEQHWDFTAEDLKDLGEIGRGAYGSVNKMVHKPSGQIMAVKRIRSTVDEKEQKQLLMDLDVVMRSSDCPYIVQFYGALFREGDCWICMELMSTSFDKFYKYVYSVLDDVIPEEILGKITLATVKALNHLKENLKIIHRDIKPSNILLDRSGNIKLCDFGISGQLVDSIAKTRDAGCRPYMAPERIDPSASRQGYDVRSDVWSLGITLYELATGRFPYPKWNSVFDQLTQVVKGDPPQLSNSEEREFSPSFINFVNLCLTKDESKRPKYKELLKHPFILMYEERAVEVACYVCKILDQMPATPSSPMYVD

SEQ ID NO: 13634 - protein, 93 aa, Homo sapiens
MLYLEDYLEMIEQLPMDLRDRFTEMREMDLQVQNAMDQLEQRVSEFFMNAKKNKPEWREEQMASIKKDYYKALEDADEKVQLANQIYDLDLWN

SEQ ID NO: 13635 - protein, 2330 aa, Homo sapiens
MLRGPGPGLLLLAVQCLGTAVPSTGASKSKRQAQQMVQPQSPVAVSQSKPGCYDNGKHYQINQQWERTYLGNALVCTCYGGSRGFNCESKPEAEETCFDKYTGNTYRVGDTYERPKDSMIWDCTCIGAGRGRISCTIANRCHEGGQSYKIGDTWRRPHETGGYMLECVCLGNGKGEWTCKPIAEKCFDHAAGTSYVVGETWEKPYQGWMMVDCTCLGEGSGRITCTSRNRCNDQDTRTSYRIGDTWSKKDNRGNLLQCICTGNGRGEWKCERHTSVQTTSSGSGPFTDVRAAVYQPQPHPQPPPYGHCVTDSGVVYSVGMQWLKTQGNKQMLCTCLGNGVSCQETAVTQTYGGNSNGEPCVLPFTYNGRTFYSCTTEGRQDGHLWCSTTSNYEQDQKYSFCTDHTVLVQTRGGNSNGALCHFPFLYNNHNYTDCTSEGRRDNMKWCGTTQNYDADQKFGFCPMAAHEEICTTNEGVMYRIGDQWDKQHDMGHMMRCTCVGNGRGEWTCIAYSQLRDQCIVDDITYNVNDTFHKRHEEGHMLNCTCFGQGRGRWKCDPVDQCQDSETGTFYQIGDSWEKYVHGVRYQCYCYGRGIGEWHCQPLQTYPSSSGPVEVFITETPSQPNSHPIQWNAPQPSHISKYILRWRPKNSVGRWKEATIPGHLNSYTIKGLKPGVVYEGQLISIQQYGHQEVTRFDFTTTSTSTPVTSNTVTGETTPFSPLVATSESVTEITASSFVVSWVSASDTVSGFRVEYELSEEGDEPQYLDLPSTATSVNIPDLLPGRKYIVNVYQISEDGEQSLILSTSQTTAPDAPPDTTVDQVDDTSIVVRWSRPQAPITGYRIVYSPSVEGSSTELNLPETANSVTLSDLQPGVQYNITIYAVEENQESTPVVIQQETTGTPRSDTVPSPRDLQFVEVTDVKVTIMWTPPESAVTGYRVDVIPVNLPGEHGQRLPISRNTFAEVTGLSPGVTYYFKVFAVSHGRESKPLTAQQTTKLDAPTNLQFVNETDSTVLVRWTPPRAQITGYRLTVGLTRRGQPRQYNVGPSVSKYPLRNLQPASEYTVSLVAIKGNQESPKATGVFTTLQPGSSIPPYNTEVTETTIVITWTPAPRIGFKLGVRPSQGGEAPREVTSDSGSIVVSGLTPGVEYVYTIQVLRDGQERDAPIVNKVVTPLSPPTNLHLEANPDTGVLTVSWERSTTPDITGYRITTTPTNGQQGNSLEEVVHADQSSCTFDNLSPGLEYNVSVYTVKDDKESVPISDTIIPAVPPPTDLRFTNIGPDTMRVTWAPPPSIDLTNFLVRYSPVKNEEDVAELSISPSDNAVVLTNLLPGTEYVVSVSSVYEQHESTPLRGRQKTGLDSPTGIDFSDITANSFTVHWIAPRATITGYRIRHHPEHFSGRPREDRVPHSRNSITLTNLTPGTEYVVSIVALNGREESPLLIGQQSTVSDVPRDLEVVAATPTSLLISWDAPAVTVRYYRITYGETGGNSPVQEFTVPGSKSTATISGLKPGVDYTITVYAVTGRGDSPASSKPISINYRTEIDKPSQMQVTDVQDNSISVKWLPSSSPVTGYRVTTTPKNGPGPTKTKTAGPDQTEMTIEGLQPTVEYVVSVYAQNPSGESQPLVQTAVTNIDRPKGLAFTDVDVDSIKIAWESPQGQVSRYRVTYSSPEDGIHELFPAPDGEEDTAELQGLRPGSEYTVSVVALHDDMESQPLIGTQSTAIPAPTDLKFTQVTPTSLSAQWTPPNVQLTGYRVRVTPKEKTGPMKEINLAPDSSSVVVSGLMVATKYEVSVYALKDTLTSRPAQGVVTTLENVSPPRRARVTDATETTITISWRTKTETITGFQVDAVPANGQTPIQRTIKPDVRSYTITGLQPGTDYKIYLYTLNDNARSSPVVIDASTAIDAPSNLRFLATTPNSLLVSWQPPRARITGYIIKYEKPGSPPREVVPRPRPGVTEATITGLEPGTEYTIYVIALKNNQKSEPLIGRKKTVQKTPFVTHPGYDTGNGIQLPGTSGQQPSVGQQMIFEEHGFRRTTPPTTATPIRHRPRPYPPNVGQEALSQTTISWAPFQDTSEYIISCHPVGTDEEPLQFRVPGTSTSATLTGLTRGATYNVIVEALKDQQRHKVREEVVTVGNSVNEGLNQPTDDSCFDPYTVSHYAVGDEWERMSESGFKLLCQCLGFGSGHFRCDSSRWCHDNGVNYKIGEKWDRQGENGQMMSCTCLGNGKGEFKCDPHEATCYDDGKTYHVGEQWQKEYLGAICSCTCFGGQRGWRCDNCRRPGGEPSPEGTTGQSYNQYSQRYHQRTNTNVNCPIECFMPLDVQADREDSRE

SEQ ID NO: 13636 - protein, 219 aa, Homo sapiens
MKVLWAALLVTFLAGCQAKVEQAVETEPEPELRQQTEWQSGQRWELALGRFWDYLRWVQTLSEQVQEELLSSQVTQELRALMDETMKELKAYKSELEEQLTPVAEETRARLSKELQAAQARLGADMEDVCGRLVQYRGEVQAMLGQSTEELRVRLASHLRKLRKRLLRDADDLQKRLAVYQAGAREGAERGLSAIRERLGPLVEQGRVRAATVGSLAGQ

SEQ ID NO: 13637 - protein, 195 aa, Homo sapiens
MEAARRPRLGLSRRRPRPAGGPSGGRPWFLLGGDERERLWAELLRTVSPELILDHEVPSLPAFPGQEPRCGPEPTEVFTVGPKTFSWTPFPPDLWGPGRSYRLLHGAGGHLESPARSLPQRPAPDPCRAPRVEQQPSVEGAAALRSCPMCQKEFAPRLTQLDVDSHLAQCLAESTEDVTCLSWMCKTLNDPGSQG

SEQ ID NO: 13638 - protein, 140 aa, Homo sapiens
MAGWQSYVDNLMCDGCCQEAAIVGYCDAKYVWAATAGGVFQSITPIEIDMIVGKDREGFFTNGLTLGAKKCSVIRDSLYVDGDCTMDIRTKSQGGEPTYNVAVGRAGRALVIVMGKEGVHGGTLNKKAYELALYLRRSDV

SEQ ID NO: 13639 - protein, 277 aa, Homo sapiens
MATMGLLMLLTLAASPHFLSICFHHVCVHTFRGPHWCEYCANFMWGLIAQGVKCADCGLNVHKQCSKMVPNDCKPDLKHVKKVYSCDLTTLVKAHTTKRPMVVDMCIREIESRGLNSEGLYRVSGFSDLIEDVKMAFDRDGEKADISVNMYEDINIITGALKLYFRDLPIPLITYDAYPKFIESAKIMDPDEQLETLHEALKLLPPAHCETLRYLMAHLKRVTLHEKENLMNAENLGIVFGPTLMRSPELDAMAALNDIRYQRLVVELLIKNEDILF

SEQ ID NO: 13640 - protein, 275 aa, Homo sapiens
MALQIPGGFWAAAVTVMLVMLSTPVAEARDFPKDFLVQFKGMCYFTNGTERVRGVARYIYNREEYGRFDSDVGEFQAVTELGRSIEDWNNYKDFLEQERAAVDKVCRHNYEAELRTTLQRQVEPTVTISPSRTEALNHHNLLVCSVTDFYPAQIKVRWFRNDQEETAGVVSTSLIRNGDWTFQILVMLEITPQRGDIYTCQVEHPSLQSPITVEWRAQSESAQSKMLSGIGGFVLGLIFLGLGLIIRHRGQKGPRGPPPAGNISAMIQSGERAQA

SEQ ID NO: 13641 - protein, 124 aa, Homo sapiens
MPPSGPRGTLLLLPLLLLLLLRAVLAVPLERGAPNKEETPATESPDTGLYYHRYLQEVIDVLETDGHFREKLQAANAEDIKSGKLSRELDFVSHHVRTKLDELKRQEVSRLRMLLKAKMDAEQD

SEQ ID NO: 13642 - protein, 891 aa, Homo sapiens
MEDFIVISDDSGSESSGGARPGRSRRPRRALSRTSGALPRRTVDFIDLTRETRPRTKDRSGLYVIDLTRAEGENRPIATLDLTLEPVTPSQKEPTSLQTCASLSGKAVMEGHVDRSSQPTARRIINSDPVDLDLVEENTFVGPPPATSISGGSVYPTEPNCSSATFTGNLSFLASLQLSSDVSSLSPTSNNSRSSSSSSNQKAPLPCPQQDVSRPPQALPCPLRPLPCPPRASPCPPRASSCPPRALSCPSQTMQCQLPALTHPPQEVPCPRQNIPGPPQDSLGLPQDVPGLPQSILHPQDVAYLQDMPRSPGDVPQSPSDVSPSPDAPQSPGGMPHLPGDVLHSPGDMPHSSGDVTHSPRDIPHLPGDRPDFTQNDVQNRDMPMDISALSSPSCSPSPQSETPLEKVPWLSVMETPARKEISLSEPAKPGSAHVQSRTPQGGLYNRPCLHRLKYFLRPPVHHLFFQTLIPDKDTRENKGQKLEPIPHRRLRMVTNTIEENFPLGTVQFLMDFVSPQHYPPREIVAHIIQKILLSGSETVDVLKEAYMLLMKIQQLHPANAKTVEWDWKLLTYVMEEEGQTLPGRVLFLRYVVQTLEDDFQQTLRRQRQHLQQSIANMVLSCDKQPHNVRDVIKWLVKAVTEDGLTQPPNGNQTSSGTGILKASSSHPSSQPNLTKNTNQLIVCQLQRMLSIAVEVDRTPTCSSNKIAEMMFGFVLDIPERSQREMFFTTMESHLLRCKVLEIIFLHSCETPTRLPLSLAQALYFLNNSTSLLKCQSDKSQWQTWDELVEHLQFLLSSYQHVLREHLRSSVIDRKDLIIKRIKPKPQQGDDITVVDVEKQIEAFRSRLIQMLGEPLVPQLQDKVHLLKLLLFYAADLNPDAEPFQKGWSGS

SEQ ID NO: 13643 - protein, 148 aa, Homo sapiens
QGFGWLVSWLHGAVLPAGTWTSKSHVRFIDYEYAGYNYQAFDIGNHFNEFAGVNEVDYCLYPARETQLQWLHYYLQAQKGMAVTPREVQRLYVQVNKFALASHFFWALWALIQNQYSTIDFDFLRYAVIRFNQYFKVKPQASALEMPK

SEQ ID NO: 13644 - protein, 1871 aa, Homo sapiens
MENEIFTPLLEQFMTSPLVTWVKTFGPLAAGNGTNLDEYVALVDGVFLNQVMLQINPKLESQRVNKKVNNDASLRMHNLSILVRQIKFYYQETLQQLIMMSLPNVLIIGKNPFSEQGTEEVKKLLLLLLGCAVQCQKKEEFIERIQGLDFDTKAAVAAHIQEVTHNQENVFDLQWMEVTDMSQEDIEPLLKNMALHLKRLIDERDEHSETIIELSEERDGLHFLPHASSSAQSPCGSPGMKRTESRQHLSVELADAKAKIRRLRQELEEKTEQLLDCKQELEQMEIELKRLQQENMNLLSDARSARMYRDELDALREKAVRVDKLESEVSRYKERLHDIEFYKARVEELKEDNQVLLETKTMLEDQLEGTRARSDKLHELEKENLQLKAKLHDMEMERDMDRKKIEELMEENMTLEMAQKQSMDESLHLGWELEQISRTSELSEAPQKSLGHEVNELTSSRLLKLEMENQSLTKTVEELRTTVDSVEGNASKILKMEKENQRLSKKVEILENEIVQEKQSLQNCQNLSKDLMKEKAQLEKTIETLRENSERQIKILEQENEHLNQTVSSLRQRSQISAEARVKDIEKENKILHESIKETSSKLSKIEFEKRQIKKELEHYKEKGERAEELENELHHLEKENELLQKKITNLKITCEKIEALEQENSELERENRKLKKTLDSFKNLTFQLESLEKENSQLDEENLELRRNVESLKCASMKMAQLQLENKELESEKEQLKKGLELLKASFKKTERLEVSYQGLDIENQRLQKTLENSNKKIQQLESELQDLEMENQTLQKNLEELKISSKRLEQLEKENKSLEQETSQLEKDKKQLEKENKRLRQQAEIKDTTLEENNVKIGNLEKENKTLSKEIGIYKESCVRLKELEKENKELVKRATIDIKTLVTLREDLVSEKLKTQQMNNDLEKLTHELEKIGLNKERLLHDEQSTDDSRYKLLESKLESTLKKSLEIKEEKIAALEARLEESTNYNQQLRQELKTVKKNYEALKQRQDEERMVQSSPPISGEDNKWERESQETTRELLKVKDRLIEVERNNATLQAEKQALKTQLKQLETQNNNLQAQILALQRQTVSLQEQNTTLQTQNAKLQVENSTLNSQSTSLMNQNAQLLIQQSSLENENESVIKEREDLKSLYDSLIKDHEKLELLHERQASEYESLISKHGTLKSAHKNLEVEHRDLEDRYNQLLKQKGQLEDLEKMLKVEQEKMLLENKNHETVAAEYKKLCGENDRLNHTYSQLLKETEVLQTDHKNLKSLLNNSKLEQTRLEAEFSKLKEQYQQLDITSTKLNNQCELLSQLKGNLEEENRHLLDQIQTLMLQNRTLLEQNMESKDLFHVEQRQYIDKLNELRRQKEKLEEKIMDQYKFYDPSPPRRRGNWITLKMRKLIKSKKDINRERQKSLTLTPTRSDSSEGFLQLPHQDSQDSSSVGSNSLEDGQTLGTKKSSMVALKRLPFLRNRPKDKDKMKACYRRSMSMNDLVQSMVLAGQWTGSTENLEVPDDISTGKRRKELGAMAFSTTAINFSTVNSSAGFRSKQLVNNKDTTSFEDISPQGVSDDSSTGSRVHASRPASLDSGRTSTSNSNNNASLHEVKAGAVNNQSRPQSHSSGEFSLLHDHEAWSSSGSSPIQYLKRQTRSSPVLQHKISETLESRHHKIKTGSPGSEVVTLQQFLEESNKLTSVQIKSSSQENLLDEVMKSLSVSSDFLGKDKPVSCGLARSVSGKTPGDFYDRRTTKPEFLRPGPRKTEDTYFISSAGKPTPGTQGKIKLVKESSLSRQSKDSNPYATLPRASSVISTAEGTTRRTSIHDFLTKDSRLPISVDSPPAAADSNTTAASNVDKVQESRNSKSRSREQQSS

SEQ ID NO: 13645 - protein, 900 aa, Homo sapiens
MATCAVEVFGLLEDEENSRIVRVRVIAGIGLAKKDILGASDPYVRVTLYDPMNGVLTSVQTKTIKKSLNPKWNEEILFRVHPQQHRLLFEVFDENRLTRDDFLGQVDVPLYPLPTENPRLERPYTFKDFVLHPRSHKSRVKGYLRLKMTYLPKTSGSEDDNAEQAEELEPGWVVLDQPDAACHLQQQQEPSPLPPGWEERQDILGRTYYVNHESRRTQWKRPTPQDNLTDAENGNIQLQAQRAFTTRRQISEETESVDNRESSENWEIIREDEATMYSNQAFPSPPPSSNLDVPTHLAEELNARLTIFGNSAVSQPASSSNHSSRRGSLQAYTFEEQPTLPVLLPTSSGLPPGWEEKQDERGRSYYVDHNSRTTTWTKPTVQATVETSQLTSSQSSAGPQSQASTSDSGQQVTQPSEIEQGFLPKGWEVRHAPNGRPFFIDHNTKTTTWEDPRLKIPAHLRGKTSLDTSNDLGPLPPGWEERTHTDGRIFYINHNIKRTQWEDPRLENVAITGPAVPYSRDYKRKYEFFRRKLKKQNDIPNKFEMKLRRATVLEDSYRRIMGVKRADFLKARLWIEFDGEKGLDYGGVAREWFFLISKEMFNPYYGLFEYSATDNYTLQINPNSGLCNEDHLSYFKFIGRVAGMAVYHGKLLDGFFIRPFYKMMLHKPITLHDMESVDSEYYNSLRWILENDPTELDLRFIIDEELFGQTHQHELKNGGSEIVVTNKNKKEYIYLVIQWRFVNRIQKQMAAFKEGFFELIPQDLIKIFDENELELLMCGLGDVDVNDWREHTKYKNGYSANHQVIQWFWKAVLMMDSEKRIRLLQFVTGTSRVPMNGFAELYGSNGPQSFTVEQWGTPEKLPRAHTCFNRLDLPPYESFEELWDKLQMAIENTQGFDGVD

SEQ ID NO: 13646 - protein, 55 aa, Homo sapiens
MQPRVLLVVALLALLASARASEAEDASLLSFMQGYMKHATKTAKDALSSVQESQV

SEQ ID NO: 13647 - protein, 202 aa, Homo sapiens
MAAGSRTSLLLAFGLLCLSWLQEGSAFPTIPLSRLFDNAMLRARRLYQLAYDTYQEFNPQTSLCFSESIPTPSNRVKTQQKSNLELLRISLLLIQSWLEPVQLLRSVFANSLVYGASDSNVYRHLKDLEEGIQTLMWRLEDGSPRTGQIFNQSYSKFDTKSHNDDALLKNYGLLYCFRKDMDKVETFLRIVQCRSVEGSCGF

SEQ ID NO: 13648 - protein, 177 aa, Homo sapiens
MSSNECFKCGRSGHWARECPTGGGRGRGMRSRGRGGFTSDRGFQFVSSSLPDICYRCGESGHLAKDCDLQEDACYNCGRGGHIAKDCKEPKREREQCCYNCGKPGHLARDCDHADEQKCYSCGEFGHIQKDCTKVKCYRCGETGHVAINCSKTSEVNCYRCGESGHLARECTIEATA

SEQ ID NO: 13649 - protein, 154 aa, Homo sapiens
MEALILYYDDTYPSVKEQKAFEKNIFNKTHRTDSEIALLEGLTVVYKSSIDLYFYVIGSSYENELMLMAVLNCLFDSLSQMLRKNVEKRALLENMEGLFLAVDEIVDGGVILESDPQQVVHRVALRGEDVPLTEQTVSQVLQSAKEQIKWSLLR

SEQ ID NO: 13650 - protein, 516 aa, Homo sapiens
MATRRLGVGETLGALNAALGPGGPVWIKETRTRHLRSRDFLAPHRALQARFDDGQVPEHLLHALACLQGPGVAPVLRCAPTPAGLSLQLQRSAVFERVLSAVAAYATPASPASLGQRVLLHCPALRSSPCALRLSQLRTVLVADHLARALRAHGVCVRLVPAVRDPHMLTFLQQLRVDWPAASERASSHTLRSHALEELTSANDGRTLSPGILGRLCLKELVEEQGRTAGYDPNLDNCLVTEDLLSVLAELQEALWHWPEDSHPGLAGASDTGTGGCLVVHVVSCEEEFQQQKLDLLWQKLVDKAPLRQKHLICGPVKVAGAPGTLMTAPEYYEFRHTQVCKASALKHGGDLAQDPAWTEIFGVLSVATIKFEMLSTAPQSQLFLALADSSISTKGTKSGTFVMYNCARLATLFESYKCSMEQGLYPTFPPVSSLDFSLLHDEYPPLSGSAEPDSSAGLHSPGAPHCCTHRDDMQVPGTAQHGFQLLLQPGTHPGGASTTPLWSDVRPPAASESCA

SEQ ID NO: 13651 - protein, 1648 aa, Homo sapiens
MDDDSLDELVARSPGPDGHPQVGPADPAGDFEESSVGSSGDSGDDSDSEHGDGTDGEDEGASEEEDLEDRSGSEDSEDDGETLLEVAGTQGKLEAAGSFNSDDDAESCPICLNAFRDQAVGTPENCAHYFCLDCIVEWSKNANSCPVDRTLFKCICIRAQFGGKILRKIPVENTKASEEEEDPTFCEVCGRSDREDRLLLCDGCDAGYHMECLDPPLQEVPVDEWFCPECAAPGVVLAADAGPVSEEEVSLLLADVVPTTSRLRPRAGRTRAIARTRQSERVRATVNRNRISTARRVQHTPGRLGSSLLDEAIEAVATGLSTAVYQRPLTPRTPARRKRKTRRRKKVPGRKKTPSGPSAKSKSSATRSKKRQHRVKKRRGKKVKSEATTRSRIARTLGLRRPVHSSCIPSVLKPVEPSLGLLRADIGAASLSLFGDPYELDPFDSEELSANPLSPLSAKRRALSRSALQSHQPVARPVSVGLSRRRLPAAVPEPDLEEEPVPDLLGSILSGQSLLMLGSSDVIIHRDGSLSAKRAAPVSFQRNSGSLSRGEEGFKGCLQPRALPSGSPAQGPSGNRPQSTGLSCQGRSRTPARTAGAPVRLDLPAAPGAVQARNLSNGSVPGFRQSHSPWFNGTNKHTLPLASAASKISSRDSKPPCRSVVPGPPLKPAPRRTDISELPRIPKIRRDDGGGRRDAAPAHGQSIEIPSACISRLTGREGTGQPGRGTRAESEASSRVPREPGVHTGSSRPPAPSSHGSLAPLGPSRGKGVGSTFESFRINIPGNMAHSSQLSSPGFCNTFRPVDDKEQRKENPSPLFSIKKTKQLRSEVYDPSDPTGSDSSAPGSSPERSGPGLLPSEITRTISINSPKAQTVQAVRCVTSYTVESIFGTEPEPPLGPSSAMSKLRGAVAAEGASDTEREEPTESQGLAARLRRPSPPEPWDEEDGASCSTFFGSEERTVTCVTVVEPEAPPSPDVLQAATHRVVELRPPSRSRSTSSSRSRKKAKRKRVSREHGRTRSGTRSESRDRSSRSASPSVGEERPRRQRSKAKSRRSSSDRSSSRERAKRKKAKDKSREHRRGPWGHSRRTSRSRSGSPGSSSYEHYESRKKKKRRSASRPRGRECSPTSSLERLCRHKHQRERSHERPDRKESVAWPRDRRKRRSRSPSSEHRAREHRRPRSREKWPQTRSHSPERKGAVREASPAPLAQGEPGREDLPTRLPALGEAHVSPEVATADKAPLQAPPVLEVAAECEPDDLDLDYGDSVEAGHVFDDFSSDAVFIQLDDMSSPPSPESTDSSPERDFPLKPALPPASLAVAAIQREVSLMHDEDPSQPPPLPEGTQEPHLLRPDAAEKAEAPSSPDVAPAGKEDSPSASGRVQEAARPEEVVSQTPLLRSRALVKRVTWNLQESESSAPAEDRAPRAPLHRPQKPREGAWDMEDVAPTGVRQVFSELPFPSHVLPEPGFPDTDPSQVYSPGLPPAPAQPSSIPPCALVSQPTVQFILQGSLPLVGCGAAQTLAPVPAALTPASEPASQATAASNSEEKTPAPRLAAEKTKKEEYMKKLHMQERAVEEVKLAIKPFYQKREVTKEEYKDILRKAVQKICHSKSGEINPVKVANLVKAYVDKYRHMRRHKKPEAGEEPPTQGAEG

SEQ ID NO: 13652 - protein, 211 aa, Homo sapiens
RGPLDVSSSHTPTWRKLLLTGALLTSCTCSAFSELPFSAQLNTLTEGASVHLPVPGRLEDSLQLMPLKTFPAAIRGVIQSELNYSVILQWVVTMDPEPVLSWTFSGVPCGMGEKLFIRRLSCEQLGTYMCIATNSKKQLVSEPVTISLPKPIMQPTEAEPMEPDPTLSLSGGSAIGLLAAGILGAGALIAGMCFIIIQSLRTDRQRIGICS

SEQ ID NO: 13653 - protein, 422 aa, Homo sapiens
MWLFFGITGLLTAALSGHPSPAPPDQLNTSSAESELWEPGERLPVRLTNGSSSCSGTVEVRLEASWEPACGALWDSRAAEAVCRALGCGGAEAASQLAPPTPELPPPPAAGNTSVAANATLAGAPALLCSGAEWRLCEVVEHACRSDGRRARVTCAENRALRLVDGGGACAGRVEMLEHGEWGSVCDDTWDLEDAHVVCRQLGCGWAVQALPGLHFTPGRGPIHRDQVNCSGAEAYLWDCPGLPGQHYCGHKEDAGAVCSASRSLHNLSTPEVPASVQTVTIESSVTVKIENKESRELMLLIPSIVLGILLLGSLIFIAFILLRIKGKYVFMLPIQVQAPPPEDSDSGSDSDYEHYDFSAQPPVALTTFYNSQRHRVTDEEVQQSRFQMPPLEEGLEELHASHIPTANPGHCITDPPSLGPQ

SEQ ID NO: 13654 - protein, 493 aa, Homo sapiens
MADSEALPSLAGDPVAVEALLRAVFGVVVDEAIQKGTSVSQKVCEWKEPEELKQLLDLELRSQGESQKQILERCRAVIRYSVKTGHPRFFNQLFSGLDPHALAGRIITESLNTSQYTYEIAPVFVLMEEEVLRKLRALVGWSSGDGIFCPGGSISNMYAVNLARYQRYPDCKQRGLRTLPPLALFTSKECHYSIQKGAAFLGLGTDSVRVVKADERGKMVPEDLERQIGMAEAEGAVPFLVSATSGTTVLGAFDPLEAIADVCQRHGLWLHVDAAWGGSVLLSQTHRHLLDGIQRADSVAWNPHKLLAAGLQCSALLLQDTSNLLKRCHGSQASYLFQQDKFYDVALDTGDKVVQCGRRVDCLKLWLMWKAQGDQGLERRIDQAFVLARYLVEEMKKREGFELVMEPEFVNVCFWFVPPSLRGKQESPDYHERLSKVAPVLKERMVKEGSMMIGYQPHGTRGNFFRVVVANSALTCADMDFLLNELERLGQDL

SEQ ID NO: 13655 - protein, 487 aa, Homo sapiens
MMLSRAKPAVGRGVQHTDKRKKKGRKIPKLEELLSKRDFTGAITLLEFKRHVGEEEEDTNLWIGYCAFHLGDYKRALEEYENATKEENCNSEVWVNLACTYFFLGMYKQAEAAGFKASKSRLQNRLLFHLAHKFNDEKKLMSFHQNLQDVTEDQLSLASIHYMRSHYQEAIDIYKRILLDNREYLALNVYVALCYYKLDYYDVSQEVLAVYLQQIPDSTIALNLKACNHFRLYNGRAAEAELKSLMDNASSSFEFAKELIRHNLVVFRGGEGALQVLPPLVDVIPEARLNLVIYYLRQDDVQEAYNLIKDLEPTTPQEYILKGVVNAALGQEMGSRDHMKIAQQFFQLVGGSASECDTIPGRQCMASCFFLLKQFDDVLIYLNSFKSYFYNDDIFNFNYAQAKAATGNTSEGEEAFLLIQSEKMKNDYIYLSWLARCYIMNKKPRLAWELYLKMETSGESFSLLQLIANDCYKRDPSRSAPFTEKHR

SEQ ID NO: 13656 - protein, 238 aa, Homo sapiens
MLLLVTSLLLCELPHPAFLLIPEKSDLRTVAPASSLNVRFDSRTMNLSWDCQENTTFSKCFLTDKKNRVVEPRLSNNECSCTFREICLHEGVTFEVHVNTSQRGFQQKLLYPNSGREGTAAQNFSCFIYNADLMNCTWARGPTAPRDVQYFLYIRNSKRRREIRCPYYIQDSGTHVGCHLDNLSGLTSRNYFLVNGTSREIGIQFFDSLLDTKKIERFNPPSNVTVRCNTTHCLVRWK

SEQ ID NO: 13657 - protein, 124 aa, Homo sapiens
MAAKVFESIGKFGLALAVAGGVVNSALYNVDAGHRAVIFDRFRGVQDIVVGEGTHFLIPWVQKPIIFDCRSRPRNVPVITGSKDLQNVNITLRILFRPVASQLPRIFTSIGEDYDERVLPSITT

SEQ ID NO: 13658 - protein, 117 aa, Homo sapiens
MKHLWFFLLLVAAPRWVLSQVQLQESGPGLVKPSGTLSLTCAVSGGSISSSNWWSWVRQPPGKGLEWIGEIYHSGSTNYNPSLKSRVTISVDKSKNQFSLKLSSVTAADTAVYYCAR

SEQ ID NO: 13659 - protein, 346 aa, Homo sapiens
MFLSILVALCLWLHLALGVRGAPCEAVRIPMCRHMPWNITRMPNHLHHSTQENAILAIEQYEELVDVNCSAVLRFFLCAMYAPICTLEFLHDPIKPCKSVCQRARDDCEPLMKMYNHSWPESLACDELPVYDRGVCISPEAIVTDLPEDVKWIDITPDMMVQERPLDVDCKRLSPDRCKCKKVKPTLATYLSKNYSYVIHAKIKAVQRSGCNEVTTVVDVKEIFKSSSPIPRTQVPLITNSSCQCPHILPHQDVLIMCYEWRSRMMLLENCLVEKWRDQLSKRSIQWEERLQEQRRTVQDKKKTAGRTSRSNPPKPKGKPPAPKPASPKKNIKTRSAQKRTNPKRV

SEQ ID NO: 13660 - protein, 239 aa, Homo sapiens
MASLQRKGLQARILTSEEEEKLKRDQTLVSDFKQQKLEQEAQKNWDLFYKRNSTNFFKDRHWTTREFEELRSCREQNPLYDTERCKVFQCDLTKDDLLDHVPPESVDVVMLIFVLSAVHPDKMHLVLQNIYKVLKPGKSVLFRDYGLYDHAMLRFKASSKLGENFYVRQDGTRSYFFTDDFLAQLFMDTGYEEVVNEYVFRETVNKKEGLCVPRVFLQSKFLKPPKNPSPVVLGLDPKS

SEQ ID NO: 13661 - protein, 602 aa, Homo sapiens
MGLVCVLGDGKTEQKGGDKKRGVKRPREDHGRGYFEYIEENKYSRAKSPQPPVEEEDEHFDDTVVCLDTYNCDLHFKISRDRLSASSLTMESFAFLWAGGRASYGVSKGKVCFEMKVTEKIPVRHLYTKDIDIHEVRIGWSLTTSGMLLGEEEFSYGYSLKGIKTCNCETEDYGEKFDENDVITCFANFESDEVELSYAKNGQDLGVAFKISKEVLAGRPLFPHVLCHNCAVEFNFGQKEKPYFPIPEEYTFIQNVPLEDRVRGPKGPEEKKDCEVVMMIGLPGAGKTTWVTKHAAENPGKYNILGTNTIMDKMMVAGFKKQMADTGKLNTLLQRAPQCLGKFIEIAARKKRNFILDQTNVSAAAQRRKMCLFAGFQRKAVVVCPKDEDYKQRTQKKAEVEGKDLPEHAVLKMKGNFTLPEVAECFDEITYVELQKEEAQKLLEQYKEESKKALPPEKKQNTGSKKSNKNKSGKNQFNRGGGHRGRGGFNMRGGNFRGGAPGNRGGYNRRGNMPQRGGGGGGSGGIGYPYPRAPVFPGRGSYSNRGNYNRGGMPNRGNYNQNFRGRGNNRGYKNQSQGYNQWQQGQFWGQKPWSQHYHQGYY

SEQ ID NO: 13662 - protein, 91 aa, Homo sapiens
MAANATTNPSQLLPLELVDKCIGSRIHIVMKSDKEIVGTLLGFDDFVNMVLEDVTEFEITPEGRRITKLDQILLNGNNITMLVPGGEGPEV

SEQ ID NO: 13663 - protein, 349 aa, Homo sapiens
MELTELLLVVMLLLTARLTLSSPAPPACDLRVLSKLLRDSHVLHSRLSQCPEVHPLPTPVLLPAVDFSLGEWKTQMEETKAQDILGAVTLLLEGVMAARGQLGPTCLSSLLGQLSGQVRLLLGALQSLLGTQGRTTAHKDPNAIFLSFQHLLRGKVRFLMLVGGSTLCVRRAPPTTAVPSRTSLVLTLNELPNRTSGLLETNFTASARTTGSGLLKWQQGFRAKIPGLLNQTSRSLDQIPGYLNRIHELLNGTRGLFPGPSRRTLGAPDISSGTSDTGSLPPNLQPGYSPSPTHPPTGQYTLFPLPPTLPTPVVQLHPLLPDPSAPTPTPTSPLLNTSYTHSQNLSQEG

SEQ ID NO: 13664 - protein, 304 aa, Homo sapiens
HGLPLLPLLSLLVGAWLKLGNGQATSMVQLQGGRFLMGTNSPDSRDGDGPVREATVKPFAIDIFPVTNKDFRDFVREKKYRTEAEMFGWSFVFEDFVSDELRNKATQPMKSGRCLCWAGASCSRSPSFSQSVLWWLPVEKAFWRQPAGPGSGIRERLEHPVLHVSWNDARAYCAWRGKRLPTEEEWEFAARGGLKGQVYPWGNWFQPNRTNLWQGKFPKGDKAEDGFHGVSPVNAFPAQNNYGLYDLLGNVWEWTASPYQAAEQDMRVLRGASWIDTADGSANHRARVTTRMGNTPDSASDNLG

SEQ ID NO: 13665 - protein, 108 aa, Homo sapiens
MEGPVLTLGLLAALAVCGSWGLNEEERLIRHLFQEKGYNKELRPVAHKEESVDVALALTLSNLISLKEVEETLTTNVWIEHGWTDNRLKWNAEEFGNISVLRLPPDMQ

SEQ ID NO: 13666 - protein, 1266 aa, Homo sapiens
MGPLMVLFCLLFLYPGLADSAPSCPQNVNISGGTFTLSHGWAPGSLLTYSCPQGLYPSPASRLCKSSGQWQTPGATRSLSKAVCKPGHCPNPGISLGAVRTGFRFGHGDKVRYRCSSNLVLTGSSERECQGNGVWSGTEPICRQPYSYDFPEDVAPALGTSFSHMLGATNPTQKTKDHENGTGTNTYAALNSVYLMMNNQMRLLGMETMAWQEIRHAIILLTDGKSNMGGSPKTAVDHIREILNINQKRNDYLDIYAIGVGKLDVDWRELNELGSKKDGERHAFILQDTKALHQVFEHMLDVSKLTDTICGVGNMSANASDQERTPWHVTIKPKSQETCRGALISDQWVLTAAHCFRDGNDHSLWRVNVGDPKSQWGKEFLIEKAVISPGFDVFAKKNQGILEFYGDDIALLKLAQKVKMSTHARPICLPCTMEANLALRRPQGSTCRDHENELLNKQSVPAHFVALNGSKLNINLKMGVEWTSCAEVVSQEKTMFPNLTDVREVVTDQFLCSGTQEDESPCKGVTTTPWSLARPQGSCSLEGVEIKGGSFRLLQEGQALEYVCPSGFYPYPVQTRTCRSTGSWSTLKTQDQKTVRKAECRAIHCPRPHDFENGEYWPRSPYYNVSDEISFHCYDGYTLRGSANRTCQVNGRWSGQTAICDNGAGYCSNPGIPIGTRKVGSQYRLEDSVTYHCSRGLTLRGSQRRTCQEGGSWSGTEPSCQDSFMYDTPQEVAEAFLSSLTETIEGVDAEDGHGPGEQQKRKIVLDPSGSMNIYLVLDGSDSIGASNFTGAKKCLVNLIEKVASYGVKPRYGLVTYATYPKIWVKVSEADSSNADWVTKQLNEINYEDHKLKSGTNTKKALQAVYSMMSWPDDVPPEGWNRTRHVIILMTDGLHNMGGDPITVIDEIRDLLYIGKDRKNPREDYLDVYVFGVGPLVNQVNINALASKKDNEQHVFKVKDMENLEDVFYQMIDESQSLSLCGMVWEHRKGTDYHKQPWQAKISVIRPSKGHESCMGAVVSEYFVLTAAHCFTVDDKEHSIKVSVGGEKRDLEIEVVLFHPNYNINGKKEAGIPEFYDYDVALIKLKNKLKYGQTIRPICLPCTEGTTRALRLPPTTTCQQQKEELLPAQDIKALFVSEEEKKLTRKEVYIKNGDKKGSCERDAQYAPGYDKVKDISEVVTPRFLCTGGVSPYADPNTCRGDSGGPLIVHKRSRFIQVGVISWGVVDVCKNQKRQKQVPAHARDFHINLFQVLPWLKEKLQDEDLGFL

SEQ ID NO: 13667 - protein, 702 aa, Homo sapiens
MAAPMTPAARPEDYEAALNAALADVPELARLLEIDPYLKPYAVDFQRRYKQFSQILKNIGENEGGIDKFSRGYESFGVHRCADGGLYCKEWAPGAEGVFLTGDFNGWNPFSYPYKKLDYGKWELYIPPKQNKSVLVPHGSKLKVVITSKSGEILYRISPWAKYVVREGDNVNYDWIHWDPEHSYEFKHSRPKKPRSLRIYESHVGISSHEGKVASYKHFTCNVLPRIKGLGYNCIQLMAIMEHAYYASFGYQITSFFAASSRYGTPEELQELVDTAHSMGIIVLLDVVHSHASKNSADGLNMFDGTDSCYFHSGPRGTHDLWDSRLFAYSSWEILRFLLSNIRWWLEEYRFDGFRFDGVTSMLYHHHGVGQGFSGDYSEYFGLQVDEDALTYLMLANHLVHTLCPDSITIAEDVSGMPALCSPISQGGGGFDYRLAMAIPDKWIQLLKEFKDEDWNMGDIVYTLTNRRYLEKCIAYAESHDQALVGDKSLAFWLMDAEMYTNMSVLTPFTPVIDRGIQLHKMIRLITHGLGGEGYLNFMGNEFGHPEWLDFPRKGNNESYHYARRQFHLTDDDLLRYKFLNNFDRDMNRLEERYGWLAAPQAYVSEKHEGNKIIAFERAGLLFIFNFHPSKSYTDYRVGTALPGKFKIVLDSDAAEYGGHQRLDHSTDFFSEAFEHNGRPYSLLVYIPSRVALILQNVDLPN

SEQ ID NO: 13668 - protein, 123 aa, Homo sapiens
MPVPWFLLSLALGRSPVVLSLERLVGPQDATHCSPGLSCRLWDSDILCLPGDIVPAPGPVLAPTHLQTELVLRCQKETDCDLCLRVAVHLAVHGLPYCPLRPAGGASACCPCAVWSVCGLCGI

SEQ ID NO: 13669 - protein, 1108 aa, Homo sapiens
MRSEGAAPGPAAPLCGALSLLLGALLGKVIEGHGVTDNIQRFSSLPPYLPVSYHILRAETSFFLKEANQDLLRNSSLQARVESFFTYKTRQPPVLNASYGPFSVEKVVPLDLMLTSNFLGPTNKFSFDWKLKAHILRDKVYLSRPKVQVLFHIMGRDWDDHGAGEKLPCLRVFAFRETREVRGSCRLKGDLGLCVAELELLSSWFSAPTVGAGRKKSMDQPEGTPVELYYTVHPGNERGDCAGGDFRKGNAIRPGKDGLEETTSHLQRIGTVGLYRAQDSAQLSELRLDGNVVIWLPSRPVKQGEVVTAYVTISSNSSVDLFILRAKVKKGVNILSAQTREPRQWGVKQEVGSGGKHVTATVACQRLGPSPRNRSSSLFNEVVQMNFEIASFSSLSGTQPITWQVEYPRKGTTDIAVSEIFVSQKDLVGIVPLAMDTEILNTAVLTGKTVAMPIKVVSVEENSAVMDISESVECKSTDEDVIKVSERCDYIFVNGKEIKGKMDAVVNFTYQYLSAPLCVTVWVPRLPLQIEVSDTELSQIKGWRVPIVTNKRPTRESEDEDEEERRGRGCALQYQHATVRVLTQFVSEGAGPWGQPNYLLSPNWQFDITHLVADFMKLEEPHVATLQDSRVLVGREVGMTTIQVLSPLSDSILAEKTITVLDDKVSVTDLAIQLVAGLSVALYPNAENSKAVTAVVTAEEVLRTPKQEAVFSTWLQFSDGSVTPLDIYDTKDFSLAATSQDEAVVSVPQPRSPRWPVVVAEGEGQGPLIRVDMTIAEACQKSKRKSILAVGVGNVRVKFGQNDADSSPGGDYEEDEIKNHASDRRQKGQHHERTGQDGHLYGSSPVEREEGALRRATTTARSLLDNKVVKNSRADGGRLAGEGQLQNIPIDFTNFPAHVDLPKAGSGLEENDLVQTPRGLSDLEIGMYALLGVFCLAILVFLINCATFALKYRHKQVPLEGQASMTHSHDWVWLGNEAELLESMGDAPPPQDEHTTIIDRGPGACEESNHLLLNGGSHKHVQSQIHRSADSGGRQGREQKQDPLHSPTSKRKKVKFTTFTTIPPDDSCPTVNSIVSSNDEDIKWVCQDVAVGAPKELRNYLEKLKDKA

SEQ ID NO: 13670 - protein, 99 aa, Homo sapiens
MFSKMATYLTGELTATSEDYKLLENMNKLTSLKYLEMKDIAINISRNLKDLNQKYAGLQPYLDQINVIEEQVAALEQAAYKLDAYSKKLEAKYKKLEKR

SEQ ID NO: 13671 - protein, 208 aa, Homo sapiens
MASLSRPSLPSCLCSFLLLLLLQVSSSYAGQFRVIGPRHPIRALVGDEVELPCRISPGKNATGMEVGWYRPPFSRVVHLYRNGKDQDGDQAPEYRGRTELLKDAIGEGKVTLRIRNVRFSDEGGFTCFFRDHSYQEEAAMELKVEDPFYWVSPGVLVLLAVLPVLLLQITVGLIFLCLQYRLRGKLRAEIENLHRTFGQFLEELRNPF

SEQ ID NO: 13672 - protein, 116 aa, Homo sapiens
MRGNLALVGVLISLAFLSLLPSGHPQPAGDDACSVQILVPGLKGDAGEKGDKGAPGRPGRVGPTGEKGDMGDKGQKGSVGRHGKIGPIGSKGEKGDSGDIGPPGPNGEPAPSAPQR

SEQ ID NO: 13673 - protein, 847 aa, Homo sapiens
GKGHRMTPACPLLLSVILSLRLATAFDPAPSACSALASGVLYGAFSLQDLFPTIASGCSWTLENPDPTKYSLYLRFNRQEQVCAHFAPRLLPLDHYLVNFTCLRPSPEEAVAQAESEVGRPEEEEAEAAAGLELCSGSGPFTFLHFDKNFVQLCLSAEPSEAPRLLAPAALAFRFVEVLLINNNNSSQFTCGVLCRWSEECGRAAGRACGFAQPGCSCPGEAGAGSTTTTSPGPPAAHTLSNALVPGGPAPPAEADLHSGSSNDLFTTEMRYGEEPEEEPKVKTQWPRSADEPGLYMAQTGDPAAEEWSPWSVCSLTCGQGLQVRTRSCVSSPYGTLCSGPLRETRPCNNSATCPVEGQWLEWGPWGPCSTSCANGTQQRSRKCSVAGPAWATCTGALTDTRECSNLECPATDSKWGPWNAWSLCSKTCDTGWQRRFRMCQATGTQGYPCEGTGEEVKPCSEKRCPAFHEMCRDEYVMLMTWKKAAAGEIIYNKCPPNASGSASRRCLLSAQGVAYWGLPSFARCISHEYRYLYLSLREHLAKGQRMLAGEGMSQVVRSLQELLARRTYYSGDLLFSVDILRNVTDTFKRATYVPSADDVQRFFQVVSFMVDAENKEKWDDAQQVSPGSVHLLRVVEDFIHLVGDALKAFQSSLIVTDNLVISIQREPVSAVSSDITFPMRGRRGMKDWVRHSEDRLFLPKEVLSLSSPGKPATSGAAGSPGRGRGPGTVPPGPGHSHQRLLPADPDESSYFVIGAVLYRTLGLILPPPRPPLAVTSRVMTVTVRPPTQPPAEPLITVELSYIINGTTDPHCASWDYSRADASSGDWDTENCQTLETQAAHTRCQCQ

SEQ ID NO: 13674 - protein, 414 aa, Homo sapiens
MSGLDGGNKLPLAQTGGLAAPDHASGDPDRDQCQGLREETEATQVMANTGGGSLETVAEGGASQDPVDCGPALRVPVAGSRGGAATKAGQEDAPPSTKGLEAASAAEAADSSQKNGCQLGEPRGPAGQKALEACGAGGLGSQMIPGKKAKEVTTKKRAISAAVEKEGEAGAAMEEKKVVQKEKKVAGGVKEETRPRAPKINNCMDSLEAIDQELSNVNAQADRAFLQLERKFGRMRRLHMQRRSFIIQNIPGFWVTAFRNHPQLSPMISGQDEDMLRYMINLEVEELKHPRAGCKFKFIFQGNPYFRNEGLVKEYERRSSGRVVSLSTPIRWHRGQDPQAHIHRNREGNTIPSFFNWFSDHSLLEFDRIAEIIKGELWPNPLQYYLMGEGPRRGIRGPPRQPVESARSFRFQSG

SEQ ID NO: 13675 - protein, 340 aa, Homo sapiens
MLWFRGALGVWVWLAAASQPCKNSNAGRRGQHPRRPAGSCVQRLTMRNTSKELQGATHRYAPCDWYYHVPVKRSEKAVDAPPASQIPGLSNLGDSHSENLPGTRRYWIKETDSEYVKLAKQGGRPDLLKHFAPGTRKGSPVAYSLPDWYIHHSKPPTASQQEVRAVSMPDYMVHEEFNPDQANGSYASRRGPFDFDMKTVWQREAEELEKEKKKLRLPAIDSKYLSKAGTPLGPKNPAGSRLSFPPVPGQKNSSPTNFSKLISNGYKDEWLQQQQRADSDKRTPKTSRASVLSQSPRDLEGPQDAARLQDAEASEGPEDTPESSQSPEESVSASTPAELK

SEQ ID NO: 13676 - protein, 764 aa, Homo sapiens
MKAPAVLAPGILVLLFTLVQRSNGECKEALAKSEMNVNMKYQLPNFTAETPIQNVILHEHHIFLGATNYIYVLNEEDLQKVAEYKTGPVLEHPDCFPCQDCSSKANLSGGVWKDNINMALVVDTYYDDQLISCGSVNRGTCQRHVFPHNHTADIQSEVHCIFSPQIEEPSQCPDCVVSALGAKVLSSVKDRFINFFVGNTINSSYFPDHPLHSISVRRLKETKDGFMFLTDQSYIDVLPEFRDSYPIKYVHAFESNNFIYFLTVQRETLDAQTFHTRIIRFCSINSGLHSYMEMPLECILTEKRKKRSTKKEVFNILQAAYVSKPGAQLARQIGASLNDDILFGVFAQSKPDSAEPMDRSAMCAFPIKYVNDFFNKIVNKNNVRCLQHFYGPNHEHCFNRTLLRNSSGCEARRDEYRTEFTTALQRVDLFMGQFSEVLLTSISTFIKGDLTIANLGTSEGRFMQVVVSRSGPSTPHVNFLLDSHPVSPEVIVEHTLNQNGYTLVITGKKITKIPLNGLGCRHFQSCSQCLSAPPFVQCGWCHDKCVRSEECLSGTWTQQICLPAIYKVFPNSAPLEGGTRLTICGWDFGFRRNNKFDLKKTRVLLGNESCTLTLSESTMNTLKCTVGPAMNKHFNMSIIISNGHGTTQYSTFSYVDPVITSISPKYGPMAGGTLLTLTGNYLNSGNSRHISIGGKTCTLKSVSNSILECYTPAQTISTEFAVKLKIDLANRETSIFSYREDPIVYEIHPTKSFIRHVNIALIQR

SEQ ID NO: 13677 - protein, 837 aa, Homo sapiens
MARGERRRRAVPAEGVRTAERAARGGPGRRDGRGGGPRSTAGGVALAVVVLSLALGMSGRWVLAWYRARRAVTLHSAPPVLPADSSSPAVAPDLFWGTYRPHVYFGMKTRSPKPLLTGLMWAQQGTTPGTPKLRHTCEQGDGVGPYGWEFHDGLSFGRQHIQDGALRLTTEFVKRPGGQHGGDWSWRVTVEPQDSGTSALPLVSLFFYVVTDGKEVLLPEVGAKGQLKFISGHTSELGDFRFTLLPPTSPGDTAPKYGSYNVFWTSNPGLPLLTEMVKSRLNSWFQHRPPGAPPERYLGLPGSLKWEDRGPSGQGQGQFLIQQVTLKIPISIEFVFESGSAQAGGNQALPRLAGSLLTQALESHAEGFRERFEKTFQLKEKGLSSGEQVLGQAALSGLLGGIGYFYGQGLVLPDIGVEGSEQKVDPALFPPVPLFTAVPSRSFFPRGFLWDEGFHQLVVQRWDPSLTREALGHWLGLLNADGWIGREQILGDEARARVPPEFLVQRAVHANPPTLLLPVAHMLEVGDPDDLAFLRKALPRLHAWFSWLHQSQAGPLPLSYRWRGRDPALPTLLNPKTLPSGLDDYPRASHPSVTERHLDLRCWVALGARVLTRLAEHLGEAEVAAELGPLAASLEAAESLDELHWAPELGVFADFGNHTKAVQLKPRPPQGLVRVVGRPQPQLQYVDALGYVSLFPLLLRLLDPTSSRLGPLLDILADSRHLWSPFGLRSLAASSSFYGQRNSEHDPPYWRGAVWLNVNYLALGALHHYGHLEGPHQARAAKLHGELRANVVGNVWRQYQATGFLWEQYSDRDGRGMGCRPFHGWTSLVLLAMAEDY

SEQ ID NO: 13678 - protein, 173 aa, Homo sapiens
MESWWGLPCLAFLCFLMHARDIYPKPKPPYYPQPENPDSGGNIYPRPKPRPQPQPGNSGNSGGYFNDVDRDDGRYPPRPRPRPPAGGGGGGYSSYGNSDNTHGRGGYRLNSRYGNTYGGDHHSTYGNPEGNMVAKIVSPIVSVVVVTLLGAAASYFKLNNRRNCFRTHEPENV

SEQ ID NO: 13679 - protein, 756 aa, Homo sapiens
MVVTRSARAKASIQAASAESSGQKSFAANGIQAHPESSTGSDARTTAESQTTGKQSLIPRTPKARKRKSRTTGSLPKGTEPSTDGETSEAESNYSVSEHHDTILRVTRRRQILIACSPVSSVRKKPKVTPTKESYTEEIVSEAESHVSGISRIVLPTEKTTGARRSKAKSLTDPSQESHTEAISDAETSSSDISFSGIATRRTRSMQRKLKAQTEKKDSKIVPGNEKQIVGTPVNSEDSDTRQTSHLQARSLSEINKPNFYNNDFDDDFSHRSSENILTVHEQANVESLKETKQNCKDLDEDANGITDEGKEINEKSSQLKNLSELQDTSLQQLVSQRHSTPQNKNAVSVHSNLNSEAVMKSLTQTFATVEVGRWNNNKKSPIKASDLTKFGDCGGSDDEEESTVISVSEDMNSEGNVDFECDTKLYTSAPNTSQGKDNSVLLVLSSDESQQSENSENEEDTLCFVENSGQRESLSGDTGSLSCDNALFVIDTTPGMSADKNFYLEEEDKASEVAIEEEKEEEEDEKSEEDSSDHDENEDEFSDEEDFLNSTKAKLLKLTSSSIDPGLSIKQLGGLYINFNADKLQSNKRTLTQIKEKKKNELLQKAVITPDFEKNHCVPPYSESKYQLQKKRRKERQKTAGDGWFGMKAPEMTNELKNDLKALKMRASMDPKRFYKKNDRDGFPKYFQIGTIVDNPADFYHSRIPKKQRKRTIVEELLADSEFRRYNRRKYSEIMAEKAANAAGKKFRKKKKFRN

SEQ ID NO: 13680 - protein, 101 aa, Homo sapiens
MAPWPPKGLVPAMLWGLSLFLNLPGPIWLQPSPPPQSSPPPQPHPCHTCRGLVDSFNKGLERTIRDNFGGGNTAWEEENLSKYKDSLSWGNREALRWLRAV

SEQ ID NO: 13681 - protein, 213 aa, Homo sapiens
MTESRSVTQAGVHWRNLGSLQPLPLRFKQFSCLSLLSSWDYREKKWVTVGDTSLRIFKWVPVTDSKEKEKSKSNSSAAREPNGFPSDASANSSLLLEFQDENSNQSSVSDVYQLKVDSSTNSSPSPQQSESLSPAHTSDFRTDDSQPPTLGQEILEEPSLPSSEVADEPPTLTKEEPVPLETQVVEEEEDSGAPPLKRFCVDQPTVPQTASES

SEQ ID NO: 13682 - protein, 214 aa, Homo sapiens
MAGLTAAAPRPGVLLLLLSILHPSRPGGVPGAIPGGVPGGVFYPGAGLGALGGGALGPGGKPLKPVPGGLAGAGLGAGLGAFPAVTFPGALVPGGVADAAAAYKAAKAGAGLGGVPGVGGLGVSAGAVVPQPGAGVKPGKVPGVGLPGVYPGGVLPGVGPFGGPQPGVPLGYPIKAPKLPGGYGLPYTTGKLPYGYGPGGVAGAAGKAGYPTGT

SEQ ID NO: 13683 - protein, 766 aa, Homo sapiens
MSVQSSSGSLEGPPSWSQLSTSPTPGSAAAARSLLNHTPPSGRPREGAMDELHSLDPRRQELLEARFTGVASGSTGSTGSCSVGAKASTNNESSNHSFGSLGSLSDKESETPEKKQSESSRGRKRKAENQNESSQGKSIGGRGHKISDYFEYQGGNGSSPVRGIPPAIRSPQNSHSHSTPSSSVRPNSPSPTALAFGDHPIVQPKQLSFKIIQTDLTMLKLAALESNKIQDLEKKEGRIDDLLRANCDLRRQIDEQQKLLEKYKERLNKCISMSKKLLIEKSTQEKLSSREKSMQDRLRLGHFTTVRHGASFTEQWTDGFAFQNLVKQQEWVNQQREDIERQRKLLAKRKPPTANNSQAPSTNSEPKQRKNKAVNGAENDPFVRPNLPQLLTLAEYHEQEEIFKLRLGHLKKEEAEIQAELERLERVRNLHIRELKRINNEDNSQFKDHPTLNERYLLLHLLGRGGFSEVYKAFDLYEQRYAAVKIHQLNKSWRDEKKENYHKHACREYRIHKELDHPRIVKLYDYFSLDTDTFCTVLEYCEGNDLDFYLKQHKLMSEKEARSIVMQIVNALRYLNEIKPPIIHYDLKPGNILLVDGTACGEIKITDFGLSKIMDDDSYGVDGMDLTSQGAGTYWYLPPECFVVGKEPPKISNKVDVWSVGVIFFQCLYGRKPFGHNQSQQDILQENTILKATEVQFPVKPVVSSEAKAFIRRCLAYRKEDRFDVHQLANDPYLLPHMRRSNSSGNLHMAGLTASPTPPSSSIITY

SEQ ID NO: 13684 - protein, 531 aa, Homo sapiens
MDYTVSMFLNTLTPKFYVALTGTSSLISGLILIFEWWYFRKYGTSFIEQVSVSHLRPLLGGVDNNSSNNSNSSNGDSDSNRQSVSECKVWRNPLNLFRGAEYNRYTWVTGREPLTYYDMNLSAQDHQTFFTCDSDHLRPADAIMQKAWRERNPQARISAAHEALEINEIRSRVEVPLIASSTIWEIKLLPKCATAYILLAEEEATTIAEAEKLFKQALKAGDGCYRRSQQLQHHGSQYEAQHRRDTNVLVYIKRRLAMCARRLGRTREAVKMMRDLMKEFPLLSMFNIHENLLEALLELQAYADVQAVLAKYDDISLPKSATICYTAALLKARAVSDKFSPEAASRRGLSTAEMNAVEAIHRAVEFNPHVPKYLLEMKSLILPPEHILKRGDSEAIAYAFFHLAHWKRVEGALNLLHCTWEGTFRMIPYPLEKGHLFYPYPICTETADRELLPSFHEVSVYPKKELPFFILFTAGLCSFTAMLALLTHQFPELMGVFAKAFLSTLFAPLNFVMEKVESILPSSLWHQLTRI

SEQ ID NO: 13685 - protein, 616 aa, Homo sapiens
MLQTVWFQGLGRNLLFQEPVTFEDVAVYFTQNEWASLHPTQRALYREVMLENYANVTSLYPTAGGFPLDTERTEKVPGALSSFLPSSSSLELILALLPMSAFPFPKPDLIFQLEQGEAAWGPDPWTLAGGEALRGMCTGGKTKTENEEKTAQLNISKESESHRLIVEGLLMDVPQHPDFKDRLEKSQLHDTGNKTKIGDCTDLTVQDHESSTTEREEIARKLEESSVSTHLITKQGFAKEQVFYKCGECGSYYNPHSDFHLHQRVHTNEKPYTCKECGKTFRYNSKLSRHQKIHTGEKPYSCEECGQAFSQNSHLLQHQKLHGGQRPYECTDCGKTFSYNSKLIRHQRIHTGEKPFKCKECGKAFSCSYDCIIHERIHNGEKPYECKECGKSLSSNSVLIQHQRIHTGEKPYECKECGKAFHRSSVFLQHQRFHTGEQLYKCNECWKTFSCSSRFIVHQRIHNGEKPYECQECGKTFSQKITLVQHQRVHTGEKPYECKECGKAFRWNASFIQHQKWHTRKKLINGTGLSAVKPYCPCAILSPLPPQHTCSALAPPGPPLSSSHAVVLPPSVPFFLLLPSSEKANPSPVQIAHFFQDLAFPGKSSLQSPNPLSHSL

SEQ ID NO: 13686 - protein, 617 aa, Homo sapiens
MEQLSDEEIDHGAEEDSDKEDQDLDKMFGAWLGELDKLTQSLDSDKPMEPVKRSPLRQETNMANFSYRFSIYNLNEALNQGETVDLDALMADLCSIEQELSSIGSGNSKRQITETKATQKLPVSRHTLKHGTLKGLSSSSNRIAKPSHASYSLDDVTAQLEQASLSMDEAAQQSVLEDTKPLVTNQHRRTASAGTVSDAEVHSISNSSHSSITSAASSMDSLDIDKVTRPQELDLTHQGQPITEHSYLDRETSLLLRNIAGKPSHLLTKEEQAAKLKAEKIRVALEKIKEAQVKKLVIRVHMSDDSSKTMMVDERQTVRQVLDNLMDKSHCGYSLDWSLVETVSELQMERIFEDHENLVENLLNWTRDSQNKLIFMERIEKYALFKNPQNYLLGKKETAEMADRNKEVLLEECFCGSSVTVPEIEGVLWLKDDGKKSWKKRYFLLRASGIYYVPKGKAKVSRDLVCFLQLDHVNVYYGQDYRNKYKAPTDYCLVLKHPQIQKKSQYIKYLCCDDVRTLHQWVNGIRIAKYGKQLYMNYQEALKRTESAYDWTSLSSSSIKSGSSSSSIPESQSNHSNQSDSGVSDTQPAGHVRSQSIVSSVFSEAWKRGTQLEESSK

SEQ ID NO: 13687 - protein, 104 aa, Homo sapiens
MAWQMMQLLLLALVTAAGSAQPRSARARTDLLNVCMNAKHHKTQPSPEDELYGQCSPWKKNACCTASTSQELHKDTSRLYNFNWDHCGKMEPTCKRHFIQDSCL

SEQ ID NO: 13688 - protein, 405 aa, Homo sapiens
MGSPAHRPALLLLLPPLLLLLLLRVPPSRSFPGSGDSPLEDDEVGYSHPRYKDTPWCSPIKVKYGDVYCRAPQGGYYKTALGTRCDIRCQKGYELHGSSLLICQSNKRWSDKVICKHMEPPRIKCPSVKERIAEPNKLTVRVSWETPEGRDTADGILTDVILKGLPPGSNFPEGDHKIQYTVYDRAENKGTCKFRVKVRVKRCGKLNAPENGYMKCSSDGDNYGATCEFSCIGGYELQGSPARVCQSNLAWSGTEPTCAAMNVNVGVRTAAALLDQFYEKRRLLIVSTPTARNLLYRLQLGMLQQAQCGLDLRHITVVELVGVFPTLIGRIGAKIMPPALALQLRLLLRIPLYSFSMVLVDKHGMDKERYVSLVMPVALFNLIDTFPLRKEEMVLQAEMSQTCNT

SEQ ID NO: 13689 - protein, 342 aa, Homo sapiens
MGLGLLLPLLLLWTRGTQGSELDPKGQHVCVASSPSAELQCCAGWRQKDQECTIPICEGPDACQKDEVCVKPGLCRCKPGFFGAHCSSRCPGQYWGPDCRESCPCHPHGQCEPATGACQCQADRWGARCEFPCACGPHGRCDPATGVCHCEPGWWSSTCRRPCQCNTAAARCEQATGACVCKPGWWGRRCSFRCNCHGSPCEQDSGRCACRPGWWGPECQQQCECVRGRCSAASGECTCPPGFRGARCELPCPAGSHGVQCAHSCGRCKHNEPCSPDTGSCESCEPGWNGTQCQQPCLPGTFGESCEQQCPHCRHGEACEPDTGHCQRCDPGWLGPRGPVIL

SEQ ID NO: 13690 - protein, 182 aa, Homo sapiens
MMKEALEKLQLNIVEMKDENATLDGGDVLFTGREFFVGLSKRTNQRGAEILADTFKDYAVSTVPVADGLHLKSFCSMAGPNLIAIGSSESAQKALKIMQQMSDHRYDKLTVPDDIAANCIYLNIPNKGHVLLHRTPEEYPESAKVYEKLKDHMLIPVSMSELEKVDGLLTCCSVLINKKVDS

SEQ ID NO: 13691 - protein, 1266 aa, Homo sapiens
MWVNPEEVLLANALWITERANPYFILQRRKGHAGDGGGGGGLAGLLVGTLDVVLDSSARVAPYRILYQTPDSLVYWTIACGGSRKEITEHWEWLEQNLLQTLSIFENENDITTFVRGKIQGIIAEYNKINDVKEDDDTEKFKEAIVKFHRLFGMPEEEKLVNYYSCSYWKGKVPRQGWMYLSINHLCFYSFLMGREAKLVIRWVDITQLEKNATLLLPDVIKVSTRSSEHFFSVFLNINETFKLMEQLANIAMRQLLDNEGFEQDRSLPKLKRKSPKKVSALKRDLDARAKSERYRALFRLPKDEKLDGHTDCTLWTPFNKMHILGQMFVSTNYICFTSKEENLCSLIIPLREVTIVEKADSSSVLPSPLSISTRNRMTFLFANLKDRDFLVQRISDFLQQTTSKIYSDKEFAGSYNSSDDEVYSRPSSLVSSSPQRSTSSDADGERQFNLNGNSVPTATQTLMTMYRRRSPEEFNPKLAKEFLKEQAWKIHFAEYGQGICMYRTEKTRELVLKGIPESMRGELWLLLSGAINEKATHPGYYEDLVEKSMGKYNLATEEIERDLHRSLPEHPAFQNEMGIAALRRVLTAYAFRNPNIGYCQAMNIVTSVLLLYAKEEEAFWLLVALCERMLPDYYNTRVVGALVDQGVFEELARDYVPQLYDCMQDLGVISTISLSWFLTLFLSVMPFESAVVVVDCFFYEGIKVIFQLALAVLDANVDKLLNCKDDGEAMTVLGRYLDSVTNKDSTLPPIPHLHSLLSDDVEPYPEVDIFRLIRTSYEKFGTIRADLIEQMRFKQRLKVIQTLEDTTKRNVVRTIVTETSFTIDELEELYALFKAEHLTSCYWGGSSNALDRHDPSLPYLEQYRIDFEQFKGMFALLFPWACGTHSDVLASRLFQLLDENGDSLINFREFVSGLSAACHGDLTEKLKLLYKMHVLPEPSSDQDEPDSAFEATQYFFEDITPECTHVVGLDSRSKQGADDGFVTVSLKPDKGKRANSQENRNYLRLWTPENKSKSKNAKDLPKLNQGQFIELCKTMYNMFSEDPNEQELYHATAAVTSLLLEIGEVGKLFVAQPAKEGGSGGSGPSCHQGIPGVLFPKKGPGQPYVVESVEPLPASLAPDSEEHSLGGQMEDIKLEDSSPRDNGACSSMLISDDDTKDDSSMSSYSVLSAGSHEEDKLHCEDIGEDTVLVRSGQGTAALPRSTSLDRDWAITFEQFLASLLTEPALVKYFDKPVCMMARITSAKNIRMMGKPLTSASDYEISAMSG

SEQ ID NO: 13692 - protein, 247 aa, Homo sapiens
MAKVAKDLNPGVKKMSLGQLQSARGVACLGCKGTCSGFEPHSWRKICKSCKCSQEDHCLTSDLEDDRKIGRLLMDSKYSTLTARVKGGDGIRIYKRNRMIMTNPIATGKDPTFDTITYEWAPPGVTQKLGLQYMELIPKEKQPVTGTEGAFYRRRQLMHQLPIYDQDPSRCRGLLENELKLMEEFVKQYKSEALGVGEVALPGQGGLPKEEGKQQEKPEGAETTAATTNGSLSDPSKEVEYKPVPLV

SEQ ID NO: 13693 - protein, 175 aa, Homo sapiens
MWQLTSLLLFVATWGISGTPAPLDSVFSSSERAHQVLRIRKRANSFLEELRHSSLERECIEEICDFEEAKEIFQNVDDTLAFWSKHVDGDQCLVLPLEHPCASLCCGHGTCIDGIGSFSCDCRSGWEGRFCQREEVGWRRCSCAPGYKLGDDLLQCHPAVKFPCGRPWKRMEKKR

SEQ ID NO: 13694 - protein, 305 aa, Homo sapiens
MERLVARGTFPVLVRTSACRSLFGPVDHEELSRELQARLAELNAEDQNRWDYDFQQDMPLRGPGRLQWTEVDSDSVPAFYRETVQVGRCRLLLAPRPVAVAVAVSPPLEPAAESLDGLEEAPEQLPSVPVPAPASTPPPVPVLAPAPAPAPAPVAAPVAAPVAVAVLAPAPAPAPAPAPAPAPVAAPAPAPAPAPAPAPAPAPAPDAAPQESAEQGANQGQRGQEPLADQLHSGISGRPAAGTAAASANGAAIKKLSGPLISDFFAKRKRSAPEKSSGDVPAPCPSPSAAPGVGSVEQTPRKRLR

SEQ ID NO: 13695 - protein, 144 aa, Homo sapiens
MARGSAVAWAALGPLLWGCALGLQGGMLYPQESPSRECKELDGLWSFRADFSDNRRRGFEEQWYRRPLWESGPTVDMPVPSSFNDISQDWRLRHFVGWVWYEREVILPERWTQDLRTRVVLRIGSAHSYAIVVSQGLLCPEHIF

SEQ ID NO: 13696 - protein, 689 aa, Homo sapiens
MIDSVKLRRDSAADFFSHYEYLCALQNSVPLPAVRACLREGVLDFNADRLRGVDWAPLLSTLKINKDLPLVSIKSFFQPWLGDTGSDMNKFCRSRVPAIRYKDVTFQLCKALKGCLSISSVLKNLELNGLILRERDLTILAKGLNKSASLVHLSLANCPIGDGGLEIICQGIKSSITLKTVNFTGCNLTWQGADHMAKILKYQTMRRHEETWAESLRYRRPDLDCMAGLRRITLNCNTLIGDLGACAFADSLSEDLWLRALDLQQCGLTNEGAKALLEALETNTTLVVLDIRKNPLIDHSMMKAVIKKVLQNGRSAKSEYQWITSPSVKEPSKTAKQKRRTIILGSGHKGKATIRIGLATKKPVSSGRKHSLGKEYYAPAPLPPGVSGFLPWRTAERAKRHRGFPLIKTRDICNQLQQPGFPVTVTVESPSSSEVEEVDDSSESVHEVPEKTSIEQEALQEKLEECLKQLKEERVIRLKVDKRVSELEHENAQLRNINFSLSEALHAQSLTNMILDDEGVLGSIENSFQKFHAFLDLLKDAGLGQLATMAGIDQSDFQLLGHPQMTSTVSNPPKEEKKALEDEKPEPKQNALGQMQNIQFQKITGDARIPLPLDSFPVPVSTPEGLGTSSNNLGVPATEQRQESFEGFIARMCSPSPDATSGTGSQRKEEELSRNSRSSSEKKTKTESH

SEQ ID NO: 13697 - protein, 216 aa, Homo sapiens
MLPQIPFLLLVSLNLVHGVFYAERYQMPTGIKGPLPNTKTQFFIPYTIKSKGIAVRGEQGTPGPPGPAGPRGHPGPSGPPGKPGYGSPGLQGEPGLPGPPGPSAVGKPGVPGLPGKPGERGPYGPKGDVGPAGLPGPRGPPGPPGIPGPAGISVPGKPGQQGPTGAPGPRGFPGEKGAPGVPGMNGQKGEMGYGAPGRPGERGLPGPQGPTGPSGP

SEQ ID NO: 13698 - protein, 262 aa, Homo sapiens
MAVFVVLLALVAGVLGNEFSILKSPGSVVFRNGNWPIPGERIPDVAALSMGFSVKEDLSWPGLAVGNLFHRPRATVMVMVKGVNKLALPPGSVISYPLENAVPFSLDSVANSIHSLFSEETPVVLQLAPSEERVYMVGKANSVFEDLSVTLRQLRNRLFQENSVLSSLPLNSLSRNNEVDLLFLSELQVLHDISSLLSRHKHLAKDHSPDLYSLELAGLDEIGKRYGEDSEQFRDASKILVDALQKSLWWECSGRVSHCQVI

SEQ ID NO: 13699 - protein, 1216 aa, Homo sapiens
MPLSSHLLPALVLFLAGSSGWAWVPNHCRSPGQAVCNFVCDCRDCSDEAQCGYHGASPTLGAPFACDFEQDPCGWRDISTSGYSWLRDRAGAALEGPGPHSDHTLGTDLGWYMAVGTHRGKEASTAALRSPTLREAASSCKLRLWYHAASGDVAELRVELTHGAETLTLWQSTGPWGPGWQELAVTTGRIRGDFRVTFSATRNATHRGAVALDDLEFWDCGLPTPQANCPPGHHHCQNKVCVEPQQLCDGEDNCGDLSDENPLTCGRHIATDFETGLGPWNRSEGWSRNHRAGGPERPSWPRRDHSRNSAQGSFLVSVAEPGTPAILSSPEFQASGTSNCSLVFYQYLSGSEAGCLQLFLQTLGPGAPRAPVLLRRRRGELGTAWVRDRVDIQSAYPFQILLAGQTGPGGVVGLDDLILSDHCRPVSEVSTLQPLPPGPRAPAPQPLPPSSRLQDSCKQGHLACGDLCVPPEQLCDFEEQCAGGEDEQACGTTDFESPEAGGWEDASVGRLQWRRVSAQESQGSSAAAAGHFLSLQRAWGQLGAEARVLTPLLGPSGPSCELHLAYYLQSQPRGFLALVVVDNGSRELAWQALSSSAGIWKVDKVLLGARRRPFRLEFVGLVDLDGPDQQGAGVDNVTLRDCSPTVTTERDREVSCNFERDTCSWYPGHLSDTHWRWVESRGPDHDHTTGQGHFVLLDPTDPLAWGHSAHLLSRPQVPAAPTECLSFWYHLHGPQIGTLRLAMRREGEETHLWSRSGTQGNRWHEAWATLSHQPGSHAQYQLLFEGLRDGYHGTMALDDVAVRPGPCWAPNYCSFEDSDCGFSPGGQGLWRRQANASGHAAWGPPTDHTTETAQGHYMVVDTSPDALPRGQTASLTSKEHRPLAQPACLTFWYHGSLRSPGTLRVYLEERGRHQVLSLSAHGGLAWRLGSMDVQAERAWRVVFEAVAAGVAHSYVALDDLLLQDGPCPQPGSCDFESGLCGWSHLAWPGLGGYSWDWGGGATPSRYPQPPVDHTLGTEAGHFAFFETGVLGPGGRAAWLRSEPLPATPASCLRFWYHMGFPEHFYKGELKVLLHSAQGQLAVWGAGGHRRHQWLEAQVEVASAKEFQIVFEATLGGQPALGPIALDDVEYLAGQHCQQPAPSPGNTAAPGSVPAVVGSALLLLMLLVLLGLGGRRWLQKKGSCPFQSNTEATAPGFDNILFNADGVTLPASVTSDP

SEQ ID NO: 13700 - protein, 1306 aa, Homo sapiens
MTMYLWLKLLAFGFAFLDTEVFVTGQSPTPSPTGLTTAKMPSVPLSSDPLPTHTTAFSPASTFERENDFSETTTSLSPDNTSTQVSPDSLDNASAFNTTGVSSVQTPHLPTHADSQTPSAGTDTQTFSGSAANAKLNPTPGSNAISDVPGERSTASTFPTDPVSPLTTTLSLAHHSSAALPARTSNTTITANTSDAYLNASETTTLSPSGSAVISTTTIATTPSKPTCDEKYANITVDYLYNKETKLFTAKLNVNENVECGNNTCTNNEVHNLTECKNASVSISHNSCTAPDKTLILDVPPGVEKFQLHDCTQVEKADTTICLKWKNIETFTCDTQNITYRFQCGNMIFDNKEIKLENLEPEHEYKCDSEILYNNHKFTNASKIIKTDFGSPGEPQIIFCRSEAAHQGVITWNPPQRSFHNFTLCYIKETEKDCLNLDKNLIKYDLQNLKPYTKYVLSLHAYIIAKVQRNGSAAMCHFTTKSAPPSQVWNMTVSMTSDNSMHVKCRPPRDRNGPHERYHLEVEAGNTLVRNESHKNCDFRVKDLQYSTDYTFKAYFHNGDYPGEPFILHHSTSYNSKALIAFLAFLIIVTSIALLVVLYKIYDLHKKRSCNLDEQQELVERDDEKQLMNVEPIHADILLETYKRKIADEGRLFLAEFQSIPRVFSKFPIKEARKPFNQNKNRYVDILPYDYNRVELSEINGDAGSNYINASYIDGFKEPRKYIAAQGPRDETVDDFWRMIWEQKATVIVMVTRCEEGNRNKCAEYWPSMEEGTRAFGDVVVKINQHKRCPDYIIQKLNIVNKKEKATGREVTHIQFTSWPDHGVPEDPHLLLKLRRRVNAFSNFFSGPIVVHCSAGVGRTGTYIGIDAMLEGLEAENKVDVYGYVVKLRRQRCLMVQVEAQYILIHQALVEYNQFGETEVNLSELHPYLHNMKKRDPPSEPSPLEAEFQRLPSYRSWRTQHIGNQEENKSKNRNSNVIPYDYNRVPLKHELEMSKESEHDSDESSDDDSDSEEPSKYINASFIMSYWKPEVMIAAQGPLKETIGDFWQMIFQRKVKVIVMLTELKHGDQEICAQYWGEGKQTYGDIEVDLKDTDKSSTYTLRVFELRHSKRKDSRTVYQYQYTNWSVEQLPAEPKELISMIQVVKQKLPQKNSSEGNKHHKSTPLLIHCRDGSQQTGIFCALLNLLESAETEEVVDIFQVVKALRKARPGMVSTFEQYQFLYDVIASTYPAQNGQVKKNNHQEDKIEFDNEVDKVKQDANCVNPLGAPEKLPEAKEQAEGSEPTSGTEGPEHSVNGPASPALNQGS

SEQ ID NO: 13701 - protein, 753 aa, Homo sapiens
MSTRTPLPTVNERDTENHTSHGDGRQEVTSRTSRSGARCRNSIASCADEQPHIGNYRLLKTIGKGNFAKVKLARHILTGREVAIKIIDKTQLNPTSLQKLFREVRIMKILNHPNIVKLFEVIETEKTLYLIMEYASGGEVFDYLVAHGRMKEKEARSKFRQIVSAVQYCHQKRIVHRDLKAENLLLDADMNIKIADFGFSNEFTVGGKLDTFCGSPPYAAPELFQGKKYDGPEVDVWSLGVILYTLVSGSLPFDGQNLKELRERVLRGKYRIPFYMSTDCENLLKRFLVLNPIKRGTLEQIMKDRWINAGHEEDELKPFVEPELDISDQKRIDIMVGMGYSQEEIQESLSKMKYDEITATYLLLGRKSSELDASDSSSSSNLSLAKVRPSSDLNNSTGQSPHHKVQRSVSSSQKQRRYSDHAGPAIPSVVAYPKRSQTSTADSDLKEDGISSRKSSGSAVGGKGIAPASPMLGNASNPNKADIPERKKSSTVPSSNTASGGMTRRNTYVCSERTTADRHSVIQNGKENSTIPDQRTPVASTHSISSAATPDRIRFPRGTASRSTFHGQPRERRTATYNGPPASPSLSHEATPLSQTRSRGSTNLFSKLTSKLTRRNMSFRFIKRLPTEYERNGRYEGSSRNVSAEQKDENKEAKPRSLRFTWSMKTTSSMDPGDMMREIRKVLDANNCDYEQRERFLLFCVHGDGHAENLVQWEMEVCKLPRLSLNGVRFKRISGTSIAFKNIASKIANELKL

SEQ ID NO: 13702 - protein, 1928 aa, Homo sapiens
MGAMTQLLAGVFLAFLALATEGGVLKKVIRHKRQSGVNATLPEENQPVVFNHVYNIKLPVGSQCSVDLESASGEKDLAPPSEPSESFQEHTVDGENQIVFTHRINIPRRACGCAAAPDVKELLSRLEELENLVSSLREQCTAGAGCCLQPATGRLDTRPFCSGRGNFSTEGCGCVCEPGWKGPNCSEPECPGNCHLRGRCIDGQCICDDGFTGEDCSQLACPSDCNDQGKCVNGVCICFEGYAGADCSREICPVPCSEEHGTCVDGLCVCHDGFAGDDCNKPLCLNNCYNRGRCVENECVCDEGFTGEDCSELICPNDCFDRGRCINGTCYCEEGFTGEDCGKPTCPHACHTQGRCEEGQCVCDEGFAGVDCSEKRCPADCHNRGRCVDGRCECDDGFTGADCGELKCPNGCSGHGRCVNGQCVCDEGYTGEDCSQLRCPNDCHSRGRCVEGKCVCEQGFKGYDCSDMSCPNDCHQHGRCVNGMCVCDDGYTGEDCRDRQCPRDCSNRGLCVDGQCVCEDGFTGPDCAELSCPNDCHGQGRCVNGQCVCHEGFMGKDCKEQRCPSDCHGQGRCVDGQCICHEGFTGLDCGQHSCPSDCNNLGQCVSGRCICNEGYSGEDCSEVSPPKDLVVTEVTEETVNLAWDNEMRVTEYLVVYTPTHEGGLEMQFRVPGDQTSTIIQELEPGVEYFIRVFAILENKKSIPVSARVATYLPAPEGLKFKSIKETSVEVEWDPLDIAFETWEIIFRNMNKEDEGEITKSLRRPETSYRQTGLAPGQEYEISLHIVKNNTRGPGLKRVTTTRLDAPSQIEVKDVTDTTALITWFKPLAEIDGIELTYGIKDVPGDRTTIDLTEDENQYSIGNLKPDTEYEVSLISRRGDMSSNPAKETFTTGLDAPRNLRRVSQTDNSITLEWRNGKAAIDSYRIKYAPISGGDHAEVDVPKSQQATTKTTLTGLRPGTEYGIGVSAVKEDKESNPATINAATELDTPKDLQVSETAETSLTLLWKTPLAKFDRYRLNYSLPTGQWVGVQLPRNTTSYVLRGLEPGQEYNVLLTAEKGRHKSKPARVKASTEQAPELENLTVTEVGWDGLRLNWTAADQAYEHFIIQVQEANKVEAARNLTVPGSLRAVDIPGLKAATPYTVSIYGVIQGYRTPVLSAEASTGETPNLGEVVVAEVGWDALKLNWTAPEGAYEYFFIQVQEADTVEAAQNLTVPGGLRSTDLPGLKAATHYTITIRGVTQDFSTTPLSVEVLTEEVPDMGNLTVTEVSWDALRLNWTTPDGTYDQFTIQVQEADQVEEAHNLTVPGSLRSMEIPGLRAGTPYTVTLHGEVRGHSTRPLAVEVVTEDLPQLGDLAVSEVGWDGLRLNWTAADNAYEHFVIQVQEVNKVEAAQNLTLPGSLRAVDIPGLEAATPYRVSIYGVIRGYRTPVLSAEASTAMGSPKEVIFSDITENSATVSWRAPTAQVESFRITYVPITGGTPSMVTVDGTKTQTRLVKLIPGVEYLVSIIAMKGFEESEPVSGSFTTALDGPSGLVTANITDSEALARWQPAIATVDSYVISYTGEKVPEITRTVSGNTVEYALTDLEPATEYTLRIFAEKGPQKSSTITAKFTTDLDSPRDLTATEVQSETALLTWRPPRASVTGYLLVYESVDGTVKEVIVGPDTTSYSLADLSPSTHYTAKIQALNGPLRSNMIQTIFTTIGLLYPFPKDCSQAMLNGDTTSGLYTIYLNGDKAEALEVFCDMTSDGGGWIVFLRRKNGRENFYQNWKAYAAGFGDRREEFWLGLDNLNKITAQGQYELRVDLRDHGETAFAVYDKFSVGDAKTRYKLKVEGYSGTAGDSMAYHNGRSFSTFDKDTDSAITNCALSYKGAFWYRNCHRVNLMGRYGDNNHSQGVNWFHWKGHEHSIQFAEMKLRPSNFRNLEGRRKRA

SEQ ID NO: 13703 - protein, 98 aa, Homo sapiens
MRKMNTLLLVSLSFLYLKEVMGLKCNTCIYTEGWKCMAGRGTCIAKENELCSTTAYFRGDKHMYSTHMCKYKCREEESSKRGLLRVTLCCDRNFCNVF

SEQ ID NO: 13704 - protein, 109 aa, Homo sapiens
MFLLMMGVLFCCGAGFFIRRRMYPPPLIEEPAFNVSYTRQPPNPGPGAQQPGPPYYTDPGGPGMNPVGNSMAMAFQVPPNSPQGSVACPPPPAYCNTPPPPYEQVVKAK

SEQ ID NO: 13705 - protein, 108 aa, Homo sapiens
MAVRASFENNCEIGCFAKLTNTYCLVAIGGSENFYSVFEGELSDTIPVVHASIAGCRIIGRMCVGDRRNSGRCAQGGSLQTDSGRPGASRKLLCLQQSGRAGASQDFN

SEQ ID NO: 13706 - protein, 709 aa, Homo sapiens
MATCAEILRSEFPEIDGQVFDYVTGVLHSGSADFESVDDLVEAVGELLQEVSGDSKDDAGIRAVCQRMYNTLRLAEPQSQGNSQVLLDAPIQLSKITENYDCGTKLPGLLKREQSSTVNAKKLEKAEARLKAKQEKRSEKDTLKTSNPLVLEEASASQAGSRKESRLESSGKNKSYDVRIENFDVSFGDRVLLAGADVNLAWGRRYGLVGRNGLGKTTLLKMLATRSLRVPAHISLLHVEQEVAGDDTPALQSVLESDSVREDLLRRERELTAQIAAGRAEGSEAAELAEIYAKLEEIEADKAPARASVILAGLGFTPKMQQQPTREFSGGWRMRLALARALFARPDLLLLDEPTNMLDVRAILWLENYLQTWPSTILVVSHDRNFLNAIATDIIHLHSQRLDGYRGDFETFIKSKQERLLNQQREYEAQQQYRQHIQVFIDRFRYNANRASQVQSKLKMLEKLPELKPVDKESEVVMKFPDGFEKFSPPILQLDEVDFYYDPKHVIFSRLSVSADLESRICVVGENGAGKSTMLKLLLGDLAPVRGIRHAHRNLKIGYFSQHHVEQLDLNVSAVELLARKFPGRPEEEYRHQLGRYGISGELAMRPLASLSGGQKSRVAFAQMTMPCPNFYILDEPTNHLDMETIEALGRALNNFRGGVILVSHDERFIRLVCRELWVCEGGGVTRVEGGFDQYRALLQEQFRREGFL

SEQ ID NO: 13707 - protein, 370 aa, Homo sapiens
MSASAVYVLDLKGKVLICRNYRGDVDMSEVEHFMPILMEKEEEGMLSPILAHGGVRFMWIKHNNLYLVATSKKNACVSLVFSFLYKVVQVFSEYFKELEEESIRDNFVIIYELLDELMDFGYPQTTDSKILQEYITQEGHKLETGAPRPPATVTNAVSWRSEGIKYRKNEVFLDVIESVNLLVSANGNVLRSEIVGSIKMRVFLSGMPELRLGLNDKVLFDNTGRGKSKSVELEDVKFHQCVRLSRFENDRTISFIPPDGEFELMSYRLNTHVKPLIWIESVIEKHSHSRIEYMIKGGKEYLMRAHFGLPSVEAEDKEGKPPISVKFEIPYFTTSGIQVRYLKIIEKSGYQALPWVRYITQNGDYQLRTQ

SEQ ID NO: 13708 - protein, 49 aa, Homo sapiens
MAPPSVPLVLLLVLLLSLAETPASAPAHRSSTFPKWVTKTERGRQPLRS

SEQ ID NO: 13709 - protein, 203 aa, Homo sapiens
MAGPFSRLLSARPGLRLLALAGAGSLAAGFLLRPEPVRAASERRRLYPPSQTWPTGQLPGNCTRSRRLCPPSMVTGYPLPSAEYPDLRKHNNCMASHLTPAVYARLCDKTTPTGWTLDQCIQTGVDNPGHPFIKTVGMVAGDEETYEVFADLFDPVIQERHNGYDPRTMKHTTDLDASKIRSGYFDERYVLSSRVRTGRSIRG

SEQ ID NO: 13710 - protein, 1531 aa, Homo sapiens
MEVSPLQPVNENMQVNKIKKNEDAKKRLSVERIYQKKTQLEHILLRPDTYIGSVELVTQQMWVYDEDVGINYREVTFVPGLYKIFDEILVNAADNKQRDPKMSCIRVTIDPENNLISIWNNGKGIPVVEHKVEKMYVPALIFGQLLTSSNYDDDEKKVTGGRNGYGAKLCNIFSTKFTVETASREYKKMFKQTWMDNMGRAGEMELKPFNGEDYTCITFQPDLSKFKMQSLDKDIVALMVRRAYDIAGSTKDVKVFLNGNKLPVKGFRSYVDMYLKDKLDETGNSLKVIHEQVNHRWEVCLTMSEKGFQQISFVNSIATSKGGRHVDYVADQIVTKLVDVVKKKNKGGVAVKAHQVKNHMWIFVNALIENPTFDSQTKENMTLQPKSFGSTCQLSEKFIKAAIGCGIVESILNWVKFKAQVQLNKKCSAVKHNRIKGIPKLDDANDAGGRNSTECTLILTEGDSAKTLAVSGLGVVGRDKYGVFPLRGKILNVREASHKQIMENAEINNIIKIVGLQYKKNYEDEDSLKTLRYGKIMIMTDQDQDGSHIKGLLINFIHHNWPSLLRHRFLEEFITPIVKVSKNKQEMAFYSLPEFEEWKSSTPNHKKWKVKYYKGLGTSTSKEAKEYFADMKRHRIQFKYSGPEDDAAISLAFSKKQIDDRKEWLTNFMEDRRQRKLLGLPEDYLYGQTTTYLTYNDFINKELILFSNSDNERSIPSMVDGLKPGQRKVLFTCFKRNDKREVKVAQLAGSVAEMSSYHHGEMSLMMTIINLAQNFVGSNNLNLLQPIGQFGTRLHGGKDSASPRYIFTMLSSLARLLFPPKDDHTLKFLYDDNQRVEPEWYIPIIPMVLINGAEGIGTGWSCKIPNFDVREIVNNIRRLMDGEEPLPMLPSYKNFKGTIEELAPNQYVISGEVAILNSTTIEISELPVRTWTQTYKEQVLEPMLNGTEKTPPLITDYREYHTDTTVKFVVKMTEEKLAEAERVGLHKVFKLQTSLTCNSMVLFDHVGCLKKYDTVLDILRDFFELRLKYYGLRKEWLLGMLGAESAKLNNQARFILEKIDGKIIIENKPKKELIKVLIQRGYDSDPVKAWKEAQQKVPDEEENEESDNEKETEKSDSVTDSGPTFNYLLDMPLWYLTKEKKDELCRLRNEKEQELDTLKRKSPSDLWKEDLATFIEELEAVEAKEKQDEQVGLPGKGGKAKGKKTQMAEVLPSPRGQRVIPRITIEMKAEAEKKNKKKIKNENTEGSPQEDGVELEGLKQRLEKKQKREPGTKTKKQTTLAFKPIKKGKKRNPWSDSESDRSSDESNFDVPPRETEPRRAATKTKFTMDLDSDEDFSDFDEKTDDEDFVPSDASPPKTKTSPKLSNKELKPQKSVVSDLEADDVKGSVPLSSSPPATHFPDETEITNPVPKKNVTVKKTAAKSQSSTSTTGAKKRAAPKGTKRDPALNSGVSQKPDPAKTKNRRKRKPSTSDDSDSNFEKIVSKAVTSKKSKGESDDFHMDFDSAVAPRAKSVRAKKPIKYLEESDEDDLF

SEQ ID NO: 13711 - protein, 462 aa, Homo sapiens
MSAEVIHQVEEALDTDEKEMLLFLCRDVAIDVVPPNVRDLLDILRERGKLSVGDLAELLYRVRRFDLLKRILKMDRKAVETHLLRNPHLVSDYRVLMAEIGEDLDKSDVSSLIFLMKDYMGRGKISKEKSFLDLVVELEKLNLVAPDQLDLLEKCLKNIHRIDLKTKIQKYKQSVQGAGTSYRNVLQAAIQKSLKDPSNNFRLHNGRSKEQRLKEQLGAQQEPVKKSIQESEAFLPQSIPEERYKMKSKPLGICLIIDCIGNETELLRDTFTSLGYEVQKFLHLSMHGISQILGQFACMPEHRDYDSFVCVLVSRGGSQSVYGVDQTHSGLPLHHIRRMFMGDSCPYLAGKPKMFFIQNYVVSEGQLEDSSLLEVDGPAMKNVEFKAQKRGLCTVHREADFFWSLCTADMSLLEQSHSSPSLYLQCLSQKLRQERGTIPGSGITESKDMHFSSLGCILLDVL

SEQ ID NO: 13712 - protein, 321 aa, Homo sapiens
MGILLGLLLLGHLTVDTYGRPILEVPESVTGPWKGDVNLPCTYDPLQGYTQVLVKWLVQRGSDPVTIFLRDSSGDHIQQAKYQGRLHVSHKVPGDVSLQLSTLEMDDRSHYTCEVTWQTPDGNQVVRDKITELRVQKLSVSKPTVTTGSGYGFTVPQGMRISLQCQARGSPPISYIWYKQQTNNQEPIKVATLSTLLFKPAVIADSGSYFCTAKGQVGSEQHSDIVKFVVKDSSKLLKTKTEAPTTMTYPLKATSTVKQSWDWTTDMDGYLGETSAGPGKSLPVFAIILIISLCCMVVFTMAYIMLCRKTSQQEHVYEAAR

SEQ ID NO: 13713 - protein, 457 aa, Homo sapiens
MYSFNTLRLYLWETIVFFSLAASKEAEAARSAPKPMSPSDFLDKLMGRTSGYDARIRPNFKGPPVNVSCNIFINSFGSIAETTMDYRVNIFLRQQWNDPRLAYNEYPDDSLDLDPSMLDSIWKPDLFFANEKGAHFHEITTDNKLLRISRNGNVLYSIRITLTLACPMDLKNFPMDVQTCIMQLESFGYTMNDLIFEWQEQGAVQVADGLTLPQFILKEEKDLRYCTKHYNTGKFTCIEARFHLERQMGYYLIQMYIPSLLIVILSWISFWINMDAAPARVGLGITTVLTMTTQSSGSRASLPKVSYVKAIDIWMAVCLLFVFSALLEYAAVNFVSRQHKELLRFRRKRRHHKSPMLNLFQEDEAGEGRFNFSAYGMGPACLQAKDGISVKGANNSNTTNPPPAPSKSPEEMRKLFIQRAKKIDKISRIGFPMAFLIFNMFYWIIYKIVRREDVHNQ

SEQ ID NO: 13714 - protein, 249 aa, Homo sapiens
MANLGCWMLVLFVATWSDLGLCKKRPKPGGWNTGGSRYPGQGSPGGNRYPPQGGGGWGQPHGGGWGQPHGGGWGQPHGGGWGQPHGGGWGQGGGTHSQWNKPSKPKTNMKHMAGAAAAGAVVGGLGGYMLGSAMSRPIIHFGSDYEDRYYRENMHRYPNQVYYRPMDEYSNQNNFVHDCVNITIKQHTVTTTTKGENFTETDVKMMERVVEQMCITQYERESQAYYQRGSSMVLFSSPPVILLISFLIF

SEQ ID NO: 13715 - protein, 171 aa, Homo sapiens
MSRSLLLWFLLFLLLLPPLPVLLADPGAPTPAGLWTWLRNSLRPSPSFTHFLLTHGRWFWEFVNATFIREMLMRLVLTVRSNLIPSPPTYNSAHDYISWESFSNFFKTSGKMGPGFTKALGHGVDLGHIYGDNLERQYQLRLFKDGKLKYQVLDGEMYPPSVEEAPVLMHY

SEQ ID NO: 13716 - protein, 770 aa, Homo sapiens
MPALGWAVAAILMLQTAMAEPSPGTLPRKAGVFSDLSNQELKAVHSFLWSKKELRLQPSSTTTMAKNTVFLIEMLLPKKYHVLRFLDKGERHPVREARAVIFFGDQEHPNVTEFAVGPLPGPCYMRALSPRPGYQSSWASRPISTAEYALLYHTLQEATKPLHQFFLNTTGFSFQDCHDRCLAFTDVAPRGVASGQRRSWLIIQRYVEGYFLHPTGLELLVDHGSTDAGHWAVEQVWYNGKFYGSPEELARKYADGEVDVVVLEDPLPGGKGHDSTEEPPLFSSHKPRGDFPSPIHVSGPRLVQPHGPRFRLEGNAVLYGGWSFAFRLRSSSGLQVLNVHFGGERIAYEVSVQEAVALYGGHTPAGMQTKYLDVGWGLGSVTHELAPGIDCPETATFLDTFHYYDADDPVHYPRALCLFEMPTGVPLRRHFNSNFKGGFNFYAGLKGQVLVLRTTSTVYNYDYIWDFIFYPNGVMEAKMHATGYVHATFYTPEGLRHGTRLHTHLIGNIHTHLVHYRVDLDVAGTKNSFQTLQMKLENITNPWSPRHRVVQPTLEQTQYSWERQAAFRFKRKLPKYLLFTSPQENPWGHKRTYRLQIHSMADQVLPPGWQEEQAITWARTEGGQPRALSQAASPVPGRYPLAVTKYRESELCSSSIYHQNDPWHPPVVFEQFLHNNENIENEDLVAWVTVGFLHIPHSEDIPNTATPGNSVGFLLRPFNFFPEDPSLASRDTVIVWPRDNGPNYVQRWIPEDRDCSMPPPFSYNGTYRPV

SEQ ID NO: 13717 - protein, 106 aa, Homo sapiens
MKVLLRLICFIALLISSLEADKCKEREEKIILVSSANEIDVRPCPLNPNEHKGTITWYKDDSKTPVSTEQASRIHQHKEKLWFVPAKVEDSGHYYCVVRNSSYCLR

SEQ ID NO: 13718 - protein, 43 aa, Homo sapiens
MSWLLFLAHRVALAALPCRRGSRGFGMFYAVRRGRKTGVFLTC

SEQ ID NO: 13719 - protein, 176 aa, Homo sapiens
MTMCSGARLALLVYGIIMHSSVYSSPAAAGLRFPGIRPEEEAYGEDGNPLPDFDGSEPPGAGSPASAPRAAAAWYRPAGRRDVAHGILNEAYRKVLDQLSAGKHLQSLVARGVGGSLGGGAGDDAEPLSKRHSDGIFTDSYSRYRKQMAVKKYLAAVLGKRYKQRVKNKGRRIAYL

SEQ ID NO: 13720 - protein, 398 aa, Homo sapiens
MALFGALFLALLAGAHAEFPGCKIRVTSKALELVKQEGLRFLEQELETITIPDLRGKEGHFYYNISEKVYDFLSTFITSGMRFLLNQQICPVLYHAGTVLLNSLLDTVPVRSSVDELVGIDYSLMKDPVASTSNLDMDFRGAFFPLTERNWSLPNRAVEPQLQEEERMVYVAFSEFFFDSAMESYFRAGALQLLLVGDKVPHDLDMLLRATYFGSIVLLSPAVIDSPLKLELRVLAPPRCTIKPSGTTISVTASVTIALVPPDQPEVQLSSMTMDARLSAKMALRGKALRTQLDLRRFRIYSNHSALESLALIPLQAPLKTMLQIGVMPMLNERTWRGVQIPLPEGINFVHEVVTNHAGFLTIGADLHFAKGLREVIEKNRPADVRASTAPTPSTAAV

SEQ ID NO: 13721 - protein, 1160 aa, Homo sapiens
MWAMESGHLLWALLFMQSLWPQLTDGATRVYYLGIRDVQWNYAPKGRNVITNQPLDSDIVASSFLKSDKNRIGGTYKKTIYKEYKDDSYTDEVAQPAWLGFLGPVLQAEVGDVILIHLKNFATRPYTIHPHGVFYEKDSEGSLYPDGSSGPLKADDSVPPGGSHIYNWTIPEGHAPTDADPACLTWIYHSHVDAPRDIATGLIGPLITCKRGALDGNSPPQRQDVDHDFFLLFSVVDENLSWHLNENIATYCSDPASVDKEDETFQESNRMHAINGFVFGNLPELNMCAQKRVAWHLFGMGNEIDVHTAFFHGQMLTTRGHHTDVANIFPATFVTAEMVPWEPGTWLISCQVNSHFRDGMQALYKVKSCSMAPPVDLLTGKVRQYFIEAHEIQWDYGPMGHDGSTGKNLREPGSISDKFFQKSSSRIGGTYWKVRYEAFQDETFQEKMHLEEDRHLGILGPVIRAEVGDTIQVVFYNRASQPFSMQPHGVFYEKDYEGTVYNDGSSYPGLVAKPFEKVTYRWTVPPHAGPTAQDPACLTWMYFSAADPIRDTNSGLVGPLLVCRAGALGADGKQKGVDKEFFLLFTVLDENKSWYSNANQAAAMLDFRLLSEDIEGFQDSNRMHAINGFLFSNLPRLDMCKGDTVAWHLLGLGTETDVHGVMFQGNTVQLQGMRKGAAMLFPHTFVMAIMQPDNLGTFEIYCQAGSHREAGMRAIYNVSQCPGHQATPRQRYQAARIYYIMAEEVEWDYCPDRSWEREWHNQSEKDSYGYIFLSNKDGLLGSRYKKAVFREYTDGTFRIPRPRTGPEEHLGILGPLIKGEVGDILTVVFKNNASRPYSVHAHGVLESTTVWPLAAEPGEVVTYQWNIPERSGPGPNDSACVSWIYYSAVDPIKDMYSGLVGPLAICQKGILEPHGGRSDMDREFALLFLIFDENKSWYLEENVATHGSQDPGSINLQDETFLESNKMHAINGKLYANLRGLTMYQGERVAWYMLAMGQDVDLHTIHFHAESFLYRNGENYRADVVDLFPGTFEVVEMVASNPGTWLMHCHVTDHVHAGMETLFTVFSRTEHLSPLTVITKETEKVPPRDIEEGNVKMLGMQIPIKNVEMLASVLVAISVTLLLVVLALGGVVWYQHRQRKLRRNRRSILDDSFKLLSFKQ

SEQ ID NO: 13722 - protein, 430 aa, Homo sapiens
MAANLSRNGPALQEAYVRVVTEKSPTDWALFTYEGNSNDIRVAGTGEGGLEEMVEELNSGKVMYAFCRVKDPNSGLPKFVLINWTGEGVNDVRKGACASHVSTMASFLKGAHVTINARAEEDVEPECIMEKVAKASGANYSFHKESGRFQDVGPQAPVGSVYQKTNAVSEIKRVGKDSFWAKAEKEEENRRLEEKRRAEEAQRQLEQERRERELREAARREQRYQEQGGEASPQRTWEQQQEVVSRNRNEQESAVHPREIFKQKERAMSTTSISSPQPGKLRSPFLQKQLTQPETHFGREPAAAISRPRADLPAEEPAPSTPPCLVQAEEEAVYEEPPEQETFYEQPPLVQQQGAGSEHIDHHIQGQGLSGQGLCARALYDYQAADDTEISFDPENLITGIEVIDEGWWRGYGPDGHFGMFPANYVELIE

SEQ ID NO: 13723 - protein, 286 aa, Homo sapiens
MELTELLLVVMLLLTARLTLSSPAPPACDLRVLSKLLRDSHVLHSRLSQCPEVHPLPTPVLLPAVDFSLGEWKTQMEETKAQDILGAVTLLLEGVMAARGQLGPTCLSSLLGQLSGQVRLLLGALQSLLGTQLPPQGRTTAHKDPNAIFLSFQHLLRGKDFWIVGDKLHCLSQNYWLWASEVAAGIQSQDSWSAEPNLQVPGPNPRIPEQDTRTLEWNSWTLSWTLTQDPRSPGHFLRNIRHRLPATQPPAWIFSFPNPSSYWTVYALPSSTHLAHPCGPAPPPAS

SEQ ID NO: 13724 - protein, 317 aa, Homo sapiens
MAEPGSRESETRARSPSVAAMASPQLCRALVSAQWVAEALRAPRAGQPLQLLDASWYLPKLGRDARREFEERHIPGAAFFDIDQCSDRTSPYDHMLPGAEHFAEYAGRLGVGAATHVVIYDASDQGLYSAPRVWWMFRAFGHHAVSLLDGGLRHWLRQNLPLSSGKSQPAPAEFRAQLDPAFIKTYEDIKENLESRRFQVVDSRATGRFRGTEPEPRDGIEPGHIPGTVNIPFTDFLSQEGLEKSPEEIRHLFQEKKVDLSKPLVATCGSGVTACHVALGAYLCGKPDVPIYDGSWVEWYMRARPEDVISEGRGKTH

SEQ ID NO: 13725 - protein, 52 aa, Homo sapiens
MMGVLFCCGAGFFIRRRMYPPPLIEEPAFNVSYTRQPPNPGPGAQQPGPPYY

SEQ ID NO: 13726 - protein, 517 aa, Homo sapiens
MLLYPAGFSFASLKSDLSKAMSQDGASQFQEVIRQELELSVKKELEKILTTASSHEFEHTKKDLDGFRKLFHRFLQEKGPSVDWGKIQRPPEDSIQPYEKIKARGLPDNISSVLNKLVVVKLNGGLGTSMGCKGPKSLIGVRNENTFLDLTVQQIEHLNKTYNTDVPLVLMNSFNTDEDTKKILQKYNHCRVKIYTFNQSRYPRINKESLLPVAKDVSYSGENTEAWYPPGHGDIYASFYNSGLLDTFIGEGKEYIFVSNIDNLGATVDLYILNHLMNPPNGKRCEFVMEVTNKTRADVKGGTLTQYEGKLRLVEIAQVPKAHVDEFKSVSKFKIFNTNNLWISLAAVKRLQEQNAIDMEIIVNAKTLDGGLNVIQLETAVGAAIKSFENSLGINVPRSRFLPVKTTSDLLLVMSNLYSLNAGSLTMSEKREFPTVPLVKLGSSFTKVQDYLRRFESIPDMLELDHLTVSGDVTFGKNVSLKGTVIIIANHGDRIDIPPGAVLENKIVSGNLRILDH

SEQ ID NO: 13727 - protein, 154 aa, Homo sapiens
MNPQTVLLLRVIAAFCFLGILCSLSAFLLDVFGPKHPALKITRRYAFAHILTVLQCATVIGFSYWASELILAQQQQHKKYHGSQVYVTFAVSFYLVAGAGGASILATAANLLRHYPTEEEEQALELLSEMEENEPYPAEYEVINQFQPPPAYTP

SEQ ID NO: 13728 - protein, 185 aa, Homo sapiens
MPGFLVRILPLLLVLLLLGPTRGLRVENEYGSYFACDFDYLRFLQKRFRHHLGDDVVLFTTDGAHKTFLKCGALQGLYTTVDFGTGSNITDAFLSQRKCEPKGPLINSEFYTGWLDHWGQPHSTIKTEAVASSLYDILARGASVNLYMFIGGTNFAYWNGANSPYAAQPTSYDYDAPLSEAGDLT

SEQ ID NO: 13729 - protein, 331 aa, Homo sapiens
MARNAEKAMTALARFRQAQLEEGKVKERRPFLASECTELPKAEKWRRQIIGEISKKVAQIQNAGLGEFRIRDLNDEINKLLREKGHWEVRIKELGGPDYGKVGPKMLDHEGKEVPGNRGYKYFGAAKDLPGVRELFEKEPLPPPRKTRAELMKAIDFEYYGYLDEDDGVIVPLEQEYEKKLRAELVEKWKAEREARLARGEKEEEEEEEEEINIYAVTEEESDEEGSQEKGGDDSQQKFIAHVPVPSQQEIEEALVRRKKMELLQKYASETLQAQSEEARRLLGCRSGTRPARSGSAPSPRATTAVPMGPSLPTTSPRGAPSCRCLTGLRM

SEQ ID NO: 13730 - protein, 873 aa, Homo sapiens
MATFISVQLKKTSEVDLAKPLVKFIQQTYPSGGEEQAQYCRAAEELSKLRRAAVGRPLDKHEGALETLLRYYDQICSIEPKFPFSENQICLTFTWKDAFDKGSLFGGSVKLALASLGYEKSCVLFNCAALASQIAAEQNLDNDEGLKIAAKHYQFASGAFLHIKETVLSALSREPTVDISPDTVGTLSLIMLAQAQEVFFLKATRDKMKDAIIAKLANQAADYFGDAFKQCQYKDTLPKYFYFQEVFPVLAAKHCIMQANAEYHQSILAKQQKKFGEEIARLQHAAELIKTVASRYDEYVNVKDFSDKINRALAAAKKDNDFIYHDRVPDLKDLDPIGKATLVKSTPVNVPISQKFTDLFEKMVPVSVQQSLAAYNQRKADLVNRSIAQMREATTLANGVLASLNLPAAIEDVSGDTVPQSILTKSRSVIEQGGIQTVDQLIKELPELLQRNREILDESLRLLDEEEATDNDLRAKFKERWQRTPSNELYKPLRAEGTNFRTVLDKAVQADGQVKECYQSHRDTIVLLCKPEPELNAAIPSANPAKTMQGSEVVNVLKSLLSNLDEVKKEREGLENDLKSVNFDMTSKFLTALAQDGVINEEALSVTELDRVYGGLTTKVQESLKKQEGLLKNIQVSHQEFSKMKQSNNEANLREEVLKNLATAYDNFVELVANLKEGTKFYNELTEILVRFQNKCSDIVFARKTERDELLKDLQQSIAREPSAPSIPTPAYQSSPAGGHAPTPPTPAPRTMPPTKPQPPARPPPPVLPANRAPSATAPSPVGAGTAAPAPSQTPGSAPPPQAQGPPYPTYPGYPGYCQMPMPMGYNPYAYGQYNMPYPPVYHQSPGQAPYPGPQQPSYPFPQPPQQSYYPQQ

SEQ ID NO: 13731 - protein, 123 aa, Homo sapiens
MLMLFVFGVLLHEVSLSGQNEAPPNTHSIPGEPLYNYASIRLPEEHIPFFLHNNRHIATVCRKDSLCPYKKHLEKLKYCWGYEKSCKPEFRFGYPVCSYVDMGWTDTLESAEDIFWKQADFGY

SEQ ID NO: 13732 - protein, 172 aa, Homo sapiens
MTSASTKVGEIFSAAGAAFTKLGELTMQLHPVADSSPAGAKWTETEIEMLRAAVKRFGDDLNHISCVIKERTVAQIKATVKRKVYEDSGIPLPAESPKKGPKKVASGVLSPPPAAPPPSSSSVPEAGGPPIKKQKADVTLSALNDSDANSDVVDIEGLGETPPAKKLNFDQA

SEQ ID NO: 13733 - protein, 183 aa, Homo sapiens
MEPPGDWGPPPWRSTPKTDVLRLVLYLTFLGAPCYAPALPSCKEDEYPVGSECCPKCSPGYRVKEACGELTGTVCEPCPPGTYIAHLNGLSKCLQCQMCDPAMGLRASRNCSRTENAVCGCSPGHFCIVQDGDHCAACRAYATSSPGQRVQKGGTESQDTLCQNCPPGTFSPNGTLEECQHQT

SEQ ID NO: 13734 - protein, 134 aa, Homo sapiens
MARGSAVAWAALGPLLWGCALGLQGGMLYPQESPSRECKELDGLWSFRADFSDNRRRGFEEQWYRRPLWESGPTVDMPVPSSFNDISQDWRLRHFVGWVWYEREVILPERWTQDLRTRVVLRIGSAHSYAIVGW

SEQ ID NO: 13735 - protein, 154 aa, Homo sapiens
MALGVPISVYLLFNAMTALTEEAAVTVTPPITAQQGNWTVNKTEADNIEGPIALKFSHLCLEDHNSYCINGACAFHHELEKAICRCFTGYTGERCEHLTLTSYAVDSYEKYIAIGIGVGLLLSGFLVIFYCYIRKRCLKLKSPYNVCSGERRPL

SEQ ID NO: 13736 - protein, 189 aa, Homo sapiens
MALSFSLLMAVLVLSYKSICSLGCDLPQTHSLGNRRALILLAQMGRISPFSCLKDRHDFGLPQEEFDGNQFQKTQAISVLHEMIQQTFNLFSTEDSSAAWEQSLLEKFSTELYQQLNNLEACVIQEVGMEETPLMNEDSILAVRKYFQRITLYLTEKKYSPCAWEVVRAEIMRSLSFSTNLQKILRRKD

SEQ ID NO: 13737 - protein, 131 aa, Homo sapiens
MEKIPVSAFLLLVALSYTLARDTTVKPGAKKDTKDSRPKLPQTLSRGWGDQLIWTQTYEEALYKSKTSNKPLMIIHHLDECPHSQALKKVFAENKEIQKLAEQFVLLNLVYETTDKHLSPDGQYVPRIMFV

SEQ ID NO: 13738 - protein, 289 aa, Homo sapiens
MATSGDCPRSESQGEEPAECSEAGLLQEGVQPEEFVAIADYAATDETQLSFLRGEKILILRQTTADWWWGERAGCCGYIPANHVGKHVDEYDPEDTWQDEEYFGSYGTLKLHLEMLADQPRTTKYHSVILQNKESLTDKVILDVGCGTGIISLFCAHYARPRAVYAVEASEMAQHTGQLVLQNGFADIITVYQQKVEDVVLPEKVDVLVSEWMGTCLLFEFMIESILYARDAWLKEDGVIWPTMAALHLVPCSADKDYRSKVLFWDNAYEFNLSALKLEKKSSPSGDDS

SEQ ID NO: 13739 - protein, 148 aa, Homo sapiens
MSLLGPKVLLFLAAFIITSDWIPLGVNSQRGDDVTQATPETFTEDPNLVNDPATDETECWDEKFTCTRLYSVHRPVKQCIHQLCFTSLRRMYIVNKEICSRLVCKEHEAMKDELCRQMAGLPPRRLRRSNYFRLPPCENVDLQRPNGL

SEQ ID NO: 13740 - protein, 145 aa, Homo sapiens
MTLLWCVVSLYFYGILQSDASERCDDWGLDTMRQIQVFEDEPARIKCPLFEHFLKFNYSTAHSAGLTLIWYWTRQDRDLEEPINFRLPENRISKEKDVLWFRPTLLNDTGNYTCMLRNTTYCSKVAFPLEVVQKDSCFNSPMKLP

SEQ ID NO: 13741 - protein, 308 aa, Homo sapiens
MLKCVPCTYKKEPVRISNGNKIWTLKFSHNISNKTPLVLLHGFGGGLGLWALNFGDLCTNRPVYAFDLLGFGRSSRPRFDSDAEEVENQFVESIEEWRCALGLDKMILLGHNLGGFLAAAYSLKYPSRVNHLILVEPWGFPERPDLADQDRPIPVWIRALGAALTPFNPLAGLRIAGPFGLSLVQRLRPDFKRKYSSMFEDDTVTEYIYHCNVQTPSGETAFKNMTIPYGWAKRPMLQRIGKMHPDIPVSVIFGARSCIDGNSGTSIQSLRPHSYVKTIAILGAGHYVYADQPEEFNQKVKEICDTVD

SEQ ID NO: 13742 - protein, 148 aa, Homo sapiens
MWNPNAGQPGPNPYPPNIGCPGGSNPAHPPPINPPFPPGPCPPPPGAPHGNPAFPPGGPPHPVPQPGYPGCQPLGPYPPPYPPPAPGIPPVNPLAPGMVGPAVIVDKKMQKKMKKAHKKMHKHQKHHKYHKHGKHSSSSSSSSSSDSD

SEQ ID NO: 13743 - protein, 106 aa, Homo sapiens
MRMSVGLSLLLPLSGRTFLLLLSVVMAQSHWPSEPSEAVRDWENQLEASMHSVLSDLHEAVPTVVGIPDGTAVVGRSFRVTIPTDLIASSGDIIKVSAAGKEALPS

SEQ ID NO: 13744 - protein, 53 aa, Homo sapiens
MAAAVPRAAFLSPLLPLLLGFLLLSAPHGGSGLHTKGALPLDTVTFYKIMVTS

SEQ ID NO: 13745 - protein, 201 aa, Homo sapiens
MRFLAATFLLLALSTAAQAEPVQFKDCGSVDGVIKEVNVSPCPTQPCQLSKGQSYSVNVTFTSNIQSKSSKAVVHGILMGVPVPFPIPEPDGCKSGINCPIQKDKTYSYLNKLPVKSEYPSIKLVVEWQLQDDKNQSLFCWEIPVQIMFPCLFSAHCPMLATEHRCLQLQMETKSLRFWSRRGMSVWLPSPAGAWRRTAPF

SEQ ID NO: 13746 - protein, 129 aa, Homo sapiens
MALSSAWRSVLPLWLLWSAACSRAASGDDNAFPFDIEGSSAVGRQDPPETSEPRVALGRLPPAAEKCNAGFFHTLSGECVPCDCNGNSNECLDGSGYCVTTDGEDPGFSASALSFILSSQGAREARAPT

SEQ ID NO: 13747 - protein, 49 aa, Homo sapiens
MASVVPVKDKKLLEVKLGELPSWILMRDFSPSGIFGAFQREHERLRKYH

SEQ ID NO: 13748 - protein, 398 aa, Homo sapiens
PLVLLLAVLLLAVLCKVYLGLFSGSSPNPFSEDVKRPPAPLVTDKEARKKVLKQGVTPNHSAFSMHALLVNHYMKGGFYPRGGSSEIAFHTIPVIQRAGGAVLTKATVQSVLLDSAGKACGVSVKKGHELVNIYCPIVVSNAGLFNTYEHLLPGNARCLPGVKQQLGTVRPGLGMTSVFICLRGTKEDLHLPSTNYYVYYDTDMDQAMERYVSMPREEAAEHIPLLFFAFPSAKDPTWEDRFPGRSTMIMLIPTAYEWFEEWQAELKGKRGSDYETFKNSFVEASMSVVLKLFPQLEGKVESVTAGSPLTNQFYLAAPRGACYGADHDLGRLHPCVMASLRAQSPIPNLYLTGQDIFTCGLVGALQGALLCSSAILKRNLYSDLKNLDSRIRAQKKKN

SEQ ID NO: 13749 - protein, 254 aa, Homo sapiens
MAAYKLVLIRHGESTWNLENRFSCWYDADLSPAGHEEAKRGGQALRDAGYEFDICLTSVQKRVIRTLWTVLDAIDQMWLPVVRTWRLNERHYGGLTGLNKAETAAKHGEAQVKIWRRSYDVPPPPMEPDHPFYSNISKDRRYADLTEDQLPSYESPKDTIARALPFWNEEIVPQIKEGKRVLIAAHGNSLQGIAKHVEGLSEEAIMELNLPTGIPIVYELDKNLKPIKPMQFLGDEETVCKAIEAVAAQGKAKK

SEQ ID NO: 13750 - protein, 178 aa, Homo sapiens
MHSSALLCCLVLLTGVRASPGQGTQSENSCTHFPGNLPNMLRDLRDAFSRVKTFFQMKDQLDNLLLKESLLEDFKGYLGCQALSEMIQFYLEEVMPQAENQDPDIKAHVNSLGENLKTLRLRLRRCHRFLPCENKSKAVEQVKNAFNKLQEKGIYKAMSEFDIFINYIEAYMTMKIRN

SEQ ID NO: 13751 - protein, 181 aa, Homo sapiens
MTATLRPYLSAVRATLQAALCLENFSSQVVERHNKPEVEVRSSKELLLQPVTISRNEKEKVLIEGSINSVRVSIAVKQADEIEKILCHKFMRFMMMRAENFFILRRKPVEGYDISFLITNFHTEQMYKHKLVDFVIHFMEEIDKEISEMKLSVNARARIVAEEFLKNVSRSSGEDPPRRLT

SEQ ID NO: 13752 - protein, 291 aa, Homo sapiens
MERKRWECPALPQGWEREEVPRRSGLSAGHRDVFYYSPSGKKFRSKPQLARYLGGSMDLSTFDFRTGKMLMSKMNKSRQRVRYDSSNQVKGKPDLNTALPVRQTASIFKQPVTKITNHPSNKVKSDPQKAVDQPRQLFWEKKLSGLNAFDIAEELVKTMDLPKGLQGVGPGCTDETLLSAIASALHTSTMPITGQLSAAVEKNPGVWLNTTQPLCKAFMVTDEDIRKQEELVQQVRKRLEEALMADMLAHVEELARDGEAPLDKACAEDDDEEDEEEEEEEPDPDPEMEHV

SEQ ID NO: 13753 - protein, 139 aa, Homo sapiens
METDCNPMELSSMSGFEEGSELNGFEGTDMKDMRLEAEAVVNDVLFAVNNMFVSKSLRCADDVAYINVETKERNRYCLELTEAGLKVVGYAFDQVDDHLQTPYHETVYSLLDTLSPAYREAFGNALLQRLEALKRDGQS

SEQ ID NO: 13754 - protein, 913 aa, Homo sapiens
MVQLRKLLRVLTLMKFPCCVLEVLLCALAAAARGQEMYAPHSIRIEGDVTLGGLFPVHAKGPSGVPCGDIKRENGIHRLEAMLYALDQINSDPNLLPNVTLGARILDTCSRDTYALEQSLTFVQALIQKDTSDVRCTNGEPPVFVKPEKVVGVIGASGSSVSIMVANILRLFQIPQISYASTAPELSDDRRYDFFSRVVPPDSFQAQAMVDIVKALGWNYVSTLASEGSYGEKGVESFTQISKEAGGLCIAQSVRIPQERKDRTIDFDRIIKQLLDTPNSRAVVIFANDEDIKQILAAAKRADQVGHFLWVGSDSWGSKINPLHQHEDIAEGAITIQPKRATVEGFDAYFTSRTLENNRRNVWFAEYWEENFNCKLTISGSKKEDTDRKCTGQERIGKDSNYEQEGKVQFVIDAVYAMAHALHHMNKDLCADYRGVCPEMEQAGGKKLLKYIRNVNFNGSAGTPVMFNKNGDAPGRYDIFQYQTTNTSNPGYRLIGQWTDELQLNIEDMQWGKGVREIPASVCTLPCKPGQRKKTQKGTPCCWTCEPCDGYQYQFDEMTCQHCPYDQRPNENRTGCQDIPIIKLEWHSPWAVIPVFLAMLGIIATIFVMATFIRYNDTPIVRASGRELSYVLLTGIFLCYIITFLMIAKPDVAVCSFRRVFLGLGMCISYAALLTKTNRIYRIFEQGKKSVTAPRLISPTSQLAITSSLISVQLLGVFIWFGVDPPNIIIDYDEHKTMNPEQARGVLKCDITDLQIICSLGYSILLMVTCTVYAIKTRGVPENFNEAKPIGFTMYTTCIVWLAFIPIFFGTAQSAEKLYIQTTTLTISMNLSASVALGMLYMPKVYIIIFHPELNVQKRKRSFKAVVTAATMSSRLSHKPSDRPNGEAKTELCENVDPNNFFFWLYSGTWITL

SEQ ID NO: 13755 - protein, 148 aa, Homo sapiens
MILFKQATYFISLFATVSCGCLTQLYENAFFRGGDVASMYTPNAQYCQMRCTFHPRCLLFSFLPASSINDMEKRFGCFLKDSVTGTLPKVHRTGAVSGHSLKQCGHQISACHRDIYKGVDMRGVNFNVSKVSSVEECQKRCTSNIRCQ

SEQ ID NO: 13756 - protein, 2046 aa, Homo sapiens
MDEVEQDQHEARLKELFDSFDTTGTGSLGQEELTDLCHMLSLEEVAPVLQQTLLQDNLLGRVHFDQFKEALILILSRTLSNEEHFQEPDCSLEAQPKYVRGGKRYGRRSLPEFQESVEEFPEVTVIEPLDEEARPSHIPAGDCSEHWKTQRSEEYEAEGQLRFWNPDDLNASQSGSSPPQDWIEEKLQEVCEDLGITRDGHLNRKKLVSICEQYGLQNVDGEMLEEVFHNLDPDGTMSVEDFFYGLFKNGKSLTPSASTPYRQLKRHLSMQSFDESGRRTTTSSAMTSTIGFRVFSCLDDGMGHASVERILDTWQEEGIENSQEILKALDFSLDGNINLTELTLALENELLVTKNSIHQAALASFKAEIRHLLERVDQVVREKEKLRSDLDKAEKLKSLMASEVDDHHAAIERRNEYNLRKLDEEYKERIAALKNELRKEREQILQQAGKQRLELEQEIEKAKTEENYIRDRLALSLKENSRLENELLENAEKLAEYENLTNKLQRNLENVLAEKFGDLDPSSAEFFLQEERLTQMRNEYERQCRVLQDQVDELQSELEEYRAQGRVLRLPLKNSPSEEVEANSGGIEPEHGLGSEECNPLNMSIEAELVIEQMKEQHHRDICCLRLELEDKVRHYEKQLDETVVSCKKAQENMKQRHENETHTLEKQISDLKNEIAELQGQAAVLKEAHHEATCRHEEEKKQLQVKLEEEKTHLQEKLRLQHEMELKARLTQAQASFEREREGLQSSAWTEEKVRGLTQELEQFHQEQLTSLVEKHTLEKEELRKELLEKHQRELQEGREKMETECNRRTSQIEAQFQSDCQKVTERCESALQSLEGRYRQELKDLQEQQREEKSQWEFEKDELTQECAEAQELLKETLKREKTTSLVLTQEREMLEKTYKEHLNSMVVERQQLLQDLEDLRNVSETQQSLLSDQILELKSSHKRELREREEVLCQAGASEQLASQRLERLEMEHDQERQEMMSKLLAMENIHKATCETADRERAEMSTEISRLQSKIKEMQQATSPLSMLQSGCQVIGEEEVEGDGALSLLQQGEQLLEENGDVLLSLQRAHEQAVKENVKMATEISRLQQRLQKLEPGLVMSSCLDEPATEFFGNTAEQTEQFLQQNRTKQVEGVTRRHVLSDLEDDEVRDLGSTGTSSVQRQEVKIEESEASVEGFSELENSEETRTESWELKNQISQLQEQLMMLCADCDRASEKKQDLLFDVSVLKKKLKMLERIPEASPKYKLLYEDVSRENDCLQEELRMMETRYDEALENNKELTAEVFRLQDELKKMEEVTETFLSLEKSYDEVKIENEGLNVLVLRLQGKIEKLQESVVQRCDCCLWEASLENLEIEPDGNILQLNQTLEECVPRVRSVHHVIEECKQENQYLEGNTQLLEKVKAHEIAWLHGTIQTHQERPRVQNQVILEENTTLLGFQDKHFQHQATIAELELEKTKLQELTRKLKERVTILVKQKDVLSHGEKEEELKAMMHDLQITCSEMQQKVELLRYESEKLQQENSILRNEITTLNEEDSISNLKLGTLNGSQEEMWQKTETVKQENAAVQKMVENLKKQISELKIKNQQLDLENTELSQKNSQNQEKLQELNQRLTEMLCQKEKEPGNSALEEREQEKFNLKEELERCKVQSSTLVSSLEAELSEVKIQTHIVQQENHLLKDELEKMKQLHRCPDLSDFQQKISSVLSYNEKLLKEKEALSEELNSCVDKLAKSSLLEHRIATMKQEQKSWEHQSASLKSQLVASQEKVQNLEDTVQNVNLQMSRMKSDLRVTQQEKEALKQEVMSLHKQLQNAGGKSWAPEIATHPSGLHNQQKRLSWDKLDHLMNEEQQLLWQENERLQTMVQNTKAELTHSREKVRQLESNLLPKHQKHLNPSGTMNPTEQEKLSLKRECDQFQKEQSPANRKVSQMNSLEQELETIHLENEGLKKKQVKLDEQLMEMQHLRSTATPSPSPHAWDLQLLQQQACPMVPREQFLQLQRQLLQAERINQHLQEELENRTSETNTPQALLPEQRAVHADSYRRIGHL

SEQ ID NO: 13757 - protein, 117 aa, Homo sapiens
MMLRVLVGAVLPAMLLAAPPPINKLALFPDKSAWCEAKNITQIVGHSGCEAKSIQNRACLGQCFSYSVPNTFPQSTESLVHCDSCMPAQSMWEIVTLECPGHEEVPRVDKLVEKILH

SEQ ID NO: 13758 - protein, 256 aa, Homo sapiens
MKSDSSTSAAPLRGLGGPLRSSEPVRAVPARAPAVDLLEEAADLLVVHLDFRAALETCERAWQSLANHAVAEEPAGTSLEVKCSLCVVGIQALAEMDRWQEVLSWVLQYYQVPEKLPPKVLELCILLYSKMQEPGAVLDVVGAWLQDPANQNLPEYGALAEFHVQRVLLPLGCLSEAEELVVGSAAFGEERRLDVLQAIHTARQQQKQEHSGSEEAQKPNLEASPSSLHFLYKLAQLFRWIRKAAFSRLYQLRIRD

SEQ ID NO: 13759 - protein, 479 aa, Homo sapiens
MDFSRNLYDIGEQLDSEDLASLKFLSLDYIPQRKQEPIKDALMLFQRLQEKRMLEESNLSFLKELLFRINRLDLLITYLNTRKEEMERELQTPGRAQISAYRVMLYQISEEVSRSELRSFKFLLQEEISKCKLDDDMNLLDIFIEMEKRVILGEGKLDILKRVCAQINKSLLKIINDYEEFSKERSSSLEGSPDEFSNGEELCGVMTISDSPREQDSESQTLDKVYQMKSKPRGYCLIINNHNFAKAREKVPKLHSIRDRNGTHLDAGALTTTFEELHFEIKPHDDCTVEQIYEILKIYQLMDHSNMDCFICCILSHGDKGIIYGTDGQEAPIYELTSQFTGLKCPSLAGKPKVFFIQACQGDNYQKGIPVETDSEEQPYLEMDLSSPQTRYIPDEADFLLGMATVNNCVSYRNPAEGTWYIQSLCQSLRERCPRGDDILTILTEVNYEVSNKDDKKNMGKQMPQPTFTLRKKLVFPSD

SEQ ID NO: 13760 - protein, 329 aa, Homo sapiens
MFRQFYLWTCLASGIILGSLFEICLGQYDDDCKLARGGPPATIVAIDEESRNGTILVDNMLIKGTAGGPDPTIELSLKDNVDYWVLMDPVKQMLFLNSTGRVLDRDPPMNIHSIVVQVQCINKKVGTIIYHEVRIVVRDRNDNSPTFKHESYYATVNELTPVGTTIFTGFSGDNGATDIDDGPNGQIEYVIQYNPDDPTSNDTFEIPLMLTGNIVLRKRLNYEDKTRYFVIIQANDRAQNLNERRTTTTTLTVDVLDGDDLGPMFLPCVLVPNTRDCRPLTYQAAIPELRTPDLGSLCSGTNSWCQGRSGVHWSSPAWRCLFPRRLHQM

SEQ ID NO: 13761 - protein, 423 aa, Homo sapiens
MGMYPGVLVPSSRGGLPLEEVTVAEVLAARGYLTGMAGKWHLGVGPEGAFLPPHQGFHRFLGIPYSHDQGPCQNLTCFPPATPCDGGCDQGLVPIPLLANLSVEAQPPWLPGLEARYMAFAHDLMADAQRQDRPFFLYYASHHTHYPQFSGQSFAERSGRGPFGDSLMELDAAVGTLMTAIGDLGLLEETLVIFTADNGPETMRMSRGGCSGLLRCGKGTTYEGGVREPALAFWPGHIAPGVTHELASSLDLLPTLAALAGAPLPNVTLDGFDLSPLLLGTGKSPRQSLFFYPSYPDEVRGVFAVRTGKYKAHFFTQGSAHSDTTADPACHASSSLTAHEPPLLYDLSKDPGENYNLLGGVAGATPEVLQALKQLQLLKAQLDAAVTFGPSQVARGEDPALQICCHPGCTPRPACCHCPDPHA

SEQ ID NO: 13762 - protein, 73 aa, Homo sapiens
MYNMRRLSLSPTFSMGFHLLVTVSLLFSHVDHVIAETEMEGEGNETGECTGSYYCKKGVILPIWEPQDPSFGD

SEQ ID NO: 13763 - protein, 240 aa, Homo sapiens
MTVGKSSKMLQHIDYRMRCILQDGRIFIGTFKAFDKHMNLILCDCDEFRKIKPKNSKQAEREEKRVLGLVLLRGENLVSMTVEGPPPKDTGIARVPLAGAAGGPGIGRAAGRGIPAGVPMPQAPAGLAGPVRGVGGPSQQVMTPQGRGTVAAAAAAATASIAGAPTQYPPGRGGPPPPMGRGAPPPGMMGPPPGMRPPMGPPMGIPPGRGTPMGMPPPGMRPPPPGMRGPPPPGMRPPRP

SEQ ID NO: 13764 - protein, 623 aa, Homo sapiens
MAAATGDPGLSKLQFAPFSSALDVGFWHELTQKKLNEYRLDEAPKDIKGYYYNGDSAGLPARLTLEFSAFDMSAPTPARCCPAIGTLYNTNTLESFKTADKKLLLEQAANEIWESIKSGTALENPVLLNKFLLLTFAIEALECAYDNLCQTEGVTALPYFLIKYDENMVLVSLLKHYSDFFQGQRTKITIGVYDPCNLAQYPGWPLRNFLVLAAHRWSSSFQSVEVVCFRDRTMQGARDVAHSIIFEVKLPEMAFSPDCPKAVGWEKNQKGGMGPRMVNLSECMDPKRLAESSVDLNLKLMCWRLVPTLDLDKVVSVKCLLLGAGTLGCNVARTLMGWGVRHITFVDNAKISYSNPVRQPLYEFEDCLGGGKPKALAAADRLQKIFPGVNARGFNMSIPMPGHPVNFSSVTLEQARRDVEQLEQLIESHDVVFLLMDTRESRWLPAVIAASKRKLVINAALGFDTFVVMRHGLKKPKQQGAGDLCPNHPVASADLLGSSLFANIPGYKLGCYFCNDVVAPGDSTRDRTLDQQCTVSRPGLAVIAGALAVELMVSVLQHPEGGYAIASSSDDRMNEPPTSLGLVPHQIRGFLSRFDNVLPVSLAFDKCTACSSKIWDMSDDETI

SEQ ID NO: 13765 - protein, 1886 aa, Homo sapiens
MFRQFYLWTCLASGIILGSLFEICLGQYDDDCKLARGGPPATIVAIDEESRNGTILVDNMLIKGTAGGPDPTIELSLKDNVDYWVLMDPVKQMLFLNSTGRVLDRDPPMNIHSIVVQVQCINKKVGTIIYHEVRIVVRDRNDNSPTFKHESYYATVNELTPVGTTIFTGFSGDNGATDIDDGPNGQIEYVIQYNPDDPTSNDTFEIPLMLTGNIVLRKRLNYEDKTRYFVIIQANDRAQNLNERRTTTTTLTVDVLDGDDLGPMFLPCVLVPNTRDCRPLTYQAAIPELRTPEELNPIIVTPPIQAIDQDRNIQPPSDRPGILYSILVGTPEDYPRFFHMHPRTAELSLLEPVNRDFHQKFDLVIKAEQDNGHPLPAFAGLHIEILDENNQSPYFTMPSYQGYILESAPVGATISDSLNLTSPLRIVALDKDIEDTKDPELHLFLNDYTSVFTVTQTGITRYLTLLQPVDREEQQTYTFSITAFDGVQESEPVIVNIQVMDANDNTPTFPEISYDVYVYTDMRPGDSVIQLTAVDADEGSNGEITYEILVGAQGDFIINKTTGLITIAPGVEMIVGRTYALTVQAADNAPPAERSTGILTLGKALDRESTDRYILIITASDGRPDGTSTATVNIVVTDVNDNAPVFDPYLPRNLSVVEEEANAFVGQVKATDPDAGINGQVHYSLGNFNNLFRITSNGSIYTAVKLNREVRDYYELVVVATDGAVHPRHSTLTLAIKVLDIDDNSPVFTNSTYTVLVEENLPAGTTILQIEAKDVDLGANVSYRIRSPEVKHFFALHPFTGELSLLRSLDYEAFPDQEASITFLVEAFDIYGTMPPGIATVTVIVKDMNDYPPVFSKRIYKGMVAPDAVKGTPITTVYAEDADPPGLPASRVRYRVDDVQFPYPASIFEVEEDSGRVITRVNLNEEPTTIFKLVVVAFDDGEPVMSSSATVKILVLHPGEIPRFTQEEYRPPPVSELATKGTMVGVISAAAINQSIVYSIVSGNEEDTFGINNITGVIYVNGPLDYETRTSYVLRVQADSLEVVLANLRVPSKSNTAKVYIEIQDENNHPPVFQKKFYIGGVSEDARMFTSVLRVKATDKDTGNYSVMAYRLIIPPIKEGKEGFVVETYTGLIKTAMLFHNMRRSYFKFQVIATDDYGKGLSGKADVLVSVVNQLDMQVIVSNVPPTLVEKKIEDLTEILDRYVQEQIPGAKVVVESIGARRHGDAFSLEDYTKCDLTVYAIDPQTNRAIDRNELFKFLDGKLLDINKDFQPYYGEGGRILEIRTPEAVTSIKKRGESLGYTEGALLALAFIIILCCIPAILVVLVSYRQFKVRQAECTKTARIQAALPAAKPAVPAPAPVAAPPPPPPPPPGAHLYEELGDSSMHNLFLLYHFQQSRGNNSVSEDRKHQQVVMPFSSNTIEAHKSAHVDGSLKSNKLKSARKFTFLSDEDDLSAHNPLYKENISQVSTNSDISQRTDFVDPFSPKIQAKSKSLRGPREKIQRLWSQSVSLPRRLMRKVPNRPEIIDLQQWQGTRQKAENENTGICTNKRGSSNPLLTTEEANLTEKEEIRQGETLMIEGTEQLKSLSSDSSFCFPRPHFSFSTLPTVSRTVELKSEPNVISSPAECSLELSPSRPCVLHSSLSRRETPICMLPIETERNIFENFAHPPNISPSACPLPPPPPISPPSPPPAPAPLAPPPDISPFSLFCPPPSPPSIPLPLPPPTFFPLSVSTSGPPTPPLLPPFPTPLPPPPPSIPCPPPPSASFLSTECVCITGVKCTTNLMPAEKIKSSMTQLSTTTVCKTDPQREPKGILRHVKNLAELEKSVANMYSQIEKNYLRTNVSELQTMCPSEVTNMEITSEQNKGSLNNIVEGTEKQSHSQSTSL

SEQ ID NO: 13766 - protein, 235 aa, Homo sapiens
NSNVLLWITALAIKFTLIDSQAQYPVVNTNYGKIQGLRTPLPSEILGPVEQYLGVPYASPPTGERRFQPPESPSSWTGIRNATQFSAVCPQHLDERFLLHDMLPIWFTTSLDTLMTYVQDQNEDCLYLNIYVPMEDGTNIKRNADDITSNDHGEDKDIHEQNSKKPVMVYIHGGSYMEGTGNMIDGSILASYGNVIVITINYRLGILGMQEARLCGSSKMFNYFKSPFTNLINFF

SEQ ID NO: 13767 - protein, 1012 aa, Homo sapiens
MPAVASVPKELYLSSSLKDLNKKTEVKPEKISTKRYEEAEVRKKLEEKDRQEEAQRLQQKRQETGREDGGTLAKGSLENVLDSKDKTQKSNGEKNEKCETKEKGAITAKELYTMMTDKNISLIIMDARRMQDYQDSCILHSLSVPEEAISPGVTASWIEAHLPDDSKDTWKKRGNVEYVVLLDWFSSAKDLQIGTTLRSLKDALFKWESKTVLRNEPLVLEGGYENWLLCYPQYTTNAKVTPPPRRQNEEVSISLDFTYPSLEESIPSKPAAQTPPASIEVDENIELISGQNERMGPLNISTPVEPVAASKSDVSPIIQPVPSIKNVPQIDRTKKPAVKLPEEHRIKSESTNHEQQSPQSGKVIPDRSTKPVVFSPTLMLTDEEKARIHAETALLMEKNKQEKELRERQQEEQKEKLRKEEQEQKAKKKQEAEENEITEKQQKAKEEMEKKESEQAKKEDKETSAKRGKEITGVKRQSKSEHETSDAKKSVEDRGKRCPTPEIQKKSTGDVPHTSVTGDSGSGKAQREPLTRARSEEMGRIVPGLPSGWAKFLDPITGTFRYYHSPTNTVHMYPPEMAPSSAPPSTPPTHKAKPQIPAERDREPSKLKRSYSSPDITQAIQEEEKRKPTVTPTVNRENKPTCYPKAEISRLSASQIRNLNPVFGGSGPALTGLRNLGNTCYMNSILQCLCNAPHLADYFNRNCYQDDINRSNLLGHKGEVAEEFGIIMKALWTGQYRYISPKDFKITIGKINDQFAGYSQQDSQELLLFLMDGLHEDLNKADNRKRYKEENNDHLDDFKAAEHAWQKHKQLNESIIVALFQGQFKSTVQCLTCHKKSRTFEAFMYLSLPLASTSKCTLQDCLRLFSKEEKLTDNNRFYCSHCRARRDSLKKIEIWKLPPVLLVHLKRFSYDGRWKQKLQTSVDFPLENLDLSQYVIGPKNNLKKYNLFSVSNHYGGLDGGHYTAYCKNAARQRWFKFDDHEVSDISVSSVKSSAAYILFYTSLGPRVTDVAT

SEQ ID NO: 13768 - protein, 336 aa, Homo sapiens
MLDTKWKGKSVVVLRHPLINPVAFGALLQYLYTGRLDIGVEHVSDCERLAKQCQLWDLLSDLEAKCEKVSEFVASKPGTCVKVLTIEPPPADPRLREDMALLADCALPPELRGDLWELPFPCPDGFNSCPDICFRVAGCSFLCHKAFFCGRSDYFRALLDDHFRESEEPATSGGPPAVTLHGISPDVFTHVLYYMYSDHTELSPEAAYDVLSVADMYLLPGLKRLCGRSLAQMLDEDTVVGVWRVAKLFRLARLEDQCTEYMAKVIEKLVEREDFVEAVKEEAAAVAARQETDSIPLVDDIRFHVASTVQTYSAIEEAQQRLRALEDLLVSIGLDC

SEQ ID NO: 13769 - protein, 183 aa, Homo sapiens
MGLLQLLAFSFLETAGPGASLEWRSLETTPEPQGLSMGSPSSGKRRPPRAPAPRPQRSAGDPRACTHTHSRFPSSQISTRTLTPRMRGLPRARGFTCVALCRARVRAQEPEFSYGCAEGSCYPATGDLLIGRAQKLSVTSTCGLHKPEPYCIVSHLQEDKKCFICNSQDPYHETLNPDSHLIE

SEQ ID NO: 13770 - protein, 126 aa, Homo sapiens
MWQLTSLLLFVATWGISGTPAPLDSVFSSSERAHQVLRIRKRANSFLEELRHSSLERECIEEICDFEEAKEIFQNVDDTLAFWSKHVDGDQCLVLPLEHPCASLCCGHGTCIDGIGSFSCDCRSGW

SEQ ID NO: 13771 - protein, 330 aa, Homo sapiens
IRFIGGLLAAYYLSGEEIFKIKAVQLAEKLLPAFNTPTGIPWAMVNLKSGVGRNWGWASAGSSILAEFGTLHMEFIHLSYLTGDLTYYKKVMHIRKLLQKMDRPNGLYPNYLNPRTGRWGQYHTSVGGLGDSFYEYLLKAWLMSDKTDHEARKMYDDAIEAIEKHLIKKSRGGLTFIGEWKNGHLEKKMGHLACFAGGMFALGADGSRADKAGHYLELGAEIARTCHESYDRTALKLGPESFKFDGAVEAVAVRQAEKYYILRPEVIETYWYLWRFTHDPRYRQWGWEAALAIEKYCRVNGGFSGVKDVYSSTPTHDDVQQSFFLAETLN

SEQ ID NO: 13772 - protein, 217 aa, Homo sapiens
MSWVQATLLARGLCRAWGGTCGAALTGTSISQVPLPKDSTGAADPPQPHIVGIQSPDQQAALARHNPARPVFVEGPFSLWLRNKCVYYHILRADLLPPEEREVEETPEEWNLYYPMQLDLEYVRSGWDNYEFDINEVEEGPVFAMCMAGAHDQATMAKWIQGLQETNPTLAQIPVVFRLAGSTRELQTSSAGLEEPPLPEDHQEEDDNLQRQQQGQS

SEQ ID NO: 13773 - protein, 65 aa, Homo sapiens
PPATMRIWLLGGLLPFLLLLSGLQRPTEGSEVAIKIDFDFAPGSFDDQYQGCSKQLPARNASLIL

SEQ ID NO: 13774 - protein, 178 aa, Homo sapiens
MLLILLSVALLALSSAESSSEDVSQEESLFLISGKPEGRRPQGGNQPQRPPPPPGKPQGPPPQGGNQSQGPPPPPGKPEGRPPQGGNQSQGPPPHPGKPERPPPQGGNQSQGKPQGPPQQEGNKPQGPPPPGKPQGPPPAGGNPQQPQAPPAGKPQGPPPPPQGGRPPRPAQGQQPPQ

SEQ ID NO: 13775 - protein, 2156 aa, Homo sapiens
MLFFLDRMLAFPMNETFCCLWIACVFNSTLAQQGTESFQCDNGVSLPPDSICDFTDQCGDSSDERHCLNYERCDFEDGLCHMTQDQSLQPSWTKRSGMIGLSPPFYDHNGDVSAHFLSLVSRVDSISSSLRSRVFLPTNDQHDCQITFYYFSCQVSGKLMVGLQTACGGPIQHLWQNTAALPNQWERNVIKIQSSQRFQVVFEGQMASTYEQDEVIAIDDISFSSGCLPANDGILLCQEALNAERELCHPDTDLCRFDATDEELRLCQACGFEFDMCEWTSEASAGQISWMRTKAREIPAFESTPQQDQGGDDEGYYVWVGAKHGFTLNHLDSRAYLNSSVCHCLGKSCHLQFYYAMESSVLRVRLYNNKEEEIFWTYNISTHSQWVKADVLIPEDLKTFKIIFEGTLLSQRSFIALDHLWVYACGQTQSRKLCSADEFPCTSGQCIAKESVCDSRQDCSDESDEDPATCSKHLTCDFESGFCGWEPFLTEDSHWKLMKGLNNGEHHFPAADHTANINHGSFIYLEAQRSPGVAKLGSPVLTKLLTASTPCQVQFWYHLSQHSNLSVFTRTSLDGNLQKQGKIIRFSESQWSHAKIDLIAEAGESTLPFQLILEATVLSSNATVALDDISVSQECEISYKSLPRTSTQSKFSKCDFEANSCDWFEAISGDHFDWIRSSQSELSADFEHQAPPRDHSLNASQGHFMFILKKSSSLWQVAKLQSPTFSQTGPGCILSFWFYNYGLSVGAAELQLHMENSHDSTVIWRVLYNQGKQWLEATIQLGRLSQPFHLSLDKVSLGIYDGVSAIDDIRFENCTLPLPAESCEGLDHFWCRHTRACIEKLRLCDLVDDCGDRTDEVNCAPELQCNFETGICNWEQDAKDDFDWTRSQGPTPTLNTGPMKDNTLGTAKGHYLYIESSEPQAFQDSAALLSPILNATDTKGCTFRFYYHMFGKRIYRLAIYQRIWSDSRGQLLWQIFGNQGNRWIRKHLNISSRQPFQILVEASVGDGFTGDIAIDDLSFMDCTLYPGNLPADLPTPPETSVPVTLPPHNCTDNEFICRSDGHCIEKMQKCDFKYDCPDKSDEASCVMEVCSFEKRSLCKWYQPIPVHLLQDSNTFRWGLGNGISIHHGEENHRPSVDHTQNTTDGWYLYADSSNGKFGDTADILTPIISLTGPKCTLVFWTHMNGATVGSLQVLIKKDNVTSKLWAQTGQQGAQWKRAEVFLGIRSHTQIVFRAKRGISYIGDVAVDDISFQDCSPLLSPERKCTDHEFMCANKHCIAKDKLCDFVNDCADNSDETTFICRTSSGRCDFEFDLCSWKQEKDEDFDWNLKASSIPAAGTEPAADHTLGNSSGHYIFIKSLFPQQPMRAARISSPVISKRSKNCKIIFHYHMYGNGIGALTLMQVSVTNQTKVLLNLTVEQGNFWRREELSLFGDEDFQLKFEGRVGKGQRGDIALDDIVLTENCLSLHDSVQEELAVPLPTGFCPLGYRECHNGKCYRLEQSCNFVDNCGDNTDENECGSSCTFEKGWCGWQNSQADNFDWVLGVGSHQSLRPPKDHTLGNENGHFMYLEATAVGLRGDKAHFRSTMWRESSAACTMSFWYFVSAKATGSIQILIKTEKGLSKVWQESKQNPGNHWQKADILLGKLRNFEVIFQGIRTRDLGGGAAIDDIEFKNCTTVGEISELCPEITDFLCRDKKCIASHLLCDYKPDCSDRSDEAHCAHYTSTTGSCNFETSSGNWTTACSLTQDSEDDLDWAIGSRIPAKALIPDSDHTPGSGQHFLYVNSSGSKEGSVARITTSKSFPASLGMCTVRFWFYMIDPRSMGILKVYTIEESGLNILVWSVIGNKRTGWTYGSVPLSSNSPFKVAFEADLDGNEDIFIALDDISFTPECVTGGPVPVQPSPCEADQFSCIYTLQCVPLSGKCDGHEDCIDGSDEMDCPLSPTPPLCSNMEFPCSTDECIPSLLLCDGVPDCHFNEDELICSNKSCSNGALVCASSNSCIPAHQRCDGFADCMDFQLDESSCSECPLNYCRNGGTCVVEKNGPMCRCRQGWKGNRCHIKFNPPATDFTYAQNNTWTLLGIGLAFLMTHITVAVLCFLANRKVPIRKTEGSGNCAFVNPVYGNWSNPEKTESSVYSFSNPLYGTTSGSLETLSHHLK

SEQ ID NO: 13776 - protein, 70 aa, Homo sapiens
MPVPWFLLSLALGRSPVVLSLERLVGPQDATHCSPGLSCRLWVTYSACLGTSCLLRAPCWRLRTCRQSWC

SEQ ID NO: 13777 - protein, 587 aa, Homo sapiens
MSPSSLYSQQVLCSSIPLSKNVHSFFSAFCTEDNIEQSISYLDQELTTFGFPSLYEESKGKETKRELNIVAVLNCMNELLVLQRKNLLAQENVETQNLKLGSDMDHLQSCYSKLKEQLETSRREMIGLQERDRQLQCKNRNLHQLLKNEKDEVQKLQNIIASRATQYNHDMKRKEREYNKLKERLHQLVMNKKDKKIAMDILNYVGRADGKRGSWRTGKTEARNEDEMYKILLNDYEYRQKQILMENAELKKVLQQMKKEMISLLSPQKKKPRERVDDSTGTVISDVEEDAGELSRESMWDLSCETVREQLTNSIRKQWRILKSHVEKLDNQVSKVHLEGFNDEDVISRQDHEQETEKLELEIQQCKEMIKTQQQLLQQQLATAYDDDTTSLLRDCYLLEEKERLKEEWSLFKEQKKNFERERRSFTEAAIRLGLERKAFEEERASWLKQQFLNMTTFDHQNSENVKLFSAFSGSSDWDNLIVHSRQPQKKPHSVSNGSPVCMSKLTKSLPASPSTSDFCQTRSCISEHSSINVLNITAEEIKPNQVGGECTNQKWSVASRPGSQEGCYSGCSLSYTNSHVEKDDLP

SEQ ID NO: 13778 - protein, 531 aa, Homo sapiens
MDGIVTEVAVGVKRGSDELLSGSVLSSPNSNMSSMVVTANGNDSKKFKGEDKMDGAPSRVLHIRKLPGEVTETEVIALGLPFGKVTNILMLKGKNQAFLELATEEAAITMVNYYSAVTPHLRNQPIYIQYSNHKELKTDNTLNQRAQAVLQAVTAVQTANTPLSGTTVSESAVTPAQSPVLRIIIDNMYYPVTLDVLHQIFSKFGAVLKIITFTKNNQFQALLQYGDPVNAQQAKLALDGQNIYNACCTLRIDFSKLVNLNVKYNNDKSRDYTRPDLPSGDGQPALDPAIAAAFAKETSLLAVPGALSPLAIPNAAAAAAAAAAGRVGMPGVSAGGNTVLLVSNLNEEMVTPQSLFTLFGVYGDVQRVKILYNKKDSALIQMADGNQSQLAMNHLNGQKMYGKIIRVTLSKHQTVQLPREGLDDQGLTKDFGNSPLHRFKKPGSKNFQNIFPPSATLHLSNIPPSVAEEDLRTLFANTGGTVKAFKFFQDHKMALLQMATVEEAIQALIDLHNYNLGENHHLRVSFSKSTI

SEQ ID NO: 13779 - protein, 281 aa, Homo sapiens
MGAGNLPPITQEEALHILGFQPPFEDIRFGPFTGNTTLMRWFRQINDHFHVKGCSYVLYKPHGKNKTAGETASGALSKLTRGLKDESLAYIYHCQNHYFCPIGFEATPVKANKAFSRGPLSPQEVEYWILIGESSRKHPAIHCKKWADIVTDLNTQNPEYLDIRHLERGLQYRKTKKPTFFSSQVGGNLHCIIAFQRLNWQRFGLWNFPFGTIRQESQPPTHAQGIAKSESEDNISKKQHGRLGRSFSASFHQDSAWKKMSSIHERRNSGYQGYSDYDGND

SEQ ID NO: 13780 - protein, 153 aa, Homo sapiens
MSPHPTALLGLVLCLAQTIHTQEEDLPRPSISAEPGTVIPLGSHVTFVCRGPVGVQTFRLERDSRSTYNDTEDVSQASPSESEARFRIDSVREGNAGLYRCIYYKPPKWSEQSDYLELLVKESSGGPDSPDTEPGSSAGPTQRPSDNSHNERE

SEQ ID NO: 13781 - protein, 123 aa, Homo sapiens
MTAPVPAPRILLPLLLLLLLTPPPGARGEVCMASRGLSLFPESCPDFCCGTCDDQYCCSDVLKKFVWSEERCAVPEASVPASVEPVEQLGSALRFRPGYNDPMSGFELGQQGGDSAEQAPRGA

SEQ ID NO: 13782 - protein, 1001 aa, Homo sapiens
MPTEKKISSASDCINSMVEGSELKKVRSNSRIYHRYFLLDADMQSLRWEPSKKDSEKAKIDIKSIKEVRTGKNTDIFRSNGISDQISEDCAFSVIYGENYESLDLVANSADVANIWVTGLRYLISYGKHTLDMLESSQDNMRTSWVSQMFSEIDVDNLGHITLCNAVQCIRNLNPGLKTSKIELKFKELHKSKDKAGTEVTKEEFIEVFHELCTRPEIYFLLVQFSSNKEFLDTKDLMMFLEAEQGVAHINEEISLEIIHKYEPSKEGQEKGWLSIDGFTNYLMSPDCYIFDPEHKKVCQDMKQPLSHYFINSSHNTYLIEDQFRGPSDITGYIRALKMGCRSVELDVWDGPDNEPVIYTGHTMTSQIVFRSVIDIINKYAFFASEYPLILCLENHCSIKQQKVMVQHMKKLLGDKLYTTSPNVEESYLPSPDVLKGKILIKAKKLSSNCSGVEGDVTDEDEGAEMSQRMGKENMEQPNNVPVKRFQLCKELSELVSICKSVQFKEFQVSFQVQKYWEVCSFNEVLASKYANENPGDFVNYNKRFLARVFPSPMRIDSSNMNPQDFWKCGCQIVAMNFQTPGLMMDLNIGWFRQNGNCGYVLRPAIMREEVSFFSANTKDSVPGVSPQLLHIKIISGQNFPKPKGSGAKGDVVDPYVYVEIHGIPADCAEQRTKTVHQNGDAPIFDESFEFQINLPELAMVRFVVLDDDYIGDEFIGQYTIPFECLQTGYRHVPLQSLTGEVLAHASLFVHVAITNRRGGGKPHKRGLSVRKGKKSREYASLRTLWIKTVDEVFKNAQPPIRDATDLRENMQNAVVSFKELCGLSSVANLMQCMLAVSPRFLGPDNTPLVVLNLSEQYPTMELQGIVPEVLKKIVTTYDMMIQSLKALIENADAVYEKIVHCQKAAMEFHEHLHSIGTKEGLKERKLQKAVESFTWNITILKGQADLLKYAKNETLENLKQIHFAAVSCGLNKPGTENADVQKPRRSLEVIPEKANDETGE

SEQ ID NO: 13783 - protein, 43 aa, Homo sapiens
MVGAMWKVIVSLVLLMPGPCDGLFRSLYRSVSMPPKGDSGQPL

SEQ ID NO: 13784 - protein, 2987 aa, Homo sapiens
MRSRLPPALAALGAALLLSSIEAEVDPPSDLNFKIIDENTVHMSWAKPVDPIVGYRITVDPTTDGPTKEFTLSASTTETLLSELVPETEYVVTITSYDEVEESVPVIGQLTIQTGSSTKPVEKKPGKTEIQKCSVSAWTDLVFLVDGSWSVGRNNFKYILDFIAALVSAFDIGEEKTRVGVVQYSSDTRTEFNLNQYYQRDELLAAIKKIPYKGGNTMTGDAIDYLVKNTFTESAGARVGFPKVAIIITDGKSQDEVEIPARELRNVGVEVFSLGIKAADAKELKQIASTPSLNHVFNVANFDAIVDIQNEIISQVCSGVDEQLGELVSGEEVVEPPSNLIAMEVSSKYVKLNWNPSPSPVTGYKVILTPMTAGSRQHALSVGPQTTTLSVRDLSADTEYQISVSAMKGMTSSEPISIMEKTQPMKVQVECSRGVDIKADIVFLVDGSYSIGIANFVKVRAFLEVLVKSFEISPNRVQISLVQYSRDPHTEFTLKKFTKVEDIIEAINTFPYRGGSTNTGKAMTYVREKIFVPSKGSRSNVPKVMILITDGKSSDAFRDPAIKLRNSDVEIFAVGVKDAVRSELEAIASPPAETHVFTVEDFDAFQRISFELTQSICLRIEQELAAIKKKAYVPPKDLSFSEVTSYGFKTNWSPAGENVFSYHITYKEAAGDDEVTVVEPASSTSVVLSSLKPETLYLVNVTAEYEDGFSIPLAGEETTEEVKGAPRNLKVTDETTDSFKITWTQAPGRVLRYRIIYRPVAGGESREVTTPPNQRRRTLENLIPDTKYEVSVIPEYFSGPGTPLTGNAATEEVRGNPRDLRVSDPTTSTMKLSWSGAPGKVKQYLVTYTPVAGGETQEVTVRGDTTNTVLQGLKEGTQYALSVTALYASGAGDALFGEGTTLEERGSPQDLVTKDITDTSIGAYWTSAPGMVRGYRVSWKSLYDDVDTGEKNLPEDAIHTMIENLQPETKYRISVFATYSSGEGEPLTGDATTELSQDSKTLKVDEETENTMRVTWKPAPGKVVNYRVVYRPHGRGKQMVAKVPPTVTSTVLKRLQPQTTYDITVLPIYKMGEGKLRQGSGTTASRFKSPRNLKTSDPTMSSFRVTWEPAPGEVKGYKVTFHPTGDDRRLGELVVGPYDNTVVLEELRAGTTYKVNVFGMFDGGESSPLVGQEMTTLSDTTVMPILSSGMECLTRAEADIVLLVDGSWSIGRANFRTVRSFISRIVEVFDIGPKRVQIALAQYSGDPRTEWQLNAHRDKKSLLQAVANLPYKGGNTLTGMALNFIRQQNFRTQAGMRPRARKIGVLITDGKSQDDVEAPSKKLKDEGVELFAIGIKNADEVELKMIATDPDDTHAYNVADFESLSRIVDDLTINLCNSVKGPGDLEAPSNLVISERTHRSFRVSWTPPSDSVDRYKVEYYPVSGGKRQEFYVSRMETSTVLKDLKPETEYVVNVYSVVEDEYSEPLKGTEKTLPVPVVSLNIYDVGPTTMHVQWQPVGGATGYILSYKPVKDTEPTRPKEVRLGPTVNDMQLTDLVPNTEYAVTVQAVLHDLTSEPVTVREVTLPLPRPQDLKLRDVTHSTMNVFWEPVPGKVRKYIVRYKTPEEDVKEVEVDRSETSTSLKDLFSQTLYTVSVSAVHDEGESPPVTAQETTRPVPAPTNLKITEVTSEGFRGTWDHGASDVSLYRITWAPFGSSDKMETILNGDENTLVFENLNPNTIYEVSITAIYPDESESDDLIGSERTLPILTTQAPKSGPRNLQVYNATSNSLTVKWDPASGRVQKYRITYQPSTGEGNEQTTTIGGRQNSVVLQKLKPDTPYTITVSSLYPDGEGGRMTGRGKTKPLNTVRNLRVYDPSTSTLNVRWDHAEGNPRQYKLFYAPAAGGPEELVPIPGNTNYAILRNLQPDTSYTVTVVPVYTEGDGGRTSDTGRTLMRGLARNVQVYNPTPNSLDVRWDPAPGPVLQYRVVYSPVDGTRPSESIVVPGNTRMVHLERLIPDTLYSVNLVALYSDGEGNPSPAQGRTLPRSGPRNLRVFGETTNSLSVAWDHADGPVQQYRIIYSPTVGDPIDEYTTVPGRRNNVILQPLQPDTPYKITVIAVYEDGDGGHLTGNGRTVGLLPPQNIHISDEWYTRFRVSWDPSPSPVLGYKIVYKPVGSNEPMEAFVGEMTSYTLHNLNPSTTYDVNVYAQYDSGLSVPLTDQGTTLYLNVTDLKTYQIGWDTFCVKWSPHRAATSYRLKLSPADGTRGQEITVRGSETSHCFTGLSPDTDYGVTVFVQTPNLEGPGVSVKEHTTVKPTEAPTEPPTPPPPPTIPPARDVCKGAKADIVFLTDASWSIGDDNFNKVVKFIFNTVGGFDEISPAGIQVSFVQYSDEVKSEFKLNTYNDKALALGALQNIRYRGGNTRTGKALTFIKEKVLTWESGMRKNVPKVLVVVTDGRSQDEVKKAALVIQQSGFSVFVVGVADVDYNELANIASKPSERHVFIVDDFESFEKIEDNLITFVCETATSSCPLIYLDGYTSPGFKMLEAYNLTEKNFASVQGVSLESGSFPSYSAYRIQKNAFVNQPTADLHPNGLPPSYTIILLFRLLPETPSDPFAIWQITDRDYKPQVGVIADPSSKTLSFFNKDTRGEVQTVTFDTEEVKTLFYGSFHKRDEGKCPAFPNSCTCTQDSVGPPGPPGPAGGPGAKGPRGERGISGAIGPPGPRGDIGPPGPQGPPGPQGPNGLSIPGEQGRQGMKGDAGEPGLPGRTGTPGLPGPPGPMGPPGDRGFTGKDGAMGPRGPPGPPGSPGSPGVTGPSGKPGKPGDHGRPGPSGLKGEKGDRGDIASQNMMRAVARQVCEQLISGQMNRFNQMLNQIPNDYQSSRNQPGPPGPPGPPGSAGARGEPGPGGRPGFPGTPGMQGPPGERGLPGEKGERGTGSSGPRGLPGPPGPQGESRTGPPGSTGSRGPPGPPGRPGNSGIRGPPGPPGYCDSSQCASIPYNGQGYPGSG

SEQ ID NO: 13785 - protein, 189 aa, Homo sapiens
MALSFSLLMAVLVLSYKSICSLGCDLPQTHSLGNRRALILLAQMGRISHFSCLKDRHDFGFPEEEFDGHQFQKAQAISVLHEMIQQTFNLFSTEDSSAAWEQSLLEKFSTELYQQLNDLEACVIQEVGVEETPLMNEDSILAVRKYFQRITLYLTEKKYSPCAWEVVRAEIMRSLSFSTNLQKRLRRKD

SEQ ID NO: 13786 - protein, 355 aa, Homo sapiens
MATLLLLLGVLVVSPDALGSTTAVQTPTSGEPLVSTSEPLSSKMYTTSITSDPKADSTGDQTSALPPSTSINEGSPLWTSIGASTGSPLPEPTTYQEVSIKMSSVPQETPHATSHPAVPITANSLGSHTVTGGTITTNSPETSSRTSGAPVTTAASSLETSRGTSGPPLTMATVSLETSKGTSGPPVTMATDSLETSTGTTGPPVTMTTGSLEPSSGASGPQVSSVKLSTMMSPTTSTNASTVPFRNPDENSRGMLPVAVLVALLAVIVLVALLLLWRRRQKRRTGALVLSRGGKRNGVVDAWAGPAQVPEEGAVTVTVGGSGGDKGSGFPDGEGSSRRPTLTTFFGRRKSRQGS

SEQ ID NO: 13787 - protein, 59 aa, Homo sapiens
MARGCLCCLKYMMFLFNLIFWDPPVGENGLTGLAEGGSVFSCQEVVESGGHLARPALSI

SEQ ID NO: 13788 - protein, 193 aa, Homo sapiens
MTPTLAALLCLGLSLGPRTHVQAGPFPKPTLWAEPGSVISWGSPVTIWCQGSLEAQEYRLDKEGSPEPWDRNNPLEPKNKARFSIPSITEHHAGRYRCHYYSSAGWSEPSDPLELVMTGAYSKPTLSALPSPVVASGGNMTLQCGSQKGYHHFVLMKEGEHQLPRTLDSQQLHSGGFQALFPVGPVNPSHRRV

SEQ ID NO: 13789 - protein, 388 aa, Homo sapiens
MRWILFIGALIGSSICGQEKFFGDQVLRINVRNGDEISKLSQLVNSNNLKLNFWKSPSSFNRPVDVLVPSVSLQAFKSFLRSQGLEYAVTIEDLQIYHEMDNIAADFPDLARRVKIGHSFENRPMYVLKFSTGKGVRRPAVWLNAGIHSREWISQATAIWTARKIVSDYQRDPAITSILEKMDIFLLPVANPDGYVYTQTQNRLWRKTRSRNPGSSCIGADPNRNWNASFAGKGASDNPCSEVYHGPHANSEVEVKSVVDFIQKHGNFKGFIDLHSYSQLLMYPYGYSVKKAPDAEELDKVARLAAKALASVSGTEYQVGPTCTTVYPASGSSIDWAYDNGIKFAFTFELRDTGTYGFLLPANQIIPTAEETWLGLKTIMEHVRDNLY

SEQ ID NO: 13790 - protein, 51 aa, Homo sapiens
MDVLASYSIFQELQLVHDTGYFSALPSLEETWQQKIIEDHLQKENTPVSYY

SEQ ID NO: 13791 - protein, 627 aa, Homo sapiens
MAMALTDPAQVSVTFDDVAVTFTQEEWGQLDLAQRTLYQEVMLENCGLLVSLGCPVPRPELIYHLEHGQEPWTRKEDLSQGTCPGDKGKPKSTEPTTCELALSEGISFWGQLTQGASGDSQLGQPKDQDGFSEMQGERLRPGLDSQKEKLPGKMSPKHDGLGTADSVCSRIIQDRVSLGDDVHDCDSHGSGKNPVIQEEENIFKCNECEKVFNKKRLLARHERIHSGVKPYECTECGKTFSKSTYLLQHHMVHTGEKPYKCMECGKAFNRKSHLTQHQRIHSGEKPYKCSECGKAFTHRSTFVLHNRSHTGEKPFVCKECGKAFRDRPGFIRHYIIHSGENPYECFECGKVFKHRSYLMWHQQTHTGEKPYECSECGKAFCESAALIHHYVIHTGEKPFECLECGKAFNHRSYLKRHQRIHTGEKPYVCSECGKAFTHCSTFILHKRAHTGEKPFECKECGKAFSNRADLIRHFSIHTGEKPYECMECGKAFNRRSGLTRHQRIHSGEKPYECIECGKTFCWSTNLIRHSIIHTGEKPYECSECGKAFSRSSSLTQHQRMHTGRNPISVTDVGRPFTSGQTSVNIQELLLGKNFLNVTTEENLLQEEASYMASDRTYQRETPQVSSL

SEQ ID NO: 13792 - protein, 143 aa, Homo sapiens
MTAEFLSLLCLGLCLGYEDEKKNEKPPKPSLHAWPSSVVEAESNVTLKCQAHSQNVTFVLRKVNDSGYKQEQSSAENEAEFPFTDLKPKDAGRYFCAYKTTASHEWSESSEHLQLVVTDKHDELEAPSMKTVAHVCNTRTLGR

SEQ ID NO: 13793 - protein, 479 aa, Homo sapiens
MQEVPEAAGLARVEPPRRSSGVGAARLRFPGGSRPLRARACVLALAVLALPERNNADSMSAHSMLCERIAIAKELIKRAESLSRSRKGGIEGGAKLCSKLKAELKFLQKVEAGKVAIKESHLQSTNLTHLRAIVESAENLEEVVSVLHVFGYTDTLGEKQTLVVDVVANGGHTWVKAIGRKAEALHNIWLGRGQYGDKSIIEQAEDFLQASHQQPVQYSNPHIIFAFYNSVSSPMAEKLKEMGISVRGDIVAVNALLDHPEELQPSESESDDEGPELLQVTRVDRENILASVAFPTEIKVDVCKRVNLDITTLITYVSALSYGGCHFIFKEKVLTEQAEQERKEQVLPQLEAFMKDKELFACESAVKDFQSILDTLGGPGERERATVLIKRINVVPDQPSERALRLVASSKINSRSLTIFGTGDTLKAITMTANSGFVRAANNQGVKFSVFIHQPRALTESKEALATPLPKDYTTDSEH

SEQ ID NO: 13794 - protein, 228 aa, Homo sapiens
MKRLAARCFAGLLILSPLTVISDSRPADSGKAIEDGNLEEMEEEVRLKKRKRRRNVDKDPAKEDVEKAKKRRGRPPAEKLSPNPPKLTKQMNAIIDTVINYKDSSGRQLSEVFIQLPSRKELPEYYELIRKPVDFKKIKERIRNHKYRSLGDLEKDVMLLCHNAQTFNLEGSQIYEDSIVLQSVFKSARQKIAKEEESEDESNEEEEEEDEEESESEAKSVKVKIKLN

SEQ ID NO: 13795 - protein, 98 aa, Homo sapiens
MRRAGLGEGVPPGNYGNYGYANSGYSACEEENERLTESLRSKVTAIKSLSIEIGHEVKTQNKLLAEMVSGYDFNFKKFDLIFANNRISTFIHFEIQRS

SEQ ID NO: 13796 - protein, 50 aa, Homo sapiens
MQGPWVLLLLGLRLQLSLGVIPGNEAPQAVPHTGHPLSQADLISTLPLAS

SEQ ID NO: 13797 - protein, 332 aa, Homo sapiens
MGLGPVFLLLAGIFPFAPPGAAAEPHSLRYNLTVLSWDGSVQSGFLAEVHLDGQPFLRYDRQKCRAKPQGQWAEDVLGNKTWDRETRDLTGNGKDLRMTLAHIKDQKEGLHSLQEIRVCEIHEDNSTRSSQHFYYDGELFLSQNLETEEWTVPQSSRAQTLAMNVRNFLKEDAMKTKTHYHAMHADCLQELRRYLESGVVLRRTVPPMVNVTRSEASEGNITVTCRASSFYPRNIILTWRQDGVSLSHDTQQWGDVLPDGNGTYQTWVATRICRGEEQRFTCYMEHSGNHSTHPVPSGKVLVLQSHWQTFHVSAVAAGCCYFCYYYFLCPLL

SEQ ID NO: 13798 - protein, 1349 aa, Homo sapiens
MPQPLLPALPPLSSPSGAGSCGPSGGEVKQEPVGGRGRREWRVAPSSRPRSSPRLALPTQCSGRRLFRRRARGLRSDNMEAVKTFNSELYSLNDYKPPISKAKMTQITKAAIKAIKFYKHVVQSVEKFIQKCKPEYKVPGLYVIDSIVRQSRHQFGQEKDVFAPRFSNNIISTFQNLYRCPGDDKSKIVRVLNLWQKNNVFKSEIIQPLLDMAAGIPPPVVTPVLASTTTAMSNTPGTPVTPVTPANVVQGLPDPWVSQITNTDTLAAVAQILQSPQGQQLQQLIQTLQIQQQKPQPSILQALDAGLVVQLQALTAQLTAAAAAANTLTPLEQGVSFNKKLMDRFDFGEDSEHSEEPKKEIPASQLSHVSESVNNSIFHQIAEQLQQQNLEHLRQQLLEQQQPQKATPQDSQEGTFGSEHSASPSQGSSQQHFLEPEVNLDDSIDIQQQDMDIDEGQDGVEEEVFEQEAKKVAVRSRSRTHSRSRSRSPRKRRSRSRSGSRKRKHRKRSRSRSRERKRKSSRSYSSERRAREREKERQKKGLPPIRSKTLSVCSTTLWVGQVDKKATQQDLTNLFEEFGQIESINMIPPRGCAYVCMVHRQDAFRALQKLSSGSYKIGSKVIKIAWALNKGVKTEYKQFWDVDLGVTYIPWEKVKVDDLEGFAEGGMIDQETVNTEWETVKSSEPVKETVQTTQSPTPVEKETVVTTQAEVFPPPVAMLQIPVAPAVPTVSLVPPAFPVSMPVPPPGFSPIPPPPFLRASFNPSQPPPGFMPPPVPPPVVPPPTIPPVVPTSLVQPSLSMTPETVKDVGFGSLVIPGGSVASNLATSALPAGNVFNAPTKQAEPEEKVPHLIDHQISSGENTRSVIPNDISSNAAILGGQPPNVTSNSGILGVQRPNVSSNSEILGVRPSNVSSSSGIIAAQPPNILNNSGILGIQPPSVSNSSGLLGVLPPNIPNNSGLVGVQPPNVPNTPGLLGTQPPAGPQNLPPLSIPNQRMPTMPMLDIRPGLIPQAPGPRFPLIQPGIPPQRGIPPPSVLDSALHPPPRGPFPPGDIFSQPERPFLAPGRQSVDNVTNPEKRIPLGNDNIQQEGDRDYRFPPIETRESISRPPPVDVRDVVGRPIDPREGPGRPPLDGRDHFGRPPVDIRENLVRPGIDHLGRRDHFGFNPEKPWGHRGDFDEREHRVLPVYGGPKGLHEERGRFRSGNYRFDPRSGPWNRGFGQEVHRDFDDRRRPWERQRDRDDRDFDFCREMNGNRLGRDRIQNTWVPPPHARVFDYFEGATSQRKGDNVPQVNGENTERHAQPPPIPVQNDPELYEKLTSSNEINKEKSDTVADIESEPVVESTETEGT

SEQ ID NO: 13799 - protein, 406 aa, Homo sapiens
MAAETLLSSLLGLLLLGLLLPASLTGGVGSLNLEELSEMRYGIEILPLPVMGGQSQSSDVVIVSSKYKQRYECRLPAGAIHFQREREEETPAYQGPGIPELLSPMRDAPCLLKTKDWWTYEFCYGRHIQQYHMEDSASGAPNDFQNNVQVKVIRSPADLIRFIEELKGGTKKGKPNIGQEQPVDDAAEVPQREPEKERGDPERQREMEEEEDEDEDEDEDEDERQLLGEFEKELEGILLPSDRDRLRSEVKAGMERELENIIQETEKELDPDGLKKESERDRAMLALTSTLNKLIKRLEEKQSPELVKKHKKKRVVPKKPPPSPQPTGKIEIKIVRPWAEGTEEGARWLTDEDTRNLKEIFFNILVPGAEEAQKERQRQKELESNYRRVWGSPGGEGTGDLDEFDF

SEQ ID NO: 13800 - protein, 1551 aa, Homo sapiens
MNLDSLSLALSQISYLVDNLTKKNYRASQQEIQHIVNRHGPEADRHLLRCLFSHVDFSGDGKSSGKDFHQTQFLIQECALLITKPNFISTLSYAIDNPLHYQKSLKPAPHLFAQLSKVLKLSKVQEVIFGLALLNSSSSDLRGFAAQFIKQKLPDLLRSYIDADVSGNQEGGFQDIAIEVLHLLLSHLLFGQKGAFGVGQEQIDAFLKTLRRDFPQERCPVVLAPLLYPEKRDILMDRILPDSGGVAKTMMESSLADFMQEVGYGFCASIEECRNIIVQFGVREVTAAQVARVLGMMARTHSGLTDGIPLQSISAPGSGIWSDGKDKSDGAQAHTWNVEVLIDVLKELNPSLNFKEVTYELDHPGFQIRDSKGLHNVVYGIQRGLGMEVFPVDLIYRPWKHAEGQLSFIQHSLINPEIFCFADYPCHTVATDILKAPPEDDNREIATWKSLDLIESLLRLAEVGQYEQVKQLFSFPIKHCPDMLVLALLQINTSWHTLRHELISTLMPIFLGNHPNSAIILHYAWHGQGQSPSIRQLIMHAMAEWYMRGEQYDQAKLSRILDVAQDLKALSMLLNGTPFAFVIDLAALASRREYLKLDKWLTDKIREHGEPFIQACMTFLKRRCPSILGGLAPEKDQPKSAQLPPETLATMLACLQACAGSVSQELSETILTMVANCSNVMNKARQPPPGVMPKGRPPSASSLDAISPVQIDPLAGMTSLSIGGSAAPHTQSMQGFPPNLGSAFSTPQSPAKAFPPLSTPNQTTAFSGIGGLSSQLPVGGLGTGSLTGIGTGALGLPAVNNDPFVQRKLGTSGLNQPTFQQSKMKPSDLSQVWPEANQHFSKEIDDEANSYFQRIYNHPPHPTMSVDEVLEMLQRFKDSTIKREREVFNCMLRNLFEEYRFFPQYPDKELHITACLFGGIIEKGLVTYMALGLALRYVLEALRKPFGSKMYYFGIAALDRFKNRLKDYPQYCQHLASISHFMQFPHHLQEYIEYGQQSRDPPVKMQGSITTPGSIALAQAQAQAQVPAKAPLAGQVSTMVTTSTTTTVAKTVTVTRPTGVSFKKDVPPSINTTNIDTLLVATDQTERIVEPPENIQEKIAFIFNNLSQSNMTQKVEELKETVKEEFMPWVSQYLVMKRVSIEPNFHSLYSNFLDTLKNPEFNKMVLNETYRNIKVLLTSDKAAANFSDRSLLKNLGHWLGMITLAKNKPILHTDLDVKSLLLEAYVKGQQELLYVVPFVAKVLESSIRSVVFRPPNPWTMAIMNVLAELHQEHDLKLNLKFEIEVLCKNLALDINELKPGNLLKDKDRLKNLDEQLSAPKKDVKQPEELPPITTTTTSTTPATNTTCTATVPPQPQYSYHDINVYSLAGLAPHITLNPTIPLFQAHPQLKQCVRQAIERAVQELVHPVVDRSIKIAMTTCEQIVRKDFALDSEESRMRIAAHHMMRNLTAGMAMITCREPLLMSISTNLKNSFASALRVSWLFPWYRYKTYYCLSVIIFFFVYIWHWALPLILNNHHICLMSSIILDCNSVRQSIMSVCFFFFLLYSQHDV

SEQ ID NO: 13801 - protein, 153 aa, Homo sapiens
MIVSSALMIWKGLMVITGSESPIVVVLSGSMEPAFHRGDLLFLTNRVEDPIRVGEIVVFRIEGREIPIVHRVLKIHEKQNGHIKFLTKGDNNAVDDRGLYKQGQHWLEKKDVVGRARGFVPYIGIVTILMNDYPKFKYAVLFLLGLFVLVHRE

SEQ ID NO: 13802 - protein, 310 aa, Homo sapiens
MAPSSPRPALPALLVLLGALFPVSEAQVHLALGDQRLNPTVTYGNDSFSAKASVSVTAEDEGTQRLTCAVILGNQSQETLQTVTIYSFPAPNVILTKPEVSEGTEVTVKCEAHPRAKVTLNGVPAQPLGPRAQLLLKATPEDNGRSFSCSATLEVAGQLIHKNQTRELRVLYGPRLDERDCPGNWTWPENSQQTPMCQAWGNPLPELKCLKDGTFPLPIGESVTVTRDLEGTYLCRARSTQGEVTRKVTVNVLSPRYEIVIITVVAAAVIMGTAGLSTYLYNRQRKIKKYRLQQAQKGTPMKPNTQATPP
